United States Patent Application Publication US 2005/0228172 A9 - sequence listing, part 194

SEQ ID NO: 877013 - DNA, 577 bp, Homo sapiens
ctgtctgaaaggttcattagcaacatctaaaagctctactgatcattaaatggcaaggtagaattaccaacaaggaggccctggaatagagccagccaaactgcattgaaacttgataaaatacagccacctttctatgccttgcacataattggagcccaacaaatatgggctgatttgttgatccactgagttggatcggtggggagcatgtctgtgcacaggatattcaagcagttcatggatgatgagtgaagtagggtacctacaaatggggagattagaaacaaaatgtttttaaagatatcctgaagcaaaacttcaaacactctgtcatggytatggaccactgagaaacccacacagcagatggctcaatctaatgcccggctaaaatgaaatggctgctttcacaaaagtaccaacttccctccaatgggaagaaacagcttcaaatgtagggcagtctgcatttgtatagggtagggaaagggctgcaacacacaaaagaaacattttcaactcaaatgtcattaaaataagcagtttctctaaatttctctctgcctcttttact

SEQ ID NO: 877014 - DNA, 584 bp, Homo sapiens
ctcttgacctcgtgatccgcccgccttgggctcccaaagtgctgggattgcaggcgtgagccaccgcacccggcctgtagaaattattaatatgcaagcaatgattgtttcatacatttttcatctagacattatattgagaaatgtggactaaagcttaattttattagaactttacatgatataaaatattgcaaaataaattttattggataagatgtactttaaacyactgaaatgtacttgtgagaatgatgcacgtaatgtacaatgtgaccttatatgttagtgaaaactaattctgtactaaaaaagtacctctcctattaccttttttaaagtaatgtttttaggtaaataatgaaccattaaacaaaagatgctaataattcaaataaaaataatgctcagatggtttttgtcagacacaattcaacataaaggtactccttggggagagaagcatgttggccattatgacttcaattagatgttagaatcatgaactctagatttgggggtaaaatttacttggagtgaaactcatctggtttacctcacctgatattacagagctaaagttg

SEQ ID NO: 877015 - DNA, 597 bp, Homo sapiens
acacattaaggtaagactcatccaacaataagattcatcccttacataaaataaatctgtagatcaaattctactttagagaattatagccttcatttctattaaccccttctaatatcctcttctgagacaattgccttctctctctgacacccaaaatcactctaaacttccttcctgaatastcacatccacaggctaagtctgtgaaaatacattttttttagtttaactgaacactcatgaagtgctagatgctttacatgctttagttcatttaagctttactacctagtagcttaatgatgaagaaagtgagaaacagaaattttgggtaacctgaaacaggcacacatctaatgagcagtttatctacaattaaaatggaggtattctgccatatcctgatgccctcttcaaccttcctcggctatcctgtttcatggatggatactcaggatatgaaaagtcataaaccaagaaagaaataggtaggttttgaatataaagtaactatatttctgtgcaatttcttactgttcatagtaagagagttataagacattcagtttggaagaagtataccactggatttct

SEQ ID NO: 877016 - DNA, 642 bp, Homo sapiens
aagcaggaaaaagtacagcaaggggaaggtgcaggctggggttgtgggagtgaagaagagacttgggagggcaactgccatcctcggtgcctgggggggagggaggacagtctctaaggtgtttctccgtgttatctgtgaatatgtaaattataatatgtaacgaatagataaatataatagtccttttyttgtgaatctgcagtgaacatttgaatgaaatttcaagcgacttctggatgttgttttttggtttgtggctcatgtctggaggggctatgcactggcttgactttcaaggattaacttgtgtgcatgtgtgttctctacctgtgtgcacatgtctgcatgtgtgtgttcacgtgcacgtgggaggttgtgttcatgaaggcgtgtgtgtggagggagggagggaatactcacagcccagcccaagactgtgagcatggctcctccctcaggaggtgagtgggatggtctcaggggaacagaagctatgaatcaggaaaagcttccccaacctccacttttggggaatgggtgtttgtatgggcagaacaggatgtggggcgacactcccaggggcagaaaacgcaaaggggtgagggagagacacagagaacagagcgggaaggagccagg

SEQ ID NO: 877017 - DNA, 459 bp, Homo sapiens
ccttccattcatttttttcttacaatttatgtatttcttaaaatttatcggtgcccagtaaaaccataactcaaaagtgcattacatgtttatttactacacacacacacacacacacacacacacacacacacacacacacagcttatttttaacagaactggagagtcttttttttttttttcttttgagacagagtcttgctctgttgcctaggctggagtgcagtggcgtgatctyggctcattgcaacctccaccttctgggttccagcaattctcctgcctcagcctcctgagtagctacgattgcagacgtgtgtcaccacgcccggctaatttgtatttttagtagagacggagttttgccatgttggccaggctaatctcgaactcctgacttcaagtgatctggccgcctcagcctcccaaagtgctgggattacagggatgagccacc

SEQ ID NO: 877018 - DNA, 533 bp, Homo sapiens
tagtcagcaaaagatattctataggctagaagcagccctaggctcacgttttttgttttttttttttaaagacagggtcttgctctgtctcccaggctggagggcagtgcattgttcatagctgactgcagccttgaactcctaggctcaagcgatcttcccacctcagcctcccaagtagctgagactacaggctacaggtacatgccaccatgccyggctaatttttttttttttttttttttttagacacacagtcctgctatgttgcccaggctgatgttgaactcctggactgaagcgatcctcccaccttggcctccccagaactgctgggattacaggtgagagccaccacgcctggccagaaacattttttaaatccaaaaaataataataataaaatttgatattttttaaagttagtataaatatattacctataaccatagtttatctgaggttttaaattctaaatcacaactatgataagcttgtcctttgctattcaaagagctggtccttaactgggc

SEQ ID NO: 877019 - DNA, 629 bp, Homo sapiens
tgatttgaggcaatgatgttaaatgtaaaactctctctccctttatgatcatgacctcgaattttctggtcagtgtttacttttaggaaagaaaagtgcttacctggaaatggttaatgttataaagatacatggacaaagaggagaaaaataacctcttaccttatgctgctgctttgggtctggtgcagtagttagaagatggctgtttggttatttttaagacacttatttctgttttgagatgagatcagcattggaaccaggccaacctggagtttttctggtttaaaatgataatcttatgcattgaargtgagagggccgattaaataaaaattttcccaacgttgaacgcaggtagaatttattgcttggtatgatttctgagtttactgatcttacttttatgtaaaaacaaagataacaattttgtgtaggaaaaattctaataggacttactttgtggtgaatctaatatggttcttcaaatgaatcatgtacagtttataaacttacagtaataatattcaaagaatgtttcactcaaatagaacaaatatttctttgttaggtaaaaccgtttaacctaagactttttgtcactcttaggactgtattacatcaaa

SEQ ID NO: 877020 - DNA, 629 bp, Homo sapiens
tgatttgaggcaatgatgttaaatgtaaaactctctctccctttatgatcatgacctcgaattttctggtcagtgtttacttttaggaaagaaaagtgcttacctggaaatggttaatgttataaagatacatggacaaagaggagaaaaataacctcttaccttatgctgctgctttgggtctggtgcagtagttagaagatggctgtttggttatttttaagacacttatttctgttttgagatgagatcagcattggaaccaggccaacctggagtttttctggtttaaaatgataatcttatgcattgaaggtgagagggccgattaaataaaaattttcccaacgttgaacgcargtagaatttattgcttggtatgatttctgagtttactgatcttacttttatgtaaaaacaaagataacaattttgtgtaggaaaaattctaataggacttactttgtggtgaatctaatatggttcttcaaatgaatcatgtacagtttataaacttacagtaataatattcaaagaatgtttcactcaaatagaacaaatatttctttgttaggtaaaaccgtttaacctaagactttttgtcactcttaggactgtattacatcaaa

SEQ ID NO: 877021 - DNA, 611 bp, Homo sapiens
cagcaaatctccagataaaaattaaaattaaaatcgtcatcatccaaaggataacttgctcctctgtatcacagagaagctaacttgttcaaatgctattatgatctgctactgctaaagtttgtattaggtttaygagcaggggaatgacagagaatccttattactttttggaagaaaagactaaggtaaaatgatttatttggattttgatttttggtctagtaattgaacaagtaaaaggaggaagtaaaccaaaaaagaggatgtagttatactagcagtttacacttctatttctatgtgtttcaagaatctgctcatggaacactggcgctgctttttaattttgtcttttatttgataacagctttattgagatataaagtgtaaaattcacttatacttttaggtttttagtatagtctcggagttttgtaatcatcacagtctgttttgcaatattttgatacctcccaaaaaataatccatgccttttagcagtcactccttccccattttcccccagctctttcaccaccagccctcggcagcaattagtctactttctgtttctatagatttgccttatctggacattttgtataaat

SEQ ID NO: 877022 - DNA, 611 bp, Homo sapiens
cagcaaatctccagataaaaattaaaattaaaatcgtcatcatccaaaggataacttgctcctctgtatcacagagaagctaacttgttcaaatgctattatgatctgctactgctaaagtttgtattaggtttatgagcaggggaatgacagagaatcyttattactttttggaagaaaagactaaggtaaaatgatttatttggattttgatttttggtctagtaattgaacaagtaaaaggaggaagtaaaccaaaaaagaggatgtagttatactagcagtttacacttctatttctatgtgtttcaagaatctgctcatggaacactggcgctgctttttaattttgtcttttatttgataacagctttattgagatataaagtgtaaaattcacttatacttttaggtttttagtatagtctcggagttttgtaatcatcacagtctgttttgcaatattttgatacctcccaaaaaataatccatgccttttagcagtcactccttccccattttcccccagctctttcaccaccagccctcggcagcaattagtctactttctgtttctatagatttgccttatctggacattttgtataaat

SEQ ID NO: 877023 - DNA, 623 bp, Homo sapiens
ttaaagcccaaggaaaaataggttaactcctgaaaatttctgattcctgacaaattctgttcctagaagagtttatttttacttccactattatagttattcacaataaaaagtttagtgtatctcatttttgtttgcattctctttaatcatggaatatacattcacattaagtaattcatttttctcaatagagttattcctaaaaaggtggtctatatatcatcttaaaaagaaacatctaaccatgctggagtaattagtatcaaattttcttcctttcataaacaattaaagaattgggtaaaatatatgcaagatctggttctggtactaggtaataatcagcrcatgactgtgatcttgagagaaatgacgtaaatcaactgagccctgcaattaccctggatacccttctgagggcacttctcaggctaaagtacatggaaagggaagacaagtagactatcatggcctccctgagtggaagagatattaaagctgaggcagctagaattcatggggcagagtactagaaaagagatagctatctagagaaaaagttccagaaatgtatataaggtcctctgaagcctattgttgaacattaagctacacatgtg

SEQ ID NO: 877024 - DNA, 623 bp, Homo sapiens
ttaaagcccaaggaaaaataggttaactcctgaaaatttctgattcctgacaaattctgttcctagaagagtttatttttacttccactattatagttattcacaataaaaagtttagtgtatctcatttttgtttgcattctctttaatcatggaatatacattcacattaagtaattcatttttctcaatagagttattcctaaaaaggtggtctatatatcatcttaaaaagaaacatctaaccatgctggagtaattagtatcaaattttcttcctttcataaacaattaaagaattgggtaaaatatatgcaagatctggttctggtactaggtaataatcagcacatgactgtgatcttgagagaaatgacgtaaatcaactgagccctgcaattaccctggataccyttctgagggcacttctcaggctaaagtacatggaaagggaagacaagtagactatcatggcctccctgagtggaagagatattaaagctgaggcagctagaattcatggggcagagtactagaaaagagatagctatctagagaaaaagttccagaaatgtatataaggtcctctgaagcctattgttgaacattaagctacacatgtg

SEQ ID NO: 877025 - DNA, 662 bp, Homo sapiens
ttggtggatcacctgaggtcaggggttcaagaccagcctggccaatatggtgaaccctgtctctactaaaaatacaaaaattagctgggcatggtggcatgagcctgtagtcccagctacacaggaggctgaggcaggagaatcgcttgaayctgggaggtggaggttgcagcaagctgagatcatgccgttgtactccagcctgggcagcaagagtgaaactacatctcaaaaaaaacaaaacaaaagaaaacaaaaaaaagaatggtagacaggactcaaatcatgaagtctgaattttattctaagtttgaaagcagagttttgtttttgttttaaatttattttattgtttatatttgttgttattttttatagatttaggggccacaagtacaattttgttatatggatacattgtgtggtggttaagtcggggtttttagcttagtcatcacctaaataatgtacattgtacataattggtaatatctcaacttcttctccctctcaccctcccagcttttggagtccctgaagtctattattcaactctctatgtccatgtgtacacattgattagctcccacctataaatgagaatgtgcagtatttgactttctgaattatttattttaaggtaatagcctccagttcaatct

SEQ ID NO: 877026 - DNA, 518 bp, Homo sapiens
ggggcaaaatgctgccagtctttttccaaagcatagcaagaacacctttattccggttccaacaaattcctcatctccatctgagactacctcagcctggacttcattgtccatatcactatcagcattttgctcaaagccattcaacaagtctctagaaagttccaaactttcccacattttcctgtcttcttctragcccttcaaactgttcttacttctgcctgttacccagcttcaaagtcgcttccacatttttgggtattcttacagcagcgctccactaccacagtaccaaatactgtattagtccattttcatgctgctacaaagaactgcccaagaccaggtattttataaaggaaagaggcttaattaactcacagttctgaatgcctggggaggcctcaggaaacttacaatcatggcagaaggcacctcttcacagggcaggaggagagagaatgagtgcaagcagaggaaatgccaggtgcttttgaaaccatcagatctcataa

SEQ ID NO: 877027 - DNA, 518 bp, Homo sapiens
ggggcaaaatgctgccagtctttttccaaagcatagcaagaacacctttattccggttccaacaaattcctcatctccatctgagactacctcagcctggacttcattgtccatatcactatcagcattttgctcaaagccattcaacaagtctctagaaagttccaaactttcccacattttcctgtcttcttctgagcccttcaaactgttcttacttctgcctgttacccagcttcaaagtcgcttccacatttttgggtattcttacagcwgcgctccactaccacagtaccaaatactgtattagtccattttcatgctgctacaaagaactgcccaagaccaggtattttataaaggaaagaggcttaattaactcacagttctgaatgcctggggaggcctcaggaaacttacaatcatggcagaaggcacctcttcacagggcaggaggagagagaatgagtgcaagcagaggaaatgccaggtgcttttgaaaccatcagatctcataa

SEQ ID NO: 877028 - DNA, 585 bp, Homo sapiens
atgcctcctttctcatttctgattttattgggttttctctcattttttcctggttagcatatcaagtagtttattgattttgtttatcttttcaaaaaaccaactttttgtttcactgatcccttgtgtgtatatatgtatttttggtctctatttagtttagttctgctctgatttttctttttttccttctaccaagggtttggtttgttcttgttttccagttccttgagatgcatcaatagtttctttatttggagtctttctatttttttttttttttttggkgtaggcatttattgctacaaacttcccttttagcactcttttgctgtatcctgtaggttttggcatattgggttttgatttttgtttgtttcaagaatttttttatttactccttatttctttcattcagtcattcaggagcatgttgtttaattttcatgtatttgtatcatttccagagttcgctttgctattgatatctagctttatttcattgtggtctgatttcaattttttgaaatttgttgagacttgttttgtgttctaacatatggtctaacctggataatgtttcat

SEQ ID NO: 877029 - DNA, 670 bp, Homo sapiens
caagccagtttttcttttcttcctgataaagctaattgccttgcattaacacacagcataagacttcgcagcacaaaaagaataacggaattataaaaggtataatttagaggctttgtcaagagctgtgatgagcatatcctaataggtataaatgttctgaagtactaatgctctattaagaggggtttctgaaggaggaacaatgcctgcattagtgttcgggctctggagaggaaaaagstttttggtctgcaattactggtctcctattctttactttagaacacatctacttgatgcttgctatttttttcaggcacacttcccccctcttgtttcacgtgtacattcacatgagtaaaatattgctttttacgctttgctgggtattgaagttgctgtctgatggagaggcttagagcctcaccttgaagcggcttcccctaacactgggtctgtgaagcttcaaagtgcaaaacatgctcatctagacaataccataaggccaccgactttggattttctgccctacttcctgagcctgcatctccgactattctttcctttgaagctctataaaagtatgcactcttgcctccctgtagagtaagctgctcctagaataggaactgctaacactttctcttttattgccttgacagtagca

SEQ ID NO: 877030 - DNA, 621 bp, Homo sapiens
cagcaaggcatcatacataacacgccttgcttgtgttttctgagcctagggcttttagctttctgtcaattctctaacgtactgatgggctttccaaaagtttatttttctttctctctcacccggcatattgtcacgtatgttattttttttattttttgagatggagtttcactctggttgcccggactggagtgcaatggcgtgatcttggctcactgcaacctctgcctcctggattcaagcaattctcttgcctcagtctcckgagtagctgggattacaggcacctgccactatgcttggctaattttttgtgtttttagtagagacggagtttcaccatgttggccaggctggtcttgaactcctgacttcaggtgacccacccacatcagcctcccaaagtgctgggattacagctgtgagccaccacacccggcctttacttttcaagttagacagcattagtttccattgagtgtttttcctggcatatattctcaacaaattatatatatgtatatatagacaaaatatatgtcaagaaattaaattccaaaggaagattctaatacacacatttaaagttcaggtgttcatggtcactcacacagagaa

SEQ ID NO: 877031 - DNA, 666 bp, Homo sapiens
ctatgtcaattgatttcaaggctgcatccctatcaagccatgtgcgtgctctttcaaatggtacgtaagccagactgaagggaaggatatagaagtgtcggacagtctcacatcatctccacacaacttgtcattgctggataaattcttcccatgtggatcttttggtaaccatcttcccagcttgctagttagccttcctctttccccttatgtgaaagttttcaactgacctgaggaaaccatctggctgtcttgcagccgctaggggtgtcatgttcattttcaaaataaaaagtaaaataggaaagtaggcactttctctcttttaattctgaagatwgctcatcatcgatatactgatagattcccctgaaacttttaaactttaatttaaggaaatctgctcatggtttttcatcattggttgtcaattctcttgactgcttaccccctacccatcatgccaacatgtcctttgctttcatgtcgagtacaaaacacatgccattgcttgagtgcccacagaggttggctgtgtaacagtgattacagacatgctatgagaatggacattactcaaagagagtgagctaagtaagaagaaaataaggagaatactagcatgtatggggcgggccaaaggtgaccatgtgcagtgcattg

SEQ ID NO: 877032 - DNA, 666 bp, Homo sapiens
ctatgtcaattgatttcaaggctgcatccctatcaagccatgtgcgtgctctttcaaatggtacgtaagccagactgaagggaaggatatagaagtgtcggacagtctcacatcatctccacacaacttgtcattgctggataaattcttcccatgtggatcttttggtaaccatcttcccagcttgctagttagccttcctctttccccttatgtgaaagttttcaactgacctgaggaaaccatctggctgtcttgcagccgctaggggtgtcatgttcattttcaaaataaaaagtaaaataggaaagtaggcactttctctcttttaattctgaagatagctcatcatcgatatactgatagattcccctgaaacttttaaactttaatttaaggaaatctgctcatggtttttcatcattggttgtcaattctcttgactgcttaccccctacccatcatgccaacatgtcctttgctttcatgtcgagtacaaaacmcatgccattgcttgagtgcccacagaggttggctgtgtaacagtgattacagacatgctatgagaatggacattactcaaagagagtgagctaagtaagaagaaaataaggagaatactagcatgtatggggcgggccaaaggtgaccatgtgcagtgcattg

SEQ ID NO: 877033 - DNA, 473 bp, Homo sapiens
ttgtctttgaactgggttcttaatctgcttactcagagcactgctcgcggtctctgaaaaccaagcgaagctttgaaaaatgctcatactcttgggctaaacggagcagcttgatggtgttcacgacatggcgtggtgatgtgtacactgtcaggcacatcctatctcaatgctcaggccacgccacactattcatcgtaagtcatctacttgaattatgggatgagagaacaaagatctgagctaagcttattataggagaaaagaaaaaaagaaaatatggatgccataagtacagagmccacaaaacaattgcgtttcagcaggtttgacaactaggatgtagctgtctcatggaaattattgagtttgtttatccaagaactcataatctaggaaggaaaatagtgtcctcttttgtaatctgtattataaactgagtatcttgaagaactgatctttgctttaatcat

SEQ ID NO: 877034 - DNA, 600 bp, Homo sapiens
cagaccctgtctctaaaaaataaaataaaatatgaataagaaccatttgtttagctcaccattctgtggttagtaatttaggctgggctcagctaggtgactgttgctccctcgtgcgtctgtagtcagttttatgtcagttttgctgatcttgtctggtctttctccctagcctgtttctatggtgaaaaattctgagagagtgtggaagcatggacagccacttgaaggrtaggctcaaagttggcaagttattacttctgctagccaaagcaagtggcaaggccaggccgggtttcagagccagggatagagtttacctctcatgggtgttgctgtacagtcactttgtaaggggcattggggatagggaagggaataattgcagccaattaaaaaataatattttatgatagctaacctttatgtagtatgtgtttcgttccagaaattcttctaagcattctacctgtatagttgatgtgatcttcaaaacaaccctatacatggttactatcactattcagattttatagatgaggaaacaagcacagagcataactgacttgctcaaagtcacagaaatattaaaggagtaaa

SEQ ID NO: 877035 - DNA, 649 bp, Homo sapiens
taaaattgatcacataatcggaagtaaaacactcctcaacaaatgcgtaaaaactgaaatcataatcaacagtctttcagaccacagtgcaatcaaattagaactcaagattaagaaattcagtcaaaaccacacaactacatggaaattaaacaacttgatcctgaatgaaacttagttaaataatgaaattaaggcagaaatcaagaagttctttcaaaattatgagaacaaagagacagtgtaccagaatctctgggatacagtgaaagcagtaytaagagggaaatttatagtactaaatgctcacatcagaaagttagaaatacctccgattaacagcctaatatgtcaactaaaagaacaagagaaccaaaagcaaacaaaccccaaagctagcaggaaacgagagataaccaagatcagagctgactgaaggatatagagacatgaataacccttcaaaaaatcaatgaatccaggagctgtttttttaaaaaaattaacaaaattgttagaccactagctagactaataaagaagaaaagagaaaagaatcaaacacaatcagaaatgataagggatatgtcaccactgaccccacagaaatataaccagccaccacagaatactataaacacctctatgc

SEQ ID NO: 877036 - DNA, 606 bp, Homo sapiens
cacccagtctcaggaccaccaactactcctgtttatttgggactttccaggtgacagcactaaagtcttacatcccagggttttcctgggactgtctgaattttaaaactgaaagtcctacattccagaaacccccttagtgctggacaaaccaagatggttggtcaccctgccaggtccccacccakagaagggcaaccaggtcataaaggtaccggcaaggacgtggtactgtttttagaggagcctagtcaacctgccctgggaggagacccagagctgctcccactagcccccctggctccctacccaggaagaggcatttgctgatgtctctgctcctctgggtgatgtcctggctcaggagctggtatctgccagttgtcacctgattctctgaaggctgagtaaggctggttttgcagttctcttttgtgttgtaattggttttctttttatcagttgtggaaatgtgtcttcatattctttgaaggaattgctacggattgcttgtgaaatcctgaaacattttcccttgactcctaggtctaagggggtgccctgaccagcatggatgcctctgcacttgtagcagggcagggcagg

SEQ ID NO: 877037 - DNA, 632 bp, Homo sapiens
tgcccttttagaagaacccctgtccctgaccttcccaccctgtttttcctataccacaatatttaaaactcattttatttgctcaacaaatattcattgtaagagctcaacagacatgaactgtcatgatattggtgattaggataagaatatatataataatggtgctatkcatattataatcataacatcatctaatcctacatcatttataggagaaaacagaggtttaacaaattaaatcacttgtccaagtctacacagctactaagtagcaggtcagaaagtaaagtcagtcctgtgtgacagcaattgctgggatttaaccaagaagatctattaccaactgatccacttaaagttgcaagaaatacccctgacagccttacccagtggcacattccccaaacatttcatctataataggaatcacaggcatcatccctgtgacgatgggccatttttctctgatgagaacagacttggggaaagtcactgtgagccttatcagaacacaatcttaaaaacgctggtctgagctctcagctgacaagcacccccttacacaaatatgtgctggagttaccaaaaagaaatcagtttgtttacacattttctcacaaaacctactc

SEQ ID NO: 877038 - DNA, 628 bp, Homo sapiens
acagccaaaccatattattcaacccctggccctccccaaatcttatgtcctcacatgtcaaaacacaatcacgcctttccaacagttcctcaaagtcttagctcattccagcattaacccaaaagtgcaagtagaaagtgtcatctgagacaargcaaatcttttctgcctacgagcctgtaaaatcaaagtcaagttagttaattcctagatacaacgggggtacaggcattgtgtaaatacacccattccaaatagaagaaactggcgaaaacaaaaggattacaggccccatgcaagttcaaaatccaatatggcagtcattaaacttaaagttccaaaatgatctcctttgactctatgtctcacacccaggtcatgcttatacaagaggtggtctcccatagccttggcagctctgcccctgtggctttgcagggtacatcccctcttctggctgcattcacaggttgtcattgagtttctgtggcttttccaggtgcatggtgcaagctgtaggttgatctatcattctggggtctggaggacagttgccttcttctcacagctccattagcagtgccccggtggcggctgtctgtgggggctccaaccccacatttccctt

SEQ ID NO: 877039 - DNA, 628 bp, Homo sapiens
acagccaaaccatattattcaacccctggccctccccaaatcttatgtcctcacatgtcaaaacacaatcacgcctttccaacagttcctcaaagtcttagctcattccagcattaacccaaaagtgcaagtagaaagtgtcatctgagacaaggcaaatcttttctgcctacgagcctgtaaaatcaaagtcaagttagttaattcctagatacaacgggggtacaggcattgtgtaaatacacccattccaaatagaagaaactggcgaaaacaaaaggattacaggccccatgcaagttcaaaatccaatatggcagtcattaaacttaaagttccaaaatgatctcctttgactctatgtctcacacccaggtcatgyttatacaagaggtggtctcccatagccttggcagctctgcccctgtggctttgcagggtacatcccctcttctggctgcattcacaggttgtcattgagtttctgtggcttttccaggtgcatggtgcaagctgtaggttgatctatcattctggggtctggaggacagttgccttcttctcacagctccattagcagtgccccggtggcggctgtctgtgggggctccaaccccacatttccctt

SEQ ID NO: 877040 - DNA, 547 bp, Homo sapiens
gcactcctgaccccaggtgatccttacagagaaggatcgcctgcctgccttggtctcccaaagtgctgggattacaggcatgagccaccacacctggcctccactctccattattatcaagcccaccccaagcaggccctcagcgtctcccttggaggccaccacaccttcctgaattagttaartaactttccccttggtggcctctttagcagcatctctagggaacaagcaaccagtgaaacaagtctgggccccatatcgggggtcctgggccttcaaagcctagcccagcccatggcttaggtctgcagctaccaggcaggcttagcatccacagctcaggaagcctgcctttccctggaaactcgattctagtgatcatctcaggcagagctggtgactcaggccctcctccccttcccaaactccctctggctgctgtctgacctgctgtgacttctttttgctttcaaggctgctcttgatatttatcttaaccagattttacatggtatgatgtgcctggggccccaaattttcctgg

SEQ ID NO: 877041 - DNA, 547 bp, Homo sapiens
gcactcctgaccccaggtgatccttacagagaaggatcgcctgcctgccttggtctcccaaagtgctgggattacaggcatgagccaccacacctggcctccactctccattattatcaagcccaccccaagcaggccctcagcgtctcccttggaggccaccacaccttcctgaattagttaagtaactttccccttggtrgcctctttagcagcatctctagggaacaagcaaccagtgaaacaagtctgggccccatatcgggggtcctgggccttcaaagcctagcccagcccatggcttaggtctgcagctaccaggcaggcttagcatccacagctcaggaagcctgcctttccctggaaactcgattctagtgatcatctcaggcagagctggtgactcaggccctcctccccttcccaaactccctctggctgctgtctgacctgctgtgacttctttttgctttcaaggctgctcttgatatttatcttaaccagattttacatggtatgatgtgcctggggccccaaattttcctgg

SEQ ID NO: 877042 - DNA, 591 bp, Homo sapiens
ctagaattaccatttgactgagtaatcccattactgggtataccccagggattataaatgatgctactagaaagacacatgcacatgtatgtttattgcagcactattcacaacagcaaagacttggaaccaacccaaatgtccatgaatgatagactggattaagaaaatgtggcacatatacaccacggaatactatgcagccataaaaaaggataagtgcatgtcctatgtagggacatggatgaagctggaaaccatcactctcagtaaactatcacaaggacagaaaaccaaacaccgcatgttctcactcataggtgggaattgaacaatgagatcacttggacacagggcggggaacatcactcaccagggcctgttgggggatggggggcctgggggagggatagcattaggagaaatccctaatgtaaatgatkagttgatgggtgcagcaaaccaacatggcacatgtatacctatgtatcaaacttgcacattgtgcacatgtaccctagatcttaaagtataataacaaataaaattaataaataaataatcaaatgagttaattccattctttaccct

SEQ ID NO: 877043 - DNA, 691 bp, Homo sapiens
ctacttaagaaaaacatttttttaaaaagttgatagggggtgcttactctcaaagatcataagtttcagcccaaggattatttactgatttcaagatgtaaaccaacaccaaccaaccaacaatgagttcacaatggagggaacaagctgccacttcctgaaataactggtcaatcactaataatgtgacagccagacactatgtgtctcattgtgatgcaacatgctacctagaagaccacttcaaaaatgattcttccagaatgctaatgtaaatctaatcagcctttagaatttaaaggcttaaaaaagactaaagaaaagtaacaaccaaatgcaatatgtagaacttatatggagcctgattcgaacatcaagtataaagagatatttttgagaaaattgagaaattttaaaacatgaaattagtattatatgatattgaagactgctgctttttcaagacatgtcctcaaatttattttacattccttccatactaactcttctccttgcatgtagacagacttgtggctgctttcaatgacttctgaarttaggtcattaaaagtcatacattctttggctagtaatcttgggttactcactcatgagaggccaagctttatctaggaagttcaactactcgagactgtcatgctggtgagtatacacgtagacactccattca

SEQ ID NO: 877044 - DNA, 670 bp, Homo sapiens
tgaaaaattagataatttagatggattgcacacattcctgggaacatgcaaactctaaaactgacttgagaaaatacaatatgaataaaactataacaaataaagtgtttgaatcagtaataaaaggattacccacaaagaaaagaccaggcctagatccttcagtgtgaaattattccaactatgttaagcagactgaattcaccaattcttcaaaaaatctttcaaataatagaacgagaggaaaaagttgtaatcttttwttattttattttattattattatactttaagttttagggtacatgtgtacaatgtgcaggtttgttacatatgtatacatgtgccatgttggtgtgctgcacccattaactcgtcatttagcattaggtatgtctcctaatgctatccctcccccctccccccaacccaaaacagtccccagagtgtgatgttccccttcctgtgtccatgtgttctcattgtacaattcccacctatgagtgagaacatgtggtgtttggttttttgtccttgtgatagtttgctgagaatgatggtttccagtttcatccatgtccgtacaaaggacatgaactcttcattttttatggctgcatagtattccactgtgtatatgtgccacatttttttgaggctagacatacca

SEQ ID NO: 877045 - DNA, 483 bp, Homo sapiens
aaataacaaaagtgcccaactttcttaaatacactattatacagcattaactttaactttgcatttataaatggtgaaagaaatcgggcagggcatggtggctcacacttgtaatcccagcactttaggaagccgagggttaaggatcacraggtcaggagatcaagactatcctggctaacatggtgaaccccatccctactaaatatacaaaaaaattagctgggcctggtggcgggcacctgtagtcccagctaattgggaggctgaggcaggagaattgtgtgaacccgggaggcggcgttgcagtgaggtgagatcaggccactgcactccagcctgggcaacagagcgagactgtctcaaaaaaaaaaaaaaaaaaaactgcctagtcctctaactgtgacaaataattgaaaataacattaaatgtcttgtatttagtgccctgcaacttaggcaaatctaaatatttccactgta

SEQ ID NO: 877046 - DNA, 643 bp, Homo sapiens
ataaaagccatattatttaagttagctcagaagtaagaactacgttaagaatgttactgattcctgaataatggcaacctctcttgtgaactgggggatatggttacttttgagacttacccttttccattaataaacatatcaaacagaatctgcttagtctgtgtatgcctagttccctattttttcttcagatgttatttttggtcttttatgtacttttagagaaaagaacagttatattctaaaatctggacccacctattctgttccattatggagactttattggactaatgagtgaaagatagataaatcattattgtttaaatataagacataactttaaatatgttatagttatctaatcatgaaataaggcatctaaaaataataataattactttcttgccaatggaactcttcaagaacaactgactgactatattcagtggtatcttaaaagtattttctgtatttkcagaatattaaaatagatggataaacaatgttaattttcaaaataaatataataaattgataaatgaattaatcaatctaagaaacataatatggtaagctaatttaaaaatcttaagtatgcctttattaagtaaatgcctaaaaatataaaacagtgatg

SEQ ID NO: 877047 - DNA, 586 bp, Homo sapiens
ttgttacatatgtatacatgtgccgtgtcggtttgctgcaccccttaactcgtcatttacattaggtatttcttttaatgctatccatcccccatccccccactccacgacaggccccggtgtgtgatgttccccaccctgtgtccaggtgatcttattgttcaattcccacctatgagtgagaacatgcartatttggttttctgtccttgcaatagtttgctcagaatgatggtttccagcttcatccatgtccctacaaaggacacgaactcatccttttttatggctgcatagtattccaacctcatagaagttttatgaggaatagatgagcaaagtgcttcattgtgtctggtgcatagtaagtgctatacacgtttcttaatttaacgattgcacacaagatgtgttcaatagttgtttttctatctcctgcctttagtttcatcacaatccatccccattggttcctttcagatctttctaaaatatccatctccgcatcagttagaaggttgtggtcaacatgagagccttccttatggagctaagattgctgctgaagctcataagtaccacatcc

SEQ ID NO: 877048 - DNA, 560 bp, Homo sapiens
gctggtactggttgttcctttccatgtttagtgcttccttcaggagctcttgtaaggcgggcctggcagtgacaaaatctctcagcatttccttgtctataaaggattttgtttctccttcagttatgaagcttagtttggctggaatgaaattctgggttgaaaagtctttaagaatgttgaatattggcccccaccctcttctggcttgcagggtttctgctgagagatccattgttagtctaatgggcttccctttgtgggtaacgcaacctttctctctggctgccctttatattttttccttcatttcaaccttggtcagtctgatgattatgtgtcttggggttgctcttctcgaggaatatctttgtggtgttctctgtatttcctgaatttgawtgttggcctgccttgctacattggggaagttttcctggataatcatctttgtggttttatctacctttggtctttgatgctggtgacctacagatggggttttggtgtggatgtccttttttttaatgttgatgctattcttttctgtttgttaattc

SEQ ID NO: 877049 - DNA, 605 bp, Homo sapiens
actcacagaattgaacatttcttttcattgagcagtttggaaacaccttttggtagtatctgcaaatggatattttgagcgctttgaggtcaatagttgaaaagaaaatacattcacataaaaattagacagaagtattccgagaaacttgtttgygatgtgtgcattcatctcacagagttcaacctttcatttgattaagcagtttggaaaaactctttttgtagtatctgcaagtggatatttggagggctttgagtcctatggtggaaaatgaaatatcttcacagaaaaactaggcagaagcattctgagaaacttctttgtgatgtgtgcattgaactcaaagagttgaaactttcttttgattgaacagttcagaaacagtctttttgtaatatctgcaaatggatatttggagccctttgtggcctatacttgaaaaggaaatatcttcaactacaaactctacagaagcattctcagaaacttcgttgtgttgtgagcattcaactcacagagttgaacgtttcttttgattgaacagtttggaaacagtctcattgtagtatctgcaaatggatatttggagcgctttttggcct

SEQ ID NO: 877050 - DNA, 580 bp, Homo sapiens
aatctgcaagtggttatttggagccctttgtggcygatggtggaaaaggaaatatcttcccataaaaattacacagaagcattccgagaaaatattttgtgatgtgtgaattcgtctctcagagttgaacatttcgtttgatacagcagttttgaagcactctttttgtagaatctgcaactggttatttggagcgctttggggcctattgtggaaatggaaatatcttcccataaaaactacacaaaagcatactcagaaactacttggtgatgtggtgatgtgtgcattcatctcacagagttgaacctttcttctgattgagcagtttggaaacactctttttgtaggttctgcaagtggatatttatagcgctttgaggccaattgtggaaaatgaaacatcttcacatataaagtacacagaagaattctgagaaacttctttgtgatgtgtacattcatctcacagagttgaacctatcttttgaaagagcagttttgaaactctctatttgtggaatctgcatatggatatttggagtcgtttgcagcttattgtggaaaaggaaatatcttc

SEQ ID NO: 877051 - DNA, 580 bp, Homo sapiens
aatctgcaagtggttatttggagccctttgtggctgatggtggaaaaggaaatatcttcccataaaaattacacagaagcattccgagaaaatattttgtgatgtgtgaattcgtctctcagagttgaacatttcgtttgatacagcagttttgaagcactctttttgtagaatctgcaactggttatttggagcgctttggggcctattgtggaratggaaatatcttcccataaaaactacacaaaagcatactcagaaactacttggtgatgtggtgatgtgtgcattcatctcacagagttgaacctttcttctgattgagcagtttggaaacactctttttgtaggttctgcaagtggatatttatagcgctttgaggccaattgtggaaaatgaaacatcttcacatataaagtacacagaagaattctgagaaacttctttgtgatgtgtacattcatctcacagagttgaacctatcttttgaaagagcagttttgaaactctctatttgtggaatctgcatatggatatttggagtcgtttgcagcttattgtggaaaaggaaatatcttc

SEQ ID NO: 877052 - DNA, 580 bp, Homo sapiens
aatctgcaagtggttatttggagccctttgtggctgatggtggaaaaggaaatatcttcccataaaaattacacagaagcattccgagaaaatattttgtgatgtgtgaattcgtctctcagagttgaacatttcgtttgatacagcagttttgaagcactctttttgtagaatctgcaactggttatttggagcgctttggggcctattgtggaaatggaaatatcttcccataaaaactacacaaaagcatactcagaaactacttggtgatgtggtgatgtgtgcattcatctcacagagttgaacctttcttctgattgagcagtttggaaacactctttttgtaggttytgcaagtggatatttatagcgctttgaggccaattgtggaaaatgaaacatcttcacatataaagtacacagaagaattctgagaaacttctttgtgatgtgtacattcatctcacagagttgaacctatcttttgaaagagcagttttgaaactctctatttgtggaatctgcatatggatatttggagtcgtttgcagcttattgtggaaaaggaaatatcttc

SEQ ID NO: 877053 - DNA, 481 bp, Homo sapiens
aactgcagattctacaaaaagactgtttcaaagctgctcagtcaaaggaaatgttcaactctgtgagatgaatgcacgcaaagggaaaaagtttctgagaatgcttctgtgtagtttttatgtgaagatatttccttttgcacaataggcctcatagcactccaaatatccacttgcagaatctacaaacagaatgtttcaaaactgcacaatcataagaaagtttcaacaatgtgagatgaatgcacacatcacaaagaaatttctcagaatgcttatgtgtagtttttttttgaatatattyccttttccaacatggggcgcaaatggctccaaatatctatgttcagattctacaaaaagagagattcaaaactgctctatgaaaagatagttgcaactgtgtgagctgaatgcacccatcacaaagaagtttcccagaaagcttctctgtagtttttaagtgaatatttttcctttt

SEQ ID NO: 877054 - DNA, 579 bp, Homo sapiens
ttctcttctatcctattgtcaggctgcaaaattttctgaacttttatgctctgcttcacttgtaaaactgaatgcctttagcaacacccaagtcacctcttgaatgctttgctgcttagaaatttcttctgccagataccctaaatcatctctctcaagttcaaagtttcacaaatctctagtgcaggggcaaaatgctgccagtctcyttgctacaacataacaagagtcacctttgctctagttcccaactagttcctcatctccatctgagaccacctcatcctggactttattgtctgtatcattatcagcattttggtcaaagccattcaacaagtctctaggaagttccaaattttcccacattttcctgtcttcttctgagtcatccaaaatgttccaatctttgcctgtttcccagttccaaagttgcttccatatttttgggtatcttttcagcagtgcccccactctattggcaccaatttactgtattcattcattttcatgctgctgataaagacatactggagacggggaagaagaaaggtttaaaagagtcacagttccatgtga

SEQ ID NO: 877055 - DNA, 662 bp, Homo sapiens
gtttttttggggtaccgtaaaaattaccataaaccaggtgacttaaaacaacagaaacattttatttcaagatctggagtctagaagtctgcaatcatagtgtcagtgccattggttcattatagaggctctgagagaaaatatgtcccatgccyttctcctagtttcttctggtggttgccagcaatcttggtcatttcttggctagtaccttcatcactccagtctctgcctccatcatcatatggctgtctttcctgggtgctgttgtgtgtcctctcctctacttagaaagacatcagtcatagtggattaaaagctcaccttaatcttatatgacctcactttaatttagccaattacatcttcaaagtccctatttccaaataaggtcacattctgaggttctaaatagatatgaactttgaataggacactatccaacctaattcacgctggttcaaacttcctgatggtgccagagaagggaaatcacaggttttattactaactttttcagatgcagggcaagaaggaacaagggagaggtggaaatttggaagcttttagcactcagacatcaaatatatagtcagattcctcatttcaaaaagtctcttgcttcctcagtaagttacactcttcacttagtcaaccaggta

SEQ ID NO: 877056 - DNA, 542 bp, Homo sapiens
taagaatacatggcaaatttggccaggcgccatggctcacgcctgtaatcccagcactttggaaggccaaggtgggcggatcacgaggtcaggagatcgagagactatcttggataacacggtgaaaacccctctctactaaaaatacaaaaaatcagccgggcgtggtggcgggcgcctgtagtcccagctactccggaggctgaggcagaagaatggcgtgaacctgggaggcgsagcttgcagtgagcctagattgcgccactgcactccagcccgcgctacagagcgagagtccatctcaaaaaaaaaaaaaaaaaaaagtaaatttaaaaaaacctaataaacttgtgcatctccaagcccacataataggatagtcttcagttaatatagactattgtttatattgagtactatatagcactctgaatatttccatttgtggcaactacaaagtttaaggcagataaaattacttccacaatattccaaatgttgggcgttttaagtttagagttctaagcctaattttctatata

SEQ ID NO: 877057 - DNA, 542 bp, Homo sapiens
taagaatacatggcaaatttggccaggcgccatggctcacgcctgtaatcccagcactttggaaggccaaggtgggcggatcacgaggtcaggagatcgagagactatcttggataacacggtgaaaacccctctctactaaaaatacaaaaaatcagccgggcgtggtggcgggcgcctgtagtcccagctactccggaggctgaggcagaagaatggcgtgaacctgggaggcggagcttgcagtgagcctagattgcgccactgcwctccagcccgcgctacagagcgagagtccatctcaaaaaaaaaaaaaaaaaaaagtaaatttaaaaaaacctaataaacttgtgcatctccaagcccacataataggatagtcttcagttaatatagactattgtttatattgagtactatatagcactctgaatatttccatttgtggcaactacaaagtttaaggcagataaaattacttccacaatattccaaatgttgggcgttttaagtttagagttctaagcctaattttctatata

SEQ ID NO: 877058 - DNA, 658 bp, Homo sapiens
cagacaagagaataaagcttgtgcagtgaaactccacttttaaaaatcatcagatcttgtgacacttattcactatcatgtgaacagcacagaaaagacctgcccccatgattcagttacctcccactgggtccctcccacagcacatgggaattcaagatgagayttgggtggggacacagaggcaaaccacatcatttcaccgctgacccctctgaaatctcatgtcttcacctttcaaaaccaatcatgccttcccaacagttctccaaagtcttaactcatttcagcattaactcaaaagtccatagtccaaagtttcattccagacaaggcaagtccctttttctatgagtctgtaaaatcaaaagcaagttagttacttcctagataccatgggggtacatgcattgggtaaatacagccatttcgaatggaaaaaattggcctaaacaaaggggctacaggccccaagcaagtctgaaatccagaggggcagtcaaatcttaaagctccaaaatgatctcctttgactctaggtctcacatccaggtcaccctgatgcaagaggtagccttccatggccttgggaagctcttcccctgtggctttgcaggttatagccccactcctggctgctttcataggctggcattga

SEQ ID NO: 877059 - DNA, 718 bp, Homo sapiens
aggcaaacatttgcagcctgtgtacgaagtcatgaagtgaggataagcagaggtttaattcaaattattatgtaagggtttgaaatttgggacctctagaagatatcacttcaacttcagaattatgaggcaagaataaattccagccagcttaaatgatcaataatggagtcctgttttgttctgctagttgaaattgttagtggaaataaagaatgagctgtaagcatgatgggaaatatcttactggaagaaacacttccagctttgtggtatattagaaagattaagggctaggtgtaagtctggattcaaatcctgatgtttccacttgttatataaattaaacaggcagcaactgctctgagcctttgttttcttccctgtaatgtggcagtgatagtagcattcatggcattactgtggtaaytaaataagatcatgtactagtgcaggattattgctcaatgctatagttctcttccctaaataatataaatgctggagagaaacagctgtctcagaaattttttgaatgttctaatttaacttgagcatgtggacattacatagcccacgaagcaagtttccgaacttaaaaacaacaagaaaataagtatgtgctagcctccaaaatgcgtgtatttaaaaaaagagtcaagattatatgtattggaattgatctggccgtctgcaggaaatggtgatcaggccctgg

SEQ ID NO: 877060 - DNA, 618 bp, Homo sapiens
acctggataacaaacctgaaccaaaaataagtttaaaaataataataaggccaggcatggtggctcacacctgtaatcccagaattttgggaggatgaggtgggtggatcacgaggtcaggagatcaagaccatcctggccaacatggtgaaaccccatctctactaaaaatacaaaaattagctgggcatggtgatgggtgcctgtagtcccagctactcaggaggctgaggcaggagaatcgcttgaaaccrcgagtcagaggttgcagtgagccaagatcgtgccactgcactccagcctgggcgacagaacaggactctgtctaaaaataataataataataataataataataataaataaaaggcacctgaggctatttttgagtgccttcaacttccatacaatacagattaatatcctcactttacaaatacagaggtagatgcacagaaaagactggagagtggcccaaaatttagcagaataggaacaatggctaatgcacattatgcactaattgtgtgccaaatgttctatatgtctcatctaattcaactctttatacaactcttgttgttatacctatttggagacaaagaaattgaagcttaa

SEQ ID NO: 877061 - DNA, 595 bp, Homo sapiens
ctctttttatgtccgctcagagaactccgagccctggtcattgagatggtgttggccacagacatgtcctgccatttccagcaagtgaagaccatgaagacagccttgcaacagctggagaggtggcatctggtggggtgtggctggggccaggccagagggagggktgtgtgaactgggggggtatacacaagggtagttggtgtgccaggtctttacctcgctgtagagactccactggcttcaggtatcagactgcatctctatgtgagagagagagagagagagagagagagtgtgtgtgtgtgtgtgtgtgtgtgtgtgtgtgtgtgtgtccttacgtttactcacagccttggcagctgatccactggagagtgctttgggctgggagtctaagatgggggttctcatcgtagctctgggacaggcttactctggaatgttggaaaattcattcaacccttctgccccagttttattacctctgaaatggtgaaaatgatacgcctccccccacaacagcttgcccctagttcctagtctcatagggctattgggagagtcatacgaggtttaaaaaaatgcatagaac

SEQ ID NO: 877062 - DNA, 595 bp, Homo sapiens
ctctttttatgtccgctcagagaactccgagccctggtcattgagatggtgttggccacagacatgtcctgccatttccagcaagtgaagaccatgaagacagccttgcaacagctggagaggtggcatctggtggggtgtggctggggccaggccagagggagggttgtgtgaactgggggggtatacacaagggtagttggtgtgccaggtctttacctcgctgtagagactccactggcttcaggtatcagactgcatctctatgtgagagagagagagagagagagagagagtgtgtgtgtgtgtgtgtgtgtgtgtgtgtgtgtgtgtgtccttacgtttactcacagccttggcagctgatccactggagagtgctttgggctgggartctaagatgggggttctcatcgtagctctgggacaggcttactctggaatgttggaaaattcattcaacccttctgccccagttttattacctctgaaatggtgaaaatgatacgcctccccccacaacagcttgcccctagttcctagtctcatagggctattgggagagtcatacgaggtttaaaaaaatgcatagaac

SEQ ID NO: 877063 - DNA, 643 bp, Homo sapiens
tcacctcttaactgacttcttagtagtcccaatcctgtattaaatgataatttgatagctaattatttgaaactagactttagtcaaagaatgaaaaatgtcagcagaatggggatttgaatatgaaatgtcctagctccccctgaatcatggatctctctcccatgtgtaatgtttatttttttaaataagcattctttctggtaccttttctgaatatagattattagagatgtaactacagaaaaaaattgaaaagggcaatatttattgcaatggccacaagatggcagacctaaaatccagacttcacaaagtaatttagacatttacatgaagaattgcatctttgagcatctttgaggatgccttaaaagccatcagtttccttcaccctcccaaaatgtctcctctaggttgtcttgaattgctgtccagctctgtggcaggcacaacaagggagaacagctttgattaacattgaatcaacagctttgataaacagaygggaatctgtttagcccctctcccagaagggatcagaccttcctgcccctcgcagaaacctgccctttgcctggctaccaccatcacctgcagcacacacagacatgccaccctgtgtttccttctcctttgcaga

SEQ ID NO: 877064 - DNA, 583 bp, Homo sapiens
ttgcactgttggtgggagtgtaaattagttcaaccattgtggaagacggtgtggcgattcctcaaggatctagaaccagaaataccatttgacccagcaatcccattactgggtatatacccaaaggattataaatcattctacaataaagacacatgcacatgtatgtttattgcggcactattcacaatagcaaagacttgggaccaacccaaatgcccatcaatgatagactggataaagaaaatgtggcacatatacaccatggaatagtatgcagccataaaaaagatgagctcatgtcctttgcagggacatggatgaagctggaaaccatcattctcagcaaactaacacaagaacagaaaaccaaacacygcatgttctcactcataggtgggagttgaacaatgagaacacatggacacagggaggggaacatcacacactggggcctgtcaggggttggtgggctagtggagggagagcattagggaaatacctaatgtagatgatgggttaatgggtgcagcaaaccaccatggcatgtatatatctatgtaacaaacctgcacattctgca

SEQ ID NO: 877065 - DNA, 583 bp, Homo sapiens
ttgcactgttggtgggagtgtaaattagttcaaccattgtggaagacggtgtggcgattcctcaaggatctagaaccagaaataccatttgacccagcaatcccattactgggtatatacccaaaggattataaatcattctacaataaagacacatgcacatgtatgtttattgcggcactattcacaatagcaaagacttgggaccaacccaaatgcccatcaatgatagactggataaagaaaatgtggcacatatacaccatggaatagtatgcagccataaaaaagatgagctcatgtcctttgcagggacatggatgaagctggaaaccatcattctcagcaaactaacacaagaacagaaaaccaaacactgcatgttctcactcataggtggragttgaacaatgagaacacatggacacagggaggggaacatcacacactggggcctgtcaggggttggtgggctagtggagggagagcattagggaaatacctaatgtagatgatgggttaatgggtgcagcaaaccaccatggcatgtatatatctatgtaacaaacctgcacattctgca

SEQ ID NO: 877066 - DNA, 608 bp, Homo sapiens
ggagtctctgtgaatctgctgtgattctggagctgcccaattcaccaattgttcattgctcaattaaattcctttaaatttcatttggccaaagtttttctttaatcagatggtgtcagaagcagcaactgaagtagagcttctrgcgacccccaggagcactgagtgaacaagcaaggtacctgcaggacccatttgtgtccactgatgtctcagagtagctggggatcatgagtaagtgctctctcggatttcagagccacatatttgtgttttgagccattggagtttctttgagtaaatttctgatccaaactgggtttgaaagttgtgacagcaactgggctgggtccaggaatggatttgatctgggaattaactggcttggatccaattagagacctcttacatctgactgggtcagaaaggaactggcagttagcagtaatattgcaggagtcataaaatacggcttttgaaaattcacagggatttttgtgtcctacccctttgtttcatttttcttgcatgcctaagtaggaaaaattattggctaagttaatcgggagaacctaagagtaaagccaatattttaggtaaaatgggat

SEQ ID NO: 877067 - DNA, 673 bp, Homo sapiens
acatattctaacaattgtacagattctagagctaaaaatagtcactgcatttttaaaaggttgaaaaatagtaaaaaaaaaatttcaggaacatgaaagttatatgaaattcagatttcagtatgtattaagttttatcagcacacagtcatgccaattcatgtaactgactgtattagtcagggttctcttgacctatagattcatattgtccactgcccagaaactgccaatttaycaagacaggggaattgtaatagagaaatattttaacatgtagagccagctaaacagaagatcagagttttattattactcaagtcagcctccctgaaaatttggaggctagagtttttcaaagatagtttggtgggcaggggtactactgattggttggtaatgcagtcataggggtgtagaaaatggttgtcatgtgcctagccctcttctaggtgggggccacaagactagttgagctgagagttgtgggtccaggtggggctattcagtcgtcagaaatgcaaaagcctgaaaagacatcttaggttctacaatagtgttgttaattacaggagtaattggggaagttgtaaagcttgtgacctccagaataatggttggtaatcacttaactatgcctacattttagcagaattcaggcccctctcatcct

SEQ ID NO: 877068 - DNA, 630 bp, Homo sapiens
atagtggcacaaacaaactcaaacagtttcctcaaataattcatttttctttgcctactcagtcttcatgcatggcagaaataacctttccattattccataactaacatcattctttgaaggcagctactaagatgaaaagaaaaaaaaatcaaatggttctcagaaaatcctagcacaatgtaaacagtggaagrtacagagaagacacatgttgtaggctgaaattacaaagcaacaattaaaagttggatcactggttaccttgagttagccatgtttaccttagttatgctggatctcaatgctttgtgggaaaaaaagaagaaaatgagccttcatcatggatgtccagaaaattaacagatgacaacggataccctctccatgaggtttgctgcatgccagacactgtgcaaagagctttacgtgcattgtctcatttatttttgccacaactgtgtgaggtcagtactattattctatccatttttttttaggtaagggatcagagatttagagaatttaagtgacttgaacaaatttaaactggctaacaatgacaaaactagactttaaatgcaggtctgattccagagctgcttctttaaatcactaggtcaggtgact

SEQ ID NO: 877069 - DNA, 603 bp, Homo sapiens
cttctcattctcttgaaagatatacaagaaacttgaaaaacacacacagacctatggatggtaaaacaataaagtcatagtagacatagctgaaaacagtacaagaaaattagaagacaggtctgagcaaatcacccagagttggaaaacatgtaaatgctattaaaatatgtgaaacaaagggtgagaagttcaaacaaatatctaacaagagctcaggaaaaagagaaggtgggaaataggcaagaggtaaccatcaaagtaataatgtaataatggctaagaattttctacaattggaaacaatttttttaaaaatccatcttaatacaccatgggagtatcagagacaaataaactaaattyaaaattacaaaaaccaaaaaaattgattatctacagatgaatgagttctataattaggtctatataaacatcttacctgcactaaaatttgtcagaagacaatgaaataatgtctttgaagtgaggggggaagggatatgtgagggtagagctctatatttagctaaactattattcaagagtataggtaaaatgaaatcatttgcgtatgcaaaaacagaaaatttactattcacg

SEQ ID NO: 877070 - DNA, 637 bp, Homo sapiens
ttggacttggcctgtggaccatagctggcagatttatcttttaagaaaaaaaattctgtcttgataccaatggacttgtttcaggattctcagaatccatggacttgagttttaaaaattcagactgaattttatgctcaaaatatgttcttatgtcattaacatacttttgatttgtcatggataaaatgatgtttttctttacaactggcaagagttgttttcaaggttatctttgaatgaagagactaaaatctatgtatgtttgtgtgtgtgtgttgtcattygacagtatctttagatatctgattttgaaggcaaaaatacaaggataatgcaatggttatgcctataattccagcactttgggaggccaaggtgggaggatcacttgagtctgggaggtcaagtctacagtgaacaatgattacaccatttcactccagcctggacaacagaggaagatcctgtctcaaaacaaacaaaaaaaagaacaaacaaaaccctcacaaagatgaaacctacctagcctaagtacttcagaaaagttcttcatcccccaatttcttccccatgaaaaacataaaaaacaaacaaaaacactacaaatgtttgtaactcagccaggcataatggt

SEQ ID NO: 877071 - DNA, 556 bp, Homo sapiens
tagaccaactgatgcagaaacaggaggtgtgagccagcaatcagatggagattctagtgctcatgaaagtttgaagaacactggtaatgtgtggagtatcttggtgtattttgctactgttgatatggattgcttatgttatataaacgattttcattaaattttttgcactcttttattttgtcccactgaacctaagactagatagagtcaccccaaaagtggcagcagggaaattccaacaagagagtgcccaaaaccattctgagatcgggccggttgggattccaaagaaagaagcaccaaacaccagagggatctktccggagcatttattagggggaacttagagagttctgcagcataccctcaggcggacagtgagagaaaaaagcatggtcaaccagctgggcaccgtggctcatgcctgtcatcccagcactttgggaggccaaggtgggaggactgcttgagcagaccagttcaaaaccagcctgggaaatatagcaagaccctgtctctacaaaaaataattcagcagccaggcacggtggct

SEQ ID NO: 877072 - DNA, 573 bp, Homo sapiens
ctcattgttcaattcccacctgtgagtgagaacatgtggtgtttggttttctgtctttgtgatagtttgctgagaatgatggtttccagcttcatctatgtccctgcaaaggacaggaactcatccttcttcatggctgcatagaattccaaagtgtatagtgccatagtttctttatccactctatcattgatgggcatttgggttagttccaagtctttgctgttgtgaacagtgccacagtaaacrtacatgtgcatgtgtctttatagtagaatgatttatatgacccagtaatgggattgctgggtcaaatggtatttctagttctagatccttgaggaatagccacactgtcttccataatggttgaaataatttacactcttaccaacagtgtaaaagatttcctatttctccacatcctctccagcatctgttgtttcctgactttttaatgatcaccattctaactggtgtgagatgatatctcattgtggcttggatttgcatttccctagtgaccagtaataataagctttttttcatatgtttgttggctgcatagatgtc

SEQ ID NO: 877073 - DNA, 621 bp, Homo sapiens
ttactttctctgtgttcacagtatgtcaaaagcctgaaaaataatttttagtaaatacaaaataaaaactcaaagtgacaagaaaagatgtattcatagctcatggtcttgaacttctatttcagcttaccacgtctgcatttttactattgaacatgacacatctcacatcaaaggagaccacccaaagtattgtctaagttgtctatagccttaaayagaggcttaaaggtaatcttcaaaaaaaaatgtttgagtgttattttggcataaacagacaaataagtagttgaaataagtagttcatagttctgtcagacttccaaaaaatctaagtttaataaaagaagtctgagcatagttagcaagtgtttactagaaaaatgcaaacccagcaacatcctgccgaaggtcactcttttttttttcagatcatcacacattgcccatcaagtgtgagtgaatctcttttagcattcctaaaaaccttcatttctttgaccactatcccagcactataatagaattctataaaatgtgaacaaaacacttcatccaaggtttgttctgcacaccagggttaagagaaaaagaaaaagtgggagaccttttccttagctc

SEQ ID NO: 877074 - DNA, 677 bp, Homo sapiens
ggtgagtgtgaagcatcgtcctattgttctacagtgtaattatcctcagcatccatcttagaggcagctaaatagggtgaaagaaatcttttgggttaacctagatatgacattgaaaattgcttttttgttttgaaactcaaatgtcacttcctcaaactttgcatgtagactcatctcctgacatagattttatcacatcatagcctgaacttcaattagtataattttctgcaaacaacctaaagcaatatacaagtaagtaagtaatcctcctaaagcctttgcattccagttttgtatcatccagtttatgtcacaaacagggtcaaaatataaaagacaacttactctaggataaattttccattttttctatttttttcccggatattttgaaatgaaagctcctctgagaagtgattattttctcctgwatacacagttctcaaaggaaggcatattaatgtccagcagttatatgaaaaaaggcacaagatcactaatcatcagggaaatgcaaatcaaaaccacaatgagatattatctcacacgtgttgaaatgtctgttctcaaaaagacaggagactggttagccagaatgtggagaaaagcaatccttgtgcactgctggtggaatgtaaattcctagagccattatggaaagcagtatggag

SEQ ID NO: 877075 - DNA, 635 bp, Homo sapiens
attaacttgaattgaataattcaatgaggagagaaggtataacagatgttttatatacctacagacatagatacacatagaaataatttattttctggcatttatttcagcaaaaagtttactactggtagcaatgagtctactaaattctaatagaatcctccaataaatggaaccatggcttccagaatagctgattctargattggggcagggaacatgcaagaggatcttgaagtaagttgccaaaataaaggaagtgctaaaaacactattcacaatagcaaagacacagaatcaatctaggtgcccatcaatggtgtactggatttaaaaaatgtggtacttatacaccaaggaatactatacagccataaaaagaatgaaatcacatactttgcagcaacatggatgctactgaaggccattatcctaattgaattaatccaggaacagaaaaccaaatatcacatgttctcacttataagtgagtgttatacatggggtactcatggacataaatatagcaagaataaacactgaggacttctataagtgggggagagagggagggagaaaagggttgaaaaactgtggctactatgctcactatctggttgacaggatcatttata

SEQ ID NO: 877076 - DNA, 643 bp, Homo sapiens
tgtggttttgatttttatttctttaatgatcagtgatgttgagtttttctcatatccttcttggccgcatgtatgtcgttttttgagaagtttctgttcatatcctttattcacttttttttcttgtaaatttgttgaagctccttgcttaagacctttgtcagatgggtagattgcaaaaattttcttccattctttggttgtctgtctgctctgatgatagtttcttttgctgtgcagaagctcttcagtttaattagatcccatctgtcaattttgcttttgttgcaattgcttttagttatttcttttattattattattataatttaagttttagggtacatgtgcacaatgtgcaggtttgttacatatatatacatgtgccatgttggtgtgctgcacccattaactcgtcatttaacattaggtrtatctcctaatcctatccctcccccctcccccaaccccacaacaggccccgatgtgtgatgttccccttcctgtgtccatgtgttctcattgttcaattcccatctatgagtgagaacatgcagtgtttggttttttgtccttgcgatagtttgctgagaatgatggtttcaagcttcaaccatgtccctacaaaggacatgaactcatc

SEQ ID NO: 877077 - DNA, 675 bp, Homo sapiens
attcttcctatccatgagcatggaatgtttttccatttgtttgtgtcctctcttatttgcttgagcagtggtttgtagttctccttgaagcagtccttcacatcttttacaattgtattcctagatattctctttgtagcaattgwgaatgggagtttcctcatgatttggttgtttgtctatttttagtgtataggaatgattgtgatttttgcacattgattttgtgtcctgagactttcctgaagttgcttatcaggttaaggagatttgaagctgaggcaatggggttttctaagtatacaatcaatcatctgcaacagagacaatttgacttcctctcttcctatttgaatacgctttatttctttctcttgcttgactgtcctggacagaacttccaatactatgttccaataggagtggtgagagagggcatccttgtcttgtgccagttttcaaagggaatgcttccagcttttgcccattcagtatgatattgcctgtggggttgccataaatagatcttattattttgagacatgttctgtcaatacctagtttattgagagttgttagcatgaaggggtattgaattttgttgaaggccttttctgcatctattgagataatcatgtgatttttgtcattggtactgcttatgtgatggattat

SEQ ID NO: 877078 - DNA, 588 bp, Homo sapiens
tctcttgtaagttggattcctaggtattttattctctttgtagcaattatgaatggcagttcactcatgatttggctctgtttgtctattactggtgtgtagtaatgcttgtgatttttgcacattgactttctatcctgagactttgctgcagttgtttatcagcttaaagaaattttgggctgagatgatggggctgtctaaatatacaatcatgtcatctgcaaacagagacaatttgacttcctctcttcctatttgaataccctttatttctttctcttgcctgactgccctggccaggacttccaatactgtgttgaataggagtggtgagagagggcatccttgtcttgtgccrgttttcaaaggaaatgtttcccgcttttgcccattcagtatgatattggctgtgggtttgtcataaatagctcttattatttagagatatgttccatcaacacctagcttattgagtgcttttagcatgaaggggttttgaattttatcgaaggccttttctgcaactattgagataatcatgtggtttttgtcattggttctgtttatgtgatggattacgtttat

SEQ ID NO: 877079 - DNA, 589 bp, Homo sapiens
gatggactggttggaacatctgtgtggcagtgtgtgaactgtaagatcctgagatcacagacacgcatgagccaaattgaccttataagtaggatgcttcttttttccttcacttctgtcattttctctaaatggtgacaatacatacatgtcccatgaagcttcacttttttttctgaattgatccccaacaaaataargctctaaaaaataagtggtgtcctagacattgtaagccccctaaaatgacctagttaagtgaagatatagctgagatgcctgtggccagatactatggaattattggagtgatttatgctcgcatcttgggtgtctgttcttttttaaggaattcacttactctgatagaccatccaggatgtttgttagtaggcacaccctccaattttgaagtgctggggaggagatatggtcattacaaaagctgcttagagcaaagagtggtaattttgtgtgtgttgaatgtgggtgtcttttgaacactgaaagactacctaatgtcatgaaaagacaagtgacttgttaaaggaatggagctctcttcccctggggtactactagcctgtat

SEQ ID NO: 877080 - DNA, 642 bp, Homo sapiens
gtgttctgtgcaaatgttagttatccttacaccaagggagagaaataattcagaagttagatatcaatgggaagtaaatatccaaaaaaagagtaaagatgtaataagcaaagtataaggcaacctcaagttcctggaacctaagtaactttatcaagcattcctgtgccttcattcagagtccttctggrttaaattttagtaggaaggaaaggaaggctcaggtgtttcccaggctctgactaggtatatatcagtctcagcagtcagtaagactatccaaatgcaaacacatgattttcttgacattgagctcatctacttcaaggcagaacttggattagacatcaggaacaacatgatgaacccccttttagccagagagtgaacactttaagtagagaaatgtgccgtctaaatgacttcccttgtgttctggaaataaggcatcctgacattgtcaaacagaatagtaagaagacgatctgggagctcgctgtttcctcctctgcttgagcctggattgtgtcctgttagtgtgtctcgaatctgttctatccaacgctcatttgcagaaaccacatttgtaaataaaagcagattagagcaatttaaaggtcagtggcaaagctgaaatataac

SEQ ID NO: 877081 - DNA, 605 bp, Homo sapiens
ctcctatatatagtctatatatacatatatagtccttctctagaaatacatacaaaatatcagttcagtcttccccaatatgactgaggtagtcattcttattatccccttcttaaaaatgaggatcctgggccgggtgtggtggctcacgcctgtaatcccagcactttgggagaccaaggtgggtggatcacctcaggtcaggagtttgagmccagcctggccaagatggtgaaactctgtctctactaaaaatacaaaaattagctgagcatggtggcagatgcctgtagtcccagctgctcaggaggctgaggcaggagagttgcctgaacccgggaggcggaggttgcagtgagctgagatctagccactgcactccagcctggtgacagagcaagactccaaaaaaaaaaaaaaaaaaagaggattctgatatttaaagtagagagataaactatcaaaagttagagagatagttcaggatggaactaggtcttgtcaaagtaaccaatatcctctgggtgggctcaaagttgtcactatgactcttacaagaaaacaacagcaagggggtcagagtcagagatgaagctggaatggtg

SEQ ID NO: 877082 - DNA, 605 bp, Homo sapiens
ctcctatatatagtctatatatacatatatagtccttctctagaaatacatacaaaatatcagttcagtcttccccaatatgactgaggtagtcattcttattatccccttcttaaaaatgaggatcctgggccgggtgtggtggctcacgcctgtaatcccagcactttgggagaccaaggtgggtggatcacctcaggtcaggagtttgagaccagcctggccaagatggtgaaactctgtctctactaaaaatmcaaaaattagctgagcatggtggcagatgcctgtagtcccagctgctcaggaggctgaggcaggagagttgcctgaacccgggaggcggaggttgcagtgagctgagatctagccactgcactccagcctggtgacagagcaagactccaaaaaaaaaaaaaaaaaaagaggattctgatatttaaagtagagagataaactatcaaaagttagagagatagttcaggatggaactaggtcttgtcaaagtaaccaatatcctctgggtgggctcaaagttgtcactatgactcttacaagaaaacaacagcaagggggtcagagtcagagatgaagctggaatggtg

SEQ ID NO: 877083 - DNA, 605 bp, Homo sapiens
ctcctatatatagtctatatatacatatatagtccttctctagaaatacatacaaaatatcagttcagtcttccccaatatgactgaggtagtcattcttattatccccttcttaaaaatgaggatcctgggccgggtgtggtggctcacgcctgtaatcccagcactttgggagaccaaggtgggtggatcacctcaggtcaggagtttgagaccagcctggccaagatggtgaaactctgtctctactaaaaatacaaaaattagctgagcatggtggcagatgcctgtagtcccagctgctcaggaggctgaggcaggagagttgcctgaacccgggaggcggaggttscagtgagctgagatctagccactgcactccagcctggtgacagagcaagactccaaaaaaaaaaaaaaaaaaagaggattctgatatttaaagtagagagataaactatcaaaagttagagagatagttcaggatggaactaggtcttgtcaaagtaaccaatatcctctgggtgggctcaaagttgtcactatgactcttacaagaaaacaacagcaagggggtcagagtcagagatgaagctggaatggtg

SEQ ID NO: 877084 - DNA, 598 bp, Homo sapiens
caaaccagtgacatcccaaatctgtttctttcttctatgatcttgggtttcactgtcaaaaatggcaaccacaggccccatattgctattgggcactttaaatgtggccaatgagactgagaaacttaatttttatgttatttgrtttatatttaaatttaaaaaaggaacacatttagttttaggaaatcttcaagtttttttttgttttttacttttttttttcttttttagagacagggtcttgctctgtcactcaatctggaatgcaatggcatgatcatagctcactgcaacctcgacctcctgggctcaagccatctccccacctcagcctcctgagtatctgggactacaggtgtgtgccaccgtatctggttaattaaaaaaaaaaaacttctattttggagaggcaggggtctcactatgtttcccaggttggtctcaaactcctggcctcaagtgatcctcccaaggcactggaattacaagcatgcacccagcctcaagtattattttgaatactatgtttgtggatccgcttttctgaactgtaaattttgtaaaatttcaataaagatcaagcatctgtgctgaa

SEQ ID NO: 877085 - DNA, 598 bp, Homo sapiens
caaaccagtgacatcccaaatctgtttctttcttctatgatcttgggtttcactgtcaaaaatggcaaccacaggccccatattgctattgggcactttaaatgtggccaatgagactgagaaacttaatttttatgttatttggtttatatttaaatttaaaaaaggaacacatttagttttaggaaatcttcaagtttttttttgttttttacttttttttttcttttttagagacagggtcttgctctgtcactcaatctggaatgcaatggcatgatcatagctcactgcaacctcgacctcctgggctcaagccatctccccacctcagcctcctgagtatctgggactacaggtgtgtgccaccgtatctggttaattaaaaaaaaaaaacttytattttggagaggcaggggtctcactatgtttcccaggttggtctcaaactcctggcctcaagtgatcctcccaaggcactggaattacaagcatgcacccagcctcaagtattattttgaatactatgtttgtggatccgcttttctgaactgtaaattttgtaaaatttcaataaagatcaagcatctgtgctgaa

SEQ ID NO: 877086 - DNA, 594 bp, Homo sapiens
acacattcatacgcatgtacatggctataatttatcaactaacattaatactaatacaatcaggaaattttatttcaaacaaatgattctaatccttgctaatataatgcagaaaatagctcattatttaaagtactgtttagttcctargttctgttatgattaaaataaacactgcatgattctatctgtatgaggtatctagtcaccaaacttatagacacagatagtagaatggtggtttctagaggctaggagtgggagaaaatgcgtagttgttcaatggcataaaatttcacttatgcaagatgaataatttctagagataagctattaactatagtacctatagttaccaatatagtattgttcactttagagtattaggataggttgcatgttaaatattcttaccacaaaaaagataaataaataacacatacacacaaaaaagaatatgagaaaatttttggaggtgatgaatatgtttgttatcttgattttggtgacagtatcatggatatatgcatatgtcaaaattagtcaagatgcacatattaaatgtatgtagtgtttttggatatccattgtatc

SEQ ID NO: 877087 - DNA, 638 bp, Homo sapiens
tgtgtgagggacctaagctgcaagctccttatgataacctaatgcctgatgatctaaggtggagctgaggtggtgatatgagcaatggggagcagctgcaaataaagattaacattagcagacaggtttcactgaacagagaccataatacgtcaattgcttgcagactcatatcaaatccctattagtgactggcaagcgacaagctacatctggtggcaggatttaagtcagaatytgacacttattttagtccacatgtggtccactcattattttatttaccacttccatctatacctttttctcacactatgcacttgtctcagtcacggttttggtaaacccacaagctaaccctagccaaaatgagttaaaatcaaacattactggaaaactttgaaaagggggaagagccaatgatgagacagcagaagactctaagactgccaacaaaaatctgcatttaaaataaaataccaagagtcctacttaaatcatgagttcattgctacaggcgattcactttctccaagcccactttgtataatatgtggcaaccagctatccaacaaaggcatgaaaccttcaaaactgcttccccagttggagaccaagcaacctgcattaaaatacaa

SEQ ID NO: 877088 - DNA, 622 bp, Homo sapiens
tccttattctattatttcagttttgtgcctctgtttttttcataattctgccatcattttattttattcttcatatatatgaactgtatatagaatatttatatctcattattaggaaagtttatttgggtaagagtcctgttaaatatctctggtttttagttaagtcttttgaaacattatgccttggaagtaaagtcaaatcaaaatagaccaggctttacagagaattaaacacagcttcaaataatcatacttcttctaaatgcctgccagaaaaacaatatatcctctttggatgaaaagaatactatcttcaaaactttgttttttgtttttgtttttattttttaatacacaatgtctctcatttaatcaaaaattattgaatgtgtcagaaaacaagaccaagtcactgaaagcaagagaaagaattcaccagaaatatatcaaatatatcaaatktatatattggagttatcaagcacagattttaaataactgttattaatacatttgagaaaatagcaagatagagaatttcactaaaaaactagaatctatagaaaaaatcacacataaattctagaaaagaaaatcaaaataactaaaattaataact

SEQ ID NO: 877089 - DNA, 640 bp, Homo sapiens
ggactcatctcaggaaattccacaaattatacattcttgttttagttctagaaaatgtgatttttttccaaggttagggcaagaatgacaatgttgtttgagggtgttaacatctaaaagtgagcaatttgtacaatttttatttgtttattgttacttaggtattcttttttatttcatgtgcttttatttctcattttcctttcactgaaatgtccccttatgtaattctggaaagaaaatgtaagcttgkgtttctttttttttttttttttttgaaacggactctcgctcttgtcacccaggatggagtgcaatggcgtgatctccgctcactgcaacctctgcctcccaggttcaagtgattctctagcctcagcctccccagtagctgggactacaggcgcctgccaccatgcctggctgatttttatatttttaatacagacagggttttgccatgttggccaggctagtctcgaactcctgacctcaggtgatctgcccacagcctcccaaagtgctgggattccaggtgtgagccactgtgcccagctgagcttgtgtttctaattagtgaaaaaaactacttgtgagaaaaaaattattctgtgattatatcagctccaatctgatataa

SEQ ID NO: 877090 - DNA, 602 bp, Homo sapiens
ggaaactaaatatgacaattttctaataaagcgaacaacttgttcctagctcaccagtggtgagtggaggttccagcagagccattcctgactcttgatccatggacacggtatgataatcaatgtgtgtgttgttttcaggcactaggactgtagtaatttgtaacttktcaatagaaaactaatgttctgaggtattatatccaaatataaataaaactaatatccaatccctgctttccaaagaaatatgtaagaggcaatggaaggaaaatggaaaataaacaccccctccaccacacacacacacacacacacacgcacacgcagacacagacatacacacacacacaaactcttacaatagatgtctaacttggaaagaggtgagaaaacagctactttgatcagttccaaatggaaagataacaatttccacaaaaatcttaaccaccatgactatgtctgagttcaagcagagccaaagaaaatctacagttttaaattagaatgaaaaagaggaaaacaaataaacacaattagaaataataaagggaatgttactactgaccccacagaaatgaaaacaagcatcaaaaact

SEQ ID NO: 877091 - DNA, 648 bp, Homo sapiens
tttaagcctaagaaacgttattcattatgatttggtctttaaataaatcacgaaggtagagagtagagcacaccccatgaatgcactgaggtgccgtaagtctccaacgccagaggtggcaggttggaatttagttcaatcacgaatttgttatgagaactctgacaaccttcagctytaaagtaagcttggaaacacaaagaaactctgcgaaaaatactgaacacagacacacacacacacactcctctcttttaagactggcataaaagatgtaagtgtaccaacaagcaacctccaaagagcaaatgaaacagaaaattcaaacgagtgcctggtaggagttgtaacttcaacaaagtgcctctcatatctgcctcataaacccgtactcatttttcacaactaactcacatagcaccccctcagtgacacctttcctgttctgcctaccagatatatctgcagacctagggtatcttctcgtccagaacacagggcatctcatacagggggctctatctacagggggctctatgctttgacaggaactgtgaacctatgggcagcagttttttcaattcatgtttgtggctctcattacaaatgtcctgcctcaggcacccagcaggtggtaataaatgctgg

SEQ ID NO: 877092 - DNA, 636 bp, Homo sapiens
tgtcttcaggcaaaggacagaaaggaacaattcttaattctacggcctactgcaaataatacttggagcctcagtttccatagctttctggcagctgaccggtcctgataaagaaatgtcttttagacagcttcaccagatgactaaactgagcaatcataagtcawaaattgatcagactccaggaactgaatcttggggttctgtgtaatctgaagaactctgtagtctatgacaacgactgccatttacagagaaattgaaaaagtctggcaaatttattaattttctccctagccattaaaaagctgataaccttgggtaaattagattggaaattttgtcattctcctctctggattaacatgtggcttagtataaaacccaaacagatagggttgcacctttgcttcctcagttggggcctacacaattgctctagaattcttatagcactctttgactaaaggcttgaagtcttagttcagtgctcatcaaaagtaaatgagcatgagactcaccctggaatcttgttgaactgcgcattcagtaggtgtgaggtggtgcctggagttctacatttctgacaaactcccaggagaagttacagcgagagcaatacttagtccactaaat

SEQ ID NO: 877093 - DNA, 611 bp, Homo sapiens
ataatgctaatggcatttcattattaattccattaatccacatcaaaaatcctatggaaggcaaaattattttttgtttttgccaatgagaaacttgaggcaaagaaagcttaaacaacttgctgaaagtcaaacttagagctaaacagccgtgctataaataatctcaactatatcagaaaaataagtgtgtatgtgtgtgtgtgcacrtgtgtgtgcatgtagacaaagagaaagtgcacatacacaaatgataaagcaaatggaatattaggaggctgagctgggcaaagagtatataagtgttctttgtattatcactatttaatttttccgtttgaaattatttctaaataaaaatctttaaaaaacctgaccaattctgaaatatctatttctttccatatacatatttagaaatgaaagctatattgatacaaagaaaatcttatatttaaaattttatggaaagaataaatgccatattttagatatcataaataataattttaagaaatgaaagctccagagaatgagaagataaaacacagactcggagagaatatttgcaaaagacttatgtaataagggactgttatccaaaacataca

SEQ ID NO: 877094 - DNA, 556 bp, Homo sapiens
aaagtgggcaaaggatatgaacagacacctctcaaaaaaagacatttatgcagccaaaaaacacatgaaaaaatgctcatcatcactggccatcagagaaacgcaaatcaaaaccacaatgagataccatctcacaccagttagaatggccatcattaaaaagtcaggaaacaacaggtgctggacaggatgtggagaaataggaacgcttttatactgttggtgagactctaaactagttcaaccattgtggaagacagtgtggcaattcctcaaggatctagaactagawataccatttgacccagcgatccaattactgggtatatacccaaaggattataaatcatgctactataaagacacatgatatgtatgttggttgtggcactattcacaatagcaaagacttggaaccaacccaaatgtccatcagtgatagaatggattaagaaaatgtggcacatatacaccatggaatactatgcagccataaaatgaatgagttcatgtcctttgtagggagatgaatgaagctggaaaccatcattctaag

SEQ ID NO: 877095 - DNA, 483 bp, Homo sapiens
tttcttccatgattgtaagtttcctgaggcctccccagctatgtggaactgtgagtcaattaaacttcttttctttatgaattatccagtctcaggcagttctttatagtagagtgagaccagactaataaagtaaattggtaccaggtattggggcactgctgtaaagatacacaaaaatgtggacgtgactttggaactgggtaacagtaagagattggaatcatttggagggctcagaagaagrcaggaaaatgtgggaaagttgaaacttccttgacttggagggctcagaagacaggaagatatgggaaagtttggaacttcctggaaacctgttgaaaggctttgaccaaattgctgatactgatatgaacaataaagtctgggttgaggtcatctcagatggagatgagaaacttattgggaactggagtgaaggtcattcttgctatgcaaagagactggtggcattttgcccct

SEQ ID NO: 877096 - DNA, 469 bp, Homo sapiens
gtagccctcatgtccagatgttttcttgccgtgttaccttaatatgcacatttttgctgcctgttctggaagttcacaatttggaacctggggtacaggaaggggagtgatctttttgttgatattgttatctacatgtaagaatctgtgcgaaagagctttataaattgcagattttatattgagtgggcaaactgtttttaggtaattctaactataaaatataaaatttctaaaaatcaacagacttccttcagagtttaagttgcttataaaattagtttgttggcagttatccacgtcagtccatttcataaggtgtsaaaatattttcttcttcctctttttcttgcctaatgttacttgattttcatctatcctgttgaatagttgtttatttttgtgattttctactcacattaacaaaacaggatagataatgaaaatatcatctgaagttcattcatta

SEQ ID NO: 877097 - DNA, 516 bp, Homo sapiens
tgttttttgactttttaaatcatagccaatctgactggtgtgagatggtatctcattgtggtttgatttgcatttctctgataatttgtgatgttgagcattttttcacttttttttgggttcttgaatgtctccttttgagaagtgtatgctcatgtcttttgcccattttaaaatggggctgtttgttattcctcattcaattgtttaatttccttatagattgtgaatattagacatttgtcaggtgcatagtttgcaaatattttctcccattttgtagattgtctgtttactctgttgatagtttcttttgtygtgtagaagctctttagttcaattaggttctacttgtcaatttttgtttttgttgtaattgcttttgaggacttagtcacaaatttttccccaaggttgatatccagaaaggggttccccagatttttctccaggattggtatagtttggggtcttacatttaaatatttaatctgtcttgagataatttttatacat

SEQ ID NO: 877098 - DNA, 679 bp, Homo sapiens
tcaacccgtcatctaggttttaagccccacatgcattagccatttgtcctaatgctctccctaccctttcccgctaacccccgactggccccagtttgtgttgtttccccccttgtgtccatgtgttctcattgttcaactcccacttacgagtgagatacatggtgtttgattttctattcctatgttagtttgctgaggatggtagcttccagcttcatccatgtccttgcaaagtacatgatctcattcctttttatggctccatagtattccagggtgtatatgtaccacttttcattatccagtctatcattaatgggtgtttaggttggttccatgtctttgctactgtaaatagtgctataataaacatatgtatgcatgtgtctttgtaacggaatgatttatattcctttgggtatatactcagtaatgggattgctgggtcaaatggtatttctggttctagatccctggagaattgccatactatctcccaaaatggttgaaataatttacattcctamtaactgtgtaaaaacgttcctgtttctccacagcctcgccagtatctattacttcttgactttttaagaatcgtcattctgactggcatgggatggtatctcattgtggttttgatttgcatttttctaaaatgatcagtgatgttgag

SEQ ID NO: 877099 - DNA, 499 bp, Homo sapiens
ccctcagtctgaatttcattgcccatatcattattagcattttggtcaaagccattcaccaagtctctaggaggtagcaaactttcccatgtcttcctgttttcttctgaccacttcaaactgttccaacctctgcctgttgtccrgttccaaagttgcttccacattttcaggtaacttcacagcagcaccccactcctggtgccaatttactgtattagtcccttctcatactgctatgaacaaatgcccaagactgtgtaatttataaataacagacatgtaattgactcacagttcctcatggagggggaggcctcaggaaacttacaatcatggtggtagctaactcttcacagggcggcaggagagagaatgagtgtcaagtgaaaggggaagcacctcataaaagtatcagatctcatgagaactcattcactatcatgagaacagtatggcggaaactgtccccataattcaattatctccacctgttccc

SEQ ID NO: 877100 - DNA, 793 bp, Homo sapiens
cacattatgttacatataattataattattaattatgtcacatatttctgtgacataattaattcactgaatattcccattcatattgtccttatgttgatattatggttaacaacttaagtctttcatatttcccactggagtatataaagtctgtgaagaatctatgcatctggaatttttgtaattctcaatgtgatttgcttatacttagtaaagtaaggttgaatgtggtataaatttataaactaatttaaaaataataaagaagwtacttggtaacttctcagattatacagtattatatttgattattataatcactttttttaagaaatgaggaagattagaccctggaagcttaaaagactttctcaacattaattatttaggaaacaacctttatattctagtggaatgtttttatgaactacaccgagggctttccactttacctaagctgttgtcaactctcttacacatgttcagtcaatatgaataaaaagaactatctgctttgtatttgccattattatttcctgctcattcttgaaaaaaatgaaagtattcttatcagtgaattgaaaaaagcatcatttatcagtggaatagacatggagattataaagcctctctactaagcacagagaataaactcttctccactttccattattacatacataatttatgcttgagggatttttgaatgaacgataaaatttgtaagaaaaatgtctatgacatttgtaataagttgtgcttgcatcaactgcagtgtctgtttcatctc

SEQ ID NO: 877101 - DNA, 582 bp, Homo sapiens
catttatgtattacttggattagtattgcaaaaaatatgaaattaaatagtgtataccctggacacttagcaccattcacacaaatgttgcccaggaggtctgcagcatagttaactctaaatttattcagctcttctgccttcttatataaaatagcacttctttcaagctgaattatctttttgtgtcttaatatggttcttaacttctttcattacctgccattatatttattatataacataatgtgaatgtaaggattttattattttatataccactacctgtccaatacctaaaatagcacytagagtacagtaaagattcactaaataactgttaaatgagtgaatacattaatgaaagctttcagagacctccctctttattcttcattaacttccatcactattagagcaaggacccaattttgcagttaataaattagatgaaatctagaagacagaattgtgggtggaagggaaacattctcaatatcattgctgatctttgaaattttgaagacatatcttcacatattttagaatggctataagtctttaataaatgaagttcaaata

SEQ ID NO: 877102 - DNA, 590 bp, Homo sapiens
ttttaccaactatccaagcatactaagctcggtcatgttgacatacaaacttcaccatctcaaggtcaagttcaaattcctattccactatttgtgtgacttttggcaatttacataatctgtattaatcctcctacattttaacaggaagaaaagagaaggaaggataagacaaaaaatacaaatatcgatagatttgtgttatatcttttggatattgaaatagttcacatctatttgtttagtttttatttttgctttttactgtgaagtagtatataaaatcattttttgagaaagaaataagatttattggaggtttgatgatactttaggaggatttaacacttgcaaaaagtgaaaaataaaaacattcaggcaaatatacttgttcagtgggatcgacrgtctagttaagactgttaagaatctagagttgtaaatatgctcaattaagtatatagatgttaaataataatatatgttaaatattcttacagtatttatattatatcataaatgctcagccggccaattgtgggcaagacaatgtagatagttggattatccaggcttagcgttttgttatg

SEQ ID NO: 877103 - DNA, 617 bp, Homo sapiens
ttcaattcctgggtatccatgttaactttgtgtctcattgatctgtctaatgttgacagtggggtgttaaagtctcccattattaatgtgtgggagtctaagtctctttgtaggtcactcaggacttgctttatgaaactgggtcctcctgtattgggtgcatatatatttaggatagttagctcttcttgttgaattgaataaatacttaaacgttagacctaaaaccataaaaactctagargaaaacctaggcattaccattcaggacataggcatgggcaaggacttcatgtctaaaacaccaaaagcaatggcaacaaaagccaaaattgacaaatgggatctaattaaactaaagagctcctgcacagcaaaagaaactaccatcagagtgaacaggcaacctacaaaatgggagaaaatttcgcaacgtactcatctgacaaagggctaatatccagaatctacaatgaactcaaacaaatttacaagaaaaaaacaaacaaccccatcaaaaagtgggcataggacatgaacagacacttctcaaaagaagacatttatgcagccaaaaagcacatgaaaaaatgcccaccatcattggccatctgaaa

SEQ ID NO: 877104 - DNA, 617 bp, Homo sapiens
ttcaattcctgggtatccatgttaactttgtgtctcattgatctgtctaatgttgacagtggggtgttaaagtctcccattattaatgtgtgggagtctaagtctctttgtaggtcactcaggacttgctttatgaaactgggtcctcctgtattgggtgcatatatatttaggatagttagctcttcttgttgaattgaataaatacttaaacgttagacctaaaaccataaaaactctagaagaaaacctaggcattaccattcaggacataggcatgggcaaggacttcatgtctaaaacaccaaaagcaatggcaacaaaagmcaaaattgacaaatgggatctaattaaactaaagagctcctgcacagcaaaagaaactaccatcagagtgaacaggcaacctacaaaatgggagaaaatttcgcaacgtactcatctgacaaagggctaatatccagaatctacaatgaactcaaacaaatttacaagaaaaaaacaaacaaccccatcaaaaagtgggcataggacatgaacagacacttctcaaaagaagacatttatgcagccaaaaagcacatgaaaaaatgcccaccatcattggccatctgaaa

SEQ ID NO: 877105 - DNA, 589 bp, Homo sapiens
tatttcttgtcttctgctagattttgaatttgtttgctgttgcttctctagttcttttcattttgattttagggtgtcaattttagatctttcctgttttctcttgtggacatttagtgctataaatttccctttacacactgctctaaatgtgtccagagatcctggtttgttgtgtcttcattctcattggtttcaaagaacatctttatttctgccttcattttgttatttacctagtggtcatttaggagcaggttgttcagtttccatgtagttgtgtggttttgagtgagtttttaaatcctaagttctagtttgattgcactgtgatctgagagactgtttgttatgatttctgttctctacatttsctcaggagtgttttacttccaattatgtggtcaattttagaataagtgcaatgagatgctgagaacaacgtatattctgttgatcttgggtggagagtgctgtagatgtctattaggtctgcttggtccagagctgagttgaagtcctgaatatccgtgttaattttctgacacattgatatgttgtgttaaagtctcccactattattatgtgg

SEQ ID NO: 877106 - DNA, 573 bp, Homo sapiens
tgtctgtagcttttttcattcttttaacagtcttttacagagcaaaggtttttcattttgtagaagtacaatttatccagtttttttaatggactgtgcttttaatgttatatcgatgaacactttgcctaagtcaaagtcatgaagattttcttgtaagtttttctttttcagagatagggtcttgctctgttgttcgggctagagtgcagaggtgtgatcatggctcactacagctatgatcactctttattattttcttccttctgcttgtttttatgttcatttgcttctctttttcttttcttctttttgagatrgagtctcgccatttcgcccaggctggattcaagctcctgggccaaagattctcccacctcaggctcccgagtaaatgggactataggcacaccaccgcactcagcttgctcctctttttctaagatagtttctcaagacagaagcttggaatatttatttgagaatttctcctccaaatataagcagtggatgctataagtttctttctgatagaaagaatataatttttaagccaggcacagtggcatgcac

SEQ ID NO: 877107 - DNA, 678 bp, Homo sapiens
attaataaaagaagaaactttaattaccatcacttctgttagaagatgttcaaacccaaaaccattacccacagtaatcagagaaatgcaaaataaaacaagaaaccatcactttacacccatcagaatgcccccycaacgagaagttattctgtggacatgagaagaaacaggaatttccatgtactgccggtggatgcacagcctggtgggtgtgtagcctggagcaaccttccgaagaacaatctggtgacgttggtcaaatcaagtatgtgcatgccctgtgccttgggagttttactaatgggtctataccccaaagaaactttcaaactgaaagcaaatatatgaggatgctcattgcagcatttagtgggcattggaagcaagcaacatagttgtctatcactgtgagttaatagagataaaaaagttccatgtcatgggatgcacactctgtatgtctctatatagcaaaatagaacttatgcgaatatgatgtacatacacataacactatgcatattaaaatactaactaaagattcagttatgcatattggaagcattagggtggtggtctgcaaaggaaggaaaggggaatggaattatagaccaagtgcaaaaaagaataaaccaatatccgagtgtgaggcctggcatgaatcaaagatgtggt

SEQ ID NO: 877108 - DNA, 607 bp, Homo sapiens
atggcagtggccacattaggactgtaatagtggcagcagagaaaagtggaaggattgtagatacattttagagaaatattccacagaatttattccttgagtggttttaggatttaagtaaaaaataaaaatgaagaatcactcctagattttgggcttgggaaactaataggtaatgatccaaaatacttagatggggaaagcttgaggaggagcacatttggcaatggatgatgatattaatagcactatttgggtcatgttaagtttaagatttctataggaaattcaaatgcatatgatgggaaggtagtgggatataagaggatagagtccagcaaagaggtctgggctaatgatttaaacttggcagtctttagcatactgatgttatttcaagtgattggattacatattttcayctaaggtaaaaatgtaacaatagaaaaaaggagtcaaggtctgagcccaaggtaatctaagatttccttagatggcaataaaagaggctacagctcacaaagataaccttacggaagcatgtagtgaaggaagtgaaggaagaaaaacaaggtaagtgtggttaggagtaatgtcagcaagatgg

SEQ ID NO: 877109 - DNA, 615 bp, Homo sapiens
tttctacctttctttggggctgtgatggagagagtatgctgttttccacatgagtttgcttggcagataggataattcatgctgcaggactagcattagcagcatttctttgacatactcggatgagtcataggagagaagacagacactgttcccatgatgtcaccacccctccctgacctccccaaggagacacaggaggaaaacgcagtttctgtgtgttgactacttgaaatagccaaatggggaaaattgcatttgaatgagtgtsataccatgtgtgtaaggtctcagagtctatgtgagaatctttaaccaaagactcacttagctaagaacaaaccctggtctttgtgggtcaacattcatatggttcgagttcagaacctccttttgcctcagtaagccagataacacagaaatggactgacattgtgttctttccctgtattatcttcactttgttaaaaaataaggaactcctgcattttttttctgctcatcttttccttcatctttcaaaatttattggatgtaggctaatcctgatagaaaatatcattgaccactgataagcagaagtaattgatagcatgcattcacatcccatctctg

SEQ ID NO: 877110 - DNA, 611 bp, Homo sapiens
agaaatggggagagtataagcaaaccaggaggctttgtttgttttaaaatgtttgctttatccagatccttatacttaaagatctgacatataacaacaacagaaaagtatagttattggctccatttaaaaaatatattattataaggctctgatttcagagcctcagtcgttcattatggagttgaaggctgggagtaaggagcagtgaaygtttaggaggccgtatacctgatctgggcaaagcatagtaaggacattctgagcacagatatgaaaacttatggagtacaatgggcaggcagtggggttagaaatagcatatgaggaaatgacaagaaacttgttcctcctttggaagataaatgatttgaagtctgtatattagaagagccttttaatatttaatatctccttctcctaaacaggccagaaaagtgacaacgagaatgtgctgaaactttaagtgcctcctgatagtgtgtgtgtgtgtgtgtgtgtgtgtgtgtgtgtgtgtgtgtttatgcattatggcccaagtgggaatatctgtttaattgcagtctggttgtcctgttattggttagacaagacatacccaaacatagaga

SEQ ID NO: 877111 - DNA, 539 bp, Homo sapiens
ctctctttggattgagcaatttggatacagtatttttgtagaatccgtaaaggcatatttttgagagctatgagacctaagatgaaataggagatatcttcacataaaaactaaacagctttgtgagaaacttctttgtgatgtttgcattcatctcatagagttcaaccattcttttgattgaacagtttggaaacagtctttttgtagaatctgcaaagkgatatttatgagtgctttaagacctatggcgaaaaaggaaatatattcacataaaaagtataaacatggtttctcagaaacagctttgtgatgtatgcactcgtctcacagaggtaaatgtttcttttctctggtcagtctggcaactgttctcgtagagtctgcaaagggatatttgtgagcgctttgaggcctatggtgaaaaaggaaatatcttcacataaaaattagtgagaggctttctgagaaacctctttgtgatgtgggcattcatctcacaaagatgaaacttacttttgattgagcagtatggaaac

SEQ ID NO: 877112 - DNA, 670 bp, Homo sapiens
ctggatatcaatgcttttttggccaaataccttacaaatatgttttccctattggtgcactgtattagtccattttcacactgccgataaaggcgtaacccagactgggaagaaaaagaggtttaattggacttacagttccacatgacggaagaggcctcagaatcatggtgggaggtgaaaggcacttcttaaatggcagtggccagagaaaaatgaggatgatgcraaagtggaaccccctgataaaaccgtcagatctcgtgagacttattcactaccaggagaacagaatgggggaacggcccccatgattccaattatctcccactaggtccctcccaggacacaggagaattatgggaagacaattcaagatgagatttaggtggggacacacagccaaatcatatcatgcactgtctttgtcttttaactttattcatcgcctcttttgtcagatcaaagcttctacatttaatacaactgaatgaatttatcagtaatttattttacggtgtctgtgttttgtgtcatataaaatttttctctctgcttagtgtcataaaatatgtcctctgttttcttctaaaaattggaaatctacttttcatattttatttcctttgttattttatttgtagggatgtgaggtagaaatctctattaa

SEQ ID NO: 877113 - DNA, 670 bp, Homo sapiens
ctggatatcaatgcttttttggccaaataccttacaaatatgttttccctattggtgcactgtattagtccattttcacactgccgataaaggcgtaacccagactgggaagaaaaagaggtttaattggacttacagttccacatgacggaagaggcctcagaatcatggtgggaggtgaaaggcacttcttaaatggcagtggccagagaaaaatgaggatgatgcaaaagtggaaccccctgataaaaccgtcagatctcgtgagacttattcactaccaggagaacagwatgggggaacggcccccatgattccaattatctcccactaggtccctcccaggacacaggagaattatgggaagacaattcaagatgagatttaggtggggacacacagccaaatcatatcatgcactgtctttgtcttttaactttattcatcgcctcttttgtcagatcaaagcttctacatttaatacaactgaatgaatttatcagtaatttattttacggtgtctgtgttttgtgtcatataaaatttttctctctgcttagtgtcataaaatatgtcctctgttttcttctaaaaattggaaatctacttttcatattttatttcctttgttattttatttgtagggatgtgaggtagaaatctctattaa

SEQ ID NO: 877114 - DNA, 686 bp, Homo sapiens
gacgcaataaaaaatgataaaggggatattaccaccgatcccacagaaattcaaaccaccttgagagaatactacaaacacctctatgcaaataaactagaaaatctagaagaaatggatacattcctcaacacatacaccctcccaagactaaaccaggaagaagttgaatctctgaatacaccaataacaggctctaaaattgtagcaataatcaatagcttaccaaccaaaaagagtccaggatcagatggattcacagccgaattctaccagaggtacaagaaggaactggtaccattccttctgaaactattccaatcaatagaaaaagagggaatcctccctaactcattttatgaggycagcatcatcctgataccaaagcctggcagatatacaaccaaaaaagagaattttagaccaatatccttgaaggtcgttgatgcaaaaatcctcaataaaatactggcaaaccgaatccagcagcacatcaaaaagcttatccaccatgatcaagtgggcttcatccctgggatgcaaggctggttcaatatatgcaaatcaataaatgtaatccaacatatacacagaaccaaagacaaaaaccacatgattatctcaataggtgcagaaaaggcctttgacaaaattcaacaacgcttcctgctaaaaactgtcaataa

SEQ ID NO: 877115 - DNA, 614 bp, Homo sapiens
aatgcacacatcacaaagtagattctcagaatgcttctgggtagtttttatgtgaagatatttcattttccaccatacgcctcaaagcgctccaaatatccacttgcagattctgcaaaaagagtgtttccaaactgttcaatcaaaagaagggttcaactctgagataaatgcacagatcacaaagaattttctgagagtgcttctgtgtagattttatgtgaagatatttcctttccacaatagaccacaaagcgctccaaatatgcacttacatttaatacaaaaagactgtttcaaaacagctcaatcaaaagaaaggttcaactccgtgagatgaatgcacacatcacaaagaaggttctcggaataattctgtgtagtttttatggaaagatatttccttttccaccatyggccacaaagggctcaaatttccacttgtagagtctacaaaaagagagtttcaaaactgctcattcaaaagataggttcaactctgtgagttgaatgaacacaacacaaagaagtttttcagaattcttctgtgtggtttttatgtgatcatatttccttttccaagataggcataaaatctctccaaatatcccctt

SEQ ID NO: 877116 - DNA, 614 bp, Homo sapiens
aatgcacacatcacaaagtagattctcagaatgcttctgggtagtttttatgtgaagatatttcattttccaccatacgcctcaaagcgctccaaatatccacttgcagattctgcaaaaagagtgtttccaaactgttcaatcaaaagaagggttcaactctgagataaatgcacagatcacaaagaattttctgagagtgcttctgtgtagattttatgtgaagatatttcctttccacaatagaccacaaagcgctccaaatatgcacttacatttaatacaaaaagactgtttcaaaacagctcaatcaaaagaaaggttcaactccgtgagatgaatgcacacatcacaaagaaggttctcggaataattctgtgtagtttttatggaaagatatttccttttccaccattggccacaaagggctcaaatttccacttgtagagtctacaaaaagagagtttcaaaactgytcattcaaaagataggttcaactctgtgagttgaatgaacacaacacaaagaagtttttcagaattcttctgtgtggtttttatgtgatcatatttccttttccaagataggcataaaatctctccaaatatcccctt

SEQ ID NO: 877117 - DNA, 617 bp, Homo sapiens
agagttgatcccttctgttgattgagcagttttgaaactgtttttgtagaatctgcaattggatgttttgagtgctttgatgcctactgaggaaaagcaattatcttcatataaaaactacacagaagcattctgagaaacttctttgtgatgtgtgcattcatctcacagagtttaagctttcttttgattgagcagtttggaaacactctttttgtagaatctgcaagtggatattaggagagatttgagtcttattgtgcaaaagaaaatatcttcacataaatactacacagaagcattctgcaaaacttctttgttatgtgtgcattcaactcacagaattgaacctatcttttgactcagcagttttgaatctcccttttggtagaatctgcaagtggatatccggagccctatgtgccctagggtggaaaaggatatwtcttcacataaaaactacacagaagcattctgggaaacttctttgtgatgagtgcattcgtcacacagaggtgaacctatcttttgatttagcagtttggaatctctctttttgcagaatctgcaaggggagattttgagccctttgaggcctactttggaaaagcaaatat

SEQ ID NO: 877118 - DNA, 573 bp, Homo sapiens
cttctttggattgagcagtttggaaacaatccttttgtagaatctgcaaaggtatatttctgagcccattgaggcctatggtgaaatatgaaatatcttcccataaaaactagacagaaagtttctaagaaacttctttgtgatgtgtgyttccatctcacagagttgaacctttcttttgattgggaagtttggaaacagtctttttgtagaatctgcaaatggatgtttggagcactttgaggcctatggtaaaaaaggaaatatcacataaatattagaaggaagcattctgagaaacttctttgtgatgtttgcatccatctcacacagttgaacatttgtttgattgaagatttggacacagtctttttgtaaaatctacaaagggataattgtgaaccctttgagacctatggtgaagtaggaaatatcttcatataaaaactacacagaaacattctgagaaactttttttgtgatgggtgcattcatctcacagagttgaagctttcttttgctagagcagtttggaaacagtcttattgtagaatccccaaagggatatttctg

SEQ ID NO: 877119 - DNA, 788 bp, Homo sapiens
gaagcattccgagaaacttagtttttttgtgtgcattcatctgacagagttgaatctttcttttctttgagcagtctataaacagtctttttatacaatgtgcaaagggatatttctgagcggtttgaggcctatggtgaaaaagtaatatcttcacataaaaactagacagaagcattctgagaaacttctattttatgtgtgcattcacctcacagagttgaaactttcttttcattgagcagtttggaaagagtctttttgtagaatyttcaaagggatatttgtgattcctttgaggcctgtggtgaaataggaaatatcctcaaataaaaagacagaagctttccaagaaacttctttttgatgtgtgctttcatctcacagagttgagcccttcttttgattgagaagtttggaaacagtctttttgtggaatctgcaaatggatgtttggagtgctttgaggcctatggtgaaaaagtaaatatcttcacataaaaactagatggaagcattctgagaaacttctttgtgatgtgtgcattcatctcatgttgttgagcctatcttttgatatagcagattggaaacagtacttttgttgtatctgcagagggatatttgtgagcagtttgaggcctatggtgaaaaagtaaataccttcacataaaaactagacagaagcattctgggaaacttctctgtgatgtgcgcattcaactcacagaggtgaacctttctttagattgagaagcttggaaacagtccttttttagaatctgcaa

SEQ ID NO: 877120 - DNA, 620 bp, Homo sapiens
cagaagcattctgagaaacttctattttatgtgtgcattcacctcacagagttgaaactttcttttcattgagcagtttggaaagagtctttttgtagaattttcaaagggatatttgtgattcctttgaggcctgtggtgaaataggaaatatcctcaaataaaaagacagaagctttccaagaaacttctttttgatgtgtgctttcatctcacagagttgagccyttcttttgattgagaagtttggaaacagtctttttgtggaatctgcaaatggatgtttggagtgctttgaggcctatggtgaaaaagtaaatatcttcacataaaaactagatggaagcattctgagaaacttctttgtgatgtgtgcattcatctcatgttgttgagcctatcttttgatatagcagattggaaacagtacttttgttgtatctgcagagggatatttgtgagcagtttgaggcctatggtgaaaaagtaaataccttcacataaaaactagacagaagcattctgggaaacttctctgtgatgtgcgcattcaactcacagaggtgaacctttctttagattgagaagcttggaaacagtccttttttagaatctgcaaa

SEQ ID NO: 877121 - DNA, 788 bp, Homo sapiens
gaagcattccgagaaacttagtttttttgtgtgcattcatctgacagagttgaatctttcttttctttgagcagtctataaacagtctttttatacaatgtgcaaagggatatttctgagcggtttgaggcctatggtgaaaaagtaatatcttcacataaaaactagacagaagcattctgagaaacttctattttatgtgtgcattcacctcacagagttgaaactttcttttcattgagcagtttggaaagagtctttttgtagaattttcaaagggatatttgtgattcctttgaggcctgtggtgaaataggaaatatcctcaaataaaaagacagaagctttccaagaaacttctttttgatgtgtgctttcatctcacagagttgagcccttcttttgattgagaagtttggaaacagtctttttgtggaatctgcaaatggatgtttggagtgctttgaggcctatggtgaaaaagtaaatatcttcacataaaaactagatggaagcattctgagaaacttctttgtgatgtgtgcattcatctcatgttgttgagcctatcttttgatatagcagattggaaacagtacttttgttgtatctgcagagggatatttgtgagcrgtttgaggcctatggtgaaaaagtaaataccttcacataaaaactagacagaagcattctgggaaacttctctgtgatgtgcgcattcaactcacagaggtgaacctttctttagattgagaagcttggaaacagtccttttttagaatctgcaa

SEQ ID NO: 877122 - DNA, 649 bp, Homo sapiens
atagtgaaaaaggaaatggcttctcaaaaaaactagacagaagcattctgagagacttctttgtaatgtgcgcattcatcttatagagttaaaccattcttttgattgagctttttggaaacactctttttgtggcatctgtaagggtaaacttctgagcccattgagacctattttgaaatatgaaatatcttcaaataaaaactagatagaaagtttctaagaawctcctttgtgatgtgtgctttcatctcacagagttaaaactttattttgattcagcagtttggaaacactttttttatagaatctgcaagtggatatttggagctctttgaggcccatggtgaaaaaggaaatatcttcacatataaactaaacagaagttttctgagaaacttctttgtgatgtgtgcatttatctcacagagctgtaccgttcttttgattgagcaatttggaaacagtttttttgtaaaatctgcaaatggatatttggagcgctttgaggtgtatggtgaaaaatgaaacttcttcacataaaactagacaaaagcattctgagaaacttatttgtgatgtgtgctttcgtcacacaaagtttaacctttcttttcattgagcagtttgcaaacagtctttttgtaga

SEQ ID NO: 877123 - DNA, 611 bp, Homo sapiens
tggctcaacacttcaggaattagctttaaggttacatcttcagagaagtcttccttaaccttctaatctaaacaagttccccattatgctctcttaccatattctttagtttttcttcatagctcttgacatgattttaattataattttgttttggtggctacaggtttagtttgtgattctctggatattttcaccttagaaagtgtgactctcctggtcatccttgtgttcttggcatttagaatagtgcttgtatrtagaagggactcaggacattgtttgttttttgttttttgtttttttttttttttgagacagagtctccctctgtcgcccaggctggagtgcagtggtgcagtcttggctcactgcaacttctgcctcctgtgttcaagcaattctcctgcctcagcctcccaagtaggtggggtaacaggtgcctgccaccacgcccagctgatttttttggtatttttagtagagacggggattcaccatgttgaccaggctggcctcaaactcctgacctcagatgatctgcccaccttggcctcccaaagtgctgggattataggtgtgagccactgcgcccagcctcaggacatttt

SEQ ID NO: 877124 - DNA, 611 bp, Homo sapiens
tggctcaacacttcaggaattagctttaaggttacatcttcagagaagtcttccttaaccttctaatctaaacaagttccccattatgctctcttaccatattctttagtttttcttcatagctcttgacatgattttaattataattttgttttggtggctacaggtttagtttgtgattctctggatattttcaccttagaaagtgtgactctcctggtcatccttgtgttcttggcatttagaatagtgcttgtatatagaagggactcaggacattgtttgttttttgttttttgtttttttttttttttgagacagagtctccctctgtcgcccaggctggagtgcagtggtgcagtcttggctcactgcaacttctgcctcctgtgttcaagcaattctcctgcctcagcctcccaagtagstggggtaacaggtgcctgccaccacgcccagctgatttttttggtatttttagtagagacggggattcaccatgttgaccaggctggcctcaaactcctgacctcagatgatctgcccaccttggcctcccaaagtgctgggattataggtgtgagccactgcgcccagcctcaggacatttt

SEQ ID NO: 877125 - DNA, 642 bp, Homo sapiens
gctgtaaactccttgaccctaaacctatgagctacttgatagcaaggtagccatttctctcaagtaaagaagaaatttccacagtacctggaggccctaagctattccaggatgatccatgacattattctcagttaccttgctctcttgctttgatttgggtcttgctagaggactggagtgtaaatcacctaagtgacttaggttgatacaaatatctgttataagatttaagggaaaaataaaattatcccaaggatgtagctgactgggagttgtcagaggtacatcgggacttcaaggttttgttcaactgtcatcctcttggggcagaaacgaaaatgtcagtagtttgagacttcctttttgctttaggataaccacaaattgcaatcttgtggtgacatcaattgtagaagtaggacrgagaaatgctggtagctcaagaagaggtgagatacctgcaaaccctgtttgaactctgcacttatctgttttaaagcaggaaaatgatcacatcattctctggctcaaaaatttcaaatggctctccattgtcagtagggtcaagctagactttttagcctagtctataaggtctgccacaaatcagcctcaatttacttttctggctttatgact

SEQ ID NO: 877126 - DNA, 633 bp, Homo sapiens
ttggaattagggagccatgtctataaacatggaatttaaggagtgagaggagaatgaagaatcaaagaacaagcaatcaaagagaaaggagacaaaccagagaaggtgcccttatggaagccataagaaaaactgtaagcagaagaagagatttgtgatccagctgaatacctgatccccaacatcagaacttgggatcttccacctatagtttatcaaacatttctcacaaaccctaagagtctgtgactcagccaactctttcagaaggttcttgtggtcttactcattattagtaaactctcctgcccactcaccccacttcagaactagaaagttgaccattaacctcagatagccccagttcatgcaatacccagcactaccckccttcctgcaactagtctgttttctgctgccttcccaaagcagaaggaggtctctagcacagtggtaggagctgggccctggagctacaccaaagcagaaaggccaatttagtatatagtcatgatgatttcaaaattacagccatgtattttgaactctttgcattttgaaatgatgtcatccttgttgcttaattggtagaatttcagttttctctcctttctcagctctgcttttccagtt

SEQ ID NO: 877127 - DNA, 633 bp, Homo sapiens
ttggaattagggagccatgtctataaacatggaatttaaggagtgagaggagaatgaagaatcaaagaacaagcaatcaaagagaaaggagacaaaccagagaaggtgcccttatggaagccataagaaaaactgtaagcagaagaagagatttgtgatccagctgaatacctgatccccaacatcagaacttgggatcttccacctatagtttatcaaacatttctcacaaaccctaagagtctgtgactcagccaactctttcagaaggttcttgtggtcttactcattattagtaaactctcctgcccactcaccccacttcagaactagaaagttgaccattaacctcagatagccccagttcatgcaatacccagcactacccgycttcctgcaactagtctgttttctgctgccttcccaaagcagaaggaggtctctagcacagtggtaggagctgggccctggagctacaccaaagcagaaaggccaatttagtatatagtcatgatgatttcaaaattacagccatgtattttgaactctttgcattttgaaatgatgtcatccttgttgcttaattggtagaatttcagttttctctcctttctcagctctgcttttccagtt

SEQ ID NO: 877128 - DNA, 689 bp, Homo sapiens
ctttaactccgtgtctgaggagttttgtctgcagctcgtcctgctacaatatttgggggagtaatcgaggaaaacttccctggcattgctagatacctaaaatatccacatacaagaagcacaaagaacacctgggaaattcattgcaaaaagatcatcacctaggcacattgtcatcagattatctaaagttaagatgaaggaaagaatcttaagagctgtgagacaaaaacaccaggtaacctataaaggaaaaccaatcaaattaacagcagaattctcggcagaaaccctataagctagaaggaattggggccctatcttcagcctcctcaaacaaaacaattatcagccaacaattttgtatccaggcaaacaaatgctgagggaatttgccactacaaagccactactacaagaactgctaaaaagagctctaaatcttgaaacaaatcctggaaaaacataaaaacagaacctctttaaagcataaatcacagagaacctataaracaaaaatacaattttaaaagcaaaaacaaaaaaaccaaggtacacaggcaacagatagcacaatgaatgcaatggtacctcatatctcaatattaacatttaatgtgaatggcctaaatgctccacttaaaagatacagaactgcagaatagataggaacttaccaaccaactatc

SEQ ID NO: 877129 - DNA, 599 bp, Homo sapiens
aggctgggcgcagtggctcacacctataatcccagcactttgggaggccaaggtgggcagatcatctgaggtcaggagtttgaggccagcctggtcaacatggtgaatccccgtctctactaaaaataccaaaaaaatcagctgggcgtggtggcaggcacctgttaccccasctacttgggaggctgaggcaggagaattgcttgaacacaggaggcagaagttgcagtgagccaagactgcaccactgcactccagcctgggcgacagagggagactctgtctcaaaaaaaaaaaaaaacaaaaaacaaaaaacaaacaatgtcctgagtcccttctatatacaagcactattctaaatgccaagaacacaaggatgaccaggagagtcacactttctaaggtgaaaatatccagagaatcacaaactaaacctgtagccaccaaaacaaaattataattaaaatcatgtcaagagctatgaagaaaaactaaagaatatggtaagagagcataatggggaacttgtttagattagaaggttaaggaagacttctctgaagatgtaaccttaaagctaattcctgaagtgttgagcc

SEQ ID NO: 877130 - DNA, 599 bp, Homo sapiens
aggctgggcgcagtggctcacacctataatcccagcactttgggaggccaaggtgggcagatcatctgaggtcaggagtttgaggccagcctggtcaacatggtgaatccccgtctctactaaaaataccaaaaaaatcagctgggcgtggtggcaggcacctgttaccccacctacttgggaggctgaggcaggagaattgcttgaacacaggaggcagaagttgcagtgagccaagactgcaccactgcactccagcctgggcgacagagggagactctgtctcaaaaaaaaaaaaaaacaaaaaacaaaaaacaaacaatgtcctgagtcccttctayatacaagcactattctaaatgccaagaacacaaggatgaccaggagagtcacactttctaaggtgaaaatatccagagaatcacaaactaaacctgtagccaccaaaacaaaattataattaaaatcatgtcaagagctatgaagaaaaactaaagaatatggtaagagagcataatggggaacttgtttagattagaaggttaaggaagacttctctgaagatgtaaccttaaagctaattcctgaagtgttgagcc

SEQ ID NO: 877131 - DNA, 693 bp, Homo sapiens
atgaatgaataaactaaaatcttcattactatttgtgctaaactctgctttaaggaattacgataagaaaggagtggatttggccagtaaactacagtagattgctacaaagctatcctaacttatgccttgcttaccatggtatgaagcagcattaactaagattatctttccctrtaagatgtatgggtgcagaaaacagtttttgttacatttcttaactgcaactccacattttaataagactcaataagaaagcaattaactttagcatacacaaagtttttaaatggttaaattgtcatacgtaaagataacttcaagcaaatcttcaccattgaaaatgaaaacaaaagaaaacattacccttctgtgattttcagtcttaagaaagaaaatctttatataattatgatcattttttatcattttctaaaatgcatgtaatggcaagcactagagtaacgaagaaaattttaactaagtgctattgaaaatgcaaagcaatggaagtaacaaaacaacaggaagctcttaagtgttagaatcttaagaaagaatgaagagaggatcaacagatttttcatcgcaaatataataaattattttataatcatttgatatgatatatttatcaataggaaggatgtcagagaacgtaaacatttggcttcagtgattctcgggtcatcc

SEQ ID NO: 877132 - DNA, 510 bp, Homo sapiens
tttgtggtaactgcatttattattttgtaaataactatacaatttgtaaaggccagttttggtggaaaaacaattaaaataaggatggaaattattacacatgctggaaatggctaatctttgtcctcaaacaaatgtttattggctgtaaacaaacttattatrtgttagttctgaaagaaaaaaacataatgaaataacttgtgcaaaatgctggagatacatcttcaaagatttttgtctaacaattaaggaagaaatgaagattacatgtaaattataaactgagaattaaacaaatgcattgacacacatgccaagtctttggaattattgataagaatacagcttattacagatcctttcatcaagagaagatactggggtttgattttcctttgacaacattttcaaaaaagttgatggtacaaaaccatcaaagtcaccatcactatctcctgctgaaaccccagccaaatcttcaccccaccccacttagtcacttgcaaa

SEQ ID NO: 877133 - DNA, 594 bp, Homo sapiens
ttcaggctggtactgggggttgtctgcacagagtcctgtgatgtgaaccatctttgggtattgcagccatggataccagcgcctgttccagtggaggtggtggagggtgcaatggactctgtgagggtccttagcttttgaggtttaatactcatatttgtgcaggttggcctcctgccaggaggtggcactttccagaaagtgtcagctgtgtagtgtggagagggaccagtagtaggcggggcccckagaactcccaagattatatgttctttgtattccactaccagggtgggtagggaaggaccatcaggtgggggcagggctaggcatgtctgagctcagactctccttgggcaggtcttgctgcagctgctgtggagaatgggggtggtttccaggtcactggagttgtttaccaaggaagattatggccgcctctgctgagtcatgcaggttgtcagggaagtgggggaaagccagcagtcacagggctcacccagctcccacacaaactgaagggctgttctcactcccctcactcccaccacccaccaccctgccaccaacagccctgagtctgtttccaggtgg

SEQ ID NO: 877134 - DNA, 647 bp, Homo sapiens
gcaatgaggtgctgagaagaatgtatactctgttgatttggggtggagagttctgtagatgtctattaggtctgcttggtccagcgctgagttcaagtcctgaatatccttgttaattttctgtctcattgatctaatattgacagtgaggtgttaaactcccacacaataatactgggagactttaagtctcttcttaggtctctaagaacttgatttatgaatctgggtgctcctgaattgggtgagtatatatttagaatagttagctcttctcgttgcattgatccccttctttttgttgttgttgttgttgttttaatctttgttggtttaaagtctgttttatcagagactaggactgtaacccctgcttttttttttttttttttcattggctgggaaaatattcctccatccctttattttgagcctatgtgtttctttgtaygtgagatgggtctcctgaatacagcacatcgatgggtcttgactctttatccaatttgccagtctatgtcttttaattggggcatttagcctgtttatgtttcagattaatattgttatgtgtgaatttgatcctgtcatgatgctagctggttattttgcccattagttgatgtagtttctacagagtgtcaaca

SEQ ID NO: 877135 - DNA, 647 bp, Homo sapiens
gcaatgaggtgctgagaagaatgtatactctgttgatttggggtggagagttctgtagatgtctattaggtctgcttggtccagcgctgagttcaagtcctgaatatccttgttaattttctgtctcattgatctaatattgacagtgaggtgttaaactcccacacaataatactgggagactttaagtctcttcttaggtctctaagaacttgatttatgaatctgggtgctcctgaattgggtgagtatatatttagaatagttagctcttctcgttgcattgatccccttctttttgttgttgttgttgttgttttaatctttgttggtttaaagtctgttttatcagagactaggactgtaacccctgcttttttttttttttttttcattggctgggaaaatattcctccatccctttattttgagcctatgtgtttctttgtacgtgagatgggtctcctgaatacagcacatcgaygggtcttgactctttatccaatttgccagtctatgtcttttaattggggcatttagcctgtttatgtttcagattaatattgttatgtgtgaatttgatcctgtcatgatgctagctggttattttgcccattagttgatgtagtttctacagagtgtcaaca

SEQ ID NO: 877136 - DNA, 647 bp, Homo sapiens
gcaatgaggtgctgagaagaatgtatactctgttgatttggggtggagagttctgtagatgtctattaggtctgcttggtccagcgctgagttcaagtcctgaatatccttgttaattttctgtctcattgatctaatattgacagtgaggtgttaaactcccacacaataatactgggagactttaagtctcttcttaggtctctaagaacttgatttatgaatctgggtgctcctgaattgggtgagtatatatttagaatagttagctcttctcgttgcattgatccccttctttttgttgttgttgttgttgttttaatctttgttggtttaaagtctgttttatcagagactaggactgtaacccctgcttttttttttttttttttcattggctgggaaaatattcctccatccctttattttgagcctatgtgtttctttgtacgtgagatgggtctcctgaatacagcacatcgatgggtcttgactctttatycaatttgccagtctatgtcttttaattggggcatttagcctgtttatgtttcagattaatattgttatgtgtgaatttgatcctgtcatgatgctagctggttattttgcccattagttgatgtagtttctacagagtgtcaaca

SEQ ID NO: 877137 - DNA, 546 bp, Homo sapiens
gcctggaaaacttttgtatttttagtagaaacggggtttcaccatgttgaccaggctggtctcaagctcctgacctcaagtgatccgccggcctcagcctcccaaagtgttgggattacaggcgtgagcaaccactcctggcctgtgaagccctttaaatttccaacctatttttttgaaatttgagaaatagaagcaaagactttttttttaacactcatttaattaatcctttgttgttcctttgaggaaagcattattttattttgcaaacactgtcttcatcagtcttttagttattctaacacaaatacagcttyttatttggaaaaaaaaaaaaaaagattgtagaggcgttttggatcctaggagattaactattttgtactatcctgtaaaatgttgttaagttgtagacagacttgcatcccgagagattgtttctccatttttatataagaatgttgaatctcaataagggtaagtaaattgtccaagatcatataactagtaagtaatatctcaaacttgaactccagtttggga

SEQ ID NO: 877138 - DNA, 452 bp, Homo sapiens
ggcacatgtttgttcccccacctacttgggaggctgaggtcagagtgttgcttgagcccaggaggtcgaggctgcaatgaactatgatcacatcagtatattccagcctgggtgatagagtgagaccatctcaaaaaaaaaaaaaaaaaaaaagatatggaagcaaactggaaaccatgggtaatactttaaaaggaagacgttgccatttgttacgacatggatgaccccagaagaccttatgttaagtgaaataagccaaacacagamagaaaacatattgcatgatctcaattatatgtggaatatttggaaaaaaaagatgacaaatatacagagatatagaataaaacagtggttattaagggcacaagggagtggggaaaggggagatacaggaaaggacacaaagtgacagatatataggattaagcaagtctagagatctaatg

SEQ ID NO: 877139 - DNA, 452 bp, Homo sapiens
ggcacatgtttgttcccccacctacttgggaggctgaggtcagagtgttgcttgagcccaggaggtcgaggctgcaatgaactatgatcacatcagtatattccagcctgggtgatagagtgagaccatctcaaaaaaaaaaaaaaaaaaaaagatatggaagcaaactggaaaccatgggtaatactttaaaaggaagacgttgccatttgttacgacatggatgaccccagaagaccttatgttaagtgaaataagccaaacacagacagaaaacatattgcatgatctcaattatatgtggaatatttggaaaaaaaagatgacaaatatacagagatatagaataaaacagtggttattaagggcacaagggagtggggaaaggggagatacaggaaaggacacaaagtgrcagatatataggattaagcaagtctagagatctaatg

SEQ ID NO: 877140 - DNA, 579 bp, Homo sapiens
gacttggagtttcctgctataaaacaggaatttgttaaactgtatgaagtattctggttttgagactgatcagtaagctcactaatagagctggtcattgagagtataaagatttgggaagaagacgtgtgcttcagatcattacctccttgtgaccctgtgttcttcaagaataaatgaaagtcatattgctcaaagcaagaataataaaagtaagakaaaaaatgtattatgtaactaattaaaatagaacaatggaaaacacaaccaagtgacatttatccatttatctcaggtatgcaaagttggttcaatattaataattaatgtaatccatcacatcaagagactaaaaaaatcacacgatcatatcaatagatttaaagaaagcatttgacaaaatccaacacccatttatggtaaaaactctcagttaactagaaatagaggtggactttctcaacttgatgaagaatatctacaaaatatctatacctaatataatttttaatgataagaaacttgtagctttctcattaagattatgaacgaggcaaagttgccccctttcattgttct

SEQ ID NO: 877141 - DNA, 612 bp, Homo sapiens
tcctctgccaaaccacggatcccgtcacatggctcttctgcaaaacattcgatctcgtcagatgtgtcttccgccaaccactccatcctgccagatgtttctgtgttaccgtgggcggctggtcagacaggagcagcgcaggagagggccatgcccacaccccaccagacacatcaggcgaccaggaggcgacgggtcaggctgccattaaactacctgtctcaaataataaatgattgccgggagccggtgccagggacgggcggtcccccagacagacagaaaccccggaaggtgrcgattagcagctcctgagaagatctcagggggcgcgtgacggggctcatgcttgcacactcacaggcaaaccggccgggttttactgtcctacgaccctccccaggcaacatccgactgccaagggaggcacgcctcatgtgagcgcccctatgactccaggaaacacgccacgcctgcggtccctcccaggtgatgacaggccactgcccatgtggatggcccaccctgagaaaaggctcaggggaggaagcaatgcaacccctggctcttggaagcctgccaatgtgtgagacctcgcctcaaaggtcgaac

SEQ ID NO: 877142 - DNA, 633 bp, Homo sapiens
aaatctcatcttgaattcacacatgttgtgggagggacccagtgggaggtaaatgaatcatgggggcagatctttcccatgctgttctcatgatactgagtaagtctcacgagatctgatgtttattataaaggggagttttcctgcacaagctgtctttgcttgctgccatccacataagatgtgacttgctcctccttgctttccaccatgattgtgaggcttccccaaccacgtggaactgtaagtccaattaaacctctttctattgtaaattgcccagtcttgggtatgtctttatcagtagcatgaaaacagacaaatatggtgaattggtaccagtagagtggggcgctgctgaaaagatacccaaaaatgtgaaagcaactttggaagaggtaacaggcagagaytggaacactttggagggctaggaagaagaaaggaaaatatgggaaaggttggaacttcctagagacttgttgcatggctttgaccaaatcctgatagtgatacggacaataaacaccaggctgaggtggtctcagatggagatgaggaactcactgggaactggcgcaaaggtaagtcttgttatgttttaacaaaaagactggtggcattttgcccctg

SEQ ID NO: 877143 - DNA, 602 bp, Homo sapiens
tagttcattttcaagatgttttagatttcacatcattttatcagaagatatttcttataaatggtgtgcatatcaaaaaatcggttttgtcactttcatcttatgttatttaatactctctgtagtaaatagcccaagtaatggaaagttttgaacaataaattctgtatttgaccttttggaaagtaagattttatttcccttggaatcattattttccacctgcctatattttgagttagttattcatacaactgtgaacacaataatctcgcccataaatccctctttggaagtaattagcaaatgcttattatgttaaaatctataaatttacatattcatcttatctttccccaaactctaaattatttaactgagataaaaaccttccataggtattttacatagtgtttaagtgataaatttaggttaaaattttatactktgttgcaatttgctatatatttatcaagttatttataatttattaatttgtttaaatatcccaattaggatgagctatgttgctaaatttttacttgattttcagtaatactatattagtacaacctgcaaaaaatatgcaaataaataagata

SEQ ID NO: 877144 - DNA, 546 bp, Homo sapiens
ttgggagggtaggtgtatatattacataggaaatgtccattacgatattctttaccctttaattctttggatgtctttctttaaattatgccaggaaagttctggcatctcaacatgattaaatgaagaacacaactgagtgcaatcctcaatcaaccagccaaggaaactattacagtcactttcaggtgcccaaattatcctattaatctgtgcatcacatcagtaaaactgacttagtgttttattccatttttcttcatctaccatccttagactatatcttcacacatatttcccatgtttcctctgatagaaatgaacaaaatcttaaaaatcttttggtatatcagctgttttctcctggggcartttttgtactcgcctgtctgaagcatgctgtaatatgtccctatttatgagcctagtgacaacaagctattttaggggttattcttttttaaaatggcatttctttgcaataaaactgctacaaataatgctactatagatttttcaagcaaggaaaggcttctaatactattg

SEQ ID NO: 877145 - DNA, 720 bp, Homo sapiens
gatttctattgttttatcttcaagttcattgattctttcctctgtcgcctccattctgttttaagcctacccagtgagttcttttctttttcttacttgttttttgttactacatttttagtcacaaaatttatatttggttttgcatatttactttttctttgctcatattttctatttcatggaagacatgttctatttcttaaattagttttaagcttgcttgtagttgtctattraaacgtttgtttgatgtctgctttacaatccttgtcagataattgtcatatttgtcatatggtgttggtatctattgattgccttttttcattcaatctaaaattttcccacttctttatattaaaagacccagcaatcccattactgagtatatacccaaaggattataaatcattcttctgtaaagatacatgcacacgtatgtttattgcaccactatttacaatagcaaagagttagaaccaacccaaatgcccatcaatgatagactgaataaagaaattgtgacacatatacaccatggaataccgtgcagccgtaaaaaaagaatgtgctcatgtcctttgcagggacatggttgaagctggaaaccatcatccttagcaaactaacacaggaacagaaaaccaaacaccacatgttctcactcataagtgggagttgaacagtaagaagacatggactcagggagaggaacat

SEQ ID NO: 877146 - DNA, 598 bp, Homo sapiens
  misc_feature 1, 2, 3, 4, 5, 6, 7, 8, 9, 10, 11, 12, 13, 14, 15, 16, 17,18, 19, 20, 21: n = A,T,C or G
nnnnnnnnnnnnnnnnnnnnntcttctccccctcccataacctgtcttgccaccataacctgttttgcccagatgcaagctctcattctttctgtaacctcaaggtggtataaaagcaaccattgggcatttctttgagtttttatattttgtatgactcccacacacatgcgtgcatcaaataaaatttgtaggagaccggacccagtggctcacacctgtaatcccagcactttgggaggccgaggcgggcggatcacctgaggtcargagttcaagaccagcctgcctaacatggcgaaactctgtctctactagaaataccaaaaaaaaaaaaaaaaaattagccaggcatggcgacgtgcacctgcagtcccagctactcaggaggctgaggcaggagaatcgcgtgacccgggaagtggaggttgcagtgagctgagatcgtgccactgcactccagcctgagcgacagagcgagactccgtctcaaaaaaaaaaaaaaaaaaaaaaatgcgtaggcctcttttccctttaatctatgtaatcagtttgttttatagactcaaattatcaaacattcaagggaaaaatttaa

SEQ ID NO: 877147 - DNA, 658 bp, Homo sapiens
tgtcttggaaccctgactcttgtattgcttgctttccatatttgttaaacacttacaaacttgcaccaggccccaggtaaagaggaaaagtgaaaactctgagtctagtgggggagtctgattcccatcccccgcaaaaaataaatggcactgtacaaagtgattgatagcactgtagggatggactcagggaaaagggagcctagatgagcagtattgcaagtgataaaaactagcttcaactagctcaagccaaaaaagatgacaaactggcttacataattgagaggtagagggagaatctagcttcatgaattgctgcactccaacaagactggagccaggtgcttgtacagcgtcaacatgaacccctctttctgcctctctcacctcyggtttcttctgtgttgctttcatactaggtccagggtgcttcatcataccttgctggttctctcaaaccctgtcagcactttgtagatggttctcttgttatgtctcctcaattagcatgtttgaatgtgttacttgtatcttgtaggtcccttgattggtaaaggagcatatagggttaagggtaatgtgcagtagaattggttccaaaaactcaggtatttctttgagcagagccctgccttatcctccctcaaaatgctga

SEQ ID NO: 877148 - DNA, 535 bp, Homo sapiens
gaattgcattgaacttacagattgcttttggcagtatggccattttcacgatattgattttacccatccatgagcatgggatgtgttaccatttgtttgtgtggtctatgatttctttcagcagtgttttgcagttttacttgcagaaatctttccttggatagrtgtattcctagatactttatgtttttgaagctgttttaaaagggattgagttcagccaggcatggtggctcacacttgtaatcccagcactttgggaggctgaggcaggcagatcacaaggtcaggagttcaagaccagcctggccaatatggtgaaaccccgtctctactaaaaatacaaaaaaaaaatagctgggcatggtggtgggtgcctgtagtctagctactcaggaggctgaggcaggagaatagcttgaactcgggaggcaaaggttgcagtgagccaagatcacgccactgcactccagcctgggtgacagagtgagactctgtttcaaaaaaaaaaaaggcaggggttgagttcttgatt

SEQ ID NO: 877149 - DNA, 585 bp, Homo sapiens
tatacaaaaatcaaatcaaaatacagacttcagtttaagacctgaaactgaaaatactagaaaacaagaaaacactggggaaatgcttcaggacattggtctgggcaaagactttctgggtaacagctcaaaagcatyggaaacaaaagcaaaactagacaaatgggattacatcgagctaaaaagtgtcttcactgcaaaggaaacaatcaacaaagtgaagaaacaacctacagaatagaagaaaatatttgcaaactatcaatttgacaagggataaattaccaaaatatataaagaactcaatagcaaaaaaagcaactaatccaatttaaaaatgggcaaaaatctgagtaaacattcctcaaaagaagacatacagatggccaacaggtatttgaaagaatgttcaacatcactaatcatcagggaaatgcaaatcaaaaccacagtaagatgtcatctgatcccagttaagatgggttttaacaaaaagacaacaaaaaaaatgcagagaaaggggaacacttatatactgttggtgggaatggaaattagtatagccactatggaaaacagtatgac

SEQ ID NO: 877150 - DNA, 568 bp, Homo sapiens
tgaatgaaatgaagtgagaagagaagtttagagaaagaagagtaaaaagaaatgaacaaagcctccaagaaatatgggactatgggaaaagaccaaatctatgcctgattggtgtacctgcaagtgacagggagaatgraatcaagttggaaaacactctgcaggatattacgcaggagaacttcccctacctagcaaggcaggccaacattcaaattcaggaaatacagagaacaccacaaagatactcctcgagaagagcaactccaagacacataattgtcagattcactgaagttgaaatcaaggaaaaaatgttaacagcagccagagagaaaggttgggttacccacaaggggaagcccatcagactaacagcggatctctcggcagaaactctgcaagccagaagagagtgggggccaaaattcaacattcttaaagaaaagaattttcaacccagaatttcatatccagccaaactaagcttcataagtgaaggagaaataaaatcctttacagacaagcaaatgctgagggattttgtcatcaccaggcttgccttaca

SEQ ID NO: 877151 - DNA, 617 bp, Homo sapiens
caaaaaagcataaagacccacctgcagagatccattttttctgccactggagttaaggacaacagataaatggttttaatggcgagagagagagagagagagacttgccaaataagattccagtttctgaactcacattgaagctctcaggtyggtatcaagataaaatacttcaatgtggtgggaaaagaaagaacattaacctgtatttgggtttctgtttaacaccaaataccaaaagatcaaaaataccaaaagatcaccaagttttaaaaattcaaaatggaatgctcaccaccaacgaagatctctgctccacatatttgaatttcatcactattgatacaggccagtttgcagacaaacaaggttgtaccaaggggaagacctgtgacttgagaattgagggagtggccatggtgaaaattgattcttctgtcaaacttgtacaggattaacttgttacgtctggaatagtgaaagcagccttgtctgggcttcaaagagcatgtaatattgacagtggatccaagtaaaattacatgggaaggcttcacagtcacatcgcctctcttgcacgcatctgcaataagatacagatgcaatatttagttggt

SEQ ID NO: 877152 - DNA, 594 bp, Homo sapiens
caacaccactatcagaggcttctagaatgtctgattcacacgcatgaaatcccacacagcacggcgtaagatcagaggacccttaccatagtgaaggaagtgtgagcgtgggccatgacaatgggatccactgatcgtatcacaaatcacaacatccaaaagcagataacctgatagggcattagaacagcttgcttgaggcatgrttgatacaccagctcagagccaatactctgcaagaataagttgctatcttctgggatgagtatacacactaagttggatacctccataaccattacatacctataaaaaaaaaaaggatgcaaggcttttcaaaccaaggaatggagtggctccactcacaatgacctattggaggcactttgtgcttctcattcctgctactctgagttcctaagggataaatattctggtcctctaaaaggtgtaatcttgccaggggacaagtttactgttaactgccaggttcagatgctgcctgggcactttgacattcttgtatacagggaccagcaagaatgaagactagccatcttggcagaggtaggaggagatagagctgctgtaaaa

SEQ ID NO: 877153 - DNA, 594 bp, Homo sapiens
caacaccactatcagaggcttctagaatgtctgattcacacgcatgaaatcccacacagcacggcgtaagatcagaggacccttaccatagtgaaggaagtgtgagcgtgggccatgacaatgggatccactgatcgtatcacaaatcacaacatccaaaagcagataacctgatagggcattagaacagcttgcttgaggcatgattgatacaccagctcagagccaatactctgcaagaataagttgctatcttctgggatgagtatacacactaagttggatacctccatawccattacatacctataaaaaaaaaaaggatgcaaggcttttcaaaccaaggaatggagtggctccactcacaatgacctattggaggcactttgtgcttctcattcctgctactctgagttcctaagggataaatattctggtcctctaaaaggtgtaatcttgccaggggacaagtttactgttaactgccaggttcagatgctgcctgggcactttgacattcttgtatacagggaccagcaagaatgaagactagccatcttggcagaggtaggaggagatagagctgctgtaaaa

SEQ ID NO: 877154 - DNA, 580 bp, Homo sapiens
aagtaaccgtgagattatttggtacatttgaaggggaaaaagtggtgcctaaggcaactaaggagagtgagaggaaatagaatagagaatattggcaaagatcatgaaagggtatgaaagtgaaactccaactgtaagagaaaaaccactaccaattaataatagttgtggtggtagtagtagacaccctggtatcaagtattgaaatgtgacattcccagggattcttataggagacgagaaacacctaaaattaagtcacttagaaatcatttctgaaggtgtctaacctcattcattttatttgagcccacctgagattagctgagccctatccagacaagcagaaccaccaaacccacccacaggcttgtgagaaatattaagtggattttttaagccattaaattttgatgtgcttgttaggcatcaattgmtaacatacacatagagtagtatcataaaaattttaatagattacatgttctgttaatatttgttttattttgcaaaatagtttaaaattattttcaccttttaccttttccaaccctaccaaagaaaccaaaataaatagcct

SEQ ID NO: 877155 - DNA, 556 bp, Homo sapiens
gatttcatattcctacttcatacatcctataatcagaagatttctagccacaaatgatattttccaataaaaatggtttgtatctttctcttgtccccattcaatgtcatcttgggtattggaagaatccttttattaattttaacctggaagacataattgtggtcattcttcctagtaaaatttctataatcatgtatgcatttaacttaacgttattctgtttaattatttggagttaattgtatctctgctatttctttcatgctctaagcctactgaatacacagcaagaaaacaaaaatgaccaattttctgctctcaatgctctttttgttctatatcttaatcagccatggtctacttcctggaaccatacstgtcagggcacaatatactacaactaatcctgtttcccatttacaccagttgatactccacctcatgtttttccctgtaagtttcactttctaaatgaatatacacgaggaggtgccggtgagggaggagaataagagtgagtacgctggttgcttcaagcacacattcatgaagc

SEQ ID NO: 877156 - DNA, 551 bp, Homo sapiens
atcaccaaaaaaatataataatgattaaaaaaagtttgaaatactaccagaattatcaaaatgtgacatggagacaagaagtgagtacacgctgttggagaattggtaccaatagacttgcttgaagcagagtttccacaaaccttcagtttgtaaaaaacacaatatctgcaaagagcaataaagcaaaatgcaataaaatgaggtattcctatrtttgagtgtaatggaacagtttatattctctttactttcctctcattgtttttacagccattaatcatatttcagcattaccagtagagacctcttgccatcttggtgaggtatggaaggaactagtgtggcggactcaaaaggacactgaattagttttgtaaaaatttaagctaatcctggctctgttactaacaaggtttgtgacctaggtcaatcacttaatcccactagctctcagttttttcatctataaaatcattttccctttcaactctccttctataatgaaagaaaaatattacacaaattctcatggagtgaaagccattatc

SEQ ID NO: 877157 - DNA, 551 bp, Homo sapiens
atcaccaaaaaaatataataatgattaaaaaaagtttgaaatactaccagaattatcaaaatgtgacatggagacaagaagtgagtacacgctgttggagaattggtaccaatagacttgcttgaagcagagtttccacaaaccttcagtttgtaaaaaacacaatatctgcaaagagcaataaagcaaaatgcaataaaatgaggtattcctatatttgagtgtaatggaacagtttatattctctttactttcctctcattgtttttacagccattaatcatatttcagcattaccagtagagacctcttgccatcttggtgaggtatggaaggaactagtgtggcggactcaaaaggacactgaattagtwttgtaaaaatttaagctaatcctggctctgttactaacaaggtttgtgacctaggtcaatcacttaatcccactagctctcagttttttcatctataaaatcattttccctttcaactctccttctataatgaaagaaaaatattacacaaattctcatggagtgaaagccattatc

SEQ ID NO: 877158 - DNA, 606 bp, Homo sapiens
ggactggatgattgtagaaaacttgaaatatagagaaataaacaaagaaaaccataaaaattccctataatccctcaaccagcgacaggtcttattaacattttggttgtatattttatgaaaactaagattacaaagaatacaatactttgtatcagctattttccttatccatcacactggagaatcaaaagaattatcagctatctgaaggtggcaaattgcttaagagacacataagcatattatctgagctttggaggtaatcaccaggagaaccaaaaacagaaagggtcagggatggtggcctttgggaatgggtgttctggagtgagattgaagggacagtttatttcttattttgcamccttctgttgaattttgaattttaatgtgtttatatatttcttcttaaatgataaaacatttataatagatttaaaaaatatatacatgtttgaatattgataaaagaggtacaggaaaatatggagaaaagatgggtatgaagatactggacttcagcattctacatatttacattcatatgtaaaatatgtacataccactttagaacacatgtcaggagccaagctatggacataa

SEQ ID NO: 877159 - DNA, 606 bp, Homo sapiens
ggactggatgattgtagaaaacttgaaatatagagaaataaacaaagaaaaccataaaaattccctataatccctcaaccagcgacaggtcttattaacattttggttgtatattttatgaaaactaagattacaaagaatacaatactttgtatcagctattttccttatccatcacactggagaatcaaaagaattatcagctatctgaaggtggcaaattgcttaagagacacataagcatattatctgagctttggaggtaatcaccaggagaaccaaaaacagaaagggtcagggatggtggcctttgggaatgggtgttctggagtgagattgaagggacagtttatttcttattttgcaaccttctgttgaattttgaattttaatgtgtttatatatttcttcttaaatgataaaacatttataatagatttaaaaaatatatacatgtttgaatattrataaaagaggtacaggaaaatatggagaaaagatgggtatgaagatactggacttcagcattctacatatttacattcatatgtaaaatatgtacataccactttagaacacatgtcaggagccaagctatggacataa

SEQ ID NO: 877160 - DNA, 696 bp, Homo sapiens
ggataaaccactgctccccaaattagagacgagatagacagacggggaatcacagattaccagagcagaagcccaggagcagaaactgctactggagctgacaccagggagaatacaacagaaagaagcgcatgtttcagaccttatttaagaagtctgtagggaacccaagtatgacacaggagacagaaacaaggacagaagaggaaattttttcctatgacagacagctacagaaaacagcaaacactgcctaattcacagccatttaaacacaaaaccccaagctaaagcctggtttacttgagttgcttaatgcagccatcatcatgtctgactatcaacaaataactacaagggcatatttaaagattaaagaacaataactggaagagacagaataggcaccaccrccagacaaacatggcagagttttggaatgatcagaccaggagttttagacaactgtgatttatctgctaagggctctaatggaaaagtgaacaacgtgaaaaacaacagatgggaaatgtaagcagaaagataaaaactataataaagaatcaaacagaaatggtagaaataaaaaacactgtaatagaaatgaagaatgccttggagaggctcagccgtcagactggatatgaccaagaaaagacccagggagtttgaatgtaagtcagtagaagcttctga

SEQ ID NO: 877161 - DNA, 667 bp, Homo sapiens
tctaatcgataaagtaaacagcctgtaagaataagttggcaatgtaagcagagagatggaaattcaaagaagtgccaaaaagaaatgctagaaatcaaaacactgtaacagacataaagaatgcctttgatggggttattagaagactggacatggctgaagaaaaaaaaatatatgagcttaagaattgtattagtcctttttcatgctattgataaaggcatacctgaaactgagcaatttacaaaagaaagaggtttaatttgactccmagttccacgtggctggggaagcctcacaatcatggcagaaggcaaggaagagcaaatcacgtcttacatggatggcagcaggcaaacagagagagcttgtgtgggggaactcctctttttaacaccatcagatctcatgagacttattcactatcatgagaacagcacaggaaagacttgcccccatgattcaattacctcctactgggtccctccaatgacacatgggagttgtgggagctacaattcaaggtgagatttgggtgtggacacagccaaacccatatcaagtatatataaatagaaacctccataactgaaaagcaaggagaaagatactgaaaaacagacaaaaacagaacagaatagctaagaactatggggaaactacataa

SEQ ID NO: 877162 - DNA, 631 bp, Homo sapiens
aaattgtatttaataagtcagagaacaataaaatgtattttggaaatatgtagttatttccagagtattttgtttgtattatgtaatagttaatttaaaaaatcaatcttatatgtgaaaaataaaaatacaaagtaaaagcaaagtcaacgtgaaaatatacccaaatttgcagacattaataagcccagtattactgtttttggtattttctgcaaacttccttttatttttaaaaaatttttaaattatttttattttttcagatggagycttgccctgtcacccaggatggagtgcaatggtgccatctcagctcactgcaacctccacctcccagtttcaagcaattctcgtgcctcagcctctcgagtagctgggattacaggcacatgccaccactcccagctaattttttctatcattagcagagatggggtttcaccatgttgtccaggctggtcttgaactgctgaccttgtgatctgcccacctcggcctcccaaagtgctgagattacaggcatgagccactgtgcctggccaaactttctatttaaaggttagaaggaaaccgagaaaaatgaattttctttcagttaaaaagaaaaaataaaatgcatctgtaaata

SEQ ID NO: 877163 - DNA, 631 bp, Homo sapiens
tacaaacaacaaaaagggatgaataggatttgcgttcatgtggagtgcgtcatctgtgcttttaaatttatcctatgaaaagaaataaaaaatatgtaatatcgaacattggtttcctaaattagcaaatcgaccatttcctcaagttattccacgttcttccaagatgygtcagaagcattctctggaggcagttgttccaaatggtgaagagtactagatggatcccaatctcacaggattcttgcttctattgcagaagagttactttccaggacttcaaaggtttagagaagctgcttgattcgtgtggcttgcagaggtgcatgggctttggagtcacgaaaagttaatcctggtcccagcccagcctcttagtagctgtgaggctttgcacaacttccttgtcttggaaagttatataaacctcatctgcaagaaaaggcatgatactgattgcaaaaatggcagcaactcttcatcccttcctgtatttatgccctttgtgatgtgcttttatagctgctttcattgagaggcagaatctgtttcccaaaccttgaatctcactggccttatttgctctggcagtagaaagctgtgaatatgaccatgtgccagtttggggccg

SEQ ID NO: 877164 - DNA, 605 bp, Homo sapiens
acacataatatacaaatacttaaattgtgatatcaaaatttttaaatgtgtagtggtggtagaataaaagtgtagagattttcatgcaatcaaatttaagttattaaaatagtctattataactataagatgttttctgtaagcctcataataactaaaaattaaaaacctttaatggatacatgaaagataaaaagtaaagaatcaaaacatacagttagagaaaattaattactcataaaagaagacagtaaaacagagagaaaggaataaaaaatctccaaagygaccaaatagcaattaacaaaatgacaacagtaaggccttgactgtaaatcattacctataacgtaaataaattaaattctcccacaaaaagacacaaaatggctgagtggataaaaagatgcagctccatgctgcctataacagactaacttcacttttaggaacacacacatattgaaaatgaaagggtggaaaagataccattctatgcaaatagaaagcagaagagattaggggtagctatactcatatcagataaaatagactaagtcaaaactggaaaatgagacaaagaaggtcattagataataataaag

SEQ ID NO: 877165 - DNA, 605 bp, Homo sapiens
acacataatatacaaatacttaaattgtgatatcaaaatttttaaatgtgtagtggtggtagaataaaagtgtagagattttcatgcaatcaaatttaagttattaaaatagtctattataactataagatgttttctgtaagcctcataataactaaaaattaaaaacctttaatggatacatgaaagataaaaagtaaagaatcaaaacatacagttagagaaaattaattactcataaaagaagacagtaaaacagagagaaaggaataaaaaatctccaaagcgaccaaatagcaattaacaaaatgacaacagtaaggccttgactgtaaatcattacctataaygtaaataaattaaattctcccacaaaaagacacaaaatggctgagtggataaaaagatgcagctccatgctgcctataacagactaacttcacttttaggaacacacacatattgaaaatgaaagggtggaaaagataccattctatgcaaatagaaagcagaagagattaggggtagctatactcatatcagataaaatagactaagtcaaaactggaaaatgagacaaagaaggtcattagataataataaag

SEQ ID NO: 877166 - DNA, 620 bp, Homo sapiens
tctgctgggtggctagatccaggagacaaataacaatcactgcagtttggctctcaggaagccacatccctaggagaagggggagagcactacatcaagggagcaagcagtccaaatgtagggagcactacatcaagggagactaaagaatctgaacagcagccttgagccccaaattttccctctaacatagtctaccagaaaaggaaccagaaaaacaattcaggcaatatgacaaaacaaggttatttaatgccccccagaaaccacactagctcaccagcaatggatccaaaccaagaagaaatccccgaattgacagaaaaagaattcaggaggttgattattaagccaggcaaggaggcaccagagaatggtgaagtccaatttaagaaaatcaaaaaaagatacacgatatgaagggamaaatcttcagtgaaatagacagcataaatcaaaaacaatcacaacttctggaaatgaaggacacacttagagaaatgaaaaatgcacaggaaagtctcagcaatagaatcaaacaagcggaagaaagaacttcagagctccaagaaaaggttttcaaattaacccaatccagcaaaaacaaggaaggaagactt

SEQ ID NO: 877167 - DNA, 602 bp, Homo sapiens
tagcattagagaacgagatactgatagtccatgagggacagaggtctgcttaaattatgcctcttgtcaattcaaatgcattttttcataaagccaaggcttttgcagactgaatggatatggtagttgttcattttgaaagtcagaatgcatatgaacttatgagatcagctggctatttctgacttccatagcgatcttatggggaaaaaaataacataattaagattttaaatgtttggctggaataactgccaccagataatatcccatgattgaacaaaaaaaaaaaaaaaaaaaaaaggaacaaagagagaagaaagaagaaagaaatgtgtccccaaagggcaacactgacatcaccgaaaataagatgcagaatttagtttttagtattactgtattataatgattggctaattgcattcacaacyttgcgaaagttaggaaggattgtgcaaaaacctgttaaatatgagtttgaatgggttttgaggcagaagagggagaaacaattattgacaaacttatttgtatagggaactaaaaaattctggacttgtgtgccagaaagagcagcagtggctctgttggctttatta

SEQ ID NO: 877168 - DNA, 654 bp, Homo sapiens
atatgccttctcacttgagaaaaagaaaactcacgaaacctaacacaatttggtaaggtccaaaatggggggattcattatacttactggtacttttccatttggcaaaatgggagaaaagtggttaagacaataaaaatcatacctaagagggatgtctccttggcaaatgctgcagcaatagctgggtccaatgcaggttgtccatccccagatggaagatcaggtcgagtataatccctacttttatcattgttgtattttacattcaaattcacaagtttggaaaaatcaatccttagggtacagcaggcattataaatattctgaccatctagggcctgtaaaagtgaataaagcatatcagcaatcttaaacaaaaaataaaaattagtgaaagtataattttagtaataaaactcaacaacaaaaactmgaacttaaaagctaccaggaaaaggattcaaatttcatatatcaaattttgctgttccagctgtccatgtattactttcccccaaatattatcttccttaaatagaaaatgctacttcaacctaaaatacaaccagctaagcatccatgctaatacttttaatttttaaaaattgcaaataggttagttttaaaaaaactaataaggatcacaaacag

SEQ ID NO: 877169 - DNA, 633 bp, Homo sapiens
gctctgtgactcgcctccaattcttccctgaagtagacccaagaaccctctcttggggtctggatcgagacccctttttccagcaacacaacccgcggggccgcctcccgcccaccctcaggtgcaggagaccccgggccatgcatccttccgggcaggaaaatgtcagccagcgctcgccsgccgctttcctcccccgcctcccgaagttctcgcccggtagctccccgactggctctcgcgccggacaaaggcgcacgctgattggccggagggccgtagtcatgcaggacgcgcgactctaggggcgggaccagacaaggggtgactgccgcgcggcgcgggggaggagaccttcatctgttcacgcggtagcgcggattgcggttcgcgcgcgcgccaccggggaaggagcggtgggccgaggggttggaggtggggccccaggaggacctcgggctgtgggccgggagagcggagtcggggagtggggcgggggagcgaggtggcgccggggagcctgggatatggcgcggccagacgatgaggagggggcggcggtggcgcccggacacccgctcgcgaaaggatacctcccgttgccgagggcgcgccgttgggaaggagagcgtg

SEQ ID NO: 877170 - DNA, 633 bp, Homo sapiens
gctctgtgactcgcctccaattcttccctgaagtagacccaagaaccctctcttggggtctggatcgagacccctttttccagcaacacaacccgcggggccgcctcccgcccaccctcaggtgcaggagaccccgggccatgcatccttccgggcaggaaaatgtcagccagcgctcgccggccgctttcctcccccgcctcccgmagttctcgcccggtagctccccgactggctctcgcgccggacaaaggcgcacgctgattggccggagggccgtagtcatgcaggacgcgcgactctaggggcgggaccagacaaggggtgactgccgcgcggcgcgggggaggagaccttcatctgttcacgcggtagcgcggattgcggttcgcgcgcgcgccaccggggaaggagcggtgggccgaggggttggaggtggggccccaggaggacctcgggctgtgggccgggagagcggagtcggggagtggggcgggggagcgaggtggcgccggggagcctgggatatggcgcggccagacgatgaggagggggcggcggtggcgcccggacacccgctcgcgaaaggatacctcccgttgccgagggcgcgccgttgggaaggagagcgtg

SEQ ID NO: 877171 - DNA, 633 bp, Homo sapiens
gctctgtgactcgcctccaattcttccctgaagtagacccaagaaccctctcttggggtctggatcgagacccctttttccagcaacacaacccgcggggccgcctcccgcccaccctcaggtgcaggagaccccgggccatgcatccttccgggcaggaaaatgtcagccagcgctcgccggccgctttcctcccccgcctcccgaagttctcgcccggtagctccccgactggctctcgcgccggacaaaggcgcacgctgattggccggagggccgtagtcatgcaggacgcgcgactctaggggcgggaccagacaaggggtgactgccgcgcggcgcgggggaggagaccttcatctgttcacgcggtagcgcggattgcggttcgcgcgcgcgccaccggggaaggagcggtgggccgaggggttggaggtggggycccaggaggacctcgggctgtgggccgggagagcggagtcggggagtggggcgggggagcgaggtggcgccggggagcctgggatatggcgcggccagacgatgaggagggggcggcggtggcgcccggacacccgctcgcgaaaggatacctcccgttgccgagggcgcgccgttgggaaggagagcgtg

SEQ ID NO: 877172 - DNA, 529 bp, Homo sapiens
caatgatgaaggagtgggttagaagtggattatgagtgagttcatgaggtgcatttgaagcaaatgttaagtctctgaaagtaattggatgggacctggcaaaggacaagtagaagtatttttgaacggcaagaatggattttttgaaaaagtcttaacaaacaatttsaaatattttctttccaaagaaagaaaatttgctttcattcccatagaaagaagctatttggaaatgttaatggtggtctcctgaatttccttgtaccaattcccttcccaaggcaggcagacaaggcaatatttcataaactttagttacttcctcccctcctacttgattttcaccatctcagtgaagaacctgcatgctttcattgctttctttttttctcttaattcatttatttcatgaaaaattatttcaaaaggaaacttaacaacacaaaactaaaagggaaggtgcatctcactctgttttaagtagaaggtaagcacaaactacatgaaatttttaaaaggaggctattaa

SEQ ID NO: 877173 - DNA, 620 bp, Homo sapiens
caggcacctttcttcctcctttagaactctattcttaatttcttattaggacagtcttcccctctgttgggaagcaagctcatttcttctggacctgcccttggaggagatggagagctccagttcgctgtcttttttttttttttttttgagacggagtgtcgctctgtcaccaggctggagtgcagtggcgtgatctcgattcacttcaacctttgactccttagttcaagtgattctcctacctcagcctcctgagtagctgggattacgggcatgtgccaccatgcccagctaatttttgtatttttagtagagacagtgtttcaccatgttggccatgatggtctcgatttcctgacakcgtgatctgcccaccttggcctcccaaagtgctgggattacaggtgtgagccactgtgcccggcctcgctggcttttttaaggagccctttatgcaccaatccatgtaatgcctcaaccccctttgtctgcaattcctagtcttatttccttccatgtttgtcagtaatctcattaaccaaatatttacatcatccttttgcccctgccacaacttctttcgaggagaaatcaggctggatatgatgagaagatac

SEQ ID NO: 877174 - DNA, 562 bp, Homo sapiens
aggctatctgggcttcctaggaaaagtagctgaaactcaggcaaagcgggaggatagaccccatatatacccctaggaaagagactgaatccagggggctgatgagctacagtctgcaggccccgcatccacggccatctcacaggataagacccactggcttggaattccagccagccaccaatagtagctttgcaccttcctgggacggagctccccagggaaggggtaggccaccatttttgctgtttgagtaacttascctttccagcctttgggctttggagagtccaagctgacccgagtctgaagtggacctctaacacaacacagcttccctacaaaaacatggcaagtctacattttccagcaggtctccaatcccattccccgtcacttggtgaggcctcccaaccagggtctccagctaccctcaccagtgtttcctggctgacagagattcaaacctcactgggatggagtttccagaggaagggtggaccactgtctttgctgtttgggtggttttggagtgtctgaggtgactgggagctgaagcaga

SEQ ID NO: 877175 - DNA, 632 bp, Homo sapiens
aagacatggagtcaaatgagatcattttgaaactttaaggtttaatgattgccccactggatttcggacttgcatggggcctgtagccctttgttgtggccaattccttccatttggaatgggtgtatttatccaatgcctgtacccccattgtatctaggaagtaactaatttgcttttgattttataggctcataggcagaagggatgtgccttgtctcagatgagactttggacttggacttttgggtgaatacttgaatgagttaagattttgggggactgttggaagggcatgattttgttttgaaatgtgataacataagatttgggagggctgaggggcagaatgatatggtttgtttctctgtgcccccccaaatctcaccttgaattgtaataatccctatakgtcaagggaatgatcaggtggagataattgaaacatgagggctgtttctaccttactgttctcataatagtgagggagttctcatgagatctgctggttttataaggggcttctctgttcacttggtgctcattctctctcctgctaccttgtgaagaggtgccttcttccataattgtaaatttcctcaggcctctccagccatgctgggttgtgagtg

SEQ ID NO: 877176 - DNA, 581 bp, Homo sapiens
aatgagatttcactgtgttagccaggatggtcgatctcctgatctcctggtccacccatctcggcctcccaaattgctgggattacaggcataagccaccatgccaagccttgattctagatcctgacacaacacatcctcaattttttctctgaggacagaaaaactgtgtgatatggaataatagtaccaaacatttgttataaccaaaggatattttatttctgcccagctgtcctgggctcttagaattgtagctcttcctagaaactggcaggatcaattgggtgacatatgaagagtggtttcactggaccaggtcytaagaaaacctggtttctgccagtagtaatacctagtaagattttttttttggactatgaattgggtgattttttaaataatataaatgataggtttgttctgtttatttttaatgattctttcaaaatagctgtgtggctttatttctataatgaagtaaattctgaatgtcttataatctgttcattattggagagtaaacaataaagaacaagtaaatgaatctgtctcagtttttgtgaatattttaatcagta

SEQ ID NO: 877177 - DNA, 604 bp, Homo sapiens
tctttcctttatacattacccagtctcaggtatgtctttattagcagagtgagaatgaactaatacggtaagttggtacctggaatggggtgctgctgtaaagatacctgaaaatgtggacgcaactttgaaactgggtaacaggcagagattggaacagtttagargactcagaagaagataggaaaatgtgggaaaatttggaacttcctagatatttgttgaatggctttgaccaaaatgctaatagtgatatggacaataaggtccaggctgaggtggtctcaaatggagatgaggaacttattgggaactggagtaaaggtcactcttgctatgcaaagaaactggaggcattttgcccctggtccagagatctgtggaattttgaacttgagagagatgagtatctgggagaagaaatttctaagcagcaaagcattagacagggaaaagagcataaaagtttggaaaatttgcagcctgatgatgcaatagaaaagaaaaccccattttctgggaagaaattcaagctggctgcaaacatttgcataagtaacaagaagccaaatgttaaccaccaagatattggggaaaatgtctc

SEQ ID NO: 877178 - DNA, 598 bp, Homo sapiens
acataaatacgaagcctcagaccctataaagtcatcacacaatgaagactacaaagcaactaactaatagcaataagacaggaacaaaaccatgcatatcaatattaaccatgaacacgaacagtataaatgctctactcaaaagaaagagtggcaaatcgaatgaaaacaacaacgacgacaacaacaagaacctatctgctgccttgaagagtaacatcttccatataatgctacccataggctcaaagtagagggaagtctaaagatatttaagcaaatggtaaacaaaaaagcccagagtttacaatctttgtgtcagatgaaagagactttaaaccaacaacagtgaaagaaaaaaaaaaaagacaaagatgggtgttatataatgataaggtgttcacgttaacaagaaaatctaaccatcytaaatatatatgcacccaacatcagagcactcgatttataaaataaatactactagatctaaggaaagaaacagacagccatacagtaatagtgggggtctttaacacctcacttagagcattagacagtatgaagcagaaaaattacaaagagattctggacttaaatt

SEQ ID NO: 877179 - DNA, 581 bp, Homo sapiens
taggaaaaatcaatattattaaaaatcaacattgcaaaaaatcaatattgttaaaatggccatggacatactgcccaaagcaatttatacattcaatgctattcttattaaactactattgacattcttcacagaattaaaaaaaaaatatttaaacattcatatgaaaccaaaaaagtgccgaaatagccaaagaaatcctaagcaaaaagaacaaagctggagggatcatgctacccaacttcaaactatactacagggctacagtaatctacgcagcctggcactagtacaagagcagacacatagaccagtggaacagaatagagaacccataaataagactrcacacctacaaccatctaatcattgacaaacctgacaaaaacaatcaatgacaacaaaattccctattcaataaatggtgctgagagaacaggctagccatatgcagaacatataatctggaccctttccttaaaccatatacaaaaatcaactcaaaatggattaaagatttacatgtaaaatttaaaactataagaactctggaagaaaacctaggcaatagcattcaggag

SEQ ID NO: 877180 - DNA, 608 bp, Homo sapiens
atataggaaaaatcaatattattaaaaatcaacattgcaaaaaatcaatattgttaaaatggccatggacatactgcccaaagcaatttatacattcaatgctattcttattaaactactattgacattcttcacagaattaaaaaaaaaatatttaaacattcatatgaaaccaaaaaagtgccgaaatagccaaagaaatcctaagcaaaaagaacaaagctggagggatcatgctacccaacttcaaactatactacagggctacagtaatctacgcagcctggcactagtacaagagcagacacatagaccagtggaacagaatagagaacccataaataagactgcacacctacaaccatctaatcattgacaaacctgacaaaaacaatcaatgacaacaaaattccctattyaataaatggtgctgagagaacaggctagccatatgcagaacatataatctggaccctttccttaaaccatatacaaaaatcaactcaaaatggattaaagatttacatgtaaaatttaaaactataagaactctggaagaaaacctaggcaatagcattcaggagataggcatggacaaatatttcatg

SEQ ID NO: 877181 - DNA, 608 bp, Homo sapiens
atataggaaaaatcaatattattaaaaatcaacattgcaaaaaatcaatattgttaaaatggccatggacatactgcccaaagcaatttatacattcaatgctattcttattaaactactattgacattcttcacagaattaaaaaaaaaatatttaaacattcatatgaaaccaaaaaagtgccgaaatagccaaagaaatcctaagcaaaaagaacaaagctggagggatcatgctacccaacttcaaactatactacagggctacagtaatctacgcagcctggcactagtacaagagcagacacatagaccagtggaacagaatagagaacccataaataagactgcacacctacaaccatctaatcattgacaaacctgacaaaaacaatcaatgacaacaaaattccctattcaataaatggtgctgrgagaacaggctagccatatgcagaacatataatctggaccctttccttaaaccatatacaaaaatcaactcaaaatggattaaagatttacatgtaaaatttaaaactataagaactctggaagaaaacctaggcaatagcattcaggagataggcatggacaaatatttcatg

SEQ ID NO: 877182 - DNA, 666 bp, Homo sapiens
cttatgaagccagccaaaaagaactgcggttttattcatcaactctgggcagtgaagcctttcaagtactgataggatctgtagctactgactacatcaaatattttttatcatcagttaacacactgcagaaataatgatacctactttgcattttccctatgtgtaacttaacacaaggtcatgaaaactatacaactttgcattttggaaaccagggtacatgtcaacaagggcaggatttcttttgcagaaaacaactaagttccctttgctgttttcaytttgataggtttttttcctgagtccttgctggaataaaaacgatcatttttttacagtattagattggaatgagtggttatatttttcagaaatttcattgatatttcttactacatttctttattttgctgtttattatgtgatgatagtggttaatatttatcaagggctatataataccaagcactgtgctatgcaatttgcattgatcatcttgttaattttcatactaactgataagacagctttatttttattcccattctacacatgaaggaagactctacacatgagtcttggactttaatgatttgcctggagtaacacaggcaaattcaaacccaggccctctggcttcaaaccccatgccttacgctgtct

SEQ ID NO: 877183 - DNA, 636 bp, Homo sapiens
cttgtctttggtcagacccagtggctcatgcctgtaatccctgcactttgggaggcagaggcagatcacctgaggtcaggagtttgagaccagcctggccaatatggcgaaaccccttctctactaaaaatacaaaaattagccagacatggcggctcacacctgtaatcccagctactcaggaagctgaggcaggagaatcacctgaacctgggaggtagaggttgcagtgagccgagatcacaccactgcactccagcctgggcgacagagtgactctgtctcaaaaaaataaaaataaaaataaataaaatccctgtcttcaaggagcttacactgtacatgtggaagcatgtaaaaaggaagttgtaaaatagtataaatggcataatttctgtttagagatacatatatgttagtatagagagcaaaaataatatctgaaagattctgcaccaaatgattaacagtggttacctttgtgaggtcaaattatagamtctttctctttctttagaacatatttctagaagggtttataatacgtagaattattttagttatttgatagtcagaaaatataagatacacataagagaaatgaaatactgtatataaaacaaagttgtatgtgac

SEQ ID NO: 877184 - DNA, 592 bp, Homo sapiens
tcattcttgctcctgtgaggagaagccaatgaaactgtagagaacaacagattctgccaattacacccaagtggtgttttattggctgacaaaatcatagggagagagagcatatggctttcactacagtctctgatcttgcttttttaaaatttattgccctctcttgatttgacatgtggagaattacaatttgaggttcagagaagttaatgatttgaaagtcacacttcagtgactaacccaggcctagactccagcctgtcaaagggagtttagagctcaagaagtcagacccttcagattataaatgggccaagtgcttgacagagatagcatatgacttgtctaagacmaaattgccaaaactagaaactcaggtcttctgactccttctgatgctctttttaatatcttacagtattctcctttgtaaccctgagacatttgtgctgctggcttatgggactgatcttctggatttcagtcctgcttctgagcctctcttttctcaattataaaaggaggatcatagaagtagtgtctgcctctttgccttcttgtggaaaccaaatgaggctgggtctgtgca

SEQ ID NO: 877185 - DNA, 614 bp, Homo sapiens
ttaattttcttgacctttttttttttttttttttttttgagatgtagtcttgttctgtcacccaggctggagtgcagtggcttgatctcagctcactgcaaactctgcctcccggggttcaagtgattctcctgcctcagcctcctgagtagctaggactacatgcgttcgccacaatagctggctaatttttttttatttttagtagagacgggattttaccatgttggccgggctggtttcgaactcctgacctcaagtaatctgcccatctcagcctcccaaagtgctgggattacaggcatgagccactgtgcctggccagttttcttgactattttattttatatttttaacatatcactttgaaatttatagcgcatagctttattttctttttaaaatttgcattgkaaatatttattctgatgtatttgtagatccacaggtagttactgtatacaaaataacacagattccgcctatgctttacccagtttccctgcatgataacatcctgaaacccataggacatatcacaaccagtacattaacattgatacactttttccctgttttacatgttttatgtttgtgtatatattgagctcagt

SEQ ID NO: 877186 - DNA, 642 bp, Homo sapiens
attaaagatctgacaaatactaaataacacacctgaatgaggaaagttatgacccaaatgactgcatactttaataatcccatattaaaatagaaaatgtcacacaaattgagctgatttgaaatatttttattagaaaataaaagctatgtccatttaaaccatcattcctaaaacgcctaccaaacaayataattattaccttaaatcccaaatgataatacaatcttttctatccacattatcttccccattggttgatacagtacatctgatccttccatgacatatacaatggccattaaggatgacagttaacagtagttatgtatatacagtgaaaatagtacaactgaccacacacacaattgaatactctcattgaggatagggtcaataaaaataatggttaaaaccaatacataattttatctgttcaatcacttgctgtctttagcagtaaaagtcaaacaacacacacatattatttttttccataaagtcttcacatgttgaaaatactttttaatccaggtgcagataattaacaatgaaaagacatttcatcttctttcttacatccagggactttatcagacttaaattcactaggtgcatggaaagaacagtaactgaaaaggc

SEQ ID NO: 877187 - DNA, 633 bp, Homo sapiens
cctggctactttttgatatttttagtagagaaggggtttcaccatattagccagacaggtcttgaactcctgaccttagatgttccacccatcttggcctcctaaagtgctaggattacaggcaagaaccactgcgccggcagaactctggttttttgagtcctagcctcaggatctgtttgctacatgatatggtttggctctgtgttcctacccaaatctcatctcaaattgtaatccccaggtatcaagggaaggacctactgggaggtgattggatcatggggacagtttcccccatgctgttcktgtgatagtgagtgaattctcacaaaatctgatgattttgtcagaaagttttccctacttgctctcacatctctctctctttctctctctctctctcgactgctgccatgtaagatgtgcctgcttccccttccaccaagattgtaagtttcctgaggcctccccagccatgtggaactgtgagtcaatgaaacctcttttctttgtaaattacccagtctctttatttctttatagcaatgtgagaatggactaatacactacaacagactatgtccctgggttattggaacctcattcacagaagcacaggagaaaggaggc

SEQ ID NO: 877188 - DNA, 608 bp, Homo sapiens
attattgccaaacctttagaaatgttactctttcagtcctgtctttaaacaacacatttcctgaacttcatgtgtattactagcattgctttttaacgttcaaaaatacagaaaaccaacacaaggaactgtttctggctcattctgtacctgctcttggcatcccacactaccattccttcaatgtaaccttgacattggctcatatgcataatgttagataatttttaaattaggagtcttagatctcaggaatggtttgaaagtcaagatcaaagtgtggatttcattcctttaaacaaccagagtttccaatccagtgcaggtgtgaaarctctcatctacaaaatcactggggatcctggctcctttcagatcaccgtgccaccatccccaagggttatctctctgtcttggtgttttaatttggcaacttcatagtccaaccacccagaggagagggaagactgatggagtggggcaaaatgtttcctagaaagtgatatgacaaaaaaaaaagcagcagagttctcttcaggctttatttctgtttaactttcaaaaattattttcttctgtgaattacatcaaagcccaaatgcttagct

SEQ ID NO: 877189 - DNA, 538 bp, Homo sapiens
taaagcagtatttggccaggcgtggtggctcacgcctgtaatcccatcactctggcaggcggaggtgggcagatcacaaggtcaggagttcaagaccagcctggccaaaatggtgaaaccctgtctctactaaaaatacaaaaattagctgggcatggtggcaccctccacgtggtggctactcagggggctgaggcatgagaatcrcttgaacccaggaggcagaggttgcagtgagccgagattgcaccaccgcacttcagcctgggcgacagagcaagattccgtctcgaaaaaaaaaaaaattagctgggtgtagtggtgtatgcctgtaatcccagctaatttggaggctgaggcaggagaatcacttgaacccaagaagcagaggttgcagtgagccaagatggtaccactgcactccagcctgagcaacagagcgagactgtctcaaaataaataaataaataaaaattaaaaattaaggtaccatgggaattgtgctttatgtgttcttaatattctaataaaaatccac

SEQ ID NO: 877190 - DNA, 654 bp, Homo sapiens
aaaggctccagctgagcccttagaatcctcccatgctcctgctgtccctgtgggtagaaagaaaagtagcttacacattagccatttcactcaattctacaattgtttcccacgtctttgcatagagcaggtccttttaggatgcctttgaacccaggtaccttcttagcattgagttgattgctggggaagtcttgcttttccaaaccatagaagtacaatttacycccattgttcttctctctccttaccttatattgagggtttgttctactcaatttttcaccttaatcttctctatataaggagtcttgtgttcatgtgtgcccccaaactccaagactcccaagctctgctaagaactctttagtgcccttcatcttctggtagcagcatggggcaggtctacatgtttctaaaagctcaggaactgtggtgcaggttgggggttgaaggatatacagatctcctcatctggaatacaactcttttgtctataagtagctctcttggagccccctcacttgacttggtggcaggaaatgaaagcacagggaaggaagggtaaattccaatgttctcaaccatgaaaaatccttcattgtttcctctttgtaatggacctcttgccatctcttacatcagttctcaggt

SEQ ID NO: 877191 - DNA, 614 bp, Homo sapiens
tattcacagtagcaaagacttggaaccaacccaactgtccaacaatgatagactggattaagaaaatgtggcacatatacaccatggaatactatgcagccataaaaaatgatgagctcatgtcctttgtagggacatggatgaaattggaaatcatcattctcagtaaactatcgcaaggacaaaaaaccaaacactgcatgttctcactcataggtgggaattgaacaatgagaacacatggacacaggaaggggaacatcacactctggcgattgttgtggggtggggggaggggggagggataggtttaggagatatacctaatgctcaatgaygagttaataggtgcggcacaccagcatggcacatgtatacatgtgtaactaacctgcacattgtgcacatgtaccctaaaacttaaagtataatattaataaaataaaattaaaaaaagaaaatataattattttcacaatcttatttaatcatgttaacatgtgttaggtttgttattttaaatgaaataataaatgtttaattttatctcattttaaatttatcatgcaatatatgcttgagatcccttaagaacaaaatgtttgagattgcta

SEQ ID NO: 877192 - DNA, 636 bp, Homo sapiens
ttaatacttggcatggtgcaagatgggcaaggatcttgcctcaccatatgctgttttctttttctttctttcttcttcttgagtttccacagagacaatgtcaagtttagagttgaaatgtgagattcaaatcatatattaaaattgtattgatggcctgctttgtgttcaggtgtcagacatataaatgtgaataagatataatcccatccattcagaagtttccagtctagtaaggagacaaggtatgaatcagaagaaatgcccctcactagctcactgaaactctaatcatgaatatgaagccacttgaagaaaattttacacaggcttcaktttacagagtgagacagaacctctgcgagtagaatcaatgaagttccatggcaaattagtgccagattctccaccaaatcttgagtttcatgacttctgctcagaaatctttctgttgtttcatacagcctcattttagcatctaacccgtcctcgggggccttctttgtgctctttccaaacagtcggtttggctttctagaaacagcatctgatgtattattaaagtgcctgaatgtaaggatgaagtcgttaaatgatgacgctgccttttccatctttctctctctcccacgtagc

SEQ ID NO: 877193 - DNA, 656 bp, Homo sapiens
ggaggccttgcaatatcaccataactcttaacttcttggacattctgcagttttttgtttttgtttttttttgtctcagactgtagcattagacacatttttgttcacaatttcctttctgaaatattatctccctttagttttcttggcactaacctgttatgcctcagataacactgtacctgatgtcttcactagtctttgatccctgtccaggcattgacttggtccttctctctgtgtccactcacctatagggcttttacccaagccgtaattgacctaagtggatgcttcagatttcctgctcctaggctgatctttctccccaactctaactctgcatttatgatactgtctgttgtgcatttttacccatttgctttttctttcactggctcactcatttatccaagacatatttttgatcttgtaattattgtgacatactttaaaacaaaaacagctgtttccacccctgacttcctgaarcctgcaatagagttgagtcttttctttctgagcattttgacatatccttaattaaatgtcaacctttccttcctggtaattgatttttcctctttttctttttaattttttaaataatttcaacatttatttttgattcaggggttacatgtgtaggttagtta

SEQ ID NO: 877194 - DNA, 639 bp, Homo sapiens
tatgcctttctgttttttatttttagtttaatttcattgtgatcagagaaaatactctgtgattttgatgtttgtgatttttttgtgacttgtgttatgggaccaaagtttggcctatcttgctaaacattccatgagtgcttggaagtatgtttattggatggactttctacaaatgttaattagttaaaattggtagataatrttcaagtctgctatattcttatcaattttctctttaatgatctatgaatgactgagagagaactgttgaaatttttaactataatcgtggattcctccatttcttcttttagtcctatttatttttacttcatgtattttgaaactcttttataaggtgaatatacataaggcagtcataatatcttatctctggtaatattctttgatctgatattcatttagccaattttttcttagtatttacatgagatgctattttgcatgatgtcccattctttaacttttaaattatgtatatcttttcctcgaaaacaggttatttgtagatagcatgattgctgtgtttgtttgtttgttttatttcttttttcttttttttttttttttttgagacagggtctccattgcccaggctggagtgctgtggtacaa

SEQ ID NO: 877195 - DNA, 625 bp, Homo sapiens
tgctactgttgggtatatacctcaaagaaaggaaatcagtataccatgcacttccatgtttgctgcagcccggttcacaatagccaagatttgaaagtaacctaagtgtccatcaacagatggatggataaagaacatgtggtacatatacacaatagagtactattcagccataaaaagaatgagattctgtcatttgcacagcatggatggaactggagttcattatgttaagctaaattagccagatacagaaagacaaacatcacgtgttgtcacttatttgtgggatctaaaaattaagacaattgaagtcatggacatagagagtagaaggatggttaccagaggctgtgatgggtagtgtgaaggtgaaaaggggtggctgtgggggagtggggtgaaatggggatggttaatgagtaaamcaaaaaaaaaaaaaatagaaagaatgaataagacctagtatttgatagaacaacaggggggaaataattttaaaatgttcaataaaaattgtacattttaaagtaactaaaagaatataattggattgtttgtaacccaaaggataaatgcttgagggataaatagctaattttccatgatgtgattattatgcatt

SEQ ID NO: 877196 - DNA, 592 bp, Homo sapiens
ggcatgagccaccatgcctcactgcttcgtttcacttctcttctctcttctctcctctctcctctcctctcttctcctttgtcccttgtcttcacttttcttcctttcccttttcccttttcttttctcttctttccttttcaaatctcactgtcaccaaggacagtgtgcagtggcgggatcatagctcactgcaatcttgagctcctgggttcaggccactctcctgcctcagcctcctgagtacctgggactacaggtgcccaccaccacacctggccaattttgttgttgtggttgtggttgtagtttgtttgtttgttttttgagaagaagtttcgctctgttgcccaggctggagtgcagtggtgcgatctcggctcactgcaacctcygcctcgcaggatcaagcgattctcctgcctcagcctcccaagtagctgggattacaggcatgcgccaccacgccttgctgatttttttttgtatttggtagagatggagttttaccatgttggtcaggctggtctcaaactcctgaccttaggtgatccacccgcctccacttcccaaagtgctgggattacaggca

SEQ ID NO: 877197 - DNA, 570 bp, Homo sapiens
tcactcctgaatgctttgctgcttagaaatttcttctgccatataccctaaatcatctcctgcaagttcaaagttccacaaatctctagggaaggagcaaaatgctgccagtcaaatagagcaagtgtcacctttactccagttcccaacaagttcctcatatccatgtgagaccacctcagcctggatttcattgtgcatatcactatcagcatttttgtcaaagcattcaacaagtctctaaggcgttccaaactttcccacatttttctgtcttcttckgagccctccaaaccgttccaacctttgcctgttacccaattccaaagtcatttccactttttcaggtatcttttcagcagtgccccactctactggtaccaatttactgtattagtacattgttttcatgctgctgataaagacatacctgacactgggcaatttaaaaaagaaagaggtttaatggacctacagtaccacgtggctagggaggcctcacaatcatggcagaaggtgaaagtcactttttacttggtggtggcaagagagagaatgaggaagaagtga

SEQ ID NO: 877198 - DNA, 643 bp, Homo sapiens
cggctggaagttaccttatatggtttagaaggagagaaaccctcagttctgggaactccacaccctttttccagatgaccatccccttatttagcatctaatcaaggaatagccataaatacagctagccagcagtccacgtggaacattgcarccactctgtctatggagcagccatttttctgtgttctgttgctgtaataaactcacttttcctttattttgttggatagctcttgaattcttttttgtgtgaagccaaggacctccctgccctggctgagcaccaatttggggatttgcctgcatcagtactgtaggacccagttctattagaaaataactgaagctgagacctcctcttttacctcacactcagtctaaaaaaccaatgtcaacaaagccacattttcagatgggaaaaaaagctaaatttaggtaaagagatagaaaaagaagattctataaatttctataaaaagttatgttagcaaggtagagaggtttagcaactatataaacaatatttaaaaataagcaaattaaagaatataattggcaaaagataagtgactatcttagacaagagtaaatcattgtcaaatgaatagaagtaaatcctccacaagggacttactgtcta

SEQ ID NO: 877199 - DNA, 643 bp, Homo sapiens
cggctggaagttaccttatatggtttagaaggagagaaaccctcagttctgggaactccacaccctttttccagatgaccatccccttatttagcatctaatcaaggaatagccataaatacagctagccagcagtccacgtggaacattgcagccactctgtctatggagcagccatttttctgtgttctgttgctgtaataaactcacttttsctttattttgttggatagctcttgaattcttttttgtgtgaagccaaggacctccctgccctggctgagcaccaatttggggatttgcctgcatcagtactgtaggacccagttctattagaaaataactgaagctgagacctcctcttttacctcacactcagtctaaaaaaccaatgtcaacaaagccacattttcagatgggaaaaaaagctaaatttaggtaaagagatagaaaaagaagattctataaatttctataaaaagttatgttagcaaggtagagaggtttagcaactatataaacaatatttaaaaataagcaaattaaagaatataattggcaaaagataagtgactatcttagacaagagtaaatcattgtcaaatgaatagaagtaaatcctccacaagggacttactgtcta

SEQ ID NO: 877200 - DNA, 614 bp, Homo sapiens
ttctagtcttggtacagttctaattgttacaatgatgaccatcatatgagattggtaggctgctaatcattttacttgtcatgaactatgataatgaaagtcaagaaggcagtgataatcacaaacttggagtgcctggcattttaatggtctaaaatttaaactacatggaaagtaaattaatagcctggaatgtactaatttttggttttgaaaaatgaaagagaatataagatataaagtagcatgaaatttgtctccctggtttaagaaatgcattgacctacaaaaatagctgctttatattaaaacattatgtgacacaactggtgctgtgaaaatactgacacatttttrtacaaagtgaagagaagatattattttggagttgtacttctgcacactgaggatttttatgatatgatttaaactgtaattgcttatattaaataaaacttgacttgctgagaaagttcaatatatataatttgacactttacacttctttgcaggatctcaaatccatgcaaatttcatgggtaagtgagcagtcttaatcaagacttgtttaatttgccagcaaaaaaatgactaatcattttattttagtgctt

SEQ ID NO: 877201 - DNA, 626 bp, Homo sapiens
gattccgtctcaaaaaaaaaataaaataaataaaataaaataaagggaatttttagtaataaatttaccatctactaataaaatggtgtattatacagatttaaaacttatactgcataaggttatttagcaacatgtaattaagttaaaatatattaataaggaaaaagcagattgatattagatatatatttccaactataagagataaaataagtctgtgattttaccagaaaatgttattaagcagtattgtctctatggtgagaaatacttttttaaaatattcatttaagtattttcaaaactgcatgatgagcatgtattacyttttaaacagtaataaaaatcaaagcaacacagtatgtttaacagtgagggaaataattattctttctcctatttttaatagaaaaaatgtattgttactgaagtaaaatttacatgtaaatgttcattttgatgttatgacagcttttcaaaaaacctgaaacagaatacagaatattttcatcacccaagaaatttcctgctttccactccattccccattcaaccagaggtaggtaacaccatagattaaattttgactgttttttgacttatagaaatgaaataatcaatta

SEQ ID NO: 877202 - DNA, 648 bp, Homo sapiens
caatcactgtggaaggggaagtaggcacatcttacatggcgaaaggtgggagagagagtgtgtgtaggaagcaagtggggaaaagccccttataaaaccatcagatctcttagaactcattcactatcatgaggacrgcatgggggagaccaccactctaattcaatcgcctacctccattgacatgtggggattacactttgagatgaagtttggttggggacacaaagccaaaccatatcattccatccctggctcctcccaaatctcatgtccttttcacattttaaaacctatcatgccttctcaacagtaccaaagtcttaacttattccagtattaacccaaaagtccaagtccaaagtctgatctgagagaaggcccttctgcctatcagtctgtaaaatcaaaagcaagttagttacttttcaagatgcaatgagggtataggtagtaggtaaattttcccattctaaattgggagaaattggccaaaacaaaggggctacaggctccatgcaagtccaaaatccagcagagcagtcattaaatcttgaagctccaaaatggtctcctttgacaccatgactcacacccagagcacgctgatgcacaaggtgggattccagagccgtggacagctctgcc

SEQ ID NO: 877203 - DNA, 642 bp, Homo sapiens
ctcactgtcacaggaacagcatgggagaaactgcctctatgatccattcacctccttccctcaacatgcagggattacaattcaagatgagatttgggtggggacacagagccaaatcatatcatcctccaactctgatcattattttagaaatgattttagctatttttgtttatttgcatttcaatagarattttagagtcagctaatcagtgtctgtattttggggggtatctaaagatacagtttagaaaaattaatattaacaaaattaggtttttaatccactcacatggcacatttctccatttatttaaacagtccttaatatttctcagtttaattttaagatggtatcatcccttccaatcagggagtttgtggagctccttctggaatccccatgctgagctgtggcttgggaattccctgtgagcagggagctggggcaatcaggactcttttgtttacctgctgtcaacactgtcctacatggcttgatgttcaatgccttgaaaataattgtttcatatacatggactgatttatatttttcaaacggtagctttgttttaatcaatccctactgtttcattttggtctagggcacaactcttgcaaacaattttccatacatgtgag

SEQ ID NO: 877204 - DNA, 642 bp, Homo sapiens
ctcactgtcacaggaacagcatgggagaaactgcctctatgatccattcacctccttccctcaacatgcagggattacaattcaagatgagatttgggtggggacacagagccaaatcatatcatcctccaactctgatcattattttagaaatgattttagctatttttgtttatttgcatttcaatagagattttagagtcagctaatcagtgtctgtattttggggggtatctaaagatacagtttagaaaaattaatattaacaaaattaggtttttaatccactcacatggcacatttctccatttatttaaacagtccttaatatttctcagtttaattttaagatggtatcatcccttccaatcagggagtttgtggagctccttctggaatccccatgctgagctgtggcttgggaattccctgtgagcagkgagctggggcaatcaggactcttttgtttacctgctgtcaacactgtcctacatggcttgatgttcaatgccttgaaaataattgtttcatatacatggactgatttatatttttcaaacggtagctttgttttaatcaatccctactgtttcattttggtctagggcacaactcttgcaaacaattttccatacatgtgag

SEQ ID NO: 877205 - DNA, 664 bp, Homo sapiens
  misc_feature 462: n = A,T,C or G
tacataagtatacttgtgccacggtggtttgctgtacctattaacccgtcatctaggttttaagccctgcatgcattaggtatttgtcctaatgctctccctcctctttcccccgacccctcaacagaccctgctgtgtgatgttcccctccctgtgtccatgtgttctcattgttcaactcccacttatgagtgacaacatgcagtgtttggttttctgctcctgtgttagtttgctgaggatgatgcttgctaggcttcatccatatccctgcaaagratgtgaattcattccttttttatgactgcatagtattccatggtgtatatgtgccacattttctttatcctgtctataattgataggcatttgggttggttccaagtctttgctatggtaaatactgctgcaataaacatgtgtgcatgtgtctttatagtagaatgacttataatccttgnggtatatacccagtaaggggattgctgggtcaaatggtatttttggttctaagatccttgagaaattgccacactgtctttcacaatggttgaactaatttacactcctaccaaccatgtaaaagcattcctatttctctgcattcttgccagtatctgttgtttccagactttttaatgatcatcattctaactggcatga

SEQ ID NO: 877206 - DNA, 593 bp, Homo sapiens
gctgaaagcagcctaatcctaccttgagtaaacagcttaaagtaggtacaaaggaatgtagagtagtttatctaaatagctcatttactcatgtggtcctaagaccaacatttgataaactgcaggtgcataattgctctctacttgggggatgggcaaccaggtcaattaccttctagtggtgtttactcaagacctttgtcatttaatatatactgaataaataagagcttcactggctgaacatggtggtggctgctactctttacagcaccttccttgatgtctgtgaggggcccggaccctaagctgaactgacaggaggaatatctgtgtcagtgtacatcattcattcattgtggggtcagggtctgcagaacgaactccacagctgtaatgtgtgtgtgtgtgtatgcgtrtgtgtgtgtgtgtgtgtgtgtatgtgtgtgtttagacagaatgagatccatctatcttctgtcatgatttattttaaggaattggttcatgcagttataaaggctgaaaagtcccagaatctgccatctgcaagctagaaactcatgaaagccagtggtttaatttagtcccca

SEQ ID NO: 877207 - DNA, 699 bp, Homo sapiens
agagccaggtagaaaatattttctacattgcaggctatacaatctctgttgcaactcttcaactctccctttgtagcatgaaaacagtgatatgccatatgtaattaataaacatggctgtgtttcaataaaactttatttgcaagaacaggcagctggtcacagttgatctcctagccatagttttccaaccttatttatctcccaaaggagatttcctttgggagataaataaggttagatttgatcttgagggtgagaaacttatgataggattaatatcctcataaaagaagaaagaggccaggtgaggtggctcatacctgtaatcccagcactttgggaggcggaggtgggcagatcacctgaggtcatgagttcgagaccagcctgaccaacatggtgaaaccyccatctctactaaaaacacaaaaattagccgggtgtggtggcacacacctgtaatcccagttactcgggaggctgaggcaggagaatcgcttgaacccgggaggcagaggttgcagtgagctgagatcttgccactgcactccagcctgggcaacagagtgagactctgtctcaaaaaaaaaaaaaaaaaaaaaaaagaaagaaaagaaaagaaaaaaaaaatctagaaaggaagcaaactcatttgcctaagaccatggcaaaatcactaaaaccatctagtacttt

SEQ ID NO: 877208 - DNA, 585 bp, Homo sapiens
ggttgctcatattcacacaccctagagtagaggaagcagtaggaacccggacctcctcaccagagggctggggagggaagctgcagtctctggttgggaggagacgagcagctggccaaaggcccctttgtagaaactggccatgctcttcctctgggcgggaggytccagcctggagctccgggcctgcccctggctttcttctggccattgtgagcgtgtattgatcaggccgggaagcaataggcctgcagcagctgaagctctagggtgggccgcattgatcggacccccgccccaggatatttataggatgggctgggctagcaaataatcggggagagcttgtttaacgagggttcagggtgctcttcgctagctggttaactttaagtattggaaatggaattgatgcgcacataataatattatgattcatacaaaccacttctcaggcaactcaatatatttcattacctcctttctagcaaatgtattgatttctgttttgcggttttataacacaatttcaaggctgttgtgggtttaatgagccgtgttcttatgatgtttaaaaagatttga

SEQ ID NO: 877209 - DNA, 596 bp, Homo sapiens
atttgaccaggatgcgtttctcaggaagcgcctgtcacaagctatcgatggtcttttaatcccgagttacttagcactgggcttactttctccctgagatgaccagtctccagtgattcctcagcttacacggcaaaaaacaagatgccaaatggctcttcttgataytggatgactgggtttaattcctgggatatggatttgccaacagatgcagcttcttgcacatataattccatgacttccaactttacctttgaaatttctaggaaggtgtctgctaatctgaagggatgctatgagattcttagacaaaaaaaattctctaaatttgtcactatttgcaatgctattatgtatgtcatgataatatcagctagtatttttgaagtctttgttttacatgttttatttgattttatagtcaaagaaaggcaaaaaggttgatatttttattatctctatttggagatgaggatactgaggtaaagaggtcaagaaacattcctgagatcacagagctagctcatggtggaactagaatagctaccatgctaaacagctgcacatactgagggattcaccactgcacaaag

SEQ ID NO: 877210 - DNA, 546 bp, Homo sapiens
tcatgtgtatgcagatgggggagaatgctgctgtcttcctgcacacctaaacacacacagacacccaggttcctctctggaagctcctacctgctctggcttcctctgatgagtctaatgattgactaaaggcagcttgacattcccaatgcaggcctctcatttatggtaaagaaaaaggagaggagatgaaagcacttgcagcaggtttacatgaggataacttccagtcaatgcagaatcctaaaggcaaaatagctctttagctaataactatgacatgtttctgatgacaattgcttgatgattgacccccttcaaagagaaggcctggagttctcaggaggttgcagcagccttgcacccttcargtttggcttgggtaagcctgcaggctggtaacatgtcctcacttcaatctgatgtgcctagccttcctgtgcattcccttaaattccaaaacatcccttaggtaaatcacagaagttgaaatgttggcaacatcactaacaaggaaaacaacagcaaatatgtctttggtgcaag

SEQ ID NO: 877211 - DNA, 593 bp, Homo sapiens
tctttgctaaaacacagtaagagtcacctttattccagtttccaacaagttccacatctccatctgagaccaccttgccctggacttcattgtccatatcactatcagcattttggtcaaagtcaattgacaagtctttagtgaagttccaaactttcccacatcttcctgtcttcggagccctccaaatctctaggaagttccaaactttcccacattttcctgtcttcttctgmacccttcaaactgttccaacctctggctgttacccagttctaaagtcacttccacatttttaggtatccttatagcagcaccctagtctttgtagtaccaatttactgtattaatctgttctcatgctgctaataaagacattatgtgaggctgggtaatttacaaaggaaagaggtttaattgactcacagttcagcatggctgaggaggcctcaggaaacttacaatcatgtcaggaagggaaataaataaatatgtccttcttacatggcggcaggaaagagaagaatgagagaagtgcagagctaagcagggaaagcccctcacaaaaccatcagatctcatgagaactcact

SEQ ID NO: 877212 - DNA, 593 bp, Homo sapiens
tctttgctaaaacacagtaagagtcacctttattccagtttccaacaagttccacatctccatctgagaccaccttgccctggacttcattgtccatatcactatcagcattttggtcaaagtcaattgacaagtctttagtgaagttccaaactttcccacatcttcctgtcttcggagccctccaaatctctaggaagttccaaactttcccacattttcctgtcttcttctgaacccttcaaactgttccaacctctggctgttacccagttckaaagtcacttccacatttttaggtatccttatagcagcaccctagtctttgtagtaccaatttactgtattaatctgttctcatgctgctaataaagacattatgtgaggctgggtaatttacaaaggaaagaggtttaattgactcacagttcagcatggctgaggaggcctcaggaaacttacaatcatgtcaggaagggaaataaataaatatgtccttcttacatggcggcaggaaagagaagaatgagagaagtgcagagctaagcagggaaagcccctcacaaaaccatcagatctcatgagaactcact

SEQ ID NO: 877213 - DNA, 657 bp, Homo sapiens
ggtagtatgaacctgaagccattcttttatcataaatcttcttacccctttattgaatttgggaaataataagtgctcacaccttttgctctgcctggcacctacatctgcttcccagcagccatcacacatggtgcattatgaaaatcctggtgagatgtgacacaattatgatggagattgaagcgtccagtgtaatatatttcactcaragatgccaacacttacaattcaaatcccaccctcaccccatcaggatttgttaggtgaaattagtttttaaaaaaagatgaatagagatgtaattctttctaaagaacaaatcacctctaccattcctatttaattatttaaaaaatattcaaatgctacttgaaaaattaccacataatttttaaaattctatacatgggattacatttatacaagtttgctaagatgcaagtggcatttggaatagtcaacaattaggcattttccaaagcatttatttttgaaagatgtctggcctaaatatgtcattatcattagagtttagtgatttttacaatcagaacatagctgtcaaaagggctggtttttgacatcatggttactgttgaggaaaaccacagccctgaatttgaaagctcttctcctaggagaggcccttgcctt

SEQ ID NO: 877214 - DNA, 645 bp, Homo sapiens
tggagataagaaacttactgggaatcccagcactttgggaggccgaggcaggcagatcacaaggtcagaagatcaagaccatcctggctaacatggtgaaaccccgtctctactaaaaatacaaacaattagccgggtgtggtggcrggcacctgtagtcccagcgactcgggaggctgaggcaggagaatggtgtgaacccgggaggcagagcttgcagtgagccgagattgtaccactgcactccagcctgggtgacagagcaagaccccatctaaaaaaaaaaaaagggaaacttgctgggaactggagcaaaagtgattctgattatgttttagcaaagagattggtggcattttgcccctgccctagagatttgtgaaactttgaccttgagagatgatttagggtatctggtggaagaaatttctaagcagcaaagcattcaagaggtgacttgggtgctgttaaaggcgttcagttttaaaaaggaaacagagcaaaaggtttggaaaatttgcaggctgacaatgcaatagaaaagaaaattccattttctgatgagaaattcaagcaggctgcagaaatttgcataagtaacgaggagttgaaggttaatcaccaagacaatgaagaaaatgtctc

SEQ ID NO: 877215 - DNA, 645 bp, Homo sapiens
tggagataagaaacttactgggaatcccagcactttgggaggccgaggcaggcagatcacaaggtcagaagatcaagaccatcctggctaacatggtgaaaccccgtctctactaaaaatacaaacaattagccgggtgtggtggcaggcrcctgtagtcccagcgactcgggaggctgaggcaggagaatggtgtgaacccgggaggcagagcttgcagtgagccgagattgtaccactgcactccagcctgggtgacagagcaagaccccatctaaaaaaaaaaaaagggaaacttgctgggaactggagcaaaagtgattctgattatgttttagcaaagagattggtggcattttgcccctgccctagagatttgtgaaactttgaccttgagagatgatttagggtatctggtggaagaaatttctaagcagcaaagcattcaagaggtgacttgggtgctgttaaaggcgttcagttttaaaaaggaaacagagcaaaaggtttggaaaatttgcaggctgacaatgcaatagaaaagaaaattccattttctgatgagaaattcaagcaggctgcagaaatttgcataagtaacgaggagttgaaggttaatcaccaagacaatgaagaaaatgtctc

SEQ ID NO: 877216 - DNA, 631 bp, Homo sapiens
agtaggctatacaatttaggtttgcacatgcaacgatgtccaaaaagaaaatcattgtatgtttatacatgcaataatggtttagcctactgttcccaggctacaacctgtagagaatgttaatgtactgaatactgtaggcaactgtaatacaatgataggtatttgtgtatttaaatatatgtaagcatacaaaggcacagtaaggatacagtataaaagacaaaaaaaaaaaaaaggtacattttcatagtgcattctactaagccagtcttgctttgctataaagaaataccgaagactgggtaattgatatagaaaagaggtttaattgactcacagcttcttcgggctgtgcaagcatggtgctgccatagcttggtttytggggaggctttggggagcttttattcagggaagaaggagaacccggagcttgtgcattacatggtgaaagcaggagcaagagagagagtagtaggtgggggaggtgtcacacacttttaaatgacgagatcccatgtgaactcagagcaagagctcacttaccatcaccgggggaatggcacaagccattcatgagggatctgcccccacgatccaaatacctcccaccaggccccacctccaa

SEQ ID NO: 877217 - DNA, 629 bp, Homo sapiens
aacaatatagtacaatccattggctcctgactagggatatgtttcaataattttaacactttaggatgcgtatacatgctatgaaaatgattttcaattctttgtgcccctacaaggctgattcgtcatttgcaaagatctgggaagcaatattagcaaagcaatccatgagcttggcaacatttctgaggatgactacaaagttcctaggatatcaagaggtagcaataatgatccctgccagtgctgtactgggagactagccaatatcaagggaagtaatggcaagttgtggatccacgctttgtcctatcctgcgtgttccacatctattcatattgaagttttcrttttctggccaccccattcattccattccattgtagcctttctggccactgtggtatctctacttaaataccacttgtaagtgcacccattcctgacaattctctattagtaagcaatgtatctttcttattacatcctaattctgtctcttgctttatttttatctttggtgttcattatcctgtgatatgtaatgcatttacatatgtatttttaaaatgtattgtctgtcttcaactggaatataacctccttgagaatatctttttaatttttca

SEQ ID NO: 877218 - DNA, 626 bp, Homo sapiens
agggtagacgtggaagatattataagtagtaaactgtggaaagtgacagggtagaatgtatgtaaggagacatatgcatttgtagaacatgtatgaggtacagaaataacatcataagagaacagtaacattgtcttctgagtatgacttttcttaggttgaggggttagggaaaatgggaaattttaggaaagaatttccacctgagctttttaaagatgaaaaggagcaagtcggagacattctagcwtggtgatatggtttggctgtgtccccacccaaatctcatcttgaattgtagctcccataattcccacatgtcatgggagggacccagtggcaggtaattgaataatgggggcgggtctttcctgtattgttcttatgattgtgaattagtctcatgagatctgatggttttataaagagatcccctgcacaagctctcttgcttgctgccatgtaagatgtgcctatgctcctcctttgccttctaccatgatcgtgagtcctctccagccatgtggaactgtaagtccattaaatccctttcctttataaattacccagtctcaggtatgtctttattagcaatgtatggactaatacagaaggacagcaggaaa

SEQ ID NO: 877219 - DNA, 687 bp, Homo sapiens
ttctcagttactaaggttgatggattccttttttggtttaagccagctgggattagatatctgtcacctataatggagaagttcttgcatatgtaggaccaaacctatactgtgttagtttcatctgatgaatatgttttaaatgcaggttcttgatcctaccattactgattctkattttgttggcttggaatcgggcccaggaatatgtatttttagggtactcaagatgactcagatgtcactagcctacacatccactttaggaaactattgccttgaattaggagtctttttatttggtggtcccttcagggctttgtaaggtaccttgcaaaaaaaaaggatgattagcccattacatatttgttgacttgaacacacatttcaagaatatgggcaaagagacagcccagattagttttcctttgaaagtattatttttaatagaaaaataacagttatatacgtttatgggtcacaatgtgatgtttcgatacatgtgtatgttgtggaatgaagaaagtagcctaattagcatattctttagctcaaatatttattttttgtttgtcgagaacattcaaaattatttttttcttagctatttggaactatacagtaattattcttgacaggaggattgcatgaagttggccagacagccaaaaagaatcagattatctc

SEQ ID NO: 877220 - DNA, 687 bp, Homo sapiens
ttctcagttactaaggttgatggattccttttttggtttaagccagctgggattagatatctgtcacctataatggagaagttcttgcatatgtaggaccaaacctatactgtgttagtttcatctgatgaatatgttttaaatgcaggttcttgatcctaccattactgattctgattttgttggcttggaatcgggcccaggaatatgtatttttagggtactcaagatgactcagatgtcactagcctacacatccactttaggaaactattgccttgaattaggagtctttttatttggtggtcccttcagggctttgtaaggtaccttgcaaaaaaaaaggatgattagcccattacatatttgttgacttgaacacacatttcaagaatatgggcaaagagacagcccagattagttttcctttgaaagtattatttttaatagaaaaataacagttatatacgtttatgggtcacaatgtgatgtttcgatacatgtgtatgttgtggaatgaagaaagtakcctaattagcatattctttagctcaaatatttattttttgtttgtcgagaacattcaaaattatttttttcttagctatttggaactatacagtaattattcttgacaggaggattgcatgaagttggccagacagccaaaaagaatcagattatctc

SEQ ID NO: 877221 - DNA, 645 bp, Homo sapiens
tatcatagctctcagctacacttcctgcaatactaagacagtcaaggaaagaaatcatggtcagtacttaaatgcaacaaatgactactatatagtagtcaatttacatagcgacagaaacatgatcaaagtgatgtctactcaagtagaaggctcacttaactccatggctccttggtaagtgatggtgataaaacacaatgttctactagtctacatttggaaactactgtcaggcagtaagtttctgtaaggaaatttgtttggacccagatttgtttctgtaaggaayacctttagtcactctcccaaaaggaatgcaggaaccacagaaaataaagcaaaagaggattttttcatttattatggactacctgggccttctaaagcaacctgtcctcccaagttaattattacatagagaacaagtaatacagctatctttggctacttggcaactgaggaacatgttccctggtaggcaaagtaagagaatttttctcagcaacaagcgtactcttccatatgtaaggaccaaactgtcccttctcttgccaggatttatcactctctgagttaactgcaacccatttggccactttgaagccagcattcttctgtagatgataaaatcatgcaagagaa

SEQ ID NO: 877222 - DNA, 602 bp, Homo sapiens
aatttcagaaaaatcaagacacttctatttggcaactggtgcctgagtcctgttgttcccattaacttacccatggatgtgtggcaatttatttctcagggaattgttttgaggctgctctggcaacaacaacaaaaaaacaccagatagctctccttgagataaatgcatgaatgtggctagatgagtatccttattaaggaaatagacaaattgtttccttataccttgaagttccttggccatctgggacttactttaggatatcctggaacctgctgtcagccttctcctgttctacagtgtcccttccatcttctcattaatyaaggtttgactgcatcagtcaggttagtctgggttatgctgcagtaacaagcaaccttcaagtctaaacagctaaaccaagcaaaagtgtattacttgctaatgttacatgtgcagcaaagaggggtatggaagtcttgagcttaatataatcatctagagtcaggctaaaagaaggcctacctcaattccagtgttttcaatgaccagaggaggaaaaggaaatgtggtaattacacattggctcataaggcttctgtctggtaaaaattaga

SEQ ID NO: 877223 - DNA, 624 bp, Homo sapiens
catgtgtggcttggcatgaggtatgcccagtatagtaaacgtttatgaaacactagctcccccacccctccctgctcttggtgctctgattccaggtgtcctgtgaaattggattcatagttctttatcaaatgggcatggggcacctattggtgcctgtgtggtgctggacagaaggacatctatgtgcttgtcccctgttcactaaaccaggtgagacacacacacaccccaacacacacacacacacagaagtacrtagataggcatttattttagctcttcagcatgagtataacccaatgtgagatcaagcatcaggattgcacaggggggcactgaaatcaggctgtgcagaggtgaggacatttatggtgggtccccagggatggagaaggggtcataggaggaaggaacagtgccatgaagatataactgaggccagaatggtcctcaacctttgggtggtcaaaggcccattagagtcgatgacgactcccaaagaccacacggaagcacacagttgtgcagttggctccagggagtccgaggggccttgagctacggcatggacctcgtctatggctctctgacttttcttatctgtctctaactcttcctctc

SEQ ID NO: 877224 - DNA, 529 bp, Homo sapiens
gtggctatcttcattgaaagttttttctcaaaagccttaaaatagaacgtagttcttggcagcaatttgaaagttatttgaggagaaggggagacttaaaatgatgattcaaatgaagcaaactaaaaagtaataaagcaagacagaggaaaaagcagtaytcacttgagcacatcccaaaagaataacatttcaaatgtaactagaaaaaagtatgctgaagttcgcaatacagaaataattattaataagatagctttaaagccctgctcagcttttcaatgttgggaattgacccagaggtggctgtaacctaagatggttccttcagtaatgaccattttttctttttcaagatgatgattattccccaccttctgagagacaaagaccaacgagccaccacagccaccagtcccagaacccgccaatgctggggaacggaaaatgagggagttcaactctggtaagttcttagcaaaatccatgaccttttcctttatcttctggactctcagtgtgactgatg

SEQ ID NO: 877225 - DNA, 623 bp, Homo sapiens
gagaataacatctagattgttatatgaaaatttccgatttttagtattggttcagaaagttttaatgaaaaaatttcaaactctataatcagaaatcacacacaaacttatcactgaaacatacacacatgcacacacacacacacacacgcatgcaccccacctatgtccaactgaggccttctgacaaatctatgatgctttagaaactgatttaacactgaaacatttccatctatatacctaaaatttaattttcaagagtaaacatatgaattttgacatctgtatttcataatacccccattgattatattttctttgtacttgatacattcttattcaattcaaataatgacaatagtaatgtttggttgaagagatagtggacacagttacttttgctaaagtgagggaatcatagggaatacggttgtagtttttaaaaatagtgaacattatcaaaatattcatatyttgtttaatgaaacatgaccttttccaaaacacacgtatatttttgaaatgcacatgaaactttggctttaaggatcacagaaaatgattaatttatcttggtcatgattttagctgtcacaaactctcaaatgttttattatact

SEQ ID NO: 877226 - DNA, 523 bp, Homo sapiens
tctgttcagttttaagtatttatcttcctttgctatgtaaatgaagttttctgtatcattttatcttttagctggctatttttattttgtatataaatgctatttctacatattaattttatatcctgctacattactgaattgttttattatctgagtccatggacattcatttgaaagctacatactacacacattctgacagatgacattgtctaattgargatgctgtacttcggtcaagggtatgtgatgttatttagagttgaaggaaaataatctacaacaatgttgagccttaaaaatctgtttgtttcaagaagaaatcagcatacttcctgattttaaaacggtctatgaagaaatggtaatgaaaatagtgtgatactgctacaagaatagacatctataccaaataaatagaattgagagtctagatataaaaccatacatttacagaatggacaaatggaagccagggccagaaaggaaattatgatctgctgcatagttctgattttca

SEQ ID NO: 877227 - DNA, 523 bp, Homo sapiens
tctgttcagttttaagtatttatcttcctttgctatgtaaatgaagttttctgtatcattttatcttttagctggctatttttattttgtatataaatgctatttctacatattaattttatatcctgctacattactgaattgttttattatctgagtccatggacattcatttgaaagctacatactacacacattctgacagatgacattgtctaattgaggatgctgtacttcggtcaarggtatgtgatgttatttagagttgaaggaaaataatctacaacaatgttgagccttaaaaatctgtttgtttcaagaagaaatcagcatacttcctgattttaaaacggtctatgaagaaatggtaatgaaaatagtgtgatactgctacaagaatagacatctataccaaataaatagaattgagagtctagatataaaaccatacatttacagaatggacaaatggaagccagggccagaaaggaaattatgatctgctgcatagttctgattttca

SEQ ID NO: 877228 - DNA, 611 bp, Homo sapiens
attctgtataatacatacacacgtataatataatagaatcatattctgtcatcttttcacttcagtctatctctttctgtgtcattttactcctttacaaagaccatatcttctttaatcctgctgagggaagcaacttaaaaataactttgatatggtttggctctgtgtcttcacccaaatctcaccttgaattgtaataatctccacatgttaaaggtggaaccaggtggagttaattaaatgatgggagcggtttcccccatgctggtttcctgatagtaagttctcacgagakctgatggttttgtaaggggcttcccctctttgattggcactcatttctctctcttgctgccctgtgaagaggtgccttccgccgtgattctaagttttctgaggcctccccagccatgcagaactgtgagtccattaaacctcttttctttataaattacccgttctcaggtattgcttcatagcagcatgagaacatactaatatgtacttctagcttctgtagtcaatgatttctggatacatactcttcttctaacactttaagataatattcctttctcttcatttaaaaatatgtaggcaacttcata

SEQ ID NO: 877229 - DNA, 611 bp, Homo sapiens
attctgtataatacatacacacgtataatataatagaatcatattctgtcatcttttcacttcagtctatctctttctgtgtcattttactcctttacaaagaccatatcttctttaatcctgctgagggaagcaacttaaaaataactttgatatggtttggctctgtgtcttcacccaaatctcaccttgaattgtaataatctccacatgttaaaggtggaaccaggtggagttaattaaatgatgggagcggtttcccccatgctggtttcctgatagtaagttctcacgagagctgatggttttgtaaggggcttcccctctttgattggcactcatttctctctcttgctgccctgtgaagaggtgccttccgccgtgattctaagttttctgaggcctccccagccatgcagaactgtgagtccattaaacctcttttctttataaattacycgttctcaggtattgcttcatagcagcatgagaacatactaatatgtacttctagcttctgtagtcaatgatttctggatacatactcttcttctaacactttaagataatattcctttctcttcatttaaaaatatgtaggcaacttcata

SEQ ID NO: 877230 - DNA, 711 bp, Homo sapiens
  misc_feature 1, 2, 3, 4: n = A,T,C or G
nnnnaatctaatattgataaacttctgttatctgatccacagtctatattcaaatttcatcacttgtctcagtaatatcctttttaaagataactattccctgctgccgcctgtgcccctccccctgccatcaagttctaattcatttctggcatttagttatgtctccttagtcacctttagtgtgtgacagtcccttagcctgtttttgtttttcttgacctttgatattagtaaggggtaygggccagttattttgtagaatgtccctcagtttgtgtttgatgtttcctcatgattagattgaaattacgcattttagggagcaatatcacaaaagtaatgtgtgtctgtagtgcatagtatcaggaagcatgtgattaaggtagtgtgctcatgtctctccactataaaattcctgcattcccttactaattagtaagaaattgtggaagatactttgagactatataaatgtccttttcttcatggaaatttcacttactagttttttttagcatctattgatgacttttgttaactgcataatttcttctgtgtttattagtttgctttccactgtaagagctttttcttctccctcattcttaaattatatcattataaacccatggatttctattttatttagtaagctatccattactaatttctattgttattactattattgatgctcagattgtccca

SEQ ID NO: 877231 - DNA, 711 bp, Homo sapiens
  misc_feature 1, 2, 3, 4: n = A,T,C or G
nnnnaatctaatattgataaacttctgttatctgatccacagtctatattcaaatttcatcacttgtctcagtaatatcctttttaaagataactattccctgctgccgcctgtgcccctccccctgccatcaagttctaattcatttctggcatttagttatgtctccttagtcacctttagtgtgtgacagtcccttagcctgtttttgtttttcttgacctttgatattagtaaggggtatgggccagttattttgtagaatgtccctcagtttgtgtttgatgtttcctcatgattagattgaaattacgcattttagggagcaatatcacaraagtaatgtgtgtctgtagtgcatagtatcaggaagcatgtgattaaggtagtgtgctcatgtctctccactataaaattcctgcattcccttactaattagtaagaaattgtggaagatactttgagactatataaatgtccttttcttcatggaaatttcacttactagttttttttagcatctattgatgacttttgttaactgcataatttcttctgtgtttattagtttgctttccactgtaagagctttttcttctccctcattcttaaattatatcattataaacccatggatttctattttatttagtaagctatccattactaatttctattgttattactattattgatgctcagattgtccca

SEQ ID NO: 877232 - DNA, 611 bp, Homo sapiens
gaaacgggtgcccttctgcaccgtctggaatgttcacaagcacaccttcatgaagtgctggaagtgctgtgaattttttttttttttttttttttttgagacgaagttttgctcttgttgcccaggctggagtccagtggtgtgatctcggctcactgcaacctctgcctcccgggttcaagcgattctcctgcctcagcctcccgagtagctgggattaaaggtgcccgccaccatgcctggctaattttttgtatttttagtagagacagggtttcaccatgttagccaggctggtcttaaactcctgacctcaggtgatctgcccgcctcagcctcccaaagtgctgggattacaggcgtgggccaccttgcccagttagtactgtgwcattttgaaagttataaaggaatttttatttgtagcatgcacctcctgtgtgtcaggctctatactgggcaccgtcagcctagaagacacagtgcctggtcccagggagtgggcatttggggctgcatgcctgggagtcagtggagagtgggttctggcactgggggtcagtcacaaaggaacaggggcctcaggtgccagctccacagaatgccaaagg

SEQ ID NO: 877233 - DNA, 541 bp, Homo sapiens
aatttcccaactgggcatccatccatccaccagccaagtggccagtggatctttgttgagcagttcctgtttgccgagccttgtgtagatctctgctgcgagggaggaggaggtccccaccttaaggagcttttaaggcttgttgggaaggcaaggcatatatctgaaaagccccattgcatgcaagttaactaacgatacaggatgatgccatgagacctctgccatccacgtaccagaacctgctctgctgatttcctggctcgatgtccatttgctgctggctcrtgctcatattcacaagtcactcttgagagtcctttccctgtgccagaccccgtgctgagtttcagacacgcagggatggacagcacacagccttggccctccaggcgcttgcatccgactgtggagagccactcttagaaacccagggagcaatccaagtctgtgtgtgacgccactcctggacctggggaacacagagcccctgccagtgccctgggagctggtattcttgcagggttggagacagacctgt

SEQ ID NO: 877234 - DNA, 541 bp, Homo sapiens
aatttcccaactgggcatccatccatccaccagccaagtggccagtggatctttgttgagcagttcctgtttgccgagccttgtgtagatctctgctgcgagggaggaggaggtccccaccttaaggagcttttaaggcttgttgggaaggcaaggcatatatctgaaaagccccattgcatgcaagttaactaacgatacaggatgatgccatgagacctctgccatccacgtaccagaacctgctctgctgatttcctggctcgatgtccatttgctgctggctcatgctcatattcacaagtcactcttgagagtcctttccctgtgccagaccccgtgctgagtttcagacacgcagggatggacagcacacagcyttggccctccaggcgcttgcatccgactgtggagagccactcttagaaacccagggagcaatccaagtctgtgtgtgacgccactcctggacctggggaacacagagcccctgccagtgccctgggagctggtattcttgcagggttggagacagacctgt

SEQ ID NO: 877235 - DNA, 639 bp, Homo sapiens
catatattcatgttacctcagcttatttcttttaggtaggcatattatttagaatgtactagagcagcctctatgaggggatttctcttttgactgtactccacttgctgtcacacccgagaatgcaaagccaggctgatctgacatagaatctgcatgtaagatctgacctctgcctgggattcacaaagcaaggtcaggctttggatttagaatgtacagaaaacaaacaggaaacattttctgcatggtgagatgtcaacatagatgtcttgaagttcccatttgagaatgtggctctttgagtttttcaggtcttgtctagtgacctgctgcagttatgtgaggggctccaggtgtaaatagaatctgatggcagaatctataagygtaaacaagcatcttcagagtaagagattaaggccacaaagtatccagagcctccaccaaactacacctatgtgttaaatgtgatactggagtagagtattcttgtcctttgtttgtttgtttgtttttaacccaaaagctagctaatcaggatgggtgattaaagttctggagcttcaccagggcagttcaatttttcatttagcctgagtgtctcttcccggacttatcaatgggccatcagctcag

SEQ ID NO: 877236 - DNA, 586 bp, Homo sapiens
aatcagttgagtttaattttaggaaatcatcttgggtgggcctaacttaaccagtttgaacactttaaaagaagactgagaaagtcttgtacttggtgttggctgccagctgagatcttggctgagactgtcagctagaactctattttttaaattttattgtttaaattgacacacagtcgatgtacatagttttgaggtacatgtgataatgtaatacattcatattacttagcattgggatatccatcaccttaaatatttgtcttttctttatgctagatacatttcaattattttcttccrtcaactagaactcttataactcacggctagccactccacgtgatttggcttctctcacagcatggctgttggattccaaagaaaagcatcccaggagagggtaagtgggtgtagagggggaggaagcaggggtggggagcacacaccaacatgcatgaggtgaatgctattcactccacctgcactgagtgcatcctactctattctctatcctagtttcaacagaaggaagagaaaacagactccacctcctgatagtgtatgacaagaatctggaaca

SEQ ID NO: 877237 - DNA, 665 bp, Homo sapiens
ttgttacaaggaaggtgcttctactcattcttcacccggataaatcctgtgtgcatttcaaaacttggtcccctgtgagaatgtaaaaaggtgcagcttctatggaaaatattttgatggttcctcaaaaagttaaacacagaattaccatatgattcagcaattccacttctaggcatttccctggtggtctagtagttaggattcagtgctctccccctcctakgcatataaccaaagaaaattgaaaacaggggctcaaagagacatttgtacttgaatgttcatagcagcattattcacaatagccaaaaaaaatggaaacaatccaagcatccatcaacagataaacagacaatctaaatactgtattcagccataaaaatgaataaagttctgatatatgttaaaacatggatgaaccttgaaatcattatgctaaatgaaataagtgtcccagaaggataaatattgtatgattccacttgtatgaaatatctagaacaggaaaattcatagagatgaaaagtagattcgatgttatgagaagttgggaaagggaaatgggaagttattgcttaatgggtacagaggttttgtgtgggttgatgaaaaacattttggaaatagtggatggttgcacaactttgtggatgtaatgaacg

SEQ ID NO: 877238 - DNA, 531 bp, Homo sapiens
gcctaggcaacatggcaagaccctgtctctaaagaagaaagaaagagagagagaaagaaagaaagaaaagaaaaaagaaataaaagaaaagaaagaaattgtgtcacaatcttgttcagagtaaatttgtttttctttctttttttttttttwtttgaaacagggtcacactctgtcgcccaggctggagtgcagcagcacaaccttggctcactgcaaccacctctgcctcctgggttcaagcgattctcctgcctcagcttcgcgaatagctgggactacaggcctgcgccaccatgcccagctaattttcatatttttagtaggcacggggttttatcatgttggccaggctggtctcaaactcctgacctcaaagtgatccacccgcctcggcctcccaaagtgctgggattacaggcatgagccaccgtgcccggcccagagtaaatttttaatgagcaattccttcaggatagaagagaaatggggataaattcaaatcatttcaggtcgatgtttgctaggact

SEQ ID NO: 877239 - DNA, 595 bp, Homo sapiens
ggactgggattttatccttaagatattgttgaaggtactagtccctacctattaaaattctaattagctgtccagattgaatggtctgaaattagtctgcagtcctcatttccactgctcagggtccctagaagtaaactgaacccatgaatgtccctatgagtactattatggtctctccatcatgtgtgtccagtctgtttaatgggctgtcttgttactcactccccttccatgctggaatgggagcttggtttactcawtctcaagaaaaggatgtgtgcaaggaaatagaaatattaagtccttttctatcccccaggccactcataatctaattaaaggcaagacaagttaaagatacctctattgaagaccttatggtatgaattgattggtcttcttatcaaggtctcttttgtcatggaattcattattgaaagagcacatggatacataaataggtcagaatatagtatgctaagggctgtgatagagtttgtgtgtgaaaatactatgggacaatagaggagttactaatctgcttttagacatttgagctagatcttaaagcaagtctaggagttttccaggc

SEQ ID NO: 877240 - DNA, 595 bp, Homo sapiens
ggactgggattttatccttaagatattgttgaaggtactagtccctacctattaaaattctaattagctgtccagattgaatggtctgaaattagtctgcagtcctcatttccactgctcagggtccctagaagtaaactgaacccatgaatgtccctatgagtactattatggtctctccatcatgtgtgtccagtctgtttaatgggctgtcttgttactcactccccttccatgctggaatgggagcttggtttactcattctcaagaaaaggatstgtgcaaggaaatagaaatattaagtccttttctatcccccaggccactcataatctaattaaaggcaagacaagttaaagatacctctattgaagaccttatggtatgaattgattggtcttcttatcaaggtctcttttgtcatggaattcattattgaaagagcacatggatacataaataggtcagaatatagtatgctaagggctgtgatagagtttgtgtgtgaaaatactatgggacaatagaggagttactaatctgcttttagacatttgagctagatcttaaagcaagtctaggagttttccaggc

SEQ ID NO: 877241 - DNA, 595 bp, Homo sapiens
ggactgggattttatccttaagatattgttgaaggtactagtccctacctattaaaattctaattagctgtccagattgaatggtctgaaattagtctgcagtcctcatttccactgctcagggtccctagaagtaaactgaacccatgaatgtccctatgagtactattatggtctctccatcatgtgtgtccagtctgtttaatgggctgtcttgttactcactccccttccatgctggaatgggagcttggtttactcattctcaagaaaaggatgtgtgcaaggaaatagaaatattaagtccttttctawcccccaggccactcataatctaattaaaggcaagacaagttaaagatacctctattgaagaccttatggtatgaattgattggtcttcttatcaaggtctcttttgtcatggaattcattattgaaagagcacatggatacataaataggtcagaatatagtatgctaagggctgtgatagagtttgtgtgtgaaaatactatgggacaatagaggagttactaatctgcttttagacatttgagctagatcttaaagcaagtctaggagttttccaggc

SEQ ID NO: 877242 - DNA, 589 bp, Homo sapiens
tggaaagatacaacccttctggattgaattaaaaaaaatagaaatcttgaacaggccaataaaaagcagtgaaactgaatcaataataaaaaattagcaacaacaccaccaacaacaaaaacaaaaacagaaacagagggagttacagccaaattataccagaaattcaaagaattcaaaccaatcctactgaaactgttccaaaagatggagaaagaaggaatcctcccaaacttgttctatgaagccagtatcatcctgataccaaaacctggaaagggcataacaaaacaaactgcagaccaatatscttgatgaacatactcaacaaaatactagtaaaccaaatcaaacagcaaatcaaaaatataatgccccatgatcaagtggtttcatccagggatgcagggatgctttaacatacacaagtcgataaatgtgatacatcccataaacagaattaagaactaaaaccatatcatctcaataggtgcagagaaaagcatttgatgaaaatccagcattgctttatgatgaaaaccctgaacaaactaggcctagagggaacatacctcaaaatgacagaagc

SEQ ID NO: 877243 - DNA, 605 bp, Homo sapiens
tggtatgagatggtatcccattgtggttttggtttgcatttctctgctggccagtgatgatgagcattttttcatgtgtttttcggctgcataaatgtcttcttttgagaagtgtctgttgctatcctttgcccactttttgatggatttgtttgatttttttctggtaaatttgtttaagttctttctagattctggatattagccctttgtcagatgggtrgattgcaaaaattttctcccattctgtaggttgcctgttcactctgatggtggtttcttttgctgtgcagaagctatttagtttaattagttcccatttctctattttggcttttgttgtcattgcttttggtgttttagtcatgaagtccttgcccatgcctatgtcctgaatggtattccctaggttttcttctagggtttttatggttttaggtctaacatttaagtcgtttatccatcttgaattaatttttgtataaggtataaggaagggatccagtttcagctttctacatatggctagccagttttcccagcaccatttattaaatagggaatcctttccccatttcttgtttttgtcaggtttgtcaaagatc

SEQ ID NO: 877244 - DNA, 650 bp, Homo sapiens
gtttctgctgagagatccactgttagtctgatgggcttccctttttgagtaacccgacctttctctctggctgtccttaacattttttcccttcatttcaaccttggtgaatctgacaattatgtgtcttggagttgctcttcttgaggaatatctttgtgacattctctgtatttcctgaatttgaatgttggccttccttgctattttggggaagttctcctggataatatcctgaagagtgttttccaacttggttccattctccccgtcactttcaggtaccccaattaaatgtagatttggtcttttcacatagtcccatatttcttggaggttttgttcatttctttttactcttttttctctaaacttctcttctcgcttcatttcattcatttgatcttcaatcacttataatctttctcccacttgattgaatcagctactgaagcttgtgcatgcrtcatgtagttctcgtgccatggttttcagctccatcaggtcacttaaggttttctctatgctgtttattctagttagccattcatcccatcttttttcaaggtttttagtttctttgcaatgggttcgaacatcctcctttagctcagagaagtttgttattaccgatcttctgaagcctaact

SEQ ID NO: 877245 - DNA, 565 bp, Homo sapiens
acacattatctccatatatggctacattctgaagtactgggagttaggacttcaacatatgaattttgaatagatacaattcagcctctagcagatactataatgggttaatcttatgtgtcaacttggctagtctgtaatacctagttgtttgatcaaactgcagtttagatattgctgtgaagttattttttagatacaaataacatttacaatcagtagacttttttttttttttttttttttttttttttgagacggagtctcactctttcgcccaggctggagtgcagtggtgcaatcttggctcactgcaacctctgcctctggggttcaagcaattctcctgcctcagcctcccaagtagttgggaccacaggcatgagccaccatgcccrgctaatttttttgtatttgtagtagagacagggtttcatcatgtcggccaggctggtctaaaactcctgacctcaggggatcagcccacctcagcctcccaaagggctgggattacatgggtaagccaccgcgcccagccacaatcaggagactctgaataaagcag

SEQ ID NO: 877246 - DNA, 534 bp, Homo sapiens
ttgacatcatgcacatggctgaatcaaccaatcctaaacctctcctcccaggcgcttcctttatgtgcaagaagatatttcatttttattttttatttttggtacaatgtgatttaaaaaaacattttatgtaaacaatttcaaaatattatgggtacatcatattcatgtgtatattcatggggtacatgtgatgttctcatcacrtgtgtaataatcacatcagagtaattggggtgaaatgtccttttttatttaagtcagttcaagtgagttttctgtttcttatagcagaaaatatcctaattggtttgcttgtttggtttggttttgtttccctaagcctgtttctctgaagtcagcatttcttagataactttttggtctcaggaatcctttccatgctaagaaatattgaggacctcgaagagcttttgtttattttgttttatatcaataaacatattgatatttgctgcattataaattaaactgaagtctaaaatatttaaaaacaaaaataacacattaaca

SEQ ID NO: 877247 - DNA, 598 bp, Homo sapiens
aaaacaaaatggacttagctactttcataaaaacctggctcttctatataaagatgtagtcttatagcttgccttgacacttcataaaacttgaccctgtcagcacacccacacttttcccagaacctagtagctcttgtgcttttggataagaaaccaagaggccaggttggtacattccccattagtccctgttgtcatggcagcacttaggtcaagttgcaggggctgtccacatcagccttccacttatatgtctcccatagcagaggtaagagaaaagcaaattacacttctattcttatctgtttcagaagtgggaagagtaaaaattgacccagagggctacatgtttcaggaaaagataaggagtgcttyttccccctgtaagtaaagactgtttttcaatctgtcatatttcaagcattcctatcacctgcctacccactttggacatttgactccgcaaattctgctttaagtggtaactcatggtaacagtgagaagtgcaccacaaatattcttgaaagttcgttattatatatcttgctctcatgggaagcaaaagtgataaaagattttattaggggagatagg

SEQ ID NO: 877248 - DNA, 598 bp, Homo sapiens
aaaacaaaatggacttagctactttcataaaaacctggctcttctatataaagatgtagtcttatagcttgccttgacacttcataaaacttgaccctgtcagcacacccacacttttcccagaacctagtagctcttgtgcttttggataagaaaccaagaggccaggttggtacattccccattagtccctgttgtcatggcagcacttaggtcaagttgcaggggctgtccacatcagccttccacttatatgtctcccatagcagaggtaagagaaaagcaaattacacttctattcttatctgtttcagaagtgggaagagtaaaaattgacccagagggctacatgtttcaggaaaagataaggagtgcttcttccccctgtaagtaaagactgtttttcaatctgtcatatttcaagcattcctatcacctgcctacccmctttggacatttgactccgcaaattctgctttaagtggtaactcatggtaacagtgagaagtgcaccacaaatattcttgaaagttcgttattatatatcttgctctcatgggaagcaaaagtgataaaagattttattaggggagatagg

SEQ ID NO: 877249 - DNA, 533 bp, Homo sapiens
aagatggctcactgtgactgagatggaaaagcctgatctcccttggtttaatgtagaggaagagagccaaagggagcttagggagattgggatggtggagtggattagtcactttagagctactcataccagctgggagggtccagaagatacacccttgaccaacactttgtgaaatagatttgagagagcagcagctgcatctttgaagagcccagcaattgctgttctctgtatgtcagctctaacagtgggaaccacagtcactcaaccacaaaatataaattccatgtgaataattggatcctgagttggcaggggccaagttgtggcactcaaccaccaatggcaaggtgggcatagctacygtgaagggcagcagaggcaaaacagcaatcagaacagtctgattggtgtagcattctggcattggctaattattcacagtgtttctagaagaaaaattgatgggaagtctactaaattccaagctaatttatataagcaaaaaacttccatgtctagtggacaga

SEQ ID NO: 877250 - DNA, 668 bp, Homo sapiens
agggggacataagagaaggagtatttaactcaaacgtagaagaaatctggggagactttgagcaggtgatagctggctgtattttaaattacgtgtaggagccagctgtgtgaagaaaacattcagaaaaataaaatagcaagtactgcagctctcagatacctcaaggcagatagggtgacagggatcagtcatttaggaagtagctcattattgctaagtagtgtacgagcatagcctttgttccatctacctttactgaccacaattctgtaccctcaacatcccgatctctccaggcaaatgattaatttcactttggcaaacamtccagggtgaggcaaagtctgcaaaacttttaaacaaaatattcatcattttaattcctttgcccttctcagtaaaattaataataatcccatttacttaatttgggaacagaagctacacatgaaagccttaaaaaaaattgatgaaataaaatctgctaattcatgtgattatctcagaacccaaaagacaatgttttgggtcattttatgccactgagaactttacctgaacacttgtgacaaataataggactactatctttctattatacacattttggcaaataactgagcataataatgaaatacaattctaatactgtgctctaaccttta

SEQ ID NO: 877251 - DNA, 549 bp, Homo sapiens
acacagctccaaaagcagatagaataatcagtatttacatagttatggatctctttgtatatggagatgggaattattttgtaaagatttccattgtttaaagcagttggagacatagtgttgggaagagcagttatttgggtgtttatagacatgcagttagagaccccaaatacttacttacaagtcacgtgaccttgaagcattcaaaataacctttatttcccctccataataacattttcggatctcagtcctgcactctcttgggattgttctgaagatacagtgagagaataccaaaatactttacacactacaaagcattatgttattaaaatttatattatcactagtaacaatamaaataaaacatgactgggtaactggcctatacatacatgatgcattaaaaaaatccaagcagattggaagtgtcttatttttataaacatgttcactccaaaagtatacaaggtccaaagtagttcatgcatttcccccctattatttttaaagtactaacccttattttattgacttgcagtg

SEQ ID NO: 877252 - DNA, 578 bp, Homo sapiens
gacttgcctcagccagctagcctgctaatcaggccctcaaaaagcctctcagctagcaagcccctcagcaagccactaagccagtctctcagcaaggaggtctcagagtcagcctctcagacagccagcctctcaaacagcctctaagccagcttttcataaagcttctaagccagtctctcagccatgcagattcagagccagccccccatctgtcctctcacccaggcttccaggcagcctcttagccgactttccaaccagcctctcagcaagcctcccagctggactgtcggccaacctcccaggcgtcctttggccagcatcccagcccggcattggccgatctctcagccagccaaccaactagccaacctctcagtaagcctytcagccagccagcctctcaacaagattctaacccagtctgtcagccaggcagattctcagccagccaaccagccacctctctgctggcctccccagccagcctctcaaccagccttttagccatccactcggcaagccacccagcaagtctcttggccagactgccagcctgccagcctatcagccag

SEQ ID NO: 877253 - DNA, 578 bp, Homo sapiens
gacttgcctcagccagctagcctgctaatcaggccctcaaaaagcctctcagctagcaagcccctcagcaagccactaagccagtctctcagcaaggaggtctcagagtcagcctctcagacagccagcctctcaaacagcctctaagccagcttttcataaagcttctaagccagtctctcagccatgcagattcagagccagccccccatctgtcctctcacccaggcttccaggcagcctcttagccgactttccaaccagcctctcagcaagcctcccagctggactgtcggccaacctcccaggcgtcctttggccagcatcccagcccggcattggccgatctctcagccagccaaccaactagccaacctctcagtaagcctttcagccagccagcctctcaacaagattctaacccagyctgtcagccaggcagattctcagccagccaaccagccacctctctgctggcctccccagccagcctctcaaccagccttttagccatccactcggcaagccacccagcaagtctcttggccagactgccagcctgccagcctatcagccag

SEQ ID NO: 877254 - DNA, 715 bp, Homo sapiens
tatatctaggaaaccccacagtctcagcccaaaaggtacttaagctggtaaacaacttcagaaaaatctcagcatacaaaatcaatgggcaaaaatcaccgacattcctataaaccaacaacagtcaagactagagacaaatcaggaatgcaatcccactcacaattctcacaaaaaataaaatacctaggaatacagctaccaagggatgtgaaaactctctacaaggagaactacaaaacactgcccaaagaaatcagagatgacacaaacaaatagaaaaacattccatgctcatggataggaaaaatygatattgttagaatggccatactgctcaaaacagtttatagtttcaatgctattcctattcaactaccattgacattcttcacagaactagaaaacactattttagaattcatatggaatcaaaagacagcccaaatagccaaggcaatcctaagcaaaaagaacaaagctggaggcatcatgctatctgacttcaaactatactacagggctacagtaaccaaaataacatggtactggtacaaaaacagacacataaaccaatggaacagaatggaaagcccagaaataagaccacatacctacaactatctgatcttcaacaatcctgacaaaaagaagcaatggggtaaagactccctattcaataaatggtgctggaataacaagctagccatatgca

SEQ ID NO: 877255 - DNA, 623 bp, Homo sapiens
ctttgtgttcatgagttctcatcatttagctaaaactgataagtgagaatatgtggtattttgttttccgttctggcattagtttgctaagaataatagactccatctccatccatgttcccacaaaagacatggtctcattttttctatagctgcatagtattccatggtgtatatgtaccacattttctttatccagtctgtcattgataggcatttaggttgattccatgtctttgcttttgtgaatagtgctgcagtgaacatacacatccatgtgtctttatggtataatgatttatgttcctctgartatatacccagtaatgggattgctgggtcaaatggtagttctgcttttagctctttgaggaattgccataccgcttgcccaatggttgaactaattacactcccaccaacagtgtataagtgttcccttttctccacaacttcaccagtatttattattttttgactttttactaatagccatgctgattggtgtgagttggtatctcattgtggttttgatttgcctttctctaatcagtgatgtcgaacttttttaacaatatgattgttggttgcatgtatgtcttcttttgcaaagtgtctgttca

SEQ ID NO: 877256 - DNA, 625 bp, Homo sapiens
ttttagaaaattggcttttggtttaactgattttataaaatcaattttctattttaaattcctttaatttttgctctatttttatgatatctttcattcttcttactttgcatattatttgctcttttttatagtgttctaaagtggaaacagattactagtattagatctttcttttctttctttttttttttgagacagagtctcactctgycacccaggctggagtgcagtgtcccaatcttggctcactgcaatctctgcctcccaggttcaagcaattctcctgtctcagcctcctgagtagctgggactacagtcatgccaccacgcctggctaatttttgtatttttagtagagacggggtttcaccatgttgatcagtctggtctcgaactcctgacctcaggtgatctgcctgcctcggcctcccaaagttctgggattacaggcatgagccaccatgcccagccagatctttcttattttcaaatacatgtaatcatgttttaaatttctccctaagcactgcttttgctgtatcccacaaatttatatatgtagatttttgtccaagcttcctgcctcataactcccataatcctcgttactatcttttgttat

SEQ ID NO: 877257 - DNA, 650 bp, Homo sapiens
tgcagaggtcagaacaaatgaataagtcaagtacggcatcacgtgtaacaacaattgagaaagtagcaaatcactttcacagcaatcattgtattgaagccccacctctcgggcactaaccctgcagagaagtgagtggcagcagcctctcttcatagacggggaggacggagcacagatggcgtggtcagtggcttgctaaaggtcatggccacagggcagagccaggcttgaagccacaccatctccactttccccacaaccagacggtgctttatttgggtgtgagagacagggagcccaactcatgaagggcccgtgtgctgccartgtggatgtgggatttaggtatggctggatccaggggtctaatgatgccatcaggaccagacctctgcttgccttctggctggattctttcccaggctccacgtggcagcaatacagccccatccacttcagcccacatcttcccagtgccaactccagagacaaagagcaccctgcaaccagggagccagggagctctttctaattggcccaagctgggtggcatgtccacacctgaaccactcacaatggtctgggacatgagggactctgataaggcagggagcatgctcgccatgtcctcctgtgtgacctgtgct

SEQ ID NO: 877258 - DNA, 581 bp, Homo sapiens
caactatgtcttagtctttctggcaaccagagtccatcctgaatctgtctagggtcctccagtcaccagccatctcattagcatacaaaaagacactcttagcactctggagattccaagggtcttagaagctctgtgtcagggaccagggactaagaccaaatattataacaaaagatactcctatcattcaggaagttagaaggatttttccgtgccaggaactggggatgaagaccaaatatatattttttaccatatcataatgtcacatgaccttggatacyttttttttttttttttttttttttttttaccttacagcaattcccaaaaaatactggtgaaagctgttggtcactaatactttttggggttggggggataattgcctcagttctgaaggggaaaccttggaggaacatgtccagcatccactacatgtgattactgataaaactgagcatcatgaaacatgggcttaaatcttggctttgctattaattggctatgtgaccttaggcaagccatgtaacattttaggaaataatttcctcatctataaaataagggggagggaa

SEQ ID NO: 877259 - DNA, 649 bp, Homo sapiens
tagtgagttttcatgagatctggttgtttacaagtgcatagcacctcctccttctctctcttcctccttctcctgccatgtaagatgtgcctcctttctctttgccttctaccatgattgtaagcttcctaaggcctccccagccatgcttcctgtatagactgcagacctgagtcagttaaacctcttttcattctaaattacccagtctcatgtagttctttatagcaatgcgaaaatggactaattcaccagtaaagggtcttgccaattctgcaataatattacctattggtttcctccagggaacttgacatgcttttctgatatcaaaatgttcatatttgtaacttttcatagaaaagataaagaaaakaatgtgtttttattttctcccagctttataggtggtataattgacaaataaaaattgtatgtattcaaggtatgcaaaatgatttgatgtacatatatattgtgaaataattacaatcaagcaaattaagatgttcatcacctcacatagttaccatttttttctgtgtgtggtaagcacacttcagatgtactgtatatgcaaatgacaaggatgcaatacattattattaactgtagtttccatgttgtatattggatgttcagaacttag

SEQ ID NO: 877260 - DNA, 649 bp, Homo sapiens
tagtgagttttcatgagatctggttgtttacaagtgcatagcacctcctccttctctctcttcctccttctcctgccatgtaagatgtgcctcctttctctttgccttctaccatgattgtaagcttcctaaggcctccccagccatgcttcctgtatagactgcagacctgagtcagttaaacctcttttcattctaaattacccagtctcatgtagttctttatagcaatgcgaaaatggactaattcaccagtaaagggtcttgccaattctgcaataatattacctattggtttcctccagggaacttgacatgcttttctgatatcaaaatgttcatatttgtaacttttcatagaaaagataaagaaaataatgtrtttttattttctcccagctttataggtggtataattgacaaataaaaattgtatgtattcaaggtatgcaaaatgatttgatgtacatatatattgtgaaataattacaatcaagcaaattaagatgttcatcacctcacatagttaccatttttttctgtgtgtggtaagcacacttcagatgtactgtatatgcaaatgacaaggatgcaatacattattattaactgtagtttccatgttgtatattggatgttcagaacttag

SEQ ID NO: 877261 - DNA, 584 bp, Homo sapiens
ttataaacaacagaaatttatttctcacagttctggaggctaagaagtccaagatcaaggcatcagcaaattcagtgtctggtgagggcccattttcttgttcataggccgagccttctgtttgtccttacatggtgagagaggcggtaaagctctctgggatttttaaaattgcaataatctcatttttgagggctataccctcataacctaattacctcccaaacaccccacctcttgataccatcacctaaagggttaggatttcaacataaggattttggcggaacatgaacattcagagcagagtaggaagaaactcagggtgggtagggaaggcataagtaggtagaccacttaggagactgcttcaattacttcagsaagagaggatagggtcctgtgcctaggtggagaaggtgaccttgactaagagcacaaagaacttgtctgtaagaacaggaaaggtgtggataggtgggaagagatggtagtcacaggatatgaaagttctcttttgattgtttaccaaatgtcagtcacattagactgcgtaagtgcaagcatacagtgatcatctgatt

SEQ ID NO: 877262 - DNA, 573 bp, Homo sapiens
atttctttccacttgcaaaatgaatcatcagagagaggatattttgtcttattcaagggcacacaaaccgcagccagaattccccattgcaagccagtttggtgaatagattaccatcagttgatgtatagtggaatgccgagtcagattctttgaaaaggaataaataatatattttaaaatrtatatttgtcttggaatatttaggccctaaaggcataaaacatttttatgatttctcaattgctttataaaacagatgtttcgactacaaatgtctgttagtcctcagtttagtttcttgcacaggatttcagaaactctcacttaagccactgttagcaggtgatttagcactcgtcagtttgtctagccttttcatataacccgttacttttttcctctcactgtgatctgtgtgatactatttctccccccacaaaaatgttcataaagagatcatgagcataattatcaaacgacatgatgttttgcctaaaatggaaaaccttgaaggaagcatttatttactcattcgttgaatacttaattcatgtttactcaattccagac

SEQ ID NO: 877263 - DNA, 606 bp, Homo sapiens
ccaagtcctgagggagcctagtcctcctaaatgcagacaatgtacccatgacaagggctacagcttggctttagcaaccaggaggatgaagatagcaaactgattaagagagtaggtataagaaccagggagagtggggtccaaatatctatcctgcctctcacttgctaaaagactttaagaaatttgctcaacctctctgaatctcagygtccttatgaaaagatagcattaattataccttctccataagatttatataacatgccagtgcagataaagcacaaagctttacataaatgttcatcttcaaaaacagaagctatgaataacaatgacaacattgttaataatgcagtgttatgcatggaagtggacaacttctaacatatttatgagtaaagagttaagatagccttttcccttctgcatgagaatttgaccttcatttaaatttcacgctgggtttccctgttaaggttggctatgctgctaaccagtgttgtttatggtaacacaaatcccatgattaacactggaaggcctatacataagctgtatatatttgataggaagtcacacttggggtcttcctgagtgtgatga

SEQ ID NO: 877264 - DNA, 606 bp, Homo sapiens
ccaagtcctgagggagcctagtcctcctaaatgcagacaatgtacccatgacaagggctacagcttggctttagcaaccaggaggatgaagatagcaaactgattaagagagtaggtataagaaccagggagagtggggtccaaatatctatcctgcctctcacttgctaaaagactttaagaaatttgctcaacctctctgaatctcagcgtccttatgaaaagatagcattaattataccttctccataagatttatataacatgccagtgcrgataaagcacaaagctttacataaatgttcatcttcaaaaacagaagctatgaataacaatgacaacattgttaataatgcagtgttatgcatggaagtggacaacttctaacatatttatgagtaaagagttaagatagccttttcccttctgcatgagaatttgaccttcatttaaatttcacgctgggtttccctgttaaggttggctatgctgctaaccagtgttgtttatggtaacacaaatcccatgattaacactggaaggcctatacataagctgtatatatttgataggaagtcacacttggggtcttcctgagtgtgatga

SEQ ID NO: 877265 - DNA, 591 bp, Homo sapiens
ctagaaatggaataagtgggtcaaagcatttcagtgatgtcttttttttttctccagagttcatttctcctctaggcagaaagtagaatgtgaaatgtggaagaaataccttcacaaagaacaacgtattttgctttggtgaaatgtcaaagtctccttaaggtggctcctaataatagcaacagtcaacctttatatgatgcttaatatgtgccagacactattctaggcactttatatatgcattaactaatgtagtctcacaacagttctataaagtagagacgaatactattcccattttacatacgagaaaactgagggagagaagctaagttgcttctaagaacatgaacagctttatagaattcactgtgtctgtggaacagatgatgctaagacatttgtttcatgcatttgttcaccrtaggtaccttatttggacccgcagaaaaaaaacattacttacttttgcaccaaataatccttatgcttactgaaatggcagatttgtatctgatgagttttgtaccagataatcattgtgttgctcctaagcaaatggcagatttttattggtaagattttata

SEQ ID NO: 877266 - DNA, 596 bp, Homo sapiens
tcaggaaactcaacagtcattgcggaaggtgaagggaaagcacatacatcacatagccagagcaggaacaagagagaggggcagaggaggtgctgcacactttccacagccaggtctcatgggaactctcacaagaacagcaccgaggggatggtgctaaactattcatgaaggattcactcccayggtccaaccacctcttacctggctccacctccaacactggagattacaatttgacacgagacttgggcagggacacagatccaaaccatagcatacagctatgtatataatcaaaactagaaagcagtggtacagtttgtttttagaacccacgtaagcttttctttcctcctctcatcgatcctaaagagtcaaatcaataggcgctctctctatatatctatatacacttttttcctccatgtatatattttttaactcaacatacaaatggagaaaaacattggaaggaaccaatgcctatttaatattgctgaggatattaatgcctttaatgattgtaaatttagatctgattaatttggattttcctacaattttacactcatctagtaaaagggttctgtcct

SEQ ID NO: 877267 - DNA, 596 bp, Homo sapiens
tcaggaaactcaacagtcattgcggaaggtgaagggaaagcacatacatcacatagccagagcaggaacaagagagaggggcagaggaggtgctgcacactttccacagccaggtctcatgggaactctcacaagaacagcaccgaggggatggtgctaaactattcatgaaggattcactcccacggtccaaccacctcttacctggctccacctccaacactggagattacaatttgacacgagacttgggcagggacacagatccaaaccatagcatacagctatgtatataatcaaaactagaaagcagtggtacagtttgtttttagaacccacgtaagcttttctttcctcctctcatsgatcctaaagagtcaaatcaataggcgctctctctatatatctatatacacttttttcctccatgtatatattttttaactcaacatacaaatggagaaaaacattggaaggaaccaatgcctatttaatattgctgaggatattaatgcctttaatgattgtaaatttagatctgattaatttggattttcctacaattttacactcatctagtaaaagggttctgtcct

SEQ ID NO: 877268 - DNA, 665 bp, Homo sapiens
atttgcccattcttgcttttgttgaagttgcttttggcaccttcatcatgaaatctttgctggttcctctgtccagaatggtatttcctaggttatcatctaggatttttatagtttgttttcacagttaagtcatttctgttttcacagttaagtaatttatagtttgttttcgcagttaagtcrtttcacagttaattcatcttgagttgattttgtatatggtgtaaggaaaaggatctaatctgcctatgggtagccagttatcccaggaccatttgttgaatagggaatcatttccccattgctttgtttttgccagctttgttgaagatcatatggtcatagttgtatggctttattttggggctctctattctgttccattggtctatgtttctgtttttgtcccagtaccatatagttttggttactgtagccctgcagtatagtttagagttgggtaacatgatgactccagctttctcctttttgcttaggattgctttggctattggggctgttttttggttccatatgaattttaaaatagttttttctagttctgtgaagaatgttattggtagtttgataggaatagcattgaatctgtaaatttcttaggtcagtatggccaatttaatggtattattgctatccacgag

SEQ ID NO: 877269 - DNA, 554 bp, Homo sapiens
ccaattatgtcatggcttctctggagaacccaataaacaaattatcttgaagagaatttcacctgttgggttctgcagcttaataaggctgcagtgccatcagcacagagtcctaacgcgcctcacaggagaatgtcttggacacactcctataaattaattttctaattctggctctgccaccagctmatttggtttctctggattaatgatgccacacctaaaaatgctgggattagactagatgttccctggcatctcttacatctctcacattttttagttctctaatttttattctgtttcaaaatgaaattaaaatattctacgtccacaaagtcatcttatgtgtgatttataacagtgtgcattggggaaaaaaaaggctatagcagaattctcagaataagttgcagttaaaataaggcattattaatgtccttagtacaccatacaatatatcctcagacaagataagaaagtataagttttcaattgttattaattactgcatactacgcacctgcaagaaatgttcaaaaactgcagaaata

SEQ ID NO: 877270 - DNA, 554 bp, Homo sapiens
ccaattatgtcatggcttctctggagaacccaataaacaaattatcttgaagagaatttcacctgttgggttctgcagcttaataaggctgcagtgccatcagcacagagtcctaacgcgcctcacaggagaatgtcttggacacactcctataaattaattttctaattctggctctgccaccagctaatttggtttctctggattaatgatgccacacctaaaaatgctgggattagactagatgttccctggcatctcttacatctctcacattttttagttctctaatttttattctgtttcaaaakgaaattaaaatattctacgtccacaaagtcatcttatgtgtgatttataacagtgtgcattggggaaaaaaaaggctatagcagaattctcagaataagttgcagttaaaataaggcattattaatgtccttagtacaccatacaatatatcctcagacaagataagaaagtataagttttcaattgttattaattactgcatactacgcacctgcaagaaatgttcaaaaactgcagaaata

SEQ ID NO: 877271 - DNA, 554 bp, Homo sapiens
ccaattatgtcatggcttctctggagaacccaataaacaaattatcttgaagagaatttcacctgttgggttctgcagcttaataaggctgcagtgccatcagcacagagtcctaacgcgcctcacaggagaatgtcttggacacactcctataaattaattttctaattctggctctgccaccagctaatttggtttctctggattaatgatgccacacctaaaaatgctgggattagactagatgttccctggcatctcttacatctctcacattttttagttctctaatttttattctgtttcaaaatgaaattaaaatattctacrtccacaaagtcatcttatgtgtgatttataacagtgtgcattggggaaaaaaaaggctatagcagaattctcagaataagttgcagttaaaataaggcattattaatgtccttagtacaccatacaatatatcctcagacaagataagaaagtataagttttcaattgttattaattactgcatactacgcacctgcaagaaatgttcaaaaactgcagaaata

SEQ ID NO: 877272 - DNA, 621 bp, Homo sapiens
taaagacggggtttccactgtgttagccaggatggtctctaactcctgacctcgtgatccacccgtctcagcctcgcaaagtgctgggattacaggtgtgacgcaccgtgcctggcccaggtactttcttttttttttttttttttttttttttttttgagacggagtctcgctytgtcgcccaggctggagtgcagtggcgggatctcggctcactgcaagctccgcctcccgggttcacgccattctcctgcctcagcctcccaagtagctgggactacaggcgcccgccactaggcccggctaattttttgtatttttagtagagacggggtttcaccgttttagccgggatggtctcgatctcctgacctcgtgatccgcccgcctcggcctcccaaagtgctgggattacaggcgtgagccaccgcgcccggccggtactttctttttgatgtgaccacctcatccctctataacttcacttccctatttcccccaagacaatgtccagaaaatgattgaggggtgttggagaaaaacaccttttaagacttgtcttccatgacagccaggctcgtagtaccactggttgtcttactgatattaaagtgcagtgta

SEQ ID NO: 877273 - DNA, 599 bp, Homo sapiens
ctgtgcccttgctgcagaggcattgcaatcatttggaagagaagaggcacttttgctttttgggttttcagtgtttttttcattgattctcatctccatcagtttgtctggtttcttctttgaggctgctgacacttgaatggggtttttgtagggactttgttgttgtttttgttgttgttgttttgtttgtttcctcttgttgttgttgctttctgtttgtttttctttcaatggtcaggcccttcttctgtagggctgctgcggtttgttgagggttcatttcaggccctattcgtctggtttgccccratgcctggagatgcaactcaaggaggctggggaacagcaaaaatgggtgtctgctccttcttctgggatctctgaccttgagggacatcaacttgttgccagtaggattgctcctatataaggtgtctgacaaaaaggttaagtaactttctaagggttatataggaagttgccagtaagactcatatgtaggtccttctggaaacaaagttcaggcttaatgtacttactacccctcagcaacccatctgcaatgaagtgctccagtcagccattcaagtgtggga

SEQ ID NO: 877274 - DNA, 570 bp, Homo sapiens
gggatcagctaattcagcatgtcgcttctaggcaagagatttccaggctggttggattatggcttctggcaaccagtactgttggcagcagtaaggtttgttcccctgtttctgttttgattccctgttgtttctgaatttkggggaaggaagttagtgggagtcaagcatacttggtattttattatacaatttccatataatcttactctgtgtagttatttaactaatactcatgaaggaagaaaataaacatgtaagacacaaatcaactgcagctatgtaggtacatttagtgtctgaactgacagcacagtggttcaaactcaaaactttccgttaattaaaaggcacaataattatattaatgtcttattgtgtgattctagatttcacacctatgattttagctctgtctgaaagtgtctctcttacccacccaagtaactcacacagattaaacatccagagccctgaaatacttatctagtccagggttacaagacagtaagtgatttttacaattatttattgagaacttgctatgtgctagacattgtgttaagtgct

SEQ ID NO: 877275 - DNA, 540 bp, Homo sapiens
gttacaaagacagggtgcattcatgaacttagttcaacattcaccctgcatagcgatggggtgcgaaaaggaaggcagcaatgaagtcacttacagtttgcaattcagctgtcatgtggaagtctgcagtaggtatgagcaaaatatactgtgaagaatatgtggctcaatattatacagcaaaatcgaactttgcaactgcttatgcatagttaactacctgggactagcctgctctggtgcaccactttatagatcaataaaaaattaaactaaaatacagactcctaggtaacygtggtcacagtacaactctatcttcctttgcaggcttattatttcctgaagctgaggctgacagggtctatgagcacacatttttgcatatattttgtttatgtgcaagccttggcatttcagccatctcctgctggggccccttccaaccatatgcttctgtttttcttcattaggtgatgtgatcccttttgactgttgcatgcacgtgaaaggacagtgggctttggggggagaagaaac

SEQ ID NO: 877276 - DNA, 599 bp, Homo sapiens
ctatctcaagagatggagctcaccaggtgcctctactaatcctttcagaacctgaagcgagcataggctctacagagtctaggatttttttaccttaaaaaacagagagacaaagatgtgcttaataatgtagacctaaaaagtgtgactgtactgctttttcaggggaaaatgatgtgattctgtgccttagggttagtgaatgctggttgaayacagagaaataacctgagaacatttcaggatcccagatctgatccactattaaagggaaggagggttggaagcatgctgcctttgaggtgttcccctcctcaccttcttgggaatctcagccatgtgcctacggtaatgacatcctggtttcctccagtcttgtgggaagagattgtagagaatttcctgctgagggaaatgaaaagcctatagcattgagattctttctcagaaatccagaaaagaaaaaagagaaactcatacatgatggtggactttgagcccagatggcttggatttgaatcccagcttggacacttactagctgtgcaatgaagaagtgaaaactcatgggcctaacatcttcctgtgtaaggtaaaga

SEQ ID NO: 877277 - DNA, 433 bp, Homo sapiens
ttctcctttgccttccaccatgattatgaggactccccagacatgtggaattgtgagtccactaaacctcttccctttataaattaccaagtcttggttatgtctttatcagcagcatgagaacagactaatactgtaaactggtattgggaggggggcattgctgtaaagacatctaaaaatgcrgaagcaactttggaactgggtaacaggcagaggttgaaacagtctggagggctcagaagaagacaggaaaatgtgggaaagtttggaacttcctagatacttgttgaatggctttgatcaaaatgctgatagtgatatggacaataaggtacaggctgaagtggtctcagatggagatgaggaacttgctgggaactagagtaaaggtgattcttgctgtgctaagagactggtggcattttgcccc

SEQ ID NO: 877278 - DNA, 639 bp, Homo sapiens
cagattgtgatgacagacgcaggccaaccacattccgaagcagattatacactggggccactgctctgccgcggagatagtaagtagtgtcaagaaaaagctttattttcataataactttttttggttataaaggggtagacaaatgcccttgttcttgccagaaagagaatagtggcagtactaggacwggggcgaatatcaggaaaacacacataccataaaggcacagtcagtactgaagatctgtgtttccttactgaagcattagtttatagaaaatgaatcatctttgttttaacttattacttgcttggctggatttattatcaattgattgtattttttccagaacaatcatgagatgaactattttctgaatgctaagggatatttattcattgcccttatactcttcagacaactatagtggtaggaaattattggacactctctattttctgacctctgtacatactgttttacattacatggcaccgaatgtgtattaatctctttcctgcagcattttcgttcatgggtggctttcatggtcaagtcctcgctcccccacctctgtggcactataagcccagggttcttagaggatctacctactgggtagcacaggaaccacaa

SEQ ID NO: 877279 - DNA, 688 bp, Homo sapiens
accataacaatattatcagacactttgggaacatttgtggtgcatgtttttgttgttgttgttgttgtttgtttttgtttttcgttttttgagacggagtctggcgtctcctctgttacccaggcttgagtgcagtggcgcgatctcgactcactgcaagctccgcctcctgggttcatgccattctcctgcctcagcctcccgagtagctgggcctacagacgcccgccaccccacccgactaattgttygtatttttagtagagacggggtttcactgtgttagccaggatggtctcgatctcctgacctcgtaatctgcccgcctcagcctcccaaagtgctgggattagtgagcaaccgcacctggccttgtggtgtgtttttattcaacccagaaagaattttgttgccagcattatttgtatgtattaataatttactgagaaactgtgtcagatataggtatatgcaaagttcctaatgacagtagaaaactagaaatatgggaaaagtttgagcttgaaatatgaaaattagaatgatgtacttaattaaataaaagaaatatttgcagatacgcttggaccaagactgataattaaaacacagtacaatttatttcaaaattaaaatgttgattatttattttcttagggggcaggtatacatgttcttaaatagtcag

SEQ ID NO: 877280 - DNA, 616 bp, Homo sapiens
gcaaagctgattcaacatatcaacagacaaaagaagaaatataatattttaataccaattgacacagaaaagacatttgacaaaaatccaatgtcctttcaaaataaaaactgtcagccaaccaggaataaaagggaactacctccacataacayaggaaacaagaatgaatgcttttcccctaagacaggaaacaaggcaaggatgtctgccctcaccactctagttcaacctagtattgaaagtctagctactgcaataaagcaagaaaaataaattaactccctacagattgacgaggaagaaataaagctgactctacttgcagatgacatgattttccatatagaaaatcccaaggaatctaaaaaaaaattaagttcaaaaaagagcttataagattagtatgaaacaatcatatttcatattctaacaagaaacatatgtaaacaaaaatttaaagcacaacagcacttacaatcaatcaagaaactaactaaatgcctaagcatacttataaaacatataatctctggatgctaagaattacaaaatgctgaggcaagaaatcaaagatccaaataaatggaaagatatctcatgttcatggattgga

SEQ ID NO: 877281 - DNA, 616 bp, Homo sapiens
gcaaagctgattcaacatatcaacagacaaaagaagaaatataatattttaataccaattgacacagaaaagacatttgacaaaaatccaatgtcctttcaaaataaaaactgtcagccaaccaggaataaaagggaactacctccacataacacaggaaacaagaatgaatgcttttcccctaagacaggaaacaaggcaaggatgtctgccctcaccactctagttcaacctagkattgaaagtctagctactgcaataaagcaagaaaaataaattaactccctacagattgacgaggaagaaataaagctgactctacttgcagatgacatgattttccatatagaaaatcccaaggaatctaaaaaaaaattaagttcaaaaaagagcttataagattagtatgaaacaatcatatttcatattctaacaagaaacatatgtaaacaaaaatttaaagcacaacagcacttacaatcaatcaagaaactaactaaatgcctaagcatacttataaaacatataatctctggatgctaagaattacaaaatgctgaggcaagaaatcaaagatccaaataaatggaaagatatctcatgttcatggattgga

SEQ ID NO: 877282 - DNA, 616 bp, Homo sapiens
gcaaagctgattcaacatatcaacagacaaaagaagaaatataatattttaataccaattgacacagaaaagacatttgacaaaaatccaatgtcctttcaaaataaaaactgtcagccaaccaggaataaaagggaactacctccacataacacaggaaacaagaatgaatgcttttcccctaagacaggaaacaaggcaaggatgtctgccctcaccactctagttcaacctagtattgaaagtctagctactgcaataaagcaagaaaaataaattaactccctacagattgacgaggaagaaataaagctgactctacttgcagatgacatgattttccatatagaaaatcccaaggaawctaaaaaaaaattaagttcaaaaaagagcttataagattagtatgaaacaatcatatttcatattctaacaagaaacatatgtaaacaaaaatttaaagcacaacagcacttacaatcaatcaagaaactaactaaatgcctaagcatacttataaaacatataatctctggatgctaagaattacaaaatgctgaggcaagaaatcaaagatccaaataaatggaaagatatctcatgttcatggattgga

SEQ ID NO: 877283 - DNA, 616 bp, Homo sapiens
gcaaagctgattcaacatatcaacagacaaaagaagaaatataatattttaataccaattgacacagaaaagacatttgacaaaaatccaatgtcctttcaaaataaaaactgtcagccaaccaggaataaaagggaactacctccacataacacaggaaacaagaatgaatgcttttcccctaagacaggaaacaaggcaaggatgtctgccctcaccactctagttcaacctagtattgaaagtctagctactgcaataaagcaagaaaaataaattaactccctacagattgacgaggaagaaataaagctgactctacttgcagatgacatgattttccatatagaaaatcccaaggaatctaaaaaaaaattaagttcaaaaaagagcttataagattagtatgaaacaatcatatttcatattctaacaagaaacatatgtaaacaaaaatttaaagcacaacagcacttayaatcaatcaagaaactaactaaatgcctaagcatacttataaaacatataatctctggatgctaagaattacaaaatgctgaggcaagaaatcaaagatccaaataaatggaaagatatctcatgttcatggattgga

SEQ ID NO: 877284 - DNA, 578 bp, Homo sapiens
tatgtctcctgctgaatgaggtaggtctaggaaattttttattaatgtggtagccattaaaaattaccatttcaacttctgtgatcatcattttagcaagacagtctagtagagaaaatgcaatttaattatttatggaggatgcttgtattttaaaagatctatttcacgggagctccaagtttcattccattttcaatactgactgtgcaaaatattgagaatgtgtaaatgaaatccacatttcagtttaattagggcagatactatartaaagtcttgttttttcattgttttggaaagtctggtgttttcattctgagcataaagatagccagtgtttttcaccagtttcttattgttacaggcagattcccaacctttggaaatcaaaatagaatactcaggatttgtaatagttatcagacttcctcaaaacttcctaattaatagggacatctcatttttcttttctccctattattttctaaagcttatactatagtctacacttggaaatagtgctttcataggtaccataatctcttggagcagtattaaaaattcagtaagagaac

SEQ ID NO: 877285 - DNA, 597 bp, Homo sapiens
ttctgggtcaaatggtaattgttctttgacttattcgagaactcaccaaactgctttccacaatggctgaactaatttacatttccacccgcagtgtgttctcttttctcctcaacctctccagcatctatctgttttycttttcttttttttttttttttactttttagtaatagccattctgactagtgtgacatggtatcccattatggttttgatttgcatttctctaatgattagtgatgttgaaaattttttatatgcttgttggccacatgtatgtcttcctttgaaaagtgtctgttgatgtcctttgcccacattttaatggggttgtttgctttttgcttgttgatttgttcagttttttttaatagattctggatattaaacttttgttggatgtatagtttgcaaatgctttctcccattctggggttgtctgtttactctcttgatagtttcttttgctgtgcagaagatcttcagtttaattagatcccatttgtcaatttttgtgtttattgaaattgcttttggtgtcttcatcatgaaatatttgccaggtcctatgtccagaatggtatttcctcatta

SEQ ID NO: 877286 - DNA, 597 bp, Homo sapiens
ttctgggtcaaatggtaattgttctttgacttattcgagaactcaccaaactgctttccacaatggctgaactaatttacatttccacccgcagtgtgttctcttttctcctcaacctctccagcatctatctgttttccttttcttttttttttttttttactttttagtaatagccattctgactagtgtgacatggtatcccattatggttttgatttgcatttctctaatgattagtgatgttgaraattttttatatgcttgttggccacatgtatgtcttcctttgaaaagtgtctgttgatgtcctttgcccacattttaatggggttgtttgctttttgcttgttgatttgttcagttttttttaatagattctggatattaaacttttgttggatgtatagtttgcaaatgctttctcccattctggggttgtctgtttactctcttgatagtttcttttgctgtgcagaagatcttcagtttaattagatcccatttgtcaatttttgtgtttattgaaattgcttttggtgtcttcatcatgaaatatttgccaggtcctatgtccagaatggtatttcctcatta

SEQ ID NO: 877287 - DNA, 597 bp, Homo sapiens
ttctgggtcaaatggtaattgttctttgacttattcgagaactcaccaaactgctttccacaatggctgaactaatttacatttccacccgcagtgtgttctcttttctcctcaacctctccagcatctatctgttttccttttcttttttttttttttttactttttagtaatagccattctgactagtgtgacatggtatcccattatggttttgatttgcatttctctaatgattagtgatgttgaaaattttttatatgcttgttggccacatgtatgtcttcctttgaaaagtgtctgttgatgtcctttgcccacattttaatggggttgtttgctttttgcttgttgatttgttcagttttttttaatagattctggatattaracttttgttggatgtatagtttgcaaatgctttctcccattctggggttgtctgtttactctcttgatagtttcttttgctgtgcagaagatcttcagtttaattagatcccatttgtcaatttttgtgtttattgaaattgcttttggtgtcttcatcatgaaatatttgccaggtcctatgtccagaatggtatttcctcatta

SEQ ID NO: 877288 - DNA, 674 bp, Homo sapiens
gatctgcataaacttcatctgtaaaacaggaatgataacactaactcatatatttgttgtgagaattaaagtatataaagaagttaacatggtttgtggaaaacagcaagtgctgatacattgtcagtgataaagataatgctgctactgctgctgctggtagggttggtagggtagaactcttacagaaactgaggcatgtctaattccagagcacatgcttttcccactgactctggtcctggaaaagatcagacagaatggtatggaaatgtgccttgaatcacaagcagttgtcgtttttgaagtagaaaaactctttccaaaaatatacaaattatggaccactctgcagatggaaattagaaccaaatgcatggaaattagagcctactaagagagaaaaacaagacaacaaatacatccataccttgacctctgatagcagtaagtgctctgaagaaatgcagcctaagtgattagatttaacagacaggygtgagggaaagatgactctagttgcttaagcacctgggtgaatgggggatttatttcatgaaggggggaatgctgaaggagaagtgagtagccgaggaatcaagagtattgtcttggctagtacaatttgagataccagttgtatatttcaatgcagatgtggaataagaagtcag

SEQ ID NO: 877289 - DNA, 616 bp, Homo sapiens
tttggaattctcatatggaagacataagtgttaaccaatcactctctctctttacagatactaatggaccatactaccaaggaccagtccacctgaaccacacactctaaagaaatattttttaagataacttttattttcttcttactcctttcctcttgatttttttcctataatttcattcttgttttttcatctcattatccaagttctgcagaccacacaggaacttgcttcatggctctttagatgaaatagaagttcagggttcctcactctagtcactaaagaaggattttactctcccagcccaraaaggtgattctttctttaccatttctggggactttagtcttaattaggtaccttattaacaggaaatgctaaggtaccttctctgtggaacaatctgcaatgtctaaatcgccttaaaagagcccatttcttagctgctgaaatcagtgctctttcacttcttcagagaagcagggatggtacctacccggcaggtaggttagatgtgggtggtgcatgttaatttcccttagaagttccaagccctgtttcctgcgtaaaggtggtatgtccagttcaaagatgtgtataatgagcatgg

SEQ ID NO: 877290 - DNA, 566 bp, Homo sapiens
gatttcaaaacacttagtttcaaaagtagatgcgtaagctcaagtatgtttccaaatataaataagctttccaataactaaatcaagttatcaaagtctaaaattaaataaaatttaaaattgagctcttcctcaccctagccatatttcaggtggttaatagccacgtggctagtggctaccatattagggcaggtatcctgtctctgtcacctggattcttttaaacccgaaccagagtaaaagatgttaccccatcaaccagaaagtcatcttacagcacccaccaagtgctcaarttataccaagtattttctgctccacttccaatctttaagttgtcaacacttcagtgattatcgtttattaggtagcccttccaaaagactgagtattttagctcagagaggaaagcatatctcaattcagggactgaatggagacactgagtgagattcaaagacaaggagttaatttccaaggtagaggtggaaaatcctgacatccttacttctttgtccagggtatcagtcacctacaaaagttacaattattgtttatcacaa

SEQ ID NO: 877291 - DNA, 668 bp, Homo sapiens
acatagcctgaggtaattttatataatattttaaataattttgtgcatgcaacaatgttttgactgtaacttgtcacatgaggtcagatatggaattttccacttgtggtatgaggtctgtgctcaaaagctttggattttggaggattttagatttcagatatttggataaggaatgctcaacttctaatgggtggaaggtctggttctttcccaataacctgtagctatgtctctcccaacctggcattatttagtcttaaagaagtcttatcttcttacttaaaattaaataagatatatatatatatakagagagagagagagagattgatgggctgtttcactttttttatatatatattcattatattgaatataatattgaacatgaatattatatggctataaatatataaaatatgagtacatagtatgtacatttaatttaatatagtacatacatttaatttaatacataattaaatgtatgtatacatttaaaatatcccaacctggcattatttagtcttaaagaagtctcatcttcttacttaaaattaaataagatatatatatagagagagagagagagagaaagagagaaagaaagagagattgatgggttgtttcactttttttatatatattcattatattgaatataa

SEQ ID NO: 877292 - DNA, 682 bp, Homo sapiens
aattgaaggttgtactaggggagtgggcagaagagtgggtggagggatcaggaggagacttaccaggacagtagctgcctgtttctagggcaccctgtggctccttgccccacaggtgagtttcttcctcttctgtgctcagtttcaatgtcacctcctctgtgaggccttctctgattgctcaaggagccccaactgcccctcatcctggattttcacatgacacttgtcccacagactgccaacgtgcctgtctccctaattagaccctgggcttccttgaggacacagacctgcctggttaattatgctgctccrttagcctgaaccactcttctccagaagtctgcccccatggctgtaatcaatctatatcagtgttacttcttatgtacctgttgcttccattagaccatgaactccttgagtgcaggggctacgtcttgttcagctctctaaatacctgagtgaatgagttaagtcagggaggtggaggctgttgaataccagctggcctggaggcagaggactggaggcagacagaatcaggaaagggactgggaggggtggagaggtgaaagcaggctgtccatgccccctgccgctgagccatgctggctgagcaagagcttccctgtggtcccacctgagcagacttccctaggaagggagactctgcttc

SEQ ID NO: 877293 - DNA, 605 bp, Homo sapiens
ggcagtggcagggtactgcctggctctagatctcatgcctcaggggccaaggactggaggttgagtagaaatgccccagtccaggattctagatacctggagagtaatccttccactgaatcctttggtcaccaactctcagcagctatgcatctttgacytaatagataaccctgtatgggtcttatttttacaatcttctggtgacatatgcctcactgccctcacagtttgctattggcagagtcaacagtggcttgagtcacttccaaggtcttatccccacatctggcaataagattcaggtatctgtcatcaatgtgacatgaacacatgaacaatgtgacatgacaagccacataccgtgcttggcaattgcacaggctctctgtcctttatttccccccaaaccctgagaggtgagaaattgtttcaattgacaaataagaaagctgaggcttagagaagtggtgtgaaatgaccaaggacattcggcttctgcatggtggggcagagctgggatccaagccagcgatcctgacctcccattctgggcagcttccatgaggctaaggtgtgttgtggatctcagaaggattcaccat

SEQ ID NO: 877294 - DNA, 605 bp, Homo sapiens
ggcagtggcagggtactgcctggctctagatctcatgcctcaggggccaaggactggaggttgagtagaaatgccccagtccaggattctagatacctggagagtaatccttccactgaatcctttggtcaccaactctcagcagctatgcatctttgacctaatagataaccctgtatgggtcttatttttacaatcttctggtgacatatgcctcactgccctcacagtttgctattggcagagtcarcagtggcttgagtcacttccaaggtcttatccccacatctggcaataagattcaggtatctgtcatcaatgtgacatgaacacatgaacaatgtgacatgacaagccacataccgtgcttggcaattgcacaggctctctgtcctttatttccccccaaaccctgagaggtgagaaattgtttcaattgacaaataagaaagctgaggcttagagaagtggtgtgaaatgaccaaggacattcggcttctgcatggtggggcagagctgggatccaagccagcgatcctgacctcccattctgggcagcttccatgaggctaaggtgtgttgtggatctcagaaggattcaccat

SEQ ID NO: 877295 - DNA, 605 bp, Homo sapiens
ggcagtggcagggtactgcctggctctagatctcatgcctcaggggccaaggactggaggttgagtagaaatgccccagtccaggattctagatacctggagagtaatccttccactgaatcctttggtcaccaactctcagcagctatgcatctttgacctaatagataaccctgtatgggtcttatttttacaatcttctggtgacatatgcctcactgccctcacagtttgctattggcagagtcaacagtggcttgagtcacttccaaggtcttayccccacatctggcaataagattcaggtatctgtcatcaatgtgacatgaacacatgaacaatgtgacatgacaagccacataccgtgcttggcaattgcacaggctctctgtcctttatttccccccaaaccctgagaggtgagaaattgtttcaattgacaaataagaaagctgaggcttagagaagtggtgtgaaatgaccaaggacattcggcttctgcatggtggggcagagctgggatccaagccagcgatcctgacctcccattctgggcagcttccatgaggctaaggtgtgttgtggatctcagaaggattcaccat

SEQ ID NO: 877296 - DNA, 555 bp, Homo sapiens
gaaaaaaaaaaaagaagtttttatatgtttaagggctcactgaaagcccagaaggatggataataacagactataccaaagtatatcaacaaaaaatttcagagctataagaataagaataaggaaaaaagtgctaaaagttctatacaagttttatacaagaagattttaaaagctatatactggttctttacaagggagaatgaaacttctgattcattggacctctcagwggaaactagaaaagagtaatggcttttttttttcttttctttttttttttttttttgagacagagtctcactctgttgcccaggctggagtgcagtggcacgatcttggctcactacaagctacacctcccaggttcaagcaattctccagcctcaacttcccgagtagctgggattagaggtgtacaccaccacattgggctaatttttgtgtctgtagtagagacagggtatcaccatgttggccaggctgatctcgaactcctgacttcaagtgatctacccacctcagcctcccaaagtgctgggattataggtgtga

SEQ ID NO: 877297 - DNA, 658 bp, Homo sapiens
ttatacaatgtcaaacttcacagaaacaagaaattacaatatgatattttcacccaaagtggcaggaaataagtgaaaatatttaaggctgaaaagattgtaatcagaaggttgcttttagatcctgttagttagagtgtcttttgttatagagaaccatgaaaatgtttctatccatccagatgttgatttctaaatgctgttctccaataaaatgaawccaggtttctttagaaattggctgaacctggagctggggtagggaaaatataagatgagcctagagcttcttatggtgccaaagaggaagtcagtgagtaaaacaagtaagaaaatgagtaagggaaataagaaagtaagggagtaaacaacatatgggaggatgtcatcagaaggacacagaaatcaatctgaataagagagaacaacttgagtccaaaataaataatattagtattggattcttaaccaaataataaaataagtattcaaacaaggaagaaaagattttgaatgttgtcaccacaaggaatgataaacgtttaaagtgatgaatatggtaattactctgatgttgtcattatgtgaataaagcaccacatggagttttaccccaaaatatggctccctgatataatgaatattttgaattacaggc

SEQ ID NO: 877298 - DNA, 708 bp, Homo sapiens
agctttaccctcatgtgtatcaatttgtaagtttattatacatggaatatgattctgtatatcttagtagccttgttcttttctttcattttgaaaacaaaatctaataatctcattcagaaaagcattatcacatacttgttctggaaaaattatcttgatgtactagagagttctctcctgtgttggaaaaatttggtacatattcaatggctatttggacagagtattcaatattaggggtgagttgctccattatttgacctaataaaattcaattttagatattccacattgtacttagagtaaagctcctccttctcacctgcttctgtgaaatcctctcatgggaaggtttacttgtcccaatggagtccttttactttttataaatttcatattatttttagtttctataattttctttctaattgtgccttgacttaagccatctttgctccatgactctatatttcaaataagatttaagataaattgaaatactaaaaatggaaaatgctaactaaaaatataagttyaaaggacacagaaaaccttaatataaataaattgtgccctattaactaaatgtactaaatgttagtttacttaaactaaacctaagtccttgacatgcactcacagcttttacaaattatatttaagggttatatgttaataattattctaaaagaatttaaaaggaca

SEQ ID NO: 877299 - DNA, 612 bp, Homo sapiens
tggtgtgctggatgctctgcatgtcccgctccatccacttgctttgcagaagtggaatccagggaggttctcctgtgggtggtcttcctttgcccatttttaaattattattatactttatgttctgggatacatgtgcagaatgcgcaggtttgttacataggtatatatgtgctatggtggtttgctgcacccatcaacctgtcatttacattaggcatttctcctaatgctttccttcccctttcctcccaccccccaacaggccccagtgtgtgatgttcccctccttgtgcccatatgttctcattgttcaactcccacttatgagtgagaacatgcagtgcttggttttctgtacctgtgttagtttgctgagaatgatggtttccagcttcatatrtgtccctgcaaaggacatgaactcattcttttttatggctgcatagtattctatggtgtatatgtgccacattttctttatccagtctattattgatgggcatttgggttggttccaaatctttactattgtgaatagtgctgcagtaaacatacatgtgcatgtgtctttatagtagaatgatttatattactttgggtatatatcca

SEQ ID NO: 877300 - DNA, 598 bp, Homo sapiens
agagtttagtaaaaccaagtgtagattattccaaacagacacaattctggaacacagctttgttccttttgtctcctcttcctagaatgtcctgccctttttctttatctaagtgactttcctcatcctttaaaactcagctcagtcaaaattacttgctggaaaccttttctgaacccccaggtaggcttctctgccctgcgctccaattatgccatctacttctaccagacagagatgacctcttcatacatgtgtctctcctgccacctttcctgtgacagagacaatgttctgttcttctttatacttccagcacctactacagtcccttgcatacaggaaatgcttgaaatatatttgttaaatcgaactgkattcttctcttcatttttttaccagttatattctataaagatgcatcatcaattgcatagatcattctcctttccgattcatctctagcagataataatttcggaacaagtgtcaaggttcctgtccatccctctcccatcccccatcccaaaaagaggaagctcttttatgatcggttaagttctttgacactgatttgttgagtgaccttgaacaagtc

SEQ ID NO: 877301 - DNA, 616 bp, Homo sapiens
gttcttgcacatactttgttcaatacttacctgacacaaggctgtaagaaaaatgaggataaatataaacatctgtggcagagagatcttgaatggtgctagacttggggtaacaaagcctacttggactgtttagctgaagcttttcatgatgttattctcaattaattaacttaggcttggggaaaggtagggttgaatgctattttgctttaaaatgccccctgggcagagagaaacatggctatctcctctgagtagaagattgaattttccaagtgcagcaatggatggagatgtgcactggaaaaaaatgaagagtggatatgtttcaaagaggaggagaggaggttgattcttgagacagggttatgagtgtktctactacagcagctgaggaaagttctggctttatgcctttttaaatttgcattttcttaggatggtggtagcactgaagttttaagtttttatcttctgcttatcaaattgctttgcaatttgtctggttgcttataggttctcagtacctaaaacttgttatgcaaaacctcatgttgtggttgaagggaattaagaaattagaccataagggaaaggacgagctttcccatgt

SEQ ID NO: 877302 - DNA, 638 bp, Homo sapiens
tggaagctaaaaaatattgaatttacagaaataaatagtaaaattgtagttattagaggctgggaagggtagggggcaggcggagatagggagaagttggttaacataaaattacatctatacagaaagaataagttctagtgttctacagcattataggatgactatatgcatttgtctgttctcacgctacccaggaaaccattttttccttccaggcctctgggcctgtgataggaggggcttccmtgtaggtctctgacatgccctggaaacattatctccattgccttggtgattaacatttggctcctcgttacttatgcaaatttctgcagctggcttaaatttctccccagaaaatggggtagaatttcttttctatggcatcaacaggctgcaaattttccaaacttttatgctctctgatctcttaaatgctttgctgcttagaaatttcttctgccagataccctaaatcacctctccccagttcaaagttcaacagggcaggggcaaaatgctaccagcctctttgctaaaacatagcaagagtcacatttattccagttcccaccaagttcctcatcttgatctgaggccacctcagcctgaacttcattatttatagcaacatc

SEQ ID NO: 877303 - DNA, 629 bp, Homo sapiens
agaacagaaagttccactgattgcaccctatctcttgaagaacatcaagttaacaattatctacatggagaaaaagaaataaaagaaaaaaaaaaacaccttcataagaaccaaaaatcaggtgagcactcatagtacctgcttttaacttcatagcgccggaagagtcactcaagacatagaaaaagtagtcctgaatcacgaatgccacccttccctcacccctagctgyagcaacaggcagagagcttctctgggcacagagggagaagaacatagcaattgtgaggcattgaactcagtgctgtcctgttaaagcagaaaggaaaacggaaccaaactcaaaggatacctgcctgatgaggaagcatctaaaccagccctagccagaggggaatcactgatgctagtgttccaaacctgcaaaacttgccaccaagggatacggcactgtgtctccaggtaaatgtgaaagcctgtccaggccataaggactgcaattcttaggcaagtcctaatgctgaactaggccagagacagttgactggggtgagggtgggcatgcaacatattgagacataagttggggcagctaagggagggcatcactcctcctctaaactcttcta

SEQ ID NO: 877304 - DNA, 550 bp, Homo sapiens
ctccatctcaaaaaaaaagagttgggaaattataaatggatacaccctctttggagagccatttggcaatatctcagaaactgttaatgtttgtacgtattgttgtattgatagttcccagtgactcacaccttccagtatccacgtcctcacacattaactctagggatggccattgacttgctmtgaccaatgggttattagcaagagtaaggcaagcagaggcttaataagcactttgcacagggtggcttgttctctgggacactacttcttagaatcctgaggccaccatgttgtgagaaagcccaagctagccgcatggagaggctatcgaaaagaaaactgaggaacacatctgacagctagaaccacaggcccacgcatagggtcccgttgagctgcttcagatgtttaagtcacccaggatgcaaccccagacattgtggaaagagacaagctgttctcactgtgccctgccgaatttctaatgcatagaattgtgagcaaatagaagggatgttgttttaagccactaagtttgggggag

SEQ ID NO: 877305 - DNA, 602 bp, Homo sapiens
tcactgtcacttcaaacgcggtcgactacctccccaaccagaaattctcatttcccaccatggcagacccccaagaaaagtggggagagattgtgctaaaagagcgaagggaaagtaatttatggagcaccttccatgtgccgggcactgagctaggtgcttctcattccttataacctctcatagcaactgggggaggtaggtttcttgattcccactttaggggtgagaaaacttaggggcggaggaaagtcaacctaaggttgactaargttggggttgtgtttgtaaatgcctgctacaggtggatgaaaccagctctgcttctaaggaggcaacttgattaaagcaaagagctctggatttgagagcagaagatctgagactaagccctatctccatccccgctgtctgtgtaacattagacaagttgcttaatgtctccaagtctccattccttcatctgtagcagagggagaagaatccctcaccctttccttaccacaaagaggagtcacacactcttgtggaggagcttgggctacctaaggcctatgcttgggtaagggggcagatgttattttctgttcatcacccctacc

SEQ ID NO: 877306 - DNA, 596 bp, Homo sapiens
aaaattgggtcactcccaccctaatacagcgcttttccaacaggctgaaaaaacagcacagcaggagattatatcctgcacatggcttggagggtcctacacccatggagtctcactgattgctagcacagcagtctgagatcaaactgcaaggtggcagcgaggctggaggaggggagcccgccattgcccaggcttgattaggtaaacaaagcagccgggaagctcgaactgggtggagcccaccacagcacaagaacaccttcctgcctctgtaggctccacctctgggggcagagcacagacaaacaaaaagacagcagtaacctctgcagacttaagtgtccctgtctgacagctttgaagagagtagtggttctcccagcacrcagctagagatctgagaacaggcagactgcctcctcaagtgggtccctgacccctgagaagcctaactgggaggcaccccccagtaggggcagactgacacctcacacagccgggtactcctctgagacaaaacttccagaggaacgatcaggcagcagcatttgcgaatcaccaatatctgctgttctacagccatcgctgttctg

SEQ ID NO: 877307 - DNA, 638 bp, Homo sapiens
atttagcattaggtagatcagcactttgggaggccgaggcagggggatagcttcagcccaagagtttgagactagcctgggcaacatagtgaggccctgtctatgcaaaatgaatgaatgaatgaggcattatggtcactcttactagatttgattgactgtgcctttacttttcaataaataatacatagactttcctgacctaagctttatgatgatctcaggttgtgatatgggggtaggaggaggttaactctctctatagccactgctttccttaaaatcattgctttttatttaagtgtcttaacatggcattttaaaaagcaaccttggccaagcatggtggctcatgcctgtaatcctgacactttgggtggstgaggtgggaggattgcttgagcccaggagttggagaccagccaaaaaaaaaaaaaaaaagcaatgctttacactccagtcattgagagaatcaaaaattattttccaaccactgccatgtcaaatgtaatttaagaaagcacccttcttccctgaagaaaatgcagtttggtttactttattccatctctgattagtggcattggttttgtttacaattagaaaataaaatgtgtttagagtacaatttaatggca

SEQ ID NO: 877308 - DNA, 627 bp, Homo sapiens
tgtttttttttgttgttgtttttgttttgagacagagtctcactgtgttgtgcaggctggagtgcagtggcatgatcttggctcactgcaacctccatctcttgggtttaagcgattctcctgcctcagcctcctgagtagctgggattacaggtgtgggctaccacacctggctagtttttgtatttttagtagagagagtgttttgccttattggycaggctggtcttgaactcctgacctcaagtgatcctctcaacttggcttcccaaagtgttgggattacaggcgtgagccactgtacctggctgtgtatgttttgttgttgttgttttttgagacagagtcttgctctgtcacccaggctggagtgcagtggcatgatctcagctcactgcaacctctgcctcccgggttcaagcaattctcctgcctcagcttcccaagtagctgggactacaggtgcattccaccacacccggctaattttttttgtatttttagtagagatggggtttcactgtgttagccagtatgatcttgacctcctgacctcatgatccacccacctaggcctctcaaagttttgggattacaggtgtgagccaccacacccggtgtattttt

SEQ ID NO: 877309 - DNA, 637 bp, Homo sapiens
ttatatgtttttgaatcattttgctggatttttcaaacacttattttcaaaaactaagtgaatgactctgacatggtaattaaagcttgagcccaatgactgcgagcgaaggttaattttgagccggcaaaaggaggttattaaaggcccagttagttccttctggaaagcctttcctgcagatgtcccagcctgcttaccccagccatggaagaagcctctatagtgagagaagctacagagccttggaaagctggggccccacagacagatgcagttaaggttaagatagaaggggtttgggagtgtcttactgaagataaaattgttacttttttgaggcagttttgagagrttttaaaataaaccagttagatgtatatataaaaaaaaaagaattccaaaggagtattgcaacaggaggaagtaccaactataagatctttaaggattgcaaagattaggtagaaaagggctttttttcctagggaaaagcaaataagattagaaaaaaggtgaggggaatgtttaaatgaagggtgaaataatcagattttagatcagacaatgttttaccctaaagtctgtgtgttcttagtagggacataaaatgaggttgtatggtggctcagactga

SEQ ID NO: 877310 - DNA, 610 bp, Homo sapiens
cccacttatgagtgacaacatgctagtttgattttctgttcttgtgttactttgctgagaatgatggtttccagctttatccatgtctctgcaaaggacatggactcatccttttttatggctgcatagtattccgtggtatatatgtgccacattttctttatccagtctattactgatgggcatttgggttggttccaaatctttgctattgtgaatagtgctgcaataaacrtatgcatgcatgtgtctttatagtagaatgatttataattttgagcgtatatacccagtaatgggattgctggatcaaatggtatttctagttctagatccttgaggaatcaccacattgtcttccacaatggctgaactaatttacactcccaccaacagtgtaaaagcattcctacttctccacatcttctccagcatctgttgttacctgactttttaatgatcaccattctaactggcatgaaatggtactcattgtggttttcatttgcatttctctaatgaccagtgatgatgagctttttttcatgtttgttggccacataaatgtctttttttgagaagtatctgttcatatcctttgcccactttt

SEQ ID NO: 877311 - DNA, 610 bp, Homo sapiens
cccacttatgagtgacaacatgctagtttgattttctgttcttgtgttactttgctgagaatgatggtttccagctttatccatgtctctgcaaaggacatggactcatccttttttatggctgcatagtattccgtggtatatatgtgccacattttctttatccagtctattactgatgggcatttgggttggttccaaatctttgctattgtgaatagtgctgcaataaacatatgcatgcatgtgtctttatagtagaatgatttataattttgagcgtatatacccagyaatgggattgctggatcaaatggtatttctagttctagatccttgaggaatcaccacattgtcttccacaatggctgaactaatttacactcccaccaacagtgtaaaagcattcctacttctccacatcttctccagcatctgttgttacctgactttttaatgatcaccattctaactggcatgaaatggtactcattgtggttttcatttgcatttctctaatgaccagtgatgatgagctttttttcatgtttgttggccacataaatgtctttttttgagaagtatctgttcatatcctttgcccactttt

SEQ ID NO: 877312 - DNA, 623 bp, Homo sapiens
gctgcatctgttgacataatcatgtggtttttgtcattgtttctgtttatgtgatggattacatttattgatttgtgtatattgaaccagccttgcatcccagggatgaagctgacttgattatggtggataagcttttcaatgtgctgctggattgggtttgccartattttattgaggattttcacatcaatgtttatcacagatattgttctaaaattctctttttttgttgtgtctctgccaagctttggtatcaggatgatgctggcctcatacaatgagttagggaggcttccctctttttctattgattggaatagtttcagaaggaatggtatcatctcctctttgtacctctggtagaattctgctgtgaatccatctggtcctggactttttttggttgataggctgttaattattgcctcaatttcagatcctgttattggtctattcagagattcaacttcttcctggtttagtcttgggagggtgtatgtgtccaggaattcatccatttcttctatatttctagtttatttgcttagaggcatttataatattctctgatggtagtttatatttctgtgggataggtggtgatatccccttaatcattt

SEQ ID NO: 877313 - DNA, 623 bp, Homo sapiens
gctgcatctgttgacataatcatgtggtttttgtcattgtttctgtttatgtgatggattacatttattgatttgtgtatattgaaccagccttgcatcccagggatgaagctgacttgattatggtggataagcttttcaatgtgctgctggattgggtttgccagtattttattgaggattttcacatcaatgtttatcacagatattgttctaaaattctctttttttgttgtgtctctgccaagctttggtatcaggatgatgctggcctcatacaatgagttagggaggcttccctctttttctattgattggaatagtttcagaaggaatggtatcatctcctctttgtacytctggtagaattctgctgtgaatccatctggtcctggactttttttggttgataggctgttaattattgcctcaatttcagatcctgttattggtctattcagagattcaacttcttcctggtttagtcttgggagggtgtatgtgtccaggaattcatccatttcttctatatttctagtttatttgcttagaggcatttataatattctctgatggtagtttatatttctgtgggataggtggtgatatccccttaatcattt

SEQ ID NO: 877314 - DNA, 623 bp, Homo sapiens
gctgcatctgttgacataatcatgtggtttttgtcattgtttctgtttatgtgatggattacatttattgatttgtgtatattgaaccagccttgcatcccagggatgaagctgacttgattatggtggataagcttttcaatgtgctgctggattgggtttgccagtattttattgaggattttcacatcaatgtttatcacagatattgttctaaaattctctttttttgttgtgtctctgccaagctttggtatcaggatgatgctggcctcatacaatgagttagggaggcttccctctttttctattgattggaatagtttcagaaggaatggtatcatctcctctttgtacctctggtagaattctgctgtgaatccatctggtcctggactttttttggttgataggctrttaattattgcctcaatttcagatcctgttattggtctattcagagattcaacttcttcctggtttagtcttgggagggtgtatgtgtccaggaattcatccatttcttctatatttctagtttatttgcttagaggcatttataatattctctgatggtagtttatatttctgtgggataggtggtgatatccccttaatcattt

SEQ ID NO: 877315 - DNA, 659 bp, Homo sapiens
ctggccggttgacagttcttaaaggccaaggaagcagtttacaacattaaaacatttagcaaacctgctatttggcctgcataatttagaccacctatttacatttgtaagatatttgtattctacaagaatgtttttatttcttaaagttgcgtgaaccaagaagcactagagactttaattttgtcttaatattttatctaagtgcttatttgtaggccaattaattagaggtttttttttatagacatcacacaaaacatgtatataaccatctagactaacagaagaagattcagtaactataagattttttgtttgccaattttctaattggattattggtctcyggttgaggacctttatgaacagggctaggggccaggcacagtggttatgcctgtaatcccagcactttgggagtctgaggtgggtggatcacctgaggtcaggagtttgagaccagcctggccaacatggtgaaaccccgtctctactaaaaatacaaaaaaattagctgggcatggtggcaggtgcctgtaatccaagctactagggagactgaggcaggagaattgcttgaacccaggaggcggaggttgcagtgagccaagattgcaccattgcacctctggcctaggtgacagagtgagactctg

SEQ ID NO: 877316 - DNA, 650 bp, Homo sapiens
ccagggctttatgcaggatgcataagaattgaaatttcctgtaagaccttagtgctgatataagctcatgatcttacccattgccctaagcctgagagtcaacatatcttctgttgtctgggtccaggtatgagagtcatccctgtgactgtgagctgggttcaaaaatgtgtcaacayctaacttgtggccagatccacatatgacattcataattccaactgtggaccgtgtttccactttagattctagacctcaccagtaggctctgttcctgtttgagggtgacaatcctaactgctggctgggtgtgtttaagagagccacaatctcacctgtgtgctgggtcctgctgtgacactctctgtgccacccaaggcctttatattataagcatgtgtagtaatcctctgtgaccttcgtacaagtaggggaaccaggaccttaccatttgccctaagcctagctatgtgaattaatatatctttttttttttttgctgattccagatacaagattcatcatcatgcctgtgagctgggtccaataatgaatcaccatcctacctgtggccaaatgcatatatgacagttacaactctaactgcagactgcatcggcatgtaaaatttaggtcaccagtgggctctc

SEQ ID NO: 877317 - DNA, 650 bp, Homo sapiens
ccagggctttatgcaggatgcataagaattgaaatttcctgtaagaccttagtgctgatataagctcatgatcttacccattgccctaagcctgagagtcaacatatcttctgttgtctgggtccaggtatgagagtcatccctgtgactgtgagctgggttcaaaaatgtgtcaacacctaacttgtggccagatccacatatgacattcataattccaactgtggaccgtgtttccactttagattctagacctcaccagtaggctctgttcctgtttgagggtgacaatcctaactgctggctgggtgtgtttaagagagccacaatctcacctgtgtgctgggtcctgctgtgacactctctgtgccacccaaggcctttatattataarcatgtgtagtaatcctctgtgaccttcgtacaagtaggggaaccaggaccttaccatttgccctaagcctagctatgtgaattaatatatctttttttttttttgctgattccagatacaagattcatcatcatgcctgtgagctgggtccaataatgaatcaccatcctacctgtggccaaatgcatatatgacagttacaactctaactgcagactgcatcggcatgtaaaatttaggtcaccagtgggctctc

SEQ ID NO: 877318 - DNA, 562 bp, Homo sapiens
agggctttatgcaggatgcataagaattgaaatttcctgtaagaccttagtgctgatataagctcatgatcttacccattgccctaagcctgagagtcaacatatcttctgttgtctgggtccaggtatgagagtcatccctgtgactgtgagctgggttcaaaaatgtgtcaacacctaacttgtggccagatccacatatgacattcataattccaactgtggaccgtgtttccactttagattctagacctcaccagtaggctctgttcctgtttgagggtgacaatcctaactgctggctgggtgtgtttaagagagccacaatctcacctgtgtgctgggtcctgctgtgacactctctgtgccacccaaggcctttatattataagcatgtgtagtaatcytctgtgaccttcgtacaagtaggggaaccaggaccttaccatttgccctaagcctagctatgtgaattaatatatctttttttttttttgctgattccagatacaagattcatcatcatgcctgtgagctgggtccaataatgaatcaccatcct

SEQ ID NO: 877319 - DNA, 628 bp, Homo sapiens
acagtgtggtaattcctcaaggatctagaaccagaaatactgtttgacccagcaatcccattactgggtatatacccaaaggattataaatcattctactataaagacacatgcacatgtatgtttgttgcggcactattcacaatagtagacttggaaccaacctaaatacccatcaatgatagacttggataaagaaaatgtggcacatatacaccatggaatactgtgcagccataaaaaaggatgagttcatgtagtttacagggacatggatgaagctggaaaccatcattctcagcaaactatcacaggaacataaaaccaaacaccacatgttctcactcataaatgggagttgaacaatgagaacacacggacatgggggsggatatcacacactggggcctatcaggaggttggggactaggggagggataacattaggagaaatgcctaacatagatgaggggttgaagggtgcagcaaaccaccatggcatgtgtatacctatgtaataaacctgcacgttctgcacatgtaccccagaacttaaagtataataattaaaaaaaagaaaataaaaaattacttacagacaacaaattctttaaaagtgatttttaaa

SEQ ID NO: 877320 - DNA, 636 bp, Homo sapiens
tgctacctcatagtgtcattatggaaaataagcattcctgaagtcagaggtagacatcttctaactccatacttatcaaggcagtcaccaatacttggtctgatgatctgctattcttgtagtagtttttcaaggtacgtggggagaaagggaacatgtcatttcaccatattaagccccattacatttgttccacactacagtaggtcagttctctgccaacattcagttctctggcttctcagctctttttgtttaagctctacacagtcatttcccctctgcctgctcaaggtcccacggaggctgggtcagcctctgccttgaacttgctctgcaaaataacaacccaggatcagattttmcccttcctcatggtgagttttctgatcttatttgctagatttataaaacagtcatttgtacagactggtataaaaattctaaagggatctttcaagtttgctgtaatagacaacaaaaatcagttacattggatcacaggctctgtaaacaagaatctgtgtctattaccagaagaaggatatgggaaaccttgcagggcagaccaagagtcagtctgtcacacggggtaaatgtcagggtcagtgccctattcttcccatcagcaagcta

SEQ ID NO: 877321 - DNA, 588 bp, Homo sapiens
caacatcatcacaacatatgagcatcaaaaactgttttacaattaacagcctcaaattcagaaccatcagaaaaaaaaaatcaatatatttcaggacaggctatttgccaaaatgttaacagtaaatttcaagggtaggttaagaattttgcaaaactttttatttgttaatatgcatttctttatttttataaagtaaataggtattrcctttataatataaaaatgaaagaaaaaatatctcaagctaggatttcattgacacaataataaacacctgctccccatccatgtacttaaaatctgaatacctgagttcaattctggccctactttttcttttttttttttttttttgagacgaagtctcgctcttgttgcccaggctggggtacaatagtgcgatctcggttcactgcaacctccacctcccgggttcaagtgattctcctgcctcagcctcccgagtagccagacttacaggcacttgccaccacacctggctactttttgtatttttagtagagacagggtttcaccatgttggccaggctggcctcgaactcctgaccccaggtgatctgccca

SEQ ID NO: 877322 - DNA, 588 bp, Homo sapiens
caacatcatcacaacatatgagcatcaaaaactgttttacaattaacagcctcaaattcagaaccatcagaaaaaaaaaatcaatatatttcaggacaggctatttgccaaaatgttaacagtaaatttcaagggtaggttaagaattttgcaaaactttttatttgttaatatgcatttctttatttttataaagtaaataggtattgcctttataatataaaaatgaaagaaaaaatatctcaagctaggatttcattgacacaataataaacacctgctccccatccatgtacttaaaatctgaatacctgagttcaattctggccctactttttcttttttttttttttttttgagacgaagtctcrctcttgttgcccaggctggggtacaatagtgcgatctcggttcactgcaacctccacctcccgggttcaagtgattctcctgcctcagcctcccgagtagccagacttacaggcacttgccaccacacctggctactttttgtatttttagtagagacagggtttcaccatgttggccaggctggcctcgaactcctgaccccaggtgatctgccca

SEQ ID NO: 877323 - DNA, 620 bp, Homo sapiens
gagttaagaagaaatcacttaggtagatagtgagggtacgggagtccttggtaaggcttttcttttaaatgaaaagcagccccacacatagacaagcaagctgggagcttgcacgggtgaatgccggcagaaactaggaaccagacacgttaagatggcrgctccattttcccttctctgccagccaagtgtacagtaaggagcagacaagctggtgccggccaagaggagaattcatgtgcataataagattagggtggggtgaccagccttcccagtgcgctatgtgaacatcatacctgattgaaccaatctgtgagccctatgtaaatcagacaccacctcctcaagcctgactataaaatctggtgcattcgccacccgccggtgtttcctctcagaagtcccctctctctcattagagagagggctgttttcctttctccttcttctgcctattaacctgtgctcctaaactccctgtgtgtgtctgttctgaattttcccggcatgagaggatgaacctggggtatataccccagaaaacatagccacttaagtgagaactcactcactattcacccccaagatccaatcaccttcgaccaggttcctcccct

SEQ ID NO: 877324 - DNA, 623 bp, Homo sapiens
agaaatatcagtagaatctgaattttcccctacctgcctccttgttttcactacaaataacatttcctttcctgcttttaagtcaagaggggaacacactgattctttagcagacagtttagcacacacttcaagccagagagtgtaccagcaatgtggattcagaaataaatatgatgggagccctgctctcacaggatggggttgggggtgggggataaagtcccaagggagttggacagtctccagatgggtagtcactgctgggcagaaacacatgagggaagtgtcaggagcccraaagaagctctgaacaggttggaacacgttttctggaggatgggacattgaaactgaatcacctacaatgttgaaggcagatggtaacctaagaaaggtaaagccttgttaatcaaatcaattcttttcactttaactgtattggaaagatactttaaaaaatcttcataacaactgaagctcgatgatgccttgattctgcattaacatccttgcccatttcttgatacattttcaatttaccttcatggtaatttacactcaaggaagctgtccaagatatgcgggggattcaataaaataggtcatggagttaaatgctg

SEQ ID NO: 877325 - DNA, 680 bp, Homo sapiens
accggattaagaacttgtcttcccgcttggcatgctttcctctgactgatcaccacccttagcctattttacatatacctaccctttcctaattgtttttctacactgtcgtgcccacctttgagtggtgtttttgcttcaaacttttttgcatactcacaaaccaatcagcatgcactccccattttgagtccataaaagctccaggctcactcatattgggggactttcctgcttttaggtaggggaagcaccccccgcccttctttctctttgctgagagctttcctttcatttaatacattctactccactcactctctggtgtctgtgtgcctaattcttcctggtcatgagacaagaaccygtacctagctgagctaaggagcagaaaaaaatcctgcatcaaccccaataactggattgtaatcttgttcattctgcttataggcctaacatggtagcctttctaataatccactctagattgagattattccttgttttcgtgtgtacattcattttctattactaccataacaaatgccaatcattcagcatctttaccaaacctatttataatatcacagttcatagatatctaagctcagcagagctcagctgggcctctgctctgggtttacaaggctggaaccaaggtatcagcagtgctgcattcc

SEQ ID NO: 877326 - DNA, 639 bp, Homo sapiens
tagttcaaccattgtggaagtcagtgtggcgattcctcagggatctagaaccagaaataccatttgacccagccatcccattactgggtatatacccaaaggactataaatcatgctgctataaagacacatgcacacgtatgtttattgcggcattattcacaatagcaaagacttggaaccaacccaaatgtccaacaatgatagactggattaagaaaatgtggcacatatacaccatggaatactatgcagccataaaaaatgatgagttcacgtcctttgtagggacatggatgaaattggaaatcatcattctcagtaaactattgcaggaacaaaaaaccaaacaccgcatgttctcactcgtaggtgggaattgwacaatgagaatacatggacacaggaaggggaatatcacactctggggactgtggtggggtggggggaatggggagggatagcattgggagatatacctaatgctagatgatgagttagtgggtgcagtgcaccagcatggcacatgtatacatatgtaactaacctgcacattgtgcacatgtaccctaaaacttaaagtataaataataataaaaaaaaaagaaaactaccaatataccttataaacataaacac

SEQ ID NO: 877327 - DNA, 668 bp, Homo sapiens
gcgtcttcatatggtggagagtacagcgaggctttaggctgagagcaattcctggagatagactggctgtgagctgccagcaggcaatatttcctagctgtgttacctaactaagcaaattctcactttcctttttataaaagcactaatcttaccatgcaggcaccttccttccttctgtctttttcttttctattttttttaaagttgttgttggatatattttggaatgtgaggttgttttcyattctattcatatttaagttttttcctccagtgcatctcaaatcagcatcaccatgttggggcctccaacatggcaatgtttgaattaatcacttggttctaccacagggatgctgtgtgtgtttttccctattaccttgatgatcaggatgatttttagcagtaacagcagcaaaggcattttgtagggtcagaaagcgagccatctatttttcagagtgcgatctcagaaggccacatgttaaatgttccttttctacatgggtgaccactaaatgggtttgtatgttgcccatgttattagtatttcttctgagtgctctagagaataaagaccaaaactgattgagacataaaaccaatggacatagggtaaacgttgctcacctgaacttactcttagtcatggcttttgctggaat

SEQ ID NO: 877328 - DNA, 653 bp, Homo sapiens
tcaaggacccatatctaggccaactcttggcagcctgactctagagtctttgctttcaatccttaaaacttcctgcccagatgaggaactggacttgatctaaggtgatagaaatccagtctggatgctttctgaaatttttccatccctaacagagccacctaagtggtttcagtttcttcaaattctttctcacaatttgattgatgagaaagtgagagttctggtttcaaacacagagattcgcaaacctctktgtagcatttgaccgtgaagccatgcctctcatcttgagggatgctttgccgacttccctttccatggaagggtgtatactccagccttggcccaaagccatgtactaagcactgggttttaggtctaaaaagagctccctggcagataacctgctgtgccctgcttgggggtagagaggagggtgcccaggtatctgccactgataaaaacatgccaggctacacgtgtaagcctgttccctccttaccccaaacttagacttagtaactgcctcatcattcagacaaggaaaagtgaaaagaaaggcaacccttcttcccacaaaaaagcacaaaaataaacatataaacaaaataaacatatcaacatataaaaataaacatataaacaaaacc

SEQ ID NO: 877329 - DNA, 665 bp, Homo sapiens
ccggggattttgttcaacaactcaccaggtactgtgatagttttttgcccagttctctcattccaatagtcagatgagtcctgtaatcgaatctttttccaaattcaaagctagaaaactcatgatgagcagttgtgttaagggacactaccagcagagcatcaagtcctatgtggtaaaaaccccaatataaataaagcaaaggggttgtacatgaaaaagaagaagacataataattctactcagtgaacatgatttaaagaattgaaaaggggaaaaaaacaaacataagaggaaggagtactcctgacatatgaagaaactaacagagaatttgcctgcattttctgaatatgcaccagctctggtccctgaccrtcgcatgaaatcccctgataaaaagtattcaagagaaacgatttacaaatctacagaaaaacactaatagaaaactgtgttccacatcttaccaccaattttcatgcaattcttgggcacgggaaagtgatttttaagaaagggcattattcatctccagagagctttgctgaattttcctgaatgtacattaatgataattctcaagttattcccaattccaaacacccctgggaggccaagccctgagaacatgaggaaagcccagggcaattgtctcagctga

SEQ ID NO: 877330 - DNA, 656 bp, Homo sapiens
ctgtatgagtttttgaagcccatgaaacctcacaagctggtcattaattatattagaagataagggcaacccttaagctaagccatacaatgtctacaatgacagtgctggggctctgtgagccttgtctattcatagttcaagcctttgggagaaagtcagctaccattagcctgggaagattcatgttgacttctgaaatgtctccaattttaacccagctagaccttcatactttagacccacaagctactaackttggcttttatgtggtattccaaagtccaatcttctccttcattcatctcaacccattcaactcctgccaattcattcttcattcttctgacagagggatccttctaaaccacatatctgattaattgctctactgacttcatgctatattgaggtacccactacctggagagcagagcccccactcaagaccccttatctctctcattattccttcttgcctcatttcctgccatactcccaccactacttgtgagttccagtgctttcgtaatgacccacattacttgatttcatgctgttttaatatgtccttactattgttaaggttgtttcctcaccatttatttacttattcattcagcaaaacatatacaagaggacttcaaaaagttcat

SEQ ID NO: 877331 - DNA, 674 bp, Homo sapiens
tattgatcaaattataattcttggtaattagtcactgagtcacttgaagatctcaaacaagtgtcttgttgggtcagtgttgaaccaatgatgtgtctctctgtgtgttttcagataaatgttttccaaatgcttgcattcgagaggctttcttacctgaagattcatacatggatgtagtcttcctcatagacaattctcggaatatagcaaaggatgagtttaaggctgtgaaagccttggtgagctcagtgattgacaacttcaacattgcttcagaccctttaatctcagactctggtgataggattgctttgttgagctattctccttgggaaagttccaggagaaagatgggtacagtaaaaacagagtttgatttcatcacttatgacaaccaactcctaatgaagaatcacatccagacttccttcyaacagctaaatggagaagcaacaattggtcgtgccctactgtggaccactgaaaatctttttccagaaacaccctatctaagaaaacacaaggtcatctttgtggtctcagctggagaaaattatgagagaaaagaatttgtaaaaatgatggctttgagggctaagtgtcaaggctacgtcatatttgtgatttctctgggctctacacgtaaggatgacatggaggagttagccagc

SEQ ID NO: 877332 - DNA, 481 bp, Homo sapiens
tgtacacaataggcttccaaaatatttagcttctcatttgcacatatgcccaagaaaggctgtaaaacccagtacaatggcttttctatttgaacatgatccagaaggataaatgttccttctgtgtacccaggttataggaaacatttgaggaccttttccaattaagttatccattgatttgttgtgtaacatrtattcctaataatagctttcataatatttgtaatttaacaatctgggagaggagatacaatgtagtaaacaatttcagtaaatggtggggcaaagccttgagataactagagatgtatatatattttttaaagacaaagattggaagaaatcaccaaagatgccatgttctgccacattgctgtgagcaatgattcaaataattatgtatgtgaaaaacataccagccttgatttttcaaaatgcacatttttcatattgtttgaatttacaggaactggcacca

SEQ ID NO: 877333 - DNA, 686 bp, Homo sapiens
tgcagaatgaagatttagattattttcttggttttaatagacagggccataagttagtagtttctagtgtaacatatgacactttgtaatactctgtaccttatacaaaggatgatggttattttgatattttttttcacagtaaagccttaaataacattggaggcataagagaaaacatcagtgttattattaattccttagtcttaagtgagcattattctttgcactcatgataggaatgatagtgacaagactggatattttatagtctggatattctggactaggaatgaacaggacatgtccataccacatttacaccaagtgttkcattctctgatattaagagaacatttttggtcaaaaacagtgatgacttcaagaaaagacatctctgcagaattgatatctttccttcatatggccctatggtggccaagacaactgattactcgagaagttttcagccctagttctaacacctatttcaggatattctaaccatagggctcctttgccttggtaaccttacctccacaactggtatgaaaaaataaaagagaaatctattgtcatgcctgatttctgggacttagaaatgtgtttcactaccatccttggtacctaaactctcagccatcactgtgctatgctcaaggatttagtttgtagctttggcatag

SEQ ID NO: 877334 - DNA, 682 bp, Homo sapiens
ttacttaaatgaagtttaaatattgacagataatttgatgttctcaaagccctttcactggtcccttctcctccactcttgtcacctccaatctattcttcctagaacagcaaacacaatcttcccccaaaaaactcagttatattgtttccctgtttacatcttgcagcgttttccccttactactgggaaaaattctcactccttaccgtgarcaagagtcgacatcctctggcccctgcctaggtcatagtaggtgacattcctaatactaattcctatcagttctttgaagacactaagcattctctggccttaggttatttgcatgtgctgttccctccatctgcacagctgtttctttgctcttctcaggactaagtccttgtctgtgcttctacctctgcaacagtatcccatttacagagaagccttccctgaccactctcaccatcccacctaaacaaagattccttcacttttctctaccagagcctcccattgttttcataacactcactaaaattagcaatcattttatatatttgccttcttgtttctttgttgcctgtctctcccaccagtatgtacgttccatgaagaagggccagcattttcttgttttgttttatcagtatatcctgagtttgaagcacaattatctgatactccatcaatggtg

SEQ ID NO: 877335 - DNA, 607 bp, Homo sapiens
tattgaattgctgattcattggccttaatattttagcaacttgcccatttttggcaatctaatgagatttttttaaaatcagatttgggaaccaacccaaatgtccaacaatgatagactggattaagaaaatgtggcacatatacaccatggaatactatgcagccataaaaaatgatgagttcatgtcctttgtagggacatggatgaaattggaaaccatcattctcagtaaactatcgcaagaacaaaaaaccaaacaccgcatattctcacgcataggtgggaattgaacaatgagatcacatggacacaggaaggggaatatcacactctggggactgtggtggggtcgggggaggggggagggatagcattgggagatatacctaatgctagatgacacgttagtgggtgcagcacaccagcatggcacatgtatacatatgtaactaacctgcmcaatgtgcacatgtaccctaaaacttaaagtataataaaaaaaaaaaattaaaaaaaaaaaatcagatttgaaattattgtttttaactaatgtatgtattttctacttgcatattatattgtggccaatattaaattacaaaat

SEQ ID NO: 877336 - DNA, 607 bp, Homo sapiens
agtcttcagaaaataacaaattgtaagaaagttattagtgatatttatatttttttcattcaaattacctaattgagggtctgaaaatatgacctctctatattcccatgtaaaaaaaaaatatttgttctattcagtattttaatcagactgtttatcagttctcacttgtgcatccttttacatttcttacatatatatgagttgaatatgaagtaattttactttttgctctagacattgggaaaaaaaatcccaaatctcaaatttaaatgtttttttaggctaggtgcaaaggctcatgctgtaatcccagcaatttgggagaccaaggcaggaggatcatttggggccaagagttagagaccagcytaggcaacataccaagacctcatgtctataaaaaaagaaaataaatagccaggtgtgttggcacacacctgtagtcctagctacctgggaggctgaggcaggaggatcacttgagctcaggagttcaaggttacagtgaattatgatggctccactgcactccagcctgggtgataggctgaggccctatccctaaaaaaataaaaactttaaagtttttcacttacatttttaa

SEQ ID NO: 877337 - DNA, 614 bp, Homo sapiens
gctaagcaaattaagcaaagacacaatagcagaaccatatagtctttgaatataggaatgtctcactccaaagtgcatgtctttttcagggcaccacacactgttactacacatatgatctacattctagactggagagagaagagggttttccttaacttcagcaaacaaaccacgtgcatgaaataaaggaaaaagttggttcaacagagtctatgagaaaatccttagaagggctgacagcaatcaaataaaatggcatatttgcccataagctgctgtcaactcgggtggctttaataaataaaagtcactggttggccgggcacagtggcttatgcctgtaatcccagtactttgggaggccgaggcaggcagatcacctgaggtcaggagttcgagaccagcctgaacaacatggagaaaccccatctctactaaaaatacaaaattagccgggcatggkggtacgtgcctgtaatcctggctagtcaggaggttgaggcaggagaatcgcttgaacctgggaggcagaggttgcagtgagccgagagcacaccattgcactccagcctgggcaacaaaggtggaactccatctcaaaaaaaaaaaaa

SEQ ID NO: 877338 - DNA, 617 bp, Homo sapiens
taattatccattagtagcaagggtaaaatttatttgtcctacgtgagtaaagacaagaagttcattattttcatatttcattgcctgaatcaaaggtgctaatgagataccttaaggcaattccacatgtaagaaaattcctagaatttaacaagatatttaacattaggtgaaaaaagaaggttaaaaaaaaagaagccaaaactcaagtgacatcgtaaaatggtaccttggagaaatcacttgtactttagtaatttagaaaggtctatctcattcatagcaagcaaaagtaaaaataaactttcatgctgtgctcaagaacagctcaaaaaacattttatacagcatactatgataaattggactgaaattcagagttaacatgtgacctttcaaactagaaatataagaacaaaaatgcaaaattaaagtattgtgttgctgagcrccttcattagcaaattattttgctaagtacaaacactgagtaccttatttagaaaattggctccaacaaaggagaaaaaaaaattggtaatgtgtgtgttctgtgtgtgatttctttaaaatttcttcttaatcaacatttttagctactttaggagtactactaa

SEQ ID NO: 877339 - DNA, 533 bp, Homo sapiens
tggtgtaactgaaagtgatggggagaatggaaccatgttggaaaacactcttcaggatattatccaggagaactttccaaacatagcaaggcaggccaacaatcaaattcaggaaatacagaaaacaccacaaaaatactcctcaagaagtgcacacaagacatgtaattgtcagatacaccaaggttaaaatgaaggaaaaggtgttcagggcagccagagagaaagggcgagatagtcacaaagggctgcccatcagactaacagctgatctctcagcagaaaccctacaaggcaaaacagagtggggsccagtattcaaccttcttaaagaaaagaattttcaatccagaatttcatatccagccaaactaagcttcataagtgaaggagaaataaaatactttacagacaagctaatgctgagagattttgtcaccaccaagcctgccttaaaagagctcctgaaggaagcatcaaacatggaaaggaacaagtggtaccagccactgcaaaaacatgccaaattgtaa

SEQ ID NO: 877340 - DNA, 605 bp, Homo sapiens
gggtgaaggatatgaacagacacttctcaaaagacgacatctatgcagccaacagacacatgaaaaaatgcttatcatcactgatcatcagagaaatgcaaatcaaaaccacaatgagatatcatctcacaccagtttgaatggcaatcattaaaaagtcaggaaacaacagatgctgcagaggatgtggagaaataggaatgcttttacactgttggtgggagtataaattatttcaaccatcgtagaagacactgtggtgattcctcaaggatctagaactagaattaccatttgacccagccatcccattactgggtatataccctaaggattataaatcatgctactataaaggcacatgcacacatatgttcattrtggcactgttcacaatagcaaagacttggaaccaaatgtccatcaatgatagactggattaagacatgtggcccatatacaccatggaatactatgcagccataaaaaaggataagttcatgtcctttgtagggacatagatgaagctggaaaccatcattctcagcaaactctcacaagatcagagaaccaaacaccgcatgttctcactcataggtgggaaa

SEQ ID NO: 877341 - DNA, 596 bp, Homo sapiens
agttctcttagcatgatcaactcttagtaaagtacaaaaatttgtaccaattttctaccaattaatcagggttggtgacttgcccctccccagctttaataaggtataattgacaatttaaatttatatgtatttcaggtgtacaacttgatgactctatacacacacacacacacacacacacacagcaaaataattattttttgatgagaatactaaaggtctctccacttaaataatacagcattgttaactatagttgcattattgtacattaggtctccagaacttattcatcttgtataactgacactttttacctctttaccagtatctctctattttctgccccccctgccccacccccacccctggcaaccaccccactatgctctgcttcaatgagtttgactattttacatttcacatataaagggatgtattaawacaaagacaaaatacagaaggaaaactgcctcaaggaaaaagtacaattcgaattttagatgagtttttcttatgtaaaaataggctagaatatttatagaaaatctattgataacaaaaaacacattataataacagtagatccacaa

SEQ ID NO: 877342 - DNA, 652 bp, Homo sapiens
taaacaagcaacaagcacattgatctgaaagacctccactgaccagcctcagaggaagcctttattaagcaccctgggagaaggacaatcaccctacctccctggtaggatgcccacattgcatggacatcctctctcttaatgaggctgtgtctactctctcttctccctgccccaagaaatgggacatacctttttgtgtgtagcccagagtctagctgtggtactgctagattatgggagatcagatcatgaaacaattataaaagagaaggaagggaagaagagaatatggagaaggaaatcactccagattctgattcaacgtttctcattctcaaagcaaaatactcttgccttcaatattaaataattacaggtgtgttgrggggggggaggtagtatagtttcttatctgtactatcccagaggtcacaatctggctggattctggaagaatctgacttgtagtaagtttggattggcatgaacaattaaatatatgtagatggatagatttgctagattaggtagctaggtaaatacctaggtagataaaatagattaagtagattagatagatttgccagattagataggaagatggattagacacacatattaattcaaatgaagactggactctccaata

SEQ ID NO: 877343 - DNA, 526 bp, Homo sapiens
cttactccctgcccacattccctgcacaacaacccccacaaaataagcaaagtgccctggaaagaaccttaaccaccattgatggaaacagaaataggtgaagtgtaaggaggactgagaagggatgggcctcagcaagaaaaataggtgttttatggaggcgattatacactaaagtggaatttgtaaattgaaaactcccggacgtctcaggattactctcatgaatgtcaagggcwtaaagctcttatgtttatcgagaggcagcgaggagtgctaggatgtacttggctgtggaaccacacagactgggtttaaatcctatttaagtcatcctgagaagttgtttaagtccttggagcctcattttctttatctgtgaaatggggataataatatcctctatccagggttgcattgaagattaactaggaaagaactggtcatagtgctgggctataaaacacaggcagttgtgattttcctaaatttctgaaagatcatggaagactttctgattcattga

SEQ ID NO: 877344 - DNA, 526 bp, Homo sapiens
cttactccctgcccacattccctgcacaacaacccccacaaaataagcaaagtgccctggaaagaaccttaaccaccattgatggaaacagaaataggtgaagtgtaaggaggactgagaagggatgggcctcagcaagaaaaataggtgttttatggaggcgattatacactaaagtggaatttgtaaattgaaaactcccggacgtctcaggattactctcatgaatgtcaagggcataargctcttatgtttatcgagaggcagcgaggagtgctaggatgtacttggctgtggaaccacacagactgggtttaaatcctatttaagtcatcctgagaagttgtttaagtccttggagcctcattttctttatctgtgaaatggggataataatatcctctatccagggttgcattgaagattaactaggaaagaactggtcatagtgctgggctataaaacacaggcagttgtgattttcctaaatttctgaaagatcatggaagactttctgattcattga

SEQ ID NO: 877345 - DNA, 622 bp, Homo sapiens
aaaaatgagagcagatataaaagtgtaccccaaccctgaccccactgccatttggtgtgcaactatgtatttcaatattaatatctttcttcaaaccaaaatggagttaagagatccttagattcccagttttaacaaagctggtcagataactatcttaaggagcagaaaaatggtctgtctctttctcatattttagaacaccacagtgactctcatataatagccttctttccctccagatacagacgtagagaagggaattgttcttcagacttcaataatgtttgaattccaggctacagaattattttcattgattttctgaatttctaggtgtcttaayacctgagacatcttttaggaaattatttcttatttgcattattatttttatttaaaaacgggccaggttcagtggttcacacctgtaatctcagcactttgggaggtcgaggcaggaggatcacttgaggacaggagtttgagatcagcctgggcaacatagcaagaccctatctcttaaaaaaaaaattttttttttccagttaggtgtggtgctacatgcctgtagtcccagtgactcaggaggctgaggcaggaggatcacttgggctcagtg

SEQ ID NO: 877346 - DNA, 619 bp, Homo sapiens
tccaagagagctcaagactctagccagtcttgtataacttatcttggaaatgacatgcctctgctgtattctgttggtcacacagattgacactggtacaatgtggggagagggtgtgaatatcagggtgtgtataccaagaggtggggatcattgggccatcttggagactggctactacagatakccatttaaaatatttacctaacgattcactcatggatgatacctgactcagaagtatgagcattttactaataagcacttggaagacaaattccccgtaccaccaagatctggttagtggtgaagaagtcagtctcaagtctaattactgatggcttcctttaaagggtctgttctgtgtaggagggagagtcttgaaggcattattaattattgaatatatatgtatttttttgagcagagacttactctgtcacccaggctggagcgcagtggcctgatcctgactcactgcaacctccacctccctggtcaaagtgattctcgtgtctcagctcccgtatagctgtgattacaggcgtgtgctaccttgaccaggtaatttgtgtatttttagtagagacgaggtttcgccatgttggccaggctagtc

SEQ ID NO: 877347 - DNA, 668 bp, Homo sapiens
tctataatcccagcactttgggaggccgaggtagcaggatcgcttgaagccagaagctcaagaccagcctgggcaacatagtgagacgcctctctctacacacacacacaccaaaaaaaaaaaaaaaaaaaaaaaaaaaaagtttaaatagcaaggcacaccatacaccactaggagctaagactggtcaggagctgaggactactcaggaggctgaggcagaaggatcacttaagctcaggaggattttgaggctgtaggagccaarattatgccactatactccagcctgggcaacagagcaaggccccatctctaaaaaatatatatatacatatataaactgtagcagatgctgtcagtgccccacccatacaacccctcaccctgatcacacttcagtgcccactggtctgacttccacctaccagcatctgcatgtcttggcctgaccgcttcccctggccactgaacctcctctgcccacccatggggcaggctagaaagcacctggtgattcacgtccaaacaccccacccaagcagccgtcaaccaatgagtaaagagagctgctgtttgaagaccccagcttcctcacctggagtgggaataaccgaggctcgtgctccatgctggctcccagcggcttcctccgtggggtaaagctc

SEQ ID NO: 877348 - DNA, 677 bp, Homo sapiens
agtggctcacatctataatcccagcactttgggaggccgaggtagcaggatcgcttgaagccagaagctcaagaccagcctgggcaacatagtgagacgcctctctctacacacacacacaccaaaaaaaaaaaaaaaaaaaaaaaaaaaaagtttaaatagcaaggcacaccatacaccactaggagctaagactggtcaggagctgaggactactcaggaggctgaggcagaaggatcacttaagctcaggaggattttgaggctgtaggagccaagattatgccactatactccagcctgggcaacaragcaaggccccatctctaaaaaatatatatatacatatataaactgtagcagatgctgtcagtgccccacccatacaacccctcaccctgatcacacttcagtgcccactggtctgacttccacctaccagcatctgcatgtcttggcctgaccgcttcccctggccactgaacctcctctgcccacccatggggcaggctagaaagcacctggtgattcacgtccaaacaccccacccaagcagccgtcaaccaatgagtaaagagagctgctgtttgaagaccccagcttcctcacctggagtgggaataaccgaggctcgtgctccatgctggctcccagcggcttcctccgtggggtaaagc

SEQ ID NO: 877349 - DNA, 632 bp, Homo sapiens
ctggaatcaggtgggcagcaggtgatcccactagtggcaacttggtgttctgcgatgtggcacatccacttcttaaatgcagattattgcactgtaataaaaatcctccatattcagtgctttcattgtgtataattatgtaaactgtagacaaaaaatattcctgaatttgtgtgtgtgtgtgtgtgtgtgtgtgtgtgtgtgcggatgcgcaatccgagatggttgttaaagctcgaaagcgagtttagcttctagagtcgcccctcctccgaggcccagccgaggtggactcgcaccgtcgcaagaccggccaggcggtggcaatgaataaaaagccagtcttggtgctagggacccaggtgttctccgtcccgcccctgcctggcagmcccgcccctcccccgccccgggccacgccccaccctggcccagcccccaaaagtaccgtttgcatctcccgtgagcctcttcgactgtcactctttggaaaaaaaagtgacgtctgcactgaggtggccgctaaagtgcgaatcacgacgggcggtggccgttgggtcccggcgggaggcggggtttccgctccctggggcgcacgtcagtcaggaggcggaagcgcagcgggggcggga

SEQ ID NO: 877350 - DNA, 621 bp, Homo sapiens
tgggcagcaggtgatcccactagtggcaacttggtgttctgcgatgtggcacatccacttcttaaatgcagattattgcactgtaataaaaatcctccatattcagtgctttcattgtgtataattatgtaaactgtagacaaaaaatattcctgaatttgtgtgtgtgtgtgtgtgtgtgtgtgtgtgtgtgcggatgcgcaatccgagatggttgttaaagctcgaaagcgagtttagcttctagagtcgcccctcctccgaggcccagccgaggtggactcgcaccgtcgcaagaccggccaggcggtggcaatgaataaaaagccagtcttggtgctagggacccaggtgttctccgtcccgcccctgcctggcagccccgcccctcccccgcccmgggccacgccccaccctggcccagcccccaaaagtaccgtttgcatctcccgtgagcctcttcgactgtcactctttggaaaaaaaagtgacgtctgcactgaggtggccgctaaagtgcgaatcacgacgggcggtggccgttgggtcccggcgggaggcggggtttccgctccctggggcgcacgtcagtcaggaggcggaagcgcagcgggggcggga

SEQ ID NO: 877351 - DNA, 617 bp, Homo sapiens
agttttccttctaaaatagttgtgtcatgtattcccactgaagtttgaaggttgggataatatctttagattgaacattttatttattctttcagaataagttttgttctatcaaaaggaaaactatatagacttttttgtgtattattgatatagtaatactggtataatctttttctgacaggctagaaaatttcacagcatatttaaatatgaatacaactgacatatgattccttttaacttggcctaattatatgcgttaactcacaaaacaaatatataaaccaatyaatatcaactacagtgaaaagtgaaacaatttaactcttactaagcctgaagaaaatgacatgatcacactatgtctgatttctattcacaacatttttattatctagtaagggatgcaatggaaacaaacgtctaagtataaatatataaaaatatgaataaaattaatcacacttctattatggtcaattgcagtaaacatactaaaatacagttattatagataactacaggaatccaggattctatcttggaggcggtactatttgatgcaagaactgcattttaatatgatgctatcagaacaaatgagctgaaatggg

SEQ ID NO: 877352 - DNA, 613 bp, Homo sapiens
gctcaaacccaaagagtcagcagcagcaacatttactgccaacagccaaagaacaaacctcccacacgtggaagcggagctcactcagttgccgctgctggctggggcagcctgcttttattcccttatctgaccccatccacatcctgctgattggtccattttacagagagctgattggcccactttacagagagctgattggcccattttgacagggtgctgattggtgtgtttacaaaccttgagctggacacacagtgctgaytggtgcatttacaatcctccagctagacataaaagttctccaagtccccactagatgagctagacacacagcactgattggcgcatttacaaaccttgagctagacacgaagtgctgattggtgcatttacaaacctttagctagacataaaagttctccaagaccccacctgactcaggagcccagctggctttgcctagtggatcccggaagcgggcagctcgcctgcaatgtatacataagtatacataattaatgctgtaacaatatgctaagcacattgcatatattatctctaatgctcacaacaaacttgccaagcatgtttcattatagcagtttta

SEQ ID NO: 877353 - DNA, 680 bp, Homo sapiens
gaacatgcaggtttgttacataggtatacacgttccatggtggtttgctgcacccatcaacctgtcatctacattaagtatttctcttaatgctattcttccccttgcccttcactccccaacgggccctggtgtgtgatgttcccctccctttgtccatgtagttctcattcttcaactaccaattatgagtgagaacatgtggtgtttggttttctgttcctgtgttagtttgctgagaatgatggtttccagcttcacacatgtccctgcaaaggacgtgaactcatttttttatggctgcatagtattccatggtgtatatgtgccacattttctttatcccgtctatcattgatgggcatttgggttggttccaagtctttgctattgtgaatagtactgcaataaacatatgtgtgaatgtgtctttatagtagaatggtttrtaatcctttggatagatacccagtaatgggattgctggctgaaatgatatttctggtcctagatccttgagggattgccacacggtcttctgcaatgtttgaactaatttacactcccaccaacagcataaaatcattcctatttctccacattctcaccagcatctgttgtttgctgactttttaatgattgccattctaactggtgtgagatggtaatttgctgtggtt

SEQ ID NO: 877354 - DNA, 659 bp, Homo sapiens
cttttgccaactcatcaaagtcattctctgtccagctttgttctgttgctggcaaggaactgcgatcctttggaggagaagtggcaccctggtttttagaattttcagcttttctgctctggtttctccccatctttgtggtttttatctacctttggtctttgatgatggtgacctacagatgtggttttggtgtggatgtcctttttgttgatgttgatgctattcctttctgtttgttagttttccttctaatagtcaggtccctcagatgcaggtctattggaayttgctggaggtccactccagaccctgtttgcctgaatatcaccagtggagactgcagagcagcaaatattgcagaacagcaaatattgctgcctggtccttcttctggaagcttcgtctcagaggggcatgtggctgtatgaggtgtcagtcggcccctactgggaggtgtctcccagttaggctactggggctcagggacccacttgaggaggcagtctgtctgttctcagagctcacacacagtgctgggagaaccactgctctcttcagaggtgtcagacagggatgtttatatctgcagaagtttctgctgccttttgttcagctatgcccttcccccagagatggagtctacagaggcaggtggg

SEQ ID NO: 877355 - DNA, 645 bp, Homo sapiens
caaagcaagtcacaaggacagatcagtttcaaagagtgggaaaatagactccacctctttataggaggagctgcaaagaatctgtggtcgtatttaatctaacacatccggacaacagagagaaatcaggaagttgaatgagatgcagatttgctcttttttttccccccaccagaatatgtatttaaggatagaagtgatgttacaggtcattaatttatttattcagatatttcagtattttgacttctracaaatcaaacccatgccaatgctatgcttttatacaatttctacatcataactggcactcactaaacccacaatcaacaatgaagaaaaaagtaggcacaggcatgtttcatagaaactaaaatagacttggtcagcttatttattaagcacatattcttatctactatgaaaagtcatgaccttcttagctgaggaaagcaattacttttgcacagagaatctttatataacaacacaaaggatattcaaaatttaccagtttctggcaagactaaagcacttaaggcaggcagtgttaatcatgcaaactttgtgaagcaattcagcttatcagagcatgagatgaacgaagtcaaagctttgatcctcagataggccaatatatttcat

SEQ ID NO: 877356 - DNA, 608 bp, Homo sapiens
gggaaggcatcagaggctagaggaggctgctgagcccccggccctggccaggcagccaagcccagctgaggacatctcatgtgctctgccatgatgcctccatgaaggcggccagccggactgaccgggaaccctgttttcctgttgaagcagcggtgagagccgggtggaggctgcaggtggcctcctcggctagagggaggacccagacctgagatacagccggggtgggctcacccaggcagagacgagggtgggcctggtgctggtgcagttcagaagtggcccctggctccagcctccaggygtggggggacgtaggggtgagcctctcccccgcccccatgggtgctggacctggcggtgtcacactgagttccctgctcacacacctcctcattcatgacacatcatccaccatcacccacatgtgcctccagccttaacggataagcacacgctcataacatgcacacgtccatgctgagacccgaaggggtggacacacttgatcacacactgttcacatgagatcccatgaccttgtgagaacaccccccaccacacacacacatgcacgcacacagaggcaggcgagtgatgtccct

SEQ ID NO: 877357 - DNA, 619 bp, Homo sapiens
aaaagcaaggaggagcaaagtcacatcttacatggtggcatgcaagagcacgtgtgcaggggaaattccctttataaaaccatcagatcttgtgagacttattcactatcatgagaacagcaggggaaagacctgcccccattattcaattacctcccaccagctccctctcacaacgtgggaattatgggaactataattcaagataagatttgggtggggacacagccaaaccgtatcaataagcttcctcatacctcttttgtaagggcagtaattctattgataaragtggagccttcattatctaaacacctccaaaagctccacctcttagtactagcacaatatgaattatgtttcaacatttaaattttggggggacacaaacattcagcccataataagaggtaagcaatcaatacagaaataaaatggtttccccaaattttatagttagtaaggtgttcagccagaatatgtgaagacagactctttgagtgttcagaccctataaccagcaatgtaagctgtttgtcagttttcttgagatggtatccaggtaggttgtatttgctcaggggcaggacagtgaaaagagtgttgacctgtctaaaat

SEQ ID NO: 877358 - DNA, 589 bp, Homo sapiens
ctgctccaagctccctgtcctctggcacacacgtataaataattctgctggaaaccgacatgtttcactcagtcatccaaatgtatttataatgttgtccaaatatatagcacttgttacaatgtttacattttagacatattttgagatatgtgccttaacagagtgctgtgattattattaatatttagtaacttatcttaccagacctaaactcaaagtttttcacaatggcaatgccttatttgggacttatttgggactgaatgtatgaagatcttacattgagtccaaattgatttctctgttagtctcgcaataacattaaagccacagaattatctgctgtatatttcttgtcttgttgtagctgatattctacatattaggacaattaggacattastaatatctattaaccttagaataaaatgtcatattgaaattgaagaggaatattggaactttgctaagaaagaatgcttttcacacacaatgatatctaaaatggagcctctgttcctggaggtatattttacaaaaattcagtgttactataggaattctgtacacttctttcttagacatt

SEQ ID NO: 877359 - DNA, 567 bp, Homo sapiens
aacatatttcttcaaagagtggcagagaagtaatataatttttcatttcttttaaaaatgccagcacatggtatgctacaaagattttaggttagtgatttgtttcatctactaagtattaggtgatagaaactgaaatctggccataatcaaatcaaggcaagatataaattggttttggttgtgatgttttttttttttttttttttttttttttaaacaaagttttgtttttgttgcccaggttggagtgcaggggcacaattttggttaattgaaacctttgcttcctgggttmaagcgattttcctgcctcagcctccaaagtagcctaaattacaggcatgcgccatcaggcccagctaatttttgtatttttagtaaagacagggtttcaccatgttggccaggatgatctcgatctcttgacctcgtgatccacctgcctcggcctcccaaagggctgggattacaggcgtgagccaccgcttccggcccgcttttgatcttatgtgatcattttaatcgcccaagtctcccagcaaattgatgagctgtgtatcctgc

SEQ ID NO: 877360 - DNA, 651 bp, Homo sapiens
gattactccaaaatccgaaactttttgagcacggacattatgcccaaggaaatattcactggagcattttggattttagactttcagattttggatgctcaagtgttaagtataatgcaaataatccaaaatccaaaagaatcataaatttgaaacacttattgtcccaagcattttggataaggaatattcaacccgtaaaccaaggaagcatattttagaggtggcatttactgaaatctttcatcatcaaatgggaaattcaaacaytttcctggttagtttctttccacctggggttgtgttgtgaacaacctgagtacaagggtttgtacttctatcttaaatttccagtctccagcagagtgctggcccatagtagaagctcaacaaataaaatgtctgaaagtcatatatgtgcattctgctggaagaaaaccttatacttacccaaaatacaaattgatcagtgaaattagtcaggtggttgtaggtgagcaaacatatcttttccctctacccatcttaggttcattggctgaggtttcatgacaaaagattaacaagataaaaacatacaatttatttaatatacattttacatgacatgggagccttcataaggaaatgaagacctgaagaagtggttaa

SEQ ID NO: 877361 - DNA, 576 bp, Homo sapiens
tagccaataatgggatttctgggtcaaatggtaattctgttttaagttctttgagtaattgtcacactgctttccacaatggatgaactaatttacactcccaccaacagtgtatgagtgttcccttttctccacaacctcaccagcatctgttgtttcttgactttttaatawtagtgaataactatcattttgactggtgtgagatggtatctcattgtggttttgacttgcatttctttaatgattagtaattttcagcacttttcatttgcttattggccacatgtatgtcttcttttgaaaagcatctgttcatatactttgcccactttttaatggggttgtttgatttttgcttgtaaatttgtttaagttccttatggattctggatgttagacctttgtcagaggcatagtttgcaaatattttctcccattctgtaggttgtctgcttaccctgttgatagtttattttgctgtgcagaagctctttagtttaattagatcccatttgtcaatttttgttttcgtcgcaattgcttttggcagatatatcaccattttaaatatat

SEQ ID NO: 877362 - DNA, 659 bp, Homo sapiens
ttgatcaagcagaagaaaggatatcagaggttgaagatcaacttaatgaaataaagcttgaagacaagattggagaaaaaagaatgaaaaggaatgaacaaagcctcaagaaatatggtactatgtgaaaagaccaaacatacatttgattggtgtacctgaaagtgatggggagaatcgaaccaagttggaaaacactcttcaggacattacccaggagaaattccccaacctagtaagayaggccagcattcaaattcaggaaatacagagaacatcacaaagatactcctcgagaagagcaaccccaagacacataattgtcagattctccaaggttgaaacaaaggaaaaaaagttaagggcagccagagagaaaggtcaggttacccacaaagggagctcattagactaacagcagaactctctgcagaacctctataacccagaagagagtgaagaccaatattcaacattcttaaagaaaagaattttcaacccagtgtttcatattcagccaaactaagcttcataagcaagtgggggccaatatccaacattgttaaagaaaagaattttcaacccagtatttcatatcgagccaaactaagctttataagtgaaggagaaataaaatcctttacagacaagcaaatgct

SEQ ID NO: 877363 - DNA, 659 bp, Homo sapiens
ttgatcaagcagaagaaaggatatcagaggttgaagatcaacttaatgaaataaagcttgaagacaagattggagaaaaaagaatgaaaaggaatgaacaaagcctcaagaaatatggtactatgtgaaaagaccaaacatacatttgattggtgtacctgaaagtgatggggagaatcgaaccaagttggaaaacactcttcaggacattacccaggagaaattccccaacctagtaagacaggccagcattcaaattcaggaaatacagagracatcacaaagatactcctcgagaagagcaaccccaagacacataattgtcagattctccaaggttgaaacaaaggaaaaaaagttaagggcagccagagagaaaggtcaggttacccacaaagggagctcattagactaacagcagaactctctgcagaacctctataacccagaagagagtgaagaccaatattcaacattcttaaagaaaagaattttcaacccagtgtttcatattcagccaaactaagcttcataagcaagtgggggccaatatccaacattgttaaagaaaagaattttcaacccagtatttcatatcgagccaaactaagctttataagtgaaggagaaataaaatcctttacagacaagcaaatgct

SEQ ID NO: 877364 - DNA, 659 bp, Homo sapiens
ttgatcaagcagaagaaaggatatcagaggttgaagatcaacttaatgaaataaagcttgaagacaagattggagaaaaaagaatgaaaaggaatgaacaaagcctcaagaaatatggtactatgtgaaaagaccaaacatacatttgattggtgtacctgaaagtgatggggagaatcgaaccaagttggaaaacactcttcaggacattacccaggagaaattccccaacctagtaagacaggccagcattcaaattcaggaaatacagagaacatcacaaagatactcctcgagaagagcaaccccaagacacataatwgtcagattctccaaggttgaaacaaaggaaaaaaagttaagggcagccagagagaaaggtcaggttacccacaaagggagctcattagactaacagcagaactctctgcagaacctctataacccagaagagagtgaagaccaatattcaacattcttaaagaaaagaattttcaacccagtgtttcatattcagccaaactaagcttcataagcaagtgggggccaatatccaacattgttaaagaaaagaattttcaacccagtatttcatatcgagccaaactaagctttataagtgaaggagaaataaaatcctttacagacaagcaaatgct

SEQ ID NO: 877365 - DNA, 541 bp, Homo sapiens
aatagcaagaaaatgaagaaaataatttaccacaaagaaaactatgtaacctgcttcttgagtattattctccattttaaagaaatggagaaagaaagttattaaaaacaacctcttaggactatatcagccactgatcacgatttttgaatatctttgccttgcttattttcttttcttttttaaacagkgtcttgctctgtcgctcaggctggagtgcagtggtgcaatctcagctcactgcaagctcctcagcctcccaggttcacgccattctcctgcctcagcctcccgagtagctgggactacaggcaaatgccaccacgcctggctaaattttttgtatttttagtagagacagggtttcaccgtgttggccaggatggtctggatctcctgacctcttgatccacccgcctcgggcctcccaaagtgctgggattacaggcttgtaatcccggcctgccttgcttattttcttagaggtgacatccattgcttactgatattttatccatggctctggcccaccttcagaggg

SEQ ID NO: 877366 - DNA, 603 bp, Homo sapiens
catcccatagacatcaaatacttttccatatatgtccctattttgtaacttgttttaatcatgtccttactcatattggagttatactgctggtacgggactcctcatcatttaatttaatagtacatattttacttcattggctttgtatgccaggctatgtaatgcagtagtctaaagggggcttgggtgataaaattcttgggttcaaaccccatccctaatatccaactgctgtatgatctcatgtgtgttgcttaactccttctggttttaattttctaattttaaaagtgaaggtaagtaatgctgatgcyttcataagagggctatttaaagattaaacatgataatacaggtaaaactaggataatgtcttaagcacagtaattagtcatcaagcgataactgttattgttataagaaactgaattatcatggatataagagtcagttttccatctctccattttgttacatttgttatatctgaggtttaaagtcatgggctatgaatcattgaaaaacacaaaggaagaacaccagattgttctttactcagatccagattatcttacgattttgtagaaatgttacataact

SEQ ID NO: 877367 - DNA, 631 bp, Homo sapiens
tcctctaaaaatacaaaaattagtggggtgtggaggcacacgcctataatcccagttactcaggaggctgaggcaggagaatcgcttgaacccaggaggtagaggttgcagtgagctgttgtgccactgcactccagcctgggtgacagagtgagactccatctcaaaaaaaaaaaaaaaaaaaaaagagaatagacagggagcccagactcagcactctaaagtaactgtaccccaaacaataggaatagacatacaaatgatcagaacagagtggacaaacaaaaagaaatagaccccaactaatatgaaaatttaataaatgawaaaggtggtatttcatttttatgggaaaatcacagcttctttaataaatagtgggtctatctagaaaaataaagttggacccctcatctctcaacacatgtcaacattaattcctggtagacaaactctaactggaaaatcaacccctgaggtggctgactcccaattcccagtcaaccggttccagcacactctggatggcccactcttgacaggatgatcaggcaatgagatgtgggccaggatagctcagacccttccaagggccctaagagagaggggcacccactttttaaagcccttg

SEQ ID NO: 877368 - DNA, 645 bp, Homo sapiens
aaactgtgagtccactaaacctcttcttctttatgaattacccaggctccggtatgtctttatcagcagtgtgaaaatggactaatacagtaaattggcaccagtagagtgggggcactcttgtaattataccagaaaatgtgcaaacagcttcggaactgtaacaggcagagattggaacagtttggagggtgagaagaagacagaaaaatgtggaaaagyttggaacttcccagagactttttgaatggctttaaatgaaatgctgataataatacagacaatgaaatccagggcgaggtggtctcagatggagatgagaaacttgttgggaactggagtaaaggtgactctatgttttagcaaagaaattggtggcattttgcctctgccctagagatttgtgaaactttgaacttgagagagatgatgtagggtatctggtggaagaaatttctaagcagcaaagcattgaagggtgacttgggttctgttaaaaagcgttcggttttaaaagggaaacagaccataacagtttagaaaacttgcagcccaaccacccacgcaacagaaaataaaaattcatttgcagaggagaaatttaagcctgctgcagacatttgtataagtaacgaggagccaaat

SEQ ID NO: 877369 - DNA, 530 bp, Homo sapiens
ctcacaagatctgatggtttttacaaggggcttcctccttctctcagcactcacttctccttcctgccaccaagtgaagaaggacatgtttgcttccccttccaccataattgtgaatttcttgaggccctcccagccctgcagaactgtgaatcaattaaacctctatcctttrtaaattacccagtctcaggcagttcttcatcgaagcatgagaacagactaatgcagtaaatttgatactgcagagagtggggttcttctataaagatacccaaaaatgtggaagcgactttggaactggacaactggcagaggttggaagtttgtagggctcagaagaagataggaaaatgtggaaaagtttagaacttcctagagacttgtagggctcagaagaagataggaaaatgtggaaaagtttagaacttcctagagacttgtagggctcagaagaagacaggaaggtgtgggaaagtttggaacttcctagagacttgttgaatggctttgactaaaatgttgatagt

SEQ ID NO: 877370 - DNA, 502 bp, Homo sapiens
atctccctctgccttggagaatttgctccctccattatgttccctggagtacacactccctaggaatctcagctagatgcccaggactctctaggagtccctcttccttaataccaccaattctttatcatgtctgtctacatattcagtagactatatctcatatttcttcttcttctcttgcttctctggcactgccttaatccaatcgaccatgatgtctcaattagataattgaagaacagwctatacaaacttcctctcttcagtctcagactgtccagcccagccactgcatggaaattactcatgcaattatgtggcttaatatcctttaggagccccccaaacttacaaagaaaacccagcttggtagactcagtatatgtttccagaatcagaacatggcatcctgactatctcttcggtagtactgtcttccatttactgattggtttagccaactgacattcttgctattattacattgtgcctacatgcc

SEQ ID NO: 877371 - DNA, 659 bp, Homo sapiens
agtaagaaaggccaacatccaaattcaacaaatacagagaacaccactaagatactcatagacaagagcaaccccaagacacataattgtcagattctccaaggttgaaatgagggaaaaattattaagggcagccagcgagaaaggtcaggttaccyacaaagggaagcccatcagactgagagtggatatctctgcagaaaccctaccagtcagaagagagtgggggccaacattcaacattcttaaataaaataattttcaacccagaattttatatctggtcaaacaaagctttataagcaaaggagaaataaaatcctttccagacaagaaaatgctgagggattttgtcaccaccaggcctgccttacaagagctcctgaaagaagcactaaatatggaaatgaaaaactggtaccagccactgcaaaaacacaccaaaatataaaaaccaatgacactatgaagaaactgcttcaactaatgtgcaaaataaccagcgagcatcttgattacaggatcaaattcagacataacaatattaaccttaaatgtaaatgggctaaatgctccaatcaaaatacacagactggcaaattggataaataatcaagacccatcaatgtgctgtattcaggatatccatctcacatgca

SEQ ID NO: 877372 - DNA, 659 bp, Homo sapiens
agtaagaaaggccaacatccaaattcaacaaatacagagaacaccactaagatactcatagacaagagcaaccccaagacacataattgtcagattctccaaggttgaaatgagggaaaaattattaagggcagccagcgagaaaggtcaggttacctacaaagggaagcccatcagactragagtggatatctctgcagaaaccctaccagtcagaagagagtgggggccaacattcaacattcttaaataaaataattttcaacccagaattttatatctggtcaaacaaagctttataagcaaaggagaaataaaatcctttccagacaagaaaatgctgagggattttgtcaccaccaggcctgccttacaagagctcctgaaagaagcactaaatatggaaatgaaaaactggtaccagccactgcaaaaacacaccaaaatataaaaaccaatgacactatgaagaaactgcttcaactaatgtgcaaaataaccagcgagcatcttgattacaggatcaaattcagacataacaatattaaccttaaatgtaaatgggctaaatgctccaatcaaaatacacagactggcaaattggataaataatcaagacccatcaatgtgctgtattcaggatatccatctcacatgca

SEQ ID NO: 877373 - DNA, 574 bp, Homo sapiens
cttcttagtgatgtgtgcattcatcccacagatttaaacttttcttttgatggagcagttttgaaaatctatttttgtaatatctgcaagtggacattttgagtgatttgaggcctatggtggaaaaggaaatatcttcacataaaaggtagacagaagaattccgagatacttctttgtgatgtgtgagttcgtctcacaggattgaaactttcttttcattcaacagtttggaaacactctttttgtagaatctgcaggtggatatttggagtgctttgtggcctatgrcagaaaaggaaatatcttcacgtaaaaactatatagacacattctgggaaacttctttgtgatgtgtatgttcatctcacagagttgaacctttctttggattgagcattttggaaacactctttttgtagaatctgcaagaagcaatctgtgaaacttctttgtgatttgtgtattgatctcacagagttaaccctttcttttgattgagcagtttttaaactctctttttgtcgaatctgcatttgtacatttggaaggctttgagacctatggtgaaaaa

SEQ ID NO: 877374 - DNA, 627 bp, Homo sapiens
aaaaacaaacaaagcatattctcactcataagtgggaattgaacaatgagaacacatggacacaggaaggggaacatcacactctggcgactgttgtgtggtgggggaggggaaaggatagcattgggagatatacctaatgctagatgacgagttagtgggtgcagcacatcagcatggcacatgtatacatatgtaactaacctgaacaatgtgcacatgtaycctaaaacttaaaggataataataaaaaaataaaaataataaaaaaatactagacagaaaaattctgagaaacttctttgtgatgtgtgctttaatctcacagagttgaaccttccttttgattgagcaatttttaaacgctctttttgtagtatctgcaagtggacatttgtagcactttgcggcctatggtaaaaaaggaaataccttcacataaaatctatacagaagtgatctgagaaacttctttgtgatgtgtgcgttcatatcacagagttgagcttttcttttgattgagcgctttggaaactctctttttgtagaatctgcaaatggacatttggagcgctttctggcctatggtagaaaaggaaatatcttcacatgaaatctagacagaag

SEQ ID NO: 877375 - DNA, 598 bp, Homo sapiens
gaaaaggtaatatcttcaaataaaaactacacagaagaattctgacaaactactctgtgatgtgtgcattcatctcacatagttgaactttctttcaattgagcaagttggaaacattctttttgtagctccatgtggatatttgcagaggtttgaggcctatggcrgaaaaggaaatatcttcacataaaaactagacagaggaattctgagaaacttctttgtgttgtgtgtgttcatctcacagagttgaaactttcttttgattgagcagtttggaaacactctttttgtagaatctgcaagtggatatttggagcgctttgcggcctattgtagaaaaggaaataccttcacataaaatccagacagaagcaatctgagaaacttctttgtggtgtgtgcgttcatctcagagttaacactctcttttgattgtgcagttttgaaactctctttttgtagaatctgcaagtggacatttggagcactttgaggcctttggtggaaaaggacatattttcacataaaaactacacagaataattctgagaaactttttgtgatgtgttatacctttctcacaaagttgaacctt

SEQ ID NO: 877376 - DNA, 663 bp, Homo sapiens
tgattgaacagttttgaaacattctttctgtggaatctgaaggggatatttggagcgctttgcggcctatggtgaaaaacgaaatatcttcacataaaaactagacagaagcattctgagaaggtggtttgtgatgtgtgcattcatctcacagagttaaacctttctttggattgagcagttttgaaacactcttattgtacaatctgcaagtggatatttggagagtttgaggccactggtgsaaaagcaaatatcttcacataaaaactagagagaaccattctgagaaatctctttgagatgcgtgcattcaactcatagagttggacctttcctttgattgagcagtttggaagcagtctttttgcagtatctgcaaatggatatttggagcactttcaggcctatagtaggaaaggaaatatcttcaaataaaaactagacagaaaattactgagaaacttgttagtgatgtgtgcattcatctcacagagttgaaactttcttttgattgagcagtttggaaacactcttttagtagaaactgcaaggggatatttggagcactttgcggtctttggtagaaaaggatatatcttcacataaaaaatagacagaagcattctgaggaactttttcatggtgcgggtattcatctca

SEQ ID NO: 877377 - DNA, 700 bp, Homo sapiens
attttcttttgattgagaagtttggacaccgtctttttctcacctgcaaatggatatttagagcactttgaggcctatggtgaaaaaggaaatatcttcccctaaaaactaggcagaagcattctaggaaacttctttgtgatgtgtgcattcatgtcacagagctgaaactttcttttgattgagaagttttgaaaaactctttcgtagagtgtgcaagtggatatttggagcgctttgaggcctatggtggaaaaggaaatatcttcacataaaaactagacagaagcattctgagaaatttctttctgatgtgtgcattcatctcacgaagttgaaccattcttttaattgagcagttttgaaacacactttttgcagtatcttcaagtggatatttgtagagctttgaggcctatggtagaaaaggaaacattgtcacataaaaactagacagaagcattctgagwaacttctgcctggtgggtgtattcatttcacggagttgaacctttccttgtattgaacagtttggaaacagtcgttttgtagaatctgcagagagatatttttgagcccattgagacgtatggggtgataggaaatatcttcacataaaaattagacagaaactttctgagaaacttctttcagatgtgtgctttcatctcacagatttgaacttttcttttgattgagc

SEQ ID NO: 877378 - DNA, 649 bp, Homo sapiens
aacagtttggaaacagtcgttttgtagaatctgcagagagatatttttgagcccattgagacgtatggggtgataggaaatatcttcacataaaaattagacagaaactttctgagaaacttctttcagatgtgtgctttcatctcacagatttgaacttttcttttgattgagcagtttkgaaacagtgtttttgtacaatctataagtggatatttggggcactttcaggcctatggtggaaaaagacacatcttcccataaaaactagacagcagcattctgagaaacttatttgtgatctgtgcattcatctcacagagttgaacctttcttttgattcagcagttttgaaactgtcgttttgtagaatctgcaaagggatatttgtgagcccattgaggcttctggggagataggaaatatcttcacataacaactagacagatactttctgagaaactattttgtcatgtgttacttcaactcaccgggttgaaactttctcttgattgagcagtttgggaacagtctttttgtagaatctgcaaatgaatatttggagcacttttggcctatgttgaaaaatgaagtatctttccataaaaactaggcagaagcttttggagaaatttctttgtgatgtgtg

SEQ ID NO: 877379 - DNA, 649 bp, Homo sapiens
aacagtttggaaacagtcgttttgtagaatctgcagagagatatttttgagcccattgagacgtatggggtgataggaaatatcttcacataaaaattagacagaaactttctgagaaacttctttcagatgtgtgctttcatctcacagatttgaacttttcttttgattgagcagtttggaaacagtstttttgtacaatctataagtggatatttggggcactttcaggcctatggtggaaaaagacacatcttcccataaaaactagacagcagcattctgagaaacttatttgtgatctgtgcattcatctcacagagttgaacctttcttttgattcagcagttttgaaactgtcgttttgtagaatctgcaaagggatatttgtgagcccattgaggcttctggggagataggaaatatcttcacataacaactagacagatactttctgagaaactattttgtcatgtgttacttcaactcaccgggttgaaactttctcttgattgagcagtttgggaacagtctttttgtagaatctgcaaatgaatatttggagcacttttggcctatgttgaaaaatgaagtatctttccataaaaactaggcagaagcttttggagaaatttctttgtgatgtgtg

SEQ ID NO: 877380 - DNA, 707 bp, Homo sapiens
gagtcctatggtgaaaaaggaaatatcttaacataaaaaccagacagaagcattcctagaaactacttcattatgtgtgcattcatctcatggtgttgtacctttcttttgattgcagttttgaaacatactttttgcagaatgtgccaggggatacttggagygctttgaggcctatggtggaaaaggaaatatcttcatataaaaactagacagaagcattctgagaaacttctttgtgttgtgggcattcatctcacagagttggattttgtttttgttgagcagcttggaaacactctttttgtagagtctgccattggatatttggagcgctgtcaatcctatggtggaaaaggtcttattttcacataagaactataaagcaggttttctaaaaacaaccttgtgatgtgtgcattcatctcacagaggtaagtgtttcttttctgcaatcagtctggaaactccgttcttgtacaatctcaaagagggtatttttgagcactttgaggcctattgtgacaaaggaaatatcttcacattcaacgcataaagaacgtttctgagattcttctttgtgatatgtgcattcatctcccagatttgaacgtctcttttaattcagccgtttggaaacagtctttttgaagaatctgcaaacggatatttgtgagcactttgaggcctatgcaggaaaagaagta

SEQ ID NO: 877381 - DNA, 707 bp, Homo sapiens
gagtcctatggtgaaaaaggaaatatcttaacataaaaaccagacagaagcattcctagaaactacttcattatgtgtgcattcatctcatggtgttgtacctttcttttgattgcagttttgaaacatactttttgcagaatgtgccaggggatacttggagcgctttgaggcctatggtggaaaaggaaatatcttcatataaaaactagacagaagcattctgagaaacttctttgtgttgtgggcattcatctcacagagttggattttgtttttgttgagcagyttggaaacactctttttgtagagtctgccattggatatttggagcgctgtcaatcctatggtggaaaaggtcttattttcacataagaactataaagcaggttttctaaaaacaaccttgtgatgtgtgcattcatctcacagaggtaagtgtttcttttctgcaatcagtctggaaactccgttcttgtacaatctcaaagagggtatttttgagcactttgaggcctattgtgacaaaggaaatatcttcacattcaacgcataaagaacgtttctgagattcttctttgtgatatgtgcattcatctcccagatttgaacgtctcttttaattcagccgtttggaaacagtctttttgaagaatctgcaaacggatatttgtgagcactttgaggcctatgcaggaaaagaagta

SEQ ID NO: 877382 - DNA, 707 bp, Homo sapiens
gagtcctatggtgaaaaaggaaatatcttaacataaaaaccagacagaagcattcctagaaactacttcattatgtgtgcattcatctcatggtgttgtacctttcttttgattgcagttttgaaacatactttttgcagaatgtgccaggggatacttggagcgctttgaggcctatggtggaaaaggaaatatcttcatataaaaactagacagaagcattctgagaaacttctttgtgttgtgggcattcatctcacagagttggattttgtttttgttgagcagcttggaaacactctttttgtagagtctgccattggatatttggagcgctgtcaatcctatggtggaaaaggtcttattttcacataagaactataaagcaggttttctaaaaacaaccttgtgatgtgtgcattcatctcacagaggtaagtgtttcttttctgcaatcagtctggaaactccgttcttgtacaatctcaaagwgggtatttttgagcactttgaggcctattgtgacaaaggaaatatcttcacattcaacgcataaagaacgtttctgagattcttctttgtgatatgtgcattcatctcccagatttgaacgtctcttttaattcagccgtttggaaacagtctttttgaagaatctgcaaacggatatttgtgagcactttgaggcctatgcaggaaaagaagta

SEQ ID NO: 877383 - DNA, 707 bp, Homo sapiens
gagtcctatggtgaaaaaggaaatatcttaacataaaaaccagacagaagcattcctagaaactacttcattatgtgtgcattcatctcatggtgttgtacctttcttttgattgcagttttgaaacatactttttgcagaatgtgccaggggatacttggagcgctttgaggcctatggtggaaaaggaaatatcttcatataaaaactagacagaagcattctgagaaacttctttgtgttgtgggcattcatctcacagagttggattttgtttttgttgagcagcttggaaacactctttttgtagagtctgccattggatatttggagcgctgtcaatcctatggtggaaaaggtcttattttcacataagaactataaagcaggttttctaaaaacaaccttgtgatgtgtgcattcatctcacagaggtaagtgtttcttttctgcaatcagtctggaaactccgttcttgtacaatctcaaagagggtatttttgagcactttgaggcctattgtgayaaaggaaatatcttcacattcaacgcataaagaacgtttctgagattcttctttgtgatatgtgcattcatctcccagatttgaacgtctcttttaattcagccgtttggaaacagtctttttgaagaatctgcaaacggatatttgtgagcactttgaggcctatgcaggaaaagaagta

SEQ ID NO: 877384 - DNA, 601 bp, Homo sapiens
attttcacatgaaaactagagagaagctttctgagaaaccttcttgtgatgtgtgcattcatctcaccgatttgaaactttctttggattaagcaatttggaaacagtatttttgtagactctgtaaagtcatatttttgaatggtatgaggcctatgatgaaataggaaatatcttcacataaaaactagacagaagctttccgagaaacttctttgtgatgtgtgcattcatctcgtagagttcaaccattctactgattgaacagtttggaaacactctttttgtagaatcggcaaagggatatttatgaatgttctgaggcctatggtgaraaaggaaatgtattcacataaaaagtataaacaaggtttctcaaaaacagctttgtgatgtatgcattcatctcaaagaagtaaacgtttcttttctctgatctgtctggaaactgttcttgtagattctgcaaagggatatttgtgagtgctttgaggcctatggtgaaaaacgaaatatcttcacataaaaattagagagaggttttctgagaaacctctttgtgatgtgggcattcatctcacaaagttgaaacttacttttg

SEQ ID NO: 877385 - DNA, 601 bp, Homo sapiens
attttcacatgaaaactagagagaagctttctgagaaaccttcttgtgatgtgtgcattcatctcaccgatttgaaactttctttggattaagcaatttggaaacagtatttttgtagactctgtaaagtcatatttttgaatggtatgaggcctatgatgaaataggaaatatcttcacataaaaactagacagaagctttccgagaaacttctttgtgatgtgtgcattcatctcgtagagttcaaccattctactgattgaacagtttggaaacactctttttgtagaatcggcaaagggatatttatgaatgttctgaggcctatggtgaaaaaggaaatgtattcacataaaaagtataaacaaggtttctcaraaacagctttgtgatgtatgcattcatctcaaagaagtaaacgtttcttttctctgatctgtctggaaactgttcttgtagattctgcaaagggatatttgtgagtgctttgaggcctatggtgaaaaacgaaatatcttcacataaaaattagagagaggttttctgagaaacctctttgtgatgtgggcattcatctcacaaagttgaaacttacttttg

SEQ ID NO: 877386 - DNA, 648 bp, Homo sapiens
tggaagaagtatttttgtagaatctgtaaagggatatttgtgagcactttgaggcctatggtgaaaaactagacagaagcattctgagaaactgcttygtgatgtgtgcattcatcacacagagttgaacctttgttttgattgagccgtttggaaacagactttttgtagactctgcaaacggatatttggagtactttgaggtctatcatgaaaaaggaaatatattcacataaaaactagactgaacgtttctgagaaacttcttcgagctgtgtgcattcatctgacagtgttcaataattctttttattgagcggtttggaaacagtctttttgtagaatctgcaaagggatatttgtgagggctttgaggcctatgttgaaaaaggaaatatcttcacagaaaaaccataaagaaagtttctgagaaaattctttggatgtgtgcattcatcacacagaattgaaacattctttggattgagcagtttgcaaatagtctttttgtagaatctgcagagggatatttgtagcgctttgaggcctatggtgaataaggaaattttttcacataaaaactagacaaaagttttctgagaaactttttgtgatgtgtgcctttatctcatagagtttaacatttgt

SEQ ID NO: 877387 - DNA, 648 bp, Homo sapiens
tggaagaagtatttttgtagaatctgtaaagggatatttgtgagcactttgaggcctatggtgaaaaactagacagaagcattctgagaaactgctttgtgatgtgtgcattcatcacacagagttgaacctttgttttgattgagccgtttggaaacagactttttgtagactctgcaaacggatatttggagtactttgaggtctatcatgaaaaaggaaatatattcacataaaaactagactgaacgtttctgagaaacttcttcragctgtgtgcattcatctgacagtgttcaataattctttttattgagcggtttggaaacagtctttttgtagaatctgcaaagggatatttgtgagggctttgaggcctatgttgaaaaaggaaatatcttcacagaaaaaccataaagaaagtttctgagaaaattctttggatgtgtgcattcatcacacagaattgaaacattctttggattgagcagtttgcaaatagtctttttgtagaatctgcagagggatatttgtagcgctttgaggcctatggtgaataaggaaattttttcacataaaaactagacaaaagttttctgagaaactttttgtgatgtgtgcctttatctcatagagtttaacatttgt

SEQ ID NO: 877388 - DNA, 648 bp, Homo sapiens
tggaagaagtatttttgtagaatctgtaaagggatatttgtgagcactttgaggcctatggtgaaaaactagacagaagcattctgagaaactgctttgtgatgtgtgcattcatcacacagagttgaacctttgttttgattgagccgtttggaaacagactttttgtagactctgcaaacggatatttggagtactttgaggtctatcatgaaaaaggaaatatattcacataaaaactagactgaacgtttctgagaaacttcttcgagctgtgtgcattcatctgacagtgttcaataattctttttattgagcrgtttggaaacagtctttttgtagaatctgcaaagggatatttgtgagggctttgaggcctatgttgaaaaaggaaatatcttcacagaaaaaccataaagaaagtttctgagaaaattctttggatgtgtgcattcatcacacagaattgaaacattctttggattgagcagtttgcaaatagtctttttgtagaatctgcagagggatatttgtagcgctttgaggcctatggtgaataaggaaattttttcacataaaaactagacaaaagttttctgagaaactttttgtgatgtgtgcctttatctcatagagtttaacatttgt

SEQ ID NO: 877389 - DNA, 620 bp, Homo sapiens
aaagaagcattctgagaaacatctctgttaagtgtgcattaaagtaacagagttgaaactatcttttcattgagcagttttgaatctctctttttgtagaatctgcaagaggatatttggagccctttgccacctacggtggaaaaggacataccttcacataaaaactayaaaaaagatttctgaggaaattctttgtgatgtgtgccttcatctcacagagttgaacctttcttttgattgagcagtttggaaacactctttttgtagtatctacaagtggatgtttggagccctttgtggcctatggtggaaagggaaatattttcacataaaaactacacagaagccaactggcaaatgaggtggcagtcaagatggccaaataggaacagctcggttctacagctcccagcctgagtgacacagaagttgggagatttcttcatttccatctgagatacctggttcatctcattaggaagtgccagacagtgggtgcaggatagtgggtgcagcgtaccatgtgtgggcagaagcagagcgaggcatttcctcacttgggaagtgcaagtggttagggagttccctttcctagtcaaataaaggggcgacagatt

SEQ ID NO: 877390 - DNA, 620 bp, Homo sapiens
aaagaagcattctgagaaacatctctgttaagtgtgcattaaagtaacagagttgaaactatcttttcattgagcagttttgaatctctctttttgtagaatctgcaagaggatatttggagccctttgccacctacggtggaaaaggacataccttcacataaaaactacaaaaaagatttctgaggaaattctttgtgatgtgtgccttcatctcacagagttgaacctttcttttgattgagcagtttggaaacactctttttgtagtatctacaagtggatgtttggagccctttgtggcctatggtggaaagggaaatattttcacataaaaactacacagaagccaactggcaaatgaggtggcagtcaagatggccaaatagraacagctcggttctacagctcccagcctgagtgacacagaagttgggagatttcttcatttccatctgagatacctggttcatctcattaggaagtgccagacagtgggtgcaggatagtgggtgcagcgtaccatgtgtgggcagaagcagagcgaggcatttcctcacttgggaagtgcaagtggttagggagttccctttcctagtcaaataaaggggcgacagatt

SEQ ID NO: 877391 - DNA, 620 bp, Homo sapiens
aaagaagcattctgagaaacatctctgttaagtgtgcattaaagtaacagagttgaaactatcttttcattgagcagttttgaatctctctttttgtagaatctgcaagaggatatttggagccctttgccacctacggtggaaaaggacataccttcacataaaaactacaaaaaagatttctgaggaaattctttgtgatgtgtgccttcatctcacagagttgaacctttcttttgattgagcagtttggaaacactctttttgtagtatctacaagtggatgtttggagccctttgtggcctatggtggaaagggaaatattttcacataaaaactacacagaagccaactggcaaatgaggtggcagtcaagatggccaaataggaacagctckgttctacagctcccagcctgagtgacacagaagttgggagatttcttcatttccatctgagatacctggttcatctcattaggaagtgccagacagtgggtgcaggatagtgggtgcagcgtaccatgtgtgggcagaagcagagcgaggcatttcctcacttgggaagtgcaagtggttagggagttccctttcctagtcaaataaaggggcgacagatt

SEQ ID NO: 877392 - DNA, 615 bp, Homo sapiens
ctacaaggtggcagtgaggctgggggtggggcacccccattgcccaggattgcttaggtaaacaaagctgctggaaactcgaagtaggtgtagcccaccacagctttcggtggcctgcctgcctctgtaggctccacctctgggggcagggcacagacaaacaaaaagatagcagtaacctctgcagacttaaatgtccctgtctgacagctttgaagagagcagtggttctcccagtacacagctggagatctgagaatgggcagactgcctcctcaattgggtacctgacccctgaaccccgarcagcctaagtgggagacaccccccagtagggtcagactgacacctcacactgccgtgtactcctctgagacaaaatttccagagcaaagatcagacagcagcgcttgtggttcatgaaaatccgctgttctgcagtcaccgctgctgacacccaggcaaacaggatctggagtggacctctagcaaactccaacagacctgcagctgagggtcctgtctgttagaaggaaaactaacaaacagaaaggacatccacaccaaaaacccatctgtatatcaccatcatcaaaaacaaaaagtagataaaac

SEQ ID NO: 877393 - DNA, 599 bp, Homo sapiens
ttaactggccaccagagaaatgcaaatgaaaaccacaatgagataccacctcacaccagttagaatggcaatcattaaaaagtcaggaaacaacaggtgttggagaggatatggagaaatagaaagacttttacactgttggtggggctgtaaactaattcagccattgtggaagtcagtgtggcgattcctcagggatgtagagctagaaatacaatttgagccagccatcccattactgggtatatacccaaggactataaatcatgctgctttaaagacacatgcacatgtatgtttattgcagcgctattcgcaatagyaaagacttggaaccaacccaaatgtccaacaataacagagtggattaagaaaatgtggcacatatacaccatggaatactatggagccatacaaaaatgatgagttcatgttctttgtagggacatggatgaaattggaaatcatcattctcagtaaactatcgcaaggacaaaaaaccaaacactgcatgctgtcactcataggtgggaattgagcgatgggaacacatggacacaggaaggggaacatcacactctgatgtggggtggggggag

SEQ ID NO: 877394 - DNA, 652 bp, Homo sapiens
agagttgaaactttctttgtctgagcagtttggaaacactctttttgtagaatatgcaagtggatatttggagccctttgaggcttatggtggaaaaggaaatatcttgagataaacactacacaggagcattctgaaaaactgctttgtgatgtgtgcattcatctcacagagttgaatttttcttttgattgagcagttttgaaacgctctttttgtggaatgtgaaagtggatatttggagggttttgaggcctacggtggaaaaggaaatatcttcacataaaaactacaaagaaggattctgagaaacttatttgtaatgtgtgcattcaactcacagatttgaacatatctttggattgagcagmtttgaaattgtctttttgtgcaatctgcaagtggatattttgagccatttgtggcctatggtggaaaaggaaatatcttcagataaaaactacacagaagcattctgagaaacttctttgtgatgtgtacattcatctcacagagtagaaactttcttttgattgagcagttatgaaataccctttttgtagaatgatcatgtggatatttggagggctttgaggcctactgtggaaaagttaatatcttcacgtaaaaagtactcagaatcattctgaga

SEQ ID NO: 877395 - DNA, 606 bp, Homo sapiens
actctttttgtagaatttgcaatttaatatttggagcactttgaggactatggtggaaaaggaaataccttcacataaaaactacacaaaactattgtgacaaacctctttgtaatgtgagcattcatctcacagatttgcacctttcttttgattgagcagtttgaaactctctttttctgtaatcctccagggtatatttggagcattttgtggcctatggtagaaaaggaaatatmttctcataaaaagtacacagaagcattctgagaaacttctctgtgatgtattcattcaactcacagaattgaacctattttttgattgagattatttttcaataatctgcaagtagatattgggagccctttgcggcctaataaggaaaaggaaatatcttcacataaaaactacacagaagaattttgagaaacttctttgtgatgtgtgcattcatctcagagtgttgaacgtttcttttgattgagcagtttggaaacactctttttgcagaatgtgcaagttgatatttgtagcgctttgagccctccagtggaaaaggaaatatctttacataaaaactacacagaagcattctgagaaatt

SEQ ID NO: 877396 - DNA, 606 bp, Homo sapiens
actctttttgtagaatttgcaatttaatatttggagcactttgaggactatggtggaaaaggaaataccttcacataaaaactacacaaaactattgtgacaaacctctttgtaatgtgagcattcatctcacagatttgcacctttcttttgattgagcagtttgaaactctctttttctgtaatcctccagggtatatttggagcattttgtggcctatggtagaaaaggaaatatattctcataaaaagtacacagaagcattctgagaaacttctctgtgatgtattcattcaactcacagaattgaacctattttttgattgagattatttttcaataatctgcaagtagatattgggagccctttgyggcctaataaggaaaaggaaatatcttcacataaaaactacacagaagaattttgagaaacttctttgtgatgtgtgcattcatctcagagtgttgaacgtttcttttgattgagcagtttggaaacactctttttgcagaatgtgcaagttgatatttgtagcgctttgagccctccagtggaaaaggaaatatctttacataaaaactacacagaagcattctgagaaatt

SEQ ID NO: 877397 - DNA, 598 bp, Homo sapiens
ttcatctcacagagttgaatctttcttttgttagggcagttttgaaacacagtttttgtaaaatctgcaagaggatattttgagggctttgatgtctattgtggaaaagtcaatattttcacacaaaaactatgcagaggcattctgagtaacttctttgtgatgtgtgcattcatctcacagagttgaacctttcttttgattgagcagttttgaaactctttctgtagaatctgcaagtggatattttgaacactttgaggactatagtggaaaaggaaatatcttcacataaaaactacacagaagcattctgagaaacttctttgtgatgtgtgcattcatctcacagagttgagcctttcttttgatggaggagttttgaaaccytccttttgtagattctgcaagtggatatttggtgtgcactgaagcctattgtggaaaaggcaatatcttcacataaaaactacacagaagcattctgagaaacttatttttgatgtgtgcactcatctcacatagttgaacctttcttttcattaagaagttttgaaacacagtttttgtagaatctgcaagtggatatttggagaga

SEQ ID NO: 877398 - DNA, 598 bp, Homo sapiens
ttcatctcacagagttgaatctttcttttgttagggcagttttgaaacacagtttttgtaaaatctgcaagaggatattttgagggctttgatgtctattgtggaaaagtcaatattttcacacaaaaactatgcagaggcattctgagtaacttctttgtgatgtgtgcattcatctcacagagttgaacctttcttttgattgagcagttttgaaactctttctgtagaatctgcaagtggatattttgaacactttgaggactatagtggaaaaggaaatatcttcacataaaaactacacagaagcattctgagaaacttctttgtgatgtgtgcattcatctcacagagttgagcctttcttttgatggaggagttttgaaaccctccttttgtagattctgcaagtggatatttggtgtgcactgaagcctattgtggaaaaggcaatatcttcayataaaaactacacagaagcattctgagaaacttatttttgatgtgtgcactcatctcacatagttgaacctttcttttcattaagaagttttgaaacacagtttttgtagaatctgcaagtggatatttggagaga

SEQ ID NO: 877399 - DNA, 624 bp, Homo sapiens
gtgggtatgtggagctgattgtggcctacggtttaaaaggaaatatgttcacataaaaactgcacagaagcattctgagaaacttctttgtgatgtgtgcattcatcacaaagagttgaatgtttcttttgattgarcagtttggaaaaacactttttgtagaatcttcaagtggatatttagagagatttgaggcctccaggggaaaaggaattatctttacgtaaaaactacacagaagcattctgagaaacttctttgtgttgtgtgcacccatctcacagagttgaacatttcttatgattgtgcagttttgaaaccctctttttgtagaatcagcaaatagatatttggaaagatttgaggtctattgtggaaatggaaatatcttcacataaaaacttcacagaagaattatgagaaacttctttgtgatgtgtgcattcaactgacagatttgaacctatgttttcatttagcagttttgaaactctcttgtcgtagaatctggaagtgggtatttgaagtcgtttgcgtcctatggtggaaaaggaaatatcttcattaaaaaactacacagaatcattctgagaaacttctttgtgatgtgtgcattcttttcaa

SEQ ID NO: 877400 - DNA, 673 bp, Homo sapiens
ttgaggcctatggtgtaaaaggaaatatcttcacataaaaactacacagaagcattcaaagaaacttctttgtgatgtgagcattctactcacagagttgaacttatctttttatcgaggagctttgaaaatctctttttgtagaatctgcaagtggatatttagagccccttgctgcctgtggtggataaagaaatatcttcacataaaaacttcacagaagcattctgaaaaaacttcttggtgatgtgtgcattcatctcacagagttcaacatttcttttgattgagctgttttgaaacactatttttgtagaatctgcaagtggctatttggagcactttgaggcctattgtggaaaaggaaatatctttgcatgaaaacaacacagaaacattctgacaaatttctttgcgatgtgtgcgttcatctcacagagttgaacttttcttttgattgagcagttttcaaacactgtttttgtagtacctctaagtggatattttgagcacattgaggcctatggtggaaawggatatatctgcacataaaatctacacagaagcattctgagaaacttctttctgatgtgtgcattcaaatcacagatttgaacctatcttttgattgcacagttttcaaactctctttttgtataatctgcaagtggat

SEQ ID NO: 877401 - DNA, 596 bp, Homo sapiens
tgcattcaaatcacagatttgaacctatcttttgattgcacagttttcaaactctctttttgtataatctgcaagtggatatttggaactctttgtggcctctggtggaaaaggaaataacttcacataaaaactacacagaagcattctgagaaacttcattgtcatgtgtggattcatctcagagagttgaacctttcttttcactgagcacttttgaaacagwctttttgtaaaatctgcaagtggatatttggaaccccttgagacctactgtggaaaagaaaatatctttacataaaaacaacacagatgaattctgagaaacttctttgcaaggtgtgcattcatctcacatagttcaactttcttttgattgagcaattttgaaacgcactttttgtagaatcttcaactagatatttggagtgcattgaggcctatggtggaaaaggaaatatcttcatataaagctgcacagaagtattctgaaaaacttctttgtgaaatgttcgttcaacacactgtggtgaacatttcttttcattgagcagttttgaaaaccactatttgaagaatccgcaagtggatatttg

SEQ ID NO: 877402 - DNA, 611 bp, Homo sapiens
cacttttgaaacagactttttgtaaaatctgcaagtggatatttggaaccccttgagacctactgtggaaaagaaaatatctttacataaaaacaacacagatgaattctgagaaacttctttgcaaggtgtgcattcatctcacatagttcaactttcttttgattgagcaattttgaaacrcactttttgtagaatcttcaactagatatttggagtgcattgaggcctatggtggaaaaggaaatatcttcatataaagctgcacagaagtattctgaaaaacttctttgtgaaatgttcgttcaacacactgtggtgaacatttcttttcattgagcagttttgaaaaccactatttgaagaatccgcaagtggatatttgtagtgcttagaggcctattgtggaaaaggaaatgtcctcacataaaaactacacagaagcattccgagaagcttgtttgtgatgagtgcattcagctcacagagttgaacctatcttttgatagagcaattttgaaactctctttttgtagaatctgcaagtggatatttggagccctttatggcctatggtggaaaaggaaatatcttcacataaaaactacaca

SEQ ID NO: 877403 - DNA, 624 bp, Homo sapiens
ttgtagaatctgcaagtggatatttggaacgctttggagagaatggtggaaatgaaaatatcttcatataaaaactatggaaagcattctgagaaacgactttgtgatgtgtgcattcacatcacagttgaacctttcttttgattgtgcagttttgaaactctctttttgtagaatctgcaagtagatactcggaggactttgtggagtattgtggaaaaggaaataactttgcataaaagctacacagacgcattctgggaaacttctttgtgatgtgttcattcaactcacagagttgaacttttcctttgattgagcagttttgaaacactatttttttttttaaatctgcaagtggatatttggtgtgctttgtggcctgtggtggaaaagcaaatatcttcacgtaacaacyagacagaagcattctgagaaacttctttgtgatgtgtgcattcatctcacagtagttgaacttttcttttgattgagcagttttgaaacactcttcgtagaatctgcaagtgcatatttagagtgctttgaggcgtgtggtggaaaaggaaatatcttcacataaacactagacagaagcattctaagaaatgtctctatgatgtg

SEQ ID NO: 877404 - DNA, 546 bp, Homo sapiens
actttctttttattgagcagttgggatagagtctttttgtagaatctgcaaaaaatatttgggagccctttattgcctatggggaaatggggggggggttcacatataaactaaacagaagcagtctgagaaacttctttgtgatgtatgcattcatctcacatagttgaaactgtctttggattgagcagtttggaaasagtcctcttgtagaatctgcaaagggatatttctgagcccattgagtactatggtgcaatgtgaaatatcttcacataaaaactagacagaagctttctaagaatcttctttgtgatgtgtgctttcatctcacagaattgaaactttcttttgagtgaggagtttggaaacactctttttctaaaatctgcaagtgaatatttggagagcttctgaggcccatggtgaaaaacgaaataacttcacataaaaactaaacagaagttttctgagaaactttcttgtgatgtgtgcattcatctcacagagttgaacctttcctttgattgagcaggttggaaagag

SEQ ID NO: 877405 - DNA, 753 bp, Homo sapiens
ttgtttttgattgagctgtttgcaaactgtctttttgtagagtccgcaaagggatatttgtgagaactttatggcctatggtgaaacaggaaatatcttcacataaaaactagacaaacagtctgagaaacttatttgtgatgtgtactttcatctcacagagttgaaactttcttttgattgagcagtttggaaagagtccttttgaagtatcttaaaagagatatttttgagcccattgaggcctatgctgaaagaggaaatatcttcacatataagctaaacaaaaactttctgagaaaattctttgtgatatgtgctttcatctcacasagtagaatttttcttttcattgagcagtttggaaacagtctttttgtaacatctgcatagggacatttctgagcagtttgaggcctatggtgacaaagaaatatcttcacataaaaactagacagaagcattctgagaaacttcttttttaggtgtgaattcatctcacagagttgaaacttacttttcattgaacagttctgtaacagtctttttgtagaaacagcaaaaggatatttgtgagccctttgaggcctatggtgtaacaggaaataccttcacttaaaaactagacagaagcattcgagtaacttctttatgatttgtgctttcatctcacagagttgaatctttcttttgattgagcagtttggaaaaactctttttgtacaatctgcaaaagatatttggtgcactttg

SEQ ID NO: 877406 - DNA, 644 bp, Homo sapiens
tgccacactggtgtcatgtacccattaactcatcatttagcattaggtatatctcctaatgctatccctccccactcccccaacaccacaacagtccccagagtgtgattttccccttcctgtgtccatgtgttctcactgttcaaatctcacctatgagtgagaacatgtggtgtttgattttttgcccttgtgatagtttactgagaatgatgatttccaatttcatccatgtccctacaaaggacatgaactcatcatttttatggctccatagtattccatagtgtatatgtgccacattttcttaatccagtctatcattgttggacatttgggttggttccaagtctttgctattgtgaatagtgccacaataaacatacatgtgcatgtgtctttacagcagcatgaaaccaacgagaacaaagacayaacataccagaatctctgggacacattcaaaacggtgtttagagggaaatttgtagcactaaatgcccacaagagaaagcaagaaagatccaaaattgacaccctaacatcacaattaaaagaactagaaaagcaagagcaaacacattcaaaagctaggagaaggcaagaaataactaaaatcagagcagaactgaaagaaatagaga

SEQ ID NO: 877407 - DNA, 620 bp, Homo sapiens
actaactgtcttttttcaaaggaaaaataaactttcttttatctttatgatataaggtaatttttacaacttggagcaagattaggctcttactctctcatggagactgggaaataaggtattatctttctggaggattacgtttgaaagggatggctcccagatccttgaaaaaggaagttttctgcttacaagttacacatgccacttctacctgcatttcactggctaaacaggtcaaatgtctaaatctgacccttccttcaataggacagaaatatataatcttctaggatatagggccactacagcaggaagaccagatagtgggagaatggtaatataatctaccacaataaccacagtgaaaacattagtaatcctcagggttaaaccaagtcttcttggacacttaggttgattctaggctattktcaatagtggaataacaaaaaataaagagaatagcccatttattttttttgcagagaagctagacaattcacagtaacttatggcctagacaattttatttcttgatcaacacaactctttaaagatgcctgtggtccaaaaatgtggattcctaatcatccccaaaaagaagggatcctctgcaa

SEQ ID NO: 877408 - DNA, 632 bp, Homo sapiens
ggttccaatggcaaaggttaatttcaaagtttttatagtgttattcaaagcacgtttgatttcagccttggcaaccatgggcagaatgtcagcaatgctccctctattagctattggagagaaaacactgtgaaactctaagaccttggttattgggccaatgaaacatttatgccctgatcagatggaggaaaacttcagcagggttagtgagacaccttccgagtgtaccaatgaagctcttgcctgctgttacagataaatgactttcatttcactattggcttgtgcttgagaaggttattcaattgattccagttttttgcaatgccttgaaggcaaataatgttgtagcatccactgtcctcataatacactgtttcttttctaaggaaggttgttgtcataataccctagatatcaacagaaaatattccacttcttatcatatattaatttggctctggaataagtaaatgtaactaccagaatgctaatgaggatgttacgctgatgtttatttgtgtgttctaatctgtagataaacagcaagatctcttatawttcatgattccaagtctcaggccacagcaggacaagcatcaaaacatctattctcaattcggagttga

SEQ ID NO: 877409 - DNA, 579 bp, Homo sapiens
gttttttgcaatgccttgaaggcaaataatgttgtagcatccactgtcctcataatacactgtttcttttctaaggaaggttgttgtcataataccctagatatcaacagaaaatattccacttcttatcatatattaatttggctctggaataagtaaatgtaactaccagaatgctaatgaggatgttacgctgatgtttatttgtgtgttctaatctgtagataaacagcaagatctcttataattcatgattccaagtctcaggccacagcaggacaagyatcaaaacatctattctcaattcggagttgagatttctaataagaattatattttatccataatcataaaatagcaccagaaaaagtcaatatctaaaaatacagatcattgaaaaatagatctttctgcccttaacataaacaaactgtaaaatctgaagttaaaattattccttgtaccagcctcctaatttacccagagttaacagaaaagttatagcagtgcatgaagctctgaggttttgatgggtgtagatatagacatccaattctgccatttcacactagtcagaat

SEQ ID NO: 877410 - DNA, 526 bp, Homo sapiens
catctcagagagttaaacttttcttttgatttagtagttttgaaacactctttttgcagaaactgcaagtggagatttggggtgctttggggtctatagtggaaaaggaaatatcttcacataaaaactttacagaagaattctgacaaacttctttgtgatgtgtgtgttcatctcacagagttgaacgtttcttttgattcggcagtttggaaaaaaatcatttgtagaatctgcaagtggacatttggagcgctttgcagccwatggtagaaaaggaaatatcttcataaaaaacctaaacagaggcaatctgagaatcttctctttgatgtgcattttcatctcacagagataaacctttcttttgattgagcagttttgaaactctctttttgtagaatctgcaagtggacatttggagcgctttgaggcctttggtggaaaaggaaataacttcacataaaaactagacagaagaattctgagaaacttctttgtgatgtgtgcgttcatctcacagagt

SEQ ID NO: 877411 - DNA, 616 bp, Homo sapiens
ttgagcagtttggaaacactctttttataccatcggcaaatggacatttggggcacttttgggcctatgttagaaaaggaaatatcttcacatacaatctagacggaagcattctgagaaatttctttatgatgtgtgagttcatctcacaaagttgaacatttcttttgattgagcactttggaaacactctttttgtagaatccacaagtggacaatttggagtgctttgcggcctttgktagaaaatgaaatatcttcaactaaaatctacacaaaagcaatctgagaaacttctttgtgatgtgtgcattcatctcaaagagataaacctttcttttgattgagcagttttgaaactctctttttgtataatctgcaagtggacatttggagtgctatgaggcctatggtggaaaaggaaatatcttcacataaaaactagacagaagcattctgagaaacttctttgtgatgcatgcattcatcgcacagagttgaacctttcttttggttgagcagtttggaaacactgattttgtagaatctgcaagtggacatttggagcgctttgtgacctatggtagaaaaggaaatatcttcacataaaacctag

SEQ ID NO: 877412 - DNA, 645 bp, Homo sapiens
taggcagaggaattctgagaaacatctttgtgatgggtgtgttcatctcacagagttgaacgtttcctttgactgagcagtttggaaacactcctttgtagaatctgcaagtggacatatggagcgctttgcagcctatggtagaaacrgaaatatcttcacataaaacctagacagaagcaatttgagaaacttatttgtgatgtgtgctttcatctcacagagttaaacctttcttttgattgagcagttttgaaaatctctttttgtggaatccgcaacggacatttggaatgctatgaggcctacagtggaaaaggaaattactttgtgaaatttgtgttcatctcacagagctgaaacttacttttgattgagcagtttggaaacactgtttttgtagaatctgcaagtggatatttgtagcgctttgtggcatgaggtagaaaaggaaatatcttcacctaaagtctaaacagaagcaaccttagaaacttatttgcaatgtatgcattcatctcacagagccaaatctttctttcgattgaacagtttagaaactctctttttgtagaatctgcaagtggacatttggagcgctttcaggtctatggtggaaaaggatatatcgtcacataaaaacta

SEQ ID NO: 877413 - DNA, 542 bp, Homo sapiens
aaaactaggcagaggaattctgagaaacatctttgtgatgggtgtgttcatctcacagagttgaacgtttcctttgactgagcagtttggaaacactcctttgtagaatctgcaagtggacatatggagcgctttgcagcctatggtagaaacggaaatatcttcacataaaacctagacagaagcaatytgagaaacttatttgtgatgtgtgctttcatctcacagagttaaacctttcttttgattgagcagttttgaaaatctctttttgtggaatccgcaacggacatttggaatgctatgaggcctacagtggaaaaggaaattactttgtgaaatttgtgttcatctcacagagctgaaacttacttttgattgagcagtttggaaacactgtttttgtagaatctgcaagtggatatttgtagcgctttgtggcatgaggtagaaaaggaaatatcttcacctaaagtctaaacagaagcaaccttagaaacttatttgcaatgtatgcattcatctcacagagccaaatcttt

SEQ ID NO: 877414 - DNA, 542 bp, Homo sapiens
aaaactaggcagaggaattctgagaaacatctttgtgatgggtgtgttcatctcacagagttgaacgtttcctttgactgagcagtttggaaacactcctttgtagaatctgcaagtggacatatggagcgctttgcagcctatggtagaaacggaaatatcttcacataaaacctagacagaagcaatttgagaaacttmtttgtgatgtgtgctttcatctcacagagttaaacctttcttttgattgagcagttttgaaaatctctttttgtggaatccgcaacggacatttggaatgctatgaggcctacagtggaaaaggaaattactttgtgaaatttgtgttcatctcacagagctgaaacttacttttgattgagcagtttggaaacactgtttttgtagaatctgcaagtggatatttgtagcgctttgtggcatgaggtagaaaaggaaatatcttcacctaaagtctaaacagaagcaaccttagaaacttatttgcaatgtatgcattcatctcacagagccaaatcttt

SEQ ID NO: 877415 - DNA, 542 bp, Homo sapiens
aaaactaggcagaggaattctgagaaacatctttgtgatgggtgtgttcatctcacagagttgaacgtttcctttgactgagcagtttggaaacactcctttgtagaatctgcaagtggacatatggagcgctttgcagcctatggtagaaacggaaatatcttcacataaaacctagacagaagcaatttgagaaacttatttgtgatgtgtgctttcatctcacagagttaaacctttcttttgattgagcagttttgaaaatctctttttgtggaatccgcaacggacatttggaatgctatgaggcctacrgtggaaaaggaaattactttgtgaaatttgtgttcatctcacagagctgaaacttacttttgattgagcagtttggaaacactgtttttgtagaatctgcaagtggatatttgtagcgctttgtggcatgaggtagaaaaggaaatatcttcacctaaagtctaaacagaagcaaccttagaaacttatttgcaatgtatgcattcatctcacagagccaaatcttt

SEQ ID NO: 877416 - DNA, 542 bp, Homo sapiens
aaaactaggcagaggaattctgagaaacatctttgtgatgggtgtgttcatctcacagagttgaacgtttcctttgactgagcagtttggaaacactcctttgtagaatctgcaagtggacatatggagcgctttgcagcctatggtagaaacggaaatatcttcacataaaacctagacagaagcaatttgagaaacttatttgtgatgtgtgctttcatctcacagagttaaacctttcttttgattgagcagttttgaaaatctctttttgtggaatccgcaacggacatttggaatgctatgaggcctacagtggaaaaggaaattactttgtgawatttgtgttcatctcacagagctgaaacttacttttgattgagcagtttggaaacactgtttttgtagaatctgcaagtggatatttgtagcgctttgtggcatgaggtagaaaaggaaatatcttcacctaaagtctaaacagaagcaaccttagaaacttatttgcaatgtatgcattcatctcacagagccaaatcttt

SEQ ID NO: 877417 - DNA, 628 bp, Homo sapiens
catctcacagagttgaacgtttcctttgactgagcagtttggaaacactcctttgtagaatctgcaagtggacatatggagcgctttgcagcctatggtagaaacggaaatatcttcacataaaacctagacagaagcaatttgagaaacttatttgtgatgtgtgctttcatctcacagagttaaacctttcttttgattgagcagttttgaaaatctctttttgtggaatccgcaacggacatttggaatgctatgaggcctacagtggaaaaggaaattactttgtgaaatttgtgttcatctcacagagctgaaacttacttttgattgagcagtttggaaacactgtttttgtagaatctgcaagtggatatttgtagcgctttgtggcatgaggtagaaaaggaaatatyttcacctaaagtctaaacagaagcaaccttagaaacttatttgcaatgtatgcattcatctcacagagccaaatctttctttcgattgaacagtttagaaactctctttttgtagaatctgcaagtggacatttggagcgctttcaggtctatggtggaaaaggatatatcgtcacataaaaactacacagaagaattctgagaaacttctt

SEQ ID NO: 877418 - DNA, 628 bp, Homo sapiens
catctcacagagttgaacgtttcctttgactgagcagtttggaaacactcctttgtagaatctgcaagtggacatatggagcgctttgcagcctatggtagaaacggaaatatcttcacataaaacctagacagaagcaatttgagaaacttatttgtgatgtgtgctttcatctcacagagttaaacctttcttttgattgagcagttttgaaaatctctttttgtggaatccgcaacggacatttggaatgctatgaggcctacagtggaaaaggaaattactttgtgaaatttgtgttcatctcacagagctgaaacttacttttgattgagcagtttggaaacactgtttttgtagaatctgcaagtggatatttgtagcgctttgtggcatgaggtagaaaaggaaatatcttcacctaaagtctaaacagaagcaaccttagaaacttatttgcaatgtrtgcattcatctcacagagccaaatctttctttcgattgaacagtttagaaactctctttttgtagaatctgcaagtggacatttggagcgctttcaggtctatggtggaaaaggatatatcgtcacataaaaactacacagaagaattctgagaaacttctt

SEQ ID NO: 877419 - DNA, 621 bp, Homo sapiens
tttggagcgttttgaggcctatggtagaaaaagaaatatcttcacgtgaaaactagacagaataattctgagaaacttttcgtgatgtgagcattcatctcacagagttaaacctttcctttgattgaacagttttgaaaatctctwattgtagaatctacaagagaacatttggatcgctttgtggctttgttaggaaaggaagaatcttcacataaaatctagacagaagcaatctgagaaacttctttgtgatgtgtgcattcatctcacagagttaaacatttctttttcttgagcagttttgaaactctgtttttgcagaatctgcaagtggacatttggagtgctttaaggcctatggtgaaaaaaggaaatatcttcacataaaactagatagaaaaattctgagaaacatctttgtgatgcgtgcattcataacacagaaatgaacctttcttttgattgagcagtttaaaaacactctttatttagaatctgcacgtggacatttggagcgttttgtggcctatggtagaaaaggaaatatcttcatataaaatctagaaacaagcaatctgggaaactcctttgtgatgtgtgcattcatctcacagggtt

SEQ ID NO: 877420 - DNA, 645 bp, Homo sapiens
ggcacagaaatatcttccagtaaaaactaccagaaacattctgagaaacttctttgtgatgtgtgcattcatttcacagagttgaacctttcttttcattgagctgttttgaaacactgtttttgtagtatccgcaagcggatatgtggagcgatttgaggccttctgtggaaaagcaattattttcatgttaaagatacacagaagcattctgagaaacttctttgtgatgtgtgcattcatctcacggagttgaacctacgttatgattaagcagttttcaaaaactctttttgtagaatctgcaagtggatatttggagcgctttgaggcatattgtggaaaaggaaatatattcacataaaaactacacagaagcattctgagtaacttctttgtgattagtgcattcatcacacagagctraacctttcttttgattgagcagttttgaatctctctctttgtagaatctgcaagtggatacttggattgctatctggcccgttgtggaaaaggaaatgtcttcacatgaaaactacacagaaggattctgacaaacttctttgtgatgtgtgcattcatctaacagatttcaaccattattttgattcagcagttttgaaacactatttttggagtatc

SEQ ID NO: 877421 - DNA, 649 bp, Homo sapiens
ctacacagaaggattctgacaaacttctttgtgatgtgtgcattcatctaacagatttcaaccattattttgattcagcagttttgaaacactatttttggagtatctgcaagtgggtatttggagggctttgaggcctcctgtggaaaagcaaatatcttcacataaaaactacacagaagcattctgagaaacttccttgcgatgtgtgcattcatcacatagaattgaaactttctgttgattgagcagtttttaaacacactttttgtagaatatgcaagtggatatttgcagtgctttgattcctattgtggaaaaggaaatatcttcacataaacactacacagaarcattcagagaaagtattttgtgacgtgtgcattaaaatcacagagttgatattattttttgattgagcagttttgaatctctctttttgtagaatcagcaattggatatttggagccctttgcatcctatggaggaaaaggaaatatcttcacctgaaaactacacagaagcattctgagaaacttctttgtgatgtgtgcattcatctcacagagttgaacctaaagtataattcagcagttctaaaacactgtttttgtagaatctgcaaggggatatttggagcgctttgagg

SEQ ID NO: 877422 - DNA, 550 bp, Homo sapiens
agcagttctaaaacactgtttttgtagaatctgcaaggggatatttggagcgctttgaggcctactgtggaaaatcaaatatcttcacataaaaactacacagaatcattctgagaaacttcgttgggctgtgtgcattcatctcacagagttgaacctatcttatgattgagcagttttgaaamactctctttgtaaaatctgcaagtgtatacttggagcgcttggaggcctattgtggcaaagaaatatcttcacatagaaattacacagaagcattcatagaaacttctttgtggtgtgtgcattcatctcacagagttgaaactttcttttcattgagcacttttgaaaccctgtttttgtagtatctgcaatggaaatttggagcgctttgagccctactgtggaaaagcaaatatcttcacataaaaactacacagaagcattctgagatacttctttgtgatgtctgcattcatctcacagagttgaaactttcttttgaatgagcagttttgtaacactctttttgtataatatgaaagtg

SEQ ID NO: 877423 - DNA, 609 bp, Homo sapiens
tgtgagaaactactttgtgacgtgtgcattcatcacacagagttgaacctttctttttattgagcagtttggtaacactctttttgtagaatctccaaggggatatttttagcgctttgagatctttggcggaaaaggaaatatcttcacatagaaactacacagaagcattctgagaaacttatttgggatgtgtgcattcatctcagtgagttgaatctatcctttgattgagcagtttttaatcactctttttgtagaatctgcaagtggatatttggagcmcatttagacctatggtggaaaaggaaacatcctcacataaaaactatgaagaagcattctgagaaacgtctttgtaatgtgtgcattcatctcacagagttgaacctttcttttgattgagcaatttcgaaacactctttttgtagaatttggacgtgtatatttggagtgctttgtggcctgttgtggaaaagaaaatatcttcacataaacactagacagaagcattctgagaaacttctttgtgatgtgtgcattcatctcagagagttgatctttcttttgattgaccaatttggacacactcttttctagaacctgcaa

SEQ ID NO: 877424 - DNA, 637 bp, Homo sapiens
ctgaaggtgtagtagacgttgggtgatggggtccatggcctgttgctttctggcttgtgttgttttgctgtgatgatgtttttagtggcatgtgcattcattctgtgtgtgtcacctgttgattaaaaatcacctcaagctgattgaaggaacaatgggatccctgatgttgttttcagaaatacatgaaataattagtgaaaaataataaacgtaaaatgaaagaatttataaattacactctcttagactgagacccaagcctagtaaaataattgtaaacattagcttgtgaaagaattctgtttcrtatccacagtagaggtcattttcctttttagggactttcttgatggtaaatgtacagcagttgatattatcatgactgtgaatagaaatgactgctgagaagcagcacggtgagaacaggttcacacttcctgccagtgctactgaagactttttgtacttgtccactctgctcctactagaagtcaaaactatagggccaagtgcctcacttcattggagaactacatcttctcatagtactaaatgtaataaatatatctttagagattctgaaagtaaaatgtgatgttgaatataaagctgtacttcttagcattgcatagct

SEQ ID NO: 877425 - DNA, 641 bp, Homo sapiens
gatgttggctgtgggtttttcataaatagctcttattattttgggatacattccatcaatagcttgtttattgagagtttttagcatgaagggctgctgaattttgtcaaaggtcttctctgtatctattgagataatcatatggtttttgtctttggttctgtttatatgatggattacgtttattgatttatgtatgttgaaccagccttgcatcccagggatgaagccaacgtgattgtggtggataagctttttgatgtgctgctggattcagtttgccagtattttattgaggattttcacattgatgttcatyagggatattggtctaaaattccttttttttttttttgctgtatctctgtcagggtttggtatcagaatgatgctgtcctcataaaatgagttagggaggattctctctttttctattgattagaatagtttcagaaggaatggtaccagctgctctttgtacctctagtagaatttgtctgtgaatctatctggtcctgggcttttcttggttggtagcctattaattatcgcctcaatttcagagcctgttattggtctattcagggattcaacttcttcctggtttagtcttgggagggttatgtgtccacgaattcatc

SEQ ID NO: 877426 - DNA, 674 bp, Homo sapiens
ctttaatttgtatcagttgtatgcttttttgtgtcagttgtatgttcttccaatttgaggttaccataaggtttataaatactgttatataactcattgtttcacactgaggataacttaacactgattgcagaaatagacatgcaaaaggcaaactaataaaactccactttaatttcatcccccgacctttataaattttttgcttctctttatgtgttattgtacagtctaaatcttgaaaagttttcatagttattatttttgattggttcatcatttagtctttctacttaagacaagaggagtttatgaaccataatcacaatgttatactattctgtttttttgtgtgctgactattaccagtgagctttttacttttagatgatttatttttgcwcattaacattattttctttcagattaaagaactccctttagcattttgtataggacaggtctcggttgatgaaattcttcagcttttgtttgtctggtaaagtctttatttctccttcacatttaaatgatattttcaagtgatttactactctagggtaaaaggttttttcccttaatttctttaaatatgtcatgccactatattctggccttttagattttaactgaaaaggctgcttccaaatgtattggagctccattgcatgctg

SEQ ID NO: 877427 - DNA, 674 bp, Homo sapiens
ctttaatttgtatcagttgtatgcttttttgtgtcagttgtatgttcttccaatttgaggttaccataaggtttataaatactgttatataactcattgtttcacactgaggataacttaacactgattgcagaaatagacatgcaaaaggcaaactaataaaactccactttaatttcatcccccgacctttataaattttttgcttctctttatgtgttattgtacagtctaaatcttgaaaagttttcatagttattatttttgattggttcatcatttagtctttctacttaagacaagaggagtttatgaaccataatcacaatgttatactattctgtttttttgtgtgctgactattaccagtgagctttttacttttagatgatttatttttgcacattaacattattttctttcagattaaagaactccctttagcattttgtataggacaggtctcggttgatgaaatycttcagcttttgtttgtctggtaaagtctttatttctccttcacatttaaatgatattttcaagtgatttactactctagggtaaaaggttttttcccttaatttctttaaatatgtcatgccactatattctggccttttagattttaactgaaaaggctgcttccaaatgtattggagctccattgcatgctg

SEQ ID NO: 877428 - DNA, 585 bp, Homo sapiens
aaacagaagggcctccctatagggcaaaaagactccagggtatgcttatcgggacgtcctagaaaagcatgggctttagggctctgccaagctggaatctggctcccacactcgcttgcctttctgaggcacagttttctcatctataaaatataatagagctgcctgtaatcccagcactttgagaggccaaggcaggcagatcacaaggtcaggagtcgagaccagcctggccaatatggtgaaacactgtctctactaaaaatacaaaaaattatccgggtgtggtggcaggtgcctgtaatcccagctactcaggaggctgaggcaggagaattgcttgaacctgggaggtggaggttgcagtgaggygagatggtgccactgcaccccagcctgggcgacagagtgagactccatctcaaaaaaaaaaaaaaatatatatatatatatacacacacacatacacacacacacacatatcacacacatatataatagagctaataataacctatctcaaaggctttttttggaaggttaaaatagataatgtatgtaacatatttagcatagttcccagca

SEQ ID NO: 877429 - DNA, 639 bp, Homo sapiens
aaagacaatttgtattgtaagtaatcattgattaaatgacaaatcagccattcagaagagacatcaggtactcttcaaaagagggcaagccaccatgggtacaagtcatcaggaaagtcttcatgactaagcatggtgtcagaaaaagtatagactctgaagtcgggcaggccctgagttcagaatcccaactttggcacttattccctatgggaatttgggtaaataatttaacctctccaagcctccagtttcccacctgtagaatgggagcaatggtacccactttgaaaggtaagtagaggggattcagtaagattatatatataaagtacctaggagaacacctggtacatggcagatgcttaataacagtagctagtattggtataaaaagagcaacttcagccagyctttgaaagatgacaggggttggcgagggcaaggcaggtatagcgtgagcaaaggcttagggggaagaatatctaaggtgggtttttgggcaaagtaaataggtaagtcgggctaacaaagagggtaagagtgggaggcccgactggaaaggtgggcacatttaagagtgtaaaaccttaaatgcttggctaaggagtatggcacttattcttgttgactagacag

SEQ ID NO: 877430 - DNA, 639 bp, Homo sapiens
aaagacaatttgtattgtaagtaatcattgattaaatgacaaatcagccattcagaagagacatcaggtactcttcaaaagagggcaagccaccatgggtacaagtcatcaggaaagtcttcatgactaagcatggtgtcagaaaaagtatagactctgaagtcgggcaggccctgagttcagaatcccaactttggcacttattccctatgggaatttgggtaaataatttaacctctccaagcctccagtttcccacctgtagaatgggagcaatggtacccactttgaaaggtaagtagaggggattcagtaagattatatatataaagtacctaggagaacacctggtacatggcagatgcttaataacagtagctagtattggtataaaaagagcaacttcagccagcctttgaaagatgacaggggtyggcgagggcaaggcaggtatagcgtgagcaaaggcttagggggaagaatatctaaggtgggtttttgggcaaagtaaataggtaagtcgggctaacaaagagggtaagagtgggaggcccgactggaaaggtgggcacatttaagagtgtaaaaccttaaatgcttggctaaggagtatggcacttattcttgttgactagacag

SEQ ID NO: 877431 - DNA, 569 bp, Homo sapiens
ggattagcgagtgggcatttttggtgaggggaatattattatgtctatggcaccatcataaatttaggtcagatttaagatatagtataggtatagtataaatatatattttatttgccatgggtgaactttgaatacattggaatctctagtaaaattaatgtatattttatatcattccccatttttatgtcttaaaaatttcttaagttttttagtataatagttatacaggtctcaggtctatgatagctttcttttttttttttttttttttgctttgtaacatattatggttatttctattacaggaggtatacactgagttccaatcctggttagggttatagccagtattacaatgtgcttctattarattacagtgttcttaataagaaatgtgttctaagacagagacttccagttagacactgatatgactaacagagtatgcccattcttgtttggcttaaaaagacgcatgtagctttaaatggtaaaaggaataatgcaggcacagatagaggttccacaggactcttaaatcttagtgctgaagtaaactctga

SEQ ID NO: 877432 - DNA, 588 bp, Homo sapiens
gccaaatcatgagtgaaatcccattcacaattgtttcaaagagaataaaatacctgggaatccaacttacaagggatgtgaaggacctcttcaaggagaactacaaactactgctcaatgaaataaaagaggatacaaacaaatggaagaacattccatgctcatgggtaggaagactcaatatcgtgaaaatggccatactgcccaaggtaatttatagattcaatgccatccccatcaagctaccaatgactttcttcacagarttggaaaaaactactttaaagttcatatggaaccaaaaaagagcccgcatcgccaagtcaatcctaagccaaaagaacaaagctggaggcatcacgctacctgacttccaactatacaacaaggctacagcaaccaaaacagcatggtactggtaccaaaacagagatatagatcaatggaacagaacagagccctaaattaactaaatttctaaattaaagttcttttaaaatatttactatcacttctaaagtttttactgtgtatgctgggcactgttctaagtgctttgcatgtattagtttatctattccttacgac

SEQ ID NO: 877433 - DNA, 600 bp, Homo sapiens
atcctttccccattgcttgtttttgtcaggtttgtcaaagatcacatggttgtagatgtgtggtgatatttctgaggtctctgttctgctccgtaggtctatatatctgttttggtacaagtatcatgctattttggttactgtagtcttgtagtatagtttgaagtcaggtagcatgatgcctacagctttgttatttttgcttaggaatgtcttggctatatggggtcttctttgattccatatgaaatttaaaatagttttttctaattctgtgaagaatgycaatggcagtttgatggaaatagcattgaatctatgaattactttgggcagtgtggccattttcatgatattgattcttcctatccatgaggatggaatgtttttctgtttgttcgtgttctctcttacttccttgagcagtggtttgtagttctccttgaagaggcccttcacattccttgttagctgtattcctaggtattttattctctttgtagtgattatgaatgggagttcattcatgatttggctctctgcttgcctattgttgatgtaaaggaatgcttgtgatttttgcgtattgattttgtatcc

SEQ ID NO: 877434 - DNA, 600 bp, Homo sapiens
atcctttccccattgcttgtttttgtcaggtttgtcaaagatcacatggttgtagatgtgtggtgatatttctgaggtctctgttctgctccgtaggtctatatatctgttttggtacaagtatcatgctattttggttactgtagtcttgtagtatagtttgaagtcaggtagcatgatgcctacagctttgttatttttgcttaggaatgtcttggctatatggggtcttctttgattccatatgaaatttaaaatagttttttctaattctgtgaagaatgccaatggcagtttgatggaaatagcattgaatctatgaattactttgggcagtgtggccattttcatgatattgattcttcctatccatgaggatggaatgtttttctgtttgttcgtgttctctcttacttycttgagcagtggtttgtagttctccttgaagaggcccttcacattccttgttagctgtattcctaggtattttattctctttgtagtgattatgaatgggagttcattcatgatttggctctctgcttgcctattgttgatgtaaaggaatgcttgtgatttttgcgtattgattttgtatcc

SEQ ID NO: 877435 - DNA, 631 bp, Homo sapiens
attaagacacatgcacacgtatgtttatcacagcactatttacaatagcaaagacttggaaccaacccaaatgcccatcaatgatagactggataaaaaaaaaatgtggtacgtttgcaccatggaataccatgcagccataaaaaggaatgaratcacgtcctttgctgggacatggaggaagttggaagccatcatccccaccaaactaacacaggaacattaaaccaaacacagtaagttctcactcataagtggaagtcgaacattgagaacacatggacacagagaggggaacagcacacaccagaacctattggggggtggggggtgagggaagggaacttagaggatgggtcagtaggtgcagcaaaccactatggcacatgtatacctatgtaacaaatctgcacgttctgcacatgtatcccttttttttgtttgtttgtttgtttttgtagaagaaataaaaaaacagagacacacagcaaaggagatgcaatttattgcaaaagaaaaataatattttgaaagttaagtacagaatagacaggacaccctaagaaagattggattcagggtgggctactcataagaataagacagcagagaatggcactaggaagactcc

SEQ ID NO: 877436 - DNA, 591 bp, Homo sapiens
ttcaaaatttatctattaccatttttgaacaagcttgagattgctgtaaattacgaggttgaaattaacaaagagacatatatcaaaaaagatcatacatatgcatgtaaacttaaaaaataagtaagtaacagcaactaaagttaattaattttaacaagcatggtttttaataagtggttgaaacccagaaaattttagactaaacatttttcctatttccataaagttacattttwaaaatctttacatatagcttaattggactttttatttaaaaattagtgggtaatgatatatcatctcttaacaagtgccttaaatcaggggtccccaaaccccaggccataagcagataccagttcatgacctgttaggaaccaggccaccacacaggaagtgagcagcgaagcttcacctgtttttttgtttgttttgttttgttttgttttgttttttgagatggaattttgctcttgttgcccaggctgtagtgcaatggcatgatctcagctcactgcaacctctgcctcctagtttcaagtgattctcctgcctcagcatccctagtagctgggattacaggtatgt

SEQ ID NO: 877437 - DNA, 650 bp, Homo sapiens
attgaccttggctccatttgccaataagttcctcatcttcatctgagaccacctcaacctggacttcattgtccatatcactatcagcattttggtcaaaaccactcaatgagtctctgggaagttccaaactttcctatatcttcttgtctttttctgagccctccaaactattccaatctctgcctgttacccagctccaaagtcacttccacattttggggcatctttataatagtgctccattcccagtaccaatatactgtattagtccattcttgcactactactacgaactgcctgagactggataatttataaaggaaagaggtttaattgacacagttctgcatggttgggaaggcctcaggaaactcacaatcatggcagaaggagaagcaaatrcatggtccttcttcacatggtggcaggagagaaaaagtgcagtgcaaatgggaggaagctccctataaaaccatcatatctcacgagaaaaacctactcccattctctagaacccagttaattgggcttacctaggactgggtaaggaaaaagaaaacagagactttcccttccctcacccctagtaagcactaagtaacaagacaaagaagcctaacactgggacaagccaaagcctagagcac

SEQ ID NO: 877438 - DNA, 630 bp, Homo sapiens
attcttgtgatagtgaataagtctcacgtgatctgatggtttaaaaaacacgagtttcagccaggtgtggtggctcatgccgataatcccagcacttgggaggctgaggcaggtggatcacaaggtcaaaagatcgagaccatcctggccaacatggtgaaaccctgtctctactaaaaatacaaagtttagctgggtgtggtggtatgcacctgtagtcccagctactcgggaggctgaggcaggagaatcacttgaacccaggaggcagaggttgcagtgagccaggattgcaccactgcacttcagcctggcaacagagtgagactctgtctcaaaaaaaaaaaaaaaaaaaatcaacaacaacaacagcaaaaaccaacgggagtttccctgcacaagctctctttcttctcttgtctgcccccatgtgagatgtgcctttcaccttctgccatgattgtgaggcctcctcagccacrtggaactgtaagtccattaaacctctttattttgtaaattacccagtcttgggtatgtctttatcagcagcatgacaacagactaatacaataaattggtactgggagtgctgttgaaaagatactcaaaaatgtgtaagcaactttg

SEQ ID NO: 877439 - DNA, 691 bp, Homo sapiens
ggcactgttacaacagaatgtttaaagaaggtggaacttgagaatgagcaaaatcttttatcagctgagattggagtataggagttggagatggtacaccagaaatacactgattatgcacatgggtaaaaattgcacatatgtatctttggtgaagggatagctgtgaaaccatttcaaatagcatcctaatcactattacattataatttaatcccaaatattgcatgggacatacttgtattaagaaatattttttatcggaaattgaaattggggcatgtgctacttttctttgccaaatctggcaatcctatatacacatttacctgatttttattaacatctagctgcttcagccctgccccccaccccaccacatactggaatatatattccatcagctcaggaacctcatctatctatcttgttcccccaccatatcctccatatgtagaacagtgcctggccttggtataataggtgctcaatggatgttgtgaatgaaaaggaaaaaggttttgtrttaagtatttatttgtttaattaaatttcacagttaccatgtttgatagcagaggaacagaaaaagaaatttaaggttgaattggataatgaaggatggggtgcagggaggcagtaggtatgaaaatataaacctaggtaaactggaaagtagaaaatgtaacag

SEQ ID NO: 877440 - DNA, 464 bp, Homo sapiens
aagttactccagtgcttagcagcttaaaacaattgtgggtcagaaatctgggaagggctctgctgggtggttcacacttgaggtctccctcatagttgtagttggatgttggttggggctttatttatcttgtctgtgctaagrtaaataaagatgcatggttggcagttgatgccagctgtcatctgctgtacacagcctctccagcagggtagtctgggtgtagtcagacttcttacatgacatatggcttcatttcaagagaaccaggcagaagtctcatggccttttctgatctagcttcagaagtcatacaacatctcctctactgtactcaattagttgaagcagtctcaagtggtccagattcaaggtggggtgggaggaattagactccacttcttgatgagggcaatggccagttgacagtatagaagaacatgtgggatgggaacacgtgttgt

SEQ ID NO: 877441 - DNA, 628 bp, Homo sapiens
tattaaaagttgcagatatgagcatagtttgacactatgcttcaaaaggcttaaaaaaacagtgcatacctagtcacatagtaagtttagttacaggactataaggtgaggaaataattagacaattgtgcaagatttatgaacacaaatgttcattgtagaatcatttatgatggagaaaaccttataaataatctaaraattcagcaataaggggttgatttgataaattatgatacataaacatctacatatgatggaatactactcataccttaaaagtaatcttgtagaagactatttaatgagtagaaaattttcaagatatagtaattaaaaatcagatcataaaaatatatgtagactgcaatcctcttttaaatgtgtatatgtatatgtgtgtatatatgtatatgtgtgtatatatgtgtgtctgtatatacatatacatatatacacacacatagaggaaaatactgaactctgatgacataatgtggggctgttttgtgctttttttctattttccacattttagattaatgatttattataaatggtatattattttaaaaacaaaacaaaaacagaattcctggtgacataccatgtatgtaggaagcccagg

SEQ ID NO: 877442 - DNA, 654 bp, Homo sapiens
acaaaataatccaatctatccccaaaattagtggcttaaaataacgactgtatattcttaaagaggcagctggttgttgtcttactttggctgttctactcatggatctgttgtaaactgcagtctcagtaggtggttctgctgatctatgaccagttttctgaaatatttgggaattggctataggcttatctaggatggtctcagatgggaaaactggactttcattccgtgtggatttttaccctccagcaagctagcataggyttttccatgatggtggtaaggtttcaatataggtcagaaacatgcaagattgtcgattttatcaaattcatttggccagagcaagtcccaggaacagctctccccttgattctgagtcccagaaacagctcagaatgaaggagtgaggtgatagactccacatctagttcagaggagttacataggaaaagggtatagaaataacatggttggaaaactggagttatttttgcagttatctctcaatagatctcactttactgatttgttttctaagtgtccttatgataaacagcatttgtataggttttagtttttaattcaatttgatagcctctgtatttgtaaacaaatttagattatcgattcgtttttttcaattcccca

SEQ ID NO: 877443 - DNA, 580 bp, Homo sapiens
gcatactctttacttcttccaagagtaacaattggataattacaaagaagtggagagagtagagagtggaaaaattttctgggagtattgggagtactagcatacatgaagtctcaccacacggctacacaaagccagagaaatttcttcctcctataatttcmtaaaagggctacttcttcataatacagcattatttaaacaactgctctttgcattatcaaagtacgttcttatgtgtacacttttgataaagataagcctttgcaagataaattgtcattttttaagttggcagactgatcattatacctacttcttttcttgcagaaaataagaggtttattatttgaagagattcaatcagagagaacttggacccaagggcccaagacacagttgaggtagaaatatcatatgaaaagtagtagtattaaataaaagactacatattaaataaagaaatctctagcattttaacttcattcaatgcacagcaagccaggcttctcccttttatatagaaggttggtgcctatgtaggaaaatggagaaccaagagtaaaggcctacagccatt

SEQ ID NO: 877444 - DNA, 567 bp, Homo sapiens
tggttttcagctccactggtcatttaaggacttttctacactggttattctagttagccatttgtctaatattttttcaaggtttttagcttctttgcgatgggttcgaacatcttcctttagctcagagaagtttgatcgtctgaagccttcttctctcaactcatcaaagtcattgtccgtccagccttgttttgttgctggcaaggagctgcattcctttggaagagaagaggcactctgatttttagaattttcagcttttctgctctggtttctccccatctttgtggttttatctacttttggtctttgatgatggtgacgtacagatggggttttggtgtggatatcctttctgtttgttagttttccttctaacagtcaggaccctcagctgcaggtctgttggagtttgctggaggtccrctccaggccctgtttgcctgggtatcaccagcggaggctgcagaacagcgaatattgcagaacagcaaatgttgctgcctgatcattcctctggaagcctttgtctcagaggggcactcggccgtgtgaggtgtcagt

SEQ ID NO: 877445 - DNA, 570 bp, Homo sapiens
tactacagcaaattaaaacaaatcaggttgaataaacacatataattttcaacttctttcagcataaattgaactgcgtaatatgatattgataaaactttatgtaaacaaaattaaatctgacaatgaaaatgcattttagcatcatttgaagtaagctaacagaggagcacaaactattggcaaaaagattattaagagttgtgctattgacattacaattaaaatcrtagactagtgggctgttacaaaaaacacagttagtagcattgtctaaaaatgaagcccagaaaaaaattctagcattatatccaaagtgcttgatgaattactttggaggctgagattatgtaaaatctctatacagttcaactggatgacagtatagactttgtgaatctctccatgtttgtttttgtatggtgtgttcaggcaggtgaatacgaggaagatgtattacgttttaaaatgcttgtcacataaatgtaactggataatggagcagtctgaacttttatcttttccaatcacatccttctaccacgctctgtcaaatctctcatttaaagc

SEQ ID NO: 877446 - DNA, 570 bp, Homo sapiens
tactacagcaaattaaaacaaatcaggttgaataaacacatataattttcaacttctttcagcataaattgaactgcgtaatatgatattgataaaactttatgtaaacaaaattaaatctgacaatgaaaatgcattttagcatcatttgaagtaagctaacagaggagcacaaactattggcaaaaagattattaagagttgtgctattgacattacaattaaaatcgtagactagtgggctgttacaaaaaayacagttagtagcattgtctaaaaatgaagcccagaaaaaaattctagcattatatccaaagtgcttgatgaattactttggaggctgagattatgtaaaatctctatacagttcaactggatgacagtatagactttgtgaatctctccatgtttgtttttgtatggtgtgttcaggcaggtgaatacgaggaagatgtattacgttttaaaatgcttgtcacataaatgtaactggataatggagcagtctgaacttttatcttttccaatcacatccttctaccacgctctgtcaaatctctcatttaaagc

SEQ ID NO: 877447 - DNA, 626 bp, Homo sapiens
ccatgtgttgtaggagggacactgtgggaggtaattgaattatgtgggcagatctttcctgtgctgttcttgtgatagtgaataagtctcacaggatctgatggttctacaagggggagtttccctgcatagtctctctctttccctgctgccattcatataagacgtgacgtgctcctccttgcctttcaccattattgtgaagtctccccagccatgtggaactgtgagtccattaaacctcttttgtaaattgcccagtctcgtgtatcyctttatcagcagcaggaaaaggaactaatacagtaaattggtaccagtagagtggagtgctgcttaaaaaatacccaaaaatgtggaggcaactttggaactgggtaacaggcaggggttggaaaagtttggagggctcagaagaagacaggaaaatgtgggcaagtttggaacttcctagatacttgttgaatggctttagccaaaatgctgataatgatatggacaatgaaatccaggctgaggtggtctcagatggagatgaggaacttgttgggaaccggaggaaaggtgacttttgttatgttttatcaaagagactggtggctttttgcccctgccctcgagatttg

SEQ ID NO: 877448 - DNA, 534 bp, Homo sapiens
gtttaactctgcgagctgaatccacacatcacaaagcagcttcacagatagattctttctagtttttaatcacaaaatgttaggattttcttttccttttttttttttttttactgtcagcccctgtgggctttgaaatttttttttgcatatcctacaaaaagagtgttttcaacctgctgaatgaaagaatgttttaactctgtgagcaaaatccagacatcacaaaggagtttcacagatagcatctttctagtttttatcacgggatattcagtttttcactataggtctcagtgggctgtgaaatgccttttcacagattgtacaaaaagagggtttccaacctgctgaatcaaaagaaaagttttgctctgtgagctgaatccacacatcrcaaaacagtttcacagattgcttctttctagttttaatcggcagaaattcagtttttcaccatagacctcattgggctccaaaatgtctctttgtggattctttaaaaggagtgtttcaaatttgctgaatcaaaag

SEQ ID NO: 877449 - DNA, 515 bp, Homo sapiens
gaacattttcattaccttagaaaaatccctcatgacctattaaagttaccccactgttggatgtaaccactgtctgatctcaatcactgtagcttagctttcctgtttttgccattcatataaatggcatgatccagaaggtactcttttgtttctagcttcttttgcccaaaatrtttttgaaaatcatccatgttatttggttttaccacatttcattctatttgtattaatgtttcgtattacattgtatttgcatacagcaattatctcttttcctttttatagacctttgcattgtttccagtttgggactagtaagaataaagtttctatgagcattcttgtacaaatgtttttgtgggcatccatgagatggtttggctgtgtccccactcaaatttcatctcaaattgtaatccgcatatttcaggggagggacttagtgggagggaggtgattggatcacaggggtggtttcccccatgctgttctagtgatagtgagttctcgca

SEQ ID NO: 877450 - DNA, 525 bp, Homo sapiens
gatcctaccaggggaaaggagaggcaagatccacctgcccccctgcacaccaacaaaatgatgtggggggtggtcatgggtgagtgcgtgctggaaaagtggcacaggggagactgcggtggagggaaagtgtgggtggggggtcagttgggggagaatgtgggtgggctggtaggggtcagaggggccactctactggagctctccaagaatcaggggtggcctgcctgtgcaggagctgtgatgtggaccctggrgaggcaacctgaatgggcatctaaggctgcactgcaaacaggcatggctaggctggggctgtgggagttgccagcagacaggagaatgctcaggtctgaccagtcccatatcatggacaagatcaccctctctattcaggtctgacaattcacctaaggttaaattctcctaggggagcaagatgggtcttgggggatgggcatccctgggcatgctccactgcagatggtcccacaccaagacttctgggctctgcactggttagaa

SEQ ID NO: 877451 - DNA, 515 bp, Homo sapiens
cttgacagggatagcattgaatctataaattactttgggcagtatgtccattttcacaatattgattcatcctatccatgagcatggaatgttcttccatttgtttgtgtcctcgtttatttccttgagcagtggtttgtagttctccttgaagaggtccttcacatcccttgtaagttggattcctaggtattttattctctttgtagtaattgtgaatggtacttcactcatgatttggctctctgtttgactactattggtgtataggaatgcttgtgatttttgcacattgattttgtatcctgaggctttgctgaagttgcttatcagcttaaggagattttgggctgagacratggggttttctaaatatacaatcatttcttctgcaaacagagacaatttgacttcctctttttctaattgaatatcctttatttctttctcttgcctgattgccctagccagaacttcccacactacgttgaataggagtggtgagagagggtaca

SEQ ID NO: 877452 - DNA, 549 bp, Homo sapiens
ttcacatgactgtgaagtgcaggctcagctcaggggaagagcgagaggcatcagatggagccagggccacagcctcaggggcgacgtgagaaacatggaggaggcccatcaggtggagaaggttcatggcaaggttcatggagaaggttcatagcaaggacctgtgggttcttgtcagctgtggggagcagtttcacttccatcctgggagcaatggggagctcataaagggtctaagcaagggaggcaygagcagataactgctctctctggctgctgatcaggaagggactgtggggcaggagctggagcaggaggctgaaaagaagctgcaaaagggtccagatggaggtgatggggaaggaaaaggctgggagttggagagaaaggatggattgcagcaatcctgctgcctccctgaacatttattttatttattttctatgtcccataattgctaaaagtgaaagaaggcacaatcattctgtagactagtcagaggtgagcaggctggcagaacgtgatcaggcaagtaggaggaaggcaggc

SEQ ID NO: 877453 - DNA, 644 bp, Homo sapiens
attgtctctaaacagtatttttttaaaaaatagaatgcatagaaaaaaaaaggaccaaagctttagtgtttttgttttgttttgttttgttttgttttaatgggaaaagcctttccttgatgtgcatgaagatgcagtttctattagcctttatgtgggacatatgcctgcaccgatggtgaattctttcaatcaagttataggtagaaaggtcataagaaagagagaaacattggtatgaagcttcttacagagcatgttgttgaaaatgtaaccaaatccatcacctcaagcatttatcctttgtttatgttatraacattctactttttaataatcttagttattataaaatgtacaataaattattgttgacagcagtcactgttgtgctatcaaataacagatcttattcattctaatgatactttttgttcccattaaccatcctcattctcttcctcgctcactatccttcccagcctctgataaccattcttctgctgtctatctgcatgagttcaattgttttaatttttagttccccaaaatgagtgagaacacacaaagtttgtctttctgtgcctggcttatttcacttagtataatgatctccagttccatccatgttgcaaatgacagga

SEQ ID NO: 877454 - DNA, 588 bp, Homo sapiens
gtttcagtatctctataaccaggaagataaaatagttgattttctttttcttcatttttccttctcatgactacctgcttcctcgggtgatgagtgggatgaacaatgtgataaattaacaatatttgacaggaaacagcattttaagtgtagaccacttaatatacctaactctgtgaactttaataagttatgtaaatttttattctaaatttctgcatctacaaaagtatgggtttgaatgagaytttatctgaagtatttttaaggcctagaatcctattatctgataaaattaaatttgattgaaacaagatgaaaataacatattaccactatgagtctgaatacaatagagatcacagatataaaacttatttagttatccatgtatatatgtatatgtatatttatacctacatttacaaaattgaaattgtttacttttattgatatgatcccacaagataataagtaatttttaaaaatagaggagagatcatctagaaataggaagagcaaaagaaagcatacttagattcattgaataaaaaaatgtctgaggatcaaatgggaggcaaaaataaa

SEQ ID NO: 877455 - DNA, 634 bp, Homo sapiens
agtgactcacacctgtagtcctagcactttgggacgccaaggcgggtggatcacgaggtcaggagttcaagaccagcctggccaagatggtgaaaccccgtgtctactaaaaatacaaaaattagccctgcgtggtggcacgcgcctgtaatcctggcaacacaggaggctgtggcaggataattgcttgaacccaagagkcagaggttgcagtgagctgagattgtgccattgcactccagcctggggtaaaaagagaaaaactctgtcttttaaaaaaaaaaaattaaacaaatagatcatcaagttatttatgacgattaaacaaaaggacacaataggttttctcttaaaaatcagcttgtatatgtatgcttctatggaatatttgtctgggcttcaggacagggatctcctgctacccctgctgtgtgaacttggataaggcaccagcctttctggcctcagtttccccatctacagaacaagagagagacatacaagtgatttttgaagacctctccagctctcaaagttatcagggtaaagtatcaagaggttatgaaacgtctcacactgtgggagggaacaaatatgtcatgattttgttccagtttaatctgtttcacattta

SEQ ID NO: 877456 - DNA, 634 bp, Homo sapiens
agtgactcacacctgtagtcctagcactttgggacgccaaggcgggtggatcacgaggtcaggagttcaagaccagcctggccaagatggtgaaaccccgtgtctactaaaaatacaaaaattagccctgcgtggtggcacgcgcctgtaatcctggcaacacaggaggctgtggcaggataattgcttgaacccaagagtcagaggttgcagtgagctgagattgtgccattgcactccagcctggggtaaaaagagaaaaactctgtctttwaaaaaaaaaaaattaaacaaatagatcatcaagttatttatgacgattaaacaaaaggacacaataggttttctcttaaaaatcagcttgtatatgtatgcttctatggaatatttgtctgggcttcaggacagggatctcctgctacccctgctgtgtgaacttggataaggcaccagcctttctggcctcagtttccccatctacagaacaagagagagacatacaagtgatttttgaagacctctccagctctcaaagttatcagggtaaagtatcaagaggttatgaaacgtctcacactgtgggagggaacaaatatgtcatgattttgttccagtttaatctgtttcacattta

SEQ ID NO: 877457 - DNA, 576 bp, Homo sapiens
gggaactgatttgtaaaggggtatgaggaacaacattccctctggtacaaagctaactgtgttgggcacagctctaagcctcatactaatcttactggacatagctctaagcctcatactgatcttactggcatgttgctctaagccagtaactagcatgtcacctggcaactgagcagaagaacagaggtttactaggtcctgagggaggctgttactgcacaagttctttgctggtgacagcagaaagtacttaggggccattccaagggtctgccttgtttgcagagttgattcatttgtggttgccatataaaggcctctgaaccaacaattgtttgggagcaaaagcaaacsagtgccaagatccaagttctcgtactgtggctgtagggttgagggctgcatagggtcgaaaggtataagtcactgtaatatcagcgtggggacaccatgggtctcatcagtggttttgcccatgggcacagcccttgtggcggatgtctaattgtgtgcagcccagatgtcagcggaggcccttggagatcctattaaacttgacccgaaccccaatgc

SEQ ID NO: 877458 - DNA, 655 bp, Homo sapiens
caaataacacttttatattttcttatgcctgtctttactttaatctcttaatcctgttatcttcataagctgaggatgtacgtcacctcaggaccaccgtgataattgtgttaactgtacaaattgattgtaaaacatgtgtgtttgaacaatatgaaatcagtgcaccttggaaaagaactatcctgttcttttttagagaacaaaggaagacaaccataaggtctgactgtctgcggggtctggcaaaaagagtcatatttttcttcttgcagagagcctataaacggacatgcaagtaggagagatattgctaaattcttttcctagcaaggaatattaatatcaataccctgggaaaggaatgcattcctagggggtggtctataaatggctgccctgggagtgtcwgtcttatgcagttgagataaggactgagatatgccctggtctcctgcagtaccctcagtcttattagggtggggaaaaactccgccctggtaaatctgtggtcagaccggttctctgctcttgaaccctgttttctgttgtttaagatgtttatcaagacaatacgtgcactactgaacatagacccttatcagtagttctgcttttgccctttgccttgtgatctttgttggacccttatcag

SEQ ID NO: 877459 - DNA, 622 bp, Homo sapiens
ttaatttcaggttgccaacaaagtttgatgcatttgcatgttttaattagtttattgttttatatatttgtatataagttatacaaaatacatatattaatatatttaagtgtaatttaagaatttcacattatttatatattatatatgttattttatagcaatagaaatcccttagatgccattattataaaaccaatattactgattgctctttatggaacttttagtaagttgtccctgaagaaatccagttaactgattaattaatgtctgtcyatccacccattcacttatagtaagcttttattgagcatctactatctatctagtgttatgaaaagagctaaagatgcaaaaaaaaatgacccattttttttcccaagtgagtcacggttcagtgggttagataaatacacaatgccttcccatcacactataataagaacaataatcaaaatatatgtggggatacacagaatggcttttcagttaactcaaccttgttttcttggatatttagtatttaacttatattattgcctttgtttaaaatatcaaggtctgcctcaatgaaaatgtttccccttgggaattgttattctaaagcctcaaaaatgta

SEQ ID NO: 877460 - DNA, 614 bp, Homo sapiens
atctatctatatataagtttgggttttcaacatacccaatcatattacctgtgaataataacaattttacttctttctcatttgtatgccttttatttctttctcttgagttattgcactggctgagactatccagtacaatatagaatagaaatgacaacaccaagaatccttgtgctattcccaatcttgtggagcaaatgttaaatacagtactataaattgtgtttgtaacagtttttttgtagatctactttatcaaataaagaaaaatctacttcacttcaraaatgtttctatgttttgtgactatcacattttatcaagcatttacccagataatcatattattttttctcataatctgacaatgtggataattaaactaatattcaaatgttaaaaaccttatgatcctgtattattttttaaattttgcattaaaggcctttattagataaggcactattcatgtattctagttcttcttgtgtcaatttggtaagttgcatttgtatgggcaagtgtccactgaacctaagtgttcaataataatgccctcttagtcacctctgaaatgaacagagtacattgttatgatccttattagtttc

SEQ ID NO: 877461 - DNA, 596 bp, Homo sapiens
tcttaaactgaaaaatgcttcatggtttttaaaatttcttccatttccatttgacatactcattctcccaatactttaggctgagagtaaatggaatttattctaaaatttttaaaaaatatatatagacacttcttgcatctcagttaaggaaaggaagatatgttgcttacagccacatgctatctatgaatatatttacttggcttctctagttgtgatctcgcctcactgcaacctccaccatcagcgttcaagtgattctcctgcctcagccccctgagtagttgggattacaggcatgagccaccatgtccagctaattttttgtawttttagtagatgggttttgctataatggctaggctggtctcaaactcctggcctcaagctatccacccaccccagcctcccaaagtgaggggattactcactttgtaagtgagcatgagccactgctcctgttcatcagtgcactttattctttttgctaatcatacttgtcaatgtttgtaacatgaatgttcatgtcttgtagaccattcgttagagcgcttgtctctgattctccaatcaggtgcatgcttactaagaat

SEQ ID NO: 877462 - DNA, 670 bp, Homo sapiens
cttcatttgagatcacctcattctggacttcatcatccatatcactatcagaattttggtcacaacagtttaacaagtctctcggaagttccaaactttccctcagcttctcttcttctaagtcctccaaactgttccaacctctgcccattacccagttacaaagctgcttccatatttttagttatctttatagcaattccccacttctctggtaccaattttttgtattagtctcacgctgctataaagaactacctgaggctgagtaatttatgagaaaataggtttagttgactcacagttccacaggctgtacaaaagtcatggctatagaacaggaaacttacaatcatagtagatggtgaaggggaagaaagcatctctccacatggctggcaggagagagagagagagagtgagtgaagaaggaggtgctacacactttcccacaaccagatatcttgagaaatctatcacragacagcactagggggataatgctaaaccatcagaaaccacctccctgatcaaaacaccttccatcaggccccaactccaacactgggaattacaattcaacatgagatttgggtggggacacagagccaaatcatattaatgctcaacttttcttttctttctttttctttttttgttagataggttc

SEQ ID NO: 877463 - DNA, 679 bp, Homo sapiens
ttgataaccaaagaaagacacaatgagaacacttggacccagggtggggaacatcacacactggggcctgtcatggggttgggggctgggggagggatagcattaggagaaatacctaatgtaaatgacgagttaatgggtgcagcacaccaacatggcacatgtatacatatataacaaacctacacgttgtgcacatgtaccctagaacttaaagtataataataataaaaaaattgatataccttttaataaaatataaatagcaaaaaatttttttcctcccattctgtaggttgcctgttcactctgatgatagtttcttttgctgtgcagaggctctttagtttaattagatcccatttgtcwattttggcttttgttgccattgcttttggtgttttagtcatgaagtccttgcccatgcctgtgtcctgaatgatattgcctaggttttcttctagggtttttatggttttaggtcttacatttaagtctttaatccatcttgagttaatttttgtacaaggtgtaaggaagggattcagttttagctttctacatatggctggccagttttcccagcaccatttattaaatagggaattcctttcctatttcttgtttttgtcaggttggtcaaagatcgtgtggttgtagatgtgtggtattatttctg

SEQ ID NO: 877464 - DNA, 679 bp, Homo sapiens
ttgataaccaaagaaagacacaatgagaacacttggacccagggtggggaacatcacacactggggcctgtcatggggttgggggctgggggagggatagcattaggagaaatacctaatgtaaatgacgagttaatgggtgcagcacaccaacatggcacatgtatacatatataacaaacctacacgttgtgcacatgtaccctagaacttaaagtataataataataaaaaaattgatataccttttaataaaatataaatagcaaaaaatttttttcctcccattctgtaggttgcctgttcactctgatgatagtttcttttgctgtgcagaggctctttagtttaattagatcccatttgtcaattttggcttttgttgccattgcttttggtgttttagtcatgaagtccttgcccatgcctgtgtcctgaatgrtattgcctaggttttcttctagggtttttatggttttaggtcttacatttaagtctttaatccatcttgagttaatttttgtacaaggtgtaaggaagggattcagttttagctttctacatatggctggccagttttcccagcaccatttattaaatagggaattcctttcctatttcttgtttttgtcaggttggtcaaagatcgtgtggttgtagatgtgtggtattatttctg

SEQ ID NO: 877465 - DNA, 593 bp, Homo sapiens
caaggtaatttatagattcaatgccatccccatcaagctaccaatgactttcttcacagaattagaaaaaactactttaaagttcatatggaaccaaaaaagagcccacatcaccaagtcaatcctaagccaaaagaacaaagctggaggcatcacgctacctgacttcaaactatattacaaggctacagtaaccaaaacagcatggtactggtaccaaaacagagatatagatcaatggaacagaacagagctctcagaaataacgctgtatatctacaactatctgatctttaacaaacctgagaaaaacaagcaatcgggaaaggattccytatttaataaatggtgctgggaaaactggctagccatatgtagaaagctgaaactggatcccttccttacaccttatacaaaaattaattcaagatggattaaagacttaaatgttagacctaaaaccataaaaaccctagaagaaaacctaggcaataccattcaggacataggcatgggcaaggacttcatgtctaaaacaccaaaagcaatggcaacaaaagccaagattgacaaatggaatctaattaaactaa

SEQ ID NO: 877466 - DNA, 653 bp, Homo sapiens
catttctatagggggtttctgagttactaaagatagtacagaaataaaaaaaggaacttaatgaaaccaaaatttagcaccctagaaacaagataaaatgttctgtgccatctgtaagaaggctgttcaatacttttactctttactacatcaaaggcacagcagcatttgtttcctccccctttgggagggacaacagtcaacaaaaaaactggtaataaaatcaggataacagcaaaattatatatacacatatatagtttagaaaaaggaaaggaacacaggcatttatgaatctaagtttgagaaaacctgctaaagttcaaagatgaatcagttaaattgttttaggttctaaatagttttcatggaaatgagcacaaaggggagagcagggctaaggactaacaatacagtcaatgagggaggcaggttttgttctatcatttttctgttgctcttcctgtaggaggaagaayggctccttcagcacgagtgccagaatgagcaggcctgcatagcagggccagagctcacccacacacaaggaaagctggaaataaaactttgtctgtaagacactgagatttagagatagttggctatgcagtagagtcaagagaaagctggctgatgaaaccctaattggaaaa

SEQ ID NO: 877467 - DNA, 593 bp, Homo sapiens
gttatttgagacaaaacatgtcagaatgctttgtaaacttgcaaagaatactgaaaagcaaggtattttgttattttttaaaattgaaagaaagttcaaacaacacaaccttgttgacatccttgattgaaataaatgcaaaaatgttataacggttggaaaaatgaacatgaagattgaaggtacacaccaaaaaataacaggtgtcaactgaaattctccaatttagataatataaatcattttctcccatgtaaatagatcatcatccaggtcaattcatatatagcttaatttgatgttgtggggaaaacaaaaacatataggtcctgacatattctaatttcttcatatacttttttaaaaataaaactttcctcttacagcagttttaagttcacaataaaattaaaaggaaggtccagagattttytatatatccccttcctgtccccacatgcacattctcccccactatcaacttcccctgccagattgggccatttgttacaattgatgaacctccattgacacatcattatttcccagagtccatagtttacttcagggtttatttactcttggtgttttac

SEQ ID NO: 877468 - DNA, 587 bp, Homo sapiens
aagtgtgcttgacatgttggaaaaatggagtcaggccgggtgcggtggctcatgcctgtaatcctagcactttgggaagccaaggtgggtggatcacctgaggtcaggagttcgagaccagcctgaacaacatgacaaaactctatctctactaaaaatacaaaaattagccaggcatggtggcatgtgcctgtaatcccagctacttgggaggctgaggcaggagaatcacttgaacccgggaggcggaggttgcagtgagccaagatgatgccagtgcactccagcctgggcaacagagtgagacccttatytccaaaaaaaaaaaaaaaaaaacggagtcagtgtggctagagaggttaacacagaggaaagaggtgggagaagctggcgaggcagcaggggacagaggatagaacctagaaccttgaaaccatcatgcactggccaggataggaagccatgggaggtggtaaacggggagcaagtcatctgacttgggtttctgctatgtggaggacaggcaaagggggaagcagggagacaggagtctatggcagtaatcggccgagagatagtgggggttt

SEQ ID NO: 877469 - DNA, 660 bp, Homo sapiens
  misc_feature 609: n = A,T,C or G
tctcccaccatgccgtgcacgtggcaggtacctgatgagtacttattctttgcaggggctgggggatgggaggcagaggggaacacagaaacagtgcagagggaggatgaacacagagggcttgtttgtgaaaagcctgatcccgctaaactgggggcctgtgcacctgggaacctggaggagagaggttgctagacagggtggcagtttagcatgaacacagtagaacgtgaggccacctttgatctttcctgggtatccaggctcatgtttccatatgaaaaccttccctgtacacaatgttactgtaataaaactggccattgacaaatctgctggaacctgtatatargagggaacactgcctataatgtacatatcttggcaggcctaaccacctactctagcacatccattcatctctcatccattcaaacatttcctgagcccctgcctgtgcccagatcccacaccaggtatgggggctatggagataatggagacatcatccctgccatctctttgagcagcgcttggcaaatgcatggcctacaagccacaaccagcccactgcctgtttttgtaagcatgtgtttcacgtggaaacancagccatgctcaatcatttatatactgtcagactgcttttgtactacaacg

SEQ ID NO: 877470 - DNA, 660 bp, Homo sapiens
  misc_feature 609: n = A,T,C or G
tctcccaccatgccgtgcacgtggcaggtacctgatgagtacttattctttgcaggggctgggggatgggaggcagaggggaacacagaaacagtgcagagggaggatgaacacagagggcttgtttgtgaaaagcctgatcccgctaaactgggggcctgtgcacctgggaacctggaggagagaggttgctagacagggtggcagtttagcatgaacacagtagaacgtgaggccacctttgatctttcctgggtatccaggctcatgtttccatatgaaaaccttccctgtacacaatgttactgtaataaaactggccattgacaaatctgctggaacctgtatataggagggaacactgcctataatgtacatatcttggcaggcctaaccacctactctagcacatccattcatctctcatccattcaaacatttcctgagcccctgcctgtgcccagatcccacaccaggtatgggggctatggagataatggagacatcatycctgccatctctttgagcagcgcttggcaaatgcatggcctacaagccacaaccagcccactgcctgtttttgtaagcatgtgtttcacgtggaaacancagccatgctcaatcatttatatactgtcagactgcttttgtactacaacg

SEQ ID NO: 877471 - DNA, 666 bp, Homo sapiens
aaggcatcacacactgtgatgggccacatgagagctgcactcaggggcagaggaagccagaggggctgtgggaagcagagccatgtataccaggagggtgaggtgacccctggttcccatgggaagatgtaattggcttgtttaattttatggctggtagggagctgaagcccattcgattgaggaccagaagaagtgcagtcggcccagctgataggggaattagctaggtggggagcttatctgatgagaacggggaggcgaggtctttggggccttataaggctcaaagaggtcaagtcagcactttaaattgataatgctaagcagatttacttattacaggacttcctgaagactctagtgtgctaacgtcagtgtactttcaagaaggggtaatatatgtggtgcttcttaaacctgttgatgcatgctacagttgttaaagaggaagattttgttggttggtgtttaagaaattcattttgaaaaatcctgctttagaacattgatrtattcaacatggtggctaaaagtgattgtctacttaattaacttttattataagaagttgtatggggaaaataaaataaaataaactgcatattaactaaggtaaaatatttctgcatgcctttcttttatttgaaaattcccatccttatt

SEQ ID NO: 877472 - DNA, 544 bp, Homo sapiens
tctgtttttattttatagttactgtagcctttcatatttctccgaaagttcaaattatatttattttaaaaatcatcttctctcttccggatgcattttgtcctgaagagttgcacatgctgcctctgtgtcatggtgcttgtgtttgctgcttctcaggcttgtaaacatctccctcaagcctcccagctctctcctcctccatggtcggcttattcagtctccacttgtattcaagcccttctttctttctcagctcaggatgttttcttgttaattgccccgagaagtagtcgtggtggtcatgagccatkatccagatgctgctgcctcccaggcccagccccaaaggatcacatgcaaaacagaggaaatgcactgcagtgtgttatcaagctgggaccccagtccagagacagatgggaaagtcggcggaggtgagggcagatgggtgtgaaccggagatgctggtcttgattcccggcctcggcttcctgcacctgtcggcccacacttctgtgcactcccccatctcacctgatag

SEQ ID NO: 877473 - DNA, 681 bp, Homo sapiens
aaagtcaaaaaatcgtaacttgaaccattgtaagttgaggcccatctgtgtagcttaattattaattaagacttaatgcctaggcactgtggctcatgcctgtaaccccagcactttgggaggctaaggcgggcggatcacctgaggttgagagttcgagaccagcctggccaacatggcgaaaccccatctttactaaaaatacaaaaattagccgggcatggtggcaggcatctgtaatcccagctactcaggaggataaggcaggagaatcactcgaacccaggaagcggagattgcagtgaaccgagatcatgccactgcactccagcctgggcaacagagcaagactccgtctcaaaaaaaaaaaayacttaataattcagactgatcatagtttaatgtgtttcccatctatggcattttcttttagtagggcttccaagagatggcataccttagtgcaaatattaatagtagaatcatctcccaacaataacatattagagggaggctaataatgttattggaacatccctaccatttattggtcactgtttacatgccaggcatagtgcaggaagcttcgctgtgttttccagcttaatctttgcatccctacaagttatgaatcacagtaccattttaaagatgagaaaactgactcactgtgatattaca

SEQ ID NO: 877474 - DNA, 607 bp, Homo sapiens
tgaaatattatttgattcatcattataatagaaaatatttctaattgtagaaacccagcttggctgggcgcagtggctcacgcttgtaatcccagcactttgggaggccgaggcgggtggatcacgaggtcagaagctcaagaccagcctggccaagatggtgaaaccctgtctctgctaaaaatacaaaaaattagttgggtgtggtggcacgcgcctgtaatcccagctactccagaggctgaggcagagaatcgcttaaacctggaggggcagaggttgcagtgagccgagattgcgccgctgcactccagcctgggggacagagtgagactctgtctcaaaaaaataaaaaaaataaayaagagatcaagaccatcctggccaacatggtgaaaccccgtctccactaaaaatacaaaaattagctgggcatggtggcacgagcctgtagtcccagctgctcaggaggctgaggcaggagaatcgcttgaacccgggaggcggaggttgcagtgagctgagatcacgccactgcactccagcctggcgacagagcaagactccgtctaaaaaaaaagaaagccaacttaagtgcccataatgg

SEQ ID NO: 877475 - DNA, 607 bp, Homo sapiens
tgaaatattatttgattcatcattataatagaaaatatttctaattgtagaaacccagcttggctgggcgcagtggctcacgcttgtaatcccagcactttgggaggccgaggcgggtggatcacgaggtcagaagctcaagaccagcctggccaagatggtgaaaccctgtctctgctaaaaatacaaaaaattagttgggtgtggtggcacgcgcctgtaatcccagctactccagaggctgaggcagagaatcgcttaaacctggaggggcagaggttgcagtgagccgagattgcgccgctgcactccagcctgggggacagagtgagactctgtctcaaaaaaataaaaaaaataaacaagagatcaagaccatcctggccaacatggtgaaaccccgtctccrctaaaaatacaaaaattagctgggcatggtggcacgagcctgtagtcccagctgctcaggaggctgaggcaggagaatcgcttgaacccgggaggcggaggttgcagtgagctgagatcacgccactgcactccagcctggcgacagagcaagactccgtctaaaaaaaaagaaagccaacttaagtgcccataatgg

SEQ ID NO: 877476 - DNA, 604 bp, Homo sapiens
gcgatcaatgtcagaaaactagaacaaatagaaacacattttccagtagagagacattcagttgactccattttggttttctttctcggtttaacttttgatttacccaagaaagaccaggaaatcagtgattgcctagagtgaaaactgctagaagaagagattatatacaaagaaggataaggaatattttggatatgatgaaaatagtctgccctggttgtggtggtggtttcataggcatatacaactgcgaaaactcctagaattgcatactttaaattgatacagtttaccctacataaattccagctacattatttgatatgggtgaaaatccatttcagagtttggcttaaayactatagaagtctgggaatgaggactcccattttactggactagaccaatccaaagcaaaattaaaaaaaaaataaagtgagtcgcagatgctaggaaagatcattgtagaaattgctcaatatttttaggtgtcttgaatacataattgatattctttttctttgaatctcaacattgaagacagattctgaagaccagcaaaaagactagactgatgtaaatacacatttcctagctaatc

SEQ ID NO: 877477 - DNA, 640 bp, Homo sapiens
acaaaacatttaccattttgcttccatgtctgtggtaggcagaatattggctcccccaaaaaaaaatctcatccctatccccagaacctatgaatgttactttacatgacaaaaaggaccttgtattaatgttactttacatgacaaaaaggaccttgtattaatgytactttacatgacaaaatggaccttgtattaagattaaggttaaagattgtggaggtagagcaagatggccaaatagaactctccagtgaatgaccccttgcaggaacaccaaattaaacaactaattaaagcaccttcataggaacaaaaaaacagggtagcaatcacagtacctagttttaacataataacaaagaaagagatattgagtggataggaaagatagcctcacattgtctacactgtcccttccccaactgcaggcagtgcagcccagagagaatctacatggttagggaagggagagcaaagtgagtgttgaactttgcattggaactaagtgctgccctgtcacaacaaaacataacatagggcagaattctgccagtgtccacaaagggaatatttatagcagccctggacccaaggggaattctccactccagtgggagaaacccacatcctggtcagc

SEQ ID NO: 877478 - DNA, 608 bp, Homo sapiens; identical to SEQ ID NO: 876830

SEQ ID NO: 877479 - DNA, 577 bp, Homo sapiens
aactcctgaacattccctatctgtaaatgttccctcccaccccatccatggctttcctcaaaaacaacatgacctggccgggtgtggtgacttgcctgtaatcccagccctttgggaggctgaggcgggtggatcacctgaggtcaggagtttgagaccagcctggacaacatggtaaaaccccgtctctattaaaatacaaaaattagccaggtttagtggcatgtgcctgtaatcccagctattcgggaggctgaggcaggagaactgcttgagcccaggaggcggaggttgcagtgagccgagatcatgccactgccactgcactccagcctgggcgacagagcaaaactccatctcaaacaaacaaacaaacaaacaaacaaacaaamaaaaaaaacccaacatgacccatcatgtaaggggctttgtttttttgtttttggtggtgcgttgtgcagagatttgagatgaaggttgaaccagcaaaagtttttatgaccgccttgtcccagcatgaagaccagagggccagagccacctgctgacatctgctgagtattgcttgaagtgcctc

SEQ ID NO: 877480 - DNA, 637 bp, Homo sapiens
ttatgtatttttctcttctttgatcttttctttttttttttttttttgagttcttggcctccttgctgttttcatttttatccattttgtctcctagtttctcttctccattagtaacttttatttcataagcctatttcgcttacctttttcacatcttgacatgcgagtttctaatcacagacaccctattttgtcgcttcactctgtaggcttccacttkttggtaaaattttgataatttttaagtgtttttaagccaatatgtctgcttctgtgctgcatatattctgtacccaggatccctgtttctcatgattatgtattgcaatttttgagggcaaaatgtgtgaagcttttgcagaggctcaaaatgttagacatggctttttcttccaagagagtgaatgataataactgtttatctctcagagaactaaaatttggaactaaggagggagtttgtttctcatgaataatttaagcccaaaaggaaaaagagaacaagcgtaacacctcactctcaagaaaaaattaacagtttggaaaaagctaaagactcaagttcacccaaggcatagtgtctattgccaaacaacctaattggctatagttttcatacacacacactgtctca

SEQ ID NO: 877481 - DNA, 633 bp, Homo sapiens
ctgaccaactacaggagtttctgttatcctttttaaatgtttaaaatttccctatccaataataataataacaataatagtaataaacagaacccacatttacccacatttaattgtctattacagctaagagaaattggctttacctgttggcctcattatagtcacccaattccatttattcaaatgtgtacaatgtgcttattacgcaccaggcactgtgctaggcatgagacaataccagagcattctttccagggctcactgtcacagtcaggccggtacacaggaaaataattacagccgtataatgcttgcattttaataaaagcatgggctagaccctagaaggagtataagaaagaaaactgaactctttctggagaggtcraagaaggaacttgggcatcactgtgttgagttgcgaaggtgtctgtgcatgaagaagatggaaggatatttcagtcacagagaacagctgtggcagaaaagcaggaaaaagcaggatttggaactgtgttttctaacatgtgttatgtaacttaattaaaataaaataaaatttcaaatgctgctactcaggtaccctagctgtatttcaaatgcttcccagtcacatgttgtcagtgacta

SEQ ID NO: 877482 - DNA, 681 bp, Homo sapiens
aggatctcattcttggttttgatatttaacaatatcagccctgcagctacaacaaatgaatttcctttatagtcgccatggaagttctcaggttttcaaaccgtggcttgaactgagaattaaggaacctaagcttgttattttctgttcrtaatcactcaaggaccctcaactgaatccattccaccccacagtccttacagttatcttgactgccataacattcagtgcagcagtcactcgggctcccaaggcacgtgtttcagttggcactttgccacaatcaaccacaggtcattgcttgattaattgtgataccactgcatgtcataggttgctagtatcccattgcacattgacaaggagctgtggaatgtgcccaaacataaaggaatgaccaacacaacctcccagattcatctctgtggaaatatctcttggaacaatgccagcattaattctttcagtgagggtccaatcaggaggcagacaaaacacaagaatttgaggagggaatgtttgaagtggacatttatttactataagtggattgcaatccagagcttgttagaggctacacagaatagtcacagtgtgcggcaccagtggaactttccagaaatcttcccacttaggtgccagggaaaggtgttcacaggtaggtatattattggaagcact

SEQ ID NO: 877483 - DNA, 681 bp, Homo sapiens
aggatctcattcttggttttgatatttaacaatatcagccctgcagctacaacaaatgaatttcctttatagtcgccatggaagttctcaggttttcaaaccgtggcttgaactgagaattaaggaacctaagcttgttattttctgttcgtaatcactcaaggaccctcaactgaatccattccaccccacagtccttacagttatcttgactgccataacattcagtgcagcagtcactcgggctcccaaggcacgtgtttcagttggcactttgccacaatcaaccacaggtcattgcttgattaattgtgataccactgcatgtcataggttgctagtatcccattgcacattgacaaggagctgyggaatgtgcccaaacataaaggaatgaccaacacaacctcccagattcatctctgtggaaatatctcttggaacaatgccagcattaattctttcagtgagggtccaatcaggaggcagacaaaacacaagaatttgaggagggaatgtttgaagtggacatttatttactataagtggattgcaatccagagcttgttagaggctacacagaatagtcacagtgtgcggcaccagtggaactttccagaaatcttcccacttaggtgccagggaaaggtgttcacaggtaggtatattattggaagcact

SEQ ID NO: 877484 - DNA, 586 bp, Homo sapiens
gccttagtaatttgttcagtactgtatggttctggatttgcaaagtaaatttgaggagatctacatgactaacgaacactcttgctgtacctaggcaaataatccacataaacctaatgaaatttgctttttactgatcaggaatacttgtggcagattccttttgatgaaaagtaagagactgttaagaaacactgtcaaagccttgaaaaaggatacaataaattattgggcrtccctttagtggtgtgctaggtactatctaatggatcctctgcatattatctgatgggatatgtaccattgtctttttattggacagactgttatacaattgtaaatgtagatgttaaattgtaaaaaaaaaaaaaaaaaaaaaggaaagtaatgcaactgaaccttaactacaactaatttctgctctgtagaaaagatggtcccattaggtttattgccctataccagtgatccccaacctttttggcaccagggaccggttttgtggaagataatttttccacagacacagtggggggtgcaaggggagatggtttggggataaaaatgttctcagatcattaggcat

SEQ ID NO: 877485 - DNA, 576 bp, Homo sapiens
agttcttataagcagaagggagaaggttgagagtcagagaaagagattggaagatgctatgcttctggctttgaaaatgaaggatggagccatgagctgaggaatgtaggcagcctctagaatatagaaaaagcaatgaaactgattctgtcctgtagcctccagaaggaacataaccctattgacaccctgatttcagcccagtggttgtgattttggatttctcacctccagaactataagataataaattcatgttgttttaagctttcaagtttgtgatgatttgtgacagtagtaataggaaactaatatagaagatgatgacytcaagaaaaagcataatcataggccaggcatggtggctcctgcctgtaagcccagcactttgggaggccaaggtgggcagagttcttgagtccaggagttcaagaccaacttggcaaacatggtgaaaccctgtctctacaaaaaaaaaaaaaaaggaagaaaaaaaattagctgggtatggtggtgcatgcctgtagttccaggtacttgaaaggccaaggtgagaggattgtttgagcccagatc

SEQ ID NO: 877486 - DNA, 604 bp, Homo sapiens
catgatcttattgatatgtggaatctaaaaaattcaaatttacagaaggtgagagtagagtggtggttaccagaagctgaagggatggcggtgtttctaggaggtgttggtcaaagggtataaattttcagttagactagaggaatacattttactatctatttcacagcatggtgttcacacttaataataataataataataatagtgataatattatatatttcaatattgctgagtacatatattctatttaatatatttamgcctagcctttctaactactacagaaagagaagctaaatgtctgttgtaagtatgcttatcttacaaaaaataagttcatttgacattcatgtaataaatctaatctttgttttattgattttcagattaacaaagaccttatctgaatactctttacaacttttatgtaaatctaaaattattccataggagaaattttatgtaaaaaaagataaaagtatgaagcatgtttcagtttgggtatttcactttgtattcactgaatattgaaaaaattaaaatactatcaactaatacataaagtcatataaactcctaaataaccgctgaggaacct

SEQ ID NO: 877487 - DNA, 541 bp, Homo sapiens
  misc_feature 138: n = A,T,C or G
ctccatatattaatttataattttgcttgtaacttctactctccttcccctgcctttaaaaacccttgcttcccgggaggcggagcttgcagtgagtcgagatcccgccactgcactccagcctgggcgacagagcgnagactccgtctcaaaaaaaaaaaaaaaaaaaaaaaaacccttgcttacaagacactgggaggtcaggatttaaacaatggctgcctggtcctccttccttggcaccctacaaataaatgccttctcttctatagctgtaagaagccttgatgtagatacctggatttactgtgccaggcgagcagaccccagttcagttaaccctycaagggtgttgtgagtggacaaggcaaacacagaattgggccaggtggattgtaatgattttgtaatgattctcattgtggtgtgagtattcacacctcctgaaatggccgggaaatggatttttttagtcacttggtgacccagggtcacaggctttctttgtgtctggctgggtttccactaaaatgcttatgat

SEQ ID NO: 877488 - DNA, 501 bp, Homo sapiens
tgggcctctttgtcccctgctaaagaaaaatgactgggtttttttttttttttttttttttttttttgtatttgagcttctgtgtggttcaggaactcaatgcaataactagctttgagttacacatagagagggaagagaggccttggatcaacttatgaactcaggcatttagcaagcacaggaactaaaagagagacacagatagagccacaggagagtgatcaactttttaagccgtgtgtgactcccaatcaatgtactggattctagaatgtgtcarattagcaattttttccccttctcttgggagctgaaggagcagagaggcagcacacagagtgaggccaatgcctgctgcccttattcccgcaacgtggtttcatctgttaacccagctccatttagcagccattcttgcgatcaataattcagagatataaatattttccttagatgtggatactattagagttttaagaaacatttgcctctatttcc

SEQ ID NO: 877489 - DNA, 617 bp, Homo sapiens
catgtttatcgatatctgtaacccatattttatttacctaataatgtatttagtcagatttgtgtccacttcagagtaatgagctcaatataatttcacccttagcgttttgctcagaaacaggtctcacaaatcaacttaacagcaacaaaaatagcagaaaaaaacccttgcatcacttcatcacgtcattcccaaactgtgtatctcagaatcttggatccaccatttctcacaatgcattcatgctttgctatagactgaattgagatcccccagattcgtatgttgaagacctaacttttccaatgtgatggtgtttgtagatggggcttttggaagggaattaggtttagatgaggtcatgaaggtggagccctcacgatgcgattagtgctcctaaaaaaaaagagacagcagaagcttgcctttgtctctctctctctccctctctctttctctctctcatgagagcacayggagaaggaagccatctgtaagccaggaaagagccctcatagaggaaccaaatggaccaacaccttgctcttagacttccagatgccagaattgtgagaaacaagttcctgctgctttaggctcccggtttatgatat

SEQ ID NO: 877490 - DNA, 605 bp, Homo sapiens
agatacccaaaaatgtggaagcaactttggaactaagtaacaggcagaggttggagaagtttggagggctcagaagaagacaggaagatgtgggaaagtttggaatttcctagaggcttattgaatgactttgaccaaaatgctgatagtgatatgaacagtaaggtccaggctgaggtgatttcagatggagatgtggaacttgttgggaactggaacaaaggtcactcttgctccacaaagagactggtggcaytttgcccccaccctggaaatctgtggaactttacacttgagagagatgatttaaggtatctggggggaaagttttctaagcagcaaagcattcaagaggaagcagtgcataaaagtttggaaaatttgcaggctgctgatgcaacagaaaagaaaaccccatttcctggggagaaattcaagcttgctgcagaaatttgcataagtacagaggagccaaatgttaattgccaagacaacgcggaatatgttcccagggcctctcagagacctttatggtagaccctcccatcataggcctggaagcctaggagaaaaagaatggtttcctgggctggaccctgtgcccc

SEQ ID NO: 877491 - DNA, 616 bp, Homo sapiens
taagcttgttgcaaaccagaaacttcaaggatcccatgcaaacaatattactaccacttgcagcacgtactcatgcaggtatctaaagttagtactaagacgattaaaaacagccaatgctgctgtaattatattttctgaatccctagttgggacataagggccaatacattatagcacaatgaagctactgaaacagaatatttgacatcgaggctgtcttggaaaattgggaatataccaccttgcaataatagtaataataaaaaataacatttmttgaaaacttacattttgcaggagaatttcctaagtgctttacttgtattaatacatcaatcctcaatataaccctatgatgtgggtactactattgtccatattttacagagggaaaactgaggcactgagttgtcagtaacttgcctgagatcccacagctagtaactatgtaagtagagtcaaattgaagcttaggccatgctgaaccagaacccttgctcttaaccatcaatactctactacctctctcccattcttggcagcaaaatctctgttttaaccctcctaggaggatacttgaacttcaaatactatttccagaaatacaaataca

SEQ ID NO: 877492 - DNA, 503 bp, Homo sapiens
tgccaaaagcaattgtaacaaaaatcaaaattgacaaatgggacctaattaaactaaagagcttctgcacagaaatataaactatcagcaaagtaaacatcctagagaatgggagaaaatatttgcaaactatgcatctgacaaaggtctaatatccagcatctataaagaacttacacaaattatcagcaaaaaaaccacaaccccattaaaaagtggataaaagacatgaatggacacttttcgaaagaagacatacaggaggtcaacgagcatatggaaaaatgcttaacatcactcatgattaaagaaatgcaaatgaaaaccacaatgagataccatctyacaccaatcaaaatggccattattaaaaagtcaaaaaataatagatgctggcaagattgtggtcaaaagggaacacttgtatactgctggcaggaatgtaaattagttcagccattgtggaaagcagtttggcaatttctcaaagagtttaacagaat

SEQ ID NO: 877493 - DNA, 521 bp, Homo sapiens
accttgaaaaggttgaaacttttgatgtcttgataaattaaacactaaccacatattgattatacatctttcagataaaagtgattatttttaaagaactcaattttgaaagaaacttttttaaaaattcaaattaatctgtacaaaagccagactagtgcccatgcaatgagaagcattatcacacttgcaggagaattttcacagatcagcacaaccaacattagaattcacaaccaaatctgccagcaacctcggagtgtctgttcttccacactctggtcaacagcaatataaatcaagagcatgttctcagttgagaggagatattgaatataytgctagaaggaaagaaaaattcatagggggacaattctgtgcaacactaggcaattgcaaaaatccttctgcaaagagaataggggataagcaatcatgcttataacaaggttgggtactctgaaagtcagggtgtgatttttgcattacactccttgcctagagcaatgtttctctggaca

SEQ ID NO: 877494 - DNA, 639 bp, Homo sapiens
tattcatacaataataaacaccgttttgctcaccaattatttctagttttccttctggccatgggaaggctgtactgtcctgcccccttggagttaggtgtggtcacatgacttgttttcccagtgaaacgtgagcagaagtcacatgtgtcactttaggatgtacaatttgccatactggatattttccactgccatggcaatcctcacttctgccacattttattgaccaaagcatgtcagaaggccaatctagaatcaaggagtggggaaatagattctacttcttgttgagaggatgtgcaaagttacattgcaaaagatgtagggaagggtgaagaattgtgactgttttrcaatcaatgtgtctaccacaattattttctcctttcatttttctttcctttttaaaatttatttaatttttaagcctttaaaaattttcagttgtatgcctatttcatttatattttaaaaacttatacatttaggtctatcaatgtacattttcataaggcttttggggtatcctaccagttctaatgtggtagtgttgccctgtaaatggactaaaattataattttacttctttctttgatctaatagccatttagggttatgttttaaaacatttagat

SEQ ID NO: 877495 - DNA, 583 bp, Homo sapiens
gacttttggaacatgcagtttcacaaactgtcattattgaagagtttaacaatacccatcttcaaatttagaacttgccttttctataaaaatataaacctaatattaaaagtccccagggactgacagaacagataatgacttatcagacagccaagtggtttatgcaaatcctagtgggtttctaaaaggaagcaatgcattttcaattaccattcacatacttttgtgtttttatcacgaagtatttttctaaaagaaaaagagggggagagagagagagacacttgcctagataacagaattstttgttttgctttggtttttatgttttaaggctttgagctccacatgaaagactcaaaacgtcttgtgataagtaaatgtgtataaatatctgctggtaaatcacaagcaacactttcacaatcatggcccccagaaggaaatacagggagcatgcactgctccatggactactacacttcacttgaagaccacaggcctggttaggaatagggttcactttttgccaagtcactgagagatagaaaaatcatataacctcccttaagtcttgttt

SEQ ID NO: 877496 - DNA, 614 bp, Homo sapiens
tattttaggttcaggggtacatgtgcaggtttgttatataggtaaacatgtgacttgggggtttggtgtacagattattttgtcacctgggtactaagcatagtatttgacagttttttttttctgaacttttctcttctcccatcctcctccctcaagcaggccctagtttcttttgttcctctctttctgtcaacatgttctcattattcagctcccacttataagtgagaacatgtggtgtttgtttttctgttcctgtgttggtttgggaaggataatggcctccagttccatccatgttcctgcaaaggacatgatctcattctttttttatggctgcatagtattccatggtgtatatgtaacacattttctttatctagtctatcattgatggccgtttaggttgattctgtrtcttagctattgtgaagagtactgcaatgaacataccaatgcatgtgtcttgatgatagaatgatttatatttctttgggaatataaccggtaatgggatctctgggtcaaagggtagttctgtttttagttctttgaggaatcaccacactattttctacaatggttgaattaatttacactctcaccagcag

SEQ ID NO: 877497 - DNA, 588 bp, Homo sapiens
cacagtgttagattaactctttaggttaactatctcaccccacccccgcttgtactgagaaacacttgactgctcctgcttgacatgagcctcgctgaggtataaggcatgccaacaccttggtattcaccttgctgtcaagacagaaaggcaccagctttgatgctgcagctcacattcaatcctttgttctctcagagctgattcaaaaggtcttaagaacaccatgagggttcatcgatcatacyagtgtgtttggattttaatttccaggcagtggggatgcaccaagattcttgaaggaggaaaatgctgatcaaatttccattttagaaaaagaaatctggcagcaatttatgtagctgtattgaattggaggtaggagaagctggaggcagggaaaccatgcagtgtgctggtaggagtgaatatagctcagcggtaagcgtctgacagcacactgaaggcacagttgaaatagtctaggtgtgagatgctgaggcctggcctcaagcatggcaaaaagaaaaatggatttcttctgaaggagacatgctagaatttagatatgcagaaaaagaacaggta

SEQ ID NO: 877498 - DNA, 659 bp, Homo sapiens
agtgttgtttccctccctgtgtccatgtgttcaacttattgttcaacttccacttacgagaacatgtggtgtttggttttctgttcctgtgttagtttgctgaggatgatggcttccaatctcatctatgtcgctgcaaagaacatgatctcattcctttttatggctgcacagtattccatggtgtatatgtaccacatttctttatttgtccagtctatcattgatgggcatttgggttggttccatgtctttgctattgtaaatagtgctgcaataagtatatgtggccatttgtcttacagtagaatgatttatattcctttgggtatatacccagtaatgagattgctgggtcaaagatccaagattctagatccttaaggaatygtcacattgtcttccacaatggttgaactaacttctatacccaccaacagtgtaaaagcgttcctattcctccacagcatcgccagcatctattgtttcttgactttttaataactgccatttttgactgatgtgagatgctatgtcactgtggttttgatttgcatttctctaacgatcagtgatgttgagctttttttcatgtgtttgctggccgtataaatgtcctcttttgagaagtgtctgctcatatccttcgcccactttct

SEQ ID NO: 877499 - DNA, 586 bp, Homo sapiens
ctcaataaattaggtactgatgggacatatctcaaaataataagagccatatatgacagacccacagccaatatcatactgaatgggcaaaaactggaagcattcccttggaaaactggcacaagacaggcatgccttctctcaccactcctattcaacatagtgttggaagwtctggccaggacaatcagacaggagaaggaaataaagtgtattcaactaggaaaagaggaagtcaaattgtccctgtttgcagatgacatggttgtatatatagaaaactccattgtctcagcccaaaatctctttaaactgatgagcaacttcagcaaagtctcaggatacaaaatcaatgaacaaaaatcacaagcattcttatacaccaataacagacaaacagagagccaaatcatgagtgaattcccattcacaattgcttcaaagagaagaaaatacctaggaatccaacttacaagggatgtgaaggacctcttcaaggagaactacaaaccactgctcaatgaaataaaagaggatacaaacaaatggaagaaaattccatgctcatgggtaggaagaatcaata

SEQ ID NO: 877500 - DNA, 586 bp, Homo sapiens
ctcaataaattaggtactgatgggacatatctcaaaataataagagccatatatgacagacccacagccaatatcatactgaatgggcaaaaactggaagcattcccttggaaaactggcacaagacaggcatgccttctctcaccactcctattcaacatagtgttggaagttctggccaggrcaatcagacaggagaaggaaataaagtgtattcaactaggaaaagaggaagtcaaattgtccctgtttgcagatgacatggttgtatatatagaaaactccattgtctcagcccaaaatctctttaaactgatgagcaacttcagcaaagtctcaggatacaaaatcaatgaacaaaaatcacaagcattcttatacaccaataacagacaaacagagagccaaatcatgagtgaattcccattcacaattgcttcaaagagaagaaaatacctaggaatccaacttacaagggatgtgaaggacctcttcaaggagaactacaaaccactgctcaatgaaataaaagaggatacaaacaaatggaagaaaattccatgctcatgggtaggaagaatcaata

SEQ ID NO: 877501 - DNA, 684 bp, Homo sapiens
cactcatcacagaagtcaaaactagaatttcttggcaagtctcaccactgtgggctaaagtgctctgggctcttaggtaaacttcaaaggcagcctaggacacaaggcctgcaattcctaggcaagtcctagtgctgggttggacttagagccagtgcaataggggagcacatgacctatggagacaccagccagggctgccaaggaagtgcttgtgccacccctcccctgaccccaggcagtgcagcttgcagcaacaaaagtgactccttccttctgcttgaggagaggagagtgaattgtgaagagtaaagagggctttgtcttgcatcctggatgcaactaactgaccacagtaggataggggactgggaagagttatgaagcccacatcctaggccctagctcccttctatgtgaagtagcaagcttctgtacatagataaaatcacacacatatatttacatttraagattattacctgaaacatcttaagaaacagataatagtgacttcctctgatgaagagaactaggagactgcactcagatatggacaagagatttatttctcattttatattattttgtacagtttccatttttgctatttatgattatccatttggctttcaatttttcttttaaaaggtagaaatattacattaaaaatctgtatacagt

SEQ ID NO: 877502 - DNA, 669 bp, Homo sapiens
gatgatgatgaagaagatagataatagatagacaaccattttatgagaaatatctaaaccagtaaataaatttttctaacacttgctgtaagatatcaaatgctaatcagtactctgtgtcatattttgtaaatgaaatcatcatataagtttattgagtttttttgagtacctaatgacttaataaaaaaaatatgggagcatatgtagtaccatgcttgtatcaatacggataaagtatctggaagtctttgctgagaatctttttgtgctgctgagattattccactgatgtggatggtccatggctgttatgtgaccgtctgtactacatgaccatcgtgaatcaatataggtgtagccatctcactggaatggcatgtactgaaagctttatccaggcacagtttagatcctctccccagtctgacttcctttctatgaccccaatgtcatagctcattcatgtgtgacttaaacacttttttgaaactcctctgcatgggtactactaatacaattsgtttctttgttgctgccaatggtgggttcaactacctgttaaacatcattttcttgatggtttcttaagtggccatcctatgtactttgaaaactcacagcttggaggaaagatgctaaagttctctacctgcatctctcacacca

SEQ ID NO: 877503 - DNA, 561 bp, Homo sapiens
ttgatgatggtgacattcagttggtgttttggtttcgatgtcctttgtatttgttagttttccttttaacagtcaggtccctcagctgcaggtgtgttggagtttgctggaggtccactccagaccctgtttacctgggtatcagcagcggaggctgcagaacagtggattttggtgaacagcaagtgctgctgcctgatcattcctctggaagttttgtctcagaggagtacccggccgtgtgaggtgtcagtctgcctctatttggggrtgcctcccagttaggctactcgagggtcagggactcattgaggaggcagtctgtctgttcttagatctccagctgcatgctgggagaaccactactccttcaaagctgtcagacagagacatttaaatctgcagaggattctgctgccttttatttggcaatgctctgcccccagaggtggtgtctagagacacaggcaggcctccttgagctgcggtgggttccacctagttcaagcttccaggccgctttgtttacctactcaaggcttggcaatggcgggtgcccct

SEQ ID NO: 877504 - DNA, 506 bp, Homo sapiens
tggaaacactgttttggtagaatccataaagggatatttgggagctcattgaggcctatggtgaaaaaggaaaacttttcagatgaaaactagaaaaaagctttctaagaaactactttgtgatgtgtgcattcatctcacagacttaaagctttctttgtattcaatagtttggaaacactgattttgtaggatctgcgaatggatatytgggagcacattgaggcctaggttgaaaaaggaaatatcttcagataaaaactagaaagaagctttctgacaaactgctttgtgatgtgtgcattcaattcatagagttaaaactttcctcggatttagcagtgtggaaaaactgtttttgtcccttctgcgaatggacatttgggaactcattgtggcaaatggcaaaaatgtgaatatcccatgataaaaactagaaggaagttatctgagaaaccgattgttatgtgtgcattcatctcacacagttaaatatttcttttcat

SEQ ID NO: 877505 - DNA, 714 bp, Homo sapiens
ttcatctcaaagtggcaaacatttctttggattcagcagtttggaaatactgtttttgtagaatctgcgaagggatattaaatagctcattggggccataggcgaaaaagtgaatatccttggatacaaactagaaggaagctatctgagaaactgttttgtgatgtgtgcattcttcttgcagagttaaacctttcttttcattcagcagtttggaaacactgtttttgtagaatctgcaaagggatatttgggagcacttttaggcctaaagtaaaaaggaaatatcctgagataaaaactagaaagatttctgagaaactgctttgtgatgtgtgcattcatctcacagagttaaaacctttgtttggattcagcagtttggaaacactgtttttgtccattctgcgaatggacatttgagaggtcattgaggctgaaggtgaaatagtgaatatctcaggatgataactagaagaaagctatctgagaaacctgtttgtgatgtgtgcattcmtctcacagagttaaagctttcttttcattcaacagtgtggaacaactgttttggcagaatctgaaagtggatactttgttgggcattggagcctaggtgaaaaagaaaatatcttcagataaaaaacagaaagaagctttctgagaaactgctttgtgatgtgggcattcatctcatggggccaaacatttctttgg

SEQ ID NO: 877506 - DNA, 594 bp, Homo sapiens
tcatggtgaataagatttttgatgtgctgctggattcggtttgccagtattttactgatgatttttgcatcgatgttcatcagggatattggtgtaaaattctctttttttgattgtgtctctgccagccttcagtatcaggatgatgctgggctcataaaatgagttcgggaggattccttcttcttatattgattggaatagtttcagaaggaatggtaccagctcctctttgtacctctgcaaaaattcggctgtgaatcagtctggtcctggactttatttggttggtaagctattaattattgcctcaatttcagagyccgttattggtctattcagagattgaacttcttcttggtttagtcttgggagtgcatatgtgtcgaggaatttatccatttcttctagattttctagtttatttgcacagaggcatttagactattctctgattgtagtttgtgtttctgtgggattgttggtgatatcccctttatcattttttattgcgtctatttgattcttctctcttttcttcttttttagtcttcctagcggtctatcaattttcttgatcttttcaaaaaacca

SEQ ID NO: 877507 - DNA, 594 bp, Homo sapiens
tcatggtgaataagatttttgatgtgctgctggattcggtttgccagtattttactgatgatttttgcatcgatgttcatcagggatattggtgtaaaattctctttttttgattgtgtctctgccagccttcagtatcaggatgatgctgggctcataaaatgagttcgggaggattccttcttcttatattgattggaatagtttcagaaggaatggtaccagctcctctttgtacctctgcaaaaattcggctgtgaatcagtctggtcctggactttatttggttggtaagctattaattattgcctcaatttcagagccygttattggtctattcagagattgaacttcttcttggtttagtcttgggagtgcatatgtgtcgaggaatttatccatttcttctagattttctagtttatttgcacagaggcatttagactattctctgattgtagtttgtgtttctgtgggattgttggtgatatcccctttatcattttttattgcgtctatttgattcttctctcttttcttcttttttagtcttcctagcggtctatcaattttcttgatcttttcaaaaaacca

SEQ ID NO: 877508 - DNA, 588 bp, Homo sapiens
tggattttataggttattgtttaaagttgtatgctatatctgtcagtgtggaagatttaaaatctcactctttcattaaaaaatgatattaatggtgtgcaattcagacttcctgtctcaaagggaacagtactgatgatcttcatactgaatcagagccattcaatagcataaacaaaaaggaattactacaccatctacagtgctctaaatgatataaaataacattgtattaaacaaaaacacaacacaattttttttttacttcaaccaaagctatccatacatattctattcatctcttgccatatagataactttgtgagtttctgcttacatatgaacatattctttctatgaggggaaatgttctatttttatggagccatggcttkgtatatatctgagaaaactcatgtgctagcaagtgcttccatttcactttttccacagtatctaccacagagctgagtacagactatctacccaataaatatttgtagactaatgaataaaataatttgtttgtggtagtatcacgtggacctcaagctctatttggtgtgctttcctggactatatatttgc

SEQ ID NO: 877509 - DNA, 666 bp, Homo sapiens
gataggaatctgttggaaggatttgaacaggtgattgaatatgtcaggaactttgaggttgagttgagcttctaagatgattgaatggtgggatgaatctgttatgtaagtaagagaataccaactttggcaggaagaggaacatattgtgcatccctcactgaattcagtaatatataacaatgtgtacatgtgattaaaagaaggtgaattkatatgtgtggtgataattttcaaagtaggtatgttagagttaaatattattaacataatttaataataaggcaatttataaaatcagtaacaaaaatattttctcaggtggttgtgagaaaacttcaacaagaagcggctgacagcctaaaaaaattaactatgttagagtctccactggaaggtatatcacattatcacattaatttggatgagacacaggtcccaaagaagaaattatttcaagtggaaagtcaagtatgtatggaacttagcatgtaaactgttattctgtagctagttgaattacatacatgttttaggatactaattatggcagaagcttgattttttattttcattacaatgaattatttccattttactatctctataatgtacttatttttataaagtgactttcattctaccattttgaaaaaccattgcata

SEQ ID NO: 877510 - DNA, 627 bp, Homo sapiens
ggccaaagaaaacaaggtcttattcctctatataaatctgtcagtgctttaagcagtgaaagaaagatttttcatttaattttacagacttgatactaatgaaaaggatagcttgtaaaatataaatctctttttctataaaaaggacatgttgttgattctcttagaccttgaacccyggccagggattttaaaccaagcagtacctatctccagatctctagtaccaaattaatttggggtggggataacaggtttattgagaaataatgaacacaccatgcaattcactcatttaaagtatacaattcattaactttagtattttcagagagttatgccgtcatcattacaattaattttagaacattttcatcaccctaaaaacaaaccccacaacatttagccatcttcactagttttcccttcctccctcagccctagggaaccacccaccttctttgtatagatttgcctataagcctctgaaataaaaagcaagtggtctgctgggactggcttatttcacttagcataatttttcatgctgcatctgtgctgtagcaggtattgatgccgggtttttgctccttagttcagctacatctgggttcttctctcatgacc

SEQ ID NO: 877511 - DNA, 678 bp, Homo sapiens
acaagtctgtaaaataaccagctgacagcatgacgacaggatccaatccacacataccattactaaccttaattggaaatgggctaaatgctctgattgaaagacgcaggggggcaagatggataaagaaccaagacccatttgagtatgccgtctccaagaaacccatctcacatgcggtgccatacataggctcaaaataaaggaatggagaaaaatctttcaagcaaacggaaaacagaaaaaagcaggtgttgcactccyagtttcgacaaaacgtatataccaataaagataaaaaaaagacagagaaagacatacaaaggtggtcctgacctttgataaatctcattattgcttgataccaacctgggctatctttattgcccaaatcaacaggataatttgctgaggttgtggagcttctcccctgcagaggttccctgatctcccaaaatctggttgagaactaaggttgattttgctgtacaactccttttctgaagttttactcatttccaacaaagaaggcaagttttcctgcttccatgatgatggagagcaggcacctcctttcctgagtttcagcttgcttctgacagggaaggtgagtgtaagttttttccagcttctaagatggcagagaacgaccaccagcctgagccttatttccaggta

SEQ ID NO: 877512 - DNA, 678 bp, Homo sapiens
acaagtctgtaaaataaccagctgacagcatgacgacaggatccaatccacacataccattactaaccttaattggaaatgggctaaatgctctgattgaaagacgcaggggggcaagatggataaagaaccaagacccatttgagtatgccgtctccaagaaacccatctcacatgcggtgccatacataggctcaaaataaaggaatggagaaaaatctttcaagcaaacggaaaacagaaaaaagcaggtgttgcactcccagtttygacaaaacgtatataccaataaagataaaaaaaagacagagaaagacatacaaaggtggtcctgacctttgataaatctcattattgcttgataccaacctgggctatctttattgcccaaatcaacaggataatttgctgaggttgtggagcttctcccctgcagaggttccctgatctcccaaaatctggttgagaactaaggttgattttgctgtacaactccttttctgaagttttactcatttccaacaaagaaggcaagttttcctgcttccatgatgatggagagcaggcacctcctttcctgagtttcagcttgcttctgacagggaaggtgagtgtaagttttttccagcttctaagatggcagagaacgaccaccagcctgagccttatttccaggta

SEQ ID NO: 877513 - DNA, 645 bp, Homo sapiens
tacttcctagggacttgttgaatggctttgaccaaaagcctgatagtgacatggaaaataaggtccaggctgaggtagtttcagatggagatgaggaacttgctggaaactggagcaaaggtgactcttgttatgttttagcaaagagactggcagccttttttccttgccctagagatttgtggaaccttgaatttgggagagatgatttagggtatctggtggaagaaatttctaagcagcaaagcatttaagaagtgacttgggtgctattaaaggcattcagttttataagggaagcagagcattaaagtttggaaaatttgcagcctgacaatatgatagaaaagaaaaacccattttgtggggaaaaactcaagcaggctgcagaaatttgcataagtaacttggagctraaggttaatcccaagacaatggggaaaatgtctgcagggcacgtcagaggttttcacagcaggccctcccatcacaggccaggaagcctaggaggaaatgtttagtggtccaggcccagggtcccagtgctgtgtgcagcctagggacttggtgccctgcgtcccagctgctccagccgtggctgaaaggggccagtgtagagcttgggccatggcttcagagggtgca

SEQ ID NO: 877514 - DNA, 647 bp, Homo sapiens
ttggcactgttgtaagcaaacaagttatgggcaaggttcttgtcaggagaattattgttcatattgagcatattaagcactttaagggctgaggcagcttcctgaaacttgtgaaggaaaatgatcagaaaagaagaaagccaaagagaaagtcacctgggttcaagagaagtgccagcctgctccacccagagatgcacactttgggagaaccagtgagaaggagcctgagctgccggaacccaktcgctatggattcatggcaaataggtatagaaaagtaaaagacctctggactgcaaaagtgtttcttttcattgagtggaagtgtggtgtcctctcccccaaagaaatatttaaagcaaattttaattgtgtcctaatttattgcgtaatgtctttactattcaaattcaatgtatatcttgctgaaagatgtgaagaggcttattgtgcaacaaattactcaattggttagaaaatggccacatgctatttatgaaatatttgtactggtttgaagatagttcctccaaatcatcatgcaagaaataaaataatttaccaaaataataaaaaaaaaagtgcctgaagacagaaatacccctaaggacagccagagacaaaggggaggggcaggactacca

SEQ ID NO: 877515 - DNA, 644 bp, Homo sapiens
tacaatttccattcgatactacacacatacacacacatacacacacacacacacacacacacacacaagatactaaagaaagtaaaaagatagaagtaatattcacaaagtcaataaagtagatatttttagcaggtaaaatgatgagtcaacaagtcaccaaagcrgaggtccaattaaaatatcaatggggattcaggaaatacagagaatgccacaaagttactcctcgagaagagcaactccaagacacataattgtcagaatcaccaaagttgaaatgaacgaaaaaatgttaagggcagccagagagaaaggtcgggttacccacaaagggaagcccatcagcctaacagcggatgtctcggcagaaactctacaagccagaagagagtgggggccaatattcaacattcttaaagaaaagaattttcaaccctgaatttcatatccagccaaactaagcttcataagtgaaggagaaataaaatgctttacagacaagcaaatgctgagagattttgtcaacgccagacctgccctaaaaaagctcctgaaggaagcgctaaacatggaaaggaaaaactggaaccacccactgcaaaatcatgccaaattgtaaagaccatcaaagctaggaagaa

SEQ ID NO: 877516 - DNA, 555 bp, Homo sapiens
  misc_feature 481, 482: n = A,T,C or G
tatgcagaagattaaaactggactgctttcttacaccatatataaaaattaactcaacatggattaaagacttaaatgtaaaatcccaaactgtaaaaaccctagaagaaaatccaggcaataccattcaggacataggcacaaacaaatttttcctaacaacaacaccataaacaattgcaacagaagcaaaaattgacaaatgtgatctaattaaactaaagagcttctgmaaaataaactatcatcagagaatacaggcaacctagagaatgggagaaaacttttgcaatctatccatctgaaaaaggtctaatatccagagtctacaagaaacttaaacaaatttttccagaaaaaaaaacaactgaattaaaaagtgagaaatgaacatgaacagacacttttcaaaagaaaacatacatgcagccaacaaaaatatttaaaaaactcaacatcactgaccattagagaacgcaanntcaaaaccacaatgagataccatatcatgccagtcagaatgctattattaaaaagtcaagaaaccacagatgc

SEQ ID NO: 877517 - DNA, 631 bp, Homo sapiens
aatcgggcaggagaaggaaataaaaggcattcaattatgtaaagagaaagtcaaattgtccctgtttgcagatgacgtgattgcatatctagaaaaccccattgtctcagcccaaaatccccttaagctgataagcaacttcagcaaagtctcagsatacaaaatcaatgtgcaaaaatcacaagcattcttatacaccaataacagacaaacagtgagtgaactcccattcacaattgcttcagagagaatataatacctaggaatccaacttacaagggatgtgaaggacctcttcaaggagaactacaaaccactgctcaaggaaataaaagaagatacaaacaaatggaagaacattccatgctcatggataggaagaaacaatatcgtgaaaatggccatactgcccaaggtaatttatagattcaatgccatccccatcaagctaccaatgactttcttcacagaattggaaaaaactactttaaagttcatatggaaccaaaaaagagcccgcatcgccaagtcaatcctaagccaaaagaacaaagctggaggcatcacactacctgatttcaaactatactacaaggctacagtaaccaaaacagcatagtactggtaccaa

SEQ ID NO: 877518 - DNA, 678 bp, Homo sapiens
ttaaaatggtcatactgaccaaagcaaaatacagaattgatgatatttctatcaaattactaatttaatttttcacagaattagaaaaaactcttctgaaattcatgtggcactaaaaaaaagcctgaatagtcaaatcaatcctaaggagaaagaacaaatctggagacatcacattattttacttcaaactatactataaggctacagtaacaaaaccagcattgtattggtataaaaacagacacatagaccaatggaacagaatagagaaaccagaaatagtgccacatatctacagtcatctgatcttcaacaagttgacaaaaataagtaacaggaaaaagacaccctatttaataagtggtgctgggataactggctagccatatgcagamgaatgaaactggaaccctacattttactatatacaaaaattaagtcaagatgaatttaaaagttaaatgtaagacctcaaactataagaatcctaaaagagtacatagaaaacaccatctggacatgggccttgggaaagaatttatgactaagtcctcaaaaacaattgcaacaaaacccagaattgacaaataggacctaattatgccaaatagattattcacagtaaaagaaactgtcaatagtgcaaacaaacagcctgggagaaaatatttgaaa

SEQ ID NO: 877519 - DNA, 678 bp, Homo sapiens
ttaaaatggtcatactgaccaaagcaaaatacagaattgatgatatttctatcaaattactaatttaatttttcacagaattagaaaaaactcttctgaaattcatgtggcactaaaaaaaagcctgaatagtcaaatcaatcctaaggagaaagaacaaatctggagacatcacattattttacttcaaactatactataaggctacagtaacaaaaccagcattgtattggtataaaaacagacacatagaccaatggaacagaatagagaaaccagaaatagtgccacatatctacagtcatctgatcttcaacaagttgacaaaaataagtaacaggaaaaagacaccctatttaataagtggtgctgggataactggctagccatatgcagaagaatgaaactggaaccctacattttactatatacaaaaattaagtcaagatgaatttaaaakttaaatgtaagacctcaaactataagaatcctaaaagagtacatagaaaacaccatctggacatgggccttgggaaagaatttatgactaagtcctcaaaaacaattgcaacaaaacccagaattgacaaataggacctaattatgccaaatagattattcacagtaaaagaaactgtcaatagtgcaaacaaacagcctgggagaaaatatttgaaa

SEQ ID NO: 877520 - DNA, 678 bp, Homo sapiens
ttaaaatggtcatactgaccaaagcaaaatacagaattgatgatatttctatcaaattactaatttaatttttcacagaattagaaaaaactcttctgaaattcatgtggcactaaaaaaaagcctgaatagtcaaatcaatcctaaggagaaagaacaaatctggagacatcacattattttacttcaaactatactataaggctacagtaacaaaaccagcattgtattggtataaaaacagacacatagaccaatggaacagaatagagaaaccagaaatagtgccacatatctacagtcatctgatcttcaacaagttgacaaaaataagtaacaggaaaaagacaccctatttaataagtggtgctgggataactggctagccatatgcagaagaatgaaactggaaccctacattttactatatacaaaaattaagtcaagatgaatttaaaagttaaatgtaagacctcaaactataagaatcctaaaagagtacatagaaaacaccatctggacatgggcmttgggaaagaatttatgactaagtcctcaaaaacaattgcaacaaaacccagaattgacaaataggacctaattatgccaaatagattattcacagtaaaagaaactgtcaatagtgcaaacaaacagcctgggagaaaatatttgaaa

SEQ ID NO: 877521 - DNA, 705 bp, Homo sapiens
gctttctttcaggctgttatttgtccacttaaatccaggtaagcaaagtgttcccttgcctcctcccgttaccactttcactggaccatcagttgcactgtcaccatggtatctaatcccagtcccttgcactgcagccccgccctgatgctcctctacgtccttagtggcctcggattttctcagactgagttccatagaacccaacatatatttttcttctttttttaacttttaaaattcaggggtgcaagtgtaagtttgttacataggtaaacttgtgtcatgggttttgttgtgcagatcatttcatcacccagctattaagcctagtacccattagttatttttcctgatccctccctccgcccacccttcaccctctaaarggccccagtgtggggaaccaacgtatcttctcatggaaaaagggtggaggaaagaagaaccacaaagttgagtcaagggatggataatcatactggttatagaacaaattaagttccatcaaccagatgcctagagctcttgtggaccagagctggagaaagaggtgtcagaagccatgagcagatggaaaaatgtactagacagactgggaggaatgaaatgttttggagagtttggggtctgagcttaaaaagtggcttctggaaatggatcatgaaacaggagctttgagcatctgtcagtgaatggagtaga

SEQ ID NO: 877522 - DNA, 595 bp, Homo sapiens
cacttctcgggcgtctcatttccataggtgactaacgccagtctcacactcaaacttttggctgactctgaccagtgcagctttggtgctctccagcaggaggtggatgtccttgagagtcaactaagtgaatgtgagagagaaaaggagaaagaataggcctttggacaccctggaccacccctccccccggtgagtgcacagactgaatttctcaaggtcttatctctccagagaccaggttgggagtgcatgttggctatggtaaactgaggggaaggaattacaaatctttttytttttttttttgagatggagtcttgctctgtcacccaggctggaatgcaatggtgcaatctcagctcactgcaacctctgcttcctgggttcaagtgattctcccacctcaggctcccaggtagctgggattacaggtgcacaccaccatgccctgctaagtttttttatttttagtagagacagagttttgcgatgttggccaggctggtcttgaactcctgacctcatgtgatctgcccaccttggcctcccaaggagctgggattacaggtgtgagccaccacgcccagcccaa

SEQ ID NO: 877523 - DNA, 630 bp, Homo sapiens
aactgaacagtgttgtgaagaaaagaggcattgatcctacttcagtgcgtaaggttttagggatatggggatataaatcgtgtttgatagtgtacctgccagaagtagttcccagagaaatctgggcatctggctttaagggagaagatcattttgtacaacagaatctctactccctagaactctaaaacatcaattactttcatctttcatggactacaacaagttgatgctttgcatggtgctgaccatgaaaatgaaagcccctaggagatmatgtatctcacaatgataataatacaataagaatgaggctaacaaaatgtgcttctgttctgtaccaaggctaagcctgtttaccctcaagtccactcctgactcttttgtgactctttatatcacacctatccaatcattacttgaagaatatgatggatacagctggttgggaagcattgacagatgcaaggtatctctcactccactcccctgcctcagacagagtctctagtgtgagctgcatctcttctatggttccagcttccactggttgggctcactttggctgtagttctagtaaccccacctttggctttccagtctataggtggtagtagcttcctgctgtta

SEQ ID NO: 877524 - DNA, 630 bp, Homo sapiens
aactgaacagtgttgtgaagaaaagaggcattgatcctacttcagtgcgtaaggttttagggatatggggatataaatcgtgtttgatagtgtacctgccagaagtagttcccagagaaatctgggcatctggctttaagggagaagatcattttgtacaacagaatctctactccctagaactctaaaacatcaattactttcatctttcatggactacaacaagttgatgctttgcatggtgctgaccatgaaaatgaaagcccctaggagatcatgtatctcacaatgataataatacaataagaatgasgctaacaaaatgtgcttctgttctgtaccaaggctaagcctgtttaccctcaagtccactcctgactcttttgtgactctttatatcacacctatccaatcattacttgaagaatatgatggatacagctggttgggaagcattgacagatgcaaggtatctctcactccactcccctgcctcagacagagtctctagtgtgagctgcatctcttctatggttccagcttccactggttgggctcactttggctgtagttctagtaaccccacctttggctttccagtctataggtggtagtagcttcctgctgtta

SEQ ID NO: 877525 - DNA, 539 bp, Homo sapiens
ctctctctatagatagatagatagatagatagatagatagatagatagatagatagatagatagatagatacagagatatatatatatatatcttctttatgctaggaacatgtaatttaccccaaggaaaataaggagatggtgtggccatcacaaaagcagcaccccragggagagcagggcttcctggagggctgtgggaagggcagggaaaactaaaggccaaccatcagtccagtaagataacagaaagtaagataagaaattattggaggacatgattttaactaaatggacggggagaagcttcccattcgccgcaatgcctctgcccaggtgaactctgtggtgcgtcacagcagaagagactgggccaaccccgctgttcgtgttgcacagtcaggaacagagggaaggggctctgggaaagccctcttggtgcctgtgcccagacggtgcatctgcagcagggctgggcagtcagaaataagcccctcaaaagtagtttaaaccaacaattatacaatgaggtactgtt

SEQ ID NO: 877526 - DNA, 522 bp, Homo sapiens
cagtgagccaagactgcgccactgcactccagcctgggcaacagagcgagactctgtctcataaaaaacaaaaaaacagaaacaaaaaccaaaccaaaacaaacaaacaaaaaaacaagacttaggggaaatcatgtttttcctcatttttgctctactatcatttgggccaaattaaaaattaatataaattcagttttcagcattatatatatttgacaaatgagaagtgcatatatttaaggcatatagcttgatattttgatatatgtatatattgtaaaatgatcaccacaatcaagctaattaacatatctgatacctcacatactaccatttwtctccctccctcctttcttccttcctctttttctttcttcttaaagagaacacttaaggtcttccctcttagcaaatttcaagtgtgcaacacagtactgataactatagtcactatgctgtatattattatctccagaatttattcatctttcataaatgaaactttgtaactttagacaa

SEQ ID NO: 877527 - DNA, 554 bp, Homo sapiens
attctgtgaaaaatgatattggtaatttgatagggatcacattgactgtgtagattgctttgggtagtatggtcattataacaatattgattcttccaattcatgagcatgaggtgatttttcatatttgcgtcatctaaaattactttcatcagtgtatcatagttctccttgtagagatctttcaccagcatagttacatgtattcctaggtattgtatatttttttctagttattgttaatgaaattgagttcttgattttgttctctgcttgattgttattagtgtataacaatgctactgatctttgtactttgattttatatcctgaaatgctaccgatgtcacttttcaagtctaggagacttytggatgagtctttagggttttctacatataagatcatatcatcagcaaatagagatagtttgactttctcttgttaaatttggatgccttttatttatttcttttccctgattgctctagagagagcttccaatatcatgttgaataggagtggtgaacatgggcatctttggcttgttccag

SEQ ID NO: 877528 - DNA, 694 bp, Homo sapiens
tgctgtgatattttaaataattgtttgacttgtctttcttatagccatagtaagtcaggggacatacagtgttctccctaacctagctgtgccctctgactacactgggaagggtcagacgttattggcagctgtgtcttttgtccctggctctgyacctgatacataaggaaaatttcttacttcctagattttttcactaaaaataagagttactgaggggtaacattacaattaacatatataattaaatctactagatgcatccaaagtgtataataaaattgagatgtgtttttagaaaaaaaattgctatagaaaggtatgagaaatgtgttttccttacaaagcgaaagtcattttgtctactgtagaggttttcaaattgtctttaaattgaagacaaattgatggataaagctaaatggatacagaaagttggggcttcgtgtggtggttctttcctgtaatcccagcatttttggaggccaaaatgggaggactacatgaagccagcagtttgtgaccagcctgggcaacaaagtgagacaccatatctacaaaaaaaacagaaaaaaaaatgagccaggcacagtagtgtgtgcctgttgtctcagctactcaagaggctgaggtgggaggactgcttgaggctaggaatttgaagctatagtaagctatgattgtgtcactg

SEQ ID NO: 877529 - DNA, 642 bp, Homo sapiens
aactgagtcatgctaatactaccttccttttgttcccaaagagtcagctgtaatttcacaaggttgcctatcttatgtaaaatgtatatctaccacgcacaagacaaatgcacaatcaactttttctccattcctctttacacatgcaacatctggatgcagtgagtgataatccaggcctcgtaaggatgtaacacttgcctcactgtctttcccccctttctttatcctccatccactcctccctggtctcgcccctataaatatggaagtcagcaaaaccttctttggaaaaagcacaggccacagagcctactgtgacttgtgtttctttatccttaaacttggcaaagtaattctctgaactgaatgagatctgtgtcagtcatttttgttttacgtgggtctacacyaaacactaagtcagtatttgctactagtgacagctttttccaagtaattgcaaatagtatcatatgtatcaactgtaaaatacatcattattttacatcacagcaaaagcatataactattgaaaaaatatgacatcacaaaaattttatctcatatatgttgaaaataatatatcttatttgaaacgcctgttccttggtgccataaagaaatagcacttgaatataa

SEQ ID NO: 877530 - DNA, 578 bp, Homo sapiens
aaagactccatttctaatagtccagaaaacattgctagtccatgtcataaacagcttaagagatatgcaaacatctagctttgacactcctaatcaacactgataaaagacagggaacttggtgactctgacatcacatctttaaacgtctgtggaaaatcaaggcctctgcttctagcattgatgagtaaagtgatcgataaaaaagataagctaagagattcamatttcagaatttcaaaattcggcttcacataaaaagccttagagcttcttacagcgctctgagtgagaattatatctcctatagtcacggggctgaaaacgctagaagtcaaacacaaaccctcactgtgaagttggctgagttactatgaaagttgaactttcagcctggcaaggtacctactgtaaatttacagcactgtaccgagaagaatggaactctgtagagtgggttgggaacattttgagagaccatgttgaggctggagacattgagctctgaaattccgacgtcttctttgccagtagacctgaccccctactgacaccctcttggcagtagcctcttcacc

SEQ ID NO: 877531 - DNA, 578 bp, Homo sapiens
aaagactccatttctaatagtccagaaaacattgctagtccatgtcataaacagcttaagagatatgcaaacatctagctttgacactcctaatcaacactgataaaagacagggaacttggtgactctgacatcacatctttaaacgtctgtggaaaatcaaggcctctgcttctagcattgatgagtaaagtgatcgataaaaaagataagctaagagattcacatttcagaatttcaaaattcggcttcacataaaaagccttagagcttcttacagcgctctgagtgagaattatatctcctatagtcacggggctgaaaacgctagaagtcaaacacaaaccytcactgtgaagttggctgagttactatgaaagttgaactttcagcctggcaaggtacctactgtaaatttacagcactgtaccgagaagaatggaactctgtagagtgggttgggaacattttgagagaccatgttgaggctggagacattgagctctgaaattccgacgtcttctttgccagtagacctgaccccctactgacaccctcttggcagtagcctcttcacc

SEQ ID NO: 877532 - DNA, 578 bp, Homo sapiens
aaagactccatttctaatagtccagaaaacattgctagtccatgtcataaacagcttaagagatatgcaaacatctagctttgacactcctaatcaacactgataaaagacagggaacttggtgactctgacatcacatctttaaacgtctgtggaaaatcaaggcctctgcttctagcattgatgagtaaagtgatcgataaaaaagataagctaagagattcacatttcagaatttcaaaattcggcttcacataaaaagccttagagcttcttacagcgctctgagtgagaattatatctcctatagtcacggggctgaaaacgctagaagtcaaacacaaaccctcactgtgmagttggctgagttactatgaaagttgaactttcagcctggcaaggtacctactgtaaatttacagcactgtaccgagaagaatggaactctgtagagtgggttgggaacattttgagagaccatgttgaggctggagacattgagctctgaaattccgacgtcttctttgccagtagacctgaccccctactgacaccctcttggcagtagcctcttcacc

SEQ ID NO: 877533 - DNA, 565 bp, Homo sapiens
aaatatactttttgaaatgactaatggtagttgcttatagtaagtgattattactacagggtgatactcttttatttgtacatttaaataagaaggatgtgctcttatgagctgattacagagtgggctgatgcgtgctgggttgtccagcggccttgaggaaatgtccttacaatgaaatacactgtggaagcattgcactgtgtcatgccatagaatgccatattgtttgcctctttaggggacccaggattcagtacaaaaataagattcatcatttaggggaatctgttttgccttccacctctgcctgattactaggacctagaaactgcatgctttcctsgttcttttccttaagaggttccaccccaaaggcaataatcccatttaaaaacttaacaactttaagaaaatctccacatgtaagagtgtctgcttttcctggccatcctcactgaacttttacccccacatttttccttgctttagataaaatataaattctctataattatttcacctaagaattatccctttaaaataaaagtgtggaactgcctgg

SEQ ID NO: 877534 - DNA, 640 bp, Homo sapiens
tttcagctctcaccagtgaaagctgaaactgaagcaacttaagaggtacttttttcttaacctctccagtgaattttcatcatgtcttttgacacacttaaaaaacccgattaccagtcctgggctgcaacagaacagaagggtttgcaacattctagaaaacaacagctggatcttggacttccatactttgtttccattragacatttgtcctgcctctacaccaacaatttttgcgcaagcaatcttcattttttgaaagtctgtgctcctgattttgaattcaagaaaaaaactccactggtctttttaaactagagctcagactcccagacattagtctaccccttcatgaagtggaacaaggtggggaagtgaggtggaaggcaggcaagctgagaaagtgttagactttctaggccctggtgagtagagacagggtgagtgctttcagttctctcatgagtacaatgcgcttaaatccaaatataaatgaatattaaaatgcccttccagagacaaatacaaatgcttaggggattgtctcccttctattagtgcaggtctggagaagtttacagtatcttactagccagagatatctactcttgtactccttaccctctcagaaaatagcta

SEQ ID NO: 877535 - DNA, 599 bp, Homo sapiens
gggtttctcaatgcagaatatgtacttggttctaatatggtagtctggttctaatattgtagcctttttctcagcaatggttgccacatctgagtcctgaatccctttggaatcagcctctccagagggtgtatgtttagaaccggcgtgagtgaaaggtagtcatccaatgacatgaggtgggtgaaaatattttaactgcttyatttataaattttcaactgaccctcctgtttttgaaacccaccagtgtccccacttccataagtccctggatcctcaattttccaagtcttcctggaattctatggagtaaattagcttactgatgcatttcccttacttgccttaggtttctgctcactctgttcccaagtcaattatgacctacctggctgcttccagtttctgaaatgttgtgtgtcagcttcttttccattgcctttgtccttgcaagcttatgccattttaaaaaattcttttgctgtcgtttttgtggagaaatagaaaaatatgtacattcaatccccatgtttaagtggaagtccctcataaaattatattagaaatttattagaaatatatacacacatatgaat

SEQ ID NO: 877536 - DNA, 626 bp, Homo sapiens
tcatggtgagaggtgaaaggcacttcttacatggcatcagcaagagaaaaatgaggaagatgcaaaagcagaaacccttgataaaaccatcagatctcatgagacttattcattatcatgagaatagcatgggaaagaccagcccccatgattcaattaccttccccaggtccctcccacaatacatggaaattctgggagataaaattcaagtctgagatttgcggtggggacacagccaaaccacatcattccatccctagcccctccaaatctcatgtcctcacatttcaaaaccaatcatgccttcccaacagtcccccaaagtcttaactcatttcagcattaacctgaaagtccacagtccaaagacttctctgagacaaggcaagtcccttttcctatgagcctgtaaaaccaaaaacaagctagttacttcctaaatacaatgggcggyacaggtattgggttaatacagccattccaaatgggagaaattgagcaaaacaaagaggttacagggcccacacaagtccaaaatccagtggcgtagtcaaattttaaagctccaaaatgatctcctttgactccaggtctcacaagccaggtcatactgacgcaagagg

SEQ ID NO: 877537 - DNA, 645 bp, Homo sapiens
atctttacttgtaaaatgtctgtttttttagtgacaacatttggatatatagcttgtataataaaaacaagttttctggtgcttaaagatttatcttaattgttaaggaggtacaaacataaaaaatatttaaaaataaagatttattgctgtgcacagtggctcacgcctataaccccarcactttgggaggccgaggggggcaatcacaaggtcaggagatcgagaccatcctggctaacactgtgaaatcccatctctactaaaaatacaaaaaattagctgggcatggtggtgggcgcctgtagtcccagctactcgggaggctgaggcgggaaaatggcgtgaacccgggaggctgagcttgctgggacccgagagcgccactgcactccagcctgggtgacagagcgagactccgtctcaaaataaataaataaataaataaataaaaataaagatttatcaagtgtacttacaatttattgactggcagatctgatacgccatctgcctgatgtggtcaatttgaaatggcagaaagctgttttctttaatgaaatcgtaagtactaagtcccagtagttcaaacacaatacaaacatgaccatgatgatcaaaccattctagcatctggacacatcg

SEQ ID NO: 877538 - DNA, 684 bp, Homo sapiens
agagaggaaggagaagaaaatacttattgaaagactgttcagcagaaaagcaaggagaagaggagtctcattttcatgagcatccaaagtgcagtaggcataaaatcatacagttaaattacggaataccaacactttaaaccatgcatacatacctacaaacaagatgtttaaaaaaaataaatgtaaccttatttcaaatcgtcagtgcttccctctagaataaatttaacaatttagtccttacaaccttggcatagtttctacaaaagtataagcaattttagtctcaattgtcagatactaaatatacaaactatatttaaaatgtctgtattttaaacattaaagtgcttcttacactcacaaatcaaataaatgtgaaattatacctcaaaacaggctattgtgaacccactagtcatgyttgtgttagattggccagatttaacatttctgatttaactatctcacaaaactaagttttaaaaaatattcagaaagcttgaaattatctgcaacaacctggccaactgacacacaaactagcttttgcctaattcttccaagttattgttacagaattttttgcttttgttttattggcacacatttttattcttgcttcactctaacatccaatttcttgtgatctttcattgctctaagctattggtaataatc

SEQ ID NO: 877539 - DNA, 584 bp, Homo sapiens
ccagacacaacaagcacaaaccatacagcaaagattgagggactcaactatattcaaatcaaggtttttctgttcagagaaggcatataaagacaaaaaaagacacacaaagtaaaaaagacaagccataaactgaaagaagattattgcataacatgtaataatcaaataattatttttcagaatatataaagatatgagtcagtaagagaaggtacacaattaaaaaatagccaaaggacacaaatgaagataaggaaacaggagtggccaacagatacaaatcaaaatcataataaaataaaatttcaaaaccattatgttggcaaaaattagtttgacaatactaygtagcaaagatgtggagcaactacaattcttatacattgccaaaggtattataaatgagtacaattagattgagaagcaattttgtattaccaaataaagctgtgtataagcatacatggaagtctgagcagttccacttttagtgatatccctagaaaaaccccagagcatgtctaccaggtgatagccgactaccccacatggatggcatgtgttggcagcattgcttataa

SEQ ID NO: 877540 - DNA, 638 bp, Homo sapiens
tcatattgagtgaaagcagccacatgtaagagagtgcacactgcagcactccatttatacatggcccacagataagacaaaagagttctttcttatgctttgatcaccctttcgatgatcagaactcagaacagaatctctgcatatgtggttagctatttgctggaagtagaaccctggtattatattttgagatacagaagttttaaattttacatagcaaaatctactgattttctyctagtgttattcttgccatttcatttgaagaaaatcagacatctgtgtctctataatgttttctaggtttattgtaaatacactttctgaggtttgttttggtttagttcatgtactgtgactttcagttgattgattgttccagaatagtttatttatatggtatttctgggttatagcattctctccactttattgtttgttcaagcaccagtacattgctctgtctgttcttctattttgattaccatggctttatattatgtactttttaatatatgttaaggcaagtcccaccttattattccctgcatttctttagaaaatttatttagttattcctaacatttgttttatttttttacaggtgaaaattagaacactagagctacacccca

SEQ ID NO: 877541 - DNA, 638 bp, Homo sapiens
tcatattgagtgaaagcagccacatgtaagagagtgcacactgcagcactccatttatacatggcccacagataagacaaaagagttctttcttatgctttgatcaccctttcgatgatcagaactcagaacagaatctctgcatatgtggttagctatttgctggaagtagaaccctggtattatattttgagatacagaagttttaaattttacatagcaaaatctactgattttctcctagtgttattcttgccatttcatttgaagaaaatcagacatctgtgtctctataatgttttctaggtttattgtaaatacactttctgaggtttgttttggtttagttcatgtactgtgactttcagttgattgattgttccagaatagtttatttatayggtatttctgggttatagcattctctccactttattgtttgttcaagcaccagtacattgctctgtctgttcttctattttgattaccatggctttatattatgtactttttaatatatgttaaggcaagtcccaccttattattccctgcatttctttagaaaatttatttagttattcctaacatttgttttatttttttacaggtgaaaattagaacactagagctacacccca

SEQ ID NO: 877542 - DNA, 646 bp, Homo sapiens
agaagctagtgccaaaataataaatagcattggaaaggtattgtaaagaaccgtgctgaacaagagaagctcctaaagatattaaaaccacccacaaatgaatcagaaaaaagctgcagttgagagatgactagaaatgtattggtagctgagctgggaacagttttcaacatgctttatttctaaacattccatcttttctgcactagtatgtccagtaaggtcaatgactatagaaaatgctcaagtatagacagaggattcacagatatctgaaagtcacgcttcttgaagattatcagtttaaaatctgtgaatcactgctacttttttttttttttccattatgagcagtctttttcccaaaggaatcytgcctgatgagtaggagtacattgtttgaaagaactacagaagtacttcttaggtgtttttcccctttagcaaaatgttgggaagatggaggagtattcagcatgaggtatgctgtcattatatttattctgggcctttcagcactgtaatttatttctgtgccaaaacaatatgaattgttaaaaaatgtgcttctccaaaatatgaaacagttggactggatccctattgaattatgcacatatcttagctaaaagaatggtattttctg

SEQ ID NO: 877543 - DNA, 605 bp, Homo sapiens
taaacatacatggtctctacttttgaagaaataaaggtcttatataaacaaataatcacagctactagtgccctcagctatctgggtttttcaagaccttccagggccaacttatggcatttagtcatagctccacagtatgtctttctgaagtttttagaaaatccttgtaggtaataactcccctacctccctcagcacagctgggacacactattgaatgaaactcatcaagtccctaattctttaccaccccactcctcaccacatggaattctagtgaaagaaacttttacttcatgctgttcaaaagggcacttttcacaaagtgtaatagagactgtacaatttaagctttatgctccacggcctaaggatttaccatattaatctatgcagatttactaaaggkaataagagtgaaactgatataactaagatagttacctctcactttccctcccagctttcctcctctggaaggattcatttccagattcaaaagtttatttctaaatggctgtttctcctgtcatagcctgcagtgtacatcagaataaagaaccgtgcccagggtgaatatctgacagtcactggaagtctag

SEQ ID NO: 877544 - DNA, 668 bp, Homo sapiens
catcttggctttcctttctctggcttcaatcttcttggcccatcgtgtggctgcccattttgtattgatgtctgccttctgccaggcttgttggacatacttttggcgggcactgtgcggaaacttgaggatgaaatcagtgagctgcatgcacttgaaaggcatggcctgtctcctcacttgagtgcaaggtccatcgaccaaagccctgttctgatcaataacatctacaatcgcgaccaattttcyggcatgaggtccaaaggagacataggccacccggccaacctccacgaagcgcctgaacaccatgttggtggcgttaggtgagaaggccactattatcttttttatgctaatgactttctggatcaagacagaaatttgtaggtgcaaggtttgatttttttttttcaaatactaggattaaagtcatgaagacattctatccctttcccttctctttctgctccatgcactgacctggggagagttgttcttgaagatcctagttagaattctgggtgcattttcccatagaaataatgctataaatgaatatgtatacttgaaatattattgcttctatatactaggtgtttaatttccagcctaagaccacaaaaactagttcaaccataatataccttgtatattacaaattaatt

SEQ ID NO: 877545 - DNA, 668 bp, Homo sapiens
catcttggctttcctttctctggcttcaatcttcttggcccatcgtgtggctgcccattttgtattgatgtctgccttctgccaggcttgttggacatacttttggcgggcactgtgcggaaacttgaggatgaaatcagtgagctgcatgcacttgaaaggcatggcctgtctcctcacttgagtgcaaggtccatcgaccaaagccctgttctgatcaataacatctacaatcgcgaccaattttccggcatgaggtccaaaggagacataggccacccggccaacctccacgaagcgcctgaacaccatgttggtggcgttaggtgagaaggccactattatcttttttatgctaatgactttctggatcaagacagaaatttgtaggtgcaaggtttgattwttttttttcaaatactaggattaaagtcatgaagacattctatccctttcccttctctttctgctccatgcactgacctggggagagttgttcttgaagatcctagttagaattctgggtgcattttcccatagaaataatgctataaatgaatatgtatacttgaaatattattgcttctatatactaggtgtttaatttccagcctaagaccacaaaaactagttcaaccataatataccttgtatattacaaattaatt

SEQ ID NO: 877546 - DNA, 597 bp, Homo sapiens
ttctccgctctaattagctgtattcctaggtattcttttataagtttttttattactttttttgtggctattgtgaatgagattgcattcttgatttggctcccagcttggacattgttggtgcatagacatactactgactttggtacattgattttacatccggaaagtttgctgaagttttaaaaagacatatctaggagcttttagtaagagactatggggctttctaggtataaaattatattgtttacaaaaaagatagtgtgaattcccgtcttcctatatggatttattttctttctttcttttgcctgattgctctggctgggacctccagtactatgttgaataggagtggggagagtaaacacscttttgttgttccagttctcaaggcaaatgcttctagcttttgcctgttcagtatggtgttggctatgggtttttcatagatggctcttacaattttgaggtatgttccttcaatgcctactttgttgaaggcttttaaaatgaaaggatgttgaattttatcaaaagtcttttctgcatctatttagataatcatgtggggttttttttagttcttttatg

SEQ ID NO: 877547 - DNA, 575 bp, Homo sapiens
taatccttcaccccagataaagtcctcatggaggagtagaaagaccactggacactggagacagatacctaagcttgacacccagttctccctctgtcatagcctattttctgttgctataatgaaatacctgagactgggtaatgtatasagaaaaaaagttaattttgctcacaatgctgaaggctgggaagttcaagatcaggcagcccatctggtgagagcctcaagctgctcataacagaaaatggaaggagagtgggtgtgtgcaaaaagggaccaaacaggaggccaagaagcctcacaaatgagcacaaatgctttgcaaatatcactagtaagcagtttctgggtaaaaccgtatttcactttggcaatttgtgggggcaggctttataacaacccactctcttgggaactaatccattcccaagagaagaagagctcactcatccctgtgagacagcattaatctattcatgaggaatccacccccatgacccaaacacctcccactaggccccacctcccaaaactgctgcattggcaattaaacttcatcatgggttttggca

SEQ ID NO: 877548 - DNA, 630 bp, Homo sapiens
atagtggcacaaacaaactcaaacagtttcctcaaataattcatttttctttgcctactcagtcttcatgcatggcagaaataacctttccattattccataactaacatcattctttgaaggcagctactaagatgaaaaraaaaaaaaatcaaatggttctcagaaaatcctagcacaatgtaaacagtggaaggtacagagaagacacatgttgtaggctgaaattacaaagcaacaattaaaagttggatcactggttaccttgagttagccatgtttaccttagttatgctggatctcaatgctttgtgggaaaaaaagtagaaaatgagccttcatcatggatgtccagaaaattaacagatgacaacggataccctctccatgaggtttgctgcatgccagacactgtgcaaagagctttacgtgcattgtctcatttatttttgccacaactgtgtgaggtcagtactattattctatccatttttttttaggtaagggatcagagatttagagaatttaagtgacttgaacaaatttaaactggctaacaatgacaaaactagactttaaatgcaggtctgattccagagctgcttctttaaatcactaggtcaggtgact

SEQ ID NO: 877549 - DNA, 630 bp, Homo sapiens
atagtggcacaaacaaactcaaacagtttcctcaaataattcatttttctttgcctactcagtcttcatgcatggcagaaataacctttccattattccataactaacatcattctttgaaggcagctactaagatgaaaaaaaaaaaaaatcaaatggttctcagaaaatcctagcacaatgtaaacagtggaagrtacagagaagacacatgttgtaggctgaaattacaaagcaacaattaaaagttggatcactggttaccttgagttagccatgtttaccttagttatgctggatctcaatgctttgtgggaaaaaaagtagaaaatgagccttcatcatggatgtccagaaaattaacagatgacaacggataccctctccatgaggtttgctgcatgccagacactgtgcaaagagctttacgtgcattgtctcatttatttttgccacaactgtgtgaggtcagtactattattctatccatttttttttaggtaagggatcagagatttagagaatttaagtgacttgaacaaatttaaactggctaacaatgacaaaactagactttaaatgcaggtctgattccagagctgcttctttaaatcactaggtcaggtgact

SEQ ID NO: 877550 - DNA, 626 bp, Homo sapiens
agtcataataaagtcagttagtaaatcaagtgcatttgatccaagtttaagtacaaaccaatatatatataatatacattatatgtatgatctcaagactctgaagtcattgcatgagcatcccttctcggcaacatcagagtgagatcactgaggtgctgtcattcatgcacacatttattcaacaaacgtttgttgaagatgtactaagtgccaggcactgtttatgataaacaggagagtctmctcaaagtaatttcacatcctattaggaaacaggaacattaaataaatagacaaaaaaggcaagataaactcagtacttacagtgaccaagaagacactgagttttaaaaagaggtaagagactatatgggggatactggtttaagtcgggtgctgagggaagatctattcaacaaggtaatgtttgagctgagaactgaattatggaaaggctccaaatgcaaagagctaggggaagggatttctggtagaggaaacatctatacaaaatctctaatatatgagtaaatgggacttttctgaggagcatacataagccagttgttgggggggcgggtaaagagagtgaaaaggagagaggtgtaagctgagtctggaga

SEQ ID NO: 877551 - DNA, 570 bp, Homo sapiens
ggtagacccggcggcccgcccgggtcacctgcgccggctgctaagggggcgcccttacctgcgcgcccggaaggggcttggtgactggcctcggttccctcagtccggagagtgtctctgccattccctgcagggctgacgccccagggctgggattcgraaggatctcggcacctctaccctacctgggattctcacctccaaccccgttggaggccccctggccttagtggaaactcatctccttgtctgcgcacccgcccccgaaatatgacctacttgaaatgtgacctactttttaaaagaaacccttaacaatcacgggaaaaccggatccaaaatttcgataagcatttttctttgaaatactattctattgcatcactgctcgaaagcttgaaaggtcaatggccacttttagttgaggccgcgactatgggaagttgggcgaggaagggggaggggtgaaagggaggcgcgtcttgcaaactttgcctggtgccccccctgccggctctgggaggaaacgggaaccagctcccaaccttggggtctgcagccggggaccaa

SEQ ID NO: 877552 - DNA, 610 bp, Homo sapiens
aaaagtgcatgaacagcctcctttactgttacagggcaatgaaggatcccactgaaagctgtaaaaagaaactttttccatgaattggtattgcttgggaataatctttaagttttataagcctcagtagattttggatcattaaatacttcctattctatatattttctttttttattattatactttaagttctagggtacatgtgcacaatgtgcaggttagttacatatgtatacatgtgccatgttggtgtgctgcacctattaactcgtcatttaacattatttatatctcctaatgctatccctcccccctctccccactccacaacaggccccrgtgtgtgacattccccttcctgtgtccatgagttctcattgttcaattcccacctatgagtgagaacatgaggtgtttggttttttgtccttgtgatagtttgctgagaatgatggtttcaagcttcatccatgtccctacaaaggacatgaactcatcattttttatggctgcatagtattccatggtgtatatgtgccacattttcttaatccagtctatcattgatggacatttgggttggttccaagtctttgctattgtgaat

SEQ ID NO: 877553 - DNA, 630 bp, Homo sapiens
gagacatggagtcaaaggagatcattttggaattttaatatttgactgccctgctggaatttggacttgcatggtgcctttagccccttcattttggccaatttctcccatttggaatgggtgcatttatccaatgcctgtactcccrttgtatcgaggaagtaactaacttccttttgattttacaggctcataggcagaagggacttgccttacctcagatgagactttggactgtgcacttttgagttaatgctgaaattagttaagactttaggggacttttgggaaagcatgattggttttgaaatgtgaggacatgaaatttgggaggggaccagggtggaattatatggtttggctgtgtccccagcaaaatctcatcttgaattgtagctctcataattcccatgtgttgtgtgagggacctggtgggagataattgaatcatggggttggtttcccccatactgttcttgtggtagtgaataaatctcacaagatctgatggttttgtaagaggtttcctctttcacttggctctcatcattctctctcttgcctgcctccatgtaagatgtgcttttcacctttcaccatgattgtgaggtctccccagccacatggaac

SEQ ID NO: 877554 - DNA, 582 bp, Homo sapiens
gggaacatttcaagtcctctcagctagctgttttgaaatatacaatacattattcttcactgtagttaccctagtctatccaaaattagaactttatctaactgcatgtttgtgcccattaaccaacctttcttgatcccttctccctcccccatacactgttgccagtctctagtaagtatcattctacttccatagttattcaaccaagagagaaaattatgtgaaggagctggtagaaggwagggtactttgcaattgctgaagccttcttgccagtgatgcatctttaaattctgttcctccagggaaaatttcagggtgccccctcctaccacccccaacaacagatacagcttgggaaaaactaaagctgcctgggaagatgttaagtttagaagcttttgttctaactttacacattgaggtggaagggagcctccttctggtcaatcacatagaagcgaattttgtttttcactgaaagttctactttgcctactttattgctggacttgcaaccagcttctcttactaaaaaaaaaaaattctgcagtaatcatgtaagaacaaaggggggaa

SEQ ID NO: 877555 - DNA, 626 bp, Homo sapiens
gggtcttgtgctgctgtgataagagtaagtgctctattctgctctgaagtaatgaaggggctgggctatttcttctgcctaggtcaattctaaagtctacttagagccatgagttttgcagttcagtttaatatgggaatgagaggaacacagaaggcttccctgtttaggcttcccaaaatggaatgagaaataggcaggcatttgactccaacttctgctgcactggaatttcccgttgcacagattctggtgtggggtctaaaatgaggccacctgctgtgttagtataaccctgggccttgttgaggttgtggaactcagtggtccccaggggttctgcgtggatctgggaaccatgtcccctgcacttttctctctggcsaacctctttgggcccagcattcctggctcttctaactgattgcctggacaaggaagctttactcagtggagtatgctaaccctgcaatggcactctgagggtagggtgtggagcgctggttgttaccagggactacctcatgctcaccagtcttcacagctgtcttgtcctccaccccaccccttggctgcaccaccaccaccactgccaccatatacaccctagtcactctctaatcctg

SEQ ID NO: 877556 - DNA, 577 bp, Homo sapiens
tgctgtgttccctgagggctttggagtcagatcgatctcaccttaaattgtggccctgccactttctagtgtcagatctttttgagtcttgattttttaatttgtaaaatgtgaacaacagtagccttgacttcatagcatgggtctgaacattgagagaagtattgcatgtcatatagtcattcaaatacctggtatgcactgctgttgtttttattagctgcaaggctactgccacaagtttttccttttgataaatttgaaaaataaaggacaaatataatgatagttcctgtattaatcaggaactctagagggacagaactaataggatatctacatatgtgtgtgtatgtgtatatatatatatatatatatatatatagagagagagagagagagagagagagagagagagagagagagagaragagacagagaggacagaactgactagtcagttctctagagggacagaactaactagatatatactagttagagggacagaactaactagatatatatatatcctattagttacatatatataggaatttattaagtattaactcac

SEQ ID NO: 877557 - DNA, 613 bp, Homo sapiens
gtaagtctggcttgagcccatggtccttactcctttaaggcattctctataaactgtaaagcaaaagatgaggggcacttgggtgaccattcccataaatgctactatgtggtatatattatgcaaggggctgatattcccaaagaatactcatttctcaaatggcgcaaaaatattaataatcatcaatactaatagctaccaccattgagcagtccctatatgtgcacagcttctggccatttgcttattagtacaataggaggtaggtgctttttctcatctccaccatatagacaaggaaactgaggcagaacaagagacaatggcttatgcaaactcagacaatagaaagagagtagttgggatttaatccaggactttctgactccaaacccatgsatgaacgcataccacaatactttattatcttagaaataacaggaaaaatgtgggctcagtggatgagaactccaggaagcttgagcaagggctgcatttcttctactacaccaaagcaagcatgggtaggtagcaagagaaggtgatgcgtgaaggatggatcatactatgctctggaagcatagacctgcccccagttttccactgtttt

SEQ ID NO: 877558 - DNA, 720 bp, Homo sapiens
atttcttctagattttctagtttatttgtgtgaggtgtttctagtattctctgatggtagattgtatttctgtgggatcagcggtgataacccctttatcattttttattgcatctatttgattcttctctcttttcctctttattagtcttgttagtggtctaccaattttgttgatcttttcagaaaaacagctcctggattcattgattttttgaagggttttttgtatgtctatctccttctgttctgctctgatcttagttatttcttgccttctgctagcttttgaattgtttgctcttgcttctctagttcttttaattgtgatgctagggtgtcaattttagatctttcctgctttcttttgtgggcatttagtgcataaatttccatctacacactgttttaaatrtgtcacagagattctggtacattgtttctttgttctcattggtttcaaagaacatctttatttctgcattcatttcgttgtttacccaggagtcattcaggagcaagttgttcagattccatgtagttgtgcggttttgagtgaatttcttaatcctgaggtctaatttgattgcactgtgatctgataggcagtttgttgtgatttctgttcttttacatttgctgaggagtgctttacttccaactatgcggtcaattttagaataagtgtgatgtgctgagaagaatgtatattctgtttat

SEQ ID NO: 877559 - DNA, 630 bp, Homo sapiens
atggcttttctctttaccttcttcaggtatctgcttaaatgtcgtattctctgtgagagctatctttggtagtatctgccatctagcatattgcatattttatttatattgtgttttgtgtttttctttttttcttttgagacggagtcttgctctgtcacccaggctggagtgcagtggcgcgatcttggctcactgcaagctccgcctcccgggatcacaccattctcctgcctcggtctcctgagtagctgggacaacaggtgcgtgccaccacacccggctaattttttgtatttttagtagagacggggtttcactgtgttagccaggatggtctccatctyctgacctcgtgatccgcccacctcggcctcccagagtgctgggattacaggcgtgagccaccgcgcccgacctttattgtgtttctgtctcctttcattagaagggaagttcatttcagtagagaggtttatttattttgtttacttttgtgtcctccagcacctagaggagagccaggtatatagtagattctcattacacatctcaagaatgaatgagtaaatgaattagtaaagtcacctctttacatcgctaaaactctttatgagcatctcaaaaaat

SEQ ID NO: 877560 - DNA, 630 bp, Homo sapiens
atggcttttctctttaccttcttcaggtatctgcttaaatgtcgtattctctgtgagagctatctttggtagtatctgccatctagcatattgcatattttatttatattgtgttttgtgtttttctttttttcttttgagacggagtcttgctctgtcacccaggctggagtgcagtggcgcgatcttggctcactgcaagctccgcctcccgggatcacaccattctcctgcctcggtctcctgagtagctgggacaacaggtgcgtgccaccacacccggctaattttttgtatttttagtagagacggggtttcactgtgttagccaggatggtctccatcttctgacctcgtgatccgcccacctcggcctcccaragtgctgggattacaggcgtgagccaccgcgcccgacctttattgtgtttctgtctcctttcattagaagggaagttcatttcagtagagaggtttatttattttgtttacttttgtgtcctccagcacctagaggagagccaggtatatagtagattctcattacacatctcaagaatgaatgagtaaatgaattagtaaagtcacctctttacatcgctaaaactctttatgagcatctcaaaaaat

SEQ ID NO: 877561 - DNA, 630 bp, Homo sapiens
atggcttttctctttaccttcttcaggtatctgcttaaatgtcgtattctctgtgagagctatctttggtagtatctgccatctagcatattgcatattttatttatattgtgttttgtgtttttctttttttcttttgagacggagtcttgctctgtcacccaggctggagtgcagtggcgcgatcttggctcactgcaagctccgcctcccgggatcacaccattctcctgcctcggtctcctgagtagctgggacaacaggtgcgtgccaccacacccggctaattttttgtatttttagtagagacggggtttcactgtgttagccaggatggtctccatcttctgacctcgtgatccgcccacctcggcctcccagagtgctgggattacaggcgtgagccaccgcgcccgacctttattgtgtttctgtctcctttcattagaagggaagttcatttcagtagagaggtttatttattttgtttayttttgtgtcctccagcacctagaggagagccaggtatatagtagattctcattacacatctcaagaatgaatgagtaaatgaattagtaaagtcacctctttacatcgctaaaactctttatgagcatctcaaaaaat

SEQ ID NO: 877562 - DNA, 631 bp, Homo sapiens
ctacttacctgccatgccacttatttcatagatccagtttccacatatgtgtgtgtatctttgttggctttctattctatttctttgttaatctgctcccatacagatactcactttcttcattaaaacaggtttataagatttactataaagcaaattcttctgttcttcagaaakactttttttatgttttgttttcccatattaactttagaatcagcttgtcaaatttcattaaaatctctgtcaggatctttttgggttttcactgaaaatatagattattttattgagaattgctatctccatgatattgaaactgttaatgaatatatttatttttatgtaggtcatctttaatatttttcaataaagttttaaattttctttataaaaattatgaacatctctgtttatacttaaccttaggattcttttatatttaatgctgagaccaatgatagatatatattttaaaatacatttactattgttgttagtatatagaagtgcaatttatttttttatgtggatcatacatgctgatatggtttggctctgtccccacctaaatctcatcttgaattcccacgttttgtgggaggaacctggtgggaggtgactgaatcat

SEQ ID NO: 877563 - DNA, 596 bp, Homo sapiens
cctaaatagcagatcctcattgcctgtatattagtttgctatggctgtcttaacagagtactgcagactggtggcttaaacaacagaaatttactttctcacagttctggaggctggaaacccaaatcaagatgctggcagggttggtttctagcgaggtttccctccttggcttgcagacagccgccttctcactgtgtcttcatgtggctttttctctgtgtgcaaggactcctggagtctcttcctcttcttacatagacaccagtcttgttggattaagatcccactctaacgacctcatgtaagcttaattacctccttaacaatcctgtctccgaatatagttaccctgggggttagagcttcaacatatacatttggtggggaacacaatttggtctataatagcctgacaccatcaraccaccagttttcaacattaagccttccaaggactataacagtaataacgcacattaagttggcatttctacttgccggatctgtgctaagtgcttttacatgcatgattacctgtattattatccctactttgccattgggaaacaagctcagcatgttatctgccaaac

SEQ ID NO: 877564 - DNA, 621 bp, Homo sapiens
ttttttttccaccctatattgaagctgtcatcccaccctttttaaaatatagggttttatcttttagaatgctatgtgggcaactagtacagtgagctctctctgtctgtgctactcaatagtcaccagcccatgtggctatttaaatttatattaaaatgaaataaaatataaaattcagtttctttgtcacattaaccacatttcaagtgctcagtaacccttgagtaggtaattcaacttgtctttgccttgttacgagatgatatcagataaggtatgtgaaggtgctgtatggttgtaaggtgttactaattgcgctaggtttactgctgaggacaaagggcaggcaatagattattagcagtcatcaggagccctcacrgtcagtttttcagaagagctgcttgtatatttgaagatttcacaattacacctgaggactaacaaagttttacttttatgttactgattagaattatgcagatctgaaaatcctttaattgaagacgaatcagaatagtgaaaagcctcaggtgcggtgacacccacaggtggtgcacatttttttttaatagcccgttagagttttcattcagggacttggggagtcaaaaggac

SEQ ID NO: 877565 - DNA, 642 bp, Homo sapiens
ctagtttttgtgtgaagatatttctttttcacaataggccaaaaaaggttcaaaaataccccttggctgatcttagaagaatagagttttcaaactactcaataataagtaacgtttacctctgtaagatgaatgcacccatcacaaagcagattctcagaaaacttctttgtcgtttttatgtgaaaatgtttccttttctaccataggcctccacaygctactaaataaccatttgcagattctacaaaaggacagttgccaaactgctcattcaaaagaatggttcaactccgtgagatgaatggacacatcacaaagactattcccagaaagcttttgtctagtttttatgtgatgatattttctttttcaccatagaccttaaagtgctcgctcacaaatatccctttgcagagtctacaaagagactttttgcagactgcttaatcaaaagaaaggttctagtctgtgagatgaatgcacacattacaaagaagttttcagaaatcttctgtctagtttttatgtgaagataattccattttcaccataggcctcaaagtgctcacaaatatttctttcatgattccagaagaacagtgtccaaattcctaaatgaaaagaatattttacctctgt

SEQ ID NO: 877566 - DNA, 642 bp, Homo sapiens
ctagtttttgtgtgaagatatttctttttcacaataggccaaaaaaggttcaaaaataccccttggctgatcttagaagaatagagttttcaaactactcaataataagtaacgtttacctctgtaagatgaatgcacccatcacaaagcagattctcagaaaacttctttgtcgtttttatgtgaaaatgtttccttttctaccataggcctccacatgctactaaatarccatttgcagattctacaaaaggacagttgccaaactgctcattcaaaagaatggttcaactccgtgagatgaatggacacatcacaaagactattcccagaaagcttttgtctagtttttatgtgatgatattttctttttcaccatagaccttaaagtgctcgctcacaaatatccctttgcagagtctacaaagagactttttgcagactgcttaatcaaaagaaaggttctagtctgtgagatgaatgcacacattacaaagaagttttcagaaatcttctgtctagtttttatgtgaagataattccattttcaccataggcctcaaagtgctcacaaatatttctttcatgattccagaagaacagtgtccaaattcctaaatgaaaagaatattttacctctgt

SEQ ID NO: 877567 - DNA, 642 bp, Homo sapiens
ctagtttttgtgtgaagatatttctttttcacaataggccaaaaaaggttcaaaaataccccttggctgatcttagaagaatagagttttcaaactactcaataataagtaacgtttacctctgtaagatgaatgcacccatcacaaagcagattctcagaaaacttctttgtcgtttttatgtgaaaatgtttccttttctaccataggcctccacatgctactaaataaccatttgcagattctacaaaaggacagttgccaaactgctcattcaaaagaatggttcaactccgtgagatgaatggacacatcacaaagactattcccagaaagcttttgtctagtttttatgtgatgatattttctttttcaccatagrccttaaagtgctcgctcacaaatatccctttgcagagtctacaaagagactttttgcagactgcttaatcaaaagaaaggttctagtctgtgagatgaatgcacacattacaaagaagttttcagaaatcttctgtctagtttttatgtgaagataattccattttcaccataggcctcaaagtgctcacaaatatttctttcatgattccagaagaacagtgtccaaattcctaaatgaaaagaatattttacctctgt

SEQ ID NO: 877568 - DNA, 628 bp, Homo sapiens
cagaatggacaaaaatagtgtttacaaactactgaatcaaaagaatgctttaagtctgtgagatgaatgcatacactacaaagtagtttgttagaaagctttctagtttttttctgacaataattcctttttcaccatagtcctcaatgctctcagaaatatccctttgcagattctacaaaaacagtgtttccaaactgctgaatgaaaagaaagtttaactctgttagatgaaygcacacatcacaaagcagtttctcaggtagcttctgtctactttttatctagggatattccctttttccccattggcttcaatgagttccaaaatgtccatcacagaatggacaaaaacagtgtttccataatactgaatccaaagaaatgtttaagtctgtgagatgaatgcaaacatcacaaagcaatttctcagaaaacttctttctagtttttatctgaagatatttcctttttcaccataggcctcaattctctcctaaatatccctttgcagattctacaaaaacagtgtttccagacgctgaaggaaaagaaaggtttaactctgttagatgaatgcacacatcacatagcattttctcagatagcttctgcctacattttattc

SEQ ID NO: 877569 - DNA, 593 bp, Homo sapiens
tgtgctcccaaatgtctattctcagaatggacaaaagcagtgtttccaaactgctgaatccaaaggaaggttaaactagtgagatgattgcacacataacaaagcagtttcccagaaagcttctttctagtttctattgatagatgtttcctttttcaccataggccacaatgctctccaaattttccctttgcagtttctacaaaaacagtgtttccaaactgctgaattaaagagacaaataactctgttagatgaatgcacacatcccatagcagtttctcagatagcttccaactactttttatcctrggatattcactttttccccattggtctcaatgagctcccaaatgtcaattcgcagaatggacaaaaaatgtgttgccatactactgaatccaaagaaatgtttaagtctgtgagatgaatgcacacaacacaaagccatttctcagaaaacttctttctaatttttatctgcagatatattctttttcaccataggcctcaatgctctttgaaatacccattttcagattctacaaaaagagtgtttccaaattcctgaatctaaagaaaggttcaactct

SEQ ID NO: 877570 - DNA, 624 bp, Homo sapiens
atcacataacagtttctcaggtagcttccatctagttttgatcctgggatattctctttttcactattggcctcaatgagctcccaaacgtccactcacagaatggacaaaaacactctttccaaactactgaatccaaagaaaggtttaactctgtgtgatgaatgcacacaacacaaagtagtttctcagaaagcttctttctactttttatctgaaaatgtttcctttttcaccataggcctcaatgctctccaaaatatgcctttgtagatcctacaaaaacaatgtttccaaactgtcaaatgaaaaaaaggtttagaactcctagatgaatgcagacaacacataacaatttctcggatagcttccatctaatttttatgctgggatatttgctttttcaccattggcctcaatasctccaaaatgtccattcatggaatgcaaaaaagtagtgtttccaaactgctgaatccaaataaagttttaagactgtgagacgaatgaacatgtcacaaagcagtttctcagaaagcttctttctagtttttatctgtagaattttaatttttcaccacaggcctcaatgctctctgaaatatccgtttgtagattctacaa

SEQ ID NO: 877571 - DNA, 632 bp, Homo sapiens
ggcattcattatgatttgatctaatttttgaaaagaaagctttacaggccggcgcagtggctcacacctgtaatcccagcactttgggaggccaaggtgggtgggtcacctgaggtcagaagttcaagaccagcctggccaacatggtgaaaccccatctctactgaaaatacaaaaaaaaaaaaaaaaaaaaaaaaaagccgggctcagtggctcacgcttgtaatcctagcactttgggaggctgaracgggcggttcatctgaggtcgggagttcaagaccagcctgaccatcatggtgaaacccgtctctactaaaaatacaaaattacccgggcatagtggcatatgcctctaatcccagctactcgggaggctgaggcaggaaaattgcttgaacccaggaggcggaggttgcagtgagccaagatcacaccattgcacttcagcctgggcaacaagagtgaaactccatctcaaaaaaaaaaaaaaaaaaaaaaaaaattagcggagcgtggtggtgcctgcctgtagtcccagctatttgggaggctgaggcatgagaatcgcttgaacccaggaggcagaggttgcagtgagccaagatcacatgactgcactccagcctggg

SEQ ID NO: 877572 - DNA, 632 bp, Homo sapiens
ggcattcattatgatttgatctaatttttgaaaagaaagctttacaggccggcgcagtggctcacacctgtaatcccagcactttgggaggccaaggtgggtgggtcacctgaggtcagaagttcaagaccagcctggccaacatggtgaaaccccatctctactgaaaatacaaaaaaaaaaaaaaaaaaaaaaaaaagccgggctcagtggctcacgcttgtaatcctagcactttgggaggctgaaacgggcggttcatctgaggtcgggagttcaagaccagcctgaccatcatggtgaaacccgtctctactaaaaatacaaaattacccgggcatagtggcatatgcctctaatcccagctactcgggaggctgaggcaggaraattgcttgaacccaggaggcggaggttgcagtgagccaagatcacaccattgcacttcagcctgggcaacaagagtgaaactccatctcaaaaaaaaaaaaaaaaaaaaaaaaaattagcggagcgtggtggtgcctgcctgtagtcccagctatttgggaggctgaggcatgagaatcgcttgaacccaggaggcagaggttgcagtgagccaagatcacatgactgcactccagcctggg

SEQ ID NO: 877573 - DNA, 596 bp, Homo sapiens
tttgttttttagacggagtccgggtctgtcgctaggctggagtgcagtagcgcgatctcggctcactgcaacctcctcctcccgggttcaagcgattcccctgccttagcctcctgagtagctgggactacaggcgcaagctaacacgccaggctaattttttttttttttttttggattttagtagagacagggtttcaccatgtcaccatgttggccaggatggtctcgatctcctgacctcgtgatccgcctgcctcggcctcccaaagtgctgggattacagacgtgagccactgcgcccagccaggtaatactcttctacattttctatatgatgccctcatgagttacaattattcctagccctgtgygagctagtggaattgttagacctactcctttgtactactcccctctgggggttctttttcgagtcttgggtaatcttttctcccattgcagatatccatatttacctaaataccccagcggtccatcttcagattttcagctctctctctctctctctctctctccccccactatttttctttctctccagctccctagtctccagtacttcaccctacaag

SEQ ID NO: 877574 - DNA, 557 bp, Homo sapiens
tcttttaagttgctgatggaaagctgactaatgtggaattcttagaaagattatacccactgttgttggttgcctttatcaatctgtatctttaccttctctaaacttttagaaggctttgtcacttaagaaagatgaagtagtagcacaaccctccttttccaggttaaacctacttctccctgccccaaaagatcagaaaaaaacagacagtgatccattgcttcagaaaataagtttattttgacaattcacccaagcctactctttttttttttttttttgagacggagttttgcccttgttgcccaggctggagtgcaacggkgcaatctcggctcactgcaacctctgcctcccgggttcaaacaattcacctgcctcagcctcccgagtagctgggactacaggcatgcgccactgtgtccagctaatttctgtatttttagtagagacagggtttcaccatgggccaggctggtctcgaactactgacctcatgatccccctgccttggcctcccaaactgctgagattacaggcgtgagccactgtgc

SEQ ID NO: 877575 - DNA, 695 bp, Homo sapiens
tgccacaactgccagatgaaaagcaacaatcagagtagaaaaatctgttgcctgatatacataacaccaatcagaccgtgtggatttttctctgaattgactgattttgtttttttcttactgaaaatggacctgcctttcactgaattttctgagggcagagtcttagctgttttctttaagcaccttttttttttttttccattgggaaatggctgatgagttcacatttagggatgtacacacacagatggcagacgtctccccactcatccagccccagatctgagccttgacgcaggccaagtggaaaaatactttcccgcccccctcccctgttcccacttcctcatctggcactatgcatgtctcactcaccctccacagcactcartcccatcgacgttcactgaacattggctttctctttctgactcctgcctgttttagtccactatatattgctgtatttgcttaaatgctggaaagtaactgttaaaatgtgaaattgtaatttttaaaaaggctacaattaaattttagccaatgccactcaccaaatctttgcacctagtagatagatcaatgtaaaaacaaatacctaactgtacagtgagtgtgggggaaatgtagtaacctagttagtagtcttcaatataaccaattgtacaaggggaagtggtgtttacctactt

SEQ ID NO: 877576 - DNA, 530 bp, Homo sapiens
ctgacttggcaattggcaggatgatactactattcactgagaggagagacataaaacagggtacaaatttgaaaggaagaatgtacaggggatggtaacaaattgagttttagacatgttgagtaagaggtacctgtgaaacatcaaagatattaagtaggcttttggcttagtgggtttgacagtgacttgggagattttagttgtagacagatattgggagtcattgggtgtataatacttgattctgtctcattaggaatgggagaatagaaatatcaagtatacttttaagttatttttgaataaaggtattatgtttaatttgcatgacaaatctgtaagaaayctctaggacagggaaacattattgcacatagaagtggctagtggcttgaagggttgcctaatatgtaaagacatccaaatttttaaaaggtggagtaggtagagggaaattttaacttatttttttaaatatggcaagaattgtcagattgggttaaaaaatcaagacccaactctatatg

SEQ ID NO: 877577 - DNA, 620 bp, Homo sapiens
ttaatttcttttcttgtgctaaacccatttataaaccaacgaagttttatgcctattttatttcatgggccacagatatctatactttcaaagtgcacatgaacttgaaagattccactggacatggatcctaaggacttgctttaaatagttatagattctaatttggtaaacacaaaaacataagcaatcaaattggtggttttctgactgttgagtgcatttccttagagactgtcattcaggacagattttgtctttatcatgataccaaatatcatttgtatttaaaaaacactgkgtatcctaaaccaaggtcagttaatctccaaaatctttctttcccccaatcattgtgaatgagcatcttcccaatattcaagagaggtgacccttgtgactcgtttccatctactaaagatgtatctcaactttgcagatttttttttttggctgtacagtggaacttggattacactttaaattaactttctctaggaatcaaaggtaatcattatttctctctatgatctaaatgactattctcatgttttttttcaagttgaagattagttttcaattccctttatatctctgccctttttcatagtaacctctga

SEQ ID NO: 877578 - DNA, 555 bp, Homo sapiens
tcagagagtagttcaaggattagtaccaaaaaaaattatttgaataatgcatgttaacagcataataattgtaaaactgcaacagaaagaaaggtataaaacagaatttgctcctgggatgctctcaattggaagagccacggatgctttctttttttttttttttttttttttttttttaaagcaatgggtagagtttgccttgaracatccacccactcattgcctgggaagtggaaacacacatttagttaagtagctgatgggaacaaaaacaagggcattcctaagagccatccgcagagtctcttctttactgaaagtaagcagagagagccacttgcatcaggccttgtgatgcaaaattgaaaggcaaaaccaatctcagctaagcatgcatttctgtttttgtttttgagtttttaaaatcccatttcaatgaatatgtattgccaaggttatctagtgaaagaaactgggatggagaacaaaacactctacagagctgtgccatccagaaggcttggaattaacctgaaggctttattaaacaaa

SEQ ID NO: 877579 - DNA, 555 bp, Homo sapiens
tcagagagtagttcaaggattagtaccaaaaaaaattatttgaataatgcatgttaacagcataataattgtaaaactgcaacagaaagaaaggtataaaacagaatttgctcctgggatgctctcaattggaagagccacggatgctttctttttttttttttttttttttttttttttaaagcaatgggtagagtttgccttgagacatccacccactcattgcctgggaagtggaaacacacatttagttaagtagctgatgggaacaaaaacaagggcattcctaaragccatccgcagagtctcttctttactgaaagtaagcagagagagccacttgcatcaggccttgtgatgcaaaattgaaaggcaaaaccaatctcagctaagcatgcatttctgtttttgtttttgagtttttaaaatcccatttcaatgaatatgtattgccaaggttatctagtgaaagaaactgggatggagaacaaaacactctacagagctgtgccatccagaaggcttggaattaacctgaaggctttattaaacaaa

SEQ ID NO: 877580 - DNA, 550 bp, Homo sapiens
ctcatcttaaaacagggaaaataatagccagctcagagagtagttcaaggattagtaccaaaaaaaattatttgaataatgcatgttaacagcataataattgtaaaactgcaacagaaagaaaggtataaaacagaatttgctcctgggatgctctcaattggaagagccacggatgctttctttttttttttttttttttttttttttttaaagcaatgggtagagtttgccttgagacatccacccactcattgcctgggaagtggaaacacacatttagttaagtagctgatgggaacaaaaacaagggcattcctaagagccatccgcagagtctyttctttactgaaagtaagcagagagagccacttgcatcaggccttgtgatgcaaaattgaaaggcaaaaccaatctcagctaagcatgcatttctgtttttgtttttgagtttttaaaatcccatttcaatgaatatgtattgccaaggttatctagtgaaagaaactgggatggagaacaaaacactctacagagctgtgccatccag

SEQ ID NO: 877581 - DNA, 610 bp, Homo sapiens; identical to SEQ ID NO: 873481

SEQ ID NO: 877582 - DNA, 584 bp, Homo sapiens
acacattaaacaaaaattaattcaagatgaattaaagacttaaatataaaacccaaaaccattaaaaaccctagaagaaaacctaggcagtaccattcagtacataggcatgggcaaagacttcatgatgaaaatggcaaaagcaattgaaacaaaagccagaatttacaaatgggatctaatcaaactaaagcacttctgcacagcaaaagaaactatcatcagagcgaacaggcaacctacagaatgacagaaaatttttacaactacccatctgacaaaggtctaatattcwtaatttaaaaggaacttaaacatatttataagaaacaaacaaccccatcaaacatgggcaaaggatatgaacagacacttctcaaaagaagacatttacatggccaacaaacatatgaaaaaaagctcaacatgaccgatcatcagagagatgcaaatgaaaaccacaatgagataccatctcatgccagtcagaatggcaattattaaaaagtcaagaaacaacagatgctggtgaggctgcagagaaaaaggaacacttttacactgttggtgggaatgtaaattag

SEQ ID NO: 877583 - DNA, 681 bp, Homo sapiens
aaaccacaatgagataccatctcatgccagtcagaatggcaattattaaaaagtcaagaaacaacagatgctggtgaggctgcagagaaaaaggaacacttttacactgttggtgggaatgtaaattagttcaaccgttgtggaagacagtgtggtgattcctcaaggatctagaaccagaaataccatttgacccagcaatcacattacttggtatatacccaacagaatatatatcattctactataaagacacatacacatatatgtttattgcagcactatttacaatagtaaagacatgaaaccgataccaaggcccatcagtgrtaggctggataaagaaaatgtggtacagatacaccatggaatactatacagccataaaaaggaatgagatcatgtccttttcagggacatggatgaagctggaagccatcatcatcagcaaacatgtgggagaagaacaatgagaacatatggacacagagaggtgaatcacacataccagggacttttggggtgtggagggcaaggggagggaacttagaggacaggtcaataggtgcagcaaaccatcatggcacatgtatacctatgtaacaaatctgcatgttctgttcatgtatcccattttttaatgaagatgtaaagaaaaacaaaaattaaaaaaagaaattt

SEQ ID NO: 877584 - DNA, 681 bp, Homo sapiens
aaaccacaatgagataccatctcatgccagtcagaatggcaattattaaaaagtcaagaaacaacagatgctggtgaggctgcagagaaaaaggaacacttttacactgttggtgggaatgtaaattagttcaaccgttgtggaagacagtgtggtgattcctcaaggatctagaaccagaaataccatttgacccagcaatcacattacttggtatatacccaacagaatatatatcattctactataaagacacatacacatatatgtttattgcagcactatttacaatagtaaagacatgaaaccgataccaaggcccatcagtggtaggctggataaagaaaatgtggtacagatacaccatggaatactatacagccataaaaaggaatgagatcatgtccttttcagggacatggatgaagctggaagccatcatcatcagcaaacatgtgggagaagaacaatgagaacatatggacacagagaggtgaatcacacatacsagggacttttggggtgtggagggcaaggggagggaacttagaggacaggtcaataggtgcagcaaaccatcatggcacatgtatacctatgtaacaaatctgcatgttctgttcatgtatcccattttttaatgaagatgtaaagaaaaacaaaaattaaaaaaagaaattt

SEQ ID NO: 877585 - DNA, 681 bp, Homo sapiens
aaaccacaatgagataccatctcatgccagtcagaatggcaattattaaaaagtcaagaaacaacagatgctggtgaggctgcagagaaaaaggaacacttttacactgttggtgggaatgtaaattagttcaaccgttgtggaagacagtgtggtgattcctcaaggatctagaaccagaaataccatttgacccagcaatcacattacttggtatatacccaacagaatatatatcattctactataaagacacatacacatatatgtttattgcagcactatttacaatagtaaagacatgaaaccgataccaaggcccatcagtggtaggctggataaagaaaatgtggtacagatacaccatggaatactatacagccataaaaaggaatgagatcatgtccttttcagggacatggatgaagctggaagccatcatcatcagcaaacatgtgggagaagaacaatgagaacatatggacacagagaggtgaatcacacataccagggacttttggggtgtggarggcaaggggagggaacttagaggacaggtcaataggtgcagcaaaccatcatggcacatgtatacctatgtaacaaatctgcatgttctgttcatgtatcccattttttaatgaagatgtaaagaaaaacaaaaattaaaaaaagaaattt

SEQ ID NO: 877586 - DNA, 586 bp, Homo sapiens
attcatatggaacaaaaaaagagtctaaatagccaatgcaattctaagcaaaaagaacaaagccagaggcatcacattacccaacttcacactatactataaggctacagtaaccaaaacaccatggtactgatacaaaaacagacacatagaccaatgaagcagaataaagaacccagaaatggccsggcacggtggctcatgcctgtaatcccagcactttgggaggctgaggcgggtggatcacaaggtcaggagatcgagaccatcctggctaacacggtgaaaccccgtctctactaaaaaaaaatacaaaaaaattagccagcgtggtggcaggtgcctgtagtcccagctacttgggaggctgaggtcacggagaatggcatgaacctgggaggtggagcttgcagtgagtggagattgcaccactgcactccagcctgggcgacagagtgagactccgtctcaaaaagaaagaaaaaaaaaaaagaatatcacaactctatttcatagaacagcctccaactgctaaactatggctattctttaactttgccaccttgatttccttttatttctcttt

SEQ ID NO: 877587 - DNA, 586 bp, Homo sapiens
attcatatggaacaaaaaaagagtctaaatagccaatgcaattctaagcaaaaagaacaaagccagaggcatcacattacccaacttcacactatactataaggctacagtaaccaaaacaccatggtactgatacaaaaacagacacatagaccaatgaagcagaataaagaacccagaaatggcccggcacggtggctcatgcctgtaatcccagcactttgggaggctgaggcgggtggatcacraggtcaggagatcgagaccatcctggctaacacggtgaaaccccgtctctactaaaaaaaaatacaaaaaaattagccagcgtggtggcaggtgcctgtagtcccagctacttgggaggctgaggtcacggagaatggcatgaacctgggaggtggagcttgcagtgagtggagattgcaccactgcactccagcctgggcgacagagtgagactccgtctcaaaaagaaagaaaaaaaaaaaagaatatcacaactctatttcatagaacagcctccaactgctaaactatggctattctttaactttgccaccttgatttccttttatttctcttt

SEQ ID NO: 877588 - DNA, 630 bp, Homo sapiens
cgaattctaccaaaggtacaaagaggaactaataccattccttctgaaactattccaaacaacagaaaaagagggactcgtccctaactcattttatgagaccagcatcattctgataccaaaacctggcagagacacaataaaaaaagaaaatttcaggccaatatccctgaatatcgatatgaaaatcctcaataaaatactrgcagaccgaatccagcagcacatcaaaaagcttatctaccacaatcaagtcggcttcacccctgggatgcaaggctggttcaacatatgcaaatcaatacacgtcatataaacatatacatcatataaacagaaccgatgacaaaaaccacgagtatctcaatagatgcagaaaaggcctttgataaaattcaacaccccttcatgctaaaaactctcaataaactaggtattgatggaacgtatctcaaaataataagagctatttatgacaaacccacagccagtatcatactagatgggcaaaagctggaagcattctctttgaaaactggcacaagacaaagatgccctctctcaccattcctattcaacatagtattggaggttctggccaggccaatcaagcaagagaaagaataaagc

SEQ ID NO: 877589 - DNA, 588 bp, Homo sapiens
tccccgctgatttttgtatttttagtagagactgggtttcaccattttggccaggctgatctctaactcctgacctcaggtgatccacacgcctcggcctcccaaaagtgctaggattacagacgtgagccatcacgcccagcctaaagattttatttttcatataactaacatgcttagagatttaactatatgtcagaattaatcaaactgttgaaacttcatattgtcttttccttcctggtgcttactgtcttgcacagaagatataaaaactcaagaagtacgatagttkttcgaaatatgggtaaagttccgtgaaaagacagaaaaaaaactcgatcccaggaattccaattccctaatacatctcattaaataaaaccaattagcttatcagattagccatctttatgaaacattctcacatgtgcttaaaagcacttgttagcaagaaacctttctttgacattttttaaaggtacaataaaaatacagcctttgtctagcttatccctaacattatcactaaagctgttggagaaaaagaaaaagtatgtgatcggctgctcacagatctcagtatgt

SEQ ID NO: 877590 - DNA, 580 bp, Homo sapiens
gaaacccatctctactaaaagtacaaaaaatagctgggcatggtggcgcatgcctgtagtcccagctactcaggaggctgaggcaggagaattcacttgaacccaggaggtggaggttgcagtgagccaagatcatgccactgcactccagcctgagagacaggttcaaaaaaaaaaaaagttgcagtttaaagagtaaggttgaatttgaagatgaagagaatggaacgaaagaaagggagagatatgaagagataraaagggacactttaaatatataggagtccaggcaacatacaaattataataggatttatgggacactgggtagcaagattagcaagccagatagcagaagcaaacagtactaggtgattaaataattttctgataagttctaaaacttttaagaaagccaaaattctaaaactgataagaaagcattggaaggtcacactctccaagcttaattgaaagcattggaagttctcactctcaccacccaacctattgggacaatatccctctttggaactctggcagctacattagtattacatatttaattaatttattattt

SEQ ID NO: 877591 - DNA, 580 bp, Homo sapiens
gaaacccatctctactaaaagtacaaaaaatagctgggcatggtggcgcatgcctgtagtcccagctactcaggaggctgaggcaggagaattcacttgaacccaggaggtggaggttgcagtgagccaagatcatgccactgcactccagcctgagagacaggttcaaaaaaaaaaaaagttgcagtttaaagagtaaggttgaatttgaagatgaagagaatggaacgaaagaaagggagagatatgaagagatagaaagggacactttaaatatataggagtccaggcaacatacaaattataataggatttatgggacactgggtagcaagattagcaagccagatarcagaagcaaacagtactaggtgattaaataattttctgataagttctaaaacttttaagaaagccaaaattctaaaactgataagaaagcattggaaggtcacactctccaagcttaattgaaagcattggaagttctcactctcaccacccaacctattgggacaatatccctctttggaactctggcagctacattagtattacatatttaattaatttattattt

SEQ ID NO: 877592 - DNA, 568 bp, Homo sapiens
tgttctcctaggtctctgggcctttttcccattgtcctgatgcacaacaactgaatcccttttatccatgctaatatctagcaacttgttgctgggccacacccaccctcagcattctcttcaggacatgcgtttttactatttacatggttaagtctgcaaattttccaaattttcagactctgctttccttttaattataaacyttgtctttaaattactcttttgctcctgaatctcagcttaagcagccaaaagtagccacacagttccttctatattttgcttagaaatctcttccagaaatcctaattcatcactcttacgttctgccttccataaagccctaggacagggaggcaatggtgccaagttcttcacaactgtattttacttcaaatcccaataagatactccttatttttatctaagacttcattagaatgaccttcactgtctatattcctatctacatttcagtcaccacaacttaactaatctctaagaagttccaaactttccctagtattctcgtcttctatgtcctcacaagaatctaggctttttc

SEQ ID NO: 877593 - DNA, 604 bp, Homo sapiens
tattcaaatttctacagctggcttgcttggattttcctcagagaatgaggttttcttttctatcgcattgtcaggctgcaaattttccaggcttttatgctctgcttcccttatacaactgaatgcctttaacagcacccaagtcacctcttgaatgctttgctgcttagaaatttattctgccagataccctaaatcatctctctcaagttcaaagttccacaaatgtctaggacaggagcaaaatgccaccaatctctttgctaaaacataacaagagtcatctttgctccacttcccaacaagttcctcatttccatatgagatcacctcagcttggactttattgtccatatcgctatcaacattttgggcaaaaccattcaagaagtctcyaggaagttccaaactttcccacattttcgtgtcttctcagagccctccaaactgtaccaacctctgcctgttacccagttccaaagctgcttccacattttgattctctcttcagcagcgccctactctactggtaccaatttactgtattagttcattttcatgctgctgataaagacacacttgagactggacaatttacaaaaga

SEQ ID NO: 877594 - DNA, 596 bp, Homo sapiens
tctttgcttaaatttttggagtttgatctatggtcaaaataacccagttattcacttatgataaatgagatggagcatgaccccctgtccattttaacattgaatatttagctcatagcattaagaagtagacatttaagcccagggatcaaagaatgacagcaaatttcccagtgttggagtcttaagatctggtccatagagttatgagcacaatttggttgccaatggcattggccattgctgctagttcaactgttcttaaagcaactattggcactacccctaccccagtcaccactagttactgtttatygagcactttctacgcactttgcattcttgcaagtctgtacaaatagtaatatataaaacccactctatggagtgggtattgtggctaatataaaggtaaagagatagatgctaagcaaggtttgtaacttgtcagaggtaacccaacttcttaaagagcagagatgggattggtacccagctatgtccttcctcaaagcccatgtttttaaaagttaagtacccagcagtgtttataaggaagaaacaagggaaggaggaaaaaattcagaggagatggc

SEQ ID NO: 877595 - DNA, 592 bp, Homo sapiens
ccaaggtgctggaattaaaggcgtgagcaactgtacctggccccaatccagtgttcttttatgtcattttccctcttcctttcagggctgttatggcacctacctttttttaacgatattggggatgttattgcaaactgccaagatattactagatagaatgagcctttggcccaggcatcagatatgcaattcagaaccatgcaatttctgtctgtttttataggcatccccaacccctaacttactggcctcargcagcacgagatggatgggtgagtggtagctccctgctgctaccccatcccctcccagctggggctcatggccatgtctgcttcatgcacacactgcatacaatagccatgcggggctagaatgagctgcagctgccacccgggccacaaggtggtttcaggggctaaggacccagtgtgtctggctggctagtttttcctgttcgctgtcccttcctgcctcgtgcccacggagtatttcctcctatggctgaaccaggaagagggtacaaacaattatgagttttccaccatgttggaggaacccatttgaaaaaagccggaggcttttgttc

SEQ ID NO: 877596 - DNA, 669 bp, Homo sapiens
ggcacgactataaaggtatctgaaaatgtgtaagtaactttggaactgagtaatgggcagagattggaacagtttggaagactcagaagaatacagaaagatgtgggaaagtttggaagttcctagagacttgttgaatggtttccatcaaaatgctgatagtgatatggacaatgaagcccagtstgagggagtcttagatggagatgaggaacttattggggactggagcaaaggtcactcttgctatgcttcagcaaagagactggaggcattttgccactgccctagagatctgtggaactctgaatttgagagagatgatctgaaattggaactcatgtttaaaagggaagcagagtataaaagtctggaaaatttgcagcctgaccatgtgatagaaaagaaaaacccattttctgggaagaaattcaggtcagctgcaagaatttgcatgagtaaccaggagccaaatgttaattaccaagaccatgggaaaaaaatgtctccaaggcatgttagaagtcttcacagcagcccctcccatcatatgtcccaaggccttggagggaaaaacggttttgtgggccagatccagggccttgctgctttgtgcagtctccagacttggtgccctgcatcccagccatagaaaaaatgggccaacat

SEQ ID NO: 877597 - DNA, 519 bp, Homo sapiens
gcaggatattgagaaatattcaattttcatgtgagagcaggggtaggggaatagagtcattcatgcctttgtctggctcagtgaatctgcatttttacaaaagattacatagacaataaggcagaggcaacaatcagatatgcatttgtctcaggtggtcagaggatgactttgagttctgccctatgtccctgcacctatgaagataagctatgaatttacattgccatggtgaactttaacagaaatgctttagggcraagatcttggggtccacaaggaatttctctgtgggcaaaatgtgagagaggtatgtagcttttcatctttgtagctatctaatttaggacacaaaatgggaggcaagttttcatgacccagttctgagcttgactttccctttggcttagtgaatttgaggttccaagatttattttccttttacagttcctaacctgcacatgaattccagccttccctccaacaggccatttgtttaaaggtagtttctgattctga

SEQ ID NO: 877598 - DNA, 519 bp, Homo sapiens
gcaggatattgagaaatattcaattttcatgtgagagcaggggtaggggaatagagtcattcatgcctttgtctggctcagtgaatctgcatttttacaaaagattacatagacaataaggcagaggcaacaatcagatatgcatttgtctcaggtggtcagaggatgactttgagttctgccctatgtccctgcacctatgaagataagctatgaatttacattgccatggtgaactttaacagaaatgctttagggcaaagatcttggggtccacaaggaatttctytgtgggcaaaatgtgagagaggtatgtagcttttcatctttgtagctatctaatttaggacacaaaatgggaggcaagttttcatgacccagttctgagcttgactttccctttggcttagtgaatttgaggttccaagatttattttccttttacagttcctaacctgcacatgaattccagccttccctccaacaggccatttgtttaaaggtagtttctgattctga

SEQ ID NO: 877599 - DNA, 617 bp, Homo sapiens
gctcactttcctgggaaggagcatggagtaatcagacagaataaagggtactccattgttttgctggccagtaatgatagagagctctggtagagtctgcttttaatagaggcaatgtaataggcaaggctttttgtattggtaaatgtcagatgccaggctttctctaggggtgaagcagggtggggtaagtggaatgttgagatgtcagtgcacagggatcttttttgcttatgaggtcaccataagtgatgcaaattaccagaaaatccagtggctgtatgatcacatattctgcttctaacagtggcagttgtttcataataaactcattataaagacaacrgttcccatcattgccagttgattagaaaaacaactctgattattttttgtttcaaatttttgggaggtgaatcttaagctaagcagaaggaaacaatctagtatttgagagctggactcatgttgcaactagtctagtgttatgaaaaactcatatatgtggtttctgcatataagaagcttacaatctaaaagaggaaaggagtcttagacctttgtaacaactggagaaacagggaggtggtttgctagaaaatgcaatcagaattgga

SEQ ID NO: 877600 - DNA, 624 bp, Homo sapiens
taaagctcaaaaatctttgtgtaccttcaactaccatctatgagtcaattctgttccttgtctagtcacttaacaaacacatttctttttattcttcaatggaaaatgagtaggtaggcagaaaataagctaaatataagattgggtggagagaagggacactgagatcattgtgcctccttagatatctacttcaaagcagtctcaccaaaaccctttargctttaccatagataataatgcaccattgaacaataggcaattgctggatcaggtgacttatggtaacaggtccttttcctccccaccttacttaaaaacaaatctcattataatggaaatggactggttgaatgagctccaattgcaactagcctccaaaaatcattttatagctgctttgaatctggccattttaaagcaaatcctccagataaatttctcaatccatctccataaaataactagtgattattaaagggataattatttctaataactcctcatcatatagaattataaaattatacctctcttggatatttaaattatattgggcatgtcttcataattataaatatacccctgccattttcttcattttgaggaaaatctctccagata

SEQ ID NO: 877601 - DNA, 610 bp, Homo sapiens
ataaaaacaatgaccttctacaactgagactttaaggcaattttaccatgtgtaatatcaaggaagcttaatgggaagaaaacagccatcatataagcaatttacataacatgatctatttatctgtcagctaaatttgtagcaggtcagatgctaaatggaayaaccagtacatcagttggtaaatggaatttaaattgtaggattctcttgagttctcattgatttaatagtggagccattcagattaatatcctctctaaatagaataacttgaaacttaaaatgctttttcactttaaggctttgtactgaccagagttagggggtttcggaaataaaactaaatttactgtttagagtgcttaaaacactcacattttgagcaggtgatactttgaaggttaataggattacaatcttggatgaaacagaggcaaatatttaatattggttgaggtttactaaaaaatgtaggtattaatagtttaatattcccttagtttattgctgtcagtggtgtgatttaagctgaggaccatctggtggcggccaatctgaagggggcaaagttagtacgtggcacaggagatcctccttatttgtcact

SEQ ID NO: 877602 - DNA, 649 bp, Homo sapiens
cttaataattcctaataattcaatcttcaaagaggattatttgtctctttcctacttcccaaattttttaaactaaagcaagagatataagaaagtcttccaaattgtctagaaagtttcccactaattaacatggaatgttgcagctataacttacggttattttaaccattaatcaaaagcatataattaaagattaaactgaattaaatgtctccactaagtaattggcttaggggacttaatgcatactacagtaagagtccawgcacacacatgtcattggctgaagtgaatcgatgtgcagatgggacttctacctgcaagtggtatataattcatgtttattgtagataaaaatttgatgcagggctgccaatatgaaaaacaaagttttataatagattttgttttcattcaaagagtttgtccaaagagaaattaataaacaaaacttaacattgagcacgttctgttcaaaaataaattaatttcaacgtccttaattcagtttttaaaagtgaaatcactttccttagtaactcaatttatctgtaacttgctgttttctcaactcaatttaaaagttaatcttattatattttaaaacctgaaacaagctgttcttcatatgtggaaaagcttattt

SEQ ID NO: 877603 - DNA, 531 bp, Homo sapiens
ttaagaagccgaagatagcagtctttgtggttacatattaagatttctgagagttgacccacaggtctagacattttctctgcttctttatgttatacaatagcagataaacttctcgagaacgtgtaaaatttattcttgtaactgtttattgtcctaggggagtgcaaggacattaataarctttagagaaaggcagttggcattcatgaaaacaaaatgcagtagtgagagaaaaatagggaaaaagagggtctatgaccaatcccacccttaccttagaggtttcttgctgattatagatcactagtttcatgctgtctgcttgcttggcatttctaagaccatgaacagtatttaccaaagtatggcgtaagggatgctgggaatatacaagattattttaggtcactattgatgaatatttttatttcaatagtcatgcatttttataattaacttatatttataaaattgctgtttttcacttagaggtggaattcctgcaattcagtagcaaaaaattaaata

SEQ ID NO: 877604 - DNA, 592 bp, Homo sapiens
cccagcactatttattgaaaaggatgttctttcctcattgaatattcttgacaacttttccaaaaatcatttggataaaaaacgcatggatttatttctgggttctctattctgttctgttggtctatgtaccatttttcctatcataccatattgttttggtcactatattcttgtaatatattttaaagtcaggtagtgtgatgtctccagctttgttgttattacttargattgctttggtttttcaagctcttttttgattccatataaattttaagatttttttttctttttctgtgaagaatattattggtatttttaaaggaattacatggaatctgtagattgctttgagcagtatggtcattgtaacaatgttaattctttcaatctatgaatacgggatgtcttcatattcaattaagttctcttaaatttctttcatcagaattttgtagttttctttgtaaaggtcttttgcttccttggctaagtatacttatagatttttttaatagccattgtaattgggattgccttctttattttctcctcagccagttcattattggtgtatagaaatactact

SEQ ID NO: 877605 - DNA, 631 bp, Homo sapiens
ctactttacaccacacacaaaaatcaaatcaaaatggatcaaagacttcaatgtaaaatccaaaactataaaaatcctggaagataacctaggcaatcgcattctggacataggaccaggcaaagatttcatgaccaaagataccaaaagcgattgcaacagaaacaaaaattgacaattctagttaaactaaatagcatctacagagcaaaaggaactatcaacagagtaaacagacaacctacagaatggaagaaaatatttgcaaastatgtatctgacaaaggtctaatatccggtatctacaaggaagttaaacaaattcacaagcaaaaaccaaacaaccccattaaaaaatgggcaaaggatgtgaacagatatttttcaaaagacatacatgtgaccaactagtatatgagaatatcctcaacatcactaatcgttagaaaaatgcaaataaaaaactcagtgagatgccatctcaccccagtcagaatggctatttaatttttttctcttgtttgatacagctggagtgcagtgtcataatcacagttcacttcaaccccatcttcagcctcccagtatgctgggattagagacctgagccattgttcctggccgagaatgg

SEQ ID NO: 877606 - DNA, 617 bp, Homo sapiens
tgcaggattcaaatggaatgttgccagtttttgaccattaagtatgatattggctgtgggtttctcataaatagctctcattattttgagatactttccatcaatacctagtttattgagagtttttagcgtaaaggggtgttgaatttcatcgaaggccttttctgcatctattgagatagtcatgtggtttttgtcattggttytatttatgtgatggattacatttattgatttgcatatgttgaaccagccttacaagggatgtgagggaactcttcaaggagaactacaaaccactgctcaaacaaataagagaggacacaaataggaaaacattccatgctcatgaataagaagaatcaatactgtgaaaatggccatactgcccaaagtaatttgtagattcaatgctatccccatcaagctatagtaaccaaaacagcatggtactcatatcaaaacaaatatatatagaccaatggaacagaacagaggcctcagaaataacaccacaaatctgcaaccacctgatgtttgacaaacctgacaaaaacaagcaatggggaaaggatcccctatttaataaatggtgttgggaaaactggctagcctta

SEQ ID NO: 877607 - DNA, 587 bp, Homo sapiens
acagtttgaatcttctgcatatggctagccagctatcccagtaccattcattgaatagagggtcctttctccattactttttttcagctttctcaaagatcagatggttgtaagtgtggcattatttctgggtcctctattatgttctgttgatctatgtgtctgtgtaccagtaccatgcttttttggttactgtagtcctgtagtatagctggaagtcaggtagygtgatgtctctggctttgttccttttgcttggaattgtcttggctattcggaacctttttttggttccagatgaattttaaaatagttttttctagttctgtgaagagtatcattgatagtttgataggaatagcattgaatctataaattactttggacagtctggtcattttaatgatgttgattcttcttattcatcaacatggaatgatttttcatttgtttgtgtcatctctgatttctttgagcagtgttttgtaattctccttgtagagatctttcacattcctggttagctgtattcctagttattttatttttaagggagaagttgtgaatgggaatgtctttctgatttg

SEQ ID NO: 877608 - DNA, 587 bp, Homo sapiens
acagtttgaatcttctgcatatggctagccagctatcccagtaccattcattgaatagagggtcctttctccattactttttttcagctttctcaaagatcagatggttgtaagtgtggcattatttctgggtcctctattatgttctgttgatctatgtgtctgtgtaccagtaccatgcttttttggttactgtagtcctgtagtatagctggaagtcaggtagtgtgatgtctctggctttgttccttttgcttggaattgtcttggctattcggaacctttttttgrttccagatgaattttaaaatagttttttctagttctgtgaagagtatcattgatagtttgataggaatagcattgaatctataaattactttggacagtctggtcattttaatgatgttgattcttcttattcatcaacatggaatgatttttcatttgtttgtgtcatctctgatttctttgagcagtgttttgtaattctccttgtagagatctttcacattcctggttagctgtattcctagttattttatttttaagggagaagttgtgaatgggaatgtctttctgatttg

SEQ ID NO: 877609 - DNA, 587 bp, Homo sapiens
acagtttgaatcttctgcatatggctagccagctatcccagtaccattcattgaatagagggtcctttctccattactttttttcagctttctcaaagatcagatggttgtaagtgtggcattatttctgggtcctctattatgttctgttgatctatgtgtctgtgtaccagtaccatgcttttttggttactgtagtcctgtagtatagctggaagtcaggtagtgtgatgtctctggctttgttccttttgcttggaattgtcttggctattcggaacctttttttggttccagatgaatkttaaaatagttttttctagttctgtgaagagtatcattgatagtttgataggaatagcattgaatctataaattactttggacagtctggtcattttaatgatgttgattcttcttattcatcaacatggaatgatttttcatttgtttgtgtcatctctgatttctttgagcagtgttttgtaattctccttgtagagatctttcacattcctggttagctgtattcctagttattttatttttaagggagaagttgtgaatgggaatgtctttctgatttg

SEQ ID NO: 877610 - DNA, 546 bp, Homo sapiens
ttttcccttctcaagttcaaagttccataaatctctaagtcaggggcaaaatgccaccagtctgtttgctaaaacataacctttgctctagttcccaacaagttcctcatttccatctgagaccacttcagcatggactttattattgtccatgttgctatcagcattttgggcaaagscattcaacaagtctctaggaagttccaaacttttccacattttcccgtcctcttctgagccctccagactattccaacccctgcctgttacccagttacaaagtcacttccgcattattgaatatcttttcagcagcacctcactcctggtaccaatttactgtattagtccattttcaagctgctgatagagacatatctaagactgggtagtttacaaaagaaagaggtttaatggacttatggttccacgtgtctggtgggggagctcacaatcatggtggaaggcaaggaagagcaagccacgtcttacaagggtggcagcaggcaaagagagagcttgtgcagggaaactcccattcttaaa

SEQ ID NO: 877611 - DNA, 611 bp, Homo sapiens; identical to SEQ ID NO: 870242

SEQ ID NO: 877612 - DNA, 642 bp, Homo sapiens
acgttgaataaataaatgtgttctgtagccgcaattattgcattaagcataaaatcagatatatctgaaacctttgtaagttatgtgaaattacatatgagcatgcatttattttcccaggtcagacatatattaggacaatttctaaacaaatacttatgaattatataattttgttaataatacccagaaacatgattcaatttcaccaatagatctagttcttctaagttttgccttgatttgtccctcaaggctgcaggaagcacattctgtaactggaagttgtcctgattcctgcaagaggtaatcctaggcttagttcccaccacccagagacatcatgatttcttttactcgtttgtagtctcattgaagggtcttctgtcttggtgaaggcaggttgtgcagtagraaaactctagaagtcagacagacttgcgttttatattgtgcacaatttcgaatcctctcggccctgcttcttacttcagccactgctacggtggccagttcagcactgtgcgttgtagatgtaacctgaaggagtgttgtctcaggtgcaaaactaccaagcacatcttgttttctgttctgggttttctttggctccttcgtgagcctactcagcatttaagcatg

SEQ ID NO: 877613 - DNA, 579 bp, Homo sapiens
gaagtctttatttcagaagcatcatataacgaatgttcatagtcaagagataaataaattattcattattctctctgagagaaaatcaaaggactgattttgaaatattagacatttgtagcagtagacatttgtatctagtgtccactatgataatctttctaatttattttcaacactacactcagaaatatagattcctgattatcagcaagtakcaaaatttcttcaggtcctggctgtttcttgtgttgtattgttggtttccagatttctaagtcaatctgaaggttttttctaagtaacacgacttgcatcgtaagtacttttttagtaaaaagttgtagtaaagagttactggtcttgcattagatataaccactttatattagttttggttatcccaagcaaactgcttgacttctgcctctctctctctgtctctctctcttttatttttttctttttgagacagtctcactctgttacccaggctggagagcagtggtgttatctcagttcacggtagcctaaacctcacagcctcaagcaatcctccctcctcagtctcccgagtaa

SEQ ID NO: 877614 - DNA, 505 bp, Homo sapiens
taagggcatatttgaatgttgagctgccagggagtggtggacatgttacctccccccatctgctacactactttgtgatgaacatctcaccaggcacacacacgatctcctcaagattatttgatggctgcctccaccacctgttattttatatcccctgaaccagccttgtgaaatgctcccaggcctggcatcccacatgtgtcctgcttggctctttgcataaaacgtccagcttgggaggmcagattgctgcttcagggcgacaagtcccacagaggtggtaaaaggaattggccgccagtcagaaactggtggcaaatatcacactcaacccgctgactcttcttgtgaatgcaaaacacatttagagatgaaatggtactcctctggctgccaaaaaaacaagtaacaaaagaagcaaggcccacatatgtttgtgatagtgagtgttttaccacgcagcaagggatctgcattttgtataggtgattttaaaatgttg

SEQ ID NO: 877615 - DNA, 602 bp, Homo sapiens
tgacatttgttgccatgatgtttgccagactgtttggacttaggtaacaggctaagcagatgtctactttctctctcactatttcatgactctagcctgaaagtttgcttacaaggatgagtgaccccagataaaggggtgcaattagctgtatacaatgaactctaaaggaatgctcaaaataaaattagttttaatgaattggaaataaacataagcctgacggcactttttgaagggtggaaaaatatgaaaaacgaagggggaggtggctacatgatttactcaaagtgaaattctctgctttagagtmtaaattgcatgccctttcagaggtacaaaaggcgcatatatattatcattgtttaatcattctacttcctttatttaatgtcatcaatatttctccattgtctgtgcaaactacttagatggggttttagggacattcaggctttagtaccattctatgtatccaggcttttcttttcagtctccctaaacaagctgtaccggccggggaaaataactctgacttgtcagcagaaaacacacagtcctgcctctactcattttctcatgctgattcctctgcctagaac

SEQ ID NO: 877616 - DNA, 558 bp, Homo sapiens
aagtgttagggattgtagtacagtcctaatgttggcctttttttcgtttttcttttttaaatgtgccttttctcctacaagataaaaaaatgatagtaaaaaaacctggttggttaaggttctaacttaatttgactgagcttagtttaagtgttcccgtcagtatatgcatgaatagattgtacttatgtggaacaagctagagactgtttaaccagatttgtgtggtgccaggcatagatagatactcaatgtcttttgakgaattgtgtcatattttgaggttataagcttttagaagttaggagtctgtttaatgtctttatgtggttggcttgaaaatggtgaataatgatttgtaaataatgtttccataaacacttttgattaaatcatattaaagtaatataaaattaggaactaaattttaaaatgttcatggttatgtactcttgtgaaatgttttgataatttgacattttaaattttgagatgacaataataataagtggttatatttttctccctgtaaatcaatagacatcaaaatttacaagc

SEQ ID NO: 877617 - DNA, 595 bp, Homo sapiens
ccaaggtgctggaattaaaggcgtgagcaactgtacctggccccaatccagtgtttttttatgtcattttccctcttcctttcagggctgttatggcacctacctttttttaacgatattggggatgttattgcaaactgccaagatattactagatagaatgagcctttggcccaggcatcagatatgcaattcagaaccatgcaatttctgtctgtttttataggcatccccaacccctaacttactggcctcargcagcacgagatggatgggtgagtggtagctccctgctgctaccccatcccctcccagctggggctcatggccatgtctgcttcatgcacacactgcatacaatagccatgcggggctagaatgagctgcagctgccacccgggccacaaggtggtttcaggggctaaggacccagtgtgtctggctggctagtttttcctgttcgctgtcccttcctgcctcgtgcccacggagtatttcctcctatggctgaaccaggaagagggtacaaacaattatgagttttccaccatgttggaggaacccatttgaaaaaagccggaggcttttgttcctt

SEQ ID NO: 877618 - DNA, 584 bp, Homo sapiens
atgacaaaacaaggttctttaacaccaccccaaaatcacactagctcaccagcaatggacccacaccaagaagaaaccccgatttacctgaaaaagaattcgggaggttagtaattaagctaatcaaggaggcaccacaaaaagctgaggcccaatgtaaggaaatccaaaaaatgacacaagaagtgaagggagaaatattcaaggaaatagcataaatagaaaacaatcaaaactttgggaaacaatggacacacttatagaaatgcaaaagactctggaaagtctcggcaatagaattgaacaaatagaggaaagaaattcagagcttaaagacaaggtcttcgaattaacacaatccaacaaagacaaagaaaaaaaataagraaatgtgaacaaagcctccaagaaatctgggattatgttaaccaaacctaagaataatctactttcctgaggaagaagagaaatctgaaagtttggaaaacatatttgggggaataattgaggaaaacttccccagccttgctagagacttagacatccaaatacaagaagcacaacgaacacctggggaattcatc

SEQ ID NO: 877619 - DNA, 580 bp, Homo sapiens
gcttctgtaatcccagttactcgggagactgaggagggaggattgcttgaggctgtgaggtttaggctaccgtgaactgagataaaacaccactgctctccagcctgggtaacagagtgagactgtctcaaaaagaaaaaaataaaagagagagagacagagagagagaggcagaagtcaagcagtttgcttgggataaccaaaactaatataaagtggttatatctaatgcaagaccagtaactctttactacaactttttactaaaaaagtacttacgatgcaagtcgtgttacttagaaaaaaccttcagattgacttagaaatctggaaaccaacaatacaacacaagaaacagccaggacctgaagaaattttgmtacttgctgataatcaggaatctatatttctgagtgtagtgttgaaaataaattagaaagattatcatagtggacactagatacaaatgtctactgctacaaatgtctaatatttcaaaatcagtcctttgattttctctcagagagaataatgaataatttatttatctcttgactatgaacattcgttatatgatgct

SEQ ID NO: 877620 - DNA, 628 bp, Homo sapiens
cttctgaaaatgaatgagtggatgattaaataaataaaactaaaattcagaaaagtaaatgtctcccaaaccctagttctatgaaagtaagccagcagcacttgatgaagaggtcacaagaagtataaagtggttttgatcaaaaggccttaatattcccctaagcttggctaaatttgagacaagcttcttcctgacttgaagctcctgacctctcttttcttagagcatttagtttagataattttacattgtaaattatttatctggtcgtttgagatgtaaatcttctcccagccacctgccaggtttataacccaggaatgcttttcccaaggacctgggccctttctttgtgtgtgtgtgtgtgtgtgtgtgtgtgtgtgtgtgtgtgtgtgtgtttccrtaggctttagattttttttattttcataggttttttgaggaacaggtggtatttggttacatgagcaagttctttactggtgatttgtgagattttagtgcacctatcacccgagcagtatacaccgaacccgatttatagtcttttttccctcatcctcttcacatcccttccccctgagtccccagagtccactgtgtaatcttatgcctttgcgttctc

SEQ ID NO: 877621 - DNA, 575 bp, Homo sapiens
cagtctacaagtttgaaaaactctgatttggtgaatgttattttcagcaggcaaactgtcttccttaatctgtcccatggttcatggcatggagaagccatgctagataaactacatacttccacaaatgaatttcaaatacttcatttctcaggatcaacaaacagttacttagtggataggggagggagggttcattcttccaaatatgagttctaaaagaaaatattaatatatcttcaaagtgaatataaactttcagatttccaaaataaacatgaagttttatctcctctctctttaacctttatatttttctatagtgcctgaaagmtaggtagaggccaagggaaatctttcgctttgccctctgaagtttcactgacaaatcaactcacaaaaaacagattcacaggagaaatggcataaacattgattagcacgcatagggaagaaataccgtgcacagatagatgatccaacctgcaataggctacagatagttacgtgatcttattcttaggggaaatgagaatggagaaatgaggatgattttagaagtgttctttagggga

SEQ ID NO: 877622 - DNA, 587 bp, Homo sapiens
ggggagatcatgttttctgcatataatgattattaaacaaaactataagaggccatgattttagactgagctcaagcactaggccctaacagaccagaccaaacaaaatggagtcattcctgctaaatgccatataagaaattggaaactctaaggaagcaaagagatctcaaaacaaacctattttgtcttctgaaaacaggagatcacagaataataaggaagtcctctctgctttaacctttatagaaaagtgacctgaagaaaccaatcagttattattattattatttttttttaccgttgttctctttgcttgttttcaccttacaaaacccactgttttgctattttccagtggaattgagaagaagttagttcatttacaacggtgaaagaatgacatcaatgcctaaagttttgatcaacttctkaattttgagagattaaccaaaagggaggaattattaaattaagtttagcctaaagctgcttccttatatattttaagttcagcctaaaggtttctccatacatagtgaactgtaatctaactggaaatgtgaatggactcttgtaacaagtag

SEQ ID NO: 877623 - DNA, 613 bp, Homo sapiens
tttttttgagacagagtctcgctctgtcatcaggctgtggccactgcaacctccgactccctggttcaagcgattctcctgcctcagtctcccaagtagctgggattataggcatgcaccaccatgcctggctaatttttgtatttttagtagagacaaggtttcaccatgttagccaggatggtctcgatctcctgacctcatgatccacccaccttgggctcccaaaagtgctgggattactggcctacccctccttttcatgtgtaacatgtggattcagaagaatgcgacctccttttttcgctttgccctttccccttttgcccacttttccgctttaaatattgaagcccttgaaatcctcttcaraaaaagcacaggctacagatcctacggtggcttatgtctccttttcccaggcatgtcttcaaccttggcaaaataaacctctacattggtggaggcttgtgtcagatactttttggtttacaatggtaacggaaactggaaagcagatggatgagtggctgatcactgacttagaaggctgaatcctaaaccagcccaggtacctttgggagtatggatgaaagtgggggccaaatataag

SEQ ID NO: 877624 - DNA, 664 bp, Homo sapiens
cagcaagaaacaagggagaggagaaagggaaacgagctggccagaccttctcagtgtgagggaagcaaagaatcaccgagatggtccattcatctgctcaaccactgagcacccagtgtgcaccaagctctgtgctggaaaaataaacacataattccctacctcatggagaatgtagctcagtaggggaaagtcagaagcaagttggcaatatgtggtgtacaggagaagcaggggctgccacgggagcacacagcaccaggcytgggggctcagaaaagcctccccacaggaagcaacagtgaatctcagactctcctgcagagtaagaccagttggcctgacatagtgcatagtgggctgagggaggggagtatgaagcaagaggagaaagcctcaatctggagaacagcaagcgtagggctcagggagcaagcatggggtacaggaaaaggacaactaggtcagaaggcctggagcaaagaatgcaagcagggtggtgtcgggttcgccacctctaaatattatgctctccatggcttcaggcccgctggacaaacccaggcaatgaacagcctcagacctggagagcagaactcctgactcatacagctcatctatctttgcacagtgccttgtgttcttgcagtcacactcttggttg

SEQ ID NO: 877625 - DNA, 576 bp, Homo sapiens
atgcttccaaaacttgggctgcattccaggcaaattttgccacaatctctgggggttgattacaggcatcagtatttctgaaagttcccaggggatgccaatgttcagacaagtttgggaatcatttggtctcaccattgtaacttcaaccgttccaacttggacttttaggctctcagctcattgtcttaataatctcccttcctggacctttgtgcactgttgtgaggaatgtaaattggtacagccattatggaaaacagtatgaggttcctcaaaaaattaaaagtagaacttccatacaatccagaaatcccacatctggatatacatccamaggaaatgaaatcagtatctcaaagagataactgccttcccaagttcactgcagcgctattcacaatagccaagatatggaaacaacctaagtgtctgtcaacaaataaatggaaaaagaaaatgtggcacatacacccacgtacacacacacaaacacacacacacacaatggaataatattcagcctcaaaaaggaataagaataatgccattcatgacaacatggatgaactcaag

SEQ ID NO: 877626 - DNA, 725 bp, Homo sapiens
tctgtctttctgtgcctggcttatttcacttaatgtaattacctcgaattccattgatgttgctgcaaatgccataagttcattctttttcttttaattgccaagtagtattacagtgtgtatatataccacattttctttcattaagttatcagttggcacttaggttgatactatctttgctattgtaaatagcgttgtgataaaaaggcaagtgaaattatctatttgatatacagatttctttttctttggaaaaatactcagtagagggattgaagggtcatctggtagctgtacttacaaattttgaggaatctccatatggcttcccacagggattatgccaatttacattcccacaaacaaggttctgtttttttctccccatcatccctaccatttgttattttgttgttgttgttgttttatcaattgccattctatccaggataagatgatatgccattgtggttttgatatgcatttccctggtgcttaacgatgctgaacaytttttcaaatacttcttggccatttatctgtcttattttgaaaaatatctattcatgctcttagcccagtttttaatacgattgttatttttgttgttgtgtaattgttgatttcttgtatattatggagattagtcctatgttggataaatagcatgcaaccattttctctcattaaacaggctgtctcttcactgtgttgattttttc

SEQ ID NO: 877627 - DNA, 640 bp, Homo sapiens
gtactgtattggtgatagtgcctggtttactgataccacctcttttaatcctgatgctgataatttgtgtcttttttttcaaactgatttgtattaaacaatgaataaaatacattcatttatatcatgattttgwcacaatgtttcctaagattaaaaatatatcttctgatattgtttcaaaaataaacagcgaccaaatgaaatatgtcaatattgaaatatgaggtatgtgggaacaatttgctaatttataaaaattgtcaattttatcagtgatatatagaattctattgtcctcaaaataacattaaagtgtcctatgttctgactgaaggtaacagttctattatcacttctctctgtaacttaaatatctactaaatactgtaaaagttgtacataaaaattattgtagattggattatatagtaactccggtttccagcataatttttaacaattttatttctttgtatgtacatactagtagatttttccaattttaatttgcactgtttgaattaacctttaacaattaaatcaagtgcttttaaaattagctgaatttagtatacttatttaatataatttaatataccaatttaatacaaacattaatatattgaactattttact

SEQ ID NO: 877628 - DNA, 548 bp, Homo sapiens
ttgaagctagttggggatggtttgtgaaaaattaatcttgtaaacaaaattctgtgtgtgatcatattagctaaagtggttttaattattcagtttttccagaaattgaacattggaataaaagcacaacagagttttattaaagcattaatctgctctttataaatgtgttattggtacatcttccaacattatgtgaaattcctataattctgatataacttagtatacattatcaataataattatatttgttatgttaaattattgkgtgccacagaggtaacaaatttgcatggcaaatgtgcctttgactgtggctgccctgagaagttttgacacccacagacaattgtcatcattttttcatcctctttagaaggtggttttataattcagctatagaactgtaacagctgctcttaaatgcaggtttccaatgacttcagagactgacattagaacaaaggaaaaactttcagaactctcatggagagctaaaatgttcatgaatatcaagcagaacaggagttatctgcatgaactgc

SEQ ID NO: 877629 - DNA, 625 bp, Homo sapiens
gttcttgaacggactttgaaatttcccataggtcttcagtggatttattctttcacttttcagaaaaatgttaaaaacgattcactttatttgatacgttaaattgcataaaaggcatcggcaaatgagaaaagatgtttaatcttccctatgttcatttgtatggataagcactattaaaataagtatttcagaaattgtctgaagtttagggaaatttgtcagcactcttgttgtcaagatacattcaatatcatgctatcagtcacaaatctggttattactttaagatattatatttcacagaaacaaccacattttcttgttaaataaactctataaaattttaagccatggccattttaagacttttttggcattcacaratagtttttgttttatttattctgacgctttccaaaagtgcttgcagtcaaaaaggaaatgtttatttttttcttcccatcttatccctccaaaatttagaaactgtttttgaatatttttattttcatggcaatatagttagttgcataagcacaataagaacatattctccttatagcaggacataattggaaacactgattatataacgaaggcttttgacaggaatgtcacattt

SEQ ID NO: 877630 - DNA, 666 bp, Homo sapiens
aggttggtgcaaaagtcattgcagttttggccatcactttcaatggaaaaaactgcaattgcttttgcaccaatctaaattttaattaacaaaatattcctttctgctgaagccctctgtggaagagagagcatacttgttctgtgtgtctctggagaacacagtcacaacaaatgagttgaagttagtaagaagaaagattgtgaatctctctctctctctctctctctctctctctstgtgtgtgtgtgtatgtgtatctgtatttatatctgttcttatatctgtatataagaacttcctgatcatttcaagggtataaaaagtaaacttgtgaaataatagtctccttcatccctgggaagttcaaagagaggctactagtcaggaatactgcagacagtatttctttattaggtggatggctgggttggacatattaaaaataaatacataagtaaacccccaaagtcccacatgttggattccagtttccacggttcaattagagtcagtgcagaccaatggaaaagattattagattttgagtcaaaagagctgtcatcagttcctagctctgttattaattaggaatgcgactttgaataagtcatgtactctcactgggcttcatttctttcatctgtaaaatgatggcaatgatat

SEQ ID NO: 877631 - DNA, 666 bp, Homo sapiens
aggttggtgcaaaagtcattgcagttttggccatcactttcaatggaaaaaactgcaattgcttttgcaccaatctaaattttaattaacaaaatattcctttctgctgaagccctctgtggaagagagagcatacttgttctgtgtgtctctggagaacacagtcacaacaaatgagttgaagttagtaagaagaaagattgtgaatctctctctctctctctctctctctctctctctgtgtgtgtgtgtatgtgtatctgtatttatatctgttcttatatctgtatataagaacttcctgatcatttcaagggtataaaaagtaaacttgtgaaataatagtctccttcatccctgggaagttcaaagagaggctactagtcaggaatactgcagacagtatttctttattaggtggatggctgggttggacatattaaaaataaatacataagtaaacccccaaagtcccacatgttggattccagtttccacggttcaattagagtcagtgcagamcaatggaaaagattattagattttgagtcaaaagagctgtcatcagttcctagctctgttattaattaggaatgcgactttgaataagtcatgtactctcactgggcttcatttctttcatctgtaaaatgatggcaatgatat

SEQ ID NO: 877632 - DNA, 666 bp, Homo sapiens
aggttggtgcaaaagtcattgcagttttggccatcactttcaatggaaaaaactgcaattgcttttgcaccaatctaaattttaattaacaaaatattcctttctgctgaagccctctgtggaagagagagcatacttgttctgtgtgtctctggagaacacagtcacaacaaatgagttgaagttagtaagaagaaagattgtgaatctctctctctctctctctctctctctctctctgtgtgtgtgtgtatgtgtatctgtatttatatctgttcttatatctgtatataagaacttcctgatcatttcaagggtataaaaagtaaacttgtgaaataatagtctccttcatccctgggaagttcaaagagaggctactagtcaggaatactgcagacagtatttctttattaggtggatggctgggttggacatattaaaaataaatacataagtaaacccccaaagtcccacatgttggattccagtttccacggttcaattagagtcagtgcagacmaatggaaaagattattagattttgagtcaaaagagctgtcatcagttcctagctctgttattaattaggaatgcgactttgaataagtcatgtactctcactgggcttcatttctttcatctgtaaaatgatggcaatgatat

SEQ ID NO: 877633 - DNA, 587 bp, Homo sapiens
gcttctggccaggacctatagccatatcacaaacttcaggcttgtcctcaaggtacacacaccattgtgttacacttgccaggtgtgggaataactaactggtagtggccaaatgaactacacataagctataacaaccaggatgagatgactaggtttgctgtaaaactgcctgcatatacagacaccaaaagccacaatcctctttgatagtattaagaaagcactgtcagttttttgaaggtgtgataatgatattaaggtatttatttaaaaaaagcctctctctctctctctmtatatatatatatgtacatatacataaaatatatatctattttaaatatccttatcctggaagcgtccttatattttaactatacatgctgaaatatatttacagatgaaattatatcaaaatatttacagatgaaattatatcaaaatgccttgctttaaaacaatttagggtaatggggggagagaaacggtggcatatataaaacaaaattgacaatgagttgataattgttgaaactgtgtgatggatacatgggagttcattattttctttacttttgcattta

SEQ ID NO: 877634 - DNA, 650 bp, Homo sapiens
acgaaacagaatagataactcagaaataagaccacacatctacaaccatctgatctttggcaaacctgacaaaaacaagcaacggggaaaggattctctatttaataaatggtgctgggaaaactggctagccatatgcagaaacttgaaactgaaccccttccttacaccttagacaaaaattaactcaagatggattaaagacttaaatgtaaacccccaaattataaaaaccctagaagaaaatctaggcaataccatacaggacactggcacaggcaaagatttcatgatgaaaatgtcaaaagcaattgcaacaaaagcaaacattaacaaatgtgatctaattaaactaaagagctcctgcacagcaaaagaaactatcatcagagtgaactgacaacctgcagaatgggaaaaaatttttgcaacttacccttctgacaaaggtctaatatccagtctacaatgaacgtaaacaaatttacaagaaaaaaaatcaaacaaccccatwaaaaagtgggcaaaggacacgaacagccacttctcaaaagaagacatccatacaaccaacaaacatatgaagaaaagctcaacatcactgatcatgagagaaatgcaaatcaaaaccacaatgagataccatctca

SEQ ID NO: 877635 - DNA, 595 bp, Homo sapiens
tcttgagataaactcctataatctctcattagaaggaggctgggggatctctccttgcctgaaaggaaattaggtgctttctatgacttcctccctggcttgctttagggatatatccacacagaagtcttctgctaggagggtgtgagacttctgcttgctctaacaagagagaargcactccctgtgccttcttccctggcatactgcagcaataaatccaaatctgtagacattccctataagtagtttccacatacattgtgtacccccaacttttacagtcttcacctgaggaaatgattcttaaattacctaactccagttgatggggctctgtgctcttgagtctgctagtaccacatagaataataaaagtgatatttaaacttgcaaacttttatcagctgtctcctcaggtttaagttgagcagtctgaaaaagagtgcaggcatctgcctcacaccctcttcttggtgtagggtagaatgattgggagataaactctggctctcatcttctcaccaagaaaagaagtaattggaacacatatctatcaccccaacctccttagctataccccaaaggactggtt

SEQ ID NO: 877636 - DNA, 595 bp, Homo sapiens
tcttgagataaactcctataatctctcattagaaggaggctgggggatctctccttgcctgaaaggaaattaggtgctttctatgacttcctccctggcttgctttagggatatatccacacagaagtcttctgctaggagggtgtgagacttctgcttgctctaacaagagagaaagcactccctgtgccttcttccctggcatactgcagcaataaatccaaatctgtagacattccctakaagtagtttccacatacattgtgtacccccaacttttacagtcttcacctgaggaaatgattcttaaattacctaactccagttgatggggctctgtgctcttgagtctgctagtaccacatagaataataaaagtgatatttaaacttgcaaacttttatcagctgtctcctcaggtttaagttgagcagtctgaaaaagagtgcaggcatctgcctcacaccctcttcttggtgtagggtagaatgattgggagataaactctggctctcatcttctcaccaagaaaagaagtaattggaacacatatctatcaccccaacctccttagctataccccaaaggactggtt

SEQ ID NO: 877637 - DNA, 604 bp, Homo sapiens
agtgtgaaaacagactaatacagtagattggtaccaaggtagtggggcattgctatgaagatacctgagaatgtgaaagcaactttggaaccgggtaaccagcagagattggaacagtttggaagtctcagaagaagacaggaagatgagggaaagtttggaacttcctagagacttactgaatggctttgacaaacatgctgatggtgatatggacaattaagtccaggctgagatggtctcaggtggaaakaaggaacttgttgggaataggagtaaaggtgactcttgctatggtttagcaaagagactggtggcattttgcccctgccctagagatctgtggaactttgaacttgagagagattatttagggtatctggcagaagaaatgtctaggcagcaaagtattcaagatgtgacctgactttttctaaaagcttacagtcctatgagttcacaaagagatttctgaaaaggaaacttacgtttaaaagggaagcaacacacaaaggtttggaaaatttgcagactgatcatgtggtaaaaaagaaaaccccattttgtggggagaaattcaagcagtctgcaggaatgtgcgtaa

SEQ ID NO: 877638 - DNA, 546 bp, Homo sapiens
gcctcgattccctgtagggattgggttccaagagataggccaagagctcagatatccttcgtagatacggagtgaatcttcaggttggcctcttagctaggaattccttagctcagaattcaaaacacgcagtcttcatagaccctgaggtcattctcaaggtatgcttaagttaagttattgctgtccagtttgtttgccatataggcattatgtatcaggcatttattctaattgatttatacatattcactttttaaattaatacattcaccttatagataaggaaacaggtaaagacctactctctgacaacagagagaggaatcaagataggagcctataacagaaaacacaagttaaaaataagaaacttcattctccctattgttaataaaaatacttcctcytccctctcttttctcagaatatttactttggaaaatatatgttatttttctgtgactttgatcactgttatgaaatggtaagtaaacctcttgtcagtgtcaaaccccaggaatgtctttcttaaggaccacaaaa

SEQ ID NO: 877639 - DNA, 586 bp, Homo sapiens
ttttggaagacatgcattcaaggctctatcactgtctttgggaacctgctgtaacttccatctgtacaatttccacatcctcaaaatactgatcataacacttgcctctttgatatcctaagaaaaattgagtgaaataaaatacgtgaaaaccatttgtaaattaccattactcaagagaaaacatggkgatgattccaccctcttgaaatctctcagtaaatgaagttgtgaaaaccaatagcatcttcaggaccaaatatttgtatttgtgcagatctctgcaacaatctctagaacagaaacattccagacgtcctagtagaaagctgaacccccatccatttagatttttgcattaaaatgacagattgctctatgactattacttactggctattacataaggacatcttataacaaatccgtgaaaggctgcaaatggacaaagcatatcttaaagactaaaaaaaaaattcacaatggattgtaaggagaaatgttttattttcatagtaaggaatgttttagtttatactgcagaatcacagacaggtcacactgagataacagaaagcatttgtga

SEQ ID NO: 877640 - DNA, 565 bp, Homo sapiens
gggagaacaatgttatgattatagcatggactctggtaccaaactacttgggctcacatccgtctggtcactacaactttatgattattgcaaagttttgtaactgtcagattgtattataaacacacaatataaatggtagttttcaagaaagtgagccttgtttccaacaatctcttctgcctctgacatggaatagattaactagatatgtacagtacatggccagcattttaatatggagtatatcaatttactagggctgccataacacaataccacagactgggagacttaaacagaaatctgttgtctggaagttctggaggctgaaagtcaaagactaaggttgagcmggtttggtttcgcccaaggcctctcttcttggctagcagatggtcacctttttgctgtttcctcacgtggtctttattctgtgcacactcctctctcataaaggcaccagtcttattggattagagccccacccttaagatctcattttaccttaatcacctccttaaaggccttatctccaatacagtcatgttgatggtgaaggctt

SEQ ID NO: 877641 - DNA, 654 bp, Homo sapiens
atttgtgttcccaccaacactgtaaaagcattcctgtttctccacagcctcgccagcgtctcttgtttcttgactttttaataattgccattctgactggcataagatggtatttcattgtggttttgatttgcatttctctaatgatcagtgatgttgagctttttttcatacgtttgttggctgcataaatgacttcttttgagaagtgtctgttcttgtcttttgcccactttttaatggggttgtttgttttttcttgtaaatttgtttaagttccttatagattctggatattagacctttgtcagatagatagatttcaaaaattttctcccattccacaggttgtctgttygctctgatgatagtttcttttgttgtacattaactctttagtttagttaggtcccatttgtcaatttttggttttgttcacaattgtttttgatgtttttgtcatgaaatcttttcccatgcctatatcctgaatcatattgcctagattttcttctagggtttttatagttttgggttttacatttaagtcttgaatccatcttgagttaatttttgtataaggtgtaaggaagggttccagtttcaattttctgcatatggctagccagttctaccagcaccatttattaaata

SEQ ID NO: 877642 - DNA, 511 bp, Homo sapiens
acatgtgtggcacttcccccttcgcgctctctctctcctgccaccatgtgaagaaggtccttgctttcccttcaccttctgccatgattttaagttgcctgaggcctcctagtcatgcttcttgttaagcttgcagaattgagagtaaattagcccttttttcttcagaaattacccagtctaaggcagttctttataggagtgtgaaaatgaactaatacagaaaatgggtaccaggagtggggcactgctgtaaagataccagaamatgtgaaagtgactttcgaactgggtaatgggcagaggttggaatagtttggagagctcagaagaaggcaggaagatgtgggaaagtttggaacttcctagagacttgttgaatgttcttgaccaaaatgctgatcgtgacatggacaatgaagtccgggctgaggtggtctcagatggagatgaggaacttatcgggaacgggagtaaaggtcactcttgctatgctttagcaaagagactg

SEQ ID NO: 877643 - DNA, 511 bp, Homo sapiens
acatgtgtggcacttcccccttcgcgctctctctctcctgccaccatgtgaagaaggtccttgctttcccttcaccttctgccatgattttaagttgcctgaggcctcctagtcatgcttcttgttaagcttgcagaattgagagtaaattagcccttttttcttcagaaattacccagtctaaggcagttctttataggagtgtgaaaatgaactaatacagaaaatgggtaccaggagtggggcactgctgtaaagataccagaacatgtgaaagtgactttcgaactgggtaatgggcagaggttggaayagtttggagagctcagaagaaggcaggaagatgtgggaaagtttggaacttcctagagacttgttgaatgttcttgaccaaaatgctgatcgtgacatggacaatgaagtccgggctgaggtggtctcagatggagatgaggaacttatcgggaacgggagtaaaggtcactcttgctatgctttagcaaagagactg

SEQ ID NO: 877644 - DNA, 619 bp, Homo sapiens
caattatcaattgttgttgttaaaattgataagcctacaattgataagttacaattactgttgttacaattgataagcctacattgacacaccattatcacccaaagtctatacattaggcttcactctcagtgttgtacattctatgggtttggacaagtgtatgagaacatgtattcattatactatcatacagaattttatttattttttttttgagacagtctcgctgtgtcactcargctggagtgcagtggtacaatctcagctcactgcaacctccacctcctgggttcaagcaattctcatgtctcagtttcccaagtagctgggattacaggcacctgccaccatgcccatctaatttttgtatttatttttagtagagacagggtttcaccacgttggccagactggtcttgaactgctcacctcaaatgatccacccaccttggcctctcagagtgttgggattacaggtgtgagccactgtgcccggcctcatacagaaatttttgactgctctaaaaatcctctatgctccacccattcactcctctctcccctcagcccctggcaaccactgatctttttatagttttcatagtttggccttttc

SEQ ID NO: 877645 - DNA, 650 bp, Homo sapiens
ggccaacctcaaaggccctataaaagatctgtttctgcagcgctagagacagaggggaggagcaagagctggaggctgcaagcccctctgggaggcagcagcagtagcctgctctgaagtgatggctgaggcagggagaggaaagctgccactttcacagtcctgaggggcatgcctgtaggtggggaagcagggtttccaggcttyttgaagaggatggctcatatactaccaaaaaaaaaaaaaaaaaaaaagagagagagagagatttggtcagactcaggtttttgttagaaaggaaaaagctggggccaggtgcggtggctcacgcctgtaatcctaacactctgggaggccaaggcggacagatcacctgaggtcaggagttcaagacctgcctgcccaacatagtaaaacctcatctcaactaaaaatacaaaaattagccaggcgtggtggtgcgcacctgtagtcccagctacttgggaggctgaggcaggagaattgcttgaacccaggaggtggaggttgcagtgagcccagatcacgccactgcactccagcctgggtgacagagtgagacactgtctcaaaaaaagaaaaaaaaaaaaaaggaagaagccgggtcatggcagggtagagggagcagc

SEQ ID NO: 877646 - DNA, 364 bp, Homo sapiens
ccatttccaccgaaatcctcaaagctatccaaatatcctcttgcagattttacaaaaagagtgtttcaaaacggctctatcaaaagaaaggttcatcactgttagttgagggcgcacatcacaaataagtttctgagaatgcttctgtctagttttcaggggaagatatttcctttttcaccataggcctgaaagcgctccaaatgtccacatccagatactacaaaaagagtgtttcaaacctgctctatgaaagggaatgttcaactctgtgacytgaatgcaaacatcacaaagaagtttctgggaatgctgctgtctgctttttatatgtaatcccgtttccaacgaaatcctcaaagct

SEQ ID NO: 877647 - DNA, 600 bp, Homo sapiens
ctacaaaaagagtgtttcaagagtgctctctcaaaagaaaggttcaaccctgttagttgagtacacacatcacaaactggtttctgagaatgattctgcctagtttatatgggaatctatttccttttccacaatacgtcacaaagcactccaaatgtccagttcaatatactacaaaatcttgtgttcacaccggctctatgaaagggaattatyaactctgggacttgaatgcaatcctcacagagttttttctgagaatgattctgtctaggttttatatggacatattccggtttccaacgaagtcctctaagctatccaaatatccacttgcagattctacaaaaagagtgcttcaaaactgctctatcaaaagaatgattcaactctgttagttgagtacacacattccaaacaagttgtggagactgcttccgtctagtttttatgcgaagatatttcctttttcaccatagacctcaaagagatctaaatgtccatttccagatacgacaaaaagagtgtatcaaagctgctctatcaacagaaaggttcaacactgttagttgagtacacacatcacaaataagtttctca

SEQ ID NO: 877648 - DNA, 589 bp, Homo sapiens
aatgtccacttccagatactacaaaaagagtgtttcaaacctgctctacgaaagggactgttcaacactgtgacttcaattgaaacatcccaatgaagtttctgagaatgcttctgtctagagtttatatgaagacaatcccgtttccaacgaaatcctcaaagctatccaaatatcctcttgcagattttacaaaaagagtgtttcaaaactgcyctatcaaaagaaaggttcaacactgttagttgagggcgcacatcacaaataagtttctgagaatgcttctgtctagttttcaggggaagatatttcctttttcaccataggcctgaaagcgctccaaatgtccacatccagatactacaaaaagagtgtttcaaacctgctctatgaaagggaatgttcaactctgtgacttgaatgcaaacatcacaaagaagtttctgggaatgctgctgtctgctttttatatgtaatcccgtttccaacgaaatcctcaaagctagacaaatatccacttgcagattccacaaaaggagtgtttcaaaactgctctttcaaaacgatgattcaattctgttagttgagg

SEQ ID NO: 877649 - DNA, 484 bp, Homo sapiens
gtttccaacgaaatcctcaaagctatccaaatatcctcttgcagattttacaaaaagagtgtttcaaaactgccctatcaaaagaaaggttcaacactgttagttgagggcgcacatcacaaataagtttctgagaatgcttctgtctagttttcaggggaagatatttcctttttcaccataggcctgaaagcgctccaaatgtccacatccagatactacaaaaagagtgtttcaaacctgctctatgaaagggaatgttcaactctgtgacktgaatgcaaacatcacaaagaagtttctgggaatgctgctgtctgctttttatatgtaatcccgtttccaacgaaatcctcaaagctagacaaatatccacttgcagattccacaaaaggagtgtttcaaaactgctctttcaaaacgatgattcaattctgttagttgagggcgcacatcacaaataagtttctgagaatgcttctgt

SEQ ID NO: 877650 - DNA, 631 bp, Homo sapiens
gttgcaaaactgctctatgaaaagaaagcttcaacactgttagttgagggcgcacatcacaaataagtttctgagaatgcttctgtctagttttcaggggaagttatttcctttttcaccataggcctgaaagcgctccaaatgtccayatccagatactacaaaaagagtgtttcaaacctgctctatgaaagggaatgttcaactctgtgacttgaatgcaaacatcacaaagaagtttctgggaatgctgctgtctgcttttcatatgtaatcccgtttccaacgaaatcctcaaagctagacaaatatccacttgcagattccacaaaaagagtgtttcaatttgctctctcaaaagaaaggttcaactctgctagcttagtagatacatcatgaaaaagtttctgacattgcttctatctagcttttattggaagatatttcctttttcaccgtagtcttgagagcgctccaaatgtccacttccagatattacaaaaacagtgtttcaaacctgctctatgaaagggactgttcaacactgtgacttcaattgaaacatcccaatgaagcttctgagaatgctactgtctagagtttatatgaagacaatcccatttccaccgaa

SEQ ID NO: 877651 - DNA, 645 bp, Homo sapiens
gttgatttttgtatatggtaaaaggaaggggcccaacttcaattctctgtatatggatagccagttattcctatatcatttattaaatagagagttcttttcccattgtttcttattgtcaattttgttgaagatcagatggttgtaggtgtgcagcattgtttctgcactctctattcygtactattagtctagatgtctgttttttatgccagtacaatgctgttttggttactgtaccctatagtttgaagctgaatagtgtgctgcctccagctttgtgcattttgcttataattgctttggctgtttgggatcttttttggttccatatgaattttggaatacatttttttttctaattctgtgaaaaaggttgttggtagtttgataggaatagcattgaatctgtaaattgacttggacagaatgggcatcttaacaatattgatttttcctatccaagggcatggaatgtttttccgtttgtttgtgtcatctctgatttccttcagcagtgttttgtaattctcactgtagagctccttcacttctctggttagctatcttcttaagtattcaattctttttctgactattatgaatgggagtgtgttgttgatttggctctaatcttggatgcta

SEQ ID NO: 877652 - DNA, 584 bp, Homo sapiens
ttctctgtgtcagaaagttctactaagcacttcatagaccttatttcatgaaaaacatatattgtgcacacaattattgtaacacaatttatgatgattgaatgtatttctttgcgcaaatttatcataatttattttaataatcttctattcttgaacattggtttgtttccaaattttyacttttctaagtgacaaatcaaataaattctttatacataactttgattatttccttagtatagagctttggaactagaactataagaccaaggaatagatacattttagagttgtatggtttgttttgtcagaataaacttcagaaaagttgtacccttgtagactctcaccagtactataggagaccagcttaaggcaaagaagtaggttttgttttgatacaggaaataacgttttcacaaaatagctgtcctgaagatattcaggcaggtgttgagtgaacatctgtcaaggatgctggaaaggggaactcacactgggtggcagttggtttataaattttaatgaccttttctactctcaaatttgtaaaaatactatttcctattcctcattcctca

SEQ ID NO: 877653 - DNA, 591 bp, Homo sapiens
cattttataatagattaggaaaaataacgcaatattcatgacaaaaatagctgcctttttgagaaccttacttgtactagtcactgtgctaagtactttacaattagtatcttaagtaatcttcacaaaaacatatgaggatcagtgtcaccttatgtattagaaaactgagaccagtagactttaacttgtaagaaataaggccttctagaacccaagtctatctgattctaaactctattctctttccactatgttacattgcttctcatttatccagtttcaataacaacagcaacaatagcaatgttgtaatagcagcaaacacttatatggcatttatgtgccacacaatstttatatatatctaaattcatttaatacaacacacatataaggtcggtaccatcattacccttatttcacaaaagaggaaactgaggcacagggccattgccaagggcagacagctagtcagtggcagagtcagcattgagtcaggcaggcagtgtggctccagagtcttgagcaacccgtactagaattagcaaccttcactagggacctctgctaccataagatctcatatcc

SEQ ID NO: 877654 - DNA, 540 bp, Homo sapiens
gatgcctataattcttaactttttaccagggcataacaagttttctgacagggcatctgtgcagatgcagtctgaccaagggatgggtcgctccctgcttcatccttgctgatgtacaagttaagcattccactaaaaggcttatcaagagtgggagacttggccggatgcggtggctcacgcctgtaatcctggcactttgggaggccgaggagggcggatcacctgaggtcgggagttcgagaccagcctgaccaacatggagaaaccccatctctactaaaaatacaaaattagccgggcgtggtggcgcatgcctgtaatcccaggtactcaggaggctaargtaggagaatcgcttgaaccctggaggcggaggttgcagtgagcagagatcgtgccagcctgggcaacaagagtaaaactctgtctcaaaaaaaaagtgggggggcggtgaggagacttggctaggtgcgatggctcacaatcttagagcactttgggaggccaaggcaggtagatcacttgagcccaggagtt

SEQ ID NO: 877655 - DNA, 599 bp, Homo sapiens
ggtgccaaaagtacaacagacaagaaaaaacatagtcttggaactccaggaacttattggctggtggaggagacagataataaaaaaggcaacaaacagatgaaacactgcaaagtgtgaccatgaagaaggcaagcagcgggagaattaccttttagtttaagaggccagggaaaatccctctgagtaagtgaggcttaccgagaccacagaattgagaaggagcctatcagacaaagaacaaagggggctgggtgtggtggctcacgcctgtaatcccagcactttgggaggctgaggagggaggatcatttgagattgggagtttaagaccagcctggtgaacatggtgaaaccctgtctctactaaaaatacaaaaattagccgggcgtggtggcrcatgcctgtaatttcagctactcgggaggctgaggcaggaaaattgcttgaacctgggaggcggaggttgcagtgagccgagattgtgctactgcaggccagctgggtgacagagcaaaacttcatcttaaatagccaaagggaagaacattccagagagaggagatatgtagagacaggaagaacttgctatgttctg

SEQ ID NO: 877656 - DNA, 602 bp, Homo sapiens
gagttctgcgggtgttgggaaggaatatccgatttttctgcgtaggctgtgctttttgtcttccacagttttgtgatcgtgacctaaattgggcatcagtttctctggtcttctcatagctaactcatttttttttgaaygcagaaatgttggcaaaataactgttatttctagagtgacagaggagaagtataattttccttttctctgctacttcgattagagttcagagaaacggattttagaaattagtatattgatattaagtgctttcatttcttaatagtatcttttctattgagaaggagcggtttccccatcattttccaggaggtacatagtatagggtataagtgctatcagaaggaacttactgttcaaagtattagtggctatccaaacactggaaactatagacaccctgtactcgtttgtttgtttgtttgtttttttggcttttaaatagttgaagcaatagaaattgttttagaaacacatttccttggtctgcgataggattgggaaagattctgctcaatcttgcctacgtattctagtatttgtaacaatatttgtaatgtttggagactcagaagcatcaa

SEQ ID NO: 877657 - DNA, 574 bp, Homo sapiens
cacagccaagctgccagagttagggagaagaaggcattgggataacttaaaatgtcatttcctaatgtgaggaggccaaacttcagtattcaaatgaggttaaacttttatttttcttctaggtactaacaccccaaacacccacaaagagaataagggagataattcagacacatctttattttgggggaagagaaaactacccattctttctcctcccaactctcttgaaaaccacaggctaattaagacagcaaaggaaattcttaagtacaaaacgtttaaaaaacaaaacactgagatttgatatttttgtttcagcttctctctataaactcacacactggtgcaagaacmctgtcattctttcctgtaactgtttaactgtctccatcatatctatttgaaatagatgaaatagctctatcatatattatctctaggctctggtaattttcaggacagctctaaggctgcagataaataaatgaccttacataatttccacatggcaaagtggagaaagcgaaatagccaaatgaacattttaacattttaaagacttttctaggaa

SEQ ID NO: 877658 - DNA, 366 bp, Homo sapiens
ttcctctttaccgatttgtatgctctttctttctcttgtctgattgctctggctaggacttccagtactatgttgaagaggagtggtgacagtgggcatccttgtcttgttccagttctgagagggaatgctttcaacttttccccatttagtattatattggctgtgggtttgtcatagatggcttttattatattgagatatgttcyttcaatgtgagttttgctgagagttttaatcataaagggatgctgggttttgtcaaatgctttatctgcatctattgagatgatcatgtgatttttgtttttaattctgtttatgtggtgtatcacatttattcacttgcatatttaaaccatccct

SEQ ID NO: 877659 - DNA, 582 bp, Homo sapiens
agagaaccccaccaggctgacagtggacctccacagaaagcctacaaccagaagatattgggggcctatattcagcatttttaaagacaagaatttccaaccaagaattttatatactgccaaactaagcttcatacaataagaaatagtaagatccttttcagacacacaaatctgagagaatttgttactactagatttgccttacaagaggccytgaaggaagtgctacataaggaaagatctttaccatgcactacaacaacacacttaagtacacagaccagtaacattaaaaagcaaccacacaaacaagtctgcataataaccagctaataagacaatggcagaattaaatccatacatatcaatactaaccttgaatgtaaataggttaaaaaccccaattaaataagacagagtagcaagttggataagaagcaaggtccagtagtatgctgccttcatgagatccatctcacatgccatgacacacatagattcaaaataaaaggatggagaaacatctaccaagtatattagtctgttttcatactgctatatgctagaaagaaatacctg

SEQ ID NO: 877660 - DNA, 582 bp, Homo sapiens
agagaaccccaccaggctgacagtggacctccacagaaagcctacaaccagaagatattgggggcctatattcagcatttttaaagacaagaatttccaaccaagaattttatatactgccaaactaagcttcatacaataagaaatagtaagatccttttcagacacacaaatctgagagaatttgttactactagatttgccttacaagaggccctgaaggaagtgctacataaggaaagatctttaccatgcactacaacaacacacttaagtacacagaccagtaacattaaaaagcaaccacacaaacaagtctgcataataaccagctaataagacaatggcagaattaaatccatacatatcaatactaacyttgaatgtaaataggttaaaaaccccaattaaataagacagagtagcaagttggataagaagcaaggtccagtagtatgctgccttcatgagatccatctcacatgccatgacacacatagattcaaaataaaaggatggagaaacatctaccaagtatattagtctgttttcatactgctatatgctagaaagaaatacctg

SEQ ID NO: 877661 - DNA, 447 bp, Homo sapiens
tcacgcttattgcccaggctggagtgcaatggcacgatctcagctcaccacaacctccacctcctgggtttaagcaatgcttctgcctcagcttcccaagtagctgagattacaggcgcacaccaccacgcccaactgatttttgtatttttagtagagacggggtttccccatgttggtcaggctggtctcgaactcctgacctcgtgatttgcctgcctkggcctcccaaagtgctaggattacaggcatgagccaccatgcccggcctaaactttgtttttaaaatgaactttttttccccccaattgctgccaatagtggataacatgtatcactcactgccaaaaatagaaagtgaccatgaaaaataaatttgctggggaagggggctccatgctggtgtggccaaggctgagagctctctcttctctgttacaaaacgag

SEQ ID NO: 877662 - DNA, 603 bp, Homo sapiens
tcctaatctctgataaaacagactttaaaccaacaaagatcaaaagagacaaagaaggccagtacataatggtaaagggatcaattcaacaagaagacctaactgtcgtaaatacatatgcacccaatacaggagcacccagattcataaagcaagtccttagagacctagaaagagacttagactcccacacaataataataggagactttaacaccccattgtcaacattagacagatcaacaagacagaaagttaacaaggatatccaggaattgaactcagctctgcaccaagcagacctaatgtacatctacagaactctccatcccaaatcaacagaatatacattcttttcagcaccacaacacacctatttcaaaattgaccacatagttcgaagtaaagcacwcctcagccaatgtaaaagaacagaaattataacaaactgcctctcagactacagtacaatcaaactagaactcaggattaagaaactcactcaaaactgctcaactacatggaaactgaacaacctgctcctgaatgactactgggtacataatgaaatgcaggcagaaataaagatgttctttgaaacca

SEQ ID NO: 877663 - DNA, 590 bp, Homo sapiens
taatggggtctttgtaacctgtatcttgtgaaataagtcctgccaaactcctaattcatcatgtgtcttttcacgagaaaataaatcactagctagctactgagtctatttcattttattaggttggtgcaaaagtaattgtgcttyttcccattaaaagtaagcatttcatttgtaaaatataaattaaattcatcactcaaatgaggaagggaactctagcataagttatatggaaaagagtatttccagctcaaagaacagcaagtgcaaaggtcttgaggtagcagtgggactttagtgctcaggtatagcaaaaagaccaggtggctggaccagagtgattgaggatgagtcataggtaaggaagtcatagaagtaatgaaggttgagattttaagcaacctggtagctgctagtaaagatttttgcttcacattgtgtaaaatggaaaggcattggtgagtcttgaacagagttagaacacaatttaagttacattttgaaatgattacatggctgctatgttaggaactgactctaggtgagcaacattgttaccagagtaaccagttaggaggatatcatta

SEQ ID NO: 877664 - DNA, 615 bp, Homo sapiens
tgttatccactttataggttgcaacttagaatagctaataatcacacaaggtcatacagctagcaagcagaagaactgaagtcaaaatcgctccagatctcttgttctgaactattatgttgtattagctgtcagtataatattacaacttgaggataaaatctgaaggacaataataaaaactattccagaattaagatcttgggtagtctctattttccacttttcaatgtgcaattgtaattcagtaattctgctagtagaaacatagttctgcagaatcctttgattgttactaccatggtagaggaaggaacaggcagttatccttgatttcatttctgagaactccatttcaacagcatgagatttgcttgacayacagtgaacccttcaagcaaacatgttcccttgaacattcaacaaataatctaatttggaaacaccaaataccacaaggaaaaagtagtacttttgttctattttctgacagatttccacaccagtgatttatggacgtatgttaagtttaggattcttatctgaagccaagaaaaaaacctttatatttttgaagcctatcatcctcaatgatggaagccaaacccttggaat

SEQ ID NO: 877665 - DNA, 641 bp, Homo sapiens
cttagataattaatttgcagcctctttttttttttttttttcaacagggtctcattctgtcacccaggctagagtgcagtggcccaatcatagctcactgcagcctcaaactcctaagttcaagagagcttcccacctcagcctcctgatttataggactacaggtatgtgcaaccatgcccagttaatttctttcttaatttctatttttgctttttggtagactggtctcaaacttctggcctcaagtgatctttccacttcagcctcccaaagtgctggtattacaagtgtgagccactgcacccagaccttttttcttttcttatatttgkgtttaagactacaattttctctaagtatagctttagcttcatttcacacattttgttttgctgaatttcattgtaatttcagtaaggactttaaaaaattaccatgagatttctttaaattatattcctttatttctaagtatttggataacttttaaagtttttttttgttactgatttctaacaatttcaccatgttcagggaatatatttctagaatttaattatttgaaatctgttaaaattcactttataaaccagaatatgatcaatatttgtaaatatttcatatgcatttgataacta

SEQ ID NO: 877666 - DNA, 650 bp, Homo sapiens
aaaaatataaaggttaggtagcaatgcaagaagctaccatcttggtaagaaatctattgcagaaaaaaaaaatgggtgcacaaccaagaagcatcagcatttgaggaaagtcagtgtcatgaaagaaaagagcaggaatagatgcaaaaaaaaaataagttaaaaaagctacatagaaagaaacacagttaaagcagtcagaagagaaatttaaaataattagattaaaaatctccagtgagataaagaaagaattgcatctgtgtgccgggcayggtggctcatgcctatagtcccagcacttcaggaggccgaggtgggcagatcacgaggtcaggagattgagaccatcctggctaacacggtgaaaccccgtctctactaaaaatacaaaaaattagcttggcgtggtggcgggcgcctgtagtcccagctactcaggagtctgaggcaggagaatggtgtgaacccgggaggcagagctcgcagtgagccaagatagcgccactgcactccagcctgggcgacagagcgagactccatctcaaaaaaaaaaaaaaaaaaagtattgcatctgtgaaacaggaaaaagaattgcatctgtgaaacaagaagaagagattataaaacaagaataagatgtcatgagg

SEQ ID NO: 877667 - DNA, 650 bp, Homo sapiens
aaaaatataaaggttaggtagcaatgcaagaagctaccatcttggtaagaaatctattgcagaaaaaaaaaatgggtgcacaaccaagaagcatcagcatttgaggaaagtcagtgtcatgaaagaaaagagcaggaatagatgcaaaaaaaaaataagttaaaaaagctacatagaaagaaacacagttaaagcagtcagaagagaaatttaaaataattagattaaaaatctccagtgagataaagaaagaattgcatctgtgtgccgggcatggtggctcatgcctatagtcccagcacttcaggaggcsgaggtgggcagatcacgaggtcaggagattgagaccatcctggctaacacggtgaaaccccgtctctactaaaaatacaaaaaattagcttggcgtggtggcgggcgcctgtagtcccagctactcaggagtctgaggcaggagaatggtgtgaacccgggaggcagagctcgcagtgagccaagatagcgccactgcactccagcctgggcgacagagcgagactccatctcaaaaaaaaaaaaaaaaaaagtattgcatctgtgaaacaggaaaaagaattgcatctgtgaaacaagaagaagagattataaaacaagaataagatgtcatgagg

SEQ ID NO: 877668 - DNA, 645 bp, Homo sapiens
gttaaaccaattataagaacagatactgacaaaagcaggttattacgtaattacaattcaacagcatccttactgagtcaatggctaaaagtcattccatgaaaactaatgcccaagcatgtttttagatgtgcactcttgaacttgatgccattagatatggcataaagaagtgatttctttggctagagaactgtaatttgcaaaacattataagaaagagattgacttctttcatgacaccataaggagctttgctgacctgcttcccaatgaaactggtgaaaaatgaccaaaaaaaagtagtcatttaaagtctctggaaatgttccaacaacaaagaacaaatgaagaaacatctattcaagaaaacctrtaaaaatttgataaaagaaagcaaaagtctatggtagttaagaccccaccaccccagctcaatatggtggagactccactctagactgctacacctaaaaaagcacaggtctccttctccccacagcttctgaaactgcctttgcaaaattatgactgagatagtgaaagagatctaacctaactgacttcaccttgcttttaacctttaagctgtccttgttccttcctggacgtgggctgaactaactttgggaggaagttagttta

SEQ ID NO: 877669 - DNA, 588 bp, Homo sapiens
taaagggtttgattcaacaagaagagataactatcctaaatatatatgcacccaatgcaggagcatccagattcaattcacaaagcaagttcgtagagtcctacaaagagatctggactcccacacaataataatgggaaattttaacacctcactgtcaatattaggcagatcattgagatagaaaattaacaaagatattcaggacctgaactcagctctggatcaagtggacctgataaaacagaactytccaccccaaaacaacagaatatacattcttctcattgccacatggcacttatctaaaatttatcacataatcagaagtaaaacattcagcaaatgcaaaataactgaaatcataacagtctctcagactacagcgaaatcaaattagaattcaagattaagaaattcactcaaaaccacacaactacattgaacaacctgctcctgaatgactcctgggtaaacaataaaattaaggcagaaatcgagaagttctttgaaactaatgagaaccaagagacaacgtaccagaatctcaagaatgcagctaaagcagtttatagcactaaatgccca

SEQ ID NO: 877670 - DNA, 577 bp, Homo sapiens
attccccagccctgtatgattctagacatgaccgagtgaagcattacagtggtggtgtccatagggaaagtgaatcagagagaagcagctgatatttaaaagttcagaataaaggaaggaggttcctcccacaaactttattctgaatagtgggaatcgctagttcttggagacagcttttcaaacattcagaggcaactaattagcagacatctgaagaaagggagaatcattcaatctctctctaaaacaaatggctaaatctgtaacttctgccaatgaagctctgattttgacggtgctaggttgagattttaacccattttcacaagacgtagttgcctttcaaggcacctctatccatggggatggggaakgagtggtgaggacgtaagatttgtatataaaagtatttttaacacttttacctacagaaaagacttgaattccatgtatcttcaatgatcagttgaagcaaaagactaaaatatcaagttaacagtctaattaaatctctttttattattttcattgttaataaaaataactgaagatcagtgtagctttatcaaggtaa

SEQ ID NO: 877671 - DNA, 606 bp, Homo sapiens
agtagtttcttcttcattgataaagacatgagaacaacccaaaagatagtcttaaaaaaaaaagaccacacactaaaaaaaagaccattgagccaatccgcaaaaatcttgcttttgaagtattttttccactcccatacaggtcttagatttgctctcatcaacctcattattttgatcgagtcttccctgtggtccgagacccttatgtgatttaacagagcagaggtagggtctcacaaatgggactctctggacttgaatttgtagactcacaagcacttgctataatatcaattttgtagcggatgagttttttttttttaatgttctttagacagaaccatttgggtttatgtgattgaatttttttttgagcaatcaaaacacttcatttttgactccttttgttcctcatttatgtatcatagacatgaytggaattttataaagctgatttccttttgattttggtaaaagacttggaatttaaagagaaaacatgccagcactgtctgtagcaagcagaaaaacatatatgttttattcccaggtaaaagtagagctcagcattatgtaggtgctgctgtcctgggactaaaggtt

SEQ ID NO: 877672 - DNA, 578 bp, Homo sapiens
atgaaaaggacattcagtgggcagctgctagaccctgaatattgaaggcatgcagagtagaactaaacccaacccacagcctagagcccagcccaacccagcccaagcaaatgagccaaaccccacagacctgaaatctatgaatgagaaaagtaagcccttgtttttgtcagacactgaaaatttcagagttttctttcaatagtgtagcatattgtggaaaaaacaaattcaccttccctgaaggatcagctttcactaataatttcaatggtttaaaaagccatatgcttggaagggaaccaaccctgttaccctattcatatctcatagttgtcyaggggcctttccctcataaagcattatccataggggatatgttttttatctcttagtgactaaacaacatcatcaaattttggaggagtcaatgaagtaagacaggaagagaagcagtaatattggacccatgtcagagagaaaacttctaaaaatattttctaagacataaatttgaatcacaatctgccatttactttgtaatgttgactatgtgagttaaattgtccagcgtggaa

SEQ ID NO: 877673 - DNA, 606 bp, Homo sapiens
ctcacctctttcttctgtctcagtcatctctcgtctagatcacacccctagcttcctaatggcttccccacccgttcacaatgtattctaaaactcaccaccaaagtgacctttctcaagacacaaaccagatcatacctctactgtctagtgtctgcaaataattccccattatgctcagagtaaaagccaaagttcttcacaggtctccaagggccacacgatctcaaccaggtccctgccttcccatcttccctcactttctctctgctatagccayactggttccctgctgttcctggaaaatcccaagcttgctccagcttggtgcctttgcattggctattccctctgcttgacacatggcccactctctacttcctgaagccttcattcacttaagtgtccccttctcaacgaggccccccttgaattccctatttaagattgcaacccacccacccacttgagcatttcaatgtcctttccttttatgtaaatttatatgttgaagtcctaacccccagtacctcagaatgagatcttatttgggaatagggtaattgacgacataattaggaaagataaagtcatagtggaaaagag

SEQ ID NO: 877674 - DNA, 606 bp, Homo sapiens
ctcacctctttcttctgtctcagtcatctctcgtctagatcacacccctagcttcctaatggcttccccacccgttcacaatgtattctaaaactcaccaccaaagtgacctttctcaagacacaaaccagatcatacctctactgtctagtgtctgcaaataattccccattatgctcagagtaaaagccaaagttcttcacaggtctccaagggccacacgatctcaaccaggtccctgccttcccatcttccctcactttctctctgctatagccacactggttccctgctgttcctggaaaatcccaagcttgctccagcttggtgcctttgcattggctattccctctgcttgacacatggcccactctctacttcctgaagccttcattcacttaagtgtccccttctcaaygaggccccccttgaattccctatttaagattgcaacccacccacccacttgagcatttcaatgtcctttccttttatgtaaatttatatgttgaagtcctaacccccagtacctcagaatgagatcttatttgggaatagggtaattgacgacataattaggaaagataaagtcatagtggaaaagag

SEQ ID NO: 877675 - DNA, 636 bp, Homo sapiens
aatgaactaaaacgctaatatagtggctggaaaggaaataagagcatctacttcccaacctttaggtgctcagagttgacaaaataacccatgtaaaaggaagtgtttaaagcctgggtggacagtagccaaaaggcatgtaaacaaacagtcccaggacctgaacagcacttaaagcagatcttaagagcttaaagtcctatgtcttacacaaaggaaaaccaatcccatttgactagcgaccagtgtgtgaacacaaaccttactattataaacaggctcagaggaagactggaacactgactccagctgaaagtgcctatgggaaacaatggagccctgagaagaacacagtgtattatcccaggaagcgctcgagggagcaagccaaccctcagcctgcaacacatacggaaccacagacaaggaatttcccccgaatcatccaaaaaggcaacaggatatggctcccaagtgcagtaaaaayaaggcactctgcttagtgttcatgctgagaggagcagatagaacagctggcaatcccaaagtcattcctgatgagaggtgcaggtccctggtgggcactgggcgcaattcagtgctgacagtaagcaccctctaggtgccacacactgt

SEQ ID NO: 877676 - DNA, 620 bp, Homo sapiens
cccagcacaatccaccccttttcccgtttaaacccacaaaatccttgcaacacatatttagcttctaaccaacaccagcaacaaattaatgagtctgcctaatatgatgtgtctgctcttatataaatgtagatgcactcacccactcttggaaaggtggagactcaaagtttcccttcagaactgtagccatctctggatagtgttaattctccttctagtttagtcacagtccttctttgataatcagtaaactaaaaattaaattacaaattaatcacaactaacaaacttctgtatggaaaagagaagataagaagatgtacgtacatatgcaagaaacaatacatagttaacatggtcctcatttttgcaagcagttacaargccatacttaggctttaaacttctttcttctacaacccactctgtttcctttacaatcaatcagtcagcatctaagccagtcatagctttttatctgttggaataactcaaatctctactcctgaaggtgcctgtagtgggttgctgtatgcttccactaacttcctgcataaggaatgcataccaataaatcccctaggctcccaacacaaattccctaggctccaccttat

SEQ ID NO: 877677 - DNA, 620 bp, Homo sapiens
cccagcacaatccaccccttttcccgtttaaacccacaaaatccttgcaacacatatttagcttctaaccaacaccagcaacaaattaatgagtctgcctaatatgatgtgtctgctcttatataaatgtagatgcactcacccactcttggaaaggtggagactcaaagtttcccttcagaactgtagccatctctggatagtgttaattctccttctagtttagtcacagtccttctttgataatcagtaaactaaaaattaaattacaaattaatcacaactaacaaacttctgtatggaaaagagaagataagaagatgtacgtacatatgcaagaaacaatacatagttaacatggtcctcatttttgcaagcagttacaaggccatacttargctttaaacttctttcttctacaacccactctgtttcctttacaatcaatcagtcagcatctaagccagtcatagctttttatctgttggaataactcaaatctctactcctgaaggtgcctgtagtgggttgctgtatgcttccactaacttcctgcataaggaatgcataccaataaatcccctaggctcccaacacaaattccctaggctccaccttat

SEQ ID NO: 877678 - DNA, 565 bp, Homo sapiens
tgagcgcgggtctttgactgcaatcagttttagtctaggtactcctttgcattcctgaagacagttctgtttcagctcaggatgcatctggctgcaagtaacagccgacaaatgagtgtttgttcctaccgcattacaagaagtccagaggttagggacactagttcagctaccagggacccaggtcttttctttctttttaggtgccctgaacagaggacacgcatgcctcagttctgagagaagttcatatgagcaccttcttcattcacmctttcatttgaaaggcatataccaaatgtctctcatataccaaacaatgggctttgggacaaagaagaaaaagacaccacttagtatgtgggtcagattaacttacacagacaagtaatctctcaatttgtaataccatgcattgactactattcatttcaaccctggctttctacagaaagaatctgaggtactaatgtattatgatatgtattataagaaaggtaagcacaggagttgctggagcccagagaaagggcccctagcctggggtgagaaaggggaggaggtg

SEQ ID NO: 877679 - DNA, 682 bp, Homo sapiens
aatgcccttctttgtctttttttatctttgttggtttaaattctgttttatcagagactaagattgcaacccctgcttttttttgctttccatttgcttggtaaatattcttccatccctttattttcagtgtatgtgtgtcttcacacatgagatgggtctcttgaatacagcacactgaagggccttgactctttatycaatttgccagtctgtgtcttttaattggggcatttagcccatttacatttaagattaatattgttatgtgtgaatttgatcctgtcatcatgatgctagctggttattttgcacattagttgatgcagtttcttcacaatgtcattggtctttatagtttggtgtgtttttgcagtggctggtgctggtttttcctttccatgtttagtgcttccttcaggagctcttgtaaggcaggcctagtggtaacaaaatccctcagcatttgcttgtctgtaaaggattttatttctccttcacttatgaagcttagtttggctggatataaaattctgggttgaagattcttttctttaagaatgttgactattggcccccactcttttctggcatgtatggtttctgcagagagatctgctcttagtctgatgggcttccatttgtaggtaacctgacctttctttctggctgcccttaacat

SEQ ID NO: 877680 - DNA, 682 bp, Homo sapiens
aatgcccttctttgtctttttttatctttgttggtttaaattctgttttatcagagactaagattgcaacccctgcttttttttgctttccatttgcttggtaaatattcttccatccctttattttcagtgtatgtgtgtcttcacacatgagatgggtctcttgaatacagcacactgaagggccttgactctttatccaatttgccagtctgtgtcttttaattggggcatttagcccatttacatttaagattaatattgttatgtgtgaatttgatcctgtcatcatgatgctagctggttattttgcacattagttgatgcagtttcttcacaatgtcattggtctttatagtttggtgtgtttttgcagtggctggtgctggtttttcctttccatgtttagtgcttccttcaggagctcttgtaaggcaggcctrgtggtaacaaaatccctcagcatttgcttgtctgtaaaggattttatttctccttcacttatgaagcttagtttggctggatataaaattctgggttgaagattcttttctttaagaatgttgactattggcccccactcttttctggcatgtatggtttctgcagagagatctgctcttagtctgatgggcttccatttgtaggtaacctgacctttctttctggctgcccttaacat

SEQ ID NO: 877681 - DNA, 617 bp, Homo sapiens
gcagttcctgtaaccttttatcagggttctcagcttccttgcattgtgttagaacatgctcctttagctcagaggagtttgttattacctaccttctgaagcctacttctgtcaattcgtcaaactccttctctgtccagttttgtgcccttgctggagaggagttgcaatcatttggaggagtagaggcattctggtttttggaattttcagtatttttgygctgattttccctcatcatggatttatctacctttgatctttgaggctgatgacctttggatggagtttttgtgtggaggtcttttttgttgatgttgttgctgttgctttctgtttgttagtttttattctaacagtcaggtccctctcctgcaggtctgctgcagtttgctagaggtccactccagacgctgtttgcctgggtatcaccagcagaggctgcagaacagcaaagattgctgcctgctccttctctggaagctttgtctcacaggggcatcagcctgatgccagctggagctctcctgtatgaggcatctgttgacccctgctggaaggtgtctcccagtcaggaggcacaggggttagggacccacttgaggaggcagtctgtc

SEQ ID NO: 877682 - DNA, 629 bp, Homo sapiens
cactatggaatactatgcagccataaaaaaggatgagttcatgtcctttgcaggggcatagatgaagctggaaaccatcattctgatcaaactatcacaaggatagaaaaccaaacaccgcatgttctcattcataggtgagaaytgaacaatgagaacacttggacacagggcggggaacatcacacaccggggcctgtcatggagtgggggcctgggggagggatagcattaggagaaatacctaatgtaaatgacaagttaatgggtgcagcaaaccaacatgatacatgtatacctgtgtaacaaacctgcattttgtgcacatgtaccctagaacttaaagtataataaaaataaatacataaaaaaataaaagagctggaaatgtagcaacttctctcaacattgagagaaatagtttttaagtttaccaatttattacactattaataggaattatactgaccatatgatagtgatgagatgtgaaatcttaagggtagagtagagagtagcatgtttcaccatccagattagaatttgccttgggggtctcaggatgcccctttcagccacagctctttaaaatttaatgttcctcctgagtataccttctgcaccttagg

SEQ ID NO: 877683 - DNA, 705 bp, Homo sapiens
cccatgcctgcctgatttgtaaattttttgtagagacagggtctgcctgtcttgcccaggctggtcttgaactgctgaactaaagcagtcttcctgctttggcctcccaaagtgctgggattattggaatattagaaataagggtcagggttgtttttttaattattccttaaattgttcttgttattgkcctggaaatggaagagtcttgaactgtccagcttcctgagtaggttggtataaagactttgacatatttatgtttccggtatgtctaatgtgacttaaggatgcactgcatccctagaataagtcctatgatgttacagagaataaaacctttatactaataaagtatatattgttaactgagattttatttctctcattaaatgtgtttaaatgagattttaagtttcatttcttattagctttgtttttgcatttatattcatatttattttctcctgtgtttactctcttagattaagcaattagaaattgtgttacatttttcttcaaaacaaatataactaacagatattagacagttaaatttccccaactatgttggcagttttcaaatgttgacatacatgccatgacatttgggaggcaagagaatgcttggctacataagggatggggtctgttcatagaaagggagatgtggatccagggcactggttgtacaaaggcaaaagc

SEQ ID NO: 877684 - DNA, 626 bp, Homo sapiens
gagcattttctaacccaatgcaaggaaattaagaaccttgataaaaagttacagaaattgctaactataataaccagtttagcgaagaaaagaaatgacctgatggagctgaaaaacacagcacgagaatttcttgaagcatacacaagtatcaatagctgaattgatcacgcggaagaaagtgtgtcagagattgaagatcaactcaatgaaataaagcaagacaacaarattagagaaaaaaccgccaaacgaaaagaacaaaggctccaagaagtatggaactatgtgaaaagaccaaatctatgtttgattggtgtacctggaagtgacagggagaatggaaccaagttgcaaaacacacttctggatattatccaggacaacatcccaacctagcaagacaggccaacattcaaattcaggaaatacagagaacaccactaagatacttctcaagaagaggaaccccaagacaaataattgtcagattcatcaaggttgaaatgaaggaaaaaatgttaagggcagccagagagaaaggtcaggttacccacaaagagaagtccatcagactaacagtggatctctctgcagaaaccctacaagccagaagagagtggggg

SEQ ID NO: 877685 - DNA, 630 bp, Homo sapiens
tggattgtagggttctctgttttttagacagttccattaactgaagcaaagcagcacaaaatgcaccattaaagaagtgtactttgatttaccttttgaacatgtacatgtaaacccatcccaataagccctatgtacaaagctaaaagatatttttcaatagaatgttctcaacacttgcttacagatttctccctctattaaacagttacattcactgacagaaaaaccaaacagcacataattcatctttaaaaagacactccagtttccttttgattagtatgggcattctatatcctttttcatattttattttgaatccatttatattttcttatttaaagttgatttcttgtagacagtacatagttagktattcattatttatccaatttgataacttctgctttttaattggtgttcttacataacttatatttcatcaaatgattgtggttggatttagaactattttattattttttccttttactattgattcttgttcttctgtctcattcttacctttattgagattatttgaataatttttagtattatattttatttttacatttttggctcctctatgtgtattttattttatttgtttaatttttattatta

SEQ ID NO: 877686 - DNA, 670 bp, Homo sapiens
tcatcccaattttcttttttaaaaattgtatttattatttttttagatggagtcctgctctgtcacccaggctggagtgcagtagcatgatatcagctgactgtaacctccgcctcctcggttgaagtgattctcctgcctcggcctcacgagtagctgagattacaggtacccaccaccactcctggctaatttttttttttttagtttttttagtagacatgggtgtttcaccctgttggccatgatggtctggaactcctaatcttaggtgatccacccgccttggcctcccaaagtgttgggattacaggctgagccactgcacccagccctaattttcttgaaattggaagattttgcacattaaaatttcagaacccaaaagggtttctttcacacccagtgaaaaggaggaaggattccagtgattctttttcaaattttaaaccctrtatagcaacagcaaaccttctgaacattcatgagatgtatattgggttttccaacagaaagaacatggggtcctaggggtcagaagaaaatatgaagggtcaaatggctccctgaacatccctgggagcatcagagcagtggtggaagaaatgggaattcagatgaagagctatataaactggacagtttcctaataagaattcacatgttttct

SEQ ID NO: 877687 - DNA, 670 bp, Homo sapiens
tcatcccaattttcttttttaaaaattgtatttattatttttttagatggagtcctgctctgtcacccaggctggagtgcagtagcatgatatcagctgactgtaacctccgcctcctcggttgaagtgattctcctgcctcggcctcacgagtagctgagattacaggtacccaccaccactcctggctaatttttttttttttagtttttttagtagacatgggtgtttcaccctgttggccatgatggtctggaactcctaatcttaggtgatccacccgccttggcctcccaaagtgttgggattacaggctgagccactgcacccagccctaattttcttgaaattggaagattttgcacattaaaatttcagaacccaaaagggtttctttcacacccagtgaaaaggaggaaggattccagtgattctttttcaaattttaaaccctgtatagcaasagcaaaccttctgaacattcatgagatgtatattgggttttccaacagaaagaacatggggtcctaggggtcagaagaaaatatgaagggtcaaatggctccctgaacatccctgggagcatcagagcagtggtggaagaaatgggaattcagatgaagagctatataaactggacagtttcctaataagaattcacatgttttct

SEQ ID NO: 877688 - DNA, 586 bp, Homo sapiens
aaaggtggatcttaaaacttaggttggaattgcgccttggattcctttcaatttggaaagggtagtggaggagaaattttaatgataaagaatcaatgaggctatttgccaaggaagtgagaaattgagttctccagaaaaattggaaattattttatgactttatgcttttatttgatttgaagtatttatgacatatggtgattacgtcatatctccctaccctgcttcaaggaaacacattatatgtggattttcttaaaatcaaggaccagtgcttattcctatcagagtacattgtacatagygtatgctcagtaaattcttgttaagtgaataaataaatgaaagcttaataaatttgaggataatacatattcagagagacatttcaagtcctgaaaaatcaaaaaacattttggtaaggagatgagtttgagcaagaggagttagacagcctatgaaaagaaagttaacaaacagagccccataaagcacagtgtaagaatatgttgccagcactatacataaaatagggaatcctttcccattgcttgtttttgtcaggtttgtcaaagatcagatg

SEQ ID NO: 877689 - DNA, 568 bp, Homo sapiens
aaaacctagacatcctccccaaggaatacagagaagctcatcaggaattaagtcctattttctgctggactttcatgtgctaagaaaattaaaaatgcaaacagcaagatgtccttgactgtgtaagagttctatcaagcataatgaatttgaagataccaaagaacaattatgatattgataataaaggaatacgtctccatttttatatttaatggtaaagtctagtactagttattaaaactgataaccaaatttagtatctagtaagtagtgcataatgtgcatggtctagtgccctcttctttctttcagacaaatcccaattttacattcaaaagggcatgtaatcagatgacagtgttattgtctgttgaagcctcataatttacttaaagttaaagtcacaattgtgctttgtatctcaktgtacttgatgatgagttcattagcctttcattctcagaaacaaagcttggctgaatggctggtcatttggcttcaaaacagaaatttggctgtgactcaagatctactttcttcaggtcttctttctccaggcctgctg

SEQ ID NO: 877690 - DNA, 579 bp, Homo sapiens
acatattaataaaagtttcaatacagcaagatctaacaattacaaacattaatttacctgattacagaccatcaaaatatataaagaaaaatggacagaaatgatgaaagatataaacagttctacagtaattataggagacttcaataccctactctctatattgaatataacaggtagacagaagataaatgaagaagtagaggacttagacaacacaataaaccaggtagatctaacaggcatatacagcacactacytaataacaatagagtacacattcttttcaaatgcacatggacatcttctaagatagacaatatgttaggcctcgaattagtctcagtagatttaaaatgatagatatcatgcaaagtatcttctcctaccacaatgggatgaagttaaatatttcataacaaaaggaaccaaaaaagtactaatttgtagaaattaaataacacaattctaaacaaccaatagatcaaaaaagaaatcacaaagcaactttagagaaaatgtttagagatagatgaagacaaaaacacagtatgccaaaactataagatatagcaaag

SEQ ID NO: 877691 - DNA, 613 bp, Homo sapiens
gctcatcgaaaagaggttggctagaaggccacggggtgggtgcgtggatgcatgaagccctgccctggggtccagatactgggcatctcctcctagctgtgcactgtccagcctgggcacagtgggcccttcctgaagctattcccaggggatatgctgaactaagttgccacaggacctgcagcctgcccactctcccctaggtgccgccggatggtggtggttgtctctgatgattacctgcagagcaaggaatgtgacttccagaccaaatttgcactcagcctctctccaggtaagctcaaccctgctctggcaagagaatgagggaatgtgtaggtggggcctctggattgtcagcyttccctccccaaggactgtggatgcagtaccaaagaactgctgaagatctctgcacacctgagcatgtgtgcatgtgtgtgcctttttgtgtgagtgaatgtgtgccaggggtacttagatgggggatggctgttgttaaccctggggttgaagactgggcttgtcccaccatggggcaagggcctgatgccagcatggcaccccttggcttgcaggtgcccatcagaagcgactgatccccatcaagtac

SEQ ID NO: 877692 - DNA, 654 bp, Homo sapiens
  misc_feature 57: n = A,T,C or G
cagtatttcctttgtatagggaggacagtcctggtatttttccccctggtggggccnactgcattgtaaagatcctttctgtcctgagatctggtggcattcctttttacaatatccagtttttccacaattataacactttcccattttagagcctgacccttggctccttttagatttgtcaactactaaattagcyattacttcagctagcattgaagagcaatgaagttcagttcttacatcctgacaagctctgagaaaatttcccaagttctttgtacacctcaccggtgccagtgcgcgttcataatctgcgtttgcattctcaaaagctagagtaaaggttagcatttctgcagccaaggtatgaggaatctgacgcttcactgcatcttgtaatcttgcaagaaattgtgcctaggtttcttgcgacccttgcgtgatatgtaaaaaggattatactgggactccctcttaaggaattgtggcccaggcgcatttagtggcctgtgtgcactgctgataagcagcatttgtgagtatcatttcatgttccaggtctgaataagggccattacccaatagcatatcctttataatgtctccgtttccagcagcatggttctatccagcctggtctgcacccagttc

SEQ ID NO: 877693 - DNA, 574 bp, Homo sapiens
aattgaatctataaattgttttcaaatgcaatgatactttatgaatactgaatttaaccaatgatgaagtagctagttttatgtcttatagatttttgtggtctacactttgtggattaggttttgtagttttattttcatattttggagccaatagctttgtttttcagttctcatacttttttttgcaggtccttagaaagatcataagtcctgaatactgtgtctgttgttcttaatcaataaaatgatcctgctggtgacctgtttgagaatacaatagtaggcttatgcctatgcaagaaaaattggagttgaagattaagcagtttgaatgatgataaaaagaaatctaacatttggttatattttatatattagggactttgttttaatgcaaaccatattctcattgaccagatatgctttaaaattcagaagtttttggattcttagaaatttaaaatagcatatatttcatatattattctgtaatactcctaaaggggtcttggacagtatccttaaccakatacattaacatttctgcagtgaaagttatgaatattcagca

SEQ ID NO: 877694 - DNA, 649 bp, Homo sapiens
agataggagacagaagagaagtaagagaatataaattccaggagacagagaattaacattctctttttttgattcatgattcagaatagggttccatggagtgttaaatcagagtgtgattctgtggtagagaaacattgtagttggtgtggtgtatcataaaatcctagaaatgaatgatgaaaggtatttctggagaagttggttattagtacagcaaaagttaaggtatatgccatatatagttcaggcagcgacatactcttgaatattggatttctttcttgcaggcttgattttcctaatggcaaaattaatagtgggtattatattaagtaagattattcagaactatcaagttatggacacatttcctaagtttacttgacaggggtaaaaagtccacattcttaatcacttatgaaattctaaaaaatttcagttgtatttccagttgcagcaggatatgayataaattagatgtcatgtaggagtgttatttatcccaattaatttaacttttgtgtgtgtgtatattttggactgctttagtacttaacattttagggctagttgacttgcataatgcttccagaaaagtacatggaatataacattgcagcttcctcaaataaaaaatgcatgtgta

SEQ ID NO: 877695 - DNA, 583 bp, Homo sapiens
tgctgacctttaattttttcagtcagaattgtgtaagcagagttgagatgtctatggtattggctagtgttctattgctaatcactggtcctcttcaatcagtacacaaaccaacaggttagttttttctcataagttgatatagatggtctgcccctgcaggcttcattttcaacatcatctcatgtcttcttaaaagaagttatccatttgtaaattgtttatttctttaggggygttgtccccataaacttttgctacagcatcaatgatttcaccattcttcacccatgcttcaccattaatttgatgtttgttcttgcttcaattttagcagaattaatgctcctctgatagagatgcttttcaaactgatgtcttacccttctttgtgcctcaagctagatcctgtttagacctgtttagactcaagctataacaagttagcatgagtttattttggtgccaaaaaaaaattgaaatccactcatagttttttcataatacacattttccaatgaaccttttgaaaacctcttatatgtttatgattaacatgaaacaactataattacaatttttc

SEQ ID NO: 877696 - DNA, 662 bp, Homo sapiens
ctggattccagtcttcacgtaccaaagtttctgagatagttatacaattagttccaattgtattcatctttttttggttgtgggctacacagagttgaaacagttaagttttagatttgttaacataaatgtcttaagcaatggcaaatatgtgaacatgaaaataatttttctgggccaggcgtggtggctcacgcctgtaatcccagcactttgggaggccgaggcgggtggatcwtgaggtcaggagatcgagaccatcctggctaacacggtaaaaccccatctctactaaaaatacaaaaaattagccgtgcgtggtggcaggtgcctgtagtcccagctgctcaggaggctgaggcaggagaatggcctgaacccaggaggcagagcttgcagtgagcagtgatggaaccattgcactccagcctgggtgacagagcaacactctgtctcaaaaaaaaacaaaaagaagaaaataatttttctggacaatgtgtaatatggattgtattagtctgttttcatgctgctgatagagacatacccaagactgagtaatttataaagaaaaagaggtttaacagactcatagctccatgtggctggggaggcctcacaatcatagcagaaggagaaagacatgttttacatggcagcag

SEQ ID NO: 877697 - DNA, 564 bp, Homo sapiens
tgtatgtttggccatccagacaaattccaagaggagatagatgttgacacatgatttcctcgatgtctagaatcaagcttgaaacatatgagggtcatatatggagtcatagttgttcaatatggcacaaaaattatccatggttgctcaataacattgtttgaaaaaaatacttgggaaagttttattttatattgatttatactttaaatacttggctgggcatggtggcttatgcctgtaatcccagcactttgggaagctgaggtaggcggatcacctgaagtcaggagttggagaccagcctggccaacatggtgaaacctcatctctactaaaaatacaaaaattagccaggtgtggtggtgtgtgcctgtaatcccagctacytgggaggctgaggcaggagaactgcttaaacccaggaggcagaagttgcagtgaggtgagatcccgccactgcattccagtctgggcgacagagtgagaaccaatctccaaaaaacaaacaaacaaacaaacttaagtgccaaacttaagtgccacttacttaactaagcataa

SEQ ID NO: 877698 - DNA, 620 bp, Homo sapiens
atctagaaatgtcactctatgattttctttcttctcccctgaagatccgcatgtgacaagtgtcctaacctatacctaaagaaagagatgctacgctgagaggctgagaagaatctgagcaaacaggccttgctgggttccccccagaattcattaccattagatcataccctttttagccaatcttatttctacacagccatcaattctttactgcacataagcataaaaatacagtttttcctaggtctttgggtcttcattctgaagkttcctgggacgcataaaacttggattaaataaatttgttatgttttcctcttgttaatctgtcttttgttataggaatgtcagctgtgcactttgaaatgggtgcaaaaaaaaatattatacatttttacctttacatagtcttcagaaaaaatatggataatcataacttcttttcagttagtctctaatatactaaatgttgtttgtcatatttaaaatatgagaaataaaattattctgtatatattttcaatttaaagaaccctattatgtattacttcattgggtctattttctgggttttgtcgttgaaatatctggagtacaataaacagaatatttttcag

SEQ ID NO: 877699 - DNA, 695 bp, Homo sapiens
ttaagagaagagtgtgcattcctgtgcaaaaaaaaaaaaaaaaaaaaaaaaaaaaatgtgagttcatttcaaaactcttagggaaccaccaaccaaatgacacttttctttagtcatgcatggaacgttttgccaggagcagcactttttcttccacccattccttggagtacattttaaaaagagaatcttttttgagcagcttttaaaaatgcacctggatttgctgstgaaaacaaatacaacatttgaactgaaacctttgcttggggaatggaagaggtcctactaagccatcttttacaagcaaacagtctagagcagtgtaatttttcaccaagtccagtgtctttgtcatggtggtagtgttttgtcttttttctgagcactgtattgtcacatgtgttccctttgctacagtagtcctcaacacctgtgcacaagcttgttgtattcaagcaaagtttggagaaaccacacattttatttaatgtcttatcttggtcatcatagaatttgaatctctgttcttgtcactatagctgcttacataatatgttttctgagcaactaacataaagttttgttaagtactatgtaatttaaagctgaactctattttatcaagattcactagactcaaaggcaaaagataccattacttttattctttgtggttgctggccatttgatag

SEQ ID NO: 877700 - DNA, 598 bp, Homo sapiens
aaaaagatgaaaaaatatgtgcattctaactattttctacaaactatatacatagtagattattccattgttgacacttctgaatcatatggccatggaaattaaggggatcccttaattgaacccctcaattgaaagaggagcaaactaaagcacagagtacagtgtccatataaacaaccacttagggctgccatcttcaatgggaaggtctctctcaagttatagactgaaatctaagyctggcccagcattcactgggcaccttattttctacctacattttcataagatgtatcacaaacttcagcaattatttgttgtgtactatctgctatatatttatgcaagttaacattgaaataataaaatgagaagccattagacaggaaccctgggttcctacctaaggaaactaaaacctagctcagcctcatttcatgcaagaggctaatttaaaagaaatgaaacttaagctcaaccaatcacatagccaactgggcattgattattgtcttgaacttcccaccaagatagtccaaatagggcaattttccaaacttcaaccaatcaaataatttctttgctctgctttctc

SEQ ID NO: 877701 - DNA, 525 bp, Homo sapiens
acatgtgcagagcatgcaggtttgttacataggtatacacttgtcatggtggtttgctgcacccatcaacccatcatctacattaactatttctcctaatgctatccctcccctagcccctcaccccctgacaggccccagtatgtgatgttcccctccctgtgtccatgtgttctcattattcaacccccacttatgagtgagaacatgtttggttttctcttcctgtgttagtttgctgagaattatggtttccagtttcatccctgtccctgcaaaggacacgaactcatcctttyttgtggctgcatagtattccatggtgtatatgtgccatattttctttacccagtgtatcattgatgggcatttgggttggttccaagtctttgctattgtgaatagtgctgcaataaacatacatgtgcatgtgtctttatagtagaatgatttctaatcctttgggtagatacccagtaatgggaatttctgggtcaaatggtatttctggttctagatccttga

SEQ ID NO: 877702 - DNA, 643 bp, Homo sapiens
ttggcttttgttgccattgcttttggtgttttagtcatgaggtctttgcccatgcctatgtcctcaatggcattgcctaggttttcttctagggtttttatggttttaggtcttacatttaagcctttaatccatcttgagttaatttttgtataagtaaggggtccagtttcagtattctgcatatggctagccagttttcccaacrccatttattaaatagggaatcatttccccattgcttgtttctctcaggtttgtaggtgtctggtgttatttctgaggcctctgttctgttacactggactatatatctgttttggtatcagtaccatgctgttttggtcactctagcattgtagtatagtttgaagtcaggtagggtgatgcctccagctttgttctttttgcttaggattgtcttggctatatgggctgtttttggttccatatgaaatttaaagtagtttttctaattctgtgaagaaagtcaatggtagcttgatggagatagtattgaacctttaaattactttgggtagtatggccattttcaagatattgattcttcctatccataagcatggaatgtttttccatttgtttgtgtcctctcttatttccttgggcagtggttagtagt

SEQ ID NO: 877703 - DNA, 637 bp, Homo sapiens
atgctagcaggttatcttgcctgttagttgatgcagtttcttcatggtgtcaatggtctttacaatttggtatgtttttgcagtggctggtaccagtttttcctttctgtatttagtgcttccttcaggagctcttgtgaggcaagcctggtagtgacaaaatctctcagcatttgcttctctttaaaggattttatttctccttcatttatgaagcttagtttggctgtatatgaaattctgggttgaaaattcttttctttaagmatgtcgaatattggcccccactctcttctggcttgttgggtttctgccaagagatctgctgttagtctaatgggcttccctttgtgggtaagctgacctttctctctggctgcccttaaaattttttccttcatttcaaccttggtgaatctgacaattacatgtcttggggttgctcttcttgaggagtatctttttggtgtgctctgtatttcctgaatttgaatgttggcctgtctttctaggttggggaagttcttctgcataatatctcaaagagtgttttccaacttggttccgttctcccagtcacttcaaggtacaccaatcaaatataggttttgtcttttcacatagtcccatgattttt

SEQ ID NO: 877704 - DNA, 588 bp, Homo sapiens
gatggagatgaggatcttgttgggaactagaacaaagctgactcttgttttgttttagcaaagagactggaggcattttgcccctaccctagagatttgtggaactttgaacttgagagaggttatttagggtatctggtggaagaaatttctaagcagcaaagcattcaagaggtgagctgagtgctgttaaaagcattccaggccaggcgcagtgactcttgcctgcaatcccagcactttgggaggccgaggcgggcagatcatgaggtcaggagttcaagaccagcctggccaagatggtgaaacctygtctctgctaaaaatacaaaagttagccaggcatggtggcaggcacctgtagtcccagctacttgggactgagactgaggcagaagaatcgcttgaacctgggaggcagaggttgcagtaagccaagatcacgccactgcactccccagcctgggcaacagagcaagactccatttcaaaaaggaaaaaaaaagcactccattttaaaagggaaacagcataaaagtttggaaaaattgcaggctaatgatgcagtagaaaagaaaaacccatttt

SEQ ID NO: 877705 - DNA, 665 bp, Homo sapiens
tgcctcagcctcccgagtagctgggactactatggaccaccatccctggctaattttgtatttttagtagagacagggtttcaccatgttggccaggctggtctcaaactcctgacctcagctgatctgccatcttggtttctttatctgtagaaatactgcaatgtattgagcacttactatgtaccccaaacagtactaaataaatgatatgtaatttttamaactttacgacaagtctttaaggtagatattttccccattttataagtggaaaaacagaggctaaaagaaagtaaacagtgaaggcgacgtctcacagctggggaggtaccaagatttctccccaggcgtgcttgcccaaagcccatgttctcaaccatctggatcttgaacactgtgtgatccagtggttacctgaaattcctttcagcctgaaagatttagctttgcccttgccttactcctgattcccttttttatttatttatttatttatttatttatttatttatttatttatttatattttaggcagagtgtcgctctgtcacccaggctggagtacagtggcacgatctcagctcactgcaagctctgcctcctgggttcacgccattctcctgcctcagcctcccgagtacctgggactacaggcgcccgcc

SEQ ID NO: 877706 - DNA, 662 bp, Homo sapiens
gatgctgcataaggcagatgtttcctgctgacggtgttcctgttgccaagtaattcatgagcaaattcacctgaatttcacttcctggtttggagaggggaagtaaaccaatgacaaaaagcactaatttaaatttcatctggagaggtgcttctgcattgctcgacattgtcaaaatacagattgccccttggtggcggcagcagctaaaacttyagatgaggctaattcttcaaaatcatttctccctcctctatcttttgatccaaatcctgccaagcctgtatggacatcattctggaggaaacccaggtctatactatggaagggactatatcgtgtgtttaaatagatttgagataatttaaaggaagttatgaggtcgttttcaattaacatattgtgttttctcttgacactacagatttgttgaagtcatggttttgatggcagtttaatgtcacacacatagtgtggcttaaatcacttatttgatcatttccctaatgacaggtttttgggctgcttccagtgtgttgctgttataaatcatgcttgcgataaacatacttgcacattaatctccttcctgatctcttgattatttccttagaacaaattcctaggtgaattcctgggatgggcatttttaagtatcttaa

SEQ ID NO: 877707 - DNA, 669 bp, Homo sapiens
ggagactgatttgtgtaataataaaactggtctccccccacacacaaacacaaagtgcaatatcactgatcaatcaatgtagaagagaaagtagcatttcctcaaagacctagaaccagaaataccatttgaccaggcaatttcattacggggtatatacccaaaggaaaataaatcattctattataaagatacatgcatgtgtatgttcattgcagcactgtttacaatagcaaagacatggaatcaacccaaatgcctatcaatggtagactggataaagaaaacgtggtacatatacaccatgggatartatgtagccataaaaaggaaggagatcatgtcctttgtagagacatggatggatctggaagctgttatcctcagcaaactaatacaggaacagaaaacccaacactgaatgttctcacttataggtgggaactgaatgataagaacacatggacccattgggggaataacacacactggggcctgtcaaggggttcagggcagggagaacatcagaaaagatagctaatgtatgctaagcttatacctaagtgatgggttgacaggtgcagcaaaccaccatggcacatgtttacctatgtaacaaacctgcatatcctccacatgtaacctggaacttaaaataaaataagaaca

SEQ ID NO: 877708 - DNA, 593 bp, Homo sapiens
  misc_feature 370, 485, 533, 534: n = A,T,C or G
gacttagaaaaaaaaaaaaggtttgttaaaccaaataaaaatataaaccattgtaagaatatgttttcaataattaaaaactttaagaaacaaagcctcaacatacatagatatactgtcaacatgcttagcaaactaatcacattattttattaagtagagactatgagggtcttacaccagctactagagtatcacgkcccctaggtacaattccaaattccaggaagtttgaaaccaatttctttttcttaattcatctggcaccttgtttaaactgaaataaattacagtcacgtgctgtgtaacatttctgtccactctggactacatacatgacggtggtcccttcgaattacagtaacatagntttactttcttatggtttaagtatgtttagatacacaaataccactgcattacagctggctacagtgttcagtccagcgcatcctatataggtttagagcctgggagcaacaggnccatatcatacagcctaggtttggtggggaccgcaccatctacatctnngtgtaaattcactctgtgatgctcacatcatgatgaaactgcctggcaatgcatttctc

SEQ ID NO: 877709 - DNA, 579 bp, Homo sapiens
acttaacgtctcctaaatctcctgtttattaactttaagacttttaaagaaataataattttcctaaaacaactgtgtgaactgcctacctattcagaccaaaacaaaacaaaacaaaaaccctcaacagggaacaaacctgcctcatctaaattagaaaccacagaactactaagatgtagctgttagcaaaatttctatgaagttgtaataatatactaattataaataggaccacaatgggatgccctccccaatccaagcattatggaacacaamaatataatttgaggaaagatagaattttctgctacttttcctgtgacgattttcagaagatctcatataaaaattaatcataaatgtgcttacatgttagattaaataagaagtgcactacataagaattagcaagccagtacaataattgctggcaccaaatgaggtttttttccttttagccagatagaatctcactgggttttatttttgttttgcacttcgatgttactaccatgaattacttcaaagtgagaaaggcatatttatatcttgctaactgctcttctagtttactcg

SEQ ID NO: 877710 - DNA, 670 bp, Homo sapiens
agtaagtattaaatgctattatagtgattactcttcttgtataattatcctcagtacttgattatgagatccttgaacataggcaatgttagcaatctctgaattcctaatatatggcagatgttaatgttctttgaataaatggaacaatgagctacgaggttagaataatagattgaaaagtcaagtcaaaatacagattcttgatttttatttctaaatctcaatatttaaaaagaattgatattyagcaattctctacttgcccccttctctccctgcttcttaccatagcctctgaaatgctcaattcataaccctttcctaatagatagaagaaacatgcttgtctgcacagaaacctgatagagggatcagctcttacagaggcccagaacattcctgtatatattaaatctttccatgtgtgggttcacattactcagccaagagatgtacaaagctaacttttgaaaatgttgctgtatctttgactttagctgctgtcttttaaagcttgaaattctcaatgttccaggaatacgatttcataatatctcttatgcaatttagtaatttttaaaagtgtaattacactgggagaagaatgactttagagactaataaaataagcagtagtatgtaaaatccatgagagcctatgcaagga

SEQ ID NO: 877711 - DNA, 670 bp, Homo sapiens
agtaagtattaaatgctattatagtgattactcttcttgtataattatcctcagtacttgattatgagatccttgaacataggcaatgttagcaatctctgaattcctaatatatggcagatgttaatgttctttgaataaatggaacaatgagctacgaggttagaataatagattgaaaagtcaagtcaaaatacagattcttgatttttatttctaaatctcaatatttaaaaagaattgatattcagcaattctctacttgcccccttctctccctgcttcttaccatagcctctgaaatgctcaattcataaccctttcctaatagatagaagaaacatgcttgtctgcacagaaacctgatagagggatcagctcttacagaggcccagaacattcctgtatmtattaaatctttccatgtgtgggttcacattactcagccaagagatgtacaaagctaacttttgaaaatgttgctgtatctttgactttagctgctgtcttttaaagcttgaaattctcaatgttccaggaatacgatttcataatatctcttatgcaatttagtaatttttaaaagtgtaattacactgggagaagaatgactttagagactaataaaataagcagtagtatgtaaaatccatgagagcctatgcaagga

SEQ ID NO: 877712 - DNA, 640 bp, Homo sapiens
gagtttttcaaggatagtttggtgggcagaaggctaggtaatgggtgctgctgactggttgggggtgaaatcataggggtgtggaaaaatgtcctcatgtgctgtgtgaacctctgggtggggccatagggctgatggagtcagaaacaccgaagtctgaaaaaatatctcaaaagaccatcttagggtctgtaatagtgatgttatctatagaagtaattggggaagttaccatcttgtgaaaaacatggttggttgttatttaactacacctacatcttagcagaatttgggcccctcttataattttaaccttgtggcctttcattagttttacaaaggtggttttgttttgggaaaggctattatcatccttgctttaaggttaaactataaactaaatttctcacccagttagcttggcctacacccagcttggcctacacccaaagacagcttggaggtcrgaagcaagatggagtgaactgtgtcagatttctctcactgtcataactttgcaaaggcaatttcaatcataatctttgcaaaggcagtttcatggctcacagaacttaggaaaacatgcttactggtttattttaaagggtgtaaattacaaagcatccagatgaacaaccag

SEQ ID NO: 877713 - DNA, 606 bp, Homo sapiens
cttgcatcagagtgccctggatgtgagagatggagtcaaaggagaccattttggagctttaacatttgactgccccattgaatttcagacttgcacggggcctgtagccccttcattttggccagtttctcccatttggaatggttgtatttacccaatgcttytacccacatactatctaggacgtaactaacttgcttttgattttacaggctcataggcagaagggacttgccttgtctcagataagactttggactgtggacttttgagttaatgttgaaatgagttaagattttgggggattgttgggaaggcatgattggttttgaaatgtgaggacatgagatttggaaggggccaagggcagaatgatatggtttggctgtgtccccacccaaatctcatcttgcatggtagctcccataattcccatgtgtcatgggagggacctggtgggaggtaattgaatcatgggggttggtctttcccatgttgttcttgtgattgtgattaagtctcatgagatctgattgttttataaggggggagttcccctgcacacactgtcttgccctctgccatgtaagacatgacttttctcct

SEQ ID NO: 877714 - DNA, 637 bp, Homo sapiens
tgaaagtttttagcatgaagggctgttgagtttgttgaaggccttttctgcacctattgagataatcatgtggtttttgtcttcggttctgtttatatgctggattacgtttattgatttgcatatgttgaaccagccttgcatcccagggatgaagccgacttgattgtggtggataagctttttgatgtgctgctggattcagtttgccagtattttattgaggatttttgcatcgatgttcatcagggatattggtctaaaattctcttttttgttgtgtctctgccaggctttggtatcaggatgatgctggcctcacaaaatgagttagggaggattccctctttttctattgattggamtagtttcagaaggactggtaccagctcctctttgtatctctggtagaattcggctgtgaatccatcttgtcctggactttttttggttggtggctattaattgttgcctcaatttcagagcctgttattggtctattcaggaattcaacttcttcctggtttagtcttgggagggtgtgtgtgtccaggaatttatccatttcttctagattttctagtttatttgcatagaggtgtttatagtattctctgatgacagtttgtatttctgt

SEQ ID NO: 877715 - DNA, 547 bp, Homo sapiens
caattcacacaaagctggatgtgtgggagaccagagttttattattactcaaatccgtctccccaagcattcagatatgggagtttttaaagatattttggcaggtaggggctcaggaagtggagagtgctgattggtcaggttggagatggaatcattgctgtcctctattcctgggtgggattgctcaactggttggcccagattaccagtctgggtggtgtaagcttatccatccagtgcagggtctgcaaaatrtctcaagcactgatcttaggttttacaataataatgttatccccaggagcaatttggacaggttcagactcttgtagccagaggctgcctgacccttaaaccataatttctaatcttgtagctaatttgttagtcctacaaaggcaaactggtccccaggcaagaacagggacttttcagaaaaaggatattatcaattttgtttcagagtcaacccataaactaaattccttcccaagattagttccacctatgccctcgaatgaacaatgacagtttgaaggttaaa

SEQ ID NO: 877716 - DNA, 547 bp, Homo sapiens
caattcacacaaagctggatgtgtgggagaccagagttttattattactcaaatccgtctccccaagcattcagatatgggagtttttaaagatattttggcaggtaggggctcaggaagtggagagtgctgattggtcaggttggagatggaatcattgctgtcctctattcctgggtgggattgctcaactggttggcccagattaccagtctgggtggtgtaagcttatccatccagtgcagggtctgcaaaatgtctcaagcactgatcttaggttttacaataataatgttatccccaggagcaatttggacaggttcagactcttgtagccagaggctgcctgacccttaaaccataatttctaatcttgtagctaatttgttagwcctacaaaggcaaactggtccccaggcaagaacagggacttttcagaaaaaggatattatcaattttgtttcagagtcaacccataaactaaattccttcccaagattagttccacctatgccctcgaatgaacaatgacagtttgaaggttaaa

SEQ ID NO: 877717 - DNA, 469 bp, Homo sapiens
tggaggaatttggtatttgaatgtttttgaagccaatatttttgaaattttagctgtttagtcaagggcttttttattctgacattccttaaccattctgtctttccatttaaaagaaatgtctgtgtgacatgtcttcctggtttttttttgtcctttgtattaatgctccagtttgttttatactatatttcttagcccccagatttatcatgggacatcactgaaaccagtggtagggtcgtttgtgacagcctaacaatgtgaatctaactatcttgatatttaatttatgtmtttctgaaggatttaacaagttaattgtgtatattctaggtgtgtcacggggtcccagccctgtcagccttggaaatcaggataccttacctgtggcagttgcccttacagaatctgttaatgcctactttaaaggagcagatcccaccaagttagtttttaaaatatatgc

SEQ ID NO: 877718 - DNA, 623 bp, Homo sapiens
acattcccatcagggtggtgccataaatattccattttatagatgtaacatttgcagtatagagagcttcagccacttgctaggagtctcagagatgatcaggtgatggaggcagaattaaccacaggctctcttcagagcccacagtcttacccaggtggctcactctctcatyaaacactttttgttactatttttataagccactgcaagttgggcaccaaaatgaatgtgtactcctcagtaatttcatgaggataaagtaaaattcatctactgtaggactaacaccatgtttcttatggctctttcaattatgattgccttctcccctctaaatcaagagttgtgtaatctaaaaatagcagtatctcacacagagatattttatgttgctgacttttataaagcaatgaactgtttgcaaataaatatctctgctatgctttctccatttataatctcaggcaacctcagtctgaggttattccagggcccagggtcaggagatggaacagagaataaaaggtcatacctgaagaaaaaaatcatcagtgctctcaaccagttcttacacctctccttttcttttctttcatgatctgtctctaaattttacttgg

SEQ ID NO: 877719 - DNA, 623 bp, Homo sapiens
acattcccatcagggtggtgccataaatattccattttatagatgtaacatttgcagtatagagagcttcagccacttgctaggagtctcagagatgatcaggtgatggaggcagaattaaccacaggctctcttcagagcccacagtcttacccaggtggctcactctctcatcaaacactttttgttactatttttataagccactgcaagttgggcaccaaaatgaatgtgtacycctcagtaatttcatgaggataaagtaaaattcatctactgtaggactaacaccatgtttcttatggctctttcaattatgattgccttctcccctctaaatcaagagttgtgtaatctaaaaatagcagtatctcacacagagatattttatgttgctgacttttataaagcaatgaactgtttgcaaataaatatctctgctatgctttctccatttataatctcaggcaacctcagtctgaggttattccagggcccagggtcaggagatggaacagagaataaaaggtcatacctgaagaaaaaaatcatcagtgctctcaaccagttcttacacctctccttttcttttctttcatgatctgtctctaaattttacttgg

SEQ ID NO: 877720 - DNA, 570 bp, Homo sapiens
aatctgtgtataggactggaaaaaataatgtacatgagagaacagaggaaacaaaaatcttagggaatcagtgaaagcttgatgtacatctcaaagtttctggtggttttcctagctgaaaaaacaattaaagggatttctttcaagtttytggggcacacaggagaaaccatgagggtgatgtcccacaacacaagcccttcttttgcaggatggtcccaccctctgcaaagctcctctccacactgcagacgggccttttacttgcccccaaaccatactcctgtattactcagtagcgttttgctgaatcttttattcccttaatacaaaagtactccaaacactctaggagcgtttgactgagtgttaaactgttctgctcagaagacatatagcattaagttgtccaaaatcagttgcaaatcactcagcatcactgtatgtattctctatttttttttttttttttttttttttgagatggagtctcgctctgtagcccaggctggaatgcagtggtgcaatcttggctcactgcaacctccgcctcccaggtcccagttcaag

SEQ ID NO: 877721 - DNA, 620 bp, Homo sapiens
aaatattaacctcttatctggttgttcagaaattgtgaaaaatccttttttattcctgtacattacctcacacagttttagagaaagggcgccaaacttataaggcaacagacatatcagttgaaggaagatttcatatcaatacatttaaaaagaagctgaagaaatcacaaaaggaaggaaaaacaattaaaatacttacaaaagaactttctaacgggaatgatgattttctaaagaaggaaacaattgttcatacacattttttgttgtcgttgagatggagtctctctctgtcgcccaggctggagtgtggtggcatgatctcagctcactgcaaactctcctccaggattcaagcaattcttctacctcagcttcccgagtaactggrattacaggtgcccgccaccacacccagctaatttttgtatttttagtagagacaaggtttcaccatgttggccaggctggtcccaaactgctgacctcaggtgatccgcccaccttggcctcccaaaatgttgggattacaggtgtgagccagtgcacccggtggtcattcgctcttttcttccaccgcaggcatgcgtgcaacctcacaggccctcatcttctca

SEQ ID NO: 877722 - DNA, 545 bp, Homo sapiens
atattttgctcatttgtagaggagaggaagttgagattcagagaccaaacacctgatcaaaagtctcacaactaaaaagtgagagccaggacttgaagccaggtctggctgaatccagccttcatgctgtgctgtctcccttctcagactaacagtgggtattggtcatgtcagggactgtccttcccccggaatatctccctctaggccttgttttttttttttgtttgtttgttttgttttcttcatacaggagtagcttttgtgcacttggcattttgatttctcagcagtagaatatacttcatgaatgggatttccttttctctgtgccaccagaatrctacaccataaaagtttctttagaagctggtcagtaatagtcacttcatttcacctgtttttaaaaattttgacatttgttttctgaccttaatcttaaaaacaacaatattaatgataagaagtatttcttcaaattaggtctataaacttctttgacttcctctacatatgattaaacaactatacatttacagcttaga

SEQ ID NO: 877723 - DNA, 605 bp, Homo sapiens
ggcataaacaagggcaggagtctctctacataaaacttttgccaaaataggatgaagtaggcaaatgttacagccaaaataatatttcactgctaatagaaaaacaggcagaaaaaactaccttgtcaccttttctgggaaaagcaaaaataaagttgtatttcatccttaattttctaccttgtgggctaaaataaaaggaaaattacttctgggcaatactgcacatattatagaataatgagccatcttaagcagttgggcaagaagcagaacaacaaatgtkcactccagaaaagaagagaatcatgcaaaaataatagtgttgttttcagaagtaaaccttaaaaagaaatcaaaagggagatataatcagatacactatcaagggccaactaggaatgccacacgtatcattgttaaagagacagtgtgacgcttgggtatgcactggaaatttggcacttgggaagctgatctgattcacacctggcttctcactgccctcatggccctctctacctgcagcaccaaatcaaaccatttcatatcagctttctcctctctctctctctctaattgttaattaattgaacactacaaca

SEQ ID NO: 877724 - DNA, 672 bp, Homo sapiens
acaggtgtgagccactgcacccggcccttactttcctttttatataactttattgcatctacatatattcctacatatagggatacacagagttagtagatgaaaagtatgttttggacctcccccaaaaaagtcattatatgaagaagacatgcacacatatatatagcagcacaattcaccaattgcaaaaatatggagccaacctaaatgcccatcaaccaatgagtggttaaaaaaatgtggcatataggacaggcacggtggctcatgcctgtaatcctagcactttgggaggccaaggtgggggtgtatcacctgaggtcaggagttcaagaccagactggccaacaaggtgaaacctcatctcactaaaaatacaaaaattagccaggcgaggtagcacgtgcctgtagtaccagctactcgagaggctgaagcaggagaatcrcttgaacctgggagacagaggttgcagtgagtcaagattgcggcactgcactccagcctgggcaacagagcaagactccatcaaaaaaaaaggaaaaaaaagtggtatatagactactcatactcagtcataaaatggaatgaaataatggcatttgcagtgacttggttggagctagaggccattattctaggtgaagtaactcaggaatggaaaaccaa

SEQ ID NO: 877725 - DNA, 672 bp, Homo sapiens
acaggtgtgagccactgcacccggcccttactttcctttttatataactttattgcatctacatatattcctacatatagggatacacagagttagtagatgaaaagtatgttttggacctcccccaaaaaagtcattatatgaagaagacatgcacacatatatatagcagcacaattcaccaattgcaaaaatatggagccaacctaaatgcccatcaaccaatgagtggttaaaaaaatgtggcatataggacaggcacggtggctcatgcctgtaatcctagcactttgggaggccaaggtgggggtgtatcacctgaggtcaggagttcaagaccagactggccaacaaggtgaaacctcatctcactaaaaatacaaaaattagccaggcgaggtagcacgtgcctgtagtaccagctactcgagaggctgaagcaggagaatcgcttgaacctgggagacagaggttgcagtgagtcaagattgyggcactgcactccagcctgggcaacagagcaagactccatcaaaaaaaaaggaaaaaaaagtggtatatagactactcatactcagtcataaaatggaatgaaataatggcatttgcagtgacttggttggagctagaggccattattctaggtgaagtaactcaggaatggaaaaccaa

SEQ ID NO: 877726 - DNA, 643 bp, Homo sapiens
aaacttacaatcatggtggaagggtaaaaagaaagcaagcacattttcacatggcagcaggagagagagagcaaagggggaagtgccactcacttttaaaccatcagatattgtgagaattcactatcataagaacagcaagggggaaatctgcccccatgatccaatcctctcccaccagatccctcccccaacactgggaattacaattcaacatgagatttggktagggacacagagacaaactatatcattctgccctggcctctcccaaatctcatgtccttctcacatttccaaacacaatcatggctacccaatagtccctcaaagttttaattcattccagcattaactcaaaagtccaagtccaaagtttcatctgagagaaggaaacttccttctgcctatcggcctataaaatcaaaagcaagttagttaattcctggggagacaagcattgggtaaatgctcccattccaaaagggagaaattggccaaaacaaaggggctacaggccccatgcaagtctgaaatccagcagggcagtcactaaatcttaaagctccaaaatgatttcctttgactccatgtctcacatccaggctacattgatgcaaggggtgggctcccaaggcgttga

SEQ ID NO: 877727 - DNA, 581 bp, Homo sapiens
gattacaggtgtgagccaccgtgtctggccaataaataaaattcttatcaaaattcaagcaatgtttctttcttatgaacaagtttattcgaaattttatataagaaggtctagatcggtataattttaatgacattgaaagtcagaaaaaaagtgggagggatcactctacccgatattaagaccaactctagtaaataaaagaatatagtagtgaaaaagggatagacacctaaatcaatagcacaaaataaaaatgccagaaatagttttgcactatgtcaaacagtgtttttaacaaaggtgcaaaagcaattcaatygaggatgatggcttttcaacaaatttgcccaaagcagtgagacacccacaagcgaaaaaagaaaaagaaaaaaaaaaaccaaaaaaacagaattaaaggcagacaacctatataaaaattaactcatactgaatgggcaaaagctggaatcattccctttgaaaaccagcacaagaaaaggatgtcctctctcactactcctattcaacatagtattgaaagttctggccagggcaattacacaagagaaagaaataaa

SEQ ID NO: 877728 - DNA, 581 bp, Homo sapiens
gattacaggtgtgagccaccgtgtctggccaataaataaaattcttatcaaaattcaagcaatgtttctttcttatgaacaagtttattcgaaattttatataagaaggtctagatcggtataattttaatgacattgaaagtcagaaaaaaagtgggagggatcactctacccgatattaagaccaactctagtaaataaaagaatatagtagtgaaaaagggatagacacctaaatcaatagcacaaaataaaaatgccagaaatagttttgcactatgtcaaacagtgtttttaacaaaggtgcaaaagcaattcaattgaggatgatggcttttcaacaaatttgcccaaagcagtgagacacccacaagygaaaaaagaaaaagaaaaaaaaaaaccaaaaaaacagaattaaaggcagacaacctatataaaaattaactcatactgaatgggcaaaagctggaatcattccctttgaaaaccagcacaagaaaaggatgtcctctctcactactcctattcaacatagtattgaaagttctggccagggcaattacacaagagaaagaaataaa

SEQ ID NO: 877729 - DNA, 573 bp, Homo sapiens
gagatgatcagataaagcaaaagacgaattagtgtggaatataaagtatcaataataaataataaataaataataagatacatatccttgtcacactatttgaacatatagttggggtttatatgatacagattatacggactttttttttttttttttttttgagatggagtcttgctctgttgcctaggctggagttcactggtgtgatcttggctcactgcagcctccacctcccrggttccagcgattctaccgccttagcctcccaggtagctgggattacagacatgcaccaccatgcccagataatttttgtatttttagtagagatggggtttcaccatgttggccaggctggtctcaaacttttgacctcaggtgatccgcccaccttggcctcccaaagtgctaggattacaggcgtgagccaccatgaccatcctgtaatacaggttcttgatgtttgatttattcgtatcttgtaagcatcggagctgcattttcttattttttaaaagtggaaggccaactatttgttacctaatatgtcacttgagtgacatattttgt

SEQ ID NO: 877730 - DNA, 573 bp, Homo sapiens
gagatgatcagataaagcaaaagacgaattagtgtggaatataaagtatcaataataaataataaataaataataagatacatatccttgtcacactatttgaacatatagttggggtttatatgatacagattatacggactttttttttttttttttttttgagatggagtcttgctctgttgcctaggctggagttcactggtgtgatcttggctcactgcagcctccacctcccgggttccagcgattctaccgccttagcctcccaggtagctgggattacagacatgcaccaccatgcccagmtaatttttgtatttttagtagagatggggtttcaccatgttggccaggctggtctcaaacttttgacctcaggtgatccgcccaccttggcctcccaaagtgctaggattacaggcgtgagccaccatgaccatcctgtaatacaggttcttgatgtttgatttattcgtatcttgtaagcatcggagctgcattttcttattttttaaaagtggaaggccaactatttgttacctaatatgtcacttgagtgacatattttgt

SEQ ID NO: 877731 - DNA, 721 bp, Homo sapiens
gtctcagcatcttgaatcaatggtctttcacaatttaaacaatggatccaacaccttagaaagttcaattagaatttggatacctatgctgggcacggtggctcatgcctgtaatcccagcactttgggaggccgaggcgggtggatcacctgaggtcgggagttcaagaccagccaacatagagaaaccccgtctctactaaaaatacaaaattagccggggtggtggtatatgcctgtaatcccagctactcaggaggctgaggcaggagaattgcttgaacctgggaggcggaggttgtggtgagccgatatcgcgtcattgcactccagcctgggcaaaaagagtgaaattccgtctcaaaaaaaaawaaaataaataatttggatacttatgaataaactgggagcatgactttgagttactggaagaagttagaaacattaatccaattttctgattaggaaaaaaaaaagcactatttcctaagtttcatactctagtctctcttaaaaatgattctaggagcacaatgccaaattatgggcatccaaggacactctggctagacaaaaaggaagaaaactaggtgagcaatgaaccttattagcatgtgtcctctcaggctgatgactgtcattaggctgctggagaatgacatcattttctctaagaggcagtcagctcgaaaatgtcaactatctccatgaattaattctt

SEQ ID NO: 877732 - DNA, 550 bp, Homo sapiens
ctattgtgaacagtgctgtaataaacatatgtgtgcctgtgtctttatagcagaaaatgatttataatcctctgggtatataaccagtaacgggattgttaggtcaaatgtatttctggttctagattattgaggaattgccacactgtcttccataacggttgaactaatttacacacccaccaacagtgtaaaagcgttcatatttctccagtcctctcyagtatctgttgtttcctgactttttaatgatcaccattctaactggtgttaatggtatctcattgtggttttgatttgcatttctctaatgaccagtgatgatgagctttttttttcatatgtttgttggctgcataaatgtcttcttttgaaaaatatctgttcatatcctttgcccactttttgatttttttttcttgtaaatttgtttaagttccttgtagattctggatattagcctttgtcagatcgatagactgcaaaaattttctcccattctgtaggttgcctttttactctgttgatagttgcttttggtgtgcaggag

SEQ ID NO: 877733 - DNA, 550 bp, Homo sapiens
ctattgtgaacagtgctgtaataaacatatgtgtgcctgtgtctttatagcagaaaatgatttataatcctctgggtatataaccagtaacgggattgttaggtcaaatgtatttctggttctagattattgaggaattgccacactgtcttccataacggttgaactaatttacacacccaccaacagtgtaaaagcgttcatatttctccagtcctctctagtatctgttgtttcctgactttttaatgatcaccattctaactggtgttaatggtatctcattgtggttttgatttgcatttctctaatgaccagtgatgatgagctttttttttcatatgtttgttggctgcataaatgtcttcttttgaaaaatatctgttcatatcctttgcccacttttygatttttttttcttgtaaatttgtttaagttccttgtagattctggatattagcctttgtcagatcgatagactgcaaaaattttctcccattctgtaggttgcctttttactctgttgatagttgcttttggtgtgcaggag

SEQ ID NO: 877734 - DNA, 622 bp, Homo sapiens
tatgccttataagtttttcttgataacaagacatgatgtacaggatttaaaaaaaattactgtaaaaatgggcctttagtaatgtagtggtaaggttttggagaagggagttctattattaggtttcagtctttttgtaagwttgcctttggactgtaaactttacaagtgcttcttagtcttcctccctacccccacccccacttagatgggatagaattgctagagagggctggagttggatattttgcttctttcacatagatggctagagtgggctggagttgaatgcttcccttctctgaggcccagtagaatttgataaaaccaaagcatgttaaactctggttaaatagcttgaggacagactgttaagaagaacagaatactccggtatatttcacaatggttccttttccctctgctggaagcatgaggggatttttctctaatattaactgtgttctcatctggtagagctccaggaaataaaacttataaaggcgtgggggcccctgattacttggttcccctggagtttttaactctcagacttgtccacactgagcttccagcaattcatcaattacagttaaggatttcctaccctggcactggttcc

SEQ ID NO: 877735 - DNA, 568 bp, Homo sapiens
gtggaacatatttctatatctatagctgctatataactacataaatgatatttagttctaagttatattcagattctcaagtaatctctgcccttaaaggaacttaccatctagaagggggatattataatactagtaagtctacacagtagggaatattaaktgctctgagagtgtgaaggaggggagagagaaagaatatttccagtctccaagaggatggggaagaaggtaggcatccaaagagaccttatgggggaaattacacctggactggatgttatgggcagaagatgatcagttggtcttatagactcctgggaagtcaattaatgtcaaccaaagcagaagtcaattccctcttctttctctctggtcttcagagagctgtttgctgtcttgcaaaatctcctttgctttccctgtttaaggctgcctttgctgtttccttgaactggatttcatcttgatgcaaattcaaaaggagcaagagggtaatctgcttttagatagtcccaggagatgttctgctgaaggctgggcagagcagcacatcaagtcggcttga

SEQ ID NO: 877736 - DNA, 569 bp, Homo sapiens
aaaaaatactatcaagtttcatctgtggccttaagagtatagacatgatacagttgttctcaactgggagcaattttgcctcctagtgatgtctgaagacagttggttgtcacaaccaggaggtgagggtatgatcctggcatctagtgattcaaggccagggaggctgctcagaatcctaccatatgcaggacggccaccaccgccctcacccaccactgcaacaaagactgatctagccaaaaacgtaaagggggccgggcacrgcagctcccacctgtaatcctagcattttgggaggctgaggcaggtggatcacctgaggtcaggagttcgagaccaccctggccaacatggtaaaccccatctctactaaaaatacaaaaattagccaggcgtggtggtgcgtgcctgtaatcccagctactcgggaggctgaggcaggcaaatcactggaacccgggaggcagaggctgcagtgagccaagatcccaccactgcactccaacctgggtgacagagcaagactccgtctcaaaaaaaaaaaaatcaagggtgccagggttcag

SEQ ID NO: 877737 - DNA, 594 bp, Homo sapiens
tgatcctgggtgtgtctgtgagggcgttgccaaaagagattagcatttaagtcactgggctggggaaggcagatccacccttaatctagtgggcacaatctaatcagctgccagcaaatacaaagcaggcaaaaaaacgtgaaaaggtgactggcctagcctcccagcctacatctttctctcttgctatttgtccttgaacattggattccaagttcttcagttttgggagtcagactggctctccttgctcctcagtttgcagacagcctattgtgggaccttgtgactgtgtaagttaatacttaataaactcatctttatatacatatacacacatatatacacatacgtatatctgtatatatatacacatacatatrtgtgtgtgtgtgtgtgtgtgtgtgtgtgtgtatatatcctattagttctgtccctctagagaactttgattaatacagccagtaaaggagagatcttcaggatagcctggcttaaaacaatagtggggtattatttttcacctataaaattgagaaggagtttaaaaaataatagtattactgagaacataccccaacactgctgatagga

SEQ ID NO: 877738 - DNA, 598 bp, Homo sapiens
ggggtcgatacttcaaaaaattgatattttattgctagaatttatacctcaaaaagcacagtgtgtggctgaacaagctaaatggtattaggtttacaggagggtttacttttctcagttaccatattcaaaaagcaaggacacatgcatttaaaattagtccacaagtgagttacttgtttagttaataacctgccatgtttcaaaagcatttgtgatgtctagtctgcaagtatatctattmtttgaaggcctttggactgcttggaatgataggtgctatataaataaaaagcaatattattgaatttatcactctcattcttagagaataagtttaaagacccctatcagcaggcaaacatgaaaactgtggctgggattagcctcattatgatccccaaagtactacaggaattattaaatgatcattatagttgaaggctgatgaattagtgtcaagattttagattttctgttgattttaaaaaacagatcccctgctcctttatatcaagcagtggttgatttgtttccagattactcttccttaatacacaatcagatatattatagatgagaatgttgagtttcagga

SEQ ID NO: 877739 - DNA, 570 bp, Homo sapiens
tgtatatctttttttgaaaatgtctgttcatgtctttgctcactttttaatgggcttgttgttctcttgtaaatttgcttaagtaccttataggtgctagatattggacctttgtcagatgcatagtttgcaaaaactttctcccattctgtaggtggtctgtttactctgttgataagtttctttgctgtgcagaagctcttaagtttgattagatgccacttgtcawttttgcttttattgcagttgattttgttttcttcatcatgaaatctttgccctttcctatgtccaggatagtattgcctgggttgtcttccagggtttttatactttttggttttacatttaagtctttaatccatttttagtttatttttgtgtatggtgtaaggaaggggtacaggttcaatcttctgcatatcgctagccagttatctgattaccacttattgaataggaagtcttttccccattgcttgtttttgtcagctttgttgaagatcagatggttgttgatgtgtgactttatgtctgggctctctattctgttccataggtctatgtgcg

SEQ ID NO: 877740 - DNA, 570 bp, Homo sapiens
tgtatatctttttttgaaaatgtctgttcatgtctttgctcactttttaatgggcttgttgttctcttgtaaatttgcttaagtaccttataggtgctagatattggacctttgtcagatgcatagtttgcaaaaactttctcccattctgtaggtggtctgtttactctgttgataagtttctttgctgtgcagaagctcttaagtttgattagatgccacttgtcatttttgcttttattgcagttgattttgttttcttcatcatgaaatctttgcccwttcctatgtccaggatagtattgcctgggttgtcttccagggtttttatactttttggttttacatttaagtctttaatccatttttagtttatttttgtgtatggtgtaaggaaggggtacaggttcaatcttctgcatatcgctagccagttatctgattaccacttattgaataggaagtcttttccccattgcttgtttttgtcagctttgttgaagatcagatggttgttgatgtgtgactttatgtctgggctctctattctgttccataggtctatgtgcg

SEQ ID NO: 877741 - DNA, 636 bp, Homo sapiens
gactctccattctattccttcctcagtcttccagaaatcctgtcctctactcaagtcgccagcggacaacctaaatgtttcttttactttattatgcacagcaatttagtttctcagactccatccttgactggtagttggttcctttacacaaccaaaaataggatttcctctcatgaaattgatttatattgctgtcttggaatgttaatgcagtgactgtggtcatccttttgagtaatatttaatctttccgatgacaatagccatgtgtatacaagccaattgatttatctgagccttggtttcctcacctacctcacatggttgttttaaagagtaaatgtaaaagcccgcatgatgcttgctacatggtagctgctgatattaaccacaagaaatttctactggaaagggaattaacacgagcaccactgagtagtattagccaacagccacagccagttgctgacatgccagamtgaagcggagggcaccacattctggcacagtcactgcatttcctgatctccctagatgccacattttctggcaaatacatagttagaaatattaggcaaatcctcacattccagagctgaaaatatcctccccccaccccaacagtaagggatg

SEQ ID NO: 877742 - DNA, 540 bp, Homo sapiens
tccaaataaacagaatatacattcttctcagcaccacattgcacttattataaaattcaccacataattggaagtaaaacattcctcagcaaatgcaaaggaatggaaataataacaaacagtctctcagaccacagtgcaatcaaattagaaatctggattaagaaactcaccaaaaactgcacaaccacatggaaactgaacaacttgctcctgaatgactactgggtaaataacaaaattaaggcagaaataaataagttctttgaaaccaatgagaacaaggacacaatgcaccagaatctctgggacacagctaaagcagtgtgtagagggaaatttatagcacaaaatgcccacaggmgaaagcaggaaagatctaaaatcaacactctaacatcacaattaaaagaactagagaagcaagagcaaacaaattcaaaagctagcagaagacaataaataactaagatgagagcagaactgaaggatatagagacacaaaaacctttcaaaaaaatcaatgaatccaggagctgg

SEQ ID NO: 877743 - DNA, 631 bp, Homo sapiens
tgatagatgtcgtagacgacagttcaggtaactatacttacctcattagatacactgtggttttcaatctgcaaaatttatactgatgacttctggattagatatgttgtggaaagagtgttcaagtacaaaaaagttgctgcaaaaaggataaaaggtatggagttatttgcatttatcagaatgcaaagtatatgcactataaatctcatttacttctattaccttgaccttagatgatagcagatagcaaagttggtgtgtgtgcacacacagaccttatacttaagtttctagctgagatgattcctgaaaagagtgagagagaattagagagtaagagtgcactaagcatggagaagaatcccagagtgccaggaagatgggtggggagaccccccsccctccaccccgccccagcagttccgacaggggagctccaggattcccctttagacttcttttttatgcacaggaagatagagatgaggaaaggaacaactactaaacagcatttagggaagttaagtgtctcagccctggggctaacttaaatgtaaagaaacaacactactcagaaaatagtaacaaaagcaaataaaccttaattacgattttgaaattcaaaccc

SEQ ID NO: 877744 - DNA, 631 bp, Homo sapiens
tgatagatgtcgtagacgacagttcaggtaactatacttacctcattagatacactgtggttttcaatctgcaaaatttatactgatgacttctggattagatatgttgtggaaagagtgttcaagtacaaaaaagttgctgcaaaaaggataaaaggtatggagttatttgcatttatcagaatgcaaagtatatgcactataaatctcatttacttctattaccttgaccttagatgatagcagatagcaaagttggtgtgtgtgcacacacagaccttatacttaagtttctagctgagatgattcctgaaaagagtgagagagaattagagagtaagagtgcactaagcatggagaagaatcccagagtgccaggaagatgggtggggagacccccccccctccaccccgccccagcagttcygacaggggagctccaggattcccctttagacttcttttttatgcacaggaagatagagatgaggaaaggaacaactactaaacagcatttagggaagttaagtgtctcagccctggggctaacttaaatgtaaagaaacaacactactcagaaaatagtaacaaaagcaaataaaccttaattacgattttgaaattcaaaccc

SEQ ID NO: 877745 - DNA, 600 bp, Homo sapiens
cctggccgcttccactgtgtcaggttggagggagaaaaaggctaagaggaattgcgcctttgccagaatctgacggtgttggtgccctgatctcgaacttccaccatccagaactgtaagcaataaatttctgttgtttataagtgtcaggcctcwgagccaaagctaagctgtcatttcccctgtgacctgcacgtatacatccagatggcctgaagcaagtgaagaatcacaaaagaagtgaaaatggccggttcctgccttaactgatgacattaccttgtgaaattccttctcctggctcagaagctcccccactgagcaccttgtgacccctgcccaggcctgcaagagaaaaacccctttgactgtaattttccactacccacccaaatcctataaaactgccccacccctatctcccttccctgactcttgttttcagactcagcccgcctgcacccaggtgaaataaacagccttgttgctcacacaaagcctttttggtgatctcttcacatggacatgtgtgacaataagccactcagtcgattgtattttgttatagtagtccaaatggactaagacaacatttaatgg

SEQ ID NO: 877746 - DNA, 654 bp, Homo sapiens
tcttgctctgtcacccaggctggagtgcagtggtgcaatcatagctcatgcagcctcctactcctgagttcaagtgattcccctgcctcaccctcctgagtaggtgagacaacaggcacactccaccatgccaggctaattttaatttttttgtagagacatagtttccctgtgttgcccaggctggtcttgaactactggactcaagtgattctcccctcatcagcctccgtaagtgctgggattacaggcgtgagcctctgcacctgagtctaaattcaatttttttttttttttttgagacggagtctccctctgtcgcctagacttgagtgtagtggcacgatctcagctcactgcaacctctgcctcctgggtccaagcgattctcctgtctcaacctcctgagaagctgggattataggcacccaccaccatgcccagctaatttttgtatttttagtrgagacggggtttcaccatattggtcaggttggtctcgaactcctgacctcaggtgatccacctgcctcggcctcccaaagtgttggggttacaggcgtgagccactgcacatggcccataaattcaaattttaaaaagctgtggcatgtgtatattttaaatgtgtgtgtatttgcatacatagagacc

SEQ ID NO: 877747 - DNA, 599 bp, Homo sapiens
gccaattgctttcccttcttgcctcccatttggtctgttttggttccgcagtcatccaactgtagcgtttcttaaaacatgtcagtggctggtgtttgtgttttgggttgaacagtttcacacacgtcgctggagcccgtgctcgaccagctgctgtgctggggatttgctttctgcggctttgggagtgtcaggtagcaaaacgaagagagtagtcgactagaacggtggcggggaggaggaggagggattgtctgcagtggagtcgggagcctcctccggaccaggacaggtaaaaccggtctgccaggtctcagggggagcgggtggagacgtcccacctcacctggctgcgctccgactcaggctcagccggcaggttctggggcaatgggggaagggagaggggccgggcccttgtgggtcccgcacgcacacagtactcaggggccagccaggygccatcccaggtggcccagcttggggtgggcagccagggttggggcaggggtgcgtcctgagttctttacctttgaaaggtctgatttccaatgctgcccttacacatacccttgctcctgccgagtttagtccgtggc

SEQ ID NO: 877748 - DNA, 700 bp, Homo sapiens
tccaaattgagaaatctgaatggctgtaattgtaacacatctacaatggaatcaagaaggtcatttacattacgttaagaaatacagaagcagagtcttatataagcgtgttacacaaaatggagatttggcacatgggttatcattggacagtgtaccacacacagtttttatttcggttccagcagaaaaacaatattgacaaatttctttctctctttgcttcctactttatcgaatagaagaggtaacaatagcatctgctgcagctggctggagcmtgagatgaggaaattgtagctgatgggcctcccaagcatatcgacactaaaaagctcatgctacagccacggcacagccaggctagcactccaacgggagcggcagatacacaaggcagccactgtgaaccagagcagggcctgccaagacagcatgtcaagtaatttttagtggcctgaagtggtttccaccatcacagctccaggcactgccgcaaggcaggacaagtttatctatctctgacatcttctccatctccctttggcatcgctctacgattttctgctgcggtagcctcactgaccaaattggtacccagtgcattcagggtgctccctggctacccatcagcctttcttcccattattcatgggcttgaagatctgggatgcttaattgggtctaatgtgtcaaaatt

SEQ ID NO: 877749 - DNA, 625 bp, Homo sapiens
tttgttggattcctctcttgactcacctggctcaggtgcccttttccttgaccagcgttggcctctgcatgaccatccagatctcgcaggagtcctccctggccccggggcctggctcggaaacctctgtgatattctgagtgatttcttttctttctgggcactgtgtgggcaccgcttgtaattgctgtttgtaattatggcttcatgagcgtggctacttggctaacatctgtcccccctcacatttgtaagtttcatgagggcgaggcccaggcatctgtttttgctcaactgtgtatctccagcaccagaaccgaggtgatgtctgccacttagggggcactcagtaaacatgtgctgaataatgggcaaatgaatgmatgaggagagctgggagggacgcgttccaccaaagccacttgctccaggggaatctttttccctttctcataaggttactaaataaattgcttggagagactcatcattcactcatttgattagatttatgggcacctgtcttgggcaccagaatggataggtggataggatagatggatgagtggatgatggttgggtgggtggatgggtagacagatggaagcatggatggatggaagga

SEQ ID NO: 877750 - DNA, 636 bp, Homo sapiens
ctctaagagacatcatagcagctgacttgaggggaaaatgaaaggggttaactagtaattcccatcaagtcatcagttgactgttctccaaagctagtcattctctgggaacagagcaaagagtcttgcatataattgtgttcaggaacaagagctaagtgtaaatggatgaaacttagcatccaackattataagcatgtatacatattttacaaacattatttaatggatccttctcaatagtcctatgagttaaaaactattattataatactattattgttctactcaacagatgaggaaattgatgaaaagagagatatataataatttcccaaggccatggacaagaaatagtggaactgatatggcattctgacctcagagttcatgctttcaaaaaacacctgacaattgttatctggctggtaatctaagatcgatgaagtttctcaaatatttgatctttccatccctgtgtagatgtatctgtttccagtaacttgccatttttctcccacagttcatgtctaattacagctctcaatctttcatgcttactgaatactctcttgggaatcagtcgcagtaccttcaaatatttacttttgtcaatccttttctatttcttagta

SEQ ID NO: 877751 - DNA, 641 bp, Homo sapiens
taaagcctcactcatgaggccctttattttcctatcagctggaagagaggatctgagtaattcagcaaggcgaggtttgtttagctgaaatgaaaagggaaatggtcaaagatgaaattgtttaattctttctcaccaactaactgcagaattatagatgtctcttgaatgcaataagttaatttcagtcattctgcttatttgtatacacgttgccaaagtaaaagcctaatccaaaaattaatgatttgagaatccattgggtattcttctgggcctagtccaattatttttttttttatgtgaacaccaaaactctcctacagtatgataygtagccaactgagtgattgactagtagctaatgcatatcaaggaacagttaaacttgcagctttaagctaaggcaaagttcagctacttatcttcagtcatctttaaatgtaattaagtctcctgggctccagttatgtggaaccagaaactagaaaggctgggtttttcaatggaaataataactggttataatccaccagcaaaagtaatgaaaatattcaagggaagaaactttttgttaaaaagaatcagatgtcgtgttattgactgtttaaaaagtacaacaaactgtttcataatatgcc

SEQ ID NO: 877752 - DNA, 641 bp, Homo sapiens
taaagcctcactcatgaggccctttattttcctatcagctggaagagaggatctgagtaattcagcaaggcgaggtttgtttagctgaaatgaaaagggaaatggtcaaagatgaaattgtttaattctttctcaccaactaactgcagaattatagatgtctcttgaatgcaataagttaatttcagtcattctgcttatttgtatacacgttgccaaagtaaaagcctaatccaaaaattaatgatttgagaatccattgggtattcttctgggcctagtccaattatttttttttttatgtgaacaccaaaactctcctacagtatgatacgtagccaactgagtgattgactagtagctaatgcatatcaaggaacagttaaacttgcagctttaagctaaggcaaagttcagctacttawcttcagtcatctttaaatgtaattaagtctcctgggctccagttatgtggaaccagaaactagaaaggctgggtttttcaatggaaataataactggttataatccaccagcaaaagtaatgaaaatattcaagggaagaaactttttgttaaaaagaatcagatgtcgtgttattgactgtttaaaaagtacaacaaactgtttcataatatgcc

SEQ ID NO: 877753 - DNA, 631 bp, Homo sapiens
catttcttgtttttgtcaggtttgtcaaagatcagatggtcgtagatgtgtggtattatttctgagggctctgttctgttccattggtctatatgtctgttttggtatcagtaccatgctgttttggttactgtagccttgtagtatagtttgaagtcaggtagtgtgatgtctccagctttgttctttttgcttaggattgtcttggcaatgcaggctcttttttggttccatatgaactttaaagtagatttttctaattctgtgaakaaagtcattggtagcttgatggggatggcattgaatctataaactacctttggcagtatggctattttcatattgattcttcctatccatgagcatggaatgttcttccatttgtttgtgtcctcttttatttcgttgagcagtggtttgtatttctccttgaagaggtccttcacatcccttgtaagctggattcctaggtattttactctctttgtagcaattgtgaatgggagttcactcatgatttggctgtttgctgttattggtgtataagaatgcttgtgatttttgcacattcattttatatcctgagactttgctgaagttgcctctcagcttaaggaaattttgggctgag

SEQ ID NO: 877754 - DNA, 592 bp, Homo sapiens
cctagtagaggctctctgtgagggctcaactcctttagcagacttctgcctgtataccagcctttttcatacatcctgtgaaatctaggcgacactgccaagtctcctttactcttgcactctgcatacctgcaggcttaacagcatgtggaagtctccaacgcttacagcttgcaccctctgaagcagcagtccaagctgtaccagtggccctttcagccacagctggagctggagcagtggggatgctgggaacagcctcccaaggtggtgcagggctttggcactctgggcctggcccatgaaaccattctttcctcctaggcctcyggacctgtgatgtgtggggctgcctcaatctctgaaatgccttgaagtccccttttcccattgtcttggctattagcacttggctctcttatagacatgcaattctatctagcaatagttgctctgcagcctgcttggatttctctcccaaaagagccttttctttctttgccacatggctagggtgcaaagttttcaaacttttacactcttcttcccttttaaatataacctacaactttaagtcatgtttttgctcctg

SEQ ID NO: 877755 - DNA, 603 bp, Homo sapiens
accatcttaaccaagatccccacagtgctttgtgtttaccttggtaatctaattctaaatttatatagaaatacaaaaggtcaggattgccatgaagaagagcaagttgggaagattttcttactagctatcaaacatttttttgacaatatagtaactaaggcaacatggtattggtatggggctagacaaaccagtagaatgggctagagagtccagaatcagaccacacactaaagatactggatatatgaagagctggactgcaggtcagtggagaagggataccatttttaatcaacagtgccaaaacaatyaggtatccctgttgggaaaaaaataaaagttgactctacttcataccatatacaagcatgtttgaaacagtcaaatatctctgaaatcaggatgtttttagaatgtacaacatatcatagtttacttagcaaacattttttcttttcttgtttcaaataaaataatggtgggtgttacatttgagatgacttaagttttatgaaatatggtgccacagtttgagtttggtcaggaaaataaaagtcaatctatataggctcccacaatcaatgtaaggacaaaggg

SEQ ID NO: 877756 - DNA, 551 bp, Homo sapiens
caagcaaatggaaagcaaagaaaacaggggttgcaatcctagtctctgataaaacagactttaaaccaacaaagatcaaaagagacaaagaaggccattacataatggtaaagggatcacttcaacaagaagagctaactattctaaatatatatgcacccaatacagatgcacccagattcataaagcaagtctttagagacctacaaggagacttagactcccacacaataataatgggagactttaacaccccactgtcaatattagacagatygagacagaaggttaacaaggatatccaggacttcaactcagctctgcaccaagtggacctaatagacatctacagaactctccaccccaaatcaacagaatatacattcttctcagcaccacatcacacttattctaaaagtgaccacataattggaagtaaagcactcctcagcaaatgtaaaagaacagaaatcacaagaaactgtctctcagaacacagtgcaatcaaattagaactcaggattaagaaactcattcaaaaccgcacaact

SEQ ID NO: 877757 - DNA, 638 bp, Homo sapiens
tccaaaaattagctgggcatggtggtgcacacttgtaatcccacccacttgggaagttgaggcaaaaaaatcacttgaaccccaaaggtcaaggttgcagtgagttaaaattgtgccactgcactccagcttgggtaacaaagggagactttgtttcaaaaaaaaaaaaaaaaaaaaaaaaaagaaatgctcagggtccacctttggggcagccacgacttcccagggtgccagcttgcagtgtcatgctccccacctacaggctcacaaaaatcctgtgatgggctggactgtgttcccaaagtcctaacccgtttctcaragtgtggtcttgtttggagatacggtctttacagaggtaatcaagttgcaatgaggtcattagggtagaccctaatcctacacgacacgcatccttatgaaaggggaatatgtggacacaagcacagagggaagacagagtgaaaacacagggagaggctgggtgtggtggctcactccagtaatcccagcactttgggaggccaaggcaggaggatctcttgaagccaggagtttgagaccagcctgggctacacagggagaccttgactctataacaaatttaaaaattagccaggcatggtggtgcatgcctt

SEQ ID NO: 877758 - DNA, 646 bp, Homo sapiens
ttttaatggggttgtttttctcttgtaaatttaagtttcttatagatgatggatattagacctttgtcagatgcatggtttgcaaatattttcccccattctataggttgtctgtttactctgttgaaagtttcctttgctatgctgaagctctttaattacatcccatctgtccgtttttgcttttgttatgattgatttggtgtctttgtcatgaaagacacccattcctagtggtattgcctaggtggtctyccagggtttttatacttttgggttttacagtcaagtctttaatccatcttgggttgatttttgtctatggtgtaaggaaggtgtccagcttcaatcttctgcatatggctagctagttatcccaacaccatttattgaatcgggagtcttttccccattgctggtttttgtcagctttgtaagatcagatggttgcagatgtgtggctgaccttatttctgggctctctattctgttctattggtctatgtgcctgtttttgtaccagtaccatgctgttttggtcactgcagccttgtagtatattttgaagttgagtaacatgattcttccaactttgtcctttttgtcttggctatttggactctttttcattccatataaattttaa

SEQ ID NO: 877759 - DNA, 646 bp, Homo sapiens
ttttaatggggttgtttttctcttgtaaatttaagtttcttatagatgatggatattagacctttgtcagatgcatggtttgcaaatattttcccccattctataggttgtctgtttactctgttgaaagtttcctttgctatgctgaagctctttaattacatcccatctgtccgtttttgcttttgttatgattgatttggtgtctttgtcatgaaagacacccattcctagtggtattgcctaggtggtcttccagggtttttatacttttgggttttacagtyaagtctttaatccatcttgggttgatttttgtctatggtgtaaggaaggtgtccagcttcaatcttctgcatatggctagctagttatcccaacaccatttattgaatcgggagtcttttccccattgctggtttttgtcagctttgtaagatcagatggttgcagatgtgtggctgaccttatttctgggctctctattctgttctattggtctatgtgcctgtttttgtaccagtaccatgctgttttggtcactgcagccttgtagtatattttgaagttgagtaacatgattcttccaactttgtcctttttgtcttggctatttggactctttttcattccatataaattttaa

SEQ ID NO: 877760 - DNA, 646 bp, Homo sapiens
ttttaatggggttgtttttctcttgtaaatttaagtttcttatagatgatggatattagacctttgtcagatgcatggtttgcaaatattttcccccattctataggttgtctgtttactctgttgaaagtttcctttgctatgctgaagctctttaattacatcccatctgtccgtttttgcttttgttatgattgatttggtgtctttgtcatgaaagacacccattcctagtggtattgcctaggtggtcttccagggtttttatacttttgggttttacagtcaagtctttaatccatcttgggttgatttttgtmtatggtgtaaggaaggtgtccagcttcaatcttctgcatatggctagctagttatcccaacaccatttattgaatcgggagtcttttccccattgctggtttttgtcagctttgtaagatcagatggttgcagatgtgtggctgaccttatttctgggctctctattctgttctattggtctatgtgcctgtttttgtaccagtaccatgctgttttggtcactgcagccttgtagtatattttgaagttgagtaacatgattcttccaactttgtcctttttgtcttggctatttggactctttttcattccatataaattttaa

SEQ ID NO: 877761 - DNA, 642 bp, Homo sapiens
ttacaaggatgtgaaggatctcttcaaggagaaatataaaccattgctcaatgaaataaaagaggacacaaacaaatagaagaacattccatgctcatggataggaagaatcaatatcatgaaaatagccatactgcccgaggtaatttatagattcaatgccatccccttcaagctaccaatgactttcttcacagaattgaaaaaaaaaaattaaagtttatatggaaccaaaaaagagcctgcattgacaagacaatcctaaccaaaaaraacaaagcttgaggcttcacaccacctgatttcaaactatactacaaggctacagtaaccaaaacagcatggtacttgtaccaaaacagatatatagaccaatggaacagaaaagactcctctgaaataacaacacacacctacaaccatctgatctttgacaaacctgataaaaacaagaaatggggaaaggattccctatttcttaaatggtgctgggaaaactggctagccatatgtagaaagctgaaactggatcccttccttacaccttatacaaaaattaattcaaggtggattaaagacttagattttagacctaaaaccgtaaaagccctagaagaaaacctaggcaataccattcaggac

SEQ ID NO: 877762 - DNA, 685 bp, Homo sapiens
tttttgtagtggctggtactggttgttcttttccatgttttgtgcttccttcaggagctcttgtaaggcaggcctggtggtgacaaaatctctcagcatttgcttgtctgtaaaggattttatttctccttcatttatgaagcttagtttggctggatatgaaattctgggttgaaaattctttaagaatctagaatattggccccctctcctctggcttgtagagtctctgccaagagatccgctgttagtctgacgggcttccctttgtcggtaacctgacgtttctctctggctgcccttaacactttttccttcatttcatccttggtgaatctgacaattatgtgtcttggggttgctcttctcaaggagtatctttgtggtgttctctgtatttcctgaatttgcatgttggcctgccttgctaggttggggaagttttcctggacaatatactgcagagtgttttccaacttgcttccatcctccccatcactttcaggcacaccaatcaaacacagatttggcctttycacatagtcccatatttcttggaggctttgttcatttctttttgctcttttttctctaaacttgtcttctcgctttatttcattaattcaatcttcaatcactgatatcttttcttccacttgatcaaattggctactgaagcttgtgc

SEQ ID NO: 877763 - DNA, 569 bp, Homo sapiens
ttcctacaaatatgtagtgacgtctttttgaagtatatctagctccaaggttaaagaacacagataaacttaacaatgtgatatatcatgtgaggctgttaaatatataatgaaataggtgctttaagtgagcaatgccattaactgaaagagatttaacagataaccctaggacaaataagcattcttaattttatacaatttktgcataaccagatggaagaatattttctctttctttggcatcccagataaaggggcagagaagaaatgcattagattagattaccaagggaggtggctagatttttagttccagaaaataatgcattattaaaagaataatgtctcatattctattttagcatatttgttctgctaagacataaactccatcaactcccaaagcagaaactcgtagcatttattgagaacttactgcatgcccagcactattttaatgtattcctgtgtaacacctctattaattatcacaatagtttcaaaaggtaggtgttactatcatcttatacttacaaatgtggaaaattaaaataaaatttgagtga

SEQ ID NO: 877764 - DNA, 569 bp, Homo sapiens
ttcctacaaatatgtagtgacgtctttttgaagtatatctagctccaaggttaaagaacacagataaacttaacaatgtgatatatcatgtgaggctgttaaatatataatgaaataggtgctttaagtgagcaatgccattaactgaaagagatttaacagataaccctaggacaaataagcattcttaattttatacaatttttgcataaccagatggaagaatattttctctttctttggcatcccagataaaggggcagagaagaaatgcattagattagattaccaagggaggtggctagatttttagttccagraaataatgcattattaaaagaataatgtctcatattctattttagcatatttgttctgctaagacataaactccatcaactcccaaagcagaaactcgtagcatttattgagaacttactgcatgcccagcactattttaatgtattcctgtgtaacacctctattaattatcacaatagtttcaaaaggtaggtgttactatcatcttatacttacaaatgtggaaaattaaaataaaatttgagtga

SEQ ID NO: 877765 - DNA, 616 bp, Homo sapiens
agcacaaaaaaccaaacaccgcatgttctcattcatagatgggaattgaacaatgagaacacatggacacaggaaggggaacatcacactctggggactgttgtggggtggggggaggggggagggatagcattaggagatatacctaatgctaaatgacgagttaatgggtgcagcacaccagcatggcacatgtatacatatgtaacaaacctgcacattgtgcacatgtaccctaaaacttaaagtataataaacacacacacacactcacacaaaagaagcttcartctgtcagagctgctataaaaattgataaagtccttgtggacagttctatctcgtgatttccatggagaacatgaagccatggagccacagaagtcccatgattgccagctctaggagagaaggttcaacacttccttctctcatctctgtgtacacctgccctttgtatgttattctagggaaaacttcatggattttcctggtgcactactactcacctgtgggaccagaaagacacttttctagaaagatacagattaatgtcaagctaataaggcaacagtaaaagctttgttgtgtggacttaaacctagagtaaatacga

SEQ ID NO: 877766 - DNA, 694 bp, Homo sapiens
caagtcactcctaagccaaaagaacaaagccggaggcatcatgctacctgacttcaaactatactacaaggctacagtaaccaaaacagcatggtactggtaccaaaacagagatatagatcaatggaacagaacagagccctcagaaataacgccgcatatctacaactatctgatctttgacaaacctgacaaaaacaagcaatggggaaaggattccctatttactaaatggtgctgggaaaactggctagccatatgtagaaagctgaaactggatcccttccttacactttatacaaaaattaaatcaaaatggattaaagacttaaacattagayctaaaaccataaacaccctagaagaaaacctaggcattaccattcaggacataggcatgggcaaggacttcacgtctaaaacgccaaaagcaatggcaaccaaagccaaaattgacaaatgggatctaattaaactcaagagcttctgcacagcaaaagaaactaccatcagagtgtacagacaacctacaaaatgggagaaaattttcgcaacctactcatctgacaaagggctaatatccagaatctacaatgaactcaaacaaatttacaagaaaaaaacaactccatcaaaaagtgggcgaaggacatgaacagacacttctcaaaagcagacatttatgcagccaaaa

SEQ ID NO: 877767 - DNA, 634 bp, Homo sapiens
taaaaaccctagaagaaaatttagggaataccatttagaacataggcataggcaaaagttttataacaaaaacgccaaaaacaattgaaacaagagcaaaaattgacaaatgggatctaatgtaactaaagagtttctgcacagcaaaataaactatcatcagagtgaacagacaacctacagaatggragaaaatttttgccatctattcatctgacaaaggtctaaaacccagagtctacaaagaacttaaacaactttacaagaaaaaagcaatcaactccattaaaaagtaggcaaagaacatgaatggacacttctcaaatgaagacattcatgcaggcaacaaacatataacaaaaagctcaactaatcattagagaaatgcaaatcagaaccacaatgagatactatctcacgtcagaatggctgttattaaaaagtcaaaaaacaacaggtcctggtgaggttgtggagaaaaagaaatgcttttacactgttagtgggagtgaaattatttcaaccatggtggaagacagtgtggtgattcctcaaagacctagaggcagaaataccatttgacccagcaataccattaccaggtataaacccaaaggattataaatcattctat

SEQ ID NO: 877768 - DNA, 627 bp, Homo sapiens
ggtcacattaaaaaaatttagtgtggtttttggtatatgacttttattaagaaaaacaatgtttcttctttttcagttggcttgaagatgttcattatgaaattatttttgtcagatgatttttctacatttgttgaaataattatatattaaaaaacatgttagtctgctgactratagatttgctagtgtataattatttttgcattattaggattaacccatcttagttatgatgtgtattttaaacagactgctaaatttattatattagtatgtgtctaaaattttattccatatttttatgtgagattggcttaaatatatttttcttgtgctattgttctctagttttgttatcaatgttactctagttttgtagaatgaatttggagctttattttacattctgtgaagcaatttgcataagacaaagattatttgttgttgaaatggttcataaaaatcaactctacaaccacctaggccttatatcttctgggtttaacttacacatctgctaagctctgctccctgtgtcttatcttgggcccttgactgaaagttaaaattcttcttgagacatctgttctcatgggggtggggtgaggagcaaaaggctaaacc

SEQ ID NO: 877769 - DNA, 646 bp, Homo sapiens
agacaaaaaaaacttcagtggtttttggacaacattaggcttcacttacatgaaaaagaaaaatattcaaaggaataaggttgtatattttataaatttgatgaaaacaacatacaaatccccccgccaaaaaaaaccacraagaaaaacacaccaaacacattataacgaaattactgaagaccaagaacaaaaagaaaatttttaaagtaatcagagaggaaaaaagagacatcatatatagtagaaaaatgtagagaattattagtgttctcatcagaaaaatgcaagccataagacaatgtagcaaaagcatttaagtcctgggaaaaaagttaacctagaaatttgtattaaataaaaatgtccttcaaaactaaagacaaaatactttttcaaagaaatcaataaaagaattaaattctaagggtttttgctggaactataaaaaatattaaaaggttttcaggttggagaagaatactagatagaaacctggatctacataaaggaatacaaaatggtgaaaatggttaatatatgggtaaaatttgaaactttttcttgtttttaaatttgtttaaaagatattttgttttgtaaggaaaaaataacagcaatgaactgtgtggtttataatatagag

SEQ ID NO: 877770 - DNA, 627 bp, Homo sapiens
agtatcatgaatttagtacttttttttctggaaatatttggcatatgaacctctctcacttatgagcagcatatttgttaattgagattattgtagattcacacgtgatagaaggaacgatacagagagatcccttgtatacttcatccagtttcscctaatggtgacattttgcgtaaccatagcataatagcataaccaggatattaatatcaataaaatccattgatctaattcagacttacccagttttacttacacacatatatgtgtgtattaaatctgatacaattttaagatgagtaggtgtgtttatccacaaataggagtaaaaatgctaaacactaacaacgtcaggatcctttctattctttgataaccatacacacctcccaccatttctcccactcattttaaatgttgccactaaacttatcctctatttctaaaatttcatcatgaatagaacaatacagaatataaactttggggttagtatttttttactttgtgtgattctctggagacttgcctaagttgatatgtacataaatgatctattccttttaattgttaagtagtattccatggtgcatatgtactgccatttgtttgaccattcaccta

SEQ ID NO: 877771 - DNA, 568 bp, Homo sapiens
agttctcattcttataatactcaaaatgtcctttaatttttaatttttgatagtcatatcattatccctaggtattttagcttctatcttaaattctaaaatgattttcaaacaagagaaagtattctttattactatatgtattaaacatcatggttttcaaatttaactgcaaatgtatcttttcattgcttcttgatgacgcccttcaccctatccatattatcactaccaagtggygattacttttcaggttcacatacttattctttagaaaaatcttgtctgtgccttataaagaatatgattgttggcattcaaaagccagtgaagtatacattattagcctgttgcctaactcatttctttaagaaactacactaattacccacatacttatgtttttatttcctcattatttctggaggaaacaaatactgctaacatgatatttgtaagacagaaaaaagtcttttcttgaaaagtgctgtcattgtagtactaacttatagtatcaacttctttatcaactccttatgcgctttttattctgagagaaataaaaaag

SEQ ID NO: 877772 - DNA, 664 bp, Homo sapiens
taagtcattcaaactcacttggtctcaggttctacctttatgaaatgataaatctgtgggttttgttctattctagtctgttactttacatggtttttgtaaaataacaataataccataattatgtaaatcccagtccagattctatctttctattttacaatctatataacttacataccatattttctaggagtgtaacyaaatgttactgaaacatcaagagttcagtctaggtcctgttgcttgcttcacagaaagccagtcactgaaacaatgagtattgccagggaaaggggctttatttggatgctgcagccaaggagaatgggacatcactcaaaaatccatcttctcaatggactaaaattagaggtagaaaaataagggaagaaatgtaactaagtatggaaaaataggaattaggagaggattaagaagagaaggtggtcaacaggcagcagcaggttacttaggcaaccataattggcaaggggtctgggtctggcatctcattgtccaggtgcagttatctggtgagttgcagttccttgaaactatcttggagggctgatagttggtttcctgagaaaggaactcagataagaaaagtgtaagtttcttcagttttaatactgggagggtcaactttttatttttattt

SEQ ID NO: 877773 - DNA, 567 bp, Homo sapiens
ccttatgctttgcacctctggaaatcctcatgttctgtttcctctttctgtgaagatctggacaaactgactcacaaccttatttatttttatgacatattttagcctttggtccagattgctggtctgtaaggacctcactgattggaccagattctaaagagttacttatttcattttctgaaagttcatagaatcatatgctttcttctttttattttagagtctctctctttctctctctctccatatatatatatatatacacacacacacatagtcttccaaaactcctcggaagaaagggaagcattctgtaagactttgggcagattttttttttttttttttggacagagtctcactttgttgcccaggctggagggcggtggcaggatgtcggctcactgcaacctccacctcycaggttcaagcaattctccaggatcagcctcccgagtagctaggattacaggcctgtgccaccacactcagctaatttttgtatttttagtagagatgaggtttcgccatgttggccaggctggtctcagactactcttgacc

SEQ ID NO: 877774 - DNA, 609 bp, Homo sapiens
attgaaattctaacaattttaaattaatttaggaaaaattacatttaacatgttgagtttttcttgatatgtgttgacatttgttcaagaccacctttttttcaggaatatttttaagatttttggttgttaaagctgtttcttgttaaatttatatgtggttcttttatttatctctattctatcttaagtgggtcaytttctttccttatgtatttattttttgaatgtgcataaaaagatactgatcttttgaatattatttacatctctagtgaatttactagattcccttattttttcccataaatctgccaattttgttgagttttattggcacatttatgtgcatgtttataccatttacatcaaaggtgacattacttcttcctttccaatttttatactccatttctggtgcctaatcacattggctaacttctctacaatggcgttgaattgtcatagagatggtggccttccttgtctagttccagacaaaggaaaataacagaaaaagtaataaagaagctgctggtgtgttacaattaaatcagaactcttgtttgctggagggttacatctctatctaatctacatctacgtcta

SEQ ID NO: 877775 - DNA, 615 bp, Homo sapiens
ttaattaagtcctaattaatgatacaaagcccctcccctaaagtgtctaatcatcagcattagtattacggcacgtatatttgcctgggtcattgaaatagaagaggttgaaatgagaattctggatgaaactaaacatgtgggggaatagatatgtgtcactgctacaggaaaatacattggatgatctttatatgcatatgatgttggctgctattcatgcctaggcacctatatatacatatacatttatatatatatacacacacatatacatttatatayacacacacacacacacacacacacacacacacacatatatatatttcctttgaaaaagaactgggtgatctctagaagctcattctactcgactcccattaaactataagtatgggttacttaaggtgttttttggttggaggctgtgtggtccttgatgctgatcttgggccttccagggtcagctgcaggcatcagggccctaatgatctatcatctggtcattttccacttgatggctatctcttctttccagctggttaaattttattttattatgggttatagaaacttcatttatcatgcattcttctcatcaacatgggcttt

SEQ ID NO: 877776 - DNA, 560 bp, Homo sapiens
aaagtcctctttcaagctcacttttatgattgttggcaggattccattacttgcaggctgttggactggaggcacagactggagttcagagaactcccatagtttcttgccattgatacaggagatagaaagtattcaggcagatagtaagggcaacagagtcatcggcaaaatttctcttgtaataaaaagcagcccccaaatcatttattttctaacaaagatcagcctgaaaaattcagcagcaaacatagataagcaagttggaagctttcatgggcgaatgccaacagctgtgtcaatagaaaagggctacctgggagccaggcatgttcaacgtgaaggctccatcttcccttttctttgtcaccacgtgtacagtaaagaggcaggcaacatggcrcctgccaggtagagaacccatttgcctaataaaaaaatagggtggagccacctgcatttttgaacattatgcaaattgcacacctggtccgaccaatctctcatgcactatgtaaatcaaacactgcctcctcaagctcatccataaaatcgtctgc

SEQ ID NO: 877777 - DNA, 558 bp, Homo sapiens
gagaacaccacaaagatactcctcgagaagagtaacccaagacacataattgtcagattcaccaaggttgaaatgaaggaaaaaatgttaagggcagccagagagaaaggtcaggttacccacaaagggaagcccatcagactaacagtggatctcttggcagaaactctacaagtcagaagagagtggggrccaatattcaacaatcttaaagaagacaattttcaacccagaacttcatatccagccaaactaagcttcataagtgaaggagaaataaaaacctttacagacaagcaaatgcggagattttgtcaccaccagacctgccttacaagagctcctgaaggaagcactaaacatggaaagaaacaaccaataccagccacatcaaaaacatgccaaattgtaaagaccatcgatgctatgaagaaactgcataaattaacgggcaaaataaccaactaacatcataatgacaggatcaaattcacacataacaatattaaccttaagtgtaaatgggctaaataccccaattaaaagacacagactggc

SEQ ID NO: 877778 - DNA, 707 bp, Homo sapiens
aatggggcacactgatacattctacgacatgaatgaacctaaaaacattaagctaagtgaaacaagcaagatataaaacgttatatatcctattatctgtttatataaaatatccagagtgggtaaatccatgcagtcagaaagtagattggtgtttaccaacagagaggtagatgaaagaatggagagtaactgcttaatggggacagggtttactttgggggtaatgaaaatgtttttgtggtggttgcataaaaatgtgagggtaktaaacgtaattgaactattcattttaaaatgattaattttacattatataaattccatctcaaattttaaagaaaattaacaacttaagccctcactttaaaatcccaactacatttttaagagtccctaattaagctgggcatggtggcctgtaatcccagcactttgggagactgaggttggtggatcgcctgaggtcaggggttcaagaccagcctggccaatatagtgaaaaccaatctctactaaaaatacaaaaaattagccaggtatggtggtgggcacctgcaatcccagctacttgggaggctgaagcaggagaattgcttgaacccgggaggtggaggttgcagtgagccaagatcatgccactgcactccagcctgggtaacaagagtgaaactccatctaaaaaagaaactgatggagctgaaaac

SEQ ID NO: 877779 - DNA, 683 bp, Homo sapiens
tatactaacttctcccaaccactcaccacaaaagaaaagaaaaaaaaaaaaagacaaacacacaatgagcagcttcaatacatatattaagcatagtagtatagatatctacatgttgaggatggtattgcacttcttcattaaacactcagaagcatttttgaaacatattctggggagaaaataaaagaaaaatgaaaatcagttttggcatattcatgcatgcattactttgcaaagtcatgatggcaaaacaatgttaaattttgataggaccagtcctaaattatggcttcctgcggratgggttacccatgggttaggagcaatcacaaattacccttcactcccaggatcccatagtatgtggaagaggatgaatgaagactgaaactgtggtgtttcaatgggagaagaaaggacagaggtgtttcctttatcttgaggattatcattactctcacctaagtgggacatccaggcattagtccatattcctccctcttacttaatcagtcaccaagtcttacagattatctttcctaaaagtctcatatccatcaccttttctattcattctgccagtttcttagttcaggtttgcatcatttctcacctggatgactaggtcagcctcccaacttgtctcatttcctccagtatggcccttgaaatgatccccc

SEQ ID NO: 877780 - DNA, 658 bp, Homo sapiens
cttccacaatggttgaactaatttaaactcccaccaacaatataaaagcattcctatttctccacatcctctctagcacctgttgttttctgactttttaatgtttgccattctaactagcatgagatggtatctcattgtggttttgttttgcatttctctgatgaccagtgatgatgagcattttttttcatatgtctgttgactgcaaaaatgtcttcttttaagaagtgtctgttcataatctttgcccactttttgatggggttgtttgtttttctcttgtaaatttgtttaagttctttgtagattctggatattagccctttgtcagatgggtagattgcaaaaattttctcccattctgtaggctgcctggtcactctaatgatagtttctttttctgtgcagaagctctttagtttaattagatcccatttgtctgttttggcttttgctgccattgctttttgtgttttagtcatgaagtctttgcccatgcctatgtccrgaatggcattgcttaggttttcttctagggtttttatggtgttaggtcttacatttaagtctttaatccatcttgagttaatttttgtatatggtgtaaagaagggatccagtttcagctttctacatatggctagccagttttccc

SEQ ID NO: 877781 - DNA, 619 bp, Homo sapiens
atccaatcacacagggaacttcctctatttttttttcctccctcaaaaaaaaaaaaaaaaaaaaaaaaagcttatctctcttccctgctcataaagctccaattacttcccatttcacagcaaatgatatccaaattccttaatctggcttcagagttctatagtcaaatgattttttagcccttttactttttcactatactcacytcagattataaccaggtggaattgtttacccttgcctaatcatgctctatgcttttattctttctttcaccttacttgtctgcacagcgtattgtagtggttaagggcttgggctctaaaattagacagtcctgaattcaagttccaaatacccgcctcactagccgtatgattttcagcagataagaccattgtcagcctctcttgccttatctatgcaatggaaaacaatacagtggaacctctctcagggctttttcctgatgactaaatgaggtaataaatataaagtgcctgacacatacagcttcaataagtattaactatcatgtttattattttcttataatcccactgattcaaaatagagttcagatttcatcccttacctaaaattttccagatttcccac

SEQ ID NO: 877782 - DNA, 587 bp, Homo sapiens
agtgacactaatgcagctctcatatattaaagggcttgagtgagtttagcgggggctgttgcttgaggttgaagccacaatcttaattttattgaataaatttttagtacaccattaacatgaaacagaggataaattcatctttattatttttcatcttgagaaaattatcttaaaatttgttttttaattttatagctaaaatgtgattagctttcttttataaaacaacamattttcagatttttacaaatcaaacacaaattatttttgaatgaggaatgttgttcctctctttatgtgtgttcatattaagtgctggtaaaattccattatgttttgacttgaacattaaatattaccttgaatatacactccccagcagtcgcattctgatagtgacatactgtactgtctgaagggtgtcatatggtcatctgtcagccgaatgttgttccatggaaagaattttattcttcagatgtcatctagaatgatttgtgttaaaaaaaagagaaatacagaagtattcacagaatctgtatgtgaggaaattagagatgggaaggattgtgctaaggatactg

SEQ ID NO: 877783 - DNA, 587 bp, Homo sapiens
agtgacactaatgcagctctcatatattaaagggcttgagtgagtttagcgggggctgttgcttgaggttgaagccacaatcttaattttattgaataaatttttagtacaccattaacatgaaacagaggataaattcatctttattatttttcatcttgagaaaattatcttaaaatttgttttttaattttatagctaaaatgtgattagctttcttttataaaacaacacattttcagatttttacaaatcaaacacaaattatttttgaatgaggaatgttgttcctctctttatgtgtgttcatattaagtgctggtaaaattccattatgttttgacttgaacattaaatattaccttgaatatacactccccagcagtcgcattctgatagtgacatactgtactgtytgaagggtgtcatatggtcatctgtcagccgaatgttgttccatggaaagaattttattcttcagatgtcatctagaatgatttgtgttaaaaaaaagagaaatacagaagtattcacagaatctgtatgtgaggaaattagagatgggaaggattgtgctaaggatactg

SEQ ID NO: 877784 - DNA, 637 bp, Homo sapiens
ccgtcaaaagaggatatgcaagataatttttttaaaaaaatggatccatgtgtccactactcagtttaagaggtagaatattaccattgtatcattgaaacctgtcccccaacccaccccatgttcatctttccaatyttaccctttttcctcctctaccagggctaaatgctttctgagctttgtgtttttaattgcttggactgtgttaaattttaactatacatgtaagtatcaataaaaaataaatttttagtactgtatgctttcaaactttatatatatagtatcaaatgctctagttcttctgtgatttttctcaatcaagattatgtttctgaatttcatctattttcagtgtggtacaggagctcattgtttaagattaccacaattcatttacacattctcctgacaatggacttttaaatgtttcctaggtgttttgttatttaggataatgttattataaattttcccatatgaagtctcttggagcaagtaaccagggttatgctgcctattctagtagtgatggggaagagtcaagaacagacagcagacgagaaaaataaatgaaatcaagagatgataatgagaatggaaattgtatgccctgtagattctatagaatctt

SEQ ID NO: 877785 - DNA, 637 bp, Homo sapiens
ccgtcaaaagaggatatgcaagataatttttttaaaaaaatggatccatgtgtccactactcagtttaagaggtagaatattaccattgtatcattgaaacctgtcccccaacccaccccatgttcatctttccaattttaccctttttcctcctctaccagggctaaatgctttctgagctttgtgtttttaattgcttggaytgtgttaaattttaactatacatgtaagtatcaataaaaaataaatttttagtactgtatgctttcaaactttatatatatagtatcaaatgctctagttcttctgtgatttttctcaatcaagattatgtttctgaatttcatctattttcagtgtggtacaggagctcattgtttaagattaccacaattcatttacacattctcctgacaatggacttttaaatgtttcctaggtgttttgttatttaggataatgttattataaattttcccatatgaagtctcttggagcaagtaaccagggttatgctgcctattctagtagtgatggggaagagtcaagaacagacagcagacgagaaaaataaatgaaatcaagagatgataatgagaatggaaattgtatgccctgtagattctatagaatctt

SEQ ID NO: 877786 - DNA, 544 bp, Homo sapiens
tctaaccacaagtttgatatatttttttaaagaaaaatttccaaaatactataactgagcaataggctaatacttcataaattaaaatatttaaatattcaatctttctgagtggatatttgttgcatatctgataacttggcctaattctgtaattgggatgagaactacccaattttattggtaacctcttttctgctctgcaactttggaaataatatggaggacttcaaattcatttgagacaaaaatattaaaaatgtaaccccygattaggatttcagttccaaagctctccttggagggatatagagctggagacaatcaatcacatttatttttcatctccttaatattgatatataaaagtcaggttaaaattagtatcaaaatgggaagcctgcattgtaaactggctggaataatacactctgcaatatgaaggaaaaaggaaaaatttagttgattcatttacttaactataattttttaaagaattttaagtttctaataaatttaactataaatttttaattttctatct

SEQ ID NO: 877787 - DNA, 609 bp, Homo sapiens
ccaagcattcaacagtgatggtgaaatgtgtcagcagctttcaactttgatttttgctcttataattttttagcttggttttgtttcccttccctttaacagatcatttcctttcctgagttggtgccagcatcttgtgtatctagatttctgaggacactgcttttcaaagtgtgctctaaagatccttggttctaaaatggtactgtcagaaagctgctttcacctatttgaatacatacttcttgttacatctgaattccaacagatgcagtttttttctttttcttttttttttttttttttttctgaggkggagtcttgctctgttgcccaggctggagtgcagtggtgtgatttgggctcactgcaagctccgcctcctgggttcacaccattctcctgcctcagcctcccaagtagcttgggactacgggtgcccgccaccacacctggctaattttttcgtatttttagtagagatggggtttcgccatgttagcctggatggtctccatcttctgaccttgtgatccacctgcctcagcctcccaaagtgctgggattacaggcgtgagccaccactcctggcccaacagatgcagctgt

SEQ ID NO: 877788 - DNA, 644 bp, Homo sapiens
aaaggagatcattttgaagcgttaagattcaactgccttgctggggtttggacttgcatgtggcctgtaacccctttgttttggccaatttgccctgtttggaatgggtatagttacccaatgcctgtacccccatggtatcaagaaagtaactaactttcttttgattttacaggctcataggtggaaggggcttgtcttgtctcagatgagactttggactgtggacttctgagttaatgctgaaatgagttaagacttgaggaactgttgggaaggtatgattggttttgaaattygaggacacaacatttagaggggacacaggcaaaataatatggtttggctctgtgtccccacccaaatctcatcttgaattgtagctcccataattgccatgtgttgtggagggacccagtgggagataattgaatcatggaggcagtttaccctatactgtccttgtggtagtgaataagtctcacacgacctgatggttttataaggggtttctgcttttgcttggttcccattctctctcttgcctgttgccatgtaagacatgacttttgccttccaccatgattgtgaggtctccccagtcatgtggaactgagagttcattaaacctctttttgcttata

SEQ ID NO: 877789 - DNA, 593 bp, Homo sapiens
gagaaaaacgtatccatgaaccacacaggagcatgtcttaaagaatgcttgtgtaaaggtgaaaaaaattacttcctatcccagtggagtaagatttgataaaaattaataatgggtattggttttatatgcatatggttcctgttccttctgacatcatgtaataaatcagtatattttctaatgttcaattgagtttttctttgcattttgaagttttccttttcttttttatttcacaaagaattatttggtaataatatgcatctacttcctactcataggttttaataagtgctcattatcygtcatttgttttctctcttttttttctatttattcatataacaatagtggctgttttagtagttgctattttttcatcattattccttgaaaatagccagtttttcttgggtcagcaactggcaggtacaggagatggccatttttctgtctcctaagcatggaagtagcttgtagacaggattttgcctatatgttaacttttcactcctccctgagaatggttaaatgtgtctggaggttttccaagcagaaaatctcttattccccatgttaaacaaaaacag

SEQ ID NO: 877790 - DNA, 593 bp, Homo sapiens
gagaaaaacgtatccatgaaccacacaggagcatgtcttaaagaatgcttgtgtaaaggtgaaaaaaattacttcctatcccagtggagtaagatttgataaaaattaataatgggtattggttttatatgcatatggttcctgttccttctgacatcatgtaataaatcagtatattttctaatgttcaattgagtttttctttgcattttgaagttttccttttcttttttatttcacaaagaattatttggtaataatatgcatctacttcctactcataggttttaataagtgctcattatccgtcatttgttttctctcttttttttctatttattcatataacaatagtggctgttttagtagttgctattttttcatcattmttccttgaaaatagccagtttttcttgggtcagcaactggcaggtacaggagatggccatttttctgtctcctaagcatggaagtagcttgtagacaggattttgcctatatgttaacttttcactcctccctgagaatggttaaatgtgtctggaggttttccaagcagaaaatctcttattccccatgttaaacaaaaacag

SEQ ID NO: 877791 - DNA, 594 bp, Homo sapiens
cctacaaaggacatgaactcatcattttttatggttgcatagtattccatggcgtatatgtgccacattttcttaatccagtctatcgttgttggacatttggacatttcggttggttccaagtctttgctattgtgagtagcgtcgcaataaacatacgtrtgcatgtgtctttatagcagcatgacttatattccattgggtatatatccagtaattggaagcctgggtcaaatggtatttctagttctagatccctgaggaatcaccacactgtcttccacaatcgttgaactactttacaatcccactaacagtgtaaaagtgttcctgtttctccatatactctctagcatctgttgtttcctgacttttaaatgatcgccattctaactagtgtgagatgatatctcattgtgattttgatttgcatttttctgatggcgagtgacgatgaccatttttcatgtgtctgttggctgcataaatgtcttcttttgagaagtgtctgttcatatccttcgcccacttgttgatggggttttttcttgtacatttgtttgagttaattgtagattttggatattatccctt

SEQ ID NO: 877792 - DNA, 587 bp, Homo sapiens
cctcccacaatacgtgggaattatgggaacaacaattcgagatttggatgaggacacagccaaaccatatcagtctcataataacgaccaaaggccaagccttccctaaatcgtccttaagagactcatgcagatttcataatttgctcccagttgggccttttctcaagactttgasattttgatctggactcagatgcctttgtggctcattatgaattccatttgtgttcttacactggactcagtaagatagctactctttcatcaatttgtgtcattatttattaattctttgcataattggacttcgaaataggattttaaaaaatgttttgaccgtgtgctcttcacaatgaagatcactaggcatttgttatgtgattctttcttttctatcatatgggagaaaataggattgggctgtgtgccctgagagggagggcacatttagatattttaggagctgtaaatagaagaccaaatatcagagagagagacttcgcttcacctgtagttcaaatggtttgttaggacaggaacagtggctcatgcctgtaattacagcactttgggaggttgaggca

SEQ ID NO: 877793 - DNA, 587 bp, Homo sapiens
cctcccacaatacgtgggaattatgggaacaacaattcgagatttggatgaggacacagccaaaccatatcagtctcataataacgaccaaaggccaagccttccctaaatcgtccttaagagactcatgcagatttcataatttgctcccagttgggccttttctcaagactttgagattttgatctggactcagatgcctttgtggctcattatgaattccatttgtgttcttacactggactcagtaagatagctactctttcatcaatttgtgtcattatttattaattctttgcataattggacttcgaaataggattttaaaaaatgttttgaccgtgtgctcttcacaatgaagatcactaggcatttgttatgtgattctttctttyctatcatatgggagaaaataggattgggctgtgtgccctgagagggagggcacatttagatattttaggagctgtaaatagaagaccaaatatcagagagagagacttcgcttcacctgtagttcaaatggtttgttaggacaggaacagtggctcatgcctgtaattacagcactttgggaggttgaggca

SEQ ID NO: 877794 - DNA, 640 bp, Homo sapiens
tacctttggacaccaacagcattctttccattcattcatcctcctgacttatcagaccctgctatgaatgacttgattgttcttcaacttccaatttaccctcaaaatttgaagattttctacccgctcaaaataattgattttgcctttttggaaagcarcccacaaagagattttttgaataaataaaaattgatccatgtttacgaagcgtgtatttggatatgtccgttggacatatctatcatttgttgacatacctatcacactgtctggaatgacacctcagttttttcccttttctttcaaagtaggcctttgggaatcacatttacttttatatagaaacatgattttttcctctcaagagcttgtcttttgtatttagcaaaaaaaaaaaagccttctccgttctgtagagaaaatccccaaattgtgcaaaacctctggagaaagcactgagcccaagaaatcagcattccaagaaaaagactctgcacacagcatctgcatttttgtgctgaactgttaaatgcagatgtagtgaaattcatagctttttcaaaatgtacaatatagtgagtgggtgttgccaatacattataattaccctggacttgtgtgaggtggatcctttgga

SEQ ID NO: 877795 - DNA, 644 bp, Homo sapiens
cattacgtctgattcactgaggctgttgttgagtttaactataaccttactgattttctgtcaactggatcagtccatttctgataaaagggtgttgaagtctcctagtagaatagtaaattcatccatttttccttgcctcatgtattctgatgctctsttttgagcacatacacattaaagattgttacgtctttttggataattgaccccttcatcattatgtaatgcttctctttgtctctgataaagttccttgacccaaagtcttctccgtctgaatacagctactttcactttcttttgattgatattaggatggcatgtcttcattcatttacttttttattgtggtaaaatacaaataacataaaatttgccatcttaaccatttttaagtgtactgttcagtggtactaaatacattcataatgttgtgcaaccatcagcaccactcatctccataactcttttcatcttgtaaaactgaaactctataactctatatccataaagaataacttcactttccccccttcctctaggccctggaaacctcctttctattttttgattctctgattttggctactctaagtacctcatataagtggaatcatacagtatttgtctttttgtgactg

SEQ ID NO: 877796 - DNA, 644 bp, Homo sapiens
cattacgtctgattcactgaggctgttgttgagtttaactataaccttactgattttctgtcaactggatcagtccatttctgataaaagggtgttgaagtctcctagtagaatagtaaattcatccatttttccttgcctcatgtattctgatgctctcttttgagcacatacacattaaagattgttacgtctttttggataattgaccccttcatcattatgtaatgcttctctttgtctctgataaagttccttgacccaaagtcttctccrtctgaatacagctactttcactttcttttgattgatattaggatggcatgtcttcattcatttacttttttattgtggtaaaatacaaataacataaaatttgccatcttaaccatttttaagtgtactgttcagtggtactaaatacattcataatgttgtgcaaccatcagcaccactcatctccataactcttttcatcttgtaaaactgaaactctataactctatatccataaagaataacttcactttccccccttcctctaggccctggaaacctcctttctattttttgattctctgattttggctactctaagtacctcatataagtggaatcatacagtatttgtctttttgtgactg

SEQ ID NO: 877797 - DNA, 646 bp, Homo sapiens
gaaacatagtgaggtccatttgggatgtgttgggattggggtccctgtagatggtggccctgtggctgggcacttggaggaaggagcagggctggaggctgagctctaggagtcatcagcacatcctgcagggagcctgggaggtggagacgacagctgctcakggagagcagagatgaggacctggggtgggaccctgaatggcacagatgaaagggtggaagccacaggatgcctgggctggcaaggctggaggggaaggaagagaatcaggagagcatggggtgaaggaggcccaaggaggagaggctactagaaagggggggagggtcagtggcctcaaggaggtcaagggaaatgaggaatgagcatccacgagttggcacaagcgtgacctcctgggggtacaaggtcagccccagcagggtccttgagtgctcctattctcaaatttcaccctcggagacccagaattctgtcctggctgctctcccagccccctgcatcagagcaagagggaggctaacggggatgcataaaatctctgcaggccacgggaaatagattcttttctctctaagttgtcacatctcactgcagtatggatggccagataagaagttttccctgcctcatagatggggct

SEQ ID NO: 877798 - DNA, 586 bp, Homo sapiens
atttttcccattgtttggatatcaaatacccataataagatatgtcagttgtataagaagagggagcttagtttattataaagtgagacttttttcttttcacacatttctagcaagaagcaacttggcctgctaaacgcatacagcaggagaaacgaggacttctctgctgggcttgaaaacattacaatggatgtgtcaggactgtaggcctggtgattcagtccttactgcagcaaattttattgacagtgtgatcctcatgccttggcctcccaaagtgctgggattacaggtgtgagccattgggccctgycaggatttgttaattttttgatttctcaactagtgttggcaagcttggagtggaaagtataaactttcaattttgtattataaaatcttgtttttatcagtagcactctcatgtcttggtttcactatttactttgtctcagaagccctagattggggcagcttgcttcttgactgacatgcacaatgtcaaaggatatgacaccagtctgtcagcagagctctagcagctacctcaacaccgtgaccatgtctgcagagaatgctccag

SEQ ID NO: 877799 - DNA, 565 bp, Homo sapiens
ggcacaagcaatcctcctgcctcagcatcccaagtagctgggactaaaggcgcacaacaccacgcccaggtaattgtaacatgctgtagagaccagtctcgctatgttgcacaggttgacctggaactcctagcctcaagcaatcttctcacctctgcctcccaaagtgctgggatyacaggcatgagccaccacgcccagctatgaccatcctatttcaaccacactgatttccttcctctatttcatatgtgccagtcatgcttgctcctccctgaaggtgttttcatttacgattccctttgcagtctcttccctagatatccacgatttgctcccttagctcctgcaaatcttcattcataaattatctctttgttggggcgccatgtcacacacctgtaatcctagcactttggggagatgaagcgggaagataacttgagccaaagagttagaggctgcagtgaactagcattacaccactgcatttcagtctgggtgacggcgagaccctttctctaaaaaagtacaaataaaagtaaaaccatctccttcttgaggc

SEQ ID NO: 877800 - DNA, 650 bp, Homo sapiens
ttaccttgggcagtatggccattttcatgatattgattttttcctacccatgagcatggaatgttcttccatttgtttgtatcctcttttatttcactgagcagtggtttgtagttctccttgcagaggtccttcacatcccttgtaagttggattcctaggtattttattctctgtgaagcaattgtgaatgggagttcactcatgatttggctctctgtttttctattattggtgtataagaatgcttgtgatttttgcacattgattttgtatcctgagactttgctgaagtagcctatcagcttaaggagattttgggctgagacgatggggttttctagatatacaatcrtgtcatctgcaaacagggacaatttgacttcctcttttcctaattgaattccctttatttccttctcctgcctgattgccctggccaggcagatctatagataaagaagtccaacatgggtctcactgtattaaaattaaggtatttccaggcctgtatttctttctgggggagaatccatttcattgtctctctcagttttctgaagctgcccctattcctaaacttatgttcccttgctccattgtcgaagtcagcaatgtagcatctttatgaccattcttttatactcaaa

SEQ ID NO: 877801 - DNA, 604 bp, Homo sapiens
aatagccctgcatatattattatatacctgcaaatctacccataggttctattccttgaatgaggatttctaggtcaaaaaattgtatgatggcatcttggaaaaatataactataaataaatgatttacagataatcaattacttaattactatatcaacccctagaattttagctctgtaactttgtcttctttgataaaatgtagtgctactccagtgtgtagcatcatataattattgctgttattgaataagtgaacttgatggaccttataaaatgccatattgtacatatatatgtatatatacatatacatgtatgtaatattttgaatatatattttaatgttctacattttaaatgtggaaaccttactgcaatataattccctttaccctttccaatttatgctatagttttcttatatattacatctatattatatagaaaatyctgtcagacatacatatataataaatattgcttaaatatttacagttgcttttccttccttctttatatttttgtgtactaggtttccttctggtattacttatcttctgtctgaagaatttactttattctctagcaataatttcat

SEQ ID NO: 877802 - DNA, 591 bp, Homo sapiens
ttgtgaactgcgcatacagggatccagcttgcagtgcttcttatgagaatctaactaatgcttgatgatctgaggcagaacagtttcatcctgaaaccaccccctcactcgcagcccccagtctgtggaaaaattgtcttccacgaaaccagcccctggtgccaacaaggttggggactgctgctgaaaagagaggacaaggaaatctacaaatatctacaacagccaagcatttatttatctttttttcctttttttgagacggagtctcgctctgtctcccaggctggagtgcagtggcatggtctcagctcacagcaatctctgcttcctgggttctagcaattctcctgactcagcctcctgagtaagtgggactacaggcaygagccaccacacctggctaattttgtatttttagtagagacagggtttcatcatgttggccaggctgttctcaaactctgacctcaagtgatccacccacctcagcctcccaaagtgctgggattacaggcgtgagccaccatgcctggccaatttatctaaatttgcccctattagtttacactcttaagatgtgggatagtg

SEQ ID NO: 877803 - DNA, 599 bp, Homo sapiens
gtcttatctaaaagtagaatcaaacaaaataataataataatttcattcatagcaagcagccaacttggttctttcttgactcttttgccttcatggaaaaattggaaggatattaggaaaagaggttttttttttttaacttaaggatttttttaaaaatttacccttaaatgttattgttcatttgtgccaaagtgtctcaagctcaaatacatcgatctctaaagtgatataattatttgttgtagggggctgttctgtacattgtagaatgtttctggtctcyaactgctagatatcggtagcacctcctcccactcacacctgcctcccaaattgtgacaaccaaaaatgtctccagatgttgccaaatgcctccccattgagaactactaaatgcaagagcttggctcaaggagtcctgtttcacataagtatgttctacagcaaagtaatatagctgtcaaaataggaaatggaggcagtgaagcccatcagcaccattgcctataggtaggcactgagtggacagttttgcttacagtccagcaatgatggggccagaggtcctaccaccactgcaatggcccctttggaa

SEQ ID NO: 877804 - DNA, 635 bp, Homo sapiens
atggactgcttgaggccaggagttcaagaccagcctggccgacatggcaaaacttcatctctactaaaaataaaaaaattagctgggcatggtagtacacgcctgtagtcccctgctcaggatgctgaggcaggagaatcacttgaasccaggaatcggaggttgcagtgagctgagattgcactactgcactccagctccagcctgggcaacaaaatgagactctgcctcaaacaaacaaacaacaacaacaacaaaaattagacggtctgataacccagtgtaaaaataaataaagaaataaaatatttttttaaaaagactttttaccaaaaattaacattaaatcattcaaacagcaaacctaaaactatttcaatgaaaattataaaccagtcagcaggaatgcctgctattaccattgcctcaaaggaactaacaaacaaaatgttaatttttaaaaaatgtataaggaagagttaagttattttatcattactttttttgaccaataatgtgattgtgtgacagtaaagaggtgcacagaaacttccaggattaataagaagtgcataggtggctgttagaacgttaagtatggtatacaaaaataaataggttttctctatcttagg

SEQ ID NO: 877805 - DNA, 637 bp, Homo sapiens
cacagccaatgtcatactgaatgggcaaaaactggaagcattccctttgaaagaggcacaagacaaggatgccctctctcaccactcctgttcaacgtagtattggaagttctggccagggtaatcaggcaagagataaagtgtattcaaataggaagagaggaaatcaacttgcctctgtttgcagatgacatgctgttaagcaacttcagcaaagtctgaggatacaaaatcaatgtgcaaaaatcacaagcattcctgtaagccaataatagacaaacagagagccaaatcacgagtgaactcccattcacaattgctacaaagagaataaaatacctaggaatacaacttacaagggatgtgaaggacctcttccaggagagctaaaatcactgctcaacgaaatgagaggacccaaacaaatggaaaaacattccatkctcatggataggaagaatcaatatcgtgaacacagccatactgcccaaagtaatttatagattcaatgctatccccatcaagctaccattgactttcttcacagaattggaaaaaactactttaaatttcatatggaaccaaaaaagagtctgcatagccaagactaacctaatcaaaaagaacaaagctggag

SEQ ID NO: 877806 - DNA, 597 bp, Homo sapiens
tctttagcacacaataagataatatttttgtcacatagtgttaaatgtgcattaatcatgaggcagctcaccttcctcataaatcacacatgaaaaatgacaggtgatattctcattttagtggtattatctttattaaaagccacataatgccttggtaataagaaaatttattctggaataaattaaaacatttctatgcactctgaaaattaatttccttttgtttcaattcatattcayaccccgatcattccagtctagatgtataagcttgacttattctggtcaccattaagaatatcctcaaggagaccaattttggttcctctggaagaataatataaatttagatttctgggaatggtgtgaacagaccctggagaataagatgctgaaggtttagttttacaacataatagaaaaaagaaaacttattttcttgtcatacctaagtaccagttgcctgggctacgtcacagaatggtaaagcagtcaataaaattaaatattgtatgatactttttatactttgcaaagtgttttaatgctaataatctcaatgagaaaaaatatagagatacacattaactgaat

SEQ ID NO: 877807 - DNA, 681 bp, Homo sapiens
tttttgcttattcaactgtttaagttatttatagattctggatattagtcctttgttggatgaatagtttgtgaatattttcttccattttgtagattgtctgattatgatgttgatagtttcttttgttgtgcagaagtcctttagttcaattaggtcccagttgtcaatttttgtttttgttgcaattgcttttgaagacttaatcataaattcrttcccaaggttgatgcccagaatggcatttcctaagttttcttctaggattttacaatttgaggtcttaacatttaaatccttaatatatcttaagttaattttggtaggtatccatcccctcaagcatttatcatttatgttacaaacaatccaattatactatttcagttatttttaaatgtataataaaattggttgggtgcagtggctcacgcctgtaatcccagtactttaggaggtcgaggcgggaagatcacctgaggtcaggagttcaagaccagcctggccaacacggtgaaaccctgtttctactaaaaatacagaaattagccgggcatggtggcaggtgactgtaatcccagctactcaggaggctgaggtgggagaatttcttggacccaggaggcagaggttgcagtgagccaagatcgtgccattgcaccctagcctgggtgacaagag

SEQ ID NO: 877808 - DNA, 681 bp, Homo sapiens
tttttgcttattcaactgtttaagttatttatagattctggatattagtcctttgttggatgaatagtttgtgaatattttcttccattttgtagattgtctgattatgatgttgatagtttcttttgttgtgcagaagtcctttagttcaattaggtcccagttgtcaatttttgtttttgttgcaattgcttttgaagacttaatcataaattcattcccaaggttgatgcccagaatggcatttcctaagttttcttctaggattttacaatttgaggtcttaacatttaaatccttaatayatcttaagttaattttggtaggtatccatcccctcaagcatttatcatttatgttacaaacaatccaattatactatttcagttatttttaaatgtataataaaattggttgggtgcagtggctcacgcctgtaatcccagtactttaggaggtcgaggcgggaagatcacctgaggtcaggagttcaagaccagcctggccaacacggtgaaaccctgtttctactaaaaatacagaaattagccgggcatggtggcaggtgactgtaatcccagctactcaggaggctgaggtgggagaatttcttggacccaggaggcagaggttgcagtgagccaagatcgtgccattgcaccctagcctgggtgacaagag

SEQ ID NO: 877809 - DNA, 681 bp, Homo sapiens
tttttgcttattcaactgtttaagttatttatagattctggatattagtcctttgttggatgaatagtttgtgaatattttcttccattttgtagattgtctgattatgatgttgatagtttcttttgttgtgcagaagtcctttagttcaattaggtcccagttgtcaatttttgtttttgttgcaattgcttttgaagacttaatcataaattcattcccaaggttgatgcccagaatggcatttcctaagttttcttctaggattttacaatttgaggtcttaacatttaaatccttaatatatcttaagttaattttggtaggtatccatcccctcaagcatttatcatttatgttacaaacaatccaattatactatttcagttatttttaaatgtataataaaattggttgggtgcagtggctcacgcctgtaatcccagtactttaggaggtcgaggcrggaagatcacctgaggtcaggagttcaagaccagcctggccaacacggtgaaaccctgtttctactaaaaatacagaaattagccgggcatggtggcaggtgactgtaatcccagctactcaggaggctgaggtgggagaatttcttggacccaggaggcagaggttgcagtgagccaagatcgtgccattgcaccctagcctgggtgacaagag

SEQ ID NO: 877810 - DNA, 622 bp, Homo sapiens
acctgaaagtgacagggagaatggaaccaagttagaaaacactcttcaggatattatccaggagaacttccccaacctggcaaggcaggccaacatttgaattcaggaaatacacagaatcccacaaagatactcctcaagaagagcaaccccaagacacataactgtcagattyacaaaggttgaattgaaggaaaaaatgttaaaggcagccagagagaaaggccaggtcacctacaaagggaaacccattagactaacagtggatctctcggcagaaaccctacaagccagaagagagtgagggccaatattcaacattattaaagaagagaattttcaacccagaatttcatatccagccaaactaagcttcataagtgaaggagaaataacatcctttacaaagaagcaaatgctgagatattttgtcaccaccaggcctgccttacaagagctcctgaaggaagcactaaatgtggaaaggaacaattggtaccagccactgcaaacacatgccaaattgtaaagaccatcaatgctatgaagaaactgcattaattaacaggtgaaataaccagctaacgtcataatgacaggaccaaattaatacataacaata

SEQ ID NO: 877811 - DNA, 622 bp, Homo sapiens
acctgaaagtgacagggagaatggaaccaagttagaaaacactcttcaggatattatccaggagaacttccccaacctggcaaggcaggccaacatttgaattcaggaaatacacagaatcccacaaagatactcctcaagaagagcaaccccaagacacataactgtcagatttacaaaggttgaattgaaggaaaaaatgttaaaggcagccagagagaaaggccaggtcacctacaaagggaaacccattagactaacagtggatctctcggcagaaaccctacaagccagaagagagtgagggccaatattcaacattattaaagaagagaattttcaacccagaatttcatatccagccaaactaagcttcataagtgaaggagaaataacatcctttacaaagaagcaaatgctgagatattttgtcaccaccaggcctgccttacaagagctcctgaaggargcactaaatgtggaaaggaacaattggtaccagccactgcaaacacatgccaaattgtaaagaccatcaatgctatgaagaaactgcattaattaacaggtgaaataaccagctaacgtcataatgacaggaccaaattaatacataacaata

SEQ ID NO: 877812 - DNA, 622 bp, Homo sapiens
acctgaaagtgacagggagaatggaaccaagttagaaaacactcttcaggatattatccaggagaacttccccaacctggcaaggcaggccaacatttgaattcaggaaatacacagaatcccacaaagatactcctcaagaagagcaaccccaagacacataactgtcagatttacaaaggttgaattgaaggaaaaaatgttaaaggcagccagagagaaaggccaggtcacctacaaagggaaacccattagactaacagtggatctctcggcagaaaccctacaagccagaagagagtgagggccaatattcaacattattaaagaagagaattttcaacccagaatttcatatccagccaaactaagcttcataagtgaaggagaaataacatcctttacaaagaagcaaatgctgagatattttgtcaccaccaggcctgccttacaagagctcctgaaggaagcactaaaygtggaaaggaacaattggtaccagccactgcaaacacatgccaaattgtaaagaccatcaatgctatgaagaaactgcattaattaacaggtgaaataaccagctaacgtcataatgacaggaccaaattaatacataacaata

SEQ ID NO: 877813 - DNA, 561 bp, Homo sapiens; identical to SEQ ID NO: 876217

SEQ ID NO: 877814 - DNA, 657 bp, Homo sapiens
atcacaaagaagtttctgagaatgcttctgtttagctttcctgtgaagattctcccgtttccaacgaaatcttcaaaataggtccaaatatccacttgcagattccacagaaagagtgattggaaactgctctttgaaaaggaaccttcaactctgtgagttgaatgcaawcatcacaaagaagtttctgacaatgcttctctccagtttttatgtgaccataattcgttttccaccacaggcctgaaagcgctccaaatgtccacttgtagacactacgaaaagcatgtttcagaactactctatgaaaagcaatgtgaaactctgggagttgaacacaaacatcacagagaagtttctgagaatgcttctgtttagtttttatgtgaagatattcccgtttccaaagacatcttcggagaggtccacgtatccacttgcagattccacaaaaagagagtttcaacactgctctatccataggagggttcaactctgtgagttgaatgcaatcatcacagagaagtttctgagaaggcttctgtctagattttatgcgaagatatacccgtttcgaacgaaggccacagagtggtccaaatatccacttgcagatcctacaaaaagagtgtttcaaacctgaactatcaaaggaag

SEQ ID NO: 877815 - DNA, 622 bp, Homo sapiens
tgtgaaactctgggagttgaacacaaacatcacagagaagtttctgagaatgcttctgtttagtttttatgtgaagatattcccgtttccaaagacatcttcggagaggtccacgtatccacttgcagattccacaaaaagagagtttcaacactgctctatccataggagggttcaactctgtgagttgaatgcaatcatcacagagaagtttctgagaaggcttctgtctagattttatgcgargatatacccgtttcgaacgaaggccacagagtggtccaaatatccacttgcagatcctacaaaaagagtgtttcaaacctgaactatcaaaggaaggttcaactctgggatttgaatgcaaacatcaccaagaagtttctgagaatgcttccgtttagttaggtgcagttatcccgtttccaacgaaatcctcagagaggtccaaatatccacttgtagattctacaaaaagtgtgtctcaaacctgctccatccaaaggaatgttcagctctgtgagttaaactcaatcatcacaaagtattttctgagaatgcttctgtctagtttttctatgaagctattccctttactaccataggcctcaaagcgctccaa

SEQ ID NO: 877816 - DNA, 632 bp, Homo sapiens
aaaatacattaagaggaagtgggtttacaaggaagtattcggtttttgttgtgttgtgtttatagtactatggtgcatccaagaggaaataattcataatttaatttaacattagaatagaaccctaaattggccaaagaaagaagagacctctacctccacagctgagggtcagaccttgctaaagggagcgtagctgtggcttactgaataatcaagttcactgtggtgcaccaaaccaaggatgaaggtctgaaaccaccagtggtggtgccaatggaattcagcagaaagactgccagtggtgcgtggtgctggagttgctgggaagctgtatgtgggkatgtcactgaaactggctgagagtggcatcctttgggactcccctacacagcttagagttgcaagagcaaaaaggaaggaaaacaccagaaccagaaatagaagccccttcctactgcagcagccctcctgtgctctctgttgttaaagcttagtatcatcccagttggcaaaggagaaatgtttatgagatctagtgtcagtattacaagaggggcaatgaagggtggatttagaactgagaggcgataaattgataattagcacaacagaaaataaatttatgtaaa

SEQ ID NO: 877817 - DNA, 703 bp, Homo sapiens
cttctatagctttataacaaatagaacactacattttgatttctgtacagaccaggtaaatgaaaataaaagcctttatttttatttattcatttagtaattttctaaatgcagaacaaaaacctagattttcattccctaaatgattcattattaaattgagtttgaaatctgcaacacaaagctctcaaatattccagtgctctatagagagggctccagcaagctgcacaatgttgcttagtctttttgtttggttgaagtgtaagtgcaaagctgttgaccttcatgttttataaaycatctgggtcttctcaaggaaaggcacttgattattattattattaatttgtgaggtaaactttctgaaaacctgttgctttctctatcataagtcctttcttcaaaaacatattctgtctttaaaacctataaaatattgtcaactgatttaaagttaagaaagaattttttttttcctaaagatatctcactgaagaaaaatgtgaggggaaatgagtcttccagtcaacctttggtcatatacctcagacatctgtttctcataagctaaacctccatatttcacatatcctgactccattaagttattatctaagaaaaaaatataggttttttagaataaaatacattgaggtaataacaactagtggttaaaaccatgggctttagagttaaacag

SEQ ID NO: 877818 - DNA, 617 bp, Homo sapiens
ggccatcatggggactttcctcattgggtaattggagcttcctcatggtctaggactggtttctcagagttagcatcttcagacagataataagagaagctaaggcagaaactcttttgatctagatgggaagtcacatagcatctttttcaccatactctgttggttgaagcagtcaggagctcctgtgcgggctcaagagaggaacagtcacatcataaaatatcaagtgagatgggatatatatcggaatatacaatatgcctcagaaggaatatacaaaagttcatttctgtgttacactgaagccaatagaaggcagagcggtgatttacatactctgctaaatgtgatcaatattctcttttacactaaaaatatagttaaaaatatatctttatccagagtagtggcaaacaaatagatataytagtttacataaatgcaaatagcattagaactaacaatctttataaatctgccttaaataatctaaaactacatccaatattttacagtaggactctcattctttaggaagaaaaatctgattttacacataatgactgatcttcacatccgaggaccaagctgagaatggcactgtgtgggcaatg

SEQ ID NO: 877819 - DNA, 633 bp, Homo sapiens
cgtgagaagcacaatagtggggagtgcctggagaatgagctgaacaggaatgacataggaatgtaggcctcagctggccatcaggaacatagggcagggctcctttcccctgccagcctcagcttcaggcaccaatgcctaggatagaagcgggctagaccctcacaccaataccctcacggagataactaggaagctgctgttggatattattatcactagagtctagagaagtctagagatctctccaggcattgcagtcctttgatgaaaacagcaaaatccaatgtctgcctccagggagggttgaggcagctaaaaatgggacattcattgcaaatattgagtctacaaatactacaaatcctttcacatcctgcktaaagcacatttccttagtgaaacttccagtcaccccaacggaagtaaatcactcttcctttttggctttctcagcatttggtctgtgtctttagtagtttgtcttgtgtattgtgcatcatttcgccaactgaactataagcttcttgaagtcaggaatcctgtctgatccattgatatattcccacagtaattatcaaagtgctttgtatgtgacaggtgcaaaatacatatggaattaaaaaccaaatt

SEQ ID NO: 877820 - DNA, 590 bp, Homo sapiens
aataggcttacatagtaacttttatccatcaacttacctatcgatgcttaacagaaaagcagcccccttttacctagcccattttaacatttaaaaaaaaaatacccatagtagacatattctttaaaagacaaaagcccaataaaacgtcaaacccttctgtacatagttgtaacaggttttcattttatggatgtgctcttgtcagtttgttaaaataggggaatcagctagtagctgttctaatgaacaccataattcaataacttacaaacttttttcacctcaggcacaaattcttgtttcgagaaggcacaggttttaaagctcaagtgatcctcctgaagttacagatgcacaacatttaaaacaatgttgaaattcttytaggtatttaactccagttagcataaagcttttttttttttttttgaatcttcagctaaaccgggaaccattagtcaagacttcctgttacactggctataaagcatctcaacaggtggattccagaaaaggtcacagcactgtgaaaagaaaagagaaataattttcttcctttcctcagatataacatctgaattcatcaa

SEQ ID NO: 877821 - DNA, 636 bp, Homo sapiens
aaccatatcaatatctttattaaaatagctgaatcaggccattactagtaattactaatcctgtaagatgatataatatgaaagtagaaaaaaatgcaaaattcccggacccttcttttttttttttttccagacagggtcttgctctgtcacccaggctggggtgcagtggtgtgatcacagctcaccgcaggcttgaactcctgggctcgtgtaatcctcctgcctcagcctcctaaatagctgggggacctacaggcacatgccaccatgctcggctaattttttaaagtaattttttktagagatagggtctcaatgtagcccagattggtcttgaagtcctggactcaagcgaccctcctgccttggactctcaaactgctggaattacaggtgtgagccaccatgctcagccagcacactgggcccttcttactaatcctcagctacaatgcaaaattcttggttcttctctcctttcactttagagcttcagagaacatgcttcggttctttgagctcaccgatttaattctgtgttgaaataatgatgtttatctgcaacatagctctgaatttgtaattgaaatctctggtgctatagcctccttatagccctgtccctagcttgat

SEQ ID NO: 877822 - DNA, 637 bp, Homo sapiens
actttcagctttataggaaagatttctgtgggctctgccctgtgctactgtgagccacttgggggcagatctgtcctgatccttctagatcttcccacagaaacgggtacagagcgctgcccatagcagagatttatgcatgtgcattgaaagaggaaaaaaaaaatcagaatgaccagggtagtgtgatggatgctctaagggtagccaaataaaaatgataggaagctagaaaggaaacccaagagtgggtcagaaggaatagcagacaatgttaaaatgttttaaggctgattttatgtggcattggtagagattagcctgctcaccacagccagtttcactgtaaatcatgtaacagaccttgtagaaatgccaagatagtagacgtctgcttaaaacgcagagctctgagaaacgctcgacttcaaacattgtttactttcttcattaggaactaaagagaagcaagtacaaggcagcgggtagcaattacctaayatctttgccgaaagagagatttttcaaaatgtgcttttctcactaatccttgaggggaaatgaggtttatttatggtgtcagaagagaacaaggcattaatagtaaaagattttatatgacttcatgtttttagga

SEQ ID NO: 877823 - DNA, 595 bp, Homo sapiens
cctttgcccactttttaatggagttgtttgtttttttttcttgtaaatttgtttaagttctttgtagaggctgaatattaggtctttgtcagatggatagattgcaaaaattttctcccattctgtagatcatctgttcactgtgatgatagtttcttttactgtgcagaagctctttagtttaattagatctcatttgtgaatttttgcttttgttgcaattgctttttgcatctttgccatgaaatctttgyctgtgcctatgtcctgaatggtcctgcctagattttcttctcgggttttgatagttttgggtttttcatttaagtctttaatccatcttgagttgatttttgtataaggtgtaaggaaggggtccagtttcaattttcgtcatatggccagccagttctcccagcaccatttattgaatagggaatcctttccccattgcttatttttgtcaggtttgtcaaagaccaagatggttataggtgtgcagtcttatttctgggttctttattctgttctgttggtctgtatgtctgttcttgtacaagtaccatgctgtttgggttactgtagccttgtagta

SEQ ID NO: 877824 - DNA, 637 bp, Homo sapiens
ctagttagactaataaagaagaaaaagatccaaataaacacaattagaaaaaacaaaggggatattaccactgactccacagaaatacaaataaacatcagagaatattacaaacatctctatgtacataagctagaaaatataaaaaaamaaatgcattcttggacacatacaccctccaaaccctgagccaggaagaatttgcatttgtgaaaggaccaataatgagctccaaaattgaatcagtaataaatagcctaccagccgaaataagcccaggacaaaacaaattcatagctgaattctaccagatgtgcaaacaagagcttatatcatttctgctggaactattccaaaatattgaggaggaactcctccctaactcattctgtgaggccagcatcatcctgataacaaaacctgacacagacccaacaaaaaaagaaaacttcaggccaatatccttgatgaatgtcaatgcaaaaatcctcaaaaaaatactggcaaactgaatccagcaacacatcaaaaagcttatctaccacaatcaagttggctttacccttgggatgcaaggttggttcaacataggcaaaccaaaaactgtgattcattacgtaaacagaactaaagacaa

SEQ ID NO: 877825 - DNA, 580 bp, Homo sapiens
tgcttttccatttgtttgtatcctctctgatttccttgagcagtggtttgtagttctccttgaagaggtccttcacttcccttgttagctgtattcctaggtattttatttgctttgtagcaattgtgaatgggagttcattcatgatttggctctctgtctgttgttatatagaaatgtttgtgactcttgcatattgatttcctgtcctgagattttgctgaagtttcttatcagcttaaggagatttgaagctgasacaacggggttttctagatataggatcatatcatctgcaaacagagacaatttgacttcctctcttcctatttgaataccctctacttctttctcttgcctgatttccctggccagaatttccaatactatgttgaatgggagtggtgggagagggcattcttgtcttgtgctggttttcatggggaatgtttccagcttttgcccattcagtatgatattggctgtgggtctgccataaatggctcttattattttgaggtatgtcccatcaatacctagtttattgagagtttttaacatgaagggatgtttaatttta

SEQ ID NO: 877826 - DNA, 629 bp, Homo sapiens
gacagcttgcaccatgcacctggaaaagccacagacactcaatgctaacccatgaaagcagctgggaggaaggctgtgctctgcaaagccagaggagtggagctgcccaataccatgggaacccacctcttccatcagcatgacctggatgtgagacatgaagtcaaaggagatcatttgggagctttaagatttgactcccctgctggattycagacttacatggggcctgtagcccctctgttttggccaatttctcccattatgaatgggtgtattttcccaatagctgtacccccattgtatctaggaagtaactagcttgcttttgattttacaggcttataggcgaaaggaacttgccttgtctcagatgagactttgtgaactgtggacttctgagttaatgctgaaatgggttgactttgggggaccgttgggaagggatgattgattttgaaatgtgaagacatgagatttgggaagggccaggggcagaatgatatggtttggttttgtgtccccacccaaatttcatcttatagctcccataattcccacatgttgtaggagggacccggtgggaaataactgaatcatgggagcaggtctctcccttgctgttctgg

SEQ ID NO: 877827 - DNA, 629 bp, Homo sapiens
gacagcttgcaccatgcacctggaaaagccacagacactcaatgctaacccatgaaagcagctgggaggaaggctgtgctctgcaaagccagaggagtggagctgcccaataccatgggaacccacctcttccatcagcatgacctggatgtgagacatgaagtcaaaggagatcatttgggagctttaagatttgactcccctgctggatttcagacttacatggggcctgtagcccctytgttttggccaatttctcccattatgaatgggtgtattttcccaatagctgtacccccattgtatctaggaagtaactagcttgcttttgattttacaggcttataggcgaaaggaacttgccttgtctcagatgagactttgtgaactgtggacttctgagttaatgctgaaatgggttgactttgggggaccgttgggaagggatgattgattttgaaatgtgaagacatgagatttgggaagggccaggggcagaatgatatggtttggttttgtgtccccacccaaatttcatcttatagctcccataattcccacatgttgtaggagggacccggtgggaaataactgaatcatgggagcaggtctctcccttgctgttctgg

SEQ ID NO: 877828 - DNA, 621 bp, Homo sapiens
ctattctaagtattttatgcttataaatgaatgtaattattttatgaatgtaatgaggctggagaactcttgtctccatattatagagaaagaaactgaagtccagtgatgttagctgacttaaacacagatattaaatgacaaagctaggcttgtctagctacagttcccacagtttaaatcattacaatatacgtagtttctactctcaaggaacttaccttcttttgggaaagcaaaaggaaaacatggttggttttaacaaatmaagcaatcaaaagccagatgatataacactacagaaaaagtaatggcctggcactgtgggtcacgcctgtaatcccaacactttgggaggccaaggtggttggatcacctgagatcaggagttcgagatgagcctggccaacatggtgaaatcccgtctctactaaaaatacaaaaatttgctgggcatggtggcgggcacctgtaatcccagctacttgggaggctgaggcaggagaatggcttaaaccctggaggcggaggttgcagtgagccgagatcatgccactatactccagcctgggcaaccaagcaaggtcgagcaagactccatatctacagattcaaaagaaa

SEQ ID NO: 877829 - DNA, 568 bp, Homo sapiens
gaaataccatatgacctagcaaccccattactgggtatatacccaaagaaatataaatcattttattttaaagatacatgcacgtgtatgttcattgtagcactattcacaataaccaagacatggaatcaacccaaatgcccatcaacaatagactggataaagaaaatgttgtacatatatcccatggaatactatgcaaccataaaaaggaatgaggtcatgtcctttgcagggacatggatgaagctggaagccatcatcctcagcaaactaacacaggaacagaaaaccaaacaccacatgttctcactcataagtgggagctgaacaatgagaacayacagacacatggtggggagcaacacatactggggcctgtcgggggtaaggggaaaggaaggcataaggaagaatgctaatggatgctgggcttaatatctaggtgatgggttgataggtgcagcaaaccaccatggcacacatttacctatgtaacaaacctgtacaacctgcacatgtaacctggatcttaaaataaaagttggaaattaaaaaagtacaaaaa

SEQ ID NO: 877830 - DNA, 622 bp, Homo sapiens
aactcattcaattacaggtttacaggtgagtacaaatgctcaacaccattgccttgaataagacaaattttaaatgaaatctgagcttcagagctcaccattgagtcagctgagcctcctgcgttttttctatagttcaatttctttttctgtctaaccttacttctytcacacctttacaggtatttttttcacaagagcactgcctagcaaggtccatgaatgcaaatttctgcctcaaagtctgtttcccaaggaatctaacctatagggttgataacaatgttgatcctagaaagcagaatttaaaatgggattttagaaatgcactattcactgggctcctggcaatgaggaccctaattaaaagtagcagatagaatactaatagctgtgacatggcatagaagtgcaattgttaaaacgtacactggtgattaactggtctggaatactagtcaaaatgaatgcatttggtgggcacactatctgaagtatttgagacatatggaaaaataataagtactatggaattggatggggttaaccatgcattgaagaaaaacactgaaaggtttacagtgattaatcaccaatttaaggtgacatgtttggaagtata

SEQ ID NO: 877831 - DNA, 565 bp, Homo sapiens
aaacaaacaaaaaacaaaacaaacaaaaaaacaaaaaacaaataatctgatttaagaattggcaagaacctggttagacacttcttaaaataagatatacaaatggtcaacaggtatataaaaatgctcaacatcactaaccatcaggaaaatacaaatcatagccataatgagatactacctcactccagttagaatagcgatctcaraaagttaaaagataacaagtgttggtaaggatgtggagaaaagggaacccttacacacttctggtggggatatagattagtacagtcattatagaaagcattacagagtttcctcaaaaaattaaaatgttaacaaaactaccatatgatccagcaattccactactgggtatgtattcaaatgcgatgaagtcactatgtcaaagagatatctgcacttctgttacaggacagatgagcccccaaattgggacttagcccaggaaaaattttggctttactcaggaaagaattcaagagccagcagtgggagaagaaagcaggtttattgaggtgacagtgttacagccccatga

SEQ ID NO: 877832 - DNA, 612 bp, Homo sapiens
cattgccacatggcacttactctaaaattgatcacataattggaagtgaaacactcctcaggaaatgcaaaagaacagaaatcataacaaacagtctctcagaccacagtggaatcaaataagaactcaagaataaaaaattcattcaaaaccacataactacatggaaattgaacaaccttctcctgaatgactcttgggtaaataatgaaattaattcagaaatcaagttctttgaaactaatgagaacaaagagacaacataccagaatctctgggatgcagctaaagcagtgttaagagggaaatttatagcactaaaatgctcacatcaaagaactagaaagatttcaagttaacaacctaacaacttaactaaaagagctagagaaccaagagcaaacaaactccaaagctagcagaaggcaaaaaataaccaagatcacagctgaactgaaggagatacactaraaacccttcaaaaaatcaatgaatccatgaacttgttttttggaaaagttaataaaatagatagactgctagatagactaataaagaagaaaagagagaagaattaaataaatacaataaaaaatgataagggggatatca

SEQ ID NO: 877833 - DNA, 629 bp, Homo sapiens
atatgatgaccctaaaaatgttcataaagaaaaacaattgaaccagatgatgtctcaaaattcttatttatagatgaagaagaatcatctaatggttaacactgatgccaatgagctaacaagaggcaatctaacagatgagatgctaactgtagcaaacagaataaatctagaagctgggagacaaatgaagaggatgccaccatgtgcacacaacmgaagtgatttttttcccacaacaatgaaattatatcccaaaattgtgcagtgcaaatgatgactaaactaacaccttacaaaatctgtgaatcattacatgtgaatcacaaaacaagaatggaaagtagatgactcttgctgttaaaataactttggtgtcttaaatattgctaccttaagcatagtattttttaaagtgcactattaatgtttagctttatttaacggtatttaaccagacacatacctgttagaaacacatttagctctattttttttttcattgagttcacagaaaaagcatcactctactctcttagctacaaaatgaagctggacatgcttctgactttcccattttctgctaagagtatatggtcagtgacacagatatcagcaatatcagaatg

SEQ ID NO: 877834 - DNA, 558 bp, Homo sapiens
gagtttaagagtggtggcctgcagataggccatgtagcttcatctttcatcttagaattctctagcctaaaaattctgtttgaattttagtggctcataagataatgtctaaacacctgagtttgatctccactggtcttatggctgggcttacatgttcagtcttacttcctgtcactcttgctgtcacattccaaatctcagacattgttcaactaccacagttctctgactataacttgcttcttccagcccctctgctttttcctctgccaaaaagaaaaaatgcycttctcttactcagaaaataaatatttaaactacatgcctcattatatacatattcttctttggaagagtatcctgcttatggactatcctagcaggctatacatttttctatttagttcccatcatattgtactgctatacaattatctaattatttgaatgcattctgtaagagttcatgactccacaaaggtgggaaccataatcttcactaatttcagttgttgagtatacaagacctgtgtatagcacatagcagttactaaa

SEQ ID NO: 877835 - DNA, 558 bp, Homo sapiens
gagtttaagagtggtggcctgcagataggccatgtagcttcatctttcatcttagaattctctagcctaaaaattctgtttgaattttagtggctcataagataatgtctaaacacctgagtttgatctccactggtcttatggctgggcttacatgttcagtcttacttcctgtcactcttgctgtcacattccaaatctcagacattgttcaactaccacagttctctgactataacttgcttcttccagcccctctgctttttcctctgccaaaaagaaaaaatgctcttctcttactcagaaaataaatatttaaactacatgcctcattatatacatattcttctttggaaragtatcctgcttatggactatcctagcaggctatacatttttctatttagttcccatcatattgtactgctatacaattatctaattatttgaatgcattctgtaagagttcatgactccacaaaggtgggaaccataatcttcactaatttcagttgttgagtatacaagacctgtgtatagcacatagcagttactaaa

SEQ ID NO: 877836 - DNA, 558 bp, Homo sapiens
gagtttaagagtggtggcctgcagataggccatgtagcttcatctttcatcttagaattctctagcctaaaaattctgtttgaattttagtggctcataagataatgtctaaacacctgagtttgatctccactggtcttatggctgggcttacatgttcagtcttacttcctgtcactcttgctgtcacattccaaatctcagacattgttcaactaccacagttctctgactataacttgcttcttccagcccctctgctttttcctctgccaaaaagaaaaaatgctcttctcttactcagaaaataaatatttaaactacatgcctcattatatacatattcttctttggaagagtatcctgcttatggactatcctagcaggctatacatttttctatttagttcccatcayattgtactgctatacaattatctaattatttgaatgcattctgtaagagttcatgactccacaaaggtgggaaccataatcttcactaatttcagttgttgagtatacaagacctgtgtatagcacatagcagttactaaa

SEQ ID NO: 877837 - DNA, 660 bp, Homo sapiens
tatccatcacatcaaacatttatctttgtgttggggacattacaattcttctcttcaagctttctaaaaaatatgcaataaactattgttgacatagtttctttattgtactgttgaatactagaacttattacttctatctggctrtattcttgtacccctcaacctacttctcttcatctccctcctcacttctcccctgatttggtttgcctctgtgtccccacccaaatctgctcccataattcccatgtgttgtgggagggacccggtaggagataatttgaattatgggggtggttcctcccatactgttctcatagtgagcaagactcacaagatcggatggtttcatcaggggtttctgcttttgcatcttcctcattttctcttgctgccaccatgtaagaagtgccttttgcttcttgccatgattctgaggcctccccagccatatggaactgtaagtccaattaaacttctttttcttcccagtctcggatatgtctctatcagcagcatgcaaatgaactaatagagtaaattggtaccaatagaggagggctttgctgaaaagatacccaaaaatgtggaagcgactttggaactgggtaacaggcagaggttggaacagtttggagagcttagaagaagacagga

SEQ ID NO: 877838 - DNA, 647 bp, Homo sapiens
tgcactggattctgtaaataaagagaagctgttactgcacttgaaaaaggaaataagggcttccaggagttgttttgcttgcctaccttgttgtgtatcatgagtcgccttaatttctccatcagtttctttacctcttcacttgctgtgagcgccataatgccccttcactgggcaggcatgtgatactaaacatgacacaaacacaagcctgggagcctcagagtcctcatccctgggatgtcatccaggtggtctagcacaggctcccgacagtgttaaggttatcatagaaaatatggaaattctcatgtagaattcttaagactctgcctggacatctgcaaacccagtttgaggaacattctcctaacactatgttgttctatctgtttgcatttggctttcrtatgtccatctgcaaatctctccttgagccactttttgaatccgaatcatgaagtttttcattttcaggatctgcagagatagttgcaacaagggttacagctaaaattgtaacccttgtccctgctggcattaaatctctggggctggcagtgtcatctgttgaaaatgatcctgaggagaccactgaaaaaggtgagcagaagcagtgtctgtcctctccgctgctgggatctttt

SEQ ID NO: 877839 - DNA, 534 bp, Homo sapiens
tcctgacattcatccctactccaacagccaggcacctgatgcttgttagacgcttaaatctacatggaggtgaattaaaaggaatctgtttgaaggtaatgggaggctgtagtgacagcttggttatgatttctgtccaacagctcccagaaacacaactgataaatgcaaacccttgtcaaaaatgacagtgtctgctgagctatacgttccaagcaagtgtttctgaaatgtaattgtcgcagcagagttagaaatggaactcgaagtacttgcaagagagtccacctcagtcaagaactccttcctctgaaatgrcttggaaaaatcaatttgccttcctgtctgagatttcttggtcacttttcacggacataggtgtccttggtatgcagtagctcttccacaggtctttcaatatcagaatcaatcccaaagcctgggtctggctcccactcaggggttcgtgtcatatgaagagctctccagcaggccagagggcacaattcacccatgcgcctgccagccattgag

SEQ ID NO: 877840 - DNA, 606 bp, Homo sapiens
acagtggcattctctcatatagacaaattctactcatgaattcttttgacttttttctgattttcaataagaaaatgctgtggccccatggactatcgaagcctctaggggcagaaaaccctggattcaccctcgggctcgggctctggctcgggctctggctctggctctcctaggttgggagacaaagggaagctgcctgattcttatagcatcaatgccataatttcaaaaggaaattattggttttatctaaagagattgttgycatgaggatgtgaggtactatatgtagaaggactgcattgcacaacttcgctctctaatcttcagactatttgctcatattttgacatatttaattctggattcttcagcatgccaatttctcctgtctgaggctggatttttcatcttaaaaaaggtgatgaaagtcatgtatgtcatagtgattaatgtaaaaataaatccaaatcatgctatataaactatacagaagtgaaaacaagtgtcattgttatcagaatttgattattgatttatttttcacaatctcttcatgattacctagtcatcttctgaacctatataaaatagttacgaaga

SEQ ID NO: 877841 - DNA, 567 bp, Homo sapiens
acagaccaacatgcaaattcaggaaatacagagaacatcactaagatactgcacaagaagatcaaccccaagacacataatcatcagattgtccaaggtcaaaatgaaggaaaaaatgttaagggcagccagagggaaargccaggtcacctacaaagggaagcccatcaaactaccagtggagctttcagcagaaactctacaagtcagaaaagattgggagccaatattcaacattcttagagaaaagaatcttcaacccagaatttcatatccagataaactaagcttcataaatgaagaagaaataaaatcctttccagacaagcaaatgctgagggattttgttaccaccaggcctgccttgtaagagcttctgaaagaagcattaattatggaaagaaaaaaccagtaccagccactgcaaaaacacaccaaaatataaagaccaatgacactatgaagaaactgaatcaactggtgtgcaaaataacctgataacataatgacgacaggatcaaattcacacataacaatactaaccttaaatattaatgggctaaatgc

SEQ ID NO: 877842 - DNA, 655 bp, Homo sapiens
cttcaatagctatggcagagcgagttaatgtttttgcaccaaacgtcaaatgggtattacagaattctgtaatttataaaatattatatacatgaattattttcttgtattatcactcataagaaacatgtggggagaaattagagggtaactggattaactagacataagactttttgagtgacaggaaagatattttcctaactgtagaaactgagragtcatcagacaagtaataaaaccaaagctagttttctggaagatccgtgtagtttcactgtggtagttggagtaaatggaaaggatggtagagtggacgctgaacaagcagccttagagaaacttcataaaaatgtatacaaggccagcggtagaaaaaataagatacaggaagaacatgttgtaaaagaaaaacttatgtatcaagggagtcatgagatttaggatgactctaggcttattaaaagagaaataagaaagtcagaattaaaagctggtataaacagagtgttagtgataatcaaatcaaccagcactaccaacacctggctgtgctaagtgctttatctggcaatctttaccatagtcctacaaaacaacaacaatcacctccaactacagatgaggaaactgaacctcacagatgtcaataatt

SEQ ID NO: 877843 - DNA, 602 bp, Homo sapiens
ttcctgactttttgatgatcgccattctaactggcgtgagatggtatcttattgtggttttgatttgcatttctctagtaaccagtggtgatgagctttttttcatgtgtctgttggctgcataaatgtcttcttttgataagtgtctgttcatatcctttgcccactttttgatggggtcgtttgtttgtttcttgtaamtttgtttaagttctttgtagattctggatattagccctttgtcagatggatagattgcaaaaattttctcccattctatagcttgcctgttcactctgatgatagtttcttttgctgtgcagaagctctttagtttaattagatcccatttgtcaattttggcttttgttgccattgcttttggtattttaatcatagtctttgcccatgcctatgtcctgaatggtattgcctaggttttcttctagggtttttaggttttaggttttaaaaatgtttaagtctttaatacatcttgagttaatttttgtttaaggtgtaaggaagaggtccactttcagttttctgcatatggctagccagttttcccaacaccatttattacatagggaatcctttcc

SEQ ID NO: 877844 - DNA, 605 bp, Homo sapiens
actgtcaggggaaaaccacctactcaagcctcagtaatggccgatgcccctccccccaccaagctagagcatcccagttcaacttcagtctgctgtgctggcagcaagaatttcaagccagtggatcttagcttgctgggctccacggtggtgggatcctctgagctagaccacttggctccctggcttcagcctcctttccaggggagtgaatggttctgtctcagcagtgttccagttgccactggggtaaaaaaacaaaaaacaaaaaacaacaacaagaaaaacctcctacagctagttcagtgtctgcccaaaaggccacccagtttttgctttaaactcagggccctggtgatctaggcacccaagggaatctcctgttccgtgggttgcaaagaccatggtaaaagcgtagttttctggaccggatagaaacgtcccacacagcacagtccctcatggcttcycttggctaggggagggagttccctgaccccttgcacttctcaggtgaggtgacaccccaccctgcttctgcttgcccgctgtgggctgtacccaccgtctaaccagtcccgatgagatgaaccatgtacctcagt

SEQ ID NO: 877845 - DNA, 592 bp, Homo sapiens
ttctttccagcatctgttgtttcctgtctttttaatgatcaccattctaactggcgtgagatggtatttcattgtggttttgattggcatttatctacaacgaacttaaacttttttcatatgtttattggctgcataaatgtcttcttttgagaagtgtctgttcatctcctttgcccactttttgatggagtactttttttttcttttaaatttgtttgagttctttgtagattgtggatattagccctttgtcagatggatagattgcaaaacttttctcccattctgtaggttgcctgttcactctgatgatagtttcttttgctctgcagaagctctgtagttwaattagatctcatttgtctattttggcttttgttgtgtttgcttttggtgttttagtcatgaagcctttgcccatgcctatgtcctgaatggtattgcctaggttttcttctagggtttttatggttttaggtattacatttaagtctttaatccatcttgagttaatttttgtataaggtgtaaggaaggggtccagtttcagttttctgcacatggctagccagttttcccgacaccattt

SEQ ID NO: 877846 - DNA, 577 bp, Homo sapiens
agtaactcagttacattcaaattacccataagaaggcttcctgcatgccacagctacttcacccatgaccctcagtaaagccacttgcctagaggtccttattctgtttcctccctgcctgccacaaacgtttggcttttgggtgactttgcatggccctctgagcatgtggtgtctccttctctaggacctatgagtataataaatcctttaatttcttatgcctctccagatataatttccgtgaccatactggagtgaaccttaaagaccccacaaggggtatttcctcccccacttatgacacagccttaatgagaaataagcctgtaacagatagaaaaaagtatttgcaaaacatatatctgacaaagaacttgtacycagaacaaatatcttagtaatacaaaataaacatcttaatattttttaaacttttattttatatttaggggtacatgtgaatatttattatataggtaaatttgtgtcattggggtttgttgtacagattatttcatcacccaggtattaaacctagtacccaatagctatcttttctgctcctctcccttct

SEQ ID NO: 877847 - DNA, 543 bp, Homo sapiens
aataaagacaagagggaatatttaaataggcacaatcagaaatgagaaggggtattttaccacagaccccacagaaatgcaaacaaccatcagagaataatataaacatttttatgcacacgaactagaaaatctagaagaaatggatgtatttctggacacataaaccctcccaagactgaaccaggaagaaattgaatgcctgaacagaccaataatgagttctgaaattgaggcagtaataaataccctaccaacaaaaaaagcccagaaccagatggattcacagctgaattctaccagctgtgcaaagaagagctggtgccattcctaatgaaactattccaaaaaatcaaaawggagggactcctccctaactcattctatgaggccagcatcatcctaatttccaaacctgagcaagacacaacaaaaaaagaaaacttcaggctgatatccttgattaaaatgcatgcaaaaatcctcaatgaatactggaaaaattggaaaatgaaatccagcaccacatcaaaaagcctatcc

SEQ ID NO: 877848 - DNA, 599 bp, Homo sapiens
tgattgaagacccagatcaaaataaatcaatacaaatgctttggtttattttttcctccattttcacttaagtactagcctctaatacaatgaaaagcaggcacaaagcatattagaaaggaaataagacaaatggtctcggaagtaataggaaggactgcatgtgttgcatgccacttattttaaatttaccagagccttgctatagagccatgtgggaaggcatgaagatttgcatatagagacttcactggaggggattctttttattttttgttttggagatggaatctcactctgtcgcccaggctggagtgcagtggcacgatcttggctaactgcaacctccacatcccgggttcaagtgattctcctccctcagcctcccaagtggctgggattacaggcgatcaccmccacgcctggctaatttttgtatttttagtagagacatggtttcaccatgtcggccaggctggtcttgaactcctgatgtcaggtgacccacctgccttggcctcccaaagtgctgggattacaggtgtgagccactgcacccggcctcactggaggggattcttagaggaaatattgagaat

SEQ ID NO: 877849 - DNA, 669 bp, Homo sapiens
gacagccttggggctcaggcttgctgagaaatattagataagatattgtgtcagtctgagacagtgggggaatatattaattcattctcacactgctataaaattctacctgagagtgggtaatttataaagaaaggaggtttaattgactcagttttacatggcttgggaggcctcaggaaacttacaatcrtggtggaaggcaaaggggaaacaagcagcttcttcataaggtggtaggagagaaagagtgagctaggaagtgccacactttaaaaccatcagctcttgtgagaactcactcactgtcatgagaacagcatgggggaaactgcccctaagatccagtcacctccaaccaggtccctgcctcaacctgtggggattacaatttgagatgagatttgggtggagacacagagtcaaaccataacaaggaattaacagccaagtccactcagcagaagtggcgagatgatttaagacttgaaggacgagtttgcaggaagacaatgttggactgaagatgtggaaaatgaggaaataggcctcaggaagggcatggctgagcagcaggaatagcctgtgcaaaggcgtagagatgtggtgtgcccagggaagtagaagtgtctaaacatggcatagggagcatgtgggcaaataacaact

SEQ ID NO: 877850 - DNA, 570 bp, Homo sapiens
tatatgtaaaaggaaaaataaaaatgctgcatttattgagagattaaaaagacagacaaaagttttcctttccctttgaaactgatgaatttcgctgtaatcttcaaagtcaaagcaacagtaaaatctacatttgtcaatgaagatcagacttacttcatttctagcataagaagtaaagttgatttatagttcaaatgcacataamcctcacctcctgaatgtcttaatctcattacacatataattaagtgatttttcccctgactgcagaaataacaggacattgatcagttgtctagctgtataccagtgtgatttgtcattataaatacagtgaggctcacaagtgtggcgctttgacaagatgtttgactctgagtccttgttcgcgctcattactggcttgcttttgcccaagtttcagtgatttggatcctaagagaatacaccatgggcagtggctgaagcttttctaggctgtgcatgaaatcagacagtgccccagagttgacctccctgagctgataacccgcctttaggaatgtgatcaaagagaacatctctgag

SEQ ID NO: 877851 - DNA, 673 bp, Homo sapiens
tggtagaattcggctgtgaatccatctggtcctggactctttttggttggtaaactattgattattgccacaatttcagctcctgttattggtctattcagagattcaacttcttcgtggtttagtcttgggagagtgtatgtgtcgaggaatgtatccatttcttctagattttctagtttatttgcatagaggtgtttgtagtattctctgatggtagtttgtatttctgtgggatcagtggtgatatcccctttatcattttttattgtgtctatttgayacaagaaaaattttctacctctcctcacattaatacaaaaaaataaaatacaaggaaaactatcagttatatgcatttgcccacatgaaattaatatttcttataggtctctctatgcaaatttattcagaggcaaaaacaacccaacatttattatagatatttttagaaacatttctatgtagggactacttgatagcaggatgatgtaaaaacatttttgtagagcaagaatatcctatcatgtcccctgagtggcagaaggaatatgtcaatccaactcataaaaatattttgctatcttattaccttcatactgaataagttattcaactcatttgactttggtggagtacagagacttactttggttggtaaataaataaaaaa

SEQ ID NO: 877852 - DNA, 685 bp, Homo sapiens
ttgccgcacctattgacccatcctctaagtttcctccccttgcctcccaccccctaagaggcactggtgtgtgttgttcccctccctgtgtccatgtgttctcattgttcagctctcacttatgagtgaaaacatatgttaaaccaccttttcatgggattgtttggtttgttcttgctgatttgtttgagttccttgtatattctgtatattagtcctttctcagatccatagtttgtgaagattatctcccagtctgtgggttatctgtttactttgctgattatttcttttcttgtgcagaagctttttagtttaattaagtcccatctatttatctttgtttttgttgcatttgcctttgggttcttgttcatgaagtctttgcctaagccaatgtctagaagggtttttccaatgttatcttctagaatttttatggttttaggtttcagatttcagcctttgatccatgttgagttgattgttgtataaggtgaaagatgaggatccagtttcattctcctacatgyggctagccaattatcccagcaccatttgttaaataagctgtcctttccccgactttgtttttgtttgtattgttaaagataagttggctgttaagtatctggctttatttctggttctctattctgttccattggtttgtgtgcctattttt

SEQ ID NO: 877853 - DNA, 618 bp, Homo sapiens
ttaccctttggttagatcccctaaagcactcagcccatggtgtgacataaaccaagtaatgcctgcatgcaaacaaagctggcttcacaaagttgcagaatgtagtaggcacctggttaaggaaaattctacccacaaattattttgcccccaacgggcactttaacagggaacacattttttccccctttttacattaaatatctgaatgttggggaaggggagatgtttgttctaaagttaatcctaatggtaaagttaaaggtccaataatgtgtttatactgtaatggacagttttgctctttctcattgctgaactttatgcaagggcctggtgcttatttgggcacaactccagaggccttcattcttactgtcaccggagtgcatggccctgccaggtcgtgtataacctgtgctatacctgtatgtgtacctgtgtgtgtaggccactgargccctggtatttggtttagtttgtttcttgctttgctgctgcttggcttattgattctctaaaagaatacaagggagaaaagtcccagagagatgtttcagagtttcaggacagtagcaatgaagacagtattcatgcagaagtttacaaaagttagat

SEQ ID NO: 877854 - DNA, 621 bp, Homo sapiens
ggagcagggggtagaaggatccttcataatagcatcatatcatcaacaaaccaccaccaaattgttatacaaaagcttacaggtaaagtcacccagagggaaaacagccttccaaattatattatagtccttgaagggagattggctataaatccacaagagtaagtaaaggtgtttaacacctcaaaatccacacatttgtgttagttttgggaaagctaaatgcatcaactctgtatcacttccctagtggagaatggtgctttgttttaggtggtgtttygggagataaaatatagctttgaccatctaggactaggattctgcaccactgtgtggtcctttgcatttggaagaataatcactcaggattaagttcatttagaattatttgtttttagtcatccactaatacgacttcatcaggtttttatggcagaatatgaactccgggcagtctggccaggaatgcagcctgaattagatttcaccttcatctctatgaatttgataaggtcacattaatacttacaataagtaaactacatttgtttgtggataattcagatttggcagaaaatcttaaaaacattgtaagactccacaaacaaaaaatctctt

SEQ ID NO: 877855 - DNA, 611 bp, Homo sapiens
ggaaaagctgcagacactcagcgccagcccatgaaagcagccaggagggagactgtctcctgcaaatccacaggggcagagctgcccaagaccatgggaacccacctcttgcatcgtgacctggatgtgaggcacggagtcaaaggagatcattttggagytttgactgccctgctggattttggacttgcatgggccctgtatcccctgtattttgagcaatttatcccatttgaaatggctgtatttacccaatgccttacccccattgtatctgggaagcaactagcttgcttttgattttacaggctcataagtggaagagacttgcgttgtttcaaatgggactttggactgtggacttttggcttaatgctgaaatgagttaagactttgtggtgctgttgggaaggcctgattggtgttgaaatgtgagggcatgatatttggcagggtcaggggcagaatgatatgattctgctgtgtacccacccaaatctcaactttaattttatctcccagaattcccacgtgtggaagggacccagggggagagaattgaatcatgtgggccagtctttcctgtgctattctcatgatagtgaataagt

SEQ ID NO: 877856 - DNA, 585 bp, Homo sapiens
acagcttgcaacatgcacctggaaaagctgcagacactcagcgccagcccatgaaagcagccaggagggagactgtctcctgcaaatccacaggggcagagctgcccaagaccatgggaacccacctcttgcatcgtgacctggatgtgaggcacggagtcaaaggagatcattttggagctttgactgccctgctggattttggacttgcatgggccctgtatcccctgtattttgagcaatttatcccatttgaaatggctgtatttacccaatgccttacccccattgtatctgggaagcaactagcttgcttttgattttacaggctcataagtggaagagacttgcgttgtttcaaatgggactttggactgtggacttttggcttaatgctgaaatgagttaagactttgkggtgctgttgggaaggcctgattggtgttgaaatgtgagggcatgatatttggcagggtcaggggcagaatgatatgattctgctgtgtacccacccaaatctcaactttaattttatctcccagaattcccacgtgtggaagggacccagggggagagaattgaatc

SEQ ID NO: 877857 - DNA, 563 bp, Homo sapiens
aaagtcctctttcaagctcacttttatgattgttggcaggattccattacttgcaggctgttggactggaggcacagactggagttcagagaactcccatagtttcttgccattgatacaggagatagaaagtattcaggcagatagtaagggcaacagagtcatcggcaaaatttctcttgtaataaaaagcagcccccaaatcatttattttctaacaaagatcagcctgaaaaattcagcagcaaacatagataagcaagttggaagctttcatgggcgaatgccaacagctgtgtcaatagaaaagggctacctgggagccaggcatgttcaacgtgaaggctccatcttcccttttctttgtcaccacgtgtacagtaaagaggcaggcaacatggcrcctgccaggtagagaacccatttgcctaataaaaaaatagggtggagccacctgcatttttgaacattatgcaaattgcacacctggtccgaccaatctctcatgcactatgtaaatcaaacactgcctcctcaagctcatccataaaatcgtctgcatt

SEQ ID NO: 877858 - DNA, 634 bp, Homo sapiens
ctattcacaatagcaaagacttggaaccaatccaaatgtccatcaataatgatatactggattaagaaaatgtggcacatatataccatggattactatgtagccataaaaaaggatgagttcatgtcctttgtagggacatggatgaagctggaaatcatcattctcagaaaactattgcaaggacagaaaaccaaacactgcatgttcttactcataggtgggaactgaacagtgagaacacttggacacagggtggggaacatcacacaccagggcctgtcgtggggtggggggagaggggagggatggcattaggagatatacctaatgtaaatgatgagttgataggtgcagcacaccaacatggcacatgtatacatatgtaacaaacctgcatgttgtgcacatgtamcctaaaacttaaagtataattaaaaaaagatataaatacataaaagaaataaggtagatcttatatatatatatattatatatataatcatatatataatatatataatcttaaaaagaaaaatatgtatttttaaataattggcaaacagactgtatattttcaaggtgtgcaatgttgtgatttgatatacatattccttttgtttgttttttggaa

SEQ ID NO: 877859 - DNA, 661 bp, Homo sapiens
gcaatttaattgaacccaaagtggggattgtggaaagcccaacttgtagccagttagtcagaattttcagaggcccagacctgtgactgctaggagggagggggcagtcttgtaagactgagcccttgccctgtgstgtctgaggatatctccaggtagacagtgttagaactggattgagttggaggacatacagcaggtgtcatctgaagaactgattgcttgcttggtgtgtggagagaaatcttcatacgtttagtcccagaaatcttttgtgttgattgttgtggcgtaaggacagaagaaaaacataagttgagttaatttttccttcacatattaggtaaatgattaaaaaaaaagaagaaagaaggtgtacttgccttaccagatattaagatgtattacaaggtcatggtagtaaaacggatatgatattggggcaaaaacagggaaatgcaccattgaatttgtagaaaactccaagacagatgcatgtacatatggtgacaccacaaatctgtgggggaaagaacagatcatttagtaggtcatgtttgggaaaatgggctcataatatggaaaacaactaagctgacatcacatataagggtgccccctaggtgaataaaatacctgaatgtgaaagcatcctaagccg

SEQ ID NO: 877860 - DNA, 661 bp, Homo sapiens
gcaatttaattgaacccaaagtggggattgtggaaagcccaacttgtagccagttagtcagaattttcagaggcccagacctgtgactgctaggagggagggggcagtcttgtaagactgagcccttgccctgtgctgtctgaggatatctccaggtagacagtgttagaactggattgagttggaggacatacagcaggtgtcatctgaagaactgattgcttgcttggtgtgtggagagaaatcttcatacrtttagtcccagaaatcttttgtgttgattgttgtggcgtaaggacagaagaaaaacataagttgagttaatttttccttcacatattaggtaaatgattaaaaaaaaagaagaaagaaggtgtacttgccttaccagatattaagatgtattacaaggtcatggtagtaaaacggatatgatattggggcaaaaacagggaaatgcaccattgaatttgtagaaaactccaagacagatgcatgtacatatggtgacaccacaaatctgtgggggaaagaacagatcatttagtaggtcatgtttgggaaaatgggctcataatatggaaaacaactaagctgacatcacatataagggtgccccctaggtgaataaaatacctgaatgtgaaagcatcctaagccg

SEQ ID NO: 877861 - DNA, 661 bp, Homo sapiens
gcaatttaattgaacccaaagtggggattgtggaaagcccaacttgtagccagttagtcagaattttcagaggcccagacctgtgactgctaggagggagggggcagtcttgtaagactgagcccttgccctgtgctgtctgaggatatctccaggtagacagtgttagaactggattgagttggaggacatacagcaggtgtcatctgaagaactgattgcttgcttggtgtgtggagagaaatcttcatacgtttagtcccagaaatcttttgtgttgattgttgtggcgtaaggacagaagaaaaacataagttgagttaatttttccttcacatattaggtaaatgattaaaaaaaaagaagaaagaaggtgtacttgccttaccagatattaagatgtattacaaggtcatggtagtaaaacgkatatgatattggggcaaaaacagggaaatgcaccattgaatttgtagaaaactccaagacagatgcatgtacatatggtgacaccacaaatctgtgggggaaagaacagatcatttagtaggtcatgtttgggaaaatgggctcataatatggaaaacaactaagctgacatcacatataagggtgccccctaggtgaataaaatacctgaatgtgaaagcatcctaagccg

SEQ ID NO: 877862 - DNA, 602 bp, Homo sapiens
atactgcccaagaaggataaaaagctagggcttggcaatgaaggagaagctctgagatgtcaaagcactgattgagtcagcactgaaggctttgcacttggggttagcaaggcgaagaggagcaagcacaggcttatagaccagcagaaagcagaggtcgaaggaagggagcatttaatatagtacctatggctctgcatgtgggaagtttgggcaaagtattgagtgtaccaagcttactggaatacaaggaattaggttttgaggtttaaattctagttatatgtaattttgtgacatagaatttataataaatgctattaatagaaaaattatactttctctgagcttcagtaacctcatttgtaaaatgagtctaatgatgctattcagagttgtttttaaattaaatgagattatgtgaaagccctttgtggctagcaacagtctatatgaatgaaaracacatttgatttattgtaaattaaaagtgaatgatggctttaggttacacgtggccattcaattccaataaggccattataaaataattgtaaatttatgtatttttattacaaggtgagaaagtagctatgaaaggt

SEQ ID NO: 877863 - DNA, 644 bp, Homo sapiens
cacaatagcaaagacttggaaccaacccaaatgtccaacaatgacagactggattaagaaaatgtggcacatatacaccatggaatactatgcagccataaaaaaggatgagttcatgtcctttgtagggacatggatgaaattggaaatcatcattctcagtaaactawcacaaggacaaaaatccaaacaccgcatattctcactcataggtgggaattgagcgatgagagcacatggacacaggaaggggaacatcgcactctggggactgttgtggggttgggggaggggggagggatagccttaggagatatacctaatgctaaatgacgagttaatgggtgcagcacaccagcatggcacatgtatacatatgtaactaacctgcacattgtgcacatgtaccctaaaacttaaggtataataataataaaataaataaataaataaataaattattgaacagataaaagttggggagaagataccatgattcattacagaagaattccagttagaaggaatggtggaattacaaaatcaccatcaggcaaacacagtaatagttattgcaggcaagggccaccaattggaggacaaaactgagatgagaaacagtaccttcacataatcaacaagaa

SEQ ID NO: 877864 - DNA, 688 bp, Homo sapiens
ttgtttgaagatgacgaaatcttatatatagaaaaccctaaagactccatcaaaacactgttggaactgataaatttagtaaaattgcagaatgcaaaatcaacatacaaaaattagtagcatttctatatgccaactgtgaacaatctgaaaaaaaatcccatttccaatagccacagcaaaaataagatgcrtaagaataaatttaaccaaggaaatgaaagatctctatactaaaaactgtaaaacattgatgaaagacattgaagaaaacaaaaacaaatgtaaagatattcccatgttcatggaatggaagaatttatattgttaaaatgcccatactacccaaagcaatctaccaattcagggcaatccttaccaaaaaaaaaaaaaaaatgataatcttcacagaaatagaaaagacaatcctaaaactagtatgaaatcacaaaagaccccaaatcgtcacacaatatttagcaaaaagaacgaagctggaggcatcacactacctgacttcaaaatatactacaaagctatagtaaccaaaacagcatggtactggcataacagcagacacataaaccaatggaacagaaaagcaagcccagaaagaaatccatgcatctatatccaccagttttggagaaaagtgtcaagaacaaacattaagggaagaagagtctct

SEQ ID NO: 877865 - DNA, 689 bp, Homo sapiens
taaaagcaaaacacgatcacagcttgtaagatcaatgttagcaacaaaaggaagcaaaaagaagacaaactaaggataggacctgtttgggaaaccctgggacacatgaagagaatcatctggcctgatattcctccagatgttttgaactgaaagacttctgaactttctgagcctacaggaatggccagcctctccctagtatgaaccagtacaccctgcattctggaagatgatgcagaggcccctcttccacaaagttttaggtacctctttctggatctgcccttccctctcctcctgggcactaggacactggacctataagtaggattaagtcacagcatgacccagctagggacttactgggctttataacaaaggaaaagagatatttcccaaaggagctgcaagacctakccaacatgtactggcagaagctggagaagtggcatttgagggggcctgccctgctgagagttatggagatagtcaacagaacacgttatctaaagggtcaaaatatgaggggagtcaacaagggcattactcagcgtctaccagtagaagacatcaaaagaggccaagcacagtcattctttgccaaatttttggacttgaggcaattttcagactcaacacccattgactgaggagtggcttggtccccaggaggaaagactgccaaa

SEQ ID NO: 877866 - DNA, 651 bp, Homo sapiens
gccaacattatactgaacagggaaaaattgaaagcattccccctgagaactggaacaagacaaggatgcccactctcaccacttcgattcaacatagtactggaagtcctagccagagcaatcagacaagagaaagaaataaagggcatccaaattggtaaagaggaagtcacactgtcrctgttcacagattatatgatcatatacctagaaaatcccaaagactcatccagaaagctcatagatctgataagtaaagcttcagaatacaaaatttatgtacacaaatcattagcactgctatataccaacaattactaagctgagaaacaaatcaagaattcaatcccttttacaacagctgcaaaaaaatatatgcctaaaaatatacctaaccaaggaggtgaaagatctctacaagaaaactacaaaacactgctgaaagaaattatcaatgacataaacaatggaaacacattccatgctcacggatggatagaatcaatactgtgaaaatgaccatacagccaaaagcaagctacagattcaatgcaattagcatcaaagtaccatcattattcttcacagaactaggaaaaacactcttaaaattcatgtagaacctaaaaagaccttgcatagccaaagtaa

SEQ ID NO: 877867 - DNA, 643 bp, Homo sapiens
tctctatggacttgtttttatgaatctgggtgctcctgtttgggtgcatatatatttagaatagttagctctacttgttgaattgatccctttaccatgatgtaatggccttctttgtctcttttgatctttgttggtttaaagtctgttttatcagagactaggattgcagcccctgcgtttttttgttttccatttgcttgatagatcttcttccatccctttattttgatcctatgtgtgtctctgcacatgagatgggtctcctgaatacagyacactggtgggtcttgactctttatccaatttgccagtctgtgtcttttatttggggcatttagctcatttacatttaaggttaatattgctatgtgtgaatctgatcatgtcattatgatgttagctggttattttggccattaattgatgccgtttcttcatagcgtctattgtctatacaatttggcatctttttgtagtggctggtactggttgttcctttccatgtttagtgcttccttcaggagctcttgtaaggcagtcctgatggttacaaaatctctcagcatttgcttgtctgtagaggattttatttcccctttgctcataaagcttagtttggctggatatgaaattctgggtt

SEQ ID NO: 877868 - DNA, 522 bp, Homo sapiens
tatggatttacatcatttgtttataataaaaaagtgttcagaaaatattcgtcttcataacataggtcaagttatggggtgcaagtgttggctaaaagtggaggatacaagatgagcaggtatgttttctgctttcaagaactcattttctgctgcagagatagccttgtaagcaagcaatggaaaactctgacatttctctscaaagctactgcattacatataagggtgtgtctgggagggtaccaggtgcctgtcagcaaaagttgcaaaaacagcttgatctgggtattaagtgggcctgttgggaaaggcaggagtgtcaaatgtcggacagaactccagacagagaaatccagatatccagtaggttagaatgtaaaaaaaaaaaaaaaaaaaaaaaaaagtggtgatctatatcactatagaataattttagatacaatggaagtttataatcatcagataatttgttatgtgcaagtcaaatgccactatcagtctcttcaatagggtggtctg

SEQ ID NO: 877869 - DNA, 695 bp, Homo sapiens
tggtgcacgcttagttcatctgatcatgttcaagttatgtgaccttcaacgtgggggtccatagcaactgtaaaagaactcacaactttgttacagaaaagttgttacaaaccctcccttttttatgtccattcctcaatcttgagagaaaaggggtaaggaccattctagatacttcctgctgattaggatcacagaccttgtttaaagaactgaaattgtttttattatcatatctgccatgctgatctgtgatcagtgatcgtggatgttactattgtaattgttttgggggtgccacaaaccccatccatataagacagcaaacaattgttaaatgttatgtgtgtcctgactgtccccccaatcatctatttcccttctttttccctctccttaggattccttattccctgagaccaaaaaaaaaaaaaaaaaaaaaaagctatggaaattaggccacttaaaaaccctacaatgacttctaagtgttcaagtgaatggaagagtcacacatccctatctatamattaaaaactgattaagattagtgaggaaaatatgtcaaaacccaagataggccaaaagctaggccttttgcaccagacagtgagccaagttgtggatgcaaggaaaagttttcgaaggaaattaaaaattctactccagtgaacatgcaaaggagaaggaaataa

SEQ ID NO: 877870 - DNA, 694 bp, Homo sapiens
cgcacaagcttcagtagccaatttgatcaagtggaagaaaagatatcagtgattgaagattgaattaatgaaataaagcgagaagacaagtttagagaaaaaagagcaaaaagaaatgaacaaagcctccaagaaatatgggactatgtgraaaggccaaatctgtgtttgattggtgtgcctgaaagtgatggggaggatggaagcaagttggaaaacactctgcagtatattgtccaggaaaacttccccaacctagcaaggcaggccaacatgcaaattcaggaaatacagagaacaccacaaagatactccttgagaagagcaaccccaagacacataattgtcagattcaccaaggatgaaatgaaggaaaaagtgttaagggcagccagagagaaacgtcaggttaccgacaaagggaagcccgtcagactaacagcggatctcttggcagagactctacaagccagaggagagggggccaatattctagattcttaaagaattttcaacccagaatttcatatccagccaaactaagcttcataaatgaaggagaaataaaatcctttacagacaagcaaatgctgagagattttgtcaccaccaggcctgccttacaagagctcctgaaggaagcacaaaacatggaaaagaacaaccagtaccagccactacaaaaacatgccaa

SEQ ID NO: 877871 - DNA, 609 bp, Homo sapiens
gttcaagagttcagcgcagtcactaagcaaataaacaaatgaccaaaccatcaacaacagtatccttcccctttactgaagagagacattgtattcagagttgctaaattttatctaaatacccagtcttaaacaaaaaattaaaacacatatggaaatagaaaaatgtgatccatatacaattcaacaakaatagttgaagacttcattatcttcttttacttaaaaataaaactaggcataaatcaacaagcaaacagaagacacgaacattataaaccaactagacctaacagacatctatagaatacttcatccaacagcagcaaagtagacattcttctcacattctccaggatagatcatatgcgaggctgtaaaagaaccctcaacaaatataaaaggattaaaattatacaaaatttgttctcagagcatggtaacaattaaaatagacaaaaataacagaataaaattcagaaaatctataaatatgtgagaattaaacaagacattctaaacaactaaagggtcaagaaaaaatcacagtggaagtcccttcagaagaataaaaacacaatccataaaaacctatgggatgcagacaat

SEQ ID NO: 877872 - DNA, 590 bp, Homo sapiens
gggtcttactctggcacacaggctggagtacagaggtacaatcacacctcatgtcagccttaacctcttgggctcaagccactctcctgcctcagtgtctacaggtacacaccatcttgcctggctaattttttttttctcgagacagggtttcatcatgttgcccaggctgatctcaaactcctgggtttaagcaataggcctgccttggcctcccaagatgttgggattacagccatgagccaccatgcttggtcaccacattttctttctccagtccactattgatgaatatctaggtggattccatgtctttgctattgtggatagtgctgcaatgaacrtacacatgcatgtgtcttaaggtagaaaaatttatatccattttggtatataaccaatcatagaattgctgggtcaaatggtagttctattttacattctttgagaaatccctaaactgttctctacactggctgaattaatttacattcccaccagcagtgtataagcattctcttttctctgcaacctctccagcatctattatgttttgactttttaataatagtcattctgactggtatctt

SEQ ID NO: 877873 - DNA, 656 bp, Homo sapiens
gttctctgttctccataggtcattttcttcctcagttaatctcagtgtgtctacctggatgatccagttgaagagatagtgtttatgctccacttattctctccatgagagcagcatgcactagctgcttctatttagccatcttggcaccccccacctttggtacatgttttgagaccaaggttattattattttttttgccagtgttgcataatttctattgcctcctacaggggaggagatgactttcattaggtagagcaaacactctttgaaacttaccaacattaaccagttttgaaaatggagggagtaattgtgctcttcttccatccttcagtaaacctcccctcaatttccttcactttttttttcaaattctccccaacctttcaatttttgagcatytcataacagacttggtcctcttctttcggtatcctcacttctcggtgatttcgcccaggcttgagctttgatcctccatctctctgctaatgctcccaaatacttatctctagtcctgaccttgctcccaaactccagactcatgcatccaactgctgacttgccttctgcacttggacgtccaatagtatgccaactcagcatgtccaaactaaactcctacccctcccccacagagcctttgctc

SEQ ID NO: 877874 - DNA, 666 bp, Homo sapiens
tgggaggctgaggggagcgaatcacgaggtcaggagttcgagaccagcctggccaacatggtgaaaccctgtctctactacaaatacaaaacattagctgggcatggtggcaggcacctgtagtcccagctgcttgggaggctgaggcaggagaatcacttgaacctgggaggcgaaggttgcagtgagccgagattgcgccactgcactctagcccaggtgacagtgtgaggctccatctaaaaaaaaaaaaaaaaaaacaaaaaacaaaaaaaactacatattgtattaggagttaggagttagtatccaaaatatatgaggaactactatatctcaatagcaaaatataaataatctgattttaaawtggtcaaaacaagtaaatagacatttctttgaaggagatgtcaggtgtatgaaaagatgttcaacatcactaatcatcagagaaaagtaaatcacaaccacaataagatatcacctcacacgtgttaggctggcaatgatctaaaaacaaaagataacaagtattgacaaggacatggaaaaattggaattcttgtgttctattggtaggaatgtaaattgataaagtcattatggaaacaatatgagggttcttcaaaaaactaaaaatgcattgtggtcagtgctgccacaggg

SEQ ID NO: 877875 - DNA, 575 bp, Homo sapiens
ttgaagataagtattttgaaataatccagtcagataaataaaaggatataatagaatgagcaaagcctccatgacatatgggacaccataaagcagccaaatttataaattactggggttccagagcaaggttctgggtggaaacagtgrcatgtaatcttggattacttctccagttgtggaatttccatcctaaaagtaagttttaagagtacagttaaaatatacaattctatgatttttagtatgttcagaattttgcaaccatcaccaaaattattttagaatattttcatccctctaagagaaactccggtgattcccgttggcaatcactcctaaaatttccttcaaccagcctctggcagccactaatctattttctatctccacagatttgcctattctggacattttatataagtggaatcatacagtatgtggtcttctctgactggctccttttactttgcatcttttcaaggttcatccacgtggcaacatatataactacttcattcctttttattgccaaataatatttccatatatggatatacaacaatgaatggata

SEQ ID NO: 877876 - DNA, 581 bp, Homo sapiens
ctgataagcttttttattttttattttattttattttatttttatttttttattatactttaagttttagggtaaacttttgcaattcactcatttctccatcttcccactggaacttctgcatacaccatcctgtgctgaaaatacagctgatccagtttgcaaatggagtcactgatkagtcactgtgttctcactggattaaagcagtgttgttttcttttcttattcatagcatgaatatattacaatttatcaaataattccttttttgaggttgttctacctatttactgctataagcagtgctgcaatcaacattctttttacgtatccccacagatcaaagaggatcagtgtcagtccatttaggctgctataacaaaatgccacaatcaggtagcttataaacaatagaaatgtatttcttatagtgtaggaagctaggaattccaagatcaagatgctggcagatttggtatctggtgagggcctgctttttggtttatagatagtgccttctcgctgtgtcctcccatggtgaaaggggtgaggcagttctctggggactcttttataag

SEQ ID NO: 877877 - DNA, 757 bp, Homo sapiens
gaataaatgacccaacctctccttctgccctgctgatgactcccattggctgaacccagcagtgaggttaaattcccgggtcatggagcagattagaaaaggaaacagagttggtctggggggaagtgaggatcaaccagtacggtgactcattgttaagtctcccagctgwtatgctaaggctgaatctggaatctcactgcagaattgacctgtctgctagttggtctgcaggcagggccatgagggaatctagctttgggatttggtgaggcagaggcagaaagaaggtgagcagccctgcatgaaaatggaggcctccctagttggtcttctgttcttatcatgtgcgaaccttgagccaggtttaaacacgaggtctagactgtgctaaggctgagaccatgactgtaggacttagtttccctaaaggtagagtgacaacattagatcaaagcaacaattctcaaatggtgttccaaggagctctagagcttggtggagatgcctcaggggttagtaagtatatggaggaggaggctaagagagttgctgcggggagccctaataaatgctaatcaggccagctagttaatgaaaaaagcctttcttgcatttggcttcgagagagcagctcaaatgagttggacttggagcatttcagcctggatgtgggtactgccagagaaggagggatggtaactgccaatgcttttggcagtcctagagtctggtccgtggtccaagaggcaaaata

SEQ ID NO: 877878 - DNA, 757 bp, Homo sapiens
gaataaatgacccaacctctccttctgccctgctgatgactcccattggctgaacccagcagtgaggttaaattcccgggtcatggagcagattagaaaaggaaacagagttggtctggggggaagtgaggatcaaccagtacggtgactcattgttaagtctcccagctgatatgctaaggctgaatctggaatctcactgcagaattgacctgtctgctagttggtctgcaggcagggccatgagggaatctmgctttgggatttggtgaggcagaggcagaaagaaggtgagcagccctgcatgaaaatggaggcctccctagttggtcttctgttcttatcatgtgcgaaccttgagccaggtttaaacacgaggtctagactgtgctaaggctgagaccatgactgtaggacttagtttccctaaaggtagagtgacaacattagatcaaagcaacaattctcaaatggtgttccaaggagctctagagcttggtggagatgcctcaggggttagtaagtatatggaggaggaggctaagagagttgctgcggggagccctaataaatgctaatcaggccagctagttaatgaaaaaagcctttcttgcatttggcttcgagagagcagctcaaatgagttggacttggagcatttcagcctggatgtgggtactgccagagaaggagggatggtaactgccaatgcttttggcagtcctagagtctggtccgtggtccaagaggcaaaata

SEQ ID NO: 877879 - DNA, 757 bp, Homo sapiens
gaataaatgacccaacctctccttctgccctgctgatgactcccattggctgaacccagcagtgaggttaaattcccgggtcatggagcagattagaaaaggaaacagagttggtctggggggaagtgaggatcaaccagtacggtgactcattgttaagtctcccagctgatatgctaaggctgaatctggaatctcactgcagaattgacctgtctgctagttggtctgcaggcagggccatgagggaatctagctttgggatttggkgaggcagaggcagaaagaaggtgagcagccctgcatgaaaatggaggcctccctagttggtcttctgttcttatcatgtgcgaaccttgagccaggtttaaacacgaggtctagactgtgctaaggctgagaccatgactgtaggacttagtttccctaaaggtagagtgacaacattagatcaaagcaacaattctcaaatggtgttccaaggagctctagagcttggtggagatgcctcaggggttagtaagtatatggaggaggaggctaagagagttgctgcggggagccctaataaatgctaatcaggccagctagttaatgaaaaaagcctttcttgcatttggcttcgagagagcagctcaaatgagttggacttggagcatttcagcctggatgtgggtactgccagagaaggagggatggtaactgccaatgcttttggcagtcctagagtctggtccgtggtccaagaggcaaaata

SEQ ID NO: 877880 - DNA, 612 bp, Homo sapiens
cagcaataagactttcaaaaagtcaattgctcctgactcttgtcttctcttttcataaaattttcaacatccacacaggaatattgggaataaaattaaataacagctacgaaaaggatgcgagaatacttttattattattattattattattattataaagttttagggtacataagttagggtaataaactttagggtaaagttttagggtacatgtgcacaacgtgcaggtttgttacatacgtatacatgtgccatgttggtgtgctgcacccattaactcatcatttagcattaggtatatctccaatgctatccctcccccttccccccactccacaccagtccccggtrtgtgatgttccccttcctgtgtccatgtcttctcattattcaattcctacctatgagtgagaacatgtggtgtttggttttttgtccttgtgatagtttgctgagaatgatggtttccagtttcatccatgtccctacaaaggacatgaactcatcactttttatggctgcatagtattccatggtgtatatgtgccacattttcttaatccagtctatcgttgttggacatttgggttggttccaagtctttgc

SEQ ID NO: 877881 - DNA, 626 bp, Homo sapiens
attcataattgctacaaagagaataaaatacctaggaatacaacttataagggatgtgaaggacctcttcaaggagaacaacaaacctctgctcaaggagataagagaggacacaaacaaatggaaaaacattccatgctcacggataggaaaagtcaatatcgtgaaaatggccatggtgccaaaagtaatttatagactcagtgctatccccatcaaactaccattgactttcttcacagaactggaaaaaaactactttaaatttcatatggaaccaaaaaggagcccrcatagccaagacaatcataagcaaaaagaacaaagctggggacatcatgttacctgacttcaaactatactacaaggctacagtaaccaaaacagcatggtactggcaccaaaacagacatatagaccaatggaacagaacagaggcctcagaaataacatcacacgtctacaactatctgatctttgacaaacctgacaaaaacaagcaatggggaaaggattccctatttaataaatgttgagaaaactggctagccatatgcataaagctgaaactggatcccttccttacaccttacgtgaaaattaactcaagatggattaaagactta

SEQ ID NO: 877882 - DNA, 532 bp, Homo sapiens
aatgcaaatcaataacacaatgagatactatctcatgccagttagaatggtgatcattaaaaagtcaggaaacaacagatgatggagaggatgtggagaaacagaaatgcttttacactattggtgggagtgtaaattggttcaaacattgtggaagacagtattgtgattcctcaaggatctagaactasaaataccatttgacccagcaatcccattactgggtatatacccaaaagattataaaccattctactctaaagacacgtgcacatgcatgtttattgtggcactgttcacaacagcaaagacttggaactgacccaaatgcccatcaatgatagactagataaagaaaatgtgacacatatacaccatggaatactatgcatccataaaaaaggatgaattcatgtcctttgcagggacatggatgaagctggaaaccatcattctcagcaaactaacacaagaacagaaaacaaaacaccgcatgttctcataagtgcgagctggacaatgagaacacatg

SEQ ID NO: 877883 - DNA, 532 bp, Homo sapiens
aatgcaaatcaataacacaatgagatactatctcatgccagttagaatggtgatcattaaaaagtcaggaaacaacagatgatggagaggatgtggagaaacagaaatgcttttacactattggtgggagtgtaaattggttcaaacattgtggaagacagtattgtgattcctcaaggatctagaactacaaataccatttgacccagcaatcccattacygggtatatacccaaaagattataaaccattctactctaaagacacgtgcacatgcatgtttattgtggcactgttcacaacagcaaagacttggaactgacccaaatgcccatcaatgatagactagataaagaaaatgtgacacatatacaccatggaatactatgcatccataaaaaaggatgaattcatgtcctttgcagggacatggatgaagctggaaaccatcattctcagcaaactaacacaagaacagaaaacaaaacaccgcatgttctcataagtgcgagctggacaatgagaacacatg

SEQ ID NO: 877884 - DNA, 532 bp, Homo sapiens
aatgcaaatcaataacacaatgagatactatctcatgccagttagaatggtgatcattaaaaagtcaggaaacaacagatgatggagaggatgtggagaaacagaaatgcttttacactattggtgggagtgtaaattggttcaaacattgtggaagacagtattgtgattcctcaaggatctagaactacaaataccatttgacccagcaatcccattactgggtatatacccaaaagattataaaccattctactctaaagacacgtgcacatgcatgtttattgtggcactgttcacaayagcaaagacttggaactgacccaaatgcccatcaatgatagactagataaagaaaatgtgacacatatacaccatggaatactatgcatccataaaaaaggatgaattcatgtcctttgcagggacatggatgaagctggaaaccatcattctcagcaaactaacacaagaacagaaaacaaaacaccgcatgttctcataagtgcgagctggacaatgagaacacatg

SEQ ID NO: 877885 - DNA, 669 bp, Homo sapiens
acgctatcacccaggctggagtgcagtggcacagtcacagctcactgcagccttgacctcctggggctcaagccatcttcctgcctcagcctcccaagtggctgggattacaggcacacaccgctacaccaggctaatttktgtattttttgtagagatggggtcttgccatgttgcctggactggtctcaaactcctgtacccaagcaatcttcctgccttggcctcccaaagtttttgggattacaggtgtgagcccccacgcatgccccaatttctacccttttgccatctgtagctgtgttaccttagggcttcaagagaacgtgcagtgctagagaactttgtcttaaagagtggagagtctcttctacctacagccccctttgacacaaatgtgtaaatttccccactggagatttttttccacccaagagcaattttcaaggggtagaggactgtgagtaaccagtataactatggagtttagagaaatgctaaatattaatacataaaaaaatttctgatttgcctcctctgggcagctaaatcagtatgtaattatataactagagttatagttaggttatgtgattttacagttatatgatattttagtggctttgctttggataaaatcaataatattagagtttagttacatcatta

SEQ ID NO: 877886 - DNA, 594 bp, Homo sapiens
tagaactgctccaagctccctgtcctctggcacacacgtataaataattctgctggaaaccgacatgtttcactcagtcatccaaatgtatttataatgttgtccaaatatatagcacttgttacaatgtttacattttagacatattttgagatatgtgccttaacagagtgctgtgattattattaatatttagtaacttatcttaccagacctaaactcaaagtttttcacaatggcaatgccttatttgggacttatttgggactgaatgtatgaagatcttacattgagtccaaattgatttctctgttagtctcgcaataacattaaagccacagaattatctgctgtatatttcttgtcttgttgtagctgatattctacatattaggacaattaggacattastaatatctattaaccttagaataaaatgtcatattgaaattgaagaggaatattggaactttgctaagaaagaatgcttttcacacacaatgatatctaaaatggagcctctgttcctggaggtatattttacaaaaattcagtgttactataggaattctgtacacttctttcttagacatt

SEQ ID NO: 877887 - DNA, 628 bp, Homo sapiens
ttcatggttctgcaggctatatgcgatgctgcctatctacctgactacttgggaggcctcaggaaagttacagttgttgtgaaatgcaaacaggaagcaggcttatcttacatggccagagcacaaacaagagagagagagatggggaggtgccatatatttttaaacaactagatctcaaaagaactcactattgtaatgacagaaccaagggggatggtgttaaaccataagaaatcacccccatcatccaatcaccacccactaggccccatctccagcattggggaatacatttcaacatgagatctagttggggacatggatccaaaccatgtcatacattaactcaatttatccttacactaacccactgtggtaggtcatgtaggtcaggtgctatttatgaatgaggacatcaaaaatttaaggagttagcaatttgcccaaggtcacactgccactaagtgttagaacctggcctaaagacrtctggctatagccgtgctctacactgttgcacttctggtctttcttattccaagatccctgtgggtgtattttcaacaagacataaggtttgggacatttaaaaaatgaattgtagcttctttaaaaagaaaatgtg

SEQ ID NO: 877888 - DNA, 612 bp, Homo sapiens
ctccagacattgccaaatgtcctcttgggagcaaaaggccccgtccctaagaaccattgttccagagtctatgactactgggaagtgtgaaggtagtttgtagctcctcatactcatgcttagtttagagtaaatgtggctcaagaatgtaataggtccccttagttttactcagacaaatagagtargcaaagctggtgcagagtgtacagaattgggagaagggcagcacggttctggaagcaactatagcagatgaaggatgaaattctggggcagggtaggctgggggtgggagaggagatgtcccactggttattctgcagagaagttcctgggcagggaagactgcttaggtgaagtcagctcaggtaggaagggattgatcattaccataggccaaggcaagcaagattcaacaagagtcccaaggctaataactgggcatagtggcatgcacctatagtcccagctactcgggaggctgaggcatgagcatcacttgagtccaggagtccaaggctgcaatgagccataatggctccagggcactccagcctgggtgaagagtgagacaccaccccaaaaaggaagagccctgaggatgagaga

SEQ ID NO: 877889 - DNA, 594 bp, Homo sapiens
aggcagcagaaacctctgcagacttaaatgtccctgtctgacagctttgaagggagtagtggttctctcagcacggagtttgagatctgaaaatggacagactgcttcctcaagtgggtccctgacacccaagtagcctatctgggaggcaccccccagtaggggcagactgacacctcacacagctggtggaggtttctgagatgaaatctccagaggaacgatcagacagtaacatttgctgtttagcaaattcactsttctgcagcctctgctgctgatacccaggcaaacagggtctggagtggacctccagcaagctccaacagacctgcagctgagggtcctgactgttaaaaggaaaattaacaaacagaaaggacatccacaccaaaaccccatctgtacatcaccatcatcaaagaccaaaggtagataaaaccacaaagatggggataaaacagaacaggaaaactgaaaattctaaaaatcagagcacctctcttcctccaaatgaatgcagctcctcacaagcaatggaacaaagctgggtggagaatgactttgatgagctgagacaagaaggcttcaggc

SEQ ID NO: 877890 - DNA, 594 bp, Homo sapiens
aggcagcagaaacctctgcagacttaaatgtccctgtctgacagctttgaagggagtagtggttctctcagcacggagtttgagatctgaaaatggacagactgcttcctcaagtgggtccctgacacccaagtagcctatctgggaggcaccccccagtaggggcagactgacacctcacacagctggtggaggtttctgagatgaaatctccagaggaacgatcagacagtaacatttgctgtttagcaaattcactgttctgcagcctctgctgctgatacccaggcaaacagggtctggagtggacctccagcaagctccaacagacctgcagctgagggtcctgactgttaaraggaaaattaacaaacagaaaggacatccacaccaaaaccccatctgtacatcaccatcatcaaagaccaaaggtagataaaaccacaaagatggggataaaacagaacaggaaaactgaaaattctaaaaatcagagcacctctcttcctccaaatgaatgcagctcctcacaagcaatggaacaaagctgggtggagaatgactttgatgagctgagacaagaaggcttcaggc

SEQ ID NO: 877891 - DNA, 636 bp, Homo sapiens
cttattcactactgcaagaacagcataggagaaactgccccatgattcaaattatctcccactggatccctcccacaacacgtgggaattgtggggatacaattcaagatgagatttgggtggggacacagcgaaaccatatcattccacccctggcccctccaaatctcatgtcctcaaattttaaaaccaattgtgccttcccaacagtccctcaaagtcttaactcatttcagcattaacccaaaagtccacagtccaaagtctyatctgagacaaggcaaatcccttctgcctatgagcctgtaaaatcaaaagcaagctagttccttcctagatacagtgggggtacagttattgggtaaatacagccattccaaatgggaaaaattggctaaaacaaaggggttacaggctccattcaagtccaaaaacctgtgaggcaggcaaattttaaagttccaaattgatttcctttgactccaggtctcacatccaggtcacactgatgcaagaggtgggtttccatggtcttgggcagctctgcccctgtgactttgcagggtacagtccccttcctggctgctttcatgggctggcattgagtgtctgcagcttttccaggcacacagtgca

SEQ ID NO: 877892 - DNA, 657 bp, Homo sapiens
tgcttggcatttgatcatttgggtcctgggagggtaccatttctgttgtttaaaatacaaaaaaaattagcggggtgtggtggcaggtccctgcaaccccagctacttgggagcctaaggcaggagaatctcttgaacccgggaggtggaggttgcagtgagatgagatcccaccactgcacaccagcctgggcaacagagyaagactctgtctcaaaccaaaaaaaaaaaaaaaaatctgtctgttgtttaaaaaaagaaaaaagtcagagaggccagttgttccgacagcatatcatgcaatagcctcgtaacactgtgagtgcaacagttgacagagcttgatgcacacagtttcaattggaataaaagggaaaatggctccccaaactgcaagagtgctgcttgtaaaacagtcagagctgctttctgtgccaggctgttcaaaaagatgtgggaacagggcttgtcctggttgacaggccattctggagaaaccctgacaatgctggccacccctctgctgtccttcccacctgttcctttctagtcagtttatggagaggaggttgtttttgcttccaggaggattacttgtggaaagggggcaattacagggctttctcctgactgcatgcttcacattcctgtgtgtaa

SEQ ID NO: 877893 - DNA, 657 bp, Homo sapiens
tgcttggcatttgatcatttgggtcctgggagggtaccatttctgttgtttaaaatacaaaaaaaattagcggggtgtggtggcaggtccctgcaaccccagctacttgggagcctaaggcaggagaatctcttgaacccgggaggtggaggttgcagtgagatgagatcccaccactgcacaccagcctgggcaacagagcaagactctgtctcaaaccaaaaaaaaaaaaaaaaatctgtctgttgtttaaaaaaagaaaaaagtcagagaggccagttgttccgacagcatatcatgcaatagcctcgtaacactgtgagtgcaacagttgacagagcttgatgcacacagtttcaattggaataaaagggaaaatggctccccaaactgcaagagygctgcttgtaaaacagtcagagctgctttctgtgccaggctgttcaaaaagatgtgggaacagggcttgtcctggttgacaggccattctggagaaaccctgacaatgctggccacccctctgctgtccttcccacctgttcctttctagtcagtttatggagaggaggttgtttttgcttccaggaggattacttgtggaaagggggcaattacagggctttctcctgactgcatgcttcacattcctgtgtgtaa

SEQ ID NO: 877894 - DNA, 652 bp, Homo sapiens
tttctaacttttaatatatttttataagtgtttttgaactataaaataaatatactttacattgaaatattttcaatcaattttataatgaaataagtcttaaattggacatattgattgtacttatacactagccaaatattacttcctggaktaaccttcactttagtattatttcacaatatttcacttaattagcataagacaaattattttccaaaatagtttattctaaaatttatagtaaaagtagaaagaaaattagatgtgttgaaatttatttagtaagaattgtttcatgaatatgtcagttttgtaacatgaagaacacttttaattgaccacctcttggagattacattattaactgggacctgtcttatatgtataaggaattgtaacatctcagagattgaaaagcacttcaaacatcttttagtcaagctattcatatatgactataccatatacctgggtgccttcaaatggtggaaaataactgcatctcaaaatagcttccatttcttgagagctcttttggaaagttccaagtttcttacaggtcaatataatactataaataatattattataacttccaaataagttagaaaatgtttgaattaacatcttaaataaacagtaagaattg

SEQ ID NO: 877895 - DNA, 630 bp, Homo sapiens
gttcccctccctgtgtccatgtgttctcattgttcaactcccacttatgagtgagagcatgcggtgtttggttttctgttcctgtgttagtttgctgaggaagatggcttccagcttcatccatgtacctgaaaaggaagtgaactcattcttytttatggctgcatggtattcctggtatatatgtgccacattttctttatccagtctatcattgatgggcatttgggttggttccaattctttgctattgtaaatagtgctgcaataaacgtatgtgtgcatgtgtctttatagcagaattatttataatcctttgggtatatacccggtaatgagattgctgggttaaatggtatttctggttctagatccttgaggaataccgcactgtcttccacaatggttgaactaatttacactcccaccaatagtgtaaaagtgtttgtttctccacaccctctccagcatctattgtttcctgactttttaatgatctccattctaactggcatgagacggtatctcattgtggttttgatttgcagttctctaatgaccagtgatgatgagctttttttccatatgtttgtttgccatataaatatcttcttttgagaagtgtctgtt

SEQ ID NO: 877896 - DNA, 630 bp, Homo sapiens
gttcccctccctgtgtccatgtgttctcattgttcaactcccacttatgagtgagagcatgcggtgtttggttttctgttcctgtgttagtttgctgaggaagatggcttccagcttcatccatgtacctgaaaaggaagtgaactcattcttctttatggctgcatggtattcctggtatatatgtgccacattttctttatccagtctatcattgatgggcatttgggttggttccaattctttgctattgtaaatagtgctgcaataaacgtatgtgtgcatgtgtctttatagcagaattatttataatcctttgggtatatacccrgtaatgagattgctgggttaaatggtatttctggttctagatccttgaggaataccgcactgtcttccacaatggttgaactaatttacactcccaccaatagtgtaaaagtgtttgtttctccacaccctctccagcatctattgtttcctgactttttaatgatctccattctaactggcatgagacggtatctcattgtggttttgatttgcagttctctaatgaccagtgatgatgagctttttttccatatgtttgtttgccatataaatatcttcttttgagaagtgtctgtt

SEQ ID NO: 877897 - DNA, 621 bp, Homo sapiens
tgcgtggtagagagctgaaggccacccatcttgtaaagataacatccttaaaacctaccctcactctcccgacagccatgccacagagctgaatcacaacaagtgtctcatggatggaaacccttccattttgttacatttcgactgtttttaatttgtttatttttacttgtgctaacccttcctcttcactgtcaaccaaaagatcatgaaagactgttgatttctaaagtccaagtaaagactatggcttaacatttcttttagctggacaaggaaggggtttgggagagaagcattgggaatgaggtgacttactctcttaaggaacccaggtagaccaccagtgactgctgctttctttcactagccctcataargcttcctttcatgatctactctagtatctgtttttggacagtgtctgtctctcacctgggctagagtacagtggtggcttgatcttggctcactgcaacctctacctcctgggctcaaaccattctctcacctcagcctcctgagtaattgggactgcaggcatgtgtcaccaagcctggctaatattttgtgtttttgctagagacggggtctcatcatgttgtccaggttggtcatgaa

SEQ ID NO: 877898 - DNA, 602 bp, Homo sapiens
aatgggaataatgataacacctgtttcatagacttgttagttaatacatgtaaagtgcttagaatgtgtctagcacatagcaggagytgaacaaggatcacctctcattaggggctgcagggggactggtggctgctgctgaagccttcagaacctcccttcacatgctcaccacagctcctccagcaggcagaaggcttactcggtggtgcagagaaattaccccaaaggaagcttttcatcagaggtggctgatgagtgcctgatggatgccttttcctccctagatggtcccaagatgactcttcctagatgaagggcctcctcctgagccttgttgtagctcagtggaaaataaataaagagggaacaaaaagtccacgaagaagaaacagtttgttgggtggcgcctctcagggccagtatgatttaattgacgtcaagcctgttatgagtactcatgtggctaggataagtggcattggaagccgggttgcccagcatccttgctctcagagccccacttgatgaccttcttaggggttagtgcctatcaggaggctgttttgagagtatctgtggggaagaagggctcagattta

SEQ ID NO: 877899 - DNA, 684 bp, Homo sapiens
tatagaccctgcatagtaatggttcaattgaacttagttctagttctttctcctcccttttgctaacagtgaaacatcaaacaatattcatcttgcccattaatattgaagtaaaacttgctgaggcagtttggtctcagggagtgtgcacatttaaataccaaaaagttaacatctacctagaagctagagaacaaagttagaaaacaaagaaacaatagggaatatttttgcctttgggtaattcagtagtactgatcagtaggaaaaaaaaytcctactgactggtaagaaatgccatagaatatgggtacgctcaatgaaaatggaaggtttttttcatatgccacctctattttcaccctcttagatacaacgaaacaattagagactgcatgtcttcatctctgaatgtgcttgtgagcaaaatggctatgtctaaccagatactctgcatttacattgtgaaaggtacctttctggggctgaaacgctatacttttccccttccttcatttcttgtccctcctcatgtatacaaaacagtgtttggagaaaagaaatatatactacatagagtcaagtcattaagtctaattccaattctctagttcgtggtttcaaaggaaaaattctgaaaatttaagcagagatcaagagaacattcttctaattttctgtacc

SEQ ID NO: 877900 - DNA, 595 bp, Homo sapiens
gagctaaattaagagaactcgtggacacaaagaaagaaacaatagacactagggtctatctacttgatggtggaagatgggaggagggggaggaaaagaaaaaataattatcgggtactaggcgtagtacctgggtgatgaaataaaataacctgttacaacaaacctccatcacactagcttacctatataacaaacctgcacatgtaccccygaacctaaaataaaagttaaaaaagagaaaatactatgtggcaagttctatcacgaacaaatcatcatttataaataacattctctctgcgtttaaatactccttgtcatctttgagcgaaaaatgagtattaatgtagcaaaagatgatttcagcagcctccatcagccctagagtggaccaaggagatgagagctggtctgaattcaaggacctagttctgactgaggaagtttactccaaagcaagagctattctctttacagctcccaaacatgcccaccacaaattgctgtttgttctcagccttcttttgcttgtcctcttagctgaaacttcccccaagtcctcattcttttgtcactatttgacctccctctt

SEQ ID NO: 877901 - DNA, 647 bp, Homo sapiens
acacacacacgcaccccacacacacacacagactttatatatatgtaatttaccaagtctaggctacaagaggaaactggcaaaaattcactaattgaaatggagcttggccaagacatccatatctaatcccccttttctgattccaaatcagggagagtacatgctttgtgttttctggtaaaatacagacctatgtaacaatcagcatattttctcagaccagagcaagtaactcccracaatgagtgtttgtcagtcctaactggtttctctacgtgggtggtgaaaaaataccttactacagtcattaattctttctttcaaaagaaccatgtgtcttgagaagttctgctccatcacagggcaatatcccattttaaatacagtgtttaccgatgtttgtccatgaatgacgtcaacaaaaatgtttaaatctcaccaggaaaggagggcttagttgccagactttgggagacagagttagttgatctttgcgctctcaaaggctctgttactcaattaagtgaccaatcattaactccaaagtatttaagcctaataatacaacaaaagagagaacaatgggtagtatctttaacattaatcatggtcacctttggtttagctgtttaggtcctttccta

SEQ ID NO: 877902 - DNA, 598 bp, Homo sapiens
gaacacctgggctgcattgggatgaataaacccaaggtcagaccctagtgcttgcttatgtttggagaaagccccatccagcagggcatcttgtgagtatgtaaaaattcaagaaggtccagttggctaacattgagaaggttccaaatgagagtgcaaggtatcccaacaggaggtggaatgtattagtattcagatatccaggctcattcagcccatgcatcaggctggtatgcagggacagagaccaggtgtgatagtgattctcatgaggtgtggttaagtattaagtgaggcaaatctgagcacgcagcctagttstagcacatagaagcttctcaacaaatactgagctattctgattatattattttagactttttcttcttcaagaggttgttgttgccattattgttactatttggcctaccagtgtaggcagagccatggttctagagagtcgacattaataaaccataaacaaagaccacagtgttcctattcaaagccaagactcataactctaacaattcagaattcacagcttccaaatgataccgtagtagttcattccattcctcactgaggtgggaaagca

SEQ ID NO: 877903 - DNA, 633 bp, Homo sapiens
tgacctgatacttttctctttcctgtgatatgaatacgtgaaagtatatttattttcaaagaaaaccaatatcctttcttgaaaaccttctgatatcagagaaggagctggcagccaaagaaccagctcaatactaaacccaagcctgggaaagtaagcggtcctcgtgcatctctagagcctgtaattaatggctctccttggattcccactttccgcttctttttaccctgctttagaaatgccttttgttttcctattcaccctggataagatccacttcccctcgctggctcccgcttccagtcaccacttccagtcacagtggcttgctatgaactcctctcctatgccattttggtttataaaaatactatattcttaataaaatcaaatagatgtttctcaataggaaaakatagatataaataatggaattcatgagctacgaagttttattccttacaggcaacttggagtcctcctcttcaacccataagacgtgtttatctcattcccactgcactccaggccatcttactaatattgttaaatgttgattttataacacctaaccaaaacattaaagaaatattcttaagcctctaggatcaagagcatctagcctggaat

SEQ ID NO: 877904 - DNA, 620 bp, Homo sapiens
cagtctgtaatattttgttatggcagcctgagctgactaagataatatattttttaattcatttgttttcaacacttttgtgtctctacaatccccaatagccaacttggatttgctgaagatcagttggctggaagtatttgggyttacttatgggttctctattctgttccatcagtatatgtgccttatatttataccagtaccatgctgttttggttactatagacttagagtatagtttgaaatcaggtagtgtgatgcctccagatttgttcttttcacttagtcttgctttgggtatgcgggctctttttttcgttccatgtgaattttagaattgttttttttctaattctgtgaagaatgatggtggtattttgatggggattgcattgaatttgtagattccttttggcagtatggtcattttcacaatattgattccacccacccatgatcatgggatgtgtttccatttgtttgtgttgtttatgatttgtttcagcagtgttttgtagttttccttgtagaggtcttttgactccattgttaggtatattcctaagtatttttttttttttttgcagctattgtaaaaggggttgagttcttgatta

SEQ ID NO: 877905 - DNA, 620 bp, Homo sapiens
cagtctgtaatattttgttatggcagcctgagctgactaagataatatattttttaattcatttgttttcaacacttttgtgtctctacaatccccaatagccaacttggatttgctgaagatcagttggctggaagtatttgggtttacttatgggttctctattctgttccatcagtatatgtgccttatatttataccagtaccatgctgttttggttactatagacttagagtatagtttgaaatcaggtagtgtgatgcctccagatttgttcttttcacttagtcttgctttgggtatgcgggctctttttttsgttccatgtgaattttagaattgttttttttctaattctgtgaagaatgatggtggtattttgatggggattgcattgaatttgtagattccttttggcagtatggtcattttcacaatattgattccacccacccatgatcatgggatgtgtttccatttgtttgtgttgtttatgatttgtttcagcagtgttttgtagttttccttgtagaggtcttttgactccattgttaggtatattcctaagtatttttttttttttttgcagctattgtaaaaggggttgagttcttgatta

SEQ ID NO: 877906 - DNA, 601 bp, Homo sapiens
ttatggacataactcaaatttctgaatctttctcacaaccctcttgttttttattttaacttttactctagatacaacgggtacatgtgcagatttgttacatgggaatattgcgtgatgctggggtttggagtatggatcccatcacccaggtggtgaacgtagtacccaacagggttttttaacccacccccaccacccctagaagtccccagtgtctattgttcccatgtttatgtccgtatttgctcaatgtttagctcccacttgtaagtgagagcatgcagtgtttgattttctgttcctgcattaatttgtttggatcatggcctccagctccattaatgttgctgcaaargacatgattccattgttttataaagctgcatagtattccatggtgtttatgtaccacatattatttatccaacccaccattcatgggcatctgacaacctctcttggaaccctagcagaggaggggaaagtggaagcagagttaccataggaagagctgttgaagagctcaatgttgaagaaggcgtagtctccactggtcatgccatgcctgtgcgccaccagcatgatgctccggatggtg

SEQ ID NO: 877907 - DNA, 550 bp, Homo sapiens
ctatgtctatgtatgttatctctaaacttgatgagtatgagtaccttctgacacatgttttccatttatcaataatggataaatgaaaaatgacaggcagtataaaataagcaaaaatgtgacaatatatttaaatcttttgtaatattcataaagtgccatagtaattgtatttattgaaaatcaatttatccatgttcccactaaataaatgttgaacagtatttaaacaccataagtttgagtcagaatttttagactactgggctaagacaaggtgtaatggaaagtatgtggcccaraaagcccattgcttatatgaaatatttcttgccaacctctatttcttctatgatagggtacaacaaagtttttccatttttaatttgttaaaattacaactttaggcaaattaaaattaacagagttgaattgagccagaagaaatattttgcaagttttgggtagccctcagaatcagagcagattcagagagattccagggtgttgctgcctcatggttgaagatttatagaaagaaaagaagaat

SEQ ID NO: 877908 - DNA, 607 bp, Homo sapiens
tttattaaacattataatttagaacaactctttatatgcaacaataattaagatacaattcacaaaagattatacataattatatattttgatattttaaaacaaaatatagctaaagtaaattgaataaaacaaagaaattgaacacaaggacaagaaagcaagcaaatattatctcacattttccaaggggataataaaaatcaaatcacactttaaaaataacttcccagaccaggaacggtggctcaaacatgtaacctcagcacttttggagggcgaggcaggaggattgcttgagctcaggacttcaagaccagccgkttaaaaaaattaataaaaaaaaaaataactaggcgtggtggtgcatgcctgtagtctccagcaacttaagaagctgaggtgggaggattgcttgagcctcagagatagaggttgcaatgagcttggtcatgtcacttcactccagcctggacaacacagcaagactctacctttaaaaaaggaaaaataaataacttccctaaaacataaagaattgattaaaacattcaacagttttgtacaggtaaaaggaaatacctttttagctattataaaaacagta

SEQ ID NO: 877909 - DNA, 610 bp, Homo sapiens
ttttatgccaagaaattgcacctcgaggacagggggatcttttattaacctttgtatcccagtggtcattttgccattcacatagtaggtatgcagtaaatgctcatctagtgaaggaatgcattacagtccgggcatttcctgctatgaaatgagtcatcttggtgaggagttgcgcgaatcttcaaggtagagttctgtgtatgcaaagacacagatcctctggcatttgtaaatctgctaatcgcttcttgagtgtcattaaatgtataagaggtcctaaaaccaaaccagtagggcatcttgtccaggttgtacttgaagttttactgaatgcttatatttttgagtttattgatagcaacacttttcattcccaaaatattatacagacattgtgttgcagtgtagacaacaggaagttttgttgcttccgtttttggtaggctaggtgtttcagtgagrggggggggggttctagaattttttggtaacggttaattacgtttttacttatctatccaggtaagacttcttacgcaaagagctcctgagtatcatgtattccatgcgtcaatttccatgtggcattttctatattaataggaca

SEQ ID NO: 877910 - DNA, 647 bp, Homo sapiens
acagaaggggttttgccgtgctgcccaggctgatccctaacccctgggctcaagcaatccacccaccttagcctcccaatgtgctgggattacaggtgtaagccaccgtgcctggcaataatttttcttttatatcaagtttcttcttcattttaaaaaaatttaaggtctatttttacttccaggaattttaattgattgttttctctataaaatgcattttacatttatgttacacttatctcttcatttcttgagtaattcagcacacattattaaaattcttttcacattatggtgtcattttccttttctggtgaaatgtttctctctttargcaaggatattttttgttttggtttgattttcctaacctctcagcttcacatttttcttgtgtgtattgaaatgtgttgtgaagcttcatgatgagcagatactccttttgaggcggtttagaaccaggtcatgagctggtggctttagatcttaatcctttttccatacttggaccatggcctgacctggttcttaggttctggtgctgctgggttttcctgccactgcagacaaattgtttactttcaggcagagccttggatagctgcagatttttaagggccctctttataaaaatattatctatt

SEQ ID NO: 877911 - DNA, 655 bp, Homo sapiens
ctttgagagtgctttgtgccacataaatctcatagaaatatctttaacttgctgccccagaaggccactgcttccctcctcagcaaacagaagcaacatcagggagtcatttgtcaaagtttcaaagggaatggttcatttatgaactgacattggatggtcttccgttccaacattcatgggattttaaaacaaagatgcattttatgattaacctccacaagcaaagagttatatttgtctcttttgacttacttcagcaacctgatttaaaaaaatctccttcaaggagaatcatatttattatacctcaaaaattcagtttatatgcatcattgttcagagcaatttctttctccctacattgaatggccaagtgatcatttgttttggagattyattcatgctttagaagacctggccacccatggaaaagaacatttttgagagcatttcccccctgcttctttcttaggacagggaaaataggtcttaaaagaattataagtgaatttagaaaatattgcttaaaagtttctcacttattctgggacatataccttcagttttctaatattcaagagctgtagtgaaaagagcattagtgtatgttaagattctctctttttgagttaggtgaacttgagccaatttt

SEQ ID NO: 877912 - DNA, 634 bp, Homo sapiens
atgcgatcgctcgacactgagaatctgtaatatgtggaatcattgcaaacatgaaaaagatgctcaatgcacttgctacctgaaagtgaatgtgaaagcgtgcaaaatttaaggtataaaagcttagggaaatattacaattgtcacacttgattacttttagacacagcttgacattcttgaagaatagttattaaagagtattcttcaaakagaaaaattcgcttattcaggtattcaataaatattcattggaagcctactgtgcatgtaacatagcagatacattgatggataacaaagatgtatgcggtatcatattgaccatatatgtatcatttcttagaaggctttaccaacaaagaagaaataaaggagcctgattattgtaaatggtgatgaaagctgttccttatatacagtaataacatgacactaggcatccctttaacaacttagttccccaaaagacatatatattactcactgataaccagggataatttttttaatttttttttttttttttttttttttttaagtagagacggggtttcaccatgttagccaggatggtctcgatctcctgaccttgtgatccgcccgcctcggcctcccaaagtgctgggattac

SEQ ID NO: 877913 - DNA, 662 bp, Homo sapiens
ttttgttagagattctgattactgtagataagaaatagggaaggaatgacagaatgaatacttgatgagaattcaggggccctgtgttctattcttccttggtataatagaatatatcttacttgtaaaatttcagaattgtaattagcttcagtttttaacttgtaaattgagaaactaaactgaatgagcttcacatttctttttatctctaatagcttagatatcaaatacagaatgccttcaccatttgctcagtactttcatgtgatactaaaatttgcagtagctttatataaaccagtacacagtgtattcggattcaacccaaatatacaattaatctaatgccaactgccaatacactgtctaaaagttgctcagctrgtcacttaattagactaactaaatattttaccagttgaaactgttttatcaatagcacagtcctctacaaatccggagaaaagtgtcatcttcttgaagataggccagaggttgcattactacctacatataaattaaaatcaataattttaagaaacaatagtctttccctttctctctccccacccccactatttaaactaaggaggaaattttaaattttctttatattgttcctactttcatcatatcctctaccattttcctataaaata

SEQ ID NO: 877914 - DNA, 625 bp, Homo sapiens
gctatgcagcttgttttactgtaatggtgttattttgggatttattggcttccagaactgagaaaaagatataggagcactttgagcaaactgctcagttatggagaatgggaaaaaaacctcaaatatctacactatgtgctgctctgttgttatttctttcagttttcttatattttgacaaattgtttgatgtgaattcatattgtttctgtttttgtgaatcataaacagatccttagacatgaataaatatctttttgccaatgtgaatgaaagaaagcagaaaaattgcagctcatatatgcatctgtatcattcaagamggaaaccacatcagttatttgaacagagagaatataatccttatctaggtataaagttgttaacaaagtaaatgaaagggaaaaaaaaagatgtcacaaaggtagcaactgcaagaagcatttactactcctagaattggggaacaaaggaaagaagttaaaattatttgcatttaggaactcagaggaggaagcagaattctgaagtgaggacatcgggcagcttatgctggttcctctgagagggtacaatgaatttgatcctgcaatatagaggaaaaaccccaaacagaattaag

SEQ ID NO: 877915 - DNA, 623 bp, Homo sapiens
acttacaagtactcaacatttctcctgtgcatctcttatcacatttttgtcattcattacacttacctatgggcaataatcatccaatacattgttgataatattattttgaatagttatttgttagacaaattaagaataagtaagaaaagcatgattttgcctctatttatttctttcctgatgcattttcttcttaaatgtagatataaattactgacctaagtaattttccatctcccygaggaatgtcttttaacatttcttgcaagacaggaaaattgagtccgaactcctttagttttgcttctctctttatttttccttcagttctttaggataatttcactgaatgcaagattaaacactattggattattttgtttaccactttaaacattttatccccctctctttttgtttgcattatctctgatatgaagacctatgtaattctattcttgttccactatagtaaggtgtttttttccctctcatttctttagtgtttttctcttcgtctttgattttttctagagtgattttgatatgtctatttatagtttttaaaaatttatcttgttttgagttctctgaggttctgggatctgtgatttcatgtc

SEQ ID NO: 877916 - DNA, 590 bp, Homo sapiens
ttataattgtggtaatttcattcagttctgggacatctacagtacatacttagttccacagaccccactgcctgtgacctagttggccaaatttaaagttgagtgacaaattttaattatgaagctgatgaaggtacttatgcaaaattatttctaatcaattataattcagttttactcactgataatcyactggagtctaatacattaatttagtgtactctagtattgaacatcaattgcactaatgctaggagctgtgggtgatccaaaggaatgatgtatatggggcagctgatgtgccaagtcccctctcactagagaacaaggaagtggaaaaatatgtaaccataagatcagcagaaaggacagatgtggtagtttggctagtgagaaaacaactgaaaagatccatctgagtaagctcctaaaattccaaagtcatttcttaaatatgctatttttaagatgatactgcctgcacattttccatggagatgcttatttttggaccatctgttgatggtaaatatgtatcatgtgccctctaaagcctctatgtgttgtctactcactattttacagcttct

SEQ ID NO: 877917 - DNA, 635 bp, Homo sapiens
ataatgaaattaagacagaaatcaagaagtttttttaaactaatgagaacaaaacacaatgtaccagaatctctgggatgcaactaaggcagtgttaaaagagaaatttatatcactaaatgcccatgtcaaaaagctataaaaatctgaaattgacatcctaacatcacaactaaaagaactggagaactaagagcaaacaaaccccaaagtgagctgaagacaagaaataaccaatatcagagcagaactgtatgaaacagagacacaaaaaagccttcaaaaaaatcaacaaatccaagagctgtttttttggaaaaaaaaacctaataaaatataccactaactagactaataaagaaaagagaatattcaaatagasacaatcagaaatgataaggaggctatcatactgatgcacagaaatacacacaaccctcagagaatactataaacacctctatgtaaataaactagacaatctagaagaaatggataaatttctggaggcatacactctcccacgactgaaccaggaagaagttgaatccctgaagagaccagtaatgaatttttttaattgaggcagtaataaattgcctaccaaccaaaaaatcccccaggaccagatggat

SEQ ID NO: 877918 - DNA, 674 bp, Homo sapiens
taccacagagttattttacctgtattcctatatttacaaagtcaaataaaaacaacctctgttatcagaatactgttaggatttactggtaaaatattaaataccatgtaccatgacaatagattacatgaacagttatcctataatgattgtgacataatgaaaataacaaaagtgtcttacgcatatttcatccccatttgggcagaaaatctaccaagaattaccatcgttcccactcccactgccatttctcccacactatccttcccccatggctggtgttaagattttattttgtacattcttggtaaacttgttaaagctaaaacttactcctrcaaatgttatgattttcctcccttagattagaagactttattttacattaaaatgctctcacaggtaagtgggaattatgggatttaggcccctcacgtagtagattctgaaacacttgaaatcagaagttttgggtttgaatcctgaccaccacctactaggttgtaataatctaatacaaaccctatttcataataaagtgctgactatctcacataatttattgaatactgtactgaaagtgaaaaacaaaatggttgtactcgaagtacagtctctagtaatgcatatcacttctgcaccactacaaagtggaaaaatcctcaaactat

SEQ ID NO: 877919 - DNA, 667 bp, Homo sapiens
aaaaaggaaacaacccatgtgaaacatttctttatgtgcttgcaaaacaaagaaaacatttcaatttatatactggtatatttgaatttctcttgcctttaaaaaattcctacttcattttaagtaccatccgactctaaagtgtcattaaataagtatgaattctgttgcagttacacacgtttaatggccaatacaatgtcttttatgggatgcattatttagtaatcttacattaagacaataacttcaatcattatgccttcaaatagcaataarcatggtaatggctttgctgagctgcttcctggctctatcattgtgttttccctttaatattagagcactgtttttatttttatcccaagagtgtgttccatcccctacccccaattcctgttttctgagagtggaagcacctttgcagtagggaataaaacatcaaagtccatctaataggtaaaattctgctccaacccagtgtcaagattaatgaagcactgataatgttagctttttttttttaatcaatgtttgttttaagcaagtctattctatcctcccaggaggaagaagtgcctcgtagtcactctgcagaattcgcagtagtccaacattctgtcaagtatgggttttgacaaacttagagagcttgaaggaactcatt

SEQ ID NO: 877920 - DNA, 672 bp, Homo sapiens
ggagagggaaagcccagtcttaggaagacccccactcccaatgtgggtgggcaccattcaatcagctgccagtacagctaagaaagcaggcagaagaaggtggaagaagctgacttactgagtcttctggctttcatcattctctcatgctggatgcttcttgccttcgaacatcagactccaagttctttggcccctggactcttggactacaccagtggtttgagagggtctcttggccttcagccactgactgaaagctacactgttagcttccctacttttgaggttttgggttttgaactgagacactgctggctccctgctcctcagcttgcagacagcctatcatgggactttgtgagtcaattctccttaataaactccttttcatatatacatatatcctattagttctttccctctagagaaccctgactaatacagggatgcatggtcaaggtcaacagatgggctatatcagagtctggaccagctacyaagcattctcttattctgggccccacacaaaacttacagaccaatcaaatggactgtggagtgttgaatcaagtatgaactggctgagtgtattagttttctcttgcttcataacaaactaccatgaatttagcaactttcaatacccactgaaatcaaggcattggctgg

SEQ ID NO: 877921 - DNA, 600 bp, Homo sapiens
atgtcttcaagtttcatcgtgtggcatttatcagaattttattccttttcgtggccaaataactttgtattgtatggatatataccacattttgtttatctattcatctgttgctgggcacgtgagttgtttccatgttttggtgatcawgactgatgctgcagttaacatggggtgcaggtatatatttgagtctttgcttctaattctttggggatattataatacctatactggatcacaaagtaattctacgtttcactttttgaggagccaccaaactgttttccacagtggctgccccatcttacattcccactaacagttcataagtgtttcaacttctcatcatcctcaccatcatttgttattttctgtttctttaaaaccagtagccatcttaataaagtaatattgcattacagttttgatgtgcatttccctggtgtcccagttctacttttatatacctgcttgtcattaagaaagctctacttttcaagaatgctggaaagagcagctttcccccgctataaactcatagccaaccttcacttatatgagaacatgcagagcatagtttcatctcctttgaaatac

SEQ ID NO: 877922 - DNA, 600 bp, Homo sapiens
atgtcttcaagtttcatcgtgtggcatttatcagaattttattccttttcgtggccaaataactttgtattgtatggatatataccacattttgtttatctattcatctgttgctgggcacgtgagttgtttccatgttttggtgatcatgactgatgctgcagttaacatggggtgcaggtatatatttgagtctttgcttctaattctttggggatattataatacctatactggatcacaaagtaattctacgtttcactttttgaggagccaccaaactgttttccacagtggctgccccatcttacattcccactaacagttcayaagtgtttcaacttctcatcatcctcaccatcatttgttattttctgtttctttaaaaccagtagccatcttaataaagtaatattgcattacagttttgatgtgcatttccctggtgtcccagttctacttttatatacctgcttgtcattaagaaagctctacttttcaagaatgctggaaagagcagctttcccccgctataaactcatagccaaccttcacttatatgagaacatgcagagcatagtttcatctcctttgaaatac

SEQ ID NO: 877923 - DNA, 607 bp, Homo sapiens
catatatgctttgtctctctcttcttccctctccctttccccacatgaacacataccccctgcttgctttttttggctgaacaagctgaaaataagttgcagacatcatcacttcaccccttcatccttaagcatgtgtcttctaagaataaggactttctcctacacagctgcaatatcattgtcacactccaaaaatttagcattaatacgataaaatgatctaatatacagcctatattcaaaygtcccccactgtcccaattctgatcttttagctggtttttccctcctggatgttatcaaatattgcatttagctgttatgcttctttagcctccttttgtctaaaacaatccctgcccctgttaaagaaaaaaaatttcatgacattgacgtttttaaagaatccagatctgtcattttgtagaatgttcaacaatatatatctgagtggtgctttatggttggattcaggttaggcatttttgccaatactgcaaaagttgtacttattttcttctcggtgcgtagcatgagaaggttgtttcattgttggtgatattgagtttgaacatttttcttttttgtacatttaccaactgaa

SEQ ID NO: 877924 - DNA, 660 bp, Homo sapiens
ctttgagagtgctttgtgccacataaatctcatagaaatatctttaacttgctgccccagaaggccactgcttccctcctcagcaaacagaagcaacatcagggagtcatttgtcaaagtttcaaagggaatggttcatttatgaactgacattggatggtcttccgttccaacattcatgggattttaaaacaaagatgcattttatgattaacctccacaagcaaagagttatatttgtctcttttgacttacttcagcaacctgatttaaaaaaatctccttcaaggagaatcatatttattatacctcaaaaattcagtttatatgcatcattgttcagagcaatttctttctccctacattgaatggccaagtgatcatttgttttggagattyattcatgctttagaagacctggccacccatggaaaagaacatttttgagagcatttcccccctgcttctttcttaggacagggaaaataggtcttaaaagaattataagtgaatttagaaaatattgcttaaaagtttctcacttattctgggacatataccttcagttttctaatattcaagagctgtagtgaaaagagcattagtgtatgttaagattctctctttttgagttaggtgaacttgagccaatttttgagt

SEQ ID NO: 877925 - DNA, 632 bp, Homo sapiens
atgcgatcgctcgacactgagaatctgtaatatgtggaatcattgcaaacatgaaaaagatgctcaatgcacttgctacctgaaagtgaatgtgaaagcgtgcaaaatttaaggtataaaagcttagggaaatattacaattgtcacacttgattacttttagacacagcttgacattcttgaagaatagttattaaagagtattcttcaaakagaaaaattcgcttattcaggtattcaataaatattcattggaagcctactgtgcatgtaacatagcagatacattgatggataacaaagatgtatgcggtatcatattgaccatatatgtatcatttcttagaaggctttaccaacaaagaagaaataaaggagcctgattattgtaaatggtgatgaaagctgttccttatatacagtaataacatgacactaggcatccctttaacaacttagttccccaaaagacatatatattactcactgataaccagggataatttttttaatttttttttttttttttttttttttttaagtagagacggggtttcaccatgttagccaggatggtctcgatctcctgaccttgtgatccgcccgcctcggcctcccaaagtgctgggatt

SEQ ID NO: 877926 - DNA, 599 bp, Homo sapiens
cacacaataatagttggagacttcaacaccccactgtcagtattagacagatcaatgagatagagaattaacaaggatattcaagacttgaactcagctctggaccaagtgggcccgatagacatctacagaactctccacccgaaatcaacagaatatacaatcctctcagcatcacatcacacttattctaaaattgaccacataaatggaagtaaaacattcctcagccaatgcaaaataatggaaaacataacagtctctcagaccacagttcaatcaaattagaactcaggattaagaaactcactcaaaacctcaaaacaacatggaaactgagcaacctgcccctgaatgactactgggttaataacaaaattaaggcagaaataaataagtactttgaaaccaatgagaacawaggcaaaacataccagaatctctgggacacagctaaaggagtgtttagagggaaattcataacactagatacccacaggagaaagtgggaaagatctaaaatcaacaccctaacatcacaattaaaagaactagtgaagcaagagaaaacaaattcaaacctagcagaagacaagaaa

SEQ ID NO: 877927 - DNA, 614 bp, Homo sapiens
aataagaaggaaccaaaaaacaatgctggtaatatgacaaaacatggttctttaataccgccaaaagatcaaatcagctcaccagcaatggaccgaaaccaagaagaaatctctggattgccagaaaaaaaaattcagaaggytaattattaagctactcaaggaggcaccagagaaagatgaataccaacttaaataaagttttaaaatgttacaggatatggaagaaaaaatctccagggaaatagttaccataaataagaaacaatcacaacttctggaaatgaagaccacacataaagaaatgcaaatacactggaaagtctcagcaatagaattgaacaggtagaagaaaaaacttcagagcttgaagacaaggcttttgaattaatccaacacaacaaagacaaagaaaaaatttttcaaaatgaataaagccttcaagaaatttggaattatgttaaatgaccaaacctaagaataattggtgttctggaggaagaagataaatctaaacatttggaaaacatatttgaggggataatcatggaaagctttcccagctttgctagagatctagatatcctaaaacaacaagctcaaaggacacctgg

SEQ ID NO: 877928 - DNA, 614 bp, Homo sapiens
aataagaaggaaccaaaaaacaatgctggtaatatgacaaaacatggttctttaataccgccaaaagatcaaatcagctcaccagcaatggaccgaaaccaagaagaaatctctggattgccagaaaaaaaaattcagaaggctaattattaagctactcaaggaggcaccagagaaagatgaataccaacttaaataaagttttaaaatgttacaggatatggaagaaaaaatctccagggaaatagttaccataaataagaaacaatcacaacttctggaaatgaagaccacacataaagaaatgcaaatacactggaaagtctcagcaatagaattgaacaggtagaagaaaaaacttcagagcttgaagacaaggcttttgaattaatccaayacaacaaagacaaagaaaaaatttttcaaaatgaataaagccttcaagaaatttggaattatgttaaatgaccaaacctaagaataattggtgttctggaggaagaagataaatctaaacatttggaaaacatatttgaggggataatcatggaaagctttcccagctttgctagagatctagatatcctaaaacaacaagctcaaaggacacctgg

SEQ ID NO: 877929 - DNA, 454 bp, Homo sapiens
catgagatctgttggtattataagggggaatttccctacacaaactcctctcctctttgcctgctgccatccatataaaatgtgacttgccctcccttgccttccaccatgattgtgaggattcccccatctatgtgaaactataggtccaattaaacctctttctcttgcaaattacccagtctyggtatgtctttatcagcagaataaaaatgaactaatacagtaaattggtaccagtacagtgggatgctgctgaaaaaaataccccaaaatgtggaagcggctttggaactggttaataggcagaggttagaacagtttggagggatcagaagaagacaggaaaatgtgggaaagtttgtaattccctagagacttgttcaatggctttgaccaaaatgttgataatgatatggacaatgaaattgagactgaggtggtctcagtggag

SEQ ID NO: 877930 - DNA, 623 bp, Homo sapiens
ttcttcccctttttttccctaaaaatcatatagttttgcattgacatgtaagtccaggatccatatggagttcatttttgtacaaggtgtgaggtttaatgtcaatgatctttttttttttttttttcatctacggatgtcctattgttccakcaccatttattgaaaaagcaattctttcctcattgaatttctcctgcattttgtcaaatatcagttgggaatatttgtgtgggtctatttctggattatctattctgttccattgatctatgtgtccatctttctgtctcactattactgtagctatatagtaagccttaatattaattacagtgattcctcccactccactctactttttgaagattatagctattctagtgcttgtgcattttcaaataagtttcagaagatatttttatttgtataatgtaaattacattatgaatatacaataaaatttataaaattaatttcagaataaactcatctatgattacaaaataccttgctaggattttggtaagaattgcattggacctataaaattaatttggggagaactgatgcctttactatgttgagtttggaagcccacttttgcactacaatttagtgct

SEQ ID NO: 877931 - DNA, 628 bp, Homo sapiens
tcaatcaggactgggtgagagtgagaggaggcccttcaaagagatttctgccccattctttcaactcatgccccatgtcaaattgatgaattctctttttaactctaaaacaagaagcagacaggaggttacaattggaacatagcccagatgtgcatttcttgagagctatacttttgtttccttttttgataaagcaatataggttttgagctttgaaattaaataaattatgaattctgaacactgttgataaaccttactactgcctgggtctccctgaagagaggtacagacctttctttatccatctctgaatccttgttcagctcagcatctgcgaacatttaaattaggatttatatattatccctttaaattttctgtggggataggaaggacatacacttgacaggtaaagatgtttgtagtcagtgaaccaagtcttagagagttgtatctaaaagttactaagttagctgaagatcagccrggacagctgatatattttaccacatatgaggcagggaacctagggtcaattcatcctgacttcctagaattaaatcaaaaggaaaaccccaactttccatgcccaaataacaaaaggaccagagactactccctt

SEQ ID NO: 877932 - DNA, 622 bp, Homo sapiens
cagacagtattcatccttttgtgactggcttatttcactgaatagtcttcaaggttcacccatgtggtagcacgtgtcagagcttccttttaaaggctgaataatatttcaataaaaagaccctacatagccaggcacagtggctcatgcctgtaatcccagcactttgggaggccgatgcaggcagatcacaaggtcaggagatygagaccatcctggccaatgtggtgaaacccagtctctactaaaaatacaaaaattagctgggggttgtggcacatgcctgtaatcccatctactcgggaggctgaggcaggagaattgcttgaaccagggagtcagaggttgcagtgagccgagatggtgccacagcattccagcctggcaacagattgagactccgtctcaaaaaaaacaaaacaaacaaaaaaacacacaaaaaaaccctacattttgtttatccattcatccatggatggatattgggttgcttcctcctatggctgttgtgaatgatactgctatgaacatgaacatacaaataactctttgaggctctgctttcagttcttttgagtgtacacctagaagtggtgttgctggttcttagaataattccaca

SEQ ID NO: 877933 - DNA, 566 bp, Homo sapiens
gatctcctgatccacccgcctcggcctcccaaagtgctaggattacaggcgtaagccaccgcacccagccctccttctttttatttctatcgtttcttgtgtcattcctgtcttactttctgcctcactgcctgtcttttgttatttctttcctgtttgcttctttgatcttttactttttcttgtatttttttgaatggtggagaggttgtggcccagtcaaactggttcttctgcttttgatatataagcaatctttaacccaatattgaatgtacttakctttgtagaaggatgcagggcggggctacagcagacattgcatcttcctctcctgaggaagcccagcagccaccaaggtgcagctccccattcccatacccctgccagaggtgagatactgcggtgatgtgtttaaaggtaagttgatgcactcactgggattcctggtatcttcatgccaatttacatcctcctcagcccaggtgtggtcccacagaatagggataagcatagatgcagctctgcatgtttatatgattcagaattagtgctagaagaataca

SEQ ID NO: 877934 - DNA, 648 bp, Homo sapiens
tcattatttctcatgtgtactatgcaacagcgtccaacctggtcgtccttgtccttaggcttatcaaacctccatacttctaccaaagtgtctcctttagtgaattcccatttcttacaggataaaattcaaatttccttggagcccataaagttcctttcatgagcttgcctttatcttcctagcctcatcattctcccctttcccctttgcctccwataccccagccttataaaaccatttgctctttactaaatatgctccactctctcattactctgagcttttgcctagactcttccctatttctatattgcctttattcattatatgcacataataaatcattaacttttaaaatcatttaaatgccactataagcattacctctagaaaaaatgtcttcctaaaagaagagctgggtactccctcttctagttcctaggcatctgtgtgtatgcaaattaggatgttgaattccattattgaatggtaattgtctacttacttgcatgtcagtcctactggactgtgagtaccttgaaacagaaactggctctacatatttgtttccctagcaccgttctggcacatagggatgatcagtaaatttttgttgaaagaatagctatatgtgtagaagaaatg

SEQ ID NO: 877935 - DNA, 578 bp, Homo sapiens
tgcaaatttgtttgagttctttgtagattctggatattaactctttgtcagatgggtagattgcaaaaattttctcccattctctaggttgcctgttcactctgatggtagtttcttttgctgtgcagaagctctttagtttaattaggtcccatttatctattttggcttttgttgccattgcctttggtgtttcagtcatgaagtccttgcccatgcctaygtcctgaaaggtattgcctaagtcttcttctagggttttttatggttttaggtttaacatttaagtctttaatccatcttgaattaatttttgtataaggtgtaagaaagggatctagtttcagctttctacttatggctagtcaattttcccagcaccatttattaaatagggaattctttccccatttctcatttcatcagatggttgtagatgtgtggcattgtttctgaggcctctgttctgttccattggtctatatatttgttttggtactggtgccatgctgttttggttactgtagccttgtagtatagtttgaagtcaggtagcatgatgcctataactttgttct

SEQ ID NO: 877936 - DNA, 665 bp, Homo sapiens
tttaaaatctgttgtctccatatcttgatggcttttgggagcatttcacacaaggatataaaatgcggttttcttaaatgaaatgttttgtagctagaataaaatcatttttacaagtacagcattcttggaaagaatttaacacccaaaaaggggaaaatgtaatgaaaaatctcaaggttggaaatacagccttactctctctagagctggaggacaggtttgtggttgaggacttctctgtccgatgtctacattcaggttctgacttcgtatcttgaaaaaggatttcctccctgtctttttcagtgtctcataaatgctactctggattgttgtaaatattagtgagatgggaggatttacagaagaaaagcaagtcaaaaatatttcctttttgatgtaaaaaaaaaaaagccctatttcgcactaacattttattttacaagtattttaatcttatattttggtattrgaaaaatttgtctattttttcattttgaagattaaatgttgcttacattttaaaagcatgggtgaagtgtacaacaaaccaataatgataaaaaatccttctctttttctccctgtttccctttttcccttggccacagccaaatgctaattgctgctttaattacagagatgtgtaaatgtattcagat

SEQ ID NO: 877937 - DNA, 634 bp, Homo sapiens
aagtcttgaaaaagccatatgctttcaagcacactactcttctctaatctttctgtttaccaacgtctttgtcactttccttacattaaagacgttaacttgtgactcctaatacttcctgggtgactctttgtcatgtacctcttctcagtcctgtacctckggatgtcaaatgacttttactttcattcagcctcaaattctgttcccatatttataccatagagatttatatgctccccaaaatgccttaacttggaatatttcattcctctactgtcacctctgatttttctgattcacatttttatgtatctacatattagcaatgctttcactttaccaagacacccaatccattaatcatattactttttaataaatatcaatagcctcattccatcttcatgtttcttcttgcccaggttatatttcatgctcaaatattacaattgtgcccttgaaaaatacttaaatcccttatctcccttttctcctttatacccaagtaaaaaacaatcctagatgagaccaaatatcctcctttttcgttgctacatgaaagcatctacacatttctaaaggaaatcatacaactgactgagcagtttcacttgaaatctttgatgaaaaa

SEQ ID NO: 877938 - DNA, 634 bp, Homo sapiens
aagtcttgaaaaagccatatgctttcaagcacactactcttctctaatctttctgtttaccaacgtctttgtcactttccttacattaaagacgttaacttgtgactcctaatacttcctgggtgactctttgtcatgtacctcttctcagtcctgtacctctggatgtcaaatgacttttactttcattcagcctcaaattctgttcccatatttataccatagagatttatatgctccccaaaatgccttaacttggaatatttcattcctctactgtcacctctgatttttctgattcacatttttatgtatctacatattagcaatgctttcactttaccaagacacccaatccattaatcatattactttttaataaatatcaatagcctcaytccatcttcatgtttcttcttgcccaggttatatttcatgctcaaatattacaattgtgcccttgaaaaatacttaaatcccttatctcccttttctcctttatacccaagtaaaaaacaatcctagatgagaccaaatatcctcctttttcgttgctacatgaaagcatctacacatttctaaaggaaatcatacaactgactgagcagtttcacttgaaatctttgatgaaaaa

SEQ ID NO: 877939 - DNA, 574 bp, Homo sapiens
taaaatagtcatttacagctataacttctgaaagcattgcttcagcctcatcccaatattttgagtatgttttatttaccttttcattcatctcaaagtattttctcatttcttttgtgatatgtctttgaaccatttgttgtttagtagtgtattgtttaatttccacattcttgtgatatttcaaattttcttcagttattttttctatttgtattctattataggtcagagaacatattttgtatgatttcaatgattttaaattcatcaagacttgttttatggtttataatatagactatcctggagagtgtttcttgtgcacttgagtgraatgtatataatcttctgggttggtagcagtgttttacagatttctgttatgtctacttggtttatagcattgttgaagtcttttccttatttatctctgtctatatgcataattcatatccataatgattctaaattcatcaagacttgttttatggtttataatatagactatcctagagaaagtttcttgtgcacttgaatggaatgtgtataatcttctgttttggtagctgtg

SEQ ID NO: 877940 - DNA, 592 bp, Homo sapiens
atggttttaggtctaacattgaagtctttaatccatcttgaattaatttttgtataaggtgtaaggaagggatccagtttcagctttctacatatggctagccagtttttccagcaccatttattaaatagggaatcctttccccattgcttgtttttgtcaagtttgtcaaagatcagatagttgtagatatgcggcattatttctgagggctctsttctgtcccattgatctatatctcttttttggtaccagtaccatgctgttttgcttactgtagccttgtaatatagtttgaagtcaggtagcaggatgcttccagctttgttcttttggcttaggattgagttggcgatgcgggctcttttttgcttccgtatgaactttcaagtagctttttccaattctgtgaagaaagtcattagtagcttgatggggatggcattgaatctataaattaccttgggcagtatggccattttcatgatattgattcttcctacccatgagcatggaatgttcttccatttgtttgtatcctcttttatttcattgagcagtggtttgtagttctccttgaagaggtccttca

SEQ ID NO: 877941 - DNA, 636 bp, Homo sapiens
ggaccagatgaggaagggctccccgcaatgcagtatacctactctaccaaaaagcagccagactacttctttaagagggtccctgatcccattcctcctgactggatgagacctcccaaaaggggcctccagccacctcctacaagcatgttcaggctggcaatgwgtcagtaccaccctggtacagagcttccagagaaaggagctggctgccatatttgctgttttgcagccttcactggtgatacctccaggtgcaggaaaacccgaggcaactagggtctggagtagaccccaggaaaaccacagcagccctactgaagagtgtcctgactgttaaaaggaaaacaaacaagcagaaaacaacaagaacaacaacattaagaaatacctggcaaaaaccccattcaatggtcaaacctcaaagattgaaagtagataatccccacaaagatgaaaaataatcaatgcaaaaacactgaagactcaaaaaaccagagtacctcttatccttcaaatgaccacaacacctctccagcaagggcacggaactgaggctgagatggctgaattgacagaagtaagtttaagaaggaaagtaataacgaactccactgagctaaaggagcatgttgt

SEQ ID NO: 877942 - DNA, 636 bp, Homo sapiens
ggaccagatgaggaagggctccccgcaatgcagtatacctactctaccaaaaagcagccagactacttctttaagagggtccctgatcccattcctcctgactggatgagacctcccaaaaggggcctccagccacctcctacaagcatgttcaggctggcaatgagtcagtaccaccctggtacagagcttccagagaaaggagctggctgccatatttgctgttttgcagccttcactggtgatacctccaggtgcaggaaaacccgaggcwactagggtctggagtagaccccaggaaaaccacagcagccctactgaagagtgtcctgactgttaaaaggaaaacaaacaagcagaaaacaacaagaacaacaacattaagaaatacctggcaaaaaccccattcaatggtcaaacctcaaagattgaaagtagataatccccacaaagatgaaaaataatcaatgcaaaaacactgaagactcaaaaaaccagagtacctcttatccttcaaatgaccacaacacctctccagcaagggcacggaactgaggctgagatggctgaattgacagaagtaagtttaagaaggaaagtaataacgaactccactgagctaaaggagcatgttgt

SEQ ID NO: 877943 - DNA, 636 bp, Homo sapiens
ggaccagatgaggaagggctccccgcaatgcagtatacctactctaccaaaaagcagccagactacttctttaagagggtccctgatcccattcctcctgactggatgagacctcccaaaaggggcctccagccacctcctacaagcatgttcaggctggcaatgagtcagtaccaccctggtacagagcttccagagaaaggagctggctgccatatttgctgttttgcagccttcactggtgatacctccaggtgcaggaaaacccgaggcaactagggtctggagtagaccccaggaaaaccacagcagccctactgragagtgtcctgactgttaaaaggaaaacaaacaagcagaaaacaacaagaacaacaacattaagaaatacctggcaaaaaccccattcaatggtcaaacctcaaagattgaaagtagataatccccacaaagatgaaaaataatcaatgcaaaaacactgaagactcaaaaaaccagagtacctcttatccttcaaatgaccacaacacctctccagcaagggcacggaactgaggctgagatggctgaattgacagaagtaagtttaagaaggaaagtaataacgaactccactgagctaaaggagcatgttgt

SEQ ID NO: 877944 - DNA, 572 bp, Homo sapiens
tgacccagcgatcccattacggggtacatacccaaaggattataaatcatgctactctaaaggtacatgtacacgcatgtttattgcagcactattcacaatagcaaagacttgaaaccaacccaaatatccaacaatgatagactggattaagaaaatgtggcacatatacaccatggaatactgtgcagccataaaaaaggatgagttcatgtcctttgcagggacatggatgaagctggaaaccatcattctgagcaaactatcacaagracagaaaaccaaacaccgcatgctctcactcataggtgggaattgaacaatgagaacacttggacacagggcagggaatatcacaccccagggcctgtcatggagcgggggcctgggggagcgatagcattaggagaaatacctaatgtaaatgacgatataatgggtgcagcaaactaacatggcacatgtatacctatgtaacaaacctgcacattgtgcacatgtaccctagaacttaaagtatttttttaaaaagtaagactcaataaaagagaaaatactaaagtaagttattg

SEQ ID NO: 877945 - DNA, 572 bp, Homo sapiens
tgacccagcgatcccattacggggtacatacccaaaggattataaatcatgctactctaaaggtacatgtacacgcatgtttattgcagcactattcacaatagcaaagacttgaaaccaacccaaatatccaacaatgatagactggattaagaaaatgtggcacatatacaccatggaatactgtgcagccataaaaaaggatgagttcatgtcctttgcagggacatggatgaagctggaaaccatcattctgagcaaactatcacaagaacagaaaaccaaacaccgcatgctctcactcataggtgggaattgaacaatgagaacacttggacacagggcagggaatatcacaccccagggcctgtcatggagsgggggcctgggggagcgatagcattaggagaaatacctaatgtaaatgacgatataatgggtgcagcaaactaacatggcacatgtatacctatgtaacaaacctgcacattgtgcacatgtaccctagaacttaaagtatttttttaaaaagtaagactcaataaaagagaaaatactaaagtaagttattg

SEQ ID NO: 877946 - DNA, 535 bp, Homo sapiens
cctgaagctgaaagagtgataaatgttttgttttgttttagtaatttaatgaagacattctctctcactctgtcttactctgtctctctcatctttttcggtcccttattatctgtctcttaactttttttttttccccataaacagccttagtctgatgagcaaataatgattgctgaaggtgtgcagaggaaacgggtgaggagtgtagagaaggatgtacgtttctctcctaagactgaacatcatcagtcttcttaattctcagtaagtgaaaagaaaccctttcatggtgggttcacagctgacccttctmtaattcaattcaaatacaaatccacccatttaccttggatatgggatctctcataattactgcagttttttttttttgataagaactgcacctgattttatttatggttctcaactcaggatatatattagaattatttaagaagccttaaaaattctgactttcagaccactccaataatgaattcaatcagaaactctagatgtgtgctgtggtggt

SEQ ID NO: 877947 - DNA, 602 bp, Homo sapiens
gtttgtgaagagagaaaccttgacttcctttcttcctatttagatgccttttatttctttctcttgcctgattgcactggctaggatttccagtattatgctgaataggagtggtgagagtggacatccttgtcttgttccagttctcaagagaaaatgcttacagcttttgcccattcagtatgatgttggctgtgggtttgtcacagatggctcttactattttgaagtatgttcctttgatgtctaatttggtgagggttttttaatatgaagggctgttgaattttatcaaaagtcttytctgcatctattgagataattatgcagttttcatttttaattctgtttatgtgggaaattgcatttattgatttgcgtatgttgaaccaactttgcatccaggaataaagcctatttgattgtggtgggttaactttttgatgtgctgctggattaggtttgttagtattttgttgaagatttttgcatcgatgttcatcaggaatattgtctgaagttttcttttttggttgtgtctttgccaggttgtggtgtcagaatgatgctgggttcatagaatgagttagggtggaatctcc

SEQ ID NO: 877948 - DNA, 541 bp, Homo sapiens
ctttcatagatgccctttatagagttgagaaagttcccttttattcctatattgccgagagcttttatcaggaatggaggttggatgtcatcagtgctttttctgtatctattcagaaaatcatgtggtttttcttttgtagtatgttattgtagttraccatcaaaccaacctttcgttcctgggattaatcctacttggtcataatgtatattcctttttgtacatgtatttgtgtgtttgatttactaaaatttggttaagaaattttgcttctatgttcatgaggactattggtctaaagttttattttcttgtaatgtctttgtctggttttggtgtctgggtaatgatgacctcagaatgagtttggcagtattgacttcttttttgatgttctgtaagacttttgtagaattggtattaattcttccttaaatctttggcagcactcatcagtgaagccacctttagttggttttctttgtgggattgttttgttttgttttgagatggagtcttgctctgtcacccaggatgg

SEQ ID NO: 877949 - DNA, 645 bp, Homo sapiens
ttttttggggggtcagtgatagtttatttgtaaccataagtaaaataaaatgaaaatgtcaaataataaatttctttttattgtctgggtctatagtccatctctgttccttactctagatgataccactgaagaaagactaattagtttaaccaggttgtaattctgatttttttttttccttgtttatgaaacacacatagtatggaaatattagcctagggagttttcctctcttttttttgtaagagtataatcggttatttatgcaaatatttattgtatatttgtgtttctcatgcgtaacagagtaaaatagttcgtgtgctgaacctttggcaaaaaaatggagtgttcaaaattgaaatyattcaacctcttttggacatggcagcgggaaccagtaatgcagccccagtagcagaaaatgttaccaataatgaaggtatggtcagatgtatctgtgagctcacacaatggtatgattttttgcacatgaaacagtcagagtttatgtgtattgaaggaatttttctataagaaggaaacttgagtttacatcttggaaggtatgattttctttccataattcctatttataataaaggtctgctcttctggtagttgttacagtataaactctag

SEQ ID NO: 877950 - DNA, 552 bp, Homo sapiens
tccacatcagaagcgacttcacagatcccgagtctctacatttctgagatattgtttggtttcatttttttttctctccaggttccaggttccataatctttttaagaggtataggatttgggaaacatagtatggagcatgaaatttctctctctctctctgtttctctctctmtatatatatatgtatatataaatatatacatatatatttttaaattatcagattagtgattaagacagatattagaagagaaacaacaaaactgttatttttctttcaccattcatagaattactggtacttctatattaagaaacaaaataaaagcaatcatttaaacataagaagtagtatgatagatatatttttgataaaaatcaagtaaatatttgtctctaaattcaaactacccacagtgcaatcagtaagtattagaaaacaggtaaagacttgttttatgtgctctggctatatgtcagacacagaagaaacaagtagagctgataacccctaacttttaaggtctattctagacgtaaagatgcagt

SEQ ID NO: 877951 - DNA, 606 bp, Homo sapiens
ttggggtggagagttctgcagatgtctattaggtccacttggtccagagctgagttgaagccctgaatgtccttaattttctgtctcgttgatctgtctcatattgacagtggggtgttaaaatctcccactattattgtgtgagagtctcagtctctttgtaggtctctaagaacttgctttatgactctgggtgctcctgtactgggtgcatatatatttagaataattagctcttcttgttgcattgatacctttaccattatgtaatgcccttctttgtctcttttgatctttgttgatttaaagtctgttttatcagagactaggattgcaacccctgctctttttttgctttccagttgcttggtaaatattcctccatccctttattttgagcctatgtgtgtctttgcacgtgaratgggtctcctgaatacagcacaccattgggtcttgactctttatccaatttgccagtctgagtcttttaattggggcatttatctcattttgtatgcatatggctagctaggtaccctgaaaaattgaatgaatattacattttccccaagtaatttgaatgccattcttatcatatattta

SEQ ID NO: 877952 - DNA, 595 bp, Homo sapiens
tcagtggagtgttgaagtttccccctattattgtgtgggagcctaattctctttgtaggtgtctaagaacttgctttatgaatctggatgttcctgtggtagttgcatatgtatttagggtagttaggtcttcttttcaaattgaatcctttaccattatgtaatgcccttctttttctttttctttttcttttttaatatttgttgctttaaagtttgttttgtctgaaattargattgcaacccctgcttttttttactgaattccatttgctcagtagattttcctccttgtctttactttgagcctatgggtgtcattgcgtgtaaggctggtctcttgaagaccacatatcaacaaatcttgcttttgtatccagcttgtcactctgtgctttttaaatgagacatttagcctatttacattcacagttagtattgatatgtgtggatttgatcctgtcattatgttatcagctggttattatgccaacttgtttatgtggttgctttacaatgtcacttgtctatgtacttaagtgtgtttttttattggctggtaatggtctttctttttcatatttagtgcttgttt

SEQ ID NO: 877953 - DNA, 659 bp, Homo sapiens
gatagttacaaaataatggtgggggaattcaatactccactgacagcacgaggcaggtcatcaagacaaaaagtcagcaaagaaacaatggacttaaactataccaccttctattcatcagcacataaaacattcttcaaaatagaccatatgataggctacaaacaagtctcaataaatggaagaaaatcaaaattatatcaagtactctctcagaccacagkggaataatactggatatcaatttcaaaagtaatccttaaaattatgaatatgcatggaaattacataacctgctcctgaattatcattgggtcaacaaaaaaaaaagatgaaaattaaaaaaaaaattaaactggacaagtatagtgacacaccctgtcaaaacctctaggatacagcaaaagtggtgctatggggaaatttcacagcattaactgtctacatcaaaaggtctgaaatagcacaaaaaaacaatctaaggttacacttcaaggtattagagaaataagaacatatcaaacccaaacccagaagaagaaaagaaataacaaagatcagagcagaattaaatgaaattgaaaccaaaaaataatacaaaagataaatgaaacaaaagctgattatttgaaaagagagaaaaaattgatataatgtta

SEQ ID NO: 877954 - DNA, 607 bp, Homo sapiens
tccagcctgggcgacagagtgagacattgtctcaaatcaaaaaaaaaaaaaaaaaaaaaaaaagaaaaaggaaaaagacagaaatatcaggcttcaattgacataggactgcaccttcttaaactagacattaggccaaatcattctgttatgacataccataaacatttacgtttttcttcctaraaaaactgattttcctcaatgaagaacgtttttatcaatggtttcaattcattattccttgtaagttactgataattttcattttagaatttagtagcttgctttttaaaaaaatatacttgtatttagatacagcaaatgattctggttacactaagaacataaagctttgtcttacattaactttattaagttaaaaaaggtgaatctatctgatgagctagcaaatggcaaacatgggcagggtctgggaggagtgggcaggcacctggcgtcctccaggaaagaactgggtcctgcccaacagtatggactccatctaagcaggggtccatcagagcctggtcagaaccaggcagggtcatggctgaacctcccctccttgctactgtctgcagtgaggtcaacccgcgagtccagt

SEQ ID NO: 877955 - DNA, 651 bp, Homo sapiens
ggtgtccaggggcacagcaaagttaagtcaggtgtactgcaggtcctcatctggctcctgtggtcagtcccaaaaagcctaggagattctggacacagaggcatgtaagcagagcctgtcaacatctgcacagccctcacaggaagttaggagagcaactgggaaggtcctggtgtttctatcagacttgtattagggacagtgtcagcctctgcctgctgtcctggaagggggctgtggcccagagcccaaagaccttttacaggagcaccagggccaggtccctttgttcttgagcgttctgaatcttcagtggtgtaaactgcgartcagaactggagatgagggtttgatgcctttgtgaagttctctgtagactcgtggaggaaagcactgtgcagggatgaagagctggacataagataccattttcactagggttttgtggttttccagggtctcctttattatctgagaaggaaatggcactggaatgatgcagcttctcatgggacctgccatttatgtgtcatttgcagttgagaaactgaatctatgcctgatacggctgttgttcaaaaattatatctgagggcatttttaactcacttaagagactggttaagattcatcggcgaatcagagctttgg

SEQ ID NO: 877956 - DNA, 651 bp, Homo sapiens
ggtgtccaggggcacagcaaagttaagtcaggtgtactgcaggtcctcatctggctcctgtggtcagtcccaaaaagcctaggagattctggacacagaggcatgtaagcagagcctgtcaacatctgcacagccctcacaggaagttaggagagcaactgggaaggtcctggtgtttctatcagacttgtattagggacagtgtcagcctctgcctgctgtcctggaagggggctgtggcccagagcccaaagaccttttacaggagcaccagggccaggtccctttgttcttgagcgttctgaatcttcagtggtgtaaactgcgagtcagaactggagatgagggtttgatgcctttgtgaagttctctgtagactcgtggaggaaagcactgtgcagggatgaagagctggacataagataccattttcactagggttttgtggttttccagggtctcctttattatctgagaaggaaatggcmctggaatgatgcagcttctcatgggacctgccatttatgtgtcatttgcagttgagaaactgaatctatgcctgatacggctgttgttcaaaaattatatctgagggcatttttaactcacttaagagactggttaagattcatcggcgaatcagagctttgg

SEQ ID NO: 877957 - DNA, 514 bp, Homo sapiens
caaggcacaatcaccaagaatcaacagaagctgaaagatggaaaaaaaaataattctttcctaaaggcttcagaagaagcatggccctgtggcagccggatttcagactcctgacctctagaaatttgagggaataaatttctattattttaaactataaagtttatggtaatttgttttagcaaccataggaaacaagtacagacatgttcagaaactaaagcaaacaaaattatgactaagtctgaagaaatkgtgaattcctaccaagacataaaatgacatgatcaaataccctgtaactgacatgtaagtaaaatttacattatcagaataatataaatctgaatactaatctatagtgtatccaaaatcacaatctaactatattgtgatgtggaaaaaggaaactaggattgagtaaaatgaggatggattgaaagagatcaaaattctcattaatagacaagttccaaaataagaaatcaagaagtagttatataagtaatattta

SEQ ID NO: 877958 - DNA, 661 bp, Homo sapiens
tttcttattgatgaattttcaattagaaaatcaataaaaatacttgtgtcaaagaaatatttgtatactgtttcacacttactagattggagatacgaatttaaagttgtagaaaattccttaactcaatttgctatttatttatatttttaataaaaattatttttttctaaaatagtcaagttggtagtaaatatgtatttattatgttttactatttttacttttaaagaactaagctaccagtttttacacaataagaaaatgaaagcattatcaatttcacctaagttatctgccacaaaagttgctaaactcatggcttaaactcctaacatatcattcacttttatgtaaatgagttgcagagtagtaggcttttcacatatcacatttgaaaatattttcagtactaaaattgtatcctgkctttattagttgttgaatttaaattgggcttctatcaacttattttctattctccacattagtgcagcaggattcagaccgcttaatatataacagtattagtgaagacctgtgtagctccatcataactgacttgtggctgttataatggagctccaattttaacagaactcacactagagttctatactgctagacatatatctgcagttaaaaccttgcacattataga

SEQ ID NO: 877959 - DNA, 604 bp, Homo sapiens
tctaaaaatcatataaaacattgacatatgaatgtgcattttaaggaaaaaagtggtcataatatatttctaatgcctctgaggaaggtactggcacttaaagttggttttaaatattttatagtggccaggcgcggtggctcatgcctgtaatcccagcactttgggaggccaaggcaggcggctcacaaggtcaggagattgagactatactggctaacacggcgaaaccctggctctactaaaaaaaaaatacaaaaaattagccagtcgtggtggcaggcgcctgtagtcccagctactcgggaggctgagatgggagaatgccgtgaacccgggaggcagagcttgcagtgagccgagatcttgccactgcactccaggccgggcgacagagcgagactctgtctcaaaaaaaaaaaaaaaattatagtgacccwctacagctattggaataatctttgtcaatctatatgtgattgattgaggttgagtttgaaaaatttcaggtagttcatggcacatgtatttcaacaccatttttccaagtcattggatacctaccgtgcattttctgtattttcagcagtaatattggctcagc

SEQ ID NO: 877960 - DNA, 613 bp, Homo sapiens
aagatacaatggggttacatgcattgggtaaatactcccattccaaatgggagaaatcagctgaaacaaaggggctacaggcctcatgcaagtctgacactcagcagggcagtttttaaatcttaccactccaaaataatccctttttactccatatctcatatccagcacatgctgattcaaaagataggctcccaaggcctttggaagctctaacccttctgttctgcagggtagagcccctatggctgtgttcacaggctgacattgagtgcctacagcattttcaggtgcacagaacaagctgtcagtggatttaccattttggggtctggaggatrgtggcccttttctcacagctccactaggcagtgccccagtggggactctgcttgtgcactccaatgccacatttccccttcagactaccatagtagaggattttcacgagggctctgcacttgcagcaggcttctgcctggacatccaggcatctccatacatcctttgaagtcaggtggaggttcccaaacctcagctcttgcctcctgtgcacccaaaggctcaatatcacactgaagctgccaaggcttgaagcttgcaccctctgaag

SEQ ID NO: 877961 - DNA, 622 bp, Homo sapiens
gtcaggagttcacgaccagcctggccaatgtggtgaaaccctgtctccactaaaaatacaaaaattagccgggtgtggtggcagacgcctgtaatcccagttactcaggcgtctgaggcaggagaattgcttgaacctgggaggcagaggttgcagtgagccgagactgcgccgttgcactccagcctrtgcaataagagcgaaactccgtctcaaaaaaagaaaataggtaaatattgtttaataggaacttgaaaatatacactttaaaataatgccatagtgcaaaactaagtattttctaactaggaattgttagcatttggttttaaaatttaggctgagcacggtggctcacacctgtaatcccagctctttgggagatcaaggtgggaggatctcttgagcccaggactttgagaccatcctggacaacatagtgagaccctgactctataacaaattttaaaaattagccagatgtggtggtgcatgcctgtggtctcagctacttgagcctgagatgggaagactgcttgagcccaggaggtcgaagctgcagtgagctgtggttgcacggctgtagtctagtctgggcaacagagtgagaccctttctcaaa

SEQ ID NO: 877962 - DNA, 558 bp, Homo sapiens
ttaagtagttttcacaatattacacacagttagttacattgttattgttatttttatataatgaaactgagaaccagaaaagttatcatagtgtgagaaactcagaggccactatggatctgggcaacaaaagagatttggtttgactgtaagttgttttctttgtctggttcctgacctgttctaaactgaaagcagaaaacagrtatcagccttgggaaacaggcctactcaacagctcctcaagcataggaccatgctaattacatggaaaatgttaaggataagtagaagttgaacaagtgaataaggaatttatggacaatgctcatgctcttaaactactcattttattaccttggcatttctttagttctttcttctagaaaatcacctataaaaaaactcaaagacactaattcatatggcagattaactctcttgtagacaaccacaagtgttaccccacccaacgtatttatttaaaggaaaaagcttggtaactgtaaggcggcatttccaaaagtatattccataatcatggccacaaaataagaa

SEQ ID NO: 877963 - DNA, 691 bp, Homo sapiens
gcaagatatctggaaaatccttctaaatatttggaactgaataacatacttctaaataactcaaagtcaatgaagaaatcaaaagatatattaatcagaaagtattttaaagtaaatgaaaacaaaatcacaacatgtcaaaattgtcaaatgctcttaaagcagcacatagaggaaattttatagcaccaaatgcctacattatgaaagaagaaaactctgaaattatctcagcttccaccttaagaaactagaaaacaaagatcaaattaaaccccagtgaaagggggagtaaaagaaataataaaaatcaaagctgaaatcaataaaataaaaaacagaaaagcaaaagagaaaatcaacaaaagtaaaacctagttctttgagaagatcagcaaaayggatcaacttctaactatacttaccaggaaaaaaagagagaagacacaaattactggtattagaaatgagagaagtgatatcgccataaaatctatagatttttttacaggtaaatgttaataaaaactttatgccaataaatttgataacctagatgaaatgaagaaactgctaaagcttattcaagtagaaataaataacctgaatggacctatatattttaaagcaattaaattatagttaaaagctttcccattttaaaaaacctccaattccagatggtttcaat

SEQ ID NO: 877964 - DNA, 589 bp, Homo sapiens
aaagggaagtgtatgaattctgagtagtgagttggttggtcagtggcgtgtgaagtaacctgatgaagcttagcgtgggttttttattttactgggggcagcatattggggaagagaaggataaccttactaaaccgcttgggtacsccaaccctgtgcaatagatattagcaacatagctaaccatacatggttagtaaatacaacccacacctaactgatgcatgtaaacattccacattacagtgaaatatattggtgtattaatgcattttaataattatggtattattttgatacctttcaaagtgtttggaataattgtgcagatagtcagatcaaccaaaacctaccagttaaatactatcctttaactgctttcttaacctaaaccaatcttggaaaggtaggattagaggccagaaagttaggattaaagtgtgttggatggatagatcagcacaatttcatccatgttggtggtaaggcttttcattaagtgtgttgatgcttcccttttaaattgtttccgcttaaataatctaactgtcctttctcaagcatattggtcaagatgatcaataccaga

SEQ ID NO: 877965 - DNA, 589 bp, Homo sapiens
aaagggaagtgtatgaattctgagtagtgagttggttggtcagtggcgtgtgaagtaacctgatgaagcttagcgtgggttttttattttactgggggcagcatattggggaagagaaggataaccttactaaaccgcttgggtacgccaaccctgtgcaatagatattagcaacatagctaaccatacatggttagtaaatacaacccacacctaactgatgcatgtaaacattccacattacagtgaaatatattggkgtattaatgcattttaataattatggtattattttgatacctttcaaagtgtttggaataattgtgcagatagtcagatcaaccaaaacctaccagttaaatactatcctttaactgctttcttaacctaaaccaatcttggaaaggtaggattagaggccagaaagttaggattaaagtgtgttggatggatagatcagcacaatttcatccatgttggtggtaaggcttttcattaagtgtgttgatgcttcccttttaaattgtttccgcttaaataatctaactgtcctttctcaagcatattggtcaagatgatcaataccaga

SEQ ID NO: 877966 - DNA, 589 bp, Homo sapiens
aaagggaagtgtatgaattctgagtagtgagttggttggtcagtggcgtgtgaagtaacctgatgaagcttagcgtgggttttttattttactgggggcagcatattggggaagagaaggataaccttactaaaccgcttgggtacgccaaccctgtgcaatagatattagcaacatagctaaccatacatggttagtaaatacaacccacacctaactgatgcatgtaaacattccacattacagtgaaatatattggtgtattaatgcattttaataattatggkattattttgatacctttcaaagtgtttggaataattgtgcagatagtcagatcaaccaaaacctaccagttaaatactatcctttaactgctttcttaacctaaaccaatcttggaaaggtaggattagaggccagaaagttaggattaaagtgtgttggatggatagatcagcacaatttcatccatgttggtggtaaggcttttcattaagtgtgttgatgcttcccttttaaattgtttccgcttaaataatctaactgtcctttctcaagcatattggtcaagatgatcaataccaga

SEQ ID NO: 877967 - DNA, 576 bp, Homo sapiens
  misc_feature 549: n = A,T,C or G
ctaccattgactctcttcgcagaattagaaaaaactactttaaatttcatatggaaccaaaaatgagaccatatagccaagaaaatccaaagcaacaagaacaaagcgggaggcatcacactacctgacttcaaactataatgtaaagctacagtaacaaaaacagcatggtactggtaccaaaacagatatatagaccagtggaaaagaacagaggcctcagaaataacaccacacatctacaaccatctgatctttgaccaacctgacaaaaacaagcaatggggaaaggatttcctatttaataaatggtgttgggaaaactggctaaacatacacagaaaatggaaactagaccccttccttacaccttatacaaaaattaactcaagatggattaaaggtttaaacatwaaacctaaaaccatgaagaccctacaagaaaacctaagcaatactattcaggacataggtgtaagaaaagacttcatgactaaaacaccaaaagcaatggcaacaaaagccaaaattgacaaatgggatctcatntagactaaagagcttctgcagagcaaa

SEQ ID NO: 877968 - DNA, 601 bp, Homo sapiens
  misc_feature 358: n = A,T,C or G
ttcctcaaggggaccagtcctccccttcattcaaggggttctgggtctgtaaactggctcaagtctggaaattgactgagggtccgtgattctctgtttttataattcaaattagtcttttatacatttgaactagaagttttctgcttatacaaagtaggaatgcgataggcttcctatcaatttcacttctaggaacacygtgactaattagccagtgccagagctctacacgagtcagactattctgattgccactttgcctctgctgtccattacggtcgctacacccaccttgcctttgatggttgagtgctaccacttggtccctgacacctcgggatccaattattcccantgtatttaaattttgtaattgagtgacttcagttcccgctgttgcatctgacatacagagaagagcaattacaaggctcttcagagatgcaggtgctgccctcacgaatctatttgcaaggcattggtcaagggtatatcttctggacccttccagctgggatgagtacatctaaagtgactaatccactccaccatcccaatctctctaagccttttgatcccttcctctacattaaaccaa

SEQ ID NO: 877969 - DNA, 633 bp, Homo sapiens
gaagaatcaatattgttaaaatggccatactgcccaaagcaatgtacagattcaaattacctatcaaattaccaataatgttcttcacaaaattagaaaaaactattttaaaattcatatggaaccaaaaagagcctgaatagcaaaggcagtcctaagtaaaaagaataaacctggaggcatcacattacccaactttgagctatactgcaaggcaacaataaccaaaacagcatggtactggtacaaaaacagacacatagaccaatggaaaagaaaataaagcccagaaataatgccacacacctagaactatctgaacttcaacaatgttgacaaaaacaagcaatagggaaaggactacctatcaataaatgatgattggataacaggataaccatatgaagaagactgaaactagactcctttattataccatayacaaaaatcaactaaagatggactaaggagttaaatgtaaaacccaaaactataaaaaaaaatctagaatataacttaggaaatatcattctggacataggccctggcaaagatttcatgatgaagatgccaaaagcaattgtaacaaaaacaaatattgataagtggtacctaattaaagagcttctgcag

SEQ ID NO: 877970 - DNA, 599 bp, Homo sapiens
ctcaaggggaccagtcctccccttcattcaaggggttctgggtctgtaaactggctcaagtctggaaattgactgagggtccgtgattctctgtttttataattcaaattagtcttttatacatttgaactagaagttttctgcttatacaaagtaggaatgcgataggcttcctatcaatttcacttctaggaacacygtgactaattagccagtgccagagctctacacgagtcagactattctgattgccactttgcctctgctgtccattacggtcgctacacccaccttgcctttgatggttgagtgctaccacttggtccctgacacctcgggatccaattattcccattgtatttaaattttgtaattgagtgacttcagttcccgctgttgcatctgacatacagagaagagcaattacaaggctcttcagagatgcaggtgctgccctcacgaatctattttgcaaggcattggtcaagggtatatcttctggacccttccagctgggatgagtacatctaaagtgactaatccactccaccatcccaatctctctaagccttttgatcccttcctctacattaaaccaa

SEQ ID NO: 877971 - DNA, 623 bp, Homo sapiens
gctctttaattaggtaccacttatcaatatttgtttttgttacaattgcttttggcatcttcatcatgaaatctttgccagggcctatgtccagaatgatatttcctaagttatattctagatttttttttatagttttgggttttacatttaactccttagtccatctttagttgatttttgtrtatggtataataaaggagtctagtttcagtcttcttcatatggttatcctgttatccaatcatcatttattgataggtagtcctttccctattgcttgtttttgtcaacattgttgaagttcagatagttctaggtgtgtggcattatttctgggctttattttcttttccattggtctatgtgtctgtttttgtaccagtaccatgctgttttggttattgttgccttgcagtatagctcaaagttgggtaatgtgatgcctccaggtttattctttttacttaggactgcctttgctattcaggctcttttttggttccatatgaattttaaaatagttttttctaattttgtgaagaacattattggtaatttgataggtaatttgaatctgtacattgctttgggcagtatggccattttaacaatattgattc

SEQ ID NO: 877972 - DNA, 665 bp, Homo sapiens
gtgaatttgtcatagatggttcttattattttgaggtatgttccatcagtgcctagtttgttgagagtttttaatatgaagggaagttgaattttatcaaaagtgttttctgcatctattgagataatcatgtggtttttgtttttagttctgtttatgtgtcaratcagatttattgatttgtgtatactgaaccaatcttgtattccaaggataaagtctacttaattgtggtggattagctttttgatgtgctgctgaattcagtttgctagcattttatcgcggatttgtgcatctatgttcatcaaagatattaacttgaagttttctttttttgctgtgtctctaccaggttttggtatcaggatgatgctggcctcatagaataatttacataggagcccctcctcttcaattttttggaatagtttcagtagaaatggtaccagctcttctttatacatttagtagaattcagctatgaattcttctggtcatggttttcttctggttggtaggctttttattattgactcaatttcagatcttgttattggtctgttcagggattcaatttctttctggtgcaatcttgaggggttgcatgtgcctaggaatttatccctttcttctaatttgtgtacgtagaggtgttcatagca

SEQ ID NO: 877973 - DNA, 622 bp, Homo sapiens
ggctacagtaaccaaaagagcatggcactggtacaaaaaaagacaccaaaatgatggaacagaaataagactatacacctacaaccatctgatcttcgacaaaccaggtaaaaacaagcaatgcagaaaggattccctatttaacaaatggtggtgggagaactggctagccatatgcagaaaattgaaactgaatgccttccttacactttattaaaaagaaactcaaagacttgaaggtaaaacccaaaattataaaaccctagaagaaaatctaggcaataccatccagggcatagacacaggcaaagatttaataatgaaaatgtcaacatcaattgcaacaaaagcaaaaattgacaaatgggatctatttaaactaaggagcttctgcacagcaaaagaaactatcatcaaagtgaacaggcagcctagaggatgggagaaaatctttgcaatctacccatttgacaaaggtctaatrtccataatctacaagaaacttaaacaaatttacaagaaaaaaacaaccccattaaaaagtgggcaaaggacatgacacttctctaaagacatttatgaggacaatgaacatatgaaaaatagctcaacatcatcgatt

SEQ ID NO: 877974 - DNA, 573 bp, Homo sapiens
atttctatttgcttttggtttcaattataaactttaaataactttgcaaaacgttgcccacctaagtaaatcacgaggtcaggagatcgagaccatcctggctaacacggtggcactccgtctctactaaaaacacaaaaaattagcctggcgttatggtgggctcctatagtcccagctacttcggaggctgaggcaggagaatggcgtgaacccgggaggcggagcttgccgtgagccaagatcackgcactgcactccagtctaggcgacagagcgagattccatcaaaaaaaaaaaaaaaaaaaaaaattgttgcccacctaaaatgtgacatatcttcttttgaaggatgaatttgccttcaaacaatgggaccagctcatctttgtcttctattatttgcctctaatgttaatgtcatcttaaatcttgaaatataaaatcgatatttgccatgtttatgagttacatagctgaaaattgactaagtctaaaacaagtttcctgaatattgcttcaacatttttaaacaatatgcaaataatatcaaattactaaaaagtaaatgat

SEQ ID NO: 877975 - DNA, 595 bp, Homo sapiens
cccttagacaagttgtcttgcctgctgccatgtaaaacgtgactttgctcctcatttgccttctgccatgattgtgaggctgccccagccacgtggaactgtgagtcaattaaacctctttcttttatgagttacccagtctcaagtacatctttattaccagtgtgaaaataaactaatacacctccwtactgagacttctcttcctcaaggacacaaaattgagattgaattagatccctttatacacgtattgttctgggaagaatgcataatgatctctctttaggcatgttatcatctatgaatgttctagcaaggaaatgcattgaatttgtcctgtgtttctttgccatattcctataattttattgtttcagagttattttatattgtagttcaaggcaagatttaccattatcagagataacacctgcttcctagtccccttactctttttcactctttagtttcttccatatattgtcctcaatagttttttttcccccaattactattgtaagcatttttttttaagaatgtcatcaccttagggttgtttcctaaataaatattggattggcatctgctctat

SEQ ID NO: 877976 - DNA, 619 bp, Homo sapiens
tatacttgtattagtcagggttctctaaagggacagaactaataggatagatgtacaaataaaggggagtttattaaggagtattgactcacacgatcacaaggtgaagtcccacaataggtcgtctgcaaggtgaggagcaaggaaacctgtccgtgtcccaaacctgaaaagtagggaagccaacagtgcagtgttcggtttgtgatggaaagctggagagcccctggcaaaccactggtgtaagtccaagagtccaaaagctgaagaacttggagtctgatgtttaaagggcaggaagcattcagcacaggagaaaaatgaagtccagaagactcggcaaatytgctctttccatcttctgtctacttgatttgagccatcctggcagctattagatggtacccacccaaattgagggtgggtctgcctttcccagtccactgacacaaatgttaatctcctttggcaacaccctcacagacacacccacgaacagtactttgcatccttcaatcaagttgccactcaatattaaccatcgcaatgcttaatattataaaatacttattttaaagaccatagattaattgtaaaatcaattgtgaaatcaattaat

SEQ ID NO: 877977 - DNA, 600 bp, Homo sapiens
tacaatgtggcaaataaactgaagcgatcaaaacaggagacaggaagaccagtaaggaggctaatgctgtaatttaaagaagaaaaattgtgagacataaacgaagaaaataatactgggaataagaaaagagaaaagagtcaaaaggtaagtaaaacagaattgttaagattttattgcacattaaccacagagataaaagagaccccaggttttaacaatgtgtgagcgtaagggtatgggttaactgagacagtgaataaaggaggaaaagcatattagatgagcatgagctcagtttggaacacatccaaattacctatggaacagtcaaggagaaatgtctaataggagactaatcgctcctccctctctcttctctctgtctgtctctttctcataaatatatatatacatatatatatatatatatacatatatatacatatacatatwcatatatatatatgaagagtcattgcagtatggtccctgaaatcatacagttagaaacattattacttaaagtggaaaaaaatctaatcccaaatgtacagtaggagtagtcagaaagatgagaagaaagccaagagaatatga

SEQ ID NO: 877978 - DNA, 600 bp, Homo sapiens
tacaatgtggcaaataaactgaagcgatcaaaacaggagacaggaagaccagtaaggaggctaatgctgtaatttaaagaagaaaaattgtgagacataaacgaagaaaataatactgggaataagaaaagagaaaagagtcaaaaggtaagtaaaacagaattgttaagattttattgcacattaaccacagagataaaagagaccccaggttttaacaatgtgtgagcgtaagggtatgggttaactgagacagtgaataaaggaggaaaagcatattagatgagcatgagctcagtttggaacacatccaaattacctatggaacagtcaaggagaaatgtctaataggagactaatcgctcctccctctctcttctctctgtctgtctctttctcataaatatatatatacatatatatatatatatatacatatatatacatatacatattyatatatatatatgaagagtcattgcagtatggtccctgaaatcatacagttagaaacattattacttaaagtggaaaaaaatctaatcccaaatgtacagtaggagtagtcagaaagatgagaagaaagccaagagaatatga

SEQ ID NO: 877979 - DNA, 508 bp, Homo sapiens
aattggtaactagaataaccagtttagagaagaatgtaaatgacctgatggagctgaaaaacacagcgtgagaacttcgtgaagcatacatgagtattagtagccaaatcgatcaaggggaataaaggatatgagagattaaaratcaacttaatgaaataaagcgagaaaaaagaatgaaaaggaatgaaaaaggcctgcaggaaatccaggactatgtgaaaagaccaaatctacacttgattggtgtacctgaaagtgacagggagaatggatccaagctggaaaactctttaggatattatccaggagaacttcccaacctagcaagacaggccaacattcaaatttaggaaatacagagaacaccacaaagatactcctcgagcagagcaaccccaagacacataatcgtcagatacaacagggttgaaatgagggaaaaaatgttaagggcagccagagagaaaggtcatgttatccacaaagggaagctcatcagactaac

SEQ ID NO: 877980 - DNA, 578 bp, Homo sapiens
gtgcaaaggacatgatttcactcttttttatggctttgtagtattgcatggtgtatacataccacattttctttatccagtgtaccactgatagatacttaggttgattccatgactttgctattgtgaatagtgstgagataaacatacaagtgcaagtgtccgtttgataaaataactttttccctttgggtagatacccagtgatggaattgctgggtcaaatagtaattctatttttagtttgctgagaaatttcccatgctgttttgctgtaggggttgaactactctacattcccaccaacagcgtgtaagcatttccttttctctacatccatgccaacttctgctattttttgactttttaataatagccattctgactggtgtgaaatggtatcgcattgtggttttagtttgcgtttctctgataattagaaatgtatatttttataaaatatgatactttcatacttgattttggcattatgtagagaacaattcaaaacgaaagggtttgaactaatgtagacaaaacacagctctgccagttatgagctgtgtgaccttcaacag

SEQ ID NO: 877981 - DNA, 543 bp, Homo sapiens; identical to SEQ ID NO: 869237

SEQ ID NO: 877982 - DNA, 661 bp, Homo sapiens
attttaaaaaattgaactgtctagttatgattgttaaaaaagaaactatcactatattagaaataggaatacactttctaaatgtgagaaaggtgtttttatattgaatgaaaaaatgttgtaagagcattctcagagattagaaattaaaacaacaggatgtctgctcttaccattgttattcaacatgatactggaggtgctagtctgtgcactgaggcaagagatagccagaaaagcgtgtatcattttcaagtgccagaataatgaaaatgctcaaaaaagcaaaaaggatggggcatatcagagagatataraagtgaccctgatataaaataaataacatggtattggcttacaacccaaagtataaaatcaatatacatgaggttacactgatataaataaatgattaaatgaacaagtaaatacaaaagaaagaagaaggacaactctttgtagaagaattccagataatatgaatagatactgtctcttccaggaattggaccttagtgtctacctcccaggccaccttgtgcctggcctggacttagtgattcacatgcaagactagagtattgaaagccgggaaagagtatctgtgtggtagagaaacctagcaaacgcctccttgaccacatgatcaaggtgaacatca

SEQ ID NO: 877983 - DNA, 593 bp, Homo sapiens
aagttgtaacacgttttgattgtatttgcataaatgtagtcagcacataagctctctctcttttcctctcctttcttccctcctccatgttctctatctctctttttctctctcatacatgtataataaaaatatatacatttttaacaataaaaaattacttaatcctcaggttagactgacatttttatacacaggcattttgtctctaagtgaatattcttagagtatatttgcatatataatctaataaatataaaaatatatggcatgaacatgtgtgtgttatcattgtacatatatgctgargttttaaagagttgataatataaaatggttaatgccaaatgtgggttggtaccactcttcaacttggaaagtatcagagagtgctgagagagagaaagttccaatatgttacttattttggtagcattcctgaggctcatcagaactctccttgcctccaggctctaaggtcaaagcagcagttaggtcaagtctagggacttcatgctaatggacactgatcactccttaacacttcctcagtcctcacagaagaatgagatcaattcttacctccctagaag

SEQ ID NO: 877984 - DNA, 606 bp, Homo sapiens
taaagttaggagaaaatattcagcatagagcatggggagacaaaaggacaggaggaaaaaaatgcagaagcaagggtatgcatcagtcagggttctccaaagaaacaaccaatagcatatacagagctatatataagaggagattcgtctcacatggttatgtaggctaagtcccacaatgtgccacctgcagtctggagaaccaggtaagctacaggtgtaattcattcccagtccagaggcctaagagccgggggttagggtgggggtgggggatggtgtaggtcttagagtctgaacaaaaagctctgatgtccaaaggcaggagaagatatatggtttttggtttktgtattgttttgtttccctttttctgacttcttatttcatcctggccctcaacacatgggatgatgctggcccacactggagaaggtagatcatctttactaaatctatcaattcacatattaatctcttctacaccagaagtaatgttttaccagctatctggccattccttaacatagtcaagttgacacataagattaaccatcacagggcaaaagatattcaggattctgtgaagtctaacttgtgtttaaa

SEQ ID NO: 877985 - DNA, 639 bp, Homo sapiens
attcaacatcccttcatgttaaaaactctgtataaactagatattaaagaaacatacctcaaactaataagagccatctatgtcaaatccacagccaacatcatactgaatgggcaaaagctggaagtattcaccttgaaaaccagcacaagacaaggaagccctttctcatcactcctattcaacatggtattgaaagtcctagccagagcaatcaggcaagagaaagaaataaagggcacccaaataggaagagaggaagttaaactatccctgtttgcgtgatatgattctacatctagaaaacctgataggctcagcccaaaagcttctttagctgatgaacaacttcagtaaaatttcatgatagaaaatcaatgtgcaaaaatcactagcattcctgtataccatccacagtcaagctgagagccaaatcaggatagcaatcccattcacaactgccacaaaaagaataaaatrcctaggaatacagctaaccagagaagcgaaagatctctacagtgagaatcgtaaaacactgctcaaagaaatcagagaagacacaaaaaaatggaaaaacatttcatgctcacagataggaagaatcaatttcattaaaatggccaccctgcccaaagc

SEQ ID NO: 877986 - DNA, 542 bp, Homo sapiens
tcaattagtgaaagtactaaaagtctctgacgtgcagaaataatggcataagctgtctttctctctgtctcctctccctctctgcctcggctgccaggcagggaagggccccctgtccagtggacacgtgacccacgtgaccttacctatcattggagatgactcatactctttaccctgccccttttgcttcgtatccaataaataacagcgcagccagacattcggggccactaccagtctccacgcattggtggtagtggtccccygggcccagctgtcttttcttttatctctttgtcttgtgtctttatttctacactctcttgtcaccgcacacggggagagacccacagaccctgtggggctggtccctacaagaaggaaaaaggttgagccaaaggaacccacccaggaggtggacaggtggagaccactgtaggagctgaaaagaatgcatttcccccataaggtcatccacacaagtcaatcataaatgcctggtagagttggatcctgctcacactgaataaatggtaaag

SEQ ID NO: 877987 - DNA, 568 bp, Homo sapiens
gggtctgtgctgaggaggagtagtgaaagaggaaggcctctatgaggttaagaggaaagcatctgtctcctgcacgtccctgggaatggaatgactcggtgtaaaaccgagcatacattctattctgagataggagaaaaccgccttatggctggaggcgagacatcatggtggcagtactkctctgttactctttactgctctgagatgttcatgtaaagttaaatataaatgtagcctacgtgcacatccaggcacagcacctttccttaaacttatttatgacacagagtcttttgttcacgtgttttcctactgaccctctccccaccatcaccctatagtcacaccgcattcccctcgccgagatagtaaagatagtgatcaataaatactgagggaactcagagaccagcgcaggtgcaggtcttcacttgctgagtgccagtcccctgggcccacttttcttcctctatactttgtctctgtgtcttatttcttttctcagtctctcatctccaccttgggagaaatactcacaggtgtggaggggtaggcccccttcaac

SEQ ID NO: 877988 - DNA, 632 bp, Homo sapiens
ttgtcagatggatagattgcaaaaattttctcccattctgtaggttgcctgttcactctgatgatagcttttttgttgtgcagaagatctttaattagatcccttttgtcagttttggcttttgttgtcattgcttttggtgttttagtcatgaagtcttktcccgtgcttatgtcctgaatggtattgcctaggttttcttctagggtttttatggttttaggtcttatgtttaagtctttaatccatcttgagttaatttttgtataaggtgtaaagaagggatccagtttcagccttctgcatatggctagccagttttcccaacaccatttattaaatagggaatcctttccccattgcctgtttttgtcaggtttgtcaaagatcagatggttgtagatgtgtggtattatttctgaggcatccgttctgttctgttggtctgtatatctgttttggtaccagtaccatgctgttttggttactgtagccttgtagaatattttgaagtcaggtagcatgatgcctccagctttgttcttttttgcttaggattctcttggctatgattctcttggctatatgagctcttttctcgttccatatgaaatttaaagtagttttttcca

SEQ ID NO: 877989 - DNA, 627 bp, Homo sapiens
  misc_feature 398: n = A,T,C or G
atggcagttgtggaaggaaaatctggagagagtaccacaacctccacatgtgtatgtgttgtgaatattttctcccactatgtgattagccttttcattttgttttcaaaatcttgatgaatggatattagtgattttttttgttgttagaaatcagctttttaatattacacttaaagtcatattgttttttaattaaattactcttatttttcttcatattgtacttagaatctgtagtatcatttttattattttttaaattatactttcagttctagggtacatgtgcacaacgtgcagttttgttacataggtatatatgtgccatgttggtttgccgcacccattaactcgtcatttaaattaggtattcctcctaatgctatccctcctcntgccccccaccccscaacaggccccagtgtgtgatgttcctcgccctttgtccaagcattctcattgttcaattcccccctatgagtgagaacatgcagtgtttggttttctgttcttgtgatactttgctgagaatgatggtttccagctccatccatgtccatgcaaaggacatgaagtcatccttttttatggctgcatagtattccacagtgtatatgtgccaca

SEQ ID NO: 877990 - DNA, 593 bp, Homo sapiens
acataaaaccttcagaggctattttaaacacctctatacacacaaactagaaaatctagaaaagtggacaaatttctggaagtatatagtctcccaatattgaatcaggaagaaactgaaaccctgaataaaccaataacaaggttcaaaattgaataaataatgaaaaatctaccaaccagaaaaagtcctgaccagactgattcacagccaaattctacyagacatataaagaagagctggtaccaatcctactgaaactattccaaaaaattgaggaggagagactccttaactcattctataacaccagcatcactgtgatatcaaaacctggcagagacacaatgaaaaaagaaaacttcaggctaatatccctgatgaacatagatgtaaaaatgctcaacaaaatacaagcaaactgatttcagcagcgcatcaaaaagctaatccaccatgatcaagtaggctttatcactgggatacgaagttggtttagcatatgcaaattaataaatgtgattcattgtttaaacagaacaaaaagcaaaaattacatgattatccaatagatgcagaaaaggcttacaata

SEQ ID NO: 877991 - DNA, 637 bp, Homo sapiens
gattcttgactacttaaacgtaaggtatatttgtatttccttttccatgcatgttcacagagaaacacccacatgataaacaggacttttgcgtcttgcttgatctcttttaaacctggactgtgacatttcgcctgcagcctgagatattgggaagctaactccacatcactcagttgagtggaatattttattgattccattgcaatttcttccatccaagagtgccattttctccctgcgaagtgctgatataatttgcatcaggctgagcttccataggtgactccctgcatttcttggtagtttaaactcattctcgatgctatgccagccactttaagyagaacaacagaagtctgccacagtaaacaatcaagccgtttcacttgcatttttctaccatgttcaatgaatcttttctcccagttaatgtttcttagtattaacctaacaggaccagtcctagctttcagattgtgtgtgtgtgtgtgtgtgtgtgtgtgtgtgtgtgtgtgtgtgtgtgtttccaaagattatatagaaagaggctcttaaaaacctcaggctcagcttgtcatacaaatgacatgccactgtcagaattcctgtgttaatctctggaagacaaagccag

SEQ ID NO: 877992 - DNA, 637 bp, Homo sapiens
gattcttgactacttaaacgtaaggtatatttgtatttccttttccatgcatgttcacagagaaacacccacatgataaacaggacttttgcgtcttgcttgatctcttttaaacctggactgtgacatttcgcctgcagcctgagatattgggaagctaactccacatcactcagttgagtggaatattttattgattccattgcaatttcttccatccaagagtgccattttctccctgcgaagtgctgatataatttgcatcaggctgagcttccataggtgactccctgcatttcttggtagtttaaactcattctcgatgctatgccagccactttaagcagaacaacagaagtctgccacagtaaacaatcaagccgtttcacttgcatttttstaccatgttcaatgaatcttttctcccagttaatgtttcttagtattaacctaacaggaccagtcctagctttcagattgtgtgtgtgtgtgtgtgtgtgtgtgtgtgtgtgtgtgtgtgtgtgtgtttccaaagattatatagaaagaggctcttaaaaacctcaggctcagcttgtcatacaaatgacatgccactgtcagaattcctgtgttaatctctggaagacaaagccag

SEQ ID NO: 877993 - DNA, 630 bp, Homo sapiens
ggataggagtgtttatttcccatctttatgcagggaatccctttcacatatcactcactcagtatttactggatgaagctgaattgcattaattagtttaagctaggaatgtgttgtccttctaggctcttccaattttcctcaagtatcaaggcattacagatgacaataaaggataatctctaaatttgtttaactataacttggactgtcattttgtaactatcatttatatttagtcttatctaggtaattagttattatggcaactagtatattgattcccacgccaaaggaattagcttttaaatcttaactattttgattatattgtagactggcacatttttgttcggggyctttatgcatttctgtggctaaaaaatctgaaagaaaagaaaacccatgcctcttattttatcttattttattttattttttgagacatggtctttctgtgttgctcaggctggtctcaaaagtctggcctcaagtaatcctcccagctcagcccctaagtgctgggtttacaggcatgatccagcatgctcagacccagctctcctgatttgttttatttcactttttagttcttcaatttttcacttaaatatatggggtgaaaaatat

SEQ ID NO: 877994 - DNA, 630 bp, Homo sapiens
ggataggagtgtttatttcccatctttatgcagggaatccctttcacatatcactcactcagtatttactggatgaagctgaattgcattaattagtttaagctaggaatgtgttgtccttctaggctcttccaattttcctcaagtatcaaggcattacagatgacaataaaggataatctctaaatttgtttaactataacttggactgtcattttgtaactatcatttatatttagtcttatctaggtaattagttattatggcaactagtatattgattcccacgccaaaggaattagcttttaaatcttaactattttgattatattgtagactggcacatttttgttcggggtctttatgcatttctgtggctaaaaaatctgaaagaaaagaaaacccatgcctcttattttatcttattttattttattttttgagacatggtctttctgtgttkctcaggctggtctcaaaagtctggcctcaagtaatcctcccagctcagcccctaagtgctgggtttacaggcatgatccagcatgctcagacccagctctcctgatttgttttatttcactttttagttcttcaatttttcacttaaatatatggggtgaaaaatat

SEQ ID NO: 877995 - DNA, 652 bp, Homo sapiens
tgacactggaaagagtgattatttctgatttttattttatatttctttatatgtattttcaaattttccgcaattctataatttttaattttatctttaagaaaaaaagcacaaaataaaccataaagcttgttatagttactcacctatttgtaagtctttggtttggtagtcttccattatccctaaggtaaattcaaactccatagaatggcattcamagctgtttacattccagactctaccttttccaggctatcttaggccacataacataattctaactacatggaactatttgccatactctgaagatggatgctattaatatattgaataatttttatgcttttacaatatgcccttgcttatgtttcctttgtcaggaatgtctttccctgtttgtctacctgtttgaaatcttacttgtccttcaaagcacagctcaaatattattttctctctgtatatatttctatcatgttacttctttttagctgctttataattacatttatgtatcatttgtgagctctttgagggcaatgaccatttcctattcatctttgtactttctttgcccagcatactccctggcatttaataggttttcaggaaatgtaggattaattaaatgaatgagacttttccc

SEQ ID NO: 877996 - DNA, 616 bp, Homo sapiens
ttacaacccaagtccttgtgttgttcagggcactctgcacaaagttgcctggccaatgggatgagagtgttggtgagagttaatcagtgattgcaagttaaataccagttgagaaatccaggcggattgttttcacattgacggctccccactctggtggacgtagttggctgctcctctggtgttatcttggcaggagagcattgtatgggtcctaatcattgaaggtgaaggcagagccatttcatggataaagcaattagagaaatagtcctagacagtgagaggagcagtcaactcccttcaatgtcaaccttctcccttccttttcwtccagcatagtgaatcaaaaagcaggttttttggaggtaagaagtcagctaaactgtcttgggtttaaaaaggcccaagactcatgtctatacaatcaaccctttagagtaccaccactcccaattaaagcaaatctcaccttccctgacaccctctaagactgtttattacccttatgtgagttattttccccttccagtctccctttcatgctgggattttccatgtcataaacacatttagaatgggcaaggaagcaagaacacaatatgatttctttctc

SEQ ID NO: 877997 - DNA, 616 bp, Homo sapiens
ttacaacccaagtccttgtgttgttcagggcactctgcacaaagttgcctggccaatgggatgagagtgttggtgagagttaatcagtgattgcaagttaaataccagttgagaaatccaggcggattgttttcacattgacggctccccactctggtggacgtagttggctgctcctctggtgttatcttggcaggagagcattgtatgggtcctaatcattgaaggtgaaggcagagccatttcatggataaagcaattagagaaatagtcctagacagtgagaggagcagtcaactcccttcaatgtcaaccttctcccttccttttcatccagcatagtgaatcaaaaagcaggttttttggaggtaagaagtcagctaaactgtcttgggtttaaaaaggcccaagactcatgtctayacaatcaaccctttagagtaccaccactcccaattaaagcaaatctcaccttccctgacaccctctaagactgtttattacccttatgtgagttattttccccttccagtctccctttcatgctgggattttccatgtcataaacacatttagaatgggcaaggaagcaagaacacaatatgatttctttctc

SEQ ID NO: 877998 - DNA, 575 bp, Homo sapiens
agcagaagtagcccttccattctgcctaaggagctcagccgtcattagcctaaagatctgtaatagcctcccttggcaaggcactgcttgtcctctccaggaactaccctcatgaccctctttgctttcagacttacaattagactcaaatcccagcagaaaccaaaacatgaggtacagttacctacaaggaggcaatgcacataaagaactatgtgwttttttctgattacatcgacagaaatttgagtgacatttgtaggaatagacatttagaatatgggattgtggtggaagtgtataaaattgggtcaggctgaatttattgatgtgggcccactaagcattgattctggattaaatattttatttcaaggggctagggatgactctaacatttgataggagaaatatactaaaatagggacccagtgatgttctgcactaaataaagtcaaaatgccaaaactgtcttattatacaatagagagaaatattcaaagacttagagtgattggaccgttagaatggaagtatcaggtaagacctgtgcattcatcctaagagggcacaga

SEQ ID NO: 877999 - DNA, 575 bp, Homo sapiens
agcagaagtagcccttccattctgcctaaggagctcagccgtcattagcctaaagatctgtaatagcctcccttggcaaggcactgcttgtcctctccaggaactaccctcatgaccctctttgctttcagacttacaattagactcaaatcccagcagaaaccaaaacatgaggtacagttacctacaaggaggcaatgcacataaagaactatgtgtktttttctgattacatcgacagaaatttgagtgacatttgtaggaatagacatttagaatatgggattgtggtggaagtgtataaaattgggtcaggctgaatttattgatgtgggcccactaagcattgattctggattaaatattttatttcaaggggctagggatgactctaacatttgataggagaaatatactaaaatagggacccagtgatgttctgcactaaataaagtcaaaatgccaaaactgtcttattatacaatagagagaaatattcaaagacttagagtgattggaccgttagaatggaagtatcaggtaagacctgtgcattcatcctaagagggcacaga

SEQ ID NO: 878000 - DNA, 575 bp, Homo sapiens
agcagaagtagcccttccattctgcctaaggagctcagccgtcattagcctaaagatctgtaatagcctcccttggcaaggcactgcttgtcctctccaggaactaccctcatgaccctctttgctttcagacttacaattagactcaaatcccagcagaaaccaaaacatgaggtacagttacctacaaggaggcaatgcacataaagaactatgtgtttttttctgattacatcgacagaaatttgagtgacatttgtaggaatagacatttagaatatgggattgtggtggaagtgtataaaattgggtcaggctgaatttattgatgtgggcccactaagcattgattctggattaaatattttatttcaaggggctagggatgactctaacatttgataggagaaatatactaaaatagggaccyagtgatgttctgcactaaataaagtcaaaatgccaaaactgtcttattatacaatagagagaaatattcaaagacttagagtgattggaccgttagaatggaagtatcaggtaagacctgtgcattcatcctaagagggcacaga

SEQ ID NO: 878001 - DNA, 657 bp, Homo sapiens
ttccttttctttacccctccctagccccatcatggtcttggatctggaaccttaatgtaaatcaatcacttgagaaatagattgcctgaccaaagatcacatttccctttttggggagaagtcacattgaagttcctgctgttaccttgagcagctccttctcttggcatgcataggaagcttccagctgttgtaacttaacctaaagaaagcaaaagagactgctaacttggcaaggtaaaagctgtgcaggaatggaatgctgtcaccaaggtggcctcacgagctgtgaggagcctcagggccatgacttcacacgtctcytgatagaggaattaagccacccagcaccgtttgcagctgcttggtaaacttgctcttttatattccttaccttttagtcttcatctggtgctagcttcacccctaaacttcaattctgagcttcctactcttacttagccatttctcttaaaaataataccagttttgaaaaacttcactcttccttttccttttaatatagtcagtcagactctaaggtgtttgttcactcctttctccctccctgtatgccttgctcacccttttatttccttcaatacttggcaaaagaccattctatatcagctgctatgctggagtgaagcatgtgtg

SEQ ID NO: 878002 - DNA, 684 bp, Homo sapiens
aaatatctcagggctgggcagagagcaaggatttataagatgaaagaggacaggctttctgatttgtgtctggctcccccaaaccctgaacaatctgtttctatttaaaacaaaaagccaaacatgtttcttttaagctggtttaagagaatagtgatgactaaggcagtatatttatttcagctgtcacaggaataattaactcttgaacattttttggttaattctcctgtatttttgaaaatactgtggttcccttcctagggactcttgaaaagaaactcattttggggtattaagatatcagaggagcaagttctcaattcttaaaactttccttgttcaaaaacattagaaagttttgttgaaaggacatagatctaaagatggttgagtagggattacacaaattaatgaagggacaaatggaaatcacattcactcactcgawaaacaattaagcacctattttgtagcagagactatagatacaattctgggttaacaaagaagaatgagatgtacctgtcatctatttcttaacagcttggggggttgcagacaggtaagcacatccttacaacacagtgtgataaagtgtgattgtagaagtacaaggtggcacaggagaggacttggaaactcattggatgagctgaatttagccagataaagagaggggta

SEQ ID NO: 878003 - DNA, 631 bp, Homo sapiens
tcccttgtttaaaatgaacaaaactctgcaatgccaagagagtaattagatagatccaggcttcagtgattacaaaagctggataaaatctgccaatgccatttatatctgaatctgggcaagccaaaaggcagtagctcttggaaaagtcttcrcaaactcaaacttcagctattgttttgtgttatggacaccaccacctaagtatcaaaaaactctaggaatgtgaggaatatgtctaagaaataaagtaaggcatatcacgagaaagaggtatgcaataacacataatagaaatagtggtgtcatgtattttttttctcatagcactttcacatatattctcttctttagtcctcacgtcatgccaatagggtaggacagagaggacacatatttcctgtattttagagacaagaaagctcagaagactgagcttctttctatgaaaaaagagtttcttagaaagggggcacatttcagggctaaagaggtaagtggctgagctagccttaattggaggtcattttgacaataatgatgatgaagaggaggcaaatgatgatagctgtcatttactgaggtctatttaccaagcactatgctcagtatacaccttaactccgtgtga

SEQ ID NO: 878004 - DNA, 618 bp, Homo sapiens
aaactggatggagaatgagtttgacgaattgacagaagtaggcttcagaaggtgggtaataacaaactcctccaagctaaaggagcatgttctaacccaatgcaaggaagctaagaaccttgaaaaaaggttagaggaattgctaactagaataaccagtttagaggacataaatgacctgatggagctgaaaaacacagcatgagaactttgtgaagcatatacaagtatcaatagtcgagtygatcaagcagaagaaaggatatcagagactgaagatcaacttaatgaaataaagtgtgaagacaagattagagaaaaaagaatgaaaaggaacaaacaaagccttcaagaaatatgggactatgtgaaaaaaccaaacctacatttgattggtgtacctgaaagtgatggggagaatggaaccaagttggaaaacactcttcaggatattatccaggagaacttccccagcctacaaagacaggccaacattcaaattcaggaaatacagagaacactacaaagatactcctgagaagagaaccccaagacacataactgtcagattcaccaaggttaaaatgaaaaaaaaaaagtgttaagggcagccagaga

SEQ ID NO: 878005 - DNA, 669 bp, Homo sapiens
caaccagctagcatcctaacgataggatcaaattcacacataacaatattatccttaaatgtaaatgggctaaatgcctcaattaaaagacacaggttggcaaactggataaagagtcaagaccacccatctgtgtrctgtattcaggagatccatctccatgcaaagacatacatgcgctcaaaataaagggatggagaatatttaccaagcaaatggaaagaaaaaaaaagcaaggattgcaatcatagtctctgataaaacagacctaaaccaacaaaggtcaaaaaagacagagaagcgcattacataatggtaaagggatcaatgcaacaagaagagctaactgtcctaaatatatatgcacccaatacaggagcacccagattcataaagcaagttcttagagacctacaaaaagacttagactcccacacaataataatgggagatttaataccccactgtcaatattggacagatcaatgagacacaaaattaacaaagatattcagaacttgaactctgctctggaccaagcgaacctaatagacatctacagaactccccactgcaaatcaacagaatatacattcttctcagcactacattgcacttattctaaaattgaccacataattggaagtaaaacactcctcagcaaatgca

SEQ ID NO: 878006 - DNA, 638 bp, Homo sapiens
gtgccaaaataataaatagcattggaaaggtattgtaaagaaccgtgctgaacaagagaagctcctaaagatattaaaaccacccacaaatgaatcagaaaaaagctgcagttgagagatgactagaaatgtattggtagctgagctgggaacagttttcaacatgctttatttctaaacattccatcttttctgcactagtatgtccagtaaggtcaatgactatagaaaatgctcaagtatagacagaggattcacagatatctgaaagtcacgcttcttgaagattatcagtttaaaatctgtgaatcactgctacttttttttttttttccattatgagcagtctttttcccaaaggaatcytgcctgatgagtaggagtacattgtttgaaagaactacagaagtacttcttaggtgtttttcccctttagcaaaatgttgggaagatggaggagtattcagcatgaggtatgctgtcattatatttattctgggcctttcagcactgtaatttatttctgtgccaaaacaatatgaattgttaaaaaatgtgcttctccaaaatatgaaacagttggactggatccctattgaattatgcacatatcttagctaaaagaatggtattttctg

SEQ ID NO: 878007 - DNA, 621 bp, Homo sapiens
attgaataatgtatgtttattgccctttcaaaattaaaactctagagatttatcacaaatattaaagctaaaaattgaaccaggtaattctcagaatttttatagaaaagtttatttttaaaattcaaaacagaaataattttgatttgagttaggtgccttatacaataaatcaagaaaataattatacctaggtgctattctcaatatttgaaaatatttttagtttattattggtagagagaatttatttacacgtaaatacttacagcaaatgtacaatagcatgttttctttcyatgtttctagtggagtcaaagaaaaacaaaacataaacttttgaaaatgtattttatttctagctttagaattaatattgatatggcatggtggctcacatctgtaatccaggcaatttgaaaggctaaagtggaaggatcccttaagcccaggagttcgaggccaggctaggcaacctaagatcctgtttctacaaaaaaaaaaaaaaaaaaaaaaaaaaaaaaattaaaaataaaaaaacaaaaaacagccaggttaggaggcacatgcctgtagacccaactactctgggggctgagagttgaggattgcttgagccca

SEQ ID NO: 878008 - DNA, 587 bp, Homo sapiens
caaagagactggtggctttttgcccctgccttagagatctgtggaactttgaacttgagggagatgctttgggatatctggtagaagaaatttctaagcagcaaagtttttcgaggatgcaaagcataaaatcttagaaaatgtgaagcctgataatgccacagaaaagaaaaactcattttctggggagaaattcaagccagctgcagaaattcacatacttaacaaggagccaaatgttaatcaccaagacaatggggaaatgtctccagggcatgtcaaagacctccacagcattctctcccatcacaggcccagacgcctaggagagaaaaatagtttcctgggcartgtccagggaccccctgctgtgtgcagccttgggactggtctcagctgctctagccattactaaaaggggccaaggtgtagctcaggatgttgtttcagaagctacaagcccctagccttgacagcttccatgtggcattggtcttacgtgtgcacagaagataagaattgaggtttgggaacctccgtctagattttagaggatgtatggaaatgactggatgtccaggcagaag

SEQ ID NO: 878009 - DNA, 557 bp, Homo sapiens
acaatgctgcagagattttgtttatggccagttttggtgccagtttatggcagatttgggggcctattcccaacagaaggggttgactgtcctcagtgaaccataaaaagctttctttacctggtgaaaatacactgtagcataatagtctacattataacgtcagcccacttggatgggagagcttttatacaaccagaaaacatgcattgaaaatgacaattgaatgaaatccctttataaaatgtttaagtggcccaaccatctggttaccgtcaggtaaccaaatgkagctgaagctttgattgttttcccatgaatatgggtttgacaaaccaaacattggttataaactattttagcaatttgtaagttaccacaccaatatttaatttgaattattttctcttttccatgatgttttggaatgcataacttttaataacaaaaactttaaggactcaggaaggacaaggtggctgttctggttctccaagagtccatgcttgacattggacttatgtcatcttgaatgccagttgttttttccaatttag

SEQ ID NO: 878010 - DNA, 560 bp, Homo sapiens
gagaaagaaaattgtaatacagtttatggaggggaagagaatcaacagatggtaagtttcatacagatatcaaaccagaaaggactcgttccctaagccaggaattgaactcaggccaccattgtaaaaaggcaaggccttagctactgagctatattggatagcttccattgctcttcctagaagtctagagcagtcaattttgagtttgcaaaggcttttaactgctcaagataattttcggagctagctatgacatgaaccccaaaattccttttccctggaaggyggagactaagagaaagtaccaccacatgattacacagttaagctcccaaggacaaaacaagatggagacctcaggcagtttttttgtttgtttcagggaactgcagcaacgtttgttattgaccagcttgctgggccgtctttaatagtgagcttatggggtcctaagcctatgttatattcctaaagtactctttataacagaaccatacagaaagacaaggacaccaaatttgctacagcttaagaatagcctcagaatcctttttttg

SEQ ID NO: 878011 - DNA, 560 bp, Homo sapiens
gagaaagaaaattgtaatacagtttatggaggggaagagaatcaacagatggtaagtttcatacagatatcaaaccagaaaggactcgttccctaagccaggaattgaactcaggccaccattgtaaaaaggcaaggccttagctactgagctatattggatagcttccattgctcttcctagaagtctagagcagtcaattttgagtttgcaaaggcttttaactgctcaagataattttcggagctagctatgacatgaaccccaaaattccttttccctggaaggtggagactaagagaaagtaccaccacatgrttacacagttaagctcccaaggacaaaacaagatggagacctcaggcagtttttttgtttgtttcagggaactgcagcaacgtttgttattgaccagcttgctgggccgtctttaatagtgagcttatggggtcctaagcctatgttatattcctaaagtactctttataacagaaccatacagaaagacaaggacaccaaatttgctacagcttaagaatagcctcagaatcctttttttg

SEQ ID NO: 878012 - DNA, 652 bp, Homo sapiens
ctctttgccctggagcaagtaattttactgctctatggttcagttattttatctgtgaaacagggataataacatcacttacttcatagggttactagtaggaaaaattagttaataccagttaagatgatttgtagagaaatggcaccttcaattaatgttaactgttactattgttgccacctctagacactcatcccttcgcactgcccttttctcatttttccctggattgttttgagtttcttagaacgtgtacatgctgttccctttgtccccatcactagactgactcctacttgactttcaggacttctgactttttcttcctccaggaatcatcttctaccactcctctgcatggcaggttagatgcccctcttaaatgcagggttaacctctatcgtacatttcacaccttgtatttacttgtttgcttccctattcttccttctamaatgcatacactttgagggcagaaactcagctctgtttgtctttgcagctctgtcacctggcacagtacctggttcattctctgcagaatgaggaaacctcaagcatccactgaagggaacagtgtagcatagctcatattaccaaatatctgcatgttagaggcttatgtgtttatgagtaggcaggtgtcttc

SEQ ID NO: 878013 - DNA, 612 bp, Homo sapiens
atgtcctttctaaaaataagaaaaaaatattccacaagtaaaacgagagtatgatagatacttcaccatggtgctggtgtatgtagacttgcgtgagggggaggacatggaatggtatgttctccattcatctctagttttatttcctagatgagttatgggtgaatactgtgacaaaaacaaaacaacaactaaaatggaaaagtcccaggagtgaacagaaaccaggacttaaactgcttcatcattattttattgtattgttttcgttttgggtttttttttttttttttttttttttttttttttaaggaagttacaacaaggagcagctaaggacagataaattggtagcagattgtggtttatgataacgacagtcccgaaggaacttggctttcttggtgacgttgaagtaaattgcattwctcaagatgtatactaagaaggatagataatgaggtgtatgggggaaaggcatgatgactatttttatagtattgttgactaccaaaatgaatggaagggaaggcgggaccaggtggagttccttgggttaatttcgatgtaccttataaatgacaaaatttccacccacttctcttagaggga

SEQ ID NO: 878014 - DNA, 583 bp, Homo sapiens
ggctggaaaaaaaaagtttggaggagctgctgtagggaatttaacaggggtgattaaaaggattgctgaggttcaaactgaggttggaaaccattaagcagcaatgatcagtacagttgtgagcatttctccaacagtatcaggaagtccaggaacaggaaggggaaaaaagagggtctgtgttgctccaggtttttagaataacaaaccaaattcagcagaagatcaaagtgaaacagacaagcagtatgtaagtggagaaatagacaatggaacacaggcttgagaaggacataaaaggagtcaggagaagactgattttctgagagcaaagagaatccctgagatatatatatatatttttaatattagaatgagagattcttgcactgggtaggactttgacctgagtgaactttgaggttcctcctaatyccaagattctttgattctagacatgagaaaacaaagctagtccctatgctgttgtcataactgtcatggtatgtgatatggtttaactctgtgtccccacccaaatctcatctcaaattgaaattcctacatgtcaagggagggacct

SEQ ID NO: 878015 - DNA, 582 bp, Homo sapiens
tttgaaataggatgaaaattcctccctctttttttttcttataacctctctcaaaaccttgcctgtgtctctatgagtgtgttgtgttacagttactgctataatttctctactagattagggtggagaagttcccatggctgttcgctctctcagaggaccctgggcaaagttggtgctcactgtgcatcactgattatatcaaatactgtgtggcatgctcaggccttgttggtctctctgtaccagtgtctatcgtgggacataataattcatgatgaacagtcaggcatctacttagtggcttatacgtagaastggctctcctttcagaagccagaaattaataaatggtctacagtcagaaggagatccttaattgattaattaattcaataagaatttattaagtaccttctatgtgctaaacactggggagacaacagtgcataaagagatcccatctttgttcatatgaaactatattctagaggaagagacacacactaattgaatactctcacaagcaaaagtacttttgtaatggtaattcatgctacaaagctgtagaccttggtgcta

SEQ ID NO: 878016 - DNA, 504 bp, Homo sapiens
ctttcttgaattctccacatttaaagtctccacttgtcacttgaattaacatagtattttagcatttaatttcctggggataccagatgttttattttgtgagtttcttttatttatgttatagttgtggtttaaacaactatatgttcatttaaaatgaaactcaaaaaagaggaaagaatggcacaactcaataaatatgtagtttaataatattcagtgaatacgtatgcacagtgaatggaagtctaaataacgtactccagtgaagaattattagatgttgcccgtctcagctggattttcagttatactattcaagctggtgggaggyttcaggggaagaacaggggagaagacaaagcagaaacagccttaggcagtataaattctgaatacctttaatttgattaacttgttaatactagcaggagagttactttgttgtattctagggattataacatggcatcatttgaaatgatatggttcccactgataagg

SEQ ID NO: 878017 - DNA, 648 bp, Homo sapiens
taccatagatggagactctttgagaaggagttaaaatttgtgggagatccccaaaataatggcagttcccacacacacttttcccccagagtgtatataggggatatataccactttctcacctccttttccacttcttatcattgttagatctctagaaagttcatgtagcttctttctcctttgtcgttatatgtttcagatacctcaccagcttcctttgctttcatttaccatatcatagtggtaatttcctcaattcctatatcctacaagagcttgatgaatgaaaagaaggaagcctgtgacaattattttattcaagcctccaaarcagagttttgccaaatgcttgtcctacttctccgtgcgcttgccatggtctttgttttgcctctttttcttttggcagttaccccaactataactggaatttcctgattgatgaagatttagtggtccaaacacagtcagttgtcttttggccagaaggaaatatacattatataatccggtggtttatcttcttatccctcccccattaacttttttttgttttgttttggtttttgaatctctgcttcccttctccatcccctaagcaaaagcataaccagcacgttttttagcatttagtagatacaagcc

SEQ ID NO: 878018 - DNA, 588 bp, Homo sapiens
taataggtcaaatatggtgactttggttggttcttatttttgttatttctccagtcatcaatcgtattgatttttttaaaaacaaaggtcaagcacatgttcgtaggtgacaccagttgcttcagtgagttggtcccttctgcttactgttctggtttaaaccccttgtggcattttctactgcatggatagtggtaaatggggttgatagtgacatagaaatgaacttagaagtaagtttatagactgttggggaccatctgttaatgtaaatgtttaaggtaaaatgcattaaggcttaagagctgacgagacgttttatttgcctcctgcttttgggattatgcctggcacctgcttgagtctagagggttcctggttaaacttgggaaacctggtttcctcttttatctgcagctgttcrttttctgggatggaatcctaagcacttatttgaattgtatttgttgaagtcactgggttatacagtaaaaataaggagtcatgttggtttttgttcgaagttttaaagtatgtaaattaaatacatttatatggctaattgtcatttatggttacctactgtta

SEQ ID NO: 878019 - DNA, 606 bp, Homo sapiens
tggtgttttaaattagcataggtaacatagagattattactcagttgaccactttgcacttgatctgagggacattgcagagtcatcacagattcttgagttatgaggtcagtatttaatgaaaggatacgtcgaaggcttttccttaactttcaaggacctgtggggatagtttctactcaatgcttctttttattcgctttcctaataaaactaatatttaattataaaattaaaatgaaacaagtttggacttccgtatgaaaagtcttatacttgatctgtaactacaagatgttagatgttcttcatgsagatgacaggcaaaggttacttttacagttctatgaaagtaaaaagcttttaaaacatttgaatgggaattggtaaaagaagcagttcttaattatgtcaattgtctgtaagagctcaggtgattatggtaaacacacctgataacaataacttaagagagcaacaataactttacagcagacacacctgaatgttggtgggagttctgagctaaggaacccagaagtggccaacctgaagatcaattccttgtctacgaggaacatctgatcccctggcctgtcccttgga

SEQ ID NO: 878020 - DNA, 615 bp, Homo sapiens
tttaatgataattatgacaccaacccccaaagacatggtttcatggctaacagatcactctcagattttgtggggatagagtgttggtagcaggaagcggcagaggaattcaactccttcttgagcttcttgtgttttataatcctccctatgtcccacctgttttgtctcagaggggataagtcaatagagctgctgctgttcacaaagccatgcaggtaagagacatgtaccccttgcttcaaagtcttagtaaacttatagagaaaatatgatttgattgcctaacaatatatttataatttacataccaaataagtgaaacgtaaggaaaaaactgctttgagctmccgagaatgctagttgatagcaaacaaggaaggtgctttggtaagaaggttgtttgctttgagcttccatggatgagaagaaatcaagtaatcaaagaggaggaagaggaggaataaaaacatagttgagaatggaacagtcagagacatgtgggcactatcttttcagataggaattttatctttcttccttgttcaacagttatttcatacacgaatgagaaaggccaaacatagtcatgaacgtttgcttttttaccttctg

SEQ ID NO: 878021 - DNA, 558 bp, Homo sapiens
caagacagggcttctgcccatacttttgcaatcacacattctgaagtaaggtggcaccatttaccaagtaggaacaaaagtgaatgattagggagaactgtttgttccagtgctctggggacaaaaaaaaaatccatgttaatcttttctaaagtgtccacttttgttatgtttatatttttgttgaggttctttgttcacttgcaactaaaccaacacgtagaactgaatgtgatttctactgatctagaaaaaaataaagttattattaaaaaggaaatctaaaggatgataaattagctgcatatttttctgttcrtctattgttttctattttctctatcttaaggttgtttataatagacagttctacatcaaacttgagatgaaattaaagttgtgaaagatttatgatgtgtgttccagttatggccaccagttctaatatgcagggaacacgtttgaaacgggatcacagttgactattaggatacaggactattcttttcagcagaactaaagagaagatcagagacctctctattttttctctccctg

SEQ ID NO: 878022 - DNA, 457 bp, Homo sapiens
tctctgcccaactgggtccccaccctgttaccttctgaggagtctaaccctgagtactgctgggctttgcagatcctagagttgcgggttatgagtgtgtccagagaaccagagtatgtcatctggattcactcactcattcacacattcatttattcayactcaacaaatatttataccattattcatagggcagacagtgaacattaaaaatgtgaaacaataacatacagtccattcattgtcaaaggatactacagatcaaggaaagaggcaacttcaagaaagtatgattagtacattgaccagccaaatgtagaagcttctgtgtcagacttgacagggtgagggaaagcttcctggacaagaagacatctaattggaatatggaaggatgcttagaatctagccaggtgtggggacttaaagggtaaagcaagtgctacccagaaaacgt

SEQ ID NO: 878023 - DNA, 616 bp, Homo sapiens
ttctttttagtgccactccaaaggcaaggaccacaaagcataagcatccatttttattaaagcagaaaggtgaagacttaaaatgtgcttctgtatgtgtgcatttttaaagcaaccctttgtaagaatgagtggatttagcaaagtagatgcgattgaatcacaatggaatacatgcctcttactcggtctaaagtcccttggttctgcaaagttttttattctcttttcaaaccttatgcaattgtgacttcatctaaattattgatacagttctaagggattagtatcttctgacggcagtctgttcaatatatttgtattttttacccttgaaggaatatgggactgttagggttttaaragaagtctgagtttttgtttgtttgtttgttttgttttgaatgacagtaaatatccattaaaaagctgtagatttgcagccttgatgattagctctctcttagactccagcaagccttactgaatttcctctggagatcaagtattgaggggcaaaatactggggtagagttgaaagcaatagagaagatttgttgacaatatcgatgattaaaaaaatgagcctttttaaacaagaaattcctgctcatac

SEQ ID NO: 878024 - DNA, 635 bp, Homo sapiens
gctaggagaaggggaaaagcattggtatttcccttaaagagaccataccagggtattttatttcctgcaagtggtttaattttgtacattgcttctctgctcacagaatgttctctgtctgtcataataaaggagagccttttcattgaaatagacctctgaatctgttttagcgactgcagtgacagtctgtatgtatctgaaagaatgagaggcataagacacctacacatgttcacatctagggtagtattttcaaaaaatggagttactttgaatcccygatcgtctctttcttttactcaatttcaagttaatatctaatgtaaaacttttataaatagcaaagagacttatacttctctagctttgcaatatttagtcttgctttttcttgttggcacggtgtgccctttaccaaatgatccatccaggtgattgatactaaaacatctcattgatttcaagtttacgtgtctagatattagatcctagaaatgagttgttaataaatatcagctttacatcaagagtttaacagaaacatattcctgaacaaatttccattgccttctaaaagggttatttcttggtctgcagagctgctaatctgtaggttgcattcagtctaggct

SEQ ID NO: 878025 - DNA, 635 bp, Homo sapiens
gctaggagaaggggaaaagcattggtatttcccttaaagagaccataccagggtattttatttcctgcaagtggtttaattttgtacattgcttctctgctcacagaatgttctctgtctgtcataataaaggagagccttttcattgaaatagacctctgaatctgttttagcgactgcagtgacagtctgtatgtatctgaaagaatgagaggcataagacacctacacatgttcacatctagggtagtattttcaaaaaatggagttactttgaatccccgatcrtctctttcttttactcaatttcaagttaatatctaatgtaaaacttttataaatagcaaagagacttatacttctctagctttgcaatatttagtcttgctttttcttgttggcacggtgtgccctttaccaaatgatccatccaggtgattgatactaaaacatctcattgatttcaagtttacgtgtctagatattagatcctagaaatgagttgttaataaatatcagctttacatcaagagtttaacagaaacatattcctgaacaaatttccattgccttctaaaagggttatttcttggtctgcagagctgctaatctgtaggttgcattcagtctaggct

SEQ ID NO: 878026 - DNA, 635 bp, Homo sapiens
gctaggagaaggggaaaagcattggtatttcccttaaagagaccataccagggtattttatttcctgcaagtggtttaattttgtacattgcttctctgctcacagaatgttctctgtctgtcataataaaggagagccttttcattgaaatagacctctgaatctgttttagcgactgcagtgacagtctgtatgtatctgaaagaatgagaggcataagacacctacacatgttcacatctagggtagtattttcaaaaaatggagttactttgaatccccgatcgtctctttcttttactcaatttcaagttaatatctaatgtaaaacttttataaatagcaaagagacttatacttctctagctttgcaatatttagtcttgctttttcttgttggcacggtgtgccctttaccaaatgatccatccaggtgattgatactaaaacatctcattgatttcaagtttaygtgtctagatattagatcctagaaatgagttgttaataaatatcagctttacatcaagagtttaacagaaacatattcctgaacaaatttccattgccttctaaaagggttatttcttggtctgcagagctgctaatctgtaggttgcattcagtctaggct

SEQ ID NO: 878027 - DNA, 614 bp, Homo sapiens
cttctctgtacaccttgctgcaaaagtaaatggggaatgcttcagggctcttgagaaaggtagtggcaatgggttggcccaggtggaggattcactggactttagaggttatatgcagagggctgtggcaaaacaggaagaaggtgatttgggatttaaaaagaggaatcctgttggaaaggaggggccatatgtacttaggtttgatgatcaattaattgattgatggttgaagggaataagaaaatagtgcaatgactgtaaggttctttgtttgagtaatgatttgaggatggtgccattaccccaaggtgaattagagacaggaacaacacgttcttgggaaaagataatgagttcrtttttagcttctttaagttttaagcgcctggtagaagatgtccagcagaacattctaaattttggcctggagttcgggagggaagttggggccagagatccatttgtgatttatcaacatggtaggacagccagtgacttttactgaaatacaagtctcatttctgacattccattgcccaagttcctgcaatgattacatgaagctattagggaataaaaaaagacccacgttcttaacatgactttgaggt

SEQ ID NO: 878028 - DNA, 631 bp, Homo sapiens
tttactgaaatacaagtctcatttctgacattccattgcccaagttcctgcaatgattacatgaagctattagggaataaaaaaagacccacgttcttaacatgactttgaggtattgtttgatctgggcctgcctgtgtctccagcctcattttgaggtatattctccttctgtatttcagttctcaaatgtatatgtgaaggtcctttctgacccagttgcccgataccagaatgccttcccaacatacatacacatctgtacacaaatgcatgtgttcacaccaacacacatgtgcaaatctgcacacatacatgcacatctgcacaagcaatagacacatgttcatatgtgtacacatgtgcacacayatgaatagattcatgtgtacacatgtgcacataaatacccatgcctgcacatgcacagatgtgcacatttcatccagtaattccaactaattcctcagattctcatctgaaacgtttttgttatcagggaagtcttctgtgacctcacagtcaaacaagtttccctgttccttctatgccatagcacttattaaattgtgttgagtatttagttttctgtcttattagaatggaagttccatgtcaataggacatgtgg

SEQ ID NO: 878029 - DNA, 631 bp, Homo sapiens
tttactgaaatacaagtctcatttctgacattccattgcccaagttcctgcaatgattacatgaagctattagggaataaaaaaagacccacgttcttaacatgactttgaggtattgtttgatctgggcctgcctgtgtctccagcctcattttgaggtatattctccttctgtatttcagttctcaaatgtatatgtgaaggtcctttctgacccagttgcccgataccagaatgccttcccaacatacatacacatctgtacacaaatgcatgtgttcacaccaacacacatgtgcaaatctgcacacatacatgcacatctgcacaagcaatagacacatgttcatatgtgtacacatgtgcacacatatgaatagattcatgtgtacacatrtgcacataaatacccatgcctgcacatgcacagatgtgcacatttcatccagtaattccaactaattcctcagattctcatctgaaacgtttttgttatcagggaagtcttctgtgacctcacagtcaaacaagtttccctgttccttctatgccatagcacttattaaattgtgttgagtatttagttttctgtcttattagaatggaagttccatgtcaataggacatgtgg

SEQ ID NO: 878030 - DNA, 680 bp, Homo sapiens
gttttaagagaagcagtaagagcatcagcaaaaagaaattacataacgagttggggaaaatgtccctatccctatctacagctctatgtgcagtttggcattactcatcacatgcattacagagagctccgaccttcctctgagtatggttgattgttcaaagccggatattgtggcttgatggctccaccatctgaatctatggtgagtcccatgagcctaatagcactgcactctattgccatggagataattacaacggttacccactgagcattatgcctaccccgctgggtgggatgaagtggagggtgagtgctgagggaagaaagtccttgttgattgtacacaaatgacttggataattagcctaagtggccaggaaaaatggcccaaaatgggttaaggcataaattactgtcattggaagtttgtaccactgtgaataagcccttgcaagagatcccaggagcattttagggttctgtgtaagatggtggggaggtaaagggagagcamaaaacactggagacactgcaaaaaggcatcatttttattctgaatctcttgtgtagagcatgagacccccaagaaggcctttgagcattaggtagtatgaggaccacaggaaacagaacaaatttcttaatttatcatttcttttacatagaacagtaaac

SEQ ID NO: 878031 - DNA, 664 bp, Homo sapiens
gatttggagtattctcaagctttatcagggctaatattaatatgtgtgcaatactaaaccgattcagcaagagccaggactgcgtgcagctttgtttttcacaaccctccctgaaaataagctgggactcataggtgacacattggtttctacaaaccccagtagacacttggtcctatggttcaagaaaaaatagtctccataattcaaaggcatatagcttatcatggattatcataagctgttggagtttgtggcctcaataatttcatttccaccatcttccacatgctatatttgtagaccattttcattgctgtgtttaattatagcccattcatttctggtgtccttggctagttacttacttaaggtgacggcaataatccacttagagcctattgcttcacrgaagacaatttttgtattaccatgttagtcacatacaggtgcaattccaacatatttttcaacatggacataatttcctatagttatttccacatctaaaggcacaagaaagatctaaattactttactttgtcttgtaaaatagaaataataaatataattttgttcttttcatttatttttctcctctactttctttttagggaaggaagagatcattttttgaaggtggtaaaatttacatccagcaaaa

SEQ ID NO: 878032 - DNA, 610 bp, Homo sapiens
gcctattccaacacctggtgcttattgagggctccattaaaggcaactgctcttattatttgcatatatcttatgccatgctctagattgtaaattcaagtattatgtatctttccaaataacagcatctgacttcttgctttcagtgagagagatagtcaataaataaacatattatatcatgaaagatagtgataagggctatgaagacaaataaagcagggtaaggagagaaagaaaagggccagggataatgtaattgaggaagacttctgggagaaaggtgcacttgaatagagattgaatgaagtgaggaaaagaattatgtccgtgctcgggtggaagcaatgcwcttgataggtacaggaaaggaaactccaaaaggtgtagaagaattacagcatcctagtgacacagaggcccatggagtggagttttgcaaggaggaaagtaatcctcagtttcaaatgcagttgagagggctgggagggcaactgcagagaacacttcctggattgagtaagtaagagagcaagaccaatgacagtggattggtgagaacagcagacttggggatgccctgagtaatccaatgagggaaaccaagaca

SEQ ID NO: 878033 - DNA, 578 bp, Homo sapiens
aaaatgaacaaagaactttaaaatctaacattaagaaaagaaacaacacaattaaaaatagtcaaatttctgaacagatatttcaccaaaggagatgtacacctggcaaataagcatatgaaagacgttcaacatcatsttgttacgcgaatataaatgaacaccacaatgatataccactacacacctattaaaaggaccaaaaaaaaaaaaaaatactggcaatatcaattgctggtgagaatacagagctaagggaactctcattcattactggtcatactgcaaaatggtataactaccttttttttttttttttgaaatggagtcttactctttcgccaggctggagtgcagcggcgtgatcttggctcactgaaacctcgaacttcctggttcgagctattctcctgcctcagcctcacgagtagctgggattacagacacgtgccaccatgccctgctaatttttgtatttttttagtagagatggggtttcaccatgttggccaggatggtctcgatctccttggcagtttcttagaaagctaaacataaattttccattcagcaatcac

SEQ ID NO: 878034 - DNA, 582 bp, Homo sapiens
ttgcccactttttgatgtttctttttttcttgtaaatgtgtttaagtttcttatagatcctagatattagacctttgtcagacggatagggggcaaaattttttgttcattctgtaggttgtctgttcacttcttttgttgtgcagaagctctttagtttaattagatcccatttgtctatttttgcttctgttgccattgcttgtgttttcatcatgaaatctttgcagtgcctatgtcctggatggtatttcctagattttcttctagggtttttatagtttggagttttgcatttaagtctttaatccatcttcagttaatttctgtataaggtgtaaggaaaggctccagtttcaactttctacatatggctagccagttttcccaacaccatttattaaataggggatcctttccccattgctygttcttttttttttttttcaggtttgtggagaatcagaggattgcagatgtgcagtgttatttttgagatctctattcttttccattggtccaggtgtctgttttagtgccagtaccatgctattttggttactgtagccttgtagtatagtt

SEQ ID NO: 878035 - DNA, 631 bp, Homo sapiens
gtaatagtgctgcaatgaacatacatgtgcatgtgtttttataacagaacaatttatattcctttgggtaaatatccagtaatgggattgctgggtcaaatggtatttctgtttctaggtttttaatgaattgccacactgtcttccacaatgattgaactgattttcactctcaacaacagtgtaaaagcattcctttatctccacaaccttgccagaatctgttattttttgactttttaataatagccattatgactggtgtgagatggtatttcactgtggttttgagatgcatttctctaatgatcaggaatgttgcactttttttcatatgtttgttgktggcatgtatgtcttcttttaagaagtgtctgtccatgtcctttgcccacttttcaatggggttgttgttttttcttctaaatttgtgtaagttgcttatagatgctggatattagacctttgtcagatgaagagattgaaaaaattttattccattctgtaggtcgtctgtttactctgttgatagtttcttttgctgtgcagaagctctttcctttaattagatcatgtttgtcaaattttgctattgtggcaattgcttttagcatccttgtcatgaaatatt

SEQ ID NO: 878036 - DNA, 441 bp, Homo sapiens
ctttcaatgacacttgcttggttatctgggtagggaaaccagtccaagtaaattgttttagcatcaatcctgtccatttcaactcccatgtggtttgggataggtggacagcaggctgccatttcctgctgcccagtatcaatataacctggtcactctgtgccaagtaacccagctctggataggatgaggatctcaagccccctgagctgcccctgctcaccttcctggactcatgggccacctttccccttcccatgcaccctccattcwatggcagagagagtcggagtaacttgcccaaggtcatgcagtcaagtggcagagccagcatctggacccagccaatctggctcctaaacaccatgttttcttgcatcaggctgaagctgggccactacccagacaaaaaggatcagctgtatgatgtgatgtgaaggg

SEQ ID NO: 878037 - DNA, 605 bp, Homo sapiens
taagatttagttattaccatgatggaatttatttttaaagaaatgtaggccaggtacggtggctcacgcctgtaatcccagcactttgggaggccgaggtgggtggatcacgaggtcaggagttcaagactagcctgaccaacatggtgaaaccccatctctactaaaaatacaaaaattagccaggcatggtggcgcatgactgtaatcccagctactcaggaggctgaggcaggagaatcacttgaacccaggaggtggagattgcattgagctgagatcgtgccactgcactctagcctgggtgacagagcgagactctgactcaaacaaaaaaaagkggccgagctcagcggctcaagcctgtaatcccagcactttagaaggctgaggtgggtggatcacctgaggtcaggagttcgagaccagcctggctaacatggtgaaagcctgtctctactaaaagtaataaaaaaaaaaaattagctgggtgtggtggcaagcatctgtagttccagctacttgggaggctgaggcaggagaatcgcttgaacctgggaggcgtaggttgcagtgagctgagattgcaccattgcactccagcc

SEQ ID NO: 878038 - DNA, 582 bp, Homo sapiens
tcacactactctggcaaaatcaacctgaactgctggattataggtcttggcctctggagctgcctgcttgagccctggcaggtctggaggcttggggctctttcattgactcagaaatatttctgcttcccacccaggacttctgttgtctcttcctcccttctcctcccctgctctcaggactcttagatgtagcccaggtttgcttccacacagttgacattggcggtgcacggtcttctcccctctaygccctcagatctccacgcctgtgcctatgacacgtgacacctgcacctgtgttgccaagcctggctcctcatccgtggccactcctgcccccacaacctgccagttctgcctcctttttgcctgcctcctgcctatctttacttcactgatttcttcggctggaaaatatttctacaacttcccctcccacactcacctggggctatgacattgttgtgcgcactggttgggcctcgcccctgccacctaacaagtacatcctacaggcccaggagggcattatctgtggttttgaatttctagtgtctcgaactgtactggcccagagag

SEQ ID NO: 878039 - DNA, 461 bp, Homo sapiens
agtctggaagagaaaacagaaacatcgtcaaagaaaccagctccacagcagagggggtcacagaataacataaacatgctcatgtgcagtacaaactcagagacatcaactccaaagagtaggaaacttggtgataacactcagaatcacctaagatgtgtgcttcctgaatgcaaagcctggacacaacagtgatctgggagagagaggctggcccacaggctccctggagctaacgattgtccacttgggcagggtcctctgatggggtaatctgggggctgcaggagaggccctaaacarctcatctccccactgccatctccatgttacaatatctaaaatttcgacatgaaagaaatacttcctcttggctttttaaaaagaatttctttcatctgtagaagcacttcacacctggagcagcagtagcattttcgctgggctgccactaacattag

SEQ ID NO: 878040 - DNA, 568 bp, Homo sapiens
ctgtgcattagacccattcatccattcagttagcattccactatgaggacctgggcaaacacctgttatttccctagagtttatgaattcctaaagacaagggctgtgtttcatccatttttttttaactttaagttctagrgtacatgtgcacaatgtgcaggtttgatacataggtatacatgtgccatgttggtgtgctgcacccctcaactcctcatttacattaggtatttctcctaatgctatccctcccccagccccccaccccccgataggccccggtgtgtggtgttccctgccctgtgtccaagtgtactcactgttcaattcccacctatgagtgacaacatgcagtgtttggttttctgtccttgtgatagtttgccaagaatgatggttttcagcttcatccatgtccctgcaaaggacatgaactcatcctttttatggctgcatagtattccacagtgtatatggtttcacccatttttgaggctacggcccttctcctcttctctcttccagttgtttctccctgctcccccaggttctgttctgccattca

SEQ ID NO: 878041 - DNA, 568 bp, Homo sapiens
ctgtgcattagacccattcatccattcagttagcattccactatgaggacctgggcaaacacctgttatttccctagagtttatgaattcctaaagacaagggctgtgtttcatccatttttttttaactttaagttctagggtacatgtgcacaatgtgcaggtttgatacataggtatacatgtgccatgttggtgtgctgcacccmtcaactcctcatttacattaggtatttctcctaatgctatccctcccccagccccccaccccccgataggccccggtgtgtggtgttccctgccctgtgtccaagtgtactcactgttcaattcccacctatgagtgacaacatgcagtgtttggttttctgtccttgtgatagtttgccaagaatgatggttttcagcttcatccatgtccctgcaaaggacatgaactcatcctttttatggctgcatagtattccacagtgtatatggtttcacccatttttgaggctacggcccttctcctcttctctcttccagttgtttctccctgctcccccaggttctgttctgccattca

SEQ ID NO: 878042 - DNA, 603 bp, Homo sapiens
taaaaattagctatgttgaaggtatttacaccacagaaattggcaaacactgcaaatcagaaggtagttttattttttggctgagaagcctgtttatgaacatgactaactcatatggattagacatggagggagagagggactgaaatgacctgtaagatgaccgtctgctgccactaactaaattatgaacttaggaggggattggctccaagttaatatcagttgcaaacagcagtgtgcaaggagatatctgaaatcaccattagtcttacaagctcagcagctggaargaagatttctaggatgccatttattatagtgcaaagcagctctgaggagccacaagccctaaaagatttagggtatgcctagagaacattgagagacaagttgattaggaaagaattggtctgtgatctttaggagtctatgtctaggaaaaaattatgagaatcactagtaatggagctggtgttcactcaggcaccatggaagcaattaacattagatggtcaactggaaattaagctgggagtgttgattctagggtctggtctgccaataatttgttggctaacctaagacaatgtgttaaacctc

SEQ ID NO: 878043 - DNA, 610 bp, Homo sapiens
acaagatgacactctattagttgagcctatgggcagactttgcctagactattaatggtcttaaacatgttaatgtttgtgaaataataaacttaacaaaacatgacattctaaaattggattgtggtgatagatgcagaactctgtaagttactaaaaatcaatgaattttacgtttacaatgagtgaattttatggcatataaattatacttcaataatttttttataaatccagaggaaaaaatgcctgctataatccatatgagccaatattttaggagagattaatctaaaagaattacttcctttttaacctgaagtttcaattactacagaaaatatawaacactacttactctatcaacatcttttgcttggtttactgcatcttcctgatctcttccatggcactcttaacaacaaacttttggtcaacaaatttctgaaaggtatagcagctcaccaaaattccctctttagcgcagtactcttattatcgaataattacaggataaggtttgcaaaaagaggcattggccaggatttttggacaggaccctggtgaagagtcatatgctggcctacttttaggggcagaaagaattagg

SEQ ID NO: 878044 - DNA, 645 bp, Homo sapiens
acaacaacaaaaatctacaggttaatattcctgatgaacatagatgcaaacatcttcaacgaaatactagcaaaccaaatacaacagcacatcaaaaagattatacaccatgatcaagtaggatttatctcaggaatgcaaggatggttcaatgtgtgcaaatcaataaatgtgatacatcatatgaacagaatgcaagcaaaaaaaaaaaacacatgatctcgatagatgcagaaaaagcatttgataaaatacaacatcccttcaggataaaaattgtctgtaaattaggtatagaaggaamatacctcaacacaataaaggccaatatgacaaacccacagctaatatcatagtgaatggaaaatgttgaaaacttttcctcaaagaacttgaacaagagaaagatgcccattttcgccacccttattcaacatggcactggaagtcctagccagagaaattaggcaacagaaagaaatgaacagcatccaaattggaaagcaagagattaagttatttctgtttgcagctgacatgatcttatatatggaaaaccctgagaataccacaatacaactgtcggaactaataagtgaattcagaaaagtcataagatacaaaatcaacatacaaccatcagtg

SEQ ID NO: 878045 - DNA, 642 bp, Homo sapiens
aggaaaagatctaaaatcgataccctaacatcacaattaaaagagctagagaagcaagagcaaacaattcaaaagctagcagaaggcaagaaataactaagatcagagtaggactgaaggagatagagacagaaaaaaaaaaaacccttcaaaaaaatcaatgaatccaggagctggtttttttttttttttaaagatcaataaaattgatagaccgctaccaagactaatagagaagaatcaaatagatgcaataacagacaataaaggggatatcactaccgatcccacagaaatacaaactaccatcagagaatactataaacacctctacacaaataaactagaaaatctagaagaaatggataaattcctgggcacatacaccctcccaagactaaaccaggaagaagctgaatccctgaatagaccaataacaggctctgaaatcaagacaataattaatagactatcaaccaaaaaaagtccaggaccagatgkattcacagcctaattctaccagaggtacaaaaaggaactggtaccattccttctaaaacccctaatttattttatgaggccagcatcatcctgataccaaagccttgcagagacacaacaaaaaaagagaattttagacca

SEQ ID NO: 878046 - DNA, 669 bp, Homo sapiens
tattttgagtaattttttcccatcagccatgcagggtaggtttgttatcaccattttactcagagagcctcaagatcaagtaactagaaagatcaggaccaagattcaaacctaggccaactaactccaaagtccatgctttttgctaaaaatcaaacctcctctaggatcttcatatgaatctgacaatgtgcccctattcttagatccaaaaatctgttccctggacaattagatggggcaaaggtaaagaaaggacatggcaagattagagacggtggagggcaggcaaaaggtggaatctgataaccaggcttctcttccttccacgtcctacattcctttgccaatgctcttctccactagctggtacacagttcttggggttctcctggtaacttggtcctgtctgtagaaatcaacaaaggcagtttctacagtaacccttggcagtaagatttactgggatggctcacagmgtctccaggtattgagatatatcttatgtattctaaaaggaaaggcttaaaagatgacaatcaggaagcttcagttggctgcttgcttactagcatttctcaggctccgtctttcacttcagctctgatttgcaatatagaaccttctgcctggccaaagcagtatcttgacagtggataggagctattt

SEQ ID NO: 878047 - DNA, 573 bp, Homo sapiens
atgtgcttttgggggtccctgaaccatgctgtataaagcacagctccctggtggagacaccctgcagagagacaatgaagagaagattcatctagaggaagaagccaggactgcacagagagagggagacacccacccaaaaatccagtggtgcagtcaaatcttagagctccaaaataatttcctttgactccatgtctcacatccaggtcatgttgatgcaagaggtgtgttcccatggtcttaggaagctctgccctgtggctttgcagggtatatatctccctcctggctgctttcatgggatggtgttgagtgtttgcagcttttccagrtgcatggtgcaagctgttggtggagctaccattctggggactgaaggatagtggccctcgtctcaaagctccactaggcagtgccccagtagggactctgtgtgggagctgtgaccccacatttcctttctgtactgccctagcagaggttctccatgagggccccacccctgcagcaaacttctgccagggcatccaggtgtttccattcatcatctgaaatctgggtggaggttcc

SEQ ID NO: 878048 - DNA, 641 bp, Homo sapiens
aggatcccaatctcttctagcttgtagagtttctgctgagaaatctgctgttagtctgatagagcttcctttataagttacctgatgtttttgcctcacagctcttaagattctttccttcatctttattttagataacctgatgactgtgtgcctaggcgatcatctttttgcagtgagtttcccaggtgttctttgagcttcctgtatttggatgtctaaatctctagcaatgctggggaagttttcatctattattccctcaaatatgttttccaaaattttagatttctcttcttcctcgggaaaacaattattcttaggttcggccatttaacatagtcccaatcttcttggaggctttgttcattttttattgttkttttttttttccttgtctttgttggattggattaattcaaaagccttgcctttgagctctgaagttctttcttctactttttgattctattgctgagagtttccagtgcattttgcaattctccaagtgtgttcttcatttccaaaagttgtgattttttttaatttatgctatctatttcactaaagattttcccatttatatcctgtattttctttttgatttctttcagttggacttcacctttctctggtgcctc

SEQ ID NO: 878049 - DNA, 637 bp, Homo sapiens
tctggatttattattaacatttgcaactcccagaagctgatgatcatctggtgtattctcagtgcatcaaaaggctaaagaccaaaggtaggtgcaaagatgcaaagcatggcttctgacccaaaggagcttgtccattgtaaactctttaaaggcagagggctatatgttatgaggtaagtttatgagatacattaaaaagtgctagttagatatatctctatttaaacaataacttaagacaataagaaaggcactttcacaagattactaacacaaaattttctaggagtttaggggaggaagaaagcttttcaggctcagtaatagaggaaggctttacccagastgatatataaacaaagccttgaaaatgagtcgtgcgcagtggctcacgcctgtaatttcagcactttgggaggccaaggtgggtggatcacctgaggtcaggagtttgagaacagcctggccaacatggtgaaactctgtctctactaaaaagacaaaaattagccgagtgtggtggcaggtgcctgtaatcccagctactcgggaggctgaggcacgagaattgcttgaaccccggaggcagaggttgtagtgagccgagatcctgccactgcactgtagcctgggc

SEQ ID NO: 878050 - DNA, 589 bp, Homo sapiens
cataagtggccatcaatacttgcaaacatttaaccatcaaaatatatcaatcattttttaagaagttcctcagtatttctttcacattttaataaactaagttagattctttccccaaccaagaaagtagaaattagagatgactcatctttctatttgaatacccctagtcaccaacaaaatagatactgaaaaagaaaagccataataaatagtagttatcactattgttataacacaagttgagtatccctaatctgaaaatctgaaatgctccaaaatctgaaactttttgagcaccaacatgacaccacaaagtggaaaactccacacttgacytcatgtgatgagtcacagtcaaaaagcagtcaaaacttggctgcatacacaaaagtattaaaaaattacataaaactatcttctggctatatgtataaggtgtatataaaacaaataaattttgtgtttaaacttgagttccatcctcaagatatctcattatgtatgcaaaaatattccaaaactctagaaaatctgaaatttcatataagggacactcaatctgtacagataagggatactcaatggg

SEQ ID NO: 878051 - DNA, 615 bp, Homo sapiens
tgttgttaggaaagggcgtgggagagggtggccccacaaaacagtgtaaagttctaaagaatttgagaggaacactctgcgggaccctgttccaagggcatctttctaagagtctgtcccttaggctctgcccctttttggccacgttgtcaaaggccttctttatgaacgaagtgagacacattatttttgttttcttgaattctaaagtgattgtcttgagttccctgggggagactcytgggaggtgtggcccactctattccagaaacaaaccaggagactgaagactcatcccaatcccatatcccatgaaaatgtgaaatcaaatcacccctgacaattccaaaactaacggaatcctaacataactctatgtaactctaaagctgagtgtgctggtaattaagcttccagcccacccttcccagctctggggtgcagggtcaccatgggctccttcctgtgtgcaccccaccccacccccactgtcagcatcctgtctccaccctgagagtgacagctggttccagtagcgggagttggttccagcttgccattttcctagcactcctataaccagcctgctgatgcccattcagagacagcagcacg

SEQ ID NO: 878052 - DNA, 601 bp, Homo sapiens
ccaatccaccgtcccaacagattatattcctaaatttaagtaaagctgtttcccattaaaggggctaatggtcttgaactcttagcttcaagcaatcctccaacttaggccctccaaagcactgggattacaggcatgagccaccacacctactagctagaytaagcaagaaaagaagagggaagatccaaataaacacaatcagaaatgaaaaagaatacattacaatttctaccacagaaatacaaaagatcttcagagactattatgaacaatacatgttcacaaactggaaatactagaggaaataaataaaatcctagaaacacaacttcctcagaattaaccaggaagaaacagaactcctgaacagatcaataatgagtagtgagactgaatcagcaatttaaaaatcttccaaaaaattaaattcagtaccagacaaattcacagtcaaattctatcaaacatacaaagaataactaataccattctctcttaaacttttcctaaaaactaaggaggagggtattcttcttaattcattctatgaggccagcatcaccctgatactaaaagcagacaaggaaacaacagaaca

SEQ ID NO: 878053 - DNA, 574 bp, Homo sapiens
gcattgccaagtcaatcctaaaccaaaagaacaaagctggaggcatcaccacgctacctgacttcaaactatactacaaggctacagtaaccaaaacagcatggtactggtaccaaaacagagatgtagaccaatggaacagaacagagccctcagaaataataccacacatctacaaccatctgatctttgacaaacctgacaaaaacaagaaatggggaaaggattctctgtttaataaatggtgctgggaaaactagctagccatatgtagaaagctgaaaaaaaagaattatttcaaaatattactgttcattgacaaggcacctagccacccaagagctccgaygaagatatataaggagattaatgctattcttattcctattaacacagcatccattccgcagcctatgaatcttaaagtaattttgactttcaattctcattaaagaaatgcattttgtaaagctatatctgccatagatagtgattcctctggtggatctggacaaaagttaaaataacaaaatcaacaggagttttgaagaagttgatcccaaacctcacggat

SEQ ID NO: 878054 - DNA, 584 bp, Homo sapiens
ccattagttgatataaatgcatcatacaatagttcctgtttctgttcctttgacagtaactttttgtagttagactagtatctattgctaaagtaattataagtaaagatgcaagaaagacactagaatgacatgatactgattgatgtaaagtgctgatgtagacaatccaactacacacacagacacacaaagaaacaggcagcatgtaatgggtatgtgtttgtgtgtgtattgattgagattgrcattgaaattaaaatacaaaattaggaaaacaaacaaataaatatttttgatccccaatcaaagatcaacattttttatctttggggaaaaatgagagaaaatagggggaaaaaaatctttcttttgtttgattgaaagtgaggatggagtagctgaaagacttaaactctagttaaggaaacagctattatgaaaaggttactgtgagctttagaatgacatatctgctataaggaggtattacacttgaagaatgctgtaaggtgcctgtgtcagataaatattaacaactggagccctgacactaaaaaatagttttctgtatattctgtaaa

SEQ ID NO: 878055 - DNA, 598 bp, Homo sapiens
agcccccaaaagccaaaagaaactgcccaaggtgacatagctgctgagtgatggaatggggactagatcaaactctaaaatcaaagagcatgctcacaattacccattaagagaactaaaggaaacaaaattctccaatctattctccctgtgcacattaaaattaaaacaatggtgttgcatttttcaaacagttatgtactgatattataccaagatgcaagcacgggtggattccttaattgtaataggtataagtaatataatgctaaaatgcaaattttgaatcccattctgtcttccaactattatctctgccaaattctttcacaattctacattaatacatattacacattttggaaaatttaatatataaggctactgtttgtattatatttgaaattagttatgttagccattaatatttacactgtttcacratcctaaaaatatcactatcttgtcttactaaaaaaaattgaaaatggagtcattaaaaaaaagtgaaaaaaaaacctctcaaagagtaaaaaatctaaaagctatgcctttaggaggaggtgaaaattaactagtgtcatctcaagtatgaaca

SEQ ID NO: 878056 - DNA, 683 bp, Homo sapiens
tgttcccccattgtatctaggaaataactagcttgcttttgatattcaggctcataggcagaagggacttgccttgtctcagatgaaactttggactgtggacttttgggttaatgttgaaatgagttaaacctttgggggactgttgagaaggcatgattgattttcaaatgtraggacatgagatttggaggggttgggatggaatgatatggtttggctgtgtccccacccaagtctcaacttgaattttttctctcagaattcccacgtgttgcaagagggacccagggggaggtaattgaatcatgggggccagtttttcccatgctattctcatgacagtaaataagtctcaggagatcgtatcagttaatcaggtgtttccacgttttcttcttcctcacttttctcttgccgcggccatgtaagaattgccttttgcctcctgccatgattctgaggcctccccagccatgtggaactataagtccaattaaacctctttttgttctcagttttggttatgtcttttttagcagcatgaaaaaaaactaatacaacctgtttctagattaaagtatattttgatggtaacttaacatttagcccagagttgatactgatgtcaatataaaatctgaagtagacatagaattatggtatactttggggtaagaagt

SEQ ID NO: 878057 - DNA, 448 bp, Homo sapiens
tttgggactttaaaatttgactgcaccactggatttcagacttgcatggtcctgtaaccccttggcgttggccaatttctcccatttggaatggctgtatttacccaatactgtacccccattgtatctaggaggtaacaagctcgcttttgatattacaggctcataggtggaagcaacttgccttatctcagataagactttggactgtggacttttgggttaatgctgaaatgagttaagatwgggggactgttgggaaagcatgattggtattgaaatgtgaggacatgagatttgggaggggccaggggcacaacgatatggtttggctgtgtccccacccaaatctcattttgaattgtagcttccataattcccccatgttgtgggagggatctggtaggagataattgaatcatgggggcagttttcctcatactgtttt

SEQ ID NO: 878058 - DNA, 619 bp, Homo sapiens
ggttctctagagggatagaagtaatggaatatctatctatctatctatctatctatctatctatctatatgtttattaagtattaactcacatgattacaaggtcccatgtattagttctttttcacactgctgataaagacatacccgaaactgagaactaaaagagatttaattggacttacagttmcatatggctggggaggcctcagaatcatggtgggaagtgaaaggcacttcttacatggtggtggcaagagaaaaatgtggaagatgtgaaagcggaaacccctgataaacatatcagatcttgtgagacttattcactatcaggagcacagcatgagaaaaactggcccccatgattcaattacctcccccgatccctcccatgacacatgaaaattctgggaggtacaattcaaactgagatttgggtgaggacatagccaaaccatataatttcacccctggcccctccaaatctcatgtcctcacatttcaaaaccaactgtgccttcccaacagtcccccaaagtcttatctcatttcagcattagcccaaaagtccacagtccgtagtcttatctgagacaaggcaattgccttccacctatgag

SEQ ID NO: 878059 - DNA, 619 bp, Homo sapiens
ggttctctagagggatagaagtaatggaatatctatctatctatctatctatctatctatctatctatatgtttattaagtattaactcacatgattacaaggtcccatgtattagttctttttcacactgctgataaagacatacccgaaactgagaactaaaagagatttaattggacttacagttccatatggctggggaggcctcagaatcatggtgggaagtgaaaggcacttcttacatggtggtggcaagagaaaaatgtggaagatgtgaaagcggaaacccctgataaacatatcagatcttgtgagacttattcactatcaggagcacagcatgagaaaaactggcccccatgattcaattacctcccccgatccctcccatgacacatgaaaattctgggaggtacaattcaaactgagatttgggtgaggacatagccaaaccatataatttcacccctgscccctccaaatctcatgtcctcacatttcaaaaccaactgtgccttcccaacagtcccccaaagtcttatctcatttcagcattagcccaaaagtccacagtccgtagtcttatctgagacaaggcaattgccttccacctatgag

SEQ ID NO: 878060 - DNA, 676 bp, Homo sapiens
aagaaataattgcctagctcaagatcagaaagaaatgtataccatggtttatcctaaagtttacagtattagctcttatgtgtaggtctgcagtctactttgtattgatttttgcataggttgtgaggttcacgttcaaattaactttttttttcatttacatgtccaactgtccccacatcatttttttcctgttcacatttattttattctttaaatttatgaggttatataaatatgcatgtattttatgcatatatacaatgatataataaaaccagggtaattagcatattcatcaccccaaacatttataatttctttttttttttttttttgagacggagtctcwctctgtcgcccaggctggagtgcagtggcatgatctcggctcactgcaagctctgcctcctgggttcacgccattctcctgcctcagcctcctgagtagctgggactacacaggcaccggctaccatgcccggctaatttttttgtatttttagtagagactttacagctccacatggctggagagacctcaaaatcatggcgggagttgaaaggcacttcttacatggcagcagcaagagaaaatgagaaagaagtaaaagtggaaacccctgataaacccatcagatcttgtgagacttattcactatcacgagaatagcat

SEQ ID NO: 878061 - DNA, 587 bp, Homo sapiens
agaatctgcattttagcaagatccccaggtgttgaatagtcacattcgagtttgagaatcactagtctagcagacaataaatgaatttgggattaaataataagtcacctgactcctggcccagagctgctgtctttgaatcacagtgattggcagtgagtagtgggcaattagggccaacagcytcaggtcctgaagagctcctctaatttgagagggtctgctggtttagtgaagggcagagctgctgctgcctcatggcctcttggggacatagggcctcacaatgtctgggtcagcttaggtcccagaggtcctaggatccttaattgaaaaatcataattatttatttagatgacactgctgttagcatgcagaattaatgacagccatgtggtctaggttgagggaggcagaaatggagggcaaaagacttctgggtggggatttcagagcccagaggtgctccataaactcaccttcgtggacaccccttaaccatgttatgtttattaaacagatacacaaaagcataagcacactttcccttaaagcttaaataatagctacgaattgtttccagttt

SEQ ID NO: 878062 - DNA, 587 bp, Homo sapiens
agaatctgcattttagcaagatccccaggtgttgaatagtcacattcgagtttgagaatcactagtctagcagacaataaatgaatttgggattaaataataagtcacctgactcctggcccagagctgctgtctttgaatcacagtgattggcagtgagtagtgggcaattagggccaacagcctcaggtcctgaagagctcctctaatttgagagggtctgctggtttagtgaagggcagagctgctgctgcytcatggcctcttggggacatagggcctcacaatgtctgggtcagcttaggtcccagaggtcctaggatccttaattgaaaaatcataattatttatttagatgacactgctgttagcatgcagaattaatgacagccatgtggtctaggttgagggaggcagaaatggagggcaaaagacttctgggtggggatttcagagcccagaggtgctccataaactcaccttcgtggacaccccttaaccatgttatgtttattaaacagatacacaaaagcataagcacactttcccttaaagcttaaataatagctacgaattgtttccagttt

SEQ ID NO: 878063 - DNA, 587 bp, Homo sapiens
agaatctgcattttagcaagatccccaggtgttgaatagtcacattcgagtttgagaatcactagtctagcagacaataaatgaatttgggattaaataataagtcacctgactcctggcccagagctgctgtctttgaatcacagtgattggcagtgagtagtgggcaattagggccaacagcctcaggtcctgaagagctcctctaatttgagagggtctgctggtttagtgaagggcagagctgctgctgcctcatggcctcttggggacatagggcctcacaatgtctgggtcagcttaggtcccagaggtcctaggatcyttaattgaaaaatcataattatttatttagatgacactgctgttagcatgcagaattaatgacagccatgtggtctaggttgagggaggcagaaatggagggcaaaagacttctgggtggggatttcagagcccagaggtgctccataaactcaccttcgtggacaccccttaaccatgttatgtttattaaacagatacacaaaagcataagcacactttcccttaaagcttaaataatagctacgaattgtttccagttt

SEQ ID NO: 878064 - DNA, 689 bp, Homo sapiens
tcttatcctaaagactctacacacaaaaattattattactaatagacaatttaataaagttgcacatacaaaatccagatataaaaatcagttgcattttttaatactaataatgaaaaagctgagaaagacattaagaaaataatcacatttatagtggcatcaaaagaaaataaaaagcctagtaataaattgaatgaaggtcttgaaggacctgtaggctaaacagtataaaatactgatgaaaaatattaaagagacacaaacaaatggaaaaatactccatgttcatgttttggaagacttaatattgttaactgttcatacaacccagaacaatctgcagattcaatacasttcctaccaaaataccaatgttatttttacagaaataaaaaaataaaattttaaaattcatatgatgaaaaaaaggaccctgaatagacaaaacaatattgagaaagaaaaatatgcctggaggtatcacactttgttatttaaaaatatattacaaagctacagtaattaaaacaggatacagacagatatatagaccaatgggatacaataaagagcctagaaataaatgcgcacatatagggtcaactcatgttcagcaagagtgccaaaaatacacaatgggggcaggatagtttcttcaacaaatggtatcggaaaaaactgaatat

SEQ ID NO: 878065 - DNA, 555 bp, Homo sapiens
aaaataaacagttgattaacacatattttgtatgttatatgtattttatactgtgttcttacataartaagctagagaaaagaaaatgttattaaaaatcgtaaggaagagaaatacatttctaatagtgcactgtatttattgatattgtaagtttacttcatctgtttacaaaatggatcatctgcctgaaatgacaactaactacagcctcagatcttaatctatggtacatatcaggcaattcaactttttctcataatgtcatgacttttctgtttcttgggagcacttccagcaaaaactagtggcacttcacacggatcccatggtgttattcgaggattatggtattgcactaagcactattgcactaagcactgtgaaagaaatgcaagaactgtgagagatcagtttttacttaatacacaatttactggagagatgaactgctcatgcacagatgattttttaaaatttattttactttaagttctggaatacatgtgcagaacatgcaggtctattacataggtatacatgtgctatagtggt

SEQ ID NO: 878066 - DNA, 555 bp, Homo sapiens
aaaataaacagttgattaacacatattttgtatgttatatgtattttatactgtgttcttacataagtaagctagagaaaagaaaatgttattaaaaatcgtaaggaagagaaatacatttctaatagtgcactgtatttattgatattgtaagtttacttcatctgtttacaaaatggatcatctgcctgaaatgacaactaacyacagcctcagatcttaatctatggtacatatcaggcaattcaactttttctcataatgtcatgacttttctgtttcttgggagcacttccagcaaaaactagtggcacttcacacggatcccatggtgttattcgaggattatggtattgcactaagcactattgcactaagcactgtgaaagaaatgcaagaactgtgagagatcagtttttacttaatacacaatttactggagagatgaactgctcatgcacagatgattttttaaaatttattttactttaagttctggaatacatgtgcagaacatgcaggtctattacataggtatacatgtgctatagtggt

SEQ ID NO: 878067 - DNA, 602 bp, Homo sapiens
cagaacctcttttaactcaatgagctgcaacattgaatgcagggtccctacttggtgggcccaaatcaataaattcagcctgctccaactttatgttccttccaccattatcccacacccttaatatccattcccatgcctgttctccagatttctgtttatataaattagaaaactcaaacagttctttttgagtgtagcacacctcctcgtaggtcacactctcaacctcacctctaggggcctaccgggactttactctagttataggtctaaaagcaaacagaggtgttgggggtggattctgaggagaatcaacattatattgcctgacaactgcctcattggaggccatcaccgttgcccaaggcaacacaaagtttatctcctcaggcaaaggcggaaaggtgatggcagcatgggycaggaggggatgctgccaccactggggatggggaagctgttccttctggcaaaaaagtttcatcagagtttacaaactcagtgtcctcagcttcatcagagtcctccaacatgtccccagtccaagttacagggtcccattcttttccaatcaatgccctcactttaacagtagacac

SEQ ID NO: 878068 - DNA, 600 bp, Homo sapiens
acagctcctcaccagcaatggaacaaagctggacggagaatgactttgacgagttgagagaagaaggcttcagatgatcaaactactccaagctaaaggaggaagttcaaacccatggcaaagaagttaaaaaccttgaaaaaaaattagacgaatggctaactagaataacccaatgcagggaagtccttaaaggacctgacggagccgaaaaccatggcacgagaactacgtgatgaatgcacaagcctcagtagccaattcgatcaastggaagaaagggtatcagtgatggaacatcaaatgactgaaatgaagtgagaagtttagagaaaaaagaataaaaagaaatgaacaaagcctccaagaaatatgggactatgtgaaaagactgaatctatgtatgattggtgtacctgaaagtgatggggagaagggaaccaagttggaaaacactcttcaggatattatccaggagaacttccccaatctagcaaggcaggccaacattcagattcaggaaatacagagaatgccacaaagatactcctcgagaagagcaactccaagacacataattgtcagattcaccaaagttgc

SEQ ID NO: 878069 - DNA, 477 bp, Homo sapiens
ttgtctgaagcccagaaagttacccgcagcagctgcaaaagccacaagatcaggaaagtgaaaggaacatgaaacagaaaggacctgaatgggaaaaattagaaggcatgctgattctcacattttcaacatgtagcttttgtatgggtcgggggattttaagattctgtggattacagggcttaggtgatctagaatggaagtagagaaaataattttcttgtgttggaaggcagcaataaatcatcattttattgatrttgaaaaaaaccagagcttattgacaggatttaggtattattgaaatgcaagattaagggaaaaggtagtaaaagttgactctgagctgttttgttggagcaactaggtgggcggaatattatgtgtatggatgcaatattatgtaggtaataaatattacaataaataccatgtgaaaaataacactgaattaaaaagaggaaacttctttagata

SEQ ID NO: 878070 - DNA, 606 bp, Homo sapiens
cccttaaaaatatgaaatcattttttcgaaatatgtgccacagacaattttgttaaataagaagacagaaacagggcattatcaagagataaatattcaatataccttatatttctgtcacacatttttataccaactgtgccaaaaattgtatatcatataaatgataacaagttcacaaaggcattcctttatcccttaactctcaaattagaaactttcataggtaggaagtaggggaagcatatattccctttgaaaggtgcaagaaaatgtcattggcattcaccatggtactcttcaagcttaaaaaaaatggactgcaaaacatttacaaacatagcatatttattgggtacctttatgtttacataaatattgaagatatctcacatacctctttcaatcagattatctcactgacatttattgaccactttctatggggaaaacaaatkgtgtttgccctagaaatcttctttggaactcagttcttgaataaaaatgttctcctaaataaataaacaaacaaataaataaataaaaaataaaataaaaaaatgcctgttggccatttatgtttatctttgttttgttttctgtgat

SEQ ID NO: 878071 - DNA, 654 bp, Homo sapiens
aatattagacagtttgacatgtccgtcatctctgatctgcaaaattctgatagaaacctctcaaaaacagaaaaaaaaaaacttagtgacagtcaagagggaatgtggactctaaaacactatgaatgcaataaatagtctgaaatgaaattaaaaagaacaaaacaaataaatttaacaaaagaaatgcaagatgtatactttgaaaaatacaaaaacatcgttaaaaaaaattaaagaaagccgggagtggtggctcacgcctgtaatcccagcactttgggagggtgaggcgggtggatcacgaggtcaggagttcgagactagcctggccaatatggtgaaaccccgtctctactgaaaatacaaaaattagttggtgtggtggcatgtgcctgtagtcccagctgcttgggaggctgaggcaggagaatcgcttgaatccgagaggcggaggttgcagtgagccgagattgcgtcactgcactccagcctgggcgacagagcaggmctctgtctcaaaaaacaaaaaaaaacaacaaaaaaaattaaagatgacctaactaaacggaaaggctttctgtgttcatggatcagaagacctaatattcttaagatggcaataatccccaaactgatctacagattcagtgc

SEQ ID NO: 878072 - DNA, 564 bp, Homo sapiens
ttctttgaagagataaataaaattgatgaaccattagtgagattaacgaagtaaacaagagagaagatccaaataaactcaattagaaatgaaacaggagctattacaaactgataccagagaaatacaaaagattattcaagacttccatgaatgcctttayatgcataaactagaaaacctagaggagatggataaattcctgaaaatataccaccctcctaggttaaaccaggaagatatagaatcgccgaacagaccaataacaagcagtgagattgaaattgtaattttttttaataccaacaaaaaaaaagtccaggaccagatggatttacagttgaattctatcacacattcaaagaagaagtggtaccaattctatagacactattccacaagatagagaaagagagcatcctccctaaatcactctgtgaagccagtatcatcctaataccgaaaccagggaatgacataacaaaaaaagaaaactacagaccaacatctttgatgaacatagatgcaaaaatcctcaatcaaatactagtgaactgaatccaa

SEQ ID NO: 878073 - DNA, 609 bp, Homo sapiens
aatatcaagaagcttttctctatgtttttttctagtagttttatagtttcaggtcatatgtttaaatctttaatccatttttagttgatttttgtatatggagtgagataaaggtccacttttattcttctactagtgcatatccagttttctcaacaccrtttattgaagatactgccctttcaccactgtatgttactggaacctttgtagatcagttgacaataaatgtgtgggtgtatttctggactctttatcctgttttattagtttatatgtctctttttttagaagctctatgctgttttggtgactagagctctgtagtcaatttcagatcaggtagtatgatgcctccagctttgctctttttgctcaaaattgctttggctatttgagtttttttattccatacgaattttagggctttttttttttttcgattactgtgaataatgccattggaattttgatggagattgcattgaatctttgggtagtatggatattttaacagtattaatgcttccaattaatgaacacagggtattttgcaatttgtgttttcttcaatttctttcaccagtgtttttttcttaatttaattgt

SEQ ID NO: 878074 - DNA, 609 bp, Homo sapiens
aatatcaagaagcttttctctatgtttttttctagtagttttatagtttcaggtcatatgtttaaatctttaatccatttttagttgatttttgtatatggagtgagataaaggtccacttttattcttctactagtgcatatccagttttctcaacaccatttattgaagatactgccctttcaccactgtatgttactggaacctttgtagatcagttgacaataaatgtgtgggtgtatttctggactctttatcctgttttattagtttataygtctctttttttagaagctctatgctgttttggtgactagagctctgtagtcaatttcagatcaggtagtatgatgcctccagctttgctctttttgctcaaaattgctttggctatttgagtttttttattccatacgaattttagggctttttttttttttcgattactgtgaataatgccattggaattttgatggagattgcattgaatctttgggtagtatggatattttaacagtattaatgcttccaattaatgaacacagggtattttgcaatttgtgttttcttcaatttctttcaccagtgtttttttcttaatttaattgt

SEQ ID NO: 878075 - DNA, 590 bp, Homo sapiens
gcagggcatagccaaacaaaaggcagcagaaacctctgcagacttaaatgtccctgtctggcatctttgaagagagtagtggttctcccagcatgcagctggagatctgagaacagacagactgccacctcaagtgggtccctgacccccaagtagcctaactgggaggcacccccagtaggggcagactgacacctcacatggtcaggtacccctctgagacaaaatttccagaggaatgatcaggcagcaacatctgctgttcaccaatattcactgttctgcagcctccactgctgatamccaggcaaacagggtctggagtggacctccagcaaacaccagcagacctgcagctgagggtcctgactgttagaaggaaaactaacaaacagaaaggacatccacaccaaaaccccacctgtacgtcaccatcatcaaagtccaaaggtagataaaaccacaaagaaggggataaaacagagcagaaaaactggaaactctaaaaatcgagcgcctctcttcctccaaaggaacgcagcttctcaccagcaacagaacaaagatggacggagaatgactttgatgca

SEQ ID NO: 878076 - DNA, 621 bp, Homo sapiens
gaagcccatcagactaacagctgatctctcggcacaaactctacaagccagaagagagtggaggccaatattcaacatttttaaagaaaagaattttccacccagaatttcatatccagccaaactaagtgaaggagaaataaaatactttacagacaagcaaatgctgagagattttgtcaccaccaggcctgccytacaagagctcctgaaggaagcactaaagatggaaaggaacaaccagtaccagccaccgcaaaaacatgccagattgtaaagaccatcaatgctaggaagaaactgcatcaactaatgagcaaaataaccagctaacatcataatgacaggatcaaattcacacataacaatattaaccttaaatgtaaatgggctaaatgctccaactaaaagacacagactggcaaattggataaagagtcaagacccatcagtgtgctgtattcaggaaacccatcccacatgtggagacacacataggctcaaaataaagggatggaggaagatctaccaaacaaatggaaaacaaaaaaaaggcaggggttgcaattctagtctctaataaaacagactttaaaccaacaaagatcaaaagagacaaag

SEQ ID NO: 878077 - DNA, 621 bp, Homo sapiens
gaagcccatcagactaacagctgatctctcggcacaaactctacaagccagaagagagtggaggccaatattcaacatttttaaagaaaagaattttccacccagaatttcatatccagccaaactaagtgaaggagaaataaaatactttacagacaagcaaatgctgagagattttgtcaccaccaggcctgccttamaagagctcctgaaggaagcactaaagatggaaaggaacaaccagtaccagccaccgcaaaaacatgccagattgtaaagaccatcaatgctaggaagaaactgcatcaactaatgagcaaaataaccagctaacatcataatgacaggatcaaattcacacataacaatattaaccttaaatgtaaatgggctaaatgctccaactaaaagacacagactggcaaattggataaagagtcaagacccatcagtgtgctgtattcaggaaacccatcccacatgtggagacacacataggctcaaaataaagggatggaggaagatctaccaaacaaatggaaaacaaaaaaaaggcaggggttgcaattctagtctctaataaaacagactttaaaccaacaaagatcaaaagagacaaag

SEQ ID NO: 878078 - DNA, 621 bp, Homo sapiens
gaagcccatcagactaacagctgatctctcggcacaaactctacaagccagaagagagtggaggccaatattcaacatttttaaagaaaagaattttccacccagaatttcatatccagccaaactaagtgaaggagaaataaaatactttacagacaagcaaatgctgagagattttgtcaccaccaggcctgccttacaagagctcctgaaggaagcactaaasatggaaaggaacaaccagtaccagccaccgcaaaaacatgccagattgtaaagaccatcaatgctaggaagaaactgcatcaactaatgagcaaaataaccagctaacatcataatgacaggatcaaattcacacataacaatattaaccttaaatgtaaatgggctaaatgctccaactaaaagacacagactggcaaattggataaagagtcaagacccatcagtgtgctgtattcaggaaacccatcccacatgtggagacacacataggctcaaaataaagggatggaggaagatctaccaaacaaatggaaaacaaaaaaaaggcaggggttgcaattctagtctctaataaaacagactttaaaccaacaaagatcaaaagagacaaag

SEQ ID NO: 878079 - DNA, 621 bp, Homo sapiens
gaagcccatcagactaacagctgatctctcggcacaaactctacaagccagaagagagtggaggccaatattcaacatttttaaagaaaagaattttccacccagaatttcatatccagccaaactaagtgaaggagaaataaaatactttacagacaagcaaatgctgagagattttgtcaccaccaggcctgccttacaagagctcctgaaggaagcactaaagatggaaaggaacaaccagtaccagccacygcaaaaacatgccagattgtaaagaccatcaatgctaggaagaaactgcatcaactaatgagcaaaataaccagctaacatcataatgacaggatcaaattcacacataacaatattaaccttaaatgtaaatgggctaaatgctccaactaaaagacacagactggcaaattggataaagagtcaagacccatcagtgtgctgtattcaggaaacccatcccacatgtggagacacacataggctcaaaataaagggatggaggaagatctaccaaacaaatggaaaacaaaaaaaaggcaggggttgcaattctagtctctaataaaacagactttaaaccaacaaagatcaaaagagacaaag

SEQ ID NO: 878080 - DNA, 626 bp, Homo sapiens
tctcctgactctttttttttttttttaagttctgggatacatgtgcagaacgtgcaggtttgttacataggtatacatgtgccgtggtggtttgctgcacccatcaacccatcatctacattaggtatttctcctaatgctatccctctcctaaccccccgcccccaacaggccccagtgtgtgatgttcccctccctgtgtccatgtgttctcattgttcaactcccacttatgagtgagaacatgcgatgtttggttttctgttcttgtgttagtttgctgaggaagatggtttccagcttcatccatgtccctgggaaggacatgaactcatccttttttatggctgcatagtattccatggtatatatgtgccacatcttctttatccagtctatcattgatgggcatttgggttggtcctaagtctttgctattgtgaacagtgccacaataaacatacatgtgcatgtgtctttatagyagaatgatttataatcctttgggtatatacccagtaatcggattgctgggtcaaatggtatttctagttctagatccctgaggaatcaccacattgtcttccacaatggttgaactaatttacagtcccatcaacaatgta

SEQ ID NO: 878081 - DNA, 626 bp, Homo sapiens
tctcctgactctttttttttttttttaagttctgggatacatgtgcagaacgtgcaggtttgttacataggtatacatgtgccgtggtggtttgctgcacccatcaacccatcatctacattaggtatttctcctaatgctatccctctcctaaccccccgcccccaacaggccccagtgtgtgatgttcccctccctgtgtccatgtgttctcattgttcaactcccacttatgagtgagaacatgcgatgtttggttttctgttcttgtgttagtttgctgaggaagatggtttccagcttcatccatgtccctgggaaggacatgaactcatccttttttatggctgcatagtattccatggtatatatgtgccacatcttctttatccagtctatcattgatgggcatttgggttggtcctaagtctttgctattgtgaacagtgccacaataaacatacatgtgcatgtgtctttatagtagmatgatttataatcctttgggtatatacccagtaatcggattgctgggtcaaatggtatttctagttctagatccctgaggaatcaccacattgtcttccacaatggttgaactaatttacagtcccatcaacaatgta

SEQ ID NO: 878082 - DNA, 609 bp, Homo sapiens
ccacacgccaactggggacatctgggaaaggtttcctctaagggcagaaacaccagaaaatacagctttttagattttttatgctgcccaccatcttgcaacaataaggggccctgactgaggctgaagctaagctgagacaggcacagcacagacatgggagaaacatggaaccctgatgagatcaccaggacagaggttgaatcaagcctgggattcacactactcttcttttgaactttcgcttctgttaagtcatttgaatctttctgttttttcacttgcagacgaaagcatcctaatggttagagttcccatcatcggttaaagggaacccagccacttgcttgtcctttattttctacaaaaaccaaaaccaaagtgcacacagaagcttattccctggaggcaggccccaacttctgggagccccgtgcttaagacaygtcttggcgccttttggttgactacggcagtaagcagctgcctcgagcctcagagcaggatgactgcaggatgggagtaaagggcgagaagttttgagaagtgctaggaccatgattgaagtgtggtcagagatccaaggaagcaaaaatgttccagcagtgt

SEQ ID NO: 878083 - DNA, 625 bp, Homo sapiens
ataaccaatatggtatttactggtgaccttgaccagagcagtttccacagagcagtagagaggaaactcttgttggagtggattcaaagagaacatgaagagctgaaatggagactgagagtcgagacagctcttttgaggagttttgctgaaattggggcagataaatctggccataactagasagtgatgtgagatcaagggagagttctgttctgttttacagtgggagggattgtaggtttgtatgctgaagggaatgatccaggagagagaaaatagtgattcttgagtaaaaaaaggaggcaattgttgaagcattgtctttgagtaagagagaaagggtaaagtctagtgcacaagcgaagggattggccttggagttcacccatcccaaccagggggcatgaagtacccccaatataggtgcaggtagctgggaggatatagtgaaaagagcctatgaaaattctcttcgagttgctttagttttattagtgaaatagaaaataaagtattcagctgtgatgaaggcaggaaaagaggtattggaattcgagaagggagaaaaggatatgaaataatcatctagttgaatggcagaaagaacaccctagaagaacaa

SEQ ID NO: 878084 - DNA, 599 bp, Homo sapiens
ccagttaaaataaccagctagcatcatgatgacaggattaaattcacacatatcaatattaaccttaaatgtaaatgggctaaatgccccaattaaaatacacagactagcaaattggataaagagtaaagacccatcagtgtgctgtagtcaggagacacatytcacatgcaaagacacacataggctcaaaataaagggatggaggaatatttaccaagtaaatgaaaagcaaaaaaaaaaaaaaaaaaaaaaaagaaagaaaaaagagtgggggttgcaatcctagtctctgataaaacagaatttaaaccaacacagattttttaaaaaaataaaaagacaaagaaaggcattacataatagtaaagtgatcaatacaacaagaagagctaactatcctaaatgtatatgcacccaacacaggagcacccagattaataaaacaagttcttagagacctacaaagagacttagactcctacacaataatagtgtgagactttaacaccccactgtcaatattagatcaacaagacagaatattgacaaggatattctggacttgaactcagctctggaccaggtggacctaatag

SEQ ID NO: 878085 - DNA, 628 bp, Homo sapiens
cctagtctctgggttccttcaccaacggcagactggcttctcagtgactccagtatcagtgtgactagttacttatattaaattccctttttttggctgggcatggtggctcatgcctgtaatcccagcacttcgagaggctaggtgggaggatcacttgaggtcaggagttcaagaccaacttggccaacatggtgaaacccctatctctactaaaaatacaaaaattagccaggcatgggggtgcatgcctgtaatctcaactactcaggaggcagaggcaggagactcgcttgaacccaggragtggaggttgcagtgagccgagatggcaacactgcactccagcctgggctacagagtgagactccgtctcaaaaaaaaaaagaagaaaaaaagaaaaaaaagaaaagaaaaatttctcttttgagctagctgctgtggcctttgtttttctgactggactctgactagtagcaaggacatgttaaaatcgtcgatccatggaaagaagtaatgaacagtagcctacaagcagagccaagtactactagtcaagttgaagaggctgaactcagaatttaagaggtaaagggcagaaaaaggctaatatagtttgagtccatgt

SEQ ID NO: 878086 - DNA, 651 bp, Homo sapiens
  misc_feature 624, 625, 626, 627, 628, 629, 630, 631, 632, 633, 634, 635,636, 637, 638, 639, 640, 641, 642, 643, 644, 645, 646, 647,648, 649, 650, 651: n = A,T,C or G
ggtctactttgggactaccatttcttgtccatagaaatctgagaaaaagtcacactttacagtggacttgggttccaatcccagcatgtcacctctcgagtgacaggcatgactgggtgtcacatcttatccttgggtatcagtttgctcctggactggtgtgagattcattgacttcttggtctatctagccttttgtgggmatttggtatctaggttgcttttggggatggggggatccttctgcacagaaggtaggccaaagttccgggctctaaagtgtcttcctccctggatgccatccacagtcctgaggtcactacatgaagcccagggagccagcttcctctgccatctgagatcaatacagcttgaaaacgtgagtgtgggatgtgtgagctctcttttctggtggccgtcaatcactggcagggcctgccataggacagcaaagagagaaacggcaaataagcatttgcattagtagaacatcacgaagccctttgcctacggtaattgaaaaaaaatctaatttctgcttgtgtccctggagtatcttcccatttggattcctatagagtctccaaatcttgtcaacacaagtgaggtggtggaaggaattcnnnnnnnnnnnnnnnnnnnnnnnnnnnn

SEQ ID NO: 878087 - DNA, 651 bp, Homo sapiens
  misc_feature 624, 625, 626, 627, 628, 629, 630, 631, 632, 633, 634, 635,636, 637, 638, 639, 640, 641, 642, 643, 644, 645, 646, 647,648, 649, 650, 651: n = A,T,C or G
ggtctactttgggactaccatttcttgtccatagaaatctgagaaaaagtcacactttacagtggacttgggttccaatcccagcatgtcacctctcgagtgacaggcatgactgggtgtcacatcttatccttgggtatcagtttgctcctggactggtgtgagattcattgacttcttggtctatctagccttttgtgggcatttggtatctaggttgcttttggggatggggggatccttctgcacrgaaggtaggccaaagttccgggctctaaagtgtcttcctccctggatgccatccacagtcctgaggtcactacatgaagcccagggagccagcttcctctgccatctgagatcaatacagcttgaaaacgtgagtgtgggatgtgtgagctctcttttctggtggccgtcaatcactggcagggcctgccataggacagcaaagagagaaacggcaaataagcatttgcattagtagaacatcacgaagccctttgcctacggtaattgaaaaaaaatctaatttctgcttgtgtccctggagtatcttcccatttggattcctatagagtctccaaatcttgtcaacacaagtgaggtggtggaaggaattcnnnnnnnnnnnnnnnnnnnnnnnnnnnn

SEQ ID NO: 878088 - DNA, 593 bp, Homo sapiens
tctaattctgtgaagaaaggcaatggtagcttgatgggaatagcattgaatctataaattactttgggcagtatggccattttaacaatattgatgcttcctatccatgagcatggaatttttttccatttgtttgtgtcctctcttattcccttgggcagtggtttgtagttctcccaaaagaggtcattcacacaccttgtaagttgtattcctaggtattctctgtgtagcaattgtgaatkggagttcactcataatttggctgtttgtctattattggtgtataggaatgcttgtgatttttgcacattgattttgtatcctgagactttgctgaagttgcttatcagcttaaggagtttttgagctgagacaatggggttttctaaatatacaataatgtcatctgcaaacagagacaatttgacttcctctctccctatctgaatatgctttatttctttctcttacctgattgccctggccagaacttccaatactatgttgagtaggagtggtgagagagggcatccttgtcttgtgctggttttcaaagggaatgcacccagcttttgcccattcagtatgat

SEQ ID NO: 878089 - DNA, 669 bp, Homo sapiens
ggctcactctgtattggccgtgggctcagtgctctgggggatgacagcaatcctgccaccgcccccatgttggagatgagaacaagaagtcgtaggaagcctgagtatcctgcccaaggtcacacagttgagaaatagtagcattgggatttaacctaggtcatctccacccaactgcattcttactacaccttggcagcagctgaatctgacctctcatcatctggtgtggtcacttcagtgtatacgccaggaaataaaattctgcagcagacaactggagactgaactgagtttgaattgagaggctggccagaaggttgacatttcagagccaaactcayagagggaatttgatgcctttgacagggatggatgaactctctcaagcaaggcccattcagaacaaggcagttagagaagggagagagccagcattaaaggtagttatggagaaggggaaacaaagtaaaatctcataatgggaggtaagagctttaaatgcagagggttgtctctcaggcaccgtgggctgctatcacagaatactgtagcctgggtggcttaaacaacagacatttatttctcacagttctggaggctgggaagtccaagaatagagtgccaacatggttggttctggtggggctctcttcctggttgctgaca

SEQ ID NO: 878090 - DNA, 584 bp, Homo sapiens
ttaattataaaacaaataaaccacttgcaatgagctataatgttagtcacatggaaaacatgttaggcaaaaatactttctgcatatagttgtaattcagtaattgtttcactatcactcagaagagaattattttatatrctggttgcatttagtccaaaatttaaatcattttccctcattagagaatagtaaaatgtaagagaaatataaatttcatgtttttaatttgttcaaaattttaaaacattaaattttgtaacactgttgccatgctctgttgacagatatattagaagagggtggaacaaactcataaagtatgaggcctccttggttcaaagaaagtagagacagaacactcaaatatatattatttccatttatttgtttttttaaaggggaactttggggtaatgccaaacaataatatttatgtttatagtctaaaaaaaaataaaataaaaataaatatagtatatatttatcatatgtaatattgtgttttgatttatgtatacattgtgggatagataaatcaagctaattatacatatgtattacctcacattcttatttttaaa

SEQ ID NO: 878091 - DNA, 672 bp, Homo sapiens
gctgcagagttagatccccagaacaggatctcagctggctccatccttcctcagctgggcaaccgtggccaatgactagctttctgtgcctgagttgctccatctgggaattgaagattgtcatagtccctgcttcaaagagtcactgggaggattaactgagaaagtgcagggaaggtgcttggaactaaatgctcaaaaaaagtccatctggccaggtgcrgtgtctcacaccagtaatcccagcactttgggagaccaaggcaggcggatcacttgaggtcaggaatttaagaccagcctgatcaacatggcaaaaccccgactctactaaaaatacaaaaattagccaggcacggtggcaggcacttgtaattccagctacttgggaggctgaggcatgagaatcacttgaacctgggaggcagaggttgcagtgagctgagatggtgccactgcactccagcctgggcaacatgagtgaaactctgtctcacaaaaaaaaaaaaaaaaaaaaagtccatcattcttactaatggaggccaaatcatctcagctcttctttggatgatcagtatgctccaagccagtgttatccaatagaccagaggtccccagcccccagaccactgaccagtagtggtctgtggcctgttaggaactgggttgcac

SEQ ID NO: 878092 - DNA, 672 bp, Homo sapiens
gctgcagagttagatccccagaacaggatctcagctggctccatccttcctcagctgggcaaccgtggccaatgactagctttctgtgcctgagttgctccatctgggaattgaagattgtcatagtccctgcttcaaagagtcactgggaggattaactgagaaagtgcagggaaggtgcttggaactaaatgctcaaaaaaagtccatctggccaggtgcggtgtctcacaccagtaatcccagcactttgggagaccaaggcaggcggatcacttgaggtcaggaatttaagaccagcctgatcaacatggcaaaaccccgactctactaaaaatacaaaaattagccaggcacggtggcaggcacttgtaattccagctacttgggaggctgaggcatgagaatcacttgaacctgggaggcagaggttgcagtgagcygagatggtgccactgcactccagcctgggcaacatgagtgaaactctgtctcacaaaaaaaaaaaaaaaaaaaaagtccatcattcttactaatggaggccaaatcatctcagctcttctttggatgatcagtatgctccaagccagtgttatccaatagaccagaggtccccagcccccagaccactgaccagtagtggtctgtggcctgttaggaactgggttgcac

SEQ ID NO: 878093 - DNA, 674 bp, Homo sapiens
gatcttttgtatttcggtggtgtcagtgtagtatctcctgtttcatttcttaatgaggttattcggattttctctcttcttttcttgttgtggctaatggtctgtcagtaatatttatattttcaaagaacccgctttttgtttcatttatcttttctattttttgtttgtttgtttgtttgtttcaattttatttagttctgctctgatcttggtaatttcctttcttctgcagggtttgggtttggtttgttcttgtttctttagttcctggaagtgtgactttagaatgtcagtttgtgytctttcagtcttttttgatgtaggtgcttagggctgtgaactttcctcttatcaccacctttgctgtatcccagaggctttgataggttgtgtctttactgtcattcagttcggagaacttttaaatttccatcttgatttcatttttgacccaatgctcatttagaagcaggttatttaatttccatgtatttgcatggttttgaaggttccttttgaagttgatttccagttttattccaccgtggtctgagagagtgcttgatataatttcaattttcttaaatttattgagggtcattttatggcctatcatatggtctatcttggagaaagttccatgtgctatgtgaatcgaatgtgtattctat

SEQ ID NO: 878094 - DNA, 686 bp, Homo sapiens
tctgttgttgtacttttttttttcaagttttcataaaaactacctagtcctggagaatgctagatcacaatatttggcttgaacttctgtatttaaaatttctgccattattgcagatgtattgacttcaggtgtgtgtcctactttttttttttttttttttttaaacattccaatgacaagtgaactttattgttatctggtggtttgcatgatcaratttctttgactctggtataattctgagtaacaacttgtaagttcgttctgctgagaaccacagatattgttttctagttttagtttcatttctttttacataaattcctatcaaaaataatttgcattatgttgttaatgcttgttggtggggaatattaattgtgtcatgattgtctttcttccctccctcatttctccttccttcctccctttctccattccctattccccacttcttaaattttaaacttctcattacaaaaaattgtaaatgtttcctaaaaaaccaaaacacacaaaaaccaagagactaatatcatgaggcttcatatacccattctgtaatcagcagtcattaggctcatgctcctatttcatgggagccacataccctcataccaccattagataggtttgaagcaaaccccagacataataccatttgatctataaatagttgagta

SEQ ID NO: 878095 - DNA, 686 bp, Homo sapiens
tctgttgttgtacttttttttttcaagttttcataaaaactacctagtcctggagaatgctagatcacaatatttggcttgaacttctgtatttaaaatttctgccattattgcagatgtattgacttcaggtgtgtgtcctactttttttttttttttttttttaaacattccaatgacaagtgaactttattgttatctggtggtttgcatgatcagatttctttgactctggtataattctgagtaacaacttgtaagttcgttctgctgaraaccacagatattgttttctagttttagtttcatttctttttacataaattcctatcaaaaataatttgcattatgttgttaatgcttgttggtggggaatattaattgtgtcatgattgtctttcttccctccctcatttctccttccttcctccctttctccattccctattccccacttcttaaattttaaacttctcattacaaaaaattgtaaatgtttcctaaaaaaccaaaacacacaaaaaccaagagactaatatcatgaggcttcatatacccattctgtaatcagcagtcattaggctcatgctcctatttcatgggagccacataccctcataccaccattagataggtttgaagcaaaccccagacataataccatttgatctataaatagttgagta

SEQ ID NO: 878096 - DNA, 641 bp, Homo sapiens
cctccaaaaaacccaaataactctctggatgcataaccctttatattttccagctattacaggacaaatttagtgatgacagtgataattttgtgtgtgtggatccttcttacagggggcagcaccgtttcttgtctgtgccacttctggtacaactgtgttgggagcttttgaccctctggatgaaatagcagacatctgcgagaggcacagcctctggcttcatgtagatgtaagttcatttatgtgtacatacctgtttaacctttggtctttttgtagccttggtagaaatttttcttattctcagaaactagatgtggagtccccaacgcttttgtttgtgtctcaaattgggggaaataagtatgccaytttcttgtaaagtataaatgagaagattccacgactttgtgtatattttgttttagctttctggattccattttgcttcttttactcccatgagccatctttggtcctcaaatctactgtcattgaagcagcctggtgtaaggcacccattttaggttagggagccgagagactttggtttgaaattctgatctgcctcttcttcattgcgatcttagccttttggatttcaatttcttcatttgtaaagaggggggatggtagat

SEQ ID NO: 878097 - DNA, 582 bp, Homo sapiens
caaacattttccttctaattttatctattgacattttatacctccttctcagggatctttggctcagtgtattgacacacaattgtaaattgcctaggttttaaatgtgagggcttggagataagcttgcaatgcttttcctttcctttcatcttcattctagaggaggcttggaatatagaccctcccccgcaccccccccacttttatttttggagaaggagtagcagaaaaaagagtgggatagtcattcaacacatagttattgaggatgtgytgagccacatagtacaacgtaaaggaaaaaaaaaggagactaatgtcatttcccagtgtggtcaccaggaaaagacagaatttttgctggaaaatatacctgagaagcaggttacttagccccattttcgtttctgttctgaatgattgatattacaaatgacaattattacatgccagttaaaaagtgtgcaagtaaagagaaaaaggaaagaaagtacatttttcttttaaatcagagaaactagaacaaactgaatctgcttttgtggggatttcttttctagctcttgcttttcttcatag

SEQ ID NO: 878098 - DNA, 583 bp, Homo sapiens
ttctttcagaggacaatcaggcctctgcaagctatgagaagcaaattgtatgaggagctaaccagaatcccatcctttgagctttgaggccaccttagtgacaaggcttactttaatgaattaaaatataaaattataacaattgtgcaaatgcattaacaaaaagaaaagtgataactctgacttctgaataatctcatactttcataagagacactcaatgtttgggkgttagaagttacaagcttattaactatctttaggattgattgagaaagtcttacaaatctgcttaaaatgcataaaaaataagcaaaatgcacaatattgcaaatatttttcatggtaattctgtaataaactctaatctaggcaatgaaacactttttgttttctttccctgaaacaatttctagtagaccaaagaaatgagatagacagcaacataataatagtgggggcttcaatgctccactgacagcactagacaggtcatcaagacagaaagtcaacaaagaaacaatggatttaggcaaggcatggtggctcacacctgtaatcccagcattttgggaggctgagg

SEQ ID NO: 878099 - DNA, 583 bp, Homo sapiens
ttctttcagaggacaatcaggcctctgcaagctatgagaagcaaattgtatgaggagctaaccagaatcccatcctttgagctttgaggccaccttagtgacaaggcttactttaatgaattaaaatataaaattataacaattgtgcaaatgcattaacaaaaagaaaagtgataactctgacttctgaataatctcatactttcataagagacactcaatgtttgggggttagaagttacaagcttattaactatctttaggattgattgagaaagtcttacaaatctgcttaaaatgcataaaarataagcaaaatgcacaatattgcaaatatttttcatggtaattctgtaataaactctaatctaggcaatgaaacactttttgttttctttccctgaaacaatttctagtagaccaaagaaatgagatagacagcaacataataatagtgggggcttcaatgctccactgacagcactagacaggtcatcaagacagaaagtcaacaaagaaacaatggatttaggcaaggcatggtggctcacacctgtaatcccagcattttgggaggctgagg

SEQ ID NO: 878100 - DNA, 583 bp, Homo sapiens
ttctttcagaggacaatcaggcctctgcaagctatgagaagcaaattgtatgaggagctaaccagaatcccatcctttgagctttgaggccaccttagtgacaaggcttactttaatgaattaaaatataaaattataacaattgtgcaaatgcattaacaaaaagaaaagtgataactctgacttctgaataatctcatactttcataagagacactcaatgtttgggggttagaagttacaagcttattaactatctttaggattgattgagaaagtcttacaaatctgcttaaaatgcataaaaaataagyaaaatgcacaatattgcaaatatttttcatggtaattctgtaataaactctaatctaggcaatgaaacactttttgttttctttccctgaaacaatttctagtagaccaaagaaatgagatagacagcaacataataatagtgggggcttcaatgctccactgacagcactagacaggtcatcaagacagaaagtcaacaaagaaacaatggatttaggcaaggcatggtggctcacacctgtaatcccagcattttgggaggctgagg

SEQ ID NO: 878101 - DNA, 675 bp, Homo sapiens
ggaacccttccttacaatatatataaaaattaactcaagatggattaaagacttaaatgtaaaactcaaaactataaaaaccctaaaagaaaatctaggcaatataattcaggatataggcatgggcaaaggtttcatgacaaagataccaaaagcaattacaacaaaagcaaaattgacaaatgagatctaattaaactaaagagcatcagcacagcaaaagaaataaagagacaacctacagaatgagggaaaatttttgcatctatccatctgacaaaggaccagtatccagaatctataaggaacttgaacaaatgtacaagaaaaaaaaaacaaccccactaaaaagtgggcaaaggacataaacagacacttctcaaaagaagacatacattgcagccaacaaacttatgaaaaaaatmtcaacatcactagttaccagagaaatgcaaatcaaaaccacatgagataccatctcacaacaatcagaatggctattactaaaaagtcaaaaaacaacagatgtggggaaaaaggaacatttttacactgttggtgggagtgtaaattagttcaatcactgtggaaagcagtgtggagatttctcaaagagctaaaaaagaactgccatttgacccagtaatcccattactgggtatatacccaaagaaa

SEQ ID NO: 878102 - DNA, 607 bp, Homo sapiens
taaaaaaaattttgtctgggcgtggaggctcatgcctataataccaacagttttggaggctgaggcaggaggattgcttaaacccaggagttcgataccagcctaggcaacatagtgagaccctgtttttacaaaaaattaaaaaaattagccaggtgtgatggtgcatacctgtagtccccagatacttgggaggccraggtggaaggattgcttgagcccaggaggttgaagcagcaatgagccatgattgtgcctttgcactccagtttggcagtaaagcaaggtcctatttccaaaaaaaaaaaaaaaaaaaaaaaaaaattagttgtagtaaaatacatataacctaaaatttagcaaattaggcatttataagcatacagttcagtagtgtcaaatatattcacactgttgtgcaaccaatccccagaactctttttatcttgcaaaactagaactctatgcatatctgcaccaacacttgactattttctgttttttaaaatagtagcctaataggtatgagatggtatatcactgtggttttgatttgtatttgcctaatgattagtgatgctgagcatattttcatgtgcttgttaga

SEQ ID NO: 878103 - DNA, 637 bp, Homo sapiens
aaacccataaaaaaccacgttcccctgaaagaatctgtaagaacaaatgtaaattatttcttcctctaagaatgctaataaagaaaatttttctgatttgcagtcatcaattagaaaatatatctgataactgttataaatccatctcattcaaatkttaagcaatatatacattcctgactttttccttgccaaaaaaaaaataagctgaaggtattctagaagtcagtatcttctaggaaaactgttaactataaaaagaagaagcatgcacacttcttccatgagctgcctctaggccctaggtgggacagggatcatgatgtctttggactcctcacctgatacttaggtcatagctcccgcttaggagaaagttttcctcctcacacaggaagagggcccggacactcccagcatggcctcggaattcaacgggtatcgctttcacttgtatgatgtccagaagatggatctttcgattagatgacacagctatcagatctcccccggaatagtggatgactcggttttgatcccacctgagtgccaggggaaaaggattatccatgaaagaagagtcagtgtccctcctgggactgacttagccccatgacttttgcctacagcagtggtg

SEQ ID NO: 878104 - DNA, 637 bp, Homo sapiens
aaacccataaaaaaccacgttcccctgaaagaatctgtaagaacaaatgtaaattatttcttcctctaagaatgctaataaagaaaatttttctgatttgcagtcatcaattagaaaatatatctgataactgttataaatccatctcattcaaatgttaagcaatatatacattcctgactttttccttgccaaaaaaaaaataagctgaaggtattctagaagtcagtatcttctaggaaaactgttaamtataaaaagaagaagcatgcacacttcttccatgagctgcctctaggccctaggtgggacagggatcatgatgtctttggactcctcacctgatacttaggtcatagctcccgcttaggagaaagttttcctcctcacacaggaagagggcccggacactcccagcatggcctcggaattcaacgggtatcgctttcacttgtatgatgtccagaagatggatctttcgattagatgacacagctatcagatctcccccggaatagtggatgactcggttttgatcccacctgagtgccaggggaaaaggattatccatgaaagaagagtcagtgtccctcctgggactgacttagccccatgacttttgcctacagcagtggtg

SEQ ID NO: 878105 - DNA, 637 bp, Homo sapiens
aaacccataaaaaaccacgttcccctgaaagaatctgtaagaacaaatgtaaattatttcttcctctaagaatgctaataaagaaaatttttctgatttgcagtcatcaattagaaaatatatctgataactgttataaatccatctcattcaaatgttaagcaatatatacattcctgactttttccttgccaaaaaaaaaataagctgaaggtattctagaagtcagtatcttctaggaaaactgttaactataaaaagaagaagcatgcacacttcttccatgagctgcctctaggccctaggtgggacagggatcatgatgyctttggactcctcacctgatacttaggtcatagctcccgcttaggagaaagttttcctcctcacacaggaagagggcccggacactcccagcatggcctcggaattcaacgggtatcgctttcacttgtatgatgtccagaagatggatctttcgattagatgacacagctatcagatctcccccggaatagtggatgactcggttttgatcccacctgagtgccaggggaaaaggattatccatgaaagaagagtcagtgtccctcctgggactgacttagccccatgacttttgcctacagcagtggtg

SEQ ID NO: 878106 - DNA, 606 bp, Homo sapiens
caccgccaggtctgcctcacaagagctcctgaaggaagctctaaacatggaaaggaacaactggtactagccactgcaaaaacatgccaaatggtaaggaccatcgatgctatgaagaaactgcatcaattaatgggcaaaataaccagctagcatcataatgacaggatcaaattcaaacataacaatattaatcttaaatgtaaatggamtaaatgccccaattaaaagacacagattggcaaattggataaagagtcaagacccatcagtgtgctatattcaggagacccacctcacgtgcaaagatacacataggctcaaaataaagggatggaggaagggctaccaagcaaacggaaaccaaaaaaagcaggggttacaatcctagtctctgataaaacagactttaaaccaacaaatttcaaaagagacaaacaaggccactacacaatggtaaaggaatcaattcaacaagaagagctgactgtcctaaatatatatgcacccaatacaggagcactcagattcataaatcaagtccttagagacctacaaagagacagactcccatacaataataatgggagactttaacacctaact

SEQ ID NO: 878107 - DNA, 606 bp, Homo sapiens
caccgccaggtctgcctcacaagagctcctgaaggaagctctaaacatggaaaggaacaactggtactagccactgcaaaaacatgccaaatggtaaggaccatcgatgctatgaagaaactgcatcaattaatgggcaaaataaccagctagcatcataatgacaggatcaaattcaaacataacaatattaatcttaaatgtaaatggactaaatgccccaattaaaagacacagattggcaaattggataaagagtcaagacccatcagtgtgctatattcaggagacccacctcacgtgcaaagatacacataggctcaaaataaagggatggaggaagggctaccaagcaaayggaaaccaaaaaaagcaggggttacaatcctagtctctgataaaacagactttaaaccaacaaatttcaaaagagacaaacaaggccactacacaatggtaaaggaatcaattcaacaagaagagctgactgtcctaaatatatatgcacccaatacaggagcactcagattcataaatcaagtccttagagacctacaaagagacagactcccatacaataataatgggagactttaacacctaact

SEQ ID NO: 878108 - DNA, 661 bp, Homo sapiens
agaggagtttgttattaccccccttctgaagcctacttctatcaattcatcaaactcattctccatccagttttgagcccttgctggagaggagttgcgatcatttggagaagaaaaggcattctggtttttggaattttcagcacttttgcactggttttccctcatcttcgtggttttatctacctttgatctttgaggctgatgacctttcgatggggtttttgtgtgggggtcctttttgttgatgttgatgttattgctttctgtttgttagtttttcttctaacagtcaggtccctctgctgcaggtctgctggagtttgttggaggtccactccagaccctgtttgcctgggtatcaccagcggaggctgcagaacaggaaagactgctgcatggtccttcctctggaagctttgtcccagaggggcaccggcctgatgctagccagagttcttctgtatgaggtagctgtcaacccctgctgggaggtctctccccrtcaggagccacgggggtcaggaacccacctgaagaggcagtctgtcccttagcagagctcgagcgctgtgctggaagaatcctccttgtcaggacctgctgctgtcttcagagctggcaggcaggaaggtttaattccactgaagctgagtccaca

SEQ ID NO: 878109 - DNA, 610 bp, Homo sapiens
cattatatttaaagttgagttttatgtagacagcaaacagaagggctggctttgaaaaaacctaatctgataaactgccttttgttttaagtttttatacaaattggtaatattagtaatatagctgtattttaaaataccatctggttattcattttgtatttgtcttatctctgttctttttatttttacttcatttcttctgagtattttttattactcgattttatctctactattggtttawttagtgtcattctcttgtaaatttttttgacaaatcagttatagtgttacttagatcttttacatacttactgattttctgtttatttgttctatcaactagtggaagagaactattagtgtctttagttgtgtatttctctattctctcaattctatttgtcttactttatgcatttttaagatcttttttgactcattcattcattcatgtatagaatttttatgtcttcttcatgaattggtccctttatcattaagcaacattcctccttatctttcttctcaaacaagttacttatccttgttcttttacaagtttaattaacttgttttggacattgatgtattcatttcccttttt

SEQ ID NO: 878110 - DNA, 593 bp, Homo sapiens
aagcaaactccaattttgttatactgttgcatacactaatactcagctaagcgtaactggcttctgtaaacttgcatttttctttaatctactatgttcgggaaggatcagcaacaatcatgtatcaaattatcatcaataagtgttgctagaaagtccactggctatgcaaacagcaacactggttgatgataatttggaaataccactgttagtgatctttgcaaacacagaagatggttctgaggtggatacagattggggtttaagttcctacaggaaatggcatttcttagttagagatcagataataaaggttattctagccactttaagtttagcagatatgttataaaagattacttaaatgtgtgaagtttcagrtgtattattgttatattttaacctcacaaaactctgtaaggaaagcaaggcacccaatgcacaggtgaacaaattgagtctcataggcatttggtgatttgcttaaggtccccagatttttcagtgttgtaggtcatttgaacccaggtcataatgcaacaaacttgcaaaaatgtaacatgatgacagtcattactctgtgtgtgtgt

SEQ ID NO: 878111 - DNA, 633 bp, Homo sapiens
actcctcgagaagagcaactccaagacacataattgtcagactcaacaaacttgaaatgaaggaaaaaatgttaagagcagccagagagaaaggtcgggttacccacaaagggaagcccatcagactaacagtggatctcttggcagaaactctacaagccagaagagagtgggggtcaatattcaacattcttaaagaaaagaattttcaacccagaatttcatatccagccaaactaagcttcataaatgaaggagaaataaaatactttaaagacaagcaaatgttgagagactttgtcaccaccaggcctgccctaaaagagctcctgaaggaagcacgaaacatggaaaggaacaaccwgtaccagccactgcaaaaacatgccaaattgtaaagatcatcacagctaggaagaaactgcatcaactaatgagcaaaacagccagctaacatcataatgacaggatccaattaacacataatgatattaactttgaatgttaattggctaaatgctccattaaaagacacacactggcaaattggataaagaatcaagacccatcagtgtgctgcattcaggaaacccatctcatgtgcagagacacacataggctcaaaataaaggg

SEQ ID NO: 878112 - DNA, 566 bp, Homo sapiens
cggacaaggaggcagccttgtcctcaataatggattaaggagaatcattaattaatgattaattaatcctctgtaatgacagagtccatggccaggagcaacaaacatggccaagggcagaaggagaccaatttcatctccatcagattcaacaataacaggcaatgcctggagatacacagggtaagacatatcagcaagagccagtgaaggccacaggatggcctgaagaccagaagggtttccgccccaccgccrtgagaagacacaggcttccccctcctctagcctccatcttaaaaaaaaaaaaacaaaggaagccggcttgatggccaacgcttgtcatcctagctactcaggaggccgagttgggaggatcgcttgagcccaggagttcaagaccagcgtgggcaatattgcaagaccccatctcaaaaaaatttaaaaagttggaaaaaatcaaaggaggagagtggatggagaaaactttcaagactgagcatttatcaaagagaacctgagtttacctaaaaaacaatttggttgtttttcttttttaactttta

SEQ ID NO: 878113 - DNA, 643 bp, Homo sapiens
ggatggtaaagatgaatgtcttaatctcctaattacattgacttgacatttttatgttagcaaagaagttttaattcatttggtcagtcctgctgcaccatcctggttggacaatatttcctaaagtctaatatcttaactgggaggtctaaatgaccagttttcattaagaggtagctagccaactataaataagtaatatcctctatagtattttctgatgatattactgtactgccattaatgggcatgttcagttgtttccccagtaatgggatgaactgatggcaactatttgtgaagtttcttgtgttgcttatataggcagtcagttatatgcagccctgttgattagtacattaaaccaaacacacacagacctagagcagaagacttgttttcccagggcacttacawgccagctaaacttgggaatccttctctctgaagcttgttgatcttgtacctgaaactcttgcttattattagtttttattgctttccctggtagaagtggtgactgtgatttgattgttaacattctgcattggaattcaatttaaccctttccatggattcagtttttatggccacatctgttttcatgggtcattttacaagattagttagtcctggtgctttt

SEQ ID NO: 878114 - DNA, 441 bp, Homo sapiens
gaatgaaacaaatcaataaatttcaacacttaagttgacaaagatgtcaaagttatctgacaaagattttaaagcagctataaaaaatggttcaatgagcaattgtaaacctgcttgaagcaaatgaaacaatagaaagtctcagcaaagaaatagaagccataaagaaacaaatggaaattttagaaytgaaaagtacaacaaccaaaaaagcaatagaaaggctcaaaagcaagtggaagagacagaggaaagaatgaaagaaaatgaagatagcacaatagagactacccaatgtgaaaggaaaataaatctcaggacccacaaatcactaagccaaagggaaaattcaagctggaaaatgcatcaggcaaacctgcctcttattttattcctaaataagatagctacaaggataaagaagctacatccttccctcac

SEQ ID NO: 878115 - DNA, 609 bp, Homo sapiens
cctagtagtttcttcttcattgataaagacatgagaacaacccaaaagatagtcttaaaaaaaaaagaccacacactaaaaaaaagaccattgagccaatccgcaaaaatcttgcttttgaagtattttttccactcccatacaggtcttagatttgctctcatcaacctcattattttgatcgagtcttccctgtggtccgagacccttatgtgatttaacagagcagaggtagggtctcacaaatgggactctctggacttgaatttgtagactcacaagcacttgctataatatcaattttgtagcggatgagttttttttttttaatgttctttagacagaaccatttgggtttatgtgattgaatttttttttgagcaatcaaaacacttcatttttgactccttttgttcctcatttatgtatcatagacatgaytggaattttataaagctgatttccttttgattttggtaaaagacttggaatttaaagagaaaacatgccagcactgtctgtagcaagcagaaaaacatatatgttttattcccaggtaaaagtagagctcagcattatgtaggtgctgctgtcctgggactaaaggtt

SEQ ID NO: 878116 - DNA, 614 bp, Homo sapiens
attgttgttcttgctccttttatgtagggagaacctttctcatgtagggtgtataatatgcattttcctcactccacttcatcccattttatttttgttaagttatagggttgcagtgaagtaagtgtatgatatctatgtgtaatacacattactaagcttgatagggtggcttttctgaataaggacaaaaatcatttgtttataaatatttttcatccttccacatcttctgcctcagtatcctgagtagctgggattacaggtgtgtgccaccatgcccagatgctttttgtatttttagtggtgatggagttttgccatgctggccaggctgatctcgaactactgatcttaagtgatccacccacctcggcctcccaaagtgttaggcatgagccactgtgcccagcctgactttgacctgtaactttttttcagcttcacgtatgtgtaggaggagctgaagcagctgggcygattcatttagtcttttgtgggtataatagcatgatggagtgtagacgcctgggacatgcagattaaggctattggaggtcagagtttctcaaaagcaaattttgtacagaaaattaataacaacaatgaaacag

SEQ ID NO: 878117 - DNA, 630 bp, Homo sapiens
ggaggatgggtgggaagatggaaatctctcatttttttgtctttatgaacctgggaccaaaaaaaaaacgaggaactttacctataaattagattgtgttgtgattcataaaccatgctaattttataatttaaaacattggaattagttatgattttaaaaatttttaaatagaactcaaaaagaaatgttttcctcatatgattgatgttttaagtgtggccattgtttccaagcaaaaatgacatttattcaattgtattaaatgagatttcttagtaggctatttttacttgattctatgtcagtaacatgtgaaataagcattagaggtgtgattaaattattggagagaaaatagtwatgtgaatatttgttttcttggacacatttgaattactatatttttcccaagcacactttgaagtacattttaaaaaataatttaacatcagggttgcactacctctctatcttgtaattccatgttacattggagctttttaaacacttatttgactctctcttctggaaactctttcttcagttgtttttcatcttattattctctcttgttcctccttattccaagggtcactctatcattggctctttggctgattcatatat

SEQ ID NO: 878118 - DNA, 630 bp, Homo sapiens
ggaggatgggtgggaagatggaaatctctcatttttttgtctttatgaacctgggaccaaaaaaaaaacgaggaactttacctataaattagattgtgttgtgattcataaaccatgctaattttataatttaaaacattggaattagttatgattttaaaaatttttaaatagaactcaaaaagaaatgttttcctcatatgattgatgttttaagtgtggccattgtttccaagcaaaaatgacatttattcaattgtattaaatgagatttcttagtaggctatttttacttgattctatgtcagtaacatgtgaaataagcattagaggtgtgattaaattattggagagaaaatagttatgtgaatatttgttttcttggacacatttgaattacyatatttttcccaagcacactttgaagtacattttaaaaaataatttaacatcagggttgcactacctctctatcttgtaattccatgttacattggagctttttaaacacttatttgactctctcttctggaaactctttcttcagttgtttttcatcttattattctctcttgttcctccttattccaagggtcactctatcattggctctttggctgattcatatat

SEQ ID NO: 878119 - DNA, 630 bp, Homo sapiens
ggaggatgggtgggaagatggaaatctctcatttttttgtctttatgaacctgggaccaaaaaaaaaacgaggaactttacctataaattagattgtgttgtgattcataaaccatgctaattttataatttaaaacattggaattagttatgattttaaaaatttttaaatagaactcaaaaagaaatgttttcctcatatgattgatgttttaagtgtggccattgtttccaagcaaaaatgacatttattcaattgtattaaatgagatttcttagtaggctatttttacttgattctatgtcagtaacatgtgaaataagcattagaggtgtgattaaattattggagagaaaatagttatgtgaatatttgttttcttggacacatttgaattactatatttttcccaagcacactttgaagtacattttaaaaaataatttaacatsagggttgcactacctctctatcttgtaattccatgttacattggagctttttaaacacttatttgactctctcttctggaaactctttcttcagttgtttttcatcttattattctctcttgttcctccttattccaagggtcactctatcattggctctttggctgattcatatat

SEQ ID NO: 878120 - DNA, 629 bp, Homo sapiens
tagtgaattatagctactgcacacacatggcttcagttagaaaggatatggtaccaggtaatgtcatcagtttttccaaatgtgttcctggggaaaataacctaaattcttgaagcagatcatttaacttataattggatgtaatattatgacaagaaaagrccttaaggcaaaaactgttccttatagaggctttttgtttttcatttgaaattagtgcagttgctgattggctttaaaaaaaaccctcatattcttttaaatataataatctgaaggtgttgctaaatttactagcccaactgagaaacaacagtatccttaaaaacaaataattgagtttaggttaaatggaaatagttggctaaatatgatttttaaaaataatacctaaggtacatgtaggaaccagatagattaaataacatgatagaaagtgttcagaagaggtagtacttttatacttagttttaaaaaatttaaattcctctactatgtagatttttatattttgtgaccacatgcatgtatagtatagtaataattcactgtaagcttgtagtgtactatattagttgaagtacgataaagaaattcttgcagaagagtagaaatacttctgaaatact

SEQ ID NO: 878121 - DNA, 638 bp, Homo sapiens
aaccccatcaaaaagtgggcgaaggatataaacagacacttctcaaaggaagacatttatgcagccaacagacacatgaaaaaatgctcatcatcactggccatcagagaaatgcaaatcaaaaccacaatgagataccatctcacaccagttagaatggtgatcattaaaaagtcaggaaaccacaggtgctggagaggatgtggagaaataggaacacttttacactgttggtgggactgtaaactagttcaaccattgtggaagacagtgtgacgattcctcaaggatctagaactagaaataccatttgacccagccaccccattacggggtatatacccaaaggattataaatcatgctgctttaaagacacatgcacacgtatgtttattgtggcactattgacaatagcaaagacttggaaccaacccaaatgyccatcaatgatagactggattaagaaactgtggcacatatacaccatggaatactatgcagccataaaaaatgatgagttcatgtcctttgtagagacatggatgaagctggaaaccatcattatgagcaaagtatagcaaggacagaaaaccaaacactgcatgatatcattaataggtgggaattgaacaatgag

SEQ ID NO: 878122 - DNA, 631 bp, Homo sapiens
tttgagctcatttggaatttcagatttgtggtttttaacacttgctgcacgttaaaattatttgggggagtcttaaaaatactaatatttaggttgtatcccagatgcatgaaattagaatctctgtgaggggtcctgaatattcctagtttttaaaagctcacctggtgatcctacaatgatatcaattataaaaaacattttctgggttttttttttcttttccactgtttcaagaggaaacagatcactgctgtaaatcttggtaaagtcatagagctatttatctttaraattgaaatagcatcttggtctcctcttacacggtggtttctcccctctcccacgatgctatcattttcatttcctctagtttgtgttttttattttgagtttgtgagggtccccaaaaccactggggtaggagctacacctgtagctaggcctggttttggtggatgaccccagatgaatcacccatttggatttcctgaaacactggagagtaaatgaagaccctggcgtagctccagtgtacctcaactggactagtcaaactgctctgtaaatagagttcttctgtggtcaggagaaaaccctgtggcatttctagttggttactctaaatctt

SEQ ID NO: 878123 - DNA, 587 bp, Homo sapiens
tgctatttatacttgtatatgcttcacaaagttctcgtgctgtgtttttcagctctgtctggtcatttatgtttttttttttttttttaactggttattctagttagcagttcctgtaaccctttatcaaggttcttagcttccttgcattaggttagaacatgctcctttagcttggaggagtttgttattacccaccttctgaagcctacttctgtcaattcatcaaactcattctccatccagtgttgctccctggctggcaaggagttgtgatgctttgggagagaaraggcattctggtttttggaattttcagcatttttgcactagtttttcctcatctttgtggatttatctacctttgatctttgatgctgatgacatttggatgaggcttttgcatgggcatcctttttgttgatgtcaatgctattgctttctgtttgttagttttcattctgacagtcaggcccctcttctgcaggtctgctggagttttctggaggtccactccagaccccatttgcctgggtatcaccagcggagcctgcagaacagcaaagattgctgcctgctccttcccc

SEQ ID NO: 878124 - DNA, 562 bp, Homo sapiens
aaaccaaggcagtctggctcagagtgtgtgcacccaactactactacacactgccacttttcagacaggaccatggatggttgaatagagacatactcattgcagccacagggaggggcctgaggaagccccagaggctaaagtagcctgggtatgttctaggaatgttgcctaggtaggaatactgtgcatcccagcaaagacctggttgggtgacttmagcttcatccacaagtatctgaagagtattatggatcctcactgaataaataccttgctgctgcatctcacctaggatcactggacagatagttggctgagccgcttgctcacatgtcagtgctggcagttgagtctgagattagagggtggtatgttaaactgctggtgctttttttgtccactgtagccgatcacatcaggcatgcccctcccatatgtagtcccatgggcttctcagcatgcctcaatgcacctgctccagaatgtgttttcccgtctcttggtgatgccttccaagtccctcaaagtcaattttgcatgtgccacccatctatgcatt

SEQ ID NO: 878125 - DNA, 562 bp, Homo sapiens
aaaccaaggcagtctggctcagagtgtgtgcacccaactactactacacactgccacttttcagacaggaccatggatggttgaatagagacatactcattgcagccacagggaggggcctgaggaagccccagaggctaaagtagcctgggtatgttctaggaatgttgcctaggtaggaatactgtgcatcccagcaaagacctggttgggtgacttaagcttcatccacaagtatctgaagagtattatggatcctcactgaataaataccttgctgctgcatctcacctaggatcactggacagatagttggctgagcmgcttgctcacatgtcagtgctggcagttgagtctgagattagagggtggtatgttaaactgctggtgctttttttgtccactgtagccgatcacatcaggcatgcccctcccatatgtagtcccatgggcttctcagcatgcctcaatgcacctgctccagaatgtgttttcccgtctcttggtgatgccttccaagtccctcaaagtcaattttgcatgtgccacccatctatgcatt

SEQ ID NO: 878126 - DNA, 582 bp, Homo sapiens
aaggactgaatgatgcttatgcccagggcacccaggatgggcaaagtccattggccaatgcgtcacctcccataaacagtgtatcagatgtattagtttctagggctgccataacaatgtaaaaaactgggtggcttaaacagcagcagcagtttattgcctaacagttttgaatgctaaagacctagatcaaggtgtcccaggggctggttccttcttagggctgtgagggagaacctgttccatgcccctctcttagcttctggtggtttgctggcaatctttggcttttagacacattaccctgatgtctgccttcatgtttacatggtattctccctgtctgcatagttcttcacaaggcattatttttacaaggacaccaatcatattgggttggagcccaccttcctccagtatgacytcatcttaagtatatctgcaatgactatttccaaataaggtcacattcagaagtactgggggttaggacttcaacatatcttttctgggcacacaattctgaagttggcttctgtgactctcccttttctaaacttatctgtgggacacctaattgtt

SEQ ID NO: 878127 - DNA, 592 bp, Homo sapiens
gtggatgctcaaggttcacatcaggtaggtgataatcaccttccactccactgcgctcagcaccacacagaaccatagtcagaatcccacattctgttcttgggttcagagacaaggccacactggagaatgttccaacgagaccaactacagctgagacagctaagccagctttgtcacctgaagaaaagttgaatgaagacaagaagttgaaggcagccagcacgttagccccagatattttacctgaatccaagtctctagcaaatcctaacgtgaaaagattctcatttatatgcaggacagttactcgaaactttgggtaggtaaatttttcctcaatataaggaagaccttgacaaaaattagagctgcctcgcaatgcaattggstgcctgtggatgtttctctttcactcagggtgctgcgtgaagaccaagctagtgctctgaaattaaactaactgaatggttttgatctttttctctacttttaaataaaaacttaatacattttgtcattttggatttcctttggatttcctctctgtttttctttctgtttttttttttttttttgtaatttaggcaaa

SEQ ID NO: 878128 - DNA, 672 bp, Homo sapiens
gggcctgccttacagtaagtcctgaagacagtgctaaatattgaaaaaaaaaaaaaaaaaaaagactgttgccagctactacaaaaacacacttaagtacatagaccagtaacagtataaagaagccacacaaaccaagtctgcactgtaaccagccaacaacatggtgataggatcaaatctacacagatcgatactaactttgaatgtaaatggctaaatgctccaattcaaaggcacagagtggtaagttagataaagaagcaacactcaacagtattctgtcttcaagagacccatctaacatgcagtgacacccataggctcaaaataaagggatggagaaaaatctaccaagcaaacaaaacatgggaaaaaagtggggttgctattctaatttcaaacaagacacactttaagccaacaaagataaaaaaagrcaagcaagggcattgcataatggtaaagagctcaattcaacaagacctaactactttaaacatacaagcacccaatacaggagcacccagattcataaagtaaattcttagagatatatgaggagacttagataaccacacataatagtaggagacctcaacaccctactgagaatattaaacacattatggaagcaggaaactaacaaagatatttaggatctgaactcaa

SEQ ID NO: 878129 - DNA, 643 bp, Homo sapiens
cttggattacaggcatgagacactgtgcctggatgaatatttctttctttctttcttttttttttttttttgagacagagccttgctctgtcgtccaggctagtgcaatcttggctctcagcaacttccacctcctgggttcaagtgattctcctgcctcagcctcccatgtagctgggattacaggcacccatcaccacgcccagctaatttttgtatttttagtagagatgggttttcaccatgtcrgccaggcttgtcttgaactcctgaactcaaatgatcctcccaccttgacctcccaaattgctgggattacaggcatgagccactgtgcctggccccagctaactttttctgtttctgagaattctctcccactggatcctgtttgctgtttctttcctagcatacccttctttgaaaacaaaagacaacatagcttagtggtttggaggtttgggctggacttccagggtttaaaagctctgacacttgcaagctatgtgacgttattcaagttactttacttctttgtgcttcaattacctcatctgtaaaatgataatatccatttaacctacctcatagagttgctataaagattaaataacgatttaagtaccttgctacatatatcagt

SEQ ID NO: 878130 - DNA, 626 bp, Homo sapiens
aagaaggccataatataataattaaggaggtaatacagcaagaaggtataacaattatatatgtactcaacactggagcacctaaacatataaagcaaatagaaatagacctaaagggagagatagactgcgatattataatcrtaagtgattttaacatcccactttcagcaacatacagatcatccaaatagaaaatcaacaaagaaaacattggagttaaactgcactctggatcaaatggtcctaacagttacctacagaaaagtcttttcaacatctgaagaatacactttttttttcaacagcacagggaacattcttcaggacagaccatatgtgaggctacaaaacaagttgtaacaaatttttaaaatcaaaattatatcaagtacgttttctgacaatggcctaaaattagaaatcaataataaaagaaactttgtaaactgtaaaaatacatataaattaagcaacatgctttgaaacaacaaataggccattaaaaaaaaagagaagaaaagttttaaatattttaaatatctcaagacaagtaaaaatggaaatacaacataccaaaacctatgggatacagcataagcagttctaagggaaaagtttatggc

SEQ ID NO: 878131 - DNA, 568 bp, Homo sapiens
ggttttaattgatttatctaattatgtgacataaagcctaggaattgacttaagggaaaatcctaacagggtaaaatgcacagtctgaagagaatggaaagctgggaaacgtcctgagaaaatgctatacccaagaaacaaatgttttaaaataaaaggcaaaaataggccaggcgcggtggctcacgcctgtaatcccaacactttgggaggccgaggcaggcagatcacgaggtcaggagatcaaggccatcctggctaacatggtgaaaccccgtctctactaaaaaaatacaaaacaattagccgggcgtggtggcgggtgcctgtggtcccagctactcaggaggctgaggcaggagaatggyatgaacccgggaggcagaacttgcagtgagccgagatcgcaccactgcattccagcctgggcaatagagcaagactccatatcaaaaaaaaaggcagaaataaatgaaattttaaaagtgatgcattaacaatacttttaatctgtaatgttacgataaatcggcattctgattaattatgaattagaactttaggctga

SEQ ID NO: 878132 - DNA, 568 bp, Homo sapiens
ggttttaattgatttatctaattatgtgacataaagcctaggaattgacttaagggaaaatcctaacagggtaaaatgcacagtctgaagagaatggaaagctgggaaacgtcctgagaaaatgctatacccaagaaacaaatgttttaaaataaaaggcaaaaataggccaggcgcggtggctcacgcctgtaatcccaacactttgggaggccgaggcaggcagatcacgaggtcaggagatcaaggccatcctggctaacatggtgaaaccccgtctctactaaaaaaatacaaaacaattagccgggcgtggtggcgggtgcctgtggtcccagctactcaggaggctgaggcaggagaatggcrtgaacccgggaggcagaacttgcagtgagccgagatcgcaccactgcattccagcctgggcaatagagcaagactccatatcaaaaaaaaaggcagaaataaatgaaattttaaaagtgatgcattaacaatacttttaatctgtaatgttacgataaatcggcattctgattaattatgaattagaactttaggctga

SEQ ID NO: 878133 - DNA, 554 bp, Homo sapiens
ggtgaattttgtgatacccatttggcaaccaccagatattggaaggggtgtagtaaattattaatataatgacagccaactttgtaggttatattttggtaaattatgttttcctaggaaattattcctttcatttacattttttgttgttgtttgtttgtttgttgacacagggtcttggtctgttgcccaggctggagtgctcactgcagccttgaactcccagagacaagcgatcctcccacctctcagcctcccaagtagctgggtctacagatactcgccaccacgcctggctaattttcgtattttttgttttgtagagatagggttttgccatgtttctcargctggtctcaaactcctgggctcaagtaattgcctgcctcagcctcccaaattgttgggactacagatgtgagccattgcacctggtcatttaagttttcaattacaccggcttaaggtcatttatggtattctctattttttttatttgatgaatctacatttatgtcactttcttattgctaacatcggtcatttcaatcttc

SEQ ID NO: 878134 - DNA, 616 bp, Homo sapiens
gaacttggttataaaatgaaattatgaaaaagttaaaaaatgctgggaggaatggagaagaaattagagatttaaaatatgtaacttctaaaaataataaataaaggcaattttaactaatttagctacttacgttgcttttgagaaacgatgattttcatttttcatgaagagtaaatttttggaagcgagacagtgckgctcacccagtcatggcctctgttctaccagacttttagtttttcatttgtttgtagtgatcttctggatttttagaacgctggagtcattgctgacatcttggtcctgtaaaggagaggaaaaatgtcagttctaaagctaatcccagtgtgttctctacacatattttttaaccttctggtatgggtatctattatgttttagagggcatctcacattatattagcatacctatttatcatattgtattagtattatattgtaatatatttacagaattcttggccagatacacaacagaaaaattatagagaatctaaatcattatttttgttggtctatcagttgccaaaaagtactcacttattatgtttcaataattagaatgtgaatgaaaaagaataaatatttgaat

SEQ ID NO: 878135 - DNA, 616 bp, Homo sapiens
gaacttggttataaaatgaaattatgaaaaagttaaaaaatgctgggaggaatggagaagaaattagagatttaaaatatgtaacttctaaaaataataaataaaggcaattttaactaatttagctacttacgttgcttttgagaaacgatgattttcatttttcatgaagagtaaatttttggaagcgagacagtgcggctcacccagtcatggcctctgttctaccagacttttagtttttcatttgtttgtagtgatcttctggatttttagaacgctggagtcaktgctgacatcttggtcctgtaaaggagaggaaaaatgtcagttctaaagctaatcccagtgtgttctctacacatattttttaaccttctggtatgggtatctattatgttttagagggcatctcacattatattagcatacctatttatcatattgtattagtattatattgtaatatatttacagaattcttggccagatacacaacagaaaaattatagagaatctaaatcattatttttgttggtctatcagttgccaaaaagtactcacttattatgtttcaataattagaatgtgaatgaaaaagaataaatatttgaat

SEQ ID NO: 878136 - DNA, 616 bp, Homo sapiens
gaacttggttataaaatgaaattatgaaaaagttaaaaaatgctgggaggaatggagaagaaattagagatttaaaatatgtaacttctaaaaataataaataaaggcaattttaactaatttagctacttacgttgcttttgagaaacgatgattttcatttttcatgaagagtaaatttttggaagcgagacagtgcggctcacccagtcatggcctctgttctaccagacttttagtttttcatttgtttgtagtgatcttctggatttttagaacgctggagtcattgctgacatcttggtcctgtaaaggagaggaaaaatgtcagttctaaagctaatcccagtgtgttctctacacatattttttaaccttctggtatgggtatctattatgktttagagggcatctcacattatattagcatacctatttatcatattgtattagtattatattgtaatatatttacagaattcttggccagatacacaacagaaaaattatagagaatctaaatcattatttttgttggtctatcagttgccaaaaagtactcacttattatgtttcaataattagaatgtgaatgaaaaagaataaatatttgaat

SEQ ID NO: 878137 - DNA, 636 bp, Homo sapiens
gcaaatagctaacaatactatgtcaggaagaaaatctcacatatcaaaattagccttgactgtaaaggacctaaaggctccatttaaaagacatagagtggcaaattggattctaaaacacaaaaaaaaacaaaaagacaaccatctgctgccttcaacacacccatctcacatataatgtcacccacaggytcaaagtaatgggatggagaaagctctatcatgaaaatgaaaaacaaaaaaaaaaaacagcaagtgtttctatttttgtatcttgtattaaacagactttaacagtaaaataaaatacaaagaaggacattatataatgataaaaagttcaattcaacaaaaagattaaactatcctaaatacatattcactgaacatcagagcacctagatttataaaataaatactactagacctatgaaaagagatagacagccatacaataatagtgagggacttcaacacctcactgacagcactagataggttactgaggcagaaaactagcaaagaaactctgtacttaaactggactcttaattaagtggacctaatagatgtctccagaatactccacccaacaaccacagaatacacatttttctcatctgcacatggaatatt

SEQ ID NO: 878138 - DNA, 594 bp, Homo sapiens; identical to SEQ ID NO: 872837

SEQ ID NO: 878139 - DNA, 652 bp, Homo sapiens
ccaggctggtctcgaactcctgacctcaggcgatccgcccacctaggtctcccaaagtgctgggattacaggcgtgagccaccacacccggccataaatagttttttaaggtttttggtacatagcatcaactcattctccagaaattgttatgaatatgtagtcccaccagaaattcaggagcatasatgcttcctacatactttccaccaggaagaaaaaccatttggtttctatgtttgccaatttgataagtttccatttacatttctgccattaccttggaaacttaacttttgtattctggtagttctttttttatgtaagcttcttaagataataaatatcaaaaacagttaagtggctagacttcaaactttaaaattctataaaaatgtaatatccagcaaaatttaatccatgagaaaattgaaactgtggtttgacaatacctctgtctccctttgtttcctcttaaatgcttgcctttgaactattctgaaatagtcacagtggcttggtatagaaagaagaggaagtcaaaggactgtggctgtatcagagatccagactgagttcaattccagttaaataggtgaaatggggtgagtggggaccttatttcattcatgatagctcattggctccctcc

SEQ ID NO: 878140 - DNA, 676 bp, Homo sapiens
gtgattaaccacataaacagaattaaagatgaaaactatgattgtctctcagtagatgcagagaaggctttcaataaaattcaacttcctttcatgttcaaaaaccctcaataaactgggtatcgaagaaatatacctcaaaataatgagagccatctataacaaactgacagccaacatcataccgaatgggcaaaagctggaagcattccccttgaaaatcagcatgacaagaatgtcctctatcaccactcctattcaacatagtattgtaagtcctggccagagcaatcagacaagagaaagaataaaaggcatccaaataggaagaraggaagtcaaactatccctgtttgccaatgacatgattctatatctagaaaaccccatagtctaagcacaaaagctccttaagataacaaaaaaaaaaactttagcaaaatttcatgatacaaaattaatgtgcagaaatcactagtattgttataaaccaacgacagccaagacgaaagtcaaatcaggaaggcagtctcattcacaattgctaaaaaaaggataaaatacccaggaatacagctaaccatggaggtgaaagatttctacaagtagaactacaaagcactgctcaaagaaatcagagatgatacaaacaaatggaaaaacattccatgctcat

SEQ ID NO: 878141 - DNA, 676 bp, Homo sapiens
gtgattaaccacataaacagaattaaagatgaaaactatgattgtctctcagtagatgcagagaaggctttcaataaaattcaacttcctttcatgttcaaaaaccctcaataaactgggtatcgaagaaatatacctcaaaataatgagagccatctataacaaactgacagccaacatcataccgaatgggcaaaagctggaagcattccccttgaaaatcagcatgacaagaatgtcctctatcaccactcctattcaacatagtattgtaagtcctggccagagcaatcagacaagagaaagaataaaaggcatccaaataggaagaaaggaagtcaaactatccctgtttgccaatgacatgattctatatctagaaaaccccatagtctaagcacaaaagctccttaagataacaaaaaaaaaaactttagcaaartttcatgatacaaaattaatgtgcagaaatcactagtattgttataaaccaacgacagccaagacgaaagtcaaatcaggaaggcagtctcattcacaattgctaaaaaaaggataaaatacccaggaatacagctaaccatggaggtgaaagatttctacaagtagaactacaaagcactgctcaaagaaatcagagatgatacaaacaaatggaaaaacattccatgctcat

SEQ ID NO: 878142 - DNA, 634 bp, Homo sapiens
ggatagatgttcagggatgttaactgcctcattgtaaaaagaatgtcatagaggaatagttggatttattatggcatatcaacagcatggaatattagactgtcattaaaaagattgagttagcatagttggcctgaaaagtcccatgaaatagcattaagcaataaaagtaagatgcaaacagatgcatataaatatattttcaaaaagctaataaagcccctatatatgtaagaaattatataagcaaatttttatagattaccatctgggagtgaaaataaaatggctaaatggttatcagattgaatgaaagtttaaaaaaatagtagttaaaaaaatacacatgacttgcttccatttcagtaaaatggaagcaaagtctgtgyaaataatatatacataaacaatttgaatagttatacagaatcagatctatctgcttcttaggtgatcatgataaactgttaagtgaaaaaagagaattgcaaaataaagagcataataaaattttggtaaaagaagctagaaactaatgtttaaatatgtatagttttgtagcacccagaagaaaaatgtggaaagatgcacccaggcttgttaacatttttacttcagtgggacaaaaacagat

SEQ ID NO: 878143 - DNA, 636 bp, Homo sapiens
taggtctcaacagtgggcttaaaatattcagtaaaccatgctgtaaataaatgtgctatcatccaggctgtgttgtttcatttatagagcccggacagtgtggatttagcttaactcttaagggccctaggattttcagagtggtcaatgaggattggtttcaacttaaagtcaccagctgtaacattagtccttaactagagagtcagcctgtccttygaattcttgcaaccagtcattgacttttcttctcaagcaatgaaaatcctaggtgacatcttccagaataaggttgctttgtctgcattgaagatctgttgttagagtagccacctacatcaatgatcttagtgagatcttttggataacttgcatcagcttctacatcagcgcttgctacctcacctgctgcttcgccttacacttttatgttatggagacggtttccttccttaaacctcaacaactaacctctgctagtttccaacttttctcctgaagctttccctcctccctcagccttcagagaatggaagagtgttagggctttgctttggattaggctttggcttaaaggaatgttgtagctgggtttatcttattcagaccaccaaaactttctccatatcagcaata

SEQ ID NO: 878144 - DNA, 636 bp, Homo sapiens
taggtctcaacagtgggcttaaaatattcagtaaaccatgctgtaaataaatgtgctatcatccaggctgtgttgtttcatttatagagcccggacagtgtggatttagcttaactcttaagggccctaggattttcagagtggtcaatgaggattggtttcaacttaaagtcaccagctgtaacattagtccttaactagagagtcagcctgtcctttgaattcttgcaaccagtcattgacttttcttctcaagcaatgaaaatcctaggtgacatcttccagaataaggttgctttgtctgcattgaagatctgttgttagagtagccacctacatcaatgatcttagtgagatcttttggataacttgcatcagcttctacatcagygcttgctacctcacctgctgcttcgccttacacttttatgttatggagacggtttccttccttaaacctcaacaactaacctctgctagtttccaacttttctcctgaagctttccctcctccctcagccttcagagaatggaagagtgttagggctttgctttggattaggctttggcttaaaggaatgttgtagctgggtttatcttattcagaccaccaaaactttctccatatcagcaata

SEQ ID NO: 878145 - DNA, 590 bp, Homo sapiens
ccaaggtttctttcatttctagcattctgtaattctaataatttggttgagtgaccccataggagtcccaaaatccaatcttctgcttactgccggaatctttttgttttcttatgaagtcatgccagagggtcatgcagttttaacttgaaaaatctcctactatagaacaccttttagggaagacaactccactgtctgactcttctaactgtgaaacagttccttactttgagatatggctgccttctcttcttytaggtaattgctacccaatgtttaaattttgcttttttgaggagtagtgtaatacctctttgctctgacagtctattaaatatccacagctggcatgtctaccctcagcttctctaaaacaagctcattcaattcctttagtcataaacatatatgacaagatttccaagcctgtaagatttaacagtctcttctaaatccagaattaatgaccttcaataaatttaccataagtctttggaaaaaaaaaaaaaaaaaaacacctaaaaaatgtgactcaatggtacgggcagtaaagacagattattcatacatttagtccttttattttt

SEQ ID NO: 878146 - DNA, 635 bp, Homo sapiens
tctgtcacccaggctggagtgcagtggtgcaactacagctcattggagcctcaaattctcaggcttaggtgatcctccaagctcagcctcctaggtagctgggactacaggcatgcaccaccagacccagctaattttgaagggcttttttgtagagacagggtttggccatgttgtccaggctggtctcgaattcctggactcagttcaagggatccactcgcctcagcctcccaaagtgctgggattacaggtgtgagccacagcgcctggcccgaaaatttccctcttaccccatcctttggccacccagtttccctctgcagaggcaaccgctgtycctagtgtcttgttgaaatatcacatttctttatttccttaaaacaacctaatttccaaggacctgctgagctggagataatgtaagctcagcccttcttggggcagaggagcctggatctcacctggcatcaagacaaggatggtggagggggcaggcacttctagttatccattatctagccacgttagtgactttggagatgtgccttgttccaggcatgtagaatcctcagagccaagtaaagggaggagccgaaacctgagcgctacattactccagtaagtccagggtg

SEQ ID NO: 878147 - DNA, 631 bp, Homo sapiens
ccatgaaggatggcagctcttagaagtcatggaagcaaagaacagtacccctcaggaccattgtaagaaaatgtcttctttgagagttcttaagactattagcacatctgaggacattttcctaaggattcatcttggtgtaaggacacactggggatattttaatttgtagtgatttgttgttgttgagcaataaacagtatatacctcttgaatttgctaaggaatgtgtgagcatacagtgctggtaacactacattagttaactctctttacctttcaaaactgatttaatgaaggtattttaatgccgtttcatagataagaaaatgaagtgcaaagtagttaacttgactaacmacaagtaagtgaaggagacataatttaagctttagcacagacaatctgtctcttatagtgaggcagtataacaataaatatgtggaggagatttctaaaatttccagtgtatgttaagaaaacaatgtattttatgatgttttagagaactgcccattataaccaactgataatgaaattcttcatctttccatgctatcatatttttcccttgtcagcacactgacctaggaatcaagaaattttggttctaatactcgcatttccacct

SEQ ID NO: 878148 - DNA, 666 bp, Homo sapiens
cttcgtcatgaaatctttgcccttcctaggtccaggacagtattgcctaggctgtcttccagagtttttatagttttgtgttttacacttaagtctttaattcatcttgagttgacttttgtatgtggtgtaagaacagggtccagcttcaatcttctgcatatggctagtcagtaatcccagcaccatttattgaataggaagtcttttccccatcacttgttttggtcagctttgtcaaagatcagatgggctgtagatgtatggccttatttctgggctgcctattctgttccattggtctatgtgcttgtttttgtaccagtatcatgctgttttggttactgtaaccttgtagcatagtttgaagtcaggtaatgtgattcctccagctttgttctttttgcttaggattgccttgactatttgggctcttttttggttccacatgaatttttgaacagttttttctagttctrtgaagaatgtcactggtagtttgataagaatagcaaaaaatctattcttatagcaatgttgaaatacacaatacattgttatcaactgtggttacaatgtaatgcaatagatcacaaaaacttattcctccagtttaactgcaactttgtaccctttgataatcatcttcccttttccatttctctg

SEQ ID NO: 878149 - DNA, 642 bp, Homo sapiens
cttactatcacgagaacagtagggggaaaccacagccatgatacaaatgatctcccacagggtcccttccacaacacgtaggaattatgggagtacagttcaagatgagatttgagtggggacacagagccaaaccttatcattctgcccctggcccctcccaaatctcatgtcctcacatttcaaaacyaatcatgccttcctacagtcccccaaagtcttaaatcatttcagcattaacccgaaagtccacagtccaaagtctcattggagacaaggcaagtcccttctgcctatgaccctgtaaaattaaaagcaagctagttactttctagatacaatgggggtgcaggtatttggtgaatacagccattccaaataggagaaattggccataacaaaggggttacagttcccatgccagtatgaaatccagcggtgcagtcagattctaaagctccaaaatgatctcctttgactccatgtctcacatccaagttatgctgatctaagaggtaggttcccatagtcttgggcagctctgcccctatggctttgcagggtgtaaccccctgcttctggctgctttcacaggctggcattgagtgtctagcttttccaggtgcacagtgcaagctgtca

SEQ ID NO: 878150 - DNA, 642 bp, Homo sapiens
cttactatcacgagaacagtagggggaaaccacagccatgatacaaatgatctcccacagggtcccttccacaacacgtaggaattatgggagtacagttcaagatgagatttgagtggggacacagagccaaaccttatcattctgcccctggcccctcccaaatctcatgtcctcacatttcaaaaccaatcatgccttcctacagtcccccaaagtcttaaatcatttcagcattaacccgaaagtccacagtccaaagtctcattggagacaaggcaagtcccttctgcctatgaccctgtaaaattaaaagcaagctagttactttctagatacaatgggggtgcaggtatttggtgaatacagccattccaaataggagaaattggccawaacaaaggggttacagttcccatgccagtatgaaatccagcggtgcagtcagattctaaagctccaaaatgatctcctttgactccatgtctcacatccaagttatgctgatctaagaggtaggttcccatagtcttgggcagctctgcccctatggctttgcagggtgtaaccccctgcttctggctgctttcacaggctggcattgagtgtctagcttttccaggtgcacagtgcaagctgtca

SEQ ID NO: 878151 - DNA, 642 bp, Homo sapiens
cttactatcacgagaacagtagggggaaaccacagccatgatacaaatgatctcccacagggtcccttccacaacacgtaggaattatgggagtacagttcaagatgagatttgagtggggacacagagccaaaccttatcattctgcccctggcccctcccaaatctcatgtcctcacatttcaaaaccaatcatgccttcctacagtcccccaaagtcttaaatcatttcagcattaacccgaaagtccacagtccaaagtctcattggagacaaggcaagtcccttctgcctatgaccctgtaaaattaaaagcaagctagttactttctagatacaatgggggtgcaggtatttggtgaatacagccattccaaataggagaaattggccataacaaaggggttacagttcccatgccagtatgaaatccagcggtgcagtcagattctaaagctccaaaatgatctcctttgactccatgtctcayatccaagttatgctgatctaagaggtaggttcccatagtcttgggcagctctgcccctatggctttgcagggtgtaaccccctgcttctggctgctttcacaggctggcattgagtgtctagcttttccaggtgcacagtgcaagctgtca

SEQ ID NO: 878152 - DNA, 600 bp, Homo sapiens
atagccttgccaacatatgatattttctgtttttaaaactccattcagaatgtgttttatatttttttatcactggatttggttggctaatgttgtgtgtagaatttcttttcacttatgtttatgttaaagattttcctttcttgttctgttcttttaaagtttttgtgttaaggtttcattggcattgtgaacaattacaaagtgttgcttttccttctattcaatgaagatagagagttaactgttttgaagaaatgactgctaaagcaatctgggccaaaagttttctttttgaagggtttgaattacggatttaatttatttaataatattggactactaagattttatatcaatatgcttttgtttctattaataccatgcaaccctttgggaatccctaccgaaagacttctgtttatcagagcgtttccttsttggcatacctagatccccaatttttcttcgcccgctcctctgtgattgttaagtgctctgctcaacttctaaactcctcaagagccattttaggatctgtaaaggcctttggttaaagtttcctcaaatgttagtttcacctctctgcatttgtcatct

SEQ ID NO: 878153 - DNA, 651 bp, Homo sapiens
caggatgagtcaaattcatagctgaattctaccagctgtaaaaagaagagctggtaccattcctcctgaaactattccaaaaaactgaggaggagggaagcctccctaactgattctatgaggtgagcatcatcctgataccaaaacctggcaaggacacgacaataaaagaaaacttcaggccaatatccttgatgaacatagattcaaaaatcctcaacaaatactagcaaatcaaatccattagcacatcaaaaagctaattcatcacaatcaagtaggctttattgctagktataaggttggttcaacatatgcaaatcaataaatgtgattcataacataaacagaactaaaaacaaaaccacatgattatcttaataacacagaaaaggcttttgatataatttaacagcctttcatgttgaaaaccctcaacaaattaggcattgaaggaacatatgtcaaaataataagagctgtctataacaaaccaacagcctccatcataatgaacaggcaaaagctgaaagcattccccttaagaaccagaacaagacaaggatgccctctctcacaactcctattcaacatagtactggaagtcctagccagagcaatcaggcaagagaaagaaagacaatgtatcca

SEQ ID NO: 878154 - DNA, 651 bp, Homo sapiens
caggatgagtcaaattcatagctgaattctaccagctgtaaaaagaagagctggtaccattcctcctgaaactattccaaaaaactgaggaggagggaagcctccctaactgattctatgaggtgagcatcatcctgataccaaaacctggcaaggacacgacaataaaagaaaacttcaggccaatatccttgatgaacatagattcaaaaatcctcaacaaatactagcaaatcaaatccattagcacatcaaaaagctaattcatcacaatcaagtaggctttattgctaggtataagrttggttcaacatatgcaaatcaataaatgtgattcataacataaacagaactaaaaacaaaaccacatgattatcttaataacacagaaaaggcttttgatataatttaacagcctttcatgttgaaaaccctcaacaaattaggcattgaaggaacatatgtcaaaataataagagctgtctataacaaaccaacagcctccatcataatgaacaggcaaaagctgaaagcattccccttaagaaccagaacaagacaaggatgccctctctcacaactcctattcaacatagtactggaagtcctagccagagcaatcaggcaagagaaagaaagacaatgtatcca

SEQ ID NO: 878155 - DNA, 614 bp, Homo sapiens
tccttctcccagctgcccctggcaaccaccatttgactctctgtttctataagtttgactattttagattcctcatataagtggaatcaggcagtatttgtctctctttgcctgacatttcatttagcattatgtccttcaagtttatccatgtgtattgtatggcaaaatgtcctattttttaaaagttgaataatattccattgtgtatatataccacatcattttgcattatcgccaacagtgtacaagggttccaatttctccacatactcagcaacactrtttttttctattttttaaaacaatagctatcctaaaggtgtgagatgatatatcattgtggtttgaatttgcatttccctgattagtgacattgagcatctttttacacaccttatggctatttatatgtctccttggagaaatgtctattcaagtctttagcccactttagtcagattactagttatttagttagttttgctgctgattcataggctagctaaattggtagagcatgagagtctatgtataacattttaatccaagcatatacacatatccatgctgtatcgctgcatgaccttcacacattgcaaaagctcacttgg

SEQ ID NO: 878156 - DNA, 614 bp, Homo sapiens
tccttctcccagctgcccctggcaaccaccatttgactctctgtttctataagtttgactattttagattcctcatataagtggaatcaggcagtatttgtctctctttgcctgacatttcatttagcattatgtccttcaagtttatccatgtgtattgtatggcaaaatgtcctattttttaaaagttgaataatattccattgtgtatatataccacatcattttgcattatcgccaacagtgtacaagggttccaatttctccacatactcagcaacactgtttttttctattttttaaaacaatagctatcctaaaggtgtgagatgatatatcattgtggtttgaatttgcatttccctgattagtgacattgagcatctttttacacaccttatggctatttatatgtctccttggagaaakgtctattcaagtctttagcccactttagtcagattactagttatttagttagttttgctgctgattcataggctagctaaattggtagagcatgagagtctatgtataacattttaatccaagcatatacacatatccatgctgtatcgctgcatgaccttcacacattgcaaaagctcacttgg

SEQ ID NO: 878157 - DNA, 585 bp, Homo sapiens
ctaaatatgtatgcacccaacacaagagcacccagattcataaaacaagttcttagagacctacaaagagacttggactcccacacaataatagtgggagactttaacatcccactgttaatattagatagatcaatgagacagaaaattaacaaggatattcaggacttaaactcagctctggatcgagtggacctaatagatatctacagaactctccaccccaaaacaacaaaatatacattcatcttattgccacatggcacttactctaaaatcgactacataattgaaagtaaaacactcctcagcaaatgcaaaagaacraaacaataacagtctctcagacctcagtacaatcaaattagaatttaggattaagaaactcactcaaaaccacacaactgcatggaaattgaacaacctgctcctgaatgactcttgggtaaataatgaaattaaagcagaaatcaagaagttatttgaaaccaatgagaacaaagacacaacataccagaatctctgggacacagctaaagcagtgttaagagggaagtttatagcactaaatgcccacatcagaca

SEQ ID NO: 878158 - DNA, 597 bp, Homo sapiens
ggtagatgtgcaggatttttccatggttatattgcatggggttgaagtttgagcttctattgattctgtcacccagggactgaacatagtacccaatagggagttttgcagcccttgccctactccctccaaccattcttttggagtccccagtgactatgttcccttccttatgtctgtctgaacccaaggtttacctcccacttataagtgagaacatgtgctatttggtttttttctgagttaggtctcttaggataacggtctccagctgagtccatgttgttgcaaaggacatgatttcattcttcttttatggctgtgtagtattccatagtgtgtatgtaccacattttctttatccaacccaccattgataggcacctaggttgaatccatgtttcagctattgtgaatagtgctgccatgtgcatatgtgtgcrtgtgtctttttggtaaaatgatttactttcctttgagtatacacccagtaatgggattagttcatcctctaattttattctaccaacgcctctcatttcccattatttttcaacagagggccttattctttaagatcagtatcttcctgttgga

SEQ ID NO: 878159 - DNA, 587 bp, Homo sapiens
tatatatatatatatatatatatatatatatatatattttttttttttttttttttttttttttggatggagtctcgctctgttcccaggctggagtgtagtggcttgatctcagctcactgcaagctccgcctgccaggttcacaccattctcctgcctcagcctccccagtagctgggactacaggtgctcgccaccacgcccggctrattttttgtatttttagtagagacagggtttcaccgtgttagccaggatggtctctatctcctgaccttgtgatctgccctcctcagcctcccaaagtgctgggattacaggcgtgagccaccacgcccagccaattttgttatatttatcaatatttatagctgaatacatgcaattagggaatgatccccaaagagcagtatttcaaataaatttatcaatgtggacacaaaagtatgtaagtatgttcttaaagggaaacatgaaatgaaaaatgcaaatttccctttaagaaaagaagcacctttaaactaagagaaaattggggcaaaaacatttctgtccattatgtaatatgtgtaaattccttcttttg

SEQ ID NO: 878160 - DNA, 696 bp, Homo sapiens
aaaaaagaaaatttcaggccaatatccctgatgaacatcgatgtgaaaatcctcagtaaaataccggcaaaccaaatccagcagcacatcaaaaagcttatctaccacgatcaagtcagcttcatctctgggatgtaagccttgtttaacatatgcaaatcaatgaatgtaatccatcacatgaacagaaacaatgacaaaaaccacatgattatctcaatagatgcagaaaaggccttcaygaaaattcaacaccccttcatgctaaaaagtctcaataaactaggtattgacggaatgtatctcaaaataataagagctatttatgacaaacccatagccaatatcatactgaatgggcaaaaactggaagcattccttttgaaaaccggcacaagacagggatgccctctttcatcactcctattcaacatagtattagaacttctggccagggaaatcaggcaagagaaagaaataaaaggtattcaaataggaaaaaaaggaagtcaaattgtctctgtttgcagatgacatgattgtatatttagaaaaccccatcgtctcagcccaaaatctccttaagctgataagcaacttcagtaaagtctcaggatacaaaatcgatgtgcaaaaaatcaaaagcattcctatacaccaacaacagacaaacagagagccaaatcaagagtagtc

SEQ ID NO: 878161 - DNA, 696 bp, Homo sapiens
aaaaaagaaaatttcaggccaatatccctgatgaacatcgatgtgaaaatcctcagtaaaataccggcaaaccaaatccagcagcacatcaaaaagcttatctaccacgatcaagtcagcttcatctctgggatgtaagccttgtttaacatatgcaaatcaatgaatgtaatccatcacatgaacagaaacaatgacaaaaaccacatgattatctcaatagatgcagaaaaggccttcacgaaaattcaacaccccttcatgctaaaaagtctcaataaactaggtattgacggaatgtatctcaaaataataagagctatttatgacaaacccatagccaatatcatactgaatgggcaaaaactggaarcattccttttgaaaaccggcacaagacagggatgccctctttcatcactcctattcaacatagtattagaacttctggccagggaaatcaggcaagagaaagaaataaaaggtattcaaataggaaaaaaaggaagtcaaattgtctctgtttgcagatgacatgattgtatatttagaaaaccccatcgtctcagcccaaaatctccttaagctgataagcaacttcagtaaagtctcaggatacaaaatcgatgtgcaaaaaatcaaaagcattcctatacaccaacaacagacaaacagagagccaaatcaagagtagtc

SEQ ID NO: 878162 - DNA, 562 bp, Homo sapiens
atgcagaagattaaaactggactgctttcttacaccatatataaaaattaactcaacatggattaaagacttaaatgtaaaatcccaaactgtaaaaaccctagaagaaaatccaggcaataccattcaggacataggcacaaacamatttttcctaacaacaacaccataaacaattgcaacagaagcaaaaattgacaaatgtgatctaattaaactaaagagcttctgcaaaataaactatcatcagagaatacaggcaacctagagaatgggagaaaacttttgcaatctatccatctgaaaaaggtctaatatccagagtctacaagaaacttaaacaaatttttccagaaaaaaaaacaactgaattaaaaagtgagaaatgaacatgaacagacacttttcaaaagaaaacatacatgcagccaacaaaaatattttaaaaaactcaacatcactgaccattagagaaacgcaaatcaaaaccacaatgagataccatatcatgccagtcagaatgctattattaaaaagtcaagaaaccacagatgctggtgag

SEQ ID NO: 878163 - DNA, 562 bp, Homo sapiens
atgcagaagattaaaactggactgctttcttacaccatatataaaaattaactcaacatggattaaagacttaaatgtaaaatcccaaactgtaaaaaccctagaagaaaatccaggcaataccattcaggacataggcacaaacacatttttcctaacaacaacaccataaacaattgcaacagaagcaaaaattgacaaatgtgatctaattaaactaaagagcttctgmaaaataaactatcatcagagaatacaggcaacctagagaatgggagaaaacttttgcaatctatccatctgaaaaaggtctaatatccagagtctacaagaaacttaaacaaatttttccagaaaaaaaaacaactgaattaaaaagtgagaaatgaacatgaacagacacttttcaaaagaaaacatacatgcagccaacaaaaatattttaaaaaactcaacatcactgaccattagagaaacgcaaatcaaaaccacaatgagataccatatcatgccagtcagaatgctattattaaaaagtcaagaaaccacagatgctggtgag

SEQ ID NO: 878164 - DNA, 597 bp, Homo sapiens
ttcagcatatcaaaggggaacctgtatccccacgtctactgcagtgctattcacaatagcaaagttatggaatcaacctaagtgtctagcaagagatgaatggataaaggaaatgtggtgtacatacgcaatggaatactatctagccataaaaaggatgacatcttgcatttgcacagcatggatggagctagaggtcattatgttaagtgaaataaaccaggcctagaaagacaaatattggatgttctcactcatacatgaragctaagggaggtagagagtagaatgatacttaccagggactaggaagggcatatgtgggtatggggagaggtgagatgaagagaggtagttcactggatacaagcatacagttagatagaaggaaattctaattattgatagcacagtagaatgactattataaacaataacatattgtaaatttcaaaagagctagtagaaatgatttcaaatgttccaaactcaaattatatatgctccaggtgatggatattctaaataccctgaattgatgattaaacattgtacacatgtatcaaaatatcacatgtaccccataaatatgtacaa

SEQ ID NO: 878165 - DNA, 594 bp, Homo sapiens
tacttcactgtgatagtcccaagtgatcatcatgttttaaactcttagcctcaccctattcttcatgcagaagataaaattattttatccactgtcacttgagaacagagccacttgtcaaaagcattatgtttcatttcatagaattttccaggtgttatggggatggattatttcattgccaaattgctgtttgttgggttgtacaactttattcttcaagcagcactatctgagagttcatgttttcctagttttgccaacagagttgcaactgcactttaacacactcttagtgttrcaccaaagagaagactagagaatcttatgaatgtatttgtacttaacttttaatgtaacaggtcttcctagacatacacaatgattagcccctcttttagatcactgttggcctacttgcagctcccctccttccctttgtaaatcactacttgatgaagtaactatgggacttaaacctcaccagacagaggaatttccagtgaggaaagcttatgtctctgctccaatgcagttaatctaaaagtccctcaagtcttaggtgttagtgatggcaaagccccttatgaggtc

SEQ ID NO: 878166 - DNA, 609 bp, Homo sapiens
gctgacaaattgccctcgcaagtggctatatcaaattacaccctccgaagagtatgtgtatggaattgcctgcttccctatgctatcagacactcaatatttatttatttattataaatttatttatttactgcactttaggaagttatttctactgagattgagtatgactttgttatttgtgttttgtatttcttatgtaagttacttgttcrtatattttattcatattagcttggttctgttgttgttgttgttgttgttgttgttgttgttgttggttgggagtcaattttttattcttaacagtagtctttgccagttattaaagatgtatgtaatttatccatatctgtcattttgttgatattctgctctataattctaaaatggctgtgtacttatatttatcaatattttctttcttttcattgttggtggcagtataaattaattcatccattgtggaagattccttaaaaacttagaggcagaaatacaattcaacccaccaatcccattactgggtatatgagcaaaggaatataaagtgttttttaataaagaaacatgcgcacatatgttcattgcagcactattcataatagc

SEQ ID NO: 878167 - DNA, 535 bp, Homo sapiens
cccagttaatggaactgttaaaagaaatagaagacagtgaatgtaataatctgtgttctttgccaatgcacgttgattaagtaatggaaaagatttacaaagatttgctgtactgttcaagattttactgaaacagaaggaatgcttgtcaaatattaatttttttttctttttcttttcttttcttttcttttytttttttttttttagacagtctcactctgttgcccaggctggagtgcagtggcacgatctcagctcaatgtaacctctgcctcctgggttcaagcgattctcctgcctcagcctcccaagtagctgggattgcaggtgcccactaccatgcctggataatttttgtatttttagtagagatgggatttcaccatgttggccaggcttttctcaaactcctgacctcaagtgatctgcctgcctcagcctcccaaagtgctgggattacaggcatgggccactgtgcctggccaaatattcaaaaattaaagacaaaaacgactgaataactttgatatca

SEQ ID NO: 878168 - DNA, 642 bp, Homo sapiens
acacagacactgttaagtgggagtctaaattagttcaactattgtggaaagcagtgtgacattttcttaaagacctaaaaatagaactaccattttacccagcaatcctattactgggtatctacccaaagagatataaattattttatcataaagatgcatgcacacatgctcactgcagcactattcacaatagcaaaaacatggaatcaacctaaatgcccatcaatggtagactggataaagacaatgtggtacatatacacaactgaatatgatgcagccataaaaaagaataagataattaagatggcagataggaggcagcactagcttgcagctcccacttggacagacagagaggtgaggaggctcacatcatgatcttttgctccaagaagtaccacagcaacattccagggaagctgagataatccacagaccctttgaaggaactggagcactgctgcatgctccytgagatgctgaaaaactgtgagtctccttgctttttagctgggaggctggtggtctggggcaagttctcagccttgatcaccagatgcccagaaatagactcggtgctgttgagggggcacagtgggagtaagactggcctttaggactgcaggctgcatgggt

SEQ ID NO: 878169 - DNA, 577 bp, Homo sapiens
atataaagaacaggtttgaccataacgcatacaaattctattcaacataaagtctaatgttcacaaattgtttcatgctctccaagagaagaagaaagttctcaagttccctaatgttgtccaaaatgaaatacaaaagggaaaatatttgcaaaaggcaggttcactaatatttgtacatctgtacagaaattcccaccatgaaaagcttccgtacacatatttgagcatttatttgttcagtgagtatatgttgagcaactaccaggccacaggcacagtactaaacagtggggacacagtggagaacaaaagtgrcacggcgtctgctctcttggatgttcaggtgaaatgaggagagagtcatggggacgccaactgcaccgaatattgctaacagaaaacataaataaatataaaatgcttgaaatggtctgaaggcaaattacagggtgtgctaaggcagtgttttaggagatctaatttagattacactatctgggaagccatctctgagcaaatgatagtgaggcagtcgccaaagggtaaagaggactctcctgggtgaagggtggtg

SEQ ID NO: 878170 - DNA, 392 bp, Homo sapiens
taacttacaggataagataggaggttggcacaagatacaggtcataaagaccttgctgacaaaacaggttgaagtaaagaagctgactaaaacccactgaaatcaagatggtgaccagagtgacttctggtcttcctcactgctatgctcccaacagcaccatgacagtttacaaatgctgtagcaaygtcaggaagttgccctatatggtctaaaaaggggaggcacgaataatccaccccttgtttagcatgtcatcaagaaataaccataacaatgggcaaccagcagccctcggggctgctctgcctatggagtattattctcttattcctttactttccttataaatttcctttcactttactttatggacttgccctgaattcttt

SEQ ID NO: 878171 - DNA, 615 bp, Homo sapiens
gcctcctattatttaatttatcattatacctttggtaaagaggaagaaaatgggaacagttaaggagatacttatttcctatgtcttatatttctttttttttagcagtgcctcaataatctgactgttgaatgtacaatyaagtataccataggcacatatgatttagatacatttctcaaataactggtgagacacaatatcataatggtcagagtatcttgatccactctactcaatcagaatctattgtcttttttttgtgagtggcacactggtcactgcatggaaaattgccaagattttttcttttccttctttaccctttcaccaaatctagaacatttttacctgaaatgcaattcaattctaataaactttttgatattagtaggaaatttacaaactgatagacattgaagttggccacttcctccacccattttaccccagagagtacgttatcattactcacaacctgtctgtttaatacttcctcttttacctcctttttgggtcttatttgtatgatattttaatcacattttacacacacacaaaaattatatgtatgttcaagataaataagagcctggacaacacagtgaggcccct

SEQ ID NO: 878172 - DNA, 624 bp, Homo sapiens
ttaaatattagatctaaaaccataaaaaccctagaagaaaacctaggcaataccattcaggacataggcatgggcaaggacttcatgtctaaaacaccaaaagcaatggcaacaaaagccaaaattgacaaatgggatctaattgaactaaagagctactgcacagcaaaagaaactaccatcagagtcaacaggcaacctagagaatgggagaaaatttttgcaatctactcatctgacaaagggctaatatccagaatctaccaagaactcaaacaaatttacaagaaaacaccaaccaccccatcaaaaagtgggcaaaagatatgaacagacacttctcaagagaagccattaatgcagccaacagacacatgaaaaartgctcatcatcagtgaccatcagagaaatgcaaatcaaaaccacaatgagataccatctcacacctgttagaatggcgctcattaaaaagtcgggaaacaacaggtgctagagaagatgtggagaaataggaacacttttacactgttggtgggactgtaaactggttcaaccattgtggaagacagtgaggcaattcctcaggagctagaactagaaataccggttgacccagccatccc

SEQ ID NO: 878173 - DNA, 573 bp, Homo sapiens
agccgaaagagagactatcgtggctaacttgtacctttagcggcttgacggcacagacaagatcaatctttccattgccaacactattttcaataattctaaaacagttgatatcaactgtgactatctttatgaaaatgcttttccccacaaatackaacacatgattctaagaactacacttgatgctacaaggaagccagaactctgtacctagagaggaggagataaatttgtaatcggtattataagttggaaaaagaaaagaaatgtaacttgggaatgtgtaagagctgatgtctttatatctagtccacagccaagggcacaagttcctttattttgagtgtgccagaccacctgcagtaactcctcataacatcttaaactaaatcttctctttaaggtctagggccttctccaactcacttcctgaaaagcagtatgctcaggtaacaactccaacagcaccgactcacaaggggtcctagacactgatttaatgttggcctcaaaaagaaaacttctggaagcttttggggctaggtgaggtacttgagggtataattctct

SEQ ID NO: 878174 - DNA, 631 bp, Homo sapiens
ttttagctttttaactttttaaaggcactttccctcatagaagtaaaaagcagaacacaagttaccagaggctgataatggtagcgggaagggagggatagggaaagacttgtacagggtacaaaattacagctagataggaggaaagagttatagtattccatactactgtagaatgactgtagttagcaataacwtatagtttcaaatagctagaaggaggatattgaattttcccaacacaaagaattgatacatagcaacaagaagaattgaaatgatggagatgctaaaattacgctgatctgatcactatacactatatctattgaaacatcactatgtaccacatatatatatatgattatcatatatcaatttaaaatttaaaaatttagaggcattttcatgtacattattattatgaataacatgtacatgttctcattctaatgctagatcaaaaagaaggctatggattgcagtaagggccatagtacaagtaatatgtttgagaccacccgctttgtttgctaagagcccaaccagtcttgttttgctttttctgaatgtctaacaaaattcagactgtagaaagtacaggcatcaggcagttttaaagcacaacatt

SEQ ID NO: 878175 - DNA, 628 bp, Homo sapiens
aatgtatcccaaacttctccttcatccatcccctgttcccttcccctttttgcctcttcctccttctcttctcctcatccttgctctggaacctaaggcaatatgaaatttttaaaaggtgctgtgagcttgctgtctgaatcctcgctaggcctctgtcttttgggggcagttttgtcggcatacccatctgcagttagctagcttggactcccatgatgggcttaggctctgtgagtgccgggccccagggctggtcagagcattttgctcccaggatgtccacttcatggttgaagggtgtcagatcaagcagagatcaagttctaacaactccagaaaaggatttgaaaaaaaaaagacactgcttggccatcagaacacttaaactttgcagaatagtacagtattcctcccccttttattacttgttagatttaaatacagatttccttktcactaacaaataagccttttcttacttttattatagtttcgttgttcatttttattcagcttaaagtatttactataaaagtgttgggatactgacaaatttttcataaattttcaatttattctgcaatattaagtcacatttttcctttccctgaggctgacttgttct

SEQ ID NO: 878176 - DNA, 537 bp, Homo sapiens
ttccaggagaacttccccagcctaggaaggcacgccaacattcaaattcaggaaatacagagaacaccacaaagatactcctcgagaagagcaatcccaagacacataattttcagattcaccaaagttgaaatgaaggaaaaaatgttaagggcagccagagagaaaggtcgggttacccacaaagggaagcccatcagactaacagcagatctttcggcagaaactctacatgccagaagagtgggggccaatattcaacattattaaataaaataattttcaactcagaatttcatatccagccaaactaagcttcataagtraaggagaaataaaatcctttacagacaaacaaaggctgagagattttgtcaccaccaggcctgccttacaagagctcctgaaggaagcactaagcatggaaaggaacaaatggtaccaaccactgcaaaaacatggcaaattgaaaagaccatcgatgctaggaagaaagtgtatcaactcatgagcaaaataaccagctaacattatgac

SEQ ID NO: 878177 - DNA, 691 bp, Homo sapiens
cacacttgaagttttctgttcacatttcttaagagtggcagttaattcagatagaggaagaaacctagaggattctggattgaggaaagtaaacattgttgaaatgaatccacatttttcgttcatgcagttgctgcttgcatcatggcagaatttggctagatgttcaccagatcctatttcttcccttgtacatggtcaaactgtatttgtcagattatttaaatatgagccacgagattkgttctgaacaatggaatatgggcattcatatatctgtatcagttccagacctggccccttaaacttcccacacaattttccttttgatcatagggtggctggatgcagaagatggagcagtgaattccaaggctctgagaacatctaagccactaattaaaaggcccctgaattactgagttatatgggcttggagaaaagccatccaccacaaccacatttagttttatgtcagagaaaacaaaattttattgtgttaagccactaaaatttgggggttacttgttataacaattaacattaattcccccaacacagccacccaatctaaggctgcgtttataaaatgagtttcaccccaataacaacaccgttcattggcatcaagaaaaaaagcccaagacaaggctacagcagacacctagaaacaaaccatggtctgtgaact

SEQ ID NO: 878178 - DNA, 609 bp, Homo sapiens
gctccttctcttgcaataacttacaagagatacaatgatcaccattatgtagttgtaattatgaagggtctgttacattgagtgatcggaccaaggtcaaattgcttgtaggaagttaagcagaggtcaggcacagtggttcacacctgtaatcccagcactctgggaggccgaggtgggtggactacctgaggtcaggagttcaagaccagcctggccatcatagtgaaaccccgtctctactaagaattcaaaaattagccaggcgtggagttgtgtgcctgtaatcctagctacttaggaggctgaggcagaagaatcgcttgaactcaggargtggatgttgcagtgagccaagatcaagtcactgcactctagcctgggcagcagagtgagactccgtctcaaaaaaaaaaaaaaaagaaaaaaaaacaaagaaagaagaaaaaaagaagtgaagcagagaatcgaacccaattttgcttgcaccagattttatgggcttgtcactctttcatatggtttttcctgaagggagaggctcaataagcatgaggacaaattagagaatcagagaacacaatttgtttagttattcaaataattgga

SEQ ID NO: 878179 - DNA, 641 bp, Homo sapiens
agataggggtcaagctttattcttttgcatatggatatccatttttcccagaactatttattgaagaaactctcctttccccaatgtatgatattggtggcttcatcaaaaattagttcactctagatgtatgaatttgtttctgagttctctatgctgttccattggtctttttgtttgtttttatggcagtaccatgctgttttgcttattatagctctgtgctataatttaaagtcaggtaatgtgattccttcacttctttagcttaggatagctttggctattctggggcttctgtggttcaatataaatttcaggattgttttttccatttctgtgaagaatgtctggtattttgatagggattgcactgaatctgtagactgctttgggtagtatgaacattttaacaatattgattcttccaatscatgaacatgaaatgtcttttcatttttttgtagcatcttcaatttcttgcatcagtgttttatacttttcattgtagagatctttcacttctttggttaattccttggtattttattttattttatttgttgcttttgtaaataagattactttcttgatttctgtttcagattgtttgctgttggtgtatagaaatgctactgatt

SEQ ID NO: 878180 - DNA, 629 bp, Homo sapiens
tctaaagtacagttctaactatgtaattcttacgcttacaaagtaattcagtatcatttagtgcttaaaattctttgctggcttcccacaccccttgggatgaaatctggacaccttgataggacttataaagtattacattatccagtctgttcttaagtctccagccccatctcttgccactttctccatgcactgtctgcatcaaccatattaattgttgttcgttgttttaaataagcaatgctctcactccttaktcttaagatacgaaggtcacttgactgggaaagatctcttccacacttctctttatcttctaattatatcctaaacattctttatgtccctttctccttaaaggctctctgagctacaaagtctcctggtacatattcttataacagctgcactattatttcataacctctatgaatgaagaaattaattgtgtcctcacactctagtattttgtagtttgacattaaatatttacagaataaatggatgtgtttggtccactcttctttttaaatttgagactcagcgggtacatgtgcatgtttgttatgtggatataccaaataatgctgagctttgggcttcagttgactccatcacgcaaatag

SEQ ID NO: 878181 - DNA, 574 bp, Homo sapiens
ctgaggcacaatttaaaataaatctcaaggtaatctcaaaggggaaatgatatgctacatgggtgataggaaacctattggtggattgtggaaaatatttataaaatagttgaacaaagggtataaataagtaggaaaaggcaaaaaaaagaggaaaggaaatgagctggaagccagcaagtggtctgagtcctaacaccaagttctaagttgggccatcatcatttaatcaaggaacgggctatcccttgattgtaagtattagttttaaatacttaaaattttaattatttaaaagtaaattgtaagtattagatttaaatacttacaattctaagtatttaaaagttctgcctggtagaactttcatttactaagtagtttacatttaggtatcagtatagtcagtattatcagcctgaarccccctaaatgggagtttctgtgtccctacacccatggagctgagggcagtgtcttgctcacagaatctcagcgtcaaaaggaaagaaagggctcccaaatttaaactcaggcatagtcaggctagtgtgggtttagcaaactcttggac

SEQ ID NO: 878182 - DNA, 618 bp, Homo sapiens
gatctatccatgtcagagcaaagaatataatctcattcattataatggctgcctacttttccgtggtgaatatgtaccacattttctttatccagtctaccattgatgggcatttaggttgattccatgtctgtgctattgtgaatggtgctacaataaacatacatgtgcatgtgtctttataatagaacaatttatattcctttggatatatactcagtaatgkgattgctgggtcgaatggcagttatgtctttaggtctttgaggaatcaccacactcttttctacaatggctgaactaatttacactcccaccaacagtgtataagcattcctttttctccagaacctcgccagcatctgttattttttgactttttaaaatggctagtctgactggtgtgagatggtatctcattgtggttttgattttcatttctctaatgatcagtgatgttgagctttttttcatatgattgttggccacatgtatgtcttcttttgacaaatgtctgttcatattctttgcccaccttttaatggtgttttttccttgtaactttaagtttcttataatgctgtatattagattttttgtcagatgcatagtttgcaa

SEQ ID NO: 878183 - DNA, 656 bp, Homo sapiens
agaaaagaccaaattgctaccaacaattagaagactgtaagtgttttaggtaatgaattggtttaacatcagagctcagataatgaaaaggggatacacacacacacacacaaacattcactcatatgtatatgtttccttctgttccaccagtatgagcacactgggtgtacttgagggacaatgactaagatttgtgtgaattagaacctgagtttgctgtggagtacaaatggtttgaaatgactgtgaagcaatgaatttatccttactcrgaaaatcatgatggcctgtccaaaatctagttgagttctccacataagaaatacaagactatgatagaccaaggtaaagaactaccacagtccctataattcttactataacgttaccttagatgactaaaactcctccttctcctcctttgtaacatgtgaaaaaacagccagaccacagctggaatcatttgaataataacaagaaagttataataattgaaaaatatagtacaaattcaaatgaatgaatgagaaaacaaaatatgtaaaaactgaagagctgaaatatccagtgtgagtggattattggaaattcttattctaggtacaaaagagataatgcacttttagaatccaagaaataataaactgaaagtg

SEQ ID NO: 878184 - DNA, 607 bp, Homo sapiens
aactggctgggccaaagttatttaactactacgtgacagaaccaaaatttaaatctagggtttgtgcatgcaagtccagagctctttccactataacacactggcctaagtgcaggcagcaaaagctctccaaggttgtgacgggacccatggccattctytgcattttgtctgtccggggaagaatggagggagagggtttgtgcaaagtgtcactcagcaaaccctgatgtggaatggggaacatctgtggtctcccttgccccactcatctgactctctgtttaccaatttcttcttgaatcaaaaaaggaactgagagcatggcccaaatgtcacgaaccggttcctgccccagcatttctcagaaggacagataaacaatgtgatggatgtgctaatgttgggttgggtggggagggtcggaagttgggcaggaagagttatttgctcagttggccaagttattcctacgcagtgagagggcttcaactaccaatccattatcgctggtcctagggttctgtagagctgaagttattgcctcagaatcttgataataggtgctacagaaggaggacacatctttacaaagacgagcctctaa

SEQ ID NO: 878185 - DNA, 566 bp, Homo sapiens
acaactaaaagaactagagaactaagagcaaacaaacccccaaagatagcagaaaaaagaaataatctagatcagagtggaactgaaagagatagagacacaaaacaccctccaaaaaaattaatgaatgcaggagcctttttagaaaaataaataaaatagataaactgctagctagactaagaagaaaagagagaagaatcaaatagacataataaaaaatgataaaggggatatcacaactagtgtcacagaaatgaaaaagctatcacaaaatactatactcacctctatgcaaataaactagaacatctagaagaaatggaaatattcctggacacacacaccctcccaagactgaatgaggaaaaaaytgaatccctgaatagacaaataatgagttttgaaattgagacagtaataaatagcctacaaaccaaaaaaagcccaggaccagatggatttacagctgaattctaacagaaatacaaacaggagacggtaccattttttttctgaaactatcaaaaatgaaattaagatggaaataaagtattctttgaact

SEQ ID NO: 878186 - DNA, 606 bp, Homo sapiens
tgatctctcagcagaaaccctacaagccagaagagtgggggccagtattcaacattcttaaagaaaaacattttcaacccagaatttcatgtccagccaaactaagcttcataattgaaggagaaatacaatcctttacagacaagcaaatgctgagakattttgtcaccaccaggcctgccttaaaagagcttctgaaggaatcactaaacatggaaaggaacaaccggtaccagccactgcaaaaacatgccaaattgtaaagaccatcaaggctaggaagaaactgcatcaattaacgggcaaaataaccagctaacatcataatgacaggatctaaatcacacataacaatattaaccttacatgttaatgagctaaatgccccagttagaagacacagactggcaaattggataaagaatcaagacccatcagtgtgccgtattcaggagacccatctcacatacagaaacacacataggctcaaaataaagggatggaggaagatctaccaagcaaatggaaaacaaaaaaaagcaggggttgcaatcctagtctctaataaaacagactttagaccaacaaagatcaaaagagacaaag

SEQ ID NO: 878187 - DNA, 606 bp, Homo sapiens
tgatctctcagcagaaaccctacaagccagaagagtgggggccagtattcaacattcttaaagaaaaacattttcaacccagaatttcatgtccagccaaactaagcttcataattgaaggagaaatacaatcctttacagacaagcaaatgctgagagattttgtcaccaccaggcctgccttaaaagagcttctgaaggaatcactaaacatggaaaggaacaaccggtaccagccactgcaaaaacatgccaaattgtaaagaccatcaaggctaggaagaaactgcatcaattaaygggcaaaataaccagctaacatcataatgacaggatctaaatcacacataacaatattaaccttacatgttaatgagctaaatgccccagttagaagacacagactggcaaattggataaagaatcaagacccatcagtgtgccgtattcaggagacccatctcacatacagaaacacacataggctcaaaataaagggatggaggaagatctaccaagcaaatggaaaacaaaaaaaagcaggggttgcaatcctagtctctaataaaacagactttagaccaacaaagatcaaaagagacaaag

SEQ ID NO: 878188 - DNA, 550 bp, Homo sapiens
ggtggagccaagatggccgaataggaacagctctggtctacagctcccagcctgagcgacacagaggatgggtgatttctgcatttccatctgaggtactgggttcatctcactagggagtgccagacagtgggtgcaggacagtgggtgcagcgcaccattcatgagccaaagcaggstgaggcattgcctcacttgggaagcacaaggggtcagggatttgcctttcctagccaaagaaaggggtgacagacagcacctggaatatcgggtcactcccaccctaatactgcacttttccaacaggcttgaaaaacgggacaccaggagattatatcctgcacatggctcagagggtcctacgcccatggagtgtcactgattgctagcacagcagtctgagatcaaactgcaaggccgcagtgaggctgggggaggggtgcctgccattgcccaggcttgattagggaaacaaagcagccaggaagctcgaactgggtggagcccaccacagctcaaagaggcctgcctgcctctgtaggctccacct

SEQ ID NO: 878189 - DNA, 550 bp, Homo sapiens
ggtggagccaagatggccgaataggaacagctctggtctacagctcccagcctgagcgacacagaggatgggtgatttctgcatttccatctgaggtactgggttcatctcactagggagtgccagacagtgggtgcaggacagtgggtgcagcgcaccattcatgagccaaagcaggctgaggcattgcctcacttgggaagcacaaggggtcagggatttgcctttcctagccaaagaaaggggtgacagacagcacctggaatatcgggtcactcccaccctaatactgcacttttccaacaggcttgaaaaacgggacaccaggagattatatcctgcacmtggctcagagggtcctacgcccatggagtgtcactgattgctagcacagcagtctgagatcaaactgcaaggccgcagtgaggctgggggaggggtgcctgccattgcccaggcttgattagggaaacaaagcagccaggaagctcgaactgggtggagcccaccacagctcaaagaggcctgcctgcctctgtaggctccacct

SEQ ID NO: 878190 - DNA, 647 bp, Homo sapiens
cttatttctgagttctctattccattccattggtctctgtgtctgtttttgtgccagtaccttgttgttttggttactgtagccttgtagtatagtttgaagttgggcagtgtgatgctacccaggctggagtgcagtggcaggatctcggctcactgcaagctccacctcccaggttcacaccattctcctgcctcagcctcccaagtagctgggattacaggcatctgccaccgcacctggctaattttttgtatttttagtagagatgtggtttcaccatgttagccaggatgktctccatctcctgacctcatgatccgcccacctcagcctcccaaagtgctgggattacaggcgtgagccactgtgcctggccagctttgttcttttttcataggattggtttggctattcaggctcttttttggttccatatgaattttaaagtatttttttctagttctgtgaagaatgtcgatggtagtttaataggaatagcattgaatctctaaattgctttgggcagtatggtccttttcacaatattgattcttcttatccatgagcatagaatgttgttccatttgtttgtgtcctctctgatttccttgagcagtggtttgtagttctccttgaataggtcc

SEQ ID NO: 878191 - DNA, 461 bp, Homo sapiens
cctgggcttttttggttggtaggctatttattaatgcctcgatttcagaactcattattggcctattcaaggatttgatttcttccttgttcagtcttgggaggctgtatgtgtccaggaatctatccatttcttcyagattttctagtttatgttcatagaggtgtttgtagtattctccaatggttggttgtatttctatggagtcattgatgatattccccttatcatttctgattgtggctatttgattcttatgttttcttttttattagtctaagcagtctatctattttattaatttttttcaaaaaatcagctgctgcattcattgatttttgaaggatttttcatgtctctatctccttcagttcagctctgatcttggttatttcttttcttctagctttggggtttgtttgctcttgattctctagttcttttagttgtggtggtagtgt

SEQ ID NO: 878192 - DNA, 626 bp, Homo sapiens
gagtccctcattttcaattgtttgtaatagtttcattagaaatggtaccagatcttctttgtacctctagtagaattcagctgtgaatctgcctggtcctgggcttttttggttggtaggctatttattaatgcctcgatttcagaactcattattggcctattcaaggatttgatttcttccttgttcagtcttgggaggctgtatgtgtccaggaatctatccatttcttccagattttctagtttatgttcatagaggtgtttgtagtattctccaatggttggttgtatttctatggagtcattgatgatattccccttatcatttctgattgtggctatttgattcttaygttttcttttttattagtctaagcagtctatctattttattaatttttttcaaaaaatcagctgctgcattcattgatttttgaaggatttttcatgtctctatctccttcagttcagctctgatcttggttatttcttttcttctagctttggggtttgtttgctcttgattctctagttcttttagttgtggtggtagtgtgttgagatctttctagctttttgatgtgggcatttagtgctataaacatccctcttaccaccacttta

SEQ ID NO: 878193 - DNA, 598 bp, Homo sapiens
cagtatttctcatctacttttgggagccataatcagaatgaaatttttctcagactgggatttcttttccctatccaactaggcaactcctctcttgcctggaagaatagagctattttcctagaaaatagtctctccatctaagaatagaacaatttasatggcaggtggtctgtttgatcccacagactgtaaatatgagatgcatcaattagagatcaactttttaccttatcaggtatgctgtccttgtcaaggttaatcaattttttcaggaaaccagtttctgaaagaagtaactttgccgttgcccagttaggtttcttttgcagaagaatacacactgcattcatgacagtcagtacaaggaagggaggccgtgtgtatactctgtaatagatgatgaaaatctcatcaacttcacaattaaaaatgaaatgcaccctgtaaatatctcagaagacaatatacacagatttttaacacacatttggataaggaaaactatttgtcaacatatagctatttaattacttaggtatcttttaaaaattgggtatcttaaatataaggatattatagttttaggaagatgaaa

SEQ ID NO: 878194 - DNA, 652 bp, Homo sapiens
tttgttgttgttgttgttaatctagattctaatatcctgactattttatgtgttgaaattttgtatatcaatttgtagcttctagtttcacttccttcttgttttcataagattccttaaatcttaatttttatatttgaacttatcagtcttttactgaatgttttttgtgttttgtgtgttgtgcaggataactttacttatgctagagctattaagagattatcctatagcttctaaaaagttctaaaatttttttctataaatgtaaatcttgaatccacttggaactgacttttttgttttggttttggtgttggtttttattttgagatggagtcttgctctgtcgcccaggctggagtgcagtggcacgatctcagctcactgcaacctccgcctcccgggttcaagcgattttcctgcctcagtctcctgagtagctgagattacagacgcacaccaccacacmcagctaatttttgtatgttggccaggctggtcttgaattcctgaccttgtgatctgcctatcttggcctcccaaaatgctgggattacagacgtgaaccaccgcaccagccggaactgacttttatgatgtaaagaagacatcaggtttttcccctaaaaaatcatttgtcccacgagta

SEQ ID NO: 878195 - DNA, 665 bp, Homo sapiens
atttgctgaggagtgttttacttccaattatgtggtcaattttagaataagtgcaatgtagtgctgagaagaatgtatattctgttgatttgcagtggggagttctgtagatgtctattaggttcgcttggtccagagcagagttcaagttctgaatatctttgttaattttgtgtctcattgatctgtccaatattgacagtggggtattaaatctcccattattattgtgtgggagtctaagtctttttgtaggtctctaagaacttgctttatgaatctgggtgctcctgtattgggtgcatatatatttaggacagttagctcttcttgttgcattgatccctttaccattatgtaatgcgcttctctgtcttttttgacctttgttggtttaggtctgttttatcagagactatgattgcaatccttgctttttttttctttccatttgcttggtaaatattctccatccctttattttgagcgcatgtatgtctttgcatggagatggatctcctgaatacagyacacagatgggtggtcttgactctttatccagtttgccaacctgtgtcttttaattgaggcatttagcccatttacatttaaggataatattgttatgtgtgaatttgatcctatcgttaggatgctagctggtt

SEQ ID NO: 878196 - DNA, 588 bp, Homo sapiens
tctctggctgcccttaacactttttttttttcattttaaccttggtgaatctgacagttatgtgtcttggggttctcttctcaggagtatctttgtagtgttctctgtatttcctgaatttgaatgttggcctgtctttgtaggctggggaagttctcctggataatatcctgaagagtgttttccaacttggttccattctccccatcactttcaggtacaccaatcaaatgtaggtttggttttttcacatagtcccatatttcttgaaggctttgtttgttccttttcattcttttttctctaatcttgtcttcacactttatttcattaagttgatcttcagtctctgatatcctttcttctgcttgatcractcgactattgatacttgtatatgcttcacaaagttctcatgctgtgtttttcagctccatcaggtcatttatgtcctctaaactggttattctagttagcaattcctctaaccttttttcaaggttcttagcttccttgcattgggttagaacatgctcctttagcttggaggagtttgttattacccaccttctgaagcctacttctgtc

SEQ ID NO: 878197 - DNA, 487 bp, Homo sapiens
catttatggttacatgtcaccaagttcaggtaactaatttactcattggaaaaggcactgaaaatacctttaaaatattaaaaatagcataatgtagcacaatttgaaggcaaagtacatattgaaatgatatttcaaaaaattacactcttaaaaatatatttttggatgtttatgtaaartgatggtgataacttgatgttttctacctctgtggaatgcatatgaaacctaagatagtggatattacaaatgtagtataagaaaactcaacacatgcttattctagatttcagattattgatgatcttcactgcaaactctaaagcctcctctgtttgggcaataagagagcaggtgtatgtgatatgagtctccttcctagataatacattgctgcagcttgcatgtgtagaaattgagctaagtgtcattctgcccagtgctgagataacagatagggtggtagcagtcatactggcatctg

SEQ ID NO: 878198 - DNA, 637 bp, Homo sapiens
ttttagactcagtttgcatttggaatcctaagggaacctagaagtgaatgtgtccaaatatattactagaaaaagaaacacagttcgaaagtttatgtgcctgttatggtgtaccaagaatggtacattattatgaattgttatgaaacatttatcaaatgtaaattctgcataaacacagctggccacagaacattgtcagtaaamagaacaaggataacagtaatatccaattaaggatatgctatatcagcatagaaaccaataaattttgtcttagggttgcatttaggacagtgaacaaaattcacttggacacttaaaatgcaggcaagaatacacagaatgagtgacctcattgtgaatagtcagcattatgagagctatcaaaatctatgggaatctatacattatcaaacaaaacttaaatgtctcccatgaaatgtttccacataagcaaaactatcaaaattatcaaatggaaattataaaacatctactgagttagaaaatgtttcaagtttccacagaagatgtaaaagtgggatacaagtttaccacatcatatatgattacatccaattaaaacactgtatccactcaaattcctagtcaaaggagttatatgccttgtcaa

SEQ ID NO: 878199 - DNA, 651 bp, Homo sapiens
ttggattaatgtatcattggaactgtttttcttttttttttttttcattttttcttatatctttcccccaatcttttttctgcctttcctggtttttaaattaacatattttttcttttcctttctttttttcttttttgagacagagtctcrccctgttgcccaggctggagtgcagtggtatgatctcagctcactgcaacctccgcctcccgggttcaagcgattctcctggctcagcttcccaagtaactgggattataggtgcccaccatcacaccgggctaatttttgtatttttagtaaagatagggtttcgccctattggacaggctggtctcgatctcctgacctcaggtgatccattgcctcggcctcccaaagtgcttagattacaggcgtgagcaactgcacctggacaaattaacattttatgtgattcctttatatctcatctcagcatattatttatattttattcaaaaaattgtttgtaattgcccaagagtttacaatatacatttctagaaaatttaagtctatcttcaaatatcactctgtggttccacaggtaatgcaggtagcttgtaacagagtattttcaattcttcctttctgatcctgtgatattgctgccatttatttatccta

SEQ ID NO: 878200 - DNA, 617 bp, Homo sapiens
ttcgcccactccactgtaagtgactctgcagaaccagggggaggggtcttcccaccgtggtagtgggcctggaggtccagcgggggctcctgtctgctgagcagcacatcacacaggcagatgggatgcagagataaggtacagactaggtcaaatcataggaaataaccagtatttaactctttctcaactatacaaatgccatcttcctgtggtttgatctcataaaggataaaaagggcaggggccagtaatgtcactgcacaaagcagtagcatctatyttgttcagggtgaggacagtttgggcttcaaaggccagagataaagcattcctgccttttttttttttttcctcttaaggtgcatgtcatttgagagtgatattttctaaaactagtagtatttttattgccaacagaggtcaggttttttccttctctcatttctgttaggtttcaatgcccttgatacaacattcattattattgtctaaatactttaccatagcttttggggctccaagctcatgttccaggtggcaggaaagagcagagaggccaagaaccacccctgagttcttagccttcagtgattcaggaggtcaccaggagcctg

SEQ ID NO: 878201 - DNA, 578 bp, Homo sapiens
ttttttaaactgctgttgctttaaagtttgttttgtctgatataagaatagctactccagctcacttttggtgtccatttgcatggaatatctttttccacccctttaccttaagtttatgtgaatccttctgtgtcaggtgagtctcttgaaaacagcagatacttggttggtgaattcttatccattctgccattctgtaacttttaagtggagcatttaggctatttacattcaatgttartattgagatgtgagttactattctattcactgtgctatttatttcctgaatatcttgtggggttttttttttcatagtattgttgttttataggtcctgtgatatttatgctttaaggagattctattttggtgtattttgaggatttgtttcaagacttagagctccttttagcagttcttgtagttctggcttagtagtggtaaattctctcagcatttgtttgtctgaaaaagactatcttttcttcatttctgaagcttaatttcactgaatacaaaattcttggctgataattgttttgtttaaggagtctaaagataggaccccaata

SEQ ID NO: 878202 - DNA, 470 bp, Homo sapiens
catcagtttttaaaagttctcaactattacgtcttcttgtttctgttttactttttcttctctccttctgagacttcagtgatatgtttagactatctcattgtgctctccatgtttcttaccctctatgaactattttcttgccttttgtctctcctgyctcattcttaatatttttctctaagctatactcaacttactagttctctcttcagctgtgtctagtcaactagtaaactcaaccactaaaatatttattttagttattgtattttgacttccagaatccccatttggtttctttttagagcttccagatatctgccaacattctcaaccttttctattactctcttgggcatgataatcatagttattttaaaagtttaccagataacttcaatatctggaccccctgtgaaattatgcctgtttataagttgtttctgcaattgcagaaagactaaagg

SEQ ID NO: 878203 - DNA, 535 bp, Homo sapiens
tctagacaaccctgggcaaagtaaggagaccctgtctctacaaaaaatgttttaaagtagccaggtgtgatggtgtgtacctgtgatcccagctactcaggaggctgaggtcagaggatcccttgagtctggtaggttgagactgcagtgagccatgataatgccactacactccagtctgggtgacacagagcaagactctgtctcaaaaaacataaataaataaatatcccattgtctgcatataccacagtttgttcatccattaatctactgacatcttagttgcttccaaattttggcaattatgaataaagctgttatgggcatccatgtgcagctttttatgtgaacayaagttttcaatttatatagataaataccaaggaacacaattgctggatcatatggtgagagtgtgtttagttttgtaagaaactgctaaactatttttcaaagcagctgtaccattttggattctcaccagcaatgaatgagcgttcctgttgctctacatccttgtcagtgtttggca

SEQ ID NO: 878204 - DNA, 619 bp, Homo sapiens
gtcttttattatttgtttatctgttgtatgctttttgaggcttgcaaataatatgttattaactcattattttaaactgatgacatcctaacactgattgcgtaagcaagcaaactaacaagtgtaaactaacaatactttaacttcatcccctgactttttatttttatatgtatttatttatttatttagtttgtttatttatttttgagatgaagtcttgctctgttgcccaggttgctgtgaagtggcacaatgtgggctcccaggtccgagtgattctgctacctcaccctctcaagtagctgggattatagccatgtgccaccacacccagctaatttttttttttttttgtattcttagtagagatgaggtttcattattttgatcaggcttgtctcaaactcctggcctcrggtgatctagggattataggcttgagccacgatgcctgtctaatccccccaccttttaacttttcactattctatttatatcttattgtcctgtctatatcttggcaacataaagtagttattttttatcggttcatcttttagtctttctaataaagttgtaagtagtttatatatcactattactgtgttataatatt

SEQ ID NO: 878205 - DNA, 619 bp, Homo sapiens
gtcttttattatttgtttatctgttgtatgctttttgaggcttgcaaataatatgttattaactcattattttaaactgatgacatcctaacactgattgcgtaagcaagcaaactaacaagtgtaaactaacaatactttaacttcatcccctgactttttatttttatatgtatttatttatttatttagtttgtttatttatttttgagatgaagtcttgctctgttgcccaggttgctgtgaagtggcacaatgtgggctcccaggtccgagtgattctgctacctcaccctctcaagtagctgggattatagccatgtgccaccacacccagctaatttttttttttttttgtattcttagtagagatgaggtttcattattttgatcaggcttgtctcaaactcctggcctcaggtgatctarggattataggcttgagccacgatgcctgtctaatccccccaccttttaacttttcactattctatttatatcttattgtcctgtctatatcttggcaacataaagtagttattttttatcggttcatcttttagtctttctaataaagttgtaagtagtttatatatcactattactgtgttataatatt

SEQ ID NO: 878206 - DNA, 615 bp, Homo sapiens
agttaggcaaactaaaagactaacagcaatatcttatagtaaaatagaatattaataattatgaaaatataccagcatcactattcttgcactttgaagtcagattaagtaaaaaaaaaagtgttacttgaacacaggcaataagatattgcaacagtggatttgataactggtaagactactaagtgactaacggcaaaagggacaattcatgtcccaagcagaatggagtgaaacagcacaagatttcatcatgctactcagaatggagtgcattttaaaacttatgaattgtttatttggaattttccacttaatatatttagactgcagttgactatgggtaactgamatcatgaaaaagaggggatgactgaataatgctgaaaacctaatgaccacatacatttctcaggcaatccacgatgccaggattttcctgaagagcgttagaaaactttaacagaatattcactcagagatgaatacttcaattaattaaaagacactgtattcacatcattttatatctgacttttatcaaaacattttatgttgtatggtttctatgttattttggtattacaggccatggaagtccttccctcaaatata

SEQ ID NO: 878207 - DNA, 615 bp, Homo sapiens
agttaggcaaactaaaagactaacagcaatatcttatagtaaaatagaatattaataattatgaaaatataccagcatcactattcttgcactttgaagtcagattaagtaaaaaaaaaagtgttacttgaacacaggcaataagatattgcaacagtggatttgataactggtaagactactaagtgactaacggcaaaagggacaattcatgtcccaagcagaatggagtgaaacagcacaagatttcatcatgctactcagaatggagtgcattttaaaacttatgaattgtttatttggaattttccacttaatatatttagactgcagttgactatgggtaactgaaatcatgaaaaagaggggatgactgaataatgcygaaaacctaatgaccacatacatttctcaggcaatccacgatgccaggattttcctgaagagcgttagaaaactttaacagaatattcactcagagatgaatacttcaattaattaaaagacactgtattcacatcattttatatctgacttttatcaaaacattttatgttgtatggtttctatgttattttggtattacaggccatggaagtccttccctcaaatata

SEQ ID NO: 878208 - DNA, 615 bp, Homo sapiens
agttaggcaaactaaaagactaacagcaatatcttatagtaaaatagaatattaataattatgaaaatataccagcatcactattcttgcactttgaagtcagattaagtaaaaaaaaaagtgttacttgaacacaggcaataagatattgcaacagtggatttgataactggtaagactactaagtgactaacggcaaaagggacaattcatgtcccaagcagaatggagtgaaacagcacaagatttcatcatgctactcagaatggagtgcattttaaaacttatgaattgtttatttggaattttccacttaatatatttagactgcagttgactatgggtaactgaaatcatgaaaaagaggggatgactgaataatgctgaaaacctaatgaccacatacatttctcaggcaatccacgatgccaggattttcytgaagagcgttagaaaactttaacagaatattcactcagagatgaatacttcaattaattaaaagacactgtattcacatcattttatatctgacttttatcaaaacattttatgttgtatggtttctatgttattttggtattacaggccatggaagtccttccctcaaatata

SEQ ID NO: 878209 - DNA, 615 bp, Homo sapiens
agttaggcaaactaaaagactaacagcaatatcttatagtaaaatagaatattaataattatgaaaatataccagcatcactattcttgcactttgaagtcagattaagtaaaaaaaaaagtgttacttgaacacaggcaataagatattgcaacagtggatttgataactggtaagactactaagtgactaacggcaaaagggacaattcatgtcccaagcagaatggagtgaaacagcacaagatttcatcatgctactcagaatggagtgcattttaaaacttatgaattgtttatttggaattttccacttaatatatttagactgcagttgactatgggtaactgaaatcatgaaaaagaggggatgactgaataatgctgaaaacctaatgaccacatacatttctcaggcaatccacgatgccaggattttcctgaagagygttagaaaactttaacagaatattcactcagagatgaatacttcaattaattaaaagacactgtattcacatcattttatatctgacttttatcaaaacattttatgttgtatggtttctatgttattttggtattacaggccatggaagtccttccctcaaatata

SEQ ID NO: 878210 - DNA, 678 bp, Homo sapiens
atgtttttgcagtggttggtactggtttttcctttccatatttagtgcttccttcaggagctcttgcaaggcaggcctgatggtgacaaaataccttggcatttccttgaaggactttatttctccttcatttatgcagcttagtttggctggatattaaattctaggttgaaaattcttttctttaagaatgttgagaattgccccccactcttttctggcttgtagtgtttctgctgagagatctgctgttagtctgatgggctaccctttgtaggtgacctgacctttcttcctggctgctcttaattttttccttcayttccaccttggagaatctgacgattatgtgtcttggagctgatcttcttatggagtgtcttagtggtgttctctgaatttcctgaatttgaatgtcagcctgtctggctaggttggggacgttctcctggataatatcctgaagtgtgttttccaacttggttccattctaccccccactttcaggtacaccaatcaatcatagctttggtcttttcacatagtcccatatttcttggaggttttgttcgtttattttcattctttgttttgttttgttttctaatcttgtctgcatgccttatttcggcaaggtagtcatcaatctctgatatcctttctcctgtttgattggtt

SEQ ID NO: 878211 - DNA, 630 bp, Homo sapiens
gaagtcatgctccagtgatataaataaacatgttaaattaacagatattatgaatacatgtcttgattttgtaaaaagctctgcataatgactcaaaggcataatgcttgcaaacagctggaaagcaaggttgtcttgccctttctgaaatactctggggaataagagattttgcaatgaaagaagaacacatatatttaataaatttcttttttaattggtgtggaattgcaggataggcaggcaaaaggttgagaaaacacatggaaaaactgattatacatatcagccaattatgacctcaattaacatactcagaagggcccgttttttcttgtcccagagatcaaataaggaacatcttgggggyaaagtcattaaaagactttagcaagcagtttttaattatacatcatttgtacatctgtgaataattacctggtagttgctacctggtgacagtgattgacagaaaggtaccaatgattccaggctaaagatacatctttaatatgagcaaaggatacaataacttcgcagcatgaagacagtgacagcaaggagctctccagcactcacagttgaaaggcaaagttgcctggcctcccagtatttgaggtgccagttgcc

SEQ ID NO: 878212 - DNA, 624 bp, Homo sapiens
gaggaaaaaataaaaacaaaaaagaacaaaaacaaagcttgcctccacctggctttgagccagggaagaagaagaaagaagcttttgttattgatgctatttataaccctgaattactccgttagaataatggggcctgagcaggggaagrtcttttgtttgcttagtacaaatgcgtcttccccctcagtaaaaccttacttaggatcatactaaacagtcactgcaggtaccaggtgtggagctaaaagcgaggaaaggaccaagatatttgtaaagaagaaatggagaggaactgagttccaggcagaagatttggaagcggaaaccatcctccgaggagatggagagccagtggaggatgggttactttctatctgaagcctgtggagattgagaagaaaataagtgtttcaaggggttttgtcaagtgaaacatatgggggtggtggtggtgaatgtgaagtcgtcccacctacaatacctttgataaaatattgttcattgatatggtttggctgtgtccccactcaaatctcatcttgaattgtagctcccataattctcacatgttgtgggagggacctggtgggagataattgcatcatgggggtcgtttccccc

SEQ ID NO: 878213 - DNA, 564 bp, Homo sapiens
  misc_feature 116: n = A,T,C or G
tctcagtcacatcttagctcagatgtcacctcttcaggaggcctttactgactgctgtctccaaagagcatcctccactcaccgttatctcattatatggctttatttttagcatntagagcatttatcactacttggcattacataataatgtatgtccatttacatgcttaacttctaactccccatagtgggttgaattgtgccccttccccacygaaagatatgtcactctcttaagcctgagaaaacctgtgaaggtgatttggaaaaatgaactttttaggtataattaaggtaaggatttcaggacaaaatcattttggggtaagtcctaaatctagtgaccagtgtctccattaaagaagggaaaggtggagaacagacactctcttgatttatgctaacaatgggggtaataataacaatagctaatatttacacacaaagaactttgtttcattttatcctttaactatgctaacaaccacataagatgatgaattatcatgaccccatttacaaccgactaaattaaaactcagaataatcctggtgacatct

SEQ ID NO: 878214 - DNA, 662 bp, Homo sapiens
aattagttttccgaatgtaattgctttgtggtgctttattacttaggaatgaacaatattttaggttactatttgccatgttttcaggcatcttatgaggaagtgtgtagcatttgatagacaagcatttcactctaaggtatttttagttgtgtggttgtagcaggtgtaaaaaaagagacagactcacatttgctcttctacctgccaggctctttgcctgcccaactccccacccttttaggkgtttctgagtggcaaaaactatatgaattacaaccctggctgcaatcagtggaaaagctcagatactatttttcctagcttgcatacatattttatgtcttttgccagatgaaaagattggcaatacagtaaaagaagcaccacagtggttcactatttctattttcctggttttcctgatgaaccaccttctggcaatttcaggactctcaaggctgctgctctcaaaggcggatttgccatgggggtgggtccccctcctccagcgctttcctcttgccttcactacatgagctgctactcagggccctcacttggccacaacagcctgaattggaggttataaattcaaaaaagcaagaaaaactttccactttctctgcatctttaggataaaaacaccataacagagcaat

SEQ ID NO: 878215 - DNA, 678 bp, Homo sapiens
atggcaggcttcttccattagacaccactgcactgggaccaaagactgtgacctgtttattctcatgtctccagcaccagcacaggacctgactagtacatagtacatgcttcatgttgagtgaatcgatgaaggaatggggacatacatttaattataatcccagataggagctatccagagaaaccttcacagggagccatgtgggcacatggtgggggtcaatgcttacttggtcaacaaaagatcagtgagtatgtaaggagggaacacattctaagtagaagatccatgtgtgagggcaaagactgtgagtcagagatgttcaaagaatggctgacagaatggccacagaagccctgtaggaaaaaaatcaccccagccccactgggatcccagcaccccagacaccaccaggcataagtcctccttcccaagcgaacagataggatttcaacagatagtgtcttctatctctaagcaagttatttcataatctgtttcctttctcagagataacctgcttatctaytaaaaagagaaacatatgctgtctatagttgctctgcataaaagtccttcttaatttacaaattatgctctttctcatgttttttaaaaatagaaataaccaaaacagttttgaaaaaaatgttggagagcttataatacttgatt

SEQ ID NO: 878216 - DNA, 664 bp, Homo sapiens
cctagaagtcttaagataaaactgaatattaaagtaaaggtcttcagtgtctattaatcctaaaaacttttgtttctttatccagtttgcttcaaggctatagcatagattgctgatgcaagagttcaacagagaatagccagaattattttagaatagaaggctaatataacagctagacattttctgatggaattttcctttagtgcaagtgttcaaactcatccaagataattgtttatatgatagaagtttcatgcataatactgtttgcagctttgtagttagtttagtattcagtacacaaattaaggttaatagcctaactacacaccaagtataactgtttgaaattcttgataagtagaatttcattataagaaaaaacaggtcttgctaacttctaatcaagagggtaacattgcctttggtctaaatgccttaaaaacaaaatatatttgctgctttaagttgtgagttttataggtaatcacatattataaaaagtttttyatttcctacctggctgctagaccaccatttacaggtatagccaagaaaacagggtatagaccaccaataacaagaccagtcagtccactccgtgttatggtacaggtttcacaatccaaatcacctaggaaataaattagtcatagaaatg

SEQ ID NO: 878217 - DNA, 593 bp, Homo sapiens
tttagctgctacttataaatgataacaggcagtatttggttttctgttcctgccttagttcgcttaggataatggcctccagctctatctttgctgttgcaaaggacatgatctcattctttttatggctgcataatattccatagtgtatacataccacattttctttatccagtttaccattgacaggcatttaggttggttccatgtctttgctattgtgaatggtgctgctgtgatcatatgtgtgcatatgtctttatggtagaacaatttatattcctttgggtatatactcaataatggatttctgggttgaacartagttctgctttaagttctttgagaaattatcagactgctttcagcaatggcttaactaattaacattcccactagcagcgtgtaagtgttcccttttcaccacaacctcaccagcatgttattttttgactttttagtaatagccattctgactcgtgtgaaatgatatctcattgtgatttagatttgcatttctctaataattaatgatgttgagcatttttttcttatgcttgttggctgcatgcatgtctcttttgaaaagtatc

SEQ ID NO: 878218 - DNA, 618 bp, Homo sapiens
atatttaggagagttaagtcttcttattgaattgaacattttaccattatataatgcccttctttgcctttatttatcattgtcggattaaagtctgttttgtctgaagttagaatagcaacccatgcttttgttttgttttgtttttcatttacttggtagatttttctccatccctttactttgagccaatgagagtcattgcatgtgagatgggtcacttgaagacagcatacagttgggtcttgcttctgtgtgcaacctgtcgcttggtgcctcttcattgtggcatttagcctgtttacattcaaggttaatattaatatgtgtggatttgatcctgtcaccatgttgttcgctggttattattattattattattattattattaytattttttgtttttgagatggactcttgctctgttgcccaggctggagtgcagtggcataatctcggcttactgcagcctccacctcccaggttccagcaattctgcctcagcctcctgggtagctgagattacaggcatgtgccacttgcctagctaattttttatttttagtagagaccatgttggccaggctggtctcaaactcctgacctcagatgatctg

SEQ ID NO: 878219 - DNA, 618 bp, Homo sapiens
atatttaggagagttaagtcttcttattgaattgaacattttaccattatataatgcccttctttgcctttatttatcattgtcggattaaagtctgttttgtctgaagttagaatagcaacccatgcttttgttttgttttgtttttcatttacttggtagatttttctccatccctttactttgagccaatgagagtcattgcatgtgagatgggtcacttgaagacagcatacagttgggtcttgcttctgtgtgcaacctgtcgcttggtgcctcttcattgtggcatttagcctgtttacattcaaggttaatattaatatgtgtggatttgatcctgtcaccatgttgttcgctggttattattattattattattattattattattwttttttgtttttgagatggactcttgctctgttgcccaggctggagtgcagtggcataatctcggcttactgcagcctccacctcccaggttccagcaattctgcctcagcctcctgggtagctgagattacaggcatgtgccacttgcctagctaattttttatttttagtagagaccatgttggccaggctggtctcaaactcctgacctcagatgatctg

SEQ ID NO: 878220 - DNA, 586 bp, Homo sapiens
aggcctagaacatgggcacatggcttcttagctaacttaggtacatgtctcctgggggtggcctgggacatgagaacacagctgctcagtcagtttgaggtcaagctgcattaatctgttttgtgttgctgtgaaggaatacttgagactgggtaatttataatgaaaagaggtttatttggctcacagctcttctcttttttttttttttttttttttttaattatactttaagttttagggtacatgtgcacattgtgcaggttagttacatatgtatacatgtgccatgctggtgcrctgcacccactaatgtgtcatctagcattaggtatatctcccaaagctatccctcccccctcccccgaccccaccacagtccccagagtgtgatattccccttcctgtgtccatgtgatctcattgttcaattcccacctatgagtgagaatatgcggtgtttggttttttgttcttgcgatagtttactgagaatgatggtttccaatttcatccatgtccctacaaaggacatgaactcatcatcttttatggctgcatagtattccatggtgtatatgtgcca

SEQ ID NO: 878221 - DNA, 623 bp, Homo sapiens
ttaatttcttttcttgtgctaaacccatttataaaccaacgaagttttatgcctattttatttcatgggccacagatatctatactttcaaagtgcacatgaacttgaaagattccactggacatggatcctaaggacttgctttaaatagttatagattctaatttggtaaacacaaaaacataagcaatcaaattggtggttttctgactgttgagtgcatttccttagagactgtcattcaggacagattttgtctttatcatgataccaaatatcatttgtatttaaaaaacactgkgtatcctaaaccaaggtcagttaatctccaaaatctttctttcccccaatcattgtgaatgagcatcttcccaatattcaagagaggtgacccttgtgactcgtttccatctactaaagatgtatctcaactttgcagatttttttttttggctgtacagtggaacttggattacactttaaattaactttctctaggaatcaaaggtaatcattatttctctctatgatctaaatgactattctcatgttttttttcaagttgaagattagttttcaattccctttatatctctgccctttttcatagtaacctctgagga

SEQ ID NO: 878222 - DNA, 546 bp, Homo sapiens
tcagagagtagttcaaggattagtaccaaaaaaaattatttgaataatgcatgttaacagcataataattgtaaaactgcaacagaaagaaaggtataaaacagaatttgctcctgggatgctctcaattggaagagccacggatgctttctttttttttttttttttttttttttttttaaagcaatgggtagagtttgccttgaracatccacccactcattgcctgggaagtggaaacacacatttagttaagtagctgatgggaacaaaaacaagggcattcctaagagccatccgcagagtctcttctttactgaaagtaagcagagagagccacttgcatcaggccttgtgatgcaaaattgaaaggcaaaaccaatctcagctaagcatgcatttctgtttttgtttttgagtttttaaaatcccatttcaatgaatatgtattgccaaggttatctagtgaaagaaactgggatggagaacaaaacactctacagagctgtgccatccagaaggcttggaattaacctgaaggcttta

SEQ ID NO: 878223 - DNA, 546 bp, Homo sapiens
tcagagagtagttcaaggattagtaccaaaaaaaattatttgaataatgcatgttaacagcataataattgtaaaactgcaacagaaagaaaggtataaaacagaatttgctcctgggatgctctcaattggaagagccacggatgctttctttttttttttttttttttttttttttttaaagcaatgggtagagtttgccttgagacatccacccactcattgcctgggaagtggaaacacacatttagttaagtagctgatgggaacaaaaacaagggcattcctaaragccatccgcagagtctcttctttactgaaagtaagcagagagagccacttgcatcaggccttgtgatgcaaaattgaaaggcaaaaccaatctcagctaagcatgcatttctgtttttgtttttgagtttttaaaatcccatttcaatgaatatgtattgccaaggttatctagtgaaagaaactgggatggagaacaaaacactctacagagctgtgccatccagaaggcttggaattaacctgaaggcttta

SEQ ID NO: 878224 - DNA, 553 bp, Homo sapiens
ctcatcttaaaacagggaaaataatagccagctcagagagtagttcaaggattagtaccaaaaaaaattatttgaataatgcatgttaacagcataataattgtaaaactgcaacagaaagaaaggtataaaacagaatttgctcctgggatgctctcaattggaagagccacggatgctttctttttttttttttttttttttttttttttaaagcaatgggtagagtttgccttgagacatccacccactcattgcctgggaagtggaaacacacatttagttaagtagctgatgggaacaaaaacaagggcattcctaagagccatccgcagagtctyttctttactgaaagtaagcagagagagccacttgcatcaggccttgtgatgcaaaattgaaaggcaaaaccaatctcagctaagcatgcatttctgtttttgtttttgagtttttaaaatcccatttcaatgaatatgtattgccaaggttatctagtgaaagaaactgggatggagaacaaaacactctacagagctgtgccatccagaag

SEQ ID NO: 878225 - DNA, 590 bp, Homo sapiens
cgacttcaaactacagtaaccaaacagcatggtactggtacaaaaacaaacacatagaccaatggaacagaagagataacacagaaataaggccacacacctacagctatctgatcttcgacaaagctgtcaaaaacaagcaatggaagaaggattctcatttcaataaatggtgctgggataactgcctagccacatgcggaagatcgaaactgaccctttccttataccacatacaaaaattaactcaagatggattaaatacttaaatataaaacccaaaagtataaaaaccctggaatacaaccaaggcaataccattctggacataggaatgggcgaagatttcatgataaaarcaccaaaagcaattgcaacgaaagcaaaaattgacaaataggatctacttaaactaaagaacttctgcacagcaaaggaaactcttgacagagtgaacagataacttatatattgggagaaaatatttgcaaactgtgcatctgactaaagtttaatatccagcatcgataagaaacttaatgaaatttaccagaaaaaaataagcaaccccattgaaaagtgagcaaatg

SEQ ID NO: 878226 - DNA, 555 bp, Homo sapiens
aaaccacagtaagataccatttcacaccagtaggaatggctattaataaaaagtcaaaaaagtaacagatgctggtaaggttgcagagaaaaaggaatgcttatacactgttggtgggattgtaaattagttcaaccattgtggaagacagtgtgatgattcctcaaaaacctaaaaacagaaataccattcaacctagcaatccccttactggatacatacccaaaagaatctaactcattctattgtaaagacacatgcacacttatgttcattgcagcactattcacaatagcaaagacatggaatcaacttaaatgcccatcaaggtacactggataaagaaaatgtggtatatatacaccatggaatactatrtagccataaaaaaaggacatcatgtcctttgcagaaatatggatggagctggaggcattacccttagcaaattaatacagaaaaagaaccaaatactgcatgttctcacttataagtgggagctaaatgatgagaacacgtggacacatggagtggaacaacacacactggcaccta

SEQ ID NO: 878227 - DNA, 589 bp, Homo sapiens
cctctgaattttttcctccttcccttgtttcttccttataaacactgctgggtacttaacttttaaaaacatgggctttgaggaaggacatagctgggtaccaatcccatctctgctctttaagaagttgggttacctctgacaagttacaaaccttgcttagcatctatctctttacctttatattagccacaatacccactccatagagtgggttttatatattactatttgtacagacttgcaagaatgcaaagtgcgtagaaagtgctcrataaacagtaactagtggtgactggggtaggggtagtgccaatagttgctttaagaacagttgaactagcagcaatggccaatgccattggcaaccaaattgtgctcataactctatggaccagatcttaagactccaacactgggaaatttgctgtcattctttgatccctgggcttaaatgtctacttcttaatgctatgagctaaatattcaatgttaaaatggacagggggtcatgctccatctcatttatcataagtgaataactgggttattttgaccatagatcaaactccaaaaatttaagcaaaga

SEQ ID NO: 878228 - DNA, 653 bp, Homo sapiens
cccgcctaattttttgtatttttagtagagatagggtttcaccgtgttgaccaggatggtctccatctcttgacctcatgatccgcccgcctcggcctcccaaagtgctgggattacaggtgtgagccactgcgcccagccactagcttgcttttgattttacaggctcataggcggaagggacttgccttgtctcagatgaaactctggactgtggactttcgagttaatgctgaaatgagttaagactttgggggactgttgggaaggcatgattggttttgaaatgtgaggatatgatatttgggaggggccaggggcagaacagtttggctgtgtcctcatccaaatctcaycttgaattatagctcccataatccccacatgtggtgagagggacccagtgggaagtaactgaatcatggggaggggatttttcccatgctgttctaatgatagtaagtctcatgagatctgatggttttataaagggcagttcccctgcacacgctctcttgcctgccaccatgtaagacatgcctttgctcctccttcaccttctgccatgattgtgaggcctccgtagccatttggaactgtgagaccattaaacctctttttctttataaattacccagttttgggtatttctt

SEQ ID NO: 878229 - DNA, 592 bp, Homo sapiens
gctaaagcccccaaaattcccagatgaataaattataagacaaacttcagcaattctacaggactggtgtcagcagtgaacaaactggttgtgaacatcaccggcacttggatccaggccttcatcgtcctggataaaactcctttttaccttcccaacatcctggcacattctttcttttataggatctcatttgtatgcacactcagtgttctcaggctgccctctggcccttttaaaatataatctcaatggcaaaatgtcacctagcacttcccttcatcacacatgtmcatttcaaatttatccctccctctaattctctttaaaatcagaatgccatctttaaagtaattcatgccttgttttgtgatattactatacctgctccatacatttatccatcattctattttaatgattctaaaatgcacattttttaaaaaattagtagtatttgaattaaatcttacatttaatgtgtttaattgatgtgactgtatcaattgtgtttttacactggtgttatggaattgagaaaatgtagtacttctttatgggcttttacctctaaaaacgtattttcctaaac

SEQ ID NO: 878230 - DNA, 570 bp, Homo sapiens
aaaagcacaaactataaaagaaaagatagataaatgtgatttcattaaaattaaatcttctgttcttagaaaacttctatgagaatgaaaaggcaagccacagactaaagaaaatatttgcaaaataatgttctatatttaataaaagacctgaatctagagtacataagaacattttaaattcagcaacatgaacataaaaaatgcaacttacaaatgagcagaaatatttgagcaggtaattcataatgtatatggatgataaatgacaagaaaagatagttagcagcagtagtcattaagaaaatgaaatttaaagcagatacttytaagtacacactagaaaggctgaaaaaaaaaaaagaaaaaatatgctaacaaacaaccagacaatgccaattgttggtaatgatgtggaacagctagatactcatacatttctggtggaaatgtgtaatgatgtagccactttgacaaacagtttgcaagtttttcataaagttacaaatacacttataacctaacccaagtatttgtccaaggaaaatgataagtacatataaatagtta

SEQ ID NO: 878231 - DNA, 661 bp, Homo sapiens
cattgttaaaatattagatatgtgtgactaaattataaagatctttgccaaccttgaagaattttagggtacaaaagaaaagagttaaacattatttcctcaataatatttgagtttaggcatacttgttttcggagtatgttctttaaaaggaaagaaaacatttgttcaattgtttctattaattattttcagtaattgtctttgaacactgtgtataattcagctctgtggtagacatggatacactatagaaaagaaaaccgtgcctttagggatttatagtcaagtgagggaaatcaatattaaaagtaatctctctctctgtctctgtttctctcttgcatatacacactcactctcaccggtgtcaatttcataaaaaatatgaagtgatgcrgagaaaatattgaaggggaccaattcagtgtggaattcagagaaggccactctggaaaattacttcatatgctaatatatgaggtgtgaatggaggtccgtcagtctatgatagagcttcatcactctagaacaactctcttctggagatgaaataggaggctcaataatgcagttatggaagggacataggcaagtgtcagttatcttggtagatttcttcaaataattattggtcataaaactccaaagacgatagatt

SEQ ID NO: 878232 - DNA, 636 bp, Homo sapiens
gtctctcatggatgggcatttgggttggttccaagtctttgctattgtgaatagtgctgcagtaaacatgcgtgtgcatgtgtctttatagtagaatgatttataatcctttgggtatatacccagtaatgggattgctgggtcaaatggtatttctagttctagatccttgaggaattgccacactgtcgtccacaatggttgaactaatatacactcccacccacagtgtaaaagcattcttatttctccacatcttctscagcatctgttgtttcctgactttttaaatgattgccattctgacttgtgtgaggtggtatctcactgtagttttgatttgcatctctctaatgagcagggatgatgagcttttttcgtatgtttactggcttcttttgaggagtgtccgttcatgtcctttgcccactttttgatggggttttttcttgtaaatttgtttaagttctttgtagattctagatattggccatttgtcagatggatagattgcaaaaattttctcccaatctgtaggtttcctgttcactctgatgatagtttcttttgctgtgcagaagttctttagtttattcagatcccatttgtctattttggcttttgttgccattgctt

SEQ ID NO: 878233 - DNA, 636 bp, Homo sapiens
gtctctcatggatgggcatttgggttggttccaagtctttgctattgtgaatagtgctgcagtaaacatgcgtgtgcatgtgtctttatagtagaatgatttataatcctttgggtatatacccagtaatgggattgctgggtcaaatggtatttctagttctagatccttgaggaattgccacactgtcgtccacaatggttgaactaatatacactcccacccacagtgtaaaagcattcttatttctccacatcttctgcagcatctgttgtttcctgactttttaaatgattgccattctgacttgtgtgaggtggtatctcactgtagttttgatttgcatctctctaatgagcagggatgatgagcttttttcgtatgtttactggcttcttttgaggagtgtccgttcatrtcctttgcccactttttgatggggttttttcttgtaaatttgtttaagttctttgtagattctagatattggccatttgtcagatggatagattgcaaaaattttctcccaatctgtaggtttcctgttcactctgatgatagtttcttttgctgtgcagaagttctttagtttattcagatcccatttgtctattttggcttttgttgccattgctt

SEQ ID NO: 878234 - DNA, 603 bp, Homo sapiens
cagcagaggagatcaaagttttgcctgagctataggaggaaaactagtgtggtatcacagacactgaaagtcaaaaaaggaacatgtgtcaagtactcgaatggtcactgcatggagtgttcctgagaggtgtgtaatgtgaacagataagtgaccacagaatctgccatatgaattcagcacattcctyttatattcagagttgtaaaatgtaatataatcactgtacaaaacatatggaagataaagagaaattttttggtacctgtgacaagaagaattttcagctcagtggaactatggagacagagccagattgagtgggtgaataatgaatgggaattcctgggtagaaatggcatattaaataaacaactatttgtttcctcctgaaactccactgagaagacaataagggaatttgttttttaaatgaataaagcaacaaggacagaagaacaagagcaagaaaattttaggattgcaaagatggagaaatgtggttctggaactagtactgacagcatcccagaaagctgaattaaaatctgcattccacaatatattcctctactttgcaagcacattaaagtttgagaagtg

SEQ ID NO: 878235 - DNA, 545 bp, Homo sapiens
acaaaatatacaaagaaatcttaaaaataaacaataagaaaaaaaaccaactttaaacagacaaaagatctgggctgggggcagtggctcacttctgtaatcccagcactttgggaggctgaggggggcagatcacgaggtcaggagattcagaccatattggccaacatggtgaaatcacgtctctcctaaaaattcaaaaattatctgggtgtggtggcatgcacctgtaatcccagctacttgagaggctgagggctgggaggcagagattgcagtgagccgagatcttgccaactgcactgcagcctggtgacagagtgagactctatcaaaaaaaaaaaaaaatctgaacaaaaaccttgccaaagaaattayataaatctctagcaagcatatgagaagatgctcaaggccatgtgtcattagggaattgcaaaccaaaacaacaatgaaataccacagtgaacctattggaatggtcaaaatccaaaacactgacaacctgaactgctggtgatgatgtgtaacgacaggagctctgt

SEQ ID NO: 878236 - DNA, 631 bp, Homo sapiens
tgcttcctagggaaccatctggtgctattagattgtttaggtctcaaggtgtgtgtgtacagtcagctccgattgaaggggaattgcatagattctccagatggtgggttgcatgacttattctttaatgtgctaaaccccagttatcaacattagcccccaaagcacagggaagaagagaacatggtctttcattgagttctgcctttctccactgggatggccaaagtgagagtttgacacattgccttcctcgtctagaaaactggcatgcttttctttgtttaccctgggcttggcctgctcagccggtctgggcttyctgggcaaacacaactcagggtgagtccctcatccctaaccttctgaatctggcagagtcacaaaccatgcccgccaccctgctcatgcctcaatcttctcagcccctccttgtgttgaacccttagtgctgccacttgcttgttcttgttccctgaccagatcatatgtccctgccacccagtcctctcctcacccgtctcctcttcaccttcatttggtccaccgtctataagcaggccaggttgtagcctccagagttcagaactgaggcctgggcatcagaagtctgctgttgtaggaaatctga

SEQ ID NO: 878237 - DNA, 496 bp, Homo sapiens
acattgatggatcttgactctttatccaatttgccagtctgtatcttttaattggggcatttagcccatttacatttaaggttaatattgttatgtgtgaatttgatcctgtcattatgatgttggctggttattttgcttgttagttgatgcagtttcttcctagcataaatggtctttatgatttggcatgtttttgccgtggctggtaccagttrttcctttccatgtttactgcttcctttgggatctcttgtaaggcaggcctggtggtgacaaaatctctcagcatttgcttgtctttaaagtattttatttctccttcacttatgaagcttaggttggctggatatgaaattctgggttgaaaattcttttctttaagaatgttgaatattggccaccactcacttctggcttgtagagtttctgccgagcgagccactgttagtctcatgggcttccctttgtgggtaacccaacctttctctctggc

SEQ ID NO: 878238 - DNA, 496 bp, Homo sapiens
acattgatggatcttgactctttatccaatttgccagtctgtatcttttaattggggcatttagcccatttacatttaaggttaatattgttatgtgtgaatttgatcctgtcattatgatgttggctggttattttgcttgttagttgatgcagtttcttcctagcataaatggtctttatgatttggcatgtttttgccgtggctggtaccagttgttcctttccatgtttactgcttcctttgggatctcttgtaaggcaggcctggtggtgacaaaatctctcagcatttgcttgyctttaaagtattttatttctccttcacttatgaagcttaggttggctggatatgaaattctgggttgaaaattcttttctttaagaatgttgaatattggccaccactcacttctggcttgtagagtttctgccgagcgagccactgttagtctcatgggcttccctttgtgggtaacccaacctttctctctggc

SEQ ID NO: 878239 - DNA, 545 bp, Homo sapiens
ggtggggtacagataaaattagattggccacgtctttgtaattgctgaagatgaatacataggagtttactataacttttcttctactgttgaatattttaaatattttttatactaaaaagttcagaggggaaaaaacttcaccaaaaaacggggtccagtcaggcgcagtggttcatgcctgtgatcccagcgctttgggaggccgaggctggtggatcacgaggtcaggagtttgagaccagcctggccagcatggggaaaccccgtctctactaaaaatacaaaaaaaaaaaaaaaaaaaaattagccaggcatgstggcacgcgcctgtaatcccagctacttgggaggctgaggcaagataattgcttgaacctggcaggcggagcttgcagtgagctgagatcacgccactgcactctagcctgggcaacagagcgagactccgtctcaaaaaagaaaaaaaaagaactgggtcctctgaatgctaaaaactcataattcaaaatgttagtggagaccaaaggcccggcagagaggga

SEQ ID NO: 878240 - DNA, 635 bp, Homo sapiens
aaagtaattattgatagttaaggattaatattgccattttgttgactgttttctgactgtttgtagtccctttgttccttatgctgtcttgcattgtgatttgacaattttgtttggtagtgataatggtttgatttctttcactttatgtatctgctacaggtttctttttctttgtgatcaccatgaggcttacataaaacatcatataacagcctgttttaagctgacaacaacttaactttgttcacaaaaattctacactttcacttctcccccatttatgtttttgatatcacagtttacatatttttatattgtgtatccattaacaaattattgtagctcaaattattattacttttgtcttttaacttttatactagagttaaaagtgattagataccaccattacagtattacaatattcttaatttgactatatactcagtgttaccagtgagttttatagttttatatattgtcttttttttwaaaaaaactatttttcttatgaggaccatctctagaatccaggaagtctctggatctgagggatggaaagttcttcctgctatgaatgagagtggactcttcccatcacccccaactgaaaccacaaacacccagaattt

SEQ ID NO: 878241 - DNA, 619 bp, Homo sapiens
atgctttcttaaggtataatctacctgccatagaattcatttttatacatatccaattcaaataattttagtacatttactgttgtacagccatcactgcaatctaattttagaacatttccatcatcccaaaaagaaatcttgtgcgcatttgcacactattctttttcacattttctagtttcttaaggtagaaagttagattattcaaaatctttcttctttgtaatgtagacatttatagctataaatttccctctgaacactgtactagctatatcctatcaatttgctatgctgtgttttttattcagttcaaaatattttataatttcccttgttctttatttttgatccatgagttatttagacatgtgttgtttwatttccacatatttttggattctccaaatttgctgtggtgttgatttgtaatttcattccattgtggtcagagaacattctttgtatagtttcaatccttttaaactgaggcttgtttttatggcctaccatatggtctatcctggaaaatgttccaaatacatttgagaaggatttgtattcttctactgcggatggaatgttctacagatgtcatttaggtcagttggtcatg

SEQ ID NO: 878242 - DNA, 628 bp, Homo sapiens
ttattgatagttaaggattaatattgccattttgttgactgttttctgactgtttgtagtccctttgttccttatgctgtcttgcattgtgatttgacaattttgtttggtagtgataatggtttgatttctttcactttatgtatctgctacaggtttctttttctttgtgatcaccatgaggcttacataaaacatcatataacagcctgttttaagctgacaacaacttaactttgttcacaaaaattctacactttcacttctcccccatttatgtttttgatatcacagtttacatatttttatattgtgtatccattaacaaattattgtagctcaaattattattacttttgtcttttaacttttatactacagttaaaagtgattagataccaccattacagtattacaatattcttaatttgactatatactcagtgttaccactgagttttatagttttatatatwgtcttttttttaaaaaaaactatttttcttatgaggaccatctctataatccacgaagtctctggatctgagggatggaaagttcttcctgctatgaatgagagtggactctttccatcacccccaactgaaaccacaaacacccagaattt

SEQ ID NO: 878243 - DNA, 596 bp, Homo sapiens
actggaaaaaaaaatagtattcttagtgtagattgcaaaaggaaagaggatatgttagatgatttgcccaaaatttaaacaggattcgctttttaaattcaagcctttttgctttcattcagatctggtcaccagacttactttttccttaaggcatatatgaatcatcttgttctttcattcagaaatcaaaagttcargcctagatcagtatttaccaaaactggtggaacactacctttccactgagagtgcattacctttttttgagtctttgaaaagaatgtcagctgaacatggtctggaagtggccaaaactctgtgggtggggagaaaggaagaaataacctatctcccatttaaaaacctaccacctattaaataaacggcagtcttgttctgtggagtattcatttgggttatctattctgatgaacaaatacaaattcttggtagggttttcttgcttctggataaaatgcttagtgttgctttttgttgttcaatcttaggttttgtttcattttgtttttcagggtctcactctgtcaaccaggctagagtgcagtagcgcaatcatggttcgtggcagcctc

SEQ ID NO: 878244 - DNA, 604 bp, Homo sapiens
ttttgagcctcaattttaccatctatgacacaggaataatacaagcatgctttattttctgcagttaatgtacctgtgaaaacttgtgtgaattgaattgtggaaaataaaattacaagctttgaatatattagaaaaaatcaatattttaagaaacctcaagatgaatccttttgtcaagtgaagaatcttctttataccttatttttaaaaataaacccaattttagtattatattttttaaaactagaacacattttaaaagggaaagaatggtgatttttgtggtcctcatggccatgggcttccctctcctcttggaaggtttctcargaaccaccttgctctgctcagctccttgccgcagtgctgggttgggaaggtaaggtggccaaagaagggtctgtgcttgcaggatgattcctcaggcattaaaaacactgtgtgttactgagaggattaagggaatgggcagtagaaaccagcgctggggagatggaaggtaagaagaataggcggacttagggctgatgaggaagtttaaagcagaactggtagagtgcttgatgtgtttgagaaacaaatcgttgcatgtgatttagat

SEQ ID NO: 878245 - DNA, 565 bp, Homo sapiens
atatttatctcatttacattcataattagtatcaatatgtgtggatttgaccctgtcatcattttagctttttattattccgacttgtttgtgttgtggctttttcatgttactgtttggtgttcttaagtgtatttttgtggtggctggttaatagtcattccttctcgtttagagtttctatcagaggctgtagtatggcaggtctggtggtaataaatttcctcagcatttgcttgtccatagactgtataaagaaaatgtggcacatatacaccatggaatactatgcagccataataatggatgagtttatgtcctttgcagggacatggatgaagctggaaaccattgttctcagcaaactaactcaagaacagaagaccaaacactgcacrttctcactcataagtgggagctgaacaatgagaacacatggacacagggaggggaatatcacataccagggcatgttggggggtgggggtctggggagggatagcattaagagaaatacctaatgtaggtgatgggttgatgggtgcagcaaaccaccatggcacgt

SEQ ID NO: 878246 - DNA, 545 bp, Homo sapiens
gaaaatgtggggttgaagcccccacacagagtccccactggagtgctgcctagtggagctatgagaagaggccactgttctccagaattgtagattccactgacagcttgcaccatgtgtctggaaaagctgcagtcacacaatgccagcctgtgaaagcagtctggagtggggctgtaccctgcaaagtcacagttgtgtgtgggagcccaagaccatgggagcccaccaccgagggagcccacctgttgcatcagcgttccctggatgtgaaacatagaaacatagagtygaaggagatcatttaaaaactttaaagttcaattacttccctataggattttggacttgcatgggccctgtggctcctttgttttggtaaatttctccaattaataatgggtgtatttacccaatgcctatgcacccactgtatctaggaaataactaactaacttactttttgattttataggataataggtggaaggaactgtcttgtctcagatgagaatttggacttggacttttgggttaatgctgga

SEQ ID NO: 878247 - DNA, 545 bp, Homo sapiens
gaaaatgtggggttgaagcccccacacagagtccccactggagtgctgcctagtggagctatgagaagaggccactgttctccagaattgtagattccactgacagcttgcaccatgtgtctggaaaagctgcagtcacacaatgccagcctgtgaaagcagtctggagtggggctgtaccctgcaaagtcacagttgtgtgtgggagcccaagaccatgggagcccaccaccgagggagcccacctgttgcatcagcgttccctggatgtgaaacatagaaacatagagttgaaggagatcatttaaaaactttaaagttcaattacttccctataggattttggacttgcatgggccctgtggctccttygttttggtaaatttctccaattaataatgggtgtatttacccaatgcctatgcacccactgtatctaggaaataactaactaacttactttttgattttataggataataggtggaaggaactgtcttgtctcagatgagaatttggacttggacttttgggttaatgctgga

SEQ ID NO: 878248 - DNA, 643 bp, Homo sapiens
taagccttctatgataatatgtcattccatttattaaggaattccttattttcaataaaatttttctgttttaagtaagttttcagtgtgtaggtcttgtatttcttttgataaatttatttctaagtattttcttgttttactttctcttgtaagtggaattgtttagttaattttattttcagattgttcattgctggtgtagggctttctatgtacaaaatcttgtcatttgtgaarggagatagtattatttattgctttctgtattagtttgttctcacactgctataaagaactacctgagactgggtaatttatgaagaaaagaggtttaactgacacacggttccacaggctctacaggaagcatggctgagaggcctcaggaaacttagaatcatagcagaagatgaagggaaagcaagctcgtcttaccacagtgaagcaagagagacagaaagagaagggggaggtgccacacacttttaaaccatcagatttcatgagaactcactcactattacaagaatagcaatgggaagtgcacccccaagattcaatcaccttccaccaggcccctcctctaacacgaggggattacaatttgagatgagatttgggtggggacacagagacaaac

SEQ ID NO: 878249 - DNA, 677 bp, Homo sapiens
ttacagacagcatatcgtggtgcttctcagcctccatagtcctgtgagccgatttccagaataaattctttctctctctctctctctctctctctctctctctgtctctctctctttctcctctctctcttgaaaggggtgccaggggtgccctcaactcctgatttataaatcatttctcacgagagagagaggagagagagatatatattatgttggtgcaaaagtaattgcgatttttgccattaccattgacactattggttctttttctctggagaaccctgactgatgcaatgggcatagcatggcaagaaaatccctatattaattctgaaattccaggtcactttggctgtgatctggagtctttaataaatgttcagtctccacagtgcaagccaacctcaacattttatctattagatctcattctatgttacacttcctgagtaaaaacattgcccaaataggctggtcacagtcaccaaaattgttcctatagagaagtsgttctcgaacagggaaattttgcctcccagggaagatttggcaatgtctggtgacatttttgggtgtcatcatggagaaatgctgctggtgtctagtgggtagaggccggagatgctgctaaacatcctacaatgcacggagcagccgctcacgacaaagaagat

SEQ ID NO: 878250 - DNA, 525 bp, Homo sapiens
ttcagccagagggaagagtaagtgcaaggcaagagcaaagagttcagcttggaggtcccacatgaagtgattagtaagggggagatatagcagatgagatctgagaacatggggaagctggggacaggttgcataggtccttatggcaaggactctagatttcattagaaaccatcggaggacaaaagcaggagagagrcatgttaaaactcatctttgtcaagaattactgagccagactgatgagcactttacatatcaaaatgtatgacaagcccacacgaatattaaccagaaacacaagtccagcccaaatggccaaacattccaagtacttttttattttgagtgcttgcttgtatccagaagcatgttaggtgctgggagatcaggtatgtaacaaaaattcccagcaccaggcagggtcagcccgagagactgggagactgggcaagttaggtggcagaagtgctttgaccctctgttagagggcaccaggcctggctggcaaatcttcaagcactc

SEQ ID NO: 878251 - DNA, 651 bp, Homo sapiens
tttccaaagtgaaaagctgtaatagtaataggttttaaaaactatagagtcagcatcttgcagaagatactcaactgggtaatttttttaaaaaatggaggcttttataacatccaattatatgacaagtgagttacatttaaaggcattgaaaaaattattccaaatacgaactgaacagtgttatcaactttaattagtcctcatattaagctctttccaagcccatgacggaggcgaaggagctataaatgataagcatgcatcccatctgaaacggtacttccaactcggagcagcatgtttggtaaccaggtcactggaggagggtgatgatcatgactgccactcatcagccaatccccccccatgacgattttatgtatatcatgcattactgctagccaccatgaatattacatagtactataattgcttgagcgtccatggtacataccaakccaaaccttacattaatcctctacccctgagaatccaaaattctccgtgccacctgtcgcaccctatcctaaagtaaggtcagctaaataagctatcgggtggatgtgggtacagtgttagattgagataatatcatttatgggggaggggcactttgtgaagtgggccccatttctcttgtcctttcgt

SEQ ID NO: 878252 - DNA, 615 bp, Homo sapiens
tggccaggtgcggtggctcacgcctgtaatcccagtattttgggaggccgaggcaggtggatcatgaggtcaggagatcgagaccatcctggctaacatggtgaaaacccgtctctactaaaaaatacaaaaaaaattagccaggcgtggtggtgggcacctgtagtcccagctacttgggaggctgtggcaggaaaaatggtgtgaactcgggaggcagagcttgcagcgagccgagatcatgtcactgcattccagcctgggcaacagagcgagactccatctcaaaaaaaaaaaaaaaaaaaaaaggaaaggatcttatttctccttcacttatgaagcttagtttggctggatatgaaatttttggctggaatttcttttctttaagaaggttgaayataggcccccaaactcttctggcttgcagggtttctgctgagaggcccactgttaagtctgttgggcttccctttgtaggtgacctgtcctttttctctagctgctttcaaaattttttctttcattctgaccttggagaatctgaagattatgcatcttgaggtgatcttcttgtgaattatcttgtaggggttctctgcatttcttgaattt

SEQ ID NO: 878253 - DNA, 626 bp, Homo sapiens
acacacacccttctggttgtgtttctctggagaacccagactaatacacaaagtcattgggcatggtggctcttgcctgtaatcccagcactttgggcatccaaggctggaggattgcttgagcccagttcaaaactagcctggcaacaaaataagaccctatctttgccaaaaaaaaaaaaaaaaaaaagaatagctgcgtgtggtagcacgcacctgtggacccaktcactcaggaggctgaggtgggaggattgcttgaacctgggaggttgtggctgtagtgagctgcgattgtgccactgcattccagtctgggtgacagagcgagaccctgtcttcaaaacaaaacaaaactaaggtggttacaatgatgtataatgccgtgcatcttcaggccttattattccctgttcattcctttagtccaggggtctacaaactatggcccataggcatacagcctgattttgtaaataaagtttgattggagcagtctcgcccattcatttacgtattgtcctgctgctttcataccccactggtagagctgagttgttgtgatggagactatatggccctcaaagctgaaaatcttctactatctggtactttacagaaaacat

SEQ ID NO: 878254 - DNA, 572 bp, Homo sapiens
acccaaacccagcagaagaaagaaataacaaatatcagagcagaattaaatgaaattaaaacaaaaaaagtacaaagagtaaatgaaacaaaaatctttttctttgaaaaggtaaataaaactgatcgaccattagcaagattaaccaaaaaaagaagagagaagatccaaataagctcaattagaaacaaaacaggcaatattacaactgataccacagaaatacaaaagatcattcaagtctagtatgaacacctttgcatgtrcaaactagaaaacctagaggagatggataaattcctggaaatatacacccatcttagattaaaccaggaagaaatagaaactttgaacagacaaataaggtgcagcaagattgaaatggtaataaaaaaaattgccaacccccccccaccaaaaaaaatccaggatcagatggattcacagctgaattctatcagacatacaaagaagaattggtagcaatactattgacactattccccaagatagaaaagagaaaatcctcccaaaattattctatgaagtcagtatcaccctaatccccaaac

SEQ ID NO: 878255 - DNA, 533 bp, Homo sapiens
agacaattctcaaaagaagatatacaaatagccaagaaacatatgaaaaaaatgctcaacatcattaatgatcagcgaaatgcaaatcaaagccacaatgtgataccaccttactcctgaaagaatggccataataaaaaaatcaaaaaataatagatgttggtgtggatactgtgaaaagggaacacttttacactgcgggtaggaatgtaaactagtacaaccactatggaaagcagtgtggggattcyttaaagaactaaaaatagaactgccatctatttgatccagcagtctcactacagggtatctagccagaggaaagtaagtcattatacgaaaaaggtacttgcacatgcatgtttatagcagcacaattcacaactgcaaaaatatggaactagcccaaatgcccattaatcaacaaatggataaagaaaatatatacttttatatgtatgtacatatatacatacatatatacatatatatataaatatatatatacacacacacacacgcaccatggaata

SEQ ID NO: 878256 - DNA, 687 bp, Homo sapiens
gtgatcctttggaggagaagaagcgttctggtttttggaattttcagcctttttgcactgttttcttttttctttttttttttttttcatcttcatggatttatctacatttggtctttgatgttggtgtcctccagatggggtttttgtgtggrtgtcctttttgttgatgataatgatattgctttctgtttggtagttttccttctaatagtcagacccctctgctgcaggtttgctggagcttgctggaggaccctccagaccctttttgcctgggtatccccagcagaggctgcagaacagcaaagattgctgactgttccttcctctggaagctttgtcccagaggggcacctgccagatgccagccagaactctcccgtatgaggtgtctgtcaacccctgctgggatgtttctccctgtcaggaagcatgggggtcgggtacccacttgaggaggctgtctgtcccttagcagagctcaagcactgtgctgggggatccactgtcctcttcagagtcagcaggcaggagcatttaagtctgctgaagctgtgcccaccaccatcctttcccccagttgccctgtcccagggagatgggagttttacctataagcacctgactggggctgctgcctttctttcagggatggcctgcccagagaggaagaatctagagagg

SEQ ID NO: 878257 - DNA, 729 bp, Homo sapiens
cctgagaccccctctccttggccagccagtgtctgtctgcatcttgcagctctttcagctgtaatccactgttattataaggagccctgttgctgtggtggtaaggagtggggaagggaaacattccattttcttaggattacatctcaatcttttggtgggcctatgttgctgtactgtgacctttacaaatgtttcttaacctttttcctccttccttagttgacacaggaatctagaggtgmctcgagtcagagaactatcttctccccagatgggataagactctggtaaagcccttttccttggagagtaagtctttatcatagagaacattctgagcgcacttcaaagtcattactttccccttccctttgccagagccaggacagggtctatcttggctctttgctgtgaaaacctgacgggtttccgggaggtaaaatccatgtacgtgtgagaccctttctcagactcctgcgcctaggagttccactctcaagctagtcaacacttagcctccagcaattcatcaaaattactatttaaatggcccttctagtctatggttccagttgcttctgctgtaggtaagcaaatcttagctgtgactgtctgaatgtacctatttcttcagattttggggtggcaagtgatttgccctgagattgctgacagttccaggaaaacttaccaagttttacttgctcaggtttggaagggagtgag

SEQ ID NO: 878258 - DNA, 550 bp, Homo sapiens
aacaacagacatttcttctccttcagttctggaggttagaagtccaaaatcaaggtgacagcagggccaggttccctctgagactcttagcagagtcctcccttgcctcttcctagcttctaaggttggccatccacccctggtggtccttggcttgcagctgaatcactgcagtttctgcctctcatcacatggcattctccctgygtgtcttttcgtatgtcattttccttttttaaggacacctgtcatgttggattagggcttactaatgacttcatcttaacttgattacatctgcaaagactctatttccaaataaagtcacattcacatcatagatacaggtatgcgtctttctgggggttacaacttaacccataacatagtgtctctcagaactgaggtttgttcaatgtgggttcatggccataatatgaataacaacaacaacaaaaccctgaggcttggagccctcagaggggttgagaggtgttttgacgggttcgtgaagacagcagctgtagtgctctaactttttcatggtggc

SEQ ID NO: 878259 - DNA, 550 bp, Homo sapiens
aacaacagacatttcttctccttcagttctggaggttagaagtccaaaatcaaggtgacagcagggccaggttccctctgagactcttagcagagtcctcccttgcctcttcctagcttctaaggttggccatccacccctggtggtccttggcttgcagctgaatcactgcagtttctgcctctcatcacatggcattctccctgtgtgtcttttcgtatgtcattttccttttttaaggacacctgtcatgttggattagggcttactaatgacttcatcttaacttgattacatctgcaaagactctatttccaaataaagtcacattcacatcatagatacaggtatgcgtctttctgggggttacaacttaacccataacatagtgtctctcagaactgaggtttgttcaatgtsggttcatggccataatatgaataacaacaacaacaaaaccctgaggcttggagccctcagaggggttgagaggtgttttgacgggttcgtgaagacagcagctgtagtgctctaactttttcatggtggc

SEQ ID NO: 878260 - DNA, 494 bp, Homo sapiens
tgtctgttgagataatcatgtggtttttgtctttagttctatttatgtgatgaatcacatttattaatttgtgtatgttgaaccgaccttacatcctggggatgaagccaacttgattgtagtggataagcttttcaatgtgctgctggatttggtttgccagtattttattgaggatttttgcattgatgttcatcagggatattggtctgaagtgtttttgtcattgttgtatctctgccaggttttggtatcaggatgatgcttttctcatagaatgaggtagggaggagtccctccttttcaattgtttggaatagtttctgtasaaatggtagcaactcttctttgcacctctggtagaattcaactgtaaatccatctggtcctgagcttttcttggttggtaagctatttattactgcttcaattttagaacttgttatcggtccattcaggaattcagtttctccctggttaaggcttgggagggt

SEQ ID NO: 878261 - DNA, 620 bp, Homo sapiens
gggccatcatggggactttcctcattgggtaattggagcttcctcatggtctaggactggtttctcagagttagcatcttcagacagataataagagaagctaaggcagaaactcttttgatctagatgggaagtcacatagcatctttttcaccatactctgttggttgaagcagtcaggagctcctgtgcgggctcaagagaggaacagtcacatcataaaatatcaagtgagatgggatatatatcggaatatacaatatgcctcagaaggaatatacaaaagttcatttctgtgttacactgaagccaatagaaggcagagcggtgatttacatactctgctaaatgtgatcaatattctcttttacactaaaaatatagttaaaaatatatctttatccagagtagtggcaaacaaatagatataytagtttacataaatgcaaatagcattagaactaacaatctttataaatctgccttaaataatctaaaactacatccaatattttacagtaggactctcattctttaggaagaaaaatctgattttacacataatgactgatcttcacatccgaggaccaagctgagaatggcactgtgtgggcaatgct

SEQ ID NO: 878262 - DNA, 640 bp, Homo sapiens; identical to SEQ ID NO: 874808

SEQ ID NO: 878263 - DNA, 635 bp, Homo sapiens
ggagacacatgttacgtgcaaagacacacacaggctcaacataaagggatgtaacaaaatttaccaaacaaatggaaagaaaaaaaaaagcaggggttgcaatcctggtctctgacaaaacagactttaaaccaacaaagatcaaaaaagacaaagaagggcattacgtaatgctaaagagaataattcaacaagaacagttaactattctaaatatatatgcaccaatacaggagcacccagattcataaaacaagttatttgagacctacaaagagacttagactttcacacartaatagcgggagactttaacacctcactgtcaatattagacagatcaacgagacagataattaacaaggatattcaggacatgaactcagctctggatcaagtggacctagtagatgcctacagaagtctgtaccccaaatcaacagaatatacattcttctcagtgccgcatggcactttttctaaaattgaccacataattggaagtaaaacactcctcaggaaacacaaaagaactgaaataataacaaacagtttctcagaccacagagcaatcaaattaaaactcaggattaagaaactcactcaaaactgtaaaactacatggaaattgaaca

SEQ ID NO: 878264 - DNA, 634 bp, Homo sapiens
tcttttgattggaaaattaaatccatttatacttaaagtaatgattgatacataagacatactgccagcattttgttaatttttaatgactgttttgtagttattttgttcctgtcttctaattttattgtctttctttgtgacttgttgcattattttgyagtggtatgctttgatttcttctttactttttgtgtatctactaaaagtttttttctttgttgttaccacgaggctatacataagctgatagtcccttaacttcagttgcatataaagactctaaacttttacttctctctgcccctatattttatgttattgatagtatgctttacatctgtttttgttgtatattcattaaccagttttttatagctatacttgttttaacatgtttgtcttttaactcatcagcttgacttaagaatgatttacataccatctttagattattattcagaatttgactatagatttacctttagcaatgagttttatagttttatatgtttttatactgttacttgtcatccttttgtttcatccttcagcatttcttgtaagactggtaccatggtaatgaactcccttagtcttggaatgtctttaactcttcatttctatagggcag

SEQ ID NO: 878265 - DNA, 632 bp, Homo sapiens
ttagagaattgcaagtcaaaaccacagtgagataccatctcacaccagtgagaatcgccattattacaaagtcaaaagataaacagatagtagtaaggctgcagagaagaagggatgcttatacactgctggtggaaatgtaaattagttcagccactgtggaagtcagtttggcaatttctcaaagaactaaaaacagaactrccatttgacccagcaatcccattattgggtatatacccaaaggaatataaatcattctatcataaatacacatgcatatgtatattcattgcaatactattcacaataccaaagacatggaatcaacctaaatgtccgtcaatggtagagtggataaataaaagtggtacatatacactatggaatactatgcagtcataaaaaagaatgagatcatgtcctttgcagcaacatggatggagctggaggccattatcctatgcaaactaactcaggaacagaaaacccaatgccacatgttctcacttataagtgggagctaaatatcgagtacacatggacacacagaagagaacaatagacgttgggatctacttgagggtggagggcaggagtagagtgaggataaaaaaactacctattggata

SEQ ID NO: 878266 - DNA, 588 bp, Homo sapiens
catcctctctctctccctgtttctctgtctctctctacatatcacttgacacacacactatatatatgtgtgtatatatacagacacatatatatcatttggaatatgcatttatatacatatatgtctcttgagatttggtatatatataatgatrtataacatttaatgcatacacaatgatagtacaatttaaataaaattatttatccatagaaatacaagcagcgcacaaattaggtgataccattatttttagaagtgcattataattttatcattaaattacataaattcttaataaaatttactaaacatttcaaccataaataaataatttatttatactttaattagcaagtttaaaagttacctgattcatttatctactttccataaaattctgcataagaagtgctaaaagtagttctttcacagacttcaatttttaacttttttcattgtgttagactattgattccacagctataaaattaccttggaaaaaagacactccctaaatcttgcgctcaatgctctgaaatggaatcatcttcctacaaccactgattaaagtcaaagaaggtc

SEQ ID NO: 878267 - DNA, 655 bp, Homo sapiens
gaaataccatttgacccaaccatcccattactgggtatatacccaaaggactataaatcatgctgctataaagacacatgcacacatatgtttattgcagcactattcacaatagcaaagacttggaaccaacccaaatgtccaacaatgatagactggattaagaaaatgtggcacatatacaccatggaatactatgcagccataaaaaatgatgagttcatgtcctttgtagggatatggatgaaattggaaatcatcattctcagtaaactatcgcaagaacaaaaaaccaaacacyatatattctcactcataggtgggaattgaacaatgagaacacatggacacaggaaggggaacatcacactctggggactgttgtggggttgggggaagggggagggatagctttaggagatatacctaattctaaattacgagttaattggtgcagcacaccagcatgacacatgtatacatatgtaagtaatctgcacattgtgcacatgtaccctaaaacttaaagtataataataattttaaaaaaagaaaatttaataagttaaaaaaagaaaagtttgtatgagtttaaggcattcaattaggcatcagttagggttagcaattcactttttggagcaacctttatgac

SEQ ID NO: 878268 - DNA, 590 bp, Homo sapiens
ctgcaacacacacaatgccaggagcgtcttcaaaaggtagtggaaaagtcaataaatcacctgagataattcccagatgattacaatgggaaaagtctcctggcatttctaagtcaatggggtgcactgactgcagacccagaatagtgtttatttcttttttaaattatactttaatttaatttaattatactttaatactatactttttaaattatactttaagttctagggtacatgtacacaacatgcaggtttgatacataggtatacatgtgccatgttggtttgctgcacccatcaactcgtcatttacactaggaatttctcccaatgctatccctcccgcagtcccccaccccccaacaggccctggtgtgtgatgttccctgccctgtgtccatgtgttctcattgttcaattcccacctatgagtgagaacatgcggtgtttggttttctgtccttgagatagtttgctgagaatgatgatttccagctccatccatgtccctgcaaaggatatgaactcatcctttttygtggctgcatagtattctatggtgtgtatgtgccacattttcttaatcc

SEQ ID NO: 878269 - DNA, 644 bp, Homo sapiens
tatcagaggtacttcacatcctacagtgtgtgggacagctccgcacagagaactgccctatccaaaatgcaagtggtacccagtgaacagaaacagggctgaaggacattggcagaggaggttgtggagtgaggttagggaagagttgggagcatacaagtgatcagaagaagcaggagtaagttgggggcccaaggagaggatgtggtggtgatggaaggtaagagtgagaaagtttgtatattagttctctagggctgtcattaacacaataccaaaaactggggtgcttaaataaaagaaatttgtctcaacattctggaagctggaagcctgagatcagggagttggtggggttgcttccttctgagggctgtgagggagagtcctttccatgtctttctcctagtttctggtggtttgctggcratctttggcattccttggcttgtagatgtatcaccctcatctctgccttcacattcatatggcattcttcctctgtgcatgtatctttgtgcccaaatgttctgtttttataaggacacagccatactgagtagagcctaccctaatgatgtcatcttaccttgattatctgcaaacatcctatttccaaataaggtcacatttataggtactgg

SEQ ID NO: 878270 - DNA, 644 bp, Homo sapiens
tatcagaggtacttcacatcctacagtgtgtgggacagctccgcacagagaactgccctatccaaaatgcaagtggtacccagtgaacagaaacagggctgaaggacattggcagaggaggttgtggagtgaggttagggaagagttgggagcatacaagtgatcagaagaagcaggagtaagttgggggcccaaggagaggatgtggtggtgatggaaggtaagagtgagaaagtttgtatattagttctctagggctgtcattaacacaataccaaaaactggggtgcttaaataaaagaaatttgtctcaacattctggaagctggaagcctgagatcagggagttggtggggttgcttccttctgagggctgtgagggagagtcctttccatgtctttctcctagtttctggtggtttgctggcgatctttgrcattccttggcttgtagatgtatcaccctcatctctgccttcacattcatatggcattcttcctctgtgcatgtatctttgtgcccaaatgttctgtttttataaggacacagccatactgagtagagcctaccctaatgatgtcatcttaccttgattatctgcaaacatcctatttccaaataaggtcacatttataggtactgg

SEQ ID NO: 878271 - DNA, 642 bp, Homo sapiens
ctgaaaattttcaaatgagagacttaagttgtatactgtagggccaggcgtggtggctcacgcctgtaatcccagcactttgggaggccgaggtgggcagatcacttgaggtcaggagtgcaagaccagcctggccaacatggcgaaacccygcctctactaaaaaacacagaaattagctgggcatggtggcagactcctgtaatcccagctactcaggaggctgagggagggagaactgcttgaacccaggaggtggaggttgctgcagtgagctgagattgcgccattgcactccagcctgggtgacagagtgagactccgtctcaaaaaaaaaaaaaaaaaaaagttatatactgtagttaacttaagatcaattgatttaaccttcattagctaaaattgtagaggaaaacctgtcattaataacaaaaatagcaacaattatcattttttgggtaccttctttgtgtcaggaatattgctaggcacctacattcttatttcatttaagccacaaaacagccctatatattgttgtacatctttataaatgatgacaacaaaactcagagagtttcacttttgtggaggagttcagagtatactgggtcccacaaaggaagattagactatggatcc

SEQ ID NO: 878272 - DNA, 643 bp, Homo sapiens
aaaagtcaggaaacaacagatgctggcgaggaagtggagaaataggaatgcttttacactgttggtggtagtgtaaattagttcaaccattgtggaacacagtgtggtgattcctcaaggatctagagctagaattaccatttgacccagccatcccattactgggtatatacccaaaggattataaatcatgctactataaagacacatgcacaagtatgtttattgcggcactatttacaatagcaaagacttggaaccaacccaaatgcccatcagtgatagactggataaagaaaatgtggcatatatacaccatggaatactatgcagccataaaaaagatgagttcatgtcctttgcagggacatggatgaagctggaaaccatcattctcagcaaacaatcacaaggacagaaaactaaacactgcatgttctcactcataggtgggaattgaasaatgagatcacttggacacagagcggggaacatcacacaccagggcctgtaagggggtggggagctcggggaggggtagcattaggagaaatacctaatgtaaatgatgagctgatgggtgcagcaaaccaacatggcacatgtatacctatgtatgaaacctgcacgttgtgcacctgta

SEQ ID NO: 878273 - DNA, 637 bp, Homo sapiens
taattatatcatatctgctaaactatatactataattctcccatttgttgtcccatttttcaagttaaaaattgagatggtcagggacacataaacataaaggtaaccctctgtgcttttcaaattattatgaagttttatcacatattttggaaaactrgaacctaaaacatctccagctgcacgaacctcaagactttaatagcagtccatgcaactatttacttgtgatgaacttaagtgaatagtgaagtcttagcccatccagacacaatgtaaatcatgagactttgatcactttaattattcatattccatagctagaaatggaattctggccaatgggagaatgggaaagagtaattagcaaatagatgcctcgtttatattatgtaccatgattgctaaaagtgcttgctttttaaggaataagcttttcacttctatatgaggaaatgaatgtgtgttggcatttttataagcaaaatgatttcttaaatcttaacactcagatgaggaaaccaattccaaaaatgattttatgagttaaaacataaaaccaaagaaaggagctttacatgaaaaatggaaggaggtgggagagaggcaatgagggggtggggggagaagagggggt

SEQ ID NO: 878274 - DNA, 641 bp, Homo sapiens
agagaatcctctgggaatgaatgatcacacttcaggtcataagagataagatacacctctgtttactgtccaaactgaaagaaattatgcaccactcccttcaataaatacatctgctaagataaatgtaggcatgtgcttttaaacctatacatatgcaggacacatatgtaggtatatgaaaaataaaacaagctgggtgcagtggctcacgcctgtaatcccagcactttgggaggcagaagtgggcagataacctgaggtcaggagttcgaggctagcctggccaacatggcgaaacactgtctctactaaaaacacaaaaattagccagtcgtgatggtgggtgcctgtaatcccagctacttgggaggctgaggcataagaatcgcttgaacctgggaggcggaggctgcagtgagccgaaatcgcaccactgtactccagcctgggcgatagagcaagactccatcaaaaaaaaaaaaaaaagggggggrgaaaaaaagaaaggaaagggaagggggatggggaaaggggaaaggaaaaggaaaagaagaaaaggaaaattatctgctaaaataaaggcaggtatagtttggtgctgtgctgatatgtacaagatacaggtataatcaagctgt

SEQ ID NO: 878275 - DNA, 641 bp, Homo sapiens
agagaatcctctgggaatgaatgatcacacttcaggtcataagagataagatacacctctgtttactgtccaaactgaaagaaattatgcaccactcccttcaataaatacatctgctaagataaatgtaggcatgtgcttttaaacctatacatatgcaggacacatatgtaggtatatgaaaaataaaacaagctgggtgcagtggctcacgcctgtaatcccagcactttgggaggcagaagtgggcagataacctgaggtcaggagttcgaggctagcctggccaacatggcgaaacactgtctctactaaaaacacaaaaattagccagtcgtgatggtgggtgcctgtaatcccagctacttgggaggctgaggcataagaatcgcttgaacctgggaggcggaggctgcagtgagccgaaatcgcaccactgtactccagcctgggcgatagagcaagactccatcaaaaaaaaaaaaaaaaggggggggraaaaaaagaaaggaaagggaagggggatggggaaaggggaaaggaaaaggaaaagaagaaaaggaaaattatctgctaaaataaaggcaggtatagtttggtgctgtgctgatatgtacaagatacaggtataatcaagctgt

SEQ ID NO: 878276 - DNA, 569 bp, Homo sapiens
ggtatggagagtggggtgctgctgtaaagacacctgaaaatttgaaagccaactttggaactgggtaacaggcagaagttggaacagtttggaggagtcagaggaagacaggaaaatgtaggaaagtttggaacttcctagagacttgtgaatggctttgaccaaaatgctgatagtgacatggacaatgaaatccaagcacaggtgrtctcagatggagatgaggagcttttagggaacaggagtaaaggtcattcttgctatgcaaagagactggcagcatttttgcccctgccctagagatttgagaaactttgaacttgagggagatgatttagggtatctggtggaagaaatttctaaccagtgaagcatacaagaggtgacttgggtgtgttaaaagcattcatttttaaaagggaaacagagcataaaagtttggacaatttgtagcctgatgatgcaatagaaaagaaaaattcattttcggaggagaaattgaagccagctgcagaaatttacataagtaacaaggagccaaatgtaaatcactaagacaatggggaaaa

SEQ ID NO: 878277 - DNA, 658 bp, Homo sapiens
acataacaatattaaccttaaatgtaaacaggctaaatgccccagttaaaagacacagactggcaaattggataaagagtcaagacctgtcagtgttctgtattcaggagatccatctcatgtgcaaagacacacacaggctcaaaataaagggatggaggaagatctaacaagcaaatggaaagcaaaaaagtaggggttgcaatcctagtctctgataaaacagactttaagccaacaaagataaaaaaagacaacagcattacataatggtaaaaggatcaatgcaacaagaagagctaactatcctaaatatatatgtayccactacaggagcactctgattcataaagcaagttcttagagacctacaaagagacttagactctcacacaataatagtgggagacttcaacaccccactgtcaatattagatcaatgagacagaaaattaacaaggatattcaggacttgaactcagctctggaccaggtggatctaatagacatctacagaactctccatcccaaatcaacagaatatacattcttttcagcaccacattgcacttattctaaaattgaccacataattggaagtaaaacgctcctcagtaaatgtgaaagaacagaaatcataataaacagtctctcagac

SEQ ID NO: 878278 - DNA, 626 bp, Homo sapiens
tcagtaaatgtgaaagaacagaaatcataataaacagtctctcagaccacagtgtaatcaaattagaactcaggattaagaaactcactcaaagttgcacaactccatggaaactgaacaacctgctcctgaacgactactggctamataatgacattaaggcagaaataaataagttctttgaaaccaatgagaacaaagacacaacataccagaatctgtgggacaaagctaaaacagtgtttagagggaaatttatagcactaaatgcccacaggagaacgcaagaaagatctaaaatcaacaccctaacatcaaaatttaaagaactagagaagcaagagcaaagaaattcaaaagctagcaggcggcaagaaataattaagatcagagcagaactgaaggagacagagacacaaaaccccttcaaaaaaatcaatgaatccaggagacggttttttgaaaagattaacaaaatagatagactgctagccagaataataagaaaagagagaagaatcaaatagacaaaataaaaaatgataaaggcgtatcaccacttattcccagtgtttctgctttcatgtcctcctcattggagagatttggaaacccattatgtggat

SEQ ID NO: 878279 - DNA, 626 bp, Homo sapiens
tcagtaaatgtgaaagaacagaaatcataataaacagtctctcagaccacagtgtaatcaaattagaactcaggattaagaaactcactcaaagttgcacaactccatggaaactgaacaacctgctcctgaacgactactggctacataatgacattaaggcagaaataaataagttctttgaaaccaatgagaacaaagacacaacataccagaatctgtgggacaaagctaaaacagtgtttagagggaaatttatagcactaaatgcccacaggagaaygcaagaaagatctaaaatcaacaccctaacatcaaaatttaaagaactagagaagcaagagcaaagaaattcaaaagctagcaggcggcaagaaataattaagatcagagcagaactgaaggagacagagacacaaaaccccttcaaaaaaatcaatgaatccaggagacggttttttgaaaagattaacaaaatagatagactgctagccagaataataagaaaagagagaagaatcaaatagacaaaataaaaaatgataaaggcgtatcaccacttattcccagtgtttctgctttcatgtcctcctcattggagagatttggaaacccattatgtggat

SEQ ID NO: 878280 - DNA, 688 bp, Homo sapiens
taatatagcatctataaggaacttaaatttacaaataacaaaagaaaacacattaaaaagtgggcagaggaaatgaacagacacttctgtaaagaagacatacatcggccaaaaatcatatgaaaagaagctgaatatcacttattattagagaaatgcaaatcaaaaccacaatgagataccatctcacacctgtcagaatggctaatagtaaaaattcaaaaaataacatatgctggcaagtggcaatgttgtggagaaaagagaacaagtatacactgttggtgggcgtgtaaattaggtcatccattgtggaagacagtgtggcgattcctcaaagtgctaaaaacagaactaccattcaacccagccatcttattactgggtttatacccagaggaatataaatcatttcaccataaagacacatgtatrtgtatgttcactgcagcactgttcacaatagcaaacacatagaatcaatctcaatgcccatcagtgacagattggatgaagaaaatgtgatacatttgcaccatggtatactatgcagccataaaaaatgagattgtgtcttttctgggaacatggatggaattggaggcccttatttttagcaaactaatacagaaacagaaaacaaatagtgcatgttctcacttatgagtggaagctaaatcatgacagc

SEQ ID NO: 878281 - DNA, 620 bp, Homo sapiens
cttcacatccattctttctactcttctatcaacttttcatgctgcacccatgtttacaatgattgctattgtctttctgtggtttaaataagccaatgtcttctctctgggtatgttatccaggaaaaaaaaaatctaattgtatcggttagtactctttttaggaaaattaactgaaatttaattcaaattaacatagccaaaaaagaatacatgttgacacctaaaattataagttcatggacaacccaagcaatatcacaaaaaagatttctccatctattttccctgctctcctctgtggatgactgtgagcagctttagattacatctttgccactccaaattaattaaaaaggtggawatgtctttctctcaatatatgggggaaaaactctttgagcttgactggcatttggtccaaatgtgtaacataatgattctgaaccaaactcacagtagtgaaagtactaattaacttagagttaggtcccatgtttacctctgcagtttgggtcgcgtcagcagcagcatctaaccatagtgaattgaggaaagccttgatgtattgccacattatgatggtgtaaaccctatagatttatgggttgagagaacct

SEQ ID NO: 878282 - DNA, 634 bp, Homo sapiens
gtattccatactccctttcaacatttatcacagttgcaattccatgctcagttttttttccccactataatgtgagctctatgaaagcaggaacagtataagtcttagttactgctatagttcttggcacaaagtactcaaataatgactgaatgtagaaggtactctcctaaaacacatacttctttgagtcaagtaagaacctctgtctatgtgtaaaagggctctctaaatttgggaacactgccacgtatttctagatctagtatatgagccattgtcagatgtacatcctattccagttttgagccattactggctgcctttgggtgagtttgcttttcattctaatttcagaagccagccacctgccattatctaaaatcctgtccacatcaagtttacacagtaagcaaytcataaagctgtgactttaataagccctaaaatatatattaataaaatgaggtcagaaatataaaatattttgtaacttcatgcacaaaaataggcttacaataccttagggggattaaatgggtatgtttctggtatttttatctctagttggtatcttcctcctaaaaaaatggggaaaacaaagttaagaatgctgctcaattcaaatatataa

SEQ ID NO: 878283 - DNA, 573 bp, Homo sapiens
atctcaattaaattaaaactcgagataaagaaacccactccaaaccacacaactacatggaaattgaacaagctgctcctgaatgactcatggtaaataataaaatgaaggtagatgtcaaaaagttttttgaaactaatgagaagaaagagacaacatatgagaatctctgggatgcagctaaagcagtgttaacagggaaatttatatcatgaaatgccctatcaaaaacccagaaagatctcaaattgacatcctaaaatcacaactaaaagaactagagaaccaagagcaaacgaaccacaaaactagcagaagataagaaataaccaagatcagagcagaactgaagcagatagagacatgaaaaaccgttcaaatatcaataaatccaggagctttttcttttgaaaaattaacaaaagatagacmactagctagactaataaagaagaaaagagagaagaatcaaatatacaccaatcagaaatgataaaggggatatcaccactgactccacagaaatacaaacaaccatcagagaatattatatacacctcagtgaaaatgaag

SEQ ID NO: 878284 - DNA, 607 bp, Homo sapiens
tgctatcatgaaagtgagttagtctcaacaatatctgaagttttttaaaggagagtttccctgcacaaattatcttctcttgtctgccaccatgtaagatatgcctttcaccttctgccatgactgtgaggcctcctcatccacatgaaactgtgagtctgtaaacctctttcttttgtaaatttcccattcttatgcatgtctttatcagcagtgtgaaaatggactaatacatgaggccagcatcatcctgataccaaaacctgacatagatacaaccaaaaaataaaacttcatgccaacatccctgatgaacttcaatgcaaaaatcctcaataaaatactggcaaactgaatccagmagcacatccaaaagcttatccaccatgatcaagtcagcttcattcctgggatgcaaggttggttcaacatatgcaaatcaataaatgtaatttatcacataaacagaactaaagaccaaaccacatgactatatcaatagatgcggaaaaggtctttgataaattcaacatcccttcatgttaaaaactctcaataatctagatattgaaggaacatccatcaaaataatgagccatttatgaca

SEQ ID NO: 878285 - DNA, 605 bp, Homo sapiens
gtatctcattgtggttttcatttgcatttctctgatgatcagtgaggttgagctttttttcatgtttgttggccgcataaatgtcttcttttgagaagtgtctgttcatatcctttgcccactttttgatggggttgtttgtctttgtcttgtaaataattttaagtttcttgtacattctgggtattagacctttgtgagatggatagattgcaaaaaatttctcccattctatagattgcctgtttgytctgatgatagtttattttgctgtgcagaagctctttagtttaattagatcccatttatcaattttggcttttgttgcaattgcttttggtgcttttgtcatgaagtctttgcccatgtctatgtcctgaatggtattgcctaggttttcttctagggtttttatggttttgggttttacttttaagtctttaatcaatctcaagttcatttttgtataaagtgtaaagaaggagtccagtttcagttttctgcatacggctagccagttttcctggcaccatttactgaataggagattctttccccattgcttgtttttgtcaggtttgtcagagatcagatggttgtagagg

SEQ ID NO: 878286 - DNA, 501 bp, Homo sapiens
ctggtcctgggatttttttggttggtaggtgattaattactccctcaatttcagagctcgttattggtctattcagggatttgacttcttcctggtttagtcttggtagggtgtatgcatccaggaaattatccacctctttagattttctaatgtatttgcatagaggtgtttatagtattttctgatggtagtttgcgtttctgtctggtcagtggcgatatcccttttgtmattttttattatgtctatttgattcttctctcttttcttattagtctagctagtggtctatccattttgttaattttttcaaataaccagctactggattcagtgattttttggagggttttgaaatgcaaatacaaaccacaatgaaatgtcatctcaagtcagtcaaaatggcgattattagagtcaataaacaacagatgccagtgaggttgtggataaataggaatgtttttacactgttggtggtaatgtaaatgaggtcat

SEQ ID NO: 878287 - DNA, 560 bp, Homo sapiens
gcttattccgcttgatattcatgaacatttcagctctccatgagagtcctaaaagtttttttttctattttaatgtcataatctccaaagttatcagaaccttgcattcaaacacctgttagagctctatagctgattatagagtcaccgtctaaagaggatcaaaacaaggcaataattgtccatagatgacaaaayatcttaggacagccacagtcaaaaacaattgacaaatatatttgttacttctgtggcacacaataatttaacataacaattataattattactgataacctatactaaattatatcagaattataagagttttgagtaattctggaacacctaacaataacatatttatacaagtactgtccaaagaaacccaaatgttacctttgcattagtgtactattgatgtcaaactcaactcttaacaaatccttatagacaaatctattcaattttaataagtttgaccataaggtatgattctcatacacctcctataatcttttctaattttctgttaaagaacagaacaatgctctaagaaa

SEQ ID NO: 878288 - DNA, 605 bp, Homo sapiens
gttgaaccctccagcaatacagcaaacgtatactgtaatgatttccacagatcttagccaaagataaaacaacctttttttttcaggtagctatacagaggggacatgggaacaccatgtattttttaggaaaatggaccatggaatctgatttgacataaggcytgaagcatcatcatcgtcccctgttagagaggaggcatatgggggccaagtcataaattgagttctggcctgtgtctggcttcagtgtatcccatgggtgggtctatggactaacctagtggttttctcagttcacacatgtgtatctgagattaatatacttggaaagtagaataacctatacactaaattcttggcctacagaataaaaatttatttgaaatggaccaagcagaaggctctgaaaatgcaccccaaccaaggtaggatagtaattcaaaaacagcatcacataggatggggattgtagtgattgttttcaatcttaaggctctcagagatgcgggggtgatgtccccatcatagtgctgcttaacttaccagtatgaccctacaaacaaaaaacagataaatctttgggaatgattatagtttgccac

SEQ ID NO: 878289 - DNA, 605 bp, Homo sapiens
gttgaaccctccagcaatacagcaaacgtatactgtaatgatttccacagatcttagccaaagataaaacaacctttttttttcaggtagctatacagaggggacatgggaacaccatgtattttttaggaaaatggaccatggaatctgatttgacataaggcctgaagcatcatcatcgtcccctgttagagaggaggcatatgggggccaagtcataaattgagttctggcctgtgtctggcttcagtgtatcccatgggtgggtctatggactaacytagtggttttctcagttcacacatgtgtatctgagattaatatacttggaaagtagaataacctatacactaaattcttggcctacagaataaaaatttatttgaaatggaccaagcagaaggctctgaaaatgcaccccaaccaaggtaggatagtaattcaaaaacagcatcacataggatggggattgtagtgattgttttcaatcttaaggctctcagagatgcgggggtgatgtccccatcatagtgctgcttaacttaccagtatgaccctacaaacaaaaaacagataaatctttgggaatgattatagtttgccac

SEQ ID NO: 878290 - DNA, 605 bp, Homo sapiens
gttgaaccctccagcaatacagcaaacgtatactgtaatgatttccacagatcttagccaaagataaaacaacctttttttttcaggtagctatacagaggggacatgggaacaccatgtattttttaggaaaatggaccatggaatctgatttgacataaggcctgaagcatcatcatcgtcccctgttagagaggaggcatatgggggccaagtcataaattgagttctggcctgtgtctggcttcagtgtatcccatgggtgggtctatggactaacctagtggttttctcagttcacacatgtgtatctgagattaatatacttggaaagtagaataacctatacactaaattcttggcytacagaataaaaatttatttgaaatggaccaagcagaaggctctgaaaatgcaccccaaccaaggtaggatagtaattcaaaaacagcatcacataggatggggattgtagtgattgttttcaatcttaaggctctcagagatgcgggggtgatgtccccatcatagtgctgcttaacttaccagtatgaccctacaaacaaaaaacagataaatctttgggaatgattatagtttgccac

SEQ ID NO: 878291 - DNA, 637 bp, Homo sapiens
tcacccccgccagtcactgttattgctgctgctgctacttccattcagtagtcttgttgctctctctccctatcagtactttgacttgctgtcagaacttctgctgttggtaccaacaatgttggagggaagtatttccattaccaattaatgctttctggacctccaagggtcaaattttctgctttatctttactaataccacattaggaattttgaacatgattgccaaagcccaagagtaacacagcaaacatattcctcgccggtgattgctcagcaacacaaaatgagcacatgtttgccatattttgacagcctaagatccctaccttctctatattatacatctgcagcctctcctcctagcctcccttttgatgtgagtgtgctaacatcatcwacctgaagttcaggctcaaagtttccttccccaaagcccagataatctttcctaaagaactctgggaggtactgtctgagtctccagactctccaagacaaatataatgattagaattcatattaattttttatttcttctgtaacaaattactacatatgtagtgacttggaacaacacaaatttattattttatattttgttggtcagaattctggtgtgggtctcattaga

SEQ ID NO: 878292 - DNA, 449 bp, Homo sapiens
cttcatgtccttggataaagtgacttaaccccctgaactttcatatccttatttatgtgaccaagtataacataaaataggaaatgttatttacctgctaaattgtagaaagacacacctggactggggacagtgagtacacactgaacactagtgttttccccacataggtaatagcacccaacagataatatttgccccacaagttataygcagattggaaaaagtggaatcatgttccaagcatcacagaagtactgactgtagctagtctggcatgtgagcatttgttgtcattttccttgcccttcaatatttgtcctgttttaccctttagtttccactaaaaagcagctgccttcactagaaagtaagtgagctccttgagggcatttgtatacatttatttttgtaccaccattccattgcctccgtcagtgttggtggca

SEQ ID NO: 878293 - DNA, 612 bp, Homo sapiens
attaatgtattatttactcactttaccttaagttacagaatttggaattatgtaatacaactaagaaaatgctaaaactgtgtcattgagtacatgagtggctgctatgagtctcaagagatgagatacaaaacggaaaaaagttttaaattaatctggctacaaagattaaatataaaaatgatgactaaaagtagtcatcatgttattattcttgttattattcatgttattattcatgttattattcttaaccaagagaaaatatctatcctgttcctttttggaactgtttatctcatcttcaactcaatttccaactcacatctaccagaagatctcccgctaatacagcttgggtctccacagtacgtcttggatgtggtcttcccgtacaatctatatacattttgtcagttcatgttctatgattacagtattttctgctttgtrttgtaattgattacatgcttctccctctctttattctgagtccttgatgtcaagggccacatttaactgtttgaggggtagtgagggggactggatacactgagcacctaaaacaaagactcagtatgattctggagtaagtgaacaaatgagtaaatc

SEQ ID NO: 878294 - DNA, 610 bp, Homo sapiens
ccaattgtcttgttcagtttcctataaggtaatatccctttcttaacaataacactgtaccattttcaataacttgtacactacccctttctctttcaattcccataattttatacatttcctaggactagaagattgtagtataaacacgtggttatcagaattaagtcttgctttctacttagaacttttttcttttttataaatgtctaatacttttatatattcagtacttttttattacactttaagttctgggatacatgtgcagaacgtgcaggtttgttacatagatatacacgtgccatggtggtttgctgcacccatyaacctgtcatctacattaggtatttctcctaatgctatccctcccctattccccccaccccctgacagacacctgtgtgtgatgttcccctccctgtgtccatgtgttctcattgttcaactctcacttatgagtgagaacatgtggtatttgcttttccattcctgtgttagtttgctggcagtgatggtttccagcttcatccatgtccctggaaagtacatgaacttaagctttttatggctgcatagtattccatggtgtatatatgtgccacatttt

SEQ ID NO: 878295 - DNA, 711 bp, Homo sapiens
ccaagctcagctctggtctaaaatatacaagataagagttattaggtctggaatgttcttcttgatggtttttggtagcttagagtctgagttttgtctgaaaattcccaatctgagtcaggctttttcctttgccaacatccttatttcaggttatctacccctactaacataggttatgcagtgcaaggtatcttcattcaaatttcatcttcactatttactatttgtataatctttggatatattaatgattttaagccttggcttccacattagttacgtggaattaataatttttctttttttctaggaaatatatgggagaatacatggtatatggtaaataaagtcttaaattcgggtgctggcatattttaatattcaaaaagtaatgcttttatttctttccatacattgaggaagaaaaatgctgggtattcatccattccctcactcarccaatcaatttaaagtctgtattgtagtccagtagtgtattagatataaggaatagaaatcaggggatccaatcactttcctaatgaagcttgctgattaataggggacacagatgtacggacaacctattataatgtaatgacacagatgctgaaaaacatatatattcatatatatttaatatatatgtgtgtgtatgcatgtgtgtgtatatatatgtataccatatatatggtatacatatacata

SEQ ID NO: 878296 - DNA, 638 bp, Homo sapiens
tacagctcaggctgttgcttcagagggtgcaagccccaaaccttgccaggttccatgtggtgttgagcctgtgggtgcacagaagtcaagaattgaggattgggaaccaccatctaaatctctgaggatattggaaaaagctggatgtccaggcagaagtttgctctaggggtgttgtcctcatggagaacctctgctagagcattgcagaagggaaatgtgggtttcaagcccccacacagagtccccactggggcattgcctagtggagccatgagaagaggaccctcatcatccagaccccagaatggtaggtagatccccagcttgcaccgtgcacctggaaaagccatagacactcaacaccagcctttgagagcagccaagagggaggctgtacactacaaagtcacagggctggagctgctctagatcctgggaacccatcccttgtatcagtgtgacctggatatragacatggagtcaaagaagattattttggaactttaagatttgactgccctgctggattttggactttcatgggacctgtatctccttcattttggccaatttctctcatttggaatggctgtatttacccaatgcctgtaccccagttgtatctaggaagtaa

SEQ ID NO: 878297 - DNA, 655 bp, Homo sapiens
tttgaaaagtaagtctattttgttataatgagtcagccacaaataatgagttagcttagcactaaaaaatgggataatcttgattacattccttccatagtgtagtgtatgcatctgtatgtatattgttcgttttcttcatactttttgtgtcataagcacaagggacaataggaatttgatgacttcatgacctgatctaagccattatgattatattgagccatgccttgcaaaaattaatgttgaaaaatgagatcatttatgagatgaaactacgatgtagctttgaaaatataaagcaattttataagttcagtatagtttttaaaaagtaatcttacactcaagagatctgaatctttctaattgtaaagtgagtaaaggagcaaaaataaaacatgttcacattcttttgaagaaacctccacaatagaccmctgtatgtaatgattccttagccaaaggcaaatttcttcgaatttcttcctttggcctctacaatatacataacacatacacattgccagattttaaaaaaattagaaaggattaaaggaattaaataattaagttatttaaatatataaatatagcaacaaaggctatcatatcattaaaaactgaatattataaaatgaatattaaaagttaa

SEQ ID NO: 878298 - DNA, 633 bp, Homo sapiens
gtccccgaggctggagtgcaatgctgcaatcttggctcactgtaacctccatctcccaggttcaagcaatcctcctgcctcagcctcctgagtagctgggactacaggcatgtgccaccactcccagctatttttttgtatttttagtagagatggggtttcactatgttggccagactggtctcgaactcctgacctcctgatccacacacctcagcctcacaaagtgctgggattacaggcgtgagccaccgtgctcggcccagatwtttatccattgtttaaatgggttgtttgttttcatattgcttgcaggttttagtttttgttttttattctggatacagatcctttatataatttgcaaatatttcttcccaaaatgtagtttccccctcctttctcctaacactatatttcagataacagaagttttaaatttttataaagaccaatttatcaatttctttctcttataatatatgcttttggtatcatgtctaaggaatcattgcttatgccaaggtcccaaagactttcttgtatgcttaattctacaagattttaagcttaaaaatattgtcttacattaggtctaaaattggtttcaagttttttataggaagtgaggta

SEQ ID NO: 878299 - DNA, 647 bp, Homo sapiens
aaaaatcttagacagcacataaatatagcaattgtctcagtccattcctgctgctataacaacataccttaggctgcataatttatacacaatagaaatgtgttgcccacagttctggaggctgagaattccaagatcaaggcaccagcagatttggtgtctggtgagggatctcagcttccaagatggctctgtgttattgtttcctcacatggtggaaggaacagaggggcaaaagcagggctcargcactccctgcaacctcttttctaaaagcactaatcccattcactaaggtggtagtgctcatgacttaatcacttccttaaaggtctcaccttctaatactatctaattgggtattgaattccaacatacgaattttggaggaacacatacattcaaacaatagcagcgatatacacagatcctgtgtctgaggtgtcccgaggtatccctctaactcataagccctctttggagaggaggcttttgttgtatacaggtatcctaatgtgtcttacaggatagcactgtgccacctttatttttttctttataattgtgtaatttattattattttgtcatttttccaacttttattttagactcagggagcacatttgcaggtttcttacctggttat

SEQ ID NO: 878300 - DNA, 594 bp, Homo sapiens
attgctacaaaggaaataaaatacctaggaatccaacttaacaaggtatgtgaaggacctcttcaaggagaactacaaaccactgctcaacgaaataaaaaaggacacaaacaaatggaagaacattccatgctcatggattggaagaatcaatgtagtgaaaatggccatactgcccaaggtaatttatagattcgatgccatccccgtcaagccaccaatgactttctccacagaattgggaaaaaaaaacctactttcaagttcatatggaaccaaaaaagagcccacactgccaagacaatcttatggaaaaagaacaaagctggaggcatcacactacctgacttgaaactatactacaaggctacagtaaccaaaacagcatggtactggtaccaaaacagagatatagaccaatggaacaraacagaggcctcagaaataacgccacacatctacaatgatctgatctttgacaaacctgacaagaataagaaatggggaaaggattccccatttaataaatggttctgagaaaaggctagccatgtgtagaaagctgaaactggatcccttccttacaccttatac

SEQ ID NO: 878301 - DNA, 564 bp, Homo sapiens
cctaacaacaaggaagcctagaaaatataggctagttgtgtaccacagaggaagagctgtgcccttaggggttttagaaacatcctacagtctcttccatagcaacctactacatcagttaagtgaagttcacaattcatgaaaatacaaaatgtaggagcttatattagtctgttctcacgctgctataaagaactaaatgagagtgggtgatttatgaagaaaacaggtttaactgactcacaggtccacagacttaacaggaagcatcactgggaggactcaggaaacttacagtcatggcagaaggagaagggaaacaagcacatcttaccatggcagagcaggagggagagagaaagtgaaggaggacatatcayacactttcaaatggtcaaatcttgtgaagaactcgctatcatgagaacagcaagggtgaaatctgcccccatgatctgatcagctcccaccaggcccctctcctgacgtgtgacgattacaatttgacatgagatttgagtggagacacagagccagactatataattttgcccctagctcctc

SEQ ID NO: 878302 - DNA, 427 bp, Homo sapiens
gaagagctgtgtagcctccatcatccatagaggtggcaggaacaccatttgcacaagtcagaatgaggaaaggtaggagacttaggatgtgaggcttgagagaaaaacagttgacaaagcagcagcaaaattctcctagtgtacacagcctattctcctgaggggagtcatataagtgcaaatataacatctatagctacaggaattttttgtttgtgctcttttaatatttattttatctatttgtcacaaacatgtaatgaaygttggtatgcatgtatctgcctcctccactggactctgagaaaccacacacccagaatcttgtacatggttggaactaaataaaccacactgttagaatgcatgccaatctttaaaatagactattgtaatgttaatttatacctacatacatgacttaatt

SEQ ID NO: 878303 - DNA, 427 bp, Homo sapiens
gaagagctgtgtagcctccatcatccatagaggtggcaggaacaccatttgcacaagtcagaatgaggaaaggtaggagacttaggatgtgaggcttgagagaaaaacagttgacaaagcagcagcaaaattctcctagtgtacacagcctattctcctgaggggagtcatataagtgcaaatataacatctatagctacaggaattttttgtttgtgctcttttaatatttattttatctatttgtcacaaacatgtaatgaatrttggtatgcatgtatctgcctcctccactggactctgagaaaccacacacccagaatcttgtacatggttggaactaaataaaccacactgttagaatgcatgccaatctttaaaatagactattgtaatgttaatttatacctacatacatgacttaatt

SEQ ID NO: 878304 - DNA, 590 bp, Homo sapiens
ctactttagaacacacacacacacaaacgccagcagtcagcagtcagaacctccatcttccattctgggtcatctgaatatagccctatcttcaattatttccaaactcagacctaaacaaaactgtcctcacatcctgcagtccttaagccactgctctgtccctctccttcataatcaagcttctcaaagtagtccaacatctctccttcctcatcatccattaacttttctcccgtggggatgatgttctgactccagccttcatcatgccaaccaaacaaccatcaccaagacaccagtgtttccaaattgccatattctaagttgccagcttcttactagacccctttgatgcagcccaacttcaaaattggctttgcacaggagagacttcacaaacgagcaaacaaagcaaagcaaagacaagtttattagagaaacagrgtacaggaaaatggctgctctatagacagagtagtagcagtagcagtagcagtagtagcagcagcagaagcagtagtagcagcagcagaagcagcagccctcgtagattgctggctagctatataatggctattccttgatta

SEQ ID NO: 878305 - DNA, 619 bp, Homo sapiens
acattccaggagactggatataggaagcaacatggaaggggcaaaagatatttgtcagtggtctctatagttttctagaagcagccaaatgatagataattctaaaatccaaaaaaaactctgaaaacaaaaattttcacaagttttcaacaaaaattcatttgaaggcaaaacctaatctgaattaatatgacactatgtaacactatgtatgtcttctttttttgtttgtttkttttagagataggatcttgctctgtctcctaggctggagtggagtggcacactcatagctcactgtaacttcgaattcctgggctcaaatgatcctccttcttcagcctcttgagcagctaggactacagacacatacaccatatctggttaattataaattttttttgtagagatggaatctcgctatgttgctgaggctggtcttgttgcctggtctcaagtgattcttcagcctcagcctcccaaagcactgggattacatgtgtgagccactacaagtggccttatggtcttcatttatcccacttagggtgaatactgttataatttgttgcagttaattatgaggtgctgctccagacttcaatggagttattccata

SEQ ID NO: 878306 - DNA, 672 bp, Homo sapiens
aatctaaaaatccttcaaattggtcactcattatttcagtacttactgagctaaacattattttgttacctataaaggagagaatgtaaaacactgtatgtctttggcattactagaaaggggtatttaaactttgtacctttttttgccataaaattgaagttacagtaagatgaaatggaagctcacaagccctgttggtgtggaattccactaataatgtcagattgttgccagaaaaacaaattttgtcatgcagcttgcaattaatgtaccaaaaatttaccagcccatataattttatcagtctgccttccccagaggaagtaaacagataataaaactaaygaaatcatatttcttgaccactctcatccaatataaattgttacttgtccttcgagtattagacagtgagctgtttacaaggccattcaaatgtctgggctagttaatggtagaggcagtagtctaaaatatggagtattcctgagtcagcaaagaggatcctgcattgtgaggaagcccccctaagtcattaccaagtgcagatctgggtttgatgggcctctgtcaaaagttgttttgcatccgcatttctgtgttccctgaaaacaccatgaaatactgaactttaatcagtaatgcaacaaatgagaaaatgctcagtgt

SEQ ID NO: 878307 - DNA, 662 bp, Homo sapiens
ccgacctgcaacataaacttatatgaaaagtgttatggaaacatcattcaaaagaactatactctacatttgaattggtcatggactgactgaaacaaaaaagtctctagatggtgacaaacaagtagagaggaagaaatcaacaagataacgaaattaaagttaggtaaatccctgtaagtgtgctaggcttaggagagggcattgaaacccatcttatttaagttgcaaagataagagtgacctgaggtggcagctgagtaacagttgaaattcccaaagctgtaagtttcagatcactattaattagaataagagacaaaatttcacactgactattttaaaaaatgatcccttgacttaatacaattcaaatgccttgtatctgcaggtcctaggaaagtatgtggcataaagtttgcagtcaataaatgttgactgtgtgattgaataaggcaagtggcaagttgaatggtcaccaactagtgaaatataattaaggtcytttccatctatctctacattctggtaaggtaataaacaccaaagatataattgccttatggtggaagaagctggtccaagttgagactccagttataacttgttagaagaatcgctgggaattctccttccatgctgtgccttttgtctccattact

SEQ ID NO: 878308 - DNA, 603 bp, Homo sapiens
ggggccagatcccttatgaattactaatccctcatgaattagtaattacattctccattcaccttcaagtatcctgaggcaccttttgtcacctgctctctatacttggaatatctggctgtaatccaaacttctgcaatgtccaaacatctttcgggatatagttcaagtgttcctgtcttttgcatgatgctttcttcgaggttctcaaccagaagtaatccatatcctttttccaaacaattttaatttcatgcatttgattcatacttttttttccctctcaagtttgtgagcaaatatcactagaaagaagaytcttgaataggaactcttttctttctagtgatattttttttcatctctgtattccccatcaggcttacaacaatgcttttagaaaagcagagagatgaaaattatgcaatataaaaatggtgctttttctttgtgtaactaataactataattctgtaggaaattgtaattcatagtgatttttgcaattattgtcctaatacaatcttaacaacaaacctggaggaaggaattaatagcatggacatttggtagatgaagaaattggaggtcagagaggctggt

SEQ ID NO: 878309 - DNA, 610 bp, Homo sapiens
gacaaaggacttttcatatcaaaaatacttctaaaactcaataataaaaagacaaatagctcacatagacacaacatatatgtgcgtatatatgtatatatatcagcagaagacttcaacagatatgtcacaaacatctatataataaatatgtaatataatagattatatgtatatgcrtgtgaatatgtgtgtgtatgaatgactaataaacacataaaaaagtattcagcataaatatttacaagggaaaggcaatttaaaatcacaatgagatacgtacccactaaaatggctaaaataaaaaagattatcaaagccaatcctgtcatatgtatggaacaacagatacactcatatattgctgggggaaagaaaacaaataatattggtttttgccattacttttaatgggaaaaactgcagttagttttgcaccaacctaatatgaccactttggaaaactgttcagtagtttgtttaaaaagcagtttactggccgggctcggtggctcacgcctgtaatcccagcactttgggaggccgaggcgggcggagatccagaccattccggctaacacggtgaaatcccgtctctactaaaaataca

SEQ ID NO: 878310 - DNA, 610 bp, Homo sapiens
gacaaaggacttttcatatcaaaaatacttctaaaactcaataataaaaagacaaatagctcacatagacacaacatatatgtgcgtatatatgtatatatatcagcagaagacttcaacagatatgtcacaaacatctatataataaatatgtaatataatagattatatgtatatgcgtgtgaatatgtgtgtgtatgaatgactaataaacacataaaaaagtattcagcataaatatttacaagggaaaggcaatttaaratcacaatgagatacgtacccactaaaatggctaaaataaaaaagattatcaaagccaatcctgtcatatgtatggaacaacagatacactcatatattgctgggggaaagaaaacaaataatattggtttttgccattacttttaatgggaaaaactgcagttagttttgcaccaacctaatatgaccactttggaaaactgttcagtagtttgtttaaaaagcagtttactggccgggctcggtggctcacgcctgtaatcccagcactttgggaggccgaggcgggcggagatccagaccattccggctaacacggtgaaatcccgtctctactaaaaataca

SEQ ID NO: 878311 - DNA, 694 bp, Homo sapiens
ctctgatgctaggtgcacatataattgttatatcctcttagtggatttgggtagtatggacattttaacaattaagtctttcaatccatgaacacaaaatgtcttttttattaagtcataagttgatataacaacttatgacttaaaatctatttttttattttttatttttattattatactttaagttttagggtacaygtgcacattgtacaggttagttacatatgtatacatgtgccatgctggtgcgctgcacccactaactcatcatctagcattaggtgtatctcccaatgctatccctcccgcctccccccaccccacaacagtccccagagtgcgatgttccccttcctgtgtccatgtgttctcattgttcaattcccacctgtgagtgagaatatgcggtgtttggttttttgttcttgcgatagtttactgagaatgatgatttccaatttcatccatgtccctacaaaggacatgaactcatccttttttatggctgcatagtattccatggtgtatatgtgccacattttcttaatccagtctatcattgatggacatttgggttggttccaagtctttgctattgtgaataatgcctcaataaacatacgtgtgcgtgtgtctttatagcagcatgatttatagacctttgggtatatacccagtaatgggatggctg

SEQ ID NO: 878312 - DNA, 694 bp, Homo sapiens
ctctgatgctaggtgcacatataattgttatatcctcttagtggatttgggtagtatggacattttaacaattaagtctttcaatccatgaacacaaaatgtcttttttattaagtcataagttgatataacaacttatgacttaaaatctatttttttattttttatttttattattatactttaagttttagggtacacgtgcacattgtrcaggttagttacatatgtatacatgtgccatgctggtgcgctgcacccactaactcatcatctagcattaggtgtatctcccaatgctatccctcccgcctccccccaccccacaacagtccccagagtgcgatgttccccttcctgtgtccatgtgttctcattgttcaattcccacctgtgagtgagaatatgcggtgtttggttttttgttcttgcgatagtttactgagaatgatgatttccaatttcatccatgtccctacaaaggacatgaactcatccttttttatggctgcatagtattccatggtgtatatgtgccacattttcttaatccagtctatcattgatggacatttgggttggttccaagtctttgctattgtgaataatgcctcaataaacatacgtgtgcgtgtgtctttatagcagcatgatttatagacctttgggtatatacccagtaatgggatggctg

SEQ ID NO: 878313 - DNA, 694 bp, Homo sapiens
ctctgatgctaggtgcacatataattgttatatcctcttagtggatttgggtagtatggacattttaacaattaagtctttcaatccatgaacacaaaatgtcttttttattaagtcataagttgatataacaacttatgacttaaaatctatttttttattttttatttttattattatactttaagttttagggtacacgtgcacattgtacaggttagttacatatgtatacatgtgccatgctggtgcgctgcacccactaactcrtcatctagcattaggtgtatctcccaatgctatccctcccgcctccccccaccccacaacagtccccagagtgcgatgttccccttcctgtgtccatgtgttctcattgttcaattcccacctgtgagtgagaatatgcggtgtttggttttttgttcttgcgatagtttactgagaatgatgatttccaatttcatccatgtccctacaaaggacatgaactcatccttttttatggctgcatagtattccatggtgtatatgtgccacattttcttaatccagtctatcattgatggacatttgggttggttccaagtctttgctattgtgaataatgcctcaataaacatacgtgtgcgtgtgtctttatagcagcatgatttatagacctttgggtatatacccagtaatgggatggctg

SEQ ID NO: 878314 - DNA, 642 bp, Homo sapiens
tttcactttaatttctatgttacccagctctgaagtcactactcaggcttatcatggtccacagacaagaaggggggcaaatgaccaggactggtcaagaatatatctccatttctttgggaccaatttctaaagatttattttgctcatttgattgggccatttcctcatatctttgtgtgcttttccctacattttttatgccttatsatatttagttgataatatgacatttgaaaaaacagctatctcatccgattttcacaaactggcctcttacaggtgaagggcttcaccaattatcccagctagagatttgggggactctctgaaaccttttctggggatgtgtcttctctgggcttgtgtgtgtaatttcccagtgaaaaagatttgcccgtttctttcaggagcctgtaatatcttgttccccctggtgtctctctgaagtactgcagtatctccaatgctgtaacaagctgtgacactcatttctgttctcagaggtcccaacctgacctgcaaaatatgccactgttctcatcagcattctgaatcaggcaagacggaaacctatttcttcagaagtcccccaaaacacaagaattttgaatgtgcattccactctcttctccaaaggag

SEQ ID NO: 878315 - DNA, 625 bp, Homo sapiens
tgatgtttcctgccctgtgtccaagtgatctcattgttcaattcccacctatgagtgagaacatgcggtgtttgattttctgtccttgtgatagtctgctgagaatgacagtttccagcttcatccatgtccctgcaaaggacaygaactcatcttttttatggctgcatagtattccatggtgtatatgtgccacattttcttaatccagtctatcattgatggacatttggtttggttccaagtctttgctattgtgaatagtgccacaataaacatacatgtgcatgtgtctttatactagcatgatttataatcctttgggtatataaccagtaatgggattgctgggtcaaatggtaattctagttctagatccttgaggaatcgccacactgtgttcggcaatggttgagctaatttacactcccaccaacagtgtaaaagcattcctatttctccacatcctctccagcgtctgttgtttcctgactttttaatgatcaccattctaactggcgtgagatgatatctcattgtgattttgatttgcatttctctatccagtgatcatgagcattttttcatgtgtctgttggctgcatagatgtcttcttttgagaag

SEQ ID NO: 878316 - DNA, 625 bp, Homo sapiens
tgatgtttcctgccctgtgtccaagtgatctcattgttcaattcccacctatgagtgagaacatgcggtgtttgattttctgtccttgtgatagtctgctgagaatgacagtttccagcttcatccatgtccctgcaaaggacacgaactcatcttttttatggctgcatagtattccatggtgtatatgtgccacattttcttaatccagtctatcattgatggacatttggtttggttccaagtctttgctattgtgaatagtgccacaataaacatacatgtgcatgtgtctttatactagcatgatttataatcctttgggtatataaccagtaatgggattgctgggtcaaatggtaattctagttctagatccttgaggaatcgccacactgtgttcggcaatggttgarctaatttacactcccaccaacagtgtaaaagcattcctatttctccacatcctctccagcgtctgttgtttcctgactttttaatgatcaccattctaactggcgtgagatgatatctcattgtgattttgatttgcatttctctatccagtgatcatgagcattttttcatgtgtctgttggctgcatagatgtcttcttttgagaag

SEQ ID NO: 878317 - DNA, 661 bp, Homo sapiens
caggtgttagggcatgggtatctttgggaccattattaagaccgtgtaccacagtgtgttttcctctgctgggcacaagtgtgtaccttgaaatctttcttttgcacaatatccacaaatatcatctcattccatccccttattgactcaagcgatgcttagagaggttaagtgggtttgcgtgttgtcatacaattaagtcacgaatcttgtagctgagtccagggcccatccttttacattatagaaagcaaacaagttcacacccaggggcctcttcccccatcagagccaggatatgatatcctcagtgctcaaatattgctggtgcccagaactaaggaaaatgacaggttttggggtcttagctctttgggcagatttttttwaagaaaagattaggcgatccttagttctcctactcttacaacaggaaagatattgatttttcacaaagactcaatgtctgacctttgaccttgttacatgcccatggtcctaggtagttcagtacagttgcagaattagaatgtgattagcttaggaaaccaagtttctaaaggttgtatttctcaaagaagaaaaaatactaatttctaaaagtaggctagcggatatttatgtaatttaggcacaagatgatggacccctctcctcaatt

SEQ ID NO: 878318 - DNA, 661 bp, Homo sapiens
caggtgttagggcatgggtatctttgggaccattattaagaccgtgtaccacagtgtgttttcctctgctgggcacaagtgtgtaccttgaaatctttcttttgcacaatatccacaaatatcatctcattccatccccttattgactcaagcgatgcttagagaggttaagtgggtttgcgtgttgtcatacaattaagtcacgaatcttgtagctgagtccagggcccatccttttacattatagaaagcaaacaagttcacacccaggggcctcttcccccatcagagccaggatatgatatcctcagtgctcaaatattgctggtgcccagaactaaggaaaatgacaggttttggggtcttagctctttgggcagattttttttaagaaaagattaggcgatccttagttctcctactcttacaacaggaaagatattgatttttcayaaagactcaatgtctgacctttgaccttgttacatgcccatggtcctaggtagttcagtacagttgcagaattagaatgtgattagcttaggaaaccaagtttctaaaggttgtatttctcaaagaagaaaaaatactaatttctaaaagtaggctagcggatatttatgtaatttaggcacaagatgatggacccctctcctcaatt

SEQ ID NO: 878319 - DNA, 612 bp, Homo sapiens
aaaatttatattttattatgttaacaaaatatggacatattaatgaaataattgtatatattattttgtttttatgcttagtttctgaaattaagaatgatgaaaaatatcagttaatttttttttttttttttttttttgagacggagttttcctcgtttcccaggctggaatgcagtggcgctatctcagctcactacaacctccacctcccaggttcaagcgattctcctgcctcagcctcccaagtagctgggatcacaggcatgcatcaccacgcccagctaattttgtatttttagtagagacagggtttctccatattggtcaagctggtctttaactcctgacctcaggtcatccacccacctcggcctcccaaagtgctgggattacaggcatgagccaccacgcccrgccttttaatttcaaatgaataaaaatggggaaacatgaaagatggagcataggatatggggtaatcagcctccaagatgtccctttgggccacctactcttattctctattgacccttcattattttcttctcttatcttctgctttcaatagtccatccagttttgtactctatttgttaggcttttcaggac

SEQ ID NO: 878320 - DNA, 592 bp, Homo sapiens
tgtattcgtttgagaaatgtatattcaaatgttttgcccattttaaaattagattattagatttttttcctatagagttgtttgagctccttatatactctagttattaatcctttgtcagatgggtagtttgaaaatatttacttccaacctgtgggttgtctgtttactttgttggttgtttcctttaccttgcaggagctttttaacttgatatgatcccatttgtctatttttgctttggttgtctgtgttttgggggtattactcaaaaaatcttttccagacagttgacctagagagcttccctaatgttttcttgtagtagtttaatagttkgaggtcttaaatttaagtctttgatccattttgatttgaattttgtatatggtcagagatagggatctagtttcattgttctgcatattgatatccagttcacctagcaccatttactgaagacactgtcttttccctaaggtatgttcttggtacctttgtcagaaatgaattcactgtaggtatgtggatttgttcatgggttctctattctgttccattgatgtatgtgtctgttttatgccagtacaat

SEQ ID NO: 878321 - DNA, 679 bp, Homo sapiens
caggtatactattgtacattcctactggctgactctctttttatctttttcattctctctcttacccttgatgttccagatgtgatgatcctctttggtttctctgaataccaaactcatccctgcagtacagcatttkcagtagttgtttcctctccctacagagctcaccactctgatgtttgcttgactggccctttcaggtcatccaccttagactcaaatggggagaatttcctggatgggtcagttattgtcccatcagcatagcacttatcaagatctcacgattgtcttatttgtttattaggacttatgttttgtctttcctctcccaccactatatttttagtacctagaactacaactagtatataggagatgcatagtagttgttgaaatgtcacagggattaatataatacatgaccgagtatgctgcatgtgaacattacacattagtggaaacctgtgtaacatgtctgcattcatgttacagagaataacacgtctacatatattacatatgttacaaagaataacatgcctacatacatgttacagaaaataacatgttctttagaaccaaactataccaagagagaatccataattcaataatataatcaagagtggcaattgacctagttatttgatcattcagactctagtaaaaattt

SEQ ID NO: 878322 - DNA, 593 bp, Homo sapiens
cactgatctttctattatccctatagttttggcttttccacagtgtcatatagttggaatcatacagtatgtagccttttcagattggcttattttacttagtaatatgcatttagggttccttcatgtcttttcatagcttgatagttcatttcttsttagcactgaataatattccattctcaacatgtttgtttatttatttgtttatttatttatttatttatttattcttgcttccaagacatcttgcttccaagttttggtgatcatgaacaaagctgctataagaaaccatgtgcaggtttttgtgtggacataagttttcgactcctttgggtaaacaccaaagagtacagctgctggtttatacggtaaagatatgtttagtttggtaagaaaccactaaactatcctccaaagtggctttaccattttgctttcctgccagcaatgaatgagagttctgctgctccacattctcaccagcatttgttgttgtcagtgttccagattttggccatttaataggtatgtagtaatatctcattattgttttaatttgcatttttccgatgatgtataatgtggag

SEQ ID NO: 878323 - DNA, 603 bp, Homo sapiens
ttgttcattcacaacctcctgctttagtctggtggcagccttcgcttacagatgtcttttctgttcatctttcttggtctaagtcaagagttaactcctgggaatctgtgctcagtcctatgaagaataatcttccatttcatttaactcctgtagcacttgatgtacttgtgtaggttagtacttaggcaggggttaatggttgacttatctgtttcactggctgatggtagactcttaaccagatgccagaacctctcaggcagaagggatcacatgttcccccaccccccgccgttttaccttaagctctccatgcattagtstcacctcattaaggcattttagggtgacattggttcatccaagtactggatatggcttccgcttgaaattctcaggattagattctttatatatggccaaataataattaaccaactcaaatgaaatttcatgaaatatcctaaagatactctacttcttctcagatattatttgtgcatttcaacagagatcttacatctttattttattaatatcttagtctgttggggctgctgtaccaaaattccatacattggatagcttataaagcacaga

SEQ ID NO: 878324 - DNA, 657 bp, Homo sapiens
acaaacagttgaaaagtgaaaaattcagctacacaatggagtgtttccaaacctttgatggatggctgtccccaccctccagctcactgaagtgattatttgtttgagtgggctgtagacacagttgtagacaacacaactttatcagtgtcgccaatggtcagagtttgctgggagaaactattatatttcaagcttgcaaatggctctaaaaaccatgacgtgggaaaggggtggggaaatgcatccatatatcttcattaaggtttcttattatgcatctctgaatattttctgggagatctgatacatagcttctaatttagcagagactgtatcaaatcaggttgagtgacaggaacaattagtttgcttctcttattcaacaacaaattaagacaaactcccagaaatctattctttgactagttcctacactctcttcttggtcatcataagtaatatgcaaagaamtatgcaccagtagttaatgaagggacacggttctcccttaatggtgcattttccatccggaaatgaagaatcaattcgtgaaaatggccatactgcccaagggaatttatagattcaatgccatccccaccaagctaccaatgactttcttcgcagaattggaaaaaactactttaaagttca

SEQ ID NO: 878325 - DNA, 565 bp, Homo sapiens
tcctgggaatggaaacaatcagatggtcaggaagggcgagggtgtcaggggatagaaccctgggcagctcagtgggaccaggaagtctgacaacagaattctccctgacttcagtgtttcccattatagatagctgcagattttcctgattgatcccacaattagtaagaactctctggagtttaaacttcatgccccttgccctcttggggaaggagattatcttcctctaaaatatgagagggtaaagagaagtccttgaggctgaataagcagttatttgatctgcgggggactcaagttttgcctgcctggcatctattcacctttattctgaaacagcatcctggttctattttgcattatgttttcttgaaaatgctgatttktccagggatatgcatgagatctaagccaggctatcataattcaaaaccaggaattgctgagagttattgggaaataaaagcagtttctctgagtatttgctaagccagtggcaatatgaaccttgagcttctagtaaccatcttggcctctcagcgagagggccctcccaagagaa

SEQ ID NO: 878326 - DNA, 657 bp, Homo sapiens
gtgctacatttacattgaagaaaaaaactacaactccatttttaaatataaaaagtcaacattgtttttaaatttagaaaaatcatcagggtgatgctatggttgaaatagaaggtgagagattcaacatgttttcatgtaaaaaataaaacaaatttaaacagtgcattgtatgcctcaattactttattgattaccttgctgaaaagaatttcttttttttttgtactttaagttttagggtacatgtgcacaatgtgcaggtttgttacataggtatacatgtgtcatgtcggtttgctgcatccattaactcrtcatttacattaggtatttctcctaatgctacccctccccctgcctcccaccccacgacaagcccccatgtgtgatgctcaccgccctgtgtccaagtgttctcattgttcaattcccacctatgagtgagaacatgcagtgtttggttttctgtccttgcgatagtttgctgaaaataatggtttccagcttcatccatgtccctacaaaggacataaactcattcttttttatgtctgcataatattccatggtgtatatgtgccacattttcttaatccagtctatcattgatggaaatttgggttggttccaagtttttgctattgtaaatagtgc

SEQ ID NO: 878327 - DNA, 657 bp, Homo sapiens
gtgctacatttacattgaagaaaaaaactacaactccatttttaaatataaaaagtcaacattgtttttaaatttagaaaaatcatcagggtgatgctatggttgaaatagaaggtgagagattcaacatgttttcatgtaaaaaataaaacaaatttaaacagtgcattgtatgcctcaattactttattgattaccttgctgaaaagaatttcttttttttttgtactttaagttttagggtacatgtgcacaatgtgcaggtttgttacataggtatacatgtgtcatgtcggtttgctgcatccattaactcatcattyacattaggtatttctcctaatgctacccctccccctgcctcccaccccacgacaagcccccatgtgtgatgctcaccgccctgtgtccaagtgttctcattgttcaattcccacctatgagtgagaacatgcagtgtttggttttctgtccttgcgatagtttgctgaaaataatggtttccagcttcatccatgtccctacaaaggacataaactcattcttttttatgtctgcataatattccatggtgtatatgtgccacattttcttaatccagtctatcattgatggaaatttgggttggttccaagtttttgctattgtaaatagtgc

SEQ ID NO: 878328 - DNA, 623 bp, Homo sapiens
aaaaagagcatttcaaaactgctctatcaaaagaaaggttcaactttgttagttgagtagatacagcataaacaagtttctgagaatgcttctgtccagtttttatgggaagatatttcctttttcaccttagccctgaaagcgctccaaaagtccagttccagatactacaaaaggagtgtttcaggactgctctatgaaagggagtgttcaacttttgacttgaatgcaaacatcagaaagcagtttctcagaacgctgctgtgtgctttttayatgtattcccgcttccagcgaaatccccaaagctagccaaatatccacttgcagattccagaaaaagagtgtttcaaaactgctccttcaaaacggtggttcaattctcttagttgagtacacacatctcaaataagtttctgagaatgcttctgtctagttgttatgggaagatatttccttttccaacataggcctgaaagcgctccaaatgtccacttccagatactacaaaaggagtgattcaaacctgctctatgatagggaatgttcaactctgtgtcctgaatacaaacatcacaaagatgtttctcagaacgctgcagtctgcaatttgtatgaattcc

SEQ ID NO: 878329 - DNA, 587 bp, Homo sapiens
aaaaagagcatttcaaaactgctctatcaaaagaaaggttcaactttgttagttgagtagatacagcataaacaagtttctgagaatgcttctgtccagtttttatgggaagatatttcctttttcaccttagccctgaaagcgctccaaaagtccagttccagatactacaaaaggagtgtttcaggactgctctatgaaagggagtgttcaacttttgacttgaatgcaaacatcagaaagcagtttctcagaacgctgctgtgtgctttttatatgtattcccgcttccagcgaaatccscaaagctagccaaatatccacttgcagattccagaaaaagagtgtttcaaaactgctccttcaaaacggtggttcaattctcttagttgagtacacacatctcaaataagtttctgagaatgcttctgtctagttgttatgggaagatatttccttttccaacataggcctgaaagcgctccaaatgtccacttccagatactacaaaaggagtgattcaaacctgctctatgatagggaatgttcaactctgtgtcctgaatacaaacatcacaaagatgttt

SEQ ID NO: 878330 - DNA, 606 bp, Homo sapiens
aactgctctatcaaaagaaaggttcaactttgttagttgagtagatacagcataaacaagtttctgagaatgcttctgtccagtttttatgggaagatatttcctttttcaccttagccctgaaagcgctccaaaagtccagttccagatactacaaaaggagtgtttcaggactgctctatgaaagggagtgttcaacttttgacttgaatgcaaacatcagaaagcagtttctcacaacgctgctgtgtgctttttayatgtattcccgcttccagcgaaatccccaaagctagccaaatatccacttgcagattccagaaaaagagtgtttcaaaactgctccttcaaaacggtggttcaattctcttagttgagtacacacatctcaaataagtttctgagaatgcttctgtctagttgttatgggaagatatttccttttccaacataggcctgaaagcgctccaaatgtccacttccagatactacaaaaggagtgattcaaacctgctctatgatagggaatgttcaactctgtgtcctgaatacaaacatcacaaagatgtttctcagaacgctgcagtctgcaatttgtatgaattc

SEQ ID NO: 878331 - DNA, 637 bp, Homo sapiens
catcacaaagatgtttctcagaacgctgcagtctgcaatttgtatgaattcccgcttccaacgaaatcctcaaaactagccaaatatccacttgcagattccacaaaaagagcatttcaaaactgctctatcaaaagaaaggttcaactttgttagttgagtagatacagcataaacaagtttctgagaatgcttctgtccagtttttatgggaagatatttcctttttcaccttagccctgaaagcgctccaaaagtccagttccagatactacaaaaggagtgtttcaggactgctctatgaaagggagtgttcaacttttgacttgaatgcaaacatcagaaagcagtttctcacaacgctgctgtgtgctttttatatgtattcccgyttccagcgaaatccccaaagctagccaaatatccacttgcagattccagaaaaagagtgtttcaaaactgctccttcaaaacggtggttcaattctcttagttgagtacacacatctcaaataagtttctgagaatgcttctgtctagttgttatgggaagatatttccttttccaacataggcctgaaagcgctccaaatgtccacttccagatactacaaaaggagtgattcaaacctgctct

SEQ ID NO: 878332 - DNA, 637 bp, Homo sapiens
catcacaaagatgtttctcagaacgctgcagtctgcaatttgtatgaattcccgcttccaacgaaatcctcaaaactagccaaatatccacttgcagattccacaaaaagagcatttcaaaactgctctatcaaaagaaaggttcaactttgttagttgagtagatacagcataaacaagtttctgagaatgcttctgtccagtttttatgggaagatatttcctttttcaccttagccctgaaagcgctccaaaagtccagttccagatactacaaaaggagtgtttcaggactgctctatgaaagggagtgttcaacttttgacttgaatgcaaacatcagaaagcagtttctcacaacgctgctgtgtgctttttatatgtattcccgcytccagcgaaatccccaaagctagccaaatatccacttgcagattccagaaaaagagtgtttcaaaactgctccttcaaaacggtggttcaattctcttagttgagtacacacatctcaaataagtttctgagaatgcttctgtctagttgttatgggaagatatttccttttccaacataggcctgaaagcgctccaaatgtccacttccagatactacaaaaggagtgattcaaacctgctct

SEQ ID NO: 878333 - DNA, 641 bp, Homo sapiens
tatgaattcccgcttccaacgaaatcctcaaaactagccaaatatccacttgcagattccacaaaaagagcatttcaaaactgctctatcaaaagaaaggttcaactttgttagttgagtagatacagcataaacaagtttctgagaatgcttctgtccagtttttatgggaagatatttcctttttcaccttagccctgaaagcgctccaaaagtccagttccagatactacaaaaggagtgtttcaggactgctctatgaaagggagtgttcaacttttgacttgaatgcaaacatcagaaagcagtttctcacaacgctgctgtgtgctttttatatgtattcccgcttccagcgaaatccccaaagctagccaaatatccacwtgcagattccagaaaaagagtgtttcaaaactgctccttcaaaacggtggttcaattctcttagttgagtacacacatctcaaataagtttctgagaatgcttctgtctagttgttatgggaagatatttccttttccaacataggcctgaaagcgctccaaatgtccacttccagatactacaaaaggagtgattcaaacctgctctatgatagggaatgttcaactctgtgtcctgaatacaaacatcacaa

SEQ ID NO: 878334 - DNA, 662 bp, Homo sapiens
tctgctttttatatgtaatcccgtttccaacgaaatcctcaaatctagccaaatagccacttgcagattccacaaaaagagtgtttcaaaactgttctgtctaaagaaatgttcaactgtgttagttgaggacacacatcagaaactagtttctgagaatgcttctgtctagttgttatgggaagatatttccttttccaacgtaggcctgaaagcgatcaaaatgtccacttccatatactaaaaaaagagtgtttcaaacctgctctaccaaagggaatgttctactctgtgacttgaatgcaaacatcccaaagaagtttctgagaatgcttctgtctagatttcatctgaagacaatcccgtttccaacgaaatcctcaaggctaggcaaatatcctcttgcagattccagaaaaagagtgtttcaaaactgctccttcaaaasggtggttcaattctcttagttgagtacacacatctcaaataagtttctgagaatgcttctgcctagttgttacgggaagatatttccctttccaacataggcctgaaagcgctccaaatgtccacttccagatactacaaaaagagtgtttcaaacctgctctaccaaagggaatgttctgctctgtgacttgaatgcaaacatcccaaagaag

SEQ ID NO: 878335 - DNA, 706 bp, Homo sapiens
tgcaagtggctatttggctagatttgaggatttcgttggaaacgggattacatataaaaagcagacagcagcattctcagaaagttctttgtgatgattgcattcaagtcacagaattgaacattccctttcacagagcaggtttgaaacactctttttgtagtgtgtgtaagtggacatttggagcactttccggcctaaggtgaaaaaggaaatatcttcccataaaaactagacagaagcattctcagaaacttactcgtgatgtgtgtcctcaactaaaggagtagaaccttccttttcatagagaagttttgaaacgctctttttgtggaatctgcaagtggatatttggctagttttgaggatttcgttggaagcgggaattcatacaaattgcagactgcagcgttctsagaaacatctttgtgatgtttgtattcaggacacagagttgaacattccctatcatagagcaggtttgaatcactccttttgtagtatctggaagtggacatttggagcgctttcaggcctatgttggaaaaggaaatatcttcccataacaactagacagaagcattctcagaaacttatttgagatgtgtgtactcaactaagagaattgaaccacccttttgaaggagcagttttgaaacactctttttctggaatctgcaagtggatatttggctagctttgggga

SEQ ID NO: 878336 - DNA, 627 bp, Homo sapiens
gtgatgattgcattcaagtcacagaattgaacattccctttcacagagcaggtttgaaacactctttttgtagtgtgtgtaagtggacatttggagcactttccggcctaaggtgaaaaaggaaatatcttcccataaaaactagacagaagcattctcagaaacttactcgtgatgtgtgtcctcaactaaaggagtagaaccttccttttcatagagaagttttgaaacgctctttttgtggaatctgcaagtggatatttggctagttttgaggatttcgttggaagcgggaattcatacaaattgcagactgcagcgttctgagaaacatctttstgatgtttgtattcaggacacagagttgaacattccctatcatagagcaggtttgaatcactccttttgtagtatctggaagtggacatttggagcgctttcaggcctatgttggaaaaggaaatatcttcccataacaactagacagaagcattctcagaaacttatttgagatgtgtgtactcaactaagagaattgaaccacccttttgaaggagcagttttgaaacactctttttctggaatctgcaagtggatatttggctagctttggggatttcgctggaa

SEQ ID NO: 878337 - DNA, 569 bp, Homo sapiens
tgtcctcaactaaaggagtagaaccttccttttcatagagaagttttgaaacgctctttttgtggaatctgcaagtggatatttggctagttttgaggatttcgttggaagcgggaattcatacaaattgcagactgcagcgttctgagaaacatctttgtgatgtttgtattcaggacacagagttgaacattccctatcatagagcaggtttgaatcactccttttgtagtatctggaagtggacatttggagcgctttcaggcctatgttggaaaaggaaatatcttcccataacaactagacagaagcattctcagaaacttatttgagatgkgtgtactcaactaagagaattgaaccacccttttgaaggagcagttttgaaacactctttttctggaatctgcaagtggatatttggctagctttggggatttcgctggaagcgggaatacatataaaaagcacacagcagcgttgtgagaaactgctttctgatgtttgcattcaagtcaaaagttgaacactccctttcatagagcagtcctgaaacactccttttgtag

SEQ ID NO: 878338 - DNA, 639 bp, Homo sapiens
ctagttttgaggatttcgttggaagcgggaattcatacaaattgcagactgcagcgttctgagaaacatctttgtgatgtttgtattcaggacacagagttgaacattccctatcatagagcaggtttgaatcactccttttgtagtatctggaagtggacatttggagcgctttcaggcctatgttggaaaaggaaatatcttcccataacaactagacagaagcattctcagaaacttatttgagatgtgtgtactcaactaagagaattgaaccacccttttgaaggagcagttttgaaacactctttttctggaatctgcaagtggatatttggctagctttggggatttcsctggaagcgggaatacatataaaaagcacacagcagcgttgtgagaaactgctttctgatgtttgcattcaagtcaaaagttgaacactccctttcatagagcagtcctgaaacactccttttgtagtatctggaactggacttttggagcgctttcagggctaaggtgaaaaaggaaatatcttcccataaaaactggacagaagcattctcagaaacttgtttatgctctatctactcaactaacaaagttgaacctttcttttgatagagcagttttgaa

SEQ ID NO: 878339 - DNA, 584 bp, Homo sapiens
tggaagcgggaattcatacaaattgcagactgcagcgttctgagaaacatctttgtgatgtttgtattcaggacacagagttgaacattccctatcatagagcaggtttgaatcactccttttgtagtatctggaagtggacatttggagcgctttcaggcctatgttggaaaaggaaatatcttcccataacaactagacagaagcattctcagaaacttatttgagatgtgtgtactcaactaagagaattgaaccacccttttgaaggagcagttttgaaacactctttttctggaatctgcaagtggatatttggctagctttggggatttcgctggaagcgggaatacatataaaaakcacacagcagcgttgtgagaaactgctttctgatgtttgcattcaagtcaaaagttgaacactccctttcatagagcagtcctgaaacactccttttgtagtatctggaactggacttttggagcgctttcagggctaaggtgaaaaaggaaatatcttcccataaaaactggacagaagcattctcagaaacttgtttatgctctatctactcaactaac

SEQ ID NO: 878340 - DNA, 576 bp, Homo sapiens
tgctctatcaaaagaaaggttcaactttgttagttgagtagatacagcatacacaagtttctgagaatgcttctgtccagtttttatgggaagatatttcctttttcaccttagccctgaaagcgctccaaaagtccagttccagatactacaaaaggagtgtttcaggactgctctatgaaagggagtgttcaacttttgacttgaatgcaaacatcagaaagcagtttctcacaackctgctgtgtgatttttatatgtattcccgcttccagcgaaatccccaaagctagccaaatatccacttgcagattccagaaaaagagtgtttcaaaactgctccttcaaaacggtggttcaattctcttagttgagtacacacatctcaaataagtttctgagaatgcttctgtctagttgttatgggaagatatttccttttccaacataggcctgaaagcgctccaaatgtccacttccagatactacaaaaggagtgattcaaacctgctctatgatagggaatgttcaactctgtgtcctgaatacaaacatcacaaagatgtttctcagaac

SEQ ID NO: 878341 - DNA, 626 bp, Homo sapiens
tttgtatgaattcccgcttccaacgaaatcctcaaaactagccaaatatccacttgcagattccacaaaaagagcatttcaaaactgctctatcaaaagaaaggttcaactttgttagttgagtagatacagcatacacaagtttctgagaatgcttctgtccagtttttatgggaagatatttcctttttcaccttagccctgaaagcgctccaaaagtccagttccagatactacaaaaggagtgtttcaggactgctctatgaaagggagtgttcaacttttgacttgaatgcaaacatcagaaagcagtttctcacaacgctgctgtgtgatttttatatgtattccygcttccagcgaaatccccaaagctagccaaatatccacttgcagattccagaaaaagagtgtttcaaaactgctccttcaaaacggtggttcaattctcttagttgagtacacacatctcaaataagtttctgagaatgcttctgtctagttgttatgggaagatatttccttttccaacataggcctgaaagcgctccaaatgtccacttccagatactacaaaaggagtgattcaaacctgctctatgatagggaatgttcaactctgtgtc

SEQ ID NO: 878342 - DNA, 630 bp, Homo sapiens
atgtttctcagaacgctgcagtctgcaatttgtatgaattcccgcttccaacgaaatcctcaaaactagccaaatatccacttgcagattccacaaaaagagcatttcaaaactgctctatcaaaagaaaggttcaactttgttagttgagtagatacagcatacacaagtttctgagaatgcttctgtccagtttttatgggaagatatttcctttttcaccttagccctgaaagcgctccaaaagtccagttccagatactacaaaaggagtgtttcaggactgctctatgaaagggagtgttcaacttttgacttgaatgcaaacatcagaaagcagtttctcacaacgctgctgtgtgatttttatatgtattcccgcttccagcgaaatccccaaagctagccaaatakccacttgcagattccagaaaaagagtgtttcaaaactgctccttcaaaacggtggttcaattctcttagttgagtacacacatctcaaataagtttctgagaatgcttctgtctagttgttatgggaagatatttccttttccaacataggcctgaaagcgctccaaatgtccacttccagatactacaaaaggagtgattcaaacctgctctatg

SEQ ID NO: 878343 - DNA, 599 bp, Homo sapiens
ccgcttccagcgaaatccccaaagctagccaaatatccacttgcagattccagaaaaagagtgtttcaaaactgctccttcaaaacggtggttcaattctcttagttgagtacacacatctcaaataagtttctgagaatgcttctgtctagttgttatgggaagatatttccttttccaacataggcctgaaagcgctccaaatgtccacttccagatactacaaaaggagtgattcaaacctgctctatgatagggaaygttcaactctgtgtcctgaatacaaacatcacaaagatgtttctcagaacgctgcagtctgcaatttgtatgaattcccgcttccaacgaaatcctcaaaactagccaaatatccacttgcagattccacaaaaagagcgtttcaaaacttctctaagaaaaggaaggttctactcctttagttgaggacacacatcacgagtaagtttctgagaatgcttctgtctagtttttatgggaagatatttcctttttcaccttaggccggaaagtgctccaaatgtccacttacacacactacaaaaagagtgtttcaaacctgctctgtgaaagggaat

SEQ ID NO: 878344 - DNA, 580 bp, Homo sapiens
ctctattgccatggtgaggcaagccagattaaattataggataatgtttaatagaatgttccagaaaattgtcttatttcttatcttttgtgaatgggtacagaatctgtgtatatttatttcatgaatttcaggataactggtacagaaaggccatagtactgttctccaaaatgcaaatgttttaatttacaaactacttgaaatgttagktacttcctttattttcctttcattttaaatatattgtgcttttttacaaatcatgtacagtatgtacatccaaagtagagaattaagagatatatctagattctaccactgaatttttaaaaacaagtttactgagagagaattctcataccatacagtttacccattgaacgtgtacaattcatggtctcttaatatattcacagagttgcataaccatcaccatcatcaattgtaggacattttcatgaccctgaaaagaatcagcaatctattttgtttccctagattagcccattctggacaccacgtatcaattggatcacacaatgtgtggtggtcttttgtgactggcttcttctactta

SEQ ID NO: 878345 - DNA, 605 bp, Homo sapiens
tatatgtattcctttctcttgggtatatacatatgagttgaatttctgggtcatatggtaacactatgctcgaccttttgaggagctgccagtctgctttccaaagtggttgcaccattttacgttcccatcagcattgtatgagggttctaatttctccacatccttgccaacatttttcatatttttgattgaaaaagrattccaacctagaggtatgaagtggtacctcattgtggttttgattcacatttccctaatgatgaatgactttaagcctctttttatgtgcttatgagccacttgtatatcttctttggagaaatatctgttcaaatcttttgcccacattaaaattgggttgtcctaaatttctgaattttaagagttctttatataccctaggtgtaagtcccttatcagatatgtttccaaatattttcaatggctttcctttttattttcttttttatgatttattatgtttttaaaatttatataattttaaattgtagagagaaggtctcactatgttgtccaggctggttttgaactcctgagctcaagcaatcctcccacctcggcctcccaagtgttgggattat

SEQ ID NO: 878346 - DNA, 549 bp, Homo sapiens
ttgatttgcatttctctgatggtcagtgatgatgagcattttttcatgtgtcttttggctgcataaatgtcttcttttgagaagtgtctgttcatatccttcacccactttttgatggggttgtttgtttttttcttgtaaatttgtttgagttcattgtagattctggatattagccctttgtcagatgagtcgattgcaaaaattttctcccattctgtaggttgcctgttcactctgatggtagtttcttttgctgtacagaagctctttaggttaattagatcccatttgtcaattttggcttttgttgccattgctgaacaaagctggaggcatcacrctacctgacttcaaactatactacaaggcacagtaaccaaaacagcatggtagtggtaccaaaacagagatatagatcaatggaacagaagagagccctcagaaataatgccacatatctacaactatctgatctttgacaaacctgacaaaaacaagaaatggggaaaggattccctatttaataaatggtgctgggaaaactgg

SEQ ID NO: 878347 - DNA, 606 bp, Homo sapiens
accatatcattccaccccggcccctaccaaatctcatgtcctcatatttcaaaacaaatcatgccttcccaacagtcccccaaagtcttagctcatttcagcattaactcaaaagtccacagtccaaagtcttatctgtgacaaggcaagtcccttctacctgcgagcctgtaaaatcaaaacaaattagttacttcatagatacaatgggggtaaaaacattgggtaaatatagccattccaaatgggagcaattggccaaaataaaggggctacmggccccatgcaagtctgaaatgcagcaaggcagtcaaatcttaaagctccaaaatgatctcctttgactccatgtttgatatccaggtcatgctgatccaagagatgggttcccatggtcttgtgcagttctgtccctgtgacattgcagggtacatcctccctcctggctgctttcacttcctgggattgagtgtcagcagcttttccagtggatctaccattctgggttctggaggatgatggcccttttctcacagttccactagttgatgccccagtagggactctgtgtgggggctccaaccccacatttcccttctgcactga

SEQ ID NO: 878348 - DNA, 591 bp, Homo sapiens
ttgctgaagttgcttatcagattaagaagattttgggctgaggcaatgggattttctagaatataggaacttgtcatctgcaaacaaagataatttggtttcctctctccctatgtgaatacctttctttctttctcttgtctgattgccctggtcagaacttctaatacgatgttgaataggagtggtgagagagggcatccttgtcttgttccgcttttcaatgggaatgctttcagcttttcctcaattcagtatcatattgctgtggattagtcatatatggctcttattatttttatgtatattccttcaatatctagtttattgagagtttttaacatgaargatgttgaattttatcaaaggtcctttctgcatctattgagatgatcatgtggtttttgtctctggttctgtttatgtaatgaatcacatttcttgatttgtgtgtgttgaaccagccatgcatcctggtgatgaagccaacttgatcataatggataagctttatgatgtgctgctggatttgattcatttgtgttttattaaggattttcgcatcaatgttcatcaggaatattggcctga

SEQ ID NO: 878349 - DNA, 651 bp, Homo sapiens
cttacagatggagcaatggtgagtgcacacttagacaagggaggggaaggggttcttatccctaacacatgtggcccctcctgctgtgtcattcccctattggctagggttagaccacacaggctaaatgaattctgattggctaaatttaaagagagtaatggggtgagtggtttggcaggaaaaattgttatgatagagcaggtaattggaatgagtcagggtagagcaggcaatcagaatgagtcagggtggagcaggtaatcaaaatgagtcaggctggagcaggtaatcgaaaaaggttgctttatragggagttaagtttaaaagtagaaggcaaaaaattgaacatactgacatattgatcctttgaaaagaaatttagaactcatatcaacattcccttgatgtagtactctcctccttttcctatggatgtggctttctatgagatgaactggagtaattgctatttctcttctgggtctacccacccagcaggtctacccagctctgagctggtattgggggttgtctgcacagggtcctatgacgtgaaccatctatgggtctctcagctgtggatgccagcacctgttccagtggaggtggcaggggggtgcaataaactctatgagagatcttagctt

SEQ ID NO: 878350 - DNA, 651 bp, Homo sapiens
cttacagatggagcaatggtgagtgcacacttagacaagggaggggaaggggttcttatccctaacacatgtggcccctcctgctgtgtcattcccctattggctagggttagaccacacaggctaaatgaattctgattggctaaatttaaagagagtaatggggtgagtggtttggcaggaaaaattgttatgatagagcaggtaattggaatgagtcagggtagagcaggcaatcagaatgagtcagggtggagcaggtaatcaaaatgagtcaggctggagcaggtaatcgaaaaaggttgctttataagggagttaagtttaaaagtagaaggcaaaaaattgaacatactgacatattgatcctttgaaaagaaatttagaactcatatcaacattcccttgatgtagtactctcctccttttcctatggatgtggctttctrtgagatgaactggagtaattgctatttctcttctgggtctacccacccagcaggtctacccagctctgagctggtattgggggttgtctgcacagggtcctatgacgtgaaccatctatgggtctctcagctgtggatgccagcacctgttccagtggaggtggcaggggggtgcaataaactctatgagagatcttagctt

SEQ ID NO: 878351 - DNA, 651 bp, Homo sapiens
cttacagatggagcaatggtgagtgcacacttagacaagggaggggaaggggttcttatccctaacacatgtggcccctcctgctgtgtcattcccctattggctagggttagaccacacaggctaaatgaattctgattggctaaatttaaagagagtaatggggtgagtggtttggcaggaaaaattgttatgatagagcaggtaattggaatgagtcagggtagagcaggcaatcagaatgagtcagggtggagcaggtaatcaaaatgagtcaggctggagcaggtaatcgaaaaaggttgctttataagggagttaagtttaaaagtagaaggcaaaaaattgaacatactgacatattgatcctttgaaaagaaatttagaactcatatcaacattcccttgatgtagtactctcctccttttcctatggatgtggctttctatgagatgaactggagtaattgctatttctyttctgggtctacccacccagcaggtctacccagctctgagctggtattgggggttgtctgcacagggtcctatgacgtgaaccatctatgggtctctcagctgtggatgccagcacctgttccagtggaggtggcaggggggtgcaataaactctatgagagatcttagctt

SEQ ID NO: 878352 - DNA, 612 bp, Homo sapiens
tgccacctcagagataaataagatgttgccaataattgagacctaatacagtgtctatgtgtacttacgtacacacacacatgttggagtgcacctatcaactaactacagtacagtctggcttttttatgctcttcagtgctgcctgagttgaaatacatccacaaaaacctcagagtcactgttgaaaccatgaaccaaccccgatagaacattctctacatattacctttcctgaatgctcttgacaactatcaggaaagctaatagcaaagtaagctctgttctgtttcttccacagcctcagttatgtagccagatgttmtaagctaagccattttaaggaagaagaaatgaagtagaaggctgatcaattatacagtaaacttaggctaaagatttgtgtaagttttcttcaccagtcaaatttaggtactgaactctctagattatactcattatccaaattccacttaagtttttccaaaataatcttgggctaggttctacctaaaatgtaagataagcagaggataattaataactataaggcctcaattatactccatgtcttttgcttaaacaactttgtgtttctcatttaatacctaa

SEQ ID NO: 878353 - DNA, 608 bp, Homo sapiens
aaatatcctcaagcagattctgtaaaagcaggatttcaagacacctctatcaaaaggaaagttgaactccgtgagttgagttcacacatccctaaatgtttctgagaatgcttctgtctagtttatatgtgaagatatttcactttccaccatgagcctctaagcgctccaaatgaacacttgcagagtatgcagaaagaatgtttccaatcttctctaycaaaggaaagattcaactctgtgagttgaatggacatatcacaaagaactgtctgagaatacttctgtctagcttttatgtgaagatatttccttttccaccgtaggcttcaaagcgctccaaatgaacacttgcagattctacaaaaagaatgcttctaaactgctgtatcaaagaaagcgttcaactctgtgagttgaatgcacacatcccaaagcactttctgagaatgcttctgtttagtttttatgtgaagatattttgctttccaccataagccttcaaagcgctccaaaggaacacttgcagactatgcacagagaatgcctcaaatctgctctatcaaaagaaaggttggactctgtgagttcaatggacacatcacaaa

SEQ ID NO: 878354 - DNA, 581 bp, Homo sapiens
tgtactaagaaaaattcttctgccttgggatgctgttaatctgtaaccttacccccaccccgtgctctctgaaacatgtgctgtgtccactcagggttaaatggattaagggcggtgcaagatgtgctttgttaaacagatgcttgaaggcagcatgctccttaagagtcatcaccactccctaatctcaagtacccaggtacacaaacactgcggaaggcggcagggccctctgcctaggaaaaccagagacccttgttcacgkgtttatctgctgaccttccctccactattgtcctatgaccctgccaaatccccctctccgagaaacacccaagaatgatcaataaataccaaaaaaaaaaaaaaaaaaagaaagagacacatgagaagacactgtggcagtcttgggtagtgaggtcctgggctttgttttgcctgacttttccttttttgtgttttccaaattttctgtaataaaaaatttctaatattaaatcactaaattctcttaacacccccataaggtagatacccttagtggttttcttttaaaatgagaatactaataaataaatttt

SEQ ID NO: 878355 - DNA, 529 bp, Homo sapiens
acaattcaggcttgggaacctatgcctagatttcagaagatgtatagaaatgcctggatgtccaggcagaaatgtgctgcaggggcagagctttcatggagaacctctgctaagacagtgaagaagggacatatggggttggaggccccacacagagtccctactggggcactgcctagtggggctatgagaagagggtcactgtcttccagaccccagaatgatagatgtaccaacagcttgcaccrtgtgcttggaaaacttgcagaccctcaaggccagcccataaaagcagccaggaaggaggctgtaccctgcaaatccacagggaaggagctggccaacaccatgggaacccatctcttgcatcagcatgacctggatgtgagacatggattctaaggacatcattttggatctgcaatatttggctgccctagtggattttggacttacacgggacctgtagctctttgctttggccaatttctcccaggtagagtgggtatatttaccaaatacctgttcc

SEQ ID NO: 878356 - DNA, 529 bp, Homo sapiens
acaattcaggcttgggaacctatgcctagatttcagaagatgtatagaaatgcctggatgtccaggcagaaatgtgctgcaggggcagagctttcatggagaacctctgctaagacagtgaagaagggacatatggggttggaggccccacacagagtccctactggggcactgcctagtggggctatgagaagagggtcactgtcttccagaccccagaatgatagatgtaccaacagcttgcaccatgtgcttggaaaacttgcagaccctcaaggccagcccataaaagcagccaggaaggaggctgtaccctgcaaatccacagggaaggagytggccaacaccatgggaacccatctcttgcatcagcatgacctggatgtgagacatggattctaaggacatcattttggatctgcaatatttggctgccctagtggattttggacttacacgggacctgtagctctttgctttggccaatttctcccaggtagagtgggtatatttaccaaatacctgttcc

SEQ ID NO: 878357 - DNA, 553 bp, Homo sapiens
gaaatgagaagtcagatcaaacataagatttgagtgtccaactcttgatttttacatatactattatttaaagcatctctactcttcatagaatgcattaagctatgtgttttgtatacaccttattttatgtaattgtcacagaacaatccagaawaggcagttaaaacaaattgatgaaattaaatcaaatcctgtctcatttaaatgaggttcagaaagattacatatactatccctggttctacaggaattaggggcagaacaaagatacaaatctgatgcatatttatatgctatggtttaaaattatgcctctagaattctgttgaaaattaatccacattatggtagtattaagagttagggccttttgaaaagtgattgattaattaacgagggtgaagccctcataaatggtattagcacccttataaaataatttgaagggctctaccctgccatttctcccatgtgaggaaatagcagcaaggtgccatctatagagcagacgtcgaatctgctggtgccttgatcttgaacttcccagcct

SEQ ID NO: 878358 - DNA, 653 bp, Homo sapiens
accaacccaaatgtccaacgatgatagattggattaagaaaatgtggcacatttacaccatggaatactatgcagccataaaaaatgatgagttcatgtcctttgtagggacatggatgaagctggaaaccatcattctcggcaaactatcacaaggacaaaaaaccaaacaccgcatgttctcactcataggtgggagttgaacaatgagaacacatggacacaggaaggggaacctcacacaccaggacctgttgtggggtgggggaagtggggagggatagcattaggagatatacctaatgttaaatgaagagttaatgggtgcagcacaccaacgtggcacatgtatacatatgtaacaaacctgcacrttgtgcacattaccctaaaacttaaagtataataaaaaacataaataaataaataaagaggaggtagagagagaaaagtaaaaggttttttcaaagaaaaaatgagaatgtcccaaacctaaagaaaggcatcaatattcagctacaagatggttctagcacaccaagcagatttaactcaaataagatgactacaagacatttaataatgaacgttccaagggtcaaggataaagaaataatctaaaagcagcaagggaaaagaaaccaataatatac

SEQ ID NO: 878359 - DNA, 653 bp, Homo sapiens
accaacccaaatgtccaacgatgatagattggattaagaaaatgtggcacatttacaccatggaatactatgcagccataaaaaatgatgagttcatgtcctttgtagggacatggatgaagctggaaaccatcattctcggcaaactatcacaaggacaaaaaaccaaacaccgcatgttctcactcataggtgggagttgaacaatgagaacacatggacacaggaaggggaacctcacacaccaggacctgttgtggggtgggggaagtggggagggatagcattaggagatatacctaatgttaaatgaagagttaatgggtgcagcacaccaacgtggcacatgtatacatatgtaacaaacctgcacgttgtgcacattaccctaaaacttaaagtataataaaaaacataaataaataaatmaagaggaggtagagagagaaaagtaaaaggttttttcaaagaaaaaatgagaatgtcccaaacctaaagaaaggcatcaatattcagctacaagatggttctagcacaccaagcagatttaactcaaataagatgactacaagacatttaataatgaacgttccaagggtcaaggataaagaaataatctaaaagcagcaagggaaaagaaaccaataatatac

SEQ ID NO: 878360 - DNA, 551 bp, Homo sapiens
aggctggagtgcagtggtgtgatcccgactcactgcaacctctgcctcctgaattcaagtgatgctcctgcctcagcctctcaagtagctgggattacaggtgtgcgtcaccatgcccagctaatttttataattttagtagagatggggtttcaccatattgaccaggctggtcttgaactcctgacctcaagtgatccccctgccccrgcctcccaatcatggtgggattataggcttgagcccctgtgcctggcctagaaggctaacttcttaattgcaagctactttcatcaatataatgcatttgtctcactccttaaaggactcctgtcacagtgtattggcaaagaactggtcagacacaagaggcagtggagtattagtaaaatacacgtggatttggagtcagaccttcctaggtttaaatgctggttttatcgcatactagttgtatgccttcatcggggtttcccaagaatcagaccctgagacaagactccaagagtaagtcatctatgtgggaggtaaatgaaacatgacacaggaaa

SEQ ID NO: 878361 - DNA, 635 bp, Homo sapiens
gtggaaatgatgtttgtttcttacttctttggggctttgactgtgccattgagattttgtgctcagggataaactaccgtgtatttacagttacctcaacctgtgaggtttgatgcctctttctttctttctttctttctttctttctttctttctttctttctttctttctttctttctttttctttctgtctctttctttctttctttctttctttctttctttctttctttctttcttycttccttccttccttcctttctttctttcttctttcttttttccttcttctttctctttctttcctctttctctctctctttccctccctcccttccttccttcctccatccctcccttcctttcttgctttttttttttcttgctttgttacccaggctggagtgcagtggcatgatcatagctcactgcagccttgaacttctgggctcaagcaatcttcctgccttggccaccctgggattacaggtgtgaaccgtggcgcccagccttggccactttctttattctaaacttctttgttccatactttgcttcttttccctggatccatccccccagcctcccttgtcactccagtgataggacactcagtcttgccaagtcaatgtaa

SEQ ID NO: 878362 - DNA, 623 bp, Homo sapiens
gtcatccagtccacatggagcatcccccttggaacatcacattgcagatgccaatgaacataatgtgtttccagtctggatgctgttcatgggggttaaccgtggccaggtgtggtggctcaggcctgtaattttagaattttgggagggttaggcaggaggattgcttgagcacaggagttttgagaccagcctgggcarcataatgagaccctgtctctacaaaaaaatagcaaaattagccaggcatggtgacacacacctgtagccccagctgctctgaaggctgaggtgggaggatcgcttgagtccaggagtttgaggctgcagtgagctgagattgtgccactgcaccctagcctgggtgacagagcaagaccccatctcttaaaataaaaacaaaaaaagccaaaataaacccatgctgaccactccctttcactgtgaagtgagggttctgtttctctcatagaactgatggaggagatgctttggggtcccagttgtcttatagtggacatttgtctttggaatggggatgggagcttctctaactcatcacagttttccagccttgaggtcctcatccgtcccagaatgagtgcttagtaactgtggcatga

SEQ ID NO: 878363 - DNA, 669 bp, Homo sapiens
acaggaaacaagttatacatagatttttttttcatttaaaaaaacactcatgtggccattcaaagctacatctctcttctcttcagctgcaagtaggcaaagtcagcacctctcacctgcccacgtgtccaggaagcatctaccacagaggaaatggcagtgcccaggtatgatgggaactcttgatgacaggagagcctgtcccattacatcactgaacagaaaagctcaaagacaagaccaagagtgaatcttagcagacagtcaagaaggatgagaaatgagggcatccayaggcatttgctcatcatgaaattctgatgcatcacttaaaatccagggacacatgaatagaagcaataaaagctattttaattaaatttgagctataattctgggtttcttgttttgttttggtacttgcacggttcaacagtatattagacaaatgtgcatttgagaaatcctgatcaaggaggacaaattagaagaaaaaaaaaaaaaaaaaaaaccctgagtattcatctgtcttcccacaaagtcttcctgaagctattcttgcaaaaccttctgcccactggcactgtatgcgtatgattaactgcacttgagcccaacagcttgcatgtatagttaatttgctccaaatttccacgctgcattataacc

SEQ ID NO: 878364 - DNA, 669 bp, Homo sapiens
acaggaaacaagttatacatagatttttttttcatttaaaaaaacactcatgtggccattcaaagctacatctctcttctcttcagctgcaagtaggcaaagtcagcacctctcacctgcccacgtgtccaggaagcatctaccacagaggaaatggcagtgcccaggtatgatgggaactcttgatgacaggagagcctgtcccattacatcactgaacagaaaagctcaaagacaagaccaagagtgaatcttagcagacagtcaagaaggatgagaaatgagggcatccacaggcatttgctcatcatgaaattctgatgcatcacttaaaatccagggacacatgaatagaagcaataaaagctattttaattaaatttgagctataattctgggtttcttgttttgttttggtacttgcayggttcaacagtatattagacaaatgtgcatttgagaaatcctgatcaaggaggacaaattagaagaaaaaaaaaaaaaaaaaaaaccctgagtattcatctgtcttcccacaaagtcttcctgaagctattcttgcaaaaccttctgcccactggcactgtatgcgtatgattaactgcacttgagcccaacagcttgcatgtatagttaatttgctccaaatttccacgctgcattataacc

SEQ ID NO: 878365 - DNA, 669 bp, Homo sapiens
acaggaaacaagttatacatagatttttttttcatttaaaaaaacactcatgtggccattcaaagctacatctctcttctcttcagctgcaagtaggcaaagtcagcacctctcacctgcccacgtgtccaggaagcatctaccacagaggaaatggcagtgcccaggtatgatgggaactcttgatgacaggagagcctgtcccattacatcactgaacagaaaagctcaaagacaagaccaagagtgaatcttagcagacagtcaagaaggatgagaaatgagggcatccacaggcatttgctcatcatgaaattctgatgcatcacttaaaatccagggacacatgaatagaagcaataaaagctattttaattaaatttgagctataattctgggtttcttgttttgttttggtacttgcacggttcaacagtatattagacaaatgtgcatttgagaaatcctgatcaaggaggacaarttagaagaaaaaaaaaaaaaaaaaaaaccctgagtattcatctgtcttcccacaaagtcttcctgaagctattcttgcaaaaccttctgcccactggcactgtatgcgtatgattaactgcacttgagcccaacagcttgcatgtatagttaatttgctccaaatttccacgctgcattataacc

SEQ ID NO: 878366 - DNA, 553 bp, Homo sapiens
aatacagcccttccaacaccttgattttagcacttctgacctacagaactataagataaaaaatgtgtaatactttaagcttctaaatttgaggtaatttgttgtgagaacaataagaaacaaacacaggaatccctattgtctgtcttcaagttcactgattcttttcttttctttttttttttgaggtggagtctcactctgttgccccagctggagtgcagtggtgcgatctcagctcactgcaaactctgcctcccgggttcatgccattctcctgcctcagcctctcgagtagctgggactacaggcacctgccaccatgcctggctatttttttgtatttttagtagagacagggtttcactgtgttatccaggatggtctcgaycccctgacctcgtgatccgcttgcctcggcctcccaaagtgctgggattacaggcacgagccacggcgcctggcccaagttcactgattcttttcctctgttccctctgtgttgttgagcccatccattgagttctaaatttgtttatttatcttcaattcc

SEQ ID NO: 878367 - DNA, 614 bp, Homo sapiens
ggctggagtgcaatggtgcaatctcagctcactgcaacctacgcctcccaggttcaagcgattctcctgcctcagcctcccaagtagctggaactacagatgcttgccaccacacccagctaattttttttttttattacttttagtagagacaggctttcaccatgttagccaggctggtctcgaactcctgacctcaggtgatccacccacctcagccttctaaagtgctgggattacaggcttgagccgctgagctcggccmcttttttttgtttgagtcagagtctcgctctgtcacccaggctagagtgcagtggcacgatctcagctcaatgcaatctccacctcctgggttcaagtgattctcctgcctcagcctcctgagtagctgggattacagtcatgcgccaccatgcctggctaatttttgtatttttagtagagatggggtttcaccatgttggtcaggctagtcttgaactcctgacctcgtgatccacccacctcggcctcccaaagtgctgggattacaggcgtgagccaccgtacctggcctacatttctttaaaaataaattccatcatggtaataactaaatcttaatacttagg

SEQ ID NO: 878368 - DNA, 592 bp, Homo sapiens
ctcagatggagatgaggatcttgttgggaactagaacaaagctgactcttgttttgttttagcaaagagactgtttgctttttgcccctaccctagagatttgtggaactttgaacttgagagaggttatttagggtatctggtggaagaaatttctaagcagcaaagcattcaagaggtgagctgagtgctgttaaaagcattccaggccaggcgcagtgactcttgcctgcaatcccagcactttgggaggccgaggcgggcagatcatgaggtcaggagttcaagaccagcctggccaagatggtgaaacctygtctctgctaaaaatacaaaagttagccaggcatggtggcaggcacctgtagtcccagctacttgggactgagactgaggcagaagaatcgcttgaacctgggaggcagaggttgcagtaagccaagatcacgccactgcactccccagcctgggcaacagagcaagactccatttcaaaaaggaaaaaaaaagcactccattttaaaagggaaacagcataacagtttggaaaaattgcaggctaatgatgcagtagaaaagaaaaacccatttt

SEQ ID NO: 878369 - DNA, 682 bp, Homo sapiens
tcaaattctacccccaattgagctatgttagacttcatataggattggtcatatccaacttttttccacttagctaaggttgtagaaacttccaaatgctgctctaatattgcagccatcaaccagaagtggctatttaaattgaaatataaatttattacaatgacataaccaaatggtcccagctgagctcaagctgggtgtggatacatgggtgctatgattcctcaaatatcaattggtacaagttactttgcatggggaagaaaatttgtgttgaataagggtttctgaaccacgagagaactgaaagtgagtgcacacagaaccatcttccccactagaggacccctatttactttgatacctttagtgaaaagacaaataaaaagagaatttaagggttgagttttgaattgatgaagagatgcaggaacttagaaacttaggtgtccagttttctgtgaagcctccaccccaccacyatttcccatccacagcattccaggctaaaaagcctcttccctagtcacaggaattctccacgaatccatcgattaaatcacttcctacaagggatgcttggtcctgtaagatcaaattttcaatttctctttgggctgcgctgtgatttgtaaccagaactagggaactgcttccaacacctgccaggttctcagca

SEQ ID NO: 878370 - DNA, 673 bp, Homo sapiens
accaaagcaatcctaagcaaaaagaacaaagctggtgaaatcgcattacctgactataaaccttactataaggctacagtaatcaaaacagcatgatactggtacaaaaatagacccatagaccaatggaacataatagagaacccagaaataaggccacacacctacaacaatctgctcttcaacaaaactgacaaaaataggcaatgagcaaaggactccctatttaataaatgatgctgggataactggctaaccatatgtagaagaaattggaccccttccttataccatatacaaaaagcaactcaagatggattaaagttttaaatgtaaagcctcgaactaagaaaatcctagaagaaaagctagggactactattgtagatattggccytgataaagaatttatggctatgtcctctaaagtaattgtgacaaaaaaaattgatgagtgaaacctaactgaactagagcttcttcacagcaaaaaaacaagcaaacaaaaaaactatcaagtaaacacacactacagaaatggaggagaaaattatagatgaaaaggagacttaagagacattcaagcaattacactgtatactacaattttaatttattcaagctgttttgctgaatacctagttggtccaaatttttgttttaataactaaga

SEQ ID NO: 878371 - DNA, 549 bp, Homo sapiens
ctccctccacttgccccccaccctccgacaggccccggtgtgtgatgttcccctccctgtgtccatgtgtactcattgttcaactcccacttatgagtgagaatatgtggtgtttgtttatctgttcctgtgtcagtttgctgagaatgatggcttccagcttcatctatgtccctgcaaaggacataaactcattcttttttatggctgcatagtattccatggtgtatatgtgccacattttctttgtccagtctatcattgatgggcatttgggttggttccaagtctttgccattggaaatagtgcytcaataaatatatgtatgcatgtgtctttatagtagaatgatttataatcctttgggtgtatacccagtaatgggattgctgggtcaaatggtatttctggttctagatccttgaggaatcgccatattgtcttccacagtggttgaactaatttacagtcccaccaacagtgtaactttctccatttttaatgtaggtatgtggagctataaatttccctctaagcattgctttagc

SEQ ID NO: 878372 - DNA, 549 bp, Homo sapiens
ctccctccacttgccccccaccctccgacaggccccggtgtgtgatgttcccctccctgtgtccatgtgtactcattgttcaactcccacttatgagtgagaatatgtggtgtttgtttatctgttcctgtgtcagtttgctgagaatgatggcttccagcttcatctatgtccctgcaaaggacataaactcattcttttttatggctgcatagtattccatggtgtatatgtgccacattttctttgtccagtctatcattgatgggcatttgggttggttccaagtctttgccattggaaatagtgcckcaataaatatatgtatgcatgtgtctttatagtagaatgatttataatcctttgggtgtatacccagtaatgggattgctgggtcaaatggtatttctggttctagatccttgaggaatcgccatattgtcttccacagtggttgaactaatttacagtcccaccaacagtgtaactttctccatttttaatgtaggtatgtggagctataaatttccctctaagcattgctttagc

SEQ ID NO: 878373 - DNA, 619 bp, Homo sapiens
tggattttgtatccactcctgtgtgtagatatcacctgctgtatttggccctatctttgcttaaaaaaaaaaaaaaaaggcctctgggcataaatccctctttcagagagagaaataattttagcagcagctggtccgtggcattaaagattgaatgactgtaatgtgttcagaccatggttggcttgttaggaattctgtaaggcaagaaataacctgagagccacagaccttggagactgcacgaaaaarattgttggtggtgatgtccttccttgaagcatcatgttgtaattcctgggccattaacacagctacccttcagtggcttctcattaactgcaggagaagctccagcgtctctgtgtgtcactgccagcttctcatccccttccatcctcattcctgcagccatccttgtgcactctgtgataagttttactcacctacttctgctctcctgtgcccctctcctctcctctcctcttctctttattttggtgcatccaattccctcttttggagtaaattttcctatagccttttctccagtctcgttcacccagtgatttctacatgtgtccttcaatccgttcaagtttcacctccacacagcctt

SEQ ID NO: 878374 - DNA, 616 bp, Homo sapiens
agaaaaaatgccttcaagaaaatagggcatagtataatgcttccgtagctaaatgttgcacacaagggaattggaacacagtgaatggtaaatcccaaacctcttcagcaagatcattgtagaggaaaattgtcacytgagggaggaacccatccaggctgcttcagttataacaatgactctgggaatcctaatcaggtgtctgataggtaaactaaatccttgcacttgaaaaatacacctccagtctggctgatattacccatctaagtcacaggtttgtcttgaaatagatcttagcgctgtgatctcagcagggatttcttctttagagaaagatattttatgagcctagaagcagctttgttggaactcacaatatccttgaactgcaagcaacagcaattttagacagagcgttaattcagtgaatttcaagagaaaaagaaaaaaaaaaaaaaaggaaaacccatacagttgtcagtgctaaatgaactgaaaagcagtttgaaagagcatttcagagtcagtgctttctatgttctgttgttatgtttaaggaatcctttagtattgtcgagccccattgagtagaatggtaccaacaaaatatggt

SEQ ID NO: 878375 - DNA, 616 bp, Homo sapiens
agaaaaaatgccttcaagaaaatagggcatagtataatgcttccgtagctaaatgttgcacacaagggaattggaacacagtgaatggtaaatcccaaacctcttcagcaagatcattgtagaggaaaattgtcacctgagggaggaacccatccaggctgcttcagttataacaatgactctgggaatcctaatcaggtgtctgataggtaaactaaatccttgcacttgaaaaatacacctccagtctggctgatattacccatctaagtcacaggtttgtcttgaaatagatcttagcgctgtgatctcagcagggatttcttctttagagaaagatattttatgagcytagaagcagctttgttggaactcacaatatccttgaactgcaagcaacagcaattttagacagagcgttaattcagtgaatttcaagagaaaaagaaaaaaaaaaaaaaaggaaaacccatacagttgtcagtgctaaatgaactgaaaagcagtttgaaagagcatttcagagtcagtgctttctatgttctgttgttatgtttaaggaatcctttagtattgtcgagccccattgagtagaatggtaccaacaaaatatggt

SEQ ID NO: 878376 - DNA, 538 bp, Homo sapiens
ctgcaaacactctctctttgcctattgccatccatgtaagatgtgacttgctcctccttgccttccaccatgattatgaggctcccccagccacgtggaactgtaagtccattaaacctttttgttttgtaaattgcccagtctcaggtatgtctttatcagcagtatgaaaatggactaatacactaaattgatgccagtagagtggggcactgctgaaaagatacccaaaaatgtggaaaagactttggaactgggtaacaggcagaggttggaacagtttggaaggctctgaagaagacwggaaaatgtgggaaagtttgaaacctctatagacttgttgaatgggtttgacaaaaatgctgacagtgatatgaacaataagatccagtctgaagtggtctcagatggagatgaggcgcttgttgggaggtggagcaaagatgactcttgttatgttttagcaaagagactagttgcattttgcccctgccctggagatttgtggaactttgaacttgagagagatgatttaagc

SEQ ID NO: 878377 - DNA, 629 bp, Homo sapiens
gaggtgctaagagcccagagaggctgtgctttcctgtcaaaccagaatttgtcttgagtgcaaaaagaaggcagtgctggtctaagaaaccagaatggccaagaaagcttatataaatatatatatatatatgtgtgtatatatatatatatatatgtatatatatatatatatatatatatatatatatatatatatatatatwtttttttttttttttttttgacatggagtcttactctgtcgcccaggctggagtgcactggcacgatcttggctcactgcaagctccgcctaccaggttcacgccattctccttcctcagcctcctgagtagctgggactacaggcacccaccaccaatcgcagctaattttgtatttttagtagagacagggtttcactgtgttagccaggatggtctcgatctcctgacctcgtgatccacccgtctcagcctcccaaagtgctgggattacaggtgtgagccaccgcgcccggccggaagcttattatatatattcttactggtcttactttcctgaattagccaatcatttgtactgaaatggaaaagatagggcaatccatagttctttttctttcagtccttccttactcaccattaa

SEQ ID NO: 878378 - DNA, 463 bp, Homo sapiens
aagagttggtgagaatggaaggtgccaatgcaaagtaaaagcaaacaactaaaatttgggaccctggttcttttatttatttttttaatttttgagacatttcactgtcgtggcccaggatggagtacagtggtgcgatcttggctcactacagtctccacctcccaggttcaagcgattctcctgcctcagcctcctgagtagcagggattacaggtgcccgccaccacgtccagctwatttttgtatttttagtagagacggggtttcaccatgttggtcaagctggtcttgaactcctgacctcaggtgatccacctgctttggcctcccaaaatgctgggattacaggtatgagccactgtgcccagccaggactctgttttaaagctacatcccctggaaagattttcctgggttactcagccacctcccatccccagagatctgagctgccttcagt

SEQ ID NO: 878379 - DNA, 590 bp, Homo sapiens
tcctgtgagttcttgctgggaaagtgcgctctggcatcagatgccagggaatcaagtgaaatgggagcacccccattctttgggctgagatcaggtggatttaactcataaaattgttttatgttacacaaatatatgcacatgacaaaagaaaatccagagagatcaaagagtatagaatgaaaagcaacacccttytgccccgttccccaagttgagaagtttgcctttccagaagcaattactgtcagcatttcctatgaatttgtccacaaatatttcacatatataaaagcatgtgtgggccaggtgcggtagctcatgcctgtaatttcagcactttggaagaccaaagagtttgagaccagcctaggcaacatggtgaaaccccatctctataaaaaaatacaaaaaaaaaaaaaaaaaattagctgggtgtggtggcatgtgcctgtagtcccagctactgcaggggctgaggcagaaggatcgcttgagcccaggaggtcgaggctgcagtgagccactgcactccagcccggccgacaaagtgagaccttgtctcaaataaaaggcacatgtgaacaaat

SEQ ID NO: 878380 - DNA, 561 bp, Homo sapiens
atagaaatcaatacattaataaatcacgaagttcataatgtctgatttgcttctaaatgagacagaactattatcgccataaagttgcacataaaatatgcccaattgtgatgtattgtgtagtctaatcaaaggcatttgagtgaataacctttccccaaaagaaggaaacaatcaaagctgaataacttcattaataattcaaggtgtgtctgccaaggcttcatttattaagtgcacagttaagaggcttcagagctgaatcctggagaggatagcaccttgccatcttctccctgcctctgggcaggcggatatacattctcagatgaactgactgcactccttgcatctggaagttcatgttccagtggagggtaatgcccagttgacttcttcagctaagaratggcccgtaacagtgctcatggactgtccggattcttaagggcagaggagccagagccaggaaatgtccttagtggccatcagttgttatgtctgttcactaatgttccaggccctatgcttctggtgtccaccacccacagaccccctgtt

SEQ ID NO: 878381 - DNA, 702 bp, Homo sapiens
aataacatttttgagcacctactatgcatgtagagcatcttacataccttatctcacttagatttacagctgcaaggtgggtatgattctagcttgaattagtctaataaccatatacctcctaggggcagtgagatgattagatcaattctaaaactattaccatgctctctgagctcaccaagacaggcagttaatacaaggatacattaataccgaatccagcaaaagctcacatggccagcttccattatgttcctatttgtgattattctgtatcaagcacagaaatgtatgttcacacgaacaacaaagaaggggtttattagtgtggattacagggcctaagcctaccctctgaaactggttttggagtctttagcacgcttgtttgggacagttaaacatgtgccagctattctaaaacagtagcagtaatgtgatagagctgggtcataccgtgcttcccaaagtatgatcacttcatttcaacaacttcacactaacagcctgaactgggcygtgaagggaatatttagaccaaggaaactggaaaactgtatcaatcaggcttttccaccctccccaagagccagttgtcagatatctaccagcctaccaacgctagctctctaatcagaaaccatcacttagcaagttcccaaattatctgcagagcaatgaactcctcttcttcagaaa

SEQ ID NO: 878382 - DNA, 596 bp, Homo sapiens
aatctgatgaggagaatattgagtcatggtgccagggaaaattagcatattctgcaaattcctggcactgttaacactggattctgtccacctttagaaatcctcagatcactatgtcagcatcccccaatcacagctctccaacttcaaggagggwtgaggggtctgaagaaggagagagaggcaacagagccagaaacccttcagaagatgccaagagcaaggttggacccatagtccaccacttactaacttcaagagtgttatgagctacaaacttctcagtctccgttgactcatctcaaaaatggaagtaaaattatttaccatgcaatatgttgtcaaaatgcattgggtttagttcatagcaggtgctcaaagaatatcagttccacttcccttgtccctagagagccttgtagtggatgttgatgtgtcttccaacacatgcaccaacctttccctgtcctgtagcagttgagatggaatcatcccactcccagctccaggaataggctctgatgggcttgaacccagcagcttaattccattggttctctaggccttcatcattagtacaggaaaggcacttgacc

SEQ ID NO: 878383 - DNA, 644 bp, Homo sapiens
cagccattgtgctaccatgagggaactagccatgataacaaaacttgcctggggaggggctacgcatcacagaaaatgatgccaaagtcctgctcaaactgtgcctgatgcctgcctgatctatggacttcttagttccatgtaatggattctctctatttttaaagccrtatcaggttgaatttttggagaaataaaacaaaaagcatcttgactaatttaaaaaatcttctttgggtattcaaccctcctaaactcacccccaaatccactgggagcatgtcaagatttttgtgagccgatttaggagatgcaaattcatttgccttaattggatctccaggaaatgacttctgccccctcttaaatcatttaaagctcaaagaggcatgagggccctccccaaggatgcaggtatcctcttgactgacagcctgtatgctctgcttccaggatccttccatctcctccctttactgagggagtctgctatgtgttagaggtgtccatcactggtcacactgggaagctgtggcagggaagctggagaaaaagcaagataggccccagaaagaacaccaactccagactcagggagactcaggccagaatcctagctcaacttcttccaagctcccaaagtc

SEQ ID NO: 878384 - DNA, 599 bp, Homo sapiens
gtcatcctaatgggtgtgaagttgtttctcattgtggtttgctttgcaggttttgatttgtagattttcctgatgattagtgatgggtgcatcttttcatgttcttactgaccttttatatatctttcttggagaaatgtctgttaactctactcatacttttgtaaatagtattcccaatccttctaactccccaatgaggtggatattagtatgttcgtgttacagtaaagccaactaaaccttagaaagactaggttwattatccaaggtcacacagctagaaaatgacacagcttgtattgaaacatcagtttttctctttccaaacctaacgcacatttcatgaaacctacattattgcaccataacatcatgttgatttacttatctgctctcctgcctgtcccatctactacataaattgagtgtggtttgaaatcagagactacttctcatctttggcacagtggcagccatggatcagaatctcttacatgctggataagtggatgcaagctcaaggccacacctaaagtccccaggtgacttgatcacttgagttagctgctggaaacctgggcttcctcttctgcaaa

SEQ ID NO: 878385 - DNA, 637 bp, Homo sapiens
gggaaaagctctgagtggtacttcagatcatcctgcctcaggtgttggttctgatcctctcaacgactcccaagggaatatgtcagctccattttgcagactgaaacccgagtctcggaatgacttgtccatggtcacacagttgctaaacatctgagccagagtgaaactctggggtatttgactttaaagtcccagcctttaaatcatcccacacttgcttattccaacttggacttgccggagtcccatagacagaggctactctcccaccgtgctgaagctggtgcatgccatgtttcagtaagagaaaggagggtgcctgggcttcgtctccacccagstgcctctcccccagcagctgcaccaggccagctgagggggattttagcccgaatccagggtttctcctacagaagacaaggagtttgggcactgccagaattagaagaacagaaagaaaatgttctggatttctcatcaaatgcccctagcctgagaaatataactaaattcacccttaggtcatcttacaatctgtcctgccccagtgttccccactcagggaactgctccacccacatcctggtccccaaaccagaggcctgggagtcacccttgacatttcctcccctac

SEQ ID NO: 878386 - DNA, 606 bp, Homo sapiens
atatacattatttcatttagtcctcatggctaccaggtgagcaccattattttcccattttacagatgaggcacagagaagttaagccacttacctaggaagggcagtcctagttaagaagctgggattcaaatccaagaggctggattccagacctcaggctctattatgagaagtacctaaatagagattggtttaaccaaagcctgagtcccaactaagggcaagactgtgacacagaggtcactaatcagaatgaaagattgagccagagttgagttgttggaatgtattttggtacatttaggttgttttaagtatatcaatctccattccactcaatggttgagttcagtttcaagttttccaaatgctttatgggaaagtcatatttttctcccattgcagcagggatgccagcgcagccatgyttctcaaccaccaagtagaagcaaagccaaactgacccaagaagatgaacagagggaatccagggagttccaacttgggttcacagctgcaattctcaaaggatggactaagccatgtcacccctccagataacacagtcatattaatagtgaccttttggaggcctccctaaac

SEQ ID NO: 878387 - DNA, 679 bp, Homo sapiens
ccttctggaatcattaaatcagactgatacttgaatcctaatctctggcgaagcattttatttattttaatcccctaagcacttcagcttgacttttcctccgggcctgccattctgggagagctcagaacgcccaccctgatcctttctgattgaaatcccccaaaggccaaggggttggggtgtttctaatgatctgctcaaccacgtggcaagtcatctctaaaccccatagtgactgcctccagcattaacactagaaaaaccgagttctctgtcttagatttcagacttaaacttttcttgagcaccggcacttcacttagcaatttcacctgttatctaatttaatcctcaacacagtcctgtaagataagatgtcttcttttctggaggggacgtggaatatmtgcactatgtggtgtgctgggccagaaatttccatatgacaatctgctcttgtttttcattttgaaatgtttatcttagaaatcccaaatgtgccttctggtttccagtaatgtcaagctagattatttggatctaccctcccactgaaaaccatgaaaaatattgcataatgtctaaaataaacacatttcctttacagtattgatgagctgaagaggcaatgaggttgtcttttcttgctagctaagagtaacaagacaagtagggg

SEQ ID NO: 878388 - DNA, 652 bp, Homo sapiens
caggtagaacttaccttctacagtaccctgatgaccaccaaccaatccctattttgcgtggtgctaaaaagcagtacatgagtaaatatcctgagatctagaaaatagaatgttattaaacttaaaaataaggaaataaactaaagttttttgttaaagtgtgtagcattagtattcaaagatcatttagacatcagccactgcatttccagcagaatttgctatcatgggtaactgttttcaatgctgacaytccatctgagacagatcagacagagccctaaaagtaataacctttaaattgagaatgtttactctaaaagttcctaacacaacccaaagccagaaaagttcacagctctacattaaaatgttagaaaaagatcacattgcagcagctgcttatgtggattacctagtctagccattctgctaaggcttaaaaaaacctgtctgagttgtaggaagaaaaaaaagaaaacaagcctcaaattatcaagttggtgcttgttgatagagctgtgatttcccatttgttgccccagaagacccaggtgtatctgaaagtcaagattttttttcaaactccgaggctgaggaaggatttctttagtgtactttccaccaatgccctgtagcttcccttgaaatt

SEQ ID NO: 878389 - DNA, 594 bp, Homo sapiens
aggaaggaaacataaattatttataattttaccaaccagtgataatcagctttaagtgataatcagcactgattataggctacattggtttatagcctaacagtctatttttctatgtatgcacacaggtagattatattttgccaaaatgaaattgtaccatacgtgttggttggtggctttaaaaaaagattcatcaatagatgaactgtatcattcctcaccttttttagtaaacagaaagagttgtaaattgtatgactctttagactgcttgctatggcagaagtggaaacattttcagarcaaatgaattgtgcatcattttgttagcaaatcgttggaaagactagataggtcagagaaagcgcaactatttcgctttgaacttcttgcacgattatattgaaggaaattctctggggacaaaaattttttgactgtcatagagccaaacaaaatggctaaaagttgttgaaagccctctcagaatatcatggtgctgtgcattccctgggccatcttggaaaagaaggaatatattctttcatcaacattagcatggagcttctgtcagaagaggctgtgcagcac

SEQ ID NO: 878390 - DNA, 533 bp, Homo sapiens
aaaataaaagatccagtagaaaccgacagtgaagagtatttcattttaagtgtttgaaatatttaatgtgtgaggccaaactgtgacataaaaatgcatgaaaatgaatgggaaacatgacaatggtgacaatcctttgaaaatccaggcctattcatataagcctctctagattggaggcctctataggatcaggaaattaagacagaagagtctctgccrtctccccttctccgttgcacagagtctcagtggaatgctttggcataaccttagagaacaacaatttgtccaatctagatatagttagccttaggaatgaacagtagctcactgcctcttcataacagtccacagaaaacttagtttattttataagctggcaagatatgcattagcaatttttttactatcacagaagcaactaaataggactcaggtatatgaaaccatttggaaaagaaaaaggaaacagagaacattgctcctatgcatgtttccaaaggacttctgggaggacgtttattggaggt

SEQ ID NO: 878391 - DNA, 644 bp, Homo sapiens
  misc_feature 1, 2, 3, 4, 5, 6, 7, 8, 9, 10, 11, 12, 13, 14, 15: n = A,T,C or G
nnnnnnnnnnnnnnngctaaatctgaaaaatatctcaaagaccacttctttaggtttcacaattgcaatgttatctataggggtgagttagagaagttataaatcttgtgacccctggttacctgaatctgtggtaaccagcttaaagaaaagcaggttaaatgtcagcaggtcattgctcatgcctattcttcakcaaaggtcaagcccttaccattgtgaatacagtttcaatctctgaatacgaggacagggaggtaagttttccttgcctcaaaatttaaccataaactaaattcctctcacagttatcttggcattggtctctgtgttattatatgtaaaacaaaattacataaaacaggttagcctgcgacgttaaaagcaaggtggaatcagtcatgctggaattctctcatcacttctaattctgcaaaggctgttccagaggtgtgaggggtcattcaggttgggatgctatggaggtcaaagcagttctatcctggatgctaatccaccatgctgacttctgattaacccaagttctgggaatgcctctaagatttccagtttacctattgttccttgtgtaagagcatgtacttagcgcaaacagtgcccttcagcaaattcctaggcattcc

SEQ ID NO: 878392 - DNA, 629 bp, Homo sapiens
acattcaaaatgtccagaatccaattcaaaattatgaaatgtatcaagaaataggaaagcatgatccattcgcaagagaaaaaaataatcaatacagacaaaattctagatgacatatattggcattagaacataaagacctcaaaatattattttagctactcaccaggcaaaattcttcctcttctatcaaaatcaagttttcaggctgagcagaagattcagagaaaagaatttccacccaagcatattttgtgytgaaaggggaaaaaaactgtataacttcattgggcaaatcatccagttttcttacaataagacttaatgtcttgttgatagccacctactctctgaataccaagcagcaataggaacatttcaaaatttcgttttgcaacctgattttcacatagattcaatttcgcttaaaatccaaaaatctcattatattataaaaatgtttctccagagtcttacagatgcttgttccactgtatcatatgatggtaaatgtctgttatgtgggctaaattctgcagccattttttttttaatcatcaaagcactcagcaaaatgtggcttattttttcttgtatgtattcacgcatttcaactttcagctgaacac

SEQ ID NO: 878393 - DNA, 629 bp, Homo sapiens
acattcaaaatgtccagaatccaattcaaaattatgaaatgtatcaagaaataggaaagcatgatccattcgcaagagaaaaaaataatcaatacagacaaaattctagatgacatatattggcattagaacataaagacctcaaaatattattttagctactcaccaggcaaaattcttcctcttctatcaaaatcaagttttcaggctgagcagaagattcagagaaaagaatttccacccaagcatattttgtgctgaaagggraaaaaaactgtataacttcattgggcaaatcatccagttttcttacaataagacttaatgtcttgttgatagccacctactctctgaataccaagcagcaataggaacatttcaaaatttcgttttgcaacctgattttcacatagattcaatttcgcttaaaatccaaaaatctcattatattataaaaatgtttctccagagtcttacagatgcttgttccactgtatcatatgatggtaaatgtctgttatgtgggctaaattctgcagccattttttttttaatcatcaaagcactcagcaaaatgtggcttattttttcttgtatgtattcacgcatttcaactttcagctgaacac

SEQ ID NO: 878394 - DNA, 711 bp, Homo sapiens
gctgaccctataatgctcaagtcccacagctgccacataagccaatgctttactttcatttgtacttcatcccaatctacctctcaataattgggaagctacagaatgtcagggattaacatcaacccacactgtatcagcaacagagtacttatcaatatttcactcttcaatgcagttccaaaatttcattctgtgggtctgttttctgcctaatttgatactttactggatcaaatgttattagcctatgtttcctctggaaatcagaactggggcaaaagactttcatggggcagtttattttgaatagtgatcagattgagaatgtagggccacaaagaccaaaacagaagaggggccaggagyggtggctcacgactgtaatcctagcactttgggaggccaaggcaggcagattacatcaggtcagcagttcaagaccagcctggccaacatggcgaaaccccatctttactaaaaatactaaaattagctgggcatggtggcgggtgcctgtaatcccagctacgcaggaggctgaggcaggagaatcacttgaacccaggagatggagtttgcagtgagtcaagatcatgccactgcactccagcctgggtgacagagtgagattccatctcaaaattaataataaaacagaagagagttattgagttaattactgctgtaggtagctgggacttggtccag

SEQ ID NO: 878395 - DNA, 601 bp, Homo sapiens
ttttttcccgtagggatactgaataaactgttgtacacctgtgttttgactgcaacccattgcatgatgtcacgtgtggaattgtccacttgtggcaccatggtggccctcaaaaaattttgaattttggaacattttttattttgaatttttggattagagatgctccacttgtagaagaccgagagtcacaataattagcctcataaaaatatttatttaaaaacattttttgaaaggcaattgaagaaaacatttaaggagagaaggaacagaatacattttccattctagaaaattaaaagagaaataagttgcagctatagctttcgcttttatcagcaatgtgcaagtaaaattcasatgtagcaaactatggtgctttaagctatgaagatgtagctgaagaatcaatgaggtagagaggtttgtaaaaatgaatttattttttatttccttgacttttttgtcactacatttccaataagactcagtcccaccaacaggatgctctcacaggagactttgaattggagctgagttgtatggcgaaagattggttcccatttgttggtatagctggtgatagaagtgtcaagga

SEQ ID NO: 878396 - DNA, 683 bp, Homo sapiens
aaacctctggaaggacacacaagaaagaaacaatgatggtttcatgttttatctttggtgaggatggggaacaggtagatgaaggagtgagactgaagaaagttgtttcattcaatgtatatttttaaaatttagactgtgtaaatttaacacctattcaaaaattaaaccagcaaataaatatccaaaaacaaatcattcaggaatgaaaaagtaatctgttttgcgggagggaaatgttctttccttaagtrgagagcgagatatctaggtaatttatacagttgaatggcttggaaactttcttgcaaagaatattttttatagcctctgccggccttcttctggatcataaatgtaatgcagtgtactgtccattgagaacaaagacttacaggctgtctgacctggtcaaagagagcatgtctgagcagcccttaaatttctgaattgcccagtctcagcataggctcataaagctactgtctgaaagaaaataaattctgcttaaagcaaatcagcctgtgagccactgcatctttacctcaatttgaaaatgcaatccatatcacagattttattctttttttactcataagactctgtaaaatattttgtaacttggaaaaattctttataaaacttagatttatttgcaaattcatatgtttttcaaagtgttt

SEQ ID NO: 878397 - DNA, 637 bp, Homo sapiens
  misc_feature 495, 498, 548, 551: n = A,T,C or G
taactgtctgagataaatccacacatcacaaagtagtttcagagatagcatctttatagttttgatctgggaatattctgtttttccccaaaggcctcaatgggctcccaaatataccatcacatattttccaagaagagggtttccaacctgctgaatcaaaggaaaggtttaactctatgagatgaatccacacatcacaaagcagtttcacagatagcttcatttgagtatttatctggagatatttaragtttcccataagcctcaaggggctctcaaatgtcccatcacatgctttccaaaaatggtgtttccaacctgtggaatcaaaagaaagttttaattctgtgaaataaatccacacatcacaaagcagtttcacagatagcttctttctagtttttatctggggatattcggtttttcccacaggcctcaaagggctcccaaatgtccctttccagattttccaaaaacagtgtttccaacctnctnaataagaagaaaatctcaactttgtggagatgaatccacacatcacacancantttcataaataactttttgtttgtttttaaattaagaatattttatttttccccataagtctaaataggctcctatatgtcccttt

SEQ ID NO: 878398 - DNA, 619 bp, Homo sapiens
tttacaaatgttttgcatttgaaacccagagttgttttaggctcatttgctgacatatgtgattttgctagaaagggccaggatcaaatgacatccaccatctgtgaagggtattatgtctagagctaagaactggaaacataaaaggggtttgcaaagtgaattgaacctacttaagtcccaaacaaaagcaaatacatattcttgcaaaatatgttcaaaatcattcaattttgaattacatatactcttggatatagaagattattataatgcatacactaatgtaaactttwaaatcataaagaatattgagaacaaatttaggctttcaggatatgtttctgttagagaaattattagaaattatgaaataaaaaatcccaacatatcttttgttctcaaagtaaccccccccatatatagagagagcatgttaagtccaagtctcatatttctatcaaaacctatcttcaaacatatttcctgtcatactccttcttgtaaatataagttatagttcattactttcccaagattaaatattttagaattaaagaacttgtctcctttattttaagaggagttggaaagggtgatggaggatgggagcagagga

SEQ ID NO: 878399 - DNA, 504 bp, Homo sapiens
ctttccaccatggctgtaagcttcctgaggcatcccgagccatgtggtaactgagtcaattaaacctttttgctttataaattacccagtcccaggtatttctttatagcagcatgaaaacaaactagtatagtaaattggtactgaagtagtgggacacttctataaggatacccaaaaatgtagaagtgactttggaactgggtaacaggcagaggttggaacagtttggagggctcaaaagaacacaggaaaatttggaacttcctagrgacttggagggttcagaagacagaaagatgtgggaaagttgagaacttcctagagacttgttgaacagccttgaccaaaatgctgaaagtgatatggacaatgaagtccaggctgagatgttctcagatgcagatgagggacttgttgggaactggaataaaggtgactctcgctatactttagcaaagagactagcagaattttgcccctgccctagagatctgtggaact

SEQ ID NO: 878400 - DNA, 504 bp, Homo sapiens
ctttccaccatggctgtaagcttcctgaggcatcccgagccatgtggtaactgagtcaattaaacctttttgctttataaattacccagtcccaggtatttctttatagcagcatgaaaacaaactagtatagtaaattggtactgaagtagtgggacacttctataaggatacccaaaaatgtagaagtgactttggaactgggtaacaggcagaggttggaacagtttggagggctcaaaagaacacaggaaaatttggaacttcctagagacttggagggttcagaagacagaaagatgtgggaaagttgagaacttcctagagacttgttgaacagccttgaccaaaatgctgawagtgatatggacaatgaagtccaggctgagatgttctcagatgcagatgagggacttgttgggaactggaataaaggtgactctcgctatactttagcaaagagactagcagaattttgcccctgccctagagatctgtggaact

SEQ ID NO: 878401 - DNA, 674 bp, Homo sapiens
tccatatccgtttttattgtgtgtatttgattcttctcttttcttctttattagcctagattacagtccattttattaatgttttcaaaaaaccagctgctggattcattgattttttttgaagggtttttcacgtctctatctccttcagtttagctctgaacttaattatatcttgtcttctgctrgctttggggtttgtttactcttggttctgtagtttttttagttgtgatgttagggtgtcaatttcagatctttctagcttttcaatgtgggcatttagtgccgtacatttccctcttaacactgctttagctgtgtcccagattctagtatgttgtctttgttctcactggtttcaaataacttattgatttctgccttaatttcattatttacccaggagtcattcaggagcaggttgttcaatttccatgcacttgtgtggttttgagtgagtttttaaatcttgagttctaatttgattgcactgtagtctgggagactgttacaatttcatttcttttgcatttgctgaggagtgttttacttccagttatgtgattgattttagagtcagtgccatgtggcaccgaaaagaatgtatattctgttgttttttgggggagagttctgtagatatctatcaggtccacttgatccagagctgg

SEQ ID NO: 878402 - DNA, 674 bp, Homo sapiens
tccatatccgtttttattgtgtgtatttgattcttctcttttcttctttattagcctagattacagtccattttattaatgttttcaaaaaaccagctgctggattcattgattttttttgaagggtttttcacgtctctatctccttcagtttagctctgaacttaattatatcttgtcttctgctggctttgggktttgtttactcttggttctgtagtttttttagttgtgatgttagggtgtcaatttcagatctttctagcttttcaatgtgggcatttagtgccgtacatttccctcttaacactgctttagctgtgtcccagattctagtatgttgtctttgttctcactggtttcaaataacttattgatttctgccttaatttcattatttacccaggagtcattcaggagcaggttgttcaatttccatgcacttgtgtggttttgagtgagtttttaaatcttgagttctaatttgattgcactgtagtctgggagactgttacaatttcatttcttttgcatttgctgaggagtgttttacttccagttatgtgattgattttagagtcagtgccatgtggcaccgaaaagaatgtatattctgttgttttttgggggagagttctgtagatatctatcaggtccacttgatccagagctgg

SEQ ID NO: 878403 - DNA, 674 bp, Homo sapiens
tccatatccgtttttattgtgtgtatttgattcttctcttttcttctttattagcctagattacagtccattttattaatgttttcaaaaaaccagctgctggattcattgattttttttgaagggtttttcacgtctctatctccttcagtttagctctgaacttaattatatcttgtcttctgctggctttggggtttgtttactcttggttctgtagtttttttagttgtgatgttagggtgtcaatttcagatctttctagcttttcaatgtgggcatttagtgccgtacatttccctcttaacactgctttagctgtgtcccagattctagtatgttgtctttgttctcactggtttcaaataacttmttgatttctgccttaatttcattatttacccaggagtcattcaggagcaggttgttcaatttccatgcacttgtgtggttttgagtgagtttttaaatcttgagttctaatttgattgcactgtagtctgggagactgttacaatttcatttcttttgcatttgctgaggagtgttttacttccagttatgtgattgattttagagtcagtgccatgtggcaccgaaaagaatgtatattctgttgttttttgggggagagttctgtagatatctatcaggtccacttgatccagagctgg

SEQ ID NO: 878404 - DNA, 666 bp, Homo sapiens
atctgcactgcagaataaatggacctaatagatatttacagaaaattttatctgatggctacagaatacatattcatctccttagcacatggctcattctcaaggatagacaatatgttaggtcacaaaacaagtcttaaaaaatgcccctcccaaaattaaaattatatcaaatgtcttctctgaccacaatagaataaaactagaaatcaatcaaaacaggaatcttgaaaactatataaacaaatggaaattaaacaatttgctccttaatgaccagtgactcaatgaagacattaagaaggaaattgaaaaatttattaaaacatatgaaaacagaaacacaacattccaaaacctgtgggatacaatgaaagaagtaatgagaggaaagtttatagcagcaagaaaagtgaaaaartgtttttctatgtcagaaaagtgaaaaaacttcaaataaacaacctaaggacctagaaaagcaagcacaaaccaaatccaagatttttagaagggaataataaaggttagggcagaaataaatgaaattaaaacaggaaaactcatataaaagattaacaaaacaaaaaattgattttttgaaaagttaaagaaaattgacaagtgtttagccagactaagaaacaaagagagaagaccccaata

SEQ ID NO: 878405 - DNA, 615 bp, Homo sapiens
catcttgcaatgcacatctttaagaacgttcaaaacacaaaatacccataaggtttcaaatttttaaaaacagtgtggcaattcctcagtgatctagaactagaaataccatttgacccagccatcccattactgggtatatacccaaaggattataaatcatgctataaagacacgtgcacacgtatgtttattgcggcactattcacaatagcaaagacttggaaccaacccaaatgtccaacaatgatagactggattaagaaaatgtggcacatatacaccatggaatactatgcagccataaaaaatgatgagttcatgtcctttgtagggacatggatgaaattggaaaccatcattctcatcaaactattgcaaggacaaaaaaccaaacaccgcatgttctcactcataggtrggaattgcacaatgagaacacatggacacagaaaggggaacatcacacactggggcctgttctggggtgggggaagggggagggatagcattagaagatataccaaatgttaaatgacaagttaatgggtgcagcacaccaacatggcgcatgtatatgtatgtaacaaacctgcatgttttgcacatgtaccc

SEQ ID NO: 878406 - DNA, 517 bp, Homo sapiens
gatgggcacttgggttggttccaagtgtttgctattgtgaacagcactgcaataaacatacatgtgcatgtgtctttatagtagaatgatttataatcctttgggtatatacccagtaatgagattgctgggtcaaatggtatttctggttctagatccttaaggaatggccacactgtcttctacaatggttaaactaatttacactcccatcaacagtgtaaaagtgttccacatsctctccagcatctgttgtttcctgactttttaatgatcaccattctaactggtgtgagatggtatctcattgtggtcttgatttgcatttctctaatgaccagagatgatgagctttttttcatatgtttattggccacataaatgccttcttttgaaaagtgtccattcatatcttttgtccactttttgatggggttgttttttcttgtaaatttgtttaagttccttgtagattctggatattagactttgtcaaatggatagattgtaaaaattt

SEQ ID NO: 878407 - DNA, 677 bp, Homo sapiens
ctctcacggaagaagctgtctaggaccacctcagtgaattgattcagctcccaaaacacccaggaagcccttccagattaatgagaacaggaaggcaaacacactcccaggacgctgatccttgtgaacaagaaataagcagtggccataacccctcccttttaattcaccaccttttaaacttcaatcatattttcctgagacaacattggaaactggcctttctgttggcattccttcttcagtgcatagatcagtcattttaggctcacttcaaacctatttgaatcccacgtcccctgytcaccatgctacctttctttttactgtcctccaatcttagtcttggtactactgtgtgtgtgtgagagagagagagagagagaaaaaaaaaaaaagaaagaaagaaagaacagagacagcaagagagagagagaagagagacagtgagagagagagagagagagaagagagacagcaagagagagagagaacgagaacccagttcttaagcttcaagtttctaggcagatgtgaccaagtgagtgttttaagaaaatctgtgacttgcttgtcacacataccaatgcacattcttatcccctccattttcctgtgaggcagatattattacctatcccgtttccatggtaataataatgagtatttgttgagtt

SEQ ID NO: 878408 - DNA, 631 bp, Homo sapiens
ggctttacttaaatgaagttgatgaaaaatatctttccccttctttttcagcatgtgcaaattatgtttttcttcttcatggtgaaatgcagccatcttctcatactcagctctaattgcttctagccttaaattcacgtaatcctgcagtgataatgggttagtcaaaagagaaatgtatttattcatctcctattaaatctcactgattctttttgtctcttgaatayccaataatttaaacctcagtctttctagttcctagaatccacaaaattttgttcctttcctttctttctgtataaaaatcaacatagctgtatctgaccaattacattaaatttattcaagataatgtgttttctaaggcagttggaaataaaaaaaaacacaatttgaatttcgctattccagccaatatttatggaaaagtaagaacagctcatgcttaagagttggagtatagagctatagttactagaatggaaataattatttctatttctgagatacgcaaaagttgcttaaactcattttatgtgaaatgaccttaggctagcatgtccagctaaattcatttcacccagcaaaacctatcttaatgaggctgcatttatgatttggccatctt

SEQ ID NO: 878409 - DNA, 680 bp, Homo sapiens
caaaagaatggttcaactatgagagttgaatgcacacataaaaaataaaattctgagaatgcttttctctagtttctatgtgaagatattttcttttctaccataggcctcaaagcactacaaatctcttcttgcaggttctacaaaacgagtgtttcaaaactgctcaatcaatagaaaggctcaaatgtatgagatgaatgcrcacatcacaaagtagtttctcagaatgcttctgtctaatttttatgtgaagatatttccttttccacagtaggcatcaaagcactccaaatatccacttgcagattctacagaaagagtgtttccaaaatgctcactcaaaagaaatgttcaactctgtgagttgaatgcacacatcacaaagaggcttctaagaatgcttttgtctagtttttatgtgaagatatttccttttccaccataggcctcaaagcgctccaaatatcaacttgcagatcctacaaaaagagtgtttcaaaacttctctgttaaaagaagggttcaactctgtgagttgaatgcacacatcacaaagaagtttctcagaatgcttctgtctagtttttatttgaggatatttccttttcagctattggtcacaaagcgccccaaatatccatttgcagttactacaaaagaatgtttccaaactgttc

SEQ ID NO: 878410 - DNA, 680 bp, Homo sapiens
caaaagaatggttcaactatgagagttgaatgcacacataaaaaataaaattctgagaatgcttttctctagtttctatgtgaagatattttcttttctaccataggcctcaaagcactacaaatctcttcttgcaggttctacaaaacgagtgtttcaaaactgctcaatcaatagaaaggctcaaatgtatgagatgaatgcgcacatcacaaagtagtttctcagaatgcttctgtctaatttttatgtgaagatatttccttttccacagtaggcatcaaagcactccaaatatccacttgcagattctacagaaagagtgtttccaaaatgctcactcaaaagaaatgttcaactctgtgagttgaatgcacacatcacaaagaggcttctaagaatgcttttgtctagtttttatgtgaagatatttccttttccaccataggcctcaaagcgctccaaatatcaacttgcagatcctacaaaaagagtgtttcaaaacttctctgttaaaagaagggttcaactctgtgagttgaatgcacacatcacaaagaagtttctcagaatgcttctgtctagtttttatktgaggatatttccttttcagctattggtcacaaagcgccccaaatatccatttgcagttactacaaaagaatgtttccaaactgttc

SEQ ID NO: 878411 - DNA, 680 bp, Homo sapiens
caaaagaatggttcaactatgagagttgaatgcacacataaaaaataaaattctgagaatgcttttctctagtttctatgtgaagatattttcttttctaccataggcctcaaagcactacaaatctcttcttgcaggttctacaaaacgagtgtttcaaaactgctcaatcaatagaaaggctcaaatgtatgagatgaatgcgcacatcacaaagtagtttctcagaatgcttctgtctaatttttatgtgaagatatttccttttccacagtaggcatcaaagcactccaaatatccacttgcagattctacagaaagagtgtttccaaaatgctcactcaaaagaaatgttcaactctgtgagttgaatgcacacatcacaaagaggcttctaagaatgcttttgtctagtttttatgtgaagatatttccttttccaccataggcctcaaagcgctccaaatatcaacttgcagatcctacaaaaagagtgtttcaaaacttctctgttaaaagaagggttcaactctgtgagttgaatgcacacatcacaaagaagtttctcagaatgcttctgtctagtttttatttgargatatttccttttcagctattggtcacaaagcgccccaaatatccatttgcagttactacaaaagaatgtttccaaactgttc

SEQ ID NO: 878412 - DNA, 615 bp, Homo sapiens
tgatgtgtccattcaactcacagagttgaacctttcttttgacagagcagttttgaaacacactttttgtagcatctgcaagtggataattggagcgctttgaggccaacggtggaaaaggaaatatcttcacagaaaaattagacagaagcattctcagagatatttggagagctttgaggcctacggtggaaaagaaatatcttcacacataaacttgacagaagcattgtcagaaactccttttgggtgtgtggattcaactcacacagttgaacctttcttttgatagagcagttttgaaacaccctttttgtagaattagcaagtgcatattkggaggaatttgagggctacggtggaaaaggaaatatcttcacataagaactagacagaagcattctcagagatatttggagcactttgaggcctacggtggaaaaggaaatatgttcacatagaaactacacagtagcaatctctgaaacatcttgtaatggttgcaatcaactcacacgtttgaaccttccttttgatagagcagttttgaaacactctttttgtaaaatgtgcaagtggatatttggaacgctttgagacctatggtggaaaagg

SEQ ID NO: 878413 - DNA, 623 bp, Homo sapiens
gttttgaaatactctttttgtagcctctacagttggatatttggagagctttgaggcatgtggttgaaacgggaatatctccacataaaaactagacagaatcgttctcagaaatttctttgcgatgattgcattcaactcagagagttgaacataccttttcatagaacagttttgaaacactctttttgtagaatctacaagtgaatattgcgaccgctttgaggccttcattggaaacgggaatatattcacataaaartgagacagaagcaatctcagaaacttctttgtgatgtgtacattcaactcacagagttgaaccttttttttgatagagcagttttgaaacactcttcttgtagtatctgcaagtggatatttggactgcttcgaggcctttgttagaaaagggatatcttcacataagatctagacagaagcatactcagaaacatccttgtgatgtgtatattcaactcaccgagttgaaccttccttttaatagagcagttttgaaacactctttttctagaatctgcaagttgacatttggagtgctttaagggctatgctggaaaaggaagtatcttcacataaaaactagaaagaagcattcccag

SEQ ID NO: 878414 - DNA, 623 bp, Homo sapiens
gttttgaaatactctttttgtagcctctacagttggatatttggagagctttgaggcatgtggttgaaacgggaatatctccacataaaaactagacagaatcgttctcagaaatttctttgcgatgattgcattcaactcagagagttgaacataccttttcatagaacagttttgaaacactctttttgtagaatctacaagtgaatattgcgaccgctttgaggccttcattggaaacgggaatatattcacataaaagtgagacagaagcaatctcagaaacttctttgtgatgtgtacattcaactcacagagttgaaccttttttttgatagagcagttttgaaacactcttcttgtagtatctgcaagtggatatttggactgcttcgaggcctttgttagaaamgggatatcttcacataagatctagacagaagcatactcagaaacatccttgtgatgtgtatattcaactcaccgagttgaaccttccttttaatagagcagttttgaaacactctttttctagaatctgcaagttgacatttggagtgctttaagggctatgctggaaaaggaagtatcttcacataaaaactagaaagaagcattcccag

SEQ ID NO: 878415 - DNA, 623 bp, Homo sapiens
gttttgaaatactctttttgtagcctctacagttggatatttggagagctttgaggcatgtggttgaaacgggaatatctccacataaaaactagacagaatcgttctcagaaatttctttgcgatgattgcattcaactcagagagttgaacataccttttcatagaacagttttgaaacactctttttgtagaatctacaagtgaatattgcgaccgctttgaggccttcattggaaacgggaatatattcacataaaagtgagacagaagcaatctcagaaacttctttgtgatgtgtacattcaactcacagagttgaaccttttttttgatagagcagttttgaaacactcttcttgtagtatctgcaagtggatatttggactgcttcgaggcctttgttagaaaagggatatcttcacataagatctagacagaagcatactcagaaacatcyttgtgatgtgtatattcaactcaccgagttgaaccttccttttaatagagcagttttgaaacactctttttctagaatctgcaagttgacatttggagtgctttaagggctatgctggaaaaggaagtatcttcacataaaaactagaaagaagcattcccag

SEQ ID NO: 878416 - DNA, 634 bp, Homo sapiens
cacataaaaactagacagaagccttctcaggaactactttgttatgtgtccattcaactaacagagttgaaccttagttttgatagagcaggtttgaaacactctttttgtagaatctgcaagtggatatttggagcrctttgaggcctatggttgaaaaggaaatatctatacataaaaactggacagaagtattctcagaaacttctttgtgatgattgcattcaactcatagagttgaacataccttttcatagagcggttttgaaacagtttttgtagaatctgcaagtggatatttggactgctttgaggcctttgttggaaacgggaacatcttcacataaaaactagacagaagcattctcagaaacttctctgtgatgtatgcattcaactcacagagttgaaccttcctgttgatacagcacttttgaaacactctttttgtagaatctgcaagtggaaatttggagcactttgaggcctacagttgaaacggaaatatcttcacataaaagctaggcagaagcaatctcaggaactcctttgttatgtgtgcattcaagtcacagagttgaaccttcattttgatagaacagttttgaaacactctttttgtagaggctgcaat

SEQ ID NO: 878417 - DNA, 634 bp, Homo sapiens
cacataaaaactagacagaagccttctcaggaactactttgttatgtgtccattcaactaacagagttgaaccttagttttgatagagcaggtttgaaacactctttttgtagaatctgcaagtggatatttggagcgctttgagkcctatggttgaaaaggaaatatctatacataaaaactggacagaagtattctcagaaacttctttgtgatgattgcattcaactcatagagttgaacataccttttcatagagcggttttgaaacagtttttgtagaatctgcaagtggatatttggactgctttgaggcctttgttggaaacgggaacatcttcacataaaaactagacagaagcattctcagaaacttctctgtgatgtatgcattcaactcacagagttgaaccttcctgttgatacagcacttttgaaacactctttttgtagaatctgcaagtggaaatttggagcactttgaggcctacagttgaaacggaaatatcttcacataaaagctaggcagaagcaatctcaggaactcctttgttatgtgtgcattcaagtcacagagttgaaccttcattttgatagaacagttttgaaacactctttttgtagaggctgcaat

SEQ ID NO: 878418 - DNA, 634 bp, Homo sapiens
cacataaaaactagacagaagccttctcaggaactactttgttatgtgtccattcaactaacagagttgaaccttagttttgatagagcaggtttgaaacactctttttgtagaatctgcaagtggatatttggagcgctttgaggcctatggttgaaaaggaaatatctatacataaaaactggacagaagtattctcagaaacttctttgtgatgattgcattcaactcatagagttgaacataccttttcatagagcggttttgaaacagtttttgtagaatctgcaagtggatatttggactgctttgaggcctttgttggaaaygggaacatcttcacataaaaactagacagaagcattctcagaaacttctctgtgatgtatgcattcaactcacagagttgaaccttcctgttgatacagcacttttgaaacactctttttgtagaatctgcaagtggaaatttggagcactttgaggcctacagttgaaacggaaatatcttcacataaaagctaggcagaagcaatctcaggaactcctttgttatgtgtgcattcaagtcacagagttgaaccttcattttgatagaacagttttgaaacactctttttgtagaggctgcaat

SEQ ID NO: 878419 - DNA, 634 bp, Homo sapiens
cacataaaaactagacagaagccttctcaggaactactttgttatgtgtccattcaactaacagagttgaaccttagttttgatagagcaggtttgaaacactctttttgtagaatctgcaagtggatatttggagcgctttgaggcctatggttgaaaaggaaatatctatacataaaaactggacagaagtattctcagaaacttctttgtgatgattgcattcaactcatagagttgaacataccttttcatagagcggttttgaaacagtttttgtagaatctgcaagtggatatttggactgctttgaggcctttgttggaaacgggaacatcttcacataaaaactagacagaagcattctcagaaacttctctgtgatgtatgcattcaactcacagagttgaaccttcctkttgatacagcacttttgaaacactctttttgtagaatctgcaagtggaaatttggagcactttgaggcctacagttgaaacggaaatatcttcacataaaagctaggcagaagcaatctcaggaactcctttgttatgtgtgcattcaagtcacagagttgaaccttcattttgatagaacagttttgaaacactctttttgtagaggctgcaat

SEQ ID NO: 878420 - DNA, 579 bp, Homo sapiens
tactttaagttttagggtacacgtgcataatgtgcaggttagttacatatgtatacatgtgccatcctggtgccctgcacccactaactcgtcatctagcattaggtatatctcccaatgctatccctccctcctccccccaccccacaaccagtccccagggtatgatgctccccttcctgtgtccatgtgttctcattgttcaattcccacctatgagtgagaatacktggtgtttggttttttgttcttgcaatagtttactgagaatgatgatttccaatttcatccatgtccctacaaaggacataaactcatcattttttatggctgcatagtattccatagtgtatatgtgccacatttttttaatgcagtctatcattgttggacatttgggttggttccaagtctttgctattgtgaataatgccgcaataaacataagtgagcatgtgtcttcatagcagcatgatttataatcctttgggtatatagccagtaatgggatggctgggtcaaacggtatttccagttctagatccctgaggaatcaccacactgacttccacaaagggt

SEQ ID NO: 878421 - DNA, 579 bp, Homo sapiens
tactttaagttttagggtacacgtgcataatgtgcaggttagttacatatgtatacatgtgccatcctggtgccctgcacccactaactcgtcatctagcattaggtatatctcccaatgctatccctccctcctccccccaccccacaaccagtccccagggtatgatgctccccttcctgtgtccatgtgttctcattgttcaattcccacctatgagtgagaatacttggtgtttggttttttgttcttgcratagtttactgagaatgatgatttccaatttcatccatgtccctacaaaggacataaactcatcattttttatggctgcatagtattccatagtgtatatgtgccacatttttttaatgcagtctatcattgttggacatttgggttggttccaagtctttgctattgtgaataatgccgcaataaacataagtgagcatgtgtcttcatagcagcatgatttataatcctttgggtatatagccagtaatgggatggctgggtcaaacggtatttccagttctagatccctgaggaatcaccacactgacttccacaaagggt

SEQ ID NO: 878422 - DNA, 579 bp, Homo sapiens
tactttaagttttagggtacacgtgcataatgtgcaggttagttacatatgtatacatgtgccatcctggtgccctgcacccactaactcgtcatctagcattaggtatatctcccaatgctatccctccctcctccccccaccccacaaccagtccccagggtatgatgctccccttcctgtgtccatgtgttctcattgttcaattcccacctatgagtgagaatacttggtgtttggttttttgttcttgcaatagtttactgagaatgatgatttccaatttcatccatgtccctacaaaggacataaactcatcattttttatggctgcatagtattccatagtgtatatgtgccacattttyttaatgcagtctatcattgttggacatttgggttggttccaagtctttgctattgtgaataatgccgcaataaacataagtgagcatgtgtcttcatagcagcatgatttataatcctttgggtatatagccagtaatgggatggctgggtcaaacggtatttccagttctagatccctgaggaatcaccacactgacttccacaaagggt

SEQ ID NO: 878423 - DNA, 534 bp, Homo sapiens
  misc_feature 505: n = A,T,C or G
gcaaaaacattgaaggcccgattctttgttggaaaatgctttctggcctattacagaggcaaaaccttaacatgcaaaaagttaacaggaaaggaggtaattaacgatggcgatcacgtggggctgtctcaaggtagcacacaattctcagctgagttttagagtcasaaggttttggaggatggaagagacccatgagaagcatttggaatggaggaaaaagcatggccaaaatatgagggcaaggaaaagaggatgcaagatgtgaggtttcggcgcagggctctcaaccttcagcaggtgtgggaatcccacatcaggactgctggctccaccccgagttttccatcccatagatatggagtaagggccaagaatctgcatttctaacacgctctctggggacctggtgctgctggcctgggaatcactcttttagaaccactgctgtagtggaataagacttgagagaacaaaaattgttatttcccagagaaaccacccnctacagtgtcgatgagaattcatgctggg

SEQ ID NO: 878424 - DNA, 565 bp, Homo sapiens
ctaggccagagcagccttgggggaaatgggaggtaacaatgggcaggttgaagcagggctgccctgtacagccacacactctgtggcctgcactcctccaggggccactcctcacattgccaagggtatgcaataagaagggcgcctcctagagtggggctgtgcacagtcacatacagtggctggagtctgggagtggtcctggaaaagtcgatacagcacacagcccagaacaaagcccygcagaccccttttccagctaggagtcctgggagaggcctcgagggcagtcaccactgcttgcctgggcctgcgagcatctctgaggtgaaatgtgctaaggggccacataagtcggggtatcctattgacacagaatcaataggacagacatggatctacagaaagagatttgtgaggattggctcccatgattgtggaggcggagaagttctttgatctgccagccgccagccggagaaccaggagtggctatgtcctaggcaggaggagatggatgtcccagctcaggcagagagcaaatctgtccttcctccacctcttc

SEQ ID NO: 878425 - DNA, 579 bp, Homo sapiens
atattagtagtatttttgttatgataaattttgtgtttaaacttggtaagagcccattagctgccaagagggaataaggaataaatttcaaaaaatgtacaatttcctttagagaagtttcagaaccaagactaatttacatgaaaagctgtagagaaagtagttgaaaagtccattcataaaacttttattccacttacatgaatttaatacacgtgttcttaacaattatgcttggattgttcatgaaaatttcataagacattaaacaaagctagccatcatctcaagttatttccctgttaactatttttacagcacatgcatgttaggcaagtatcaaaaaaaaaaaaatcacaaaagcaaaaawcctaaaaaaaagttaaatacatgggtttttgttttactgctgtgcttgatatacatgaagtaatgaataccaagcaattcatttttcctgcatctttacttttacatttgttcttaggttgcctaaaacatttaaatacaaataaaatgagtgtagcaaaaataatgaaagctaacagcaggtaactttacaaataatggaatgtgaac

SEQ ID NO: 878426 - DNA, 593 bp, Homo sapiens
tctgagagtaaaagctcctccttctgcatgagggtaggcttagtctgagattcccctccaaagtgtttgcataaagggtcttttttccccctccaaagtgttagcataaagggtctcaattgttatgtctgtgacttgtgctaactttgtattgctcatagaaagacggcaagtggtatgcaaactagtgttcgagcaaatttgcatcatcaatccagaaaatgtcaaagctagaaaggcctttgaagggcatctggtctattcccttcattttaaagagagctgaggtcaatgagctgtgtgacttgggatgagcagcactgtgccagggtgttttggaaacactaccctctggcatcatcatatctctgcttctagcagagaggagttaacagatatagggtactgttgtgacwtctatgggaatgatctggggaggtagccccataactactgcacacatagagaaatacctccctggatgtttaagcatgtagataacccagccaatttgggcagttttttctattttttttttcttcttaatgtacaacatcagttaatcaaacacaaactgctccagctaatgctgg

SEQ ID NO: 878427 - DNA, 548 bp, Homo sapiens
gggcaacatagtgagacccagtctctacaaaaataataataataataatacaaaaaaaatttgccaagcatagtggcgtgtacctgtagtgctagctacctggaagtctcaggtgggagggtcacctgagcccaggagtttgaggctgcagtaaactatgattacaccactgtactccagcctggcaacwgagtgagaccctgtctcttaaaaaagaaagagtttgtgttactggataccctgattgggtgggatggaagcacattacatctgtgttagagtccaaactataatatgtgaagttttcctttatatgtttggctgactattcaacaaatattaattgagcatctactctgtgccaggcactttgcttggcattaaggatagagccgtgagcaaaacaggtctccatgcttttaggagctcatgaatgttcctccattgaaaaatttattttgcaatatttaatatataaaaatacattaaaaacatattctttatatcaaaaacatataaagaataatgaattcttgtatgccgtcctt

SEQ ID NO: 878428 - DNA, 541 bp, Homo sapiens
aaaccatcagatcttgtgagaactccctatcatgagaacagcatgggggaaactgcccccatgacccagtcacctgccaccaggaccctccctggactcacagggattacaacttgaaatgagatttgggtggggacacagagccaaaccacatcaaccactatgcttacataagagaggggggccttcatgtcttcatctcttcckgcttggacagagtcttggttacctccttcttggcctgaagtggctcctcggggcactcctgtacttccttggtcttaaccttgggggcctatctggttagccaggggcttcttgcaggccttctctgccttcagcttgtggatgtgtttcaggagaatctgcttgattctcattcacctaaaagataatgtaatttttaagagaaaaaaagtcagatgttatttttctttgagtaccatggccacagccatacatcttgctcaggcaaccgaagaggcatgcctccagcatcctctgccatgacgaaaaggcctcataggatcccagtgaaacc

SEQ ID NO: 878429 - DNA, 630 bp, Homo sapiens
atttcttgtttttgtcaggtttgtcaaagatcagatggtcgtagatgtgtggtattatttctgagggctctgttctgttccattggtctatatgtctgttttggtatcagtaccatgctgttttggttactgtagccttgtagtatagtttgaagtcaggtagtgtgatgtctccagctttgttctttttgcttaggattgtcttggcaatgcaggctcttttttggttccatatgaactttaaagtagatttttctaattctgtgaakaaagtcattggtagcttgatggggatggcattgaatctataaactacctttggcagtatggctattttcatattgattcttcctatccatgagcatggaatgttcttccatttgtttgtgtcctcttttatttcgttgagcagtggtttgtagttctccttgaagaggtccttcacatcccttgtaagctggattcctaggtattttactctctttgtagcaattgtgaatgggagttcactcatgatttggctgtttgctgttattggtgtataagaatgcttgtgatttttgcacattcattttatatcctgagactttgctgaagttgcctctcagcttaaggaaattttgggctgag

SEQ ID NO: 878430 - DNA, 605 bp, Homo sapiens
cccagctacgcaggaggctaaggccaggggatcacttgagtccaggagttagagactgcaaagagctatgatcatgccactgcactatagcctgggcaacaaagcaagaccgtatctctccaaaataaaaaataaaaacctgcaagttaaaactacagaatttttccaaagttattaaaaccatctcaaattattgtaaactttatagtaaaaagtccttgtaaatcagtatatttatcacttggtaaatttagtgaactggtcatttgatgaaatttgcaaatctataaatgttaaaatgttgtcaatagggaaaatgacttatataatagaataatatttaagtgtaacctaagaaaaatttatagaaaactcaaaaaatgtagttatgttcaaaaaaactatgcatttattcaacaatatcactgtatatctcttatgagccaagccctattytaggcacttaggcaacatcagtgaacaaaataaagatttttgcctccatagaataataagcatatcagtgctattgcatgtcaaaagacaaagagtgcaacaggaaaacagaaatgtatagcaggatgagggaatcagaaatgcaggag

SEQ ID NO: 878431 - DNA, 693 bp, Homo sapiens
caagatatttattactattatttattataatacctcccacttccccttcactgttccttcccatttttcaggttttttttttggtatcttttctactttattgggacacaggtgtcccataaaattagggtcccaattaggtattagggtcccaatttagtgactctaattcccatatttgttttagtgttttcttggttttgttatttgtaagttgaatttgttttgctcgtctgcttctatcattttatctgtaatttaaaaaactcttcctttattttgaagtaatgtggtttcttattcctttcttctatatcccacaagccctttctacttcaaagtgtcatccactgataaacgccagctgggagcttgttagaaatgtagactctcaggccctatcccagacctactgaatttgaatctgtgttttaacaaaacccccagctgagtcacatacattttaggtacgagaaacattgttttacagtgttttttgaagactctaacccttgggatccacgatggttttatttttgacttctactyttttttgggggagagtggggttgtaccagcttacctttcctatcctcttgttgtctgaccatcttctccctgattcttacatttctttctgtagcattccttccttcataaaggctatttatagttcatggtgaaagtcctgat

SEQ ID NO: 878432 - DNA, 650 bp, Homo sapiens
tcatgtatatctagatataggatttctgggtcatataaaattatatttaaaaattttttagaagctgccatactgttttctacagtgactacatcatttgacattccctccagcaatacacagggttccaatttctccacattcttaccaacacttgttattttctgcttttttctttgtttttatatatatataatagccattctaatgtgtatggagtctcattgtggttttgacttgcatttccctaatgactagtgatattaagcatcttttcatgtcctcattggccatttgtatatcatttttggagaaatatctattcaagttctttgtccatttttgaactgggttgcttattattttgctgttgagttgtagaagttcttttatgttctggatatgaattccttatctggcatatgatttggaaatattttcttcyatcatgtgggctgtcttttcactctcttggtagtgttctttgttgaataaatgtttttaaatctgatgaagttcaatttatttttcttttgttgcctatgctttgggtgtactatctaagaaataatcaccaaatccaatgtcatgaagctttcatcttatgttttcttctaagagttttatagtttttgtgcttttgtttaggt

SEQ ID NO: 878433 - DNA, 636 bp, Homo sapiens
gctctgcccctgcagcaaacttttgcctgggcatccaggcatttccatacatcttctaaaatctagccggaggttcctaaacctcaatcctttacttctgtgcacccacaggctcaacactacatggaagctgccaaggcttggggcttccaccctctgaagccacagcccaagctctacgttggcccctttcagccatggctggagccttgaacayagagcaccatgtctctaggctgcatacagcttggggaccccgggcccagcccacaaaaccactttttcctcctaggcctccaggcctgtaatgtgaggggctgcggtgaaggtctctgacatgggctggagatgttttccccatggtattggtgattaacattaggctccttgctacttatgcaaatttctgcagccggcttgaatttctcctcaaaaaatgggtttttcattcctactgcattgtcaggctgcaaattttctgaacctttatgctgtttcccttttaaaacagaatgcttttgacagcacccaagtcacctttgaatgttttgctgcttagaaatttattctgctagatagcctaaatcatctctctcaagttcaaagttccacaaatcttcagggcagggcaaaatg

SEQ ID NO: 878434 - DNA, 622 bp, Homo sapiens
actaagtcccaaagattattaccctatattatctcttaaatcacaccccctcttacttaggacaggaacatacccctgaacaacagtgctcagctgagggggtgaacaaggctaaaacccagccaatcactgctggcaaggccttgagccctggctccaggctgcacctgccttaggaaggggcgtctctctacgacactgaatggcctcctgtggatcaccacagacctgctttaaccaycttaactgcaaccaccttgttcttggcccttatttatacgttgaccactatgaccatctcctaacactcctagaggtaacttaaactgcatacacacacatatattcataactgaacaagctttatgcatatttacaaattaaatgtgccatcactgaaattcaaattaaaagcattaatcaaatgtgaccaacatactgtttgactaaaattgaacctcttctgctccaaggaggataaggagctgacagctatgttacaagatctatctagttttgtactatatagaccatgtgttatgcaatgactcaatatccaatcaatgtttctctctgataaagtccttccaaactgtctgttggcatcatttggccattatga

SEQ ID NO: 878435 - DNA, 535 bp, Homo sapiens
ggaacaactacgggcatgctcccagaaaattaccccttagttcacatatgtagcagacaattataatccccaatatttagtattttaggttcattgatcaggtgtttgctaaaaacctcctaaaatgataaggccatcctgaagcctactaaccccagttagtccattggtgcagtctctacccaggaagctccccaaaatatctctctaggagcatccctcccacagagagcttattattactttttttttttttttttggtggagatgattatcttagtttagaagcccctcattttaactgggcctacagtttastctgcagaaatacaaaggggtggagtaagttaatgttgaagtgaatgtggagagcgaggacagaggaaggaatcttagatatttcccacaactggaagacaagtgtgagaggagaaatcattgcccagaaaatcactaaaagagaaatataacattcttcttgtggtacatgtataactaaaatacttggcacttttctgtaatcaatgattactct

SEQ ID NO: 878436 - DNA, 584 bp, Homo sapiens
aaaatgcatgtgtgaaaaggctggatttcaagggatggagtagaaacccagcttttccttccataatcaaattgcataatgtcgttaaatcatgtctgctttaagttctaaaatgttctcctgtctgttgggcagaaaggccacagaagcaaatcctctttttcttattgtccttgaaggacctggggggttctttctgcagaggaagagcattgagaatatttaaaaagagcttcccaagcagccctcctaattgtccaagatcttaggatataacaagatatacatttaaatatgtgtttcagcattttttacatgtcctgaaagccctaaggaattcacagttatcagacaacctgaccaccatcaaaatacaatatttaaacaccagcaaaatatctcttatcctasgacttgtaagaggctcatattaatggtatggattccagtcatcagaatcaaagttttctccaaaggtagaatgcacatgctgatttaatggttcattaatttctctgctatcattgatggaggttttaggctgccattatttatcagtgatgctggggaccactggtacagct

SEQ ID NO: 878437 - DNA, 615 bp, Homo sapiens
agcaccgtggcacacgtttacccgtgtaacaaacttgcacatcctgcacatgtcccttggaacttataaaaataaagaattcaacaattattcacggtttaagaaatatgctttcttcagtatttggtattttttctatttccccactctctgccaaaagtacattcaggcacctcagaagcaaccaagtcgcatcttttytctctctaaattatcaaggcagaggtctcatttctctacttcctttgcctgagtagaaagggtaactcagtgaaagtgctgtgtgtgacgtgtctgggaaagctacatgggggaagcaaacacacctgttatggaaacatctgtgagttttcccaaggagagcaagaagcacttgtgtgtccgcaacagatggtgctcctcccgctaaccgcagagtcatgcccatctgtccatctgtccaatatagtacagttgcaccgcctgaatttgctcacttttgattccctgatcctgttggaatagcaggctatggcattcctgtgggaaaatgtactgtgtaccacagtggttcgaattatgtactggaatttagtaagtaaaaccctggaataaccaactttcctcatcgtatgt

SEQ ID NO: 878438 - DNA, 625 bp, Homo sapiens
tcttttgatattctatattgcttctcataggtgttctgaactctgccacatttttcagaagtctttgttttttatggtgatagactaagcatcctggtgcagtagggaagcattccagtcttgactccagctctatgtactgtgtgacattgagcatgtcatttaatttcctgagacattggactctcctgtctgtaaaatggggatggttagagaagcatggaaaaacctggagacctttggctagaaratattatgtgaatgggattgactgaaatgagctgttgatctccgactcatccctatgtaaaggaacagccctggattacttcagggccaccttctctagtacacttgattgtaaccagagtaggatgatcaaaacttgagcatgtcaatggatgcagaagaaatgtctctgactgattttcttataagggaactccatattgtgcatgcttatacacgtaaggcatcctctccaggacatggtgatagatatgtgtttaaattaacatcataaatacttaatttcatggcatataaagaacactggggtaggggtcgaaggataagagagccagttttgtacatctcatcctaactctgcatgtggtaacatcat

SEQ ID NO: 878439 - DNA, 564 bp, Homo sapiens
caaaatgtagtgaatgaatgttcaaagagaaggtggcctacaaacatcaagcctttttggtatgtatcaacaaggaattatatcctgtatgcaaatacattaagaatgatattccaaccagatcttgaggacagtcacccagcaaagacaccactatctaaactgccactctattaaagaaaaacacactttggagtgtgtgtggtggtaaaaattactttatccactagtatttgaggagctccatagccagaktgaatcttcttaaccagtgtgagacagcaagattcagattctgttaggataaagctgtgtatatagggctaaaggagaataatgtagattaagtaataagtagcctgcccttaaccatggggactacatttcaagatgcctggttgatgcctgaaatcgaggatagtaccaaaccctgtgtatgctatgcattaattttttttcttcacaactgcacagatgaagtttggttcttacaatgtagatcttagccagcttagtatatatatattttctttccttattaacaacttaaaggaagcattctat

SEQ ID NO: 878440 - DNA, 530 bp, Homo sapiens
ggttatgaaagaaaaaaaaagaatttcactgaagcatacgcatgctgtgaagatacttttgcaggtatagttgctccagaaagaaagctgagactgggtattatgtgtatagaacactctcatatattaaaggcacacatttcagcaaagtgagaggactccaagatatatatgtatgtacacacacatacacacacaaaatttcaggactaaccttctagacggcaataaaaaattgccacaagagtatctgtgtttttggaagcatgttctgaatcaacagtgtctagcaactcaagttgaacatagttgtatgtgctagaggtagtgagttttaactggaaaatctcactgtttgcttgcrtgctgtccacacagtgaaggacatggttgaaggcatagaaagaatatggtttactatgtctccatgatggaaagtaggttttcatatcctttaccatcctcacaagttcttcagaaagcttttttttttttttaaattgtgctttttccttctagtgtactttagt

SEQ ID NO: 878441 - DNA, 631 bp, Homo sapiens
gaacaagggctttaaaaagtgggtgcccctctctcttagggcccttggaagggtctgagctatcctggcccacatctcattgcctgatcatcctgtcaagagtgggccatccagagtgtgctggaaccggttgactgggaattgggagtcagccacctcaggggttgattttccagttagagtttgtctaccaggaattaatgttgacatgtgttgagagatgaggggtccaactttatttttctagatagacccactatttattaaagaagctgtgattttcccataaaaatgaaataccacctttwtcatttattaaattttcatattagttggggtctatttctttttgtttgtccactctgttctgatcatttgtatgtctattcctattgtttggggtacagttactttagagtgctgagtctgggctccctgtctattctcttttttttttttttttttttgagatggagtctcactctgtcacccaggctggagtgcagtggcacaacagctcactgcaacctctacctcctgggttcaagcgattctcctgcctcagcctcctgagtaactgggattataggcgtgtgcctccacaccccactaatttttgtatttttagagg

SEQ ID NO: 878442 - DNA, 557 bp, Homo sapiens
actgccaaaagcaatttataaactcaatgaaattcacatcaaaattctaccatcatacctcacagaactagaaataaacatcctaaaattcatgtagaaccaaaaaagggcccagctagccaaagcaatattaagcaaaaataacaaatctggaggcattacattacccaacttcaaactataacacaagactatagtcatggaaacagcatggtactggkataatattgggcacatagacccatggagcagaatagagaactgaggaaaaaaaggaaaacacttacagtcaactgatcttcgacaaagcaaaccaaaacataaagtggggaaaggataccctattcaacaaaggtgctgggataattaattggcaagccacatgtataagaatgaaactgaatcctcatctctcaccttatacaaaaatccactcaagatggatcaaaggtttaagtctaagacaaaaaccacaaaaaatctagaagataacattggaaacacccttctagacactggccgaggcaaagacttcatgaccaagaaccctaaagcaa

SEQ ID NO: 878443 - DNA, 542 bp, Homo sapiens
ggataaaatagagtgcagtgtatactgctcaggtgatgggcgcaccaaaatctcacagatcaccactaaagaacttactcatgcgaccaaacaccacctgtaccccaataacctatggaaaaaaaaagctttttctagaattaaaaaaaagtggtcagcttgatgtttaattgcagaatygatctttttttataaaagaaaatataatgcttattaaatagcagaaataaagttatgtttgaccttacaaaagatatatctgatatctgaagagttaagattaaggaggttgaaaatgttccagaagtaagaataattacaagaaatgcatgtcttgtaggcaaatggttcttatgaagttaagagcttgcttttacatggatgagaggacaaggtttggataaaggcttgattggccttccacgtgtggagagacatctttttatcattcctgtaagaaagttggtgatgtatcaggaacaaatagtttaaaaatcaggtctgagacctaggtattaaggtgataaatgctttatggttga

SEQ ID NO: 878444 - DNA, 542 bp, Homo sapiens
ggataaaatagagtgcagtgtatactgctcaggtgatgggcgcaccaaaatctcacagatcaccactaaagaacttactcatgcgaccaaacaccacctgtaccccaataacctatggaaaaaaaaagctttttctagaattaaaaaaaagtggtcagcttgatgtttaattgcagaatcgatctttttttataaaagaaaatataatgcttattaaatagcagaaataaagttatgtttgaccttacaaaagatatatctgatatctgaagagttaagattaaggaggttgaaaatgttccagaagtaagaataattacaagaaatgcatgtcttgtaggcaaatggttcttatraagttaagagcttgcttttacatggatgagaggacaaggtttggataaaggcttgattggccttccacgtgtggagagacatctttttatcattcctgtaagaaagttggtgatgtatcaggaacaaatagtttaaaaatcaggtctgagacctaggtattaaggtgataaatgctttatggttga

SEQ ID NO: 878445 - DNA, 591 bp, Homo sapiens
ggcagagcgagtcagtccccaggctcctggatggtctgcatgagcctcagcagtggaggtggcagtggtgggtgagatgagcttgtccttaggccatgggatggcacccaagtgggcaggccttcaggcccagtgaactctcatgcaagtgcatggcagttctgttgctggcaggggtagttgcagtcagtagcagtagccccaggcaggggactgtcaagctctggggagcacacacttgcaccctttgtcccaatggcagattctctgacgtgctgcactgcctgttccctggagcatagcatggactaggatgttggggagccaggtgcactgctgatttcagccagcatcacaatgctgtagctcttggtgtagacatagggtgatgtcagcagagctccagagttgtgaataaatagggggtyttaagcccagggcaggatatagtctagtggggtttgaggtctgaaaatggcactctgctataactatttagattttaaggggtgtgtgggacccagcacaaaactccctttctgtagcaatgccatttcgtggactccagccagctctgtgtcatagtctcag

SEQ ID NO: 878446 - DNA, 612 bp, Homo sapiens
acaagctatcaactgacaatttcaaggcccatctgttacactggcataatgcccacttaaaatgtggtatgccaatttcattaatgtttaggttgtgagtcaaaaccttaatcagtcaaaataggatactagaaaataaaacttttcagttgattgtcccttttcattctaggaataagaaataacctggcaatcyaatacgcaaaagtaacttcttgaatctgctcaggatcattatgaagaccaacccaatccttgagccctggtgctaagaatagaccaaatgtacatcaaggtttggtccaaaaaggcatcataaaaaatgctgcatctaaagaatgtggacatttgacattttctcatcctatacatctcccaccctcccctcaaaattccaaatacacagatgctcgatatttttgtaataatagcatacgagtattcagtcataaagaaattaactaaagtccatcatttgttcatttactgagaacctactgtgtgcaagacactagtgtaggtgctgggatacaccataaatctgtggactcataatatttacattatagtttcaccgttggaatgaacttcataaatcttgtagcccaaata

SEQ ID NO: 878447 - DNA, 647 bp, Homo sapiens
aaatggaaaccatgctcacgaattaaaaaaaaaaaaaaaaaaaaaaaggctgggctcagtggctcacgcctgtaatcccatccctttgggaggccaaggtaggtggatcattaggtcaagagattgagaccatcctggccaacatggtgaaaccccatctctactaaaaatacaaaaaattagctgcatttggtggcacatgcctgtagtcccagctactcaggaggctgaggcaaaaaaatttyttaaatccaggaggtggaggttgcagtaagccgagattgcaccactgcactccagcctggtgatagagcaaggctccgtctcaaaaaaaaaaaaaaaaaaaaaaaaaatgttgtttaaatgaccatactacacaaagctatcttcaaattcaatttaacccctatcaaaataccaatgtgacttttcacagaaagagatgaaacaatcacaaaattcatatgaaaacaagaaataacttcaataaaaaagaaatcctaagcaaagagcaaaaagttgaaggaatcacaccacctgattaaaaatatattacacggcaatagtaatcaaatagcattagtataaaaacagacacatagaccaacagatcagaataaagaacccagaaataaattcacgcattt

SEQ ID NO: 878448 - DNA, 532 bp, Homo sapiens
gagtggctgaatagataaaaaaagtaagacccaactacatactactttcaagaattccacttcacctatatagacacacacagactaaaagtgaaaaggtgaaaaaagatatttcatgcaactgaaaatcaaaaaagagcaggagtagctatacttagataagagaatacaaatcaaagactgtaaaaagagaaaagacagtgactgtaaaatgataaaggcgtcaacttagcaagagagtatataataattacaaatctctatgcacacaacaccagggctcccaagtatataaaacaaacattaaaaatttgaaggtagagatagaytacaaaacaataatagtaggggactttaacaccctactctcggtaatgaacagttcattcaagcaaaaataatcaacaaagaaacatcagagttaaaactacacactagatctaatatgcctaactgaaattgatagaacattgcacccaattgctgcagaatacacattctttacatcagcacatagtatattctccagaat

SEQ ID NO: 878449 - DNA, 573 bp, Homo sapiens
atttaaccaaagaaatgaaagatctatataaggaaaactatagaaacactgatgaaagaaattgaaaaagacaccaaaaatgaaaagatattccacgttcattgattagaagaatattgttaaaatgacaacactatccaaaacaatttacagattcaatgtgatacctatcaatattccartgacattcttcacagaaatataaaatgcatggaataacaaaagacaccaaatagtcaaagcaatcctgagcaaaaagaacaaaggaaaggcatcacactacctgacttcaaattttactacaaagccagagtaaccagatcgtcatggtactggcataaaaacagacatatagaccaatggaacagaatagagaacccagatatatattcacaaatttacagccaacttatcttcaacaaaagtaccaagaacctacagtggggaaaggacaatctttttaatcagtgatgtggcaaaaaatggatagctatattatatgcagaagaatgaaactagaacccctcaccttaccaaaaatttaaatcacaatggattaacaacttaaatgta

SEQ ID NO: 878450 - DNA, 619 bp, Homo sapiens
aggagatcaaatcactctatggaaaaaaatctaacatgattctttaaaatggacaaaagctccaaacagacatttttcaaaagaggacatacaggagacaggaggaagatgttggataggaggcaggactaatgtgcatttcccacctggaatgaaagaagattgtgtggagactcagamcatgaacttttgttccaaaaaccattgcaggagtgtaccgggaaaacagagaattcacagatattctgaaagaagcggcatgctgctacaaattctatgagacaggcgaaaaactgtgagttcccaaagtgtgagaggggaaaaatctgcctcctaacatatcccactggggaatctgaaaatccagatcactggagaaggatttaaacttacctagagctggaaaggatttagggagtcacacaaaacataaatgtagaagtagcagcaggaagagccttataggcactcccattctccagcttgcacccagggaagccatccctgactatatctcacaggggccctcaggaaaggcagccagcacaattaagtaggggtcacagggtgaaagcagcttcaaactaaattttgtagtaatattgattgggcatgaacc

SEQ ID NO: 878451 - DNA, 569 bp, Homo sapiens
gcatggttcagataaattaaggcaagtagattttgatgatgaggaacgaatgacttatacccttctgatgacagcattttcttattaggaaggatgattatatttccaaattgactcccaatttttctttctccagaagagccctgaccataactacttacggttttgtaaccttgcataaaacagcatcttttctaacaaaaatgcctgttttaaatttgactttcatttataaacaagcttattagtcaaaggaatgtggctctttcatcccttttaaaccctcataagtattttctgcattcaaattatgaagagaagctttaactgtacaaacaakgtgcatgctcacgttggcatttctttgatttaggtatgaaattatttggcatgtttctaattactttctcttcagctaaatcttcaattatgctgttttcttttgtttgtcttgtttcaataagtaagagattgagtagttataattttgttggtaagacattgtcaaaattgaagagattgagtagttgtaattttgtttgtaaaacaagtaaacgaataaaaagttc

SEQ ID NO: 878452 - DNA, 590 bp, Homo sapiens
tttaatcatacatagcttttaatagctaatttaacacatttcaaaaacacatgaaacattatttttcttgttagcaaagaaaaatatagtctacatgaatattataaagatagtgaaatgcaaaccataatggtttctatcaatgaattaattacatgttcttagcttttctctgtggggttcttatcttcagtctgacagacacaaaatgtgactgtatttaagaaagtgaaaataaccacagtggcaatttatttatctttcattattgtaaaaggaaagattttccttaataaagttctttgcacataaattacttttcckgaaaacagaattttgttgctttacatattaactttaaagtttttgactattttatagatatttaaattaacatttcatctactttcttgctgttttaaccagataatactgagcataatttaaacatttttgtagataactgaggatcaaaaaataaatccaaattattttaaccttctgtaattaaagaacctcagaatccagaaagtcttagtatcatgtatgccgtgatgaacttagccataaagctactggaaattattagc

SEQ ID NO: 878453 - DNA, 606 bp, Homo sapiens
ttgtatgcaatattataaagtaagtattaataactcccagtaatacaaataatgattccagagttgctagtctgaaaacatttgaggactctttttttttgagacggagtcttgctctgtcacccaggctggagtgcagtggcttaatctcggctcactgccagctccgcctccggggttcatgccattctcctccctcagcctcccgagtagctgggactacaggcgcccaccaccacrcccagctaatttttttgtatttttagtagagatggggtttcaccgtgttagccaggatggtctcgatctcctgaccttgtgatctgcctgcctcggcctcccaaagtgctgggattacaggcgtgagccaccgcgcccagccttgaggactcttaaaagaggaaaattcaattaatagagtcaatgatgaaaaagtcaagacagagtttctaatattttccttgatgttagttttgcagaaagacaacatgagatagaggtcgtatcttttccacataccaaatgagaggtttattttaaaataatgttaaagtagtaacacaaatgatagggaataatatatgtcaacgtgagtgggcttcttgt

SEQ ID NO: 878454 - DNA, 595 bp, Homo sapiens
ttttattgatatgttcggccctcctcctcaaccctgtctttgagggcatgcgcctgcttcccatcacaattctgaatgtaaggtattaattggagcaacagcagaaagatttgggaaagcgatggtaagacaagcctgtgtacccactgtgtggtgcagcaaagacacgtgaatttctcatgggttcaaaaaggggttatagaagttgaccaggttatgagccatcctgtargaactcttcactggagggtagcctgtgtggttagggtatatccatagcacaaagtcatgggtaagtcctgggaatagaacctgagggggttccaatatatcgggcaaagtgtgcattatacacatcaggcatgtgtgacctatgagaaatctacaagcgagcatgttagcccactctacacgaaggaccaaattatacatgatttttcactttttttccccattcctcctccttagcctcaacacattaaagaaggaaggggaaagaagaagagggagaggcacagtgaagaagaaaagtagagttaaatagagtccttagccacttgcccacgatgggtcttgtagccacgtgttagaccta

SEQ ID NO: 878455 - DNA, 677 bp, Homo sapiens
tagaagagaaacaaaatatacctatataaatataaacctatagtgtgtcaggttatgattaatgcaatggaacaaaaagcaagacccgagaccaaagtaggccctctttgaaaaaataacattagagaaaagacctgagggaagtaagaaagagtgctttgagggtgtctgtgaaaagttcattcaagatggaggaaacaaagtacaagggtacaaggtggaggaagcaaagtacagagtgaatgactggaccagagaagcaagaagatgagattgaggaagttgagaaaagaaatattaccatacagcctggtaggccatagaaagtactttggatgttaattggagtaaaggtaaaaaggaaagccactggagaatttgagcagagagtaagccttatattttaaataaacagtaagactcacgttttaaatgaatcatactgactttgatgtgaaaaatagaatataatgaggcaagtataggaatagtcagaarctattagaatattgtaaggatttggtggctagatgaagatagtcatagtaaaggcagttgagaagtggtgaaatcctggatatattttgaagataaggggacaggatactccaattgatttgtatggaggataagagagaagaatttaaaagttttggactgaacaatgggctaaacag

SEQ ID NO: 878456 - DNA, 550 bp, Homo sapiens
gttacaaagacagggtgcattcatgaacttagttcaacattcaccctgcatagcgatggggtgcgaaaaggaaggcagcaatgaagtcacttacagtttgcaattcagctgtcatgtggaagtctgcagtaggtatgagcaaaatatactgtgaagaatatgtggctcaatattatacagcaaaatcgaactttgcaactgcttatgcatagttaactacctgggactagcctgctctggtgcaccactttatagatcaataaaaaattaaactaaaaatacagactcctaggtaacygtggtcacagtacaactctatcttcctttgcaggcttattatttcctgaagctgtggctgacaggttctatgagcacacatttttgcatatattttgtttatgtgcaagccttggcatttcagccatctcctgctggggccccttccaaccatatgcttctgtttttcttcattaggtgatgtgatcccttttgactgttgcatgcacgtgaaaggacagtgggctttggggggagaagaaaccctgcttta

SEQ ID NO: 878457 - DNA, 665 bp, Homo sapiens
tgtacatctttaaaaataagttctatgcacttaacaataatttatgtgtgtatgcattcctttgaaaccactgatgatatctgctgctgtatatcttgatttattttcaatttaacaatggatcttggagatggtttcttttttatttcttgattgtatagtctttattagaygaacacaccagaactcatttggccattcctgtactaatgtacatttactaggttttcagtattttgcttctacaaacaatactgcaataaatattttcatccgtagatcattgtgcatgtggacatagctgtagaaaaaaatcactagaggtggaagtgttaaaaggtatatgaatttaaatttgcaatgggtagagtaaaatcgtactctagaaatgtgaagacattctatcaaccatgcttgagagtgttcgatgctccacactttggccaatctgaagcattttctgtattcttcacaattcccctgggtaaccaataagatgattttaaactaaaagatagcttgttgttaggtcatcacaaccatcccacaagtgtttgccttggtgttttcaaaggatctctgaagatgctttatgaatcatttcttgttgttagatgcctaagtgcagttgtcaaggctgtagaactgccaaggaggaagggaag

SEQ ID NO: 878458 - DNA, 605 bp, Homo sapiens
tgtgtgttgttcccctccctatgtccatgtgttctcattgttcagctcccaattataagggagaacatgtagtgtttggttttctgttcctgcgttagtttgcagagcatagtggcttccagctccaaccatgtccctgcaaaacacatgatcccattctttttcatggcttcatagtattccatggtgtatatgtaccacattttctttatccaggctagcattgatgggcatttgggttgactccatgttattgctattgtgaatagtgctgcaatgaacatacacatgcatgtatctttataaaagaatgatttatattcctttgggtatatatgcagtaatgggatkgctgggttgtattagttcattttcatgctgctgataaagacatacacagactgagtaatgtataaaggaaaagaggtttaatggactcagtcccacgtggctggggaggcctcacaatcatggcagaaggcaaaagtcacatcttatatggtggcaggcaagaaagaaatgggaactaagtgaaaggtatttccccttataaaaccataagatctaatgagacttcttcactaccatgagaacagtatgaggga

SEQ ID NO: 878459 - DNA, 578 bp, Homo sapiens
gtagttttccctgtaaatttgtttaaattcctcatagattctggatattagacatttgtcagacggacagattgcaaaacttttctcccactctgtaggttgcctgtttgctctgatgatagtttattttgctgtgcagaagctctttatcttaatttgataccatttgtcaatttttgcttttgttgcaattgcttttggcgatttagtcataaaacctttgcctgtgcctatgtcctaaatagyattgtctagattttctttattttattttatttatttatttttgagacaacgtctcgctctgtcgcccaggggctgaagtgcagtggcatgatctctgctcactgcaacctccgcctccgaggttcaagcgattctcctgcctcagcctcccaagtagctgggatcacaggtgcaccacgcccagctaatgttttgtatttttagtagagacagggtttcaccatgttagccaggatggtctcgatctcctgaccttgtgatccacccacttcagcctcccaaaatgctgggattataggcatgagccactgcgcctggccttgcctagattt

SEQ ID NO: 878460 - DNA, 578 bp, Homo sapiens
gtagttttccctgtaaatttgtttaaattcctcatagattctggatattagacatttgtcagacggacagattgcaaaacttttctcccactctgtaggttgcctgtttgctctgatgatagtttattttgctgtgcagaagctctttatcttaatttgataccatttgtcaatttttgcttttgttgcaattgcttttggcgatttagtcataaaacctttgcctgtgcctatgtcctaaatagtattgtctagattttctttattttattttatttatttatttttgagacaamgtctcgctctgtcgcccaggggctgaagtgcagtggcatgatctctgctcactgcaacctccgcctccgaggttcaagcgattctcctgcctcagcctcccaagtagctgggatcacaggtgcaccacgcccagctaatgttttgtatttttagtagagacagggtttcaccatgttagccaggatggtctcgatctcctgaccttgtgatccacccacttcagcctcccaaaatgctgggattataggcatgagccactgcgcctggccttgcctagattt

SEQ ID NO: 878461 - DNA, 578 bp, Homo sapiens
gtagttttccctgtaaatttgtttaaattcctcatagattctggatattagacatttgtcagacggacagattgcaaaacttttctcccactctgtaggttgcctgtttgctctgatgatagtttattttgctgtgcagaagctctttatcttaatttgataccatttgtcaatttttgcttttgttgcaattgcttttggcgatttagtcataaaacctttgcctgtgcctatgtcctaaatagtattgtctagattttctttattttattttatttatttatttttgagacaacgtctcgctctgtcgcccaggggytgaagtgcagtggcatgatctctgctcactgcaacctccgcctccgaggttcaagcgattctcctgcctcagcctcccaagtagctgggatcacaggtgcaccacgcccagctaatgttttgtatttttagtagagacagggtttcaccatgttagccaggatggtctcgatctcctgaccttgtgatccacccacttcagcctcccaaaatgctgggattataggcatgagccactgcgcctggccttgcctagattt

SEQ ID NO: 878462 - DNA, 599 bp, Homo sapiens
ctctttctcctttaaatattgaagtcttcaaaactctctttgggaagatcacaatgttcctttttggacacattctcaatcttggcaaaataaacctctaaaataattatgactcccctcagtcattttccttgatttatattcttttggctttgtacctcctggaatgtaggaattctgtctctcatccttggtaatctaccattcrccttctttactgcacaaatattagtcaataaacatttgatatataaatgaatgaacacatatgcaaaaataaattgagttcaaaataaaagccatcgtggatgccattcaagagcttttaataattaaagtatagattctaagttggttttaccattaaagtatttaactcttatgatatgaagcctgaagtgatttggtgttcgtttcttcatagaaggaacaataacttgggtgattatcttcatcacaattatttttctaactataacccagatttctcagtgtctcctgcttgatcatctttctgctaccaacaactaaatttgatttatccgagcctcagtcctcacgctgtcttctccagttccatggctttattttatttttga

SEQ ID NO: 878463 - DNA, 680 bp, Homo sapiens
aaatagtgacaacaccaaatgctgatgaggtatggaaaaactggatttctcaagcattgctggagggaatgtaaatgttgagctattttggaaaactgatagtttcttttaaaactaaacattcaactacaatgtggcccaatcattgtactcctaagcatttatttcagagaaatgcacccttatattcacaaaaagcctgtacatagttgtttatagaagttttatttgaaatagacagaaactggaaacaacccatatgtctttcaatgggtgaatgtttaaataaactgtgatacatccaaaccatgaaatactattcagcaatagaaaagaatgaactactgtattgatacatgcaataacttcgatggatctcctggaattatgctgagtgaaaaaagctaattctagtaggtcatatactatgtgatcccacytctatgacatacttggaatgtcaaaattatagaaatgaagagaagattagttgttgccacctgttggggacagcgttggagagatggaagtggttgtggtttaaaaggcaacacagggaatccttgcaatgatggaactgttctgtattgttctgtatctttactataccgatatcaaaatcctgtttgtggtatcatactagagttgtgaaagatgttatctttggggaaaaataggta

SEQ ID NO: 878464 - DNA, 564 bp, Homo sapiens
ccaggtgccttctgccacccctttctttgactaggaaagggaacttcctgaccccttgcacttcccgagggaggcagtgcctcaccctgctttggcttgcaaacggtgcgctgcacccactgtcctgtacccactgtctggcactccctagtgagaggaacccggtacctcagatggaaatgcagaaatcacccatcttctgtgtcgctcacgctgggagctgtagaccagagctgttcctattcagccatcttggctccagtcatttcctgactttttaatgattgccattctaactggtgtgagatgktatctcactgtggttttgatttgcatttctctaatgaccagtgatgatgagctttttttcatgtttgttggctgcataagtgtcttcttttgagaagtgtgtgttcatatactttacccactttttgatcgggttgttttgtttttttcttgtaaatttgtttaagcttcttgtagattctggatattagccctttgttagatggatagattgcaaaaattttctcccattctgtaggttgcctgttcactctc

SEQ ID NO: 878465 - DNA, 633 bp, Homo sapiens
ggagcattttctaacccaatgcaaggaaattaagaaccttgataaaaagttacagaaattgctaactataataaccagtttagcgaagaaaagaaatgacctgatggagctgaaaaacacagcacgagaatttcttgaagcatacacaagtatcaatagctgaattgatcacgcggaagaaagtgtgtcagagattgaagatcaactcaatgaaataaagcaagacaacaarattagagaaaaaaccgccaaacgaaaagaacaaaggctccaagaagtatggaactatgtgaaaagaccaaatctatgtttgattggtgtacctggaagtgacagggagaatggaaccaagttgcaaaacacacttctggatattatccaggacaacatcccaacctagcaagacaggccaacattcaaattcaggaaatacagagaacaccactaagatacttctcaagaagaggaaccccaagacaaataattgtcagattcatcaaggttgaaatgaaggaaaaaatgttaagggcagccagagagaaaggtcaggttacccacaaagagaagtccatcagactaacagtggatctctctgcagaaaccctacaagccagaagagagtgggggccaata

SEQ ID NO: 878466 - DNA, 575 bp, Homo sapiens
ggactcatactgagtgaaaaaagaagggagatttacaatggaggttaagtgtaaaatcttgttggttgagtgtaatttctatctaaatgagacagggtatatacttatttccattttaaatctcccttcaaatatagtaacaaccaacatttttatgaattgtggaacattattaggacattaaagagaaggcactgcaggttttgtcctaatacctagatattaggtgtcttgggggatgttcgtctatcttcctgtgagcccatggcatcttggttctcattacttactattacaaggggccatagtctgaaaaattctcaagattrtaaaattttcttgaaaattaaaacttaaagagtttattactgtgtttggcccaaaaaacaagcttgcaatatatcaattctcttcttgataaaaacagggttgggggtcactaaagccacattttaatatatttaggatatattaacaagagtctgagctgtttattaatcagtgtggtttattataatttttaggggtttctatcatttacctttattaatatctcatccctccctagagtttta

SEQ ID NO: 878467 - DNA, 634 bp, Homo sapiens
ataatggtgaatacgtagtagcaataatagtggtaatagttattgttgttctttttctcacagactaagaaactgagggtcaaagagaaggaaattccttggataaagtgagacataggaagcaataaaactggaacgatagaggatggtcctacattttcacgttagccctttttttgagagcaattgataacaaccgcagcaaacatttctgctgtgctcatctgtgctcagcactttacaagcattatgctatttacttaactcagtaagtccatgagtttatgtacaattgttattcttaaattaaatttgacaaccttgaaactcagaggttgagaaacatgtcctttgtccctccagatctacttgcccccttctcctctgcactgtgcctggrgaggctgcctgctttggactgcctcaacctgctcttttgtcctctggtttctggttgcctttggccagtcggaagcactggcaggagggcttggggtggtcaaggagctatggccaatgccagccctcaggcatgcctcttgaggtttccctgcaccctgcccacacatttgcagagaatctctttattacttatcctcaaattgcccacttgaatgtgccaagtgtttcctgc

SEQ ID NO: 878468 - DNA, 665 bp, Homo sapiens
ctttttattgttaagttataagaattcttcatatattctggatgtaagttcctttttggatttattatttgcataatttgtcttccattctgtagatggtttattcactttcttgatgaattactttgtaaaagttttttyattccttaaatttttaaaatttttattttattttttgtagagatgagggtttccttatgttgagcaggctggtctcgaatttttggcctcaagtgattctcccatctcagcctcccaaagtgctggggttacaggcatgaactactgcacctggctgatagagtcctttaaaatacaaatgtttttaaaatttgtgatgaaatccagtttatctatttttttgtggttgtctatacctttgataccattatctaagaaatgattgcctagcccaaggtcataaaaatttactcctatattttcttctaagtgttctgtagttttagctcttacatggtctatgttccattatgagttaatttttgtaaatggtatgaggtagggcgccaacttcatttttttttttttgcatgtggatattcagttgtctcagcaccttttgttgaaaagactatttttttctccattaatatgccttgtactcttatcaaaaatcatttgattataagtgtaaagttttattt

SEQ ID NO: 878469 - DNA, 665 bp, Homo sapiens
ctttttattgttaagttataagaattcttcatatattctggatgtaagttcctttttggatttattatttgcataatttgtcttccattctgtagatggtttattcactttcttgatgaattactttgtaaaagttttttcattccttaaatttttaaaatttttattttattttttgtagagatgagggtttccttatgttgagcaggctggtctcgaatttttggcctcaagtgattctcccatctcagcctcccaaagtgctggggttacaggcatgaactactgcacctggctgatagagtcctttaaaatacaaatgtttttaaaatttgtgatgaaatccagtttatctatttttttgtggttgtctatacctttgataccattatctaagaaaygattgcctagcccaaggtcataaaaatttactcctatattttcttctaagtgttctgtagttttagctcttacatggtctatgttccattatgagttaatttttgtaaatggtatgaggtagggcgccaacttcatttttttttttttgcatgtggatattcagttgtctcagcaccttttgttgaaaagactatttttttctccattaatatgccttgtactcttatcaaaaatcatttgattataagtgtaaagttttattt

SEQ ID NO: 878470 - DNA, 582 bp, Homo sapiens
tttctatcgctaacacatcatattattttaaattttgtaagctctgacattaaaagtgctaccgaaaacaaaagacacctgtgtaaataaatttgctatatgtatcagataaggtctaaatgggggaaaaagcattcaaatatgtaaagcagaaagaatttagtacagagaattggtgacactggtgatagaagaactgagaagctcagtgacaaatgtcaaacagtgaagcaacccagagattagcaacaacaggaagccaataccaccccttcttttttatttttattatttatttatttatttttaagacagagtctcgctctgtygcccaggctggagtacagtggcatgatctcagctcactacaacctctgcctcctgggttcaagcgattctcctgcctcagcctcctaagtagctgggattacaggcacctgccaccactcctggctaattgttgtgtttttagtagagacggggtttcaccatgttggccaggctggtctctaactcctgaccttgtgatccgcccgccttggcctcctaaagtgctgggattacaggagtgagccaccgcgc

SEQ ID NO: 878471 - DNA, 582 bp, Homo sapiens
tttctatcgctaacacatcatattattttaaattttgtaagctctgacattaaaagtgctaccgaaaacaaaagacacctgtgtaaataaatttgctatatgtatcagataaggtctaaatgggggaaaaagcattcaaatatgtaaagcagaaagaatttagtacagagaattggtgacactggtgatagaagaactgagaagctcagtgacaaatgtcaaacagtgaagcaacccagagattagcaacaacaggaagccaataccaccccttcttttttatttttattatttatttatttatttttaagacagagtctcgctctgttgcccaggctggagtacagtggcatgatctcagctcactrcaacctctgcctcctgggttcaagcgattctcctgcctcagcctcctaagtagctgggattacaggcacctgccaccactcctggctaattgttgtgtttttagtagagacggggtttcaccatgttggccaggctggtctctaactcctgaccttgtgatccgcccgccttggcctcctaaagtgctgggattacaggagtgagccaccgcgc

SEQ ID NO: 878472 - DNA, 621 bp, Homo sapiens
gcctctactgaggatggggaaggtgttctctctggcaaaaaaggttcatcagagtttgcaaactcagtgtccccaggtccatcagggtcctcccacacatccccattccaagttgcagggtcccattcttttccaatcaatgccctcactttaacaatagacacctggcaaggccatgcgtgcatctttcgttgctggtcagccactcgcataataagagcttgagtctgtctttccacaatttcagctctttctctacaggcgataagactctcagggcagtcttagcagatttgaggctcagtatctgcttttgaagctggaggacaraatcctcaagttcatcattttctttcatcactttgttcactgaacttaggagcaaccaaccagctacattatattccttggttctccacatatggtcaaaagtattatgtatagagtcactaaacactaaatttcttgcctctcatgagcagtgaatcagaagtgtcaaatgcatttattttgcataactctctaaacagtttatgccaagtactatcagcgttctctatactattagaagtagagtccttagtatttttgggtctattcataagcagccaactccagaaa

SEQ ID NO: 878473 - DNA, 614 bp, Homo sapiens
ctttttttttgatgtatgaagttatagctataaacttcccttttattactgatttcactgtatgctattggttttggtatattgtgtttccattaccatctatttcaagaaatatttcaattgtcttcttaatttcttcattgacccactggtgattcaggagcatattgtttaatttccatatgttcatatattttccaaaattcctattattggttcctagttttattgctttctgtttagagaatatgtttgataytgtttcaattttctttgaatgttttaagacttgtttttgtggcctatcatatggtctgttcttcggaacgatccatgtgctgaagaatatatattttgcacattctttgaataaagaatgatgcttgaataaagtgatctgtaaatatccattggggccatttgttttataatgcagataatgtctagtgtttctttgctgattttcggtctggaagatctgtccgtgggtgcttcagtgttgcatgcatatatatttacaattgctatgtgctttggctgaattcactccttcatcattatataatgactttctttttctcttcttagtttttgtctagaaatctgatttgtat

SEQ ID NO: 878474 - DNA, 580 bp, Homo sapiens
aaaactatcattggggaaggaaattttaatttaacattatctaatgtttaatctctattacctctccaaaaacaacatggtgtacttaaaggtaatctagtatactaggtgtgttagggagaagaagtaacaccttttacagcaacatcttttattttcattaatttatacttcttgaaaataaaggccaggcrcagtggctcatgcctgaaatcccagcactttgggaggccaaggtgggtggatcatgaggtcaggagatcgagaccatcctggccaatatggtgaaacccgtctctactaaaaatacaaaaattagccaggcatggtggcgtgctcctgtagtcccagctactcaggaggctgagtcaggagaatcgcttggacctggaaggtggaggttgcagtgagctgagatcacgccactgcattccagcctgggcaacagagcgagactcggtctcaaaaaaaaaaaaaagaaaaagaaaagaaaagaaaagaaaatactttaaaccaatttaagaaagaaataaactgcctgggtttgtatctcctctattagtgtcaaccttttctggga

SEQ ID NO: 878475 - DNA, 580 bp, Homo sapiens
aaaactatcattggggaaggaaattttaatttaacattatctaatgtttaatctctattacctctccaaaaacaacatggtgtacttaaaggtaatctagtatactaggtgtgttagggagaagaagtaacaccttttacagcaacatcttttattttcattaatttatacttcttgaaaataaaggccaggcgcagtggctcatgcctgaaatcccagcactttgggaggccaaggtgggtggatcatgaggtcaggagatcgagaccatcctggccaatatggtgaaacccgtctctactaaaaatacaaaaattagccaggcatggtggcrtgctcctgtagtcccagctactcaggaggctgagtcaggagaatcgcttggacctggaaggtggaggttgcagtgagctgagatcacgccactgcattccagcctgggcaacagagcgagactcggtctcaaaaaaaaaaaaaagaaaaagaaaagaaaagaaaagaaaatactttaaaccaatttaagaaagaaataaactgcctgggtttgtatctcctctattagtgtcaaccttttctggga

SEQ ID NO: 878476 - DNA, 595 bp, Homo sapiens
tggagaaataggaatgcttttatactgttggttggaatgtaaattagttcaacaattgtggaagactgtgtgtggtgattcttcaaagacctagaaccagaaataccatttgacccaacagttacattactgggtatatacccaaaggagtataaatcattctattttaaagatacatgcacacatatgttcattgcagcactattcgccatagcaaagacatggaatcaacccaaattcccatcaattatagactgggtaaagaaaatatggttcatatacaccacagaatactatgcagccataaaaaggaatgagatcatgtcctttgcagggacatggatggagctggaagccattatcctctgttactgcaaactaatgcagtaacagaaaaccaaactctgcaygttctcgcttataagcgggagctgaacaatgagaacacatggacacagggaggggaagaatacacactggggtctgctgctgggggaagcagggggagggaaagcatcaggaaaaagagctaatgtatgctgggcttaatacctagggatgggttgataggtgcagcaaaccaccatggtatatg

SEQ ID NO: 878477 - DNA, 576 bp, Homo sapiens
attcttcctacccatgaacatggaaggttcttacatttgtttgtatcttatttcattgagcagtggtttgtagttttccttgaagaggtccttcacatcccttttaagttggatttctaggtgttttattctctttgaagcaattgagatccttattgtgagagtcagttcagaatctggggttttgttttgttttgttttgttttgttttgttttgttttgttttgagatggagtctctctctgttaccaggctggagtacagtggcacagtctcagctcatgcaacctctgcctcccaggtccaagtgattctcctgcctcagcctcccaagtagctgggactacaggcacgtgccaccatgcccagctaactttcgtatttttttttagtagagatggggtttcgccatgttggccaggatggtcccgatctgttgaycttgtgatttgcctgtctcagcctcccaaagtgctgagatcacagacgtgagccactgtgcccagcccagaatctgggttttaaccagatttgccattataaaatgaaatgaaaccaaaaccaccaatcaatatc

SEQ ID NO: 878478 - DNA, 468 bp, Homo sapiens
gagagatctgtggaaggcaaaggaagaggagccaagaggccagataacattcctgcttcccctacattgtgagagtgaaattgtcagcaacctatatcagtaattaaccagaggctttttagagagtaagacttctgatagatacctcaatagctgaagttgctcttcagtactgcayataacctgtggacagattttcatcattattaattcatttattcaacagatagatattaaattcaaggcatagttctaaactatgcagtcaattacaaaaaaaataataatgaaggacattagctctgcctcataggacgttaaaactctagctgctaaatgagacaaatagggttcccacatcaagtgcctgggctcctgttataaactgggctctgcttccattggcttctcttgtttctgttttgataaacccatcatttggcttagtccctacccttgccatgctca

SEQ ID NO: 878479 - DNA, 468 bp, Homo sapiens
gagagatctgtggaaggcaaaggaagaggagccaagaggccagataacattcctgcttcccctacattgtgagagtgaaattgtcagcaacctatatcagtaattaaccagaggctttttagagagtaagacttctgatagatacctcaatagctgaagttgctcttcagtactgcatataacctgtggacagattttcatcattattaattcatttattcaacagatagatattaaattcaaggcatagttctaaactatgcagtcaattacaaaaaaaataataatgaaggrcattagctctgcctcataggacgttaaaactctagctgctaaatgagacaaatagggttcccacatcaagtgcctgggctcctgttataaactgggctctgcttccattggcttctcttgtttctgttttgataaacccatcatttggcttagtccctacccttgccatgctca

SEQ ID NO: 878480 - DNA, 658 bp, Homo sapiens
attggtgtcatacatgcaaaaaacctgaaaatatatctcaaaagcccaaagtacaatggtgatgttatctgcaggagtaattggggaagttgcatatctggtgtcctgtagaataatgcttggaaatccataccttagcagaattcagactcctttcctcttccttagcctggtggtctcttattaggtttaccaaggtgtttacatttttggggaaggccttttatcagataaaactatacattaaatatcttccaaatttagcttggcctaagctcrggaataattaaaggcagctcgaaggctaaagcaagagggggagatggctagatcagatctcccccactaccataatattctcactgatacaatttttgctaaggcagtttcacttcttctactcttatctggaatgatgcatgtgcttctgggcagctacctattggcagggcagctgtaatgatgggactaggttctctcacacagttcagttgtgtggggttggtttgcagtcagctagtgtggaatagtgatgtcttatctgttttccatgtactctcacactctcacttccccagttaagcagtctagtccagacaagttctgtagcttgtccaaagatgttgttcctcacatgcagagaagcaagaatgagtaa

SEQ ID NO: 878481 - DNA, 653 bp, Homo sapiens
taacatttggctcctcattacttatgaaaatttctgcagtgggcttgaatttctcctcagaaaatgggtttttctcttctattgcatcatcaggctgcaaattttccaaacttttatgctctgcttcctcttgaatgctttgccacttasaaatttcttccaccaggtacccagatcaagtctgtcaagttcaaagttccagggatctctaggtcagggataaaatactgccagtctctttgcatagtgagagtaacctatactccagttcccaacaagttcctcatctccatctgagaccacctcagcctgggctttattatccatatcactctcagcattttggtcaaagccatttgacaagtctccaggaagttccaaacctcactacatcttcctgttttctgagccctccaagtctaggaggtttcaaactttcccacattttcccatcttattctgagccccccaaactgttccaacctctcatgttacccagttctaatgttgcttccacatttttgagtatctttatatcagcaccccactctctgtggtaccaatatgcagtattaattctcaaactactaataaagacatgcctgagactgggtaatttataaaggaaagaggtttagttgactcatagttca

SEQ ID NO: 878482 - DNA, 653 bp, Homo sapiens
taacatttggctcctcattacttatgaaaatttctgcagtgggcttgaatttctcctcagaaaatgggtttttctcttctattgcatcatcaggctgcaaattttccaaacttttatgctctgcttcctcttgaatgctttgccacttagaaatttcttccaccaggtacccagatcaagtctgtcaagttcaaagttccagggatctctaggtcagggataaaatactgccagtctctttgcatagtgagagtaacctatactccagttcccaacaagttcctcatctccatctgagaccacctcarcctgggctttattatccatatcactctcagcattttggtcaaagccatttgacaagtctccaggaagttccaaacctcactacatcttcctgttttctgagccctccaagtctaggaggtttcaaactttcccacattttcccatcttattctgagccccccaaactgttccaacctctcatgttacccagttctaatgttgcttccacatttttgagtatctttatatcagcaccccactctctgtggtaccaatatgcagtattaattctcaaactactaataaagacatgcctgagactgggtaatttataaaggaaagaggtttagttgactcatagttca

SEQ ID NO: 878483 - DNA, 615 bp, Homo sapiens
atgaaaatttcccttaactcttagtcatgagcccattatatacactcacataatactatttatttttcccttatgacacattacattatttataattataaatatatttttagattgtttgattaatgccttcattaacttagtttcacaargacagagaccttgtctaattgttttctccattgaatttctgaaggtctgccatggaatatattaagtagttaataaattatgtatttaaaaagcacactgacaggtgtgtgaacatagagattcaccacaaagttaacattagacatcctatgtagtgtgagtataaattatttgatttaatcttaattttacattttctaatatatattaattttataatgacagtattttaaaaggaaagaagtataaatctttatatcagttagcaccacatagacaaaattccagttgcaattccttgtttaggatatcacttctgctttcttgtttttaagatacaatttcattcccttggaatgtgctccatctataaattgatgttttttaatcaaaatttatttcttgtcttaaaagcaagacatttataatttgtcttctttattgatgacttgattatagtta

SEQ ID NO: 878484 - DNA, 607 bp, Homo sapiens
ggttcacccaggtgagacacaggaaacattcccagaagagagccaatgggtttatttttacatgcatgcagcttgaggacacccacatgataccaggaagggagaaagggaaacttgagagggtttagggatcttctcagcacccccatttccacaagacaatggggaaactgtttatgataattttatttaactcatgcagcttcacagcagcgattaatmaaaactttaaaaactagtgtcgtctaaaagaaaagtaaaaatagaaaaagacctcagagtgggaaaactcagatcatttatctaggctctgtctcaattaagctgcgtgaacttgttctagtcatttatattttggggtacaagtttcctcatatatcttctgttccatacaaggttgttaggctcaaatgcaaaaaaatatataaaagttagaaaacagattgcaaaagtaaatgttgattattgttactatttctctattttgccccatcatgtcagaaaaataaactccacaccttaaaaatgaaacaaaacaaaaaactgggaaagttatgttggattgaactttcaaattagatacctactgagtaaatttattgaataa

SEQ ID NO: 878485 - DNA, 602 bp, Homo sapiens
aatttatctactcaaatgattgtttttcttcaacatcataatgttgcaggcctattgatgtatatttttgtgtactaaatagtttgtggagctcttcttgaagaattatcttcagagctgattaaccagacacaccctccagacatcatagtcacagctgctttgagacagcaacaacctcatccccgcaaatagtatggattcctgtcttattcaataggtctgaattttaaatactcttagcttatttcaagaactaaatctatcctccacaaataaaaatgtgctgccgctcagaatatttaggagaatatgtgatagccaagatacttttggcttatttcaaaaattcatctatctccacaaaggaaaatgtttcaccattcagaatattcaagagaattttcttagaaaagaaatccaagattgtattcaytggaataacagacctttcttcaaggtgacttctttcaaaagaacaatatttaggggtatatagaacatcatttttaaaataatttattttgctatatttaccacatttcatgacaccctaaaagattttggctaatgaaatttatacagttcaaatgtgtattcct

SEQ ID NO: 878486 - DNA, 607 bp, Homo sapiens
ttttgcatggtatcatcattgagtatttacttattgattgactaatgatgacatgtttgggtgtgctgtttgatttatgggctgttttggtttatagactggtggtttctataaagcagaaaggagagaaaaatatgctgggtaacaaaaactaaaagaaatctgcaatgcaraacaactaaataaaaaagagagcagagagatgaagtaaaactgccttgttctaaaacaaatggtaactaaactaaagatcaatagaatgtcaaaagaaaatccaaggatggtgccagccaatatgatcataaattcactttgggtgcaaaccatcaaattatggatatatgattacttcacttcaccttctaaagattcttattctctcccaagcaaacccctactccagttagcaatacaggaaaattgagtataaaaagaaaaaaaactttaatgcaatttttaattgtcaattaaaaagatagataaaaattaaactctgtgatgccagccagcattatggactataattggtatcagggttgaagagacatagaattgggaatgatttactgaatgtaagaatagcctattgctgcataagaaattacca

SEQ ID NO: 878487 - DNA, 607 bp, Homo sapiens
ttttgcatggtatcatcattgagtatttacttattgattgactaatgatgacatgtttgggtgtgctgtttgatttatgggctgttttggtttatagactggtggtttctataaagcagaaaggagagaaaaatatgctgggtaacaaaaactaaaagaaatctgcaatgcagaacaactaaataaaaaagagagcagagagatgaagtaaaactgccttgttctaaaacaaatggtaactaaactaaagatcaatagaatgtcaaaagaaaatccaaggatggtgccagccaatatgatcataaattcactttgggygcaaaccatcaaattatggatatatgattacttcacttcaccttctaaagattcttattctctcccaagcaaacccctactccagttagcaatacaggaaaattgagtataaaaagaaaaaaaactttaatgcaatttttaattgtcaattaaaaagatagataaaaattaaactctgtgatgccagccagcattatggactataattggtatcagggttgaagagacatagaattgggaatgatttactgaatgtaagaatagcctattgctgcataagaaattacca

SEQ ID NO: 878488 - DNA, 544 bp, Homo sapiens
ccatgcctatgtcctgaatggtattgcctagttttcttctaggatttttatggttttgggttttacagttaagtctttaatacatcttgagttaatttttgtatacggtgtaaggaagggatccagtttcagttttctgcttatggctagccagttttcccagcaccatttgctgaataggagatcatttccccattgcttgtttttgtcagctttgtcaaagatcagatggtcgtagatgtgtggtgttatttctgaggtctctgttctgctccattggtctatatgtctgttttggtaccagtgccatgctgttttggttattgtagccttctggtatagtttgaagtcaggtagggtgatgtctacggctttgttcttttcrcttaggattgtcttgactatacagggtcttttttgattccgtacgaaatttaaaatgtttttttctaatcctgtgaaggatgtcaatggcagttttgtgggaatagcattgaatgtataaattactatgggcagtatggccattttcatgacattggtt

SEQ ID NO: 878489 - DNA, 646 bp, Homo sapiens
taataatttcaaagatttatgttttttattttaatgtttaagattgctgaactgccagatgacatgaatatatgtttgaaagataatactaaagaacaaagaaatctattttattctatttattaagctgtgtagagtgaaaaaatgctaacccttatcaaatatatyaatatttatttcttgtctattttattggaattcagtatttattttggcatttaacaaagtaataaatatttctctatattctgcttaagtaatggaacaaataggactcaatatattacaaggtttaaattataatatttttaaaaagcaacagtgtgtgcctcaagtgttgcaaacttgatttgagcattttatggtactccagtcagctgcctattaaaagtgtgatcaggtagtttagactgtgactagctgtgtcaacagaaggaaagtggaggattagtctctatggcaacgacaaagtatccctgtttgtagacagacaaattctgctacatctgaaactgattgacaggtctattcctttgcaactgacccatagaaattagcaagtaaaagttattatactgggttgtattgaagggttctcaatatcttaaagtgctcttgtaagtttttctgcagcatttgcatgaga

SEQ ID NO: 878490 - DNA, 593 bp, Homo sapiens
aaattagcaagtaaaagttattatactgggttgtattgaagggttctcaatatcttaaagtgctcttgtaagtttttctgcagcatttgcatgagaaacctggcaggaattgttctgaggtttatatctatggtttgatagattctttgtgggggagtattgctggtgagaataacttaattttcagttctctgtatgacagaattgttggagcatggattgaggggaaaacacacatcaaagacccaaagctgaataatatgccacatttcaaaatcacaagaccttgtaagaatattatattttgaaactgctttcaagaaaaaatttacccaaattaaataggaataattgttgtaggaataacttgacatgttttaagattattacaagaaagatcgagttcaatttttaaaaacaatcctttaactttactgtttaatttaaaacarcaagcatcatatttattattgcaaaaatattttttctttagatataaattttctaataaagtaaaacacttgtcataaaacaaagtatttgcctttatgataattttagaactatattttagctcatgtgctttagtttga

SEQ ID NO: 878491 - DNA, 586 bp, Homo sapiens
tccagccctcttttcctgaatcctaggacttttgaatctacattatgttacccatttatgaaggaaaaatgagatttgccattcttaatttgaaatatatatccagttcttaaaacagacaaattggtcaggtctacactgtaaattaaagtggaaaattatttcaactgtctgtgtaattaaagttcaatcaagcaacgaaagaagtatttttaccttgaataatcctgcaattaccttaattatccatattcttttgcactttctataacaaaaaatatccaaaacaataaattctatatctgattatctttaataaaatgaattaaatatgcttctgtttaaaaaaaaaactatgataatccctttgctgaatatactgaatctgaagaggtagartcacttgtccattggaaacactaaaaaaagtaaagagaaatattcaaaatgcattacaaaatgccaataccacacatgtaacttgttaatacttttttctgtcatgttcacattatgtttctgaacataagatggctttggctcctttaagagcccaattgttagactggaaaaatgtctctgcagc

SEQ ID NO: 878492 - DNA, 560 bp, Homo sapiens
ttttctcccaaagctctttcaatatatgctgcactaaaataatctagaaagatgatatagtatggtgcactatctcacaatattgcccactctcctttcttagcaacagaataactgaaataaagacaaatttcctatcacgctccttgaaggtaggcatggccatttgaataagttccacttatggaatttgagtggaggtagtgagtttgatttgcttttcttctttcttttctgtagtgtacacataatggctgaagctccatcagccatcgtgtatcacaacctagtgtcccagaaaataaaaagcaagcatggcaaagcaatgcaatctgagggtccttatttcctaacaacatagtttccattccacttcaggaccattcttttgtccatgataagtagactcgtatttcatttartcctttgtgttgtttttctgtttttcagagatgagggaaattctaactcaaagaaagggattctgtgaaaggtgatcaaacacgggagaatggcagaggaaatccccaggaatgataacaaagggaaatcttaagttt

SEQ ID NO: 878493 - DNA, 625 bp, Homo sapiens
agatcaaaacagctcaagatgatatagagagatcatacaaaagagtcaagaaattaagggtttggtctatatcttatggtcaaatagggcagccatctgtgaattatattgtattcagatagatggtaccaacagtaaagaaacctgggttgctctgccaataacaagctgagtgaccttgagtaagtcctctaaactctgtaagtctctctctttgttcctctgtaaagggaagaagtgtgtaaagtytatttcattcctagggtttcaggtagaagatgtcaggtcttgagaagagcaactaaaaatatgacccccttgtgatgccaagggagttacatcacccagtacttacaagaatccaaatgttgactgagatctgtaagcaaaaagaaacactgaaaagccttgtcaggcattttgtagtcatctggtaatacagtcttgaatgtgtctatcttgagaatacccagatatttataccatgtttggtatttcacttaatgagatgcagtgaggtccctttcaggcattagagccacagtgaagaatagaggaacaggacagcctgtcttgacagagtgaacaacacactgttgtcgccagcttgttgatgacattgatc

SEQ ID NO: 878494 - DNA, 638 bp, Homo sapiens
tatttatgtgtgtgtgcatgcacacatatataatccatttatatgcacacatataattcatttatatgcattatatacatgatatacgtgtgtatacacacacacacagatataaacatctttcatgcataagggacagcaacaaataaaggccccacccaaggtagagacatgacggaatgttatatgaccagcctaaaactagtatgactggagtgctgtgagtcctgagagaacgaaagaagatgaggtyagagaggaaatgcagatccaagtgcattggcttcttgccagctcttgcaacgtctttggcttttacaccaagagagacatttgcacagaagactaacacgatctcatttacttgggttgagagagattgaggtgcagcaagcacagaaacaagcagacctgcttgaaggctactcaattcagttagaacgaagacttcagaaaatgtcagcacaaactcaaactcacaagtcacagctgacctttgacaaaacatattaatttgatgtgcgaatgttgacaaaatttttcagcttctaaatgttatgggaaagagtatgcatgataaatcaagaatatatctgatcgcaatttggctgtgagaattggcaaggagggagaagaaa

SEQ ID NO: 878495 - DNA, 568 bp, Homo sapiens
tatatgcacatgtaaagtattcttaaaatctttgtaatgtaatttttcaggtggcgctacttatagtcttttgtatttattaaacacgactagaaaatttaaaacaaacaaacacatatacaacacaaatcacttttttkttgttgttttttttgagatggcatctcagtctgtcatccaggctggagtgcagtggagccatctcagcttgctgcagccaccacctcccaggttcaagcaattctcccatctcagtctcccaaatagctgggattacaggcatgtgccactgcacccggcaaattttttttttgtatttttagtagaaatggggtttcatcatattggctaggctcctgacctcaggtgatccactggattcggcctcccaaagcatgagccaccgtgcccggccacaaataattttcaagttgagaatttaaagtatgggtagcattcctggcactcaacagaagcaaacacagttctgctatataagatttaacaggaaaacaaaaaacagaaaagcaacaaaaactcaaactcaaacacccccaaaacaaaacaa

SEQ ID NO: 878496 - DNA, 568 bp, Homo sapiens
tatatgcacatgtaaagtattcttaaaatctttgtaatgtaatttttcaggtggcgctacttatagtcttttgtatttattaaacacgactagaaaatttaaaacaaacaaacacatatacaacacaaatcactttttttttgttgttttttttgagatggcatctcastctgtcatccaggctggagtgcagtggagccatctcagcttgctgcagccaccacctcccaggttcaagcaattctcccatctcagtctcccaaatagctgggattacaggcatgtgccactgcacccggcaaattttttttttgtatttttagtagaaatggggtttcatcatattggctaggctcctgacctcaggtgatccactggattcggcctcccaaagcatgagccaccgtgcccggccacaaataattttcaagttgagaatttaaagtatgggtagcattcctggcactcaacagaagcaaacacagttctgctatataagatttaacaggaaaacaaaaaacagaaaagcaacaaaaactcaaactcaaacacccccaaaacaaaacaa

SEQ ID NO: 878497 - DNA, 568 bp, Homo sapiens
tatatgcacatgtaaagtattcttaaaatctttgtaatgtaatttttcaggtggcgctacttatagtcttttgtatttattaaacacgactagaaaatttaaaacaaacaaacacatatacaacacaaatcactttttttttgttgttttttttgagatggcatctcagtctgtcatccaggctggagtgcagtggagccatctcagcttgctgcagccaccacctcccaggttcaagcaattctcccatctcagtctcccaaatagctgggattacaggcrtgtgccactgcacccggcaaattttttttttgtatttttagtagaaatggggtttcatcatattggctaggctcctgacctcaggtgatccactggattcggcctcccaaagcatgagccaccgtgcccggccacaaataattttcaagttgagaatttaaagtatgggtagcattcctggcactcaacagaagcaaacacagttctgctatataagatttaacaggaaaacaaaaaacagaaaagcaacaaaaactcaaactcaaacacccccaaaacaaaacaa

SEQ ID NO: 878498 - DNA, 599 bp, Homo sapiens
ctaacctctccctggtgcttcagaggaggaaaaaaggacacaggtgaagatcccagttttccttgctcaggaaatattaattctactccctagaatgcacaagatttgcaaagactaggtgatagtagaaggtttggacgaactttcagaaggttgaggtgaattcagctgagaaaaacaggcaaggacttaggaaatattccttatttgaaggggcctgaaagtgtggtctggggttcaggagtgacctgtcatacttgagaggattaaaatactctccaaacacagtcccattccttcaattttagctcgttttttcgcgtctgagcatatattaaacctagtccatcaccaaatttagcattagattgcgaagttctattgattgtatttgatttgtaatttaagattttctccccctacataattttgttraaaacacagaagtgaattctgttcacttaggtgtaacagttaatacttgctgtttaaggaactaattaaaccttactggcttataaaaaacaaccaccattttatttgtttgaagttctgtggatctgcattttggtgtggtggattcacctgggtagttgata

SEQ ID NO: 878499 - DNA, 614 bp, Homo sapiens
ttacaactataactgctcacaagtggtttttgttttgtagatgattgccttgctcagtgtggcaaagattgcaaatcttactgctgtgatggaaccacgccctactgttgctcctactacgcttatattgggaatatcctctcgtgagtattcgtcagatttggcaatactgatgctcttcctcttgtccagttgtccagttatgtcttttaaaagtactaagtgatagttgtgggcaagagatttcaagattggttattgacatgaaatctttactggagatattaacacatcgctatctaatggactatattgtttgacamaatatgcaaaataatatacaaaataaattgccttcattataaaggaactaaaaagagttattcttttattgttttactttgtgtactataataatgttttaagtagacatcattttattgataattttataacatcatcagtgatatggttttgtctgttttgtgcaagttaagatttgttatttaattatagccagtttattttgtcatcatgtattaatttaatacatccagtagatgtcaggaaaaagagaggttatgaataaaaaacagttgagacatgaaatgtca

SEQ ID NO: 878500 - DNA, 679 bp, Homo sapiens
ttccgtatatagcgagccagttatcccaacatcatttattaaatagggagtccttttcccattgattgtttttgtcaattttgttgaagatcagatgattgtaggtgtatagcattatttctgaattctctattctgttctgttggtctatgtgtctgtctgtttttgtatcagtatcatactattttggttactgtattcctgtgatacagtttgaaggtgggtaatgtgatgcctccagctttgttccttttgcttaggattcaattggctattcaggctccctttgggtttcatatgaattctaaaatactttttttctagctctgtgaataawgtcattggtagtctgatagagcaaattcctgaatctgtaaattgctttgggcagtacagtcagtttaatgacattgagtctttctattcatgagcatggagtgtttttccatttgtttgtgtcattttttgagccatgttttgtagttctccatgtagacatctttcacctccttgattagctgtattcctatttgtgtgtgtgtgtgtgtatgtgtatgtgtgtgtgtgtggcagttgtgaatgggactgcatttctgaattggctctcagcttggatatttgtgtataggaatgctagtgatttttgcacattaattttgtatcctgagacttcgcagaa

SEQ ID NO: 878501 - DNA, 679 bp, Homo sapiens
ttccgtatatagcgagccagttatcccaacatcatttattaaatagggagtccttttcccattgattgtttttgtcaattttgttgaagatcagatgattgtaggtgtatagcattatttctgaattctctattctgttctgttggtctatgtgtctgtctgtttttgtatcagtatcatactattttggttactgtattcctgtgatacagtttgaaggtgggtaatgtgatgcctccagctttgttccttttgcttaggattcaattggctattcaggctccctttgggtttcatatgaattctaaaatactttttttctagctctgtgaataatgtcattggtagtctgatagagcaaattcctgaatctgtaaattgctttgggcagtayagtcagtttaatgacattgagtctttctattcatgagcatggagtgtttttccatttgtttgtgtcattttttgagccatgttttgtagttctccatgtagacatctttcacctccttgattagctgtattcctatttgtgtgtgtgtgtgtgtatgtgtatgtgtgtgtgtgtggcagttgtgaatgggactgcatttctgaattggctctcagcttggatatttgtgtataggaatgctagtgatttttgcacattaattttgtatcctgagacttcgcagaa

SEQ ID NO: 878502 - DNA, 625 bp, Homo sapiens
ttaactaactacatctgcaatgaacctatttccaaataaggttacattctgaggtcctagaggttagaactccaatatatgaatttcagagtgaaggaggaacatgattcaacgcataacagcttgtaacattgtgtacagaaggtgcaactttttttttttattmtacttcaagttttagggtacatgtgcacattgtgcaggttagttacatatgtatacatgtgccatgctggtacgctgcacccactaactcgtcatctagcattaggtatatctcccaatgctatccctcccccctccccccacccctcagagaactgcaaatcaaaaccactatgagataccatctcacaccagttagaatggcgatcattaaaaagtcaggaaacaacaggtgctggagaggatgtggagaaataggaacacttttacactgttggtgggactgtaaactagttcaaccattgtggaagacagtgtggcaattcctcaaggatctagaactagaaataccatttgacccagccatcccattactgggtatatacccaaatgactataaatcatgctgctataaagacacatgcacacatgtttattgcggcattattcacaatagcaa

SEQ ID NO: 878503 - DNA, 647 bp, Homo sapiens
ctttgttgatggatagattgcaaaaattttctcccatttggtaggtttcctgctcactgtgatgatagtttcttttgctgtgcagaagctctttagtttaattagatcccatttgtcaattttggcttttgttgccattgyttttggtgttttagtcatgaagtctctgcccatgcctgtgtcttgaatggtatcgcctatgtttactcctaggatttttatggttttaggtcttacattgaagtctttaatccatcttgagttaatttttgtatcaggtgtaaggaagggatccagtttcagctttctccatatggctagccagttttcccagcaccatttattaaatagggaatcctttccccattgcttgtttgtgtcaagtttgtcaaagatcagatggttgtagatgtgcagtgttatttctgaggcctctgttctgttccattggtctacatatctgttttggtaccagtaccatgctgttttggttactgtagccttgtactatagtttgaagtcaggtagtgtgatgcctccagctttgttctttttgcttaagattgtcttggctatgcaggctcttttatgattccatatgaaatttaaagtagttttttccaattctgtgaagaaagtcagtggta

SEQ ID NO: 878504 - DNA, 566 bp, Homo sapiens
atttgcagttggtgtagatgagtgagatttaacatctggtccttcagggaaaattcctgtagttccagagctgaaagaaaaaaactatcattctattattaaagggcccagaattagttcttgttctctgtgttccatgtgctcatcattgataaatgatcatactatctttgcagtctcargccatcagaaggggagataaaataattcctccctgtttaccagcagcagccctgtgtattacagtgtgtgtgcagggagtggtgctggagtcctgtcttgccctgggagggacttctgtaatttgcatacttagtgagtcagtggggagagatgagagatagagatgccatttgtgatacaacctctggtgccctatctgtgcaatctagaaaaaaatcactagccagagtctgtctcaaaatggaacactgaccttttccaaaacccgcctcactggaatataacagggctaatgtaaaagaagtaaatgacacttaggttctggggggaaaattgatgtaagtttttatcaggatggtcatccaatggtcattagaagcaca

SEQ ID NO: 878505 - DNA, 675 bp, Homo sapiens
ctttaagccagaagagattgggagccagtattcaaaattcttttttaaaaaagaaattccaaaccaaaattttatatacagccaaactaagattcgtaagtgaaggagaaagaagatcctttccacacaagcacatgctgagggaatttgttactatcagatgtgccttacaagagctcctgaaggaagcactaaatatggaaaggaaagaccattaccagccactacaaaaacactaaagtacacagaccagtgacactataaagcaaccatataaataagccttcaaaataaccagctaacatcataattatgggatcaaatccacacatatcagtattaaccttaaatgtaaatgggttaaatgccccaattaaaagayacagagtggccaattggataaagaaccaagaccgagtggtatgctgtcttcaagagacccatctcacatgcaatgacacataggctcaaaataaagagatgaagaaaaaatttaccaagcaaatggaaaatggaagagcaagggttacagtcctagttcttgacaaaacagactttaaaccaacaatgatcaaaaaagacaaagaaaggtattacataatggtaaagtgttcaattcaaaaagaaaatctaactatcctaaatatacatccaccccaatacaggagcacccag

SEQ ID NO: 878506 - DNA, 632 bp, Homo sapiens
gaacagttctttaattcaggttcaagtttcctattagcaaccatacagtgtctaccttgaatagtgtgaagagaatggattatccatactattacccttataccacctgcttttgaaagtcttcatcctcaagttaggggttactcctgtcctgaacattgtatcctcttctgtcaacagracctgccacttctcattggccctaccttagttatcagccatttagtttcatctgcttttcccctgtgtgttgcttaaggggcctcggctcacagtgagagcaagaaatggatgaaggaaaggtgccttggtcctgagtaaagcctcaggacaaagcatcttcactactagggctttttacacaaccaagagtgacttcttagcttaaggcccatgtaccaaaggaggctttgtctctttttcttctttgtctgaaaaccccagagttagtagttattaataaaaacatgccaatttgagacaaaaacaatacaaaggtgagagatatctggagattaagcagtgcttttatttcctattctacaaacatttttgagtgcctgttgtgtaatacgcactgatctggtattcatcagtgaaaataaagatctctgactttgtggaagttacat

SEQ ID NO: 878507 - DNA, 614 bp, Homo sapiens
cccaggctggagtgcagtggcacgatctcggctcactgcaacctccgcctcccgggttcaagcgattctcctgcctcagcctcacgtacagctgggattacaggtgcccgccaccacgccgggctaattttttgtatttttagaagagacagggtttcactgtgtttgccaggatggtctcgatctcctgacctcgtgatctgcctgccgcctcrgcctcccagagtgctgggattacaggcatgagcccccacaacaggcccaggaagaccattttttaaaaacatgtaacatttctgcctataatccaaggaagtttgacctattgttcctagtttttattgggtatcatgaaattaattattcatgcatttcatagatacgtaattactttctagaactacagtcacattcccttgacatgggtattttggaacagtaatcagtcaaatttaaaatgaaagtttaaatttgtattcttgggattttgtaattttagacccacccaagacttatacccaggatggtgtgtgtttgactgaatcagggaagactcagttacagagcctcacagttacagttccaagaagaaaactgtcaaaaccaaaactgaa

SEQ ID NO: 878508 - DNA, 658 bp, Homo sapiens
ctgtgaagtatgtatattctgttgatgtggggtgtagggttctgtagatatctattaggtctgcttggtccagagctgagttcaagtcctggatatccttgttaaccttctatctcattgatctgtctaatattgacagtggggtgttaaagtctcccattattattgtgtgggagtctaagtctctttgtaggtctctaaggacttgctttatgaagctgggtgctccagtattaggtgtatatatttttaggatagttagctcttcttgttgaattgatccctttaccattacgtagtggccttttttgtctcttttgatctttgttggtttaaagtctgttttatcagagactgggattgcaatccctgctcttttttttttttttttttttttttttttttttgcttttcatttgcttggtttcttccttcatccctttattttgagcctatgtgcatytttgcacatgaaatgggtctcctgaatacagcacactgatgggtcttgactatccaatttgccagtctgtgtcttttaattggggcatttagcccatttacatttaaggttaatattgttacatttgaatttgatactgtcatttgatgctagcaggttattttgtcccttaattgatgcagtttcttcatagca

SEQ ID NO: 878509 - DNA, 658 bp, Homo sapiens
ctgtgaagtatgtatattctgttgatgtggggtgtagggttctgtagatatctattaggtctgcttggtccagagctgagttcaagtcctggatatccttgttaaccttctatctcattgatctgtctaatattgacagtggggtgttaaagtctcccattattattgtgtgggagtctaagtctctttgtaggtctctaaggacttgctttatgaagctgggtgctccagtattaggtgtatatatttttaggatagttagctcttcttgttgaattgatccctttaccattacgtagtggccttttttgtctcttttgatctttgttggtttaaagtctgttttatcagagactgggattgcaatccctgctcttttttttttttttttttttttttttttttttgcttttcatttgcttggtttcttccttcatccctttattttgagcctatgtgcatttwtgcacatgaaatgggtctcctgaatacagcacactgatgggtcttgactatccaatttgccagtctgtgtcttttaattggggcatttagcccatttacatttaaggttaatattgttacatttgaatttgatactgtcatttgatgctagcaggttattttgtcccttaattgatgcagtttcttcatagca

SEQ ID NO: 878510 - DNA, 658 bp, Homo sapiens
ctgtgaagtatgtatattctgttgatgtggggtgtagggttctgtagatatctattaggtctgcttggtccagagctgagttcaagtcctggatatccttgttaaccttctatctcattgatctgtctaatattgacagtggggtgttaaagtctcccattattattgtgtgggagtctaagtctctttgtaggtctctaaggacttgctttatgaagctgggtgctccagtattaggtgtatatatttttaggatagttagctcttcttgttgaattgatccctttaccattacgtagtggccttttttgtctcttttgatctttgttggtttaaagtctgttttatcagagactgggattgcaatccctgctcttttttttttttttttttttttttttttttttgcttttcatttgcttggtttcttccttcatccctttattttgagcctatgtgcatttttgcacatgaratgggtctcctgaatacagcacactgatgggtcttgactatccaatttgccagtctgtgtcttttaattggggcatttagcccatttacatttaaggttaatattgttacatttgaatttgatactgtcatttgatgctagcaggttattttgtcccttaattgatgcagtttcttcatagca

SEQ ID NO: 878511 - DNA, 673 bp, Homo sapiens
tttctccaataaaactggttttcagcaagcatcaacttagtgctgataaaccagctgcattacaataaatctggatgatctaaacttgtcattttaagccataattatagctcagagatgacactgaagaaacagttaaaagattgggtgcaaatttgtaactcaaggaagtctgagagttcttagaaaaaaataagatagagcttctcctctgcatatctccaatttgctctataacttgattgagtcatggccacactctgtctagaagacatagcaaggtcactctgaacttsattcagttaaggaagagcagcaggcagcaagtttcatcatttctaacccgtatcagctactacacaagagcaagagaaatcaaatctcaaacatttttgaacactccaaatgcccaattctgcactcagtcctgaaatggtggactccctgatgcttatgcttggaaaggatcttgcaataaactgtctgacttattctcaaagtaagaatgttctctacaatatgtggggaagatactcacttatctccacttgaaaatgtctacagacaaaacactccttactctatgagttgtctatctatcaacttcaaacgcatgtaaagtactgtgttaatccattttcatgctgctgatgaagacattcccgagactggg

SEQ ID NO: 878512 - DNA, 665 bp, Homo sapiens
catactttgttctttcgcaataacaaataattgtcgtgacattgaaattttagtcttttcctattttcatagcctttagcatgaagcgtacaaggaggcagattagttacttatgtcacaaattcactatattactatatcaactattatatcactagtaagacataattaacttaaaatgataaaagtgaacatagttatatcacaaacggctctttttctgttatgtatctctcaatatttaattatgcatgtagacatacagaatcactgtacgtttattatagaatatatagtattaaaaacaatttaacaccgttttttgatttcttgcttttaaaagaattctatatttttatatcaggtattaaatgcctatatgatttgtcttctttgcttaacattgcttacaccatttgaaataattttactacrtgttatagaaaaaaaaagatgtcaatcaaacgtaagcacaaacaccacaaatgatatactacagggtcagaatagaagaaaaataaaataaacatatgaaaaacaaaacaaacatttttatatacacaggcttaacaggatactagaatcctagtgattcttaaggctcttgacatctcagggagaggcagactgggaccacgtggacagactggtctctgctttcagtt

SEQ ID NO: 878513 - DNA, 590 bp, Homo sapiens
aactggctatgaaatagtatcttcttatggtttaatttgcatctccctgatgacttataatgttgaataacattgtattctgaaatattataattagttgattattgtgtttgatgcataaaacataacattcatttacaacctacctggtttgattgaacaatataattattctgagtcacagtatgtagttgaataaagacaattatgtctaaaatattaatataaatcacttaaaagtacacaggatacttctttaaaatgtcttaaaattaacaacaggagcacagttctctatataaatatygaatattgtagaccttccaataagtgcaattcccaaattaaataagcaggatacagtagtattaaaaacaatatatatacatacttttgagaatgatatgaaattacatcatgaactcccttgataatattaatttatgttaatcagaaagatacccaacaaaatcttctttcctatacaacctggttagagttgaccagaagagaaattttgcacaagatttggaaggcaaagtgaagcatgaaccatcacatataaaggtgttatgattatatgaaatttt

SEQ ID NO: 878514 - DNA, 536 bp, Homo sapiens
ctagtatttctttatattagtttttgtcctcttactctgtctgtcttctctgggaattcctaattcatatttttgtacacttggtattgtcccataggttcctcatactttcatcatgctttttcagtctttttcttgttgttcctctaggtgggtaatttcaaattacctgtcatcatgttcatcaattctttttctgtatgattgagtctgctgttgaagccctgtattgaatttttcacttctgtcttcatacttttcagctatagggtatctgtttggtcctttttttatggaatataatatttaaactaaactaattttttaatgaattattttcctaattatattttgtggtttatttgtgttttctacatctcattggacttattgaaaatsattattttgagttctttttccctgtgctggcaggactgctctgagagagcagccaagaggaactggagctaagtgggagctcccttttaggatcctcagccaagacaaatgactgtcacctgaggcattagtgtgca

SEQ ID NO: 878515 - DNA, 625 bp, Homo sapiens
tgcacaggtcagtgggggcctgggcctggctcatgaaaccattctgtcctcctaggactttggggttgtgatgaaagggggatgctgcaaaggtctctgaaatgccttggaggcctttttcccattgtcttggctatcagcacttggctcctttttacttatgcaaaatttygcaacctgcttgaaacctcccccagaaaatgggcttttctttcctaccacatggccgggctgcaattttccaaacttttatgctcttcttcccctttaaatataagttccatctcctgagttcaagtgattctcctgcctcagcctcctgagtagctggaactacaggcatgcaccaccacacctggccaatttttttctgtatttttagtagagatggggtttcaccatgttggtcaggctggtctcaaactccagacctcaaatgatctgcccacctccgcctcccaggtcatttctttgctcgtgcgcatgagcataggttattagaagcagccaggccacatcttgaacactttgctgcttagaaatttaatcccccagataccctaaatcatctttctcaagttcaaagttccacagatccctagagtaggggcacaatccaaccaag

SEQ ID NO: 878516 - DNA, 610 bp, Homo sapiens
tacagaccagagtgcaattgttagaaatcaaataaagagataagaaaaaaatattttatttgtataaccatagagttcagactgccataaatttagttatagtctggcaggacaagctggccatagagaatcctctttagggttctaatagatgagtatcagtgaacgaccaccaatcatccaggacaaaattaatgtttgagtttgtgcataaagggttgatttggacttcacaggattatttcttctttgaaatgtgggaaatcatttgttcctacgcaattcacaaggctatctggttcaacccatgctttcccaagtcaaaatgttctttcccacagcccagcaagrtaaagtactcaggacagctggattttaagaacacctttgtgagttgggtctttattgggataatcagagaaaatgactacatttaggtcttctttcatattttatactagtaccagaaaatacaaattgggtgcagaaaacctgggtgcatgaacattgcatgtttaaaccaagctaaaaagagaatttgtagccaaactacaatggaacttattgatgatggctagagaactgctatgtggtaattttatgtttgaca

SEQ ID NO: 878517 - DNA, 639 bp, Homo sapiens
cctggttttctgttcctgtgttagtttgctgcgaatgatggtttccagcttcatccatgtccccgcaaagcacatgaactcattctttttttatggctgcatagtattccatggtgtatatgtgccacatttcttttatccagcctatcactgaagggcatttgggctggttccaagtctttgctattgtaaatagtgctgcaataaacatacatgtgcatgtgcctttatagtagaatgatttataatcctttgggcatatayccagtaatgggattgctgggtcaaatggtatttctggtcctagatccttgaggaatccccacactgtcttgcataatgatttaactaatttatgctcccaccaacagtgaaaaagccttcctatctctccacatcctctccagcatctgttgttttctgattttttaatgatccccattctaactggtatgagatggtatcacattgtggttttgatttgcgtttctctaatgaccagtgatagtgagctttttttcatgtttcttggcaaataaatgtgttcttttgagaagtgtctgttcacatcctttgcccactttttgatggggttgtttttttctttcttgtaaatttgtttaagttctttatagattc

SEQ ID NO: 878518 - DNA, 655 bp, Homo sapiens
gttgcaaatgacaagatttcctttttagttaaggttaaatagtactccagtgtatatatgccacatgttcttaatcaactcattcattgttggacacttagcttgtttccatgtcttggccattgtgaataactcaataaacatgggartgcagacgtatttttgatataatggtttcattcatttcctttagatttatatccagtagtggaatttctgagttatgttgtagacctattttgatgaacttccatactgtttctcagcttcttatcatgttttcatcatagcatctttcctctgcattttcttctgcccagaaatgaaggagggaagataccctcttttggggtccatattaattagtgatccatatgtgttagaaattgtattcagctatgaataacaaaaaccctccaaaaatgactcaaatcaattagtagttttacttttctactattttattttctagttttatttttccatgtgttgtctggaggtttacattctagggctggtatggtggctctgccacagaacagggtctttctgtttttctggtgagctatccttaacattgtatcctggtctagggaatgtttatttctagatctttgaaggcaggggctatattatttatttagatttttaaaat

SEQ ID NO: 878519 - DNA, 655 bp, Homo sapiens
gttgcaaatgacaagatttcctttttagttaaggttaaatagtactccagtgtatatatgccacatgttcttaatcaactcattcattgttggacacttagcttgtttccatgtcttggccattgtgaataactcaataaacatgggagtgcagacgtatttttgatataatggtttcattcatttcctttagatttatatccagtagtggaatttctgarttatgttgtagacctattttgatgaacttccatactgtttctcagcttcttatcatgttttcatcatagcatctttcctctgcattttcttctgcccagaaatgaaggagggaagataccctcttttggggtccatattaattagtgatccatatgtgttagaaattgtattcagctatgaataacaaaaaccctccaaaaatgactcaaatcaattagtagttttacttttctactattttattttctagttttatttttccatgtgttgtctggaggtttacattctagggctggtatggtggctctgccacagaacagggtctttctgtttttctggtgagctatccttaacattgtatcctggtctagggaatgtttatttctagatctttgaaggcaggggctatattatttatttagatttttaaaat

SEQ ID NO: 878520 - DNA, 601 bp, Homo sapiens
gtgttaaaaaaacatctctgataaggtagaaggtagtttttttgtccttgctctggaacaaggagaacatagttcagtttattattattccatactaagataaggggggatcaattttcctatggtataaagatgtcttccagatccttggcctcattgttcagcagagcacaagaggcattcagagatctctatgcactccccaacttttcgtatttgttgtgagtaatacctcagtagccctcctttttcattttactttgaattttgtccttgggttctctctgtggttgcagtgagaaaaaaaaaaaaaaaaaaaaaaaagacaactttcaggaaattttagagctacttccattgcagtttaataaactaactccaaactagccagtcatatgatactttgggccrgaacctacctcacctctcttctactctaacaagagattcctgttgatgacatccaagacttagaaatcggccttgatgctattttgatcattggaggtgctagtagtatagatggtttcagcacttgataactctagctcttctgtccttcttcctgtattttatattagggcccttgctgtagtgtaaa

SEQ ID NO: 878521 - DNA, 679 bp, Homo sapiens
acaaaacatatatcatcatctataaaacacttattaaagaaagtaaacaggacacaaataaatggaaagatatcctgtgttcatggattgcaagaattcatattgtttttcttttaactttttttaaaatttattatactttaagttttagggtacatgtgcacaatgtgcaggttagttaaaaaagtatacatgtgccatgttggtgtgctgtacccatcgactcgtcatttaatattaggtatatctcctaatgctatccctcccctctcccccaaccccacaacaggccctggtgtgtgaygttccccttcctgtgtccatgtgttctcattgttcaattcccacctatgagtgagaacatgcggtgtttggttttttgtccttgcgatagtttgctgagaatgatggtttccagcttcatctatgtccctacaaaggacatgaactcatcatttttttatgcctgcatagtattccatggtgtatatgtgccacattttcttaatccagtctatcattgttggacatttggattggttccaagtctttgctattgtgaatagtgccacaattaacatatatgtgcatatgtctttatactagcatgatttataatcctttgggtatatacccagtaatgggatggctgggtcaaatggtatttctagttcaagat

SEQ ID NO: 878522 - DNA, 595 bp, Homo sapiens
gacagagtggagatttggacacaggctgcatgaacgagcagactgccactaaggtggcctaaatttatgtccacttttgtcccatagcccaagtttgggcatcttgcccctgctttgccctctagtatctgaccttggtttgctcctcttttttactgtacagagctcaaaatgttgaaaatatagatctgaatctcaagcgagagataagagctaaagttgtggatctggtaatcattggtgctgcctcctccttcccttcctaatccccattgtaatctgtaaaatttacagttccatttagctgtggctattcctytcttgtagtttacaatctagaggaaataaaactatttactggttcattcttgttgtcacaaaaagtgtaacagctaagagatttcttcactacaaaaatattttcaggccccagttagttcatattataacgatgtgcacagacccatgagtgaacttcagccttaccacatgctagcaatatagcctttgacaaattaagctttcagattttttttgtatgtgcaatgagagtaataatttctgtctcttggggtttttatgaggattaggtgaa

SEQ ID NO: 878523 - DNA, 595 bp, Homo sapiens
gacagagtggagatttggacacaggctgcatgaacgagcagactgccactaaggtggcctaaatttatgtccacttttgtcccatagcccaagtttgggcatcttgcccctgctttgccctctagtatctgaccttggtttgctcctcttttttactgtacagagctcaaaatgttgaaaatatagatctgaatctcaagcgagagataagagctaaagttgtggatctggtaatcattggtgctgcctcctccttcccttcctaatccccattgtaatctgtaaaatttacagttccatttagctgtggctattcctttcttgtagtttacartctagaggaaataaaactatttactggttcattcttgttgtcacaaaaagtgtaacagctaagagatttcttcactacaaaaatattttcaggccccagttagttcatattataacgatgtgcacagacccatgagtgaacttcagccttaccacatgctagcaatatagcctttgacaaattaagctttcagattttttttgtatgtgcaatgagagtaataatttctgtctcttggggtttttatgaggattaggtgaa

SEQ ID NO: 878524 - DNA, 653 bp, Homo sapiens
ttagtgcttctttcaggagctcttataaggcaggcctggtggtgacaaaatccctcagcatttgcttgtctttaaaggatattatttctccttcacttgtgaagcttaatttggctggaaatgaaattctgggttgaaaattcttttctttaagaatgttgaatattggcccccactctattctagcatgtagagtttctgcaagagatccactgttagtctgatgggcttccctttgcaggtaactcracctttctctctggctgacctttacattttttttttcattttaaccttggtgaatctgatgattatatgtcttggggttgctcttctcgaggagtatctctgtggtgttctctgtatttcctgaatttgaatattggcctgtcttgctagattggggaagttctctcttgctagattggataatatcctgaagtgtgttttcccactgggttccgttctccctgtcactttcaggtacaccaatcaaacgtaggtttggtcttttcacatagtctcatatttctttgagactttgttcattccttttcattcttttttctctaggcttgtcttcacactttatttcattaagttgatcttcaatctctgatatccttttttccacttgattgctttggctgttg

SEQ ID NO: 878525 - DNA, 657 bp, Homo sapiens
atcctaattgctaattttaaaccaaacatttgtagttttgtttattgcaactttgctgcatgggactttgctttcataaatctatatggggttggggttaatttgccctaatttgctgacctgggacacatgtaatcactgttaaacttacacccggtaaccctgatgtgtttacatttcaaaagaaatgaaattggcctggaaaaaaattttggaagtactgtaagtyttttttctttttttttccgaagggaaatatttcaaaaaaggaaacattatgagtagacacttcaaaaaagataaaatattttacatttgttttttgactaatgtgctataaaaaggattatatttgtgagaaaagatactgatcgccaatatttcaaataccgtcttgcaatgtatagtttttagtgacattgtagtataaagctgtaatttgaaattttactttggaatgtaaagtagaaaatattagctatgtcaatgatatcttgcaaagtgttcccatttataattatttatattgtaaatagctttctgaagtaaattcgaagttaatgtgcataaaatgtatttattatgtgaggaattttttggtttaaaatatagttaccaatatgcactttgagtctgggttattcattgaaagaaaaa

SEQ ID NO: 878526 - DNA, 579 bp, Homo sapiens
tgaaatatgttccaccaatacctagtttattgagtgtttttagcatgaagggatgttgaattttcttgaaggcttttttggcatctattgagagaatcacatggtttttgtcattggttctgtttatgcgatggattacattcattgatttgagtatgttgaaccacccttgcatcttggggatgaagctgacttgattgtggtgcataagctttttgatgtgctgctggattcagtttgaaagtattttattgaggattttcacatccatgttcatcaggaatattggcctgaaatttttcttttttcttttttttggattataccttaagttctggagcatatatgcagaatgtgcagatttgttacataggtgtacacgtgccatggtagtttgctstacacatcaacctgtcatctactttaggtatttctcctaattttatccctcccctagccccccaacccctgacaggccccagtgtgtaatgttcccctccctgtgcccatgtgttctcgttattcaactctcacttatgagtgagaacatgtggtgcttggttttctgttcttgtgtta

SEQ ID NO: 878527 - DNA, 597 bp, Homo sapiens
ctgtttaaacccagaaggttgaggctacagtgagccataatcacacccctgtactctggcctgagggacagagtgaggtcctgtcttaaataataataataataataatcatcatcatcattatcattatcatcatcaacatcatcattacctagaaacagaaaattgaacactgcatatttttacctatgtatggaagcttaaaaaggttgatttcatgtaagttaaaagtagaacagaggatactagagtttgggaagagtagggagaagggagggatagggagaagtttttcagggatacrattacagtgagataggaggaataagtttcagtgttctattccactgaattactataggtaacaatacattattatgtagtttcaaatagctacaagtagaacattgaacattgccaaaacaaagaaatgataaatgtttgagatgataaatatgctaattactctgatctgattactgtacattatatgcattgaaatatcactatgtttaccatgaatatgtacaatggttgtcaatgaaaaaaattaaaatattacataaagaaacaaaatattctttaatattataaaat

SEQ ID NO: 878528 - DNA, 616 bp, Homo sapiens
atttgttgagggttgttttatgcctaattgtgtcaattttacagcatgtgctatgtagcaacgaaagaaatatatattctgttgtttttgggtggagacttctctaaaggtccatcagatccatttggtccaatgctgggtttaggtcctgaatatctgttaattctctgccttgatgacctatctaatattatcagtggaatggtgaagtctcccactattattgtgtgggagtctatgtccctttgtaggtctgtaagaacttgctttatgaacctggctgcttctgtgttggatgcacatatatttagaatagttaggtcttctgtttgaattgaactctttactattatgtgaygcccttccttgtcttttttttttttttaactttgttggtttgaaacctgttttgactgaaattaggattgcaacccctgcttttgtctgttttctatttgcttagtagatttttctccatctttttattttgagcctttgtgtgtcattatgtgtgagctggatgtcttgatgacagcatatcactgggtcttggttttttatccggcttgctactctatgcctgttaagtgagggcatttagctcatttacatttaa

SEQ ID NO: 878529 - DNA, 622 bp, Homo sapiens
caacctatccatctgacaaagggctgatatccagaatctataaagaacttaaacaaatttacaaaaataaaaaatcaaagagtgggcaaaggatatgaacatacacttctcaaaaaaaggcatttatgcgaccaacaaacatatgaaaaaaaaaaaactcatcatcactggtcattagagaaatgcaaatcaaaccacaatgagataccatctcacgccagttagaatggcgatcattaaaaagtcaggagacaacagatgctgaagaggatgtggagaaatagraaagcttttacactgctgatgggagtgtaaatcagttcaaccattgtaaaagacagtgtggtgattcctcaaggatccagaaccagaaataccatttgacccagcaatctcattactgggtatatacccaaaggattataaatcattcttccctaaagacacatgcatatgtatgtttattgcagcactattcacaatagcaaagacttggaaccaacccaaatgtccatcaatgacagactggataaagaaaatgtggcacagatatacaatggaatactatgcagccataaaaaaggatgagttcatgtcctttgcagggacttggatgaaactg

SEQ ID NO: 878530 - DNA, 579 bp, Homo sapiens
tcagacaccatcaaacagaaaaacatattcattgtgggagtctcaaaagaagaagagaaaggagtggagagaatgtttgaagaaataatggctgaaaccttccaaaatgtgattaagaataaatatgagcaacgaagcagctcagcaaagttcaaataagataaactcagagacccacactaagacacattataatcaattttttttaagccaaagacaagacagaatactaaaaagaacwagacagaagcaagtcattacacacatgggatcctcaataagattatttgcaggtatctatcaagaaactatgaaggccagaaggcagtaggctaatacagcaaacatgctaagaaaaaagaaaatactgtcaacccagaatcttatatttaacaaaactgtccgccaaaaatgtggaataaataaagacaaataaaagctgatggaatgtgttaccacttgacctgctctgccaaaaaataatcaagaaagtaccactgggtgaaataagtaaacactacacagtaactaaaagattattaaaaaataaagattaccacaaaggcaaatgtatggtta

SEQ ID NO: 878531 - DNA, 553 bp, Homo sapiens
aaaagttccaaattttagagcatttcagatttcagattttcatattaggagcgcttaacctgaagtacctcctgagtagataaggcaaaatggaatgtaattaagagatttggtgaggccaagagatttgtagtatcacttatattacactgtattttggagggacaaaaggtttaccttggatgattatatcaccttttcaacaggctgctgctctgataaacttgctgaaaagttttggttaacatgctaaatctagcgtttttgctactgagcrtttgacttcattctcagataaggcccaaaattactttcaggctttcttagagtcttgctgtggtggaaggctgcaaaaacaaaaccaaaaaaaaaaaaaaaacaactaactgtgtgagataaaagtgatctggtattttgtgccatcttcacaactgattatctaaccaagaaggttgttgtaaaaatgtagcattaagatgtgtgagcttctggacaacactggacatgaagtttttattttactacctacaaactgtgtgacttcaagcaattt

SEQ ID NO: 878532 - DNA, 553 bp, Homo sapiens
aaaagttccaaattttagagcatttcagatttcagattttcatattaggagcgcttaacctgaagtacctcctgagtagataaggcaaaatggaatgtaattaagagatttggtgaggccaagagatttgtagtatcacttatattacactgtattttggagggacaaaaggtttaccttggatgattatatcaccttttcaacaggctgctgctctgataaacttgctgaaaagttttggttaacatgctaaatctagcgtttttgctactgagcgtttgacttcattctcagataaggcccaaaattactttcaggctttcttagagtcttgctgtggtggaaggctgcaaaaacaaamccaaaaaaaaaaaaaaaacaactaactgtgtgagataaaagtgatctggtattttgtgccatcttcacaactgattatctaaccaagaaggttgttgtaaaaatgtagcattaagatgtgtgagcttctggacaacactggacatgaagtttttattttactacctacaaactgtgtgacttcaagcaattt

SEQ ID NO: 878533 - DNA, 655 bp, Homo sapiens
cctccaggtttgttctttttgcttaggattatcttcactatattggtgcttttttcattccatatgaaatttaaagtagttttttgataccatctcacaccagttagaatggcgatcattacaaagtcaagaaacaacatgctggttaggatgcggagaaataggaatgmttttacactgttggtgggagtgtaaagtagttcaactattctggaagacagtgtggtggttcctcaaggatctagaaccagaaataccttttgaccaagcaagcccattgctgattatatacccaaaggattgtaaatcattctactataaagacacatgcacacatatgtttattgcagcactatttacaatagcaaagacttagaaccaacccaaatgcccatcagtgacagactggataaagaaaatgtggtgcatatacaccatggaatactatgcagccataaaaaagaatgagtttctgtcctttgcagggacatggatgaatctggaaaccatcatcctcagcaaactaacacagaaacagacaaccaaataccacatgttctcactcataagtgggagttgaacaatgagaacacatggacacagagaggggaacatgacacatcagggcctgtcagagggtggggggaaagaggag

SEQ ID NO: 878534 - DNA, 655 bp, Homo sapiens
cctccaggtttgttctttttgcttaggattatcttcactatattggtgcttttttcattccatatgaaatttaaagtagttttttgataccatctcacaccagttagaatggcgatcattacaaagtcaagaaacaacatgctggttaggatgcggagaaataggaatgcttttacactgttggtgggagtgtaaagtagttcaactattctggaagacagtgtggtggttcctcaaggatcwagaaccagaaataccttttgaccaagcaagcccattgctgattatatacccaaaggattgtaaatcattctactataaagacacatgcacacatatgtttattgcagcactatttacaatagcaaagacttagaaccaacccaaatgcccatcagtgacagactggataaagaaaatgtggtgcatatacaccatggaatactatgcagccataaaaaagaatgagtttctgtcctttgcagggacatggatgaatctggaaaccatcatcctcagcaaactaacacagaaacagacaaccaaataccacatgttctcactcataagtgggagttgaacaatgagaacacatggacacagagaggggaacatgacacatcagggcctgtcagagggtggggggaaagaggag

SEQ ID NO: 878535 - DNA, 655 bp, Homo sapiens
cctccaggtttgttctttttgcttaggattatcttcactatattggtgcttttttcattccatatgaaatttaaagtagttttttgataccatctcacaccagttagaatggcgatcattacaaagtcaagaaacaacatgctggttaggatgcggagaaataggaatgcttttacactgttggtgggagtgtaaagtagttcaactattctggaagacagtgtggtggttcctcaaggatctagaaccagaaataccttttgaccaagcaagcccattgctgattatatacccaaaggattgtaaatcattctactataaagacacatgcacacatrtgtttattgcagcactatttacaatagcaaagacttagaaccaacccaaatgcccatcagtgacagactggataaagaaaatgtggtgcatatacaccatggaatactatgcagccataaaaaagaatgagtttctgtcctttgcagggacatggatgaatctggaaaccatcatcctcagcaaactaacacagaaacagacaaccaaataccacatgttctcactcataagtgggagttgaacaatgagaacacatggacacagagaggggaacatgacacatcagggcctgtcagagggtggggggaaagaggag

SEQ ID NO: 878536 - DNA, 613 bp, Homo sapiens
ggcacaggactggaggtgcccctcagcacaaacagcctgggtgccatggatggtatgttgatggcaggaggcagacagtctcctgggtggaaaggggcaggtccccggtgaaaccccaccttcaagccagggatggacagaagcctcaggatcagacttccagttctgggtggagtctgtgacccagagtgagaacttatggtgcttttgcccatgcctgcccatgaccacccataaaccagtcagtacacacttcctcccttctaagcccataaaaaccccakactcagccagactcacacagacattgggagtaccagctgcaggaaggagctacccacttcaggtctcctcagcttgtccagatgacctgcctacagaacacagttgtccactatgggtctcctctcccctgaggtaggagctgtccactatgggtctcctctctgctgggagctggacacttctcagatgacctgcctgcagaaagaacctacctactttgggtcccctgagagctgttctatcacttaatgaagcttctctatgccttgttcaccctctgttgtccatgtacttcattattcctggatgcaggacaagaactcaggac

SEQ ID NO: 878537 - DNA, 614 bp, Homo sapiens
gtttacacatatatatacacacatatatgtgtatatatgtgtatatattcacacataaatatttgtaattattattcatttattattatagctaatttaattttttaaagaatgttatatttacatcatagctaacttttatgccttaaatatatttttctcaccttgtacttttgcattctctctctcttttgctcctcacagaactccttttcaataggtaaaagacttttttatagataatccacctgaattcagagctttagggactgactcatggttacttacctggtaagttgagcagctgtgttttaaactsaaactcctgaggtgttgaatacgttcactaacttggacaatggtgttatgtctgcataaatatgccaaagtacttcaaatcttacacattaaacaagtggcgttagttgtatgtcagttataaaacaatatacgtgtacatatatgtgtatatttttgtatttaattgttaacaacaaatatatattacacaaggagaaaaaatgaagattctcttgaaaatataaaatgcacacattgcaaacattttattcaactctgtagttaatgagggaactattaagatgtttaaattg

SEQ ID NO: 878538 - DNA, 661 bp, Homo sapiens
aacagcagcttaaaattttctttgttgattctgttacttctaccagaaatattagttaatatttctgactcacttgaattgtttttaattgaattatttagtgttggaaatcaattatccataggtttcttgagaatatctgcaagtcttataagcaagacattgacagctttttgttccagactgtcttttttaaggttgtgtttatagtgaacagccttagaatatagagagattataccgttctgtagcaaagggcagatattcttactttctaacataggaaaggtaatgtctcccttcagagctaagggtagccatgcttattctatttataagagattagaaatccctaacctcagagttcatcccctgtaacacaattcagtgcaggcatcctgggttccttgtctcattttcctgtagaagcataggctccagaaactggcctgaacatgttgatgctcttactactattatcacttggagtaataagcagtcytctctgacttgggtcttgtgtcttctattaccatacatgaaactagaatgcactaactgtgcacttgaaagtacaataaaattgtagaacttcccaagttcttgacaggttaggtgatgaacataggattatgacagagacttggctttctgaaaacag

SEQ ID NO: 878539 - DNA, 542 bp, Homo sapiens
acatactctcaaatatcccttcaccaatcgtacaaacacagtgtttccaaaatgctgaatgaaaagaaaggtttaactttgtgaggtgaatgcacacatgacaaaatagtttctcagatagctttcttgtagtttttaacctgggatattcccctttttccattttcctcaatgagctcccaattgtccatttgcacattggacaaaaaatgtgttcccaaactgctgaatcaaaagtatggtttaactctgacctgaatgtacacatcacaaagttatttatcaggtagtttccttctagtttatatcctgggatattcgcttttccaccacgggcttcaatgagcttgcaaatttccattcccagaatggacaaaaacagtgtttccaaactgctgtatgaaaargaaaggtaaagtctgtaagatgaatgcacacgtcacaaagcagtttctcagaaagcttctttctagtttttatgtgaagatgatttctgtttcaccataggcctcaaagtgctcccaaatatccatttgcagata

SEQ ID NO: 878540 - DNA, 623 bp, Homo sapiens
tccttcctgctttcctgccctcccctccacggctcctctctcacaggcagtgtcgccagcatgcggccatgtgcagctccttggggtggctttgcaggggacccctccagagacaccttcgcctcagctgtcctctgccacagagcatcacgtggtagatttccagctagttgtagaggatatagctttccagcacgtccctcagggcaggtgtccctcagtgtctgcagggtgagtttctggcaagctcctccagcacagggacttccctgccattcagcaagactcactacccctctccacagtgcccaatcctgctctagggagccactctccaatgtccacctcagtcctaggggccatggctgctccccacatctgctacggccataccccttccggctatctttctttccattcgcttgctcctccctttctttatggtaaatttctccaygcaaattactgcatgagtcatctcctgattggactcagacactgcttctgtgtaagatgcttatgtatgactgtagctgagataaaaagttgtgtgcaaaaccctaagaaatgcagtgtgcatgcatgctgccaccgtaaggttgtggttaacatccacaaagtca

SEQ ID NO: 878541 - DNA, 645 bp, Homo sapiens
ggcaccaccaagtggagctgtgagaagagggccaccatcctccagaccccagaatgatagatccatggagagcttgcactatacacctggaaaagctgcagacactcaatgccagccagtgaaagcacccggtaggaagactataccttgcgaagccacaggggtggagctgcccaagaccatgggaatgcacctcctgcatcagtgtgacctggatatgagacatggagtcaaaggagatcatttcrgacctttaagatttgactgtgctgctagattttggacttgcatggggcctgtagcccctttgttttggccagttcctcccatttggaatggctgtatctacccaatgcctgtacccccatcgtatctaggaagtaactaacttgcttttgattttataggcttataggcagaagggacttgccttgtctcagatgagactttggactgtggacttttgagttaatgctgaaatgaattaagactctgggtgatggttgggaaggcacgattggttttgaaatgtgaggacatgagatttgggagggggtctggggcagaatgatatggtatggctctgtgtccccacccaaatctcatcttgaattgttctctcataattcccatgcattgtgggag

SEQ ID NO: 878542 - DNA, 609 bp, Homo sapiens
cattcagcaacagtaggccccacctgtcagtcatcccatttagaatgattctgccagtctctttttcattccatggaaatacctttctttccagtccaggacacatgtaagtgtcccttaatggaggaagggcatgctagaaaattttcaatttaccccccaggtcctctcttcactcttctccatcttgtcatttgcccaaggaagctgacctgaatggtgcatgcatctacagctccattgacttctgtctcctagttgggtgttgtatagctgagatatttgtcccctctggatgtcatgttgaaatatcmccaatattagaagtggaacctagtgggaggtgtttgggtcatgggggcagatccttaatgaatggcttggtgccatccccttggtgataagtgagttctcactccattagttcacatgagatttggttgtttaaagaatctggcgtattccttttatttcttgatcccttctcttttgctttgtctcttgccatatgacatgcctgcttcctcttcaccttctgccctgagtaaaagcttcctgaggcctcaccagaagccaaacagatgccagtgccatgcttgtacagcctgc

SEQ ID NO: 878543 - DNA, 623 bp, Homo sapiens
gacattcgtgtggacaacaaacatatgaaaaaaagctcatcatcactgttcattagagaaatgaaaatcaaaaccacaatgagataccatctcatgccagttagaatgccaaccatttaaaatcaggaaacaacagatgctggagaagatgtagagaaataggaatgcttttacactgctggtgggagtataaattagttcagccattgtggaagacagtgtggttatttctcaaggatttagaaccagaaataccatttgacccagtgattccattactggctatatacccaaagggtcataaatcattctattataaagacacatgcacacatatgtttcttgcagcactattcataataggaaagacttggaactgaccaaatgcccatcaatgatagactggataacacaaatgtggcacatatatgccatggaatactatayagccataaaaaagaaagagttcatgtcctttgccgggacatggatgaagctggaaactatcattctcagcaaactaacacaggaacagaaaaccaaacaccgcaagttctcactcataagtgggagctgaacaatgagaatacatagacatggggaggggaacatcacacactggg

SEQ ID NO: 878544 - DNA, 665 bp, Homo sapiens
gatgttctaaaaggagaagagattaaaatgagatttggggaaaacatctggattttatttgtttgtgatattctagttatccatagaaaaataatgccattgtttttaataaagcaacataattgtcagtttttttatagtttcattttcttaataaaaacccccactgaaataaagggagtaaagttggtctcatattttgaatatagtcatccaattatcacatatattttacttaaaattttagaatcatagcaatcactcaagtttcttgccatctaatgattagacacattcaactgagtaaataaggattagcagcactacatataaaatgttgaagttgatgctgtgaggtgctgatatatgacacccaaatactgccaatcaagtaaagggaatgaaatataagccttaacatctatcatagaaggtggaatatgggaaactctgtatcagcatatgaagtgcagtgatgagtcagaagagctccgtggaagcttcagagaaaagacagcttttgccctcrgtcttggatgctgggtagatcattgctggccagagaaagttataggaaaaaaaaaaaaaagaaggcattcctgaaagaaggaaaatctgagcaaatgcatagcagtattgaaataattgaacacatttcatatgta

SEQ ID NO: 878545 - DNA, 604 bp, Homo sapiens
ggatatgtaaatatatactccaggaggtataatttttgtagttattgtagtgcttttgtaatgaagaactaagtctattttcacagtgatagagaattgagttgagttcttttgaccctggatggatttgtctattttttaaggtgctacttaaaaatgtwtaggagaaaataaaaataaattatctctttcataagttaaaaatattttacatttcagcattctgaaagcacagaggattcaacaaaaatgatggtttagaatcaaattcaataaagaaacatcagcttgagatcagactctctgaggaatgtttttttttcctgatgaatctgagccattcaaggtccttataaataagtgagagcacctttgatttttgactttttatagttaacagtttcagtttgctaatacaaaagacctcatgccttttcatccagaaaacagagaacactttctattatgtaagagtattatgtttgaaggagtatgtttgcttcaactatgcgtgctatggtacagaaagaaaaaccacctccctgtaggtctaaatccaaggggttttcaatgtatttgggttaagttatgttgtaaggttata

SEQ ID NO: 878546 - DNA, 578 bp, Homo sapiens
tcatactgaatggacaaaaactggaagcattccctgtgaaaactggcacaagactgggatgccctctctcaccactcatattcaacatagtgttggaagttctggccagggcaatcaggcaggagaagggaataaagggtattcaattaggaaaagaggaagtcaaattgtccctgtttgcagatgacatgattgtatatctagaaaaccccattgtctcagcccaaaatctccttaagctgataagcaacttcagcaaagtctcaggatacaaaatcaacktacaaaaatcacaagcattcttatacaccaataacagacaaacagagagccaaatcaggagtgaactcccattcaaaattgcttcaaagagaataaaatacataggaatccaacatacaagggaggtgaaggacctcttcaaggagaactacaaaccattgctcaatgaaataaaagagtatacaaacaaatggaagaacattccatgctcatgggtaggaagaatcaatatcgtgaaaatggccatactgcccaaggtaatttatagattcaatgccatccccatcaagatacca

SEQ ID NO: 878547 - DNA, 578 bp, Homo sapiens
tcatactgaatggacaaaaactggaagcattccctgtgaaaactggcacaagactgggatgccctctctcaccactcatattcaacatagtgttggaagttctggccagggcaatcaggcaggagaagggaataaagggtattcaattaggaaaagaggaagtcaaattgtccctgtttgcagatgacatgattgtatatctagaaaaccccattgtctcagcccaaaatctccttaagctgataagcaacttcagcaaagtctcaggatacaaaatcaacttacaaaaatcacaagcattcttatacaccaataacagacaaacagagagccaaatcakgagtgaactcccattcaaaattgcttcaaagagaataaaatacataggaatccaacatacaagggaggtgaaggacctcttcaaggagaactacaaaccattgctcaatgaaataaaagagtatacaaacaaatggaagaacattccatgctcatgggtaggaagaatcaatatcgtgaaaatggccatactgcccaaggtaatttatagattcaatgccatccccatcaagatacca

SEQ ID NO: 878548 - DNA, 578 bp, Homo sapiens
tcatactgaatggacaaaaactggaagcattccctgtgaaaactggcacaagactgggatgccctctctcaccactcatattcaacatagtgttggaagttctggccagggcaatcaggcaggagaagggaataaagggtattcaattaggaaaagaggaagtcaaattgtccctgtttgcagatgacatgattgtatatctagaaaaccccattgtctcagcccaaaatctccttaagctgataagcaacttcagcaaagtctcaggatacaaaatcaacttacaaaaatcacaagcattcttatacaccaataacagacaaacagagagccaaatcaggagkgaactcccattcaaaattgcttcaaagagaataaaatacataggaatccaacatacaagggaggtgaaggacctcttcaaggagaactacaaaccattgctcaatgaaataaaagagtatacaaacaaatggaagaacattccatgctcatgggtaggaagaatcaatatcgtgaaaatggccatactgcccaaggtaatttatagattcaatgccatccccatcaagatacca

SEQ ID NO: 878549 - DNA, 578 bp, Homo sapiens
tcatactgaatggacaaaaactggaagcattccctgtgaaaactggcacaagactgggatgccctctctcaccactcatattcaacatagtgttggaagttctggccagggcaatcaggcaggagaagggaataaagggtattcaattaggaaaagaggaagtcaaattgtccctgtttgcagatgacatgattgtatatctagaaaaccccattgtctcagcccaaaatctccttaagctgataagcaacttcagcaaagtctcaggatacaaaatcaacttacaaaaatcacaagcattcttatacaccaataacagacaaacagagagccaaatcaggagtgaactcccattcaaaattgcttcaaagagaataaaatacmtaggaatccaacatacaagggaggtgaaggacctcttcaaggagaactacaaaccattgctcaatgaaataaaagagtatacaaacaaatggaagaacattccatgctcatgggtaggaagaatcaatatcgtgaaaatggccatactgcccaaggtaatttatagattcaatgccatccccatcaagatacca

SEQ ID NO: 878550 - DNA, 595 bp, Homo sapiens
aaaacaaaattggtttgagaacaaagctgtcattacttgcaagatgaaaacagtaaaaattgcatgtgtttattaaaacacagaagtatattcctgtgcaaattaatgcagattctgaagcgaaagacaggacttttgagagattttgagtccaaggrttcacctcttcaaacacaactgaaaaaactctattttttctatttttaaatctaatcagtttatatatgcccaggtccagcaaaaagaagctgggttgataatgtgttttgcagttattcaagctagtttgaaagagtacctggcagtgattgtgaagaccaatgattgtgctactaaggtctctcaattgccagacacccaccaagtattttttaaatatgctattctgttttgaaactcaaaaccttgtatttttgttaatctagttacctgccaaatcaaacaggaatccaaagtttcataaccctgctgtgttctctggttactagaaataagcatatttttgatgttttaacaaccttttaaaataataatttctaataatgaaatagaatatttctattttaagtagctattgggtagtatctttacataa

SEQ ID NO: 878551 - DNA, 607 bp, Homo sapiens
tttctattgtttataaattaccaagtatctggtattttctaagagcaggaagaatagactaagatgacctctttgtgtcaataccccataaggttaagcggtgattctaatttctctcatcaaagactattattttcttttattgaacttcatataaatagaatcataatatacctacttcctggtttctagcttctttctgtgaacattatttttatgggatttacctaggctgttgcacttagcmgtaactaaatatttttcactgatgtttagtactatattatctaaatgtaccattctttattttagcattatagtttttgctattttgaataaacctgttaagatttttttgtacatgtcttttggtacaaatatccgctaatttaatttgggtctgtacagtcagttctcctataatgtgccatatatgttcctaaaaatcactgcaatatgcaaaattgtacaataaaaactgagttatgagaaaaatgggattaatggtataacactcaagtacattgtcagtgataaataaagaggtaaacaaaaggaatagtacactattacacatatttgatagttaaaacatacataaatacta

SEQ ID NO: 878552 - DNA, 580 bp, Homo sapiens
taaagagtccagacccgttagtgggctgtatacgggcgacccatctcatgtccaaatgcacatataggctcaaaataaagggatggaggaagatctaccaagcaaatggaaagcaaaaaaaagcaggggttacaatcctagtctctgataaaacagactttaaaccaacaaagatcaaaagagacaaagaagggaattacaaaatggtaaaaggatcaattcaacaagaagagctaactatcctaaatatatatgcacccaatacaggagcacccagattcataaagcaagtccttagagacctacaaagacttagactcccacacaataataatgggagactgtaacaccccactgtcaatattagacagatcaacaagacagaaagttaacaaggatatcccggacttgaactcagctctgcaccaagtggacytaatagacatctacagaactctccaccccaaatcaacagaagatacattcttctcagaaccacatcacacttattcgaaaattgaccacatagttggaagtaaagcactcctcagcaaatgtaaaagagcagaaatcacaacaa

SEQ ID NO: 878553 - DNA, 642 bp, Homo sapiens
aaatgataaaggggatatcaccacggatcccacagaaatacaaactaccattagagaatactataaacacctctacacaaataaactagaaaatctagaagaaatggatacattcctggacacatacaccatcccaagactaaaccagaaagaaattgaatctctgaatagaccaataacaggctctgaaattgaggcaataattaatagcctgccaaacaaaaaaagtccaggaccagatggatttacagcagaattttacctgaggtacaaagaggagctggtaccattccttctgaaactattccaatcaatagaaaaagagggaatcctccctaactcattttatgaggccagcatcatcctgataccaaagcctggcaaaaacacaacaaagaaagagaattttagacaaatwtccgtgatgaacatcgatgtgaaaatcctcaataaaatactggcaaaccgaatccagcagcacatcagaaagcttatcgacacggtcaagtcagcttcattcctggaatgcaaggctggttcaacatacacaaatcaataaatgtaatccatcacagaaacagaaccattgacaaaaagcacatgattatctcaatagaggcagaaaaggccttcaacaaaata

SEQ ID NO: 878554 - DNA, 674 bp, Homo sapiens
agctgtttttttcttcctctctttgcttctagattgaaacaatggaggatctttgtgtggcaaacacactctttgccctcaatttattcaagcatctggcaaaagcaagccccacccagaacctcttcctctccccatggagcatctcgtccaccatggccatggtctacatgggctccaggggcagcaccgaagaccagatggccaaggtgagtttgagctgaagctccacatttgggcygagtagttcctgaatggaattggagaactgctcttgttttatgctaaagacattttaactcaggaggtcagcaatcatcacaggtaatgaagcactgatccttacaacacaaattccttagattcaaatctataagacagccaagcccccgaatccctcaactgtagctgttgaaggcatatgggagttgaatagcctgcaaggctggagacagttatgagtgaccacatcttatattttaataatataatattcttatttttcaaagttagtgttttgtacccattatctcattcagttttaagacagatatcattttacagatgagagccctggtggtgtcagagaagcccccactgtctcctaactcctagcctgggctccttcccattactgtgccactgtggtgtttgttccctattcctatgaagaa

SEQ ID NO: 878555 - DNA, 674 bp, Homo sapiens
agctgtttttttcttcctctctttgcttctagattgaaacaatggaggatctttgtgtggcaaacacactctttgccctcaatttattcaagcatctggcaaaagcaagccccacccagaacctcttcctctccccatggagcatctcgtccaccatggccatggtctacatgggctccaggggcagcaccgaagaccagatggccaaggtgagtttgagctgaagctccacatttgggccgagtagttcctgaatggaattggagaactgctcttgttttatgctaaagacattttaactcaggaggtcagcaatcatcacaggtaatgaagcactgatccttacaacacaaattccttagattcaaatctataagacagccaagcccccgaatccctcaactgtagctgttgaaggcatatgggagttgaatagcctgcaaggctggagacagttatgagtgaccacatcttatattttaataatataatattctyatttttcaaagttagtgttttgtacccattatctcattcagttttaagacagatatcattttacagatgagagccctggtggtgtcagagaagcccccactgtctcctaactcctagcctgggctccttcccattactgtgccactgtggtgtttgttccctattcctatgaagaa

SEQ ID NO: 878556 - DNA, 623 bp, Homo sapiens
tctttactcaaacttttttgttcctttatggacggtgccctgtgttgagtttgccagttttgtctatgtggtgttagacttttctgtctagagtggggactgagaaaggaccctgatgcttggcatataattatgtactgggaaaacatggcctaatattgcccaatccacatgctctgggactatggtctctagttttttccagtagaaggattcattttgacatcaaaattatatagaactcctacatgaaaatagttctgtttgattacgattggttgagaaaatacataaatgcatatagactcacagaataccagcttcacggaacccaacttactactaaaagttcaaagtccatagtttargaaccatttgctttagggaatgctttagggaatataggaatattgcctataatgtccataaattcttagccatctttcaaatgcaacaaagctgcagcttagcagaattgctaccactgagaagcaaattagtgtgtgaagtcagttcagtgaagggctgaggtatttgattaaatgaccacatgaaaaatggagatgtagaaaaaagtgtgaaagaaaagagaaacgattctgtaagtacaaaggcagcaataa

SEQ ID NO: 878557 - DNA, 623 bp, Homo sapiens
tctttactcaaacttttttgttcctttatggacggtgccctgtgttgagtttgccagttttgtctatgtggtgttagacttttctgtctagagtggggactgagaaaggaccctgatgcttggcatataattatgtactgggaaaacatggcctaatattgcccaatccacatgctctgggactatggtctctagttttttccagtagaaggattcattttgacatcaaaattatatagaactcctacatgaaaatagttctgtttgattacgattggttgagaaaatacataaatgcatatagactcacagaataccagcttcacggaacccaacttactactaaaagttcaaagtccatagtttaggaaccatttgctttarggaatgctttagggaatataggaatattgcctataatgtccataaattcttagccatctttcaaatgcaacaaagctgcagcttagcagaattgctaccactgagaagcaaattagtgtgtgaagtcagttcagtgaagggctgaggtatttgattaaatgaccacatgaaaaatggagatgtagaaaaaagtgtgaaagaaaagagaaacgattctgtaagtacaaaggcagcaataa

SEQ ID NO: 878558 - DNA, 609 bp, Homo sapiens
taaacatacatggtctctacttttgaagaaataaaggtcttatataaacaaataatcacagctactagtgccctcagctatctgggtttttcaagacctcccagggccaacttatggcatttagtcatagctccacagtatgtctttctgaagtttttagaaaatccttgtaggtaataactcccctacctccctcagcacagctgggacacactattgaatgaaactcatcaagtccctaattctttaccaccccactcctcaccacatggaattctagtgaaagaaacttttacttcatgctgttcaaaagggcacttttcacaaagtgtaatagagactgtacaatttaagctttatgctccacggcctaaggatttaccatattaatctatgcagatttactaaaggkaataagagtgaaactgatataactaagatagttacctctcactttccctcccagctttcctcctctggaaggattcatttccagattcaaaagtttatttctaaatggctgtttctcctgtcatagcctgcagtgtacatcagaataaagaaccgtgcccagggtgaatatctgacagtcactggaagtctagcaga

SEQ ID NO: 878559 - DNA, 587 bp, Homo sapiens
ctgaaatctgctttttttaaaaaatatacttgtacccatgtttgtattccttcacgtgtattgccaatattttaatattcactttgaatcatggtttggccatttgtaaaataaaagaattaaactagatagtaaagttcatctgcgccacattttagaaattgaaagtacattgtgggtgagactcttaagtttcttaccatcactttaactgggagaacctggttttatctatgtcttatcatggggttttggattctttaaaaatgctttcatttgcaactaacagaaaatcccactcaaactgggtgaagcataaaagataatctmtgtatttacttaactaagaaggccagaggcaactagcttaggaaacagcttgatccagcaggttaactatatttacattagaggctcatttctttatatttctcatggatctgccttctgtgctagctttggcctcaggctagaactgctaatggtagcagccatggctcctggcagttccagccttcacatcttcatcatctcaaccagtgaagctgttctagtccagtagttccaggcaattctttgagtatcaa

SEQ ID NO: 878560 - DNA, 548 bp, Homo sapiens
acacagctccaaaagcagatagaataatcagtatttacatagttatggatctctttgtatatggagatgggaattattttgtaaagatttccattgtttaaagcagttggagacatagtgttgggaagagcagttatttgggtgtttatagacatgcagttagagaccccaaatacttacttacaagtcacgtgaccttgaagcattcaaaataacctttatttcccctccataataacattttcggatctcagtcctgcactctcttgggattgttctgaagatacagtgagagaataccaaaatactttacacactacaaagcattatgttattaaaatttatattatcactagtaacaatamaaataaaacatgactgggtaactggcctatacatacatgatgcattaaaaaaatccaagcagattggaagtgtcttatttttataaacatgttcactccaaaagtatacaaggtccaaagtagttcatgcatttcccccctattatttttaaagtactaacccttattttattgacttgcagt

SEQ ID NO: 878561 - DNA, 565 bp, Homo sapiens
catcaaatttgaaaagattctctataatgaccaagggaattacagtcctgtcactgggaagtttaactgctctattcctgggacatatgttttttcctaccatattacggtgagggggcgacctgctcgaatcagtctggtggcccagaataagaagcagttcaagtccagagaaactctctatggtcaggaaatagaccaggcctctctcctcgtcatcttgaaattaagtgcaggagaccaagtctggcttgaggtgtcaaaagattggaatggggtgtatgtcagtgctgaggatgacagcatttttactgggttccttttgtacccagmggaaacttctggaatttcaccataaatttgtgtcctgaatcctgtagtttagattcagtggaataagtcagttaacacagagtagtgctattaaaaaataacttccattttttcaagattataaaaataatacagaaaaatttaaaaagtcacctagtcaattattattcctattttaaggcacctcctttaaaaatatttatatgtatttcagagcatatgtctattaact

SEQ ID NO: 878562 - DNA, 588 bp, Homo sapiens
ttaattaacattataaacatacacttcctttgctctggaaaattcacctctataaaaataatagcaccaatgagtaggtagatcgatagataaagagatagaggattagttttgtattgctgtcacaaattaccaaaaatttagttgcttagaccaatacaaatttattagaacaagacaaatacaattctggaggtcagaagtcctaaaatcaagatgtcagcaaaaactgcattccttctggaggttcccttccaatttccagagtgtgtttctttaccttttccagttctggagactacctgcattccctggctcatgaccagttccttctgtcaatatgacctctgcttctgtcttgacagctacctcctacattcctcttatgagaacccctgtgattaccctgagcctactgaatagtctctccatctcaaggccttaayttagtcatgtctgcaaagttcattttgccatataaaataaaataaggtttaaaggttccaaggattaggatatgaatatctttgtgaggcctttattctccctactatatttatatacccacgcccacatacacacacacac

SEQ ID NO: 878563 - DNA, 594 bp, Homo sapiens
ccaataaattccaaaaaatcaaaatcatatcaagtatcttctcggaccacagtggagtaaaattagaaatcaagaccaagaggaactctcataaacacacactacatggaaactaaacaccttgctcctgagtgamctttgggtaaacagtgaaattaagaaatcaaaaaaattttcaaaacaaatgaaaataggcaacatatcaaaacctcagggatacagcaaaagtagaactaagaggaaagtttataactttaaatgtctacaccaaaaagatagaaagatcttaaatttacaacctgatgtcacacctcaaggaactagaaaaataagaccaattggaacccaaagctagcacaaaaaaagaaataacaaggattaaagcagaagtaaatgaaattgagacaaaaaaagatataaaggatcagtgaaacaaaaagttggttatttgaaaggttacacaaaaatgacagactgctggctaaattaaccaacaagaaagagaaaattcaaataagtacaaccggaaatgataaaggtgatattacaattgataacatagagatacaaaagatcatcacagactactgtgaa

SEQ ID NO: 878564 - DNA, 594 bp, Homo sapiens
ccaataaattccaaaaaatcaaaatcatatcaagtatcttctcggaccacagtggagtaaaattagaaatcaagaccaagaggaactctcataaacacacactacatggaaactaaacaccttgctcctgagtgacctttgggtaaacagtgaaattaagaaatcaaaaaaattttcaaaacaaatgaaaataggcaacatatcaaaacytcagggatacagcaaaagtagaactaagaggaaagtttataactttaaatgtctacaccaaaaagatagaaagatcttaaatttacaacctgatgtcacacctcaaggaactagaaaaataagaccaattggaacccaaagctagcacaaaaaaagaaataacaaggattaaagcagaagtaaatgaaattgagacaaaaaaagatataaaggatcagtgaaacaaaaagttggttatttgaaaggttacacaaaaatgacagactgctggctaaattaaccaacaagaaagagaaaattcaaataagtacaaccggaaatgataaaggtgatattacaattgataacatagagatacaaaagatcatcacagactactgtgaa

SEQ ID NO: 878565 - DNA, 594 bp, Homo sapiens
ccaataaattccaaaaaatcaaaatcatatcaagtatcttctcggaccacagtggagtaaaattagaaatcaagaccaagaggaactctcataaacacacactacatggaaactaaacaccttgctcctgagtgacctttgggtaaacagtgaaattaagaaatcaaaaaaattttcaaaacaaatgaaaataggcaacatatcaaaacctcarggatacagcaaaagtagaactaagaggaaagtttataactttaaatgtctacaccaaaaagatagaaagatcttaaatttacaacctgatgtcacacctcaaggaactagaaaaataagaccaattggaacccaaagctagcacaaaaaaagaaataacaaggattaaagcagaagtaaatgaaattgagacaaaaaaagatataaaggatcagtgaaacaaaaagttggttatttgaaaggttacacaaaaatgacagactgctggctaaattaaccaacaagaaagagaaaattcaaataagtacaaccggaaatgataaaggtgatattacaattgataacatagagatacaaaagatcatcacagactactgtgaa

SEQ ID NO: 878566 - DNA, 594 bp, Homo sapiens
ccaataaattccaaaaaatcaaaatcatatcaagtatcttctcggaccacagtggagtaaaattagaaatcaagaccaagaggaactctcataaacacacactacatggaaactaaacaccttgctcctgagtgacctttgggtaaacagtgaaattaagaaatcaaaaaaattttcaaaacaaatgaaaataggcaacatatcaaaacctcagggatacagcaaaagtagaactaagaggaaagtttataactttaaatgtctacaccaaaaagatagaaagatcttaaatttacaacctgatgtcacacytcaaggaactagaaaaataagaccaattggaacccaaagctagcacaaaaaaagaaataacaaggattaaagcagaagtaaatgaaattgagacaaaaaaagatataaaggatcagtgaaacaaaaagttggttatttgaaaggttacacaaaaatgacagactgctggctaaattaaccaacaagaaagagaaaattcaaataagtacaaccggaaatgataaaggtgatattacaattgataacatagagatacaaaagatcatcacagactactgtgaa

SEQ ID NO: 878567 - DNA, 617 bp, Homo sapiens
gtgccacagtcttttgctgcacccatcaacccgtcatctacattaggtattcctcctaatgctatccctcccctagcccccaacccccgacaggccctggtgtgtgatattcccctccctgtgtccatgtgctctcattgttcaactcccacttatcagtgagaacatacggtgtttggttttctgttcttgtgttagtttgctgagaatgatggtttccagcttcatccatgtccctgcaaaggacatgaactcatttatgtctgcatagtattccgtggtrtatatgtgccacatttcctttatccagtctatcactgatggacatgtgggttggttccaagtctttgctattgtgaacagtgctacaataaacatatatgtgcatatgtctttgtagtagaatgatttataatcctttgggtatatacccagtaatgggattactgggtcaaatggtatttctggttctagatccttgaggaatcgccacactgtctcccacaatgactgaactaatttacactcccaccaacagtgtaaaagcattccttggccaggtgcagttgctcacacctgtaatcccagcactttgggaggctgaggcaggtggatca

SEQ ID NO: 878568 - DNA, 644 bp, Homo sapiens
gggaaactattctaagactatgttattatgtccttctgtgttaaattatcctttttaaaaagtgaaaagagaactatgaatgtttagagagtggggattctttgttcagttttgttgaatgttattaattggcaaaattaaaaattagcaactttttctgttctccaccctctagcattccaacatttaaaaaaatttagttgtcagtgagaccaaaacccagaaatcaatgaacattaaagttcatttcaacctttattctggctgtgggatagagaaactgtgttccctacatacagcatctgatcwtgcatataggcacattttagaatttagcaaacagaaaagactccccaaactcatatcactgacttccactaatggtaagcctagatgttaggccagtgacagatttttgagaacttactcatgacgttaaattcaagccccttgtcaccaagagattgtctttcagaaggaggcgctagggatggaagtatatgaggccctaagataacattacaagaggccatgctgttaggttgattttgttttccaaaaataaagcagaaacaatcaaagccaaataatgaaaacactgctactacaaacagactgacatcttttcccaaaacttcattaag

SEQ ID NO: 878569 - DNA, 669 bp, Homo sapiens
ggagatgcttgcaagaaccacaaccttgctttaaagaccaaaagttctctaagtggcctgcacctctcagttctaggggcacttgccacgttaaaggtcatttggcttccacagctgacgggctaccacttttccagcttaacaagctcattttaccttttgtataaaatccatgcagaggtttagtttgaacaggccccaggctccagtcattttgaactataacaggtgtcaagatacccggtactgattgggcacagggatgtcagctgccatccattatgcaggagaagatgtcataaaattcaatttccttgatttttttccarttgagtcattactttctgtttaacccaacacttggagcagtctattcttgtttactaaacaaaggaaaagctagaaagatctttcctgtggggacccttcagttttgcacaaactgtccttccttacttccccaaatccagtttcacaagctccctgcagcagcctcagggacccaactccccagccttttcatggtgagttgaagcttcaagattttggtttatttctaaactgctagaagagactaggtcttcactgcctcttaagaggtagcctgaacttcctatatacagttctcagggtccttttcttaaagggaaaaaggggcttccaaggaaa

SEQ ID NO: 878570 - DNA, 671 bp, Homo sapiens
gaaattgtaattggtccccagaaaattacttttatatgattagtgtggtggtggaagtcagcatacccttgggtaagttcacgagatatgcaatgtatattttgctgataaaggagaatattcagttcagatttatcatattcttttatttaattaatatttctattgtgcctactaggtactaggtactttgctaggatttggagataaaataatgggaaaaagaaaaggcaagttcctggttgtattagtctgttctcwtgctgctaatagacattcctgtgactgggtaatttacaaaggaaagagatttagttgactcagttcagtatggctggggaggcctcaggaaacttacaagcatggcagaaagggatgcaaacacgtcctttttcacatggcagcagcaaggagaagagccaagcaaaaggggaaaagcccattatgaaaccatcaggtcttgtgagaactcactatcaagagaacagccacatgggggtaacgcttccatgattcaactacctccttccaggtccctcccatgacacgtggggattatgagaactacaattcaagacgagatttgggtgggggcacagccaaaccatatcactcgtgatagagatttttcagccaaagtagaacccataacaatgtagggaactcaaact

SEQ ID NO: 878571 - DNA, 671 bp, Homo sapiens
gaaattgtaattggtccccagaaaattacttttatatgattagtgtggtggtggaagtcagcatacccttgggtaagttcacgagatatgcaatgtatattttgctgataaaggagaatattcagttcagatttatcatattcttttatttaattaatatttctattgtgcctactaggtactaggtactttgctaggatttggagataaaataatgggaaaaagaaaaggcaagttcctggttgtattagtctgttctcatgctgctaatagacattcctgtgactgggtaatttacaaaggaaagagatttagttgactcagttcagtatggctggggaggcctcaggaaacttacaagcatggcagaaagggatgcaaacacrtcctttttcacatggcagcagcaaggagaagagccaagcaaaaggggaaaagcccattatgaaaccatcaggtcttgtgagaactcactatcaagagaacagccacatgggggtaacgcttccatgattcaactacctccttccaggtccctcccatgacacgtggggattatgagaactacaattcaagacgagatttgggtgggggcacagccaaaccatatcactcgtgatagagatttttcagccaaagtagaacccataacaatgtagggaactcaaact

SEQ ID NO: 878572 - DNA, 612 bp, Homo sapiens
ccaaatgcctgatttcaaaattcacttttaaaccgtttagtgctttatcatttctctttattttctaccattctgcttctcttctagacagatttataacagccattttaggtagataccatttaaggtagatactyatttcttctcgggtgatttttcttccctacatttttttttaacctggatttctcaccctccgttattccaaatgataaatatttctttaactccatagacatttctcttcataaataaaggtattacctttatcctgttcttgtcattgccatatagtgtcacatgtaaagaacacatgtataagaacacacacacaatcacacataagaatgcctatataaaatatacatgtacttatgttttatttatttactttttttgtatattttatacttatgtacgtaggtatacgtatgcttacttatacatgcatacacagtagaaagcccttaaaacaaaagtttttaagtgtttcttcttacattttgaatcattgctgattaccaatgtgacctgtatccctgagaatatttcgacttttgtctgtttttaatctgtgtagtctctgtttcagaattagtagtgaaaactatt

SEQ ID NO: 878573 - DNA, 612 bp, Homo sapiens
ccaaatgcctgatttcaaaattcacttttaaaccgtttagtgctttatcatttctctttattttctaccattctgcttctcttctagacagatttataacagccattttaggtagataccatttaaggtagatactcatttcttctcgggtgatttttcttccytacatttttttttaacctggatttctcaccctccgttattccaaatgataaatatttctttaactccatagacatttctcttcataaataaaggtattacctttatcctgttcttgtcattgccatatagtgtcacatgtaaagaacacatgtataagaacacacacacaatcacacataagaatgcctatataaaatatacatgtacttatgttttatttatttactttttttgtatattttatacttatgtacgtaggtatacgtatgcttacttatacatgcatacacagtagaaagcccttaaaacaaaagtttttaagtgtttcttcttacattttgaatcattgctgattaccaatgtgacctgtatccctgagaatatttcgacttttgtctgtttttaatctgtgtagtctctgtttcagaattagtagtgaaaactatt

SEQ ID NO: 878574 - DNA, 612 bp, Homo sapiens
ccaaatgcctgatttcaaaattcacttttaaaccgtttagtgctttatcatttctctttattttctaccattctgcttctcttctagacagatttataacagccattttaggtagataccatttaaggtagatactcatttcttctcgggtgatttttcttccctacatttttttttaacctggatttctcaccctccgttattccaaatgataaatatttctttaactccatagacatttctcttcataaataaaggtattacctttatcctgttcttgtcattgccatatagtgtcacatgtaaagaacacatgtataagaacacacacacaatcacacataagaatgcctatataaaatatacatgtacttatgttttatttatttactttttttgtatattttatacttatgtacgtaggtatacgtatgcttacttatacatgcatacacagtagaaagcccttaaaacaaaagtttttaagtgtttcttcttacattttgaatcattgctgattaccaatgtgacctgtatccctgagaatatttcracttttgtctgtttttaatctgtgtagtctctgtttcagaattagtagtgaaaactatt

SEQ ID NO: 878575 - DNA, 639 bp, Homo sapiens
gcagtctgcagaaactgacttcaagtggatccagacattgcaggtagcaagacaagacttaaagcagcttttataagtatgttcaaattatttttttaaaaagaccctaatgcagggacaaatagaagactttgatagataaaatgttgcaaaaagaaacactaaggctgactagtacaataactgaaataaaataatgttagacagtcatgacagacatggaaatagccaaataaagaatgaggtttttgaagataaatcgaaataagttattcactccagaaaacagaggaaaaggaattaaaactgaaatgagcctgaaagacatataacataatatcaggtgatttttaagcaaaatttaaatcccagaatgatggaagacagaaagagacagctaaaatacctgaaaaaagtaatgactgaaaatttccctaaaaaawttttttaatcactccttagtattactgaaaggttaagaaaaaaaaatcgtaatagttactagagaaaatccctttatatacaaaaatagtttgtttgcagaagaaagcaatatgattaatgactttttaaaatgacagacaattgtaacataataacatgcaacgtattctgaaagaaaaagtataatttgtcaac

SEQ ID NO: 878576 - DNA, 705 bp, Homo sapiens
tgtcagatgcatagcttgcaaatattttctcctattctgtaggtggtttgtttatagtttcttttgctgtgaagaagctcttaagtttaattagatccctcccacttaaaaatttttgcttttattgaaattgcttttggcatctttgtcatggaatctttgcctgtccctatgtccaagatggtattatcttggttgtcgtcctggatttttattgttttagtttttacatttaagtctttaatccatcgtgagttcatttttgtatatttgtatattgtgtgaggaaggggtccagcttcaatcttctgcatatggcccagcatcaattattagtattttctctattgcttgtttttgtcagcttcgttgaggaagatcagatggtcatagaagtgtgaccttatttctgggctctgtattctgttccatttgtttatgtgcctgtttttatacaagtaccatgcttttttttttgcttactgtagccctgtagtatagatggaagttgggtaacatgctgcttccagctttgttcttttggcttagtattacctcagctattctgawtcttttttggttccttatgaattttaaaatatattttttttctggttctgtgaagaatgtcattagtaaattgataggaataccattgagctagaaaattgctttgggcagtatggccatttgaatgaaattgat

SEQ ID NO: 878577 - DNA, 659 bp, Homo sapiens
aggtggaagagaagtgaaaagcaattcttgtgctctagtcagtagtgtgtttatctttgacagccattacgtgtcaaaaattactgacccttacttaatgatatctctattgttttgggaagcctaagcagtggtaataaataggcccaataggtatcatgaatcctacatcatcgatgatcattcttgcttgcttcaccacacaggcacgtgttcccaatttgcagcaattctttgcagctattccggtgtccatgcttcttgctttttgtaaccctactatttctataatccctataatctgcactcattcataggggaggaaagaagacacagacggggcaaggccactttttgaacgcctcagcctagaaatgcgctatgccactcattctcacattctttcttctagaaatggccacacctaacagcaagggaggaaggaacacatagtctggtatgtccaggatgaagagaacataaatttaaataaacagtttgcagtctccatcacattattcrgagattaaaaatatttttctcaagtaaagatctttcttagagattagctttgaaaataaagatggtacaatatcctaaatttatttgctgcaagataattttacaatgtggccacatctgatcaggcttaataacca

SEQ ID NO: 878578 - DNA, 591 bp, Homo sapiens
ccactacctgtgcacaacacatgggactcagagggttttcccaccactgctactgccattgcctacatcattttggctttccagggctccgagaatattctcacccacctggaccactgctgccactactggcatcttagcaagtcacctcatggcccaagaattcggccttctggttctgctaacattggtgtcaacatacagygccttagggctcaagatcaggcatcagccttgctcagcccagtgatgccacccctggggcccaaagactggcccacctggcacccctgtccccagtaaaacttcaccagagcctccactagtaaccacttgttaaaccacagaggaaatcacaaataccactgatgctgttgtttatagccaaaaaaatcatacagagactacactaccacatgcacccataatcaaaactaaaagagcctatctaaacaacaccattgacaaatcttcaggaaaaagtcctctcctatgaaagcaaatttgaaaactggaagaagagactattagaccaggtgtacagatatcaatgtaaggaaaaaagcaatgaaatatgacacttccaaggga

SEQ ID NO: 878579 - DNA, 591 bp, Homo sapiens
ccactacctgtgcacaacacatgggactcagagggttttcccaccactgctactgccattgcctacatcattttggctttccagggctccgagaatattctcacccacctggaccactgctgccactactggcatcttagcaagtcacctcatggcccaagaattcggccttctggttctgctaacattggtgtcaacatacagcgccttagggctcaagatcaggcatcagccttgctcagcccagtgatgccacccctggggcccaaagactggcccacctggcamccctgtccccagtaaaacttcaccagagcctccactagtaaccacttgttaaaccacagaggaaatcacaaataccactgatgctgttgtttatagccaaaaaaatcatacagagactacactaccacatgcacccataatcaaaactaaaagagcctatctaaacaacaccattgacaaatcttcaggaaaaagtcctctcctatgaaagcaaatttgaaaactggaagaagagactattagaccaggtgtacagatatcaatgtaaggaaaaaagcaatgaaatatgacacttccaaggga

SEQ ID NO: 878580 - DNA, 597 bp, Homo sapiens
gcagaacagcgatggctgtagaacagcagatattggtgattcgcaaatgctgctgcctgatcgttcctctggaagttttgtctcagaggagtacccggctgtgtgaggtgtcagtctgcccctactggggggtgcctcccagttaggcttctcaggggtcagggacccacttgaggaggcagtctgcctgttctcagatctctagctgygtgctgggagaaccactactctcttcaaagctgtcagacagggacacttaagtctgcagaggttactgctgtctttttgtttgtctgtgctctgcccccagaggtggagcctacagaggcaggaaggtgttcttgtgctgtggtgggctccacccagttcgagcttcccggctgctttgtttacctaatcaagcctgggcaatggcgggctcccctcctccagcctcgctgccaccttgcagtttgatctcagactgctgtgctagcaatcagtgagactccatgggtgtaggaccctccaagccatgtgcaggatataatctcctgctgtgctgttttttcagcctgttggaaaagcgctgtattagggtgggagtgacccaatttt

SEQ ID NO: 878581 - DNA, 591 bp, Homo sapiens
cctggttaacccacagaatcatgagaaataataaagcattggtttaatacaccaaattttaggaaggtttacaacacagaactggtgtctgagacaatgagtgtacatagagtgtctatgggtcttgtcatcttttttctgcagttttctcaaaaggaatgttattacactttaggaagaacaattcctcatttgtgagaaagcctcatgttttrcagtacactcagcatcactggtcttgcctgctatattccagtagtgctctgcagtcactgaaagaatcaaagacatcacccccacaggcctaaaattccctgttgttagcgaaacccaaacagagcaattacttctgggaaggtgagtacttcagaggttagattcactaattataaggcaggaattacattctatctgtatgtcctgattattatgatttgaaatacctctttccctggaacttcatgctgccttcaaagaagtgggctgtattaggccatacctaaagtgagtttacaatgtccataaaattatatcatgctatttgatagtaagcaatgcaaccagatgtgataaatatgggtggatttgatc

SEQ ID NO: 878582 - DNA, 591 bp, Homo sapiens
cctggttaacccacagaatcatgagaaataataaagcattggtttaatacaccaaattttaggaaggtttacaacacagaactggtgtctgagacaatgagtgtacatagagtgtctatgggtcttgtcatcttttttctgcagttttctcaaaaggaatgttattacactttaggaagaacaattcctcatttgtgagaaagcctcatgttttgcagtacactcagcatcactggtcttgcctgctatattccagtagtgctctgcagtcactgaaagaatcaaagacatcaccyccacaggcctaaaattccctgttgttagcgaaacccaaacagagcaattacttctgggaaggtgagtacttcagaggttagattcactaattataaggcaggaattacattctatctgtatgtcctgattattatgatttgaaatacctctttccctggaacttcatgctgccttcaaagaagtgggctgtattaggccatacctaaagtgagtttacaatgtccataaaattatatcatgctatttgatagtaagcaatgcaaccagatgtgataaatatgggtggatttgatc

SEQ ID NO: 878583 - DNA, 671 bp, Homo sapiens
taatggttgtgaaacccctgcttccttcctgggctactcgtgaaaggcctgactaccagatgggaaccactataatacatcatacaacctggaataatttggtaggtttttaagaagcatacgtatatgtggaaggaggtcttcttaatgggctgaatgaaaataatagcagcatgtcattctttcacgatgaactatttccccactccttttatatgaaggatgctcattagaaagtagcaaagataaagggtaggttttggtctataattgaagtgcacaaggggtcctaatgataccagaggaggcatagaacataaagttgctactgtgtcatgcccacccttcccaacttcttctactcctccckgctgaataatggctttgtgaacataagttattaggaatcaaaaaactttcaaacacatcatcactctctactttaaaaaattagtgtgttcccatgtaattgttagcaattcttacatagatccaagagacactgatttgcttccactaaaaatatctcctttataggtttgttagttcacctcaaatatttctaccattgggatcctatctttaaaataaaatattgaaaacctatgctaaaattttatgtactttatataaatgtaacttaccattagttgttaataccttgttaagaa

SEQ ID NO: 878584 - DNA, 693 bp, Homo sapiens
ttggctgaagtttgctttagaaaaaacaattcagttttttcataataatatttttgtcttgcataaataaccttctttctgaaatgtatccatgactttcctctttgaaatgaattgagggagttttttgaaagattagtttaatatatgggaagctcctggcataaaactgcaggaggctgaccactaattcaggatctggggtgtctgggctggaaaggacctgcgtgagcatagaattcaagcattttaggttttaactcttatcagaacattgccctcatttatgggtggcctgggactgtattttggctttatcagaaagaaaactgcttttgattagtaatgtctgctataggcatagaaatcacaagtgacagtatatgtgatacatatttgatgtccctgatttagccccagcctgtcattatacagatgaagaaactgaggctcaaagctttcggactcatcccagctttcacagaggcaaaatcatgacaaaagcccagtttcctagttatgcagtgacagttttagaactgaatcccargcatcctcattcccagtcctacatgctctcattcctctccactcacttttccatatcaaatattcaattaaaattatgatattctttttctaatgaaaacacattaccaattttataatgtaagtcaatggaaaacaaaatac

SEQ ID NO: 878585 - DNA, 468 bp, Homo sapiens
aagaccatcctggccaacatggtgaaaccccatctccactaaaatacaaaaaaaaaaaaaaaaaaaaaaaaaagccaggtgtggtagcacacacttgtagtcccagctactcaggaggctgagacaggggaatcacttgaacctgggaggcagaggttgcagtgagctgagatggcaccactgcactccagcctggtgacacagcaagactccatytaaaaaaaaaaaaaaaaaaagcttatccaccacaatcaagtcagcttcatccctgggatgcaaggctcgttcaacatacacatatcaataaacgtaatccatcacataaacagaaccaatgacaaaaaccacataattatctcaatagatgcagaaaaggccttcaataaaattcaacaccccttcatgctaaaaactctcaataaactaggtattgatggaatgtatttcaaaataataacagctatttat

SEQ ID NO: 878586 - DNA, 543 bp, Homo sapiens
gaagccatgcattgtggctcatgcctgtaatctcagcactttgggaggccaaggtcaaggcaggaggatcacttgaggccaggagttcaagaccagcctgggcagcatagcaagaccccatctctctctctctctctctctctctctctctctctctctatatatatatatatatatatgtataatacacacacacacacacacatatatacacacacacatatatatatatatattttttttttaatttaatcaggcatggtggtatgtgcctgtagtccgactcaggaggctgaggcaggaggatcatttgagccagragtttgaggctacagttagcagctatgatcatgtcactgcactgaagcctgagtgatgagaccctgtctcaaaaaaaaaaaaaaaaaaagagttccaaagaaaaagagaaacaggttaaaaaaattaaatataatggctaagaattttccaaaattaatgaaagacaaaaagttgcagatctaagaagcccagagtcccaagaatacctctctccttaaaaaa

SEQ ID NO: 878587 - DNA, 658 bp, Homo sapiens
cactgggggggttcctgttatttaatagtctgcatttacctgttcccttcattgttccttggaagagactctccactggctctctgaggcatccagaggaataaactgggcatgactaatgtacacgcaaattgtcctgcacccgtggacacttcacccagagtccggtggcatctagcacgctacactggacgagaccctggcaggtggccattgaggagcctgcgtggctctgtgcttggaggcacagtgattgttcctcatgactgcttggcacttggccaggggaccatatgcctggagttgtgtaatgcagtgggatacctggccagtttccccaaccctcagggggcttcctggtctttttaaccaaccacatatgcataggctatattcgaaggaccaagctgatgaaaacaatatcagcttgtgggaagagacccaagaaatyggtgaataacttccattgaattgtcattgcaatcccacataggagatctgtgatagtctcttttctctgacgtctttaaaatacaagttttattttccctgacctttttttttccattttaaaggaaatagtacttactgtagatcatttatgaaaagccacaaagaaagaaaatgaaaatcactaataattctgtcacctgaacat

SEQ ID NO: 878588 - DNA, 599 bp, Homo sapiens
ttaaagatactgtgcattggactgagcccaacaacttagcctggtcatgaacttctgccctcttttcactccctacctatcacctatgcaagctctctgctctactcagcactggagagtccttctttcccaaaaatgtcatgccccttcccgcatctgggatattgagtctgccattttcctcacttgaaatgcttcctcctctttccataactcttctttcagcctaactcgaattctctttcttcctgtaggaccttcattgaacattccaacacatacttagcaatttctccctttcttttgaattcactagcacataatatctgtacctttttcttggcacttggtctgttatcttgyttgttattccactttcttagtattgtatttattttcctctaactggataatagcctctttcaggaattttatacatctttgtgtttctagcacatgctatgacctatacatagtagactttgtacagatgcttgctcttatgtgagagcagaagcacatggtgatcaaagaatgtgtggaaatggtctcaagtcaggtcagccggtctaccccaaataatccatttaaatggacag

SEQ ID NO: 878589 - DNA, 599 bp, Homo sapiens
ttaaagatactgtgcattggactgagcccaacaacttagcctggtcatgaacttctgccctcttttcactccctacctatcacctatgcaagctctctgctctactcagcactggagagtccttctttcccaaaaatgtcatgccccttcccgcatctgggatattgagtctgccattttcctcacttgaaatgcttcctcctctttccataactcttctttcagcctaactcgaattctctttcttcctgtaggaccttcattgaacattccaacacatacttagcaatttctccctttcttttgaattcactagcacataatatctgtacctttttcttggcacttggtctgttatcttgtttgttattccactttcttagtattgtatttattttcctctaactggataatagcctctttcaggaattttatacatctktgtgtttctagcacatgctatgacctatacatagtagactttgtacagatgcttgctcttatgtgagagcagaagcacatggtgatcaaagaatgtgtggaaatggtctcaagtcaggtcagccggtctaccccaaataatccatttaaatggacag

SEQ ID NO: 878590 - DNA, 633 bp, Homo sapiens
aaatctacttaaacacttcctttttgatgcaggaaagaatcttaagagctgtgagacaaaagcatcaggtaacctgtaaaggaaaacctacagattaacagcagatttcccagcagaaaccttacaagttataagggattggggtcctatcttcagccctcttaaacaaaacaattttaagtcaagagttttgtatccagcaaaactaatcttcacaaatgaaggaaagatagtctttttcagacaaacaaatgctgagagaattcaccactaccaaggcagaactacaagaactgttaaaaggagcccaaatcttttttttctttctttttttttkgtttctgtttttgtttttgagatgtagtctcgctttgttgcccaggctgtagtgcaaccttggctcactgcagccttggcctccaggattcaagcgattctcctgtctcagtcccctgagtaactgggattacaggcacccaccactgcgcccagctaatttttgcttattagtagagacagggttttgccacgtcagccaggctggtttcagactgctgacctcaagtgatccacccgccttggcctcccagggtgctgggattacaggcatgagccaccacctggccaagagct

SEQ ID NO: 878591 - DNA, 611 bp, Homo sapiens
ttaaatgacttgcttcctggaattcttggaaatgaaaaatcaggactctgaatcatgagattatgagacattttctaatttcctttttatattttagagttttccatattttctgttacaagcatggactacttttgtgatttaaaaaaagttatttaaaaaattagggaaagaaagcttctgaaatgtaccccagttgacaagacttgcatcccagggcaaggctgaccagcaggattggcgggctgctttgactgagcttcctgaaccaraaaagtcattgcgtttttgaataggggccatggagatcttctagtcaaccccttagcacaacagtcagtgtgcagagaacataaccagccagaaacagtgtcctacttctttaaaatagatacttggaaagctttaatgccagcagagcaaagccaaagatattgattcttttagctcaagtatgatgaattctgaacatgctattttctctttatttatattctattaaataatatgagctccttaaagaaaatgtgttgaattaaaattaaaaatatatatacattttttatgcactaaatatgaccacaaaatttatttcccctagtcttttttaa

SEQ ID NO: 878592 - DNA, 607 bp, Homo sapiens
aaaagacaggaagcatagagggggacttttccttttccatctgtttttttttttgtaaggcaggaaaacctttctaaaagatcccccagcaaaaatgtcctctgattccatgggccaggcctgggttccacgtttatgcttcagttacaaagaatgctgggaaatgtaraatatgtcatttgcagcctttgtcaagtggaggtcaaccctgcccacaaggaaaggggaaggaagtagattttgagcaggcaatcaacggtgtctctgccaaaaaaatctagctcagaggatgatgaaagtcaaatgaatatatatttatttatttggctgaagttaatttatagcagttattatatgccaggcactgtttaacatcaactcatttcctcctcataacatcatgagggaggtacccgcacaacagtgtctctccaaaaggtgtgttaaagcttcgcacaaagtgggctgcctgggaatgctgatttttccatctctcctctaattctgccacaagagcacatatgcatactggatggaggggcaataataaaagtagaagcaactacttcaaatgccctcctcctacccattctagtttctgtgttta

SEQ ID NO: 878593 - DNA, 681 bp, Homo sapiens
tctcagggtttttcctttcttgtttgtcaaatgtgggatacgtttgtagaatttgtagtgacatttccacaggtttcctctagcagtaccaggtaggagaaagagcagtagcatgatagggccatgggctggaaatgagaaataaatacatcatggacgaacctttttttttttttctctttttattctttgkgggccattgagagggaccatctgtgaaagtttttgactgtacaatctccaatgttccttcttgctggaataccagttttatgatgtgttatctcactggttactgaggaaataagaaagccaagggaggagaaggttctagacatctccacagacaacagaagcacaaacaaacaacaatacctcagcaggctggcctcccagcactgataagtgtttgggtccactgcaatgactctcttcaaagcctccttccaggctcatttttcctggtgccttgtggagcacaacccatttctgttggctagagtcctgcatacactcctgtgctttaaaaggaaggaattacaagtactaggagatggtcaatagtctacccttcaaaagagggaaagcccacagcctaggaaataaagccttttggggtagatcttgggagtggttaaaaattctatagaccccactgtacttagcgcacatctgtgaaag

SEQ ID NO: 878594 - DNA, 603 bp, Homo sapiens
aaagttcaagaagtccaagatcaagacaccagccaattcacttacggtgaggacccactttctggtttatggatggcactttctagctatgtctttacatggtggaaggggacgaacaagttcccctgggccttttttataagagcactaatcccattcatgagagctctgccctcatgacctacctaattacctcccaaaagaccctaccttctaataccatcaycttgagagttagaattcctttcaacatgaattttggagggacacaaatattcagaccatagcctaaggtcatatggttttacttcttttgagttactacctaggagtggaatagctgaatcatatcgtaggtgtatatttagcttttaagaaattccctgttttccaaaatggttgtaccatttttcattcccaccagcagtatatgacagtttaatttcttccgtatcatttccaactttggaattttcatcacagcaattctaattctgatagtgttatctcactgtggttttaatttgcatttccctgatgactgataatattcagcacctctttgtctgcttactttccaaccatgtgtcttttttggtgaag

SEQ ID NO: 878595 - DNA, 639 bp, Homo sapiens
agatggtggacttcctttgttgcaaggtgtcattctcacactgatgtttatgctcactacgtgtgtatttttgctgtaagctgccttaagatcctttgtgggagggaatataggcccaccaccctacaggttccggggktgcttcctcagagcaaagaaaccatgatccaaaaaaggagatggtcaaaacaggctacagatactactgttttgcttgatacctcttttacaaagcaattgaaaagttaataattgtacacatacattgtgccaggtagtgtgctaggtgcttgacataaggtactgcatttaactctcataacaagcatatatgataaaatggtctcaaatttatgagaagcaaatgaagactcagaaaagccatatgccttgatagatacagtgtgtttacgttcgaatcccaggatttgtgattatgctgcctagagaatctttacctttggacagggctataattagtgtattctgtgaggttgcccgggaaaacagaaagctcttgggctttggaatgcaacacacatagtttagaagactggttcaacctggaaaagtcatccatttttccattcaacagatacatattgtaggtgatgaaagaggcaggagaatagatcagat

SEQ ID NO: 878596 - DNA, 639 bp, Homo sapiens
agatggtggacttcctttgttgcaaggtgtcattctcacactgatgtttatgctcactacgtgtgtatttttgctgtaagctgccttaagatcctttgtgggagggaatataggcccaccaccctacaggttccgggggtgcttcctcagagcaaagaaaccatgatccaaaaaaggagatggtcaaaacaggctacagatactactgttttgcttgatacctcttttacaaagcaattgaaaagttaataattgtacacatacattgtgccaggtagtgtgctaggtgcttgacataaggtactgcatttaactctcataacaagcatatatgataaaatggtctcaaatttatgagaagcaaatgaagactcagaaaagccatatgccttgatagatacagtgtgtttacgttcgaatcccaggatttgtgattatgctgcctagagaatctttacctttggacagggctataattagtgtattctgtgaggttgccckggaaaacagaaagctcttgggctttggaatgcaacacacatagtttagaagactggttcaacctggaaaagtcatccatttttccattcaacagatacatattgtaggtgatgaaagaggcaggagaatagatcagat

SEQ ID NO: 878597 - DNA, 603 bp, Homo sapiens
taattcccatcagcaatgtgtgtggggtggtgcggaattcattttctctgcatcctcaccagcatttgatgttatctctattttttattttaaccattataataggtaagtagtaatatttcattgtagctttaatttgcatttccctaaaagctaatgattttggagcatcttttcatatgcttattgcaatctatatatcctctttggtgaaatgtctcttcatatcatttgcccatgtcccagctagattatttgggtttttttattrttgagttttgagagctctttatattttctagatatgagtcattcgtcagatgtgtggtttgtaaatatattctcccagtctgtagtatagcttgtttctccccttaacagtgtcttctgcagagcaaaagtttaaaagttttgtaaagcccaatttagcaatttttctttttctttctttctttttcttttctttttttttttccaaaaagacagggtcttggtctgtcacccagtctgaaatgcagtgctgtgctctgctcgctgtaaccttgaactcttgggttcaagtgatccttctacctcagtgccccactagcttagcctccagag

SEQ ID NO: 878598 - DNA, 509 bp, Homo sapiens
gctttgttataaaatttagatctgtgactcatcctgaattaatttttatgtacggtgtgaggtaggaattaaggtgcatttttttctatgccaatatctaattgcttcagcaccattgattaaaaagaacgtcatttatccacttaattatgggtgtctttgccatagatcaaaggactgtatgtgagggtctgtttctgagctctctattttattccattggyctttttgtctatttttgggctaaaactatgctgtctaaattattgctaagtagtaaatcttgaaatcaggttgtttaaatcctccaactttgtctttaagttttcttgtatttttaaagatcctttgaatttccatatgaattttagaattgacttgtcaatttccccaaaataaactgctaaaattttgaatggaatcatattgaatttatagataaattttgaaaatcaatgccattttaacaaacttgagcttctcagttcatgaacataggatatcatttc

SEQ ID NO: 878599 - DNA, 622 bp, Homo sapiens
tacaccagagtggtgagggcctgggtggaggataatttcgtaaattgggttgaaccacacagtcttgtgaagtgggctgcatgcttattagatctgaaccctttcacttacttattctggggtatgctaaaggcacaggtttatttagtgaaaattagagacataaattcctgaggcattgtattccagatgtatatatagggactgatggaaattctgcattaatgcaccacactcattgcaatttcgtacaaagcattaagctatgaattgctaaaaaggargaacatattgaagacattgtacaatgcttttgactatataacttattgtaatgtaacactaataacccatttattatggatattcatttgcctgtgtttccaggcttcaggttaccgtaaaactagagagtattttacactcttgatcatgaactcttcacattaatagcactgacagctacaacttccatttgtatatctgggtaacctcagagctgatacaaattttttaattgtttttcctttggatgttcatgtaagcaggtgggtacctgtgactattccatgcaggggctactggaaagatagctctaactcccagtcttggatacactttg

SEQ ID NO: 878600 - DNA, 622 bp, Homo sapiens
tacaccagagtggtgagggcctgggtggaggataatttcgtaaattgggttgaaccacacagtcttgtgaagtgggctgcatgcttattagatctgaaccctttcacttacttattctggggtatgctaaaggcacaggtttatttagtgaaaattagagacataaattcctgaggcattgtattccagatgtatatatagggactgatggaaattctgcattaatgcaccacactcattgcaatttcgtacaaagcattaagctatgaattgctaaaaaggaggaacatattgaagacattgtacaatgcttttgactatataacttattgtaatgtaacactaataacccatttattatggatattcatttgcctgtgtttccaggcttcaggttaccrtaaaactagagagtattttacactcttgatcatgaactcttcacattaatagcactgacagctacaacttccatttgtatatctgggtaacctcagagctgatacaaattttttaattgtttttcctttggatgttcatgtaagcaggtgggtacctgtgactattccatgcaggggctactggaaagatagctctaactcccagtcttggatacactttg

SEQ ID NO: 878601 - DNA, 491 bp, Homo sapiens
tatttgtttctgattagcaacaacaattgcttctccattttcaagctctggttcatatcggagtaatgtttctgcagtgcatactagatgaaaatgagattggattttcttttactgacagcctgactacaagccttttaaaggtaaaaacaaaatactcctacacagggcgcgagttctatttcttttaaataggttgtcatgttgcaaayagcataatgcagctgcaataaataaagagcatttggttttttttgtttttgttttttagattggcatggtgtggatggaagtgaagaaaaatgttccaggttgcttgtgcaagactttcaaagtgaaaagtgagccaaattgaggaaccctaatataatttctaacaatggaaacagcatctcttctacagtctctctctctttaaattctaatttagagattagtttaaaaaagagtaaaaaagatggtagaaatttttttaaagaaaattaaatgaa

SEQ ID NO: 878602 - DNA, 627 bp, Homo sapiens
gaagtaggcttcagaaggttggtaataacaaacttctctgagctaaagtggcatgttctaacctgtatcaaggcagctaaaaaccttgaaaaaaaggtcagatgaatggctaactagaaaaaacagagtagagaaaaccttaaatgayctgatggagctgaaaaccattgcacaaaaacttcgtgacgcatgcacaagattcaatagccaattcaatcaagtggaagaaaggatatcagtgattgaaaatcaaattaatgaaataaagttagaagacaagattagagaaaaaagagtgaaaagaaatgaacaaagcctccaagaaatatgagactatgtgaaaagaccaaatatacatttgattggtgtaccggaaagtgacagggagaatggaaccaagttggaaaacattcttcaagatattatccaggagaatttccctaacccagcaaggcaggccaacattcaaattcaggaaaaacagagaacaccacaaagatactcctcaagaagagcaaccccaagacacacaattgtcagattcacaaaggttgaaatgaaggaaaaaatgttaagggcagccagaaagaaaggttgggtaacccacaaagggaggcatatcagact

SEQ ID NO: 878603 - DNA, 627 bp, Homo sapiens
gaagtaggcttcagaaggttggtaataacaaacttctctgagctaaagtggcatgttctaacctgtatcaaggcagctaaaaaccttgaaaaaaaggtcagatgaatggctaactagaaaaaacagagtagagaaaaccttaaatgacctgatggagctgaaaaccattgcacraaaacttcgtgacgcatgcacaagattcaatagccaattcaatcaagtggaagaaaggatatcagtgattgaaaatcaaattaatgaaataaagttagaagacaagattagagaaaaaagagtgaaaagaaatgaacaaagcctccaagaaatatgagactatgtgaaaagaccaaatatacatttgattggtgtaccggaaagtgacagggagaatggaaccaagttggaaaacattcttcaagatattatccaggagaatttccctaacccagcaaggcaggccaacattcaaattcaggaaaaacagagaacaccacaaagatactcctcaagaagagcaaccccaagacacacaattgtcagattcacaaaggttgaaatgaaggaaaaaatgttaagggcagccagaaagaaaggttgggtaacccacaaagggaggcatatcagact

SEQ ID NO: 878604 - DNA, 627 bp, Homo sapiens
gaagtaggcttcagaaggttggtaataacaaacttctctgagctaaagtggcatgttctaacctgtatcaaggcagctaaaaaccttgaaaaaaaggtcagatgaatggctaactagaaaaaacagagtagagaaaaccttaaatgacctgatggagctgaaaaccattgcacaaaaacttcgtgacrcatgcacaagattcaatagccaattcaatcaagtggaagaaaggatatcagtgattgaaaatcaaattaatgaaataaagttagaagacaagattagagaaaaaagagtgaaaagaaatgaacaaagcctccaagaaatatgagactatgtgaaaagaccaaatatacatttgattggtgtaccggaaagtgacagggagaatggaaccaagttggaaaacattcttcaagatattatccaggagaatttccctaacccagcaaggcaggccaacattcaaattcaggaaaaacagagaacaccacaaagatactcctcaagaagagcaaccccaagacacacaattgtcagattcacaaaggttgaaatgaaggaaaaaatgttaagggcagccagaaagaaaggttgggtaacccacaaagggaggcatatcagact

SEQ ID NO: 878605 - DNA, 652 bp, Homo sapiens
aaagaccatcgttgctattaagaaactgcatcaattaatgggcaaaataaccagctaacatcataatgacagcatcaaattcacacataagaatattaactttaaatgtaaatgggctacatgccccaattaaaagacacagactggcaaattggatagagtcaagacccatcagtgtgctgtattcaggagacccatctcacatgcagagatgtacataggctcaaaacacagggatggaggaagatctaccaagcaaatggaaagcaagaaaaagcaggggttgcaatcctagtctttggtaaaacagactttaaaccaacaaagatcaaaagagacaaagaaggccactacataatggtaaaggaagcaattcaacaagaagagctaactatcttaaatatataggtaccaaatacaggagcacccagattcataaagcaagtccttagagacccacaaagagacttggactcccacacaataataaygggagattttaacaccccactgtcagtattaggcagatcaatgagacagaaggttaacaaggatatccaggacctgaactcagctctgcaccaagctgacctaatagacatctacagaactctccaccccaaatcaacggaatatatattcttctcagcac

SEQ ID NO: 878606 - DNA, 529 bp, Homo sapiens
gcgtgctgggagaaccactactgtcttcaaagctgtcagacagggacatttaagtctgcagaggttactgctgtcttttgtttgtctgtgccctgcccccagaggtggagcctacagaggcaggcagccctccttgatctgtggtgggctccacccagttcgagcttcctggctgctttatttacctactcaagccttggcaatggcaggcccccctcccctggccttgctgctgccttgcagtttgatctcagactgctgtgctagcaatgagcgaggctccatgggcgtaggaccctccaaggcatgtgcaggatataatctcctggtgtgccatttgataagtccattggaatagygcagtattcaggtgggagtgatccgattttccaggtgccatctgtcccctctttctttggctaggaaagggaattccctgaccacttgcacttcccaggtgaggcgatgcctcaccctgctttggctcacgcacagtgcgctgcatccactgtcctgcacccactgtcca

SEQ ID NO: 878607 - DNA, 544 bp, Homo sapiens
cttgctgctgccttgcagtttgatctcagactgctgtgctagcaatgagcgaggctccatgggcgtaggaccctccaaggcatgtgcaggatataatctcctggtgtgccatttgataagtccattggaatagcgcagtattmaggtgggagtgatccgattttccaggtgccatctgtcccctctttctttggctaggaaagggaattccctgaccacttgcacttcccaggtgaggcgatgcctcaccctgctttggctcacgcacagtgcgctgcatccactgtcctgcacccactgtccagcactctccagtgagatgaacccggtacctcagttggaaatgcagaaatcacccgtcttctgcgtcgctcatgctgggagctgtagactggagctgttcctattcagtcatcttggctccaccccggacaacctatacaatcatttaggttgtttgactagctgggaaacttcaaattttttagtcttatgttagtacctcaattttcctcctgtataccaacttcataggattgtaatg

SEQ ID NO: 878608 - DNA, 544 bp, Homo sapiens
cttgctgctgccttgcagtttgatctcagactgctgtgctagcaatgagcgaggctccatgggcgtaggaccctccaaggcatgtgcaggatataatctcctggtgtgccatttgataagtccattggaatagcgcagtattcrggtgggagtgatccgattttccaggtgccatctgtcccctctttctttggctaggaaagggaattccctgaccacttgcacttcccaggtgaggcgatgcctcaccctgctttggctcacgcacagtgcgctgcatccactgtcctgcacccactgtccagcactctccagtgagatgaacccggtacctcagttggaaatgcagaaatcacccgtcttctgcgtcgctcatgctgggagctgtagactggagctgttcctattcagtcatcttggctccaccccggacaacctatacaatcatttaggttgtttgactagctgggaaacttcaaattttttagtcttatgttagtacctcaattttcctcctgtataccaacttcataggattgtaatg

SEQ ID NO: 878609 - DNA, 619 bp, Homo sapiens
ggtcgggatggtggtgcttttggatacttccagtaaagatggcagccccgagtggtttttgtccttaacagagtcctccattttcttacccctctgagattagaattacatttgttttctaaagcttaatcctaaagattgacctgctttttgcagtaattatatggctcagatttctgtcttagaaacttcctccagtgattgcgtttcctgatcagctcagttcctgtgtccatactcagcacctgtgtggacccagtcagatggaacttgggggacaaattttggatgtccagtactggtgttttttttttttttaagcatcctggaaggttaggaatgtccaatgagtgattagagttagtgaggattgtttctctagaagtaatttatggtatcaggttatcccctgagttttttcttactcaccrtatgtctggtggttctcacagccaggggcactgaggggctctgccctgggatctggaggccagcactgttcacctgatctccaccactgagatacttctggctacagccataatcaggtggcccaaaggactgaacaaggaagaatgggagggcactctagactaattaaggttgtcttttcagtcta

SEQ ID NO: 878610 - DNA, 627 bp, Homo sapiens
tgtgggtgtgttgtttgatagtccttctaaattagatttcttcatcttggatattgctttcattttagagaatattttttagagcacaaattcatcctcttactaatttaattggaatgcctatataattgcattctatccttgtggaagtgtgaaaaattgatacaagtgtattgctaaagtcacagaacagactcactgagaaaattgaaataaattaatctcatggtttatcgaatttattkcaaacacaccgtaagaatcaaggggaaagagaagaaggtagggttacacacttaggatagcatgcaagcagagtagaatgaccaagctacttgagtcttgttttatgcaatgtacatatatcctatctctttctgcttcatcaggttttcctactgatggcagggatacaagaaccagagttaaggtataaaaaaaggaagtcagcagatagaggggcctgtaaccataacactcttgttcttttgaagacactcaggaaggtgcatgcctgtagctgagccttacgaattggccagataaacagttacgggtactatatggcaaaggacaaacgaatgacgatggggcatcactaatgggtggctggttaaaaactccgtg

SEQ ID NO: 878611 - DNA, 627 bp, Homo sapiens
ctttgcttgaattcagtgtaagaatccatcaagatgaatagcctgtggaaccttcagagtgaccaggagactcttttatgtctgtttacttggatgaagccagattctctctgctgagcctaatatagggttttaacacaaacacacacatacatatctatctatctatctgtctgtctgtctgtctatctatctatctatctatccatctatctatctattgctctctttctctctctctctctatatatatatctcatataatgcaataataraaaaatgggtattaggattagggataaatgaagttaaagtatcctaagatccatgacttgtccactaagtggaaagggaatgaatttgaaatatactacaataaatttagaataaatgaaaagaaatagactagacttgtagattgcctgctattacccacaggtgtatactcaaggaacctgggcatgaaccaggatacattatttgttcatcctaaaagtgtagagaaacatcacatataattaagcaaatacgtacaatataatactggcaaagggtgctataatgatcatgcacaatttgctaataaaagcagttagaatttctagtccaaatacggcagattaaagt

SEQ ID NO: 878612 - DNA, 660 bp, Homo sapiens
tctttgttgccttaaagtctattttgtcagaaactatttgcaacccttgctttttggttttccatttgtttgggtaaattttcctccatctctttattttgagcctgtgtgtgtctgcatttaagataggtttcttgaagacagcataccaatgggtcttggctcattatccagcttgccattctgtgtcttttaattggggcatttagcccatttacatttaaggttattattatgtgtgaatttggtcctatcatcatgatgttagctggtcatkttgcagatttgtttatatggttacttgacagtgtcactgttctgtgtacttctgtttgtttttgtagtggctggtaacatgttttcctttccatatttagtacttccttcaggagttctagcaaggcaggcctggtggtaatgaattccctcagcatttgcttttctaaaaagtatcttatttctctttcatttatgaagtttagtttggctggatatgaaattatggcttgcaaattctcttctctaagaatattaaatattggcctccaatctcttcttgcttgtagggcttccattgagaggtctgctgttagactgatgggttttccgttataagtgacctggcctttctggtctgcccttaacttttttttttcattt

SEQ ID NO: 878613 - DNA, 618 bp, Homo sapiens
gcctctttgagctgtggtgggctccacccagtttgagcttccctgccactttctttacctactcaagccttggcaatggcgggcgcccctcccccagcctcgctgcagccttgcggtttgatctcagactgctgtgctagcaatgagcgaggctccgtgtgtgtaggaccctccaagctaggtgcggcatgtaatctcctggtgtgccgtttgttaagcctgttggaaaagygcagtattagagtgggagtgacctgattttccaggtgccgtctgtcacccctttctttgactaggaaagagaattccctgaccccttgcacttcctgggtgaggcaatgcctcgccctgcttcggctcatgctcagttcactgcacccactgtcctgcacccactgtctggcactccccagtgagatgaacccgctacctcagttggaaatgcagaaatcacccatcttctgcgtcactcacgctgggagctgtagactggagctgctcctcttcggcaatcttggctccaccctcaagagcaaacaaatttaaaagctcgtagaagacaagaaataactaagatcagagcacaactgaaagagacagagacatgaagaacttttc

SEQ ID NO: 878614 - DNA, 618 bp, Homo sapiens
gcctctttgagctgtggtgggctccacccagtttgagcttccctgccactttctttacctactcaagccttggcaatggcgggcgcccctcccccagcctcgctgcagccttgcggtttgatctcagactgctgtgctagcaatgagcgaggctccgtgtgtgtaggaccctccaagctaggtgcggcatgtaatctcctggtgtgccgtttgttaagcctgttggaaaagcgcagtattagrgtgggagtgacctgattttccaggtgccgtctgtcacccctttctttgactaggaaagagaattccctgaccccttgcacttcctgggtgaggcaatgcctcgccctgcttcggctcatgctcagttcactgcacccactgtcctgcacccactgtctggcactccccagtgagatgaacccgctacctcagttggaaatgcagaaatcacccatcttctgcgtcactcacgctgggagctgtagactggagctgctcctcttcggcaatcttggctccaccctcaagagcaaacaaatttaaaagctcgtagaagacaagaaataactaagatcagagcacaactgaaagagacagagacatgaagaacttttc

SEQ ID NO: 878615 - DNA, 661 bp, Homo sapiens
ggtggaacatatctcaaaataacaaggtcaatttatcacaaacgtgataaatagctgaaaaccacagcacgagaacttcgtgatgcatgcacaagcttcagtagctgattcaatcaagtggaagaaaagatatcagtgactgaagatcaaattaatgaaataaagctagaagacaagattagagaaaaaagagtggaaagaaattaacaaagcctccaagaattatgggactatgtgaacagaccaaatctatgattggtgtactggaaagtgacggggagaatggaaccaagttggaaaacactctttgggatattatccaggagaacttccccaacctagcaaggcaggccaacattcaaattcaggaaatacagagaacaccacaaagatactcctcgagaagagcaaccccaaaacacataattgtcaaattcactaaggttgaaatgaaggaaaaamtattaagggcagccagagagaaaggtcgggttacccacaaagggaagcccatcagactaacagcggatctctcggcataagagagtgggggccaatattcaacatttttaaagaaaagaattttcaacccagaatttcatatccagccaaactaagcctcatcagtgaagaagaaataaaatcctttacagacaaggaa

SEQ ID NO: 878616 - DNA, 501 bp, Homo sapiens
aaagaacaaaatatgaagcaaccagaaaacaagcaagaaatggcagtagcaagtcctcatttattaataactgaatataaacaactcaattctacaattaaaagacatacagaaaaccaaacaccgcatgttctcactcaaaggtgggaattgaacaatgagaacasttggacacatgatggggaacatcacacactggggcctgtcatggggtggggggatgtgggagggatagcattaggagacatacctaatgtaaatgacaagttaatgggtgcagcacaccaacatggcacatgtatacatatgtaacaaacctgcacattgtgcacatgtaccctagaacttaaagtatataataaaataaataaataaataaataaaaagaaatagaaatgattgtcttgactgaaaatggaaaaaaaaaagacatacagtggctgaacaaagaaacaagacccaattacatgctgcccacaagaaacccaatttatttataaa

SEQ ID NO: 878617 - DNA, 622 bp, Homo sapiens
gcaaaaaaacagaaaaataactgtgagccatgcatctctaacctctactgtagtggaaaatttatgagcatgagcgaatgctcacaatatatttttaaagaaaagtagctgcttttaaaatagcagatgcagtagaatttttttttaatcttgtaattgtatttacatagaaaaagatttggaaggatatgatctcacacagtaatcgtctgggaggataagacaagttttaattttttttgcttctctgtatattttaatttctttataatgggtgtatatcattttaaatataaactacaagttaaatagagaaaggggaggtgaatcaccccaacctggcagagtaggcagtggaccagcttgcctgacctgacaatctcagtgtgagctgcattccaggctgtcaccaattattcccttctctcctgggtgctggtgacaattgcttttgrtgccatttcagccatgccttattcattcttctttggggccaattcacttaaaagtgtgctgaccccacagaaaagctagtgctctcaaactacctccctggagaagctccacattgcagctatgaaacaggactgtgcaaaactcataaatctcccacctttttgaa

SEQ ID NO: 878618 - DNA, 641 bp, Homo sapiens
aacagaggaaggcatctggccaagagctcatgaggaagtaaaatgctgccagcaatcatctgattgagcttggaaattcatccttctccacttgcaccttcagatgagactgtggccttggccagcacctggattatagccttgtaagagaccatgaagcagataccccagctaagtcattccttgattcctgtctcacagaagctataatataatacatgcatactgttttaagccattgcgttttggggtagttgctacacagcaatagataatcaataaatcaaatatgtctgggagttagccatgattcaggtctttcttcatcctccccacctcagtggctccaaacccttgtgagaaatcagggtgctgttaagtgctagaatttctgttgctgaatgtgatggtattacaatacccagaatttatcaataattacagaatcatccctaataygggcgagctggctcttgcacttgtgcaccaagctgctgttgaagaagaactgggcattgtcttcctgcagtttttttttttttttttgagacgccacccaggctggagtgcagtggcatgatcttggctcactgcaagctccacctcctgggttcataccattctcctgcctcagcctccca

SEQ ID NO: 878619 - DNA, 651 bp, Homo sapiens
tctacagagttctttctggcattttgattggccttgtgttggatctatagatcaattaggtgataattcacatgctaacattattgtcttccactccatgaacacagtatatattaatatgtatttagatcttccttcatttctttatcagtattttgtaattttcagcttcagacatattttatatttgtaactaagtgggtttttttggagctattgtaaagggtacttttttaaaatttgaatttctaattgttcrtttgcagtgtatggaaatacaatttttgtgtgtatattgaccttgtatcctgcaaccttgctgatatgatctggctctgtgttcccacccagatttcatcttgaattgtaattcccatgtgtcgaggtgtgggggggcatgtaatccccttgtgtcaagggaaagaggcgactggatcatgggggctgtttcccccatgctgttcttgtgatagtgagtgagttctcactagatctcttggttttataaggggctcttcccccttctctttctcttctctctcctgctgccatctgaagaaggtccttgcttccttttcaccttccaccatgattgtaagtttcctgagacctcccaaaccatgtggaactgcgagtcaattaagcctcttt

SEQ ID NO: 878620 - DNA, 651 bp, Homo sapiens
tctacagagttctttctggcattttgattggccttgtgttggatctatagatcaattaggtgataattcacatgctaacattattgtcttccactccatgaacacagtatatattaatatgtatttagatcttccttcatttctttatcagtattttgtaattttcagcttcagacatattttatatttgtaactaagtgggtttttttggagctattgtaaagggtacttttttaaaatttgaatttctaattgttcatttgcagtgtatggaaatacaatttttgtgtgtatattgaccttgtatcctgcaaccttgctgatatgatctggctctgtgtycccacccagatttcatcttgaattgtaattcccatgtgtcgaggtgtgggggggcatgtaatccccttgtgtcaagggaaagaggcgactggatcatgggggctgtttcccccatgctgttcttgtgatagtgagtgagttctcactagatctcttggttttataaggggctcttcccccttctctttctcttctctctcctgctgccatctgaagaaggtccttgcttccttttcaccttccaccatgattgtaagtttcctgagacctcccaaaccatgtggaactgcgagtcaattaagcctcttt

SEQ ID NO: 878621 - DNA, 607 bp, Homo sapiens
ttttctccttctcttatttggaccttgtgtcttccgtttagtttctcaattcatacaaaactgcattgaggccatcaccaatcattctatatgacaaatgctccttttaacaaccccacaatatcgcctcttaccacaaaatcttccttcagcttaatctctcccactctaggttcccatgctgcccctaatcccgctcgaagcagccctgagaaacatcacccattatctctccataccactgccaaaacttttcactgccccaacactttaccactatttcattttatttttcttattaatataagaagacaggaatgtcaggcctctgggcycaagcctgcacgtatacatccagatggcctgaagtaactgaagaatgacaaaagaagtgaaaatagccagttcctgccttaactgatgacattaccttgtgaaacatcttctcctggctcatcctggctcgaaagctcacccactgagcaccttgtgaccctgacccctgctagccagagaacaaccccctttgactgtaattttccactacctacccaaatcctataaaatggccccacccctatctccctttgctgactctcttttcgga

SEQ ID NO: 878622 - DNA, 610 bp, Homo sapiens
acttttatctgcctgattcaagcctagtccttctaacaactctacaatgaatttcttgcaacatcgtgataggaataaaacctatagccaagtctattattcacctgtcgaatctggactacttcttgtttctaatgcaatgcctcagctcctcatgggctcttgttgccaagattctagcatgyactgtggctgggtctgtccaagtcatttatgacagcagggatatttacctaatcaatagatacagatataagaccaaaatggaaaactctctaaggaaattaaaacaagtgtgtagtaccctatgctgtaacgtataccttttgcagtttcctctatgagcttgctgggatgcagtctcacaactccatagtgtttcttatgttcttccacctcccacttggtttccaaccccgatattgatccctactcacctacccattctatcttcattcacatgataaatgcaaacttcttttccgtgctcaagctctggcccaatttgttgcttgccatcttcccttttgttttttggcagagtaaattattcctgcctctgtggaagcttgaaaaacacatgattatagaagggcttcttacccaaatc

SEQ ID NO: 878623 - DNA, 586 bp, Homo sapiens
gaaagacgtcaaattgacaacctaacaccacaactaaaagaactagagaaccaagagcatacaaatcccaaagctagcagaagacaagaaataaccaagatcagagcagaacttaaggagatagagacagaaaaaacccttcaaaaatcaatgaatcccagagctggtgtttaaaaaaattaatacaatggatatactgctagctacactaataaagaagaaatgagagaagaatcaaataaacacaaccagaaataataagggggatattgccgctgaccccacagaaatacaaacaaccatcagagaatactgtaaacacctctatgcacataaactagaaaatctagaaaaaaatgaacaaattcctggacacgtacaccctcccaagactggaccaggaataagctgaatccctaaataaaccaataatgrgttctgaaattaaggtagtaataaatagcctaccaaccaaaaaagcccaggaccagatgaatttacagctgaattctatcagagatataaagaggagctggtacaattacttctgaaacactgccaaaaaatttataggaaagactcctcc

SEQ ID NO: 878624 - DNA, 553 bp, Homo sapiens
aaaaatttataggaaagactcctccccaactcattttatgaggccagcatcatcctgataccaaaacctgacagagatacaacaaaagggacacttcaggccaaaatccctgatgaacatcattgcaaaaatcctcattaaattctggcaaaccaaatccagcagcacatcaaaaagcttattcaccacgatcaagttggcttcatccttgggatgcaagcctggttcaacatatgcaaatcaataaatgaaattaatcacaaaaacagaactaaagacaaaaaccacattattatctcagtagacacagaaaaggccatcaataaactcartatctttcgtgttaaaaagtctccataaactaggttttcctttttttttttttttttgagataaagtcttgctctgtcgcccaggctggagtgcagtggtgtgatcttggctctctgtcacctacgcctcccaagttcaagtggttctcctgcctcagccccctgagtagctgagattaaaggcacccactaccacacccagctaatttttgtatttttag

SEQ ID NO: 878625 - DNA, 545 bp, Homo sapiens
tagattatatgatatgccacaaggcatatcccaataaatttttaaaaatcaaaatcacacccagtatcttcttagagcactgtggaatgaaactagaaataaactccaaaaggaaccccaaaaactacaaatatatggaaattaaacagtctgctcctgaatgacttttgagttaacattaaaatcaatatagaaatttaaaaattattcaaaatgaatgataatagtgacacaagtaatcaaaacctctgagatacagcaaaagcagctctaagaagaaagattatagcactaaatacctacatctaaaagtctgaaagatcacaaatcaargaacatcacacctcaaggaactagagaaacaagaacaaacaaaacccaaagctagcagaaaaaaaagaaataacaaagataagagtagaatgaaatgaaacagaaggaaaaaaatacaaaagatccatgccacaaaagttggttctttgaaaatataaatgaaactaatagaccgctatctattaatagattaactaaactaaaaaagaggg

SEQ ID NO: 878626 - DNA, 545 bp, Homo sapiens
tagattatatgatatgccacaaggcatatcccaataaatttttaaaaatcaaaatcacacccagtatcttcttagagcactgtggaatgaaactagaaataaactccaaaaggaaccccaaaaactacaaatatatggaaattaaacagtctgctcctgaatgacttttgagttaacattaaaatcaatatagaaatttaaaaattattcaaaatgaatgataatagtgacacaagtaatcaaaacctctgagatacagcaaaagcagctctaagaagaaagattatagcactaaatacctacatctaaaagtctgaaagatcacaaatcaaggaacatcacacytcaaggaactagagaaacaagaacaaacaaaacccaaagctagcagaaaaaaaagaaataacaaagataagagtagaatgaaatgaaacagaaggaaaaaaatacaaaagatccatgccacaaaagttggttctttgaaaatataaatgaaactaatagaccgctatctattaatagattaactaaactaaaaaagaggg

SEQ ID NO: 878627 - DNA, 562 bp, Homo sapiens
agggggccagggtaaggacgcaaggtggtgggcagctgagccatgttaacagccttgcttgcccatctcctccttcactgcatgctcagggctctgagccacaggagggagcatcacagcctgctgcatccggacactgggaacaccactccagagctgtctgggaggccagggctgccctacagcgtcggggatcctggtgaggccttgggaaagcttagctctccagggcaccagggagccccggaacctcccaggaggktgtgttttgggggcagcagcagggaagagtgggtgtctggccctgtgctcctggagaagcccctggaagcccaaggtctgaggtcagctgaggtgtcaggaactgcagccttcagggaggaaggaggccaaagccccaagggggagtccctgctctgggcagggtggagaaggtggagtttgtctcatttagcactgacactagcgcctggcacacagtggatactcagtgtttgtggagtataaatgaatgagtaaattgctaattgaggttatatcaggctgggcttttctttctctt

SEQ ID NO: 878628 - DNA, 533 bp, Homo sapiens
gtgatagcaagtttgcacgagatctgatagttttataagggtcttccccctttgatggggcctcattcttgcctccaccgctatgtgaagaaggatgtattgacttcttccaccatgactgtaagtttcctgaggcctttctagccatgctgcactgagtcaattaaacctcttttctttataaattacccagtctctggtatgtccttacagcagtgtcagaacagactaatacaataaattggtagcagtaaagtggggtgctaytataaggattccccaaaatgtggaagcaactttggaactgggtaacagacagagggtataacagtttagaagactcagaagaagacaggaaaatgtgggaaagtttggaacttcctagagacttgttgagtggctttgaccaaaatgctaatagtgatatggacagtgaagtccaggctgaggtgatctcagatggagatgaagaacttgttggaaactggagtaaaggtcactcttgctatacaaagagactggtggcattttgc

SEQ ID NO: 878629 - DNA, 533 bp, Homo sapiens
gtgatagcaagtttgcacgagatctgatagttttataagggtcttccccctttgatggggcctcattcttgcctccaccgctatgtgaagaaggatgtattgacttcttccaccatgactgtaagtttcctgaggcctttctagccatgctgcactgagtcaattaaacctcttttctttataaattacccagtctctggtatgtccttacagcagtgtcagaacagactaatacaataaattggtagcagtaaagtggggtgctattataaggattccccaaaatgtggaagcaactttggaactgggtaacagacagagggtataacagtttagaagactcagaagaagacaggaaartgtgggaaagtttggaacttcctagagacttgttgagtggctttgaccaaaatgctaatagtgatatggacagtgaagtccaggctgaggtgatctcagatggagatgaagaacttgttggaaactggagtaaaggtcactcttgctatacaaagagactggtggcattttgc

SEQ ID NO: 878630 - DNA, 604 bp, Homo sapiens
atgactttcttcactgctgtgacagtgcagcactgaattccatgtaaagtcccccagtcactgtgctgtctctccttgatgcgcacagattttctctttgtgccactcagctgcttctggacggtgtgggagaggggtgacatacacaattcaagactgtctcccctgccatcctcattgtctcttttagcaatacgaagctaaaaccagatactgtgtttgctgaactgatttattgttcttatgacggtacttttctgtgtgcagatactttttaacatttggtgttccagtgggtggaggtggggatgaacagtgtagacttctgttgcaccatcttactccgccctctttccatgaactttttgaccatttatattagaattgcagcttgatatatttataatgttttggcagtttatcacttagtgtagttttcttactggttttgtggttattaaaatacayatgtaacttacagtctactggaataaacaattttgcattcaagagaagtttggaaaccttactttattttagatttctttatcttccccatttaaaacatgattgttacatatttcacgtgatgtatttttttcaa

SEQ ID NO: 878631 - DNA, 706 bp, Homo sapiens
ctcacaaatatctctttgcagattctacaagaacagagtttccaatctgatcaatgcaaagaaacatttgcctctgtgaggtgaatgcccacatcacaaagcagtttctcagaaagctccttgatagttttatgtgaagatatttcctttattaccataggcctcaagggttgcacaaatatcccttttcagataccacaaaaagaatgtttccaaactgctcaatcaaaagtatggttcaaccctgtgggatgaatgcacacatcacaaagaagtttctcagaagtttttgtctggtttttatgagaagattattcctttttcatcataggcctcaaagcactcacaaatatccctttgcagattctagaattacagtgtttccaaactgctcaatgaaaggaaacgtttccttctctgacatgaatggacacaacacaaagcagtttctcagtaagcttctttctagtttttatgtgaacatatttccttttccacaataggmctcaaatcactcacaaatatccctttgaagattctacaagaacagagtttccatactgctcaatgaaaagaaatgtttacctctgtgagatgattgcacacttcactaagcagtttgatataaaacttctttattgtttttatatgaaggcatttcctttctcaccatgggcctcaaagcactcaaaaataccccattgca

SEQ ID NO: 878632 - DNA, 627 bp, Homo sapiens
aatcagaagaaagtttcaaatctgtgaggtgaatgcatgcatcacaaagaagtttttcggaaagcttctgtctagttttcatatgaagataattcctttttcaccataggcctcaaagcaacgtgaaatatcactttgcagattccacaaaagattgtttccaacctgctcaatcaaaagaaaggttcaactctgtgagaatgcacacatcacaaaatggtatcctagataatttctgtttagtttttatgtgaagataaatccttttcaaaatagtcctcaaagggctcccaaatatccctttgcagattctagcaaagaaattattccaatcaaaagaaatatttaacactgtgaggtgaaagctcacatcacaaagaagtttatgagaaagcttctgtctagtttttatgtgaagatatttcctttttcaccrtaggcctcaagggactcccaaatatcccactgcagattctacaaaaagactgtttccaaactgctcaatcaaaagaaagtttcaactatgtgtgatgaatgcaggcatcacaaaaatgtttctcagaaagcttctctctagttttcaagtgaagatatttccttattcaccataggtctcaaagggctccc

SEQ ID NO: 878633 - DNA, 627 bp, Homo sapiens
aatcagaagaaagtttcaaatctgtgaggtgaatgcatgcatcacaaagaagtttttcggaaagcttctgtctagttttcatatgaagataattcctttttcaccataggcctcaaagcaacgtgaaatatcactttgcagattccacaaaagattgtttccaacctgctcaatcaaaagaaaggttcaactctgtgagaatgcacacatcacaaaatggtatcctagataatttctgtttagtttttatgtgaagataaatccttttcaaaatagtcctcaaagggctcccaaatatccctttgcagattctagcaaagaaattattccaatcaaaagaaatatttaacactgtgaggtgaaagctcacatcacaaagaagtttatgagaaagcttctgtctagtttttatgtgaagatatttcctttttcaccgtaggcctcaagggactcccaaatatcccactgcagattctacaaaaaractgtttccaaactgctcaatcaaaagaaagtttcaactatgtgtgatgaatgcaggcatcacaaaaatgtttctcagaaagcttctctctagttttcaagtgaagatatttccttattcaccataggtctcaaagggctccc

SEQ ID NO: 878634 - DNA, 664 bp, Homo sapiens
ctcagaaagcttctgtctagtttttatgtgaagatatttcctttttccccataggcctcaaatcactcagaaagatccctttgcagatcctataaaaagattgtttccaaactgctcaatcaaaacaaaggttcaactctgtgagatgaatgcacacatcacagagaagtttgtcagaaagcttctgtgtagtttttttgtgaaaatattccctttttcagcatggcctcaaggggattacaaatatcccctttcagattctacaaaaagactgtctccaaagtgytcagtcaaaagaaagtttcaactctgtgaggtgaatgcatgcatcacaaagtagtttctcagaaagcctctgtctagcttttgtgtgaacatatttccttttacataataggcctcaaagggctcccaaatatctctttgcagattctacaaaaagtctgtttccaaactgctcaatcaaaagaatatttcaactctgttagatgaatgcatgcatcacaaacaagtttctcagaaatcttcggtctagtttttatgtgaagatattcactgtttcaacaaaggcctcaaaccacttcgaaatatccattgcacattctagaataagactgtttccaaactgctcaatcaaaagaaatgttcaaattttgagatgaat

SEQ ID NO: 878635 - DNA, 664 bp, Homo sapiens
ctcagaaagcttctgtctagtttttatgtgaagatatttcctttttccccataggcctcaaatcactcagaaagatccctttgcagatcctataaaaagattgtttccaaactgctcaatcaaaacaaaggttcaactctgtgagatgaatgcacacatcacagagaagtttgtcagaaagcttctgtgtagtttttttgtgaaaatattccctttttcagcatggcctcaaggggattacaaatatcccctttcagattctacaaaaagactgtctccaaagtgctcagtcaaaagaaagtttcaactctgtgaggtgaatgcatgcatcacaaagtagtttctcagaaagcytctgtctagcttttgtgtgaacatatttccttttacataataggcctcaaagggctcccaaatatctctttgcagattctacaaaaagtctgtttccaaactgctcaatcaaaagaatatttcaactctgttagatgaatgcatgcatcacaaacaagtttctcagaaatcttcggtctagtttttatgtgaagatattcactgtttcaacaaaggcctcaaaccacttcgaaatatccattgcacattctagaataagactgtttccaaactgctcaatcaaaagaaatgttcaaattttgagatgaat

SEQ ID NO: 878636 - DNA, 664 bp, Homo sapiens
ctcagaaagcttctgtctagtttttatgtgaagatatttcctttttccccataggcctcaaatcactcagaaagatccctttgcagatcctataaaaagattgtttccaaactgctcaatcaaaacaaaggttcaactctgtgagatgaatgcacacatcacagagaagtttgtcagaaagcttctgtgtagtttttttgtgaaaatattccctttttcagcatggcctcaaggggattacaaatatcccctttcagattctacaaaaagactgtctccaaagtgctcagtcaaaagaaagtttcaactctgtgaggtgaatgcatgcatcacaaagtagtttctcagaaagcctctgtctagcttttgtgtgaacatatttccttttacataataggcctcaaagggctcccaaatatcyctttgcagattctacaaaaagtctgtttccaaactgctcaatcaaaagaatatttcaactctgttagatgaatgcatgcatcacaaacaagtttctcagaaatcttcggtctagtttttatgtgaagatattcactgtttcaacaaaggcctcaaaccacttcgaaatatccattgcacattctagaataagactgtttccaaactgctcaatcaaaagaaatgttcaaattttgagatgaat

SEQ ID NO: 878637 - DNA, 664 bp, Homo sapiens
ctcagaaagcttctgtctagtttttatgtgaagatatttcctttttccccataggcctcaaatcactcagaaagatccctttgcagatcctataaaaagattgtttccaaactgctcaatcaaaacaaaggttcaactctgtgagatgaatgcacacatcacagagaagtttgtcagaaagcttctgtgtagtttttttgtgaaaatattccctttttcagcatggcctcaaggggattacaaatatcccctttcagattctacaaaaagactgtctccaaagtgctcagtcaaaagaaagtttcaactctgtgaggtgaatgcatgcatcacaaagtagtttctcagaaagcctctgtctagcttttgtgtgaacatatttccttttacataataggcctcaaagggctcccaaatatctctttgcagattctacaaaaagtctgtttccaaactgctcaatcraaagaatatttcaactctgttagatgaatgcatgcatcacaaacaagtttctcagaaatcttcggtctagtttttatgtgaagatattcactgtttcaacaaaggcctcaaaccacttcgaaatatccattgcacattctagaataagactgtttccaaactgctcaatcaaaagaaatgttcaaattttgagatgaat

SEQ ID NO: 878638 - DNA, 621 bp, Homo sapiens
acagatatccctttgcagattcttcaaaaagactgtttccaagctgctcaatcaaaagaaggtttgaactctgtatgattaatgcacacatcacaaataagtttctcagaaatcttctgtctagttttaatttgaagatatttcctttttcaccacaggcctcaaatcactgagatatatcccttttcatattctacaaaaagacagcttccaaactgctcaatcaaaagaaaggttcaactctgtgagatgaatgcacacatcacacagaatttcctcataaagcttctgtctagttttatgagaagatagttccattttcaccataggcctcaaagcactccgaatatccctttgcagatggtgaagatactttgtttttcacagtagtcctcacamtgctcagaaatgtccaatttcagattccacaaaaagatgctttccaaactgctcaatcaaaggaatgtttcaactctgtgaaatcaatgcacacatcacaaggaagttactgagaaagcttctgtctagttttcatgtgaaaatatttcatttttccccataggcttcaaacccctcagaaatatcccttttcagattctacaaaaagactgtttccaaact

SEQ ID NO: 878639 - DNA, 621 bp, Homo sapiens
acagatatccctttgcagattcttcaaaaagactgtttccaagctgctcaatcaaaagaaggtttgaactctgtatgattaatgcacacatcacaaataagtttctcagaaatcttctgtctagttttaatttgaagatatttcctttttcaccacaggcctcaaatcactgagatatatcccttttcatattctacaaaaagacagcttccaaactgctcaatcaaaagaaaggttcaactctgtgagatgaatgcacacatcacacagaatttcctcataaagcttctgtctagttttatgagaagatagttccattttcaccataggcctcaaagcactccgaatatccctttgcagatggtgaagatactttgtttttcacagtagtcctcacaatgctcagaaatgtccaatttcagattcyacaaaaagatgctttccaaactgctcaatcaaaggaatgtttcaactctgtgaaatcaatgcacacatcacaaggaagttactgagaaagcttctgtctagttttcatgtgaaaatatttcatttttccccataggcttcaaacccctcagaaatatcccttttcagattctacaaaaagactgtttccaaact

SEQ ID NO: 878640 - DNA, 678 bp, Homo sapiens
gggatacaagtatccctttgcagattctgcaaagactgtttccaaactgctcaatctaaagaaaggttcaactctgtcagctgaatgcatgcatcacaaagaagtttctcagaaaggttctgtctagttcttatgtgaacatatttcctttttcaccttaggcctcaaagggctcccaaatatccctttgcagattctagaaagagactttttccaaactgctcaatcaaaacaaaagttcaactctgctatttgaatggacacatcataaagaagtttaatggaaaccttctgtctagttattatgtgaagctatttccttattcaccataggcctcaaactgctctgaaatatccctttgcagattctagaaaaagactgtttccaaactgctcaatcaaaagaaatgttcaactcygtgagatgaatacacacatcccaaagaagtttctcaaaacacttctgtctagtttttatgtgaagatatttactttttcaccataggcctcaaagtgctcccaaatatccctttgcagatgaatgcatgcatcacaaacaattttctcagaaggcttctgtctagtttttatgtgaagatattcactttttcaccatagacctcaaagtgcagattctagaaaaagactgtttccaaactgttcaatcaaaaggaaatt

SEQ ID NO: 878641 - DNA, 594 bp, Homo sapiens
aagaaagtttcaaccctgggagatgaatgcatgcatcacaaagaagtttctcagaatgtttctgtctggtttttatgtgaagatatttcctttttcaacatgagccttagactggtcacaaatattcatctgcagatactacaaaaagactgtttccaatgtgctccaygaaaagaaaagttcaactatgtgagatgaaagcacacatcccaaagaagtttctcagaatgcttctctctagtttttatgtgaagattcttcctttttcgctataagcctgaaagcactccaaatatccatttgcatattctacaaaaagagggtttccaaactgctcaatcaaaagaaagcttcaaccgtgtgaaatgaatgcacacatcacaaagaagtttctcagaatgcttctgtctagtttttatgtgaaagtaattcctttttcaccataggccttaaaccattcacaaatatccctctgcagatactacaaaaagactgtttccaaactgctccatcaaaggaaaggtagaaaagaaaggtgagatgaaagcacacatcataaagaagtttctcagaatgcttctgtctagtttttat

SEQ ID NO: 878642 - DNA, 648 bp, Homo sapiens
aaagaaaggtttaacttgtgagatgaatgcacacatcacaaataagtttctcagagtttctgtctaatttttatgtgaagatatttcctattcccccagagtcctcaatgggctcacaaatatccctttgaagattctacaaagtgamtttttccaaactgctctaccaaaagaaaggttcaactctgtgagatgaatcctcacatcacaaagaagtttctagaatgcttctgtctggtttttgtgtgaagatatttccttttccactatagacctaaaaaagctccaaatatccacttgcagtttctacaaaaagagtgtttccaaactacggaatcaaaagaaatcttcaacagtgtgagatgcatgcacacatcacaaagaagtttctcagaatgcttctatctagtttttatgtgaagatatttcctttttcactacatgcctccatgtgctccaaatataaatttgcacatacttcaaaaaggctgtttagaaactgctcaatcaaaagaaaggttcaactctgtgagatgaaagcacacatcacaaagaagttcctctgaatgcttctgcctagcttttatgggaagatatttcctttttcaccataggcctcaaagtgctccaaatatccctttgcagatt

SEQ ID NO: 878643 - DNA, 648 bp, Homo sapiens
aaagaaaggtttaacttgtgagatgaatgcacacatcacaaataagtttctcagagtttctgtctaatttttatgtgaagatatttcctattcccccagagtcctcaatgggctcacaaatatccctttgaagattctacaaagtgactttttccaaactgctctaccaaaagaaaggttcaactctgtgagatgaatcctcacatcacaaagaagtttctagaatgcttctgtctggtttttgtgtgaagatatttccttttccactatagacctaaaaaagctcyaaatatccacttgcagtttctacaaaaagagtgtttccaaactacggaatcaaaagaaatcttcaacagtgtgagatgcatgcacacatcacaaagaagtttctcagaatgcttctatctagtttttatgtgaagatatttcctttttcactacatgcctccatgtgctccaaatataaatttgcacatacttcaaaaaggctgtttagaaactgctcaatcaaaagaaaggttcaactctgtgagatgaaagcacacatcacaaagaagttcctctgaatgcttctgcctagcttttatgggaagatatttcctttttcaccataggcctcaaagtgctccaaatatccctttgcagatt

SEQ ID NO: 878644 - DNA, 692 bp, Homo sapiens
agatactacaaaaggatggtttccacactgctccatcaaaagaaacgttcaactctgtgagatgaatgcacacatcacaaagatgtttctgagaatgttgctgtctaatttttatgtgaagatacttccttttccaccataggcttcaaagtgctccaaatatctacttgcagaatctagaaaaagagtgtttccaaactgctcaatcaaaagaaagtttcatctctgtgagatgaatgcacacatcacaaacragtttctgagaatgctgctatctaatttttatgtgaagatatttccttttccaccttaggcctcaaagtgtagattctacaaaaagagtgttaaaaactgctcaatcaaaataaaggtgtaactctgtgagatgaatgcgaatatcacaaatatgtttctcagaatgcttctgtctagtttttatgcaaagatatttccttttcaactataggcctcaaagcgctccaaatataaatttgcagatactacaaaaagagtgtttccatactgctcaatcaaaagaaaatttcagcactgtgaggtgaatgcacacatctgaaagaagttaatcagaatgcttctgtctagtttttatgtgaagagatttccttttcaattataggcctcaaagtgctccagatttccgtttgcatatactacgaaaagagtatttccaa

SEQ ID NO: 878645 - DNA, 692 bp, Homo sapiens
agatactacaaaaggatggtttccacactgctccatcaaaagaaacgttcaactctgtgagatgaatgcacacatcacaaagatgtttctgagaatgttgctgtctaatttttatgtgaagatacttccttttccaccataggcttcaaagtgctccaaatatctacttgcagaatctagaaaaagagtgtttccaaactgctcaatcaaaagaaagtttcatctctgtgagatgaatgcacacatcacaaacaagtttctgagaatgctgctatctaatttttatgtgaagatatttccttttccaccttaggcctcaaagtgtagattctacaaaaagagtgttaaaaactgctcaatcaaaataaaggtgtaactctgtgagatgaatgcgaatatcacaaatatgtttctcagaatgcttctgtctagtttttatgcaaagatatttccttttcaactataggcctcaaagcgctccaaatataaatttgcagatactacaaaaagagtgtttccatactrctcaatcaaaagaaaatttcagcactgtgaggtgaatgcacacatctgaaagaagttaatcagaatgcttctgtctagtttttatgtgaagagatttccttttcaattataggcctcaaagtgctccagatttccgtttgcatatactacgaaaagagtatttccaa

SEQ ID NO: 878646 - DNA, 620 bp, Homo sapiens
ttctcagaatgtttctgtctagtttttatgtgaagatatttccttttcagatataggccactaagcgctccaaatatccatttgcacatactacaaaaagagtgtttccaaactccccaatcaaaagaaaggttcgactctgtgagttgaatgcacacatcacaaagaagtttctgagaatacttctgtctagtttttatgtgaagatatttccttttcagctttaggcctcaaagtgctccaaatatccatttgcagatactrtaaaaagagtgtttccaaagttctcaatcaaaagaaatgttcaactctgtcagatgaatgcacatatcaaaaagaagtttcttagaatgcttctgtttatgttttatgtgaagatatttccttttccaccataggcctcaaagcactacaaatatccacttgcagattgtgtttccaaagtgctcaatcaaaagaaatgttcaactatgtgagatgaatgcacatatcacaaagaagtttcttagaatgcttctgtttatgttttatatgaagatatttccttttccaccacaggccacaaagcactacaaatatccacttgcagattgtaaaacagtgtttcaaaactcctcaat

SEQ ID NO: 878647 - DNA, 620 bp, Homo sapiens
ttctcagaatgtttctgtctagtttttatgtgaagatatttccttttcagatataggccactaagcgctccaaatatccatttgcacatactacaaaaagagtgtttccaaactccccaatcaaaagaaaggttcgactctgtgagttgaatgcacacatcacaaagaagtttctgagaatacttctgtctagtttttatgtgaagatatttccttttcagctttaggcctcaaagtgctccaaatatccatttgcagatactgtaaaaagagtgtttccaaagttctcaatcaaaagaaatgttcaactctgtsagatgaatgcacatatcaaaaagaagtttcttagaatgcttctgtttatgttttatgtgaagatatttccttttccaccataggcctcaaagcactacaaatatccacttgcagattgtgtttccaaagtgctcaatcaaaagaaatgttcaactatgtgagatgaatgcacatatcacaaagaagtttcttagaatgcttctgtttatgttttatatgaagatatttccttttccaccacaggccacaaagcactacaaatatccacttgcagattgtaaaacagtgtttcaaaactcctcaat

SEQ ID NO: 878648 - DNA, 607 bp, Homo sapiens
tcctcagcaaatgtaaaagaaaagaaattataacaaactatctctaagaccacagtgcaatcaaactagaactcaggattaagaaactcactcaaaaccactcaactgcgtggaaactgaacaaactgctcctgaatgactatggggtacacaacgaaatgaaggcagaaataaagatgttctttgaaaccaacgagaacaaagacacaacatacmagaatctctgggacacattcaaagcagaatgtagagggaaatttttagcactaaatgcccacaagagaaagaaggaaagatctaaatttgacaccctaaaatcacaattaaaagaacgagagaagcaagagcaaacacattcaaaatctagccgaaggcaagaaataactaaaatcagagcagaactgaaggaaatagagacacagaaaacgctttaaaaaatcaatgaatccaggagctggttttttgaaaagatcaacaaaattgacagacttctagcaagactaataaagaagaaaagagagaagaatcaaatagatgcaataaaaaaggacaaaggggatatcaccaccaatcccacagaaatacaaactaccattagagaatacta

SEQ ID NO: 878649 - DNA, 609 bp, Homo sapiens
aaactgctcaatcaaaagaaatgttcagctctttgagatgtatgcacacagcacaaagaagtttctcagaaagcttccatctagtttttatgcaaagatatttactttttcaccataggcctcaaaattcacaaaaatatccctttgcagattccacaagaagactgtttcaaaactgctcaatcaaaagcaaggttcaaccctgtgagatgaatgcacacataaaaaggaagtttctcagaaagcttctgtcttgttttcatwtgaagatatttcctttttcaccacaagacttaaaccgctcacaaatatccctttgcagtttccacaaaaagacgtttccaaactggtcaaagaaaagaaagggttaactctgtgagatgaatgcactcaacacgaagaagtttctcagaaagcatctgtctcttttttatgtgaagatatttcctttttcacgataagcctcaaagggctcaaaagtatccctttgcagattctacaaaaagacagtttccaaactgctcaatcaaaagaaaggttcagctctgtgagatgaatgcacacatcacaaggaagtttctcagaaagcttctgtctagtttttatatg

SEQ ID NO: 878650 - DNA, 628 bp, Homo sapiens
gcattcaaggtaaagagttaaaatgttctttccattgagaagttttgaaacactctttttgtagaagctgaaagtggatatttggagtgctttgaggccaatggtggaaaagaaaatatcttcataaagaaactagacagaagcattctgagaaacttctttgttatgtgtgcattcaactcacagatttgaacctttcttttattatagcagytttgagacacactttttccagaaactgcaagtggatatttggagcactttgaggcctacggtggaaaaggaaataccttcacttaaaaactagacagaagcattctcagaaacttccttgtgatgtgtgcattcaactcacagagttgaaccttccttttgatagagcagttttgtaacactctttctgaagaatccacaagaggatatttggagcgctttgaggcctacagtggaaaaggaaatatgttcacataaaaaatacactgaagcattctcagaaacttctttgtgatgtgggcattcaactgacagagttgagcctttcttttgatggagcagttttgggacactctttttatagaatcagcaagaggatatttggagcactttgaggcctacatttgaaaaggaa

SEQ ID NO: 878651 - DNA, 631 bp, Homo sapiens
atgtgtgcactcaactcacagagttgaacctttcttttgatagagcagttttgagacactcttttgtagaatctgcaagtggatatttggaccgctttgagtccttcgttggaaacgggaatatcttcacaaaaaactagacagaagctttctcagaaacttctttgtgatgtgtccattcaactctcagagttgaagctttcttttgattgaggagtttggaaacactttttttgtagcaactgcaaatggatatttrgagcactttgtggcttatatttgaaaaggaaacatcttcacataaaaactagacagaagcattccaagaaacttccttacaatgtgtggattcatctcacagatttcatcctttctttggattgagcagttttgaaacactcttttggtagaatctgtaagtggatattttgagcgccttgattcctatggtggaaaaggaaatatcttcaaataaaaaatagagagaagcattctcagaaacttctttgtgatgacggcattcaactctcagagttgaatctttcttttgattgagcattttaaaaatctctttttgtagtaactgcaaagggatatttggcacgctttgaggcctgtagttgaaaatgaa

SEQ ID NO: 878652 - DNA, 631 bp, Homo sapiens
atgtgtgcactcaactcacagagttgaacctttcttttgatagagcagttttgagacactcttttgtagaatctgcaagtggatatttggaccgctttgagtccttcgttggaaacgggaatatcttcacaaaaaactagacagaagctttctcagaaacttctttgtgatgtgtccattcaactctcagagttgaagctttcttttgattgaggagtttggaaacactttttttgtagcaactgcaaatggatatttggagcactttgtggcttatatttgaaaaggaaacatctycacataaaaactagacagaagcattccaagaaacttccttacaatgtgtggattcatctcacagatttcatcctttctttggattgagcagttttgaaacactcttttggtagaatctgtaagtggatattttgagcgccttgattcctatggtggaaaaggaaatatcttcaaataaaaaatagagagaagcattctcagaaacttctttgtgatgacggcattcaactctcagagttgaatctttcttttgattgagcattttaaaaatctctttttgtagtaactgcaaagggatatttggcacgctttgaggcctgtagttgaaaatgaa

SEQ ID NO: 878653 - DNA, 657 bp, Homo sapiens
aaggaaatatcttcatataaaaacttgacagaagaattctgagaaacttctttgatatgtgtgcattcaaggcaaagagttgaaatattcttttgattgagaagtattgaaacactctttttgtagaacctgcaagtggatatttggagtgctttgaggccaatggtggaaagaaaatatcttcacaaagaaactagacagaagcattytctgaaacttctttgttatgtgtgcattcaactctcatagttgaacctttcttttgattgagcagtttggacacactctttttgtagtaactgcaaatggatacttggggtgctttgacgacaatagctgaaacggaaatatctgcacttaaaaactacacagaagcattctgagaaacttctttgtgatgtgtggattcatcacacagacttttaactatctttgattgagcagttttgagacacactttttgtagaatctgcaggtggatattttgagcactttgaggcctatgttggaaaaggaaatatcttagcataaaaactagacagaagcattctcagaaacttctttgtgatgtgtgcattcaactctcagagtcgaagttttcttttgattgagcagtttggaaacactcttttagtaagaactgcaaatgtctattag

SEQ ID NO: 878654 - DNA, 657 bp, Homo sapiens
aaggaaatatcttcatataaaaacttgacagaagaattctgagaaacttctttgatatgtgtgcattcaaggcaaagagttgaaatattcttttgattgagaagtattgaaacactctttttgtagaacctgcaagtggatatttggagtgctttgaggccaatggtggaaagaaaatatcttcacaaagaaactagacagaagcattctctgaaacttctttgttatgtgtgcattcaactctcatagttgaacctttcttttgattgagcagtttggacacactytttttgtagtaactgcaaatggatacttggggtgctttgacgacaatagctgaaacggaaatatctgcacttaaaaactacacagaagcattctgagaaacttctttgtgatgtgtggattcatcacacagacttttaactatctttgattgagcagttttgagacacactttttgtagaatctgcaggtggatattttgagcactttgaggcctatgttggaaaaggaaatatcttagcataaaaactagacagaagcattctcagaaacttctttgtgatgtgtgcattcaactctcagagtcgaagttttcttttgattgagcagtttggaaacactcttttagtaagaactgcaaatgtctattag

SEQ ID NO: 878655 - DNA, 652 bp, Homo sapiens
gaggcccacgatgaaaaagtgaacattccaggattaaaactagaaggaagctatttttgaaaccgctttgtgatatgtgcattcacttcatagagataaacctttcttttcattcagccgtttggaaacactgttttggtagaatctgtgatgcaatatctgggaacgcattgaggcctatgatgaaaaaggaaatatcttcagataaaaactagaaagaagttttctgagaaactgatttgtgatgtgtgcattcacttcacagagttaaatctttctgtggattcagcagtttgcaaacactgattttgyccattctgtcaatggacatttgagagctcattgaggctgatggcgaaaaagtgaatatcccaggacaaaaactagaatgaagctaactgagaaacagctttgtgatgtgtgcattcacctagaacatttaaaaccttttcattcagcagtctggagacactactttggcataatccacaatgggatatttgggagcgcactgtggcctaaggtgaaaaaggaaatatcttcagataaaaactataaagaagcttactgagaaaatgctttatgatgtgtgtattcatttcacagagttaaacctttctttgaattgagcattttggaaaaacggttgttg

SEQ ID NO: 878656 - DNA, 652 bp, Homo sapiens
gaggcccacgatgaaaaagtgaacattccaggattaaaactagaaggaagctatttttgaaaccgctttgtgatatgtgcattcacttcatagagataaacctttcttttcattcagccgtttggaaacactgttttggtagaatctgtgatgcaatatctgggaacgcattgaggcctatgatgaaaaaggaaatatcttcagataaaaactagaaagaagttttctgagaaactgatttgtgatgtgtgcattcacttcacagagttaaatctttctgtggattcagcagtttgcaaacactgattttgtccattctgycaatggacatttgagagctcattgaggctgatggcgaaaaagtgaatatcccaggacaaaaactagaatgaagctaactgagaaacagctttgtgatgtgtgcattcacctagaacatttaaaaccttttcattcagcagtctggagacactactttggcataatccacaatgggatatttgggagcgcactgtggcctaaggtgaaaaaggaaatatcttcagataaaaactataaagaagcttactgagaaaatgctttatgatgtgtgtattcatttcacagagttaaacctttctttgaattgagcattttggaaaaacggttgttg

SEQ ID NO: 878657 - DNA, 642 bp, Homo sapiens
gtagtttccacaaaaggactgtttccaagctgctcaactgatagaaagttttaactctgtgagttgaatgcacacatcacaaggaagtttttgagaaagcttctgtcttgtatttatgtgaagatatttctttttcaccataggcctcaaatcactcagaaatatctctttgcagtttctataaaaagactgtttcaaaacttctcaatcctaagaaaagttcagctctgtgcattaaatgcatgcatcacaaagaacattctcagaaagcttctttctagtttttatgtgaagttatttccttattcaccataggcctcaaaggcctcaaaaatatcccttwccatattttacaaaaagactgtttccaaactgctcaatcaaaagaatggttcaactctttgaaatcaatgcacaaaacacaaggaagtttctcagaaagcttctgtctggtttttatatgaagatatttcttttttcaccataggccacaactgctaagaaatataacattgcagtttctacaaaaagactctttcaaaattgttcaattgaaagaaaatttaactctgtgagatgaatgcacacatcacaaagaagtttctcagaaagcttctgtctagttttcatgtgaagatattt

SEQ ID NO: 878658 - DNA, 633 bp, Homo sapiens
  misc_feature 333: n = A,T,C or G
aaagtgaatatctcaggataaaaacttgaaagaacctctctgagtaactgcattgtgatgtgtgcattcatctcacagagttaaaccttccttttcattcagcagttttgaaacactgtttttgtagaatctgcaaagggatattggggcacgcattcatgcctatgttgaaaaagaaagtattttcagtaaaaaactagaaagaawctttctgagaaactgctttgtgatgtgtacattcagcacacagagttaaacatttctttggattcagcagtatggaaacgctatttttgtagaatttgtaaaggggtatttaggagctcattgagnccaaaggcaaaaaagcaaatatcccaggatacaaaccagaaggaaactatctgagaaaccacttggttatatgtgcattcacttcacagagttaaactttcttttaattcagcagtttggaaacactgttttgtaaaatctgcaaaggggtatttgggagaccattgaggcctatggtgaaaaatgaaatatgttcagatagaaactagaaagaagctttctgagaaacttctttgagatgagtgcattcatcacacagagttaaacctttctttggattcagcagtttagagacaatgt

SEQ ID NO: 878659 - DNA, 633 bp, Homo sapiens
  misc_feature 333: n = A,T,C or G
aaagtgaatatctcaggataaaaacttgaaagaacctctctgagtaactgcattgtgatgtgtgcattcatctcacagagttaaaccttccttttcattcagcagttttgaaacactgtttttgtagaatctgcaaagggatattggggcacgcattcatgcctatgttgaaaaagaaagtattttcagtaaaaaactagaaagaaactttctgagaaactgctttgtgatgtgtacattcagcacacagagttaaacatttctttggattcagcagtatggaaacrctatttttgtagaatttgtaaaggggtatttaggagctcattgagnccaaaggcaaaaaagcaaatatcccaggatacaaaccagaaggaaactatctgagaaaccacttggttatatgtgcattcacttcacagagttaaactttcttttaattcagcagtttggaaacactgttttgtaaaatctgcaaaggggtatttgggagaccattgaggcctatggtgaaaaatgaaatatgttcagatagaaactagaaagaagctttctgagaaacttctttgagatgagtgcattcatcacacagagttaaacctttctttggattcagcagtttagagacaatgt

SEQ ID NO: 878660 - DNA, 590 bp, Homo sapiens
ggactgtttccaaattgctcaatcaaaagtgaggttcaactctgtgagatgaatggacacttcacaaagaagtttctgagaaaccttcggtctagtttttatgtgaagatatttcatttttcaccataggcctcaaagcactcaaaaatatccctttgcagatgctacaagaacacagtttccaaatggaccarggaaaacaaacgtttacctcggtgagatgaatgcacacatcacaaagcagtttctcagaaaccttctttctccttattatgtgaagatatttcctttttcaccatagacctcaaagcgctcacaaatgtccctttgcagatactacaaaaagactgtttccaaactgttgaaccaaaagaatggttcaacactgtgagatgaatgcacacatctaagaagtttctcagaaagtttctgtctagtttttatgagaaggtatatcttttttcaacatagctctcaaagcattcagaaatatccctttgcaggttctagagaaacagagtttccaaattactccaagaaaagaaatgtttgccactgtgagatgaatgcacacctcacaaagtactttc

SEQ ID NO: 878661 - DNA, 583 bp, Homo sapiens
gggtccctaacaaaatgaaggcagaaataaagatgttctttgaaaccaacgagaacagagacacaacataccagaatctctggaacacattcaaagcagtgtgtagagggaaatttatagcactaaatgcccacaagagaaagcaggaaagctctaaaattgataccctaacatcacaaataaaagaactagagaaacaagagcaaacacattcaaaagctagcagaaggcaagaaataactaagatcagagcagaactgaaggaaatagagacacaaaaaacccttcaaaaaatcaatgaatgcaggagctggttttttgaaaagaycaacaaaattgatagactgctagcaaggctaataaagaagaaaagagagaaaaatcaaataggcacaataaaaaaagataaaggagatatcaccaccgatctcacagaaatagaaactaccatcagagaatactataaacacctctctgcaaataaactacaaaatctagaggaaacggataaattcctcgacaaatacaccccccaagactaaaccaggaagaagttgaatctctgaatagaccaataacaggc

SEQ ID NO: 878662 - DNA, 583 bp, Homo sapiens
gggtccctaacaaaatgaaggcagaaataaagatgttctttgaaaccaacgagaacagagacacaacataccagaatctctggaacacattcaaagcagtgtgtagagggaaatttatagcactaaatgcccacaagagaaagcaggaaagctctaaaattgataccctaacatcacaaataaaagaactagagaaacaagagcaaacacattcaaaagctagcagaaggcaagaaataactaagatcagagcagaactgaaggaaatagagacacaaaaaacccttcaaaaaatcaatgaatgcaggagctggttttttgaaaagatcaacaaaattgatagactgctagcaaggctaataaagaagaaaagagagaaaaatcaaataggcacaataaaaaaagataaaggagatatcaccaccgatctcacagaaatasaaactaccatcagagaatactataaacacctctctgcaaataaactacaaaatctagaggaaacggataaattcctcgacaaatacaccccccaagactaaaccaggaagaagttgaatctctgaatagaccaataacaggc

SEQ ID NO: 878663 - DNA, 605 bp, Homo sapiens
cggccatctcggctccacccttctgtctagtttttctgtgaagatatttcttttcaaccatagacctcaaagcactcacaaatatccctttgcagattctacaagaagagagtttccaatgtgttcaatgaaaagaaacctttacttctgtgagatgaatgcacacaccataaagcagtttctcacaaaccttgtgtgcagtttttatgtgaagatacttgctttttcaccataggcctcaaagggctcaaaaatatccctttgtagatcctacaaaaagactgaccccaaactgctgaatcaaaggaaagtttgaactctgtgagatgaattcacacatcacaaagaattgactcagaaaacttcagtctagtttttatgtgatgatattttgtttttcaccataggcctcaaaccacttacaaatatccctttacagattctacaaaaagacwgtttccaaactactcaatcaaaagaaatgttcacctctgtgagatgaatgcatgcatcacaaagtagtttctcagaaggcatctgtctagtttttatgtgaagatatttcatttttcaccataggcctcaagttgctcacaattatccct

SEQ ID NO: 878664 - DNA, 642 bp, Homo sapiens
gacaacttggaagacagtagtggttctggacacagcatgcagcttgagatctgagaacggacagactgcctccataagtgggtccctgacccctgagtagtctaacagagaggcaccccccaggaggggcggactgacacctcacaagcctgggtaccactctgagaaaaaacttccagaggaacattcaggcagcaacatttgctgttcacaaatattcgctgttctgcagcctctgctgctgatactcaggcaaacaggatctggagtggatttccagcaaactccaacagacctgcagctgagggtcctgtctgttagaaggaaaactaacaaacacaaaggacatccacatcaataccccatctgtacgtcctcatcatcaaagaccaaaggtagaaaaaaccacaaaratggggaaaaaacagagcagaaaaactgaaaattctaaaaatcagagtgcctctcctccttcaaaggaatgcatctcctcatgagcaatggaacaaagaggacagagaatgactttgatgagttgagagaagaaggcttcagatgatcaaactactctgagctaaaggagaaagttggaatccatggcaaagaagttaaaaactttgaaaaaagattagatgaatggct

SEQ ID NO: 878665 - DNA, 578 bp, Homo sapiens
aaataggaaatatcttcatataaaaactggacagaagctttctgagaaacttcttcataatgtgtgcatgcatctcacagagttgaagcattgttttgattgagcagtttgggaactgtcattttgtagactctgaaaaggcatacttgtgtgcgcttgaggcctatggtgaaaaactgatatatcttcacataaaaactagaaagaagctgtctgtgaaactgstttgtgatgtgtgtattcatctcacagagttgaaccattcttttgattgagaattttggaaacagttttttgtagaatctgcaaagggatatttgggagtgttttgaggccagtggtgaaaaaggaaatattgtcacataaaaactagaaagaagcttttggagaaactattttgtaatgtgtgcattcaactcacagaggtaaaagtttccgttcattgagcagtttggaaactctgttcttctagtatctgcaaagggatatttgtgagcacttttaagcctatggtgaaataggaaatatcttcatataaaaactggacagaagctttctgagaaacttcttcataaagt

SEQ ID NO: 878666 - DNA, 520 bp, Homo sapiens
ctttgatggaacagtttgggaactgtcattttgtagattctgaaaaggcatatttgtgtgcacttgaggcctgtataaaaaaatgatgtatcttcacataaaaactagaaagaagctgtctgtgaaactgctttgtgatgtgtgtattcatctcacagagttgaaccattcttttgattgagcattttggaaacagtctttttgtagaatctgcaaagggatattaggaagcgctttttggcctatggtgaaaaagkaaatatcttcacataaaatctagaaagaaggtttctgagaaacttctttggatgtgtgcattcatctcacagaggtaaacgtttcttttcattaagcagtttggaaactctgttcttacagaatctgcaaggggatatttgtgagtgttttgagtcctttggtgaaaaacgaaatatcttcacataaaaactagacagaagctatctgagaaacttccttgtgatgtgtgcgttcatctaacagagttgaaccattcttttga

SEQ ID NO: 878667 - DNA, 634 bp, Homo sapiens
tttagtgccataaatttccctctacacactgctttgaatgcgtcccagagattctggtatattgtgtctttgttctcattggtttcaaagaacatctttatttctgccttcatttcgttatgtacccagtagtcattcaggagcaggttgttcagtttccatgtagttgagcagttttgagtgagtttcttaatcctgagttctagtttgattgcactgtggtctgagagaccgtttgttataatttctgttcttttacatttgctgaggagtgctttaattccaactatgtggtcaattttgkaataggtgtgctgtggtgctgaaaagaatgtatattctgttgatttggggtggagagttctgtagatgtctattaggtctgcttggtgcagagctgagttcaattcctgggtatccttgtcacgttgatctgtctaatgttgacagtgggtgtcaaagtctcccattattattgtgtggtagtctaagtctctttgtaggtaactcaggacttgctttatgaatcttggtgctcctgtattaggtgcatatatatttaggatttttaactcttcttgttgaatcaatcccattaccattatgtaatggccttctttgtcttttttgatct

SEQ ID NO: 878668 - DNA, 634 bp, Homo sapiens
tttagtgccataaatttccctctacacactgctttgaatgcgtcccagagattctggtatattgtgtctttgttctcattggtttcaaagaacatctttatttctgccttcatttcgttatgtacccagtagtcattcaggagcaggttgttcagtttccatgtagttgagcagttttgagtgagtttcttaatcctgagttctagtttgattgcactgtggtctgagagaccgtttgttataatttctgttcttttacatttgctgaggagtgctttaattccaactatgtggtcaattttggaataggtgtgctgtggtgctgaaaagaatgtatattctgttgatttggggtggagagttctgyagatgtctattaggtctgcttggtgcagagctgagttcaattcctgggtatccttgtcacgttgatctgtctaatgttgacagtgggtgtcaaagtctcccattattattgtgtggtagtctaagtctctttgtaggtaactcaggacttgctttatgaatcttggtgctcctgtattaggtgcatatatatttaggatttttaactcttcttgttgaatcaatcccattaccattatgtaatggccttctttgtcttttttgatct

SEQ ID NO: 878669 - DNA, 503 bp, Homo sapiens
atcgccaagtcaatcctaagccaaaagaacaaagctggaggcatcacgatacctgacttcacactatactacaaggctacagtaaccaaaacagcttggtactggtaccaaaacaaagatatagaccaatggaacagaatggagccctcagaaataatactgcatatctacaactatctgatctttgacaaacctgagaaaaacaagcaatggggaaaggaytccctatttagtaaatggtgctgggaaaactggctagccatatctagaaagctgaaactggattccttccttacaccttgtacaaaaattaattcaagatggataaaaggcttacatgttagacctaaaaccattaaaaccctagatgaaaacctaggcaataccattcagtacgtaggaatggggaaggacttcatgtctaaaacaccaaaagcaatggcaacaaaagccaaaattaacaaaagggatctaattaaactaaagagcttctgcacagccaa

SEQ ID NO: 878670 - DNA, 503 bp, Homo sapiens
atcgccaagtcaatcctaagccaaaagaacaaagctggaggcatcacgatacctgacttcacactatactacaaggctacagtaaccaaaacagcttggtactggtaccaaaacaaagatatagaccaatggaacagaatggagccctcagaaataatactgcatatctacaactatctgatctttgacaaacctgagaaaaacaagcaatggggaaaggactccctatttartaaatggtgctgggaaaactggctagccatatctagaaagctgaaactggattccttccttacaccttgtacaaaaattaattcaagatggataaaaggcttacatgttagacctaaaaccattaaaaccctagatgaaaacctaggcaataccattcagtacgtaggaatggggaaggacttcatgtctaaaacaccaaaagcaatggcaacaaaagccaaaattaacaaaagggatctaattaaactaaagagcttctgcacagccaa

SEQ ID NO: 878671 - DNA, 581 bp, Homo sapiens
aaaaggaaatatcttcacataaaaactagtcagaagcattcttagaaacttctttgtgatttgtgcattgaactcacagagtttaaccttccttttgatagtgcagttttgaaacactctttttgtataatctgcacatggatatttggaacatttcagggccaacggtggaaaaggaaatatcttcacataaaaactacacagaagcattctcagaaacttctttttgttgtgtccattcaactcacagagttgaacctttcttttggtagaccagttttgaaacactctctttgtagaatctgcaagtggatatttggagtgytttgaggcctacggtggtaaagggaatatcttcacataaaaagtagacagaagcattctcagaatcttctctgtgatgtgtgcattcaactcactgagttgaaactttcggttgatagaggagttttgaaacactctttttgtggaatctgcaagtgaatattaagagtgctttgaggcctacggtggaaaagaaaatatcttcacataaaaactacagagaagcattctcagaaacttctttgtgatgtgtgcct

SEQ ID NO: 878672 - DNA, 668 bp, Homo sapiens
tatattttcaccataaaggatgggagaatgcctccaacaaggagaaaatagcaactccttccattttgttctcttgtattgtgggtaggaacctacctcctcaacttgtaacatttccagacttatcctttcaatatataacatgtaaagatacagttcatttcttctgtcacccagggtggagtgcaatggggtaatcatggctcactgtaaccttccagggctcaagcgatcctcccacctcagcctcctgggtagttgggatcacaggctcatgccaccatgcccaactagtttttctattttttgtagagatggggttttgccrtgttgcccaggctggtctcaaactcctgggctgaagctctctgtccacgttggcctcccaaagtgctgtgattataggcgtgagccagtgtgtgtggcccaaggtttattttttaatagaagaacatcacagaccagagaaaaagaatattgtctgtctcctgtaagagaatttaggagttgcactacctgcctaataacttattttactaggaaaccatggaggtaatatgggccatccatctgcatatttgggaagaagccaaacaaaaattaggtagtggctgagttcaaattagaaggggctgggagactgtaaggaaaatgttaaaaggacaaaa

SEQ ID NO: 878673 - DNA, 571 bp, Homo sapiens
aagcagcaggctgggttccaggtagtctgtacgtagaactaaaaactgccccaggccataagccgtcccagtggagaccagtgaaaccacagctttcaggccgcaccccttctggtctacctgtgaagcaggagtgcccagctcctgcgcccatggctatagcaaacttactacttgcccctcatttctggccaacagggtttatcctcactcaaggttataatctcatatctcagatgggagcttctctcaacctgtgactgcagcttgagttagctggtagacttctgtgaggtcccctgtgaggtaggatcaggaatggcttccctctgtccttgctggagtgtgaaagtgcaggcaatgtgcatcctgataccgcttcttctcaccccatcactcgmtaaatcagctccagcactgggtagtgttaagatctgcctccatggcctgaattgcccggctctccggtgggagtgtgtgtcacggtggcagtctctccccctctcacacactctggagactcacagttttccatctggttcacagtgtaggctgctgtttcttctttcaa

SEQ ID NO: 878674 - DNA, 664 bp, Homo sapiens
tctcattatcttcttagaatggtctgttacacaattctttccatccataaaagtggaagtccattactgggtttgctaccctgggggttaccagtcctgtagagaagaccttaaagcatgcctgtatgggtggaatatactaggataaaacctcaaagaacaggttgatgtttgcactccttccactgagaagtccctgggtaggttacttgtgtaatttacaatgattcatttccatttaaaatatgtcaaatatccattcagattaattatttagatagaaaattttatgacaaaaatcagccccaaggaaayaacttgaggacaaaaccaaaatgttatagctattataaaggtgtgaactaccatgtagcacctaattggcccagtgtgaagctgagagagtgctttgctctaccttttgcttgtcctttacagcgatttaagaggtcgtgtacatctttctcactttgaagtgggaaccataaaagctgttgatcagggaggttgggcagtgcatccttcatgacattattagtgaaaatacatttttaaaattattatctattaacttcaaaaagatgtacaatagttgtctttttttttttttttttaaggagctgagctatttcaagggctgtgattattagtgtaaaaggagaca

SEQ ID NO: 878675 - DNA, 598 bp, Homo sapiens
tactgtctctgttcccttcagtccaagttggtgatgtttctgcatgtataattctcttgaaagctttgtaggtctcctgtgcatctttctggagttcaccccattagacaaaagcacatctgtaggtctcttcaagatgaccacttttctsctttggacttctagtgagggataacactcttaatcttcttagagctctattgtttgatttaaagcatctgagagtcacactcttgcaaccataagggagctttaaaaagaaatctgacctagtgacactttgaggcacgacttttcatttttagaaggtcttaacaaagaattttatgctcacaccctcagcttcactttaaaccatgttttcttgaggatttcctagatttgatctttgctcatggccatttcttaattctagtattaatcatcatctgaagaggctgggaatcttcgtaactcacaagttctaattgtttttgtataacatccctttctttagcaaatcactcttagattttaccatacatagtatttatgtggcattttcatcattttggctggaaatttccttagctagatcatccaggtcactaggtacctt

SEQ ID NO: 878676 - DNA, 522 bp, Homo sapiens
taccattcaggacatatacattggcaaaggcttcatgactaaaacaacaaaagcaattgcaacaaaagccaaaattgacaaatgggatctgattaaactaaagagcttctgcagagcaagagaaactattatcagagtgaacaggtaacctacagaatgggagaaaaattttgcaatctatccatctgatgaacgtctaatatccggaatctacaaggaacttatacaaatttacaagaaaaaaaaamcccatcagaacgtgggtgaaggacatgaacagacgcttctcagaaaaagacatttatgcacccaacaaacatataaaaaaaagctcgtcatcactggtcgttagtgaaatgcaaatcaaaaccaaaatgagataccatctcacaccagttagaatggcaatcattaaaaagtcaggaaacaacagttgctggagaggatgtagagacataggaatgcttttatgttgttgttgggagtctcaactaggtcaaccattgtggaagacagtgtgac

SEQ ID NO: 878677 - DNA, 522 bp, Homo sapiens
taccattcaggacatatacattggcaaaggcttcatgactaaaacaacaaaagcaattgcaacaaaagccaaaattgacaaatgggatctgattaaactaaagagcttctgcagagcaagagaaactattatcagagtgaacaggtaacctacagaatgggagaaaaattttgcaatctatccatctgatgaacgtctaatatccggaatctacaaggaacttatacaaatttacaagaaaaaaaaaccccatcagaacgtgggtgaaggacatgaacagaygcttctcagaaaaagacatttatgcacccaacaaacatataaaaaaaagctcgtcatcactggtcgttagtgaaatgcaaatcaaaaccaaaatgagataccatctcacaccagttagaatggcaatcattaaaaagtcaggaaacaacagttgctggagaggatgtagagacataggaatgcttttatgttgttgttgggagtctcaactaggtcaaccattgtggaagacagtgtgac

SEQ ID NO: 878678 - DNA, 565 bp, Homo sapiens
ctgggtctctgaaggaaaagtgaagcttgtgattaggggttttaatagggtaacaattcaggaaggggagagagagaaggatttactgaagaagtgatgtttcagctgaggcatgagtgatgaatttgagttaggttgttaaagagttggtggcrgggacacattccaggcaaagagaaagaacataggttgtatgtacaaaggtcttgggaccaccgcctcctcagaacctcctcagaagagagctggtgtgtgagtggtataaagacatcatctgataatttagcaatttgtaattcatttgggtcatactgagttacttcaatatttcttaaaagcatgtacaactaactgcagggcccccttttgttgccttcacttgggaagacatggcaataaggtaaaaggatacaacataccatgctcactttctgtcttccagaatttcaatgacctctctactttgttgggcctctcacttcccatctttaatgcactttaaacaccatcaatttcatggcaaatttctttcatccttatttggcaacgggagacatgttagctg

SEQ ID NO: 878679 - DNA, 565 bp, Homo sapiens
ctgggtctctgaaggaaaagtgaagcttgtgattaggggttttaatagggtaacaattcaggaaggggagagagagaaggatttactgaagaagtgatgtttcagctgaggcatgagtgatgaatttgagttaggttgttaaagagttggtggcagggacacattccaggcaaagagraagaacataggttgtatgtacaaaggtcttgggaccaccgcctcctcagaacctcctcagaagagagctggtgtgtgagtggtataaagacatcatctgataatttagcaatttgtaattcatttgggtcatactgagttacttcaatatttcttaaaagcatgtacaactaactgcagggcccccttttgttgccttcacttgggaagacatggcaataaggtaaaaggatacaacataccatgctcactttctgtcttccagaatttcaatgacctctctactttgttgggcctctcacttcccatctttaatgcactttaaacaccatcaatttcatggcaaatttctttcatccttatttggcaacgggagacatgttagctg

SEQ ID NO: 878680 - DNA, 627 bp, Homo sapiens
cagaaaacttcttaagaaattaaaagacaacacttttttatattttggacattttttctttggttattttatattttggccattttttctttggttattaaaaagatgtagaattttgacaatttgaaaacagctaaatagcaaataaattaatgcattgtagacaaatgagtcttaaatttatttcttaaacgtttaagtaaaataatgtacagaggaacattgaagatctcctagttaaccctcttctagcacttacagatatggggcccatagagtttaacgkattttcacaattatatcacagtaaatctaaatctagaattttggttttccatatttcctctgtaatgatttctccacatgaccatggcacataaaatgatacttatggcaatggttacagtcctctatgtatgtctctaaaatgatgaaaccatgttgcatgaattagcaacggagaggatttcctcttccacagtattccgtactatcaataatcaactctattaaggatccctggtaagatgtgcattgtattattcatccatttaatatatacatttactgtatgtcaggtcctttgctaatgtttccagtattaaatgtcaggcgagaaaacaggga

SEQ ID NO: 878681 - DNA, 627 bp, Homo sapiens
cagaaaacttcttaagaaattaaaagacaacacttttttatattttggacattttttctttggttattttatattttggccattttttctttggttattaaaaagatgtagaattttgacaatttgaaaacagctaaatagcaaataaattaatgcattgtagacaaatgagtcttaaatttatttcttaaacgtttaagtaaaataatgtacagaggaacattgaagatctcctagttaaccctcttctagcacttacagatatggggcccatagagtttaacgtattttcacaattatatcacagtaaatctaaatctagaattttggttttccatatttcctctgtaatgatttctccacatgaccatggcacataaaatgatacttatggcaatggttacagtcctctatgtatgtctctaaaatgatraaaccatgttgcatgaattagcaacggagaggatttcctcttccacagtattccgtactatcaataatcaactctattaaggatccctggtaagatgtgcattgtattattcatccatttaatatatacatttactgtatgtcaggtcctttgctaatgtttccagtattaaatgtcaggcgagaaaacaggga

SEQ ID NO: 878682 - DNA, 412 bp, Homo sapiens
gaggttgttgtgagccaagatcacaccactgcacttcagcctgggtaacagagtgagactccattaaaaaaaaaaaaaaaaaaaatatatatatatatatatatatatatatgtatatatatatatatatatatatacttcagtttgtcttccaatatgactgagaacccttttactatactgascctgccataaataataactataaactccaaacaaaataaaaacatagccacttgaaggcacttggaaacaaacaaacaaaacatgcatagatacatgaaaagaatcattatttgaaagaagggaatgacactgggtgagtttcccattttcacagcttctagctgatggcaagcaccccaacatgctatgctgggtgattaaaagtccaatggaaaaaccgcagtat

SEQ ID NO: 878683 - DNA, 579 bp, Homo sapiens
ccaaagtctaagctctgacccaccaagcataccaacacctcctccatgccttaaacagtgttagtctgtacagagaggacttgacaactctgctaatcagaatatttcttgaacaactaatggaagggataaagaaagaaaggaggaaggcagaaggaagrgaaggagggacagagtgagggaggaagacacaagtcactgctgccttgtgggagatgcactggacttagcatagctgccctggtgtcctggtcactgctctccccctgtggctgaatggcttgggacaggttgccagacctctatatgtcttcaccattaaaagagacgtttaagaaaggataaatttcttcttcctaaagaacctctcccagtccctttgtccaatcctggcatctcatttttcaatgcttacatagacctctcctctggggtcacctggcacaacaacgctttactaactgccttcaattcttaggtcatactgaggcattaggcttgccaacctggttgaagtgtgagatcttagagaaaaagaatcttctttcctcctcctttatcttcttttctcctcctctg

SEQ ID NO: 878684 - DNA, 579 bp, Homo sapiens
ccaaagtctaagctctgacccaccaagcataccaacacctcctccatgccttaaacagtgttagtctgtacagagaggacttgacaactctgctaatcagaatatttcttgaacaactaatggaagggataaagaaagaaaggaggaaggcagaaggaagagaaggagggacagagtgagggaggaagacacaagtcactgctgccttgtgggagatgcactggacttagcatagctgccctggtgtcctggtcactgctctccccctgtggctgaatggcttgggacaggttgccagacctctatatgtcttcaccattaaaagagacgtttaaraaaggataaatttcttcttcctaaagaacctctcccagtccctttgtccaatcctggcatctcatttttcaatgcttacatagacctctcctctggggtcacctggcacaacaacgctttactaactgccttcaattcttaggtcatactgaggcattaggcttgccaacctggttgaagtgtgagatcttagagaaaaagaatcttctttcctcctcctttatcttcttttctcctcctctg

SEQ ID NO: 878685 - DNA, 579 bp, Homo sapiens
ccaaagtctaagctctgacccaccaagcataccaacacctcctccatgccttaaacagtgttagtctgtacagagaggacttgacaactctgctaatcagaatatttcttgaacaactaatggaagggataaagaaagaaaggaggaaggcagaaggaagagaaggagggacagagtgagggaggaagacacaagtcactgctgccttgtgggagatgcactggacttagcatagctgccctggtgtcctggtcactgctctccccctgtggctgaatggcttgggacaggttgccagacctctatatgtcttcaccattaaaagagacgtttaagaaaggataaatttcttcttcctaaagaacctctcccastccctttgtccaatcctggcatctcatttttcaatgcttacatagacctctcctctggggtcacctggcacaacaacgctttactaactgccttcaattcttaggtcatactgaggcattaggcttgccaacctggttgaagtgtgagatcttagagaaaaagaatcttctttcctcctcctttatcttcttttctcctcctctg

SEQ ID NO: 878686 - DNA, 635 bp, Homo sapiens
cccatgcaacatcaaatggtctactatattccaggcgttaaagtaggtgcaaaaatcaaaagaagaaatagacactatttccatcttgaaggagtttgttgtctggtgggaataaagactacttatcaataagcacaataatagcaagtagtcaatgatataataggtacattcatagtgctaacataatataaagatttattgaacacttactatgctcccaaccccatgctaagctctttacataatttctctcatttaagcctcatgatgatcctatgagacaggtgctataattttctcattttccacataaagggacttgttccacatcacatacctatgaagaggtggggctcttgaagctcaacactctatctccagaccttatgctcttaaacatcaagctacctactgctagctggaatcactgatgaagatatgactccagagaaatttacrgagttccctcagagagggtgacacttatgctgggccttaaaggagatcatcaaagagaggagggaaagaaaatttcaggcagttgcaagactgggtaccaagtcccatgtgtttagagaggagcaaacatttcttcagtatgactagaagatagaatgcatatgtgtagatgg

SEQ ID NO: 878687 - DNA, 533 bp, Homo sapiens
aactccaacctgtgagtttcttccattgctaattactgctccccatactgtgacagctgtgtctttcctgtttggtagctgatgaatcaatcaaaagatgcttttgtaaagtagtgatttgggggttgcttaagtgcctgatagaatgtgtgacactgacaggttccctggggatgaggacggtgtttaccacagcatgttctcagagggtgccaaacaggkgccccgcccaaacctactcaggatcaccatgcagcaagttgggaaatgcctacccagccctagttctagtttctatggtaatggtggtttgggggccaatattgcaacaatcctatttgcaggtatctgcagcatggcttttaatccccaaacagtgttggttttctttgttctcttcctgccaatcattcctgttcaagacttatctgatgcctattctgtaccatcaaaactctgttctctacacagcagactgagatctctgagtacagtatatttctggtaaggactcaatatctgctaacagtgta

SEQ ID NO: 878688 - DNA, 707 bp, Homo sapiens
agagccaggtagaaaatattttctacattgcaggctatacaatctctgttgcaactcttcaactctccctttgtagcatgaaaacagtgatatgccatatgtaattaataaacatggctgtgtttcaataaaactttatttgcaagaacaggcagctggtcacagttgatctcctagccatagttttccaaccttatttatctcccaaaggagatttcctttgggagataaataaggttagatttgatcttgagggtgagaaacttatgataggattaatatcctcataaaagaagaaagaggccaggtgaggtggctcatacctgtaatcccagcactttgggaggcggaggtgggcagatcacctgaggtcatgagttcgagaccagcctgaccaacatggtgaaaccyccatctctactaaaaacacaaaaattagccgggtgtggtggcacacacctgtaatcccagttactcgggaggctgaggcaggagaatcgcttgaacccgggaggcagaggttgcagtgagctgagatcttgccactgcactccagcctgggcaacagagtgagactctgtctcaaaaaaaaaaaaaaaaaaaaaaaagaaagaaaagaaaagaaaaaaaaaatctagaaaggaagcaaactcatttgcctaagaccatggcaaaatcactaaaaccatctagtactttctccaaag

SEQ ID NO: 878689 - DNA, 638 bp, Homo sapiens
tctgagattatacttacagcaggttttggggacactaaaatacacctttttttgatgtggcatatctatatgataaaaaaagcttctctttattgtgttagccactctctagcctttcttgagccccttatcccaaaataatcattctatttcatcatatccctcactggcctgaattaccttaggtcttccttaatatattcagctattacaggatagtaggaggcggacrtacaaggtatgtgtatattgtaacagataagaatgagataaagataaaagaacaaagtgtcagctcaggtatgggaagaaaaacattaagcaaaagaaacattttttgaataacagtcttttctctaccagaaattctcgttagaattttagtgtactttgaaaggtatctcatgtgataaaaaataatttatagtaaggaattactagaacccctaacaaaaaatcaagtaatcacttgattctcactgtctaggaaccaatttgaaaatctcatatcaaacttctctcttgatgacagccaaatcaattaatgcacttttatcattaatgacaggacataacatgtttttgaaattatcttttgggcctttattctccataaaatgacatactacagcaagcca

SEQ ID NO: 878690 - DNA, 636 bp, Homo sapiens
cacagagtctgtatatattccaatgattatttttgaaatagtggttgcctttcaaagtgtcatcacttttattcaatgcattcctttgtatagttagtatagtagcaatgaaataaaacactgagttggtcagcttgtaaaactgtcaactaatatattattaatggagtttaacagatgagtgcaaaactaggccctatcatctatgtggccatgtcagcaaagagaagagaatctggcttctgctcttatgtcaatccaactaacaggaattgaagcacctgaattaaacaatttgcaacctgtcaaaacttagcaagatcaagcatttaaaccaaactgaaagttttraggggaaattttttattattatagtatttataataactgaaaattgaaaacaaagtaaaacaagcctctttcttaataggggattatggattaggagcatttaactaatggagacttccacttaaggtacaccactgaagaataagtttcctgtaggcatatgacttatggatacagtcttattccctcatatttgcatttttttaaatgaaagttctgtataagcattgcatactgaaagatctaaggaataatcaaccaaacaaaagccccacatgaatgatg

SEQ ID NO: 878691 - DNA, 670 bp, Homo sapiens
ctacctttttgaatacaggccaaatgttactgaggtgatctgggcaaaagccttgagggactgaagcattcaaatgttcacaaactcctcctcctcttggactaaggtcaaagtatcaccagggctgtgtccttttctggaggttccaggagagaatctatttccttggttttgtttttgtttttgttttgtttttgttttttttgagacggagtctcgctgttgcccaggctggagtgcagtggcgccatctctgctcactgcaggctccgcccgctggagttcatgccattctcttgcctcaggctcccgagtagctgggactacaggcacccgcaacctcgcctggctaattttttgtatttttagtagagacggggtttcaccgtgttagccaggatggtctcgatctcctgacctcgtgatccgcccgcctcgrcctcccaaagtgctgggattacaggcgtgagccaccatgcctggctttccttggtttttatagcttctacaagtgaccctcatttcttgactaatggctacctcctttcatcttcaaaaccgcatttgttatatcattttacttccacctgaatatccagtgaccagaaatctttttttatacccaaaagatccaaataaaagacattacccatatgcttcctgaagtttt

SEQ ID NO: 878692 - DNA, 677 bp, Homo sapiens
ttgccaggtgaaggaagctcccaactggaattggtagtggctcccacttggcacaaatttccttgagtggagtctgggggactagccagagctgctgtggatatgaatgagcgcaggagtacagtagtggccaaacagggagaggcaaggtccaaaagctgtgcttgctttctcagcagggtatctcacagcctggggcaaggtctgagtggagcactgccagaacaagactggcctcactacctgcatgggaactgggtgaggcctctcaaaaatggttatccctgacttccctggcaaactatatgatcagagcagagacagccaagatctcctctggaacataaccccattggcctgggaagcaaccccccaccccatagtagccacagaaagtgccccacccaaggagagtctgtgccaagccttgcctaatcctgcccccatctgatggtatttccctgaygccctggtagccaaacacaaagcataggcacccttgggagctttaaggccctgcccattgcctgagaaaccaaaatacttaccttggccgtcttagggcaagcctagagctcctgactactaccacagctggtgctctcttgaaagtgccacctcctggttggaggccaagcaactcaggccattgtgacacttcatgacagaatgaccct

SEQ ID NO: 878693 - DNA, 625 bp, Homo sapiens
agaaagcaggggtaataattgatttcatttacaacatgactggaggcacaagcagatctaaaacaagacagagttgagagaacaaatgtagtctttttaaaagtttcatctaaatgtcttccctgtatttcagatgtgagtgtcagaggcccttccctaattacaacaaggcaagtgcatcttagaagaatttggattggcaaatgtcctgatgtgtgccaaacttttaaaatagtccttgggtgcaaacagaacgccaaaataggtctgcctgcttgaaaatggcatcaacccaatttccatttatatcccagctcaactagcctacctaactgcttagaagagttatccagcctctttttcactctggaaaataatattaatagctgtttcctaataggggttgagaaagattaaagcaatatggtacatgtaaaatacctaacacagtgcccgccatagagtaaatgctcattaaaygtgagcctaaaaatggacctactgacaatgtttctctttactgtcatcaacaaagtaataatggaagaggaagaaatgcttccatgaagccaaacaaaaagctttatatcatagttcttctttatctgtagttactctttccaca

SEQ ID NO: 878694 - DNA, 674 bp, Homo sapiens
ttcttatttaaagcaagtctctaaaagttttacattacatgttcattaaagaagtacatatgattccagcctctcattaaataatattcaattttaaaaaaaagaaagcaagaaaaagtattccttaaagcagtacttaactgataaaaatttatatattaaagaactaatgcttgcatgaaagagcttaaatttyactttgttacatttttaacccatgcagaaacactgaagcaagaaaaaaatgtacaacatatttttatacgttgtttctacacatataggaagaataatatatgtgtctgtgtgtgcttgcggcctgtgtgtgtgtgtgtacatatgtatataaaatagaaaaagaacattagcgttatttgctaaaataaaaaagaacatttagtcctgtctgagtttttcctttaaagggtgatataaagattttgtagggaaaattcatagatgaccattagttatgattattttactagctaaagaagaaattctttgatagttctagataccagcacgttactttctttttacatagagctttttgttatgggagtaacaagaaaaattttcagacattcgtttcataattcttggccaaatttccatcagcagaagagcaaatttgttgatgactaagcagagattcagaaagcccagggacc

SEQ ID NO: 878695 - DNA, 674 bp, Homo sapiens
ttcttatttaaagcaagtctctaaaagttttacattacatgttcattaaagaagtacatatgattccagcctctcattaaataatattcaattttaaaaaaaagaaagcaagaaaaagtattccttaaagcagtacttaactgataaaaatttatatattaaagaactaatgcttgcatgaaagagcttaaattttactttgttacatttttaacccatgcagaaacactgaagcaagaaaaaaatgtacaacatatttttatacrttgtttctacacatataggaagaataatatatgtgtctgtgtgtgcttgcggcctgtgtgtgtgtgtgtacatatgtatataaaatagaaaaagaacattagcgttatttgctaaaataaaaaagaacatttagtcctgtctgagtttttcctttaaagggtgatataaagattttgtagggaaaattcatagatgaccattagttatgattattttactagctaaagaagaaattctttgatagttctagataccagcacgttactttctttttacatagagctttttgttatgggagtaacaagaaaaattttcagacattcgtttcataattcttggccaaatttccatcagcagaagagcaaatttgttgatgactaagcagagattcagaaagcccagggacc

SEQ ID NO: 878696 - DNA, 674 bp, Homo sapiens
ttcttatttaaagcaagtctctaaaagttttacattacatgttcattaaagaagtacatatgattccagcctctcattaaataatattcaattttaaaaaaaagaaagcaagaaaaagtattccttaaagcagtacttaactgataaaaatttatatattaaagaactaatgcttgcatgaaagagcttaaattttactttgttacatttttaacccatgcagaaacactgaagcaagaaaaaaatgtacaacatatttttatacgttgtttctacacatataggaagaataatatatgtgtctgtgtgtgcttgcggcctgtgtgtgtgtgtgtacatatgtatataaaatagaaaaagaacattagcgttatttgctaaaataaaaaagaacatttagtcctgtctgagtttttcctttaaagggtgatataaagattttgtagggaaaatkcatagatgaccattagttatgattattttactagctaaagaagaaattctttgatagttctagataccagcacgttactttctttttacatagagctttttgttatgggagtaacaagaaaaattttcagacattcgtttcataattcttggccaaatttccatcagcagaagagcaaatttgttgatgactaagcagagattcagaaagcccagggacc

SEQ ID NO: 878697 - DNA, 666 bp, Homo sapiens
ttccccactgtaccattcatagtgtagatcagaaaatcttattttatctggatcatgcatacctccctaatctcatactttccacatttctttgaacattattatctaaaaatattgactttattttataaatttaaataaaaaacaatgggaatgggagaagggggaggtcaaactctttcccacttgagaggtttatatttgctacttcctccatgaaatgttctgcaaatcttcacatctgactccttctccatatgactccttcaaatgtatgctaaaatactactttcacagagagacrgtttcttctactcaaacacatcttcaatggtactaaacaaattttatgattatagtttcattcatgttcagttgtttcattgtctatcttcccattgacctgtaagcattttgaagcaggcaccatgcctccattattcacaattgaatatttagaacctgatgtaatatcttagtacccagtaaaatgtaggtacccaataaatttctaacaatccaaataaatgacataaaccagaaaataatcagaaacatgaaaacactcaaacaaaataaaaagtaaaggttggtaaggtgttgtaatgattaatagaaaaaggacatgaaaacaactggaaatgtaggtaaaagactctttatttg

SEQ ID NO: 878698 - DNA, 666 bp, Homo sapiens
ttccccactgtaccattcatagtgtagatcagaaaatcttattttatctggatcatgcatacctccctaatctcatactttccacatttctttgaacattattatctaaaaatattgactttattttataaatttaaataaaaaacaatgggaatgggagaagggggaggtcaaactctttcccacttgagaggtttatatttgctacttcctccatgaaatgttctgcaaatcttcacatctgactccttctccatatgactccttcaaatgtatgctaaaatactactttcacagagagacggtttcttctactcaaacacatcttcaatggtactaaacaaattttatgattatagtttcattcatgttcagttgtttcattgtctatcttcccattgacctgtaagcattttgaagcaggcaccatgcctccattattcacaattgaatatttagaacctgatstaatatcttagtacccagtaaaatgtaggtacccaataaatttctaacaatccaaataaatgacataaaccagaaaataatcagaaacatgaaaacactcaaacaaaataaaaagtaaaggttggtaaggtgttgtaatgattaatagaaaaaggacatgaaaacaactggaaatgtaggtaaaagactctttatttg

SEQ ID NO: 878699 - DNA, 674 bp, Homo sapiens
ttccatgaagtcaaaacttagtataatatagcagtttaattttttccattaattatgtcaagtagcatgtaatcaatgcctaatatttgtttgacactgtagcgagtgatagagacaccataaagaatgaggtgatttctttctaataaaagataaatgagtacatggctcaagaaagtgtagtagttttgaaacatttatgcagttggtgagaaggtctggaaaggaggaagtacctcattttacctgggagtgaccacaaaagctccctaaaggagtagagcaggatctgcatcttgaaagaggagtagacttcaaacaagaggagttttagaaagaataagggaggaaataagyaggagagaaaacagtaggtaagaaagcaaatgtgaattaaacaaagcactcaggtgaagcagcatgaatattatgagaaaaacagataattatagataaatgcaatagttctctaactgtagtgtgcgtaagagtcacctggaaggcttcttaaaacatagatgccaagacctcacaccctctgttctgattcagtagggctaacctacaaactgaaaatttgcctccctcaagtccccaagaagtgttgatgctgccagtccatgaaccactgtttggggcacacaaacaaaatagctagagcttagtgagacatc

SEQ ID NO: 878700 - DNA, 674 bp, Homo sapiens
ttccatgaagtcaaaacttagtataatatagcagtttaattttttccattaattatgtcaagtagcatgtaatcaatgcctaatatttgtttgacactgtagcgagtgatagagacaccataaagaatgaggtgatttctttctaataaaagataaatgagtacatggctcaagaaagtgtagtagttttgaaacatttatgcagttggtgagaaggtctggaaaggaggaagtacctcattttacctgggagtgaccacaaaagctccctaaaggagtagagcaggatctgcatcttgaaagaggagtagacttcaaacaagaggagttttagaaagaataagggaggaaataagtaggagagaaaacrgtaggtaagaaagcaaatgtgaattaaacaaagcactcaggtgaagcagcatgaatattatgagaaaaacagataattatagataaatgcaatagttctctaactgtagtgtgcgtaagagtcacctggaaggcttcttaaaacatagatgccaagacctcacaccctctgttctgattcagtagggctaacctacaaactgaaaatttgcctccctcaagtccccaagaagtgttgatgctgccagtccatgaaccactgtttggggcacacaaacaaaatagctagagcttagtgagacatc

SEQ ID NO: 878701 - DNA, 437 bp, Homo sapiens
cctctgttgtttcttcccctctgacagaaagtggtagccctaccctcttcaaaattcttggttcttcatttcctgtaccccttcagcctaataattttttttccgtaagtgctatttctgaatctcttagagcaggggttggtaaactatgattagtggayaaaataaggggatatcattctatacttatcaaactagctaaatattcagacttatgacaacacacttatgggaaggttgtggggaagcaaatatcctaataaaatgctagaagtatactatcttttgggaggtcactataaaatatataacatgtaattatatatacaatatgcaataaaacacttaaaatgtgcatattcttcttaactcagcaatttaaaaaataattaaaaggatgtgtaaagactgatgtagattggaggcaagatggctaa

SEQ ID NO: 878702 - DNA, 602 bp, Homo sapiens
ttctcagcactttaatcgcacctattctaaaattgaccacataattggaagtaagacactcctcagcaaatgcaaaagaacagaaattataagagtctctcagaccacagtgcaatcaaattagagctcaggattaagaaactcactcaaaactgcacaactacrtggaaactgaacacctgctcctgaatgactactgggtaaataatgaaatgaagacagaaataaagatgttctttaaaaccaatgagaataaagacacaatgtaccagaatctttggggcacatttaaagccatgttttgagggaaatttatagcactaaatggccacaagagaaagcaggaaagatctaaaattgacaccataaaataaaaatttaaaagaactacagaagcaagagcaaacaaattcaaaagctagcagaagataagaaataagtaagatcagaggagaatggaaggagatagaaagacaaaaaacccttcaaaaaaatcaatgaatccaggagctgttttttttgaaaagatcaacaaaatagatagactactagccagaataataaagaagaaaagagagaagaatcaaatagacatgataaaa

SEQ ID NO: 878703 - DNA, 663 bp, Homo sapiens
cgtatgtaacaaacctgcacattgtgcacatgtaccctagaacttaaagtgtaataaaaatatatatatataaaataaataaataaaacaccaaaagcaatggcaacaaaagccaaaattgacaaatgggatccaattatactaaagagcttctgcacagcaaaagaaactatcatcagagtgaacaggcaacctaccgaatggaagaaaakttttgcaatttatccatctgataaagggctaatatccagaatctacaaacaacttatacatatttacaagaaaaaaacaaccccatcaaatattgggcaaaggataaagaggcacttctcaaaagaagacatgctgccaaaaacataagaaaaaatgttcatcgtaactggccattatagaaatgcaaatcaaaagcacaatgaggtaccatctcatgccagttagaatggtgatcactaaaaaggcaggaaacagcagatgctggagaggacatggagaaataggaatccttttatgctgttggtgggagtgtaaattagttcaaccattttggaagacagtgtggcgattccttaaggatatagaagcagaaataccatttgaccctgcaatccctttactggttatatacccaaaggattataaatcattctactataaagacacatg

SEQ ID NO: 878704 - DNA, 675 bp, Homo sapiens
aaggataaagaggcacttctcaaaagaagacatgctgccaaaaacataagaaaaaatgttcatcrtaactggccattatagaaatgcaaatcaaaagcacaatgaggtaccatctcatgccagttagaatggtgatcactaaaaaggcaggaaacagcagatgctggagaggacatggagaaataggaatccttttatgctgttggtgggagtgtaaattagttcaaccattttggaagacagtgtggcgattccttaaggatatagaagcagaaataccatttgaccctgcaatccctttactggttatatacccaaaggattataaatcattctactataaagacacatgcacatgtatgtttgttgtggcactatttacaatagcaaagactgggaaccaacccaaatgccaatcagtgataaactggataaagaaaagtggcacatatacaccatggaatactatggaacatggaacgtagttcatggaacacctacaaaactaacaccatacatggaacacctgcaaaactaactcaggaacagaaaaccaaacactgcatgttctcacttataagtggtagttgaacagtgagaacacatggacatagggaagggaacatcacacactggggcttgttaggaggtgggggactaggggagggatagcat

SEQ ID NO: 878705 - DNA, 675 bp, Homo sapiens
aaggataaagaggcacttctcaaaagaagacatgctgccaaaaacataagaaaaaatgttcatcgtaactggccattatagaaatgcaaatcaaaagcacaatgaggtaccatctcatgccagttagaatggtgatcactaaaaaggcaggaaacagcagatgctggagaggacatggagaaataggaatccttttatgctgttggtgggagtgtaaattagttcaaccattttggaagacagtgtggcgattccttaaggatatagaagcagaaataccatttgaccctgcaatccctttactggktatatacccaaaggattataaatcattctactataaagacacatgcacatgtatgtttgttgtggcactatttacaatagcaaagactgggaaccaacccaaatgccaatcagtgataaactggataaagaaaagtggcacatatacaccatggaatactatggaacatggaacgtagttcatggaacacctacaaaactaacaccatacatggaacacctgcaaaactaactcaggaacagaaaaccaaacactgcatgttctcacttataagtggtagttgaacagtgagaacacatggacatagggaagggaacatcacacactggggcttgttaggaggtgggggactaggggagggatagcat

SEQ ID NO: 878706 - DNA, 630 bp, Homo sapiens
acaaattcctgggtaaagtaaaacttcaaaagagaattattcaagatcaagaaagacatggtgacacaacaaaattagttaaagataagtttgcaagcacacaaaaaaagagaaagaaaaataaagacgtcctggcaattaagcccacaaaaagtcatgaaataatgcagatacatagaaaacatgatttaaagtattttttaattgaagtgaaatagttaacaatcaaagagaaaatgataagtatggaagggaaaggaaattcaacatacacaaaattggagatactgagagagtggaaattaagggaatgaaaaatatttaaaatgccaatcatgaaaaagtcataggaacaaaataagacttgaatctaaaaactgaagaagcacattatgttcctggaaagataacagaatggtcaacaccaagacatattttagtaaatgtaccagtcaggttycatcaaggacagaatctgaaaatcctcggcaaaatactagcaaacagatccagcagcacaccaaagggctaatctaccatgattgagcaggctttatccctgggatgcaaggttggttcgatgtacacaaatcaataaatgtgattcatcacataaacagaaccaaaacc

SEQ ID NO: 878707 - DNA, 642 bp, Homo sapiens
aagatcatcgaggctaggaagaaactgcatcaactaacgagcaaaataaccagctaacatcataatgacaggatcaaattcatacataacaatattaaccttaaatgtaaatgggctaaatgctccaattaaaagacacagactggcaaactggataaagagtcaagaccaatcagtgtgccgtattcaggaaacccatctcaggcatctgcaatctaatggtaatctaatctaatctaatgctaacatcttgcaattgcaagattgcaagattgctatcatcttgcaatcaggcaagagaaagaaataaaggtattcaattaggaaaagaggaagtcaaattgtcactgtttgcasatgacatattatatatttagaaaaccccatcttgtaagcccaaaatctccttaagatgataagcaactcagcaaaatctcaggatacaaaatccatgagcaaaaatcacaagcattcctatacaccaataacagacaaacagagagccaaatcatgcgtgaactcccattcacaattgctacaaacagaataaaatacctaggaatccaacttacaagggatgtgaaggacctcttcaagaagaactacaaatcactgctcaacgaaataaaagaggaatcaaac

SEQ ID NO: 878708 - DNA, 661 bp, Homo sapiens
ggtctgatttacatcactgggatacccttttgcttgcagttctacccagagctctgagggtctttcacccagcaggggccagtcccacagcgtgtgcccccacagctcactctgatccatcctgggtcctgccactcctgggtcttccaaccaggctctcataacggatcatacctgctctgaggggagttcacagtttaactaaagggactcagagagggcccctcccttgtcccaagaggagagccccactccccttttcccagactaatttactgacctctgaactgtaggagtgcagggtgctccacccccactccaccttaggacacaggcttacaaaacttaaaacacttctgtgtcctcaagataatcttggggaggaaactgaggctctgagaggggtgtgctctagttgcccagggccccagttcaaatcttggttgttggttgttctgaccctttccattacaccatcccattcctctccatccaaatctccttggaggggawggcaattaaccctcagtccctcagaggaccaccagctgcagatcctaagaatcaggaaggtacagtaccaaaggcctttccatgacatctccagttttcccaggtccacctcagagggactctgtcaggtaaccaccacccaggagca

SEQ ID NO: 878709 - DNA, 527 bp, Homo sapiens
ctagtctcttgctgtccctgccggcagaccactctgtctcctacagggcatgcatgtgcaggatcaggtgatatgcgtgatcagtggctgcagcctagaaagatggcagagcaagagcaaagaaaaaaattccctttgattccagaatatctcctgaaaaagatgaagacttttcaagccctcaaagccatccaggcaaagtargcacttctggtaaagaatgagcagaggaaaggaagaaggctcaggtttaagcgactggaattcgtcctacatgattcctagcagcacaaatgtggcagggtgcatctcctatgactagaagtgaagcctcatgccttagaattgccagataaacttttcttggcctctgttgtatacatccaaaggattaatggggtgagttcactggtgcagaggaacactgcaagagttctgaagattttctgtggtgtctgtcaaagtcatcccccagagcctaaaagtggaaacttatgtgacctggggatttccaaatctgaagtctg

SEQ ID NO: 878710 - DNA, 628 bp, Homo sapiens
gccaggcttgagagccacttatctataccagtggcttatctataccagtggaaccaaagtatagttcctaaccatcatctgcatcacctgggaacttgttagaaatgcaaattattgaaccccaccccagatttactaactctgagaaactctgggggtgagacccagcaatctgtgttttaacaagctctccaggtgattctcgtgtacttcaaagttgtgctgcccaatatggtagccactagttatgtgtggctattgaaaacttcaaatgtggctagtccgaattgaaatgtgctgtaatgtaaagtacacactggatttcaaaggcctcacacaaaactagaatataaaaatcacatgaataatatttaattacatatgaagataatatattgggtatttaaatcaaatgaaatatattactaaaatgaatgtcacctatttctttttactttttaaatatgtctgctagaawatttgaaattatgtatttggcttgcattacatttctgttggacagcactaaagtctgattgcactgatctatgcaatcactattttctttactgttgggaacaggcccctcaaatctggccataaactggccccaaaactggacataaac

SEQ ID NO: 878711 - DNA, 596 bp, Homo sapiens
cacagactgtgtagctcaggagggcataaatcccagatcaagttgtcagtggaggtggttctttcagaagcctctatccttggcttgcaagatgaccatcttttccatgtgccttcacacagtcttccctctgcgtgtgtctacatcctattctcctcttcttataaggaccccagtcatattggaggagggccctaacctaatgaccccattttagcttaattagctcttcagagggattggatttccacacatgaatttagggggaggcgggtagacacctgtgaaaaccaacattggcttatcmtcctgtatgtaaggctgaagttaaattactcattgagcaaaacattgctacttagagcaaaaagatttgaaagggtgcttcacgactaacaacctgtgagagtgggaaaactaagactgagtttagaaagtcagaaagggagaaacttttagtttaattccaggaataggagcagaaagtaaaaacccattaggaattatactataaattaaaaatataaatactgcaagactgacagaagagtctagagaagattacaaatacttcacattttctgtgaaattataac

SEQ ID NO: 878712 - DNA, 533 bp, Homo sapiens
aaagccctataacctggaaagtattctcaggagagactagttatgtatgacacatcagagtttgcttatcttttttcagtgttgtatccctatagttccttcctgtagggtctccttaaatagttactttttatgttgtatctagagttggttattgttatcagctcagtacatattcaatacaagcatgtctggcatgatcagaactcctaaattatgtttcttaacttagagttcaargaaaatgtgtatgcaaaatataaaataatgtatgtgtttaaaatatatctgccaaataaatattttagatttgcaaatttcagggtaactcattagctttctcattttctgctctaattaaaaaaaatgtgagatgtatattttgtcaccaaagtcttcaccatttgcttaccatgtatgatatgcatacatacctatggggaagaattaaatagcaataatcataatcataaaacaattgtgattacatgaaacgtgaaagctgtttcataaattttggaaatgacactatt

SEQ ID NO: 878713 - DNA, 603 bp, Homo sapiens
caaagttccacaaatctctagggcagggacacaatgccaccagtctctttgctaaaacataacaagacacacctttgctccagttcccaacaaattcctcatctccatctgagatcacctcagactggaccttattatccatattgctatcagcattttgggcaaagccactcaacagtctcyaggaagttccaaacttgcccacatttttctgacttattctgagccccccaaactgttcccacctctgcctcttatccagttccaaagtcacttccacatttttcggtatcttttcagcaatgccccactctactgatagcaatttactgtattagtccattttcacactgctgataaagacatacccaagaatgggaaatttacaaaagaaagaggtttaattggacttacatttccacatggctggggaaacctcacaatcatagcagaaggcaaggaggagcaagtcctgtcttacatggatggcagcaggcaaagacagaatgaggaagatgcaaaagcgaaaacccctgataaagccatcagatcttatgagacttattcactaccacgagaacactatgggggaagctgccacta

SEQ ID NO: 878714 - DNA, 567 bp, Homo sapiens
aaaacattaataggaaagacaactagctagactaattttttttagtaaagagagaagatccacacaaacacaatcagtaatgacgaaggggacattaccactgaccctagagaaatacaaaaaaccttcagagactactatgaacacctctgttcacacaaactagaaaacctacaggaaatggataaagtcctcgacacattcagccacccatgactgaactaggaggaaactgaatytctaaagagaccaataatgaattccaaaaatgaatcagtagtaagttggccaatcaaacaaagcccaggatgaggattcccagccaaattataccaaaagtataaaaaaagagctggtatcctttatattgaaactatttgaaaaaaattgatgaggaaagactccttgctaactcattctatgagcccagcatcatcctgatactaaaacctgagggacattattgaaaaaaaaaaaaaaagaagagaaagaaagaaaacatcaggccaatagcctcgatgaacatcgatacaaaaatcctcaacaaaatactagcaaactaaatct

SEQ ID NO: 878715 - DNA, 567 bp, Homo sapiens
aaaacattaataggaaagacaactagctagactaattttttttagtaaagagagaagatccacacaaacacaatcagtaatgacgaaggggacattaccactgaccctagagaaatacaaaaaaccttcagagactactatgaacacctctgttcacacaaactagaaaacctacaggaaatggataaagtcctcgacacattcagccacccatgactgaactaggaggaaactgaatctytaaagagaccaataatgaattccaaaaatgaatcagtagtaagttggccaatcaaacaaagcccaggatgaggattcccagccaaattataccaaaagtataaaaaaagagctggtatcctttatattgaaactatttgaaaaaaattgatgaggaaagactccttgctaactcattctatgagcccagcatcatcctgatactaaaacctgagggacattattgaaaaaaaaaaaaaaagaagagaaagaaagaaaacatcaggccaatagcctcgatgaacatcgatacaaaaatcctcaacaaaatactagcaaactaaatct

SEQ ID NO: 878716 - DNA, 571 bp, Homo sapiens
ttgttacttctctcttctttcatcaaaaatgagaacatctgtaatcatcacagcaggatgctggcctgtgcctctaagtggtgtccagaaagacctctgttgggctgagtttggatagtcccacatgaggagaatagttatttactgaggaatagctgggaggaagcaacttatgatttttgtaaaacaaaagtagcctatactataaaataaactagaatgcgcaatgtaaaatgtgacttggaaatgggacgtacacaaacttaggaacatattttatgagaaacaaatttaagaacttcaaaaagaaaattttcagaataattgtcattattatcacattaaaaacacaccacataaaaatacattgaaatcttgaaatctaagttgtggcttattgtctagatactgakaaatggtttgtgagagaagggagagggatgtgagtgtgggcttagtttatatttcactttgaagataaagtgagaaacattaagtgactgcatttgtgctaaagaacagacaatgctattgtgtgatagagaatacaatgaaaggcaaaaccaggaga

SEQ ID NO: 878717 - DNA, 658 bp, Homo sapiens
tcaagatcagaaagaaatgtataccatggtttatcctaaagtttacagtattagctcttatgtgtaggtctgcagtctactttgtattgatttttgcataggttgtgaggttcacgttcaaattaactttttttttcatttacatgtccaactgtccccacatcatttttttcctgttcacatttattttattctttaaatttatgaggttatataaatatgcatgtattttatgcatatatacaatgatataataaaaccagggtaattagcatattcatcaccccaaacatttataatttctttttttttttttttttgagacggagtctcwctctgtcgcccaggctggagtgcagtggcatgatctcggctcactgcaagctctgcctcctgggttcacgccattctcctgcctcagcctcctgagtagctgggactacacaggcaccggctaccatgcccggctaatttttttgtatttttagtagagactttacagctccacatggctggagagacctcaaaatcatggcgggagttgaaaggcacttcttacatggcagcagcaagagaaaatgagaaagaagtaaaagtggaaacccctgataaacccatcagatcttgtgagacttattcactatcacgagaatagcat

SEQ ID NO: 878718 - DNA, 618 bp, Homo sapiens
atgagaatgtgtccttgtgagccctgacacaaaccttgctggcagggcactcaggactgccaggaagactcaggaccacagaggggactcaagaccaccagggaagagcaggttgcaggaagcacagggccagccccagagcagttgggggtagagatgagaggttggtttactgccaggttctggggttgcctcaccatcttcatgtttcctccagggaccctctcttatttcatggtgctgtgactagctctacatctctaaaataccacagttttgttgtaccrggaggaaaccttctcacaggccctaaatgtagagcaatctctctgccagtggtcactaggatcacagccctgaggaagctgagggtaacctggtgaatcttctccagtcacattcgggacaggaaccttagcggggttccctgtggagaacagtctcaggaatcctaacctcagccaagacagaggctgggccagatcaatgtcagatagaacctcacaagttttatgtctgacccttctccaccaacaataaagcatgccaatcagtatcagcgccgatctggggcccttttactcctagcccattctgtttctctttatttgttgttgt

SEQ ID NO: 878719 - DNA, 601 bp, Homo sapiens
cagaaaaggatgtaattaaatcagagaaaaagatgaggatcaagaaggtaggaaacatgcaaaaatcatgacaagtagtttttgccattaagaaaaagatgaaactaattaattccacaaaacaagtcaagaataactcgtgaattagagrgagcagaaatggagttgccatcttcaaaggcactcgttttcaggagatgtatacaatttttggaaaaacttgtatttgaaaagttaagtatgcattttgcaattttcagagagtgaaagaatagcaacaaaatacttataaactaggaaaggaaaaatcttgaataagaaaataatctataccaaaaaagccacatttaagtactatgtttattttgttaaattaatttaaattttaaaaatttatcttcactctatgcaataatatttgtgaaattttgactctggtgtgtaaattaacttgtttactgcattgaatcctttgtcatttttgtaatactttgattatctccatctaaatattcaaacatcacctcttaacataaccagtggtacactttccatgatttagatatggtggtctgactagcgttgaaacttgagagaagct

SEQ ID NO: 878720 - DNA, 599 bp, Homo sapiens
ctctctgggccagtacagttcgagacactagaaattcaaaaccacagataatgccctcctgggcctgtaggatgtacttgttaggtggcaggggcgaggcccaaccagtgcgcacaacaatgtcatagccccaggtgagtgtgggaggggaagttgtagaaatattttccagccaaagaaatcagtgaagtaaagataggcaggaggcaggcaaaaaggaggcagaactggcaggttgtgggggcaggagtggccacggatgaggagccaggcttggcaacacaggtgcaggtgtcacgtgtcataggcacaggcgtggagatctgagggcrtagaggggagaagaccgtgcaccgccaatgtcaactgtgtggaagcaaacctgggctacatctaagagtcctgagagcaggggaggagaagggaggaagagacaacagaagtcctgggtgggaagcagaaatatttcctgagtcaatgaaagagccccaagcctccagacctgccagggctcaagcaggcagctccagaggccaagacctataatccagcagttcaggttgattttgccagagtagtgtgaagaggccctgattttc

SEQ ID NO: 878721 - DNA, 559 bp, Homo sapiens
taactatagggaaaactaatgaagaaggagccattaaggaactttcccagaacctgatcttgacaaggtagaatgaggctgctgactaggaaattcagggtagatggatcacttgaggtcagaagttcgagactggcctggccaccatggtgaaaccctgtttctactaacaatacaaaaaattagcggggcacggtggcatgcgactgtaatcccagctactcgggaggctgaggcaggagaattgcttgaacccaggaggcggagcttgcagtgagctgagatcatgccactacactccagcctgggcaacagtgtgagactccatctcaaaataaataaataaattaattaaataaataaataaataaacaatcaaacagaaataaataaataaaataaaarccgaaaaagttacatgcaatttgtttggctctatttttttgaatttcaaaatgttatttcaggaagataagctatgtatataccagagaaagcataaatacagacacataaaagaaattttgttttaccatttgaaataggttattatcatgca

SEQ ID NO: 878722 - DNA, 615 bp, Homo sapiens
cccatcaacgatagactggataaagaaaatgtagtacgtatacaccatggcatagtatgcagccataaaaaggaacaagatcatgtcctttgcagggacatggatgaagctggaaaccatgattctcagcaaactaacacaggaacagaaaaccaaacactgcatgttttgtcttataagtgggagctgaacaatgagaatacatggacacagggaggggaacagcacttcctggggcctgtcaggggagggcagagcgggagagcataaggggaaagagctgattcatgaggggcttaatacctaggcgaygggttgataggtgcaggaaaccacaatggcacatgtttacctaagtaacaaatctgcacatcctgcacatgtaccccaaaacttaaaaaataaataaataaattaaaaaaataaaaaagactgagtgtaaatgttttagaggacattgtcaattatactcccagaaatttattaataacctatatctttgccaattgtgtttttttagcaacaatttctagtcttgagattatcaggtcaaatagtaaacatattaaatatgagaacaattatctaatattcttacaaaagtcttttacaata

SEQ ID NO: 878723 - DNA, 669 bp, Homo sapiens
atccatattatataaaatgcgtattacataatagatattgaaagagtctaaaagttggataaaagttactctggaggactggaaaagtggaagaaagagaagcttggaagggacagaaaaaccagagtgatcaccaataaaatgaatttaaattcttttgtccrggaattatcaaaggactttggtaaccagaatactttaagcgtagcacacacttaaggtagtaggcattgggaaagcttccatgcaacttgtaaattcccagaaggttagaaggaaaaacagcctgaaaaattatactttaagggatcgtgtgaacctaatttataaaatgttttccaaatcacaattatctttggaagtatgactccactttcactttaacacagatttcattaaattttaagttctaaatcaaagaaacaaatgggatctgggaatctttgaacatgtatattcattgaagtgacaaataagaatcagtaaaatggaaaacaagagagataaactaattaaattttggagatcaggcgtggtggttcacacctgtaatcccagtgctgtgggaggattgcttttgcctaggagttcaagactatcctgggcaatagagcaagactctgtctctatgaaaaatacaaaaattagccaggtatgatggcatgccgt

SEQ ID NO: 878724 - DNA, 549 bp, Homo sapiens
tggttgtagatgtatggtgttacttctgaggcctctgttttggttactgtagccttatagtatagtttgaagtcaggtagcgtgatgcctccagctttgttcttttggcttagggttgtctaggccatagggctcttttttgtttccatatgaaatttaaagtagttttttctaattctgtgaagaaagtcaatgatagcttgaatggggatagcattgaatctataaattacttgggrcagtatggccattttcatgatattgattcttccaatccatgagcatggaatgtttttccatttgtttgtgttgtctcttatttccttgagcagtggtttgtagttctccttgaagaggtccttcacatcccttgtaagttgtattcctaggtattttattctctttgtagcagttgtgaatgggagttcactcatgatttggctgtttgtctattattggtgtataggaaagtttgtgatttttgcacagtgattttgtatcctgagactttgctgaagctgcttatcagcttaaggagatttggggctg

SEQ ID NO: 878725 - DNA, 621 bp, Homo sapiens
tttccttcactttcagttcgatccaatttcaattttcaagaatccttgttctattctaacctgaaaaatgacccagattttgtaatatgattttctagccttacatttatcatactgctgacaagccaaaatgtattaaactgtttaagtcaacataatttaagtttaggaactttcctttaccccctctttgttttttacctagctctgggccttgctcattgggtgcagctttttgaatttaatatatgtcttgttatgtgtaaattgtctcctgacatctgccttatgcagtgtggcaccattctgagtagctgacaatctacccaacacaaaacacctgacattgcttgtctgttttgaatgagctcargcacgcttcccaagaagtccatgattctttggaaatgaatagcaagaaactcttaagagggaaacgaaacattttgttgttcttggggaaaaaaatacagaaacacacaataaaaacttctctagtatgaacatgtgcaagtttcacaatcatactattaaattttgcattcgcaggttgttcaaagtgtagtttacctgatcagcctgtgtcagatagcttggtagccaacagcagtcttttgaaaa

SEQ ID NO: 878726 - DNA, 671 bp, Homo sapiens
tttcattaaagcctttccttatcctcacttcacccaacttccaagctggcactccttataaacctcactttgcatagtttttgacaatagttcatattcaaaaaatgacctatacagtagttcctcacttaacgttgttgacaggttcttgtaaactgtgactttaagccaaaccacctataacaaaaccagtgttaccatcagctaattgatataaacaagagctaagttgctatggcatatttcttgtcacaaaaacaccaytgaacttcttaataaggaccaaaacacttctaatattaaatattgaaataaacatgagctgttcatacatttaagaaaatttaatcaaaacaatcaaggtaattatttactgaagtttggtgaatcagtgattgatggcggtcataatggtggtgggttaaaccaagaaataaatgtctgtgaagtgaaaattggaaggagaacctcctaacaccatgtagttcaaaaacaaacaattgcatataggcaggctcactaagggcctgcctcatttattgtcatgcattagtatgtttatcttagacatgaaaatttatttttcgacaataatttgtactcattttctgtcacacttaactccagttcagggttgcaggtggctggagtccattccagtagctcagatg

SEQ ID NO: 878727 - DNA, 621 bp, Homo sapiens
aggagctgacagatgaaacaaaaatgagacattgaggattatatacagaagtaacataaactttaaggtttaagaaaacctttggatgggaaaaataatgttctgaaaagggcaatagagaataagaagaacatgagtataggatgaaagagtttcctaaaatttctagataacaaacttattgcattgacaatgcacaaaaaactgttgcactaatattgtgttttccagtttatcactatatacctttatgtatcttgaattatacatagatctatgtgtttttgttgagggttttatgaattgtatacttttataagtggagtgccatatatcagtaataggatgccaaaaatgcacgttttctcataactcttgaagtttaaataatgtttcatttcctagctaccgtgttggccattgcaatttcctctggtcgcaaatcagactgcactgtcactatggttctgggaagaagactraacccaacagttttgaaaagttgttttgaataagataggcttcaaaaaggtgatcttgcagtatttattatttcaaatcatttgaagagtttttattgtcctgtttattatgctaagttaattgtttctatgataaaga

SEQ ID NO: 878728 - DNA, 633 bp, Homo sapiens
gaataatcgttcccatcaaatttgtgagggtttggtcactattcaattttttttctgcctctttatctctttcctttttacactatcattatgtgtatgttggtgtgcatgatattgcttcacaggacattattattttgttttttactttttttcttcctgtttgcttagactgaataatatcaattaatctgcattcacattcttggattctttcttcccctgatccaatgtggtggtgagcttctctagtaaatttttcatttcagttaatrtatatttctattccagaatatccattttatccttttttataatttccatgtttttattgatattctgtcatcgatgagacatagttattactttcctttagtttgttaagcatggtttttcttagcagtttgaaaatatttaaaatagctgatttaaagtctttgtctataaaatccaatgtcttggctttttcaggaacattttctatttactgtacttttttggtcttgtgtatggacaatactttcttgtttctttgtccatctcttaattttttatgaaaattgcacatcttaaataatagaatgtggcactctaggaaccagattctcttcccttatccaggtttgttgttgt

SEQ ID NO: 878729 - DNA, 616 bp, Homo sapiens
ctgtacgtcaccatcttcaaacaccaaaggtagagaaaaccacaaagatggggaaaaaacagagcagaaaaaccagaaactctaaaaatcagagtgtctctcctcctgcaaaggaacacagctcctcagcagcaatggaacaaagctggatggagaatgactttgaggagttgagagaagaaggcttcagaagaccaactacgccgagctaaaggaggaagttcaaaccaatgacaaagaagttaaaaactttgaaaaaaagttagacgaatggctaactagaataaccaatgcagagaagtccttaaaggacctcatggagctgaaaaccacagcacgagaactacatgacaaatgcacaagcctcagtagccratgcgataaactgaaagaaagggtattagcgatggaagatgaaatgaatgaaatgaagtcagaagagaagtttagagaaaaaagaaaaaaaagaaaccaacaaagcctccaagagataagtgactatgtgaaaagaccaaatctacgtctgactagtgtacctgaaagtgacgggcagaatggaaccaagttggaaaacagtctgcaggatattatccaagagaactttcccaatctagca

SEQ ID NO: 878730 - DNA, 602 bp, Homo sapiens
cagtaggggcagactgacacttcacacgactgggtactcctctgacacaaaacttccagaggaatgatcaggcagcagcatttgcggttcaccaatatctgctgtactgcagccaccgctgctgatactgaggcaaatagggtctggagtggacttccagcaaactccaacagacctgcagctgaaggtcctgaccgttagaaggaaatctaagaaacagaaaggacatccacaccaacaacccatctgtacgtcaccatcttcaaagaccaaaggtagagaaaaccacaaagatggggaaaaaacagagcagaaaaaccagaaactctaaaaatcagagtgcctctcctcctgcaaaggaacgcagctcctcascagcaatggaacaaagctggatggagaatgactttgaggagttgagagaagaaggtttcagaagaccaaactactctgagctaaaggaggaagttcaaaccaatgacaaagaagttaaaaaccttgaaaaaaaattagacgaatggctaactagaataaccgatgcagagaagtccttaaagaacctcatggagctgaaaaccacagcatgagaactacatgacaaa

SEQ ID NO: 878731 - DNA, 566 bp, Homo sapiens
cctgagtagctggggttacaggcaggcactaccatgcctggctaatttctgtatttttagtagagatggttttgccatgttggccaagctggtctagaactcctgatctgaggggatccacccaggtcagcctcccaaagtgctgggattacaggtgtgagccactgcgcccggccagggtgatgtccatttatacagggaggtcaaatggctttagtcagtctactgattcaaatactgatctcttccagaaacaccctcacagacacaccccgaaaaaaatgtttgtccaaatagctgggcacccaataacctagtcatgttgacacrcaatactaaccaccatcacactactcaaatctcaagtgttcaatcaccacctatgactactacttcccatattagacagcacagatctatcacatttctatcatcacacaaaattctattgccagagctagtctagataactatgtttaagtatactaaggtataacattttgagaatttacattttttctgtttacattatttgagtaatatatgccctattattctataatcca

SEQ ID NO: 878732 - DNA, 621 bp, Homo sapiens
tccattttaatatgatattttatttaacccaatacagttgaggcttgaacaacacaggtttgaactgtgtgggtccgcttacacatggcttttgttcagtctctgccacccctgagacagcagggccagcccctcctcttccgcctcctcctcagcccactctacatgaaaacaaagaggatgatgatctttttgatgatccactttcacttaataaatagcaaatatatgttctcttctttatgatttctcgtaataacattttcttttctctagcctcatttactgtaagaatacagcatattcccagctaytcaggaagctgaggcaggagaatcacttgaacctgggaggccgagtttgcagtgagccaaaatcgcaccattgcactccagcctgggcaacaagagcgaaactccaactcaaaaaaaaaaaaaataaaaagaatacagcgtataatgcatgtaacatataaaatatgtgttaatcaactgtctatgttatgggtaagtcttccagtcaacagcaggctattaggagttaagtttctggggaatcaaaggttatacacaggattttgacggcatggtggttggcactcctaactcccacatcgttcag

SEQ ID NO: 878733 - DNA, 607 bp, Homo sapiens
gctgcatggcgcccccctggtccccacccccccgggcgtcgcctcgcgtgggtgggcttcgcgttccctccggggtttcagagccaccacgtgacttccacgaagcgcggggcgccggcggaaagccgcggcaggggtgggatttgggaccccgaggtgcggagagagggcgggcagaggaggaaacgaggcgggggtgggagaaggagggcggggcagacgtgggacgggaaggacggctgccgggactggcgcgcggggacactgggccgacgcgtggagtagcggggagagcgggaagcctgagggggcggggccggcgcgaggccgtgggtgcggcacgaggatgccggcggcgggacagcgcccgtaggcagccccacgggcagggcgcgcgggcggggcggggcgggccgggccagaggagcgcccggcatgtcgcargggctcccggccgccggcagcgtcctgcagaggagcgtcgcggcgcccgggaaccagccgcagccgcagccgcagcagcaggtagagggcgagaggctcagggagggccgtggggtgcggggaccggcgcgccgcggggggcgaggaggtgggtgctggagtt

SEQ ID NO: 878734 - DNA, 607 bp, Homo sapiens
gctgcatggcgcccccctggtccccacccccccgggcgtcgcctcgcgtgggtgggcttcgcgttccctccggggtttcagagccaccacgtgacttccacgaagcgcggggcgccggcggaaagccgcggcaggggtgggatttgggaccccgaggtgcggagagagggcgggcagaggaggaaacgaggcgggggtgggagaaggagggcggggcagacgtgggacgggaaggacggctgccgggactggcgcgcggggacactgggccgacgcgtggagtagcggggagagcgggaagcctgagggggcggggccggcgcgaggccgtgggtgcggcacgaggatgccggcggcgggacagcgcccgtaggcagccccacgggcagggcgcgcgggcggggcggggcgggccgggccagaggagcgcccggcatgtcgcaagggctcccggccgccggcagcrtcctgcagaggagcgtcgcggcgcccgggaaccagccgcagccgcagccgcagcagcaggtagagggcgagaggctcagggagggccgtggggtgcggggaccggcgcgccgcggggggcgaggaggtgggtgctggagtt

SEQ ID NO: 878735 - DNA, 627 bp, Homo sapiens
gaattcagtttgggtgctctaagggggtttcaaagaggtcctctctagccacataggtttgtactgctatctgctatctgttatgttcaaactccccagcttcccctgggagaaaaatggctggatttataaatggacacgttcttagttgaactgcagatccttctaatagcagagcttgataactgaggaggtaattatctgttaccagagactccctttggaagacagcagtcctgccacattatgtgaagtgtagacagttaagttattccgcatgcttagcagcctctggtaccagcaaggctatcactgcaactgcatggaggcaggccagccatcctttggctatcaaatcaagctctttacttaggctgctgggctggacctcaggcctgtgttagaactcccaatgccattccctttctttctgacacataaaggttgaacatcttctatatagggagactaagggatggtaycttaagaaaggcttgttttcattagttaaaagcctttctagcctccagttccaaattagagagtaagttttagtttcctgaatcttttattaggtgatataagagacaagctatttcaccataccgaggtattgatagtctgcag

SEQ ID NO: 878736 - DNA, 660 bp, Homo sapiens
aagaaatcttcccagtggtcaggacatcaaggcactcactttacagctaaagaagtgtggcagtggtctcatgctcatggaattcactggtcttaccatgttcttcatcatcctgaagcagctggattgatagaatggtagaatggccttttgaagtcaaaattaccaygctaactagatgacaataatttgtaggtctaaggcaaagttctccagaaggccgtgtatgctctgaatcagcatccaatatatggtactgtttctcccatagccaggattcatgggtccaggaattaaggggtggaagtggaagtggaaatggcaccactcaccatcacccctagtgatccaatagcaacatttttgcttcctgttgccacgacattaccttctgctggcctagaggtcttagttccagagggaggaatgctgccaccaggagacacaacaacaattgcattaaactggaagttaagattgctacctggaccctttgggctcctacttttaagtcaacaggctaagaagggagttacagttttggctggggtgattgacccagagtatcaagacgaaatcagtctactattccacaatggaggtaaggaagagtatgcatggaacacaggagatccattaggacgtcacttagtattatca

SEQ ID NO: 878737 - DNA, 677 bp, Homo sapiens
tatcaaccaagcctgggacttagcacataccagaattttatcaaacatttgtgattaatttaaaagccaatcactggccgggcgcagtagctcaagcctgtaatcccagcactttgggaggccaaggcgggtggatcatgaggtcaagagatcaagaccatcctggccaacatggtgaaatcccatctctactaaaaatacaaaaattagctgggcatggtggtgcgcgcctatagtcccagctactcaggaggctgaggcaggagaatcacttgaagccaggaggcggaggttgcagtgagctgagattgtgccattgcactccagcctggtgacaaagcgacagagcgagactccgtctcaaaaacaaaaaacaaaaaacaaaagccaatcacatcccagacgaagagaaaygactcttcacaccatcttttggaaatatatggtttactaccccactaccccaaatccaggtctctacacataaagagatggggacaggagctgtatgtggaaagatcacatctcttggcaatcctgtcttcagaagttggaagtcacatctagccacaaagagccaggctgtgttttctgcaaccaaacatatttggcaatttcacagtatatttctgctggtcttcaccttctctccagacctacccttccctaaaagttat

SEQ ID NO: 878738 - DNA, 677 bp, Homo sapiens
tatcaaccaagcctgggacttagcacataccagaattttatcaaacatttgtgattaatttaaaagccaatcactggccgggcgcagtagctcaagcctgtaatcccagcactttgggaggccaaggcgggtggatcatgaggtcaagagatcaagaccatcctggccaacatggtgaaatcccatctctactaaaaatacaaaaattagctgggcatggtggtgcgcgcctatagtcccagctactcaggaggctgaggcaggagaatcacttgaagccaggaggcggaggttgcagtgagctgagattgtgccattgcactccagcctggtgacaaagcgacagagcgagactccgtctcaaaaacaaaaaacaaaaaacaaaagccaatcacatcccagacgaagagaaacgactcttcacaccrtcttttggaaatatatggtttactaccccactaccccaaatccaggtctctacacataaagagatggggacaggagctgtatgtggaaagatcacatctcttggcaatcctgtcttcagaagttggaagtcacatctagccacaaagagccaggctgtgttttctgcaaccaaacatatttggcaatttcacagtatatttctgctggtcttcaccttctctccagacctacccttccctaaaagttat

SEQ ID NO: 878739 - DNA, 579 bp, Homo sapiens
accaggcagaaatgggagaagaccaaggcatggtgcattgggcatgggagcatcagcagccccaaattctgggctccaggtttggcaggaaggcaagggaaagccaggtagaggtgacagagatctggaaatctggatcaaaacaaaagcaggcttatagaaggaatgaggccagatgtggtgactcatgcctgtaaacccagtgctttcgaggtggagacagtaggattgcttggggcaatcagcttgggcaacgtggcgagaccccatctctacaaaaaattgaaaaattagctgggtgtggtggtgcacacatgtattcctagctacttgggagactgaggtgggaggattgcttgagcccaggagttcaaggctacagtaagatatgaccaggctastgccctctagcctgggtgacagagtgagatactgtctcaagaagaaaaagaagaaataggagcagaggaactagggagggaacactattgggtcacttattttctcatgttcccctctctttgtacagtatttaatgtctttttttaaccttagcctcaccctcctcatgacttacaa

SEQ ID NO: 878740 - DNA, 611 bp, Homo sapiens
aattgaaggcacataaaatatgctgtctaaccacaatgtggctaagtaaaaaaaaaatcaataacagacaagtatttgagaaattttaaatatctcaaaattaaacacactcaaaataaccaatgtgtccaagatgaattcaaaagggtcttcagaaaaagcactgagatgatggctgggcatggtggctcacgcctgtaatcccagcactttgggaggccgaggtgggcagatgacctgaggtcaggagcttgagaccagcctggcaaacatggcaaaaccccatctttactaaaaatacaaaaattagccgggcatggtggcagaggccagtaatcccagctactcaggaggctgaggcaggagaatcgcttgaacctgggaggcagaggttgcagtgagccaagatcatgccactgcactccagcctgggtgacagagtgagaytctgtctcaaaaaaaaaaataaaaataaagaaaaaagaaaatgcactgagatgaataaaaatctatacaacacatcaaaatttatgaaacatggataacacagtgcttagagaggaaaattacagctgaaacacttctattaaataagaacaacaaaaaatttt

SEQ ID NO: 878741 - DNA, 611 bp, Homo sapiens
aattgaaggcacataaaatatgctgtctaaccacaatgtggctaagtaaaaaaaaaatcaataacagacaagtatttgagaaattttaaatatctcaaaattaaacacactcaaaataaccaatgtgtccaagatgaattcaaaagggtcttcagaaaaagcactgagatgatggctgggcatggtggctcacgcctgtaatcccagcactttgggaggccgaggtgggcagatgacctgaggtcaggagcttgagaccagcctggcaaacatggcaaaaccccatctttactaaaaatacaaaaattagccgggcatggtggcagaggccagtaatcccagctactcaggaggctgaggcaggagaatcgcttgaacctgggaggcagaggttgcagtgagccaagatcatgccactgcactccagcctgggtgacagagtgagactctgtctcaaaaaaaaaaataaaaawaaagaaaaaagaaaatgcactgagatgaataaaaatctatacaacacatcaaaatttatgaaacatggataacacagtgcttagagaggaaaattacagctgaaacacttctattaaataagaacaacaaaaaatttt

SEQ ID NO: 878742 - DNA, 584 bp, Homo sapiens
ctgtagcttcttcttcagcaattattgttttaccttgcactttcatgttctggagatggcttcttcccttaaacctcatgagttaacctctggaaatgttacttcagccctaattcctcatacccttcagccttcacataatgaagacagttatggacttgctctggattargctttggcttaggagaatgttgttgctggtttgatcttctatccagatgagtaaaactttctccatatcaacactaagtctgttttgctttctcattgagggttcactggagtagcactttaaattccctgaagaactttccctttgcattcataacttgactaactgcttggctcaagatgcctagcttttagctcacctgggcttttgaaatgcttcctcattcaacttagttatttctagcttttgatttaaagtgacagaagtgtggctcttcctttctcttgaacaattagatgttacagaatggttataaattggcttcatcttaatattgctgtgtcttggggaatagggaggctcaaggcgagagacagacagagagatgggggaaaatggtccaccactggag

SEQ ID NO: 878743 - DNA, 627 bp, Homo sapiens
ttaaagaaaagaattttcaacccaggatttcatattgcaccaaactaagcttcataagcgaaggagaaataaaatcccttacagacaagcaaatgctaagagattttgtcaccaccaggtctcccttacaagagctcctgaagaaagcactaaatatggaaaggaaaaactggtaccagtcagtgcaaaaacacaccaaattgtaaagatcatcgacactatgaagaaactgcatcaactaatgggcaaaataaccagytagcatcataatgacaggatcaaattcacacgtaacaatattaaccttaaatgtaaatgggctaaatgccccaacttaaaaacacagactggcaaattggataaagagtcaagacccattggtgtgctttaatcaggagacccatctcaagtgcaaagacacacatagaatcaaaataaaggaatggaggaatatttaccaagcaaatggaaggcaaaaaaaaaaaaaaaaaaaaaaaaagcaggggttgcagttctagtctctgataaaacagactttaaacaaacaaaaatcaaaaacaaaaaagacaggcattacataatggcaaaggggtcaatgcaacaagtagagctaactatcctaaatat

SEQ ID NO: 878744 - DNA, 627 bp, Homo sapiens
ttaaagaaaagaattttcaacccaggatttcatattgcaccaaactaagcttcataagcgaaggagaaataaaatcccttacagacaagcaaatgctaagagattttgtcaccaccaggtctcccttacaagagctcctgaagaaagcactaaatatggaaaggaaaaactggtaccagtcagtgcaaaaacacaccaaattgtaaagatcatcgacactatgaagaaactgcatcaactaatgggcaaaataaccagctagcatcataatgacaggatcaaattcacacgtaacaatattaaccttaaatgtaaatgggctaaatgccccaacttaaaaacacwgactggcaaattggataaagagtcaagacccattggtgtgctttaatcaggagacccatctcaagtgcaaagacacacatagaatcaaaataaaggaatggaggaatatttaccaagcaaatggaaggcaaaaaaaaaaaaaaaaaaaaaaaaagcaggggttgcagttctagtctctgataaaacagactttaaacaaacaaaaatcaaaaacaaaaaagacaggcattacataatggcaaaggggtcaatgcaacaagtagagctaactatcctaaatat

SEQ ID NO: 878745 - DNA, 627 bp, Homo sapiens
ttaaagaaaagaattttcaacccaggatttcatattgcaccaaactaagcttcataagcgaaggagaaataaaatcccttacagacaagcaaatgctaagagattttgtcaccaccaggtctcccttacaagagctcctgaagaaagcactaaatatggaaaggaaaaactggtaccagtcagtgcaaaaacacaccaaattgtaaagatcatcgacactatgaagaaactgcatcaactaatgggcaaaataaccagctagcatcataatgacaggatcaaattcacacgtaacaatattaaccttaaatgtaaatgggctaaatgccccaacttaaaaacacagactggcaaattggataaagagtcaagacccattggtgtgctttaatcaggagacccatctcamgtgcaaagacacacatagaatcaaaataaaggaatggaggaatatttaccaagcaaatggaaggcaaaaaaaaaaaaaaaaaaaaaaaaagcaggggttgcagttctagtctctgataaaacagactttaaacaaacaaaaatcaaaaacaaaaaagacaggcattacataatggcaaaggggtcaatgcaacaagtagagctaactatcctaaatat

SEQ ID NO: 878746 - DNA, 577 bp, Homo sapiens
ctcagctgaatcaaatggctccatttccccagtggctgaagctgctgggtaaagaaaacagaatcagttgctccctttcatgagctgtggacaagaaaggctctgaaatgcgaagcttaaacttgttttacagtctaggaacaaggtgtaagtacacctctgctggcttcccaagagctagcttccaaagcaaggtaattgattgcagcatcccacaaagtaagtaggcaacccatctttgacctgctggcatggcaaaagcctgacacgcatgcatgggcgctgtaatargaaagataatgcagccctggtgtcccaaaggttgaggagctcctagcaaagggttagagtggctaaaagggccctggagatgagccggtcccatgttcccccaagagagattcatggagagttgcctctccatctcgagttcattcgtatttggtgggtcccagggaaggagttggcagtagaggctggaacagcttgaaaaacaaagtctgttcatgttttaggaacattatcattggcttgaattccccaattggtatttggaaccagtggggaaacattcact

SEQ ID NO: 878747 - DNA, 577 bp, Homo sapiens
ctcagctgaatcaaatggctccatttccccagtggctgaagctgctgggtaaagaaaacagaatcagttgctccctttcatgagctgtggacaagaaaggctctgaaatgcgaagcttaaacttgttttacagtctaggaacaaggtgtaagtacacctctgctggcttcccaagagctagcttccaaagcaaggtaattgattgcagcatcccacaaagtaagtaggcaacccatctttgacctgctggcatggcaaaagcctgacacgcatgcatgggcgctgtaataagaaagataatgcagccctggtgtcccaaaggttgaggagctcctagcaaagggttagagtggctaaaagggccctggagatgagccggtcccatgttcccccaagagagattcatggagagytgcctctccatctcgagttcattcgtatttggtgggtcccagggaaggagttggcagtagaggctggaacagcttgaaaaacaaagtctgttcatgttttaggaacattatcattggcttgaattccccaattggtatttggaaccagtggggaaacattcact

SEQ ID NO: 878748 - DNA, 681 bp, Homo sapiens
acaagtctgtaaaataaccagctgacagcatgacgacaggatccaatccacacataccattactaaccttaaatggaaatgggctaaatgctctgattgaaagacgcagggggacaagatggataaagaaccaagacccatttgagtatgccgtctccaagaaacccatctcacatgcggtgccatacataggctcaaaataaaggaatggagaaaaatctttcaagcaaacggaaaacagaaaaaagcaggtgttgcactccyagtttcgacaaaacgtatataccaataaagataaaaaaaagacagagaaagacatacaaaggtggtcctgacctttgataaatctcattattgcttgataccaacctgggctatctttattgcccaaatcaacaggataatttgctgaggttgtggagattctcccctgcagaggttccctgatctcccaaaatctggttgagaactaaggttgattttgctgtacaactccttttctgaagttttactcatttccaacaaagaaggcaagttttcctgcttccatgatgatggagagcaggcacctcctttcctgagtttcagcttgcttctgacggggaaggtgagtgtaagttttttccagcttctaagatggcagagaacgaccaccagcctgagccttatttccaggtaagt

SEQ ID NO: 878749 - DNA, 681 bp, Homo sapiens
acaagtctgtaaaataaccagctgacagcatgacgacaggatccaatccacacataccattactaaccttaaatggaaatgggctaaatgctctgattgaaagacgcagggggacaagatggataaagaaccaagacccatttgagtatgccgtctccaagaaacccatctcacatgcggtgccatacataggctcaaaataaaggaatggagaaaaatctttcaagcaaacggaaaacagaaaaaagcaggtgttgcactcccagtttygacaaaacgtatataccaataaagataaaaaaaagacagagaaagacatacaaaggtggtcctgacctttgataaatctcattattgcttgataccaacctgggctatctttattgcccaaatcaacaggataatttgctgaggttgtggagattctcccctgcagaggttccctgatctcccaaaatctggttgagaactaaggttgattttgctgtacaactccttttctgaagttttactcatttccaacaaagaaggcaagttttcctgcttccatgatgatggagagcaggcacctcctttcctgagtttcagcttgcttctgacggggaaggtgagtgtaagttttttccagcttctaagatggcagagaacgaccaccagcctgagccttatttccaggtaagt

SEQ ID NO: 878750 - DNA, 608 bp, Homo sapiens
atctacaaagaacaaacttacaagaaaaaaaacaaacaaccccatcaaaaagtggacaaaggatatgaacagacacttaccaaagaagacatttatacagccaacgaacatgtgaagcaaagcacatcatcactggtcattagagaaatagaaatcaaaaccacaatgagatacaatctcacagcacttagaatgtctatcgttaaaaaatcaggkaacaacagatgctggacaggatgtggagaaataggaatgctcttacacagttggtgtgaatataaattagttcaaccattgtggaagacagtgtgacaattcctcaaggatctacaactagaaatatcatttgacccagcaatcccattactgggtatatacccccaaaattataaatcattctaatataaagacacatgcacctgtctgtttatggcggcacttttcacaaaaccaacgacttggaaccaacccaaatgcccaccaatgatagactggataaagtaaatgtggcatatatacaccatggaatactatgtagccataaaaaaggatgaatccacgtcctttgctgggacatgaataaagctggaaagcatcattctcagcaa

SEQ ID NO: 878751 - DNA, 606 bp, Homo sapiens
atcactggtcattagagaaatagaaatcaaaaccacaatgagatacaatctcacagcacttagaatgtctatcgttaaaaaatcagggaacaacagatgctggacaggatgtggagaaataggaatgctcttacacagttggtgtgaatataaattagttcaaccattgtggaagacagtgtgacaattcctcaaggatctacaactagaaatatcatttgacccagcaatcccattactgggtatatacccccaaaattataaatcattctaatataaagacacatgcacctgtctgtttatggcggcacttttcacaaaaccaacgacttggaaccaacccaaatgcccaccaatgatagactggataaagtaaatgtggcatatatamaccatggaatactatgtagccataaaaaaggatgaatccacgtcctttgctgggacatgaataaagctggaaagcatcattctcagcaaactaacacaagaacagaaaaccaaacaccacatgttctcactcataacttggagttgaacaatgggaacacatggacacaggaaggggaacatcacacaccagggcctgtcagcgtggggggctag

SEQ ID NO: 878752 - DNA, 646 bp, Homo sapiens
gcaaagctcccttcatggaacacacggctgggaggacctcgccattctggaaaggcaaggctcagtgggggagatgtgaatgctcttccctgatttgggggcttggtcctagggagccaaggctgtgcatcacgaacggaggccttgggggaaggtgggcagtggagtagcagcttggactcagtgccatcctgcagaacttctttgatctcagctttcccttggtaacataggggtaataattgtccttccccattaggcaaagaagcaagagaacagtgttcctgaaagaaaaaaggctgtgcagaaaactgtagcatacttgtcaagtctgtgcactttaggtcaggtatggttcttgcctcttaagaaccgtgtcaacctggataagttgcttaacttttggaaccttgtttttgtcattgtaaaagggagggagcatttgaccatgagaatacaaggacagtgatcatggacggaggccatggtaagcytcttccccagattcccctaccctagtgctttagcccgggacctgtcatgttataggctctggataaatcatggctgaattcactgaaaaaaatagtcaccattcactgaatacctactacatgccatgtagtttataaaggaaagaggttta

SEQ ID NO: 878753 - DNA, 621 bp, Homo sapiens
tggagctgttcctgtttggccatcttggaacctcctcctgaaaatttatactttttttaaaaaactataccttctgaaaagggagacttctttactgattttatcacctcatttctggaatcttttatttatactgtctttttacattctgcatgactttcttgctttttataatttggcttaaaatattgcattctaattttcatctgttttggggggttatagttttggtggtgtgtttccataatctgtgggaattttgtaccagtgcctattctctcttttttgacaataactacgtatgtttataatcttttctgttkctcatttgtctgcagattagttttctggaaaaaaaggtagatggtatctggatagctgtggatcttttatcttcatgaagtgttcaaaaatgtaatctcgttctttttgggatctcttgattctgtttttctctgttgcttttacttggctttctcttttcttttgcttctactgcctctgtcctgtttaatttggaatctattctcagctgtttctactcactgtagaaatgtattctggaatatgttagattctagttttcataagacttggtctcttccctttctgttcccatgc

SEQ ID NO: 878754 - DNA, 571 bp, Homo sapiens
ataatatgatgtggcaaatctgaaaatcagattacaccctccccaaggaggagggaatgttgttgttacttagtgttttttctgaaagaattctacaaaatctgtattctttattatatgtggcaactgaagtctctgcttgattagtttgttagcttaatggtcagttaaaggattggatagatattttcttaaacacttgaaataagtgttttcctatcttggggaagggccttgtgtatatattggggcataccttcaaccctcagcaaggccttcttacttgtgcagagcctccaagtcagcccacagtgacagctcaggtctttctcargtctcttctgactgtgtgcacagacatgggcatgtgcacaactctgtgcatcatgttaccttctggattccaagaaatatgttggagcttttcaatacctttgtgggtatctacttccccaggctttacttttaagcattttggttagcctactgtttgccccaactgttgtccattgcctcatacagccagaaagttattcaattgcctctaattgtttttggaaaatgctcctgg

SEQ ID NO: 878755 - DNA, 564 bp, Homo sapiens
cctctctcactgctcctattcagcataatattggaagtactagccagagcaatgggacaacaaagaaagggcatccaacagaaagagaggaagtcagactatctctgtttgcagatgacatgatcctatatctagaaaacctcatagccttggcccaaaagcttcttcagctgataaacaatttcagcaaagtttcacaatacaaaattaatgtacaaaaatccgtagcattcctataaaccaacagcraaactgatagccaaatcagaaaagcatcccattcacaattgcacaaaaagaataagatagctagaaatacagctaaccagggaggtgaaagttctctgtaatgggaattacaaaccactactcaaagaaatcagagatgacacaaacaaatggaaaaacattctataatcatggataagaagaaccaatgtcattaaaatggccatactgcgtaaggcaatttacacattcaatgctattcctatcaaacaacaaatgccatccttcacagactagaaagaactatttaaaatgcatatggtaaccaaataagag

SEQ ID NO: 878756 - DNA, 564 bp, Homo sapiens
cctctctcactgctcctattcagcataatattggaagtactagccagagcaatgggacaacaaagaaagggcatccaacagaaagagaggaagtcagactatctctgtttgcagatgacatgatcctatatctagaaaacctcatagccttggcccaaaagcttcttcagctgataaacaatttcagcaaagtttcacaatacaaaattaatgtacaaaaatccgtagcattcctataaaccaacagcgaaactgatagccaaatcagaaaagcatcccattcacaatwgcacaaaaagaataagatagctagaaatacagctaaccagggaggtgaaagttctctgtaatgggaattacaaaccactactcaaagaaatcagagatgacacaaacaaatggaaaaacattctataatcatggataagaagaaccaatgtcattaaaatggccatactgcgtaaggcaatttacacattcaatgctattcctatcaaacaacaaatgccatccttcacagactagaaagaactatttaaaatgcatatggtaaccaaataagag

SEQ ID NO: 878757 - DNA, 564 bp, Homo sapiens
cctctctcactgctcctattcagcataatattggaagtactagccagagcaatgggacaacaaagaaagggcatccaacagaaagagaggaagtcagactatctctgtttgcagatgacatgatcctatatctagaaaacctcatagccttggcccaaaagcttcttcagctgataaacaatttcagcaaagtttcacaatacaaaattaatgtacaaaaatccgtagcattcctataaaccaacagcgaaactgatagccaaatcagaaaagcatcccattcacaattgcacaaaaagaataagatagctagaaatacagctaaccagggaggtgaaagttctctrtaatgggaattacaaaccactactcaaagaaatcagagatgacacaaacaaatggaaaaacattctataatcatggataagaagaaccaatgtcattaaaatggccatactgcgtaaggcaatttacacattcaatgctattcctatcaaacaacaaatgccatccttcacagactagaaagaactatttaaaatgcatatggtaaccaaataagag

SEQ ID NO: 878758 - DNA, 640 bp, Homo sapiens
atgcttggtacacttatttaaagcccttcattctgaggaactgaattataagataattccttggtaaggaagaaagcaagagtgtcttaactggcataaggaatgatcatcacaaccagtacaaaagaactttaacaatcaatcagccctgtaccagttcagccactgccagaggatacatttttctgtgctccatttcagacttggttaagtctgacctgcagctacaggtcagaaccaccagaggtcagatttttacaccccacccgaatagatgctaagcttgagtctgagacagacaatggtgtttcttttcctagcaccttttcctcttcaatttacctttattaccaccaaatacaatgtaagaatattawatataaatataagagacgcatagtttactttcctatatggaaatggcatcatgaggaaaaagtaaggaaaaggaggaaattaagaagacaattattttaagacgaaagctggtattgaggaaggacaaaaaccaaacagccttcaaatcaatttaaaaagacaaagagaaaccaaaaaaaaaaaaaaaaaaccctatatgagcattctgattatcaaaattgtattaagatgtttgtttttattcataagaataaagctgatc

SEQ ID NO: 878759 - DNA, 590 bp, Homo sapiens
acatgtacatgatcactcccaccatctaagtcatcaatgttgcccccaggtgacatctcagagtcattccctaaatcacaaagctaaccggatgaatcacagatttgtaactgcaatgaacaaggactcttcagtacctctgaagatcaaatacctttgaggggatttatgtacatgattttcttatcctgcacacatatatgaattgtccttactgaatcaaaggcactgaaatgataaacaaaacactcagatttgtttggggyccctggccagcaataaaaatgctccaaactgagatactctgtttaccaatcgacatattatgaaacctacacaagaacttttctaaaacttctgaagtttgtttaaaaccttttagttggatatttctgagagactacaaagaattactacatatgtatcaaaatcataaagaccatcgcagtctgaaacagaaaacaatagaaaagtcttatcctgggattcaggggatgaaataaaaaacaagaaccccttgcactagcatctgtctgtctcaatctctgtctttttttcctccctcctcttggtctgcctgatcctctaac

SEQ ID NO: 878760 - DNA, 590 bp, Homo sapiens
acatgtacatgatcactcccaccatctaagtcatcaatgttgcccccaggtgacatctcagagtcattccctaaatcacaaagctaaccggatgaatcacagatttgtaactgcaatgaacaaggactcttcagtacctctgaagatcaaatacctttgaggggatttatgtacatgattttcttatcctgcacacatatatgaattgtccttactgaatcaaaggcactgaaatgataaacaaaacactcagatttgtttggggcccctggccagcaataaaaatgctccaaactgagatactctgtttaccaatcgacatattatgaaacctacacaagaacttttctaaaacttctgaagtttgtttaaaaccttttagttggatatttctgagagactacaaagaattactacatatgtatcaaaatcataaagaccatcgcagtctraaacagaaaacaatagaaaagtcttatcctgggattcaggggatgaaataaaaaacaagaaccccttgcactagcatctgtctgtctcaatctctgtctttttttcctccctcctcttggtctgcctgatcctctaac

SEQ ID NO: 878761 - DNA, 426 bp, Homo sapiens
gacttacagctttaggtatttccattttaattttatcccatgttaaatgaagttactgtgttatttttgatgataaaatatatgcttattttagaggatgcaaaccgtggaaaaagagaaagatgaataaaatcaacaataatcttacctcatgaagacacaaatggctaatrtttggttttattttctttcaggaatttttcctgaatatttttgctcacagataagatcaaagaattacaatatgcacaaattaagttcctactttgcttcttaacaacataaaatttctctctgttgaaattttttggatcagagatgggagattacaccaaaaaaacaggaaaacccactcaattgggaattgagagccatgggtttcagtcaccatagtattcttgtctgggagtgcaagtgtggttactg

SEQ ID NO: 878762 - DNA, 599 bp, Homo sapiens
tcagaatccttgtctgctagaatcagatggtgtctttgagattgtccattcatccctagagccacaaatgctggctgagctcttactgtctacagaagctgtgcttggcacttgggggcatatggacgtacttggaaatggatccaagcccacagtttagtaaaggagataaaactataataaaaggtagaaagctatcattgtcaaaagagaggtacaggagcctgagtttgagtgtctgaatgtggcagacaccacagtgaccttcccaggcattcttctcttcctattgacagaactcagaatcctgatcctactcagggaggaagttgatatctctagatttcagagaaggaagtcccagtcttggggtgggctttagatccagttctggatgctggaaatgtctgacagggcttttgggaaaggcattactgcagccktccctgcttcctggctttgaaagttgcacaataatggctggaggcacagcagccacattgtaattaaaaggcaatactcttaaagaccaataagcaacactatgaggacaatggaggagaaggaagaaaagatttgcctggtctttaatgattcca

SEQ ID NO: 878763 - DNA, 581 bp, Homo sapiens
cccctgcaattattttttttttctttaaataaattatgtggctgaagcagctgcccacctcggggtgagtgatgataacagcagagaacaaatgtggcaatttggagcatggagttcctaaactgacctttaaaactgatggcaattatcagtctaaaaggtttcgcaacagtccgtctcctgaaggattcagagcatgttactcctgcggatgcttggttaggagctgacggagactgcccagccctgccctgccctagactcaacaaagattccctggctggtgtaagaggcaggagggaatgtcccccagtggtaccccaccaggccctgctcccctctttgtggacagaaggcctcagggcccctccacagctccctcggggtccrtgaacactgctctcagcaacccgacccacacccctgcaccaagtcagcccccaggcccggggctctccctgggcaggaggagggagggagaaaccaggatgtggctgagaaaatctggacaggattgagtttctgtcatcagaaggacccccaggatggaaacaagccaagttgttttctgcaccccaagc

SEQ ID NO: 878764 - DNA, 436 bp, Homo sapiens
caatcaacaggatatgaaaagaaaagtaagagggtgccaaaaatgactccaagatttctgcctggtggaaacattaaagagtggcagggcatggtggctcacgcctgtaatcccaggagttcaaaaccagcctggccaacatggcgaaaccctgaatctaccaaaaatacaaaagttagcttggccgcagtggtgcacacctgtaatctcagctactttggaggctaaggcaagagaatcgcttgagcctgggaggaggaggttgcagtgagcctagatcgcaccactgcmttctggtctgggtgacagagtgagaccctatctcaaaaaaaaaaaattaaaaaattaaaaaccattaaagagtgtatatcaagatgtcagttggataagcagagaggggctcagataggaaacctgggctggaattataaatcta

SEQ ID NO: 878765 - DNA, 645 bp, Homo sapiens
taaatgtctgttgtttaagcatcccagtctatagcatcttgtgattgccccccaagcagactaagacactgccattgttcctttgtccctgtgtgatcctagaagctccctacagctcaccccagttagagatttcatctgttccttggaccagtggccccagccactaccatagcaactatagctgcgccccgactgtgcaacgccacttgcagcctgtgtttagacatcaggactcagcctggtctgctaaatatctggaagtgccactttctcactcaaattcttcctcttgccaagcagtctgatctgacaggggtcttgagcaagaaagaaagatagaacttgtcatctttgcagtacataacattctatagagtaattcataacttgcccctttcccacttctcttacmtacatccttttgtgaccactaacattccaaaatcactgaggaaatgaaataacatattgtgaaatgcaatataaaattattctcatgatcaaaattaaatatcttgttgcaacctggaaagaaaaataacacagaacagaatagccctaggaggctgcctccaaactggaggagggcaccggctgattttcaggctaagacatcaccaaaggtgacaagaactgaccgtc

SEQ ID NO: 878766 - DNA, 645 bp, Homo sapiens
ctgcgctaatctttattatatttcttctgcttactttggatttaattttctcttctttttctagtttcctaaagtgtaaacttagactattgatttcagatattttttcctctttttcatatgcattaaagttcccctttaatgcatatgaaagttttccagcactccacaaattaagttgtattttcattttaattagttcaattttttttttggaatttcccttaagagtttttctttgacccatttgtgacttaaaagtatgttgtttaatctccaagtattggggaatttttcagctatctttctgtattaatttctaatttaaatccacygtggtatgaaagcagacattgtatgatttatattcttttaaattcgttaaggtgtgttttatggctcagaatgtggtacatcttggtgaatattccatatgagcttgagaagaatgtgtaatatgctgttgttagatgaagtagtctgtagatgtcaattatatccagccaagtgatagtgctattgagttcaactatgtccttcctgattttctgcctgctgaatctgttcatctctgatagaagaatgttaaaatctccaaccataatagtggattcatctatttctccaagcagttttattggtttt

SEQ ID NO: 878767 - DNA, 535 bp, Homo sapiens
ctttgcctgccaccatccatgtaagatgagacttgctcctgcttgccttctggtatgattgtgaggcctccccagccatgtgaaactgtaagtccattaaacctctttttctttccattctttggtatgtctttgtcagcagtgtgaaaatggactaatacagtaaaatggtatcactasagtggggtgttgatgaaaagatacccaaaaatgtggaagtgactttagaactgtgtaatgggcagaggttgaaaaagtttagagggctcagaagaagataggaaaatgtggaaaagttgggaactccctggagacttgttgagtggctttgaccaaaatgctgataatgatgtggacaatgaaatccagcctgaggtggtctcagatggagaggaggaacttgttggaaagtggagcaaaagtgactcttgttatgttttattaaagaacctggtggcattttgcccttgccctagagatttgtggaactttgaacttgagagagatgatttagagtatctggcagaagcaattt

SEQ ID NO: 878768 - DNA, 560 bp, Homo sapiens
attggggaagtgataaatgtccatgaaatcttcacaatttatgttcagagattgcagtaaagacaggcataagaaattataaaagtattaatttggggaactaataaatgtccatgaaatcttcacaatttatgttcttctgccaaggcttcagccggtccgtccatttggggtccctgacgtcccgtaacagctgaatagtattcattattttttatggctcagtagtactaatggctgaattatatatatgtaccacattttctttattcatttatccattgatggacacttaggttgcttccaaatcttagctactataaacagtgctgcaacaaacataggagtgtagctatctctttgatatackgatttccttacttttgggtaaatatccagcagtgtgattgctagatcatatggtagctcaatttttagttttttgaggaacctctaaactgttcttcatagtggttgtattaatctacattccaaccaacagtgtacaagggtttccttttctccacatccttgccagcatttgttattgcctgtctttt

SEQ ID NO: 878769 - DNA, 620 bp, Homo sapiens
atgaccattttggcaatattagttttccctatccatgagcatggaatgtttctcactgtttgcttcatctctgatttctttgaacagtgttttgtaattctcatagcagagctctttgactcccaggttagctacatttatagatattttatacatttttgtctgttgtgagattgtgttctagatttggctctcagcttggatgttgttggtgtataggaatgctgctgatttttgtacattgattttgtatycagaaactttactgaagttgtttatcagatcaaggagcttttgggcagagactataggcttttccaggtacagaaactgaatcagtagcaaacaaggatagtttgactacctttatccctatttggatgcctttcatttctttctcttgcctgattgctctggccaggacttccagtactatgttaaataagagtggtgaaagagggcatccttgtcttgttcaggttttcaaggggaatgcttccagcttttacccattcagtgtgatgttggcagtgagttcattgtagataggtcttattattttgaaggatgttccttcagtgctagattgttgagagtttttaacatgaatggctgttgaa

SEQ ID NO: 878770 - DNA, 620 bp, Homo sapiens
atgaccattttggcaatattagttttccctatccatgagcatggaatgtttctcactgtttgcttcatctctgatttctttgaacagtgttttgtaattctcatagcagagctctttgactcccaggttagctacatttatagatattttatacatttttgtctgttgtgagattgtgttctagatttggctctcagcttggatgttgttggtgtataggaatgctgctgatttttgtacattgattttgtattcagaaactttactgaagttgtttatcagatcaaggagcttttgggcagagactataggcttttccaggtacagaaactgaatcagtagcaaacaaggrtagtttgactacctttatccctatttggatgcctttcatttctttctcttgcctgattgctctggccaggacttccagtactatgttaaataagagtggtgaaagagggcatccttgtcttgttcaggttttcaaggggaatgcttccagcttttacccattcagtgtgatgttggcagtgagttcattgtagataggtcttattattttgaaggatgttccttcagtgctagattgttgagagtttttaacatgaatggctgttgaa

SEQ ID NO: 878771 - DNA, 657 bp, Homo sapiens
agtttttaacatgaatggctgttgaattttatcaaaagcctttcctgcatctattaagatgatcatgtgctttttgtttttagtttttgtttatgtaatgaatcatatttattgatttgtatttgttgaaacaaccttgcatcccagggataaagccgacttgatcatggcggattagctttttgaygtactgctgggttttacttgctagaagtttgttgagaatttttgcatctatgttcatcaaagttcttggcctaaatttttctttttttgttatgactctgatagattttcgtatcaggatgatgctagtctcatagaacaagttagggaagagtacttcctcctcaatttttttgaatagtttcagtaggagtggtatcagctcttctttatacatttggtagaattccactgtagtcgatcaggcgctggactttttttgtttggcaggctttttgctactgattcaatttctgaacttgttattggtctgttcagggattcaatttctttctgattcagtcttgggaggttgtatgtgttcaggtaacttatctatttcttctgttttctagcttgtgtgcatggaagtttttgtaatagcctctgaaggttttgttgttgttgttgttgttgttatttctgtggtgt

SEQ ID NO: 878772 - DNA, 657 bp, Homo sapiens
agtttttaacatgaatggctgttgaattttatcaaaagcctttcctgcatctattaagatgatcatgtgctttttgtttttagtttttgtttatgtaatgaatcatatttattgatttgtatttgttgaaacaaccttgcatcccagggataaagccgacttgatcatggcggattagctttttgacgtactgctgggttttacttgctagaagtttgttgagaatttttgcatctatgttcatcaaagttcttggcctaaatttttctttttttgttatgactctgatagattttcgtatcaggatgatgctagtctcatagaacaagttagggaagagtacttcctcctcaatttttttgaatagtttcagtaggagtggtatcagctcttctttatacatktggtagaattccactgtagtcgatcaggcgctggactttttttgtttggcaggctttttgctactgattcaatttctgaacttgttattggtctgttcagggattcaatttctttctgattcagtcttgggaggttgtatgtgttcaggtaacttatctatttcttctgttttctagcttgtgtgcatggaagtttttgtaatagcctctgaaggttttgttgttgttgttgttgttgttatttctgtggtgt

SEQ ID NO: 878773 - DNA, 646 bp, Homo sapiens
tcgctggttgttggaatacaagcctcagtttcttacttgctgttgactgaaggcagtcttcagttccttggcacatggcctttccagcatggtagtttgcttacttcatcaaggtttgcaagccaagacggcaatagaaagaacacagcaagatagaagtcattcttttgtaatctaatcatggaaataacatctcatctcttttgccttattctgttcattagaggcaagttacttggstggggggtcatcccacactgaatgggaggtgacaacacactagtgtaaatattaggaagtggggatcattgcgggtcatcttgaaagccgcctaacacgtggatcattccctacaccctaaacatatcctggacttaactccctctcagttatctcaggatttccttctttctataaatccactcccaatctcagctcaaccttcaacacacaattcagttaagatctccttttgtgaattttattatgaatccttcagttagatgggattgtcccaatgtctaagttccccaaacatttggcacacatcttaggtcatatgtcatctcctgctttttgttatagtattcatagccttcagatgtattcattgatcggggcctggaagttcagaatggggtcttac

SEQ ID NO: 878774 - DNA, 646 bp, Homo sapiens
tcgctggttgttggaatacaagcctcagtttcttacttgctgttgactgaaggcagtcttcagttccttggcacatggcctttccagcatggtagtttgcttacttcatcaaggtttgcaagccaagacggcaatagaaagaacacagcaagatagaagtcattcttttgtaatctaatcatggaaataacatctcatctcttttgccttattctgttcattagaggcaagttacttgggkggggggtcatcccacactgaatgggaggtgacaacacactagtgtaaatattaggaagtggggatcattgcgggtcatcttgaaagccgcctaacacgtggatcattccctacaccctaaacatatcctggacttaactccctctcagttatctcaggatttccttctttctataaatccactcccaatctcagctcaaccttcaacacacaattcagttaagatctccttttgtgaattttattatgaatccttcagttagatgggattgtcccaatgtctaagttccccaaacatttggcacacatcttaggtcatatgtcatctcctgctttttgttatagtattcatagccttcagatgtattcattgatcggggcctggaagttcagaatggggtcttac

SEQ ID NO: 878775 - DNA, 646 bp, Homo sapiens
tcgctggttgttggaatacaagcctcagtttcttacttgctgttgactgaaggcagtcttcagttccttggcacatggcctttccagcatggtagtttgcttacttcatcaaggtttgcaagccaagacggcaatagaaagaacacagcaagatagaagtcattcttttgtaatctaatcatggaaataacatctcatctcttttgccttattctgttcattagaggcaagttacttgggtggggggtcatcccacactgaatgggaggtgacaacacactagtgtaaatattaggaagtggggatcattgcgggtcatcttgaaagccgcctaacacgtggatcattccctacaccctaaacatatcctggacttaactccctctcagttatctcagratttccttctttctataaatccactcccaatctcagctcaaccttcaacacacaattcagttaagatctccttttgtgaattttattatgaatccttcagttagatgggattgtcccaatgtctaagttccccaaacatttggcacacatcttaggtcatatgtcatctcctgctttttgttatagtattcatagccttcagatgtattcattgatcggggcctggaagttcagaatggggtcttac

SEQ ID NO: 878776 - DNA, 573 bp, Homo sapiens
tggggaaagattccctatttaataaatggtgttgggaaaactggctagccatatgcagaaagataaaattggatcccttcctcacaccttaaacaaaaattaactcaagatggattaaagacttaaatataagacctaaaaccatgaaaaccctagaagaaaacctacacaataccattcaggacataagcatgggcaaatatttcatgactaaaacaccaaaagcaatgacaacagaagccaaaattgccaaatgggatctaattaaaccaaggrgcttctgcacagcaaaataagctatcatcagagtgaaagggcaacctacagatatgggaggaaatttttgcaatctatccatctgacaaagggctaatatccagaatctacaaagaacttaaacaaatttacaagaaaaaaaaacctcatcaaaaagtgggcaaaggatatgaacagacacttctcaaaggaagacatttatgcagtcaagaaacatgaagaaaatctcatcatcactggtcattacagaaatgcaaatcaaaaccacaatgagataccatctcactccagttagaa

SEQ ID NO: 878777 - DNA, 681 bp, Homo sapiens
aaatactgagaaatgtcaaaacgtaacaaagaacagggtgactcatttgattaatgtccagggaagttgttaagtatccagatcacagtctaggcagtgagggaatctggaaacaaatcaagcaatctcaacattaagggccaggaaccccagacaattcagggcaataactctacagggcacctaragtaaatgtcctatatttgtctctctagcccagcactgtctaatagaaacataatgtgagtcacttatatcagttttaatttactatggtcacattaaaaagtcaaaattaggctgggcgctgtggctcttgcctgtaatcccagcactttgggaggctgaggcaggaagatcacttggggtcagaagttcaagaccagcctggccaatatgcaaaacctcgtctctacaaaaaatacaaaaattagctggacgtgatggcacccgcctgttatcccagctactcaggaggctaaggcatgagaatcacctgaacccaggtggcagagtttgcagtgagttgagattgcgccactgcactccagcctgggcaacagagcaagactctgtctcaaaaaaaaaaaaaagtcaaaattaaaaagtgaaattaattaaactactatattttatctaacccaataaattcaatgtatcacctatctgtatattcaatac

SEQ ID NO: 878778 - DNA, 687 bp, Homo sapiens
ttattaattcatcaggaagcacatttgataaaaaatgagtgtctgatctataacagtttaagaggtattagcatctccatggatgtagcatatttatcctgttaaagggctactaggaaaactaattatggctgtggaaatcaggatagtggtaactaagtggaagcattggaaggaggcacaaggcgggtttctggggtgctgcttatgctctgtttcttgatctgggtgctggttacatgaatgtgctcaagctatgaaaaaaaattragctatacccttattatttatacacttttctgtatgtatgattacttcaataaaaataaacaataattataacgattatgataatcaaaatatcagtcttgtgttggttcaaaacacgagtttatgtcttcagctagatatcagtttatagtcttcacaaatactataaagatcagtaagtctatgtctagactataaagtcagtataggtatgtggaatataccttttagtaagaggtcatttgtttactttgggaacaggaggcccagaaaccagctgaagaggcctgtttctcagtgagtagaaaggctggaaaggttctttccagctcttgttgcccactgcccagttcttcttcagtcatcttcatgttattactgaacaaccctttgggaaagacagagcagatataatca

SEQ ID NO: 878779 - DNA, 687 bp, Homo sapiens
ttattaattcatcaggaagcacatttgataaaaaatgagtgtctgatctataacagtttaagaggtattagcatctccatggatgtagcatatttatcctgttaaagggctactaggaaaactaattatggctgtggaaatcaggatagtggtaactaagtggaagcattggaaggaggcacaaggcgggtttctggggtgctgcttatgctctgtttcttgatctgggtgctggttacatgaatgtgctcaagctatgaaaaaaaattaagctatacccttattatttatacacktttctgtatgtatgattacttcaataaaaataaacaataattataacgattatgataatcaaaatatcagtcttgtgttggttcaaaacacgagtttatgtcttcagctagatatcagtttatagtcttcacaaatactataaagatcagtaagtctatgtctagactataaagtcagtataggtatgtggaatataccttttagtaagaggtcatttgtttactttgggaacaggaggcccagaaaccagctgaagaggcctgtttctcagtgagtagaaaggctggaaaggttctttccagctcttgttgcccactgcccagttcttcttcagtcatcttcatgttattactgaacaaccctttgggaaagacagagcagatataatca

SEQ ID NO: 878780 - DNA, 590 bp, Homo sapiens
ggttgattaccaaggggcataaggggacttttgttttatatcttcattggagtagctggttacacaggcatacactgtcaaaacatttaactgtttatgtgacatctgtgtattacattatatgcaaattttatctgaaaatgtaagctaaatatgactgtgctcagaattaatggaaaagtgtagaccttcctaaactcctttcaacccctgggggtgatgctttaaagccagcgaggtttctttgtatccagayagagaatgtgagtcccagcatgtaacaagggatgaagtggaggctaggctggggctgagtatgatgacatgaggcagtgtcaatcatactaagaggacaacctgggacagggatgtgggctgcaggaagatgccccttaggaccaaaactgcatcaggtaagtgcctgccaagagctgtcttctgaaaatgggcatctgaccttattaagaaaggttggttgggttggctgttgaaggcctctagccagctcttgcacatggctgaattatctgatggaaccaggacgagcttaatgtttctgagaggcttcacagtatggtgcttctctttcc

SEQ ID NO: 878781 - DNA, 663 bp, Homo sapiens
ttcatccatggctgggacacagggcaccaagtcccaagactgcacaaagcagcaaggccctggacccagcccacaaaaccactttttcttcctaggcctcagcttgtgatgagaggggctgctgtgaagacctctgacatgccctggagatattttccccattgtcttrgcaattaacagttggctcctcattacttatgcaaatttctgcagctggtttgaatttctcctcagaaaatgggcttttcttttccgtcgcattattgggctgcaaattttctgaacttttatgcttggcttcccttttaaacataaattccaattccaaaccatatatttgtgaatacataaagctgaatgcttttaagagcacccaagtcacatcttgaatgctttgctgcttagaaatttcttctgctagatactctaaatcatctctctcaagttcaaagttccacagatctctaaggtagggggaaaatgccattagtctctttgctaaagagtagcaaggaacacttttgctccagtttccaataaattcctcatctccgtctgacaccacttcatcctggactttattgtccatatcactatcagcatcaaaatgctgacagttaaagccattcaacaaatctctaggaagttccaaactttcccaca

SEQ ID NO: 878782 - DNA, 558 bp, Homo sapiens
acactgtttctataaacactttagacacagtgagccactcttctcagggaatggtggaaaccctcccaattccaatttccttaacaccagccaagggccagccttgcatgcaggcctttctaaggatggcagtctcttgcctgctatatgaaatcttttctgcacaatgcttatagccccaatttaatttttagtgttgttttaaaattttattttaataacacataatattataagataaggtaacttggtactaatttctgttgtatgatccatcttaagttgcaatgctggttactttttgacttttggtgactaacaggtatttgtatataagttaccatagcaatgttaggtaattataatctgtcctttttatctcattaagctttcagtaaaattgttraattaaataagcataataatttgagttaaaattagaataaaaattgtattttattttaattacatgaataatctagttttcatattgtgctaaatccctgtttagaattatgaaataagataaaatattcaatcatttttatcaatattttc

SEQ ID NO: 878783 - DNA, 693 bp, Homo sapiens
ctttaggaatcgccacactgtcttccacaatggttgaacaaatttacactcccacctacagtgtaaaagtgttcctatttctcgacatcctctccagcatctgttgtttcctgactttttaatgatcgccattctaactggcatgagatggtttatcattttggttttgatttgtgtttctctaatgaccagtgatgatgagctttttttcatatgcttgttggccacataaatatcttcttttgagaagtgtctgttcatatcctttgcccactttttgatggggttgtttttttcttgtcaatttgtttaagttccttgtagattctggatattagctctttgtcasatggatagactgcaaaaattttctcctattctgtaggttgcctgcttactctgatgatagtttctattgctgtgccgaagctttttagtttaattagatcccatttgtcaattttgaattttgttgccattgcttttggtgttttagtcatgaagtctttgcccatgcctaggtcctgaatgctattacctaggttttcttctagagttttttggttttaggtcttatgtttaagtctttaatccatcttgaattaatttttgtgtaaggtgtaaggaaagggcccagtttcagttttctgcatatggctagccagtttttccacaccatttattaaataggga

SEQ ID NO: 878784 - DNA, 571 bp, Homo sapiens
ctacaatacttcactgatagaatacatcaactagactaaatacatagaggatagaagttatagagttaaaataataaagaaaaatcatgttcacgaaacatttaaaaaattaatcagcacatgattaattttttagacatgacaataaaaaggaaaagttaaatccaacaggtaaaaatcgcatgggccacatttactgaccataaaataatcagtgagagattaagaagtaacaataacaatgccaaaactctaaacacttaaaaattgaactctttcagagatctcttgagttaaaaaaaatcagaaatggacactgaaattatagacattgagaatacaatggagtataaccaaagctatatctagatgacaatttctaattctcagttgttaatagcaaataaatacagcaatagaaaaaaaaatgcrttgaagttaagagcctaaaaatagaaaggtaaagcaaatcaaaagagaaaaaaaaataagagcaaagcatcaataaaaccaaaagaagaaattactgaattagaaagtgaaaaatcccaaagaagcagtgttaataaat

SEQ ID NO: 878785 - DNA, 693 bp, Homo sapiens
ttgttagatgtggggttttgagagggaggtgggaaaccttttttttactgcatgctccccaggattgggttaggaccaccttctgtatattcctgtaactccttgtactgccatcttaggatttctcatttgatattaaaattgcttgcttacactatatattgtatattgcaagctccatgtcttgctcattattatatttgttgcacctactaccatgcctagtacacagcagttctcagaatttgtgcaaggaaaaagtagaaatgtagagactttaaagttgaaattattttcatagatgtttagaaaaaggacaattagctttcaatatraaaagcagtaaggtgtactgaaaagcagtaagatatcctcaatgtttaactctcagcagtgttacaaatgttttcaagtttagagatggacaaagaatgcttgcatactccaataatgtccacctccaatgaaagcaaagcaaacagcaattccatttgcagttatgcaggacctcaagaaaggggcttatattaaacaccttcagacacagatactaattctaagacctgataaatgcagcatttcttcaacattctcttcagcagttatcctcagagcttaagtcaattcttagagctactacctgtggctgaattggaggtgtcccaatctccagactctcttaaaatggaaaat

SEQ ID NO: 878786 - DNA, 589 bp, Homo sapiens
tcttgctgacagtccaaacatcagccagaccactaccagcaaagaccaatcactctgttttgatatgtgagtttagagctatttgctatcttttgtatacattccctgaatatttgtcttcataatatatgagaaatatatgatgtcataattccttttgggattcactatttgagctccacttttccattcaggaaactggaatcataaatggaaaaaaaaattactatgtaattaagcttctagcatgtgctggacactgtcctagataaataattgtctcttcaatcctgagaatgaagctttattgacctcgtccacactgttggttagtaagtgacattgatcaaacagttttgcagtttaaacattatayatttgttcataaaataaaaataaatgaatatataacatttgaattttctcagattcaaaagatggtacagacaaattaggtcttgaattccactttgttatcctgatgttttttacatattcgtttccatctattgctttctaaatagaatccccctataaatgtccaatatcattacaactattgttataaacaaaaagtgaataaagagca

SEQ ID NO: 878787 - DNA, 638 bp, Homo sapiens
cacactcccaagactaaaccagaaagaagctgaatccctgcatagaccaataataggctctgaaattgaggcaataattgagagcctatccaccaaaaaaagtccaggaccagatggattcacagctgaattctaccagaggtacaaggaggagctggtaccattccttctgaaactattccaatcaatagaaaaagagggaatcctccctaactcattttatgaggccagcatcatcctgataccaaagcctggcagagacacaatgaaaaaagagaattttagaccaatatccctgatgaacattgatgcaaaaatcctcaataaaatactggcaaaccgaatccaacagcacaycaaaaagcttatccaccatgatcaagtggacttcatccctgggatgcaaggctggttcaacatatgaaaatcaataaacataatccagcatagaaacagaaccaaagacaaaaaccacatgattatctcaatagatgcagaaaaggcctttgacaaaattcaacagcccttcatgctaaaaactctcaataaattaggtattgatgggatgtatctcaaaataataagagctatctatgacaaacccacagtcaatatcatactgaatgggcaaaaactgg

SEQ ID NO: 878788 - DNA, 587 bp, Homo sapiens
ttgacccctgaaagctgacaatgatatggataattaaatccaggctgaggtggtctcagatggagatgaggaacttgttgggaagtgaagtgaatgtgactctggttatattttagcaaagagattggtggcatttttcccctgccctagagatttgtggaactttgaacttgaggtaggtgatttaggataactggyggaagaaatttctaggcaacaaagcattcaagaggtgacttgggtgctgttaaaagcattcagttaaaaaaaaaaacagagcataaagttcagaaaatgtgcagtctgatgatgcaacagaaaagaaaaacgcattttctgaagagaaattcaagccaactatagaaatttgcataagtaatgaggagtcaaatgttaattaccaagacaatggagaaaatgtgtccagggcatgtcagagaccatagcagcaggccctcccatgccagccctggaagccaaggatgaaaaactggtttcatgggccagacccagggccctcaagtctgtgcagcctagggacttgttgccctgtatcccagccactccagccatggctaaaagggccc

SEQ ID NO: 878789 - DNA, 570 bp, Homo sapiens
aaatagaggacaaagacctgaattaaggaattagccatgaagacagaaagaagaaattagatttagggaattctgataaaataacatttaaaaacattttgaccaattcttcagtgtgatgagggaagaagccattaattatctctagcttttagctagatacatcttgttgagaagtagatgagaagatagtaacaaaatgatmcatatttagaaacatgtactggtatctgtgaaacatgcccaaggaaatggccaataggcatgcctggctacatactttgtaaggcccagcacaaaatgaaaatggaaggtcttattcaaggattattaaatgtattaagatggtgacagcagaacattaaattaagcacagggctcttccatgcatgggacgccatgtttctaagcaggtggcttgcccttgaaactggttctgctggtaggcagaagaaaacatggcagttttctgaatctcaggagagaggaatggactgaagaaataggttaaaaatcaatagtgttatatatgttataaatgaagtaaggagagcttggagctcatacagt

SEQ ID NO: 878790 - DNA, 604 bp, Homo sapiens
agacctttgtcagatgcatagattgcaaaaattttctctcattctgtagattgtctgttcatgctgatggtagtttattttgctgcgcagaagcactttagtttaattagatgccatttgtcaatttttgcttttgttgcaatggcttttcgtgtttttgtcatgaaatctttgcccatgcctatgtcctgaatagtatggcctagattttcttctaagttttttatagtttggggttttacatttaagtctttaatccatcttgagtttatttttgcataagatgtaaggaaaaaaaggaaatctattccccattscttgtttttgtcaggtttgtcaaagatcagatggttgtagatgtgcagtcttatttgtgagttctctattctcttccatcagtctatgtgtctggttcttgtaccagtaccatcctgttttggttactatagccttgtagtgtagtttgaatcaggtagtgtgatgcctccagctttgtttttttttttttgcttaagattgtcttgaatacaaaggctcttttttggttccatatgaattttaaagtagttgtttttctaattccataaagaatgccaatggtagt

SEQ ID NO: 878791 - DNA, 647 bp, Homo sapiens
ttgtgatttttgcacactgattttgtatcctgaggctttgctgaagttgcttctcagcttgagaagcctttgggctgaaatgatggggttttctagatacaggatcatttaatctgcaaacagagacagtttgacttcctctctttctaatttaatgcsctttactaatttatcttgcctgatagccctggccagaacttccattactatactgaataggagtggttagagagggcatcatgtcttgtgctggttttcaaagggaatgcttccagcttttgcccattcagtatgaaattggctatgagtttgtcataaattgcttttattattttgaggtatgttccatcaatacctagtttattgagtgtttttaacatgaagggatgatgaatttatcaaagggcttttctgtgtctattgagataatcatgtggtttttgtctttagttctgtttatgtgtggtgatcttgattaattatttttcataaaaagttgtcattgaaagtcccctcaccattgttcagatcaagcagtggaattatttatgaatttgaatactgtagattcaaggagaatatatggaatttttaagaataataaatagtaccaatttttatctatttctgggggtgaaagcagactg

SEQ ID NO: 878792 - DNA, 652 bp, Homo sapiens
cttcagtctacgctgcctataaataaaggcattttttaaattaacacagaacaattattaaaatcaggaaattaattttgatacagtgctttaaactataggtagttaaaattgatcaattgcccaaccaatgtctttctattacagaggaaaacttgttttcttgtctgaggtctaatttatgattgtatattgcatttggctggttgtcatgtctctggtttacttcgaaatgctccttagatttttttttataaccttgatatattgttaatataagaggtcaattatttgtaaaatacccctcagtttgggtttatgcagtcttttttcattattagattcaggttacccatttttggcagggatacatcagaaattctgttgtggtcatatcagggaaacattaaaattcacatggtgtcatttgtctccttactggtgctaactttgatcacatggttaagatgaggtcgaggtytcttaaaatttataaggggttttacagaaagggtaatgagtagagaagtgacagttagggatgcagagctgtagcaagtactatgggaataaggagctgaggaagtgaagcctggaaagatggagtcacaggtttagacagagagcgctcgtcaacgctcctaaagcacag

SEQ ID NO: 878793 - DNA, 511 bp, Homo sapiens
tataagaagagacaccagagtgctgacttccactctccttctcattctccacacacacactgaggaaaggtcatgtgaggatgtagggagacagcagccagatgcaagccaggaacagagccctcactggaaccaggttagttagaaccttgatcttggactstcatcctcccaaactgttagaacataaatttctgtgttttaaaccacctggtctgtggtgttgtattacagcagcccaagaaaaaataatacagaggccaaatatatactttttaattcctttttaaatcacctcttactttgcaataattacccctcgtgtatctttacaccaatctgctgccaggcatatgtaaggtattcttttcctccgttacatacaaagaatcttaaagagaaaaatagaagactgactccattatctgtataacacaaactgcctaccttcaaccttgcaacagaaacaaaatctggagaccccattctccttgctagtaactggtttact

SEQ ID NO: 878794 - DNA, 654 bp, Homo sapiens
ttgggccatgggctctgaggatttttctttttagaccatattaagaacatcataatctatcacccaggctagaagagtactcagggtcttattacctttgaaaaaggcaaagctacgatttatgtggaatattgtstccaaaaacctttatctgaagcttagctggattgaaaattgatgctgcttttttatgtcaaagtgacccgcatggctcagatccttcagacaagaatgatatgttgcattctcccaaatcttatttcaaacaccaaagtttttcatgacctatgattttagaacaagttttctcagcatgatgtacttgatattaattaacaaaagcaatttttataagtttctttattttagatttgttttataaagaaagaaactgcctttaaactattttaaaaatcataattgttaggaaggagttaggcaagtaaaaatcctctcatttttagaacagtatgatttgcttcattaaatatcagagtcttactatacaaaaagagttttactttcttctctcaaaattctcattatttataaattgcctattatttttacttaatttattttccaaatgttttatgcaaagttttgatctctgtgaatttctctttaatctcaataacatgaggagttttacaa

SEQ ID NO: 878795 - DNA, 608 bp, Homo sapiens
atcaatattatagcatgttacagtacttcagtattttcataactggataatgtctcattgtataaatataccacatttctttactcatccatcacttgatagacatttgggttgtttccactttttgactattatgaataattcggctatgaacattcatgtacaagtgcttgtgttgacttatccttttagttctattggggatataactaagggtggaattattgggtcatgtggcagccctatatttaatcattagaggaayttccagactgtttttcgaagtagctgcaccaatttacattctcacaagcattgcatgaggcctccaatttctcaatatccttgccaacaactgttactatctgtattttactgaatagcaatcctaacaggtatgaagtgttatctcactgtgggtttaatttgcaatttcctaatatagtcatttgtatatttttgaacaaatatctatccaaatcctcacacatctttaaagtggcttattcatctgtatactgttgagttttaagggtcctttccatactccgaatataagtcacattaattataagacttacaaatattttctactcttctgtggtttg

SEQ ID NO: 878796 - DNA, 606 bp, Homo sapiens
gaaaagtttttaaaacaaactatcatagtgaaaagagaaacatgtgtgagttgattttcatggtttctcctgctcttcagcacacatccaacaatgactgggattccagtacagcatttgcactctcaatcctaactctcttggtgttttcattcacattaatactgatattatgttaatactgataccattaacactagcattgtgttaayattaacactatttactaacataattaattttgtagaaaagtttgtgcagtgtcttcttaaataaatatcctccaaagattaaaaaaaatagtttattaatgatgaaatgccatattcaaattgtattgtttcctttgctggatttttaaagaaaatgtatttctgctaaggaattaaaggaaatgggataaacaaaattcataagaaatagtaaaaatagtaaataagctagaagcttattaaatagaaataaagctcataggatatgtcaaatataaagaatgagtaacaaagtagctggcaaaattcaacatatatgttaaatgtgcatggtaagttagtaacctataaaacatgttaaaggtaggatgaataagtagaagatagaatggaa

SEQ ID NO: 878797 - DNA, 606 bp, Homo sapiens
gaaaagtttttaaaacaaactatcatagtgaaaagagaaacatgtgtgagttgattttcatggtttctcctgctcttcagcacacatccaacaatgactgggattccagtacagcatttgcactctcaatcctaactctcttggtgttttcattcacattaatactgatattatgttaatactgataccattaacactagcattgtgttaatattaacactatttactaacataattaattttgtagaaaagtttgtgcagtgtcttcttaaataaatatcctccaaagattaaaaaaaatagtttattaatgatgaaatgccatattcaaattgtattgtttcctttgctggatttttaaagaaaatgtatttctgctaaggaattaaaggaaatgggataaacaaaattcataagaaatagtaaaaatagtaaataagctagaagcttattaaatagraataaagctcataggatatgtcaaatataaagaatgagtaacaaagtagctggcaaaattcaacatatatgttaaatgtgcatggtaagttagtaacctataaaacatgttaaaggtaggatgaataagtagaagatagaatggaa

SEQ ID NO: 878798 - DNA, 604 bp, Homo sapiens
gttctgccagcatgcagcttgagatctgagaacggacagactgcctcctcaagtgggtccctgacccccgagtagcctaactgggaggcaccccccagtaggggcagactgacccttcacacggccgggtactcctctgagacaaaacttccagaggaacaatcaggcagcaacgtttgctgtttaccaatatccgctgttctgcagcctccactgctgatacccaggcaaacagrgtctgggtggacctccagcaaactccagcagacctgcagctgagggtcctgactgttagaaggaaaactaacaaacagaaaggacatccacaccaaaacccctgtacgtcaccatcatcaaagaccaaaggtagataaaaccacaaagatggggaaaaaacagagcagaaaaactggaaactctaaaaatcagagcacctctcctcctccagaggaatgcggttcctcacaagcaatggaacaaaattggacagagaatgactttgacaaattgagagaagaagacttcagatgatcaaactactctgagctaaaggaggaagttcgaacccatggcaaagaagttaaaaagcttgaaaaaaaaatag

SEQ ID NO: 878799 - DNA, 613 bp, Homo sapiens
ttcagtggcccgtttagcatagaaactttctgtgaactctgtaggtgaccttttccctttctttgtttccacttaatcagattgcatgcgacctttgggagcctaaggcttcgatgttgagaagagtacatgaaaggattaaaaaaaaataatacattttttggtacattgcctttggaggcatattaaaatcctcttgaatgctgttgtctttttctcattgaaaatacccagcctgttttctatataaacagcccttttcttttatcttggtgatattgttttacaatccaaccttatgrcttaactattttatttgtctcaaaatcattttttttagcatggcccaattattagaaacaatctcactcatgtgaaaaagaattgttagtgatctttctttcaactaaggagaaaaacaaatatacaaacagcactgttcccctgtaggatttgcgttggttggtcagacatactttctctggattgttacctgaaattgaaagggaactatggcgatctgagtattcctcccatctgtcatttgcatggggactcttgcctaggccaccaactcaaaaaagaaaaaataaagattgctgcatttggaggc

SEQ ID NO: 878800 - DNA, 644 bp, Homo sapiens
ttgagtacatctgacaaagggaagcctgctgtgtcctgagagagcttgacaaggcatgatcagcccatgagaagtgcacgagttccctctcccaggaccatgctagcacgggagagacattttcatgcatctgagctcattctagtaaagtcctaagcaaaggcaaaggagtagcaacatcaatatttctttcagaccctgaggtctttgattctcacatttatttttactyttatcatctttctcttttttgaggccatgtaatcaatgataaattgtccaccacttagtaaaataaaagtcctctttaaatatatccttttgactccagattttctgttactttcactaccgtggtagagaggaggatatgtgatttgttttaaaactgcttatcctaaaaagttggtaagtaccatacacccctacattagttacacttacatgcatgacattagttatatttacatgcacgactaccatttattgaacaacacacatttattggcagagattgtatacagaatgctttgaaacaaggaatgaaaagaaaaataagatgggcaagaataagggagagaaaaatggatctgaaaactaagtttctttaagtcaggctgaagggactgttactgttttatgtt

SEQ ID NO: 878801 - DNA, 644 bp, Homo sapiens
ttgagtacatctgacaaagggaagcctgctgtgtcctgagagagcttgacaaggcatgatcagcccatgagaagtgcacgagttccctctcccaggaccatgctagcacgggagagacattttcatgcatctgagctcattctagtaaagtcctaagcaaaggcaaaggagtagcaacatcaatatttctttcagaccctgaggtctttgattctcacatttatttttacttttatcatctttctcttttttgaggccatgyaatcaatgataaattgtccaccacttagtaaaataaaagtcctctttaaatatatccttttgactccagattttctgttactttcactaccgtggtagagaggaggatatgtgatttgttttaaaactgcttatcctaaaaagttggtaagtaccatacacccctacattagttacacttacatgcatgacattagttatatttacatgcacgactaccatttattgaacaacacacatttattggcagagattgtatacagaatgctttgaaacaaggaatgaaaagaaaaataagatgggcaagaataagggagagaaaaatggatctgaaaactaagtttctttaagtcaggctgaagggactgttactgttttatgtt

SEQ ID NO: 878802 - DNA, 621 bp, Homo sapiens
gctcttggtttgactgttgttggtgtataagagtgttagtgatttttccacattgattttgtatcctgaggctttgctgaaattgtttatctgctgaaggaacttttggtttgagatggggtttcctaatataggattatatcatctacaaagagataatttgactttcttcctgtttggatgccatttacttccttcttgcctgattgctttggccagaacccaacactatgttgaataggagtggtgagagagggtgtcctggtcttgtgctgattttcaaggtgaatgtttccacattttgcccatttattctaatgttggctgtgggtttgtcatataggggtcttattattttgaagtagkttccttcaatacctagcttattgagagtttttaacatgaagggatgtttaattttattgaaagccttttctgcatctattgagataatcatgtggttttttactttagttctgtttatatgatgaatcacattttattgatttgtgtatgttgaaccaacattgcataccagggataaagcctacttcattgtgtggatacactttttgatgtgatgctggattcagtttgacagtattttgttgaggatgtttg

SEQ ID NO: 878803 - DNA, 703 bp, Homo sapiens
ttagaaacagtgagaattacaggcagtagcagatgacagctgaacacttcatgtaaggaacaggctgaggaactgcttcttaatgttttttctattccatatagacctaggtggccagttctccaccacatcacctgaaagccagagaaacagcagcacctataatggagtcaatgggatattatcagggtggcccatcattccttacccagatataatctcctgcacatcctaggactaagtaattatagcacagctttttgttgaggaagagtagagtttatggcaaaggaaaagggagagtgcctgagattcagggtcatcttgtaagaaagcaaatgaggcaaacatagtgattgagccaatatagcaacccargaggcttaccgccctgaggagtaccctgtctccaccaccacactcaccaggagggatgtcagctatgttctggactttaaactttctcccagtacatactttcagccaaagtacttaataatcccagagcagtaagagttgtctagtaaaaataacaagacatctgagaaacataactgcaataagagaaagataatatatggaacaatctgtaacaaccaaaccaaaataaattaatagatcggagagaacaagcatttaaaataagatcaataaatatcataaaagtggtgaaaaaggacatttgtaggatatttaatataaa

SEQ ID NO: 878804 - DNA, 558 bp, Homo sapiens
ttttttttaagtaagcttatgtttggttagtatttactatgtggatacactgatctgcagttctcaagtaccaaattcaagtgtaagtgaatttagattttatcaataatcctttctgatgcagcacatataaaaaatgttaagggaaatgtgcctgatgccagctcatctttgaagtgcagacattataagtcaatcacctataagaacatagtttccattctgcagtatatatgtgtacaatgtatatttcctgactaaaggtttattatcaagaaaactagctaccaaacagcacatcagcacatcagctagcctcagacccttaacaaatttgcttttcttttttttttcagagtccacagagctattttattattattactaktattattattattattattatttttaattatattttaagttttagggtacatgtgcacattgtgcaggttagttacatatgtatacatgtgccatgctggtgtgctgcacccactaactcgtcatttagcattaggtatatctcccaatgctatccctcccccctccccc

SEQ ID NO: 878805 - DNA, 644 bp, Homo sapiens
cctttgaggatgatttaaaaaatgatcagacacattgttgatatgtcaatatgtttttaagcattttgttgttctttctaaaaattattctatacctaaatggtaataattttgaaaagtagttactggtatattatatttttctcattgtcttaaataattactttgagaatttatatagtctaatagcttcatagtgtttttatttgaagtagttttatcatgtgatccttacataaagtaagtttaaagtttctaagtttttgactaaaggtttttttttttttattatactttaagttttagggtacatgtgcacaacgtgcaggttagttacatatgtatacatatgactaaaggkttttatttaactttaatgtcttctttgataaaacagccttgaagtgttctagaacggaatggagtaaacttcttccaatttgtttctgtgaattttatccttatttgaaaatcctaaatttcttcccccaggttctactttaattgggcacttacaaagtaattcttcaatcagtgtctctaatgtctcactgcttcccaacaaatctacgaagacagaacaaaagatgcaacttacagaaacacagaaaattaagactgtcagaggacatagtgcttgattc

SEQ ID NO: 878806 - DNA, 570 bp, Homo sapiens
ttgcttttgtcatctttgtcatgaaatctttgccagttcctatatccagaatgatatttcctaggttatcgtccagggtttttatagttttgagttttacatttaagtcttaaatccatcttgagttgatttttgtatatggtgtaaggaagggttccagtttcagtcttctgcgtatcgctagccagttatgccagcaccatttgtttaatagtgattctttccccattgcttgtttttgtcagttttgtggaagaccaggtagctgtaagtgtgcagccttatttctgggctctctctattctgtcccctttgtctgtgtgtctgtttcagtgccagtaccctgctgtttyggttactgtagccctgtaatatagtttgaagtagagtcatattatgccccctccttttttgtttttgcttaagattgcctttgctatttgggctcttttttgggtccatgtgaattttaaaatagtttttctagttctgtgaagaatgtcattggtagtttgataggaacagcgttgaacctgtaaattgctttggcaatgtggctgttttaatgat

SEQ ID NO: 878807 - DNA, 727 bp, Homo sapiens
ggttccaaaacaatcacattagatttacacgttttctgtaagctttgtcactgaaaaaacttgatattataaaaatatttcaatgactgagtttattcaacattgttgactacctttagttactttctaatgtcttctggctgattcagagattctgggcttctcagaccttacttggaaaggtctgataagaccaaatttaaaatgctatgtatgtgatgattcagttctttagaagggttgccagtttgtggtgtacagtaaacacttggattactaaatattctagtgaagattagcacttttcatttgcatcttttttttttcttctgagattctcaaataccttaaagataagcagaaattcataatctacattcattctgaaaacttttatattamtattcagcaagtgatctttaagattgagctaggaacttgtggccctggtgtgttattttcaaataactagaaacttacattttcaaatgatgatttttatctttgaagcaaggattttgattttgttttggttttatagcttattttcaaagttaagaaacgcaagaaagggtgttaatatatttcattcaggaaaggtcctggttggtaaaatatgtaaaagtacaaacttctgaattcaccatcatttcctgatggatttgtaaaaatttttctccccagtctaatgtatttgtttgtatactaacttccacacagggctatg

SEQ ID NO: 878808 - DNA, 571 bp, Homo sapiens
agagataaagatgaattggagcaggatggtaattcagaggtggtaaaaaaattaaaaagactctgactataatttagagatagagacgagattttcttacgtattggctgaggggtggaagagaaagagaaggactgaatctcaaagtttctggcctaagtaattgttaccaactgagacggggaaacgtaaatgtacagcaggttgggaggaaacatatttttgatatgttgytatcaaactatctaatgatctcccagtcagcaggagtggctgcattagtttggagtgtaagagagaagtttagaccagagacaggaatttggggatcagcaaacttttgagagtggaacatgatggcagagtaggactctgaagcaactgtctcccctcaaaattacaatttgaacaacaaaataataactaaaaacttcccacatcttgcaacagttatagacatccagatatatgcagctcaagaattcctaaacagattcagcccaaagaactcttctccaaggcatattatcatcaaactgtcaaaagtcaaacacaaagagaattctgaaaa

SEQ ID NO: 878809 - DNA, 643 bp, Homo sapiens
gctagcagaagacaaaaaataactaagataagattggaactgaaggagatagagacataaagaatccttcaaaaaatcaatgaatccaggagctggtttttgaaaaaaaacataataaagtagatagactgctagatagactaagatgaaaagagagaaaaatcaaatagacacaataaaaaatgataaaaggggtatcaccactgaccccacagaaacacaawatactgtcagagaatactataaacacctctatgcaaatgaactagaaaatttagaagaaatggataaattcctggataaatggataaatttctgttattcagtctcttccttgaatagaccaataacaaattctgaaattgaggcagtaataaatagctgaccagccaataaaggcccaggaccagacagattcacagccaaattctaccaaagaataaagaggagcaggtaccatttttttctgaaacaatgccaaatggttgaaaaggaaggacttctccctaactcattttctgaggccagcatcatcctgataccaaaatctggcagagacacacacaaaaaagaaaagttcaggccaatatccctgataaacattgatgtgaaaattctctataaaatactggcaaactgaatc

SEQ ID NO: 878810 - DNA, 649 bp, Homo sapiens
ctcttcaaggagaaatataaaccactgactgctcaaggaaataagagaggacacaaacaaatggaaaaatattgcatgctcatggataggaagaatcaatataaaaatggccatcctgcccaaagtaatttatagattcagtgttattcccattgaactaccattgacatttttcacagaattttttttttaaactattttaaaatttacatgaaactggccaggcatggtggttcatgcctgtaatcccaacactttgggaggctaaggtgcgtggatcatctgaggtcagaagtttgagaccagcctggccaacatagtaaaccccatctctactaaaagtacaaaaatcagctgggtgtggtggcatgcacctgtaatcccagctactcaggagggtgaggcaggagggtcacttgaacccaggagggggaggttgcagtgagccaagattgtcccactgcactccagcmtaggtgacaaagtgatactccatctcaaaataaacaaataaaataaaataaaatttacatgaaaccaaaaaacccatatagccaagacaatcctaagcaaaaagaatgcagctcagctggaggcatcacgctatccgacttcaaactatactacaatgctacagtatccaaaacag

SEQ ID NO: 878811 - DNA, 647 bp, Homo sapiens
tttctaatccgccttaaaataccccttaagatctcactttgcagacttttatctcactgtctgtacttttcatctctccctcattgctagtacatttttcattaaaaataataacaacaaaaacttaatatgctccctaaccccatctaaggaaatcttcaggaattgcctcattatttctttgtttcctttatagccaagcctctaaggagatatgtaaatgtgtttgttctgtgaaagggccatgtgtgcaaagcagtccccaaatgccaaaggagcccagaaatccaagaaggaggcagacaaatccagtttgtcagtattgggtgatttattaggggcgcttacaggcagaagcgtggtcttggcagcctcaagacaggtagatctcctcactgttcctcccaaacccaaggtataaggaaagggtcttatgtgctccagcaaaacagttaaaggcaaccctccaaaaccagcacgaatcctgtgtgcgtcacarcctctaatttatgtgataacatcaaggttgctttgatctaaaagtaggagtacatgttcttgcactagggacagaaaataaaacagaaaccaggagacattcatggggctagggccaatcagaagtcaaccggcagattagcatccac

SEQ ID NO: 878812 - DNA, 541 bp, Homo sapiens
aatgaaaaaccgtgacttcaggctgctgaaagcctaaaataaaaattaaaaaaaagaacaaaaacaaaatataaggaaggttggacaagcttgcaagttagataataatatagattctctttggttttatataatatattcatatcaaagaatgcttttacaacatctcttaaatacccaaatctgattctcttgtgcttacattcaaggattttctttaagaaaaaatggtatgactaggtctacaytagaaaataattcttgtaattttgtggaagagatgtaaaaaagcagaaactgggaaccagaaaaagggcaggaatagaaagatagttcacaagcaattctggtataattatgaacagatgagaggcaaggtatgagagagagagtgagtagtaaatggtgattcaggggttttagcaatgtgaggacaaaagagagagcaggaatgagagtcaacagaatagtaggcacagatggggatgtatcagaaggctccacgtgcctccaactatcatacagtaaaagcacatgtgta

SEQ ID NO: 878813 - DNA, 662 bp, Homo sapiens
gaaaagaaccaattttactttttcaagatgagaatctagaatgatttctcatatttgttatattagatcattcttattcttttattccaaagatttgctgtgagccaggttgagtcagtgccgtgccctgtaagggagcataaacatcttcaggtataacccaagccacrggctccaaatgcggagtttgaatacaagaagcaaaatatagtcttttgaaatcttctttttccttttctttgttaagccaaataatacaatttgctacacacatttcaaggtagcttagaaatggaatagcttcaccacgagcctttctgcagaggacagcctgagagtcaagtgagaaagtgacagccagaagctagtccatctcaggcaacagaggaaatctactgcattgcagagtcccagggacgacctaatggaaaacaacagcgagagtgtgagccagggctctgctggtggagtggggaaatgcagctgcaattccaggacacacagagactgcacatgtgcagaagcatgcagagagaatgtttgcatctttcctgtaaggtgagcagaaaacgatcctccctacaaaaagattgcaggagaaaacttcctggaggttgagaataacatgcaaaaataatgtcctgtgatgaggaaacttgggc

SEQ ID NO: 878814 - DNA, 584 bp, Homo sapiens
ggttttggagtactcacttttcttccatgtgatgctaccgtgcaaattataaatttctgtacttttctcctgttaatctgcctaccatcagtttatttcatagacttaactatcaaaccttcagatggtagagggaaaatcttccctctcctacagtatccacctatctttagttttcagggcacaagtttgttctatgacctaatttttctgattgatctaagaagagttgattttcagcttattcagattttttccttgtgacaataggagtgatggcttccgagttctttacatgttggactgaaattgaaaatctgagtttgttttcatcaaatgcttcttggcatgggtagtaatttttaaatcatatgccaratattttgggtgatacattccagagagtatgaattatgctgttaatttttctgatgctgttagactttgaatgtaaaattctatataccttacaaaataatcaattaagtgttaggtaaaataaccttagaaaatttgctgccttatgcaactttttaaaaagcaaaatgaaacatggttgtgtggaaggaaaataaactcttgag

SEQ ID NO: 878815 - DNA, 642 bp, Homo sapiens
ctgagctcagcagggccttcccaattgttccgcaatctatctcttatccctgtggtgaaaattttattcttccccaaggtccttacgcaacccctttcttggtgattacaaacacactgttttctttacacaaacaaagtgaaggctttaagggataaactccacccacttctctcacatttcacatttaaaaatgtcttccattttctctttactcaatgtcacttgagtcttttttttttcttctaatgctaaaatgtatcactgtggtctccttcccatggattcctacatcgtccttggttatgatgcattgatcagcyccttcccaggaacttcaccctttctcctatcactggttgctatctccacatagaaaaatggttacgattctccattctatgaaaatctgccttaaattttcccttaagttgtaccattaaattgacatgctttctccatttcacacctacattgactgctcttaattcccttgtgtgcaaacatttcttaaatgtttctgcttggtgtctgcctcaacggatctgctcaatcatctcttaaatatccatcagaattttctgattgatgaatctagcagcctctttattatgttccctttttaaactctgtgaaactttt

SEQ ID NO: 878816 - DNA, 703 bp, Homo sapiens
tggtatttggttttctgttcctgagttagtttgcaaaggataatagcctccagctccatccatgttcccataaaagacatgatcttgttcttttttatggcttcatagtattccatggtgtatatgtaccacattttctttacccagtctgtgattgatggaggttaggttggtcccatgtctttgctattgtgactagtgctgcaatgaacattcactagcatgtgtctttatggtagaatcatttatattcttctgggtatgtacctagtaatgggattgctggggtgagtgctagttctgcttttaggtatttgaggaattgccatagtgcattccacaatgattgaactaatttacactgcctccaacagcgtatcagcattcttttttyttcacaacctcaccagcatctgttattctttttctttctttcccttttttttttttttggagacagagtctcactctgtcacccaggctggagtgcagtggcgcaatctcggctcactgcaagctccgcctcctgggttcacgccattctccctgcctcagcctccagagtagctgggaatacaggcgaccctacgtccggctaatttttttgtatttttagtagagacggggtttcaccacattagccaggatagtctgcatctcctgaccttgtgatccgccagccttggcctcccaaactgctggg

SEQ ID NO: 878817 - DNA, 577 bp, Homo sapiens
taacaagtcacaatcccttaaccatcttgatgttttcattccctaagtttcatttacatccagttctgaaggatctctgtagtctttagtgaaaagataagctttttgaataacatttcagattaaagcaatctaaaaaccaaaaaaaatactctttcagcttctgtgaaagwatattctctgttttcatttttaaatcttgagatcaaggatttgaggtaggggctattaaggtaaagatgagagggaagcagagagagaaaaagagggatgaagataagatgggatggtgtggataaaagaaagagagttgtaagcataaaagcatgagggttatggcttgtcttgcaaaatagaacagatgaagtatcctctccaatacaattttcttcttttcttaccctctgtgctaagataaattttcttttcggatcatgattatggattaatttatgacttcccttaattgtctgagcaacgcagggttaatgtcctggtaaggacaagttctcttttactttatgagagcaatcacttaacgaaaattaggctattactttttatctccttctccttg

SEQ ID NO: 878818 - DNA, 577 bp, Homo sapiens
taacaagtcacaatcccttaaccatcttgatgttttcattccctaagtttcatttacatccagttctgaaggatctctgtagtctttagtgaaaagataagctttttgaataacatttcagattaaagcaatctaaaaaccaaaaaaaatactctttcagcttctgtgaaagtatattcwctgttttcatttttaaatcttgagatcaaggatttgaggtaggggctattaaggtaaagatgagagggaagcagagagagaaaaagagggatgaagataagatgggatggtgtggataaaagaaagagagttgtaagcataaaagcatgagggttatggcttgtcttgcaaaatagaacagatgaagtatcctctccaatacaattttcttcttttcttaccctctgtgctaagataaattttcttttcggatcatgattatggattaatttatgacttcccttaattgtctgagcaacgcagggttaatgtcctggtaaggacaagttctcttttactttatgagagcaatcacttaacgaaaattaggctattactttttatctccttctccttg

SEQ ID NO: 878819 - DNA, 577 bp, Homo sapiens
taacaagtcacaatcccttaaccatcttgatgttttcattccctaagtttcatttacatccagttctgaaggatctctgtagtctttagtgaaaagataagctttttgaataacatttcagattaaagcaatctaaaaaccaaaaaaaatactctttcagcttctgtgaaagtatattctctgttttcatttttaaatcttgagatcaaggatttgaggtaggggctattaaggtaaagatgagagggaagcagagagagaaaaagagggatgaagataagatgggatggtgtggataaaagaaagagagttgtaagcataaaagcatgagggttatggcttgtcttgcaaaatagaacagatgaagtatcctctccaakacaattttcttcttttcttaccctctgtgctaagataaattttcttttcggatcatgattatggattaatttatgacttcccttaattgtctgagcaacgcagggttaatgtcctggtaaggacaagttctcttttactttatgagagcaatcacttaacgaaaattaggctattactttttatctccttctccttg

SEQ ID NO: 878820 - DNA, 644 bp, Homo sapiens
ttaattacttcgtgtattactgtagtttaattgctattgagaaaactgagcacacatttataaaacctttctattttcacttaattttaaaaagcaatcacatttattgcatgaacgctgattcattttactttttctcttgaatttctaaaccaaattaataaattaaaaaattaaaaacmcttaatattgtacataggaaatttccattattttgaaacttcttaaaacgacaatcttcaacactaatatgtaaaatgaaaaagacttaaatgtaagacctaaaaccataaaaaccctagaaaaaaacctgggcaataccattcaggacataggcatgggcaaggatttcatgtctaaaacatcaaaagcaacgacaacaaaagtcaaaattgacaaatggggtctaattaaactaaagagtttctgcacagcaaaagaaactatcatcagagtgaacaggcaacctacagaatgggagaaaaaatttgcaatttttccatctgacaaagggctaatatccataacctacaaagaacttaaacgaatttacaagaaaataaacaccaccatcaaaaagtggtaaaaggatatgaatagacacttctcaaaagaagacacttattcagccaacaaacctatca

SEQ ID NO: 878821 - DNA, 647 bp, Homo sapiens
agttccatataaaaccctattgggattatgcttgcaaagttcattgattcaccagtttggagagaattaatatctttacaatattaagtcttcctatcatagaacatgaaataccttcaaatgtctttcaagaatgttgcacacttttctcccataaaagacttgggcatttcttttttttgctggatttcttctaagatactgaatctttattttatttatttatttattttctaatgtcagtaagtttatgggaaactggtggtgttttgttacacgaataagttctttagtggtgattgctgagattttggtgcatccatcacccaagcagtgtacactgcacccaatgtgtagtcttttatccctcacccgcctcccaccccttcccctrgatcccccaaagtccactgtatcattcctatgcctctgcattctcatagctcccacttatgagtgagaacataagatgtttgattttccattcctgagttatttcacttagaataatagtctccaattccatccaggttgctgcgagtgctattactttgttcctttttatgtctgagtagttattttaaatggtatctttttcaatgttgcattttctaaatgttcttgcatctttatcttggagaatacct

SEQ ID NO: 878822 - DNA, 615 bp, Homo sapiens
cacactgaagtacaaagaccaatgatactatgaagcaactacataagtaagtctgcaaaataaacagctaggatcatgattacaggatccaaattcacacataacaatattaaccttaaatttaaatgggctaaatatcccaattaaaagacacatagtagcaagttggataaacaaccaggacccattggtgtgctctactcaagagatccatctcacatgcaaagacacaccaggctcaaaataaagggatggtggaaaatttaccaagcaaatggaaagtagataaaaacaggcgttgcaatccagtttctgacaaaacaaactttaaaccaacaatgattaaaaaaaaagaarggcattacataacggtatagggatcaatttcaacaagaagagctaactatccctctcctaaatatatatgcaccaaatatagaagcacccagattcataaaacaagttcttagagacctacaaagagacttagactcccacacaataatagtgggatgctttaacaccccactgtcaatattagatagattgacaagacagaaaattaacaaggatattcaaaacttgaactcagctctggatcaagtggacctgata

SEQ ID NO: 878823 - DNA, 615 bp, Homo sapiens
cacactgaagtacaaagaccaatgatactatgaagcaactacataagtaagtctgcaaaataaacagctaggatcatgattacaggatccaaattcacacataacaatattaaccttaaatttaaatgggctaaatatcccaattaaaagacacatagtagcaagttggataaacaaccaggacccattggtgtgctctactcaagagatccatctcacatgcaaagacacaccaggctcaaaataaagggatggtggaaaatttaccaagcaaatggaaagtagataaaaacaggcgttgcaatccagtttctgacaaaacaaactttaaaccaacaatgattaaaaaaaaagaagggcattacataacggtatagggatcaatttcaacaagaagagctaactatccctctcctaaatatatatgcaccaaatatagragcacccagattcataaaacaagttcttagagacctacaaagagacttagactcccacacaataatagtgggatgctttaacaccccactgtcaatattagatagattgacaagacagaaaattaacaaggatattcaaaacttgaactcagctctggatcaagtggacctgata

SEQ ID NO: 878824 - DNA, 579 bp, Homo sapiens
gatttaaaaaattgtgctttaatgtgtataaaacttggtgatttttagttaagtcctatagatgggcagagaggcattcagccaagtatatacatttgataaatagttaggggatcaattagctctatggctacaaaatgcctattatcccagcctgtcatcacagcaaagctgttttctaagaacataaggaagatcaaaccaggacagaatggcaacccaaggcctgtaggtggaagtggagaattgatgctggggccttatcaaataatggcagagagcctgcgatagcagagtttgtcaccagcagatggaactcccataggatgactcagctaggatactgagatgttgtgcttcaatgtctgagactcatttctctacagtttctctcttttgtgtttcatagattcttgttcaatcgtgtttcaaactattctrgtttgctaagaatcttccttgtcacttcctcttttcttcacgaaatttccttgtctctgggtttcaatcctagtcagttccttctctttcttctccttacccctggtactagatgtatttattgctgtcactagatgt

SEQ ID NO: 878825 - DNA, 512 bp, Homo sapiens
ccacagatcttaaggcagaaaatgccaccagactctttgctaaagcatagcaagagtgacctttgctccagttccaaataagttcctgatctccatctgaaaccacgtcagcctggacttcattgtccataacactatcagcattttgctcaaaaccattcaacaagtctctaggaagttccaaactttcccacatcktagtgtcttattgtgagccctccaaactgttccaacctatgcccattacccagttccaagtcacttccacattttaaggttatctttatagcagtgccccacacccactaccaattttctgaattagtctgttttcatactgctatgaaaatactccctgagactggataatttataaacaaagagacttagttgacttacagttccacatggctggggagtcctcaggaaacttacaatcatggtggaaggtgaaggaaaagcaggaaccatcttcacaaggtggcaagagagagaaagcacaggggaaactg

SEQ ID NO: 878826 - DNA, 587 bp, Homo sapiens
aaccaaaggatttcatgagacttatcattacattatgggaaaactgctccagtgattcaattatctcccaccaggtccctcccacaacacatgggaaatataaaagttacaattcaagatgagatttgggtgggcagagccaaaccatatcattccacccccgccccactccccctgccaccaaatctcatgtcctcacatttcaaaaccaatcatgccttctccaaagtcttttttttttttttttttttttttttttggggaaacaaagtctcacactattgcccaractggagtgcaggggggcaatcttggatcactgtaacctctgcctcctgggctcaagtgattctcctgcctcaaactcccgagtagctgggattacaggcatgtatcaccatgcccagctaatctttttgtatttttagtaaaaacgaggttttaccatgttggacaggctggtctcaaactcctaatctcaaatgatcaacccaccttggcctcccaaagtactgggattacaggcatgagccactgtacccagccccccaaagttttaactcatttcagcattaactcaaaagtcc

SEQ ID NO: 878827 - DNA, 587 bp, Homo sapiens
aaccaaaggatttcatgagacttatcattacattatgggaaaactgctccagtgattcaattatctcccaccaggtccctcccacaacacatgggaaatataaaagttacaattcaagatgagatttgggtgggcagagccaaaccatatcattccacccccgccccactccccctgccaccaaatctcatgtcctcacatttcaaaaccaatcatgccttctccaaagtcttttttttttttttttttttttttttttggggaaacaaagtctcacactattgcccaaactggagtgcaggggggcaatcttggatcactgtaacctctgcctcctgggctcaagtgattctcctgcctcaaactcccgagtagctgggattacaggcatgtatcaccatgcccagctaatctttttgtatttttagtaaaracgaggttttaccatgttggacaggctggtctcaaactcctaatctcaaatgatcaacccaccttggcctcccaaagtactgggattacaggcatgagccactgtacccagccccccaaagttttaactcatttcagcattaactcaaaagtcc

SEQ ID NO: 878828 - DNA, 597 bp, Homo sapiens
taagttttttgaaaccagtgagaacaaagacacaacataccagaatttctggaacacagccaaagcagtgtttagagggaaatttatagcactaaatgcccacagaagaaagcaggaaagatctaaaatcgacaccctaacatcacaattaaaagaactagagaagcaagagcaaacaaattcaaaagctagcagaagacaagaaataactaagatcagagaagaactgaaggacatagagactcgaaaaacctttcaaaaaatcaatgartccagaagctgtttttttgaaaagattaacaaaattgatagaccactagccagactaataaagaaaaagtgagaagaatcaaatagacacaataaaaatgataaagaggatgtcaccactgatcccacagaaataaaaactaccatcagagaacactataaacatctctacacaaataaactagaaaatctagaagaaatgggtaaattcctggacacatacaccctcccaagactaaaccaggaacaagtcgaatccctgaatagaccaataacaagttctgaaattgaggcagtaattaatagcctacaaaaaaaaaaaggcca

SEQ ID NO: 878829 - DNA, 699 bp, Homo sapiens
atcacattatttcttctctcaataaaatgttgatatagcaactaaaatgtattagtaatgaagaaacactttgaggtgctttttctcaaataagtcagtaaaactaatgctacttaaaaaaatatacatactggtcgggcacggtggctcacacctgtaattccagcactttgggaggtcaaggcgggcagatcatgaggtcaggagtyggggaccagcctggccaacatgacgaaaccccgtctctactaaaaaatataaaaattccgggtgtagtgacacgtactgaaggataaagtcagcactctgcattcttcgttttttttgtagaatcttttgtaataaactgcatatatttattgagtttaatacttccataattcatcatctccaaaaaaatccctaacttacctttgtgtaagggataatccctaacttatctggtggggttattttaccccaccagatattagtgagaaagagaaaggaaaagatagctagataagtgtaaatgaagatagatagatgtaaaaacagatagatatgtatagacagatagatatgaataaataagaccaaatggatcatcaatggcttttacagacaattgtttccaaaagagctacagtatcaattatataattatttcatgatgaaatttattttaatttgagtttggacagcgttatttgtccttcc

SEQ ID NO: 878830 - DNA, 627 bp, Homo sapiens
taaaaactcaatactctaggtatccatggaatgtatctcaaaataataaaagctatttatggcaaacccacagccaatatcatatggaatgggcaaaaactggaagcatttactttgaaaaccagcacaagacaacgatgcctctctcaccactccaattcaacatagtattgagagatctggccagggtaatcaggcaagagaaagaaataaattgtataaaaataggaaaagaggaagtcagattgtctctgcgtgcagatgacacgattgtatatttagaaaaccccatcgtctcagcccaaaatctccttaagctgataagcaacttcagcaaagtctcaggatacaaaatcaatgtgcaaaaatcacaagcatttctataacccaataamagaagaacagagagccaaatcaatcatgagtgaactcccactcaaaattgctacaaagaaaataaaatacctaggaatacaacttacaagggatgtgaaggatctcttcagggagaactacaaaccactgctcaaggaaataagagaggacccaaacaaatggaaaaacattccatgctcatgaataagaagaataaatatcatgaaaatggccatattgcccaaagcaatt

SEQ ID NO: 878831 - DNA, 627 bp, Homo sapiens
taaaaactcaatactctaggtatccatggaatgtatctcaaaataataaaagctatttatggcaaacccacagccaatatcatatggaatgggcaaaaactggaagcatttactttgaaaaccagcacaagacaacgatgcctctctcaccactccaattcaacatagtattgagagatctggccagggtaatcaggcaagagaaagaaataaattgtataaaaataggaaaagaggaagtcagattgtctctgcgtgcagatgacacgattgtatatttagaaaaccccatcgtctcagcccaaaatctccttaagctgataagcaacttcagcaaagtctcaggatacaaaatcaatgtgcaaaaatcacaagcatttctataacccaataaaagaaraacagagagccaaatcaatcatgagtgaactcccactcaaaattgctacaaagaaaataaaatacctaggaatacaacttacaagggatgtgaaggatctcttcagggagaactacaaaccactgctcaaggaaataagagaggacccaaacaaatggaaaaacattccatgctcatgaataagaagaataaatatcatgaaaatggccatattgcccaaagcaatt

SEQ ID NO: 878832 - DNA, 621 bp, Homo sapiens
gggaaaggctatcaaagggcttttctttaaaggtatttgcagatgagtttctcctgctgctcagtcatctctaggtcagtcatctctatgctgccttatcctgctacctctttttttttttttttgagataaggtcacactttgtcayacaggccagagtgcagtggcgtgatcatggttcactccaggcttaacctcccaggctcaggtgatcctcccacctcagcctcccatgtagctgggagcacaggcatgtgccaccacacccagctaatttttgtatttttagtagaaatgggattttgacatgttacccaggctggtctcaaactcttgggctcaagagacccacctacctcagccttccaaagtgctgggattataggcatgagccaccatgtccgccacccccaacctcctttttaccaaccccttgtggctcagcctacaggattgcaggtgtttttactgttgaaaaatagtcaaactccagtggttttaaagggacaagtaaagcaacattcacaattgctaagacattcaattctaggtatatattccacagccaacttttttttcccccatgagagttcataattgcatcatgggatacaatgagag

SEQ ID NO: 878833 - DNA, 552 bp, Homo sapiens
ctctcctgagttccagaccaacacagccccctgactgcagacttccccatgtggatgtcccatagataacctcaattcaccatctcctttattgcagcttttatcttttctccaaaatttattctttcttccataattatctctttagtggagtcacaatcaaagccaaaagaatgaaaagtcatccctgatcctgcctgctcatcacttcttcatggactgaatgayctagacctgtcaattacatcactattcatgaatgctttccccatctcctcacaccatcattatattctacctggatgagggcagtgttctcccagggtgtcttcttgcatcctgtcgggcccaccctgctatctctcctccttattacacactcagatgctcagttacttcccatgagtctctctccttaaaattctcctctagatccctatcctagttaacagcataatgtcgcaattcattctaacaaagtccctaattatttgaccctgtctgttttttcccatcactgtcctactattcatcccttcattcaaacaactg

SEQ ID NO: 878834 - DNA, 606 bp, Homo sapiens
tttataatcaaaagattgagatctttaaaggacaaaatggaaaataaaattaggtttggggtaaggaatcctacttggacactacaaaaatagaaggaaaaaaaggtgaatgaataattggcaaaacaaactctttttcctgtaagttcccttttcccaaattcttgccatcatgctaaaaaaagttgtctcgtgggttgatttttctcagaatcctgatgcttgttgttaataagaatttttttcatgtgccaaagttttgtttttcgtgtgacttctgcggcaattttggtcttactgcaaaatatttttttaagtaccrtggtaaaagttactggtaataagccaaaaggagaatttaaggtgaacttctatacaatttacttttattgactaggggaaatcaaatgcattgcccaaggtaattgaagtcagattattgtaggagaaatatcaattctaattaaaaacaaagtgtgagtgcttatttccagtttcaaaacttacattttttaatttctacctcatcctttccccaacaagacatatttttgctatcaggctaacataaagtgctgctactgactgagccagcctaatggaatg

SEQ ID NO: 878835 - DNA, 606 bp, Homo sapiens
tttataatcaaaagattgagatctttaaaggacaaaatggaaaataaaattaggtttggggtaaggaatcctacttggacactacaaaaatagaaggaaaaaaaggtgaatgaataattggcaaaacaaactctttttcctgtaagttcccttttcccaaattcttgccatcatgctaaaaaaagttgtctcgtgggttgatttttctcagaatcctgatgcttgttgttaataagaatttttttcatgtgccaaagttttgtttttcgtgtgacttctgcggcaattttggtcttactgcaaaatatttttttaagtaccatggtaaaagttactggtaataagccaaaaggaraatttaaggtgaacttctatacaatttacttttattgactaggggaaatcaaatgcattgcccaaggtaattgaagtcagattattgtaggagaaatatcaattctaattaaaaacaaagtgtgagtgcttatttccagtttcaaaacttacattttttaatttctacctcatcctttccccaacaagacatatttttgctatcaggctaacataaagtgctgctactgactgagccagcctaatggaatg

SEQ ID NO: 878836 - DNA, 634 bp, Homo sapiens
catgagaattctgggagatacaattcaaattgagatttgggtgaggacagagccaaaccatatcattctgcccctggcccctctaaatctcatgtcctcatatttcaaaatcaatcgtaccttcccaacagtcccccaaagtcttaactcatttcaatattaatccaaaagtccatagtccaaagtcttacctgagacaaggcaagtcccttctgcctatgagccagtaaaatcaaaagcaagtgagttacttcctagctataatgggggtacaagtattgggtaaatatagctattccaaatgggataaattggccaaaacaaagggcaccaagtccctaggctgcacacagcatggggamcctgggcccagcccacaaaaccactttttcctcctgggcctccaggcctgttgtgggaggggctgctgtgaaggtctctgacatagcctggagacattttctccacagtcttggggattaacattaggctctttgttatctatgcacgtttctgcagccagctggaatttctccctagaaaatgggtttttcttttccatcacatagtcaagctgcaaggttttcaaacttttgtgctctgctttccttataaaactgaatgccttcaacag

SEQ ID NO: 878837 - DNA, 636 bp, Homo sapiens
gaccctgggcccagcccacaaaaccactttttcctcctgggcctccaggcctgttgtgggaggggctgctgtgaaggtctctgacatagcctggagacattttctccacagtcttggggattaacattaggctctttgttatctatgcacgtttctgcagccagctggaatttctccctagaaaatgggtttttcttttccatcacatagtcaagctgcaaggttttcaaacttttgtgctctgctttccttataaaactgaatgccttcaacagcacccaaatcatatcttgaatgctttgctgctyagaaatttcttccaccagataccctaagtcatctctctcaagttcaaagttccacaaatctctagggcaggggcaaaatgccaccagtctctttgctaaaatataatgagtcacctgtgctccagttcccaacaagttcctcatctctagctaagaccacttcagcctggaccttatttttcatattgctatcagcctttgggaaaagccattcaacaagtctttaggaagttccaaactttctcacattttcctatcttcttccgagccctccaaactcttccatcctctgcctgttacccagttccaaagtcactcccacattttt

SEQ ID NO: 878838 - DNA, 621 bp, Homo sapiens
gtcttccccagagcatccagataacagtccagcctagctaacacttcaatttcagccttaagaagccctaagtagagaatccagacaagttcatttggacttggtgaaaactcgctgtgtttaaatggactgtgagataataaatggccattgttttaaactgctatgtttgtggtaccttgttacccagcaatgatagctaatacaggcagttattgctacaataccatgtgktgctgatgtttcaggacaaataataaactaattatttgggctttcatgacacagtgagagagatgttattatactttttgttcaaccttggaataatgaaatctatggtataccagtaaaccacaatgagtattttacaagacgtataggcataataatataaaatcttatgtcttatatatactttatatatctatttgtagtctcataaatatacttatatgtatatgtgtgtagactaaaaaggagcattccaatctcaccaacacacacatatgcacacaccttttcctacatgtacttcttacaaataaaacaggaaaaagactctcaaatttaggaatttaatttttactcttcctactcagagaaatttctgcttgtgcg

SEQ ID NO: 878839 - DNA, 621 bp, Homo sapiens
gtcttccccagagcatccagataacagtccagcctagctaacacttcaatttcagccttaagaagccctaagtagagaatccagacaagttcatttggacttggtgaaaactcgctgtgtttaaatggactgtgagataataaatggccattgttttaaactgctatgtttgtggtaccttgttacccagcaatgatagctaatacaggcagttattgctacaataccatgtgttgctgatgtttcaggacaaataataaactaattatttgggctttcatgacacagtgagagagatgttattatactttttgttcaaccttggaataatgaaatctatggtataccagtaaaccacaatgagtattttacaagacrtataggcataataatataaaatcttatgtcttatatatactttatatatctatttgtagtctcataaatatacttatatgtatatgtgtgtagactaaaaaggagcattccaatctcaccaacacacacatatgcacacaccttttcctacatgtacttcttacaaataaaacaggaaaaagactctcaaatttaggaatttaatttttactcttcctactcagagaaatttctgcttgtgcg

SEQ ID NO: 878840 - DNA, 656 bp, Homo sapiens
ttgccctctctcaccactcctattcaacatagtattggatgttctggccagggcaatcaaacaagagaaagaaataaagcgtattcaaataggaagagaggaagtcaaattgcctctgtatgcagatgacatgattgtatatttagaaaaccccattgtctcagcccaaaatcttcttragctgataagcaacttcagcaaagtctcaggatacaaaattaatgtgcaaaaatcacaagcattctatacatcaatgatagacaaacagagagtcaaatcatgagtgaactcccattcacaattgctacaaagagaataaaatacctaggaatacaacttacaagggatatgaaggacctcttcagggagaactacaaaccactgctcaaggaaataagagaggactcaaacaaatggaaaacattccatgctcatgggtaggaagaatcaacgttgtcaaaatggccatactgcccaatgtaatttatagattcagtgttatccccatcaagctaccattgactttcttcacagaattaggaaaaaaactactttaaatttcatatgagaccaaaaaagagcccatgtagccaagacaatcttaagcaaaaagaacaaagctggaggcatcacgctacctgacttcaaaccatact

SEQ ID NO: 878841 - DNA, 698 bp, Homo sapiens
gtatacccaagtattgaaatagaggattcatgagaatcataatgactttagcacaccaattccagtctccataatggccttccaggactgcagggggccaatcagcgccttcctcctggagaaaacagtgattctaaagtttggaaaggctctcaaaagtagtaaaataggtcataaaacagagttaaatatgttttatatagcttcacagactgatgtgccrtagaatttattgaggtacttaaatggattttgggctggccccttgtgggacatctgattctgtctttatcctggaaaaagtgttaggcagcctagcaaggctgctttcctttacccaaaccaaggcacatttgagatttcacagggccatgctggtgcgaatgtctccagaagataagggtcattctagaagagagagaggctggattaagggtagaggaggcatgggaagttactgggcaaatgtccagcattggattagagactaattaaatacacatcctttattttctcatcttttttctgcctggcctctcaaaacgtagattgggaagactatatggagaatatatgtatatatatatagatatatacacacacacacacacacacacacacacacacacggaattcatatatatatgatgctttgtaaacttgtggccatctcacaacacaaaaaaacctgactgcaa

SEQ ID NO: 878842 - DNA, 650 bp, Homo sapiens
attgtcttggctatatgggatcttctttgattccatataaaatttaaagtggttttttctttccaattctttgaagaatatcaatggtagtatgatggaaatagcactgaatctataaattactttgggcagtatggtcattttcatgatactgattcttcttatccaygaggatggaacgtttttccatttgtttgtgtcctctcttatttccttgagcagtggtttgtagttttccttgaagaggtccttcacatcgcttgttagctgtattcctaggtattttgttatctttgtagcagttgtgaacatgagttcattcatgatttggctctctgcttgtctattggtgtatagaaacgcttgtgatttttggacattcattttgtatcctgaggctttgctgaagttgcaaataaatttctttttatttctaccagaaagagggtttattagaaagagtatgctactatattatgtaactcagtgtgcaatgatgactaaaactgagttgaagaaacagtgtttttgtctacctaaaagagtggcatcaatctgatagagaaatgactttctattggatacagaccaagcaggaggcttttctttttggacttaaaaactgggtaggccacgaaataggtatcaat

SEQ ID NO: 878843 - DNA, 650 bp, Homo sapiens
attgtcttggctatatgggatcttctttgattccatataaaatttaaagtggttttttctttccaattctttgaagaatatcaatggtagtatgatggaaatagcactgaatctataaattactttgggcagtatggtcattttcatgatactgattcttcttatccatgaggatggaacgtttttccatttgtttgtgtcctctcttatttccttgagcagtggtttgtagttttccttgaagaggtccttcacatcgcttgttagctgtattcctaggtattttgttatctttgtagcagttgtraacatgagttcattcatgatttggctctctgcttgtctattggtgtatagaaacgcttgtgatttttggacattcattttgtatcctgaggctttgctgaagttgcaaataaatttctttttatttctaccagaaagagggtttattagaaagagtatgctactatattatgtaactcagtgtgcaatgatgactaaaactgagttgaagaaacagtgtttttgtctacctaaaagagtggcatcaatctgatagagaaatgactttctattggatacagaccaagcaggaggcttttctttttggacttaaaaactgggtaggccacgaaataggtatcaat

SEQ ID NO: 878844 - DNA, 642 bp, Homo sapiens
ttttcattttaaattcttgcaatgttttaaacattatttgcatctatcacatttttccttgtggttaacctacttttgaatacacgtaactaattagcaaacatgatttttgtttgtttgcctagcataaagttttgtacctaacagtcatacactgagaagatcagaaagaaataataggaggtggtaaataagacatttcycttatttaacctccaacttattatcattctttagggaacttcatgaggatcaatgtaaaaagatttagagtaattatcagtggcactctaaagttgtctgcatacaaataggacactaataaatcaggtgtgtgtgactcaaagaaagtaattattagtaaatttgtctgtcaaatatatttcatttaaaattttctgactccaattaatttcatttcaacatgcagaaataatcccaagaagcttattactcattctgaagaaacagatgctgtaaaaaccaagaatagtggaataaaatctttttgttaaataagacatctagcaaaagatattcccttccatctgtggtctaattatcaagagattccaggatattagacttctagactggcatcatattttttaattactgaggaaagaaaaaggaactaaaaaa

SEQ ID NO: 878845 - DNA, 642 bp, Homo sapiens
ttttcattttaaattcttgcaatgttttaaacattatttgcatctatcacatttttccttgtggttaacctacttttgaatacacgtaactaattagcaaacatgatttttgtttgtttgcctagcataaagttttgtacctaacagtcatacactgagaagatcagaaagaaataataggaggtggtaaataagacatttctcttatttaacctccaacttattatcattctttagggaacttcatgaggatcaatgtaaaaagatttagagtaattatcagtggcactctaaagttgtctgcatacaaataggacactaataaatcaggtgtgtgtgactcaaagaaagtaattattagtaaatttgtctgtcaaatrtatttcatttaaaattttctgactccaattaatttcatttcaacatgcagaaataatcccaagaagcttattactcattctgaagaaacagatgctgtaaaaaccaagaatagtggaataaaatctttttgttaaataagacatctagcaaaagatattcccttccatctgtggtctaattatcaagagattccaggatattagacttctagactggcatcatattttttaattactgaggaaagaaaaaggaactaaaaaa

SEQ ID NO: 878846 - DNA, 642 bp, Homo sapiens
ttttcattttaaattcttgcaatgttttaaacattatttgcatctatcacatttttccttgtggttaacctacttttgaatacacgtaactaattagcaaacatgatttttgtttgtttgcctagcataaagttttgtacctaacagtcatacactgagaagatcagaaagaaataataggaggtggtaaataagacatttctcttatttaacctccaacttattatcattctttagggaacttcatgaggatcaatgtaaaaagatttagagtaattatcagtggcactctaaagttgtctgcatacaaataggacactaataaatcaggtgtgtgtgactcaaagaaagtaattattagtaaatttgtctgtcaaatatatttcatttaaaattttctgactccaattaatttcatttcaacatgcagaaataatcccaagaagcttattactcrttctgaagaaacagatgctgtaaaaaccaagaatagtggaataaaatctttttgttaaataagacatctagcaaaagatattcccttccatctgtggtctaattatcaagagattccaggatattagacttctagactggcatcatattttttaattactgaggaaagaaaaaggaactaaaaaa

SEQ ID NO: 878847 - DNA, 682 bp, Homo sapiens
gtttgttgtacatattatttcataacccaagtattaagccgaatacccaatagttaccttttctgttcttctccctcctcctaccccccacccctcaagtagaccccactgtctgttgttttcttcttcgtgttcgtaagttcttatcatttagctcctacatataaatgagaacatgcgtatttggttttctgttcctgcattagtttgctaaggataatagcctccagctctatccatgttcctgcaaaaggcatgacttgttctttrtggctgcatagtatgccatggtgtatacgtaccacattttctttatccagtctgtcactgatgggcatttaggttgactctatgtctttgctcttgtgaatagtgctgcaaagaacattcactagcacgtgtctttatggtagaatgatttatagtcatctgggtatatacccagtaatgggattactgggtcaaatggtagttctgattttagctctttgaggaattaacatgttgatttccacaatggttgaagtaatttacactcctaccaacagtgtataagggttcccttttctctgcgaccttgccagcacctgttattttttgactttttaatattagccattctgactggtgtaagatggtatctcattgtggttttggattgcatttctctaatgatcagtga

SEQ ID NO: 878848 - DNA, 609 bp, Homo sapiens
gaactgaagtaaagatgactcttgttatgttttagcaaagagactggtggcattttgcccctgccctagagatttgtggaactttgaacttgagagagatgatttaggatatctggtggaagaaatttctaagcagcaaagcattccagaagtgacttgggtgctgttaaaggcattcagtttcaaaagggaaaaaaagcataaaagtttggaaaatctgcagcctgacaatgtgatagaaaagaaaatcccattttctgaggagaaactcaagctagctgcagaaatttgcataaataatgaggagccaaatgtgaatcaccaagacaatggggaaaatgtctccagggtatgtcagagacctttcgggcagcccctcccattacaggcctaggaggawaaagtggtttcctgggccagggtcctgggtccctgtgctgtgtgtagcctagggacttggtgtcctgcatccaagccactccagccatggctgaaaggagccaacatagagctcaggctgtggcttcagagggtgcaagctccaagtcttggcagcttccatgtggtgttgtgcctgtggatgcgcagaagtcaaaaactgaggtttgg

SEQ ID NO: 878849 - DNA, 543 bp, Homo sapiens
cttaacgaaataaagcaagaagacaagatgagagaaaaaagaatgaaaaggaatgaacaaagcctccaagaaatatggaactatgtgaaaagaccaaacgtacattgatttgtgtacctgaaagtgatggggagaatggaatcaagttggaaaacactcttcagaatattatccaggagaacttccacaacctagtaagacaggccaacattcaaattcaggaattacagagaacaccacaagaatactccttgagaagagcaaccccaagacacgtaatcatcagattcaccaaggttgaaatggaggaaaawatgttaagggaagccagagagaaaggtcagattacccacaagggaagcccatcagactaacagaagatctcttggcagaaaccctacaagtcagaagagagtggggaccaatattcaacattcttaaagaaaagaattttcaacccagaatttcatatccagccaaactaagcttcataagcgaagggagaaataaaatcctttaaagacaggcaaatgctgagagatt

SEQ ID NO: 878850 - DNA, 543 bp, Homo sapiens
cttaacgaaataaagcaagaagacaagatgagagaaaaaagaatgaaaaggaatgaacaaagcctccaagaaatatggaactatgtgaaaagaccaaacgtacattgatttgtgtacctgaaagtgatggggagaatggaatcaagttggaaaacactcttcagaatattatccaggagaacttccacaacctagtaagacaggccaacattcaaattcaggaattacagagaacaccacaagaatactccttgagaagagcaaccccaagacacgtaatcatcagattcaccaaggttgaaatggaggaaaatatgttaagggaagccagagagaaaggtcagattacycacaagggaagcccatcagactaacagaagatctcttggcagaaaccctacaagtcagaagagagtggggaccaatattcaacattcttaaagaaaagaattttcaacccagaatttcatatccagccaaactaagcttcataagcgaagggagaaataaaatcctttaaagacaggcaaatgctgagagatt

SEQ ID NO: 878851 - DNA, 608 bp, Homo sapiens
ttctttgaaaccaatgagaacaaagacacaacataccagaatctctgggacacacttaaagcagtgtgtagagggaaatttatagcactaaatgcccacaagagaaagcaggaaagatctaacattgacaccctaacatcacaattaaaagaactagagaagcaagagcaaacacattcaaaagctagcagaaggcaagaaataactaagatcagagcagaactgaaggagatagagacacaaaaaaacccttcaaaaaaatcaatgaatccaggagctggttttttttgaaaagatcaacaaaattgataaaccrttagcaagataacaaagaagaaaagagagaagaatcaaatagatgcaataaaaaatgataaatggcttatcaccaccaaccccacagaaatacaaactaccatcagagaatactataaacatctctacgcaaataaactagaaaaatctagaggaaatggataagttcctggacacatacaccctcccaagactaaaccaggaagaagttgaatccctgaatagaccaataacaggctctgaaaatgaggcaataattaatagcctaccaaccaaaaaaagtccaggaccag

SEQ ID NO: 878852 - DNA, 681 bp, Homo sapiens
tcttctagattttctagtttatttgcatagaggtgtttatagtattgtctaatggtactttgtatttttgtggagtcagtggtgatatcccgtttagcaatttttattgtgtctatttgattattctctcttttattctttattagtctagctagcagtctatctattttgctaatttttttcaaaaagccagttcctggattcactgattttttgaagggtttttgatgactctrtctcctgcagttctgctctgatcttagttatttcttctgctagcttttggatttgtttgcttttgcttctctagctcttttaatcgtgatgttagggtgttgacttgagatctttctagctttctgatggggccatttagtgctataaacttccctcttaacactgctttagctgtgtcccagagattctggtacattctctttgttctcattggtttcaaagaacttcttgacttctgctttaatttcattatttacccacaagttattcaggagcaggttattcacttcgcatgtagttgtgtggttttgagtgagtgtcttaatcctgagtcccaattttattgcactgtggtgtgagagactgtttgttatgatttccattcttttgcatttgttgaggagtgttttacttccaattatgtggtcaatttttgaataagtg

SEQ ID NO: 878853 - DNA, 681 bp, Homo sapiens
tcttctagattttctagtttatttgcatagaggtgtttatagtattgtctaatggtactttgtatttttgtggagtcagtggtgatatcccgtttagcaatttttattgtgtctatttgattattctctcttttattctttattagtctagctagcagtctatctattttgctaatttttttcaaaaagccagttcctggattcactgattttttgaagggtttttgatgactctatctcctgcagttctgctctgatcttagttatttcttctgctagcttttggatttgtttgcttttgcttctctagctcttttaatygtgatgttagggtgttgacttgagatctttctagctttctgatggggccatttagtgctataaacttccctcttaacactgctttagctgtgtcccagagattctggtacattctctttgttctcattggtttcaaagaacttcttgacttctgctttaatttcattatttacccacaagttattcaggagcaggttattcacttcgcatgtagttgtgtggttttgagtgagtgtcttaatcctgagtcccaattttattgcactgtggtgtgagagactgtttgttatgatttccattcttttgcatttgttgaggagtgttttacttccaattatgtggtcaatttttgaataagtg

SEQ ID NO: 878854 - DNA, 600 bp, Homo sapiens
tcattctaaataagattaatagtagttgattatagagaaataagatagaaatatgaatagattctggtatagcagatcggagttcttttattctgctctgttgatctgttgccttgttcttatttccaggactaaactattataattatggttttatagtatattcattacctgacagagaaagtcaacatcttttatttaaaaaaattctacctagtctaaaatgtttatttttactgaaatatttctaaataattgttmactcaaaatatttacttgaaaatttactattctttaaatttttaaattatttttaggtaaattgccatctttacatttaatattctcatccataaagagggtctatcttttccatgaatgtatatctaatttatacttcagagtacactctttagtttttttcatcttaagacctgcagctttaacaaaattgttatacacacacacaaatacatttgatgtgaactctgaaagaatcacaatatattaccctactttatattttttaaaaagtccttcaagcttcttatcactgtccttactattgactggaattttatttttcattttttttaaatt

SEQ ID NO: 878855 - DNA, 701 bp, Homo sapiens
agtttcaggagatcatttgactcattattacgtcgatttgaaataatattgtacttaaaaaaaaccaaaaacgagtggaacttttatgtggtgagttctacatatcatgatgaggatttgagacttttctttaggccataaaaggctatsaaaatgttttaaaagagtagtgacacattgtgatttgcctaatgagaaagattgtcttaaatattaatataacagaggctgagagactatgagagctcatcaggatcacgcagtgtaaataagaaaggctgagaatcaaagtgaaaataaataagcaacttcttcctctaagatatgagaaattgttgtttttcccaacatgtgtccatgtgttctcattgttcagctcccacttataagtgagaacatgtggtatttggttttctgttcctgtgttagttgactgaggataacggcttccaactccatccatgtccctgaaaaggacataatctcattcctttttatggctgcatagtattccacggtgtatatgtaccaaattttctttatccattctatcattgatgggcatttgggttgattccatgtcttcactattgtgaatagtgctgcaatgaacatacacatgcatgtatctttataataggatgatttatattactttgcgtatatacctagtaatgggattgctgggtcaaatggtgttt

SEQ ID NO: 878856 - DNA, 569 bp, Homo sapiens
atattagatcaacgagatagaaaattaacaaggatattcaggacttgaactcaactctggactaaacagacctatctacagaactctccaccccaaatcaacagaatgtacattcatctcagcaccacatagcacttactctaaaatagaccacataattggaagtaaaacactcctcagcaaatgcaaaaggagaagaatcataacaaacatccactcagaccacagtgcaatcaaattagaactcaggattaagaaactcactcaaaactgcatgtctacatggaaactgaacaacctgctcctgaatgactactggtaaatgacaaaattaaggcagaaataacgaagttctttgaaaccagtgagaacaaagatacaacgtwccagaatctccaggacacagctaaagcagtgttcaggggaaatttgtagcactaaatgcccacatcagaaagcaggaaaggtctaaaatcgacacactaacatcacaatttaaagaaccagaaaagcaagaccaaacaaattcaaaagctagcagaagacaagaaatagctaagatcagagca

SEQ ID NO: 878857 - DNA, 703 bp, Homo sapiens
tatgtgagtctgagtggagcaggccagaaagatctaccctcagtgtttcagtgcttcagagatcacagagtaagtgaaaatgcaggtgaaaaatacaagagatctcctctgccaaattattcaattgtgtacaatttatgcctcttcacatataacaccgtggttgccttcgagcatgtgacaccgtttgtcagagaattaaaagaatttgacaagctcagcaaccttctgaaccagacatttgctgatattgagattcctccaatgtcataaccacataaaatggtgaactactcttggttaaagatttgactgtcaagaaagatagacttcttatatttaccactaaatctaacatagaaaaactagtgcgtgtttcgctttggctattggatggcactttcaagactgtccctactttttaaaatcagtgatatacaattcatgcccctgttggatctggaaattctaaaayttatctacttctttatatattaatgactggaaacaaatgaagtattttataatcacttatttgaagatttggtggactgtgcagaagaaaatggatttcttggaactcccaaaccaaaatgacaggtttggaattaagtgtaatcaaagcttctaaaagtgaacctgaaagagttatcaataaaaattttttttcatgtagtctaacacatgtggcagaaattcagat

SEQ ID NO: 878858 - DNA, 636 bp, Homo sapiens
ccaaaaaccacatatatccttaactactgctactgcaacatccttttcctctacaatcaaggatgacctgcatcaactttttttttatttgatagaagcagtaaaggattcatggatttctcaagcacctatataatgatatacataaaaccaagcttctaaatcctgtgaacttccatgactaagtggcctarctgcacaggcttaggacagttgtatgctggaaatggaattatataggctagattcatttttgttttccattttactttctaaaaacaaacacaaaagcaacaatgcaaggaaatggcaaatggggactttgccactagagagacacctgtaaattgatgtggttaatagtgggtgtatgggcagtaggcagttgggcctagggagcatcattgtgctttcagaagaatatctgagtccagccatccacctcaccatttgtttgcaattatatatctggagtaagtgatgtttgggattggttttgcatgagtagaaatgttgtgttctggtaagaattgggagcttgtgtctggaatcagtaaactttgcaagtgagggaaacagggacactgaagcattgctacctgtgcagatcacagatctacctgttgtagatgcaga

SEQ ID NO: 878859 - DNA, 657 bp, Homo sapiens
cccttcctggctaaactgcctgactccagcctcccgccctccaatctgatctcatactctcaattggtgcgtttttcttaaacactgcatttccctgtcattcctctgcatccaggttttgagacctccatactgttcattgctttttcttagtttcagatttgaagacaaacagttgctctttgagtgccaatatgtgtcaggtgccatgttgaagtctagttggtgatggctagagtcatcccggcaatcaaagggaatcttcgcactcccacctcccaccatcccccaagttgggaagagagaccaacattcaaataatagaacgcataagggaatagagagacattggaaaattataagtgctgcctgtgtgctgggaattgaaaagcaggccctaggaaaccagattcttacatttatatagggaygtgtgctgattttaaagctctgcctatcttaaggctcaatagtggtaaattctcctaagaacacgtaactaataactggcctggtgaagaagacaaagaaaatttgccattgatcatgtttcccctcctgggtcacaagctttctgaagaaggggccagctgttattcttccataaatcttatagtgctgaaaagattgctgaactcctaggagtttttagcaaat

SEQ ID NO: 878860 - DNA, 657 bp, Homo sapiens
cccttcctggctaaactgcctgactccagcctcccgccctccaatctgatctcatactctcaattggtgcgtttttcttaaacactgcatttccctgtcattcctctgcatccaggttttgagacctccatactgttcattgctttttcttagtttcagatttgaagacaaacagttgctctttgagtgccaatatgtgtcaggtgccatgttgaagtctagttggtgatggctagagtcatcccggcaatcaaagggaatcttcgcactcccacctcccaccatcccccaagttgggaagagagaccaacattcaaataatagaacgcataagggaatagagagacattggaaaattataagtgctgcctgtgtgctgggaattgaaaagcaggccctaggaaaccagattcttacatttatatagggatrtgtgctgattttaaagctctgcctatcttaaggctcaatagtggtaaattctcctaagaacacgtaactaataactggcctggtgaagaagacaaagaaaatttgccattgatcatgtttcccctcctgggtcacaagctttctgaagaaggggccagctgttattcttccataaatcttatagtgctgaaaagattgctgaactcctaggagtttttagcaaat

SEQ ID NO: 878861 - DNA, 641 bp, Homo sapiens
gaatgcagaagcagaccaggagtccagctttctcttatgaagccataattattaggctattttcatttactaaaagtgaaaaaagaatgccactcttctcactcatattttggttctgaaatattttttcatttcaaatatgctaacaatgttaatatgcaatgagcttattttttaatgaattaataaaagtataggccatcaccctattaaattacaagttcttgaaagatctttrcctactttacctttgtgtcctaaaaactgataaatgaatgaatgaatgctgaatgccaaaataatgatttagacataaactgtataggagtccagaggaaacacctatcctggggaaatttgatgaagaaagtgagatttgaggtggtgcttgaagacaggggaaggcttccaccaggaaaataaaactagaatggacccttccagtggggaaataacatgatcaaatgcacagaatcaggaatttttaaagtgtacttaaaaaaaactcatagaaagattaatgctaaagctggcattagtaagattcctatgaggaggtgcaaacgagcagataaagaaatctggacattttggtaacgttttctttgtagacttaatttgaagaaatgatcatataaagc

SEQ ID NO: 878862 - DNA, 667 bp, Homo sapiens
catcatcatccatcataaatgatcttatatgcacacataaatgcatgtacgatgaccaaagatgggtcacatcagaatgaatatataaaggattttattcacattatataaagagcagtgcatcatttttttctttgccccagycccctttggtgaaaatatcagccattcagttgtgataatcacagtgttatcaacctagtagagacaccagcgcagcagaatactataaaaggctaagttttttttttaatggacttcagcaatctattgaaaataaaaatgtaattagtgtggcaaaacaatagttcacatcttctaattactgttctattttttgacagaatgttttaattattgttttctttcctcttctcttctgtttctattgatttgttgccagtttaattaagtcagtaggacctcccagttctccataagttaccctcaggggcttctgtctgcttcattgttttaaagtaaaccagatctccaaatacctataaaacaaacccagaagttgaagggatatttttaaatgagaaaaaactagaaggaataaagaataagacatacaattcaaggtataaagggaagattagacagaaaaccagtttctaattttagagctaaaggaataattattattaataaatatgctacagac

SEQ ID NO: 878863 - DNA, 667 bp, Homo sapiens
catcatcatccatcataaatgatcttatatgcacacataaatgcatgtacgatgaccaaagatgggtcacatcagaatgaatatataaaggattttattcacattatataaagagcagtgcatcatttttttctttgccccagccccctttggtgaaaatatcagccattcagttgtgataatcacagtgttatcaacctagtagagacaccagcgcagcagaatactataaaaggctaagttttttttttaatggacttcagcaatctattgaaaataaaaatgtaattagtgtggcaaaacaatagttcacatcttctaattactgttctattttttgacagaatgttttaattattgttytctttcctcttctcttctgtttctattgatttgttgccagtttaattaagtcagtaggacctcccagttctccataagttaccctcaggggcttctgtctgcttcattgttttaaagtaaaccagatctccaaatacctataaaacaaacccagaagttgaagggatatttttaaatgagaaaaaactagaaggaataaagaataagacatacaattcaaggtataaagggaagattagacagaaaaccagtttctaattttagagctaaaggaataattattattaataaatatgctacagac

SEQ ID NO: 878864 - DNA, 605 bp, Homo sapiens
gaaggtaaggatatccatattgaccactttcatccatcaatgtagtggaggtcttatatacagagagaaagagaaggcaggagaaaaagaggaaggaaaaggaaattaagaagtataactgcctttattagaagatgttatgctcctgtatgtgaaaataccaagaattacacatacacgtgcatacacacacatacacatgcacacacatacacatgcatacacattcacacacacaactatggaggctaataaagattaataccagatacatatacaaaaatatacatttttgtagtatrcaatggataatacaaatgaaattaagaaaataatttcatttagaatagcttcaaaaagaatagatacttagaaacacatgtcacaatgcaaaatttgtatactaaaagctgcaaaatattgctgaaagaaatcaaaggacatataaataaatggagagacatttcatgagtagaagactcaatgttgtcaagatgttagttcttcccaaattaaaatataaattcagtacaattcctacacaaatcccagcatacgttttttgtagaaattgacagtctgatcctataattcatgcagaatgt

SEQ ID NO: 878865 - DNA, 610 bp, Homo sapiens
caaagcattaatgcttgtgctcagggtagctcaagtcctggtaacatccatctttcaatcactttccatgatatttttttcttgaatcttctcagcccctttctttattgaattgctcttctcctctcctacttataaaattaagacctctcctatccacaaaacaaaatacatgtgaattasctacagatttgtgtgtgtgtttgtataaatgctgaccacttgcatcaaccttatatgttttgaatatataacaaagagaatgaaatacaaaatacataggaatactacagaaaaccccaagccttctttgactctttaagaaaagtgccaatagcaagaatatttcaaaggctttgtgtgtatgtttgaatgaataactcacatcaaagcaactcacatactaaatatcattccataattataacacatccggaagtaggcaaatttaatattgtttgctctttcataaggcaactgatgattaagtgatgaatcaagtcccaacagtgattaatcggcaaggctaagatttgaacttaagttatctgatccaaagtctaaaatttactaccagacatactaattccccagcatagcaatggctgtc

SEQ ID NO: 878866 - DNA, 504 bp, Homo sapiens
gagggaggacaagaagcactgaggtccaacctcgtgagttcaaaagccctcggacgggcacggtggctcacgcctgtaatcccagcactttgggaggccgaggtgggcagatcacgaagttaggagatcaagacgatcccggctaacacagtgaaaccccgtctctaccaaaaaaatacaaaaaaattagctgggcatggtggctggcacctgtagttccagctagttgggaggctgaggcaggagaatggcgtgaacccgggaggagaagcttgcagtgagcggagttgcactccagcctgggygacagagtgagaccccatctcaaaaaataaagaaaatgatagtaaaaaaaaaaaaaaagaagaagaagaagaagccctcatcttggaagtgcatcctccaccctaagctgtccccagtgggtatcacatgcatcagggaaaagctgcctatccaagcccttcaaaatttctgacacacaaaattgtgagaaaagccagt

SEQ ID NO: 878867 - DNA, 425 bp, Homo sapiens
gctagtttaaaaaactcataggaagatcaatgaaactcccttgcagaggttgtaggagaacctgcttctgtaaattacagcactacacagtttccttagcattataggaggattttcccaggacaggattttaaaatgataaaygctggcttattttagagggttactgttgtctcttgcgaaatctttttactatctggccatctaggcattgagggccaggattattaaccatctttaactgtatgcatacagatgctactcacctgtgcccatttgagaagaactttacaattctcttttgattttgttgttcagggtttacactgaagctactgttttctctatctacagcatcttaacatttatgatatgtctcaacccatctgaagcccagaacttttgttctttgtcttttctggata

SEQ ID NO: 878868 - DNA, 538 bp, Homo sapiens
ttcacaatagcaaagacttagaaccaacccaaatgaccatcaatgataggctagataaagaaaatgtggcatacgcacaccatggaatagtatgcagccataaaaaaggatgagctcatgtcctttgcagggacatggaggaagctggaaaacaccattttcagcaaattaacacaggaacagaaaaccaaacactgcatgttctcactcataaaggggagctgaacaatgagaacacatggacacagggagtggaacatcacacaccagggcctgtygggtggtgggggagctaggggagggatagcattaggagaaatacctaatgtagatgacagattgatgggtgcagcaaaccaccacggtatgttatacctatgtaacaaacctacatgttctacacatgtatcccagaatttaaactataattaaaaaaaaagaaatggtgggagatgtcttcacaatatatcatgcttccagatcctttctgataaaattatacactaatgctaatgatatattaaaggacaataccaaa

SEQ ID NO: 878869 - DNA, 642 bp, Homo sapiens
agctgcaagcattttacaataaactgctaggcagggctgcattcatttagtcatgagtcaatacaaagactaggtctgaatgccttggatgtcctccaaccctagtcaccaccttaaaacacacgaccaatttctctatagtgccttcggccagccatctaacacaaagagggctactctaattcacagtatgtcctcaacttttgaacatccagttttatcccataatcaccactaaatctttttttttaaattctttatcatgcactccaaaagggttggttttgatgctttccctcctatttcctcccttgcaacgcactttcactctcactttcactctcagatccaccagacggggtcctattacaggagtttcrgacactgctcagccaggaacgtgccttcccctgtcatagcctgctgcggctacgaagctggtcctatcagccttatgcaacgtcctcagtctgatttccccaacactcgccttggagcacacagaccatgctagggatctatgcctccccacgtcactccctgcattggcctctcccaagaccatctctttcatgccatttcacacatctcccttgccccaggactcctaattggacaaaacaagcctctctcatgtcccag

SEQ ID NO: 878870 - DNA, 699 bp, Homo sapiens
gatgctaaaaatcatatggaattacaatctcaaattaccaaaacaatgttgaaaaggaagaacaaaattggaggcactctcacttctcaatttcaaaagtgccacaaatcaaacagtaatcaaaatggtgtactgacagaagaacagaaatacagaacaatgaaatagaattgagagttcagagataagcccatatatttacggttaactgactttcaacaaggatgccaagaccattcagtgtggaaaagaatggtctcttcaacaaatgttcttggacaaccagacagccacwtgcaaaatatgaagtataaggttgaacccatacctcatactatatatacaattagctcaaaatgaatcttagacgtaagtgtaatagctaaaactacagaaggagtaaatcttgatgacctcagatttggcaacatattcttagaaatgccactgaaagtacaagaaacacaaggaaaaaataggtaaattggacatcatcaaaattaaaatcaactgggcatcagaggatattattaagaaagtgaggaaacaacctataaaatggaagaaatatttgcatatcgcatattaacaagaatacagtatttggaatatataaagaactcttacaacaacaccaaaaagacacacaaccaaattttaaattgagcaaaggacttgaataaacatttctccaaagaa

SEQ ID NO: 878871 - DNA, 627 bp, Homo sapiens
gcgcatcacttgaggtcaagagtttgagaccagcctggccaatgtggcaaaaccccgtctctactgaaaatacaaaaattagccaggcatggtggcatatgcctgtaatctcagctactcgggaggctgaggcatgagaatcgcttgaacccaggaggcagaggttgcagtgagctgagattgtgccmctgcactccagcctgggtaacatagtaaaactgtgtcaaaaaaaaaaaaaattgttctgagctaaggcccatagacttcaccttcaccagactgtctattcaatggtataaaaaaggtcaaatgtccctactatagagagagtctaatcttttctagggcctgcaagattgtataaagcagagatgatatattaatgaaggagggtgaacagaaaaaaggaggagagatgaagcccagggcaaggaaatcagggaattgcggggaagataatatcaagtgttgcatgggttggcgtggagaaatagaaggtgaaaagttagggatagggagaaagtaaggaaagtaagaaaataggtgaaaaatgaaaaggggaattttgaagggttggttttattacaaatgggatcccctttgatcctcttagaaaaatactaaaaa

SEQ ID NO: 878872 - DNA, 588 bp, Homo sapiens
cacaccatgaccttttgctccaagaaccaccacagaaacacaccaggataaaacaaaagaattcacagatcctttgaaagaagtgccatgccactgcaaattccatgggacttgtgaaaaactgtgagtttcccaaatgcaagagggaggaaaacctgcatccaaacacacatccccactggggagtctgaaattccagatcacaggagaaggatttaaccttacttacagctgaaatgaacttagggagccacgagaaatataaaagttgaagcataagtgggaagagccttgtaggcactcccagtctccagctcaagaycagggaagccatccaggactacatctcacagggggcctcaggaaaggcagccagcaaaattaaagaggagtcacagggtgaaagaagcttccaaatgaaatttgtaatagttttgactgggcacaaattttcttgagcagtatctgggaagctaatgggaactgctgcagatacaagcacaggagccactgatgacattgtgggcaggtggaggtaggtaaggcctaaaagtcatgcctactttctcaacaggaaagcttacaacc

SEQ ID NO: 878873 - DNA, 533 bp, Homo sapiens
ttggaatttgtgttttctagaccagtacttctccaaattaaagcaaatttaggctgggcatggtgtcccatgtctataatctcagcactttggaaggccgaggagggcagatcacttgaggtcaggagttcaagaccagctgacccaacattgtgaaaccctgtctctactaaaaatacaaaaattagccgggcatgatggcatgtgcctgtaatcccagctactttggaggccgaggcaagataatcgcttgaactggagaggtggaagttgcagtgagccgagattgcaccactgagctccagcctgggcaacagarcaagactctgtctcaaaaaaaaaaaaaaaaaaaaaagcgaatttagttcactttggtattgtgtcaaaatgttgattcttttaaagtaaatctaaagaatttacgtgtagttgaagcttgtcatctgttaatttttttaattaaaatataatatttagattcagagtaaatctaaagtgagacctgaagctgctctcaggtgatactgatgctg

SEQ ID NO: 878874 - DNA, 626 bp, Homo sapiens
ctcaaatttaaaaatagaaaagaacaccagacagagaaaaaagaaacaaaacaaatacattaaaaactgaccctgctgaagcagatgccactctttgaaataacaaagaaactgctgaacacgcctttaattcagtgaggcagtaggtgtttttttctttgtttgtttttgtttcttttyttttttttttttttttgagacggagtttcgctcttgtcacccaggctggagtgtagtggcacaatctgggctcactgcaacctccgccttccaggtccaagcaattctcttgcctcagcctcctgagtagctgggatcacaggtgcacaccaccacagcctgctaattttgtattttttttagtggaggcggggtttctctatgttggtcaggctagtctcgaactcccaacctcaggtggtctgctcacctgggcctcccaaagtgctgggattacaggcgtgagccaccacgttaaaaagggaaacttcctatttgccctctaaaggtttgcagaaaatgaatggacaaaacataaattaatagaagaaagaggcaaaaaaaaattctgtaaaatgtaggcgaaaaatcacagggtctcactcagttacccagcatgaagtgca

SEQ ID NO: 878875 - DNA, 645 bp, Homo sapiens
ttgtatgcatctaggaatttgccaatttctactaggctttccaatttattggcatataataaccagttatgatcctttgaatttctgaagtattagttgtaatgtctcctttttttatctgttgattttatttatttgaatcttgtctctcttttcttagttagcctggttaaaagtttgtcaattttgttttgctttccagaaaaccaacttttcgtttaatcttgwgtgttttttctttcaattttatttctgctacgatcttatttattttcttattttcggtttagtttgttcttactttactagttctttaagatgtattgtttatttgaagtttttcttttgtttggatagtaggcacttatagctgtaaatctctgcctttgtactgctttctgcataacaagttttggtatactgtgttttcgttaccctttgtttcatgaaatttttgaatttctgtcttagtatgttcattgacccgctagtcatttattcaggagggtagtgtttaactttcatgtgattgtattgtttccaaaattactcttcttattgatatctagttttattcctttgtagtcaaagaagatggccacggagatagcagcatggtcaagtaggagccggccattggcaaga

SEQ ID NO: 878876 - DNA, 613 bp, Homo sapiens
attcataaatctacagtcgaaattctcatcagagacaaagcaagtcccttctgcctatgaacctgcaaaatcaaaagcaagttagttacttcctaggtacaatgggggtacaggcgttggtaaaaacacccattacaagtgggagaaacygtccaaacctaagagtctacaggccccatggaaatccaagatccagaggggcagtcatatagtaaagctccaaaatgatcttctttgactccatgtctcacatccaggtcacactgatgaaagaggtgggctcctatgacctttggcagctctgcccctgtggttttgcagtgtacaggcccccttccggctgctttcatgggctggcactgagtgtctgtggcttttccaggtgcacagtgcaagctgttgatgaatctaccattctggggtctggaggatgttggccctctcctccctgctccactagccagtgctccagttgggactctgtgtgggggctccaaccccacatttcccttctgcactgccctagcagaggttctccataagagctccacccctgcagcagacttctgcctaaacttccaggcattttcatacatcctctgaatctaggcag

SEQ ID NO: 878877 - DNA, 675 bp, Homo sapiens
cgcccaggctggagtgcagtggagtgatctcggctcactgtagtctctgcctcctaggttcaagaaattctcctgcctcagcctcctgagtagtgaggattacaggctaatttttgtatttttagtagacacagggtttcaccatgttggccaggctggtctcgaacccctgacctcaagtgatccgcccacttcggcctcccaaagtgctgggattacaggcatgagtcactgcatctggccagctcattagacttcctgataagatttcaaattttatgtctttgtccraagtcagatctataactttaaaaatataaactagttattttactttgttttcatttgtttttctttctgattttttaagtaattaattctaacaaaatggtctacttggctgtgctcatgtgtatagctgatgtcagcatattaatagccagatgtagatgacatatcttgatctctggtctcatcgctctactgttaccgtcaacattgttaccaagcatgagctgggcaatgcaaggcaattattttctgacccttgcagtctgtataatttggttatcccctagatacaatctctataaatagtgtttgttgggttctggaaactagagtggacagatggcatgggggacataatcaccaatcttacccaagtatgtaaca

SEQ ID NO: 878878 - DNA, 584 bp, Homo sapiens
tcctttacagataagcaaatgctgagagattttgtcaccaccaggcctgtcctacaagagctcctgaaggaagcactaaacatggaaaggaaaaactggtaccagccactgcaaaaacataccaaattgtaaagaccatcaatgctaggaagaaactgcatcaactaacgagcaaaataaccagctaacatcataatgacaggatcaaattcacacataacaatattaaccttaaatgtaaatggactaaatgctccaattaaaagacacagactggtaaattggataaagagtcaagacccatcagtgtgctgtattcaggaaacccatctcacatgcagagacacagacaggctcaaaagaaagggatggaggaagatctaccaagcaaatggaaaacaaaaaaaggcaggggttggaatcctagtctcygataaaatagactttaaaccaataaagatcaaaagagacaaagaaggccattacataatggtaaagggatcaattcaacaagaagatctaactatcgtaaatatttatgcacccaatacaggagcacccagattcataaagcaagtccttag

SEQ ID NO: 878879 - DNA, 706 bp, Homo sapiens
gagcaatttaaaacaggaagttaggatataatgcagtttgtaaagttaaaatattgtaaagttagaataagaaatttaaagtaatcttaaggtgtgaaaaaatttagaactatgccatattgttttttttaacttttaaaaaaggtacttgtactactgagtataaagttccttatgaattccatcagctagaacatattagaaactatgtttcctttatacagacaaacttttatacacatatacttatgtgtgtatgtgtgtgtgtatatatatakagagagaggtatgtatatatgtacacacacacagcacacttgacacctaaatgttatgtcgaatattttctacattttgtttttacattgtaatactgtattttcagcccaattaaagagattgtttcgaaaagtcaccactatttttaacacttaatgcaaacagatgatgcaagtggtagtgaagggaagagataaaatttaatgaagcgacccccaatttttttgtccagcattgtccctaagtgcacacagggaaatttcaaagttccttaggatctcccttttgttttccctcacttgtcattcacagtggaataaaatccttgagctatggagctacctgattctgaggtcagttcatttttcagtgaaagaactatttctaggttcattcaaaatatcaatttttgtagtaattttcattt

SEQ ID NO: 878880 - DNA, 561 bp, Homo sapiens
atacagacattgattcagggaagcactcaagctggtacctaggactggggggtgtctcacatcctagttatgtgcttatgggtccttaggtaatgagatgatacacataatgcaaaattcaatgaggataaatgtaaagacacatgctttttaaaaaacacaaataaaacctaatacatatcaaaattagttcagttcacttyaaaaagggttggagattggattgtctacaagtcctattagggccaagaaaatactggaagtgaccaaaaagataatctaatcttacctacataaatagaaaaaaaacatattgtatagccaatattcaaatcaagacagatttgtatttcattctattcggtatatctctgaccatatcagggagaacatgggcaaactatttcacctccttttgcctcagttttttatttataaaatatgtataataaaggaacttacaacataaagttgttgtgagaagtgagtaaatatatgaaaaacataatagttcttacataggataagtgccaaaaaagtgtttataaaataaaaaattat

SEQ ID NO: 878881 - DNA, 578 bp, Homo sapiens
tgaaagcctttcccgtaagatctggaacacaacaagtatgcccacttttaccactgttattcaagatagtactgaaagtcctagctagagcaatcagaaaagaacaaaataaaggacatccaaattggaagccaagaagtcaaattatccttgttygcagatgatatgaccttatatctggaaaaacctaaagactccacacaaaaaaaatatcaggactgataaattcagtaaagttgcaggatacacaatcaacatacaaaaatcagtggcatttctatatgacaacaatgaacaatctgaaaaaaaatcaagaaaataccccatttacctagctacaaataaaataaaatacctaggaattaaccaaataagtgaaagattgctctaatgaaaactgtaaaacattgatgaaaaaaattgaagagaacacacgcacacaaatggaaagatatcccgtgttcttagattggaagaatcaatattgttaaaatgtccctaatgcccaaagcaatctacagatttaatgcaatctctatcagaataccagtgacatccttcacagaaatagcgaaaaa

SEQ ID NO: 878882 - DNA, 688 bp, Homo sapiens
actcatgccattagtggaagtagactgggaagtggcattttgtaatgcaattgtcatcccctctcctgtgcctgatgtcacagtatgtcttataatgtgaagggctctggaagaacctttgtctctgggtaaagcctgcagctgtggaaccagtcacccatggagaataattttactatcatcagattgtttgcttaccaagttgcttccactctgtatattcttttatttctttgttctttcacttactcattcattcaataaatattttagtgcctccacagcttggagggtttggtttgtgttagtggtaaccaagaccattggaggaggcttgatytcttctttctgagcttatcaaaaggataattgagttgggaacaattgagtttgcatcatggatataactttggaaactttactgaacatttagtttaaatatacatatatcaaactacagtgtctataaagatttgataatatgcttagtttgtaaattgcaatcctttctcactgaaactcaagtaattgacagtagaaggatggggtttaagatctcaaactttgggcaaaaattcgatcaacccccaagtcagcatcaatccttgccaaaattgcaaataagaattttgtccttagtacctcccaagtgcaaattccccttcccttctttcataattaattcttg

SEQ ID NO: 878883 - DNA, 684 bp, Homo sapiens
tttcatggtgtacatgtaccacatgtttaaaaactaatccagagtgaatagacacacaaaggttgattctatgtctttgctagtgtgaatagtactgcaatgaacatacaagtgcatgtgtctttttggtagaatgatttattttccttcagatatatatacccattaatggaactgatgggttgaatggtagttttgttttaagctctttgagaaatctccaaactgccttccayagtggctgaactaatttacattctcaccaacaatgtataagcattctcttttctctgcagctttgccagcatctgttttttttttactttttaataataataataatggtcattctgactgacgtgagatggtatttcattgtggttttaatttgtatttctctgatgattggtgatgtttagcatcttttcatttgtttgttggctgtgtgtatgtctttttttgagaaatatctgctcatgtcctttgcccgtttttgaatagagttgtttgttttttgcttattgatttgcttaagttccttatagattctggatattagacctttgacaaatgcatagtttacaaatattttctcccattctgtaggttgcctgtttattctgttgatagtttcttttatggtgcagaagctctttagtttacttaggtcccacttgtcaagtt

SEQ ID NO: 878884 - DNA, 684 bp, Homo sapiens
tttcatggtgtacatgtaccacatgtttaaaaactaatccagagtgaatagacacacaaaggttgattctatgtctttgctagtgtgaatagtactgcaatgaacatacaagtgcatgtgtctttttggtagaatgatttattttccttcagatatatatacccattaatggaactgatgggttgaatggtagttttgttttaagctctttgagaaatctccaaactgccttccatagtggctgaactaatttacattctcaccaacaatgtataagcattctcttttctctgcagctttgccagcatctgttttttttttactttttaataataataataatggtcattctgactgacgtgagatggtatttcattgtggttttaatttgtatttctctgatgattggtgatgtttagcatcttttcatttgtttgttggctgtgtgtatgtctttttttgagaaayatctgctcatgtcctttgcccgtttttgaatagagttgtttgttttttgcttattgatttgcttaagttccttatagattctggatattagacctttgacaaatgcatagtttacaaatattttctcccattctgtaggttgcctgtttattctgttgatagtttcttttatggtgcagaagctctttagtttacttaggtcccacttgtcaagtt

SEQ ID NO: 878885 - DNA, 684 bp, Homo sapiens
tttcatggtgtacatgtaccacatgtttaaaaactaatccagagtgaatagacacacaaaggttgattctatgtctttgctagtgtgaatagtactgcaatgaacatacaagtgcatgtgtctttttggtagaatgatttattttccttcagatatatatacccattaatggaactgatgggttgaatggtagttttgttttaagctctttgagaaatctccaaactgccttccatagtggctgaactaatttacattctcaccaacaatgtataagcattctcttttctctgcagctttgccagcatctgttttttttttactttttaataataataataatggtcattctgactgacgtgagatggtatttcattgtggttttaatttgtatttctctgatgattggtgatgtttagcatcttttcatttgtttgttggctgtgtgtatgtctttttttgagaaatatctgytcatgtcctttgcccgtttttgaatagagttgtttgttttttgcttattgatttgcttaagttccttatagattctggatattagacctttgacaaatgcatagtttacaaatattttctcccattctgtaggttgcctgtttattctgttgatagtttcttttatggtgcagaagctctttagtttacttaggtcccacttgtcaagtt

SEQ ID NO: 878886 - DNA, 684 bp, Homo sapiens
tttcatggtgtacatgtaccacatgtttaaaaactaatccagagtgaatagacacacaaaggttgattctatgtctttgctagtgtgaatagtactgcaatgaacatacaagtgcatgtgtctttttggtagaatgatttattttccttcagatatatatacccattaatggaactgatgggttgaatggtagttttgttttaagctctttgagaaatctccaaactgccttccatagtggctgaactaatttacattctcaccaacaatgtataagcattctcttttctctgcagctttgccagcatctgttttttttttactttttaataataataataatggtcattctgactgacgtgagatggtatttcattgtggttttaatttgtatttctctgatgattggtgatgtttagcatcttttcatttgtttgttggctgtgtgtatgtctttttttgagaaatatctgctcatgtcctttgcccgtttttgaatagagttgtttgttttttgcttattgatttgcytaagttccttatagattctggatattagacctttgacaaatgcatagtttacaaatattttctcccattctgtaggttgcctgtttattctgttgatagtttcttttatggtgcagaagctctttagtttacttaggtcccacttgtcaagtt

SEQ ID NO: 878887 - DNA, 585 bp, Homo sapiens
acacggtgctaagaggaaagttcatagccctaaatccctacatcaaaaagactgaacgagcacaaactgacattctaaggtcacacctcaaggaaccagagaaacaggaacaaaccgaacccaaacccagcagaagaarggacataaccaagatcagagcagaactaaatgaaattgaaacaaaaaaaaatacaaaagataaatgaaacaaaaagctggttctttgaagagataaataaaattgatagatcattagcaagattaaccaagaaaagcagagagaaaattacagttgacaccactgaaatacaaaagatcattcaaggctactgtgagcacctttatgcacataaactaggaaacctagaaaaggtggataaattcctagaaaaatacaaccctcctagcttaaatcaagaagaattagacatcctgaacagaccaataacaagcagtgagattgaaatggtaattgaaaaagctaccaagaaacaaaagctcaggaccagacggattcacagcagaattctaccagacattcaaagaagaattggtaccaatccttttgacactattccacaaggc

SEQ ID NO: 878888 - DNA, 688 bp, Homo sapiens
ggcttatgatagggcctgtcatccaaaacccttctgtttacctctcctgcccatctatcttaccacctagactcctttttccttcttccctactcacactttctaggcacattaagccatgtatgaccgctgggccttccctcttctagcctcaagactttagtacatgctgttttcatagattggagccctgtacctttcctcttatccccctcagcctgactaacttctgcttagccttcaggtctctgcctcgttatcacacctgtctgcaggaagctttccctgatactccaaatcttagttttatgcccctatatgtctcttcatggaaccctatggttactctcattgcagtactttccacatggcactgcaacagcctgtggacctgtcttcctcgatagatagtgagcttttcttctttgtcatttccccagcactaaaacagtaactggcctataatatgctgcctgcaaagatctggtgaatgaataaatgtcctgcagggatggagaaaacatgagcatstggcctggaaaaagaggcttcatgctttctctatatcctgtctgggttgagccagcaaatgaggtcaatatttaatcaattgatcaactaagtgcagttaaactatagcttctcatacagagtcagagatgaaagaaaattgaagttggaattttcc

SEQ ID NO: 878889 - DNA, 602 bp, Homo sapiens
aaagggaccaactgaagaagctccctgggctaattttctagccagcagccactgcaatgttcccactaggagagtgagaaggagggagagcaaagtataataaataatgactggctttgctggtcaggagaaattatcactatgcttgagggatctaagcatatgttcacccaggaatatatcaggggtgaaaactgaggcgagggagaaatgaaagcccagaatgggttggacatatctccaggacatatttatttaaatttttaaaaacgaaaaaacaaatagcatcacccaaagttacatattgctaaacytaaaaatggccagtcacccttcttcccctaaatttaaattgctttttaacttgtagttttttatggctttgtagggggaagtctagctattttacatttcttgtagacatttgctccagtctactatatttattttgtgtcagctttgtgtgttagcagagcaaaaggctcagaatgcttactctgtgctcaccttcggagatctgctctatatagtaggaaaataggacctagaaaattcagggatatgcagaggcaaaatattacccagatcaggaaagtcagtgt

SEQ ID NO: 878890 - DNA, 635 bp, Homo sapiens
caaatgtgttcaatcaggcttggaaactattactttaggggaaaatacaggtatagcctagactcctgaggctcacagaattaccaattagcatcagattgtaccaattgtgaaaaaaaatgctaagccctaaacgaagacctggagaagtcaccctagttaccctatkaccctggacaaggctcttgataggacttagcaagttatttttctcatctgtaaagtggggatattaaagtatcactttgtggaattgttaaatacacacacacactctctctctctctctgaaacacagctctttaattcttgctaatgttgaaaaactggacagagtcaacttctacctggaatgatcttctcccagacacccacatgactctccatgatactccttcagctctctccccaaacatcatctcgtcctagtcaggctttccatatctactcaacacaagaaagcaaaatgtgccgccaccatcatcattgttctttatcctttgctctgcttcttattcttctttatagtgtttatccttgcctgacactttagatatttatttgctaattgactgtctcctcaactaaaatttaaggtccacaacatagagacttggtctttctcttcactgtga

SEQ ID NO: 878891 - DNA, 639 bp, Homo sapiens
aaggaggtgaaagatctgtacaagaagaactagaaaacactgctaaaagaaattagagaccacacaaataaatggaaaaatattttatgctcatggagtggaagaatcaatattgtaaaaatggccatactgcccagagcaatctgaagattcaacactattcctatcaacctaccaatgtaatttttcacagaattaggcaaaactattctcaaagtcaattgaaacaaaaaaaatagccaaatagccaaagcaaccctaagcaaaatgatcaaaaccagaggtatcacactaccctactttaaactacactataaagctacagyaacccaaacaacatggtactggtacaaaaacagagacatggaccaatgatacagattagaaaactcagaaataaagccacacacctacaactatctgatttttgtcaaggctgaccaaaacaagcaatggaaacggactacctactcaataaatgattctgggataacaggctagccatattcagaagactgaagctggaaccctatctttcactatatacaaaaactaactcaaaatggatccaatttaaatgtaagacttcaacctataaaaattctagaagacaacttaggaaatactcttttcaacact

SEQ ID NO: 878892 - DNA, 639 bp, Homo sapiens
aaggaggtgaaagatctgtacaagaagaactagaaaacactgctaaaagaaattagagaccacacaaataaatggaaaaatattttatgctcatggagtggaagaatcaatattgtaaaaatggccatactgcccagagcaatctgaagattcaacactattcctatcaacctaccaatgtaatttttcacagaattaggcaaaactattctcaaagtcaattgaaacaaaaaaaatagccaaatagccaaagcaaccctaagcaaaatgatcaaaaccagaggtatcacactaccctactttaaactacactataaagctacagtaacccaaacaacatggtactggtacaaaaacagagacatggaccaatgatacagattaraaaactcagaaataaagccacacacctacaactatctgatttttgtcaaggctgaccaaaacaagcaatggaaacggactacctactcaataaatgattctgggataacaggctagccatattcagaagactgaagctggaaccctatctttcactatatacaaaaactaactcaaaatggatccaatttaaatgtaagacttcaacctataaaaattctagaagacaacttaggaaatactcttttcaacact

SEQ ID NO: 878893 - DNA, 653 bp, Homo sapiens
cagaaaatgtgtttttgttttttatcacattgtcaggctgcaaattttccaaacctttatgttctgattcccttttaagcataagttccaattttagatcatctctctcaagttcaaggttcacacatcactagggcaggggtgaaatgtcacctgtctctttgctaaagcataacaaaaatgacctttgctccagttcctaataagtttctcatctccatctgggaccaccttggcctggacttcattgttcacatttctatcagcattttgktcaaaaccattcaacaagtctctaggaagctgcaaacatttccacatctttctgtcttctgctgtgcctccaaactgtcccaacctcatgcctgttaccaagttccaaagtcacttccacattttttgatatctttatagcagtaccccactctctgtggtaccaatttactatgttagctggttttcacactgctataaagaactgcccaagactgggtaatttataaagaaaggaggtttaattaactcacagttctaaatggctgtgtaggtctcagaaaacttacaatcatggcagaaggcaaagaggaagcaatcttggatcttctcacatggtggcaggggagagaagagtgagtagcgaagggagaagaccc

SEQ ID NO: 878894 - DNA, 632 bp, Homo sapiens
atatggagattgcactgttgtattcaaagggaggaggtgagaggttctggtataccagaaaatgggagcctcccttctgagctctgtatgcagataggacagtgtatgccattaagtgtgtgggtcttctggaaagaaatagtttgggctttgttcgttctcttcctaagtggtctggtggaaagcctacttagaaggggctaccaatttcttctaacgtaagggatgacaaatggcgatgctggttcttaggggctgaagaacctcgacttcttcattcagggttagcaaggmtcttcaggattgaggtctttgcaggtctccaagcctgatgctttcagtatgtgtagtttgtatcactcacaggctgagaacatgggaaagggaaccaggcttagggaggctttctttgtatgttgtttacccttgtcacacaagtaggttcttattgttgttcattccctgagggttcagttcattatctcaggcattacaagttgttttgtttttagtccctttacattttatcacctggacagcctgtcttgaagttgttccagactccagagggttttggacatattaaattttctcatcaatttttttccctccccttcccttccctttctcgc

SEQ ID NO: 878895 - DNA, 605 bp, Homo sapiens
ccctggagtcagcactttcaaacaagttcttcagatgattctgtgaatattggaatctttgcttaccacggtttctcaacaggaggaattttgcactgcaaggtgcatttggcaatgtttgaagacatttttggttgggacaactgggaaaggggagctactggtatctagtgagtagaagccaaggatgctgctaaatattcaataatgcatggctatcataacaaaaaattatctagtcctgagtgtcagtggtgctaaggttgacaaactcttactctattctgtcctacatagctttgagtctccttaccatcatgattgacttcttacccactgtatagatgtctcttaaatgtaactcagagaaaggactgaacacaataaagacctgacatctttaaaagaggaagtgaagaagcattgtatcttattacaggataattcattaayagaatttcaggtgttcttgggggacaacattgggaactgagattcctctaggtgccattaaatatcatatgatttcagttcagcatacatgttcataatcctaggatgtccatgggcactagaagagcttattgaaacatcttggtacaaag

SEQ ID NO: 878896 - DNA, 593 bp, Homo sapiens
ttgcctcctctcttatttccttgagcagtggtttataaaataaacggtattcaaatagaaagagaggaagataaattgtctctgtttgcagatgacatgattgtatatttagaaaaccccatcgtctcagcctcaaatctccttaagctgataagcaacttcagcaaagtctgagtatacaaaatcaatgtgcaaaaatcacaagcattcctatccaccaattatagagagagagccaaatcatgaatgaactcccattcacaatggctacaaagagaataaaatacctaggaatacaacttagaaaggatgtgaaggacctcttcaaaagattactctttatrccttctgtacatcgtctctgtttttaaaaaatcagaaattggctttgcacactgaagccacactgatgacttcaattaccaggctcacatgtattttggaatcatgacactaatggaatggtggacattcttagggattatttggaagaaatgagtactaacaccaatattcacaagttgacttaaggtttatgtattcaactgtaggaaatgtagctgtgccctgggaaaactggatcattactaagg

SEQ ID NO: 878897 - DNA, 593 bp, Homo sapiens
ttgcctcctctcttatttccttgagcagtggtttataaaataaacggtattcaaatagaaagagaggaagataaattgtctctgtttgcagatgacatgattgtatatttagaaaaccccatcgtctcagcctcaaatctccttaagctgataagcaacttcagcaaagtctgagtatacaaaatcaatgtgcaaaaatcacaagcattcctatccaccaattatagagagagagccaaatcatgaatgaactcccattcacaatggctacaaagagaataaaatacctaggaatacaacttagaaaggatgtgaaggacctcttcaaaagattactctttatgccttctgtacatcrtctctgtttttaaaaaatcagaaattggctttgcacactgaagccacactgatgacttcaattaccaggctcacatgtattttggaatcatgacactaatggaatggtggacattcttagggattatttggaagaaatgagtactaacaccaatattcacaagttgacttaaggtttatgtattcaactgtaggaaatgtagctgtgccctgggaaaactggatcattactaagg

SEQ ID NO: 878898 - DNA, 593 bp, Homo sapiens
ttgcctcctctcttatttccttgagcagtggtttataaaataaacggtattcaaatagaaagagaggaagataaattgtctctgtttgcagatgacatgattgtatatttagaaaaccccatcgtctcagcctcaaatctccttaagctgataagcaacttcagcaaagtctgagtatacaaaatcaatgtgcaaaaatcacaagcattcctatccaccaattatagagagagagccaaatcatgaatgaactcccattcacaatggctacaaagagaataaaatacctaggaatacaacttagaaaggatgtgaaggacctcttcaaaagattactctttatgccttctgtacatcgtctctgtttttaaaaaatcagaaattggctttgcacactgaagccacactgatgacttcaattacyaggctcacatgtattttggaatcatgacactaatggaatggtggacattcttagggattatttggaagaaatgagtactaacaccaatattcacaagttgacttaaggtttatgtattcaactgtaggaaatgtagctgtgccctgggaaaactggatcattactaagg

SEQ ID NO: 878899 - DNA, 705 bp, Homo sapiens
tcatttatttgccatctaaacttcactatttccttgttttttttttctgtttttttgtttttgtttttgtttttgtttttgttttttttactaatatattaaggtgtatgattaggttattggtttgagataatttttcttttttaaatagagtagattaacagctgttaatttctatctaaacactgctccagctgtacaccataagttctattacgttgcatattcatttttatttacctcaagttgttttctaatttttcttgtgattttttttctttgatccattggttgtttaagactgtgttgtttaatttccacawatttgcaaatatttgtttttcttctgttattgagctctaactttatttcattatggtcagagaagatacttagcatgattttgctgtttttaaaattattgaggcttgctttgcagctcaccatttggtccaccatagagaatattccaactgcactggagaagaacaggtggtctactgggtggaatgctccacatttgtttgttagggctagttggtttgtaatgttttcaagtcttttgtttctttattgatcttgttgagtttttctacacattttgaaagctgagtattgaagcccacaactactgttgttgagttgtctatttctccttttctcgttgtcaggttttgattcatgtagtttggcactctgttatta

SEQ ID NO: 878900 - DNA, 574 bp, Homo sapiens
acagaactctccacccaaaaacaacagaatatacattttatctcggcaccacatgacacttactctcaaattgatcacgtaattggaggtaaaacactactcagcaaatgcaaaataactgaagtcataacaaactgtctttcagaacagtgcaatcaaattaggactcaagattaagaaacccactcaaaaccacacaactacatggaaattgaacaacttgctcctggatgacttccaagtaaatgayaaaattaagccacaaatctttgaaactaatgataacaaagagagaacataccagaatctcagggacacagctaaagcagtgttaaaagagaaatttatagcactaaatgtccacatgaaaaagctggaaagatctcaaactgacatcctaacatcacaactaaaagaactagagaaccaagaacaaacaaaccccagagttagcaggagacaagaaataaccaagttcagaagagaactgaaggaaatagagacacaaaaacccttcaaaacatcaatgaatccaggagctggttttgtgaaaaaaaatcagtaaaatagacag

SEQ ID NO: 878901 - DNA, 574 bp, Homo sapiens
acagaactctccacccaaaaacaacagaatatacattttatctcggcaccacatgacacttactctcaaattgatcacgtaattggaggtaaaacactactcagcaaatgcaaaataactgaagtcataacaaactgtctttcagaacagtgcaatcaaattaggactcaagattaagaaacccactcaaaaccacacaactacatggaaattgaacaacttgctcctggatgacttccaagtaaatgacaaaattaagccacaaatctttgaaactaatgataacaaagagagaacataccagaatctcagggacacagctaaagcagtgttaaaagagaaatttatagcactaaatgyccacatgaaaaagctggaaagatctcaaactgacatcctaacatcacaactaaaagaactagagaaccaagaacaaacaaaccccagagttagcaggagacaagaaataaccaagttcagaagagaactgaaggaaatagagacacaaaaacccttcaaaacatcaatgaatccaggagctggttttgtgaaaaaaaatcagtaaaatagacag

SEQ ID NO: 878902 - DNA, 596 bp, Homo sapiens
catattccgtgggtcaatggattccagaaaccagtgttttaatctgaatgtttcttctttttgttttctttttatttttggagatagagtcttgctctgtaacctaggctggagtgcagtggtacaataatgggtgactgagactggaactcctgggttaaagcaactcttcagactcagcctcccaagtagctaggaytacaggcacacaccaccatgcctagctaattttctaatttttgtaaagatggggtctcaccaagttgcccaggctggtcttgaattcctggcctgaagcaatcctcttaccttggcctcccaaagtgctgggatttcagatgtgagtcactgaacccagcctgactccttcttgatgacttttaatgaattctttgatcatgagtggatactattgtgggataattcacttaatctttgaagaatcttgatctccctttcggtaccatagagctcagctttcattgaccaggagacttttttttttttttgagcaaaacagagttttgctctgacgcccaggctggagggcagtggcaggatctcggctcactgcaacctctgcctcccaggtttaa

SEQ ID NO: 878903 - DNA, 596 bp, Homo sapiens
catattccgtgggtcaatggattccagaaaccagtgttttaatctgaatgtttcttctttttgttttctttttatttttggagatagagtcttgctctgtaacctaggctggagtgcagtggtacaataatgggtgactgagactggaactcctgggttaaagcaactcttcagactcagcctcccaagtagctaggattacaggcacacaccaccatgcctagctaattttctaatttttgtaaagatggggtctcaccaarttgcccaggctggtcttgaattcctggcctgaagcaatcctcttaccttggcctcccaaagtgctgggatttcagatgtgagtcactgaacccagcctgactccttcttgatgacttttaatgaattctttgatcatgagtggatactattgtgggataattcacttaatctttgaagaatcttgatctccctttcggtaccatagagctcagctttcattgaccaggagacttttttttttttttgagcaaaacagagttttgctctgacgcccaggctggagggcagtggcaggatctcggctcactgcaacctctgcctcccaggtttaa

SEQ ID NO: 878904 - DNA, 639 bp, Homo sapiens
cctcccaagtagctaggattacaggcacacaccaccatgcctagctaattttctaatttttgtaaagatggggtctcaccaagttgcccaggctggtcttgaattcctggcctgaagcaatcctcttaccttggcctcccaaagtgctgggatttcagatgtgagtcactgaacccagcctgactccttcttgatgacttttaatgaattctttgatcatgagtggatactattgtgggataattcacttaatctttgaagaatcttgatctccctttcggtaccatagagctcagctttcattgaccaggagacttttttttttttttgagcaaaacagagttttgctctgacgcccaggctggagggcagtggcaggatctcggctcactgcaacctctgcctcccrggtttaagcgattctcctgcctcagcctcctgagaagctgggactacagatgcatgccaccacgcccagctaattttttgtatttttagtagagatggggtttcactgtgttagccaggatagtcttgaactcctgacctcgtgatctgcccacctcagcctcccaaagtacaagactttcttttggatagggttgtctttctgcatctcattttctaggggggcagaga

SEQ ID NO: 878905 - DNA, 592 bp, Homo sapiens
actatcaatttatatttttcaatattgacacctattataattagttggtattcaatgataagggcttttgtgttagtaaacattatcagtaaaacagatttacacaggtaaatgattataataggaacagttatatctctacatttgaactacaacaaaattctagtaacacctctaaaagttggcataatgtcaatgcaactttgctggtcctatgtcttatgacatttaaaaactgtaccaagccaggtacagtggctcaaacctgtaatcccarcactttaagaggcagaggcgggcggatcacgaggccaggagatggagaccaccctggctaacatggtgaaaccccgtctctactaaaattacaaaacattagccgggcgtggtggtgggcgcctgtagtcccaactacttgggagactgaggcaggagaactgcctgaaccgggaggcggagcttgtagtgagccaagattgtgccactgcactccagcctgggcaacagagcgagactccacctcaaaaaaaaaaaaaagtgcaccaataagaaaatgtttaattcatttgagaaaacaataggttaaataata

SEQ ID NO: 878906 - DNA, 640 bp, Homo sapiens
gacgtgtagtgttatttctgaggtctttcttctgctccattggtctatatgtctgttttggtaccagcaccatgctcttttggttacagtagccttgtagtataatttgaggtcaggtagcatgatgcctccagctttattccttttgcttagcattatcttggctatacgaggtcttttttgattccatatgaaatttagaatagttttttctaattctgtgaagaatgtcaatggtagtttgaygggaatagcattgaatctataaattactttgggagtgaagtcattttcatgacattaattcttcctatccatgaggatggaatgtttttctatttgtttgtgtcctctcttatttccttgagcagtggtttgtagttctccttgaagaggtcattcacatctgttgttagctgtattcctaagtattgtattctctttgtagcaattgtgaatgggagttcattcatgatttggctctctgcttgtctattgttggtgtgaaataattaacaaaatagaccgctagttagaataataaagaagagagaataatcaaataaacacattaaaaaatgataaagaggatatcaccactgaatccacagaaatacaaactaccatgagagaataccat

SEQ ID NO: 878907 - DNA, 621 bp, Homo sapiens
gtttgacattttcctataattgacacatttggataaatgacttttaaaacattcttcttttttttatattgtctcatagtgttagtatttatatgatttattaatatttatttattaatatgttttcattacattgcatttggaaatccacttgttcttttgtttatatgcaaattatctagtatggggaagagagattaattctaggtttataatctttaatttctagaaatattgtgaagcatgaccaaagacagtgacttgggaaaagaaataccaggagggacataatagaagttttaaatgatagaagtaggaatagtataaaataatcaatttaggtaaataatagactgtaacaagtggtrgcaatgtagcatagtgaaaatatcagtgacctttggaatcagagacatctgggttgaaaaacaaatatctttatatactagctgtgtgattgtaatcaagttttttaacctccctgaggttcaatttcctatctatacaatggaaacaatacctagaacagtaggttgtttctaggacaaaataaaaggatatatgaaaagtatgtagtattggcatgtaataatggaataaccattttaaaagttttaaaag

SEQ ID NO: 878908 - DNA, 620 bp, Homo sapiens
ctttagccaagagcagtaaatttagatgccaatcaggaaacaaagaggagaattagattctaagaaatttgagaagaaacttgaggagatatgatatcaaaatctcaaacctagctgctgatgcccttaataaatatggggacatcagaaggaaatttgaagcagtaagatattgagagtagactttgtaaatacatcttaggtaccttatcagaatgttttttcctttattatgtggtagctcacattgatcctctaattccctgagaaatttccagttcattttggcatcaagcacaagttctccttaaaggaggayggaaagttcgtgtaatatttttaggttttatggctggattttgggaaaagggattctggtttctatgactcaccttggggaagagggattctagtttctatggctagccttcggggagaatggcactgagaaatagcgcaggagaaggtaagagaaaaccttttgcttctgaggccttcactttgggctattgttttctgaggcccagaggtgtgcacataataatttatgggttacatgtaaaaattaggaaacatttctaatgaaaaacgttagctcaatatattattctcttaggtca

SEQ ID NO: 878909 - DNA, 647 bp, Homo sapiens
gaatgacactggataaaaaataagggaattgccattgttagcatgactgatatcacttcaagggtagcatttattccacaagcaatttagagtcagaaatcactaacatgtattgaatgcttacaaagtgactagtttaaacagacttattgataatagtaaccccataatgtggctataattataattcctgatttaaaggtaaggattctgaagatacttaagataatataccattgagatattgttgatattaattgggccagaattcaagttcaggtaacatcaggctagttcattctattaacacatcactactctttctcttgaccaactaattcagtaatccatgttaattagacatacaacaactaagtaatacttagtacataatgaataactgaagtataaatgcatttacagaaacaaaaataagattatttccagaaataaatggtagccatgaataaagtcagaaaacttgtcttagtttctatgaagyccacaggctgttatccagtgcaaacagttaatagattatattgtaataatactacagcaaaattgaatattattccatgttttgatttaaaaactatcaaaaatgtagctattatttaaaaaccattttaaccaatacctccaag

SEQ ID NO: 878910 - DNA, 566 bp, Homo sapiens
agatgaagctgttttgcttgatatggaaattaaatactggaatttacaaatcaaaatgttagccttatattaacttcagtctccttttgttttgtttcactttctttttacaaaattgagaatattttgattaccaaagataagtaagtacatgtagtccctgttttaagaactcacttagcaaattcrgatagaaacacctttgccctgaggtctgtacaaaagttggttaactggataatacaatgaattgatggttgctgatgtgttaaaagttgttataaaacatatttgacattttatttgttttatagttttaaaagtatttcaagcatattaccagtgaaattaaaatcactgatttattaagcctctaaagctccttcagactttagtgaatacacagttgaccctttaacaacataggcttgaacggtatggtcaacttatatgcaatttttttcaataaatacatggaacaaatttttagagatttgcaacaatttgaaaaaaaattgcaggtgaaccacgtagcttagaagtaccgtaaaaatatttttaaagtt

SEQ ID NO: 878911 - DNA, 616 bp, Homo sapiens
tttagtcatgaagtccttgaccatgcctctgtcctgaattgtattgcttaggttttcttcttgtgtttttatagttttaggtctaatatttaagtctttaatccatcttgaattaatttgtgtataagatgtaaggaaggaatccagtttcagctttctacatatggctagccagttttcccagcaccagttattaaataggaaatcctttcccatttattgtttttgtcaggtttgtcaaatatcagatggttatggatgtgtggcgttatttctgaggcctctgttctgctccattggtttatatatctgttttggtaccagtgccatgctrttctggttattgtaaccttgtagtatattttgaagtcaggtagcttgatgcctccagctttgctcttttgcttaggattgtcttggcaatgcaggctcttttttggttccatatgaactttaaagtagtttttttttcaattctgtgaagaaagtcattggtagcttgatggggatgacattgaatctataaattaccttgggcagtatggccattttcacgatattgattcttcctatccatgagcatggaatgatcttccatttgtttgagtcctctttt

SEQ ID NO: 878912 - DNA, 656 bp, Homo sapiens
atttggggaactagaaagaaaaatgttttcttgacagaaataaactcacattcatttcagcttgttaatgaggaattcaatcaggctttattaaaagaaacaggaggtagccttatatgccaaaattctgaccttcaatagtgccccaaagctaaactcagtttgcatgtggtatgttttccaaagtaaagtaggtgataatactaccaaatattatcatagactactaaaagttacagctttctaatttatagcatctgtgtatttgctgtttctttctcaactgataaaaaatgcctttcttgggctattttatgatagcatttcactgcttgaatccaaatattttattaggtagaattgaggttaacacactataaagaaaagtcacaaaaatacaatgtcttaaaaactgtaatgctaattccttctcacttatgttctgtgaagtgatcagggctggcacagagaatcaagattcctgatttaactagctcattgactattaaaacaagygttttctctatcactttattgctgctttgttaattttacttgtatcagatatgatagattaatcctacattataaataaagaataatatttcttcaatatatcttgcctgcaaaagtccagagaggtataatagcactta

SEQ ID NO: 878913 - DNA, 698 bp, Homo sapiens
taattttacttgtatcagatatgatagattaatcctacattataaataaagaataatatttcttcaatatatcttgcctgcaaaagtccagagaggtataatagcacttagtacatatttttaaatgaattaaatgcttaagaaatgatacaaaacatgaatctatccttgatataaagatcttgcatagacaaacatcttaatcctgaaatctctgatttttcattgacaatatactgttatcttcttatccctgttttattagcattatgggggctctactgaagacatttttttaatgtggctttactcaggcacaatggcacatgcctgtagtcccagctactcaggaggctaagtcaggaggatcacttgagcctggtagttcgaggctgtggtgagctatgattgggccactgcactccaacytgagcgacacagcaagactccatctatctctaaaacaaaacaaaaagaccttagtctaaaaatctgacaggcatggtagcttacatctgtaatagcagccctgtgagaggccaaagagggagcattgcttgaagccaagagttcatgaccaaccttggcaacagagtgagatcctgtctccaccaaaaattgaaaaattagctgggcatggtggtgcttgcttgcatttccagccacttggggtggggggctgaagtgggaggatcact

SEQ ID NO: 878914 - DNA, 653 bp, Homo sapiens
agaatcatatggcccaaaatggcagcataccattgttgataaatgccgatttagatatatcaaaaaaaatttaaattaacaagacatcagataaaagctaaaattatcatacttatttgctatttcaacttatataaaggttcataagatgggcctccaataagtggttgctttgagatattaactaatgatggcaatacatatatactggggctactcyctcaaaaattttgggtgcagtacatacatgactgaaaatattagagtccatcatgccacaatctcctccaatttggtcattctccttgggtgaggtacattttaggggagaagaaaagtgctgcagcccctcttatgattacttttactacctccattgcacaagaaagaatggaagagatcagcagcctcctgattttaccttgggaaaaatgaagcttatcaaataaccttcctgacataagatcttagctagatgctgtgaaaatggactgaaaagtggaaattacagtcatgtttataattggcagttttcaggtatatttaaatatgtaaaatgtaaaccttaaagaggaaataccatgttctgccaaaccactttctctgatctgtgttttttgggggacataatacagtccctttttcaatgtaga

SEQ ID NO: 878915 - DNA, 653 bp, Homo sapiens
agaatcatatggcccaaaatggcagcataccattgttgataaatgccgatttagatatatcaaaaaaaatttaaattaacaagacatcagataaaagctaaaattatcatacttatttgctatttcaacttatataaaggttcataagatgggcctccaataagtggttgctttgagatattaactaatgatggcaatacatatatactggggctactccctcaaaaattttgggtgcagtacatacatgactgaaaatattagagtccatcatgccacaatctcctccaatttgrtcattctccttgggtgaggtacattttaggggagaagaaaagtgctgcagcccctcttatgattacttttactacctccattgcacaagaaagaatggaagagatcagcagcctcctgattttaccttgggaaaaatgaagcttatcaaataaccttcctgacataagatcttagctagatgctgtgaaaatggactgaaaagtggaaattacagtcatgtttataattggcagttttcaggtatatttaaatatgtaaaatgtaaaccttaaagaggaaataccatgttctgccaaaccactttctctgatctgtgttttttgggggacataatacagtccctttttcaatgtaga

SEQ ID NO: 878916 - DNA, 646 bp, Homo sapiens
caaagagcagggtggtgatcagtggataaaaaattactaagaggaaacatcaggatcagggggattctagctagactgacttgacaggattcttcttgctgaaggcaggccagagtgataagtcctgggaatggtgggagattagaatctgatcagatatccagggttggggattttcgctgaatgaacccagccacatttttgctaaaactgaattcagcatgccaaggatgagtttttgtcaaaatacaatttggaaataactayttgaaaggtaaaactgactagaaaagtagtttaataaaatttcacctctcaaaacaatatagagatgttaataatcctaattgttagttctgccaccattgccaataaaaattattgaatgctagctgcatgtcaggtcctatactaggtctgagaataaaaggaataagatgcattctattaatgcaagggtagcccatataatatagcaagtaaaactatttgtaaatcaatgaaaaaactgctgccattagaacaagagcctcaatatggcttctttaaaaaacaaacaaaaaaatcttcaatcaagactctctctgtattcaactaccacagaatacacatttttttcccaacagcacatggaacattttctagg

SEQ ID NO: 878917 - DNA, 632 bp, Homo sapiens
gtttttcagagccaggcagtcttcatattcatgtcttctatggatatgcctgtcatacattcaagttcttctatttcaagaccattataatttttcaccatgagtatccaaagcatgagattacaataattttgctctaggaacacactgtcgacttaggaattaattataagcaaaagaaaacaaactaaaaccaaattaaaaaccccacttagagttgtgtatagtaaggctatgtataytgaatccaaactatgattgtaaaagaatatttcaacttgagcaattaatctttccctattgtttgctttgaggtttgaatttcatcatttttggttttattttatttcatttttaaagacagaatctcattctgtcagtcaggctggagtacagtggcacggtcacagctcactgtagccccaacctcctggatcaagtgatcctcccacctcagccgcacaagtagctgggactacaagtggacagcctttggctatttttttttttttaatttttacaaactttttgtagagaacaggtctcactttgttgctcaggctggtcttgaacttctggcttcaagccatcctcctgccttggcctcccaaagtttggggattacaggcatg

SEQ ID NO: 878918 - DNA, 632 bp, Homo sapiens
gtttttcagagccaggcagtcttcatattcatgtcttctatggatatgcctgtcatacattcaagttcttctatttcaagaccattataatttttcaccatgagtatccaaagcatgagattacaataattttgctctaggaacacactgtcgacttaggaattaattataagcaaaagaaaacaaactaaaaccaaattaaaaaccccacttagagttgtgtatagtaaggctatgtatactgaatccaaactatgattgtaaaagaatatttcaacttgagcaattaatctttccctattgtttgctttgaggtttgaatttcatcatttttggttttattttatttcatttttaaagacagaatctcattctgtcagtcaggctggagtacagtggcacggkcacagctcactgtagccccaacctcctggatcaagtgatcctcccacctcagccgcacaagtagctgggactacaagtggacagcctttggctatttttttttttttaatttttacaaactttttgtagagaacaggtctcactttgttgctcaggctggtcttgaacttctggcttcaagccatcctcctgccttggcctcccaaagtttggggattacaggcatg

SEQ ID NO: 878919 - DNA, 685 bp, Homo sapiens
ctcatctgagacaaggcaagtcccttccacctatgagcctgtaaaatcaaaagcaagttagttacttcctagatacaatggaggtacaggcattgggtaaatacatccattacaaataggagaaattggccaaaatgaaggggatacaggcctcatgcaagtccaaaatccagcagggcagtcaaatcttaaagctctaaaataatctcctttgactccatgtctaacatccaggtcatactgatacaagaggtgggttcccatggtcttgggcagcccttcctgtgtgggtttgcagggtacagcctgcctcacagctgctttcatgggctgacgttgagtgtctgcagcttttccaggcacacagtgcaagctgtcagtggatctaccattctgtagtctagaggattttgaccttcttctcacagctctactaggcagtgctccagtggggattctgtttgggggttctgaccccacatttcccttctgtactgccctagcagaggttcttcatgagggcccygcacctgcagcaaacttctgcctggacatccaggtgtttccatacatgctataaaatccaggtggaggttcccaaacctcaattcttgacctctgtgcacttgaaggctcaacaccctgtggaaactgccaaggcttgggacttgcatcctctgaagcc

SEQ ID NO: 878920 - DNA, 643 bp, Homo sapiens
ttttgaattgtaattctcacatttcccacatgttgtgggaagaacctgatgggaggtgattgaattaggggggcaggtctttcctgcactgttctcatgatagtgaatgaatctcacgagatctgatggttttaaaaatgggagtttccctgcacaagctgtctctttgcctgtcacgatccatgtaagatgtgacttgctcttccttgccttccaccatgactgtgaggcctctcaagccatgtgaaattgtaagttcattaaacctgtttcttttgtaaattgctcagtcttggatatgtctttctcagcaacgtgaaaatgaactaatacagtaaattggtaccggaagagtggggcgctgctgaaaagatacccaaaaatgtggaagtgactttggaactgggtaayaggcagaggtcagagcagtttggaggactcacaagaagataggaaaatgtgggaaagttcagaatttcctagagacaagttaaatggctttgctcaaaatgcagatagtgacatggacaataaaatccaggctgaggtggtctcagatggagatgagaaacttgttgggaactggaggaaaggtgactcttgttatgttttggtaaagagactggtagcattttgctcgtgc

SEQ ID NO: 878921 - DNA, 695 bp, Homo sapiens; identical to SEQ ID NO: 877575

SEQ ID NO: 878922 - DNA, 610 bp, Homo sapiens
gcaggatttcaaatggaatgttgccagtttttgaccattaagtatgatattggctgtgggtttctcataaatagctctcattattttgagatactttccatcaatacctagtttattgagagtttttagcgtaaaggggtgttgaatttcatcgaaggccttttctgcatctattgagatagtcatgtggtttttgtcattggttytatttatgtgatggattacatttattgatttgcatatgttgaaccagccttacaagggatgtgagggaactcttcaaggagaactacaaaccactgctcaaacaaataagagaggacacaaataggaaaacattccatgctcatgaataagaagaatcaatactgtgaaaatggccatactgcccaaagtaatttgtagattcaatgctatccccatcaagctatagtaaccaaaacagcatggtactcatatcaaaacaaatatatatagaccaatggaacagaacagaggcctcagaaataacaccacaaatctgcaaccacctgatgtttgacaaacctgacaaaaacaagcaatggggaaaggatcccctatttaataaatggtgttgggaaaactggct

SEQ ID NO: 878923 - DNA, 679 bp, Homo sapiens
ttgtgacctctcttatttccttaaacagtggtttgtagttctcctggaagaggtccttcacattccttatgagttgtattcctaggtatttttttctcttagtagcaattgtgaacgggaattgactcatgatttggctctctgtctgttattggtgtataggaatgcttgtgatttttgcacattgattttgtatcctgagacttttctgaagttgcttatcagcttaaggagattttgkgctgagactatggggttttctaaatatacaatcatgtcatctgcaaacagagacgatttgacttcctgtcttcctatttgaatacctttatttctttctcttgcctgattgccctggccagaactttcaatactatgttgaataggggtggtgagagagggcatccttgccttgtgctggttttcaaaaggaatgctttcagcttttgcccattcagtatgatattggctgtgggtttgtcataaatagctcttattattttgcgatgcatcccaccaatacctagttaatttagtttttagcatgaagggatgttgaattttattgaagaccttttctgcatctattgagataatcatgttgtttttggcattggttctgtttatgtgatggattatgtttattgatttgcatatgttgaaccagccttgcatccca

SEQ ID NO: 878924 - DNA, 679 bp, Homo sapiens
ttgtgacctctcttatttccttaaacagtggtttgtagttctcctggaagaggtccttcacattccttatgagttgtattcctaggtatttttttctcttagtagcaattgtgaacgggaattgactcatgatttggctctctgtctgttattggtgtataggaatgcttgtgatttttgcacattgattttgtatcctgagacttttctgaagttgcttatcagcttaaggagattttgggctgagactatggggttttctaaatatacaatcatgtcatctgcaaacagagacgatttgacttcctgtcttcctatttgaatacctttatttctttctcttgcctgattgccctggccagaactttcaatactatgttgaataggggtggtgagagagggcatccttgccttgtgctggttttcaaaaggaatgctttcagcttttgcccattcagtatgatattggctgtgggtttgtcataaatagctcttattattttgmgatgcatcccaccaatacctagttaatttagtttttagcatgaagggatgttgaattttattgaagaccttttctgcatctattgagataatcatgttgtttttggcattggttctgtttatgtgatggattatgtttattgatttgcatatgttgaaccagccttgcatccca

SEQ ID NO: 878925 - DNA, 679 bp, Homo sapiens
ttgtgacctctcttatttccttaaacagtggtttgtagttctcctggaagaggtccttcacattccttatgagttgtattcctaggtatttttttctcttagtagcaattgtgaacgggaattgactcatgatttggctctctgtctgttattggtgtataggaatgcttgtgatttttgcacattgattttgtatcctgagacttttctgaagttgcttatcagcttaaggagattttgggctgagactatggggttttctaaatatacaatcatgtcatctgcaaacagagacgatttgacttcctgtcttcctatttgaatacctttatttctttctcttgcctgattgccctggccagaactttcaatactatgttgaataggggtggtgagagagggcatccttgccttgtgctggttttcaaaaggaatgctttcagcttttgcccattcagtatgatattggctgtgggtttgtcataaatagctcttattattttgcgatgcatyccaccaatacctagttaatttagtttttagcatgaagggatgttgaattttattgaagaccttttctgcatctattgagataatcatgttgtttttggcattggttctgtttatgtgatggattatgtttattgatttgcatatgttgaaccagccttgcatccca

SEQ ID NO: 878926 - DNA, 650 bp, Homo sapiens
aaatgtgtgaaagattttttttttttacaatttatgttcattattcttctaaatggctatttggaaaataaatgtttattaagttttttgaatctttactgtgaacaactgatgttttactgcctcaatttctgaaaggttattttcttattttgttaagttgctggttctgaactttttggtctcaggttccctttatattcttaacaatagttgaggaccccctgaaagctttgcattgtgttgttctgtctaccagtatttaacatattaggaattaaaactgaaaacatacaagaactcaggracatatagcacacattccattagctgtgagaaacatgatgtcatgtagcctctggaaaacacatacacttgtgagagaatgacagttacaaggcaaatgacacttaagtattattatgaaaataattttgacattgcagaccacctgtaatgatctcgggtatcccaggcatccctggaccacactttgagaacattgcaatagatggttttacaataacctaaaacataaatccaggctgcagtgatacacccattgcattgttctgcaagttctgtgtaaatatttcatgtctaaaatgcttcataatttttatctatagtacatagttttacaagtgtac

SEQ ID NO: 878927 - DNA, 644 bp, Homo sapiens
gggcatgcttaaatgctgagtaggctcacgaaggagccaaagaaaacccagaacagaaaacaagatgtgcttggtagttttgcacctgagacaacactccttcaggttacatctacaacgcacagtgctgaactggccaccgtagcagtggctgaagtaagaagcagggccgagaggattcgaaattgtgcacaatataaaacgcaagtctgtctgacttctagagttttyctactgcacaacctgccttcaccaagacagaagacccttcaatgagactacaaacgagtaaaagaaatcatgatgtctctgggtggtgggaactaagcctaggattacctcttgcaggaatcaggacaacttccagttacagaatgtgcttcctgcagccttgagggacaaatcaaggcaaaacttagaagaactagatctattggtgaaattgaatcatgtttctgggtattattaacaaaattatataattcataagtatttgtttagaaattgtcctaatatatgtctgacctgggaaaataaatgcatgctcatatgtaatttcacataacttacaaaggtttcagatatatctgattttatgcttaatgcaataattgcggctacagaacacatttatttattcaacg

SEQ ID NO: 878928 - DNA, 593 bp, Homo sapiens
ataataataaataaaaattaaaaaaaagaataatcaatatcccctacccaagccaaaaaaatacgtacgtttaggggaagactggataaagtttgcggttctgttaggaagtaggagtaataaatatgaatgttgtaaaagcaactgacaatatcttccacatttattttgcaatttattttttgtgtagcgatagagaaaaatgcaagaaaaacatacatataactataacctaagatgtaacatagtaaatgcacagcctcaaaaatcagtcagagttgctgttagagttgaaacttgcctttttttcttgaattaaacttttacaattctggatgagtatgtcttgatcttcagaaattgttactttgtgagtgctagttttgtacagattcctgaattcctctggaatcatgttttattttggtttcatttctgcatatcctcacaatgyctgctaacctttaaaatcctattgaaaagttgtctctgatttatggccattttccacaaagaaggaaaagtttcaatcactatagaggaattaccatatattcagtgaagagagaataataaaagtgcattgagatgtg

SEQ ID NO: 878929 - DNA, 644 bp, Homo sapiens
gcatgagcctgtattagttttccaggactgccgtaataatgtgccacaatctgagtagcttaagcagcagaaatttattgtcttataattctggaggctagaaagctgaacctgagggtcagcagggtgagttccttttgaggactgtgaaggaartatctgttccaaactgtcttcacactcacatggcattccccctgtatatgtaggctgtctttgtgttcaaatttcccctttctataaggacgtcagtcccactgagttagggaataccctggcatcatcttaacttgatttcttctgtaaagaccctatctcccgctaaagtcacatcccgaggtattggaggttaggacaccagcatatcttttttgaggggacacaattcaacctctgacagagtcaaatttcaatttctattaagattctcacccatcaagctcatgactttgtaaattccccacagctcccaggccagagcatttcagccacgcaaccagtagtgaccatcctaaagctattattaaatctccaaagttgaacagaaaatgtctcgctctggtgagcaggctgcaactcagcctttctgctgggactttcttattctgcagtccactactttgccctatcatcggatgaatcca

SEQ ID NO: 878930 - DNA, 644 bp, Homo sapiens
gcatgagcctgtattagttttccaggactgccgtaataatgtgccacaatctgagtagcttaagcagcagaaatttattgtcttataattctggaggctagaaagctgaacctgagggtcagcagggtgagttccttttgaggactgtgaaggaaatatctgttccaaactgtcttcacactcacatggcattccccctgtatatgtaggctgtctttgtgttcaaatttcccctttctataaggacgtcagtcccactgagttagggaataccctggcatcatcttaacttgatttcttctgtaaagaccctatctcccrctaaagtcacatcccgaggtattggaggttaggacaccagcatatcttttttgaggggacacaattcaacctctgacagagtcaaatttcaatttctattaagattctcacccatcaagctcatgactttgtaaattccccacagctcccaggccagagcatttcagccacgcaaccagtagtgaccatcctaaagctattattaaatctccaaagttgaacagaaaatgtctcgctctggtgagcaggctgcaactcagcctttctgctgggactttcttattctgcagtccactactttgccctatcatcggatgaatcca

SEQ ID NO: 878931 - DNA, 670 bp, Homo sapiens
ctacctagttttaaatttaaaactttgctctccagaattttaatcatccaaagaatgttcacgttgaataaataaatgtgttctgtagccgcaattattgcattaagcataaaatcagatatatctgaaacctttgtaagttatgtgaaattacatatgagcatgcatttattttcccaggtcagacatatattaggacaatttctaaacaaatacttatgaattatataattttgttaataatacccagaaacatgattcaatttcaccaatagatctagttcttctaagttttgccttgatttgtccctcaaggctgcaggaagcacattctgtaactggaagttgtcctgattcctgcaagaggtaatcctaggcttagttcccaccacccagagacatcatgatttcttttactcgtttgtagtctcattgaagggtcttctgtcttggtgaaggcaggttgtgcagtagraaaactctagaagtcagacagacttgcgttttatattgtgcacaatttcgaatcctctcggccctgcttcttacttcagccactgctccggtggccagttcagcactgtgcgttgtagatgtaacctgaaggagtgttgtctcaggtgcaaaactaccaagcacatcttgttttctgttctgggttttctttggc

SEQ ID NO: 878932 - DNA, 500 bp, Homo sapiens
tatctatgcttctattttctcgggaagcatagactgggaagcctagaagtttgcctgtttttatgggcagtaggaaaaaggacgggttatagcacacatcaggctggtcacttcctgggctacataccttgtatagaacagcattatacaaacaagttccttttagagtccctgtacacttatggtaaccataaaataataggactgtagcaaccttttgtcctatgttgtgggaagtcagggaccccaaatggagggactggctgaagccatggcaraagaacataaattgtgaaaatttcacggacatttattagttccccaaattaatacttttataatttcttacacctgtctttactgcagtctctgaacataaattgtgaagatttcatggacatttatcacttccccaatcaatactcttataatttcctatgcctgtctttaatctctttatcccgtcatcttcataggctgaggatgtatgtcgcctcagg

SEQ ID NO: 878933 - DNA, 545 bp, Homo sapiens
ctggctaatttttgtgcttagtattgacaggatttcaccatgttagccaggctggtcttgaactcctgacctcaaatgatccacctgccttggcctcccaaagtgctgggatgacaggcatgagccaccatgtctggycacagtgaggcttattcttggtcatgttacatgtctgggctgtgttagggcattgtggtgtggtctgttcattgtgttcactcagggatccaggttgacaaaagtcccatctctgcatatgtccttgatcatcacttcaggggaaagggaatgtggtggatcacagagcctcttagcacttccacctggaggtgactcaagttgctcctgctcatggttcattggacaaaacagatcacagagtcatgggcaacttctctgtgcctggaaggggaaccaaaatatgaatagctacattgattttctctagctagtacacagaaggcctcatttaaacacagttacttatttgtgttttgaagctaattgtagtccatcaactttcacagaagatatgtgcacttcca

SEQ ID NO: 878934 - DNA, 633 bp, Homo sapiens
gcagctggttgttagactgcattgtaaaaattactccccaaagatgtgaagtgaaacagaaaggcaaaggcaggctagaaaacaacacaagtaaaacatgaacaagttcattccagaaggagattctcaaccacagctgcacatcagaatcagctggggagattttgcaaacccagtgcccaggctctgmaacccagatcaattattacagaatctcttggggatgaaacatgggcatcagtattttgtgtgtgtttgtgttttttgttttgtttttttttttttttttttgagatggaatcttgttctgtcacccaggctggaatgctgtggtgcaatctcagctcactgcaacctctgcctcccgggttcaacccattttcctacctcagccttccgagtagctgggattataggcatgcaccgccacgcctggctaatttttgtatttttaatagaaatagggtttcaccatattgggcaggcaggtctcaaacacccagcctcacgtgatcctcccgccttggcctcctaaagtgctgggattacaggcatgagccattgctcctagcagtatttttttaatgaggcaaaattcacataacatacaaatccctgtatgaaaccatacac

SEQ ID NO: 878935 - DNA, 597 bp, Homo sapiens
tgatcctcccacctcagtctcctgagtagctgggactacaggcttaggctaccaggcctagctaatttttgtacttttggtagagatggagttttgccatgttgcccatgctggtcttgaactcttgagcttaagcgatccacctgcctcagcctcccaaagtgctagaatttcaggcatgagccacygcaccaggctgagactcttattttctttttaaaacattattactgaatcatcttttctgtcgcaggcactttcagtccctctcaactcttatctgttctctaccttgggaccagatcattctggaactactctaatcatgctgcttctttgcctaaaatttttcagtggctcaagtgcattttcttcagattggtttcagagcctggtggggacacctggtgttttttctacccaacaggcagttatttatttggtagggctttaagtttctttacaggtacccattccttcatcccagtttgtctggcaatgatccttcttcttggctctaggagtgaacacatgacgaatcctcctagacccaataattgggtcagggacaggcataaattagttaagtcagataaa

SEQ ID NO: 878936 - DNA, 671 bp, Homo sapiens
ccgttttcaaagggaatgcttctagcttttgcccattcaatatgatattggctgtgggtttgtcataaataggtcttattattttgagatatgttcaatcagtacctaatttattgagaatttttaacatgaagggatgctgaattctatcaaataccttttctgcatctatttagataatcatgtggtttttgtcattggttctgtttatgttatggattatagttattgatttgagtatgttgaaccagtcttgcatcccagggatgaaaccaacttgatcatggtggatgttttttgatgtgctgctggatttggtttggcagtattttattgaggatttttgcattgatgttcatcagggatattggcctgaaattttcttttttttgttgtgtctcttcctggtattggtatcaggatgatgctggcttcataaaatgagttagggaggagtccccctttttctattgtttggaatagtttcagaaggaatggtagtagctcctctttgtatttcttgtagaattcagctrtgaatccatctggtcctgggctttttgtgtttggtaggctattaattactgcctcaatttcagaactggttattggtctaatcacagattcaacttcttccttgtttcgtcttagtagggtttatgcatctagga

SEQ ID NO: 878937 - DNA, 589 bp, Homo sapiens
taaaacaatatcccaagcgttactaacttgtttggtacatattgaaccaacatgaatcaaaacagaagtgacttggtattcatgtagatgtcatgtgtgatataggcattctatgaaatttgcactatgtttcagtcttaatcatgttgttcccttgtggttttaatgtgtctctctttttttttttttttttttgcctttattttctttgacacaccaacttccagaaagaatatatttaatttacaaaacgagctccaaaatacttcagtcattgaaaaatcttaaaatgtaatgggtgtaatataatacttttaatcgttgttcttaatgttaaactttaaagagagaagaacataagaatattcaagtgtcaatggattatactaaaaaagaaaaagaaaaaaaaacctcacctttattttmtgataaacatactgtccttgatttccaaggcttggctgttgaaattgctgaagaacttccaccgtagatacctttttttgttttcacttggaaagtattcgcaagccatttttgcatcaggaatgcaggacacctaggtaaaatgtataaatgtgacataaca

SEQ ID NO: 878938 - DNA, 590 bp, Homo sapiens
ggtagttttatttctggtgcccattacttgaggataagaggtaatagtaagtgatccccatcaatccagtaacactgtaagataagttggtgatgagctaactaccaaggtatctatatatgccttggcacagtgtgygcatgtgtttgtgtatgttggggtggggtgatgagagccagaatgcacgtgtgtgtgcatccgtgtgtgtatgtgcatgccttatgtgaatgcagcttattttattttttatttttattttgtgtatttattttttgagacaggatctcactcttttgccaaggctggagagcagtggcattatcttggctcattgcaacctcaaccaatgggctgattttgcccacttttgcagagagaatggagtagcccatttttgcagagagattggaggtcaagttttcaattaccatccacccctttgatagaaactgcagttttgttgtgcctgttatggaactggaaaaataaaaaaaagaaaggaagagaacctaagatatcactttttaaggtattacttaattggaggtagtgcattttacacatttctgatggtttaggctaaaccattt

SEQ ID NO: 878939 - DNA, 505 bp, Homo sapiens
ttgcccaggttggagtgcaatggcatgatctcggctcaccacaacctctgcctctcaggttcaagcaattctcctgcctcagcctcccgagtaggtggggttactggcatgcaccaccacacccagctaattttgtatttttagtagaggagagatttcaccatattggccaggctggtctcaaactcctgacctcagttggtccaccggcctcggtctcccaaaatgctgggattacaggcgtgaaccaccgcgcccggccttgttttcttattatggttttcagagttttctatcaattctagataccgtttctcctcagattctgtcttaaatattttcccccaatctctggattttttttwaaattttcttaatagtgtctttcaaaaagctgaagttttcgttgtgatggcatttaactttgtcttctctggcttgtgctttttgtctccattaggaaatctttgcctctatcaagttcacaaagagtttatcctatgtt

SEQ ID NO: 878940 - DNA, 561 bp, Homo sapiens
tgaaattagccttattgtgcttctagcctttaaaaaatgtacacatattgggtaatctgaattgcttagaaaatgaccatctaactcatccttgctttttatgctctgaatgaatagttgaactggaagcattaaaatattgaaaacagtaagattggctaaaggacttcaactttattgagccttaaaactatgcctcaggtaaacctgatggtgagatttctaacctcatagtattcaaataactttaatgcaattttaactacagaatgggatggtaaaccaaattyttatccatcttatccaaagtagccctttgacaatgtagacaaaataaaattaacaacatttgtgaagcaccgagtagagctcacaagagaagaggtgtgctcttcgaagatcttatataaaactcatatggtatatgtacagcatatgtttaccattgcttcaactgattaacttcaacaaaccatgttggtggactcatatgagtttgcatgtagaagtagtaaagagcctagattctgtggcacagtttccttaggttttaatccactg

SEQ ID NO: 878941 - DNA, 667 bp, Homo sapiens
cttgcctcagggatagtttgttgccattgatttcaggtcatctggaatatacaattttgccagtcctttaaccacagttttagtaaataggataattaattgagcagattttaaaaacaaagttctatgagagatctctccatggtagcccccaaatccagtgctctgtcttctctcaatgctacaatgactctccactgtgctcaaatgyatgccatttgtgcatccacttctggcctctaacaggaggtgaataattttgctgagagactggagagttgtagagaattagagataatttctctgctcctgtgctctgtgtacacaaacacaagctggacacaggcccgtgggaataaaccccgggtgcaggcagtatttcctgaaacctaagacactgcatgctggactcactaaaccttaaggatggaggcagtgtggttaaacacctccagttttcagataaatagacaggtctgtgatcttctggaagcagagcagaagatggaagcttggactctggcactgagttgcctggattggaatctgacctctttaattcctggctgctctgcaaccttaggtatagtgcctaaccattctgtgctcagcttctctatctgtgagatacagataattataggctggatgcagcggctcatgcctg

SEQ ID NO: 878942 - DNA, 598 bp, Homo sapiens
ctattccatttagtgaagagagtgtcctttcctcagtgtatatacttggcacctttatagaaaatcagttggtggtaaatgtggtatatgctggcatcagtgttagtgtgtccaggcgggctgatctgggggcttccagtcagcttgctgaggtgctggcaatggcagctgtgggccaggtggatgggcaggtccataggccctgggcatcaggcatggtgtgggtgatggcagttgcagtggcaggacaatcctctggtacccaagtagtcccaactgattttcaaggtggctgcaggccatttcccaggcccacaggtggttcatgtctgtgggtggggggtgtatgctggctgtgatggtagtggcaggttgggtgaacccatctccaggccttcaggatgagtgctcaggygccaacaggaatagatggggctgagcaatccccaggcccctgcatgggcactagggagaagggagacagaggtgagcctcaggccccccgatggtatatataggcactagctatggtaggcaggggcgtggtgatttccaggccctcagtggaatgcttggatgggaggaccagcagctacac

SEQ ID NO: 878943 - DNA, 615 bp, Homo sapiens
aaggaaggagaaaaaaaaggatttttaaaagaagcatgaaatgataaaacacaaaacacgtgaaaataagtcctgatttaataaaaagcaagtagcagaatcttaaaagaaagtacattgcttgtgcagttttacaaaactcactcacatacaaatgaatacacatatgcatatacattagtaagtatatgcataaatatgtacatacgttaaactgaagcaaaaatttcatgaaacaacacactttcttttttttaaatttattattattatactttaagytctagggtacatgtgcacaacgtgcaggtttgttacatatgtatacatgtgccatgttggtgtgctgcacccattaactcatcatttacattaggtatatctcctaatactatccctcacccctccccccaccccacaacagaccccggtgtgtgatgctccccttcctgtgtccatgtgttctcattgttcaattcccacctatgaatgagaacatgtggtgtttggttttttgtccttgcgatagttcgctgagaatgatggtttccagtttcatccatgtccctgcaaaggacatgaactcatcattttttatggctgcatagtattcca

SEQ ID NO: 878944 - DNA, 609 bp, Homo sapiens
gaaactccgttcaaacaaacaaacaaacaaaaaaacacagtaaccagcagggtgtggtggctcacgcctgtaatcccagcactttgggaggccaagggcaggtagatcatctgaggtcaggagttcaaggccaggcatgggccaacatagtgaaaccttgtcctctaccaaaaatacaaaaattagccaggcatgatggcgggcgcctgtagtcccagctactccrgaggctgaggcaggagaattgcttgaacccaggaggtgaagtttgcagttagccacgatcacgccactacacactccagcctgggcaacagagtaagtctccgtctcaaaaaaaaaaaaattataaaaggtctgtgatgaagaagctacctctccttccattaaatactttgagtcattcttctcaaaacagtcttagaatggaaactcttggtgttttatacttggttttgtccaatatgaaagatatcctagctacagtgatagaactggaaatggtggaatttggccacagggtagaaatgaagcgggaaaagggaaaggacaatactatgatcattcttattatacagaaggaattttacaggagaaaagatgaataac

SEQ ID NO: 878945 - DNA, 473 bp, Homo sapiens
ataaaatcagagatgaaaagggagacattacaactgatactgcagacattcaaaggatcattagtatctactatgagcaactacatgccagtagacatatgcaatctagtatgactgaaccatgaagcaacccaaaaccttgagccgggcaggtggctcacgcctgtaatcccagcactttgggaggccaaggtgggcggatcacgaagtcaggagttcgagaccagcctgaccaacatggkgaaaccccatctctactaaaaatacaaaaattagccgggcgtggtggcatgcgcctgtaatcccagctactcaggaggctgaggcaagagagtcacttgaacccgggagtcagaggttgcagtgagctgagattgtgccactgcactccaacctgggcaacagagtgagactccgtctcaaaataaataaataaataaatccaaaacctgaacaggacaatacaagtaaca

SEQ ID NO: 878946 - DNA, 636 bp, Homo sapiens
cacattttttttctctagtctaccattgatgaacatttaggttgattccatgtctttgctattgtgaataatgctgtgataaatatgtgcttgtatgtgtctttatggtagaataagttatattccttagggtatatacccaataatgggattgctgggtcaaatggtagttctgtttttagctgttcgaggaattaccacactgctttccacaatggttgaaataatttacactcccactaacagtatataagcattctgttttctctgcaactttgtcagtatctgttayttttttactttttaataatagtcattctgactagtgtgagatggtatcattgtggttttgatttgcatttctctaatgattagtgatgttgagcatttttgcatgtttgtcggtcgtgtgtatgtcttcttttgaagagtgtctgttcatgtcctttgcccactttttaatggaatggttctttgcttataaatttgtttaaattccttatagattctgatattagacctttgtgagatgtatagttagcaaatattttctcccattctgtagattattgattctgttgatagtttcttttgctgtgcagaagctctttagtttaattgggtcccatttgtcat

SEQ ID NO: 878947 - DNA, 642 bp, Homo sapiens
tcctaatgctctccctccccttcccccaacccctcaacaggcccgggtgtgttatgttcccctccctatatccatgtgttctgttctgagatggatttgctaagatgaatctttgcttgtgttctaagacctggtgaaatctcccctgggcaatggcctggggtgggccctgagctgtttgattggcaggtgacagagccctgaataaaaggcttcattctttgattttctttttggatctcatagtttagtgaggcaattctcactgcttcctctaggggtgattctcccctggggggtgctatattatggaatttggaggggcagttttgattgtgacaaagacttgggggctttgcttgcatttagtaggcatggcctgggaacactctatatcctgcattcatggggcagtattgcccattgaataattttttaagtgtactgtgggactttcatrtgggtaaacctgtattccaatagttgtgatgtaccctaaattttccaggaaagaaaccattgtgtaaatccttttgcttggaacttcactggagttagaaagtcacctgtggtggttaacttaccagtggagcccagccctgtccgtctgcctctgtggctgtcatgttcttgaagattcta

SEQ ID NO: 878948 - DNA, 604 bp, Homo sapiens
tctaattctgtgaagaaagtcaatggtagcttaatggagataggattaaacctataaattactttgggcaatatgtctgttttcacgatattgattcttccaatctatgagcttggaatgtttttccatttgtttgtgtcctcttttatttccttgagcagtggtttgtagttctccttaaagaggtcctttgcatcccttgtaagttggattcctaggtattttgttctctttgtagcaattgtgagtgggagttcactcatgatttggctctctgtttgtctattattgatgtataggaatgcttatgatttttgcayattgattttgtatcctgagattttgctgaagttgtttatcagcttaaggagattttgggctgggatgatggggttttctaaatatacaatcatgtcatctgcaaacagaaacaatttgacttcctctcttcctatttgaataccctttatttctttctcttgcctgattgccctagccagaacttccaaccctatgttgaataggagtggtgagagatggcatccttgtcttgtgccggttttcaaagggaatgcttccagcttttgcccattcagtatgatat

SEQ ID NO: 878949 - DNA, 624 bp, Homo sapiens
cctctacatgctgctttaaatgtgtcccagagattctggtacattgtgtctttcttctcactggtttcaaagaacgcctttatttctgccttcatttcgttatgtacccagtagtcattcaggagcaagttgttcagtttccatatagttgtgtggttttgagtgagtttcttaatcctaaattctaatttgattgcactgtggtctgagagacagtttgttgtgatttccgttcttttacatttgctgaggagtgctttacttccaattatgtgytcaattttagaataagtgtgatgtggtgctgagaagaatgtatcttctgttgatttggggtgaagagttctgtagatgtctaataggtttgcttggtgcagagctgaattcaagtcctggatatccttgttaaccttctgtctccttggatctgtctaatattgacagtggggtgttaaagtctcccattattattgtgtgggagtctaagtctctttgtaggtctctaagtctaagtctctttgtaggtctctaaggacttgctttatgaatctgggtgctcctgtattgggtgcatgtatatttaggatagttagctcttgttgaattggtccctttaccattatg

SEQ ID NO: 878950 - DNA, 624 bp, Homo sapiens
ggaaccagtgccagggtaggaaatccttaactgtaattgatgaattgctggaagctcagtgtggacaagtctgagagttaaaaactccaggggaaccaagtaatcaggggcccccacgcctttataagttttatttcctggagctctaccagatgagaacacagttaatattagagaaaaatcccctcatgcttccagcagagggaaaaggaaccattgtgaaatataccggagtattctgttcttcttaacagtctgtcctcaagctatttaaccagagtttaacatgctttggttttatcaaattctactgggcctcagagaagggaagcattcaactccagcccactctagccatctatgtgaaagaagcaaaatatccaactccagccctctctagcaattctatcccatctaagtgggggtgggggtagggaggaagactaagaagcacttgtaaagtttacagtccaaaggcaawcttacaaaaagactgaaacctaataatagaactcccttctccaaaaccttaccactacattactaaaggcccatttttacagtaattttttttaaatcctgtacatcatgtcttgttatcaagaaaaacttataaggcatact

SEQ ID NO: 878951 - DNA, 644 bp, Homo sapiens
tgacctccataagcccctactttaactggaaaaccacaatgactttttgtgcctcctggattgacatctgctcagagccagtgttcagtagtccccaaaatgtctgataatttccctttccctaaagcacagtgaccctggtaaaaggccagaggtctccttcrggaaggatgggagagagattcaccacgtaaattgtcggtaatgtagtggggtccttcctcaagggaacccggcttccccttcattcaaggggttctgggcacgtagactggctcaagtctggaaattgactgacaggccgtgattctctgtttttgtatttcaaattagtcttttgtccattcgacctagaagttttatccttatataaattaaataggaatgcagtaggcttcctatcaattttacttccaggaacgctgtgattaattagccaatgccacagctctacacaagttagactattctgattgctgctttgtctctgctgtccattacagtagctacgaccaccttgcctttgacggttgagtgctgtcacttggcccctgccacctcaagatccaattattcccgttgtcttgtagttgagtgactgcggttcccactgttcgatctgacatacagagaacagcaattac

SEQ ID NO: 878952 - DNA, 562 bp, Homo sapiens; identical to SEQ ID NO: 868990

SEQ ID NO: 878953 - DNA, 620 bp, Homo sapiens
tccatttgttgtgtcctcttttatttcattgagcagggtttgtagttctccttgaagaggtccttcacatcccttgtaagctggattcctaggtattttattctctttgaagcaattgtgaatgggagttcactcatgattggctctctgtctgttattggcatatagraatgcttgtggtttttgcatattgattttgtatcctgagacttgctgaaatgcttatcagcttaaggagatttgggctgagacgatggggttttctaaatatacagtcatgtcatctgcaaacggggacagttgacttcctcttttcctaactgaataccctttatttctttctcttgcctgcttgcccctggccagaacttccaacactatgttgaataggagtggtgagaaagggcatccctgtcttgtgctagttttcaaagggaatgcttctagtttttgcccatttgatatgatattggctgtgggtttgtcataaatagctcttattattttgagataatcaatacttagtttattggaataccatcaatacctagtttattccaacaaaagccaatggaaactaatacaaatggaatctaatacctctaataccatcgatacct

SEQ ID NO: 878954 - DNA, 660 bp, Homo sapiens
catcacccaaatagtatacatggtacccattaagtaatttctcattcctcacccctcttccaccctcctaccttctgagtatccaatgtctaccatttaatggagtaaatactgatagacataatttacataaacaaaagcttgataatatctggtcagggccaatcattgtggttctatttattaacggtgattgctttgggcataggcctgaaatgagacgtagtaaggagttctgctaggcggaaagtttacttttatagtgacacacgagaaagagatggtctcttttcgtccactagccatcactgggttggcatgtgacagctagaattgtggcagtcttcttatatgaccacaagctgacacaaagaaggtagtgaagtgaaagaatgaaagtaacgtgggacttggtcaacattgytgcactgcaggattaaccagccctggagccatcttgtccctagaagttttgttacttgtgataacagggttcccctattgcttaagctgttcgcgtacagtttcccttaatagccaagagcattctgatataggaatttgttcctaaactttaaacttataaagtaactcacaactagaataaagagtctttttttttcctttgacttttttcagtatggagctcacattcatatc

SEQ ID NO: 878955 - DNA, 528 bp, Homo sapiens
tttgatgtgggcatttagtgctataaatttccctattaacaccgtgttagctgtcccaaagattctggtatgttgaatcttttttatcattagtttcaaagaacttgatttctgccttaatttcattatttacccaaatgtctttcaggagtastttattcaatttctatgtaattgtatggttttaagtgaatttcttagtcttgagttctaatttgcttgcactgctgtctgagagactgtttgttatgatttcagttcttttgcatttgctgaggagtgttttacctctgattatgtgatcaattttagagtaagtgccatgtggtcataagaagaatgtatattctcttgtttttgggtggagagttctatagatgtctatcaagtctgcctgacccagagctgagttcaggtcctaaatatctttgtctaatattgtcagtgggatgttaaagtctcccactattattttgtgtaagtctaagtctctttgaaggtctttaagaacttactttatgaatctga

SEQ ID NO: 878956 - DNA, 622 bp, Homo sapiens
tttgttatgatttcagttcttttgcatttgctgaggagtgttttacctctgattatgtgatcaattttagagtaagtgccatgtggtcataagaagaatgtatattctcttgtttttgggtggagagttctatagatgtctatcaagtctgcctgacccagagctgagttcaggtcctaaatatctttgtctaatattgtcagtgggatgttaaagtctcccactattattttgtgtaagtctaagtctctttgaaggtctttaagaacttactttatgaatctgagtgctcctgtgttgggtacatatatatttagaatacttagatcttcttgttcaattgaacactttatctttatgtaatgcccttcttcrtcttttttgatctttgttggtttaaagtttgttttgtcacaaactaggattgcaacccctacttttttctgttttccatttgcttggtagattttcctccatccttttattttgagcctatgtgtgtcactgcatgtgagatgggtcttttgaagatagcataccaatgggtcttgcttctttatccgcttgccactctgtgtcttttagttggggcatttagcccatttacatttaaggttagtat

SEQ ID NO: 878957 - DNA, 565 bp, Homo sapiens
atctgcaaacagagacagtttgacttcctctcttcctatctgaataccttttatttctttttaaaatttttttattatactttaagttctgggatacatgtgcagaacctgcagttttgttacacaggtatacacgtgccatggtggtttgctgcacccatcaatctgtcatctacattaggtatttctcctaatgctagccctcccctaacctgcactccctgacaggccccagtatgtgatgttcccttccctgtgtccatgtgttctcattgttcaactcccacctatgaatgagaacatgyggtgtttggttttctgttcttttgttatttcgctgagaatgatagtttccagcttcatccatatccctgcaaaggacatgaactcatccttttttatggctgcatagtattccatggtgtatatgtgccatcttttatttatccagtctatcactgacaggcagttggattggttccaagtctttgctattgtgaacagtgctgcaataaacatacgtgtacatgtgtctttatagcaaaatgttttaaagtcctttggg

SEQ ID NO: 878958 - DNA, 565 bp, Homo sapiens
atctgcaaacagagacagtttgacttcctctcttcctatctgaataccttttatttctttttaaaatttttttattatactttaagttctgggatacatgtgcagaacctgcagttttgttacacaggtatacacgtgccatggtggtttgctgcacccatcaatctgtcatctacattaggtatttctcctaatgctagccctcccctaacctgcactccctgacaggccccagtatgtgatgttcccttccctgtgtccatgtgttctcattgttcaactcccacctatgaatgagaacatgcggtgtttggttttctgttcttttgttatttygctgagaatgatagtttccagcttcatccatatccctgcaaaggacatgaactcatccttttttatggctgcatagtattccatggtgtatatgtgccatcttttatttatccagtctatcactgacaggcagttggattggttccaagtctttgctattgtgaacagtgctgcaataaacatacgtgtacatgtgtctttatagcaaaatgttttaaagtcctttggg

SEQ ID NO: 878959 - DNA, 627 bp, Homo sapiens
agcttccttctagcttctagtcctgaaagtgccctcaaactcatcattagagcatacctttattgtattttcaagtgtatcataactattgtgtatatttaaataggcaaaagttccttttgtggaccttgattataaatacatacacacactttttttctatttccttttttttttttttttttttgkgatggagtctcactctgtcgcccaggctggagtgcagtggcacgatctcggctcactgcaacttccgcctccgcggttcaagcgattctcctcccgagtagctgggactacaggcgcgccaccccggcccggctatttttgtttttttagtagaggcaaggtttcaccatattggccaggatggtctcgatctgttgacctcgtgatccgcccgaggcagatcccaaaagtgctgggattacaggcttgagccactgtcccggcccagaaccccttttaaagtcacccttgaagggctcctctgattctttcctcaatggttaaggcagctcttggctgccctcttctgggatcaggtctccaagccacccattcctgttgaccagcaacccttttaggtcccatcttgcctgtgagctaggactggtgggaccatca

SEQ ID NO: 878960 - DNA, 596 bp, Homo sapiens
aatctataaatcatagcaatgttaatttaaagaaatacttattaaatgcccactatggactagacagagcaccctgtgcctctaaattgattatgaaagcagtcaatgaagtcttttcttggcttaaaatgtataaaatgccacgacgtccctggctttagttggttaacaacactttgcatgtgggctaaaacaacgtgtgtgcatttttaaaaattaccaaaactcatttggtcagatctcaattgaattttcagatgccaaaagtcaaatgtttccaaatagaaattcagtatagattttaagattttgtttaagattttgtctcccatcaagtcatgtcaagagaaccaagtttaaatagtggaatagttcctaayacgatctcaatattttgtctttccagaacgatatgtggtaccccaaattatctctctcctgaagtcctcaacaaacaaggacatggctgtgaatcagacatttgggccctgggctgtgtaatgtaagtaaatgcagcagaataattaaaaagcaaattcggatttagattttaacacttgaaaagagttgctttatgaccattgctaaagatgtgt

SEQ ID NO: 878961 - DNA, 597 bp, Homo sapiens
taagtcaatctgttttttataaagggctgggcatggtggctcatgcctgtaatcctgacactttgggaggtggaggcgagaggattgcttgagtacccagaagttcaataccagcttgggcaacatagtgagacctcacttctggaaaaaaaaaaaaaaaaaaaaaaaaaaaaggtgaaatttatttaattatttatttaatttttaaaaacacttgaaaagaatattacttgttataattaaattcttctcactcttttggtaatctggcagrtggtagatttttttaaattttttttgttggagatggcaatcctccgtcaattacccatttgtatttatttattaacattattttggttttggaagcccaaatatctgggattcagtgatgtggagggtagtatagacgcccctgggctatgtatagctggacagtataaaggaagcagctggagagccaggcaggggctgtattttagtcaaacaactcctggtgcagcttaaagcaccagacatttatgaatgactgcagtgtgctacgcaaagtgctaggccatggaggagagggagccaagagtttttaagcttcctatc

SEQ ID NO: 878962 - DNA, 705 bp, Homo sapiens
cagggaaactcctcctttcaaaaccatcagatctcatgagacttactcactatcaaaagaatagcatggaaaatacctgcccccatgattcaactacttcccactgggtccctcccacaacacatgggaattcaagatgagatctgagtggggacacaggcaaatcaaatcaaaaggatatacaaaataaccagaaaacaatgaacaaaatgacaggaataagtcctcacctatcaataataactttgaatatgtgttaaattacctacctaaaagatagagacaggcttaatggataaaaaatgacccaacaatgtctacaagaaactcacttcacttgtaaagacacacacagactgaaagtgaagggactgaaaaagatatgccacgcaaacagaaatcaaaagtaatcaggagtagctaaacttgcatcagataaaacagactttaagtcaaaaactgtaaaaaggacaaagaaggtcattatatcrtaataaagggataaattcagcaacaaaatataacaattctaaatatgcatgcaaccaacacaagtgcatccagacacacatagcaaatattattaaatctacagggagagatagagtccaatacaatgatagttgagaacttcaatatcctactgtcagcattggacagttcatctagacataaaatcaacaaagaaacattagatttaagctg

SEQ ID NO: 878963 - DNA, 621 bp, Homo sapiens
tttttttcttttcttttttttttttttgagacagagtctcgctctgttgcccaggctggagtgcagtggcacgatctcggcttgctgcaaggtccgcctcccgggttctcaccattctcctgcctcagcctcccgggtagctgggactacaggcacctgccactgcatcaggctaatttttttttttttgtatttttagtagagacagagtttcactgtgttagccaggatggtcttgatctcctgacctcatgatcctcccgcctcagcctcccaaagtgctgcgattacaggtgtgagccaccgcctgagtgagtttcttaatcctagttctaatttgattgcactgtggtctgagagactgtttgttatgatttcygttcttttggatttgctgaggggtgttttacttccagttatgtggtcaattttagaataagtgcgatgtggtactgagaagaatatattttctgttgatttggggtggagagttctgtagatgtgtattaggtccacttggtccagaactgagttcaagtcttgaatatccttgttaattttgtctctcgttgctctgtctaatattgacagtgtggtgttaacttttcgcactgttattgt

SEQ ID NO: 878964 - DNA, 581 bp, Homo sapiens
tgtggcaggaatccaagttaccctgagctaccagcagtataaccatacgggtctgcagcaacttcaatccttgcctcctcagaagagagaattccactgaggagcataaagcagaaaaagagactgaggcaaatttcagagcaggagtgaaagtttactaaaaagctttagaacaatgagaaaaagaaagaaatcaaagaaggaaagtacaacttggaagagggctaagccggtgacttgagagaccaagtgcacaacttgacctcttgacttgggrttttatactttggcaaactactaggatcttgcattacttctgcccactcttcaaatcttattgggaagctgctgatcaatttcaggtattttctatctattaggagactgcctttttctggcactggctgtgaccaattacattagagaagcagttaacaactgcctgaccatcacacctgatggttgcccaacactcttggtgtgttggaggagagccctattctgctctgctaatacctgactagatacctagtgtaacactgatagtctcaatattttggtaaggaatttcagatcactca

SEQ ID NO: 878965 - DNA, 581 bp, Homo sapiens
tgtggcaggaatccaagttaccctgagctaccagcagtataaccatacgggtctgcagcaacttcaatccttgcctcctcagaagagagaattccactgaggagcataaagcagaaaaagagactgaggcaaatttcagagcaggagtgaaagtttactaaaaagctttagaacaatgagaaaaagaaagaaatcaaagaaggaaagtacaacttggaagagggctaagccggtgacttgagagaccaagtgcacaacttgacctcttgacttggggttttatactttggcaaactactaggatcttgcattacttctgcccactcttcaaatcttattgggaagctgctgatcaatttcaggtattttctatctattaggagactgcctttttctggcactggctgtgaccaattacrttagagaagcagttaacaactgcctgaccatcacacctgatggttgcccaacactcttggtgtgttggaggagagccctattctgctctgctaatacctgactagatacctagtgtaacactgatagtctcaatattttggtaaggaatttcagatcactca

SEQ ID NO: 878966 - DNA, 594 bp, Homo sapiens
ttgggttggttccaagtctttgctattgtgattagtgccacaataaacatacatgtgcatgtgtctttatagcagcatgatttgtattcctctgggtatgtacccagtaatgggatggctgggtcaaatggtatttctagttctagatccctaaggaatcggcaccctgccttccacaatggttgaactactacagtcccaccaacagtgtaaaagtgttcctatttccccacatcctctccagcaccccttgtttcctgactttttaacgccattctaactggtctgagatgatatatcattgtggttttaatttgcatttctctgatagccagtgatgatgagcattttttcatgtgtctgttggctgcataaatgtcttcttttgagargtgtctgttcatatccttcacccactttttgatggggtttttttttccttgtaaatttgtttgagttctttgtagattctagatattagccctttgtcacatgagtagattgcaaaaattttctcccattctgtaggttgcctgttcaactctgatggtagtttcttttgctgtgcagaagctctttagtttaatgagatcc

SEQ ID NO: 878967 - DNA, 623 bp, Homo sapiens
tggcagacatggaaggggcagacatcacttcaaaccatactcctccggcaggaacacagtggtgttgcctcaagctcactgaaagggaaacaaggagatgcaatcttccaagactgagaagaaacaatgggactggtgaacatttcrctagcctgtgccacattcatatatatttgtttaattctcacgacacagggactttattatccccattttgcagataagcgagctgaggcatgaagagtttcataaatatcacaaggtttcatgaggagtaaaaggtagagctaagaaataaagccagtgaaattgtcttcagaggtcaaatttctaatttttatgaacatactgttcaaattaaatgtcacctaattcataaaatacttttatctgcaagacaaggttatatacttttaaaaactcatcagggaaataatgggttctttaactgttctttatttcagtgttatttattactacattgctactctcaatctttctgtgaatatgtgtgtacatgtgtgtatctgtacatttttgaaatgtattcttagtttctgaattttatttcagaactacgattattgactatcttcatcattgttgaaatatgtatgaagcac

SEQ ID NO: 878968 - DNA, 710 bp, Homo sapiens
gatcaatgatgttgagaaccttctcatatatgtttgccatttgtatgtcttcttttgagaaatgtctattcagatcttttgtccatttttaaatcaaattattagatttttttctgtagagatgtttgagctccttatatattctagttatgaaccctttgtcaaatggatagtttgcaaatattttctcccattctgtgggttgtcttttcactttgttgattgcttcctttgctgtgtggaagctttttaacttgatgtaatctcatttgtccatttttgctttcgttgcctgtgcttgtgtggtatggctcaagaaatctttcccagtccaatgtcctagagaatttcccccaataatttcttttagcaatttcatagtacaaggtcttagatttaaggctttaatctatttcgatgtgatttttgtatgtggtgagaaataggggtctagtttcattcttctgcatatggctatccagttttcgcagaaccctttatcgaagagactgtcctttccccagtgtaygttcttggcacctttgtcagaaatgagctcactgtagatgtatggatttgtttctgagttctctattctgatcctaggtctgtatgtctgcttttatgccaataccatgctattttcattactatagctttgtggtataatttgaagccaggtaatatgatgcctccagctttttttccct

SEQ ID NO: 878969 - DNA, 496 bp, Homo sapiens
gtttggcatttcccctgcttgcactcattctctcccctgctgccctgtgaagagatgccttccacaatgattgtaagtttcctgaggcctccccagcgatatggaactgtgtgtcaattaaacctctttcctttatatattacgcagtcttgggcagttttttatagtggcatgagaatggactaatacagtaaattggtacccatagaatggggcactgctgtaaagatactaaaaaatttggaaatgactttggaacgggtamcaggcagaggttggaacagtttggaggactcagaagaagacaggaagatatgggaaaatttggaacttcctagaaacttgttgaatggttttggccaaaatgctgatagtgatgtggacaataaggtccaggctgagctggtctcacatggaaatgaggaacttcttgggaacgggggcaaaggtggctcttgatatgctttagcaaagagactggtggcattttgccctt

SEQ ID NO: 878970 - DNA, 582 bp, Homo sapiens
tatgcttatatgatgaccacatagcacaaaaatagcaatgctctcaaattaatttgctctactaatgtgattatagtaaaataataatgactattatttggggtacctaatatgtaatcctaattattttttagaataatcatgaattcttggtgttttaacaaactacatttattaagatattttaatacagacataggaatagtcaggcagagaacaacgcagaatagaaaacytaaaaccagaccgacgggtgataaatatgtcaattcatatttgtaaggaaagtgtgggttatttgatagctggcacaggaataattggttaagtattgcgaaaataatcttatatttatacctggaattccatactaaaataattctaattaaataatatatattttaaaaaccaacacaaaatcataaaatgtaaaaaggaacatataaggaaatttatagataattttatgagtaaaaacagagacaaatttacttatacgttaagcacatttcattaagtctgtcagctcacaacaactctcttttctcttgtaagggcctttctggactgagttcacagaca

SEQ ID NO: 878971 - DNA, 622 bp, Homo sapiens
taagaggagacttccaactacagttagaaaccattacactttgagaatattgattgagaggtgataaaacatgatgtgtgttatcaaagagcagagccttctcatgtggaaatgctaggacagcaagagtaggagagcagactaaccactagaatcagggttaggccttcataaagcaactgatatcccccaacctgcagaggtctgtttccttgtgttactcagtgaactggtattttgtattttcctggtattcttaggtggccattattgctgttattccagctgtratactgaaaagaaatagcgaagattttgccttcagaaagttctcagtgacaaccaggtcagctaaaagatatattatgtgatgtgcatttacctttccttttctgctagtgtctgtgttagactccatcccactatcatttggttgactacagaacttgaaactacttagatttcaatcccttaaattctcattaactatatattttattgccttattaaagaattttgttgttaacacgttttacctttgacgaaggagtaaactggcatttaaattcagcattgcaagtccttaaattaacattgtaaataatattccaccaattagcaa

SEQ ID NO: 878972 - DNA, 586 bp, Homo sapiens
caagagctcttgaaagaagcactaaacatggaaaggaaaaaccgataccagccactgcaaaaacacacaaaaatataaagaccaatgacactgaagaaactacatcaactcgtgtgcaaaataactagttagcatcatgatgacaggatcagattcasacattacaatgctaaccttaaatgtaaatgggctaaatgccccaattaaaagacacagactggcaaattggataaggagtcaagacccattggtgtgctgcattcaggagacccatcttacatgcaaagacacacacaggctcaaaataaagggatggaaggaaaatttaacaagcaaatggaaagcaaaaaaaagcaggggttgcaatcctagtctctgacaaaacagactaaacaaataaagataaaaaaagacaaagaagggcattacgtaatagtaaagggaacaattcaataagaagagctaactattctgaatatatatgcacccaataccagagcacccatattcataaaacaagttcttagagacctacaaagacacttagactcccacacaataatgggagatcttaacaccccactgt

SEQ ID NO: 878973 - DNA, 607 bp, Homo sapiens
aggtcaacaatggtgtgcccattaaatgacatatttttcagcagttaaaaagccacttccaaaagcttaccagaaaatgtttctgagctatattttatacttaaaatgctgataaatatgaaaatatatgtattaatatatcacaaggctcaaagttaaaatgttgaaaaggatttacaatgaacattgttctaccattcctgtcattcggctccctagttcctcgcccaaacaattgtttcctttttttgtgtgtcctaacaatgtgtttacataagcagatatatttatatatgtgtgtatttatgggtacatacatttatatatgtatgtgtatttgtatgttataaaattatatttacatagacaggtgaccttaaaacaacacacagctatgcactgtgcaggtccacttacaagtgagtttttttccataaayatattacaaaatgatctggagattttcagcaatctggaaaaactcagaaaccacgtcaccaataaatagcaaaacaaaataagaaaaagttaggtacgtcatgaatgcataaaatatacatagataccagtctatttatgtgttaatcaactgttgatgttatcagta

SEQ ID NO: 878974 - DNA, 551 bp, Homo sapiens
  misc_feature 1, 2, 3, 4, 5, 6, 7, 8, 9, 10: n = A,T,C or G
nnnnnnnnnncccagcataacgttttaccagctatctggcaatcccttagcgcagtcaagttgacgcaaaaaattaaccatcacgagaaaagaataacccagaaaacgagctgattaactatgagaagtggggagaaggaggtagaaggaacatcatacatsttcaaaagttaaagttaatgttatatgtattcaaaagtaaaattaaatctataggaatgatgaagggaaaaacaacatttcaagcaggctaaaacaaatgaacctaattgcatttcaaatgaatactgtccttacagggaaactgggggaaagggagggaaggaagaggacaggaaggagacataggaatcaaaccaagcaaaatattaatctgggcaaaagtgtacagttaggatttttgtacatgatttctttttgaatatttttattaatccaaagtattttcccaattagaaaggtaaaaaagaaaaaaaattaaaaagaccaacaactaaaacaaaacaatgctgccgagacctggcttctgctcttgctctcagcctggggtt

SEQ ID NO: 878975 - DNA, 642 bp, Homo sapiens
tataattaccttggatgtccaacaacttgtggcaatatcatctagtaaatccaagtcaacaccaatctgttgactcagaagtccaccttctaggtgtacccccaagataaatttgttcttcaaaaaaaatgtgatttcttcataaaaggcacatctggaaacagcaaaaatgcccacaaataagaaaacaaatgaacacatcacagagtgttcacactattgaatattgcaataaagcaaaaactgaatatagcaatagaaatgaagtatttctacaaagagcagtatgcataaatctcccaaacattaaaaaaagagcaggagaagccaaacacaaaataatctatagtgaattattccctccagatgaattccaaaaatacctaaaattattggagattaattatcctcaccccttctctgaagggagaggtagaagttgggaattcgtggggaaggcatggggaaacattctgataytctgttcacattctatattctgaataattaagtattctggaaggggttacataggtgcacagcattatacaaatcttcgtctaggtatagtctcaagatttgggcatgttaatatatgagtgttacacttcagttaaaacagttcagtttcttttgaattcc

SEQ ID NO: 878976 - DNA, 588 bp, Homo sapiens
tttagactctccattttatttcatcaatctgtagcaacaagatatattcaataattttgaactctccaaaattattaaatatattccatccgataatatttttgtactcttcattttattccactgtctacacatatgctaatgccacattcacatgcatacttctgctttgaagacaaattttatgaattatgagtcctccaattttgtcctycctttttactataattttggctcttctgtatccctggcatttccatataaatttaaaaatcaacttgtcagtaactacaaaaaagaaagctggaaatttaatagggattgttttgaatatgtagatcaatttgcaagtattgttttgttaacaatattacatcttctctttaatgaacaggcatttcttaccatttacttgggtctttacttctttttattattattattattatactttaagtttcaggatacatgtgcacaacatgcaggtttgttacatatttatacatgtgccatgttggtgtgctgcacccattaactcatcatttagcattaggtatatctcctaatgctatccctcccccatccccc

SEQ ID NO: 878977 - DNA, 658 bp, Homo sapiens
agcaccaagtcacctcttgaattctttgctgcttagaaatttcttccaccagatatcctcaatcatctctctcaagttaaaagttccacaagtctctagggcagaagcaaaatgctgccagtctttttgctaaaacataacaagagtcacctttcatccagttcccagtgagttcctcctttccacctgagaccacctcagcttggaatttattgtccatatagctatcagcattttaggcaaagccattcaacaagttcctaggaagttctaaactttcccacattttcctgtcttcttctgagccctccaaactcttccaatttctacatgttacccagttccaaagtagtttccacatttttgggtatcttttcagcaaygccccactctactggtaccaatttactttattagtcttttcatgctgctgataaatatatacctaagactgggtaatttacaagagaaaggggtttaattggactcagtgttccacatggctgaggaggccttgcaatcatggtggaccattgtcagactctcagttaatctttcctagatgtagacaaggaaaggccttgtccacttcccacccacccacccagggctggaatgtattatatatttaaatatatttcttggtttattcactaga

SEQ ID NO: 878978 - DNA, 643 bp, Homo sapiens
gccattctctggagacattttctccattgtcttggggattaacattcagctcattgttacttatgcaaatttctgcagcctgcttaaatttctactcagaaagtgttttttgtttgtttgtttgttttctactgcatcatcaggctgcaaattttctgaacttttatgctctgtttcccttttaaaacaaaatgcttttaacagcacccaagttacctcttgaatgttttgctgcttagaaatttcttccagcaggtactctcaatcatytctctcaaattcaaagttccacaaatctctagggcagaagaaaaatgctgccagtctctttgcgaaaacataacaagagtcacctttgatccagttcccagtgagttcctcatttctacctgagaccccctcagactggactttattgtccatatcactatcaggatttttggcaaagccattcaacaagtctctaggaagtttcaaactttcccacattttcctgtctttttctgggcctttcaaactgttccaacctctgcctgttactcagttccaaagtcacttccacattttcatgtatcttttcagaagtgccctactctactggtaccaaattactgtaatcgtctgttttcatgctgctgatgaa

SEQ ID NO: 878979 - DNA, 664 bp, Homo sapiens
ttgttttagcccaaaatcttcttaagctgataaagaacttcagcaatgtttcaggataaaaaaatcaatgtgcaaaaatcacgagcatacctatacaccaacaacagtaaagcaaagagccaaatcacgaacaaactctcatttacaattgccacaaaaagaataaaatacataggaatacagctaactacggaggtgaaagatctctacaaggagtactacaaaccaatgttcgaagaaatccgagatgacactaacaaataaagaaaattccatgctcatggataggaagaataaatatagttaaaatggccatactcctcaaagcaatttatagattcaatgctgttcctattaagcaatcattaagattcttcacagaactagaaaaaaaattttaatttatatgaaaccagaaaagagcctgaatagycaagaaaatcctgagcaaaatgaacaaagttgcaggcatcacattaccagacttcaaattatactacaaggctacagtaaccaaaacagcatggtactggtacaaaaacaggcacatcaaacagtggaacaaaatagagagcccagaaataaggccatacatctatgatcatctgatcttcaacatagctgacaaaaacaagcaatgaggaaaggattccttatttaatag

SEQ ID NO: 878980 - DNA, 631 bp, Homo sapiens; identical to SEQ ID NO: 878035

SEQ ID NO: 878981 - DNA, 693 bp, Homo sapiens
ggatgacccgagaatcactgaagccaaatgtttacgttctctgacatccttcctattgataaatatatcatatcaaatgattataaaataatttattatatttgcgatgaaaaatctgttgatcctctcttcattctttcttaagattctaacacttaagagcttcctgttgttttgttacttccattgctttgcattttcaatagcacttagttaaaattttcttcgttactctagtgcttgccattacatgcattttagaaaatgataaaaaatgatcataattatataaagattttctttcttaagactgaaaatcacagaagggtaatgttttcttttgttttcattttcaatggtgaagatttgcttgaagttatctttacgtatgacaatttaaccatttaaaaactttgtgtatgctaaagttaattgctttcttattgagtcttattaaaatgtggagttgcagttaagaaatgtaacaaaaactgttttctgcacccatacatcttayagggaaagataatcttagttaatgctgcttcataccatggtaagcaaggcataagttaggatagctttgtagcaatctactgtagtttactggccaaatccactcctttcttatcgtaattccttaaagcagagtttagcacaaatagtaatgaagattttagtttattcattcat

SEQ ID NO: 878982 - DNA, 629 bp, Homo sapiens
acagagagctcattgccaagctgacgggcactgaaaacaggagagcagagagcgttctcacttctgggccttacagcacgtgtccttgttgtaccaagttgtaactgaagttttattatcctgtggaagcaatactaggactatgaggtgtgaggagttggaataacattcttagtgtaatctttccagtgaattgtgaacgacacggatgtattggctgaactgcaattttttattgtatgtattcaaggtatatagcatgatgttttgaaatacatatacaccaccaggaaatttaytgttttaaataggaaattgggttgttagttttgaatactatcaaaataaagattttttggaggaaagggaagtgcatttgttgagtgactacatttcaggcatgtattcaaaaaacagcttccatacagatattattatcttcactttataaataaaaaatttgagaatcataataattaagtttcccaatttaacatctctaaaaaatgatagagattcaaacacagcagtctctgtgcaaaccgcatgcttttcaaactcccctggctgataatttcagaatacaatttgttcacagattggaaactgccaatgttaaatataaaaaa

SEQ ID NO: 878983 - DNA, 694 bp, Homo sapiens
ctttaactccgtgtctgaggagttttgtctgcagctcgtcctgctacaatatttgggggagtaatcgaggaaaacttccctggcattgctagatacctggatatccacatacaagaagcacaaagaacacctgggaaattcattgcaaaaagatcatcacctaggcacattgtcatcagattatctaaagttaagatgaaggaaagaatcttaagagctgtgagacaaaaacaccaggtaacctataaaggaaaaccaatcaaattaacagcagaattctcggcagaaaccctataagctagaaggaattggggccctatcttcagcctcctcaaacaaaacaattatcagccaacaattttgtatccaggcaaacaaatgctgagggaatttgccactacaaagccactactacaagaactgctaaaaagagctctaaatcttgaaacaaatcctggaaaaacataaaaacagaacctctttaaagcataaatcacagagaacctataaracaaaaatacaattttaaaagcaaaaacaaaaaaaccaaggtacacaggcaacagatagcacaatgaatgcaatggtacctcatatctcaatattaacatttaatgtgaatggcctaaatgctccacttaaaagatacagaactgcagaatagataggaacttaccaaccaactatctgctgc

SEQ ID NO: 878984 - DNA, 644 bp, Homo sapiens
actcccatcataggctcaagggcacaggagggcagaatatttcaggggacagacccagagtgctatttgcatcccagcacagcacttctaagcctcaggtatggcttatgctgcagctcaggaaagtacaagtcataaaccttggttggcatccacatggtgctaattctgcaggcttacagaaagcaagagctgtggaggctggcagcccctaactggacttaaaaagatattcctattgttaaaagcctgggggcctaggcagagactaattacaggggcagaaccactgcagagaagtctcactagaccaatgccaagcagaaatacaggattgtagctgctgcagagagcccccatcaaggcaattcytagtggagctatggaagtgaggccatcacagagagtcccactacagtaatatctagtcaagggagctcggccactgcaaagtccccaccagggcaatgcctagtggcattgtggaagtgaggtcactgcagagagttcccaagagggcaaggccttctgaagccatggtagtgggactgccactgagaccccagaactgtagagctgccagcatgcaatgccagcttgggagagctgggtgtactgagcccagccaagtcaaaaggacagag

SEQ ID NO: 878985 - DNA, 446 bp, Homo sapiens
tggaggaatttggtatttgaatgtttttgaagccaatatttttgaaattttagctgtttagtcaagggcttttttattctgacattccttaaccattctgtctttccatttaaaagaaatgtctgtgtgacatgtcttcctggtttttttttgtcctttgtattaatgctccagtttgttttatactatatttcttagcccccagatttatcatgggacatcactgaaaccagtggtagggtcgtttgtgacagcctaacaatgtgaatctaactatcttgatatttaatttatgtmtttctgaaggatttaacaagttaattgtgtatattctaggtgtgtcacggggtcccagccctgtcagccttggaaatcaggataccttacctgtggcagttgcccttacagaatctgttaatgcctactttaaaggagcagatcccacc

SEQ ID NO: 878986 - DNA, 643 bp, Homo sapiens
gtttacatttaaagttaatatttttatgtatgaattttatcctgtcattatgagtttaactggttaatttgttcgttagttcatgcagtttcttcctagtcttgatggtctttacattttggcatgattttgcagtggctggtaccagttgttcctttccatgtttagcgcttccttcaggagctattttagggcaggcctggtggtgacaaaatctctcagcatctgcttgtctgtaaagtatgttatttctccttcacttatgaagcttagtttggctggatatgaaattcaggtttgaaagttcttttctttaataatgttgaatattggtccccactctcttctggcttgyagagtttctgccaagagatctgctgatagtctgatgggcatccctttgtgggtaacccgacctttctctctagctgcccttaacatttttttccttcatttcaactttggtgaatctgacaattatgtatcttggagttgctcttcttgaggagtatcgttgtcgcgttctctgtatttcctgaatctgaatgttggcctgccttgctagattggggaagttctcctggataataccctgcagagtgttttccaacttggttccatcctcctcgtcactttcagatac

SEQ ID NO: 878987 - DNA, 640 bp, Homo sapiens
ctctggcagcactagaaatgatggctctatctttgcatttccaactctaggacaatgagtaaaagtttactgcattggattgggctttaatctatctgcaataaaggttttatatataatacagcaccgaggagtgataaaattatttatgtgaattaagtcttagtttcctctcctcaaggagtgtcataaatttctaatttagtttctaaaaaaaacttaacattaatcctttaaagctgggcactttcgtgcagtagaattagatcctttctggaacaaggtggagtataaagaaatgttgccttactctaatgttgctcttggttgtttgttttatgcgtcaagagcccttaaaaggttcctcatcgctaagatagactaatactagaaactctttgaaaattaaaccgttctttgaattcttcawtattgctgaaagtatctcttaaaagacccatacccaggtaaaaactttccaatctaaaaaagaaaaatgtcctactttgatctcaaccattactgaatttgtatcccatgctattttgctaaatccaatttaactgttccagaaataatgcttaggtttggtaaaagttgcagttcttaaaggtagtggagaaactcagagcttgacata

SEQ ID NO: 878988 - DNA, 630 bp, Homo sapiens
cttaattctgtttggggtttttcctctatattgcaggatcaaattcattgtaccctctcagaggaaccagcataagctgcccgatgtcctcacttcagaattctgcttcctcctctgagttcctaaatgcaaataattttaacttctttcctttgttccccaattctaggagtagtaaatgcttcttgcagttgctacctttgtgacatctttttttttccctttcatttactttgttaacaactttatacctagataaggattatattctctctgttcaaataactgatgtggtttccktcttgaatgatacagatgcatatatgagctgcaatttttctgctttctttcattcacattggcaaaaagatatttattcatgtctaaggatctgtttatgattcacaaaaacagaaacaatatgaattcacatcaaacaatttgtcaaaatataagaaaactgaaagaaataacaacagagcagcacatagtgtagatatttgaggtttttttcccattctccataactgagcagtttgctcaaagtgctcctatatctttttctcagttctggaagccaataaatcccaaaataacaccattacagtaaaacaagctgcatagcccaaa

SEQ ID NO: 878989 - DNA, 634 bp, Homo sapiens
aatggtttcctgggccaggtccagggctcccctgctgtgtgcaacttgagtcccagctgctccagccatggctaaaatgtgccaaggtacagctcaggatattgtttcaaaaggtgtaagcccccattcttggcagcttccacatagtgttgggcctgtgattgtatagaagacaagaattgagtttggtgaacttctgcctagatttcagaggatgtatggaaacacctggatgtccaggcagaagtctgctgcaggggcagagccctcatggagaagctctactagggcagtgcagaagggaaatgtggggttggagcccccacacggagtccctactggggtactgactagtagaactgtgagaagagggccactgtcctccagaacccagaatggtagatccactgacagcttgcattatgtggctggaaaagctgcagacactcaacagcagccatgaaagcagccaggaggggsactgtaccctacaaagccacaggggcagtgctgtccaagccatgggagcccacctcttgcatcagcatgccctggatgtgagacatgtagtctaaggagatagttttggaactttaaggtttaatgactgccctattggattacttgcatgagg

SEQ ID NO: 878990 - DNA, 654 bp, Homo sapiens
ttggttttctttgtgcctcctttgtgccagacttaaagccaaagaagctagcagtcccaatacaccaatgggcacagacagaaaagtcccagcaaaagcctgctgtctttagccaaaagacaaggaagagggcagcctagcaagaaggaaaacttttagacaattactgccatgctctagtcaaaacaccacaggaaaaaccttcagcactatccccagcatgccagcaaagacccatgcttccactcttgcctggagagttaggactttcctccccacccctcaacccagtgctaacagtagaagccacatggagtgcagtaataaggcactcctttccctccaaattagaaaggtatcagtggaggtctagtgggaaaccggaactcccacccctgccactagtaatgaggagcccccytgtgggtatcaatggaggctgagtgggaaatctggatttctgtcaccacctaataataatgaggcaggatccacttcccctaccacagtgatgtcagaggagaacaggtgatataaactgaattgtgtactccactccctgagttcatatgttgaagtcctaactctcagtacctcaacatgtggactgtatttggagataaggtctttaaagaggtaattaaggttaaatga

SEQ ID NO: 878991 - DNA, 620 bp, Homo sapiens
gtcccattgtccaacaatccatgcttcactctgcactattccttcatcatgacaccacatcctactttcttcaacttgccagataatacatgtgaaacagtaacagaacatgtcatccaagagataaaactccaacaatgctgggcctgccagcaggcrtcccaacctgggtaaccactcgtacaactgatttccacactcttggaggtatgtgatatccatactactaaccagtcgccatcctctctggtcaccctccagctcctttacttccccaggcaccctcaacctcatcaggttcttcctctgaatttttccttcacagtcccacctttcctgccctctgtcaacgattgatattatataaagccattgaaagtacaagggcctcacacgtatgcactggtgaatgcccttcccataaaaggggataccaggccacctttttgtatattataaattgggcctcatcacaatctttggtataacaggcataagtctagatcttttcagttctgtagcagacttcattcttagagctgccagccaaacaacgtcacaattcctggcagaccatatataccaaacagcccaagatttagaagcccttaatgagataa

SEQ ID NO: 878992 - DNA, 578 bp, Homo sapiens
tggagattctaaggattttagttgtatgccaggagacatgttagtgaccaaatatgcatttaggttatcaccgtacatacccatctttgaacccagatcctcttacataaaaaggatttacaactcagccaggcgtggtggctcacacctgtaatcccagcacttttgggaggctgaaggtgggtggatcacctgaggtcaggagttcgagaccagcctggctaacatggggaaaccccatctctacaaaaaatagaaaattagccaggtatggtggcacatgcctgtagtcccagctactcgggaggctgagacagragaaacacctgaacctgggaggcaaaggctgcagtgagcaaagattgccccactgtactccagcctgggcgagacagagtgagactccgtctcaaaaaaaaaaaaaaaaaaaaaggatatgcaactcaaaagataccaccacattatcagaatcccatttagtcacattaataagtccagtccagtgggtgaagccactcaggtttgctggcttccatttgatatacggttctaaaagtaggagtggtcttagcaaaaca

SEQ ID NO: 878993 - DNA, 642 bp, Homo sapiens
aataatttatggaaacatgagttgaaatgcagggtacactcagcactgcaatgtagacctttattttgattattatcttattccacttggctcctggcttctcctcatcctctgttctcaagtcggattcttattatttgggactctgtctagtgttcccttgattgtatatagtataaatttaacaatcatttgtcacttttctcacaatatgaggtgaaaagattttgtaataacagaccactgcatattgtacaattaagttttttcaacaattttaaggcaggattcacagtaaacacttttttcttttaaaaaattatttttaaggaatagagacagtctcaccatgttgcttggctggccttgaacttctaggctcaggcartcctcctacctcagcctcccaaagtgctggaattataggcatgagccaccacacccagcccacagtaacatttctaatgtggcagatgtagttacattgacaaaaatttttctggtaaaggccaggtgtggtggctcactcctgtaatcccagcactttgggaggctgaggcaggtggatcacttgaggccatgggttcgagatcagcctggtcaacatggcaaaaccccgtctctactaaaaatacaaaaatt

SEQ ID NO: 878994 - DNA, 632 bp, Homo sapiens
ttaagaatgttgaatattggcccccactctcttctggattgtaggggttctgctgagagattcgctattagtctgatagggttccctttgtgggtaacccgacctttctctctgggtgcccttaacattttttacttcatttcaaccatggtgaatctgacaattatgtgtcttggggttgctcttctcaaggagtatctttgtggtgttctctatattttctgaatttgaatgttggcatgccttgctaggttggggaagttctgctggataataccctgaatagtgttttccaacttggttccattctccctgtcacttttcaggtacaccaatcaaacgtagatttgttcttttcacatagtcccatatttcttggaggctttgtttcttttcactcttttttctctaatygtgtgttctcactttatttcattgagttgatcttcaatctttgatatcctttcttccacttgatcgattcagcttttgatacttgtgtatgcttcttgaagttcttgtgctctgttttcagctccatcaggtcaattatgttcttctctaaactggttattctagttagcaattcatctaaccttttttcaaggttcttagcttccttacattgggtt

SEQ ID NO: 878995 - DNA, 553 bp, Homo sapiens
cttgaacttatagatagagaagcctgtgtggagagggcctcctgacaagaactatgcccttctgttgacttctggagtgcactataaccccacagggaggaagatgacagaatagacagctcgaccggactcttttcctttcctttcctctcctctgatctgctgctggtgctcccattgaccaaacccaacaggaaaccaaaggtcagcctctcaaggcataagcaaggttaacaaaatagatatggagggggaagatgtaagaaatcctactagctattgctatttatccatctatctgtcacctatctatctgaaatagttaatacatacacatggktttagaaattcaaaaattgtaaaagtgtaaacggtgaaaacaaagtcttcttttatctctgaacttcagtctcccaggcactcctctgccaagataatttcttatgaaactttcctgttatattctctgatcatcttagcatagatgtaaatacatcctccttctaccacttgcattctaagccaacggcaatatgccatgcaaacccttctg

SEQ ID NO: 878996 - DNA, 613 bp, Homo sapiens
gacttggtgatgcgggctcgtttttggttccatatgaactttaaagtagttttttccagttttgtgaagaaagtcattggtagcttgatggggatggtgttgaatctataaatcaccttgggcagtatggccattttcacgatattgattcttcctacccatgaacatgaaatgttcttccatttgtttgtatcctcttttatttcattgagcagtgctttctagttctccttgaagagttccttcacatccctggtaagttggattcctaggtattttattctctttgaagccattgtgaatgggagttcactcatkatttggctctctgtttgtccgttgttggtgtataagaatacttgtgatttttgcacactgattttgtatcctgagactttgctgaagttgcttatcagcttaaggagattttgggctgagatgatggggtttgctagatatacaatcatgtcatctgcaaacagggacaatttgacttcctcttttcctaattgaatgccctttatttccttctcctgcttgattgccctggccagaacttccaatgctatgttgaataggagtggtgagagagggcattcctgtcttgtgccag

SEQ ID NO: 878997 - DNA, 498 bp, Homo sapiens
ctgagataatgaaatgtataacaagcagcctcttaacgtccacacttgctcctttcgaatcaatttgctacaccattttccagaattttttttttttagtgtacatgactgtgtgtgtgtatgtgggtggtgggagttggactgggagtgattaacatgtttgagctcctaattactacataaatagaaatttmtttagtgtatgcaaacccacatgatatttcctaacaatacacgtatttgacaaagaaacaaacaatacatggtctagttttctaggccacaatagtgctatgtggaataaccaggactcaaataatatccttccatatagagagatgctacaaaatcacagcaatctgaagacatacatcagtcatatcaattaccttaggtttctagtttgattgatttgatgctttccttgtgctcttccccaccacactcttaaatccacactgcattttactgcactagtgtctaattcagtgccaggct

SEQ ID NO: 878998 - DNA, 579 bp, Homo sapiens
ttttaaacagtttaatttttctgggtacagagtaaatgtatatatttatgaggtatatgggatatattgatacaggcatacaaaatataataattacattgggataaatgaggtatccatcacctcacgcatttatcctttgtgttacaagcaatccaattatactctttaaaatgtacaagtaaatcagtattgactatagtcaccctattgtgctatcagataatagatcttattccttctttcaaaatattttttgtgcccatttaatcatcccctctccccttgccctacatttcccaaaccctggtaatcatcattctactttctatctctgagttaattgttttaatttttagctctcacaaataagtgagaasatgaaaagtctgtctttctgtgcctgactgatttcctttagcataatgacctccagttccatccatagtgttgcaaatgacagggtctcattcttttatggctgaatagtactccattgtgtatatgttccactttttttttttttatccattcgcctgttgatggacacttgggttgcttccaagtcttggctgttgt

SEQ ID NO: 878999 - DNA, 605 bp, Homo sapiens
agctgtgagagagccatgagaagcaagcccaaggagagatgctgcccctactacacgctccatgggcacttgcaggagacagagctcccgacatctgccagggcctgaggaaatcaacaccagatgacaccggtgtccacaagatttcytgcaccacatctctcccaacactaggtgtgccactggctatccaccaagtggagttagagaaatcgaatttctaggcagggaaatggagcagtcacctgcttccacttcttccactgtatgcttccaacctgaagccaacctgagccagggacatggggagatgcttgaagtctaaatgcagtaccaagcctgaaatcagtatatgttacctgttaacccctctattaaagcaagacctcctagcaactaaaatgtccagagagagtcttaataaacactcttaaagagtgtccagaaaatccatgggatctggccggaatttcctcaaggaaaaggaaaaaaatacaagttcctcatgggagcacctttctgattatctcaatgttatacttgttcaaagaaacattattacagagacaaatcccacctacccttccttggggctggtttgctac

SEQ ID NO: 879000 - DNA, 605 bp, Homo sapiens
agctgtgagagagccatgagaagcaagcccaaggagagatgctgcccctactacacgctccatgggcacttgcaggagacagagctcccgacatctgccagggcctgaggaaatcaacaccagatgacaccggtgtccacaagatttcctgcaccacatctctcccaacactaggtgtgccactggctatccaccaagtggagttagagaaatcgaatttctaggcagggaaatggagcagtcacctgcttccacttcttccactgtatgcttccaacctgaagccaacytgagccagggacatggggagatgcttgaagtctaaatgcagtaccaagcctgaaatcagtatatgttacctgttaacccctctattaaagcaagacctcctagcaactaaaatgtccagagagagtcttaataaacactcttaaagagtgtccagaaaatccatgggatctggccggaatttcctcaaggaaaaggaaaaaaatacaagttcctcatgggagcacctttctgattatctcaatgttatacttgttcaaagaaacattattacagagacaaatcccacctacccttccttggggctggtttgctac

SEQ ID NO: 879001 - DNA, 605 bp, Homo sapiens
agctgtgagagagccatgagaagcaagcccaaggagagatgctgcccctactacacgctccatgggcacttgcaggagacagagctcccgacatctgccagggcctgaggaaatcaacaccagatgacaccggtgtccacaagatttcctgcaccacatctctcccaacactaggtgtgccactggctatccaccaagtggagttagagaaatcgaatttctaggcagggaaatggagcagtcacctgcttccacttcttccactgtatgcttccaacctgaagccaacctgagccagggacatggggagatgcttgaagtctaaatgcagtaccaagcytgaaatcagtatatgttacctgttaacccctctattaaagcaagacctcctagcaactaaaatgtccagagagagtcttaataaacactcttaaagagtgtccagaaaatccatgggatctggccggaatttcctcaaggaaaaggaaaaaaatacaagttcctcatgggagcacctttctgattatctcaatgttatacttgttcaaagaaacattattacagagacaaatcccacctacccttccttggggctggtttgctac

SEQ ID NO: 879002 - DNA, 626 bp, Homo sapiens
attcctattactgtaacagggatatttaccacacagcttgggctggatctcatgtgtcttggtctatttccagaaaaaagaaaaatttgccacagttctgccataatctaagaagtccagaaatctagtagtttatttccctccaaggcgacaactatcccagacttttctagaactcgtgagaatcttcattcagatgttgatccagtgtttttctgtaattttgcattctttgtgattgggtagaaaccagactcagtgagatgtctgaagcatgggaattgggcaaccttcttgcccttcccagcagctgtgagtgttagaatgccagtgtcccctggtagattctggagatagaccatctctaaagatttagagttttctgctccagatcaacaacttctcaaacaataattattaatacataaaccmcttagattctcagtcttaaagcatgtgaattcgagttgttatgaggttttcttctagaattacaagtacctattacattatatttgggttagtaaatggactacttaggtgattttctcaaggcaaagggagtattcatttttgtcacattttgtgagaaaaaatgtccacctttgaaatgagtctttctctca

SEQ ID NO: 879003 - DNA, 630 bp, Homo sapiens
gttaggaataagagagaaggatcaaatgggaaagtaggatcttctttcctgtttatttcttagggggtgggggcggagcaaacaagataactatagggggagaagttaggagattttggaaaactgcctttattttattttttcctcttgccctgcgcctcctagcatctttatgcttgcctctgggcttttctgctccggcttgactgggtcccgcaaagtccacttcctttttttttaatttttttttcccccaaagagaagcacctgcaagtgtaatgggtgttacggaacactcgtccaggccaggatgagaaaccctctgactgttggctaggaagaaaagaaaagcgggaaatacttaaaaaccatttatgaagtgtacctgtgaattgaaaaayagggtctcattttaagacagcttgatttgagggtgaggggcttgactcagttgcattttaaaaaacaaaacccaaccaaataaaaaggaatacgcatacaggcactaaggtctcttccaaaccccaccccagggctggctcttggggctgggatgctgctggggaccggtcttcccagctcttggcctggccggtttgcacgcagtgcagttgctgtgtgtgtgttgcg

SEQ ID NO: 879004 - DNA, 572 bp, Homo sapiens
tttacagccgaattctaccagaggtacaaagaagagctggtaccattccttctgaaactattccaaacaatagaaaaagagggactcctccttaactcattttatgaggccagcatcatcctgataccaaaatctggcagagacacaacaaaaaaagaaaatttcaggccaatatccctgatsaacattgatgcaaaaatcctcaataaaatactggcaaaccaaatccagcggcacatcgaaaagcttatccaccacaatcaactcagcttcatccctgggatgccggctggttcaacatacgcaaaccaataaatgtaatccatcacataaacagaaccaatgacaaaaaccacatgattatctcaatagatgcagaaaaggcctttaatcaaattcaacaacgcttcatgctaagaactctcaataaactaggtattgttggaacatatctcaaaataataagagctatttatgacaaacccacagccaatgtcatactgcatgggcaaaagctgcacgcactccctttgaaaaccagcacaagacaaggatgccctctctcaccactc

SEQ ID NO: 879005 - DNA, 611 bp, Homo sapiens
ttctctagtgctgttcaagccaagaggagtaaccacatgagatcccctgtaaataatcatcagagtccccctagctcatatagtagatgaaagcccagccaatccacttccccactcctgattcacagaaactgggaaagataataataagtgagtattactgttttaagccactaagctttagggtgatgctttaaataattaatagaaaaaatagtggtgtataatttgctccccatctacattgcaagctcctcaagcatagaacacttctttgaaattttaaaatccaggcaataatttatatattattaaacatcatagcataattagatactgagtgtggaattagaaaaaggaagcaatatttattgacttctactaagatgctttatatatacatgaacctcatatacataaaaatggctacctatatggagaaatagatagtctytaaagaataaaatattgtacccaaactgcaaagtaatgaagtcaatttttttctttttttgtgatcacttcccagacttgtttttttaagtgagatgatgtgtgtgaaaggacttaataaaccataagttgctctacagacatgtgacattacagct

SEQ ID NO: 879006 - DNA, 630 bp, Homo sapiens
ttatgaatctgcccgctccaacattgggtgcatatacatgtagaataattaagtcttgttgaattgaatcctttatcattatataatgcccttcctttttcactgttgttggtttaaagtcttttggttgctatttaagaatagcatcctctgctcatgtgtgtgtgtgtgataaatttttctccatccctctactttgagcctatgggtgtcattacttataacatgggtctcttaaagacagmagaaggatgggttttgttttgtttgttttgttttatccaacttgccactcaatgtgtttaagtgggatgtttaggcatgtctctcagtttaaattaaaagccacaaatgattacgcctagtaagaaaggcatgtcataagctgagaaatgctgaaagttaggcctcttgtgctagttagccaagttgtgaatgcaaaaaaaaagttattaaagaaaactaaaaatgctactccagggaacacgcaaataacaaaaaaaaaagtgaaacagtctttatggcttatacggaaaaagttttacaagtctgaatagaatttcaaactagccacaacattcccttaaactaaagcctaatccagagcaagactgtctctttaattctatg

SEQ ID NO: 879007 - DNA, 644 bp, Homo sapiens
atattgtatcctaaactcatgcttctatttagaaagaaagtaacaactcatttaggagctctaagctgggagttttatatttctctttttgctgacaagtgtacccatgacctccatccctaagtgggcaggatcaagacagtggtttcatgatctgcagctgggagtsggtggtgatgccattcagctgcagggcccagagcacagtacaaccaaagccagtcttctggcgtaagtcaggctcaagaagcatatgactgtgtccagtctaaagaagaggatggagagcaagaatggaaaccaaatcaatggctttgcaattggggtcagagaagcataagcaaatgggcttaggagcctggggagttacctgagcaacagaactcgggggatgcagttctctctggagtgtcagcaacaaagctggtgggaggcagaggagctattacagtttctgaagagtgaggaacaaagtaatcatcacaggcacatttttagaataagataagataatgtacattacagtactttgtaaagtgtaacacaaatgggaggtgtcattattgttattaacattattatcatcatcacatagccctgaacacctcataagtctatatgatggaaaagaatgaaaagaaatg

SEQ ID NO: 879008 - DNA, 644 bp, Homo sapiens
atattgtatcctaaactcatgcttctatttagaaagaaagtaacaactcatttaggagctctaagctgggagttttatatttctctttttgctgacaagtgtacccatgacctccatccctaagtgggcaggatcaagacagtggtttcatgatctgcagctgggagtcggtggtgatgccattcagctgcagggcccagagcacagtrcaaccaaagccagtcttctggcgtaagtcaggctcaagaagcatatgactgtgtccagtctaaagaagaggatggagagcaagaatggaaaccaaatcaatggctttgcaattggggtcagagaagcataagcaaatgggcttaggagcctggggagttacctgagcaacagaactcgggggatgcagttctctctggagtgtcagcaacaaagctggtgggaggcagaggagctattacagtttctgaagagtgaggaacaaagtaatcatcacaggcacatttttagaataagataagataatgtacattacagtactttgtaaagtgtaacacaaatgggaggtgtcattattgttattaacattattatcatcatcacatagccctgaacacctcataagtctatatgatggaaaagaatgaaaagaaatg

SEQ ID NO: 879009 - DNA, 653 bp, Homo sapiens
attgactttcctcaattgcaattaattttgacaattttccttaaaatattgtgttttatgtacctcttgccccagattgaagattggtttcataagggaaaggggataaatgtctatgtatagtttcttactcctccttccctgccctctactaggtctgtgttataatgtactctttcttagagctgttagtatrttctgtaagcatctgtgtggggtgtgtgtggggtgtgcattttttatataactatcaagctgtagggtatctaacctttacacttttcaaatcaattttattattactatttcctttaatttcacaaattggcttttcagaaaatattattctctccaatttgtggacacataaactgaggctcaggacactaggttagtgatgtgtccaaattcacacaaataatgatagacatgttcataatcagggtacaagatatctgatccatttagcaagtcattcaatcattcattcatcagcatgtactaagaagctattatgtatcatgttccagaaggtaaaaaaataaaatttctctttgaaaagcttatttatctcacaatattgatacctctgttgtcaggtcttcaaactagtttttaaaactgtattttatcttgatttgaagtcagaaaca

SEQ ID NO: 879010 - DNA, 601 bp, Homo sapiens
ctgaagacagcaaaaactatattggtgaattcttatccattctgccattctgtgtcttttaattggagcatttaagccatttacactcaatgttagtattgaggtgtgaggtgctattctagtaattgtgctatttattacctgaataccttttttcattgtgttattgttttataggtcctattaratttatgctttaaggaggttctattttggtgtatttcaaggatttgtttctatcgattttatttatcttttaaaagaaccaactttttgttccattttcttctttttttttggtttatgcatttgctatattataattttattgttattttagaatatgctccctctatttatttatttatttttattttattattattatactttaagttttagggtacatgtgcacaatgtgcaggttagttacatatgtatacatgtgccatgctggggtgctgcacccagtaactcatcatttagcattaggtatatctcctaatgctatccctcccccctccccccaccccacaacagtccccagagtgtgatgttccccttcctgtgtccatgtgttctcattgttcaattcccacct

SEQ ID NO: 879011 - DNA, 537 bp, Homo sapiens
accctcctatggatagagcagttttgaatctctctttttgtggaatctgcaagtggatatgtggtcctctttgaagatgtctttggaaacgggaatatcttcacataaaaactaaacagaagcattctcagaaacttctctgtgatgtttgtgttcaactcacagagtttcacgttgcttttcatagagcagatgagaaacatgcttttcgcagggtctgcaagtggagatttggagagatttcaggcctgtggtggaaaacgaattatcstcacgtaaaaactagagagaagcattgtcagaaacttgtttgtgatgactgcattcaactcacagagttgaaggttccttttcaaacagcagtttccaaacactctttctgtggcatctgcaagtggatgtttgggcctctttgaagttttccttggaaacgggataatcttcacagaaaagctaaacagaagcattctcagaaacttctttgtgatgtttgctttcaactcacagagttgaactttccttttgagagagaagctt

SEQ ID NO: 879012 - DNA, 589 bp, Homo sapiens
ctacaaatagtgtgtttcgaaactgctccatccaaaggaatgttcagctctgtgagttaaactcagtcgtcaccaagagttttctgtgaatgctactgtctagcttttatatgaagctatttcctttactaccataggcctcaaagcggtccatatctccacttgcagattctacacaaagagagtttccaaactgctctgtcaaagggaatgttcaactctgtgacttgaatgcaatcatcacaaagtagtttctgagaatgcttctatctagcttttacgggaagttaattccttttccaccacaggcctcaaagccctccaaatgtccacttgcagattctggaaaaagagtgtttcaaagcttctctctcgaaaggaaagttcaactctgtgagttgaatgcaagcatcacaaagaagtttctgagaatgcttctgtttagctttyctgtgaagattctcccgtttccaacgaaatcttcaaagaggtccaaatatccacttgcagattaaacagaaagagtgtttggaaactgctgtttgtaaagaaccttcatctctgtgagttgaatgcaatcgtgacaaag

SEQ ID NO: 879013 - DNA, 444 bp, Homo sapiens
ctttgatagttcagctttgaaacactcttcttgtagaaactgcaagtggatatttggtcctctctgaagatttcgttggaaacgggataaaccgcacagaactaaacagaagcattctcagaaccttcttcgtgatgtctgcattcaactcacagtgtggaacctttctttgatagttcaggtttgaaacactctttttgtagaaactgcaaggggataattgcacttctttgaggmctaccgtagtaaaggaaataacttcctatagaaagaagacagaagctttctcagaaaattctttgggatgattgagtggaactcacagagctgaacattccttgcgatgtagcagtttagaaacacactttctgcagaatctgcaagtgcatatttggacctctctgaggaattcgttggaaacgggataatttcagctgactaaac

SEQ ID NO: 879014 - DNA, 612 bp, Homo sapiens
ggtttgaaacggtctttctgtagaaactgcaagtagatatttggacctctctgaggatttcgttggaaacgggataaaccgcacagaactaaaacagaagcattctcagaaccctcttcgtgatgtttgcattcaactcacagtgctgaacctttctttgatagttcagctttgaaacactcttcttgtagaaactgcaagtggatatttggtcctctctgaagatttcgttggaaacgggataaaccgcacagaactaaacagaagcattctcagaaccttcttcgtgatgtctgcattcaactcacagtgtggaacctttctttgatagttcaggtttgaaacactctttttgtagaaactgcaaggggataattgcacttctttgaggcctacygtagtaaaggaaataacttcctatagaaagaagacagaagctttctcagaaaattctttgggatgattgagtggaactcacagagctgaacattccttgcgatgtagcagtttagaaacacactttctgcagaatctgcaagtgcatatttggacctctctgaggaattcgttggaaacgggataatttcagctgactaaacagaagcagtctca

SEQ ID NO: 879015 - DNA, 632 bp, Homo sapiens
ccaaatctaagttactggctttaaagaggagggagagagagagagatagaggtagaaagtttattcaaaaggatgacaagagacctttccaaacctggagaagaatatctatatttaagtaaagaaggtgatagaacacaaagcagatttaatccaaagaaggcatttaataatcagtctcccaaagatcaaggtaaagaaaggatcttaaaagtagcaagtgaaaagaaacagataacatacaatggtacaccaatatgtctggcagcygacttttcaatggaaaccttacagatcagaatagaatgccatgatatatttaaagtgctgaaggaaaaaaaaacctttttaccctagaatagtatatcaggcaaaaatacccttcaaacataaagaagaaataaagaccttctcagacaaacaaaagttaagggatttcatcaacaccagagctgttttacaagaaatcctaataggagttcttaaatctgaaagaaaataatattaatgagcaataagaatcacctaaaggtacaaaactcaccagcaattgtaagtacacagaaaaacacaggatattataacactgtaattgtggtgtataaaccactcatatcttaaataggaagact

SEQ ID NO: 879016 - DNA, 668 bp, Homo sapiens
tcccagagaaaaatacattcaagaaggaagcaattaatggaagaaaattatgagtgattaatgggagataattatgagactactcagaattattgaatattgactagagtaagaagaaaagtcaatgatattcttaataagacaatgaaagtccaattgkgagaggtgaggagagaatgagaggtgaccatgcacagtgagcaaagagagacaactcttaaggggtgaattcaaaggcaaccagaggagatctgtagacaaagataattttgttattatagtcacaatctttttattttggaataattttacatttatagaaaaactaaagagattgttcttggagattgtgttttaagacaggtaatttttaaagaagagggataaattgatgagcaaaagagataaatccagcagataataaattcttcgatgaagtgatccacaggggagacattcctgatacaaatagagaggtttttcactgactagaaatagacaaagaatggaaggcagaatacatgcagatgatggggagctggtagacttgataatagaaggatgagtagttccctattaattataaggaatagtcaacagctaagggtgaaaagtgagaggatttggggttttgagaatataaaaaatcatttctgtaagtgaaagtg

SEQ ID NO: 879017 - DNA, 668 bp, Homo sapiens
tcccagagaaaaatacattcaagaaggaagcaattaatggaagaaaattatgagtgattaatgggagataattatgagactactcagaattattgaatattgactagagtaagaagaaaagtcaatgatattcttaataagacaatgaaagtccaattgggagaggtgaggagagaatgagaggtgaccatgcacagtgagcaaagagagacaactcttaaggggtgaattcaaaggcaaccagaggagatctgtagacaaagataattttgttattatagtcacaatctttttattttggaataattttacatttatagaaaaactaaagagattgttcttggagattgtgttttaagacaggtaatttttaaagaagagggataaattgatgagcaaaagagataaatccagcagataataaattcttcratgaagtgatccacaggggagacattcctgatacaaatagagaggtttttcactgactagaaatagacaaagaatggaaggcagaatacatgcagatgatggggagctggtagacttgataatagaaggatgagtagttccctattaattataaggaatagtcaacagctaagggtgaaaagtgagaggatttggggttttgagaatataaaaaatcatttctgtaagtgaaagtg

SEQ ID NO: 879018 - DNA, 603 bp, Homo sapiens
ttttccttgaagtgacaggctcactaagttcaatttccagaaaatatctgccagataccaaagtcttaaccattagactgggagttattctttcaaataaaaaaggtgctttatgaaaaaagtgactagttcatcttattaatcagataaccacacaaatgctttttcttgagttaaccaacatattaacytacagaatgctttatgtgtgtttttcattttgtaaaacagaatagatatatactcaaggattgagattagatatatactcaaggtatatatctatatattgagaatatatagatatctatatattgaggtatattgagatatattgagaatgtgtatatatatatattgagaatagatatatactcaaggattgagatttaacaacattagcaattttagtacttcattggagcattcttaggcaaaactatcctcttttttctttttttatctgcaagtgcatgatggtaaagaatacaatgatgatttggtaccactgcctggatttatgctaaggcactagcagttttacccactattagttttttactatctttgctaatatcaaataaactctttttttaaatatta

SEQ ID NO: 879019 - DNA, 524 bp, Homo sapiens
ggcagaaaactgaaactggatccctttttacaccttatagaaaaataaactcaagatggattaaagacttaaatgtaaaacccaaagccataaaaatcctagaagaaaacctaagcaataccatccaggacataggcatgggcaaagatatcacgacgaaaacaccaaaagcaattgcaagaaaagctaaaattgacaaacgggatataattaaacagctgatgcacagcaaaagaagctatcatcagagtgaacaggcaacctacagaatgggagaaaagttttgcgatctacccatctgacaaaggtctaatatccagaatctacaaggaacttaaatttacaaaacagaaaaccccatcaaaaagtgggtaaagtgtatgarcagacacttctcaaaggaagacatttatgtggccaagaaacacatgaaaaaatgctcaacatcactgatcattagagaaatgcaaatcaaaaccacaatgagataccagctcactccagtcagaatggtgataattaaa

SEQ ID NO: 879020 - DNA, 556 bp, Homo sapiens
taaaaaaatcattggtatttggagtagggattgcataagaaactgtgggtagtatgaacattttaacaatattgattcttctattccaggatcatggcatatatttccatatttttgatcctcttcaattttttgcatcagtattttatagttttcaatgtaaagatcttctctcctttggttaactcctagctattgcattttatgtgtagctattgacagtggggttactttcttgatttctttctcagattgtttcttgctggcatacagaaatgctactgattttttgtatgttcattttgcatcctgcaactttactgaatttatcarttctgataggttttttgcagtgtcttggggttttttcaaatataatatcatgtaatctgcaaacaagaataatttcacttcttccttttcaatttgaatgccctttatttctttctcttgtctaattgctctaggtaggacatctggtactattttgaataacagtggtgaatgtgagcatctttgtcttgttccagatcttagagaaaaggctttcaggttt

SEQ ID NO: 879021 - DNA, 654 bp, Homo sapiens
tttctcctttgctgtcttcttggtgtacccttgctaaaaattagttgattgtatatgcatgggtttatttcttggctttccattttgatctattggtctatgtctctggttttatcccagcaccatattgggtttgattactattactttataacataatcatagcattatttatacttatgtttttatcaagatagtatatatatatatatttgctaattaatcaaatagtatgaagggcttatggagaaagcagtagtgtgaaaccataatcctatttaccttaagattttccctaattttaatatttttaactgaatataaacacatttatggraaatacatacttctatttttaattcatatcctacagtctttgtatttatgaaaaatgagaatgttgcttatttatgcaaacttttctgcctctaaattttgtcagatgtttgatagttacattattattttagttaatgtatgataccttctataactttaaataatatattgagatctcatttgttccatcaaatacaggcagtacttcttgcttttgccctttttttgaaacgagaaaaatagctacgtttatctccatcgtttttccatcttcccacattccactgtcatctagttatttttaatattttaata

SEQ ID NO: 879022 - DNA, 597 bp, Homo sapiens
cataaagtattcatgtccatctattctatcctcttctagtaagctttctgtgcctattaacctttctgtctgtgctgttgtagcattaatgtcagtaataccaagtgacaatatcaagcaatttaacgatcgacatataatgcaaaattatatttagttgctcatttttgttctttcaatttttttttttcagtcatttacttgcacttgcacttgtcttatgagcagggttgtcagcagcttggtctctcttttagtttttgcttgaattactttaacatcctggaggcttcttcagtactaagatggttatgctcacggttggcttaggaggaaactcagtaagagcagtccatttttattgcttctggtgccaaatggcatcacacttttaagtctgatcatgcagagcctgtttgcctgagcttyagggatattcctgttagtttgcattatgccagccagcatatgatccagtcagatttaaaacatcccttggctaatgtccaggtgtatattcatctatttccaaagcaccaccactatattagggtgggtgcgtccagcagctttcctccccacaaatttcctaaattc

SEQ ID NO: 879023 - DNA, 647 bp, Homo sapiens
atacaagaggggtactaaactttagaatataaaatacatacatctgtgttacagaaaaaaaataaaacaacacaattatctcccattttttttctcttggacaaataagtaatatattaatgacccaaataattttgttatcctaaaaataatatgagtgaacgtttggatttgcaccatgccatagaaagggcattgtgttacctctcattgctctctacttcctgccagtttttggttgtttgtttttgcttttttttgtgtgtgtgtgggaactgcagacatacaatttgagatattgatgaggaggcatgtgtttaggaaacagcactttgcctgtcttaccttctgaaatgttgttttattatcaagctgagcagtagattttaagggcttttacatcatctttcaacatctcaactttattttcctgtttccatttgcatagcygtagatagtcacaatttattttttgttacagttttatggtccttgtacttataatgaatttctattttccataagatcctgcttgttgggtaactacagaatatgcataatagatagaagaataaagttttattaatcaaaatgctcagatccattgaagggaaatttcaacctctcatatttatttatttgaaaac

SEQ ID NO: 879024 - DNA, 658 bp, Homo sapiens
aatagagtgagggttctggaagaaggaagagcttcccaaggataatggtattagcccagacatgaccccgggaaaattagcgtgaactaggcatctgcatcaatttctttctattggatagattaaaagtttttatgttttaatcatgatgagaaagaactgatatttttcccatcttttacccatcatttgtgtagagaaagccagaacgatattgatgtctgaagggatcacasagacaagaatatatccttcatctctaggattaaggcaaattttagctggctttcctatttctattctcactcccattttgcatagctatatctaaaatacagtcaatattccatattttttttcttcagactaaattgagtgattcttagggagttagaagaagtgcctcttgtcctgaccccagagctatatcagaatatctgggtcaggctaaaagcatttgcaatgggtcaggctaaaaacacttggaatgtcaaaacctgctccagtccattttggtagttttccttcttatatactattgaaggctgtgcttctctccaagattagctcttacattctccttttcaaaaagtcttctgggccatgagtatgtgtccctcttatgggatccatatcattcatcatgctctacatagca

SEQ ID NO: 879025 - DNA, 676 bp, Homo sapiens
gaattatttgttttagatgatcatattggtacaattttttactggcacacaaggaatccaatttccaggtccattacccaaaacaacacagaaatttgaaacaagaaaatatcttagtgcttgaactatagatcaaagtataattcatatacctcattcccttgtggattattacgataagaagaaagaagaagaaaaaaggcaatttttctgcccatttgatcgatgttccatttgacctctgtgatgccctcttgccataaccttttaaataccatctgctctttttgtgaagagtgtgatgggaaggagtcacttccagacagcaattgattataagaacattaatcaagrgcatggattatctgtagcatgacactgtgtgctgtagttaagcaatctggccttcagtatgattggaaagactaatccttatgtgaaagcctaaaacggacttagcatcacatgtttaagcagagaagagcaaataatgcgtgaacatctattggaatctgtgataaatttcagcaattttagggctaatttgtttacccagtctaatgggattagattgattatatgtgctcctaaaatgttatacatatttcatgcttgttccaatcacagaggacagaaaaagctagacattctttgcttagaacttgaaaaaaataca

SEQ ID NO: 879026 - DNA, 620 bp, Homo sapiens
caagttatgaaagacgtgtttgtgataaagaaaattactgaactaggccagagagctgaaagtttactcttagtgcagtgatgtctaactagttacaaattagaatcactggatataattttcaaaatgcatatttccaggccaaagtcccagaaasctctctcaccagggtatccaagtagtttgccaaggcctgggcaagaatgtcagtgacatgacgataagcactccaagccaatgctcattggaggcacaagtgaaacaagatagaaaataaaagcttcatgactttttgccttttactttgtattaactgcctcagccaatcttatacattagaaataatttagctgctttaccaaacgtgttatgacattaaattttaagataaagaaggttgccagtgaaaacgttcttgctattcttacttacaatttagagtcaccatgagggaacctaaaataatgattaaactctcctttctttggttttgtggttgctaaatcactaagacctgtaggaaaatttcacactttgtcactaaatgttatgatgctgtcttttctcaagtgataatatatttttaaataaataaaataaaaactccagagtgttaattc

SEQ ID NO: 879027 - DNA, 636 bp, Homo sapiens
cagcaatgttcatcagggatattggcctcaaattttctttttttgttgtgtctctgccaggttttggtatcaggatgatgctggcctcataaaatgagttagggaggattccctgtttttctgttgtttgaaatagttttagagggaatggtaccagctcctctttgtacctctggtagaattcggctttgaatccctctggtcctagactttttttsgttggtaggctattaattactgcatcattttcagaacttgttattggtctattcagggattctacttcttccaggtttagacttgggagggtgtatgtgtccaggaatctatccatttcttgtggattttctagtttatttgcatagaggtgtttatagtattccctgacaatagtttgtatttctgtgggatcagtggcgatatcccctttttcattttttattgcaattatttgaatcttctctcttttttaaattaatctggctagtggtctaatttgttttaaaaaacaaaaataaaaaaataaaaaagaaaaaaacagcttctggattcacggattttttttaagggttttttgtgtctctatcaccttcacttctgctcccatcttagttatttcttgttttctgctagctt

SEQ ID NO: 879028 - DNA, 583 bp, Homo sapiens
ggtcccggacccccgagtagcctaactgggaggcacccccgagtaggggcagactgacacctcacacggccgggtactcctctgcgacaaaacttccagaagaacaatcaggcagcaacattggctgttcaccaatatctgctgttctgcagcctctactgctgatacccaggcaaacagggtctggagtggacctccagcaaactccaacagaccttcagctaagggtcctgactgttagaaggaaaactaacaaacagaaaggacacccacaccaaaaccccatctgtacatcaccatcatcaaagatcacaagtagataaaaccacaaagatggggaaaaaacagagcagaaaaatggaaactctaaaaatcagagtgcctctccccctctaaaggaacacagctcctcaccagcaaaagaccaaagstggatggagaatgactgacgagttgagagaagaaggcttcagacaatcaaactactccgagctaaaggaggaagttcgaacccatggcaaagaagatgaaaaaagattagacgaatggctaactagaatagccaatgcagagaagtccttaa

SEQ ID NO: 879029 - DNA, 742 bp, Homo sapiens
tccttgaggaatcaccatactgtctttcacaatggttgaactgatttacattcccaccagcagtgtaaaaatgttcctatttctccacagcctcaccagcatctactgtttcttgacttttgaataattgccattctgactggaatgaggtggtgtctcattgtggttttgatttgcatttctctaatgatcagtgatgttgagctttttttcatatgtttgttggctgcaaaaatgtcttctcttcggaagcgtccatttatttcctttgctcactttttgataaggttgtttgttttttcttgtaaatttgtttaatttccttatgaattcaagatattagacctttgtcagatgggtcaattgcaaaaaatttatcccattccgcaagttgcctgttcactctgatgatagtgttttttgctgtgcaaaaactctttagtttaattatatcccatttgtcaatattcgctctggttgcaattgyttttggcattttcgtcatgaagtctttgcccatgcctatgtcctgtatggtattgcctacgttttcttctagggattttatggtttggggtttacattaagcctttaatccatcttgagtgaattttcatataaagtgtaaggaaagggtccagtttatgttttctgcatatggctagccagttttctcagcatcatttattgaatagaagattctttccccattgcttgtttttgccaggtttgttgaaaatca

SEQ ID NO: 879030 - DNA, 601 bp, Homo sapiens
gttgaataggagtggtgagagagggcatccttgtcttgtaccagttttcaaatggaatgcttccagcttttgcctattcaatatgatattggctatgggtttgtcataaatagaacttattatttcaagatatgtcccatcaatacctagtttcttgagagtttttaacatgaagggatgttgaattttatcaaaggccttttctgcatctattcagataatcatgtggtttttgtctttggttctgtttatgtgatgaattgyatgattgatttgcatatggtaaaccaaacttgcatcccaaggatgaagccaacttgatcacgatggatgagttttttgatgtgctgctggattcagtttgccagtattttattgtggatttttgcacaggtgttcaacagggatattggcctgaagtttttgttgttgttgttgttgttgttgttgttgttgtgtctctgacaggtttcgataccaggataatgctggctttataaaatgagttagggaggagtccctctttttgaattgtttggaatagttttagaaaaaaatgctaccagctcctctttgtatctctggtagaatttggctgtga

SEQ ID NO: 879031 - DNA, 601 bp, Homo sapiens
gttgaataggagtggtgagagagggcatccttgtcttgtaccagttttcaaatggaatgcttccagcttttgcctattcaatatgatattggctatgggtttgtcataaatagaacttattatttcaagatatgtcccatcaatacctagtttcttgagagtttttaacatgaagggatgttgaattttatcaaaggccttttctgcatctattcagataatcatgtggtttttgtctttggttctgtttatgtgatgaattgtatgattgatttgcwtatggtaaaccaaacttgcatcccaaggatgaagccaacttgatcacgatggatgagttttttgatgtgctgctggattcagtttgccagtattttattgtggatttttgcacaggtgttcaacagggatattggcctgaagtttttgttgttgttgttgttgttgttgttgttgttgtgtctctgacaggtttcgataccaggataatgctggctttataaaatgagttagggaggagtccctctttttgaattgtttggaatagttttagaaaaaaatgctaccagctcctctttgtatctctggtagaatttggctgtga

SEQ ID NO: 879032 - DNA, 601 bp, Homo sapiens
gttgaataggagtggtgagagagggcatccttgtcttgtaccagttttcaaatggaatgcttccagcttttgcctattcaatatgatattggctatgggtttgtcataaatagaacttattatttcaagatatgtcccatcaatacctagtttcttgagagtttttaacatgaagggatgttgaattttatcaaaggccttttctgcatctattcagataatcatgtggtttttgtctttggttctgtttatgtgatgaattgtatgattgatttgcatatgktaaaccaaacttgcatcccaaggatgaagccaacttgatcacgatggatgagttttttgatgtgctgctggattcagtttgccagtattttattgtggatttttgcacaggtgttcaacagggatattggcctgaagtttttgttgttgttgttgttgttgttgttgttgttgtgtctctgacaggtttcgataccaggataatgctggctttataaaatgagttagggaggagtccctctttttgaattgtttggaatagttttagaaaaaaatgctaccagctcctctttgtatctctggtagaatttggctgtga

SEQ ID NO: 879033 - DNA, 629 bp, Homo sapiens
tgatgatagtttcttttgctgtgcagaatccctttagtttaattagatcccatttgtcaattttggcttttattgccatcgcttttggtgttttagtcgtgaagtctttgcccatgcctatgtcctgaatgatattgcctaagttctggccagggcaatcaggcaagataaataaataaagggtattcaaataggaagagaggaagtcaaattgtctctgtttgcagatgacatgattgtgtgtttagaaaaccccatcatctcagcccaaaatctccttaagctgataaccaacttcagcaaagtctcaggatacaaaatcaatgtgcaaaaatcacaagcattcctatacacmaacaataggcaaacagagagccaaatgatgagcgaactcccattcacaattcctacaaagagaataaaattcctaggaatacaacttgcaagggatgtgaaggacttcttcaaggaaaactacaaatcactgctcaaggacataagagaggacacaaacaaatggaaaaatattccatgcttatagatggggaaaatcaatatcgtgaaaatggccatactgcacaaagtaatttatagattcagtgctatccccatcaagctaccattgactt

SEQ ID NO: 879034 - DNA, 679 bp, Homo sapiens
tatccaagcaagaaacttgggatcatccttgactcttttttcttatctcctgatccctttattctccaccccttcccaatccagttaagtcttaaaaattttaccgttagtgtgtctccaatgtcctctcctctccctttccttctgccactgctctgttttaaactttctcttttgagtggacgtgtgcagaagccttcaaactggttgcctcacctcttgccttgtgcccaccttccacatttcacaagactaacatatctaaagtacaaatctgtttatacctcctctactcaaaatcttttaacagctctgttaactatcaaaaaagcctcagaacctggactgcaggcatttagggtaaagataaataagatgctaatttatataaaaaggaggtgaggtaaaggtatgctacagtgtcactggtaaaatataaagcgaaaactatctagaagattgyttctacttgaggaactttggacttggagttaattggtagctaggttttcaatttggctgttcctctgccttgtgtgtgattctatatgtgctatgacctccctgggctttagtgtcttactgtgtgatacgaagatggtagtgcctgttgtgtatatggtgatgtgtcagacttggcttctggtctcgattctactgttaaagagcggtgggatct

SEQ ID NO: 879035 - DNA, 615 bp, Homo sapiens
aactgtgaggctgtctggggaggctgataaactcaggtccaacaggacattcttgaggactgcattgaactcaagttgtaggggcttcttggagagacccatgaactgagtttatggaccctttttggggaggtcactgaactttcactgcatgcctggaactttgcttgcagactcaaagtccatgtggctgtcctctgctacacaaactcagaggtacaagacatacagacagacatggactgcagttacccaaggatcattcacagtctctcctctctccttgctacacacacacatacacacacacacacatacacacaccctgtctcttcagtcccctctcctggttcttccataatttcctaacctctgaacacaggaatgttcagagttcagtccrcaaacctccccatttgtttatactcactttttttttttttttttgagatagggtcttgctctgccacccaagctagagcgcagtggcccaatctcggctccctgcaatctctgcctcccaagttcaagcgattctcatgcctcagcctcccaagtagctgggactacaggcacataccaccatgcccagttaatttttgtatttttagtaga

SEQ ID NO: 879036 - DNA, 630 bp, Homo sapiens
catcagtgattgcaaaattgtgaaattctattattccttcttcattcatgtgttagatggcattttcttttttaagtatttcttcaaccctgtaagttgtatgtttaggacactgtatgccagcactggtactgggatgattggcaaggttctgtggtggaattcctttaaaggaagagtgcaagtcttcattattgataatttgggaatgttgaataaatacrctttatttaaaggatgttggtaaataaataggttaaaatctcatcatgaaataaatagcttgtgacttatagtatggagctggtcactgatgtttgttctttttaagaggacaatgttgatattcagaaatttcaaaagtaatttgtgcagggcagtagttactagtttcttgagccagatttctcagcatgaacttgagaacagaccttttgtgtgaatcagattaataaaatattgagtttacataagacagcatatttttattaaaagctgtcaaagaactggagcagcagcatttcccaatgtggctccttgacaaaagggctctggagtcgaataaacttgggaaacaatgtgtactttattctctcttggaatgtcaagtacatattaacatgtaaaaga

SEQ ID NO: 879037 - DNA, 629 bp, Homo sapiens
atggaatggaatggaaagcaatggaatggaatgaaatcaacacgagtgaaatggaatggaatgggatggaatagaatgcaatggactggattggaatcaatctgagtggaatggaaaggaatgcaaaggaatgggattgaagggaatggaatggaatggaatggaatggaatggaatggaataaacccgagtagaatgcaatggaagggaatggaatcgaatgtaatggaatggcattgaatggaatcaacacgagtggaatggaatggaatggaatggattggagtggcacggaawcaaccccagtggaatgtaatgtaaaggaatggaatggaatggagtagaatgaacccgagtcgaatggaatggtatggaatgaaacggaatggaatggaatggtatggaatggaatggaatggtattgaacggaatggaatggaatggaatagaatccaatccagtgtaaaggaatggaacggaatggaatggaatggaatggaatggaatggaatggaatggaatggaatggaaaggaatggactctaatggaataaattgcagtggaatggtatggaatgcaaagtaatataatgaaaatgagtggaatccaccaaaatggaaaggaaagg

SEQ ID NO: 879038 - DNA, 624 bp, Homo sapiens
aactctatttaacattgattgcagtgcatgcagaggggtaaattttcccaagggagtaataaagtgccaggaagaatcagggaagagaatgtccctggcagaaaacacttctccccaacctaggatactatgtgtttctttttttatttttctgatttgactgattcccaagagattctaatggtggtctgaagtttcctgtgtagattgtggtctactccagactgttggctcctggtgttactgagcaaagcaaactctttcccctggagtggaattcctgtgtgacagctgttccccacctcaactgcctccattgctcaccagatgagaaatattgttaagtgaggaaaacacagaatggaggctgggagtagsagttttagttcctcctccatgcccgtgctcaactcccattagcagtaatggctgtggtatgaataggccccaggaacactctagtttattaagaggtaatgatatatacagttagtggtggagtaaaatgaaacagcagaattgctgtttgtcaaccaggtgtggtggctcacgtctgtaatcctagcactttgggaggccaaggtggaccaatcacctgaggtcaggagttcgagaccagcccag

SEQ ID NO: 879039 - DNA, 590 bp, Homo sapiens
gtatttgaagatattcttattgacataatgttgggaagtagtatttgtggtgaataggattaaggacttcggattttatgcataacatagggttacatcatggttctgccaactgtgtaaccttggatgagttacttaaccttttatgcacaaatttactcttctgtaaaaatgagattaatcatttattttaaaatgaagattaaatgtttattaaggttgttgaacattttaaatagagtaatatatgtatgatgctgtgctagactgtcagcagctcagcctcatatccacacttatctttattttccattgcatcacagtggagaagcttgggctacatttccccatatctttttccagtatgcttttgtatgagattctggtccacagctatgccaccctgaacacacttgatctcctctgatcttggaagctaagcaggttggrtctggttagtttttgtatgggagagtacctgggaataccaggtgctgtaggctaaaattaaaaaaaaaaaaaggtaaataaataagtgagagtctgccaatgagaaacaatgatctgagatttcagtgcagaagtaaagg

SEQ ID NO: 879040 - DNA, 563 bp, Homo sapiens
acagtgtatgtatgttcaactggagtacatacacccaacagtagtttaaagtcaatggctctaagaatgtaagcccttatcatcactgtctgagtgtcccaaggtcctacacacacaccaacacacagtgtttagggtcatttttttaaaaaagcagtgttgatgatagtgtagtagtataaacacattattacattttgattcacatttccctgactgagcacaattttatacatttattcatcatttgacatcctctattgtgaagtgcytaaggatttaaaattaagcatcttttcatttgtttatcggctatttggatatcctccttcaaggagttcaagtttttgcatattttcctacagaataatctgtctttgtgtgtgtgtgattggtaggagttctttatattttctgaataggagcccttgttggataggcatattgtgaataacttctcccaattgagggttgccttttttctctgttagtgccttcttttgatgatatgaaatgagatgtcaatcataatacaattcatttatcattttaacttttatgat

SEQ ID NO: 879041 - DNA, 554 bp, Homo sapiens
tgggtaacagagtgagaccttgtctcaaaaaaataaataaataaataaatacatccatagaaatttaaaaatacctacttagattagggctgccacataaaatatagaacagttaaatttgaatttcagataaatagtatattttaataataagtattttcaagtattacatatttgaagtttatctgaaattcagagtaaactagagatctccaataattttcctaaatttgccaaccctaccctaggtactaccattcagttttattttctggtctgagggttacacctacttgagaattaatgtgctggtcagtgaagaacattttgtggctggtcaagtaataaaaattgtatctttgaagcattcagtggctttcagtctgcaccttcttggatgtgacagatcagsaaagagacacgagtcccatcttcacatcaatggtacaaacatattgaactgattgcccccattctgctatactaagcagcctggtttctagtagtatctctgcctaagaactcatcctttcctgtttccatctgattttctc

SEQ ID NO: 879042 - DNA, 588 bp, Homo sapiens
ggcagctttaaaccatctcaatcaatagcctctaacttctccagaaggttcttatttcatgaatttctaagcaagggactacctggattaagacatttggtagacaccattttgagatgaagaatcttgaatgggaagaagggagatctctacttactgaagcttcccgatgacatagttgagtgtcccccaaaaggaactttagaacaagatgttcatcatgccatatctctatggaaaaggaaattatttaaaagaaaacaaaggcaaacaattgataatctgattytcatgggaaagttttcattatcaaagaaaaagagggctgggttccatggctcacatctgtaatcccaacactttgggaggctgagaggggtggataacctgaggtcaggagttcaaaaacagcctggccaacatggtgaaaccctgtctctactgaaaatacaaaaattagccaggcgtggtggtgtgcacctgtagtcccagctacttgcgaggcagaggcaggagaatcacttgaacccaggaggtagaagttgcagtaagctgagatggcttactgcatccagcctggatgacaca

SEQ ID NO: 879043 - DNA, 683 bp, Homo sapiens
tcacaaaaatatattatttgctatcatcatctttgccacagaacttttgcacttcatcttacttttatttttctgataattcatttttgttcctccttagatggcactaagttatctcttagtaaaaagtgtctaaccaccttccctcattatcattccccataatatgtcaaaaaaaaagtttcagagatatcatattgagttatttaggccaaagtcaataaatggctctcagaataagactttgaaaataatataacactctatactaggcatggtggctcattcctgtaattgtagcaatttaaaagcctgtgccagaatgatcacttgaggccagaatttgagatcagccagagcaacatagtgagacccccatgtctacaaaatttttttttwaaattagctgggcatggtggctcatgcctgtagacccagctagttgggagactgaggcaaaaggatggcttgtacccagagttcagggctgcagtgaattatgaccacatcaccgcacttctgcctggatgacagacaaagaccatatctcaaaaaaacacaaaataatgaatcctgtaaataaggattctgatgccataagcctttccttaaactgcaaatgtttcatgctaatttgaattgcattttaagaagtaatgattcttggggtaaaggccatagaa

SEQ ID NO: 879044 - DNA, 604 bp, Homo sapiens
tccagtcttgcagtagaattcacactgatatcctgctactgaaatattcacttccttatggtatccttatgaaaacactttttggtcatgtgttacaatttgtcaggggctgtgttagtctctttatattgctatgaagacatacccaatgctgggtaatttatttattattttttaataaaagaggtttatcttggttcggggttctgcagactgcacaggaagcaatgctatctgctctgggtgaggcctcaagaagcttacaatcatggcagaaggtgaaggggagccagtgtgtcacatggtcagagagggagtaagagagasaagggggcagtcccaggctgtttctaacaatcagatctctatgaactcactgagaagaactcactcaagtggattgtgctaaaccaagcttgtccaacccacagcttgtgggctgaatgcaggtcagaacagctttgaatgtggcccaaatttgtcaactttgttaaaacaaaagagagtttgtgtatgtgtgtgtgtgtgtgtgtgtgtgtgtgtgtgtgtgtttatttttatttatttatgtatttatttattttagctcatcagctatttttag

SEQ ID NO: 879045 - DNA, 600 bp, Homo sapiens
gtagagtatgcatactttcaaatgggtcctgtcatgttattttctgaaatggttaaaaccatttaatttcccatccattgcccataaaggttgttttcctcatatcctcatcactcaatgttatctaggattcttatattttctaagcaagtggtgaaaatacagatctcattttatttgtgtacatttgcatttgtcagattgttaacaatgtattgaattttttggcccatttttctattgagtttactatcttctttgttcatctgaatatcaatcatattcactttgccctaagcagtgtcaacattttctattactctgtcatacatctgataactttgtatgccaacctttactgaaatgagcctttatgatttttatacwtctagagtttatgtatttaattaaatttattggtttagtatatattttattaaactgtaacaacagtcccaaatctatgttttgctgggttcattcagatttagaactcagataactttttggaggataaattctttttatcataatgaagaatggctatcataatgcaatatgattacttctgccaatgcttattgttttatagtctacttt

SEQ ID NO: 879046 - DNA, 619 bp, Homo sapiens
tggtctaatgtggccaatgctgtccatttccctgctatatccattattctcatcttcttcactaagggaacatagattcactttttccaaggagcactgtttaaatgtctttatttatttatttatgcatattttattattttacaattttttttttgaaaaatggtctcactctgtctcccaggctggagtrcagtggcatgatcagagctcactgcagccttgaactcctgggctcatgtgatctcccagctcagactcctgagtaggtaggactgcaggcataacaggtgtgcaccgccacacccagcttttgttttgttttgtttttgtagagactgggtctcgttatgttgcctggactggtttcaaattcctgtgctcaagtgattctcccaccttggcctcccaaattgctggaattacaggcatgagccaccatgcctggccctggttaacgtctttaaatgagtttcccagtttttcttgtaactgtagtgagcgaatcttatagtcctggccaatgtgaaatgcagaattcactgctttggatttctgaaaatctgtttggaaaggggagagttattgttcctcttttttgttgaccaatttccctttg

SEQ ID NO: 879047 - DNA, 659 bp, Homo sapiens
ctttaagcagttttccgccctgggtgggccaggtgttcctttccctcattctggtaaacccacaaccttcaccatgggcatcatggccatcatgaacatgtcacagtgctgcagagattttgtttatggccagttttggggccagtttatggccagatttcggggtctcttcccaacatgggtgctctttttttgggtgcatatgtatttaggatagctcttcttgttgaattgaaccttttaccattgtgtaatgcccttctttgtcttttttttawctttattggcttaaagtctgttttgtcagaagctagaattgcaacccctgcttttttctgttttccatttgcttggtaaattttcctccatccctttattttgaacctatgtgtgtctttgcaaatgacgtggatctcttgaagacagcataccgatggatcttgactctttatccagcttgccattctgtgtctttttaattggggcatttaacccacttacatttaaggttagtattgttttgtgtgagtttgatcctatcatcattattctagctggttattttgcagatttgtttatgtggttgcttcatagtgtcactggtctgtgtacttcagtgtgtttttatagtgggtggtatcaatttctcctttccgtat

SEQ ID NO: 879048 - DNA, 550 bp, Homo sapiens
cccctatacacacagaggaccttaaagagcttttccttatgtgggctgtaactatcattatttaccatattagaaatttaaatggatacagccataaaaaagaacgagatcatgtcttttgcaggaacatggatggaactggaggctattatccttagcaaactaacgcaggaacagacaaccaactaccgcatgttctcacttacaagtgggagctaaatgataagaatttatgaatacaaagaaggaaacaacacagtggggtcttcttgagaagggtggatgggaagagggagaagagcagacaagataactattgggtactgggcttgatcctgggtgaggaaataatatgtacaacaaaccccatsacatgtgtttacctgtgtaacaaaacctcacatgtaccaccaacctaaagtggaagttttttaaaaaagtataatagtgttagcagtggaagttatttgactcacacagcaccaaaatatgttaccagtggcgaatctctatgggtctgcagcaactttaattcctaccacctcagaaa

SEQ ID NO: 879049 - DNA, 619 bp, Homo sapiens
gcattatatacggactttggttccagctccttatcttttacaaaaattatggtttcattaaaaattatttatttatgacttttttaatttttaaaaattgtggcagccgggagcagtggctcacgcctgtaaatccagcactttgggaggtcaaggcaggcagatcacaagatcaggagttcgagacgagcctggccaatatggtgcaatcctgtctctactaaaaatacaaacaatcagccgggcgtggtagcacacgcctgtagtcctagctactctggaggctgaggcaggagaattgcttgaaccggggaggcagaggttgcagtgagccgagattgcgccactacactccagcctaagagacagagcaaaactccgtctcaaaaaaaaaaaaaaaaaaaaacctgtggcaaaatacataaaatttgccatcttcacctttttttcaatgtaaagttcagkggcattaagtatattcacattgttgcgctaccatcaccaccatctatttccaaagttttcatcttcccaacctgaaatcccatcctcattaaacaataactcctcatttctccctcctccattggcgttcaccattctactttctgtctcaaag

SEQ ID NO: 879050 - DNA, 571 bp, Homo sapiens
accttgtccacttgcttttatgccattgccattccaccactctgtctctgtaagaggatgcatgaaacaccatgtgtccacctgcagcctgagagagatatgggctgtcagagtcaatgagcttcctaggccttccccttacctgcttcttaccgttccctctggatatgaggcctccagatccccatctctcacttaaggtgttctgaatgcttaccttggcttctagcagataggaaaccatcctggccaacacagtgaaaccccatctctaygaaaaatacaaaaattagctgggcatgatggcgcacgcctgtagtcccagctgcttgggaggctgaggcaggagaatcgcttgaacctgggaggcagaggttgcggtgagccgagattgtgccattgcattccagcctgggcaacaagagcgaaactccatctaaaaaaataaaaataaaaacaacaagaaaaaagaaagtattttcctacctgccttcccagactaaatttcttccccaggcttcagagtttctgaaaacaaccttgcagtgtctccttcatccctctctaagag

SEQ ID NO: 879051 - DNA, 675 bp, Homo sapiens
cacctactgcacaactatctgatatttaacaaagctaacacaaccaagcaatggagaacagggtccctgttcaataaatggtgctagggtaactggctagccatatgcagaagattaaaacttgacactgttcttaaaccatatacaaaaatcaactcaagatggattaaagacctaaatgtaaaacccaaaactgtaaaaacactggaagagaacmtaggcaatactattctggaccatagaaataggtaaatatttcatgatgaagatgccaaaagcaattgctacaaaagaaaatattgacaaatgggatctaattcaactacagagcttccacacagcaaaagatacgatcaacagacaacctacagaatggaagaaaattttttgcaagctatgtatctgatgaaggtctaatatccagcatgtattaggaacttaaacaaatttacaagaaaaaaaaccatacaaccacattagaaagtagacaaatgacatgaacacttttcaaaagaaaacatacacgcagccaacaaccataagaagaaaagctcaacatcactgatcactgatcattagataaatgcaaatcaaagccacaatgagataccatctcacaccagtcagaatggccattattaaaaagtcaaaaaataacaggtgctggtgagattg

SEQ ID NO: 879052 - DNA, 675 bp, Homo sapiens
cacctactgcacaactatctgatatttaacaaagctaacacaaccaagcaatggagaacagggtccctgttcaataaatggtgctagggtaactggctagccatatgcagaagattaaaacttgacactgttcttaaaccatatacaaaaatcaactcaagatggattaaagacctaaatgtaaaacccaaaactgtaaaaacactggaagagaacataggcaatactattctggaccatagaaataggtaaatatttcatgatgaagatgccaaaagcawttgctacaaaagaaaatattgacaaatgggatctaattcaactacagagcttccacacagcaaaagatacgatcaacagacaacctacagaatggaagaaaattttttgcaagctatgtatctgatgaaggtctaatatccagcatgtattaggaacttaaacaaatttacaagaaaaaaaaccatacaaccacattagaaagtagacaaatgacatgaacacttttcaaaagaaaacatacacgcagccaacaaccataagaagaaaagctcaacatcactgatcactgatcattagataaatgcaaatcaaagccacaatgagataccatctcacaccagtcagaatggccattattaaaaagtcaaaaaataacaggtgctggtgagattg

SEQ ID NO: 879053 - DNA, 536 bp, Homo sapiens
cttacataacttcttgtacaatttgtgtaaattgtgtaactgacttgtataactgcaaattaatcggtttatttgtggtttagtttgtggaggatatagattttctaaggaagcattttctcatgttttgtggttacataactgatatcttatagtttattagtaaataattaacactaaacacaatctaattgctttatcccttaagtggttgcaataagcaagacattattttatatcacttcagtgtattaaattttgatacctaggataaagagctgtaactcactcgccttatattgggaggggcataaaataaagtactcacyttgttttaaaaagttattttggcacacttttaaatatatttaggagaaaaatatttttgagaagtacaatattttatattaaaacattgattgtttccaacatgaatattgttaaatagtgatttattccaggaaaccatgaaaaggtgtcaacaaaatagtaaaaaaattgtatcctgcaagctcaatttttagtgaggctaagag

SEQ ID NO: 879054 - DNA, 647 bp, Homo sapiens
atattttaagtaaaatattaacagcagaattcatcagtggttgaaaggataattcatcataactaagcagtgattgttatattaatactggggatttttttatctttaagggaaagatatagaaagaataataagaaacatgtatgtaatattttctgtgtacctctctctgttcaaagcagtttacagttaatcatcataatgaccttatgaaataggtccatgccatttctattttacaaaagaagactagaagaacctaaaataaaggaaggttaagttgcttcttaaagatagcgtagcatagtgaaactggattgwgaatacaagtgtctaggtccaaatttcatgtattttaacactgtgatatgatcatctccatggatgctaaaatggggattcatagaaggcaataatcaatcttgcttaaaactcttaatttattaagattagatatatagctatttatcattagaaaatgtacaaattttaaactccaaatcagaataatgcttaaaatagaaataccagattcatttccattacagtcagaagtaaacaaggacacccactattcctaatattaacatattatcattacactgcatgtgctaaaaaaaaataaggcaggataaaggttaaaaatg

SEQ ID NO: 879055 - DNA, 651 bp, Homo sapiens
gccaggaaggcaacaggaacaaatgaaacggagactcgtttactttgtttaatttttaccactcagaaacataagcccaactgttgcctaatatttccatttttcaagagaagccggaaacctttttttttctatgttggtaacaaatttaaaaggcatttaagcactatacccatgcctggagaaaactaacctatagatttataattagaacttctgacgtagtcccatgatttttagtcctaccttaaaacagaaatatatcacctgagagctttaaaaatacctctgctttcctctccaccaggaaatttctaattttaatttttatttatttatttattttgagacggagtctcgctctgtcaccaggctgcagtgcagtggcacgatctcggctcactgccacctccgcctcccaggttcaagcgattctcctgcctcagcctcctgagtagctgggactacaggtgtgtaccaccacrcccagctaatttttgtatttttagtagagatggggtttcaccatcttggtcaggatgttctccatctcttgaccttgtgatctgcccgtatctgcctcccaaaatgctgggattacaggcgtaagccactgtgtgtggcccgaaatttctaacctaattggtcaag

SEQ ID NO: 879056 - DNA, 593 bp, Homo sapiens
aacaaccactctcacagaccacagtgcaataaaattagagatcaattctaagaaaattgttcaaaaccatacaataatatgacaattgaataatatgctcctgaatgacttttgggtaaataacgaaatgaaggcagaaatygagaaattatttgaagctaataagaacaaagataaaacatactagaatctctgggacacagctaaggcagtgttaagagggaaatttatagcattaaatgcccacaccaaaaagttagaaagatctcaatttaacaatctaacatcacaactaaaagaactagagaaccaagggaaaaccaacaccaaagctagcagaagacaagaaataacccaaatcagagctgaactgaaggagattgagacacgaaaaaccatccaaaagattaataaacctaggagttggttatttaaaaaaagtaataaaactagatagaccactagctggaccaataaagaagaaaagagagaaggtctaaataaacacaattagaaataacaaatgggatattaccactgaccccacagaaaatgaaatgattatcagagaataacatgaacacctctatgca

SEQ ID NO: 879057 - DNA, 573 bp, Homo sapiens
gaaagtgaagcagccaagcggtgaatctgagtttagtgcttgagctcggtatttatgatggtgggagtcaagacaactgaggtgttcacagcaaggggcggagacacatcacaggtggcagaaggaatcttgctgtcctgtgcagctgttagaaactctaaactgttgagtgaaaaaaggcagaaacagaacagtatgggcatctctacaacacattgcaatgagggcatgtgggggcaggagaatggaagtggagctcagaaatgaaaggaaaaaaagttaaaataacgtaaagtatgaaaaaagatttgcatgatctgatgataatgagccaaagaagtgaggattatgagaaggttaattytttgcatctgtggttcaaaacaaccaccaccataacaggttatgaaataagaacctgcactgccccccagcaccatctatggggaaggggctatgaaagtagacatgaaggttgtggctacccctggcttttgggttttttttttttttttttttttttttactccacagagctgtgctaaaacacagattctgggcctcacctttgtg

SEQ ID NO: 879058 - DNA, 575 bp, Homo sapiens
acaagagaatttcattgcattttatctgagggaaataatgtgttgtagttccactttcagggagtcggggatactgggattttatacttacatatgggtcaaaccgtcttagctgaataaatcacaaacctctgtaatatctagggtgcttgggtgcttgcttacaataaaaaaggcatgcaggaaaagcggcggtggggggggaagtattttcaaattaggtctctaaatagggattttacaacatccgtttattattattatcatattattattatttaraaatgggatctcaccatgttgctcaggccggtctccaacacctggccttaagggagcctcccaacttggcctcccaaaagtgctggtattacaggtgtgagccagcatgccaccctccacttatcttaaagtaaaattttgattatatagtatgtgaaagagactggcatctttcattcacccatgaagtgccatctccttggtctcatttttttgcatttgtcctcatctgcggaatgtctggccactttgctgtttcctctgggtgtggtttagagtacaaagtacaaccc

SEQ ID NO: 879059 - DNA, 689 bp, Homo sapiens
gaagaatgtcagtggtagttcgatgggaatagcattgaatctgtaaattactttgggcagtatagccattttcacgatattgattcttcctatccatgagcatggaatgtttttctatttgtttgtgtcctttctgctttccttgagcagtggtttgcagttctttaagtggttcttcacttcccttgttagctgtattcctaggtattttcttctctttgtagcaattgtgamctgtagttcattcatgatttggctctctgcttgtctgttgttggtgtataggaatgctagcaatttttgcacatcgattttgtatcctgagactttgctgaagttgcttatcagcttcagaagcttttgggctgagatgatagggttttcaagacacaggatcatgtcatctgcaaacaaagacagtttaactacctctcttcctatttgaatatgctttattgctttctcctgcctgattgctccagccagaacttccaatatgatgttgaataaaagtggtgagagagggcatccttgtcttgtgccaattatcaaggaaaatgcttctagcttttgctcattcagtatgatattggctgtgggtttgtcatagatggctgttattattttgaagtctgttccttcaatacctagtttattgagagtttttaacatgaagggatgttggattt

SEQ ID NO: 879060 - DNA, 689 bp, Homo sapiens
gaagaatgtcagtggtagttcgatgggaatagcattgaatctgtaaattactttgggcagtatagccattttcacgatattgattcttcctatccatgagcatggaatgtttttctatttgtttgtgtcctttctgctttccttgagcagtggtttgcagttctttaagtggttcttcacttcccttgttagctgtattcctaggtattttcttctctttgtagcaattgtgacctgtagttcattcatgatttggctctctgcttgtctgttgttggtgtataggaatgctagcaatttttgcacatcgattttgtatcctgagactttgctgaagttgcttatcagcttcagaagcttttgggctgagatgatagggttttcaagacacaggatcatgtcatctgcaaacaaagacagtttaactacctctcttcctatttkaatatgctttattgctttctcctgcctgattgctccagccagaacttccaatatgatgttgaataaaagtggtgagagagggcatccttgtcttgtgccaattatcaaggaaaatgcttctagcttttgctcattcagtatgatattggctgtgggtttgtcatagatggctgttattattttgaagtctgttccttcaatacctagtttattgagagtttttaacatgaagggatgttggattt

SEQ ID NO: 879061 - DNA, 601 bp, Homo sapiens
tattattatattagtatatgtatatttgataatatgcatcattaacatattctactaccttcctcccaaggtttgggggaaaggaagacaatgagataagagttgtgaagacatttttaaacccaaaatatggactgggtgtggtggctcactcccccaagcactttgggaggccaaggcgggcagatcacttgaggtcaggartttgaaaccagctcagccaacatggtgaatccccatttctactaaaaatatttttaaaattagctgggtgtagtggcaggctcctgtaatcccagctactctggaggctgaggcaggagaatcacttgaacccaggaggcagaggttgcaatgagctgagatcgcacccctgtactccagcctgggcaacagagcgagactccgtctcaaaaaaaaaaaaaaaatgtgttgtacatgtgaatcacaaagagatgaaaaggtgaagtttgttctttcccctgcccgggtccctccccatgcccactccttccccatgccatctagccattctcaagtatccagcctcctgctgtggaataggtacaaggacagagtgatagacgtgctcacctgtgcc

SEQ ID NO: 879062 - DNA, 626 bp, Homo sapiens
tttgttagttttgtttaggattgccttggctgtttgatgtctttgtgaatccatgtaaatttagaatttttttttccgtttctgtgaagaatgtcattgatattttgataagcattgcattgaatctatagatcacttttggttgtatggtcatttccacaatattccttccttccttctttttttttttttttttttggagacagagtctcactctgtcacccaggctggagtkcagtggcccgatctccactcactgcaagctccgcctttcaggttcacgccattctccttcctcagcctcccaagtagctgggactataggcgcccgccaccatgcccagctaattttttgtatttttagtagagacggggtttcgccatgttaggcaggatggtctcgatctcctgacctcgtgatccacccgccttggcctcccaaagtgctgggagccaccgtgcccggccacacaatattttttcaattcatgaactggaatatctttcaatttttttgtatcctcttaaacttttctcatcagtgttttatacttttccttgtagaaatccttcacctcctcagttaaatttatttctaggtattgttttctgtagctattgtaaat

SEQ ID NO: 879063 - DNA, 582 bp, Homo sapiens
ctgaatagaccaataagttctgtaatcgaggcactaatagcctaccaaccaaaaaaaaagcccagaaccaggtggattcacagccaaattctacaagaggtacaaagaggagctggtaccattccttctgaaactattccaaacaatagaaaaagagagactcctctctaactcattttatgcggccagcatcatcctgataccaaaacctggcagataacaaaacaaaaaaaaatttcaggccaatatccctgatgaacattgatgcaaaaatccycaataaaatactggcaaactgaatccagtagccaatcaaaaagcttatccaccatgatcaagttggcttcatccctgggatgcaaggctggtacgacatacacaaatcaataaacgcaatccatcacataaacagaaccaatgataggagtcactattcttatgtcagataaaacagactttaagccaacaacagtaaaaaaggacaaagaagggcattgtgtagtgataaagtattcaactcaacaagaagatttaactatcctaaatatatatgtactcaactggagcaccagagctataaaa

SEQ ID NO: 879064 - DNA, 582 bp, Homo sapiens
ctgaatagaccaataagttctgtaatcgaggcactaatagcctaccaaccaaaaaaaaagcccagaaccaggtggattcacagccaaattctacaagaggtacaaagaggagctggtaccattccttctgaaactattccaaacaatagaaaaagagagactcctctctaactcattttatgcggccagcatcatcctgataccaaaacctggcagataacaaaacaaaaaaaaatttcaggccaatatccctgatgaacattgatgcaaaaatccccaataaaatactggcaaactgaatccagtagccaatcaaaaagcttatccaccatgatcaagttggcttcatccctgggatgcaaggctggtacgacatacacaaatcaataaacrcaatccatcacataaacagaaccaatgataggagtcactattcttatgtcagataaaacagactttaagccaacaacagtaaaaaaggacaaagaagggcattgtgtagtgataaagtattcaactcaacaagaagatttaactatcctaaatatatatgtactcaactggagcaccagagctataaaa

SEQ ID NO: 879065 - DNA, 597 bp, Homo sapiens
ggaaaccatcattctcagcaaactattgcaaggacaaaaaaccaaacactgcatgttctcactcataggtgggaattgaacaatgagaacacatggacacaggaaggggaatatcacacaccagggcctgttgtgggggggtgggcaggggggagggatagcattaggagatatacctgatgttaaacgacgagttaatgggtgcagcacaccaacatggcacatgtatacatatgtaacaaacctgcacattgtgcacatgtaccctaaaacgtaaagtataataaaaaaattaaaaataaataaataaagttgtaaatatatatgtaactgacatcagagtccctaaattcataaagcaacaattaaatgatctgaagggagaaataggatgcaaaactgtaatggtrgcacctcactacttgactttcaacaatggtcagatcatctagatggaaagtcaataaggaaacattggacttgaattacatttcagaccaaatgaagctaacagacatatatggaacatttcatttaacagcagctaaatacatatccttctcaagtacacacagaacattctccaaaacaaatcca

SEQ ID NO: 879066 - DNA, 693 bp, Homo sapiens
agcgatcttgtatgcctggctgtgccaatgtggtagagccacgggtagttcctcggcaccagctgcagtgatgcaggctgccacagagaacctgctctacccatcaccttggtgctggttaacagacctgcaagggaatgacgatgggcaaaaccggcttgggagctgtgtgttattgatgtctctgtcctcctctaggtgaggggacaggagtgcagctctttagattgacatcacaattgtattcgagttctccagagaaacagaacaaattaggcaattttatacacacacacacacacacacatacacgagcagattactataaaaattggctcatgtggttatggaagcccaaaagtcccacagtctgccatctacaagctagggaaacaggcgtaattcagcggtgtatttcagctcaagcctgaaggcctaaaacccaggaggctgaaggtgtagagtccaggtstgagtctgaaagcctgagaaccaggagtaccagtatccgagggttggggaagcctgatgtcccagctcaggcagagagagagaattaatccttcttccacctttttgttccgtttgggccctcagtggataggatgatgtgatctccattggggaaggcatcagtccaccaattcaccaatccaaatgctgatctcttccagaaatacccttgcaaacaca

SEQ ID NO: 879067 - DNA, 546 bp, Homo sapiens
ttctctgaagttcttgtttttttgatacctgactgtcacactactgctgtggatgtgcttcataccatcacagtactgcagggttataagattatctgatagccaatagaagcagacgtctactcactgtcattctttygtcttttggagaataaagttagctatttttatctgggttctcaattttttttttttcttttcgagatgaagccttgctctctcacccaggctagagtgcagtggtgcgatcttggctcactgcaacctctgcctcccgggttcaattgattcttctgcctcagcctcctgagtggccaggattacaggcatccatcaccacgcctggctaatttttttatttttagtagagacagggtttcaccatcttggccaggctggtcttgaactcctgacctcgtgttgcacccacctctgattcccaaagtcctgggattacaggcgtgagccaccgcacctagccgggttctcagttttgtataaactttaaaatagattatcaaatcacataccaattaccatctgatt

SEQ ID NO: 879068 - DNA, 540 bp, Homo sapiens
cactccagcttgggcgacaagagggagactccacctcaaaaaagagaagaaaaaaagaaaaaaaaaagctcatagaataagggtacaaagaaaatattttgtgcagctctatatgttggtgttttatgctaagtattattataaaaaagtccaaatgtttttaaaaattgaaaagtttgtaaaataaaaaaagtacagtaagctaaggttatgttattcttgaggaaagaacaaatttttcataaaygtggtgtagcctaaatgtacagtgtttacaaagtctacagcagtggtcggtaatgtcccaggccttactgttcactcaccaaccactcactgactcacccagagcaacctccagtcctgcaagctccattcatggtaagcgccttacacaggtgtaccatatttttatttttcctaccatattttgaacgatatttttctatgtttagatacaccattgtgttgcgattgcctacagtattcagtacagaaacatgctgcacaggcttgtggcctaggagcaacaggctaacc

SEQ ID NO: 879069 - DNA, 540 bp, Homo sapiens
cactccagcttgggcgacaagagggagactccacctcaaaaaagagaagaaaaaaagaaaaaaaaaagctcatagaataagggtacaaagaaaatattttgtgcagctctatatgttggtgttttatgctaagtattattataaaaaagtccaaatgtttttaaaaattgaaaagtttgtaaaataaaaaaagtacagtaagctaaggttatgttattcttgaggaaagaacaaatttttcataaacgtggtgtagcctaaatgtacagtgtttacaaagtctacagcagtggtcggtaatgtcccaggccttacygttcactcaccaaccactcactgactcacccagagcaacctccagtcctgcaagctccattcatggtaagcgccttacacaggtgtaccatatttttatttttcctaccatattttgaacgatatttttctatgtttagatacaccattgtgttgcgattgcctacagtattcagtacagaaacatgctgcacaggcttgtggcctaggagcaacaggctaacc

SEQ ID NO: 879070 - DNA, 467 bp, Homo sapiens
tgtacctttttgaaaggaactgattgcgtaagtttttggttacaattgtataaaaatgtaattggataataaaacttggtcgttgcagcactctgaaactctcaaagcatgtaggaaataaaaacaagtagtactattatagtgaataaaaaaatgaagcacagggaggtaggtgacatccaaggtcaccctggatgctgataagctacctggaacttttgatacaggacatagaataccartttattattctaatttttattatcgtcccccagttatttgtaattgagaactagctctgctaggcattttgttaggtaaggtgaagaatccagggattgataagatgtagcatctcacatgctagatggagcctagaatctcttgctagttttcttcctttgctaattttaatgtgtattgagtaccacttaaaaaaacagatgaaaaatagagttgcctaatta

SEQ ID NO: 879071 - DNA, 472 bp, Homo sapiens
gtgtatgggggggtgaggatagtaatactgtagttcctttgctgtatctcatctttaattttctctgtcctcactctttcacttattaattttaatttatgttcaggttatctctagcttcctagcagactctccttccaatawgtatcactgttagggaaacattttttggcatggacatctgacttatttatgacactaagttcaataagaattcatctttttggtataccattaattctgtgaaaacataaatccattctgtctcagaaatatgtgattataaataacagaacttcctattatggcaacaaactaacaggtgttttttttttcttatataaatagaagtaagaagttatgctgaggatggtaaagttgcttaattttagaatttttggaattttaggctgtacttatcttcatgctttgtctttctgaaagcttaggttcttatcattattcttgtcag

SEQ ID NO: 879072 - DNA, 643 bp, Homo sapiens
caaaaaaagcttttgataaaattcatttttttatgttaaaaaacctcaagaaactagggaacacatttcaaaataataggagccatttatggcaaacccacagtcatcctcatactaaacagggaggagctggaagcatttcccttgaaaactggcaacagacagggattccttctctcaccattcttgttcaacattgtcttggaagttttggccagagcaatcaggcaggataaggaaataaagggcatccaaataggaagagaagaagtcaaactatccttatttgtagacaatataatcctgtatcgaagaaaccccatagtcttggcccaaaaggtccttaagctgataagcaacttcaaaaaagtatcaacatacaaaattaatgtacaaaaatcataacattcctatacaccaacaacaggcaagccaagagccaaatcatgaatgcagtcccatttcacaattgcyaaaaaagcataaaataccttgatatacagctaaccagggacgtgaaaaatctctacaaggagacctgcaaagcactgctcaaagaaatcagaaataacacaaacaaataaaaaagctatgctcatggataggaagaatcaatattgttaatatgaccatactgcctaaa

SEQ ID NO: 879073 - DNA, 605 bp, Homo sapiens
gctctgcaaggtaatctttggtgtcagtgctgaggaggctcctgaggtctgctatgacataaatcttgaaagttaccgatttggacattgtactcgacgacaaacagctctcaacaaccaggcttgtgcaggaatagataagttttgtggaagactgcagtgtaccagtgtgacccatcttccccggctgcaggaacatgtttcattccatcactcagtgacaggaggatttcagtgttttggactggatgaccaccgtgcaacagacacaactgatgttgggtgtgtgatagatggcactccttgtgttcatggaaacttctgtaataacaccaggtgcaatgcgactatcacttcactgggctaygactgtcgccctgagaagtgcagtcatagaggggtgtgcaacaacagaaggaactgccattgccatataggctgggatcctccactgtgcctaagaagaggtgctggtgggagtgtcgacagcgggccacctccaaaaataacacgttcggtcaaacaaagccaacaatcagtgatgtatctgagagtggtctttggtcgtatttacaccttcataattgcactgctctttgggatgg

SEQ ID NO: 879074 - DNA, 584 bp, Homo sapiens
ggtgggagcaaaatgctgccagtctctttgcataacaagtgtcacctttgcggcagttcccaaccagttcctcatctccatctgagaccacctcagcccggactttattgtccatatcattatcagcatttttgtcaaagctattcaaaaagtctccaggaatttccaaactgtcccacatcttcctgtcttctgagctcttcaaatctctaggaagttccaaacttttccacattttcctgtcttcttctaagccctccaaactgttctaatctctgcctgtcacccagttccaaagtcgcttamacatttttgggtatctttacagcagtgccccactctctgtggtaccaatttactgtattagttcattctcacacttctaataaagacatacctaagaccgggtcgtttataatgaaaaagaggtttaatgaactcacagtttcatatggctggtgtattagtccattttcatgctgcttataaagacataactgagactgggcaagtaacagaagaaagaggtttattggacttatggttccacgtggctgggaggcctcacaatcatggcagaaggt

SEQ ID NO: 879075 - DNA, 689 bp, Homo sapiens
caacacatgggaattcaagatgagattttggtggggacacagtcaaatcatatcattccaaccttggccccttccaaatctcatgtcttcacatttcagaaccaattatgctttcccgacagtacccaaagtcttaactcatttcagcattaactcaaaagtccacagtccaaagtctcatctgagacaaggcaagtccctttcacctatcagcctgtaaggtcaaaagcaagttagttacttcctagataaaatggtggtacaggcattgggtaaatatagccatttcaaatgggagacattggycaaaacaaaggggctacaggccccatgcaagtccaaaaatccagcagtgcagtcaaatcttaaagctccaaaatgatgtcctttgacgctgtctcacatccaggtcaagctgatgcaagaagtgagctcccatggccttaggcagctccacccctgtggcttcacagggtatagtccccttcctggctgctttcacaggctggtgttcagtgtctgcagtttttccaggtgcacagtgcaaactgtaggtggatctactattctggggtccagaggacggcggccctctgctcacagctccatgagtcagtgccctagtaggggctctgtgtgggggcaccaatcccacatttcccttctgcactgccctagcagaggttctt

SEQ ID NO: 879076 - DNA, 521 bp, Homo sapiens
gttccatcactggaaagaatacgtttgctggtgggaagcagtctttatttcttccacttcagagttgttttctttatcggcttctaggagaagatactatccacttctctccctctttttttttgaaagagggtctcactctgtcacccaggctygagtgcagtggcatgatttggcttattgcaaactcaacctcctgggctcaagtgatccttccacctcagcctcttgagtagctgggactatagttgcacaccaccacacccagctaatttttgtaatttgtttagagacggggtcttgccccattgcccaggctggtctcaaactcctggactcaagcaacccacctgcctcagtctcccaaaaagctgggagtataggcataagccacaacgcctggcactatccacttctctgcaaaaaggcgatgcccatttttggtggtagttgtggttaagccaggcatgtagatgttcacatgacaaggtatagggaaaacccaaaaggaatcctagagt

SEQ ID NO: 879077 - DNA, 655 bp, Homo sapiens
gcatgtccatttctgggtccaaatttcctctgtctactgcttccacatcaaagcaaaacctcttctcaatggagtctgttttcttccgtgtgcaggatttgagggtaactgattcacagtctccctatttcctcctgacttttggtcaaatggtaccatggtgatttgtttggaatcccatttatatatacatacagtagtgcttcacccaagaagttccaaagtgatgtttctcctgcacatagaggtatccctccatggtgtaggaactgatggtcttgtgctcaaggggattttccttcatctttttcatcastgattcctggcctgtggcttccgactttttggagcacggacttgagtagacctggcttcagatggctaagagattaagttttggctgcagctataagggtctaggctgcccacataaggttggtgtgtcagggcttggcttttgctgttgcaagaagcatccaagcatcaaacttggaggtaatagagaggtcatctcccatcagcaacctttacaaagatgctgatctggtagatgaaactctttcttagtgcagattataaaaaccttgccaatagtccttaactgtatttcatctgccttccagttagcttataggttagatgaaaccatactcat

SEQ ID NO: 879078 - DNA, 619 bp, Homo sapiens
gatgagaaataaccagtacgagaactctggcaactcaaaaagctagagtgtcttcttcttttttctttctttctttttttttttttttttttcctgagatggagtgttgctctgtcacccaggctggagtgcagtggcacgatcttggctcactgcaacctccacctcccaggttcaagcaattctcctgcctcagcctcccaagtagctgggactacaggtgcctgccaccatacctggctaattttttgtatttttagtagagatggcatttcaccgtgttagccaggatggtctcgatctcctgacctcatgatccgcctgcctcggcctcccaaagtgmtaggattacaggcgtaagacaccttgcccagccgccagtgtctcttcttatctctaaacaaccacactagtttcccagcaatgattcttaaccaggcttaaattgctgaaatgacagaaatagaagtcacaatatgggtaggaattaagatcattgagattcaggagacagtcaaaactcaatccaaggaatctaagaaatacaataaaagaatacaggaaatgaaagataaaatggccattttaagaaaaaactgatctgatagagctgaacaac

SEQ ID NO: 879079 - DNA, 701 bp, Homo sapiens
ggacaataactggaatcattccccttgagattggaataagacaaggatgcccactctcaccactcctgttcaaaatagtactggaagtccttgccagagcaatcaggcaagagaaagaaataaaaggcatgcgaataggagaaaaagtcgaactatcttcactgatgatataactcgatacttaggaaactaaagactctgccaaaaggctcctgaaactcataagcgcttcagtaaagtatgaggatacaaaattaacatacagaagtttgtagcatttctatacaccaataacattcaagctgaaagctaaatcaagaatgcaattccatttacaatacacatggacacacacacacgcctaggatacaaataaccaaagaggkaaaagatctccccaaggagaactacaaaacactgctgaaagaaatcccagatggaaacaaacaaatagaaaactattctacgctcacagattggaagaatcaatatcattaaaatagtcatactgtccaaagcgatctacaagtccaatgctattcctatcaagctatcaatatcatttttcacaaaactggaaaagactattctaaaatttatatggaacaacaacaacagaaagcccaaatagccaaagcaatcctaaacaaaaaaacaaagctggaagcatcaaattacctgacttcaaactatactataag

SEQ ID NO: 879080 - DNA, 635 bp, Homo sapiens
caataatatttttcaccccatatatttaagtgaaaaattgaagaactaaaaagtgaaataaaacaaatcaggagagctgggtctgagcatgctggatcatgcctgtaaacccagcacttaggggctgagctgggaggattacttgaggccagacttttgagaccagcctgagmaacacagaaagaccatgtctcaaaaaataaaataaaataaaataaaataagaggcatgggttttcttttctttcagattttttagccacagaaatgcataaagaccccgaacaaaaatgtgccagtctacaatataatcaaaatagttaagatttaaaagctaattcctttggcgtgggaatcaatatactagttgccataataactaattacctagataagactaaatataaatgatagttacaaaatgacagtccaagttatagttaaacaaatttagagattatcctttattgtcatctgtaatgccttgatacttgaggaaaattggaagagcctagaaggacaacacattcctagcttaaactaattaatgcaattcagcttcatccagtaaatactgagtgagtgatatgtgaaagggattccctgcataaagatgggaaataaacactcctatcc

SEQ ID NO: 879081 - DNA, 635 bp, Homo sapiens
caataatatttttcaccccatatatttaagtgaaaaattgaagaactaaaaagtgaaataaaacaaatcaggagagctgggtctgagcatgctggatcatgcctgtaaacccagcacttaggggctgagctgggaggattacttgaggccagacttttgagaccagcctgagcaacacagaaagaccatgtctcaaaaaataaaataaaataaaataaaataagaggcatgggttttcttttctttcagattttttagccacagaaatgcataaagrccccgaacaaaaatgtgccagtctacaatataatcaaaatagttaagatttaaaagctaattcctttggcgtgggaatcaatatactagttgccataataactaattacctagataagactaaatataaatgatagttacaaaatgacagtccaagttatagttaaacaaatttagagattatcctttattgtcatctgtaatgccttgatacttgaggaaaattggaagagcctagaaggacaacacattcctagcttaaactaattaatgcaattcagcttcatccagtaaatactgagtgagtgatatgtgaaagggattccctgcataaagatgggaaataaacactcctatcc

SEQ ID NO: 879082 - DNA, 612 bp, Homo sapiens
cttttttataataaaacacttgatataggtctactctcttaataattgtcaagtgtacaatacaatattattaactgtaagtgctatgttttacagcagatctctggaatatgcttatattgcacaactgaaactttataccatttaaccaactccccatttcccctccctcactctagaccctgataattaccattctattctctgattctatgagtttcaccttcttaggtaactcatgtaagtagaatcatgctgtattcatccttctgtgactgatttatttcactaagcataacatactctaggcttatccaggttgtcacaaatggcagaatttccttcttttaggctgagtaatattacattgtatgtatttaccatattttaactccattcttctgtctatggtcatttaggttgtttccatatcttggctgttgtaaataatgctgygattaatcttaatcttaggttaaacatcacttgaccattaaattcttcccccacctttgccatacacttctaaaacatcctgtggttcttgcccactgattatacttgcagttactggtctgtatgtagcaacacagatagggaaagaacttcaga

SEQ ID NO: 879083 - DNA, 733 bp, Homo sapiens
tctcatcacaatcacaagttctgcccaaattgaaaggagggaattttaaaaagacaaggtggtattttaataataaagtgtcagtttctaaaagtgagaaatttatattgagaagtttattttgcaggaaatgacagataaaataggtgcaagtaagaacaaataagcatgtttttctaatactacaagctgagcagaawgctttgtttggctgaaatagagacgttctactcctgagaagctcccttacaacaaattttctatcaaacattccctaggatggtttggctgtcttaaaaagagatgaaatagtgatggaaaattaaattacaacattgctttgacttaaacagcaggtggcccatccagcctaagtactatacttactttattttataatacattttaaaattagtcatctcagttatttttgccttactgtcatcatttaatctagtgcctggttgattatagaccaacaagagatatttgaagaaaaaaaatgtgtggacttgtcttttcagttttctgtaattaaggagaagtagttttccttctttatattaccaaaaaggtaactcagtcacctctgagctgttaacccaaacttaacaggcaatttcttaataatgcaatcaacctctaaatagcaccttacttaaatctaactctctttgagcataagcaattatcagtttcatttgattgggtatctattgatttactagcccta

SEQ ID NO: 879084 - DNA, 733 bp, Homo sapiens
tctcatcacaatcacaagttctgcccaaattgaaaggagggaattttaaaaagacaaggtggtattttaataataaagtgtcagtttctaaaagtgagaaatttatattgagaagtttattttgcaggaaatgacagataaaataggtgcaagtaagaacaaataagcatgtttttctaatactacaagctgagcagaaagctttgtttggctgaaatagagacgttctactcctgagaagctcccttacaacaaattttctatcaaacattccctaggatggtttgrctgtcttaaaaagagatgaaatagtgatggaaaattaaattacaacattgctttgacttaaacagcaggtggcccatccagcctaagtactatacttactttattttataatacattttaaaattagtcatctcagttatttttgccttactgtcatcatttaatctagtgcctggttgattatagaccaacaagagatatttgaagaaaaaaaatgtgtggacttgtcttttcagttttctgtaattaaggagaagtagttttccttctttatattaccaaaaaggtaactcagtcacctctgagctgttaacccaaacttaacaggcaatttcttaataatgcaatcaacctctaaatagcaccttacttaaatctaactctctttgagcataagcaattatcagtttcatttgattgggtatctattgatttactagcccta

SEQ ID NO: 879085 - DNA, 587 bp, Homo sapiens
tgagacaaaacatgtcagaatgctttgtaaacttgcaaagaatactgaaaagcaaggtattttgttattttttaaaattgaaagaaagttcaaacaacacaaccttgttgacatccttgattgaaataaatgcaaaaatgttataacggttggaaaaatgaacatgaagattgaaggtacacaccaaaaaataacaggtgtcaactgaaattctccaatttagataatataaatcattttctcccatgtaaatagatcatcatccaggtcaattcatatatagcttaatttgatgttgtggggaaaacaaaaacatataggtcctgacatattctaatttcttcatatacttttttaaaaataaaactttcctcttacagcagttttaagttcacaataaaattaaaaggaaggtccagagattttytatatatccccttcctgtccccacatgcacattctcccccactatcaacttcccctgccagattgggccatttgttacaattgatgaacctccattgacacatcattatttcccagagtccatagtttacttcagggtttatttactcttggtgttttac

SEQ ID NO: 879086 - DNA, 650 bp, Homo sapiens
ttagatatttgtgaatattcttctttgatacaatatcaaaagtagacaagaggtaatttcttaaatgttgctgcaatgtagaatcaaattatatcaataaaattttatacatctgtgcctctaactttcagtttgaatgaatcttttattcattcataaactcctattcgttccctgagttaggcagatctcccaaatgttaacacattttactaggcaatatcataagtggcattcattaatatcacctccaatctcatcggaaactttttaagtactagaaaactgtcatattaaaaatggcagattacattttccaaagtttcaattttctcttgaaagctttaattttatcattagcaacaaagagtgatgattgttttcctgaactgacagtctgacattaattttcaagaaaatgtctgccctatacccaaacatgaataactgtatctcatctgttagtagctctttcaaaaaaaaaaaaaaaaaaacccctgatrttcttgggaaaagtggctaattcaggttgcaactgaaacaatctcacattgcttgcaatagccatcatactttggtgtgcaacagaaatggcctatgtacatttcccatttggtcataacgcaaacctaaaaagatatatattcaag

SEQ ID NO: 879087 - DNA, 554 bp, Homo sapiens
cagtggcccaggcctgtaatcccagcactttgggaggccgaggcaccatggatcacctgaggtcaggatttcaagaccagcctgaccaatatggtgaaaccctgtctctactaaaaatacaaaaaattagccaggcttggtggcatgcacctgtagtcctagctactggagaggctgagaccgggtaattgcttgaagccaggaggtggaggttgcagtgagccaagattgcaccactgcactccagcctgggcaacatagcaagactccatctcaaaaaaaaaaaaaaaaatatatatatatatatatatatayacacacacacatatatacacactttgtctctatttcacacgctcaatttttctcttcctttttgaatataaggaatatgctatggactgaacgtgtaccccccaaaattcacatgttaaagccttaaaccctaatgtggatttatagaatttggaggtatggcctctaagaggtttggacctggtaaggggaggaagagtgacctgactgctctctctttctcatgctctgccatgtga

SEQ ID NO: 879088 - DNA, 630 bp, Homo sapiens
tgacaaaatacagttctttgacacacccaaaaaatcacactagctcaccagcaatggatccaaactaaaaagaaatctttgatttacctgaaaaataattcagaaggtcagttattaagctaatcaagaaggcacaaagaaagatgatgtccaagttaaggaaatcaaaaaaatgatacaagaaatgaggggagaaatcttcagtgaaataggtagcataaataaaaacaatcaaaatttcargaaatgatggatgcacttagagaaatgcaaagtgttctggaaagtctcagcaatagaattgaacatgcagaagaaagaactttagagctcgaagacaaggtttttaaattaacccaatctgacaaagacaaataaaaaaaataagaaaaaatgagcaaagtatcagggaagtttgggattatgttaaatgaccaaacctaagaataattggtgttcctgaggaagaagagagatctaaaagtttggaaaacgtgtttgagggaacattcgaggaaaacttccttggccttgctagagacctggacttccaaattcaagaagctcaaagaacacctgggaaattcattgcaaaaagataatcacctaggcacatttcaccaagttatc

SEQ ID NO: 879089 - DNA, 630 bp, Homo sapiens
tgacaaaatacagttctttgacacacccaaaaaatcacactagctcaccagcaatggatccaaactaaaaagaaatctttgatttacctgaaaaataattcagaaggtcagttattaagctaatcaagaaggcacaaagaaagatgatgtccaagttaaggaaatcaaaaaaatgatacaagaaatgaggggagaaatcttcagtgaaataggtagcataaataaaaacaatcaaaatttcaggaaatgatggatgcacttagagaaatgcaaagtgttctggaaagtctcagcaatagaattgaacatgcagwagaaagaactttagagctcgaagacaaggtttttaaattaacccaatctgacaaagacaaataaaaaaaataagaaaaaatgagcaaagtatcagggaagtttgggattatgttaaatgaccaaacctaagaataattggtgttcctgaggaagaagagagatctaaaagtttggaaaacgtgtttgagggaacattcgaggaaaacttccttggccttgctagagacctggacttccaaattcaagaagctcaaagaacacctgggaaattcattgcaaaaagataatcacctaggcacatttcaccaagttatc

SEQ ID NO: 879090 - DNA, 630 bp, Homo sapiens
tgacaaaatacagttctttgacacacccaaaaaatcacactagctcaccagcaatggatccaaactaaaaagaaatctttgatttacctgaaaaataattcagaaggtcagttattaagctaatcaagaaggcacaaagaaagatgatgtccaagttaaggaaatcaaaaaaatgatacaagaaatgaggggagaaatcttcagtgaaataggtagcataaataaaaacaatcaaaatttcaggaaatgatggatgcacttagagaaatgcaaagtgttctggaaagtctcagcaatagaattgaacatgcagaagaaagaactttagagctcgaagacaaggtttttaaattaacccaatctgacaaagacaaataaaaaaaataagaaaaaatgagcaaagtatcagggaagtttgggattatgttaaatgaccaaacctaagaataattggtgttcctgaggaagaagagaratctaaaagtttggaaaacgtgtttgagggaacattcgaggaaaacttccttggccttgctagagacctggacttccaaattcaagaagctcaaagaacacctgggaaattcattgcaaaaagataatcacctaggcacatttcaccaagttatc

SEQ ID NO: 879091 - DNA, 627 bp, Homo sapiens
gacacaaagttcattaactgtaataatgtcaaatttcctgaaaatctcagagtctgaaatatcccaatcagaatgcaaacactgtttttttctaacttgaaaagctcatttaaaaatgtacacaaaaacatagatgagactgtatttggtgtaaaagttaatataaaatgcagcaactgargcagtgttcttttgattacgtagtagaaaaagtggacaataagacagaaaaaaaaaagcccaaggtcagacccagacgaatgttggactgtggcatgtaaatgggatggtattgctgaccagtgtgaaggggcatactgctcaataataattatctagctgacagaattttttttggaacactgccatttttttaatatgttttataaatttctgtttaatttatagataaaaatttatgtatttatgtgaaaatgtgattcaaaaatatttgtggatacatagatggatatattaatggaatacatgaggtatttttgtacaggcatgcaatgtgtaatagtcacatcatggaacattgagtattcatcccctcaagcatttatcctgtctttgtgttacaaataatccaatcatactcttttagttagttttaaaatgtacaat

SEQ ID NO: 879092 - DNA, 399 bp, Homo sapiens
catacatatatgtcatatatatgccatatatatatcatatatataaaaaataactgggtattccattgtaggaggtagaaataaagaaaagaatacatacaaaaatctaagttaaaaagacaagaacataaataagaatacacacacaatgtaagttaaaaagacaagaacataaataaaaacraaacaaaaaagatcaataaaatcaaaagctgactctgaaagctctaataaaaaataccgaatttcaagaaggcagaaacgagatgggccaagttcaaaagttacaggcaataataattattcttatttacaaattgaatataactttaaatttgtaaagaatttccacttaatattataccccttaaaaagatgatagggttagatgaattttat

SEQ ID NO: 879093 - DNA, 693 bp, Homo sapiens
caggtaagtctctaggatctgtgaggtcatcggtaccgtggatgcttcttcagggtggggagggtttgctgccattgatagccctgcaccatcatggaagcgtgcccagtctgtttccccatctttgatgcactgtggatgataaataatcatcactgctgtgtgatggctgagagggattccagccagtgtgtgctaggttatagtgttttcctgatggatggagcctattctgggaagcagcttattgtctcacgtgaacaggctttctaaaataaatgactgctttcttaatattttgaatccttttcttcagcacatgttttgttgccgtggtttgaaagcttgccaaatatatgcctttgcacaactccctgtagggctgggtatacaatcagaccaaacagtgtgatttaagtttgagcataattgggaattcagcaatcacttgccttgcatttgatggaatggcagtggagtgcttgagagttacttcgctgttaaaaaattatatgtgtataacgcgcacgcgcgcgcrcacacacacacacacacacacacacacacacacacacagagtttcactatctcataataaagttgtacctgaaaccactgggcaaaaataacactagcatgataaataattgcttgatttttgtgatggaggcaggaattaacttcaacaaatca

SEQ ID NO: 879094 - DNA, 682 bp, Homo sapiens
atatcatgaagatgggaaaagtttattttatcactaaatataaccaattagcatacatgaatggcctctccagttaccaggtgagttcaggatgaactatgtatgacatggtgctatatattcttctacttgtggactaattatggtgaccactaattatggtgacagactaattctgtctttgcaatctgttaagcagattgactgtgatgcatgacacattctcgattaattgtgtaataaaacatcattcttactgttctgtcattgtggtgtttctctggggatgsagaaaatttttcttttaattatattttccaaacactgtcaagaattatcagacacaataaaaacatataaggtgccaaccagaatttactatagagaggactttccctctcaggcttccagtcaactaacaaatttgctgcaaagtgcctgctttctcttaaatatgcaggcagaattatgtctctgcctgttagatacctgtagttttctatagtcacttctagagagactagaccagatttctacagacttgacagggcaacaatcaaccattttacctctttctatgactcttgtatcttcagtcctgaaactgattcacagaccctggaccccaggtacccaatcagagtaacgtgtgcactgagtagacatgtggaaatgagagtct

SEQ ID NO: 879095 - DNA, 640 bp, Homo sapiens
ggtggggggaggggagagggatagcattgggagatatacctaatgctagatgacgagttagtgggtgcagcgcaccggcatcgcacatgtatacatatgtaactaatctgcacattgtgcacatgtatcctaaaacttaaagtataataataataaataaaataaaataaaataaaawaataaatgctcattatcactaatcagagaaatgcaaatcaaaaccacaatgagatatcatcttacaccagttagaatggcttttgttaaacagtcagaaatataacagatgttgttaaggctctggagaaaatggaacacttgtacactgttggtggggatctaacttagttcaaccaccatggagagcagtctggaaatttctcaaagaactaagagttgaactgccattcaacccagcaattccattactgggtatatacataaagaaaaaaaattgtatcaaaaagtcatatccacttgtatgttcattgcagcaccattcacaatagcaaagacatggagttaactcaggtgtccatcaacagtgggttgcataaagaaaatgtggtacatatacaccatgggacactatgcagccataaaaaaatgaaattatgtcctttgcagcaacatggatgca

SEQ ID NO: 879096 - DNA, 592 bp, Homo sapiens
ggatttcaccatgttggccaggcctgtctcaaactcctgacctcaagtgatccaccttccttggcctcccaaagtgctgggtttacaggtgtgagccaccacctggcctgcattatcactttctagcaacttccctctgaccctttgaggcccaagcccaattcagcctcttccatgaggtcatccccaactagactccctcctgtggccacccctagctcttacaaccgtcagtgctcactgttgaccctgagcgatgtgttcacacacattcttccgatctcccaagccagacagcaagcctgcaacactaagctcactgcccaacacasagcacatctatggtgactgattaatgtcagattggatgtttctcattttcaaaaaactgaatgaaaaaaatttatattcttggtttagcacttcccatgtatatccttgaagcttgccatttctccttttcagctaataacgttatggtcactgtgaggtgggaaacagtgtaaaaggaataaagaaaagttgcctgagaacttttaaggatcaagtctttggtcttcgctctctttccattcattcattcattcattct

SEQ ID NO: 879097 - DNA, 589 bp, Homo sapiens
tacaagtatctccttcaagttcttgctttcctttcttttggatatattcccaaaagtgaagaggaatactccttaatgaaaaagggcgcgatgatgtacttaacaagagggcttcaaaatacataaagcaaacatttaacaggaccaaacagaaaaacaaacaaatccacaatcacagttggaaatttgctgacagaatgggaaaaaattcaagaaagttatagaatatttgaacaaaattatttgccaacttgaccaaattgatatctaacccaacaagtataaagtaaatatttcgttcaagtgtrcatgggatgttcaccaagagaggctatatttcatactattaaagaagtctcagatttcagaagattaaaatcttataaaatatattctctaagcacaacagaattagaaaccaatgataaaaaaataacaaaaatatcaaatatttgaaaattaagcaacacacttctaaataagccttaatttgaagaagtcacaaggcaaattttaaaatgctataaactgaattaatgtatcaatatagtctaacaaaatgtgtgaggtacatttaaaataatgctta

SEQ ID NO: 879098 - DNA, 626 bp, Homo sapiens
tggatttccccctcagtgttgctcttgtaacagtgagtgtgtgccgtgagatttggttgtttaaaagtgtgtaacacctctcccctcactctcttcctcctgtatgggccatgtaagatgagcttgctctcctgtcgccttctgccatgattgaaagtttcctgaggctgccgggtgtggtgtttcacccctstaatcccagcactttgggaggctgaggcaggcagatgacttgaggtcacaagtttgagaccagcctggccaacatgatgaagctccgtctctactaaaaatacaaaaattagccgggcattgtggtgggtgcctgtcatcccagctactcaggaggctgaggcaggagaatcacttgaacccgggaagcagaggttgcagtgagccgagatcaggccactgcactccagcctgggcgacagagcctagctcaaaacaaaaaaaaaaaaaaaaaaaaagttttccctgagttctccccagccatgcttcctgtacatcctgcagaaccatgagccaatcaaatctcttttctttataaattacccagtctcgggtatgtctttatagcaatgccagaatgaactaatacacctggcgaatggaattaagttaca

SEQ ID NO: 879099 - DNA, 642 bp, Homo sapiens
agtggaaaccaaaaatagcagaaatatctatacttacaactgataaaatagactacaagtaaaatgctgtaaaaagagacaaagaaagtcagaatataaagataaagggatcaattcagatagaggatatactcgtatagacatctatgcaccccacacaggagcatccgtgtgtacaaagtaaacattagtaagtctaatgttaagcaaagacaggcttcagtatagtaagagtaggggacatcaacaccctactttcagtagtggacaaaaaagtcaacaaataatcatctgagttaaactacacactagacccataacatttcacccaactgtatcagaatatacattcttttcataagtacatggaacattctccaggatagaccatrtatcaggcctcaaaacaagactcaaaacatttaagagcataaatctgaacaagtgtcttttctgaccacagtggactcaaactagaaatcaataacaagaggaacttcagaaactgcagaaacacataaaaagtcaacagtatgttcctaaatgatcaatgggtcataaagaaattaaaaaggatattataaaaattcttgaaccacatggaaatggagatgcaacatacaaaaatctatgggatacaac

SEQ ID NO: 879100 - DNA, 566 bp, Homo sapiens
gccattgcttttgatgttttagtcatgaagtctttgcccattcctatgtcctgaatgatattgcctaggtaacaaacctacacattctgcactcgtgtcccagaacttaaagtaaaaaaaaaaaaaaaaaaaaaaaaaaaagatgtgtgtgggctaccataccaaaagcagataattacatagtgaaagtgagaactggtaaccttcttcctaccttctcatatgccagcattagtctttgtttcctttttggcttcgaattgaaraaacacagttgtcttattagattacagattctttcctattattttctgaagagggagccacctcagaagcaaagttcctgtcatagatttttttacattattgctttctgttttacttttcattattatttaacctgaatctttccagcatacagaaaagtacagaaaataatatggggctctgaaatactccttcctagttttaataaatgtgaagattttggcgtatgtcttagatctgacttaagaagtaattattttcatacttaaacccctctcatctcattcccttctcccagt

SEQ ID NO: 879101 - DNA, 677 bp, Homo sapiens
tcaaattcattattatagatatataaagaagaattgatttttctccgtttttctactggtcatcttacataattcttattatttctaatattttccactgatgttcataatttaacacaaatgtctacattttaaaatattatcttgtttcaaataactatataattttattttcttgttatatcacratgaccagatcttttaaacaaataaaggtgaacaaataaaggtgatcacagatatcttttctttctgacactcttaatatttaatcatcttaaaaacaacaaggtagataaaatatataaacaatctcgctgtagtctcatctcagttttgggcaaatcacatttatcatcaaatcacattccctggttactgagacaataaactggtttcgtttgtaagtcaacctcactgaatatgttcataaagcaaataattgaaaggaaatgaggcaaaagccagaattattatagtttaaatcattaggcccaaatagtctatattgaagcatgatatttccctgaccccttctcaggactcgtgacaagagtgccccatttactcatcccgctgctctcaactcctcacagtagggagtacacgagtaaatgaggcaggaactggagtacatgagctctggaaccagttagctgcttcggcaccggccggag

SEQ ID NO: 879102 - DNA, 481 bp, Homo sapiens
ctcattcaccgtcacaagaacagcatggaggtaactgcccccgtgattcaattaactcccattgggtccctctcatgacatgtggggattaagggcactacaattcaagatgagatttgtgtggggaaacaaagcctaaccatatcrttccacccctggttcctcccaaatctcatgtcctcacatttcaaaacataatcatgcctttccaacagtcccccaaaatcttaggtcattccagcattaaccaaaaagtccaagtccaaagtctcatctgaaataaggcaagtccctcccacctatgagcctgtaaaatcaaaagcaagttagctacttcctagataaaatggagatacaagcattgggtaaacacaccaactctaaatgggagaaattggccaaaacaaagaggctacaggccccatgcaaatccaaaatccaatagggaagccattaaaccataaagttcccaaatgttttc

SEQ ID NO: 879103 - DNA, 665 bp, Homo sapiens
ttctctagagttcttatttgcttgtattggtaacagcaagtgatatgccagtaaaaagcttggttcaaactttaataataaaacatttatttcattagaaccatcatctacaaatgagaagtagtttggtttattttatcttaacatgccatttgccagtactagcatttacttctattaatactgtaagtaaacaaataaatatatagaagccccagacttcattagataggtacaccaaggctatgcacaattctggaggacctatgatttgacataaaattatactactaaagagagcaaacacagcataaactttctgcaaagcaatttggctgtgtgtagtaagagcttgaacctatttatctaatttttactttaaaatgtttgtctacatttcacttctaattaaatagcaaaatactataataaaaattatgttcaagttttatttataactaaatgtacttgaaaatattctatactttctctctmtatatatttttacaataagcccattatggattgaatcgtgtctccgcaaagaggtatgctgaaatcctaacctctagcacctgtgattgtgactatttggaaatggggttttgtggatgtaatcaggttatgatgaagatattaaagtgggccttaatgtaatctgactg

SEQ ID NO: 879104 - DNA, 622 bp, Homo sapiens
aaagtttgctgcaggggcggggctgcatggcaagccagtgcagaaggcaaatgtggggttggagctcccaaacagagttcctgctggggcactgcctagtggagctgtgagaagaggactaccatctccagaccccagaatggtagatccaccgacagcttgcatgcaccatgcccctagaagagccacaggcactcaatgccagcccatgaaaacagccagaagggaggctgtaccccacaaagccacagggktggtgcttcccaagaccatgggaacccacctcttacatcagcatgacctaaaagtgagacctggagtcaaaggagatcattttggagctttaaaatttgactgccccactggattatggacttgcatgggtactgtaacccctttgttttggccaatttctcccattttgaatggctgtatttacccaatacatgtactcacattgtatctaggaagtaagtaacttgattttgattttacaggctcgtaggtggaagggacttgccttgtctcagatgagactttggactgtggactttagggttaatgctgaaatgagttaagactttggaggactgttgggaagacatgattggttttgaaatgt

SEQ ID NO: 879105 - DNA, 674 bp, Homo sapiens
ggtacctactgagctccaattacttgtgaaaatgacacagggctaatttgtccgtacttcatcatttatccaatttgttccatgaagaggtatgactgttggctgtatctggtgtattatgttgaataaccaagatagaaggtctaataaggcttgatttctgacattaagaaatgagaggtctagtgtatgtcttactttactactttaggtgaatatttcatgacaagtaaatattttttaaaaactttgacttctcaggccacagagaaactctcaagaaaaccaagtttagcttacaggtatttctagcatctgtgagttgttaaagactcccaaaccataaaattagatctttaaaaacatgcaaaaaggaacagacawgctgaagggttaataatgagaagcacgtgcttactctctgtgctttaaccacatggacactgttgtcactgctactaatgctcacgttttcaggtttctatttctggtgtgggtgacactgctctttctttagaaaacatactttaaatggcttagggagtaaatgtggtaaaatgaatacaaaataagtaggaagatgaatgaacaattcaatattatattccagagaagataaaaataaaaagctaagcaattaacactacacttaaaagatgagtgtgttgtagttg

SEQ ID NO: 879106 - DNA, 674 bp, Homo sapiens
ggtacctactgagctccaattacttgtgaaaatgacacagggctaatttgtccgtacttcatcatttatccaatttgttccatgaagaggtatgactgttggctgtatctggtgtattatgttgaataaccaagatagaaggtctaataaggcttgatttctgacattaagaaatgagaggtctagtgtatgtcttactttactactttaggtgaatatttcatgacaagtaaatattttttaaaaactttgacttctcaggccacagagaaactctcaagaaaaccaagtttagcttacaggtatttctagcatctgtgagttgttaaagactcccaaaccataaaattagatctttaaaaacatgcaaaaaggaacagacaagctgaagggttaataaygagaagcacgtgcttactctctgtgctttaaccacatggacactgttgtcactgctactaatgctcacgttttcaggtttctatttctggtgtgggtgacactgctctttctttagaaaacatactttaaatggcttagggagtaaatgtggtaaaatgaatacaaaataagtaggaagatgaatgaacaattcaatattatattccagagaagataaaaataaaaagctaagcaattaacactacacttaaaagatgagtgtgttgtagttg

SEQ ID NO: 879107 - DNA, 612 bp, Homo sapiens
atgcaataaaaaaagataaaggagatatcaccactgatcccacagaaatacaaactaccatcagagaatactataaacatctttatgcaaataatctagaaaatctagaagaaatggataaattcctggacacatacaccctcccgagactaaaccaggaagaagttgaatctctgaatagaccaataacaggttttgaaattgaggcaataattaacagcttaccaactaaaaagtccaggaccagatggattcacagcagaattctaccagaggtacaaagaggagctggtaccattccttttgaaactattccaatcaatagaaaaagagggaatcctccctaactcattttatgaagccagcatcatcctgataccaaagcctggcagagacacaacaaaaaaaaawttttagaccaatattcctgatgaacatcaatgtgaaaatcctcaataaaatactggcaaactgaatccagcagcacatcaaaaagcttatctaccacgatcaagtgggcttcatccctgggatgcaaggctggtttgacagacacaaatcaataaacatagtctatcacataaacaaaaccaaagacaaaaaccacatgat

SEQ ID NO: 879108 - DNA, 630 bp, Homo sapiens
ggactacaggcaccagccaccatgcccagctagttttaatttttctttttcttttttttttttttagaaacagggtctcactatgctgcccagactggtcctgaattcctggtctcaagcgatccaactgccttgtcttccaaaagtgctggaaggacttggggcagagcaaggtgacagatagaaggctccactgaccatccactcagcaagcccaccaatttaacatctacaccagcagcattggcgtcagtcactgcacctggctgggattacaggtgtgagtcactgcacctggccaatttatcattttaaatgattgcccagcattctactattgataccagaatttctttagctactctctactgttggatatttagactgctttcaatcttttggctrtcataaatattacaatattctattcacaaagctcttcaacctagtccagttatttttccagaataacttcctagacgtggaattgttggatcaaagggtgtgcatctttaagactttgataactattacaaaactgccctccagaaagcttgtaccgttaaataccaccatttccccctatcatcaccctcactgcatagcagcactctttttcctcttcgcatt

SEQ ID NO: 879109 - DNA, 620 bp, Homo sapiens
tgggagttgactcatgatttggctctctgtttgtctattattggtgtataggaatgcttgtgattttacacattgattttgtatcctgagacttagctgaagttgcttatcagcttcaggagattttgggctgagatgatggggttttctaaatacacaatcatgtcatctgcaaacagggacaatttgacttcctcttttcctaattgaataccctttatttctttcttttgcctgrttgccctggccagaacttccaacactatattgaatagcagtggtgagagagggcatccctgtcttgtgccggttttcagagggaatgcttccagtttttgcccattgagtatgatgttggttgtgggtttgtcataagtagttcttattattttgagatacgttccatcaatacctagtttattgagagtttttagcatgaaggctgttgaagtttgtcaaaggccttttctgcatctattgagataatcatgtggtttttgtcgttggttctgtttatgtgatggattatgtttactgatttacatatgttgaaccagccttgcatcccaggggtgaagcccacttgattgtggtagataagctttttgatgtgctgctgg

SEQ ID NO: 879110 - DNA, 604 bp, Homo sapiens
taacacatctaaagaaataatatgttgatacaaagtatgcctgatgagttatggaagatttaaaaagagagtcagaaagttacatgtaagctgctcaccaaagcattttaaacaggcctagccagacacagaatactgtagtccattgtcaaggtctttctttttgtggcggtgtaaacaacaagctaatttagcctgttgccaagaaacactgaagttcatcaaactaacagtatgttctcatgtcaccctggaaagtcttctgattataatgggctccctatatgggatgacctatagggagagaatgtgctggtgctgaggacttgagtattctgattcytaagacagaagtttcactataaatagataaatttgcattctatgtttgtatgtcaaccttaagctcaacgaatatgcatctgaatcttagagacagatgattctcaattgcatcacacagtcaggcttccaagtctgtaaacctaagcacctcaataactttctaagataatgctactgaagaaggtgtttgggggaaaaagctgccatctgaaaggtatctttggtggtaggggtcggggagacagcgtggcatgctgtt

SEQ ID NO: 879111 - DNA, 508 bp, Homo sapiens
ttcctttagaaagactatgttaaaatgaatttgctaacattataattaccattttaattacattgtgtttgatagtgcactgaattctgagatcagaaagtatagagctttccttcctttttttttttttttttttgagacagagtctcgctctatcccccaggctggagtgcagtggtgcaatctcagctcactgyagcctccgcctcctgggttcaagcaattcttatgcttcagccttctgagtagctgggactacaggcacctgctaccatgcctgtcgaacttttgtatttttagtagagacagggtttcgccatgttggccaggctggtctccaactcctgacctaaggtgattcaccctcctcgccctcacaaagtgctgggattacaggcgtgatgcctggccagcatagggtttttttttcacttacctttgaaagtagcttctttccctctctttctgggtgaaataaattcattatatttaagtaatctaccatgag

SEQ ID NO: 879112 - DNA, 585 bp, Homo sapiens
cttatgttttagcaaagagactggtggcattttgccctagagatttgtggaacttcgaacttcagagagacgatttaaggttctggtggaagaaatttctacacagcaaagcattcaagaggtgacttggtgctgttaaacgcattcatttgtaaaaggaaaacagagcataaaagtttggaaaatttgcagcctgacaatgcagtagaaaagaaaatcccattttctgaggagaaattcaagctggctgcagaaatttgcataagtratgaggaagcagatgttaatccccaagacaatgaggaaagtgtctccagggcatgtcagaggtcttcacagcagcccctctcatcacaggctcaaaggcctaggaggaaaaagtggttttgtgggccagacccaaggttcctgtactgtttgtagcctaaggacttggtacctgcatcccagctgctgcagctgtgactaaaaggggccaaggtacagctcaggccatggtttcagagggtgcaatccccaagccttggcaacttccaagtggtgttgagcctgcaagtgcacagaagtcaagaactgaggtttgga

SEQ ID NO: 879113 - DNA, 552 bp, Homo sapiens
ttgactaacactgagggtctgtggaggaggctaaggaagaaataagattagaaaggtggagcaggtctagcttttacttccaggaaaggtgatgaggatcaagggagagatgtgattacaggtgtcctttagaaaggtaaatcagggctgggcacagtggctcacgcctgtaatcccagcactttgggaggctgaggcgggtggatcacgaggtcaggagttcaagaccagtctaaccaagatggtgaaacccrgtctctactaaaaatacaaaaattagcctggcggcggggtgggtgcctgcaatcccagctactaggaaggctgaggcagagaattgcttggaccctggaggcagaagttgcagtgagctgagatcatgccactgcactccagcctgggcaacaaagtgagacttcatctcaaagtgagacgtgagactcacttcacaaagtgagacttcatctcaaaaaaaaaaaaaaaaaaaaagaaaagaaaagaaagataaatcaggcagcagcatgcaaaactggctggagaagaaatggagta

SEQ ID NO: 879114 - DNA, 558 bp, Homo sapiens
gtctgagagactatttgttatgatttctgttcttttgcatttgctgaggagtgttttacttccaattatgtggtcaattttagaataagtgcaatgtggtgctgagtagaatgtatattctgttgttttggagtggagagttctgtagatgtctattaggtctgcttggtgcagagctgagttcaagtcctgaatatccttgttaattttctgtctcrttgatctgtctaatattgacagtggggtgttaaagtctcccatgattattgcatgggagtctaagtctttttgtaggtctccaagaacttgctttatgaatctgggtgctcttgtattgagtgcatatatattcaggatagttagctcttcttgttgcattgatccctttaccattatgtaatggccttctttgtcttttttgatgtttgttggtttaagtctgtttcatcagagactaggattgcaacctgtttttttgtttgtttgttttttgctttccacttgcttggtaaatattcctgcatccctttattttgagcctatgtgtgtctttgcaca

SEQ ID NO: 879115 - DNA, 606 bp, Homo sapiens
acacccacacgcaatatgcacacatagttgcacacaggcacacacacacaaatctacatctgggactagcaaatgttagaagctaatttgcaggaacgccacacagcaccaatcttgttgattctatcaccaccaatataatctttcaaaatatccatatatctgactccatccctaacccaagccattgtcattgcctgcctggatcttgcagtaggtctcccctcatgtttccctcccctcatgacaataagaatgaactttccaaaatccaaacctgacttggtctctttctgcctacaccctttcagtgcttgtcactactcttagcatagagacccattgtcttcaatatcatctgtgtgtcctccagggccttgtgtgttctggcccccactacctctctcagctcttttccttcaacttatrgcctggcttaccacactgtggccaaactgacctcgtcttcactctttggacctcctgtacattctccccaacttccagacctcatctatgctggcccctatttctggatgctccccttcccatgcccctagcttccccaacacacacaaactcatacactcactgctagaaaaaccc

SEQ ID NO: 879116 - DNA, 609 bp, Homo sapiens
cagatgtggagactaaaatctagatatgcacatagatggctcaggcaagggcatccagcttttcaaggtcatttagtttttctattatagagctgggaccaacgactaggtgccctgccttatcatcttgtgcttgttgtattataccagattgttgcaaacctaacttatagaacagcattttccaaactgtaataatgtgtttaagagtcacctgcagattttgttaaatacagactccaattcagtagtaggtctgggtgaggcccacacatttgtatatcaaacaagctcctggctgaggctgatgctaagggcccagggaccacacattgtgtaacaaggcattaggagatcctggttgcaaccgtaatttcttcagtccctattwtgagattaagaaaacactttcaaaagagacattttgccacctgatcttcatcttgctggttctgaccatcctgcaagaaactgctttgaatggacaggtgagctggtatttaaaggcaaagaatgatccctgagctaaggctggagagcctccaagagtctgcattatggggtgtcagaattcttctttctgggagctaagaagagcattgtttacag

SEQ ID NO: 879117 - DNA, 650 bp, Homo sapiens
tccctgtctctctcacccttttctctgaagcacttgggagggagtgtctctggaatttccttatatgattaacaaaacttctttccaaaagtaatgcaattgtcttaagacttcctccctaagaatctcatcaaataaccagggaagatcaaccacctgagaagagaagagactgtaagtcgtcaccacacccagacatcatctgcttttctgagagcagctccaagtgataacctggaggactttatctgcaaaataaaacaacctttgtccctgtacagtgccacctctcccattctagtagtgtctgactccctctgcctgggtccattcattctttctaatgattgactgctcctcaaaagaattgtctacattttccatctgttccctcttgtgtgaagaaggatgcataagctcttatactacactggcttttttgggtgattaccctgtgattcccccctgtacatgttaataaatttatatgccttttctcttattaatatgycttttgtcagtttatttttcagcgtactttcagaggacgaaggcaaactgttccctttgcccttgcattaacaacagactgacacagattcatggagatcagccaataggagggaaagattgttgttttctttatacaa

SEQ ID NO: 879118 - DNA, 668 bp, Homo sapiens
gttgcataaagaaaaaaatgtagggagccagttccaagatggctgaataggaacagcagtctgcagctcccagcatggtcaacacagaagatgggtgatttctgcatttccaaatgaggtacctggttcatctcattgggactggttggacagtgggtgcagcccatggagggcaagccaaagcagggcagggcatcgcctcacccgggaagtgcaagggatctggggatttccctttctgagccaagggaagtcgtgacatactgtagctggaaaatcgggacactgccaaccaaatactgtgcttttccaatggtcttagcaaacggcacaccaggagattatatcctgcacctggctcggcaggtccccagcccatggagccttgttgactgctagcgcagcagkccaagattgagctgtgaggcggcagcctggctgggggaggggcgtctgccattgctgaggcttgagtaggtaaacaaagtggcctggaagctctaactgggtggagctcaccgcagctcagtgaggcctgcctgcctctgtagactccatctctgggggcagggcatagctgaacaaaaggcagcagaaacttctgcagacttaaacgtccctgtctgacagctctgaagagagcagtggttctcccagaatggtgtttg

SEQ ID NO: 879119 - DNA, 621 bp, Homo sapiens
ttatttgtaacataaaggataaatgcttgaggtgatggatgccctacttaccctgatgtgattttttttttttttttttgagacacagtcttgctctgttgcccaggctggagtgcagtggcacgatcttggctccaggcaacctctgcctcccagattcaagtgattctcgtgcctcagcctcctgaatagctgggataacaggtttgtgccaccatgccctcacgggctaatttttgtatttttagtagagatggggttttactatgttggccaggctggtcttgacctggtctcaagtggtctgcccacctyggcctcccaaagtgctgggattatgggtgtgagccactgtgcctggccctgatgtgacttttatgtaatgtatgcctgtgtcaaaatatcctatggaccatgtatatatacacacacacacacacacacacacacacacacacacacacacacagccctactatgtacccacagatattaaaaataaagaatgttttaaaagtttaaaaaatcatgaaattttggggaggtttaatatgcagaattggatgattgaatcaaatatgaagaatattttgttgctattaaaaaaataaagagccaggt

SEQ ID NO: 879120 - DNA, 596 bp, Homo sapiens
gatgaaatttaaatttgatttaaattttcataatttaattttcattttgatggccactttattttgacaaagacactagtggaggaaagtctctttattggatcatcaatttccctataaatctttgtctcagaaaaatttaataataatttcataataaattataataaataatgtttcacatcttacattattcacttttgatttagttggcttgtgctgtcaatatgytgcccactgtataacactacctgatgaattacattcaactatgtagtaatacatattactacatatacacacacacgtatacatgtgtatatacatgtatacgtgtgtgtgtatatatatatataaccatatgtaatttcaaaaggtaaattaaatataatgggacagtgttggtaacctcttagatagtgtagggctaagatagctgaatttatggcatggtgttgtatacttcagatatctatgctgtaatattaaaatggcatttccttggcccactaaattgtccatttcctggcccaaaaagatacgcgaaaggagtgaaaatgggaagaaaatagccttttgaaggacttgcctaataa

SEQ ID NO: 879121 - DNA, 549 bp, Homo sapiens
cactttgcttggcatgtgtatgaaaaacagtattttgggttcatctaaatatgtcattgatttggtttggctgtgtcctcacccaaatctcatcttcaactgtagctcccataatccccacatgtcatgggagggacccagtgggaggtaggtgaatcatggggccagttaccttcatgctgttctcatgatagtgaatgattctcacgagatctgatggttttataaggggyttttcccccacttcgctctgtacttcttgctgctgccatgtgaagaaggacacgtttgcttcccattccaccgcgattgtaagtttcctggggtatccctggccatgcagaactgtgagtcaattaaacctctttcctttataaattacccagtctcaggtatgtctttattagcagtgtgagaatggactaatacagtaaattggtactgggtagtggggcactgctgtaaagatacttgaaaatgtagaagcaactttggaactgggtaacaggcagaggttgaaacagtttggagggctcagaagaagacagg

SEQ ID NO: 879122 - DNA, 509 bp, Homo sapiens
tttataaggggtttttcccccacttcgctctgtacttcttgctgctgccatgtgaagaaggacacgtttgcttcccattccaccgcgattgtaagtttcctggggtatccctggccatgcagaactgtgagtcaattaaacctctttcctttataaattacccrgtctcaggtatgtctttattagcagtgtgagaatggactaatacagtaaattggtactgggtagtggggcactgctgtaaagatacttgaaaatgtagaagcaactttggaactgggtaacaggcagaggttgaaacagtttggagggctcagaagaagacaggaagatgtgggaacgtttggaacttcctagagacttgttgaatggctttgaccaaaatgctgatagtgatatggacaataaagtccaggctgaggtggtctcagatggaaatggtaactagttgggaactagaggaaaggtctcttgttatgctttagcaaagagactggcagcattttacc

SEQ ID NO: 879123 - DNA, 574 bp, Homo sapiens
agctgttatctgaaaaataaactcagtacctaatcctgtgaaagcttagccagaatcacacaattccaacaatccctccagtttttcttgtgtaaaattactcaggcctcgtcattgctgacatgcttctgattatagatatctaaatgaatacctgaaggagtataaggactttctctcctgtggctgtctcccgctgatcctttagtctaagaagtttgttcttcgtcggtccattcctrcaatcagtgttggcctctgatgcacaagtctgtggtgaatgaattcatagagtattctttttgtgcaagcaatctaggaagtactcggcatttctcttttgctgatggggtttcttcttagttcttgctggctgcccatctccaccctctgctgtgagaccttcccttagaagccataaagcagttctttagtctcaaatcagagtccacatctcctaacaacagtgagcagcttaggtaaagctacatgacttacatcctgtttatttatttatttattcattattctttcatctatttatttttttcttggtccgaccaagtttgccaaa

SEQ ID NO: 879124 - DNA, 586 bp, Homo sapiens
agacatgttaacagacttaacattttttttcaataaatggaagaattgatatacctccctaataaagatgtatatgaaaactcgcaaaagagagttccaaagtcttcacttcttactaagaaaacaaacaaaaagaagccaaaggcttcaaattatattatcctacaaagctctacatgatctgatcctcccattctttacctattttttattattttcctatgattatttcttttgcttgctccaacatagcagtttttgcctttgttaaatacaccaggcattgcgtttaagatagccatttctgttgctgttcccctgactaaaaggctgtcctacagatgtctgcataattttctcttccacwacttaaagactctacttaaatcttagcatctcaatgaggttttccttggctgactatttaaagttgcaactcattcccatcaaacctcaaacaaataccgttagtgtccctgatttattttcctcacaaaaaattataaatctctgatttattgtatttcgcttgtttctcttgtttattttatatctcctcccatccctttataatgtatgctccata

SEQ ID NO: 879125 - DNA, 618 bp, Homo sapiens
aaagatgtacatatatttttcatgtatatatatcttaaactatacatatatgttgacatgtatgtgcgtatatatgtatatatgcttgtgtatagatattgctaacctcgtgtctctcatacatgtctctgtcttctgaagaataccctggatttgttttttcccctgcctgtgtaccacctcctatactgttttcaaggtaggtcttccagttaccaaccttttgaagctttatatgcctgagaatatttctactgtggctttccatttcagtaagaatttgacaagatataaaactgtaatgaaagattcttttgtccatgttttttgaatgctacttcatttcttcttatattcacagttgttattaaaatgtttgatatcagtctaaccactctttcttcataggtgatcagctctttatggaaattgatacgatattctcattgactttgatatatttactttttacgawaatatattggtttttcctaatctctcttattttacatgttatgggcccatttatctttcatttgggacatttattgctatgatttccaaaatatttctactttcctacttttacttttaaatattttctgtgatacttgctat

SEQ ID NO: 879126 - DNA, 617 bp, Homo sapiens
ctcttcttgctttatttcattaatttgatcttcaatcactgaaaccctttcttctacttgatcgaatccgctattgaagcttgtgcatgcgtcacgaagttctcatgccatagttttcagctctatcaggtcatttaaggtcttctctacactgtttattctagttagccattcatctaaccttttttcaaggtttttagcttccttgcaatgggttcgaacatacatttttagctcggagaagtttgttattactgaccttctgaaacctacttctgtcaactcatcaaagtcattctctgtccagctttgttcagttgctggcaaggaactgcaatcctttgaagaagaggcactctggtttttagaattttcagcttttctgctctgttttctccccatctttgtgtttttatctatctttggtctttgatgttggtgacctacakatagggttttggtgtagatgtcctttttgttgatgttgatgctatttctttctgtttgttagttttccttctaacagtcaggtccctcagctgcaggtctgttggagtttgctggaggtccactccagaccttgtttgcctgggtatcaccagcagaggctgcagaat

SEQ ID NO: 879127 - DNA, 586 bp, Homo sapiens
ggtgcctctcatggcagaaaaagtttgttagcgcaaagataatttattaagattaggagaggaaactctggaaggaatactgctatgttaacagcctgatctgtgtgtgtgtaagtgtgtgtgtgactgcacatgagcgtgtatgcatattatgtagtttttgtctccaatatgattatctattgaagatgaaacatactcaagcctgcataatgcacgttaattgcccccactggtcccaggattgagatcwccagagacagagcctcagactctggaagggataagtaatgaggaatggggagatttgtggcatgttctacatctgagtaaagcctgaaaggggcctttgtaaagaaaagaatcaaaaggtgccttacttagaggctatttgactcccgggcaacatttaggatatggaattatgggcaggtggagcagtaacttttctgtatctcgaagtccactttgtttcagatgttggtataaaaaggagcataaattttcatgactattttccttcacaaacagctttattattaggcttattagacacagaattaagaaattttgtcaaatagtaatt

SEQ ID NO: 879128 - DNA, 556 bp, Homo sapiens
tgtttaatgacacagagcaaaaccacatcagcatgtgacaaaggtctaatatcaagaatctatgagggggcagttccaagatggctgaataggaacagctccagtctgcagctcccagcatgagctatgcagaagacgggtgatttctgcatttccaactgaggttctgggttcatctcatgggggcttgttggacagtgggggcaggacagtgtgtgcagaccaccaagagtgagctgaagcagggtgaggcattgcctaacccaggaagtgcaaggggtcagggaattcccrttcctagccaagggaagtggtgatggacggcacctggtaaaatccagtcactcccaccctaatactgcacttttccaatggtcttagcaaacggcacaccaggagattatatcccatgcctgtcttggagggtcccacacccacagagcctcgctcattgctagcacagcagtctgagatcaaactgcaaggtggcagcgaggctgggggaggggtgcccatcattgctgaggcttgagtaggtaaacaaagtggcccagaa

SEQ ID NO: 879129 - DNA, 556 bp, Homo sapiens
tgtttaatgacacagagcaaaaccacatcagcatgtgacaaaggtctaatatcaagaatctatgagggggcagttccaagatggctgaataggaacagctccagtctgcagctcccagcatgagctatgcagaagacgggtgatttctgcatttccaactgaggttctgggttcatctcatgggggcttgttggacagtgggggcaggacagtgtgtgcagaccaccaagagtgagctgaagcagggtgaggcattgcctaacccaggaagtgcaaggggtcagggaattcccattcctagccaagggaagtggtgatggacggcacctggtaaaatccagtcactcccaccctaatactgcacttttccaatggtcttagcaaacrgcacaccaggagattatatcccatgcctgtcttggagggtcccacacccacagagcctcgctcattgctagcacagcagtctgagatcaaactgcaaggtggcagcgaggctgggggaggggtgcccatcattgctgaggcttgagtaggtaaacaaagtggcccagaa

SEQ ID NO: 879130 - DNA, 593 bp, Homo sapiens
acccaccactgattaaatagtccatctcttggcctagggaaccccctaaaaatctaaaaactttttccaaccatgactaaacaagagatcagacacgcctcgttatacctactcccctttgtggtttagtcacagcagtgaccaacactcatgttaaaatagagatcttaagactgacagaagagtggcagtaagatgtcaaattataaacaagacctaaggccttgccaggcaaggattttgccactcacttctacacttaaaagataaactatgttttaactgccaataggttattccttttctctagtggctcagtaagcactggcactgagacaagcactatgaagacaattgcagcscatcccctgatgaactgaccccctgttccacaagccataaccccagctttgattgaacatttgctatcaggatctttttcctgatcagaggccactgaccatggcctggctctggccgtttacagaatgtgcaccctgagtgcctttgtgtctctgcttctgctatttgcacatagggcctgactgtaatggatttaaatgctaagtcaccactggtgagtgaacagggct

SEQ ID NO: 879131 - DNA, 606 bp, Homo sapiens
tggttatgtgatttgaaaatagtttcccatctgaaacttgacattcatgttcttatagttacttgagtagaaaacgtctttaaatttaatgagtttcaactgatagtaatttcatttattgatcattttttacatattatwttatattatattattttattttattttatttgagatggcgtcttgctgtgtcacccagactagagtgcagtggcacgatcttggctcattgcaaactctgcctcctgggttcaagcaattctcctgcctcagcctcccgagtagctgggattacaggtgcctgccaccacatctggttaatttttgtatttttagtagatggggtttcaccatgttggccaggctggtctcaaactcctgacctcatgatccatctgcttcgacctcccaaagtgctgggattacaagcgtgagacactatgcccggtctaaattttaattttaagatcattggtcaactgttaattattttatatttttaacttttttgtgtgtacatttatttgataaatttaagggctatgagtgcaacttttgcacatggatatattccatagtggtcttggcttttagtgtaatatcacc

SEQ ID NO: 879132 - DNA, 554 bp, Homo sapiens
ccaaggcctccggcagtcttgcctctatggattttctgggttcagtccactcagcctctctcacaggtgggactgtcaagcctctagctctcctaggtggactggataccctttgtggtgcctccaaacccatatttctgcttggcattgtgctgagggctcagtgtggtgactctgtctctgcaacaactcactgcccgagaccttaggctgtccacagcattctttgaaatctacgtggagaaagccatgccctcgtggttcttctattctgcacacctgcagaattaacaacacatggatgccatggaagttgatgacttgtaccattgaagtgatggcttgagccacacctaggtcctcctgagccacagcatgggcagccaaggagtgctgtgcctggacacagggaacrgagtcctaaagtgcctgctagaagtgaggccatagatttgcttcaaatttcttccatcatatatcctcgtttatggctctgaacttccactttacagaaagacctagggatgagcacaattcagccacattctttgcca

SEQ ID NO: 879133 - DNA, 642 bp, Homo sapiens
caaggtttgagaatagcttggctttatgacttaagtgttacaaaatgtaaaaaataacattgcattagagctttcacacatttcaataaaccaggtagaacggtgtttttcagaatcacaaagtaaagagtatatgcaggattttataactgtagcaggaattttgttcaccctgaaaagtgtttctgtttgttcttcacatgctaatggaaactggtatgtaaataatttgaatgtttctctctcttttccaaaaaagacttatagtgaacaaaactttaattgttgcaaaagcttgtgtctatatgtcaggacccaattrcatgttacatgaacttgtgatctatggctttcttttacaaagcagctttggacttaaaatggtcaatgattgaaataactcttttggtttgtctttctctttaggtaaatatccagtcattaaaattttaatccctttttccgttctgtaacttgcgaggcctctattggtaaggaagggaggcctagaaatgcatccagttgctgctctccggtctttcttgacctctaatctgcctggtgacagttttgctttgctgtcatccaccatgataaatgtacctcagagtcatttcactctcttggctgaatatagccata

SEQ ID NO: 879134 - DNA, 639 bp, Homo sapiens
caacagcccttcatgctaaaaactctcaatgaactaggtattgatggaatgtatctcaaaataatgagctatttatgacaaaaactggaagcattctctttgaaaactggcacaagacagggatgccctctctcaccactcctattcaacatagtgttggaaattctggccagggcaatcaggcaagagaaagaaataaaggcattcaattaagaaatgaggaagtcaaattgtccctgtttgcagatgacatgattgtatatttagaaaaccccatcatctcagcccaaagtctccttaagctgataaagaacttcagcaaagtctcaggatacaaaatcaatgtgcaaaaatcacaagtattcctatacaccattaacaaacagamagagagccaaatcatgagtgaactcccattcacaattgcttcaaagagaatagaatacctaggaatccagcttacaagggatgtgaagggtctcttcaaggagagcaacaaactactgctcaatgaaatacaagaggacacaaacaaatgggaaaatgttccatgcttatggataggaagaaacaatatcatgaaaatggccatactgcccaaagtaatttatagattcaatgctatctccaccaagctac

SEQ ID NO: 879135 - DNA, 632 bp, Homo sapiens
ccagggcaatcaggcaagagaaagaaataaaggcattcaattaagaaatgaggaagtcaaattgtccctgtttgcagatgacatgattgtatatttagaaaaccccatcatctcagcccaaagtctccttaagctgataaagaacttcagcaaagtctcaggatacaaaatcaatgtgcaaaaatcacaagtattcctatacaccattaacaaacagaaagagagccaaatcatgagtgaactcccattcacaattgcttcaaagagaatagaatacctaggaatccagcttacaagggatgtgaagggtctcttcaaggagagcaacaaactactgctcaatgaaatacaagaggacacaaacaaatgggaaaatgttccatgcytatggataggaagaaacaatatcatgaaaatggccatactgcccaaagtaatttatagattcaatgctatctccaccaagctaccaatgcctttcttcacagaattggaaaaaactacttgaaagttcatatggaacccaaaaagagtccgtattgccaagacaatcctaagccaaaagaacaaagctggaggcaccacggtacctgacttcaaactacactacaaggctacagtaataaaaacag

SEQ ID NO: 879136 - DNA, 639 bp, Homo sapiens
caacagcccttcatgctaaaaactctcaatgaactaggtattgatggaatgtatctcaaaataatgagctatttatgacaaaaactggaagcattctctttgaaaactggcacaagacagggatgccctctctcaccactcctattcaacatagtgttggaaattctggccagggcaatcaggcaagagaaagaaataaaggcattcaattaagaaatgaggaagtcaaattgtccctgtttgcagatgacatgattgtatatttagaaaaccccatcatctcagcccaaagtctccttaagctgataaagaacttcagcaaagtctcaggatacaaaatcaatgtgcaaaaatcacaagtattcctatacaccattaacaaacagaaagagagccaaatcatgagtgaactcccattcacaattgcttcaaagagaatagaatacctaggaatccagcttacaagggatgtgaagggtctcttcaaggagagcaacaaactactgctcaatgaaatacaagaggacacaaacaaatgggaaaatgttccatgcttatggataggaagaawcaatatcatgaaaatggccatactgcccaaagtaatttatagattcaatgctatctccaccaagctac

SEQ ID NO: 879137 - DNA, 537 bp, Homo sapiens
ttttgtggcactacaatagcaaagacttggaaccaacccaaatgtccaccaatgattgactggattaagaaaatgtggcacatatacaccatggaatactatgcagccacagaaaaggatcagttcatgtcctttgccggtaaatggatgaagctggaaaccatcattctcagcagactatcacaaggacagaaaaccaaacaccacatgtytcactcataggtgggaattgaacaattagatcacttggacactgggcagggaacatcacacactgggacctgtcagggagtggtgggctgggggagggatagcattaggagaagtacctaatgtaaatgatgagttgatgggtgcagcaaacctacatggcacatttatacctatgtatcaaacatgcacgttgtgcacatgtaccctagaactgaaagtataaattttaaaaaaaggaaaaaaaagagaaacttctctcttcttagttaatagctaatggtctaccaattttttgtctttccaaaaaaccatttttttagtctg

SEQ ID NO: 879138 - DNA, 617 bp, Homo sapiens
ttgggtagaatgttatgtaagtatctgttaggttcattgtttttttttttttggagttcagtttaaagcccagtgtttctttgttgactttctgcctagataatgtctagtattgtcaccagagtactgaagttccccactactattttgttgctcactatctcttttcttaggcctagtaataattgttttatgagtttaggagctccagagttagatgcatttatatttataattgttacatcttctttttggattgatccttttatcgttatgtaatgacctcsttcatctttttttttagtgttgttgctttaaagtctgttttatctgatacaggaatagctattcttgcttgcttgcttttggtttccatttgcatggaatatctttttcacccctttacctgcaagaatccttacatgttaggtgtgtctcttgaagacagcagatgtttggtttgtgatttttaaaaatttattatgccattctgtattcacattcagtgttaatattgagatgtggggtactgttccagtaatcatgtttgttgctacctaagactttgttttcttcattgtgttcttattttaaaggacctgtgaattttatgcttt

SEQ ID NO: 879139 - DNA, 685 bp, Homo sapiens
tctttttcacccctttacctgcaagaatccttacatgttaggtgtgtctcttgaagacagcagatgtttggtttgtgatttttaaaaatktattatgccattctgtattcacattcagtgttaatattgagatgtggggtactgttccagtaatcatgtttgttgctacctaagactttgttttcttcattgtgttcttattttaaaggacctgtgaattttatgctttcaaggtgtcctattctggtgcatatcaaccttttgtttcaagatttagaaatccttttagcatttctagtctggtagtgacaaatctcctcaacctttttttgtttgagaaatactttattcctccttcattcatgaaacttagttttgctggataaaaaattcttggctgaccattattcggtttaaggaggctaaagataggaccccaatctctcctagcttgtaaggtttctgctgagaagtctgctgttagtctgataggtttgttttataggttacttggtgcattttttcttattgctgttagaattctttcctttacgttgactttagatagcatgatgaccgtatgccttggtgatgacctttttgcagtgaattccccaggagtcctttaagcttcttgtgtttggttgcctaaatgtcttgcaaggccagggaagttttcctcaat

SEQ ID NO: 879140 - DNA, 634 bp, Homo sapiens
cacttgatgtccatatcgttggcactgatagaatgccaacagatctctagatgtgcgtgtaagcatgtgtgtgtgtgtgtgtgtgtgtgcatgcagcccaatactataagagagttttccttaagaaacataaagatgttctatatgctttgaaaaatgtgtctcacatttaaggttgaggagaagtgcatcaagacactgggaaaatgtaaaaaggtcatatgtaagtgtgggggtgagtgaattgaaaataacagtcatttcaacaaagagagtgaagaaaaacaacaggcaatgactaggcttcttagaatacaaggcaaaaaaatataaaatgttaaaagcatttaaaaatcaatgcagaataataaacaacatgcaggaattaacaaaaggcaaccactttgacaagcctgtraatacataaaaacaaaaacaacaaaagtagtatttatttttgtaaaaaatgaaggtatccacttaagtgtaatttgatttcctataaagaagcaaatgctgggtacaacagtggactcattttcctattcatatgtggctcttttgaaaacataaaaaactaaccctacgaggaggtcctcatttgttttgacccatagttgatcagcgtaaaaat

SEQ ID NO: 879141 - DNA, 634 bp, Homo sapiens
cacttgatgtccatatcgttggcactgatagaatgccaacagatctctagatgtgcgtgtaagcatgtgtgtgtgtgtgtgtgtgtgtgcatgcagcccaatactataagagagttttccttaagaaacataaagatgttctatatgctttgaaaaatgtgtctcacatttaaggttgaggagaagtgcatcaagacactgggaaaatgtaaaaaggtcatatgtaagtgtgggggtgagtgaattgaaaataacagtcatttcaacaaagagagtgaagaaaaacaacaggcaatgactaggcttcttagaatacaaggcaaaaaaatataaaatgttaaaagcatttaaaaatcaatgcagaataataaacaacatgcaggaattaacaaaaggcaaccactttgacaagcctgtamatacataaaaacaaaaacaacaaaagtagtatttatttttgtaaaaaatgaaggtatccacttaagtgtaatttgatttcctataaagaagcaaatgctgggtacaacagtggactcattttcctattcatatgtggctcttttgaaaacataaaaaactaaccctacgaggaggtcctcatttgttttgacccatagttgatcagcgtaaaaat

SEQ ID NO: 879142 - DNA, 637 bp, Homo sapiens
gtggtgctgagaagaatgtatattctgttgatttagggtggagagttctgtagatgtctatcaggtctgcttggtgcacagctgggttcaattcctggatatccttattaactttctttctcgttgatctgtctaatgttgacagtgggatgttaaagtctcccattatttttgtgtgggagtctaagtctctttgtaggtctctaaggacttgctttatgaatctgggtgctcctgtattgggtgcatatatatttaggatagttagctcttcttgttgaattgatccctttaccattatgtaatggtcttctttgtctcttttgatctttgttggtttaaagtctgttttatcagagactaggattgcaaaccctgcctttctttgttttccatttgcctactagatcttcctccatccctttattttgagcctatgtgtgtctctgcaagtgacatgggtctcctgaatacagcacacygaagggtcttgattctttatccaatttgccagtttgtgtcttttaattggagcatttagcccatttacatttaagtttaatatggttatgtgtgaatttgatcctgtcattatgatgttagctagttattttgctcgttagttgatgcagtttct

SEQ ID NO: 879143 - DNA, 641 bp, Homo sapiens
gcctggtggtgacaaaatctctcagcatttgcttgtctgtaaaggattttatttctccttcacttatgaagcttaatttggctggatatgaaattctagattgaaaattcttttctttaagaatgttgactgttggtccccactctcttctggcttgtagagtttctgctgagatccgctgttcgtctgatgggctttcctttgtgggtaacccgacctttctrtctggctgcccttaacatttttcccttcatttcaactttggtgaatctgataattatgtatcttggagttgctcttctcgaggagtatctttgtggtgttctctgtatttcctgaatttgaatgttggcctgccttgcttggttggggaatttctcctggataatatcctgcagagtgtttttcagcttggttccattctccccatcactttcaagtataccaatcagacgtagatttggtcttttcacatagtcccatatttcttggaggctttgtttgtttctttttactcttttttctcttaacttctcttctcacttcatttcattcatttgatcttcaatcactgataccctttcttccagttgatcaaatcggctactgaagcttgtgcatttgtcatgtagttctcgcgc

SEQ ID NO: 879144 - DNA, 611 bp, Homo sapiens
ttctctgggacttttgggaagttacttggtgctgcgtatgtgtgcagtgtaacatgataaatcttctccaaaattcctatctccttaagtctttgattcctttcctttatgttatgtcaaaaaagtcctgacatctgagcatcagtaaacataggccatggttgatttcaagtttaaacmaacaaatcaaataattctttgtacaaaaaatttacatccagaatctttaagtgtaaccacgtcatttaggcattccatataagcaacttccccaagtgagactataagagtgtcatattccatcttctttggtttactaccccaaaaatacacttacacatattcctcaggtttctgctaatatataataatacaataatgttttttaaaaatacactttatttccagagtagttttgagttcacagcaaaatcgagcacacaggtttcctatataccctgttttcacacatgtgtagcttcccccattatcagcatcccccactagagtgatacattttttacaactgataaatctacattgacacataatcacccagagtccatagttttcatttgggttcacttttgttgttgttcattttatgggtt

SEQ ID NO: 879145 - DNA, 611 bp, Homo sapiens
ttctctgggacttttgggaagttacttggtgctgcgtatgtgtgcagtgtaacatgataaatcttctccaaaattcctatctccttaagtctttgattcctttcctttatgttatgtcaaaaaagtcctgacatctgagcatcagtaaacataggccatggttgatttcaagtttaaacaaacaaatcaaataattctttgtacaaaaaatttacatccrgaatctttaagtgtaaccacgtcatttaggcattccatataagcaacttccccaagtgagactataagagtgtcatattccatcttctttggtttactaccccaaaaatacacttacacatattcctcaggtttctgctaatatataataatacaataatgttttttaaaaatacactttatttccagagtagttttgagttcacagcaaaatcgagcacacaggtttcctatataccctgttttcacacatgtgtagcttcccccattatcagcatcccccactagagtgatacattttttacaactgataaatctacattgacacataatcacccagagtccatagttttcatttgggttcacttttgttgttgttcattttatgggtt

SEQ ID NO: 879146 - DNA, 583 bp, Homo sapiens
tagtcttagacattttgttgagggcattaataaatttaaaaaatacatgagcataatctacaattatataaaatttaattccacaaaaatatcgattttgtgcaaactattgctattaggtgagccatcgttcactagtagtgtgactttagaatcattacttaatatccttattcttggtttcatcatctgggaaatgggtacagtaatagtgtacccaatagtgatcttaaagggttgtaakatgtaaggaagaagatgcacaataatacttagcaccatgcctgacacatggtatacatccaatccatgaaaagtgttagcagaggattagtgttcccattaccttaaaaacaaaaatattaattttattgtggaaactgctgtaccacccagatggtggtccctaaaaactgaatgatgtgataagaaatctctggtaactcccacttctctattcccacaaaactatgatatcttctaagacactcctcactcccctagaacacccaaatagtttcctaattattgtccttgtcttcaagtttcctcctttctacagcatagtcttttgattaagaaa

SEQ ID NO: 879147 - DNA, 717 bp, Homo sapiens
ttggggcagatagaataggtaatattattttagtttgcaagtaaggacactgagatgcaaagatgctactgcttttctaagattagtaagtttgggcacaaaacttaaatccacatctttgtcctatattttttctaataacaaagcatataaacaaatacaatttttgttaaatagaaatgtctgatttctgtttctaaattgatctgatagatgaggaaattatcaatasagctgttttataaaagcacacatcaaagcataaatactcttttcaattaatatttaaaactaaattttctaaagtaagttttaaaatttgtgttcgaagacatgtaacataaaattaaccatttaaaagtgaacagtttagtgacacttagtacattcacagtgttgtgaaaccaccgcctgtatccagttccaaaacattttcattactccaaaataaaatcctgaatacattaaaccggttctccatattagcctttaccctcagttctcccctcaggcaagcaccaatccgcttttgtctctaggaattcacttattctagatagttcatgtaaattgaatcgtacaacatatgatcttttatgtctgtttctttcactcagcacagccttttcaaggttcatccgcactgtagcctgtagcatgtatcagcatttcattcctttttgtggctaaataaattctactctgtgtgtgtgtgtg

SEQ ID NO: 879148 - DNA, 589 bp, Homo sapiens
gcaacctatccatctgacagaggcctaatatccagagattacaaggatcttaaatttacaagaaaaaagaaactgtattaaaagtgggcaaaggacatgaaaagacacttctcaaaaaaagacatttatgtgaccaacaaacatatgaaaaaaagctcagtatcattgatcattagagaaatgcaaatcaaaaccacaatgagatacctataatcttatgccagtaagaatggcaattattaaaaagccaagaaacaacagatgatggtgaggctgtgggggaatagcaatggttttacattgttggtgggaatgaaaattagttcaaccattgtggaagacagtgtggtgattcctcaaagacctaggaccagaaataccttttaatccatcaatcccattaatgggtatatacccaaaggaatataaatcattctattatraagatacaggcacatgtatgttcgttgcagcactattcacaatagcaaagacacaaaatcaacccaaatgcccatcagtggtagaaaggaaaatatggtacatatacaccatggaacactacgcagctataaaaaggaacgagatc

SEQ ID NO: 879149 - DNA, 571 bp, Homo sapiens
gtacttgagaaggatatgtatttagctgctgttaaatgaaatgttccatatatgtctgttagcttcatttggtctgaaatgtaattcaagtccaatgtttccttattgactttccatctagatgatctgaccattgttgaaagtcaagtagtgaggtgcyaccattacagttttgcatcctatttctcccttcagatcatttaattgttgctttatgaatttagggactctgatgtcagttacatatatatttacaactttatttatttatttttaatttttttattatactttacgttttagggtacatgtgcacaatgtgcaggtttgttacatatgtatacatgtgccatgttggtgtgctgcacccattaactcgtcgtttaacatcaggtatatctcctaatgctatccctcccccctgcccacccccccacaacaggccctggtgtgtgatattccccttcctgtgtccatgtgttctcattgttcaattcccacctatgagtgagaacatgcagtgtttggttttttgtccttgcaatagtttgctgagaatgatggtttccag

SEQ ID NO: 879150 - DNA, 575 bp, Homo sapiens
tacacgtaccctgaacctaacataaaaattgaagaagaaaaccaaaccattcaatcaataaacaaaaaaaaaagaaaattcaccagcaagacaattattatttaatattcatactgcatcagagagttacaaagacagaaatatgttgaaaggaagtaaacatgacccattgagagcaaattcatcagaaggctaccatcccactatttctggatcattacaataaccttctcttggcaatggccatgccacaaatatctctacatccctgattcaaggcataataactaatactagtaggcagtctgttgtttcttgacttttgatcagaaaatgaaaaattttmcagaatgagggttacagtcttctccaatatgctatgagaattctgtactttccaacaacaaccataggagttgagcctggttttgtaaaagaaatcaaccttgaacaagatttgaaatgatgagtaggattgagagagacagaagttttagaaaggatgaaaatgcagtgaggttataattgcctgaaggaaactttaaaaatctcaataagaattctaaacttgatat

SEQ ID NO: 879151 - DNA, 562 bp, Homo sapiens
agggttttttaacatgctacaattagttttttatccagtactcatcaattgagatcaatttacaaagtagccggacttggagtatcattccatactgtctctttagtttgtatcattacattcttattcatcatctaccctgtgacaataacggkgctgaagtctagagtataaaaataactaagacattttcactatcaaaatagcgtgagaactagtttggggaggcatgcataaacagataattttaaattaataaagtaaacatcgtgtagaaatagaaacaagatgcaatggagcatagaagaggaacctaaggaattggcctgctccattaagtgtgtgagtgtatgtgtgtgagcttcaaagaagagtttctacagcagattcttcctgggtttgatccttgaagtaaagaagaacatatgcatgtaaagaaaaggagtgaaggaattgctaagggagggagacgcatgagtgaagacatgggactgttaaattgtctcattaaaaactgaagttacagcagcttagtaatactagagcataaatttcaagacag

SEQ ID NO: 879152 - DNA, 562 bp, Homo sapiens
agggttttttaacatgctacaattagttttttatccagtactcatcaattgagatcaatttacaaagtagccggacttggagtatcattccatactgtctctttagtttgtatcattacattcttattcatcatctaccctgtgacaataacggtgctgaagtctagagtataaaaataactaagacattttcactatcaaaatagcrtgagaactagtttggggaggcatgcataaacagataattttaaattaataaagtaaacatcgtgtagaaatagaaacaagatgcaatggagcatagaagaggaacctaaggaattggcctgctccattaagtgtgtgagtgtatgtgtgtgagcttcaaagaagagtttctacagcagattcttcctgggtttgatccttgaagtaaagaagaacatatgcatgtaaagaaaaggagtgaaggaattgctaagggagggagacgcatgagtgaagacatgggactgttaaattgtctcattaaaaactgaagttacagcagcttagtaatactagagcataaatttcaagacag

SEQ ID NO: 879153 - DNA, 562 bp, Homo sapiens
agggttttttaacatgctacaattagttttttatccagtactcatcaattgagatcaatttacaaagtagccggacttggagtatcattccatactgtctctttagtttgtatcattacattcttattcatcatctaccctgtgacaataacggtgctgaagtctagagtataaaaataactaagacattttcactatcaaaatagcgtgagaactagtttggggaggcatgcataaacagataattttaaattaataaagtaaacatcgtgtagaaatagaaacaagatgcaatggagcayagaagaggaacctaaggaattggcctgctccattaagtgtgtgagtgtatgtgtgtgagcttcaaagaagagtttctacagcagattcttcctgggtttgatccttgaagtaaagaagaacatatgcatgtaaagaaaaggagtgaaggaattgctaagggagggagacgcatgagtgaagacatgggactgttaaattgtctcattaaaaactgaagttacagcagcttagtaatactagagcataaatttcaagacag

SEQ ID NO: 879154 - DNA, 562 bp, Homo sapiens
agggttttttaacatgctacaattagttttttatccagtactcatcaattgagatcaatttacaaagtagccggacttggagtatcattccatactgtctctttagtttgtatcattacattcttattcatcatctaccctgtgacaataacggtgctgaagtctagagtataaaaataactaagacattttcactatcaaaatagcgtgagaactagtttggggaggcatgcataaacagataattttaaattaataaagtaaacatcgtgtagaaatagaaacaagatgcaatggagcatagaagaggaacctaaggaattggcctgctccattaagtgtgtgagtgtatgtgtgtgagcttcaaagaagagtttctacagcagattcttcctgggtttgatccttgaartaaagaagaacatatgcatgtaaagaaaaggagtgaaggaattgctaagggagggagacgcatgagtgaagacatgggactgttaaattgtctcattaaaaactgaagttacagcagcttagtaatactagagcataaatttcaagacag

SEQ ID NO: 879155 - DNA, 640 bp, Homo sapiens
ggtgggcacctgagttgattctacgtctttgctatttgaatagcacagcaataaacatacaagtgcacgtgtctttttggcagaatgatttattttcatttgggtaaagggattgctgggtcaaatagtagctctgttttaaggtctttgagaaatctccagactgctttccacagtggctggactaatttacattcccatcaagagtataaaagtattgctttttctccacaacctcaccagcatctgctggttttttacttttcagtagccrttttgactggtgtgagatggtatctcattgtggttttgatttgcatttccttgataattagtgataatcaactttttttatgtgtttgctggccacttgtatgtcttcttttgagaactgtctgttcacatccttcacccatgtttttaatggggttatttggattttttttgctagtcaatttctttaagttccctataggttctggatattaggcctttgtcagatgcatagtttacaaatatattctcccagtctgtaggttgtctgttcgctctgttgatagtttattttgctgtacagaagctctttagtttaattagatcccactcgtttatttttgtttttgttgcaattgtttttgga

SEQ ID NO: 879156 - DNA, 640 bp, Homo sapiens
ggtgggcacctgagttgattctacgtctttgctatttgaatagcacagcaataaacatacaagtgcacgtgtctttttggcagaatgatttattttcatttgggtaaagggattgctgggtcaaatagtagctctgttttaaggtctttgagaaatctccagactgctttccacagtggctggactaatttacattcccatcaagagtataaaagtattgctttttctccacaacctcaccagcatctgctggttttttacttttcagtagccattttgactggtgtgagatggtatctcattgtggttttgatttgcatttccttgataattagtgataatsaactttttttatgtgtttgctggccacttgtatgtcttcttttgagaactgtctgttcacatccttcacccatgtttttaatggggttatttggattttttttgctagtcaatttctttaagttccctataggttctggatattaggcctttgtcagatgcatagtttacaaatatattctcccagtctgtaggttgtctgttcgctctgttgatagtttattttgctgtacagaagctctttagtttaattagatcccactcgtttatttttgtttttgttgcaattgtttttgga

SEQ ID NO: 879157 - DNA, 574 bp, Homo sapiens
aaaattttttcctattctgtaggttgcctttcactctgatgatagtttcttttgctgtgcagaagctctttagtttaatttgatcccatttgttaattttggcttttgttgccattgcttttggtgtttttgtcatgatgyctttgcccatgcctattgacccagcaatctcattactgggtatatacccaaaggattgtaaatcattctactataaagacacatgcacacctatgtttattgcagcactattcacaatagcaaagatttggaaccaacccaaacgcccatcagtgatagactggataaagaaaatgtggataaagaaaatatggcacatgtagatcatggaatactatgccgccataaaaaaggatgagttcagccaggtacagtggctcacgcctgtaattccagcactttgggaggctgaggtgggcagatcatgaggtcaggagatcggagatcgagaccacctggccaacatggtgaaaccccatctctactaaaaatacaaaaattatctgggtgtggtggcacatgcctgtaaacccagctactcgggaggctgagg

SEQ ID NO: 879158 - DNA, 574 bp, Homo sapiens
aaaattttttcctattctgtaggttgcctttcactctgatgatagtttcttttgctgtgcagaagctctttagtttaatttgatcccatttgttaattttggcttttgttgccattgcttttggtgtttttgtcatgatgtctttgcccatgcctattgacccagcaatctcattactgggtatatacccaaaggattgtaaatcattctactataaagacacatgcacacytatgtttattgcagcactattcacaatagcaaagatttggaaccaacccaaacgcccatcagtgatagactggataaagaaaatgtggataaagaaaatatggcacatgtagatcatggaatactatgccgccataaaaaaggatgagttcagccaggtacagtggctcacgcctgtaattccagcactttgggaggctgaggtgggcagatcatgaggtcaggagatcggagatcgagaccacctggccaacatggtgaaaccccatctctactaaaaatacaaaaattatctgggtgtggtggcacatgcctgtaaacccagctactcgggaggctgagg

SEQ ID NO: 879159 - DNA, 574 bp, Homo sapiens
aaaattttttcctattctgtaggttgcctttcactctgatgatagtttcttttgctgtgcagaagctctttagtttaatttgatcccatttgttaattttggcttttgttgccattgcttttggtgtttttgtcatgatgtctttgcccatgcctattgacccagcaatctcattactgggtatatacccaaaggattgtaaatcattctactataaagacacatgcacacctatgtttattgcagcactattcacaatagcaaagatttggaaccaacccaaaygcccatcagtgatagactggataaagaaaatgtggataaagaaaatatggcacatgtagatcatggaatactatgccgccataaaaaaggatgagttcagccaggtacagtggctcacgcctgtaattccagcactttgggaggctgaggtgggcagatcatgaggtcaggagatcggagatcgagaccacctggccaacatggtgaaaccccatctctactaaaaatacaaaaattatctgggtgtggtggcacatgcctgtaaacccagctactcgggaggctgagg

SEQ ID NO: 879160 - DNA, 584 bp, Homo sapiens
aatatagaatttcattggatagaggaatgcattgaagttttaaaataactattttcagaacaaagaggctagattataataaatgtctagccagtttagcaaagagaaatataactaaatgtaaattatattaaacttaatttaactacagttgagccctgaaaagttttgaggttatcatagatgtaatctgtagacagcacacttgttgtcaaaccggaattaaagacaagaaggagagttgtacatgcaacacatggtaaagagaacgaataattagctattaaactaaaaaaaaaatagtaatcagtggagagytgctgtaagatgtggatcaaactatggcaagtggcttcctttccatgatcaaattgctgttggtggtgacaaaagggtaacagggaggaacttctagaaaaccagggctattgcccacagtctcttagggttatacagtgaatgaaaacaaaatgactttagtgagtgcttaatagtacaagcagttaaaggaaaagaaaaaaagaaacaaagaaagaaaaaaatagtgtcactctactgaaccaaggacctagctgagattccat

SEQ ID NO: 879161 - DNA, 642 bp, Homo sapiens
ggagagggccactatcttccagaccccaggatggtagatccactaacagcttgcatcatgcacctggaaaagccacagacactcaatacctgcctgtgaaggcagcagggagagagactgtaccctgcaaagccacagagatggagcttcacaagaccctgggaacccacctcttgcatcagcgtgacctggatgtgagacatggagtcaaaggagatgattttggakctttaagatttgactgccctgctaggacttgcatgaggtctttagcccctttgtttttgccaacttctcccatttggaatggctgtatttacccaatgcctgtacccccactgtgtctaggaagtaactaacttacttttgattttacaggctcataggtggaagggacttgccttgtctcagatgagactttggactgtggacttctgagttaatgatgaaatgacttaagattttgggggactgttgggaacacatgactagttttgaaatgtgagggcatgagatttgggaggtaccaggggtggaatgatacagtttggctctgtcctcacccaaatttcatcttgaattcccatgtgttgttggaggaacctggtgggaggtaattgaatcatgagggcaagtcttccc

SEQ ID NO: 879162 - DNA, 642 bp, Homo sapiens
ggagagggccactatcttccagaccccaggatggtagatccactaacagcttgcatcatgcacctggaaaagccacagacactcaatacctgcctgtgaaggcagcagggagagagactgtaccctgcaaagccacagagatggagcttcacaagaccctgggaacccacctcttgcatcagcgtgacctggatgtgagacatggagtcaaaggagatgattttggagctttaagatttgactgccctgctaggacttgcatgaggtctttagcccctttgtttttgccaacttctcccatttggaatggctgtatttacccaatgcctgtacccccactgtgtstaggaagtaactaacttacttttgattttacaggctcataggtggaagggacttgccttgtctcagatgagactttggactgtggacttctgagttaatgatgaaatgacttaagattttgggggactgttgggaacacatgactagttttgaaatgtgagggcatgagatttgggaggtaccaggggtggaatgatacagtttggctctgtcctcacccaaatttcatcttgaattcccatgtgttgttggaggaacctggtgggaggtaattgaatcatgagggcaagtcttccc

SEQ ID NO: 879163 - DNA, 665 bp, Homo sapiens
gggcactacagagatcctggagaactgatcttgatacaaattcctatcttttttgccagctttttataagttgtcttaaaattttatctgcatagtttggaatgagtcaggtgtcaccaccatctcacctttgttgccagaattgcaagggttgaaatggaataatccctttcctctctatcctaagggacacagccaacacccctatgacaaagacagattaataagagaaaagtataacaaatttatttgatcatagttttatgagatacaggagtcttcagaatgaagacataaagatacaaggaaaactatttttatgcttaggttcaatgaagartgggcagccctttagaaatatgactggaagtaaagggtatgatctaatgccaatagactgagtaggggggctcaccaaggcctgtctctcagatttttcttggcctctctgtgtagcattcctaccctctaggtacagggtaggactcctctagaaggagggccttaatttctttatggccagctgttacacagaaaggtggagaaagagatagttagaataacatttttagactttatggctgactttgaaaagaaaaatgggttcaggtttctatgacctgcctaggagaaaaggaattctagtttctgtgggtcatggagca

SEQ ID NO: 879164 - DNA, 668 bp, Homo sapiens
aaccaagatttattttcatagtgaaatcaatttttgtagatttttttctctgtttattacttcactagtgtctcaaaactatgccaaagttgacagttccttttcataccattcaccatttaataatcgtatattcacatcaagacatgtgcacacattttaaaagataaagtcttgcatctagccaccaccagcaccccagttccttatagatgttttccttcaatgttttatctaagctctcatgccagacctttattcatgtccctcactctctgccagtctttattgattccctgacatgcggcctttcatctcaggcaayctttttttgtttttgttgttcagcattgaatatttcctttattaacttatttttatctgattatagaaattataaacatagaaccactagaacacaagcgagaataaacaagagtttttaaatgatctgcgatcacaattctcagtaccatattcactttaacacagatacattttttaaacaaaagttggacctgccatttaatgtcatatttctacctggcagcttttagaacaaatattggaaagctggctacattaaatccttactttgaaaattaggttttagtgcatgtgaaggaaagtgaagtttaataaaaagttcagaataaaattttgggcaa

SEQ ID NO: 879165 - DNA, 668 bp, Homo sapiens
aaccaagatttattttcatagtgaaatcaatttttgtagatttttttctctgtttattacttcactagtgtctcaaaactatgccaaagttgacagttccttttcataccattcaccatttaataatcgtatattcacatcaagacatgtgcacacattttaaaagataaagtcttgcatctagccaccaccagcaccccagttccttatagatgttttccttcaatgttttatctaagctctcatgccagacctttattcatgtccctcactctctgccagtctttattgattccctgacatgcggcctttcatctcaggcaatctttttttgtttttgttgttcagcattgaatatttcctttattaacttatttttatctgattataraaattataaacatagaaccactagaacacaagcgagaataaacaagagtttttaaatgatctgcgatcacaattctcagtaccatattcactttaacacagatacattttttaaacaaaagttggacctgccatttaatgtcatatttctacctggcagcttttagaacaaatattggaaagctggctacattaaatccttactttgaaaattaggttttagtgcatgtgaaggaaagtgaagtttaataaaaagttcagaataaaattttgggcaa

SEQ ID NO: 879166 - DNA, 600 bp, Homo sapiens
tttatcaaagctaaattctaatatagcagttagaggtgagatttaactgacttgttaatattttaaaaacagccaagtaaatgaaaattcaagtaatttctatttcttttctatctttaaaggggagcttaattaactgatttttttcagctatctaacactcctttgttagaagattcttccatccacttaagatccttttgatattttgttaaatgtgcattcctttgaaaaactacactgatgccctatcatgcccagatatttggcaaaattgtcatagagttgtttcttcaatagaatacttctaccaaataatttgtcttaatgattctcagaacatttaggataaatcatgttgatcaccatttgattttgatcaaaatcatatattgatcactaagsgtaaataatttaaaacggtaaataccaaacagtaagaaaatccttcttccatgtaatattacaatatggagactacttcagcaataagtaagtgaaaaataccagttgtagatctggaagtagaatccaagcaggctctataaccatatgtagtttgagcacaggaattatgtcataggttattctttctaaatt

SEQ ID NO: 879167 - DNA, 619 bp, Homo sapiens
tccccatccctctgcatcagacttcttcattccttctcttccaatttttctccttcctggcttctaacaaatcttccaagccattcacccttattcatgagtctatatatattctaactctggactattcaggtcacacagagaggatgaccaggtgccctacgcaaatgtctaacccttgggaagattttcccttgcctttctaggctgccccaggactacagggcaactgttatccattgttggcttatacctacatcrtgagttgacatctgtctattggtcataggcatatcctatgtggccatagctatgaatttagggaactattcagagaatgtagaatggggaagaggaatctaggctctgtgcttttatagctcacttgtgccttatcatcctgcttgggccggttctcagaggtactgcttctaccttactgtgatttgcagatagaatgaatttgctctggaatcctaagggtctacattttcattcccccaatgggtttgtcctttaagttccttttatatcttatgccaatactgacactttttatactataaggccggacagaagaaaaagtccaaggtgcagggtcatgatactgacctactga

SEQ ID NO: 879168 - DNA, 643 bp, Homo sapiens
catcttagccagaactctgctttcagttcttcttagtgccctgatcaactgggtgaaacatgctgctgccccacatatccaggtagcaatgtcattttgagccctatgttcaataatccttaaaatactaggtaattccctttccctagtctataagtacctaaaaaaatagcagcagatcccttagtggaaggaatgctggaattactaacatgtacctttcctgcagggtacttcctcacgtatacctggcctcttttcaagttagtcccatattcaaaaactggctcagctatagacactargcaaagatttgcatatatatatatatatacatacacacacacacacacacaacaataatggctatcatctatgttgctcctaggggcatcatgttctattaaccaggtttgtgactctgtatgagttagtcatcctttctggatgctaacaactgtcttgctactcattatactaattaattggggccttttctgcttagggatcctgtcctatcttatctcttggtatcactggacccagttctgcagtggggaactatcctagcctacagaggagaaataatgcttgtgatgcttgtgacccttttgctttggtaagtcaaacaggtttcaagccc

SEQ ID NO: 879169 - DNA, 630 bp, Homo sapiens
caaaacaacctgacaaaatttgtcaatatgcacttgcacttggtatttgattaaacctcaccagggctgtaggggtaacctctgacctctgctttgagtcaggaaaatgataacttcttcctggaggataaattattttcttaggcctattccaagcctctctcactctctctctctctctctctctctctttttttttttagatggagtctccatctgtcgcccaggctagagtgcagtggtgcaatctcagctcattgcaacctccgcctcccaggttcaagcaattctcctgcctcagcttcccaagtagctgggattacaggcatgtgccaccacatctgtctaatttcatatttttagtaaagacaggatttcaccatgttaaccaggctggtctctcaaactcctgagctcaagtaagccacccacctcggcctcccaaagtgctgggattacatgcatgaggtacagkgcagggcccagccttttgagaattcctgattctcttcaatctgctagtattttcctctttcaaatgagtcacacattgaagagctttccggatttatgatgatgccccatgcaagcctaatatgagagcatcatttcttgtgcatcataacacac

SEQ ID NO: 879170 - DNA, 568 bp, Homo sapiens
aatttttctttttaaaataagattatgttttaaatatttatatcaaagaaatatgcctcgtatgatcttcacaaaagtatttgatctataactcataaaagaactataaaatgtgtaagaaactcctattttatctttttattgtcattgttttcagtgttatcatactggaaaaatattatgggcagtatacatatttttccttaaagggagattygaaaataaataaatcaagcaaaaaagaaacttctagtcatgattgtttctccctatttttttaagttttagaaagctgtaatttggaagaaatgctggaatcttattttacatatagtctcttcctgaagttctagagttttgctatcaatgaaactctggaaaaaaaaaaccaggatgtctaagatggtgtaaaagaaagtctcagctcttgtttcccacagaaaaaacaatttagcaatgatacatagaccaaaatacctttgtgagaattctagaatccaggtaagaagctgaagtaccctaggcaagcaaaaagacaagaataaatatatttaaatggctaagaaga

SEQ ID NO: 879171 - DNA, 568 bp, Homo sapiens
aatttttctttttaaaataagattatgttttaaatatttatatcaaagaaatatgcctcgtatgatcttcacaaaagtatttgatctataactcataaaagaactataaaatgtgtaagaaactcctattttatctttttattgtcattgttttcagtgttatcatactggaaaaatattatgggcagtatacatatttttccttaaagggagatttgaaaataaataaatcaagcaaaaaagaaacttctagtcatgattgtttctccctatttttttaagttttagaaagctgtaatttggaagaaatgctggaatcttattttacatatagtctcttcctgaagttctagagttttgctatcaatgaaactcyggaaaaaaaaaaccaggatgtctaagatggtgtaaaagaaagtctcagctcttgtttcccacagaaaaaacaatttagcaatgatacatagaccaaaatacctttgtgagaattctagaatccaggtaagaagctgaagtaccctaggcaagcaaaaagacaagaataaatatatttaaatggctaagaaga

SEQ ID NO: 879172 - DNA, 612 bp, Homo sapiens
acaattattatgtattattataattcctcttgaacctgagtttcaaccatctttcaaaatggggaaaatagtaatcacacatacatgcacacacatgcaaacaatgtatgcactcatttattattcaacaaattttattgaacatctactatgtttgagcactgttctgcattctacagatagagctgtaaatcaaacagttgtaattctgttaacatgcagcagcattaaatctgattatgtatgcattaagttgtgcataaaattgtgataaaatctcattgtatatgcataaaaatgtatgcagcatagtatgaagcatactttaagtaacaaaagcaaccactgagaaaacactagactgaatactagaacagcctatttcaacaatcagaactacatttacaaacattcaaacccctcagtggacctaggattcagtatgaccctgaaatggtatttgtatgtaargattaaagtctgttagttgtactgttttataaatacacataaacacatatataaatacatatacatatacatgtaaaagttctgtaatatatgctctataacacatatatgttcatatatgtatatgcatatacagagata

SEQ ID NO: 879173 - DNA, 664 bp, Homo sapiens
atccacaatgtagaaactattataattgctccaaatacggtgacttataaaaccatctattttattaaacttcatgattgtgggaatcaggaattcaggcaagtctgggttgaataattctgttcctcatgacattgatggagatcacttgttgtattcagctgaaggatgggtgggtctaggaaatccaaagcagctttactcactcatctgatacattggtaagaatggttggaaggctgggcttatttggggttgccaaccagagcacatacacatgctgtctccaatgtggtggtctcagatggtttaatgtcttacacagtagctcaagaatctcagagagaggttccaaaataaagaagtgtaagttgtctgtccttaaagcatggacctagaaactggcaccactgcaagcaacatgggagtacaaataaatgttctcaccacaaaatttgctaccaakcaatcaacaggctttcttcccaatgcacagagaggccaataccatggcaccagctcttgagaaaagaaaagccttattgtgagtcaaccagcaaggagaaagaaggaaacactcaaatctgtctccttgcactggggtttgggtcgggttttgtaagagtagggtaatgagatgtgatctgattggctcttgcagtga

SEQ ID NO: 879174 - DNA, 627 bp, Homo sapiens
gggtttgaatttcaaaatcgtaattaaggtttatttgcttttgttactattttctgagtagtgttgtttctttacatttaagttagccccagggctgagacacttaacttccctaaatgctgtttagtagttgttcctttcctcatctctatcttcctgtgcataaaaaagaagtctaaaggggaatcctggagctcccctgtcrgaactgctggggcggggtggaggggggggggtctccccacccatcttcctggcactctgggattcttctccatgcttagtgcactcttactctctaattctctctcactcttttcaggaatcatctcagctagaaacttaagtataaggtctgtgtgtgcacacacaccaactttgctatctgctatcatctaaggtcaaggtaatagaagtaaatgagatttatagtgcatatactttgcattctgataaatgcaaataactccataccttttatcctttttgcagcaacttttttgtacttgaacactctttccacaacatatctaatccagaagtcatcagtataaattttgcagattgaaaaccacagtgtatctaatgaggtaagtatagttacctgaactgtcgtctacgacatct

SEQ ID NO: 879175 - DNA, 627 bp, Homo sapiens
gggtttgaatttcaaaatcgtaattaaggtttatttgcttttgttactattttctgagtagtgttgtttctttacatttaagttagccccagggctgagacacttaacttccctaaatgctgtttagtagttgttcctttcctcatctctatcttcctgtgcataaaaaagaagtctaaaggggaatcctggagctcccctgtcggaactgctggggcggggtggagggsggggggtctccccacccatcttcctggcactctgggattcttctccatgcttagtgcactcttactctctaattctctctcactcttttcaggaatcatctcagctagaaacttaagtataaggtctgtgtgtgcacacacaccaactttgctatctgctatcatctaaggtcaaggtaatagaagtaaatgagatttatagtgcatatactttgcattctgataaatgcaaataactccataccttttatcctttttgcagcaacttttttgtacttgaacactctttccacaacatatctaatccagaagtcatcagtataaattttgcagattgaaaaccacagtgtatctaatgaggtaagtatagttacctgaactgtcgtctacgacatct

SEQ ID NO: 879176 - DNA, 604 bp, Homo sapiens
ttcctcttcatttcctactggctccactgggatccctaaaacacaatttacagttgctgcaaacccatagctttgccttccaatcactactggttgctgctttgggattcacaacctatgcctcttccttaaaaatgttaaaaatatcttatgagatgtgatgtgtttccacagagactcagtagtataaatcattttgtatctatcccaagtcattacggaactcttaggaaagaggctataatttyactagactctagtgtttttgtatatacagtttacgagaaggtagaaagtgacaataatgatatcagcttccagagatagctagagaccgtgtagaggagtttgacaggaacattaaggatccagaaactttgtcatttgaaacaaaacaaaacaaaattcatatatagcacaaaggttaaaagggcttttttatcctaaataacttgaagataatatttatatcaatcttcctaagtaccttatattctcagtgccttgtatatgtaactattcattcagcaaatattttctgagcagccacaagtctcagaaatggcagaggtcaaatacctcatttccaatgccttgaggaaaa

SEQ ID NO: 879177 - DNA, 635 bp, Homo sapiens
ccctggaagagacatgatatgtactgggaagagaaaacatttagagaaaagggaacagccttcgccagcatgaagaatacattttgatcagtgcactgctgaatcaaaatgatgcagacttttatcattataaaacctacttaacaactcactgaaattaagagtgtttctaaataacattcttcatgttccaggccccgtgctggccattaaaaacacacaccaacaagagggactgaagcagagcttacaagttagtgtcatgtatgaagaagcaaccaaacaatgaaaatacagcatgaaagctacggtgaagcaagtataatgttgcctagcagtatctgcaaaaggtcctaaactggagacaagaacaggtgtctctgagtaactcactgtttagtggaaacctgtaaatacaggtcaacatgtacagcagacatcacatataaggatcaacatgcaaggagatatcaatagaggcaaagagaactcatttcayccaagcagcccacagtataggggacaaaagtttaagcgtgtggctatgatatggtgtggtactgatcacagaagtatgccagggatgtgctatagtagcacaaaacagaggtggtaaagcagtatgtaggttgggg

SEQ ID NO: 879178 - DNA, 614 bp, Homo sapiens
tgtctccccaggggactggcttgatgtgatattaaaatacgttttattttatctactggaaattcaagaggaatgctctctgcaattcaaaagggacgaaaatctcagaataaaaaattcattttcaatccctgcagagttcattatgaacaacagagtgctagaaattaaaacatttgaatgcatttaataaggttctataatggaatgacattcatgtttagatagattctctagtctttctccctctttcatctctctaaattctatggttagggaaaaagtgaaatactgatgtgatttaattggttaattatggctagattcatcagcaaagtaagagagctgaagcaattatctasattattaaagtttagaaactgtccttccccctgatatcttgatatcccagtcaaagtgggtcatgactattacattaattgagaccaaactatttgtggttgcaggaatgtgcatgcttaaaaaataaaactagagtatttaggccagaattaattgaatcagaagaggagattaaggcaacatagaaagttacttaaatttttaacttttttcatcttccttcatatactatactttaactaaattaccta

SEQ ID NO: 879179 - DNA, 632 bp, Homo sapiens
caaaacaacctgacaaaatttgtcaatatgcacttgcacttggtatttgattaaacctcaccagggctgtaggggtaacctctgacctctgctttgagtcaggaaaatgataacttcttcctggaggataaattattttcttaggcctattccaagcctctctcactctctctctctctctctctctctcttttttttttwagatggagtctccatctgtcgcccaggctagagtgcagtggtgcaatctcagctcattgcaacctccgcctcccaggttcaagcaattctcctgcctcagcttcccaagtagctgggattacaggcatgtgccaccacatctgtctaatttcatatttttagtaaagacaggatttcaccatgttaaccaggctggtctctcaaactcctgagctcaagtaagccacccacctcggcctcccaaagtgctgggattacatgcatgaggtacagtgcagggcccagccttttgagaattcctgattctcttcaatctgctagtattttcctctttcaaatgagtcacacattgaagagctttccggatttatgatgatgccccatgcaagcctaatatgagagcatcatttcttgtgcatcataacacacat

SEQ ID NO: 879180 - DNA, 632 bp, Homo sapiens
caaaacaacctgacaaaatttgtcaatatgcacttgcacttggtatttgattaaacctcaccagggctgtaggggtaacctctgacctctgctttgagtcaggaaaatgataacttcttcctggaggataaattattttcttaggcctattccaagcctctctcactctctctctctctctctctctctcttttttttttaagatggagtctccatctgtcgcccaggctagagtgcagtggtgcaatctcagctcattgcaacctccgcctcccaggttcaagcaattctcctgcctcagcttcccaagtagctgggattacaggcatgtgccaccacatctgtctaatttcatatttttagtaaagacaggatttcaccatgttaaccaggctggtctctcaaactcctgagctcaagtaagccacccacctcggcctcccaaagtgctgggattacatgcatgaggtacagkgcagggcccagccttttgagaattcctgattctcttcaatctgctagtattttcctctttcaaatgagtcacacattgaagagctttccggatttatgatgatgccccatgcaagcctaatatgagagcatcatttcttgtgcatcataacacacat

SEQ ID NO: 879181 - DNA, 602 bp, Homo sapiens
cagcgtgaaatttccatcgtaacgtgggattatttcttttttttcctttctttctttttttttttttttttttgagacggagtctcgctctgttgcccaggctggagtgcagtggctcaatctccgttccctgcaagctccgcctcccgggttcacgccattctcctgcctcagcctcccgagtagctgggactacaggcgcccgccaccacacccggctaacttttttgtatttttagtagagacggggtttcaccatgttagccaggatggtctcgatcccctgacctcgtgatccacccgccttggcctcccaaagtgctgggattacaggcgtgagccaccgcacccggctgrattatttctttgattcttttgtctgtctcccctgactcaactgtgagccccatgcgggcaggggctgtctggctccctgctgtacctccagcacctggcacccagctccgcacacagtagggcctcagcagccatctatccagggaaggaagggcagaagcagtgtctagccacagcaatctgacccagaagcaacaatcacagctctcttgagtttctagcctgcgtgatttacaagcttgttt

SEQ ID NO: 879182 - DNA, 664 bp, Homo sapiens
ttttttttttttgagatggagtctcgctctgtcgcccaggctggagtgcagtggtacaatctcggctcactgcaagctctgcctcctgggttcacgccattctcctgcctcagcctcccgagtagctgggactacaggcgcctgccaccacgcccagctatttttttgtatttttaatagacatggggtttcaccgtgttagccaggatggtctcgatcttctgacctcatgatctgcctgcctcggcctcccaaagtgctgggattacaggtgtgagccaccaygcccggcccagagtatgtcttatacttcttttgttaaatttattcctaagtattgcttgtgatgctattataaatggcattgttttcttaatttcatctgtggtttattcattgctactgtacagaattgcaattgagttttgtatcctgtgaccttgatgaattcattttattctaatcaatttttaggaaattctttaggattctctataggcaagatcatgccatctacaaatagagattgttttatttcttcctttccaatctggatgccttttatttctttttcttgtataattgtcctgggtagaaactctagtacaatgttgaacagaagttctaagagtggacatccgttttttcctgagcactggagaca

SEQ ID NO: 879183 - DNA, 664 bp, Homo sapiens
ttttttttttttgagatggagtctcgctctgtcgcccaggctggagtgcagtggtacaatctcggctcactgcaagctctgcctcctgggttcacgccattctcctgcctcagcctcccgagtagctgggactacaggcgcctgccaccacgcccagctatttttttgtatttttaatagacatggggtttcaccgtgttagccaggatggtctcgatcttctgacctcatgatctgcctgcctcggcctcccaaagtgctgggattacaggtgtgagccaccacgcccggcccagagtatgtcttatacttcttttgttaaatttattcctaagtattgcttgtgatgctattataaatggcattgttttcttaatttcatctgtggtttaktcattgctactgtacagaattgcaattgagttttgtatcctgtgaccttgatgaattcattttattctaatcaatttttaggaaattctttaggattctctataggcaagatcatgccatctacaaatagagattgttttatttcttcctttccaatctggatgccttttatttctttttcttgtataattgtcctgggtagaaactctagtacaatgttgaacagaagttctaagagtggacatccgttttttcctgagcactggagaca

SEQ ID NO: 879184 - DNA, 546 bp, Homo sapiens
tattctaattcattactacgattgtcttaatttctcatcttggatcactgccaaagctccaccactgcaaccttcctttgtattactcaatagcaacagtaaattcaatagggttctctggtaacccctggttcttctgtatttcaatttatttttgacaatgaacaaacgtgagctctttttwcttgtatgatgtcacacaccttcctacatctgataaaggattgctactagtccaaaataagaccaaaggaaggcttagtctgtacttctttacatattacaattgttatgtgtaagaaaagagagagagaggaaggttttgtaaagaagttggcataaattacagtgttattagtgtaaacctatcttttaaaaaagtgcctcatgaggctgggacaatgactctgacttcttacttacctttaaaaggtataatatataatttctgacagtgctattttttctttagactaatgatcctgctttgttattttttacaaagcacttagctactaccttttctctgagaaagattcttttatc

SEQ ID NO: 879185 - DNA, 642 bp, Homo sapiens
catcttagccagaactctgctttcagttcttcttagtgccctgatcaactgggtgaaacatgctgctgccccacatatccaggtagcaatgtcattttgagccctatgttcaataatccttaaaatactaggtaattccctttccctagtctataagtacctaaaaaaatagcagcagatcccttagtggaaggaatgctggaattactaacatgtacctttcctgcagggtacttcctcacgtatacctggcctcttttcaagttagtcccatattcaaaaactggctcagctatagacactargcaaagatttgcatatatatatatatatacatacacacacacacacacacaacaataatggctatcatctatgttgctcctaggggcatcatgttctattaaccaggtttgtgactctgtatgagttagtcatcctttctggatgctaacaactgtcttgctactcattatactaattaagtggggccttttctgcttagggatcctgtcctatcttatctcttggtatcactggacccagttctgcaatggggaactatcctagcctacagaggagaaataatgcttgtgatgcttgtgacccttttgctttggtaagtcaaacaggtttcaagcc

SEQ ID NO: 879186 - DNA, 616 bp, Homo sapiens
aggtttaatcttcctttagaaatcaatttgtcctatataacattgtcctatataatagaaagtcaaataattgtgttttgaggtatcttatttctatctggttctgctatatgtaacacagttcaaggggccagatgatctgagtggcagtatcagcagattagataggagaaacaaaaagctgagagaccagttaaamggctgtcttggaagatcctttaataggcaaagaggtccatgataccaataacagccattgtgatcaaaagtgtgggatacgtttgaaaccctagtgaggtcgacttaaaataatttagtcacctatttttttatctggggttggaacaagatgagcatttcggtttgggtcacagggtgcatggtgaaatagaagaggatatataagacctcagctagaaaaagaaacttgatttagaacgattagattatgtatgctgtatatttgtatatatgtatgtataattattagattgtgtatgctatacataatctacctatatatatacacatatatatatacatttatacactgtatattcatgctttgatttaagactttgccttaatttagaaacagattgttaagatacaattg

SEQ ID NO: 879187 - DNA, 581 bp, Homo sapiens
ttgcccactttttgatgtttctttttttcttgtaaatgtgtttaagtttcttatagatcctagatattagacctttgtcagacggatagggggcaaaattttttgttcattctgtaggttgtctgttcacttcttttgttgtgcagaagctctttagtttaattagatcccatttgtctatttttgcttctgttgccattgcttgtgttttcatcatgaaatctttgcagtgcctatgtcctggatggtatttcctagattttcttctagggtttttatagtttggagttttgcatttaagtctttaatccatcttcagttaatttctgtataaggtgtaaggaaaggctccagtttcaactttctacatatggctagccagttttcccaacaccatttattaaataggggatcctttccccattgctygttctttttttttttttcaggtttgtggagaatcagaggattgcagatgtgcagtgttatttttgagatctctattcttttccattggtccaggtgtctgttttagtgccagtaccatgctattttggttactgtagccttgtagtatagtt

SEQ ID NO: 879188 - DNA, 649 bp, Homo sapiens
ccaatctttccttttatggttagcactttttacttcttgtattctatttaagaattctttgcctatcccaaagctatgaagatattctcctgttttctggaaattggttgttttagattttatatacagatcaaagtaaaatctctaattttgtatatgtcatgaagtgaggttcatttttttccctgtatgactaccagagcctctactctggccttgaattgaatattcatcccaagcttttctttctgcttttgtaagctctccaayatatccatagaagtcatgccaccccacaatctttgtaaaaattatggttgtcattgtaatcaactgcagctactccaatggaccacctcaagtcttgccctccacagacactgcatcccacactcgccacagagataatttgagtaattgtgaagcccttgcttgctatggtttgccaggcataagtggtcatctgttcactcattaagtatgtaagcaactcagtcccagaatcccaccactatattctatgccctagggacactgtaggtaaaaacactatatcagttttggaccatgcaggaaacgtaattcctctcaggtgttttacctgaagaagctttacagggggactatttgcagagggcagacatagtta

SEQ ID NO: 879189 - DNA, 649 bp, Homo sapiens
ccaatctttccttttatggttagcactttttacttcttgtattctatttaagaattctttgcctatcccaaagctatgaagatattctcctgttttctggaaattggttgttttagattttatatacagatcaaagtaaaatctctaattttgtatatgtcatgaagtgaggttcatttttttccctgtatgactaccagagcctctactctggccttgaattgaatattcatcccaagcttttctttctgcttttgtaagctctccaatatatccatagaagtcatgccaccccacaatctttgtaaaaattatggttgtcaytgtaatcaactgcagctactccaatggaccacctcaagtcttgccctccacagacactgcatcccacactcgccacagagataatttgagtaattgtgaagcccttgcttgctatggtttgccaggcataagtggtcatctgttcactcattaagtatgtaagcaactcagtcccagaatcccaccactatattctatgccctagggacactgtaggtaaaaacactatatcagttttggaccatgcaggaaacgtaattcctctcaggtgttttacctgaagaagctttacagggggactatttgcagagggcagacatagtta

SEQ ID NO: 879190 - DNA, 526 bp, Homo sapiens
catcaggattttgtggtctgtccttattctcaaacaaggacggaccaatagaggagattgtataactgtaaaactgcttttgctggtgaacatcaaggacaaaatattgaggcctgcaaaaccatgctttttgaagttatatcagaaacttcgtcatttaaaatcgtatcagagactgaagatcagaagaaactggagatcrgaagaaattttaaactatacaataaaaaatgctgtgtgttaaaaacaacaaacaaaaaaacacagcctctgtcttgtcttggtgacagtgtttttctaatttctgtcagacctaataagatatctccaagtctacctcaatctcaaaagttacccaataatctataatagttcattgttgaggcaatattgagagaaggaaggtaaatcaacaaaatcctgaaggctctcggtcatacccttctaacaagtaagaaggtgtattggtcccttttcatgctgctgatcaagacatgcccgagactgggcaatttacaaaagaaag

SEQ ID NO: 879191 - DNA, 591 bp, Homo sapiens
ttccagtttcacgtgagtctgccttcctcatttctcgctgggaatacgattcccaaaatagcctgagaaaactttctgtggcattgccagcccctgcgggaggggctccattatgaactccatgactggagactcctggcaccatgtggcgaggctaccagaagccgcatgatcttgaccttcagtgaaggatgtcagtaaattccttgtgatgtaagaagcagttaatgtgcacatagaggccacatgctcactgaggtgtcccaaggacacactggaatacctgacctaaagktttgttttccttttcatttaccagttgctcctgctatgcattttgatcattgtattgttgtagaagacagtagcacaaaagcctttattttttgggaatttcagcgttgccagttaattatctggatcatccaagcaatgtctacaaattttgttctgacactagaaacttgatagagggagatatgtagccaaaatgaagcactgagagcattctgtgccccgaaccctccctgatgtcaatacgtagctgatcatagatagcaggaattcatcctgttgaatagtcaccaaaga

SEQ ID NO: 879192 - DNA, 610 bp, Homo sapiens
tggccagaatctggtatttgattgatatattgcagaagttttacagtattaaagtataaaaagctgtgctaaggctttatatttaacgtctcacttcagcatcaccacatagaaagggtcaagaaatatctcccatctacacatagagaaacttaggatcaggtctagtacttctcactaggagacacaaagatcccttttatattcatgtttagctgccactctgggaacatttcccaggatttcttgtcttcacgtgctggaattggaatcacttggttgtttttgagccagatcctgatggattatcatgccctgtacaattgtcctaacttgggcagcgcagacctgtttamcttattaactttattagttcccatcctcaaagggtcattatccataggcatccacatgggcatgaacaggagaaatgttacttgagaaatctgctggtattttttgtatacataaggctgaaacttgaccaaccatttgtcatgctaccaggcaccaatcatctaccctgtcagcccatgggcacctggccagatgtgagccaaaatgtaataaggtgcatttacagggaggctttccagcacaagcaccgcag

SEQ ID NO: 879193 - DNA, 569 bp, Homo sapiens
ttcctgtgtctctcaaccttcatgggcatcagtcaggctttctgaagctctttgtcaatggtttgtggcaaaggggcacaaaccattgaccctccctcatgaatataggcagaatgtccagcacactgacaaaactctaaaaattctttttctctctcttctacctcaactattttatatttctgacatggcttaatgggctaatgctggcagaaactcgttctatttatttgctaggtggtcggcagctcactttagaatacaggagttttttttttttgagacagagtctcagattgttacccaggctggagtgcagtggcaagaatatgggaatatttgatatgtcttgccctttggaractgtattgattttctagagttgccataagaaagtaccaaaatgtggaggcttaaacaacagaaattttttgtttcacacatctaggcctagaaatcccctgaaattcaatgaaaatgttggcaatattggttgtaagggaattcagggaaggttgtgagggaataatctgttccaggcctctttccttggcttgtagttgactgtc

SEQ ID NO: 879194 - DNA, 519 bp, Homo sapiens
ggtttttttttagtttttttttttttttttttttttttttgaaacaaagtcttgctctgtcccccaggctggagtgcattggcgccatctcgggtcactgggagctctgcctcccgggttcacgccattcacctgcctcaacctcccgagtagctgggactacaggcgcctgccaccgcgcccacctaagttttgkgtttttaataaaaaagggatttcaccttgttagccaggatggtctcgatctcctgaccccgtgatctgcccgcctcggcctcccaaagtgctgggattacaggcgtgagccaccgcgcccgaagcagggagtcttcaggttcagaaatcttcatttaacaatgactttgtttcaggacttgtgctcagccctggagatgaggagtggaaacactcttccttttttggagaaaggtcctaactaaggtaggatacagacacgtaaatcaaaacctgtgagataagagctgtggtataaattggagtgctatgactttatagagc

SEQ ID NO: 879195 - DNA, 519 bp, Homo sapiens
ggtttttttttagtttttttttttttttttttttttttttgaaacaaagtcttgctctgtcccccaggctggagtgcattggcgccatctcgggtcactgggagctctgcctcccgggttcacgccattcacctgcctcaacctcccgagtagctgggactacaggcgcctgccaccgcgcccacctaagttttgggtttttaataraaaagggatttcaccttgttagccaggatggtctcgatctcctgaccccgtgatctgcccgcctcggcctcccaaagtgctgggattacaggcgtgagccaccgcgcccgaagcagggagtcttcaggttcagaaatcttcatttaacaatgactttgtttcaggacttgtgctcagccctggagatgaggagtggaaacactcttccttttttggagaaaggtcctaactaaggtaggatacagacacgtaaatcaaaacctgtgagataagagctgtggtataaattggagtgctatgactttatagagc

SEQ ID NO: 879196 - DNA, 519 bp, Homo sapiens
ggtttttttttagtttttttttttttttttttttttttttgaaacaaagtcttgctctgtcccccaggctggagtgcattggcgccatctcgggtcactgggagctctgcctcccgggttcacgccattcacctgcctcaacctcccgagtagctgggactacaggcgcctgccaccgcgcccacctaagttttgggtttttaataaaraagggatttcaccttgttagccaggatggtctcgatctcctgaccccgtgatctgcccgcctcggcctcccaaagtgctgggattacaggcgtgagccaccgcgcccgaagcagggagtcttcaggttcagaaatcttcatttaacaatgactttgtttcaggacttgtgctcagccctggagatgaggagtggaaacactcttccttttttggagaaaggtcctaactaaggtaggatacagacacgtaaatcaaaacctgtgagataagagctgtggtataaattggagtgctatgactttatagagc

SEQ ID NO: 879197 - DNA, 720 bp, Homo sapiens
ggtttgactatattaaacaacaatggcttaaacataaaaggcttattcatttacagaaaagaagtctagaggagatagtccgggaatgtaagagtggctctacaaagccattggatactgggctcgttccatctttctcctccattgttcttagtcagtggcttccatcctgaagtttacccgatggtccaagacagctttcttagctcctttcttcatccctcttcacctcaggcagcaggagtgtgaaagcaggagaggacaaaatgtccggccttcctgaagaatctgctccccttaagcaatcttcctgtaagttctaatgttttttagaacttatatcttttttttttttcagatggagtcttgctctgccacccaggctggagtgcagtggcacaatcttggctcactgcatcctcctcctccckggttctagcaattcttctgcctcagcctcccacgtagctgggattacaggcgggcaccaccacacccggctaatttttgcatttttagtagagatggggtttcaccatgttggacaggctggtcttgagctcctgacctcaagtgatctgcccacctcagcctcccaaagtgctggaattacaggcatgagccactgtgccctgccaagaacttaacatcttattgatcagaatgtattgacgttactgtacttggcaagggagattagaaaatgcaatttttatgtgg

SEQ ID NO: 879198 - DNA, 511 bp, Homo sapiens
gggtgggccctgccctagaggaactgaacagggtcatcctgccccacagaatctagagaggcggccccactctttgaaacctagaaggaaacggtcctgctccctgggcctcttgcaggagtagcagccccagtgatctctgaatccccttaggggtcattcgtccctttccttgaatagtggtccagtccctgtagaacccaagaagtcccacaatcggccttaattcttttctgctttctctgcactatttacttcaaactcttggcatcttagctggtataatctcatctmtgttcctggcttctgtcaatagagctgatgaagtccctgagtcccatcatctctttatctattagtcaagaactttttctaggcactggaaatataaggtattgtttctaccatgttatgcatttttttagcaatatgttcctactctagctcaaaacccagcactcacagactgttatgacatcatttaatcttaatcaccttcttaaaagctctg

SEQ ID NO: 879199 - DNA, 640 bp, Homo sapiens
aacctaggatattgatattatcattcctctgtgtagattaaaagctaaataaagttcatcactgctatctggcctattaaccattacactatagtatctcaactagctctttaaacttactttctcctagtgtagatcagcttctaagattttataaattctttgtagatacttgraagacgcctggctcatgcctgtaatcccaggactttgggaggctgaggagggcagatcgattgagcccaggagttagagaccaggcctgggcaacatggcaaaaccccatctctacaaaaaatacaaaaattagctgagtgtggtggggtgcacctggagtcccagctatttggagggcttaggcaggaggattgcttgagcccagaaggttaaggcttcagtgagctgtgattgcatcattgcactccagcctgagtgacacagtgagaccctgtctcaaaaaaataaataaataaaataataataatagtaacaataatttagctctgctttagaaattgaggaaatatatgtggatatatacttatataatgatatgtatagacatgtacatatcgtgcatatatgaacatacatatattcagaaaataaaaaaatgttactttaaatttggtaaattaaa

SEQ ID NO: 879200 - DNA, 583 bp, Homo sapiens
ccaatttctcccatttggaatggctgtatttacccaatacctgtactctcattgtatctaggaagtaactagcttgcttttgattttacaggctcataggccgaagggacttgccttgtctcagatgagactttggactgtagacttttgggttaatactaaaatgasttaagactttcggggactatcaggaaggcatgattggttttgaaatgtgaggacatgagatttggagaggccagggatggaaagatatggtttggctgtgtccccacccaagtctcatcttgaattgtatctcccagaattcccatgtgttgtgggagggacccgggggaggtaattgaatcatgggggctggtctttctcgtgttattcttgtgatggttaataagtctcatgagatctgatgggtttatcagggctttccacttttgcttcttcctcattttctcttaccactgccatgtgagaagtgccttttgcctctcgccccgattctgaggccttcccagccgtgtcgaactgttaagtccaatcaaacctcttttttttcctagtctcgggtatgtctttatcagca

SEQ ID NO: 879201 - DNA, 622 bp, Homo sapiens
tgcccaatttctcccatttggaatggctgtatttacccaatacctgtactctcattgtatctaggaagtaactagcttgcttttgattttacaggctcataggccgaagggacttgccttgtctcagatgagactttggactgtagacttttgggttaatactaaaatgacttaagactttcrgggactatcaggaaggcatgattggttttgaaatgtgaggacatgagatttggagaggccagggatggaaagatatggtttggctgtgtccccacccaagtctcatcttgaattgtatctcccagaattcccatgtgttgtgggagggacccgggggaggtaattgaatcatgggggctggtctttctcgtgttattcttgtgatggttaataagtctcatgagatctgatgggtttatcagggctttccacttttgcttcttcctcattttctcttaccactgccatgtgagaagtgccttttgcctctcgccccgattctgaggccttcccagccgtgtcgaactgttaagtccaatcaaacctcttttttttcctagtctcgggtatgtctttatcagcagcgtgaaaacagaactaatacagtgggtattttcct

SEQ ID NO: 879202 - DNA, 551 bp, Homo sapiens
tggatagaatgaatacaaaacaatcaaacttcaggaaataatggacacacttagagaaatgcaaaatgtactagaaagtctcagcaatagaataaaacaagaagaaagaacttcagaactctaagacaaggattttgaattaacccaattcaacagagacaaagaaaaaagaaytctaaaaaacgaacaaagcctccaagaagtctgggatcatgttagatgatcaaacctaagaataattggtgttcctgaggaagaagagaagtctaaaagtttggaaaacataattgggggaataatcaaggaaaacctccctgaccttgctagagacctagacatccaaatataagaagatcaaaacacctgggaaattcatcacaaaaagagcatcacctgggcacattgtcatctgattatctaaagtcaagaaaaaggaaacaattttaagagctgtgaggcaaaagcgtcagataacctataaagacaaaccttctgctagattttgaatttgtttgctcttgcttctctagttcttttaattgtgatgttag

SEQ ID NO: 879203 - DNA, 551 bp, Homo sapiens
tggatagaatgaatacaaaacaatcaaacttcaggaaataatggacacacttagagaaatgcaaaatgtactagaaagtctcagcaatagaataaaacaagaagaaagaacttcagaactctaagacaaggattttgaattaacccaattcaacagagacaaagaaaaaagaactctaaaaaacgaacaaagcctccaagaagtctgggatcatgttagatgatcaaacctaagaataattggtgttcctgaggaagaagagaagtctaaaagtttggaaaacataattgggggaataatcaaggaaaacctccctgaccttgctagagacctagacatccaaatatargaagatcaaaacacctgggaaattcatcacaaaaagagcatcacctgggcacattgtcatctgattatctaaagtcaagaaaaaggaaacaattttaagagctgtgaggcaaaagcgtcagataacctataaagacaaaccttctgctagattttgaatttgtttgctcttgcttctctagttcttttaattgtgatgttag

SEQ ID NO: 879204 - DNA, 529 bp, Homo sapiens
ctagcatcatcctgataccaaagcctggcagacacacaacaaaaaaagagaattttagaccaatatccctgatgaacatcgatgccaaaatcctcaataaaatattggcaaacctaatccagcagcacatcaaaaagcttatccactatgatcaagtgggcttcatccctaggatgcaaggctggttcaacatacgcaaatcaataaacataaaccatcatataaacagaaccaaagacaaaaaccatatgatcatctcaacagatgcagaaaaggcctttgacaaaattcaacagcmcttcatgctaaaaactctcaataaactaggtgttggtgggacgtaactcaaaataataagagctatttatgaccaacccacagccaatatcatactgaatgggcaaaaactggaagcattccctctgaaaaccggcacaaggcaagggtgtctcaccactcctattgaacatactattggaagtgctggccagggcaatcaggcaagagaaagaaataaagcgtattcaaa

SEQ ID NO: 879205 - DNA, 661 bp, Homo sapiens
cctggggaattacacccctcttggagtggaaatctctattcagagcgagagaccctggggtactccaggaaggagtgagcagacagggcgggctgcccaagacacctagggacggtcgcctatctcaccagcatcccgtttgcccattaatccaaagaactgctgaggcttgggtctccgggcgattctctgcagaagatgctcaaagggctccggcagttcctcctgggagacaaaagcacggacaaagggcgtgtaaggcaaccagagcgaggcacccagcaacccgagcccttccccccgctgtactccggccccgaggmgtggggaggcggccttccccacgctcgggctgagcggggtccctcccgaggcgctgcctctctgcgcccctccccgccgaactcgcgtcccgccccccgcaagcctgccagggcgagttagcagctggctcggcgtcttcaagcttcgagcgctttccgctctttcctcccagcccggggaccttccctcatctgctgcgccgccacctgactttgtcttgtctcggtgccggctttgtagagtcctcaccgccctaaatgcacacaggtgtgtgggatctggggctggggctccggtggggaagggtgacaacgctttacagacgactttcaccgtt

SEQ ID NO: 879206 - DNA, 612 bp, Homo sapiens
cacatatatttctattgcacacaataattgtttacattttttattattatacaacaaaaagggtggagataggagggctggagattgcaacattagccaaatctgaattcaaaacacattttcaccagttactagctctgycatcttgggaaaattatgtaatatcatacataataatagtgtctactttgttgggccttttccaggattaaatgagtgaaggtaatacctggtgcttgatacgttttataatttattatttcaggatcaagattataattaaatatgaggaaataaaatattataatgaaataatgtatttaagcatttaatacaattcctggaacccaatgaatattcaacaactttttagggccctagccaaagaaacaatcaacccagtcattcttaagtacattgaatgaaaaacaagggttacatcagctgaacaaacctataatcaggacagaaaacagcagagtttaagccccttcaccaagggaactgaattttacttttgtggcagaacctaaatttcaaactgagttagattggctttgggaagaaaatcaagcagttgtcttgacatgaggattcttcaactgcctccag

SEQ ID NO: 879207 - DNA, 612 bp, Homo sapiens
cacatatatttctattgcacacaataattgtttacattttttattattatacaacaaaaagggtggagataggagggctggagattgcaacattagccaaatctgaattcaaaacacattttcaccagttactagctctgccatcttgggaaaattaygtaatatcatacataataatagtgtctactttgttgggccttttccaggattaaatgagtgaaggtaatacctggtgcttgatacgttttataatttattatttcaggatcaagattataattaaatatgaggaaataaaatattataatgaaataatgtatttaagcatttaatacaattcctggaacccaatgaatattcaacaactttttagggccctagccaaagaaacaatcaacccagtcattcttaagtacattgaatgaaaaacaagggttacatcagctgaacaaacctataatcaggacagaaaacagcagagtttaagccccttcaccaagggaactgaattttacttttgtggcagaacctaaatttcaaactgagttagattggctttgggaagaaaatcaagcagttgtcttgacatgaggattcttcaactgcctccag

SEQ ID NO: 879208 - DNA, 615 bp, Homo sapiens
ttgtttaaatctaccacacgctctaaatttgaacagagatagcctttgaataaagtacacagtttttaccccatcaaattctctgaaataatagcaatcttgcatctacaagaataaacaaccatcttcccctaaaaaaatatgctgaaaagaacagaaaagaaactataaagaaaataaaaccttctcagggctctaaatctttacctcattatccggtatgttccctttaactatcatatactatgaacccccacaacccacccccaatcccagccttacccatacctcaaccactatttgtcatttgaatcaacccattttactttcwtttaagtactacacagtgtttaaaattattttgctactgttactatttatatatttattttgccttagtaatttgtctcccctccttacaactaaattacaagctccatcagagcatagattatgagatgcctatgaaaactttacctaaagtcctagaaaatattccagaatattggagataataagtgataaatgaattaagaaataaaggaaggaatcatcatgataaataaacatagcccccaaaaatatttaagtactttttacataacaggcataaat

SEQ ID NO: 879209 - DNA, 582 bp, Homo sapiens
ccatgatgtgtttatttcacattgcatgcctgtatcataaaatctcatatactctataaatatatacacctattatgtatccacaaaaataaaaaagagaatgaagattgtaaattgaaaaataagaaaatataaaagtactaaaagcaattcaatgtgtaactccaaatgaatractttgaaacactgaagtaaatggcttttttctagccaaatataacatactaaaatgattttgttaaattgaaagggaaaaacaatccagacacatgaccatacatgctattagagaactaattgcagtggtcctattcttgggcaattatgtgtgtggtgaagggaggcagggtggccagagtcctgcctcacctgcctttctatcaatactgaggacaatggaggaacctctcagggtttatcacaagatggtatgtaaccacttctggggatgataatgtcactgaaggaatttgaataataaggcatcatgatcaaaatgtatgttcaatttctccaaagtgataaggggaacagaatgtaggacacagataaaaaaggctgccgtgtgcaatgtgagatcac

SEQ ID NO: 879210 - DNA, 583 bp, Homo sapiens
taagtgctaagaattaattaaaactgaacttactctggataagacattttgtaagtgacagataataaaaacatattttttaacttttatattaggttcaggggtacatgtgcagggctgctatataggtaaattgcacgcttagtgtgtataaattatttygtcacccaggtagtaagcatagtactcaataggtagtttctcaatcctcaccctcctcccactccaatcctcaagtaggtcccagtgcctgttgttcctttcttcatgtgcatatgaaaacttagcagcacatcaacatggcacatgtgtccatatgtaacaaacctgcacgttgtgtacatgcaccctaaaatttaaagtataatttaaaaaaaagaaaacttacatttttttagataataaagaatcactgctcagcagcctaaacaagtcataaatgaattgttctcatattttaattactaaaaatatagtttatgaatgtattcctatgtcacacaattattgcctgattataataattttatttttaataataattactttagaaccttgacgttcatggaaaaatttcactcaa

SEQ ID NO: 879211 - DNA, 583 bp, Homo sapiens
taagtgctaagaattaattaaaactgaacttactctggataagacattttgtaagtgacagataataaaaacatattttttaacttttatattaggttcaggggtacatgtgcagggctgctatataggtaaattgcacgcttagtgtgtataaattatttcgtcacccaggtagtaagcatagtactcaataggtagtttctcaatcctcaccctcctcccactccaatcctcaagtaggtcccagtgcctgttgttcctttcttcatgtgcatatgaaaacttagcagcacatcaacatggcacatgtgtccatatgtaacaaacctgcacgttgtgyacatgcaccctaaaatttaaagtataatttaaaaaaaagaaaacttacatttttttagataataaagaatcactgctcagcagcctaaacaagtcataaatgaattgttctcatattttaattactaaaaatatagtttatgaatgtattcctatgtcacacaattattgcctgattataataattttatttttaataataattactttagaaccttgacgttcatggaaaaatttcactcaa

SEQ ID NO: 879212 - DNA, 583 bp, Homo sapiens
gaaacaaaaattgagtaaatcaaagttactaagattactcaggatataagtctgtatgtttccagagcctttattttcaccactataccaggcttcttcatttctctaaaggggctagaaacaggggttgaaataggaatgaaacacttgtccattcatccattcgagaatctgaagctttgcctggaggccgatttccacacctgtgccccattactaagagctatggtgagttggctctaccatccatagaagcaagccagagctattcagctgtcagaacttgattcaaaagctttggaagttgtctggtagaatctagcagagtcaaactcactaaggtatgaactcaatgtgcagacttggtctctagtaacctgaaatagttcaatgcagtggttgtcaaaagaaccaagtttacrtgagagtatagcaggtgctgcatcttggttttataaatcgttgtaaattatctctctaactatattcccagccatttctattacttctcatggaaagcaaattcaaacaggcgtcatacctgaaaaggcatataagaaattaagacaaagtgagccacaca

SEQ ID NO: 879213 - DNA, 560 bp, Homo sapiens
atggtgacgcgcgcctgtagtcccagccacttaggaggctgagacaggagaatcgcttgaacccaggaggtggaggttgcagtgagccgagattgtgccactgcactccagcctggtgacaaagtgagactccatctcaaaaaaaaaaaaatatatatatatatatatatatgtctgtaccctataaactgtagctccatayacacatatacactaatatattgtctgtacatatatgtgaatacacatatttccactctgtataaataacagctttagacattgtttacatcttgctttttctcacttcttagatcttacagctctttcaatgtcctaaatgcaagacttccagagatcaatgtcagcatgtctctcttattttatgaaatggctacatgagtttacattataggcatctaccatgattcagttgaacagtctcttcctgatggacattttgttattttcttcctattaaagcaatgctgggataaacacaatacttgatatatttatataacatgagactatatttgtaggagagattctggaaaatg

SEQ ID NO: 879214 - DNA, 560 bp, Homo sapiens
atggtgacgcgcgcctgtagtcccagccacttaggaggctgagacaggagaatcgcttgaacccaggaggtggaggttgcagtgagccgagattgtgccactgcactccagcctggtgacaaagtgagactccatctcaaaaaaaaaaaaatatatatatatatatatatatgtctgtaccctataaactgtagctccatacacacatatacactaatatattgtctgtacatatatgtgaatacacatatttccactctgtataaataacagctttagacattgtttacatcttgctttttctcacttcttagatcttacagctctttcaatgtcytaaatgcaagacttccagagatcaatgtcagcatgtctctcttattttatgaaatggctacatgagtttacattataggcatctaccatgattcagttgaacagtctcttcctgatggacattttgttattttcttcctattaaagcaatgctgggataaacacaatacttgatatatttatataacatgagactatatttgtaggagagattctggaaaatg

SEQ ID NO: 879215 - DNA, 646 bp, Homo sapiens
tagagggttggctgccagcgtgattgactaaaatggtcttcagggactttcatgagtaaaggagatatattttttaacacttactgggaaatggagctttgaaagcctgtctccagcaaaagggatttttgacatgtataggctggggcctagaagtaaattttctctctcctacttttgcaacagtcttttccctttatcctggtagaaactaaagtagtcaacttcttgtcattaaaatggaactggagaaatcatcraagagatacgatttttccttactcttttaaagcagcctaggtattaaaatatcttctgagatctgtgcagaattttcatttatactaaacaactcattttgtttgtcagggacaaactaatatgaataacaaatatctagggtagaatttttcatagaaactctttatatgttaaaagaaaaaaaaaagctacttactgcttattgatgcattcaaatcattcttaagcctgccattgccaaaatggcagactgaaccaaaccttgaattcttagtagagagggtatttttgctttttgtttttgtttattgtttggagctagcttgcttctttgttttctttctttctgtgttcctttcttttttttttttttttttgagaagac

SEQ ID NO: 879216 - DNA, 635 bp, Homo sapiens
aggttagtccagctatactacattttttaattagcagtctgaaatataaatattcactccaacacttaacaatacttgcatgcacagccactgctgtggtgaccaactctgagggggatccaactgagttccctccagaagcaatcccagatattgtcctgtggtcggaaaacatgctctgtataattctgattctttgaaattattgaagacaccaggcgccgtggctcatgcctgtaatcccaacactttgggaggccgcagctgtggatcacctgaggtcaggagtttgagaccagcctggccaacatggtaaaaccctgtctctactaaaaatacaaaaattagccaggcatggtggtgcaggcctgtagtctcagctactygtgaggctgaggcaggagaattgcttgaacccgggaggtggaggtcgcagtgagctgagattgcgccactgcactccatcctgggagacaaagcaagactccatctcaaaaaagaaaaagaaaagaaaaagaaattgttggagacctgttttatggcccagtatatggtcagttttgcagttttggtagataatccatgtgcacttgaaaataatatatattttgccattcttcaggaccatgtcctat

SEQ ID NO: 879217 - DNA, 676 bp, Homo sapiens
gctttagagatgacactgagagggaatgccacctttatgctacctactctacagaaagaggctttctgtttcttcttatttatcctgcaaaagcgtggtccagctttttactgatgtcccagtttcttgcagacaaattttaaaaatcctaaagaaaaaagtaacccagyggaaatcatagagtgaacatacagctagctgtttcctgaatttactctcaggtcctctgatattacaatggtcaaagagagctccgggctcttagcatgtgccagtcactggggctaaatatgttacctttattatttaatcattacaacaatgacagttaaataacacctagctattcttgttattgttattattaccctgtttctatagatgagaaaactgaggcttagagagattctctaatttgcccaatgttccctagctaataaacaggtgatccaacttagattagaaccaaattctgtctgattctggaacctgctcctccaccttttttttgacaataatagtcattaccacaatattctgtgttaattatttttcagcgtacttttcttgcttcttctttattctaaatttaaatttattttctttttaaaagtagcgcaacaaacgcatatatacccttcagctagattcatcaattttgttgtgttttcctttc

SEQ ID NO: 879218 - DNA, 602 bp, Homo sapiens
cttggccaacatggtgaaaccccgtctctaccaaaaatacaaaaattagttgggcgtggtagtgcacacctatagtaccagctatatggaggctgaggcagaagaatcgcttgaacccaggaggcggaggttgcagggagcagagatcgcaccattgcactctagcctggcaacagagcgagactccatctcaaaaaaaaaaaaaaaagagtaatatgctacctagtggggaggccagggaaggtttccctgaggctgtggctatagggctgtgatctgaaggcccagsaagggttaacttggggagaggagaaagagcattccaggcagagggagcaggccttgcaaaggctttgcgacaacagaaagccctgacaaaggactgaaagaagacccacgtggctagggctgcagaagtgtagaggaagattagattgggaaggtgggtaagaaatgaccattaagtttcaagcagggggaacatgagactcaaatgtgcattttgaaaaaaacaaaacacacagactcagactgcagtatggagaatgggactggaatgttacaaaggcttgagagcagctgctaactgcctgtagcaccca

SEQ ID NO: 879219 - DNA, 618 bp, Homo sapiens
tttttttttttttttttttgagacagagtctccttctgtcacccaggctggagtgcagtggcaggatctcagctcactgcaacctcctcctcccaggtgcaagcgattcttctgcctcagcctctcgagtagctgcggttacaggtgcacgccaccacacccagctaatttttttgtatttttagtagagatgcggkttcaccatgttggccaggctgatctccacctcctgaccttaggtgattcactcgcctcggcctcccaaagtgctggtattacagggttgagccaccgcactcggccatccaacccctttttatcctcctccatccactatagttctcagcctctaataaccttcattctacagtctatctccatgaatttattttatttaagctcccatatatgagtgagaacatcctatatttgcccttttttcctggcccacttcacttaacataatgaccttttgattcatccatgcttatgcagatgttaggatttcattttttgattgctcaatattccactgtgtataaataccacattttatccattgatccattgatgaaccctagtttgattctatctcttggctattgtgaataatacagc

SEQ ID NO: 879220 - DNA, 603 bp, Homo sapiens
tcacccccgttaaaatagcttttatccaaaagataggcaataatgaatgatggcatggatttgcataaaagggaaccctgtacactgttgaggggaataagttggtaaaaccactgtggagaacagttgggaggttcctcaaaatctaaaaatggaactgacatatgatccaacaatctttctgctaggtatacccaaaagaaaggaaatcagtatatcaaagaaatatctggattcccatgtttgttgcaggactgttcacaataggcaagatttggaagcaagaggtgtccaccaacagatgaatgaataaagaaaatgtacatatacccaacagaatactgttcaactataaaaaggaatgagatcctgtcayttgcaacaacatagatggaactggaggacattacattaagtgaaataagccaggcacagaaagataattttctcatgttctcatttatttgtggaagctaaaattgaaataatggagacagagagtagaatgatgtttaccagaggttgggaagcgtagtaggaggcagggaagtgggatggtaaatgggtacaaaaatatagttcgatggaatgaataagatctag

SEQ ID NO: 879221 - DNA, 619 bp, Homo sapiens
acaagtatcaatagtcgaatccatcaagcagagagagaaaggatatcagagattgaggtcaacttaatgaaatagggcataacaacaagattagagaaaaaagaataaaagggaacaaacaaagcctccaagaaatatgggactatgtggaaagacaaaacttacatttgattagtatacctgaaagtgacagggagaatggaaacaagctggaaaaccctcttcaggatattatacagaacttccccaactagaaagacaggccaacatttaaattcaggaaatacagagaacaccacaaagatactcctcgagaagagcaacyccaagacacataatgtcagattcaccaaggctgaaatgaaggaaaaaatgttaaggggaggcagagagaaaggtcaggctacccatgaaaggaagcccatcagactaacagctaatctctctgcagaaaccctacaagccagacgagagtgggggccaatattcaacattcttaaagaaaagaatttttaacccagaatttcatatccagccaaactaagcttcataagtgaagaagaaataaaattctttacagacaagcaaatgctgagggattttgtcaccaccaggcctg

SEQ ID NO: 879222 - DNA, 665 bp, Homo sapiens
  misc_feature 1, 2, 3, 4, 5, 6, 7, 8: n = A,T,C or G
nnnnnnnnacaacctatcagattctcttatcctgtacccttcctgagacaccatcagtcaactttcaattcacttgttggttcctttcatttctcccgaagtcatttccttcagccagttatttattggttattacttcmgccacatatttattcaaccaataaaaatttattgagcaccactgtgtatcctgttacgtgtttggagctatctagaatactgaacatgcaaacaggccgggcacagtggctcacgcctgtaatcccagcactttgggaggccaaagcaggtagatctcttgaggtcaggagttcgagaccaaactggccaacatggaaaaaccccatctctactaaaaatacaaaaattagccaggtgtggtggttcacacctgtaatcccagctacttggatggctgaggcaggagaattgcttgaatccaggaggtggaggctgcaatgatccaagatcatgccactgcactccagcctgggtgaaggagtgagactctttctcaaaaaaaaaaaaaaaaaaaaaaaaagaacgtgtaaacagcaaacactttggtccctgccctccatagaggctaaactgccacatgtttagtaattttcaaaatgagcttaaggcagtttattaccaagagctaagtggcatatccagtg

SEQ ID NO: 879223 - DNA, 705 bp, Homo sapiens
gaatgaaaataacttttaagtattatgatctagcatacctatcaatattttcttacctattgtgatggttaatgttatttctccacttggctaggctatggtgcccagttgtttagtcaagcacccatctagatattgctataaaggtatttttttagatgaggtaaacatttaaatctacactttgagtaaagtagattgccctccataaagtgagtagagcttgtacaatcagttgaaggcmttaggggcagatgctgaggtttcccaggaaagaagaaattctggatcaaggctgaaatctagaaatcctgctgaccttccagcaagctgccctgcagaattcacactacacactgcaacatcaactcttacccaagtttccagttaccaagcctgcctcatagattttagacttcccagtctttacagttgtgccagccaatttttaaaaaatttatctttgtctctctttatctctccttcaaagtccattaatggttttgtatctctggagatcctgattcgaaaatcaatgagttttgggtcaaggtgtctgtggctcttgaactcttttatttgggggaatgtgttctttttctgtcatgcctctattatggcatgcttcaaaattttaagagaccagccaaaaattaatgaaaatttgcaaaaatatcagaataatctagaaatgcaaatgtactt

SEQ ID NO: 879224 - DNA, 598 bp, Homo sapiens
tttttgctcattgattttgtatcctgagactttgctgaagttgcttatcagcttaaggagattttgggctgagacagtggggttttctagatatacagtcatgtcatctgcagacagggacagtttgacttcttcttttcctaattgaataccctttatttttttcctcctgcctgattgccctggccagaacttccaacattatgttgaataggastggtgagagagggcatccgtgtcttgtgccagttttcaaagggaatgcttccagtttttgcccattcagtatgatattggctgtgggtttgtcatagatagctcttattattttgagatacatcccatcaatacctaatttattgagagtttttagcatgaaggttgttgaattttgtcaaaggccttttctgcatctattgagataatcatgtgctttttgtctttgattctgtttatatgctggattacgtttattgatttgcatatgttgaaccagccttgcatcccagggatttctttataaattactcagtgtcaggtagttctttataacggtgtgaaaatggactaatatatagagtataccaacatattgccc

SEQ ID NO: 879225 - DNA, 622 bp, Homo sapiens
cttgtgccagttttcaaagggaatgcttccagtttttgcccattcagtatgatattggctgtgggtttgtcatagatagctcttattattttgagatacatcccatcaatacctaatttattgagagtttttagcatgaaggttgttgaattttgtcaaaggccttttctgcatctattgagataatcatgtgctttttgtctttgattctgtttatatgctggattacgtttattgatttgcatatgttgaaccagccttgcatcccagggatttctttataaattactcagtgtcaggtagttctttataacggtgtgaaaatggactaatatatagagtataccaacatattgccctgttgatctccaggttcatgtgttcacttggacatctaaaagagaaaactagatttcttcgattttccataaaacatgttctcttcctattttctscagctcaactgcttttccacctctccttactttcttgttaatttgcttaggccaaatattggtgttatctttttctctttttctgcttactccccatcggaattgttaaggaatgctttcagtccatcttaaaattattacatatactctgttcatttcacatgacc

SEQ ID NO: 879226 - DNA, 622 bp, Homo sapiens
cttgtgccagttttcaaagggaatgcttccagtttttgcccattcagtatgatattggctgtgggtttgtcatagatagctcttattattttgagatacatcccatcaatacctaatttattgagagtttttagcatgaaggttgttgaattttgtcaaaggccttttctgcatctattgagataatcatgtgctttttgtctttgattctgtttatatgctggattacgtttattgatttgcatatgttgaaccagccttgcatcccagggatttctttataaattactcagtgtcaggtagttctttataacggtgtgaaaatggactaatatatagagtataccaacatattgccctgttgatctccaggttcatgtgttcacttggacatctaaaagagaaaactagatttcttcgattttccataaaacatgttctcttcctattttctgcagctcaactgcttttccamctctccttactttcttgttaatttgcttaggccaaatattggtgttatctttttctctttttctgcttactccccatcggaattgttaaggaatgctttcagtccatcttaaaattattacatatactctgttcatttcacatgacc

SEQ ID NO: 879227 - DNA, 654 bp, Homo sapiens
atgtaatagttcaatatttatacatatatgtaaatgttctgtgttgcgaggtacagagtatttcttactctaggttgtgataaaacatatttgaaacagtactcaagcttgttataactattgctttatttaaggacatttccccaaaacttaatacttacaattttgtctgacaaagacccaggtagcatacctcttactgggttcttccggggtgatgtttaaaatcttttaggatccatmatctgtgaaagaaatgtacaaagttttcagtgtattttttcttactatattcttgatacttgttaaaagaaaaactttagacaaattaaatttagcacagtttatttgagcaaagaactatttatgaatcaggcagtactcagaagcagaaggggttcagagagctccacccagcagtgagagcagtgagcttttatgggccagatacaggagcacagaagagaaatcacctgagtggctacagctgggcatctcccttatttggggctggtgtgatgagtgcattgcttgcaactggctgaaatctggctgtttgctatattcttagtttgaactaaactatgttagattgcagtttgttatgtaggaattcaaagtacagagtcaacaggttaagggcctcctgcttat

SEQ ID NO: 879228 - DNA, 615 bp, Homo sapiens
gtttaaacatgcagtggcatttcctatgtaattaaatttctaaatgtacaagcaaactttgtctacatattggcatgtataataaattattaattagaattgtcaaaaaccattaatttgaaatctgtagagcaagtcttcagcctcttgactgtaccatgagattcatttagaaattatttaaacacattaattaaaactaagtttaaatattctaaaattaatactgataaagaaggaaaattaaatcttcaagttatgttctgcttgtatttcatgatggagcagttatttgcacctggaataatttaaatagtaaaggtatatgaataaaacaaactttataattattatgtggtattttggggtggacatttccaattacagagtaaraaagattaaaaaattctctcattactattagaattagacaaagatagaagtctagcttgagctattaaggcacgtttaaaatatatctaaaaaatgaaaatggttaatttttctaaattaacaacattcaaacttttcaatcccatagtttatgaaattggaggagcccttttatatgacaatctcaatttacaacatactttggttaattcatgtatgtaa

SEQ ID NO: 879229 - DNA, 642 bp, Homo sapiens
gccatttgggaccaactgaacataacctgcttaaaagttccacctaaattattggaatccttttatatctatcttagacaaaatcacctaaattgtatctttcggagttcagagttagtaataatggcaaatatttcatctcctaaaakaaaaactattcaggaaaataaatcttgagcatgaaacttcaattttctgatttcactgaacgcgatatcgaagatgcaaaagcaaataacaattctaaaccttgatggaatatttacttcgattggctttcacccaaaagtggccatggattactgaaaatattttcagagctctctgtataactttaatggatagtggccaagatgcaaccgtggctataattagtttctctgtttatacatttcaggcacggtgaaatgtgttaataaaaaattaaaaagacacaggtttgtggtgattaagtaagattaagtaaattgttagatctatattacatttgtgcataaatattctaatgctaacttgaagaatatatgaaatattcattaattgaatattctaatctgttaaaatgaccttaataatttccattcctcaataattttactttcatttcaaaaaagattaattgaataccttttttttttttcc

SEQ ID NO: 879230 - DNA, 637 bp, Homo sapiens
  misc_feature 365: n = A,T,C or G
gttgaactagtttacagtcccaccaacagtgtaaaagtgttcctatttttccacatcctctccagcacctgttgtttcttgactttttaatgaccgccattctaactggtgtgagatggcatctcattgtggttttgatttgcatttctctgatggccagtgatgatgagcattttttcatccrttttttggctgcataaatgtcttcttttgagaagtgtctgttcatatcctttgcccactacaccgcatgttctcactcataggtgggaattgaacacatgagaacacatggacacaggaaggggaacatcacacaccggggaatgttgtggggtggggggagggggaagggatggcattangagatataactaatgctaaatgatgagttaatgggtgcagcacaccaacatggcacatgtatacatatgtaacaaacccgcacgttgtgtacacataccctaaaacttaaagtataataataataaaaaattgtattaaggaccccaaagagctattgattttgtgagtccttaatataatgtttactttattaaacattgaatcagaagttttaaaattgtttcataattttattttaaagattagaaaattgaattcaagaatgagtaag

SEQ ID NO: 879231 - DNA, 666 bp, Homo sapiens
aagagagtttcaaaactgcgctctcaaaaggagtgttcaactctgtgagttgaatgcagtcatcacagaaaagtttctgagaatgcttctgtctagatgttatgtgaagatatacccgtttcgaacgaagtccacagagtggtccgaatatccacttgtagatcctgcaaaaagagtgtttccaacctgaactttcaaaggaaggttcaattctgggatttgaatgcaaacatcacaagaagattctgagactgcttctgtttacttagctgaaattatcccgtttgcaacgaattcctcagacaggtccaaatatccacttgcagattctacagaaagtgtgtttcgaaactactccatcccaaggaaagtactgctctgtgagttcaactcaatcatcccagagaattttctgagaaagcttctgtcttgtttttataggaagttatttcctttaytacgataggcctcaaagaagtgcagttatccacttgcagtttctacaaaaagagtgtttcaaacctgaactatcaaagaaaggttcaacactgtgggttgaatgcaaacatcacgaagaaggttctgagaatgcttctgtttagttctgtgcggtttatcccgtttccaacgcaatcctcagagaggcccaagtatccgcttgcagat

SEQ ID NO: 879232 - DNA, 339 bp, Homo sapiens
ctcacagggctgaacattcctttggatggagcagtttggaaacacactatctgtaggatctgcaagcggatacttgggcctctctgaggattgcgttggaaacgggataaaccgcacagaackaaacagaagcattctcagaaccttcttcgtgatgtttgcattcaacccacagtgttgaacctttctttgatagttcaggtttgaaacactctttttgtagaaactgcaagtggataactgcacttctttgaggcctatcgtagtaaaggaaataacttcctataaaaacaagacagaagctttctcagaaaattctctgggatgattgacttgaac

SEQ ID NO: 879233 - DNA, 562 bp, Homo sapiens
tcaaagcgttgaaccctcctatggatagagcagttttgaatctctctttttgtggaatctgcaagtggatatgtggtcctctttgaagatgtctttggaaacgggaatatcttcacattaaaactaaacagaagcattctcagaaacttctctgtgatgtttgtgttcaactcacagagtttcacgttgcttttcatagagcagaygagaaacatgcttttcgtagggtctgcaagtggacatttggagagctttcaggcctgtggtggaaaacgaattatcgtcacgtaaaaactagagagaagcattgtcagaaacttgtttgtgaagactgcattcaactcacagagttgaaggttccttttcaaacagcagtttccaaacactctttctgtggcatctgcaagtggatgtttgggcctctttgaagatttcgttggaaacgggataatcttcacagaaaagctaaacagaagcattctcagaaacttctttgtgatgtttgctttcaactcacagagttgaactttccttttgagagagaagctttgaaacactcttt

SEQ ID NO: 879234 - DNA, 484 bp, Homo sapiens
tggaatctgcaagtggatatgtggtcctctttgaagatgtctttggaaacgggaatatcttcacattaaaactaaacagaagcattctcagaaacttctctgtgatgtttgtgttcaactcacagagtttcacgttgcttttcatagagcagatgagaaacatgcttttcgtagggtctgcaagtggacatttggagagctttcaggcctgtggtggaaaaygaattatcgtcacgtaaaaactagagagaagcattgtcagaaacttgtttgtgaagactgcattcaactcacagagttgaaggttccttttcaaacagcagtttccaaacactctttctgtggcatctgcaagtggatgtttgggcctctttgaagatttcgttggaaacgggataatcttcacagaaaagctaaacagaagcattctcagaaacttctttgtgatgtttgctttcaactcacagagttgaactttcctttt

SEQ ID NO: 879235 - DNA, 556 bp, Homo sapiens
accctcctatggatagagcagttttgaatctctctttttgtggaatctgcaagtggatatgtggtcctctttgaagatgtctttggaaacgggaatatcttcacattaaaactaaacagaagcattctcagaaacttctctgtgatgtttgtgttcaactcacagagtttcacgttgcttttcatagagcagatgagaaacatgcttttcgtagggtctgcaagtggacatttggagagctttcaggcctgtggtggaaaacgaattatcgtcasgtaaaaactagagagaagcattgtcagaaacttgtttgtgaagactgcattcaactcacagagttgaaggttccttttcaaacagcagtttccaaacactctttctgtggcatctgcaagtggatgtttgggcctctttgaagatttcgttggaaacgggataatcttcacagaaaagctaaacagaagcattctcagaaacttctttgtgatgtttgctttcaactcacagagttgaactttccttttgagagagaagctttgaaacactctttttctag

SEQ ID NO: 879236 - DNA, 632 bp, Homo sapiens
accctcctatggatagagcagttttgaatctctctttttgtggaatctgcaagtggatatgtggtcctctttgaagatgtctttggaaacgggaatatcttcacattaaaactaaacagaagcattctcagaaacttctctgtgatgtttgtgttcaactcacagagtttcacgttgcttttcatagagcagatgagaaacatgcttttcgtagggtctgcaagtggacatttggagagctttcaggcctgtggtggaaaacgaattatcgtcacgtaaaaactagagagaagcattgtcagaaacttgtttgtgaagactgcattcaactcacagagttgaaggttccttttcaaacagcagtttccaaacactctttctgtggcatctgcaagtggatrtttgggcctctttgaagatttcgttggaaacgggataatcttcacagaaaagctaaacagaagcattctcagaaacttctttgtgatgtttgctttcaactcacagagttgaactttccttttgagagagaagctttgaaacactctttttctagaatctgcaagtggatatttggagggctttgaggcctgaggtggaaaaggaattatcttcccgtaagaactagatag

SEQ ID NO: 879237 - DNA, 581 bp, Homo sapiens
acagagttgaaggttccttttcaaacagcagtttccaaacactctttctgtggcatctgcaagtggatgtttgggcctctttgaagatttcgttggaaacgggataatcttcacagaaaagctaaacagaagcattctcagaaacttctttgtgatgtttgctttcaactcacagagttgaactttccttttgagagagaagctttgaaacactctttttctagaatctgcaagtggatatttggagggctttgaggcctgaggtggaaaaggaattatcttcccgtaagaactagatagatgcattctcagaaactactttgtgacgattgcattcaagtcacagaggtgaacattccctttcasagagcactttggaaactctcgttgtgtagaatctgcaagtggagatatggaccgctttgaggcctatggtagtaaaggaaacagcttcatataaaaactagacagcagcattctcagaaaactctttgtgacgactgagtttaactcacagggctgaacattcctttgcatggagcagtttggaaacacactatctgtaggatctgcaagcggat

SEQ ID NO: 879238 - DNA, 522 bp, Homo sapiens
accaccgctttctctgaaataggcaaatgttccctgggcaaaagtggccaaaaactgtacctaggacttacattcttttccagttttagcccagaaattcctcactatcacatcagctccttaataccttcagtcaggagactgaggcaggagaattgcttgaacccaggaggcggaggttgcggtgagccgagattgtgccattgcactccagcctgggcaacaagagggaaactccatctcataaaatatatatatttaataccaaatttaaaacttgtccaattaaaatagtgaaatgattattactaatattaaaaatattgacaccaagataaaaataatttcatgttgacatttaaaawgattaagataattaaattttatcataagtattaaactttaaaaacctccttttatagtggttgtcattagtagtgttgatctgaatatttagtctgcctgtataagaagtgttagtgccaagaactgaatttataaatgtttccctttatttatgct

SEQ ID NO: 879239 - DNA, 522 bp, Homo sapiens
accaccgctttctctgaaataggcaaatgttccctgggcaaaagtggccaaaaactgtacctaggacttacattcttttccagttttagcccagaaattcctcactatcacatcagctccttaataccttcagtcaggagactgaggcaggagaattgcttgaacccaggaggcggaggttgcggtgagccgagattgtgccattgcactccagcctgggcaacaagagggaaactccatctcataaaatatatatatttaataccaaatttaaaacttgtccaattaaaatagtgaaatgattattactaatattaaaaatattgacaccaagataaaaataatttcatgttgacatttaaaaagattaagatwattaaattttatcataagtattaaactttaaaaacctccttttatagtggttgtcattagtagtgttgatctgaatatttagtctgcctgtataagaagtgttagtgccaagaactgaatttataaatgtttccctttatttatgct

SEQ ID NO: 879240 - DNA, 665 bp, Homo sapiens
caagagcaacttaaaagtcacaaaccctgaaccatctacccacaacccacagagagacctcccagtctcctatgcatagctaagaatagcccacttggctgcagttggcctgaaattcttgctttttgggttaaaacagttggccactattttcagtctgacactcccttttacaaatgagaagagatgccactgctcattggaagcattctcacttatttgctgttggcagaggaatgtgtcagaacctggacagtaagtcaaagagtttgctgagaggaatcactttggttctctgcctgtggaagaatcttgatttcagtggctcaagagcagacaaaagcaggattaaaagatcgttaaaaacttttagttgatttagcttccaagtcatccagaaatcttccagggagcttttcaaagaaaaggaatcctcagttatamataggaaacacctctaatcttgagggaaaccatttctgtgtaactgaagactgtacaagacagaaggaagcagacccaccctcccgtattctaaataagtaacttggatgtactttggcaaatgaatttagcacacttaacttctgtttaaaaatgccggtttttgaaggatttacagaatggctgcattaagactggtggtcaaatgggttgttcagctg

SEQ ID NO: 879241 - DNA, 668 bp, Homo sapiens
ttttctcctcttgggggaggctttcccagccgtttgctctccctgctcttaggactctagctttttccatttggcatgcagatcacgtcttctttatgatcaggagagactctttaagcacctaaggcagccctgctgcccacactccttccagcccaacctcaggagtgctgagctttctgtctcaacatttttccatgactctgcagagcacttccagggaaataaaaagtttagggttcagtttaatacagtgccaggtattctaccaggcactgatggaggcactggggggaggtcacaaaaaggatgatggtgctgtccctgcctggaggagctccactggyccagtgcatttaccttggctccttggccagatttaaatgctctgggaggccatccacaacaaggcccaactctgtggctatgccacagaatcaaggctctggtaattggaagtagcttaaatgtaatcaattctaacttggtacatggctctaggttaaatttgttggagtactttggacttcggttagaggatggggtggagtgtttaggagagaagattgggttggaaggacacagagcgtcatttctgagagcttcaactctacccatggcttctaaaataagccagagggtaaatgctacttttctgctatctttcc

SEQ ID NO: 879242 - DNA, 442 bp, Homo sapiens
gcagagacaaaatgccaccagtctctttgctaaagcatagcacgacctttattccagttcccaacaagttcctcatctccatctgagaccacctcagcctatacttcactgtccatatcactatcagcattttggtcaaagccattctacaagtctctaggaagttccaaactttccygcatcttcctgtcttcttctgagccctctaagctatttcaacctctgcctcttaccgagttctaaagttgcttccacatttttccgtaccagtatagcagcaccccactcttggtaccaatttactgtataagtctgttctcacactgctgtgaagaaatacctgatactgggtaattgataatgaaaagaggtttaattgactcacagttccatatggctggggaggccacaggaaacttacaatcatggcagaaggcacctc

SEQ ID NO: 879243 - DNA, 546 bp, Homo sapiens
tgctttgaaatgcttaataccttgtaaatagtcaataagtagcaattagtttttttattattattggacccaagttgatgttattttactatcttaaaaattttactagtaaacaataagggaagacttagagaagtaatttgtgtatttatctgttatgaayttagtttgtcattgtcttctagctttactgtcttattgtaatgtacttttccctcctcatgtcgtagatgaataaaatcaagggtagttccagttatatttcttttttctataacagctttatacaccatacaatttacacaccatacaattcacccatttagcctgagtgaattgtataattcacagtttttagtttattcaacggtttttagttgaatataatccaacggttttttagtttattcatagacttgcgcaaccatcaccacaattaattttagaacatcttcctcaccccaaaatgaaactttatactcattagttgtcaccctccatttccccagttctaggaaaccacaaacctattttctgtctgtatag

SEQ ID NO: 879244 - DNA, 690 bp, Homo sapiens
atttctatacatcctctgaaatctagaggttcccaaaccccaattcttgacttctgtgcacttgcagactcaacatcatgtggaagctgccaaggcttgggctttgcaccctctgaagccatgacctgagctgcagcatggccccttttggctgtggctagagcagctgggacacaggataccaagtccctaggctgtactcagcaggaggaccctaggcctgtccatgagaccattttttcctgctaggtcgctgggcttgtgatgggaggggctgccacaaaggtctctgacacaycttggagacatttttcccattgtgcaattaacatttgactccccattacttatgcaaatttctgaagccagattgaatttctcagaaaatgggtttttcttttctattgcatcatcaggctgcaaattttccaaacttttatcctctgcttccctttaaaacagaatgcttttaacagcatggaagttatctcttgaatgctttgctgcttagacatttcttctgccatataccctaaatcatctccctcaagtgcaaagttccacagatctctagggtaggggcaaatgccaccagtctctttgctaaaacataacaagagtcacctttgttctagttcccaaaaagttcctcatctctatttgagaccacctcagcctggatttcattgt

SEQ ID NO: 879245 - DNA, 584 bp, Homo sapiens
tgtaaattgagcttatgaattgagcattgtgctgatataaaatctgatgaaaattgcactgaattaaaggaaatgcagtaaaatgtctccagtgactaaaaaccaagctacaaaataaaatcctagtctatttaatatatttaaatttcttctctcccttttcagggctcaaatagtggcttaaatatatgagcttgtaattcctattgtttactaaattctactttggcagtaggtttcatctcttctaacctacataggactcaggcaattccccctccaccytactctgcaaatcttcaactttctcttctacatgggaccatcagatcggcataaaaatatgttatttctcctaccataaaaagcaaacaaaaaagaacaaataaagccataacattctttttagccccactttcctctccaggtactaccccatagcaaaaccctttaaaaccgttgtatataacaatgattttcaatgttctcctcccattatctctgatacccaccatgctactaacaatgttctcagccagggtgttagtgcactccatgctgctactactgatgcaaattctcag

SEQ ID NO: 879246 - DNA, 625 bp, Homo sapiens
aactgccattaatacgtttggggaaaatgatgaaatgccaagaaaagaaaaacgtatccaatttttcttttcaaaactttctctgagtctgaaccaggcttagaagacatttgtgacatcaattactgcctttcctagttgcctcactcatctaaatggaaaattattctgcataattctgagttaatatgagacaagagaaaaaatatacccagaagactttgaaagttaaactgaaagagacccaaaggccaaattactcagagacacaagttgtatrgagaaatcaagtcaataaagatttgatggcctggcacagtggctcacgcctttagtcttagcacttcaggaggctgaggtgggcagatcacaaggtcaagagatcgagaccatcctggccaacatggtgaaaccctgtctctactaaaaatgcaaaaattagctgggcgtggtggcgcatgcctgtggtcccagctactcgagaggctgaggcaggagaatcactttaacccgggaggcagaggttgcagtgagctgagatcgcaccactgtattccagcctggtgacagagtgagactttgtctaaaaaaaaagattgtggagaaggtttgacagaggagaaat

SEQ ID NO: 879247 - DNA, 625 bp, Homo sapiens
aactgccattaatacgtttggggaaaatgatgaaatgccaagaaaagaaaaacgtatccaatttttcttttcaaaactttctctgagtctgaaccaggcttagaagacatttgtgacatcaattactgcctttcctagttgcctcactcatctaaatggaaaattattctgcataattctgagttaatatgagacaagagaaaaaatatacccagaagactttgaaagttaaactgaaagagacccaaaggccaaattactcagagacacaagttgtatagagaaatcaagtcaataaagatttgatggcctggcacagtggctcacgcctttagtcttagcacttcaggaggctgaggtgggcrgatcacaaggtcaagagatcgagaccatcctggccaacatggtgaaaccctgtctctactaaaaatgcaaaaattagctgggcgtggtggcgcatgcctgtggtcccagctactcgagaggctgaggcaggagaatcactttaacccgggaggcagaggttgcagtgagctgagatcgcaccactgtattccagcctggtgacagagtgagactttgtctaaaaaaaaagattgtggagaaggtttgacagaggagaaat

SEQ ID NO: 879248 - DNA, 550 bp, Homo sapiens
agggagaaaccaggggtaaggaatttgagcttgaggcagaggcaatgtgaaattattatcaattcttttttttttttttttttttgaggagtctcactgtatcacccaggctggagtacagtggcatgatcttggctctgcctcccaagttcaagcaattctcctgtcttagcctcctgagtagctgggactacaggcacaggccaccatgcctggctacttttgtttttttttttgagayggagtcttgctctgtcacccaggctggagtgcagcggcgcaatctcggctcactgcaagctccgtcttccgggttcacgccattctcctgcctcagcctcccaagtagctgggaatacaggcacccgccaccacgcccggctaatttttttgtattttttttagtagatacggggtttcaccatgttagccaggatggtcttgatctcctgacctcatgatccgcccgcctccgcctcccaaagtgctgggattacaggtgtcagccaccgcgcccagccacccagctactttttgtatttttagtaga

SEQ ID NO: 879249 - DNA, 601 bp, Homo sapiens
catccatattgttttccgtagtggttataccattttacaacactaccaacagtgcataaggtttccaatttctccacatacttgtcaacatttgttattctctctttctctctgttttgtgtgtgtttaatagtagccattcttatgggtgtgaagtgatattgtggttttgatttgcatttctttaatgattaattgtgctgagcatcttttcatatgtgtgttgataatttgtataatgtatttgggaaagtgtttatgcaagtctttactcatttttaatcaggttgtttgttttcctgttgttgagttgcaggaatttttttatattctagatattaattccttatcagatatatagtttgtaaatattttctcytaatccataggctgcttttttgctttgttgattgtgtcctttgaacaataattttttaagtttgatgtagtcccatttgtctatttttgcttttgttgcctgtgcttttgatgccatatccaataaatcactgccaaatccaatgttatgaaacactttctctatgttttcttctaggagttttaatatcttgggtcttttagatttgtaactcattttgag

SEQ ID NO: 879250 - DNA, 591 bp, Homo sapiens
aataaataaacctttattgttccaagccattaagatttggtggtttgcatgcaggataactacagcaaaagcaaactaagagaagtggtcataactgaccagagtcatttgaactttatgctttctgcaatgaggagacagtaaagagtttaagcagtcagtgacatgaacaaatttctgttttatcaaagttcaactttgtgcttccagttaactaaacatgattatataygttatctctgctcctttctcaatatcttttgaaatgactatgagaaattctgaaaacgcataaacgtaaaagaagaaaaaaaggaaaagaaaaaaaacagcaaggaaatgaaattttgaatatgaaaagtagatggaaataactatttaacagagccaaggaattggaacctaagcctgcaaagtgggaaagtaaataagcaacaaatcattcatgacatagaacccaagagaggcccaggaatggaaaacaccaggttcctctgacagggcgaatgtgtgaggggtaggcctgaaataataaagaattaattgaaaagtattttaaaagaatggttagaccactagcttcctagttga

SEQ ID NO: 879251 - DNA, 568 bp, Homo sapiens
ctgatatttaatctataaccctttgcataagaaagtgccagggtccacagcagcctgggatgaatacttattctaaggttagttttgcacctttgtttctaggataaatggatgtttcagtgggacttgggcagcagaagttaggggcaggctgattttacccagtgaatatctctggtggagtgagggaaaatgmatttgggaatggtttttcaactgtatttctatatgcaaattgatcattgcatcagtttaaggcatttgtgttgactaatgctgcaaataaataatgatcagttttattcttacagtgccttgttacatgtggtaaaggaacaaagcagcggcaggtatggtgtcagctgaatgtagatcacttgagtgatggcttctgtaattcaagtaccaaacctgaatctctgagtccatgtgaacttcatacatgtgcttcctggcaagtaggaccatggggtcctgtgagtatatgatatgggtttttctaatttgatctatctttacagaatagcacaaaagttgtgttatatttactcctcccttagtggatgca

SEQ ID NO: 879252 - DNA, 615 bp, Homo sapiens
cctggcagcagccatgtggcagaaagagagaatctatgcacctgggggagggagagctcagtgactgtgggactctgtattggaactcagtgctgtcaacactgggcagaactcagctgatacccacagagggaacatatagaacagctctagacagaaggaatcgtccatcccagtggtcagaacttgagttctggcaatctctgccaccacaggcagagctctggggtcctaaacaaacttaaaaggcagtctaggccaaaaagactacaactcttcagcaagtcctagtgctgtgctgggctcagagccagtggacatcgggggcacacaacctagtgagacatcaacaggggtggctaagggagtgcttgcgccaccccatcccaacatcaggctgcayagctccaacctgaaaaagacactccttctttctgcttgaggagtggagaaggaagttaagaggactttgtattgcaattaggataccagctcagccacagtagaatagggcacctggcagaatcatgagcccattctaagccctagctcccagaagacacttctagacacaccatggtccagaagggaacctactgccttgaagggaaggac

SEQ ID NO: 879253 - DNA, 647 bp, Homo sapiens
cacggagattacgaacccctcccaactacccatgcatctttaggactggagatgttaattacagtcctctggttctcctacccctaggtttgtacttcagcaaaaatgataaaggatgtttcccacagagacctgagaacttgggaattatttttcttgaatctaaaagaaatcaattgattggccttcacagtgaggggcaagtctatatagcatagtgccatgagctgtgaaaaaggagcctaagcccatcagttctttcataacacgaccaggcctctctttcaataatactatttataatacaaaaatagaagtattgggaaagattttgccttttcacacaaacagacacatgtagtaagtaacagtgttggttcaaytgtaagacaacagtttcgtaacatctttaggtttttaaaaggtcatgagattgaactacccatttaacctggattgggcagaactagtaaagatatcaggcttttagtataaaggatacaaccctacagtttcacagatacaaattttgaatatctttatactatctaataaaaatgagtttgcaaaaattattaaacatgtaaataaactggtaattgagctggcttagctgagagaaaaggctacttaaaaactttcgcaca

SEQ ID NO: 879254 - DNA, 599 bp, Homo sapiens
aggtttcagccatgagaatagtgaaagtcataaaaattgtattctggatagatttgaaagataaagacaacaggagtttctgaagtactgtgaattgtgagagaaagaggaaacaaatgacctgttacattttcatacacctgaaaggcaaaggctcattctccttatactgggacactaatataaacattataaaaggcttttccaaccaggtgtatcagctggtgatccakaagccatgacagaatgaggaatgccttctcattgttcatctaacatttccattaaagaaaatggaatgtttcccttctgcccacttcctagcatcacttcctttttattttaataattctgtagccaatcataacccctgtgctggatgagatgacagaaacagaagtctatttgtaaagaaaacagataaattaagaaagaggaaatatgaaatgttaagattgttatgatgaattaccttctgttaatgatatatactattattttgaaggggaaggcaaataatgcatgaaagtggactctaaaataaaagaaattttcttattacaaaaccaataatgataagatagcaccaaactagtaat

SEQ ID NO: 879255 - DNA, 664 bp, Homo sapiens
gtgatgtgcacttatatctttagtatgaatgttaaaagacaaaactatcttaaggagatacaataattaaaacatatgcaatataaaaatgtaaattatgatatcaaaaaatcaaagtgggggcaagagtgtaacaaaagtatcaaagtttgtcagaggggcttaaaaaaagtaaaattgctatgaacttaaagtaacctattatataactataagatgttttttgtaagcttcatggtaaccataaagaaaaattgcatgatagaaacataaaaagtaaaaagtaaaaaatcaaagcacaccactagagaaaatyacttaagcacaaatgaaaacagcaagagagaataaaggaaaaaaaaaatctacacaacaactaaacaacatttaagaaaatagcagtagtaaatccttacctatcaatcattaccttaaatgtaaatagattaaattctccaataaaaagacatagggtggctgaatggattaaaaacaacaacaacaagacccaagtacatgcttgaatagtaggaaactaaatttaacagcatattaaaaaggtcattcatgctgacctgctggaaagctctacattcctatggggtgtggggagggggtaggcaggtgagcaggagcaggacaagacagaccactggtgaaaggc

SEQ ID NO: 879256 - DNA, 540 bp, Homo sapiens
aacttacaatgtattatcctagtacatccactactgagtttggattatatttccctacaaacttaaaaatgcaataaaaagtggccttgatttagattctgcctgattcatggaatgacaaaaactaaccttgaaaaatttaatacaaattttagatacataattttttaaatacgaggctgaaacaaatagtatttttcccttttggaacacattcatttgggtttacattttttttttgttttttttaagacagagttttactctttcacccaggctggagtgcagtggtgggatcttggctcactgcaatctctgcctcccaggttcaagcgattctcctgtctcagcctcctgagtagctggatttmcaggcacacgccaccacacctggctaatttttatatttttagtagggacagggtttcaccatgttggctaggctggtctcaaactcctgacctcaggtgatccatccgcctcggcctcccaaagtgctgggatcaggccagcctaaatgttatatcttaaaatgtattt

SEQ ID NO: 879257 - DNA, 464 bp, Homo sapiens
agtagtgattcctctgatagatctgggaagaataaatttaaaatcttttggaaagagttcatcattctagatgccattaagaacacttgtgatcatgggaggaattcaaaatatgaacatgaacaggagcttggaataagttgtagatgactttgaggagttcaagacttcatscaactgttgtggatgactttgaggagttcaagacttcatggaggaagtaaatgcagatgtggtggaaatagaaagagaactagaattagacttggagcctgaagatgtgactgaactgctgcaatgttatgaccaaactttaacggatgaggagttgcttcttacggataagcaaagaaagtgggttcttgagaaggaatcttgaaagagtgtggacgttgttgaaatgacaacagggcatttagaatattacataaacatagttgataaaccaatggcaaggtttgaga

SEQ ID NO: 879258 - DNA, 646 bp, Homo sapiens
tattgtgagggctaattaagataaatttgttgagcctacttgataaactttaaaacactaagtaagatattatctgacacttattaatagtaagaatagctcatatttactgaaaatttgttttatgctggggctggacttcaaatccacccaatatagtgtctttatggtacttaaaaaaagaaattccaacctcatgtaacaatttttttttttttttttgagacggaatctcgcaatgtcrttcaggctggagtgcagtggcatgatatctgctcactgcaacctccacctcccgggttcaagtgattctcctgcctcagcctcccaagtagctgggattacaggtgcctgccaccatgcctggctaaatttttgtatttttagtagagatggggtttcactatgttggccaggctggtcttgaactcctgacctcatgatctgcctgcctcagcctcccaaaatgctgggattacaggagtgagccaccgtgcccggccttaagtaacaattttttaaatttttatattattacacaatctgtatcactggctgaagtcataaatgggcttaaatgctcacacatacccctatgtcaatgcacaacacagctagtagcactcatactcaatgttcccaactg

SEQ ID NO: 879259 - DNA, 646 bp, Homo sapiens
tattgtgagggctaattaagataaatttgttgagcctacttgataaactttaaaacactaagtaagatattatctgacacttattaatagtaagaatagctcatatttactgaaaatttgttttatgctggggctggacttcaaatccacccaatatagtgtctttatggtacttaaaaaaagaaattccaacctcatgtaacaatttttttttttttttttgagacggaatctcgcaatgtcgttcaggctggagtgcagtggcatgatatctgctcactgcaacctccacctcccgggttcaagtgattmtcctgcctcagcctcccaagtagctgggattacaggtgcctgccaccatgcctggctaaatttttgtatttttagtagagatggggtttcactatgttggccaggctggtcttgaactcctgacctcatgatctgcctgcctcagcctcccaaaatgctgggattacaggagtgagccaccgtgcccggccttaagtaacaattttttaaatttttatattattacacaatctgtatcactggctgaagtcataaatgggcttaaatgctcacacatacccctatgtcaatgcacaacacagctagtagcactcatactcaatgttcccaactg

SEQ ID NO: 879260 - DNA, 644 bp, Homo sapiens
agaaacgcaaattaaaactagaatgactaaaacttaaaagactattaaaaccaaacattggtgaggttgtagagcaactggaacattgctggtaggaaagtaaaatggtacaactcctgtgaaaaacagtttgacaatttctcataaagttacacacacaattaccacatgactcagcaattccactcctaggtgtttacccaagagaagtgaaaacagtccacacaaagacccgacaacatatattcataacagcattaaattacgttcaaagcmgcactgtttcctaaagccaaaagctggaaacaatccaaatgtttgtcaacaggttgatgaaacggatgatcaaattgtgacatttctatacaatgaaatattgctcagctataaaaaggaatgaatttaagattaaatggaggcacttcttcctatacttcccactaagtatagctaaaaccatggatattatagataaaacaaacactaaaaggctcttgaaggtggagagaagacagaacaattggaagccttgggaccttgggaatggcatggcagtgagttctctgggttttcttttcttcctcatatatctggaactggatgctggagaaaccactggaaagaccaatgggcgcaaacgaaaa

SEQ ID NO: 879261 - DNA, 535 bp, Homo sapiens
aaattctttatatccttattctatgagcttttttctattataaaagttaagtacttttttttaaaaaaaatcttttttgttaaaaacagacacattagcttaggtctacacaagatcctgatcatcaagatctgtgcaaaaaaaaaattattttttgagacagagtctcgctctgttkcccaggctggagtgtagtggcgtgatctcccctcactacaacctccacctcccgggttcaagcaattttcctgcctcagcctcctgagtagctgggattacaggcgcaagccaccacgcccagctaatttttgtatattagtagagacaaggtttcaccatgttgaccaggctggtcttgaactcctgacttcaagtgatccacccgcctcggcctcccaaagtgctgggattacaggcgtgagccactgcaccaggccaaaaatttttttttaattagccgggtatgatggtgcgtgcctgtattcccagctactccagaggctgaggtgggaggatggcttgaacccaggaggtc

SEQ ID NO: 879262 - DNA, 535 bp, Homo sapiens
aaattctttatatccttattctatgagcttttttctattataaaagttaagtacttttttttaaaaaaaatcttttttgttaaaaacagacacattagcttaggtctacacaagatcctgatcatcaagatctgtgcaaaaaaaaaattattttttgagacagagtctcgctctgtttcccaggctggagtgtagtggcgtgatctcccctcactacaacctccacctcccgggttcaagcaattttcctgcctcagyctcctgagtagctgggattacaggcgcaagccaccacgcccagctaatttttgtatattagtagagacaaggtttcaccatgttgaccaggctggtcttgaactcctgacttcaagtgatccacccgcctcggcctcccaaagtgctgggattacaggcgtgagccactgcaccaggccaaaaatttttttttaattagccgggtatgatggtgcgtgcctgtattcccagctactccagaggctgaggtgggaggatggcttgaacccaggaggtc

SEQ ID NO: 879263 - DNA, 617 bp, Homo sapiens
ggcagaaagaatgattgaaggaagcccaggataagcttatcctaaacttcacaattaagccaaagccactggaagggcttaatttttcaaggccagaggtctgcctctttggagctttcactcttctgtttgaagaatgacattcatacagcactggggtgtgtttcctgaacaacttgtgtaaaacaaaaggcccctgggagcctgaggttctgtccaggatagataatgagacatgctgactctgyccatcgttccccaaatgatgtctcctcaccttcctgggttatggaattgtagagcagggactgtgacaacatgcttctgagctgatgccctgccctgtcttctagacaggaactgtgggaagaggtcaaagatctggccctgagcccctggattttcatgcaccccgaaaaatcctccttgatttcaattcaccttaagatatctagagtttgatcttttaatcgaatggccatttaaataaaattttaaaaagcaattgcagcccaaatatctccttaatgtgatgttttcaaaagttgtttcagaatttttaagcaaaacgcccgcctgtacttattgtaatgattttctcaatacctcatctcccc

SEQ ID NO: 879264 - DNA, 511 bp, Homo sapiens
catgcacctgatctatgatgggttcttatttttgagaatggatgggtatgtttaagtacatttttaaaaattgtagtacaaaagtaatacatgctcactgtaagacattgaaaactactgaagcatatacatttaaaatatcctcacccccagccaccccaactctcactctcctacggcagccagtataagcaaaattttatatactttattgaggtgttattgacattcaaaaagctgtatgtatttaaagtrtacaacttgatgagtttggaggtgagtagaggcctgtgaaaccatcaccacaatgtatgccataaacatactcatgacgtccaagagttttcttctgccctctttatgatggtgattagaacatttcacataagatctctttgtgaacttttaagtgtgtgatacagtgttgttaactctaggtactatcctgtccagtagatccgtaggacttgttaatcttgcataactgaaacttaaactttgtaccctttga

SEQ ID NO: 879265 - DNA, 589 bp, Homo sapiens
tcccttcaacagggaggattatgggctgacatctcattattgaagtactgaaacatgaataatttgtcctacgttgataggagatactgaaacccatatagttatgaggtcatagctgtaaagaataaactctaaaattattacaaaagaataataatgggaaagaaatactaatgaaaactatgattgtatatamatcccatgtaatttacatatattcatcatcttttgttaaataaatatggttatcagacgtttatcttgtttaaataaaattgcgttttttaaaaaagtctattgctgatatttccaaatttcctatgaaattaagtggcagagaaggaatataaatgagagaaaaaagcaaaagattcatgagttaatgaagtagtcattcttgggactgaaaacaggtacatccttctctctttggtttttcttatataatataatatgaaataataaaaatgccgagtcattgcatgttcagtgaacagagtaaatttgaatacagtatcagaagtgtggcaaagtaaatataaatattatttataaaggaaatctgactttccaagcatatgtgaaatta

SEQ ID NO: 879266 - DNA, 589 bp, Homo sapiens
tcccttcaacagggaggattatgggctgacatctcattattgaagtactgaaacatgaataatttgtcctacgttgataggagatactgaaacccatatagttatgaggtcatagctgtaaagaataaactctaaaattattacaaaagaataataatgggaaagaaatactaatgaaaactatgattgtatataaatcccatgtaatttacatatattcatcatcttttgttaaataaatatggttatcagaygtttatcttgtttaaataaaattgcgttttttaaaaaagtctattgctgatatttccaaatttcctatgaaattaagtggcagagaaggaatataaatgagagaaaaaagcaaaagattcatgagttaatgaagtagtcattcttgggactgaaaacaggtacatccttctctctttggtttttcttatataatataatatgaaataataaaaatgccgagtcattgcatgttcagtgaacagagtaaatttgaatacagtatcagaagtgtggcaaagtaaatataaatattatttataaaggaaatctgactttccaagcatatgtgaaatta

SEQ ID NO: 879267 - DNA, 632 bp, Homo sapiens
ggccccatgatggaattagtatctttgtaagaagaggaagagagactcatctctctccctgtgtgaaagatttctttgaaataaaaaggttttcctattataacatataggccatagtgcactaggaaaattgctctgtttcatgccactccaggcttttaatgtatgcagatgtggtatgtgcacctgttaaagttttgagtatgaaaaaagtgttaggggaaacacagagatgttaacataaagacatgatgttactgagtcacaaatcaatgtttaaaacagcttacttccagatttcttgttatgtaagagaagttattccctcttatttaagaaactattatttggatactatatttatttcattctattgatttatatctgaaatcattcctctgatataaaagatattcaaaatgcttacataaatgatgaataacctgttcayaggtagtaagatcctgaacagtatagcaaagttaaatgtctaacaacatcaagtttattgagtaattttatgttgcataacaagcatccctaaactcagtgctttaaacaactatcacttgctcacagtactgaggatgagcaatttgggctatgcgcagataagaagttctgttcttctt

SEQ ID NO: 879268 - DNA, 620 bp, Homo sapiens
caaatttacaagaaaaaaaaaacatcaaaaagtgggcaaaggatatgagcagccagttctcaaagaagacatttatgcagccaacaaacatatgaaaaacaagctcatcattactggtcattagagaaatgcaaatcaaaaccagaatgagataacttctcatgccagttagaatggcagtcgttaaaatgtcaggaaacaacagatgctggagaggatgtgaagaaataggrgctcttttatactcttggtgggagtgtaaattagttcaaccattgtagaagacagtgtggcaattcctcaaggatctagaactagaaataccatttgacccagcaatcccattactgggtatacacccaaaggattataaatcattctactataaacatacatgcacatgtatgtttactgtggcactgttcacaatagcaaagacttggaacccacccaaataacccatcaataatggactggataaagaaaatgtggcacatatacaccacagaatactatgcagacataaaaaaggatgagttcatgtcctttgcaggaacatggatgaagctggaaaccattattctcagcaaactatcacaagaacagaaaaccaaacaccg

SEQ ID NO: 879269 - DNA, 572 bp, Homo sapiens
tgagtgtggttgacagcctcacgtgtctgcacctctgcttcgtttttgggagctattccatggtacagaattaaatcaaggctgtcagggaattatatttcttcaaaaaaatttgaccttgatatagtttgttatctcttacgttttcattaaagataatttaatgactggaaaactgtttttacataaatatctgcaagctatatctttgaaataatttctcctcttttgatctaacctttttcaaataaatgtttgttaactatgtaattaaatttccttgacttattcttcaaagtgcattactttatttatagcatctcattaaaagttttcatatatttaaaaaattttagccctgtcatatgtttgcaggcaagaaaactaacttgtaaataaaatccctttgtactaccctttgctttagcygtatagaccatcatattattactttctccgaggaatagtctgtgttgccttttttggagattatggatcaatatttctaaatttatgctgcattgactgcaaactttgcaggatagtttgtttgaccatagtattttaattat

SEQ ID NO: 879270 - DNA, 686 bp, Homo sapiens
tatttgtcgtaatactctcccttcccttgacccccacttccggataggccccactgtgtgacgttcccctccctgtatccacgtgttctaattgttcaactccctcttatgagtgacaatatgcggtgtttggttttctgttctgtgttagcttgctgagaatgatggcttacagcttaatccgtgtccctgcaaaggacattaactcattcttttttatggctgcctagtattctatggtatatatgtgccacattttctttattcagtctatcattgatgggcatttgggttggttccaagtctttgctgttttaaatagtgctgcaataaaygtatgtgtgaatgtatatttatagtagaatgatttataatcctttgggtatatacccagtaatgggattgctgagtcaaatggtatttctgattctagatccttgaggaatcaccacactgttttccacaatggttgaactaatttacactcctacagtgtaaaagcatttctatgtctccacagcctcgccagcatctgttgtctcctgactttttaatgatggccattctaactggcatgagatggtatttcagtgtggttttgatttgcatttctctaacgaccagtgatgatgagtttttttttttttcatctgtttgttggccacataaatgtcttcttttgagaa

SEQ ID NO: 879271 - DNA, 527 bp, Homo sapiens
accacactgttttccacaatggttgaactaatttacactcctacagtgtaaaagcatttctatgtctccacagcctcgccagcatctgttgtctcctgactttttaatgatggccattctaactggcatgagatggtatytcagtgtggttttgatttgcatttctctaacgaccagtgatgatgagtttttttttttttcatctgtttgttggccacataaatgtcttcttttgagaactgtctgttcatatcctctgcccactttttgatggggctgtttgttttttcttgtaaatttgtttaagttctttgtagattctggatattagacttttgtcagatgggcagatttcaaagattttctcccattttgtaggttgcctgttcactcagatgctagtttcttttgctgtgaggaagttctttagtttaattagatcccatttatcaatttttgcttttgttgccattgcttttggtgtttcagtcatgaagtctttgcccatgcctatgtcctgaatggta

SEQ ID NO: 879272 - DNA, 653 bp, Homo sapiens
tgacttgatcatcgtggatttttgatgtgctgttggatttggtttgacagtattttactgaggatttttgcatagatcttcctcagggatattggcctgaagttttccttttttgttgtgtctctgccaggttttggtatcaggatgaccctggccttataaaatgagttagagaggagtccctttttttctattgttcggaatagtttcacaagaaatggtaccagctcctcgttgcacttctggtagaatttggcagtgaatctgtctggtcctgggcttttttggttggtagggtattaattcctgcctccatttcagaacttgttattggtctattcagggattygacttcttcctggtttagtcttgggaggatgtatgtgtccaggaatttatccatttcttctagattttccagtttatttgcatagaggtgtttacagtattctctggtggtaatttgtatttctgcgggatcggtggtgatatcccctttatcattttttattgtgtctatttgattcttctctgttttcttattagcctaagctagcagtctgcctattttgctaatcttttcaaaaaactagctcctggattcatttgattttttgatatattttctttccaaatttttctactggttattt

SEQ ID NO: 879273 - DNA, 566 bp, Homo sapiens
aaatataccaaacgaagtaccttctttataacacaggtttaataaacatattgaaaaaaaaggtgttaattaatgagaggattaagcactcaattctaacaaaaatgaatacacattacaagtttttaaaccagtttgaattaarggttttttttgttttgtttcttagtttttagaaaagtagaattaaggaatccaggatccaaatgagatctctatgtcttccaaacctgctttaaaaatttttctcccttgttttaagtgttagagagatgcaaaagatagtattcgggattatataattttgtttatgactttagttattgaacagaaaatagtttaatcaattaacacaaatacttagaaaacatttttctacatatatagaaaagtaaagagataaagagtttaaaaataaaagtaaagagaaaaaaacagaaaataggtcagaattgggataagaattctaagaaattgggaacgttaaagaaaaaagagaattaatcaccagaaaaagaatgctagcgattaattcaatagaattatgttcaaaacacttcatgcga

SEQ ID NO: 879274 - DNA, 630 bp, Homo sapiens
aattcttggcaatactatggtgttgttttcccttgggaagaggtccagggctgacattgtactacacaaacataggcctccaagtagaagtacaattcctaggttaggacaatagatttagttagctttcctggacacaaatctgttcttttttattttcctcattggaatagatttttaggaatttctataataggttcagctctattttgtggctaaagggacataatggagtgcaagttaacacaagatttcgacattcaccaagatgatgctttattggttttttttggtgtttaactaaaccatgagataaggaagaaaatataaacttggagraaaagctgacccttaaccagaaattatagtggttgacattggtgacttgctaatagggccgatatagtaggtaataattaatatactggtgtgtttgtgtgtgtgcctgtgtgtgtaagggaggggttagctcagctatatgagtgatgccaaatacaccatgcttcaaggatgctgtattaaagatattacttattttaacaaataaatgcaacttgagagggagtcaattctgcagtgtattaattccttaacatcttatccttaatcaggttctcacctcactgaagc

SEQ ID NO: 879275 - DNA, 555 bp, Homo sapiens
cactctccgggcacaggagcctaggtcaccccctatcctcatgcagaggacttggggctaaggaggtttcccagttccatctctaggcacaaccctgggtgcttggtggccccccactggattctccctcagccctggtgcttttgctgacatcaagggatctgcatgtggaccttcccagtctggatctgcccattttgcaccctgcccccactacctgggggctgaggagtgagctcagatcacagtgcactccaggaatcaggccattgcctgaggcaacagacagcttctcttagtaaacaggaatcaagtgcatacccagcttccttggccacagctggctcttacccctaagtgctatctactggattatagttctaactgcacagtccaatacaaaaccttccaagggaagtgcatagttccatagaagcaaagtcaaaagaccatacctaccagcattatctacagtcacaycccttagagagtagaggaaagggaaagagaaagaagaaaaataatagtattatagggaaaggaagaaatagaagt

SEQ ID NO: 879276 - DNA, 576 bp, Homo sapiens
actcagagaacatacaatgtttcttctcaagttatacaaattagtaccaaagcttcgattagaattagattgagtaatttacaatcaaatgtcctgttttgctttctacaactgtattaaataacaaagtaagagtagaaatagaaaaagcctaacatttttaaaaagcacaataaaataaaactaaataacagaataaggaatcaaacaagaacaatagcactatcactattctatgccaggccctttactacctcacaytcaaattacagcaatagcatcacagcaacttgctcggcattgcatgcttcacccttgaaatttacctgttatagttgacagaattcagcttgttaagacaattacagtctgactagactgtctgtattttctaccttataattcctaaactctttcacctatttttcaaagcccccttcatactacccacttagaagttaaagctgttgtcatatcttcatgtcttaatatttctatattttaatctgatgctgaccacacaataggggctcaacaaatatttcttaatgagttcattcagaaatatcatcccca

SEQ ID NO: 879277 - DNA, 642 bp, Homo sapiens
ttcaaagcttccatttttgttacatagcattgttcaacagcatcatctgacttttcttattgttatgtggccagttttagcacactaactcagagagaatgcagatgctgatgtctgtgggttctttgatgtatttttctaccatgttttgaatcttaacctttggtcattcttatttacagttttgtatttttgttgaaataaaagtctaaatggcaatgagggttatttttgtaaaaygagttcccactgtgtagtaccatcccataaacaatgcatacggtttaatgttcaagctgaaaatcagaatcacattttaaaatgactgcagagtaacataggctgaagtcagtttctacaatttaattagatttatttttatgagaagatgttcaagattattttactcaagatattattttaggctttctcctacagggcaatgattattaacactattttctgttaaccacagcattttgactgaggagtaattctaccttcacatttttgtcacatggtataactaataggctaaatttttccagcaaagcacattatatgtgtaaaaacaattcaaacccagtaaatgcagttacttggaaacattataaggaaatgtcacaccataacatttacctg

SEQ ID NO: 879278 - DNA, 634 bp, Homo sapiens
gggcctggaagcaatgacaccccagtagcaatgaacacacctcacacccagatcttgttttctaatatcatccttcaataaaaggaaccagggctttttgaagaaatggctgattttaggaccggggcaggaactatacaagataggcctggaacattttgtagtctgagaaggtaaagaagtatgcgaaaaacaaaaacaatgaacaaaaacaaaccacacgttgttggggtatattaaaggagcacaggaactaactaaaagagttctcattggccaaagctagaactctgagcaacaaaacaaataaactagtattgtattataacccacagtatggaaataaatatccatgagtcygtgctgatgtaaataaatgactgaataaattaatgcatggaggagagagacaaatctcccatgtgcaagaatttcaaattatttatgtagatattctgccttcaagaagttagagcatgactctccactcactgagtgtggactgcccagagtgattctttccaaagagtacactatgaaaagtgggaaaaataactttacactggaaacgtctgataaactctacctcagctaggtgattacggtaacatcaacagtgacaagtcatgctgat

SEQ ID NO: 879279 - DNA, 599 bp, Homo sapiens
cttgtgaccacaggcaagtgcctaacctctccatgccttagtttctttgtgtataaatgtagataaaagtagaatgtaccttgttatattattgtggatactaaacaggaccatgtacaaatatagcttcacataatacttcatacaaacttgayctttgttaattgttaattgacaattgttagttattatgcagaaccatatgaaatggctgatatttggccatttagacctaaaaaatgccaatttcacacgattcaacctgatactattattgctccactggtcctgctttagccatactgagttcatttggttctccaaacacacttctcccatcacccttcactgggctaatttctactcaccttcaagtctcagctaagatgtaggaggtcatatgcataaatcccccagactgggtaaggtgctgtgctacgcttccattacaagtctttgccccttgtaatgtacatatcatactattccgtacataaccacccactttttcgttcatcttcctaaccagaccacaaagactctgcgtgggagtgtccagctggctgtcatagaccagggcctcgcctgcagcctgttgt

SEQ ID NO: 879280 - DNA, 702 bp, Homo sapiens
actgtgcattggtttgcttaccctgagaagacctgaaagatgagattatgatctttcatctcaaattaaagaaggcttgtctcaggaaccatttgacaagttcaaacgctgctgacttagatactggcctcttatcagcaccttcaatttaatgtttggagtgagtggtaggcctatgttgttgaatttttatcatatttcccctcatcttggtagattatgctttaattcactattctgtgacttatcaatattgtctrttttatgctattgagctataataaataaatagcgtaatgcagtacttacaggtagtgaaattgaggcaaaatgggcttgtgacataggctagatcaaaaaggtattacctgcaagttaataagtagctcagattctgctataatttgctttattcataggtcttgtgggggaaaaaataaaataagctttctcgttctgataatcccttaaaagagtcatgaagttttgatctttggcttatttgatttatttttaattgatagaaaccaagccattcctgtgcctctcaaaaatctatctgtggaaaatattttaacttttaaccaaattatgtcttcccagtattagtgaccctctatgttaaaatgtttttcccttgaaagttagaactccaatgttgttagaagagtttgattctctttttgaagaatcatagaaaca

SEQ ID NO: 879281 - DNA, 702 bp, Homo sapiens
actgtgcattggtttgcttaccctgagaagacctgaaagatgagattatgatctttcatctcaaattaaagaaggcttgtctcaggaaccatttgacaagttcaaacgctgctgacttagatactggcctcttatcagcaccttcaatttaatgtttggagtgagtggtaggcctatgttgttgaatttttatcatatttcccctcatcttggtagattatgctttaattcactattctgtgacttatcaatattgtctgttttatgctattgagctataataaataaatagcgtaatgcagtasttacaggtagtgaaattgaggcaaaatgggcttgtgacataggctagatcaaaaaggtattacctgcaagttaataagtagctcagattctgctataatttgctttattcataggtcttgtgggggaaaaaataaaataagctttctcgttctgataatcccttaaaagagtcatgaagttttgatctttggcttatttgatttatttttaattgatagaaaccaagccattcctgtgcctctcaaaaatctatctgtggaaaatattttaacttttaaccaaattatgtcttcccagtattagtgaccctctatgttaaaatgtttttcccttgaaagttagaactccaatgttgttagaagagtttgattctctttttgaagaatcatagaaaca

SEQ ID NO: 879282 - DNA, 613 bp, Homo sapiens
gtcttgcttctagcttatggggagaaaacattatttatttgtagctgccaaatactatattctcactaatttaataagcagccaccattttctctgcctctgaaaatttatgttggtctttggacaggtctggctgcctttttaaatctagtggtctgtgaccatggaaggctttakccaaagggaaaatgactccataaatcctcagaggctgtctcacattaatttatagtttgaaggctccaggaccctatgaaaagcctttaaacaagaaaaatcaacacataccaacacatatgtattggaagtcatcctaccttacaacaggaagtattcctaagtctttagaaagcaaagtatgtgcaaacatagcaagatacagacttggcaacacctgtagagacctgatacttaattatgaaaaaatctggtcacattacatcatgaagcacatgagtatacaaagtagtttttggtgcaaaattatgattatgatatttctgctcttgaattttgcaaacaatagacctattcatcatgtcattactgggaagcaaattaagttgctttagaagatgacatgtcactttcctttagaactcacggtagatct

SEQ ID NO: 879283 - DNA, 542 bp, Homo sapiens
atcctcagtttccccatctgtaaagctggattaatgacagtaatactgatatgcaatgcttatttgagccctagtcatgggccaagacccgttcaaatactttatacatattgacttgtttaatcctttcagcagtctgagagctgagtgtcattatcccttttctstgtgtacagagctgaagcaaggtgaattaaatgacttgcccaaggtcacacagccagtcagtgggtgaaccagcatttcagtctaggtggtatgggcccagggcctctgcttctaaccactctccactgccttgattttataggattcctctggggactcactgagatgatgcaggcaaaatgatgcagtggccccttgatggttgttatcattctttctatttattggtctactttctaaagaaaagctgaactatcctcttaaatgttcatcaggttaaagagttgcctactactaatgcttaaaagttgccggaaaaaaatgtaaatgaagccgtttccttcgtttgttccctctttcaagttcaaatgctg

SEQ ID NO: 879284 - DNA, 662 bp, Homo sapiens
ggtaatagaattaacacagaataaaaggatgaaatccaactacttgtaagtcaggaggcaacaaaaaggaagaaaacttgctatggaagcatcaaaaggctctggaattagaagtaccagtagctctgaaggtagaagagatagaggaaasggactgaaaagagcaagatggattaaaagtatgccatttaattgaaaccttcaaatcattttcctgacctcattatgtcaagggtcctattccttttttgacatgatgggagacgaattactccctggttaatttaaactagagacttttcagacttggggagacctggcatcaccaagagtgacattgatgcatgagactgaaaaatatgaggattgtcttctaaataatggcatctcccattccacttcttttactcacattccagaacatcaacatacagaattatatccaagataggaaatttgaaaaatacactcttgagaaatgaattggcttaagaaaaatgactagaaaaagggtaatttgtgtgtcctccaattccttcaataaaatgactgatacactctacaaaacaacagcagcaacaacaaaacaaacacaatgtaaacattcacagactgtgggtgttactttctgggagacattttgcctgggataagtgttccaa

SEQ ID NO: 879285 - DNA, 597 bp, Homo sapiens
tattatgatagctgctcttcatcatcttaactcctgccagttgtctaaacatcatggtggctgatgcagatagcccttagacattgacacttctaattagctcatcatccatctgcttttgtcatctctaatgctatttcctcactatgtgaaaatattttggccgagcgcagtggctcacgcctgtaatcccagcactttgggaggccgaggagggcggatcacgaggtcaggagatctcgaccatcctggctaacaccgtgaaaccccgtctctactaaaaatatacaaaaaaattagctgggcgtggtgggggcgcctgtagtcccagctactcgggaggctgaggcaggagaatggcatgaacccaggaggcggagcttgcagtgagcgcagatcaagccactgcactccagcctgggtgacagagcgagactccgtctcaaaaaaaaaaaaaaawtttttggctgaccagttggttattttttcttttcttcacccaatcctctatcaaaatttaaacgtcattcctttctattattcttaccaaaatattttaatttttttccttcctaattataaatccttctgtcttga

SEQ ID NO: 879286 - DNA, 564 bp, Homo sapiens
ggtaacaaattcccttagctttttaattgacctgccccttctctctagctgcctttaattttttttccctcagattgaccttgttgaatatgatgactctgtgtcttgccgatggtcattgtgcacagtatctcacaagggttctctaaatttcttgaatttacatgtcaacctctgtagtgagattggataatttttcatgaactgtatcttcaaatatatattttatgttgcttggtctctctcctctttctgaaatgccaatgagtggtagctttgggctctttatataattctgtatttctcagcagttttgttaatttattaaaattattttttctttatttttttctgcctgtattgctttcaaggagtggtcktcagactctgaggttctttccgcatctccgtctattctgttgttatgcttcaaattttactttgaaactcctgtagtaaatgtatttccaaagttcagcttggttctttcttaaaatgattatgtcatttttcaactcctggatcattttcatattttccttgtattgggtttcaaccttcttt

SEQ ID NO: 879287 - DNA, 564 bp, Homo sapiens
ggtaacaaattcccttagctttttaattgacctgccccttctctctagctgcctttaattttttttccctcagattgaccttgttgaatatgatgactctgtgtcttgccgatggtcattgtgcacagtatctcacaagggttctctaaatttcttgaatttacatgtcaacctctgtagtgagattggataatttttcatgaactgtatcttcaaatatatattttatgttgcttggtctctctcctctttctgaaatgccaatgagtggtagctttgggctctttatataattctgtatttctcagcagttttgttaatttattaaaattattttttctttatttttttctgcctgtattgctttcaaggagtggtcttcagactctgaggttctttccgcatctcsgtctattctgttgttatgcttcaaattttactttgaaactcctgtagtaaatgtatttccaaagttcagcttggttctttcttaaaatgattatgtcatttttcaactcctggatcattttcatattttccttgtattgggtttcaaccttcttt

SEQ ID NO: 879288 - DNA, 692 bp, Homo sapiens
gacttgccaaggataataggactagtgagtggcatctgaacacaggttccactacattgtctgctggcttcctccccacatccctaaatagtagtacattagttctgggaagacatgtgtcctgatccaatagaaaccctgtccaaatccagttatagaatgcaaaccatctgagaataaacaggaagagagcccttcctataaggcacaagcttaggctctctgtctttttctccaaatgcctaaatttttcatcagttattatataccctttgtcctcttggtagacacatctctgagttagatacagatatgagtgagacatttctaagtcaaatgctgttctcccaaggggcaaagccatccagttatacttgggtctgtgtgaccactgagtttgacaatacagcatccttttcaaagagctgtgcagactctgccctgcctgtctgtaatggaagctctctgatctgctggcccaaagcttatctctgctgccttctctcctaacactgcatactctmcctccctgcttaacagctgcatggtggtagataatcacttcgcactgcctgcccccagcctctcctcaaactaacggcaacatgctggctacctgtccagaaatatattctgcctcaccacctggtgcctgctcctgtgacctgctctcttgtgtgtttaattcacaa

SEQ ID NO: 879289 - DNA, 597 bp, Homo sapiens
tgaatgggttatatgcaaatactatggcattttatataaaggagttaagcattcacagattttggtatctgaggggagtctggaatcaatcccccatggataccaagggacaacgcttttgatgtgcattgtttgagcttgtgtttaaatgctgagtgagattaagcagctgtgtgccccttctcagggatatgatggagctcaaagaggacaggacaacatggcagcaagagccacttccaattgaatcatgtgggcatgagtggggactgccagtgawttcgcccggttgtggggatctaagggagacctgaggcccggtactaagctgatttggagaacaaagggaacaaagatgtgatcggcccacatctctgacgttcaggagaatcagagggaagaggctacagctgcactggggcctttggtaataggatggcaccgaaggacagttgtatccaaccaaagcctttatttacaaaactgtccaggtctgtcaaggtttatgtatctggtaaccaaggccaagtgtgtgcttcccctttaagaatcttctgaattttctgccggttgcagtggctcacgtctgtaatccca

SEQ ID NO: 879290 - DNA, 554 bp, Homo sapiens
atatttggagaattggtcattggatagcaaaactccaggggaagatcatcttccaactctgtcctctgtctagctcctcatccatcctgctgagagccacctccaccacccaataaaacccgcattcaccatccttcaagtccgcatgtgacctgaktcttctgggacgctgaacaagagcttgggatacagaaagctgtcaaactgcccttgcaaaaaggcagagggtccactgagctggttaacacttaagccatcagcagatggcaaggctaaaagagtacactgtagcctatgcccccttaggctcctgcacctgttcgtctgcatgctccaccttccataagggggttgagcagcagcagtgaccaaacagatgagccacacccctgtcagatgccctgagagtggggtcagggaactctcctttttcagttttgatttgcatttttctatgatcagtgacactgaacttttaaaaatatgattcttggccacatgtgtgtcttcttttgagaagtgtctgttcatgtcctttgcccacctttttaatg

SEQ ID NO: 879291 - DNA, 607 bp, Homo sapiens
ttttataatcagaagattgagatctttaaaggacaaaatggaaaataaaattaggtttggggtaaggaatcctacttggacactacaaaaatagaaggaaaaaaaggtgaatgaataattggcaaaacaaactctttttcctgtaagttcccttttcccaaattcttgccatcatgctaaaaaaagttgtctcgtgggttgatttttctcagaatcctgatgcttgttgttaataagaatttttttcatgtgccaaagttttgtttttcgtgtgacttctgcggcaattttggtcttactgaaaatatttttttaagtaccrtggtaaaagttactggtaataagccaaaaggagaatttaaggtgaacttctatacaatttacttttattgactaggggaaatcaaatgcattgcccaaggtaattgaagtcagattattgtaggagaaatatcaattctaattaaaaacaaagtgtgagtgcttatttccagtttcaaaacttacattttttaatttctacctcatcctttccccaacaagacatatttttgctatcaggctaacataaagtgctgctactgactgagccagcctaatggaatgg

SEQ ID NO: 879292 - DNA, 607 bp, Homo sapiens
ttttataatcagaagattgagatctttaaaggacaaaatggaaaataaaattaggtttggggtaaggaatcctacttggacactacaaaaatagaaggaaaaaaaggtgaatgaataattggcaaaacaaactctttttcctgtaagttcccttttcccaaattcttgccatcatgctaaaaaaagttgtctcgtgggttgatttttctcagaatcctgatgcttgttgttaataagaatttttttcatgtgccaaagttttgtttttcgtgtgacttctgcggcaattttggtcttactgaaaatatttttttaagtaccatggtaaaagttactggtaataagccaaaaggaraatttaaggtgaacttctatacaatttacttttattgactaggggaaatcaaatgcattgcccaaggtaattgaagtcagattattgtaggagaaatatcaattctaattaaaaacaaagtgtgagtgcttatttccagtttcaaaacttacattttttaatttctacctcatcctttccccaacaagacatatttttgctatcaggctaacataaagtgctgctactgactgagccagcctaatggaatgg

SEQ ID NO: 879293 - DNA, 612 bp, Homo sapiens
tattccttttctctccccctttctccccttggcaccaaaaaatttctggcctgtataggaagacatacctggcatgaaagttgaaaggattatgaaatcttgcattggatattttagtcgacagttttcctttggacctttcttcttaaaaactaagctctggcacattgttgtgggttgttttctttctttctgtggctccatgcacatgctgttgcttttgtatttattctcagcagggcgttctctgacacctatatcaatcagaaccttcctttcaaaacagagccaatgtggagaagatctggaggtctgtactggagtcttgctttgagatgggcttggaaatcaaacaagaaatgcaaaccttattaatcaaaatgggctcaaaggagatttgtctgacagcactgyagagagcagtaataaaattaaataagtgtctgtgagtagttacacaggaaaaaatgtttcttgtaagacaacagataaatggtaaagcacattaaggtttgaaagcttcttttggaggagggctgtcagagtggccatttacatccttcagctgggtgccagagtcttctgtgcatcctaatagctcctctgctgtgt

SEQ ID NO: 879294 - DNA, 608 bp, Homo sapiens
tcaagctatgttttataaatcttatgtcattcaaaaatctaaatacattttatttgaaaaagaacagtcacttatactcttttacttactctttatgaaacaggaaaatagggtgaagaggcagggaaaatagggtgaggaggcaggaaaatagggtgaggagctaaggtggattcacacttcagctaggacaggaaatatcctctccatagggcgtargctgtaaatgactttgtaactttacttcattctctccatttacgtagggtgtaccccaactaaccaatggaatcctctagagggtatttaaactcccagaaattctgtaacagggcctttgagccccactatgctcaggcccgctcccacactgtgaagtgtgctttcattttcaatagatcccttcattccttccttgctttgtttgtgagttttgtccaattctttgttcaagatgccaagaacctagacaccctttaccattaacatttaattaacatttgatcagctcaagtttaatggtttaaactctcaaacaattaattccttgaataaattagttaattaaatccccttaaacatgttaagctgaatttctaaatttagtg

SEQ ID NO: 879295 - DNA, 608 bp, Homo sapiens
tcaagctatgttttataaatcttatgtcattcaaaaatctaaatacattttatttgaaaaagaacagtcacttatactcttttacttactctttatgaaacaggaaaatagggtgaagaggcagggaaaatagggtgaggaggcaggaaaatagggtgaggagctaaggtggattcacacttcagctaggacaggaaatatcctctccatagggcgtaggctgtaaatgactttgtaactttacttcattctctccatttacgtagggtgtaccccaactaaccaatggaatcctctagagggtatttaaactcccagaaattctgtaacagggcctttgagccccactatgctcargcccgctcccacactgtgaagtgtgctttcattttcaatagatcccttcattccttccttgctttgtttgtgagttttgtccaattctttgttcaagatgccaagaacctagacaccctttaccattaacatttaattaacatttgatcagctcaagtttaatggtttaaactctcaaacaattaattccttgaataaattagttaattaaatccccttaaacatgttaagctgaatttctaaatttagtg

SEQ ID NO: 879296 - DNA, 637 bp, Homo sapiens
cataatagtgtcattgtacatggtccataaacactagaatgcgagttctcaacatagaaaagaggctagcaccataggaggtgctgaaaaatgtggaattagtattgagtgattcatgtacacattaaaactgcaaaacacctgatcttcagggcaccaagaaataggcagaaattgcaggccagtagctcctatgctggttgatatctgtaccaactggacaaaccacttctaaatcttcttgctctccctgtatctagatttttttcacttctattcaatgccctccctttcggtccaaaatacaaataccttcctgtcaagtggtaacaaaagctttgttggagacttggggttaagctaagattactaatcagataagtggtttaggatttgctcaacctggttgttttgaatatttattagaccsaggaaactctcttaaaaagatcctgaggattaggccctgtagcaaaatttatctgcatttctttgttaattcatctacacctccaaagggcatgtaatggggcaggaaacatggttggggacaagggagcagaagtaaccaaataattgtgaaatttaaactacagattttttactccttcctgaggttttaatggccaccttaagt

SEQ ID NO: 879297 - DNA, 637 bp, Homo sapiens
cataatagtgtcattgtacatggtccataaacactagaatgcgagttctcaacatagaaaagaggctagcaccataggaggtgctgaaaaatgtggaattagtattgagtgattcatgtacacattaaaactgcaaaacacctgatcttcagggcaccaagaaataggcagaaattgcaggccagtagctcctatgctggttgatatctgtaccaactggacaaaccacttctaaatcttcttgctctccctgtatctagatttttttcacttctattcaatgccctccctttcggtccaaaatacaaataccttcctgtcaagtggtaacaaaagctttgttggagacttggggttaagctaagattactaatcagataagtggtttaggatttgctcaacctggttgttttgaatatttattagaccgaggaaactctcttaaaaagatcctgaggattaggccctgtagcaaaattyatctgcatttctttgttaattcatctacacctccaaagggcatgtaatggggcaggaaacatggttggggacaagggagcagaagtaaccaaataattgtgaaatttaaactacagattttttactccttcctgaggttttaatggccaccttaagt

SEQ ID NO: 879298 - DNA, 593 bp, Homo sapiens
tctagttctcttctggaattgattcttttatcaattattcctgatcatgggaagcaaagattgttataggtagaagggatatagagagtatctattccaataggtatatataatatactttacctgtatgtgaacacatacagagcgtaartaatatttcaggaggttataacacccccaccccaaccttgcagacaaactttggaatgtgcttttttttttctgtgagaaataatacatcattgttttatcatattatcagggttaggggccatttatctaggacaacctataataaacagagtcccagagaggaaaagtaagtatttttacagttacttacagagccataactaaagcctattttatcttgctttattgtatctaataaaaacaacttaaaagatgtgtttttatgattattttaatgttaggtatagtctgctactcagccatgggaaagataaacagtgatcatgagatccaaggagccggggattgtattagtttcgttgacagtgttctcagtgcagagaacatagcctgacacgtaataggctaggttaacatttgctggatgaataaataaaatg

SEQ ID NO: 879299 - DNA, 598 bp, Homo sapiens
tgatttagctcttggcttgcctgtttttggtgtataggaatgccactaatttttgcacattgattttgtatcctaagactttgatgaagttgcttatcagtataagaagtttttgggatgagaccatggggtttcctagatataggatcatgtcrtctgcaaacaaagataatttgacttcttttcttcctatttgaatacactttatttttctcttttgcctgattgccctggtcagaactttcaatgctatgttgaataggagtggtgagagaggacaaagttgtcttgtgttgcttttcaaacggagtgcttccagcatctgcccattcagtatgatattggctgtggctttgtcatacacgactcttactattttgagttgtgttccttcaatacctagcttatagagttttaacatgaatgttaaattttatcgaaggtcttttctgtgtctattgagataattatttgatttttgtctttagttctgtttatgtgatgaatcatgtgtactgatttgcatacgttgaatcagtcttgcatcctaaggattgaaacctagttgatcatggtggataagctttttgatgtactg

SEQ ID NO: 879300 - DNA, 598 bp, Homo sapiens
tgatttagctcttggcttgcctgtttttggtgtataggaatgccactaatttttgcacattgattttgtatcctaagactttgatgaagttgcttatcagtataagaagtttttgggatgagaccatggggtttcctagatataggatcatgtcgtctgcaaacaaagataatttgacttcttttcttcctatttgaatacactttatttttctcttttgcctgattgccctggtcagaactttcaatgctatgttgaataggagtggtgagagaggacaaagttgtcttgtgttgcttttcaaacggagtgcttccagcatctgcccattcagtatgatattggctgtggctttgtcatacacgactcttactattttgagttgtgttccttcaatacctagcttatagagttttaacatgaatgttaaattttrtcgaaggtcttttctgtgtctattgagataattatttgatttttgtctttagttctgtttatgtgatgaatcatgtgtactgatttgcatacgttgaatcagtcttgcatcctaaggattgaaacctagttgatcatggtggataagctttttgatgtactg

SEQ ID NO: 879301 - DNA, 613 bp, Homo sapiens
tttatccctgggacacagggttgcttcaacatatgccaatcaataaatgtgactcatcacataaatggaactaaagactaaagtcacgtgattttctcagtagatgcagaaaaggcttttgacaaaattcaacatcccttcctgttaaaaaatctcaataaactagatattgaaggaatatacttcaaaataataagagccacctatgacaaactgacagccaacatcgtattgaatgtgcaaaagctggaagcattccccttggaaactggcacaagacaaggatgccctctgatatggtttggctgtgtccccacccgaatttcatcttgaattgtggctcccataattctcaagtgttgtgggagggacctrgagggaggtaactgaatcatggggctaggtctttctcaagatggtgaataagtctcatgagatctgatccttttataaatggttttattagttcattagcagcatgagaatggactaatacagtaaattggtactgggtaatgggatgctgatgtaaagatacccaaaaatgtggaagtgtctttggaacttggtaagaggcagaggttggaacaatttgtagggtttagaagtggac

SEQ ID NO: 879302 - DNA, 612 bp, Homo sapiens
aagaagacacagctcacaggagcaactgatgctcctatgaacaaatccagtccgtgattgagattctaactcatgtacttattgtcaggcctctgagcccaagctaagccatcatatcccctgtgacctgcacgtatacatccagatggcctgaagcaaccgaagatccacaaaggaagtgaaaatagccgtaactgatgacattccaccattgtgatttgttcctgccccaccctaactgatacgatatattctccctctgccctgaagaaggtactttgtaatagtctccccccaccttaaaaaggtactttgtaatattctccccacccgtgagaatgtactttgtacacctatcccaaacctataagaactaatgataatcccaccaccctttgctgacyccttttttggactcagcccacctgcacccaggtgaaataaacagccttgttgctcacacaaagcctgtttggtggactctcttcacagggatgtgcatgacacttagacccaacatacagcaggtgttgactctaatgactagaaccaggacatatgctagattgttaatctcatccctgaaattttctgcagatgtcattgggacat

SEQ ID NO: 879303 - DNA, 558 bp, Homo sapiens
ttgatgactttaggatactatattaactcttaattgaattaatacaagtttaggtgtaaagatgatgtttatgttgacaaaaattattaatgttttacatatatgaaattaataatatattttttgtatttgtagaatactttgaaatctattattagctaatattttatattcattttgmgttttcacattattgttagatccagagaaaagtaatattttgtgaatactcaaatcataaacattttgctggatgcattcatagatattttatttaaaatgtacactaattgaagttttataccattttatgattcatcaaacacagcaactgaatactggcgtatagcaacattacaggatgttagtctaacataaaactcataacacattttaaaaagggtaaaaggaaggaaaggaaaagggatacgaggctgtagaaagattttaaaaacaaacgtcatatgtctgaaccttacctggaggtttcatattttgtgaaaagcagtttgtaagtagaggactcgtaagtgcacctagtacactgcaatggcacag

SEQ ID NO: 879304 - DNA, 542 bp, Homo sapiens
gtttgagaccaacctgaccagcatggagaaacccccgtctctactaaaagtacaaaattagcagggcatggtggcgcttgcctgtaatcccagctcctcgggagccagaggcaggagaatagcttgaatctgggaggtagaggttgcggagagccgaaattgtgccattgcactccagcctgggcaacaagagtgaatctccatctcaaaaaaaaaaaaaaaaaaaaagaatttaaagggacacttcctatcttattttatkaacccagtattgccctgattccaaatcgagacaaaggcattatacaactttgatgtttatccctcataaacatagactcaaaagtccttaaaacataataaccaattgaatgtagcagtacatagaatggataataaactgaacaaattaagtttctagcaagattgcaaggttaatttattatttgaaagatcagtttaatcaattttattcacctggatggttacatctggcaaaactcagcaaactgtgcactttaaaataggagtatttattttat

SEQ ID NO: 879305 - DNA, 591 bp, Homo sapiens
cctgtggaagaggccatctctcttttcccttgggtgttgtgacatgtgaaagacagccacagattttcgtttgcctaggacagttccagtttatgcccactgtcctacagtaagtattaattacattacctttcactctccagaattttccaggtaagtgataaattagacagttgccttagaaatatagatataaaacaaaggattgcattggatatttttccagtatgaaaaaagaagaaaaaaagcaatgctaaggaaacagccaagggagaacacagccagggaggcacttagcctgaaatcattctctagctggattactrcagtagatttctattccaatttatttccttacttttgaaatcagtttgaatttggatctctagtatctgcagctaaaggcaacctaactgatatactccgtcacctcaagtgatacgtgataagagcttgatgtgtattcttccacatttctccttggtcatacaacaagtacattctcttacatacatatttcacacaataggtttttgggtttttggttgaagtttgtttttatgagagtgaagttattacacatgtatttaa

SEQ ID NO: 879306 - DNA, 645 bp, Homo sapiens
ctaaaaaattcctagtgacataatagtgcaacatattactcgtgtgtttggggtgatgctgttgtaaacaacccactgccctgtcagtcatataaaagcatagcacatataattatagatagcacacaatatttgataatgataacaaaaacgattatctattattaaaactattatttgataattgttgatcaattagttgatattattgataatgataataaaaactatgtttatgtatttactatacttttattgttattttagagtgtattccttctacttatagaaaaaaaaagttagctattaaaacagtctcaggcaggtccttcaagaggtagtccataagaaggcattgttatcattagtgacagctacaaacatgttattttccctgaagaccttccagtgggacaagatgtggaggtggaagatgatgatattgatgagcctaaccctatgtaggtctaggctaatgtgggtgtttttgtcttaggttttagcaaaraagtttaaaaagtaagaaaattaaaaatgcttatagaatgaagatataaagaaagaaaatatttttacacctgtacaatgtgttcatgttttaaactgttattacaaaagagtcaaagttaaaaaattaaattttat

SEQ ID NO: 879307 - DNA, 551 bp, Homo sapiens
gaaaccaccctggccaacatggtaaaaccctgtctctactaaaaatacaaaaattagctgggcatggtggtgggcacctgtaatcccagctacccaggaggcttaggcaggagaatcacttgaactaggaaggcagaagttgcagtgagccgagatcgtgccactgcactccagcctgggcaacagagtgggactccacctcataaataaataaacaaayaaataaattgaacagtctgctcctgaatgactccttggtaaattatgaaattaaggcagaaattaagaagctctttgaaactaatgagaacaaaaggacaacataccagaatctctgggatgcaactaaagcagcagacagcagaaggcaaaaaataatcaagatcagagcaaagctgaaggagataaacaccaaaatcccttcaaaaaatcaacaaattcaggaggtttttttttgagaaaattaataaaataaatagactgctagctagactaataaagaagaaaagagacaagaaccaaatagacacaatcagaaatgataaggggga

SEQ ID NO: 879308 - DNA, 637 bp, Homo sapiens
aatccatttcctgtgtcttccagcttctgctggcttctggcattcctttgctgtggccaaaccactccaatctctttctctttggtcacattgccttctccttctctgtttgtgtcacattctccctctgtctctctcttataatgatacttgtgattgcttttagggcccacccagacaatctaggataatcactccattactccattttaagattcttaatcacatatgcaaaggccatttttaaagtaaggtaacatttatagattccatggattggggcctgatatctttgggggccattattcagtctgctacagtcttctctctggcccccartgatttatgttcattccacggtaaaatgtgttcatcccacctccaaatcctcaaaagcctcaacccaacacagcatcaactaaagcccaaaatatcatctaaatatcatcagcttgaaagtcctaaatctcattatctaaattacctaaatcagatataggtaggatactgtgtatgatccatcctggggcaaaatttctctccatctgtggacctgtgaaacaagaagacaagatatctgttccccaaatataatgatgatacaggcatcatgatgtaacagtaatagacatttaca

SEQ ID NO: 879309 - DNA, 609 bp, Homo sapiens
ggaacgtttgtgtagaattctttgtgaagacgtatgttttctttcttctggggtaaatacctaggcatggaatggctaagtcataggacagggagtgcttaactttacaagaaactgtcagatcaatgagttcagtgtgatggtgcgtgcctgtagtttcagctacttgggaagctgaaacagtaatatggctwgagctccggagttggaagctgcagtgagctatgatggcaccactgcactccaccccggggcaacagaacaagactctgtctctaaaataatactaataataaactggttgtaatattttacattctcaccaaaagtgcatgagagttttgtacagaactcattcttgagattgaaaggcatgggcatctgaacacgccacaccaaaatatgccacttaagcatgttcattattttgatctgaagggaactgaaaaacagcagattcagaaagggctgtctgctcttcccatttctacctaaaagcagggcataaatttcccatgagaaaggttttcctaggaaggagagaacattcttatcactggagatgggaggtcaatgctgagatatgtttgccaagcaaaacttcctaaa

SEQ ID NO: 879310 - DNA, 602 bp, Homo sapiens
ttgagcagtctctttcccatcatggatttacctaccacgtgtcctgtgcaccaagaactctcaggtgtatatctatacgtcggacatttttaagcaacatcctttggatttcacacagtatcttaaatatgtcccaaattgrcatggacatctttactataatctgttcctgatgccatgtccctcttcacccatctggaacctacaccatttccattccctgtttcagaaaatgacacgcaactgcccaagtcagaaatctatgagtacccctgttacttttccttcatttcctcttttctaatatcaaattttgactcttatttccttaagtatctctcaggtccacccctccactctcactgtcttagtccttcaagtaatcaccatctcttatgactcatcttccttgtactattgcaatattcacaagatatcctctagttatttcccacaccagtccaacctccattctattaataatttttctaacgtgaaaatacgatcattatacttctctgctaagaatttttcattacccaccggcagggcctttcatgatcacactgttaaactcatcgccattcttcctccagttcctc

SEQ ID NO: 879311 - DNA, 653 bp, Homo sapiens
accaggtaacactggctggattcttgttggccctgcttctgctgatgatccaatcactctgggttgtcatgattttctcccatagggcttcttgggagccaagggtcctgggtaatgtattagtctgcttgggctgccataaaatacyacagactgggtggcttaaacaacagccctttattttctcacagttctgaagactagaacatcaagatcaaagtgccaacatggtttgcttgagacctctctttttggcttgttgacagccaccttctctctgcttcttcacatggcctttcctctgtgtgtgcatgtggagggagagctcaagatctggtggctcttccccttcttatgaggacaccagttctgctggattacagctgtactattataaccttaactgcctccttaaaggctccatctccacatacaaccacattgggggttagggattcaacaaatgaaattgtgggggcgggggggacacagttcaggtcttaacaggtgggtatcaaagccagaacccacaaaatgtggggcttttcttgttttgtgctgtgaagccaatacacaaaattgaaagtaagcatcaaacagtgcagactttagttgatggccatggacttgagaagtgggagtttggctcacac

SEQ ID NO: 879312 - DNA, 668 bp, Homo sapiens
caaaaatttacattcccatgccttcttatagtcttttactaataacatattttactttccttacacaccttgcatgtaaatctattttcagtggtctcagttatatgttataagggtaactttcagcaacttttaattttggtgcataaattttctttcaggaatcctttcttgacttacacagaccacctacaacatgctttgactttctgacttgtcctaaacaactgtctttttaaacaaccaggtattttactttaggaaaagaatttaacatacaagattattttttatacaacatctcttttccttataaacttctttgcacagccagggaacatggctcattccacatgtccccaggtttatctaraatctaatgtctccagtacattgaacaatttttaaaagtcaaagcactttataaccttaaagcatttagcaaacctaatatctggcttgcataattcagaccaaatgtttacatttttaaagatatttctattttaccaataatctttaaaactgtgtttatttccaaaagattattttagtcacatgacctaaaaggcattatagttacttttctgacaaaatatttgatttaagcacttatttttctttgagccaattaaatagagctctttcatatcacacacacaacacat

SEQ ID NO: 879313 - DNA, 628 bp, Homo sapiens; identical to SEQ ID NO: 877319

SEQ ID NO: 879314 - DNA, 566 bp, Homo sapiens
caccttgttccatctgtttacaactcagctccctctgaaagttgagatataaggaaatcccccttcctcatgccctccgttccctgaagaacaccctccttttccctgagtgatgagattcttgtgagacaataggtaaagtgaagataaatcattttgatgattttcattcaacgatccctggatcagggttaggggctcattcataagaggactagcttggctaatagytcatttctgatttaacatcacatgaagcacgggggttattgtttacaatctgaaatgcaatctaagtttacactgcagttaatccagtatttttaaatgccaaactactggtacccaagaaatcatctagactcagtcttgccaggcagctggagcttcagacttctgggacccaaagaggcttcgctcaaggtataaggagtggttcacaagaatggcttccagctcccagcccagggatagcttcagatgatctgggctgtcagagagtgggctgtccacacagcaagtcagagaccctcactgtgtttgcccttcaaggtttgcagaacctc

SEQ ID NO: 879315 - DNA, 646 bp, Homo sapiens
aggaagcccagtggatgtcattagtgaggggctcctcctcctctctacacttaaataagcacaccatcatagttcctggcccagaacatttgggaatgagccctgtagacatcaccttgtctatgttacttctaaattgtactgcccagggtctggcctctgtgggtttgcacctggccacaccctatccagggtaatacatgtcaacagtgcccaggcctctgccattttcagaaaccccaaaccccttttatcttccaaggcagataaatacccagcatcagtgtatatgcyagtgttaggaaaccagtcttctggggttagtgctgaagaactaacaccttctaccataaaggcctgaaagagctactttaggaatttgaacacaccaaaggaatcttccatccaccatgaaaagaaaaaagaaaaaatatgtatgtgtaaaggaactacattatgccatacactttgccatgtcctgctgtacttcgcctacaaaactgcaaggtaaagattattataattggtttttaagatgagtaaacaaaagattagagaagtttttttttttaaaaaagtccctaaattgtacagctatttcactctttgcagacagcctgaggaaaacttttagctaatcttaata

SEQ ID NO: 879316 - DNA, 568 bp, Homo sapiens
gcctttctcattcttggcctcttcatttgtaatcaattttggtaatgtagaatatgtcctcagatactttcccttctcccactcacccccaatcaataatcaggaaataaattgtctgagtctcacgaacccaggggaggacaggcactcctgttttcagatccaaatgttgcattttccaagatctctctggcctgccatgccccctattctgtgcctatatagcccccragaccctagcaggcatacacacaagtgtgtggatgtcaagagaaacacacaggcagaagaacacaccaacagacactggcaggccattgatggtgggatgacgtggaatttggctgaggacagttggaggatagcccagccacagagcagcctgacccaagggaagaccactttcccactccatccctctcatgctccccatccatctgctgagagctacttctaccactcaataaaaccttgcactcattctccatgccaacacgtgatctgatttttccagtacactactgcaagaaccccgggatacagaaagccctatgtccttgtgataagg

SEQ ID NO: 879317 - DNA, 603 bp, Homo sapiens
aaaataaagggatggaggaagatctaccaagcaaatagaaagcaaaaaaaagcaggggttgcaatcctagtctctgataaaacagactttaaaccaacaaagatcaaaagagacaaagaaggccattacataatggtaaagggatcaattcaacgagaaaagctaactatcctaaatatatacgcacccaatacaggagcacccagaatcataaagcaagttcttagagacctacaaagagatttagactcccacaaaawaatagtgggagactttaacaccccactgtcaatattaggcaaatcaacgcgagagaaaattaacaaggatatccaggacttcaactcagctctggaccaagcgaacctaatagacatctacagaaccctccaccccaaatcaacagaatatacattcttctcagcaccacatcacacttattctaaaattgaccacataattggaagtaaaacactcctcagcaaatgtaaaagaacagaaatcaaaacaaactgtctctcagaccacagtgtaatcaaattagaacacaggattaaaaaacccactcaaaaccacacaactacatggaaactgaacaacctg

SEQ ID NO: 879318 - DNA, 545 bp, Homo sapiens
ataaaattgaggccaaggttatttgtcaagagcaacatgacagatataagtttgaaatatttaaaaagcaagggctgggcactgtggctcaagcctgtaatcccagcactttgagaggccaaggtgggtggatcatccgaggtcaggagttcgagaccagcttggccaacatggtgaaamccccatctctactaaaaatacaaaaattagccaggcatgggttgtgggcgcctgtaatcccagctactcaggaggctgaggcaggagaatcacttgagccgaggaattggaggttggagtgagcggagatagtgccactgcgctccagcctgtgcaacagagcgagactccatctcaaaaaaaaaaagcaaaaaagttttgaaatattattgtctataatctttcatcagccctatcttagatatttgaaaatgaatatcatacatagaaaaatattaaatgagaggccggaatcccactatttgattaatatgctacaatgaaattgcaaacaaccacttcgttcactcaacaggcataggtaa

SEQ ID NO: 879319 - DNA, 545 bp, Homo sapiens
ataaaattgaggccaaggttatttgtcaagagcaacatgacagatataagtttgaaatatttaaaaagcaagggctgggcactgtggctcaagcctgtaatcccagcactttgagaggccaaggtgggtggatcatccgaggtcaggagttcgagaccagcttggccaacatggtgaaaaccccrtctctactaaaaatacaaaaattagccaggcatgggttgtgggcgcctgtaatcccagctactcaggaggctgaggcaggagaatcacttgagccgaggaattggaggttggagtgagcggagatagtgccactgcgctccagcctgtgcaacagagcgagactccatctcaaaaaaaaaaagcaaaaaagttttgaaatattattgtctataatctttcatcagccctatcttagatatttgaaaatgaatatcatacatagaaaaatattaaatgagaggccggaatcccactatttgattaatatgctacaatgaaattgcaaacaaccacttcgttcactcaacaggcataggtaa

SEQ ID NO: 879320 - DNA, 550 bp, Homo sapiens
aggagttcgagaccagcttggccaacatggtgaaaaccccatctctactaaaaatacaaaaattagccaggcatgggttgtgggcgcctgtaatcccagctactcaggaggctgaggcaggagaatcacttgarccgaggaattggaggttggagtgagcggagatagtgccactgcgctccagcctgtgcaacagagcgagactccatctcaaaaaaaaaaagcaaaaaagttttgaaatattattgtctataatctttcatcagccctatcttagatatttgaaaatgaatatcatacatagaaaaatattaaatgagaggccggaatcccactatttgattaatatgctacaatgaaattgcaaacaaccacttcgttcactcaacaggcataggtaatgcaatctgcatatctgctatctggccagtagggctatctgccagtgttaggccatgtggaagaagttggctttatttcactagtttgcattgcctagggagaagaatgattagtaaaatacattcagtaggatgattattatttgcag

SEQ ID NO: 879321 - DNA, 642 bp, Homo sapiens
cttttcttcattatgtgaacaagggcatgttggggaccaagctctgtggtgtctcttcttataaggaaactaatctgatcagataatggccccacccttattacttcatttaaccttatgtacttccttactctaaatataggcacacttgagttggggcttcagcatatgaatttgtggggcaaacacaaatattcagtttaaaacaaaaagggcttggaaaacattccawtgaggaacagttggatgtcctggggctgtttagtttggaaaagagaagaatcagtaagacttggtctcagacatcagattgcccaaaggctataacagcagagggagcaaatgttttcagtttgtccttcgtggaagacttcagaaggaaataaacacatcatcattggggacaggaaggctggttctgacatcatttgggagggatggagtgtaagcttgacttaagtgagtagcctaaaatattacttcggattcccaaattctggaataactgttatgagaatacctccaaaccctatttcaactttcctcagcaagaagtttttctgggtgcaagaacattattctatccctcttgtattctacctcttcactcattccttcccaaccagagtctcagccaagccg

SEQ ID NO: 879322 - DNA, 642 bp, Homo sapiens
cttttcttcattatgtgaacaagggcatgttggggaccaagctctgtggtgtctcttcttataaggaaactaatctgatcagataatggccccacccttattacttcatttaaccttatgtacttccttactctaaatataggcacacttgagttggggcttcagcatatgaatttgtggggcaaacacaaatattcagtttaaaacaaaaagggcttggaaaacattccattgaggaacagttggatgtcctggggctgtttagtttggaaaagagaagaatcagtargacttggtctcagacatcagattgcccaaaggctataacagcagagggagcaaatgttttcagtttgtccttcgtggaagacttcagaaggaaataaacacatcatcattggggacaggaaggctggttctgacatcatttgggagggatggagtgtaagcttgacttaagtgagtagcctaaaatattacttcggattcccaaattctggaataactgttatgagaatacctccaaaccctatttcaactttcctcagcaagaagtttttctgggtgcaagaacattattctatccctcttgtattctacctcttcactcattccttcccaaccagagtctcagccaagccg

SEQ ID NO: 879323 - DNA, 687 bp, Homo sapiens
gggagaagaggataccaggcagaagaaacaacatctattaagtctcagatgtgaaaaagagaatgaaactaccagctgtaggatctaacagtgacttagtgcagctggagggaaaagtatgagaatgagtggtaagagatgggttttgagatgtcagcagatataagattttgtaagctatgcatattattaagagttctccagagaaacagaaccaataggaaatatatgaaaagatttattatgaggaattgattcatgcagttgcrgaggctgagatgtcccatgatctgtcatctgcaagctggagactcaagagggccaacggtgtaagtcccagtctaagggcaggaaaaaactaaagtttcagtttagtagtcaggcggaatgggcaaagtctcctttcctccacgttttgttctttttaagcactcagtagattggatcatgtccactcacattggagagagcaacctgctttactgggtcactgattcaaatgctaatcttatctggaaacttcctcacagacacaatcagaaatcatatttagtcaaacatctggataccctatcatccaatcaacttgatgcatgaaattaaccatcacaagtccatcctttgtcagtttggcacttatactcatctccttaaatcatacttagcctccaaataaagacaataaca

SEQ ID NO: 879324 - DNA, 687 bp, Homo sapiens
gggagaagaggataccaggcagaagaaacaacatctattaagtctcagatgtgaaaaagagaatgaaactaccagctgtaggatctaacagtgacttagtgcagctggagggaaaagtatgagaatgagtggtaagagatgggttttgagatgtcagcagatataagattttgtaagctatgcatattattaagagttctccagagaaacagaaccaataggaaatatatgaaaagatttattatgaggaattgattcatgcagttgcagaggctgagatgtcccatgatctgtcatctgcaagctggagactcaagagggccaacggtgtaagtcccagtctaagggcaggaaaaaactaaagtttcagtttagtagtcaggcggaatgggcaaagtctcctttcctccacgttttgttctttttaagcactcagtagattggatcatgtccactcacawtggagagagcaacctgctttactgggtcactgattcaaatgctaatcttatctggaaacttcctcacagacacaatcagaaatcatatttagtcaaacatctggataccctatcatccaatcaacttgatgcatgaaattaaccatcacaagtccatcctttgtcagtttggcacttatactcatctccttaaatcatacttagcctccaaataaagacaataaca

SEQ ID NO: 879325 - DNA, 649 bp, Homo sapiens
atcattctgtctcctctccatgtctatctttactataaatctgtacttaaaataaatattttggaatgctaaagatttaaataaatgtatttacatgaatggaaaagctcctacaaattattttgtctctatttctttttttttccaacattttttgtctttgcttttcacttctttgagaggcagcattgtataatgattggaaaggatgatatcagatggtcagagttaacctgcagaatatacttgttaggtatgttatttaaaagtcagctggtcgcagtagctcacgtctataatcctagcattttgggaggctgaggtaggtggatcgcttgagcctaggagttcaagaccaggctgggtcttgagcctaggagttcaagaccaggctgggcaaatggcaaaaccccatgtctactaataatacaaaaaactatctgggcatggtggcgcatgcctgtggtcccagctaygcaggaggctaaggtaggagaatcacttgagcccaggaagtgaagtctgcagtgaactgtaattgtgccactgcactctagcctgggtgactgaagtgagatcctgtctcaaaaataaataaataaataaataaaacaatcttcacctcaccttacttaaatgaaaaatgaga

SEQ ID NO: 879326 - DNA, 649 bp, Homo sapiens
atcattctgtctcctctccatgtctatctttactataaatctgtacttaaaataaatattttggaatgctaaagatttaaataaatgtatttacatgaatggaaaagctcctacaaattattttgtctctatttctttttttttccaacattttttgtctttgcttttcacttctttgagaggcagcattgtataatgattggaaaggatgatatcagatggtcagagttaacctgcagaatatacttgttaggtatgttatttaaaagtcagctggtcgcagtagctcacgtctataatcctagcattttgggaggctgaggtaggtggatcgcttgagcctaggagttcaagaccaggctgggtcttgagcctaggagttcaagaccaggctgggcaaatggcaaaaccccatgtctactaataatacaaaaaactatctgggcatggtggcgcatgcctgtggtcccagctacrcaggaggctaaggtaggagaatcacttgagcccaggaagtgaagtctgcagtgaactgtaattgtgccactgcactctagcctgggtgactgaagtgagatcctgtctcaaaaataaataaataaataaataaaacaatcttcacctcaccttacttaaatgaaaaatgaga

SEQ ID NO: 879327 - DNA, 581 bp, Homo sapiens
cagacaataatcaataagtatttaatacaagaatgcatacattggtcaggtgcaatggctcacgcctgtaatcccagcactttgggaggccgaggcaggtggatcacttgtggtcaggagtttgagaccagcttggccaacatggtgaagctccacctctactaaaattacaaaaaaattagctgggcatggtgacacacacctgtaaccccagctgctcgggaagctgagacaggagaattgcttgaactcgggaggcagaggtttcagtgagccaagwtctcaccattgcgctccagcctgggcaacagagccagattccatctcaaagaaaaaagtgcatacatgaatgaaggtgaagtcaacacatgagcaaagtacaagagaaaaacagagtgatctgcattgctataaaatgatcagcagctaatttccttccagagaaaataatttttaaaaaaaaactcaaacacagattacagttttaaaaggctgaatttctcttttctaaccactatagtttttgaaggctgaattttctctcttctgactactacagtttttaaagactgaatttctct

SEQ ID NO: 879328 - DNA, 559 bp, Homo sapiens
acgcacaggcactaaaatggcactactttgggctcgagaaacacagagtgaacacaacacacaaaagttgctatcatggagtttacaagctagtgtcgggaggcaatcaacaaaaagaagaaaaaaatttagtgttatggaaaaataaagcaggaaaggtgaatggaaagtgctggggtggagagcaattttaaattgggaggccaagtaaagactcaataaacagawgtcacttacaccattacctgacaaaggtgaggggatgtaccatgtggagatctagggaaaagacagttcgaggcaagagagaacaagttcaaggggcaacggtgtggccagggcatggcgcagaatggactaacggaaggataccaagaatgaggtcagagaggcctgggctagattgtgcaggaccttgccactataaagagttctgctttcactatgagtgacatgggaagccactgaaaggttctgagcagtggaatgacatgaaatgacattttaaaagtctcacagtggccactgtgttaataatggggaggggggagtggaagca

SEQ ID NO: 879329 - DNA, 624 bp, Homo sapiens
agtagaaatcacaaaatggtcccattccattgatggttgttccttacaaaatttcatatttttaggcttcacatatcctttagatttcaagtttcatttaataacagtttgatctttggtttcaaggatctctttttagaattgttwaaatacctgagaggtcaaaccaaaaatttatatctctactcttcaggaacagaatcaaatggacttagggtgtaggcgtcccacagtaatggtaaagtcgcagaaacatggcaatgctgaattaccatgcagtctaaaattagtatgtaattggcttaaaatgaagacaccttggtatagcaacgtagtataatatacaaaatgcaagcagtgattagtggaactctgtgtctttatttagtagaactacccctctttcttatatcactagtgtgtgaatcagatatgtattcaagagtcaaggacaggacagaagacttgtatctgttcttagatcagaaaaagaattgaaaattataaccaatgtaatttggtgaaagtcaaagttgaggtgagctaaaggattaaaacatgcttacagatcactttggataccacctcctacaaatgcagaggtgactgcaattggaaaactga

SEQ ID NO: 879330 - DNA, 629 bp, Homo sapiens
gtaacacatgaggccagtgttccaatgaaaatgatttggtttaacgtgtaaacctactgggcaagatatctaatgctatgtcaggtgccaggcttagcatactgccactactcaaaaagtgaaatgtaataatgggacttgtcaagactctgaagtaataaatgtcattaaacccaggagaaaggagatggctttgctttcatttacccggggacatacagtctcagttttctcagaaaaacctaaaatcctgttgctaaatttacatagaaatgaactgaatacattatttaaagcctgattcaggcttcccatcataaaggacagggaatcttacctatattgattggtctttcaaaaggtgtatgggaaaacrcccctctcctaatcactgaattaaatggaatttgctagcattagtttaatcagtaccttgtaatcaaatcaggcatgaaatcaagttttgattatatattgttctcactattactatcaaattgccaaatcattggaaacacccctaagtatgggggaggaagacaaaggatcagggaagcaatatttatttagtaaaacagagaaatataattagatttaaccaaatttgtgaagctcttcagccttccttt

SEQ ID NO: 879331 - DNA, 576 bp, Homo sapiens
tgggactgtgttgagtcagacctgaagccagcacagcactgaatcttgtccaaggcccactgtaaccactccctggctactgtttatatttgttcaaggccctggggctctaaaatcagcaggtggcaaagtcagctaggcttgtttctttccttccagagcagtgagttctgggacrgtccaaagatactgtctagaagccagaaactggagtcaaaaaaccttgtaagtctacctggttttctattgttctctggctgagttggcacataaactatgagaatcagtccttcccactcttccctcccctaaccacaggcagaggaacctcaccccatggccaggatctccacagcctcacagggagtactgccagcctaccctttatgttcccttaaagcccataggctctacagtcagcctaagaggcacccttcaatgtagtgcactcctctttggcccaacaaagtttcagaaatgtcatccaagacccaaggcctggaatcagggacaccaagattctgcttggtgttatactctgctgtggcctaattagtacctgagttacaaaaaaaa

SEQ ID NO: 879332 - DNA, 600 bp, Homo sapiens
tgacctggagcacaggatggaatgagacagcacagcagtccgaaatgggtaatggctcaaagatagagtgaggattccttttcatccttttagaataaataaaattgaatttgaaaatgtaacagtaaggtttgttaaaaatctcccaaatcaataataatattacattcttttctccttgtctagactgaggcttttcttagctctgaatctgggcaaacaccattctctcttctaagaacttaattcttttttgcctttaccttcttagaccccatacctacactgtaaggtataagaagatatcaattgtattcakagggttgcattttctaaatagagtaggcaatcaatagatatttgttgaattgcctctagtgggatgcccttcccccacacatcttttctcaccgtggacttctttcctacctggctccaaagttcaggaattacaatccagtttttttctctttttagattagaccaacttgtcccaaaactttgtgctatagaaaatgaccttaaaagatactctgaaaagaaaaaataattattccagagttaaataggtttgggaaatgtgttatccagtattttttc

SEQ ID NO: 879333 - DNA, 615 bp, Homo sapiens
tacatatttcaacaatgatgaagatagtcaataatcgtagttctgaaataaaattcagaaactaagaatacatttcaaaaatgtacagatacacacatgtacacacatattcacagaaagattgagagtagcaatgtagtaataaataacactgaaataaagaacagttaaagaacccattatttccctgatgagtttttaaaagtatataaccttgtcttgcagataaaagtattttatgaattaggtgacatttaatttgaacagtatgttcataaaaattagaaatttgacctctgaagacaatttcactggctttatttcttagctctaccttttactcctcatgaaaccttgtgatatttatgaaactcttcatgcctcagctcgcttatctgcaaaatggggataataaagtccctgtgtcgtgagaattaaacaaatatatatgaatgtggcacaggctagygaaatgttcaccagtcccattgtttcttctcagtcttggaagattgcatctccttgtttccctttcagtgagcttgaggcaacaccactgtgttcctgccggaggagtatggtttgaagtgatgtctgccccttccatgtctgcca

SEQ ID NO: 879334 - DNA, 524 bp, Homo sapiens
aacttaaactgggctctagaccaaacagacctaatagacatttacagaatatacacagaatatacatttttctcatctgcacttggaacattctccaaaattgaccatatgcgtggccacaaagcaagtctcaacaaattaaaatatttatattttatatatatatatatatatataaatatatatatatatatatataatatcttcttagaccacagtggaataaaattagaaatcaataccaaaaggaaccctcaataatatgcaaatacatggaaattaaacaacttgctgctgaatgatcgttgcataagtgacaaaattaaggcagaaattwaaaaaaatagaaatgaatgacaatagagagaaaacatagccaaacctctgggacacagaaaaagtagtgctaagaggaaagtttatagcattaaatgcttaaatcaaaaccatagagaaatctccaattaaaaatctaacatctcacctcaaggaactagaaaagtaagaacaaaccaaacccgaga

SEQ ID NO: 879335 - DNA, 674 bp, Homo sapiens
aaccatcaaatttctttaggtttatttttatgggtaagtagaatctccagaaaatgacttactccttcctccttttactgtctatgtgaagttattctttgtcactgtaattttatatcctccacaataagcagtcatttcyagacacctttcaggtgggcaagaagttttaaggtcataaaggtcaaattcttactcaaaggtgaaattcttactcaaaggcactcccttatggcatccttgctggaaagcacagccagctcagatacctgcagagatgaagacctcacttctgcacaggcagcccattccaccacggaggggttgaggggtgttcaactgaccacgtgcccctgcaccaagctaagtccaccttcccacaacacatacccattgctggtcatactgctttttggaagaactcagagaggaaatacatgaattccacatgacagccctgcagtattttaggattatatctccttttccctagactataagtcctggatccccaagccattcctcacatgctatggtttccaggcattttgctgtcctgggcatctacctctgaatgagctccatttactaaggtccccttaaaatatgtcattgaaatcagaatatattatcacggaatcacatcttattgggagggagttggcttaatgcta

SEQ ID NO: 879336 - DNA, 673 bp, Homo sapiens
ggaaaaagcattttctgtgttcatggactctatccctagactagttctaaaaattaaatttctaagcatttagatacagtgtttagctctggaattagacttccttgatttactaatgcttgtgtttgaatattatttttaaaagcttattatcaatataaatatttgcctccaattaataagcacatacagatggaatcacatagtcttcagagaaagtgaagggagttaaattttaaatgactagaactcaaatgctgcacaataactgtatctggtaaaaagctttggaggtggaaaaaatggaaagggggagggaaattgaaaattatctgcagaaagtttaaacgttggttttcaaacacttaagactttctactccattaaaactgataatttgactttcttcatccttttgcagttacatgaratgaaaatactttgtgttccacaatgacctcaattttattaatgttagtcactccctgatgcgtgcggttcttaggctaccactcctcttatttatcattggcattagttgatgaatctggtgttgcctaaggaaagcttgttgccaagaaggacgtagtgtgattttactgtgtttataatccttaatcctcatatattcccagagagaataatttttcctttttccaaaatctgggaaaat

SEQ ID NO: 879337 - DNA, 568 bp, Homo sapiens
gaattaattttgttaaaatgaccatagtgcctaaagcaattagaggttcaatgatatttctagcaaagtactaatatcatacttcacagaattagaaaaaaaaatttttaagtaatatggaaccaaaaaagagtctgaatwgcctaagcaatcctaagcaaaaagaacaaagccagaggcattacactacctgacttcaaactatactataaggctatagtaaccaaaccagcacggtactggtacaaaaacagacacattgaccaatggaacagaatagaaaactccaaaataaaatggcacacttacaatcatctgatcttcctcaaggtcaacaaaagcaagcaatggggaaaggaccccttattcaataaatggtgctgggataactggctagccatatgcaaaagaatgaaattggactctcacctttcaccacatacaaaaattaacttaagatggactaaagattgaaatgtaagatcacaaactataaaaattctagaagaaaatctaggaaatacccttctcaacattggccttggcaaagaatttttggctaagtccc

SEQ ID NO: 879338 - DNA, 669 bp, Homo sapiens
gaatattaaatggatgagcatttgttgatggcttcctgtgtgtttgcacaaggcttcgcagtggttattcaagagtgccagtaccagatgtgactctgtcaacagtatatccagacagttctccttcgaccattgtgtttttactattctcgtaaattttaaaccttatttgttttccattgctactgattacagttacccctttttacttkttttgttcttagaaaatgaaactgatttaaatattagccaacagtaaagctttaggaaaggtaaatttgtaaacatagtgatatacgtataaattaggaggctcaccaaatacaaacagaaagaatgtaaggcatgtgattacctggactgtcttctggcatttgattttgagaatttcctcaaaagctcaatattccaattcgttggggtttctaaacctgagtttggaatccaattctgtggatcacaagataatttttactgtggctgaaaaacggagttatatcagaaaggtaggctagccctaggcaaaatagtgaagcagtaaaactttgtctttccagggccattgcacttctgtctgcttgtctttaggagttagcctaagaactcaatgccttttttttctttcccttcactacacaggaattcctgcctttgtcagacttcttgcct

SEQ ID NO: 879339 - DNA, 669 bp, Homo sapiens
gaatattaaatggatgagcatttgttgatggcttcctgtgtgtttgcacaaggcttcgcagtggttattcaagagtgccagtaccagatgtgactctgtcaacagtatatccagacagttctccttcgaccattgtgtttttactattctcgtaaattttaaaccttatttgttttccattgctactgattacagttacccctttttacttgttttgttcttagaaaatgaaactgatttaaatattagccaacagtaaagctttaggaaaggtaaatttgtaaacatagtgatatacgtataaattaggaggctcaccaaatacaaacagaaagaatgtaaggcatgtgattacctggactgtcttctggcatttgattttgagaatttcctcaaaagctcaatattccaattcgttggggtttctaaacctgagtttggaatccaattctgtggatcacaagakaatttttactgtggctgaaaaacggagttatatcagaaaggtaggctagccctaggcaaaatagtgaagcagtaaaactttgtctttccagggccattgcacttctgtctgcttgtctttaggagttagcctaagaactcaatgccttttttttctttcccttcactacacaggaattcctgcctttgtcagacttcttgcct

SEQ ID NO: 879340 - DNA, 633 bp, Homo sapiens
tccactgacagcttgcactgtgtgcctggaaaagctgcagtcattcaatagcagcccatgaaagcagccaggagggaggctgtaccctgcaaaagcacagggatagagctccccaagaccatgggaatccacctcttgcatcagcatggcctgaaggagatcattttggagctttaaaatttgactgcctcactggatttcagacttgcatgggccctgtaacccccttttcttttggccaatttmtcccatttggaatggctgtatttacccaatacctgtacccccattgtatctagggagtaactagcttgctttgattttacaggctcataggcagaagggacttgccttctctcagataaaactttggactgaagacttttgggttaatgctgaaatgagttaagacttcgggggagtgttgggaaagcatgattggttttgaaatgtgaggacatgagatttggaggggccagggatggaatgatatggtttggctgtgtccccacccaaatctcaacttgaattttatctcccagaattcctgcatgttgtggaagggccccaggggtaggtaattgaatcatgggggctggtctttccagtgatattctcatgatagtgaataag

SEQ ID NO: 879341 - DNA, 583 bp, Homo sapiens
tggtgatttcttatatttctttaggtaaatcatgaaagagtttaaccatatcttagcaatggaataacaatgcagattttatcataaagacctaatcaagaatagataaggccctgaagttttagagattgcaagatggaataattccattcagacttaccttagaaatatgttgctgtatagataaaataagacytggttgtttttaatggccattgtttccagcctctgcagaagtaggttgtgatactatttgggagaaggacctcaattcacacatttgctaccagttcaacctgctttcatctctctcttggagtgaggcacattcttcatgccagatgcaaggaggtacgctgttaagtattacagatgaaactgaagaaaatttcgtaaggggtaagtaggtggatgacgcacattgatattgatacaataaaagatggttgttaactgttttcacatatacaaaaatatattctgacaaaaagttcttaaaaaatatttttctttccataatatggcccaaaactctcacccaaaatttttccatgaaccttgagtgattccatttggcatccag

SEQ ID NO: 879342 - DNA, 610 bp, Homo sapiens
ttagcactatgcttagcaaatagccatgtagccattttcaatattgttagtcattcacttatcaatcagttgctataaaccctgtaccctgttaaaggctgagactcccagtttctgccctcagaaacctcacagtccaatgggaaaggaccacaggagaaccagcagttaggatgcaggatggtaagtactttattaataatcactttttaaaacactatcactaatgggtgacaaccattttttgctagccactgtgtgctacatgctttatgtaagtcaagtacataatctttctagtctaaatatgtgagttcaaatcccagcattaccactgaataattatgaaatctttggcatatttattaactctttgacacttggttattcatcttgtaaataggtacagaagtcagaaaaartaggatgggcacggtgggtcacacttggcaacatagtgaaaccccatctctactaaaaataaaacaattagccaggcatggtggtatatgcctgtggtcctagctacttgggaggctgaggcaggaagatcacttgagcccagacgtttgaggctgcagtgagctgtgatcacattattgtgctccag

SEQ ID NO: 879343 - DNA, 570 bp, Homo sapiens
agtacttctctagccacatctcttccctgttccctgagttcaccttgtcctcaattcagcatttagttcaccgaattaactgaaattgtatttccccactttcctatagggtctccaggatgtaagtcagagatcaggctgcggtgtagagccaccatttccttgacctaatttggactcttctcaaactcaccacaaagcaccttaggcataatgatcagttgcatgtaaggtgttgatgccctcactttggtcatcttaggccactaacatactagttcaaggagtagaaggaggtcagcaggtcagatatttgctggggcstattatggagggcttaggaactcactcatgccaaggaggcacaggataagaataaaagctcatttcctgccctggaagaaattgggttttagttgggaagacaagaccaataggcagtaaatggtcttggccttgcctgtgtctgaagcctcctctcttcaagattctgcttcaagattccttttatttaagcatccctctatatagctgaagattccaggaagaggaactggaataactggtgag

SEQ ID NO: 879344 - DNA, 575 bp, Homo sapiens
ttaaatgtatgtagaagtaaaagatatgatgacaataatgtaaatgtggtagaggtaatttgggattgttgtatgagtagtagtagtaaaggtattataaagtcttataattgtaaaaaaagttagtcaaatactaaattatatcagggtatacgtgaggtatgatgtaatctataggtaatcactgaaagaatagtagaagtgtatataaataacaagcaattagagggtgaaatggaataataaaatatttggttgattcaaaagaaggcaagatgaaagggaacyagattatagaaaatactggataaatataaagctaatggcaagattacaatttaaacctaagtatattagtaattacattaattgtagtagattatgcactccaatgaaagaatagttgagaaacccaggtgcttgatacaggaagatgttagcatttacaagaatggtccactgaagttgtaagtgaccttgtagatgggcccaaggcatataagctagagcctcagcaacatttgatatactaacaagtgcactccttgttatatgtacccatatgcaaaccaaaa

SEQ ID NO: 879345 - DNA, 649 bp, Homo sapiens
ggcttcagaaggtgggtaataacaaactcttctgagctaaaggagcatgctctaacccaatgcaaggaagctaagaaccttgataaaaggttacaggaactgataactaaaataaccagtttagagaagaacataaatgacctgatggaactgaaaaaacacagcatgagaacttcgtgaagcatacacaagtatcaatagccaaatcgatcaagtggaagaaagaatatcagaggttgaagatcaacttactgaaataaagcatgaaaacaagattagggaaaaaaagaatgaaaaggaatgaagtaagcctccaagaaatatggtactatgtgaaaagaccaaacctatgattgatgatgtacctgaaagtgacaaggagaatggaacyaagttggaaaacacacttcaggatattatccaggagaacttccccaacctagcaagacaggccaacattcaaattcaggaaatacagagaacaccactaagatactcttcgagaagagcaaccccaagacacataattgtcagattctccaaggttgaaacacaggaaaaaatgttaagggcagccagacagaaaggtcaggttacctacaaagggaagcttatcagactaacaggggatctctctgaagaaacccta

SEQ ID NO: 879346 - DNA, 695 bp, Homo sapiens
tattataaaatcgaccacataattggaagtaaaacactcctcagcaaaggcaaaacaacacaaatcataacaaacagtctctcagactatacagtgccatcaaattagaactcagattaagaaactcattcaaaactgcacaactacatggaaactgaacaacctgctcctgaatgactactgggtaaataacgaaattaaggcagaaataaataagttctttgaaaccaatgagaacaaaaacatagcgtaccagtatctctgggacacagttgaagcagtgggaatttatagcactaaatggccacatccaacagggggaaaatctaaagtcgacaccctaacatcacaattaaaagaactagagaagcaagagcaaacaaattcaaaagctagcagaagacaagaaataactaagatcagaacagagttgaaggagctagagacataaaawcccttcaaaaagtcaaaaaatccaggaattgattttttgaaaagattaacaaaatggatagactgctagccagatgaacaaagaataaaagagagaagaatcaaatagacacaataaaagatgataaaggggagatcaccacttatcccacagaaatacaaactaccatcagagaatactataaacacctctaagcaaataaactagaaaatctagaagaaatggatgaactcctggatga

SEQ ID NO: 879347 - DNA, 578 bp, Homo sapiens
atcagaaaaccaactctgataatatgacaaaacaaggctctttaatacctcccaaaaatcacactagctcaccagcaatggatccaaaccaagaagaaatccctgattttcctgaaaaagaattcagaaggttagttattaagctaatcagggaggcaccagagaaaggtgaagcataatgtaaggaaatcaagaaaatgatacaaaaagtgaagggagaaatattcartgaaatagcatagacaaaaaacaatcaaaacttcagaaaacaatgaacacacttatagaaatgcaaaatgctctggaaagtctcagcaatagaattgaacaagtagaagaaagaaattcagagctcgaagacaaggtctttgaattaaccaaatccaacaaagacaaagaaaaaagtgtaagaaaatactaacaaagcatccaagaagtctgagattatgttaaacaaccaaacctaggaataataggcattcctgaggataaagaaaaatctatacatttggaaaacatatttaggggagtaatcaaggaaaactaccctggcctggatagagacctagacatccaaa

SEQ ID NO: 879348 - DNA, 689 bp, Homo sapiens
tccattttgaggaatcagaatctattcctataatttcttcttgcatatcatttcctctgaattaaattttctttttccctaaaatatatcacatagtattgctctcttaaaagaccttgtgtataaactatctgagtcctagtttatctgtaaaggtcttgattttgtcctcaatattatcaataatttagaaatatatagaattcccaattgaaaattattttattttatatatcatttaaaaatctatataatataatatattttaatgtagtgtcttattgccttctttgttactttttagaggtaatctttctcctttcattttgggtttaagatcttttttttcctattgtgcaattttcttgttatgttttctattgtgcaattttcttgttatgtttaaaatgtcatattatttttatttatattgtttaagttaatttyacttattgaatattataatatatagctgtaaactgtcatagaaagttatttcaaatatcctttttgtattactgtctctattgtaacttttattaattttaagagcatatattccaagtttgtatctttcatgacttttaacttcatttttcatttttcttatgtttctacactgatttctgagtatttttcatatctttattttccatttctctattttttcagtaattcctaatctgtag

SEQ ID NO: 879349 - DNA, 619 bp, Homo sapiens
gtttatagtattctctgatgatagtttgtatttctgtgagatcagtagtgatatcccctttatcattttttgttgcatctatttgtttattttctcttttcttctttattagtttcgctaccggtctgtcaatattgttgatcttttcaaaaaacagctcctggattcattgctttttttgaacggttttttgtgtctctatctccttcagttctgctctgatcttagttatttcttgccttctgctagcttttgaatgtgtttgctcttgcttctcaagttcttttaattgtgatgttagggtgtcaattttagacctttcctgctttctcttktgggcatttgttgctatacatttccctctacacactgctttaaatgtgtccagagattctggtatgttgtatctttgttctcattggtttcaaagaacatctttatttctgctttcatttcgttatgtacccagtagtcattcaggagcaggttgttcagtttccacatagtcaagcagttttgagtgagtttcttaatcctgagttctagtttgattgcactgtgatctgagagacagtttgttataatttctgttcttttacatttgccaaggagtgcttta

SEQ ID NO: 879350 - DNA, 566 bp, Homo sapiens
ttggaagaatgatatattttgttttggatgtttacctagtaatggggttgctgggttaaatggtagttctgttttaaggtctttgagaaacctgaaaactgctttccacaatgggtgaagtaatttatgttcccaccaacagtgtgtaagcgttcctttccccctgcagccatgtcagcatctgttgttttctgactttttagtaatagctrttctgactgatgtgatgtggtatctcattgtgcaatcatccatttaaaaaatatgtttgatctgctgtggattgaatccatggatgtggaacccagagaaatgaagggctgactggatagagtaaaattaaatgagtagtgaagataaggttaaaaaaaggcaggttggaaatatttatgaaggaagttgaatacaaggaggagaacagtgttcttaaatagtgaagctttttaattaagtcagtgatacgttcaaaaagtaataatgtgattaatgctggtaagaaatggaagccatgaatcaatttggagagtattccaacattgaggaattatgtgaaatgtctgaattta

SEQ ID NO: 879351 - DNA, 534 bp, Homo sapiens
ttgctccatgtggccttttttcccctttctggctgcttttttaaagttttatttttgtccttggtttttcagttttttttttattatactttaagttttagggtacatgggcacaacgtgcaggttagttacatatgtatacatgtgccatgttggtgtgctgcacccagtaactcgtcatttaacattaggtatatctcctaatgatatcccttccccctccccccacccacaacaggccccagtgtgtgatgttccccttcctgtgtccatgtgttctcgttgttcaattcccacctatgagtgagaacatgcggtgtttgkttttttgtccttgagacagtttgctgagaatgatggtttccagcttcatccatgtccctacaaaggacatgaactcatcattttttatggctgcatagtattccatggtgtatatgtgccacattttcttaatccagtctatcattgttggacatttgggttggttccaagtctttgctattgtgaatagtgccgcaataaacatacgtg

SEQ ID NO: 879352 - DNA, 629 bp, Homo sapiens
tattcaagcccctgcctctcagcacccaggttcttgtccaggctgttcaggaagaatcaggtcattcgaatggattgaagggttgcatatgcagagattttcactgggtgatggatgtggctctcagtggaatggggagttggaaaggggatggtgcaggaagatggtgatctttcccttaaaccatgccatctgaagttagccacatctatccatagtctccaagactcagccactcgtatccatgacattcagcaamttgtatcctcgatgacactcagcaacttgcacccctgagtccttgcatcagccacttgtgttgctctgccagctgaagtctttttattggcacaggataggagtgtggcaggccaaaaaagcaagacttgggtggaaaaacggggtcttctgttttcacttagggtcatagttccatgcttaagggtggggtttatcctggagtccagccattctgtatcattattattattattattattatcattattattttgccccatataatgcacacagctatgttttgattacactcttactttgttcctgtcctttctcagcactttcaaacagacccgacctattcattgtttacatgcctttgaaggcta

SEQ ID NO: 879353 - DNA, 569 bp, Homo sapiens
ctgccaaccatgtaaaatgtgacttgctcctcctcaccttccaccatgattatgaggccttcccagccacatggaactgtaagtccattaaaccctttttcccacataaattgtccagtctcaggtatgagcagcataaaaatggactaacacacctgctcaccaaggaacaatgcctctagracatctccaagttcttatctcttattgctgcactcctacttactattccctgctagtatctgtcacatggctgcatgccggactaatctctgatgctttcctcgagttctttgctctgagtcttctccagcttaccttcccaacacttccccataggcttagaactgatgcttgtctctcagcctaggtagccacatgcaagaacatgaagaaccagagccacccagtaggaaggcaagatcagctattctcatcatacctaaaaggcttttgctctcttttacatgtttctaaatcctaatcattcttcaatttcttgtgatcatctctcacctatagcctttcataacccccctcctcctatgaccaaacagctttattctgaa

SEQ ID NO: 879354 - DNA, 630 bp, Homo sapiens
aatcatgtggtttttgtcgttggttctgtatgtgatggattacatttattgatttgtgtatgttgaaccagccttgcatcccagggatgaagctgacttggtcgtggtggataggctttttgatgtgctgctggattcrgtttgccagtattttattgaggattttcacatagatgtccatcagggatattggcctaaagttctctttttttgttgtgtgtctgccagactttggtatcaggatgatactggcctcataaaatgagttagggaggattccctctttttctattgataggaagagtttcagagaaaatggtaccagctcctctttgtacctacaatacaatttggctgtgaatccgtgtggtcctggactttttttggttggtaggctattaaccattgcctcaatttcagagcctgttattggtctgttcagagattcaacttcttcctggcttagtcttcggggattgtatgtgtccaggaatttatccattccctctagattttctagtttatttgcatagaggtgtttatggtattctctgatggtagtttgcatttctgtgggatcggcggtgatatctcctttatcattttttattgcttctgtttgattcttct

SEQ ID NO: 879355 - DNA, 630 bp, Homo sapiens
aatcatgtggtttttgtcgttggttctgtatgtgatggattacatttattgatttgtgtatgttgaaccagccttgcatcccagggatgaagctgacttggtcgtggtggataggctttttgatgtgctgctggattcggtttgccagtattttattgaggattttcacatagatgtccatcagggatattggcctaaagttctctttttttgttgtgtgtctgccagactttggtatcaggatgatactggcctcataaaatgagttagggaggattccctctttttctattgataggaagagtttcagagaaaatggtaccagctcctctttgtacctacaatacaatttggctgtgaatccgtgtggtcctggactttttttggttggtaggctattaacmattgcctcaatttcagagcctgttattggtctgttcagagattcaacttcttcctggcttagtcttcggggattgtatgtgtccaggaatttatccattccctctagattttctagtttatttgcatagaggtgtttatggtattctctgatggtagtttgcatttctgtgggatcggcggtgatatctcctttatcattttttattgcttctgtttgattcttct

SEQ ID NO: 879356 - DNA, 793 bp, Homo sapiens
taccatattctttatcatactgactgaaaccttgatttgtttctctcttcacttgttacattcaattatttgatacattctgttaatttgatttattcaatatctgttgaaattctaccttccttccactctgacaatggtttctctctcccaccagtcagttttgatttattcaatatcggttgaaattctacctttcttccactctgacaatggtttctctctcccaccagtctgttttgctgagagttccaaaaatcatcttcctgaaacccgaatcttttattgtcacttcattatatatgtattttcaatatgcaattacctgacaataggatgcccgataaagcacacactctattctttcaccactgcctatgatattttatttcctttcataagccttttgctctaactaaactccaccatccaccgaacctcctgaatcaaggtcaattgatattggctgggtgcagtggctcatgcctgtaatcccagcagtttgggaggctgaggcgggcagatcacaaggtcaggagattragaccatcctggctaacactgtaaaaccccatctctactaaaaatacaaaaaattagcccggtgtggtgccatgcatctataatcccagctactggggaagctgaagcaggagaatcgcttgaacctgggaggcggaggttgtagtgagctgagatcacgccactgcactccagcctgggtaacagagcgagactgtctcgaaataaatacataaatacatacatatgtattaattgatatcaattctac

SEQ ID NO: 879357 - DNA, 615 bp, Homo sapiens
ctggcagcagccatgtggcagaaagagagaatctatgcacctgggggagggagagctcagtgactgtgggactctgtattggaactcagtgctgtcaacactgggcagaactcagctgatacccacagagggaacatatagaacagctctagacagaaggaatcgtccatcccagtggtcagaacttgagttctggcaatctctgccaccacaggcagagctctggggtcctaaacaaacttaaaaggcagtctaggccaaaaagactacaactcttcagcaagtcctagtgctgtgctgggctcagagccagtggacatcgggggcacacaacctagtgagacatcaacaggggtggctaagggagtgctggcccccccccccccatccacatcaggctgcayagctccaacctgaaaaagacactccttctttctgcttgaggagtggagaaggaagttaagaggactttgtattgcaattaggataccagctcagccacagtagaatagggcacctggcagaatcatgagcccattctaagccctagctcccagaagacacttctagacacaccatggtccagaagggaacctactgccttgaagggaagga

SEQ ID NO: 879358 - DNA, 576 bp, Homo sapiens
tggccaggcaccgtgtctctcacctgtaatcccagcactttgggaggccgaggtaggcagattgcttgaggtcaggagttctagaccagcctggccaatagggtgaaaccctgtctctattaaaaatacaaaaattagccaggcatggtggcacatgcctgtagtcccagctacttggaaggctgagacacaagaatcacttgaacctgggaggcagagattacagtgagccaagattgcgccactgcactctagcctgagtgacagagtgagaytctatttcaaaaaataaaaataatttctgtatatgctatcataatcacaatgaaaaataatattctatttttcaagcaagtctaaatgttaagaaccaacccaaaataactcaaataagtataataaaaatgtatatattatattctcaaaaaacaaaagaataattaattaaaagtaataacccttgagcatactaaaagataaagatcacactgactcttaacgtttttttctaatttctgtggcatatccttacttctatgtttctcaactagccattaatgattgtgatggaagaaa

SEQ ID NO: 879359 - DNA, 584 bp, Homo sapiens
ttcaatcgcctcaaattacagatatcttaaactctagagactccataaagtaaaaactattttcagagcttatttttttaatctgcattagtaaaacagagctattcataagacttgcttaaatgaaactaccgctttaaaaacttacatactcaaaatgtatttatagatttcttactaacatgtattagtaacttagctagaatataaaagtatctaaaaatgcaagaattataatttttgaatatctactaaatgtcagacactatgctagcacagtacctaaatgatctcatttaatctttgcagctaatttgaaaggtaggcaccagtatcccatttcacaaatgaagaataaagaaactgaggctcaaggaggagtaagtgacaaaytacatggtgattctgaagatcttcaatatcatttactctaagcacctttgctctgtaaataaactgaggactaaagaattaaataacttgttcagaatcacatgactactaaaggtccaaagcagaattcatagctaaggcccctgattaccactcttagagtttataaaaagtgacaatgtaattttttt

SEQ ID NO: 879360 - DNA, 627 bp, Homo sapiens
tgagatcacctcagcctggatttcattgtccacatcgttatcagcattttgatcaaagccattcaataagtctttatggagttccaaactttcccacattttcctatcttcttctgagtcctccaaactgttccaacctctgcctgttacccagtttccaaagtatcttccacatttttgggtatctcttcagcagcaccccattcctggtaccacctacctgaattagtccgttttcatgttgctgataaagacataccaacactgggtaatttatacaaaaaaaaaatggtttaatggacttacagttccacmtggctggggaagactcacaatcacggtggaagtcaaggaggagccagtcacatcttacatggatggcagcaggcaaagggagagcttattcagggaaataacaccttataaagctgtcagatcttgtgagacttattcactgtcacaagaaaagcacaggaaagaactgcccctatgattcaattaccttcagctgggtccttcccacaacacatgggaatttaagatgagatttgggtggggagacagccaaaccatatcagtaaacataatgatgttatatatctgtgtattttgagagtgatcagtagc

SEQ ID NO: 879361 - DNA, 627 bp, Homo sapiens
tgagatcacctcagcctggatttcattgtccacatcgttatcagcattttgatcaaagccattcaataagtctttatggagttccaaactttcccacattttcctatcttcttctgagtcctccaaactgttccaacctctgcctgttacccagtttccaaagtatcttccacatttttgggtatctcttcagcagcaccccattcctggtaccacctacctgaattagtccgttttcatgttgctgataaagacataccaacactgggtaatttatacaaaaaaaaaatggtttaatggacttacagttccacatggctggggaagactcacaatcayggtggaagtcaaggaggagccagtcacatcttacatggatggcagcaggcaaagggagagcttattcagggaaataacaccttataaagctgtcagatcttgtgagacttattcactgtcacaagaaaagcacaggaaagaactgcccctatgattcaattaccttcagctgggtccttcccacaacacatgggaatttaagatgagatttgggtggggagacagccaaaccatatcagtaaacataatgatgttatatatctgtgtattttgagagtgatcagtagc

SEQ ID NO: 879362 - DNA, 640 bp, Homo sapiens
agaagacaagaattgaggtttgggaaccttggcctagatttcagaggatgtatgaaagtgcctggatatccaggcagaggtgtgctgcaggggcagagccctcatggagaacctctgctaaatcagtgcagaagagaaatgtgggattagagcccccacacagagaccctactggggcactgcctagtgaagctggggtctaggcagaccccagaatggcagatccactgactgcttgcaccatgcacctggaaaagctgcagaaactcagcactagcctgtgaaagcagtcaggatggtgggctgtacactgcaaagccacaggggcagagctgcgcaaggctgtgggaacccacactctttcattagcatgacctggatgtgagayatgcagtcaaaagagatcattttggaactttaaggtataatgactgcctattagatctcagacttgtatggggtctgtggcccctttgttttggccaatttctcccatttggaatgggtgtatttaccgaattcctctactcccattctatctagaaagtaactaactggcttttgattttataggctaataggtggaagggacttcccttgtctcagaggagactttggactgtggacttttgagttaacg

SEQ ID NO: 879363 - DNA, 582 bp, Homo sapiens
ataattgaacatacatcaaagtatttcatgtgaaattaagacatacatcaaatacttagaagtatgtagacattccctggcttccctgagcatttgcataattttctcctcctgtgatctgcaagcactttgagtcctacgacccccatcactgagaatagcggttggctcataagaggtccttagtaaatgaacgattggatgattcctgttcattagatctgcactgaacatgcaagttatgacacgtttacccaattatcttacccctggaattaggttaggcagtaatatcatagcctcatcctcagacaaaaacytaaaagtgattatatattaatgcatgtcgtttctaaggccacaggttgtcagcaacaccagggctggcacttgtcccttgcacgtgcacgaagggcgaccccctgacatttcactgcttggcacaggcagcctgcaccgaaggcccatggcatttagttcccttaaggatgtgcgagctcttaccaccccctcaacccacaaattcagctgagtaattttaccaagttgaccttaaactcactgaggtatgaagagatgtaa

SEQ ID NO: 879364 - DNA, 582 bp, Homo sapiens
gaaagccaatgagagcttagctaatataaaagggatggaattcactatcaaaacttttcagagacttagaaaaaatatggaaaattagtgaaaatgtaagagaatgagccttgaaatatcaagataattaaactgcaaactttaagaaggcargaaagatatcctttacttagtttgtcttgtccaactaatggttagttgaatgccatgcacataacacatccctttgagtacttattgaataaatgtagaatgtcattctggaataaattgaggcaagaaactagagggatagcagtgtgaaaaatgagattaatttatttggtatagagtcagtaaatttaagtgggccatttgaaacaacaagcttaaaagaaaaccaaataagcattttcaatgcatagaaatgcaaccatttttctccttctgtactttatccattcaaacattgcttgaaaaaaatataactttcagtcttgcttttttatctccaccaaactcagataattttggtcgttgatgacctttctaagctaattcctattttagaatgctatggatgaatgaatctcaaaacttcat

SEQ ID NO: 879365 - DNA, 762 bp, Homo sapiens
caattataaatgtgttaaaatgaattataggccccaatactggtttctttgtaatattatgcatcaacacccaatgctcttccttgtttattgactttgagcttgaccacataaacaactttgaacaatacaattgagatgatgttagtccagtaatgctagtaaagatattgctgagaaatgtgacagaagatacaaaaataaatttaaawcatagggcatattaagcatatgagttcttctaaaccaattaaatgattttttcattaaaacaatcatcagtatgatttatcagagtcattctaagaactgttggtgatatggaagaaggatgtgaaagcagactgggaaacgagttccattgcaggggcatagatgtaggaaacatgtattccaggtgtagatcagaaaaaaatggtaaatagagagatttcagtagatggcttggatggtttagtgattaaccttttttttggaaagggagaagaagataatgcaaaaatttctcacaagaataacttaataataatgttgttattaaagaaataggagtcagaaaaaaaagggctaggttgtggatatgcaaaattgtggcagaaatgactgactttaaaatttatattagactattaatactgaccagtattaaaatgtcttaaaattataatgtcaaaataaaatatcataacacttctaatgcacttaaaaatattatccacataatacaggagtcttttacagatgagaatgcctagaaatgtt

SEQ ID NO: 879366 - DNA, 762 bp, Homo sapiens
caattataaatgtgttaaaatgaattataggccccaatactggtttctttgtaatattatgcatcaacacccaatgctcttccttgtttattgactttgagcttgaccacataaacaactttgaacaatacaattgagatgatgttagtccagtaatgctagtaaagatattgctgagaaatgtgacagaagatacaaaaataaatttaaaacatagggcatattaagcatatgagttcttctaaaccaattaaatgattttttcatyaaaacaatcatcagtatgatttatcagagtcattctaagaactgttggtgatatggaagaaggatgtgaaagcagactgggaaacgagttccattgcaggggcatagatgtaggaaacatgtattccaggtgtagatcagaaaaaaatggtaaatagagagatttcagtagatggcttggatggtttagtgattaaccttttttttggaaagggagaagaagataatgcaaaaatttctcacaagaataacttaataataatgttgttattaaagaaataggagtcagaaaaaaaagggctaggttgtggatatgcaaaattgtggcagaaatgactgactttaaaatttatattagactattaatactgaccagtattaaaatgtcttaaaattataatgtcaaaataaaatatcataacacttctaatgcacttaaaaatattatccacataatacaggagtcttttacagatgagaatgcctagaaatgtt

SEQ ID NO: 879367 - DNA, 606 bp, Homo sapiens
tagattacaagaattttttcccattctgtaggttgcctgttcactctgatgatagtttcttttgctgtgcagaagctctttagtttaattagatcccatttgtcaattttggcttttgttgcaattgcttttggcgtttttgtcatgaagtctttgcccatgcctatgtcctgaatgatattacctaagttttcttctagggttttgatggttttgggttttacatttaagtctttaatccaccttgagttaatttttgtataaagtgtaaggaagagatccagtttcagttttctgcatatggctagccagttttcccagcaccatttattgaataggagatcctttccccattacttgtttttgtcaagtttgtcgaagatcagatggctgtagatgtgtaatttctgaggtctccgttctgttccattggtctatatgtatgctttggtaccaascagtaccatgttattttggttgccgttgcctttttgttttctggaagtgtttgtgaagaattggagttaattgttctttatttgtttggtaggattcacaatagaacctcctggacctgcactttgtgtgcctgagaaatttttgtag

SEQ ID NO: 879368 - DNA, 670 bp, Homo sapiens
gaatacatgcagcaggttaccttcagtttagccttttgtggcaacaaaatcgcatatacttattgggataaatgactatgtccatatttactattcctgcagttggtttttccctaagtatatttaacttttacattttttacctagaatattcaataatgtaacttatggaccgttgttccactttgccaacatttatttaataatcttattctacatccataacattatctcctacacctgcctttctatatccacaaatgcaataaacacrcattcttatccacactatgatgcagtaactttgtgactagctacttatccaggaggactaaattcatatgtctacaaatagatttgtacacaaatgttcacagcagatttagctataatagtcctaaactggaaacattccaaatgtctaccaagaggtgtacattttgtagtatatccagacaataaaacaccactcaacaatagataggaacaaacatacaacaatatggctgaatctcattttgactcatgcatagccaaaaagccacacactgtaaacagtggatactgtagggttccagtcaggtgagatctgagataaaggaaaacaaatggataatgatagaactcaaaacagcaattgccctttggttgtaggagtaggggcctgaga

SEQ ID NO: 879369 - DNA, 633 bp, Homo sapiens
ttttgattgtgacatttagcccatttacatttaatgtatgtgaatttgatccatcatcatgatactagctggttattttgcacaattgttgaacagtttcttcacaatgtttttggtctttatatttttgtgtgtttttgcagtggctggtactggtttttcctttccatatttagtgcttccttcaggagctcttgcaagggacgcctggtggtgatcaaatctctcagcatttgcttgtctggaaactattatatttccctttgcttctgattcttagtttgcctcgatatgaaattctaggttgaaaattcttttctgtaagaatattgaatatyggtccccattctcttcttgcttgtagggtttctgctgagagatcgactgttagtgtgatgggcttccctctgtaggtaacctgaccttttttctggctgcccttaatattttttccttcattttgaccttggagaatctgatgattatgtgtcttggagttgtcttcttgtggaatatgttagtggtgttctctgtatttcctaaatttgaatgttggcctatcttgctagattggagacattgtcctggatgatatcctaaagtatgttttccaacttagttctatttgcttgg

SEQ ID NO: 879370 - DNA, 597 bp, Homo sapiens
gtctctataaaaaataaaaaagttagctgggtgtggtggtgaacacctgtagtcccagctactagggaggctgaggatggaggatcaattgagcccaggaggttgaggctggagtgagccgtgattctaccactgcactccagctgcagtgacaaaacgagaccctgtctcaaattttttttttaaaaaagaatattttatataattgctcaacttcagtatgtatgtctagcacttaaaaacttaaatctatttttgcctaagtttgatattctgagaactaataccaggtgatattgttgccttaggtttttattctacccccacgktagcccctccatcacacctcttctttgtcgttcatgtattggtggcacccagttccctcttctttttaggagcaattttcaagaaaggatctaatattggtgatttataactcagtgtgaacttaaacccatcaggacctctggtaagggtattgtcttatctctgatgatgaaatgaagagacttcaaggaagagggaaaggcaaggaaattacattcaatactggcagctacttcatgtcagatcctgccctaaattctgctcgta

SEQ ID NO: 879371 - DNA, 618 bp, Homo sapiens
acagaaaggatcccccagcacagtacagctgctctaccaaaatgtgaccagactgcttctttaagtgggattctgatccattcctcatctttgagtgggacctccaaaccagcgcctccagccacccctttccatattgtctggccaacagtttttatttctccctgggatggagtgcccaatgggaggggtacaccatcatctttgctgtttcggtgacaattgttccagcctgtgagctttagagagcccaagatractgaagaagtggtaacccagcatgacacagctgctctatgaaagtgtggacagaccgctcccttaagtggatcccacttaccaggtgagatttcccctggggcctgccaatgttctctagctgacagaggtttgtaaacttccttggacagagctcctagaggaagaggtaggctgccatttttgttgttttggcaacttagtcattctagcctccaggctttggagagcccaagccaacaggggcagaagcagtaccccaacacaggacagctgctctacaaaagcatagctagacagcttctttaagtaggtctccaatcctattcctcccgactgcatgagacttccctagaggag

SEQ ID NO: 879372 - DNA, 646 bp, Homo sapiens
ggttatctttatagcaataccccaccaccttggtaccaattatctgtattattccatttcacactgctataaagatactacttgagactggataatttatatacaaaagaggtttgactcacagttccacatggctaaggaggcctccagaaacttaacaatcatggcagaaggtgaagggaagcaaggcacagagcaaggaacacagcaacagcaggagagagagaaagagtgcaggaaaaaataaacctgccgcttttaaagccatcagattttgtcagaactcctttaccatcatgagaacagcagggggcaaaccatccactgaatccagtcatctcccatccggycttttcctagatacatgggggatagaatttatgacgagatttggggtggggacagaaagccagaccatatcattgttgcaatcctagtttctgacaaaacaaactttaatccaacaaagatcaaaaaagacaaagaagggcattacctaatggtaaagggttcaattcaacaagaagatctaaccatcctaaatatacatgcacccaacacaggagcacccaaattcataaagcaagttatggtagaccttaaaggagacttatactccctcacaataatagtgggagactttgaa

SEQ ID NO: 879373 - DNA, 646 bp, Homo sapiens
ggttatctttatagcaataccccaccaccttggtaccaattatctgtattattccatttcacactgctataaagatactacttgagactggataatttatatacaaaagaggtttgactcacagttccacatggctaaggaggcctccagaaacttaacaatcatggcagaaggtgaagggaagcaaggcacagagcaaggaacacagcaacagcaggagagagagaaagagtgcaggaaaaaataaacctgccgcttttaaagccatcagattttgtcagaactcctttaccatcatgagaacagcagggggcaaaccatccactgaatccagtcatctcccatccggtcttttcctagatacatgggggatagaatttatgaygagatttggggtggggacagaaagccagaccatatcattgttgcaatcctagtttctgacaaaacaaactttaatccaacaaagatcaaaaaagacaaagaagggcattacctaatggtaaagggttcaattcaacaagaagatctaaccatcctaaatatacatgcacccaacacaggagcacccaaattcataaagcaagttatggtagaccttaaaggagacttatactccctcacaataatagtgggagactttgaa

SEQ ID NO: 879374 - DNA, 619 bp, Homo sapiens
tttttagtgaaattctacattatctcatgttaaaaactctcaatacactaaatattgaaggaacatacctcaaaataataagagctatctatgacatacccaaagccttatcacactgaatgggcaaaagctggaagcattttttttttttttttttttttttggaaaaccagcactagacaatgatgctctctcttaccattgctattcaacatagtattggaagttcaggccagagcaatcaagcaaggaaaagaaataaaggcattcaaatagaaagagaggaagtcaaaatatccctttttgaagatggcatgatcctatatctagaaaactccatcatctcagctcaaaaaattcttaacgtgataagcaacttcagcaaagtctcaggatacaaaatcaatgtgcaaaatagctaacattcctatacacaaaaaaacagtcmagccaagagacaaatcacaaatgaactcccattcacaattgccacaaaaagaataaaatatcaggaatacagctaacaagggaagtggaatatctcgacaaggagaacaacaaaccactgctcaaagaaatcagagatgacataaacaaatgaaaaaacattccatgctca

SEQ ID NO: 879375 - DNA, 660 bp, Homo sapiens
tgctcctgggtggtggttacctgacagagtccctctgaggtggacctgggaaaactggagatgtcatggaaaggcctttggtactgtaccttcctgattcttaggatctgcagctggtggtcctctgagggactgagggttaattgccwtcccctccaaggagatttggatggagaggaatgggatggtgtaatggaaagggtcagaacaaccaacaaccaagatttgaactggggccctgggcaactagagcacacccctctcagagcctcagtttcctccccaagattatcttgaggacacagaagtgttttaagttttgtaagcctgtgtcctaaggtggagtgggggtggagcaccctgcactcctacagttcagaggtcagtaaattagtctgggaaaaggggagtggggctctcctcttgggacaagggaggggccctctctgagtccctttagttaaactgtgaactcccctcagagcaggtatgatccgttatgagagcctggttggaagacccaggagtggcaggacccaggatggatcagagtgagctgtgggggcacacgctgtgggactggcccctgctgggtgaaagaccctcagagctctgggtagaactgcaagcaaaagggtatcccagtgatgtaaatcagac

SEQ ID NO: 879376 - DNA, 487 bp, Homo sapiens
tttcagtggaaatcttaaaggctgagagagagtggcatgacaaatttaaagtactgaatgaaaaaaaaaacttaccctagaatagtatatctggtgaaaatatctttcaaccatgaaggagaaagactttcctagaaaaaacaaagctggctaggtgtggtggctcacgcctgtaatcccagcactttgggaggccaaggcaggcggatcacttgaggttaggagtttgagaccagcctgtccaacatgtctttactaaaaatacaaaaattagctgggtgtggtggtgggcacctgtaatcccagctactcgggaggctgagtcaggagaatcacttgaacccrggaggcagaggctgcagtgagctgagactgtgccactgcactccagcctgagcaacagagtgagactccatctcaaaaaaaaaaaaaagaaaagaaaagaaaaaccaaagctgtgaaatttcatccacaccaggcctgtcct

SEQ ID NO: 879377 - DNA, 592 bp, Homo sapiens
gattagtgccttataaagggtaggagaaaactacttaggccctgttgcccttccttcttctgccatgtgaggacacaatgttcatcccctctggaagatgcagcaccaaggggtcatcttagcagcatagagaatgagcactcaccagacactgaatatcggtgccttgatgttggaatttccagcctccagaactgtaagaaataaatatgttcttcataaattatcctatttgtggtattttgttatagcagcactaatggattaatatagtagacatcccccccgccttggttttttttttttttttttttttttttggggcaggggcactatttttagctcactggaacctttgcctcccagggtccaacaattytcctgcctcaacctcctgagtagctgggattacacacaaatgcccccacaccccgccaatttttgtattattaataaaaacggggggtccaccattttggccaggctgggcttgaactcctgacctcaagggatccaccccgcctcagcctcccaaagtgctgggattacaggcgtgagccaccatacctggcccagtagccaccctaatgtg

SEQ ID NO: 879378 - DNA, 613 bp, Homo sapiens
ttactttttattactatagcaacaacaagggctattattattaattaaaatttattgaacacataccatgtgtcaggcaagtagattactttctgtttagaaaatgccatcacaaaggggacaacacatacaaaagacaatgatctgaatctgcaagtgggaaaaaaactaaartggattttcagttgtttgaaataaaattccttgccatcagcatttgctcaatattgataaagggaagattcaggtccctttgtaagagagagagggaaaaaacagagacattgattgaatccatactgtgaaactgtgcagtaggtattgacccatcattgctctcaaacaatggaaaaagagtgagatgaatttgctttgtgtagtagccaatcactcaggtggctgagtcacaaacaagatttaatctctgattgctgcacaaaaatgtctacaaagaagctcctgtggaagacatttttcctcacctattcaaggttgcagaggtagttgtctttgtgacttgtgagtggtgtaggagtgtgaagagtataaattagagaagaatataaggaagtttgctgtgtgtttagcaggaactgcatcctaagaaagaatc

SEQ ID NO: 879379 - DNA, 613 bp, Homo sapiens
ttactttttattactatagcaacaacaagggctattattattaattaaaatttattgaacacataccatgtgtcaggcaagtagattactttctgtttagaaaatgccatcacaaaggggacaacacatacaaaagacaatgatctgaatctgcaagtgggaaaaaaactaaaatggattttcagttgtttgaaataaaattccttgccatcagcatttgctcaatattgataaagggaagattcaggtccctttgtaagagagagagggaaaaaacagagacattgattgaatccatactgtgaaactgtgcagtaggtattgacccatcattgctctcaaacartggaaaaagagtgagatgaatttgctttgtgtagtagccaatcactcaggtggctgagtcacaaacaagatttaatctctgattgctgcacaaaaatgtctacaaagaagctcctgtggaagacatttttcctcacctattcaaggttgcagaggtagttgtctttgtgacttgtgagtggtgtaggagtgtgaagagtataaattagagaagaatataaggaagtttgctgtgtgtttagcaggaactgcatcctaagaaagaatc

SEQ ID NO: 879380 - DNA, 613 bp, Homo sapiens
ttactttttattactatagcaacaacaagggctattattattaattaaaatttattgaacacataccatgtgtcaggcaagtagattactttctgtttagaaaatgccatcacaaaggggacaacacatacaaaagacaatgatctgaatctgcaagtgggaaaaaaactaaaatggattttcagttgtttgaaataaaattccttgccatcagcatttgctcaatattgataaagggaagattcaggtccctttgtaagagagagagggaaaaaacagagacattgattgaatccatactgtgaaactgtgcagtaggtattgacccatcattgctctcaaacaatggaaaaagagtgagatgaatttgctttgtgtagtagccaatcactcaggtggctgagtcacaaasaagatttaatctctgattgctgcacaaaaatgtctacaaagaagctcctgtggaagacatttttcctcacctattcaaggttgcagaggtagttgtctttgtgacttgtgagtggtgtaggagtgtgaagagtataaattagagaagaatataaggaagtttgctgtgtgtttagcaggaactgcatcctaagaaagaatc

SEQ ID NO: 879381 - DNA, 683 bp, Homo sapiens
gtaacacaaaggaagggtaattgcttgatgtgatagatatcacatttaccctgattattatacattgtatgcctgtatcaatatatgtcatgtaccccataaatatatacacatactatttacccacaacaattaaaaattaaagaaagaaaaatattcacagacaagtgaacctgcacagttcaaacccttgctgttcaaggatcaactgcataaacatttctcattcctaataaacaggagttttaatttaaaaacctaaaagtaaattaatagaattcaagccttgaatgtatgtaattgaggggctggcacataacattaggaattatactagaatactatttttttattattattatactttaagttttagggtacatgtgcacaatgtgcaggttagttacatatgtatacatgtgccatgytggtgcgctgcacccattaactcgtcatttagcattaggtatatctcccacagctatccttcccccctccccccaccccacaacggtccccagagtgtgatgttccccttcctgtgtccatgtgttctcattgttcaattccacctatgagtgagaatatgcagtgtttggttttttgttcttgtgatagtttactgagaatgatgctttccaatttcatccatgtccctacaaaggacatgaactcatcatttt

SEQ ID NO: 879382 - DNA, 683 bp, Homo sapiens
gtaacacaaaggaagggtaattgcttgatgtgatagatatcacatttaccctgattattatacattgtatgcctgtatcaatatatgtcatgtaccccataaatatatacacatactatttacccacaacaattaaaaattaaagaaagaaaaatattcacagacaagtgaacctgcacagttcaaacccttgctgttcaaggatcaactgcataaacatttctcattcctaataaacaggagttttaatttaaaaacctaaaagtaaattaatagaattcaagccttgaatgtatgtaattgaggggctggcacataacattaggaattatactagaatactatttttttattattattatactttaagttttagggtacatgtgcacaatgtgcaggttagttacatatgtatacatgtgccatgctggtgygctgcacccattaactcgtcatttagcattaggtatatctcccacagctatccttcccccctccccccaccccacaacggtccccagagtgtgatgttccccttcctgtgtccatgtgttctcattgttcaattccacctatgagtgagaatatgcagtgtttggttttttgttcttgtgatagtttactgagaatgatgctttccaatttcatccatgtccctacaaaggacatgaactcatcatttt

SEQ ID NO: 879383 - DNA, 587 bp, Homo sapiens
aacacaacaaaaaaaaaagaaaactttgggacaatagccttgatggtcattgatgcaaaaatctcaaaaaaatacgtgcaaatcaaatccagcaacacatcaaaaagctattccaccacaatcaagtaggctttatccctgggatgcaaggtaggtccgacatatgcaaatcaataaatgtgattcatcataaacagarctaaagatagaaaccacatgatcatctcagttcaacatcctttcatgttaaaagctctcaacatactaggtaatgaaggaatatagctcaaaataataaaagtcatctatgacaaacccacagccaacatcatactgaatgggcaaaagctggaagcattccccttgaaaactggcacaagtatgctcacccaccactcctatttaacagagtattggaagccctggcaaagagcaatcaggcaaaagaaagaaatgaagagcattcaaacaagaagagagaaagtcaaacaattcctgtttgcagatgacatgattttatatctagaaaaccctatagttatagacaaaaagctcctgcagctgataaacaccttcagcaatgtttt

SEQ ID NO: 879384 - DNA, 587 bp, Homo sapiens
aacacaacaaaaaaaaaagaaaactttgggacaatagccttgatggtcattgatgcaaaaatctcaaaaaaatacgtgcaaatcaaatccagcaacacatcaaaaagctattccaccacaatcaagtaggctttatccctgggatgcaaggtaggtccgacatatgcaaatcaataaatgtgattcatcataaacagaactaaagatagaaaccacatgatcatctcagttcaacatcctttcatgttaaaagctctcaacatactaggtaatgaaggaatatasctcaaaataataaaagtcatctatgacaaacccacagccaacatcatactgaatgggcaaaagctggaagcattccccttgaaaactggcacaagtatgctcacccaccactcctatttaacagagtattggaagccctggcaaagagcaatcaggcaaaagaaagaaatgaagagcattcaaacaagaagagagaaagtcaaacaattcctgtttgcagatgacatgattttatatctagaaaaccctatagttatagacaaaaagctcctgcagctgataaacaccttcagcaatgtttt

SEQ ID NO: 879385 - DNA, 633 bp, Homo sapiens
aggtaaaatgggacagtggccaatatctctcctctttttctacccttctcttctctccaaagagtcacccttcaatttaggatgtcagtaattttctgtgatcacagtggtctctcaggaaaagctcagctaccagtaattttaactttaataaaaatctaattgaaatatagactcttctargaagatttatgttttaagttttgcttttcaaattctgttatgtaataaaagattgtgttgtgtgtagtgggattttaaatatggaactttctggagtcaggaagacatttttggagctattaaaaatatgccaaatatggaagtatctcctcctttaaaaaaataaatgttgtgtatatttaaggtatacaacatgatgttgtgggatacatatagtaaaaaggctactggaataaagcaaattaatacagccatcatctcacatatttatctgtttatttgtttttgtggcaggagcagttaaaatctactcaccatgaatcccaaatacagtacacttttatgtcctatagtcctcatttgtacatttgttctctagacttgtttgtcctacagatctgctacattgaattccctgacctgtatttccccattttctctccacttccc

SEQ ID NO: 879386 - DNA, 561 bp, Homo sapiens
catcacaaaaacagaactaaagacaaaaaccacatgataatcttaatagatgcagaaaaggcttttgataaaattcaatatttcttcatgttaaaagctctgaataaactagacattgaaggaacattcttcaaaataagcgccatctatgaaaaactcacaggcaacattatactaaatgggcaaaagctggaagcatttccattgaaaacaggcacaagacaaggatgccctctctcaccacttctattcaacatagcattggaagtcttagccacagaaatcaggcaagagaaagaaataaagggcrctcaaataggaagccaggaagtaaagcattttctgtttgtagatcacattattctatatctggaaaaccccatagtctcagccccacagcttcttcagctgataaacaacttcagcaaagtttcaggatacaaaatcaatgtacaaaaatcactagcattgctatacaccacaacagtcagactaagagcaaaatcagaaaggccatctcattcacaattgccataaaaattataaaatacctaggaatat

SEQ ID NO: 879387 - DNA, 576 bp, Homo sapiens
gatgggcaaaactaaataaaccctgattcttaaattggcttaagtgatgaagacacgagcttatcgtgctttccttttatccccattggtgtttatatctatactgcggtcatagacgtggtcttttgttaatataactcattaccttaaaagggacaattagtcaattatttatcaaaaaaattatttgttatttttgttcagtttgtgctactgatggattttacaatccagaaagtaattaactaaakaaataaattaaatggctgatgctctcttttcagttaataattgataaattaataaagtttatacttcataatttttacacttctggttgagatacatatctttcaattattcaaattttttagatgattcaaagttaactttaatagtgtactttattcatcaagcaaacattatttagtttctaacatatgctagccactctgacaagggttagggagaaagggttttttgtactcttgaagtttacaatctagaggagagataaacatcatattatcacacaatagtgacaaactgtaacataatgaacactaagaaatgtga

SEQ ID NO: 879388 - DNA, 576 bp, Homo sapiens
gatgggcaaaactaaataaaccctgattcttaaattggcttaagtgatgaagacacgagcttatcgtgctttccttttatccccattggtgtttatatctatactgcggtcatagacgtggtcttttgttaatataactcattaccttaaaagggacaattagtcaattatttatcaaaaaaattatttgttatttttgttcagtttgtgctactgatggattttacaatccagaaagtaattaactaaagaaataaattaaatggctgatgctctcttttmagttaataattgataaattaataaagtttatacttcataatttttacacttctggttgagatacatatctttcaattattcaaattttttagatgattcaaagttaactttaatagtgtactttattcatcaagcaaacattatttagtttctaacatatgctagccactctgacaagggttagggagaaagggttttttgtactcttgaagtttacaatctagaggagagataaacatcatattatcacacaatagtgacaaactgtaacataatgaacactaagaaatgtga

SEQ ID NO: 879389 - DNA, 576 bp, Homo sapiens
gatgggcaaaactaaataaaccctgattcttaaattggcttaagtgatgaagacacgagcttatcgtgctttccttttatccccattggtgtttatatctatactgcggtcatagacgtggtcttttgttaatataactcattaccttaaaagggacaattagtcaattatttatcaaaaaaattatttgttatttttgttcagtttgtgctactgatggattttacaatccagaaagtaattaactaaagaaataaattaaatggctgatgctctcttttcagttaataattgataaattaataaagtttatacttcawaatttttacacttctggttgagatacatatctttcaattattcaaattttttagatgattcaaagttaactttaatagtgtactttattcatcaagcaaacattatttagtttctaacatatgctagccactctgacaagggttagggagaaagggttttttgtactcttgaagtttacaatctagaggagagataaacatcatattatcacacaatagtgacaaactgtaacataatgaacactaagaaatgtga

SEQ ID NO: 879390 - DNA, 666 bp, Homo sapiens
agactcacagctgaattctaccagaggcacaaagaagacctcctaccatttctactgaaattattcaaaaaaattgaaaagaagggactcctctctaacacatcttatgaggtcagcatcaccttaatgccaaaacctggcagagacacaacaaaaaataagaaaacttcagaccagtatctctgatgaacattgatgcaaaaatcctcaataaaatactggcaaactgaatccagcagcacatcaaaatgcttatccaccacagtgaatttggcttcatccctgggatgcaaggttggttcaacatacacaaatcaataactgtgattcaccgcataaacagaaataaagacataaaccataaaccacatgattatctcaatagatgcagaaaagtccttcaataaaattcaacatcccttcatgttaaaamctcttaataaactaggtattgaggaacataccacaaaataataggagccacatatgacaaacccacagcatatatcatactaattggacaaaagctggaagcactccccttgaaaaccaggacaagacaaggatgccctctctcaccactcctatttaatgtagtattggaagttctgtccagggcaatcaagcaagagaaagaaacaaactgtatctgaataggaagataaa

SEQ ID NO: 879391 - DNA, 584 bp, Homo sapiens
atagtacccaaaggattataaatcatgatgctataaagacacatccacacgtatgtttattgcagcactattcacaatagcaaagacttggaaccaacccaaatgtccatcaatgatagactggattaagaaaatgtggcacatatacaccatggagtactatgcagccataaaaaaggatgagttcatgtcctttgcagggacatggatgaagctggaaaccatcattctgggcaaactatcacaaggacagaaaacccaacaccacatgttctcactcataggtgggaattgaacaatgagaacacatggacacagggtggtggacwtcacacaccagggcctgtcatgagctgggggtatgggggagggatagcattaggagaaatacctaatgtaaatggtgagttaatgggtgcagcacatgaacatggcacatgtatacatatgtaacaaacctgcatgttgtggacatgtaccctagaacttaaaatataatataaaagctctatcaaagaaaaaaataaaaataaaaataactgtagaagcagatcaagttaataagccctacatcaatccataaa

SEQ ID NO: 879392 - DNA, 617 bp, Homo sapiens
ttctagggtttttataatgtatagttttatacaatttatcatcttgggttttacatttaagtctctaatccatcttgagttaatttttacataagatgttaggaagggatccagtttctattttctgcatctggctagcagttctcccagcaccatttattaaataggaaatgctttccctattgcttttacttggtttgtcaaagatcagatggttgtagatgtgcagttttatttctgagttctctattctgttccattggtctatgtgcctgttttcgtactagtaccatgytattttggttagtgtagccttgtagagcttgaagttgtgtagcctgatgcctccaggtttgttctttttgcttaggatagtcttggctctcagagctctttattggttccatatgaattttaaaatatttaaatttttttttctacttctgtgaataatgtcaatggtagtttagtgggaatagcattgaatctataaattgctttggcactatgaccattttcacaatatggattcctcctacccaaatgtaaacacaagtatcaatagtcaagttgaccaagtggaagaaagaatatcagagcttgaagactatcttgct

SEQ ID NO: 879393 - DNA, 589 bp, Homo sapiens
ttactttttttatatatactttaagttttagggtacatgtacacaacgtgcaggttagttacatatgtatacatgtgccatgttggtgtgctgcacccagtaactcgtcatttagcattaggtatctctcctaatgctatccctcccccgtccacccaccccacgacaggccccagtgcgtgatgttccccttcctgtgtccatgtgttctcatgttcaattcccacctatgagtgagaacatgcggtgtttggttttttgtccttgtgatagtttgctgagaatgayggttttcagcttcatccatgtccctacaaatgacatgaactcatcattttttatggctgcatagtattccatggtgtatatgtgccacattttcttaatccagtctatcattgttggacatttgggttggttccaagtctttgtattgtgaatagtgccacaataaacatacgtgtgcatgtgtctttatagcagcatgatatatagtcctttgggtatatacccagtaatgggatggctgggtcaaatggtatttctgttctagatccctgaggaatcaccacattgacttccacaatgg

SEQ ID NO: 879394 - DNA, 605 bp, Homo sapiens
acagctgcatctgttgggccaggagtggtggctcacgcctgtaatcccagcactttgggaggctgaggcaggtggatcacaaggtcagaagatggagaccatccaggctaacatggtgaaaccccatctctactaaaaatacgaaaaaattagccaggtgtggtggcgggcacccgtagtcccaagctacttgggaggctgaggcaggagaatggtgtgaacccaggaggcggagcttgcagtgagcccaaatcacaccactgcactccagcctgggcaacagagcaagactccacctcagaaaaaaaaaaaaaaaaaaaagaaaaagaaaaraactgcatctgttggaattcagatgtaacaagaagtatgtattcaaataggtgaaagcagctttctgacagtaccattttagaaccaaggatctttagagcacactttgaaaagcagtgtcctcagaaatctagatacacaagatgctggcaccaactcaggaaaggaaatgatctgttaaagggaagggaaacaaaaccaagctaaaaaattataagagcaaaaatcaaagttgaaagctgctgacacatttcaccatcactgttgaatgc

SEQ ID NO: 879395 - DNA, 650 bp, Homo sapiens
aattattgctaatccaattatttgtatgtattaagtgttttggatggctaatgattttcatgagaaatattggatgatacatctaattttaggtgaaaataaaaagatcacaaattttatatacatgataatcacatcttaaataaaattacatttaaaaagtgccaaaaaattaaaatttgttacgtgcaaaaacttctgctcctggttatgatgcagtcaatggtactagattagtcttcctgccacaatcaactataaacttgaacagactgtgtatggtgcccrttgtcaggcagtggaaaactggcagcatgaggctataatttctaagaaaagtgaaatgctgaaggtagcacctatgtttgccttgacctgagggaaatttcataattccagtgcagcaattcaagcaacactgaaattcagagctccagaaggcagagattagagttcagagaagagctaaaacaactggatttaggtaggtaaagcacaataaaggaaagatatatgcagaggtagctccagaattcagtgtggggattctctacaagtccttggctgaggactggacttctcatacctaggagactaccagagacttatcagagagcaactactatatgactgtgattggaataaaaata

SEQ ID NO: 879396 - DNA, 657 bp, Homo sapiens
ctcatcatcaggtactaacaaacagttctgggacccacatagatccttggtccccactttaagcaacactgatctaaattcttgtagagttggccatggaaatccaagcacactaaagattttgcagtatccagagagaaaggataacaatactcaaataagcactataaatgatgacttcaaaaggctccgtgacaaggattgacactcttcttatctatgaaatgatttttctttgtgagttgaggaaaaacacatattctaagaatgargttaatcttcctttacccggcacgtgttactcctgcttaacatgaactttttattccctacagctccccctcctcttctgaaaccactacacaccttatacacgttatgtacagagagccatgggcatggatcaagagagagagacagaatgcttttgcctaagccaggcatcccctacaatgttaaggttggcttcaaaaatggaatggaaaacaaagttttatgttgaatgaaatattcttttcgaagattttattctctctactcttgggaaagttcctgaataaaaaatacagaggtagccgtcactcacctctataaattggcattgaacagggtaggtaaaacacaggaagcaaagctatgtaagaaggaatacttaga

SEQ ID NO: 879397 - DNA, 657 bp, Homo sapiens
ctcatcatcaggtactaacaaacagttctgggacccacatagatccttggtccccactttaagcaacactgatctaaattcttgtagagttggccatggaaatccaagcacactaaagattttgcagtatccagagagaaaggataacaatactcaaataagcactataaatgatgacttcaaaaggctccgtgacaaggattgacactcttcttatctatgaaatgatttttctttgtgagttgaggaaaaacacatattctaagaatgaggttaatcttcctttacccrgcacgtgttactcctgcttaacatgaactttttattccctacagctccccctcctcttctgaaaccactacacaccttatacacgttatgtacagagagccatgggcatggatcaagagagagagacagaatgcttttgcctaagccaggcatcccctacaatgttaaggttggcttcaaaaatggaatggaaaacaaagttttatgttgaatgaaatattcttttcgaagattttattctctctactcttgggaaagttcctgaataaaaaatacagaggtagccgtcactcacctctataaattggcattgaacagggtaggtaaaacacaggaagcaaagctatgtaagaaggaatacttaga

SEQ ID NO: 879398 - DNA, 491 bp, Homo sapiens
tttcatctcatcagcaagcatgaccttgtctccatcacctcagtaaatggatgaacgttgcatcaaacactgccctaatcttttgcatgatttggaaaagtctggtttgtaagctaataataaacaatgtattttccacttaaaaatcaaatttcattatawccatgagcatggctgtgtgaacgcagtggactccctatagagtcagaacaaggtttatgaaatgaaatgacccctaaaaagccatggtccaaggcatcatggaaacataagctggtcacatacaaacaagctgggaacttttgtttttaggaggcctctacaggaaacactaaatctgctgctagatttcagcagctgcatctggcaggctgtagcatgcattgctttgctgtttggcttactttctggctggcagagctctaaggaggatgttagcagccaaacaggtttgagctgtgaaactatgagttcacgttaaacatagaatt

SEQ ID NO: 879399 - DNA, 608 bp, Homo sapiens
tttcctttctgtttattttcttatggttaaacaagttcaatgtgcctcattttaaataatagtccaaatttcacacatacagaacatttgtgaaaaatatcgtcagtattaccaaaaataccaacttaatatgataagacaaaaaaaaatacccagtgrcataatctaactagctaatagtggtctaaaattcatagcaatatgaaaaatggcaggtttagttatgctattttaaaattacctttacttcaatgtttttatatgatttgaaaaataaaaaggaaaacatacaattgtattctcacattgtacaaacttttaagtttcattgttttcttcaacattgtgagtcatgataagtttccctgcaatttcattttctgaaagaatgtagagaggaacacattttattttatttatttatttatttatcttatttttttaacttgccaaacatttattatggaaagtgataatgtttcaaattttttcttccctttgttttatattttttaattgagcatgattttgttttcctgttctacattttctaccttcattggaataattttttacttatcgtgcctttctctctatttttttttatt

SEQ ID NO: 879400 - DNA, 608 bp, Homo sapiens
tttcctttctgtttattttcttatggttaaacaagttcaatgtgcctcattttaaataatagtccaaatttcacacatacagaacatttgtgaaaaatatcgtcagtattaccaaaaataccaacttaatatgataagacaaaaaaaaatacccagtgacataatctaactagctaatagtggtctaaaattcatagcaatatgaaaaatggcaggtttagttatgctattttaaaattacctttacttcaatgtttttatatgatttgaaaaataaaaaggaaaacatacaattgtattctcacattgtacaaacttttaagtttcattgttttcttcaacattgtgagtcatgataagtttccctgcaatttcattttctgaaagaatgtagagaggaacacattttattttatttatttatttatttatyttatttttttaacttgccaaacatttattatggaaagtgataatgtttcaaattttttcttccctttgttttatattttttaattgagcatgattttgttttcctgttctacattttctaccttcattggaataattttttacttatcgtgcctttctctctatttttttttatt

SEQ ID NO: 879401 - DNA, 604 bp, Homo sapiens
atatcttccaccaaaggatgctaatgatctttctcagcacaagctccaggcacagctttttgacaaccagattatgctgagtggtatatcaccaaagctgcactaagccctctggctgtgaggcatcagaccagtttgtatgctggtgggacaaaactgtggraaaatcatttcccttctatgccaaatttcatttaattgctattgtttacctagtgggaaaagacttatgttccacagctcaagaaaatcaatcctacttcaatacagtgacttaacctggagttacattagcttaatgaaaaaaaggcctggctgaaatataaaatcaagaaatcaactataatttagctaatataatgtaacaataaaaattcttccagaagattaatcttccccaaagctctaatcaattcttaaaatcatcagtccaaatcagtaagtcagtggcataataagcattataatcttaacattttcaaagaagaaaattgaaagagtgaataaagtaatttcattctgtcctaaattttattcaaagaaagaacataacacaaaacctgaaactaccagcttctttcctcaaattttacctaatcattga

SEQ ID NO: 879402 - DNA, 606 bp, Homo sapiens
tattttcaggcttaaaaaaaagttaactctaacctaagcagcagttgtacagccatttcaaatggtggtgcagcattttttaatttctcggaaaatcttttgggagcaatataatatagttctatgaaaaattaatcaatgaaattattatgactgtaatctcataatttcattgtccttctcctttcagtttttacttattctctttaaaattcaaatgcccctaaaaagcatatcatacataataatgactgaaaatagttgcaaaataaaaattgagtaggagagacatttcaaggtttcttttatgagaatgctacgttaaccatgtgacatacacatgctaaaaacaattgtggaaaaaaatgactaatatttgtgtagcacttgacagtttacacaataatatcaaatattctcatttgacyttcaaaaggatttttaaactcgtgtttcacaaatgaggaaaatgagattcagtaatacaaatcagagctgttacatctccttatgatcatgtcacccaataaagcagaggcatttgttttcttgagaagagatgaagaaggcaaaatttattaaaattatgagtcttttttgtagttt

SEQ ID NO: 879403 - DNA, 604 bp, Homo sapiens
  misc_feature 506, 590, 591: n = A,T,C or G
acagcatttaactccatgacctattttattgaatcccccgcatatcttggacagcttccttgagtgtaaattaccatgaaggtaaattgaaaatgtatcaagaaatgggcaaggatgttaatgcagaatcaaggcatcatcgagcttcagttgttatgaagattttttaaagtatctttccaatacagttaaagtgaaaagaattgatttgattaacaaggctttacctttcttaggttaccatctgccttcaacattgtaggtgattcagtttcaatgtcccatcctccagaaaacgtgttccaacctgttcagagcttctttygggctcctgacacttccctcatgtgtttctgcccagcagtgactacccatctggagactgtccaactcccttgggactttatcccccacccccaaccccatcctgtgagagcagggctcccatcatatttatttctgaatccacattgctggtacactctctggcttgaagtgtgtgctanactgtctgctaaagaatcagtgtgttcccctcttgacttaaaagcagaaagggaaatgtatttgtagtgaaaacaaggaggcanngtagggaaaaatc

SEQ ID NO: 879404 - DNA, 609 bp, Homo sapiens
cacagcaccacatcacacttattctaaaactgaccacataattggaagtaaaacactcctcagcaaatgtaaaagaacagaaatcataacagtctctcagactacagtgaaatcaaattagaacttaggatttaagaaactcactcaaaaccgcaaaactgcatggaaactgaacaatgtgctcctgaatgactatgggtaagtaaygaaatttaggcagaaataagttctttggaaccaatgagaacaaacacacaatgtaccagaacctctgggacacagctaaagcagtgtttagcgggaaatttatagcactaaatgcccacaggagagggtgagaaagatctaaaattaacatcctaacatcacaattaaaagaactagagaagaaagagcagacaaagtcaaaagctagcagaagacaagaaataactaagatcagagcagaactgaaggagacagagacacaaaaaaactctaaaaaatcaatgaatccaggagctggttttttgaaaagattaacaaaattgactgctagctagactaataaagaaaaaaaaaagagagaagaataaaatagaaactataaaaaatgataaaggggatata

SEQ ID NO: 879405 - DNA, 609 bp, Homo sapiens
cacagcaccacatcacacttattctaaaactgaccacataattggaagtaaaacactcctcagcaaatgtaaaagaacagaaatcataacagtctctcagactacagtgaaatcaaattagaacttaggatttaagaaactcactcaaaaccgcaaaactgcatggaaactgaacaatgtgctcctgaatgactatgggtaagtaatgaaatttaggcagaaataagttctttggaaccaatgagaacaaacacacaatgtaccagaacctctgggacacagctaaagcagtgtttagcgggaaatttatagcactaaatgcccacaggagagggtgagaaagatctaaaattaacatcctaacatcasaattaaaagaactagagaagaaagagcagacaaagtcaaaagctagcagaagacaagaaataactaagatcagagcagaactgaaggagacagagacacaaaaaaactctaaaaaatcaatgaatccaggagctggttttttgaaaagattaacaaaattgactgctagctagactaataaagaaaaaaaaaagagagaagaataaaatagaaactataaaaaatgataaaggggatata

SEQ ID NO: 879406 - DNA, 529 bp, Homo sapiens
gtaactgaaagtgatggggagaatggaaccatgttggaaaacactcttcaggatattatccaggagaactttccaaacatagcaaggcaggccaacaatcaaattcaggaaatacagaaaacaccacaaaaatactcctcaagaagtgcacacaagacatgtaattgtcagatacaccaaggttaaaatgaaggaaaaggtgttcagggcagccagagagaaagggcgagatagtcacaaagggctgcccatcagactaacagctgatctctcagcagaaaccctacaaggcaaaacagagtggggsccagtattcaaccttcttaaagaaaagaattttcaatccagaatttcatatccagccaaactaagcttcataagtgaaggagaaataaaatactttacagacaagctaatgctgagagattttgtcaccaccaagcctgccttaaaagagctcctgaaggaagcatcaaacatggaaaggaacaagtggtaccagccactgcaaaaacatgccaaattgtaa

SEQ ID NO: 879407 - DNA, 617 bp, Homo sapiens; identical to SEQ ID NO: 877338

SEQ ID NO: 879408 - DNA, 582 bp, Homo sapiens
atagttcataatgacactttttatttctgtggtatcagttgtaataattcctttttaggctttagttttgttttctctttcacttagtctagctaaaggttagtcaattttgcttatctttaaaaatcttatgtttctctattgcattttttatttcattcactgtatttttacctccagtatatctgattattcttccaatatctctgttaaaattttctggtacatttctgagctgattctgtgttttcttgaagttggctgagtttccttaaracagctattttgaattctttatctgatagataatacattatcttcattactttagggtctgtctggagcacataattttgtccattttgtgaggtcatatttccttgaagttttttgatgctcgtggacatgcaataaaatacaggaatttggtatttattatattctttgcagtctgactttgtgtctgtttttcagagggccttcagtgtgccttctaagcagactattgagttccatgaatctgtgaccactgcaatcatctcagcactagaggattctctaagcccaggtatacagggaatg

SEQ ID NO: 879409 - DNA, 654 bp, Homo sapiens
gcatattggagagtccagtcttcatttgaattaatatgtgtgtctaatccatcttcctatctaatctggcaaatctatctaatctacttaatctattttatctacctaggtatttacctagctacctaatctagcaaatctatccatctacatatatttaattgttcatgccaatccaaacttactacaagtcagattcttccagaatccagccagattgtgacctctgggatagtacagataagaaactatactacctccccccccycaacacacctgtaattatttaatattgaaggcaagagtattttgctttgagaatgagaaacgttgaatcagaatctggagtgatttccttctccatattctcttcttcccttccttctcttttataattgtttcatgatctgatctcccataatctagcagtaccacagctagactctgggctacacacaaaaaggtatgtcccatttcttggggcagggagaagagagagtagacacagcctcattaagagagaggatgtccatgcaatgtgggcatcctaccagggaggtagggtgattgtccttctcccagggtgcttaataaaggcttcctctgaggctggtcagtggaggtctttcagatcaatgtgcttgttgcttgttt

SEQ ID NO: 879410 - DNA, 640 bp, Homo sapiens
ccctctgaagccatggcccaagctctacactggcccctttcagccacggctggagcagctgggacgcagggcaccaagtccctaggctgcacacagcactgggaccctgggcctggaccactaaacatttcctcctaggcttcctggcctgtgatgggagggcctgctgtgaaaacctctgacgtgccctgcagacattttccccattgtcttgggattaaccttyagctccaagttacttatgcaaatttctgcagcctgcttgagtttttccccacaaaatgggtttttcttttctatcatattgtcaggctgcaaattttccaaactttaatgctctgcttcccttataaaactgaatgcctttaatagcacccaagtcacttcttaaatgctttgctgcttagaaatttcttccaccagataccctaaaccatctctcccaaattcaaggttccacaaatctctagggcaaggaaaaaaggctgccagtctctttgctaaaacataacaagagtcacctttgctccagtttccagcaagttcctcatctccatctgaaactacctcagcctggaccttattttccatgtcactatcaggcttttggtcaaagccattcaacaagtccctaggaagt

SEQ ID NO: 879411 - DNA, 610 bp, Homo sapiens
cctaggaaaatagaataaagggaaatggcattgaaataaaagtcttctatttggaattctgataactgatactattaggcataattttttgagatatctctaattggagtcatgcctcattcagaagtgattaaaagtgtcatttargtgaaaaatcaaacctctctttttgattacatctgtaattataatgcactaacagaacgaatgtaaatacagaagactcatgtgcttttgacatcaaaatgtagttgtaatggcaaaaatgagatgctgtggcagccactcatgttaattacctcaggatttccatatagtcaatccagtgtcgtaatgcattatagaaattatgttttgcatgtttaattgatatgttttggcaggtggttcaaggtccttcttctattttcaaagctagagcagtttccagaatttccgtcatgtaccaagttatgcctgagatagacttggaaacttttggagtctgaaggaaattttgaatcatccttcaatcatctattctacttttctctccctctctcactctgtaggtggtgaaactgcagctcagaagtgagatgcactagaactcaggattctttcattgggc

SEQ ID NO: 879412 - DNA, 629 bp, Homo sapiens
gcaactcaggaagtttaggaggcactgaccttgtcagggtaaatcaggaccttgagggatcttcagcagcgatctcaaactttaatgactatgacaatatctagattgcttgtgaaaaatacaggccagtgagtccacccccaaacttactaaattagaaactttggttgttgccaaggcaatattcatctagtaagtgacccaatttatgccttggataggtatttgggtattaaacttgtttatttattcattyttcattcagtaaatatttataaaatatctactgtacatatttttctacattgggataaatcggtgaaaaatacaaacaggacacatacccttaaggatctacattctagcaggggagacaggtgacaaagagcataatgaataagttgactatgcaatagcctgggtaaagaaaataacaagtagagcagagaatgaggtaaatattgaggatggtaaatattaaggatggtaaatattgagttagggagtagagggttggtaacaaaaccaagtgaggtggtaaggattgggctccttgaaagttttgaagagggtgagggaactaagcagattccagggagatgggtccaaacagagcgagcagagtgaaa

SEQ ID NO: 879413 - DNA, 569 bp, Homo sapiens
ctctgtgaagcctagggacttggcgccctgtgccccagtcgctctacccaaggctgaaaggggtcaatgtgcagcttgggctgtggcttcagagggtggaagccccaagccttggtagcttgcacgtgttgttgagcctgcgagtgaacagaagtcaataactgaggtttgggaacctccgcctagattttggaagatttatggaaacaaytcaatgcccaggcaaatgtttgttgcaagagcagggccctcacggagaacctctgctagggcagtgcagaagggaattgtggggtctgagcctccacacagattccccactggggcacttcttagtggggccgtgagaagagagacacctttctccagatcccagaatggtggatccactgacaacttgcaccttgcacctggaaaagccacagacactcaatgacagcctgtgaaagcagccaggagggggatatacccagcaaagccacagggatggagctgcccaagaccatgggaacccacctcttgcatcagtgtgacctggatgtaagatctggagtcaaaacagatcattt

SEQ ID NO: 879414 - DNA, 569 bp, Homo sapiens
ctctgtgaagcctagggacttggcgccctgtgccccagtcgctctacccaaggctgaaaggggtcaatgtgcagcttgggctgtggcttcagagggtggaagccccaagccttggtagcttgcacgtgttgttgagcctgcgagtgaacagaagtcaataactgaggtttgggaacctccgcctagattttggaagatttatggaaacaactcaatgcccaggcaaatgtttgttgcaagagcagggccctcacggagaacctctgctagggcagtgcagaagggaawtgtggggtctgagcctccacacagattccccactggggcacttcttagtggggccgtgagaagagagacacctttctccagatcccagaatggtggatccactgacaacttgcaccttgcacctggaaaagccacagacactcaatgacagcctgtgaaagcagccaggagggggatatacccagcaaagccacagggatggagctgcccaagaccatgggaacccacctcttgcatcagtgtgacctggatgtaagatctggagtcaaaacagatcattt

SEQ ID NO: 879415 - DNA, 589 bp, Homo sapiens
ggggtagatctctaggagtagaattgctgaatcacatggagggcccatatgtaaattgtaagttgatgttttaatggaaagcataacatatttatgtataagaaagcaatattcagaactatatagtggaaacatttataggtttcagcttgaattttgtcagcattatattaaaagttgtgtaagataaacattttcttttcttacacagtcaacacataacagacactatttcccttctggttatcaaggtgtgtgtgggrttttcttttaccaacatccaatgagttatccagtggatgccaactgggtgtcttataattcagttcaattctgacactatctacctggagttagtcagatcccacaggttaagggctcagccacacaggacttttttcacttcagatgttagttgcaagtaatagattgtcagctatacttctgaaccaccttgctataaatccggatccccattaccttctccctgagtttgattactttgtcaggataccagtttattacagaaggtattgcaaagtatacacttagacagccaaattaagagattatgaaggacaaggtatat

SEQ ID NO: 879416 - DNA, 589 bp, Homo sapiens
ggggtagatctctaggagtagaattgctgaatcacatggagggcccatatgtaaattgtaagttgatgttttaatggaaagcataacatatttatgtataagaaagcaatattcagaactatatagtggaaacatttataggtttcagcttgaattttgtcagcattatattaaaagttgtgtaagataaacattttcttttcttacacagtcaacacataacagacactatttcccttctggttatcaaggtgtgtgtgggattttcttttaccaacatccaatgagttatccagtggatgccaactgggtgtcttataattcagttcaattctgacactatctacctggagttagtcagatcccacaggttaagggctcagccacacaggacttttttcacttcagatgttagttgcaagtaatarattgtcagctatacttctgaaccaccttgctataaatccggatccccattaccttctccctgagtttgattactttgtcaggataccagtttattacagaaggtattgcaaagtatacacttagacagccaaattaagagattatgaaggacaaggtatat

SEQ ID NO: 879417 - DNA, 626 bp, Homo sapiens
cagatggtcctgcacaatatgcagataccagacaaaaatggacagctgcagcactatagcctattttttggacatccctgaaggacagaggtgaagggaaatcttccttgtgggcagaactttgagcagttcacctggtwgtgcactttgcatggaaggagaaatggccagatgtgcgattatattctgattcatgggctgtagctcatggtttggctggatggtcagggacttggaagaagcatttttggaaaattggtacaaagaaatttggggaagaagtatgtggatagacctctctgagtggtcaaaaactgtatatttgtatcccatgtgagtgctcaccaacaggtgacctcagcagaggaggattttaataatcaagggaatgggatgacctgttctgtggacaccactcaacctctatccccagccacccctgcatcacccaatgggcccatgaacaaagtggccgtggtggcagggatggaggttacacatgggctcagcaacatggactcccactcaccaaggctggcctggctatggccactgttgagtgttcaatatgccagcagcagagaccaacactgagccctccatatgacactgttcctcgggttgat

SEQ ID NO: 879418 - DNA, 626 bp, Homo sapiens
cagatggtcctgcacaatatgcagataccagacaaaaatggacagctgcagcactatagcctattttttggacatccctgaaggacagaggtgaagggaaatcttccttgtgggcagaactttgagcagttcacctggtagtgcactttgcatggaaggagaaatggccagatgtgcgattatattctgattcatgggctgtagctcatggtttggctggatggtcagggacttggaagaagcatttttggaaaattggtacaaagaaatttggggaagaagtatgtgkatagacctctctgagtggtcaaaaactgtatatttgtatcccatgtgagtgctcaccaacaggtgacctcagcagaggaggattttaataatcaagggaatgggatgacctgttctgtggacaccactcaacctctatccccagccacccctgcatcacccaatgggcccatgaacaaagtggccgtggtggcagggatggaggttacacatgggctcagcaacatggactcccactcaccaaggctggcctggctatggccactgttgagtgttcaatatgccagcagcagagaccaacactgagccctccatatgacactgttcctcgggttgat

SEQ ID NO: 879419 - DNA, 635 bp, Homo sapiens
accaaggttgaaatgaaggaaaaaattttaaggtcagtcagagagaaaggtcaggttacccacaaggggaagcccatcagactaacagtggatctctctgcagaaaccttacaagccagaagagagtgggggccaatattcaacattcttaaagaaaagaattttcaacccagaatttcatatccagccaaacwaagcttcataagtgaaggagaaataaaattccttacagacaagcaaatgttgagagattttgtcaccaccaggtctgccttacaagaactcctgaaggaagtgctaaatatggaagggaaaaactggtaccagccactgcaaaaacataccaacttgtaaagaacatcaacactatgaagaaactgcatcacctaatgggcaaaataaccagctaccaccatgacaggatcaaattcatacataaaaataataaccttaaatgttaatgggctaaatgtcccaattaaaagacacaaactggcaaattggatagagtcaagacccagacccattggtgtgctgtattcaggagacccaccttatgtgcaaagacacacataagatcaaaataaagggatggaggaatatttaccaagcaaatggaaagcaaaaaaagcagg

SEQ ID NO: 879420 - DNA, 587 bp, Homo sapiens
cctgacaaaaacaagcagtgggaaaaggaatccctatttaacaaatggtgctgggaaaagtggctagccatctgcagaaaattgaaactggactccttccttataccttatacaaaaatgaactcaagatggatcaaagacttaaatgtaaaacccaaaactataaaaaccctagaaaaaaatctaggcaataccactcaggacatagacatggggaaagattttatkatgaaatcaccaaaagcaattgcaacaaaagcaaaaattgacaaatggaatctaagtaaactaaagagcttctgcaaagcaaaagaaactatcaacagaacgaacagataatctacagaatgagagaatatttttgtaatttgtccatcagacaaaggtctaatatccagaatctacaaggagcttaagcaaatttacaagaaaaaaataaacaacctcattaaaaagtgggcaaaggacatgaacagacacttttcaaaggaagacataaatgtggccaacaaacacatgaaaaaaattttaacatcactggtcattagagaaatgctaatcaaaaccacagtaagataccatttcac

SEQ ID NO: 879421 - DNA, 626 bp, Homo sapiens
aagtcaatatatttttttcctttaccttactgcttttggggtatgatgggttatatagtatattttttgataaaagggaacatattagttcattaggagaatatagtattttctggataatagtatctgagaggaaattatgcttttatggagaatattgaataatgattaaagagtattcaacaatggtttgatataagatacagaaaayttattcatttcttaaaatttcaactttaatacattgtgacattaatacatgtctaaatgaagatctttatactaagcagatgagaagtacaaatatagcttttgggttagataagtctatataagacagatctaggagacccaaagggatatatttgtaatgtccattaaaaaatgccaagatatactgcccaaagcaatctacagattcaatgctattcctgtcaagctaccaatttcatttttcatggatctagaaaaaactattctaaaattcatatggaaccaaaaaagaacccaaatagccaaagcattcctaaacaaaaagaacaaagccagatgcattacattaccagatttcaaactatactataaagctatagtaaccaaaacagcaaggtactggtacaaaaaca

SEQ ID NO: 879422 - DNA, 551 bp, Homo sapiens
ttttactgtcattaagtaaacataaggctggggtgcggtggctcatgcctgtaatcccagcacttcgggaagctgagatgggaggatcacttgaggccaggagtttgagaccagcctgggcaatatagtgagatcccgtctcttaaaaaaatgaaaaaattagcagggcgtgatggctcatgcctgtaatctcagttactagagaggctgaggtgggaggattgccagagcccaggagttttgatggtgcagtgagctatgaccatgccactgcacttccagccttggtgacagagcaagaccctgtctcacaaaaaaaaaaaaaaaaaaaaaaaaggaaaagaaaaawttagcagggcgtgatggctcatgcctgtaatcccagctgctagggaggctgaggcaggaggattgcttcagcccaggagtttaaggctgcagtgagctatgaccatgccactgcactcccacctgggtgacagaacaagagcctgtctttaaaaaaaaaaaaaaaaaaaaaaagtaaaaataagcattaatatttctgtccc

SEQ ID NO: 879423 - DNA, 579 bp, Homo sapiens
tccctggtaacctgtcagccctggcttttagatgcttgaaagatgaggttggatacaactatagaacaaacccacccaaaaaagtccttgagagaaaaacatgaagcaaataaaatcagctaagatgctccctgtggaagcgtgtcttaaaaacatttgccttttcctgattgctccaatggaggaataccttattaccaacaaaaagttaggagtgatgtatgggagctaaaaaagtagacctcatggaggtagagactagaatggtggttaccagaggctgggaagggaagggggggatgaaaagttggttaaggggtcccaaaatacagttagggagaaagaataagttttagtatctgacagtayagtagaaaaattagagtcaacaacaatttattgtatatttcaaaacagctaaaaaaatgtgcaatgttcccaacacaaacaaaagataaatgtctgaggtgatggacagcccaattaccctgatttgatcattatacattgtatacatgatcaaaataccacatgtatcccccaaatatgcacaactattatacaacaataaaaaatgtt

SEQ ID NO: 879424 - DNA, 675 bp, Homo sapiens
ccagggtttggtgttactcctgcttgtgttagtagttgctatttatttagtgacttttctgaacttcttctgtaaagtctcgcattatatgtcatgtgttcccactaaagtccctcctcggttagcttaccgatcaggtaatgattaaatgaagatttacttaaattcttggaactgataagtctcctagtttttgccaaggggctctgtgtacatgttggggcataccttcagcactcagctagacaatttacagccatgccttagctttcacttcttgcttgtgcagaacctcaaggtgtcagccagggrtgagagtttatgaacttagtaggtctttcctgaccatgctgacagtctgccctatgcatgcgcgtgacattccaaattgccaggaatatgtcttatggacttctagtttcccaagcatatatcagagtgtttcaaattcctgtggacatcttattcctcagcttttcctattaagctttttgattaggcttttttcccccaaactgttattcattgccgaatacagttgccatgttaaaacacttgtctgtaattgttttccaaaaacaccctctgtggagaggctttagcactagacagctttcattctggtcaaataaagacaaacctttcaaatgaggtcttccagggaaccaccagaca

SEQ ID NO: 879425 - DNA, 634 bp, Homo sapiens
tgcatttaggctaaaatgtcataatttaaattttaactgggttattgaaaaaaagttattggcgaagaaaaaaactaagaggatgtataatggtcaagacagccagcaggggaagagaacagcattgaagaacccatatagatttggaacatgtagacacatggaggaatattatttaaccaagaaagcaaaggggaaaaggtgttcattattctaaaaataaagaaaagagtaaataagatggtgagtgcaatatgaaaatgagaagataatggtaaaaaaaaaaagtgtcagttctgctcttgagtatcattaatttgatgatgcaaatcaacttttaatttctttaataagagctccctggaattctacagcaaataaagtcttgagctggcttgtttaatagagaagccaaaattgaattgttargtacagaattttttattggggctcatatcatgaatgtttcggctttcttcttcagagacatgggaacaacgctagtcccacttacaacacttaagaacattctcatgatgactgttgaactggaaaaactgtaagttatttttttctgagatttatttttacttagttggttctttaggtttgttttattattttcttaagtcag

SEQ ID NO: 879426 - DNA, 655 bp, Homo sapiens
ttctaaagtgtagctgatttgagaactactgatgcagttcaaacttttggcacctaacttttgctgatacttttaaggtttggatgcaggaagatgaagtgacacttgatgcatgtttcttggctattctgggcacaattaaggttgaagcacaaactcagaagtgttcatcacaaattaccacccgagaggaacctctccatgagtattctgtgctcggaggaattctttctataartggcttgcttttctgatgtaaacaagcagaaacgatttggatttttttttattttttactttaaatactggaatacatatgcagaatgtgcaggtttgttacatgggtatacatgtgccatggtggtttgctcacctatcaacccatcatctaggttttaagccctgcatgtattaggtatttgtcctaatgctctccctccccttgccccccaaccccccgacaggccccagtgtgtgtttccctccctgtgtctatgtgttttcattgttcaactcccacttatgagtgagaacatgcggtgtttggttttctgttcctgtgttagcttgctgagaatgatggcttccagcttcgtccatgtctctgcaaaggacatgaactcattcttttatatggctgcatggtattccgtgg

SEQ ID NO: 879427 - DNA, 644 bp, Homo sapiens
atatggagtgacttgaattggtcctgtcctgttttcagttaatctgggtaactggagtaaccaaccaaaatgtatttgctaagtcaaagagatcaacatagagagtccatgtttactaatgcctttacagaggtcccctgttatccactccatatggaatacaccccaagacccccagtgggtgcctgaaactacgaatagcatcaaatcctttatgcactatgttttttgtttgttttattaagtcaagaatagttacctttcttsttttttttttattatactttttaagttttagggtacatgtgcaaattgtgcaggttagttacatatgtatacatgtgccatgctgctgcgctgcacccacccactaactcgtcatctagcattaggtatatctcccagtgctatccctcccacctcccccgaccccaccacagtccccagagtgtgatattccccttcctgtgtccatgtgatctcattgttcaattcccacctatgagtgagaatatgcggtgtttggttttttgttcttgtgatagtttactgagaatgatgatttccaatttcatccatggcccaacaaaggacgtgaactcctcattttttatggctgcatagtattccgtggtgtatatgtg

SEQ ID NO: 879428 - DNA, 644 bp, Homo sapiens
atatggagtgacttgaattggtcctgtcctgttttcagttaatctgggtaactggagtaaccaaccaaaatgtatttgctaagtcaaagagatcaacatagagagtccatgtttactaatgcctttacagaggtcccctgttatccactccatatggaatacaccccaagacccccagtgggtgcctgaaactacgaatagcatcaaatcctttatgcactatgttttttgtttgttttattaagtcaagaatagttacctttcttcttttttttttattatactttttaagttttagggtacatgtgcaaattgtgcaggttagttacatatgtatacatgtgccatgctgstgcgctgcacccacccactaactcgtcatctagcattaggtatatctcccagtgctatccctcccacctcccccgaccccaccacagtccccagagtgtgatattccccttcctgtgtccatgtgatctcattgttcaattcccacctatgagtgagaatatgcggtgtttggttttttgttcttgtgatagtttactgagaatgatgatttccaatttcatccatggcccaacaaaggacgtgaactcctcattttttatggctgcatagtattccgtggtgtatatgtg

SEQ ID NO: 879429 - DNA, 557 bp, Homo sapiens
cttcacaatgcaaacacaagtatcaatagccaaatagaccaagcagaagaaaggatatcagaacttgaagagtatcctgatgaaaataaggcaggcagacaagattagagagaaaaaaaacaatgaaaaggagtgaacaaaacctccaagaactacgggattacgttaaaagactgaacctgtgattatagggtacctgaaagaagcagggagaatggaaccaagttggaaaacacacttcaggatattatctaggggaacttccccaacctagcaagacaggaacattcaaattyaggaaacattcaaattcaggaaatccagagaaccccagtaagatattccatgagaaggtcaaccccaaggcacataataatcagattctccaaggttgaaatgaaggaaaaaatgttaagggcagccagagagaaaggccaggtcacctataaagggaaccccttcagactaacagaggagctatcagcaaaaaccctacaagccagaagagattcagggacaatattcaacattcttaaagaaaataattttcaatctag

SEQ ID NO: 879430 - DNA, 383 bp, Homo sapiens
gttgggaggtgttagaattttgaggacaaggtttgagaagtgttatcctatataaggtactatttaaaattattaaaatcctaaattaagaggaaaataaaaccctaacttggtaaaattctattttaagctgtatttctcaccaatattagtttttactattacttttgaagaggatgataaaattmttttattttattttattttattttattttacttattattattattattatactttaagtttagggtacatgtgctttgcaatatttttaaacgtcgtatgtttttagattttaggtattgtgacatatgttaacacaatgagatatctaaaatggtgtgtttttccataatgataccatcacataaactccaaaa

SEQ ID NO: 879431 - DNA, 567 bp, Homo sapiens
tatgaaattgtattaagtttatatgtacatattcaatctcagttttgaagtgcaattatctacaatttgcttgatgaggtcataagaatgaaaatacatattcactctcacttaataccatgaaggataggcttctttgtggaatccaggttattcttatggaacaagctgagaatttctggatgagttgccaraaatgctggatatcttctgtttttatccagattagtccaataaaacaaaaacacaaaaaaagtgcacacatgtatcctcaatttcacagagtataacttaatcctgagataagataaaaataaatgtaatgtatgcataagagttctgaccaaccacttgaaaatattagcagatttaatcaaataatttcttctctcctttttctttcagtttcatttattttttctaaaaatcttcagatagaaacaaataccctttagggtttcctatagagaaaattacatgtaagattgagttatgctcattctgatatatttgcttatcttagtagtaggattcaatctttcttcttggttcatttcatttctcaat

SEQ ID NO: 879432 - DNA, 408 bp, Homo sapiens
tactctctaccctatattctgctcagtatagagcttaaggagataactatcacagctttaggttttttttaattgtgttaatgttgaatcaaaacttttctttaggtgtgcatataaaagggaataagaaagggaaccaactatgttgatagaggaataattcttcaaatgaatgttacattaagaaattgtcaatgaaacactgctgttaataatataaaaggttttatgtrttagattcctctgaatataactttcacattttgtcctcttttgtgctaatagaacattctagtatgccagtagaaaaaaatatcactttagaaaggccttctaatgtaaatctcacatgccagttcacaacatctggggatttgaatgcagtaaatgtgacttggaaaaaagatg

SEQ ID NO: 879433 - DNA, 584 bp, Homo sapiens
tcctctactcatttcccagttccaaagctgcttccacatttttagatatttgttattgccacagccccacttcctggtaccagttttctgttttagtccattttgtgctgctgtaatagagtatctgagactaggtaatttataaagaacagaaatttatttyttacaattttggaggctgggaggtcctgggatgaggggccttcatttggtgagggccttactgctgtgtcatcccatggcagaaaggagaagagcaagagagaatgtacaagagagagaagggaaggggaccaaagatatcttttatcaggaccccactcccgtgataactaattcactcccccaataacatcattattccattcacaagggctctgccttttaaaggtcccacctctcaacacttgcattcagggttaagttttcaaaacatgaactttggaggaaatgttcaaaccatagcagttgtgatcaagcagccatgctgaatatttctgtgaccaaattcctctgcagctttgcttctgttggttgtgctgacaatacccaccttgtctctggatgttaagtgctcccacttg

SEQ ID NO: 879434 - DNA, 618 bp, Homo sapiens
ccctctgaaaactggcaaaagacagagatgccctctcttacaactcctattcgacatagtgttggaagttctggccagggcaatcagtcaggagaaagaaataaagggtattcaattaggaaaagaggaactcaaattgtccctgtttgcraatgacatgattgtatatctagaaaacaccacaatctcagcccaaaatctccttaagctgataagcaacttcagcaaagtctcaggatacaaaatcaatgtgcaaaaatcacaagcattcttaaacaccaataacagacaaacagagagccaaatcatgagtgaactcccattcacaattgcttcaaagagaataaaatacctaggaatccaacttacaagggatgtgaaggacctcttcaaggagaactacaaaccactgctcaatgaaataaaagaggacacaaacaaatggaagaacattccatgctcatggataggaagaatcaatatcgtgaaaatggccatactgcccaaggtattatatacattcaatgccatctccattgagctaccaatgactttcctcacagaattggaaaaaactactttaaagttcatatggaaccaaaaaggagcccccattgc

SEQ ID NO: 879435 - DNA, 600 bp, Homo sapiens
ctcatcatcaccggccatcagagaaatgcaaatcaaaccacgatgagataccatctcacaccggttagaatggcgatcattaaaaagtcaggaaacaacaggtgctggagaggatgtggagaaataggaacacttttacactgttggtgggactgtaaactagttcaaccattgtggaagtcagtgtggcgattcctcagggatctagatctagaaataccatttgacccagccatcccattactaggtatatacccaaaggaatataaatcatgctgctataaagacacatgcacacgtatgtttattgcggcactactcacaatagcaaagacttggaaccaactcaaatgtccaaaaatgatagactggattaagtaaatgtggcacatatacaccatggaaygctatgcagctataaaaaaatgatgagttcatgtcttttgtagggacatggatgaagctggaaaccatcattctcagaaaactatagcaaggacaaaaaagcaaacaccgcatgttctcactcataggtgggaattgaacaatgagaacacatggacacaggccggggaacatcacacaccagggcctgttgtg

SEQ ID NO: 879436 - DNA, 592 bp, Homo sapiens
atgcagtgtttggttttctcttcctacatgagtttgctgagggtaatgacttccagctccatccatgtctctgcaaaggacatgatctctttcctttttatggctgtatattattccatggtcttgatagtagaatgatttatattcctttggttacatacccagtaatgagatggctgggtcaaatggtacttctggttctgtgtctttgaggaattgccacactgtcttctacactggctgaactaatttacatttccacccacagtgtaaaagtrttcctatttctctgcaacctcaccagtatctgttatttcttgactttataataatcaccattctgactggcatgagatagtatctcattgtgatttgcatttctctaatgatcttttatgacattgagctttttttcacgtttattggctgcatgaatgtcttcttttgagaagcatctgttgatgtcctttatccactttttaatggggttgtttgtttttttcttgtaaatttgtttaagttctttgtagattccggctattagacctttgtcagatagatagattataaaaattttctcccactctgtagg

SEQ ID NO: 879437 - DNA, 609 bp, Homo sapiens
tgaaggagtttgttagagttaattaaaaattcattctttatcttgtactttgttttttatcaaactatatttatatattattccaagcataacaaagggtaaatattaataatgtgattaaggaataaacagatgtttcaatttagactctattttgaattaatcagtcttgaactgagaagattttaatgttaattgagttttttcaaaacctcatgtccgtgcaagattgattttttaaaaatcctgttttggctttggtttattgtmgtattaatctgaataacacatataatcatagaatattattatttggcaatagcattttgcaatttaataaatattccttgaattacttcagtatttaatacagacagataaaaagtggaagctggtatggaaaaacagcttcacgtttttaaagtttctgtgttgcaagtggatagaatacttgcagtaacgaaatattcatatcaaatcaaccctcaattataaaattggcttaaaatactattaaaattgggacttctatctatggagcaatttgattaaatggctggaacactattaaaaagtaaggctcctcaaatagaaaaatatcagtggggc

SEQ ID NO: 879438 - DNA, 609 bp, Homo sapiens
tgaaggagtttgttagagttaattaaaaattcattctttatcttgtactttgttttttatcaaactatatttatatattattccaagcataacaaagggtaaatattaataatgtgattaaggaataaacagatgtttcaatttagactctattttgaattaatcagtcttgaactgagaagattttaatgttaattgagttttttcaaaacctcatgtccgtgcaagattgattttttaaaaatcctgttttggctttggtttattgtcgtattaatctgaataacacatataatcatagaatattattatttggcaatagcattttgcaatttaataaatattccttgaattacttcagtatttaatacagacagataaaaagtggaagctggtatggaaaaacagcttcacrtttttaaagtttctgtgttgcaagtggatagaatacttgcagtaacgaaatattcatatcaaatcaaccctcaattataaaattggcttaaaatactattaaaattgggacttctatctatggagcaatttgattaaatggctggaacactattaaaaagtaaggctcctcaaatagaaaaatatcagtggggc

SEQ ID NO: 879439 - DNA, 635 bp, Homo sapiens
atacattacactaaaatctcaataatagagaaaaaacattactcaataaaaatgggcaaatgatttgaatgacacttcagcagagaaaaaaattagatgggaaataaacacatgcaaataggctcaacattattagtcattagatatttgccaataaaattatgatgtgatactacatgtctattagaatagcttaaaaaaaacaaaaggcagaagcccaccaatactaagggctagcaaacatgcaagcatgcagaggagctggaactctgacacattgcttttgagaatgcaaaatgttatagttgttttggaaagcagtttggcaaatgacatttttatagaattagaagaaaaattctaaattcatatggaaccaagaaagaacccaaacatacaaaataatcttaagaaaaaagaaccaagccaaagatatcacactacctaacttcaaattatactacaaggctrcagtaaccataacagcatgatactggcaccaagaaagacacatagaacaatggaacagaacagagagcccagaaataaggccacacacctacaaccatctggtctttcacaaagctgacaaaagcaatggggaaacgactccccatttaataaatgatgctggg

SEQ ID NO: 879440 - DNA, 515 bp, Homo sapiens
aactgatacaaatttaaatggaattgcaaaggagctagaagagccaaactattttcaaaaatataaacaaagttgagtaaattttactataatatttcaaaatatgttagaaaatgatagtgaccaagacatgaagtactggtgtaattacggctatatagatcagtggaacagattacaaagaacttcagaattaacctcttacatatacagtcaattgagttttctccaagatgccaaagcaattcaatgaggaaagaataattttcaacaagtagagataaaaaaatagataaccatatgaaaacgatccaaagaaagttaaacttgattatcacaccagttaacaagcaaaaattggcttgaaatgaattayagacttaaatgtaagatgtctagaagaaaattgtgttgcaagctgactgtgcagattgcaaagatctctaaaatagaatttttttaaaagcttaaactataaaagaaactgatcaataaattggactattccatcaaaa

SEQ ID NO: 879441 - DNA, 531 bp, Homo sapiens
aatcccagcactttgggaggccgaggcgggcggatcacggggtcaggagattgaaaccatcctgggtaacacggtgaagccctatctgtactaaagatacaaaaaaattagctgggcatgatggcagatgcctgtagtcccagctactcaggaggctgaggcaggagaatggcctgaacccaggaagcggagcttgcagtgagccaagattgcgccactgcactccagcctgggcgacagagcaagactccatctcacaaaaaaataataaaaataaaataaaaaaaaaaaagaaaggctgtctttctcctttcccattggccrtctttctccattccctactcctccaatcccctggcaaccactaaatctactttccatgtctgtggacttgactcttcgggacattttacataaatggaatcatgcaatgcagcacattttgcatctggcttttttcacctggcgtgttttcaaggctcattcgtattctagcatatatcaatactttgttcctatttaggactaaat

SEQ ID NO: 879442 - DNA, 626 bp, Homo sapiens
atttgctttactatattgtaagttatgtgtgtccttatatatatcagattaacagtatgcttgcttgcttggctgcagtgctaacctctgaaaacatgtattcagcctgcatccataatatggtagtggcaaggtattaacagaaccaggtataggtgaaatgttttctgaattttcctcttgtttcctctcaagattgtgatccagcttccctcatctaatttatttgctccactcattcatatggatgagaaatctttatttattttttaagcctatacatgrctgattatttgtaaacttaaagaaactgtcccagaaactcttctgctcagtgtaagggtcagataacagctatgaaaacattactgactgcaaaaaaagtacatgtttcctgcccaagagaaagagcatagtggccccaattcaatctcctaatacagctattagaaaaagaagaatgagttttctgctcagaaaatattctttcttctcaatagctcactccatggctaactgtccactttgtacagcaaaagttagttctgtccaagtatttcaatttggcagaacagactttaaggccaaaataatttagtaaaaaattcactaatcttccatttcat

SEQ ID NO: 879443 - DNA, 616 bp, Homo sapiens
attccataaagtcatcaaggttgtcaagacctttctgttgtttttagaaatattttggataagtaaaaaaggtatgacaatttcaaagctggaaggattatacagtcatcctaaatttatgggctgcaatggtcttacattaacctttaacctcacttttcatgagaaatagacagaaatatttagttgggtaaatgcagtgattattctctttctaggagcataaactgctgtaaacttggggcctagagaaaggcttagatcgcagtcattctcttggctttgattccagatgtttgtacagactcagtaaagtgaagtctctgtcctctttcggggcaaaaccataggattgtccatctctgcttttcattcctccccaaacccgctgcctgctgctcctctsacacttttctttcgagtcttcccagcacttgcttaagaataccagtggcaagaggcgtgcagcccatgaagaacagtcctgggtgaaagctgggctggcagggggaagaaagcgcaggtggatttcctccatggcttttgcttttccccattcacctgtgcttatgtaatcacagcctggagttttcaggaataaagcgactagttatca

SEQ ID NO: 879444 - DNA, 556 bp, Homo sapiens
aatttaactcatttacattcaagtttagtgttgatatgtgtggatttgatcatgtcatcatgttttcagcttgttatttttcagacttgtttatgctcagcacagttcttgatgtggctgctttatagtgtcaccrgtttgtgtactccagtgtgtttttgtaatggctagtaatggtcttttctttccacatttagtgcttccttcacatgctcttgtaaggggggtctggtggtaatgaattccctcagaatttgcttgtctgaaaagaattttatttctccttcacttacgaagctcagtttagccaggtataaaattctgggttaaaatttcttttctttgaaaatgttgaatattgaccctcagtctcttttggcttgtatggtttctgctgacatgtccactgttagtctgatggacttccctttgtaggtgatctgacctttctctctagctgctttgaacattttttgtttcattttgactttgaagaatctgatgactatgtgtcttggggatcatctttttgtgaagtatcttactgaggttcttt

SEQ ID NO: 879445 - DNA, 642 bp, Homo sapiens
aagaccaaataaaaagctttacacagcagtgaatgacctagtaagatcttgtcaacagattttcatcaatctccttttctttcaacctttctgctccacttctccaggatgatttatcctcctcccagaagggtgtagtccttcaatgacagcttagtttttgatacatcaaggattttatcatgaacattgagacctatccaatcaccagttccacagctacaggccaaccttcagagaagtcttcctggaatgctaagaaaaggctagagttttttagataaaagttcctctttttggtttgtttttaaaattggtgacaataggtgctgtcttacagattaattccaaggtattgtcctcctttgccaccttggacagttcccacaaaacgttctaggccttactytctttcaaaaattatgcattcatctgagtgctctgtgcaggaagaaaggtgatgtaacagttgtcccatatctgtaagaggtattgtcaaggccagctgatacaggagggaccaatatggaccctttagtcttcttagtttgtaaaacaccttagttcacatttgacagtcatgggaaggattgccaccactgattctatctgggaatagtgatgtctgagatggagatatgt

SEQ ID NO: 879446 - DNA, 600 bp, Homo sapiens
aaatgctgtaacatccagtctctttaggcattctgactactcctagcattctgactttgatccaggctcctagctccttcttcccttcaatctgtacagaagctctttgctcaagccagaatggcctctctattgcagatattcactgtgaacattgtagtgcctctgctcacaactcttctttgatagacccattacctccataggaaatacccactttattttctgtctaattagattctatccattttttgaggatctgaggttttggtttttttttttttttcctttctttcatgactacatcagcctaragtaatctctgtcttttctgacattctatagtgcttttcatctgctggtctcttccatagtaatcattgatttagctgaaacctccatttggagaacaaaaagttcctgagtctttttcctgagtcactatgtattgagagggagttatggcaatacatacatctacattccaatgaaaacttcacagactatttgctacataccatgtataacttattgaacttctgtgagactcatagtctcaaaatccggatgatgctaatttctccttcccaagttatcatg

SEQ ID NO: 879447 - DNA, 598 bp, Homo sapiens
gtgagtcaattaaacctcttttctttacaaattacccagtctcaggtattctttatagcactgtgaaaatggtttaatatacccactcaggctgattttggatacccagaattttaaggtgatacatttttgccatgttcagccactaagtctgtagtaatttgttctgctgtagtagtcataggaagttaatgcactcccttttcaaagcacagtgttgtccctaataacatagttgaaaaacatgggataytgagaaaaacgaaatgactccctatctaacatattaatagatcccagctccctttccttatgtggacaccctcattgtgtaaaggaatggggtggaattgggaggcacctatgatattttatcttttaaatatcatgaacttctttctaactcaggtttggatgaaggcaatgcctattttctatgataaagggaataacacgggtcaacaagattttcacatgtgcactggctaatgttctatgtagtttttaaatagatggctatttttggtcatccacagtactgatttttaaaaggtagggggctgcgtgcagtagctcacatctgtaatcccagcacttt

SEQ ID NO: 879448 - DNA, 598 bp, Homo sapiens
gtgagtcaattaaacctcttttctttacaaattacccagtctcaggtattctttatagcactgtgaaaatggtttaatatacccactcaggctgattttggatacccagaattttaaggtgatacatttttgccatgttcagccactaagtctgtagtaatttgttctgctgtagtagtcataggaagttaatgcactcccttttcaaagcacagtgttgtccctaataacatagttgaaaaacatgggatattgagaaaaaygaaatgactccctatctaacatattaatagatcccagctccctttccttatgtggacaccctcattgtgtaaaggaatggggtggaattgggaggcacctatgatattttatcttttaaatatcatgaacttctttctaactcaggtttggatgaaggcaatgcctattttctatgataaagggaataacacgggtcaacaagattttcacatgtgcactggctaatgttctatgtagtttttaaatagatggctatttttggtcatccacagtactgatttttaaaaggtagggggctgcgtgcagtagctcacatctgtaatcccagcacttt

SEQ ID NO: 879449 - DNA, 683 bp, Homo sapiens
atttgaaataagcgcctttgcagatataacttaggatctcaataagcgattaccttgtattagggcaataaaatctaaattcagtgatgaatatccctgtaagatgcagaaaatggaaggaagatcatgtgaaaacaaagatggagattagagttatgctgccgcatgccaaagaacgtgagtggccagcagccagcaaaatctaaagagatgyggaacagattcttccttaaagcctgcaaaaggcaccaactctgttgacaccttgatgtcagaattctggcattcagaattgtcaaagagtaaattgctgctgttgttagccacagtttctggtgatgcattgtggaagtcctacaaaactaatacagatgtcacctgtatttttcaggactctacagagaaacaatcaatagtatacatatgtgtgtatactactggacatatatatatcttcaaattatttatttacttattataggaattggcttatgtgatcatggaggctgagttgtctcatgatctgccatgtgcaagctgaagactgccatgtacagccagtggtgtaattcagtctgagcctgaaggccaaagaaccaggagtgctgatgttcacaggcaggagaagttgggggggccagctcagagctagttaatgcacccattcctgacccttttgttct

SEQ ID NO: 879450 - DNA, 705 bp, Homo sapiens
cttgtgtttctcctgagaaaatgggattttcttttctatggcattgtcaggctgtacattttctaaacttttatactccgcttcccttataaaactgaatgcctgtaacagcatccaagtcatactgtgaaggctttgctgcttagaaatttcttctaccagatactctaaatcatctctctttacttcaaagtttcacagatttctactgcaggggtaaaatgccaccagtctctgctaaaacataacaacagtcactttgccccagttcctaaaaatttcctcatttcactctgagaccacctcagctgggactttattgtttacatctctatcagcactttgagcaaagccattcatcaagtctctaggaagttccaaactttcccacattttcctgttttactgctgagctctccaaactgttgcaaccccttcatgttacccagttccaaagtctcttctatatttcaggtatctacagcagtgccccactcccagtaccaacttactgtattagcctgttttcatgttgctgataaagacataacctagactgggaagaaaaagagggttaatggacttayaattccacacggctgggaggcctcacaatcatggcagaaggcaaggaggagtaagtcacatcttacatggatggcagcaggcacaaaaaaagtttgtgcagggcaactcccactttaa

SEQ ID NO: 879451 - DNA, 620 bp, Homo sapiens
tatgtaattttaaagatggaaatggtattcagatcatatagattattttgcatatgtgaataatgcgtaacagatctgttaaatgacttcacatgggtcaaacatttaattaagaagatatctgctaaaataaatagcatgtgattcctaattcaatgaacttctacaggcatgtaatcttctttatgtctatgttttgaagtaaatctagttataattattatactgccatattaagcattttggaaattttacataaaaataaaaatatgagtatatagctatatatataaatgagtagatacaattagtgaatatatgtgtctatgtatgcatataaaacactacggagaaatctctcaggaaagaaaatgttctactaaattaaaattattaaattcagcttagtcagtagctatgaaaaattttaccttctctctactgactttaaggtttayggaaaaatgtaattttactgttattttaatggataaatttcaacatacatttttttgaattgatactctcttctaaactaattttcacctaaatttatgtgtttttgaagccattattacatttaataaaattatcacacaaaaacaatgaatatgtgtaag

SEQ ID NO: 879452 - DNA, 651 bp, Homo sapiens
tcactgctgcataatactccatcaggtggagacaacaaaatttaattagtagtctttagtatgacagagtttgaaagaactctgcttggaaataaaaaagatagattaagagtgtaaccataaaatgaaacaagccaagaaaattaagagagaaaaatttttgagcagaattccttccagtttttcaaaggttagacatgccaccatgcatgagcacaaagcacaatgaagactgagcatatatgattaagaggttagtttcataatcaaataatttaaattattatgatacatttaatgatatgtaaaattttaatagcactttatggtaattagacataaataataaattttaacataggtaaccccataatgtaattagggatgattttacataccaaacaggattctcaaarttcctctttgttctccagtactgttcttataatcgttgtcaatgtcaagtattaccctgacacttgtctcatccaatgatactggaagatatccccccaaaatgaaactttttgtatttatggataaaaattatttaacgtgcataaagtactgtgaaatacaatgtaaagaacactgagataatttggatatattcctgatttcaggtagccatagagatgaatacttcattta

SEQ ID NO: 879453 - DNA, 627 bp, Homo sapiens
tagaagacatcttgcagattaatcatctttaaagatggctttgggtttaaatttcattcgaggaataaatttgagttctgttgaattgagacatctcagaaattaacccccaacaatttcccttattcaaaattgcttttacatttatggaaaacaaaacaaactttttaaaaatcaaagttgagagctttcaccttttaataacagtttcaaacttaatatagcttattaagaattaatataataactctttttattgtttaagcctctcttaccagctytaccatgcattaattatttttcttcttttgtatttatacaataaatgcttgacaaaaaaaaaaagctacataatttaagatttttatgacacaatggaaaagtttcttacccccaggggaaaaaacaattctatgatgttctcattgtctttccaggcaaaattttatatattagaaagaagaagaatatgaaaaaaaaaaaagctctagttatactttctgtgatgtgcagcaggtttggaatacatggaacataaaagaatattacatgagctataaagggttaatgctgtgtgttcttaattttaaatttcagataaatatgatttcagctgtgatcctacat

SEQ ID NO: 879454 - DNA, 669 bp, Homo sapiens; identical to SEQ ID NO: 865890

SEQ ID NO: 879455 - DNA, 645 bp, Homo sapiens
attagaaaaaaatttgggggtacactataataattactttttattaatctcagaactttatatcagctaaaaccaaaatcaagcaaaatattcttcaagagaagaatgaatccataacaatttatgatatgctttttttttcttttctttttttattatacttttaagttttagggtacatgtgcacaacgtgcaggtttgttacatatgtatacatgtgccatgttggtgtgctgcacccattaactcgtcatttacattgggtatatctcctaatgctatccctcccccatccctccaccccacaacaggccccgggttctgatgttccccttcctgtgtccaagtgttctcattgttaaattcccacctatgactgagaacatgyggtgtttggttttttgtccttgtgatagtttgctgagaatgatggtttccagcttcatccatgtcctatgatatgcttttaaaatatagatatgaaattaagcaatggcttcagaaggtttatttttggtacttcagtggttaaaataatatttctccacaaagcctttcaaccatgatattggtatatgggctctgttattaaatcagttaaaatgagtaagagattgcataaagcttgccttcagtaagtagttc

SEQ ID NO: 879456 - DNA, 717 bp, Homo sapiens
aatgatagggaaaggttcggggagctagatggccattccgatttactgaagcagaaaaagaaaggcttccaagtcttcttctagtcaattggactggtgcttcagaggcagcacctaagtcaggctctgagtacatacataaaaggcacttgaggccaggtacagaggctcatgcctataatcccagcactttgggaggcctaggtgggcagatcacttgagaccaggagttcgagaccagcctggccaacatggtgaaaccccgtttctactaaaaatacaaaaattagccaggcatggcagtgagtgcctgtaatcccagttactctggaggctgaggcaggagaactgcttgaactcaggaggtggagtttgcagtaagccgagatcataccactgtactccagcctgggcgactttgggaggctgaggtgggcaggtcacttgaggtcaggagttcaagaccagcctggccaacatggtgaaaccccaactctactaaaaatacaaaaattggcgaggtrtggtggtgtgcacctgtgatctcagctactcaggaggctgaggcaggagaattgcttgaacccgggaggcggaggttgcactgagctgagatcatgccattgcactccagcctgggcagcaagagcgagactccgtctcaaaaaataaataaataaataaagcacttgaaagaagtgtatgtgtgtctatggg

SEQ ID NO: 879457 - DNA, 572 bp, Homo sapiens; identical to SEQ ID NO: 878254

SEQ ID NO: 879458 - DNA, 622 bp, Homo sapiens
atgtgaaactgtgagtcaattaaacctctttccttcataaattgcccagtcttaggtatgtctttatcagcagtgtgagagcagactaatattctggatcaaacggtatttctggttccaggtctttgaggaattaccacactgtcttccacaatggttgaactaattcacattcccaccaacagtgtcaaaacattcctatttctccacagccttgccagcayctgttgtttcttgactttttaataatcaccattctgactggtgtgagatggtatctcattgtggttttgatttgcatttctctaatgatcagtgatgttaagcttttctcatgtttcttggccacataaatgccttcttttgataagtggccattcatgtccttttactactaataggttttttttttttcttgtaaatttgtttaagttccttgtagattctggatactagacttctgtcagacggatagattgcaaaaattttctcccattttgtagattatctgtttactctaatagtttcttttgttgtgcagaagctctttagattaattagatcgcatatgtcaatttttgcttttgttacaattgcttgtgacattttcgtcaggaaacct

SEQ ID NO: 879459 - DNA, 634 bp, Homo sapiens
acacacacccttctggttgtgtttctctggagaacccagactaatacacaaagtcattgggcatggtggctcttgcctgtaatcccagcactttgggcatccaaggctggaggattgcttgagcccagttcaaaactagcctggcaacaaaataagaccctatctttgccaaaaaaaaaaaaaaaaaaaagaatagctgcgtgtggtagcacgcacctgtggacccaktcactcaggaggctgaggtgggaggattgcttgaacctgggaggttgtggctgtagtgagctgcgattgtgccactgcattccagtctgggtgacagagcgagaccctgtcttcaaaacaaaacaaaactaaggtggttacaatgatgtataatgccgtgcatcttcaggccttattattccctgttcattcctttagtccaggggtctacaaactatggcccataggcatacagcctgattttgtaaataaagtttgattggagcagtctcgcccattcatttacgtattgtcctgctgctttcataccccactggtagagctgagttgttgtgatggagactatatggccctcaaagctgaaaatcttctactatctggtactttacagaaaacatttgctgac

SEQ ID NO: 879460 - DNA, 563 bp, Homo sapiens
taaaacctagcacctgcttgggctatcccctagagctttaccgtctccccagaaaagtgacagtactagttttggtgtcaatgaaattcttccttccctgagctgaagttctttttgttgttttcaaggaaaatcacaacctggcccaacccaaaagctccacagggaactccgagttgtattcctactcttccttgcttggatatattttcattaaaaccagaaggtcaaaaaaattaagaacatrttctctaaaaattgggttcctggagttcaatgggtagaaaggcataaacccctctttgagaaactttttcaatgaatccaaagaagggatattagaggtagtataatttgttggaaatagcacagatttagtttttaaagttatttaaattttaaaagcagaaatatctctaagcaaacttgggaaaaagagaattttaccagtaattcctccacaataatattgtttttgtgttgactcctccaggctttcatataaatggttgtacttggcatacatgtgatccatgtgatagggagcatgaaatgatgtacta

SEQ ID NO: 879461 - DNA, 601 bp, Homo sapiens
agaaagaaatataaatcatgtttcctctccatttgtggtcacagcagccagctctgcaaggagggaaagcaaaggagaggggaagaaagtgccaggctagatcaggccaggggccacctgtgcaccagctgtgggctcctcatttatttatttatcatcagaaatcctgcccagatttccctgccaagggatcacatctcccttgcaaaatgacccttgttaggcatttttgttctgtggggaaggagatgtgtatraaggggtaagcaagaaagacacagtacctgcccttgtagagctcagagtctgatgtgggaggccaggacctaacagtgaaatgtggctgttccacggtgtgatggcatcaggcgggggagctacctacaccagggaaagcatcagaggagtttccccaaaggaagtggcaatcaaggtgaggttcaaggctgaagccaggaggaggccgccaggcagaagtgcacatttgaaagactacaaatgcatcagagcatggttggtgggcagcttggaggtggtagaacaatgcgggattgttggagcaacctaggcaacagacaatggacaaggggaataccaatgg

SEQ ID NO: 879462 - DNA, 688 bp, Homo sapiens
ccttttctgcatctattgagaaaatcatgtgttttttgtctttagttctgtttatgtaatgaattacatttattgatttgcatatcttgaaccagccttgcatcccggcaatcaagccaacttgattatagtggataagctttttgatgtgctgctagatttggtctttcagtattttgttgaggatttttacattgatgttcatattggtctgaagttttctttttttgtcaggttttggtatcaggatgatgctgccaggttttggtatcaggatgatgctgccagsttttggtatcaggatgatgctggcctcataaaatgatttagggaggattccctctttttctattgtttggaatagtttcagaaggaatggtaccagctcctttttgtacctctggtaaaattcagctgtaaatccgtctggtcctcggcattttttgattggtaggcgatttattactgcctcaatttcagaactcgttattgatctactcagggattcaatttctttctggttcagtcttgggaaagcttatgtgtccaggaatttatccatttcttctagaatttgtagtttatttccatagaggtgtttatagtattctctgatggtatttctgtggagtaagtagtgacatcctctttatcattttttattgtatctacttgattcttctttctt

SEQ ID NO: 879463 - DNA, 646 bp, Homo sapiens
aacatagtgtcaagtttgtgaaaggaaacatcaggggagacatttatatactgaagctttctcaagtaagagcagcctgaacagcagctgataggtaaatcgtgctatatccagggtgcttaagggtaacagaaatgttgagtctgagtcagagaagatacgtgagggtaaaaataatcaatatgtgccaatatttgagggactaagggtgtaaagtgattagacataccctgcactgtgagaaagcatggattaaactgatggtcaaaattttagaaacaatatgaccagtaaagctttcccacaactactacaaggcagtgaattctgagccacatattttgtgttagtaaaaactggtgaccttctgatggcattgyggtgggaaatttttctgcattgtgtaggaagctggattagataatttgtaggttttcttccaaatattagattctatatttttatgtttatttttctgcaggcatgctgagaaattgacatggcaatcaatgagagtttttgtttgaataaatatttcgaagtcaagcccatgttactcaggaattctattgtatctcctttctccaccactttccaaatgcttatttcaaaattgaaagaaatccacaagagcaatttctttcta

SEQ ID NO: 879464 - DNA, 594 bp, Homo sapiens
tgcaactgagccaagatcacaccactgcactccagcctgggcaacagagtgagactctgtctcagaaaaaaaaaaaaaaaaaaaaaagaagaagaagaagaagaagaagaagaagtgactcaatcaggcagttctggctcagggtttctgatgaggctgcagtcaagatgttagtcaaggttatagtcatctgaaggcttgactggggccagaggatctacttccaagatggcacactcacatggctgttgacaggtggcttcagtcctttgccacatggggtttttcgcaggctgcttaagtgcacttacaacatggcagctggcttcctccacagcaagagatccatgagaaagcaaggaggaagccacatgtcctttatgatcaagcaacggaagtcacactccatcatttccataatatcctrttagttacacaaatcagaccttttcgacatgggaagggactataatggagcaagaggcccagaaggctcaggtcactgggggccaacgggctactgtaaatgccttatgcactctgattaactttgccactgtaggtattcctgtttccatactggttcttgtctaa

SEQ ID NO: 879465 - DNA, 587 bp, Homo sapiens
gctacctattcattttatttcataaaaataagtgggtgatctaaaagtacagggtttggggaaaatcagatacctaaatagttgtgaaaattcttccagaagttgaaaggactgttcagagattattattgtcggtgttgatggtgtttcacctccttttaagtcctgcaggcgttttggtgacatttcagcaaactgtgtactcctgtgaattttttattgtgaaattctgccatagagatatcaaatcatgatgccacaaggcccctgctggtttctgaccgtgcttaatagattctgtctctacagcctgacatgtgcagttgtgttggaaaatggctgattaaaaaatttagagtcaacacatgcagccagcctgcatggaacaagatagcgccctgggtgacagcctggggctttgatgcaggaaggatggaarggatcttatgctcctgataggaagtcagacatgcaccctaagaggagaaaattctgaaaaattcataagcttccttatcattaataattaatctctaaaccaacaggcactggcaatttatactggccaacacgggagaacagccaag

SEQ ID NO: 879466 - DNA, 614 bp, Homo sapiens
aagactttagtatctaaggctcttgaggtatttcttcataaacatagtctccagcaatattactacaacttctttccagaattctcagataacaaagctgttaattctcacagaggggctcaaatgtaaaaaatgaaagatttcttctctgagggtaggatcagagccttgtaaaagaaagttgtctggtagtaatatctttcaggctgcaatgtctcagcctatggtggactatgttcatgaaagaaaacctgatacatgcagccagaggatgttgggttgtctgaattaacaatcccagcatgctttgaaattggtgtctcakccacttttgcagaggtcacattaaagtggctgagccaatcacggacaaggaaggagagaagcggaagagagcaggtagtgtggaatgaggtacttctctgaaaagagagttgaaaaaaaagaattggtttcttcaaagaatccccagacctaaaagtcacagtgcaaaagataattaacacaaccaagaagaattgaggcacaaaaggaaattacagaccagctgatctactttggaaatgaatgcatttttacttacagatcttaaagtttgtttttggatagattta

SEQ ID NO: 879467 - DNA, 578 bp, Homo sapiens
tctttttgagacagggtcttgctctgtgacccagactggagtgcaaaggtgctatcatagcttactgcagccttgacctcttgggctcaggcagtcctcccacctcagcctcccaagtagctgggactacagccatgtaccaccacgcccagctaagtttttttaaaaaaatttgtagaggtgggatctcactatgttgtcttggctggtctcgaactccttttttttttttttttttaattttctaaccaggttcaaaatttaatgtccttattttaattatccaaacagacaatttcagttaaaatttatttttttcttgtgaaaagacataatagaagaaaaataagttacaatttgagatgaaaataattatggttttaggggaaggtagcatcagaaaatgggaatgccagyagaatgagcaagaaagtaggaatgagaggaaaacaaatgcctatcagatttggcggttagcttcatatatattatttaattcttacaacagctctacaagatattagagttaccatttttactaactataacaactagaaatgcaagaaacttcttcttta

SEQ ID NO: 879468 - DNA, 631 bp, Homo sapiens
acaatgtgcaggttagttacatatgtatacatgtgccatgctggtgtgctgcaccattaactcgtcatttagcattaggtatatctcctaatgctatccctccccactcccccgaccccacaacagtccccagagtgtgatgttccctttcctgtgtccatgtgttcttattgttcaattccgatctatgagtgagaacatgtggtgtttggttttttgtccttgcgatagtttactgagaatgatgatttccagtttcatccatgtccctacaaaggacatgagctcatccttttttatggctgcatagtattccatggtgtatatgtgccacattttcttaatccagtctatcattgttggacatttgggttggttccaagtctttgctattgtgaatagtgccacagtaaacatacrtgtgcatgtgtctttatggcagcatgatttatagtcctttggtctcgaactcttagcctcaggcagtcctcccacctcagcctctcaaagggctgggattacaggcatgagccaccaaacctggccgtcatcaaattcttttcactccatcttcaagataaatctagaattcaacctttcacccctgcttccatctcaccattggcttcca

SEQ ID NO: 879469 - DNA, 654 bp, Homo sapiens
ttaagtcatatgttctaggcaaagtttagaggacaaggacaagtcaaaatctctagagggaacaaggaaaagcttcccagcttgatagagaacagacaggaggcatataagatctaatttttacagagaatggaccacctggtgtggtctcatacccataatagtttggcatcttaaacatggaaaagaaggcatgattttgccccaaatatcctttatctgacacctaacgcattgctccccagcctagctgctaccttttgattgtgtaccagtgacaagcactttacaaattagggttacacacaagcaaagtaaaaatgcattcaggtcacagacagagaataactgaaaaacttacagacaaatytgagtttatcacaaacaaatggcttaattgtctaacctgttttaggctgataaaaagtgactggacttctcacactgggtttcacagacagaaccaacagacaagccaatgctaaaaaacttgaagcaaggagagtgagttggtttggatctggattttcttgaaataatgaaaacagaaagagtgaagacagcatggtgaggaggtggtaggtactcacgaatggttaaatccatcacttgggaggccaagcagaagacaggatgctcatacatttctctctt

SEQ ID NO: 879470 - DNA, 622 bp, Homo sapiens
tgcgtggtagagagctgaaggccacccatcttgtaaagataacatccttaaaacctaccctcactctcccgacagccatgccacagagctgaatcacaacaagtgtctcatggatggaaacccttccattttgttacatttcgactgtttttaatttgtttatttttacttgtgctaacccttcctcttcactgtcaaccaaaagatcatgaaagactgttgatttctaaagtccaagtaaagactatggcttaacatttcttttagctggacaaggaaggggtttgggagagaagcattgggaatgaggtgacttactctcttaaggaacccaggtagaccaccagtgactgctgctttctttcactagccctcataargcttcctttcatgatctactctagtatctgtttttggacagtgtctgtctctcacctgggctagagtacagtggtggcttgatcttggctcactgcaacctctacctcctgggctcaaaccattctctcacctcagcctcctgagtaattgggactgcaggcatgtgtcaccaagcctggctaatattttgtgtttttgctagagacggggtctcatcatgttgtccaggttggtcatgaac

SEQ ID NO: 879471 - DNA, 655 bp, Homo sapiens
acttgactgtattaagggatatccagatagctcataaagcattatttctgggtgtattagtccagtctcatgttgctaataaagacatattcgagactgggtaacttataaagaaaagatgtttaatggtctcatagtttcacatggctggggaggcttcacaatcgtgatggaagatgaaggaagagcaaagccatgtcttacatggtggcagacaggagagagcttgtccaaggggactcccatttatgaaaccatcagatcttgtgagacttattcactactacaagaacagtatgggggaaactgcccccatgattcaattatctctacctgtccctgcccttgaaatgtggggattattacaattcaaggtgagatttgggtggggacacagccaaaccctatcagtgggtatgcctgtgaggktatttctggaagacattggcatttgagtaagtgagctaagtaaggaagatccacttcacccattgtgggcagcaccatccaatcggctgaggaccagattggaacaaaaagaggaaagaggaattagttatccctacctctctctttctccctctctctcctggagctgagacgcccaccctctcctggcctgagagatcaaaatttcacattttccagacttcag

SEQ ID NO: 879472 - DNA, 670 bp, Homo sapiens
gtttagaaaaagaagagataaatgagtttgaaataatcacaaataggtaattaaattaatcttaactattaattgctaactatacatcaagcatgagttaagtactttgcatctactgagtcatatgaggttaagaagtttgcccactggcacaaaactaacaaggggtgagttaggatttgaactcaggctccagaggctgtgctcagatgaastatttccttcctgatccttcaaccagctgcaggctgtttgcaagtttccctttgaactgatggctggtaaaagtcacaggctctgtcatgtccttctcttgtgtcccctagtagacagtcctgttaagtacccaaagcaggcctcatcattgttttaattagtaaagtttcaggaaatgtctgtggaataaaacctataaagaggaactcaagaaaaaaaatagaagatttattatcccacaagccttagaaatctccaacccaaagtctcaataagaacagtttacacaagagccttggaggaaactgggagaatcgcttgaacccaggaggttgcggtgagccgaaatcgcgccattgcactccagcctgggaaacaagagtgaaacaccatctcgaaaaacaaacaaacaacaaaaaaactatatcccttattccccaaacctaatcaagca

SEQ ID NO: 879473 - DNA, 629 bp, Homo sapiens
gcatctctcaattgtagggaaaggcctgtgcagtcgggatgaacctagcatcacaaaagaggtccccttcctctgtgtagctgtggctaatgcacacccccttgctatcatttctgtgtccaggatgacacaatattcaggatggaggcagaccctctcccatggctgagctcacccagtgctgagtcagatsctcctggctttagacaaataccaggttctttatttctctctgggtcacaacgtaaaagatcatttaaaagactaaattaatttgtccttttccttagatttcctacttatcccatttataagaacaaaaattcaagttctactcataaacaataaaaattgtatactcacatctgcctcaatcctggacctctaaactggtcctgatcacctgggtactataacccagctgtgcaagggagtgagtcaggtaggctgctggttgtgccagaccagtgccttaagggagccctggggtttccaggagatgctgcagcacgtggaggtccagggcatctctccccgtgccatgaccagagcaactctgttttacctattttgtgttagccgttaatgaaatggctaagcatgtttgaagaactacagttctaagcact

SEQ ID NO: 879474 - DNA, 614 bp, Homo sapiens
taaattaaagaaccatagcaatttctagagtcatcatagcctatgaaaagaggaggtgctaaaataagtggcacaaaaaactgtggggactgaggaggctaatctgatttttcaggatactgaaactttttataacctttttataaccaagccactgcaaatgatcctcttccattcctagggcatggctggtaagaactagagcaccgtgtgagaagttaataagacgcccaatttatggagcacccactgggggctattgtatgttcattatccctacttctcacaacaaattaaatactatgaccccatttcaaaactaaggggactggggctcagggatttgtccaaaatcagttcatgctctttcytccatatcagcaactcagattagaagacattcttgaaaatcattaaaacaaatttctttcctttcctccctccctttactcctcatgtcatttctgaataatgactactattttattggacagttactgccctcctcccacctctctggctggtcgagagaattgaggcccttttgtgattaaggaaattctctatctgctcacagggacaagcccatgtttcttgctttacctgtcttcttc

SEQ ID NO: 879475 - DNA, 660 bp, Homo sapiens; identical to SEQ ID NO: 867970

SEQ ID NO: 879476 - DNA, 657 bp, Homo sapiens
gggagtcggagaggacctttccatgttaactgttaaacggtttgggcaggaattgcctgataaattaattcctagaaatagttatgtgtgaactttgacctgggagttgatttctacattgagatgtaattaattttcagtaagtatgttagtgataatttgggggtaagaaatgggggtagtatttctagagtagaagcagtgtgaaaacaggaccacagaggcaggagccatgaagcagatttagttgcgcactttctctggaaaaaygtaggcccctgaaaacagatattgcagagagctctcggcctttccacagcgcactgaatggggatttcggacattttatttagatatcaagtgaaatacaattcaaacaggatagagaacttagggacttagaataatgattgacatttagcaagccctcaataaatgttagctcttgtaattaactactgttttctagaatatgtatggaaactcagatcacttggccaggatgcaacacctgccaaaaaacaaaggaagcgcaatcacttttcaaatccaaaggaaaagacttggagtatatgtggtttaaaaaatgtctgcactgaagcaggaggatcacttgagccctggagttcaagaccagcctaggcaacacagcaagac

SEQ ID NO: 879477 - DNA, 642 bp, Homo sapiens
gcttagtttggctggatatgaaattctgggttgaaaattcttttctttaaaaatgttgaatatgggcccccactctgttctggcttgtagggtttctgcagagagatccactgttagtctgatgggcttccctttgtaggtaacccgacctttctctctggctgccctaaacattttttcctkcatttcaaccttggtgaatctgaggattatgtgtcttttttttttttttttttttaaatatatgaggagtatctttgtggtgttctctgtatttcctgaatttgaatgttgacctgtcttgctaggttggggaagttctcctggataatatcctgaagtgtgttttccagcttggttccattctccctgtcactttcaggtacaccaatcaaacgtaggtttggtcttttcacatagtctcatatttcttgggggctttattcgttccttttcattcttttttctctaatcttgtcttcatgcttatttcattaagttcatcttcaatgtctgatatcctttcttctgcttgattgatttggctattgatacttgtgtatgcttcacgaagttcttgtgctgtgtttttcagttccatcaggtcatttatgttcttttctaaactggttattctagtta

SEQ ID NO: 879478 - DNA, 519 bp, Homo sapiens
tatggaattccactgtgtctaagtcatgtagagaaccctaacagaaggagggtatgatgagattaggtggtcaatccacaatgtttccctcagtaggtatgaggaacaggattaaaaacatgtccattacaatcgtatttttccctccttatcctasgaagccaggtgattacttactgtgtactcaaacaagagaagagacatttgtttttctggataaatttattataggatacttgacaccaggggcaatgaatgacaagagtgaggcactgtactgaaaacagaggaatcaaatatagagaatgatgaaacttcacgctcctcttacaaagaaaaagcaggccatgcataagagggtttaaggggtaagaatctgaattatagctgctatggtctgaatgtgtccttcaaaatgtatgtgtccttcaaaatgtatgtgttggaaactcaatccctaatgcaatagtattgggaagtgaggcctaatgggaggtgtttaagtcgtgggggctctgc

SEQ ID NO: 879479 - DNA, 645 bp, Homo sapiens
tcaaaagctagcagaaggcaagaaataactaagatcagagcagaactgaaggaaatagagacacaaaaaaaccttcaaaaaaaatcagtgaatccaggagctggttttgtgaaaagatcaacaaaattgataaatcgctaggaagactaataaagaagaaaagagagaagaatcaactagatgcaataaaaaatgataaaggggatatcaccaccgatcccacagaaatgcaaactaccatcagagaatactataaacacatctacacaaatcaaccagaaaatctagaagaaatagaaaaattcctggacacatacaccctcccaaggctaaaccaggaagatgttgaatccctaaacagaccaataacaggctctgaaattgaggcagtaatagcctaccaaacaaaaaaagtccaggaccagayggattcacagccgaattctaccagaggtacagagaggagctggtaccactccttccaaaactattccaatcaatagaaaaagagggaatcctccctaactcattttatgagtccagcatcaccctgataccaaagcctggtgcagacgcaaaaaaatgagaattttagaccaatatctctgatgaacatcaacacaaaaatcctcaataaaatactgg

SEQ ID NO: 879480 - DNA, 645 bp, Homo sapiens
tcaaaagctagcagaaggcaagaaataactaagatcagagcagaactgaaggaaatagagacacaaaaaaaccttcaaaaaaaatcagtgaatccaggagctggttttgtgaaaagatcaacaaaattgataaatcgctaggaagactaataaagaagaaaagagagaagaatcaactagatgcaataaaaaatgataaaggggatatcaccaccgatcccacagaaatgcaaactaccatcagagaatactataaacacatctacacaaatcaaccagaaaatctagaagaaatagaaaaattcctggacacatacaccctcccaaggctaaaccaggaagatgttgaatccctaaacagaccaataacaggctctgaaattgaggcagtaatagcctaccaaacaaaaaaagtccaggaccagacggattcacagccgaattctaccagaggtacagagagragctggtaccactccttccaaaactattccaatcaatagaaaaagagggaatcctccctaactcattttatgagtccagcatcaccctgataccaaagcctggtgcagacgcaaaaaaatgagaattttagaccaatatctctgatgaacatcaacacaaaaatcctcaataaaatactgg

SEQ ID NO: 879481 - DNA, 621 bp, Homo sapiens
ccacaaagtcatttttcccttctaagtctctgggcctgtgatgggaggggttgctgtaaaggtccctgacatgccttgagacattttccccattgtctcggtaattagcattcagctcctcattacttatacaaatgtctgcagctggcttgaatttaaccccagaaaatgtggtcttgttttctatcaaattataagccttcaaattttccaaactttaacgctctacttcctcttsaatgctacgccacttagaaattttcaccagaattcacctaaattatctctctcaagttcaaagttccatggatctctagggtagggtcaaaatgccaccagtctctttgcatagcaagagtcaccattactccagttctcaacaagtttctcatttgcatcctagatcacctcagcctggacttgattgttcctatcagtactggcattttggtcaaagccattcaacaagtctctaggaagttctacactttaccacattttcctgtcttcttctgaggcctccaaactgttccaacagaggcagagcctgttacccagttccaaagttgctgccacattttcctgtatttttacagcagcaccccactctctgtggtacca

SEQ ID NO: 879482 - DNA, 621 bp, Homo sapiens
ccacaaagtcatttttcccttctaagtctctgggcctgtgatgggaggggttgctgtaaaggtccctgacatgccttgagacattttccccattgtctcggtaattagcattcagctcctcattacttatacaaatgtctgcagctggcttgaatttaaccccagaaaatgtggtcttgttttctatcaaattataagccttcaaattttccaaactttaacgctctacttcctcttgaatgctacgccacttagaaattttcaccagaattcacctaaattatctctctcaagttcaaagttccatggatctctagggtagggtcaaaatgccaccagtctctttgcatagcaagagtcaccattactccagttctcaacaagtttctcatttgcatcctagatcacctcagcctggacttgattgttcctatcagtaytggcattttggtcaaagccattcaacaagtctctaggaagttctacactttaccacattttcctgtcttcttctgaggcctccaaactgttccaacagaggcagagcctgttacccagttccaaagttgctgccacattttcctgtatttttacagcagcaccccactctctgtggtacca

SEQ ID NO: 879483 - DNA, 621 bp, Homo sapiens
ccacaaagtcatttttcccttctaagtctctgggcctgtgatgggaggggttgctgtaaaggtccctgacatgccttgagacattttccccattgtctcggtaattagcattcagctcctcattacttatacaaatgtctgcagctggcttgaatttaaccccagaaaatgtggtcttgttttctatcaaattataagccttcaaattttccaaactttaacgctctacttcctcttgaatgctacgccacttagaaattttcaccagaattcacctaaattatctctctcaagttcaaagttccatggatctctagggtagggtcaaaatgccaccagtctctttgcatagcaagagtcaccattactccagttctcaacaagtttctcatttgcatcctagatcacctcagcctggacttgattgttcctatcagtactggcattttggtcaaagccattcaacaagtctctaggaagttctamactttaccacattttcctgtcttcttctgaggcctccaaactgttccaacagaggcagagcctgttacccagttccaaagttgctgccacattttcctgtatttttacagcagcaccccactctctgtggtacca

SEQ ID NO: 879484 - DNA, 608 bp, Homo sapiens
tcatttgataaagttcatcaatttgaagacctaatatttttaagacaacaatccaccccaaattgatctatagatacaatgcaatcccaaacagaatcccagcaggggattttgtaaaatttgattctaaaatttgtatggaaatacaaaggacctagaatakctaaagcaattttgaaagaaaaaaaagaacaaatttggaagacttacattatctaaccctaatatttactgtaaagctatagtaatcaagataatatggtactggcataggtattgataaacagatcagcacaatagaataaagtccagaaatataagcacacattgatggtaaatcaagttttgaaaaagatgccaaaggaatccaatggaaatagaaagttttttcaataacagttcgagaacaactggatagctttatgggaatcattaacttcaaacactatgtaatacttttagcaaaataaacatacagacataaacattacaaacaaacctttgtaatgaggctaagcaaaagtttcctagacagaattagaaagcagtaatcataacagaaaaaagtcataaattggacttcacaaaattaaaaatttgtcattgaa

SEQ ID NO: 879485 - DNA, 561 bp, Homo sapiens
ccagtcatatatccaaagaaagaattaatagcatatgtccacacaaaagcttgtacatgaatatttgtaacaatactactgaaatagacaaaaggtgaaaacaagctgtgcccatcaacaggcgaacagataaacaaaatgtggtatatccatacaatgaaatatgatttggtcaaaaaaaakaagtaaactactgatgtaggctacaatacttatgaatcttgaaaatgatatgctaagtgagagaagttggttgtaaaagatgacatactatatgattccattcatgtagaagtcccaagtaaggagacaaaaaggagttggtgttgctcagggctaagatggggagtatagggtggtgataactaaaggtcatggggtttccctttgaggtgatgaaaatgttttaaaattgactgaggtgatggttgtatatgtccgcgaatatactaaaaaccattaaattgtatgctttacttgaattgtatggtatacaaattctatctcaagctgttagaaaagaataaaaagaatattacgaaatcctatgtcaataaattt

SEQ ID NO: 879486 - DNA, 666 bp, Homo sapiens
agtgattagcttttttaaaaattattttaagttctgagatacatgtgcaggacgtgcagttctgttacctaggtaaacatgccatggtggtttgctgcacctatcaacccatcacctaggtatttagacccacatgcattagccatttatcctgatgctctagctacccctgatcgccaacaggccccagtgtgtgttgtttccctccctgtgtccatgtgttctcattgttcagttcccacttatgagtgagaataggtggtgtttggttttctgtacctgtgttwgtttgctgaggatgatggcttccagtcatccacatccctgcaaaggacatgatcttgttccttttcatggctgtatagtattccatggtgtatatgtactacattttctttatccagtttatcattaatgggcctttgggctgatttaatgtctttgctattgtgactagtgctgcaataaacatacacatgcatgtatctttgtaatggaatgatttatattcctttgggtatatatgcagtaatgggattggtgggtcaaatggtatttctggttctagatccttgaggaatcaccatactgtcttccacaatggttgaactaatttaccttcccaccaacagtgtgaaagcatttctatttctccatagcctcgcc

SEQ ID NO: 879487 - DNA, 735 bp, Homo sapiens
tccttgaggaatcaccatactgtctttcacaatggttgaactgatttacattcccaccagcagtgtaaaaatgttcctatttctccacagcctcaccagcatctactgtttcttgacttttgaataattgccattctgactggaatgaggtggtgtctcattgtggttttgatttgcatttctctaatgatcagtgatgttgagctttttttcatatgtttgttggctgcaaaaatgtcttctcttcggaagcgtccatttatttcctttgctcactttttgataaggttgtttgttttttcttgtaaatttgtttaatttccttatgaattcaagatattagacctttgtcagatgggtcaattgcaaaaaatttatcccattccgcaggttgcctgttcactctgatgatagtgttttttgctgtgcagaagctctttagtttaattatatcccatttgtcaatattcgctctggttgcaattgyttttggcattttcgtcatgaagtctttgcccatgcctatgtcctgtatggtattgcctacgttttcttctagggattttatggtttggggtttacattaagcctttaatccatcttgagtgaattttcatataaagtgtaaggaaagggtccagtttatgttttctgcatatggctagccagttttctcagcatcatttattgaatagaagattctttccccattgcttgtttttgccaggtttgttg

SEQ ID NO: 879488 - DNA, 597 bp, Homo sapiens
ttaagatatctaatttgaactgatatgaaatatcaggctcacagtttagaggaaaacattctgccagttatggtcagggaactgcatatttctagcttatcttcttcattgtaaactctctaacacctagaactctacctacccatagtggacactcaaaaataatttgctgaatgaatagtaaatgtggacaaactaaacaaacatgatcaggtaaaaaattattatttgataatatgaaaaaagcagaaaaaaagaaaatttctttttttagagttttcaaaaataggtaaatgtttattgcaaaaattgtggactgtatttttcaatgttatttttgcctagtagaaaacaaggttatctttaagytattaatgtaaattacacaaacatttatatctgaaatatagatttgctatgattttaatatacactcaattgtctccagagttgtgatattgtctttgccacggatataataaccatagtgggaactctaccttatagttagaggttagaaattgataaattatttaaagaaatcaatactctagcaactactaagcagaaagataaaatctggagacatcacattgt

SEQ ID NO: 879489 - DNA, 598 bp, Homo sapiens
caccttttcatagtttgtattgaaatactattgcttctattaataacaatatgtaaagtaaataatgtatattacttcattaatatgtataggaaaatcttcattgtagatacaatagactttgtaaaattcaatgacatttttgaaacaaatgggatgttaaaacaacatactgaaatgagaaaggtttccttgtccccctagcaggacgtccaatggaggtgtgactcactccttcagtgccctgctcctcaaacctctaggggagcatacaggcaggcaggctgtggggctccaaccccacggcagtgtctaggggtgaatgtttacagctcctgaagycccagtgggtgtatgttacagggtgctctcttagtttgccatctataggcggcctgtattaaccagctcaattaaacccccttccttattacaaggacagacggatttctgtatcctggggtttcttgccttagtgtacctgaagaatcaggtcacatgtgggcttggagaatgagtgcaaggctctccgctaatgggggagccagaagggagatggttgtccccagaagctgggccgctagatggccccagctct

SEQ ID NO: 879490 - DNA, 598 bp, Homo sapiens
caccttttcatagtttgtattgaaatactattgcttctattaataacaatatgtaaagtaaataatgtatattacttcattaatatgtataggaaaatcttcattgtagatacaatagactttgtaaaattcaatgacatttttgaaacaaatgggatgttaaaacaacatactgaaatgagaaaggtttccttgtccccctagcaggacgtccaatggaggtgtgactcactccttcagtgccctgctcctcaaacctctaggggagcatacaggcaggcaggctgtggggctccaaccccacggcagtgtctaggggtgaatgtttacagctcctgaagccccagtgggtgtatgttacagggtgctctcttmgtttgccatctataggcggcctgtattaaccagctcaattaaacccccttccttattacaaggacagacggatttctgtatcctggggtttcttgccttagtgtacctgaagaatcaggtcacatgtgggcttggagaatgagtgcaaggctctccgctaatgggggagccagaagggagatggttgtccccagaagctgggccgctagatggccccagctct

SEQ ID NO: 879491 - DNA, 607 bp, Homo sapiens
gtggtttgctgcacccatcaacctgtcatctacattaggcatttctcataatgccatcactacccttgacccccaccctctgacaggccccagtgtgttcctatttctccatctaattttgcaagcatgtcattttataagacttttttcttcactaaaatttgtttgtcttaccttttaaatatagtgacaattgtcatattaaatgcaaacttatcatgatgtatacttttaacatccctcatttgtatggatctttccaagatcccaatttttatttatatttatgtaagtatctttttaattttctttttctaaaaatgtgtgccccaaaatgataagtatatgaggtaatgcctacataagttagcttgatttatcattccrtaaggtgtacatatttcaaaactacatgttgtacatgataacatatatatttttatcaattaaaattaatacttttataaaaagaaaattataaaaatcagaaaattattaaaaattattgtaaaaatcagccttgtgaccgaagaaaatactgaaattctcatagtatgtggaggcctgaaatatattaccaaagacaggtgaacaataacaaaaacaa

SEQ ID NO: 879492 - DNA, 527 bp, Homo sapiens
gaggaaaggctttccatttttctccattgagtaagacgctagttgtcgtttgccatatatggctcttattattcttaagtatgctcattctatacccagtttgtggagggattttatcttaaagagatgtggaatttcattgagtggtttttttttagcatttatttaaaggatcatatgttttttgctcttgcttactaatgtaattattgatttatatatgttgagccatccttgcatccctggaatgaatcccagttgattatggtgtaagatctttttaatgtgttgytgaaattggtttgctattatttcgttgaagatttttgcttctatgtttatcagtgatactgctctgtagtattctctttttgtgtgtccttgtctggtttgggtatcaaaattatgttggcctggtagaaggagttgggaagtactcattctactttaactttttaaaagagtttgagaagaattggtataatctcttttttaaatatttggtagaattcaacaataaagccata

SEQ ID NO: 879493 - DNA, 527 bp, Homo sapiens
gaggaaaggctttccatttttctccattgagtaagacgctagttgtcgtttgccatatatggctcttattattcttaagtatgctcattctatacccagtttgtggagggattttatcttaaagagatgtggaatttcattgagtggtttttttttagcatttatttaaaggatcatatgttttttgctcttgcttactaatgtaattattgatttatatatgttgagccatccttgcatccctggaatgaatcccagttgattatggtgtaagatctttttaatgtgttgttgaaattggtttgctattatttcgttgaagatttttgcktctatgtttatcagtgatactgctctgtagtattctctttttgtgtgtccttgtctggtttgggtatcaaaattatgttggcctggtagaaggagttgggaagtactcattctactttaactttttaaaagagtttgagaagaattggtataatctcttttttaaatatttggtagaattcaacaataaagccata

SEQ ID NO: 879494 - DNA, 619 bp, Homo sapiens
accctttgtgaagtagctggcacacatttcactgtcgggcttttctggtgatgcagaaacacggccctaagaaggttatgcaatctccccaaagtcccacagctggtttgtggctgaggctgtaaactctcatcttagtgcctgactgtggcaatcasctctcttctgggccaccacttggcccagaggaggaagatggatgagggcgctcatgtcaaacactagcctaatccatttttaatggcctttattttcatctcgtgaggaaaatagcatagccttccctggctaaacactagttcaggaaaagccacaaaccagccccctgagtcttgtttacaaaaatgaacccaacctaactctgcctagctggcaaaaactgataaactcatggcagcttccctggccatagcccacggaacaaggatcagtatttctgagtattgtcatgcatttttcttagtttatcatggccagaagaagtgaaaaacactgtaaaaaatgagatgaagaaatcctgggaagaagcaataatatgaggaagatataaaaaggagaagagaaagagaatagagactaagaaagttattgtgcatgggggaccaaagaggatagtgca

SEQ ID NO: 879495 - DNA, 639 bp, Homo sapiens
gctagccagactaataaagaagaaaagagagaagaatcaaatagacataataaaaaatgataaagggatatcaccactgactccacagaaatacaaactactgtcagagagtactataaacacctctacgcaaataaactagaaaatctagaagaaatggataaattcctggacacatacaccctcccaagactaaaccaaaaagaagtcgcatctctgaatagaccaataacaagttctgaaattgaggcacaaattaatagtctaccaaccaaaaaaggcccaggatcagacggattcacagccaaattctamcagaggtacaaagaggagctggtaccattccttctgaaactattgtgaacaatagaaaaagagggactccttcctaactcattttatgaggccagcatcatcctgatactaaaaccaggcagagacacaacaaaaaaagaaaatttcaggccaatatccctgatgaacatcgatgtgaaaatcctcaataaaatactgggaaactgaatccagcagcatatcaaaaagcttatccaccatgatcaagttggcttcatccctgggatgcaaggctggttcaacatatgcaaagcaataaatgtaatccatcacataaacagaacc

SEQ ID NO: 879496 - DNA, 623 bp, Homo sapiens
caatgacaaaaaccacatgattatctcaatagacgcagaaaaggccttcgataaaattcaacaccccttcatgctaaaaactctcaatagactaggtactgatggaacatatctcaaaataataagagctatttatgacaaacccacagccaatatcatactgaatgggcaaaaactggaagcattccctttgaaaacgggmacaagacaaggatgccctctctcaccactcccattcaacatagtattggaagttctggccagggcaatcatgtaaaagaaagaaataaagggtattaaaataggaagagaggaagtcaaattgtctctgtttgcagatgacatgatcacatatttagaaaaccccatcgtctcagcccaaaatctcctaaagctgataagcaatttcagcaaagtctcaggatacaaaatcaatttgcaaaaatcacaagcattcctatacaccaataatagacaaacacaaagccaaatcatgagtgaattcccattcacaatttcaacaaagagaataaaattcctaggaatacaacttacaagggatgtgaaggacctcttcaaggagaactacaaaccactgctcaaggaaataagagaggacataa

SEQ ID NO: 879497 - DNA, 664 bp, Homo sapiens
cagtagaaattatgagacataaacaagcaagggggggaaaagtcccatcgttaagagataaagcaatcaacacagacagcttagagatgctgggattatcacaaagggacttaaaaataactaggattcctatgttgaaggtgctaatagaaaaggttgactgcatgaatgaatagatggaaatggactatttcagtcaagggaaatgggattagcattattctttgaatagttatagatcatttcttgtggctggaggcggggccttcattctatcagcacaaactgcctcaattatcagagaaaaatatgagggttcggctaggaaggaaggacragggaatgactattaggtaggcaaccagcagcagtattgtgagggtacacatagagcatggaaatcattgctctttacaggatacttttcgaagacctaaggaaaactctgttcttatcttaccttaaccagctaggagtatgtatgtgtcatggttagggtaacctaagaaaggctggccacaaggacatcaaagccacatcactgatttccctggaccaagtcagatttcatcatacaatagatggacaggacaggcctctatagactccaggaagaaacagagcaaggaagaaaaactcaaaaagaaaattaaatcaagtagaa

SEQ ID NO: 879498 - DNA, 664 bp, Homo sapiens
cagtagaaattatgagacataaacaagcaagggggggaaaagtcccatcgttaagagataaagcaatcaacacagacagcttagagatgctgggattatcacaaagggacttaaaaataactaggattcctatgttgaaggtgctaatagaaaaggttgactgcatgaatgaatagatggaaatggactatttcagtcaagggaaatgggattagcattattctttgaatagttatagatcatttcttgtggctggaggcggggccttcattctatcagcacaaactgcctcaattatcagagaaaaatatgagggttcggctaggaaggaaggacgagggaatgactattaggtaggcaaccagcagcagtattgtgagggtacacatagagcatggaaatcattgctctttacaggatacttttcgaagacctaaggaaaactctgttcttatcttaccttaaccagctaggagtatgtatgtgtcatggttagggtaacctmagaaaggctggccacaaggacatcaaagccacatcactgatttccctggaccaagtcagatttcatcatacaatagatggacaggacaggcctctatagactccaggaagaaacagagcaaggaagaaaaactcaaaaagaaaattaaatcaagtagaa

SEQ ID NO: 879499 - DNA, 615 bp, Homo sapiens
aatgcaatctcaataaaattccagcaagctattttgtaaatatcaaccaactgattctaaagttcatatgaaaatgtaagagatttagaatagctaacacaataccaaagaagaacacagttggagaattcacactacttgatttcaagacttaatataaagctacagtagttaagaccttattatactggggaaagaatagacacatagaacgatggaaagaatgtagagcccagaaattgaccaacacatatgtagtcaacttatctttgacaaagaagcaaagaaaattcaatggagaaagaagagccttttcaacaaatagtctagaacaattagatgtccatgcaaaaacaaaaaaaacaaaacaaaacctggagagaaaaattacatctttcacaaaaattaactcaaattgcattatggacytaaatgtaggatgcaaaacataaaacttctgtatgaaaatatcagcaaaaatctaggtgaccttcattatagtgatgagtgtttagatacaacatcaaaagcacaatctatgaaagaaaaaaattgatgtcattaaaattaaaaacttctgctctgtgaaagactatttatttgcagaattaaaag

SEQ ID NO: 879500 - DNA, 590 bp, Homo sapiens
tggggcctgttggggggtggggggctaggggagggataccattaggagaaatacctaatgtaggtgacaggttgatgagtgcagctaaccaccatggcgcatgtatacctatgtagcaaaactgcatgttctgcacatgtaccccagaacttaaagtataataaaaaaaaattaacaccaaaaccctatgaagaagttagcataattatccccattttgtggatgarggaagttaggcacaaaatgaatcagtaatttgtccacgtcacacacctaggaaggggcaaagacatgcactcagattctgacattctgacctctgagatcatttccttaatgctatgcaatagaactgctctattgacataatttgtgaggaattgccttcctgagatagaattaagaagcaatgatgatgaaggacaggtaagcccccaaattgtagtttagcttgggatagttcttggctttgcttgggaaagaattcaagagccagttgtatttatctatttatttataacttttattttaggttcaggggtacatgtgaaggtttattacacaggtaaacacgtgtaatgggtttgctg

SEQ ID NO: 879501 - DNA, 533 bp, Homo sapiens
tgccttctaaataggacagtattgttaggtgctttacatgagacaaaataagcttgttctttcctctttagttgtatcaaaaggagcatcaaccacatggaaaaattatgagttcatactgtgaagatgaggagagacaagataataatcttcaggatgacyggtagaaagcagcgagagaaataatttctggaagactaattttgcagttatttgagatgatgacattgaggcatgctctgctcctggatggcatacactttcactttgcctaccaactcagattgacagggtgcttcatggagaaggatggaaaagttacattcagccttcacaagagagggtgccagaatcatttggagaggggaatagtgactttttatggttcccaagtaagtaaccctcccttggagccaagtttgtgctagaagatttaggacgctaaatttaacgatatgactgagttacaaagtcaaatcaatatttataaatatggtgatgatggctgtttattgattatcatcatgaattgt

SEQ ID NO: 879502 - DNA, 602 bp, Homo sapiens
actttcagtgcacaaagtcgaaattgtagtgtgttttgctttcttaagcactaaaatggtcaaagaacctgctttttttttttaataacatacttttttttattcttctaaagcaccttgaactcaggctggtatttaraaaatatgtggacttaaaagcctacttaacttaaacagctatgcttacataaatgactcaatttactgtgccagggatcaattttatgagtaaaggtcaattatcatggctggaaagcactttgtaatcaaaataaaagaggacagtattcaaatttctgtgatttttctcaagagatttttctaaacttttgtgtgtttgtctttacacaactacagttaaattagaaacaaaagtgaaaggataattttaaatacagatagaggtatttaagaaaatctttatataattcaatttgactttaagcaatgtattgaataggtgaaaataattactcaaaatattatcattatacatgtattttttcattataatatgaaaatgatgtaggttcaaacaatataaatgtaatccttagcaaatagagcattcttaagataaattataatattgacttaacatt

SEQ ID NO: 879503 - DNA, 643 bp, Homo sapiens
ggtagtatgtttattttgacaatatcaattctttcaatctgtaaacatggccatcttttcatttatttgtgttctcctaagtttcttttactaatatttcatggttttacttgtaggggtctttaagctctgtttattcctatgtatcttttttggagctattgaaaatgaattgttttcttgatttccttttggatagttcactattagtgtacacaaatactactaaattttgcaggctgatttttgtatcrtgcaactttattgaatttattagttctaacagcattttggtggagacttcaaggttttctgtatataacatcatgccatcttcaaacagggatgatttgatgtcttcttttccaatttggatgcctttgtttctttctcttgcctaattgcactggctaggattttcagtgctatgttgaataagtggtgaaagtgggcattcttgtcttgttcttcatcttagagaaaaagttctcaacttttccctgtgcagtataatgtcagctgtgggatggtcatatatgggttttattgtgtggaggcacataccttgtatacctaattcattgagagtttttaatcatgaagggatattgaattttgtcaaatttttttgtctgcatctatt

SEQ ID NO: 879504 - DNA, 643 bp, Homo sapiens
ggtagtatgtttattttgacaatatcaattctttcaatctgtaaacatggccatcttttcatttatttgtgttctcctaagtttcttttactaatatttcatggttttacttgtaggggtctttaagctctgtttattcctatgtatcttttttggagctattgaaaatgaattgttttcttgatttccttttggatagttcactattagtgtacacaaatactactaaattttgcaggctgatttttgtatcgtgcaactttattgaatttattagttctaacagcattttggtggagacttcaaggttttctgtatataacatcatgccatcttcaaacagggatgatttgatgtcttcttttccaatttggatgcctttgtttctttctcttgcctaattgcactggctaggattttcastgctatgttgaataagtggtgaaagtgggcattcttgtcttgttcttcatcttagagaaaaagttctcaacttttccctgtgcagtataatgtcagctgtgggatggtcatatatgggttttattgtgtggaggcacataccttgtatacctaattcattgagagtttttaatcatgaagggatattgaattttgtcaaatttttttgtctgcatctatt

SEQ ID NO: 879505 - DNA, 602 bp, Homo sapiens
acactcccaccctcagcagacttgacccccctattcatccccagcagaagtctccacccacagtactatcagcctttccacctcatctgagaagaattaatcctgcattgcctgagaaaaaatttaataccttcccaccagaagtagctgccatgcaagacaatgctaattctcctcgggactcacaccccacactactttgtttctagacttataactagactcaagtcttagcaggtctttaaaggggaggtatgatgtttgacccatgagaaagtgtattacactccaraagaacaaattgagttttctaactaatatagatagaaatctagggaacacctgtagaaatggatactaaatgtgtgcagtaatggtcaaaaagtcataaagttggatcaggtctaactttattgacatgggctcactatgcaggttctgcacttaatgttatagcttggaagttacaaagagctggagttgttttatttgttggtcggttggttagctgaaacatggaccaaaagatggccaacagtgagtaaaccaaatattcaggacatacctttgtttaatatagagggagaaataaaagcttatgg

SEQ ID NO: 879506 - DNA, 628 bp, Homo sapiens
ggatttatttttattaacttgcagcatagaaaggagtaaaaataaacaatactcatattttccccagttaatgaaaataaacaagtattagtaaaaagcttctgatctctaagagtacataatagaattctttttgagaataactgctgttttgacaaataccatatccttcaagacaaatcgaacaaccaaaagacaatctgcctttatttctcaaaatgactttgacctcaaattctgaaactgacagggtgactttgctcagtgaataaatatgatacagaaccttttagagggaatcgaatatgccgaatacccaagtgatctctctgtctctctttttttttttttttattatactctaagttttagggtacatgtgcacattgtgcaggttagttacatatgtatacatgtgccatgctggtgcgctgcacccactaaygtgtcatctagcattaggtatatctcccaatgctatccctcccccctcccccgaccccaccacagtccccagagtgtgatattccccttcctgtgtccatgtgatctcattgttcaattcccacctatgagtgagaatatgcggtgtttggttttttattcttgcgatagtttactgagaatg

SEQ ID NO: 879507 - DNA, 661 bp, Homo sapiens
tcctttgcaacccataggaaaaagaatatgtagataggggctctggagttgtgcggccatggacaagacacttattcacttatagccatataaaattgttgtaagattgaataagataattacataaaggactggagtgcagtgctaatcatgtcaagargagttaggtcagcaattaataataataaaaaggagcagaaaatatgaacttctcacctctttggccttggcattcttttactttggtgcgaatggtatagaatgtcagggcccctgcttataggggtgccatacctcatagtcatagtctttgtaatttggatacttattgcaataatttcctgatagatatctataaagtcacttaagaaagggatgtattttttttttctatttgaacactggtactatattgataggattataaagtcagaatgctgagctgtatgatggttattcacactgagataacactttgggagatgctgaaatataattaagaatttattatgaaagagttttgccagtggtagtaatatatctgcttttggaaacagaacattttctttctttctaaatacttgcatttattaaatttctcaattactcacatacgatgctattatatcctaaggactatatttcagttaactttagggag

SEQ ID NO: 879508 - DNA, 611 bp, Homo sapiens
atccactttataggttgcaacttagaatagctaataatcacacaaggtcatacagctagcaagcagaagaactgaagtcaaaatcgctccagatctcttgttctgaactattatgttgtattagctgtcagtataatattacaacttgaggataaaatctgaaggacaataataaaaactattccagaattaagatcttgggtagtctctattttccacttttcaatgtgcaattgtaattcagtaattctgctagtagaaacatagttctgcagaatcctttgattgttactaccatggtagaggaaggaacaggcagttatccttgatttcatttctgagaactccatttcaacagcatgagatttgcttgacayacagtgaacccttcaagcaaacatgttcccttgaacattcaacaaataatctaatttggaaacaccaaataccacaaggaaaaagtagtacttttgttctattttctgacagatttccacaccagtgatttatggacgtatgttaagtttaggattcttatctgaagccaagaaaaaaacctttatatttttgaagcctatcatcctcaatgatggaagccaaacccttggaat

SEQ ID NO: 879509 - DNA, 618 bp, Homo sapiens
tttataatcctttgggtatatatccaataatgggattgttgggtcaaatggtatttctggttctagatccttaaggaatcgccacactgtcttctacagtggtttaactaatttacattcccaccaacagcataaaagcattcctatttttccgcatcctctccagcatctgttgtttcctgacttattaatgatcaccattctaactggcatgagatggtatctcaatgtggttttgatttgcgtttstctgatgaacagtgataatgagcattttttcatatgtctgttggctgcatgaatgtcttcttttgaaaagtgtctgttcatatcctttgcccacttttgatggggttgtttgtttttcttgtaaatttgtttaaattccttgtagattctggatattagccctttgtcagatggatagattgcaaactttttctcccattctgtaggttgcctcttcactctgatgatagtttcttttgctgtgcaagaagctctttagtttaattagactccatttgtcaattttggcttttgttgcaattgcttttggcattttattcgttaactctttgccattgcttgtgtcctgaatggtattccctaggtttt

SEQ ID NO: 879510 - DNA, 597 bp, Homo sapiens
caacagacctttcagcaggaaccctacaagccagcagaaattgggaaccaatattcaacattcttaaagaaaagaagtttcaacccagaatttcatatccagccaaactaagcttcataagcaaggagaaataaaatcctctccagacaagtaaatgctgagatattttgtcaccactgggcttgccttgcaagagttcctgaaggaagtgctaaatatggaaaggaaaaagcaataccagccatggcaaaaatacaccaaaatataaagaccaatgatactatgaagaaactgcatcaactagtgtgccaactaactagatagcatcatgattgcaggataaaatttacacatarcaatactaaccttagatgtaaatgggctacctctatttacatttaaatgccccaattaaaagtcacagagtggcaaattggatagagccaagacccatcagtgtgttttattaaggagacccatctcaccttcaaagacacacataggctcaaaataaagggatggaggaaacttaaccaagcaaatggaaaacaagaaaaaagcaggggttgcaatcctagtctctgacaaaacagactt

SEQ ID NO: 879511 - DNA, 493 bp, Homo sapiens
atggatatgtgagtataattttagatagtgaagatttctatattaaaatgccacatggaaaaaggactaaggggaatgaggagatgagtcatatggaatgcccaagacacagaacaaggcaggcagagaacgtaacaaggataaagacactgaartgaaatcatgcttgctatatttcaaaacaacagcaaggacactagtgtgacagagcaggagtgaccaatgggaggttggagattttgtcagagatatagtcaaggctcaggatcgtacagggacttgtaagcctggaaagcactttcaatttcattcagaatgagatgagaagccattgaaaagtttttaagcagatgagtaaaataatccaccttgtattttaagaggaacgttctacctgctctgtggaatagaaaggtggaagggcaaagcttgaaacagagcagtgaagagtgtactgtaatattatgcgagaaatagtggagggaatgagagg

SEQ ID NO: 879512 - DNA, 566 bp, Homo sapiens
gcctgttcactctgatggtagtttcttttgctgtgcagaagctctttaattggatgccatttgtcaattttggcttttgttgccattgcttttggtgttttagacacgaagtccttgcccatgcctatgtcctgaatggtactgcctaggttttcttctagggtttttatggttttaggtctaacatttaagtctttaatccatcttgaattaatttttgtataaggtgtaaggaagggatccagtttcagctttctacatatggctagccagttttcccagcaccatttattgaacagggaatctttccccattgcttgtttttgtcaggtttgtcaaagatcagatggttgtagctgtgcacaggctgttctttcaggagagttttctcagtcatgattcatctaattcatacctacygagcacttagcatgtgccaggtactggaccaagtgctgctaaacaaaagagacagggtcccccctggccctagcagagtttcagactaatcgaggaggaagcatgaactattaatatgtaaataccaataatgatcagtaagagaa

SEQ ID NO: 879513 - DNA, 677 bp, Homo sapiens
tagctttaggtgtacaagtggtctttgattacatggataaattgtatagtggagatatggttaggccgtgtgtcctcaaccaaatctaatcttgaactgtaaccctcataatccctataaccctcatgtatcaaggaagaggctaggtggagctaattaaatcctgggggcaatttcttgcatgctgttctcatgatagtgagtgagttcccataggacctcatggtgtaataagttcttctcccttcacttgacacttctccttcctgccgccgtgtgaaaaaggtgccttgtttcccctttgccttctgccatgattgtaagtttcctgatgcctccctagccaggctgaactctgagtcaattaaaactcttctttgtaaattgcccagtcttgggcagttctttatagcattatgaaaacagattaatacaattggtaaagtctgagattatagtgcacccatcacytgagtggtgaagattgtacccaatatgtggctttttgtctctcttattcccctcccagcctccccactttggagactccagtatccataattctctttgtcttttacttttgatagttttactataagtatcgataagaaaaccctctgggttgaatctactaggaaatctttaatctttctgactctggaagtccatatctctct

SEQ ID NO: 879514 - DNA, 604 bp, Homo sapiens
aacttgcagtgtattttgtaactgctagtaattcacacaatcttggttgatttcttaaataagaaagctacaatcaaagaaggaatataaaaagcaaaactcttttactcctagcaccttgcataatatttgcacatattaggcactcaataaatatttgataaataaatgattttcatgtattttagtgtatatctaatgtgatattaaaatggcatgtttgaaagtgatctttatttgaacattcattgtactaaacaaaaacttcaattttaagaaaactggattttaaaaatctcttgcacatatacataagtagaaatataatttttttctatttaaaaaaggctaattaataagaaatcacacttacgcatgccatgtaattytcttacagaagcttaacaaagattagtcatagtggctattgttttgctggttagaaagaacatcacagatttacttagacttttttttggaagatagttattaaatacatttacataaaatagtggcatgaagatcctcaatctagtaatgcaagttttgagagactggaggatttggctacatttatattcaagtgaactaacggcactggtcc

SEQ ID NO: 879515 - DNA, 516 bp, Homo sapiens
gctctagacttgtcagatgaaaccttataaaccaatagagactgagggactattttcagtattcttaaataaaagaaattccaactaataatttcatatcctgccaaactaagcttcataagtaagggagaaacaaatttttttgaggcaarcaagtgctaagggaatttattactgtcagaccaaacttatgagaaatccttaagggagttctaaacatggaaatgaaagaatgatacctgctaccacaaaaatacatttaaatacataactcataggccctataaagcaatagaaaccacaaagcaaacagctaacaagttcatgataggttgagacctcacatgtcaatattaactttgaatgtaaatagtctaattgtccctcataaaaggcacagagtggcaagttggattaaaaaataaaacaaacaaacaaaaaaaccaagaaccatttgtctactgtcttcaagagacccatcacacctgtaatgtaatgtcattcataacctcaaag

SEQ ID NO: 879516 - DNA, 615 bp, Homo sapiens
ttcatgtggtagggttgagtgcctgcagcttgtcccggcacacggtgccagctgtcaatggatctagcagtctgtggtctggtggatggttggccctcttctcataactccactaggcagttccccagagagtactttgtgagtgctccaaccccacatgtcccctttacactgtcctagtacaggtatccatgagggctgcccccaagcagcagacttctgcctggacatccaggcttttccatacaccctctaaaatctaggtggagactcccaagcctcagctctggtgctctgcacatccacaggcttaacaccacatggaagctgccaaggtttatggtttgtacactctgaagcagcagcttgaactgtacctgygcccatttgagtcatggctagagttggagtggccaggatgcagggtgtcatgtcctgagactgcacagagtagtaggaccctgggcctggttcaaaaaaacattattcctcctaggcctctggggctgtgatggaaggagctgctgtggaggtctctgaaatgccttggagaccttttctccattgtgttggctatcagcattggtcttccttttactcatccaaatttctgca

SEQ ID NO: 879517 - DNA, 620 bp, Homo sapiens
acttttgaaattcactcttttagtgaaatttaaatgtacggtattcagttattagctttattcttcatgctgtgtaactgatttcaaaaagaggaaaagaaatgaaatgtatttttcctatctaagtaaggcttctaccatttgactgtatcctcattctccccatggcccagtctctgataaatacctgtagtaatctgttttcacactgctgataaggacatacccaagactgagcaatttaccaaagaaagaggtttaatggacttccatttccacatggctggggagacctcacaatcatggcagaaggcaagaaggagcaagtcacgtcttacatggatgacagcaggcaaaaatagaaagcttgtgcagggagacccccaatacacaaaccatcagatctcatgagacccattaactatcatgagaacagcccaggaaagacctgcccccatgactcaatcatctttcactaggtmccccctataacatgtgggaataataggaataaaaagatgagatttgggtggggacacagggccaaaccatatcattctgcacctggcccctcccaaatctcagatcttcacatttcaaaaccaatcatgccttcccaa

SEQ ID NO: 879518 - DNA, 516 bp, Homo sapiens
tttcaaaacagattgtgatagttattttaaaaaagaaaacgaaaacatatatgtaagcccctaaatgacatagtatctacatatagaagtaaaaaaatataaaacacaggtttgttgagctctatgtttagaaatagacagtggaggtcaagagtttgttttctgctaggtaaaatggagtggaagtgtttcaacctcatgcctaaagcaaggcactgtggaatgagagcttcgttactatccaaatactgagctttcctgctttctgccragtattttgacagaagaaaaataacaggttaacaaacaaaaggagaagatattcatgcactgaatgtggactgtttttttggttcaatagatattaaaaagtatagacatgggctcgtgaccaagagctgtaccaaagtatctggcttttgaatatctcctggataagcaaagacagaatatctaaactttttattaccacactggcgtgtggaacgaatggtggaggcaaccaaaaatgataag

SEQ ID NO: 879519 - DNA, 573 bp, Homo sapiens
aagagggccaccatcctccagaccccagaatggtagatccactgacagcttgcaccgtgcacctggtaaagccacagacacttaatgccagactgtgaaagcagccaggagggaggctgtaccctgcaaaaccacagggtttagctgcccaaaatcatgggaacccatttcttgcatcagcatgacctaaatgtgagwcatggagtcaaaagagatcattttggagctttaagatttgactgccctgctggattttggacttgcatggccctgtagcccctttattttggccagtttctcccattaggaagggttgtatttacccaatgtctgtacccccattgtatctagaaaataactagcttgattttgattttacaggctcataggcagaagagacttgccttgtctcaaataagacattggactgtggacttttgagttaatgctgacatgatttaagactttggggcactgttgggaaggcctgattagttttgaaatgtgataacatgagatttcagaggccagaggtggaatgatatgatgtgtctctgtgtccccactcaaata

SEQ ID NO: 879520 - DNA, 653 bp, Homo sapiens
gagaatgaatacagtaccttcaactgaaatatctaggttctcacattgggactgattagggaaacaatttgactgtggacaatgaagaaaagcagggtagggtgatggcccactctggagtgacatagagccaagggaayccccagccctacccagggaaaccgggagtgattgtgtaactccaggaaaccatgcttctaccatggatctttgcaacccatggatcaggagatccccctgtgagctcatgccaccaggaccttgggtctgacacacagagctgtgtggagtcttcagatcagctgctcatgcacacacagagaccatgtagctttacatactccagcgcagggatccccaacaaacatgtctacaactcacgtaaggctggaggtctgcatacaaccctaggaagagtgtagatagaattcagagagctgagcatcgttccacttacatgacacctcatgggataagaaaacctgttttggaattccagccaggcattggcaacaggatggagcctgcctgagatcagaccgagccccccggggttgggtgagggggaaggtgcaccatctctgctgtttggttgactcagccattccaacttgtgggctatggagagtccaaatggtccagacaagaaaggg

SEQ ID NO: 879521 - DNA, 653 bp, Homo sapiens
gagaatgaatacagtaccttcaactgaaatatctaggttctcacattgggactgattagggaaacaatttgactgtggacaatgaagaaaagcagggtagggtgatggcccactctggagtgacatagagccaagggaacccccagccctacccagggaaaccgggagtgattgtgtaactccaggaaaccatgcttctaccatggatctttgcaacccatggatcaggagatccccytgtgagctcatgccaccaggaccttgggtctgacacacagagctgtgtggagtcttcagatcagctgctcatgcacacacagagaccatgtagctttacatactccagcgcagggatccccaacaaacatgtctacaactcacgtaaggctggaggtctgcatacaaccctaggaagagtgtagatagaattcagagagctgagcatcgttccacttacatgacacctcatgggataagaaaacctgttttggaattccagccaggcattggcaacaggatggagcctgcctgagatcagaccgagccccccggggttgggtgagggggaaggtgcaccatctctgctgtttggttgactcagccattccaacttgtgggctatggagagtccaaatggtccagacaagaaaggg

SEQ ID NO: 879522 - DNA, 653 bp, Homo sapiens
gagaatgaatacagtaccttcaactgaaatatctaggttctcacattgggactgattagggaaacaatttgactgtggacaatgaagaaaagcagggtagggtgatggcccactctggagtgacatagagccaagggaacccccagccctacccagggaaaccgggagtgattgtgtaactccaggaaaccatgcttctaccatggatctttgcaacccatggatcaggagatccccctgtgagctcatgccaccaggaccttgggtctgacacacagagctgtgtggagtcttcagatcagctgctcatgcacacacagagaccatgtagctttacatactccagcgcagggatccccaacaaacatgtctrcaactcacgtaaggctggaggtctgcatacaaccctaggaagagtgtagatagaattcagagagctgagcatcgttccacttacatgacacctcatgggataagaaaacctgttttggaattccagccaggcattggcaacaggatggagcctgcctgagatcagaccgagccccccggggttgggtgagggggaaggtgcaccatctctgctgtttggttgactcagccattccaacttgtgggctatggagagtccaaatggtccagacaagaaaggg

SEQ ID NO: 879523 - DNA, 653 bp, Homo sapiens
gagaatgaatacagtaccttcaactgaaatatctaggttctcacattgggactgattagggaaacaatttgactgtggacaatgaagaaaagcagggtagggtgatggcccactctggagtgacatagagccaagggaacccccagccctacccagggaaaccgggagtgattgtgtaactccaggaaaccatgcttctaccatggatctttgcaacccatggatcaggagatccccctgtgagctcatgccaccaggaccttgggtctgacacacagagctgtgtggagtcttcagatcagctgctcatgcacacacagagaccatgtagctttacatactccagcgcagggatccccaacaaacatgtctacaactcacgtaaggctggaggtctgcatacaaccctaggaagagtgtagatagaattcagagagctgagyatcgttccacttacatgacacctcatgggataagaaaacctgttttggaattccagccaggcattggcaacaggatggagcctgcctgagatcagaccgagccccccggggttgggtgagggggaaggtgcaccatctctgctgtttggttgactcagccattccaacttgtgggctatggagagtccaaatggtccagacaagaaaggg

SEQ ID NO: 879524 - DNA, 625 bp, Homo sapiens
gtaagtgaatggataaatacactgtggtgcatccagacaatggaatattattcagtgctggaaagaaatgagctaataagccatgaaaagacatggagaaaccttaggtgcatattactgagtgaaagaagccaatctgaaatggctacatattgtagaattccaattatatgacattctgaaaaaggcacaagtggagacagacagtaaaaaaaaaaaaaaaaaatctgtggttgcgaggggttgtggggagggagggataaataggggaagcccaggggatttttagggcagtgaaactactctgtatgatgctgtaataatgaatacatatccatatacatctgtccaaacctatagaatgtacaacaccaagagtaaactctaatgtaaactatggattttgggtggtaatgatgtgttgatgtaggttcattgactgtgacaaatggaccactctggtgggggatgttgacagtggcagaggyggtgcctgtgtggggacaggggtagaaaggaactctctgtatcgtctgctcaattttgctgtgaacctaaaactgctctaaaaaataaagtccatttaataaatcagttatacaccccacgtctttgagttgaattg

SEQ ID NO: 879525 - DNA, 632 bp, Homo sapiens
ctattgttaactcttggaaaagcaagatttgtgggttttgttttgtttttttttttacaagaaaggaaacaataactatactgtttggctcaccacagaatacatttacacatacataagagtgtaaatactgaatagggatgtaataacaatttgttgtaaaactatgtaaggtttacaacaaattgttctgggacaattggatatacacatataagagaataaacttggacctccttcctaataccatatacaagaaaaattaagtggaaattgttcatagacctaaatataagggctaaaattataagctcttacaatcttggattaagccaaggtttctaagatataacacaaaagcacaaacaacagaagaaaaaatagataaattggattacatcaaaattttaaaagcttgtgtgcctcaagaaacaacaaaataacattattatcrgataaattatttacaaatattttctcccattctataaattgctatttacagaataagacaatttacaggatgggagaaaatatttacaaataatttctctaataacggacttgtaactagaatatataaagaagtcttacaactcatacaattcataacaaaacacaagtaatccaat

SEQ ID NO: 879526 - DNA, 580 bp, Homo sapiens
aggactcctctctttgctgagagctttcctttaacttaataaattctatacaattcagaacaatgtgctctccctccgtttttagagacatgtcccttaccccaacctccaatggccacaggtacacatgtgagacaaatgggagagcggcatctcccaacctccctcccctcccggctggggcacataacccaagggccccacttgcctaggtggccagcwtttcctgctcactcttccctctccccatgcacccacagtgtctttcctcccctggctgagccagaaaggaggagacagcaattaaaatgttctctccctattggaggaactcatttgcataaaaataaaaggtttctcctccaggcatcttccccaccctgcacttaagctgttttattttatttttttttcttttctccactttgtaaggagttaacttttatgagagggttttttttttttttttttttttcttattaggccaggaccccaattcccaagatagccttttctctcccttggttaaggaagacccagctccaaagctttaggttagcatgactaatttctgccgatt

SEQ ID NO: 879527 - DNA, 459 bp, Homo sapiens
tgtgtgtggaggttcactgtttcctgtggggtagcaatggcagaggtcttatgaagcttatctagttcccaagtggtgtacacttttttgcctttttatttctcccagtgttttctttacctggttgaataattcagatttcaggccagtagggtaggtgtccctgaatgaaaaccagcagattggtaaatgcaatacccaatggtgggaagaagtccaagccttgacygaggcatctgtgggagctcttagtgaaatgcactgaggtcttttcacggggaagggagggagccacttcagctcccttgccaggcccccaggaaagcaggtcacacccctaaatacagttctagctattcagattagcaggccctttttatttgcaggaattctgacgttccaagtagagagagattgtgattctatgccttacgcaaatctgaatctggaggggactcc

SEQ ID NO: 879528 - DNA, 646 bp, Homo sapiens
gttagtctgatgggtttccctttgtgggtaacccaacctttctctctagcttcccttaagatttttttctttgtttcagtcttggtgaatctgacaattatgtgtcttggtcttgctattctcgaggaatatctttatggtgttctctgtctttcctgaatttgaattttggcctgtcttgctaggrtggggaagttgtcctggataatatcctgaagagtgttttccaacttggttccattctccctgtcactttcaggtacaccaatcaaacgtaggtttggtcttttcacatagtcccatatttcttggaggctttgttgattccttttcattattttctctctaattttgtcttcgtgcttcatttcattaagttgatcttccatctctgatatcctttcttccacttgattgattcggctgttcatacttttgtacgtttcacgaagttctcgtgctgtttttcagctccatcaggtcatttatgttcttctctaaactggttattctagttagcaattcctttaactttctttcaacattcttagcttccttgcattggattagaacatgctcttttagctcggaggagtttgttattacccaccttctgaagcctacttctgacagttagtcaaattga

SEQ ID NO: 879529 - DNA, 632 bp, Homo sapiens
atgactagaatggaacttgagatttttctcctaaaagctggtcctcttctgcagtgctgctcaaaatctggttgtcaggccagcaactcagtgtcacctggaatgcactggaaattcaggcttccaggcccatccaggttccatgtgggccacacccaccgagtcaaatagggtggtggggggsaacatctgtttgttcagaagccatcaatggtccttgtccccatctgcccattctttaactcagaggacagcttcaccatcatcagttgcgtgaagcagaaaactaggtgtctttcctgaatcctcttttcctcagtccctataaacttctcaatcatttttccagcaaaatctttctccatctgtttttcctccatctccactgccactcctttgctatagtctttcattgggagacctgcaaaagtattcccaagatctcccacgtccttcaagccattctgcacatgaaaatcaaaattatatttgaatgcacactaacatgcagtccaatccaaagcctttgccagcttcttgttgctcacttttagggtaaagaccgaatccttaccatgagtggtctggcagtggccgtctatctgctgtgtgttccctgctccatcctccaa

SEQ ID NO: 879530 - DNA, 632 bp, Homo sapiens
atgactagaatggaacttgagatttttctcctaaaagctggtcctcttctgcagtgctgctcaaaatctggttgtcaggccagcaactcagtgtcacctggaatgcactggaaattcaggcttccaggcccatccaggttccatgtgggccacacccaccgagtcaaatagggtggtggggggcaacatctgtttgttcagaagccatcaatggtccttgtccccatctgcmcattctttaactcagaggacagcttcaccatcatcagttgcgtgaagcagaaaactaggtgtctttcctgaatcctcttttcctcagtccctataaacttctcaatcatttttccagcaaaatctttctccatctgtttttcctccatctccactgccactcctttgctatagtctttcattgggagacctgcaaaagtattcccaagatctcccacgtccttcaagccattctgcacatgaaaatcaaaattatatttgaatgcacactaacatgcagtccaatccaaagcctttgccagcttcttgttgctcacttttagggtaaagaccgaatccttaccatgagtggtctggcagtggccgtctatctgctgtgtgttccctgctccatcctccaa

SEQ ID NO: 879531 - DNA, 677 bp, Homo sapiens
aaaaaatatctgcaccatgtcctaagaggtactataatcctctttgaatttacttcttttcttggatctcatttgttaattgttgacttctgaacattttaagtagaataattttaattttatccaaattttccacttgtcctcagtaagaggattggtcttccattcttaaaataatgacaaactatttcagagaaccatttgtctcacttcagctcataatcatgttgtgttcttaatagaygagaaaaaaagcagtgttatattacaaataatttttaaaattttttagtgattaaatgattttttcgcaactaggatgttctaagaaaggaaactattttatgcaggataaatcattgaaaagttgtatgccaaagtatgacatggcacacatttggtaggcataggtattacacagacctaccagacagcacattttaagttactactgaacagtcataattgttcatttggaatgggaattcctactcacaaacacaagcaagttctgactgattaacttgatctattgttgaagaactgcatagtaatttttagagtacacacgagcctttcaaatatgtattattttattgtctgattctcataaagctaatgatagaattaactttctaaagtgaaaggagtttaaataatcttttcatggacatgta

SEQ ID NO: 879532 - DNA, 624 bp, Homo sapiens
ggtattacacagacctaccagacagcacattttaagttactactgaacagtcataattgttcatttggaatgggaattcctactcacaaacacaagcaagttctgactgattaacttgatctattgttgaagaactgcatagtaatttttagagtacacacgagcctttcaaatatgtattattttattgtctgattctcataaagctaatgatagaattaactttctaaagtgaaaggagtttaaataatcttttcrtggacatgtagttattaagagatagggctggttaaagaatcttggacttctaacgtctttctccatgacccatctctctactctgttgtttctcattgagaggtcaatacttctgagtatattaaaacagaatttcaatatttatcttagcaatataaaatactaaatggctactaaaatgatcacaactcttttttaatccaaaatctgctttttcttctagtatttgttttctcttctgtgttatgcagattattcattcatatagcacctatttacattttaaaatacaaatggtcatgtggtatggaataaactctttatgtgtatgcatgctttatttcctgttttggcaactgtgccttt

SEQ ID NO: 879533 - DNA, 624 bp, Homo sapiens
ggtattacacagacctaccagacagcacattttaagttactactgaacagtcataattgttcatttggaatgggaattcctactcacaaacacaagcaagttctgactgattaacttgatctattgttgaagaactgcatagtaatttttagagtacacacgagcctttcaaatatgtattattttattgtctgattctcataaagctaatgatagaattaactttctaaagtgaaaggagtttaaataatcttttcatggacatgtagttattaagagatagggctggttaaagaatcttggacttctaacgtctttcyccatgacccatctctctactctgttgtttctcattgagaggtcaatacttctgagtatattaaaacagaatttcaatatttatcttagcaatataaaatactaaatggctactaaaatgatcacaactcttttttaatccaaaatctgctttttcttctagtatttgttttctcttctgtgttatgcagattattcattcatatagcacctatttacattttaaaatacaaatggtcatgtggtatggaataaactctttatgtgtatgcatgctttatttcctgttttggcaactgtgccttt

SEQ ID NO: 879534 - DNA, 638 bp, Homo sapiens
tgaaaaataccactaaaagaaagttaaaattatccctgatcatactttccaaacataagtaccattaagtttttggttcactacctcaagggttttttttaaatacatatatatgtatattatttacaaaatcggcctaactatagcaatttttatgttcttatggatacctcaaagaatagtaggaccaatgacctgagaacacctgtaactaactctcatttttctaggaatataaatgataatcagaatttgtttttatgtactatattctcccctaaaattgagaaagtaaaatcagtagttttcatgacattttcacaaaaccagtaatgtcgcargaagtctttgatttaaatccaaagaaagatactgttccttcttccaaatatatggccggacacttagaatattataaagtcttgctataaataattaaatgtaacctgcctatgcctcctagtaaaatatatgaaccaaatatatttatgggatgcagtacctaagctgattatcatgtacttattcccttacctaatcaagactggtttttaattcaaaacaaatgtcacaatctttacagtaaaggaaaattaataagcatgaatagtctgtaactctaactttaaaaaagtaaa

SEQ ID NO: 879535 - DNA, 662 bp, Homo sapiens
ttaagatttcattagagcctaactgacctggggggagaaaaatacttaaccccagacccctctagccatcttgccttacctaaacaggcagtgtcagtggaattagagaacacttatgaagttcacagcccaaaggcacatacttactaacagactgatgtctaatcacagaactgtggaatatttcccatccccatacacattactatcacatcactaaaggccttggactatttactggacttctttttacatagtctctcatgtccagctttcaacaaaaaattacaaggcatactgaaaggcaaaatacacagttcgaagagatagggcaagtatcagaaccagactcataatagcacagggatgttcgaattatcaaactgggaaacaactgtgattaatatgctgagggctctaatgaaaaatgtggacaaaatgaaagaacagaagggtaamaaaacaacaatgagatatcatctcacaccagttacaatggctactatcaaaaagaaaaaaataacaaatgctgattaggatgcagatgcagagtaaaaggaactcttatactattgataagaatgtgaactagtacaaccactatggaaaacagtatggagatttctcaaaaaactacaactagaactaccatatgattcagc

SEQ ID NO: 879536 - DNA, 599 bp, Homo sapiens
tattgcggatattcttagaccctcttctggatgtgcttatgaagtttagtaccaatgcctacatgcccttgctgaagactgacagatgcctccagctgctgttgaagctgttgaacacatgcaggttgaaaggttccagtgcccaagatggtgaggataagttgtttctcttggtatcttgcttgatatagcattggtatttagagttctagagaggaaacttccgtctttttaaaayaaaaagaaaactttttatataatttagaaattatatatatttaagaaattatataattatatattaagaaattatataatttaagaaaaatatttattgagtatctcccagtggtgctggggatacagtggtgaaggagcaaccatctgttctcgtgagttgacattctagtggtttccgtgtgttggttactataatgtaatttcatttgctttttaaaaatatttatgcatgcttattgatttctagaccatttaaaatgatcactgtcttgtatatgtttaagcaggatccatttctgtttgccactctgctaaagcatgagaatggcagtaattttataattacttgtttttaaata

SEQ ID NO: 879537 - DNA, 599 bp, Homo sapiens
tattgcggatattcttagaccctcttctggatgtgcttatgaagtttagtaccaatgcctacatgcccttgctgaagactgacagatgcctccagctgctgttgaagctgttgaacacatgcaggttgaaaggttccagtgcccaagatggtgaggataagttgtttctcttggtatcttgcttgatatagcattggtatttagagttctagagaggaaacttccgtctttttaaaacaaaaagaaaactttttatataatttagaaattatatatatttaagaaattatataattatatattaagaaattatataatttaagaaaaatatttattgagtatctcccagtggtgctggggatacagtggtgaaggagcaaccatctgttctcgtgagttgacattctagtggtttccrtgtgttggttactataatgtaatttcatttgctttttaaaaatatttatgcatgcttattgatttctagaccatttaaaatgatcactgtcttgtatatgtttaagcaggatccatttctgtttgccactctgctaaagcatgagaatggcagtaattttataattacttgtttttaaata

SEQ ID NO: 879538 - DNA, 590 bp, Homo sapiens
caaattcatttctgaaaacaactgttttaaattttggttctgtggcacacacatttacctttttatgatgattatcttaaaggaaacctctttctacatatgtatataaaagttaaatgctaagcatattatctaaagtcagtagagacacaccagggaaggaattcctggtgtctggaatatacaaataaaaaggttttgttttcatacacttggataactctaaacttctcagaataattagtctgttagcaatgataaaacctggtataaaaagtcmaatactttttattttatcaaataaaaactatttggaattgagcttttgaaactgactcttccaactggtcttttgattgaaagctaattttttaaataatatacttcttataatgaggagaatatttttcaaacatgtttgaggaatggaacacccaagaatcttgttttttttctttccaaaacgaaactagtattgagataattggctttttttttttttaattctgggtccacaaggtaaaagactcacaaggaaaaagctactattaagaaaattaaaattttggttaactttttatttaccaaac

SEQ ID NO: 879539 - DNA, 515 bp, Homo sapiens
tgtgccattaattactgtattaaactataactccaatttaccatcccaaattcacttttcactgtcacagtctcttatcctctggatgtagcacaaaggatgtttcttctagaaagatttctctcatgtccctgaagtagaattgcttctttcccatgctaacaattacatagcattcactaaatgcttattatgtgctagacatgaggcctaggtgagggcttggaatatgggaggtgctaaataaaaatcgactgaatgaatggccaargcttttacatgtgctgtctcatttaatcattctaaaagctttctggtatgtaccgaaactgaaactcacatgctcaagctaacagagttaacaagcagggggctcagatttgcaacatgggtttgtctaatcctaaaaaccatccctttaattcctaccctacactgggttcccacatcccttgcttaacaggtattgctcagaattacagtttggtctatatgtgtttctgccacactctgag

SEQ ID NO: 879540 - DNA, 584 bp, Homo sapiens
ttagaaaaccccatctcctcctacttttggagagaggatcttattttctgtcattctctgtgaggacttttgcatttcctctttccatctgtctgaaaatgcagttacctttctctggtgctgagttgcagaaaacccaagttaattctgtttttcctttgtcctgaaatgcagatacagtttcagagatccagactttaaaatcaaggccctcaaaacaataagcagttgtaaatgctaatgaaagctgtgaccttggtgttytggaaacggcagaaagcccattagctctgtgcagcacaactaatctctgtcagcctcaacaagtcagaccaacaaaacctacaagggttttgtcacttctctagggagatgctgtaatgtgcaaagacaatgctgcctgctctgcatacatttaaagcatcttgccactacattctctaccagtcttctttttccaaggtcaaaactgaagtgtcctttattttgggcttttagtgtttttttttttttttttcagtctttccatgcaaaaagaaaacttcaatttatttgattatttcttatggtcaccagtagagaca

SEQ ID NO: 879541 - DNA, 610 bp, Homo sapiens
aaaaatcaatatcctttcttagattcatagagaagtaaggtcacaggtcaaactgttgccccaacaaatacagagaatcacatcttacctgagcagaaactaatgaagaaaacctaaattatacttgatgaattgccagaagttccatgtggatgggtctgagagctaaaggcttctgggggactcagtcttaggaaagacctcatgcttttatgggttttacttcctggatctttatcaagttctcgcagtgattacaggagaaaaattccyttgtgcttctgacagaggaaagggaaggaacttttttgaaatacaccagtgcattctgttcttaataagttctgccctcaggagaaaccatttagctagttgctgaaaattaaaattgctagagttttatcagaaactaactgacctggggggaagaggtgtcccaaccctatctggtcttccatgtggaagaaggaaaacacccaacttcagctcactctagttatcttatcccatctaagttgaggggatgtgactgagaagcatgtgtgaagttcgcagcccagagacacaggcttactaaaagactgagacctattcataagactataaaaca

SEQ ID NO: 879542 - DNA, 610 bp, Homo sapiens
aaaaatcaatatcctttcttagattcatagagaagtaaggtcacaggtcaaactgttgccccaacaaatacagagaatcacatcttacctgagcagaaactaatgaagaaaacctaaattatacttgatgaattgccagaagttccatgtggatgggtctgagagctaaaggcttctgggggactcagtcttaggaaagacctcatgcttttatgggttttacttcctggatctttatcaagttctcgcagtgattacaggagaaaaattcctttgtgcttctgacagaggaaagggaaggaamttttttgaaatacaccagtgcattctgttcttaataagttctgccctcaggagaaaccatttagctagttgctgaaaattaaaattgctagagttttatcagaaactaactgacctggggggaagaggtgtcccaaccctatctggtcttccatgtggaagaaggaaaacacccaacttcagctcactctagttatcttatcccatctaagttgaggggatgtgactgagaagcatgtgtgaagttcgcagcccagagacacaggcttactaaaagactgagacctattcataagactataaaaca

SEQ ID NO: 879543 - DNA, 578 bp, Homo sapiens
ttactgattaaaatattcacaaaaactgagacagattcatttacttgttctttattgtttactctccaataatgaacagattataagacattcagaatttacttcattatagaaataaagccacacagctattttgaaagaatcattaaaaataaacagaacaaacctatcatttatattatttaaaaaatcacccaattcatagtccaaaaaaaaaatcttactaggtattactactggcagaaaccaggttttcttargacctggtccagtgaaaccactcttcatatgtcacccaattgatcctgccagtttctaggaagagctacaattctaagagcccaggacagctgggcagaaataaaatatcctttggttataacaaatgtttggtactattattccatatcacacagtttttctgtcctcagagaaaaaattgaggatgtgttgtgtcaggatctagaatcaaggcttggcatggtggcttatgcctgtaatcccagcaatttgggaggccgagatgggtggaccaggagatcaggagatcgaccatcctggctaacacagtgaaatct

SEQ ID NO: 879544 - DNA, 511 bp, Homo sapiens
tgggaggccgtggtgggcggatcacttgaggtcaggagttcgagaccagcctggccaacatggtgaaaccccatctctactaaaaacacaaaaattagctgggcatggtggtgggtgcctgtagtcccagctactcaggaggctgaggcaggagaattgcttgaacccgggaggcggaggctgtagtgagctgagaytgcgccactgcactccagcctggcgacagagcaagactctgtctcaaaaaaaaaaaaaaaaagtattagctgttgtgatctcttgtctcagatattgttatcaagctgccagatgtacactataaaccaaaaataaaattctaaggcccccgaccatctgaatggacttccttctcagccagggtgctcttaaaatgtaacctgagagactggttcaggccatgatgggaagtgggggtccgacatgcctcatataaaatcaacacagacctgataagaagcatttataatctattctctctgaaacctgctac

SEQ ID NO: 879545 - DNA, 674 bp, Homo sapiens
atggcttatcactcagtgaaagaaaccaaactgcaactactatagactgtgtaattccaactatgacattctgcaaaaggcaaaactatgaagtaaagaagatcagtagcttccaggggttaggaagagggagggatgcaaaggcagatgagatgctttgggctctctgtccccaactaaatctcatctcaaattgtaatccccacatgttgagggagagacttggtgggagatgattagatcatcggggcagattttccctattcygttcttgtgatagtgagttagctctcaaaacagctgatggtttaaaagtgtgtggctttcttcgctccctccctctcctgccaccatataagatgtgccttgcttcccctttgccttccgccatgattgtaagtttcctgaggcctccccagccatgcagaactgtgaatcaattaaacctcttttctttataaattacccattctcaggtagttctttatagcagtgtgaaaacagactaatacagcagagaaaagtgtattttcagggaagtgaaatattgtctgatactacaatgatggataatgtcattatacatttgtcaaaacccatgaaatgagtacactaccaacagtgaaccctaatggaaactatgcaaatatatcctaggcaaatatgtaaactat

SEQ ID NO: 879546 - DNA, 645 bp, Homo sapiens
tatatctcctaatgctatccatcccccctccccccaccccacaacagtccctggagtgtgatgttccccttcctgtgtccatgtgttctcgttgttcaattcccacctatgagtgagaacatgcggtgtttggttttttgtccttgasatagtttgctgagaatgatgatttccagtttcatccaggtccctgcaaaggatatgaactcatcattttttatggctacatagtattccatggtgtatatgtgccacatttccttaatccagtctatcgttgttggacatttgggttggttccaagtctttgctattgtgaatagtgccgcaataaacatgtgtacatgtgtctttatagcagcatgatttatagtcctttgggtatatacccagtaatgggatggctgggtcaaatggtatttctagttctagatccctgaggaatcgccacactgacttccacaatggttgaactagtttacagtcccaccaacagtgtaaaagtgttcctatttctccacatcctctctagcacctgttgtttcctgactttttaatgatcgctattctaactggtgtgagatggtatctcattgtggttttgatttgcatttctctgatggccagtgatggtgagcatttttt

SEQ ID NO: 879547 - DNA, 685 bp, Homo sapiens
atagccaagacaatcctaagcaaaaagaacaaaactggaggcatcacgttacctgatttaaaactatactacaagcttacagtaaccaaaacagcatggtactggtaccaaaacagatatagagatcaatggaacagaacagaggcctcagaaataacaccacatayctacaaccatctgatctttgacaaacctgacaaaaacaagaaatagggaaaggattccttatttaataaatggtattgggaaaactggcaagccatatgcagaaaactgaaactggacccattccttacaccttatacaaaaattaactcgaggtggattaaagatttaaacgtaagacctaaaaacataaaaaccctagaagaaaacctacgcaataccattcacacataggcatgggcaaatatttcatgactaaaataccaaaagtaattgcaacaaaagccaaaatttacagatgggatctaattaaactaaagagcttctgcacagcaaaagaaactatcatcagagggaacaggcaacctacacaatgggaataaatttttgcaatctgtccatatgacaaagggctaatatccaccatctacaaggaacttgaacaaatttacaggaaaaaaaaacaaccccatcaaaaagtaggtgaagtacattaacagacacttttaaagagaagaca

SEQ ID NO: 879548 - DNA, 543 bp, Homo sapiens
ttgtccagcctatcattgatggacatttgaacggttccaagtctttgctattgtgaatagtgctgcaataaacatttgtgtgaatgcgtctttatagcagaatgatttataatcctttgggtatattgccagtagtgggattgctgggtcaaatggtatttctagttctagatccttaagaaattgccacactgtcttccacaatggttgaactaatttacactcccaacagtgtaaaagtgttcctatttctgcacatcctcttcrgcatctgttgtttcctgactttttaatgatcgccattctaactggcatgagatggtgtctcactgtggttttgatttgcaattctctaatgaccagtgatgatgagctttttttcatatgttttttggtcacataaatgtcttcgttttaaaagtgtctgttcatatccttcatccactttttgatggggttgtttgtttttttcttataaatttgtttaagttctttgtagattctggatattagccttttgtcagatggatacattgcaaaaat

SEQ ID NO: 879549 - DNA, 565 bp, Homo sapiens
acgtgccatggtggtttgctgcacccatcaacccatcacctacattaggtatttctcttaatgctatccctccccagacccccaccccccaacatgccctggtatgtgatattcccctccctgtgtccatgtgttctcattgttcagctcccacttatgagtgagaaygtgcagtgtttggtcttctgttcttgtgttagtttgctgagaacaatggtttccagcttcatccatgtccctgcaaaggacataaactcatccattattatggctgcatagtattccatggtgtatatgtgccacattttctttatacagtctatggacaagcaaatgctgaggaaatttattaccaccagacctgccatactacagcctctgatagaaactctaaacgagaaggaatgactattaaccagccaccacaaaaatacacttaagaacaccaaacagtaacatgaaaaagccacaacacaaacaagtcggaataataaaaagctaaaatgatgacagggtcaaatccacacatattgatactaattatgaatgtaaatgagataaatat

SEQ ID NO: 879550 - DNA, 400 bp, Homo sapiens
ctttttgaattcacacgtaactaatagcatatgctattttaacactgagacatcctataaaaattatgatccgatgattttttttttcttttgagatggagtctcactcttgttgtccaggctggagcacagtggcacaatctcgtctcaaggcaaactccgcctcccggattcaagcgattctcctgcctcagcctcccgagtagctgggattacaggcacctgccactacaccaggctaatttttgtatttttagtasagatggggtttcaccacgttggccaggctggtctcaaactcctgacctcaggtgatcctcccacttcagcctcccaaagtggatcctatgaattttaacagccatgtttatattttaaaatgctcaaaacattattgttt

SEQ ID NO: 879551 - DNA, 623 bp, Homo sapiens
tcttgcatcccaggaataaagcctacttgatcaaggtgaattagctctttgatttgcttctggattcagtttgctagccttctgttgaaaatttctgcatttgtgttcatcaaacatattggcctaaagtttttttttttttttttttygttgtgtgtttttatggtagcaggtaccattcttttgtttccatgtttagcactcaaagaccccttgtaagtctggtctaatgctaattaattcccttagcgtttgcttctctgaaagaaattttattttcccttcacttacggagcttagtttcgagggatatgatgttctcagttggattttttttaaggatgctgaagatagttctccaatttcttctgctttgagaggtcccttgctagcctgatgggtttccctttgtaaatgacctgatccttttctctagttgcctttgagatttttttctttcatgttgaacttagacaatctgatgactgtgtgcctagcagatagtcattttgtatgatatctttcaggggtctctgaattccttgaattttcatgttggtctttctagcaggattggaaaaatcttcatggattatatcctcaaatttattttctaagttgct

SEQ ID NO: 879552 - DNA, 590 bp, Homo sapiens
cataagcccctactttaactggaggcccacaatgactttttgggtcccctagaattagcatcagctcagagccagtgtccagtagtccctgaaatgtctgatcatttccctttccccaagccacaattaccctggcaaaaggacataggtctccttggggaagaatgggagaatgattcactgyctaaattgttggtaatataatggggtctggcctcccctttattcaagtgtttcttggtctgtaaactggctcaagtctggaaattgattgaggctatgattctgtttttataattcaaagtagtcttttgtccaatcgatctagaaatcttctgcttatataaattaagtaggaatgcagtaggcttcctatcaatttcacctttacgaacagtgtgattaattaaccaatgccagagctctacacgagtcagactgttctgattgccactttgcctttgctgtccattatggtagctatgcccagcttgcctttgacagttgagtgacaccacttggcccctgccaccttgggatctaattattcccattgtgtttaaattttgtagttgagtgcctgtggttcc

SEQ ID NO: 879553 - DNA, 583 bp, Homo sapiens
tcctttacagataagcaaatgctgagagattttgtcaccaccaggcctgtcctacaagagctcctgaaggaagcactaaacatggaaaggaaaaactggtaccagccactgcaaaaacataccaaattgtaaagaccatcaatgctaggaagaaactgcatcaactaacgagcaaaataaccagctaacatcataatgacaggatcaaattcacacataacaatattaaccttaaatgtaaatggactaaatgctccaattaaaagacacagactggtaaattggataaagagtcaagacccatcagtgtgctgtattcaggaaacccatctcacatgcagagacacagacaggctcaaaagaaagggatggaggaagatctaccaagcaaatggaaaacaaaaaaaggcaggggttggaatcctagtctcygataaaatagactttaaaccaataaagatcaaaagagacaaagaaggccattacataatggtaaagggatcaattcaacaagaagatctaactatcgtaaatatttatgcacccaatacaggagcacccagattcataaagcaagtcctta

SEQ ID NO: 879554 - DNA, 706 bp, Homo sapiens
gagcaatttaaaacaggaagttaggatataatgcagtttgtaaagttaaaatattgtaaagttagaataagaaatttaaagtaatcttaaggtgtgaaaaaatttagaactatgccatattgttttttttaacttttaaaaaaggtacttgtactactgagtataaagttccttatgaattccatcagctagaacatattagaaactatgtttcctttatacagacaaacttttatacacatatacttatgtgtgtatgtgtgtgtgtatatatatakagagagaggtatgtatatatgtacacacacacagcacacttgacacctaaatgttatgtcgaatattttctacattttgtttttacattgtaatactgtattttcagcccaattaaagagattgtttcgaaaagtcaccatatttttaacacttaatgcaaacagatgatgcaagtggtagtgaaggaaagaaataaaattaaatgaagcaacccataatttttttgtccagcattgtccctaagtgcacacagggaaatttcaaagttccttaggatctcccttttgttttccctcacttgtcattcacagtggaataaaatccttgagctatggagctacctgattctgaggtcagttcatttttcagtgaaagaactatttctaggttcattcaaaatatcaatttttgtagtaattttcatttt

SEQ ID NO: 879555 - DNA, 643 bp, Homo sapiens
ttaagaagaggctatttggtgttgggacaatttgatactctcaagcaaaagaatgaaattgaagcatttttcatacaacatacaaaagttaagcaaaaatgaaacaaagacctaagtgtaagagctaaacctataaactcttagataaaacagaaataaacattcatgaccttggatttgaaagtcttagatatgacaccacaaacacaagcaaccaaagaaaaaataggtaaattggacttattcaaaaatggaaacatttgtacattaaaggacagtatcaagaaagtgaaaagacaacctacataatatgagaaaatatttgcaactcatatatttatatagggtmtaatatccaaaatacataaagaaccctcacaactcaacaacagaaagacaaataatcctattaaaaattgggtgaagtacgatgggggctccagagtaggaccagtactgctctgatagtgtactggccctaaaatagcatgtggtttatctcccaggggactggtggagagggagctatattgttgcaggtatgcatgacacttttgtaaagtggaggcctggtcaatagctgaggcagacctggcaaacaacccttctatccacccttttataggcaggcctgtttttactg

SEQ ID NO: 879556 - DNA, 675 bp, Homo sapiens
tcttgtagtcttttctacagaattactcatatatatacaaacacacccacacatgcacacacatatgtatatgtgtatatatgtagaatttatagtaggctgtctccaactttatttttttacctaattattgagaagatagggagtatgttttcttcatgctctgttgaaagcaaggtaattaatagagaagaaaggatgcaagtttggggaaatacctttgagccaatgatgttcagttgtaggggttcaaaagtttgaatgattatgttgaacacagtgaataataagttattctggacagtattaaaagaaakgccacatagaaaataacgtccatgaactcatgttatatcaattacaacccgtgctttttcataaggcagcttctgtaatgaggcaacagattaaaatcaaattgacatcaagaaaacaaaactcagaacgcacatcttagtcagggctccccttaaaatgaactctgaatcagcaaaattgatagaccactagcaagactaataaagaagaaaagagagaagaatcaaatacacgcaataaaaatgataaaggagatatcaccactgatcccacagaaatacaaactaccatcagagaatactacaaacacctctacgcaaataaactagaaaatctagatgaaatggataaattcct

SEQ ID NO: 879557 - DNA, 624 bp, Homo sapiens
tttccaacttgattgcattctccccgtcactttcaggtacaccaatcaaacatagatatggtctattcatatagtcccatatttcttggaggctttgtttgtttctttttactctttgttctctaaccttgtcttctcactttatttcattaatttgatcttcaatcagtgataccttttcttccacttgatcgaatcggctattgaagcttgtgcatgcatcatgaagttctcgtgccatggttttcagctccatcaggtcatttatggtcttctctacactgtttattctagttagccattcrtctaaccttttttcaaggcttttagcttccttgagatgggttcgaacatgctcctttagctcggagaagtttgttattactgaccttctgaagcctacttctgtcaatttgtcaaagtcattctccgtccagctttgttcagttgctggtgaggagctgcaatcctttggaggagaagacgtgctctggtttttagaattttcagcttttctgctctggtttctccccatctttgtggttttatctacctttggtctttgatgttggtgacctacagatggggttttggtgtagatgaccttttcgttgatgttgacgc

SEQ ID NO: 879558 - DNA, 624 bp, Homo sapiens
tttccaacttgattgcattctccccgtcactttcaggtacaccaatcaaacatagatatggtctattcatatagtcccatatttcttggaggctttgtttgtttctttttactctttgttctctaaccttgtcttctcactttatttcattaatttgatcttcaatcagtgataccttttcttccacttgatcgaatcggctattgaagcttgtgcatgcatcatgaagttctcgtgccatggttttcagctccatcaggtcatttatggtcttctctacactgtttattctagttagccattcgtctaaccttttttcaaggcttttagcttccttgagatgggttcgaacatgctcctttagctcrgagaagtttgttattactgaccttctgaagcctacttctgtcaatttgtcaaagtcattctccgtccagctttgttcagttgctggtgaggagctgcaatcctttggaggagaagacgtgctctggtttttagaattttcagcttttctgctctggtttctccccatctttgtggttttatctacctttggtctttgatgttggtgacctacagatggggttttggtgtagatgaccttttcgttgatgttgacgc

SEQ ID NO: 879559 - DNA, 624 bp, Homo sapiens
tttccaacttgattgcattctccccgtcactttcaggtacaccaatcaaacatagatatggtctattcatatagtcccatatttcttggaggctttgtttgtttctttttactctttgttctctaaccttgtcttctcactttatttcattaatttgatcttcaatcagtgataccttttcttccacttgatcgaatcggctattgaagcttgtgcatgcatcatgaagttctcgtgccatggttttcagctccatcaggtcatttatggtcttctctacactgtttattctagttagccattcgtctaaccttttttcaaggcttttagcttccttgagatgggttcgaacatgctcctttagctcggagaagtttgttattactgaccttctgaagcctacttctgtcmatttgtcaaagtcattctccgtccagctttgttcagttgctggtgaggagctgcaatcctttggaggagaagacgtgctctggtttttagaattttcagcttttctgctctggtttctccccatctttgtggttttatctacctttggtctttgatgttggtgacctacagatggggttttggtgtagatgaccttttcgttgatgttgacgc

SEQ ID NO: 879560 - DNA, 444 bp, Homo sapiens
ttcactgggctactttgtttcgcctgagcaagcaaggaaactcagtgtttatattattgaaggaatgtctttgacattcttttaaaaaagacatcctactgaatgaacctgttagctttccttcatctagattgaagtttctcaaccttggcactattgatgtttcaggctacmtaattctttgttgagggtgggggtgctgttacgtgcactgtgggataattagcctcatccctggcctctgccttctaaacatcagtagcaccttcccttccagttgtgacagtagaaaatgtttccagacattgccaaatgtcctctggtaggcaaaattatctctagttgagaatctgttgtttagatcaacaaaggacttgaaggtcatgagtggccctcttgagtttatgttcccggggtctactttttccagtggtcagtaactca

SEQ ID NO: 879561 - DNA, 658 bp, Homo sapiens
gataccctaaatcatctctctcgagttcaaagttccccaggtccctagagcaggggcacaatgccaccagtctctttgctaaagcatagcaagagtgacctttgctccaattcctaataagttcctcatctccatctgagagcacctcagcctggacttgattatcaacatcactatcagcattttggtcaaaatcattcaacaagtctctaggaagttccaaactttcccccatcttcctgtcttctgagccctccagactattccaacctctgcccattacgcagttcaaaggttgcttccacatttttaggtacatttatagcaatgtcccacttctggtactgrtttcctgtattacattacattcctgttttcactgctataaagaactatctgacatttggtaatttataaagaaaagagatttaatttactcacagttctgcatggctggtgaggcctcatgaaacttacagtcacagcagaagatgaaggggaaaagaggcacgtcttacatggtggtgagagagagagagagagagaatgagaaggagaaagaatcacacttttaaatcattatatcatgagaacagcatggggaaactgttcccaggatccaatcatctcctaccaggttcctccctcccttgatata

SEQ ID NO: 879562 - DNA, 628 bp, Homo sapiens
tgaaaagtcaaatggaatagtcatttttcaataattctcacaatttcttactataagattgcttgattgcagtttaaaacccttctctgttctggcccattcatgttgacatactgcttcctagtcctgatgctttctctagaaataaactgcaatatgcggctgggcgcggtggctcatgcctgtaatcccakcactttgggaggccgaggcgggcggatcacaaagtcaggagattgagactgtccttgctaacatggtgaaaccccgtctctactaaaaatacaaaaaaattagctgggcatggtggcgagtgactgcagtcccagctactcgggaggctggggcaggagaatggcgtgaacctgggaggcggagattacagtgagcagagatcaggccactgcactccagtctgggtgacagagtgagattctgtctcaaaaaaaaaaaaaataaataaataaaataaaataaaataaattaaactgcaatatgctatctgagcaggaaactcagacagaggtgccgttagtctgcagttcactcagcttcagggacagggacagggtcaggtaaagccccatcttatgctggtggaatgaaaattctggtacctgaatcctat

SEQ ID NO: 879563 - DNA, 628 bp, Homo sapiens
tgaaaagtcaaatggaatagtcatttttcaataattctcacaatttcttactataagattgcttgattgcagtttaaaacccttctctgttctggcccattcatgttgacatactgcttcctagtcctgatgctttctctagaaataaactgcaatatgcggctgggcgcggtggctcatgcctgtaatcccagcactttgggaggccgaggcgggcggatcacaaagtcaggagattgagactgtccttgctaacatggtgaaaccccgtctctactaaaaatacaaaaaaattagctgggcatggtggcgagtgactgcastcccagctactcgggaggctggggcaggagaatggcgtgaacctgggaggcggagattacagtgagcagagatcaggccactgcactccagtctgggtgacagagtgagattctgtctcaaaaaaaaaaaaaataaataaataaaataaaataaaataaattaaactgcaatatgctatctgagcaggaaactcagacagaggtgccgttagtctgcagttcactcagcttcagggacagggacagggtcaggtaaagccccatcttatgctggtggaatgaaaattctggtacctgaatcctat

SEQ ID NO: 879564 - DNA, 576 bp, Homo sapiens
ctttgaggcctccctcctggaaaacatactctctcagcttaccagtgtttcctctaccaaagggaaatttctgcaaactgtagtgttacattctttttgccttccctcttttccctttgtccagtgaggccacatgattgtcagaacaggacttgggacttcctgggtgccttgtccccttcctccatgtaataaataatggctgacaccaagcaagtgggattgggaggcaaggagtcttttattttcttcttcatatacgtctatgcctttgtttarttggttttggcaagattttctcaccagaaatggagatttgttgaatttaaaatacaaataaatcagtcatattttacatttctataaaacactcaaaccaggccacacacccctgctgtgcctcaaaatcaaccataaactgccaaggtcaggaggcagggccctgacacttaagcacagtgtgttttctcagaatcggccaagttgacgccattccaattcctcaatatgccacaacccattaattgcggtttttgaaagggtacatgtatttttaccaaaaccccaggggttcag

SEQ ID NO: 879565 - DNA, 567 bp, Homo sapiens
tgtaagcttcatcggcataataagaaccttggtttccacaaccccttgtcttaacccagacactcccttctatggattccaggtctttagataaactttttcaaccaattgccaattggaaaatctctgaatccacctatgacctggaagcccacactttgagttgttttgtcttttcagacagaaccaatgtacatcttacatgtactgattgatgtcttatgtctccctaaaatgtataaaactaagctgtagctagaccaccttggcacataccatcaggaactcctgagggtgtgtcatgggcatgtccttaaccttggcaaaataaactaaactgattaagacttgtctcagataatttttggtttatacyttcataaaggaagtgaagcttgggcttgtgttgaagaaaagaataggagagaaagcatctgccgacatgtacctgtgagaaccttgcaagaattacagacacttttaatgacaaaaccaggcatctgcattgggaggagtggtaaggaagaaggaggctggataaaggagctagaagccatgctgggaggg

SEQ ID NO: 879566 - DNA, 587 bp, Homo sapiens
atcttgaattgcaccaatatagaagtcaattgctctctgttatgctactgtcccatcttgcttatcctcccttgacccccagctcagtaatattagagtatttgattaagtcgatgatcagtttttacattattttggctatgtaaattatattcataagtagtagatcacaaccycactttttttacatgagttaaatttctaaaggcaatacctacttcattcttcatttgctcattgtgctgtacaattttattaatattcacctaaacacttcaatatttcttttaaagttttttgtttgtctttgatttttgttatgtcttgctatactcctcttgggttaaatttgatttgagacctctatgctttctatactgggtattggcaatttcccagattagggaaatttccagccgttatttatttaaatatgatttctggtcttttttctttctttctttctcttccttctgcaattcttatgatgtgaaggtttgatctcttgataatatcccattattcctataagctttctttttgttcttttttactcttttgtctttttgctcctcttactcaatact

SEQ ID NO: 879567 - DNA, 670 bp, Homo sapiens
ctttgaacgtgaggtgagtctcttgaagacagcataccaatggggcttaagtctttatccatcttgccaatctgtgtcttttaattggggcatttaacccatttacatttaaggttaatattgttatgtgtgaatttgatcccgtcatcatgatgctagccagttattttgcagacttgtttatgtggttgcttcatagtgtcactggtctgtgtactttagtgtatttttgtaatggatratatagtttttcctttccatatttagtgcttctttcaggagctcttgcaaggcagaccttgtggtgatgaatttcctcagtgtttgtttgtctgaaaaggatcttatttctcctttgcttatgaagcttaatttggctggtaatgaaattctgggttggaaattcttttctttaagaatgttgaatattggcctccaatctcttctggcttctagggtttctgctgagaggtctgctgttagtttgataggcttccctttgtaggtgacctggcctttctctctggttgcccttaacattttttccttcatttgacctcacagaatctgatgattatgtgtcttggggttgatcttctcatggaggatgttactaggattctctgaatttcctgaatttgaatattggtctgtcttgctaggttgtgga

SEQ ID NO: 879568 - DNA, 663 bp, Homo sapiens
ctatgctcacgcagcaagtaggtactacagtcagcacttactctcagagcagtgtgggcctagagtctgtgctcttattcgtagtcctctaccccagaccatacctctcctcccatcattgctgaaaatttagaacttttaaaagttcatggaaatcatttacataaattatgaaagataaagccacagttctgttctctggtacatatgaatcaagaccatttatgggcaatctcagaaataaacctaccacatccgcccccagtgcttttgactcattacctctatccctttgccaaacaaccagatgttgtaaagctggttaccttcaatggagcagtaagcaaaggcaccccactcaaaccttgtgatctatcacggcagtggagtcactgcctgtaggtggattgttttgtttgtttttctcccaagcctgaatcctggctcccctgcagagagagctccataaaggctcagccaaaggtgaatggcagtgacactgtggcagycttttgttcctaatgaagcaccttagggttcattatatgaccaggtgctaccccaggagatcctaatttagtagcttagggaagaagctgaggcatgcagatttaaaagcaaaacaaaacaaaacaaactccatgggtgattatgatacacaga

SEQ ID NO: 879569 - DNA, 562 bp, Homo sapiens
  misc_feature 177: n = A,T,C or G
atgaaaagcaacctgaaaaacagttctagtaatatgacaaaacaaggttctttattatccccaaaagatcacaatagcttaccagcaatggatctaaaccaagaagaaaactctgaattcccagaaaaagaactcagaaggttgattattaagtgactgaaggaggcaccaaagggnaatatgaactcaaaggaatttcaaaaatgttacaggatatgaacagaaaaatctccagataaataaatagcataaataagaagcaatcataatttctggaaattaaggacacacttagaaaaatgcaaaatacactggaaagtcttagcaatagaatccaacaagtagaaggaagaacaccagagcttgaagacaaggcttttgaattaacccaatcaaacaaagacaaagaaaaaaaaaawttaaatgaacaaggcctccaagaagtttgggattatgttaaacgaccaaatctaagaataattggtgttcccaaggaagaagagaaatctaaacgtttggaaaatctatttgagggaataatcaaggaaaacgtccccaacct

SEQ ID NO: 879570 - DNA, 695 bp, Homo sapiens
tcagtctttgatccatgtagaggcagttcccttctactcctagtttgttactttttttttttaatcataaaagggtgctaaattttggcaaatgctttttctgtgtttactgaaataatcatgtggtttttgtcctttattctattaatatgttstattacattgattgattttcttatgttaagccaacctttcatcattcaggataaatcccacttcgtcatggggtataatcctttccacatgttgctggatttggtttgctagtattttgtcaaagatttttgggtctaaatccataaaggttatgggtttttagctttcttttcttgtaatgttttcatttggttttggtatcagggtaatactggcctcataaaatgagttgaaaagtgttcccaccttcttattttttggaagagtttgtgaaagatttatgacaattcttcattaaacattcagtagaatttaccagtgaagccacttgatcttgttttttgtttgtttgttttttggttggaatatattacaggtctattcagattttctatttcttcttgagtcagttttggtagttcgtgtctttctaggaatttgttcatatcatctacattatctaatttttggcatacaattgttcatagcattatccactaatccttttaatttctgtaaggttggtagtaatgtccttt

SEQ ID NO: 879571 - DNA, 629 bp, Homo sapiens
tgcatatgcctatcaaacaagctggaagccgacggttactgacatcatctttacagtgatctagttccatagcaaggctctatggagagaattcatgtgggaaaaaaatattcttacaaatcaagactgttttgagtagttatcactcaaaaaattccagtgtctttgtcaccagccttccagttttatttcttccaagttcttgcttcacagcctttagttacttctgatgcattagtgcagatgtttatcttaatctcttttttaaaaacattatgaatcagtttatttatagattttatcctttctctatgaatgttttggttaaagaatctattaacatggaatatatatgggaatttatcccagtttttttctcaacctctttattccacacaaattagcaataatatattcttcacaaatttattccctttaggtttgaggtcacctttgcattgagttgarccatagacatactattcttccaactagtttcagaatgccatgaagaataatctgtaaaccagattatagtcttttaaattttatttttaaatagtttgtattaaaaattcttaagttaaaaaaattggtaaactagtcctaagcaattgaacttgaaatca

SEQ ID NO: 879572 - DNA, 601 bp, Homo sapiens
catgaaaaagccaggaaaatgacacttttaaaggaagatatactatcatactggtctttaagaaaaaaaatgtaaataaattttttaaaaaaggaacacaataattctccagaaacagatctcaatcaaaaagcaattaatgaaattccagaaaaagaatccaaattagattctaaagaaggatagtgagatacaagataattctgaaaaacaatacaaagaaatctgaaaaacaattcaggatatgaatgagaagtttaccaaagacatagatgtcataaaagaatcaaacagaaattctgcaactgaacaattcattgaatgaacaacataacacatttgaaagcttcaacaatagattagttcaagcagacaaaagaacctctgaacctgaagacagttcaggttcaactttwgaaataacccagccatgaaaatataaaggaaaaaaaaagaattaaaaaaagctaaacaaagccttcatggtatatggaacaccatgaagtgaccaaatatacaaattattgatatcccagaaggtaaagagatattgaaatagttaaacatatataacaaaataatagataaaaactttccacat

SEQ ID NO: 879573 - DNA, 576 bp, Homo sapiens
actggctgtcaatattatactaaatgggcaaaaactggaagcattccctttgaaaactggcacaagacaaggatgccctctctcaccactcctattcaacatagtgttggaagttctggccagggcaatcaggcaagataaagaaataaacggtattcaattaggaaatgaggaagttaaattgtccctgttggcagatgacatgactgtatgtttagaaaaccccatcatctcagccaaaaatctccttaagctgataagcaacttcagcaaagtctcagaatacaaaatcaatgtgcaaaaatcacaagcattcctatacaccawtaacagacaaacagagagacaaatcatgagtgaactcccattcacaattgcttcaaagataataaaatacctaggaatccaacttacaagggatgtgaaggacctcttcaaggagaactacaaaccactgctcaatgaaataaaagaagacacaaacaaatggaagaatattccatgctcatggatagaagcatcaatatcatgaaaatggccatactacccaaggtaatttatagattcaatgccatc

SEQ ID NO: 879574 - DNA, 680 bp, Homo sapiens
attctgtgaggcaagcatcatcctgataccaaaacctggcagaaatacaacaataaaataaaacttcaggccagcatcgctgatggacattgatgcaaaaatcctcaaaaaaggatgggtgtagtggctcatatctgtaatccaagcactttgggagaccaaagcatgtggatttcttgaggtcaggagttcaagaccagcttggccaaaatggtgaaaccccatttctaccaaaaatacaaaaaaattagccaggcatggtggtgagtacctattatcccagctactcaggaggctgaggcagaagaatcacttgaacctcggaggcagaggttgcagtgagctgagatcatgccactgcactccagcttgggtgacagagactccatctcaaaaaaaaatcctcaataaaatactagcaaaccgaatccagcagcacatcaaaaatcttatccaccatgatcaagtaagctttatccccttaggatgcaaggttggttcaacatatygaaatcaataaatgtgattcaccccataaacagaactaaagacaaaaaccacgtgattatttcaatagatgcagaaaagttcttcaataaaaatcaacatcccttatgttaaaaactctcaataaactaggtattgaaggaacatacctcaaaataataagagccacatat

SEQ ID NO: 879575 - DNA, 587 bp, Homo sapiens
accctcccagcatggcttctagctcctttatccagcctccttcttccttaccactcctcccaatgcagatgcctggttttgtcattaaaagtgtctgtaattcttgcaaggttctcacaggtacatgtcggcagatgctttctctcctattcttttcttcaacacaagcccaagcttcacttcctttatgaargtataaaccaaaaattatctgagacaagtcttaatcagtttagtttattttgccaaggttaaggacatgcccatgacacaccctcaggagttcctgatggtatgtgccaaggtggtctagctacagcttagttttatacattttagggagacataagacatcaatcagtacatgtaagatgtacattggttctgtctgaaaagacaaaacaactcaaagtgtgggcttccaggtcataggtggattcagagattttccaattggcaattggttgaaaaagtttatctaaagacctggaatccatagaagggagtgtctgggttaagacaaggggttgtggaaaccaaggttcttattatgccgatgaagcttacaggtaacaggcttgagaaag

SEQ ID NO: 879576 - DNA, 598 bp, Homo sapiens
ttaaacatgttatcttgaattgcaccaatatagaagtcaattgctctctgttatgctactgtcccatcttgcttatcctcccttgacccccagctcagtaatattagagtatttgattaagtcgatgatcagtttttacattattttggctatgtaaattatattcataagtagtagatcacaaccycactttttttacatgagttaaatttctaaaggcaatacctacttcattcttcatttgctcattgtgctgtacaattttattaatattcacctaaacacttcaatatttcttttaaagttttttgtttgtctttgatttttgttatgtcttgctatactcctcttgggttaaatttgatttgagacctctatgctttctatactgggtattggcaatttcccagattagggaaatttccagccgttatttatttaaatatgatttctggtcttttttctttctttctttctcttccttctgcaattcttatgatgtgaaggtttgatctcttgataatatcccattattcctataagctttctttttgttcttttttactcttttgtctttttgctcctcttactcaatact

SEQ ID NO: 879577 - DNA, 617 bp, Homo sapiens
aacattcctttcatggctgttgtgctggtggtgtgctataatttcctcaaaggcacagactggcagaatattagacggttttataacatgacctttttgtttctttcactgattaacatttttagatgggatacaaggagactctgtctcctttgcaaatcataggattacaaagttaggaaataatttagagattattttcattatttttactcattatttttattcattcctactgctcattgaggaattcttttcccatcttgcccttttaggtgggtattcactatttcatacatacaaatttatacatatgtataatatgtatgtattacatacatataatgtatacayacatatatatgtacgtatttctatgccatgccagttttcaaactagaaatatagcttttgtgactattaaattattacctgaagtctaatctgttttgtgcctctggtggtctaaagcttccttaatttgagaggcaatatactgatttgaaatttctaccactgattttcactaactttctgaaacgacacacagtattactatttacataagcctataagtaagaatataactaccttatttctcattcttctgtaatata

SEQ ID NO: 879578 - DNA, 673 bp, Homo sapiens
gtccattcagtttttgtagccatctgagactctgttcaagtgtccctccacagcctgcctctttgcctgaagactctgttcttacctagaagtctgtaccaagagtgcatgagacccagaatatgaagagggtggccagggagggagagaggatagatagctcggaagtgggwggagaccggcagaggaagggagacgtggggatatgggagtgacaatggagaggatgctgccttttgaaggcttttggcccaggtacctactcatttcattctcattcccttagaggggcagacccaggtgggagtactgcaggccacgcccctcgaagacagcatccacgtggtcttccgatactagcaaggtgtgctcggcagccggtgcctcaaggtgagacctgggagggctggaggaaagggactgggtttggtcaaatataggggtagatactatagagggaatctccaacttgacattaaaacctcctcccttaaaattccctgcctgaaactttctcatcataccgcctctggagcctcacctgcccagtctctgctagagatggggcaagacagaagtcatggtgcaacctaagctggggagtcgttcccacgtggactctagaggaacacagcagaggccactggaagtccccagaagaggccagcatcta

SEQ ID NO: 879579 - DNA, 692 bp, Homo sapiens
ccctttttgatggcttcggcggtgtaagactgccacctccttgggtttttgcactgcgtcgaataactccatgatttccttgtgatatttaatgtggttccccagaggttaggaaccccctttctttccatattgcagcatgggcatgtaggattagataagcatacttgctatctgtatacacatttattctcctttcctttcccagttctaaggctcgggtaagtgccactagttctgctaactgggcactggtccctggggaagagacttactttcaagtactgttacatcactaacaatggcataacctgcccttcgtatccaattctccaccacaaatgaactttcatcagtatatagattaaggtcaggattaactaaggggacttctaagaattcatctcgggcagcataagtctggactataacttgttggcagtcatgctcgatyggttccccatcctctgggagaaaagtggcagggttgagggccgcacacgtatgtatttgaagcactggtccctcaaggagtagtgcctggtatctaggtaggcggttgtctgatagccataacttcctttggcacctattatgccatttacatcatgagtagtccagacagtgagatcctttccttgtattattttgatagcctctaacactgagacggccaccgctgcaactaccca

SEQ ID NO: 879580 - DNA, 617 bp, Homo sapiens
  misc_feature 1, 2: n = A,T,C or G
nncagagagggcaagcagctagcacaaggtcccacagctggactcagggctgctggctacagggcctggctctacatgctgcacagtcagagagggagagtcccatgcgcagttggaagggagaagggaaggggaggctggcgctagatagtaacaagctgtgtgttttgggcatttcccctgtaccagacactgtgctaaatgacccttctgctytgtttgcctggaaaagtccccatcttagtgaattctgactttccacctactgtcccggagcagctgactgtggtggagaaaactgcaggacagggaccctcagctgctgctatacagccagtgatcctgccacgtccctgactccatgggctttcaacacgaggcctccccaacgcagtgtccacaccagcattactgtggaacttgggagacatgcagatcccacaggagagggaagggggagctgctctcaattcagatcaagtttcccctgtgccagaagaatcagtcctccagatgggtgggcagcactgggcctgaggtgaatgttactgtgctgtacgctcacaaagttagagggcagagctcatattaaaggttcatactgagaggtgaagcca

SEQ ID NO: 879581 - DNA, 667 bp, Homo sapiens
attttttaaaactataattaataggctaagaattttaatggataaagtcaacaacatacaagaacagatggataatgtaaacagagagatggaaattctaagaaagaatacaaaataaatgctggagattaaaaacactgtgacagaaatgaagaatgcttttgatgggattattgctatactggacatggctgaggaaataatctctgaacttaaggatatgatgatagaaacttccaaagataaaaagtcaagagaaaaaagaccaaaaaaccccagagcaggatatccaagaactgtcggatggctataaaagatgtaacaaacatataatggggaaataaaaaggaraagaaagaaaggaacagaagcaatatttgcagaaataatgactgagaatttccctaaattattgcagacatcaaaccacagatctaggaagctcagagaacactaagcaagataaatgccaaaacaaaaacaaaaacaaaaaaacccacaaaaaaccagcatcaaggcatatcattttcaaactgcaaacatcaaagacaaagaaaaaatcctgaaagaagccagaggggggaaattaacacatccagagagtaacaaaattaagtattacatccaaaaaccatgcaagcaagaggagagtggcatgaagtattta

SEQ ID NO: 879582 - DNA, 667 bp, Homo sapiens
attttttaaaactataattaataggctaagaattttaatggataaagtcaacaacatacaagaacagatggataatgtaaacagagagatggaaattctaagaaagaatacaaaataaatgctggagattaaaaacactgtgacagaaatgaagaatgcttttgatgggattattgctatactggacatggctgaggaaataatctctgaacttaaggatatgatgatagaaacttccaaagataaaaagtcaagagaaaaaagaccaaaaaaccccagagcaggatatccaagaactgtcggatggctataaaagatgtaacaaacatataatggggaaataaaaaggagaagaaagaaaggaacagaagcaatatttgcagaaataatgactgagaatttccctaaattattgcagacatcaaaccacagatctaggaagctcagagaacmctaagcaagataaatgccaaaacaaaaacaaaaacaaaaaaacccacaaaaaaccagcatcaaggcatatcattttcaaactgcaaacatcaaagacaaagaaaaaatcctgaaagaagccagaggggggaaattaacacatccagagagtaacaaaattaagtattacatccaaaaaccatgcaagcaagaggagagtggcatgaagtattta

SEQ ID NO: 879583 - DNA, 610 bp, Homo sapiens
ggtcaataaatgttttatttttttatcttcttttgcagtccagaagccttttttatttaatacctattatgacatgaagcatagggaataggttccagcagcccagaccccattccactggctctcacaaagtgtgcttccctgggtggagcaggctggcgcttcgttaaacacaggtatcttattctttgccttccttctttttctaatcattttccttcatgcatttctggtgcctaatatgctcaatatgcacattaattctctggtccttaacttgtttgtttacaacaatgctaacagcgtactgggggacactgtagactttctggttttgccatggtaacatttttggggcattcccwttttttaacagtgcgtattcccttgatgtctacagtatcacaattttttgtagagtcacatgtatgtggccaaaggaacaactccatgttttctttctttcctttttttttttggagttggagtctcactctgtcacccaggctggagtgcagtggcgcaatctctgctcactgcaatctctgccttccgggttcacgccgttcttccgcctcagcctcccgagtagctgggactacaggcgccc

SEQ ID NO: 879584 - DNA, 576 bp, Homo sapiens
gtgatgctattcaataatactgaggtagaagacttatagaacaaaatttaagattagtttgtgacaagttgagtttgaacaactttgtgacacgcgagtggagatattatatagagaactgaatacaaggaccaaagattcaaaggagctatttgcagtaaaaattttaatgcatagtcatataggtggtataattgaagctcaagacaaagtttctcaaccttggaacactgacattgtggccgaataattttttattgtacagggtgatactgtgtattgcagaatgtttagagcatccctagcctctgctcacagatgtcagtagcaacccctgagtcatgataaccaaaaatgtctgcagctttaccaaatattccacaggggtgcaaaaccacacctttttgagaaacactcgttaaatgatagtaagtaggargagaatgcagagtaataagaaaaccatataaccctactgagacaagaaaccttaaatttaatttggctccaatatatatggctcaaataattttctttaattggaataattgtcatggatataaaagtgggtaacaa

SEQ ID NO: 879585 - DNA, 593 bp, Homo sapiens
atatatatttatctagatctagataaatgtgtataaactaatttttaaagttctaaaaacatacatactaaaatgacagcaacctctggggaagggactgagaaaaaggaggtcaaaagggatgttaactttacctgtaatgttcaattttaaaatttacaatgaaaatgtrttcatgtatttttatgcaatttatatgaacaacatttttaaaagaaagaagctcttacagagaaagtcacaaacccatgtgggatatgctcaccaagaaactccatgtattcacaggttcacttctttggtgctctcctcaggatacttgaaaagccatatttagcaaagagtttcaacttttgctcacctgtctgttcttaacttttattttagtttcaaggatatatgtacaagtttgttatataggtaaattatgtcttgtgggtgtttggcatatagattatttcatcacccaggtcatgagcatggtacccaacaggtagtttttcaaccctctccttcctcccactcttcactctcaggtaagctccagtggctcttgttctcttctctgtctccatgtgtactcaatgtttagc

SEQ ID NO: 879586 - DNA, 513 bp, Homo sapiens
ggaagaacatttcttcagatgtagtgtagtgaggtcctctagcaagagggtacagctagagcaaaggccatatggtgggaaagtactgacacatgaaataaatgacaggtgagagtagcaggaaagagaatcagatcatctgaatgyagagcgtcataggcctttgtcatttactatgcacaaaatgaggcgccattgcaggattttgagtagaggagtgatgtgatctgacttaagttgtttttttgtttgttttttgttttgttttgtttttttgagacggagtcttgctctgttgcccaggatggagtgcattggcgccatctcggctcactgcaagctccatctcccaggttcaagcgattctcctgcctcagcctcctgagtagctaggattacaggtgcatgccaccacgcccagctaatttttgtatttttagtagagatggggttttaccatgttggtcaggctggtctcaaactcctgaccttgtgatctgcctgcctcggcct

SEQ ID NO: 879587 - DNA, 513 bp, Homo sapiens
ggaagaacatttcttcagatgtagtgtagtgaggtcctctagcaagagggtacagctagagcaaaggccatatggtgggaaagtactgacacatgaaataaatgacaggtgagagtagcaggaaagagaatcagatcatctgaatgcagagcgtcataggcctttgtcatttactatgcacaaaatgaggygccattgcaggattttgagtagaggagtgatgtgatctgacttaagttgtttttttgtttgttttttgttttgttttgtttttttgagacggagtcttgctctgttgcccaggatggagtgcattggcgccatctcggctcactgcaagctccatctcccaggttcaagcgattctcctgcctcagcctcctgagtagctaggattacaggtgcatgccaccacgcccagctaatttttgtatttttagtagagatggggttttaccatgttggtcaggctggtctcaaactcctgaccttgtgatctgcctgcctcggcct

SEQ ID NO: 879588 - DNA, 513 bp, Homo sapiens
ggaagaacatttcttcagatgtagtgtagtgaggtcctctagcaagagggtacagctagagcaaaggccatatggtgggaaagtactgacacatgaaataaatgacaggtgagagtagcaggaaagagaatcagatcatctgaatgcagagcgtcataggcctttgtcatttactatgcacaaaatgaggcgccattgcaggattttgagtagaggagtgatgtgatctgacttaagttktttttttgtttgttttttgttttgttttgtttttttgagacggagtcttgctctgttgcccaggatggagtgcattggcgccatctcggctcactgcaagctccatctcccaggttcaagcgattctcctgcctcagcctcctgagtagctaggattacaggtgcatgccaccacgcccagctaatttttgtatttttagtagagatggggttttaccatgttggtcaggctggtctcaaactcctgaccttgtgatctgcctgcctcggcct

SEQ ID NO: 879589 - DNA, 559 bp, Homo sapiens
gaaaaggctgcaccagaccgtggttgctccttgtggtttccaagaataaaaagatactgtagtcacattttgtttatcaatttctcagttgatggcttgtttctatcttttccctattatgaataatactactatgaacatttgtgtagaaacttttgtgtaaacatatgtttttatttctcttgggtatatatctagtgccaacattactgggccatctggtaactctatgttcaattgtttcatgaactgtcagtttattccraagctgctgcatcattttatattcccaaaagcagcatatacatgtttagaattttccaaatccttactgacacttcctaatgtctgatttttttattctagtggatgtgaagtagtatcttattgtggttttgatttggattttcctagtaaataatgatgtcagacatctttttatttatttatttattttttgctttttagccattagtatatctttcttgaaacagtatcagttcaggtctttttctcatagtttaatcaggttatttgtcattttattattgagctgtga

SEQ ID NO: 879590 - DNA, 559 bp, Homo sapiens
gaaaaggctgcaccagaccgtggttgctccttgtggtttccaagaataaaaagatactgtagtcacattttgtttatcaatttctcagttgatggcttgtttctatcttttccctattatgaataatactactatgaacatttgtgtagaaacttttgtgtaaacatatgtttttatttctcttgggtatatatctagtgccaacattactgggccatctggtaactctatgttcaattgtttcatgaactgtcagtttattccgaagctgctgcatcattttatattcccaaaagcagcatatacatgtttagaattttccaartccttactgacacttcctaatgtctgatttttttattctagtggatgtgaagtagtatcttattgtggttttgatttggattttcctagtaaataatgatgtcagacatctttttatttatttatttattttttgctttttagccattagtatatctttcttgaaacagtatcagttcaggtctttttctcatagtttaatcaggttatttgtcattttattattgagctgtga

SEQ ID NO: 879591 - DNA, 622 bp, Homo sapiens
tgtaatacccacaactataaaaataataggggaaaacagcaaaaactcttttggacattggtctaggcaaaaaatttatgagtaagacctcaaggctgggtgtggtggctcatgtctgttatcccagcactttgggaggttgaggtgggcagatcacctgaggtcaggagttcaagaccagcctgcccaacatggcaaaagcctgtctctacttaaaatacaaaaaattagctagacgtggtggcagccgcctgtaatcccagctactcaggaggctgargcaggaggattgcttgaacctgggaggtagaggttgcagtgagccgagatcacaccactgcactccagcctgggtgacgagtgaaactccatctaaaaaaaaaaaaaaaaactgaaaagcacaggcaacaataacaaaaatagacaaatgggacttactgaagtcctaaagtactaaaaagcttatgcacaacaaaagaagcaccagcagagtgaagagacaatctgtagaatgtgtagaattggagaaaataattgcaaattatccatctgataggggactaataaccaaaatatacaaggaactcaactcaacaacaaaactcagaaacaatcccattaa

SEQ ID NO: 879592 - DNA, 573 bp, Homo sapiens
ctgctcctttctgcccacttttctcactcatctctgacccaaggcttgtggtaaagcacatcagcatagacttgggtgcaggtaacagctgcctggaggtgcctgggcatgtgtaaattcagggctgtcacctcattcctcatttaggcagctggccagcacccgagggatttttctggatctgccaagcacacatctgaagctgagagcagagagagggtaggggagcagggaggcagctgggtgttgaggaaagaaggctttgaaagcaacagacctagactttgaacccacacctgccacgtcccgtatgacaatgggcaagtcacttacccttcaagggcctcattttttatcgttaaaataggcctttgacctatttcttrcaggtttgtgttgtggattaagaaaaatgctatgaaagtgtttgttaaaatgattgtcacatagtaagccttcttttttgttagggtcttttctccaatattaaaagcttgctttggcaagttacttctcctcagtgcctcagtttcttcatttgtaaagcagggacaatcatagtatctcacgggg

SEQ ID NO: 879593 - DNA, 573 bp, Homo sapiens
ctgctcctttctgcccacttttctcactcatctctgacccaaggcttgtggtaaagcacatcagcatagacttgggtgcaggtaacagctgcctggaggtgcctgggcatgtgtaaattcagggctgtcacctcattcctcatttaggcagctggccagcacccgagggatttttctggatctgccaagcacacatctgaagctgagagcagagagagggtaggggagcagggaggcagctgggtgttgaggaaagaaggctttgaaagcaacagacctagactttgaacccacacctgccacgtcccgtatgacaatgggcaagtcacttacccttcaagggcctcattttttatcgttaaaataggcctttgacctatttcttgcaggtttgtgttgtggattaaraaaaatgctatgaaagtgtttgttaaaatgattgtcacatagtaagccttcttttttgttagggtcttttctccaatattaaaagcttgctttggcaagttacttctcctcagtgcctcagtttcttcatttgtaaagcagggacaatcatagtatctcacgggg

SEQ ID NO: 879594 - DNA, 666 bp, Homo sapiens
ttataaataaattatgtattttgaacacaaaagccacctttggactataataatacattacatttgtactaactcatggttttcaaagtactgttacctgcattatttaatttgaccttcacaatcaccttgaggttcaggcaggaataaaaatatttgtactgtcatacaacagatgaggagactgaggctcagataggatacaggtgtgagcagaatttttataatcttttcttgagatttttaggattgctaatgaatgaaagaaatttcaccaattaaaatcgtaggatttctttttttactytatttattcatgtttttgagacaaagtctcactctgtcacccaggctggagtgcagtggtgtaatcttggctcactgcaaacttcaccttccgggcttaagcaattgtcctgcctcagcctctcaagtagctgggattacagatatgcaccaccatgcccagctaatttttgcatttttagtagaaacagggttttgccatgttgcccaggctggtctcaaactcctgacctcaagtgatccacccacctcagtctcccaaagtgctgggattacaggcgtgagccaccacacccagcttataggatttcatagttgtaattgacggaagcttattcaacccagcaagatgatgtagaa

SEQ ID NO: 879595 - DNA, 617 bp, Homo sapiens
tctctttcctcttgaagggaagggaaagtggcctcttgaattttgcccagataaatagaaccatgagtgtaactctaagttaaaaagaccaactggaaagtcaggatcttctcagaagggtgagttttctgaagcggctcagctatgttatgttggacacacagtaacctcttacgtgggccacacctaaaatctgaagtgagtctaaggaagtgagcttggatctgaggacacagcagaaggaaataaaatgtcctggtctrtcttgcttagtaacaagtgttgagcttactaatgttgcttttctctctgggtttgcctgctgccttctgggctcccattaaaaacgtcttgtatgacaattactattttttgctttttcaaaatgtcacagaaactatttagccaatagatcacctcatgcaaggctacaacttctcttttaaatatcgcattaatcgtttatatgttggatgatgtgagttattagcttggcaacaaaatgggttttcctcttggctctttttatttcttctctcattattacaggaaagccaaaccaatacttcatggtggacacttatgtcatgcctctggggtctaaataatggtccctt

SEQ ID NO: 879596 - DNA, 581 bp, Homo sapiens
  misc_feature 579, 580, 581: n = A,T,C or G
tttatcctacttaattcttcatgttcatctttcagtatctctaccccctgcccctattaaatattgaactctagatgcactgttttatttacttgaagttccccagtaatggcttttctccagctggaatgcctttcccacaattatttgcttcatcaactcctacccatccttaaagacagagctcaggcatcactactactctctggaagtctctgtctttccaatctgccataggtatccttcttatgtgctcccatagaatttcattttattctataatatcacttagagtattttattatttggaatttttgcctcacatattagactgtawcttgaaggaaataactgtgttttgtatttttgttaccaatatttagtatatattctcaacaaataatttttgtgtgagtaaatgattgcatgcatatgtggctcaacagagttacataaacaaatgaaagaaacttctcctctattacataaactataaacgtcaactttttcataattacatacaacgtggaaaaatatatttacatgtcttagagtcttagaagtctcattcctaaaaannn

SEQ ID NO: 879597 - DNA, 667 bp, Homo sapiens
gctaggtgacatgttccctaccatcaaaagtttcacaatctaaatgtcgagataagacaaatatagttaacacaaatcaaacaataatttaaggatgcacaggctaaataacacatggtataaaaaatatatgttacaactgattcaaagaagtgaatgatcactgagactctgatttcaaaaagtaagatttcaaaaaggatataggaggaaagaagggagggagagaattccagggaagtggaattgctataacaaagatgctgagaaagaaaaaaacacaaagtatgcttaaggatactgattagactggtttgatttaaacctggggctggtaaaggtaacagtgagggaaaaagacaaagcctaacaaccacagtgatatttgcataatacttcacttatgttatttgactaycaaaacagcagcacaagaaagggtagattgtagagggccttgaataccaggttataaatatctagcagcagtatctacacgtctaagatggaatactccatcattagaagataaagaaactagaggcagggagactagttatgacagttcagcaataagctaaaaaggacccaggttaaagtgacagcagtgggaacagaaaggaagaaatttataaggctatagtgataactggggaaggagataaaa

SEQ ID NO: 879598 - DNA, 550 bp, Homo sapiens
aatttggaacctactagagatttgttgaatggctttgacaacattgctgatagtgacatgaacaataaggtccaggctgaggtggtctcagatggagatgaggaacttgttgggaactggagcaaaagtgactctcataatgttttagcaaaaagactggcagcattttgcccctgccatagagatctgtggaactttgaacttgagacgaatgatttcaggtatctggtggaagaaatttctaagcaggaaagcattcaataggtgacttgggtactgttgaaagcgttccatattaaaagggaaacagagaataaargtttggaaaacttgcaacctgatgatgcagtagaaaagaaaaacccatttcttgacaagaaatttaagccaactgcactaatttgcgtaagtagcaaggagcctaatgttaatccccaagaccatggggaaaatgtctccaggccatgtcagagaccttcatggaagcccctcccatcacaagcccagaggcccaggaggaaaaagtgatttcatgggccaggcccagggt

SEQ ID NO: 879599 - DNA, 645 bp, Homo sapiens
acaggagtgttcacagctacccatatttaatgtaattatctgctttacccatgtattcctgatttaaaattatttaaagaaaatagactttgcattgaattttttaatgttgaagtataatttatatatacaaaagtgaagatatcaactccacacctcaattaattttacatgtataaatactgtgtaaccattactcagttcaaaatatagaacactgtcagcagcctaggaggatttcttatgtcccttctaagttaatatcactcctggaggtaatttctattctaatatgtatcactctgaggtgattttaccaattcttgaatgtcatataaatggaattagatagtatattactctcttgtgtgtgactrcttttcactatcattatatttgtaggattcatcatgttgttgcattaagaaatacaccataatttatgaattcattctaagactaaaaaatattgtagtcatttttaaagtttggggctattataaataaaactgctatgaatagctgcagactttggtttccttgcttgtttcatggacatgggcacccatttatcagggatctataagtagtaatgaaaattttgcatactgtacacctgtacttggttgaagttggtactgtcag

SEQ ID NO: 879600 - DNA, 645 bp, Homo sapiens
agggtcactgtacatccacgttctttgctacagcaaaacaaaagtaaccttggctcctgtttgcagtaagttcctcattttcatctgagagcttctcaatctgatccttactgtccattttcctgtgagtcttctgatcacaagtatttaacaactctttacaaagatccaaactttccctcatctccctgtctttgaagtcctccaaactctccygaactccatctgctacccccttctgaacctgcttctacattatcagctatttttgtcacaggctggcagtgtggtaatggaagacaagcccattttctggggaaaaattcaaggaggcttcagatacttgaataaaaagaagcccattgctgattgccaagacattagggagaaggccttgaagacatttaacagttccactttgcagtaattattttctccatgatcataaagaaaagaggtttaataggttaatgattctgcagactgtaaggaagcatagtggcttctgcatctgacaggactcaggaagcctcccaatcataccagaatgtcaaggggcaaggagatgtctcatatgggaagagtaggagcaagacagagaaaggaaacaggtgtcatgccccattaaacaagcagatctcatga

SEQ ID NO: 879601 - DNA, 614 bp, Homo sapiens
gtctttcaatgacaaatttttaattttgtgaagtccaatttatgacttttttctgttatgattactgctttctaattctgtctaggaaacttttgcttagcctcattacaaaggtttttttaattttatgtctgtatgtttattttgctaaaagtattacatagtgtttgaagttaatgattccataaagctatccagttgttctcgaactgttattgaaaaaactttctatttccattggattcctttggcatctttttcaaaacttgatttaccatcaatgtgtgcttatatttctggactttattctattgtgctgatctgtttatcaatacctatgccagtaccatattatcttgattactatagctttacagtaaatattagggttagataatgtaagtcttccaaatttgttcttttttttctttcaaaattgctttagmtattctaggtcctttgtatttccatacaaattttagaatcaaattttacaaaatcccctgctgggattctgtttgggattgcattgtatctatagatcaatttggggtggattgttgtcttaaaaatattaggtcttcaaattgatgaactttatcaaatgaacccca

SEQ ID NO: 879602 - DNA, 616 bp, Homo sapiens
ttcctttgttttggccactatatttatgtgaaagcttgcctcatatggtccacttatccttgactttctagtcagaaaaggtgtttaaaagatgacagctctatgtgcaaaggtggggtttgtcaactggcgtacattttgtaaggtgatgagagaagagaacatctaaacattttgtttggggaaggctcccaatgtcagtatcttttgacgctacctttttttttttttttgagtcagagtctctctctgtcactcaggctggagtgcagtggcgtgatctcagctcactgcarcctctgcttcctgggttcaagcaatcctcctgtctcagcctccttagtagctgggactacaagcatgcaccaccacacccagctaatttttgtatttttagtagaagggggttacaccatgttggccaggctggtcttgaactcctgacctcaggtgatctgcctaccttggcctcccaaagtgctgggattacaggcatgagccactgcgcccagccttgatgcaacttctctatagaagaaaacttcgatctcctgaatgtaggggaagtatggcctttaagtttggctgttatattctagttcttgaatagggtggg

SEQ ID NO: 879603 - DNA, 593 bp, Homo sapiens
tctttaagtagagattgtaaaattattcagaactacccatttttctctagaggagattgtaaggtaatatagcatatcagtttgaagagaaagacattacagaagtttgacctaattattataaaattatacttctaattgtgctgagagtatcatcctaatttatcactcctttatataatcttaaataatattattttatcaatgctttcattgaagctttttagtaaattaaagcctcatatgcaggaagctacagtatgatatcttttgacaaaatgaattcttcyatttgcatagcctaaactgaaatatattatcaaaaattcattcatgatctagtaaccaaaatttattagaaaagattcaacatgttaatgttacattggcctaataagaaggccttaacatttaaatggctgcttcatcaaggaaaatattgtcatgtcatcagctgagtgtactgttattttacaactatcttctggttaaagataattttagaagacactactagttagattatatgatagataatatgtaaattttctctgatataatgttcttatttttagtaaaccaaaatgagttat

SEQ ID NO: 879604 - DNA, 694 bp, Homo sapiens
agcaagtcacatcttacgagcatggcggcaggcaaagagagcttgtgcaggaaaactcccccttataataccgtcagatctcatgagatttattcactattgtgagaacagcatgggaaagacccacccccataattcaatcatctcccaccaggtccctcccataacacatgggaattatggaagctacaagatgagatttgggtgaggacacagagctaaaccatatcaattagaaacaccaggggaaaataaaaataaaataatatttaaaagatactattaaaaagtcacagtccaaatgtgaagcaaaattaaagtgcagcattattttaaataattaggatcatatctgtgatggttaattttatgtgtcaacgtgactgggccatgggaggcccagatatttgatcaaacactctgggtatatttgtgagggtgtttttggatgagattaacatttgaacaggaagactgagtacagcagttttctcttcctcayaggagtgggcattcagttgaaggcctgaattagaacaaggagtctggccctcccatgaataagaggaaactccttccacctggctgtctgaactgggacattggtctttaccagccttgagactcgaattgaaacattggctcttcttgggtctcgagcttgccagaccttaagaccagaatttaaactact

SEQ ID NO: 879605 - DNA, 630 bp, Homo sapiens
gatctttttaatgttctgtgaaatttcatttgccagtattttgctgaggattttgcatttctattcatcaggggaattgacctgttgttttctttctatgttgtattgttgtctgattttgatatcagagtaatgctgacctcatagacataatttggaagtattttgttctcttcaatttttcagaatagtttcagtagaattggtgttagttcttctttaaatatttgatagaattcagcggcaaagacatcaggtcctgggtttttctttgatgggaagatttttatgactgattcaatcttgttactcattattgagctgttcagattttctatttcttcctcattcagttttgttagattgtatgtgtccaggaatttatctgttttctctaggtcacccagttttttggcatacaattgttcataatagtatcttatgttcgtttgtatttctgtggtatcagttgtaatgtcccctctttatctcygattttatgtattcaaatttttcttttttagctagttttgctaaaactgtgtcaacattgtttattttttcaaaaacaaatctatttttagttgatcttttgtatttgcttagtctctatttaatttattttgttct

SEQ ID NO: 879606 - DNA, 799 bp, Homo sapiens
ttaggaagtagaattgatatcaattaatacatatgtatgtatttatgtatttatttcgagacagtctcgctctgttacccaggctggagtgcagtggcgtgatctcagctcactacaacctccgcctcccaggttcaagcgattctcctgcttcagcttccccagtagctgggattatagatgcatggcaccacaccgggctaattttttgtatttttagtagagatggggttttacagtgttagccaggatggtctyaatctcctgaccttgtgatctgcccgcctcagcctcccaaactgctgggattacaggcatgagccactgcacccagccaatatcaattgaccttgattcaggaggttcggtggatggtggagtttagttagagcaaaaggcttatgaaaggaaataaaatatcataggcagtggtgaaagaatagagtgtgtgctttatcgggcatcctattgtcaggtaattgcatattgaaaatacatatataatgaagtgacaataaaagattcgggtttcaggaagatgatttttggaactctcagcaaaacagactggtgggagagagaaaccattgtcagagtggaagaaaggtagaatttcaaccgatattgaataaatcaaaactgactggtgggagagagaaaccattgtcagagtggaaggaaggtagaatttcaacagatattgaataaatcaaattaacagaatgtatcaaataattgaatgtaacaagtgaagagagaaacaaatcaaggtttcagtcagtatgataaagaatatggt

SEQ ID NO: 879607 - DNA, 597 bp, Homo sapiens
tagagtccttgccctcatggagtttaaagtgcagtaatgtagagtaattttaaaatctatttattattatttaaaacaataaacgaatacattcttgccgaaaataaatgaaaagtctgtctgtactccttggccaaggccaaaacatgaaagcaaargagctgcctgcctgaaaacactacaagcaactctcaagagggtttctctgttgaaacagtacgtctcattatggaaataatgagaaaaattagtaactgtgcaaatgacagcacacatgcatctttgtggtttctgaccttttagcatcatcaaagcaagaccacaaacctttcaacaccatgcgtggtattaatcttgcacagaatataatgttttcacatattttattctgatttcctataaagtaatttcaatttttagctaaagctaatggatttttctagtgaaaatattgtgtattgaatgactttccagtgagatccacgtaccatgcgccattttcatgctcatgctcatttctctgaagtctgtttgcctttaattcaccatgataaaattccttgtgtacttttattggcaaccatcgcatagtgacac

SEQ ID NO: 879608 - DNA, 590 bp, Homo sapiens
aagaagaaaagagaaaagaataaaatagatgcaataaaaaatgataaagggtatatcaccaccaatcccatagagatacaaactaccatcagagaatactataaacccctcatgcaaatcaactagaaaatctacaagaaatggataaattcctggacacatataccctcccaagactaaatcaggaakaagttgagtccctgaatagactaataacaagttctgaaatttaggcagtaattaatagcctaccaaccaaaaaaagtccaggaccagatggattcacagccaaattctaccagaggtacagagaggagctggtaccattctttctgaaactattcagaaagaatagaaatagaaaagatggaatccttcctaacttattttatgaggccagcatcatcctgatatcaaaacttggcagacaaacaacaaaaaaagaaaatttcaggccaatatccctaatgaacattgatgcaaaatttctcaataaaatactggcaagctgaatccagcagcatatcaaaaagcttatccaccacgatcaagttggcttcatccctgggatgcaaagctggttcaacaca

SEQ ID NO: 879609 - DNA, 591 bp, Homo sapiens
acagtttgatggtttttcagaaaactaaatatagaactaccaacaatccagtaattccactactgggtatttacccaaagaaatggaaatcagtatatcaaaagaatatctgcacccccatatttatttcagcactactaataatagccaagctatggaatcaacctaagtgtttttgaatgaatgaaagaatagcaaaatgtggtatacctacacaayaaaatactatgtagccataaaaagaataaaattctgtcattttcaacaaaagaaattgaactggaggacattattttaagtgaaataagccaggcacagataaatacgtaatacttgtggtcactcacacatgggaattaaaaaaaaaatctcttgacgctagtgaatagaatggtggttaccagaagtggggaaggatagtagaaagatgagtataaaaagggattgttaaatgggtacaaacatggagtacgttctagtgtttaatagcatagtaggtagctatagttgataatgatttattctttttccaaaataactagaagattccaaatgctctcaacataaagaaatgataaatattgaaggtga

SEQ ID NO: 879610 - DNA, 515 bp, Homo sapiens
gtgagtctaatgtctcctccatgggagggagctgtagaatttaaagttgaccatcctgctcatgcctgagttttctctctcctgcaactaatgccttcctctctgtctgagacctggcatgtcagggtagaaggcccttcaccctccttctcttgacaaactctgatttattgacatcttactgaatatccaatggctggaactgggatcaagctcttcagtgtggtctaaaagctgggggcaggagagacctcactcccttcaaaytcactaagatatgaggtgacctcattataccacaggcttttgtcaaggccacagggacataaactcaggtcacttttgtttcacaggcgttattctaatatttgtgtttttttgtttgtttgtttgttttttgagatggagtctcactctgtcacccaggctggagtgcagtggcacgattcggctcactgcagccccgcctcctgggttcaagcgaatcttctccctcagcctcccgagtagctggg

SEQ ID NO: 879611 - DNA, 587 bp, Homo sapiens
ataaaagaaatatcccaaataaaaagaaaaagttagtgttgctaaacaaataactgagaagctgaatgttttcccacttagtgtcccacctcactccatggattaatacactttccaaatatattaaataactgaatgtagaaaattaagatataaaattgcatagagatccagtcatacagtgaataaggtgaccaaattaaccctcttgstagagagtatttgaaagtaataaacacactccccctcacagacacatgtagacacatagacataaaattattgaaagagaactctctgaaaaataaggattatctttggaagttggaaacaataagaaagacttaatactaaaagatgatctgtcagatagtactgaaggtaacccattaggagaatttgccaattcctcctgcccagcatcttgggttttacctgaccgcctcaacacaaggtagaagacaaaagctgttagctgtacaatgtgaaattttaaagctgaggcacccacataaagctgaagacatcgaaagtcaccaccagtaggcaagctagggggaaaaaaagactcacagggcaaggtagtg

SEQ ID NO: 879612 - DNA, 607 bp, Homo sapiens
ccaagatttgggaagttttcaatatgtattttgttaatttttagtttttctatttttataaattcaggaagtacatgtgcaggtttgctacataagtatattgcatagtggtggagtttagacatctagtgtggccatcacccaaatagtaaacactgtacccaataggtaatttttctttcttcttttttatcattcartgttattttcttttaattaaactttaagttttagggtacatgtgcacaacgtgcaggttacatatgtatacatgtgccatgttggtgtgctgcacccattaactcgtcatttaacattagatatatctcctaatgctatccctcccccctccccccaccccacaacaggccctggtgtgtgatgttccacttgccgtgtccatgtgttctcgtgtttaattcccacctgtgagtgagaacatgcggtgtttgcttttgtacttgtgatactttgctgagaatgacagtctccagcttcattcatgtccctacaaaggacatgaactcatcattttttatggctgcatagtattccatggtgtatatgtgccacattttcttaatccagtctatcattgttggacatt

SEQ ID NO: 879613 - DNA, 585 bp, Homo sapiens
tttgtagccagtgagtatcaaaagccttggtagatccacagcaaagaattaaaaaaaaaaaaaaatggagggtggagccaagatggccgaataggaacagctccagtctacagctcccaacgtgagtgacgaagaagacaggtgatttctgcatttccaactgaggtaccaggctcatctcactggagagtgtcagaaagtgggtgcagggtgcaggacagtgggtgcagcgcactgagcatgagccgaagcagggcaaggcattgcctcacctgggaagtgcaaggggtcagggaattccctttcctagtcaaagaaatgagtgacagacaacacctggaaaatcaggtcactcccacactaatactgtgcttttccaacggtcttagcaaacggcacaacaggagattatatcccacgcatggctcagagggtcctatgcccayggagccttgctctttgctagcacagcagtctgagatcaaactgcaaggtggcagcgatgctgggggaggggcacctgccattgcaccgaggcttgagtaggtaaacaaagcagcccagagctctaactggggggagccc

SEQ ID NO: 879614 - DNA, 690 bp, Homo sapiens
tgtttggttttctgttcctgcattagtttgctgaggataatggcttccagatccatccgtgtctctgcaaaggacatgatctcattcctttttatggctgcatagtattccattgtgtgtgtgtaccacattttctttatccagtctatcattgatgggcatttcggttgattccatgtctttgctattgtgaatagtgctgcaatgaacatactcatgcatgcttctttgtaatagaattatttataatctttgggtatatacccagtaatgggattgctgggtcaaatggtatttctggctctagatctttgaggaattgctacactgtcttccacagtggttgaactaatttacactcccatcaacagagtaaaagtgtttctatttcttcacaacctcaccagcatctgtgatttcttgactttttagtaactgccattctgactggygtgagatggtaactcattgtggttttgacttgcatttctctaaagatcagtgaacacattctatatttgataaaggacttgtgtccagaagaatacttaaaatactactaagaaaacaaatgacccagtaaaatatggggaaaatatttgaatgtatattttaccaaagagatgttgatagaaaacaagcacatgaaaagatactcacgattactagttcttagggatatatggataa

SEQ ID NO: 879615 - DNA, 539 bp, Homo sapiens
cacaacacatgaaaacttgtgagatgcagataaagcagtattcagggagaaatttgttgcactactaccaataatacaattaaagacaggcctcaaatcaatgacttcagatactaccttaagaagttagaaaaataaagcaaagtaaacctaaagtaagtgaagaaataatgaggattagattagttattgaaataagtaaaatggaaaacaaaatcaacaaatctgattctttcrgaagacccatgacttttataatcctctagccatactgaccaggaaaattacaagcgacactcacaagtagtttctacagtgtagatgagttgaatcattcctcaaaggacacaaattcacaaatttcaaaagcatgtgctcatcttaatggaatggagaaatgtctaatatctattacttgtgaaaactctgggtaaatgaaacaaattcagcttaacctgataaatgatatcttcaaaaactctacatccgaaatcatatataacaataaaagactaaatgtttttcctccaaggccagga

SEQ ID NO: 879616 - DNA, 603 bp, Homo sapiens
tacaagttgcagttcacacatgttgaattgaataatatctgtgttccagtattatatttaggatatttgaaccttacacagtcctggtagcattagcatccctcagcaaatagagtgcctatttcattttccagtgcatgagattaatttatactcttatggtcatttaactcatttgcaaggttgtagttttaattctttctgatcccctaaataccccaaatcgttttcccaccactctattatacatccacgctctcctataaaatgaaattctcatctttttaggattacataagtgatttgaccgaactctaatttctcttcctgtgccagcatctgtcamatcataggtggtgcccctcttttataaacccgatccacattatgcccatccctgccatcatcttcatgacgttaatatctacatatgaacaagactctgcatttattgatggcatatcaaatggccttgaccacttctttactgctactttcattcacagacatattctgggacttgttaaaagtcttatatcaacataaccatctcagtatgaggcattattttctagtcttgcagcttgcctgctcagtgttccc

SEQ ID NO: 879617 - DNA, 668 bp, Homo sapiens
ctatagaaattattttgttttccaactaactgtattgacagattagagaggaaattaaatatttaaattgatttcttactcgaggctaatctttccagttgtcatatttttctttttatttgtaaacttcattgaagtatagttaatattaaatgaaacacatcaattttaagagtacattttgatgtctttatatgtctgtctgtaatcatcatcccaattaagatatagtacatttcatcatgctaaaatgtttcctcctgctcctttacagtaaattataattttcatacctgacacagccaactactgatctatttttttctattccagaatttcatttcaatgaaaayatacagtatgcatttaatagtgcctgaatgcttttattaaaaatatatatctgagcctcatgcaagttgttggatgtgtcagtagattgttccttttcattcccaaatgtgttttgatatttaaagtattttttgtgaatagaatataattagatcttgtttttttaggcagtctgacaattgctgtcttttggtttgtatgtttaatccatttatatttaatgtaattattgatattgtattgcagtctatatcttagtatttcttttctgtttgccccatctattttgttcctgtttttcatcttcccttttt

SEQ ID NO: 879618 - DNA, 679 bp, Homo sapiens
aagaggtctgaagagactatgaataatacgttaaaagagtagagactactaagagcatagattaaaaatacgaagagatgattcagagatttggtataaaattttaaaaatcaaatgaaattaagaacaaaaagtagtaatatttagtcaaaaaatctacttaaatgcasattagacagagaagaaaggattggtgaactgaagacagtctagcataaaacatgtaaactaaatgcagataaaatggagaataaggccagacccagtggctcacacctacaatcccagcactttaggaggcttaggtgggtggatcaccaggtcaggagttcgagaccagcctgaccaacatggtgaaaccctatctctactaaaaagacaaatattagttgggcatggtggcacacacctgtaatcccagctaatcaggaggctgaggcaggagaatcgcttgaacccaggaggcagaggttttagtgagcagagatcatcccactgtattccagcctggtgacagagtgaggctctgtctcaaaaaataaaaaataaaaaaaagcgaatatagaaaagagtataggaagcatatagggcagaatataaagatataacagtaatacttggagcctgaagagaattaggaaagtggaacgtaagcaatatttaaagtggcaataaccaa

SEQ ID NO: 879619 - DNA, 679 bp, Homo sapiens
aagaggtctgaagagactatgaataatacgttaaaagagtagagactactaagagcatagattaaaaatacgaagagatgattcagagatttggtataaaattttaaaaatcaaatgaaattaagaacaaaaagtagtaatatttagtcaaaaaatctacttaaatgcagattagacagagaagaaagsattggtgaactgaagacagtctagcataaaacatgtaaactaaatgcagataaaatggagaataaggccagacccagtggctcacacctacaatcccagcactttaggaggcttaggtgggtggatcaccaggtcaggagttcgagaccagcctgaccaacatggtgaaaccctatctctactaaaaagacaaatattagttgggcatggtggcacacacctgtaatcccagctaatcaggaggctgaggcaggagaatcgcttgaacccaggaggcagaggttttagtgagcagagatcatcccactgtattccagcctggtgacagagtgaggctctgtctcaaaaaataaaaaataaaaaaaagcgaatatagaaaagagtataggaagcatatagggcagaatataaagatataacagtaatacttggagcctgaagagaattaggaaagtggaacgtaagcaatatttaaagtggcaataaccaa

SEQ ID NO: 879620 - DNA, 627 bp, Homo sapiens
gacttagaattaaatttggattcttaatttctgactctggaagtataaaacattaattcctcaaggcatttttcctcatctgcaaaactggaattataaggcctatcttatgtgatattattataaataaatggctagcatggtgccttcaagagtagactgcgagctgtttcctttttattttatcctgtgaatgcactttatcattatctccttgaggcattagaaaatgtaaaagtggaagctggtacatttaaactcacatagaactcgaagcgattgtgtattatcatcyataaatgttaaaatgaagactctagttactagatatgttccctcttatatatatttttcacatatccataatgtccccatactcattttttatgtgtgtatataatagtggaagctgtgtttgtaaaaacaattttaatgtcattttccttattacagaagtaataattagagtagaaaattttggatttacatataagcaatatcaagaaaagaaaaatcaaccaaggtctcactgctctaatcattaatattttggtttattttatcaaacctaatctctcagtctctatctccatattatatatgtatacacacataccatatatgtac

SEQ ID NO: 879621 - DNA, 461 bp, Homo sapiens
tctagggtggaggtaaaatgctgccagtttttctttttgcatagcaagaatcacctttactccaattcccaagaagttcctcatttccatcagagaccacctcagcctggacttcattatccatatcgctatcagcattttgatcagagccattcarcaagtctctaggaagttccaaactttctcacattcctgtcttctttagccctccaaactgttccaacctctgcctgttacccagttccaaagttgcttccatattttcaggaatctttatagtagcacccaactcctgctaccaatttactgtattaatggattctcacactgctaggaataaatacctgagactgggtaatttataaagaaaagagatttaattaactcacaattctgcattgctggggaggcctcaggaaacttacaatcatggcagaaggtgaaggagaagcaggcgcctt

SEQ ID NO: 879622 - DNA, 435 bp, Homo sapiens
  misc_feature 279, 280, 281: n = A,T,C or G
atttaattagtttgcatttgtcaatctttgttttgttgcaattgcttttggcatcttcatcatgaaatttttgccagggtctatgtccagaatgatattttctgttttcttctagggttttcattgttttaggttttacgtttcagtctttaattcatcttgmgttgatttttgtgtatggggaaaagaaaggtgaagtttcagtcttctgcttatggctagccagttatcccagcatcatttattgaataagaagtcctttttcctattgatttttgnnngtaggtttgttgaaaatcagatggttctaggtgtgtgactttatttctgggctctctattctgttccattggtctatgtgtgtgtttttgtgctagcaccatgctgttttggttattgtagccttgaaatatagtttgaagttgggtactatga

SEQ ID NO: 879623 - DNA, 597 bp, Homo sapiens; identical to SEQ ID NO: 877546

SEQ ID NO: 879624 - DNA, 597 bp, Homo sapiens
aaacacgtgttgctcaattgatgtgtcaccatatctgataatactgccatactttgagcaaaggagtaacttaaattcaacatgagttttcagatgtcttcgaattttctctcattatgagaattatctactgctaatatcattttaatccaactttcataattcctaggagtatcagtggaaatttctttacattttgatataatttcaaacttcaggaaagttgcaagaatagtacaggtgctcttatacacccrgatttaccaattagctacagcaatgatttaattttagtgcactaattagaaaaagaattcaaaacaattactttctctatttctatttaatctaattctagggaaaataattgcttttgcacgtgacagcaaaaaaaaactgaatggatctattatcactaaaattgtatgggagctctgggttgatgctacacattcctgaacagcttttatggggtattaataattagcagcacagagattgtggattaaacttctttgtgagcccaccatgttccttgtagcccactgtcactagactctgaatctactagagtgtccacaattaagaaccccacaa

SEQ ID NO: 879625 - DNA, 654 bp, Homo sapiens
gccatttctcatggctctaccaaggatcacagtcctcctattgagggtcccccacttcccagggctcagcggtgaaggatccaggggtctcacctgcacccacaaagcagccgttctaacacttcaccctcccctgagcccatgggcgttttcttaggctttgggaatagaaaaccctactctggcttatttcatattctaccttatctgacatccacaccccgagacrccaccttccaccaaagtcctggcctttagaacacaaagcccatgacaggactcaaatttccctgctttctgctctcagatttcttcaaatgcaataaaacaccaaaaaaccctggcagcccgaatacagcaaaggtccaaaggtgaaagagggagtaggaatacagggaggggcattcaagcatcacttcctcttggaagccaatttgaggctccctctgcctcctcctccttcctccagcccactactgattcagctacctctcttctgtatggaggctccccgctgctttagttccataacccagtgtgcatacagtatttatagcacttctttgttgtctttaagttctggtttactaatctgttgtagccaatagactctaagcttcttgaggacacatatatgattgaattgtctcctta

SEQ ID NO: 879626 - DNA, 661 bp, Homo sapiens
tctgaaagattctgcacattttccctttgggctactgtacggctaatggccaattttatggaaaggaaatcaacaggcaaattggatatgttcacattatttcctcatttttctcacttgattttctattacaagtaaacactgtgcaaggagaggtagaaaactgtccaggaaggaagagtggcacactgtaatatagcactctccatcctgacttcatttctcagtaatcagttggtgggccatcaggactatgatattaatgggtgtttttttctatcaaaacggaggtctcagtaggcccccaagggttgctgatatccaacgaacaaacattcactaacttttcttcagctgtaccataatagggtatacatgttatgatttacaataaatactgtgaaaatgatataacacccaggattgtgagtctaaaggtttccttaggggttgctgagcttgggagatttttatcagaactagaaatttgtctgcaatggtggaagcaatgaaaagacagtacatgccatgaaaatgttgaccattctacattcaaactcaaaagattttgtgtattacaatttcctcctggcaaggcagaatgtcctgatgtatctgcctygctttccctagtagaggtacatttcgatgcttaaagatt

SEQ ID NO: 879627 - DNA, 619 bp, Homo sapiens
ttttctccacaaccttgccagcatatgtcattttttgactttttaatagtagccattctaactggtgtgagagggtatctcattatggttttgatttgcgtttctctaattatcagtgatgttgagatttttttcatatgattgttgactgcacctatatcttcttttgggaagtgtctgttcctgtcctttgatcaccttttaatgagattttttttcttgtaaatttgttaaggttccttatagatgctggatattagacctttgtctgatgcagagttggcaaaaattttcccccattctgtaggttgtctgttatactctgttgatagtttcttttgctgtgcagaagctctttggtttaattaaatcccatttgtcaatttttccttttgttgaaatcatttttgacaycttcatcatgaaatgcctatgtccttgcctatggcttgaatggtattgtctggattttcttaaaggatttttatagtttgggtttttacatttaagcgtttaagccatcttgagttaatttttgtatatgatataaggaaggagtccagttttaattttctgcatatggctagtcagttctcccagcaccatttactgaataggg

SEQ ID NO: 879628 - DNA, 602 bp, Homo sapiens
tagcaaaattttactatatattttcaacatcatctttgataatggccttgttaaattctaagtttggtaatctggtttcaactctctgcttcatttcttactgtgtgaccttgggtgagttacttaacctctctgtgctgcaatttcctaatctaaataaagagactgttaacagtatgtacgttatagaattgtaataattaagtgacctaatgaataaaatgctgttacctgctctacctgacacatataggagtcaacaatgagtgcaatgacaataacagtgatcatgatrtcactccagagttttgtgactgactccttattggtccctatattacctatctattgctatggaacaaattaccccaaaatttagtggcttaaaacattacacatttatatcttacaatttctgcgtgccgggaattgtggagtggcttaattgagtgtctggctttaggtctttcatgagatttcaattgagttgttggccaagcctttggtcaactgaacacttggctggcactgagggatctgcttctaagagggctcattcatatgctatcagctggaggcctcagttccccactatttctctc

SEQ ID NO: 879629 - DNA, 627 bp, Homo sapiens
caatatgcaggcaagatgaagaattgtttgtacccagcaattgaggcttatggtgggatttaagtctctgaggaacaacagtgatcggagtgagactactatgtcttcattaatctcacaagtcatcctcctctgttctttaccttaaattgttgcactccagctcccattcccaggctgtttctcatttgctcccatgagttcaagctcacctttacactgatgtcttccagcaacttttctccagcccacctggctgtctaacaagcacaaaactaatcaaacactgaattcatcacctccatttttacccccacccaccactccagcctacctgttcctgcccctcttgttayagtctcaacaaatgacaggagccaagacccacctttccaacctagaaatctgagtggcaacctctatgctttcttatccctcactaccatattgaatccatcaccatgtcctgcttcttttcctgctacttatctctaaagtccatctcccctcaaagtccctgcctcatatggttaggatatttgttccctccaaatctcatgttgaaatgtgatccccagtgttggaggtgaggtctggtgggaggtgtttgggtcatgggggcagatt

SEQ ID NO: 879630 - DNA, 601 bp, Homo sapiens
attacttgcctgccagatagctaaccaaataactatgggagggtctgggttgagagaaaccagggtcctaaactaccaggtcaaatacattattgctaaatctctataccattgtcagaaacatgctacagaaaaccaggctggtttatgtaaaaatarttgtgttagtactgattaaaattctaaagggctagtattaataaaatgaaatatcttgggtaaaagtgcttaatattccttggatgctctgtttctttagaattagagagtacaatgggagtaaatgcatcaaaacaatgtaaaattctttgtgatcaccagggtgtgaccctgcctctggtaacgtacacagcagttacttctggaaccattgcttgagatatctagaaacactctggtggccctaccttggctattcctggctatgactctctgctccaatctcctgccttatcctctttacttctaattagttagtagacatccttgggaagtaagaaactagagcttcaggggacccagcttcctggctcctcctgtgccgtctttagaatactgtggcagaaaccccaatgatcttggaaatttgggtttgcatatt

SEQ ID NO: 879631 - DNA, 455 bp, Homo sapiens
ccaccatgattgtgaggcctccccagacatgtggaactgtaagtccattaaacctcattttcttcccaatctcaggtatgtctttatcagcagtgtgaaaacagactaatacacaaacccacagccaacatcatactgaatgggcaaaagctggaagtattccccttgaaaaccatgacaagacaagtatgctgtctttcatcactcctattcaacayagtactggaagtcctggccagagcaatcaggcaagagaaggaaataaaggacatctaaataggaagagaggaattcaaactatccctgtttgcaggtgatatgattctttatctagaaaaccccatagtcttggcccaaaagctccttcagttgataaacaatttcagccaaatttcaggatataaaatcaatgtacaaaaacactaacattttatacaccgacaacagccaagcca

SEQ ID NO: 879632 - DNA, 632 bp, Homo sapiens
agtgaacaggcaacctatccatctgacaaagggctaatattcagaatctacaaggaacttcaacaaatttacaagaaaaaaacaaacaaccctgtcaaaaagtgggcaaaggatatgaacagacacttctcaaaagaagacatttatgcagccaacaaacatattttttaaaagctcatcatcactggtcattagagaaatgcaaatcaaaactacaatgagatatcatctcatgccagttagtatggtgataattaaaaagtcaggaaacaacagatgctggagaggatgtggagaaataggaacgcttttacactgttggtgggagtataaattagttcaacattrtggaagacagtgtggcaatatctcaaggatctataaccagaaataccatttgacccagcaatcccattactgggtatatacccaaagggttataaatcattctactataaatcattctactataaagacacatgcatatgtatgtttattgcagcactattcatgatagcaaagatgtggaaccaacccaagtacccatcagtgatagactggataaagaaaaggtggcacatatacaccatggaatactatgcagccataaaaaagaatgagttcatgtcctt

SEQ ID NO: 879633 - DNA, 632 bp, Homo sapiens
agtgaacaggcaacctatccatctgacaaagggctaatattcagaatctacaaggaacttcaacaaatttacaagaaaaaaacaaacaaccctgtcaaaaagtgggcaaaggatatgaacagacacttctcaaaagaagacatttatgcagccaacaaacatattttttaaaagctcatcatcactggtcattagagaaatgcaaatcaaaactacaatgagatatcatctcatgccagttagtatggtgataattaaaaagtcaggaaacaacagatgctggagaggatgtggagaaataggaacgcttttacactgttggtgggagtataaattagttcaacattatggaagacagtgtggcaatatctyaaggatctataaccagaaataccatttgacccagcaatcccattactgggtatatacccaaagggttataaatcattctactataaatcattctactataaagacacatgcatatgtatgtttattgcagcactattcatgatagcaaagatgtggaaccaacccaagtacccatcagtgatagactggataaagaaaaggtggcacatatacaccatggaatactatgcagccataaaaaagaatgagttcatgtcctt

SEQ ID NO: 879634 - DNA, 604 bp, Homo sapiens
agagttatcaggaagctaaaatgacacgttttagagatactgacttgcaaagacccccttcaaaggcactgtgtataattatatatttgtaagtttatattatttttcttagagtgggttccctaaagagtctgagtttcaggatgcataaaacttggttttgctcttgtttttcaacacatcaataggaatttgtctttagtttatagtctcagatacaaagcaacatttctagtcctagagggtgcttcctctcccattgctcttaaagacatctccctggttttcttttgttgaaatgtgctatctttgttttacaacattgtaatatgataattttraagttactatctttgtgcaaggtaataaatgaatgaaaatctcaaatgctaacatcttctgtggcatttcaatattaaactaaatgtgtgcataatattctctttggtaagtgaattaacattttcacataaccatgaaagataaaattttaataatctcccttggagttgtctctttgaagtcatgtgcaaaatattaaatgagaattctaacagaacactattccttctgtcttttcagattttgtaagctctcaaagaca

SEQ ID NO: 879635 - DNA, 478 bp, Homo sapiens
tggctctagaagtccttatttgaccacatgccagaagaatccatgtgagtactgcctgagtacctccaagttggaaaagtacgtttttttttttaactgagtgcctccaagttggaaaaatgttctttttttttaatgttatcgggttcaagggtggaacatttgtcctactaaagaacaccttttaagagctttgtggccggaagggtgaaaagtagacctccttctccttctcttcttttcgtcccctttgattcttttcctcttctyttttgatcttcaatccaatctttagccccaactcaccttctagatgcatttttcctatttttttcctcttctgctagataattgttggttgggacaatcccatcttaatcaatgttcaaattatgtctccatgttcatttccctgtaggtcatagaactctttgttagagtatcatgtggccaatttataggtctttattctttctct

SEQ ID NO: 879636 - DNA, 571 bp, Homo sapiens
tagcttaaaaatcctctcgttttcccaggatacgagaggataattttcagggtaacttcaagttcttctcctgctgatcttgtcctacatcctctcaccagtgaagcctcatttgccaatttctagtccctcaacagatcccacttttccmtccgtggggcctttgcacaggctggtccttcttcctaggtaccctttcccacatttcttttggaaggccttctaatgtcactggaaacgtcattacctcaaaaggacctttcctgaccacactgcctcagtaggactctgattttattttctctggtgcctccctgctccttgaacagccctggtcacaatcaggacgtattaatttgcttgcttacttgatgaatgtctccatcccccagttgattacatgctacatgtggacagggaccattatgtctgtactgcttaattcaaggaccacaataaatacttgacggatgaatgaatggacagataaatgaagaaactggggagctgggaaaaccactccccctttgaggctggaggagatgaaacacatagtgaggactcagagcca

SEQ ID NO: 879637 - DNA, 669 bp, Homo sapiens
agagaaatgatcttaacaaaagaacaaaaaaaaaaaaaaaagaaagaaacttgaaagtgaacagaagttctgaagtgtgtgggggtggaagaagctttcttggagaggaacagtaaggagatagctaactcaaagcgaccagaatagcttagcgagctgagaattgagaattttgtgactcggtggttctgctccatagggacactgccggctcccggggagaatgcatcttactctgccccctaggcaggtccagtttctggacttccctggccacacagctggagatttccacatcatatattctgcttgtcttaraaaactgaaggactgattttctgggccttctgactgaccagagagcgttctttgtgagagacacaatagctatctattcctttgtgcagtgtgctttgccaagttccatgagggcagcggtccctgctatctttgtgtaattctgggcagtctgagtcccacaaattggatttacacagcacctgcgagttctcacacaagcccccttgttggtaatatcatttggcatatgtagcaagcattcatttttatcatagtgttaattgttagccatggcagtaacaagccagaaaaaagcacaggcagaaaaaaagccacgtctgctcaattaaaaggggtaaatggcttggc

SEQ ID NO: 879638 - DNA, 588 bp, Homo sapiens
catcagatccatggtctgctgctgattttgattcttatcacatcctgtataataagtaagataactattatccttgtattgtaaataaggggaatcagtctcagagaattaaagtgacttaatgggttatattcagaatcatattcaattgttgttccccgagcatctttgaagtactgggcaattgctatatgctagtctgtttattatcttccagttattgttcataacaacccagtggaattggtggtattacctgtattgaacagataagtttgaaggcatgtaagccactgttgagaatcatgtagttcttaaggaataaagctgagatgtaagcctgggttttgtgaatccaagtccagtacactttacctatgatgttaaacataacactttaagctgctactgtggtataatatttggrccacataagcaattactcaaattctgttctattcatactgattaccttttagatccatgttctaaaattctgttttcatcatgccagccaagcagtgggaggcacaaacataggtataataattgtgttaacagcaataataaaaaagctaccatttattg

SEQ ID NO: 879639 - DNA, 646 bp, Homo sapiens
tgagaaggtatctcactgtggttttgatttgcatttctctgatgatcagtgacattgagcttttcttcatatgtttgttggctgcgtaaatgtcttcttttgaaaagtgtcttcttttgaaaagtgtctgttctatcctttgttcactttttgatgtggttgttttttttttttcttgtaaatatgtttaagtttttttgtaaattctggatagtagacctttgtcagatgggtagattgcaaaaattttctcccattctgtaagttgtctgttcactctgatgctagtttcctttgctgtgcagaagctctttagcttaattagatcccatttgtcaattttggcttttgttgcaattgcttttggtgttttggtcataaagtctttgcctttgcctatgtcctgaatggtattgcctaggttttcttctagggtttttatggctttgggttttacawttaagtctttaatccatcttgagttaatttttgtataaggtgtaaggaagtgttccagtttcagttttctgcatacggctagccagttttcttggtaccatttactgaataggagatcctttccccattgcttgtttttgtcaggtttgttgaagatcagatggatgtaaatgtgtggtgttatttc

SEQ ID NO: 879640 - DNA, 658 bp, Homo sapiens
ggaagaaaaatctatgcacgagtacactgggattttgagcactccatgtggaattaaactcaacaatggcagccagatgagagaaaggccttatgaggtaaaaccagtgaggtaggtgaaacactcttcctctaagaatttgtatgaggagtgttaagagttcactcacttttargacttttctgaagaaggagttctatatctatccatttttacctgtatgctctttagttccctggtagatttctttacttgaaactgctttatactatcaaagatactggctaaaagaattcttctcattgctacacatcacggagagaccaaaagtgaatctctcaaaacagagagactagaactctagtcagttcttgggaataaactgcagtaggtattgtaggacgtaagaataggagagtgagccttctgtattaatggttctgtgcaaggatagaccttaggccttgcacagatggaaaggtcccacttgtgtagaactgggatgcttgaagagtgactgaattcccagcaattagtgctaaaactccttaaatagagaagccaatgctgacagcaaacggcaccagaatgttagagagctggcaacggcataaactggtagatcagaaagtagtagaaaccagatatattctctcaa

SEQ ID NO: 879641 - DNA, 641 bp, Homo sapiens
gttcaaatcttgattctgccatttagtaagcagattattttatataggcagataagtacctcttagaatttgcttttccatttgtaaaataaagatggtcatagcatacttatagggatgttattatggtaatttaagaaatatttcctaattatggcaatttaagatttattatggtcttttgtatttcctactaatatatttacaatggaacatcagctaagtgagatayatattgaatgactttatgaatattgtgtattaacttataactggagaagcttctttttttttcttttttctccatatggttttgctttttgaatttattattgttattggaagtcctcttatatccaaagaatttattttaggcctttgtaccaaaaataaaaaaaaaagatttattttttaatggcaagagcctattctgagatgcttcctactggaaacttccttaataattttgctcctgtaatttttctttaatgaaaattgactcaaccaataagaaatttcatttgctctcaagatctgcctcagtttacttctattctctgttccttccttgcattgttgctcaatgctacacttagaaccaataaatcagacatggttcatgcctcaaacactgacaaaaa

SEQ ID NO: 879642 - DNA, 641 bp, Homo sapiens
gttcaaatcttgattctgccatttagtaagcagattattttatataggcagataagtacctcttagaatttgcttttccatttgtaaaataaagatggtcatagcatacttatagggatgttattatggtaatttaagaaatatttcctaattatggcaatttaagatttattatggtcttttgtatttcctactaatatatttacaatggaacatcagctaagtgagatatatattgaatgactttatgaatattgtgtattaacttataactggagaagcttctttttttttcttttttctccatatggttttgctktttgaatttattattgttattggaagtcctcttatatccaaagaatttattttaggcctttgtaccaaaaataaaaaaaaaagatttattttttaatggcaagagcctattctgagatgcttcctactggaaacttccttaataattttgctcctgtaatttttctttaatgaaaattgactcaaccaataagaaatttcatttgctctcaagatctgcctcagtttacttctattctctgttccttccttgcattgttgctcaatgctacacttagaaccaataaatcagacatggttcatgcctcaaacactgacaaaaa

SEQ ID NO: 879643 - DNA, 605 bp, Homo sapiens
aaagagttatcaggaagctaaaatgacacgttttagagatactgacttgcaaagacccccttcaaaggcactgtgtataattatatatttgtaagtttatattatttttcttagagtggttccctaaagagtctgagtttcaggatgcataaaacttggttttgctcttgtttttcaacacatcaataggaatttgtctttagtttatagtctcagatacaaagcaacatttctagtcctagagggtgcttcctctcccattgctcttaaagacatctccctggttttcttttgttgaaatgtgctatctttgttttacaacattgtaatatgataattttraagttactatctttgtgcaaggtaataaatgaatgaaaatctcaaatgctaacatcttctgtggcatttcaatattaaactaaatgtgtgcataatattctctttggtaagtgaattaacattttcacataaccatgaaagataaaattttaataatctcccttggagttgtctctttgaagtcatgtgcaaaatattaaatgagaattctaacagaacactattccttctgtcttttcagattttgtaagctctcaaagaca

SEQ ID NO: 879644 - DNA, 650 bp, Homo sapiens
tgaaagtatcaaaaacttttaaagagatttgctctctatcagttagctttcagtgaatcataaaccactctgaaatttaggagcttaaaacaagaaccattttattattggtcacaagtctgtgtgttgattggggtctgaaagaaactagatagcctatctctaatgtttggaggtagggatggctgtcaccccactgttggctgtcagctgaggaatttctcaccctccagtaggcaggtgagccagggctttttcacatgaaggtgattacagaggaaagtttccaagggtagcaagaaggggcacaaacacactgcactggttctttacatgtctccccttgctgatgtcccactggggaaagcaagttacgtggccaagatgaaatttgagggatgagaaracagaattctcttggatagaagtggcaaagttattttgcaaaagggtatgcatagaggggtgggaggaatttgtggccattttgcaatctaccacaatctatcaagtaccctgataactagaagtgctctcttcatcaatacctttcctaagcaggaatgaagaagacagttttctgatcacctttagcactgccaggttaatttccttatttatctacactgactatctggggtgttttcaaa

SEQ ID NO: 879645 - DNA, 581 bp, Homo sapiens
aagtgctgtttcattgaaccttccccatgttgctgtgaggtagttatatttttctccactttacacatgaggaaactgcagatggaatgctttgcccaaagtcacacagcagtaagtggcagccagacttgcaactcgaggccctaccaccttaacatgaatgatagaaagtccagatcattgagaagtgtctgttcatatccttcatccactttttgatggggttgtttttttcttgtaaatttgtttaagttccttgtagattctggatattagccctttgtcagacggatagattgcaaaaattttctcccattctrtaggttgcctgttcactctaataatagtttcttttgctgtgcagatgctttttagtttaattagatcccatttgtcaatttatacagccaaaaaacatatgaaaaaaagctcatcatgcaaatcaaaacaacaatgagataccatcttacaccagttagaatggcgatcattaaaaagtcaggaaacaacagatgctggagaggatgtggagaaataggaacgcttttacaatgttggtggaagtgtaaattagttaaacc

SEQ ID NO: 879646 - DNA, 656 bp, Homo sapiens
cagatctctcagcagaaaccctgcaagccagaagagaatgagggccaatattcaacattcttaaagaaaataattttcaacccagaatttcatatccagccaaactaagcttcataagtgaaggagaaataaaatcctttacagacaagcaaatgctgagagattttgtcaccaccaggcctgccttacaagagctcctgaaggaagcactaaacatggaaagaaacaaccaataccagccactgcaaaaacatgccaaattgtaaagaccatcgaygctatgaagaaactgcatcaactaatgggcaaaataaccagctaacatcataatgacaggatcaaatgcacacacaacaatattaaacttaaatgcaaatgggctaaatgccccaattaaaggacacagactagcaaattggataaagagtcaagacccatcagtgtgtagtattcagaagacccatctcacatgcaaagattcacatagactcaaaataaagggatggaggaagatctaccaagcaaatggaaagcaaaaaaagcagggattgcaatcctagtctctgataaagcagactttaaaccaacaaagattgaaagagacaaagaaggccattacataatggtaaagggatcaattcaacaagaagagctaa

SEQ ID NO: 879647 - DNA, 656 bp, Homo sapiens
cagatctctcagcagaaaccctgcaagccagaagagaatgagggccaatattcaacattcttaaagaaaataattttcaacccagaatttcatatccagccaaactaagcttcataagtgaaggagaaataaaatcctttacagacaagcaaatgctgagagattttgtcaccaccaggcctgccttacaagagctcctgaaggaagcactaaacatggaaagaaacaaccaataccagccactgcaaaaacatgccaaattgtaaagaccatcgacgctatgaagaaactgcatcaactaatgggcaaaataaccagctaacatcataatgacaggatcaaatgcacacacaacaatattaaacttaaatgcaaatgggctaaatgccccaattaaargacacagactagcaaattggataaagagtcaagacccatcagtgtgtagtattcagaagacccatctcacatgcaaagattcacatagactcaaaataaagggatggaggaagatctaccaagcaaatggaaagcaaaaaaagcagggattgcaatcctagtctctgataaagcagactttaaaccaacaaagattgaaagagacaaagaaggccattacataatggtaaagggatcaattcaacaagaagagctaa

SEQ ID NO: 879648 - DNA, 566 bp, Homo sapiens
cacaaaagaaactaccatcagagtgaacaggcaacctacagaatgggagaaaatttttgcaatccactcatctgacaaagggctaatatccagaatctacaaagaactcaaacaaatttacaagaaaaaaaaaccctatcaaaaattgggcaaaggatatgaacagacacttctctaaagaagacatctgtgcaaccaacagacacatgaaaaaatgctcatcatcactggtcatcagagaaatgcaaatcaaaaccacaatgagatacaatctcacaccagttagaatagcaatcattaaaaaattaggaaacaacagatgctggagaggatgtggagaaataggaactcttttacactgttggtaggaatgcattagttcaaccattgtggaagacagtgtggcgatycctcaaggatctagaactagaaataccatttgacccagtgatcccattactgggtatataccccaaggattataaatcatgcaactataaagacacatacacacatatgtttattgcagcactattcacaatagcaaagacttggaacctacccaa

SEQ ID NO: 879649 - DNA, 476 bp, Homo sapiens
cattctgagatactgagggttaggtcttcaacatatcattttggggatacacatttcaacccataacaactcagagagtcaaaaaaacaaagaggccaccataccaatttccacaggtcaactagtaaagacctgmtttctgattgtatgcaaatatgttgacatttgtcctaaccacagtagaaaaagtatataaatggtagccttcatagggctgtaacaggtatgctatttagaatccaggttccagatgctttaacaatgagatgatacagtgaaaaatgagatagaagtttattttcctttcagttaatcatctgagaataagcactttagggatgatttaacagcactgaactattaaggaccctgggatcctttatattattgccatcttcaacatgaagtttccatctctgggcttttgccatcatgtttgccacacacctattaagaaggaaattagggcaagggag

SEQ ID NO: 879650 - DNA, 638 bp, Homo sapiens
cagaatttacatattaaatcgattattttctccttcataatagttaccttttgacacttacacattcaccccaagtacaaattcactaattatcaaggcctaggcactattataattctgggcatataaatcttaaatattctatgattgaatgggtccatgagtgagtgagtgagcaaatggtaaaagaacagataaattaatttagaacctctgctttgaggagtgctttcccagccagtaatatttttaatatctacrctaatggcaaaactttctggtttggggtgaatttgattaatgaaaagactcaaaaaatcatttggaataagtcttgggagtaagagacacaatccagtgggataaggacacttaggaaaacacaaggcatgatcaaaatattggaagtctgactttctcataattgtgtcctgaaggcaattccagaaatgatttgagcatccacagcggctctgaactaggcatgttaactccagaatgactgcttagaaagactatgttattttgaatgaaggaaaactgacatgctgattttctgtttctctaattaggctcatacattcatggtcaaggtttatatcatattttgtaaatgtgattagaagaaaagaccattt

SEQ ID NO: 879651 - DNA, 608 bp, Homo sapiens
ggtcgcaatgttttacaactgttaaccgctatctagattcagaaccttttcatcatgccagaagaaaaccctgtacacattaagcagtcactccccagttttcctcttcccctagtccctggcaaccactcactaatctgctatctctatggatttgcctattctagatatttcatataaatgaaatgatataatatgggaccttttgtatctgtcttttttcacttascataatgttttcaaggtttattcatgttgtagcatgtgttagtacttcattcctttttgtggctaaagtaatactccattgcatggatgtcacaattttacatttatcagttgatgaatatttggcctgtttccatcttttggctatcgtgaatagtgttgccgtgaacattcatgtatgagtttttgtttgaacatttgtagttatctgtattttatagatgaggacagtaaactacagagctagattagtaagtagcccaggatcacacaagtaagagatggtgaagccagggatacaaatccaggcaattgatgtcagaacctacattttttaaccactgtgcttaacctggcagctactaggtatccagtaaatg

SEQ ID NO: 879652 - DNA, 664 bp, Homo sapiens
tctgcttccaggatatttctattgcatccttcttattttaactttttactttaatgagaaacttatttaattaaagacttctaaagaacatatatactcatttcttttaagataacaactacaatagctttttacaaagttagtagggtataagtgtaagtaaggtatagaacttactagttctagtaagtaagacgtgtctgtggatagctgtgcatgttcctaataatgtcatttagaaatgtatttcttttctataaaacctcctgtagatgatctcactagagggaatgtccaatataacaaggtaatgagaatgcctctcaaaataagctcacactcatggattttggggaggctctcaccaacactccaagctgcatagtgatgggagtttcctttgttgtctttctcaagaagggacaatcctgttgtccctgttaaataatgtagatacttatctatgaatgagggacatcatrcccatttaatatgttctcgtagtcacagtccctctgctccagcatcatattaaacttaaattcaacccttccctaggcttgcttgaataaactttaaagtagattagacttctatgtgtgaacagtttttatatactgtttgtaattatatatataaattaattacaatattacatgataaa

SEQ ID NO: 879653 - DNA, 635 bp, Homo sapiens
atccctgtttgcagatgacatgattctatatctagaaaaccccatagtcttggcccaaaagctccctcagttgatacacaacttcagaaaagtttcaggatacaaaatccacatacaaaaatcattagcattcctgtacaccaacaacagccaagccgagagccaaatcaggaaagcaatcccattcacaattgccacaaaaagaataaaatacctgggaatacaactaaccagggaggtgaaaaatctctacaatgagaatgacaaaacactgctcaaagaaataagagatgacacaaacaaatggaaagaacattccatgctcatggataggrggaatcaatatcattaaaaaggccatactgcccaaagcaatttgagcagattcaatcacattggattatattcagtgtgattcctatcaaactaccaacaacattcttcacagaactagaaaaaaattattttaaaaatcatatggaactaaaaaagagcctgaatagccaaggcaatcctaagcaaaaagagcaaagctgaaggcatcacactacccaatttcaaactatactacaaggctacaggaaccaaaacatggtactggtacaaaaacagacacatggaacagaatagagaat

SEQ ID NO: 879654 - DNA, 635 bp, Homo sapiens
atccctgtttgcagatgacatgattctatatctagaaaaccccatagtcttggcccaaaagctccctcagttgatacacaacttcagaaaagtttcaggatacaaaatccacatacaaaaatcattagcattcctgtacaccaacaacagccaagccgagagccaaatcaggaaagcaatcccattcacaattgccacaaaaagaataaaatacctgggaatacaactaaccagggaggtgaaaaatctctacaatgagaatgacaaaacactgctcaaagaaataagagatgacacaaacaaatggaaagaacattccatgctcatggatagggggaatcaatatcattaaaaaggccatactgcccaaagcaatttgagcagattcaatcacattggattatattcagtgtgattcctatcaaactaccaacaacattcttcacagaactagaaaaaaattattttwaaaatcatatggaactaaaaaagagcctgaatagccaaggcaatcctaagcaaaaagagcaaagctgaaggcatcacactacccaatttcaaactatactacaaggctacaggaaccaaaacatggtactggtacaaaaacagacacatggaacagaatagagaat

SEQ ID NO: 879655 - DNA, 627 bp, Homo sapiens
aatcagagcaaatcctggcgatgttctgcaggcagtggcccagttatacgaatgcctgttcaataagtttgcctggataaaggaagaaaggggcaagaaatgaatcaaattctacagtggggaccactacgtttctctgctttcaatgcctgctttattattcttttctttttctctctttctttatcagggtcaccctcaggaaaaagtcagacacactcccctgaaaccactgctggctggaggaaacaggtttagcatatgtcaatgagaaccacacatgctatggaatttcatgccaaagctatcaagcttccctttgacagcctcactgagaaaacaagtcaatagagattcattaattggaatttagaaaccttacgtatttaaaaaaaaaaggctgaaaattattatacattacagaacaatgattctcacactccagggcacttaagaatcccctgaggtgttaagaaaargagactttttaattgaaataagtttctgaatttataataaaattagcattttgagattaaagtcttaagaaatctaaatttataaactcataattttaataaattgaatattcactaaaacaccagcaactccaggtattttttcaag

SEQ ID NO: 879656 - DNA, 663 bp, Homo sapiens
ccatggtcataatatgatatgctaaatttcacttcttttaaaagataagataatttggcattgcaaaattgcataaggcaaaggtggtataaatatattaaagctcctctatgtattagtggttactaccattgcatatatctgcactcaagtttatttttccaactctggaagaaaccagaacaacaatgctcccaattattttccttttgaaagtttagtttgtatgacttcacttaccttctgtctggtggaggatcatgaccagcgtgccctgccaaatgttctacacaactggctcaagtaactgggggatttggaggtatgctggctatgttcatgccaaaggtaaatctactgaccatggcaaaagaattaacctttgaaaacgagcaattgctctatttggtcttctagtcttaaagccatttgtttatgtagaattgctcttagacctggacaagagggtcccatattttagaggccttattccctcatgagtgargagtctgcagggccaaaggactcctcctttccttctagaaattctgaattccagggagccagaagtgtctacctgcccagaaggctccgagcctgctctaaggcctgcatagcccccttcccttgtgtatcctcctgagggcagatggtaccactagg

SEQ ID NO: 879657 - DNA, 410 bp, Homo sapiens
aattttgcctcacgttgtatcctatataaatgaagacatttattatctttgcggcttcttttcctcaacattcatacaaagccttgtacataaatattcatagcagcctatttgcaatcgcccaaatctgaaaggaagcaacacaaatattcaccactaggtgaaagaataaacagccatggaatatttctacaatggaatattattcatcaataaaaactgataaacattacaacrtggatcaatcccagaataattatgctcagtgaaagaatccaggcagaaaaagagaatatactgtatagttacatttacataaaactccagaaaagtcagactcatctatagtgatagaaagcagaacaatatttgtctgggtggggagtggggtgaacagtgccttggggaca

SEQ ID NO: 879658 - DNA, 452 bp, Homo sapiens
ataggtagcttttaccaaagcttctgtagcatactaaatgcatcatgcctgaaaattttacaaaatctttaagtcatccctgatgcccaaatgcagctactgtagatcctccttataaagctgatattgtgagaaaaaaactaataaattataaatactatgttcgaatgattgatttatgatttatctaaaattataaaataagccatattttactggaattctgttctacttgagttcttaataagaaattagcaccttccatttgtttctctttttcctttctttctttyttttttttttttttttttttttgagacagagtcttactctgttacccaggctggagtgcaatggtgtggtctcagcttactgcaacctctacctcctgggttcaagcgattctcctgcgtcagcctcccgagtagctgggactacaggcatgtgccacc

SEQ ID NO: 879659 - DNA, 577 bp, Homo sapiens
tggtgctaccaccaataccaacatcaccactctctcttaaatacagaaaggccttgaggcttttcaaagaaattccatatgtatcatctcattccattttcattggctatgattagtatagggcaagtagtattttaaaacttggtagatgagaaatgagacacattatatcaatagtcgtgacttagtatgtcaaaaaatttaatgagtttcagtgatctgtgtaaagagaacacagatccatgaccgagtaattcttatatagagtttttctgttttttattttgtaaacatttttctccrtttcagcactctgtccagaggaagtgtttttaatgtgtgtagtgatttctgcatgatttcagatactgtcccatatggacagaaatatgcttcagactcagcattaacatgccaaatgcatttatttgcctgtgtaaaacagattaattcaatgttagatcataatggaattaggagaaaaagagtccttattgaaaaccagccaaaacatctcatttatagcagagaatttggtacagatttattagaaattctgcatataggcaactcattt

SEQ ID NO: 879660 - DNA, 628 bp, Homo sapiens
gttgaattttgttgaaggacttttctgcatctattgagataatcatgtggcttgtcattggttctgtttatgtaatggattacatttactgctttgcatatgttgaactggccttacatgccagagatgaagccgacttaatcatggtggataagctttttgatatgctsctggattcggtttgccagtattctgttgaggatttttgcagtgatgttcatcaggaatattggcctgaaattttcttttttgttgtgtctctgccaggctttggtatcaggatcatgctggcctcacaaaatgagttagagaggcgtccctctttttctattgtgtggaatagtttcagaaggagtggtaccagctcctctttgtacctctggtaaaattcaactgtgaatctgtttggtcctgggcttttgttggttggtaggctattaattactacctcaatttcagagcttgttattggtctattcagggattcagcttcttcctggtttagtcttgggagggtgtatgtgtccaggaatttatctatttcttctagattttctagtttatttgtgtagaggtgtttatagtattctctgatggttagttgtatgccacagcgttcctgtggcat

SEQ ID NO: 879661 - DNA, 628 bp, Homo sapiens
gttgaattttgttgaaggacttttctgcatctattgagataatcatgtggcttgtcattggttctgtttatgtaatggattacatttactgctttgcatatgttgaactggccttacatgccagagatgaagccgacttaatcatggtggataagctttttgatatgctgctggattcggtttgccagtattctgttgaggatttttgcagtgatgttcatcaggaatattggcctgaaattttcttttttgttgtgtctctgccaggctttggtatcaggatcatgctggcctcacaaaatgagttagagaggmgtccctctttttctattgtgtggaatagtttcagaaggagtggtaccagctcctctttgtacctctggtaaaattcaactgtgaatctgtttggtcctgggcttttgttggttggtaggctattaattactacctcaatttcagagcttgttattggtctattcagggattcagcttcttcctggtttagtcttgggagggtgtatgtgtccaggaatttatctatttcttctagattttctagtttatttgtgtagaggtgtttatagtattctctgatggttagttgtatgccacagcgttcctgtggcat

SEQ ID NO: 879662 - DNA, 688 bp, Homo sapiens
tctaaatattatattaggattttcatcagagttgaacatcagtcaaaagagaaagagaaatacttagagtgtgaacaactcttagatttcggcagagattttctcttattagcaagagagaaaaaaggagcctgacttatgttagcacagtttttaacaggtatataggaagaagacaataaaacaggagactcaggctgggtgcggtggctcatgcctgtaatcccagcactttgggaggctaaggcaggtggatcacaaggtcaagagatygagaccatcctggccaacatggtgaaacccagtctctactaaaaatacaaaaattagctgggcatggtggcacatgcctatagtcccagctacttgggagggtgaggcaggaaaaatgcttgaaccagggagttggaggaggttgcagtgagctgagatcgtgccactgcactccagcctggcgacagagcgagactccatcttaaacagaacaaaacaaaccaaagcaagaaacaggagactcagatatcctgtatccattgagaaaattatcattactgtgaatcttttttctctagtggcgattggacttttctgtaacttggtattctgcagtttgttttatttgcttgctcaggacttaaggtgcttctttaatatgaagaaatatatttctttaattttgtaaaaattt

SEQ ID NO: 879663 - DNA, 688 bp, Homo sapiens
tctaaatattatattaggattttcatcagagttgaacatcagtcaaaagagaaagagaaatacttagagtgtgaacaactcttagatttcggcagagattttctcttattagcaagagagaaaaaaggagcctgacttatgttagcacagtttttaacaggtatataggaagaagacaataaaacaggagactcaggctgggtgcggtggctcatgcctgtaatcccagcactttgggaggctaaggcaggtggatcacaaggtcaagagatcgagaccatcctggccaacatggtgaaacccagtctctactaaaaatacaaaaattagctgggcatggtggcacatgcctatagtcccagctacttgggaggrtgaggcaggaaaaatgcttgaaccagggagttggaggaggttgcagtgagctgagatcgtgccactgcactccagcctggcgacagagcgagactccatcttaaacagaacaaaacaaaccaaagcaagaaacaggagactcagatatcctgtatccattgagaaaattatcattactgtgaatcttttttctctagtggcgattggacttttctgtaacttggtattctgcagtttgttttatttgcttgctcaggacttaaggtgcttctttaatatgaagaaatatatttctttaattttgtaaaaattt

SEQ ID NO: 879664 - DNA, 618 bp, Homo sapiens
atagtttagagattgaaatgtaaaaaatgaaaccacacaaatatgaaaagaaaacagagatgaatttcttaattacctgaaaacgcataagtattcctaatcatgattcaaaacacagaggcaacaaggagaaatagtgataaatttagctctgtgaaattaaaacacatttacagtagcaaagtataaaacaaatgacaatctagagaagtatatttgccacatgtaacaaacacaaagagctaactaatatccttaatttacaaaggcttctaaaagtggagaaaagaccaacaacctgatagaaaaraatgggcgagaggtaacaataaaaaattattttaaaaagaaacacaaatgacacttaaacatataacaagatgctcaatcttgctcataaaaagtaaatgtaaagtaaaatttactcttctaacaaactggcaaaaatccaaatattctaccagtagctacaacatgtacaaggagaaataaacaggtacaaaaatccatagaaattttttccagttctttacatgccagatggagttgcctgctctcacttaaccagaaggacaagaaggctgtaaaacccaagatagtaaaaaagtttggctcagc

SEQ ID NO: 879665 - DNA, 583 bp, Homo sapiens
tgataaatgcaccataaatgcctgcattcaatgataaggctaatgatctagatcctgctttgtggtttgcctagtattggaaagagtagcaaaaataatgatgtaatggggtgaagcaaaaagtggtgagtgaatggaaagactttagatgggctttgaatcatatttctgggttcaaattctacattaccatctacaaggtctttggcaaattgttcaacttctctgagcctttattttctcatttaaaaatagaaataatatccacttcatcagggagatgtgaaaatcacatgcaatagtaaagtggaagtttcttgcaatagtagatgctccataaatgtttattctctttttctcttctttccaaggtccacctgactgtcaacacgatgacatttgtatcaaatagcatcaygaatctgtgaattttgtagagcacaactgatttccaaattaggaattcagggcccacatccatgtgaagcaactgattattcctatagcacttgcttattgctgctttaaagaaaacctagattctagcccttattctaaactaacctgctggacaatctttggt

SEQ ID NO: 879666 - DNA, 664 bp, Homo sapiens
ggacttcagtagaccacacaggtgcgcagaacaaaaggcaagccagtcaccatctaaacatggatgagcacctgctgtgggccaagcactacttagtgccagtgggatcacaaaagacaagacatggcctgggccctcatcccctcctctcttccccgccccgccctatgagctaacagctgtggtgggtagatattgcattaggagagttctgaaaacagcattaagtcccttggggtggaacaggctatgagtgctgcagtcactgagrtgtcaggaagccttcctggaggagatgcagttgagccaggctttgaagggtgagctggactagatgggtgaaagagaggaggccattcaaggtgtagaatctactagtcaggattctccagagaaacaggccaatgccaacaggagatgtaagtatgtcatgtatatattagcaggtaaggattgatgctgcagtcttgagtctgaaggctggaaatgcaggaagaatttctgtattgcagcctggaggcagaattccttcctctttgggaaaccagcctttgcttgtaaggccttcaactgattagacgaggcccacccatactatggagggtaatctcctttacttaaggtcaactgatagtaaatattaatcacatctgaaaatcacctt

SEQ ID NO: 879667 - DNA, 630 bp, Homo sapiens
ctataggtcttataagaaaggcaggaaaatgctttattttctctcattatttaccagttttaaaaatgagttggttcctcagtgggctccaaaggtgattaattagttttttttttttttttttcggtgttatactgacatatttgatggatttcaatctattgcagttaatgttcttaataatattcttttaaaamttgatggatcatgcttttattctataactgacttactttaatatttgaaaactgtaaatgacattttgtctatttcccaagaggggagctaacaggtctctatggattcacttggaagtggctcacaagtctttctttaaactttaaaacatctctaaacttttacattctttactattaaggcaaaaaggcagttcaagttcaatcagaatttcatgttcaattgcttcacatagtcacaatattaaaagctctgaatgtgtgacttaggtccagcggttagaaaggtattttcagcctggcgagatgtgctttgctgctgggctgcagctcatttgtgctgtcaccatgggattggctactgtagcgctcagaggacagctctggttccacagactcctgtccgcccacggactcctgtccgcccacgggc

SEQ ID NO: 879668 - DNA, 630 bp, Homo sapiens
ctataggtcttataagaaaggcaggaaaatgctttattttctctcattatttaccagttttaaaaatgagttggttcctcagtgggctccaaaggtgattaattagttttttttttttttttttcggtgttatactgacatatttgatggatttcaatctattgcagttaatgttcttaataatattcttttaaaaattgatggatcatgcttttattctataactgacttactttaatatttsaaaactgtaaatgacattttgtctatttcccaagaggggagctaacaggtctctatggattcacttggaagtggctcacaagtctttctttaaactttaaaacatctctaaacttttacattctttactattaaggcaaaaaggcagttcaagttcaatcagaatttcatgttcaattgcttcacatagtcacaatattaaaagctctgaatgtgtgacttaggtccagcggttagaaaggtattttcagcctggcgagatgtgctttgctgctgggctgcagctcatttgtgctgtcaccatgggattggctactgtagcgctcagaggacagctctggttccacagactcctgtccgcccacggactcctgtccgcccacgggc

SEQ ID NO: 879669 - DNA, 631 bp, Homo sapiens
gttcctagtctctgggttccttcaccaacggcagactggcttctcagtgactccagtatcagtgtgactagttacttatattaaattccctttttttggctgggcatggtggctcatgcctgtaatcccagcacttcgagaggctaggtgggaggatcacttgaggtcaggagttcaagaccaacttggccaacatggtgaaacccctatctctactaaaaatacaaaaattagccaggcatgggggtgcatgcctgtaatctcaactactcaggaggcagaggcaggagactcgcttgaacccaggragtggaggttgcagtgagccgagatggcaacactgcactccagcctgggctacagagtgagactccgtctcaaaaaaaaaaagaagaaaaaaagaaaaaaaagaaaagaaaaatttctcttttgagctagctgctgtggcctttgtttttctgactggactctgactagtagcaaggacatgttaaaatcgtcgatccatggaaagaagtaatgaacagtagcctacaagcagagccaagtactactagtcaagttgaagaggctgaactcagaatttaagaggtaaagggcagaaaaaggctaatatagtttgagtccatgt

SEQ ID NO: 879670 - DNA, 595 bp, Homo sapiens
ttaaaataaccagctagcatcatgatgacaggattaaattcacacatatcaatattaaccttaaatgtaaatgggctaaatgccccaattaaaatacacagactagcaaattggataaagagtaaagacccatcagtgtgctgtagtcaggagacacatytcacatgcaaagacacacataggctcaaaataaagggatggaggaatatttaccaagtaaatgaaaagcaaaaaaaaaaaaaaaaaaaaaaaagaaagaaaaaagagtgggggttgcaatcctagtctctgataaaacagaatttaaaccaacacagattttttaaaaaaataaaaagacaaagaaaggcattacataatagtaaagtgatcaatacaacaagaagagctaactatcctaaatgtatatgcacccaacacaggagcacccagattaataaaacaagttcttagagacctacaaagagacttagactcctacacaataatagtgtgagactttaacaccccactgtcaatattagatcaacaagacagaatattgacaaggatattctggacttgaactcagctctggaccaggtggacctaatag

SEQ ID NO: 879671 - DNA, 523 bp, Homo sapiens
aaaaccggtaccaggtactgcagaaacaaaccaaaatgtaaagaccattgacactatgaagaaactgcatcaactaatggggaaaataagcagctagcatcataatgacagaatcaaattcacacataacaatattaaccttaaatgtaaatgggctaaatgccccaatcaaaaggcacagactggcaaattggataaagagccaagacccatcagtgtgctgtattcaggagccccatctcataygcaaagacactcaaaggctcaaaatagagggatggaggaagatttaccaagcaaataaaaagcaaaaaaaaaaaaaaaagcaggagttgcaatcctagtctctgataaaacagactttaaaccaacaaagataaaaaaagacaaagaaaggcattacatcatggtaaaaggatcaatgcaacaagaagagccaactatcctaaatatatatccacccaatacaggagcacccagtttcataaagcaagttcttagaaatcaagttctacaaagagac

SEQ ID NO: 879672 - DNA, 522 bp, Homo sapiens
gatggtctctatctcctgacctcgtgatccacccgcctcggcctcgcaaagtgctgggattacaggtgtgagccaccgcgcctggcctttcaaaatattttaatcaaatgttcatgtattagacttatcaaaaatatggaattggttggtcctacaaaagataacagaaagtatattttcagagaatcaactataagttattattattagcaagaaaggtaattaaggtgaccagacacaagatcaacatatagaaataattacatggcagttaaatatacttagaaaatttagtgaagataggatacctytatcaatagagagcagttgtatgccataaagtaccctggcataaaatgtccatgcaatgaataagaactatatggagaaaattttaaaactttatgaagaaacataagagaatattttattaattgaagaagtatacctagtttctaaataaaatgacccagtatcttaaaagtataaatcccttccccaaataaatctatacacttaatg

SEQ ID NO: 879673 - DNA, 666 bp, Homo sapiens
tcatttctgaattaccttcctagtatgatatggtatcattaagaaattcctgatagtgcttcactagcatttttcttgaatcattctagttgttagcttaaaagagaccaacgtctacttaagaagtaactatttaggaaaaaaaggagtgagamtggctgtctaaatatcgaccctctgctattcctacacatttgtgaaacttaaacattcttataaaattcagctgttttttctgctatgtctttgagaagtcattgtataggcaataaccggatgaaaatatagttatatgaatttttttaaaaaaacgagttatgtttacagaggaggtctaaatggggtccaaagtaatgaatttcataattgtcattccacatttagaaaatagtagttgagctcattttaaatatttgttgagagcctaacccattttgctaaagttcagaatgaaagcttggagtcccagcctcccttctggtaattacttctgtgtgaccttggacaagtttcttaactaccctgtacctcagtcttatcctttgtaaaagtggaggtaataatattactctttaaatggagctgtttggaggattaaatcaattaatttctgtcaagctttttcatggcatgtcctgtgtacttaacatgtactagctattataa

SEQ ID NO: 879674 - DNA, 594 bp, Homo sapiens
tgggtaggaagaatcaatatcgtgaaaatggccatactgcccagggtaatttatagatccaatgccatccccatcaagctaccaatgactttcttcacagaactggaaaaaactactttaaagttcatatggaaccaaaaaagagcccgcatcgccaagtcaatcctaagccaaaagaacaaagctggaggcatcacactacctgacttcaaactatactacaaggctatagtaaccaaaacagcatgttactggtaccaaaacagagatayaggtcaatggaacagaacagagccctcagaagtaacgctgtgtatctacaactatctgatctttgacaaacctgagaaaaataagcaatggagaaaggattccctgtttaataaatggtgctgggaaaactggctagccatatgtagaaagctgaaactggatcccttccttacaccttatacaaaaatcaattcaagatggattaaagacttaaacgttagacctaaaaccataaaaaccctagaagaaaacctaggcattaccattcagcacataggcatgggcaaggacttcatgtctaaaacaccaaaagcaatggca

SEQ ID NO: 879675 - DNA, 702 bp, Homo sapiens
aaaaacacttctgcaacccgctcttcagcacttgaggtcctgaacatggacacttttcctgcagtacatccacacccattctcaggtagttttgttgttattctcttgcgttttccatttaaacacactgaaagatatttaactgtggtgaggaaaaattccaacacaatgttgctaccaaaataaatgccaatgtcaaatgaattattttatatttcaagttgacctattttcagaaagtctgaggagagtaagaatgatttcttgaacacttacatttttttctagcaaatatgttgatctcaacacagcccttttttgttttcatgactgttttcagtggtgttaatatgtaattttatgtaacactatattgggcaatgtagagaaaggaagaaacaaaacagggagaaaaaacaaaagaccctagcatttaagaggaggcagagcaggcacatgtgatgagaatatattatcttccactttgtagtaggaacaccgttgcccctgaactgtgtggcacttcctcctaaggggaraaatgacagttcgatgaggaccctgttagagtaagcactcagaggaaacctcatgcaatactgaaagaagtcaagtgtggaagaaaggagagaaagacattgctttatctagtatttttgtcacctagcaatataagcaaggcctagatgtttggccagttta

SEQ ID NO: 879676 - DNA, 557 bp, Homo sapiens
attacataatggtaaaggtattgatgcatcaagaagagctaactatcctaaatatatatgcacccaatacaggagcacccacattcaaaaagcaagttcttagaaacctgcaaagagacttagactcccacacagtaatagtgggagactttaacactccactgtcaatattagacagatcaatgagatagaaaattaacaaggatattcagtgcttgaactcagctctggaccaagcagacctaaaagacgtctagagaactctccaccctaaatcaacagaatacacattcttctcaggacatcatcacacttagtctaaaattgaccacataattggaagtaaagcacttctcagcaaatgccaaagaatggaaatcatracaaacagtctctcagaccacagtgcaatcaaattggaactcaggatcaagaaactcacttaaaaccccacaactacatggaaagtgagcaacctgctcctgaatgactacttggtaaataacgaaatgcaggcagaaataaagatgttctttgaaaccagtgagaacaaagat

SEQ ID NO: 879677 - DNA, 641 bp, Homo sapiens
tcttaatacaaattcccatcaattgaaaagtaaccagaattgtatatcccattaagaaagaaaaaaaaagctgttgtcagttgtaattttaatttgcatcctgagctgagcatcaataaaatgttataatataaatataacacttgttaaaatacagccactcaatagattttgtctctgatgatgtttgcaatttatattacagggaaaaaaagaaagcaagaacctaacaaataagtgtataattttaccttcctgtcctattcttatcctaggtttatgcatatttccatagctgttatgataataatagtgtcagtttaaaaattatatttaatatatcataagaattttcctcattctgcagtcttcagaactgttttttaattacatatatattraatttatttaaaagtacattttttcatgtatctttgtgttccaaattttagctattatcaattatattggcatgaatatatttgctgattttgttactctgcttattatatttcccattgtaaatgttaatacagtgaaattagtggatcaaggcgtagagacacttgagagctcttaaaatatattgctccaagttgttatgaaaaacttattgtaagcctattattagtgcaaaatta

SEQ ID NO: 879678 - DNA, 722 bp, Homo sapiens
ggtatacagctttcattttcagagtggaattacatcaacggagaaatgcagatgtaggaaaatttggatcatgggcgaaatgtacaaggataactggaagaatctgattgcatagttatacatttaattcaatttggtaatctaattttggaaaaagggcatataaacacagagcattaaaagcgttaactgaacacacacttctgtcttccaacttgttttaacaaaatctctaaggtggatggggcagaaataaaaagtacctcttttgacatctaagttagaataaatgatccaatatatttgaggatttcagctatatatacagctaaaatccagctatrtatacagctaaaatatggttcatttatatatatataaatatgtgtaccagaaactaaaaggaaaatattatgagcagttcctttcttggacaaaaaatactgtcttttatctaaccaattcacacttcacttaccctgaagtatcactaacttaaactcgtgatagacatggtcaggagagcagttggctaaatgtgatgctccatttgttcactgctgccccctgtctattattccagtcatttacccaagtcttatcttgcttgacatttaaatagtctgttctagtggctgctacttaatctctcataccctaggctgaagaacttgattcagcctttcattcaccatatggttaaagctccttataatgaacaa

SEQ ID NO: 879679 - DNA, 619 bp, Homo sapiens
ttagttaaatgtgtgcattaaaatacttttgttaagaagacaaaagaattatctatacaaagtgtattttgttatatgactcaggacccagaggtatccaatgagtaaattggagataaagataaacatagcataagaggagaaacatamtgtaaacagaaagtaaatacatcttcctctcatctagtggatgagagaagaatgccagaaaggaagcacagcctctgcaggagctacagactgacatctcataacagattctccttagaaaaattaaaatggttggtgtggtaagaaagtcaccaggtttaaagtcattaaaattctgggtctgagcaggtgtattaaactctagagtctcattgtattcatttgtacaattttgcatttaatatccacctcagggcattattggaaaaaataaaagagataatttatatttggaaaaacattacaggcctcaaatgcattgttttagatttttgtgaattgttagtttaaatcataagcttaaagtacttaaagtgaaattttccatgaataattgattgatccaatattttttgagattgcaaaactctggaatgctattaaagaaaattggaagttgtttgcatgt

SEQ ID NO: 879680 - DNA, 620 bp, Homo sapiens
tgtgtgtttgtctgttattggtatgtaggaatgcttgtgtttttgcacatcattttgtatcctgagactttgctgaagttgcttatcagcttaaggagattttgggctgagaggatggggttttctaaataaacaatcatgtcatctgcaaacatgggcaatttgacttcttctcttcctatttgaatacgctttatttctttctcttgcctgactgccctggccaaaacttccaatactatgttgaataggagtggtgagagagggcatccctgtcttgtgccagttttcaaatagagtgcttccagtttttgcccattcagtatgataatggctgtaagtttgtcataaatagctcttattattttgaaatacrttcaattgatacctagtttattgggagtttttagcatgaaggggtgttgaattttgtcaaaggccttttctgcatccattgagataatcatatgttttttgttattggctctctttatgtgatggattatgtttattgatttgtatatgttgaactagacttgcatcccaggtatgaagctgaattgatcatggtggataagctttttgatgtgctgctgagttcaatatttgccaatattttg

SEQ ID NO: 879681 - DNA, 589 bp, Homo sapiens
gattaacacaaactgcatggcttaacaagagaaatttattctttcacatttctggaggctggaaatttgaaatcaagatgtcagcaagtttggttctttctggaggttttgacgacaaatttgttcatatttctttcctagctcctggtgttcctgagcaatctctggcactccttagctggcagtgacatcattccaagttttctctctcttataacatgacattctccctggtcatctctgtatccatgtgtcttcacatagccttcttataaggacaccagtcattggtcaccctaatctagtataamctcatcttagcttgatcatatctacaaatatattatttgcaaataatgtcacattcacaggtaccagaggttagagcttctaacatctctttttggaaagccaattcaactgaaaacatatacatacaacaaaatctacaaattataaaaatgctatgtttgaactctggcaaagaaaaaccttgatataagtgccatcctatttatgttatggaatactttaatcacccccaacactcctgacactttgcaatcagtgtgccacctccaaccaccgt

SEQ ID NO: 879682 - DNA, 589 bp, Homo sapiens
gattaacacaaactgcatggcttaacaagagaaatttattctttcacatttctggaggctggaaatttgaaatcaagatgtcagcaagtttggttctttctggaggttttgacgacaaatttgttcatatttctttcctagctcctggtgttcctgagcaatctctggcactccttagctggcagtgacatcattccaagttttctctctcttataacatgacattctccctggtcatctctgtatccatgtgtcttcacatagccttcttataaggacaccagtcattggtcaccctaatctagtataaactcatcttagcttgatcatatctacaaatatattatttgyaaataatgtcacattcacaggtaccagaggttagagcttctaacatctctttttggaaagccaattcaactgaaaacatatacatacaacaaaatctacaaattataaaaatgctatgtttgaactctggcaaagaaaaaccttgatataagtgccatcctatttatgttatggaatactttaatcacccccaacactcctgacactttgcaatcagtgtgccacctccaaccaccgt

SEQ ID NO: 879683 - DNA, 622 bp, Homo sapiens
gcataaaacacatactggagtttgaagacggtagaaaaaaaaaagaatgtaaattatttcataatcatttaaaaattgataacatattgatcatattttgggtataccagttaaataaaatatattattaaaagtcatgtcacctgttcctttttacttcaaatgtggctaatagaaggtataaagttayacatgtggcttgcattagtttctactggacagagctggtctggatggaagattatttttttctttggtttgttttctcattccatttccccgccaccctccgttggtttggaagttaagctttctctgcttctgattttagtatagtagttgtagttctcaaagtgtggtccctggactagtagcatcagcagcatctgggaatttggtagaaatgaaaattctagaactgtaccccagatctcctggaacagaaactctgggggtggagcccagtggtctgcttcataacccaccagataattctgaggtattctcaagttctagaaccacggccttaatgattacccttgaaaagtcactatacctatttaccttaataaaacctagggttgttcaatatcctaatgccatcctaaatagtaagaattat

SEQ ID NO: 879684 - DNA, 565 bp, Homo sapiens
taccatcccccctagtcagaatgaatatcattaaaaagcacaaaatgacaggtgttggcaagattagggagaaaagaggatgctcatacactgttcgtgggaatgtaaattagttcagccactgtagaaagcagtttgaagatttttcaaataacctaaaayagaattaccattttacccatcaatcgcattactgggtatatacccaaaggactgtaagttgttctaccagaaagacacatgcacacctacgtttatcaacagcatcacagtactattcataatagcaaaaacatggaatcaatctatatgcccaacaatggtggcctggataaagaaaatatggtacacatataaatgatggaatactatgcagcaatgaaaaaaaaacaaaatcatgtctcttgagcaacacagatgcagctggaattcattaccctaggcaaattaccaccagaaaggaaaaccaaataccacatattctcagttgtaagtgggaactaaacattgagtacctatggacaaagagaaaggaataataggcaatgggaaatatgtgaaagtg

SEQ ID NO: 879685 - DNA, 565 bp, Homo sapiens
taccatcccccctagtcagaatgaatatcattaaaaagcacaaaatgacaggtgttggcaagattagggagaaaagaggatgctcatacactgttcgtgggaatgtaaattagttcagccactgtagaaagcagtttgaagatttttcaaataacctaaaatagaattaccattttacccatcaatcscattactgggtatatacccaaaggactgtaagttgttctaccagaaagacacatgcacacctacgtttatcaacagcatcacagtactattcataatagcaaaaacatggaatcaatctatatgcccaacaatggtggcctggataaagaaaatatggtacacatataaatgatggaatactatgcagcaatgaaaaaaaaacaaaatcatgtctcttgagcaacacagatgcagctggaattcattaccctaggcaaattaccaccagaaaggaaaaccaaataccacatattctcagttgtaagtgggaactaaacattgagtacctatggacaaagagaaaggaataataggcaatgggaaatatgtgaaagtg

SEQ ID NO: 879686 - DNA, 658 bp, Homo sapiens
agattcataaagccagttcttagagacctccaaaatgacttagactcccacacaataatagtggaagattttaacactccactgacaatattagacagatcattgagacagaaaattaacaaagattttcaggacctgaactcagctctggatcaagtagacctaatagatatctagagaactctccaactgaaaacaacagaatatacattcttctcatggctgcacggcacttastctaaaattgatcacattattggaaataaaacactcctcatcaaatgcaaaagaactgaaatcataacaaacagtctcccagaccacaatgcaaataaattataactcaacattaagaaactcaatcaaaatcacaagactatgtggaacttgtacaacatgctcctgaatgactcctgggtaaataataaaattacggcagaaattaggaagttctctgaaactaatgagaacaatgagacaacataccagaatctctcggatgcagcttaagcagtggtaagaggaaaagttagagcactaaatgccccatatcaaaaagctacaaatatctcaagtcaatgacctaacatcacaagtaaaagaactagaggaccaagaggaaaacttcccaaagctagcagaagacaagaaataacca

SEQ ID NO: 879687 - DNA, 658 bp, Homo sapiens
agattcataaagccagttcttagagacctccaaaatgacttagactcccacacaataatagtggaagattttaacactccactgacaatattagacagatcattgagacagaaaattaacaaagattttcaggacctgaactcagctctggatcaagtagacctaatagatatctagagaactctccaactgaaaacaacagaatatacattcttctcatggctgcacggcacttactctaaaattgatcacattattggaaataaaacaytcctcatcaaatgcaaaagaactgaaatcataacaaacagtctcccagaccacaatgcaaataaattataactcaacattaagaaactcaatcaaaatcacaagactatgtggaacttgtacaacatgctcctgaatgactcctgggtaaataataaaattacggcagaaattaggaagttctctgaaactaatgagaacaatgagacaacataccagaatctctcggatgcagcttaagcagtggtaagaggaaaagttagagcactaaatgccccatatcaaaaagctacaaatatctcaagtcaatgacctaacatcacaagtaaaagaactagaggaccaagaggaaaacttcccaaagctagcagaagacaagaaataacca

SEQ ID NO: 879688 - DNA, 658 bp, Homo sapiens
agattcataaagccagttcttagagacctccaaaatgacttagactcccacacaataatagtggaagattttaacactccactgacaatattagacagatcattgagacagaaaattaacaaagattttcaggacctgaactcagctctggatcaagtagacctaatagatatctagagaactctccaactgaaaacaacagaatatacattcttctcatggctgcacggcacttactctaaaattgatcacattattggaaataaaacactcctcatcaaatgcaaaagaactgaaatcataacaaacagtctcccagaccacaatgcaaataaattataactcaacattaagaaactcaatcaaaatcacaagactatgtggaacttgtacaacatgctcctgaatgactcctgggtaaataataaaattasggcagaaattaggaagttctctgaaactaatgagaacaatgagacaacataccagaatctctcggatgcagcttaagcagtggtaagaggaaaagttagagcactaaatgccccatatcaaaaagctacaaatatctcaagtcaatgacctaacatcacaagtaaaagaactagaggaccaagaggaaaacttcccaaagctagcagaagacaagaaataacca

SEQ ID NO: 879689 - DNA, 658 bp, Homo sapiens
agattcataaagccagttcttagagacctccaaaatgacttagactcccacacaataatagtggaagattttaacactccactgacaatattagacagatcattgagacagaaaattaacaaagattttcaggacctgaactcagctctggatcaagtagacctaatagatatctagagaactctccaactgaaaacaacagaatatacattcttctcatggctgcacggcacttactctaaaattgatcacattattggaaataaaacactcctcatcaaatgcaaaagaactgaaatcataacaaacagtctcccagaccacaatgcaaataaattataactcaacattaagaaactcaatcaaaatcacaagactatgtggaacttgtacaacatgctcctgaatgactcctgggtaaataataaaattacggcagaaattaggaagttctctgaaactaatgagaacaatgagacaacataccagaatctctcrgatgcagcttaagcagtggtaagaggaaaagttagagcactaaatgccccatatcaaaaagctacaaatatctcaagtcaatgacctaacatcacaagtaaaagaactagaggaccaagaggaaaacttcccaaagctagcagaagacaagaaataacca

SEQ ID NO: 879690 - DNA, 529 bp, Homo sapiens
agaactagaggaccaagaggaaaacttcccaaagctagcagaagacaagaaataaccaagatcagagcagaactgaatgagatagagacacacaaaatccttcaaaaaactcaagggattcaggagctgtatttttttttttttttgaataaaagttaacaaaatagaccgcatctgcactaataaagaagaaaacttaaaagaattaaatagacacagtcagaaatgataagggggatatcaccamtgaccccacaaatatacaaacaaccatcagagaatactttaaaaatctttagcacataaactagaaaatctagaagaaatggatacattcctggatgcacacaccctcccaagtctgaaccagggaaacattaaatccctgaataaaccaataataagttcaaaaattgaggcagtaataaatagcctaccaccaccaccaacaacaaaaatcccaggatcagatagacttacagctgaattctaacagagatactatttcttctgaaactattccaaatga

SEQ ID NO: 879691 - DNA, 529 bp, Homo sapiens
agaactagaggaccaagaggaaaacttcccaaagctagcagaagacaagaaataaccaagatcagagcagaactgaatgagatagagacacacaaaatccttcaaaaaactcaagggattcaggagctgtatttttttttttttttgaataaaagttaacaaaatagaccgcatctgcactaataaagaagaaaacttaaaagaattaaatagacacagtcagaaatgataagggggatatcaccaatgaccccacaaatatacaaacaaccatcagagaatactttaaaaatctttagcacataaactagaaaatctagaagaaatggatacattcctggatgcacacaccctcccaagtctgaaccaggraaacattaaatccctgaataaaccaataataagttcaaaaattgaggcagtaataaatagcctaccaccaccaccaacaacaaaaatcccaggatcagatagacttacagctgaattctaacagagatactatttcttctgaaactattccaaatga

SEQ ID NO: 879692 - DNA, 529 bp, Homo sapiens
agaactagaggaccaagaggaaaacttcccaaagctagcagaagacaagaaataaccaagatcagagcagaactgaatgagatagagacacacaaaatccttcaaaaaactcaagggattcaggagctgtatttttttttttttttgaataaaagttaacaaaatagaccgcatctgcactaataaagaagaaaacttaaaagaattaaatagacacagtcagaaatgataagggggatatcaccaatgaccccacaaatatacaaacaaccatcagagaatactttaaaaatctttagcacataaactagaaaatctagaagaaatggatacattcctggatgcacacaccctcccaagtctgaaccagggaaacattaaatccctgaataaaccaataataagttcaaaaattgaggcagtaataaatagcctaccaccaccaccaacaacaaaaatcccaggatcagatagayttacagctgaattctaacagagatactatttcttctgaaactattccaaatga

SEQ ID NO: 879693 - DNA, 618 bp, Homo sapiens
tgcactaataaagaagaaaacttaaaagaattaaatagacacagtcagaaatgataagggggatatcaccaatgaccccacaaatatacaaacaaccatcagagaatactttaaaaatctttagcacataaactagaaaatctagaagaaatggatacattcctggatgcacacaccctcccaagtctgaaccagggaaacattaaatccctgaataaaccaataataagttcaaaaattgaggcagtaataaatagcctaccaccaccaccaacaacaaaaatcccaggatcagatagacttacagctgaattctaacagagatactatttcttctgaaactattccaaatgatcgtaaaggagggactccaacatcaacaacaacaacaacgacaaaacttcaggccaatatccctgatgaatatcaaagcaaaaatcctctaaaatactgacaaaccaaatccagcaacacatcwataagtttatctatcacaatcaagatgacttcatcctcagaatacaagtttggttcaatgtacaaaaatcaataaatgttattcatcacataaacagatctaaagacaaaaaacacatgattatctcaatagatgcagaa

SEQ ID NO: 879694 - DNA, 618 bp, Homo sapiens
aatcagagaggacaccaacaaatggaaaaacattccttgatcatgggtaggaagaatcaatatcataaaaatggccacactgcccaaagtaatttatagattcaatgctgttctcattgaactaccattgacatgctttacagaattagaaaaaaaaaaaactattttaaaatgtataaggaactaaaaagtcagtagagccaagacaatcctaagcaaatagaataaagctggaggtatcatgctacctgacttcaaactatactacaaagctatagtaaccaaaacagcataatacttgtacaaaaacagacaggtagtccaatggagtagaacagagacctcagaaattacaccacacatctacaaccatctgatctttgacaaaccttgtaaaaacaatcagaaaagggtttactatttaatacatagcwctgggagaactggctagttgtatgcagaaaattaaaactggaccacttcctaatactttatatgaaaactaactcaaggtggattaaagaattaaatgtaacaacaaaaactttaaaaaccctaaaagaaaatctaggtaataccattcaagtcttaggaacaagcaaagattttatgatgaaa

SEQ ID NO: 879695 - DNA, 563 bp, Homo sapiens
aagacaaactgatatggtcactaagcttccccatcttatcaagttccctggtagacctgtctttccttaacccagtggaaatgttatgagtgcatgaagggagaaacattcctgaggacaggcagagacaaaaaagagaggcaggactaccaacctcttagacatggaaactcttctccgtaactcagccaaaaattgacctcaaatcagagtagttgcttagcaacagcatgctgtaggaygtaagttctttaggtatactgggaacaagcccttaggcagtgttctcacacttccaggataatccatttggaacccccatcacttgggacaggcagagctctaatcattcacatgagctgaggtaaacctgggcttaacatgtcacctagaactaaagtgaatgcagtgacttttcggtaaagattttctaagcaaatatattccattaaaaaaagacagaaaaaaaatggaacaaataatccttcaatgcaaaggcatgcatatattcacaagaaacaacagagaacagggaaccaggacctctccaaaaggacaatgca

SEQ ID NO: 879696 - DNA, 629 bp, Homo sapiens
aatagaaatttctccaaaaaagaaaaaaaatacagtggcttataagcaaagtcaaaatgttcaacatcattagacaccaaggaaatataatcaacaatgagatactgaagggggccagcccctccacacctgtgggtgtttcttgtcaggtgggccaagagactgagaaaagaaagagacagagagacaaagtatagagaaagaaaagtgggccctgsggaccggcacttagcatacagaggacccacactggcactggtctctgagttccctcagtattttttgatcattatctctactatctcgagagggggatgtggcaggacaatagggttatagtggggagagggtcagcaggaaaacatgtgaacaaatgtctctgtgtcataaacaaggttaagaaaaggtgctgtgctttgatgtgcacatacataaacatctcggtgcattaaagagcagtattgtcaccagcatgtcttacctccagccctaaggtggttttctcctatcttagtaaatggaacatgcaatcgggttttacaatgagacattccattgcccagggattagcaggagacagatgacttcctcttatctcaactgcaaagaggccttcctcttttactaat

SEQ ID NO: 879697 - DNA, 582 bp, Homo sapiens
ttattaacagtatatctaataaaagaggggtcgattttcaaataaaataaaagaaggttgcaattacaagacgaatgagtactggattggcaaaagcaagacgttcatggtagtttctctcagtaatcaactgaaatctytcattcagacatgatctcaaattctgttattagatagatacagtagacactccaccttgcagtgaatttggctcttagagtgctacaagatggacactaaaatatggattaactgagtggtgtcattgggttcaagaacagggaagagctaggactttgacacccccattaggtggtggcaacatgtttggtaaaattgtgacatattttaccttgacttagagaccttatgcccaccaaggtggtagtattaggaaaacatcaacatattggctatatttttctgccttcagaaatgtcctataagagaaatgaacctacatcagagtgaaactaaaaataatggaaacataactgtgataaaaacaggcactttgaatgctgtacttctcatactttggaatcttgctggatgaaaaaagtatatttttgtaccacccta

SEQ ID NO: 879698 - DNA, 579 bp, Homo sapiens
ggattcgaagatagataaactggatgaaacttgggatggtcaccctcaaggagagggtaagcacattctaagtagctttggtaatgttaaatatatatttgggaagaagctttaataaggatgtgagacagcccaatggatgaaccataccattcagcattagtagcctacccaatggccatttctcctttcctccttgataacagaaatacgattatgtttaaggtggcaatatgcccagctcctgggataaattatgmtgagtctatctagataaatcatggggttcccatagccctttgccaaatactcactttcctactcaccttgcagcttcaggtagccaaaggagacctaagggtgagaatatcaggggtggaaaagttctatactctgataaagggaatatttccctttattttctatacttagaaaaatgtggaagtcattttgtgattatgaagcaagcaatcaacgcaaggataaaaaactcacatgctgcagattgcagaaaagtgagagaatctggatcagatttcttgttaagtaaatcaaccttataattgatgtcatagcgga

SEQ ID NO: 879699 - DNA, 638 bp, Homo sapiens
acaatcagagattagagacactgaatttcattttattagcagtttgcaccagtggctacgtgataaagtaggatgtaaatgaccagtgatcaccctggtttacttggtaaccatgctctgttgtgttgcttagtcattagacattatgggcaggctttccatttcataccctytccctccaattcctgctacctaggacttatgaagatgcccagaaacagtgacatttatgacttccatgtgaactcacctttctgggtccctctctttcgagagaaaatacggtggcttcctatatgtactgattgtcacagcagtcccgcttctatgaagtcccttccattataatctttcccaaatccctccaagcctcaaccatatatttctgtctactggtctccagatatctctctacttgataacttaattcctacccacctttccaacttcattcttacaccattctcccgcttgttcacttcattatagccaaatgatctctcagagcttctcatgctaccagtcctgtgtcatagcctctcacttgcaatttccttgacctgaaagtttttcctttcactctataatatctagcacctttttgccctgggattcagctggaatgtctctttcccaga

SEQ ID NO: 879700 - DNA, 688 bp, Homo sapiens
agcataaattttaaagtcttatataaagctttacacaaaaataccaccaaagagaggctgaagagttaaatgcaagagagaggggcaacatccaatctatacactatagccagggtataaacaaatataagcatgttattttcatgattaaaatatttatttatttatttatttatttatttatttatttattatttatttatgtatttttttgagagtttactctgttgcctaggctggaatgcagtgtcacaatcttggctcgctgcaccctccatctcccgggttcaagcaattttcctgcctcagcctcctgagtagctaggattacaggtgtgagccaccacacccagctaatttttgtatttttagtagagacaggttttcactatgttggccagcctgatctcaaactcctaacctcaaatgatctgcctgcctcggcctcccaaagtrctgggattgcaggtatgagccaccatgtctgacatgattaaaatatttaaatggctgtgcattgtcatatgcctcatgcccaaaatatttaacatgatcctgaggcctttcatgatagcctcaacagaccacacttacattttcctttgtccttactcctcttctctgtctgacttccaacaagccaggtcttctctcatatcctagaatatgccatgataccttctacccc

SEQ ID NO: 879701 - DNA, 631 bp, Homo sapiens
cagagtggtttcttagatatcttccttctagtttttatcctgggatatttgctttatcgccattggcctcaatgtacttccaaatgtccctttccaaaatggacaaaaacagtgtcaccaaactgctgaatccaaagaaaggcttacctctgtgaaatgaatgagcacatcacaaatcagtttctcagaaagcttctttctagtttttatcagaagttatttcctttttcaccattggcctcaatgcactgccaaacatttttcacagattctacaaaaacagagtttccaaagtgctgaatgaaaagaaaggtttaactctgtgagatgaatgcccacatcaaaaagcagcttctcagagcacttccttctagtttttgtcctgggatattscctttctcccccaatggcttcagtaagctccaaaatgtctaatttgcagaataggcaaaaacagtgttaccaaactgctgaatccaaagaaaagttttactctgtgagatgaatgaacacagcaccaagcagtttctcattaagcttctttctagtttttatctgaagatattttctttttcatgatatgcctcaaagtgctgctaaatgtcccttcacagattctaaaaaaacagtg

SEQ ID NO: 879702 - DNA, 739 bp, Homo sapiens
taaaactatctgcgcagaatggttcccctgttatctgtatttttaaggttctagtttattaacatgacatacagcttctctgctctttggacccttcagcaccatttcttgctactccctgttgtgctctttatgttcctaggaaaggaarctgcttattgtcctgtgtatcttctcccccacacatatttcctgcctgtgtgccttgcttatgctgtccctacttcccaaactatcccatcctcagtcacatccatttcagtcctttttctggagttcactgtgtaagactcaggtgtcagccacttcatttaaaaaaacttttaacatacgtattcacatactatacactttcctcctctactcccactttggggtcaaggatctctcttctttactttttataggaccctgatttttatctctcctttccctgtagtactgttatggtactgtctgtgtactactgtttaggtgtgttttgcacaatggactgtgagaatttggggggcaagaacttgtgggggccaagggtccagcccttgttattggtccaacctttggctctctgaaagtttgctgaaaaatgaacatgcacaaggcagattaataggagaaaaggcatacaaatttatttaacatgtatccgcgggaacctgtatgatgaccccaaaatacaggggaaattgcccattcttatacttaggttcaataaagtatagacagctgtgtagaaatg

SEQ ID NO: 879703 - DNA, 686 bp, Homo sapiens
ggagcatttctatcagttatgctctttcttaaaaaaaaacatgaaaataaacgcatcatttatgtaactcttataagaaatgcataaatcatgggaaacagtgagcaagatataattgaaattcagcagctcagtgagttacgaaccttctctctacaactcaattgtgttagttactgcttaacttaacgctgggttttcctttttgctttcaggaaaacctttaacttacgccctgggtgttgcctgtcaacagtttcctggtggctcaccgcttctgcctgctccagccttgctccggcagcttcaaggcttctgggcttcagagcttgttgtgaaagcttgctgctttggcctgctacccctgcttcaggtgtcaaaagcttttaattagcttgcttcctctaattactataactaggcccttacgtgtctgcataatccagttctagggtctgaaaggagaattacctttagccattcattcttctttaaaagatcttttactttggccctcctggcattcaygggagagtaagaagttatattgcatgattcacctttgatggcccccgtcttcagtctgtaggggcaaactggtgtgggcatactgtattttatagccagtgtttgttctgattggttgatgcccatgctgtcccaattttaaagtattttgactattg

SEQ ID NO: 879704 - DNA, 586 bp, Homo sapiens
tgacttttacttggagacagatgggaaaccattggaagctgtggagcagaggagtgtcatgatctgagctacatttcaagaggatcaactgtggctttagtgttgaggatgggttgtgggatgagagggcagaagtagtagagaggtcaggtaggacaatccaggcaagattttcttttttttcttttcttttttttttttgagacagagtctcactcacttcagcccgggctgaagtgcagtggcgtgatcttggctcaccacacctcygtctcccgggttcaagcaattctcctgcctcagcctccctagtagctgggactacaggcgcccgccaccacacccagccaatttttgtatttttagtagagatggggtttcattatgttggccagactggtctcgaactcctgacctcaggtgatccacccacctcggcttcccaaagtgctgggattacagacatgagccatgtaatagtagcttggaatgggttggaacagaggagatatggtgaatgaattcttgctatatgcaggaagactagatttatagaactccgtggcaactgtttctgtattctaca

SEQ ID NO: 879705 - DNA, 634 bp, Homo sapiens
cagtaagggatcaatatccagaatatatagagaactcctaaaactcagcagcaattgttttctttttatttatttatttattttttattttgagacggagtctcgctctgtcgcccaggctggagtgcagtgacgtgatcttggctcactgcaagctctgcctcccgggttcacgccattctcctgcctcagcctcttgagtagctgggactacaggtgcccaccaccacaccyggctaattttttgtatttttagtagagacggggtttcaccgtgttagccaggatggtcttgatctcctgacctcgtgatctgcctgcctcggcctcccaaaacactgggattacaggcgtgagccaccgcgcccggccagcaattgttttcttaaaaaaacaaactgattaaaaaatgggaaaaggcttgaatagtcctttctccaaagatgatatgaaaatggcaaaaaagcacatgaaaagatgtttaacatcactaatcattagggagatgcaaatcaaaaccacaatgagatattactcacactcattatgatggctactattaaaaaaaaacaaaacagaaaacaaaaagaattggccagcatatggagaaattggaacccttacgcattgctgg

SEQ ID NO: 879706 - DNA, 592 bp, Homo sapiens
ttgttttgagacggagtctcgctctgtctcccaggctgggatgcagtggcaccatctcggatcactgcaagctccgcctcccgggttcacgccattctcctgcctcagcctcctgagtagctgggactacaggcacctgccaccacgcccggctaattttttgtatttttagtagagacggggtttcactgtgttagccaggatggtctcaatctcttgacctcgtgatccgyccctctcggccttccaaagtgctgggattacaggcgtgaaccaccgcgcccggccccctgcttcatgtttgagaggaaaatctaatttgtttatactaatatttagagcacgcttccggattcagtatggctactggatgctaaggaaatgtttctttagcagtttgagattctgtggttgagacacatacaagaaataaattaagtacaaaaacatccgttgaatttttaggaactctcaaggttttaaagagatgcaagcagatgacagtgaatgctgtgttactctgcctgggtctaccctcagggcaagggcgtgcgtttccccagctgccaggaatgtttgccactaacagctc

SEQ ID NO: 879707 - DNA, 623 bp, Homo sapiens
aactaaaagaatgaaattaaaatgttcctaacacaaataaatgataaatgtttgaagtgacggatctctgaattaccctgatttgatcatcacacattgtatgcttctatcaaaatactacatgtaccccataaatatgtacaactattatgtatccataataactaaaamtaaaaaaatgtaaatgcatctcttaatatgtatgtgtttaaaattagaaacttgctacattttaaataaaagagaaacaaatgacttctatgaactattcaatcatttcaagtatacaagtttagtaatctttacacaactttacattaattacacttatttttactaatagtagcattacatgttcaaaatttgaatgttatttagttttctgacattacaatggcacaactttaaaatctgtattactttttcctttatattttaggagtcttcctaggccaaagtataaaatctgtagctctagcaaaaactaaataaaaatgaaaaaaacaaggtatctgtcaccctacacctcctaatcaatatggcttatttttttgctaatttttttttttttttgagacagaatttcactcttgttgcccaggctagagtgcaatggcacgatc

SEQ ID NO: 879708 - DNA, 623 bp, Homo sapiens
aactaaaagaatgaaattaaaatgttcctaacacaaataaatgataaatgtttgaagtgacggatctctgaattaccctgatttgatcatcacacattgtatgcttctatcaaaatactacatgtaccccataaatatgtacaactattatgtatccataataactaaaactaaaaaaatgtaaatgcatctcttaatatgtatgtrtttaaaattagaaacttgctacattttaaataaaagagaaacaaatgacttctatgaactattcaatcatttcaagtatacaagtttagtaatctttacacaactttacattaattacacttatttttactaatagtagcattacatgttcaaaatttgaatgttatttagttttctgacattacaatggcacaactttaaaatctgtattactttttcctttatattttaggagtcttcctaggccaaagtataaaatctgtagctctagcaaaaactaaataaaaatgaaaaaaacaaggtatctgtcaccctacacctcctaatcaatatggcttatttttttgctaatttttttttttttttgagacagaatttcactcttgttgcccaggctagagtgcaatggcacgatc

SEQ ID NO: 879709 - DNA, 601 bp, Homo sapiens
atctttacacctttttaaaaaattacccttaagtcagctttcatattcttctcatattgtggttattttgtcacctattacatataaactccttgaagacaggacaaaggtcttaacctctgattttccttagcttgattcggtgtgaggcatatggtaagtgctcaaccaatattttaaagaaatgaatagaatctcttctttaattcagctatgtttcattattcaagatagctagcattttttccccttaaaacatctctttggccaggcacggtggctcatgcctgtaatctcagcactttgggaggccgaggcgggcarattgtctgtgttcaggagttcaagaccagcctggccaaaatagtgaaaccctgtctctgctaaaaatacaaaagattagctgggcgtggtggcatgcacctgtaatcccagctactcaggagtccgaggcaggagaatcacttgaacctgggaggtggaggttgcagtgagctgagatcatgccattgcactctagcttgggcaacaagagtgaaattccatctcaaaaaacaaaacaaaacaaatctctttatgttcatttcttttccattttgat

SEQ ID NO: 879710 - DNA, 650 bp, Homo sapiens
gttttcaaaacctttgtttcaattcaatcagacagttattcagaactgaatatcaatcaggctcaaaactgatttaacaagcaattttgaggtaaaactaaaaaaatcaaccatatttgttcaaaagccaaaagtagtatttggcatacttgccttatgaaatgaggacaaaacataacaattctgtaaatatcttcagaattaggaggacagacaaggaaagatgactgaagagaagcctccagtaatcatcctcccctcaaaaacaccaaattgaacaactattcacacaaaaatcaccttaataagaaccaaaatcaggtgagtgattacagcaccgggtttgaacatcatattaaggaaagaggcactgaagagggtaggaaagtcttgaattgccaataccacccctctcctattccctggtagtggcctcatgacacagagagagaatctrtgcattcagaggagggagagtgcagagcttgtcggaatttgcactggaactcagtgctgccctgtcatggcagaaagcaatactgagcagaattcagccagctgaaaacaacatttagaccagccctgggcagagaggaatcatccatcccagtggttagaacctgagttctggcaagccctgccaccatggg

SEQ ID NO: 879711 - DNA, 585 bp, Homo sapiens
ccatctcccttcttccacataactccaataagactcatgaaccacttcctcacctatctgcctctgtaacggtgcaggccctctttctcttccttgaactgtttttcattaatgacccctctccatattcaagaacctgaataaaataatctccttgattgtctggtgcattttgtctttcacaaagcaagacacattttttttgaaaagttatcaggttatcagttaaacgtacatagatttattgctcagtgttactcccatccaggaaataataattacacctgagtcytaaaaggggaaggagaaaggaggaagagtaattcaggattattaaaatcttcatcttttctgaaagaagtttcttctgagtctaactcaagagacagagcagtgtcccaaagccaggtggattgcttagtttggatcatgattcacccccaatttgtactagcatagatggatgtgagtaagtaatatgggatgaaagatgattctcagcaaggatgattgtacattccaatttgaatgccctttctcctaacttagaggatagagtgtgtgtccgtttcagctacagagtta

SEQ ID NO: 879712 - DNA, 582 bp, Homo sapiens; identical to SEQ ID NO: 871573

SEQ ID NO: 879713 - DNA, 665 bp, Homo sapiens
actttaaactaacaaaaataaaaaaagacaaaaaagggcattgcatattggtaaagggttcaattcaacaagaagagctaactattctaaatatacatgcactcaacacaggagcacccagattcataaagcaagtttttagagactttaaaacagacttaggctcccacacaaaatagtgggagacatttacatcccactgacaatattagacagatcattgagacagaaaattaamaaagatattaaagacctgaactcagctctggatcaaatggacctgatagatatctacagaactctctacccagaaacaacagaatatacattcttctcattgctacatggcacttactctaaaattgaacatatagtcagaagtaaaacactccttagcaaatgcaaaagaactgaaataataacaatctctcagcagcacaatcaaattagaactcaagactaagaaattcactcaaaaccatacaattacatggaaaacaaataacctgctcctgaatgacttttgggtaaataatgaaattaaggcagaaatcaagaagttctttgaaactaatgagaacaaagatacaatgtaccacaatcttcttgacacagctaagtcagtgttaagagggaaatttatagcactaaatactcatatcaaa

SEQ ID NO: 879714 - DNA, 655 bp, Homo sapiens
  misc_feature 621, 622, 623, 624, 625, 626, 627, 628, 629, 630, 631, 632,633, 634, 635, 636, 637, 638, 639, 640, 641, 642, 643, 644,645, 646, 647, 648, 649, 650, 651, 652, 653, 654, 655: n = A,T,C or G
acctcaagcagagaactcaccaagctcatcttaacttacgacctacagaactgtaataaaattaatttgtcttattttaagatgttaactttgtgttaatttgttatggcagcaataggaaaataataaaattccaaaaagcagaagttataaacaacaatgtgtgatcacaaagtgcaataagattaggttggtgcaaaaataattgtggtttttgtcattgaaaataatggcaaatcctcagttacttttgcaccaacctattattaataaaaacaaaaaaaatttggggtcaaaaggcaaatacatcccaaactacagaatttctaaaacaaagttaaaataaaaatttgacatatctgaatccttaaagcactaaaaagaaaatytaaagcctccaatagttatgtcaataaaaccaagagtaaaacatttaactcataaaagtaaaaaagaatatcaaaataaaccaaacacatgcaacaatttataataaatcttgttctctgaaaaaattacaatggaaattaatcattagtttttttaatcaagtaaaaatgaaaaaaaaaaaacataaatacacaaagaaatgaaagggggaaataaccatcgaaaaaaatnnnnnnnnnnnnnnnnnnnnnnnnnnnnnnnnnnn

SEQ ID NO: 879715 - DNA, 670 bp, Homo sapiens
accctctgtcttgccaacttgcataaaatcaatgaatatgggtagatatgctagggaagagtgggggggtgggaaaaggcaactcaatctgtcaggctcagctttctatactgagataagtaactgcctgctaatttatgatcatgatgagtgatttttaagtggcaggaataaaatgctccccaacagcttcccattctattaacttcatttttaacttattatttagtcaaccttacttttactaatgactgtcagaactagaaaaacactgttaagaaaagtggggccggacaccgtggctcacgcctataatcccagcattttgggagggtgaggcaggcagatcacttaagtccaggagtttgaggccagtctgggaaacatggcaaaaccctgtatctacaaagaatataaaaaattcagccaggctggtggtgcatgcctatagtcccagctattcgggaggctgagctaggaggatggcttgagcccaggaggcagaggttgcagtgagccaagactgtgccaccrcattccagcctgggtgacagagtgagatcctgtctcaaaaaaaagaaaaaaaagtgagaaacattaaagttatctaatactcttttttaaaaaacaaaaaaaaattactttattgaaaacactttaaaaataatga

SEQ ID NO: 879716 - DNA, 689 bp, Homo sapiens
gctgagatgtttggatggagagaaacataaatctggcctacatgcacatccagtcatagtaccttcccttgaacttaattatgacatagattctattgctcacgtgtttgttgctgaccttctccttattatcaccytgccctcctactacattcctttttgctgaaataatgaaaataataatcaataaaaactgagggaaatcagagactgctgccggtgcaggtccttgggtatttgcatgcattaggtatttgtcctaatgctctcccttcccttgacccctaccccctgaaggaccccagtatgtgatgttcccctccctgtgtccatgtgttttcattgttcaactcccacttatgagtgagaacatgtggtgtttggttttctgttcctatgttagtgtgctgagaatgatggtttccagcttcatccatgtccctgcaaaggacatgaactcatcctttttttatggctgaatagtattccatggtgtatatgtgccacattttctttatccagtctctcactgatgggcatttgggttggttccaagtctttgctattgtaaatagtgttgcaataaacacacatgtgcatgtgtctttatagcagaatgatttataaatctttgggtatatacccagtaatggaattactgagtcaaatgacatttctggttctagatc

SEQ ID NO: 879717 - DNA, 689 bp, Homo sapiens
gctgagatgtttggatggagagaaacataaatctggcctacatgcacatccagtcatagtaccttcccttgaacttaattatgacatagattctattgctcacgtgtttgttgctgaccttctccttattatcaccttgcyctcctactacattcctttttgctgaaataatgaaaataataatcaataaaaactgagggaaatcagagactgctgccggtgcaggtccttgggtatttgcatgcattaggtatttgtcctaatgctctcccttcccttgacccctaccccctgaaggaccccagtatgtgatgttcccctccctgtgtccatgtgttttcattgttcaactcccacttatgagtgagaacatgtggtgtttggttttctgttcctatgttagtgtgctgagaatgatggtttccagcttcatccatgtccctgcaaaggacatgaactcatcctttttttatggctgaatagtattccatggtgtatatgtgccacattttctttatccagtctctcactgatgggcatttgggttggttccaagtctttgctattgtaaatagtgttgcaataaacacacatgtgcatgtgtctttatagcagaatgatttataaatctttgggtatatacccagtaatggaattactgagtcaaatgacatttctggttctagatc

SEQ ID NO: 879718 - DNA, 649 bp, Homo sapiens
ggctacagtaaccaaaacagcatggtattggtacgaaaacagagatatagaccaatggaacagaacagagacctcagaaataacaccacacatctacaaccatctgatctttgacaaacctgagaaaaacaagcaatgaggaaaggattccctatttaataaatggtgttgggaaaactggctagccatatgcagaaaactgaaactggaccccttccttacactgcatacaagaattaactcaagatgaattaaaggcttaatgtaagacctaaaaccataaaaaccctagaagaaaacctaggcaataccattcaggacatagacatgggcaaaggccccatgtytaacacaccaacagcaaaggcaacaaaagccaaaattgacaaatgggatctaattaaactaaagagcttctgtacagcaaaagaaactatcatcagagtaaacaggcaacctatagaaagggagaaaatttttgcaatctatccatctgacaaagggctaatatccagaatctacaaggaacttaaacaaatttacaggaaaaaaaaaaaccaaacaaccccataaaaaaagtgggcgaaggatatgaatagacccttttcaaaagaagacatttatgcagccaaaaagtatatgggaaaaa

SEQ ID NO: 879719 - DNA, 612 bp, Homo sapiens
attcgtccttctgtctttgcttcttgtgcttctagtagtggatgcacctcctgcccgggtctagttgccattggctagtccctagccacttctaactcctggctgtggtttctgggctgtggaaaaaccacttctcccgattgtgcctaacccattgggtgacaaggttgattacaccctagattttaaaatctcaatgcttagaccacatcaagactaattacattagaatttctggggcacaatgtaggatttaaaattgtattttcatatacatccatgtttgagacctaattctctagccttagagatggttggggtttcctaattccttaccaatacttgtttagcttttcagcttytccaccacctatataactatttctgtgtgttaaattttcatttgcttaaaaggtctggactggttactgtttcttggcccggcctgatacatttttactattattactattattttagaaataacaattaatataaaaattagatggctgaatacccagtagttttcgatttctgaatattaaagtacatcaaaatagccacaggaaagattgctgcactacatctgagatggtcaggcaatgtctatat

SEQ ID NO: 879720 - DNA, 619 bp, Homo sapiens
gttttttaaaataatcaacaaaatagaccactagcccgactaataaagaagaaaagagaaaagagagaagaatcaaatagacacaataaaaaatgataaagggaatatcaccactgatcccccagagatacaaactaccatcagagaatactataaacacctctattcatctaaattacaaaatctagaagaaatggataaatttcaggacacatacactcttccaaatctaaaccaggaagaagtcaaatccctgaatagaccgataaaaagttctgaaattgaggcaataactaatatcctaccaaccaaacaaagcccaggaccagasagattcacaaattctatcagaggtacaaagaggagctggtaccatttcttctgaaactattccaaacagtagaaaaagagagactcctccctaactcattttgtgaggccagcatcatcctgataccaaaacctgacaagacataacaaaaaaagaaaatttcaggccaatatccctgatgaacatcaattcaaaaatccttgataaaatactggcaaactgaatcagcaacacatcaaaaagcttatccaccacgatcaagtcggattcatccctgggatgcaagtc

SEQ ID NO: 879721 - DNA, 587 bp, Homo sapiens
ccaaagtaatttatacattcaatgctatccccatcaagctaccattgagtatcttcacagaattagaaaaaaactactttaaatttcatatgaaccaaaaaagagcctgtacagccaagaccatcctaagcaaaaagaacaaagctggaggcatcactctacctgactttaaactatactacaaggctacagtgaccaaaacagcatggtaatggtaccaaaacagatatacaggccaatgtcacagaacagaggcctcagaaataatgccacacatctacaaccatctgattttcgacaaacctgacaaaaacaagaaatggggaaaggattccacatttaataaatggtgttgggaaaactggctagccttatgcagaaaacagaaactggaccccttccttaarcctatacaaaaattaactcaagatggattaaagacttaaacttaagacctaaaaaccataaaaaccctagaagaaaacgtaggtaataccattcaggatataggcatgggcaaagacttcatgaataaaacaccaaaagcaatggcaacaaaagccaaaatagacaaatgggatctaatt

SEQ ID NO: 879722 - DNA, 645 bp, Homo sapiens
gctgccacttttaaaaccaacagatcttgtgaaaactccctcagtaacatgagaacagtatgggggaaaccgccccgggattcagtcacctcccatcagttccctcccttgacatgtgaggactactattcaagatgagatttgggtggggacatagagccaaaatatatcaatatattaataattctttttcactagtggttaaattatgaatttattgtatgttttctgtttatttttctgtttcctagttgtctatagcataattagcctatattaattttattgtcaaaktaaaaagatgaaaaaaaaggcttggaattatgaatatttaaccttatagaacagctctgagcatgaacagaagtcataatttagagaaatgtctggctatgaaggctctcaatctcataatgaaaggattacagttgttatacattcccctttcccttgcaaacacagtcttgaacactgaacataatctaatcctgactgatcaaatgcagtcaacttgaagtttgaaactgcagagagagatgaaaagacatcaattgtcaaatgattcccagtgtggcaaggcagtatcagcttgtgctcagtggtggcgttaagggtagagtgactatagagcaccagtcagcatct

SEQ ID NO: 879723 - DNA, 619 bp, Homo sapiens
gatctctcagcacagtgggaacatgtaaacaaacttacctgcaaaactcaggaataacaaaagaaaatacatccagaaagaatttagcacaccaatattctgttctacaggcatggctcattcatctgcagtgtggggctcccaaagtgctcaaaaagaacggtttgtggtcccactgttacacatgaggggtctcctttgggcagaaaatgaccctcaaaacacaaattccttttttaattctcaggggtaaacaatgtgtcatttaataaactttcatttatatatgtgatcaagaactatttacaaataacctattgagttattaaatattagatcaaccaacttgggttgttcatttggtattgaataaaattaattataagtttatattcatcaaataagtgactaaatagttggattccctcaagggatttattctacaaataagtctgtgggccatatatttggcagcrttgcaaagctccagctgataattacaatactattattgtaataataataattattaaataattacaatactattattaaatgtacataaatgtacacagaagagaaagggggctttggcttgcctacgaatatagcagtgcaa

SEQ ID NO: 879724 - DNA, 608 bp, Homo sapiens
aaatgggaaaaatgaatgtgattggtgaagatgagaacctctaaagcagccactcaaatgacaaaatacatcaatatggtgcatttgttctgtctttttctaaaactttgaactgatcattctgccaaataaatgaacaaactgaaacttagccgtctgtcctatgcagccctacaatgattgaatgtacaacagcttgtgaaagaaccaaaaaggaaagccaggctggagctagccaacaacatatatcatgtggtaggaaagtgtcaatgaatatggaactaacattttttttygaaaaagaaatgaaaagaaaaaaagatgacagttgttcatgagaaggctgagagggagagggcagatgataagtaaagctgactcagagagcacatgggtacagttttgaagtacagcaggtagttatgcaatgcttggtgattacaccctcaaatacagcacgacaggcaataatttaatttttcaaacctccatgttaaaagcaagttttgaatttggcagtgaggccttttccttccactagtgtcaagtgagagtgcagccatttcatttgaatgcccagctgcaacattcagtgcatttatcatagc

SEQ ID NO: 879725 - DNA, 608 bp, Homo sapiens
aaatgggaaaaatgaatgtgattggtgaagatgagaacctctaaagcagccactcaaatgacaaaatacatcaatatggtgcatttgttctgtctttttctaaaactttgaactgatcattctgccaaataaatgaacaaactgaaacttagccgtctgtcctatgcagccctacaatgattgaatgtacaacagcttgtgaaagaaccaaaaaggaaagccaggctggagctagccaacaacatatatcatgtggtaggaaagtgtcaatgaatatggaactaacattttttttcgaaaaagaaatgaaaagaaaaaaagatgacagttgttcatgagaaggctgagagggagagggcagatgataagtaaagctgactcagagagyacatgggtacagttttgaagtacagcaggtagttatgcaatgcttggtgattacaccctcaaatacagcacgacaggcaataatttaatttttcaaacctccatgttaaaagcaagttttgaatttggcagtgaggccttttccttccactagtgtcaagtgagagtgcagccatttcatttgaatgcccagctgcaacattcagtgcatttatcatagc

SEQ ID NO: 879726 - DNA, 591 bp, Homo sapiens
ccattctcctgcctcagcctccagagtagctgggactacaggcgcccaccatcacgccctgctaatttttttgtatttttagtagagacggagtttcaccatgttagccaggatggtctcgatctcctgacctcatgagccgcccgcctcggcctcgcaaagtgctgggattacaggcatgagccatcgcgcccgacctgtaattactttcttcaccttctgtagaagttcatgaattttcactgcttttatagattcaataagcattgaagtatgctcaatatttaaaatatttatctgttctgtattcctgraattggaccctatataattatacacttgaatgtcagaatattataataaaaatattctccttaagatacgagatctagtcccagatccatccctaacaccatcaattgttggatgtcaatttccttgctagtttattttatctatataaaataaagatgagttaagaaccccatcctaattctcaaacttttgaaagtaattgggaggaacaagcaaaaataacatttgtgattgtattgtgaaaaaaattacccagttctgcaaacgtattacttt

SEQ ID NO: 879727 - DNA, 580 bp, Homo sapiens
aaatgtctcttcaaatgtgtaatactatggtttgaatatttgtcctctccaaaactcatgctaaaatttaattgccaatacaacagtattgagagatagagcctttaagaggccactgagtcatgagggctactctctcatgcagtattcattaaggattcaatgccttaataaaggggccttcagaagtggactctccctttgcccttttgctttctgcattgtggtgacacgtaagaaggtcctcataagttggcagcaccttgataataaaccttccaccytccaaaactgcaagccaaaaaattgtgttaattataaattactcaatctgtggtattataagagcacaaaatggactaagacacccaatgtttaaaaaaaaattacaaggcacacacaaaaaaaggaaaaatatgatccacttaagggaacagatatataaatacatcctcagaaaatgtttctgaagaaacaccaactttaggcttaccagaaaagactttaaaacaactgtcttaaatatgctcaaaaagcaaaagaaaaacaaataactaaaagaaatcaggaaaaaatatat

SEQ ID NO: 879728 - DNA, 679 bp, Homo sapiens
tgcctattattggtgtatatgaatgcttgtgatttttgcacattgctttgtatcctgagacttcactgaagttacttatcagcttaagacatttttgggctgagatgatggggttttctagatatacaatcatacaatcatgtcatctgcaaacagagacaatttcattttctctcttcctatttgaatactctttatttctttctctyggctcattaccctgccagaactgccaatactatggtgaataggagtggtgagagagggcatccttctcttgtgccagtttttacaggaaatgcttccagcttttgcccatttagtatggtattggttatgggtttgtcataaatagctcttattattttgagatatgtgccatcaatacctagtttattaagagtttttagcctgaaggggtgttgaatttttcaaaagcattttctgcatctattgagataatcatgtggtttttgtcattggttctgtttatgtggtggattatgtttattgatttgcatatgttgaaccagccttgcatcccagggttgaagccgacttaattgtggtggataagcttttgatgtgttgctgactcctgtttgccagtattttctgaggattttcgcatcaatgttcatcaggggtattggcctgaaagtttctttttctgttgtgt

SEQ ID NO: 879729 - DNA, 658 bp, Homo sapiens
ggaaaagcattcaatgttccacgattaagcatgatgttagctataatttttgtagactctttcaatttgaggaaattcccttctttcctagtttgctgagtttttatcatgaatggttgttggactttgtcaaatgctttttctgtgtaaactgacatgatcatgtgactttttygcctttagtctgttgatgtggtggattgcatttgattgatttttgaatgttgaagcatacttgcatatcagagataaattccactaggttgccatgtgtaattcattttgtgcattaccagattcaatttgttaatattttgttgaagatttctgtatctacattcatgagtgatactagtatgtagctttattctttttttcttctatctttgtctacttttagtatcagagtaatactagccttctaaaataatcaaggagtacctctcctcttctattttctggaaatagaattttctgaaaatagaagaggagagagtaacattcttctttaaatggtaaatagaattctccaaggcttcaaggccaggagatttatttttcaggagcttttatattattattaagggttcagtttctttaagagtatagaactattcagtttgtctgtttcaactttgttgagtcagataatttccag

SEQ ID NO: 879730 - DNA, 658 bp, Homo sapiens
ggaaaagcattcaatgttccacgattaagcatgatgttagctataatttttgtagactctttcaatttgaggaaattcccttctttcctagtttgctgagtttttatcatgaatggttgttggactttgtcaaatgctttttctgtgtaaactgacatgatcatgtgactttttcgcctttagtctgttgatgtggtggattgcatttgattgayttttgaatgttgaagcatacttgcatatcagagataaattccactaggttgccatgtgtaattcattttgtgcattaccagattcaatttgttaatattttgttgaagatttctgtatctacattcatgagtgatactagtatgtagctttattctttttttcttctatctttgtctacttttagtatcagagtaatactagccttctaaaataatcaaggagtacctctcctcttctattttctggaaatagaattttctgaaaatagaagaggagagagtaacattcttctttaaatggtaaatagaattctccaaggcttcaaggccaggagatttatttttcaggagcttttatattattattaagggttcagtttctttaagagtatagaactattcagtttgtctgtttcaactttgttgagtcagataatttccag

SEQ ID NO: 879731 - DNA, 596 bp, Homo sapiens
gaatactggcatctgggagtgttgtctgccttaactgaaaattttctttgatttatgtttttttttaaaatagattgcttcactttattccatactatctgttagtttaaatggaaatttgtttttggtttgttttcccaggtcttcaatgttcctggcagcttaaagtaccaactgggacacttgtcactagtttgagaagtgcagccataggtgagttctctccaccccaactttcttagtcatcctgccctgaacaaatcagctcaagccagtcccccgccagtgccactttccacttgtctccattgaaaccttcaccctccttcaaggcccaccaccagcccttcgcagatgcccacctccccagcctytacagccctttgtttccatcagtccctctccctggctcagtctctgctttcataaggagccggctctctgttcacccagatttaacttgctcagaggcagaaacttaggcttctttgtatgctcccaatgcttagttccatactgggaacaaagtaggtgtccggtatttttttactggtttccctttaaaaaaaaaaaaaaaaaaaaaaaagaggggactg

SEQ ID NO: 879732 - DNA, 567 bp, Homo sapiens
ttttgaaatgatcatataatttttctccataatctgttaatatgttgaattaggtcaaaatatttcctaattttgagctaccttcgcatttctggaaggtatttggacataattatattttttggacataattatattttgcatactgctggagaggatttgccactattttctttaagatttttgtatctctgttaataaacttaaaagtctgattttactgttttatactgtccttgtccagtttggtagcaagaacatactagccttataaaatgagaagcgttatccaccctacaccccccaattctctgaataagcttttgtaaaataagaattacttgtttttgagggtttggtaaaacttgcttctgtaactgtctgggcttggtgtctttggaaagggagatattttctttyttctttttctttctttctttcttttttttttttttttgagacagagtctcactctgttgccaaggctggagtgcagtggtgcaatcttggctcactgcaacctccgcttcctgggttcaagcgattctcctgcctcagcctcctgag

SEQ ID NO: 879733 - DNA, 663 bp, Homo sapiens
atctcaaaagagaaacaaaaaaagaagaggtatgggacatgcaataatgaatgaatgaaaataagaagcagcttttttttctcccttgtaataagtctatcacagggaaatcactatttccacaagagtccagtttaggagagtgtgtttacttctttctccatcctgctcccctaccatttctctctcttttgtcccaaccttaccaaagtacaggaaagcaaaatataaagcctgaggtagagatggaaatgaatggaaagatgacttataagctgtctcagctcatctactgtccaccagatgcacagataaagggcccagctttactggtatagaaataacagttcgccaaagctactctaaagaatgatcagaaatgccaattttttaacatttacatgtaaaacattatatttttgtgaatgtaaactggtatctttctcgaggagcaattcatcagtatattttacaaacccttggtatcaacatgtccaattataggaatktatcctaagaaaaataatcatgaatgcatactaagaatcagctacgtaatgttcatggcagcattgcttatgacagtgtaaaactggaaacgacctcaatttccagtataatgatctgtgtaacatatgaaatactcatacacagaatattaaa

SEQ ID NO: 879734 - DNA, 670 bp, Homo sapiens
tatccacactctcatgtctattgcagcattattcataacagccaagatacagagctaacctaaatgtccatcaatggttggatgcataaagaaaatgtgatatgtacacaaaggcatactattcatccttaaaaaataaggaaatcctgtcatttgcaacaatgtggatgaacccggaggacattatattaagtgaaaaaaagccaggcacagaaaaacaaatactgaatgatctcacttatatgtgaaatctaaataaacagaactcatagaagcattgagtagaatggtggttaccaggggctggggtagagagaagggttagaggagatgttagtcaaaggatacaaaatttcagttagacaggagggatacattcaagagacatcttgcacaacatggtaattataggtaacaacaatgggttttayacttggaaattgctaagagagtacattttaaatgttcttaccacaaaaaaagtatgtgaagtaatgcatatgcaaattagtttgatgtagccattccacaatgtatacatatttcaaaacatcaggctgtacacaatatacacaattttcatttatcaattaaattaataataataataaataccagaaacaccctttatattacagttgcatggctgtgtgtggatgtgcacacatta

SEQ ID NO: 879735 - DNA, 670 bp, Homo sapiens
tatccacactctcatgtctattgcagcattattcataacagccaagatacagagctaacctaaatgtccatcaatggttggatgcataaagaaaatgtgatatgtacacaaaggcatactattcatccttaaaaaataaggaaatcctgtcatttgcaacaatgtggatgaacccggaggacattatattaagtgaaaaaaagccaggcacagaaaaacaaatactgaatgatctcacttatatgtgaaatctaaataaacagaactcatagaagcattgagtagaatggtggttaccaggggctggggtagagagaagggttagaggagatgttagtcaaaggatacaaaatttcagttagacaggagggatacattcaagagacatcttgcacaacatggtaattataggtaacaacaatgggttttatacttggaaattgctaagagagtacattttaaatgttcttaccacaaaaaaagtatgtgmagtaatgcatatgcaaattagtttgatgtagccattccacaatgtatacatatttcaaaacatcaggctgtacacaatatacacaattttcatttatcaattaaattaataataataataaataccagaaacaccctttatattacagttgcatggctgtgtgtggatgtgcacacatta

SEQ ID NO: 879736 - DNA, 627 bp, Homo sapiens
ggcaaagacctgctaaagggacaagaagaaagggaaaatgaagtcatattttattcatcattcagatattcacctcattatttgaactattaatagaaaattgaggctttttcctctcttgtgggtatcctatctctttatttttagatcttcttggaaatacctttctgaaacttgaagatcccctctagatattattttccaggatgaaaggcctctagcagagtctttaatgtgcaataatgagaagatgaaacattattgtgtttcctctggactcttgtatttgaacttgatccaggattgacactrggcagctcacctttcccacatcatggttagctctaagtcaggctaagaaattaccttccctggccactccctgctttgtccagttaaataaaaatgaatttttagttttatttagttaactaactccatgggccatggtaagctaaagaaaagtagatgtatgagaggaaacgttggcaaattctctgtacttatttagagtacaggaaagatccataattaaccatgctttgggaaaatacttccttggaatggtcatattgaagggtttggtttaaaaaaagttgagggttgggggcttctacatcacatcct

SEQ ID NO: 879737 - DNA, 627 bp, Homo sapiens
ggcaaagacctgctaaagggacaagaagaaagggaaaatgaagtcatattttattcatcattcagatattcacctcattatttgaactattaatagaaaattgaggctttttcctctcttgtgggtatcctatctctttatttttagatcttcttggaaatacctttctgaaacttgaagatcccctctagatattattttccaggatgaaaggcctctagcagagtctttaatgtgcaataatgagaagatgaaacattattgtgtttcctctggactcttgtatttgaacttgatccaggattgacactaggcagctcacctttcccacatcatggttagctctaagtcaggctaagaaattaccttccctggccactccctgctttgtccagttaaataaaaatgaatttttagttttatttagttaactaactccatgggccayggtaagctaaagaaaagtagatgtatgagaggaaacgttggcaaattctctgtacttatttagagtacaggaaagatccataattaaccatgctttgggaaaatacttccttggaatggtcatattgaagggtttggtttaaaaaaagttgagggttgggggcttctacatcacatcct

SEQ ID NO: 879738 - DNA, 615 bp, Homo sapiens
aattctctgtacttatttagagtacaggaaagatccataattaaccatgctttgggaaaatacttccttggaatggtcatattgaagggtttggtttaaaaaaagttgagggttgggggcttctacatcacatcctcgctacatttttttaaaaattaagatttctataatttttttttagaaattaaggcttctataaaattcatgtaattttaaccagggataatctcactcagtttccacgtgtgtgaaatggggattataatagtaccttttctcgggctttctgggactactttatataacatttggaagagtacctctccaattatcatgctgtacaccttgaatatatacaatttttgtgtcagttatacctcaataaagctggagggaaaccctcatttccayagtgaaaataagtacctagcacacaactaatattctagtctataattctataaatgttagcaattattattatcaactaataaaattcccaattacccttataccatatgaccctttgggggagaggactaatagtccatgaatagtatggaatctgcatgtacagagttttagaaacttttgttttcactgctgcattttaaa

SEQ ID NO: 879739 - DNA, 553 bp, Homo sapiens
ctgtgtagatccccttaagagttagtgtctcttctatctattaaaagaagaaaacggtgagggaaggggggacagtaacccttgtgggaaaaatgacccttgttgtgggaagtcagagaccccgaatggaggaaccagctgaagccatggcagaagaacataaattgtgaagatttcatggacatttattagttcccaaaattaataatttcttatgcctgtctttgctgcaatctctgaacataaattgtgaagatttcatagacatgtatcayttccccaatcaatactcttgtgatttcctatgcctgtctttaatctcttaatcccgtcatcttcataaactgaggatgtatgtagcctcaggaccctgtgatgattgtgttaactgcacaaattgtttaaacaatatgaaatcttgaaaaaagaacagggtaacagcgatgttcagggaacaagggagataaccattaggtctggctgcctgagagccaggcagaacagagccatatttctcttctttcaaaagcaaataggagaaatattgctgaat

SEQ ID NO: 879740 - DNA, 577 bp, Homo sapiens
cacagctgaattctaccagaggtacaaagaggagctggtactataccttctgaaactattccaatcaatagaaaaagagggaatcctctttaactcattttatgaggccagcatcatcctgataccaaagcctggtagagacaccccccaaaaaaaagagaattttagaccaatatccctgatgaacatcgatccggaaatcctcaatgaaatactggcaaatagaatccagcagcacatcaaaaaacttatccaccatgatcaagtctgcttcatccctgkgatgcaaggctggttcaacatatgcaaatcaataaatgtaagccatcacatgaacagaaccaatgacaaacaccacatgattatctcaataaatgcagaaaaggcctttgacaaaattcaacagcccttcatgctaaaaactctcaataatctaggtattgatggaatgtatctcaaaataataagagctattttttgacaaacccacagccaacattatactgaatgggcaaaaactgaaagcattccctttgaaaactggcacaagtcagggtcgacctctctcaccactcct

SEQ ID NO: 879741 - DNA, 628 bp, Homo sapiens
gtacatgatgccaccatagaaaaagcagttgccttaatctttggagtcatttgccaggttgtgcctattatgaaaaacctgttgcattatatacatagttcatataactttctgcttctattcttgtgttccacattcttttgggcacatgggatacttttgggcagaagggactttgtggaagtcatttccttggtttaaaatattcaaatggaatcctttgaagtttgttgatcatccatcaaaagatacatttttaaaaaatagatattctggagaaaataacaattgcaatcttttaccaaacacttaatgtytatcccatgaggtactgtgtttattgtttttccaggattctcaattttttttgctcaaacagctttatgaagtatgtactgttatcattttcattttacatataaaacaagtgggcttagtcacattaagtaactcctccaagtcaccattagctgacttcagaaccaggaggtaaaccagcagtctgattttagtgctcacaataaccagagtatcataacttcttcagaaatttagaaatcttgtcattttgtttcaggaatagcaagcagacctactggctctgtatcttccaccatgagaagtttgt

SEQ ID NO: 879742 - DNA, 592 bp, Homo sapiens
tagatccactgacagcttgcaccatgtgcctggaaaagctgcacacactcaatgccagcccataaaagcagctgagagggatgctgtaccctgcaaagccacagaagcagagctgcccaagaccacgggaacccacctcttgcatcagcatgacctggatgtgagacctggagtcaaaggagatcattttggagctttgaaatttgaccgccctgctggatttcggacttgcatgggctttgtaacccctctgttttggccaatttctcccatgtgaaactgctctatttacccaatacctgtacccccattgtatctaggaagtaaatagcttgcttttgattttacaggctcataggcagaagggatttgccttgtctcagatgagactatttggactgtagacttttgggttaacrcagaaatgagttaagactttgggggactgttggaaaggcataattggttttgaaatgtgagggcatgagatttggaggggtcagggatggatgatatggtttggctgcgtccccacccaaatctcaacttgaatttaatctcctagaattcctacatactgtgagagggaccc

SEQ ID NO: 879743 - DNA, 518 bp, Homo sapiens
gtttgagacactcttttggaagaatctggaagtggacatttggagcgctttgatgcctttggtgaaaaggaaacgtcttccaataaaagccagacagaagcattctcagaaacttgtttgtgatgtgcgtactcaactaaaagagttgaacctttctattgatagagcagttttgaaacactctttttgtggattctgcaagtggatatttggattgctttgaggatttcgttggaagcgggaattcgtataaaaactagacagcagcattcccagaaatttcttycggatatttccattcaactcatagagatgaacatggcctttcatagagcaggtttgaaacactctttttgtagtttgtggaagtggacatttcgatcgccttgacgcctacggtgaaaaaggaaatatcttcccataaaaaatagacagaagcattctcagaaacttgttggtgatatgtgtcctcaactaacagagttgaactttgccattgatagagagcagttttgaaa

SEQ ID NO: 879744 - DNA, 660 bp, Homo sapiens
ttcgttggaagcgggaattcaaataaaaggtagacagcagcattctcagaaattactttctgatgtctgcattcaactcatagagttgaacattccctttcatagagcaggtttgaaaaactctttctgtagtatctggatgtggacatttggagcgctttgatgcctacggtgaaaaagtaaatatcttcccataaaaacgagacagaaggattctgagaaacaagtttgtgatgtgtgtactcagctaacagagtggaacctctcttttgatgcagcagtttggaaacactctttttgtagaaactgtawgtggatatttggatagctctaatgatttcgttggaaacgggaatatcatcatctaaaatctagagagaagccctctcagaaactactttgtgatatctgcattcaagtcacagagttgaacattcgctttcttagagcacgtttgaaacactctttttgtagtgtctggaagtggacatttgcagcgctttgatgcctttggtgaaaaagggaatgtcttcccataaaaactagacagaagcattctcagaaacttgtttgtgatgtgtgtaccaagctaaaggagttgaacatttctattgatagagcagttttgaaacactgtttttgtggaaaatgcaagtggat

SEQ ID NO: 879745 - DNA, 527 bp, Homo sapiens
ctttgtgatatctgcattcaagtcacagagttgaacattcgctttcttagagcacgtttgaaacactctttttgtagtgtctggaagtggacatttgcagcgctttgatgcctttggtgaaaaagggaatgtcttcccataaaaactagacagaagcattctcagaaacttgtttgtgatgtgtgtaccaagctaaaggagttgaacatttctattgatagagcagtwttgaaacactgtttttgtggaaaatgcaagtggatatttggatagcttggaggatttcgttggaagcgggaattcaaataaaaggtagacagcagcattctcagaaatttctttctgatgtctgcattcaactcatagagttgaacattccctttcatagagcaggtttgaaacactctttccggagtatctggatgtggacatttggagcgctttgatgcctacggtgaaaaagtaaatatcttcccataaaaacgagacagaaggattctcagaaacaagtttgtgatgtgtgtact

SEQ ID NO: 879746 - DNA, 641 bp, Homo sapiens
aaaggtacacagcagcattctcagaaatttctttctgatgtctgcattcaactcaaagagttgaacattccctttcatagagcaggtttgaaacactctttctggagtatctggatgtggatatttggagcgatttgatgcctacggtgaaaaagtaaatatcttcccataaaaacgagacagaaggattctgagaaacaagtttgtgatgtgtgtactcagctaacagagtggaacctctcttttgatgcagcagtttggaaacactctttttgtagaaactgtaagtggatatttggatagctctaatgatttcgttggaaacgggaatatcatcatctaaaatctagagagaagccctctcagaaactactttgtgatatmtgcattcaagtcacagagttgaacattcgctttcttagagcacgtttgaaacactctttttgtagtgtctggaagtggacatttggagcgctttgatgcctttggtgaaaaagggaatgtcttcccataaaaactagacagaagcattctcagaaacttgtttgtgacgtgtgtacccagctaaaggagttgaacatttctattgatagaacagttttgaaacactctttttgtggaaattgcaagtggatatttgg

SEQ ID NO: 879747 - DNA, 577 bp, Homo sapiens
tagtttttatacgaattcccgctcacaacgaaatcctcaaagcaatccaaatatccacttgcagaatccacaaaaagagtgtttcaaaactgctctatcaatagaaaggttcaactcttttagttgagtacacacatcacaaacaagtttctgagaatgcttctgtctggcttttattggaagacgtttccttttcaccaaaggcatcaaagcgctccaaatgtccacttccagattcttccaaaagagtgtttcaaacgtgctcaaagtaagggaatgttcaactctktgacttgaatgcagatatcaccaagtagtttctaatagtgcttctgtcttgattttagatgatgatattcccgtttccaacgaaatcgttagagctatccaaatatccacttacagtttctaccaaaagggtgtttccaaactgctgcatcaaaagaaaggttcaactctgttagttgaggacacacatcacaaagaagtttgtgagaatgcttctgtctagattctgtatgacaatattcccttttccaacgatatcgttaaagcaatctaaatatcaatttgcaga

SEQ ID NO: 879748 - DNA, 577 bp, Homo sapiens
tagtttttatacgaattcccgcttccaacgaaatcctcaaagcaatccaaatatccacttgcagaatccacaaaaagagtgtttcaaaactgctctatcaatagaaaggttcaactcttttagttgagtacacacatcacaaacaagtttctgagaatgcttctgtctggcttttattggaagacgtttccttttcaccaaaggcatcaaagcgctccaaatgtccacttccagattcttccaaaagagtgtttcaaacgtgctcaaagtaagggaatgttcaactctktgacttgaatgcagatatcaccaagtagtttctaatagtgcttctgtctagattttagatgatgatattcccgtttccaacgaaatcattagagctatccaaatatccacttacagtttctaccaaaagggtgtttccaaactgctgcatcaaaagaaaggttcaactctgttagttgaggacacacatcacaaagaagtttgtgagaatgcttctgtctagattttgtatgacgatattcccttttccaacgatatcgttaaagcaatctaaatatcaatttgcaga

SEQ ID NO: 879749 - DNA, 612 bp, Homo sapiens
gaggcctatagagaaaatggaaatatcttcacataaaaactagacagaagcattctcagaaacttttttttgatgcttttatttaactcacagagttgaacattccttttcatagagcagttttgaaacactctttttgaaggatctgtaagtggaaacatggagctctttgatgcatatgatgaaaaaggaaatatcttccaataaaaactagacagaagaattctcagatacttctgtctgatgtgtgtactcaattcacagatttgaacttttcttttgatactgcaattttgaaacactctttttgtcaagtgtgcaagtggatatttggatagctttgaggatttcgttggaaacgggaatatcttcatataaaaactagagagaagcattctcagagacttatttgtgatrcttgcattcatttcacagagttgaacgttccttttcatagagcagttttgaaacactctttttgaggaatatgcaagtggatatttggagagatttgagacctatggtgaaaaaggaaatatcttcacataaaaagtagacagaagcattctcagaaactactttgtgatgtgtgtactcaactcacagagttaa

SEQ ID NO: 879750 - DNA, 563 bp, Homo sapiens
agaaataatctgacaaacttctttgtgatgtatgcattcaactcacagagttgaaagtttcttttgaataagcagtttggaaacactcctttgtagagtctgtaggtgaacatttgcggcactttgagacctatggtagaaaaggaaatatcttcacgtaaaatctagacaaaagcaatctgagaaacttctttgtggtgtgtgcattcatctcacagagttaaacctttcttttgattgagcagttttgaaagtctgttttttttagaatctgcaagtgaatatttggagtgctttgaggcctatggtggaaaaggaaatatctttacctaaaaactagawagaagaattctgagaaacttctttgtgatgtgagcattgatctcacagagctgaaactttcttttgattgagcagttaggaaacactctttttgtagaatctgcaagtggacatttggagcactttgcagacaatgatagaaaaggaaatatcttcacattaaaagtagacaggagaaatctgagaaacaactttgtgatttgtgcatttatctcccagag

SEQ ID NO: 879751 - DNA, 593 bp, Homo sapiens
ttgaaactgtctttttgtagaatctgcaagtggacatttggagcccttttgggcttatggtggaaaaagaaatatcttcacataaaaactagacagaataattctgagaaacttctttgtgatatgtgcgttcatctcacagtgttgaaactttcttttgattgagccgtttggaaacactctttttgtagaatctgcaagtggacatttggagtgctttgcrgcctatggtagaaaaggaaatatcttcacataaaacctacacagaagcaatctgagaaacttctttgtgatgtgtgctttcatcacaccgagataaacctttcttttgattgaggagttttgaaactgtctttttgtagaatctgcaagtggacaattggagcactttgaggcctatggtggaaaagaaaatatctccacataaaaatagacagaagatttctgagaaacttctttgtgatgtgtgcattcatgtcacagatttgaacctgtctgttgattgagtagtttggaaacactcttttttagaatctgcaagtggacatttggagcactttgcggcctatggtagaaaaggaattatcttcaca

SEQ ID NO: 879752 - DNA, 696 bp, Homo sapiens
atatgtgcattcatctcgcagaattgagcctttcttttgattgagcagtgttgaaaccctctttttgtagaatctgcaaatggtcatttggagcactttgaagcctacggtggaaaaggaatttatcttcacataaaaactagagagaagaattctgacaaacttctctgtgatgtgtgcgttcatctcacagagttgaaactttcttttgattgagctgtttggaaacagtctttttgtagaatctgcaagtggacmtttggagcactttgtgtcctatgatagaaaaggaaatatcttcacataaaattcagacagagccaatctgagaaactactttgtgatgtgtgcattcatttcacagagttaaaactttagtttggttgagcagttttgaaactctctttttgtagaatctgcaagtggacatttggagcgcttttaggcctattgtggaaaaggaaatatcttcacctaaatactagacagaagaattctgagaaacttctttgtgatgtgtgcgttcatctcactgagttgaaccttcattttgattgagcattttggaagcactccttttgcagaatctgcaagtggagatttggagcgctttgcagccagtggtagaaaaggaaatacctgcacataaaatctagacagaagcaatatgggaaaattctttgtgatgtgtgcatt

SEQ ID NO: 879753 - DNA, 643 bp, Homo sapiens
gagcgctttggggcctaaggtagaaaaggaaatatcttcacataaaacctagacagaagcaatctgagaaacttctttgtgatgtgtgcattcatctcacagagttgaaccttgcttttgattgagcagtttggaatcactctttttgtagaatgtgcaagtggacatttggagcgctttgyggactatggtagaaaaggaaatatcttcacattaaatctagacagaagcaatctgagaaatttctttgggatgtgtgcattcgtctcacagagttaaaacttccttttgatagagcagtattgatactctctttttgtaaaatctgcaaatggacatttggagtactttcaggcctatggtggaagaggaaatatcttcacataacaactagagagaagaattcagacaaatttctttgtgatgtgagcgttcatctcacagaattgagcctttcttttgattgagcagtgttgaaaacctctttttgtagaatctgcaaattttcatttggagcgctttgaggcctatggtggaaaaggaatttaacttcacataaaaactagagagaataattctgacaaacttcttggtgatgtgtgcgttcatctcacagagttgaaactttcttttgattgagcag

SEQ ID NO: 879754 - DNA, 664 bp, Homo sapiens
attcatctcacagagttaaacctttcttttgattcagcagttttgaaactctctttttgtagaatctgcaagtggacatttatagctctttgagaactatgatggaaaaggaatatcttcacaaaaaaaactagacagaagaattctgagaaacttctttctcatatgtgcrttcatctcacagagttgaacctctcttttgattgagcagtttggaaacactttttttatacaatctgcaactggacatttggagcactctgcggcctatgttagaaaaggaaataccttcatataaaatctagacagaagcaatcagagaaacttttttgtgatgtgtgcattcatctcacagaggtaaatatttcctttgagcagttgtgaaactctctttatgtataatctgcaagtggacatttggagcactttgaggcctatggtggaaaaggaaacatcttgacataaaaactagacagaagaattctgagaaacctctgcattatatgtgtgttcatctcacagagttgaaactttcttttgattgagcagtttgacaacactctttttgtagaatctgcaagtggacatttggagcgcattgagccttatggttcaaaaggaaatttcttcacataaaatgtagacagaagcaatctgagaaacg

SEQ ID NO: 879755 - DNA, 664 bp, Homo sapiens
attcatctcacagagttaaacctttcttttgattcagcagttttgaaactctctttttgtagaatctgcaagtggacatttatagctctttgagaactatgatggaaaaggaatatcttcacaaaaaaaactagacagaagaattctgagaaacttctttctcatatgtgcattcatctcacagagttgaacctctcttttgattgagcagtttggaaacactttttttatacaatctgcaactggacatttggagcactctgcrgcctatgttagaaaaggaaataccttcatataaaatctagacagaagcaatcagagaaacttttttgtgatgtgtgcattcatctcacagaggtaaatatttcctttgagcagttgtgaaactctctttatgtataatctgcaagtggacatttggagcactttgaggcctatggtggaaaaggaaacatcttgacataaaaactagacagaagaattctgagaaacctctgcattatatgtgtgttcatctcacagagttgaaactttcttttgattgagcagtttgacaacactctttttgtagaatctgcaagtggacatttggagcgcattgagccttatggttcaaaaggaaatttcttcacataaaatgtagacagaagcaatctgagaaacg

SEQ ID NO: 879756 - DNA, 433 bp, Homo sapiens
gagtgtttcaaacgtgctcaaagtaagggaatgttcaactctgtgacttgaatgcagatatcaccaagtagtttctaatagtgcttctgtctagattttagatgatgatattcccgtttccaacgaaatcgttagagctatccaaatatccacttacagtttctaccaaaacggtgttcccaaactgctgcatcaaaagaaaggttcaactctgttagttgaggacacacatcacaaagaagtttgtgagaatgcttctgtctagattttgtatgacsatattcccttttccaacgatatcgttaaagcaatctaaatatcaatttgcagaatccacaaaaatagagtttcaaagctgctctgtaaaaagaaaggttccactctgttagctgagtacacacatcacaaacttgtttctgagaatccttctgtc

SEQ ID NO: 879757 - DNA, 653 bp, Homo sapiens
tcccttttccaacgatatcgttaaagcaatctaaatatcaatttgcagaatccacaaaaatagagtttcaaagctgctctgtaaaaagaaaggttccactctgttagctgagtacacacatcacaaacttgtttctgagaatccttctgtctcgtttttatgggaagatatttactttttcaccgtaggcatcaaagcgctccaaatgtccacatccagatactccagaaagagtgtttcaaacctgctctatgaaagggaatcttcaactctatgagttgaatgcagacatcagaaagaaatttctgagaatgctgcagtctaccttttatttgaattcccgcttccaacgaaatcctccaagctatccaaatatccacttgcattttccacaaaaagagtgtttcaaaactgctctatcaatagaaatgttcaactcctttagctgggtacacacatcacaaacaagtttcwgagaatgcttctgtctagtttttatgggaagacattccctttttcaccaaaggcatcaaagcgctccaaatgtccacttccagacactacaaaaagagtgtttccaacgtgctctaagaaagcgaatgttcaactctgtgacttgaatgcagatatcacaaagtagtttctgagagggc

SEQ ID NO: 879758 - DNA, 615 bp, Homo sapiens
ttggagctatccaaatatccacttacagtttctacaaaaagagtgtttccaaactgctgcatcagaagagaggttccactctgttagctgagtacacacatcacaaacttgtttctgagaatccttctgtctcgtttttatgggaagatatttacttttacaccgtaggcatcaaagcgctccaaatgtccacatccagatactccagaaagagtatttcaaacctgctctatgaaagggaatgttcaactctatgagttgaatgcagacatcagaaagaaatttctgagaatgctgctgtctaccttttatttgaattcccgcttccaacgaaatcctccaagctatccaaatatccacttgcagattccacaaaaagagtgtttcaaaactgctctctatcaatggcaaagttcaactctgttagttgaggacacatatcaccaacaastttctgagaatgcttctgtcaattttttatgggaagatatttcctttttcaccgtaggcgtcaacgcgatcgaaatgtccacttccacaaactacaaaaagagtgtttcaaacctgctctatgaaaggccatgttcatctctgtgagttgaatggaaatatccg

SEQ ID NO: 879759 - DNA, 614 bp, Homo sapiens
aatctaaatatcaatttgcagaatacacaaaaatagagtttcaaagctgctctataaaaagaaaggttccactctgttagctgagtacacacatcacaaacttgtttctgagaatccttctgtctcgtttttatgggaagatatttactttttcaccgtaggcatcaaagcgctccaaatgtccacatccagatactacagaaagagtgtttcaaacctgctctatgaaagggaatcttcaactctatgagttgaatgcagacatcagaaagaaatttctgagaatgctgctgtctaccttttatttgaattcccgcttccaacgaaatcctccaagctatccaaatatccacttgcattttccacaaaaagagtgtttcaaaactgctctatcaatagaaatgttcaactcctttrgctgggtacacacatcacaaacaagtttctgagaatgcttctgtctagtttttatgggaagacattccctttttcaccaaaggcatcaaagcgctccaaatgtccacttccagacactacaaaaagagtgtttcaaacgtgctctaagaaagcgaatgttcaactctgtgacttgaatgcagatatcacaaagtagt

SEQ ID NO: 879760 - DNA, 632 bp, Homo sapiens
cacttttgaaatactctttttgtagtgtctgcaagtggatatttggagcgatttacagcctatggtggaaaagtaaatatcttcacatcaaaaccagacagaagcattctgagaaactcctctgtgatctgtgcattcatctcacagagttgaacataactttcaattgagcagttttgaaacactctttttgtagaatctgcaagtggatattttgagtgctttggggcctatggtggaaaaggaaatatcttcacttaaaaactagacaaaagcattctgagaaacttctttgtgatgtgtgcattcatcacacagagttgaacctcyccttaggttgagcagctttgaaacactctttttgtagaatctgcaagtggacatttggagcgatttgaggcctatggtggaaaaggaattatcttcacataaaaactatacagaaacattctcacaagcttctttgtgatgtgtgcattcaactcacagagttgaacctttcttttgactgagcagttttgaaacactctttttgtagaatctgcaagtggacatttggtgtgctttgaggcatatggtggagaaggaaatatcttcacttaacaactaggcggaagcattctgagaaactt

SEQ ID NO: 879761 - DNA, 611 bp, Homo sapiens
gtttgtccatcacaaaggattccagaacactgctataggtttctgagtgtttgtccctcacataggattccagaacaattctacgaggctccgaatgtttgtccttcagataggatttcagaacacagtggctgggttctgagtgtttgtccctcacatagggtatcagaacactgctgctgggatctgagcgtttgtctttcacagaggattccagaacactgctgctttgttctgagtgtttgtccctcacataggattccagaacactgccgctcggtactgagggtttgtcccttacatagaattctagaacactgcagctcatttctgagtgtttgtccctcacttaggattccagaacaatgctacgattgtctgaatgtttgttccttaccaagtattccagaacactgctgctgggttctgagtgtttggcactcacattggtttccagaacactgctaygagggtctgaaaatctcgcacataggattccagaacactgctaagatggtctgaatgtttttccctcagaaaggattctggaaccctgctactggattctgtttgtttgtctcttacaaaggatttcagagcactgctcctgg

SEQ ID NO: 879762 - DNA, 521 bp, Homo sapiens
ggccgcggatgtcgcgagtgctgtgggaatgtgggctaaggtggagagttatggtggcgcgtgttacaggctcaggggtcaggaagaagcctaatcgtggaggcggcatctgaggagggtcttgaacgctgggcaggcttttgccccatagagatggaggaagctagtcctgtctgctggaggaaacagggcagaggcragaagggagacgtgcagcgctggtgtgaggagccacgagcaggccaggcctgtaaagcagaatgatgggaaccaagatagagaaggcaaatcggggtcctgtggtcgctgaataatttgaatgaaatcagtaaacaggtgacagggatccatcgcaagagcatgggatgaaacgaggagtagtccacggtgattcctccgcagcggtgggtattaataatcgcgtatgtgacaccaaaacggtgggtattattgatagcgtatgtgacaccaaaaccaccccactcaagttgtggctctttccctaaagtagaaaacagaaa

SEQ ID NO: 879763 - DNA, 655 bp, Homo sapiens
ctactcctgctatgggtttaagcctaagaaacgttattcattatgatttggtctttaaataaatcacgaaggtagagagtagagcacaccccatgaatgcactgaggtgccgtaagtctccaacgccagaggtggcaggttggaatttagttcaatcacgaatttgttatgagaactctgacaaccttcagctctaaagtaagcttggaaacacaaagaaactctgcgaaaaatactgaacacagacacacacacacacactcctctcttttaagactggcataaaagatgtaagtgtaccaacaagcaacctccaaagagcaaatgaaacagaaaattcaaacgagtgcctggtaggagttgtaacttcaacaaagtgcctctcatatctgcctcataaacccgtactcatttttcacaactaactcacatagcaccccctcagtgacacctttcctgttctgcctaccagatatatctgcagacctagkgtatcttctcgtccagaacacagggcatctcatacagggggctctatctacagggggctctatgctttgacaggaactgtgaacctatgggcagcagttttttcaattcatgtttgtggctctcattacaaatgtcctgcctcaggcacccagcaggtggtaat

SEQ ID NO: 879764 - DNA, 599 bp, Homo sapiens
caaaaaagtttatcagaatgcttctatctagtttttatgtgaagatatttctttttcaccctaggcttcaatgggctcagaaatatccctttgcagattctacaaaaggactgtttccaaactgctcaatcaaagaaaggttcaactctataagatgaatgtacacatcacatggatgtttctcacaatccttctattttttatatgaaggtatttcctttttgaccatgggcctcaaagygctcaaaatatccatttgctgattccacagaaagactgtttccaaaatcctcaatcaaagaaggattcaactgtatgagatgaatgcacacatcacagagatgtttcttacaatgcttctgtctcttttttatgtgaaggtatttcctttttcgccataggcctcaaagcgctccaaacatccatttgctgattctgcaaaaagactgtttctaaactgctcaatcaaaagaaagctacaactccgtgtgttgaaagcacacatcacaaagacgtttctcagaaggattctgtctagtttttctgtgaggatatttcctgtttcaccatgggccataaagggctcaaatatatttttc

SEQ ID NO: 879765 - DNA, 599 bp, Homo sapiens
caaaaaagtttatcagaatgcttctatctagtttttatgtgaagatatttctttttcaccctaggcttcaatgggctcagaaatatccctttgcagattctacaaaaggactgtttccaaactgctcaatcaaagaaaggttcaactctataagatgaatgtacacatcacatggatgtttctcacaatccttctattttttatatgaaggtatttcctttttgaccatgggcctcaaagcgctcaaaatatccatttgctgattccacagaaagactgtttccaaaatcctcaatcaaagaaggattcaactgtatgagatgaatgcacacatcacagagatgtttcttacaatgcttctgtctcttttttatgtgaaggtatttcctttttcgccataggcctcaaagcgctccaaacatccatttgctgattcygcaaaaagactgtttctaaactgctcaatcaaaagaaagctacaactccgtgtgttgaaagcacacatcacaaagacgtttctcagaaggattctgtctagtttttctgtgaggatatttcctgtttcaccatgggccataaagggctcaaatatatttttc

SEQ ID NO: 879766 - DNA, 651 bp, Homo sapiens
tcaaactgctccaaagatccatttgcagattctacaaaaagtgtgtttccaaactgctcaatcaaaagaaaggttctactctgtgagatgaaagcacatatcacaaagatgtttctcagaaatcttctgactagtttttaggtgaagatatttcctatttcaccataggcctcaatgggctcacaaatatccctttgcagattctacaaaaggactgttttgaagctgctcaatcagaagaaaggttaaactctgtgagatgaatgcatacatcrcaaagaagtttcttagaatgcttctgtctagttttcaggtgaagatatttcttttttcaccataggcctcaaagcgctccaaatatccatatccatattctacaaaaatgctgttcccaaactcctcaatcaaaagagaggttcaactctgtgtgatgaaagcacacttcatgaagaagtttctcagaatgcctctgtctagtttttatgtgaagatatttcctatttcaccttaggccataaagggctcacaaatatccctctgcagattctagaaaagaactcttttcaaactgctaaataaaaagaaaagttcaactctgtgagatgaatgcacacatcgcaaagaagtttctctgaaagcttctgtccactt

SEQ ID NO: 879767 - DNA, 489 bp, Homo sapiens
aagagaggttcaactctgtgtgatgaaagcacacttcatgaagaagtttctcagaatgcctctgtctagtttttatgtgaagatatttcctatttcaccttaggccataaagggctcacaaatatccctctgcagattctagaaaagaactcttttcaaactgctaaataaaaagaaaagttcaactctgtgagatgaatgcacacatcgcaaakaagtttctctgaaagcttctgtccactttttatgtgaagatatttcccttttcaccatacctatcaaagcgctcaaaatatccctttgcaaattctctgaaaagactgtttccaaacttctcaatcaaaagaatggttcaactttgtgagatgaatgcacatatcacaaagaagtttctctgaaaccttctgtgtagtttttatgtgaagatatttcctttttcaccataggcctcaagccactcgcaaatatccctttgcagattttgcaaga

SEQ ID NO: 879768 - DNA, 489 bp, Homo sapiens
aagagaggttcaactctgtgtgatgaaagcacacttcatgaagaagtttctcagaatgcctctgtctagtttttatgtgaagatatttcctatttcaccttaggccataaagggctcacaaatatccctctgcagattctagaaaagaactcttttcaaactgctaaataaaaagaaaagttcaactctgtgagatgaatgcacacatcgcaaagaagtttctctgaaarcttctgtccactttttatgtgaagatatttcccttttcaccatacctatcaaagcgctcaaaatatccctttgcaaattctctgaaaagactgtttccaaacttctcaatcaaaagaatggttcaactttgtgagatgaatgcacatatcacaaagaagtttctctgaaaccttctgtgtagtttttatgtgaagatatttcctttttcaccataggcctcaagccactcgcaaatatccctttgcagattttgcaaga

SEQ ID NO: 879769 - DNA, 625 bp, Homo sapiens
atccaaactgattaatcaaaagaatgcttcacataaaatctctagaagaaaacctaggcaagaccattcaggacataggcatgggcaaggacttcatgtctaaaacacctaaagcaatrgcaacaaaagccacaattgacaaatgggatctaattaaactaaggagcttctgcacagcaaaagaaaccaccatcagagtgaacaggaatcttacagaatgggagaatatttttgcaacctactcatctgacaaagggctaatatcaggaatctacaatgaactcagactaatttacaggaaaaaaacaaacccatcaaaaagtgtgtgaagtatatgagcagacatttctcaaaaaaagacatttatgcagccaatgaacaaatgaaaaaatgctcatcttcactggccatcagagaaatgcaagtcaaaaccacaatgagataccatttcacaccagttagaatggtgatcattaaaaagtcaggaaacaacaggtgctggagaggatgtgagaaataggaacacttttgcactgtcagttggagtgtaaactagttcaaccattgtggaagttggtatggtgattcctcagggatctagaactagaaataccatttgacctag

SEQ ID NO: 879770 - DNA, 669 bp, Homo sapiens
ctgtctagtgtttatgtaaagatatttcctttctcaccataggcctcaaagtgctcataaatatccctttgcagattctacaaattgacagttttcaaactgttcagtcaaaagactgtttcaactatgtgagatgaatgcacacatgacagggaggtttctcagagaacttctgtctatttattatgtgaaggtatttcctttttcaccaaaggcctcaaagcgctcacaaatatctccttgcagattctacaagaacagagtatccaaactgattaatcaaaagaatgcttcacataaaatctctagaagaaaacctaggcaagaccattcaggacataggcatgggcaaggacttcatgtctaaaacacctaaagcaatggcaacaaaakccacaattgacaaatgggatctaattaaactaaggagcttctgcacagcaaaagaaaccaccatcagagtgaacaggaatcttacagaatgggagaatatttttgcaacctactcatctgacaaagggctaatatcaggaatctacaatgaactcagactaatttacaggaaaaaaacaaacccatcaaaaagtgtgtgaagtatatgagcagacatttctcaaaaaaagacatttatgcagccaatgaacaaatgaaaaaatgctcatcttcact

SEQ ID NO: 879771 - DNA, 643 bp, Homo sapiens
tctcacagagttggagatttttcgattgagcagttttgaaatactccttttgtagaatctacaggtggacactttgagagctttgaggcctttggtagaaaaggaaacatcttcacataaaatctagacagaagcaaactgagaaacttctttgcgatgtgtgcattcatctcacatacttaaaacttcctttgattgagcattttggaaatgcactattggtagaatctgcaagtggacatttggagcgctttgaggcctacggtggaaaaggaaatatctttgcataaaatctagagagaagcaatctgagaaacttctttgtgatgtgtgcattcatctcagagagtgaaaccttccttttcattgagcagttctgaaactctttttgttgaatctgcaataagaaattgggagtgctttaaggcctatggtggaaaaggaaatatcttcccataaraacaagacagcagaaatctgagaaatttttttgtggtgtgtgcgttcatctcacagagttgaacctttcttttgattgagcagttttcaaacactctttttgtagaatctgcaagtggacatttggagcgctttgcagcctatggtaacaaaggaaatgtcttcacataaaatctagacagaa

SEQ ID NO: 879772 - DNA, 643 bp, Homo sapiens
tctcacagagttggagatttttcgattgagcagttttgaaatactccttttgtagaatctacaggtggacactttgagagctttgaggcctttggtagaaaaggaaacatcttcacataaaatctagacagaagcaaactgagaaacttctttgcgatgtgtgcattcatctcacatacttaaaacttcctttgattgagcattttggaaatgcactattggtagaatctgcaagtggacatttggagcgctttgaggcctacggtggaaaaggaaatatctttgcataaaatctagagagaagcaatctgagaaacttctttgtgatgtgtgcattcatctcagagagtgaaaccttccttttcattgagcagttctgaaactctttttgttgaatctgcaataagaaattgggagtgctttaaggcctatggtggaaaaggaaatatcttcccataaaaacaagacagmagaaatctgagaaatttttttgtggtgtgtgcgttcatctcacagagttgaacctttcttttgattgagcagttttcaaacactctttttgtagaatctgcaagtggacatttggagcgctttgcagcctatggtaacaaaggaaatgtcttcacataaaatctagacagaa

SEQ ID NO: 879773 - DNA, 601 bp, Homo sapiens
tttctcagtaggcgatactttctctttcactatagtcctcaaagtgatcagaaatatccctttacagattccacaaaagacgtttctaaactgcttaatcaaaagaaagttacaattctgtgagatgaatgcacacatcaccaagaagtttctcagtaggcctctgtctagtttttatgtgaagacaatatctttttcaccatagggttctaggyactcaaaaatgtcccttagcagatcctacaagaacagagtttcccaactgatcaaagaaaagaattgttttcctctgcgagatgaatgcagacatcaaaaaacagtttctcagaaaccttctttatatttttctgtgaagatacttcttttcctgcatatgcctcaaagtgctcacaactatccgtttgcagactcttcaaaaagactgtttccaaatggctgaattaaaagagacgttcaaatctgtgagatgaatgcacatatcacaaagaagtatcttagaaacgttctttatactttgaatgtgaagatatttcctttgtcacaataggcctcaaagtgctcaaaaataccccctttgagattgtacaagaacagagtttcc

SEQ ID NO: 879774 - DNA, 601 bp, Homo sapiens
tttctcagtaggcgatactttctctttcactatagtcctcaaagtgatcagaaatatccctttacagattccacaaaagacgtttctaaactgcttaatcaaaagaaagttacaattctgtgagatgaatgcacacatcaccaagaagtttctcagtaggcctctgtctagtttttatgtgaagacaatatctttttcaccatagggttctaggtactcaaaaatgtcccttagcagatcctacaagaacagagtttcccaactgatcaaagaaaagaattgttttcctctgcgagatgaatgcagacatcaaaaaacagtttctcagaaaccttctttatatttttctgtgaagatacttcttttcctgcatakgcctcaaagtgctcacaactatccgtttgcagactcttcaaaaagactgtttccaaatggctgaattaaaagagacgttcaaatctgtgagatgaatgcacatatcacaaagaagtatcttagaaacgttctttatactttgaatgtgaagatatttcctttgtcacaataggcctcaaagtgctcaaaaataccccctttgagattgtacaagaacagagtttcc

SEQ ID NO: 879775 - DNA, 610 bp, Homo sapiens
tggcagactctacaaaaagagtgtttccaaactgctcaacaaaaagaaagtccaactctgtgagatgaatgcacacaacacaaagaagtttctcagaatgcttctgtctagttttcatgtgaagatatttccttttccaccataggcgtcaaagcgctctaaatatccacttgcagattttacaaaaagagtgtttcaaaactgctcaaccaaaagaaaggttccactctgcgagatgaaagcacacatcacaaagaagtttctcaaaatgattccctgtagtttttatgtraagatatttccttttccacaagaggctgcaaagcgatccaaatatgcaattgcagattctacaaaaagtgtgtttcagaactgcttaatcaaaataaaggttcaactctgtgagttgaatacacacatcacaaagaagtttctcagaatgcttctcgctagtttttatgggaagatttattcttttccaccgtatgcctcaaagtgatccaaatatccacttgcagattctacaaaaagagtctttcaaaactgcttaattaaaagaatggttcaactctgtgagatgaatgcacacatcacaaagaagtttctccga

SEQ ID NO: 879776 - DNA, 548 bp, Homo sapiens
aatgcacacatcacaaagtttttctcagaatgcttctgtctagttttcatttgaagatattttctttcataccataagccccaaagtactcccaatatctaccttcagattctacaaaaagtgtgtttcaaaactgcttaatcaaaagaaaggttcaaacctgtgagatgaatgcagacatcacaaagcagtttctcagaawgcttctgtctagttttgatgtgaagatatttcctttaacaccataggactggaagcgctccaaatattcacttgcagattctacaaaaagagtgttagcaaagacttggaaccaaaccaaatgtccaacaatgatagactggattaagaaaatgtggcacatatacaccatggaatactatgcagccataaaaatgatgagttcatgtcctttgtagggacatggatgaaattggaaagtaatctgaaaaagttttttgtgatgtgtgcattcatctcacagagataaacctgtcttttcattgagcagtttcggaactctctttttgaagaatctgcaagtgggc

SEQ ID NO: 879777 - DNA, 610 bp, Homo sapiens
actctgtgagatgaatgcacacatcacaacaaagtttctcagaatgcttctgtgtaatttttaactgaagatatttccttttccacaatagccctcaaagcgctccaaatatccacttgaagattctaccaaaagagtatttcaaaactacttaatcaaaagaatgcttcaactccgtgtgatgaatgcacacatcacaaagaagtttctcagaatgctactgtgtagtttttatgtgaagatatttccttttccaacacaagccgcaaatgtcttcaaatatccactttcaggttmtacaaaaagagatattcaaaactgctcaatcaaaaggtaggttcgactctatgagttgaatgcatacatcacaaagtagtctctcagaatgcttctgtgtagtttttatgtgaagatatttccttttacaccataggcctcaaagcgctccaaatatccacctggagattccgaaaaaagagagattcaaaactgctcaacaagataggttcaactccgaaagttgaatgcacacatcacaaataagtttctaagaatgcttctgtgtattttttatgtgaagaaatttccttttcctcagtacgccttacag

SEQ ID NO: 879778 - DNA, 610 bp, Homo sapiens
actctgtgagatgaatgcacacatcacaacaaagtttctcagaatgcttctgtgtaatttttaactgaagatatttccttttccacaatagccctcaaagcgctccaaatatccacttgaagattctaccaaaagagtatttcaaaactacttaatcaaaagaatgcttcaactccgtgtgatgaatgcacacatcacaaagaagtttctcagaatgctactgtgtagtttttatgtgaagatatttccttttccaacacaagccgcaaatgtcttcaaatatccactttcaggttatacaaaaagagatattcaaaactgctcaatcaaaaggtaggttcgactctatgagttgaatgcatacatcacaaagtagtctctcagaatgcttctgtgtagtttttatgtgaagatatttccttttacaccataggcctcaaagcgctccaaatatccacctggagattccraaaaaagagagattcaaaactgctcaacaagataggttcaactccgaaagttgaatgcacacatcacaaataagtttctaagaatgcttctgtgtattttttatgtgaagaaatttccttttcctcagtacgccttacag

SEQ ID NO: 879779 - DNA, 561 bp, Homo sapiens
tctagattttatgtcaagatatttccttttctaccataggctgcaaagcactccaaatgttcacttgcagattctacaaaaggagtgtttccaaactgctcaatcaagagaatggttcaactctgtgagttgaacgtacacatcaccaagaagtttctcagaattcttctgtttagtttttatttgaagatatttccttttccaccataagcctcaaagcgctccaaatttccacttgcagtttctgcaaaaagagagtttcaaaactgctcaatcaaaggaaagttttaactgtgtgagatgaatgcacacagcataaggaagtttctcagattgcttctgtctagattttatgtgaagatatttccttttctaacagaggccacaaagcgctctaaaygttcacttgcagattctacaaaaagagtgtttccaaactgctcaattcaaagaaaggttcaactctgtgagatgaacgcacacatcacaaagaagtttctcagaattcttctgtctagtttttatgtgaagatatttccttttccaccatattcctcaaag

SEQ ID NO: 879780 - DNA, 628 bp, Homo sapiens
ttgttaagttttcaggaattttgtgagccagttgatcttacaccagtagcctgaattcagccattgttatttacatcccagaaggggccaaattctcaaatcacggctttttcccccaccgaaagccaattgctaagtatttatcagtacaccattggataaattcacttttttcatgaatggtttaattcattgacacccagattttcagagtaatttctcagctgctttcttgccttttctgccatctcatagcaattcgcccaaatcaaatcaatgttttaagatttaaattagttcctactatcaagatgctcaartataaatgtgtagtcagctaatatgttattgatgatattaaaaaaataaatcacataagataattcgtggaatgcacttaacacattgctttgagccatagaactcattcagtaaatattgtttgttatttttattagcactaatctcctgctattcattaagcacatcttcacttataaaaaaaacgccatactattcttcaatatgacaaattttttcttatgtctccaagtttatctccaatctgaaatctcctctcatcctcctttcccttaaatatttccaggaccagagcaaggctcagctt

SEQ ID NO: 879781 - DNA, 628 bp, Homo sapiens
ttgttaagttttcaggaattttgtgagccagttgatcttacaccagtagcctgaattcagccattgttatttacatcccagaaggggccaaattctcaaatcacggctttttcccccaccgaaagccaattgctaagtatttatcagtacaccattggataaattcacttttttcatgaatggtttaattcattgacacccagattttcagagtaatttctcagctgctttcttgccttttctgccatctcatagcaattcgcccaaatcaaatcaatgttttaagatttaaattagttcctactatcaagatgctcaaatataaatgtgtagtcagctaatatgttattgatgatattwaaaaaataaatcacataagataattcgtggaatgcacttaacacattgctttgagccatagaactcattcagtaaatattgtttgttatttttattagcactaatctcctgctattcattaagcacatcttcacttataaaaaaaacgccatactattcttcaatatgacaaattttttcttatgtctccaagtttatctccaatctgaaatctcctctcatcctcctttcccttaaatatttccaggaccagagcaaggctcagctt

SEQ ID NO: 879782 - DNA, 628 bp, Homo sapiens
ttgttaagttttcaggaattttgtgagccagttgatcttacaccagtagcctgaattcagccattgttatttacatcccagaaggggccaaattctcaaatcacggctttttcccccaccgaaagccaattgctaagtatttatcagtacaccattggataaattcacttttttcatgaatggtttaattcattgacacccagattttcagagtaatttctcagctgctttcttgccttttctgccatctcatagcaattcgcccaaatcaaatcaatgttttaagatttaaattagttcctactatcaagatgctcaaatataaatgtgtagtcagctaatatgttattgatgatattaaaaaaataaatcacataagataattcrtggaatgcacttaacacattgctttgagccatagaactcattcagtaaatattgtttgttatttttattagcactaatctcctgctattcattaagcacatcttcacttataaaaaaaacgccatactattcttcaatatgacaaattttttcttatgtctccaagtttatctccaatctgaaatctcctctcatcctcctttcccttaaatatttccaggaccagagcaaggctcagctt

SEQ ID NO: 879783 - DNA, 617 bp, Homo sapiens; identical to SEQ ID NO: 861405

SEQ ID NO: 879784 - DNA, 617 bp, Homo sapiens; identical to SEQ ID NO: 861406

SEQ ID NO: 879785 - DNA, 605 bp, Homo sapiens
cctgtgttcatgtgttctcattgttcaaatctcacctatgtgtgagaacatgtggtgtttggtttttgtccttgcgatagtttactgagaatgatgatttccaatttcatccatgtcttttcaaaggacatgaactcatcatttttatggctccatagtattccatagtgtatatgtgccacattttcttaatccagtctatcattgttggacatttgggttggttccaagtatttgctattgtgaatagtgccgcaataaacatacgtgtgaatgtgtctttatagcaacacgaaactaacgagaacaargacacaacataccagaatctctgggacacattcaaacagtgtttagagggaaatttatagcactaaatgcccacaagagaaagcaggaaagatccaaaattgacaccctaacatcacaattaaaagaactagaaaagcaagagcaaacacattcaaaagctagcagaaggcaagaaataactaaaatcagagcagaactgaaagaaatagagacaccaaaaacccttcaaaaaattaatgaatccaggagctggttttttgaaaggatcaacaaaattgatagactcctagcaa

SEQ ID NO: 879786 - DNA, 605 bp, Homo sapiens
cctgtgttcatgtgttctcattgttcaaatctcacctatgtgtgagaacatgtggtgtttggtttttgtccttgcgatagtttactgagaatgatgatttccaatttcatccatgtcttttcaaaggacatgaactcatcatttttatggctccatagtattccatagtgtatatgtgccacattttcttaatccagtctatcattgttggacatttgggttggttccaagtatttgctattgtgaatagtgccgcaataaacatacgtgtgaatgtgtctttatagcaacacgaaactaacgagaacaaagacacmacataccagaatctctgggacacattcaaacagtgtttagagggaaatttatagcactaaatgcccacaagagaaagcaggaaagatccaaaattgacaccctaacatcacaattaaaagaactagaaaagcaagagcaaacacattcaaaagctagcagaaggcaagaaataactaaaatcagagcagaactgaaagaaatagagacaccaaaaacccttcaaaaaattaatgaatccaggagctggttttttgaaaggatcaacaaaattgatagactcctagcaa

SEQ ID NO: 879787 - DNA, 605 bp, Homo sapiens
cctgtgttcatgtgttctcattgttcaaatctcacctatgtgtgagaacatgtggtgtttggtttttgtccttgcgatagtttactgagaatgatgatttccaatttcatccatgtcttttcaaaggacatgaactcatcatttttatggctccatagtattccatagtgtatatgtgccacattttcttaatccagtctatcattgttggacatttgggttggttccaagtatttgctattgtgaatagtgccgcaataaacatacgtgtgaatgtgtctttatagcaacacgaaactaacgagaacaaagacacaacataccagaatctctgggacacattcaaacagtgttkagagggaaatttatagcactaaatgcccacaagagaaagcaggaaagatccaaaattgacaccctaacatcacaattaaaagaactagaaaagcaagagcaaacacattcaaaagctagcagaaggcaagaaataactaaaatcagagcagaactgaaagaaatagagacaccaaaaacccttcaaaaaattaatgaatccaggagctggttttttgaaaggatcaacaaaattgatagactcctagcaa

SEQ ID NO: 879788 - DNA, 582 bp, Homo sapiens
aacactttgaggcttatggtgaaaaaggaaatatcttcacattaaaattagactcatgttttctgggaaacttctttgtgatgggtgtatgcatctcaaagacttgaatctttcttttgattgagcagtttggaaacagtctttttggacaatctgcaaagggatgtttcggagtggtttgaggcatgtgatgaaaaaggaaatatcttcatataaaaactagacagaagcattctgagaaaccctttgtgatgcatgcattcaactcacagagttgaatattctttcattgagcagattggaaactgtctttttgtagaatatgcaaagtgatatttgtgagctttctgcrgcctattgtgaaaaaggaaatatccagaaataaaatctagacagaagccttctgagaaacttcgttgtgatgtgtgcattcatcacacagaattgaacttttcttttgattgagcagttttgaaacagtcttttcatagaatctgcaaaggaaaatttgggaacgctttgaggcttatggtgaaaaagaagtatcttcacctaaaaacttgacagaaacgttctgagaaa

SEQ ID NO: 879789 - DNA, 582 bp, Homo sapiens
aacactttgaggcttatggtgaaaaaggaaatatcttcacattaaaattagactcatgttttctgggaaacttctttgtgatgggtgtatgcatctcaaagacttgaatctttcttttgattgagcagtttggaaacagtctttttggacaatctgcaaagggatgtttcggagtggtttgaggcatgtgatgaaaaaggaaatatcttcatataaaaactagacagaagcattctgagaaaccctttgtgatgcatgcattcaactcacagagttgaatattctttcattgagcagattggaaactgtctttttgtagaatatgcaaagtgatatttgtgagctttctgcggcctattgtgaaaaaggaaatatccagaaataaaatctagacagaagccttctgagaaacttcgttgygatgtgtgcattcatcacacagaattgaacttttcttttgattgagcagttttgaaacagtcttttcatagaatctgcaaaggaaaatttgggaacgctttgaggcttatggtgaaaaagaagtatcttcacctaaaaacttgacagaaacgttctgagaaa

SEQ ID NO: 879790 - DNA, 620 bp, Homo sapiens
gaattatcctttgcagattccacaaaaagactgtttccaaactgctcaattaaaagaaaggttcaaacctgtgagatgaaagcacacatcactaagaagtttctcagaatgcttctgtctagtttttaagtgaagatatttcctctttcaccataggtctcaatgggctcagaaatatccctttgcagatcctacaaaaggactgtttcccaactgctcaatcaaaacaaaggttcaactctgtcagatgaatgcacacttcacaaacaaatttctcaaagtgcttctgtctagtttttatgtgaagatatttccttttccaccataggcctcaaagaactcaaaatgtccatttgcagataytacagaaagatgctttccaaccagctcaatcaaagaaaatattcagctctgtgaattgaatgcacatcacaaagtagtttcccagaatgcttctgtcttgtagatatgtgaagatatttccttttccaatatatgccacaaagtgctccaaatatcaacttgcagattttgtaaaaagagtgtttcaaacttcccaatataggaaatgttcaactctgtgagatgaatgcacacaacacgaagaagttcctcagcat

SEQ ID NO: 879791 - DNA, 662 bp, Homo sapiens
aagtgacagagaagctgaattcaactggctgaaacaataaggaatttagtatctcccataacaagaggtctgggttatgtctgccctatagttggttctttcagtttgttcaacagcatcatgaaagatccggatgcttttcatctttcctgttcccaagatcacaagatggtggcaacatttccaggtgttatatcctcacaatcatgagcagaggcagaaaaggcaggagggagtcttacccagaagcccctcagcagactttcccttttgtcttattggctagaattgtgaatcatgtgtcacgcctaagtcaaccaccacaggcaagagaagraagtcattgtaattgacctagaacaattttttttttttttttggagacggagtttcacttttgttgcccaggctggtgccatctcgccccagcctcccgagtggctggattacaggcacgcgccaccatgcctggctaattttgtatttttagtagagatggggtttctccatgttggtcaagctggtctcaaactcccaacctcaggtgatctgccagcctcggcctcccaaaatgctgggattacaggtgtgagccactgcgcccggctgaaccatcttttttttaaagggctctccttctgttgcccaggctggagtgcagt

SEQ ID NO: 879792 - DNA, 624 bp, Homo sapiens
gtgtatgtgctatgtggcagtttgtgttctaggtatgggacacaaaagcacttttccttcatgaagttcacttgcagtttatttggataaaaaacaattttaaaatatacagactattatagtagatattgctaaatgccacgcatgatattttctaaaytcaatttggctttctctaagccttcctctcacattagtaataatatataagctttttcctccaattaaatctatatggaaccatccagtattaaattatatggcctcaggagataaaaaataacaaagaattattcccagtggtagtgtcaacttttctacaaagttaattaatcactgcagatgaatgtggctggaacaggtgacagattgatgctgactgaaaagtaacaactttgaaaatcccaagcagataacataatttattggtgaaaatcacaacacactcataattagtaaatctttcagagtacataggaattgaaagaaaggaaaacaaaataaacatctaatttatatactgaaaatccttgttatctgaacatattattccatgtttaataaggtttgctgaatttgataatatattacaaaatattttcaacatggagatttttattttcc

SEQ ID NO: 879793 - DNA, 643 bp, Homo sapiens
cagatttatcccaccaagcctctcctatacaaaaatgatgaaatctactctggaaagagctcagtcttggttaatttcattctagaaagtctgggcaaaaacacacacaaaaaaaaacaaaaaaaaatagtcaaatgattttccagattaatatggtttgaatggatctgaaagttctctctsctagctcccctctccatttctcttttgagttctcactgtctgtttctgcatctctgtttctctataagttgtatgcatattctaaaatacctgcgtcttgccactaaactttgtatgagtcatcacttatgaagatgaggcttctaggattccctctctataaatagattatttttaaggagtcaattcttaagccagtatttgtaaaacattttccttgaagtctaatgacagaaaaaagttacttgtgcccttggaagttgtggaaacacaaccatagcatcctacaaaaagcatgcaattcatttaaagtttttttttaaatcttaaaatttcatgtgaatttgttttttaaattattgacataatttaaaatttgtccatattgattttaatataagaattttatttttcaatatctatgaattaaattaaatatgtgtatatgtatggacatcta

SEQ ID NO: 879794 - DNA, 718 bp, Homo sapiens
caggcagagcaggttcttaaatctagtatccttaaagcaaccaaaagtttttcaacgagtttcataatcattgccagtacatccttcctaatggctgatccgcattccagctggctttatataaatctctttttattgttttctttgcctgaatgaacacagggaccaactgttccctgtcactcatctattacactttcagacacttgaagcctgagaatcgcttctaattttctaattaatcaatcatactttcatatatmctaaatttagtttccattgatggaacagccacagattgctggcaccatccttggcactggtgggcagtggtcaggagggaggaagatgacaaagtcattggaattggggcacttgaatccaatagaagcatgacagatgacaaccaggcagagtagttaagtgcattctctgaagcgaattcctgaaataaataggaaggctgtgggtaaaataaggcaataatccaacagccctcttacccagctgggcaacctccttagacaaataaacagcatccttttaaccatctacacaggctcacagttgagccaatttatctgtatcatctacaaacaatatttcacttaatctaaggcagaacagcagcacaaacattgaggtctgggtctgtaaccatttcttcaacactgaaatgtttatgggaacgttcaaggctaagaaagaaagaacatgt

SEQ ID NO: 879795 - DNA, 589 bp, Homo sapiens
cttctctcctctctcactgggaaagagactctagcaactgacgaaggtgaggaagatttaatcacacattcctactccattgagagctgctgcttcttgtgtttttttttttttttctctgtgcttaccgcttatttcttccacacacctacttcaggcatagccaagagtaaaggatagtggtgctggatgtgggccccattagggaagatttaggctttatcctttgtttgtgttctccacttgtgatttgtattaaattcactttgggacacataccacaaggtacaagagggctttttgattgaaaagtgaaaggagcctattagaaatgtgaaatcataatttctggaggtttggggatttaaaaaaatgtggacagctgctggctaaagaactgagaaacgtttaagtcagaaaaatattctaggcaacggagccagagaacytaaatcagtggcaaatactgctaagccatcattacatactaaatagttattagtcatctcttcgttttaaacagaaagcttaagggtctgaagtccaaagcttagactccattctttctaacaaatcaaaaatcccatcc

SEQ ID NO: 879796 - DNA, 590 bp, Homo sapiens; identical to SEQ ID NO: 863807

SEQ ID NO: 879797 - DNA, 662 bp, Homo sapiens
ctgtgacatttagttgtaatggagattatagtgccttgccttgacctgcatttcattctatacaaacacaagtgaaaacttgaataataagtctatctttattctacatacaaggaggacttccaaaagtatgtggaaaaaatggaattaaaagataaaaatataaatataaacttttatttctcaccataagctccatcaagttcaagacacttttgtgagcaatgatatcagccatttagtstatgtctacagaactgagggtcctaggaaattgaaccatgtcaatgcagatttttacactattaaatgaagaagaagtctcatttagggatttttttttaagattaggaaacaaaaagaagtcagaagaagccaaatgaggacttcagtgtagatgcctaatgatttcccatcaaaactctcacaaaattgcccttgtttgatgagagaaataagcaggaggagctttgctttggtggagaagaactctctggtaaagctttcctggatgtttttctgctaaagctttggctaactttctcaaaacactctcataataagcaaatgttattgtcctttggccctttagaaagtcaaaaagcaaaattccttgagaatcctcaaagaaattgtggtcattatctttgctcttactggcc

SEQ ID NO: 879798 - DNA, 513 bp, Homo sapiens
gttggaaagaatatgggcttcagaaacaaagatttatataatttttcagcttcttacaagttggtattgggcaagttgtttaaatttctgagtctcggtctaccaaattgcaattaatgatactaactttacaaggtaaattgtgaggatcaaataaagttttataaccatgtgtccagtcaaattaactttyatatacataaatgcaacaaagttagcccctatctttctgtttccaagattcaacaaactcaataccttttatatttacacttagaatgttttctcacagtgattcctaaaaaatttttatttataagcattctctaaatccttcttcattctacctacagttcaaagacataagtaatacaaacactgtaattctaaatcatataagagaccagtaaaacaaaatcaagctcctggtggtttatgtattattttatttttaaacttttcacatcacatttttaaatgacattacattggaaattatttactaagctttgg

SEQ ID NO: 879799 - DNA, 617 bp, Homo sapiens
ctatcactgtacttacctggtgacattgaaactatttctctatgtcctgcagaatggaagctagccaggatgtctagcttatttttctctgtctctataatgccttttacattttctggcacatattaggaactctataaatattggtttaactgaacaaaactaaaatctaaagaataaaattaggccaaatcaaaaatgtaaaaaaaaaaaaaagagaaaaaatagtttcaaaatagaattataggcaatgactaaaagggaacataaataagggtagaatggctcaatgatcatgaatttcagagctaagaagttaaaaattagtttgaaatacaggcaaataactgaattcttaagactaacttctaggttgaaactgcctcccaagacagactctcttcagagcagcaaagccaggaaaaagcaaaccacttgaacatttctcygacagtcattcatatctatggcccacagactcccttgcaagtgcccataaagtccaaaagaatatgttttatagaacaggcctataatcaggcggctcaggggtacattatccttaacccccagagtagtctgaaatggaaatttcaaacaatgtaattatctgtttt

SEQ ID NO: 879800 - DNA, 617 bp, Homo sapiens
ctatcactgtacttacctggtgacattgaaactatttctctatgtcctgcagaatggaagctagccaggatgtctagcttatttttctctgtctctataatgccttttacattttctggcacatattaggaactctataaatattggtttaactgaacaaaactaaaatctaaagaataaaattaggccaaatcaaaaatgtaaaaaaaaaaaaaagagaaaaaatagtttcaaaatagaattataggcaatgactaaaagggaacataaataagggtagaatggctcaatgatcatgaatttcagagctaagaagttaaaaattagtttgaaatacaggcaaataactgaattcttaagactaacttctaggttgaaactgcctcccaagacagactctcttcagagcagcaaagccaggaaaaagcaaaccacttgaacatttctctgacagtcattcrtatctatggcccacagactcccttgcaagtgcccataaagtccaaaagaatatgttttatagaacaggcctataatcaggcggctcaggggtacattatccttaacccccagagtagtctgaaatggaaatttcaaacaatgtaattatctgtttt

SEQ ID NO: 879801 - DNA, 622 bp, Homo sapiens
aatccccatctctactaaaaatacaaaattagccgggcgtggtggcacatgcatgtaatcccagctacttgggaggctgaggcaggagaatcacttgaacttgggaggtggaggttgtggtgatccgagatcaggccattgcactcccagcctgggcaacaagagcaaaactccatttaaaaaaaaaaaaagaaaaaagaaaaaggtgagaaataattgagagaaaagagaattggagtaagaaagagggagaaaagtagatgcagaaaagccttcaacaaaattcaacagcccttcatgctaaaatctctcaataaactaggtattaatggaatgtatctcaaaataataagagctatttatgacaaacccacagccaatatcatactgaatgagcaaaaactggaagcattccctttgaaaactggcacaagacaaggatgccctctctcacyactcctattcaacaaagtgttggaagttctggccagggcaatcaggcaagagaaaaaaataaagagtattcatttgggaaaagaggaagtcaaatttccatttgcagatgacatgattgtatatttagaaaaccccatcttctcagcccaaaaatcttcttaagctg

SEQ ID NO: 879802 - DNA, 635 bp, Homo sapiens
cacaacacgagaacttcatgaagcatacacaagtttcaatagccaaatcgatcaagcagaaaaaaggatatcagtgattgaagatcaacttaatgaaataaagagagaagacaagactagagaaaaaggaataaaaatgaacaaagcctccaagaaacataggactatgtgaaaaaaccaaatctatgtttgattagtgtacctaaaagttatgaggagaatggaaccaagttggaaaacactcctcaggatattatccaggagaacttccccaacctagcaagacaggccaacattcaaattcaggaaatacagagaacaccayaaagatactcctcaagaagagcaaccccaagacacataatcatcagatttaccaaggttgaaatgaaggaaaaaatattaagggcagccagagagaaaggttgggttacccacaaagggaagcccatcagactaagagtggatctctctgcagaaaccctacaagccagaagagagtgggggccaatactcaacattcttaaagaaaagaatttttaacccagaatttcatatccagccaaactaagcttcataagtgaaggagaaataaaatcctttacagacaagcaaatgctgagagattttgtcac

SEQ ID NO: 879803 - DNA, 635 bp, Homo sapiens
cacaacacgagaacttcatgaagcatacacaagtttcaatagccaaatcgatcaagcagaaaaaaggatatcagtgattgaagatcaacttaatgaaataaagagagaagacaagactagagaaaaaggaataaaaatgaacaaagcctccaagaaacataggactatgtgaaaaaaccaaatctatgtttgattagtgtacctaaaagttatgaggagaatggaaccaagttggaaaacactcctcaggatattatccaggagaacttccccaacctagcaagacaggccaacattcaaattcaggaaatacagagaacaccataaagatactcctcaagaagagcaaccccaagacacataatcatcagatttaccaaggttraaatgaaggaaaaaatattaagggcagccagagagaaaggttgggttacccacaaagggaagcccatcagactaagagtggatctctctgcagaaaccctacaagccagaagagagtgggggccaatactcaacattcttaaagaaaagaatttttaacccagaatttcatatccagccaaactaagcttcataagtgaaggagaaataaaatcctttacagacaagcaaatgctgagagattttgtcac

SEQ ID NO: 879804 - DNA, 635 bp, Homo sapiens
cacaacacgagaacttcatgaagcatacacaagtttcaatagccaaatcgatcaagcagaaaaaaggatatcagtgattgaagatcaacttaatgaaataaagagagaagacaagactagagaaaaaggaataaaaatgaacaaagcctccaagaaacataggactatgtgaaaaaaccaaatctatgtttgattagtgtacctaaaagttatgaggagaatggaaccaagttggaaaacactcctcaggatattatccaggagaacttccccaacctagcaagacaggccaacattcaaattcaggaaatacagagaacaccataaagatactcctcaagaagagcaaccccaagacacataatcatcagatttaccaaggttgaaatgaaggaaaaaatattaagggcagccagagagaaaggttgggttacccacaaagggaagcccawcagactaagagtggatctctctgcagaaaccctacaagccagaagagagtgggggccaatactcaacattcttaaagaaaagaatttttaacccagaatttcatatccagccaaactaagcttcataagtgaaggagaaataaaatcctttacagacaagcaaatgctgagagattttgtcac

SEQ ID NO: 879805 - DNA, 702 bp, Homo sapiens
gaatcaatattgtgaaaatggccatatttccctaagtaatttatagattcaatgctatccccatcaagctaccactgcctttcttcatagaattgggaaaagactactttaaacttcacatggaaccaaaaaagagcctgcatagccaagacaatcctgggcaagaacaaagctggaggcatcacgctatctgacttcaaactatactacaaggctacagtaaccaaaacagcatggtactggtaccaacacagatatatagaccaatggaacagaacagaggcctcagaaacaataccacacaactacaaccatctgatctttgacaaaccagacacaaacaatcaatggggaaaatattccctatttaataaacagtgctgggaaaactgggtagccatatgcagaraactgaaactggaccccttccttacaccttatacaaaaatcaactcaagattgatcttgacttaaatgtacgacctaggaccataaaaatcctaaaagaaaacccaggcaataccattcaggacgtagtcatgggcaaagacttcatgtctaaaacaccaaaagcattgtcaacaaaagccaaatttgacaaatgggatctaattaaactaaagagcttctgcaagcaaaaggaactatcaccagagtgaacaggcaacctgcagagtgggagaaaatttttgcaatctatcc

SEQ ID NO: 879806 - DNA, 702 bp, Homo sapiens
gaatcaatattgtgaaaatggccatatttccctaagtaatttatagattcaatgctatccccatcaagctaccactgcctttcttcatagaattgggaaaagactactttaaacttcacatggaaccaaaaaagagcctgcatagccaagacaatcctgggcaagaacaaagctggaggcatcacgctatctgacttcaaactatactacaaggctacagtaaccaaaacagcatggtactggtaccaacacagatatatagaccaatggaacagaacagaggcctcagaaacaataccacacaactacaaccatctgatctttgacaaaccagacacaaacaatcaatggggaaaatattccctatttaataaacagtgctgggaaaactgggtagccatatgcagaaaactgaaactggaccccttccttacaccttatacaaaaatcaactcaagattgatcttgacttaaatgtacgacctaggaccataaaaatcytaaaagaaaacccaggcaataccattcaggacgtagtcatgggcaaagacttcatgtctaaaacaccaaaagcattgtcaacaaaagccaaatttgacaaatgggatctaattaaactaaagagcttctgcaagcaaaaggaactatcaccagagtgaacaggcaacctgcagagtgggagaaaatttttgcaatctatcc

SEQ ID NO: 879807 - DNA, 702 bp, Homo sapiens
gaatcaatattgtgaaaatggccatatttccctaagtaatttatagattcaatgctatccccatcaagctaccactgcctttcttcatagaattgggaaaagactactttaaacttcacatggaaccaaaaaagagcctgcatagccaagacaatcctgggcaagaacaaagctggaggcatcacgctatctgacttcaaactatactacaaggctacagtaaccaaaacagcatggtactggtaccaacacagatatatagaccaatggaacagaacagaggcctcagaaacaataccacacaactacaaccatctgatctttgacaaaccagacacaaacaatcaatggggaaaatattccctatttaataaacagtgctgggaaaactgggtagccatatgcagaaaactgaaactggaccccttccttacaccttatacaaaaatcaactcaagattgatcttgacttaaatgtacgacctaggaccataaaaatcctaaaagaaaacccaggcaataccattcaggacrtagtcatgggcaaagacttcatgtctaaaacaccaaaagcattgtcaacaaaagccaaatttgacaaatgggatctaattaaactaaagagcttctgcaagcaaaaggaactatcaccagagtgaacaggcaacctgcagagtgggagaaaatttttgcaatctatcc

SEQ ID NO: 879808 - DNA, 627 bp, Homo sapiens
gagactaacatttgagtcagtgggctgggagaagccgacccaccctcaatctgggtgagcaccatctaatcagctgccagtggggctggaataaagcaagcagaaaacttggaaagagcagatttctgagtcttctggcctttatctttctcctgtgctggatgcttcctgccctcgaacatcagcctccaagttcttcagcttttgaactcttggacttataccagtggtttaccatgtgctctcaggcctctggccacagactgcaccatcagcttccacatttttgaggttttgggackcagactgagccaacactggcttctttgctcctcaacttgcagacaacctaccataggattttaccttgtgattgtgtgagtcaattctccttaataaactcccttcacatatacatatatcctactagttctgtctctctagagaactctgaccaatatatatactatatatatatatatagtatttttgatcttataacatacagaaatatattttacaataatggcacaaagaagttgagtgggaataaacctgtattggagaaacacaaggacatcagataataagtcaaattcacaggaagaaaggataagaacctgaaag

SEQ ID NO: 879809 - DNA, 615 bp, Homo sapiens
gatcgggggccccaatgttgggagaggagggttccaggggctaggaatctgtgcagctcaccatttctgtacctggtccacactttaggatttggtcacatgccttgctcagatggagatgcctctgttcttttcctgagccttcagtgtcacaatcttatcacaaaaggaaatgacattatgctggtgtacctggccctgactgtaggatgctggctactaacaattactgctkcctttttttaagtgctcataggcttatatttcataattccattttaattttgatggtgatcaatataaaactctaaataaaggcaagagaggatcagtaaagtgaaaggatgattccatgactggggagaaaatatggatattttcagatggggtattagtccattctcacgctgctatgaagaaatattcaagactgggtaatttataaaggaaagaggtttaattgactcacagttctgtagggctgggaagacctcaggaaacttacaatcatggcagaaagggaaacaagtccttttttcacatggcagcagcaagaagaagtgcataggaaagcaggggaaagtcccttataaaaaccatcagatctcgtgagaa

SEQ ID NO: 879810 - DNA, 550 bp, Homo sapiens
tcgattggattgatgcatgagattcacaattccaactccattgcctcttggtgtgtgattcggaacctcaacagtgggttctgttaatgtggaaggctgataatcctcactttgatctgagtttgcatacaacagccacgattttccctgtgtgctgggctctattttggcactctgtagcacttgagagcttcatacaatgtgcatgcaactcataatagtctctggccatcctacaagttgaagacccagaaccttagtttttgctctaagactaactacaagagtcatatcttcargtatgagtcatcattccacctgtaagctgtgcccatgtgtttttcccaattccaactgtggagacagaccaggcacaagggttgcatcacctgggtgctggccagagatatgtcacaattgccactttgggcagggtcaaaatctccccttagtgcaggggcaattcaggagggtcatatcacctaggtggtgggcccagcgatatgtcacaatgccccccatgggcagggccaaagcaggacagttatat

SEQ ID NO: 879811 - DNA, 578 bp, Homo sapiens
cactcaaatctcatcttgagttgtagttcccataatcccctcatatcatgggagggacttggcaggaggtaattgaaaaatgggggcaattcccccttgctattcttgtgatagtaagttctcatgaggtctgatggttatataaggggctttcccttttgctcagttctcggtcttctccttgctgccaccatgtgaagaaggaagtatttgttttcccttctcccatgattgtaagtttccagaggcctctacagccttgctgaactgtgagtcaattagacctctgtcctttataaataacccagtcttrggtatgtctttatagcagggtgaaaacagactaataccgtaaattggtaccacagagagtgctactgctataaaaatacccgaaaatgtggaagacactttggaactgggtaactggcagaggctggaaccatttgaagggctcaggagaagataggaaaatgtgagaaagtttggagcttcctgaagacttgttgaatggctttgattaaaatgctgagagtgatatggacaataaagtcagtgctgaggtagtctcagatgga

SEQ ID NO: 879812 - DNA, 555 bp, Homo sapiens
cttgtagtatagcttgagatcaggtagcatgatacctccagctttgttctttttgtttaggattgtcttggctatacgggctcttttttggttccacatgaaatttaaagtagttttttttctaattctgtgaagaaagtcagtggtagcttgatgagaatagcattgaatctataaattactttgggcagtatggccattttyacgatattgattcttcctatccatgagcatggaatgtttttcgatttgtttgtgtcctctctcattttcttgtagttctccttgaagaggtcattcacatctcttgtaagttgtattcctaggtattttattctatttgtagaagttgtgaaagggaattcactcatggtttggctctctgtctattatttgtgtataggaatgcttgtgattatcagcttaaaaagactttgggctgagacaatggggttttctagatatacaaaaatgtcatctgcaaacagagataatttgacttcctctcttcctattagaatatgctttacttctttttcttgcctgatttccctg

SEQ ID NO: 879813 - DNA, 555 bp, Homo sapiens
cttgtagtatagcttgagatcaggtagcatgatacctccagctttgttctttttgtttaggattgtcttggctatacgggctcttttttggttccacatgaaatttaaagtagttttttttctaattctgtgaagaaagtcagtggtagcttgatgagaatagcattgaatctataaattactttgggcagtatggccatttttacgatattgattcttcctatccatgagcatggaatgtttttcgatttgtttgtgtcctctctcattttcttgtagttctccttgaagaggtcattcacatctcttgtaagttgtattcctaggtattttattctatttgtagmagttgtgaaagggaattcactcatggtttggctctctgtctattatttgtgtataggaatgcttgtgattatcagcttaaaaagactttgggctgagacaatggggttttctagatatacaaaaatgtcatctgcaaacagagataatttgacttcctctcttcctattagaatatgctttacttctttttcttgcctgatttccctg

SEQ ID NO: 879814 - DNA, 656 bp, Homo sapiens
tttaacaaggaatgttctttgctaacaatttaaaaattgtatgatttatttctttaattttggcatagaaaaataaatctgtcattaatttaatattttattgtaaatttggaaataatagactagattcctacttggagatattataaaagcattgtctaattttgttgtattactcagtttyatttagttcatttttaatgatatttttattcaattttatctcttgcagcaatggaattgttttacatattgcaatttatagtctaaagcaaaattagaggtgatgtctttatttttccacatctcacaatactcgtgttgctctcttttaataagaaataatttagttaaattatttttcttgctagctactgattatattctaaaaagaaaatagaaaagatgggggaatgcaagaatgtagttttgttattatttctcccatcatttcaattgctaaattcaattatcaaggtaaatgaatccatgcaagtttttatattaatgaaacaaggtttcatctcaagattacaattgattattataaaaatggtttattaaaatgcaagaaaatacagatagtcttatatgtgttcattaccagttgctttataaatatagattagatattgttctaaattaaaggactcaaa

SEQ ID NO: 879815 - DNA, 634 bp, Homo sapiens
cctggaatctctcagctttctggtgccaccacattccccagtgccagccatggaggctgcttgtggtatgcctggccgagccacagcctcacagggaactgacacctatgccggtgcctggagctgccctccccactgaaaccaacatgcctggctatgcgcagtggctggaccccacagttgctcactcacaaacccctccttgctccgtgcctgtctcacccttggcaggtgtggcatccaggccagtaggatgagctgaacacagcctgccaggctgaatgggtaaaatgagacaaacaggccctagcaaaactcaggcaaaggcaccactggccacggaggtttctggctggaaaagcaacacccgaatgatctcgtgacattatcacatactatatactgtatgtaattgtacaagctgtacttttgtacaactggcagtgtagtaggattgtttataccaacatcacytcaaatatgcattgcactattatgtttagatggctatgacatcactaggtgacaggaattttttagctctattgtaatcttatgggaccaccatagtttatatggtctgtcattgttatactgctcatgactgtataaacacatacaaataagttcaact

SEQ ID NO: 879816 - DNA, 566 bp, Homo sapiens; identical to SEQ ID NO: 879273

SEQ ID NO: 879817 - DNA, 606 bp, Homo sapiens
tgtgggggttggagcccctacacagagtcccttctggggcgctgcctagtggagctgtgagaagagggccaccatcctccagactccacaatggtggatcaactgaaatcaactgacagcttgtactgtgcacctggaaaagccacagacattcaatgccagcctgtgaaaggagccaggaaggaggctgtaccctgcaaagccataggggcaaagatgcccaagaccatgggaacgcacctcctgcattagtgagatctggatgtgaaatctggagtcaaaggagatcattttggagctttaaaatttgactgwcccactggatttcagacttgcatgggccttgtaacccctttattttggccaatttcacccatttggaactgctgtatttaccaaatacctgaatccccatcgtatccaggaagtaactagcttgcttttgattttacaggctcataggcagaagggacttgcctcgtctcagatgagactttgtactgtggacttttggattaatgctgaaattagttaaaactttgggggactgttgagaaggcatgattggttttgaaatgtgaggacatgagatttggagagcccagg

SEQ ID NO: 879818 - DNA, 582 bp, Homo sapiens
cttatttggatgccttttgcttctctctcttgtctgattgccctggccaggacttaaaatactatgttgaataggagtggtgagagagggcatccttgtcttatgccgattttcaagtggaatgcttgcagcttttgccygttcagtgtgatgttagctgtgggtttgtcattgatggctcttactgttttgaactatattccttcaatgccaagtttctttagggttttaacatgaaggattgttgaattttatcaaaagccttttctgtattcattgatataatcatatggtttttgtttttagttctgtttatgtgatgagtcacatttattgatttgcatatgttgaactaaccttgcatcccagggattaaagtctacttgattgtggtggctaagctttttgatttgctactggattcagtttgctagtatttggttgaggatttttgcatctatgttcatcaaggatattgggtggaagttttcttttttttttgttgtgtctcttccaggttttggtatcaggatggtgctggcctcattgaatgagttgaggaggagtagctcctcctcaatt

SEQ ID NO: 879819 - DNA, 587 bp, Homo sapiens
aaattggtaacctggtccccaagcctactctgcatcatatgcagcaaatgtgaaaatataaattctaaaaacaaaacaaaattgagacatattagcatggaggcagtcattgcagacataaatgattctactctatctcaacagtcctacgttttatgctggctgacacaataagtgatcttcatattgggaagccagaatcatcaaatgtattcacatatcaaaacatcacattgtacaccttacatacacaatttttgtttgtcaattatacctcaataaacctggaaaaaatatattcagtatgtttgaggaggttaaaaatgatgtgataaattaggaagtgttctagtcagtaaagaacaaattaaatataactcagaactatttgaaaaattcggatrttcagaacttagagttcacatagtggaggttttattgctttaggatattctattacgaagaatgtaaaacctattatggctaataattttttttacttaaaggcaaactttctaatgctgatattattgtcttttccaatttagattctatgtaaacatcactactttttaagttagttcatc

SEQ ID NO: 879820 - DNA, 646 bp, Homo sapiens
gttggcactgttgtaagcaaacaagttatgggcaaggttcttgtcaggagaattattgttcatattgagcatattaagcactttaagggctgaggcagcttcctgaaacttgtgaaggaaaatgatcagaaaagaagaaagccaaagagaaagtcacctgggttcaagagaagtgccagcctgctccacccagagatgcacactttgggagaaccagtgagaaggagcctgagctgccggaacccaktcgctatggattcatggcaaataggtatagaaaagtaaaagacctctggactgcaaaagtgtttcttttcattgagtggaagtgtggtgtcctctcccccaaagaaatatttaaagcaaattttaattgtgtcctaatttattgcgtaatgtctttactattcaaattcaatgtatatcttgctgaaagatgtgaagaggcttattgtgcaacaaattactcaattggttagaaaatgccacatgctatctatgaaatatttgtactggcttcgaagatagttcctccaaatcatcatgcaagaaataacataatttaccccaataataaaaaaaaagtgcctgaagacagaaatacccctaaggacagccagagacaagggggaggggcaggactacc

SEQ ID NO: 879821 - DNA, 583 bp, Homo sapiens
ggcacaagcaatcctcctgcctcagcatcccaagtagctgggactaaaggcgcacaacaccacgcccaggtaattgtaacatgctgtagagaccagtctcgctatgttgcacaggttgacctggaactcctagcctcaagcaatcttctcacctctgcctcccaaagtgctgggatyacaggcatgagccaccacgcccagctatgaccatcctatttcaaccacactgatttccttcctctatttcatatgtgccagtcatgcttgctcctccctgaaggtgttttcatttacgattccctttgcagtctcttccctagatatccacgatttgctcccttagctcctgcaaatcttcattcataaattatctctttgttggggcgccatgtcacacacctgtaatcctagcactttggggagatgaagcgggaagataacttgagccaaagagttagaggctgcagtgaactagcattacaccactgcatttcagtctgggtgacggcgagaccctttctctaaaaaagtacaaataaaagtaaaaccatctccttcttgaggcctatcctaaccacctcat

SEQ ID NO: 879822 - DNA, 624 bp, Homo sapiens
tactttggactatggacttttgagttaatgctaaaatgagttaagacttttagagactgtcaggaaggcatgattgcttttgaaatgtgaagacatgagatttgggaggggtcagggtggaatgatatggtttgcctgtgtcctcacctaaatattatcttgtagttcccataattcccatgtgttgtgggagggaccctgtggaagacaattgaatcatggggtggtttcgcccatactgttttcatgttagcaaataagtctcaggagatctgatgattttataaggggtttatccgttcamttggttctcattctgtcttgtctgctgccatgtaagacatcccgttcaccttctgccatgattgggaggcctccccagccacatggaaccgtgagtccattaaacctctttttctttataagctacccagtctcaggtatgtctttatcagcagcatgaaagcagactaatacagaaactaaataattgccaaagattgctagtaagtgctgtaactgggatggaaactgattcctgagctcaagattttcttgctcagctagactgtccaagtaatctgcccaagaaagctagcagaaatgtattctatatacatccac

SEQ ID NO: 879823 - DNA, 504 bp, Homo sapiens
ccaagactgaaccagaaagaaactgattccatgaacagaccaataacgagctctgaatttgaatcagtaataaatagcccaacaaccaagaaaagtcttgggacctgatgggttcagtcgaattctaccagatgttcaaagaagtactggtagcattcctacagagaccactccaaaaaactgaggaggaaggactcctcaccaactcattgtgtgaggccagcatcatcctgataccaaaacttggcagagatacaacaaaaaaagaaaacttcaggccaayatccttgctgaacattcatgtaaaaatcctcaacaaaatactcacaaactgaatcccagcagcacatcaaaaagctaatccacaatgatcaagcaggcctcatccccgggatgcaaggttggttcaacatacacaaatcaataaaggagattcatcatataaagagaactgaagaccaaaaccacgtgattatctcaacagacacagaaaaggtttcaata

SEQ ID NO: 879824 - DNA, 640 bp, Homo sapiens
gaggtatacaaagagtaaaaaacatgctttaactgtctcataatctcactttctagtactgtattcttcttgctaggcttggcacagtagcaggtgctgcagccaacacagtcaggtctctatactcagaggcctttgacgggctggggaatgttctctctggttgatgttacacagatcattttaggtctcctctgattggggtggggtaagaatgagcactagtactttctacttatttctacctatgttctgcrtgtgtttccctatgggttaggtaactggattgtcccccaactttaagaacacacatggcctgtgaattattgaaattcagacaagcttttgttctttccagtttgggaacttgtcctatgtgtatactatttaagaacagggaaaaacatttttagaaggcaaacatgaatttttatatatcagccctgactctttctttctctgcaacttctgttgatgcttatcctctcttgactctatcagtaggtatgtatggggcagtgattaaggctgtggagttttgcattcaagtagacttgagttccaacacgtccctccacttagcaacttcatgaccttggataatgtacttaactgaggaagtctaagttttctaatgtgt

SEQ ID NO: 879825 - DNA, 654 bp, Homo sapiens
taggcatttcagaaaaagaaaagagagaggaagaaatagtgactatagttttccataattgaaaggcaccagactccagattatgaagttatgtgagcaaataaagattgttgtttaaagccaatacattttcaggagatttgttatgtcccagtagatacacctggtacacctggcctaggtcatggtctatactccagctgccagcggtggtaagtggcagccttccatcaagagtcatgtagtatataattttccagctataagaaaagggtttgcagccaggcatggggctcatgcctgtaatcctagcactttgggaggctgaggtgggcggatcacttgacgtcagaagttggagaccagcctggccaacatagtgaaaccctgtctctactaaaaatacaaaaaatagcctggcatggtggcayatgcctgtagtcccagctactcaggaggctgaggcaagagaatcgcttgaacctgggaagtgcaggttgcagcgagctgagatcaggccattgcactccagcctgaaagacagagggagactctgtcttaaaaaaaaaaaaaaaaaaaaaaagccaataaaaacaagaaagaaacaaacaaaaaacaagaaagaaaaggctttgcttaaaaatctgtgagtca

SEQ ID NO: 879826 - DNA, 629 bp, Homo sapiens
ggcctgagaccttgcttcactgggggacagggctgccatcctcgaaggccagggtctgggcctctgggccgggagctcctccatcagcttgcagccctgggggaggcttgcagccctggaggccactccctctagtgacagaacccatacctctgggaactgcttcctctgcctgcatgccccaaacttggacttggaggttgtagatggccgtggcagggcccttgcctggcccctatcctcctgcagcctggcctaggcatgggtgacttacccagtgccagcaggctgcctcagcccgtgcccactaaaaaatttgttcctggccgggcgcagtggytcacgcctgtgatcccagcactttgggaggctgaggcaggtggatcgtctgaggtcaggtgtttgagaccagcctaaccaacatggtgaaaccccgtctctactaaaaatacaaaaattagccgggcgtgatggcaggcgcctgtaatcccagctactcaggaagcttaggcaagagaatcacttgaacctgggaggcggaggttgcagtgagcggagattgcgccgctgcactccatcctggacaatagagcaagactccgtctcaaaaaaaaaaaaattgttcccat

SEQ ID NO: 879827 - DNA, 629 bp, Homo sapiens
ggcctgagaccttgcttcactgggggacagggctgccatcctcgaaggccagggtctgggcctctgggccgggagctcctccatcagcttgcagccctgggggaggcttgcagccctggaggccactccctctagtgacagaacccatacctctgggaactgcttcctctgcctgcatgccccaaacttggacttggaggttgtagatggccgtggcagggcccttgcctggcccctatcctcctgcagcctggcctaggcatgggtgacttacccagtgccagcaggctgcctcagcccgtgcccactaaaaaatttgttcctggccgggcgcagtggctcacgcctgtgatcccagcactttgggaggctgaggcaggtggatcgtctgaggtcaggtgtttgagaccagcctaaccaacatggtgaaaccccgtctctactaaaaatacaaaaattagcygggcgtgatggcaggcgcctgtaatcccagctactcaggaagcttaggcaagagaatcacttgaacctgggaggcggaggttgcagtgagcggagattgcgccgctgcactccatcctggacaatagagcaagactccgtctcaaaaaaaaaaaaattgttcccat

SEQ ID NO: 879828 - DNA, 606 bp, Homo sapiens
tattgaatattagctttaagtttatagtgaggtgttggagaagtaactagctaaaagtcatttgtgtagtgctgggttttttctccattggttacggtatgattactagtaatgcagcatccttagtctgcctgaaaattatactagcctcatttattttgtaatgcatttgttataactatgtttctcattggtaatacatttctagcaaaatattgtatttgcctactgctaccttaaaagctaacttcaaacttaagtcttaaaatatttcacagctttgaaattttaagtgacttacagccgaaggaggaaaaaagggttatctatcgtggaaggtatgtaggaaccactttatagatcgctaaagataatttagtccgatttaatctattacmcttatcaggaaactagcacctctgcatccttctggggaacctaaaatgcttatatccagggcctggcactagtgatgtgaacctggattcagttctttttggagcgcttccatgttatatgttctgaccgtcatagtactgtctcccagtttgactgcttttgcttctgttgttttactccagacaaggaattcacagtagatggttc

SEQ ID NO: 879829 - DNA, 648 bp, Homo sapiens
aattcacatatattgtaaaaccagactgcatgtggaacaaactgtgtgtttgaactaattaagtattcaaagaaatatttaatatttcttattcacccaccttgcccccttttctcctcctttctcgatcagtaaatatttactggatgtttccagaatgtgaatgttgcataaaaacaagtatatgaaattgtctttgctatcaaggataatataactgaacgtaatatattagsccactttgctgctttaggaagaatactaaggtgagcccagtttaatctttaacatattgttacctctcatttctgcttgttcaaatccaagctgcaactcagtgccatcttcttcatgattatctttactcctacccctctctacctccattcccccaaaaagtgatctcatactcctgtgagcatccttagcatttatgcagtcttttcttttttttttttttttattattatactttaaggtttagggtacatgtgcacaatgtgcaggttagttacatatgtacatgtgccatgctggtgcgctgcacccactaactcatcatctagcattaggtatatctcccaatgctatccctcccctccccccaccccacaacagtccccagagtgtgatgttccccttcctgtg

SEQ ID NO: 879830 - DNA, 570 bp, Homo sapiens
gccctgttctcatcctcaaaggcaaagtgaaattcaaggaagacactgcatgggagcaaatcccagtaccttcctctggcagtctttctagagtcctacattgttcttttcttccttttctttgaacaaataggtgcatagaatgaattatgtgaattctaaaatgttaaatttcaaacagcagttttaaaatatattaatttaaacatagcaaatgatttatttgcagttttactcctccaaatataggagaacttcttctagttaatttttggcttttactacgcagatttctacctctcttgtagttgcaaatgcataaaaaatgcatccaaatctatttactcattcatttcatatctatatactaaggaatcaaagtgcatgyctcccctaaattattttgtcttttctcttatcgctcttcctaacacccatgccatttgaatgtattctctcctcagatccttattattttcttctttgatgtatagccatttatgttgtatcacaccctcttaatacattatgaaatctgtgaatacaatatatatgtatcttaatcatttc

SEQ ID NO: 879831 - DNA, 622 bp, Homo sapiens
aggaggtgagtggtcagtgagtgaacattactgtctgagctctacctcctgtcagatcagctgcagcattagattttcatagaagcccaaatcctattgtgaactgtgtatgcaaggtatctaggttgcacactccttaagagaatctaactcatgcttaatgatctgaggtgggaccatttcattctgaaaccatgccccctccccacccttggtccatgaaaaaattgccttccacagaattggtccctgatgccataaaggttggggactgctgatctaaagggagaggtagactcaacaaaataaaagaggacacaaacaaatggaagaatattccatgctcatggataggaagaatcaatgtaatgaaaatggccatactgcccaaggtaatttatagattcawtgccatccccatcaagctaccaatgactttcttcagagaattgaaaaaactacttcaaaattcatatggaaccaaaaaatagcccacaatgccaagtcaatcctaagccaaaagagcaaagctggaggcatcacgctacctgacttcaaactatactacaaggctacactaaccaaaacagcatggtgctggtaccaaaacattgatctgtat

SEQ ID NO: 879832 - DNA, 652 bp, Homo sapiens
caaaagaagtagccttcacctgctaccagaccatggcaaggaggtggatgtataatgcttcatgttataggagagttaagaatggtgactaggccaggcgcggtggctcatgccagtaatcccagcactttcagaggccgaggcaggtggatcatgaggttaggagatcgagaccatcctggccaacatggtaaaaccctgtctctactaaaaatacaaaaaaaaaaaaaattagctgggcatggtggtgggcgcctgtagtcccagctacttgggaggctgaggcaggagaatcgcttgaacccaggaggcggaggttgcagtgagctgagatcgcaccactgcactccagcctgggtgacagagtgaggttctgtcmcaaaaaaaaaaaaaaagaaagaaaaaggaaaaggatgatgatcaataagttaatctacagtatgtattgagaacttaatttataaaacaaaatatcaaagaatggaaggtattgggaaatagaataagacagtaataagaaaaaaaaaacaaaaaaagaatcagatggtgaaatgtggcttcactctttattatctttgttttctcagaaaatttatttaactcaatttcttcacttaaacaataaaagacttaataatctagacttaaaaaa

SEQ ID NO: 879833 - DNA, 581 bp, Homo sapiens
ttatactttaagttctagggtacatgtgcacaatgtacaggtttgttacatgtgtacacactgccatgttggtgtgctgcacccattaactcgtcatttacattaggtatatctcctaatgctacccctcccccctccccccaccccacaacaggccacggtgtgtgatgttccacttcctgtgtccaagtgttctcattgttcaattcccacctatgagtgagaacatgaggtgtttggttttttgtccttgcgatagtttggcactactcacaatagcaaagacttggaaccaacccaaatgkccaacaatgatagactggattaagaaaatgtggcacatatacaccatggaatactatgcagccataaaaaatgatgagtttatgtcctttgtagggacatggatgaagctcttttttttttctttaatatggaacttgcatcagtgaaggaataaagagtgtattggtttgttattgctgctgtaacaaattgtcacacatttagtgggttaaaacaacacaaacttattatctttcaattctggaagccagaagtctgaaataggtttcctcggg

SEQ ID NO: 879834 - DNA, 685 bp, Homo sapiens
tccttaattaaataatgaacaaagagttttccttgttgtctatcaagactttctaaaacaacatggtctgccagctgcggtggctcacgcctgtaattccagcactttgggaggctgattggggtggatcacttgaggccaggagttcgagactagcctggccaacatggtgaaaccgcatctctagaaaaatacaaaaattagctgggcatagtggtgtgcacctgtagtcctagctacttgggaggctgaggcatgagaattgcttgaacccrggaggcagaagttgtagtgaaatgagatcacgccactatgctccagcctgggtgacagagtgataatctgtctcaaaaaagtaaaataaaataaaataaaataaaacaacatggtttccctatttgatagatggagaaacaagtcccagaggttaagtgacttgcccagtgaagaaaagacagagctgccgcttgtactcagattgtctggatcctaaaatcaatagcctaaaaaggtaataatctgcctcttacaccccaccaaaaaattctgttcaattctgttgagctgagagagaagaacagagagactggaaatttgaagaaaggggaatggccccagaggatttccctttgtgaattcaatctacccttactcaggtgggagattataggttatataaccacct

SEQ ID NO: 879835 - DNA, 559 bp, Homo sapiens
cagccaaagcaaaaattataacaccctctataacactatcttatgtggttttaaatctattatagaaaatatttaagacaactatgttatacacagtagaagataaagggactaaaaggaatgtgaggcttctatatttcactccaattggcactctggtgggttatgttaatagtggagaaggttatatatagatgggcagggagtatgtgggaaacctctgtgttttcccttcaattttgctttgaaactaaaattgctctaaagtctaataaaaaatgcatctwccagatcaaaagctgcatgccacatactagaaactacattgaatacccttgtaaagacagcatatccagccagctgcaactggacctaccactgtgccttaaatcagtaattggctcacttaagtttgttatttcctcaacacatccatagcatcaaccaattttacatccttctagtgactatttcaccacatgtcctacacaccagagttattgcacaagccactgcatctttttctaattgtaccttgtccctatttaccccagataaa

SEQ ID NO: 879836 - DNA, 647 bp, Homo sapiens
agcaaagctcccttcatggaacacacggctgggaggacctcgccattctggaaaggcaaggctcagtgggggagatgtgaatgctcttccctgatttgggggcttggtcctagggagccaaggctgtgcatcacgaacggaggccttgggggaaggtgggcagtggagtagcagcttggactcagtgccatcctgcagaacttctttgatctcagctttcccttggtaacataggggtaataattgtccttccccattaggcaaagaagcaagagaacagtgttcctgaaagaaaaaaggctgtgcagaaaactgtagcatacttgtcaagtctgtgcactttaggtcaggtatggttcttgcctcttaagaaccgtgtcaacctggataagttgcttaacttttggaaccttgtttttgtcattgtaaaagggagggagcatttgaccatgagaatacaaggacagtgatcatggacggaggccatggtaagcytcttccccagattcccctaccctagtgctttagcccgggacctgtcatgttataggctctggataaatcatggctgaattcactgaaaaaaatagtcaccattcactgaatacctactacatgccatgtagtttataaaggaaagaggttta

SEQ ID NO: 879837 - DNA, 619 bp, Homo sapiens
gtttttgggtggagagtcgtatagatatctatcacatccacctgatccttagctgagttcaggtcctgaatatctttgttaattttctacctcgatggtctaatattgtcaatggttaaagtctcccactattgtgtgggagtctaagtctctttgtaggtttctaagaacttgctttatgaatctgggtgcatatctatttgagatagttagctcttcatgttgaattgagccctttaccattatgtaatgtccttctttgtctttttttaatctttgttggtttgaagtctgttttgtcagaaactaggattgcaacccctgcatttttctgttttccatttgcttggtaaattttcytccctgcctttattttgagcctatgtgtgtctttgcacgtgaggtgcatctctcgaggacagcataccaatgggccttagttcttcatacagcttgccactctgtgtcttttaattggagcatttagcccacttccttttaagattagtactgttatgtgtgactttcatcctgttaccatgatgttagctggttattttgcatacttgtttatgtggtttctccatagtgtcactggtctgtgttcctcagtgtgttt

SEQ ID NO: 879838 - DNA, 552 bp, Homo sapiens
gtctctgtctccttcagttttgctctgatcttagttatttcttgtcttctgctaacttttgaatttgtttgctcttgcttctatagttcttttaattgtgatgttagggtgtcaattttagatctttcttgctttctcttttgggcattcagtgctataaatttccctctacacgctgctttaaatgtgtcccagagattctggtacattgcgtctttgttctcattggtttcaaagaacatctttctttctgcctttatttcgttatttacccagtagtcattcaggagcaggttgctcagtttccatgtagttgtgtggttttgagagagtttcttaayactgagctctagtttgattgcactgtggtctgagagactgtttgttgtgatttctgttcttttgcatttgctgaggagtgttttacttccaattatgtggtcaattttagattaagtgcaatgtgctgctgagaagaatgtatattctgtagatttggggtggagagttctatagatgtctatttggtctgcttggtccagaggtgagttc

SEQ ID NO: 879839 - DNA, 593 bp, Homo sapiens
ctcccacattattctggatactacacctgaccctcatgactgtatctctctgatccacctggcattcaactcatttccccatatttccttctttcctgttcctcaccctgatcacatttagtttattgatggcagttccgccaggcctaatcgccactcgccagcaaagscaggctatgctatcatatcttccacatctatcgttgaggctaccactctgcccccctctactacctctcagcaagtcaaattagttgccttaactcaagccctcactcttgcaaaaggactacgtatcaatatttatactgactctaaatatgcctttcatgttctgcaccaccatgctgttatataagctgcattaatgcctctttaataaaaactctgctcaaggccgctttacttccaaaggaaggtggagtcattcactgcaaagaccatcaaaaggtgtcagatcccattgctgtaggcaaggcttatgctgataaggtggctagacaagcagctagctttccaacttctgtccctcacggccagtttttctccttcatatcagtcactcccatctactcccctgctgaaacttccac

SEQ ID NO: 879840 - DNA, 618 bp, Homo sapiens
acatattcagattctgttttttataatttactttttaaatagttataaaaatatcatttaaatatataatttatctttctgttattaaaacagatattctagcaagaaacactagagggcattcactgctttgttcaaagacattggtccactttatatgcagctgttcatatgtgatgcaatttgttaatatgcttgagaaattaagtatgaaaattttcattttctaaaatatctcagcatattattgaatactgaaacaacaaaaaccaaaaagtggataagtaggtcacagggcacaagaatatcgaatttttcatattggaaacaaatctttaaataatctttaatgtgacttaatttccyttaaaataagtcaacaaataatacaaaatatcaagtttttagcatttctagcgcacaaaaaatcttgatataattttagacttacctttattttaaacgcacctggaatttaaaaacacaaataaattatgtagaagcatcaatgagttaaatcattcatttcccaattgtcattttattataagatatcactgaaattatcctgcttctatttccattctcaagttttcttattacacctacctatccttt

SEQ ID NO: 879841 - DNA, 446 bp, Homo sapiens
cactaacctccactgtctgatgggtttctgtactcctaaatttggagtattgcaggggctattgcatgcttttactaggccttgggcttttaggtccttaaaaatcttttggagtcattgttggggctcgggtctaagggggtactgcttttgttagggaaaggaggcggaatcctttagtttaacttgaacaggatgggcattctttgctcgtccatattgtccttctgttgccyagacttcaggattaattccttcctcaagcaggggacagcaaatgtgtgttccttctcctatgttcaggggtataatggcccctgcttttgctagaatgtctctccctaacaagggagtggggctttcaggcataattagaaaagcatgtgaaaagagtaaagttccccagtcacaacttagtggctgggagaagtatctagtgactgcct

SEQ ID NO: 879842 - DNA, 446 bp, Homo sapiens
cactaacctccactgtctgatgggtttctgtactcctaaatttggagtattgcaggggctattgcatgcttttactaggccttgggcttttaggtccttaaaaatcttttggagtcattgttggggctcgggtctaagggggtactgcttttgttagggaaaggaggcggaatcctttagtttaacttgaacaggatgggcattctttgctcgtccatattgtccttctgttgcccagacttcaggattaattccttcctcaagcaggggacarcaaatgtgtgttccttctcctatgttcaggggtataatggcccctgcttttgctagaatgtctctccctaacaagggagtggggctttcaggcataattagaaaagcatgtgaaaagagtaaagttccccagtcacaacttagtggctgggagaagtatctagtgactgcct

SEQ ID NO: 879843 - DNA, 579 bp, Homo sapiens
tattgatctgttcagggattcagtttattcctggttcagtcttgggatggtgtatgtgtccaggaatttatctatttcttctagattttctagtctatgtgcatagatgtgttcataatattatctgatggttgtttgtatttctrtggggtcagtggtaatatccccttatcatttctgatcgtgtttatttgaatgttctctcttttcttctttattagtttagctagtggtctattttattaatgtttttcaaaaagccagctcctggactcattgttcttttgaatggttttttatgtttctatctcctttagttctcctccgattttggttatttcttgtcttctgctagctttgtgattggtttgctcttggttctctagttcttttaattgtgatgttaggttgttaacttgagatccttcaaactttttgatgtggacattcagtgctataaatttccctcttaacactgccttagctgtgtcccagagattctggtatgctgtatctttgttctcatcagtttcaaagaacttcttgatttctgccttcaattcattatttaccccaaag

SEQ ID NO: 879844 - DNA, 681 bp, Homo sapiens
taaaaaagatactttttttgccaaaaaatttgttttcgctgtcatgcaagttctcctgggtaagcacctttggtcttgttttgtgcatagcatacagagcagcaattgtatatagccaaagaaagcctgtttttttttcttgttaatttatttaagttccttgtagattctggatattaccctttgtcagatggatggattacaaaatttttctcccattctgtaggttgcctgttcactctgatgatagtttcttttgctgtgcagaagctctttagtttaattagatcccatttgtcaattttggcttttgttgccattgcttttgtgttttagtcatgaagtctttgcctatgcttatgtcctgaatggtattgcctaggttttcttctagggtttttatggttttaggtcttatgtttaaatctttaatctgtcttgagttaatttttgtataaggtrtaaggaaggggtccagtttcagttttctgcatatggctagccagttttcccaataccatttattaaacggggaatcctttccccataaggatatgaacagacacttttcaaaagaagacatttatgcagccaacaaacatatgaaaaaaacctcattatcactggtcattagagaaatgaaaatcaaaaccacaatgagatactatctcacactagtca

SEQ ID NO: 879845 - DNA, 681 bp, Homo sapiens
taaaaaagatactttttttgccaaaaaatttgttttcgctgtcatgcaagttctcctgggtaagcacctttggtcttgttttgtgcatagcatacagagcagcaattgtatatagccaaagaaagcctgtttttttttcttgttaatttatttaagttccttgtagattctggatattaccctttgtcagatggatggattacaaaatttttctcccattctgtaggttgcctgttcactctgatgatagtttcttttgctgtgcagaagctctttagtttaattagatcccatttgtcaattttggcttttgttgccattgcttttgtgttttagtcatgaagtctttgcctatgcttatgtcctgaatggtattgcctaggttttcttctagggtttttatggttttaggtcttatgtttaaatctttaatctgtcttgagttaatttttgtataaggtataaggaaggggtccagtttcagttttctgcatatggctagccagttttcccaataccatttattaaacrgggaatcctttccccataaggatatgaacagacacttttcaaaagaagacatttatgcagccaacaaacatatgaaaaaaacctcattatcactggtcattagagaaatgaaaatcaaaaccacaatgagatactatctcacactagtca

SEQ ID NO: 879846 - DNA, 674 bp, Homo sapiens
attttcaagctttcagatcaaaatcacctaggaaacttgtaaagctgtatgctataccatatctgcaaatttgattgacaaaacatctagagctaaaaaatatgcattttaaacaaatatcccaggtgattcctagcacattaaatttggggaaccatgaccctgatacctaatttttttttattcttccctgctgtcttgtctttgytataattatcgtttctcataaatcctctcataataacaagacattgctttgctttcagtgtcactaacatttctgtaatcaccatgattatcaggctttgctcgattcgtatgtatacgtagatctttgaaaaatacagtacctgtgttaacattcaaaatcagaatcaaaattaagactcagaatcagaatcactcctgcctgattccagcttcaaatttcaagctgtagctgttccgcatatgaccatattctgggcattggtgctactgccactgtgtgtgcacccacacactggtgacaagagtgatcctctggactgccatttaacctttttgggaaaaaaaagagaatgaaaggacattcgtccccttcagtagcatggcatcaaaggtccccagtgtcttgtaatgccacagcagatacttacagccttggtgaccaaagacctcccacaatcttcacc

SEQ ID NO: 879847 - DNA, 637 bp, Homo sapiens
gggactctaggcgcccgccaccacgcccggctaattttttgtgtttttagtagagatggggtttcaccatgttagccaggatggtctcgatctcctgaccttgtgatccgcctgcctcggcctcccatagtgctgggattacaggcatgagccaccgcgcccagcctatctgtgatcttaaccaatttatcttgccttttctgatgcatgactaagaacttatggggaattcaaatagatcactaatataaagacaatttaaagtgcttgacttgccagtgttcttatagcaaaactttcataargtttatgacacttctttgatttctaaggttttaggggtacaggcatatcttattatagagtatttttcctctttcatttaaagatttaatttactacgcatcatttccaagctccttgaccttttctggatccccaccaccacctgccctaatggatactgacaccagctgtgaatatgtataatataaactggccaaaacacatggcctgggcaggttaataacttgctgccccttcaaactgatattatttaaatttgtatttaacacttgaacactgtcataggctgatcctaaaatgaaccccaataatccatgcctcttggtagtta

SEQ ID NO: 879848 - DNA, 647 bp, Homo sapiens
ctcgttttttctgttcttattagcctacccagctacttaggtcataagtcaaatacttgagttcctaagctaactaggattgcaatgtattgtgggctgcaacaaaatgcagcaggacaaccctaaagaaaacacctaaagccactacccaacaaccgataggcaatgtccaggaagactgtgaccccatagtactcagcctgtgaggaaccgggggaagggacctgtgcattagggaataaattgctttttgtaactgtgctgggtgtgcctgcccaccggacasccaatcttgcaagaccatcacgaaaaatctcacttttactgttctctgggtctctgagtccattctttgggcttggatggtgagtttgtttctcacaatagcaacaaatgcaacaacaacagaagctaatttttattgggcacttactatatgccaggatctgcttaaagcactttacatgtgttagcttattcaatcctaaaaataattcttctaatcacatgcctccacattgtcttaagaaactcatcctgtgttcaaaagctggataattttccaattttacagaatcaggttgacatactctacaatcctagtcagcatgataaagtgacactcatacattcatttgaaagacttt

SEQ ID NO: 879849 - DNA, 507 bp, Homo sapiens
caagagcaccagctactgactgccaggttagcatttcacccgctagacccaggcgccaggattctgaacaaatacatttggaaatgccacttggtctatcctggagtcagctttggataagtctctaactagggacctcaggtgccttttcctgtcaagcccagagtaaccccttatatgccatggaacagaaaactttaatagctttatgattccaaatttgtcaccgtgctccaagaaagatgtcataaaatctagaaatttgcatgcacacatattcactttatgcaataatccaaacccataaacatgggtgcatgccttatttcgtcatctaaaaccaaagatccaaaagtgccrtgaacacacagactctgctcagtggagatgaagaccgctcatgccacatttttcacaaaacaaccctcatttaatccttggtacaaacgtcacgagctatttgctcatgtcttttatacgtggagaaagagcagatttgggagattg

SEQ ID NO: 879850 - DNA, 616 bp, Homo sapiens
ggagacacatgctctaacacattgcttttggatggctaaacagcatccatcctgtggggccatgtgggaatatgatgcttttgcttgactcaccacttctacccctggggaatttatctgcagatacttgtgtatgtgtacaaaaatgtgcacacaaagtcattcactgtggcactgtttaagcttcaaaatattggaaacaacaaaattgtcaattagaatattgctaaataaatgatggtttactcatacaattaaatgttatgtggctgaaaaaaagaatgaggacactatgtaataatttggaaaaaattctaaaatatattactaagtgaaaaaacaaagtagggaagaatgtttcagaaaaggmtaacttttgggtaagaaaatgggagaaataagaatatatatttgcccagcgtggtggctcgtgcctgcaatcccagcactttgggaggccgaggtgggcggatcacctgagttcgggagttcaagaccagcctggccaacatggtgacaccctgtttgtactaaaaatacaaaaattagctgggcatggtgttgggtgcttgtaatcccagctattcaagaggctgaggcaggagaattgcttgaa

SEQ ID NO: 879851 - DNA, 697 bp, Homo sapiens
gctatactatcaaatggccagcaaccacaaagaataaaagtaatggtatcttttgcctttgagtctagtgaatcttgataaaatagagttcagctttaaattacatagtacttaacaaaactttatgttagttgctcagaaaacatattatgtaagcagctatagtgacaagaacagagattcaaattctatgatgaccaagataagacattaaataaaatgtgtggtttctccaaactttgcttgaatacaacaagcttgtgcacaggtgttgaggactactgtagcaaagggaacacatgtgacaatacagtgctcagaaaaaagacaaaacactaccaccatgacaaagacactggacttggtgaaaaattacactgctctagactgtttgcttgtaaaagatggcttagtaggacctcttccattccccaagcaaaggtttcagttcaaatgttgtatttgttttcascagcaaatccaggtgcatttttaaaagctgctcaaaaaagattctctttttaaaatgtactccaaggaatgggtggaagaaaaagtgctgctcctggcaaaacgttccatgcatgactaaagaaaagtgtcatttggttggtggttccctaagagttttgaaatgaactcacattttttttttttttttttttttttgcacaggaatgcacactcttctcttaac

SEQ ID NO: 879852 - DNA, 591 bp, Homo sapiens
aaattcattattttcaatttgctgcttcaaattctattaattgcactgaagaacaaaagtaggcacttctctttcataattttatggtttggacatagcctcttgagagccactttgtcattacaaggtttgatacattcaggagctttgaacatggcttcagatttcagagatagaaatggtaaaatgatagattttataacaaagcaacacatatgggtagatgttcttataataaagataatctgtcgtttggtttaagttatgaaataattcagtgaaattattgtaaacaatgctaagaagggaaaaaccaagaaagcaagcaagaaagctaatttggacctggaagagcctgattttgagaatcaagattgtcaaggtaattaaatcaagtgagaattgaaatkacttgtttagttagtcttactatcagaaaagaaaaaatagaatgatgaaaatagaacacaataaaaacaagcattttaatcaataaacctgacagtgattataatgaaaaagatgtctaaatcaggatacatactaataaaagaaaaaagggagtgctcccaagtgcttgatcttaaagtc

SEQ ID NO: 879853 - DNA, 593 bp, Homo sapiens
ttggattagggctcgccctaatcatgtatgaccttatcttcacttgattacatcttcaaagaccctactttccaaataaggtcaccattacaaatactggaggttaggacttcaatatgtatgttggggagacacagtttaatttgcaacaaagcacatcaattttatttttctcttcaacacaattgcaaagtcagaagtcttctggaagccaaaaataactattataatattgcttgagatgcatggtgttctrtaattaagagttataaaatttaatagtaatacattccataagagcattttactcactaaaatggctgatgatatgtcaaagttcaattagtagaaatgttaacttttgaattattctttgttagggactgggaagaagtgacctgttgtacatcagagctgtttattataagaaagacatttttctactgtcttaaaaaacaaagacagttgatttatcctttaaccaaaaagcacttttgcaaggaatctttatatgagtgatatatacaatttagttaaattaaaatatctgccacatatattgaaataagtatttcccattattgaaaggaaac

SEQ ID NO: 879854 - DNA, 593 bp, Homo sapiens
ttggattagggctcgccctaatcatgtatgaccttatcttcacttgattacatcttcaaagaccctactttccaaataaggtcaccattacaaatactggaggttaggacttcaatatgtatgttggggagacacagtttaatttgcaacaaagcacatcaattttatttttctcttcaacacaattgcaaagtcagaagtcttctggaagccaaaaataactattataatattgcttgagatgcatggtgttctgtaattaagagttataaaatttaatagtaatacattccataagagcattttactcactaaaatggctgatgatatgtcaaagttcaattagtagaaatgttaasttttgaattattctttgttagggactgggaagaagtgacctgttgtacatcagagctgtttattataagaaagacatttttctactgtcttaaaaaacaaagacagttgatttatcctttaaccaaaaagcacttttgcaaggaatctttatatgagtgatatatacaatttagttaaattaaaatatctgccacatatattgaaataagtatttcccattattgaaaggaaac

SEQ ID NO: 879855 - DNA, 671 bp, Homo sapiens
caattaaacctttttcttcttagtctcaggtctgtttttatcaacagtgtgaaaatggactaatatagtaaattggtaccagtagagtggggcattgctaaaaaggtacctgaaaatgtggaagcggctttggaactgggtaacaagcagaggttggaacagtttggaggactcagaagaagacatgaaaatgtgggaaagtttggaacttcctaaagacttgttgaatggcrttgtccaaaatgatgataatgatatgacaataaaatcctggctgaggtggtctctgatggagacaaggaacttgttgggaactggagaaaaggtgacccttgttacgttttagcaaagagacaggcagcatttagagacttgtggaactttgaacttgagggagatgatttagggtatctggggggagaaatttctaagcagcaaagcattcaagatgtcacttgggtgctgttaaaggcatttagttttacagggaatcagagcatagaagtttggaaaatctgaagcctgactatacagtagaaaacaaaaacccattttctggggagaaattcaagccagctgcagatatttacatacgtaacaaggagccaaatgttaatccccaagacaataaggaaatgtctatagggcatgttagagacctttgaggcagg

SEQ ID NO: 879856 - DNA, 612 bp, Homo sapiens
accagaaagattgaagaacaagaggtttttttaaattttttaagaaagcagaagtttaattactttcccatagatgtcccgaagccagcagcccactgggctgctatgatagctccaagacggcatttcatggcttattacaactgatgaaagaaggcaaacaacgtttttctccaaataactcargttattctctatttttttttttttttttgagaaggagtttcactctttttgcccaggctggagtacaatggtgcgatctcagctcaccacaacctccgcctcccgggttcaagagattctcctgcctcagcctcccgagtagctgagatcacaagcatgtgccactatgcccggctaattttgtatatgtagtggagacagagtttctccatgttggtcaggctggtctcgaactcacgacctcaggtgatctgcctgcctcggcctcccaaagtgctaggattactggtgtgagccaccgtgcctggtcgtatgctctattttttaaagattttttaccccaaatcagatgttaaacatgggtagcactgacaaagaatgtgtgtcttttggaccacaaggagatatcctgttgacacagtgggc

SEQ ID NO: 879857 - DNA, 570 bp, Homo sapiens
cttaagtgggcccctgccccctgagtatcctaactgggagacacctcccagtaggtgcagactgacacctcataaagccgggtgaccctctgagacgaagcttccagaggaaggatcaggcagcaacatttgctgttctgcaatatttgctgttctgcagcctctgctgctgatacccaggcaaacagggtcgggagtggacctccagcaaaatccaacagacctgcagctgagggacctgactgttagaaagaaaactaacaaacagaaaggaatagcatcaacatcaacaaaaaggacatccacaccaaaaccccawctgtaggacaccatcatcaaagaccaaaggtagataaaaccacaaaggtggggagaatccagagcagaaaagctgaaaattctaaaaatcagagcgcctcttctcctccaaaggatcacagctcctcaccagcaatggaacaaacctggacggagaatgactttgacgagttgacagaagtaggcttcagaagatcggtaataacgaacttctccgagctaaagaaggatgttcgaacccattgcaaagaa

SEQ ID NO: 879858 - DNA, 653 bp, Homo sapiens
aaccttgcccacagaaaaaataaagtgtactgaactgacacagaaaaaggtaggaaaaggcataatgagatgacctaccagcaagcctggagcctaggctgcaggtttgaagagatgttttaggtttctccatttttgtttcttcccagcctcagagaaaggaatatcagaaatgaaacagagaccaaaacatattattttgctgggcatggtggctcatgcctataatcccagcactttgggaggccaaggtgggcagatcacctgaggtcaggagttcaagaccagcctggccaacatggtgaaaccctgtcttttctaaaaatacaaaaattagctgggtgtgatggcaggtgcctgtaatctcagctattcgggaggttgagacaggagaatggctggagcctgggaggcggaggttgcagtgagccatgatcacagcactgcactccagcctgggtgactgagtgagactctgtctcgaaaaaaaaaaaaaaamatatatatatatatatgtatatatatatatatcgtgtaagtagccacacaaaattggtacccattttctaaagactatcaatccctgtacactaaaaacatggcattccttcaaaaacagtggctgtttgtgaaaagcagggcagtggtcaacc

SEQ ID NO: 879859 - DNA, 659 bp, Homo sapiens
cattttctaatttatttgtgtagaggtgtttatagtattctctgatggtagtttgtgtttctgtgggatcagtggtgatatcccctttctcattttttattgtgtctatttgattcttctctcttttcttctttattaatctggctagcggtctatctattttgttagtcttttaaaaaataccagctcctggattcattgattttttttatgtgtttttttgtgtctctgtctcctttagttctgctctgatcttagcaatttcttgtcttctgctagctttagaatttgtttgctcttgcttctctagttcttttaattgtgatgttagcatgtcaattttagatctttcccattttctcctatgggcatttagtgctataaatgtccctctaaacactgctttagctgtgtcccagagattctggtacatggtgtctttgttcttactggtttcaaagaacttytttatttctgccttaatttcattatttacccagtagtcattcaggagcacattgttcagttcccatgtagttgtgaggttctgagggagtttcttaatcctgagttctaatttgattacactgcagtctgagagactgtttgctatgatttccattcttttgcatttgctgaggagtgttttactttcaagt

SEQ ID NO: 879860 - DNA, 628 bp, Homo sapiens
tttattcttgttgtagtgattgtgaatgggagttcatatgatttggctctctgtttgtctattattagtgtataggaatgtttgtgatctttgcacattgattttgtatcctgagactttgctgaaattgtttatcagcttaaggagatttagggttgagaccatggggttttctaartatacaatcatgttatctgcaaacagagagagtttgacttcctctcttcctatttgaatatgctttatttctttttcttgcctgattgtcctggccagacttccaatactatgttgaataggagtagtgagacagggcatctttttcttgtgctggttttcaaagggaattcttccagtttttgcccattcagtatgatattggctgtgggtttgtgataaatagctcttattattttgagatatgttttatcagtcctagtttattgagagtttttagcatgaaggggtgttgaattttattgaagaccttttctgcatttatggagataatcatgtgttttttgtcattggttctgtttatgtgatgaattatgattattgatttgtgtttattgaactagccttgcatctgagggatgaagctgacaagatcgtggtggataagctt

SEQ ID NO: 879861 - DNA, 628 bp, Homo sapiens
tttattcttgttgtagtgattgtgaatgggagttcatatgatttggctctctgtttgtctattattagtgtataggaatgtttgtgatctttgcacattgattttgtatcctgagactttgctgaaattgtttatcagcttaaggagatttagggttgagaccatggggttttctaagtatacaatcatgtyatctgcaaacagagagagtttgacttcctctcttcctatttgaatatgctttatttctttttcttgcctgattgtcctggccagacttccaatactatgttgaataggagtagtgagacagggcatctttttcttgtgctggttttcaaagggaattcttccagtttttgcccattcagtatgatattggctgtgggtttgtgataaatagctcttattattttgagatatgttttatcagtcctagtttattgagagtttttagcatgaaggggtgttgaattttattgaagaccttttctgcatttatggagataatcatgtgttttttgtcattggttctgtttatgtgatgaattatgattattgatttgtgtttattgaactagccttgcatctgagggatgaagctgacaagatcgtggtggataagctt

SEQ ID NO: 879862 - DNA, 623 bp, Homo sapiens
tgacccagcaatcccattactaggtatatacccaaaacattataaattattctaccataaagacacatgcacacgtatgtttattgcagcactgttcacaatagcaaagacctagaaccaacccaaatgccatcaatgatascctggataaagaaaatgtggcacatgtacaccatggaatactgtgcagccataaaaaggatgagttcatgtcctttgcagggatatggatgaagctggaaaccatcattctcagcaaactaacaggaacagaaaaccaaacattacatgttctcactcataagtgggagttgaacaatgagaacacatggacacagagaggggaacatcacacaacggggtctgttagggggtggggagctaggggagggatgtattaggagaaatacctagtgtagatgatgggttgatgggtgcagcaaaccaccatggcacgtgtatacctatgtaacaaaccttcacattctgcacttgtatcccagaacttaaagtataataataaaaaaaagcacaaagagggacattatataatgataaaaggctttgtccaacaggaaactatcacaatactagacatacattcacctaacactggaggtccc

SEQ ID NO: 879863 - DNA, 623 bp, Homo sapiens
tgacccagcaatcccattactaggtatatacccaaaacattataaattattctaccataaagacacatgcacacgtatgtttattgcagcactgttcacaatagcaaagacctagaaccaacccaaatgccatcaatgataccctggataaagaaaatgtggcacatgtacaccatggaatactgtgcagccataaaaaggatgagttcatgtcctttgcagggatatggatgaagctggaaaccatcattctcagcaaactaacaggaacagaaaaccaaacattacatgttctcactcataagtgggagttgaacaatgagaacacatggacacagagaggggaacatcacacaacggggyctgttagggggtggggagctaggggagggatgtattaggagaaatacctagtgtagatgatgggttgatgggtgcagcaaaccaccatggcacgtgtatacctatgtaacaaaccttcacattctgcacttgtatcccagaacttaaagtataataataaaaaaaagcacaaagagggacattatataatgataaaaggctttgtccaacaggaaactatcacaatactagacatacattcacctaacactggaggtccc

SEQ ID NO: 879864 - DNA, 683 bp, Homo sapiens
ttgaaactgaagaaaacaaagacaacataccaggatttctgggatgcagctaaagcagtgtttagagggaaatttctaacacaaaatgcccacatgaaaaatctagaaatgtctcaagttaacaacctaacatctcaaataaaagaactagagaaccaagagcaaacaaaccccaaagctagtagaagacaagaaataatgaagatcagagccaaactgaaggagataaagacatgaaaaactcttaaaaaaatcaacaaatccaggagctagtgttttgaagaaattaataaaatagacaactagctaagctaataaagaaagagagaaaaatcaaataaacaaaacacaatcagaaatgataacagagatatcaccactgaccctacagaratacaaacaaacatcaaagaatattataaacacctctctgcacataaactagaaaatctaaaagaaatgaacagtgttctggacaaatacaccctcccaagactgaaccaggaagaaattgaatccctgaatagaccaaaaatgtgctctgaaattgaggcaataatggcctaccaaccaaaaaaaaacctcagacccagacaaattcacagctgaattctaccaaaggtagaattcaaagagaaggtggtaccatttccactgaaactattccaaaaaattgaaaggga

SEQ ID NO: 879865 - DNA, 683 bp, Homo sapiens
ttgaaactgaagaaaacaaagacaacataccaggatttctgggatgcagctaaagcagtgtttagagggaaatttctaacacaaaatgcccacatgaaaaatctagaaatgtctcaagttaacaacctaacatctcaaataaaagaactagagaaccaagagcaaacaaaccccaaagctagtagaagacaagaaataatgaagatcagagccaaactgaaggagataaagacatgaaaaactcttaaaaaaatcaacaaatccaggagctagtgttttgaagaaattaataaaatagacaactagctaagctaataaagaaagagagaaaaatcaaataaacaaaacacaatcagaaatgataacagagatatcaccactgaccctacagagatacaaacaaacatcaaagaatattataaacacctctctgcacataaactagaaaatctaaaagaaatgaacartgttctggacaaatacaccctcccaagactgaaccaggaagaaattgaatccctgaatagaccaaaaatgtgctctgaaattgaggcaataatggcctaccaaccaaaaaaaaacctcagacccagacaaattcacagctgaattctaccaaaggtagaattcaaagagaaggtggtaccatttccactgaaactattccaaaaaattgaaaggga

SEQ ID NO: 879866 - DNA, 635 bp, Homo sapiens
tggactttttttgttggtaacttttaaattaccatttcatgcttgttgcttgttattggtctgttcagagtttctgtttcttcctggtttaatctaggagggttgtatattcccaggaatttatccatctcctctagttttctagttcatgcrcatagaggtgttcatagtagccttgaatgatattttgtatttctttggtattggctgttatatctcccattttgtttctaattgagcttatttggatcttctctcttctttcttggttaatctcactaatggtctatcaattttatttatcttttcaaagaaccagctttttgttgtatttatcttttgtatttttttgtttgtttgaatttcatttagtactgctctgatcttggttgcttgttttcttctgttgggcttgggtttggtttgttcttctttctctagctccttgaggtgtgaccttagattgtctgtgctccttcagacttaacaatgtaggcatttaatgctatgaatttcctgttagcactgcctttgcttatcccagaggtttttataggttgtgtcactattatcgttcagttcaaataatctgttaatttccatcttgatttcatttttgactcagtgatcattca

SEQ ID NO: 879867 - DNA, 631 bp, Homo sapiens
ctacagaatggaagaaaatttttacaatctatccatctgacaaaggactaatatccagaatctacaaagaacttaaacaaatttacaagaaaaaaaacaaacaacccgatcaaatgtgggcaaaggacatgaacagacacttctctaaagaagacatttatgyggccaacaaacatatgaaaaaagatcatcatcactggtcattacagaaatgcaaatcaaaaccacaatgagatatcatctcatgccagttagaatggtaatcattaaaaagtcaggaaacaacagatgctggagaggatgtggagaaataggaacacttttacactgttgatgggagtgtaaattagttcaaccattgtagaagacagtgtggcaattcctcaggatctagaaccagaaataccatttgacccagtaatcccattacttggtatatacccaaaggcttataaatcattctgctataaagacacatgcacacgtatgtttattgcaacaccattcacaatagcaaaggcttagaaccaacccaaatgcccatgaatgatagacaggataaagaaaatttggtacatatacacatatacaccatggaatactatgcacccataaaaaaggatgagtccat

SEQ ID NO: 879868 - DNA, 635 bp, Homo sapiens
aaaattaagtcttctggttgaattgaactctttatcattatgtaatgcccttctttgccattttttttttactggtttaaagtatgtttaagtatggtttatttgatataagaatagtgactcttactgttttttgttttccatttgtgtgatagctttttctccaaacttttactttcagyctatgagtgtcattacatatgagatgagtctcttgaagacagtagatggaagggtctttttgtttttttaaatcaaacttgcatttttgtgatggatttagactgtttacattcaaggttaatatcgatatgtgagattttgatcctgtcatgaagttgttagatggttgctttgtagtttctgttgtatgcttgctttatggggtctgtgggctatccacttgagtgtgttgtttttgtgatagcaggtatcattcttttgtttccttgtttagaactcccttaatgatctctcgtaaggctggtctagtggtaatgaattcccttagcacttgtttgtttggaaaagattttatttctctatctcttaggaaacttaatttggtgggatgtgaaattattggttggaatttcttttctttaagaatgatgaaaataaacccctaatctctc

SEQ ID NO: 879869 - DNA, 570 bp, Homo sapiens
catgctttaattccagcatttgggaggctaaggagggaggatcattttagcccaggagctcaagaccagcctgggcaacacagtgagactctgtctctacaaacaatgtaaaattagcagtttgaggctgcagtgagccctaattgcaccactgcactccagcctgggcaagatcaagactctgtctctagagaaataaaaaatggaaaaaataacaaataagcaaaacagagtccctggactcaaaatctaagagaggcagatatagatgcaaacaaactagggctgggtgctaggtgcagtgacaggaaaagctggaggtgcagcaagagtaaccagaaggggcagtttatcaagacatacggagacagaatcaggacaggctttctggacaggtcaaagcccatgatgacccataatgasagaagttggacactatggcttgacttgcaccggcacctgtgtactcaggacaaaaagatggataggtaactctggatctccagaggtcagtagagacctcaaggggggaccaatgcacacaaagcggctccaggtaggaccacaggc

SEQ ID NO: 879870 - DNA, 527 bp, Homo sapiens
accaggtgcgctttgttcaatctcagacttcaccctttgtagccatttactatatcaataaatgaataataaatatgtcaataactaaataaatgagtgtttgccagtaagttacctaagctgtctgactcccatctatgaagttgatacaagaatttctttcttaccaggttgttctattaactgatagagcaaatacttctacccagcataaattcaccacaaaaatttgcttcctctgccccacccttyaccctatccacgccagcagcctggtagagcagaaaaagctttacagtttgatgtaactgaatttagttttttactttctagttatttcctgtgtaaccctagtcaagttgcttaacatctttgagcctgttctctcatctataaaactgatataataatatctaccctcataggattgtggctaggattaaataaagtaacatgtataaagcacccagcatgtgcacattccatagatgtgacttctcagtctctgaatacccaaggtaccatat

SEQ ID NO: 879871 - DNA, 649 bp, Homo sapiens
tgtgtgtgtgtgtgtgtatatatatggatatatatatatttggagatatatatatatatggatatatatatatatatggactttcaagaaaaaaataaaaagtatcagattgaaacttcctcattttctttacttaaaacatttcaacctacccacatcttcacatgtcctttttaattttatactatccattagagaactaacatctcgttttctccctaaggtggcttctgccacctctgctgtgggctctattccctctcacctttggaggtcataaataataaatttttctattatttaaactttttctcaatgtgccattcccattgtttcttaaattgctcaatytttacattaaaagaataacaacttattaaaaaagaaccttacttaggggatttgaggagcttccaggttggtgagtacatcaagcttctgggagagtcctgcccagagagggcaaggaagctctcaacaccccattctgatactttttatttttttcattaaaatagaagtcaagatgacgtcatgagagtaagcaagttaaggttattataatgtttgaaaaaatagtagaaaaggtttgagataatagtagagaatgtaagagagagttagagaatcagagaaatgtggccatcat

SEQ ID NO: 879872 - DNA, 686 bp, Homo sapiens
cagaggcatatcttacagagcctaatccttactttaccttgagcaagaacaaatgctagatagagaaaaagtgcaaatgtaaaacaaactaacaacaaaaagcaaacaataactacctgaacacccccaaagcaagtaaatatttatacacacatgtaaacaaacaacctaaaagcagcaggaaaaaaagatggacttctttttctgtaagtcataactcttttatgcattttataacagagaagctgctgagaaaaaaaaaattgaattatttgaccaattagaaagtcaaaactcttgaatagtaaaagtatccaaaaaaaatcaaaagacgtggaaactggaacatatttgtaacacataaaaaaacaaatcttctaatgccatattggcaaagattaaaagattatataacaaaggatgaccatcttgcraatagattgtgctacaatcatataatgttacatgattactgccattacaagaatgcaacatatttatatatgctgctatgaaaatatccacagaatattgtatttgtcccagcaggtagaaacaaatacccaagttgaatctggaataatttgtagtcaaaggaagagaacctagaggggagacattttgaaaacagaatcagcaaagtaaaggaagaagtaaaaaatattctgaaatttttcagccttagt

SEQ ID NO: 879873 - DNA, 615 bp, Homo sapiens
ataagcagtgtgaaaacaaactaatagagtaaattggtatcagaagtgggtgctgctgaaaagatacccaaaaatgtggaagtgactttgtaactgggtaacaggcagaggttggatccattaggagggctcagaagaaaaccggaagatgtgggaaagttyggaacttcctagagacttgttgaatggctttaaccaaaatactgataatgatatggacaatgaaatccaggctgaggtggcctcagatggagatgaggaacttgttggaaactggagtaaagatgactcttgttatgttttggtgaagagactggtggcattttgcccctgccctagagatctgcggaagtttgaacttgagagagatcatttagggtatctggcagaagatatttctaagcagcacaaattcaagaggtgacttgggtgctgctaaaggcattcagttttaaaagagaaacacagcataaaagtttggaaagtttgcagcctgacagtgcgatagaaagaaaatcccattttctgaggagaaactcaagccagctgcagaaatttgcataagcaacaggagctgaatgtgaatcaccaagacaatcgggaaaatgtctccag

SEQ ID NO: 879874 - DNA, 673 bp, Homo sapiens
caccatgtgcctggaaaagctgcagacactcaatgccagcttgtgagaacagccaggaggggggctgtatcctgcaaagccacaggggtggagctgtccaaagcatgggagcccaccgcttgcatcagcatgacctggatgtgagacrtggtgtcaacggggatcattttggaactttaagatatgactgctcagctggatttcagactttcatgaggccaatttcttccatttggaatggctgtatttacccaatgcctgtatccctatcatatctaggaagtaattaaattgcttttgattttacaggcttataggcggaagggagttgccttgtcttggatgagattttggactgtagacttttgagttaatgcagaaataagactttgggggactgttggggaggtattattggttttgaaatgtgaggacatgagatttgggaggggccaggggcagaatgatatggtttggttgtgttcccacccaaatctcattttcaattctcatgtgttctgggagggactctgtgggaggtaattgaatcataggggcagtcctttcccatgctgttctcatgatggtgaataagtctcatgagatctgatggttttaaatagggaagtctccccacacaagctctcttctcttgtctgccaccatttgacat

SEQ ID NO: 879875 - DNA, 673 bp, Homo sapiens
caccatgtgcctggaaaagctgcagacactcaatgccagcttgtgagaacagccaggaggggggctgtatcctgcaaagccacaggggtggagctgtccaaagcatgggagcccaccgcttgcatcagcatgacctggatgtgagacgtggtgtcaacggggatcattttggaactttaagatatgactgctcagctggatttcagactttcatgaggccaatttcttccatttggaatggctgtatttacccaatgcctgtatccctatcatatctaggaagtaattaaattgcttttgattttacaggctyataggcggaagggagttgccttgtcttggatgagattttggactgtagacttttgagttaatgcagaaataagactttgggggactgttggggaggtattattggttttgaaatgtgaggacatgagatttgggaggggccaggggcagaatgatatggtttggttgtgttcccacccaaatctcattttcaattctcatgtgttctgggagggactctgtgggaggtaattgaatcataggggcagtcctttcccatgctgttctcatgatggtgaataagtctcatgagatctgatggttttaaatagggaagtctccccacacaagctctcttctcttgtctgccaccatttgacat

SEQ ID NO: 879876 - DNA, 718 bp, Homo sapiens
aggggcagagccctcctggagaacctgtactagggaatgtagaggggaaatgtagggttggagcccccacacagagtccccatggggaaactgcctggtggtgctgtgagaagggggccactgtcatccagactccagaatggtagattcactggcagcttgcatctctcacctggaaaagctccaggcattcaacgccagcctatgagagcagctgtggccactgtaccctgcaaagccacaggggcaaagctgccaaaggttattggaacccactgcttgcccaagtgtgctctgaatgtgagacatagagtcaaaagagattattttggagctttaagatctaataactgccctgctgggtttcagacttgcatggggcatgtagcccctttattttggctgatttctcccttttggaatggaagtatttacccaatgcctatacccatygcatcttggaagcaactaacttgcttttcattttacaggctcataggtggaagggacttggcttgtctcagatgagacttgggactttggacttttgagttaatgctgaaatgagttaagactttggggcactcttgggaaggcatgattagactttgcaatatgagaaggacatgaggtttgggaggggccagggacaaaatgacattgtttggatctgtgtccccacccaaatctcatgtcaaattgtaacccccaatattgg

SEQ ID NO: 879877 - DNA, 487 bp, Homo sapiens
agaactcactcactgtcatgaaaacagcaaaggagaaatccacccccatgatccaattacctccgaccaagtccctcttctgacacatgggaattgcaatttgacatgagattttggtggggacacagagccaaatcttatcaatcaagaatgttatcaagatactggcccggatttggccctgatctcactaaagttggtgaaactaagagcatgtaaaaggcagcaaccaatactcagtttcctaaagttgaatgtgtacaggatccacattagttggtctcctgtgtttctggattacagagcagcacctcagaagtttcctccagttgrggtcctagaccatgtggtgacctatcaaaggatcagcagtcaagttggcagttttggaggaaaaagcatagcaaagaattgcttgtattttttaaatgtaaatgtaaaattaaattttattttttatagaaataccatgaagttatttataata

SEQ ID NO: 879878 - DNA, 677 bp, Homo sapiens
taagtcaaaggcagacactttggtaaagccaaaatgaatgagtagctgtaagctaaagactgtcatccctgtaattccacctcgattgttatatctggctttttgagctgctgtttacctaaaacagtcagctaagtgagactttataactcaaaagtaaattctttgaaaattgaagaacctgaggccaagaaatcttaccttakcaaacttctgggtgggggctgggttttgttagaatagcattttttataacatttttcaagggctcagtaatgtaattctacctagcatttaactttgattttctgcaaatactttaaggttgctgatttgttttaaaataagagtttaacataacagtcactctgatggctaatactgagtgtcaactcgattagattgaaggttgtgaagtattgatcctgggtgtgtctgtgagaatgttgccaaaggagattaacatttgagtcagtggactggggaaggcagaccggcccttaatctggtgggaacaatctaatcagctgccagcgaatataaagcaggcagaaaaacgtgaagaggtgagactggcctatcctcccagcctacatctttctcctgtgctagaggcttcctgccctcaaacatcggactcccaagttcttcagttttgaaactcggactggctctcc

SEQ ID NO: 879879 - DNA, 578 bp, Homo sapiens
ttaaaggccgccagttgctaattgtaggtgtggggaatctgcacaggctcaagtgacaggaagcagggagtggggccatgaagctggccattttccaccttgcagccactagatttctaaaagccatctcacacgcctctgttgcataaagccattcccaaactcagagggatgatttgctccacagggactgmaccttggagacttttgcacacaaagtaaaatgactcctgcctgagaaaacacccttttctcctaatttgttggttttaggagaaaatggaaaagcttgtatacgcacactcagagggagggtcaaggaaacaagcataccaggggaagggaggaaagaaatcgcatttataagcagctactacagcatttcactcaaagctcccaataacttcataagctgaacttattattctcctcttacaaacaaggacccaaggtttagaaaatttaaatgattgaccgagtcaatgtaataagaaggcaaacaaccaacttaagtttctctgaccccaaagcccatacttgtttcataacatgatgctgttttccactgagatgtgtca

SEQ ID NO: 879880 - DNA, 595 bp, Homo sapiens
tatacacgtgaaataaatttgtatgccactcttctattcatcaatctgcctcagtaactttcagcaaaactttagggggcaaagggccctgggccccacagttatggcactgtgagcaagatcatcaaaattgttcttttttttcaggaagccacagcaargggaacccaggaaactgacaccgtggcaaaagtgtaagaatttcttaccagccaggctcctggcctggttctctgggcaatccagttgagcaaacagtaaaaatcactatctgtctcctctgcaaggtttgattaacggcaaaaaaaggatctgtgtggctagtcttggggtgtgatgtctctggtgtacttttggtactttgtggtatgaatattcatatcgtttgatccctttcccctcagaaacagcctttttttgttgttgccatttttctttgtccttgtccttctgtgttgttctgttgtaaagaggggcatggagtagaacatggacctggaaagcctataagcctgcagtttgagctggctctgcagataagtcagttttgcagttctgactagacctgtgtctgttaagataaactttgcgatgg

SEQ ID NO: 879881 - DNA, 669 bp, Homo sapiens
taaagggatcaattcaacaagaagagctaactatcctaaatttatatgcacccaacacaggagcacccagattcataaagcaagtccatagagacctacaaagagatttagactcccacacaataataatgggagacttttaacacmccactgtcaacattagacagatcaacgagacagaaagttgacaaggatatccaggaattgaacttaactctgcaccaagtggacctaatagatatctacagaactctccaccccaaatcaacagaatatacattcttctcagcaccacattgcacttattccaaaattgaacacatagttggaagtaaagcactcctccgcaaatgtaaaagaacagaaattataacaaactgtctctcagaccatagtgcaatcaaactagaactcaggattaagaaactcactcaaaaccactcaactacatggaaactgaacaacctgctcctgaatgactactaggtacataatgaaatgaaggcagaaataaagatgttctttcaaaccaacaagaacaaagacacaatataccagaatctctgggacatatttaaagcagtgtgtacagggaaatttatagcactaaatgcccacaagagaaagcatgaaagatctaaaattgacaccctaacatcacaatttaaa

SEQ ID NO: 879882 - DNA, 669 bp, Homo sapiens
taaagggatcaattcaacaagaagagctaactatcctaaatttatatgcacccaacacaggagcacccagattcataaagcaagtccatagagacctacaaagagatttagactcccacacaataataatgggagacttttaacacaccactgtcaacattagacagatcaacgagacagaaagttgacaaggatatccaggaattgaacttaactctgcaccaagtggacctaatagatatctacagaactctccaccccaaatcaacagaatatacattcttctcagcaccacattgcacttattccaaaattgamcacatagttggaagtaaagcactcctccgcaaatgtaaaagaacagaaattataacaaactgtctctcagaccatagtgcaatcaaactagaactcaggattaagaaactcactcaaaaccactcaactacatggaaactgaacaacctgctcctgaatgactactaggtacataatgaaatgaaggcagaaataaagatgttctttcaaaccaacaagaacaaagacacaatataccagaatctctgggacatatttaaagcagtgtgtacagggaaatttatagcactaaatgcccacaagagaaagcatgaaagatctaaaattgacaccctaacatcacaatttaaa

SEQ ID NO: 879883 - DNA, 522 bp, Homo sapiens
gagaagggagcaaggacaaaaccccccctctgtataagttagctgtcttcaaacagcatttactgaagtcccctcaagcacttccacttaacacttctactatgaatctttggccagatagcttggccagtcttaacactgaagtagcctgggacacgttctctcttagctggatgcttttcagtcctgaataaaatcatcattctatgcagaaggggacagcaaatattgggtggaaaagggagtattggtaaccagttatgagatagttatagaaatccacataagaaataataacagtggcatggggcaggaacatttgtaaggtatttaaggtagatttgataggmcacagtgattgatcagatgtgaatgatgagaaagatgggggagtcaaagtcaatgactaaactgaagtgacaaattggaaggaggtgccattctcacataaacaagaacatgaggagaaactgaacacatggagaaagtgatttaacagcttccacctttgttaaaattcag

SEQ ID NO: 879884 - DNA, 543 bp, Homo sapiens
ctgagatctgtcttagatacttgggttcacaaattgttactaagagagcagcacacacttcttactacgcacttggtatccacccccactgccatgtcttccccaggaattcctgcccattttagacatattaaagtgtgcgtgagtttatgagaaatagtgtttctctttcttttccctttgattcaatttttagaaaataaataataatttgtttgcagccaatatgaacagtaaggtatttttctggctggaataatagaaatttggaataaattaactgctgtcttttgatattttgtrtctcaagaacttatataattattagtcaacttcctacaaaataataagcttgggagggcaaactgctttacaggttttttgttttttgtttttcttttctttttctagacaggtaatatgagaccacaatattcttaatagtggtgtctgttatataattacaaatgctaattatttcaaaaatgggggagagccccatttaattctttattctatgccacaggtaatgttacagttata

SEQ ID NO: 879885 - DNA, 647 bp, Homo sapiens
aatatagtacacataccataaaactcactctttaaaaatataaattcaagaccaggcatggtggctcacacctgtaatcccagcactctgggaggccgaggcaggcagatcacctgaggtcaggagttcgagaccagcctggccaacrtttacctgtctctactaaaaatacaaaaattagttgggcgtggtggcgggcacctgtaatcccagctactcaagaggctgaggcaggagaattgcttgaatccaggaggcagaggttgcggtgagctgagattgtgccattgcattccagtttgggcaacaagagcaaaactccatctcaaaaaacaaacaaacaaaaaccaaaaattagctgggtgtggtgatgcgcacctgtaaacccagcttgggaggctgcagcaggagaacagcttgaacctgggaggctgaggttgcagtgagccgagatcatgcccctgcactccagaatgggtgaaaagcacaactccgtttccaaaaaaaaaaaaaaaaaaaaaaaaaaatatatatatatatatatatatacacacacacacacatacatattcaattgtttcaattgtttatatatatataaattcaattcaaaaccctgtattgacagagttgtgtaatcacaacca

SEQ ID NO: 879886 - DNA, 647 bp, Homo sapiens
aatatagtacacataccataaaactcactctttaaaaatataaattcaagaccaggcatggtggctcacacctgtaatcccagcactctgggaggccgaggcaggcagatcacctgaggtcaggagttcgagaccagcctggccaacattyacctgtctctactaaaaatacaaaaattagttgggcgtggtggcgggcacctgtaatcccagctactcaagaggctgaggcaggagaattgcttgaatccaggaggcagaggttgcggtgagctgagattgtgccattgcattccagtttgggcaacaagagcaaaactccatctcaaaaaacaaacaaacaaaaaccaaaaattagctgggtgtggtgatgcgcacctgtaaacccagcttgggaggctgcagcaggagaacagcttgaacctgggaggctgaggttgcagtgagccgagatcatgcccctgcactccagaatgggtgaaaagcacaactccgtttccaaaaaaaaaaaaaaaaaaaaaaaaaaatatatatatatatatatatatacacacacacacacatacatattcaattgtttcaattgtttatatatatataaattcaattcaaaaccctgtattgacagagttgtgtaatcacaacca

SEQ ID NO: 879887 - DNA, 676 bp, Homo sapiens
taaaactggtaggtttttagttgtaagttaacaaaactgttcacaaaataaatcatactaaaaacttaacaatattattagataatatttagaaggaaataatgaaataaatgtccccaaaaagttcagtcatttaagagtagtttgatagtttgagtaggccctggcactaggtagcagtgtcccctggtggtgaatcttggtatttcatatctctccatygtttttcctcagggttcttctgatgctgaggagtctggtcctagcccctggctagctaatccttccagccggaggacattcttcccacatccccgtacgtatgtacctgacagagtggaagtctcccagccacctctgagatctttctcctggaaaagaaatgctatcaagtcactgacaagcacacaagaccagcctgtgttcaccaaattaatcacgtactctaggcctaaccctatctgtatattaaactagctttcttgcttagatgccattgacttgagtaagcagaataagatctatatttcaagtggaaccaagtactctctgtttccctgcagggacaccaaggaaatttcagagctcaggaatatcctaacacagttgcagccagggactctggggcgttcagcccacatggtgctttctgctgcccacagggtgcctccagtca

SEQ ID NO: 879888 - DNA, 676 bp, Homo sapiens
taaaactggtaggtttttagttgtaagttaacaaaactgttcacaaaataaatcatactaaaaacttaacaatattattagataatatttagaaggaaataatgaaataaatgtccccaaaaagttcagtcatttaagagtagtttgatagtttgagtaggccctggcactaggtagcagtgtcccctggtggtgaatcttggtatttcatatctctccatcgtttttcctcagggttcttctgatgctgaggagtctggtcctagcccctggctagctaatccttccagccggaggacattcttcccacatccccgtacgtatgtacctgacagagtggaagtctcccagccacctctgagatctttctcctggaaaagaaatgctatcaagtcactgacaagcacacaagaccagcctgtgttcaccaaattaatcacgtactctaggcctaaccctatctgtatattaaactagctttcttgcttagatgccattgacttgagtragcagaataagatctatatttcaagtggaaccaagtactctctgtttccctgcagggacaccaaggaaatttcagagctcaggaatatcctaacacagttgcagccagggactctggggcgttcagcccacatggtgctttctgctgcccacagggtgcctccagtca

SEQ ID NO: 879889 - DNA, 611 bp, Homo sapiens
gtgtcttgctacttaaaacaaccagcactcgcatgaactaatagagcaagaactcactaattaccaatgggatgacaccaagccattcatgagggatcctcctccatgcccccgatacctctcaccaggccccatctccaacattcgggatcacatttcaacgtgagacttggaggagacaaatatccaaactatatcatttctctttttgccttgtcctaataaaggaaggaagttacttgtggtgataaaggccttggttttcactttgttgtctgctgcctgttgaaatgggtcagaatataaaagggtttttctgaggaaaagtaaatgcttggaaaagttcttgttactgggcctattatattagttcccaataagaatttgagctacactgtgctaatagagtccatgagcccgctggtgtcccatctctcagtagaggacagggcagcatattccactccagtagtygttgtataaaatatatttgaagcacaactctcattacaaggtacgcaatacatttttagtgtgtcattgagaaacatccaggaaatcactcagagaagctttcctgtattctctgagcatattccctttaaaggctt

SEQ ID NO: 879890 - DNA, 632 bp, Homo sapiens
cctggcatttgagaagaacaacatactaaggtgatttataaggaaggaaatctcacagagtctacatcattcccattccaacaccatcagagttgttgctggtacctgctgctggaaggctaaaagagaggtcacatcactggatcttttgtggacatcccctagcaccagcctgaagtgtggcagtcccactgcamagctagacccagagaagcagcaggattcacagtagtctagctctcagggattcctacttctaagggaagggagaatgcaccacattaagggagcatactgtgggataacagaatccagtcggtaggactagagtcctggaactttctgcttacaaaatgtttcagcagagacacaagtggaatgctgggctcagtggggaaagtctgcagctctaccccaacattcaggcagccccaaggctcatgaagcatcttggaaaaggagacttcttcttcctctcacccaccactgcagacacagcggaggcttcgcccatgggagctcagcatgggtgcagctgtagacagcctttctgtaacacttcagggtgactacatccccataagaggagtgccatccaggtttaagtttgcatgaggggtacagtcacaaga

SEQ ID NO: 879891 - DNA, 656 bp, Homo sapiens
ccatttaccaagtgctctaaaccagaaacttttcatcaactcatttttcctcacctccccctgtcccatcctgttgtgaaaattacctcaaaccttctttctgcccctctctttatttctattatttcttgcctaaaccatttgcaacagcctctcaaataaccttgaaataactttcctacctccaagttcttccttgtccaatctgtcctccccacactgtcaccagaatgtgccatctttgctctactacccaccagttgaaaatctttgctaggttctgttctagagtctctttcatgaaaactttctcattcctctgttggcctggaattttccacttccttctttgcaccctcccataccttgtacatctatggttgygcttaccatagttgattacacgtgtttcccttgagtagcttataaacttctcaaaatcaagatgatctcattcactcctgtacaaccagttcactgaaaagtgcctggcatatggtaggtgctcacaacattttgctgaaaaaaagaaaaatagcttacaagaccaagtaacactcacagatcctctttatataatagtgtgtccggtcccaaaataaaacttatgctgtgtaaggcttcttaaaaaagtacaccctgcatcttaacaggaa

SEQ ID NO: 879892 - DNA, 648 bp, Homo sapiens
aaccatctaaatgatgctcagtgtatgaaatgggaacatagacaactaaatgaaagcagcaaaatgagaatatcacaaaaaattataaaaaccttcaaaaattatggagctgaagactacagtaagtcataaagacagaaattctcaaacaaaatacttgtaaaatatcaagaagcttaaattagtttggctaagataaacacagttactcrtaacaagacagattataagcaaaattttaaaagtcgtaggcaaaaggaatcttggaagcaagcagtaagataaacctgttgtgtcatctatagcatgcttcattgagatttgcagtggatttatcaacacagtccttgcaggccagaaaaaaagttaagtgatatagtcaaagtgctgaaacaaaaactttcaaagcaagaatactataggaaaagtcttcaaaaaaagttccaaagtaacaaaatgcagtaaaagtacatcactagtatatctgccttactgaaaatgcttaggggtgtctcttccactgaaaataaaattctagaaaaaacctacattatataaaaaacacataactctctaataaagacatgcacataacaggaaattgtattaaaattataatacagaaaacaattctattttcaaaatttg

SEQ ID NO: 879893 - DNA, 584 bp, Homo sapiens
agcacttaggttgtttctaattcatgggtattatgaataatgctgcaatgaacatgaaattgcagatgtctgtttttgacatactgattaaaattcctttggacacgtatccagaagtgggattgatggatcatagggtaaatatatttataatttcttgaggaagcttcatactgttttccaagatggctgtgctaatttccattcttaccaacagtgcacagggtttctttttctccacatcctcatcaacacttatcttccatctttttttataatagccctagtaaaatgtgtgaggtgatatctcattgtggctttgatttgcatttctctgataattagaaatgttyatgattttttcatgtacctgttggccttttgtatgccttacgaaatgtctattctggttctttgcttattttttttaataagcatagttttattcttatgtttgagtaggttgagttacttatatattattatatgagccccttatctgatgtatggtttaaaaatgttatcccatttgtgggttctcttcattctattatcacttcttttcctgtggaaaagctttttag

SEQ ID NO: 879894 - DNA, 631 bp, Homo sapiens
atagtttaagtgggattgctattagttttatacatgttttgtcaaattcagtgaaaccatcagatttcaggcttttctttgatgggaggctttgtattatggatctcatcacgtcttgtttgtgtattcaggttgtggatttcttaataattcaatcttcttaggttctatgtgtctagaaatttatccatttgttctagattttccaatttatggcatctatctgctcatagtactcactaatgatcttttgaattcctgcagtataagttgtagagttgaaatgtctcctttttcatctttgatattatttgagtcttttccttttattcttttatttatttatttatttttgagatggagacttgctctgttgcccaggctggagtgcagtggctcgatctcagcttactgcaacctccgcctccygacttcaagcaattctgcctgcctcagcctcctgagtaggtgagattacaggcgcccaccaccatgcctggctaatttttgtgttttttaatagagacggggttttgccatgttggccaggctgatcttgaactcctgacctcaggtgatccagccgcccgcctcagcctcctaaagtcctgggattacaggcatgagccac

SEQ ID NO: 879895 - DNA, 631 bp, Homo sapiens
atagtttaagtgggattgctattagttttatacatgttttgtcaaattcagtgaaaccatcagatttcaggcttttctttgatgggaggctttgtattatggatctcatcacgtcttgtttgtgtattcaggttgtggatttcttaataattcaatcttcttaggttctatgtgtctagaaatttatccatttgttctagattttccaatttatggcatctatctgctcatagtactcactaatgatcttttgaattcctgcagtataagttgtagagttgaaatgtctcctttttcatctttgatattatttgagtcttttccttttattcttttatttatttatttatttttgagatggagacttgctctgttgcccaggctggagtgcagtggctcgatctcagcttactgcaacctccgcctcctgasttcaagcaattctgcctgcctcagcctcctgagtaggtgagattacaggcgcccaccaccatgcctggctaatttttgtgttttttaatagagacggggttttgccatgttggccaggctgatcttgaactcctgacctcaggtgatccagccgcccgcctcagcctcctaaagtcctgggattacaggcatgagccac

SEQ ID NO: 879896 - DNA, 631 bp, Homo sapiens
atagtttaagtgggattgctattagttttatacatgttttgtcaaattcagtgaaaccatcagatttcaggcttttctttgatgggaggctttgtattatggatctcatcacgtcttgtttgtgtattcaggttgtggatttcttaataattcaatcttcttaggttctatgtgtctagaaatttatccatttgttctagattttccaatttatggcatctatctgctcatagtactcactaatgatcttttgaattcctgcagtataagttgtagagttgaaatgtctcctttttcatctttgatattatttgagtcttttccttttattcttttatttatttatttatttttgagatggagacttgctctgttgcccaggctggagtgcagtggctcgatctcagcttactgcaacctccgcctcctgacttcaagcaattctrcctgcctcagcctcctgagtaggtgagattacaggcgcccaccaccatgcctggctaatttttgtgttttttaatagagacggggttttgccatgttggccaggctgatcttgaactcctgacctcaggtgatccagccgcccgcctcagcctcctaaagtcctgggattacaggcatgagccac

SEQ ID NO: 879897 - DNA, 629 bp, Homo sapiens
taaacaatgtaatctagtaggatgttgctttcctatttttcctaatactaccatgtttagatgcaggcggctaagtgagagtatatgatttcctgtgtatgtatagatgtaacccacactcataggcggaaagttctgcaggctgagaagtgaagccctttgctgaacaaccaccaccaacattctaggacccccacacccttggttctgcaggctacacccctcccatctgcttagaagcagaaagaaaactctgcggttacttttccctttgacaataagccgcggttctcttcaacgttctcctggggacttgggtcaatgttcycccatgcaaatgttagccaggcccagggttattgtttcccctacccctgaggattgatcatggcatgcaactgccccatattgtattttggtcacccccatcggcatcccatctgctgctagtgcctctggccagcttctcgcatggtcctgacacggtgctgtcactctcacattatttgcacacattgtttacctatagctggacacattgttcataggagcccagctggtaaagtaaaaatattccaagactgtgctgataagctacttcttccctgcatcctgggctggtgagaagc

SEQ ID NO: 879898 - DNA, 629 bp, Homo sapiens
taaacaatgtaatctagtaggatgttgctttcctatttttcctaatactaccatgtttagatgcaggcggctaagtgagagtatatgatttcctgtgtatgtatagatgtaacccacactcataggcggaaagttctgcaggctgagaagtgaagccctttgctgaacaaccaccaccaacattctaggacccccacacccttggttctgcaggctacacccctcccatctgcttagaagcagaaagaaaactctgcggttacttttccctttgacaataagccgcggttctcttcaacgttctcctggggacttgggtcaatgttcccmcatgcaaatgttagccaggcccagggttattgtttcccctacccctgaggattgatcatggcatgcaactgccccatattgtattttggtcacccccatcggcatcccatctgctgctagtgcctctggccagcttctcgcatggtcctgacacggtgctgtcactctcacattatttgcacacattgtttacctatagctggacacattgttcataggagcccagctggtaaagtaaaaatattccaagactgtgctgataagctacttcttccctgcatcctgggctggtgagaagc

SEQ ID NO: 879899 - DNA, 629 bp, Homo sapiens
taaacaatgtaatctagtaggatgttgctttcctatttttcctaatactaccatgtttagatgcaggcggctaagtgagagtatatgatttcctgtgtatgtatagatgtaacccacactcataggcggaaagttctgcaggctgagaagtgaagccctttgctgaacaaccaccaccaacattctaggacccccacacccttggttctgcaggctacacccctcccatctgcttagaagcagaaagaaaactctgcggttacttttccctttgacaataagccgcggttctcttcaacgttctcctggggacttgggtcaatgttcccccatgcaaatgttagccaggcccagggttattgtttcccctacccctgmggattgatcatggcatgcaactgccccatattgtattttggtcacccccatcggcatcccatctgctgctagtgcctctggccagcttctcgcatggtcctgacacggtgctgtcactctcacattatttgcacacattgtttacctatagctggacacattgttcataggagcccagctggtaaagtaaaaatattccaagactgtgctgataagctacttcttccctgcatcctgggctggtgagaagc

SEQ ID NO: 879900 - DNA, 596 bp, Homo sapiens
tttccccgatgcatgtctaggcacttttgtcaaaaatgagttttctgtatatgtatagatttgtttctgggttctctattctgtcccattggtctgtgtgtctgtttttatgctagtaccctgctgtcttgtgtactatagctctgtaatatgatttcaagtcaggtaatgtgattcctccaattttgttctttttgctcargatagctttggctattctgggtcttttgtgattccaaatttataaattttaggattgtttttaatatttttgtgaaaaacgtcaatttaatctatagattgctatttttatttttatttttattaatttaatttaattaattaatttatttattttgagatggaatctcgctttgtcgcccaggctggagtgaagtggtgcaatctccggtcactgcaagctctgcctcctgggttcttgccattctcctgcctctgcctctcaagtagctgggactacaggctcccaccaccacgcccggctaattttttgtatttttagtagagacggggtttcactgcgttagccaggatggtctcgatctcctgacctcgtgatctgcccgccttggcct

SEQ ID NO: 879901 - DNA, 675 bp, Homo sapiens
agatagatgctggcctcttctggggacttccagtggcctctgctgtgttcctctagagtccacgtgggaacgactccccagcttaggttgcaccatgacttctgtcttgccccatctctagcagagactgggcaggtgaggctccagaggcggtatgatgagaaagtttcaggcagggaattttaagggaggaggttttaatgtcaagttggagattccctctatagtatctacccctatatttgaccaaacccagtccctttcctccagccctcccaggtctcaccttgaggcaccggctgccgagcacaccttgctagtatcggaagaccacgtggatgctgtcttcgaggggcgtggcctgcagtactcccacctgggtctgcccctctaagggaatgagaatgaaatgagtaggtacctgggccaaaagccttcaaaaggcagcatcctctccattgtcactcccatatccccacgtctcccttcctctgccggtctccwcccacttccgagctatctatcctctctccctccctggccaccctcttcatattctgggtctcatgcactcttggtacagacttctaggtaagaacagagtcttcaggcaaagaggcaggctgtggagggacacttgaacagagtctcagatggctacaaaaactgaatgga

SEQ ID NO: 879902 - DNA, 645 bp, Homo sapiens
atgtacattataaaaaatatatagttttatgactctccagcactttaattataacatatgattatattataaaataataattgacatattgatttttcataatattaaagtgtatttttatcttcacaattagacaattgaccttatgttattttctctattattgcactagtaccagttctttaccatgatagacattcaagcatttatttctcttgaagtgagtgtatatttctcagtccagaagagtcttctctgaaatccacaaaacaaaggtgagatgctaatttttcctaaaacacacaagacaaagctaatgatatatacctctcatagatcaactgctgttttgcttcaaacacttaaatatcacaaaacacaccatatttgtttattcatttgtaagcttaagagcttattattattatcattagagatagagtcttgccctgttgcctgttgctcaggctgaagtgcctgtgccaccatgcytaagttttttttgtttttgtttttgtttttgttttttagtagaaacaaggtctctctatgttgcccagcctggtctcgaattccaagggatccttctgcctcttcttcctgaaatgctgtgattacgggtgtgagccactatgcctggccaag

SEQ ID NO: 879903 - DNA, 645 bp, Homo sapiens
tctctcctttttctgataggcaaaaccttaccattccatttaagctccagctaaaaatttacctcctgtctatggcctttcactcttccccatatgcaagttaaattatgcctctgttctcccctgtgatttatacataccctactacagtatcttacaacacttatcacaacagattttagatcttaatttattagcaggaattctgtaattttcagctttggatccccaggaccatatatggtacctggaacagagyagctgtttagaaaatagcttttggggttattggttttaaaaaaggaaacataattatcttgttgagagaattgcagtaatgttgttttatcttctcattatcactaatataccatgacacatgccctagtacaacattcatgcctaagagaaactgtagatttcacaaatgctgtataaatcttgcctggagtaaatgcagagaaataaagcagcaagaaaaaataatgaaaatcaattaaaatcttcagtgtttttcagaaacttcaaggaaagggtgcattcctaaagagaaaaggaagaacagaaaggaaggccaactttcttcaaggaaggagtgcattcctaaagaaacagccctcagccctactctgctactcaaagtgt

SEQ ID NO: 879904 - DNA, 631 bp, Homo sapiens
tcttcctggtttagtcttgggagggtgtatgtttccaggaatttgtccatttcttctagattttctagtttatttgtgtagaggtgttcatagtattctctgatggtagtttgtatttctgtgtaatgacaatacacagaaattggtggtgacatcccctttatcattttttattctgtctatttgattcttgtctcttttcttctttattagtctggctagcagtctatctatttattgatcttttcaaaaaaccagctcctgcattcattgattttttttgaagkgttttttgtgtctctatctctttcagttctgctctgattttagttatttcttgccttctgctagcttttgaatttgtttgctcttgcttctctagttattttaattgtgaggttagggtgttgattttagatatttcatgctttcttttgtggacatttagtgctataaatttcattttacacactgatttgaatgtgtcccatagattctggtatgttgtgtcttttttctcattggtttcaaagaacatctttatttctgccttcatttcgttatttacccagtagtcattcaggagcaggttgttcagtttccatgtagctgtgcagttttgagtgagttt

SEQ ID NO: 879905 - DNA, 631 bp, Homo sapiens
tcttcctggtttagtcttgggagggtgtatgtttccaggaatttgtccatttcttctagattttctagtttatttgtgtagaggtgttcatagtattctctgatggtagtttgtatttctgtgtaatgacaatacacagaaattggtggtgacatcccctttatcattttttattctgtctatttgattcttgtctcttttcttctttattagtctggctagcagtctatctatttattgatcttttcaaaaaaccagctcctgcattcattgattttttttgaagtgttttttgtgtctctatctctttcagttctgctctgattttagttatttcttgccttctgctagcttttgaatttgtttgctcttgcttctctagttmttttaattgtgaggttagggtgttgattttagatatttcatgctttcttttgtggacatttagtgctataaatttcattttacacactgatttgaatgtgtcccatagattctggtatgttgtgtcttttttctcattggtttcaaagaacatctttatttctgccttcatttcgttatttacccagtagtcattcaggagcaggttgttcagtttccatgtagctgtgcagttttgagtgagttt

SEQ ID NO: 879906 - DNA, 560 bp, Homo sapiens
acaaaagacagggctaccttgttttgcgtatttgttttgggtttctttgtttttgtttttgagacagggtctctttctgtcctccaggctggagtgcagcggtgcaatcacagctcactgcagctttgacctcctgggctcaatccatcctcccacctcagcctcttgagtagctgggactacaggtgtaagcaccaccatgcctggttaatttttctgtgtttttatagagatggggttttgtcaggttgcccaggatgttcttgaacttctggggtcaagcgatctatccttctcagcttyccaaagtgctgggattacaggcatgagccacagcctgtgtgtgcccagcccattgttcttattctgtgctctattcccaaggcttggcactagttggtactcaagaaatatctgctgcaaaaatgaacacatgagtccagtgtgttgagtcatatggtcacgtgcttagtattttgagagtgttatgagaagctaactcagcctgggtcatggcagttgaatgtggaagaagattgaagggggaaaaatggatgggg

SEQ ID NO: 879907 - DNA, 589 bp, Homo sapiens
ccccgtgggtgaaaatgttgatctgttagggatttagaaaatctagtaaaagtttgcctgggctcagaagcttattaatctatttgaaaaatatgtgtctgccactgtactaggcattaagcatacaaaaatgaataaaatatgaagtctttttatatatatatttttattatactgtaagttctagggtacatgtgcacaacrtgcaggtttgttacatatgtatacatgtgccatgttggtctgctgcacccattaactcgtcatttacattaggtatatctcctaatgctatccctcccccctccccccatcccacaacaggccctggtatgtgatgttccccttcctgtgtctttaagctctttctgaacaggagagaagccacaaactatcatatagtgtgatacgggctgtgatatagaatatctgggagtgctttgagaacctacaggaaagaggaggtcttctaatgaggtcataggcaatgcttccaagggagtttttcttcaaatggaggaaaaggaaaagggattctaggtgaagggaataggatgacccaaggtctaggagtttgaaaatgatggca

SEQ ID NO: 879908 - DNA, 641 bp, Homo sapiens
ggtataataggctgaataacggtgcccaaagatatcgtggtcctaatcccctggaacctgtaaatgttaccttatatggaaaaacattttctgcagaaacaatccaattaaggattttttttttttttgagatggagtctcgctrtcgcccagtctggagtgcagtggtgcaatctcggctcactgcaggctccgcctcccggggttcacgccattctcttgcctcagcctcccgagtagctgggactacaggtgcccgccaccatgcccggctaattttttgtatttttagtagagacggggtttcactgttagccagtatggtctcgatctcctgacctcgtgatccgcccgcctcggcctcccaaagtgctgggattacaggcgtgagccacagcgcccggccaaattaaggattttgaagtggggaaattagcttggattatttagctgagtctaaatctaatcacaattatccttacaaatgggagttgggggagattttacagtgaagacaagaagacaatgtgatcttagaggtagactgaaatgatgttgccgctctgtttgaatgcaggaaatgcaacttcagatgttggaaaaagcaagtaactgtttctttcctagagcctctggaggaa

SEQ ID NO: 879909 - DNA, 641 bp, Homo sapiens
ggtataataggctgaataacggtgcccaaagatatcgtggtcctaatcccctggaacctgtaaatgttaccttatatggaaaaacattttctgcagaaacaatccaattaaggattttttttttttttgagatggagtctcgctatcgcccagtctggagtgcagtggtgcaatctcggctcactgcaggctccgcctcccggggttcacgccattctcttgcctcagcctcccgagtagctgggactacaggtgcccgccaccatgcccggctaattttttgtatttttagtagagacggggtttcactgttagccagtatggtctcgatctcctgacctcgtgatccgcccgcctcggcctcccaaagtgctgggattacaggcgtgagccacagcgcccggccaaattaaggattttgaagtggggaaawtagcttggattatttagctgagtctaaatctaatcacaattatccttacaaatgggagttgggggagattttacagtgaagacaagaagacaatgtgatcttagaggtagactgaaatgatgttgccgctctgtttgaatgcaggaaatgcaacttcagatgttggaaaaagcaagtaactgtttctttcctagagcctctggaggaa

SEQ ID NO: 879910 - DNA, 600 bp, Homo sapiens
atggctgagaaaataatatttgagcttgagattacatcaatagaaatttcccaaactgatttcattcaatggtgttttgtagttagcagtgtacagatcttacaaatattttaccagatttataaataacttttatattttttggtattgtaaatggcactactttttaaaaatttaagtttccaattgttttattgctgataactaaaaaacaaattgatcttaaattttgtgaccttgctaaaatatcctatgagttgtagtagtattggtttttagatttggggggattttttttcttcatcttttattttaagttcaggggtacatgtgaaggacatgcaggtttcttacatagrtaaatgtgtgccatgatggtttgctgcacagatcatcccatcacctaggtattaagcccagcatctgttagctaatcttcctgatgccttcccttccaccatcccacctctgacaagtcttagtgtgtgttgttctccctagtgtgtccatgtgttctcatcattcagctcccacttacaagtgagaacatgcggtgtttggatttctgctcttgcatcagtttgctgaggataatggctt

SEQ ID NO: 879911 - DNA, 571 bp, Homo sapiens
tgaggactccaaagcctgtacactttccactttctcacctctgagacttatatgcccatgggttcaaatacaacacagatccccagaacaccagaactgctatcaaaccaataaaatcatgtgggtgaactgtatatctgaaatgagactttgatggacaactctcttgacaggggacatattacatttaacaatttaagaatagggaggaataattgttccagacctcctttgtgacttttcattcattcattcaatataaatttactaargagccactgtttacagcctctgatctacacattgagtatgaagtaatgaggaaaaaaaaacccaaacagattacacacttttattgacaagtgttctacatcttggtatgggttagtcagaaatatagttctcacatgtaaaacaaaacaaaaaactcacccattgaaattttgtagtccctagtccagtacatccatgagtcttatagacctatgtactcacacataatgcaatccaacctaattaaatgccacaccatggttggaacccactggtgacaaactgataagtaggccag

SEQ ID NO: 879912 - DNA, 611 bp, Homo sapiens
aacagcatgccacgctgtctccccgacccctaccaccaaagatacctttcagatggcagctttttcccccaaacaccttcttcagtagcattatcttagaaagttattgaggtgcttaggtttacagacttggaagcctgactgtgtgatgcaattgagaatcatctgtctctaagattcagatgcatattcgttgagcttaaggttgacatacaaacatagaatgcaaatttatctatttatagtgaaacttctgtcttargaatcagaatactcaagtcctcagcaccagcacattctctccctataggtcatcccatatagggagcccattataatcagaagactttccagggtgacatgagaacatactgttagtttgatgaacttcagtgtttcttggcaacaggctaaattagcttgttgtttacaccgccacaaaaagaaagaccttgacaatggactacagtattctgtgtctggctaggcctgtttaaaatgctttggtgagcagcttacatgtaactttctgactctctttttaaatcttccataactcatcaggcatactttgtatcaacatattatttctttagatgtgttaatgaact

SEQ ID NO: 879913 - DNA, 667 bp, Homo sapiens
gctcattctttttttatggctgccatgtattctatggtgtatatataccacaggttctttatccagtctatcattgatgggcatttgggttggttccaactctttgctattgtaaactgtgctgcaataaacatatatgtgtatgtgtttttatagtagaatgatttacaatcytttgggtatatagccagtaatgagattgctgggtccagcggtatttctgatactagaggaatcaccacactgtcttccacaatggatgaactaatttacagtctcataaacattgtaaaagtgtttctatatctccacagccttgccagcatctgttgcttcctgactttttaataatcacatactaaatcttctcaatatataatatcatacagccacagctctcaagaaagaaatctgtagaaagtggtatctttccaggagaaatctttgacagctttcatgactgattgtattacatgttaatgaagtttttcctggagcttcattactgttcttaaagtctatctcataatgtacatttggagactgcctagaaaaatgtggtctctgtttggtgctggtaaagtggtgacaagatacctaataaagtgactgtacttgactattttccataatttactattttgggataagcttaacatcttcactg

SEQ ID NO: 879914 - DNA, 667 bp, Homo sapiens
gctcattctttttttatggctgccatgtattctatggtgtatatataccacaggttctttatccagtctatcattgatgggcatttgggttggttccaactctttgctattgtaaactgtgctgcaataaacatatatgtgtatgtgtttttatagtagaatgatttacaatcctttgggtatatagccagtaatgagattgctgggtccarcggtatttctgatactagaggaatcaccacactgtcttccacaatggatgaactaatttacagtctcataaacattgtaaaagtgtttctatatctccacagccttgccagcatctgttgcttcctgactttttaataatcacatactaaatcttctcaatatataatatcatacagccacagctctcaagaaagaaatctgtagaaagtggtatctttccaggagaaatctttgacagctttcatgactgattgtattacatgttaatgaagtttttcctggagcttcattactgttcttaaagtctatctcataatgtacatttggagactgcctagaaaaatgtggtctctgtttggtgctggtaaagtggtgacaagatacctaataaagtgactgtacttgactattttccataatttactattttgggataagcttaacatcttcactg

SEQ ID NO: 879915 - DNA, 604 bp, Homo sapiens
cttatcagcttaaggagtttggggctgagatgatggggttctctaaatatacagtcatgtctgccaggcaaggtggctcatgcctgtaatcccagcactttgggaggctgaggcgggcagatcacgaggtcaagagatcgagaccatcctggccaacatggtgaaaccccgtctctactaaaaatacaaaaattagctgggcatggtagcatgcacccgtagtcccrtagtcccagctactcagaaggctgaggcaggagaattgcttgaacctggaaggcggaggttgcagtgagccgagatcatgccactgcactccagtctgggctacagagcaagaatctgtcaaaaaaaaaaaaaaatcatgtcatctgcaaagagagacaatttgacttactctcttcctatttgaatatcctttatttctttctcttgcctgattgccctggacagaactgccaatactgtgttgtcttgtgctggttttcaaagggaaagcttccagctttcgcacattcattggctatgggtttgtcataaatagctcttattatttttagatatgtttcatcaatacttagtttgctgagagtttttaacatga

SEQ ID NO: 879916 - DNA, 602 bp, Homo sapiens
tttgtttggtttcactgcctatgctccttctactatgattcctaaacttgttgggaatcaaactgcaaagatttaaagagggagcaggtaaagacatgagtggagtgtgtttaaatcaatgagttcaaggcatttgttctttagaaaaaagatgtgatgattccttaaaatcagcgtttatcaaccttggccctattgacatattgggctggataaatgttttcagtaggaggatgtcctgtgtgctgcaggatattcagcaacatccctggcctctgcccacatgatgcaagtagcaccttctccaggtaggattgtaacaccccaaaatttcttcacaaattgccaaatgtcctatgggaggtaaaaatcaccttaggttgagaatccctgtcttaagtktgctatggagttaagaaaaaggttttgttacctttttttttttaaaatgaaggtgaagttgtttagggagacctgagtatgcttactgataataggagaaagaatcattagagaggaaatgattgaaaatgcaacaaaataaacaaggtgagacacagcatgatcttctggtgctcagtataatgtgtttcaagacacac

SEQ ID NO: 879917 - DNA, 625 bp, Homo sapiens
aaaaatgtgaaatattgaatgtatggcttaagagatctacaataaatgattatgtgaagttttgctttgttttgtatctgtagctgcttcttgaattacctgtcatttgtgattcttattaccttgcgtgtgtgtgtcaaaaaacattttcaaccttaaagcwgtgcgagtttgatctacagttgtttctgattcagtcaacactgagcttgaatattaattttatgaatttagttgcaagaataaaaggtagctggagaggctgggagttcaggagaatgcctcagtctccagtgactttcacagtaacactaaataaaccaagaatctaagaaaacaccatgtacttcataggcggtttcagactagttcaccgtacacttgttactcaatgtttgttcttaagtatttttaggtctttggagcttttttaagatgcagaaacctaggtcccattccaaaaatgccactcaaatttttttttaaccatgtccttggggatgagacttacttaccatttcttacacctaccagaacacaactcataagcccttcttcccatgtctagagattctggcttccccactgtaagaactgaagatactgcagctgaattgatgtcatg

SEQ ID NO: 879918 - DNA, 490 bp, Homo sapiens
tgtttccacccagggacacagtggttgcatttagtggtaagtcaggattgtcatcctagttttttgtactttctgagtctctgagccaatagagaagttactgtactggcttgagtgatcagctgttattattaagaagaatgtgaggtggagagggggcaggagcagtagctcaagcctaaaatcccagcaaaagatcactggaggccaggagttcgagaccagcctagatgacatagagacctcatttctccaaaaaaaattaattaggcatgatgatgcacacttggaaggctgaggtggaagaatcacttgagtcccagatgttgaggctgtagtgaactkggattgctcccctacactccagcttgggtgacagagcaaggcagaaagaaaagaaaagaaaaggaaagaggagaaaagaggagaagagaagagagaaaagaaaagaaagaaaataaaaggaaaaaagaaaagaaaaagaacgagg

SEQ ID NO: 879919 - DNA, 670 bp, Homo sapiens
aatgggtcccccactcccaccagtctcttcaccccaagaagtcattgccctccttgcaatgggccaacaccctgctttactttaggggagctgcccctccctgactgtcagtcccttagggtgggattccttccctaggcctgtccaatgagcgtggtacattccatgggaatgagaggcacagggctgggcaggtattcaaagtggggccattcagaggcaaggaatgtctgtccttggactttatctgcaacarttaggaaacagtgcttctctttacacctgggttgtgagtcctggagctgcaggtggccgtctttcctaagcataaagcccatgctgatggaagcagcctatggttctagtggcatcatctcagctcctaaatccagtctctttgggacccagatctttccctggacttcccccttgcaggagtccataatagtctgttttatacttaagcctcaacgaggtttttaaaattattattatttgttactgaatcttatcaaacatatcacccttggccagttttttttttcttttatttctagggattcagattctagaaatgcatttcttgttccacattctggaaacacattgcattgcacagccgatggtatttaggaagggagttaaccctaccacagggaccagtgcacag

SEQ ID NO: 879920 - DNA, 584 bp, Homo sapiens
acatatgtaacaaatctgcacattgtgcacatgtataccctagaacttaaagtataataaaaaaaattaaaaagataccaaaactgaaaaaaaataaaaataaaaaaataaagatgtcagaagggctgcatcttttctgaaggcatctagggaggaatcattttcttgcctttttcagcytatagagaacttctctttctgtcttcaaagtcagcaacagccagtcaagtttatttctgtccagctctaaaactgactcttctgcttccttcttctgcttttaaagactcttgtgattacattgcctccacccaaataatccaggataatctctccacctcaaggtcagctgattagtaaccttaattctatcggcaacttagttgccttgtcatgtaacatagcatattcacaggttctgaggattagaacataggtacctttgggaactcttttgcctactatgctattttaaatgaaattaaacagggatctcgccagcagaacttcagttaccttctagtatctaaagaataacgtgaattgccaaggcaatcacaggatatggggtctgtgaaatctat

SEQ ID NO: 879921 - DNA, 625 bp, Homo sapiens
ttagtcaagcagtaccaagtttggggctggagagcagcaggttagctattacaaatatttttaccagtgaagtaatttttttctggataaatgattgcctatgcttttccttgagaaattagaagggaaaaatctactggtgcttttcctaattcaactatctttctagacatcatccaatagagattattgtcaggaacaattttctgtagacatcaatcaaattaaaaagaagtaatagcaaacataatggtataatttctactttcaaatatctagtaggaatgtttaagayagccatcaatgatcattatgaagtaacttttagtaactgagccaacatttcataatgccctgcattcattcatgcacacacacacacacacacacacacacacacacagtcattgaattagtggtggtagtcaacccaaattaagtagaagtctgtattaacttatagctttggtgccagctaaaggtaataataacagaaaccctcaaagttatcaattttctgttttatttttatttggcatgtattctttattttctgcctgcatttccaaagtttcattacattagactcatatttaataagactgaaattttagtggttgtagaa

SEQ ID NO: 879922 - DNA, 575 bp, Homo sapiens
tttttgggtttcctggtgcacataaaagttatatttatattacactatagtctattaagtgtaaaatagcatcatgtctaaaaaacaatgtatgtcttaattaaaaatactttattactaaggagggttttgcttccatgttgatgtctgctgactgatcaaggtgagtagctgctgaaggttagagttgctggggcaatttcttaaattaagacaacaatgccacrtcaccaaaatagcagaatagaaagtaacctgttcatatccctttataaaaacaagaactctgcacccatctaccatcaaaaatgtctctctgagagcctcaggattcaagtaggagtttgtgaaactccagtgaagcctaagaccttggagtgtcattttgagagtgcaaactgaaacctagttggccaattcactgagctttctcctgagttcaagcccagaaaaggcctagtcctacaagaggcttggttacagccctgtttgggcctgagcctgtaaccaaaaccatctgccaagaggtccagaaagaactgtgcacgctagtactttggcaaaaaggctcattt

SEQ ID NO: 879923 - DNA, 474 bp, Homo sapiens
ttttcatatgtttgttggccgtataaatgtcttcttttgagaagtgtctatctctatccttcacccactttttcatgggttgtttttttcttgtaaatttgtttaagttctttgtagattctggatattaaccctttgtcagatggatagattgcaaaaattttcccccattctataggttgcctgtaactctgaagatagttctttttttttttttcctgctgtgcagaagctctttagtttaattagatcccatttgtcaattttggcttttgttaccattgcttttggtgttttaracatgaagtctttgcccatgcctatatcctgaatggtattgcctaggttttcttctagggtttttatgattttaggtcttatgtttaagtctttaacccatcttgagttaatttttgtataaggtataaggaaggggtccagtttcagttttctgtatatgtctagccaattttc

SEQ ID NO: 879924 - DNA, 601 bp, Homo sapiens
gttcacataaaacatacagataatgaaagttttaataacaatatcactctgtttccagaaagacctaatatttgctgttgtggtggcaaataccttgcccagagctcccagatagtctgccacctcccccgtcctccctccagggcatgtacagtaaagttggatgattgaagtgttccagatgactcggctttgggcactcaaactgctttgtccccagcacctggtttattcctcctcctctcttccacaccttgttttccttctttgaaggaatggagggacgcttcagcagaaggagtaggaaaggatgcaatggtggttggttgtaataaacaggagcctgggttgccraaggggctgagcctcacaggggctgtgctggagtggttactgcaagcttagtatgtgtctgtgctcctcgaggcagaggagccctgtttataagcctggttcataatttgctgatctgtcgtaggaagtaaatggcccagggttatcagccttgttcatttgtgcagaacattatgcatcctcctgttggttcaatccatcccagagtctaaattacaggtcataaagcagcttctgcacgcaggat

SEQ ID NO: 879925 - DNA, 590 bp, Homo sapiens
cccccatgctattctcatgatagtaaattctcacaagatctgatggttttataaagggcttccttctttgcttagctctcattctccttcctactgcaatgtgaagaacatgtaggcttccccttctgctatgatcgtaagtttcctccccacatgggaggtctccctagccatgtggaactgtaagtcaattaaacctcttcctttataaattacccagtcttgggcagttctttatagcagcawgagaatggactaatacgatggcctccagctccatctatgttcctggaaagaacatgatctcattttatggctgcagagtattccatggtgtatatgtcccatgttttctttatccagtctatcattgatgggcatttaggttaattccatgtctttcctattgtgaatcatgctgcaataaacatacacatacatgtgtctttataatcgaatgatttatattcctttgggtatatatccagtaatgggatttctgggtcaaatggtatttctatctttaggtctttgaggaattgccaccctgtcttccacaatggttgaaccaatttacactccctccaaaa

SEQ ID NO: 879926 - DNA, 555 bp, Homo sapiens
cgggctccgagcagatcgaggtgggagagcttttaactagaattagaaccttctcttctaagagactttctgcaggcaggaagtcatttgcccagggtattggttctcctgctgtggtgttggtgagagtcctttagggctctgcaagagggaccttaacttgtgtagttaatgagccaaaggccttctgcctgacaatgttttctgaagatctatcttcctctgaatgcagcagttttcctctctttaataaggatgatctgatttacaaaacaacaaaaaaacagtaaatcaagaccaaaaggtaagacactctgccctcaggattaatgaacccaaaggctkgtgtccatacagatccttctgatcctaatatcctacagtagaagatagagcagcctccatgtttgggacaatatttttattatgtgttaacatcaaatctgtagaagctccaagctctgaaaagattatacccactccttgtcatgtaatttaaaataatagaagaattttctaaaccaaaaagttaaaagttaaacaagataaacagtt

SEQ ID NO: 879927 - DNA, 611 bp, Homo sapiens
tactttgggaggccatggtgggaggatcacttgaagccaggggttcaagaccagcaaggacaactaaggaagaccctatctcaagaaaagaaagaaagaaagagaagaaagaaagagagagaaagaaagaaggaaagaaaaargaaagaaagaaagaaagaaagaaagaaagaaagaaagaaagaaagaaagaaagaaaagaaagaaagaaagaaagagaaagaaaagaaagagaaggaaaggaagcaaatgaaggaaaggaaggaaatgaaggaaaggaaggaaaggaaggaaaaagggataagcatggtggcatgtgcctatagttccagctgagagaactgagcttgagggttgggaggctgaggttggaggattgcttgagcccaggagttcaagaccactgtgatctatgattgcccactcacttcacttcaatgtgggcaacagagcaaaatattatttataaaataaaaatgaaaataattgtttaaaaagagcacattttaagcataaaacagaatttttgaaaacagagaaaaaaatcatataaccactagcttccaaagtatggtaattattttattgtattttgtctttataatcactga

SEQ ID NO: 879928 - DNA, 562 bp, Homo sapiens
atatggacaatgaaatccaggcagagatggtctcagatagagatgaggaacctgttgggactggagcaaaaatgactcctgttatgttttagcaaagagactggcagcattttgccactgccctagagatctgtgaaactttgaacagatgatttagggtatctggcagaagaaattctaagagatgatttaggttatctggcagatgaaatttctaagcagcaaarcattcaagatgtgagttgggtgttgttaaaggcattcagttttataagggaaacagaacataacaatttggaaaatttgcagaattatgtatatttgcacaaattacctatatatttatatattatataatatatataaatttgcagaattgtatatattctcatacaaattatctatatattttatagaatacaaaatttgcagcctgaccatgcaatagaaaagaaaatcccattttctgaggataaattcaagccagctgcagaaatttgcaaaagtaatgaggaaccaaatgctaatcatcaagacaatggggaaaatgtctctagggcat

SEQ ID NO: 879929 - DNA, 586 bp, Homo sapiens
taacaaaaatgtcaatatgtatattcatgtataaatttttgtttgtataaagtttcttcaattctcttggttatatccctaggagtaaaattggtgggttacattttaagtctatgtttaacattttgataatgtgtcaagttgttttgcaaagtagttgtgttattttctattcccaccagcaatgtttgatggttttaatttctggacatccttaccaatacttgttattatctatcttatttttttaattaaagccttaaagaaaatgtgaaatgtgacttcactgtgattttgatttgccttttcctaatgattaataacattaaatatcctttcatgtgctgcttattggctacttgtgtatcttatttgaaataaaatatytatttaaatttttatattaaaacattgggttaaagggtttttttatattgttgatatacttctcttattatatacatataaggttggacacagtggctcatgcctgaattcacagcacttttggaggccaaagtgggagtgtgccttgaggccaggagttcaagaccagcaatggcgttagcgagatggtgtctcaaaa

SEQ ID NO: 879930 - DNA, 604 bp, Homo sapiens
tgttcttgactctttatccaattaccagtctgtgtcttttaattggggtatttagcccatttacattgagtttaacattgttatgtgtgaatttgattctgtcatcatgatgctagctggttattttgcacattagttgatgaagtttcttcatagtgtcattgatctttatattttggtgtgtttttgcagttgctggtaccagtttttcctttccataattagtgcctccttcaggagctcttgtaaggctgccctgatggagacaagatccctcagcagttgcttgtctgtaaaaaaattttatttctcctttgcttatgaagtttactttggctrcacatgaaattctgggttgaaaattattttatttaagaatgctgaatatcggccccactctcttctggtttgtagggtttctgcagagagatccactgttagtctgatgggcttccctttgaggtgacctgacctttctctctggctgcctttaacattttttccttcatttcaaccttggataatctgatgattttgtgtcttggggttgatcttctcgaggagcatctttttggtattctctgtatttcctgaattgaatgtt

SEQ ID NO: 879931 - DNA, 604 bp, Homo sapiens
tgttcttgactctttatccaattaccagtctgtgtcttttaattggggtatttagcccatttacattgagtttaacattgttatgtgtgaatttgattctgtcatcatgatgctagctggttattttgcacattagttgatgaagtttcttcatagtgtcattgatctttatattttggtgtgtttttgcagttgctggtaccagtttttcctttccataattagtgcctccttcaggagctcttgtaaggctgccctgatggagacaagatccctcagcagttgcttgtctgtaaaaaaattttatttctcctttgcttatgaagtttactttggctacacatgaaattctgggttgaaaattattttatttaagaatgctgaatatyggccccactctcttctggtttgtagggtttctgcagagagatccactgttagtctgatgggcttccctttgaggtgacctgacctttctctctggctgcctttaacattttttccttcatttcaaccttggataatctgatgattttgtgtcttggggttgatcttctcgaggagcatctttttggtattctctgtatttcctgaattgaatgtt

SEQ ID NO: 879932 - DNA, 587 bp, Homo sapiens
aaaaccctcagatctcatgagactcattcactatcatgaaaacagtgcaagagagacctacccccataatttaatcacttctcaccgagttcctcccacaatacatgggaattgtgggagttacaattcaagatgagacttgggtggggacaaagtcaaaccatatcattccactcctggctcctcccaaacctcatgttttcatatttcaaatccaatcatgccttcccaacagacccccaaagtcttacttaactcatttcagcattaactcaaaagtccacagtccaacgtctcatctgagacaaggcaagtcccttccacctatgagcctgtaaaatcaaaagcaagttagttacttcctagatataaaggggatatgtgcgtcrggtaaatacagaaattccaaatgggagaaattggccaaaacaaagggcctacaggccccatgcaagtttaaaatccagcagggcagtcaaatcttaagccccaaaatgatctccttttacttcatgtctcgcctctgggtcacactgatgcaagaggtggggttcccattgtcttcggcagctctgcccttgtgggtc

SEQ ID NO: 879933 - DNA, 621 bp, Homo sapiens
gtatagcttgaagtcaggtaatgtgattcctccagctttgttctttttgcttggctttttttttttttttttttttttggctattcaggctctttttctgttccatgtacatcttaaaacagttctgtaaaaaatgtcattggtactttgataagaaaaacactttatctgtagattgtttttgtaatgtggctattttagtgttctgattcttccaatccatgagctatagaatgttttgttttgtttttccattagtttgtgtcatctgttttactttarcatggttttgtagttctctttatagagatgattcacctctttggttaaaggtatccctagtcagagtgtgtgtgtgtgtgtgtgtgtgtgtgtgtgtgtgtgtgtgcgcgtctattttaaatgggattcggttcttaatttggctttcagcttgaatgttatcagagcatagcaatgctgttgatttttgtatattgtttttgtattctgaaacttaactgaagttatgtctcagttctagaagccttttggcagggtctctagggttttccaggtatgtaattatattgtcagtgaagagagataagttgatttcctcttttcctttttgaatgctgt

SEQ ID NO: 879934 - DNA, 700 bp, Homo sapiens
gagggaacctagacaagccatttactttctctgattgcaagtaagtgtggcttatctttttctcatatgtccaaataaggttgtttcacaactttccatgaaaacaccatgccaatatgactaatattaaaatatcaaattcaccttcatccttcctgtggagttttctacccagtttctctgcccatcaccatgagagcacaaacatcattattcacatattctgtttaccacttagcacatggcgggtgtttaattagtgttacaagagtaatcataacatacagaaggtggaagaaaaagttatgtatttttaataagagtgcgacaataattttatttttggaaacacactcaacttaaatgtgatttcttgtttatattacctttgtcttttccatttcacatcagcaacaggaaaaaaagtaagtttgtgtcatagtcaaaaggtattttttcacaattctactttggtcattcattcaacagccaacaaataatctagggcccactatatgccaggtactgcrgttattattactccaaacttagttgaaccctgaaagatgcactcattgcccctcaacttccttcctcaaaagttgcagagtgtgatgctattgtctactgttcctcgtggctggctagcatctcattcctggcccagttcttgtgtgccgctatggagcagaggtgattt

SEQ ID NO: 879935 - DNA, 663 bp, Homo sapiens
acactaaataaatataaaaccactatttgcttaatttcaacttcctatgctacctccaatatattaaatggatggtaatatcttcttatatcttcttttttttttttaatgtggcagattgggaaaggattgtggagtgagacagacctggagttccatccctgctctgtttaatatttgtatggagtttgatgattaaattttagttccccatttctctgagatttaaagttgaactaaatagtacttaatccctagggttatttgtgcctagtttttgctacagtgcctacctaacaatgggttctcaaaacatggtagcttcaaacattcactttaatgacattttaatctacaattagaggtagggtatttttaatatagagtatagccagatackagaaaaaccatctgctcctaaaatcaacattgaaagataaagcatagaaagaatgtccagatacatgagagaacctctatatctgttccctgcagagtaattattatgcaattaatattaacaaatactttgaatatctgaaatgaaatctctatgtaagttctaagtataatttttatttcctctaattatacaatgaaaacattattgctagtatttctaattatagcagtctggattactaaaattttaaaatgaactgt

SEQ ID NO: 879936 - DNA, 644 bp, Homo sapiens
tttcttgtgtattataatcattaagttttgtgtgtatccagaaaatttttttttctctttctttctctttccttctttcttctttttttttttttttttttttgacagggtcttgctctgttgcccaggctggagtgtaacagcacagctgtctcacttttgggcttaagggatcctcctgcctcagcctcttgagtrgctgggactacaggcatgtcccatgacacccagctaatttttaaattttgtgtagagacaggggcctcactatgttgcccaggctggtctctaactcctgagctcaagtgatgctcccgccttggcctcccaaagtgctgagattacaggcatgagctaccatacctggccagaattttctattttctataatttttatcagcataattgttaaaatattctaactgaatgtctaaacaatagtgtactttaagttctccctgtttttttatatctgaattgttcacttgccaatataagctgccaatagatttttataaactctatatttatgactttagtgttttataggtgaaacaaacttttaaagcttatcaagtacaactgtctcaattttcagacaagaaactgaagacacaggtaattgactaagttctctcaagcta

SEQ ID NO: 879937 - DNA, 556 bp, Homo sapiens
ttcacttgtttatctgctgacattccctccactattgtcccatgaccctgccaaatccccctctgtgagaaacacccaagaattatcaataaaaaaataaattaaaaaaaaaaaaaaaaaaaaaaaaaagaaccgctgttgctggccaggcgcggcggctcacgcctgtaatcccagcactttgcgaggctgaggcgggcggatcacgaggtcaggaratcgagaccatcctggctaacatggtgaaaccccgtctttactaaacatacaaaaattagcttggcgtggtggcacgtgcctgtaatcccagctacttgggaggctgaggcagaaggatcgcttgaaccagggagttggaggttgcagtgagctgagatcatgccactgcattccagactgggcgacagagtgagactccatctcaaaaaaaaaaaaaaaaaaaaaaactgctgtcaccgagagtctgagccctaagagagagttgagggagagaagggaacctgtcgtgaggctaaggtgtcattaggttggatttaacagactctcctgttagcat

SEQ ID NO: 879938 - DNA, 556 bp, Homo sapiens
ttcacttgtttatctgctgacattccctccactattgtcccatgaccctgccaaatccccctctgtgagaaacacccaagaattatcaataaaaaaataaattaaaaaaaaaaaaaaaaaaaaaaaaaagaaccgctgttgctggccaggcgcggcggctcacgcctgtaatcccagcactttgcgaggctgaggcgggcggatcacgaggtcaggagatcgaraccatcctggctaacatggtgaaaccccgtctttactaaacatacaaaaattagcttggcgtggtggcacgtgcctgtaatcccagctacttgggaggctgaggcagaaggatcgcttgaaccagggagttggaggttgcagtgagctgagatcatgccactgcattccagactgggcgacagagtgagactccatctcaaaaaaaaaaaaaaaaaaaaaaactgctgtcaccgagagtctgagccctaagagagagttgagggagagaagggaacctgtcgtgaggctaaggtgtcattaggttggatttaacagactctcctgttagcat

SEQ ID NO: 879939 - DNA, 556 bp, Homo sapiens
ttcacttgtttatctgctgacattccctccactattgtcccatgaccctgccaaatccccctctgtgagaaacacccaagaattatcaataaaaaaataaattaaaaaaaaaaaaaaaaaaaaaaaaaagaaccgctgttgctggccaggcgcggcggctcacgcctgtaatcccagcactttgcgaggctgaggcgggcggatcacgaggtcaggagatcgagaccatcctggctaacatggtgaaaccccgtctttactaaacatacaaaaattagcttggcgtggtggcacgtgcctgtaatcccagctacttgggaggctgaggcaraaggatcgcttgaaccagggagttggaggttgcagtgagctgagatcatgccactgcattccagactgggcgacagagtgagactccatctcaaaaaaaaaaaaaaaaaaaaaaactgctgtcaccgagagtctgagccctaagagagagttgagggagagaagggaacctgtcgtgaggctaaggtgtcattaggttggatttaacagactctcctgttagcat

SEQ ID NO: 879940 - DNA, 556 bp, Homo sapiens
ttcacttgtttatctgctgacattccctccactattgtcccatgaccctgccaaatccccctctgtgagaaacacccaagaattatcaataaaaaaataaattaaaaaaaaaaaaaaaaaaaaaaaaaagaaccgctgttgctggccaggcgcggcggctcacgcctgtaatcccagcactttgcgaggctgaggcgggcggatcacgaggtcaggagatcgagaccatcctggctaacatggtgaaaccccgtctttactaaacatacaaaaattagcttggcgtggtggcacgtgcctgtaatcccagctacttgggaggctgaggcagaaggatcgcttgaaccagggagttggaggttgcagtgagctgagatcatgccactgcattccaractgggcgacagagtgagactccatctcaaaaaaaaaaaaaaaaaaaaaaactgctgtcaccgagagtctgagccctaagagagagttgagggagagaagggaacctgtcgtgaggctaaggtgtcattaggttggatttaacagactctcctgttagcat

SEQ ID NO: 879941 - DNA, 656 bp, Homo sapiens
gttatgaaatttttttcacagcaggatgactatggtcaaaaacaatgtattgtatatttcaaaataagagagtaactttcaaatgtctcatcataaaaaagataggtaaataaggtgatggatacgttaatggcttgatttaatcattctacattgtatacatgtatcaaaatattacactgtaccccttaaatgtatatagttataatttgtaaatttaaaatattaattcaaaaatataagcaccatgttcaagatggtttgtttcctaaatatctgaaacatttttgggttttctgcactgccttctcattgaattgttaagaactattttcaagtttatcagtttattccctgtcttattctggtatagmatttgtcatattaattgcagttttattttttaattacattttttatttctaaaatatttgccactttatttattacacccaattattgtcatttcagtttttttcccacaattattttcttattttttcctggaaatacctttattaccatttaatacattcatatcatgtgtattttaatgttttataaaataaattttatcttaatgttatgacatcatattttaattttatcattaaattttttcacatatgaaattttacactgagggtttatttttg

SEQ ID NO: 879942 - DNA, 580 bp, Homo sapiens
caaaagaagacatttatgcagccaacaaacatataaaaaaatgctcttcatcactagtcattagagaaatgcaaatcaaaactctagtgagatagcatttcacatcagttagattggcaatcattaaaaagtcaggaaacaacagatgctggagaggatatggagaaataggaatacttttacactgttggtgggwatgtaaattagttcaaccattgtggaagacagtgtggtgattcctcaaggatctagaactagaaatgccatttgacccagcaatcccatcactgggtatatacccaaaggattataaatcattctactataaagacacatgcacatgcatgtttattgcggtactatttacaatagcaaagacttggaactaacccaaatgcccatcaatgataaactggataaagaaaatgtggcacacatacaccatggaatactatacagccataaataaggatgagttcatgtcctttgtagggacatggatgaaggtggaaatcatcattctcagcaaactatcacaagaacagaaaaacaaacaccacatgttctcactcatagtggg

SEQ ID NO: 879943 - DNA, 581 bp, Homo sapiens
acgtaaaggacctcttcgaggagaactacaaaccactgctcaatgaaataaaagaggacacaaacaaatggaagaacattccatgctcatggatgggaagaatcaacattgtgaaaatggccatactgcccaaggtaatttatagattcaatgccatccccatcaagctaccaaagactttcttcacagaattgggaaaaactactttaaagttcatatggaaccaaaaaagagcccgcattgccaagtcaatcctaagccaaaagaacaaacctggaggcatcatgctacctgacttcaaactatactacaaggctacagtaaccaaaacagcatggtactggtaccaaaagagagataaattggaaatctaacagaagcattyagaactacatgtcaagcccaagtcacttttagatatttgagaatgtgtacaaaccatatgggtgtactttccccaaaagtgtgttttttgcagtagtggttaggagtattcttttgtgagatggtatttttcttaagcaaccaccatttagattcttagttctcttaacttttaggttaacaactcaatacatctt

SEQ ID NO: 879944 - DNA, 617 bp, Homo sapiens
ttgttttggaatattttcagcaggaatggtaccagctcttctttgtacatttggtagaattgagctgtgaatctgtgtggtactgggcttttgtttttttttttttctggttggtaggctatttattattgcctcaatttcagaactcattattggtctattcagggattcgatgattcaatcttggaagggtgtatgtgtccaggaatttatccatttcttctarattttctagtttatgtgcatagagatgtttataatattctcagatggttgtatttctgtggggtcagtggtaatatcacccttattatttctgattgtgtttatttgaatcttctctcttttcttccttattagtctagctagtggtcaatctattttattactttttttcaagaaaccagctcctcgattcattgatcttttgaatgtttgagtgtgtgtgtgtgtgtgtgtgtgtgtgtccctatcttcttcagttcaactcttattttggttgattcctgtcttctagatttgaggtttgtttgctcttggttctccagttcttttagttgtgatgttaggttgttaacttgagatttttctagcttttgaataaggtcatttagagg

SEQ ID NO: 879945 - DNA, 583 bp, Homo sapiens
tctttcccatgctattcttgtgatagtgaatatgtctcatgagatctgatgggtttatcaggggtttctgcctttccttcttcctcatttttctcttgccaccatgatgtaagaagtgcctttctcctctcatcatgattctgaggcctctgtagccatgtggaactgaaagtccaattaaacctctttttctttccagtctcsggtatgtctttatcagcagcatgaaaacagactaatggttccaatagaatggggcattgctgaaaagatacctgaaaatgtggaagcgactttggaactgggtaacaggcagaggttggaacagtttggagggctcagaagaagacaggaaaatgtgggaaagtttgggacctcctagacacttgctgaatggctttgacaaaaatgctgatagtgatatgaacaataaggtctaggctgaggtggtcttagttggagatgaggaacttgttgggaactggagcaaaggtgactctcgatatgttttagcaaagagactagcagcattttgtcccttcccaagagctttgtggaactttgaacttgaaagagatgattt

SEQ ID NO: 879946 - DNA, 645 bp, Homo sapiens
tttgttttagcaggtctgattctccctttgaggatcttgcttgttcataagattaactcaaatgaataactttgtataatataacctaaaggttgaaattacatttcttattaaacaaagagcaaaatacattgtgaatatttatcatgagccatagaccgtattactcaacctataaagatggacctggagagttcagtctgtaggaatttgtgtagactaaagggaaacagatatgaaaacaagtatgttcaatgtaatttcacaagtgctacagtgaagaatgtgggcaaatgctattgatgacagatgaaggaccagcaggctggagagagtggggtaagtgttaakagttacagggttctcagactggcagctgttggctgagtctagccacagaccagatgcaatttgaataacttactggcataagctcctagtattcatgatatggcattatttgttcttgaacactaactcctgataatactctcaaagtttctgactatgctttgttgatactgaacacaaatgcattccctagagtgtgcgagagactggaaattatcactcattctctagtcatgttgaatttactgtttgaaattttatagtataaatgtagaacagcacatctttcaacaa

SEQ ID NO: 879947 - DNA, 603 bp, Homo sapiens
tttgtgcagacattgtcttacataaagcacaaagaatacatgtgaacataatggagaaaagtttagttggtgtgtgagtactcccattccatctagctaatcttgtgagacagataaactcctgattgggtcccaggtcactagttaaaagagagtcttgtcggtgaggcaaattcaagaagaagcccacgagaaagagtcagatgtaatgtactaaaaagcagtgtcagtgccaaaaaaaaaaaaaaaaaaaaaacccacacaggataaaggcaagaagagttggtattcaggtagtaaaaccaactaaaagtgaaatctgaatgatatgaagatgacctgaaaatgttctttggagcagctgcttctctctttaatggaagttgcctgataagtgggtttggaaagatgtctaataatataccacmcaaaggactaacaaagagtcaaagagtttcaaattgattcaattatggtacaagaatatatattctgtttattaagcaaaagcacagtgagatgaaaactgctgaggaaaaaaaaagacactgatagcttagaaaatgtggtctgagctatgttggatattacaatcaggcagaa

SEQ ID NO: 879948 - DNA, 642 bp, Homo sapiens
tattcatacaataataaacaccgttttgctcaccaattatttctagttttccttctggccatgggaaggctgtactgtcctgcccccttggagttaggtgtggtcacatgacttgttttcccagtgaaacgtgagcagaagtcacatgtgtcactttaggatgtacaatttgccatactggatattttccactgccatggcaatcctcacttctgccacattttattgaccaaagcatgtcagaaggccaatctagaatcaaggagtggggaaatagattctacttcttgttgagaggatgtgcaaagttacattgcaaaagatgtagggaagggtgaagaattgtgactgttttrcaatcaatgtgtctaccacaattattttctcctttcatttttctttcctttttaaaatttatttaatttttaagcctttaaaaattttcagttgtatgcctatttcatttatattttaaaaacttatacatttaggtctatcaatgtacattttcataaggcttttggggtatcctaccagttctaatgtggtagtgttgccctgtaaatggactaaaattataattttacttctttctttgatctaatagccatttagggttatgttttaaaacatttagatcat

SEQ ID NO: 879949 - DNA, 479 bp, Homo sapiens
cactttaactcaaagcttatgaatcttatactctcctaaaataataatttcatatctatagtgagatagatatatagatagagatacatgtcaggttcctagagacattaagtgtttttctatgcttacagctaatatggtagggtagaagcatttttctttcttttttcttttcttttttttttttttgagatagggtctgcctctattgcccaaactgggcggtagtggcgtgactgcaactgactgccgccttgacctcccaggcttaagcgatcctccaacctcagccttccaagtaggtgggactacatgcacaagacmccatgctggactgctttgtaaaatttttttataaagacaaggtctcactatgttgcccagtctgctcttaaactcctgagctcaagtgatcctcctacctcagcctcccaaagtattaggattacaggtatgagccaccacacctggtatgagaa

SEQ ID NO: 879950 - DNA, 596 bp, Homo sapiens
gagaatttggctgtatttttaaacaatacataggggtagaattttgtctccatattaaaaaaaaaaaaaaaaaagaaataaacctggaaaaggctatgcaaaactctgtgaatattacattgggtctttacagttcatgtccctgggatgaacatgaacaagatggttctaggaaacaaaattcacaaagatcaaaaagaggtgttcatggaataaggttgtgtcttgaaagctttcctaggtgtcccacccagctcagtgaaactgagtccttatttgatgtagtttccattcacagctgtcatagtctacagtgcagttcttttcaccccaaaatatgtgtggttttgacaaatgttctccctaaaataacccagaatacatgataagattattaataggcatgctcttaatagacaatgtcagtaatyttaacacttggtcattcaaaactctagaaatgctgatacaaaaatatgatggctactaaagtaatttagggagaaaaaaaatgaccacaaaaataacaacactgtctttaaggcactaatagtatcactagaattattaattgacaatatgcactaaaaatacaa

SEQ ID NO: 879951 - DNA, 627 bp, Homo sapiens
  misc_feature 614, 615, 616, 617, 618, 619, 620, 621, 622, 623, 624, 625,626, 627: n = A,T,C or G
tccacatgtttttcattctgatatatctctaagcagtcagctgtcctgtgattgcttaaagttgggttgaaaacacctagactttttagttcatggggtgaagagctatgaggagacacatttagatgtaatgccaaggaccgtgcctctcttagagatcttgaactttgagctggatacagtgactggatgggaattaagcttctatgtcttaggaagaggctggttgcattctttacacgggagaaatttgagacatttctgatagttggtggccaaaaagaggaatgtggcagagaatgatgacttgtttactatgcccatttccctttctgtctcatagcctctcttatagatgggagtggccatggacagaattttggcccattcaatctgggctaagttattcttaggcaggacacttccaattctgacccataaataatctcctctctctcttcccaaacactgacytaacctgtgggtccagtgggaattagaatcactatttggaatgaagcaggtcagtgagtcactacacaaaaagagagtcttccagaagaactgcctattcatgagcatacatgttgggtgactttattgtgttaatcgcnnnnnnnnnnnnnn

SEQ ID NO: 879952 - DNA, 631 bp, Homo sapiens
cattaactgtcagctcttattttgttgaataatttttacatagatgagtggtgaatttgagatatagttagtaaatggaagataagtatgtcatttttttccctccttagctataatgatgggttctattaagagatttcctagtgttgaaccatctttgcattcctggatgcaacatgccaggaaaaccrctgttgttttttgctttttagttgtttatttgtttatgctgacagattctgtttactaatgctttatttgatatatgtatatactttttgaagatatgaggtctcattacattttccagactggagtgcagtggctattcacaagtacgtttacagtgcactatctctgggctcaagtgatcctctcacatcagcctcctgagtagctgggacaacaggtacctgccactgcacctggcactctttgatattctttagtaagattgatctgtcttctttttttgatgcagttagtttttggttttaatgacacattctttatagaaaagaactggaggattttctttgcttttctgtgctgtaacatagtttcaggagcagttgggattcttgatttttgcaaatgtgttagaattcctatgaaaaaatattcagggctg

SEQ ID NO: 879953 - DNA, 631 bp, Homo sapiens
cattaactgtcagctcttattttgttgaataatttttacatagatgagtggtgaatttgagatatagttagtaaatggaagataagtatgtcatttttttccctccttagctataatgatgggttctattaagagatttcctagtgttgaaccatctttgcattcctggatgcaacatgccaggaaaaccgctgttgttttttgctttttagttgtttatttgtttatgctgacagattctgtttactaatgctttatttgatatatgtatatactttttgaagatatgaggtctcattacattttccagactggagtgcagtggctattcacaagtacgtttacagtgcactatctctgggctcaagtgatcctctcacatcagcctcctgagtagctgggacracaggtacctgccactgcacctggcactctttgatattctttagtaagattgatctgtcttctttttttgatgcagttagtttttggttttaatgacacattctttatagaaaagaactggaggattttctttgcttttctgtgctgtaacatagtttcaggagcagttgggattcttgatttttgcaaatgtgttagaattcctatgaaaaaatattcagggctg

SEQ ID NO: 879954 - DNA, 532 bp, Homo sapiens
tgggtttttgtaatgttaccttttctgaggtttccccagacttctaggcatctggagtcctccctggaacagaaggtttttaagatcctacaaatggagccaatcttctctagcaggggacagagtaaatggcttaataggcctatcacatcttaatttttttaatggttttatatcctggggtaacagtgaggaaggcatgattttattattattaattattattctattatyacagttttccagtctggctctttgatgtttacaagttcagacaacatgtggttttcaagccaggtttcataaccttaaactacctttccatgtggcttctgtccaccctattttgttttagatcttgtttatgtttggcttaaatcatgagttggctgtggtgtgtattttgccacatggattcaaggcatcagatgaagacagcattttggatggcatctacatcgaagcacagttacaaaacttgtgtgccaatgcttgccagactctggctgggtggatgagtcctgggctgccc

SEQ ID NO: 879955 - DNA, 638 bp, Homo sapiens
gcagaatcataggccacacctaaagtaagcagaatatgatgacctgatagatactgtggccacaatagtaggaagatcaggaagaaggtcccagccagaacctgctattctaagagcaggatctcatcaccttagctacaatctaatgaactgctggcttctgaaccacattgtgtctgctagatttgccccaggaaaatkgatgtgacacattctgaccccttcctccttatttatcctaaagcagaacctggggagggcatttcatttctaccttttaataataattgcaaaaaattattgagtgtttaatgtgtcccagacagcgtgctaaaatctttacattaattacatcaatgaatcttcaaataactttctcaagaatataatattaatatcaccacttcaattttgagatgaggaaagtgaagtaggaagaggctaagaaacttggcaaaggttatgtactccttgggagaagatctgggttaaattagacttactcctatctagaacctagctacaaaggaatctgaaagttttaatatttagcttctgacctctgtagtacagaagacatgctagaacaaggttggaacagattgagcttgtcattccactagattcacaagctgact

SEQ ID NO: 879956 - DNA, 618 bp, Homo sapiens
tgaaattggatccttatctcacatcctatacaaatatcaactcaaaatcaattaaagacttagatgtaagaccaaaaactgctagaagaaaacataggggtaaaactacacaacattgctctgaacaattatttttttgatttgacttcagaagtgcaggcaacaaaagcaaaaatagacccaaatgggattacattaaactataaagcatttgcacagcaaaggaaacaacagcatgcagagacaacttgtggaatgagagaaaatattggtaagccatgcatttaataaagaatttatatctgaaacatrtaaggagctcaaacaactcaacaacaagaaaacaaaaaactcaataaaaaaatgggcaagggacctgaatagatatttctcaaaagaaaatatacaaatgatgaacagaaatatgaaaaaatggttaacatcgcaaatcattagggaaatgcaaattaaaaccacaatgaaatatcatctcacagctgtcagaatggctattataaaaagatgaaagatagctagtgttgatgaggatgtggaggaaagggaactctagtacgctattggtgggaatgtaaattagtacagccactatggaaaact

SEQ ID NO: 879957 - DNA, 589 bp, Homo sapiens
cttcataaaatgagttagggagagtcccttcttttcaaatgtttggaatagtttcagaaggaatggtaccagctcctctttgtacttctgatagatttcggctgtgaatgtgtctggtcctttgctttttccagttagtaggctattaattactgtctcaatttcagaacttgttattggtctattcagggattcaacttcttcctggtttagtsttgggagggtgtatgtgtccaggaatttattcatttcttctcaattttctagcttatttgtgtagaggtgtttacagtattctctgatggtagcttgtatttctataggatcagtggtgatatcccctttataatttgttattatgtctatttgatttttctctcatttcgtctttattagtttagctagcagtctatctatttttttttgtttgttttttcaaaaagccaggttctgcattcattgatttttttgcggggtgttttctgcctcaatctccttcagttcagctctgattttggttatttcctgtcttttgctagcttttggattaatttgctcttgcctctctatctctttttattgtgatatt

SEQ ID NO: 879958 - DNA, 585 bp, Homo sapiens
tcaccacaatgagtctttctatgattattcttttaaaaattcacatcttagcacttttctctctcttgtagctgcttccttcttattagcggccatagcatagattcactaattttttttttgtattatcaaaaatttctatttgctgtttcccacaagaatgtatctttcatgaggacaacgatgaaggtctactttgttttctactctataccctgctgcacattgttgcctggccttttgtagacagttartaaagggtttttgaataaattgacaaacaaatgtaggtgatttttgtttttacactttgctttttgcttcttaaaatgtatgtgttaaattatcttccaagtttcgttctactattacatttagaaaaaacaaagttgtaaaaaaaaatcatttgattgagatggcttccattgtgtggtacggtcttactcttcttttgtctccagtcactaaacaataagttaatgataagaatttcactgaagtatacaaagaggtactctatttttttctaatgctctaaacaaaacaaacaaaacaaaaataaaatacagaaaggaaagtttttgc

SEQ ID NO: 879959 - DNA, 605 bp, Homo sapiens
gcaaatatgtagggccgactttttatatgcgggttctgcagggcagactgagggacttgggtatccacagattttggtatctgcaggggtcctgaaaccaatcttccacatataccaaggaacaactatttatctataaatatatatattatatatatataataaarctgataaaacttgaattatttttctggccaatttcttgaaagttacaaattgtgttttgtaagtaacaggcttcgaattcatgattcataacatgatttataacaataaaacctactaaaactcagtaaacatgaggtgcaaatgaaagtccatgtgaagacaggatgattatatatatatatgaagaatatatatatatgaagaatatatatatgaagaatatatatatgaagaatatatatatgaagaatatatacataggaagaatatatatataatatgtgtatgtgtgtgtgtgcatgcacgaataatttgggagcaaatttaaaccatataatttaatgaatatttgctgaatacctatagtttgccatgtattgtatgaggtcctgtgcttaaagttatgaataagacattgctgcttccctcaagaaaag

SEQ ID NO: 879960 - DNA, 661 bp, Homo sapiens
gcttcagaaggcgggtaacaacaaacttcactgagctaaagaggcatgttgtaacccaatgcaaagaaggtaagaatcatgataatacatgagctgagagccaaaatagccagtttagagaggaatatagctgaactcttagagctgaaaaagacaccaacttcacaatgcaatctaatgtattcatagcagaatagactaagcaggtgaaagaatctcacagcttgaagcctatctttccgaaataagacaggcagacaataatagcaaaaaaagaatgaaaaggaatgaacaaaacctttgagaaatatgatattatgtaaagagactgaatctatgattgattggggtacctgaaagacatggggagaataaccaaattggaatacttaaggatattatccaggagaacttcctcaacctaccaagacaggccaacattcaaattcaggaaattcaragaaccccagtaagatattccacaagaagatcatccccaacacacataattaccagactctccaaggtcaaaatgaaagaaaaaaatgtttaagggtagccagagggaaagaccaggtcacctacaaagggaaccccatcagactaacagtggatctctcggcagaaactctacaagccagaagaggtagggagagaatat

SEQ ID NO: 879961 - DNA, 597 bp, Homo sapiens
aagtcctttttttcaaattatgagaaaaatggtgtatttatgtttactcattatatcagaggctaaaataatatttttccatttgttcaagactcactttgtgtctttccataagtaaagttttataattttccccaagcttctcacttaatttatccttgggtattatatatttttatgtagctattttaaatatgacttaatattttattgttttttaaccaattctttatgtgaatgttattaattgtataggtgaattttatcttctgttaaattatttatttcaccattgatatcatttgcaaatggaaatcattttatttctcctttccacatttgattgtctaattgttttctctggtctaatggtattgtctaatactttgaatcaaatattaaataataatggatatagatgaatcttttgcattttatttgctttccacaatagctaaaatraataccacatttattttaatgactatttaatattccataatatgaaacaataattttttaaatcagacctatactgatggaaatttaaggaattttcatctttagctataacagaaactgctgaaacgacatttg

SEQ ID NO: 879962 - DNA, 698 bp, Homo sapiens
tctccttcttctttccttaagcttctgtacttacccttcattctcatgcatattttcaacctgttgattagacaatcagaattcgtttatgtaggttggtggtagagcaaccccacatcaatatgtgagtagattaagctgcagaagataaatacttgtggcccactgttgtctcagatcatgatgtttgtttctcaagttaaggcctccttcgattttggcatgcaaaatggtggcatctactcaataatttatgctaacttccctttggaagtcatttcttgagcagaatacctacaaaagtttttctattacatgtagagtgtaaaacygttatacaatatttctgaataaatttaaagagaaaaagataaactttagaaccaaatgagatgtttgcatcctcaattcctaaggccacgttttgtaaggccaaagaggagaagtcccatggccaggatccgagaaacttgttactgaaaaagtagtaataggtgtccagacttcattgctgagttatttttccactttagaggccagatcagtcaggactcatctatacaaaggcatacattgggcaacttctatttccaagacaaaggcaatcaggatatcttagacagaaagagggttcaattgagtctataattataattaatttgtaattgtttgtcctctaagttagcatatataactga

SEQ ID NO: 879963 - DNA, 590 bp, Homo sapiens
atcattctcagcaaactattgcaaggacaaaaaaccaaacactgcatgttctcactcataggtgggaattgaacaatgagaacacatggacacaggaaggggaatatcacacaccagggcctgttgtgggggggtgggcaggggggagggatagcattaggagatatacctgatgttaaacgacgagttaatgggtgcagcacaccaacatggcacatgtatacatatgtaacaaacctgcacattgtgcacatgtaccctaaaacgtaaagtataataaaaaaattaaaaataaataaataaagttgtaaatatatatgtaactgacatcagagtccctaaattcataaagcaacaattaaatgatctgaagggagaaataggatgcaaaactgtaatggtrgcacctcactacttgactttcaacaatggtcagatcatctagatggaaagtcaataaggaaacattggacttgaattacatttcagaccaaatgaagctaacagacatatatggaacatttcatttaacagcagctaaatacatatccttctcaagtacacacagaacattctccaaaacaaatcca

SEQ ID NO: 879964 - DNA, 536 bp, Homo sapiens
gtggcaatgccttacttgttacaccttataagccactcataaaatatttgattcacagcactttaaccctggtctgatggttcagaggtcttctatcccactgcttcctgtaggagcacaacaacagtttccttgggatggaagctaaagcggccaactggttatattaggctccatacaattgtgracaaacacagaaaaggttcactgtactggctgaggaccttaatcctaaagctgtgaaaaaatcagtttccttcatcacagtggagacaaaaagatctacgcctgaaactttaagaattttctggaaattctcttacggtttccatgttcagtgaaaagtggttgaaagacgacgtcaaactaaaaaatcaagaccactaaaaatttatatttttcaaagtgcagatttagatcacctcaagagatcaaaaactatgaccaactttagatacccccttagcataaagggaacatggaaagagaggtattgttgcaaacagctgtaagaattaacttgcttactagtttct

SEQ ID NO: 879965 - DNA, 682 bp, Homo sapiens
gctaaatgagccacaaaatagttcctcaggttgtaaccaaatttctgtaatcattgtcatcttcctaactatagtgcctttaaaacggatcataattgtaagtattataaataattcatttataataaattataaattataattcattttctagtaaaatatctataagttgtattagagaataaaataatatatacyttttcttttttgctcaaaatgtaaagattttgtaaagcattataagttacactaccaacagcattgtaaatgttgcagctttcttcacatctttgccagcattagatattaagaggtttttacctttaaaactttgctactgataaaaatgtaattgttttaatttatatatttcagcttggaaatttttcatgtttacttgctggtggcatttttgctttaattttatattcatgctctttgaaaatgtatctatttatgttttaccgtatttcacatcaatttgtgtaaactaactaattaacaatgacactggattgttattacactggatgtgaatttgtcctagtattttgttcattctattatttaatgtatttcctgtaaaattatgttttttctaatcaacttaccttttcctcaaataattatattttgtttaagctcaagataatttttactctagaaatttgataaggattcc

SEQ ID NO: 879966 - DNA, 592 bp, Homo sapiens
acagtagaaaactcttattccatcattttgctaatgatatatacatcagtgtacctttttaaaatgggaaaaattgttttccaaacaacatattgccaccagttgtttgtgataaacaaattatggacccagtagctgcatataggtgactggacacagctgaktcaaaactgttagtaaaaaaaacagtatcctttgccttttgcctctgtgtattctgtttcttctttttagtgcattcttgctttcatattcccatgagtcagagcttttcaccactgtgctatgaatgggttgtaattgtgcccagattctggtccacttgaactttgagggaactgatagagatttgggtgtctcgacctctgggtagacaccaccagctttgaatctacacatccagttacccataaaccaatggttccagtgagctgcatagatatcattgatgcctatgtgtgctatgacttggaaaatgttaggaaatattgtctttggtgtccaaattcttcacaccctctcccacttttcctttgtaacaggtataggctattagtaacagtgcctgccatttaatagacaatcattattt

SEQ ID NO: 879967 - DNA, 581 bp, Homo sapiens
ctgctagtaatgtgtgcttttatttaatgggaatcccgtaagtactcacttgtaaaaagcagggtttcccagaatccattggcacaaactgttcaactccttgacatacacacagaacaattcagtcacagtgttaacactgtttgggataaactatgtgactgtgaattagggaggtcagaagaaagtatgtttttagacatcattggatgtatactttttattcgtcctatagcctatactttagaaccatactcattgaaactgtgaaaaatgaaaccacatcatgaaaaagttttcctrataatagcattatttgtgtatcttaacggtagctatggactctttatagctacttaggaaatagctcttgtcatgtttccaaatctatatcttaaaatgctttgtctagacaagagtttgctgatcctctgacatattaaaaatggagctcagttctgttttttaatctgggactaaaaattttctctggcagtacagttttggcacacaatttggctctttctgtcttctctaaatgactttttgattctcttttccgttccgttgttttctggaga

SEQ ID NO: 879968 - DNA, 717 bp, Homo sapiens
tgtcatcagaaggttttctgccctctccctggaatcaagttgcaaacacgatcctcaatagtaattagagctaagcggcaattacaggacgtatgatttgttcagaagcactgcctgccggctgtttcctagcaccacatttcacgggagcaccaggttgagatgatggaattatttacttttaaatgtaacatctcgtacagtgctcaaatgcagacgtgaacgtggactgtaaccttaaaaacaaaggtaagcactgctaactgacccacatttacatcttaaggaactttcttatgaaatatgtgacaaaaatataaaacaggtcaaatgaatttcagaaaaagagaaaagtatcagaattaagacaaatagaatttgctaattttgcaactcctttgtctaatggtatcttgactttcctagcctgtttgtatttcatttgtactactgagccactttactaactataatgacgaggtaactgatttcccacatttctttaatctttataagctaccgttcccctttctttcagagtttgtgtsggaataactactaggtaaaaatgagattcatgttcaattcaactatgttagaactctctctcctttttatcttcttttcagaaagtatatttaagctgttgattataaatgtccaagaatccacattcagattgacagaatagtggctggtagcctgtaatcaaattga

SEQ ID NO: 879969 - DNA, 588 bp, Homo sapiens
tttttgttatacaaaatgaagggtagattcctaattatgcttacctctaaaattttattaaatataattcttttagaactattcagtgacttgagtaacattgttacacttttcctaggaaaagttgtattttttagggaggtttccaaaataaatgatagttctgcactgccgttaggtctttagcatgctatagactgccatcataactgccaattgttggattttatagactcagagttctagatatacatttttctttttggcatcactagagtctgtgttagtctcccctattcacctcctaaattcagcaargaagcatcagcatcagagacaacacgtagttcctctgtttgtaatagaaagaggcttcagacttcaagaaagggtcttaatgccattgaggagagtcaccaggcaaatgtagctcaggaccatcgccccaggtctttttgccagtaaatttcatcaggcgctgtgacctcccaatccgttctcgacctcagacaattttagtaaagccctgtctggagataattttggcttctccaaagacttagtaatttagaaactaagcacatgaca

SEQ ID NO: 879970 - DNA, 625 bp, Homo sapiens
aataactaaaagagtggaattggaatgttcctaccacaaagatataataaatgcttgaggagatggatacccaagttagcctgatttgatcattacacattgtatgcttgcattaaaatatcacatgtataccataaatatgtacaactattatgtattcrtaataattttaaaaatatttttttaaaaaaataaaacattttaaaaacaataagatacccagttaaacttgaatttcagataaacaaaaataatttttagtttaaatgtgtccaatgaacacctctcataaggcccagtatatgtgatatactgaaaaattacttgtttttgctctgaaattcacatttagttggacatcctatattttacctggcaatactagactcattgaaacttcagtactttttagtaagtagagatatgcgatgaggaaaataaatttcttgagctgctattcaccttgtatttaggatacaactttcatcaggatgtgaggttctgtgtgtttttgttcctcggagtttctccagtatctagatcactcatagcatttggtaaatatttattgaatgagacagtgaaatggtaatggttaaaatattgtggcatgcaggatgcttaa

SEQ ID NO: 879971 - DNA, 625 bp, Homo sapiens
aataactaaaagagtggaattggaatgttcctaccacaaagatataataaatgcttgaggagatggatacccaagttagcctgatttgatcattacacattgtatgcttgcattaaaatatcacatgtataccataaatatgtacaactattatgtattcataataattttaaaaatatttttttwaaaaaataaaacattttaaaaacaataagatacccagttaaacttgaatttcagataaacaaaaataatttttagtttaaatgtgtccaatgaacacctctcataaggcccagtatatgtgatatactgaaaaattacttgtttttgctctgaaattcacatttagttggacatcctatattttacctggcaatactagactcattgaaacttcagtactttttagtaagtagagatatgcgatgaggaaaataaatttcttgagctgctattcaccttgtatttaggatacaactttcatcaggatgtgaggttctgtgtgtttttgttcctcggagtttctccagtatctagatcactcatagcatttggtaaatatttattgaatgagacagtgaaatggtaatggttaaaatattgtggcatgcaggatgcttaa

SEQ ID NO: 879972 - DNA, 655 bp, Homo sapiens
gaaaaggccttcgatacaattcaacaccccttcatgctgaaaactctcaataaactagttactgatggaacatatctcaaaataataagagctatttgtgccaaacccccagccaatgttatactgattgcgcaaaaactggaagcattccctttgaaaaccatcacaagacaaggatgccctctctcaccactccttttcaacatagtattggaagttctggccagggcaatcaggcaagagaaaggaagaaaacctattcaaatagaaagagaggaagtcaaattgtctctgtttgcagatgattgtatatttagaacactctatcacctcagccccaagtctccataagttgataagcaacctcagcaatgtctcaggatacaaaattaatgagcaaaaatcaaaagcattcctctgcagcaataatagacaaacagagagccaaatcatgagtgacctcccattcacaattgctaccaagagaataaaatgcctagggatacaacttayaagtgatgtgaaggacattttcaaggagaactacaatccactgctcaaggaagtaagagaggacacaaacaaatggaaaaatattccatgcttatggacaggaagaatcaatatggtgaaaaaggtcatactgcccaaagta

SEQ ID NO: 879973 - DNA, 587 bp, Homo sapiens
tcaaatgccttagcatggatcatatggttgtggtgaaagagttagaatgcacactactcagtgttgatgtacacagagaagcaatgctcccgggctgggcccaccccaaaccagcacaattaaacccgtttacagttgttatccaagcaacctgacatggtttctgtacttggatcaacattgagtccttctccagaacgtgatagaaacataaggcagaagaaggctttagcctactcatggagggcattttctatttcttttctttgattcaacttgaacacctgactgagggaggcaaaattccaagatcggccctggcagttagggctcctctgttgcaaaggctcttgtgtagcaaggacattagttcttctaggccatgarggtactatttagaagggccctgggagggagattattcccctgattttgcagcaaacccatctttaggaaaaaatgacctaggtattgaggtaattctggttccaatgtaactttgctcctatctttctttccgtcttaagtaggcaaatcagaataatttcagtgtattgctatgagcagggaaacaatgaaaactataa

SEQ ID NO: 879974 - DNA, 634 bp, Homo sapiens
ttattttttctttcaaggctttaaatattgtactccactttcttcttgatagcgtgacttctcagaaaaagtctactgtaatttttacctttttattcattaggtatggcgactcacactcccaacctcgaatcctttaaagatttttttccttgtctttggttttctgtggtttgaaaatggtctgctgctacagactgaattgtatccctctaaaatttatatgttgaatccctaagtcccagtgtgatggtatttggagttggaactcctgagagataattaggtttagatgaggtcatgaaggcaggacccttacgatgggattattgcccttcctagaaaaaacaacagaaaacttgctgcctctcaccctaccatgggagaacacagcaagaagagaaccaaattctgccggccrggaagacagccctcaccagaatctcacctcaccggaaccctgaacttggacttccaacctctcaaactgtgagaaacaaatttctgttctttaaaccaccaagtctatgggattttgttacagtagcctgagaagactaagacatgtgaataggtgtaggatgttcttaaaatgtgtcccgcatgaatttctataaaattcctgattctttgt

SEQ ID NO: 879975 - DNA, 650 bp, Homo sapiens
gtcctcttcctggggacgggactatgtctattcaactacaatgactcagctgatgaaaatttcattgtgggctgagaactcattgcagaactcagcctgcagtagaaatcaggctgaatgggatgatgggtttattaaaaaaaaaaaaatcaaggcagaataagatggagaccaggaaagcagcagaggggtagatgacttgcagcatcacagagctgtgagtgactgttagagctcatcattcaccatggacaaacctaatgaatttagtctaagcacagctggaaaatattgcatatcttccttagaaaggctttttaacagctgagttcctgaccttccctgaagtcagttttctttagttttattctcatagctaaatttaaaatcrgtacagaaataaaaaagtctggtagagaatgggtttttctttaaaacatgggacattttagctccctgatatctcagcagctttccatgacttcatcttctgctttgtaacttggcaaatcattagaaatgactttattattgtcccatccaatctgatggagatcccttaggcttcacatctcagcttcttattttgttacctctttaactctctcaactcccctgtccactcccttctctcattggcctgcttcctg

SEQ ID NO: 879976 - DNA, 576 bp, Homo sapiens
atgtaataaaaagcaatggtgacatcctacaaaaatgttttgctttccattccctgttaaaagagtacagctttctatactattctaagttatgttaagagcattagttgttgtgggaagggtgagaacctgagaggaggtgggagagaaagaaaataatggaaatagagaaaagaggaagagagaaaactggaagwttttcaggcaaattagagaaacatttggtggggaggaaaagatttaagcgatgcccaagcacaatagcattcacttccaaatttaaaattgtctgctgatggtggcggaaaacctgtaactctttttgtaaatcttattttcactattatagtcttctcaggctgacataattaccttttggggtttcatcagcctttggcaaaattacagcatctacatttcaaatatgttctatttccagaaaggaatctacagcctcttattttttaatacatggcaggtggctagctgttaactaactttttttccctaaagaatgacataattaacccaagtatgttacattcccattgctggataccctataacaagaaattg

SEQ ID NO: 879977 - DNA, 595 bp, Homo sapiens
ctactgctagaatgcatctgccatggggttgagtggccactctctctatccctaaggacctactgccattccactatgtgaacactgttgcctgcagcactatgatcccacctacatgaagcctagccatggtggaacaactgagaccacaatgttcaaacccatgcaatgccccatccccaccaaccaggccggaggcagcactgcctcctcagagaaaccactgtacaaccaaacaaactactgtgttcatgtgaaactgcaactggctcaatggccagtctagcagcaggcctacctccacaaagagaccaccacacagctacccagcctcccgcacctacacgtaccaggcctgaccaccatcccagctcttccactttcagaaaaaccacaccattgccatcacaactgccattgcaactcccacagcctagtccamtaaggcaatcacagatataactgacgaggattacagctaaagaaactgcacaaagaccatgctactgagccccctagaactaaaggcaatgcaccacacccaactgatgtcctaggacgaatctacaggaaaaagtctctccttacaaaacct

SEQ ID NO: 879978 - DNA, 720 bp, Homo sapiens
tgctttaaaacctgaaggatggaggtgtctggtaaacacataggcacaccctgacccagtttttccacagtaaaatggaatgttgcaaaaataaaattggatgaaattctacgaaccctttagaaagttaaaatactataattttgttgttgttgttgttgttgttgttgttgtttttgagacagagtcttgctctgtcacccaggctggagtgcagtggtatgatctcagctcactgcgaccccagcctcctggattcaagtgattctcctgcctcagcctcctgggtagctgggattacagacatgcgccaccacacccagctaatttttgtatttttagtagagacagggttttgccatgttggccaggctggtcttgaactcctgacctaaggcaatccacccgccttggcctaccaaagtgctgggattacagcttgagccaccamgcccgggcactgtaatgtattttaattgcatttatgttatttacagtaaagaatcagaaagccatgtgccttgagacccttctttcttccctgacttttcctcctcacttctctttcacctctctccaatcacatattcccatatgtgaagacagctaagtccttaaaacaaattttcaagaaaataaaaatagagggtgaagaggagaatgtataaaagcttcacggaggaaggaaattgtattcatagctaagggcagcattctcag

SEQ ID NO: 879979 - DNA, 720 bp, Homo sapiens
tgctttaaaacctgaaggatggaggtgtctggtaaacacataggcacaccctgacccagtttttccacagtaaaatggaatgttgcaaaaataaaattggatgaaattctacgaaccctttagaaagttaaaatactataattttgttgttgttgttgttgttgttgttgttgtttttgagacagagtcttgctctgtcacccaggctggagtgcagtggtatgatctcagctcactgcgaccccagcctcctggattcaagtgattctcctgcctcagcctcctgggtagctgggattacagacatgcgccaccacacccagctaatttttgtatttttagtagagacagggttttgccatgttggccaggctggtcttgaactcctgacctaaggcaatccacccgccttggcctaccaaagtgctgggattacagcttgagccaccacrcccgggcactgtaatgtattttaattgcatttatgttatttacagtaaagaatcagaaagccatgtgccttgagacccttctttcttccctgacttttcctcctcacttctctttcacctctctccaatcacatattcccatatgtgaagacagctaagtccttaaaacaaattttcaagaaaataaaaatagagggtgaagaggagaatgtataaaagcttcacggaggaaggaaattgtattcatagctaagggcagcattctcag

SEQ ID NO: 879980 - DNA, 634 bp, Homo sapiens
ggacaaccttggcaaatagattgtaaaatgtttaacttcctaagtgcaacaggcttcaaatttgtgttgatctatagatgatttgaaacagaatttatctgatctgagaattggataggaaatctatgaaatagctgttagtaattaaagagcattttcaaaatgtagccagtcaattagataagcacaactcattggataagattttttaaaaacattacattttcaccttttattgcctttctcaaatgtattcaggagaagaagatgaaaagttgtcaggaaacataactttattttattattgtagtcctccagttatattaagccataaaacaaccttcattcagttactgaaagtatctggtcaagacaytactcaacagttcaatccttattcatgcttagacttctcctaattctcaccccacataaacatagaaaaattatttttaaataaaataagcaattcaaaaatcatatattagaaggacaacacagcatgatcaagagtgcaatcaaggttcatttaagaaatgtaaggttgatttaacattcaaaatccaatcaatgtaaagcttttcccctaagagtgggaataaggtaagtgatatacttccactcttacagtcaa

SEQ ID NO: 879981 - DNA, 636 bp, Homo sapiens
ttcactatcacaagaacagtacaggagaaacccacccccatgattcaattaactcccaccaggttcctcccatgacatgtggggattatgggagctacaattcaagatgagatttgggtggggacacagccaaaccacatcataagtcatacctcaaaagtctagctattgaaataaaatcattgataaagaacaattgaaaagccaagatcacaacttaccacractcattggcaaaattttccccaaagttctataaaaccagtgattctccatattacccatgctgcccttatcttttaacacattgcatataaaacacactctatttgttcgttgtcttgttttcttccaattagaatagaagctccatcagggcaggaattttattttatttttttccccactcacatgtctcaaagactaaaaccagtgcttggcgcatgagagttgcccaataaatgtttctcgaatgaattaatttgacaggtttcaatgttaaatttataacttctacccacaagccataaaccataaaaattgctgttccccaatcactgcttccattttcccaaactcacagtttgccccaagctgttaattccacctaaaatcctgtatgtcttagatggcatt

SEQ ID NO: 879982 - DNA, 558 bp, Homo sapiens
catcagagaccaaaggtaaataaaaccacaaagatggggagaaaccagcacagaaaagctgaaaattctaagaatcagagcacctcttctcctctaaaggaacacagctcctcgccagcaatggaacaaagctggacaaagaatgactttgacgagttgacagaagtaggcctcagaagactggtaataacaaacttctccgagctraaggaggatgtctgaacccatcgcaaagaagcgaaaaaccttcaaaaaagattaggtgaatggctaactagaatcaacagtgtacagaagaccttaaatgacctgatggagctgaaaaccatggcacgagaattatgcgactcatgcacaagcttcagtagctgatttgatcaagtggaagaaagggtatcgatgattgaagatcaaatgaatgaaatgaagtgagaagagaagtttagagaaaaaagagtaaaaagaaatgaacaaagcctccaagaaatatgggactctgtgaaaagaccaaatctacgtctgattggtgtacctgacagtgacggggagaatggaacc

SEQ ID NO: 879983 - DNA, 663 bp, Homo sapiens
taaaaactaaatgcatcaataaaaagtataaatgactttgtgatgtggtttggatttgtgtcctcacccaaatctcatgttgaattgtaatccccaatgtggaggaggggcctggtaggaggttatttgatcatgggggtagatttcccctttgctgttcttgtgatagtgagttctcacaacatctggttgtttgaatgtgtgtagtacctcccccttttccttcttcctcctgctttagccatgaaagacatgcctgcatccccttcacctttcaccatgattgtgtgagggcttcccagscatgcctgctgtatagccagtagaatcatgagccaattaaacctcttttctttatatattacctagtctcaggtagttctttatagcaatgcaagaatgaactaatacagaaagttggtaccaggattggggtattgttataaagatacctgaaaatgtggaaccaactttggaactgggtaatgggcagaggttggaagagtgtgatggtatcagaagaagacagaaagatgaaggaaagtttgaaacttcctagagaattgttgaattgttgtgaccaaaatgctgatagtaatatggacaatgaagtgcagactgagaatgtctcagatagagatgaggaacttattgggaactgga

SEQ ID NO: 879984 - DNA, 640 bp, Homo sapiens
ttatagccccagtagtaatagcaactagcaaatacttaatttggtgagatatattccatgtctttgtctcctgaacaattagctagatgaataaatagctgtctgccctgagaaagggaacataatatgcaattaaaattaaggacgttctatttgagrggacctgttacatgaaattacagcagaaggcaattggggaatattattattttgcatatttaggaatcaggataattagaagatgccaaacacgtagggccaactggtaagggtttgggaagggaagagggaaaaagacctcaccttgtgggatgtgggcatcagtgggagggtagctgtgcatgttatgtacagaaaatagggtgcttggagctattgtaaatgatgaggggagtcctaagggctgtgattgtggagaagaaacttagaccctcaactgaacaacatgagtcacattcctgcccctccattttgttgttacatcatttgctctttccaaatctttgatttcttcctcatctgaaaaaaaaatagagctaatcatttcgactacagaaatttgtcacaaggattaaaaatgagacaatccatgtaatgtgcctgataaagtacttgcaaataggaagtctttcatagacat

SEQ ID NO: 879985 - DNA, 570 bp, Homo sapiens
aggggaaataaaataggacaagtaggaaacaaatagtaagatgataggctcaaacttaattgtatcactgatcacattcaatgaaattggtctacacacctctttaaaacagcagttgtccaggtgcagtgtctcacgcctctaatcccagcactttgggaggccagggcaggcggatcatgaggtcaggagttcgagaccagcctggccaacatmgtgaaaccccgtctctactaaaaatacaaaaattagcagggtgtggtggcatgcgcctgtagtcccagctactcgggaggctgaggcaggagaattgcttgaacctgggaggcagaggttgcagtaagccaagactacactgctgcactccagcctgggtgacagattgagactctgtctcaaaaaaataaaaataaaaataaaacagcaattgtgaaattgaataaaaaagcaagacccaaatatatgctgcttacaagaagcacactataaagccaaaaaaggttaatccctgttgtctagtggttaggattaaaaaaaaaatagttaaaagtaaaaggttaggaaaagata

SEQ ID NO: 879986 - DNA, 616 bp, Homo sapiens
gaattcctgctctacttcctgctagctgtgtgacctccgaagagttatttccccattctgagcctcagtttccttatctggaaaatggggataaaattcatacctgccccgcagggtagttgaggataagtgctcgatacatgtgaacttttattataatagaaatatttccaggggctcatttcctgggattgccggtggctcatacctgtaatcccggcactttgggaggccgaggtgagtggatcacctgagatcaggagttggagaccagcctggccaacatggcaaaaccccatctctaytaaaaatacaaaaatcagccaggtgtggtctcaggtgccggtagtcccagctacttgggaggctgagacataagaattgcttgtacccgggagacggaggttgcagtgagctgagattcactgtgactccagcctgggtgacagagactgtctcaagaaacaaaacaaaacaaaacaaaacaaatctttccagcaatgctggaggaagagggttaggttttgtctcctctttctgcagggtagtgaaccaaggctcagagagcccaaggtcacatggctaataagtgaaagtgtcaggatggtgactcatg

SEQ ID NO: 879987 - DNA, 650 bp, Homo sapiens
taatgatcgccattctaactggacaatacctaaatttttaaataagaaaactggaaacttaaactgagacccaagagaaaaacctccaagctctggattccaatagaactttctgtgatgatagaaatattgtctgtttgcactgtcccatacagtagccactagccacatatgactattgagcacctgaaatggggctagtgcaactgaggagttaaaattcaaatttcacttaatatcatttaattcaaatttaaatagccacatgtggctcgtggctaccaaattagacatcatagttctaggacgtaacaattaagagaacaggctttaaactcagcctgaccatagtttgaaacagaccctaattgctgtgttaccgagggcaagctatttaaattccctaaacctttctcayctataaaacaggaataataacatctatttcttgggattgacaacacagcaaagctcttagtattatgtcacaagcactcaatcaatggaagtattaagtgaggacaaaagtaatccaacagcaagcaagtcacggatgaatgaatggatgaatgaatgactcagcgatgcctggtcatttcccactgacaaggactatggagactgcaaaccttttcatccaggcatctact

SEQ ID NO: 879988 - DNA, 639 bp, Homo sapiens
tcccttgtttaaaatgaacaaaactctgcaatgccaagagagtaattagatagatccaggcttcagtgattacaaaagctggataaaatctgccaatgccatttatatctgaatctgggcaagccaaaaggcagtagctcttggaaaagtcttcrcaaactcaaacttcagctattgttttgtgttatggacaccaccacctaagtatcaaaaaactctaggaatgtgaggaatatgtctaagaaataaagtaaggcatatcacgagaaagaggtatgcaataacacataatagaaatagtggtgtcatgtattttttttctcatagcactttcacatatattctcttctttagtcctcacgtcatgccaatagggtaggacagagaggacacatatttcctgtattttagagacaagaaagctcagaagactgagcttctttctatgaaaaaagagtttcttagaaagggggcacatttcagggctaaagaggtaagtggctgagctagccttaattggaggtcattttgacaataatgatgatgaagaggaggcaaatgatgatagctgtcatttactgaggtctatttaccaagcactatgctcagtatacaccttaactccgtgtgaaacaagca

SEQ ID NO: 879989 - DNA, 589 bp, Homo sapiens
tgacagaagtaggcttcagaaggtgggtaataacaaactcctccaagctaaaggagcatgttctaacccaatgcaaggaagctaagaaccttgaaaaaaggttagaggaattgctaactagaataaccagtttagaggacataaatgacctgatggagctgaaaaacacagcatgagaactttgtgaagcatatacaagtatcaatagtcgagtygatcaagcagaagaaaggatatcagagactgaagatcaacttaatgaaataaagtgtgaagacaagattagagaaaaaagaatgaaaaggaacaaacaaagccttcaagaaatatgggactatgtgaaaaaaccaaacctacatttgattggtgtacctgaaagtgatggggagaatggaaccaagttggaaaacactcttcaggatattatccaggagaacttccccagcctacaaagacaggccaacattcaaattcaggaaatacagagaacactacaaagatactcctgagaagagaaccccaagacacataactgtcagattcaccaaggttaaaatgaaaaaaaaaaagtgttaagggcagccagaga

SEQ ID NO: 879990 - DNA, 676 bp, Homo sapiens
caaccagctagcatcctaacgataggatcaaattcacacataacaatattatccttaaatgtaaatgggctaaatgcctcaattaaaagacacaggttggcaaactggataaagagtcaagaccacccatctgtgtrctgtattcaggagatccatctccatgcaaagacatacatgcgctcaaaataaagggatggagaatatttaccaagcaaatggaaagaaaaaaaaagcaaggattgcaatcatagtctctgataaaacagacctaaaccaacaaaggtcaaaaaagacagagaagcgcattacataatggtaaagggatcaatgcaacaagaagagctaactgtcctaaatatatatgcacccaatacaggagcacccagattcataaagcaagttcttagagacctacaaaaagacttagactcccacacaataataatgggagatttaataccccactgtcaatattggacagatcaatgagacacaaaattaacaaagatattcagaacttgaactctgctctggaccaagcgaacctaatagacatctacagaactccccactgcaaatcaacagaatatacattcttctcagcactacattgcacttattctaaaattgaccacataattggaagtaaaacactcctcagcaaatgcaaaagaac

SEQ ID NO: 879991 - DNA, 588 bp, Homo sapiens
ttgtgaactgcgcatacagggatccagcttgcagtgcttcttatgagaatctaactaatgcttgatgatctgaggcagaacagtttcatcctgaaaccaccccctcactcgcagcccccagtctgtggaaaaattgtcttccacgaaaccagcccctggtgccaacaaggttggggactgctgctgaaaagagaggacaaggaaatctacaaatatctacaacagccaagcatttatttatctttttttcctttttttgagacggagtctcgctctgtctcccaggctggagtgcagtggcatggtctcagctcacagcaatctctgcttcctgggttctagcaattctcctgactcagcctcctgagtaagtgggactacaggcaygagccaccacacctggctaattttgtatttttagtagagacagggtttcatcatgttggccaggctgttctcaaactctgacctcaagtgatccacccacctcagcctcccaaagtgctgggattacaggcgtgagccaccatgcctggccaatttatctaaatttgcccctattagtttacactcttaagatgtgggata

SEQ ID NO: 879992 - DNA, 601 bp, Homo sapiens
ctggtcttgaactcctgacctcaagcaatccacctgcctcaacctcccaaagtgttgggatcacaggcgtgagccaccatgcccagcctcaaattctttatgtactgcgttcctcagctttccaggctttactgccttacatactctctacacttgtactgaaaaatattttataaagatatttatactaagatgaaacaaatttatgatacatttcgtcatctyatagtcatattttgaatgctcatacatgtggggtgatagaagtattgagatagtacaaagttgactaagatttaatcgaagtttaatgttttattccctcctagcctcaactctaaatgaatgactaattctcaaacattttgacaataatatttactgagtacttaatttgagtcaagtaatatgctaagtattatcctatttattcactaaaatagggttataagagaacatcattatcactatttttcatataagaaaactgaagcttagggggttgagtacatttactgaagatctcataaatgagcttgaaagtcagaatttggccaggcagtttgactctataatccatacctcttatccattatgcaca

SEQ ID NO: 879993 - DNA, 666 bp, Homo sapiens
tggaagaattttccagaattgacaaagaacatttttacaaaaataaaatttccgaaatgcacttgaagagctatactttaagtccaacttattaaagagaaaatgtcagcacaggatatatataaagcattttttaaaataatgtgacagcatcataattctctttgatttgtaaaagtaattgaacacattttctaccagtgtgaccactgatcttcagtgcaaatggtgagaaagattctctgcttggcatctctagtcaggcttctgattcttctgctaggcccatctctgcacttccttccaaatccagttgcagcaaacaactttgctaagtcagtttagcaagaatcttctaccctcaatatctgattatcctctctacttgatcaggttcctcatccttcatcactccttaggtgatgtgtgaccaccctggcctgagttaagtaagaatcctgtggcccggcatggtggctcatggcggtaatctcagcactttgggaggccgaggagggyggatcacaaggtcaggagatcgagaccattctgaccaatatggtgaaaccctgtttctactaaaaatacaaaaaaattagctgggcatggtggcacatgcctgtaatcccagctactcggagggctgagataggagaatagcttgaa

SEQ ID NO: 879994 - DNA, 719 bp, Homo sapiens
attaatatggttatcccctagtatgtctgcacactgtattttaaatgataatctgtgattataagtagtgtctgattctcatgagtgtcagttaaaattattccataaaggttttatcaattaaaaaatatccaacctccattatcataaagttttgaaatcttttagggtctcttgaggtgaatgcaagtgccatatgtccacaaacaaacagayaggttcaattgtgatgaggctctggatgatggcagtgaactgtcagaagagagttttacttctggggatttttataggcagaaatgtggctgatgctatcacattaaaaatcatcactgggcaacacagaagggtactcttgactctttgcatttggatttcaacctcctggtcatgtgtattttataagcagaacctgataatattctgagcagggcagtgcctacaggggacagggacagagacaataaggcctccttgtcagggcatacacatgaaagggcagcaggagattctgtgcaggctggatgtgtttgagagtgcaggaaatgggttgtctgttaacatcttctgccaactcgttactcttatttccgtggagcactccaaggacacagggtagagcgaagtcaaagtgaaatccaagagcaaatctgctcagtacataccatggtgaagagggagcctgaatgagcaaaggagatggatatttccaggaatca

SEQ ID NO: 879995 - DNA, 607 bp, Homo sapiens
gaaaggggaagcaaacatgtccttcttcccatggcagcaggagagagaagtgcagagcaaaagaggaaaagttccttgtaaaaccatcagatcccatgagaactcagtcactatcatgagaacagcatggggaaactgcccccattattcagttatcttcacctggttctgcccttgatacatgtggattattagaattcaaggtgatatttgagtggggacatagagccaaaccatattaggcatagaggtttgatgggagagaacagagcaaaatgaggctgcagggctaagcagagctatcctcaatggcrgttatgcagattcccttcagatattgatctttttataacttacttttattaactgaaaaatgaacttttaaaacctttgtactccaatattctttgaaaccatcataaggcatagcacttaatctctcagagttgaagatttctaccttcattcaacaaatatttcttgagggcccattaagtgttccaggaagtcttccaggagctggggatgagtggtaaacacaacaaattctctgacctcattactgagtatgtctgaaggcttttatggaaaatgacacttttaaaaa

SEQ ID NO: 879996 - DNA, 659 bp, Homo sapiens
aaacatttattgagtacttagtggtgatgaatactgtcttcagactctattttacattcacaaccatcatataaattaagcactgtcatcctcattttataggtgagagaacttagagagctaaagtaatttgcacaagccaagcagccaggttttttttrgcggggtgacaggagtggggaagggggaggaggagaagtagagagctgggatttgaagccaagtattatgtgagagttcaaaccagcactctcaaccaccatgtgaagtgcctctacctgatgggatttacatggaaagatgaagattaagaacactaagttatagaccctggctttgggaccctcaaacacaccaatacaaaaatctgatgaggagtgataggtgctacgtagaacattcaagcatagggccctgggacagggaagaattgagtctggctggagagaacagagcagagggagagatcaaggagagttttgcagaggaagtcctttcatcttgtccttgaatggtaggcaaggattctattattattattactattattattattattatttagagatagggtttccctatgttgcccaggctgttcttggactcctgggctccagcagtcctatctcctcagcttcccgagcagctggaattataag

SEQ ID NO: 879997 - DNA, 652 bp, Homo sapiens
tagtaacaaaaccctccatatacctgtagaagaatgatgggctggtgaatgagtggagaaaatgagagatgaaagaggagaaatcaccaagagtcattggatatcataatgtatgctaaacactgtcatgggtgtttgcaaaaatattatgcaattttgtttacctcagtcataatactatgctgtcattatctgactctcaatagggtgcctgtttcagctatgaatcctggtacatcaagggtgctcaacgtgttaaattaaatattgtactcatttcacagttgagggaacagggactcagaacagcagacagaaattgccttttcttctgcttgtatctgaaaggatgtgttgttactaaacttmttacgaaagggagaattgggagaactgcgaaatgtttgtcagattttgggttggggagtggataaatagagaagccttcatagatacataaacttggatgtaatgtcaaactgtggattacattttcttcatatcccaaattatccactgaatacaaggtttagaaaagaaagcagaattctcctaaatccgtcttatacagaaactgactacttcattcccaatctgtttccctctcctttgtggcttacagtgaaaccacgtgaccacagttaggtgtgac

SEQ ID NO: 879998 - DNA, 615 bp, Homo sapiens
tcctccctctttttcattttcttgcagtcacccaacacctctttactcatcctgcataatccaactcaagctttactttcttctttaccttcatacccctattctcttggtctgtgtaaggtgttgatttgtgtgttactctaatgccttagcatttccatatcaatacactcasttttacttatcagtgtctccaacaagtctccaagtttcatgatgtcaggcaatgggttttaattgtctttctatctggagtgtgtctcccagtgctttggagcgtagtataatcaataaacttttgatgggcgaatgcaagaaaaaatgtgatactgaatttccacatatgttttcagagaacccagccaactatgaagttccttgtctttgccttcatcttggctctcatggtttccatgattgtaagtatatcaggacatttgaagaatatgttctcagtacctatcccaagagtctctctattccttgtgttctggcatatattggtgtttacttgaatacagctttatatgtttaaatgtttccatatgaacttttttttgtactaacctacataagctatataaggatttagaataaatagtcattattcatcta

SEQ ID NO: 879999 - DNA, 642 bp, Homo sapiens
ggcttgattggcaaatacgacttctacatccatattctcatctttcataccatatcacactactaccactttttgaagaatcatcaaagagcaatgcaaatgaaaaacactataatttactgtatactctttgtttcaggatacttgccttttcaattgtcacttgatgatataattgcaatttaaactgttaagctgtgttmagtactgtttctgaataatagaaatcacttctctaaaagcaataaatttcaagcacatttttacatgtatgctccttatttttctcttttctatttataggaataatgatttctttcatcatcttctttcccagtttgactagcacagattgaagcccataatgtcagaggtccttatttataatttagtctgtcatattttatatgttacaaacatggtactcaaactcacttattattagagctatttatgccaagatttgatttgcccatggtttcctttgccacaccacagttgctaagcctccaaagcactcacattttttatctcagtccctgtaggtcagaagataaccaccatgtcactctacagcagtatgtaggcactctgcatgtaaaccatctaatgccctccattagtttttcagcaatgactttt

SEQ ID NO: 880000 - DNA, 540 bp, Homo sapiens
  misc_feature 418: n = A,T,C or G
tttagactttcataacttaaatatgcacatttaaattagcatgacagttactaaaagaatataaacaaagactagaacttaaaatgactagagaagaaaaaatatcccaccaattgaaaagaaggcaagaaaggaaaaaaagaaayataagtaggataaatagaaagtgacaaaatgacacaaacacatatgcatgtacatacacaccactcaccatctatacagaatccaagtatgtcagaatacaaatacatgcaaatggactaagtaatccagttaaagatggataaattgttaaaatctcattccatgctatttttaagtcatatttaaaatacaaagatattgaatgattttaaaaggtattaaaatacgtatcagaggagccaggcttggcggcacaatgttctgtaattcnccccaagttggaacttcaaggaagcagaggtgagaggatcacctgagaccaagagctcaagaccagccttggcaatatagccaaactctatctctaaagaaataaaaacaattatttggcgg

SEQ ID NO: 880001 - DNA, 540 bp, Homo sapiens
  misc_feature 418: n = A,T,C or G
tttagactttcataacttaaatatgcacatttaaattagcatgacagttactaaaagaatataaacaaagactagaacttaaaatgactagagaagaaaaaatatcccaccaattgaaaagaaggcaagaaaggaaaaaaagaaacataagtaggataaatagaaagtgacaaaatgacacaaacacatatgcatgtacatacacaccactcaccatctatacagaatccaagtatgtcagaatacaaatacatgcaaatggactaagtaatccagttaaagatggataaattgttaaaatcycattccatgctatttttaagtcatatttaaaatacaaagatattgaatgattttaaaaggtattaaaatacgtatcagaggagccaggcttggcggcacaatgttctgtaattcnccccaagttggaacttcaaggaagcagaggtgagaggatcacctgagaccaagagctcaagaccagccttggcaatatagccaaactctatctctaaagaaataaaaacaattatttggcgg

SEQ ID NO: 880002 - DNA, 540 bp, Homo sapiens
  misc_feature 418: n = A,T,C or G
tttagactttcataacttaaatatgcacatttaaattagcatgacagttactaaaagaatataaacaaagactagaacttaaaatgactagagaagaaaaaatatcccaccaattgaaaagaaggcaagaaaggaaaaaaagaaacataagtaggataaatagaaagtgacaaaatgacacaaacacatatgcatgtacatacacaccactcaccatctatacagaatccaagtatgtcagaatacaaatacatgcaaatggactaagtaatccagttaaagatggataaattgttaaaatctcattccatgctatttwtaagtcatatttaaaatacaaagatattgaatgattttaaaaggtattaaaatacgtatcagaggagccaggcttggcggcacaatgttctgtaattcnccccaagttggaacttcaaggaagcagaggtgagaggatcacctgagaccaagagctcaagaccagccttggcaatatagccaaactctatctctaaagaaataaaaacaattatttggcgg

SEQ ID NO: 880003 - DNA, 613 bp, Homo sapiens
gcagaatgcccacttgattaaattattaatttatctaatatcaagtagagcccagcatatatataatacacacacaccaacacacacacacacgtatatgtatacacatacatacatatatacatacacatatattatatatatatatatatatawaaaatacagcagtttcttcagattttttatcacaaaactatcacctcaaggtaatttggagagaacatacgggaagattacacaccttgtagaagcaactagagccaacatatatatatatacacacacacacatacgtatatgtatacacatacatatatctatacatacacgtatatacattatatatatacatacacgtatatatattatatatatataaaatacagcagtttctttagattttttatcacaaaactatcagctcaaggtaatttgcggaggacatatgggaagattatccactttgtagaagctacttaacccaatcacatttagtccttttaacaatttacccaactatatttcacaaggtaatccttatttaggtagacttcatcgattggttttccccattataagctgacaaatactgtgaccttgttagggataatat

SEQ ID NO: 880004 - DNA, 625 bp, Homo sapiens
gagggtaacaacaaaacaaatctcaaaaaattaccttctgcacatgcttccatcactgcatttgtcttggatctcagttaactgttaatatgtttgactccctggctacactgagaacaacggcccaaggacaggaatggtgtcttatgcattttcgtgtttgcattgcctaacaaaatgtgtagcaaaaatgcccttggtcaacgtttgtaaaatatcatcaaaccaagatttttattacactcacctgtaagcagtgatgccattactagttttcctaaaataattttcacaaagagtgataggtctattttataatctatattttaataatttctcagaatccagaagccaaatgaggtgtcatctcctcccactacctctgcagtcattcctccagcagtaccccaagcccagcatttggtggcccaacctcgtgtggcaaccatccagcaggtacaagaatccaagcraaacacaagtgccatccactgtgacagacagtcatggtgaccatgaccatcttgcatggcatgatcgtgtttttctcaggtgcaactccatcatcaggataatcaccttgtatttctgatgtttgagagcagtggttcctgttgctttggga

SEQ ID NO: 880005 - DNA, 640 bp, Homo sapiens
aaatcatgctactataaagacacatgcacacgtatgtttattgcagcactattcacaatagcaaagacttggaaccaaccagaatgtccatcaatgatagactagattaagaaaatgtggcacatacacaccatggaatactatgcagccataaaaaaggatgagttcctgtcctttgcagggacatggatgaagctggaaaccatcattctcrcaaactatcacaaggacagaaaaccaaacaccgcatgttctcactcataggtgggaagtgaacaatgagaacacttggacacagggcagggaacatcagacactggggcctgttgtgcggttgggggaagggggagtgatagcattaggagaaatacctaacgtaaatgacgagttaatgggtgcagcaaactaacatggcacatgtatacctgtgtaacaaacctgcaggttgtgcacatgtaccctagaacctaaagtataatttaaaaaatgaacaaaataaataaataaaaagatgcctccctcacagatctattggtaagattaaataagagcatggatgtagagcaataggttcagtgcttgacacagagaatgtgtcaatgtcctcacatcccctccctttcgctttcctctgttagaa

SEQ ID NO: 880006 - DNA, 570 bp, Homo sapiens
gatctcctgatccacccgcctcggcctcccaaagtgctaggattacaggcgtaagccaccgcacccagccctccttctttttatttctatcgtttcttgtgtcattcctgtcttactttctgcctcactgcctgtcttttgttatttctttcctgtttgcttctttgatcttttactttttcttgtatttttttgaatggtggagaggttgtggcccagtcaaactggttcttctgcttttgatatataagcaatctttaacccaatattgaatgtacttakctttgtagaaggatgcagggcggggctacagcagacattgcatcttcctctcctgaggaagcccagcagccaccaaggtgcagctccccattcccatacccctgccagaggtgagatactgcggtgatgtgtttaaaggtaagttgatgcactcactgggattcctggtatcttcatgccaatttacatcctcctcagcccaggtgtggtcccacagaatagggataagcatagatgcagctctgcatgtttatatgattcagaattagtgctagaagaatacagatc

SEQ ID NO: 880007 - DNA, 624 bp, Homo sapiens
aaggaaagaaatgttgggaggaaccaaccctgccaaccttggtctcaggttccagcctccagggcagtgggaaaataagttctgttgttgaagccctttgggctaaggtgctttgttgttgcatcccaaggaaaccaacgggcaggcacaggtgtaaaacacctttagagaggtggacagaaggggtgccctaggggccggttggtgagacatgatgtgctaagggtggggaagaacctaccaggcagaggcatgacaasgaaaatgccccagcagagacccatccacatggggtcttgtgggccacactaaggggcttaggttttgctctaagaactcaggaaattatggaaagattttaaggaggaaagcgatggatttggtttacactaaaaacaaagaagccaaacagaagccactctggctccttgtcgagagcaggctctgaggcatgaaaagccgtgggaagatgggtgggagctactgcaggaatccaggactctgatgggcccacgatggggggaagtgcagcagatacagcaggtacagggatctcgagccttgcagtgacccagccagagagccacagagctgggtgaggatttgagtgtgggaggagaagac

SEQ ID NO: 880008 - DNA, 634 bp, Homo sapiens
caaaaaattagccaggtgtggtagcgcgcgcctgtaatcccagctactcaggaggctgaggcaggagaatcacttgaacccgggaggcggaggtggcagtgagccaagatcatgccattgcactccagcctgggtgatagaatgagactctgtctcaaaaagaaaaaaaaagaaaaagaaaaatggtaagtgttggccaggatatggagaaargggaacctttgtctaccgttggtgggaatgtaagttagaacagccattttggaaaacagtatggaagtttctcaaaaaaaactaaaaatagagttaccatcattctgcagtcccacttctgggtatatagccacaggaatgtaaagcagtgtgttgatgagacgtctgcactttcatgttcactgcagcgttattcacatgccaagatatggaaacaacctaagtgcctatcgacagctgaaaggatttaaaaatgtggtctgtgtacatgaaagaatacgattcagcctgaaagaagaatgaaattctgtaatttgtgacaacatgggtaaacctggagggcgttatgctatgtgaaataagccaggcacagaaagatgaatattagatgatctcacttttatgtggaatgtaaaaattt

SEQ ID NO: 880009 - DNA, 609 bp, Homo sapiens
gcaaagaccaggagactattatttttttttcttttaagaaaatctctgtgaaaccactagctgaccaaaagctaaagaaacaacagaattaagaggccatccacagcaaacaataacaacaaaccttgaggaaggtgaagaatcttatatccasttaccacatttaaatatataacatgcccagtttctaaccaaaaaatcacgtggtgcacaaagatacaagaaagtatggccaatttgcaggaaaaaaagccaaatgaacagaaagtatccctgaggaagcacagacattgtcttactaggcaaagctttaaatcaactgccttaaatatcctcaaatagataaaggcaatcattgacaaaaaaattaaaagaaaccagacaaataatgccacaaaaatatcaataaagaaattgaattatataaaggaagcaaataggaattctggagctgaaaaatacaataactgaaatgaaaattttactagagcttcaacagcagatttatgcaggcagaagaaagaatcagtaaacttgatgagctcattgaaattatctagtttgaggaacagaaagaaaaaaaatgaagacatgtgaatagagcataaa

SEQ ID NO: 880010 - DNA, 560 bp, Homo sapiens
gctggagataaactgaaactttgagcaacctctggactgactctgattaccctccacaccctacctgcacagggaggagagaccacaaagccagcagcaaacagtaaacttttccaagaatcagagaggaaggagttcctgacaccctgcagcaaaaacaacctcaaaattcccctgaagacagacccatgggagctggggtcaaggtggccttgcgcttcaccgaggaggtgtcattaccaaacgtgstggacattggctacctacggaagaaagattaaggactgaaagaaaatagtggagaacatgcttatgacatgggggtaggacagggaaggccttgagcaagacacaaatcacaaaagcaaatagagaaagagtgatgtctaccttcaatgaaatgtgaaacttctgattcaaaatcggaaacctctataagctgagataaaagacaagcaacagagttggagaagatatttctaacatttgtatgtgtgcaaatgtatgtgtgtaatgtgcttatacatatacatatagataaatgcgtgcgtatacacatg

SEQ ID NO: 880011 - DNA, 560 bp, Homo sapiens
gctggagataaactgaaactttgagcaacctctggactgactctgattaccctccacaccctacctgcacagggaggagagaccacaaagccagcagcaaacagtaaacttttccaagaatcagagaggaaggagttcctgacaccctgcagcaaaaacaacctcaaaattcccctgaagacagacccatgggagctggggtcaaggtggccttgcgcttcaccgaggaggtgtcattaccaaacgtgctggacattggctacctacggaagaaagattaaggactgaaagaaaatagtggagaacatgyttatgacatgggggtaggacagggaaggccttgagcaagacacaaatcacaaaagcaaatagagaaagagtgatgtctaccttcaatgaaatgtgaaacttctgattcaaaatcggaaacctctataagctgagataaaagacaagcaacagagttggagaagatatttctaacatttgtatgtgtgcaaatgtatgtgtgtaatgtgcttatacatatacatatagataaatgcgtgcgtatacacatg

SEQ ID NO: 880012 - DNA, 583 bp, Homo sapiens
agaattctcagatgagttagcaaatagtggctggagataaactgaaactttgagcaacctctggactgactctgattaccctccacaccctacctgcacagggaggagagaccacaaagccagcagcaaacagtaaacttttccaagaatcagagaggaaggagttcctgacaccctgcagcaaaaacaacctcaaaattcccctgaagacagacccatgggagctggggtcaaggtggccttgcgcttcaccgaggaggtgtcattaccaaacgtgctggacattggctacctacggaagaaagattaaggactgaaagaaaatagtggagaacatgcttatgacatgggggtaggacagggaaggccttgagcaagacacamatcacaaaagcaaatagagaaagagtgatgtctaccttcaatgaaatgtgaaacttctgattcaaaatcggaaacctctataagctgagataaaagacaagcaacagagttggagaagatatttctaacatttgtatgtgtgcaaatgtatgtgtgtaatgtgcttatacatatacatatagataaatgcgtgcgtata

SEQ ID NO: 880013 - DNA, 597 bp, Homo sapiens
tgaagatccctgcggatgaggatttgtgttttaaaggttctgagaagtcctgcaacaacagttctcaaacttatttgtccaggggatcttttcttccactgaacgtagttggggagacatggccttaagccttgagcagagaaagagacaagaaactgttgtctcacttacaaccaagtgttgtgtttatgttttaggtttttatgaaactgaggtgctgtttgaggttccaaatcaaactgggtggttgaagagagcctggtatccctgtagacttagccagccatgaaaagttgccttttgttgaaggaggtgttttacaaagggaaatagggtgtctcctgggcatcamattagcacttaaatacatgaatcactgaaatgaaatgaaatgatgaaatgaaatgaaatgatggaatgaaatgaaatgatgaaatgaagtgatgagatgaaatgatgaaatgaaataatgaagtgaaaggatgaaatgatgagatgaaatgaaatgatgaagtgatgaaatgaaaagatgaaatggaatgatgaaatgaaatgaggaaatgatgaaatgcaatggtgaaatgaaatgaggaaatg

SEQ ID NO: 880014 - DNA, 538 bp, Homo sapiens
cactgaagagagctaggagtcagctactgtttgctgcagataatattcagtaaggagctaactgctaatgcactggcctggggaagtgtttaatgtcaaatagaaaccaacactagtaaaatacttccaggaggtaagaatttttttttttttgagacagagtcttgctctgtccccaaggctggaatgcagtggcatgatcttggctcactgcaacctccacttcccaggttcaagcaattctcctgactcagtctccctagtagctkggattacaggcacacaccaccatgcccagctgatttttgtagttttaatagagatgcggtttcaccatgttggccagggtggtctcaaattcctgacctcaggtgatccgcccgccttggcctctcaaagagctgggattacaggcatgagccactgcaccttgctgctccttctttttttgtaatggacctgggagatccttaggaatgagggaaagactcatttctttgaatagggcagaatattaaagactagccagccttcaggc

SEQ ID NO: 880015 - DNA, 613 bp, Homo sapiens
ctgctgtaacaaattatcacgaaatacatatcttacaataaagtgactgttaagcctacagttctggagttcagaagccttaaatgagactcacagggctaacatcaagttttgggcagggctgcagtctttctgagggctctgtggmagagtctatgtactttatttttttcagcatgcagaggccacctttatttcttggaacatgacctcgttcttatatcttttttgtttttttttttttgagatagagtctccttctgtcgcccaagctggagtgcagtggcacgatctcagctcactgcaacctctgtctcccgggttcaagcgattctcctgcctcagcttcctgagtagcttggactacaggcacgtgataccatgcccagttaattttttgtacttttagtagggatggggtttcaccatgttagccaggatggtctcgaactcctgacctcgtgatccacccaccccggcctcccaaagggctgggattaggcgtgagccaccgcgctgggtcctcattcttgtatcttaaaagtcagtgatgttgagtaatttctcatgccaccacctccatggttgcctttcttctgccttcttctttcac

SEQ ID NO: 880016 - DNA, 497 bp, Homo sapiens
tttatttcttggaacatgacctcgttcttatatcttttttgtttttttttttttgagatagagtctccttctgtcgcccaagctggagtgcagtggcacgatctcagctcactgcaacctctgtctcccgggttcaagcgattctcctgcctcagcttcctgagtagcttggactacaggcacgtgataccatgcccagttaattttttgtacttttagtagggatggggtttcaccatgttagccaggatggtctcgaactcctgacctcgtgatccacccaccccggcctcccaaagggctgggattaggcgtgagccaccgcrctgggtcctcattcttgtatcttaaaagtcagtgatgttgagtaatttctcatgccaccacctccatggttgcctttcttctgccttcttctttcacttataaggaagcttgtgatttcattgatccccaccatttaagataatctctccatcattttattgcaaccttaa

SEQ ID NO: 880017 - DNA, 620 bp, Homo sapiens
tgaatgtccagttctcagagttatctaatatcatctaatttcaatgaaaaaaaaaaaaacctgggcttttaaataattaaagttagttttattcagtcttactgaagatcgcaacctgggaaagttttggagaatttctgttagactgctccaaagcagtgtttcatgccacagcttatttagcaggaggtggatgttctgcatgtgctcagaagttccattaaagcaaaaacgcatccaagtttgggtgtgagagtgtatctgcytatagattaaagaggtatagttgttaaccctgtcagatattattttatatacaggaaaaggcaggggctaggatcatttaacttatattttctaaaaatatagtgactcaggtaagcattatggggacctacactctagcctgtttattgtcttcaaggcattcctctggagggatgtgcttagtcactgagtttggggtttgtgaagctatgctgacaagccatatgagcaaataggatttctttaaggcaagggccaactatgtggctggccagaagcagacatttgctacttgtctcacataataaaccttatttctgtttatacttgcctctctatattttgttgctagc

SEQ ID NO: 880018 - DNA, 614 bp, Homo sapiens
agtctactattgatagaatttaggttgattccatgtctttgctattgtcaatagtgctgaaatgaacatacataagcgtatatcgttatgatagaatgatttagatttctttaggtatatacccaatcacgacattgctgggttaagtggtagttctgtttctaggtctttaagcaattgccagactgttttccacaatggttcaattaatttacactcccactaacagtgtgtaagtgttcatttttccctgcaacctcaccagcacctgttactttttgacttttcaataatagccattctgactggtgtgtgatggtatctctctgaagttttaaattgcatttctctartgatcagtgatgttgagctttttttcatatgcttgttggtagcatatatgtcttcttttgaaaagtgtctgtttctgtcctttgcccacttttcaatggggttatttgttttgttcttataaagttgtttaaattccttacagatgctgaatattagtcctttgtcagatgcatagtttgcaattctttttcccattcttgagattgtctgtttactctgttgatagtttcttttgctgtgcagaagctctttaattagat

SEQ ID NO: 880019 - DNA, 616 bp, Homo sapiens
cagattctacaaaaagactgtttccaaactgatcaatcaaaagaaaggttcacctctgtgagatgaatgcacacataacaaggaagtttcccagaaagcttctgtctagtttttatatgaagaaatttcatttttcaccacaggcctcaaagcactcagaaatatccctctgcaggatctacaaaaaggctgcttccaaactgctgaatcaaaagaaaagttcaactgggtgagaggaatgtgcagatcacaaggaagtttctcagaaagcttctgtctagttttcatgtgaagatcgtstctctgagatgtatgcacacatcacaaagaagtttcacagaaagcttctgtatagtttttatgtggagatatttcctttttcaccataggcctcaaaggactccaaatatccctttgccaattctacaaaagactctttacaaactgctcaatcaaaagaaaggttcagctctgtgagatgaatgcacacatcacaaacaagtttctcagaaagcttccatctactttcttgtgaagatatttcctttctcaccataggcctcaaagtgcggcaaatatcaatttacagattctacaaaaagactgttgccaacct

SEQ ID NO: 880020 - DNA, 594 bp, Homo sapiens
tgggcgtggctgctcccaaggtctctgatgtgccctggagtcattttccgcattgtcttggcaattaacatttgtctcctcattacttactcaaatttctgctgcctgcttgaatatccccccagaaaatgggtttttctttcctactgcattgccaggctgcaaatctttcacacttttatgytctgcttcctcttgtacactttgctgcttagaaatatcttccaccagataccctaaatcatctctctcaagttcaaagttccacagatctctagggcagaggcaaaattctgccagtctctttgctacagaataacaagaatcacatttgctctagttcccaaaaagtttctcatctttatctgataccacttcagcctggactttattgtccatatcagtatcagtgttttgataaaagccattcaacaagtctcttggaagtaccaaactttcccacatcttcctgtcttctgagccctccaattctctaggaagttcaaactttcccacattttcttgtcttcttctgagtcctccaaactgttccaacttctgcccattacccagttccaaagctgcttccccatt

SEQ ID NO: 880021 - DNA, 560 bp, Homo sapiens
tgccagtctctttgctacagaataacaagaatcacatttgctctagttcccaaaaagtttctcatctttatctgataccacttcagcctggactttattgtccatatcagtatcagtgttttgataaaagccattcaacaagtctcttggaagtaccaaactttcccacatcttcctgtcttctgagccctccaattctctaggaagttcaaactttcccacattttcttgtcttcttctgagtcctccaaactgttccaacttctgcccattacccagttccaaagctgcttccccattatcaggtatcctgtagcaatgcccctcagtaccaatttactgtattattccattctcctgctgctaggaagaaacactgaagactgggtaatttataaagaaaaagaagtttaatggastcacaatttcaaatggcaagggaggcctcacaatcatggtgaaacgcagaggagcaaaggtacatcttacatggcagcaggcagaagagtgtgtacaggagaactgcactttataaaataatcagatcttgtgagacttat

SEQ ID NO: 880022 - DNA, 636 bp, Homo sapiens
aagtggattgtacaaatactacacaaatcataatactgcagaattatttttatattatacattatcttcactcataacatcgacatagataatctaggacataattttaataattttgagtatatatttactgtaatatttatatattatatatataaaaccaagaggcacttccagtaattctggcaaaaagggagcatcaacatagtatctaagctaaaaaataataaaaataaatacaattgatctagttttttttctgtacagattctactttttacaaacatttctccgccactaagtcgcctaacaatacttgtgatgggatgatactaagtattgctacatatattaaatggaagatataggtgaaaggacaagatttatttcaattgcaaaatgatgaagttcaaaagactcactcttgttwttctagaagttgaaaaatttggcaaagttattagtaaacatattcaggtctgtcgagagtggtaagaattacattgttaaaaattgtcatgtacaaatgacatccctatagtgtcactttggttggcagttatttgaaaatattgcttttcagaaacagtaaatttagttaattaaatactctctggtttacaaatatccttcaag

SEQ ID NO: 880023 - DNA, 571 bp, Homo sapiens
ggtaagtcaaattcttgattttgaagtattttcatttttctgttggggcttaaggagatttataaattacatccctctcttcccttcgtgtattaaaaagttgagaaaccatatcagaagcaaaaatggaaattgatgtcagctttattactgaacaactgattgcagtacacgaccaaagagcaaaggcttgacagccattcctgctgatgtctccaccctctcacacctcctcagtttagatcctaccattgtctctacccaggattgctgcttcctgtaattctgtgtatacaggaaataaaaggcttaatcttcaaggttggcagcctttcaacagataagatctattcatttgagagatgtgtatcaatgcatgtctctcaccaatgatcaaaggggtragtgttctgtaggcaaaaacccagtgttctaatgaacccccttcatggaaatgagcagcccctcatgatattggtccccctcttcttgtcccttcaagcaatatttacatttatagaaattcttcacatgtctaattggtaggctacataataggaaaaagggagaa

SEQ ID NO: 880024 - DNA, 574 bp, Homo sapiens
tagataaatgtgtataaactaatttttaaagttctaaaaacatacatactaaaatgacagcaacctctggggaagggactgagaaaaaggaggtcaaaagggatgttaactttacctgtaatgttcaattttaaaatttacaatgaaaatgtrttcatgtatttttatgcaatttatatgaacaacatttttaaaagaaagaagctcttacagagaaagtcacaaacccatgtgggatatgctcaccaagaaactccatgtattcacaggttcacttctttggtgctctcctcaggatacttgaaaagccatatttagcaaagagtttcaacttttgctcacctgtctgttcttaacttttattttagtttcaaggatatatgtacaagtttgttatataggtaaattatgtcttgtgggtgtttggcatatagattatttcatcacccaggtcatgagcatggtacccaacaggtagtttttcaaccctctccttcctcccactcttcactactcaggtaagctccagtggctcttgttctcttctctgtctccatgtgtactcaatgtttag

SEQ ID NO: 880025 - DNA, 632 bp, Homo sapiens
tcgatgactatgggagaagaggaaatgtcttcatataaaaactagacagaagcattctcagaaacttccttgtgacgtgtgcattaaataacagtgttgaaccattgtttagaagagcattttggaaacacttcttttttttagaaaatgcaagtggatatttggagcgctttgtggcctatggtggaaaagaaaatatcttcacataaaaactagacagaagtattctcagcaacttctttgtgatgagttcattcaattcagatagttgaacatttctttcgtagagcagttttgaaacactctttttgtagaatctgcaagtggatatttggagcacactgaagcctatggtggaaaaggaaatatcttcacwtaaaagctagacagaagcattctcagaaacttctttgtgatgtgtgcattcaactcacagagttgaacctttctttgattgagcagttttgaagcactctttttgtagaatctgcaattggatatttggagctctttgatgcctatggtgggaaaggaaatatccgcatataaaaagtagacagcagcattctcagaaagttgtttgtgttgtgtgcattcaactcacagagttgaacctttcctttgattgagca

SEQ ID NO: 880026 - DNA, 667 bp, Homo sapiens
gaggcctccattggaaacgggaagatcttcacataaaaaatagacagaagtattctcagaaacttctttgtgatgtgggcattcaacacacagagttgaaactttttcttgatagagtagttggaacactctttttgtggaatctgcaatttgacatttggagagctttgaggcctatggtggaaaacgaaatatctacacataaaaactagacagaagctttctcagtgacttctttgtgatgtttacattcgactcacaaatttgaacataccttttcatagatcagttttgaaacactcttttcgtagtatatgcaagtggatatttggactgctttgaggccttcgttgtaaacgggaatatcttcacataaaaactagacataagcattctcagaaacttctttgtgatgtgtgcattcaactcacagatttgaacctttcttttcatagagcagttttgaaacaytctcgtcgtagaatctgcaattgaatatttggactgctttgaggctttcgttggaaaagggaatatcttgacataaaaagtagacagaagcattccaagaaacttctctgtgaagtctgcattcaactcatagagttcaacatacctttttattgagcagttttgaaacactcttttcatagaatcggcaagtgta

SEQ ID NO: 880027 - DNA, 624 bp, Homo sapiens
cagaagcattctgagaaacatctttgtgatatgtgcattcatcacacagggttaaacctaccttatgattgagcagttttgaaacactctttttgtagaatctgaaaatgaatatttggagcgctttgaggcctaccgtggaaaagcaaatatattcatataaaactacmcagtagcattctgagaaacttgtttgtaatgtgtgcattcatctcacagagttgaacctttcttttgattgagcagctttgaaagactctttttgtaagtggtaattggagccctttgtggcctatggtggaaaagaaaatgtcttcacttaaaaactacacagaagcattctgagaaacttctttgtgatatgtgcatacaactcacagagttgaacttatcttttcattgagcagttttgaatctctttctgtagaatctgcaagtggatatttggagccatttgcgccctatggtggaaaaggaaatatcttcaaattcaaacaacacagaagcattcagagaaacttgtttgtgatgagtgcattcatcacacagagttgaacgtttctttttattgagcagttttgaatctctcattttgcagaatctgaaagtggatatttggagcac

SEQ ID NO: 880028 - DNA, 593 bp, Homo sapiens
ttcttcagtttccatgtagtggagcagttttgagtgaatctcttaatactgagttctagtttgattgcattgtggtctgagagagtttgttatgatttcttttttttttttttacatttgctgaggagtgctttactttcaactatgtggtmaattttggaatatgtgtggtgtggtgctgaaaatagtgtatattctgttgatttgggatggagagttctgtagatgcctcttaggtccgcttggtgcagagctgagttcaattcctggatatccttgttaacattctgttgtgttggtctgtctaatgttgacagtggggtgttaaagtctccgattactattgtgtggtagtctaagtctctttgtagttcactaaggacttgctttatgaatctggatgctcctgtattgggtgcatatatatttatgatagttagttcttcttgttgaattgatcgctttaccattatgtaatggccttctttgtctcttttgatctttgttggtttaatgtctgttttatctgagactaggattgcaacccctgcctttctttcttttccatttgcttggtagatgttcttctatcc

SEQ ID NO: 880029 - DNA, 593 bp, Homo sapiens
ttcttcagtttccatgtagtggagcagttttgagtgaatctcttaatactgagttctagtttgattgcattgtggtctgagagagtttgttatgatttcttttttttttttttacatttgctgaggagtgctttactttcaactatgtggtcaattttggaatatgtgtggtgtggtgctgaaaatagtgtatattctgttgatttgggatggagagttctgtagatgcctcttaggtccgcttggtgcagagctgagttcaattcctggatatccttgttaacattctgttgtgttggtctgtctaatgttgacagtggggtgttaaagtctccgattactattgtgtggtagtctaagtctctttgtagttcactaaggacttgctttatgaatctggatrctcctgtattgggtgcatatatatttatgatagttagttcttcttgttgaattgatcgctttaccattatgtaatggccttctttgtctcttttgatctttgttggtttaatgtctgttttatctgagactaggattgcaacccctgcctttctttcttttccatttgcttggtagatgttcttctatcc

SEQ ID NO: 880030 - DNA, 608 bp, Homo sapiens
gaattcctagtgcctgctgatacccagcaccacataaaatgtgctgtttcatcttcgctgcagagttcctgcccaggggcaatttcaaattttcctccagtcttaagtccattttcttttttctttttttttttgagacggagtcttgctctattgcccaggctggagagcagtggcgtgatctttgctcactgcaagctccgcctcccgagttcacgccattctcctgcctcagcctcctgagtagctgggactacaggcacccaccaccatgcccagctaatttttcgtatttttagtagagacggagtttcactgtgttagccaggatggtctcgatctcctgacctcgtgatccrcccgcctcggcctcccaaagtgctgggattacaggcatgagccactgcgcccggcctgagtccactttcaaatagggggatgagctagtcactgcagaggtcctaagtttctgcatgatggaaataccgtgaatttcagcatctgtactgtggtggtgttgggccttcacccgacccctctagggctgactcaggaatctgggtcagtactggactgacggagctggggtctgagtcaattattgtctg

SEQ ID NO: 880031 - DNA, 646 bp, Homo sapiens
ccaacattcaaattcaggaaatacagagaatgccactcctcgataaagatgctcctcgagaagagcaattccaagacacataattgtcagattcaccaaagttgaaatgaaggaaaaaatgttaagggcagccagagagaaaggtcgkgttacccacaaagggaagcccatcagactaacagcagatctcttggcagaaactctacaagccagaagagagtgggggccaatattcaacattcttaaagaaaagaattttcaacccagaatttcatatccagccaaactaaggttcataagtgaaggagaaataaaatcctttacagacaagcaaatgctgagagattttgtcaccaccaggcctgccttacaagagctcctgaaggaagcgctaaacatggaaaggaacaattggtaccagccactgcaaaaacatgccaaattgtaaagaccattgatgctaggaagaaactgcatcaactaatgagcaaataaccagctaacatcataatgacagcatcaaattcacacataacaatattaaccttaaatgtaaatgggccaaatgctccaattaaaagacacagactggcaaattggataaagagtcaagacccatcagtgtgctgtattcaggagacccatc

SEQ ID NO: 880032 - DNA, 492 bp, Homo sapiens
ctttatttcttggaacatgacctcgttcttatatcttttttttttttttgagatagagtctccttctgtcgcccaggctggagtgcagtggcacgatctcagctcactgcaacctctgtctcccgggttcaagcgattctcctgcctcagcttcctgagtagcttggactacaggcacgtgacaccatgcccagttaattttttgtacytttagtagggatggggtttcaccatgttagccaggatgttctcgaactcctgacctcgtgatccacccaccccggcggcctcccaaagggctgggattaggcgtgcagccgcactgggtcctcattcttgtatcttaaaagtcagtgatgttgagtaatttctcatgccaccacctccatggttgcctttcttctgccttcttctttcacttataaggaatcttgtgatttcattgatccccaccatttaatataatctctccatcattttattgcaacctta

SEQ ID NO: 880033 - DNA, 463 bp, Homo sapiens
ccagtagtcattcaggagcaggtttttcagtttccatgtagttgagcagttttgagtgagtttcttaatcctgagttctagtttgattgcactgtggtctgagagacagtttgttataatttctgttcttttacatttgctgaggaatgttttacttccaactatgtggtcaattttggaataagtgcgatgtggtgctgagaagaatgtatattctgttgatttgggtggagggttctgtagatgtctgttaggtctgcttggctcagagctgagttcaattcctggatatccttgttaactttctgtctcrttagtctcttaacactcataccatctcccttaccccccgtactccaagcatagatactattatccaacttttaagtatgaaaaaactgaaggctgcttagggcttaaaggtttaaattaaggctatgatttggatccagatctgcctgtc

SEQ ID NO: 880034 - DNA, 645 bp, Homo sapiens
attcacatggcagcggcaaggagaagtgccgagcaaaaggggaaaaagcaccactcactaacaggagaacaagacatgggaaacctccccccaattcaattatctcccactgggttcctcccatgacatgtgtggattatgggaagtacaattcaacatgagatttgggtggggacacagccaactcataccatcatccaccacatcaaacccactaagtgagctacatttttgctgcgtgggatgaaaatgtccacacagcacagagaagaatatgtgcttcatagagtaatgatagtcagcttaacaaaagatgcttccgtgagaggctgatggtcagccctgagatcagtaaccagaagccgtggcttccagaaggctgcctggatctggttagtgaggatttcagtagtgaagtgaccagcaataggagtasctccagtggcagaagcgaacttcagcacagcccactggccaggattcctggatgacctgacattgacatcagcagagttttcaagggcaacaatggcataagctgtcagcagaagcttctcccaggtcctcttcagatttaggatgtagatgtcatcagttttccttttatagatgtactgttccatttggaagggttggtgccaccta

SEQ ID NO: 880035 - DNA, 654 bp, Homo sapiens
gccaagaactgagtcaaaatgtcagggaaaggaggcacctgcaaggagaaaggggacagatgcacttacataggacagatgcaaatagacaccactatgacacgtaaagctggaataatcaatacattcctaaggacaaagtggggctggtcggattgggaaatggctgacagctgcagaagttgggaaasatccatcatcttgaaaactttttccgcacaaacccactgtgatcgctcaagcaattggtaaggaatccaagagagtctgtatatgatacagatcagggagagcagaacacttgggaggtgaccaggtctttggggccgagcccttttgaatgggattagtgcctttataaaagaagctcagtggagttcttgtgtgccttccactatgtgaggacatagaaagaaggcaccatctatgaaccatgaaatgggctctcatcaacactgaatttgtgagcattttgacctgagatcttacagcctcaagaagtgtgaaaaaagaaatatctgttgttttttagtcacccagttcatgttattttgttataagaatccaaatagaccaagatattccacttaatatgtaggggaaggtaacaaaaactgacacacctagaatactcatgatgctgggagtatgaaa

SEQ ID NO: 880036 - DNA, 667 bp, Homo sapiens
gtaatcttcagagggtgaaaggggaagcttttcacttcactcctactgtgacaactaactaccttcttacttattcaattttttagtctatatcaacactttcatatacatttacttttaaacaaaattttccatcattacacttaaaattttatttaccttttaaaaaggaaattaaaaataaaattaaaaattataaaattttacataataaaaataaaataaatgatttatataaaaattaatctgacctgtgaaaaacactatccagaggccaggcgcggtggttaacgcttgtaatcccagcactttgggaggccgaggtgggtggatcacgaggtcaggcgatctagaccacgatgaaacccctctctaccaaaaatacaaaaaattagccgggtgtagtggcgggctcctgtagtcccagccactcaaagaggctgaggcaggagaatggcgtgaayccaggaggcggagcttgcagtgagccgagatcgtgccactgcaatccagcctgggtgacagagccagactctgtcaaaaaaaaaaaaaaaagaaaaagaaaaacactatcgagagaataaaaagacaaatcacagactgggagtaaaaatttacaaaagctatatctggtgaagatacatttgttatccaaaatatacaaaga

SEQ ID NO: 880037 - DNA, 667 bp, Homo sapiens
gtaatcttcagagggtgaaaggggaagcttttcacttcactcctactgtgacaactaactaccttcttacttattcaattttttagtctatatcaacactttcatatacatttacttttaaacaaaattttccatcattacacttaaaattttatttaccttttaaaaaggaaattaaaaataaaattaaaaattataaaattttacataataaaaataaaataaatgatttatataaaaattaatctgacctgtgaaaaacactatccagaggccaggcgcggtggttaacgcttgtaatcccagcactttgggaggccgaggtgggtggatcacgaggtcaggcgatctagaccacgatgaaacccctctctaccaaaaatacaaaaaattagccgggtgtagtggcgggctcctgtagtcccagccactcaaagaggctgaggcaggagaatggcgtgaatccrggaggcggagcttgcagtgagccgagatcgtgccactgcaatccagcctgggtgacagagccagactctgtcaaaaaaaaaaaaaaaagaaaaagaaaaacactatcgagagaataaaaagacaaatcacagactgggagtaaaaatttacaaaagctatatctggtgaagatacatttgttatccaaaatatacaaaga

SEQ ID NO: 880038 - DNA, 666 bp, Homo sapiens
gattataaagctcatttaatttcaagaaattttttaaaaaatgaatatatttttaggagactaaaaaattgatgtagcaaatttgaaaagtagtttgtatatagtattttaaattaaaactcacaaatgaactcatcagattagacatggccatggatgagagttcataaatatttcagaatgcattacagaaaattttaaaaaatgcacaatgtggacagaatcatgaagagacatggaagatacagtgagaaagtgtagcatgtgtttagtgagtgttctcttagaagaagggaactgggaagggacaatatgtgatggtattttggctgaaagttctctagactcttgtaagacactaatccrcatattcaaaaattctatgcatgctaagcaagctacagtggagataaacctacctctacatatctcctagagaaatagtaaacaatcaggaagggaaaaatatttcaattagcactagaaaaatcaaattacctttaatcatattgaaatctgaaagcatgaaaggtaaaataaacaatattatttgttaagaataataatgccactctgaaattctcaaccaagaaaaatattcatcaacctatggctaaataacatatttagagacaaaaaacaaaacaccaccagcagaattccact

SEQ ID NO: 880039 - DNA, 595 bp, Homo sapiens
cttagcatccagtatttcttttttaataaagaaaataattattctcttgcaatatactatgtttatctgggttttgaaaagtgctgtttcctaatatgagaaagccatttacatttttaattctacaaaggcaaatggaatggtactaaattatttacataataatgtttagatggtggcccttataacattctttctatacttcctacagagttgcagatatgcaatcatagaatatttctgggagctaatcctttagcttgatgaatgaaacaagacttttaaataaaattaaactttcaaattatccaggtaatgggcctgtcttttaattcaatggatatggagcataatgaattatccctgtkcattgggtaataagttttcattcttctaatactcaaaatgtcctttaatttttaatagtcatatcattatccctaggtattttagcttctatcttaaattctaaaataattttgaaacaggagaaagtattctttattactatatgtattaaacatcatggttttcaaatttaactgcaaatgtatcttttcattgcttcttggtgacgcccttcaccctatccata

SEQ ID NO: 880040 - DNA, 497 bp, Homo sapiens
cagtgttcgatactgaaatctatacgttcctaatgggtggttaaaaaaaaaaacctcagcaagagaagcagaaaatgtttcctcttcctgaaaaactgtagaaaggcaggcaccattctgggtgggacatggtccttgcaaaagtctttatggtttttttttttattttgagatgaagttttgctcttgttgcccagactggagtgcagtggcataatctctgctcactgcaacctctgcctcctgggttcaagsaattctcctacctcagcctcccgagtagctggaattacaggcacctgccaccatacctggctaattttttgtatttttagtagagatggagttttgccatgttggccatgttggcctcgaactcctgacctcaagtgagccacccgcttctgcctcccaaagtgctgggattacaggcgtgagtcactgtgcccggccaagattctgttttgatagaacacttgagtctctctcaccttgta

SEQ ID NO: 880041 - DNA, 619 bp, Homo sapiens
ttgtataaatcaaagttctgttcatagggaccatcaacaatgttctctgacctggcacccttctgttcccccaccccacccttctatcctcctagataactactgggaaaatatttctttctcggagatgcctttcttcctccttgatgatagtaatcatttttctctttttagctcaaaaggagaattttttttcctttgtcatgtctgtgtgccttgcctatctaatacagtacattgtttctcatttcctttgttactatgcttgtgcatgtctcaaaaacaaatgtgaactttttgtccaaacaaagtaagtgcatgctttataaaattacaaaggaatggtacagctgttctctgattatattcttagagtgtttaaaattttgaaagtgcttargagtttctttttaaaaatctgtcaacaaacttcttacagaaacctattttgtgaagtgttttatttttgctcctatgaattgtatataaaaatacctaatgtgttttagtagtaataatgcatagtttaataaagtggaagttcaacagattaaagcttttagactgtctttttcatctgcaattaatcaattacatttaaccacagaagtgattttat

SEQ ID NO: 880042 - DNA, 632 bp, Homo sapiens
gagcagagacaaactaacaatccgtcctggctaaagccatcctataccagcaaggctctggccaatctaccagctgaccacgaatgagtccagtaaagattggacaaacctggctcagatcagcagaacaacccaacaaaactgttagaataaatattagtggtttagaataaatatcacttcattttggagttctttcttacacggcaatagctaactgatacaaaggttgtgctaccaacttgctgtgtaactaatacaaacatttattctgtctgcaaattccttatcaggaaagcaagagagtcagaaaagttttagtctttcacttgctttgatgtttcaacaatattctgcatgggtatrcactcacatttttctttttttattgatacataatcctttacatatttatggtgtacatgtgagtatttgtggcatatgtagaatgtataatgaacaagtcggagtatttgggatatctgtcactttgagtatttatcatttctatgtgttggaaacaacttaagtttcctcttctagtggctttgaaatatacactacattgctgccaactatagtcaccctactctgctattcctcagcagcattcatatctactatctgacggt

SEQ ID NO: 880043 - DNA, 632 bp, Homo sapiens
gagcagagacaaactaacaatccgtcctggctaaagccatcctataccagcaaggctctggccaatctaccagctgaccacgaatgagtccagtaaagattggacaaacctggctcagatcagcagaacaacccaacaaaactgttagaataaatattagtggtttagaataaatatcacttcattttggagttctttcttacacggcaatagctaactgatacaaaggttgtgctaccaacttgctgtgtaactaatacaaacatttattctgtctgcaaattccttatcaggaaagcaagagagtcagaaaagttttagtctttcacttgctttgatgtttcaacaatattctgcatgggtatgcactcacatttttctttttttattgatacataatcctttacatatttatggtgtacatgtgagtatttgtggcatatgtagaatgtataatgaacaagtcggagtatttgggrtatctgtcactttgagtatttatcatttctatgtgttggaaacaacttaagtttcctcttctagtggctttgaaatatacactacattgctgccaactatagtcaccctactctgctattcctcagcagcattcatatctactatctgacggt

SEQ ID NO: 880044 - DNA, 560 bp, Homo sapiens
cttatgcttagttaagtaagtggcacttaagtttggcacttaagtttgtttgtttgtttgttttttggagattggttctcactctgtcgcccagactggaatgcagtggcgggatctcacctcactgcaacttctgcctcctgggtttaagcagttctcctgcctcagcctcccargtagctgggattacaggcacacaccaccacacctggctaatttttgtatttttagtagagatgaggtttcaccatgttggccaggctggtctccaactcctgacttcaggtgatccgcctacctcagcttcccaaagtgctgggattacaggcataagcaccatgcccagccaagtatttaaagtataaatcaatataaaataaaactttcccaagtatttttttcaaacaatgttattgagcaaccatggataatttttgtgccatattgaacaactatgactccatatatgaccctcatatgtttcaagcttgattctagacatcgaggaaatcatgtgtcaacatctatctcctcttggaatttgtctggatggccaaaca

SEQ ID NO: 880045 - DNA, 655 bp, Homo sapiens
ttttaaatacacatgcattttttatttgaggaagctgcaatgttatattccatgtacttttctggaagcattatgcaagtcaactagccctaaaatgttaagtactaaagcagtccaaaatatacacacacacaaaagttaaattaattgggataaataacactcctacatgacatctaatttatrtcatatcctgctgcaactggaaatacaactgaaattttttagaatttcataagtgattaagaatgtggactttttacccctgtcaagtaaacttaggaaatgtgtccataacttgatagttctgaataatcttacttaatataatacccactattaattttgccattaggaaaatcaagcctgcaagaaagaaatccaatattcaagagtatgtcgctgcctgaactatatatggcatataccttaacttttgctgtactaataaccaacttctccagaaatacctttcatcattcatttctaggattttatgatacaccacaccaactacaatgtttctctaccacagaatcacactctgatttaacactccatggaaccctattctgaatcatgaatcaaaaaaagagaatgttaattctctgtctcctggaatttatattctcttacttctcttctgtctcctatc

SEQ ID NO: 880046 - DNA, 670 bp, Homo sapiens
ctggattccagtcttcacgtaccaaagtttctgagatagttatacaattagttccaattgtattcatctttttttggttgtgggctacacagagttgaaacagttaagttttagatttgttaacataaatgtcttaagcaatggcaaatatgtgaacatgaaaataatttttctgggccaggcgtggtggctcacgcctgtaatcccagcactttgggaggccgaggcgggtggatcwtgaggtcaggagatcgagaccatcctggctaacacggtaaaaccccatctctactaaaaatacaaaaaattagccgtgcgtggtggcaggtgcctgtagtcccagctgctcaggaggctgaggcaggagaatggcctgaacccaggaggcagagcttgcagtgagcagtgatggaaccattgcactccagcctgggtgacagagcaacactctgtctcaaaaaaaaacaaaaagaagaaaataatttttctggacaatgtgtaatatggattgtattagtctgttttcatgctgctgatagagacatacccaagactgagtaatttataaagaaaaagaggtttaacagactcatagctccatgtggctggggaggcctcacaatcatagcagaaggagaaagacatgttttacatggcagcaggcaagaga

SEQ ID NO: 880047 - DNA, 621 bp, Homo sapiens
atctagaaatgtcactctatgattttctttcttctcccctgaagatccgcatgtgacaagtgtcctaacctatacctaaagaaagagatgctacgctgagaggctgagaagaatctgagcaaacaggccttgctgggttccccccagaattcattaccattagatcataccctttttagccaatcttatttctacacagccatcaattctttactgcacataagcataaaaatacagtttttcctaggtctttgggtcttcattctgaagkttcctgggacgcataaaacttggattaaataaatttgttatgttttcctcttgttaatctgtcttttgttataggaatgtcagctgtgcactttgaaatgggtgcaaaaaaaaatattatacatttttacctttacatagtcttcagaaaaaatatggataatcataacttcttttcagttagtctctaatatactaaatgttgtttgtcatatttaaaatatgagaaataaaattattctgtatatattttcaatttaaagaaccctattatgtattacttcattgggtctattttctgggttttgtcgttgaaatatctggagtacaataaacagaatatttttcaga

SEQ ID NO: 880048 - DNA, 449 bp, Homo sapiens
ccacttacagattctacaaaaagagagtttcaaaactcctcaatcacaagaaaggtttaattctgtgagataaatgcacacttaacagagaagtttctctgattgcttctatctagattttatgtgacgatatttccttttctaacatgggccgcaaagcgctccaattgyccacttgtggattctacaaaaagagagtttcaaaactgctcaatcaaaacacaggtttaactcggtgagatgattgcacacatcacaaagaagtttctcatattgcttctgtctagattttatgtgaagatatttactattctcccgtaggccacacagcaccccaaatgtccaattgcagattctacaaaaacagtgtttccaaactgctcaatcaaaagaaattttcaactctgtgagatgagcgtacacatcacaaaggagtttcttagaattct

SEQ ID NO: 880049 - DNA, 449 bp, Homo sapiens
ccacttacagattctacaaaaagagagtttcaaaactcctcaatcacaagaaaggtttaattctgtgagataaatgcacacttaacagagaagtttctctgattgcttctatctagattttatgtgacgatatttccttttctaacatgggccgcaaagcgctccaattgcccacttgtggattctacaaaaagagagtttcaaaactgctcaatcaaaacacaggtttaactsggtgagatgattgcacacatcacaaagaagtttctcatattgcttctgtctagattttatgtgaagatatttactattctcccgtaggccacacagcaccccaaatgtccaattgcagattctacaaaaacagtgtttccaaactgctcaatcaaaagaaattttcaactctgtgagatgagcgtacacatcacaaaggagtttcttagaattct

SEQ ID NO: 880050 - DNA, 536 bp, Homo sapiens
ttctttggattcagcagttttctaaacagtccttttgtagaatctgcaaagggatatttcagagcccattgagggctatggtgaaaaaggaaatatcttcaaataaaaacaaaacagaagctttctgagaagcttcctgtgatgtgtgcattcatctcatagagttgaatctttcttttgattgagcagtttagaaacagtctttttgtaaaaygtgcaaaaggatatttctgagccatttgaggccgatggtgaaaaagaaatatcttcacatcaaaactagacagaagcattctgagaaacttgtttctggtgtgtgcattcatctcacagggttgaacctttcttttgtttgagcagtttggagtcttttttttgaatatgcaaatggatatttgtgagcgctttacagcctatggtgaaataggaaatatcttcacataaaaataagacagaatctttctgagaaaatgctttgagatgtgtgctttcatctcacagagatgaacttttctgttgatcaagtagcttggaaa

SEQ ID NO: 880051 - DNA, 546 bp, Homo sapiens
ctatcttttgattgaacagttttgaatctctcttttttcagaatctgcaagtggatatttggagctctctgaggcgtactgtgaaaaatcaaatatcttcacctaaaaactacacagaagcattctgagaaactcctttgttatgtgtgcattcaactcacagagttgaaactatctttggattcagcagttttgaatctctctttttgtagaatctgcaactggatatttggagtcctttgtgccatatggtagaaaaggaaatatcttcaaataaaaactatacagaagcattctgggaaacttctttgtgttgagtgcattcatcacacagtgttgacactttcttttgattgagtagttttgaaaaaatctttttgtagaatctggaagtggatatttrgagggctttgaggactcttttggaaaaggaaatatcttcacataaaaactacacagaagcattctgggaaatgtcattgttatctgtgcattcaactcacagagttgcacctatctttgaattgagcactttcaaatctctct

SEQ ID NO: 880052 - DNA, 546 bp, Homo sapiens
ctatcttttgattgaacagttttgaatctctcttttttcagaatctgcaagtggatatttggagctctctgaggcgtactgtgaaaaatcaaatatcttcacctaaaaactacacagaagcattctgagaaactcctttgttatgtgtgcattcaactcacagagttgaaactatctttggattcagcagttttgaatctctctttttgtagaatctgcaactggatatttggagtcctttgtgccatatggtagaaaaggaaatatcttcaaataaaaactatacagaagcattctgggaaacttctttgtgttgagtgcattcatcacacagtgttgacactttcttttgattgagtagttttgaaaaaatctttttgtagaatctggaagtggatatttagagrgctttgaggactcttttggaaaaggaaatatcttcacataaaaactacacagaagcattctgggaaatgtcattgttatctgtgcattcaactcacagagttgcacctatctttgaattgagcactttcaaatctctct

SEQ ID NO: 880053 - DNA, 554 bp, Homo sapiens
ggaaacagtctctttgtagtatctgtagagggatatttgcgagcggtttgaggcctatggtgaaaaaggaaatatcttcacataaaaactagagagaagctttctgagaaacttctttgtgatgtgtgaattcatctcacagtgttgaacccttctttggattgagcagtttggaaacaatccttttgtagaatctgcaaaggtatatttctgagcccaytgaggcctatgatgaaatatgaaatatcttcccataaaaactagacagaaggtttctaagaaacttctttgtgatgtgtgcttccatctcacagagttgaacctttcttttgatggggaagtttggaaacactctttttgtagaatctgcaaatggatatttggagcactttgaggcctatggtaaaaaaggaaatatcatcacataagtattagacggaagcattctgagaaacttctttgtgatgtttgcatccatctcacacagttgaacatttgtttgattgaagatttggacacagtctttttgtaaaatctacaaagggataattgtg

SEQ ID NO: 880054 - DNA, 615 bp, Homo sapiens
ttgtgatgagtgcattcattgctcagagttgaacttttgttttgattcagcagtttgcaaactctctttttgtagaatctgcaactggatatttgaagacctttgtggcctatgttggaaaaggaaatatcttccaataaaaactagaaagaaacattctgagaaacttctttgtgatgtgtgcattcatctcacagagtttaagctttcttttgattaagcagtgtttaaaaactctttttgtaaaatctgcaagtgcatatttggagcgctttgaggcctattgtgaaaaagtaaatatctacatataaaaactacacagaagcattctgagagacttctttgtgatgtgtgcattcatctcayggagttgaaccattcctttgatttagcagtttcaaaacactatttttgtagaatttgccagtggatatttggggccctttgaggcagatggcagaaaaggaaatattttcccatagaaactacacagaaacactcggagaaacttctttgcgatgtgtggtttcatctcacagagttgaaccattcttttgattgagcactttggaaacacaccctttgtggaatctgcatgtggatatttggagtgct

SEQ ID NO: 880055 - DNA, 615 bp, Homo sapiens
ttgtgatgagtgcattcattgctcagagttgaacttttgttttgattcagcagtttgcaaactctctttttgtagaatctgcaactggatatttgaagacctttgtggcctatgttggaaaaggaaatatcttccaataaaaactagaaagaaacattctgagaaacttctttgtgatgtgtgcattcatctcacagagtttaagctttcttttgattaagcagtgtttaaaaactctttttgtaaaatctgcaagtgcatatttggagcgctttgaggcctattgtgaaaaagtaaatatctacatataaaaactacacagaagcattctgagagacttctttgtgatgtgtgcattcatctcatggagttgaaccrttcctttgatttagcagtttcaaaacactatttttgtagaatttgccagtggatatttggggccctttgaggcagatggcagaaaaggaaatattttcccatagaaactacacagaaacactcggagaaacttctttgcgatgtgtggtttcatctcacagagttgaaccattcttttgattgagcactttggaaacacaccctttgtggaatctgcatgtggatatttggagtgct

SEQ ID NO: 880056 - DNA, 475 bp, Homo sapiens
tgaaacactctttttgtcgaatttgcaagtgtatatttggaccaatatgaggacttcgttggaaaagggatatcttcacaaaaactagacagaagcattcccattaacttctttgtggggtgtggattcaactcaaaaggttgaacctctcttttgatagagcagttttgaaacactctttttgtagaatctgcatgtggacatttgaagcgctttgaagcctatggtgaaaaaggaaacatyttcacattaaaactacacagaaggattctcagaaaattctttgtgatgtttgctttcaactcacaagttgaacattgcttttcatagagcagttgtgaaacactctttttgtagaatttgcaattgaatatttggacggcttggagaccttcgttggaaaaggaatatcttcacataaaaactagaaagaggcattgccagaaacttatttgggatgtgtgcattcaactca

SEQ ID NO: 880057 - DNA, 611 bp, Homo sapiens
tctttgtgatgtgtgaattcaactcacagagttgaagctttctattgatagagcagttttgaaaaaccgtttttgtagaatctgccagtggacatttggagagctttgaggcctacggtggaaaaggaaatatcttcacataaaaaccagacacaaagattctcagaaacttctttgtgacgtttgcattcaactcacagagttgaacacaccttttcatagagcagttttgaagcactcttttcgtagaatctgcaagtgtatatttggamtgctttgaggccttcattgtaaacgagaatatcttcacataaaaacgagacaaaagcattctcagcagcaactactttgtgatgattgcattcaactcactgtgttaacctttattttgatagggcagttttgaaacactgtttttgtagcatctgcaagtggtcatttggagagctttgaggcctatggtggaaaaggaaatatcttcacataaaaacaggacagaagcattttcagaatctcctctgtgatgtttgcattcaactcacagagttgaacgtcccttttcatagagcagttttgaaaccctcttcgtagaatctgccagtggatatttg

SEQ ID NO: 880058 - DNA, 614 bp, Homo sapiens
tcctgggcctttttgttgaaagttttggattattgattcaagctctttatttattaattacctgtttagtatttttatttcttcttgattcagtctttgtaggttacatttctaggtatttaccaatttattctagcttattaaatttttggcatataattattcataatagtctcttgtaattcaaagggactacacaacagagaacagttaacaagatggcaatggtaaatcttttcctatcaacagttaccttaaatgaaaataaattaaactttygaataaagaggtatagagtagttgagtggataaaaatactaagattcagctatatgctgtctaaaagagactcacttcagctttaaggacacaggctgaaagtgaagagattgagaaaatgatattccatgtaaatggtaaccaaaaaaaaaaaaacccgaaaaacacaaaacaacaaaaaagcaggaatgtctctacttataccagacaaaattgattttaagccttgactattgtttatagagaaaaggaaggccattaaaaattaataaaattttacttcaacaaaaagatacaattataaatatatatatatatatacacccaacatcaga

SEQ ID NO: 880059 - DNA, 614 bp, Homo sapiens
tcctgggcctttttgttgaaagttttggattattgattcaagctctttatttattaattacctgtttagtatttttatttcttcttgattcagtctttgtaggttacatttctaggtatttaccaatttattctagcttattaaatttttggcatataattattcataatagtctcttgtaattcaaagggactacacaacagagaacagttaacaagatggcaatggtaaatcttttcctatcaacagttaccttaaatgaaaataaattaaacttttgaataaagaggtatagagtagttgagtggataaaaatactaagattcagctatatgctgtctaaaagagactcacttcagctttaaggacacaggctgaaagtgaagagattgagaaaatgatattccatgtaaatggtaaccaaaaaaaaaaaaacccraaaaacacaaaacaacaaaaaagcaggaatgtctctacttataccagacaaaattgattttaagccttgactattgtttatagagaaaaggaaggccattaaaaattaataaaattttacttcaacaaaaagatacaattataaatatatatatatatatacacccaacatcaga

SEQ ID NO: 880060 - DNA, 526 bp, Homo sapiens
ccaaaagtggggagggaaggaggcaagggttgaaaaactacctgtcaactattatgttcaccacttgagatatgcattcagttgaaactcaaacctcagcatcgcacaatatatcaatgtaacaaacatgcacacatacctcttgaatctaaaatttaaaaataaagcaaattaaaaatataaaataggtcttttcatgacttmccagcctgggttggagtcccttctctgttttcctagtgaactatttttgcttatatgagagtatgtgtctgtccccaacccccacccaaagcttcctagtatgttttgtctttcattccagagtcttcagaaattgactcattgtgggcactcagttattcaggttttgcttctgcatttaccactttctagctgtgtgatttgaggcaagacatttactcccccttaacttcagtttcctcatatctaaagtgggactaataatgtagtagttttgtaagatttaatgaaataatgcaagtgaaaatgtctagcagaatgc

SEQ ID NO: 880061 - DNA, 620 bp, Homo sapiens
cctagggctgttttactcttgggctccttgtttaaattctcaggttccatcccggacctattgaatgagaaactctggggatggggtccagctactttgttttaactttaagtgattctgatgtaaattaaaattcaagaagctcttctatataatgttggttaggatttcagaaaccaggcctgttgcttacaggtgggaatacgtagatagagagagaaatgacaaataccataactgggtttgttttatctgtctstttttctcccttctcctcctttttttcctgctataggaacaaaatttggagggaggtagctcagggaaaggatgtaaactgtagtaacttttggttgatctcatgtgtgtcaggggtcttcaaaaccacctttaggttccagtgattcattaaaaggagtcacacaattcagcatataatcatactcttagctagaatttattacagcaaaagggtgtaaagcaaaatcaccaaagggaaaagactcatggggcagaagtccaaagtccaaagttaggcagtccagagttaggcagtgggtgccctggtgaccagcccccaataaaaaccctgggcactgagcttctaatgagcttccctg

SEQ ID NO: 880062 - DNA, 620 bp, Homo sapiens
cctagggctgttttactcttgggctccttgtttaaattctcaggttccatcccggacctattgaatgagaaactctggggatggggtccagctactttgttttaactttaagtgattctgatgtaaattaaaattcaagaagctcttctatataatgttggttaggatttcagaaaccaggcctgttgcttacaggtgggaatacgtagatagagagagaaatgacaaataccataactgggtttgttttatctgtctgtttttctcccttctcctcctttttttcctgctataggaacaaaatttggagggaggtagctcagggaaaggatgtaaactrtagtaacttttggttgatctcatgtgtgtcaggggtcttcaaaaccacctttaggttccagtgattcattaaaaggagtcacacaattcagcatataatcatactcttagctagaatttattacagcaaaagggtgtaaagcaaaatcaccaaagggaaaagactcatggggcagaagtccaaagtccaaagttaggcagtccagagttaggcagtgggtgccctggtgaccagcccccaataaaaaccctgggcactgagcttctaatgagcttccctg

SEQ ID NO: 880063 - DNA, 600 bp, Homo sapiens
cattgaaaaggaatgctccatgatgtgtcttgtctactatctctggaatcagtatcaattccaagtagtaatgtaaaataaaagatctatgaaacaactgagcggggtggggcaggcacagtggctcacacctgtaatccctgcactttgggaggccaaggagggcagatcacttgaggtcaggagttcgagaccagcctggccacatggcgaaatcccatctctactaaaacatacaaaaattaccctagtgtggtggcaggcacctgtaatcccagctactcaggaggctgaggcaggagaatcacttgaaccagggaggtggagggtgcagtgagtcgagatcgcaccactgcactccagcytgggagacagagcaagactatctcaaaaaaaaaaaaaaaaagtctactttatgttgtcattaaacagtaatgatatctttttaagatctcaaatcttttggtaactaaaaatacaattatgtaattaatttaaaattcattaattctcagtgactttaaaaaacccctgtccatctccttagtttatagcttcctaaagtatcttaatttaaaggatgataagccattctaacat

SEQ ID NO: 880064 - DNA, 686 bp, Homo sapiens
ttggttatcttcacagtttaattttttattcttctgcctttatcatttcaagttctgtcactgactcaacaaatacttactgagaagttgctctatcccaggcacaaccctaggtgctagagataactcacaacctcaggcagtcaggtgcarccctgttgccttggaaactacagtcttttatgaggggcagacagtaaacaagcaaggaagaagaggcagaaggaaagtggtgaagtcattggtgtccttggcaataactgattcagttggagtgatgaggactacagccttgttggaatacaatttctgaaggagggagatgtgtgaagagagagagttggagggagagagagaaggattatagataattatttttaggagttgtgctataaggaaaaacagagaaatggggtggttgcaggagggagggttaagagacagttttgtttttcctgagctgggagatgtgacagcatgtttgccaacctccaggaagggctagtagatgaggggaaccatttgtgcagcggtcacctatctcttcttttccaccagtcacatccttgaagaagcctgaaagataggctttgcagagggacattaatactcaatccagtggacaagggggaagacaatgtatagggcacaggtgcaggtttatcttcttatttttccagcttctt

SEQ ID NO: 880065 - DNA, 576 bp, Homo sapiens
acacacacacactaggttcttgcatctgagggtggggcctgaatctctgtacatcaggcacaggaaggtgccactccttgctacttttctccaggtctcatgatccaatccctaatatttccattgtggaatacgcttgacacttacttcacatcatttgctctatctttgcattaactaaygatcatatcaaaacactgtcttttgaaaaaatttattgcagaggggtcacctaggaaagatgcacttggtaggggtcacctgtgcccccttgtcctcctttgctattcaaatcgtcctcaaacctaccctctggctgaggtgggcagtccaacatgcaggcaggcgcctggctgcctggaggcagcccttctcgttgccctgtcataattcaagcaggtctttctgatgccagaggaaatgcctacaagccttagaaaagtcttagagatttttaataagggttattagcctctattcctttggaacaagaaagggtagagctgactttgatcatgaagttttcgattctctcgctgccgtcacacctcttccaatgcctcagtaggagacacc

SEQ ID NO: 880066 - DNA, 558 bp, Homo sapiens
gtatcttcaaatagtttcttggctaaaatcaaatgatgctttactgctactaacaagtcaaagaacaataattaacaattaaagttgacaatttcattaactacaggaaagcaactagatagagacagatagagttttttttctttttttggagacagagtctcgttctgttgcccaggctggagygcagtggcacgatctgggctcaaggcaacctccgcctcccaggttcaagcaagtctcctgcctcagcctcccgagaagctaggattacaagtgtgcaccaccatgcccagctaatttttgtatttttagtagacacagggttttgccatgttggccaggctggtctcaaattcctgacttcaagtgatccacccacctcagcctcccagagtgctgggattacaggcatgagccactgcacccggccagttattttcaaaatgggatcttgctttgttccctcagctggagtgtagtggtacaatcagagctcactgtagccttgacctcctgggctcagctcctgagtagctgtgactacaggcgtgcacc

SEQ ID NO: 880067 - DNA, 642 bp, Homo sapiens
tattttattttattttattttattttattttattttattttattttattttattttattttttgagacagagtctcactctgttgcccaggctggagtgcagtggcacgatcttggctcactgcaacctcagcttcctgggttcaagtgcttcttgtgcctcagcctcccaagtaactgggattacaggtgcacaccaccacacctggctaatatttgtattttagtagagattgggtctcaccatgttgcccaggatggtctcaaactcctgactgcagktgatcctcctgccttggcctcccaaagtgctgggattacaggtatgagccactgcacccggccgagagccactagtttaaataaagaggtattgattccaaagtttccatgtatatttatactagtaaagcatagggtcctacaaaaattggctaatggggctcaaaattcttaacagtgacactgaacatgtcattcatattaattacttgcccttggaggtcatgtaagtgctcttggtttctgtgttcatatttgttaaccaactatacaacataacaaaggttactttgtggttagtataataataggcacaaatgctttggtcaactcacttggtattcaaagtcaatgttagtaa

SEQ ID NO: 880068 - DNA, 642 bp, Homo sapiens
tattttattttattttattttattttattttattttattttattttattttattttattttttgagacagagtctcactctgttgcccaggctggagtgcagtggcacgatcttggctcactgcaacctcagcttcctgggttcaagtgcttcttgtgcctcagcctcccaagtaactgggattacaggtgcacaccaccacacctggctaatatttgtattttagtagagattgggtctcaccatgttgcccaggatggtctcaaactcctgactgcaggtkatcctcctgccttggcctcccaaagtgctgggattacaggtatgagccactgcacccggccgagagccactagtttaaataaagaggtattgattccaaagtttccatgtatatttatactagtaaagcatagggtcctacaaaaattggctaatggggctcaaaattcttaacagtgacactgaacatgtcattcatattaattacttgcccttggaggtcatgtaagtgctcttggtttctgtgttcatatttgttaaccaactatacaacataacaaaggttactttgtggttagtataataataggcacaaatgctttggtcaactcacttggtattcaaagtcaatgttagtaa

SEQ ID NO: 880069 - DNA, 501 bp, Homo sapiens
acccagcaatcccattagtgagtatatacccaaaggattataaatcattctactataaagacacatgcacatgtatgtttaatgcagcactatttgcaatagcaaaaacttggatccaacccaaatgcctgtcaatgataggctagataaagaaaatgtggcaygtatacaccatggaaactatgcagccataaaaaagaatgagttcctgtcctttgcagggacgtggatgaagctggcagccatcatcctcagcaaactaacacaggagcagaaaaccagacaccacctgttctcaatcattgttgagagttgaacaatgagaccacatggacacagggaggggaacatcacacaccagggcctgtcgggaggtgggggaaaagcgaggagagggcattaggacaaatacctaatgcatgtggggcttaaaaactagatgacaggttgataggtgcagcaaaccaccatggcacatgtatacctatgtaacaaacctgg

SEQ ID NO: 880070 - DNA, 434 bp, Homo sapiens
atttgacccagcaatcccattagtgagtatatacccaaaggattataaatcattctactataaagacacatgcacatgtatgtttaatgcagcactatttgcaatagcaaaaacttggatccaacccaaatgcctgtcaatgataggctagataaagaaaatgtggcatgtatacaccatggaaactatgcagccataaaaaagaatgagttcctgtcctttgcagggacrtggatgaagctggcagccatcatcctcagcaaactaacacaggagcagaaaaccagacaccacctgttctcaatcattgttgagagttgaacaatgagaccacatggacacagggaggggaacatcacacaccagggcctgtcgggaggtgggggaaaagcgaggagagggcattaggacaaatacctaatgcatgtggggct

SEQ ID NO: 880071 - DNA, 501 bp, Homo sapiens
acccagcaatcccattagtgagtatatacccaaaggattataaatcattctactataaagacacatgcacatgtatgtttaatgcagcactatttgcaatagcaaaaacttggatccaacccaaatgcctgtcaatgataggctagataaagaaaatgtggcatgtatacaccatggaaactatgcagccataaaaaagaatgagttcctgtcctttgcagggacgtggatgaagctggmagccatcatcctcagcaaactaacacaggagcagaaaaccagacaccacctgttctcaatcattgttgagagttgaacaatgagaccacatggacacagggaggggaacatcacacaccagggcctgtcgggaggtgggggaaaagcgaggagagggcattaggacaaatacctaatgcatgtggggcttaaaaactagatgacaggttgataggtgcagcaaaccaccatggcacatgtatacctatgtaacaaacctgg

SEQ ID NO: 880072 - DNA, 646 bp, Homo sapiens
actaagacttgcactaacaatttaaagcctagtgaacttggtatttttttttttcaagaactccagtgcaagcatccctgtttttaacatcaaggatatggctgctggcagcttctctgaaggggtacaatgaggctggttctgaaagtgctaaaataagttggaggctggaccaaacctcttcccctgggtggtgttaataacaagacacaggaaagaagtgtcttgctctcctctgcctccagtctccctttattacttcctactggcaaaacytaagagaacactgctgaaaaagttgtcttggaaatctaggaggatggctcttaggtcataatatagaatagtgagcttggaacaaagaaccatcaggcaaacatttggaacagaatatgccataaaagtgtgtatccttcattcataagatttagtatctaatgtcagtatctcctaccttggtctctacgttccaataagacaagaacacctgactggctttgtttatttttctattacctaatacactgcctggtttagagtatgcaattcagtaatacttgtagaatgaatagagataatcttaaatttaataaaggattaatgtttaaatatccttaggatttctgccaatagccttccacaaaga

SEQ ID NO: 880073 - DNA, 646 bp, Homo sapiens
actaagacttgcactaacaatttaaagcctagtgaacttggtatttttttttttcaagaactccagtgcaagcatccctgtttttaacatcaaggatatggctgctggcagcttctctgaaggggtacaatgaggctggttctgaaagtgctaaaataagttggaggctggaccaaacctcttcccctgggtggtgttaataacaagacacaggaaagaagtgtcttgctctcctctgcctccagtctccctttattacttcctactggcaaaacctaagagaacactgctgaaaaagttgtcttggaaatctaggaggatggctcttaggtcataatatagaayagtgagcttggaacaaagaaccatcaggcaaacatttggaacagaatatgccataaaagtgtgtatccttcattcataagatttagtatctaatgtcagtatctcctaccttggtctctacgttccaataagacaagaacacctgactggctttgtttatttttctattacctaatacactgcctggtttagagtatgcaattcagtaatacttgtagaatgaatagagataatcttaaatttaataaaggattaatgtttaaatatccttaggatttctgccaatagccttccacaaaga

SEQ ID NO: 880074 - DNA, 618 bp, Homo sapiens
ctgggagacagtttgttgtgatttcttttcttttacatttgtggaggagtgctttacttccaattatgtggtcaattttagaataagtgtgatatggtgctgagaagcatatatattctgttgatttggggtggagagttctgtagatgtttattaggtctgcttggtgcagagctgagttcaagtcctggatatccttgttaaycttctgtcttgttctgtctaatattgacagtggggtgttaaagtctttcattattattgtgtgggagtctaagtctgtttgtaggtctctaaggacttgctttatgaatctgggtgctcctgtattgggtgcatatatatttaggatagttagctcttcttgttgaattgatccctttaccattaggtaatggccttctttgtctcttttgatctttgttagtttaaagtctgtttcatcagagactaggattacaattcctgctttttttggctttccatttgcttggtagatcttccttgatccctttattttgagcctatgtgcgtctctgcacgtgagatgagtctcctcatctcactaatgggtcttggctttttatccaatttgccagtccatgtcttttaattgga

SEQ ID NO: 880075 - DNA, 618 bp, Homo sapiens
ctgggagacagtttgttgtgatttcttttcttttacatttgtggaggagtgctttacttccaattatgtggtcaattttagaataagtgtgatatggtgctgagaagcatatatattctgttgatttggggtggagagttctgtagatgtttattaggtctgcttggtgcagagctgagttcaagtcctggatatccttgttaatcttctgtcttgttctgtctaatattgacagtggggtgttaaagtctttcattattattgkgtgggagtctaagtctgtttgtaggtctctaaggacttgctttatgaatctgggtgctcctgtattgggtgcatatatatttaggatagttagctcttcttgttgaattgatccctttaccattaggtaatggccttctttgtctcttttgatctttgttagtttaaagtctgtttcatcagagactaggattacaattcctgctttttttggctttccatttgcttggtagatcttccttgatccctttattttgagcctatgtgcgtctctgcacgtgagatgagtctcctcatctcactaatgggtcttggctttttatccaatttgccagtccatgtcttttaattgga

SEQ ID NO: 880076 - DNA, 528 bp, Homo sapiens
ctctaaaattgaccacatcattggaagtaaaacactccccagcaaatgcaaaagaacagaaatcgtaacaaacagtctctcagaccacagtgtaatcaaattagaacccaggattaacaaactcactcaaaaccgcacaactacatggaaactgaacaaccttctcctgagtgcctactgggtatataatgatattaaggcagaaataaagatgttatttgaaaccaatgggractaaaacacatgtaccagaatctctgggacacatttaaagcagtgtttagaggaaaatttatagcactaaatgcccacaaaagaaagcaggaaagatctaaaattgacactgtaacatcaaaatcagaatggctattattaaaaagtccaaaagttccagatgcttgcaaggttgtggaaaaaaaaaatgaacacttttacactgtcagtgggagtaaaaattagttcaaccattgtggaagacagtgtggcaattactcaaagacctaaatatggacataccattcgacccag

SEQ ID NO: 880077 - DNA, 672 bp, Homo sapiens
gggctccttattacttatgcaaatttctgcagctagcttgaatttctcctcagaaaatgggattttctatcacattttcaggttgcaaatttttcaaacttttgtgctctgtttcccttttaaaactgaaggctttttaacagcactcaagtcacctcttgaatgctttgctgtttagaaatttcttctgcaagataccctaaaatatctttcccaagttcaaagttccataaatctctagggcaggggcaaaatgctgcagtctctttgctaaaacatatcaagagtcacttttactccagttcccaacaagttcatcagcaacatctgagaccacctcagtctggaccttattgtccatatcactagcagcattttgggcaaagccattcaacaagtatctaggaagttctaaactttcccacattttcctgtcttctcctgagccctccaaaatgttccaacctctgcctgttatccagtttcaaagttrctttcacatttttgggtatcttctcagcaaccccactctactggtaccaatttactgtattagcctgttttcaaggcgctgataaaggcctacctgagactgtgcaatttacaaaagaaaaaggtttaattgggcttacagtttcatgttgctggggaagcctcacaatcatggcagaa

SEQ ID NO: 880078 - DNA, 640 bp, Homo sapiens
gcaacctttcaataagacaagtcttctttaatttcaaatggaacagcctgtgttccatatttcttagcctggctgacatagaggtcacagatttactgtgggacaaggtagaatcacttacatattatcctaaatttagatttggcctagattttttgctgaaatgatgagaggcatggcaataaaatgaaactttgctgcttttatcattttctgctttcmgagttaaaaaaaaatcataaaataaattgtgcttaaagaaaccactgaattcatcaaactctgactccttaaaatgattaagtcattttgtctcccaaccagtcctgaactgccttcttagtgacctgtggcatgtcctgaatagcctttctgagcaggcaggtaggatatatatgaatatgacaataaacagctgtagtagtgttcagtttcagtcttcaatctttgacatcctttttaaatgctccccaatgacttccccaagtgttcactctagtcactattgtcctagaagagtactgagccaatttagtgtatatttattgatcactataaaaggcaatgtactgtgttgctggaggtgcacccaacttctaaaaaatttacagttgaagaggcaagacataattccatgaaa

SEQ ID NO: 880079 - DNA, 512 bp, Homo sapiens
tgtcccccaaagtcttaactcatttcaacattaactcaaaagtccacagtccagtctcatttgagaaagggaagtcccttccacctatgagcctgtaaaatcaaaagcaagttagttacttcctagatacaatgggggtacaggcattyggtaaatacagccataccaaatgggagaaatttgccaaaacaaagggtctatcggccccatgcaagtttgaaatccagcagggcagtcaaatcttaaagttccaagataatctcctttgactccatgtctcacacttaggtcacgttgatgcaagagatgggttcccatggtcttgggcagctctgcccctttggctttgcaagatacagccctgctcctggctgctttcacaggctggagttgagtgtctgcggcttttccaggcgcacactacaagctgtcagtggatctaccattctggggtctgaaggatggggtcacagctctactaggctgtacaccattggggactctctgtgtac

SEQ ID NO: 880080 - DNA, 597 bp, Homo sapiens
ctgtattggttattctagttatacattcatctaaatttttttcaaagtttttaacttctttgcctttggtttgagttccgtcctgtagcttgtagtttgatcgtctgaagccttcttctctcagctcttcaaagtcattctctgtccaactttgttccattgctggtgaggaactgtgttcctttggaggaggagaggcrctctgctttttagagtttcctgttttctgctctgttttttccccatctttgtggttttatctacttttggtctttgatgatggtgatgtacagatgggtttttggtgtggatttcctttctgtttgttagttttccttctaacagacaggaccctcagctgcaggtctgttggagtttgctagaggtccactccagaccctgtttgcctgggtatcagcagcggtgttttcagaacagcggtttttcatgaaccgtaaatgctgctgtctgatcgttcctctggaagttttgtctcagaggagtacccggccgtgtgaagtgtcagtctgcccctgctcggtggtgcctcccagttaggctgcccggaggtcaggtgtcagggacccacttgaggag

SEQ ID NO: 880081 - DNA, 597 bp, Homo sapiens
aaataccacatttaacatgagtccatgaattttttaatacatatttgaatcaatttgcttatataaacagagaccacataaaaatattttcctggggtgccgtgtgccctagaggctactctgagaaaatggttactctaaacctgtcctgacaaagctttacaatgagccttaaaataattaattttatcttcaagtaacttaacggctgagaaaaaaaagaaaataagaaaataaagtccaacaatctttargaatgacaaaaactggtacttaatataaaatttatagtactcagaatccaataaaaaaacttacatatagtatacagaaatagacccagaaatgaaatgaaagagatgatggaattaacagacaagaactttaaaatctttgttataaatacatgaatttgaaaaatatggatataataaaaagaaaaacaaaaataaaaatttaacaaaacagaaattttagagattagaaatttcattatctgaaatgaatattttgctacaaggtgttaccatcagatttgctactgaagaaaaagatcagtgaacttgaagatgtagcaatagaaactacccaaaatga

SEQ ID NO: 880082 - DNA, 608 bp, Homo sapiens
aatttcaagtgagtgtttgtatatgtgtgcatgtgtgtggtgcataaataatagcaggaacaacaaaaagaaacctagaaacatttaaaatttccaacaacagaagtaaggatgaataaactatgatgtgtttatacaatgaaacaygtaaaggagtgaaaactgaacaaattactgccacacatatcaacaaaagcaaatttcaagatcacaagattgagtaaagaaatgtcattgaaatatatagagagtataatttcgtttatagcaatataaaaaagaaaatgaaatcatagatggttctcagtatatatatgtgtgtgtgggtgtatatacatacatatggtaaaatagtttaaagggatggagaaactttcacaatatttagaataatgataacctgtggcaaggaggcagatacagccagggaaggattaatgagcactcttgaagtctctgattattttgtatttattttccatgtgggaacatatgcatgccccatttattcttcttcaaattggaccaaaatatcattgtataatcttctctattttatttcttaaaatgtttgttataaatatatgtctattctatgaaaatcttct

SEQ ID NO: 880083 - DNA, 608 bp, Homo sapiens
aatttcaagtgagtgtttgtatatgtgtgcatgtgtgtggtgcataaataatagcaggaacaacaaaaagaaacctagaaacatttaaaatttccaacaacagaagtaaggatgaataaactatgatgtgtttatacaatgaaacacgtaaaggagtgaaaactgaacaaattactgccacacatatcaacaaaagcaaatttcaagatcacaagrttgagtaaagaaatgtcattgaaatatatagagagtataatttcgtttatagcaatataaaaaagaaaatgaaatcatagatggttctcagtatatatatgtgtgtgtgggtgtatatacatacatatggtaaaatagtttaaagggatggagaaactttcacaatatttagaataatgataacctgtggcaaggaggcagatacagccagggaaggattaatgagcactcttgaagtctctgattattttgtatttattttccatgtgggaacatatgcatgccccatttattcttcttcaaattggaccaaaatatcattgtataatcttctctattttatttcttaaaatgtttgttataaatatatgtctattctatgaaaatcttct

SEQ ID NO: 880084 - DNA, 620 bp, Homo sapiens
caaatgacaggtaataaaaggtaaattcattattcctttaaaacaaaagcaagatttgtggaacttttcttcccttcttcactatttcttttttttccccctgtgtttctctgtttcatctctgttcttaaattacacttcaaaaaaacagaattgtaaacctctgggtacatgaagtatataacctttgagctgagttcattcccttgcctctgggccattgctcatttgaccatcacctgtattttcactacactacatggtcatttaaagttctgggcttgttttaatttgtttgtttaaaagttgttctagggtttaattttgcaagtattcaagcctgaaccttstcttttaccctacttatttaacatatttttgtcagaccaaaattatactgatttttcccagtatttcctgattaaaaagcaaagtgaagagtaaaacccaaacatttttcctagaaatctagggggcaattaaaagaaatcactagggcattgtataacatcatgaacacatactcctttggatatccgttgcttactttttgaacaagttttttcctgtatactggcatgcgggaggcaaataatatcatccataatagattgagcagt

SEQ ID NO: 880085 - DNA, 614 bp, Homo sapiens
aaaagcatgtctcattgtgattttaatttgcatttccctgatgattggtgatgttgaacattttttcatacatctattggccatttgtatgtcttcttttgaggaagttctattcatgttatttgccggctttttctttctttttttttttttttgtgagagggagtctcattctgttgcccaggttgaagtgcagtggcgctatctcagctcactgcaacctccacctcccggattccagagattctcctgcctcagcctcttgagtagctgggactataggcgcatgccaccatgcccagctaattttgtattttttagtagagayggggtttcaccatattggccaggttgatctcaaactcctgacattgtgatccctcagcctaagccttccaaagtactgggattacaggcgtgagccaccagcccagccatttgcccactttttcatgagattattattattttttgttattggatattaatccattgtcagatgaatattgtgcagatgtgttcatccattcagctggtgtctcttctttctgtttttttttttcctttttgctaagagattttttttaaggtttatttagtcgcatttgtctatt

SEQ ID NO: 880086 - DNA, 465 bp, Homo sapiens
gggagtataattttagatagtgaagatttctgtattcaaatgccacatggaaaaagtactaaggggaatgaggagatgagtcatatggaatgccgaagagacagaagaaggcaggcagagaaaataacaaggattaaagacactgragtaaaatcatgctttctatatttcaaaacaacagcaaggacactagtgtgacagagcaggagtgaccaatgggaggctggagattttgtcagagatattgtcaaggctcaggatcgtacagggacttgtaagcctggaaaggactttgaattttattcagaatgagatgagaagccattgaaaagtttttaagcagatgagcaaaataatccaccttgtattttaagaggagcattctaccttctctgtggaatagagaggtggaagggcaaagcttgaagcagagagagcagtgaacagtgtactgtaatattctta

SEQ ID NO: 880087 - DNA, 613 bp, Homo sapiens
accgccacacctggaatagaaaacagttttcaatagcaaacagtagcagtatgcttgggggttttaggattgattattttcaaatctctagaaaagttcaatgcattaccttaggctataatcccagggcagagtctcatctgttaatrgggggctggtctaagggtccttccagctctcagattaatggtttcccatgttgaactgctcccttccacccatccatccttggttttgtttgtttgtttgtttttacaggacaagatcgcactatattgcccaggctggtcttgaactcctggccttaagtgatcctcctgccttggcctcccaaagtgctggagttacagatgtgagcctctgtgctcagcccatccttggctgttcaattgtggaggtaagtagtagatgctaagtttacctccaggtcagaagggacagatgccccagggcagaatcataaccataaccaggcctcccaatgcatgaagacattatgttctgaagcttaaacctggacaaagttctgaccagtagcagtgtgttcatgaatatcgggtcaaaaatttaaaactgggactatacagaagaacctggtagatgcaggtgcagt

SEQ ID NO: 880088 - DNA, 613 bp, Homo sapiens
accgccacacctggaatagaaaacagttttcaatagcaaacagtagcagtatgcttgggggttttaggattgattattttcaaatctctagaaaagttcaatgcattaccttaggctataatcccagggcagagtctcatctgttaatagggggctggtctaagggtccttccasctctcagattaatggtttcccatgttgaactgctcccttccacccatccatccttggttttgtttgtttgtttgtttttacaggacaagatcgcactatattgcccaggctggtcttgaactcctggccttaagtgatcctcctgccttggcctcccaaagtgctggagttacagatgtgagcctctgtgctcagcccatccttggctgttcaattgtggaggtaagtagtagatgctaagtttacctccaggtcagaagggacagatgccccagggcagaatcataaccataaccaggcctcccaatgcatgaagacattatgttctgaagcttaaacctggacaaagttctgaccagtagcagtgtgttcatgaatatcgggtcaaaaatttaaaactgggactatacagaagaacctggtagatgcaggtgcagt

SEQ ID NO: 880089 - DNA, 594 bp, Homo sapiens
gtacaatattatgaactctgggtgttcaataagcagttgacaatgacgaatgagaatcaatccatgaaatacttggtggtatcttcaagggccaaatattactctttgataatgctgaaaccttaactcaaattcaaggataaccagctttactagatttttacagtccatgttaagaactacagattatttcccaagacaattatgtggtagccaaaaaagctcccaygtaagcttaatgtaacgggactcaatgtaactactgtgtaagttatgaactggcagaaaagataacaagcaaatcttcagattactactttaaaagtgagatgagaaaacaaaagtgaatgtttctggtgtttctgaaggttggggaaaaaatagatattgaaatttgccccatctttccatactagacacacctatttatcaccacaactttggccaggacaagagaaaggagtatcagaaaaaaaagaagatagagagaggaaaaaaagagaataagcatgaagaaggcagatggcagggcagggtaagaaggtttttaatcttaaagagcagaagccacagtttgtgtctaaaacagtgcca

SEQ ID NO: 880090 - DNA, 596 bp, Homo sapiens
gtatacacatgccgtggcggtttgctgcacccatcaacccgtcatctacattaagtatttctcctaatgctatccctcccctagccccccacccccccgacaggtcccagtgagtgttgttcccctccctgtgtccatgtgttctcattgttcaactcccacttacgagtgagaacatgtggtgtttggtttctgttcctgtgttagtttgctgagaatgatggtttccagcttcatccatgtccctgcaaaggacataaactcatctttttttatggctgcatagtattccatggtgtgtaggtgccacattttctttatccagtctatcattggtgggcatttgggttcrttccaagtctttgcaattgtgaatagtgctacaataaacatacatgtgcatgcgtctttatagtagaatgatttataatcctttgggtatatatccagtaatgggattgctgcatcaaatgatatttctggttctagaaccttgaggaatcgccacactgtcttccacaatggttgaactaatttacactcccaccaacagtgtaaaggcgttcctatttttccacatcctctccagcatctgt

SEQ ID NO: 880091 - DNA, 620 bp, Homo sapiens
gtctttgaggaatcaccacacagtcttccacaatggttgaactaatttacaccccccaagaagagtgtaaaagtgttcttttttctccacaacctcaccaggatctgttgtttttctgactttttaataatagccattctgactggtatgagatggtatctcatgtggtttttatttgcatttctctaatgatcagtgatgctgagtttttttttttcatatatttgttggccacatgtatgtcttcttttgagaagtgtctgttcatgtcttttgctcactttttratggagtttgctttttttctttaaatttgtttaagttctttgtagatgtgggatattagacctttgtcagatgggtagattgcaaaaattttatcccattttgtaggctgtttactctgatgatagtttcttttgctgtgcagaagctctctaatttaattagattccatttgtcaatttttgcttttgttgcaattgcttttggcatcttcatcataaattctttgcctgtgcctatgtcccgaatgatattgcctatattttcttctgggttttttatagtttggggttttacatttaagtctttattccgtttgagttgatttttgtgta

SEQ ID NO: 880092 - DNA, 633 bp, Homo sapiens
aggataagtgtctcaggttttttgaaatttggattagaaaacttggccatctaccaggggttttccttaagactgaaccttagtgcctcagggataacctggctagttaaagcaccttttattaattttgtttcctctcctatcttacttcccacttctttactgatttttcgtgcagttaatttgcaatcaaatccttttcttttcttttttcttttttttttttttaagatgaagtctcactctgtcgccaggctggagtgtagtagcacgatttcggctygctgcaacctccaactccctggtttaagtgattctcctgtctcagcctccctagtagctgggattacaggcatgcaccgccatgcccagctaatttttgcatttttagtagagacggggtttcaccatgttggccaggatagtctcaatctcctgacctcgtgatccacccgcctcagcctcccagagtgctgggttacaggcgtgagccaccacacccggcccaaatccttttcttgaagtatgcctctagggaactcagctaaagagtgttggtgaaggatgagattctggagttagatcacttgctgtgcaaatgtcaacaaggccctccttgctgttagtaactgg

SEQ ID NO: 880093 - DNA, 615 bp, Homo sapiens
tatatacccagtgatagagttgctgggatgaatggtatttctgtctataggtctttgaggaatcaccacactgtcttccacaatggttgaactaatttacactcccaccaacagtgtataagcattcctttttctycacaaccttgtcagcatctgttattttttgactttttagtaatatgcattctgactggtgtgagatattatttcattgcggttttgatttgaatttgactaatgatcagtgatgttgagattttttttatatgattttctccctctcacttttgggtatttaatttgtgaaactaagatgcctggaaatttatgtcaggcgttatgtcatatgaggttacaaacttgaggataaaaacaatatactgaggagagcagagtaaaaagatgaagaaactagagtttttccagaaatcagtgacccaatcctgtaactttgttgcttctagacttcttgttacatgagataataataatagtaatgatgataatgataataacagcaataatttcccttcccgttaagcacttgtcgattagagattttgtgtttcaatattagaaacaagtgttccgatgctggggaaatgtgacaatatg

SEQ ID NO: 880094 - DNA, 642 bp, Homo sapiens
tttatcagcttaaggagattttgggctgagacaatggggttttctagatatacaatcatgtcatctgcaaacgagcacaatttgacttcctcttttcctaattgaataccctttatttccttctcctgcctaatggccctggccagaacttccaacactatgttgaataggagttgtgagagaaggcatccctgtcttctgtcagttttcaaagagaatactgccaacttttgcccattcagtatgacactggctgtggttttgtcatagatagctcttattattttgagatacgtcccatcaatacytaatttattgacagcttttagcatgagtgtcgttgaattttgtcaaaggccttttctgcgtctattgagataatcatgtggtttttgtctttggttctgtttatatgctggattacatttaccgatttgcatatgtttaaccagtcttgcatcccagggatgaagcccacttgatcatggtggataagctttttgatgtgctgctggatttggtttgccagtattttattgaggatttttgcatcaatgttcatcaaggatattggtctaaaaatctgtttttttgttgtgtctctgcccggctttagtatcaggatgatgctggcctcataaa

SEQ ID NO: 880095 - DNA, 642 bp, Homo sapiens
tttatcagcttaaggagattttgggctgagacaatggggttttctagatatacaatcatgtcatctgcaaacgagcacaatttgacttcctcttttcctaattgaataccctttatttccttctcctgcctaatggccctggccagaacttccaacactatgttgaataggagttgtgagagaaggcatccctgtcttctgtcagttttcaaagagaatactgccaacttttgcccattcagtatgacactggctgtggttttgtcatagatagctcttattattttgagatacgtcccatcaatacctaatttattgacagcttttagcatgartgtcgttgaattttgtcaaaggccttttctgcgtctattgagataatcatgtggtttttgtctttggttctgtttatatgctggattacatttaccgatttgcatatgtttaaccagtcttgcatcccagggatgaagcccacttgatcatggtggataagctttttgatgtgctgctggatttggtttgccagtattttattgaggatttttgcatcaatgttcatcaaggatattggtctaaaaatctgtttttttgttgtgtctctgcccggctttagtatcaggatgatgctggcctcataaa

SEQ ID NO: 880096 - DNA, 643 bp, Homo sapiens
atttgcatatgtttaaccagtcttgcatcccagggatgaagcccacttgatcatggtggataagctttttgatgtgctgctggatttggtttgccagtattttattgaggatttttgcatcaatgttcatcaaggatattggtctaaaaatctstttttttgttgtgtctctgcccggctttagtatcaggatgatgctggcctcataaaatgagatagggtggattccctatttttctattgattggaatagtttcagaaggaatggtactagctcctccttgtacctctggtagaattcggctgtgaatccatctggtcctaggctttattgattggtaagctattgattattgccccaatttcagagcctgttattggcctattcagagattcaacttcttcctggtttagtcttgggagggtgcatgtattgaggaatttatccatttcttctagattttcttgtttatttgcaaagaggtttttatagtattcactgatggtagtttgaatttctgtgggattggtgatgatatctcctttatcattttttattgcatctatttgattcttctctcttttcttctttattagtcttgctagcagtctatcaattttgttgatcttttcaaaaacccag

SEQ ID NO: 880097 - DNA, 597 bp, Homo sapiens
ccatatttcttggaggtttgttcatttctttttattcctttttctctaaacttctcttcctgcttcatttcattcatttcatcttccatcactgatatcctttcttccagttgatctaataggctactgagacttgggcattcatcacgtagtttttgtaccatggttttcagctccatctggtcctttaaggacttatctgcattggttattctacttagccattcatctaatttttttttcaaggtttttaacttctttgccatgggttcaractttctcctttagcttggtgcagtttgatcgtctgaagccttctctcagttcatcaaagtcattctccgtccagctatgttccattgctggtgaggagctgctttcctttggaggaggagaggagctctgatttttagagtttccagtttttctgctctgttatttccccatctttgtagttttatctccttttggtctttgaagatggtgacgtacagatgggtttttggtgtggatgtcctttctgttggttagttttccttctaacagtcaggaccctcagctgctgatctgttggagtttgctggaggtccactcctg

SEQ ID NO: 880098 - DNA, 597 bp, Homo sapiens
ccatatttcttggaggtttgttcatttctttttattcctttttctctaaacttctcttcctgcttcatttcattcatttcatcttccatcactgatatcctttcttccagttgatctaataggctactgagacttgggcattcatcacgtagtttttgtaccatggttttcagctccatctggtcctttaaggacttatctgcattggttattctacttagccattcatctaatttttttttcaaggtttttaacttctttgccatgggttcagactttctcctttagcttggtgcagtttgatmgtctgaagccttctctcagttcatcaaagtcattctccgtccagctatgttccattgctggtgaggagctgctttcctttggaggaggagaggagctctgatttttagagtttccagtttttctgctctgttatttccccatctttgtagttttatctccttttggtctttgaagatggtgacgtacagatgggtttttggtgtggatgtcctttctgttggttagttttccttctaacagtcaggaccctcagctgctgatctgttggagtttgctggaggtccactcctg

SEQ ID NO: 880099 - DNA, 597 bp, Homo sapiens
ccatatttcttggaggtttgttcatttctttttattcctttttctctaaacttctcttcctgcttcatttcattcatttcatcttccatcactgatatcctttcttccagttgatctaataggctactgagacttgggcattcatcacgtagtttttgtaccatggttttcagctccatctggtcctttaaggacttatctgcattggttattctacttagccattcatctaatttttttttcaaggtttttaacttctttgccatgggttcagactttctcctttagcttggtgcagtttgatcgtctgaagccttctctcagttcatcaaagtcattctccgtccagctwtgttccattgctggtgaggagctgctttcctttggaggaggagaggagctctgatttttagagtttccagtttttctgctctgttatttccccatctttgtagttttatctccttttggtctttgaagatggtgacgtacagatgggtttttggtgtggatgtcctttctgttggttagttttccttctaacagtcaggaccctcagctgctgatctgttggagtttgctggaggtccactcctg

SEQ ID NO: 880100 - DNA, 546 bp, Homo sapiens
cagtctttttgtagtatctgtagagggatatttgcgagcggtttgaggcctatggtgaaaaaggaaatatcttcacataaaaactagagagaagctttctgagaaacttctttgtgatgtgtgaattcatctcacagtgttgaacccttctttggattgagcagtttggaaacaatccttttgtagaatctgcaaaggtatatttctgagcccattgaggcctatggtgaaatatgaaatatcttcccataaaaactagacagaaagtttctaagaaacttctttgtgatgtgtgcttccatctcacagagttgaacctttcttttgattgggaagtttggaaacastctttttgtagaatctgcaaatggatgtttggagcactttgaggcctatggtaaaaaaggaaatatcacataaatattagaaggaagcattctgagaaacttctttgtgatgtttgcatccatctcacacagttgaacatttgtttgattgaagatttggacacagtctttttgtaaaatctacaaagggataattgtg

SEQ ID NO: 880101 - DNA, 622 bp, Homo sapiens
cagaagcattctgagaaacttctattttatgtgtgcattcacctcacagagttgaaactttcttttcattgagcagtttggaaagagtctttttgtagaattttcaaagggatatttgtgattcctttgaggcctgtggtgaaataggaaatatcctcaaataaaaagacagaagctttccaagaaacttctttttgatgtgtgctttcatctcacagagttgagccyttcttttgattgagaagtttggaaacagtctttttgtggaatctgcaaatggatgtttggagtgctttgaggcctatggtgaaaaagtaaatatcttcacataaaaactagatggaagcattctgagaaacttctttgtgatgtgtgcattcatctcatgttgttgagcctatcttttgatatagcagattggaaacagtacttttgttgtatctgcagagggatatttgtgagcagtttgaggcctatggtgaaaaagtaaataccttcacataaaaactagacagaagcattctgggaaacttctctgtgatgtgcgtattcaactcacagaggtgaacctttctttagattgagaagcttggaaacagtccttttttagaatctgcaaagg

SEQ ID NO: 880102 - DNA, 790 bp, Homo sapiens
gaagcattccgagaaacttagtttttttgtgtgcattcatctgacagagatgaatctttcttttctttgagcagtctataaacagtctttttatacaatgtgcaaagggatatttctgagcggtttgaggcctatggtgaaaaagtaatatcttcacataaaaactagacagaagcattctgagaaacttctattttatgtgtgcattcacctcacagagttgaaactttcttttcattgagcagtttggaaagagtctttttgtagaattttcaaagggatatttgtgattcctttgaggcctgtggtgaaataggaaatatcctcaaataaaaagacagaagctttccaagaaacttctttttgatgtgtgctttcatctcacagagttgagcccttcttttgattgagaagtttggaaacagtctttttgtggaatctgcaaatggatgtttggagtgctttgaggcctatggtgaaaaagtaaatatcttcacataaaaactagatggaagcattctgagaaacttctttgtgatgtgtgcattcatctcatgttgttgagcctatcttttgatatagcagattggaaacagtacttttgttgtatctgcagagggatatttgtgagcrgtttgaggcctatggtgaaaaagtaaataccttcacataaaaactagacagaagcattctgggaaacttctctgtgatgtgcgtattcaactcacagaggtgaacctttctttagattgagaagcttggaaacagtccttttttagaatctgcaaag

SEQ ID NO: 880103 - DNA, 541 bp, Homo sapiens
ttctactgtgtctatgtagaaagaagtagacataagagactccattttgttctgtactaagaaaaattcttctgccttgagatgctgttaatctgtaaccctagccccaaccctgtgctcacagaaacatgtgctgtgtcgactcaaggtttaatggatttagggatatgcaggatgtgctttgttaaacaaatgcttgaaggcatcatgcttgttaaaagtcatcaccactccctactctcaaggacccagcgacacaaaacactgctgaaggccacagggacctctgcttargaaagtcaagtattgtccaaggtatctccccatgtgatagtctgaaatatggcctcatgggaggggaaggacctgaccatccaccagtccgacacctgtaaacggtctgtgctgaggaggattagtaaaagaggaaggcctctttgcagttgagataagacaaagccatctgtctcctgctcgtccctgggcaatggaatgtctccttgtaaaacccgattgtatattccacctactgagataggag

SEQ ID NO: 880104 - DNA, 660 bp, Homo sapiens
tcctacacatggctcacagtgtcttacatccatggagtctccctgattgctagcacagcagtctgagatcaaactgcaaggtggcagtgaggctgggggaggggtgcccaccattgcccaggcttgcttaggtaaacaaagcagccgggaagctcgaactgggtggagcccaccacagctcaaggagacctgcctgcctctgtaggctccacctctggcgacagggcacagacaaacaaaaagacagcagtaacctctgcagacttaaatgtccctgtctgacagctttgaagagagcagtggttctcccagcacacagctagagatctgagaacgggcagactgcctcctcaagtgggtccctgacccctgacccccgagcagcctaactgggaggcatccctcagcaggagcagactgacacttcamagggccaggtagtccaacagacctgcagctgagggtcctgtctgttagaaggaaaactaacaaacagaaaggacatccacaccaaaaacccatccgtacatcaccatcatcaaagaccaaaagtaaataaaaccacaaagatggggaaaaaacagagcagaaaaaccggaaactctaaaaagcagagtgcctctcctcctccaaaggaacacagttcatcaccagcaacgg

SEQ ID NO: 880105 - DNA, 563 bp, Homo sapiens
aatatcttcacatgaaaacgacacagaagcaatctgagaaacttccttatgatgtgtgcattcatctgacagatttgaacattttttttgattaagcagtttggaaacactctttttgtaggatctgcaagtagatatttggagagatttgaggtctgtgtaggaaaaggacatatattcatataacaactacacagaagcattctgagaaatatctctgtgatgtgcgcattcatctcacagagttaaacctttcttctgatggagcagtttggaaacactctatttgtagaatctgcaagtggatatttggagcactttraggcctatgggtggaataggaaatatcttcacataaaaactacacagaatcatcctgagaaacttctttgtgatatgtgcattcatctcacagaggtgaaactctcttttgattgaacagtttggaaacaatctttttatactgtcgtcaagtggatattttgagctgtttgaggcctatggtggaaaaggaaatatcttcacctaaatactacacagaagcattcggagaaacttctttg

SEQ ID NO: 880106 - DNA, 646 bp, Homo sapiens
tttatactgtcgtcaagtggatattttgagctgtttgaggcctatggtggaaaaggaaatatcttcacctaaatactacacagaagcattcggagaaacttctttgtgatgtctgcattcagctcacagagttgaacctttcttttgattgagcagttttgaaaccctctttttataggatctgcaagtggatattggaagctatttgagacctattgtggaaaaggaaatatcttcacataaaaactacacagaagcattttcagaaacttttttgtgatgtgtgctttcatctcacagagttgaamctttcttttcattgagcggtttggaaacaccatttttgtagaatctgcaagtgcatattttgagtgctttgtgatctatggtggaaaaggaaatatcttcacataaaaactacacagaagcattctgagaaaattctttgtgatgtgcggatttatctcacagagttgaacctttcttttgattgagcagtttcgaaacactttctttttagaatctgcaagtggatatttggagtgctttgaggcctatggtggcaaaggaaatatctttacatagaaactacacagaagcattcagagaaacttctttgtgaagtgcgtattcaacgcactgagtt

SEQ ID NO: 880107 - DNA, 646 bp, Homo sapiens
tttatactgtcgtcaagtggatattttgagctgtttgaggcctatggtggaaaaggaaatatcttcacctaaatactacacagaagcattcggagaaacttctttgtgatgtctgcattcagctcacagagttgaacctttcttttgattgagcagttttgaaaccctctttttataggatctgcaagtggatattggaagctatttgagacctattgtggaaaaggaaatatcttcacataaaaactacacagaagcattttcagaaacttttttgtgatgtgtgctttcatctcacagagttgaaactttcttttcattgagcggtttggaaacaccatttttgtagaatctgcaagtgsatattttgagtgctttgtgatctatggtggaaaaggaaatatcttcacataaaaactacacagaagcattctgagaaaattctttgtgatgtgcggatttatctcacagagttgaacctttcttttgattgagcagtttcgaaacactttctttttagaatctgcaagtggatatttggagtgctttgaggcctatggtggcaaaggaaatatctttacatagaaactacacagaagcattcagagaaacttctttgtgaagtgcgtattcaacgcactgagtt

SEQ ID NO: 880108 - DNA, 551 bp, Homo sapiens
tttgtacaatctgcaattggatatttgaagcgatttgaggcctattgtggaaaaggaaatatcttcaaataaaaactacacagaagcattctgagaagcttctttgtgatgtgtgcattcaactcacagagttgaacctatattttgattgagcagttttgaatctctctttttgtagaatctgcaagtggatatttggagccctttctggcctatggtggaaaaggaaatatcttcaaatgaaaactacagaaaagcattttgaggaacttctttgtcatgtgtgcattcatctcacatggttgaacctatattatgattgagcagttttgaaaaactctttttgtttaayttgcaagtggacacatagagccctttgaggtctactgtggaaaagcagatatttccacctaaaaactatacagaagcattctgaaaaacttctttgtgatgtgtgcattcacctcacagagttgaacctttcttttgattgagcagttttgaaacactctttttgtaggatctgcaagaggatatttggagcgatttca

SEQ ID NO: 880109 - DNA, 661 bp, Homo sapiens
ttaatagagatttctacctcacatccctacaaatcaaataacaaaggaaataaaatatgaaaagcagatttccaatttttagaagaaaacagaggacatattttatgacactaagcagagagaaaaattttatatgacacaaaacacagacaccgtaaaataaattactgataaattcattcagttgtattaaatgtagaagctttgatctgacaaaagaggcgatgaataaagttaaaagacaaagacagtgcatgatatgatttggctgtgtgtccccacctaaatctcatcttgaattgtcttcccataattctcctgtgtcctgggagggacctagtgggagataattggaatcatgggrgccgttcccccatactgttctcctggtagtgaataagtctcacgagatctgacggttttatcagggggttccacttttgcatcatcctcatttttctctggccactgccatttaagaagtgcctttcacctcccaccatgattctgaggcctcttccgtcatgtggaactgtaagtccaattaaacctctttttcttcccagtctgggttacgcctttatcggcagtgtgaaaatggactaatacagtgcaccaatagggaaaacatatttgtaaggtatttggccaaaaaagcatt

SEQ ID NO: 880110 - DNA, 661 bp, Homo sapiens
ttaatagagatttctacctcacatccctacaaatcaaataacaaaggaaataaaatatgaaaagcagatttccaatttttagaagaaaacagaggacatattttatgacactaagcagagagaaaaattttatatgacacaaaacacagacaccgtaaaataaattactgataaattcattcagttgtattaaatgtagaagctttgatctgacaaaagaggcgatgaataaagttaaaagacaaagacagtgcatgatatgatttggctgtgtgtccccacctaaatctcatcttgaattgtcttcccataattctcctgtgtcctgggagggacctagtgggagataattggaatcatgggagccgttcccccatactgttctcctggtagtgaataagtctcacgagatctgacggttttatcagggggttccactttygcatcatcctcatttttctctggccactgccatttaagaagtgcctttcacctcccaccatgattctgaggcctcttccgtcatgtggaactgtaagtccaattaaacctctttttcttcccagtctgggttacgcctttatcggcagtgtgaaaatggactaatacagtgcaccaatagggaaaacatatttgtaaggtatttggccaaaaaagcatt

SEQ ID NO: 880111 - DNA, 608 bp, Homo sapiens
tccaagagtgacggtttagaggaccatttcttgttgacacggagatggttgagttcttctacaataaatctatgtgagagacaggttgtgataagttggaagtgttggctgccttcatggtctcaaagttctatgtcaagttcacctcagcactgctgcactcctgttctgctgtcaggttggtaatgcttggccagtagtggttctccacatggtcctcaactgccagtgcttccctgatccactgcctgccagaaatgcaattgtagcagaggaggctggtaaggggacagaagccagagatggtaactggccaccacctccctggggaagagagygatgggctctcaatcctagctcacatgccaagtgccattctcatcccagcacccagtggtgtcccccataatgtgcactgcctggtctgaggtaaatggagagctcagctaaggcctaaagttgaaaaggggctttacagagtccccagtgtgctggatatctcaccagccatggaaagaatctgtgtccttgtggccacagacaggcaatgatgggagcttgcccacatttcagggccttctggagtcttcatttgagagttcagctct

SEQ ID NO: 880112 - DNA, 622 bp, Homo sapiens
ctaaaagaacaaagctggaggcatcacactactcaacttcaaactacactataatgctacagtaaccaaaacagcatggtaatggtacaaaaacaaccaatgaaacagaatagagaactctgaaataagaccatacacatacaaccatctgatctttgacaaacctgacaaacaagcaatggggaaagggttccttatttaataaatcatgttgggaaaactggctagccatatgcagaaactgaaactggacatcttccttatactttatacaaaaaaaataactcaagatggaataaagacttaaacataagacmtaaaaccataaaaaccatagaagaaaacctaggcaataccattcaggacataggcatgggcaaagactttgtgactaaaacacaaaaagcaatggcaacaaatcccaaattgacaaatgagatctaattaaactaaagagcttttgcacagcaaaataaactatcatcagagtgaacagacaacttacagatcgggagaaaatttttgcaatctatctgtctgacaaagggctaatatccagaatctacaaagaacttaaacaaattaacaagaaaaaaacagccccatcaaaaagtaggcaaag

SEQ ID NO: 880113 - DNA, 641 bp, Homo sapiens
ctgattgtagattctacaaaacgactgttttcaaactgcccaatcaaaagaaaggttcaactctgtgagatgaatgcacacatcacaaagaagtttcatagacacctcttattattttgagatacgacctatcaatacataatttattgacagtttttagcaggaagcgttgttgaattttgtcaaaggccttttctgcacctattgagataatcatgtggtttttgtctttggttctgtgtatatgttggattacatttattgatttgcatatattgaaccagccttgcatcycagggatgaagcccacttgatcatggtggataagctttttgatgtgctgctggattcggtttgccagtattttattgaggatttttgcatcaacgaccttcaaggatattggtctaaaattctcttttttggttgtatatctgccaggctttggtatcaggatgatgctggcctcataaaatgagttagggaggattccctctttttctattgattggaatagtttcagaaggaatggtaccagttccttcttgtacctctggtagaattcggctgtgaatccatctgatcctggactctttttggttggtaagctattgattattgctacaattttagagcctgtt

SEQ ID NO: 880114 - DNA, 693 bp, Homo sapiens
acataatttattgacagtttttagcaggaagcgttgttgaattttgtcaaaggccttttctgcacctattgagataatcatgtggtttttgtctttggttctgtgtatatgttggattacatttattgatttgcatatattgaaccagccttgcatctcagggatgaagcccacttgatcatggtggataagctttttgatgtgctgctggattcggtttgccagtattttattgaggatttttgcatcaacgaccttcaaggatattggtctaaaattctcttttttggttgtatatctgccaggctttggtatcaggatgatgctgrcctcataaaatgagttagggaggattccctctttttctattgattggaatagtttcagaaggaatggtaccagttccttcttgtacctctggtagaattcggctgtgaatccatctgatcctggactctttttggttggtaagctattgattattgctacaattttagagcctgttattggtgtattcagagattcaacttcttcctggtttagtcttgggagggtgtatgtgttgaggaatgtatccatttcttctagattttctagtttatttgcatagaggtgtttgtagtattctctcaaggtggtttgaatttctgtgggatcggtggtaatatcccctttatcattttttattgcgtc

SEQ ID NO: 880115 - DNA, 632 bp, Homo sapiens
tctgcgttgcacatgatatgccagctcaaccgcagtggggtagagcaccaagcggattcttagagtccctgagtccaggcctagggtcttcttggtcagcatttctgcacttgccctgggccaaaggtcgagtcccaggcattgcagaatttatcwcaagataattaaagagtccttgggctttaagtgagaaagtgatgatgatttggtggaaaccccccatgggccagtagtgttggcagtcatagaagaggctcttctgcctgaagacaggggaaggaagagtagaaaatactttgtcttattccctaagtgcaaggttagctacaataaaatagaagagcaggtaaattttgaagatcctatgctttaatctgtggctcccaggtagcatctgtggacccactcatggctaggggaacttgccaccctataggcagagacacaatcctggctgactttgctatctattaatcacagagtcctagggctttgaataaacttatatggtagccaagtagtggttgcagtgggccttgcgtgagaccaagttctgtgcctacttcaggtgtgaaccagcacagtctcagtggtggtggccacaggagtgcttatgttacccaaaccccagc

SEQ ID NO: 880116 - DNA, 556 bp, Homo sapiens
aaataaaaactattgatacctacagctacatacgactacagcaaagattaaatgaagcctaaattttagccagataaaggcctgtttgtctctccttctactacatgatacacggtgtctggctttcaaaaaattgtaagaggccaggcgcagtggctcactcctgtaatcccagcacttcrggatgccgaggcgggtggatcacgaagtcaggagtttgagaccagccagggtaacatagtgaaacaccatctctactaaaaacacaataaattacccgggcttggtggcaggtgcctgtaatcccagctgctttggaggctgaggcatgagaatcgctgtaacccaggaggcagaggttgcagtgagtccagatcgtgccactgcactccagcctgggcgacagtgggaaactccatccaaaaaaaaaaaaaaaaattgcaagacatgctaaaaggcaaacacataatctgaagagacaaagcaaacatcaaagccagactcttatgtgatacagattttagaattataagactgtcaattgaaaataattact

SEQ ID NO: 880117 - DNA, 556 bp, Homo sapiens
aaataaaaactattgatacctacagctacatacgactacagcaaagattaaatgaagcctaaattttagccagataaaggcctgtttgtctctccttctactacatgatacacggtgtctggctttcaaaaaattgtaagaggccaggcgcagtggctcactcctgtaatcccagcacttcaggatgccgaggcgggtggatcacgaagtcaggagtttgagaccagccagggtaacatagtgaaacaccatctctactaaaaacacaataaattaccygggcttggtggcaggtgcctgtaatcccagctgctttggaggctgaggcatgagaatcgctgtaacccaggaggcagaggttgcagtgagtccagatcgtgccactgcactccagcctgggcgacagtgggaaactccatccaaaaaaaaaaaaaaaaattgcaagacatgctaaaaggcaaacacataatctgaagagacaaagcaaacatcaaagccagactcttatgtgatacagattttagaattataagactgtcaattgaaaataattact

SEQ ID NO: 880118 - DNA, 556 bp, Homo sapiens
aaataaaaactattgatacctacagctacatacgactacagcaaagattaaatgaagcctaaattttagccagataaaggcctgtttgtctctccttctactacatgatacacggtgtctggctttcaaaaaattgtaagaggccaggcgcagtggctcactcctgtaatcccagcacttcaggatgccgaggcgggtggatcacgaagtcaggagtttgagaccagccagggtaacatagtgaaacaccatctctactaaaaacacaataaattacccgggcttggtggcaggtgcctgtaatcccagctgctttggaggctgaggcatgagaatcgctktaacccaggaggcagaggttgcagtgagtccagatcgtgccactgcactccagcctgggcgacagtgggaaactccatccaaaaaaaaaaaaaaaaattgcaagacatgctaaaaggcaaacacataatctgaagagacaaagcaaacatcaaagccagactcttatgtgatacagattttagaattataagactgtcaattgaaaataattact

SEQ ID NO: 880119 - DNA, 605 bp, Homo sapiens
tttcttttttgagacagagtctcactctgtcatccagactggagtgcaatggcacaatcatttctcactccagcctttacctccaggctcaagcaatcctcttgcctcagcctcctgagtacctgaaactgcaggtgcacaccatcatgcccaggtgtttttgtttgttttattttgttttgtagaaatrgagtttcatcgtgttgcccaggctagtctgaaactcctgggctcaagtgatctgctcacctcaatcctcccaaagtgctgagattatcagaggcgtttgaaccagggcaacttttcttaaataggggatggataaaataaggctgagacctactaggctgcattcctaggaagttaggcattgctagtcacattataaataggcggtcagcacaagatataatcataaagaccctggtgataaaacagaatgcaatcaagaagctaatcaaaacccaccaaaaccaagatggtgatgaaagtgacctctgctcatcactctcaccgctcattgtttactagttataatacattaatatgctaaaagacagtgcctccagtgacatgacagtttacaaatgccctggcaatgtcca

SEQ ID NO: 880120 - DNA, 605 bp, Homo sapiens
tttcttttttgagacagagtctcactctgtcatccagactggagtgcaatggcacaatcatttctcactccagcctttacctccaggctcaagcaatcctcttgcctcagcctcctgagtacctgaaactgcaggtgcacaccatcatgcccaggtgtttttgtttgttttattttgttttgtagaaatagagtttcatcrtgttgcccaggctagtctgaaactcctgggctcaagtgatctgctcacctcaatcctcccaaagtgctgagattatcagaggcgtttgaaccagggcaacttttcttaaataggggatggataaaataaggctgagacctactaggctgcattcctaggaagttaggcattgctagtcacattataaataggcggtcagcacaagatataatcataaagaccctggtgataaaacagaatgcaatcaagaagctaatcaaaacccaccaaaaccaagatggtgatgaaagtgacctctgctcatcactctcaccgctcattgtttactagttataatacattaatatgctaaaagacagtgcctccagtgacatgacagtttacaaatgccctggcaatgtcca

SEQ ID NO: 880121 - DNA, 608 bp, Homo sapiens
aattaaattttataaggattttaataaatcttcaggttgagcaaaaacaatttctaactggaagctaaaaaaaaagagaagaaaataaagaataaatgaaataaaagccaatatctgaaggcaatatatacattttaaaaatggaaacaacagaaataatcattctcctgcaactcctccatgctattcatgttaaattaaattttatatgwcttttcttctattaatttgctttttgttagttgattttcagcaaaccatcaaagggaaagcgggtatttttctttgacccctgcagttttgttgctgtgagcaggataatcaaaactgctctagtctgctgcaagtcaaaattaaggaaatcaaggacctgacaaattaatagaagagaaagaatctcttaccagtcaggatcctggtctgtttctgtggaatctggttgagtgaatggtaaaaaaaaatctctgtttgtcttcttttcctctctaaaatgttgattaatgggagaaaaacatttacacaggctatcttcaggtgcagcagtataaatgtttataatgtctgaccctattcctcccagaaacagtctttttttgttccttcgtgac

SEQ ID NO: 880122 - DNA, 569 bp, Homo sapiens
aatgtctgatcatttccctttttccaatacacagttaccctggtaaaaggccagaggtcttcttggggaagggtgggaggaagattaacagcatacattgccggtagtgtactggggtccttcctcagggggatccagcctccccttcattcaaggggttctgggtctgtaaactggctcaagtctggaaattgattaaggccatgattctctggttttatatttcaaataagtattttgtccwttcggcctagaagttttctgcttatataaattgagtaggaatgcagtaggcttcctgtcaatttcaattctaggaacacagtgatttattagccaatgccagagctctacacaagtcagactattttgattgctgctttacttctgctgtcaattactgtaggtatgcccaccttacctttgatggttgagtgttgccacttggtccctgccacctcaggacccaattatttccattgtatttaaattttatagttgagtgactgcagttcccactattagatctgacatacagagaagaacaattacagggcccttaaaagatg

SEQ ID NO: 880123 - DNA, 569 bp, Homo sapiens
aatgtctgatcatttccctttttccaatacacagttaccctggtaaaaggccagaggtcttcttggggaagggtgggaggaagattaacagcatacattgccggtagtgtactggggtccttcctcagggggatccagcctccccttcattcaaggggttctgggtctgtaaactggctcaagtctggaaattgattaaggccatgattctctggttttatatttcaaataagtattttgtccattcggcctagaagttttctgcttatataaattgagtaggaatgcagtaggcttcctgtcaatttcaattctaggaacacagtgatttattagccaatgccagagctctacacaagtcagaytattttgattgctgctttacttctgctgtcaattactgtaggtatgcccaccttacctttgatggttgagtgttgccacttggtccctgccacctcaggacccaattatttccattgtatttaaattttatagttgagtgactgcagttcccactattagatctgacatacagagaagaacaattacagggcccttaaaagatg

SEQ ID NO: 880124 - DNA, 589 bp, Homo sapiens
ggctgcaaagccaaaggaggggagtttgtgactaggtgaagactgatttgcaatgggtcacaggccacactagaaaaattacttccatgagattctcagtggagtatatcagattttaattgcaattttattttatttatttttcatttatatatatatatttattatacttcaagttctagggtacatgtgcacaacrtgcaggtttgttacatatgtatacatgtgccatgttggtgtgctgcacccattaactcatcatttacattaggtatatctcctaatgctatccctccctcctcccccccaccccacaacaggccctggtgtgtgatgttccccttcctgtgttcaagtgttcttattgttcaattcccacctatgattgacaacatgcggtgtttggtttttttgtccttgcaatagtttgctgaaaatgatggtttccagcttcatccatgtccctacaaaggacatgaactcatcattttttatggatgcatagtattccatgatgtatatgtgccacattttcttaatccggtctatcattgttagacatttgggttggttccaagtctttgctaat

SEQ ID NO: 880125 - DNA, 661 bp, Homo sapiens
atgacaggaagaacagaattgttttctcatcctgtcctagctgtcactaagactagggaaaatgcagttggaggtgagactcctttcttctgccaagctcgcattcactgaaaagtggctctactttgggtaaaacaccctgagaatatagggtcccgattgtacttaccctgcttgtgaggtgttagttccatgccaggaaagggaagttgagctcacaggttaccatccccttctctccatggactgcacagcccctagagcaggaatgtcactcagagaagattgacgttatctccacctcaacctcatgctggctcaggatttttgcattaggcagagtaaaggaaaggggagaattaggtcctaaaactgtctaatcttttccagaggtgactgacttygtttgcagcagagcatggagaaattcaaacctaaggatactctcaggaatagtggggtttgtggtgaaaggcaattaggagactacttttagacctaataaagatgtactctagactaaaggtccccaacctttttggcaccagggactggtttcatggaagacaatttttccacagactggggcagaggggagggttttggggtgattcaagtgcattacattcattgtgcactttatttctattattattacata

SEQ ID NO: 880126 - DNA, 544 bp, Homo sapiens
aaaaacacatgattatctaaatagatgcagaaaaggcttttaataagattcaacatccattcatgttaaaaactctcaataacctagataatgaaggaacatacctcaaaataatagctgtataagacaaacccatagacaacatcatactgaataggtacaagctgaaagcatttaccttgaacaccagcagaagacaaggataccctctctcaccactcctattcaacatagtattagaagttctggccagagaaatcaggctagaaaaagaaataaagttcatctgaatagaaagagaggaagtcaaaccatccctgtttgcagatgacatgatcgtgtatctagaaaactctatagtctcagccaaaaagcttcttaagctgatraacaacctcagcaaggtctcagggtacaaaatcaatatgcaaatatcactagcatttctacacaccacagcagtcaagccaagagccatcttacaaatgaacctgtgtttataattgtcagaaaaaaaataataaaatacctaggaatacagcta

SEQ ID NO: 880127 - DNA, 631 bp, Homo sapiens
cagcatctggcataagatatatcaatcacaaaggaaaatgtccagacctgggggactactgtatgccaggaccaagcatgcatgtgttcactagtcctggtgaaatggggtgggagacatgcagacaggagatgactaactggtggtatgatacttggccttttattttcagtataagtgaatatgtaattggttgagaaatgtgtataccttaagatagcagttgccattttttttttcacagatctatgagtaaatattgtaggcctgccagccttattgtctttgtaacaactactgayttctgcaatgttgtgtgaaagcagccatatacaaagttaatacataaatgaatggatgtggctgtgtttcagtgcaactttatggacactgaaacttgatttttatgtaatgttcatgagtcatgaaataatctcctattgaattttttcaattatttaaaaatgtaaaaacctatcttagctcataggccatacaaaaacagcacttaaataaacttatatatgtaaaatttgggttttagcacaaaggatatattctgaaagaaatacagcataatctttaaaagcaatttatgactcgtatttaaataaaagggatgaatagatga

SEQ ID NO: 880128 - DNA, 584 bp, Homo sapiens
agatttaaaaaatcaatgaatccaggagcagtttttttgaaaaaattaataaaatagaccactagatacactaataaagaagaaaagagagaagaatcaagtagacacaacgaaaaacgataaaggggatatcaccactgaccccacagaaatacaaacaacaacctaaaaagtgagagaaaatttttgcaatctgttcatctgacaaaggtctaatatccagaatctacaaagaactcaaacaaatttacaagaaaaaaaaattaaaaagtgggcaaaaaacaygaatggacatttgttaaaagaagacattcatgcagccaaccaacatatgaaaaatttctcaacatcactgatcattggagaaatgcaaatgaaaaccacaatgagacaccatctcatgccagtaagaatggtgattattaaaaggcaagaaaaaacggatgctggcaaggttgtggagaaataagaacgcttttacactgttggtgggaatgtaaattagttcaaccattgtggaatggtgattcctcaaagatctagaactagaaataccattagagctgcaatcccattactgggta

SEQ ID NO: 880129 - DNA, 510 bp, Homo sapiens
tcacgttattttgattactctgataattccaaaatctgtgtcattttttgaacctggtttgtatgtttccttagctcttcaggtgtgcttttacttgcctttgatgtaacttgtaacctttgcctaatatattagataataggaactgaggtaaatatgtctttagtgtgaggttatgtgttaatctggcaagaattagaactgtgtttaatattttgtaaagctgtaggtgtcagaggcttcaaatcttaatactgctttctttttccttctctttttttttttttctgatgtctttgaactttcctaagtccttatgtaragtctttttctttcagctccttcatctattatccattgttattatactagagtcctgctggtgcagggctaacatgtggagaagagtgattgttttataatctgactaaaactcagatttgtagtgagcctatgtccctgaaacttggccttcacaaatgtgaagcttttttccctttctttaggtga

SEQ ID NO: 880130 - DNA, 630 bp, Homo sapiens
acgattactacagatcgttgtgatgaaggtgttatagagaaaaattggtttggttggccaaggtgtgagcaggtacctggagaagtaatagaagaccaggagggaaggaagggcaatatgtaactatccttggatagcttaattaaagaaggaaaggacgtttattgcccagactcatggagaagataattcaggtataaataacacagagtgcaaagtctctgagtcaaaaatgtttattattttacacaaacagaactgargccagtgttgcttgatcttaggaactcagttgattttatgagggcatttgaaagaagcaggtaggagccagatggtaaaggaccttgtgggccatgataaaaatcttcagaatatattcagagtgcaatgggagctatggaaatattttaagcaggggaatgaggtcttccaattcacattttaacacattttcactggctcctatgtagagaacggattttgagaaataaggatggaacacagaggaaccactggcagcttataagatgtgtaagattgtaagaatccagctgagagatggtgtagacttgacataacacacagctgcaaagacacagaatttatgtcagcacaaaagcttgtgac

SEQ ID NO: 880131 - DNA, 613 bp, Homo sapiens
ctctgctcttagaggcagtgatttgggtgccatggttttggaaaatactgagtgaaaagtttgctcaactttaaatttttaaaagaaacagaataatcattctcaatgataatggcataagctgaaccaattgagatgtccatggtattggttattgtttctgttgttaattgtaggtcttcttcaatttgagcacaaataaaattaactttttccttgaaaattrgtctgctgctttgggcttcttcactatcatctcttcccttcttaaatgagttagccatttataaactgctgatttttgtggggggcattatcctcataaacttttaataaggcatcaatgatttcatcagtcttccactaaagcttcaccataaattcgatgtttgttcttgcctcaattttagcagaattcatgttgctctgataggggctcttctcaaactgatgtcttactcttcttagtgcctcaaattaaatcctattcacacaagttataacaagttactagaacttttttttggtaccaaaaaggaaatcaaatccatgcatagcttttttgttttcataatacacattttccatgagtttttaaaagacccctcatata

SEQ ID NO: 880132 - DNA, 681 bp, Homo sapiens
agcacatgaatgtctgtgatccatttaaaattttttatttatttatttatttttaattataccttaagttctagggtacatgtgcacaacgtgcaggtttgttacataggtacacatgtgccatgttggtttgctgcccccatcaactcatcatttacattaggtatttctcctaaagttacccctcccccagccccccatccctaaacaggcccctgtgtgtgatgttccctgccctgtgtccacgtgttctcattgttttaaaattaattttatttggaagtatagaaaggaaaatgagctagacmccatatcaattcaggcagtatttacatgattcctaactcatcaaactagagaataactgtgaaggtggctcacacctgtaatcccagcactttgggaggccgaggcaggtggatcacaaggtcaggagttcaagaccagcctggccaacatagtgaaaccctgtctctactaaaaatacaaaaaaattagccaggcatggtggcgggcacctgtaatcccagctactagggaggctgaggcagaagaatcgcttgaacctgggaggtggaggttgtggtgagctgagatcacggcattgcactccagcatgggcaacagtgcaagactctgtctcaaaaaaaaaaaaaaaaaaaaaaaaaaaaaacacctcaa

SEQ ID NO: 880133 - DNA, 622 bp, Homo sapiens
ttctgctcattgttacttaagcaaatttctgcagctggcttgaatttctccccagaaaatgggttttccttttctactgcatcatcagcctgcaaatttttcaaccttttatactctgcttcctcttgaatgctttgccacttagaaatttcttctgccaggtaccctagatcatctctctcacattcaaagttccacagatctctagagcaggagcaaaatgctgccagtctctttgctaaagcacaataagaatcacctttgctccagttcccaagttcctcacctccatctgaaaccacctcagcctagactttttggcaaaaaccattccacaagtttctaggaagctccaaactttcccacatcttcttgtcttcttctgagccctccaagtctctaggaagttccaaactttcctacattttcctgtcttcttctgagccctccatrtgattccaacctctgctggttccccaattccaaagtcactttcacatttttgggtatcttttcagcagtgccccactcccagtcccaatttactgtattagtctattttcatactgctatgatgaaataccagagactgcataaattataaagaaaatgaggtttaatg

SEQ ID NO: 880134 - DNA, 622 bp, Homo sapiens
ttctgctcattgttacttaagcaaatttctgcagctggcttgaatttctccccagaaaatgggttttccttttctactgcatcatcagcctgcaaatttttcaaccttttatactctgcttcctcttgaatgctttgccacttagaaatttcttctgccaggtaccctagatcatctctctcacattcaaagttccacagatctctagagcaggagcaaaatgctgccagtctctttgctaaagcacaataagaatcacctttgctccagttcccaagttcctcacctccatctgaaaccacctcagcctagactttttggcaaaaaccattccacaagtttctaggaagctccaaactttcccacatcttcttgtcttcttctgagccctccaagtctctaggaagttccaaactttcctacattttcctgtcttcttctgagccctccatgtgattccaacctctgctggttccccarttccaaagtcactttcacatttttgggtatcttttcagcagtgccccactcccagtcccaatttactgtattagtctattttcatactgctatgatgaaataccagagactgcataaattataaagaaaatgaggtttaatg

SEQ ID NO: 880135 - DNA, 644 bp, Homo sapiens
caatcaatgtattaaatataagaaaactctatttattaagataaaagaagttctaatatttatttcctataactactatatagtcattctactccattttggagatccctgaaataattattaaatcctgctaattccacatctaaatatttgtttaattgatttccttctttcatttcctgcctttttcctttcccctgctctggttcagaaacttgttgtttcttgactgggggattcctgctccaaacrcctcacttcatggtggttcctgactttgcgtgtgtctttcccaaatcctcacatgtcttattttatttatttttattcaaactgtacaatggaatctttacacttccctttttaaaaccatttgttaacctttcattgtctgctggataaaacccaggtctgttataaagctctgtgtggtctacatccttttctagcttgatgtgttactactccattctttacattttaaatttcagcaaaatcaaactgatgtattttcttaaactcaaacatttttccctcacttctttgccttgtgtgttttcagtgcctcttcttgtgttctcaccctgccattcaccacatttctttttctgattcatctttattattttaggctcatgttggtt

SEQ ID NO: 880136 - DNA, 613 bp, Homo sapiens
aaaggccaagaagcagctccaagaagagccctgaagcagtagcgggtatgaggtgcagatgctgatgaataaaaataacatgaggtacaaacagaaaaatcagaaagtcgaagaagagtcagcaagatggtaacagaggaatattcttttagccacttttgtgagaatgaattggactttttgttgatcttgtttaatatacaacgctgggccagcatggtggctcagacctataatcccagcactttgcaggctgaagtgggtggatcatttgaggccaggagttcaagaccagcctgagcatcatggcagaaccccctctctaccaaaaacacaaaaaactacctgggcaggggttgcrgttttggcgcactcctgtagttcccactactcaggaggctgaggtgaaaagatctcctgagcccaggaggcagaggctacagtgagccaagatcatgcctctgtactccagccaaggtgacaaagttcagacgcctcccataacctttttcttgtggcctttcattagctttacaaaggtggttttcagttcctgagcaaagaaggggttaatttttttagtttttttttttttcgtttgtttgttttgttt

SEQ ID NO: 880137 - DNA, 613 bp, Homo sapiens
aaaggccaagaagcagctccaagaagagccctgaagcagtagcgggtatgaggtgcagatgctgatgaataaaaataacatgaggtacaaacagaaaaatcagaaagtcgaagaagagtcagcaagatggtaacagaggaatattcttttagccacttttgtgagaatgaattggactttttgttgatcttgtttaatatacaacgctgggccagcatggtggctcagacctataatcccagcactttgcaggctgaagtgggtggatcatttgaggccaggagttcaagaccagcctgagcatcatggcagaaccccctctctaccaaaaacacaaaaaactacctgggcaggggttgcggttttggcgcacwcctgtagttcccactactcaggaggctgaggtgaaaagatctcctgagcccaggaggcagaggctacagtgagccaagatcatgcctctgtactccagccaaggtgacaaagttcagacgcctcccataacctttttcttgtggcctttcattagctttacaaaggtggttttcagttcctgagcaaagaaggggttaatttttttagtttttttttttttcgtttgtttgttttgttt

SEQ ID NO: 880138 - DNA, 647 bp, Homo sapiens
attaattatatttgcatagtctatatttttataaattttcctataaaatgttacccagttgcaaattttttttatatatggtttttctcttaaacttcctcatatactagaaccttgatgataattttataaaagaaatactatggagtactaactgttacagtgcttttctttctacctctttctttctctctgtttctctttctgtttatctctctgtctcagtcttgattatataataaattaataaaatgagagtaagaaytctgatttttttctataacaattgaatatatttctctcttattttcattgcaaatattgactggccaacaatcttttaaatgggaccactgacagaagataaattgggcaagagagtataattggaacaggttacaggaatttgagctgccagagactatagatgattaagtctaatgcctcattttagagctgagagagaaatcgtggttgagagacgttgtcatttatctaagagtgctgagctatttaatggtgagactacacacactcttctaatcccagtgttcttttactgaactcaattatttgtattacagatacttcaaaacttattccaagtacatgtcaagcaaagggaagaatgtttataagtataaggt

SEQ ID NO: 880139 - DNA, 647 bp, Homo sapiens
attaattatatttgcatagtctatatttttataaattttcctataaaatgttacccagttgcaaattttttttatatatggtttttctcttaaacttcctcatatactagaaccttgatgataattttataaaagaaatactatggagtactaactgttacagtgcttttctttctacctctttctttctctctgtttctctttctgtttatctctctgtctcagtcttgattatataataaattaataaaatgagagtaagaactctgatttttttctataacaattgaatatatttctctcttattttcattgcaaatattgactggccaacaatcttttaaatgggaccactgacagaagataaattgggcaasagagtataattggaacaggttacaggaatttgagctgccagagactatagatgattaagtctaatgcctcattttagagctgagagagaaatcgtggttgagagacgttgtcatttatctaagagtgctgagctatttaatggtgagactacacacactcttctaatcccagtgttcttttactgaactcaattatttgtattacagatacttcaaaacttattccaagtacatgtcaagcaaagggaagaatgtttataagtataaggt

SEQ ID NO: 880140 - DNA, 647 bp, Homo sapiens
attaattatatttgcatagtctatatttttataaattttcctataaaatgttacccagttgcaaattttttttatatatggtttttctcttaaacttcctcatatactagaaccttgatgataattttataaaagaaatactatggagtactaactgttacagtgcttttctttctacctctttctttctctctgtttctctttctgtttatctctctgtctcagtcttgattatataataaattaataaaatgagagtaagaactctgatttttttctataacaattgaatatatttctctcttattttcattgcaaatattgactggccaacaatcttttaaatgggaccactgacagaagataaattgggcaagagagtataattggaacaggttacaggaatttgagctgccagagactatagatgattaagtctaatgcctcattttagagctgagagagaaatcrtggttgagagacgttgtcatttatctaagagtgctgagctatttaatggtgagactacacacactcttctaatcccagtgttcttttactgaactcaattatttgtattacagatacttcaaaacttattccaagtacatgtcaagcaaagggaagaatgtttataagtataaggt

SEQ ID NO: 880141 - DNA, 676 bp, Homo sapiens
ggagctctgagccagagcaattttgtttcagggacacacacagtcatgtctggcagtggtgtgctagtagatgtttcacaatcagctctctgtggggcaaaaggcctgatttacagcacttgctgattttcatggtataaacactcccaccgtggctgacttcagctaccgacatgatgccccagatcatgaaattgggaaggattgtgccccattggcttccccaagcagataygagcccatctctgacagcaactgcaagatgccaaggcctccttggaagctacacctgtctccattctagtctccatggtaactttgaaactagacaagactaagccaggtgaattgttttctaactgaggagctaagagttaataagacgtcttttcaaataaagatgcagatacttctctgcctttaaaaattgggactgcctagaagtaaaaaccaatagactcttcacttccttcccgttggaccacatccttccttctatacctccaaagttaggatgtaaagagctggaaggagagaatgagccatctgattccattgctccccgtgcttcccaccctggaggaatcacttagagtggaggattgaaaaataactgctctgagtattcacaagttaatttgaaatggtagacaaagaagagatggccagaaagcag

SEQ ID NO: 880142 - DNA, 564 bp, Homo sapiens
ttcactctgcatttgcacacaccctgccttcttcggaagatgccctcctcatggtataatttcaaagcatagctcagacattcgtctttcctcggtcagccaacacatctttagcaagcaggtacctgcgatttgccaggtaccagccttgggggcaaggcctggagcttcttggttctcgcactttctgcaatacccagagaccttccatagcctgttgagtgaaggaatgggcagcacatgggatgctgaacaaatagcacagagctttatgatgacttggaattattaaaagyttctggatgcagagctgatgtcccaaaaatttgatgagacactaactgagagagcttggataacaaccaacactctgatggggcaagtttttcccaggtttccctctcttctcctggatgggtcccaaaaacttcacaccctgagaagccccaccccagcaggcacgggcttcctgtcgaagctccattccttccactggagaaagcaccagatagcctcgtggattcacacagcgagccgtacccagcccaggggagccagggccct

SEQ ID NO: 880143 - DNA, 689 bp, Homo sapiens
ttgctacaaagagaataaaatacctaggaatacaacttccaagggatgtgaaggacctgttcaatgagaactacatgcaactgcttaaggaaataaaagaggacacaaacaaatggaaaaacattccatgctcatggttaggaagaatcaacatcatgaaaatggccagactgcccaaagtaatttatagattcaatgctctccccatcaagctaccactgactttcttcacagaattagaaaaagctactttaaagttcctatggaaccaaaaaagagcccccatagccaaggcaatcccaagcaaaaagaacaaagctggaggcatcacactacctgacttcraactatattacaaggctacagtaaccaaaacagcatggtactggtaccaaaacagatacatagaccaacggaacagaaaaaaggcctcagaaataatgccacacatctacaaccatctaatctttacacacctgacaaaagcccacaatttactgaagaacaaaattacaatgtaatgctttagctgtgtctctagtgggggaaggttatgtaaggatttattggaaattggaacttccatttatggtgattccttcaatgtagagacttaaattaggagtaggtatgaatcatgacacaacagtctaacattagtggaaacagcaaagtgagtattttgagat

SEQ ID NO: 880144 - DNA, 665 bp, Homo sapiens
tcatttctgaattaccttcctagtatgatatggtatcattaagaaattcctgatagtgcttcactagcatttttcttgaatcattctagttgttagcttaaaagagaccaacgtctacttaagaagtaactatttaggaaaaaaaggagtgagamtggctgtctaaatatcgaccctctgctattcctacacatttgtgaaacttaaacattcttataaaattcagctgttttttctgctatgtctttgagaagtcattgtataggcaataaccggatgaaaatatagttatatgaatttttttaaaaaaacgagttatgtttacagaggaggtctaaatggggtccaaagtaatgaatttcataattgtcattccacatttagaaaatagtagttgagctcattttaaatatttgttgagagcctaacccattttgctaaagttcagaatgaaagcttggagtcccagcctcccttctggtaattacttctgtgtgaccttggacaagtttcttaactaccctgtacctcagtcttatcctttgtaaaagtggaggtaataatattactctttaaatggagctgtttggaggattaaatcaattaatttctgtcaagctttttcatggcatgtcctgtgtacttaacatgtactagctattata

SEQ ID NO: 880145 - DNA, 669 bp, Homo sapiens
tctgagctactggaatggactccagccacctgcaaccctgaactggagttaagtgtgacagaaaatgagtacaaattattgtcgaaaaataaattttcatgtctaagataaacatactaatgcatgacaataaatgaggcaggcccttagtgagcctgcctatatgcaattgtttgtttttgaactacatggtgttaggaggttctccttccaattttcacttcacagacatttatttcttggtttaacccaccaccattatgaccgccatcaatcactgattcaccaaacttcagtaaataattaccttgattgttttgattaaattttcttaaatgtatgaacagctcatgtttatttcaatatttaatattagaagtgttttggtccttattaagaagttcartggtgtttttgtgacaagaaatatgccatagcaacttagctcttgtttatatcaattagctgatggtaacactggttttgttataggtggtttggcttaaagtcacagtttacaagaacctgtcaacaacgttaagtgaggaactactgtataggtcattttttgaatatgaactattgtcaaaaactatgcaaagtgaggtttataaggagtgccagcttggaagttgggtgaagtgaggataaggaaaggctttaatgaaa

SEQ ID NO: 880146 - DNA, 629 bp, Homo sapiens
ttggctcagggttccacaggaaacttacaaacatggcagatggcaaaggagaaacaagctcatcttacatggccagagcaggaggaagacagagaaggggggaggtgccacacatttttaaacaaccacatcatgagaactcactatcacaacaacagcacaaatgaagatcatgttaatcatgagaaactgcacccatgatccaatcacctctcaccaggccccacctctagtattagggattacatttcaacctgagatttgggtggggacacagatacaaaccatatcattccactcctggcccctcccaaatctcatgtccttctcacatttcaaagtgcaatgaacagtaccccaaagtcttaactaattcagtattaattcaaaagtccatagtccaaagtctcatctgaaataargctagtttcttctgcctatgagcctgtaaaaccaaaaacaagttagttacttccaaggtacaatgcgagttcaagtatggggtaattttcccctttccaaaagggagaaatcagacagaggaaaggggctacaggccccatgcaagtctgaaatcccgcaggacagtcattaaatcttaaagctccaaaatgatctcttttgactcc

SEQ ID NO: 880147 - DNA, 618 bp, Homo sapiens
atggccccaaaagggtgggtaaatttgcagccttgagtttcaggtcaatttcttggacattaaattcagacactgtcagatatgtatttagcacacatttttaaaatatgttctctctaaagttttcaacagacagaaggggacttcatcaagctcctcagtgattggctgtcaagtcgtggaagcccctgtgatccagccaatgagagcccagagatacccagaaatacccagatctcatagggtcgttggctcccactaggctgggaaccgaaggccaagcacactgcgagggtctgatggaaaagcaagtcgcctgyggttggtgactaataataaaacaagcaggttacacccattgcaaaaatgttagccagcaggagagaatgtgacatgagcccaggggctgattcgggtcatgtgcaaacactagaaaggggttctgtgaaaagcatgggcttcttgacccagaaatcctctctggggccccttcccagtcacactaactcccagagtttccttaaaagtgttcccacttctgtatgcacccctaatctgttcaattagggctgtttttgaacttgatataaagagactcatactttaagtgttcctcat

SEQ ID NO: 880148 - DNA, 618 bp, Homo sapiens
atggccccaaaagggtgggtaaatttgcagccttgagtttcaggtcaatttcttggacattaaattcagacactgtcagatatgtatttagcacacatttttaaaatatgttctctctaaagttttcaacagacagaaggggacttcatcaagctcctcagtgattggctgtcaagtcgtggaagcccctgtgatccagccaatgagagcccagagatacccagaaatacccagatctcatagggtcgttggctcccactaggctgggaaccgaaggccaagcacactgcgagggtctgatggaaaagcaagtcgcctgtggttggtgactaataataaaacaagcaggttacacccattgcaaaaatgttagccagcaggagagaatgtgacatgagcccaggggctgattcgggtcatgtgcaaacactagaaaggggttctgtgaaaagcatgggcttcttgacccagmaatcctctctggggccccttcccagtcacactaactcccagagtttccttaaaagtgttcccacttctgtatgcacccctaatctgttcaattagggctgtttttgaacttgatataaagagactcatactttaagtgttcctcat

SEQ ID NO: 880149 - DNA, 655 bp, Homo sapiens
agagacatctgcttgagaagtaagtactgtggctgtgatgagaaccctgcttactggctccaagtccactcccatcttcacaattccacccgtcatcctccacttacatataaaagtgaaaaactgcagatagcaaaatatgagtgatagcatcaagagaggagaatgaaggagaaaaaaaatcagatcctttaaaaatgcatataacattgtaaaaatttcaaagcagttagcatgtctcagaaaacattcagacccaacstggaaatctagctccaccataaaccatgggagctttcataagttacctaacttctgtaagcctcagttccctcatatgtaatataaggataataatactaccctaacttacaaaacattcttttaagtgttacatatgcctggcacatgaaatgcccccaaataatatttgataaataaatgacatcaaatattagctatttaaaaaatctgttaaactttttttttttttttttttttttttacaaacagcaatgtctcagctgaacattgggcgaggcattccttaatttggtaggcgccggggagtgctgcagatcagcaggggatgtgaaacaatgacagttacattttgggaagcttatattataatggcagtggcgactaataagta

SEQ ID NO: 880150 - DNA, 655 bp, Homo sapiens
agagacatctgcttgagaagtaagtactgtggctgtgatgagaaccctgcttactggctccaagtccactcccatcttcacaattccacccgtcatcctccacttacatataaaagtgaaaaactgcagatagcaaaatatgagtgatagcatcaagagaggagaatgaaggagaaaaaaaatcagatcctttaaaaatgcatataacattgtaaaaatttcaaagcagttagcatgtctcagaaaacattcagacccaacctggaaatytagctccaccataaaccatgggagctttcataagttacctaacttctgtaagcctcagttccctcatatgtaatataaggataataatactaccctaacttacaaaacattcttttaagtgttacatatgcctggcacatgaaatgcccccaaataatatttgataaataaatgacatcaaatattagctatttaaaaaatctgttaaactttttttttttttttttttttttttacaaacagcaatgtctcagctgaacattgggcgaggcattccttaatttggtaggcgccggggagtgctgcagatcagcaggggatgtgaaacaatgacagttacattttgggaagcttatattataatggcagtggcgactaataagta

SEQ ID NO: 880151 - DNA, 655 bp, Homo sapiens
agagacatctgcttgagaagtaagtactgtggctgtgatgagaaccctgcttactggctccaagtccactcccatcttcacaattccacccgtcatcctccacttacatataaaagtgaaaaactgcagatagcaaaatatgagtgatagcatcaagagaggagaatgaaggagaaaaaaaatcagatcctttaaaaatgcatataacattgtaaaaatttcaaagcagttagcatgtctcagaaaacattcagacccaacctggaaatctagctccaccataaaccatgggagctttcataagttacctaacttctgtaagcctcagttccctcatatgtaatataaggataataatactaccctaacttacaaaacattcttttaagtgttacatatgcctggcacatgaaatgcccccaaataatatttgataaataaatgacatcaaatattagctatttaaaaaatctgttaaacttttttttttttttttttttttttwacaaacagcaatgtctcagctgaacattgggcgaggcattccttaatttggtaggcgccggggagtgctgcagatcagcaggggatgtgaaacaatgacagttacattttgggaagcttatattataatggcagtggcgactaataagta

SEQ ID NO: 880152 - DNA, 582 bp, Homo sapiens
ccaggagggaactgatttgtaaaggggtatgaggaacaacattccctctggtacaaagctaactgtgttgggcaccacttctaagcctcattactcatcttactggaccatagctctaagcctcatactgatcttactggcatgttgctctaagccagtaactagcatctcacctgtcaactgagcagaagcacagaggtttactaggtcctgagggaggctgttactgcacaagttctttgctggtgacagcagaaagtacttaggggccattccaagggtctgccttgtttgcagagttgattcatttgtgattgccatataaaggcctctgaaccaacaattgtttgggagcaaaagcaaacsagtgccaagatccaagttctcgtactgtggctgtagggttgagggctgcatagggtcgaaaggtataagtcactgtaatatcagcgtggggacaccatgggtctcatcagtggttttgcccatgggcacagcccttgtggcggatgtctaattgtgtgcagcccagatgtcagcggaggcccttggagatcctattaaacttgacccgaaccccaa

SEQ ID NO: 880153 - DNA, 647 bp, Homo sapiens
ataagcttttccacatatgaagaacagcttgtttcaggttttaaaatataataagattaacttttaaattgagttgagaaaacagcaagttacagataaattgagttactaaggaaagtgatttcacttttaaaaactgaattaaggacgttgaaattaatttatttttgaacagaacgtgctcaatgttaagttttgtttattaatttctctttggacaaactctttgaatgaaaacaaaatctattataaaactttgtttttcatattggcagccctgcatcaaatttttatctacaataaacatgaattatataccacttgcaggtagaagtcccatctgcacatcgattcacttcagccaatgacatgtgtgtgcwtggactcttactgtagtatgcattaagtcccctaagccaattacttagtggagacatttaattcagtttaatctttaattatatgcttttgattaatggttaaaataaccgtaagttatagctgcaacattccatgttaattagtgggaaactttctagacaatttggaagactttcttatatctcttgctttagtttaaaaaatttgggaagtaggaaagagacaaataatcctctttgaagattgaattattaggaattattaag

SEQ ID NO: 880154 - DNA, 599 bp, Homo sapiens
gtggtttcaccagtgtagcctcttgagcaaaccttggacactgaatcatatttgttgcctaaagatattaatgattatctggcttagcctcatgggcctgattcttcttcaacagtaatgtgttgattattggcattttagacatggttggtattatacagctgaatctctgcacaaattcagagcagctatgcaggcttctgccactgggtgagttgatgaaggagatgatgtctcctctcataatgctgcaccaaacasatggaatggcaagctgtctatgactctgagtatctctgaacatgaacctgtccttctgcctaccctaatcattccactttcacgaagtgcatgcactactgagccacagagaaattacacaacaagcagtagacatggtgcctgaaggcaatgcaactcttgaactggaaatttagcacacatgtgaaatccttcgcagatacaaagccgttcttagactattattttcaaaggtaaaattagagatgtaataaccttatgagatcatcatgtccagttctctcattctagagatagtaaaactgtgatccagaagttaagtcccttacttatggtta

SEQ ID NO: 880155 - DNA, 534 bp, Homo sapiens
ctcaatggctggcaggcgcatgggtgaattgtgccctctggcctgctggagagctcttcacatgacacgaacccctgagtgggagccagacccaggctttgggattgattctgatattgaaagacctgtggaagagctactgcataccaaggacacctatgtccgtgaaaagtgaccaagaaatctcagacaggaaggcaaattgatttttccaagycatttcagaggaaggagttcttgactgaggtggactctcttgcaagtacttcgagttccatttctaactctgctgcgacaattacatttcagaaacacttgcttggaacgtatagctcagcagacactgtcatttttgacaagggtttgcatttatcagttgtgtttctgggagctgttggacagaaatcataaccaagctgtcactacagcctcccattaccttcaaacagattccttttaattcacctccatgtagatttaagcgtctaacaagcatcaggtgcctggctgttggagtagggatgaatgtcagga

SEQ ID NO: 880156 - DNA, 604 bp, Homo sapiens
cctcatgatgctgtctggttattttgcacactagttgatgcagtttcttcatagtgtcattggtctctatattttggtgtgttttttcagtgactggtactggtttttcctttgcatatttagtgcttccttcaggagctcttgcaaggcagttctgatgataatgaaatacaccagcatttgcttgtctgggaaggattttatttctccttcacttttgaagcttagtttggctgaatatgaaattctgggttgaaaattctttctttaagaatgttgaatattggcccccaatctcttggggcttgtagrgtttctgctgaaagcctgctgttagtctgatgggcttccctttgcagaagacctggcctttctctctggctgcccttaacattttttccttcatttcaaccttggagaatctgatgattgtgtgtcttggggttcatcttctcatgcagtatcttagtggtgttctctgtattacctgaatctgcatgttggctggtcttgctaggtaggggcaattctcttggataatatcctgaagtgtgttttccagcttgtttccattctccctgtctccttcagatactccaatcaa

SEQ ID NO: 880157 - DNA, 625 bp, Homo sapiens
taaattgcactttctagttttcatgttttcctgttgtaaaatcagtatgaaatatcttcaacccctttaaacaagttttaaattatttaagctaattttgcaagtagtgttatgaagaccaattagaaaaataccatgtaaactttatcaawcattctagattattaacagattttaataattttgctggttttatacatttcctagggcttcgatggacgaaatggagaaaagggtgaaacaggtgctcctggattaaaggtaaatcacaacaaaaatcatattttcataagtaaattcattaaatattaaagctacatataagattcatattgtgagccttaacttgttttctgaaatttacctgaattttacctattaggtgtgaataatggtaaccaattcagatattctattaacgcttccatgaaaaatgacaacttgaagagtctagattagaaatagttgagcatcttagtataacttatcaattacttcactttagtctttaagtttttaaatacagaaattgagatttctggtaaataaaatactaacagaaaattaatattgttaaaatgtatatctttttctaggctctataaacttttccataatattctgt

SEQ ID NO: 880158 - DNA, 666 bp, Homo sapiens
tgaaatttaactttgtaagcttgtatgtggttgttgatcttttttttccttacagacacccataataaaatatcatattaaaattctcctgttttttgtcacttttcaaagatttaaaaaatgcacgtctacattaaggaactccagtaatcttgaaaaagtatattgaattctaactctatagattaataatgcaataatttttaagaatataaaataatataacatatattcagagtagagataatgctcaatgaggaatcctgcagatttttagatcatatttgcaggaacccctgtgggacatactggacactgagggcattctgtttgaaagggtcaatccttggaaatggtaacacagtaaatcaaggtattcccaaactgggaataataagggaggaagatgttgatagtttatcagaaagtaattgtaatacgggtctattgaaatatattaatattaagaaaaattgacaagtaccacatgatctcacttctatgtggaatctaaaagagttgaawtcattgatgaagaatagaatggtggtttccaagggcagaaggtggggtggggttgggagattttagtctatggatacaaaattgcagtaagatagaagttataagctcaagagatctattgtgaaacgtggtgaccacagt

SEQ ID NO: 880159 - DNA, 611 bp, Homo sapiens
gataaacactgatgcaaaaattcttaacagaatacttgaagaccgaatctagcagcacagcaaaaagttaatccactataatcaagtaggcttcatccctgggatgcaaggttagttcaaaatacaaaaatcaataaatgtgattcatcacataaacagaactaaagacaaaaaccacatgattacctcaatagatgcagaaaaggcttttgataaaattcaacattccttcatgttaaaaactctcaataaactaggtattgaaggaacacatctcaaaataataacagccctctgacaaactcacagccagcattatactgaatgggcaaaagccgtaagcattccccttgaaaaggcgtgagacaaggattctctctcatcacttctattcaacatagtattggaagtcctatccagagcaaacaagcaasagaaagaaataaagagcatccaaataggaagaaaggaagtcatattatctcagtttatagatgacatgatttcacgattttatatctagaaaaccccatagtcttcacccaaaagttccttcagctggtaaataacttcagcaaagttgtaggatataaaatcaatgtacaaaactc

SEQ ID NO: 880160 - DNA, 609 bp, Homo sapiens
tgttaaaagtcttgaatatttggttttccagctcataaaggattagaaacagaatattaaactgaagtttctaacaataaaatacataaaatatgataatttgattgtaaaagtggcaaaatatttgaaaaatttagtggtagatgtaacgaatcaaagagtaggacaattaggcccatttggaggagagaaaaactaatctatattccttagagtggcatgaaattaatactgccaaagtcatcagttactatgccaactctcaaggaatcagagataaaatggtattttccatgttaaatattttatgttcaaatgtattggccrgcatttttttcttccttcttcttgcattcctttttaatgtcacttagataatttaattttttttaatgtcacttagataatttaaaattttaatgtcacttagataatttaaaatacctacaaaatgttcgaaactcatattccaactgccttgaatacttgaagaattagtacattgctcttaaagatattattaccatttatgattttaaaaagaattctttgtcatgtcctcccaccacacatgacactcacataatacagatattcacctttgctttt

SEQ ID NO: 880161 - DNA, 617 bp, Homo sapiens
acacttagattgaactccttaaagtcagaaattatgatttccttgcttctgccatccctgtatctttttcatttgtacgcattttattgaataagtatatgaatgaatatatgaataaacagatggctttttataaaactttgtctttgtggatgtgattcaaaagcaaatgactcctggtcattctgtgactttcatctcataagaacacagaacacaaaggatatttcttctcttttgtgtgcatttagcactttgagtgctaaatgaagaaccttatttaatagtcttttatattcgattacttaagtcaggagcattcaatcttttggcttccctgggccacattggaaaaagaattgtctggccacacatgaaatgcactaacactgacaatagctgatgagctaaaaaaatctcataatgttttaggaaaatttataaattcgtgttgggycacattcaaagctgcctgggctgcatgtgacctgcaggccgcatgttggagaagcttaacttaagtggttaggaggaaacactaggtactgtacatgttatacattttcaatagagaaatagagacactaaaactccataataattcacggaagatataa

SEQ ID NO: 880162 - DNA, 616 bp, Homo sapiens
ctatggtctcaacttatctaatccctttggtacaatttggcaagatcttcttgggattgttataagaattttattgatcattctcctttcagatttcaataagacccagaaatgggtgtagttatggtgttgtgcatgtgtaacgtaactcacagttttttagggaggtatgcctaaattgcattataatgctttgaaaccagaaagaaaaatgaagccaggttttgtgcctcacacctgtaatcccagcacttcaagaggcttaggcaggaggatcacttgaggccaggagtttgagaytgtaatgagccatgattgcatcatggcactccagcctgggcgacagggtgagaacttgtttccagaaaagaaaagaaagaaaacaaaagaaaagaagttaacatgtttcctcttccatttttctccaccatttttccccacgatttttccttttctgccaatctccacttcactgtgaacaaagagggcctctatcatcaggaaatctactcagctctgctggggtgctgacggaagagaaagagcagaagtaacctcaaagcaggttctaaataaacagtctcctacttaatgtaggataagtctttattttgct

SEQ ID NO: 880163 - DNA, 592 bp, Homo sapiens
acaaacctgacaaaaacaagcagtgggaaaaggaatccctatttaacaaatggtgctgggaaaagtggctagccatctgcagaaaattgaaactggactccttccttataccttatacaaaaatgaactcaagatggatcaaagacttaaatgtaaaacccaaaactataaaaaccctagaaaaaaatctaggcaataccactcaggacatagacatggggaaagattttatkatgaaatcaccaaaagcaattgcaacaaaagcaaaaattgacaaatggaatctaagtaaactaaagagcttctgcaaagcaaaagaaactatcaacagaacgaacagataatctacagaatgagagaatatttttgtaatttgtccatcagacaaaggtctaatatccagaatctacaaggagcttaagcaaatttacaagaaaaaaataaacaacctcattaaaaagtgggcaaaggacatgaacagacacttttcaaaggaagacataaatgtggccaacaaacacatgaaaaaaattttaacatcactggtcattagagaaatgctaatcaaaaccacagtaagataccatttcac

SEQ ID NO: 880164 - DNA, 595 bp, Homo sapiens
gagacacaattgcaccattgtggattaggataaatcatatattatcaggtacaaccacactatcagcattcaaccttaactagtgtctctcctacctcaagacatgagtaataatttccttatcacagaggaggacaaacatatctctgcccttagcaaaaaattggtcagataaaatacaaaatgtacatatgaatcaggaaaaaagaagagaacatttgtaggtctgtcataaataaactttatttttggactgtatcaatataaactaatggatagaagaaagaaaggaaggtaagaagaaaagaagaacatagcttcccttaagacatgtgtgaacgatgtcagttttttctaatcactaygtctattattaatataaatatatagcactattaaaccgctgtttctcagatttacagattcagattcactggttttctaccctgattctgttgctctgaagaacacccaagaatttgtgattcttatgattaggcagtaggggagacattgcttttaacattaaatatctaaacaaaacactggtttgtgttgttttatttccacttatattatttcagtttacctgtga

SEQ ID NO: 880165 - DNA, 570 bp, Homo sapiens
tgcaaaccaactctccgataagcttctagtgtttttcttttttttaggtttgccactaatcctcccagcatttctgcagattgtaactgaagctcagcttttctaggaggaaaatacctgttatggtcaacaacctaagagtcactcttgattcctctccattttcaactaaacagctgctctgtctgtgacgcctccagcatgtgctcacaccccaayggcctcggacctctcccaaggcagcatcctctcagttgagacctaaaaaaactgcctcccaaatattttccttgcttttgtctttccctgaactctattctccacatcacagtcattatttgctaatggctttattgagttctagtttctacaccatacaattcacccatttgaggtttaaaattcaatgggacaatcaattttaaaacactttcatcacctcaaaaagaagccctgtagccttcagctatcaacccccaatctccccacaagcaaggagtcagtaatctattctctgactctatatatttgcctattcttgacattttacacaagtgaagtcatatactg

SEQ ID NO: 880166 - DNA, 570 bp, Homo sapiens
tgcaaaccaactctccgataagcttctagtgtttttcttttttttaggtttgccactaatcctcccagcatttctgcagattgtaactgaagctcagcttttctaggaggaaaatacctgttatggtcaacaacctaagagtcactcttgattcctctccattttcaactaaacagctgctctgtctgtgacgcctccagcatgtgctcacaccccaatggcctcggacctctcccaaggcagcatcctctcagttgagacctaaraaaactgcctcccaaatattttccttgcttttgtctttccctgaactctattctccacatcacagtcattatttgctaatggctttattgagttctagtttctacaccatacaattcacccatttgaggtttaaaattcaatgggacaatcaattttaaaacactttcatcacctcaaaaagaagccctgtagccttcagctatcaacccccaatctccccacaagcaaggagtcagtaatctattctctgactctatatatttgcctattcttgacattttacacaagtgaagtcatatactg

SEQ ID NO: 880167 - DNA, 622 bp, Homo sapiens
taccttatcctctttccaaatagcatctcaataaggtaaaatttatacaggaaaaaaagctaatgtatccaaatgaacatctctgagaagaagatataaaacatctccatcctcctgtgagggttctttatgcctttttccaacaaattccatctctcaagccaaccactttgttgacaccttttttttgaaacttttattttaaattcaagggtacatgtacaggttttttatataggtaaactcatgtcactggggtttgttgtacagattacttcatcactcagctataaagtctagtaccgattggtgacttttcctgatcctctccctgctctaaccctccaccytcagggatgccccagtgtctgttgttcccctctacgtgttcatgtgttctcatcatttagctcccacgtgtaagtgagaacatgcagtatttggttttatgtttctctgttagtttgctaaggataatggcttccagctccatccatgttcctgcaaaggacatgatctcattcctttttatggctgcatagtgttccatggtgtatttgtaccatattttctttatccagtctaaccattgataggcatttaggttgactccatgtctttg

SEQ ID NO: 880168 - DNA, 567 bp, Homo sapiens
acccattagcatttgggaaagaatttggaggcttatcagaaatatacagatgtaggccgggcacagaggctcacacctgtaatcccagcacttagggaggtcaaggcagttggattgcttgaggtcaggagttcgagacaaacctggccagcatggtgaaaccccgtctctactaaaaatacaaaaaattagctgggcatggtggtgcacgcctgcagtcctagctactcaggaggctgtggcaggagaatctcttgaacccagaaggcagaggttgcagtgagccgagatcgcaccactgcactccagcytgggtgacagaacgagactctgtctcaaaaaaaaaaaaaaagaaaaagaaaaagaaaagaaagaaagaaaagaaaacaaatatacagatgtagatccgacagtcctaagaattccatgttaattaatgtgaactattttgtaatacgcagatgatatcttgatagccagtgaaatggagggtaactccatcctccatgccatcaaagtcttaaatttcctggcagataaagggtacaaggtttctaagaaagaggc

SEQ ID NO: 880169 - DNA, 567 bp, Homo sapiens
acccattagcatttgggaaagaatttggaggcttatcagaaatatacagatgtaggccgggcacagaggctcacacctgtaatcccagcacttagggaggtcaaggcagttggattgcttgaggtcaggagttcgagacaaacctggccagcatggtgaaaccccgtctctactaaaaatacaaaaaattagctgggcatggtggtgcacgcctgcagtcctagctactcaggaggctgtggcaggagaatctcttgaacccagaaggcagaggttgcagtgagccgagatcgcaccactgcactccagcctgggtgacagaacgagactctgtctcaaaaaaaaaaaaaaagaaaaagaaaaagaaaagaaagaaagaaaagaaaasaaatatacagatgtagatccgacagtcctaagaattccatgttaattaatgtgaactattttgtaatacgcagatgatatcttgatagccagtgaaatggagggtaactccatcctccatgccatcaaagtcttaaatttcctggcagataaagggtacaaggtttctaagaaagaggc

SEQ ID NO: 880170 - DNA, 702 bp, Homo sapiens
ctccgagatgccctcctgaactacctctcccctccagtagccccttctcatactcattttatttttgtcatagcaccaacactatctgaggtcagggaccttgtctctcattcaatcctttatccccagagcctgaaacagtgtgtggcttggagtaggtgcatgaccaatatttactggaggaagaaacgaagacaggaaggaggaaggaagggagaaagtgaggaaggaaggaggaaggaagggagaaagggaaaagcggggaccagacagattctccccttttctggcsccctcaggaacccgagtctaccgaccttgtgggctggccactaaaacaaaggccccaggcagtacttcccaagcagccagcggaaggcagtttccctctcccccaggccctgtgcccacccacagttgggaactgctgcagtgacgtggggcctcttgccaccagctagctaacagttccatgacaattgcttgtcactgcgctagtcctctccagggtctgtagcagggacagtttacttgggacgggactcttagaattcccagctcatcatgggacagctgctttttgagtgtttgtcccttaaacccgtagcaacgcagttaacccccgatgatctggctgcaattctggatgacctgacgataattctcacaaccgaatttctgcaaataaaacttccagaaagt

SEQ ID NO: 880171 - DNA, 699 bp, Homo sapiens
caacactgcttttagcttgatgagatccatgctagatttttttttttttctttgagatggagtctcgctctgttacccaggctggagtgcaatggcacgatctctgctcactgcaacctccgcctcctgggttcaagcaattctcctgcctcagccttctgagtagctgggatgacaggtgtgcgccaccatgcccagctaatttttgtaattttattatagatggggtttcaccatgttggtgaggctggtctcgaactcctgacctcgtgatccacccgcctcagcctcctaaagtgctgggattacaggcatgagccactgcacccggcccacgctaggcttctgaacctgcagaacrataagataataaatgtgtattgtgttaagttgctaggtttgaggtattttgttctggcagcaatagggaactaagccaagctgccatgtactgtccatctatgttccaggtgctgttcacattcttgttaatgtccacaaccatctagcaaagctgtaatgatagataaatgcccattttgtaggtgatggaactgaggctcagagaaatgaggtcttctcacatcctggctacacagcttggaaggggccatgtgggatgggggctgaatttgtcaggccccgctccgatgccctttctgcaacatgagctcctaggatatgctgatggtagagctt

SEQ ID NO: 880172 - DNA, 617 bp, Homo sapiens
agtttgaaatgtttgtttgggttattaaaactgtcaagaagattttcttttgagttcgtctttgaaattactgtctttgagcttgtcacacttttaaaaatgtgatttttggttcattttctcttctctcctttttcttctcttccccctttccttgactcttgggggaagaaagacttttctgctgttcaccagatatttttccctcagcaggcttgccttttctrttgcattagtttttaaagtaaattgatgagcaccgttgatttgtaaaaaccagcatatacatgaacttgtttttctaaactttctttctaatgtttttcaaaaagctgaacccaatgtgaatatcaggagttacggtatttttaagaaaacatatttatgatatacctctgaaaactcttggctttggacaagcctcttaactcctttccaagcttcttcattagagaaactggaattctaaaatggcatgatccttaaagtaaaaagaaaatacagaattgacttaagcatctcatacgctcatgcatggtgcacctatttttatagtcaccagtgacaagtatggattcctatggctatacttcacattagattaaccatttatctct

SEQ ID NO: 880173 - DNA, 655 bp, Homo sapiens
taatattgtaattaatttatatatataattacaaacagtatataaaaactgttcacacatagaagtctaatctactttaaagtttattcaagcaagcctagggaagggttgaatttaagtttaatatgatgctggagcagagggactgtgactacgagaacatattaaatgggyatgatgtccctcattcatagataagtatctacattatttaacagggacaacaggattgtcccttcttgagaaagacaacaaaggaaactcccatcactatgcagcttggagtgttggtgagagcctccccaaaatccatgagtgtgagcttattttgagaggcattctcattaccttgttatattggacattccctctagtgagatcatctacaggaggttttatagaaaagaaatacatttctaaatgacattattaggaacatgcacagctatccacagacacgtcttacttactagaactagtaagttctataccttacttacacttataccctactaactttgtaaaaagctattgtagttgttatcttaaaagaaatgagtatatatgttctttagaagtctttaattaaataagtttctcattaaagtaaaaagttaaaataagaaggatgcaatagaaatatcctggaagcaga

SEQ ID NO: 880174 - DNA, 629 bp, Homo sapiens
ttcccaacagtcccccatagtcttaactcatttcagcattaactcaaatgtccacagtccaatgtctcatctgagacaaggcaagttccttccacctataagcctgtaaaatcaaaagcaagttagttacttcctagatgcattaagagtaaaggcattgggtaaatacacctgttcaaaatgggagaaatatgtgaaaacaaaggtgttacaggtcccatgcaagtcaaaaatccagcagggcactcgaatctcaaagatctaaaatgatctcctttaaatctatgtctcacatccaggtcacactgatgcaagagktaggttcccatggtcttcagcagctccacctctgtgggttttgcagggtacatccttcctcctgtctgctttcacaagctggcattgagtgtctgtggcttttctaggtgtacagtgaaagctttcagtagatctaccattctggggtctggaggacagtggcccttttctcacagctccagtaggtggtatcccagaagggattctgtgtgggggctccaaccccacatttcccttccacactgccctagaggaggttctccatgagaccctcgcccctgcagaaaacttctgcctgaacatccagagat

SEQ ID NO: 880175 - DNA, 620 bp, Homo sapiens
aagtgagatcgcaaactatttgtctttacatgcctaggttatttcactcaacataatgtccttcaggttcatccatgttgttgcaaatgacagaattttttcttttttaaggctgaataatattcctttgtgtatatataccatattttctttatccattcatctgttcatagatacttggrtcaacttttaaagaaatgcatatttcctttcagtttattttgaatatacagtacacggtttggatttttcaactcttttaaagaggagcaagaacagtcagcttgtttgtagtaaatcttgtacagatgtgagaaggtcctgattgctctatgccaagaatttgtttgactacaggtctgtggattagaacgggaaaatggggatagggacaggagtccaaattaagtgtcagaaaataatcagtttaatggcatgctcaggcagttgacaaaggcatagcataaacacaggcaaggtccaaagtactagtcaggaaccagaactgaagtcaaataatattggcaaggtagcattctaaaacatctaaaaggctgttgtcaagccaacagagtttcctgattcctcacctcctttgaggaggaaaaacagtggcttgg

SEQ ID NO: 880176 - DNA, 624 bp, Homo sapiens
gcccaagccactgtttttcctcctcaaaggaggtgaggaatcaggaaactctgttggcttgacaacagccttataaatgttttagaatgctaccttgccaatattatttgacttcagttctggttcctgactagtactttggaccttgcctgtgtttatgctatgcctttgtcaactgcctgagcatgccattaaactgatattttctgacacttaatttggactcctgtcctatccccattttcccgttctaatccacagacctgtagtcaaccaaattcttggcatagagcaatcaggaccttctcacatctgtacaagatttactacaaacaagctgactgttcttgctcctctttaaaagagttgaaaaatccaaaccgtgtactgtatattcaaaataaactgaaaggaaatatgcatttctttaaaagttgayccaagtatctatgaacagatgaatggataaagaaaatatggtatatatacacaaaggaatattattcagccttaaaaaagaaaaaattctgtcatttgcaacaacatggatgaacctgaaggacattatgttgagtgaaataacctaggcatgtaaagacaaatagtttgcgatctcacttatta

SEQ ID NO: 880177 - DNA, 601 bp, Homo sapiens
aaacatataccatggtggtttgctgcacctatcaacccatccctaggtattaagcccagcatacattagctctttttcctgatgctttccctccccctgcttcccccagcagcagaccccagtgtgtattcttcccctccctgtgtccatgtgttctcattgttcagctcccgcttataagcgagaacrtgcagagtttggttttctgttactgcattagtttgcagtaacagaggataatggcttccagctccatccatgtccctgcaaaggacatgatctcattcctttttatggctgcatagtattctgtggtgtatatgaaccatattttctttacccagtctataattgatgggaatttgggttgattccatgtctttgctatggcgaatagtgctgcaatgaacatatgtgtgcatgtatctttaaaatagaatgatttatactcctttgggtatatacccagtaatgtaactgttgggtcaaatggtatttctggttctaggtctttgaagaatcaccacacacagtcttccacaattgttgaactaatttacattccaaccaacagtataaaagcattcctatttctccacag

SEQ ID NO: 880178 - DNA, 665 bp, Homo sapiens
tcatccaggctttgttgttccatttacagagcagatttagcatagagtagatttagagtagattttgcaaaattcttaagggctctagggtttttgaaatgggaaatgagaattagcttcaacttaaagtcaccagctcattaagtcctaacaagagtcagcytgtgctttgaagctttgaagccaagcattgatttctcctctttagctgtgaaagtcctagatgacatcttcttccaacagaaaattggaaaatagaagactgaaaatctattgtttgatgaatctacctttatcaattaccttaggtatatcttctgtataacttgctgcagcttctccatcagcacttgatgcttcaccttacacttttatgttatgaagatgacttatttccttaaatcttctctgctggcttcaaacttttcttctgcagcttcttcacctcgctcagccttcagagaattgaagagagttagggccttgctctggaatagggtttgacttaagggaatgttgtggctggtttgatcttgtatccagatttctcacatttctcaaatatcaacaataaagctgtttagctttcttatcattcatgtgttcactggagtaacaattctaatatccttcataaacttttcctttgcgtttacacattggct

SEQ ID NO: 880179 - DNA, 665 bp, Homo sapiens
tcatccaggctttgttgttccatttacagagcagatttagcatagagtagatttagagtagattttgcaaaattcttaagggctctagggtttttgaaatgggaaatgagaattagcttcaacttaaagtcaccagctcattaagtcctaacaagagtcagcctgtgctttgaagctttgaagccaagcattgatttctcctctttagctgtgaaagtcctagatgacatcttcttccaacagaaaattggaaaatagaagactgaaaatctattgtttgatgaatctacctttatcaattaccttaggtatatcttctgtataacttgctgcagcttctccatcagcacttgatgcttcaccttacacttttatgttatgaagatgacttatttccttaaatcttctctgctggcttcaaacttttcttctgcagcttcttcacctcrctcagccttcagagaattgaagagagttagggccttgctctggaatagggtttgacttaagggaatgttgtggctggtttgatcttgtatccagatttctcacatttctcaaatatcaacaataaagctgtttagctttcttatcattcatgtgttcactggagtaacaattctaatatccttcataaacttttcctttgcgtttacacattggct

SEQ ID NO: 880180 - DNA, 602 bp, Homo sapiens
tcactttttctttcaagtgtgctgaaacaaaatctaccatctgcactgccaaatacttaagtaagatgtgttataacactatttaaaaagatattcttgacagcaggaaaaatatccagcctgtgacagactcaggctctcagggtcttctccttttaactcatagttctaccccattgttgctttcaaaggtaaataatctggtccctagaatgcagtgaagagaatcagtgcagaggcttgggttatgatatgaagtgatcagaattgatggttactgactggacagctactactcagaatgactgctggccatttattgattaatctgtccaagcaccatggcatatttcctcctctaattgctggcaagccaggaagttgtggcgaaaccaagtgttggccaaatatgaagctaccaggaggactgggggttagttgatgccatttrccactttagttggcatcacaagcaagcatggcagattagatgttatctttaccaaaaacgagagtgctttcagtgtacaatttatccttatttttgatatcctgtattgagacacttactattcccttatctataatggcagatgttaagc

SEQ ID NO: 880181 - DNA, 600 bp, Homo sapiens
agtcaaagagattattttggagatttaaggactgcgatgacggccccactgggttttggatttgcatggggcctgtagcccctttgttttggccaatttctactatttagtatgggagcatttatccaatgcctgtacccctattgtatcttggaagtaattaattgcttttgattktacaggctcatacatggaaaggacatgccttgtctcagatgaaactttggatttggacttttgagttaatgctggaatgagttaaggctttgagggactgtcaggaaggcatgattgtgttttgaaatgtgagaaagacatgagatttgggagggcccaggggcggaataatatggtttgtttctttgttcacacctacatctcatcttgaattgtaatcaatccccatctgtcaagggaaggacctagtggcaggtgattggaacaggtgagtggtttcccccacgctgttattgtgataatgaatgagttgtcacaagagctgatggttttaaagtgtggcacttcctcattcttacacgatttctttcttgcctgccgcaatgtaagacatgcctccttccccttccaccatgattatac

SEQ ID NO: 880182 - DNA, 548 bp, Homo sapiens
gagatgcaattctctaaagtattgttcagccagatggatgtgaaaggcattgaatcattctgccagggcttgattgtacacgcaaggctttcattcccatcatgaagaataaagctgaggggaaaagacacagagaacagaaacaggattgaggttgtctcacacccaacaactctcaccctccacctgtgccaggccatctttcagaagcagcagtgaacagaacctactgaagttgcagtggcatgcctagactatggggcaagggctccctcgctgccactgaagctgttgtcagaaaatgcaccactctcagaaactggtgcagggttcacagagttctttcttctccctttccamtcctgtttctctggtctcccctgtgcctgcaagaggtgagtaccaattagttgctgtttccaccccatatttaaaacccaacaccaaacaggttgccactgctgttggcgaggtcactctcagtgctaggaaacttgaagtaatgagctaaaactgtcaagtaaattaatagattccagacttgatgt

SEQ ID NO: 880183 - DNA, 707 bp, Homo sapiens
ccttcaccttctgccatgattgtaagtttccgagacctccgcagctatgttgaactgtgagtaaattacacctctttccattataaattacccaatatcacgcagttctttatagcagcatgaaaatggactaatacagtaaattggtaccaggagtgtgctgctgatataaagatatttgaaaataatctggaagtgactttggaggtgggtaacaggcagaggtttaaacaatttggagtgctcagaagaagakagaaaaatgtgggaaagtttggaacttcctagagacttgttgaatggctttggccaaaatgctgacggtgatatagacaataaagtccaggctgaggtggtctcagatggagatgaagaacttattggtaactagaataaaggtgactctggctatgctttagcaaagagactggtggcatttggcccctaccctagagatctgtggaactttgaacttgagagagatgatttaggatatctggcgagaagaaatttcttagcagcaaagcattcaagaggtgacatgggtgctcttaaaaccattcagttttatgcactcacaaagagatgatttggaattggaacttatgtataaaaggaaagcagggcataaaagttgggaaaatttgcaacctgatgatgtgatagaaaagaaaaacccattttctggggagaaattcaagctggct

SEQ ID NO: 880184 - DNA, 707 bp, Homo sapiens
ccttcaccttctgccatgattgtaagtttccgagacctccgcagctatgttgaactgtgagtaaattacacctctttccattataaattacccaatatcacgcagttctttatagcagcatgaaaatggactaatacagtaaattggtaccaggagtgtgctgctgatataaagatatttgaaaataatctggaagtgactttggaggtgggtaacaggcagaggtttaaacaatttggagtgctcagaagaagatagaaaaatgtgggaaagtttggaacttcctagagacttgttgaatggctttggccaaaatgctgacggtgatatagacaataaagtccaggctgaggtggtctcagatggagatgaagaacttattggtaactagaataaaggtgactctggctatgctttagcaaagagactggtggcatttkgcccctaccctagagatctgtggaactttgaacttgagagagatgatttaggatatctggcgagaagaaatttcttagcagcaaagcattcaagaggtgacatgggtgctcttaaaaccattcagttttatgcactcacaaagagatgatttggaattggaacttatgtataaaaggaaagcagggcataaaagttgggaaaatttgcaacctgatgatgtgatagaaaagaaaaacccattttctggggagaaattcaagctggct

SEQ ID NO: 880185 - DNA, 635 bp, Homo sapiens
taatagatacctagaaatatcactggttataagggtaagaaaatgtagaaatggattattatccataagaagtttttccatattttaaaaattatgtatacttatgaaaaaaatgccagaaaaaatgcagaacacaaactcaaattactctaatatgttttcacttgacaattttctcgtatattcttaagtcttttttctacttaaaattgttatttttttaacgtgaaatgctatgttgttttacctttaagatagcataagcctttctccttgttttcacacagatttcatgaatatttagtagctctatagtagtagctctcatatattaaatgtccaccatatttcagccacagtgctagccttcagtagataccatgatgaccttatgaggcaacagtttttatacccgttttacagataaacataagcaggaaagcaactctactcaggccatgtmatctagaatgggtggttgtggaatccctcctccgtgggggctattaatccctctctgctacacaatttataatcaagtggatattccctggtttattcccacacagttggacatttaggttgtttctaattttgtctgttacaaataatattgagaaaaaatattttatgac

SEQ ID NO: 880186 - DNA, 608 bp, Homo sapiens
acagctgaaaaagaggaactgcccaaatgcagtgatgtcagttactttgctgtcatttggatggtgatagggtgagggaggaggatggagtcactcagagtagaaatggggagaccaagaagagcatccaggggctgttgctgcactaggggttgagggggcctgtgtggattgggtttaagagtcaggggtcatggcttgaggtgaagggagaggagatcctgtaggattctaagcaggttgaggaagagacggagacaggaaagtaagccctttgtaggctgggaccccaggtacccatcaccgtatctggcataggcttatcccatttataattcttctacccctcatcccttagttacaaacttttactcatmctgcaagcatcacatggcttaaaaccctgttctcaaagaagccttttctgatcccctcagggacagatttgctaagcctagtaggtccctcctaggttgccatatttctattgccatcacaacatgtttcacattttgtcttttatcccctgcagactgtaagtccaaaaggggcaagagagtcttgtaggatgctgctgtgtccccagggtgagcacagtgccccacacc

SEQ ID NO: 880187 - DNA, 598 bp, Homo sapiens
tatgctggactacatttattgatttgcatatattgaaccagccttgcatcccagggatgaagcccacttgatcatggtggataagctttttgatgtgctgctggattcgttttgccagtattttattgaggatttttgcatcaatgttcatcaaagatattggtctaaaccactgctcaaggaaataaaagaggatacaaacaaatggaagaacatttgatgctcatgagtaggaagaatcaatatcgtgaaaatggccatactgcccaaggtaatttacagattcaatgccatmcccatcaagctaccaatgactttcttcacagaattggaaaaaactactttaaagttcatatggaaccaaaaaagagcccgcatcaccaagtcaatcctaagccaaaagaacaaagctggaggcatcacactacctgacgtcaaactatgctacaaggctgcagtaaccaaaacagcatggtactggtaccaaaacagagatatagatcaatggaacagaaaagagccctcagaaataatgctgcatgtctacaactatctgatgtttgacaaacctgagaaaaacaagcaatggggaaaggat

SEQ ID NO: 880188 - DNA, 613 bp, Homo sapiens
aaatgacataattttcttaatttacagcagttactcactggactttgatgttgaataaatcccttttttgttgtttgtttcaaaaagctacagattataaactagaattaaggccccagaagtttttaggaaaatgctatttccaraattttgctaagtatatcaaatatgatatattacatttcaaaaatttccaaatcagaaggaaaacgttgaaagattctctgtaaaatacagcagtatgtttatatagttaatagtatagtttctttatcgtgttttctctgacacatttgccagaggctttattcgaaagggtgaagattaaacatattctctcagtttgtgattggttatataaaacaccataccagctatgaatgatggttattctttgttaagtcattcaaatatgatttttaaaaatttaaaagtgaaaatcgtgttttttagagtaagtgtagtgtttgagagaaattacttcatccaataaactgctaatgtttgcaatcccaaagttcaaattatgttaaatgtttatacagtaatattgtcagtaacccaataaattttaatttctgtattctgccagagatggaggctatgaaaaatc

SEQ ID NO: 880189 - DNA, 605 bp, Homo sapiens
caaaagttcaagactgtaatcattgcatatttaagttgtcacagtggagaggcctggcttaatttttttttaagttaacattatttactggtcacagggacattagttctcagtgaaatgcagttaaaggcgattacctcctcattgccacttattctcaatttaccaactaaaaggacaatgtggggrttctgagcacagaagttttatggagcccattttccccttgaaatcttgaacgctattatttgccagttgtttaaaagctagcatttcagttttcaaagctacaatcacatttattttctggttaaagagcaggagaagaaaaacaactccccaggttgaagttaatgtttttaactccttctccccaagagacatatacatatgcaagcttgcacctctaggctctggaaacatgataagccatgtaactgctccgaaccagggaactgtaataaaaccagagcatctaaacacaaggcagaggaacccgagaaggaaggtaaaattctaagcagtctcctttgaaagggtcactgaccaactggggcatacacaaaagaaggagtgatcagagtgacaacagacattgagggtct

SEQ ID NO: 880190 - DNA, 506 bp, Homo sapiens
tcttgtccatatcactatcagcatttttgtcaaagccattcaaccagtctctagggagttccaaactttcccacatttccctatcttcttctgagccctccraactgttccagcctctgcctattaccaagttccaaagttgcttccacatttttgggtatcttttcagcaatgcactctaatcttaccaatttgctgtattagttcattttcatgctgctgataaagacatacaagagactaagaaatctacaaaagaaagaggcttattggacttacatttccacgtggctggagacctcacaatcatggcagaaggtgaaaggcacgtctcacatggcagcagacaagagaagagagagcttgtgcagggaaactcccatttttgataccatcagatctcatgagacttattcactgtcatgagaaaggcatgggaaagacctgcccccatgattcatttatctcccaccaggtccctcccacaacatatgggaattatggga

SEQ ID NO: 880191 - DNA, 589 bp, Homo sapiens
gtagaatctgcaagtgaatatttggagccctttttgacctatggtgtaaaaggaaataccttcacataaaaactacacagaagcattctgagaaacttctttgtgatatgtgcattcttctcaaagagaagaaactttaattcgattgaatagttttgaaacactctttttgtagaatctgcaagtggatatttggaacgctttggagagaatggtgaaaatggaaatatcttcatataaaaactatggagaagcattgtgagaaacgtctttgtgatgtgtgcattcaactcacagagttgaacctttcttttgattgagcagttttgaatccctstttttgtaaaatctgcaagtggatatttggagcattttggggcctctggtgaaaagaaatatcttcacataaaaactatacaaaagcactctgagaaacttctttgtgatgtgtgcatacaactcgcagagttgaaccattcttttgaatatgcagttttgaaacactctttttgtagaatctgcaagtagatactcagagggctttgtggagtattgtggaaaaggaaataacttttcataaaagctagac

SEQ ID NO: 880192 - DNA, 629 bp, Homo sapiens
ttccttttccactataggcctcaaagcactccaaatatccacttgcaggttctgcaaaaagagagatgcaaagctgctcaatcaaaagatgggttcgactctgtgagttgaatgcacacatcacaaagaagtttcccagaattcttctgtgtagtttttatttgaagatatttccttttccacaataggccacaaaggtctccaaatattcactagcagattctacaaaagagagattccaaatggctcaatcaaaagataggctcaactctgtgtgttgaatgcacacataataaaggagtttctcagaataattctgtgtagtttttatattaagatatatcttttcccaaaatagrcctcaaagccctccaaatagctactttgagtttctacaaaaagagtgtaccaaaactgctcagtcaaaagaaactttaaactctttgtgatcaatgcactcatcaccaaggtgtttctctgaatgcttctgtgtagtttttatttgaagatatttccttttccacaataggccacaaaggtctccaaatattcactagcagattctacaaaagagagattccaaatgactcaatcaaaagataggctcaactctgtgtgttgaatgcaca

SEQ ID NO: 880193 - DNA, 617 bp, Homo sapiens
aatgtccacttgtagattctacaaaaagagtgtttccaaactgctcaatcaaaagttaggttcaactctgtgagatgaatgcacacatcacaaagatgtttgtcaaaatgcttctgtctagtttttatgtgaagatatttccttttctaccataggcctcaaagcactcccaatgtccacttgcagattccacaaaagaggttttcaaagctgttcaatcaaaataaatgttcaactctctgagatgaatgcacacatcacaaagaagtttgtcagaatgcgtctgtctagttcttatgtgaagatatttccttttccaccaaaggcatcaaagcactccaaatgtccaatcacaggtattatcaaaagggtgcttcaaaactgctaaatcaaattaaggctcaactctgtgataygaatgcacatattgcaaagaaggttgtcaaaatgcttctgtctggtttttatgtgaagatatttcctttttaccataggcctaaaagtgcacaaaatgtccacttgcagattttacaaaaagagtgcttccagactgctaaatcaaaagaaaggttcaactctgtgggacgagtacatacatcacaaagaagtttcttaga

SEQ ID NO: 880194 - DNA, 617 bp, Homo sapiens
aatgtccacttgtagattctacaaaaagagtgtttccaaactgctcaatcaaaagttaggttcaactctgtgagatgaatgcacacatcacaaagatgtttgtcaaaatgcttctgtctagtttttatgtgaagatatttccttttctaccataggcctcaaagcactcccaatgtccacttgcagattccacaaaagaggttttcaaagctgttcaatcaaaataaatgttcaactctctgagatgaatgcacacatcacaaagaagtttgtcagaatgcgtctgtctagttcttatgtgaagatatttccttttccaccaaaggcatcaaagcactccaaatgtccaatcacaggtattatcaaaagggtgcttcaaaactgctaaatcaaattaaggctcaactctgtgatacgaatgcacatatygcaaagaaggttgtcaaaatgcttctgtctggtttttatgtgaagatatttcctttttaccataggcctaaaagtgcacaaaatgtccacttgcagattttacaaaaagagtgcttccagactgctaaatcaaaagaaaggttcaactctgtgggacgagtacatacatcacaaagaagtttcttaga

SEQ ID NO: 880195 - DNA, 617 bp, Homo sapiens
aatgtccacttgtagattctacaaaaagagtgtttccaaactgctcaatcaaaagttaggttcaactctgtgagatgaatgcacacatcacaaagatgtttgtcaaaatgcttctgtctagtttttatgtgaagatatttccttttctaccataggcctcaaagcactcccaatgtccacttgcagattccacaaaagaggttttcaaagctgttcaatcaaaataaatgttcaactctctgagatgaatgcacacatcacaaagaagtttgtcagaatgcgtctgtctagttcttatgtgaagatatttccttttccaccaaaggcatcaaagcactccaaatgtccaatcacaggtattatcaaaagggtgcttcaaaactgctaaatcaaattaaggctcaactctgtgatacgaatgcacatattgcaaagaaggttgtcaaaatgcttctgtctrgtttttatgtgaagatatttcctttttaccataggcctaaaagtgcacaaaatgtccacttgcagattttacaaaaagagtgcttccagactgctaaatcaaaagaaaggttcaactctgtgggacgagtacatacatcacaaagaagtttcttaga

SEQ ID NO: 880196 - DNA, 617 bp, Homo sapiens
aatgtccacttgtagattctacaaaaagagtgtttccaaactgctcaatcaaaagttaggttcaactctgtgagatgaatgcacacatcacaaagatgtttgtcaaaatgcttctgtctagtttttatgtgaagatatttccttttctaccataggcctcaaagcactcccaatgtccacttgcagattccacaaaagaggttttcaaagctgttcaatcaaaataaatgttcaactctctgagatgaatgcacacatcacaaagaagtttgtcagaatgcgtctgtctagttcttatgtgaagatatttccttttccaccaaaggcatcaaagcactccaaatgtccaatcacaggtattatcaaaagggtgcttcaaaactgctaaatcaaattaaggctcaactctgtgatacgaatgcacatattgcaaagaaggttgtcaaaatgcttctgtctggtttttaygtgaagatatttcctttttaccataggcctaaaagtgcacaaaatgtccacttgcagattttacaaaaagagtgcttccagactgctaaatcaaaagaaaggttcaactctgtgggacgagtacatacatcacaaagaagtttcttaga

SEQ ID NO: 880197 - DNA, 620 bp, Homo sapiens
ccataggcctcaaagggctcagaaatatccctttgcagattgtatgaaaagactatttctgaactactcaatgaaatgaaagcttcaactctgtggtttgaatgcacacatcacaaagaagtttcccagaatacttctgtctaatttttatatgaagatatttcttcattcagaaatatcactcagaaatatccctttacagattgtggaaaaagactgtttccaaactgctcaatgaaaaggaagattcgactctgtgaaatgaatgcaaacatcataaagaggtttctcaaaaagcttctgtctggtttttatgtgaaggtatttcctttttcaccataggccacaaaccactaacaaatatccctttgcagattctccaaaaagactgcttscaaactgctcgatgaaaagaaaggctaaactttgtcacacatcacaaagaagtttctcagaatgcttttgtcttgttttatatgaagaagtttcatttttcaccataggcctcaaagtgctccaaatatccatttgcagattctacaaaaagactttttccaaattgctcaatcaaaagaacggttcaactctgtgtgatgaatgcacatatcacaaagaagttt

SEQ ID NO: 880198 - DNA, 620 bp, Homo sapiens
ccataggcctcaaagggctcagaaatatccctttgcagattgtatgaaaagactatttctgaactactcaatgaaatgaaagcttcaactctgtggtttgaatgcacacatcacaaagaagtttcccagaatacttctgtctaatttttatatgaagatatttcttcattcagaaatatcactcagaaatatccctttacagattgtggaaaaagactgtttccaaactgctcaatgaaaaggaagattcgactctgtgaaatgaatgcaaacatcataaagaggtttctcaaaaagcttctgtctggtttttatgtgaaggtatttcctttttcaccataggccacaaaccactaacaaatatccctttgcagattctccaaaaagactgcttccaaactgctcgatgaaaagaaaggctaaactttgtcacacatcacaaagaagtttctcagaatgcttttgtcttgttttatrtgaagaagtttcatttttcaccataggcctcaaagtgctccaaatatccatttgcagattctacaaaaagactttttccaaattgctcaatcaaaagaacggttcaactctgtgtgatgaatgcacatatcacaaagaagttt

SEQ ID NO: 880199 - DNA, 569 bp, Homo sapiens
gaagtatacacttgcagatgctacaaaaagagtgtttccaaaaagctcaatcaaaagaaatgtttaacactttaagatgaatgtgcacattacaaagaagtctctcagaatgcttctgtatactttttttgagaagccatttcctttttcaccataggcctcagtccactcactaatagcccacttcagacactacaaaagactctttccaaactgctcaatcaaaataaaggttcacatctatgagatgaaagccyacatcacaaagaagtttctcagaaagtttctgtctagtttttatgtgaagatattttctatttcaccttaggcctcaaagagataaaaaatatcccttttcagattctacaaaaaactgtttctgaactgcctcatcaaaagaaaggttcaactctgtgagatcaatgcacacataaaaaaattagtttctcagaatgctactgtctagtttttatgtgaagatattactttttcaccataggtctcaaactgcaaacaaatattcctttgcagatcgcacaaaaagtaagattccacactgcttaatgaat

SEQ ID NO: 880200 - DNA, 623 bp, Homo sapiens
cattgaagcctagggtgaaaaagaaatgtcttcacataaaaattagatagaagcattctgataaacttttttgtggtgtgtccattcatctcgcagagttgaaactttctgtggattgagcagtttggaaacagcctttttgtagaatttacaaaaatatttgtgagcactatatggcccatggtgaaataggaaataccttcacacaaaaaytagacagaagctttctgagaaactactttgtgatgtttgcttccgtgtcacagggttgaaactttcttttgattgagcagtttggaaacactctttttgtagaatctacaaatgggtatttggagtgctttgaggcctatagtgaaaaaagaaatattttcaccgaaaaactagatagatgtattctgcaaaacttctttgtgatgtgtgcattcatctcatagagttgaatctttctttggattcagcagttttctaaacagtccttttgtagaatctgcaaacggataattctgagcccactgagtcctatgctgaaaaaggaaatatcttcacataaaaacctaaaaactagacagaagcattctgagaaacctctttctggtgtgtgcattcatctcacagagttg

SEQ ID NO: 880201 - DNA, 628 bp, Homo sapiens
tgtgagatgaatgcacacatcaccatgaagtttctcagaatgattctgtgcagtttttagttgaagatattcccatttccaccataggccacaaatggccccaaatatccacttgtagattctacaaaaagatagtttcaaaactgttcaatgaaaaaataggttcaacaccgtgagttgaatgcacacatcacagagaagtttctcagaaagtttctgtgtagtttttatgtgaagatgtttccttttacacartagacctcaaagtgctccaaatattcacttgcagatacttcaaaaagattgtttcaaaactgctcaatcaagagaaatgttcatctctgtgagatgaatgcacacatcacaaagaagtttctcagaatacttctgtctgttttttatgtgaaggcatttccttttccacaacaggccacaaaaggctgtaaatgtccacttgcagatactacaagaagagagtttcaaaatggcttaatcaaaagataggttcatctctgtgaattgaatgcacacatcacaaaggagtttctcagaatacttctgtctagttttcatgtgaaggcatttccttttcccccataggcatcaaatggttccaaacatacacctg

SEQ ID NO: 880202 - DNA, 623 bp, Homo sapiens
caacactgtgagatgaatgcacatatcgcaaagaagtttctccgaatgattctgtgcagtttttatgtgaagatatttccttttccacaataggaatctaagcactccaaatatcaacttgcagattgtacagaaagagtgtttcaaaactgctcaatgaaaagaaaggttcaactctgtgagatgaatgcacacatcaccatgaattttctcagaatgattctgtgcagtttttatgtgaagatatttccttttccacaataggaatctaagcactccaaatatcaacttgcagattgtacagaaagagtgtttcaaaactgctcaatgaaaagaaaggttcaactctgtgagatgaatrcacacatcaccatgaattttctcagaatgcttctgtgtagtttttagttgaagatattcccatttccaccatacgctgctaatgcctccaaatatccacttgcagattctacagaaagagagtttcaaaactgttcaattaaaagacagattcacctccgtgagttgaatgcacacatcacagagaagtttctcagaaagcttctgtgtagtttttatgtgaagatatttccttttacacaacaggcctcaaagtgctccaa

SEQ ID NO: 880203 - DNA, 600 bp, Homo sapiens
cgctccaaatatccccttgcagtttctactaaaagagtgtttccaaacggctcaatcaaaagaaagtttcaactctgtgggatgaatgcacacaacattaagtagtgtctcagtaattttctgtctagtttttatgtgaagatatttcctttcctactataggcctgaaagtgctgcaaatatccgtttgcagatactgcaaaaagactgtttccacactgctcaatcaaaggaaatgtccaactctgtgagttgaatgcacgcatctcaaagagattacttmtaatgattctgtctagttttgatgtgaagatatttgcttttccaccagtggcctcaaactctccaaatatccacttgcagattctacaataagagtgtttcaaaactgctcaatcaaagaaaggttcaacactgtgagatgaatgcacacgtcacaaagcactttcttagaatgcttctgtctagcttttatgtgaagatatttcctttttcaccataggctgcaaagcgctccaaatatccctttcagattctacagaaagagtatttcaaaactgttcaatcaaaagagaaactcaactctggtgatgaatgcac

SEQ ID NO: 880204 - DNA, 600 bp, Homo sapiens
cgctccaaatatccccttgcagtttctactaaaagagtgtttccaaacggctcaatcaaaagaaagtttcaactctgtgggatgaatgcacacaacattaagtagtgtctcagtaattttctgtctagtttttatgtgaagatatttcctttcctactataggcctgaaagtgctgcaaatatccgtttgcagatactgcaaaaagactgtttccacactgctcaatcaaaggaaatgtccaactctgtgagttgaatgcacgcatctcaaagagattacttctaatgattctgtctagttttgatgtgaagatatttgcttttccaccagtggcctcaaactctccaaatatccacttgcagatyctacaataagagtgtttcaaaactgctcaatcaaagaaaggttcaacactgtgagatgaatgcacacgtcacaaagcactttcttagaatgcttctgtctagcttttatgtgaagatatttcctttttcaccataggctgcaaagcgctccaaatatccctttcagattctacagaaagagtatttcaaaactgttcaatcaaaagagaaactcaactctggtgatgaatgcac

SEQ ID NO: 880205 - DNA, 609 bp, Homo sapiens
gcacagatcacaaataagtttctcagaatgctgctgtctagttttaatgggaagagatttccttttccaccataggcctcaaagctctccaaatagccatttgcagatactgtaaaaagactgtttccaaactgctgaatcaaaagaaaggttgaactccatgagttgaatgcacacgtcayaaagaagtttctcagaatggttctgactagtttttatgtgaagatattttcttttccaccataggcctcaaagcgctgaaaatattcacttgaagattctacagaaagagagtttcaaaactgctcaaacaaaagaaagattcaactctgtgagatgaatgcacacatcacaaagaagtttctcagaatgcttctgtctagttttatgtaaagatatttccttttctactataggccacaaagcactccaaatatcaacttgcagattctgcagaaagagtttttcaaagctgctcaatcaaaagaaaagttcaactctttgagatgaatgcacacatcatgaagttcctcagaatgcttctatttttatgtgaagatatagccttttctaccatagaccacaaaacgctccaaatatccccttgca

SEQ ID NO: 880206 - DNA, 631 bp, Homo sapiens
catcaagttaccaatgactttcttcccagaattggaaaaaactactttaaagttcatatggaatcaaaaaagatccctcatcaccaagtcaatcctaagccacaagcacaaagctggaggcatcacgctccctgacttcgaactatactacaagkctacagtaaccaagacagcatggtactggtaccaaaacagagaaatagatcaatggaacagaacagagccctcagaaataacgctgcatatctaaaactatctgatgtttgataaacctgaacaaaaccagcaatggaaaaggattccctgtttaataaatggagctgggaaaaatggctagccatatgtagaaagctgaaactggatcccttccttacaccttatacaaaaattaattcaagatggattaaaaacttaaacgttagacctaaaaccataaaaatcctagaagaaaacacaggcattaccattcaggacataggcatgggcaaggacttcatgtctaaaacaccaaaagcaatggcaacaaaagccaaaattgacaaatgggatctaattaaactaaagagcttctgcacagcaaaagaaactaccatcagagtgaacaggcaatgtacaaaatgggagaaagttt

SEQ ID NO: 880207 - DNA, 536 bp, Homo sapiens
cagtagttttgaatctctctttatgtcgaatctgcaagtagatatttgaagcccttttcagcctatggaggaaaaggaagtatcatgaaataaaaactacacggaagcattctgagaatcttcttttggttgtgtgcattcatctcacagtgttgaacctttcttttggtagagcatttttgwaacactgtttttgaaaaatctggaagaggatatttggagcactttgaggcctattgtggacaagtaaatatgataacataaaaactataaagaagcattctgagtaacttcatttgatgtgtgcattcaccacacagagttgaagctatcttatgattgagcagttttgaaacactctctttgtataatcttcaagttgaaatttgaagcactttgaggcctactgtggaaaagtaacatcttcacataaaaattgcacagaagcattatgagaatcttctttgtgatgtgtgcattcatctcacagatgtgaacctttcttttggtagagcagttttgaaacacggtttttg

SEQ ID NO: 880208 - DNA, 612 bp, Homo sapiens
gctctcatttttcttaagatttttcaatcaacttccagtttctgattctgactttttctaataagtgaacacctactgaagaacatcagcaattttgtgcatggaaattgaacggggaaaaataccgtttgcctcagcaggggagtatcctgacattcattgttttcttatattttattgtaaaccaataatggacccaaaaagtgtttattgcagaggaggttatgattaatttttctggtaagtggacaaaagtattcctttaaacctccctgtgtgcaagatacaagataaatattrtaatgttattaaaagcaaatattgtaatattttttcttataggtttctcatttttacttcaaaatactaataaaatttattccgaatttattattttaatgagacttggcattgccaatacagcacatactgcagagaattctatttccattcaattaaaactagttaagaaacatctgttcaaaaacttttcttagaaaaagaattataacccattttcaattttgtttaacttcatgaataatttccttttttttgtaattttacagtggatgtaatttgaaagagtactaatgtttcattatcaggaat

SEQ ID NO: 880209 - DNA, 612 bp, Homo sapiens
gctctcatttttcttaagatttttcaatcaacttccagtttctgattctgactttttctaataagtgaacacctactgaagaacatcagcaattttgtgcatggaaattgaacggggaaaaataccgtttgcctcagcaggggagtatcctgacattcattgttttcttatattttattgtaaaccaataatggacccaaaaagtgtttattgcagaggaggttatgattaatttttctggtaagtggacaaaagtattcctttaaacctccctgtgtgcaagatacaagataaatattataatgttattaaaagcaaatattrtaatattttttcttataggtttctcatttttacttcaaaatactaataaaatttattccgaatttattattttaatgagacttggcattgccaatacagcacatactgcagagaattctatttccattcaattaaaactagttaagaaacatctgttcaaaaacttttcttagaaaaagaattataacccattttcaattttgtttaacttcatgaataatttccttttttttgtaattttacagtggatgtaatttgaaagagtactaatgtttcattatcaggaat

SEQ ID NO: 880210 - DNA, 612 bp, Homo sapiens
gctctcatttttcttaagatttttcaatcaacttccagtttctgattctgactttttctaataagtgaacacctactgaagaacatcagcaattttgtgcatggaaattgaacggggaaaaataccgtttgcctcagcaggggagtatcctgacattcattgttttcttatattttattgtaaaccaataatggacccaaaaagtgtttattgcagaggaggttatgattaatttttctggtaagtggacaaaagtattcctttaaacctccctgtgtgcaagatacaagataaatattataatgttattaaaagcaaatattgtaatattttttcttataggtttctcatttttacttcaaaatactaataaaatttattccraatttattattttaatgagacttggcattgccaatacagcacatactgcagagaattctatttccattcaattaaaactagttaagaaacatctgttcaaaaacttttcttagaaaaagaattataacccattttcaattttgtttaacttcatgaataatttccttttttttgtaattttacagtggatgtaatttgaaagagtactaatgtttcattatcaggaat

SEQ ID NO: 880211 - DNA, 647 bp, Homo sapiens
tatccagaatctacaaggaacttcaacaaatttacaaaacaaaaaacaaaaaacaaaaaaaaacaccccatcacaaagtgggcaaaggatatgagcagacacttctcaaaagaagacatttatgcagccaacaaacatgacaaaaaactcatcaccactggtcattagagaaatgcaaatcaagaccacaatgagataccatctcaagccagttataacggagatccttaagaagtcaggaaacaacaaatgctggagaggatgtggagaaataggaacccttttacactgttggtgggagtgtaaattagttcaaccattgtggaaaacagtgtggcaattcctcaaggatctagaactagaaataccatttgacccagaaatcccattaccagtatakggccaaaggattataaatcattctactataaagacacatgcacacgtatgtttattgcagtactatttacaatagcaaagacttggaaccaacccaaatgcccatcaatgatagactgcttaaagaaaatgtagcacatatatgccatagaatactatatagccataaaaaagaatgagttcatgtcctttgcagggatatggatgaagctagaaaccatcattctcagaaaactaacataggaaca

SEQ ID NO: 880212 - DNA, 638 bp, Homo sapiens
gcttcctgcctattctacatgcagaggtgtaaattaatcattatcatagaagatctttcttgactattgagcagtttcacagcttatgacaatatgtatcattgactcttaaggaaaataaagcatcaagaatgcattgttttctaaccaaaaacatcatccacagcacttgtcaatcttagactcattccttaaagaaaaattaatatacttaggcaaaatatctttgggggttctaatttcatttataaggtatactrtttttttaaagatataaaaaactgggtggcttatacttttaacaaaaataatggttttgcaaactaatctacatttagggaactaaataaattctagcagagagtgttaatatcacaatattctctgagtagagagaatcgtgttcagtttttttttcaaattaccatgaagtgaaaacaaggtaagatacagtagaaaatattagatgaaaaaatctaattgttcagttacagtgaataattctcatttattcacaacaatttttgaacattactgagactacaaaatagtttgtgtagttttaaaatacatttccttttaatgtttttaaataaatgtccctataattactgatatagtttggccatgtccctacc

SEQ ID NO: 880213 - DNA, 585 bp, Homo sapiens
tccacaagtgtgtgtaatcgggagttaatagtgttgaattacaccttgctttttgatagtacttaagttttttaaacatttttgcagttatcatttcattttaaattttacaaataaaccctgtggctccagtagtgaaatattgtcccttttttaacagatttgaagacttgtcagtaaggctcagaggtttgcttgatgacactgggtgatcagacatatgagcgtctccaaagacatctggacatcaatttttttttttcagacggagtctcgctctgtcacccaggctggagtgcartggtgtgatcttggctcactgcaacctccacctcccaggttcaagcaattctctgcctcagcctcccgagtagctgggactaaaggtgcatgccactatgcccggctaatttttgtatttttagtagagatggggcttcaccatcttggccaggctggtcttgaactcctgacttcgtgatccacctgcctcggcctcccaaagtgctgggattacaggcgtgagccactgcgcccggccacatcaaatattaaagtatggcaagggatgacatggattttcac

SEQ ID NO: 880214 - DNA, 585 bp, Homo sapiens
tccacaagtgtgtgtaatcgggagttaatagtgttgaattacaccttgctttttgatagtacttaagttttttaaacatttttgcagttatcatttcattttaaattttacaaataaaccctgtggctccagtagtgaaatattgtcccttttttaacagatttgaagacttgtcagtaaggctcagaggtttgcttgatgacactgggtgatcagacatatgagcgtctccaaagacatctggacatcaatttttttttttcagacggagtctcgctctgtcacccaggctggagtgcaatggtgygatcttggctcactgcaacctccacctcccaggttcaagcaattctctgcctcagcctcccgagtagctgggactaaaggtgcatgccactatgcccggctaatttttgtatttttagtagagatggggcttcaccatcttggccaggctggtcttgaactcctgacttcgtgatccacctgcctcggcctcccaaagtgctgggattacaggcgtgagccactgcgcccggccacatcaaatattaaagtatggcaagggatgacatggattttcac

SEQ ID NO: 880215 - DNA, 585 bp, Homo sapiens
tccacaagtgtgtgtaatcgggagttaatagtgttgaattacaccttgctttttgatagtacttaagttttttaaacatttttgcagttatcatttcattttaaattttacaaataaaccctgtggctccagtagtgaaatattgtcccttttttaacagatttgaagacttgtcagtaaggctcagaggtttgcttgatgacactgggtgatcagacatatgagcgtctccaaagacatctggacatcaatttttttttttcagacggagtctcgctctgtcacccaggctggagtgcaatggtgtgatcttggctcactgcaacctccacctcccaggttcaagcaattctctgcctcagcctcccgagtagctgggactaaaggtgcatgccactatgcccggctaatttttgtatttttagtagagatggggyttcaccatcttggccaggctggtcttgaactcctgacttcgtgatccacctgcctcggcctcccaaagtgctgggattacaggcgtgagccactgcgcccggccacatcaaatattaaagtatggcaagggatgacatggattttcac

SEQ ID NO: 880216 - DNA, 577 bp, Homo sapiens
ctgaatgtatttaatggtccatttatatgttcttttatgtaacatgtagtttaataaagttcctgtttatgagagtcatgtttcatctcagcttcttccatggatgtgtctgtgtgatcttgctgggagagtattcaatttcctgcccagagagaagcagagatccaggaggctagggagggttgggatacagctgacttgtcctccaaaggctcaagagcctaaatgaggctgttggctgtgtgtcttcttgatagcacagaacctgctcataattgagggcttagggagtgggccttgccccaggccgtggggatgtaaccccgcctctgacacgcaggctgtcgatgragtgcgcagctcacgttattccatgctgagctgagttttttgtcatctccgtgggcctggcaagtctaaatggtgtcctgggtgtcctgcattttggttcaggacaccattaggaaatcacaactcacctcatggctgactcaggaatgagcagagaggagggagagatggcttgatatgaccggcattgtgcatatttgaaaaggagtggcgattgtgcctcaga

SEQ ID NO: 880217 - DNA, 594 bp, Homo sapiens
tattagaattaataaattcaataaatttgctggctataaagtcaatacataaaaatcaattatatttcaaaatatccacaacaaataattagaaagctaattttaaaacttgatgccatttacaatagcattaatagaatcaaacatttaggaataaattcaacaaataagtaaaagatctctatacataaactataaacattttctgacattaaagaaaatctaaataaatctaagaaaatctaaataaatctaaataatacttgtggattggaacacatagtstaaaaatgtcaatttcccttcaaattcatccatagattcaatgtaaacctcaaagatatcttggcaggcttattttgttttgtttgcatgtggaatacaaaggaccaagagtgtttaggacaatcttgaaaaacatcactgaaacacttacactagataacacaagtaataagaatgctggataattcagtcactgtggtattggcagaaagagagacaagtacatcaatggaacagaatagagtacaaaaactagaccaacacttgatttataacaaagatggtattgtacagaagggaaaggacagt

SEQ ID NO: 880218 - DNA, 566 bp, Homo sapiens
gtgaacaagatcaagattttcccctcatggggcttaaatttctatgtaaaggggactgaaaatcacccgtaaatacatatatcatgtattgctaaaggctgtaaataaaattactaagtataatgagctaaagaatgactacatgagggatcaggggataatctcactgactagtgagaaaaatcctctcaaaggaagtaaattttgacttgaaacttaaatcatgagtagaggcagcccagataaaggtctcagaatagagaaccccaggaaaaactaacaatatttgtaaaagacttcagaatcaaatatgacacccaagtgtatttgcagagggggaagtgaatgaaaactgtataaaacaaggtcagaaaagttgtcaggaatcacattatgtagcctcatggtaaggwccattttccattttagatatattacagtacaggaagaagttttaagcagaggagtgatgggtaagacacgacactttgagaacacaattttggcttctgtatatacagaggatattccaggttggagtgagaatagtaggctattgttatagg

SEQ ID NO: 880219 - DNA, 502 bp, Homo sapiens
tttcactttcaataaaggatagaacaactaggcagaaggtgaacacatggaagatgtgaacactacatttaaactacattcaacagaaatctatataacactccactcagcaatagtagatatattatcctcaagttccaaagggttctccagaatataccatgtgttaggccataaaatgaacctcaataaatttaaatgattaaagccatacaaaatatattcttcaagcagaacaaagttaaattagaatgtaataagagaaaaattgaggaatttacaaatgcgtggaaattaaataacacagttataaataaccaattggtggaagagattatatgcraggcagtttgagattaatctaaatgaaaatacaatgaaccaaaatggatttgttacagctgaaacagtgtttacagagatatctgcagctgtaaatgtctatcctaaagaggaaaatatatttgcatcaatacataacaattcacataaagaagctaaa

SEQ ID NO: 880220 - DNA, 553 bp, Homo sapiens
attgttcataatctaatgtggaacacatattcctcctttgttctactccaggtgctggtattttgcccttctagatcctcctgtgaggcatcacaccatcaccaccaccaccagaaaaataactcctgaaagtttagaatgttagtgggaaataactcttatattgcattgatatgaaaaattgtagaagttttatagaaaataagtcttatgttgcctggtcaaagctggctacatttgaatgggtttctttataaaaatttgttttaatagacttgtgatctgagggatcaaaattgatgcccatttatcaaacaagatgggccwaaggctaaggaaacaaaagttacttaggagtccagtgttcaggacccagatggcatggcaaatttccaaattcctaccactataaggaaaactacacctcagctaaacttcttaacaacagagctctcaggctgatttacagcccaaaccaccacagctctgcaggacagaggactgactttacaaatattcttttctgattagctattgcagaacttaagccagt

SEQ ID NO: 880221 - DNA, 644 bp, Homo sapiens
accagaaaaaaaaggaaaaaaaaaacacactgagttttttttaaagatcaataacaattttaaaactcacagctatattaagaaaaaaagagaaatctcaaatactaaaatcgtaaataaaagaggtgacagtacaacagatgccacagaaatgaaaaarattacaagagactaatgtgagcaaccgtatgccacaaaactgggcaacctagaataaatttataaattcctagaaacacaaaccaccatactgaatcacggagaaataaaaaatccaaagagacctgtaactagtaagaagattcaaccagtaatcaaaaaccccccaaaaaagaaaattccaggtccagataacttcactggagaattttaccaaacatttcaagaagaattaatgccaatcctctgcaaaatattccaaaaatgttcaaaaaccagaaggggacattccaatccattctatcaggtcaacatttatctggttccagagccagatgaacaccttttgtaataaaaagactcaaagaattagtaatatatggaaactcctcagtaaataaagattgtacatgaaaagctcacagctaacatcatactcaatggtgaaaaactaaaatcttttcctctaggatcaggaataagat

SEQ ID NO: 880222 - DNA, 655 bp, Homo sapiens
gagatgaaatcttgcctgggctggagtgcagtgatgcgatctcagctcactgcaacctccacctcccgggttcaagcaattctcctgcctcagcctcccaagtatttgggattacagtcactcccgaccaggcccagctaattttttgtgtgtttttagtacagagaggatttcactttgttggccagtctggtctcaaattcctgacctcgtgatccacgtgccttggcctcccaaagtgctgggattacaggcatgaaccaccaagcccggccccaacttctcctaatgttgctattttgatcttcttttttaaatcatcaatgttctcaatagcatctagaatggtkaatcctttccggtaggttttcaattattttgcccagatctatcaaaggaatcactttctagagaagctatagctttatgaaatatatttttaagtgataagacttgaaagttgaaattattctgtgatccaagggcactagaatgaatgttgggttagtaggcatgaaaacaatattcagctctttatacatctctgtaaaagcccttgagtaccaggggcattgtcagtgagcggtaatactttgaagtaatcttatttcttgagcagtaggtgtcaacagtgggcttaagatattcagtaaac

SEQ ID NO: 880223 - DNA, 660 bp, Homo sapiens
ccaccactacctctttatggcaacacccactctactccaacctcccatccctaacacctggcaactaccaatttgtgttccatccatctctacaattttatttcaagaacacaatataaacggaatctgatagtatgtaactttttttttctttttttagacagagtcttggactgtcacccaggctggagtgcaatggcatgatcttggctcactgccacctccgactcctgggttcaagggattatccttcctcagcctccygagtagctgggattacaggcgctctccaccacacccagctaattttttgtagttttagtagagatggggtttcactattttggccaggctggtctcgaactcctgacctcgtgatctgccagccttggcctcccaaagtgctgggattacaggcatgagccaccacgcccgtccgatagtatgtaacattttaagattggcttttctcattcggcataattaccttaagatacatccaaattgttgcttgtatcaatagttcattccttcatattgctaagtaatattgaatggtatggatggaacacagtttgtttaaccattcacccattgaaggacatttgagttgcttccagtttttgatattacgaataagctgctaagaatattcatgaa

SEQ ID NO: 880224 - DNA, 660 bp, Homo sapiens
ccaccactacctctttatggcaacacccactctactccaacctcccatccctaacacctggcaactaccaatttgtgttccatccatctctacaattttatttcaagaacacaatataaacggaatctgatagtatgtaactttttttttctttttttagacagagtcttggactgtcacccaggctggagtgcaatggcatgatcttggctcactgccacctccgactcctgggttcaagggattatccttcctcagcctcctgagtagctgggattacaggcgctctccaccacacccagctaattttttgtagttttagtagagatggggtttcactattttggccaggctggtctcgaactcctgacctcgtgatctgccagccttggcctcccaaagtgctgggattacaggcatgagccaccacgcccgtccgatagtatgtaacattttaagattggcttttctcattcggcataattaccttaagatacatccaaattgttgcttgtatcaayagttcattccttcatattgctaagtaatattgaatggtatggatggaacacagtttgtttaaccattcacccattgaaggacatttgagttgcttccagtttttgatattacgaataagctgctaagaatattcatgaa

SEQ ID NO: 880225 - DNA, 601 bp, Homo sapiens
taacttataaattaaatttctgcccaagttactttggcctaagcccaagaatgaacaaagggcagcttggaggttaaaggcaagattgagtcagttaggtcagatctcttttactgtcacaattttatcactgttctaattttttgcaaaggcaatttcatcgtggccctctttttgacctcataagcagaactttggccacccgctgggacctgctggcttatgccctgtgttggaatggacacttgagtcaggccctcattctggccacagggtataggaaatagtgctccaggaagattagagctgcttggagatggttgagaggggccaatttggctccaaatattgaggcaagtggtgaaaatggagagctgcagcactgggctatggacaaggcatccaaggaagtaaccagccagaagatatcacctgcctatggcagctgcctaaatggactgctgargaataaatgggtcctacgttatctgctaaggatgtatttcccctctttctctcttttttaatgagcttcttattttagaacagtttcagagtcacagaaaaattgtgaagatgtgtacagagcttgcagtcttcc

SEQ ID NO: 880226 - DNA, 687 bp, Homo sapiens
ctttagagggaaggttacagatgtgagatgtggggcttggagagcgcttgctgggtcagtgagttcatttgagatttaggattttaagccctacctggtggggtctccccttgccccttggcctgggtgcagctgctgtattcctgctgcaggctcaacctgggcccgtgcctagattagcatctttttaggctcaagtccctccatctgctttaggaaaaaaaagcttcacggtcaaattcagtttgaaaaacttggtgatttccaaggtccatcagcattttgagaagccctgcagggaagagacccaaaattaactagggttaattttgttcatccttgactttctctgagggatgagatccttttcacctacaaagcctgttgctggccttggaaggygtgttctatacaaaccaccttggagaaccaagggaggaagggcccctgtctcaggcagggaagtgaagacaggagaagctggccatgaccttctcactcccctaaaggacaaactgggggcagtggctgtagtcctgcccttggggaaggaagagagcaagtggcccaagaggcagggctagagagaagatcttagaaccaaatacactctgaggaactgttttgggctttaaactaggagttgacaaactagaccacaatggaatcacctggggcaattttgaa

SEQ ID NO: 880227 - DNA, 662 bp, Homo sapiens
aaatttgtgctaaaagagaaagtgctgcaggtctcctctctattgccatgtttggctgatttcaacatagcaaagcaatgtgaaatctacagttttaacagggccatgttatcctttggggaaaacttcaattatgctaataatgataccagatatggttctaaattttaaaaatataagacrattgtattattttccacatgctctttcattgcagactcctctacttgccatcctcatagcattttatttttgtttagctgttcacacaaaaaaagaaaaccaattaagcttcttttgtttgtttcatttaaagtaggtgtttcaaagtgcaaacagctgcagtgaatgtaaataacgaatgttggccccaagtactgccagtttgagctccatacttaaagacacaagaggtctttcactcctcgtttcactgatggcttttatttggtgaaacataaggaacattataccaaatagtcactaaaacatgcatgtctctaaaattgcatatgttgcagtaattttcactgtctaggccacttgtaaatggaagcatttccatacagattgtccaaagataaaatgtaaattagccaaataaaattgagcatggtagagaaaaagctgaagttctgaggtgttttagaaaaagcacacct

SEQ ID NO: 880228 - DNA, 525 bp, Homo sapiens
gaaaaaaaaaaaagaaacagaagaagagacatcaaaatggataccacagaaataaaaaaaaaatcattagagactaccatgaacaagaatataccaataaatttgaaaacctagaggaaatggatatattcctggaaacatacaacctaccaagattgaaccaagaagaaatagaaagtctgaacagaccaataagaagtaatgagactgaattagtaataaaacatctcctaacaaagaaaagtccaggaccaaattgcttaatctgaattctaccaaagtttaaagaagaattaataccaattcttctcaaactattccaaaaaattgaagcwgataaaactctttgtattagtttgttctcacactgttataaaaaactacctgagactgggtaatttatgaagaaaagaggtttaattgactcacagttccacaggcttaacaggaagcatggctgggaggcctcaggaaacttacaatcatggcaaaaggtgaggaaaagcaagcaccttcttcacatgg

SEQ ID NO: 880229 - DNA, 626 bp, Homo sapiens
ttaaaggataaacaataaaaatcattcccaaatgggaaccatggtagatggaggatatgtggtagtagaaagacttctcagtgtagaattttttgtatatcattttgatgtttgaagcatacaaacctggtaataaaacatggatctacaggacagtacccacatacaaacaatatttgtagggaacaggttttcctgtaactcacagccctaagtaggagccatataaccatgggagcagtcctttgaatatacaaagttaagagatattttctttaggttttgagacagtatcccctacttcattaaagttggtctcttcttaactgagtagatttaatttgaaaaggttagttcaactagaaataggacatgatttcagttgaagccraagtatatactattatagcactagtattacacgtgtcttatggaaaacttgttaccactgacaaattctggatgaaatttcaggtgttctcatagcccagaacattgaggaaaatcaccttttttccccctttcctaaatcttgagtcctcagaacttctgacaaaagagtttatgggtccattcctaacaattagatttttttgtttttttgcttcccttcgaagtgagattat

SEQ ID NO: 880230 - DNA, 660 bp, Homo sapiens
cctcctggactgagccaatgtagtctggatagtagaaaggaccttagccaagaaaccaggaacagcctctctgaatctctttctgcaattgtgtgtttccagaaaaattgcttctttgagtttgttttctgatcaggaaaatgaggaagtttgattacatcaaggcttctcaagttctaattctatcacattcacctaaggtggttccaaaatatacagattcccagatctgactgaaggacacattgtagaggttgggctgaggtctctgtatcagactgggcgtaaagtgtaatgtcctgtcctgccacttattaactgggtgacctagagtaagttacttcatgactcgtatatttctcataggtaaagcagggatgataatatctctacttcatatgtccccgggagggtaaaatgatagaatcctttttaagtagcaagtatattgcctgtcacatattaatcattcaacagatgttatatattatttgtatagcccmcagtattcactgtgtgtgtgtgtgtgtgtgtgcgcgcgcgcgtttggtgcaaggtagacgatccataagtatctgctgcgtaaataaaagttgtttttttttttttagcaacttcttttgttctcagatctgaaatgattagcccaggaattacttc

SEQ ID NO: 880231 - DNA, 598 bp, Homo sapiens
cttggagagcaataagcattggccataggtttcagaatgagaagatttggtgttgctgaaagggctgagcaagctgaaccaaacactttcactggataattaattattttaaaggctaagtttcaaggattgtgtagcctttgttcaacrcatgcagtacatgtatctcccagtttaccaatgactaatagtgtaaaataagacaaggagaaaatggataatagccttttgacagacttagcctagattacaggtaagcatggattactgggaaacagaactcacaaattaacatccatataatgttttcttttttaacttttaagactcagttgaaaaattattgccaaaaataatactctctgtagttgtatttcacattataggaaggtctgcctgttggcactcgattcttctagttatcctgtgagacagatgaggcatgttttattatcttcattttatatatgaagaaatgaggccacagataatatggtccaacgtcacatagtagttgtgtagcagaaaaggtttccaacaggtaaatggtgtttccatttatgcacctcccacttactcttcacgtcactgtaatcag

SEQ ID NO: 880232 - DNA, 586 bp, Homo sapiens
actcagcataattattttgtgatttatccgtgttgttgagtacatgagtcatttgttcctttttctaaatatatcacaatttgtttatctaaatttctgtttatagatatttgggttgtttccagtttcagctgtcattaataaagctactataaacattcatgtacaaatctttttgtaaacatgttttcatttctcttgggtaaatatytagtaaaggaatttctagaccataatgtaaatacatttttacctctatttaaaaaaacaccaaacagtttctaaaactgtttgcttttctgtttaatgattactttttcactagtatttttggtgatttaaaagtttagtttataagcaaagtttaccataatagaaaaattctgcatgattggaaatggtttagtgtatattaaaagctggtgaagagaattagaagcctattatagtaacagaataatggatctctaaagatatctgtgtactaatccctggaacctgtgaatatggtactttaaatggcaaagagggattaaagttgttgatggaattaaagttgttaatctgctggccttgggatacggag

SEQ ID NO: 880233 - DNA, 626 bp, Homo sapiens
actataaagctactctaatcaagaatgtgtggggttttgttgaaaagatagatagatagatcgatggaacaaaatagacaattcagagatagacccacactttttcagttgattgatttttaacaatggtgcaaaggcaaatcaatggataaagtacactctcttcaacaaatggcattagaataattatatttttattaaattaaaacaaacttcactctataccttaaattatatacaaatattaactaaayataggtaataggtataaatattaaacctaaaaataaagtctaaaatattatattgaagaaactatctgaaattttggaaaagggaaagatttatgagaaacaataccaagagcatgttccataaaagaaaactggctgtgttgaattccatcaaaatggagaactgctcttgtaagacaatgtgaagagaataaagagacaaaccacaaactggtagaaaatatttgcaaatcatatatttctttttttttttttaatttccataggtttttggggaacaggtagtatttggttacacgagtaagttcattagtggtgatttgtgaaactttggtgcacctatcacccgagcagtatacactgaacctgatt

SEQ ID NO: 880234 - DNA, 626 bp, Homo sapiens
actataaagctactctaatcaagaatgtgtggggttttgttgaaaagatagatagatagatcgatggaacaaaatagacaattcagagatagacccacactttttcagttgattgatttttaacaatggtgcaaaggcaaatcaatggataaagtacactctcttcaacaaatggcattagaataattatatttttattaaattaaaacaaacttcactctataccttaaattatatacaaatattaactaaacataggtaataggtataaatattaaacctaaaaataaagtctaaaataytatattgaagaaactatctgaaattttggaaaagggaaagatttatgagaaacaataccaagagcatgttccataaaagaaaactggctgtgttgaattccatcaaaatggagaactgctcttgtaagacaatgtgaagagaataaagagacaaaccacaaactggtagaaaatatttgcaaatcatatatttctttttttttttttaatttccataggtttttggggaacaggtagtatttggttacacgagtaagttcattagtggtgatttgtgaaactttggtgcacctatcacccgagcagtatacactgaacctgatt

SEQ ID NO: 880235 - DNA, 589 bp, Homo sapiens
catatcaagtttagaattcttattgagatttttaaagtttccttcaggcaattataacctcactgcattttcatcctttctaaaacttctgtctctctcaatcctactcatcatttcaaatcttgttcaaggttgatttcttttacaaaaccaggctcaactcctatggttgttgttggaaagtacagaattctcatagcatattggagaagactgtaaccctcattctgkaaaatttttcattttctgatcaaaagtcaagaaacaacagactgcctactagtattagttattatgccttgaatcagggatgtagagatatttgtggcatggccattgccaagagaaggttattgtaatgatccagaaatagtgggatggtagccttctgatgaatttgctctcaatgggtcatgtttacttcctttcaacatatttctgtctttgtaactctctgatgcagtatgaatattaaataataattgtcttgctggtgaattttcttttttttttgtttattgattgaatggtttggttttcttcttcaatttttatgttaggttcagggtacgtgtatagggttgttata

SEQ ID NO: 880236 - DNA, 662 bp, Homo sapiens
aaaaacttcaggaagcatatgggtaatgtcttttatttggatcttttgggtataaaaaaagatttctggtcactggatattcaggtggaagtaaaatgatataacaaatgcggttttgaagatgaaaggaggtagccattagtcaagaaatgagggtcacttgtagaagctataaaaaccaaggaaagccaggcatggtggctcacgcctgtaatcccagcactttgggaggycgaggcgggcggatcacgaggtcaggagatcgagaccatcctggctaacacggtgaaaccccgtctctactaaaaatacaaaaaattagccaggcgaggttgcgggtgcctgtagtcccagctactcgggagcctgaggcaagagaatggcatgaactccagcgggcggagcctgcagtgagcagagatggcgccactgcactccagcctgggcaacagcgagactccgtctcaaaaaaaacaaaaacaaaacaaaaacaaaaacaaaaccaaggaaatagattctctcctggaacctccagaaaaggacacagccctggtgatactttgaccttagtccaagaggaggaggagtttgtgaacatttgaatgcttcagtccctcaaggcttttgcccagatcacctcagtaacatttggcctgtattca

SEQ ID NO: 880237 - DNA, 670 bp, Homo sapiens
catacactcattcattcaacagatatgccttaagttccaattgttggccacactttggagaaggaaatagagtctacaacaatgtgcattgaggataacagcatttggtagatttgttgtatgaatttaatgagaaaataaaaaaatcttagcattgtttttttaagaagactaaataaatgttcactgtttcattgttctctgagcttccagaagtttctgccatctgacaatagtaggagattatgggtaaactgcagaatcaatttatgcttcctccatatcagaaagtcagatgaatctcaagaaataactaaacaattgtggccaagaagcaatgtgatgttttttcatattcttaaaataaattgagtgattcaaaaattaaacatcatcattttctggggtcatcactgagcacgaaattttaatttgatccttgaaaggaaccacyatatgttccatttgaagtctgagaaaactgaatcccttcagcattgtcataaattgagaatcaggggaggtgctatgtcagaaattgagagcactgagtcaaattttcctcctaaacagcttccaacgttagttaattagccaagttcgaatttaggataattctttttaattgaagaaagtgggtattcacaaactctgcttcagtaattgcaag

SEQ ID NO: 880238 - DNA, 607 bp, Homo sapiens
actataaagacacatgcacagatatgtttattgtggcactgttcacaatagcaaagacttggaaccaatccaagtgcccatcaatgatagactggattaagaaaatgtggcacatattcaccatggaatactatgcagccataaaaaaggatgcattcatgccctttgcagggacrtgaatgaagctggaaaccgtcattctcagcaaactaacacaaggacagaaaaccaaacactgtatgttctcactcataaatgagttgaacaatgagaacacatggacacagacgggaacatcacacactggggcctgttgtgaggtggggtctaggggagggatagcattaggagaaatacttaatgtagatgacgggttgatgggtgcagcaaaccaccatggcatgtgtatacctatgtaacaaacctgcacattctgcacatgtaccccagaacttaaagtataatttaaaaaataataaaaaaaggaagataaattgctttttttgataggaattgtgtaaatttatcagaatatactagaatttctgtgtttgtatggcacaaacctgttgccgtcctacaaacagcaaatacatgtatatatgaa

SEQ ID NO: 880239 - DNA, 583 bp, Homo sapiens
cctaaaataaaaacaccttatttaaaagaaacaaggatacaaatcgcataagacttctattcaagaagcattcaaggacgaaaaatgtggagtgaaatttttttttttttttttgagacagagtcttgcactgttgcccaggttggagtgcggtgacgcgatctcggctcactgcaacctctgcctcccrggttcacgccattctcctgcctcagcctcccgagtagctgggactacaggtgcctgccaccacatccggctcatttttttgtattttttagtagagacagggtttcactgtgttagccaggatggtctcgatctcctggccttctgatctgcccacctcggcctcccaaagtgctgggattacaggcgtgagccaccgcacccggcctggagtgaaatatttaaagtgtgacaataacccaccaagctacaattattatccatagaaattttccttcaaaagtaaaggaacaataaagactttctcagacaaacagcaactgagggaatttgtgagcaatagacttgccttgaaaggaatgttaaaagaagttcttcagaaagaagggaaatt

SEQ ID NO: 880240 - DNA, 583 bp, Homo sapiens
cctaaaataaaaacaccttatttaaaagaaacaaggatacaaatcgcataagacttctattcaagaagcattcaaggacgaaaaatgtggagtgaaatttttttttttttttttgagacagagtcttgcactgttgcccaggttggagtgcggtgacgcgatctcggctcactgcaacctctgcctcccaggttcacgccattctcctgcctcagcctcccgagtagctgggactacaggtgcctgccaccacrtccggctcatttttttgtattttttagtagagacagggtttcactgtgttagccaggatggtctcgatctcctggccttctgatctgcccacctcggcctcccaaagtgctgggattacaggcgtgagccaccgcacccggcctggagtgaaatatttaaagtgtgacaataacccaccaagctacaattattatccatagaaattttccttcaaaagtaaaggaacaataaagactttctcagacaaacagcaactgagggaatttgtgagcaatagacttgccttgaaaggaatgttaaaagaagttcttcagaaagaagggaaatt

SEQ ID NO: 880241 - DNA, 649 bp, Homo sapiens
aaggttgctccaaaaagtgaattgctaaccctaactgatgcctaattgaatgccttaaactcatacaaacttttctttttttaacttattaaattttctttttttaaaattattattatactttaagttttagggtacatgtgcacaatgtgcagattacttacatatgtatacatgtgtcatgcctggtgtgctgcaccaattaactcgtaatttagaattaggtatatctcctaaagctattccctccccccttcccccaaccccacaacagtccccagagtgtgatgttccccttcctgtgtccatgtgttctcattgttcaattcccacctatgagtgagaatatatrgtgtttggttttttgttcttgcgatagtttactgagaatgatgatttccaatttcatccatatccctacaaaggacatgaactcatcattttttatggctgcatagtattccatggtgtatatgtgccacattttcttaatccagtctatcattgttggacatttgggttggttccaagtctttgctattgtgaatagtgctgcaataaacatatgtgtgcatgtgtctttatagcagcatgatttatagtcctttgggtatatacccagtaatgggatggttgggtcaaatggtat

SEQ ID NO: 880242 - DNA, 617 bp, Homo sapiens
cgaggacaactaactaactttatttaataaacacaccctgaagtctgaattctaaaattagtttaccctctccaacacaagattccttcatcattggctgctcatcaagttaaaagttatcaggagaggcaagtgcaatgccaacattggatgactacagcagctatacactttaggacttagaaagactattcagggtctagaaataccatttgacccagcgatcccattactaggtatatacccaaaggactataaatcatgctactgtaaagacacatgtgcatgtatgtttattgaggcactattcacaatagcaaagacttggaaccaagccaaatgtccatcaatgatagacaggattaagaaaatgtggcacatacacaccatagaatactatgcagccacraaaaaggatgagttcatatcctttgcagggacatggatggagctggaaatcatcattctcagcaaactatctcaaggacagaaaaccaaacaccgcatgttctcactcataggtgggaattgaacaatgagaacacatggacacagggcagggaacatcacacaccagggcctgttggggggtgggggactgcgggagggatagcatt

SEQ ID NO: 880243 - DNA, 647 bp, Homo sapiens
attttaatacctttaaatttaatttttctaaaaatgcatttcattatactttataaaagcattaaaccacaatcagctggaatttaattttaaaaaacctgattatttaactcagataacaagaaaagccctgctgtaaaacaacatagacatgtcatttattattaaaactttttgctatataatttctcagatcattttttttctgttcaaaatatgttgtgtggaattcaagtttaaattagataaaatcaactaggcatggtggcttatatcccacggtggctgtaatcccagcactttgggagcctgaggcaggaggattgcttcaagccaagagttcaagattagcctggacaacataacaagaccctgtctccacaaacaaacaaacaaaaataataaaaaaaaaawtaaaaattaaaagggaaagagagaaaaaagaaaaaaaaaattaaccaggcctggtgatgtatgcctatagtcctaactacttgtgaggctgaggtgggaggatcacttgaacccacgagtttaaggctacagtaagccatgattatgccatcgcactctagcctgggtgacagagtgagacactgtctcagtcgatcactcaattaaataaaatcttgtgatacttcagattt

SEQ ID NO: 880244 - DNA, 647 bp, Homo sapiens
attttaatacctttaaatttaatttttctaaaaatgcatttcattatactttataaaagcattaaaccacaatcagctggaatttaattttaaaaaacctgattatttaactcagataacaagaaaagccctgctgtaaaacaacatagacatgtcatttattattaaaactttttgctatataatttctcagatcattttttttctgttcaaaatatgttgtgtggaattcaagtttaaattagataaaatcaactaggcatggtggcttatatcccacggtggctgtaatcccagcactttgggagcctgaggcaggaggattgcttcaagccaagagttcaagattagcctggacaacataacaagaccctgtctccacaaacaaacaaacaaaaataataaaaaaaaaaawaaaaattaaaagggaaagagagaaaaaagaaaaaaaaaattaaccaggcctggtgatgtatgcctatagtcctaactacttgtgaggctgaggtgggaggatcacttgaacccacgagtttaaggctacagtaagccatgattatgccatcgcactctagcctgggtgacagagtgagacactgtctcagtcgatcactcaattaaataaaatcttgtgatacttcagattt

SEQ ID NO: 880245 - DNA, 593 bp, Homo sapiens
gccagtctatctgctaaggcatagcaagagtgacctttcctttagttcccgataagtaccttatctccatctgagaccacatcagcctgtacttcattgtccatatcactatcagcattttgatcaaaaccattcaaccagtctctaggaagttccaaattttcccacattttcctttcttcttctgagccctccaaactgctccaatctctgcccattacccaattccaaagttgcttccacatttttatgtatttttataaaagtgccctgctctgctggtaccaattttctgtrttagtctgttttcacagtgctataaagatactacctgagactagataatttatacagaaaaaatgtttaattgactcacagttctgcatgactggggaagcctcagaaaacttaacaatcatggcagaatgtgaaagggaagcaaagacctgcttcacatggtggcaggagagagagagagagatcaagggggggagtgccacactttaaaatcatcagctcttgtgagaactcactcactatcatgagaacagcatgggggaaactgccccgtgatccaagtacctcccaccagg

SEQ ID NO: 880246 - DNA, 598 bp, Homo sapiens
gtctcttgaatatgcaatttcaatatgatgaggtaaggtgtgtgggagcaaaacactatggaaacacagagggaaggtacctgctttatgcaagcctacataagaagaatttcaaaaggtagagatatttataacatacctaaaggataaatttggaaaaaaaaaaaaaaaaagaaagaaaggctgggcatggtggttcacacttgtaatcccagcactctgggaggccaaggaggtgaatcacgaggtcaagagattgagaccatcctgggcaacatggtgaaaccctgtctctactaaaaatacaaaaattagctgggcgtggtggcgcacacctgtaataccaactactcagtaggctgaggcaggagaattgcttgaacgggagaggcggggattgcaccmctgcactccagcctggtgacagagcgagagtctgtgaaaaaaaaaaaaaaaaaaaaagagggcaaggtctatgaaaggtcaataggcctgaaggcaagtccacacttggctagatggaggacataaaaaaaaaaaaaaattaggttaaataataccaaaagggtgcaggagtgatgagggaaaagtaagttca

SEQ ID NO: 880247 - DNA, 568 bp, Homo sapiens
ctcagtttttcaccaggggaaagggctagtttctatcccttatatacccagtttatagggttgctgtgagagttcaattcaataatgcaaagagcttgttgcatagcatctaaagcattcaaaaaattcagtaagtgttatctattactactattactaaactaccagggtgcagttcctgtccttcctcaaaacacagaacatttgtgaacaaaagtaatggttttcaaatgtcagtccatggtcaagtactcaacaatctgcaataaaatgagaaaaaaatgagtgaaattatttttatgaagctaaatatattcacttttttaaatgttaagatctttataaattcatagtgataaagtaattgtttgggaattttgaaaacgtatttatgtatttttaattgccaaatttaaasgtcttcaactttatttctgtccataagttgttttcatttttactggccatggatcttgagacctgagaacacgttgctcacgtcactttatcagtatcctttccagatgcttcccccatggtgtcccttgtattggagttcttagtccct

SEQ ID NO: 880248 - DNA, 671 bp, Homo sapiens
attaactgagcacattcactgtagctgacatcatgtaggaagtgggaatttagaagcaaactgacaacgttttgtctcttcataaatttgaattccaatggagaagacaaatatacaaagaaataattacagggtactaggcaaaactggagagaaygtacaagacccaactggagcacgtaaagaggaaacttcaccatatctgaataacgctcattccaatctggtattttcacagttgatctctttgtcttctgtcttcctcttctgtcatgtaagaaaatctgctatcttgtttccagcagtatatcctgtatctagaacactcctggccacattacaagtgctcaatgagtgaatgaatgaatgaatgaatgaggattaaagagtatggtttaagaagtgttcaatttcccacagcttgaaaattgcagaaccaccccactatctgccctagaccctggaggtgaccagcacaggtagtgatatcctatgaacattaaaaccaggctggccaggcacagtggctcacatctttaatcccagcactttgggaggccaagaaacgcggatcacctgaggtcagagtttgaaaccaacctggccaacatggtgaaaacccgtctatactaaaactacaaaaattagctgggcatgttgactggcatttg

SEQ ID NO: 880249 - DNA, 671 bp, Homo sapiens
attaactgagcacattcactgtagctgacatcatgtaggaagtgggaatttagaagcaaactgacaacgttttgtctcttcataaatttgaattccaatggagaagacaaatatacaaagaaataattacagggtactaggcaaaactggagagaacgtacaagacccaactggagcacgtaaagaggaaacttcaccatatctgaataacgctcattccaatctggtattttcacagttgatytctttgtcttctgtcttcctcttctgtcatgtaagaaaatctgctatcttgtttccagcagtatatcctgtatctagaacactcctggccacattacaagtgctcaatgagtgaatgaatgaatgaatgaatgaggattaaagagtatggtttaagaagtgttcaatttcccacagcttgaaaattgcagaaccaccccactatctgccctagaccctggaggtgaccagcacaggtagtgatatcctatgaacattaaaaccaggctggccaggcacagtggctcacatctttaatcccagcactttgggaggccaagaaacgcggatcacctgaggtcagagtttgaaaccaacctggccaacatggtgaaaacccgtctatactaaaactacaaaaattagctgggcatgttgactggcatttg

SEQ ID NO: 880250 - DNA, 620 bp, Homo sapiens
cagccacctgctaccacgcccggctaatttttttctattttttagtggagacagggtttcgccatgttagccaggatggctcgatctcctgacctcatgatctgtccgcctcggcctcccaaagtcctggggttacaggcgtgagccattgcgcctggccttcctccatccttttattttgagcctttctgggtctttgyatgtgagatgggtctcttgaacacagcacaccaatgggtcttcactctttatccagcttgccattctgtgtattttaattggggcatttagcctatttacatttaaggttaatatcgttatgtgtaaatttgatcctgtcatcgtgatgctcgctggttattttgcagacttgttaatgtagttgtttcatagtgccttggtctgtctacttcagtgtgtttttgtagtggctggtgacagtttttcctttcactattcagtgcttccttcaggagctcttgcaaggcaggccttgtggtgacaaattccctcagcatttgcttgtctgaaagggattttatttctccttcacttatgaagcttagtttgcctggatatgaaattctgggttggaaattcttttctttaagaatgttgaa

SEQ ID NO: 880251 - DNA, 620 bp, Homo sapiens
cagccacctgctaccacgcccggctaatttttttctattttttagtggagacagggtttcgccatgttagccaggatggctcgatctcctgacctcatgatctgtccgcctcggcctcccaaagtcctggggttacaggcgtgagccattgcgcctggccttcctccatccttttattttgagcctttctgggtctttgtatgtgagatgggtctcttgaacacagcacaccaatgggtcttcactctttatccagcttgccattctgtgtmttttaattggggcatttagcctatttacatttaaggttaatatcgttatgtgtaaatttgatcctgtcatcgtgatgctcgctggttattttgcagacttgttaatgtagttgtttcatagtgccttggtctgtctacttcagtgtgtttttgtagtggctggtgacagtttttcctttcactattcagtgcttccttcaggagctcttgcaaggcaggccttgtggtgacaaattccctcagcatttgcttgtctgaaagggattttatttctccttcacttatgaagcttagtttgcctggatatgaaattctgggttggaaattcttttctttaagaatgttgaa

SEQ ID NO: 880252 - DNA, 628 bp, Homo sapiens
tatcctctgtggacaaaggatataattttccatagacaaggaatgtttataatttaaggagaaacttttaatggacacatattggggggcaagatagatttgattccaaaaagtcccagaaaaaaagtacatcatcatctgttcgccaagtctttcacagacagactttaaatacatggaagcatactaaatattggagccaaaccagaaggcaaggtaagaactcctgagytgcataatgctggacagatggtggctggagaattcaccagtaacctcaaaatctgcctgtaaagcataaaaagttctagagattctcataattcttaaatactaagtccttctgaaattaggagtccagatctcacccccaaaggatttgaagccaggggtaaactcaaacacaagctgcaacccataccagatctagttcaataagaacttagatcaggtctggcagaagaaggggctttctctgttccaaaattattttatatataagattcaacatacaataaaacataacattatatgagaaacaaaacaaaatgtaaatatcagaaaactatgaccaaaaaaggttatatagcatagaatcaaaactgaaccaagcatgaattttaacagg

SEQ ID NO: 880253 - DNA, 526 bp, Homo sapiens
agaatggctgtaggctgcaactctttatgataaataaagtctcctcttctaaatttataaattgtattatcttaagttgacagaaataaagtctcctcttctaaattcataaattgtgtttttttaagttgacaggataaagtctatttcctctattcactaaatgtgtcctcttagcacattacttagactctttgaaccatagttctccatagaataaggaaaataatattcacctcaaagggttgctgtaagaatagaacaaaaaatataaatgtaaagaacatatacacagtaggcaatcastacctatatgtgatgtgataggaaagccctctttttctatcattacttttagaaggttgctaatttaagttcatgattaatgtgagataaatctacagatttcttcacatttacctgtcctatttctatgcctaagtttgtttatgtataattgtacatatgttgagtacttggagattttgaaacattgaaaacactctgggatcagaggaaaagttcc

SEQ ID NO: 880254 - DNA, 452 bp, Homo sapiens
tttgccatcctatgaaagtaggagaaaggatgctgagaaagccatacccataaggcccaggctcacagggcttaactgggtctgggacttaaccatgagagcaaagaatccccacctccctcttaccactattctagcaccaactgataagcaacagctgactggttgtaaagaagatgcaaaggcatctggagtgccccttccgtgtcacagtcattcaagccacactgaaaaccaraactaagaaatactttcaagcatctcaggccctgcatgaagcccaaggtcacaacaatccatcatcagaatgttaagtttttgacacactgaagataataatggcaataaaacaccccaaacaccccaaaacacagctcaacttctagattgattcggctcctcacgccagggacctggaagaaaagtaggcatgcccaatttcagatattcac

SEQ ID NO: 880255 - DNA, 569 bp, Homo sapiens
ggtgtatacccagtaatgggattgctgggtcaaatggtatttctggttgtagatccttgaggaatcaccacactgtcttccacaatgattgaactaattcacactcctaccagcagtgtaaaagcgttcctacttctccacatcctctctagcatctgttgtttcctgaatttttaatgatcgccattctaactggaatgagatggtatctcggtttttatttgcatttctctactgaccaatgatgatgagcttttttcatatgtttgttggatacataaatgccttcttttgataagtgtctgttcatattctgctcccactttttgatgaggttgtttgtttgtttcttgtaaatttgtttaagttccttgtagattctggatattagccctttktcagatggacagattgcaaaaattttctcccattctgtaggttgcctgttcactctgatgatagtttctttttctgtgcagaagctctttagtttaattagatcccatttgtcaatttcggcttttgttgccattgcttttggtgttttagtcacgaagtctttgcccatg

SEQ ID NO: 880256 - DNA, 706 bp, Homo sapiens
tttctactggtatggattcattaaggtaggcatagtacctgtcttccatctgtagcctgtggtcactttctcctcagggaaataatgtaaaatgacactcaaagaacagcaagaaattccaccagcagagtatgagtaagagttttctcgaaaggtggattatggaatgactagacccagaattgagagggagctgagtctgttggagacacagaaagaggggcagcattgctgtgtaaagagaagcatggaccagagtggaggctggaaggtagaaaaagctratctttgttaaaaggatagactttatcatgagagactggaggggtctggaagagtgttaagtaggtaatgctctctgttacacagtgatcaaaacatggaaactgaagtaacccaggctacaactaagccacatctacacaacagtgaggtgacgactggggtaaataaaaggattgctgatgaatggaggattcctgctacagtttttaatccaacagttaggacccacattgaatgaattatgcaatggctcagtgctagtcaaagaggcaaatcctgggtcaaatgacactatctcttccacaagatattgagcatttcacaaatttcagaagacatttttttttttccactagcgagactacttcagttgtgaactcttccataattatccctttgaaataaatcgatttaatttttt

SEQ ID NO: 880257 - DNA, 706 bp, Homo sapiens
tttctactggtatggattcattaaggtaggcatagtacctgtcttccatctgtagcctgtggtcactttctcctcagggaaataatgtaaaatgacactcaaagaacagcaagaaattccaccagcagagtatgagtaagagttttctcgaaaggtggattatggaatgactagacccagaattgagagggagctgagtctgttggagacacagaaagaggggcagcattgctgtgtaaagagaagcatggaccagagtggaggctggaaggtagaaaaagctgatctttgttaaaaggatagactttatcatgagagactggaggggtctggaagagtgttaagtaggtaatgctctctgttacacagtgatcaaaacatggaaactgaagtaacccaggctacaactaagccacatctacacaacagtgaggtgacractggggtaaataaaaggattgctgatgaatggaggattcctgctacagtttttaatccaacagttaggacccacattgaatgaattatgcaatggctcagtgctagtcaaagaggcaaatcctgggtcaaatgacactatctcttccacaagatattgagcatttcacaaatttcagaagacatttttttttttccactagcgagactacttcagttgtgaactcttccataattatccctttgaaataaatcgatttaatttttt

SEQ ID NO: 880258 - DNA, 706 bp, Homo sapiens
tttctactggtatggattcattaaggtaggcatagtacctgtcttccatctgtagcctgtggtcactttctcctcagggaaataatgtaaaatgacactcaaagaacagcaagaaattccaccagcagagtatgagtaagagttttctcgaaaggtggattatggaatgactagacccagaattgagagggagctgagtctgttggagacacagaaagaggggcagcattgctgtgtaaagagaagcatggaccagagtggaggctggaaggtagaaaaagctgatctttgttaaaaggatagactttatcatgagagactggaggggtctggaagagtgttaagtaggtaatgctctctgttacacagtgatcaaaacatggaaactgaagtaacccaggctacaactaagccacatctacacaacagtgaggtgacgactggggtaaataaaaggattgctgatgaatggaggmttcctgctacagtttttaatccaacagttaggacccacattgaatgaattatgcaatggctcagtgctagtcaaagaggcaaatcctgggtcaaatgacactatctcttccacaagatattgagcatttcacaaatttcagaagacatttttttttttccactagcgagactacttcagttgtgaactcttccataattatccctttgaaataaatcgatttaatttttt

SEQ ID NO: 880259 - DNA, 704 bp, Homo sapiens
agtggatcattttggagatttaagttttaatgattgccccactggatttcagacttgcatgtggcctgttgccccttcattttagccaatttctcccattcaaaatgggtgtatttacccaatgcctgcacacccatcataacttggaagtaactaacttacttttgattttacagactcataggcagaagggaatttccttgtctcagatgagactttggagtgtgkactgttcggttaatattgaaatgagttaagactttgggggactgttgggaaggcatgattggttttgaaatgtaaggacatgagatttgggagggccagagacagaatgatatggtttggctgtgtcctgacccaagtctcatcttaaattttagctcccataatcctcatgtgttgtggcagggacctagtgggaggtaattgaatcatggggttaagttttctcatgctgttctcataatagtgaataagtctcatgagatttgatggttttataaagggcagttcccctgcacatgctctcttgcctgccaccatgtaagatatgccttggtcttcctttgccttccaccatgattgtgaggccttccctgccatgtggaactgtgagtccattaaacctcattttctttatgaattacccagtctaaggtatttcttcatagcagtatgaagtgcactaatacattatgtct

SEQ ID NO: 880260 - DNA, 704 bp, Homo sapiens
agtggatcattttggagatttaagttttaatgattgccccactggatttcagacttgcatgtggcctgttgccccttcattttagccaatttctcccattcaaaatgggtgtatttacccaatgcctgcacacccatcataacttggaagtaactaacttacttttgattttacagactcataggcagaagggaatttccttgtctcagatgagactttggagtgtggactgttcggttaatattgaaatgagttaagactttgggggactgttgggaaggcatgattggttttgaaatgtaaggacatgagatttgggagggccagagacagaatgatatggtttggctgtgtcctgacccaagtctcatcttaaattttagctcccataatcctcatgtgttgtggcagggacctagtgggaggtaaytgaatcatggggttaagttttctcatgctgttctcataatagtgaataagtctcatgagatttgatggttttataaagggcagttcccctgcacatgctctcttgcctgccaccatgtaagatatgccttggtcttcctttgccttccaccatgattgtgaggccttccctgccatgtggaactgtgagtccattaaacctcattttctttatgaattacccagtctaaggtatttcttcatagcagtatgaagtgcactaatacattatgtct

SEQ ID NO: 880261 - DNA, 607 bp, Homo sapiens
gaaagtttttttaaaaaccgtaatttatttggtcttttactaaaaccatttttggaggctgtggatgaagctgaataaatattaggattttttgtttgatacattaattgcatttggtccaaacctaggcagcagatatactttgtggctccaaaatatggaatgagtgaatccccatcttgatcctatgtggctcatatctatcactttgtaattgctggcaattttagagaatttaggtgcattatgtggctttgaagccatatacagtcttttgctatattcactaggtgatggtagtttatgaaatactgtgtaagataatgtgcctggtttccatttctaaatgaaataccgtttatttttatttaaattaaaaaagttttcactcragtgaggaattttttagttttattgaggttagcatacatataataaagtccaaaaaatcttaaatgtggagctcaatgacattttatacacacatgtacaaatacgtgtatattatacacaacagtgtaccaccaaccaaatcaagatatggaatatttccaggacccctgaagattctctcatgcttcttcccaggcaacacccccaccctacc

SEQ ID NO: 880262 - DNA, 718 bp, Homo sapiens
agttcccagaataaagtgaaacttgcatgttatttttttaaattgaggatgaagcaaaatatagccaaggaaggaatacatctgcatatttaatggccaaataaataaatataatacaaccactaagattttcaggagtttacagttactgcaatgataaaatttggtttgtttttctttcaggttattcttttctactttttcctctgatagagcagttgaagcagttaaaaggatttcttaaaaaatctgacaacactgcaaatttatgctgaatacatacagtatctaatttaaagtaaaaggaactaaactttttcccctcacttttgattcttaatattctttatcagctggttgaagagttcctagctctgactgttcatgcttgcaaatacgagttaaaaatactgtgagagttcatttaatttccacttaaaattcacaggaagtcatacttgttaccaggaaacactgtacttcttttagagaatatctaatccagataggctaaattatatccattacactckatcatggctagttggtaaaagctgccaaggaataccttagctatttttgatgagtacaacacttcagtggtgtctcatttccatactgacataagggctaaacaggctttcttcagaaaaacaccttacagaaatctctgaagtgtgctatgcctagatcttccttgagaaaaagatattataga

SEQ ID NO: 880263 - DNA, 621 bp, Homo sapiens
aaaagacaaggttatatttccttttttaattttttttacttttattttaggttcaagggtatctaggtgttcaggtttgttatataggcaaactgcatgtcacaggggtttggtgtacagattattttatcatgcagrtagtaagtataatattcaataggtatttttttctgatcctctccctcctcccacccttcaccctcaagtaggctctgatgtatgttgttcccctctttgtgtccatgtattttcattgtttagcttccacttacaaatgagaatgtgcagtatttaattttcttttcctgcattagtttgctaaggataatggcctccagctccatccatattgctgcaaaggacatgatctccttttttatggctgtgtagtattccatggtgtatatataccacattcttttaatccagtctacagttgatgggcatttaggttgattccatgtctttgctattgcaaatagtgctaagatgaacatatgcatgcatttgtccttatggtagaaggatttttatccccttgggtactcacccaataatgggattgctgggacaaatggtaattctgtttcaagttcgttgaggaatcaccacactgctttc

SEQ ID NO: 880264 - DNA, 657 bp, Homo sapiens
cttatctcaaactgtaatccccacatgtcaagggaggggtctggtgggaggtgattcgaacatgggggagctttcccccatgctgttctcataatgctgaaggagttctcaagagatctggttgtttgataagtgcctggtatttcctctgtacrtttcgctctcctgctgccatgtaacacatgccttgattcccctttgccttctgccttgactttaagcttcctggtgcctcctcagccatgcagaagtatgagtcaattcaacctcttttctttgtaaattacacagtctcaggtagtatctttacagtagtgtgagaatggacaaataaaccatacatgtgtactcaatgtattaacatttttacaccattgccactattgttatcctaccacattgttattttatcattattgtttctatctttctagtttgtggtaaaacaaatgaatcagtttaaaaattacttataaaacagcttcattattatgtagagtaagagggtaattaatctggacattttcaagattctgaactttggtaactgcaaaggtaactggaacttgtgttatttgaagttttgactgatgtaggaatgccactagatgagaagatgattaatatttcagagataagaataacaaagtttccaaa

SEQ ID NO: 880265 - DNA, 628 bp, Homo sapiens
ttccactgagcccaagtgatcctcctgcctcagcctcctgagtcactgggactacaggcatgtagcaccacacctaactggaaaaaaaaaattttttttttaagagatagggtcttgctatgttgcccaggctgatctcaaactcctgtcctcaagtgatcctcctgcctcgacctcccaaagtgctgagattacaggtgtgaaccactgaacctggcccgtttttaaataaaaataataatgcaaataagaaataatttcctaaaagatgtctcaggtrttaagacacctagaaattcagaaaatcaatgaaaataattctgtagcctggaattcaaacattattgaagtctgaagaacaattcccttctctacgtctgtatctggagggaaagaaggctattatatgagagtcactgtggtgttctaaaatatgagaaagagacagaccatttttctgctccttaagatagttatctgaccagctttgttaaaactgggaatctaaggatctcttaactccattttggtttgaagaaagatattaatattgaaatacatagttgcacaccaaatggcagtggggtcagggttggggtacacttttatatctgctctcatttttcca

SEQ ID NO: 880266 - DNA, 546 bp, Homo sapiens
ggagagtctataggaagtatctggggcaaagaaaaggaaagcagcaagaatctggcagtgattgatcccaaggttccactgaagggttaggagggtctgcttctctgctccacttactcctgcaaaaaaccgttgaccgccaaattttggaggagtccctctgccactgtgactctaagcaacactgttgasagctatttaggaagtttttggggacacagcactatgtggctagctcatgttggtatacccacactctccttaggtatgaactgagacaatgggcaccacactggttgtgtgcacatggtacaacactgccttgtctgggggaatttctgccgttgtgctgctgcatgtaccacattccctgtgaacacaccctagaataaactctgattttggcaaccacaaaatactggtgggttcctggagagctgaaggatatctgaaaatctagcccttggtgtgggtcactgctagagaatgaggcagtgcagtctgctaaagttcctttaggacaaagaaaatatgggcatggtgctg

SEQ ID NO: 880267 - DNA, 546 bp, Homo sapiens
ggagagtctataggaagtatctggggcaaagaaaaggaaagcagcaagaatctggcagtgattgatcccaaggttccactgaagggttaggagggtctgcttctctgctccacttactcctgcaaaaaaccgttgaccgccaaattttggaggagtccctctgccactgtgactctaagcaacactgttgagagctatttaggaagtttttggggacacagcactatgtggctagctcatgttggtawacccacactctccttaggtatgaactgagacaatgggcaccacactggttgtgtgcacatggtacaacactgccttgtctgggggaatttctgccgttgtgctgctgcatgtaccacattccctgtgaacacaccctagaataaactctgattttggcaaccacaaaatactggtgggttcctggagagctgaaggatatctgaaaatctagcccttggtgtgggtcactgctagagaatgaggcagtgcagtctgctaaagttcctttaggacaaagaaaatatgggcatggtgctg

SEQ ID NO: 880268 - DNA, 640 bp, Homo sapiens
cttatcttctaatttgataattttgtttggaatccattttgttataattagtttttaagcttttatgattcacttatttttcatctttcatttgcaggagtgtgtaggtttaatattactgcaagttacatagaactctgggaagayaatattttacaaaactttagtcacttaaaaacatacaaatctatgcagagaccataaacaaaaaatgctctaaaatgatatgagctacacttttttatattaaggatgtttatatttgacattcacttcagaaagaggagataggaaggtttaaacagccagcatgccgaaactagtttttcctgaaatggcttttaccatattcacatctggttcatctaattaggtttgcaattgttataccttcaatattcacattttataggcgtgcacttatcaacatagtcagaacaggatatcttttatttttttaagtgataacaatatataacccttagtatttttgttgttgttgttgttctatttgctttattttgtgttttacatttttctaaacactaacatttttcttcatatttatttggatgtagaatctctagctagagtttcttgcttctggtttgtaattctaatttcaatgttcatataccct

SEQ ID NO: 880269 - DNA, 588 bp, Homo sapiens
tggagcatttagcccacttacatttaaggttaatattgttatgtgtgaatttgatcttgtcattatgatgttagctggttattttgctcattagttgatgcagtttcttcctagcattgatagggtttacaatttggcatgtttttgcagtggctggtactggttgttcctttccatgttgagtgcttccttcagaagctctagtagggcaggcctggtggtgacaaaawctctcagcatttgctcgtctgtaaagaattttatttctccttcacttatgaagcttagtttggctggatatgaaattctggattaaaaattcttttctttaagaatgtggaagatcggcccccactctcttgtggcttgtagagtttctgctgagagatcccctgttagtctgattggctttcctttgtgggtaactcgacctttctctctggctgcctttaacatttttccttcatttcaactttggtgaatctgacaattcttgtcttggagttgctcttctcgaggaatatctttgtgccattctctgtatttcctgaatgtgaatgttggcctgctttgctaggttgaggaagt

SEQ ID NO: 880270 - DNA, 666 bp, Homo sapiens
acctcaaaataataagagcctaagagccatctatgaaaaatgcacagccaacattatactgactgggcaaaatctggaagcatccacctttaaaactgtcaaacgacaaggatatcctctctcaccacttctattcaacatagtattggaagccctggccagggcaatcaggaaagagaaagaaataaaatgcattcaaataggaagagaggaagtcacactctgtctctttgcagatgacatgattctatatctataaaatgccataatctcagccccaaagctccttcaactgataaacaactccagcaaagttgcaggatacaaaatcaatgtactaaagtcactagcattcctgtacaccaacaacagccaaactgataatcaaatcagaaaggcaaccccattcacaattgccacaaaaaaaacaataaaatacttaggaatacagctaaccagggaggagaaagatctctgcaacaagcattamaaaacactgctcaaagaaatcagagaagacacaaacaaatgaaaaaacatcccatgctcatggataggaagaatcaatataattaaaatgactagactgcccaaggcaatttatagattcaatgctattcctatcaaactgccaacaatgttcttcatagaaatagaaaaaactat

SEQ ID NO: 880271 - DNA, 687 bp, Homo sapiens
cctcacatttaaaagtgtaagaagaacccatcacctttcacatccattggctgtaaagttgacacatgacatctcatgtccattggctagaatatagtcacatggtgatatttaatcacaaagaggaaatgataaatcgtgtttttctcttgatgatcatgtgccaactaaaattgtaaccctatgtaaaaagtgagcagatattggggcaaccagtaacctgtcaygaagtgttcatgcttcatatttttcctcaaattctttcaagagccatttcttctctaaatagttttacaccaggtttgagttacaaaagaaccctgagagtaatcagatacaacagatgcatcctcattttgtctttctgtattttcatacctccatctctgcagaacatggacatgtggaatcatttgggtggaatatttaatgatgtatgggttttttttttccagcttaaaacaacatcacaagagaacagatgttcccataatgcctacaagcacaacctacttctgtgacaatgagttagcctgtgattttgctcaagtcaggaacagaagcataggcaggcatatgttttcttagggaggtaaaaacagagaccagaggcttgacaagctgataatatttagaggaaacctttggcctttcactcttaatgggacactaatttttcacttcttt

SEQ ID NO: 880272 - DNA, 664 bp, Homo sapiens
tcaaattctctccagcaggatgttctccactcacttttgtctttaagaactagccagattgaggcagtgatactgaagcaatctatgtccagttgctttcaggatatcatgctgtaaaccaagcccaagtttttaaccttggccaaacttttcataggaacttcccatgaagccttaagtagagagtgagagagaggagacaaagtagcaggagtaggtgctagaggaatcacttactcacaaaacctacttcttccttcaggacctgctccaaatccatctctaatatctcatttgcacttagtggatcacaggtgcatatgcccaaacttctggtttgataggctaaatgaaacgtaggcagctcaagaygcatggtcacttggtgtaccacggtcaagtgtacagtatccatgagatcccggtagtaatctaggagctgtttctcaaaaagagaatactctgtaaataggataagcctttgtcctaaacctgaaaagtatacactgtggctgttctattaatggataatagcaggttatgaaacacccatatgtgccacaaatcctgtgaacccatgggatctgatgggtcataaggcccaaatgatacagcagctttcattgcactctgaatctatagcagaatcttctctttctctagg

SEQ ID NO: 880273 - DNA, 586 bp, Homo sapiens
cactgacatcaccatactgtcattcaaacatctcagcccagtcccaccctgtgcagcccccgccccaggcccacccaaatgttctggttccactgtgagcagtcagccttcccacaggctccattaaggccacttgaaagtgtgtgggagaaaaacgctttctgcattcgtgcaagggatttgacatcactaagggagctgtgttgtcaccacattaagctaaaagaaccaccaaacagggccgggcgcggttgctcgagcctgtaatccaagcattttgggaggccgaggtgggcagatcacgaggtcaagagatcgagaccatcctggccaacatggtgaaaccccgtctctactaaaaatacaaaaattagccaggcacggtggcaggtgcctrtagtcctagctactcaggaggctgaggcagaagaattgctttaacccaggaggcagaggttgcggtgaacctagatgtgccactgcactccagcctgggtgacagagtgagactccatctcagggaaaaaaaaaaaaaaaaaaaaaaaaaaaaaagagaaccaccaaacaggagggcaggaggacaggg

SEQ ID NO: 880274 - DNA, 587 bp, Homo sapiens
taactaacctgcacgttctgcacatgtaccctaaaacttaaagtataaaaaaaaaataaaaaacagatgtaactttaaaatatgtgaggagtagtacagttctagtacggttctaacaattattttgggataacaataatacctggatggttgagttacattattgaacaaagtataaaattggcaactcaaataataataatatcaataatttaaataatgaaaacttaatagcctggtgtaaaaagcacatctgacatatcttacattgaaayctttgtataatgaaatacgcattattacaacatatttatagatgaagaaactgaccattcaggtaacatggacaagtagcttcctcaaagttacaataacatgaaaagcacagcctggacaacactgtgattccagtgtttgctctttctaccaaacttccatctaaatgtaaaaggtaatgaaacatagacaacagtatgtaccaattttcatctgtgtatcttcactgatacaaaaaatcttgtaaaaccctttgtgtttgggtctcataaaaacaaccccagtttataattatttaacaattacgacat

SEQ ID NO: 880275 - DNA, 623 bp, Homo sapiens
catcttctgaaatctaggtggaggttcccaaaccccaattcttgacttctgtgcactcacaggctcaacacagcatgcaagctgccaagccttggggcttgcaccttctcaagccatggccttagctctacgttggcccctttcatccatggctggagctgatgggacacagggcaccaagtccctaggctgcacacagcatgaggaccctgggcctggcccaggaaatcacttttttcttctaggcccctagccctgtgatgagaggggctgccatggmgatctcaggcatgccctggagactttttccccatcatcttggggattaacattcagttcctcattacttacataaatttctgcagccagcttgaatttatcctcagaaaatgggattttcttttctattgcattgtcagtctgcaaattttccaaacttttatgctctgcttcccttataaaactgaatgtctttaacagcacccaactcacttcttgaatgctttgctgcttagaaatttcttctgccagatatcctaaatcatctctctcaagttcaaagttccaaaaatctctagggcaggggcaaaatgctgccagtctatttgctaaaacataacaag

SEQ ID NO: 880276 - DNA, 623 bp, Homo sapiens
catcttctgaaatctaggtggaggttcccaaaccccaattcttgacttctgtgcactcacaggctcaacacagcatgcaagctgccaagccttggggcttgcaccttctcaagccatggccttagctctacgttggcccctttcatccatggctggagctgatgggacacagggcaccaagtccctaggctgcacacagcatgaggaccctgggcctggcccaggaaatcacttttttcttctaggcccctagccctgtgatgagaggggctgccatggagatctcaggcatgccctggagacwttttccccatcatcttggggattaacattcagttcctcattacttacataaatttctgcagccagcttgaatttatcctcagaaaatgggattttcttttctattgcattgtcagtctgcaaattttccaaacttttatgctctgcttcccttataaaactgaatgtctttaacagcacccaactcacttcttgaatgctttgctgcttagaaatttcttctgccagatatcctaaatcatctctctcaagttcaaagttccaaaaatctctagggcaggggcaaaatgctgccagtctatttgctaaaacataacaag

SEQ ID NO: 880277 - DNA, 623 bp, Homo sapiens
catcttctgaaatctaggtggaggttcccaaaccccaattcttgacttctgtgcactcacaggctcaacacagcatgcaagctgccaagccttggggcttgcaccttctcaagccatggccttagctctacgttggcccctttcatccatggctggagctgatgggacacagggcaccaagtccctaggctgcacacagcatgaggaccctgggcctggcccaggaaatcacttttttcttctaggcccctagccctgtgatgagaggggctgccatggagatctcaggcatgccctggagactttttccccatcatcttggggattaacattcagttcctcattacttacataaatttctgcagccagcttgaatttatcctcagaaaatgggattttcttttctattgcattgtcagkctgcaaattttccaaacttttatgctctgcttcccttataaaactgaatgtctttaacagcacccaactcacttcttgaatgctttgctgcttagaaatttcttctgccagatatcctaaatcatctctctcaagttcaaagttccaaaaatctctagggcaggggcaaaatgctgccagtctatttgctaaaacataacaag

SEQ ID NO: 880278 - DNA, 590 bp, Homo sapiens
atctgtttggttagctctgaagatgggagggagttgaggtagtaagtagctcaggatagatatcatgagatgtgaataatagagaaaactaggatgtggttgtaatcttaaggaatattctcttagcatggtatggaactggagagtcaatgaatggcaattttagtgcatacatcctaccacaaatttggatggattataaaaccatatttaccaccaacagtcaattcttaatatgccagcaatataatacataataattaaaatcttaggtaatagaaatagattgkcctttaaaacctggatcttcaatttagtagtttgggcatactcaacttctctaaaccttatttttttcatttgtaaaatgaagttatatttgtacctatctcatagacatgtgataactaagtgaataattgctattgtaaatgctcagtaattgttagcagacatcatcatcattggtaagagtactgggctggaggtcattgtattacaacttcaattttgccaacgactagctatggtcttggtcttgggcattcattaaaccttgcttgggctttgggctcctcatttataaaatg

SEQ ID NO: 880279 - DNA, 591 bp, Homo sapiens
ctcacagaaatacaaactaccatcagggaatactataaacacctctacgcaaataaactagaaaatctagaagaaatggataaattcctggacaaatacaacctcccaagactaaaccaggaagaagttgaatctcttaatagaccaataacaaattctgaaattgaagcagtaattaatagcctaccacccaaaaaaagtccaggaccagacggattcacagccaaattctactagaagtacaaaaaggaactggtatcattccttctgaaactattccaaccaatagtaaaagagggactcctccctaactcattttatgaggctaacatcatcctgataygatgacctggtagagacacaataaaaaaagaaaatttcaggtcaatatccttgatgaacatcgatgcaaaaaatcctcaataaaatactggcaaaccaaatccagcagcccatcaaaaagcttatccaccatgatcaagttgggttcatccctgggatgcaacgctggttcaatatatgcaaatcaacaaatgtaattcatcatataaacaaaagcaatgacaaaagccacatgattatctcaatgga

SEQ ID NO: 880280 - DNA, 616 bp, Homo sapiens
atgctgggataactggctagccatatgcagaagactgaagctggacccctttcttacaacatgtattagttcattttcatgctgctgataaaaacatacctaagactggataatttataaataaaaagaggtttaatagacttccagttccacatggctggggagccctcacaatcatggcagaaggcgaaaggcatgtcttacataccggcagacaagagagaataygtgcaggggaactcccctttttaaaaacatcatatctcatgagacttattcattaccacgagaacagtgtgggaaagatctgcccccatgattcagttacctcctactgggtccctcccacgacatgtgggaattacaggagctataattcaagatgagagttgggtggggacacagccaaaccatatcattctgcccataggccctcccaaatctcatatcctcacacttcaaaaccaaccctgccttcccaacagtcccccaaagtcttaactcatttcagcattaactcaagagtccacagtccaaagtctcaattgagacaaggcaagtcccttccacctatgatcctgtaaaatcaaaagcaagttagttatttcctagatac

SEQ ID NO: 880281 - DNA, 676 bp, Homo sapiens
aagtgagggtcaagagactctcctattgccaggatttcaggactccatagtggaaatggaaaccactgaaagtttctactaaccctttcctcgtattaaggagtctccctcagctcccagctgatcctactgagtagactgcctmatttccttccccttccttggtttaggcatttactgtcacttttctattgaattacagtgttctctcttgggtggtctatttgaaatgtgatcatctactcattatgttggttcttcttagtggaggaggtgagtatgaaatacctctagtcggtcatcttgaagctatcctctttcatatcttttccttatcacatcatatctatttccctataggtcctcaaatttattagcacagagttacagtcttaggaattcaattcctctcattctgaactgtgagtaattgtgattgatgttgttatttcgtccttctttcctctctttccttccttactttcatcttttcttttccttctttttttagttcttcccttcctttcaatgaagcacagtagaatgtttatttttttaaatgcaacatccctcacttgaagtctttcaaagactttagaataaagtccaaattatctactaatataaaacaaagtgcttctcaggttggtatttatctacttcggtatctcactgc

SEQ ID NO: 880282 - DNA, 618 bp, Homo sapiens
tgttcacaaactaaattattgtatattcatataatgtgatattcattaaattaatgtaaatttatatttattcattaaaaatatattcgttatttcttaactggaaaaagagatgtgatcttattttaattaatatatacacaaattaaatatctatattatgtacagtgyaagcctagaattgtatactccatggtttatccttatttctttttttttttttaatactttaagttttagggtacatgtgcacaatgtacaggttagttacatatgtatacatgtgccgtgctggtgggctgcactcattaactcgtcatttagcattaggtatatctcctaatgctatccctcccccctccccccaccccacaacagtccccagagtgtgatgttccccttcctgtgtccatgtgttctcattgttcaattcccacctatgaatgagaacatgcggtgtttggttctttgtccttgccatagtttactgagaatgatgatttccagtttcatccgtgtccctacaaaggacatgaactcatcattttttatggctgcatagtattctatggtgtatatgtgccacattttcttaatccagtctatcattgttggaca

SEQ ID NO: 880283 - DNA, 653 bp, Homo sapiens
gccattttaactggactcacatgagaatttccctgccctatcatataaaagctatataactttgggcagatcacataaatgatctaagtgtgttttcttatctgagtaattaaaataagaattgtacttgtttcccagggtttttatactggaaaatactaaattggtaataggtaatgtgcacaacactatgctagggctatttcaaatgttcaataattgctagcttctgctgttattttgttttagaagaattcttttttttcccagtacctagtgtagtgcaatatttcttctgatcttcagatctcagtttaattctcactttcttcatgccagtggamtaataacctgtttctcgtcacagtgaacatcaaaagtctcaagcaattataatggaaatttgttgtgtagtattatcaaacagaatctataaggaactcaaatcaccaagaaaaacaaataatcccatcaaaaagtgggcaaagaacataaatagacatttctcaaaagatgtacagtcatcaaacatattacaaaattctcaacatcactaatcatcagggaaatacaaattaaatccacaatgagctaccacttacttctgcaagaatggccataattaaaaagccaaaaagcagtagctgttcatg

SEQ ID NO: 880284 - DNA, 658 bp, Homo sapiens
aatcccagctactcgggaggctgtggcaggagaatcatttgaacccgggaggcagtggttgcagtgagccaagattgtgcctctgcactccagcctgggcaacaagaacaaaactccatctcaaacaaaacaaaacaaaagtatctttagtcaaaattaaatgatctcaccttagtacaaatgcttccctattggtttccccctttcctagggggaagttggtttgctaaaacacatcatttagaagaagggaccaagaagtttctaacacccagatctgatttatgctccactgtaattgctaccacacattgttacaagcattgaagctatcacaggaagtggtactgtctgatggcgtgactgaagtaaatcccctgtgtggcactcttgatgagcttctggaggtcccctatcctgcttcatacacatgttrggtatacaatgtttacctgtttgtatgtgctggagaagccagcgtttttctgtgcagaggcgaagccctctctttccctgaatgtcagtcatacacataatatcctgagaggagcccataattaggagtgcaattaggggtgtaacatagtgggcagacttgggagatgaaggaaggagacaggaacagagcataatgctttttaacctatccaggcttgat

SEQ ID NO: 880285 - DNA, 641 bp, Homo sapiens
gctcttattattttgaggtacattccttcaatacctagtttattgtgagtttttgacatgaagggatgttgacttttctgaaagccttttctacatctgtggaggtaatcatgtagattatcttcagttcacgacatatttaattccattgcattcatgtatcctgaataatttcagtcctattttgctttccagggtcaacagtattcagttaagcaccactttcttcttgagcaactttcttctctcggttcttctggccccttcactttgttgttcccctgttacttcaatctcctttgctaattcctcctccttttcagctcagtgtgtgaatgttggagtgttcggagtttggtcctgggccctcttctcactatttacactctcttcttaaggatttcaattagtccagaggctctaaatatcatgtatcagtgctttcttattttttgtctaagcrtcacatagaaataattttttaaaaacccaaacagtgctaaaaagcttatttttaaaaagcaggagtatcttatctatcttccccacacctcttcagaaacaatctcttttcatttgtttccttccaggatttacctatttatctccatatttctaaacagcatgcatatcttgctagc

SEQ ID NO: 880286 - DNA, 637 bp, Homo sapiens
ctattagaagatctctgatgggctgagatgattgagtctgggacgatctggcaggaaagaagtccaagtagaccctcctccaaagctccccatgggccactagcagcatttggatgtggagtcagagaacaaaaggaacttagacctccctaagtgtagattccccaacccaatcagttaatgagaaagactgagggggagccttggttcttcccttcttcagcccacaasaagtcccttcagactgagagagcacaagaattctcagataaacaaggtggaatatctcaagagggaccaacttcctgtgagtttggctgtgggggtggttaaagtgattagtctgaacattacaaacagatgtagtcatatgtgtcttccaagctagtaaagcaagttttgtgttgcaaggggtcaaaggcattttcaaagtcaaagaaatgttatcagtctattcctcatctgcaaatcatacaccccacactgaaggagatatgttcaaattctcactgcccacttgtccctgcctactcagtctctccacactccttcttcctcccaagtggagaggcagcagcaagtgctgatggggagtcagggaatgaggcagggggatgagtctcaaaggacctttgtt

SEQ ID NO: 880287 - DNA, 488 bp, Homo sapiens
atggctttataggtggtttttccacagcttcactctgcacttctcttacctgccaccatgtgaaaaagagcatgtgtgcttccccgtctgccatgattgtaagtttcctgaggcctccccagccatgctgaactgtgagtcaattaaacttctttcctttataaatttctcagtcttgggcagttctttacagcagcatgagrgtgggctaatacagtaaattagtactgcagagagtggggcactgctataaagataattgaaaatgtggaagcaactttaaaactggttaacagatttttgaacagtttggagggctcagaagagacgaaaacgtggaaaagtttggaacttcccagagacttggaaggctcagaagacagacagatgtgggaaagtttgcagcttcctagggacttgttgaacggctttgaccaaaatgttgacagtgatatggagaaggaagaccaggctgaggtggtctcaga

SEQ ID NO: 880288 - DNA, 396 bp, Homo sapiens
agattttcaagatgtgagttgtgctactcaattaggaaaaaataaaaagaaggaacaaagctttttccttttttttccactttaaaggtgaagaaagtaaacacatcatgcagatgaaaatggctctagacgttctggctgtaacgttgttatcaatgaaatcctttcccacttgttccagctgagtgaagactgcaggcctcytgtggataaaaatctaaatgcttcaatggcactgaaagacccatgtgcccatcagcattagcaaagctggacatttcttttgcattttctttgtttgggtaagaggcctattttaaattataatatacaagaaggtaagttatgtaaacctcaaagcctatgtattgtaaataacctttcacaaattttaaa

SEQ ID NO: 880289 - DNA, 588 bp, Homo sapiens
attctttttttcccaggtactattccaagtgttttatttatttatttatttatttatttatttatttatattttattttaagttcaggggtacgtgtgcaggatgtgcagatttgtcacacaggtaaacatgtgccatggtagttcgctccacagatcatcccatcagctcgatattatgccyggcatccattagctattcttattgatgctctcccttgtctcccaactccaaatcctccaacaagcctcagtgtgtgttgttccttcccatgtgtcagtgtgttctcatcgttcagctcccacttacaagtggaaacatgcggtgtttggttttctgtccttgtattagtttgctgaggataaaggcctccagctctatctatgtccctgcaaaggacagggtctcactcctttttatggctgcatagtattccatggtgtataggtaccacatttcctttatcgagtctatcactgatgggcatttagttgattccgtgtctttgctattgtgaatagtgatgcaatgaacatgcatgttcattgtatctttatagtagaatgattaatatctctttgtgtatat

SEQ ID NO: 880290 - DNA, 694 bp, Homo sapiens
aaaaacgccaaaagcagaattgcaacaaaagccaaaattgacaaatggcatctaattaaactaaagagcttctgcacagcaaatgaaaactatcatcacagcgaacaggcaacctacagaatgggagaaaacttttgcaatctacccatctgacaaaggtctaatatccagaattcaaaaggaacttaaacaaatttacaagaaaaaacaaaccccatcaaaaagtgggcaaagaatatgaacagacacttctcaaaagaagayatttatgtggctaacaaacatatgaaaaaaagctcaacatcactgatcatcagataaatgcaaatcaaaaccacaatgagataccatctcatgccagtcagaatggtgattattaaaaagtcaggaaacaatagatactggtgtggctatggagaaataggagcgcttttatgctgttgatgagaatgtaattagttcaaccattgtggaagacagtgtggtgattcctcaaggatctagaaccagaaataccatttgacccagaaatcccattactgggtatatacgcaaaggaatataaatcattctactataaagacacatgcacatatatgtttattgcagcaccacttacaatagcacatatatggaaccaacccaaatgtccatcaatgatagactggataaaaaaatatgttgtacatataca

SEQ ID NO: 880291 - DNA, 665 bp, Homo sapiens
ttgctctctgtttgtctgttcttggtatataggaatgcttgcgatttttgcacattgattttgtatcctgagactttgctgaagttgcttatcagcttaaggagattttgggctgagacaatgaagttttctaaatatacaatcatgtcatctgcaaacagagacaatttgactttctcttttcctaattgaataccctttatttctttctcttgactgattgccctggccagaacttccaatactatgctgaataggagtaacttccaatactatgttgaataggagtggtgagagagggcatccttgtcttatgccrgttttcaaagggaatgtttccagcttttgccaatatcgtgtaatattggctgtgggtttgtcataaatagctcttattattttgaggtatgttccatcaatacctagcttattgagagtttttagcatgaaggggtgtgaattttgtcgaagaccttttctgcatctattgagataatcatgtgttttttgtctttggttctgtttatgtgattgattacatttattgatgtgcgtatgttgaaccaggcttgcatcccaggtatgaagccaacttgatcgtggtggataagcattttgatgtgctgctggattcagtttgccagtatgttattgaggatttttgc

SEQ ID NO: 880292 - DNA, 609 bp, Homo sapiens
ggtgagccaaagcaggttggggtgttacctcacccaggaagtgcaaagggcctgggaattccctctccaagccaagggaagccatgagggactgtcctgtgaggaacgctgcattctggcccagatactgtgcttttaccatggtctttacaacctgcagaccagaagattccctcctgtgcctacgccaccatggccttgggtttcaagcacaaaactgggtggccacactgagctagctgcaggagttttttttcataccccagtggcacctggaatgccagcgagacagaaccattcactcctctggaaagggtgctgaagccagggagccaagttgtctggctcggcgggtcccaccccccatggagcctagcaagttaagatccactggcttgaaattctcactgccagcacagcagtctgaggttgayctgggatgctcgggcttggtgggagaaggggcatctgacattgctgaggcttgagtaggtagttttaccctcacagtgtaaataaagcttccaggaagttcaaactaggcagagcccactgcagctcagcaaggctgctgtggccagactgcttctctagattcctcctctctgg

SEQ ID NO: 880293 - DNA, 643 bp, Homo sapiens
ttttggcattttgaggtcttttgtggttctctatgaattttaagattgatcttttctattctttgaaaaatgccattctactcatctgacaaagggctaatatctagaatctacaatgaactcaaacaaatttacaagaaaaaaacagccccatcaaaaagtgggcaaaggatatgaacagacacttctcaaaagaagacatttatgcagccaaaagacacacaaaaaaatgctcataatcactggccatcagagaaatgcaaatcaaaaccacaatgaaataccatctcacaccagttagaatggcaatcattaaaaagtcaggaaacaacaggtgctggagaggatgtggagaaataggaacacttttacactgttggygggactgtaaactagttcaaccattgtggaagtcagtgtgttatgttagaaatccctagattcctcagggatctagaactagaaataccatttgacccagccatcccattactgggtatatacccaaaggattataaatcatgctgctataaagacacatgcacacgtatgtttattgtggcactattcacaatagcaaagacttggaaccaacccaaatgtccaacaatgatagactggattaagaaaatgtggcacatat

SEQ ID NO: 880294 - DNA, 602 bp, Homo sapiens
gtctgagcaaggtagctcagttcagtgctttgagaggccaaggtgggaagatcactggaggccaggagttcaagacaagtctgggcaccataccaagaccctgtttctgaatataaagtagctggctacagtgtgtctgcctttaatctcagctacttgagaggctcaggcagaaggatcacttgagcccaggagtttgagggtgcagtgagctatgattgcaccacagcaatccagcctgggctrtagagcaagaccccatctctaaaaatgaaacagaaaaaaggcttcaattacttaaatgtaatcataccttggttttttgtttgttttgttttgttttgagatggagtttcactcttgttgcccaggctggagtgcaatggtgtgatcttggctcactgcaacctctgcctcccagattcaagtgattctcctgcctcagcttcccaagtagctgggattacaggtgtgtgccatcatgcctgactaattttgtatctttagtagaaacggggtttcaccatgttggtgaggctggtctcgaactcctgatctcaagtgatccacccacctcagcctcccaaagtgctgggattaca

SEQ ID NO: 880295 - DNA, 602 bp, Homo sapiens
gtctgagcaaggtagctcagttcagtgctttgagaggccaaggtgggaagatcactggaggccaggagttcaagacaagtctgggcaccataccaagaccctgtttctgaatataaagtagctggctacagtgtgtctgcctttaatctcagctacttgagaggctcaggcagaaggatcacttgagcccaggagtttgagggtgcagtgagctatgattgcaccacagcaatccagcctgggctgtagagcaagaccccatctctaaaaatgaaacagaaaaaaggctycaattacttaaatgtaatcataccttggttttttgtttgttttgttttgttttgagatggagtttcactcttgttgcccaggctggagtgcaatggtgtgatcttggctcactgcaacctctgcctcccagattcaagtgattctcctgcctcagcttcccaagtagctgggattacaggtgtgtgccatcatgcctgactaattttgtatctttagtagaaacggggtttcaccatgttggtgaggctggtctcgaactcctgatctcaagtgatccacccacctcagcctcccaaagtgctgggattaca

SEQ ID NO: 880296 - DNA, 557 bp, Homo sapiens
acagaagtatatataaacaaacaagtgcagaagcatacataattaaacacatttttgctgttattattttgaacaaacttttttaaaattatactttaagttctagggtacatgtgcacaaggtgcaggtttgttacatatgtatacatgtgccatgttggtgtgctgcacccattaactcgtcatttacattaggtatactcctaatgctatcccttcgccttctccccacccygcgacaggacccagtgtgtgatgttccccaccctgtgtccaagtgttctcattgttcaattcccacttatgagtgagagcatgcagtgtttgattttctgtccttgcgatagtttactgagaatgatggtttccagcttcacccatgtccctacaaaggacatgtactcatcattttttatggctgcgtagtattccatggtgtatatgtgccacattttcttaatccagtctatcattgatggacatttgggttggttccaaatctttgatattgtgaatagtgccacaataaacatatgtatgcatgtgtctttatagca

SEQ ID NO: 880297 - DNA, 557 bp, Homo sapiens
acagaagtatatataaacaaacaagtgcagaagcatacataattaaacacatttttgctgttattattttgaacaaacttttttaaaattatactttaagttctagggtacatgtgcacaaggtgcaggtttgttacatatgtatacatgtgccatgttggtgtgctgcacccattaactcgtcatttacattaggtatactcctaatgctatcccttcgccttctccccaccctgcgacaggacccagtgtgtgatgttccccaccctgtgtccaagtgttctcattgttcaattcccacttatgagtgagagcatgcagtgtttgattttctgtccttgcgatagtttactgagaatgatggtttccagcttcacccatgtccctacaaaggacatgwactcatcattttttatggctgcgtagtattccatggtgtatatgtgccacattttcttaatccagtctatcattgatggacatttgggttggttccaaatctttgatattgtgaatagtgccacaataaacatatgtatgcatgtgtctttatagca

SEQ ID NO: 880298 - DNA, 621 bp, Homo sapiens
acacacaatgaagatgcaggggccggggaaccccagcactcggtaccctttgtccaagattaaaatcggcctgtgggatgtagtgagaaggcaggttgcatgggtgtaactgatgtatcttttccttaacgttattataataatgggtaatttctcaataaagcattctttttggagaaaaaaagaaatagctaagtttatatgagataaaacagactttaaaggtagaacagttaaaaaaaaagacaaagaaggtcattatataatgaaaaagagattaatccagcaataagatataacaattctaaatatatatgttcttaacactggaacacccaaatytgcaaagcaaatattactagatctaaagagagagatagagtgaaataaaataatcatggaagacttcaatatcccattctcaacaatagacagagtatgtagaaaaaaaatcaacaaagacacattggatttaaactgtactttagaccaaatgaacctaacagacatttacagaacattttacctaacaactgcagaatatacattctttccatcagcacatggaaacttctccacaatagactatattctaggccacaaaacaagtctcaacaaatt

SEQ ID NO: 880299 - DNA, 615 bp, Homo sapiens
ctgttgcctgagctggatggagtgcaatggcgtgatcttggctcactgcaacctccacctcccaggttcacgcgattctcctgcctcagcctcccgagtagctgagattacaggcgcccaccaccacacctgggtaattttttgtatttttagtagagacggggtttcaccatgttgtccaggctggtctcaaactcctgaccccatggaacgccctcctcggcctcccaaagtgctgggattacaggcgtgagccaccgcaccccgctatggtgtatttttatcaccaccttctcacaggccctgatgggctactggagaaagaggaagctragtccagggtgggaaatcccctactccacctgaggcaatggagcaggaagatgaaggttgtctccaggcttcctccacttcctgtgcacctactgcaggccaggtccctacacacactgacctgcttccaggagaggatttacagagaagctgaagcgtcaagcccctcctgtggccccggttaatgagtgccaccaattgactacacaagaacacctgaaataccctgagctcataaataaaagaaacctcagagaggttttcccaaatttgacaacaatc

SEQ ID NO: 880300 - DNA, 693 bp, Homo sapiens
cctcataaaataagtttgagaggagtccctccttttcaattgtttggaatagtttcagaagaaatggtaccagctcctctttgtacctctggtagaattcagctgtaaatccgtctggtcctgggctttttttggttggtagkctattaattattgcctcaatttcagaacttgttattggtctattcagggattcaacttcttcctggttcagtcttgggagagtgtatgtgtccaggaacttatccatttcttgtagattttctagtttatttgcatagtggtgttcttaatattatctgatggttgtatttctgtggggtcagtggtgatatcccctctatcatttttttttgtgtctatttgattcttctctcttttcttctttattagtctagctagcaggtttttttttttttccctcaaaaaatcagctcctagatttgtagattttttgaagggtttttttatatctctatctccttcagttctgctctgatcttggttatttcttgtcttctgccagctttggggtttgtttgctcttggctctctagttcttttagctgtgatgttagattgtcaatttgagatctttctacctttttgtgttatagcatttagtgctataaatttctctgttaacactgctttagctgcatcccagagattctggcatgttatctctttgtt

SEQ ID NO: 880301 - DNA, 693 bp, Homo sapiens
cctcataaaataagtttgagaggagtccctccttttcaattgtttggaatagtttcagaagaaatggtaccagctcctctttgtacctctggtagaattcagctgtaaatccgtctggtcctgggctttttttggttggtagtctattaattattgcctcaatttcagaacttgttattggtctattcagggattcaacttcttcctggttcagtcttgggagagtgtatgtgtccaggaacttatccatttcttgtagattttctagtttatttgcatagtggtgttcttaatattatctgatggttgtatttctgtggggtcagtggtgatatcccctctatcatttttttttgtgtctatttgattcttctctcttttcttctttattagtctagctagcaggtttttttttttttccctcaaaaaatcagctcctagatttgtagattttttgaagggttttttwatatctctatctccttcagttctgctctgatcttggttatttcttgtcttctgccagctttggggtttgtttgctcttggctctctagttcttttagctgtgatgttagattgtcaatttgagatctttctacctttttgtgttatagcatttagtgctataaatttctctgttaacactgctttagctgcatcccagagattctggcatgttatctctttgtt

SEQ ID NO: 880302 - DNA, 494 bp, Homo sapiens
ttctcatgatagtgaataagtctcatgagatctgatggttttatgaaggggagtttccctgcataagttgtcttctcttgtctgccgccatgtgagacatgccttctactttccaccatgattgtgatgcctccccagccacatggaactgtgagtccattaaacctctttcttttgtcaattgcccagtstctggtacatctttatcagcagcatgaaaacaagctaatacagtaatttggtactgacagtggggtgctgctgaaaagatacctgaaaatgaggaagtgactttggaactgggtaacaggcagaggttggaacagtttggagggctcagaagaagagaggaaaatgtgggaaagtttggaactccctagagacttgttgaatgcatttgaccaaaatgctcaagatgatatgaacaacgaaatccaggctgaggtggtctcaaatggagataaggaacttgttgggaactggagtgaaggtga

SEQ ID NO: 880303 - DNA, 670 bp, Homo sapiens
agtgcagaagggaaatgtggggtgggtgcccccacacagagtccccactggggtgctgtctagtggagctgtgagaagaatgccactgtcctccagaccccagaatggtagatccacccacagcttgcaccgtgcacccagaaaagccacagacactcaatgccagcacaggaaagcagccaggagggaggctaccttgcatagccagaggggctgagctgcccaaaaccatggggacccagctcttgcatagcatgacctagatgtgagacatgaagtcaaagaakatcaatctggagctttaagatttgactgcactgctggctttcagacttgcatggggccttcagcccctttctttgggccaatttctcccatttggaacaagtatttacccaatgcctgtacccctattgtatctaggaagcaactcacttgctttttattttacaggctcataggccaaagggacttgccttgtctcagatgaaactttggactgtgtacttttgagttaatgctgaaatgaggtaagactttgggagacttttgggaaggcatgattagttttgaaatgtgaagacatgaaatttgagaggggccaggtgtgaatgatatggttcggctatgttcccactcaaatctcatcttgaattgtagttcccataat

SEQ ID NO: 880304 - DNA, 670 bp, Homo sapiens
agtgcagaagggaaatgtggggtgggtgcccccacacagagtccccactggggtgctgtctagtggagctgtgagaagaatgccactgtcctccagaccccagaatggtagatccacccacagcttgcaccgtgcacccagaaaagccacagacactcaatgccagcacaggaaagcagccaggagggaggctaccttgcatagccagaggggctgagctgcccaaaaccatggggacccagctcttgcatagcatgacctagatgtgagacatgaagtcaaagaatatcaatctggagctttaagatttgactgcactgctggctttcagacttgcatggggccttcagcccctttctttgggccaatttctcccatttggaacaagtatttacccaatgcctgtacccctattgtatctaggaagcaactcacttgctttttattttacaggctcataggccaaagggacttgccttgtctcrgatgaaactttggactgtgtacttttgagttaatgctgaaatgaggtaagactttgggagacttttgggaaggcatgattagttttgaaatgtgaagacatgaaatttgagaggggccaggtgtgaatgatatggttcggctatgttcccactcaaatctcatcttgaattgtagttcccataat

SEQ ID NO: 880305 - DNA, 670 bp, Homo sapiens
agtgcagaagggaaatgtggggtgggtgcccccacacagagtccccactggggtgctgtctagtggagctgtgagaagaatgccactgtcctccagaccccagaatggtagatccacccacagcttgcaccgtgcacccagaaaagccacagacactcaatgccagcacaggaaagcagccaggagggaggctaccttgcatagccagaggggctgagctgcccaaaaccatggggacccagctcttgcatagcatgacctagatgtgagacatgaagtcaaagaatatcaatctggagctttaagatttgactgcactgctggctttcagacttgcatggggccttcagcccctttctttgggccaatttctcccatttggaacaagtatttacccaatgcctgtacccctattgtatctaggaagcaactcacttgctttttattttacaggctcataggccaaagggacttgccttgtctcagatgaaastttggactgtgtacttttgagttaatgctgaaatgaggtaagactttgggagacttttgggaaggcatgattagttttgaaatgtgaagacatgaaatttgagaggggccaggtgtgaatgatatggttcggctatgttcccactcaaatctcatcttgaattgtagttcccataat

SEQ ID NO: 880306 - DNA, 643 bp, Homo sapiens
gcttcagttttcagcatatggctagccagttatccaagcaccatttattgaatagggattcctttctccattgcttgtttttgtccaccttgtcaaagatcatacaattgtaggcatatggctttatttctgagttttctatcctgttccattgctctacgtgtctgtttttgtaccagtaccaaggaattgcaacaaaaacaaaaatagttaagtaggaccttattaaactaaaaaggttctgcacagcaaaataaactgtcaacagagtaaacagcctacagaatggaagaaaatattcacaaactatgcattaaacaaatccagaatttgtcctatgcaagaacaaatatcyagaatctgtagggaacttaaataaatcaacaaacagaaagcaaataactccattagacaatgagcaaaggatatcaacagacacttctgaaaagaagatatacaagaagccaaaaaacatctgaaaaaatgctcattatcaccaatcatcagagagatacaaatcaaaaccacaatgagatatgatctcacaccagtcagaatggctattattaaaaagtcaaaaaacaacagatgatgatgaggctgtggagaaaagggaacacttatacactattgttgagaatgt

SEQ ID NO: 880307 - DNA, 633 bp, Homo sapiens
tagacaaaagtaaactgtctagtcatctgctaaaccatttctgggcaaataaagacaaaaggtccagaaaaacatcccttagttcaaaaatctcaccaacccaaaacaaaaatgaagagactcattcactagtccatggtctcccccaaaaataggaatccattctgttttcccatcaccaaagtcagtgcctagcatctaagggggtttgataattctggtgttaacaagttctgctctaaaactgtaagtatctcctagagagcattaaactagttataattagtcatttacaccatgatgggcttgacaaatgtgcagttaacaacaaatgtggggttaacaaatttcagaaattaycaaagcatctatgttggcacagtaaggaatacagaacaaaccagaacatatccttggctcctggaaaactaaacactaagatcattataccttcagagatcagagtacagttaaaaggccaaactccaaaacatacatgaaaattcaaaagaataaataaaaaaggattagattaattgctattcatatcataccaagaaaaacatttatttgggagtgttctaatctaattgctgttaaactaaaatgaatttttagtgggcataaagcctt

SEQ ID NO: 880308 - DNA, 617 bp, Homo sapiens
gtgccagtatctgtgtttataacatataaagctggaaataataagaactctcttcagagggaagtaattcatccaatagtggactttatgttctatttccatgataaaatacagatttcctttaaaagccaaaaaatataaaaatataattccagcttattaaaagtaatagcctaagaaaagcatagaagyagaatatcctcacagtcctggtttttaattttattgcaaatataaatattgtctacttgaaaacatttcgtctcagcatctctctacaaataaccaagcaagcattgattgacagattaggcttactaatattgccttcccttttcctaagtgagctgttctacttacatttttgacagttgaaaatgactgcttgccaacattgtcaatgatatgttgagtaagaaattgtgttcttctatatcattttctaacctcccatttttcttttctttttctcttcacattcgttgttcttattgagatgaaatgatcacaaatggttagaaattgtctgttttcccttgatcaggtccatttatcctgtgcttagtttttctaaatgtatttttttaagaacataaaagatggtatgactctgcttg

SEQ ID NO: 880309 - DNA, 617 bp, Homo sapiens
gtgccagtatctgtgtttataacatataaagctggaaataataagaactctcttcagagggaagtaattcatccaatagtggactttatgttctatttccatgataaaatacagatttcctttaaaagccaaaaaatataaaaatataattccagcttattaaaagtaatagcctaagaaaagcatagaagtagaatatcctcacagtcctggtttttaattttattgcaaatataaatattgtctacttgaaaacatttcgtctcagcatctctctacaaataaccaagcaagcattgattgacagattargcttactaatattgccttcccttttcctaagtgagctgttctacttacatttttgacagttgaaaatgactgcttgccaacattgtcaatgatatgttgagtaagaaattgtgttcttctatatcattttctaacctcccatttttcttttctttttctcttcacattcgttgttcttattgagatgaaatgatcacaaatggttagaaattgtctgttttcccttgatcaggtccatttatcctgtgcttagtttttctaaatgtatttttttaagaacataaaagatggtatgactctgcttg

SEQ ID NO: 880310 - DNA, 631 bp, Homo sapiens
gcgattctcctgcctcagcctcctgagtagctggaattacaggtgtgtgccacctaatttttgtagttttagtagagatagggtttcaccattttggccaggctggtcttgaactcctgacctcaggtgatccacctgcctcrgcctcccaaagtgctgggattacaggcgtgagccaccgcacccagtcatgaattcttttaattgcaaaaaatgatataccatttatacagcaaactcttgcctcctttataagaaaagtaccagcagagaaaaacctattcaaggaagtcaaacattttgtcttgtaccacttacaaatcaatcaacgaatgtcctttgccacttaactttacaattattttcatgtgatttggtatctgagtttaaccaagtatagtccaatggaaggcaggtttacaaatgggaactaggtattttgaagaaagagaaacatttttaagaaatagaaacatttttaagaaatcaggaaaaggaaagcataaattttgtgatagccttaattggtgtttgtagagaagtttttaaaactagggagaagcagttataaaaagtgtaaagtgtcagggcaattgaaggtctggaaaatctctcagaagtagcagagaaa

SEQ ID NO: 880311 - DNA, 631 bp, Homo sapiens
gcgattctcctgcctcagcctcctgagtagctggaattacaggtgtgtgccacctaatttttgtagttttagtagagatagggtttcaccattttggccaggctggtcttgaactcctgacctcaggtgatccacctgcctcagcctcccaaagtgctgggattacaggcgtgagccaccgcacccagtcatgaattcttttaattgcaaaaaatgatataccatttatacagcaaactcttgcctcctttataagaaaagtaccagcagagaaaaacctrttcaaggaagtcaaacattttgtcttgtaccacttacaaatcaatcaacgaatgtcctttgccacttaactttacaattattttcatgtgatttggtatctgagtttaaccaagtatagtccaatggaaggcaggtttacaaatgggaactaggtattttgaagaaagagaaacatttttaagaaatagaaacatttttaagaaatcaggaaaaggaaagcataaattttgtgatagccttaattggtgtttgtagagaagtttttaaaactagggagaagcagttataaaaagtgtaaagtgtcagggcaattgaaggtctggaaaatctctcagaagtagcagagaaa

SEQ ID NO: 880312 - DNA, 631 bp, Homo sapiens
gcgattctcctgcctcagcctcctgagtagctggaattacaggtgtgtgccacctaatttttgtagttttagtagagatagggtttcaccattttggccaggctggtcttgaactcctgacctcaggtgatccacctgcctcagcctcccaaagtgctgggattacaggcgtgagccaccgcacccagtcatgaattcttttaattgcaaaaaatgatataccatttatacagcaaactcttgcctcctttataagaaaagtaccagcagagaaaaacctattcaaggaagtcaaacattttgtcttgtaccacttacaaatcaatcaacgaatgtcctttgccacttaactttacaattattttcatgtgatttggyatctgagtttaaccaagtatagtccaatggaaggcaggtttacaaatgggaactaggtattttgaagaaagagaaacatttttaagaaatagaaacatttttaagaaatcaggaaaaggaaagcataaattttgtgatagccttaattggtgtttgtagagaagtttttaaaactagggagaagcagttataaaaagtgtaaagtgtcagggcaattgaaggtctggaaaatctctcagaagtagcagagaaa

SEQ ID NO: 880313 - DNA, 632 bp, Homo sapiens
caaggacccaggcacattgcagtagggtattattattattctgagcaaagccctgtgtgttctgcagggcttctaaagcagtgctactcaaagtgtggtctatagaccactgcaaattgcatagcatttgttgctggtctgcagtgagataagtaaaagaaytgagagaaagcactgaaatagcaatttagagcattgccccaacttctaagcacttgaccagtggacttgatttttgtatatttttgcttcttttatttttcctggtaattctttcttactggtttttgttttgttttgtttgtttttgagatggagtcttgctctgttgcccaggctggagtgcagtggcacgatctcagccactgcaagctccgcctcccgggttcatgccattctcctgcctcagcctcccaagtagctgggattacaggcgcctgccaccacgtctgcctaattttttgtatttttagtagagatggggtttcaccgtgttggccaggatagtctcgatctcctgaccttgtgatctgcccgcctcggcctcccaaagtgctgggattacaggcgtgaaccacagcgcccagctcttactgtacttttttaaagtatcagtctacaaatgaccgaaa

SEQ ID NO: 880314 - DNA, 632 bp, Homo sapiens
caaggacccaggcacattgcagtagggtattattattattctgagcaaagccctgtgtgttctgcagggcttctaaagcagtgctactcaaagtgtggtctatagaccactgcaaattgcatagcatttgttgctggtctgcagtgagataagtaaaagaattgagagaaagcaytgaaatagcaatttagagcattgccccaacttctaagcacttgaccagtggacttgatttttgtatatttttgcttcttttatttttcctggtaattctttcttactggtttttgttttgttttgtttgtttttgagatggagtcttgctctgttgcccaggctggagtgcagtggcacgatctcagccactgcaagctccgcctcccgggttcatgccattctcctgcctcagcctcccaagtagctgggattacaggcgcctgccaccacgtctgcctaattttttgtatttttagtagagatggggtttcaccgtgttggccaggatagtctcgatctcctgaccttgtgatctgcccgcctcggcctcccaaagtgctgggattacaggcgtgaaccacagcgcccagctcttactgtacttttttaaagtatcagtctacaaatgaccgaaa

SEQ ID NO: 880315 - DNA, 627 bp, Homo sapiens
gtgcacctgtaatcccagctactcaggaggctgaggtgggaggatcacttgagcccaggaggtagagactgtggtgaggtgtgatttggccactgcactgcatgcagcctgggtgacagagctggaatgcagtggcgtgatcgaaaaaataacaatttttaaaaggggcactgattttaagctataacccctatattttaaatacataggctggattttatcttgctcatacagacttttaaaatgataccctgtgtttagccctgaaaagtgcttacttcttctttgtctgatgggtcttaaaattttctatccttgcagcttaccctgtgttaccactccactaaagaaaacaaagyattcttttttacaataaaaggttatttttatatgaaactttgaatttcacatttatcaactcatttgattttcaaaactggttttgttggaggtgcaggtcagaagaggagtggaaaccaacctgccctaatcctattgcacccattttcccatcagctcactaaagagtcgtgtggaaagttggtagctttatcctcagaggccctcctggatcctctctggacctttcccaggtgataccatttcaggaaaatgggtttcttttca

SEQ ID NO: 880316 - DNA, 633 bp, Homo sapiens
cccgagaggcggagcttgcagtgagctgagatcacgccactgcactccagcctgggtgacagagcgagactctgtctcaaaaaaaaaaaaagagggggtgctgcccacatgttgcttttacagtacctgcaatttcaggggggraaacccccaaaaaactaggaagtgcaagtatgtctcaattcaggaaagttcatagaaactttacaaattacaccagataaactggggaattaagttcaacaattgaaggtctgatatgtgttacttttattcaggtgttctgtggatatgaatataaatgagaaagttgaaacatagttcactaacaacattttgaaatgagattaaaatcactaacaacattttaaatgaggtgaattgtatgtgatgtggactaaactagatagctgtttaaaaacttgtttagagaaaatacaattatagttttagatgacctagtgttagtctagattaatctagtcccatcctctagggattggaagtccaagaggggaccattctaagaatggttgtgaaccccttatagaatctgatgaaagctgtggattttgttttcaggaaatctcacttgtccattttcacacggtttagcataaagtttagtctgtt

SEQ ID NO: 880317 - DNA, 555 bp, Homo sapiens
ctagcacagcagtctgagatcaaactgcaaggccacagtgaggctgggggaggggcgcccgccattgcccagcctcgcttaggtaaacaaagcagcctggaagctccaactgggtggagcccaccgcagctcaaggaggcctgcctgcctctgtaggctccacctctgggggcagggcacagacaaacaaaaagacagcagtaacctctgcagacttaaatgtccctgtgtgacagytttgaggacagcagtggttctcccagcacgcagctggagatctgagaacaggcagactgcctcctcaagtgggtccctgacccccgacccccgagcagcctaactgtgaggcaccccccagtaggggcagactgaaacctcacacggccgggtactcctctgggacaaaacttccagaggaacaatcagacagcagcattcgccgatcacgaaaatccgcggttctgcagacaccgctgctgatacccaggaaaacagggtctggagtggacctctagcaaactccaacagacctgcagctgagggtcctgtctgtta

SEQ ID NO: 880318 - DNA, 555 bp, Homo sapiens
ctagcacagcagtctgagatcaaactgcaaggccacagtgaggctgggggaggggcgcccgccattgcccagcctcgcttaggtaaacaaagcagcctggaagctccaactgggtggagcccaccgcagctcaaggaggcctgcctgcctctgtaggctccacctctgggggcagggcacagacaaacaaaaagacagcagtaacctctgcagacttaaatgtccctgtgtgacagctttgaggacagcagtggttctcccagcacgcagctggagatctgagaacaggcagactgcctcctcaagtgggtccctgacccccgacccccragcagcctaactgtgaggcaccccccagtaggggcagactgaaacctcacacggccgggtactcctctgggacaaaacttccagaggaacaatcagacagcagcattcgccgatcacgaaaatccgcggttctgcagacaccgctgctgatacccaggaaaacagggtctggagtggacctctagcaaactccaacagacctgcagctgagggtcctgtctgtta

SEQ ID NO: 880319 - DNA, 642 bp, Homo sapiens
ctccaaagaacaaaactgcagaccttaagcatatctgtattgcacagacaactatcaaagtttctcattcactatctttctggtcttctcccactattatacaaacaagtttttgtaaaagttcatgaacattagtgaatattacattagtgtgttaggatagaggacaaggttccacatttctggaatgataaagtgctatatttaaaaaacaagtacataaaacccaaaagtcaaagaacttaaaagcgaatttaagacaggaagagaagacattcatcaccaaatacacatattaaacaaaaaaaaaaaatccaggccattggaatcaaactattcttacaaagacaccrttttgtgtaaattaaaaataaataaatacaaacaaggtccctgaaaatagatgaggttctcttcctgctgtgaaacaacacggttttagcattcatacaggaagaattatggtttcaattcagagtttaaggtcctatttctcttagcatgcctcaaatcctgctactataacaaagccaggcacatggacttgagttttctatagttattccaacccacaatactaacacaatctttactaattgctttaatgttagaaaagaaatccctcattttcactggtctcca

SEQ ID NO: 880320 - DNA, 583 bp, Homo sapiens
ataaatcatagatgccgcaaaattggaaaaaagattccatgctcatggattagaataatcagtatcattaaaatagccacattgcctaaagcaacctaaagattcaacactattcctatcaaaataataatgtcattttccacagaattagaaaaaaaaataacttctctgaaatccatatggataccaaagaacagcttgaatagccaaagcaatcctaaggaaaaagaacaaagctagaggcatcacatctcctgacttcaaactatattataaggctatggtaaccaaaacagcatggtactgctacaaaaacccatgcaccaatggaacagaatagagaagccagaaataaaaccacacacmtacaaccatctcttctttgacaaagctaacaagtaatggggaaaggactccctattcaataaatggtgctgtgataactggctagctatgtgcagaagaatgaaactggacccctgtctttctccatatacaaaacttacctcaaaatggataaaagatttaaatataagacctcaaagtataaaaattctagaagaaaaccttggaaatgccattc

SEQ ID NO: 880321 - DNA, 684 bp, Homo sapiens
ctttctgacttttccatagatcttcatcatttccatagacatttgtcttccttctttttttaacttttacatgtcatatgggagtggcccctgtaagtatcatttgttcttacccaactttctctatgacataagaaaccttttaaatactgatcaaaataattcaggcaatgttctttaataatataaaatataagtattgtgtttcagatgaatcagacatattcrtttagtaggtcagattctccatatcattatagtgatgagcatatagtaggatttatggaaatacttcacttacatttcccttatggagatgacaatagtaagaatttttactttttttcttacctttcactacgtaaggatgagcttggattacttattttaaaatccataattaggcatttccaactactcaatatggtttatataaacttactaggaatatctgttgaattaaaaccttaccttatgtttgattttaaatgtacctgtcttaatccttaaaataagaagggtacatttttttcaattactcctcacttaagaaaagatattcttgagtagttatttataataaggagatcatggactacttacattttaactcaaattcttcttaagtgtttacatttttaaatattgattattgctagaaggaactcatacattaaattggca

SEQ ID NO: 880322 - DNA, 481 bp, Homo sapiens
atttccctttcctagccaagggaagccatgacagattgtacctggaaaaacagggcactcctgcccaaataccgtgcttttcccacagtcttagcaactggcagaccaggagatcctctcctatgcctggctcagtgggtcccacacccacagagccttgctcactgctagtgcagcagtctgagattgaccagggaggctgcagccaggtgggggaggggcatatgtcattgttgaggcttgagtaggtaaacaaagcagccaagaagctcgaagcgggtggagcccaccacagctcagcaaygcctactgcctgtacagactccacttctgtgggcagggcatagctaaacaaaaggcagcagaaacttctgcagactaaaacatccctgtctgacagctctgaagagagcagtggttctccaagcacagggtttgacctctgagaacagacagactgcctcctcaagtgggtccctga

SEQ ID NO: 880323 - DNA, 682 bp, Homo sapiens
aaagagaataaaatacctaggaatacaacttccaagggatgtgaaggacctgttcaatgagaactacatgcaactgcttaaggaaataaaagaggacacaaacaaatggaaaaacattccatgctcatggttaggaagaatcaacatcatgaaaatggccagactgcccaaagtaatttatagattcaatgctctccccatcaagctaccactgactttcttcacagaattagaaaaagctactttaaagttcctatggaaccaaaaaagagcccccatagccaaggcaatcccaagcaaaaagaacaaagctggaggcatcacactacctgacttcraactatattacaaggctacagtaaccaaaacagcatggtactggtaccaaaacagatacatagaccaacggaacagaaaaaaggcctcagaaataatgccacacatctacaaccatctaatctttacacacctgacaaaagcccacaatttactgaagaacaaaattacaatgtaatgctttagctgtgtctctagtgggggaaggttatgtaaggatttattggaaattggaacttccatttatggtgattccttcaatgtagagacttaaattaggagtaggtatgaatcatgacacaacagtctaacattagtggaaacagcaaagtgagtattttgagat

SEQ ID NO: 880324 - DNA, 522 bp, Homo sapiens
gggatgacctgcctgcagaaaggagctaccaactgcaggtctcctctgagctgtactgtggctcaataaagcacctcttcaccttgctcaccttctacttgtccacatacctcatttttcctggactcaggacaagaactcgggacctgccaactagcagggctgaaagaggtgtaacataaacagggctgaaacgcgctccttkcttgccaaattgcaggcaagaagaagagaagagagaaggagagaagagctgtgtcccttcaggaacacagacctaggagctcccccagccagggctgtgacaccttctttggggatctgcaggtcctgcatctccaagcttctgggtgccactgcattccctgatacccacagtggaagctgtttgcagtcggcctggtccagctgcagcctcacagggagctggcatctgtgcctggagctgcccaccccactgcagctggcatgcttggctgtgtgcagtggccagatcccatgctcgcttgctcacacacccct

SEQ ID NO: 880325 - DNA, 602 bp, Homo sapiens
ctgctgtggtctgaatgtttgtcccttacctaggattcgagaacattcacacctgggatgtaaatgcttgcccttaacataggatttcagaacactgctcctggggtctgaaagtttgtccctcacataggattccagaactctcctgctgtggtctgaaagtttgtaccgcacataggattccagaacactgctgctgtggtcggaatgyttttctgtcacataggattccagaacactgcagctgggttctgaatgtttgtccctcacataggatttccgaacaatggcaagaaggtctgattgttgggtccctcacataggattcctgaacactgctgctgggctctgaatgtctgtccctcacattcgattgcagaacactactgctatggtctgaacgtttgtctgtcacataggattccagaacgatcctgctgtggtctgaatgtttgtctgtcacataggattccagaacactgcggctggggtctgaatgtccctgacataggattccagaacattgctatgagagtctgaatggttgtctttcacatagcattccagaacactgctacgagggtctgaatgttggtccctca

SEQ ID NO: 880326 - DNA, 686 bp, Homo sapiens
ttccttaagattctggatactaaacctttgtcagatgcataatttgcaaatatcttctcctattctgtaggttgtctgtttactctgttgattgtttctttagtctcatttgtcaatgtttggttttgtcacaactgtttttggcgcctttgtcatgaaatctttgccagggcctgtgccaaatggtatttcctaggttaccttgcagggttttcatagttttaggttttacatttaagtctttaatccrtctttaattgatttttctgtatggtgtaaagatggggtccagtttcaatcttctgtatatggctagccagttatcccagtacaatatactgaataagaagtcctttccctgcttgtttttgttgactttgtcaagatcatatggttgtaggtgtgtagcattatttctgggctctctattctgtttcattggtctctgtgtctgtttttgtaccagtaccatgctgttttggtcattgcatcattgtggtatagtttgaagttgggtatgttgtgatgcctccagctttgttctttttgtttaggatcgtgttagctattcagactctttttttggttccatatgaattttaaattagtttttcttttttttccccttttttattttatttatttttattatactttaagttctagggtacatgtgcacaacatgc

SEQ ID NO: 880327 - DNA, 536 bp, Homo sapiens
attgaaaagcaatttcagattcaatttagacaaaggtcctgatcagcatgctgccaagaggaagaacacagtgggctctgactccaccccagactacctttctgaggttcctgtgcaattcactggtccccatgctaatcctaaggagttcacttattacagtataaaataatccttccagagaacactttttttttaaccattcacttgagttgttgaatgcttaaatacctgccctgatgacatatgttttatttttagtttatgataaatacagcattctgtttgaattttttttaacatcatatataatggctaraaaaaagtggaagtcagaatgtggcaaaaactaagtgaaactttgctaagaagacagattatctttctaatataagcctaatacatttttagtaattgtgggatgtgtgaattgtcttctgccttatagaggcatagatctattgcattctgccagaatgtgttctttcctcgaaatatcccggaagagaggattataacatgaatacaatctcttt

SEQ ID NO: 880328 - DNA, 630 bp, Homo sapiens
taagtcaatttgcatagctccttatttgcatttgacctagacacctgcattactttttggagaattctacttttatggtgcttttgaacacttcacttccaccccactatgacaaaatgcattttgcttgctgtggatctttgaggggtgcacagtgtgattatttttaacttttcatttgtattcatttaggttagaacaagttgtttacttttattacaaggctgttttgcttttcatgggtttatttcctcattcatttttgaaaaacaagatttcgttttagagatgtggactttttgtgacaatagactacaaattatacctatggatactgtcactgttcatgtccagataaagggcttcccatttctgctgcactaatatctagattacatttttctgtcttgactgatcttgaggaaataaacattcaaaactcacatgtactaaattcaacttgtaagyttcccactttactttgctgcaaaacaatgcattactctaaatgccatcattgttcttctttttgtccaacttgaaaacatgggagttacccttgattcttttctctcccaccctcccgcatgcaatgaatccccaagttcaactgagtctgcctccttcaga

SEQ ID NO: 880329 - DNA, 597 bp, Homo sapiens
acaaaaaccacatgattatctcaaaagacgcagaaaaggcttttgataaaatttaatatcccttcatgttaaaaactctcaataaactaagtattgaatgaacatacttcaaaataataagagccatctatgaaaacccacagccaacataacactgaatgggaaaaacctggaagcattccccttgaaaaccagcacaagacaaggatgscctgtctccccactcctattcaaaatagcattggaagtcctagccagaggaattaggaaagagaaagaaataaagggcatccaaacgggaaaagagtaagtcaaactatccctgtttgcagacaacatggtcctatatctagaaaacccaacagttttagcccaaaagcttcttaagctaataaacaacttcaacaaagtcccaggaaataaaatcaatgtgcaaaaattactagcattcctatacacaaacaacagccaagctgagagccaaatcaggaatgcagtcccattcatgattgccacaaaaagaataaaatacctaagaagacagctgaccaggaaggtgaaagatctgtacaaggaaaaccacaaaacactgctcaa

SEQ ID NO: 880330 - DNA, 597 bp, Homo sapiens
acaaaaaccacatgattatctcaaaagacgcagaaaaggcttttgataaaatttaatatcccttcatgttaaaaactctcaataaactaagtattgaatgaacatacttcaaaataataagagccatctatgaaaacccacagccaacataacactgaatgggaaaaacctggaagcattccccttgaaaaccagcacaagacaaggatggcctgtctccccactcctattcaaaatagcattggaagtcctagccagaggaattaggaaagagaaagaaataaagggcatccaaacgggaaaagagtaagtcaaactatccctgtttgcagacaacatggtcctatatctagaaaacccaacagttttagcccaaaagcttcttaagctaataaacaacttcaacaaagtcccaggaaataaaatcaatgtgcaaaaattactagcattcctrtacacaaacaacagccaagctgagagccaaatcaggaatgcagtcccattcatgattgccacaaaaagaataaaatacctaagaagacagctgaccaggaaggtgaaagatctgtacaaggaaaaccacaaaacactgctcaa

SEQ ID NO: 880331 - DNA, 615 bp, Homo sapiens
aggggaacagttcagaggctgcaatggaaaggaactgtcactactatgaggaagaaccagggctggctgattctcccaggaacagggaggagacagaaaggccacaagaaacagggaggagccattcccaggcttgcctcacagagratcatgggggcaattagaggagcctaacaaagagaagctggcaaggtagaaacctggtttgcagtctcaagttcggcattgcaaaatgtaaaagggtggagctggggctgagagacaacagcttcatattaaactgaacaggattcaagagccagggtgacctggtgcctgggtccctcttttagactccctgtctctgtgcttctgacccacattttgttccagccttttcctcacttcacgcctctgccttaggctcctcaccactcatctgcttcctctacctcacttattcttccaggttcaagtcaaatggcaaccccctccccagggtgacctcagcctgctcccaattccttcctggacaccccgaaagcatggcttctgaactcaaccacctctgtcagctttgccttgtctgtgagagccttgggacaccagcaggctagagcacaagacccagggtcc

SEQ ID NO: 880332 - DNA, 643 bp, Homo sapiens
tgccttttccaatactacctatggcctgcacctcccccattctgagcccataaaaagccctgggctcagccatattagggcgactttgcccctttgggctaggggaccacccccgtgacccctctccactgaaagctgtttcatcactcagtgtaactcctcaccttggtcactctgtgattgtcagtgtatcctcattcctcttgggagtgggacaagaactcatgaacccatgcataagccagacgtggctcargtgggctgagtgggtgggcagtctcctgcagcaggtaatgtggtcaggcaaggaccaggcagggtgtcactggctggaggtccctggcttgcaaaatgactgagaagaaaatcctgtgtcactcagaggcttccaggagcctctgctcacactttaagcatcctccacactgaagtcctataattcccagacctcagcactagttggctgcacacaaattatgtggggcacctgttaagatggtgatcctaggaccttaccctggagcttctgacccagtgggtatgtttacaggaccctctagacaactgtgtatatgagaatctctcagctggttccgacatgctgccagctaccactcccatccttgaccctctgcttgggaca

SEQ ID NO: 880333 - DNA, 590 bp, Homo sapiens
caagaaagaattcggggtgaatccacagagtaaagtgaaagcaagtttattagagaagtaaagaaacaaaagaatggctactccatagacagagcagccctgagggctgctggttggctatttttatggttatttcttgattatatgctaaacaaagggtggattattcatgagttttccaggcaaagaacctggagttcctggaactgarggttcttccccttcttagaccgtaaagggtaacttgcagacatggccatggcatttgtaaactgtctgtggcactggtgggagttctttagcatgctaatgtattatgattattgtataatgagcagtgaggctgaccagaggtcactttagtcaccatcttggttttgacaggttttggttggcttctttactgcatcctgttttatcagcaaggtcttcgtgacctgtattttgtgccaacctcctatttcatcctgtgactaagaatccctaacctcctgggaatgcagcctagcacgtctcagcctcgttttaccccactcctattcctggtagagttgctctagtttgaatgcctctgatagtaccagtgcccc

SEQ ID NO: 880334 - DNA, 520 bp, Homo sapiens
caactggcaaatgggataaagagtcatgactcattggtgtgctgtattcaggagacccatctcacgtgcaaagatgcacataggctcaaaataaaggtatggaggaaaatttaccaagcaaatggaaagcaaaaaaascaagggtagcaatcctagtctctgagaaaacagactttaaatcaacaaaggtcaaaaaagaaaaagaagggcattacacaatggtaaagggaacaattcaacaagaagagctaacaattctaaatatatatgcacccaatacaggagcacccagctcataaaacaagttcttagagacctacaaagagacttagactcccacacagtaatagtgggagactttaacatctcactgtcaatattagatagatcaatgagacagaaaattaacaaagacattcatgacttgaactcagctctggattaagtggacctaatagacatctacagatatctacagagagttctgtagatatcaacagaatcaacagaatatacaaca

SEQ ID NO: 880335 - DNA, 597 bp, Homo sapiens
ctgcaaataatggtacatgtgtctcattttatagctttcacttctgcattgtattttactgcattgttaaaaatcataaaaaaaattatcagtggtgatatagatcaggtaggccctatacttgatttaaactgtaatttttttagtgttttgacattgagaatgatgttggctattgtctttagaaagatgtyctttgtgtgttaaggaaataaaatgttattcttagttttataaaaataacatcaagaatgagtatctaactattttgttaaaagccatcacataaagatattttaacacctcaaacaccaactcttttgagtgtctaggcataatttaaactttatattataaattttgtctatatgcttatgttttgcctataatagagatataaaacattgtcacctcttaacagatttttaaagccccataaaaaactaatcaattaactaacaggagtattaataactagaactatatatatgttcaattttcagcataggagaaatgagagattttttgaagaattatctaatcaagataatagcagctaacgttttaatcacttgtaaacatttaggaaagaatgag

SEQ ID NO: 880336 - DNA, 665 bp, Homo sapiens
taaaggtgattttcagatgtgattaatatttactatcagttgaccttaagtaaaggagattaccctccatagtatgggtgggcctcgtctaatcagttgaaggccttacaagcaaaggctggtttcccaaagaggaaggaattctgcctccaggctgcaatacagaaattcttcctgcatttccagccttcagactcaagactgcagcatcaatccttacctgctaatatatacatgacatacttacatctcctgttggcattggcctgtttctctggagaatcctgactagtagattctacaccttgaatggcctcctctctttcacccatctagtccagctcacccttcaaagcctggctcaactgcatctcctccaggaaggcttcctgacayctcagtgactgcagcactcatagcctgttccaccccaagggacttaatgctgttttcagaactctcctaatgcaatatctacccaccacagctgttagctcatagggcggggcggggaagagaggaggggatgagggcccaggccatgtcttgtcttttgtgatcccactggcactaagtagtgcttggcccacagcaggtgctcatccatgtttagatggtgactggcttgccttttgttctgcgcacctgtgtggtctactgaagtc

SEQ ID NO: 880337 - DNA, 551 bp, Homo sapiens
ccaaatatgttcaaaacctagggtttcattttttttaaagtcacaggtgaaatgatcgagttcaggcagaatattatcagatatattaagcaaggggtccctggcggctgttctggcaaatgctaaggactgtggtcatgagctgaagcagacttccctgtgcatccamcctacttgacccagttatggtacctacctggccctgtgggcaggtgagtttcttctggttacaggatttttgcagttgatagatacttgttttctcctgtaatcttcaaaacaagccaactgggtagatattgttagctcatcgggcggatggaagagttgaggtacagagaatacgtgatttgcccagagtcacggaaggggcagaccagtgctcaaagctctcagaatcctcatcgggacccttcctactacaacacagaagagaaggtttgtactgcccaagaaggtttgtactgtacagagagaaagaaaaggcttttgtgggaaacttggacttcactatggtgggtaattaagcttctaatcatacagacctctta

SEQ ID NO: 880338 - DNA, 622 bp, Homo sapiens
gttcatagcctcccacacagttactgcctattgaagtgaaaagtcaaatatctccaaactaggaaggaagccctagtaggaagatagaaactactaaatgaattgcaatgatgaagtttgctagtagaacactgtattggtccattttcacactgcagataaagacatacctgagactgggcaatttacaaaagaaagaagtttattargcttacagtgccacatgccaccacagtcatggtggaaggcaaaaggcatgtctcacatgacagcaaacaagagaagagagcttgtgcagggaaactcccatttttaaaaccatcagatcttgtgagacttactcactatcataagaacagcatgggaaagacccacccccatgattcaattacctcactccaggttcctcccataacacgtgggaattcaagatgagatttgggtggggacacagccaaaccatatcattcccccctggcccctcccaaatctcatgtcctcacatttcaaaaccaatcatgccttcccaacagtcccccaaagtcttaactcatttcagcatttactccaaagtccacagtccaaagtctcatctgagacaaggcaagtcctgtctgcctat

SEQ ID NO: 880339 - DNA, 671 bp, Homo sapiens
  misc_feature 74: n = A,T,C or G
acagtcagtgcagtttaaagccagcttgtgtagatttgaacccaactggcttttggctttgagcaagttaaatnaaatttttaggccttggtgttcattcatgcatatccgtgataataatactacctcatagagttgttatgaggattaaatgacttaatacatgcaaggcacttgtaatagtgcttggaatattttaagcactccaaaaatgtgacaagtttttttttttttttttttttttttttaaatttcaggtcaaaaagttcttaccacagtctggactctcaatcagggaacgcactggaagttaaatgttagttccatccctttgcctgagcattattaaactgcccatacagtttttctgtctaagcatcctttttttcttaatctttttcttgttcaraacctgcacctgatttcatacatgaggaagctatgaaatctcctttcctattgcggtcctgcctaagaaacaaattaaaacaagggccacatgtggctttgggctttgtgttttgattgcctcctgccatgttgactaagctgtgtagctactctacattgctgtttgttgaattccacaggtgctaaataggtcaccttttagcgatgatgtttcttctatgtttcttctatgttcagagacttcaggcccatgccatgta

SEQ ID NO: 880340 - DNA, 618 bp, Homo sapiens
ttccaaagggctgatgagacttgcatgccagcagaaggggtggagcaagatggcagaaaagaagaccctaccaatcattctcccactccaggaataccaaatgcaacaactatacacacacaaaaaaagcacctttataagaaccaaaaatcaggtgagcactcacaatacctgctgttaagttcatatcgctgatagaggcactgatgatggtagaaaagacagtgtttacttgcccatgccacccyttccctgtccctcagcagtagtcctgtggcacagagagagacagtctgtgtgtttgggaaagggagagcacagggaatgtgagagttttcattgaactcagtgctgtgttgtcacagtgtgaagcaaaactgtgttgaattcagctgacacccacccatggagagaacattctggccagccctacccagagggaaatcactcaccccagtggtgggaacttgagtccagcaagctttaccagtgtggactgaagggttctggggccctaaataaccttcaaaggcagtctaaaccacaagcaatgtaagacctagcgctgagctgggctcagagccggtggacttgtaggcataaaacttactgagacac

SEQ ID NO: 880341 - DNA, 618 bp, Homo sapiens
ttccaaagggctgatgagacttgcatgccagcagaaggggtggagcaagatggcagaaaagaagaccctaccaatcattctcccactccaggaataccaaatgcaacaactatacacacacaaaaaaagcacctttataagaaccaaaaatcaggtgagcactcacaatacctgctgttaagttcatatcgctgatagaggcactgatgatggtagaaaagacagtgtttacttgcccatgccaccccttccctgtccytcagcagtagtcctgtggcacagagagagacagtctgtgtgtttgggaaagggagagcacagggaatgtgagagttttcattgaactcagtgctgtgttgtcacagtgtgaagcaaaactgtgttgaattcagctgacacccacccatggagagaacattctggccagccctacccagagggaaatcactcaccccagtggtgggaacttgagtccagcaagctttaccagtgtggactgaagggttctggggccctaaataaccttcaaaggcagtctaaaccacaagcaatgtaagacctagcgctgagctgggctcagagccggtggacttgtaggcataaaacttactgagacac

SEQ ID NO: 880342 - DNA, 554 bp, Homo sapiens
cttgcaccaaagacatatttgctgttgttttccttgttagtgatgttgccaacatttcaacttctgtgatttacctaagggatgttttggaatttaagggaatgcacaggaaggctaggcacatcagattgaagtgaggacatgttaccagcctgcaggcttacccaagccaaacytgaagggtgcaaggctgctgcaacctcctgagaactccaggccttctctttgaagggggtcaatcatcaagcaattgtcatcagaaacatgtcatagttattagctaaagagctattttgcctttaggattctgcattgactggaagttatcctcatgtaaacctgctgcaagtgctttcatctcctctcctttttctttaccataaatgagaggcctgcattgggaatgtcaagctgcctttagtcaatcattagactcatcagaggaagccagagcaggtaggagcttccagagaggaacctgggtgtctgtgtgtgtttaggtgtgcaggaagacagcagcattctcccccatctgcatacacatgaacctgggc

SEQ ID NO: 880343 - DNA, 653 bp, Homo sapiens
aaatcagacacaagctcttatcgtgagagtggctgatctgcaaaaaaaaaaaaaaaaaaaaaaaaaaaaaaaaaaaaaaaggtgcatgcacagcctcattaggtgtctagtgttaaagtgagggtattgactggaaaagaatgggaccttgcaacttggaatggggacgtgtgggaggaccctgatgaagctggggacactgagtttgtaaaccttgatgaatcttttttgccagaaggagcagcttccccatttccattagtgacaacatctcctccctgacccatcctgccatcagcctttccacttttgtctgaagakataaaccctgtgctgtctgagggaacagtgatggcctcccctgaggcagataccaggcaaaataatgttgattctcctcaggagccacccactacacccctgtttacttctaaacctataactagactaaagccctggcaggtccctagaggtgatattgagagtgtgatccatgaggaggtgcatgacactcgaaaagaactgcttgagctttctaatttatagaaacagaaatttggagaacaagcatgggaatgcatattaagggtgtgggataatggtagaaggaacttagagttggatcaggctgaatttattgatttgggcccact

SEQ ID NO: 880344 - DNA, 633 bp, Homo sapiens
gaatcaatgggaaagacttggaagaactcttaattaaagaagcaactgttgataaaaatttcatttccaatgtattgccagaacaccagacatgctggtggagagggtgagcagttccccaaatcccaaccccttcatcaggaactgtgtttctccaactgcctcctgtttcttctcaaacagatacggagtctttcagtgatcaggtgagctcaaaacgccttactgcaactgcagcaccttccataaacttagaatcattttccccatttcttacctattaaagtgttagtcaaagactaaaattctcccttcttttttacactataatgttcttctgacctttctaatctatcaaaataaccagataataaattagatctacaataraattcaaaaacagtaacattatttttcttgtcattatatgataatgtttttacttcatgagccaaacaaatattgcattaagaagacactttatcaacctttgctcttcatacaagagcctgcttcaagctgcatccacaaatatcaagggagagtaattcacctatcttacagaaaagaatatttataatttgtcaggataaaaaatcttgagaagggatgagtggtttgacagaaggtgag

SEQ ID NO: 880345 - DNA, 604 bp, Homo sapiens
ttaaatgttctgattttttttaagttaaaacaaaagcaggactttttttcataatttcaacttttattttagatttcagggtacatgtacaggtttgttacctgggtatactgtgtaatactgaggtttgaggtatgaatgattctgccacccaagtagtgagtgaagtgctcaataggtagtttttcagcccttcccccactccctcttcccccactctagtagtccccagtgtctattgttctcatctttatacccacgcgtacgcaatgcttagctccctcttataagtgagaacatatgccacatttggttttctattcctgtgttaatttgcaaagtgagaattttgatggtgagtattcrttctaaaagcacactggggagttggtctggactttcttggttgtgacctgaccccaggaggctagggattcccacccagaattccgtggctttagtgctcattgtgtcatggcatgcctccctagagatgcagaagcctaccatggccatcaacctatctacactgaccaagaatggaactttggaatcttctatttgtctagggtatatctcccttaggtgacaagagaaaggacag

SEQ ID NO: 880346 - DNA, 607 bp, Homo sapiens
tcaatctgattttgttaatctatagcttatgtactttataatagatttttagatataataaaggatcttcatattcctgaccatggccttggtttaatttttactgctggaatcagcttatttggggtgttacttttttaatgtgaacatttgtgcataaataagtgatctaaaatgttagtttctatgttgctcttgttctggcaaaattctactgtgccaaaacatgagcaaagtaagttttctcttttttactccctgaaattatttataaaacataaaatyatctgttcttgaacattttttttaattgtcatcaaaatcatctgggtctgtttaacttttttttttttttgagacggagtgtcactctgtcaccccggctggagtgcagtggcatgatctcagctcactgcaacctccgactcctgggttcaagcgattctcctgcctcagcctcctgcgtagctgggattacaagcatgaaccaccacacctgtctaattttgtgtgtttttagtagagacagggtttcaccatgttggtcaggccggtctcaaactcctgacctcgtgatctgcctgcctcaacctcccaaagtgctggg

SEQ ID NO: 880347 - DNA, 546 bp, Homo sapiens
tccaaaagtagatctgccaaaaacagggtaaggctcagatttcagccacagttgaagagcaacatggaggtgtaaaccccggtattcactgccatctgatgccatcattgctctgatagaaacagagcaatacaaaaatatagactggtaccactgtggcaccagcgtggattcagcatgaacgtgaacatgaaaaggctgcactgggcaaaactgtgaagtttgctttggttctctatccttcctccatttcaaggagcctctttccttcctggagggatcacaatccctgggagtctccaccttcatttccacyctggtttttcagagtccttgctaaggctttgctcccgagcctgccacaggctctgaacctggccagacatcctccttagcatcccagtttagctgctctgtgtcctgcttgctgcaacccaccccgcccccacccccatctatggaaagatgatgacagataacccgtatcagcttattaatgattgaaggtgatttaatgctgggttgacagcattctaaagatagaaa

SEQ ID NO: 880348 - DNA, 584 bp, Homo sapiens
aaaatctctcagcatttgcttgtctgtaaaaaatgttatttctccttcacttatgagcttagtttggctggaaatgaaattccgggttgaaaattctttgagaattttcaatattggcccccactctcttctggcctgtagggtttctgcaaagagatctgctattaatctgatgggcttcyttttgtgggtaacccgacctttctctttggctgtccttaacattttttccttcatttcaactttggtgaatctgatgattatgtgtcttggggttgctcttctcaaggaatatctttgtggtgttctctatatttcctgaatttgaatgttggcctgtcttactaggttggggaagttctcctggataatatcctgaagagtattttccaacttggttccattcttcccgtcacttcccggtacaacaatcaaacgtaggtcttttcacatagtcccatatttcttggaggctttgtttcatttctttcttttttctctaatctaagttgatcttcaatttgatatcctttcttccacttgatcaattcagctattgatacttttgtatgcttcaccaggtt

SEQ ID NO: 880349 - DNA, 607 bp, Homo sapiens
attctaatcctgcgtgcagaagctgctttatgacctgtaatttagactctgggatggattgaaccaacaggaggatgcataatgttctgcacaaatgaacaaggctgataaccctgggccatttacttcctacgacagatcagcaaattatgaaccaggcttataaacagggctcctctgcctcgaggagcacagacacatactaagcttgcagtaaccactccagcacagcccctgtgaggctcagccccttyggcaacccaggctcctgtttattacaaccaaccaccattgcatcctttcctactccttctgctgaagcgtccctccattccttcaaagaaggaaaacaaggtgtggaagagaggaggaggaataaaccaggtgctggggacaaagcagtttgagtgcccaaagccgagtcatctggaacacttcaatcatccaactttactgtacatgccctggagggaggacgggggagggtggcagactatctgggagctctgggcaaggtatttgcaccacaacagcaaatattaggtctttctggaaacagagtgatattgttattaaaactttcattatctgtatgttttatgtgaac

SEQ ID NO: 880350 - DNA, 560 bp, Homo sapiens
acttatacacctactatatacccacaaaataaaaataaaagcaaataaataaattttatatgaatgaacaataatttattcaataatcccttactggtggatatatatgttgtttccaaagttgtgctatcattatacaaaacattatacaaagttgtgccatcattatacaaaattggcattagatcctgactgccctgctgggttttggacttgggtggtgcctatagcccctttgttttggccaatttctccattttggaatggcagcatttatccaattcctgtacttccactgtatcttaaaaataactaacttgttttttatttgacaggcttayaggtggaagggacttgccttgtctcaggtgagactatggacttggacttttgaattaacgctagagtgagttaagactttgggagactgttgggaaggcatgattgtgctttgaaatgtgagaaggagatgagatttggcagaggccaggggaggaataatatggtttggctctttgtccccacacaaatctcatgttgaattgtaatttccagtgttg

SEQ ID NO: 880351 - DNA, 614 bp, Homo sapiens
ctgtttggaaattcatcagaggcttctagcccaagaacccatctctgcaatggtctatatagtcaatattaaattatattatacaatatccatttgtgttatcaacgattacatggttgatatacttgtgtaataatactctttaagaaatcccaccaggtgtggtggctcatacctgtaatcccagcactatgggaggccaaggtgggcagatcatttgaggtcaggaattcaagactagcctggctaacgtgatgcaactctgtttctactaaaaatacaaaaattagccaggtatggtggcacacatctgtaatcccagctacttgggaggctgaggcagaagaattgcctgaacccaggaggcagagattgcagtgagctgagaacgtgccactgtattccagcctggcaacagagcaagactgtcaaaaaaaaaaaaaaaaaaaaaaaaaaaaagagagagagaaagggawgggaagggaaagggaggggaggggaagggagggaagaaattccacatagaatgtcctgtggcattatttaatttcccctactctttaggtaatagatgtgcattactgagggtgtcattataaagacttcgtgtgttg

SEQ ID NO: 880352 - DNA, 663 bp, Homo sapiens
aaatttagggtagtttttatccttggggagagctggagtcaggaggatgacagagggaaggatcccacagtgagatgcaaaataatattaataattactagttcttaggttaggtagaggattcataagtattatttctcccataacttatcatccttcataatatataaccttttgaatatattaaatattacctaataaaatataggataataataaaataagttcctttggaaaaatactctagtgcattgaataaagggcgttcggaagagcaaaacgattcagctcaattctacaacttcgtgtatctaagttagaatcttctctagcttaacacatattgaagaggttgyacagagtaacatgagaaagaccttggttggcacagcctaatttaactttcttgagggcactttattagaaacacaaaatgtacctacaactgtatcctcatgtacaggaatacagatactataagcacagaattcctacacttactgtttctgctttctcacccttccattctgtcttcttggacttgattttccactactccaataagtagcttttatcaatatcacaaatgacttccatcttaccaagtccagtggttattcaatcttatcttctcagcagtttttatcataaatactccttctt

SEQ ID NO: 880353 - DNA, 525 bp, Homo sapiens
cagttaaaaaggatatttatttatatatttctatttatttatttatttttgagatggagtctcactatgtcacccaggctggagtgcagtggcatgatctcggctcactgcacttgaacctcccaggttcaagcgattctcctgcctcagcctccccagtagctgggattacaggtgcccaccaccacacccagctgatttttgtatttttactagagatggggttttgccatgttggccaggctgatctcraactcctgacctcaggtgatcctcccacctcggtctcccaaagtgctgggattacaggcatgagccctactgcacccagactaaagaggagttttagataaacagcaaacaaatcatttttaatgtcagtatgtgccatgcaatgtttggcacatacttttttaaattatttgctgtttacccctaaaattccactttaactggacatcttatattattacttgctaaatctggcaaacatagaaggagatctgggttcaggtgttacctgag

SEQ ID NO: 880354 - DNA, 598 bp, Homo sapiens
tggggaccgctgccacagacaacacttccatgagtgagcatggctacatttcaatgtgcttttatctatggatactgaagtgtgaattttctgtaattttcaagcatcatgaaatgctttccctgctccttaccctttctttctaaccattygaatgtgtaaaaaccatttgtagtttgagggctgtctaaacataggaggcaggtgggatttggcccactggagggttctagtttgctgaccgctgccctggagcactggttcccagctgtggcccctggattggtgcatcagcatgacagggagcttgtgagacctgttgaaggttagtcttgatttgagaatgtgggagtgtcccaaacaccacagtctgtagttggactaagaattcctttctttcttttcttttttttcttttttttttgagatggagtctcaccctgtcacccaggctggagtgcaacggcatgatctttgctcactgcaacctctgcctcccaggttccagctattctcctgccccagcctcctgagtagctgggattacaggcacgcaccaccatgcccagctaatttttgtatctttagtagagacggg

SEQ ID NO: 880355 - DNA, 598 bp, Homo sapiens
tggggaccgctgccacagacaacacttccatgagtgagcatggctacatttcaatgtgcttttatctatggatactgaagtgtgaattttctgtaattttcaagcatcatgaaatgctttccctgctccttaccctttctttctaaccattcgaatgtgtaaaaaccatttgtagtttgagggctgtctaaacataggaggcaggtgggatttggcccactggagggttctagtttgctgaccgctgccytggagcactggttcccagctgtggcccctggattggtgcatcagcatgacagggagcttgtgagacctgttgaaggttagtcttgatttgagaatgtgggagtgtcccaaacaccacagtctgtagttggactaagaattcctttctttcttttcttttttttcttttttttttgagatggagtctcaccctgtcacccaggctggagtgcaacggcatgatctttgctcactgcaacctctgcctcccaggttccagctattctcctgccccagcctcctgagtagctgggattacaggcacgcaccaccatgcccagctaatttttgtatctttagtagagacggg

SEQ ID NO: 880356 - DNA, 553 bp, Homo sapiens
ataaaactgttaaaataattcagatgtcagctgggcatggtggctcacgcctgttatcccagcattttggggaggccaaggcaggcagatcacctgaggtcaggagtttgagaccagcctggccaacatggtgaaaccccgtctctactaaaaatacaaaaattagccaggcatggtggcatgcgcctgtaatcccggctacccaggaggctgagacaggagagtcgctagaacccgggagggagaggctgcagtaagcggagatcacgccactgtactccaggatgggcgacagaacaagattccgtctcaaaaaaaaaaaaaaaaaaagaaattcagatatcagattagaaagtcaaagcartcttttctctagtgatataaattaattttcattaataacatattttaggaaagaatacttcagcatcataatgtattattgaaaatgtcatttacatttttgagatatagtcaaacttgggaaaactttcaattttctttatatataagctgtgaaattttaaaatattattgaatatataaaatatat

SEQ ID NO: 880357 - DNA, 659 bp, Homo sapiens
cacataagagggtcaggggaagatttttttgtaaaaagtgggttttcaaaagaaaagaaaagaaaagctaaaggagagttcagaaacagagactataagaatgaaccagagatctgccatcctcatgatattggaaaaataaaaaagagtcaactagagaaacaactaaggctaaaatgaacacttgtgatacagagctcttagttaaatcatagttatttggcagtcatttacatgggccaggtttatttgcttattagacatctgactatcagacaagatgaccttcactatcacacaggatgacctatgagcaaatgaaggaggaaagtgattttaaggggttgaagagagaagcatgtagtagctcccatagaactgctttaggagggagagaactttgacaaagagaaaaaatatatatatatataaaatatttatatacatttatatattatatctattatatttttrtatatataagcttttagttagatacagcagaagtggagttttgtgctgcactgatactggtttatggttcatgtggaattaactttttttaatttaaggccaagttatctgatggtggttagcatggatttctgaaatctctgagtatagttgaagaagggaaatctgatctagaggtaaaaatt

SEQ ID NO: 880358 - DNA, 691 bp, Homo sapiens
atctcatgagacccattcactatcacaagaacagcatgggaaagacctgctcccatgattcaattacctcccaccaagtccctcccacaatccgtgggaattccaaatgagacttgggtggggacacagccaaaccatatcattccacccctggtccctcccaaatctcatgtcctcacatttcaaaaccaatcatgctttcccaacagtccctcaaagtcttaactcatttcagcactatctcaaaagtccacagtctaaagtctcatctgagacaaggcaagtctcttctgcctatgagcagccagtaaaatcaaaagcaagttagttacttcctagatgcaatggaagtacaggcattgggtaagcatagccattccaagtggaagaaattggccagaacaaagggactacaggggcggtcaagtcttaaagctccaaaatgatctcctttgactccatttctcacatccaggtcatgctgatgcaagaggtgggctcccatggccttaggcasgtccgcctctgcagctttgcagggtatagccctcctcctggctgctttcaccagctggcattgagtgtctgtgccttttccaggtgcatggtgcaagctgttagtggatttatgattctgggatctggaggacagtggcccacttctcacagctccactacgtggtgtcccagt

SEQ ID NO: 880359 - DNA, 691 bp, Homo sapiens
atctcatgagacccattcactatcacaagaacagcatgggaaagacctgctcccatgattcaattacctcccaccaagtccctcccacaatccgtgggaattccaaatgagacttgggtggggacacagccaaaccatatcattccacccctggtccctcccaaatctcatgtcctcacatttcaaaaccaatcatgctttcccaacagtccctcaaagtcttaactcatttcagcactatctcaaaagtccacagtctaaagtctcatctgagacaaggcaagtctcttctgcctatgagcagccagtaaaatcaaaagcaagttagttacttcctagatgcaatggaagtacaggcattgggtaagcatagccattccaagtggaagaaattggccagaacaaagggactacaggggcggtcaagtcttaaagctccaaaatgatctcctttgactccatttctcacatccaggtcatgctgatgcaagaggtgggctcccatggccttaggcacstccgcctctgcagctttgcagggtatagccctcctcctggctgctttcaccagctggcattgagtgtctgtgccttttccaggtgcatggtgcaagctgttagtggatttatgattctgggatctggaggacagtggcccacttctcacagctccactacgtggtgtcccagt

SEQ ID NO: 880360 - DNA, 608 bp, Homo sapiens
aggggttggaatcctagtctctgataaaacagacattaaaccaacaaagatcaaaagagaaaagaaggccattacataatggtaaagggatcaattcaacaaggagagctaactatcctaaatatatatgcacccaatacaggagcacccagattcacaaagcaagtccttagagacctacaaagagacttagactcctgcacaataataatgggagactttaacaccccactgtcaatattagatagatcaacgagacagcaagttaaaaaggatatccaggaatagaactcagctctgcaccaagtggaccttatagacatctacagaactctccaccccaaatcaaaagaatatacattcttctcagcaccacattgcacttattccaaaagtgaccacatagttggaagtaaagcagtcctcagcaaatgtaaaagaacagaaattataaaaaacygtctctcagaccacagtgcaatcaaactagaactcaggattaagaaactcactcaaaaccgctcaactacctggaaactgaacaacctgctcctgaatgacttctgggtacataacgaaatgaaggcagaaataaagatgttctttga

SEQ ID NO: 880361 - DNA, 660 bp, Homo sapiens
ggcagttgttaaaaaggcaaaaaacaacagatgctgacgaggttgtggagaaaaagaacacttttacactcttggtggcagtgtaaattagttcatccattgtggaaaacagtgtggcgtttcctcaaagacctagaaccagaaataccatttgacccagaaatcccattactgggtatatacccaaaggaatataaatcattctattataaaaatatatgcaggcatatgtttattgcagcactattcacaatagcaaagacatagaatcaacccaaatgcccatcagtgacagactggatatagaaaatggggcacatatacaccatggaacaatatgcagccataaaaaaaggatgcgttcatatctttgcagtgacatggatgaagctggaaaccatcattctcagctgactaacacaggaacagaaaaccaaacaccacatgttctcactcataagtgggagtttaacaatgagaacacacagacacagagaggggaacaacaaacacasctgggcctgtcaggtggtgagaggaggcagagtatcagaataaataactaatgcattcaaggcttaataactaggtgatgggttgacaggtgaggcaaatcaccatggcatacgtttacctatgtaacaaacctgcatgtcctgt

SEQ ID NO: 880362 - DNA, 632 bp, Homo sapiens
ctgtctcaaaaaaaaaaagtatgtgacacttgtaattttttttcctagccataaagttcctcagggtaacatcattaagggaaaactggaataagtagagtgttgaagatttagtattgcgtagcattcttactcaaagtcaggactgaaaactrcttttgaaaggctttcatagtctctctggcagagtgaagcatagaaaatgaatggaaggttgagtccgaggagaaaaatttaggcaagacatacacagagggaggtttgaagcatgctgctttgtttttgtacaaaaggatcaaaggacatttctcacattaattgcttctatttttacttgcatccttattgtgcttccattcatctctctaactgatgtcctggacactctttttgtccttgttcctctctcatcacatgccacataatttctgccttggatcatccatccctttcctcttctctctctctctctctctctcttccgtctctctctctctctctttctctctttctctcgttaggttctgtattctagagcagcagagaaggccagctgccacccatatgctgcccttccatgttgtaaagatgtccctgggcagcagctaaccagccagagccctcatttccca

SEQ ID NO: 880363 - DNA, 634 bp, Homo sapiens
tcttgtctattggagataaggaaggcatcttatttttcatttccaagaagtatttttgcacctgtgttgggttgacagaaaatactacatgaggaaaatataccacaaaagacactgttttacatacatcatgatcaaataaacgagacaatagtagaatttatttaactttggaatttatagaactgtaactcatctgggaagtctctactccactctttcatactggttggggaaatatgagttcyaccaaatggttaagagaaaagaagaatagtaatgctaacactcatattaacactaatgctaataccagctagctctatagagctgtattgtctaaaatgcagccactagtcacacaggctatttatatttacattttaagtaactaaaattaaattaaattttaaaatccagttccttagtcacactaagtggcagtgggggctggctccagagtttgcagtctgttcagcactacatacacctctctgaaagatggagaactccagagtccatgtgggtggagctgcacagcctggctccctgtcacccctctccccactaatttgcttgccagccttgccctgccacagctcatggcagtttcacagggtaaagtcatggcttt

SEQ ID NO: 880364 - DNA, 634 bp, Homo sapiens
tcttgtctattggagataaggaaggcatcttatttttcatttccaagaagtatttttgcacctgtgttgggttgacagaaaatactacatgaggaaaatataccacaaaagacactgttttacatacatcatgatcaaataaacgagacaatagtagaatttatttaactttggaatttatagaactgtaactcatctgggaagtctctactccactctttcatactggttggggaaatatgagttctaccaaatggttaagagaaaagaagaatagtaatgctaacactcatattaacactaatgctaataccagctagctctatagagctgtattgtctaaaatgcagccactagtcacacaggctatttatatttacattttaagtaaytaaaattaaattaaattttaaaatccagttccttagtcacactaagtggcagtgggggctggctccagagtttgcagtctgttcagcactacatacacctctctgaaagatggagaactccagagtccatgtgggtggagctgcacagcctggctccctgtcacccctctccccactaatttgcttgccagccttgccctgccacagctcatggcagtttcacagggtaaagtcatggcttt

SEQ ID NO: 880365 - DNA, 601 bp, Homo sapiens
ttaaaaacgagagcacaagctctcttttttcacctgccgccaaccatgtcatatgtgatttactccttcttgccttccactgtgattttgagacctcctcagtgaagaagaactgtgattccaattaaacctctttcttttgtatattgtcagtctcaggtttgtctttgtcagtagtgtgaaaatggactaatggttccartagagtggggcgttgctgaaaagatacccaaaaatgtggaagagactttggaactggataacaggcagaggttggaacagtttggagggctcaaaaaaagataggaaaatgtaggaacatttagaacgttcttgagacttaatgaatggctttgcccaaaatgctgatagtgatatggaaaagaaagtccaggctgaggtggtctcagatggaaatgagaacttgttgggaattggagcaaaggtgactcttgttatgttttagcaaagagactggcagcattttgcccctgctctagagatttgtggaacttcgaacttgagggagatgatttagggtatctagtggaagaaatttctaagcagcaaagcgttcaagaggtgacctgggtgctgttaa

SEQ ID NO: 880366 - DNA, 618 bp, Homo sapiens
aaaagaaggcatatatgtggccaacaaacataagaaaaaagctcaacatcactaatcattagagaaatgtaaatgaaagcgacaatgagataccatctcacatcagtcagaatggctactattaagaagttaagaaataacagatgctggtgaggttgtggagaaataggaacacttttataccattggtggaaatgtaagtaaattagtttgaccattgtggaagacagtgtggtgattcctcaaagrtttattaccagaaatatcatttgacccagcaatcccattactgggtatatatccaaaggaatataaatcattctgttataaagatatacacacatgtgtgttcattgcagcacaattcacaatggcaaagacatggaatcaacccaaatgcccattaacaatagactggatttaaaaatatggcacatgtacactatggaatactatgcagccataaaaagaaatgagatcatgtcctttgcaggtacatggattaagctggaagccattatcctcagcatcctaacacagggttagaaaaccaaacaccacatgttctcatgtataagtgggagctaaacaatgagaacaactggacacagaaagggg

SEQ ID NO: 880367 - DNA, 557 bp, Homo sapiens
tgataggtgcagcaaaccaccatggcacatgtatacctatgtaacaaacctaaacgttctccacatgtatcctagaacttagttttttttttttttaaaaaaagaagaaagaaaaatgattaattacctttgtaaaatttgtggttcagcaatttttgcaatctagagctgccacatacagtcattcagcttggctactgtccaactctagcatgtatcatgcacacagattaaaatgtaaaatgcatactcttacagtcattcaatggtgcttctaactacaaaatacatattaattgtaaattttyttactaaaaaactgcagcctgatactctcatctctggtgaattaccatgggatcttaaattctgaaaaaaaaaaaaaaaaaaaaaaagcatcaacaactaggcaatacgcaaatagaactgaaaacacgctgaagaaggaaggtgatgccagtaatgtaattcaaactgattaaaattccttcaaggttgtaatttctgtgcttgtatttgcagcatttataccaccaattcagtcaattaataataac

SEQ ID NO: 880368 - DNA, 602 bp, Homo sapiens
acagtgtggtgattcctcaaggatctagaactagaaatatcatttgatccagcaatcgcattactgggtatatacctaaaggattataaatcattctataaagacacttgcacacgtatgtttattacagcactgttcacaatagyaaagtgtttgaaccaacccaaatgcccatcaatgatagactggataaagaaaatgtggcatgtatacaccatggaatactatgcagccataaaaaggatgagttcatgtcctttgcagggacatgggtgaaactggaaaccatcattctcagcaaagtaaaacaagaagagaaaaccaaacactgcatgttctcactcataagtgggagttgaacaacaagaacacatggacacagggaggggaacatcacataccggggcctgttggggtgtgggggacttggggagggatagcattaggagaaaaacctaatgtaaatgactagttgatggaggcagcaaaccaacacggcacatgtatacctatgtaacaaacctgcacattgtgcacatgtaccccagaacttaaagtataataataaaaaaacttatttttagtgttaaaatacacataac

SEQ ID NO: 880369 - DNA, 601 bp, Homo sapiens
tctgtaaatttaagatattgtctgttgtcttctagttttggtggttggggatttcacttttttataccatccctgctttccccactatattttctcaataaagtcagagcataattttttactaaataagtagttaggatgtaacatccataatatcaatatggctatgtaaataatgtgcactgctaagccagatagtktactctatggtaacatttctttctgtgtagactactaaaaatacaaaaattagctgggcatgatggcatgcacctgtgttcccagctactcaggaggctgacacacaagaatctcttgagcccaggaggtggaggttgcagtgagctgagatcacgccactgcactccagcctgggcaacagaggaagactctgtcaaaaaaaaaaaaaaaaaaaaacaccaaaaatttgtctacagcaaatacatagggttaatattaatatcccttttacaagaagggctccttcttatagaaaaaggaaagaccaatagaaaaactggcaaagggcatgaaatacatttcataggagaagaaatacaaaagaagataaaattatacccatccttattcattgtaaaag

SEQ ID NO: 880370 - DNA, 566 bp, Homo sapiens
tatcttaaagaaggcatacaataaatatttaataaaaattaaattaaaaaaactggtaggtaaccatggatcatctctagagatgatcatcgtatcagacctacatagtatgttagagcttggggtctggagtccgacggcccgaatcttcctcacagtccagctttcagtgaacctcacagtgcctcagtawccttaattgaaaaacaggaataataatagtaccttccctataagggctttagagaagtgagtgggttctgcctagtatctgacacaacaagtagtccataaaggttagctctttttaatccatcccacaggaagctctgatgtgctatgctgggtagaaaagtatatcttacaaaaatatccctgttttgctctctgaaaccctgttgaaaccttttgacattcagctacatgttaagccctgggcaaccttggagttcttccgccatctgtgtaactgtgaatcttaacgtgctaagtatacaacatacacacatcacctctcatttaataaagcaaattgttccacacaagggtagcagagctctcgtttg

SEQ ID NO: 880371 - DNA, 566 bp, Homo sapiens
tatcttaaagaaggcatacaataaatatttaataaaaattaaattaaaaaaactggtaggtaaccatggatcatctctagagatgatcatcgtatcagacctacatagtatgttagagcttggggtctggagtccgacggcccgaatcttcctcacagtccagctttcagtgaacctcacagtgcctcagtatccttaattgaaaaacaggaataataatagtaccttccctataagggctttagagaagtgagtgggttctgcctagtrtctgacacaacaagtagtccataaaggttagctctttttaatccatcccacaggaagctctgatgtgctatgctgggtagaaaagtatatcttacaaaaatatccctgttttgctctctgaaaccctgttgaaaccttttgacattcagctacatgttaagccctgggcaaccttggagttcttccgccatctgtgtaactgtgaatcttaacgtgctaagtatacaacatacacacatcacctctcatttaataaagcaaattgttccacacaagggtagcagagctctcgtttg

SEQ ID NO: 880372 - DNA, 687 bp, Homo sapiens
agacattcagaggtcagatttaagggatgagatgagattctgtgtctgattcttcttgtggctatctccccctgcccctcaaaacctaccgagttgagaactgatcttgatgatgaatttgtttttaatagaccctgagcagraagtgaactgaggtggaaaaaatgttcttattatttgagggagaaccatagccactcttcacctctcagctgggtcagctgatgccagaatgttcttcacgtaccaattaaatgcaatgtgagatatatatatatatagctagatatatagatagatatatagatatagagcacctactgcatgccaagcaaatgtgcaggaccaaaaaaggcaataaaaagtttttattttcattggaatttaagtttcatgtcttgctgctgaatgcctttaacatgcctggcacagtttagatgttcaataaatgttgaataaatgaataaataatgcactctgtaaatcaatctcataagccaacccagatagattggtagcagctgcccagagggctgtatcaagaaaaatcctgaggctatatttaagctcagtgggaaatgtgacctggttgattagcagtgtctgtcaagggcagaagaggggtgaaatcaagtgtgtgatatattcgccttttgggggctaaacataagtaatatagctattctt

SEQ ID NO: 880373 - DNA, 687 bp, Homo sapiens
agacattcagaggtcagatttaagggatgagatgagattctgtgtctgattcttcttgtggctatctccccctgcccctcaaaacctaccgagttgagaactgatcttgatgatgaatttgtttttaatagaccctgagcaggaagtgaactgaggtggaaaaaatgttcttattatttgagggagaaccatagccactcttcacctctcagctgggtcagctgatgccagaatgttcttcacgtaccaattaaatgcaatgtgagatatatatatatatagctagatatatagatagatatatagatatagagcacctactgcatgccaagcaaatgtgcaggaccaaaaaaggcaataaaaagtttttattttcattggaatttaagtttcatgtcttgctgctgaatgcctttaacatgcctggcacagtttagatgttcaataaatgttgaataaatgaataaataatgcactctgtaaatcaatctcataagccaacccagatagattggtagcagctgcccagagggctgtaycaagaaaaatcctgaggctatatttaagctcagtgggaaatgtgacctggttgattagcagtgtctgtcaagggcagaagaggggtgaaatcaagtgtgtgatatattcgccttttgggggctaaacataagtaatatagctattctt

SEQ ID NO: 880374 - DNA, 594 bp, Homo sapiens
ggacaggggatttttttatttgctgatctctggatctggcagtatttaaagttaatttcactcaggagtgctttgtgggcttgtggatgcttttctgtttggacctcctctgccctcatttatctgattgtccacttttccggttctctggttgttaaggtcttctggcttaagacctcttggacaatgatttctctttttcctgttctgcaactgactcctagtccttrgcaaatggaatcatccaatcttttcattaatagatgtaggaaatgtagggcctttagctttctcaggtattaaaaaaaaccatcacttttatatgttaaatcaaggacgctgagtaatatcatcaaagctgcctttactgtgcttggaattcgaatgtaatatggtagaggtgataagaaaagaaatcatatctgataacagtactcttcgaagaaaatcttcccagaattcctactttgttctctgtatcttgacttttttaaattttaaagttggaaagttctttgcatcttttttctctgtatcttgattttttttttatttttaagttggaaagtggtccagtaacatgaaaccaattga

SEQ ID NO: 880375 - DNA, 626 bp, Homo sapiens
acaatgaaatactctaaaatcattgacttgaatggtttaactaggaaaattgtattttatgtcaatcatatatcaataaaattatttcaaaaatggcagacgagttctaagttatgacccaatgaatcacctggatgccaaacatatttttcattttacctatcatttaataataaccctatctctttcttctgatgattacagtcactatctctgccaagatagtgacttttttcttccctgcttgtttttagtattaggagactaacattatgtggcagccataccttgaaatttgctgaaattctggccgtcatccctggtagaagtgtatcctcrtggggaacctagactttcagatctgaagagactacagttgtagatatggcaagcccacattcaccaagtcagtcactgagagtaacggtaattacagtcattcctacttccatctcttggttctgaagcttacttattttagataatgaggaaagataccacattattatattgatttagtgtgtatattgttcctaaaatatggtgccccatctgagcagggtgttgttaccaacctagcttctgtaacatgcctcaattttccatttcttcatatcctttcctgt

SEQ ID NO: 880376 - DNA, 621 bp, Homo sapiens
  misc_feature 446: n = A,T,C or G
cacacaccattggttgtttctctggagaactttgactaataaagcatcataaggtaacataaagatcttcactctttttgcttacccccctcatttatgcacacgccttttctgtagacctctctgtctcagtcttctaagctgtctgcttctaggcccctgataaacaaagcaagtctttccccactgccaatgagttcatatatgttgtcatctatggaaactattcttgccacacaatatgaatgaccaagtatatcacctgaagctctgcccacatgaaaattcctcttcaccaatgtcattcatgaccacttcttcagaaatgaagtctactaaacatgttgcttatttctttatggggggagttgtgagatactgtaatttgggtttctttatgtttgaggaacatttcagaacacccccaggtcattggaccccccaancaatgcacttatcgatacgttgagtcccaraaacattatagagtatatttctcacactcttgagtgtatgagctttaagaaggcccaccttatacagtagaattagcgcatttttaatttgcaaccacaagccaatgtactcataatctttttcttggcctttgccttcaatata

SEQ ID NO: 880377 - DNA, 629 bp, Homo sapiens
taacaaaaatgtgaaatattgaatgtatggcttaagagatctacaataaatgattatgtgaagttttgctttgttttgtatctgtagctgcttcttgaattacctgtcatttgtgattcttattaccttgcgtgtgtgtgtcaaaaaacattttcaaccttaaagcwgtgcgagtttgatctacagttgtttctgattcagtcaacactgagcttgaatattaattttatgaatttagttgcaagaataaaaggtagctggagaggctgggagttcaggagaatgcctcagtctccagtgactttcacagtaacactaaataaaccaagaatctaagaaaacaccatgtacttcataggcggtttcagactagttcaccgtacacttgttactcaatgtttgttcttaagtatttttaggtctttggagcttttttaagatgcagaaacctaggtcccattccaaaaatgccactcaaatttttttttaaccatgtccttggggatgagacttacttaccatttcttacacctaccagaacacaactcataagcccttcttcccatgtctagagattctggcttccccactgtaagaactgaagatactgcagctgaattgatgtcatg

SEQ ID NO: 880378 - DNA, 586 bp, Homo sapiens
ttaaggcatataagaaaaagagtgcagtgaggcacatttagaaagatagctggtaatggtgcagagagcatattaaaaagaaaaaatatgacaaccagaagattagttacaaagtatattagtcagaataggctaggctatgctgtggtaacaaataaaccctgacatttcagaagttgttcccatcatctctgacttatagaagacatttcctctccctttttgaagctgtagcatctggaacacattyaacctgaaagactgatggggcaggaagaaaataattgtggaggaagcacttctacttttaaatttctcaggctaggagagacacacactaattctattaaaagtccattggccagtattgttcagtacctctacactaaccacaagtgagtctgggaaatataaagaagctccaagatatgagttttttaatctatgtcataaaatgttatcagttttgtccattaactgtaagatatacgatgaaaatagaaaccagagctccaacttaagaactatttatgggtataattgataagatatattaactggtatgtgattaggcagaatgtgagta

SEQ ID NO: 880379 - DNA, 592 bp, Homo sapiens
atatccccttgattgattgatccatatagcatgatacagtgactttcttttactcatgacagattttgactgaatgtctattttctctaatataagtataaccactcctagtctgtttcagttaccatttgcatgaaatactttttttcatccctttattctcagtctttgtgtgtccttaaggctaaaatgagtaggcattgagtccatttgtgccactataacagaataccaratactgggtaatttattcaaaacaatagaaaattatttctgatgattctggaatctggaaaaattcaagatcaaggtgtaggtaggattggtgcctgatgagcattgctctttacttccaagatggcaacttattggtgcattttctggagaggaagaatgcagtgtcctcacttggtagaaggaggtagaaaacaagagagagcttccttcaactttcaatctcgagcccttttataagggtgataaccccattaatgtgagtacagtcctcatgacttaattacctcccaaaggccacatcttttacaactgttacattggggatgaagtttcaacataaattttggaggggata

SEQ ID NO: 880380 - DNA, 644 bp, Homo sapiens
tcattctagtctcagttcaaaggtcaccaccttataaagacattcaataacaatacaaatacaaagtagtcctcttgttactgtgtataatattgcaaatacaaagtagttccctggtcactattatataatcctgatctatttatagtatctgaaattatcctgctcatttgtttgtttacttgtttattggatgactcatcctactaaatcatgagttgatgaatattttctataaagggataaatggtaactattttaggctttgaggtccatagcctaacttctcaacttctgctccaacttctcaactccaccatgataatgtaaaagtagccacagraaaatcagaggtgaattagcatgactgtattcagacaaaactttatttttaggcttgccacggtggctcatgcctgtaattccagcacactgggaggccgaggtgggcagatcacctgaggttgggagttcaagaccagcctgatcaacatggagaaactccatctctactaaaaatacaaaattagctaggcgtggtggtgcatgcctataatcccaggtactcgggagactgaggcaagagaatcacttgaacccaggaggcagaggttgcagtgagccgagatcatgccattgcactc

SEQ ID NO: 880381 - DNA, 644 bp, Homo sapiens
tcattctagtctcagttcaaaggtcaccaccttataaagacattcaataacaatacaaatacaaagtagtcctcttgttactgtgtataatattgcaaatacaaagtagttccctggtcactattatataatcctgatctatttatagtatctgaaattatcctgctcatttgtttgtttacttgtttattggatgactcatcctactaaatcatgagttgatgaatattttctataaagggataaatggtaactattttaggctttgaggtccatagcctaacttctcaacttctgctccaacttctcaactccaccatgataatgtaaaagtagccacaggaaaatcagaggtgaattagcatgactgtattcagayaaaactttatttttaggcttgccacggtggctcatgcctgtaattccagcacactgggaggccgaggtgggcagatcacctgaggttgggagttcaagaccagcctgatcaacatggagaaactccatctctactaaaaatacaaaattagctaggcgtggtggtgcatgcctataatcccaggtactcgggagactgaggcaagagaatcacttgaacccaggaggcagaggttgcagtgagccgagatcatgccattgcactc

SEQ ID NO: 880382 - DNA, 656 bp, Homo sapiens
ttctcccaggccactttgacttgaagacccctcattggttttgctgaaactttctttattagtagtagcagtagtatactttaagttctgggatgcatgtacacaatatgcaggtttgttacataggtatacatgtgccatggtggtttgctgcatccatcaactcatctgcattaggtatttctcctaatgctatcccttccctagaccccacccmtcaacaggccccagtgtatgatgttcccctccctgtgtccatgttttctcattattcaactcccacttatgagtgagaacatgcggtgtttggtttcctgttcctgtgttagtttgctgagaatgatggtttccagcttcatccatgtccctgcaaaggacatgaactcatctttctttttttggctgcatagtattccatggtgtatctgtgccacattttcattttctttatctggtctattattgatgggcatttgggttggttccaagtctttgctatcgtgaacagtgctgcaataaacatatgtgtgcacctgtctttatagcagaatgatttataatctcttgggtatatattcagtaatgagattgctgggtcaaatggtatttctggttgtagatccttgaggaatcgctacactgtcttccacgatggc

SEQ ID NO: 880383 - DNA, 640 bp, Homo sapiens
tgtgccactatacccaagcctgggcaacagagcaagaccctatctcaaaaacacccccaaaatcattgataacacatatgtccataagaagatcattattaagtattccttgacctctgttccagcctaaacaatctctgtttgggaaaacttcagctcttggtttttaaaaagaaaagggaaagagagaaaataattttaaaaaatagatatgaagaaagaaaaattataatctgtttatatattcactccatcaacaaacagtgctgggcactgggggaaggagcggacaggcattcattcaaccaacaatgggaacctgagtcttccaaagagtgagcttacatctaggacattcaatagtttttgacctgcaaattgtgaccttacaggacrttcaatagtttttgacctgcaaattgtgaccttatagtagtattgcaggatctggccagcagcccgcaatgcaatggggctctttccttgttcccaggtggatcggcaggtcgagaaataatagacatacacaagatagtgaaagctgggtccaggagggtcaccaccttctggtcccatgagccgccaatgtactggatatgccagcatttattattaagtttagtgagggcaggggaaggtt

SEQ ID NO: 880384 - DNA, 612 bp, Homo sapiens
ctgcatcagagagaagagcccagggtattgagctgtcacacagccctgcacccctgtggccatgcaacttgaaccacatgagtggcttccgtggagaagtaagcactttaccttcttgcacacagatggaattatcacttgggatccagcctagggttccattaaaatgcttcaaacacagtctctttgtagcgcccttcagcttgaatccgtcttggcagtgaaatcgggctacagagccttcaaagaaaacccctccgctgggggtcctgaagccattctcgggaatgccggggtcagcacacacttgaaggtcatcgaaccctacatcaacaaagagaggaaaaggtgcctatgaatatgttctctcaatgccaagggccttcctacataaatggcagaccctgcatgatgtcatacgcyttggacactccagttaccccaccaccaaagccaaggacattttagtgcacattctactctgcttttagctctttgctcagaaaagcactgagtagagttttctgttcaatggccaagttagcctttcaaggaagttacaggaggagggagaaggaaacagacaaaaaggatttcacatgacaagtgcca

SEQ ID NO: 880385 - DNA, 639 bp, Homo sapiens
tcaacctgtcatctaggttttaagccccacatgcattaggcatttgtcctaatgctctccatccctttgttcttcaccccctgacaggccccagtgtgtgatattaccctccctgtgtccgtgtgttctcattgatcaactcccacttacgagtaagaacatgtggtgtttggttttctattcctgtgttagtttgctgaggatgatggtttcccacttcatccaagtccctgcaaaggacatgaactcagtttttcatggctgcatagtattccatggtgtatgtgtgccacattttctttatccagtctatcattgatgggcattttgttggttccaagtctttgctattgtaaatagtgcttcagtaaacatacatgtgyacgtgtctttatagtagaatgatttataatcctttggtatatacccagtaatgtgattgttggatcaaatggtatttctgcttctggatccttgaggaattgcaacactgtctctcacaatagttgaactaatttacactcccaccaacagtgtaaaggcattcctatttctcctcatccttgccagcatctgttgtttccagactttttaatgattgtcattttaactggtgtgagatggtatctcactgtggat

SEQ ID NO: 880386 - DNA, 576 bp, Homo sapiens
tatatcctctcacaattaatatgttggattcctaacccccaaggtgatggcattaggaggtgagacctttgggaggtgattagttcatggaagtggaatcttcttgaatgggattaatacccatataaaataggcccaatgttctgacttcaaactatactataaggctacagtaaccaaacagcatggtactagtacaaaaacagacacatagaccaatggaacagaataaagaactcagaaataaaaccaagcatttacagccatctgatctttgacaaagtcaacaaamgcaatggggaaaggacttcctattcaataaaaggtgctgagatacctggctagcaatatgtagaaaaatgaaactggacttctaccttgagttgatacaaaaatcaactcaagatgaattaaagatttaaatgtaaaacctcaaaacataagaattatagaagaaaacctaggaaataccattctggactttggctttggtaaagaatttatgactaagtcctcaaaagcaattgcaacaaaaaaattgacaagtgggacctaattaaactgaagagcttctgc

SEQ ID NO: 880387 - DNA, 643 bp, Homo sapiens
gagaattcccagatggtcaatcattgtatttgttatttttgcatttggagggcactccctacctctgtcacctctccccaccatcaccacctccttcaaacaagagtcacacagaagatacctctcaaatgcaaaatctattctgtctcagtgccacaggcttaggtctatctgtggattccagctaatgggatggccatatgtcaacttagaaagggtgggggctgtgatgtgaccccagcatcatggtcagctccatgccagtacaacagtcttccaagttaaaatgtagataagacacaggtacatgtacatttatggaggttaaataacagaaagtgaatccactttaaaggtttataaaatgagatagggatgatggtagggctgcatgtgttgggcactggtgcctgttgcagtcataattaacactgcttaactgacatcttgctgaggaagagagggcgatggrgtggtaagaaagaaagtagacataagaaagcaaaatgaaggccgggcatggtggctcatgcctgtaatcccagcactttgggaggctgaggcgggcagatcacaaggtcaggagttcgagaccagcctgaccaacatggtgaaaccccgtctctactagaaatacaaaaat

SEQ ID NO: 880388 - DNA, 650 bp, Homo sapiens
tgatagactggataaagaaaatgtggcacatatacaccatggaatactgtgcagccataaaaaaggatgagttcatgtcctttgcagggacgtggatgaaactggaaaccatcgttctcagcaaagtaacacaagaagagaaaaaccaaacaccacatgttctcactcataagtgagagttgaacaatgagaacacgtggacacagggaggggaacatcacatactggggcctgttgsgggggtgggaggctcgggggagggatagcattaggagaaatacctaatgtaaatgatgagttgatggatgcagcaaaccaacatggcacatgtatacatatgtaacaaacctgcacgttctgcacatgtaccccagaacttaaagtataataataaaaaatattgtttgttagttcttgtgtttttcagctccatcaggcagaaataagactgcacatttacaaccatctgatattcgacaaacctgacaaaaataagcaatggggaaaggatttcctgttcaataaatggtgctgggaggactggctagccgtatgcagaaaattgaaacttccttaaatcttctgcaaaaatgaactcgagattaaaaacttaagtgtaaaaccgcaatttataaaaaccctagaagaaa

SEQ ID NO: 880389 - DNA, 790 bp, Homo sapiens
ggaaatatagaaaagataaaaaagagaaaaatctgtttcatgaagcttaaatgacatggggaacacactcaataaaatcacagctattataatgtgtgcatcaggctctgccttccttgcagtttcaacaacatgaatataagtggttgtgatgattaattttgtgtcaatttggctgagcagagatgtgaagtcaagcattattctgggtttctttaaggatgyttttggatgagattaatgtttaaatcagtggactttgagtaaagcagatggccctccctaaagtgagtgggcctcatctaatcagttgaaggcctggatggaacaaagactgaccttaaaatcctgcaagattgggtcttccctgaatttccagactgctggcccaccctgcagaaataaggtattattttaaataattagtagttaacattttctttaatccttacacaactcaatgattaaaaaatgggttatcataaggtaaatacatttcccaagatagtaaaggtgaaaagcagaaatttcacctgcgagtgaaactcagcaattctcttcagaacatgtgctcttaatgactacagttccaacaatctgctccaggtttatcaactacaaatcagatgaaatccaaatcctcccaaatcttaaccctataattatttaaagaaaaatatgtcactggctagtaaatcttgccatttgcaagtgtatatgaaattgaaaggaggttgctgtccctgccttgtgtctatcagcaccacctaattaattttcttaattttta

SEQ ID NO: 880390 - DNA, 525 bp, Homo sapiens
gctttccttcactcgaattcattcttgactagagcctgtatatgcctgtttcagggacatttaaactcttaaaggatttcttctgatctttactgaatacattaaggagaatgccaaccagtgcccttttgtgtactgggacatgtagtcatgtgattaaaacagggaacatgaactctgactttaaaatgtattgtagatataaatgctctcagctagaaaaggttttccacatccacagtcatgatgggagcctttcattcctcagaaataatcccyttttaggtcatcaaaaaaaagtacaactgccacagctcatgatgcaatgtcttcatgagcccagagcacatgcaaatcctaagggaactaccatagtacagcgctcattcttggcaccagaacaaatgaaacatattctatcctgcacacacctgccagagcaggccactttcctcttctgggagatttaaaaagctccccaaaatgttattactcccatccccaatacacagaaaaaggggaaaa

SEQ ID NO: 880391 - DNA, 589 bp, Homo sapiens
gatgttacaatcttgtaggaaatagaggacaaagacctgaattaaggaattagccatgaagacagaaagaagaaattagatttagggaattctgataaaataacatttaaaaacattttgaccaattcttcagtgtgatgagggaagaagccattaattatctctagcttttagctagatacatcttgttgagaagtagatgagaagatagtaacaaaatgatmcatatttagaaacatgtactggtatctgtgaaacatgcccaaggaaatggccaataggcatgcctggctacatactttgtaaggcccagcacaaaatgaaaatggaaggtcttattcaaggattattaaatgtattaagatggtgacagcagaacattaaattaagcacagggctcttccatgcatggggcgccatgtttctaagcaggtggcttgcccttgaaactggttctgctggtaggcagaagaaaacatggcagttttctgaatctcaggagagaggaatggactgaagaaataggttaaaaatcaatagtgttatatatgttataaatgaagtaaggagagcttggagctcatacagt

SEQ ID NO: 880392 - DNA, 664 bp, Homo sapiens
acaagaaggcttatcaaggtctggtggacttcacaacccctccctactgcatggagcctatgctgggattctgctgcctggatccaagagtcagtgcttctgctactggacattctgtgtaccatggatctttcacttcaatgtctagagagttttacgtggaataaagatttcacttgctctgtaattaactaattaactttataaatgtgtataaaacttctatttgaagctgaatgtatgctgttttatgcagtgctggagatggcctgatgagccaggtagacaccccctgtccaagctgcttcatcctatcctgccaactgagctgactgaagaatttaggaaattaaaaatagaaaatctagaaaaataaaaaacacactcytaagacccatgagaatactttttctaacttatgtgaaaatcagaaataatttctttagaattgcaatagtatccacatattttgttgtcagaaatttctattaattgggcatgagagatcctatattacttttcattgaacagatgatagaataacttaaggagtaaattgaattaaaaaaggccaattttggcacatttctaagaaaggagttttccttttttctgcataatctagttttaattcctattcatatatgttattatataaacacgg

SEQ ID NO: 880393 - DNA, 598 bp, Homo sapiens
aaatggtgtagcacacatggagagccacatgcaaaaaacaaaacaaagaatgtagacatagaccttaacatttttacaaaaattgactcaaaatagattatatacctaaagtaaaatgtaaaactgtaaagctcctagaagataatgaaagagaaagcctacatgatcttgaggatggcaatagggcacaatactgaaggcacaatccatgaaggaattaattgataagctgtatttcattaaaattttaaaattctgcctcacaaaagtcacagaatgaagagacaagccacagactttgggaacatattgcaaaaaacacatctgataatgggctgttattcaaaatatgcaaakaactcttacaagtcaaccataagaaaacaaacaagctgattttaaaactgggccaaaggccttcacagacacctcaccaaagaagacgttcatacgataaatacacaaatgaaaagatgttacagatcatctgtcatcaggaaaatacatattaaaacaatgagttactactatacacctattataatggtcaaaatccagaacactgacaagatcaaatgatggcaaggatgtggagcaa

SEQ ID NO: 880394 - DNA, 645 bp, Homo sapiens
aagctgtaaaaactgatccctgcaagattttagcatctttttacagcttccagtcaaaccatgaactccagcatcaccaactccagcctgataattacatgtactgaaagagatatccattgaaagactccctcgaccccccctttaaagggactttcatcaggtgctattaattaatccttgtactgttaagttaaagggttttgattcctgggtgcacatatctcatctgaaaaaggcaccaactcctactaattcttaaaatattgatactattatctgacaccatactcargttaacaaaagccttgtcttcagacccagaagaaaggtagcatgaaaatgatctgcttttgtgagacataagactagaaattaaaactattcaatctctctaggctcagtgactactgcaggagagatgggcatgtgagattgtaagggcctgttttgagggatacaattagttcagatgctccaaatcaaggatggcacagagttacctaaacagccaacaagttgaggaattttgccactctgaattccttaactcaaaagggtttaaccaaatgcttatgtttcgtattgctaaatggctacaagtcagtatctaagaccagaattcatttctataaccttactttt

SEQ ID NO: 880395 - DNA, 611 bp, Homo sapiens
cccaaactgatggcagtaatcattgattgcattgctatatttaaaatgtgcatcttcaaaattgcaagtttatttaatagaccattttaactatgaaacatcaaaagcattaaatttctcaagatattttcaaatgtatcaaagaaaattaacttacatgaactcggtccaacatttaagactatcttattgagataaaaaactagagaaatactgaaattttgatcagtgttttgttttgtcataggggttactatgagccagcatttaaatactaattagctgcagtaaaatatttactgaaagaccattcagcatttgagagaacacataccaaaatggaggctacaaataagggggtaaaattcacttctatgtaaaaataatcatggtaaacatgaattgccagtgaaaatcacatgctcttcaagtcagagctactagtttcygaagggcaccatctccactcatgtatttgagtatgcttataacaacgcatgtttctgttaaaagtgcatatattacaaaaatatttttatgaaagagcattcttagcatatatgaggatattttgatcaactaatatatttttccttgtctttacacaaaag

SEQ ID NO: 880396 - DNA, 590 bp, Homo sapiens
agcatgagaatggactaatacacaaccccattaaaaagtgggtaaaagacataaacatgaacagatacctctcaaaaagagacatacaagtagccaacaatcatatgaaaaaatgctcaacatcactgatcattagagaaatgccaattagarccacaatgagataccatctcacaccagctagaatggctattattaaaaagtcaataaataataattgctagtgaggctgtggcataaaagaaatacttttagactgctggtgggagtgtaaattagttcaatcattgtggaagaagacagtatggcaattcctcagtcacctaaagtcagaaatatcattcaacccagcaatccctctagtaggaatatacccaaaagaacataaaccattctattataaagacacatgcatgcgtatatttattgcagcactattcattatagcaaagatatggaatcaatccaaatgaccatcaatgatagaatggataaagacaatgtggtcatgtataccatggaatactatgcagccataaaaatagaatgagatcatgttctttgcagaggcatggatggagcaggaagcc

SEQ ID NO: 880397 - DNA, 612 bp, Homo sapiens
attgatagtatttgatacccatcttctggattcttcagcattacacagacacagccaaagagtcaagacagctcctaagaaaaggaatctgtttgcttcctacttagtaaaagcttgtttatagaataaaacagaggcgaatgagctataatctgaaattttaatttgccctacaattaatttacataatttgtgaaatggtaagttattgattttcctagctacaaagattgctatctaaaatttctcacatgcaatctstgcttcatactctagtcttataaaatggaaacctagtaaggaatacactaaaaattcttaaacacaaacattgtcaaggacataatattctttcagaagttaaggttgccctcagcttttctgcacaaattgacttcgcagtaaatctaaagtaaattttcccaacttctctcccactttccactctaattgattctccatgaaactgctggggttgtcttcctaaacaacaataataacaaatgaagaagaaaagaaagagaagaggaaaaaaatggtagataaaagggaaagtaggacagacgatgtcatccagctgcagagacctgcaaggtgcttctcactctgttc

SEQ ID NO: 880398 - DNA, 643 bp, Homo sapiens
tttgctttattgtgcatctatttttattcatttaaaaaattttttaatttccacattaatttgttgacacaaagataattgaagatcatgttctttcatttccatgtatttgtatagtttcctgagttcttcttaaaatgaatttctgctttcattctactgtggtctgagaagatatttgatataattttgatttatttaaacttattaatatttgttttgtggacttacagttggtctaccttaaaacttccatgtaatgatgtgaaaagtgtatattctgcagttgttgggtagaatattctgtaaatgtctatcaggtcaattttgtctacagtctaatttaagtccagtgttgctttgttcatttactcctttaattatgtttctagtgctgtcagtggggtgttaaaattccactattattgtattgctatctcttttcttaggtctagtagtgtattagttttcacactgctatatatrtactacctgagactgggtaatttattaaaaaaagaggtttaattgattcacagttccatatggctggggaggcctcaggaaactaacaattatggtagaaggtgaagaggaagcaaggcatgccttacatggttgcaggagagagacggtgaggaag

SEQ ID NO: 880399 - DNA, 638 bp, Homo sapiens
actgaatccagcagcacatcaaaaagcttatccactatgatcaagtcggcttcatccctgggatgcaaggctggttcaacatatgcaaatcaataaacataatccatcacataaacagaaccaatgacaaaaatcacatgtttatctcaatagattcagaaaaagccttcaacaaaaacagcccttcatgctaaaaactctcaataaactaggtattgatggaatgtatctcaaaataataagagttatttatgacaaacccacagccaatatcatactgaatgggcaaaaactggaagcattccctttgaaaactggcacaagacaagcttgccctctctcagtactcctattcaacrtagtgttggaaattctggccagggcaatcaggcaagaggaagaaataaagggtattcaattaggaaaagacgaagtcaaattgtctctgtttgcagatgacatgattgcatatttagaaaaccccattgtctcagcccaaaatctccttaagctgatgagcaacttcagcaaagtctcaggatacaaaatcaatgtgcaaaaatcacaagcattcctatacgtcaataatagagaggcaaatcatgagtgaattcccattcacaattattacaaagaga

SEQ ID NO: 880400 - DNA, 638 bp, Homo sapiens
actgaatccagcagcacatcaaaaagcttatccactatgatcaagtcggcttcatccctgggatgcaaggctggttcaacatatgcaaatcaataaacataatccatcacataaacagaaccaatgacaaaaatcacatgtttatctcaatagattcagaaaaagccttcaacaaaaacagcccttcatgctaaaaactctcaataaactaggtattgatggaatgtatctcaaaataataagagttatttatgacaaacccacagccaatatcatactgaatgggcaaaaactggaagcattccctttgaaaactggcacaagacaagcttgccctctctcagtactcctattcaacatagtgttggaaattctggccagggcaatcargcaagaggaagaaataaagggtattcaattaggaaaagacgaagtcaaattgtctctgtttgcagatgacatgattgcatatttagaaaaccccattgtctcagcccaaaatctccttaagctgatgagcaacttcagcaaagtctcaggatacaaaatcaatgtgcaaaaatcacaagcattcctatacgtcaataatagagaggcaaatcatgagtgaattcccattcacaattattacaaagaga

SEQ ID NO: 880401 - DNA, 638 bp, Homo sapiens
gccatatatgacaaatgcacagctaccatcatactgaatggggaaaattttaaagcttttcctctaagatcttgtacaagacaaggatgcccactttcactactcttattcaagatagtattagaaattcaagccagggcaaccagtcaagagaaagaaataaagagtatccaaattggaaaggaggaaataaaattatccctgtttgcagacaacacaatcttgtatatagaaaattctaagtactccaccaaaaaacacttaaatctagtaaatgaattcagtaaagttgcaaaatacaaaatcaacatgcaaaaatcagtagcatttctataaatcaataatgggctagctgagaaagaaataaaaaaatcagtccgatttacaatggctacaaaaagtgaaatatctaggagtaagttgaatgaaggagtgaagaatctctactaggaaaactataaaacactgaagaaaaaaactgaagaggatacaaaaaamcagaaaacactaaagaaaaagaactgaagaggatacaaaaaaatggaaagacatctcatgttcaaagcttggaagaattaatattgataaaaatgaccttactacccaaagtgatctacagattcaatgccatccctatt

SEQ ID NO: 880402 - DNA, 589 bp, Homo sapiens
ggagccggtggcatggggggtggtgtgaatgcccaccgaggtctgaagtggggtgcagatttgttcatcagcagaaagttactcgggtcatgtctgcagtggggggctcttccctagaggccttggccggctgcctccaggtcagggggctgagttggcatccaaagactcaaaggagtgaatcgtacatgtcagtcacagggttggcttgggcaccaccgtgctggggcaccactgggccctctgaccacctggasagcctgaccaggcctgccacagagacctcagagtgccagagaatctccactgtgtccttagctccacacagtcagggcttccctgaaatctgcctctctctgtcattatgcttggccggtactgctcatcctgatggcactgggcaggcagtgggctgcagaggcagagctgaggggaccaggaggcaggcactctgtgtgactttggaggatccttctaccccaaggcctcactgctgccatctgtaagtgaaggaactggaccagatggggaataaggaggcctccatctcatgccaaaggccaaggctaggagtggctgcctggggtgc

SEQ ID NO: 880403 - DNA, 525 bp, Homo sapiens
gttggcgggtccaggcacggtgtctcacttctgtaatcccagcactttgagaagccaaggtgggaactcgaggtcaggagttcgagaccagcctggccaacatggcgaaaccctgtctctaatacaaaaattagacgggcctggtgacatgcgcctgtagtcccagctactcgggaggcagaggcacatgaatcacttgaacccaggagtggaggttgtactgagccaagatygtgccactgcactccaccctgggagacagagtgaaactatgtctttaaaaaaaaaggcggggtgcagtggcacacacctgtaatcccagcactttgggaggccgaggcaggtggatcacctgaggtcaggagttcacgaccagcctaacatggtgaaaccccatctctactaaatataaaaaaattagccgggtgtggtggcacatgcctgtaatctgatctacttgggaggctgagacaggaaaacagcttgtacctgggaggcggaggatgcagtgagccgagattgcac

SEQ ID NO: 880404 - DNA, 569 bp, Homo sapiens
ctttcttatatatccccttctgtcgtttttcttcatggaatttataactccttaaagctaccctattcattgtctgtttgtcagtgtattttatttgtcctattctatggcatataagcttcatgagagcagtgtttcattgaccactacatctcccaccatctagtttctacctaaaacagtgcttcataattttagtgctcagtaaacatttgtaaaatttagtagcaaactggttcaacacctagcactgataaagcaacaattttcttgaattattrcagtctgagactggctgtatgtaatgttatgctatgtaaagaaaaattaagtgggaaatagtactaaattctgtctctcagttatttttgcccacaaaaatcccagaacccaggattctgtattctcttggtagcagtgtactgcattatggagagattagcttttgaacaccatcaataaacatcccacactcattcctttaacaaaactcaatggaaaaatttgaggccacaaaataagaaataaaaattcacagcataacctacaggggaaaatgtttaaggact

SEQ ID NO: 880405 - DNA, 540 bp, Homo sapiens
aaacttgaaaattatggaattatgtaaagagactaaatctacaattcactggcacccctgaaagagagggagagaaagcaagcaacttggaaaacatatttgagcatattatccaggaaaatttccccaacctcactagaggggccaacattctaatgaaggaaacgtatttaggtactatacaataagacactcccaagacacgtagtcatcagattctccaaaatcaaaataaaagaaaaaatataaatgcaggtagtgagaagaggcaggttaactacaaagggaamcccatcaggctaacagtagatcttataagaaggtcagaaaccctacaagccagaagagatgggggactatattcagcatttttaaagaaaagaaattgcaacaaagaatttttatatacagccaagctaggcttcataaacaaagaaaaaataagatccttttcagacaagcaaatgctaagggaaatcattaccaccagacccatcttacaagaaagaggtccttaagtgaatgctaactatggaaatg

SEQ ID NO: 880406 - DNA, 643 bp, Homo sapiens
aggtgatccaactcttgcctggtctctgcctactggggacattgtgacatatctctgcactgatctcccaggtgctgtaactttagtctaggctctggatacacggcattgtgacatatcactgcactgagcacccaggtgatataactcttgtctaggctstgcctacaggaggcttatgacatatctctgcactgatcatccagttgatataactcttctctagcatctgcctacagggtgctttgtcacatatccctgcaatgatcaccctggggatataccaattgtccacgctctgcctacaggggcattgcgatgtatctctgcactgatcacctaggtcatgtaactcttgtttaggttctgcctacagtggcattgtgacatatctctggactgatcacccaggtgatgtaactcttttctaggatctgcctacaggtggctttgtgacatatccctgcaatgatcacccgggtgatgtaccacttgtcaaggctctgcctacagggacattgcaatgtatctctgcactgatcacctaggtcatgtaacccttgtctaggctctgcctgcagtggcattgtgacatatctctgcactgatcatccaagtgatgtaacacttgtctaggatctgc

SEQ ID NO: 880407 - DNA, 634 bp, Homo sapiens
ctcagtgatgacctgggtgcacccgtgagtggagaagctaggcctggccagagaagcaggagaaacacacacataagtgcacacatatacaggcacacacacatgcacaaacacactgcatccacacatgtcagttcargggatagaggacattgactctgggccctgttgacccatgcaggctcccattgtggtgggttgtgtcaccccacaatgtcactgttgctaagcccccatcgcctctgtgttgtggagcagttagagacacacagccgtgtctgtgagtggctctgcgtgaaggaccattttctaggtgagaggcacatctcaacacagctgactgatcagactcaggtgagtgggacctgctctcttctttttctcctggcttggggacagtcgctatcaggtgggtggttttggcctctgggcagctgctgagggtaatccctgaacactcactgggtgcctattctgtgctgacagtcatctcattcatcctcgcagcaattccattctgcatcttttctgatcacccccgtgatgacccaggacaaccccatcaggccctctcacccaggcccagtccagctccatgataaccaagaagcaggtccagagacaaccacccttc

SEQ ID NO: 880408 - DNA, 634 bp, Homo sapiens
ctcagtgatgacctgggtgcacccgtgagtggagaagctaggcctggccagagaagcaggagaaacacacacataagtgcacacatatacaggcacacacacatgcacaaacacactgcatccacacatgtcagttcaggggatagaggacattgactctgggccctgttgacccatgcaggctcccattgtggtgggttgtgtcaccccacaatgtcactgttgctaagcccccatcgcctctgtgttgtggagcagttagagacacacagccgtgtctgtgagtggctctgcgtgaaggaccattttctargtgagaggcacatctcaacacagctgactgatcagactcaggtgagtgggacctgctctcttctttttctcctggcttggggacagtcgctatcaggtgggtggttttggcctctgggcagctgctgagggtaatccctgaacactcactgggtgcctattctgtgctgacagtcatctcattcatcctcgcagcaattccattctgcatcttttctgatcacccccgtgatgacccaggacaaccccatcaggccctctcacccaggcccagtccagctccatgataaccaagaagcaggtccagagacaaccacccttc

SEQ ID NO: 880409 - DNA, 639 bp, Homo sapiens
tgacaaaacacaacagcctttcatgctaaaaaccctcaataaactaggtattgatgggacgtatctcaaaataataagagctatttatgacaaacccacagcaaatatcatactgaatgggcaaaagctggaagcattccctttgaaaaccagcacaagacaaggatgccctctctcaccactcctattcaacatagtattgcaagttctggccagggcaatcaggcaaaagaaagaaataaagtctattcaaataagaagacaggaagttcaaattgtctctgtttgcagatgacatgattgtatatttagaaaaccctatcgtctcagcccaaaatctacttaagctgataagcgaattcagcaaagtctcaggatacaaaatcaatgtgcaaaaatcacaagcattactatacacaaataatagacaaacagagagccaaatcatgagtgaacttccattcmcaatcacttcaaaaagaataaaatacctaggcatacaacttacaagggatgtgcaggacttcttcaaggagaactataaaccactgctcaaggaaataagagaggacacaaacaaatggaaaaacattcatgctcatggataggaagaatcaatatcgtgaaaatggccagact

SEQ ID NO: 880410 - DNA, 636 bp, Homo sapiens
caaaatagcaaagatggcggtcctctcctcactctgggagatctgtcccattgaggtacaaacctgttgctggcctgaacacactggtaggaggtagctggagagtccagttttgaggtcccaaccagtgaggagaaacaggattggggaccctctttaaaaagcagtctggtcacgttttcatacagcagctgakatgtgctggggcactgcttttgtccccagtgagctaggactcttcaaatcccaaaggctggaacaatcaagtcactgaaacagcaaagatggtggcctgccccttcctctgggggcatcatcccagggaggtttcaaatctctgttgtacagaaaccaccagtgggggttgctgtagaccctggttgggaggtcctcccagtgaggagaaagaggactggggacccgcttaaaagaggagtctggtcacattttcatagagcagctaagctgtgctgggggaccacttccacccccagccagcttggaccctccacagcccaaagtctgaaacagctgttgcccaaataacaaagatagtagcccacctttccccctgggagctccacaccagagaggtttcaaatctctgttggccagaaaacagcaacaggggtgtct

SEQ ID NO: 880411 - DNA, 588 bp, Homo sapiens
ttttaactgttgttggtttctacgtcatatactttgaaagtaactgacccagggtatagggtgaggcctaccatctgccaggcacgtctagagtaggggtctttggtgaggaaaggatccttagaaaaagggacagtttagcattatttagtgtcaagttagctaatgatgtgatagagatcacaggcagggtctcactttactccacagtctttgcaaccttattgtccttctgtcttaacactcctgccttgacctccttacatttgcttygtgccatccaccccaatcccaatgtctttctccattttcttgctgaaactctttaaggcctgtgcatactttcagaacaccccgtatttctgctagcaaagcacttataaccatttaaattatgtgtgtggctggagagtatgtcagagcctccctgggagactattatatgctcactgcttcagagaaaagctatggagggcaaaaagcaaaggtttcttgtcttttatcttccaaatttttaatctatgggggcaggaaagaaaagacttactggtttaactaacatttttggagggacaaggccttgtccct

SEQ ID NO: 880412 - DNA, 682 bp, Homo sapiens
aacctttcagaagctggaagaagaaagcaattcccagggaagctcataagcctcctcagatcctcctctagaacggaaattccacccaccaaggagaagcagtttggacccactgcaccattgctgacagctgggttcctctctgcctctcctcccctatctccaccaggagaaagaagacccaaygataggtcttggggaaaagcttttcaaaaagcatcttttttctatcttcctttctctcaacaccacatgacagtcatgatagtcctaggatggctgcaacctcaaaaaaagcaaaacctgcaaataacccctgtgagacctctgtcctgactgtccaaaacatgaagcccaagagccagtttttcaaatgcactaatgtccacgggatgaaaatcttgtcctgtttgcctatattttcccttaccctcctcaactcctcgtctatgctgagaatatcagcatgctctatgatttccataacaaagtaagattcagaaaaagaagtataactagaagaaatattgttgcaaccattctacttttggatttggtatcaagtcgtatttaagacataatttattgccctacttcggacaaaatgtccaaatctgatctattccctctccctaactccaatctcaatgtcactcccatatttttcatgtaggttaagaca

SEQ ID NO: 880413 - DNA, 682 bp, Homo sapiens
aacctttcagaagctggaagaagaaagcaattcccagggaagctcataagcctcctcagatcctcctctagaacggaaattccacccaccaaggagaagcagtttggacccactgcaccattgctgacagctgggttcctctctgcctctcctcccctatctccaccaggagaaagaagacccaatgataggtcttggggaaaagcttttcaaaaagcatcttttttctatcttcctttctctcaacaccacatgacagtcatgatagtcctaggatggctgcawcctcaaaaaaagcaaaacctgcaaataacccctgtgagacctctgtcctgactgtccaaaacatgaagcccaagagccagtttttcaaatgcactaatgtccacgggatgaaaatcttgtcctgtttgcctatattttcccttaccctcctcaactcctcgtctatgctgagaatatcagcatgctctatgatttccataacaaagtaagattcagaaaaagaagtataactagaagaaatattgttgcaaccattctacttttggatttggtatcaagtcgtatttaagacataatttattgccctacttcggacaaaatgtccaaatctgatctattccctctccctaactccaatctcaatgtcactcccatatttttcatgtaggttaagaca

SEQ ID NO: 880414 - DNA, 682 bp, Homo sapiens
aacctttcagaagctggaagaagaaagcaattcccagggaagctcataagcctcctcagatcctcctctagaacggaaattccacccaccaaggagaagcagtttggacccactgcaccattgctgacagctgggttcctctctgcctctcctcccctatctccaccaggagaaagaagacccaatgataggtcttggggaaaagcttttcaaaaagcatcttttttctatcttcctttctctcaacaccacatgacagtcatgatagtcctaggatggctgcaacctcaaaaaaagcaaaacctgcaaataacccctgtgagacctctgtcctgactgtccaaaacatgaagcccaagagccagtttttcaaatgcactaatgtccacgggatgaaaatcttgtcctgtttgcctatattttcccttaccctcctcaactccycgtctatgctgagaatatcagcatgctctatgatttccataacaaagtaagattcagaaaaagaagtataactagaagaaatattgttgcaaccattctacttttggatttggtatcaagtcgtatttaagacataatttattgccctacttcggacaaaatgtccaaatctgatctattccctctccctaactccaatctcaatgtcactcccatatttttcatgtaggttaagaca

SEQ ID NO: 880415 - DNA, 560 bp, Homo sapiens
aacaaaagcaaaaatagacaaacggaattacataaaactaaaaagttctggcacagcaaaggaaacaatcaacagagtgaagagacaactcacagaatggtagaaaatatctgcagactgtacatctgataagaagttaatattcaaaatatataagaaacttaggcaactcaatagcaagaaaacaaataactcaattttaaaacagggaaaagacttgaacagacatttctcaaaagacatacaaatggccaacgggtatatgaaaacatgttcaacatcactaatcatcaagaaaatgcaaattaaaccaaaataagatattacytcatgcccattagaatagttattgtcaacagataagtgctggaaagatatgcggaaaaaaggaaaggcttgtacattgttggtggaaatataaattaatatagccactatggaaaacaatggaggtttatcaaaaaattaaaaatagaattatcatataatccagcaataccacttgttggtgtacatctaaaggaaatgaaatcaatatgctgaagagatatctgcactcc

SEQ ID NO: 880416 - DNA, 647 bp, Homo sapiens
tttaaagcatgatatgacaacccctatgtctatcagtgtgcaacctaatgaataaaatattatgtagccacataatatggtactgtgcagctatcaaaagaaataaaatgatcttcagaatgtattgttacatgagaaaacaaggtccagtagagtgcatctagtatactacatttgtgtagaaaggggaaaagatttatgaattgatatatgtataaatattcatattattatcttatatatgcatgtgtgtgggtttgcttatgcttttaaaaagaaataagtaaactaaaacatacactaaaaactaatttttaaaattcatttgttaaaagggtatagagaacagacaggaatgmatactccaaatgtaccttgtttcatagttttgattttggaatcatgtacaagttttagattattaaaaaccaaggttaaataaaaaggaaaaaatcaaaacaactcttaaaaaacaaactgatagaaataagcctaattatacatcaagtagattttcaaagatcaaatttcaaccatacatttcaatggaaaatatcctgaggaaaaaaagaaccacagagaaatctcaaaaattcaatggtcctgttgtttatggaagtatcattaggaattatgttaaagtcact

SEQ ID NO: 880417 - DNA, 647 bp, Homo sapiens
tttaaagcatgatatgacaacccctatgtctatcagtgtgcaacctaatgaataaaatattatgtagccacataatatggtactgtgcagctatcaaaagaaataaaatgatcttcagaatgtattgttacatgagaaaacaaggtccagtagagtgcatctagtatactacatttgtgtagaaaggggaaaagatttatgaattgatatatgtataaatattcatattattatcttatatatgcatgtgtgtgggtttgcttatgcttttaaaaagaaataagtaaactaaaacatacactaaaaactaatttttaaaattcatttgttaaaagggtatagagaacagacaggaatgaatactccaaatgtaccttgtttcatagttttgattttggaatcatgtacaagttttagattattaaaaaccaaggttaaataaaamggaaaaaatcaaaacaactcttaaaaaacaaactgatagaaataagcctaattatacatcaagtagattttcaaagatcaaatttcaaccatacatttcaatggaaaatatcctgaggaaaaaaagaaccacagagaaatctcaaaaattcaatggtcctgttgtttatggaagtatcattaggaattatgttaaagtcact

SEQ ID NO: 880418 - DNA, 497 bp, Homo sapiens
ttttcaggagatctctgctagatattttctgcctacattatacatattaaagcaaattaatagttttattccacattcttccattatatccagcttccccataacaatgactgctgtcatctaagttatttcgcaaagacaacagactattcttgactggcaggtttatgttttgctaggtttttttttttttttttttgtcaaatcctgatttattttaaaactttaaatattttaaaactttaaatttgtcatcataaaatcataaaaatctccagagtttttgttcatttatcattwagtttttatatttatttatttatttatttatttattatttattttttttgagatggagtcttgctctgttgcccaggctggagtgcagtgtcataatctcggctcactgcaaccaccactttccaggttcaagtgattctcctgcctcagcctcccaagtagctgggattataggtgcttgccaccatgcctagcta

SEQ ID NO: 880419 - DNA, 635 bp, Homo sapiens
ggtagggtatatgggtgacagacaacttgtctttttaggtcagaggcctccatgtcaagaggagctacaatcagaccaaatacagatcacaagattctgaactttgagcctaatgctgtgattagattagacttcgggatgactccggaggtgagtatattttgcctgtgagagggatgtgaataattaaggccagatgttaggctgtggcagattgtaatattggctgtaattattcacctctggtctccatggtgcttggcaacataattttgcagaatttcccaccaggagttaagagttgatttttccaccctgaagtctgggctggctttgtgatttgctttgaycaacaaaatgcaatggaagtgaaatcatgtttcaggcctcaaacttaagaggccttgcatgttttccaattgctctcttggaaaattcctccactggcatatgaaaaagcatcgactatcttactggaacatgggagaccacatggagcaaagaggagctgtcctagcagaagccatcctcaaatatttagttccccagctcacctggcagttgaactcagatgcattcatgaggccagatgtgaacaaaagaactggcccgctgagcacaatccaaattgctca

SEQ ID NO: 880420 - DNA, 632 bp, Homo sapiens
cacacagggaggcaggatcagaatgtggctgtaacttggggcaccgacgccgcctgggtgtcctggacacagcctggagaaagtctagagacagggctgtcacatctagaacaatggtttctgatgagcttgggagcaccctgtccaaattgaatcctccckagaaacccagcaatgtgagacagaaccaagagtggctcagatggaggccgtgggagcttggatgcctgcacacttggtcctctcatatacctgttggtggtcacaaccccatggtggctccagggaacacagtttgaccatcacggacctgggttttagagtcaggcaagagagacagaggctggcagtcgtgagtgtccggcacttgcaggatttgtgcccaccctcagcactcacagcctggtgggaggccaggccctggtgcccaaggcagccccttccctacagctgggacaggaggccacaggttctcagacacctggtgcctcctgcttccctgactctgattcctggtctccccagtagatgagactgagaccactgcggcaaacacaactcaacgtccctgtccctgcaacagttattcctatcgctgtacttaatagactggcagtctcatccatgcctcc

SEQ ID NO: 880421 - DNA, 608 bp, Homo sapiens
ggatcttcttcagagtatgaaacagacatccataaaccaatgtggatgttaatagatgattaaacaaagaaacgatgggaagaagaacacgtcttcttatagaagtattccaaatatctcaggcagatattcctccaatcaataggtgaaggctaaacactcatgagttgattgtgtcctgagattagagacatggaataaataatcactattagtgtattttataatgagacttcagatataatgccaaatacgtgatctatgaatgaataattttttatgttttttgtstaaatttgtgcacacacacacacacacacacacacacacacacacacatattttttgaaatacccactgataagagagaaaaaggcaaccacagactgggagaaaatacttccaagtcatatatttgttaaatcaattctttcaatttgttaaatgacttttataatcaatatgcaagtaaacttacaactaatgaaaagaaaaccatggagataaaaatgaaccaaatatcaggaaaggcatctcagcaaaaattatataaaaattgtttaatataaatttttttatttgggacatgtgcatttaaataaatatta

SEQ ID NO: 880422 - DNA, 587 bp, Homo sapiens
tctctgaagggcaataaacaaacacatgcacattgtaaaatattcataagtcattaaagtaaaacatagaagtccccctaaacacacatttccactgaccctgcaaatctcctctctataaattacagctaacagttggggtgttacatttgtctcagtacctcagcaatgactcactcatagcaatagttctttagaggcctataagcagacygaatggaagagttaaaatgggttagtggttaaaatctcccaccaataacctaaaaaattgagagttatttttatcttacttttctaagatatttttcaaggtaattggagaaaacaatgagtatggtcatattttacattaggaagatgagtcaaaaaaggatttaaatgagtttctgatttaaatacgtttcatttccttaataagtttttccaagaaaaagaagagttagagaaaagaatttgaattttcgaaggaatgtttttacaaatatcatctggctgattcaatcataaacaagagtaatttcataataccaatattgaatcagtcatagctattcattattacattctataagaatttcttagga

SEQ ID NO: 880423 - DNA, 407 bp, Homo sapiens
caagaagtaatttcaagagaagggacagctgcagatagaagagagcttgggattttgcagtttgttcctgttgagccccttatatttgtttttccgtgcatgcccaggccaagttttttctattttttagagtcacgttgtcattttacatccacctgcgtggatagaacatgcatttttctatattataaatgataccttgcatttatttagcataattraaagttatttatttgttcactgatacaaacaacatttattgggggccttctaaatgttaaagaaaagtaggtgttgtagaagtacagagaaggaacagctatggattttatactcaagaaatggaatattttccctttgagaaatgagacatgaatataagtgaatgtatcatgagatggaaagag

SEQ ID NO: 880424 - DNA, 609 bp, Homo sapiens
tttcaatgagactctcattgcaaataacacccaaatggggcctgtgttattaatgggattttcaaaatagtgaacctttttcccagtgcattcctctcagggcgatggagagctataatgttgacatgggtaattggaggcttaagtatatccttcatataaatctacatgtaagtaaattaaaaaataaatacatgagataaattgacatatttgtatatggagaaattatcyccaggaatgtcaatatgcaatctatttcatctctgccattgatctgctcttatttggggtatagagagggaagagaatagagaaatggggctgttctgaccctgagtctattttctaaaagcagcatagtcaatattaaacttttaaactagtacattgacacgatggttgtctaagtctacagtgaaaaatatcagggaagcattgtgaatgtaagggtcacattcaatatgcaactgagatgtaatggtcaggctgtgagatacacagaagggagcctgggactgacattttttaatgctcttgctcccacatttaatcactggtgcatgcttccctcacttacctgcctcacccctgcaccctcctttcccc

SEQ ID NO: 880425 - DNA, 716 bp, Homo sapiens
gcgtaaaaatgctactgattttatatcctgaaactttgccttaagttgtttatcaggtctaggagcctttgggcagagactacgggcttttctaggtatagaatcatattgtctgtgaagagaatgagtttgtcttcctcttttcctatctggatgctttttatttctttctcttgcctgatttttgggtctaggacttccagtgttatgttgaacagaagtggtaagagtgagcatccttgttttttttcagtgcacacatgtggtggtgggagagggcacacaagttctgcctgcaagtgtgcctacaatgtaatggggaaagcttccagcttttgtctaattagtataatactggctgtgtgtttgttatagatggctcttattatttttaygtatgctccttttatgcaatgtttgttaagtttttaacatcaagggaggtagaattttaccgaaagtgtttgctgcctctattcagaggatcatgtggtttttatttctagctctgtttataagataaattatatttattgatttgcatatgttgaaccaccactgcaacccagggataaagcctacttgattgtgatggattacctttttaatatgccgctggatttggtttgctagtattttgttgaagacttgtgaatctatgttaatcaaggatattggcctgaagggtggtttcatttgctgtgtctctgccaggt

SEQ ID NO: 880426 - DNA, 558 bp, Homo sapiens
ttatttattaattcaaggatttattagcaaagaagaaggaacataagttcagtgataaactaggattcagcctaatattttactataggaaagattagtgattgccttgaaagaagagactttgttaattttctagttgtatggaattaccattttaaagataagagtctgtggatgtttattctctaagactttgactttcaaatttcctattttgtgtaaaagtgtttagagactatcagagaaactttcagacttttgcaagttttagtcactttagctaagaaaaaattcagaaaattaggttgaaaagcaattttaaaatgagaaaaacattcttagaaaaataacatatcaatcaaacttcattcaactcttcctgataagaaaaaccataggaatggcgaaaaatctatttattktaccttctggttctacaaaatacctatatgcaaactatattaacttaaaagcattttgtgtcgtcctctaattatctgaattacaaaaaatagctttcaggtaaaatagcttttactacatatatattttttgcaa

SEQ ID NO: 880427 - DNA, 598 bp, Homo sapiens
gttcatgatagctgtgtgcttggggtagctggccagtggccagcagtggcagcagagggttacttacagggaatgtggtaggagaatatgaggcaatagtggttgccaaagcagtgatggcagctttttcacactgtgggatttttttttttytaaatgtgttaggcagatctgtttggtctttgtgaagccaggtagcaggataggatatggccagagggttattagagtaatgcacttgggaacagccagcagtagttaccttgtcagctgacgtctgttcccttgaagcagttttgacctctctgttcagctttgctctgtctagctggccattctggatttaaaggaccatctgtggtttctgaccaggctccctctttgccacggtcctttggcaagggcatcttctgtcactctcctgtcataaacccttgtggattctcccagacatagctcagattcctagctttttagcgttggccttctgtaactgttccctagctatctttgtgctgtgtctcttattctccacactcctcatacttttctttctggtcataccaagcagtatatgttcttctgtctgtctggacca

SEQ ID NO: 880428 - DNA, 678 bp, Homo sapiens
ataacagtgtaagattcataagatggcaagaagagtgggaatccaaagcacatgcaaggagaccagtcttgggaggcagaacagctccccttgtgtcataggagggaatgggagaggatgcttacacttgcgctctggtttaagatccatctccatgaagcctccctttgactatttaggtttttgttaatttgcttattctgtcttgtattatttcctactattttagacttcaggcttatctttcttaagtagattgtaaacttgagagtaggggtcatattttatttttatatgtccgtaygttgtctagcccagtgctgagactgattttcaaaaataggtactcaaggccaggagcagtggcttacatgtgtaagccccgcactttgggaggacgaggtaggtggatcaattgaggtcagcaattcaagaccaggctggccaacatggtgaaaccctgtctctacaaaaaatacaaaaattagctgggtgtgttggcgggcgcctgtagtcccagctacttgggaggctgaggcaggagaatcacttgaacctgggaggcagaagtgccactgcactccaccctgggcgacagagcaagactctgtctccaaaaaaaaaaaaaagaaaagaaaagaaaaaagaaaaataggtgctcagtaaaaactcattaag

SEQ ID NO: 880429 - DNA, 636 bp, Homo sapiens
aaaactcctgtagcataattcaacagtaggtaagaccttacacaagttatttcatttccctgggtgtattagtccattttcacactggtgataaagacacacccaacactgggaagaaaaggaggtttaatttgactttcaattccacatggctggagaggtctcacaatcatggtagagggtgaaaggcacttcttacwtggcagtggcaagagacaatgaggaagaagcaaaagcggaaacccctgataaacctaccagatctattgagacttattcactatcacaagaattgcacaggaaagatcagcccccatgattcaaatacctcccactgggtccctcccacaacccttgggaattctgggagataaaacctaagttgaggtttggatggggacacagccaaaccatatcattctgccccggcccctctcaaatctcaagtcctcacatttcaaaaccaatcatgccttcccaacaatctcccaaagtcttaactcatttcagcattacctcaaaagtccacagtccattgtctcatctgagacaagaaaagtcccttctgtatatgagcctgtaaaataaaatgcaagttagttacttcctagatacaatgagggtacaggcattggg

SEQ ID NO: 880430 - DNA, 671 bp, Homo sapiens
atgtgcgctaagtacagtggggtctatagaatttttaaccactcccaagatctaccccaaaaggctttatttcctaggctgtgggctttccctcttttgaagggtagactattgaccatctcctagtacttgtaattccttccttttaaagcacaggagtgtatgcaggactctagccaacagaaatgggttgtgctccacaaggcaccaggaaaaatgagcctggaaggaggctttgaagagagtcattgcagtggacccaaacacttatcagtgctgggaggccagcctgctgaggtattgttgtttgtttgtgcttctgttgtctgtggagatgtctagaaccttctcctcccttggctttcttatttcctcagtaaccagtgagataacacatcataaaactggtattccagcaagaaggaacattggagattgtacagtcaaaaactttcacagatggtccctctcaatggcccmcaaagaataaaaagagaaaaaaaaaaaaaggttcgtccatgatgtatttatttctcatttccagcccatggccctatcatgctactgctctttctcctacctggtactgctagaggaaacctgtggaaatgtcactacaaattctacaaacgtatcccacatttgacaaacaagaaaggaaaaaccctgag

SEQ ID NO: 880431 - DNA, 584 bp, Homo sapiens
cagtagtatttgattatgctaatttgtgtatttcaagcttatttttgacagattgtttttaaacagttcattccttgactcatcatgaatctattctagtgtacagctcaaagttcattcttttccctagtgatatccaatttcytcaaaatgctgattgaatagtcattcttttccctattgtgatgctgtttctggaacgttataaagttcttacacaatttggaatttccatcatttctgttctagtgcactgatgaatcttttaaatttcaagccatatgatttttgaccacagttactttttatcatgctttgcagtctgtttacagtgaaaagggcattattactaatctaaaatggttttagtttcaatgtttatttcccccatttcatccttcgagggtgaagaagtgagaaccgagagctggagaagttagggaaccttaacgttccttcccatcctaagaattaggaagcctgtgatggtacggagcagacatcagaagctggctgcctgatctggcttacagtcttgttctgtttgtcctacacagctgctattattttggtttgctttgact

SEQ ID NO: 880432 - DNA, 584 bp, Homo sapiens
cagtagtatttgattatgctaatttgtgtatttcaagcttatttttgacagattgtttttaaacagttcattccttgactcatcatgaatctattctagtgtacagctcaaagttcattcttttccctagtgatatccaatttcctcaaaatgctgattgaatagtcattcttttccctattgtgatgctgtttctggaacgttataaagttcttacacaatttggaatttccatcatttctgttctagtgcactgatgaatcttttaaatttcaagccatatgatttttgaccacagttactttttatcatgctttgcagtctgtttacagtgaaaagggcattaytactaatctaaaatggttttagtttcaatgtttatttcccccatttcatccttcgagggtgaagaagtgagaaccgagagctggagaagttagggaaccttaacgttccttcccatcctaagaattaggaagcctgtgatggtacggagcagacatcagaagctggctgcctgatctggcttacagtcttgttctgtttgtcctacacagctgctattattttggtttgctttgact

SEQ ID NO: 880433 - DNA, 471 bp, Homo sapiens
tgtcccctactggtgggctcccttgtctactcattgatttcctactgcacccccgccctctctcttctctgtcggtaccaaactgctgaacagggaacacctggatgaataagagagcatcactcctccctcttccacagagaacacctccagcttgactcatggcctagagaagaaacgtgtgttgttttgagttttcttggggaaagcagttttataagcagataattacaatgcagtatgatacggttataataaaaggcatgtaccaagttttctggaagttcaaggagagggaaattaactcttcctgggacgttraacgaggtttcacagaggaactgggtcctgatgaagagtaggcgtttgaacgacaggaatgatagaaattcagacaataacttcagaatcaaagaccttgaagcaagaaagtgcagacaataattgaagaatggtattactattttcaga

SEQ ID NO: 880434 - DNA, 663 bp, Homo sapiens
  misc_feature 633, 634, 635, 636, 637, 638, 639, 640, 641, 642, 643, 644,645, 646, 647, 648, 649, 650, 651, 652, 653, 654, 655, 656,657, 658, 659, 660, 661, 662, 663: n = A,T,C or G
atcttctgtaaatatttttattttcactttgaagtaacaatatgattagatataaaattttaagcttaaattttttcttgaaaacttttaaatatgttcaattgtcttatgttttattttcttacattagactacrttatactttagaaataccacaatttttaaaaaggcattttcatcatgtcagtctttgaacataaaagttcttcaaggtgtgaaagttcttcagtatataagcagaggaacaggcacagtggttcacacctgtaatcccagcactgtgggaggccgaggcaggaggatcgattgaggccaggagtttgaaagcctgggcaaccaaatgaggccctgtctctaaaataaaaataaaaatagataagcagaacttggaaagtggatggcctggcacctctttctaacacttagtggtgggtatcagtcaacagactcacctgacagacccatcatcttcacatcttacacctcatgtaagtagaattgtgcaccatttgtcattctgtgactgcttatttcatttagtctaatatcttaaggtttatccatgtttagcatgtgacaggacctccttttttaaggctgcataatattccactatatgtgtacaccatattnnnnnnnnnnnnnnnnnnnnnnnnnnnnnnn

SEQ ID NO: 880435 - DNA, 602 bp, Homo sapiens
ttttcctcatgatatttgtgtgttttgtgagaactgcctttcttaaattcttctgaaccaactcataatactccaaatttaaatccatccatctataaaactaccttttctgtatcagtagtactttttcagaacatacctatttctagattataatcaaatattcttaaaataatctggtagtctgtgagtcctttgtctagaacttaattaaaagtggcaaaggaggccgggygctgttgctcactcctgtaatcccagtactttgggaggccgaggcaggtggatcacgaggtcaggagatcgagaccatcctgggtaacacggtcaccccgtctctactaaaaatacaaaaagttagccgggagtggtggtggatgcctgtagtcccagctacttgggaggctgaggcaggagaatggcgtgagcccaggatgtggagcttgcagtgagccgagatggcaccactgcactccacactgggcgacagagcaagactccgtctcaaaaaaaaaaaggggggcggaggggggcaaaggagaagccaggcatggtggcttacacctataatcccagcactttgagaggccgaggcaggcagg

SEQ ID NO: 880436 - DNA, 668 bp, Homo sapiens
tttgaggaatatgcagagtaattagaggatcaatttctggcagagattacaaatcagaaatcatggcagaagtccagacaagtcgtccttagaaaggggcaaagaagaaaggaggatctgggtacacagccaatattcagagaccagaaagagcacasaggagagagattttaaagaaagctattcaaagtaacagctctagctttttataggttgtcgttgacctataaaaatggagctgaaatagaacagagctaacagaagcctagcatggaccagaccaacaagtttaatccacagaagggagctgagtcaccatatacttggttctcagcatttctgcctagtgggtaggaagaggctaagagggggttaaagctcagtctatgttgggctctggctgagactgcctgggtggaagtaaaacttagaaactctgagagttggaaatgggagttccaaattctttgaatgtgcataaagttttcttcattaataagacgaacaacatacagctaattttggaaatatagctatttttttccataaaaaatatcaattttcagaggtacttttgggtggaaaactataaactcttaatgtaaagacatctctcttttcttcctttcactactattacttaaatgccataaatgtcttgatcacaa

SEQ ID NO: 880437 - DNA, 648 bp, Homo sapiens
tcccagggatgaagccaacttgatcatggtggataagctttgtgatgtgctgctggattcggtttaccagtattttattgaggatttttgcattgatgttcatcagggatattggcctgaaattttctttttttgttgtgtctctgccaggttttggtatcaggatgacgctggcctcataaaatgagttagggaggattccctctttttctattgtttgaaatagtttcagaaggaatggtaccatctcctctttgtaccctgggagmattcggctgtgaatccgtctggtgctgggttgtttttggttggtaggctaataattactgcctcaattttagaacttgtaattggtctgttcagggattggacttctccctggtttagtcttgggagggtatatgtggttaggaatttatccatttcttctaggttttctattttatttgcatagaagtgtttatagtattctctgctggtagtttgtatttttgtgagatcagtggtgatatacaatttatcattttttattgtgtctatttgattcttgtctctattcttctttattagtctgactagcggtctattttgttgatgttttcaaaaaccagctcctagattcattgatttttttgatgggtttttcat

SEQ ID NO: 880438 - DNA, 648 bp, Homo sapiens
tcccagggatgaagccaacttgatcatggtggataagctttgtgatgtgctgctggattcggtttaccagtattttattgaggatttttgcattgatgttcatcagggatattggcctgaaattttctttttttgttgtgtctctgccaggttttggtatcaggatgacgctggcctcataaaatgagttagggaggattccctctttttctattgtttgaaatagtttcagaaggaatggtaccatctcctctttgtaccctgggagaattcggctgtgaatccgtctggtgctgggttgtttttggttggtaggctaataattactgcctcaattttagaacttgtaattggtctgttcagggattggacttctccctggtttagtcttgggagggtatatgtggttaggaatttatccatttcttctaggttttctattttatttgcatagaagtgtttatagtattctctgctggtagtttgtatttttgtgrgatcagtggtgatatacaatttatcattttttattgtgtctatttgattcttgtctctattcttctttattagtctgactagcggtctattttgttgatgttttcaaaaaccagctcctagattcattgatttttttgatgggtttttcat

SEQ ID NO: 880439 - DNA, 686 bp, Homo sapiens
attataggatcaaattcacacataacaatattaacatttaatgtaaatgggctaaagtctccaattaaagacaagacagataaattggataaagaatcaagacccatcgatgtgctgcatcaggagacccatctcacatgtaaagacatacttaggctcaaaataaaaagatggaggaatatttaccaagcaaatggaaagcaaaaaacagtaggggttgcaatcctagtctctgataaaacagactttaaaccaacaaagatcaaaaaaggaaaagaaggacattacataatggtaaagggatcaatgcaacaagaagtgctaactatcctaaacatatatgctcccaatacagtggtatccacatactgggatatgagccaatataccacccagattcataagacaagttcttagaggactacagagagacttggactcctgcatagcaatagtgggagaatttaacaccccactatcaatattagacagatcaacaagacagaaaattaacaaggatattcagkacttgaacttggccctggaccaagaagacctaatagacatctgcagaactctccaccacaaatcaacagaatatacattcttctcagtgccacataacacttattctaaaattgaccacataattggaaacaaaacactcctcagcaaatgcaaatgaa

SEQ ID NO: 880440 - DNA, 642 bp, Homo sapiens
agctctcatattgcaaactagtagcctccttgcaatctctttagtgccacggtttttgcatttttatactgtttgctgctgatttcactgcttaaaatggcccccaaggatagtaatgaagtgctggccctgaccacwagaaggctgagctgtgccttatggagaaaatgcacaagccttgcacagacatgagttacagcagtgtcggctatgagttcaatgttgatgaattaagcagtctttaaacagaaacacacataaaacaaagttatgtattggatccgttgacaaaaatgttgtggccagaagctcaaaagaccctaaacccttttatttcccaggagcaatggttcagtatttgctaagtgaatgttcacagtgacactacagaatagacttagctaccacgcatatcgagaatcagctgtattcatcgagctccttcttctgccaagtgccatgcctacagctgggtgtttggtgaactcctgctttcagggagcttaaagtttagtgagggaggcatgcattaattaatgacactaatgaatgtgcagtttcaggcaagtcaaggaagatgccctaaggatgtgaagtgccaaccgagacctaaagaatgaatgggagttctacagctcaaac

SEQ ID NO: 880441 - DNA, 674 bp, Homo sapiens
ggttcaattcactatttttaactgactggaaaaaggaaaatatatggccctgttttctttgcttgagtgatgtaaagagcatttttacagaaatacgcattttccactagatttatctgcgatagcatctctctactgctcccatgagctgcctgtgagatccatacatatctcctgggctatgagtctgatcaaccaaacaggcaccagggagtgggaaacgtccaggctgttccccacttgtgtctttttgttgtggtgatggtaaaatatacataatataaaatttaccctttcaccatttttaagtgtacaattcattgccattaagctcatttataatatacagcaaccagcacctccatccatctctagaattattttcatcttctcaaactgaaactctgtccccattttaatggggacygactcactccccattccccctcctcccaggccctggtaacctctattcgacattctgtaagaatttccccactctaggtacctcatataagtagagtcatacgatacttgtccttttgtatttggcttctttcatgcagcatattttcaaggttcatccatattgcaacatgtgtcagagttttcttcccttttaaggctgagtaatattccatcatacatacataccacattttgcttatctgctc

SEQ ID NO: 880442 - DNA, 668 bp, Homo sapiens
aattattaaagatttgaaaaaacagaatgataatggattattatttgaaaaaaacggaatgataatggattattatgtggtacttcagccagatactgagagtagaaggagcccgtaggcagtgtgatgccacatttcctatgtgcggcagctcagatgttagggagacttgggtctaggatctgtctccaatactgccagccacatggagatgaaaagtttgacaaggagagaaacatgagaggcagttttcacatctattaaagagagatgataacagtatctcccctgtargcttgttatgaggattaaaataaggagcctagaccactgtttaagtgaggggtcatgaaacaatgaacccagaccaacattcacactttagtttgaatcacctagtgatctggctagaaagcagatgctgactcagtaggtctgggcctgagactcagcacttctttttttttttttttatgaagtctcactctgttgactaggctggagtgcagtgatgcaatctctgctcactgcaacctccgcctcccaggttcaagcaattctcctgcctcagcctcctgaggagctgggattaccgacgcatgccaccacgcccagctaatttttgtattttcagtagaggcaggatttcaccatgttggccaggctgg

SEQ ID NO: 880443 - DNA, 622 bp, Homo sapiens
tggtctgagagactgtttttaataaattcagttattttacatttgctgaggagtgatttacttccaattatgtgatcaattttagagtaagtgccatgtggcaatgagaagaatgtatattctctggtttttgggtggagagttctgtagatttcttattttattttattattattatactttaagttttagggtacatgtacacaatgtgcaggttagttacatatgtatacatgtgccatgctggtgtgctgcacccattaaaagttctgtagatttctaacagttctgcttgattcagagctgagttcaggtcctgaatatctttgttaattttctgtctcaataatctgtctaatattgtcagtggggtgttaaaatctcccactattattgtgtrggagtctaagtctctttgaaggtctttaagaacttgctttataaatctgggtgctcctgtattgggtgtatatatatttaggatagtagctcttcttgttgaattgaaccctttaacattatgtaatgcccttctttgtctttttaaaaaatcttttgtgttttaaagtctgttttgtcaaaaactagaattgctttttttctgttttccatttgcttgata

SEQ ID NO: 880444 - DNA, 625 bp, Homo sapiens
tgcagacttgtttatgtggtcacttcagagtgtcactggtctgtgtacttcagtgtgcttttgtagttcctttctacatttagtgcttctttcaggagctcttgcaaggcaggcctggtgctgacatatttcctcagcatttgcttgtctgaaaagcatatttatttctcctttgcttctgaagcttagtttggctggatgtgaaattctgggttggaaattcttttctttaagtatgttgaatattggacaccaatctcttctgccttgcagaaattccactgagaagtctgctgttagtctgatgggtttccctttgtaggtgacttggccttcctctctggcttccctcaacatttttttmtttcatttcaaccttggagaatctgatgattaagtgtcttagggctgatctcctagtggagtatcttattgtggttcctggatttcctcaattcaaaggtttgcctgtctttctagattggtgaagttccattggatgatatactgaagcacgttttccaatttgtttccattctccacatctttttcaggtccctcaattagtcgtaggttcagtcttttacatactcccatatttcttgcaggttttgtttgttcctct

SEQ ID NO: 880445 - DNA, 718 bp, Homo sapiens
ttgcaggttttgtttgttcctcttcatcctttctttctctattcttgtcttcctgtctatttcagaaagatgatctgcaggctctgagattctttcctttgcttggtctattctgctactgatacttgtgattgtcttgtgaagttctcatgttttgtttttcagctccatcgggtcaattatattcctctgtaaactggctattttggttgtcagttcccgtattgttttgtcatgattcttagcttctttgcattgagttagaacatgcttttttagcaaggcaaagtttgttattacccaccttctgaagcctactttggtcaattcagacatctcagcctcagcccagttctgtgcccttgctggagagatgttgtggtaatttggcggagaagaggcacccagctttttgagttttcagcgtttttgcattgattctttctcaccttcatgggcttatctaccttcaatctttgaggttactgacctttgaataaggtttttagggtcttttttgttgatgttgttgctttctgtttgtttgttgtaacaakcaggccactcttccagtaggtctgctgtggttagctgggggtccactccagaatgtagtcacctcagcccctcccacacctagatgtatcaccagggaaggctgcaaaaagcaaagatggcagcctgctccttcctctgggagccctgtcccaggagggca

SEQ ID NO: 880446 - DNA, 506 bp, Homo sapiens
gagtttggaagtagtcttcccttctctatttttttttttttttttttttttggaatagtttgagcaggactggtgtcagtttttctttaaatatttggtagaattcagcagcaaaaccattgggtcctgtgcttttcttgctgggagaacttttgatactccttccattaaattgtttattatttgtctacataagctttgaattttttcatggtttaatgttcataggttgtatgtatctaggaatttatccmtttcttatagattttccaatttattggcatatagttgcttagattaatctttaatgatcttttaaattttttcagtatcaaattctcttctttcagctgtaattttatttatctacatcttctctcttgttttctcaattaatctggctaaagatttgtcaattttatcttttcaaaagaccaacttctcatttcattgatcttttgtatttcaattttatttatttatttatgctctaatatttatttttt

SEQ ID NO: 880447 - DNA, 658 bp, Homo sapiens
catggcatattggactccacctgtgttgggtttgtagcttcctctacttctttcctccccagcaattttggctgattagtatttccagttagttcacagtcactgcctttctctagatcatttataaagattaaagtcagcagaaatccaaggactaatctcagcaggatgccagacaagtatattctcaatatatgtctttgtctattaacaaggaaatgaggtaaaagaaaatatcgactttagtatataactgtttgcaaaagagartattgggttcaaggattgacaaaatagtctgtccagaatccatagcaacaaagaaactccgctgctagaagcataggttaaaaagggagccgtttgaggaagataattactaggctagaacacttaggcacctaaaatgagcagaggcattgtggtcaccctgtgaacaagggttttattaaagatatggtgagtcaggctatcagagataaagatattaatggggctgttaggcaaatctgaagatatcattgaggagcatgcagacaggctgcaacgaactagcagggcttgactgctacagggtctttttgtcctgcagctcggcacagagatgcctaatatctcaatactttaaaaaagtagaaaaaaggctatgtatttgcaa

SEQ ID NO: 880448 - DNA, 576 bp, Homo sapiens
acactacagttacagtattatgatattctgtgtttttctgcatacttactattaccagtgaggattgtaccttaaatgatttcttattgctcattaatgtcatttgcattctgattgaattacttcctttggcttttctgatagcgcaggtctagtatttttgaaacccctcagcttttggttgtctgggaaagtctttatttctyattcatgtttgaagggcattttcactggatatactgttctagcataaaatgtttgccttcagcactttaaatatattatgccagtctctcctggggtttccacttaaaagtctgctgccagatatatgggagctccacggtatgttatttgtttctttccttttactgcttttaggatccattatttatacttgactcttaagattattaaataccttgagctagtcttatttggattaaatttgctaggtgttctataacccttttgtatttgaatattgctatatttatcttggtttgggaagttctcagttattatccctttgaataaactctctacccctatctctctctgtaactcctctttatg

SEQ ID NO: 880449 - DNA, 586 bp, Homo sapiens
cccagggagcatcattttctgacagttgcagctggattagcaccacgtgggccagtagcctcagagaagggagtgtgcaatatcagcttcctccagagagatgccgatgggtccattctgggcccccgtttccatacctgtagcctcttaggggacacagaatgactgggaggtgctgcctattcacctgtggaatgtgggcacttctggggtctgactttctcctatatagctctgtagcttttgaatacctataataattatgtacttgtattaatttttaaaaatctattaaaaagaaaaaaaataaaggaagaggggctgagctctgctgtggaaatcagatctatttagaaagcaagaaggtctgtggacaatccaatacaaggtggcccagcctccataccacctccagctgtccccrggctgctttgcagtaacaacctatgggcaaatggcagcgtgcgcctccgtctttctgccctatatgcctgaagtcacagcggtccttcaggagtgttatgactcattcccatggggaggtgggggcgtgctaggtgtcttagtccattgtgtttgctctcat

SEQ ID NO: 880450 - DNA, 613 bp, Homo sapiens
ccttttttttctttttttttttttgagacggagtctcactctgtcacccaggctggagcgcagtgatgtgatcttggctcactgcaacctccacctcctgggctcaagtgaatctcctgcctcagcctccctagtagctgagattacaggcacacaccaccactcccagttaatttttgtatttttagtagagacagggtttcaccgtgttggccaggttggtcttgaactcctgacctgaagcatcaccttgttttaaaatgggtaatcatgatgtgtatttagccagaaaaacattcaagtgcaaggtcgagaagaacaagttgtaccacttttaatctataattttgttttcacaattggcatacataaatttgaaagtacttcagttattgatttagctgcagaattatgaattttagataaacaataaataacttttagtttaagtatgtctcaaatawtgcatgggacatacttatactaaaatatatattgttaatctaaaattcaaatttagctgggcattctgtatcttgattgcttgatctggcaactttatttgctggagcttccagcctgactacccataagcagctctcagataaaatga

SEQ ID NO: 880451 - DNA, 590 bp, Homo sapiens
attaaagacttaaacgttaagacttaaaaccataaaagccctagaagaaaacctaggcaataccattcaggacataggcatgggaaatgacttcatgactaaaacaccaaaagcaatggcaacaaaagccacaattgacaaatgggatctaattaaactaaagagcttctgcacagcaaaagaaactatcatcagagtgaacagggaacytacacaataggagaatatttttgcaatctatccatctgacaaagggttaatatccagaatctaaaaggaacttaaacaaatttacaagaaaagaacaaacaaccccatcaaaaagtgggcaaaggatatgaacagacacttctcaaaagaagacatttatgtggccaacaagcatatgaaaaaagctcataattactggtcattagagaaatgcaaatcaaacctcaatgagataccatctcctcacagttagaatggtgaacattaaaaagtcaggaaacaacagatgctggagagaatgtggagaaatacgaatgcctttacacttttgatgggagtgtaaattagttcaaccattgtggaagacagtgtggcgattc

SEQ ID NO: 880452 - DNA, 620 bp, Homo sapiens
agttttttctaattcactgaagaatgtcaatggtagtttaatgggaatagcatggaatctataaactgctttgggcagtatggccattttcataatattgattcttctatccatgagcacaaaatgtttttctgtttatgtcctctctttctttctttgatcagttgtttgcaattctccttgaagaggccctacacttcccttgttagctgtattcctaggygttttattctttctgtagcaattgtgaatgggagttgattcatgacttggctctctgcttgcatattgttggtgtataggaaactagcgatttttgcacatggattttgtatcctgagactttgctggaattgcttatcagctttagaagcttttgggatgagacaatggggttttctagatataggatcgtgtcatctgcaaacaaagacaactcaacttcctctcttcctatttgaatcccctttatttctttctcttgcctgattgccctggccagaacttctaattctatgttgaataggagtggtgagagggggcatccttgtcttgtgctggttttcaaggggaatgcttccagcttttgcacattcagtttgatattggctatgggtttg

SEQ ID NO: 880453 - DNA, 605 bp, Homo sapiens
ggtggaacgaaagcaaaaatccagaatttgaaggaggggtaacattaccctggaaggtatggggacgaaaggagtattcacgatcttttgtcttttagaacagtccctggagtcttcctccagaatgcaaacaacctggtgctgctgtttatcttttcaatgatgtctgaaaacaagggaaccaatgtgagcctgcatctcatactgcctgcggtactatgagtcataaagtactctatctttgacccaagtgtatcatatcttcttccaagayctaggaaactctggcaggcaaggaagttagcttgcaaataggataaaatctccaagttttcccagtgtttgatataaacacaaaataactaaagagacttcagtttaattatattctggctttccaaattggaaattgaaaatataggaataaaaacaataatattggcatctagatgttttgtaaacagtgctttcatagatagtttatcagtgaagttcacaaaatatattaacaatgtatataatatccctccatgcatcctcttggcacttaattcatgtagaatctgtggtggacagttaaatatgggttttgattttccagatgc

SEQ ID NO: 880454 - DNA, 449 bp, Homo sapiens
gattctcatctcccatctgagaccaactcagcctggacttcactgtccatatcactatcagcactttggtcacaaccattcaacaagtctctaggaagctgcaaactttccctcatcttcctgtcttcttctgagccctccaaactgttccaacctctgcccattacccagttccaaagtcacttccacattttcaggtattttatagcaatatcccacttctctsgtaccaattttctgtattagtccgttctcacactgccataaaaaaccacctgagagtgggtaattaatgaagaaaagaggtttaactgacagttccgcaggctgtacaggaggcatggctggggaggcctcaggaaacacagtcgtggcggaagggcaaaggcaccttcttcacatggtggagtgggagagagtgaagcaggaagtgctatacacttttaaac

SEQ ID NO: 880455 - DNA, 651 bp, Homo sapiens
cactgttgatggtaatgtaaattagttcaaccattgtggaagacggtatggtgattcctcaaggatctagaaccagaagtaccatttgacccagcaatctcattactgggtatatatccaaaggaatagaaattattctactataaagacacatgcacacatatgtttattgagcaatatttacaatagcaaagacatggaagcaacccaaatacccatcaatgatagactggataaagaaaatgtggtacgtatacaccatagaatacgatgcagccatgaaaaggaatgagatcatgtcttttgcaggaacatggatgaagtagaagcyttcatcagcagactaacacagtaacagaaaaccaaacatcgcatgtcctcactcttaagtaggagttgatcagtgagaacacatggacacagagacaggaacaatgcactccagggcctgttgcggggtggagggtgaggggagggaactttgaggatgggtcaataggtgtagcaaaccaccatggcacacgtatacctatgtaacaaaccagtacattctgcacgtgtcccggctttttttttttaagaaaaagtttaaaaaatgtagtctatatgtttattccaatagtgtccatgagcacatactaatccagaatt

SEQ ID NO: 880456 - DNA, 619 bp, Homo sapiens
agacccattggtgtgctgtattcaggagacccatctcacatgcaaaagacacacataggctcaaaataaagaaatggaggaatattttccaagcaaatggaaagcaaaaaaaaaaaagcaggggttgcaatcctagtcttcaataaaacagactttaaaccaacaaagatcaaaagagacaagggcattacataatggtaaagggatcaatgcaacaagaagagctatctatcctaaatatatatgcactcaacacaggagcactcagattcataaagcaagttcttatagacctacaaagagacttacactcccacagaataacagtgggagactttaacacctcactgtcaatatyagacagatcaatgacacagaaaataaacaagtgtatccagggcgtgaactcagctctggaaccagcagacctaatagacatctacagaactctccaccccaaatcgacagaatatatattcttctcaggaacacatcgcacttattctaaaattgaccatataattggaagtaaaacactcttcagcaaatgcaaaagaacagaaatcaaaacaaacagtctctcagaccacagtgcaatcaaattagaactcaggattaa

SEQ ID NO: 880457 - DNA, 619 bp, Homo sapiens
agacccattggtgtgctgtattcaggagacccatctcacatgcaaaagacacacataggctcaaaataaagaaatggaggaatattttccaagcaaatggaaagcaaaaaaaaaaaagcaggggttgcaatcctagtcttcaataaaacagactttaaaccaacaaagatcaaaagagacaagggcattacataatggtaaagggatcaatgcaacaagaagagctatctatcctaaatatatatgcactcaacacaggagcactcagattcataaagcaagttcttatagacctacaaagagacttacactcccacagaataacagtgggagactttaacacctcactgtcaatattagacagatcaatgasacagaaaataaacaagtgtatccagggcgtgaactcagctctggaaccagcagacctaatagacatctacagaactctccaccccaaatcgacagaatatatattcttctcaggaacacatcgcacttattctaaaattgaccatataattggaagtaaaacactcttcagcaaatgcaaaagaacagaaatcaaaacaaacagtctctcagaccacagtgcaatcaaattagaactcaggattaa

SEQ ID NO: 880458 - DNA, 619 bp, Homo sapiens
agacccattggtgtgctgtattcaggagacccatctcacatgcaaaagacacacataggctcaaaataaagaaatggaggaatattttccaagcaaatggaaagcaaaaaaaaaaaagcaggggttgcaatcctagtcttcaataaaacagactttaaaccaacaaagatcaaaagagacaagggcattacataatggtaaagggatcaatgcaacaagaagagctatctatcctaaatatatatgcactcaacacaggagcactcagattcataaagcaagttcttatagacctacaaagagacttacactcccacagaataacagtgggagactttaacacctcactgtcaatattagacagatcaatgacacagaaaataaacaagtgtatccagggcgtgaactcagctctggaaccagcagacctaatagacatctacagaactctccaccccaaatcracagaatatatattcttctcaggaacacatcgcacttattctaaaattgaccatataattggaagtaaaacactcttcagcaaatgcaaaagaacagaaatcaaaacaaacagtctctcagaccacagtgcaatcaaattagaactcaggattaa

SEQ ID NO: 880459 - DNA, 593 bp, Homo sapiens
gacatcatggtactctaccttaacactgcagcatgcatctcctaagagtaagaactgctcatgcctataatcccagcacattgggaggccaaggtgggtggattgcttgagctcaggagttcaaaaccagcctgggtaacatggtgaaatcctgtctctacaaaaaatacaaaagttagctggccacgagtgtgcctgtagtgtcagctactcaggaggctgaggtgggaggatcacttgcatccaggagtttgaggcaagatcttatcaacttggacgacagagtgagaccccctgtctcaaaaaaaaaaagagaaagaattgtcttytacataaccacattaccatcatcacacatgaaaattaaccatggcgtaagtcttttcatttttttatatttgagacagggtctccctttgtcacccagtgcagtggcacgatcacagctcgctgcagcctcgacctcccttgctcaagtgaccctcctgcctcagccttctgagtagctgagactacaagtgtgcaacaccacggctggctagtttttgaattttttttttttttgaaaggagtcttgctctgttgcccaggtt

SEQ ID NO: 880460 - DNA, 583 bp, Homo sapiens
gagccaggactggagcatcaacctccacaccctctcatttgaagtcaacttgagcttagatctgccagctgtgttatttttactttacatggctttcaagagtttctgaagtgcagcacacacatgcaaacacataccagatgcctccttcgtttctagacccaagtttctatctggtatcaggtgcctttaacttgcttctactcagatcactgactgaaattaaagctacctggtgaagtagcaggactgggccattaaccactggcccagcagctgggagtgatggactttccgtgaaggtgagctcaggagtaccgagctcgcacaatgagcaggagtcagcccggggctgtcggtgaatcattggcctayggctcacgcatctaggaaaatcttttgaagcacagcaaagtaaagagagaaattcctagacttaatgccatcttcttgtggacagaagcctttagagatccctcactttgctctgatcgtctttcataacttaagagtacccttttgatgtctctcagccccaggactgttagaaggctttgtaaagtgcaaagagccaaacagctaa

SEQ ID NO: 880461 - DNA, 609 bp, Homo sapiens
tcctagagtcttgctgaatggctttgacaaaaatgctaatagtgatatgaacaataaggtccagactgaggtggtctcagatggagatgatgaacttgttgggaactggaacaatggtgactcttgttatgttttagcaaagacactggtagcattttgcccctgccctagagatttgtgaaactttgaacttgagagagatgatttagggtatctggtggaagaaatttctaagcagcaaagcatgcaagaggtgactttggtgctgttaaaggcattcagttttaaaagggaaacagagcataaaaatttaaaaaatttgcagcctgacaatgcaatagaatagaaaatattattttctgagttgaaattcaagccagctgctgaaatttgcacaagtaacgaggagctcaattttaatccccaagrcaatggagaaaatgtctccaagacatgtcagaggtcttcacagcagcccctcccatcacaagcccagaggctgaggaggaaagtggttttgtgggccggccccagggtccctgtgctgtgtgccccctaaggacttggtgccctgcatcccagcagctccagctgtggttgaaaggggcc

SEQ ID NO: 880462 - DNA, 647 bp, Homo sapiens
ttgttaaattcaacttttatagaatcactgtttctacctaaaattatccccctgccccttgtatttctgctccttgcacatccagtcttctgaaccaagccaacaggttccaccacttttgatgttctcttctgctttactcgtgacatccagtcaagggctacttttgtaacacatcctccactccatccattttcattgcctccaaagtcaagccctaattatttagcatccagactgcctacctatccagtggccttacatctaatctccccacattcattctttccttagattacttacgaaacccacttaggacacctaaacccacttgggacactaagctcaggaacccacttaaacccacttggaacattaggctcggactttggagaccatggaatgaatttctttccatcaattrgattaaaatcccacaaggagacaggcaagcaagtagtgtgcatgatacagcatggtaaagggatgcaacaggccccaagaatgaggaattatccatatacagaagtccaagaaaactttcccaagaagtaacaggtgaaacgaacctgaagcatatgagagccaagtacagaaaagggtatttcaggtggagacagcatggggatgtttggggaaatgtctaa

SEQ ID NO: 880463 - DNA, 657 bp, Homo sapiens
agagaattactcaattgaaagatagatgccaaaaaaaaaaaacaaaatgaaaaaacctacaatgtagcatagagataaaaagtataatcagagataatgagacctaagacatgcctaactggaattttaaaaggaaataataggctggtagatagataatatttgaagggctaatgacttaatattttacagaattgataaaagacataagttctctaatcattaattaggataaataaaaagagccccatgccaagacacaatgtaatgaatctgccaaacaccaagaaacaaacaaagtctttaaaggtacccagagaaaaccatattacctccagagtcatgacatctagactgatggctgactcccagyagtaatggtggaatccatttaaagtactaaaataaaagagctgtcaatgaggaattttataaccatcaaggcaatattttttaaatgcaggtaagataaagacagttacggacaaacaaaacatgggttagcttccaacagacatttaataacataattcctaaagaatatactttagtaatatttataatatttttaataaagtatattctttagaaataagaaagaagaaaataatttcaaatggaaggttagagatctactaatgaatagtgagcaaagaa

SEQ ID NO: 880464 - DNA, 696 bp, Homo sapiens
tagccttttctttctactctatttttttctctttgtatttaaaagcccttgcttgttctttgggtagaaggaggaaatacttaacatttttctaacacatataattcatgttcttatttactacataaggccctatgctatttacttttaatacctctgtgttctaatctttggaatctaagtttaggcacctgtctgctacaaagaaattcccctgtggcttaatgtctttcractgtatgaatttatactcctgcatccattcaggtccagcaaaacatacattcataacatactttgctgtttacacagtatttttatataaattttaatgtcagagcctcatggaaattaagattcagaaatggttagttgtttggccagtgtcacacaactagtgagctgttgaactaaaacctagcgtgagaccctgtccccaccaaaataaattaattaaattaaataaaatctaggttagctagtcccatttcaatgtataaactcattttacatctctgataagtcaaagaaaaaatgagttaattatatagataaaaaatatacatttaattatgtattactgaatatataatcacacacatgtagtcaggtaagcatttttttttttccccctgtccttggcatttcattagttctctcagcatttttgtgagtttgaatagcaattttcatttt

SEQ ID NO: 880465 - DNA, 525 bp, Homo sapiens
acagagcaagaccttgtcacaaaacaaaacaagaacctgttccctgtctttgaatgcacttcagttattgttctgaattgttcgccataggtagacaattcaatactttggacaatcaattggttgttatttttatttccagtgatctttttcccagtcttacccaactattgccatgatgttcactacatggattgttatcatcaactcgaacatcttgattttaattaatcctgtctctgttctcactttctattctttaaagtcattcactgtagcttcagagctgctctaatgctttggccccagtgaaactgccaattcattaatcaccacytctttattttctctcttccttcttctcctgtttttatttccttttttaacctaacttagatgccacgattcatcactataagcaatcccttgcaaacatcatcaactcaaacttggtttttctccaacatgttaaaaccctacttggtaaaactcggctgttttcttattccactactatatgtgagc

SEQ ID NO: 880466 - DNA, 696 bp, Homo sapiens
tagccttttctttctactctatttttttctctttgtatttaaaagcccttgcttgttctttgggtagaaggaggaaatacttaacatttttctaacacatataattcatgttcttatttactacataaggccctatgctatttacttttaatacctctgtgttctaatctttggaatctaagtttaggcacctgtctgctacaaagaaattcccctgtggcttaatgtctttcgactgtatgaatttatactcctgcatccattcaggtccagcaaaacatacattcataacatactttgctgtttacacagtatttttatataaattttaatrtcagagcctcatggaaattaagattcagaaatggttagttgtttggccagtgtcacacaactagtgagctgttgaactaaaacctagcgtgagaccctgtccccaccaaaataaattaattaaattaaataaaatctaggttagctagtcccatttcaatgtataaactcattttacatctctgataagtcaaagaaaaaatgagttaattatatagataaaaaatatacatttaattatgtattactgaatatataatcacacacatgtagtcaggtaagcatttttttttttccccctgtccttggcatttcattagttctctcagcatttttgtgagtttgaatagcaattttcatttt

SEQ ID NO: 880467 - DNA, 650 bp, Homo sapiens
attccttcttacatagctttgcttcctgtgttttacctaccctgttcaatgccaatttatagaggtgagtgacggctacctctgtattttttattcaggaactttcccaagagtagagagaataaaatcttcgaaaagaatatttcattcaacataaaactttgttttccattccatttttgaagccaaccttaacattgtaggggatgcctggcttaggcaaaagcattctgtctctctctcttgatccatgcccatggctctctgtacataacgtgtataaggtgtgtagtggtttcagaagaggagggggagctgtagggaataaaaagttcatgttaagcaggagtaacacgtgcygggtaaaggaagattaacctcattcttagaatatgtgtttttcctcaactcacaaagaaaaatcatttcatagataagaagagtgtcaatccttgtcacggagccttttgaagtcatcatttatagtgcttatttgagtattgttatcctttctctctggatactgcaaaatctttagtgtgcttggatttccatggccaactctacaagaatttagatcagtgttgcttaaagtggggaccaaggatctatgtgggtcccagaactgtttgttagtacctgatgatgag

SEQ ID NO: 880468 - DNA, 650 bp, Homo sapiens
attccttcttacatagctttgcttcctgtgttttacctaccctgttcaatgccaatttatagaggtgagtgacggctacctctgtattttttattcaggaactttcccaagagtagagagaataaaatcttcgaaaagaatatttcattcaacataaaactttgttttccattccatttttgaagccaaccttaacattgtaggggatgcctggcttaggcaaaagcattctgtctctctctcttgatccatgcccatggctctctgtacataacgtgtataaggtgtgtagtggtttcagaagaggagggggagctgtagggaataaaaagttcatgttaagcaggagtaacacgtgccgggtaaaggaagattaacytcattcttagaatatgtgtttttcctcaactcacaaagaaaaatcatttcatagataagaagagtgtcaatccttgtcacggagccttttgaagtcatcatttatagtgcttatttgagtattgttatcctttctctctggatactgcaaaatctttagtgtgcttggatttccatggccaactctacaagaatttagatcagtgttgcttaaagtggggaccaaggatctatgtgggtcccagaactgtttgttagtacctgatgatgag

SEQ ID NO: 880469 - DNA, 498 bp, Homo sapiens
atgtaaattctatgtttaacgtgaactcatagtttcacagctcaaacctgtttggctgctaacatcctccttagagctctgccagccagaaagtaagccaaacagcaaagcaatgcatgctacagcctgccagatgcagctgctgaaatctagcagcagatttagtgtttcctgtagaggcctcctaaaaacaaaagttcccagcttgtttgtatgtgaccagcttatgtttccatgatgccttggaccatggctttttaggggtcatttcatttcataaaccttgttctgactctatagggagtccactgcgttcacacagccatgctcatggwtataatgaaatttgatttttaagtggaaaatacattgtttattattagcttacaaaccagacttttccaaatcatgcaaaagattagggcagtgtttgatgcaacgttcatccatttactgaggtgatggagacaaggtcatgcttgctgatgagatgaaact

SEQ ID NO: 880470 - DNA, 598 bp, Homo sapiens
tcttttcattgagggaaaatacacaactatgcaaagcttacaatttacatcccacaagaggacctctcagcttactcccatatcctagcctccctatagctccccttcctattaatgataatcctctctaatctcccctatccagaaggaaataagcaaagaaatctccaaaggaccacaaaaacccccaggttatcggctatgtccccttcaagctgtagggggaggggaatttggcccaacccgggtacmtgtccccttctccttctctgacttaaagcagatcaaggcagacctggggaagttttcagatgatcctgataggtacacagatgtcctacagggtctagggcaaaccttcgacctcgcttggagagatgtcatgctactgttagatcaaaccctggcctttaatgaaaagaatgcggctttagctgcagcctgagagtttggagatacctggtatcttagtcaagtaaatgatagaatgacagccgaagaaagggacaaattccctaccagtcagcaagccatccccagtatggatccccactgggaccttgactcagatcatggggactggagttgtaaacatctg

SEQ ID NO: 880471 - DNA, 639 bp, Homo sapiens
ttgatgaaaggattcttctttttccattgaatggtcttgaaacccttgcagaaaatcaactgaccataattatcatggtttatttctgggctctcaattctatttcattgatctatgtgtctgttcttatgccagtatcacattgtcttgattactgtagctttgtagttagttttgaagttggaaagtgtgagccctccaactttgyttaagactgttttggctatcctgggtgctttacatttttatgtgaagtttagaatcagcttgtcaatttcagaaaaataagccagctggaattttgatagagattgcattaaatctgtagatcaatttgggaagtattcccatcgtagcaatagttagtcttctgatctatcaaaatggatgtattttcattatttaggtctttagtttatttcaacaatgttatacatgtttcagaatacaagtttttcacttcttttggaaaaattaatcctatgtatttcattcttttgatgctaatggaaaaggaattgttttcttatttttattttctgattattcattgcaagcatatagaaatataattgatttaatgtattgatcttatgttctgtaaccttgactaacttttttattctaatagatttttag

SEQ ID NO: 880472 - DNA, 639 bp, Homo sapiens
ttgatgaaaggattcttctttttccattgaatggtcttgaaacccttgcagaaaatcaactgaccataattatcatggtttatttctgggctctcaattctatttcattgatctatgtgtctgttcttatgccagtatcacattgtcttgattactgtagctttgtagttagttttgaagttggaaagtgtgagccctccaactttgcttaagactgttttggctatcctgggtgctttacatttttatgtgaagtttagaatcagcttgtcaatttcagaaaaataagccagctggaattttgatagagattgcattaaatctgtagatcaatttgggaagtattcccatcgtagcaatagttagtcttctgatctatcaaaatggatgtattttcattatttaggtctttagtttatttmaacaatgttatacatgtttcagaatacaagtttttcacttcttttggaaaaattaatcctatgtatttcattcttttgatgctaatggaaaaggaattgttttcttatttttattttctgattattcattgcaagcatatagaaatataattgatttaatgtattgatcttatgttctgtaaccttgactaacttttttattctaatagatttttag

SEQ ID NO: 880473 - DNA, 639 bp, Homo sapiens
ttgatgaaaggattcttctttttccattgaatggtcttgaaacccttgcagaaaatcaactgaccataattatcatggtttatttctgggctctcaattctatttcattgatctatgtgtctgttcttatgccagtatcacattgtcttgattactgtagctttgtagttagttttgaagttggaaagtgtgagccctccaactttgcttaagactgttttggctatcctgggtgctttacatttttatgtgaagtttagaatcagcttgtcaatttcagaaaaataagccagctggaattttgatagagattgcattaaatctgtagatcaatttgggaagtattcccatcgtagcaatagttagtcttctgatctatcaaaatggatgtattttcattatttaggtctttagtttatttcaacaatgttatacatgtttcagaatacaagtttttcacttmttttggaaaaattaatcctatgtatttcattcttttgatgctaatggaaaaggaattgttttcttatttttattttctgattattcattgcaagcatatagaaatataattgatttaatgtattgatcttatgttctgtaaccttgactaacttttttattctaatagatttttag

SEQ ID NO: 880474 - DNA, 585 bp, Homo sapiens
tgttctcctaggtctctgggcctttttcccattgtcctgatgcacaacaactgaatcccttttatccatgctaatatctagcaacttgttgctgggccacacccaccctcagcattctcttcaggacatgcgtttttactatttacatggttaagtctgcaaattttccaaattttcagactctgctttccttttaattataaacyttgtctttaaattactcttttgctcctgaatctcagcttaagcagccaaaagtagccacacagttccttctatattttgcttagaaatctcttccagaaatcctaattcatcactcttacgttctgccttccataaagccctaggacagggaggcaatggtgccaagttcttcacaactgtattttacttcaaatcccaataagatactccttatttttatctaagacttcattagaatgaccttcactgtctatattcctatctacatttcagtcaccacaacttaactaatctctaagaagttccaaactttccctagtattctcgtcttctatgtcctcacaagaatctaggctttttctagtctgctccttcaaa

SEQ ID NO: 880475 - DNA, 521 bp, Homo sapiens
acctaatagatatctacacaacatactactcaacaattacagaatatgcattcttcccacttgcacatgaacatactctaagattgaccatgtgcaatgtcattaagcaagtctcaataaatttaaaaaaactaaatcataccaagcatattctcagatcacagtggaataaaaatagaaatcaataccaaaaggcactctcaaaaccacacaattacatggaaactaaacaatttktcctgaataaattttgagtaaacaacaaaattagggcagaaataaaaaaaaatctttacaaaaaatgaaaatgcagacacaacataccaaaatgtctgatatgtagcaaaagcagtgttaagaggaaagtttatagtgctaaatgcctacatcaaaaagaaagatctcaaattgacaatttagccttgcatctaaaggaactataaaaacaagaacaaactaaacacaaagctagcagaagaaaaaaaataactaaaagcagagcagaattaaataaaactgag

SEQ ID NO: 880476 - DNA, 607 bp, Homo sapiens
tcttttgtaaattgtccagtctcaagtgtgtctttatcagcagcatgaaaatgaactaatacagtaaattggtaccagtagagtagggcgctgctgaagagagaatcaaaatgtggaagcagctttggaactgggtaacaggcagaggttggtacagtttggagggctctgagaagacacgaaaatgtgggaaagtttggaacttcctrgagacttcttgaatggttttgcccaaaatgttgatagcgatatggacaataaagtccaagctgaggtgatctcatatggaaatgaggaacttgttgggaagtggagcaaagatgactcttgttatgttttagcaaagagattggtggcattttgctcctgtcctagacatttgtggaactttgaacttgagagagatgatttagggtatctggcagaataaatttctaagcagcaaagcattcaagaggtgacttgggtgctgttaaaggcattcagttgtataagggaagcagagcataaaagcctggaaaatttgcagcctgacaatgcgatagaaaagaaaacctcattctctgaggaaaatccaagcaagccagctgtagaaatttgaataagt

SEQ ID NO: 880477 - DNA, 619 bp, Homo sapiens
atgaggaacacttaaagtatgagtctctttatatcaagttcaaaaacagccctaattgaacagattaggggtgcatacagaagtgggaacacttttaaggaaactctgggagttagtgtgactgggaaggggccccagataggatttgtgggtcaagaagcccatgcttttcacagaacccctttctagtgtttgcacatgacccgaatcagcccctgggctcatgtcacattctctcctgctggctaacatttttgcaatgggtgtaacctgcttgttttattattagtcaccaaccrcaggcgacttgcttttccatcagaccctcgcagtgtgcttggccttcggttcccagcctagtgggagccaacgaccctatgagatctgggtatttctgggtatctctgggctctcattggctggatcacaggggcttccacgacttgacagccaatcactgaggagcttgatgaagtccccttctgtctgttgaaaactttagagagaacatattttaaaaatgtgtgctaaatacatatctgacagtgtctgaatttaatgtccaagaaattgacctgaaactcaaggctgcaaatttacccacccttttggggccatt

SEQ ID NO: 880478 - DNA, 569 bp, Homo sapiens
gtcctgcaggagacatgcattcgtttttcctctcctaaactattctgacaaatagaagccacttgtagaatccactaaacatttttctgcattagaaattttgcatattaagcatacacacacaccccaccccacacacacacagaaatacttactcttggaatgatcacccatagcacccagaaaaggataatgaaaaataatatccaccatgcagaaaaagagatgtgcgcaaagtgtgcggccaggggcagaaggacgagggtcgcrcgcccggcctcggctctttgctaactaactcctactgccccgcggagttgaaggagcgattccgcaccggcccgcacgcagcatgacgtcaacacgcactagccccgggccggagctgggggcgggacctgtggcgtcacgaagcttccccagaactgccggggatgcgggggaggtgatggggatccaggggctgatgggcggggtgggttgggttggaggctgggggtgaagggagattggctgggaggaagtgggccaaccctgattggcccggagtgaacaatggagtgcagccc

SEQ ID NO: 880479 - DNA, 638 bp, Homo sapiens
ccaggattttaactggggtctgatcatgcaggcaccctctgcctggcacataccaaaattctagactctcagaaagaaatgaatgttcagcataaaccacaattattacacagtttaggcactgggagccacttaatagttccagaatggtgggaactctcctgaaattccagttcccagacaccagcggatagccgacctgtgaacaagcctttaaggatagcagtcaggtctgctgtgtgaacactttcctgcataagcccattagcattgtaatgagtttgggccctgagggaattagagagcctttgaaggggaggagtagaaaagtgaatgatctgactcacattttagaaggaacaactctgaccatagtatagagaatagattgtaaatgggcaaggacagaaatagaccagttaggaattattacagtaataaatgatggagctrtgggaagcatgaatttgctgctcattgagatatggatgactataggaagagcaggtttaggggataagatgaggagttttggatgtgcttaaagtcttgtgtctgttgcatgcaagggtcagaagtttacactactactcaatctggtccattcctggagctaagcgtagtagatcagcttcctc

SEQ ID NO: 880480 - DNA, 643 bp, Homo sapiens
tgtgggtattgttcttttttaaaaaaatataaaaccaaaattgtcctttaaaaagtcattctttctgagtttcagtacattcgttggccacattgtgggtgcattacattgttagaaagataaaattaaccaaataggatcaaaatgtggtttccaggtttaggcacaatggaagtagtaagtagggaacaagtctgtgtaaaacagtcggacttatgaaaaagtagatctgagttgtggagtgatataggttgggcttcctgtaaatagactctgagattgagagttgtggacagaaggattttggggagatacatctatgaggatgtgaggaaggtgaggatgtgcagagggagaagttgatccacaggcaattgcaactgaggttgattgcaactgagttcaggagatgagctggtccttaggagttgttcccagtttagagctaagctattgatatccccattttagcagtccttgrctttaggccaccctcagggttgggtataaccttgagtgagacagtttgctgtaggaaagggtgattcccaatgaggagcacagaacctgttgttcctagcagccgagggatgggtacatcagccccaagaagggatctgggcagacgacgagattatctatt

SEQ ID NO: 880481 - DNA, 691 bp, Homo sapiens
caagaaaaaatattaagatactaattcaaggtacaggactatattagtccattctcacactgctttagaaaactatctgaaactgggtattttatgaagaaaaaaggtttaattgactcacagttccacagactgtatagaaagcatgctttgggaggcctcaggaagcttacagtcatggcagaagggtgaaggggaagcaagcaccttctttacatggtggagggaaaaagagagcgcgaagggggaagtgctgcacacttttaaacaactggatcttgggagaactcctctactatcacaagagcagcaagcgggaaatccgcctctatgatccaatcacctcccaccaggtccctcccccaacactgaaaattataatttgacatgmgatttgggttgggacacagagccaaaccatttcaatgaccaataccatttgctctgtgaggggtagaattggagtgattaagagagacaagagaaagcttgagctatgtctgcgtggattggcaggacacactttgggcagagggaaaggtatgagcaaaggagaaaggcagaagtgtttatagcattgaggccaccattggtagatgaaagtgccagcgacagaggatttgaccagaatgttgtggtgctgagattggagatacaacactggaatctagagaagatggcctggaatggc

SEQ ID NO: 880482 - DNA, 691 bp, Homo sapiens
caagaaaaaatattaagatactaattcaaggtacaggactatattagtccattctcacactgctttagaaaactatctgaaactgggtattttatgaagaaaaaaggtttaattgactcacagttccacagactgtatagaaagcatgctttgggaggcctcaggaagcttacagtcatggcagaagggtgaaggggaagcaagcaccttctttacatggtggagggaaaaagagagcgcgaagggggaagtgctgcacacttttaaacaactggatcttgggagaactcctctactatcacaagagcagcaagcgggaaatccgcctctatgatccaatcacctcccaccaggtccctcccccaacactgaaaattataatttgacatgagatttgggttgggacacagagccaaaccatttcaatgaccaataccatwtgctctgtgaggggtagaattggagtgattaagagagacaagagaaagcttgagctatgtctgcgtggattggcaggacacactttgggcagagggaaaggtatgagcaaaggagaaaggcagaagtgtttatagcattgaggccaccattggtagatgaaagtgccagcgacagaggatttgaccagaatgttgtggtgctgagattggagatacaacactggaatctagagaagatggcctggaatggc

SEQ ID NO: 880483 - DNA, 527 bp, Homo sapiens
gtggctcatgtctgtaatcccagcactttcggaggccgaggcaggtggatcacaaggtcaggagttcgagaccagcctggccaatatggggaaaccccatctctgctaaaaatacaaaaattagccaggcgtggtgagggggcggcgcctgtagtcccagttactcaggagactgaggcaggagaatcgcttgaacccaggagatggaggttgcagtcagccgagatcacaccacgtactccagccygggcaacagagcgagactctgtctctaaataaatacattaataataattaaaaaaaaaaaaagtttgtcccaagggccccttacttcttgcagaagggtcacctcactttctataccatggacaagaggaattcagtgtcttccaccaggctttttcctcctcaaaacagaaaggtcagctgtctcttgatactgaataatattattcagtatatattatttataataatactattactactactattaataatattcagtatatataaataataaataa

SEQ ID NO: 880484 - DNA, 617 bp, Homo sapiens
ggtcttgagctcccaacctcatgtgattggcccacctctgcctctcaaagtgctgggattacaggcgtgagccaccgtgcccggactcagatttcttaagagtttctgaaatttaaggataaaaattacggctattattatagatatttctaatgttccaaatacaaatttatgaagtttaaatacgtatagggacatattttctctcgaractaattagaaataaaggcatggcttaataagaaacattaaaatatgtgtgaaatatacatattttatttttctctacagttagaactttctgagtaaattttactaaagcttggcacctgtgttaaataaaaaggctaatagttatattacgattaattgtttagtcagataagaatccctgggttgtaaagtttcagacagctaagcagtctcgtcttctgggaaaacgtatttgcattccaaagaagtaaaaaataagaacctagaatccttcccaatgtttctgagaagactctttcagaaggggagtggacacagctactctctctcctatataaatatccatattcactttttctggattccctatgtactgtacactctattatatgtagactgacttc

SEQ ID NO: 880485 - DNA, 485 bp, Homo sapiens
cttgtcctgaattctttcttgcacgagatccaagaaccctctctcggggtctggatcaggaccttcttcctgtaacaattgggtggactaggttatgctgcaataacaagcaaccccaaagtcatggtgacttaaaccacaaagattattttttgctcctgttatatgtcaatcaagattcagcagggctgttttgttcatcacactygaagaatacaggctgatgccaatgctggctcaagagagacctggggagtctcttcccagacctgggaagatcatgatcttctcagaagtgggaagggacacagacctgttccattcacacttcatgaaccaagtcatggccaatcctaaacatcagagtgtggaaagtgcagtccaacatgaggaatatcttatggagtgggcaatattgatgtctgtctggaatgtttgcattggttctttttcatctgtgttttgactttcttctaacaggtgtt

SEQ ID NO: 880486 - DNA, 655 bp, Homo sapiens
actgtataacagaatcgagcaaatctacacatttcagagaattgttatcataaaatctatatgggaatactgaagaatatgcagtaatacaatacttttgtatggcaggggagaagtatatttcactgaaaagagatagttagggcaatagagctatagaggcagagagacagaaagaaagggacaaacagaaagagaaagagaaatagagagagagagatggaggatgcacgaactagatctacaaattaggcaacaatctgcatggcatcattttagaagtacacacatctaataaatgttttgataaayggctattccattcacctggcccatgcctaaaaactttcccacatatttcctctttagcactaaaagcatttgttaaaatgtcagtgttatctaggaggattaacccacagggataacagcctttagactcatttcttttctgtgtgtgtgtttttttcttttttaatctttctaaccaggcctttggcaagaccttgagggactatattggggaataaagagagaatgcctttgggaagccgaggtgggcggatcacgaggtcaagagattgagaccatcctggccaacattgtgaaaccccatctctactaaaaatacgagaattagctgggtgtggtggtg

SEQ ID NO: 880487 - DNA, 603 bp, Homo sapiens
atgaggctctcccacattatggagggtaatctgcttacttaaagtccactgacttcatgtgtcatccaaaaacactctcatagaaacatccacaataatgcttgaccaaatatcttggtgtcgtggtccagccaaattgacacataaaattaacagtcacatgtcaccagaggactgagagacttcrtcttttcagaagtgattggggtggtggcagagttggtggggatgacactaataccaggcacctggagtgtggtgtggtgagcaatcagaaggttgtgaacctgaaggtaaggcttttccaacctctcaactttcccaagagccagccgttggattaagtccaagggtcgtaacagttacagagaccacttgcaggtctgtacatctaccttgtcagggtatgtctccctaaaagttaaggggaggcatgggttcaggaggggttttctggtagtcacaacttgtgagtatgtttggatatcaggaattataaccagagcacagctgtttatcaagtgcaggtatcttgctacagaaatttgtaatatgaattgaagatttgttttacaagtgcttctctgaaaatcacattgatta

SEQ ID NO: 880488 - DNA, 649 bp, Homo sapiens
gtaaggcaggtagagtgtgggcatgaagtttgacacatatagagtgctcagtaagctgttcaaaaggaaggagtaggaagagaaatcatagctacagctcactaaatacacaagaaaaatcacattcgatgagcacctgctctgtaaaaggagttcatccttgtctacactgtattgtcacttcagcatccaatgagctctccaaatgctcaacaacaggctggaggaaggaaaaggcaccatggcaatgagaaccagcttttctaagacacaggggtttagaggtgagcagattttagacagtgaattgactaytctgagcagaggaaatgcaaggaagaagccaccccagggagagggaatgggccagcctggccacagggatagctgaagcagcccttttaattattctacctctatgacccaatggccagaatagagaatatgttcagggctttggcattagactggctggagttacaatcctggtctgccacttcagacaatggggcctagagcaagttactcagcttcctcatctgtaaaacaggatggccttatttatagggaccatgctgagcacatgctagacatagagtaaatgctcagttaatggtagtttgttactaatatgagcagggtctataaa

SEQ ID NO: 880489 - DNA, 569 bp, Homo sapiens
tatcttaaacatttccaagtgattctgatatgcaactgatgaaggaccattgtgataggcgatgcattgacggttgcaggcaactgggatgtaagagcataggaaggagaagctcctgtggcccttccacctttgtggcatgaggtgctccttccccccccacccccgagggttggcaggggctggttcagctccctggagattctcagtccccrgccaccaggggtacctggcaatctcctaatgctgactccctttctttccctgaacctcccaatcccagtttacatcccctcatctcagacctcctttaaagccatgaacccaagtctgctcctttcacccccatctcagcctgcagaagtcctcagtgggtctccttgtgggatgatgtgatgcttaatttcatgtgtcaacttgactgggctaagggatggccagatagctgggaaaaggttatttttgagtgtgtctatgagggtgtttccagaagagattagcatttgaatacatagacagaagaaagaagatcgtcttaattaatgtgggtgggaatcatctagttcctt

SEQ ID NO: 880490 - DNA, 653 bp, Homo sapiens
ctaattgaataccctttatttcattctcttgcctgattgccctggccagaacttctaatactatgttgaatactagtggtgagagagggcatccttgtctaaacacaaggatttttaactgcacaggaaaatgtttgaatattggaaagagtggttccactctatgaactctacagtttgggtaagtccaaatcactttgcacaatgatcctgatgcctgctacttgtttgttttgtcaattttctattgacctggctgctaatgacttttgtacatgaattgaggagtgtataccttttgagtatgacatgggccattaattatgcataaggtttatttwaaaaatgctgagtgatctgtttttcttctctttagttcttattcagatagaggcagttgctacagtcaagaatacaggagattcagttgttttatatatatgtatatgatatatatacacacacacacatatatatatatatataagccttcatggtgacctgtacacactaggctggacaaatactgtgagattctttcctaccacaaaaattttgaaaatgttgttctaggcgaacaatgtacagtccagtttaaattttgattttgggcccagaacctcctaaactcgactaatgtagatttttcacct

SEQ ID NO: 880491 - DNA, 623 bp, Homo sapiens
ttcaggacactggcatgggcaaagagtttctgactaaaacaccaaaagcaatggcaacaaaagccaaaatagacaaatgggatctaattaaactgaagagcttctgtacagcaaaagaaactatcctcagagtgaaaagacaacctacagaatgggagaagatttttgcaatctatccatctgacaaagggctaatatccagaatctagaaggaacttaaacaawtttacaagaaaaaaacacaatcccatgaaaaagtgggtgaaggatatgaacagacacttttcaaaagaggacatttatgtggccaacaaacatatgaaaaaagctcatcatcactggtcattagaggaatgcaaatcaaaaccacagtgagataccacctcacaccagttagaatgccaatcattaaaaagtcaggaaacaacaggtgctggagaggatgtagagaaataggaatgattttacactgttggtaggactgtaaactaattcaaccattgtggaagacagtgtggtgattcctcaaggatctagaactagaaataccatttgatccagcaatcccattactgggtatattcccaaaggattataaatcattctactataaagacacatgc

SEQ ID NO: 880492 - DNA, 646 bp, Homo sapiens
atataaagctgtgtccacatggtttaagtgtgtattcctgttgttcatatagctctctttttctcccatgaagttttagcattcttttcttggagctctaaaagatttcaggtctatttatagaaatgagagacatattttagcctgttttacatcctaamatgcatttaatcctagtatatggacttgctctgaatttgttattattacaaataaattgggcttttatctttgactactatactatatgctctcaactcaaactttagctaaaaaagttatgcttttgtaattgtatcagtaattattagcttagtgcactgatataacatatgaaaggctaaaaaaaacagaattgggtaggatattaaaataaaaactttttgttgactattcttatccatactctaacgttatatcaatctctttcagaaattcaaacctgatttgagaaaaagcaatctgtgacaggcatggatttgaagaattgcttcctaactcttaacttagtattatcatttttatgactttagcataaaaacaaaataagtatagaacaaaatatatatctcatttctgaatttgaataaaaaatagtaagaggctatttaagcaattaaatgcaacccgaacatatgcatctgca

SEQ ID NO: 880493 - DNA, 624 bp, Homo sapiens
tgaaaataaaacttctttcaagattatctaatgtttcctatgtagcattcacaatattcagggcacagaaaataatggaatgtcaaagagaagaaaagacagttaaagcctgggtccagaaatgaccaagagtctcctgtcacaggattattttgaacatgctaaagtagaacatgaataaaattctaaaaagaaatttytaagcctctacttataaaaattaaaagttaatatacatttgttcaacctataaaaaataatttgtcacaaataggatgtcctattctcacactaggacattcgtcacaaattcttagaaaagcttaattcaagatttcctgttgttgttgttgttgttgttgttgttgttgttgttgttgttttgagatggcgttttgcacttcttgcccaagctggagtgcagtggctcgatcttggctcactgcagcctccacctccccagctcaagcaattctcctgcatcagcctcccgagtagctgggattacaggcgcctgccaccacgccctgctaatttttttttctttttttttttttttttgtatttttagtagagatggggtttcaccatgttggccaggctgggctcaaactcctggcctca

SEQ ID NO: 880494 - DNA, 649 bp, Homo sapiens
atatgaccctcttcccatcatgaagggggcagatttatctgttagtatctatgatgatttgtaaacaataccaatcctagaccaatctctcttctttatccaacctcacaaatattctgcctctctaagtagcccttgtccctttgcccctcttgtttccgtttgtttcctcctttctcacctggttcagaatgcctaggagagtttgtataagattcttaatgccstaggaataggaaaagcaatcatgcctcaggccataggcctgttgtcagcaccacggacagcggctcatcaggcttggcaagcattgtacagaggtataacttgccagtagagaatgttgatgacctttttaatatctttgaaagtcttcatcagttcattccccttctcttcttagccttctattttattgaggtggatgacgttaagacttcaactttttggtgcaggcagaggagcccacatctcagtagtctgtgagaaggaggggctcaggctgacaggaggcaaactcatctaggcctgctgaagttaattcatcacttggctctagggttcagggaacaaaatacagaaggcaaagaagaacaatggaatcagcaagagaggtaactcctctcttctcttgcagatgcctcaatta

SEQ ID NO: 880495 - DNA, 582 bp, Homo sapiens
atggtaactggagaatgtcatcctttttaatgtcaactttaacccaagaaaaatctctggggtaaacaaatcatcgttgtcaccatccctgccatttcgttatggtctggtgaggttcagtctttgtaggggagctataggatgkagtagtagttcagaaaaggatttttctagacctatagtcccaaagtcaagtctcagctgtgccactgtctagtcctatgaaatacatttgttcctaaaacctttcatgactttttacctatgcctttgttcaacccactggtatttaacttaactgatcaaagatttctgaacattgtgcatatctttggatgatcatttcagaaagagaacaaattcaggagatgacttacccaggatcctaaagatatgtcttgtttggacatgaaacttgtaaaacatttctgcttctcaatttgaattttgtgtactgttaaaaaaatacctaggatgtcattacctatccttcccacaccttgggagtattcaccgtcggtgtctgtaaggaaggtgagtactagagtactacctagccctaaaatgcttttggattataat

SEQ ID NO: 880496 - DNA, 582 bp, Homo sapiens
atggtaactggagaatgtcatcctttttaatgtcaactttaacccaagaaaaatctctggggtaaacaaatcatcgttgtcaccatccctgccatttcgttatggtctggtgaggttcagtctttgtaggggagctataggatgtagtagtagttcagaaaaggatttttctagacctatagtcccaaastcaagtctcagctgtgccactgtctagtcctatgaaatacatttgttcctaaaacctttcatgactttttacctatgcctttgttcaacccactggtatttaacttaactgatcaaagatttctgaacattgtgcatatctttggatgatcatttcagaaagagaacaaattcaggagatgacttacccaggatcctaaagatatgtcttgtttggacatgaaacttgtaaaacatttctgcttctcaatttgaattttgtgtactgttaaaaaaatacctaggatgtcattacctatccttcccacaccttgggagtattcaccgtcggtgtctgtaaggaaggtgagtactagagtactacctagccctaaaatgcttttggattataat

SEQ ID NO: 880497 - DNA, 582 bp, Homo sapiens
atggtaactggagaatgtcatcctttttaatgtcaactttaacccaagaaaaatctctggggtaaacaaatcatcgttgtcaccatccctgccatttcgttatggtctggtgaggttcagtctttgtaggggagctataggatgtagtagtagttcagaaaaggatttttctagacctatagtcccaaagtcaagtctcagctgtgccactgtctagtcctatgaaatacatttgttcctaaaacctttsatgactttttacctatgcctttgttcaacccactggtatttaacttaactgatcaaagatttctgaacattgtgcatatctttggatgatcatttcagaaagagaacaaattcaggagatgacttacccaggatcctaaagatatgtcttgtttggacatgaaacttgtaaaacatttctgcttctcaatttgaattttgtgtactgttaaaaaaatacctaggatgtcattacctatccttcccacaccttgggagtattcaccgtcggtgtctgtaaggaaggtgagtactagagtactacctagccctaaaatgcttttggattataat

SEQ ID NO: 880498 - DNA, 534 bp, Homo sapiens
tctctacaaaaaatataaaaattagctgggtgtagtggcacacacctgtagtcccagctacttggggggctgaggtacgaggatcgcttgaacccaggaggcagaggttgcagtgagccaagatcacaccactgcactccagcctgggtgatagaggggaaccctatcaaaaacaaaaaacaaaaaacaaacgaaaaaaaaaatttaagccagaacacatcatcttaaggagaacgaaaatcttctgtatgcacatactgccaacacattttaaaaggcccacattttaacaagtagacaaactatcagacaagagatcataaattattttggctgacaaaaatcgttraaattatctaactcaacattctgcatgtaggtttctacacataatgtatatgtatgggtgtgtctacacagccttttgaagggaatggcatatgatgaagcccatttttccatagttatgatggtgtcctagcaaagcaagaatatcaaggtctgcatttctgccaactcaatgcatagccccaa

SEQ ID NO: 880499 - DNA, 670 bp, Homo sapiens
tataccattgcacttcagcctggatgacagagtgagaccctatctgaaaaaaataaataaaaagtaaaaaaatccctttggccttcaaaatggctaatgccacacagtggaacagacatggctgtcagcagttttggagaygcaggtaattagtcctgctccagctcctgcgggtgcacaactgttcattatgtttttattgtttcttctgattactggttttatggaatgatatggaatttcttattcttagtaatctattttctagagataatatatcagaatgagtataaagttatagtctatccttttttttctgaaggctacagttggattactgacattgttccctaaatgataatataagcagaccaaggaagtggctatagtccagagatttatgaatacataaaatttagtatcacagaatgacatttcttcactaatttatagaccaagtctctcttagacaaatgattcatggaaccattataatggaaatagaaagacttatagtcaatggaaactggagcactagtaaatgagggaagacaggttgtaacattgtttgaaggttgtgacactgtattttgcttttttttgtttgttttcaaattttttaaatagagatgcgatctcactacgttggccaggttggccttgaactcct

SEQ ID NO: 880500 - DNA, 670 bp, Homo sapiens
tataccattgcacttcagcctggatgacagagtgagaccctatctgaaaaaaataaataaaaagtaaaaaaatccctttggccttcaaaatggctaatgccacacagtggaacagacatggctgtcagcagttttggagacgcaggtaattagtcctgctccagctcctgcgggtgcacaactgttcattatgtttttattgtttcttmtgattactggttttatggaatgatatggaatttcttattcttagtaatctattttctagagataatatatcagaatgagtataaagttatagtctatccttttttttctgaaggctacagttggattactgacattgttccctaaatgataatataagcagaccaaggaagtggctatagtccagagatttatgaatacataaaatttagtatcacagaatgacatttcttcactaatttatagaccaagtctctcttagacaaatgattcatggaaccattataatggaaatagaaagacttatagtcaatggaaactggagcactagtaaatgagggaagacaggttgtaacattgtttgaaggttgtgacactgtattttgcttttttttgtttgttttcaaattttttaaatagagatgcgatctcactacgttggccaggttggccttgaactcct

SEQ ID NO: 880501 - DNA, 595 bp, Homo sapiens
aagagattattttggagatttaaggactgcgatgacggccccactgggttttggatttgcatggggcctgtagcccctttgttttggccaatttctactatttagtatgggagcatttatccaatgcctgtacccctattgtatcttggaagtaattaattgcttttgattktacaggctcatacatggaaaggacatgccttgtctcagatgaaactttggatttggacttttgagttaatgctggaatgagttaaggctttgagggactgtcaggaaggcatgattgtgttttgaaatgtgagaaagacatgagatttgggagggcccaggggcggaataatatggtttgtttctttgttcacacctacatctcatcttgaattgtaatcaatccccatctgtcaagggaaggacctagtggcaggtgattggaacaggtgagtggtttcccccacgctgttattgtgataatgaatgagttgtcacaagagctgatggttttaaagtgtggcacttcctcattcttacacgatttctttcttgcctgccgcaatgtaagacatgcctccttccccttccaccatgattgtac

SEQ ID NO: 880502 - DNA, 500 bp, Homo sapiens
ttgcccagaattttattcctaaacactgtaacattctaaatggtgaggttttagttattagtattgttgaaaacttagaagatcaccctaaatggaatagaagccatcttgaaggaattccactatccaaattagggacaattaggagggaaaaataacaattatggtagtaaatgtaatggataaaaaataagtaataagtccatttgatacacacaatacacaagctttgaggagaaaaatttcttctatagaacaaaaaacaccccatgatgtatcaaaacattatattcattgattactaattaactacaaaaaamatctacaatttttacatgaagaaatctggaggacactgcatgattcatatgatcaaacaacatcaacaataatattacaaactgactttacagcctcactcgaacaataaatgacacaatattagttgcatagtattcttgacaaagttgtttattctgaataggcggaaaataatcaga

SEQ ID NO: 880503 - DNA, 601 bp, Homo sapiens
tgtgctttataagctatccaatgtatggaattttggtacagcagccccaacagactaagatattaataaaataaagatataagatctctgttgaaatgcacaaataatatctgagaagaagtagactatctttaggatatttcatgaaatttcatttgagttggttaattattatttggccatatataaagaatctaatcctgagaatttcaagcggaaagccatatccagtacttggatgaaccaatgtcaccctaaaatgccttaatgaggtgasactaatgcatggagagcttaaggtaaaacggcggggggtgggggaacatgtgatcccttctgcctgagaggttctggcatctggttaagagtctaccatcagccagtgaaacagataagtcaaccattaacccctgcctaagtactaacctacacaagtacatcaagtgctataggagttaaatgaaatggaagattattcttatataggactgagcacagattcccaggagttaactcttgacttagaccaagaaagatgaacagaaaagacatctgtaagcgaaggctgccaccagactaaagcaggaggttgtgaatgaac

SEQ ID NO: 880504 - DNA, 601 bp, Homo sapiens
tgtgctttataagctatccaatgtatggaattttggtacagcagccccaacagactaagatattaataaaataaagatataagatctctgttgaaatgcacaaataatatctgagaagaagtagactatctttaggatatttcatgaaatttcatttgagttggttaattattatttggccatatataaagaatctaatcctgagaatttcaagcggaaagccatatccagtacttggatgaaccaatgtcaccctaaaatgccttaatgaggtgagactaatgcatggagagcttaaggtaaaacggcggggggtgggggaacatgtgatcccttctgcctgagaggttctggcatctggttaagagtctaccatcagccagtgaaacagataagtcaaccattaacccctgcctaagtactaacctacacaagtacatcaagtgctayaggagttaaatgaaatggaagattattcttatataggactgagcacagattcccaggagttaactcttgacttagaccaagaaagatgaacagaaaagacatctgtaagcgaaggctgccaccagactaaagcaggaggttgtgaatgaac

SEQ ID NO: 880505 - DNA, 642 bp, Homo sapiens
tttatgaatgcgacagggcctggatgacagctcatctgtttacagtatggtttactgaacactttaagcctgtgattgagacctattgctcagaaaaaaaagattcttttcaaaatattgctgcttattgacaatgcacgtagtcactcagaagctctgatggagatatagaaggagattaatgttgttttcatgcctgctaacacacatccattctgcagcccgtggatcaaggggtagttttagattttcargccttatcatttaagaaatatatttcataaggctatagctgctatagatagtgattcctctaatggatccaggcaaagtaaattgaaaacctactggaaaggagtctctgttctagattttgttaaaaacattcatgattcatggaagaaggtcaaaatgtcaacattaacaggagtttggaagaagtggattccatcccgcatggatgactttgaagggttcaagacttcagtggaggttacttctgatgtagtggaaattgcaagagaacttagaattaaaagcagagcctgaagataagactgaattgctgcaatctcatgattaactgatgaagagttgcttctgatggatgagcaaaggcagtggtttcttgtgatagaatct

SEQ ID NO: 880506 - DNA, 589 bp, Homo sapiens
agatctattcccgcacagtcagggagctggcccctcctgccgcagtcccagagttcaagtcactgtaaaaccaaccacgcatccagtgccaagctggcctctgtggggagaggactgcatctcatatagcccctccttgcctcaagttcctcctgttcctgtgtaaagagataaacgatggtcctagtctatcttgtactcacgttagactctactcctccctgtctgtggcctttgggcaagtctctctcctrctcagagcctcacagcccctctcaggttccaaccacagtgcagaggacaggactcccagagtgtgtgcaaaaccctctgcctagcctacccagaggctgctggtgacttttccacatacccaattgtattgaactgggctgtttttcctgcttgccaagagctttttctttttttcctctcatctcagctaatccagtagctgggaccacaggcatgcaccaccacacccactaatttaattaattaatttatttttattattattttttaacagacagggtcttggtgtgttgctcaggatggtcttgagctcttggactcaagcaaccatccc

SEQ ID NO: 880507 - DNA, 642 bp, Homo sapiens
attctgggttgaaaattcttttctttaagactgttgaatattggccccccagtctcttctggcttgtagggtttctgcagagatatttgctgttagtctgatgggcttccctttgtgggtaacccagcctttctctctggctgcccttaacattttttccatcatttcaaccttggtgaatctgatgattgtatgtcttggggttgctcttctcgaggagtatctttttggtgttctcggtatttcctgaatttgaatgttggcctgcctygctaggttgtggaagttctgctggatcaaatcctgaagactgttttccaacttggttccattctccccctcactttcaggtacactaatcaaatgtaggtttggtcttttcacatagttccatatttcttggaggctttgttcgttccttttcattcttctttttttctaatcttgtcttcatgctttattttattaagttgatcttcaatcacagacatcctttcttcctgttgatcaattcagctattgatacttacgtatgcttcatgaagttttcatgctgtgtttttcagctccatcaggtcatttatgttcttctctaaactggttattctagttagccatttttctaacctttttttaaaggtt

SEQ ID NO: 880508 - DNA, 632 bp, Homo sapiens
acaggcaacttacagaatgggagaaaaattttgcaatctatccatttgacaaaggactaatatccagaatctacaaggaacttaaacaaatttacaagaaaaaatgaacaaccccatcaaaaagtgggcaaaggatatgaacagacacttctcaaaagaagacatttatgcagccaacaaacatatgaagaaaagctcattatcactagtcactacagaaatgcaaatcaaaaccacaatgagatatcatctcacaccaattagaatggcgatcattaaaaagtcaggaaacaacagatgctggagagaatgtggagaaataggaacacttttacactgttggtgggactgtaaattagttcaaccattgtggaagacagtgtggygattcctcaaggatctagaactagaaataccatttcacccagcaatcccattactgggtatatactcaaaggattataaatcattctactataaagacagatgcatacatatgtttaattgcagcactatttataatagcaaagacttggagccaacccaaatgcccatcaatgacagactggataaagaaaatgtggcacatacacaccatagaatactatgcacccatgaaaaaggatgagttt

SEQ ID NO: 880509 - DNA, 632 bp, Homo sapiens
acaggcaacttacagaatgggagaaaaattttgcaatctatccatttgacaaaggactaatatccagaatctacaaggaacttaaacaaatttacaagaaaaaatgaacaaccccatcaaaaagtgggcaaaggatatgaacagacacttctcaaaagaagacatttatgcagccaacaaacatatgaagaaaagctcattatcactagtcactacagaaatgcaaatcaaaaccacaatgagatatcatctcacaccaattagaatggcgatcattaaaaagtcaggaaacaacagatgctggagagaatgtggagaaataggaacacttttacactgttggtgggactgtaaattagttcaaccattgtggaagacagtgtggtgattcctcaaggatctagaactagaaataccatttcacccagcaatcccattactgggtatatactcaaaggattataaatcattctactataaagacasatgcatacatatgtttaattgcagcactatttataatagcaaagacttggagccaacccaaatgcccatcaatgacagactggataaagaaaatgtggcacatacacaccatagaatactatgcacccatgaaaaaggatgagttt

SEQ ID NO: 880510 - DNA, 602 bp, Homo sapiens
gtttgtggctctgcattctttatctgttcagtagcagcaactgggcccctcctcctggcattcagcattgggacaggcactgagaggggaatggcaagggaaatggaaggcatgctcttcccaaatgaacagtggacatggagctcactatctcactcaagtcctagcatccaggcgtggaatgtggccagagacgagaaatccaaattcctcagggctgagtataatagtcagctattgatacaataatgctgcataacaaaccaacccaaacctcagtggcatgcaacaacaagcacttgtaactatgttcatgttcargctgaagtggttcagctgatctaatctgggctcagctgggcagttctgcttcaggcagcaggtcaactgggctggactccaagctgtgggttgggttcaggcctcctccatgggttggtttgctccatgggtgtttatctggggcccacactaaagaagtgactacctgacatttgatcctcttatggtagaccacaaaagctcaagaagaaactcaaaccattcaagtatgtttaaggcctctgcctgtgtcatgtccatgaacactcctttagccaaag

SEQ ID NO: 880511 - DNA, 654 bp, Homo sapiens
tctcagcactattcacaatagtaaatacatgtaatcaacctaaatgcccataaacggtagactggataaataaaatgaggtatatagatacatatatataccatggaattctatgtagccataaaaaagaaggagatcaagtcctttgcagcaacatggatggaactagaggccattatcctaagcaaactaacacagaagagaaaaccaaataccacaggttctcacttataaatgggagataaacattaagtacatatggactcaaagaagggaaagatagacactagggcctagttgagcagggagggtggraggaaggtggggatcaaaaaactacaaatggggtactgtgcttattacctgggtgattaaataatctgtattaccaaccctccataacacacaatttacctatataacaaacatgtacatatacccctaaacctaaaatgaaagattttaaaaaataaaatataataaaaagtaaccccagagagaaattgttagcacaagtggtaatatacgaaggtcagataggaaaatgatatagaattatattccaagataatggataacccaaatactcctaagggagaactgagtgaaaagatatgaatcgaaataataagaaccacctatggcaaaaccata

SEQ ID NO: 880512 - DNA, 644 bp, Homo sapiens
acaatcctaagcaaaaagaacaaagctggaggcatcatgccacttgacttcaaactatactacaagtttacagtaagtaaaacagcatggcactggtaccaaaacagatatatagaccaatggaacagaacagaggcctcagaaataacatgacacatctacaaccatatgaacttcctttttttttttttttccaatttgaatgtcatttatttctttctctggccaaattgctgtggctaaractcccaatagtatgttaaccaaaagtggtgaaagtgggcacctttgtcttgttccagatcttaaaggaaaaactataaacttttccctattcagtatgttattagctgtgggtttatcatataaggcccttatgttttgaagtatggtatttctatgcctaattcattgaaaatttttattatgaggggatgttgaattttgatgtttgatttttctgaatgtattgtaacacatgtatgattcttctgtccttgattttgttaatgtgatttataaagtttatttctttgtgtatgatgaaccatcctttcatccctgggatgaatcccacttaatcgtggagtatattctttataatatattgtcgattctggtttgccagtattttgttgaggatt

SEQ ID NO: 880513 - DNA, 644 bp, Homo sapiens
acaatcctaagcaaaaagaacaaagctggaggcatcatgccacttgacttcaaactatactacaagtttacagtaagtaaaacagcatggcactggtaccaaaacagatatatagaccaatggaacagaacagaggcctcagaaataacatgacacatctacaaccatatgaacttcctttttttttttttttccaatttgaatgtcatttatttctttctctggccaaattgctgtggctaaaactcccaatagtatgttaaccaaaagtggtgaaagtgggcacctttgtcttgttccagatcttaraggaaaaactataaacttttccctattcagtatgttattagctgtgggtttatcatataaggcccttatgttttgaagtatggtatttctatgcctaattcattgaaaatttttattatgaggggatgttgaattttgatgtttgatttttctgaatgtattgtaacacatgtatgattcttctgtccttgattttgttaatgtgatttataaagtttatttctttgtgtatgatgaaccatcctttcatccctgggatgaatcccacttaatcgtggagtatattctttataatatattgtcgattctggtttgccagtattttgttgaggatt

SEQ ID NO: 880514 - DNA, 631 bp, Homo sapiens
gcaaatactctaaaatcaatcacatgttcacccataaagcaattataaacaaatttttaaaaaagctgaaatcataccaaccatactctcaaaacacagagcaataaaaatagaaatcaaaactaagaagatctgtcgggccaggcacagtggctcatgcctgtaatcccagcattttgggaaggcaacgcaggaggaccacctgaggtcaggagtttgagaccagcctgaccaatatagtgaaaccccatctctactaaaaatacaaaaattagccaggcgtggtggcaggcccctgtaatcccagctactgggaaggctaaggcaggagaatcgcttgaacccaggaggcggaggttacagcgagccaagattgcaccattgcattcgaggctgggcaacaagagcgagactccatctcaaaaaaaaaaaaaaaaaagaaagacagaaaaaaagaaaaaaaagaaaaagaagatctrtcaaaaacatacaattacatggaaattaacctgctcctgaatgacttttgggcaaacaatgaaattaaggtagaaatcaagaaattctttgaaactaagaaaaacaaagaagtaacatgccagaatctctgggacatagctaaagcagtatt

SEQ ID NO: 880515 - DNA, 599 bp, Homo sapiens
gctttgtgtaacccagtccctgcttgtccctccaggttcattccacgtcactctcttcttcacgtgctggggtccaaccccactcaccatccctcggaccccagaaggcccacggtcctgccagccttgaggccttcccttctgcctggaacccttctctttgctcctaacctacctctgtcgtcttcctggcaccacttgaatatcacctcctcgggaagccttccctgatctcccaaactgagccagggcctcccttgttctagcattctgtatttccttggagcacatttcayaatttaattctataattccttttccagtgtctacctctctcactgactctgaggcccatgaggagagaaaccacgtccttctcatttactgtggtttccttggcttctcgcctgacatacaaaaggtgctcagtgagcgaatggaaacacctcccaagcagggctcacagccgtgggtgtcccaacccaagtgcaaaggcagagctcagatttgtcctgctggaccccaggacaccaggcaggtaccagacaggtgatggacagatggagatgagttcttctacaccttcttaagattatgca

SEQ ID NO: 880516 - DNA, 594 bp, Homo sapiens
accagggcaatcaggcaagagaaaaaaataaagggtactcaattaggaaaagaggaagtcaaattgtctctgtttgcaaatgacatgattgtatatttagaaaaccccatcatctcagcccaaaatcgccttaagctgataagcaacttcarcaaagtctcaggatacaaaatcaatgtgcaaaaatcacaagcattcctatacaccaataacagataaacagagagccaaatcatgagggaactcgcattcacaattgctacaaagagaagaaaatacttaggaatccaactgacaagggatgtgaaggacatcttcaaggagaagtacaaaccaccgctcaatgaaataaaagaggatacaaacaaatggaagaaaattccatgctcatggataggaagaatcaatattgtgaaaatggccatactgcccaaggtaatttatagattcaatgccatccccatcaagctactgatgactttcttcacagaattggaaaaaactactttaaagttcatataaaaccaaaaaaaacttgcattgccaagacaatcctaagcaaaaaaacaaaaaacaaagctgggggcatcatgc

SEQ ID NO: 880517 - DNA, 613 bp, Homo sapiens
atgcaatatttgggccatacttatgctaaaaaatgttatttattggaaaatcaaatctaactttacatcttgaatttttttctttactaaatctggctatcttacaactctctcaattattcccttatcctactttgccttctytgcacttatcatactgtctggtaatactgtttattcagtttttactaggttattgtctgtgttccagcactgaaatattagctctgtggaagtgaaaatgtttccattttatctcttgctggaactctagcacctagaacaatgctcagcacatagtagctgctcaataaatgttgaatgaatttattgaatgaatgaatgaatgaaacatctatatcaaaaccatgttgcttgtccattaattctgcaaaaagttcatatggataattaaatctacaatatttactgtttatctttactttttatttctttttttctagtcagattgcaacattttcaaagatatgaatgatgctaatatttacatattgtgtacttactatgtgccaccattctgagtcatgcacacttaatactcacaaaaaccttatgaaataagtacaatttttactcccactttggcaattag

SEQ ID NO: 880518 - DNA, 534 bp, Homo sapiens
catttttatgttgctgataaagacataactgagactggaaagaaaaggaggtttaatttgacttacacttccacatggctgggggggtctcataattatggtggagggcaaaagacacttcttacatggcggcagcaagagagaatgagtaagaagcaaaagcggaagtctctgataaacccatcagatctagtgagacttactcactatcacaagaatagcacgggaaagaccagccctcatgattcaactacctccycttgagtccctcccacaacacgtggaaattctgggagatacaattgaagttgagatttgaatggggacacagccaaaccatatcaacacccaatattgtacttcttttaacagattcagtatggattagaggaaatgtaatgttaaacattgggtatgtaaaacatgaataatatttctttgctggttaaatattgccagtgagatttcattggattggtaccgaacatgtctaattttatagttgttataatgatttggataaggatgacatag

SEQ ID NO: 880519 - DNA, 640 bp, Homo sapiens
ttcatcaacactagaaaaaatttcaccattacctcttcaaatattatttttctataattccttttattttagtctctctctctctctctctctctctctctctctctctctgtttctggagatgtgtgtgtcttaggttctctttcatgttttctatgtcttaatttctctgtactgcaattcagttcatcaatattctcttcagtcctaatttgctgtttaacccattcattaagtttttaatttcaataactgtagtgttatcatttccagaaagtgtgtttagttctgtatttgwgttctgtgtttttaatagtgttttataaatttcttatgttttatgaccttttttacatctttaatcataattgtctaggaattcgttcaacaaacacttattgggaacctggaatataccagttactatgggcattgaaaagtgtataagatattatttcaaggaggtatgagtttagtgagggaaaaaacacagtacataaattataacaaaatgtgtaaggactagataggtatttggctagggtactacgggaaaatagagaatctcactaaacacagaaagatcagaaaaaccttccaaaagtatatgagtcctggactaattcccaaagcttaggaa

SEQ ID NO: 880520 - DNA, 678 bp, Homo sapiens
tatgcagctcatctcttacttgcagcaagttgtacccagtctacataatttctgtaacctactactccatccagcagttatttttgaccagcactgctgcaataatacatatacttgtttaagcagaagttaatcttacacattggttttgacaataccactgtttcacagatatttcctgttctgtctccttacatccatatggtaagattgtacatgctggtccccttgtggtggggttaggtgaccagttctagcacttgtcacccgtaagtgatgagtagaagtgacaatccacttctgggccagagtacttaaatgttgatggtaaacccaccacatttctctcttttgcttccagcacagtgacccatgatattcaaggtggtggctcctttgtcagatgaattcctgagtgaccataagcagagatctcctaacgacccatgatgggtagtgtgagcaagtatgaaccatctagtggagcaagaaatagtgcctatataagcacygagatttgaggatggtttgttaccagagaattgcctaccttatcctgactgataatcagatgtaataatatacctctgactggtgttggctccatcatacaccagggaaacagctgttgtctagtacttataacatgtaactcaaaacccctggtttaaatgaatt

SEQ ID NO: 880521 - DNA, 629 bp, Homo sapiens; identical to SEQ ID NO: 879897

SEQ ID NO: 880522 - DNA, 629 bp, Homo sapiens; identical to SEQ ID NO: 879898

SEQ ID NO: 880523 - DNA, 629 bp, Homo sapiens; identical to SEQ ID NO: 879899

SEQ ID NO: 880524 - DNA, 582 bp, Homo sapiens
ctaaaaagcttttccacaggaaaagaagtgataatagaatgaagagaacccacaaatgggataacatttttaaaccatacatcagataaggggctcatataataatatataagtaactcaacctactcaaacataagaataaaactatgcttattaaaaaaaataagcaaagaaccagaatagacatttcgtaaggcatacaaaaggccaacaggtacatgaaaaaatcatraacatttctaattatcagagaaatgcaaatcaaagccacaatgagatatcacctcacacattttactagggctattataaaaaaagatggaagataagtgttgatgaggatgtggagaaaaagaaaccctgtgcactgttggtaagaatggaaattagcacagccatcttggaaaacagtatgaagcttcctcaagaaattataaatatatttaccctatgatccatcaatcccacttctggatacgtgtccaaaggaattttaatcagtatgtcaaaaacagacatctgcaatttcatgttcattgcagcattattcataatacccatgaattagaaacaacctaagtg

SEQ ID NO: 880525 - DNA, 639 bp, Homo sapiens
tttgcaacgaagaagcccgcagtgccacacgagccctgaggcatggactggagccccaaaggcagcgcacaccctgctcctgagcctgctgctcatttcctctctgtgactccatacctagcacagatgttgcactgaggcttgtgwatgccaggcaaggccaagctggctcaaagagcaaccagccacctctgcaaggatccacctggagcaggtggaccagccaccaacctcacccacttaaggaagcagggaatgtgtgtttgtaccatgcattgcactacaagtacatttctcctgagtttggtggcctaggttttcttctaggttttttatggttttaggtcttaagtttaactcttcaatccatcgtaagttaatttttgtataaagtgtaaggaagtggcccagtttcagtattctgcatatggctagccagttttcctaacaccatttattgaataaggaatcctttccccattgcttgtttttgtcaggtttgtcaaagatcagatggttttagatgtgttgtgtcatttctgaggcctctgttctgttccatttgtctatatatctggtttggtaccagtaccatgctgttttggttactgtagccttgtagaatagtttgaagtcagg

SEQ ID NO: 880526 - DNA, 673 bp, Homo sapiens
taaaagaaacaagattctgtgttgggttctgcttttagcttatggattttagacattgtccaaaagtgcttcggaaattgaatgtatgttgcaagtattatgtagtaagaacatgcttatgctgttgtaattcgcttagtgatgaaatcaaatcaggttttacattgggaacttcataatttagtgtgaagccacaagacttgagaatggtttgggggagtatgtgcaatttatatagctagttgtttcttaccacccaattctgtaattttctatggtgaatatatacataaatttataatcatgtaacattgattgaagatataagatgatatcagattcatattggattgaactaggactgccagtaactttagaggcctccaaaattattaacatgtcattgctatwtttaatcttaattttttggtatcatcaatattgatatcatgctttcacctttgcttttgtatctagaaacaatatactttttaagttcatacttgtatcagatattaaaaatgaaaattgtagcataaaagtggatagatgagtaaatcttgggttcaagcctgcgttgtattcttcattagccgtgttgtttctggcaagccacgtaacccctctgagctccaattccttcattagtgaaaggaagaagagcagcttctct

SEQ ID NO: 880527 - DNA, 592 bp, Homo sapiens
gacatttcaattggtgtcctagttaatgttgaagtgaaattaatacttcatggatagcagagtcttgttaagattttggaataataatattaatatttcagtttttataatagagctccactgtgtttagaggtctgagttaactcattagatatttgagaatgagtagttattctgacataaaagaatgagaaaatctgtgtcatccttgcaattgtatatggttctatatagtagggtgattwactgtaaaatacttttttgccttttttcatggatcataaggaccactgtgaggcatttctagtctgtctttttggcagtgctcatgtttaggaatccattttccctcaatcactaactttggtgtatgtaagaattctatgaacagattaggaaattgtgtaatctctatgcatggttttctttattctttttacacatctaggcagatgtgttatgtgtaatatagtacttagcaattatttgtgaagtggccttgactattcaattcatttaaaatggactagattgcttaatagctgtgcttctttacagaaacgttttttaaaatcccaagagactcattggt

SEQ ID NO: 880528 - DNA, 592 bp, Homo sapiens
gacatttcaattggtgtcctagttaatgttgaagtgaaattaatacttcatggatagcagagtcttgttaagattttggaataataatattaatatttcagtttttataatagagctccactgtgtttagaggtctgagttaactcattagatatttgagaatgagtagttattctgacataaaagaatgagaaaatctgtgtcatccttgcaattgtatatggttctatatagtagggtgatttactgtaaaatacttttttgccttttttcatggatcataaggaccactgtgaggcatttctagtctktctttttggcagtgctcatgtttaggaatccattttccctcaatcactaactttggtgtatgtaagaattctatgaacagattaggaaattgtgtaatctctatgcatggttttctttattctttttacacatctaggcagatgtgttatgtgtaatatagtacttagcaattatttgtgaagtggccttgactattcaattcatttaaaatggactagattgcttaatagctgtgcttctttacagaaacgttttttaaaatcccaagagactcattggt

SEQ ID NO: 880529 - DNA, 659 bp, Homo sapiens
tatgttaaagttttatgtaaagtttcctttccttcctaacagtttttattttatgtatttcctcagtgtatggattgtttgtgatgcttatgtttgcactgtgcattgtaacttttacaggtgtataataatcattttatccatttcatattttttgccatgatacatgatgctgtgtctgattctaatatttctacctgtctattcctctaacttttctatgttccttttgaccagggaaacttttgaatccctttattttcaacattyctttgtcaatttgtttatacatgtgcttcttataattagtaaatttagatttttaccttttgatataatctgattttatttgccttttattgttatcttttaagccatttatattcactatgccaagtcaggtatagtcttattttgccattttattttattctttgtgatttatacttattgttttcttcttccctatacattatatgtcattgtagctcctctttcttcctattagttattttttctacaaattttattctatattcccatttgtagaatgcacatttttgttctacagttatatatatattcacatatgcacattatatgtatataaaaatatacatatacacagagattagcatatatatgtaattttcaaccaa

SEQ ID NO: 880530 - DNA, 588 bp, Homo sapiens
gccgctgtatgcagagagagtttacaggcattggagtttttacatgctaatcaagtgatccacagagacatcaaaagtgacagtgtacttttgggaatggaaggatcggttaagctcactgactttggtttctgtgcccagatcacccctgagcagagcaaacgcagtaccgtggtcagaacgccatactggatggcaccagaagtggttacacggaaggcttatggccctaaagtcaatgtatggtctctgggtatcatggctactgagatggtagaaggagagcctccatacctcaatgaaaatcccttgagggccttgtgcctaatrgcaactaatggaatcccagaacttcagaatccagagacactttccccaatatttcgggatttcttaaatcgatgtttggaaacagatgtggaaaaaaggggttcagccaaagaattattacagcatcttttcctgaaactagccaaactgttatctagcttgacaccactgatcatggcagctaaagaagcaatgaagagtaaccgttaacatcactgctgtggcctcatattcttttttccattttctacaagaagc

SEQ ID NO: 880531 - DNA, 620 bp, Homo sapiens
gtgttcttgaagttctattgtggtttaagggaactaatttgagattgctttgaaatggccaataaaattctgccattataattttaaattaaatttcggtatcatatgaaagctacaaggattaaggaggcaaatttatctaatagaagagctaggcttatatttcattccaaataagatgaaaatatgcttaatattccagaagcttcaggttgtaacttcttttctctttccgtgttgtcaggctgtgtttgactccatccgccagtctcaataccgatactcaaaattctcctaggattgagcgttacatgcatcttccacattattaaaaccatttggaataataattccacaaagaaaagaagatcagaatgtatttaaggaacaaatcaatgatttttattttctaagataattttttatggatgaaaaatgtgctcagtgtattttaaataatgsaagatgtcaagaagttgaaactggttgagtcaaggaggtcaaactcacagtttgaatagccagcactagaaatggcaaatatcacaaattcctaacatattttattagtttgtaaaagcaaattcaaatttttattggctgtttggatttttctcata

SEQ ID NO: 880532 - DNA, 621 bp, Homo sapiens
gtattgctaggaattcttacatttgcagaacaaataagagaataagaccggccgggcgcggtggctcaagcctgtaatcccagcacttcgggaggccgaggcgggcaaattacaaggtcaggagatcgagaccatcctggctaacatggtgaaaccccttctctactaaaaatacaaaaaattagccgggcgyggtggcaggcacctgcagtcccagctactcgggaggctgaggcaggagaatggcgtgaacccaggaggcggagcttgcagtgagccgagatcgcgccactgcactccagcctgggcgacagagcaagactccgtctcaaaaaaaaaaaaaaaccagagattgagaataagacctttacaaggtgtattgtgtggttcaaaccagaagtatgaaaagaggtaatgaagagggatgagtgagactgaaaaacactgaggcataatatatacatgaaatggacagggaagccaaggtgaagatcaaaggtgttggatcacgtatccagggatgcaggaaagtgaggtgaagacagagagatcagtatcctctgcctctggctcagatgtgcagtcagtacgccctgtggagcaaaaggggcagcctctgtt

SEQ ID NO: 880533 - DNA, 647 bp, Homo sapiens
attggttgagaagctcagcaatgggtgtcctctgcaaactgggactgatggtaggagatgctgttaaagaacagggatcccaagtagagatgggatgatagtatccccaaaacagaagtaattgtagttgttgtaatgagcagtaaggttagaatagcaactaggaaagattgatctgcaaaactctattgtcatggctagtagaacatgactttcttaggggaatattagatgggaggtcaacaaaagtatttcttaatatatgtaatcaaaggaaatcaagtgtaaatcaaagaraatgaccaaggttagcctcaatcgttttaagaggtttattggccaatgttaaggatgcatctgaggaaaagaacacagaaccacaggaaaaatctgtggtccatcttttctccgaagagggtctggagacttcaatacttaaagggaaaagagccagtactgggggaaagaagaagaaaggaaaaaaaaaagggagggtagacacaagaggcaagcagttgcagttgcattcttttgagtctttgatcagtgttcacagcatatacattttacatgtgagaggggtggaggaatactcacttatgcattcatctagtactcagcgaatctgcattttaaaataagataaa

SEQ ID NO: 880534 - DNA, 662 bp, Homo sapiens
ggaacagcaaagatgggtgcctgtttcttcctttgggaagtttgaccttgagtggcactgaactgatgccagtatgaacactcctgtatagggtgtctgacaacccctgttggagggtctcacccagttgggtggtacggggagcaggatccatttaccaaagcactttggctgtcccttgatggagggggtgtggtttgctgggggaaacccactcrtctgggcggcctggattcctcagaactaacaggaggaaagaataagtctgctggtccatggaaactgtggccactcctccccctagggactcaggcccagggagatcagagttctgtccctgagcctctggctggagttgttggagttcctgcagggaggtcccaccctgtgaggagggatgggccagggtcaggcctgaagaggcactctggccacagtcggccacagccggtgtattgggctgtggggaatacctgttgggagcaggctgtccagcctccctggcttcagcaggggaaaagcacagcctgaagctatagagatggctgtcatccttcccagaccctgggagcttagtgtgttaggcagctagcagtcctagtgttggctgttgaccctcaccaaggagctcaaaaggcttaggcttagacagcaggcagctg

SEQ ID NO: 880535 - DNA, 661 bp, Homo sapiens
gacaaattcacagctacatcatacttcatgaggaaaagctaaaagcctttgctctaagaactctaacaagacacagatgctcattttcaccactcctattcaacatagtactgagttagccagaacaattaagcaacagaaagaaaagcatccaaattggaatagaagaagtcgaattattcctttttgcatatgacattatcttacatatagaaaaggtcaaaaatctcttaagactgatgaataatttagtgaagttgcaggagagaaaatcaacagacaaaaaccatttctatttcccaataataaactagatgacaagtaagtcaaagtggctatcctttttacaatagttataaaatatataataaaatacctagttataaatctraccaaaatgataaaatacctctacaatgaaaataataaaacgctgatgacaaatattgaggaggacacaaagaaatgaaaagacatcccatgctcatggatcagaaaaattaatattgttaaaatggccacactacccaagacaatctatatattaaatgcaatccctatgataatataatgacattcttcaaagaagtaaaaaaaaaatcataaaatatttatgaacccacagaagatcccaaatagcaaaagcaacactgggtaagaa

SEQ ID NO: 880536 - DNA, 614 bp, Homo sapiens
actttgcttctgtcttatattgtacctgtctcctcccacctgccttgcacccacgcatgtctattttgcagataagttaacttgctatggtgcaaatctttgaccagagggcaatggaacaatggataatacatgatttcccctttcctttttcctggaaatggcatcctgagatacatttcttactgcttttcaggaactgttgtatggtaactgtgaaagtatgcaacaatacytacagagacagccacctggcaacacttgcatcagcaatctctccttccatgatttgcttcctgactctctctcctgctccctgggatcacatctcccaaaactgcatgtgcagaagcctttgttgggctgtgatttctgggcaatctaagctaggatggacattgtctaatacatcagagatgctcagtcagtgaaactatcaagcctcttctctgtatggttgagtgacccggaccgtattccttttaatttgaaagttttataattccctatatttttattttgttcttatagcctctttcttatcttcatgagagaagataacaaaatggaagacacaaagcagttcagtgaacaagtttcaaatagaattgatg

SEQ ID NO: 880537 - DNA, 590 bp, Homo sapiens
tgtcacactgcctttcacaatggatgaactaatttacactcccaacaacagtataagagcattcctttttctccacaagttcaccagcacctgttatgttttgactttttaatagccattctgactggtgtgagatgatatgtcattgtggttttgatttgcatttctctaatgatcagtgatatgaaaatagtttcatatgattgttagccatatgtatgcyttcttttgagatgtgtctgttcatgtcctttgcccattttttaatggggttgcttgttttgttcttataaatttgcttaagttccttatagatattatatattagacctttgtcagatggatagcttacaaaaatttgctcccattctctaggttgtcttttcactctattgctagtttcttttgctgtgcaaaagttatttagtttaattagattccgtttgtcaattttttctttggttgcaattgctttcggcatcttcatcatgaaatcttcacccattcctttgtccagaatagtattttctaggttttcttccagggttgttacagtttttgggttttacatttaagtctttaatccatct

SEQ ID NO: 880538 - DNA, 627 bp, Homo sapiens
tcaacagggatattggcctgaaattttctttttttgttgtgtctgagacaggttttgttatgaggatgatgctagcctcataaaatgaattagggaggattccctcttcttctattgtttggaatagtttcagaaggaacggtaccagctcctctttgtacttctggtagaattcagctgtgaatccatctggtcctggactttttttggatggtaagctattaattactgccttaatttcagaagttgttattggtctattcagggattcaaattcttcttgctgtagtcttgggagggtgtatgtgtccaggaatttatccatttcttttagattttctagtttatttgcatagaggtgtttatagtattctctgatggtggtttgtatttctgtgggatcggtggtgatatcccctttgtcattttttattgcatctattcgattcttctctctttycttctttattagtctggctagtggtctattttgctgatgttttttaaaaaaaacagttcctggattcattgattttttgaagggtttttcatgtctctatctccttcagttctgctctgatcttagttatttcatgtcttctgctagcttttcaatttgtttgcttt

SEQ ID NO: 880539 - DNA, 645 bp, Homo sapiens
gacttggaagatttggttgttaatttggagttaaattcagtaaattttagcttttagcacagtgctaactacccactccccacccctggtcccatagtgggcacctgtgttcctggagcagcttgcatatcacttgtgggagctgggataggcaacaaggaccctgtcatccaaattttgaggatttgtgttggttgctgattgttgcttctgatcactgaggtgcggacatagaggaaggcagccattgtttgcacctcctccttccgccattgttgcaacacsctttagctgaagtgacttcaaggggattttttttttttttttgagatggagtctcgctttgtcacccaggcttgagtgcagtggcacaatcttggttcactgcaacctctgcctcccaggttcaagccattctcctgcctcagctccccaagtagctgggactacaggtgagcaccattatgcccagctaatttttgtattttttttttttttagtagagatggggtttcaccatgttggccaggctggtctcaaactcctgacctcaagtgatctgcccacctcggccttccaaagtgctgagattacatgtgtgaaccaccgcgcctagccacttccaggggattaaagggctggtaa

SEQ ID NO: 880540 - DNA, 645 bp, Homo sapiens
gacttggaagatttggttgttaatttggagttaaattcagtaaattttagcttttagcacagtgctaactacccactccccacccctggtcccatagtgggcacctgtgttcctggagcagcttgcatatcacttgtgggagctgggataggcaacaaggaccctgtcatccaaattttgaggatttgtgttggttgctgattgttgcttctgatcactgaggtgcggacatagaggaaggcagccattgtttgcacctcctccttccgccattgttgcaacacgctttagctgaagtgacttcaaggggattttttttttttttttgagayggagtctcgctttgtcacccaggcttgagtgcagtggcacaatcttggttcactgcaacctctgcctcccaggttcaagccattctcctgcctcagctccccaagtagctgggactacaggtgagcaccattatgcccagctaatttttgtattttttttttttttagtagagatggggtttcaccatgttggccaggctggtctcaaactcctgacctcaagtgatctgcccacctcggccttccaaagtgctgagattacatgtgtgaaccaccgcgcctagccacttccaggggattaaagggctggtaa

SEQ ID NO: 880541 - DNA, 656 bp, Homo sapiens
agattgagtaataggagaagaggtatacaaatttatttaaggtgcatacacaggagctttagaacgaagacccaacttcccaatgagttacagaaatgtatataccatttttaggttatagaaagaatgggggcttagatgctggtaaaacaagttatttgaagcgagagaaaaggattgctagcaaaggtggccttgctatgtagatgaaaacttcctcagagagaacatatgataaatatttcttttcagacttttaaaggtttcagactctcaatttctgctggatctgggaaaaggaacagaaagggaagggggcatggctggattaatggagattctctagagatgcaaattttccccacttaagacagctttgtgaggccatttctacctactggccaagaagcagccatttcaaaatatawcaaagaaatatatttggggggtaaaatgttttaatttcttcactaggctgtccctcattgccatttctcagactttgaaaagactagagtcaaggttctaattaatacctctgaaatttctaaaaacttctgttgcagaactttattattcatctgcttccccccaacctcccggagcagattctagaattactttctaggctcaatatgtgggactttttctctccc

SEQ ID NO: 880542 - DNA, 675 bp, Homo sapiens
tccattcagagttctgagtccccatttccaggccctagctcctgaataacaataccagacacactttgggccagaaggaagctgccactttgaaggaaagaacccagtcctagcagcattcctcacttgctaactgaagagccctcaggctatgaataaccagaarcaatacccaggtactatgttatcagcttttggtaagagtttgagacttgctggcttcaagtcccggctcagtcagaaggaggtagagcacaaagcaggctcttgggttttcagaatctaggacatggctcttagacagcatttctagaccttccctgggccagaagggagcccagtgccctaaagggtgagtcccaggccaggcagcattcaccacaaactgactgaagagcccttgtgctttaagggaacattggcagtagtttaacagtacttctcatgggcctgtggtggcagtggccacagagtgaggttcccctgcctttggtgaagaaagggaagaatgaaaagaactttgtctagtgctttgagtgccagctcaactacaatatactaggacaccatggtagacttctaaggttttaaatctagtctctggtgcctggaaagcacctctagacctgcctgggcctggaagaagtcactacactgaaaggaaggacatagacc

SEQ ID NO: 880543 - DNA, 675 bp, Homo sapiens
tccattcagagttctgagtccccatttccaggccctagctcctgaataacaataccagacacactttgggccagaaggaagctgccactttgaaggaaagaacccagtcctagcagcattcctcacttgctaactgaagagccctcaggctatgaataaccagaaacaatacccaggtactatgttatcagcttttggtaagagtttgagacttgctggcttcaagtcccggctcagtcagaaggaggtagagcacaaagcaggctcttgggttttcagaatctaggacatggctcttagacagcatttctagaccttccctgggccagaagggagcccagtgccctaaagggtgagtcccaggccaggcagcattcaccacaaactgactgaagagcccttgtgcttyaagggaacattggcagtagtttaacagtacttctcatgggcctgtggtggcagtggccacagagtgaggttcccctgcctttggtgaagaaagggaagaatgaaaagaactttgtctagtgctttgagtgccagctcaactacaatatactaggacaccatggtagacttctaaggttttaaatctagtctctggtgcctggaaagcacctctagacctgcctgggcctggaagaagtcactacactgaaaggaaggacatagacc

SEQ ID NO: 880544 - DNA, 641 bp, Homo sapiens
ataggaacctaagtcctacaatgcaagaggatgaatgttgctaacaatctgaatgagtccggatgtaaattctttcttagagcctccagttaggtgcccaggccagcggacatctagattctgtccttgtgagaaacagagcaaaataaacacttaagactctcggatttctgagatgtattaatacaactgtgacaaaataagaatgtgttgttttaagttactattttcttttgtaatttattataacagcaataataaattaatacaatcctcaaaataatgaggagaagaaaacctcttctgctttagtgaacagacagtgstcactgccttagaggatcttatcttctaattgcagtagtgtctttgtcatttgcgctgctgtaacagaaaaacacaaaattgcatcatctataaagaatagatatttatttcttacagttgtagaggctgggaagtccaagattaaggcaccaacaggtttggtggctggtaagggcccaattttcactactaagatggtgcctgattgttgcttcctttggaggagagcctgtttctcccttggcagaagaggagaagagagtgggtcccctcccacaagccctttttatatttatattggcattaattcattc

SEQ ID NO: 880545 - DNA, 641 bp, Homo sapiens
ataggaacctaagtcctacaatgcaagaggatgaatgttgctaacaatctgaatgagtccggatgtaaattctttcttagagcctccagttaggtgcccaggccagcggacatctagattctgtccttgtgagaaacagagcaaaataaacacttaagactctcggatttctgagatgtattaatacaactgtgacaaaataagaatgtgttgttttaagttactattttcttttgtaatttattataacagcaataataaattaatacaatcctcaaaataatgaggagaagaaaacctcttctgctttagtgaacagacagtgctcactgccttagaggatcttatcttctaattgcagtagtgtctttgtcatttgcgctgctgtaacagaaaamcacaaaattgcatcatctataaagaatagatatttatttcttacagttgtagaggctgggaagtccaagattaaggcaccaacaggtttggtggctggtaagggcccaattttcactactaagatggtgcctgattgttgcttcctttggaggagagcctgtttctcccttggcagaagaggagaagagagtgggtcccctcccacaagccctttttatatttatattggcattaattcattc

SEQ ID NO: 880546 - DNA, 577 bp, Homo sapiens
cttcagatgagattcagcacattaccagctgtggtagccacagggcaagattccttatgcttgagaaaagcagatggaaaagtaaagaagactttgtcttgcaccttaggtaccagcagggccacaggggtgtagagcaccaggtgtactcttggggtccccaattcagggacttgacttttagatggcatttctggacctgccctaggtcagaggggactcacttccctgaagggtaagtctcaggccaggcagcattcaccgcaggcggttttaagagcccctgakccttaagagaacattggaggaagtctggcagtacttctcgtggactgtggtgatggtggctacagagtgaggttcctctgtctttggaaagaggagagaggattggtaaggactgcatcttggggtttgagttccaactctgcatcttggggtttgagttccatctcagctgcagtacaatagaacaccagatagactttcaaggtgttttactcaggtcactgattcctggatggtatctctggacccacctggtgtctggggaaacttaacgctcagaagggaagga

SEQ ID NO: 880547 - DNA, 617 bp, Homo sapiens
cagcccttgagtcccagatcttccttctgaaatagtctacccaaatgagaaggaactagaaaagtgattctggtaatatgacaaaacaaggttctttaacactctccaaaagatcacactagcttgccagtaatggatccaaaccaagacaaaatctctgaattgccagaaaaagaattcagaaagtcaactagtaagtgaatcaaggaggtaagagaaaagtgaaatccaacttaaagaaattataaaaaaaaaaaagatacaggatatgaatggaaaaatctccwgtgaaatacatagcgtaaataaaaaacaatcacaacgtctggaaatgaaggacacacacacttacagaattgcaaaatgcactagaaagtctcagcaagagaattgaacaagtagaagaaagaatttcagagcttgaaaacaaggcttttgatttaatccaatctaacaaagacaaagaaaaaagaattttaaaaaggaacaaagcctccaagaagtttgggattatgttaaatgaccaaacctgagaataactggtgttcctgaggaaggagagaaatctaaaaggatggaaaacaaatttgagggaataattgaggaaaacttcccca

SEQ ID NO: 880548 - DNA, 690 bp, Homo sapiens
caaacagaccaatggtactatctgttgctaactctaaaaaaggctttggctgggtgtggtggctcatgcctgtaatcccagaattttgggaggccaaggtgggcagatcgcttgagcccaggagttcaagaccagcctgggcaacatggcaaaacctcgtctctacaaaaaaaatatgaaacaaattagctgcrtgttgtggtttgagcctgtagtcccagctaatctggaggttgaggcaggaggattgattgagcccaggaagtcaaggccgcagtgagccatgatcgtgctgctgcactccagcctgggcaacagaacagaccctctctcaagaaataaagaaatcaaaaacaaaaattaaaaaggctttgattaggatgtaagactggatctatatgtgggcaatcttgacaggctaataatgccatgtcctccaagccagcaggcttgaaatctttgctcaatatgtatttagaacagaggccaagctctgtatgttgtgatggtcgtgagggctgcaggcctctgcatgttctattgaccactagtgtgtggtcagctggcctggctggctgagtgggtgtctcttcttcccccactattctttgtgggactcatcagagggaggaggacaaggtttctctcaaaatcatatgacgtgattcctgccaggctgttatggttgtt

SEQ ID NO: 880549 - DNA, 690 bp, Homo sapiens
caaacagaccaatggtactatctgttgctaactctaaaaaaggctttggctgggtgtggtggctcatgcctgtaatcccagaattttgggaggccaaggtgggcagatcgcttgagcccaggagttcaagaccagcctgggcaacatggcaaaacctcgtctctacaaaaaaaatatgaaacaaattagctgcgtgttgtggtttgagcctgtagtcccagctaatctggaggttgaggcaggaggattgattgagcccaggaagtcaaggccgcagtgagccatgatcgtgctgctgcactccagcctgggcaacagaacagaccctctctcaagaaataaagaaatcaaaaacaaaaattaaaaaggctttgattaggatgtaagrctggatctatatgtgggcaatcttgacaggctaataatgccatgtcctccaagccagcaggcttgaaatctttgctcaatatgtatttagaacagaggccaagctctgtatgttgtgatggtcgtgagggctgcaggcctctgcatgttctattgaccactagtgtgtggtcagctggcctggctggctgagtgggtgtctcttcttcccccactattctttgtgggactcatcagagggaggaggacaaggtttctctcaaaatcatatgacgtgattcctgccaggctgttatggttgtt

SEQ ID NO: 880550 - DNA, 641 bp, Homo sapiens
tccctatctaagaacaagggtgggaaagccacagtccataagcaaaccccgcctgcttcctgtttttgtgcagcctgcaagctaagaatggtctttggatttttttaatggctttctgaaaaaaatcaaaaggaaaacatttgtgacatttgaaaagtacatgaaattcaaagttcagtgtcaattaagttttattggaacatagccatgctcattcatttatgtattgtttatagcagagccaaacagagactgaaaagccaaaaaactactatctracccttaacagagaaagtttgctgacccctggagtagagataagaatgacacacaacctcagtggtcacgtctcttatgcacaaaatcctgaatatagacagtaaacttaattccagaaatagtagtaaataccatctaggatggaaatccattcctgagttgtccaaactttctgatttctttaatgacaaaagccaacttaattaaatacagcttctgcattctatctgaaatcatgtttatatattcaccttttgactcagcggagcaataaaaaaagcactgggctccaagttagaagacctaggttttaggcaatttcttttaaattgttacattgttaaaaatgtatttaagtcttg

SEQ ID NO: 880551 - DNA, 528 bp, Homo sapiens
tctataaattactttgggcactatgtcaattttcacgatatcgattcttcctatccatgagcatggaatgtttttccatttgtttttttcctctcttgtttcctggagcagtggtttgtagttctccctgaagatgtccaagttgtattcctaagtattttattctctttgtagcagttgtgaatgggagttcactcatgatttggctctctgtctaatattggagtacaggactgcttgtgatttctgcaaattgattttatattgtgagactttactgaaggtgcttatcagcttarggagatttttggcctgagacaatagggttttctaaatatacaatcatgtcatctgcaaacagagaaaatgtgacttcctcttttcctatttgaataccctttatttctttctcttgcctgattgccctggccagaactatggccaatactatgttgaataggagtgttgagagagggcatacttgtcttgtgcaggttttcaaagggagtgctttcagcttttgcccat

SEQ ID NO: 880552 - DNA, 646 bp, Homo sapiens
gcataagatgccttgaacactgcctgcttatagtaagtactagtcactataattgtgcaatgggttaaatgtatgtcaaggacatggggcagaagttgaggtaggattttcctgatgtgccatgtctatttttagaaatgtgactgtggccccttgtttctttcagactatgtgagttcatccatttcaccctggcttcagtcattgccattcagctgggatagacacttaggaataatgggcttcatttggaatgtacagtctagaaaaacaccctttattgtagtatatctcttccatttgcttgagtgtatgtagtggccacagtttaactgccaagcagtattattgctagtgggtaaacaagagttatctctctgagtcttccagaaaagacaaagtgaccctggatgctaatggcacagatgagatgggatctcttccaggagtctgaataygagaaaagagtctctgaagtgtgtactagatgagcccagcttattaccagtcagcagagtgacttccaagagtttgtaaacattttctgaggctttctcatgggtctgtaactttcctaagtgctttatatgtattacctcatttaattgtcacaaaatcccatgaggtaagtgggaatatttttacc

SEQ ID NO: 880553 - DNA, 631 bp, Homo sapiens
taacatactaataatgactcacaatacataggtcatgtcttttttaagtgtgtgtgtgtgtttcaatgaaatgagaagactttcattgaaatagtgatttttttttttttttttttgagtcagagtctcgctttgtcacccaggctggagtatagtggggtgatcttggctcactgcaacctctgcctcccaggttcaagcaattctcttgcctcagcctcctgagtagtgggattacaggcacacgccaccacgcctgactaattttcgtatttttagtagagacgaggtttcacagkgttgctcaggcttgtctcgaactcctgacctcatgatctgcctgcctaggcctcccaaagtgctgggattacaggtgtgagccaccacacccagcctgaaagaaacatcctgtatgctgaaaactgtggagactcaaagatcaaaaatggacaaagatcagaagtccacacttcaggagctcagttggcattagatttcttctttctcatggcatgactgtttccaagtggctcaccttaaccttcactccttttgtcttcccaaattcagaactttcatctaaacctctgggatatcccctaaaccatatatgttttattaggagttaaat

SEQ ID NO: 880554 - DNA, 588 bp, Homo sapiens
agtcacttgattaatttgggacaagcagctaattatttgagaaaaaacaaaagcaatccctctactttagataattcatccaaataaatcaattttaaaaaattaaaatcatactacaaagtaagagcaaataattatataatcttgagactacacaaagtatttctgagcatcaaactgaatgtcaatgtgctagagaaaamtattgatatattggactattaatttaaaagcatttttaccactaaaacctctaaaattaaatatctaaggaaaacatttgctataacaatgggagtgttaactgtactcttacaaaacactattaagatcacttaatcacagaagagatataaattagaattaaacatatgaaattgtttaacttttataatcaaaaattccaattgaatctataatgatcaacatggaaattgttaaactgtcaaaactaaaaaagataatcatttctggtgagaatttagagaaagttaccatctcagtatctgatggggcaatgcaaattgggaaaaatttttctggaaagtgatttaggacagcctatgtcaaaatccttaaaaatatgca

SEQ ID NO: 880555 - DNA, 682 bp, Homo sapiens
actgtaaaattaattgctctaattagcaagtgtcatcagtgacaaactaacatagaacattttatttgctgcagctgtcattaatataaaaaaaaaagtgaaggaaaaagatttttaattagtcatgtatgagccaatcgggtcatattggagtagccaacatcccttttcctctgacttttgaatccagttacagatatcagggattagcactggggtacctcaagtccctggaagcccctcacatctcagctgctcttatacggctgctactttcccactgattacccactacttctatagctaattatctgttagcatatttcaagcttgtcttttcaagcagaaatgtggctggaaactgtcttatttatctctgacccaaatctgagcctgggctagtgtctttatacaatcataggttcagaaaaaagacatgttgattgattgattggtatttgagcrgtaaatcaatttcagaacatggcttcttttttaacttattctctgcaaagtcaaaaaaagccacatctgcttgagtaaaaaggatgcgtcatatattttcaattcctaaccttgttcagatggcaataaaagcaaatagccttatatctttctcttgtagatactcatgagaagacatattttgcttcattttactaaacattttcagcacctatga

SEQ ID NO: 880556 - DNA, 602 bp, Homo sapiens
ctatcaccaatctctctttcacacatactcctcctcttctcatttctgttcgtgtacttggttctcagtgtaagattttgttagaagaaagaggcatgttggtaaaataagaaataatatatcaaaaataaaataaaattgtttgaaagtctctgcagtgctttaacaatgaaagaagtatctatgcacactttatagtttgctaaatacataattgattaagttagaagactatgtagagctgcggcgggcagatcactaggtcaggaatttragaacagcctggccaacatggtgaaaccccgtctctactaaaaatacaaaaattagccgggtgtggtggcaggcgcctgtaatcccagctacttgggatgctgaggcaggagaattgcttgaacctgggaggcgggggttgcagtgagccaagatcatgccactgcattacagcctgggtgacagagcaagactctgtcccagaaaaaaaaaatttaaaaaattaagctatgtagagttatttctacaaattgggtttagccattgttatatgaatatttattgctcttatatacagttctgagaacccctgaaatgattactgaata

SEQ ID NO: 880557 - DNA, 587 bp, Homo sapiens
ttcagagccttcatactattatagcctactggagctcccactggtcctttctggtgcccctttctggggctgagggaatttccatgggctgggccacctggtgcctctagatgggcaaaaggagtctcaggcctacggagaccaagagtgcttcccaaactaggctgcctgttatgatgtggttcctattgttgrtaccacccagtcaccctacatgtctgtcagtggaagtggaggagaataccaggctcaccaggaagcaggaggaatgagtctatgttggctgtcttttggtgccaagttgggatcaggtaataccaggcctaggtcaccttctcttgttggatgcggtgatggtaagacatcctacctctattgttcctccagtcttagggtccctaactaattcctctttctgtttccatctttcagagttctcctttggttacctcttgcattatttctagactttataattgcatttaactgagaggagagaagacagaaatggatctatgctattttgtctggaccagaagtcctttcaaaattattttgaatgaaataattcatggaatacatcacta

SEQ ID NO: 880558 - DNA, 587 bp, Homo sapiens
ttcagagccttcatactattatagcctactggagctcccactggtcctttctggtgcccctttctggggctgagggaatttccatgggctgggccacctggtgcctctagatgggcaaaaggagtctcaggcctacggagaccaagagtgcttcccaaactaggctgcctgttatgatgtggttcctattgttgataccacccagtcaccctacatgtctgtcagtggaagtggaggagaataccaggctcaccaggaagcaggaggaatgagtctatgttggctgtcttttggtgccaagttgggatcaggtaataccaggcctaggtcaccttmtcttgttggatgcggtgatggtaagacatcctacctctattgttcctccagtcttagggtccctaactaattcctctttctgtttccatctttcagagttctcctttggttacctcttgcattatttctagactttataattgcatttaactgagaggagagaagacagaaatggatctatgctattttgtctggaccagaagtcctttcaaaattattttgaatgaaataattcatggaatacatcacta

SEQ ID NO: 880559 - DNA, 585 bp, Homo sapiens
tatctttttccatcaatttgctgtcagtctacctatatcattgaatttgaagtgagtttcttgtaaacaacacatagctgggtcatgttttgtaatacactctgccaatctctgcattttaatggatgcatttagaacatttacatttaagataattattgatatattaggactaagtctgatattttattattatttgttctctgattgatccttttgtttattacacttttgtttcttttttcttgccttcctgtggtttacttggacattttttgatgtttcattttgatttaattgygattttttttttcggcatatcatgttatgttgtttccttagtgcttattatgtttggaaactctgtagatggacagccttccatgatggggaggaagctgcagggcctgggtctccttatgccactggatggagtctggggagacacagggcttcacagtggctgcttctgtgggtgaattaggccatgtgctgtgtctaagttgtggactgggggccaggactgtccagggctttgctgctgctactattgctgctgatgccactgctggcagatcaatctct

SEQ ID NO: 880560 - DNA, 585 bp, Homo sapiens
tatctttttccatcaatttgctgtcagtctacctatatcattgaatttgaagtgagtttcttgtaaacaacacatagctgggtcatgttttgtaatacactctgccaatctctgcattttaatggatgcatttagaacatttacatttaagataattattgatatattaggactaagtctgatattttattattatttgttctctgattgatccttttgtttattacacttttgtttcttttttcttgccttcctgtggtttacttggacattttttgatgtttcattttgatttaattgtgattttttttttcggcatatcatgttatgttgtttccttagtgcttattatgtttggaaactctgtagatggrcagccttccatgatggggaggaagctgcagggcctgggtctccttatgccactggatggagtctggggagacacagggcttcacagtggctgcttctgtgggtgaattaggccatgtgctgtgtctaagttgtggactgggggccaggactgtccagggctttgctgctgctactattgctgctgatgccactgctggcagatcaatctct

SEQ ID NO: 880561 - DNA, 362 bp, Homo sapiens
atcagatctctccgcagctcccaaaagtgtcccaagggttagcactgaccagcttgctgggtttgaaggaaccacaatgcatcgggtgtggctctcttcctgctagctgctccgaagtgagctcctactgattctattcagttggacrctcacattcagcgagtccagggggtttttcatgctttgagcatttttaagagtctgctatttgcccagttcagtgaggggcactcaggatgtatcagtggttcaggctgacttggttcctgcctaggggaagacccacaagaccagtacccaatgcagggatggcatggatggtaggggaggcttggaggccctaacccactcttgaagggatg

SEQ ID NO: 880562 - DNA, 560 bp, Homo sapiens
gctggagataaactgaaactttgagcaacctctggactgactctgattaccctccacaccctacctgcgcagggaggagagaccacaaagccagcagcaaacagtaaacttttccaagaatcagagaggaaggagttcctgacaccctgcagcaaaaacaacctcaaaattcccctgaagacagacccatgggagctggggtcaaggtggccttgcgcttcaccgaggaggtgtcattaccaaacgtgstggacattggctacctacggaagaaagattaaggactgaaagaaaatagtggagaacatgcttatgacatgggggtaggacagggaaggccttgagcaagacacaaatcacaaaagcaaatagagaaagagtgatgtctaccttcaacgaaatgtgaaacttctgattcaaaatcggaaacctctataagctgagataaaagacaagcaacagagttggagaagatatttctaacatttgtatgtgtgcaaatgtatgtgtgtaatgtgcttatacatatacatatagataaatgcgtgcgtatacacatg

SEQ ID NO: 880563 - DNA, 560 bp, Homo sapiens
gctggagataaactgaaactttgagcaacctctggactgactctgattaccctccacaccctacctgcgcagggaggagagaccacaaagccagcagcaaacagtaaacttttccaagaatcagagaggaaggagttcctgacaccctgcagcaaaaacaacctcaaaattcccctgaagacagacccatgggagctggggtcaaggtggccttgcgcttcaccgaggaggtgtcattaccaaacgtgctggacattggctacctacggaagaaagattaaggactgaaagaaaatagtggagaacatgyttatgacatgggggtaggacagggaaggccttgagcaagacacaaatcacaaaagcaaatagagaaagagtgatgtctaccttcaacgaaatgtgaaacttctgattcaaaatcggaaacctctataagctgagataaaagacaagcaacagagttggagaagatatttctaacatttgtatgtgtgcaaatgtatgtgtgtaatgtgcttatacatatacatatagataaatgcgtgcgtatacacatg

SEQ ID NO: 880564 - DNA, 583 bp, Homo sapiens
agaattctcagatgagttagcaaatagtggctggagataaactgaaactttgagcaacctctggactgactctgattaccctccacaccctacctgcgcagggaggagagaccacaaagccagcagcaaacagtaaacttttccaagaatcagagaggaaggagttcctgacaccctgcagcaaaaacaacctcaaaattcccctgaagacagacccatgggagctggggtcaaggtggccttgcgcttcaccgaggaggtgtcattaccaaacgtgctggacattggctacctacggaagaaagattaaggactgaaagaaaatagtggagaacatgcttatgacatgggggtaggacagggaaggccttgagcaagacacamatcacaaaagcaaatagagaaagagtgatgtctaccttcaacgaaatgtgaaacttctgattcaaaatcggaaacctctataagctgagataaaagacaagcaacagagttggagaagatatttctaacatttgtatgtgtgcaaatgtatgtgtgtaatgtgcttatacatatacatatagataaatgcgtgcgtata

SEQ ID NO: 880565 - DNA, 611 bp, Homo sapiens
tggtgtgctgtattcaggagacccatctcacatgcaaaagacacacataggctcaaaataaagaaatggaggaatattttccaagcaaatggaaagcaaaaaaaaaaaagcaggggttgcaatcctagtcttcaataaaacagactttaaaccaacaaagatcaaaagagacaagggcattacataatggtaaagggatcaatgcaacaagaagagctatctatcctaaatatatatgcactcaacacaggagcactcagattcataaagcaagttcttatagacctacaaagagacttacactcccacagaataacagtgggagactttaacacctcactgtcaatatyagacagatcaatgacacagaaaataaacaagtgtatccagggcgtgaactcagctctggaaccagcagacctaatagacatctacagaactctccaccccaaatcgacagaatatatattcttctcaggaacacatcgcacttattctaaaattgaccatataattggaagtaaaacactcttcagcaaatgcaaaagaacagaaatcaaaacaaacagtctctcagaccacagtgcaatcaaattagaactcaggattaa

SEQ ID NO: 880566 - DNA, 611 bp, Homo sapiens
tggtgtgctgtattcaggagacccatctcacatgcaaaagacacacataggctcaaaataaagaaatggaggaatattttccaagcaaatggaaagcaaaaaaaaaaaagcaggggttgcaatcctagtcttcaataaaacagactttaaaccaacaaagatcaaaagagacaagggcattacataatggtaaagggatcaatgcaacaagaagagctatctatcctaaatatatatgcactcaacacaggagcactcagattcataaagcaagttcttatagacctacaaagagacttacactcccacagaataacagtgggagactttaacacctcactgtcaatattagacagatcaatgasacagaaaataaacaagtgtatccagggcgtgaactcagctctggaaccagcagacctaatagacatctacagaactctccaccccaaatcgacagaatatatattcttctcaggaacacatcgcacttattctaaaattgaccatataattggaagtaaaacactcttcagcaaatgcaaaagaacagaaatcaaaacaaacagtctctcagaccacagtgcaatcaaattagaactcaggattaa

SEQ ID NO: 880567 - DNA, 611 bp, Homo sapiens
tggtgtgctgtattcaggagacccatctcacatgcaaaagacacacataggctcaaaataaagaaatggaggaatattttccaagcaaatggaaagcaaaaaaaaaaaagcaggggttgcaatcctagtcttcaataaaacagactttaaaccaacaaagatcaaaagagacaagggcattacataatggtaaagggatcaatgcaacaagaagagctatctatcctaaatatatatgcactcaacacaggagcactcagattcataaagcaagttcttatagacctacaaagagacttacactcccacagaataacagtgggagactttaacacctcactgtcaatattagacagatcaatgacacagaaaataaacaagtgtatccagggcgtgaactcagctctggaaccagcagacctaatagacatctacagaactctccaccccaaatcracagaatatatattcttctcaggaacacatcgcacttattctaaaattgaccatataattggaagtaaaacactcttcagcaaatgcaaaagaacagaaatcaaaacaaacagtctctcagaccacagtgcaatcaaattagaactcaggattaa

SEQ ID NO: 880568 - DNA, 511 bp, Homo sapiens
ggtcgcttcactgcactccagcctaggcaacagaacgaggctccacctcaaaaataaaataaaataaataaaataaaaataaaagtactaattccaaaaagcatgcagttaaagaaacaattttttgaaggagaaggataagaatttccaagaaaggaaattcaaatattgattttatgctgtcatgtttatacttataattactgtctctgaatctgaacaagtgaaaaatattaacatcctgatattctcctcttctgttgataagaacaggctccttttttaraaatcaaatctgagccactgtggcggcagtgacattcagccagtagaactcctgtaaatgttcctgtctgaataaagatgggcatcaaggggttacagcaaaatttcttttttacttattcttggtgagatatagctacttcatttacacagtacttcctaattttcaaagccccttctcatacatgatctcaactcacacaatcctacgagacagaatagagag

SEQ ID NO: 880569 - DNA, 511 bp, Homo sapiens
ggtcgcttcactgcactccagcctaggcaacagaacgaggctccacctcaaaaataaaataaaataaataaaataaaaataaaagtactaattccaaaaagcatgcagttaaagaaacaattttttgaaggagaaggataagaatttccaagaaaggaaattcaaatattgattttatgctgtcatgtttatacttataattactgtctctgaatctgaacaagtgaaaaatattaacatcctgatattctcctcttctgttgataagaacaggctccttttttagaaatcaaatctgagccactgtggcggcagtgacattcagccagtagaactcctrtaaatgttcctgtctgaataaagatgggcatcaaggggttacagcaaaatttcttttttacttattcttggtgagatatagctacttcatttacacagtacttcctaattttcaaagccccttctcatacatgatctcaactcacacaatcctacgagacagaatagagag

SEQ ID NO: 880570 - DNA, 466 bp, Homo sapiens
acaagttactccagtgcttagcagcttaaaacaattgtgggtcagaaatctgggaagggctctgctgggtggttcacacttgaggtctccctcatagttgtagttggatgttggttggggctttatttatcttgtctgtgctaagrtaaataaagatgcatggttggcagttgatgccagctgtcatctgctgtacacagcctctccagcagggtagtctgggtgtagtcagacttcttacatgacatatggcttcatttcaagagaaccaggcagaagtctcatggccttttctgatctagcttcagaagtcatacaacatctcctctactgtactcaattagttgaagcagtctcaagtggtccagattcaaggtggggtgggaggaattagactccacttcttgatgagggcaatggccagttgacagtatagaagaacatgtgggatgggaacacgtgttgt

SEQ ID NO: 880571 - DNA, 600 bp, Homo sapiens
catttccttgacaatctgcatgactcagcagaggcagccataatcctcctaggtacacaactccattgaccagggaagctcaccccaacccccacagcattcacagcaagacccacacaaggacagtctgagctcagacacgcctaaccctgcctccaccttytgggtcttccatatccaccctggtagctgaagacaaggggcacagaatcttgggagctctaaactgtctagtttggaataattgcttttgcaaatttttttttgattgaatagttactgggagtgattttgtggcaatacaaactaaaaatgacatggaaactttgcaggggcagattttcctagagaggatcaaatgctttttaaacaaaacatctgtattcatggcacattagtgacagggcttgagaaccatgatttcttgaacttaagttcttttaaaacctataccttactcagagactagagagagaacattccttcacaaaatatttgcagccaatggaaagactggtgtatgactgaaaacatttattcataattgaatatttttttttgagacggagtttcattcttgtcacccaggctggagtgcaa

SEQ ID NO: 880572 - DNA, 607 bp, Homo sapiens
tagcattagagaacgagatactgatagtccatgagggacagaggtctgcttaaattatgcctcttgtcaattcaaatgcattttttcataaagccaaggcttttgcagactgaatggatatggtagttgttcattttgaaagtcagaatgcatatgaacttatgagatcagctggctatttctgacttccatagcgatcttatggggaaaaaaataacataattaagattttaaatgtttggctggaataactgccaccagataatatcccatgattgaacaaaaaaaaaaaaaaaaaaaaaaggaacaaagagagaagaaagaagaaagaaatgtgtccccaaagggcaacactgacatcaccgaaaataagatgcagaatttagtttttagtattactgtattataatgattggctaattgcattcacaacyttgcgaaagttaggaaggattgtgcaaaaacctgttaaatatgagtttgaatgggttttgaggcagaagagggagaaacaattattgacaaacttatttgtatagggaactaaaaaattctggacttgtgtgccagaaagagcagcagtggctctgttggctttattagttga

SEQ ID NO: 880573 - DNA, 512 bp, Homo sapiens
ataatagagaacaaaaggcacattagagagagtttcaaattgctgcagcaaaaacaatgtcctttagtagttgactgaaaaatgtattaaaggccaagtgatagaaataaaagtaaataccaccttggcctctataagggaaacaacaccagagataagcagaaaatctttagactgagacagaaaagagaytatctgtgaatggaggacatatacattgaaaataaacctcattattttggaaaagagagtttgggggataatggacagactgcaagtagatattttgaatactctgctccaagccatctctctttattgaatggaaacgtagtttttttgtttgtttgtttttgtttttcttttttttgagacagtgtctctctctgttgcccaggctggagtgcagtggctcaatcttggctcactgcaagctctgcctcctgggttcacaccattctcctgcctcagcctcctgagtagctaggactacaggcgcctgccaccacacc

SEQ ID NO: 880574 - DNA, 571 bp, Homo sapiens
gaaactatttcaaaaaattgaggaggagggactcctccctaactcatttgatgagaacagcatcatcctaataccaaactggcagagacacacacacacaaaaataaaacttcaggccgatatccttgataaacttcaatgtaaaaaatcctgtgcaaaatactggcaaaccaaattcagcaacccatcaaaaggcttatccaccatgatcaagtaggctttatccctggatgcaaggttggcttaacatatgcaaatcaataaatgtgattcatcacaaaaacagaactaaagacaaaaatcacataattatctcaatagatgcagaaaaagcttttgataaaattgaacatccattcatgytaaaaactctcaataagctaggtattaaagggaacatagtcaacataatatgaaccatatatgacaaactcgcagctaacatcatactgaatgggcaaaagctggaagcagtccccttgaaaacctgcacaagaccaggatgccctctctcaccactcctattcaacatagtattgtatgtcctggccggggcaaccagacaagagaa

SEQ ID NO: 880575 - DNA, 696 bp, Homo sapiens
tccttagcaaactaacacaggaacggaaatacaaatcctgcgtgttcacactcacaattgggagccaaattatgagaacacaaggaaacatagaggggaacaacacacaatggggccttttggaagatggagggtgggaggcagtagaggatcaggaaaaataactaatggatactaggcttaatacctgggtgatgaaataatgtgtacaacaagcccccaagacacaagtttagctatataacaaacctgcacatgtacccctgaacttaaaataaaagttaaaaaaaatttaaaaaacagaaaaaacttcttctgacaccatcaacaaggaaatcaatcaggaataaacacataatttgagrgaatcattgtggccaaataaatgtgtattctactggtatttcacatcacctgacaccattgcccatggctaaatgcttaatggacctccctgatattcaagttaaatattttaatatgcaatgtgacgtgactcctaggcagaaaaaaaatagttacattactcctattgtagcatatagctggaataaaatactgttttttcttatgaagcaatgaagagctcatacataatgacagttagaggaggcaaaatatagacacagtaacccagaaaactattatggaaataggctaggaacaatatggaaataacataaagaaaacataaaa

SEQ ID NO: 880576 - DNA, 678 bp, Homo sapiens
ttacttacacaaatttctgcagctggcttgaatttctccctagaaaatggtattttattttctattgcatcatcaggctgcaaattttccagacttttatactctgcttcctcttgaatgctttgtcacttagaaatttcttctgcaaaacaccctaaatcatctctctcaagttccaagttccacagatttctagggcaggagcaaaatgccatcagtctctttgcataggaagagtgaccttcactccagttcccaagaaattccccatctccacctgagaccacctcagcctggacttcattatccatatctctatcagcattttggtcaaggccattcaacaagtccctaggaagttccaaacatttccatatcttcctgtcttctgagccctccaagtctctaggaaggcccaaactttcccacattttctcatcttctgagccctccaaactgttccaacctctgcctattacccaattccaaagtcagttgtgatgtaggttttttctcctcctgargtcagctagatccaggttttttgtctcaagaccaggaagaattaggcatgtggacatcagagagtgagtaataaaatttattaagcaaaaggacaaccctcagcaaaaagaggggtcctgcaagcaggttttcacctcacagttgagtgccagg

SEQ ID NO: 880577 - DNA, 588 bp, Homo sapiens
tacagcacactgatgggtcttgactctttatccaatttgcccgtctgtgacttttagttggagaatttagcccatttacatttaagattaatatttttatgtgtgaatttgatcctgtcattatgatgttagctggtgattttgctcgttagttgatgcagtttcttcctagccttgatgttgtttacaatttctcatgtttttgcagtggctggtaatggttgtwcctttccatgtttagtgcttccttcaggagctcttttagggcaagcctggtggtgacaaaatctctcagcatttgcttgtctgtaaaggattttatttctccctcacttatgaagcttagtttggctggatatgaaattctgggttgaaatttcattgctttaagaatgttgaatattggcccccaccctcttctggcttgtagagtttttgccgagagatctgctggtagtctgatgggcttccctttgtgggtaacccgagctttctctctggctgcccttaacattttttccttcatttcaactttggtgaatgtgacaattatgtgtcttggagttgctcttcttgaggagtatcttt

SEQ ID NO: 880578 - DNA, 588 bp, Homo sapiens
atgccagaatgatagatccagcaacaggttaccactgtgtgcttggaaaagccacaggcactcaacaccaacctatgaaagcagctctgggggctgtaccctccagagcttcacgggtgcagctgcccaaggccctgggaacccacctgttgtatcagcatgccctgaatgtgagtcatgaagtcaaaggagattactctggagctttaagatttactgagggccctttaggattctggacttggaggaggcctgtggcccctgtgttttggccartttctcccatttggaatgggaacatttacccaatgcctgcacccctactgtatgttgggagtaactaatttgttttttattttacaggctcatagggagaagggacttgccttatctcagatgatactttggacttagatttttgagttaatgctggactgagttaagactttacagaacagttgggaaggcatgattgattttgaaatgtgaaaaggacatgagatttgggaggggccaggggcagaatgatatggtttggttctgtattcccacccaaatctcatcttgaatggtaatccccacatgtca

SEQ ID NO: 880579 - DNA, 597 bp, Homo sapiens
tctcaccatctgccctctaccccagctgacccagagactccctgccagaacactgagtgtattttgatgagttaaatgaaaacaacaaccataaccaaaacaaatccaaactgcatgggtcttgggggaaagaaaaaaaaaatcagaaaaattggacacttcataattccttcctttgcacattctttttctttttaaatgagtacatttgatgtagaatgcagagttcctagagggtgttctaaaaacttaaaaacttagagttctawagtggacccgaccctttgttaaagccttcttaatgccataggaaggtttccatgatttagagtttttatgatattgatacatgccaaaaacaatttaatcacatcacaaatatgactgagtatgtctactctttcctaaggtgaaatgccacttctctgattattggcctgctgtttgtatggacctgttctatgcatactttgtaatggttcacatcctataattacagcaccaacatttccttcagggcaatataaaaaacacactccaagttaaaaatcattcccatctctatccattctctttggagggaacataaaagaacaa

SEQ ID NO: 880580 - DNA, 597 bp, Homo sapiens
tctcaccatctgccctctaccccagctgacccagagactccctgccagaacactgagtgtattttgatgagttaaatgaaaacaacaaccataaccaaaacaaatccaaactgcatgggtcttgggggaaagaaaaaaaaaatcagaaaaattggacacttcataattccttcctttgcacattctttttctttttaaatgagtacatttgatgtagaatgcagagttcctagagggtgttctaaaaacttaaaaacttagagttctatagtggacccgaccctttgttaaagccttcttaatgccataggaaggtttccatgatttagagtttttatgatattgatacatgccaaaaacaatttaatcacatcacaaatatgactgagtatgtctactctttcctaaggtgaaatgccacttctctgattattggcctgcwgtttgtatggacctgttctatgcatactttgtaatggttcacatcctataattacagcaccaacatttccttcagggcaatataaaaaacacactccaagttaaaaatcattcccatctctatccattctctttggagggaacataaaagaacaa

SEQ ID NO: 880581 - DNA, 650 bp, Homo sapiens
ttgataggaacaggggatgtaaaaacatccaatgacatatgtatttgacgacaatagccttgaaagagaataatccttttttgagagtctgaaggtgaaacaatgactgaaatgagtacgaaatcttttgcttagttttgttgttcttatttagagatcaataaataaattctgtttcaagtgtcaagctattttgcctgtttaaaaatagacacrcccaagggactttacccagggccctggctctaaataccaagtatacatccatgcctcccagatttttaccattatctctggcctctccacggggcttcaagttcaaatatccaacttctaattttgacatctatacctgatggtctgttggcaactcaaacttagcacggccagtacagaattctttttttcaaatatctctttgttcccttggctccatgtcacacagtcttagtacaggccatcactatataatctgttgctcaaggaaaagataataaattggctgggtgtggtggctcatgcctgtaatcccagcactttgggaggcctaggcaggtagatcacgaggtcaggagattgagaccatcctggctaacatggtgaaaccctgtctctactaaaaatacaaaaaattagccgggcttggtagc

SEQ ID NO: 880582 - DNA, 650 bp, Homo sapiens
ttgataggaacaggggatgtaaaaacatccaatgacatatgtatttgacgacaatagccttgaaagagaataatccttttttgagagtctgaaggtgaaacaatgactgaaatgagtacgaaatcttttgcttagttttgttgttcttatttagagatcaataaataaattctgtttcaagtgtcaagctattttgcctgtttaaaaatagacacgcccmagggactttacccagggccctggctctaaataccaagtatacatccatgcctcccagatttttaccattatctctggcctctccacggggcttcaagttcaaatatccaacttctaattttgacatctatacctgatggtctgttggcaactcaaacttagcacggccagtacagaattctttttttcaaatatctctttgttcccttggctccatgtcacacagtcttagtacaggccatcactatataatctgttgctcaaggaaaagataataaattggctgggtgtggtggctcatgcctgtaatcccagcactttgggaggcctaggcaggtagatcacgaggtcaggagattgagaccatcctggctaacatggtgaaaccctgtctctactaaaaatacaaaaaattagccgggcttggtagc

SEQ ID NO: 880583 - DNA, 590 bp, Homo sapiens
ccctcaaggtcagaggttccagaagaaggagcagacacccatctttgctgttctccagcctccttcagtgacatctccaggcgcgggagcaaatcaagatcagagaagaattgaaggagatagagacatgaaaaaccctccaaaaaaatagaagaatccaggagctggttttttgaaaaaactaacaaaatagatagaccgctagctagactaataaagaagaaaagacagaagaatcaaatagatgcaataaaaaatgataaaggggatatcaccactgatcccacagaaaaacaaactaccatcaaagagtactataaacattctacrtaaataaaccagaaaatctagaagaaattgataaattcctggacacatacaccctcccaaaactaaaccaggaagaagtcgaatccctgaatagacaaataacaagttctgaaattgaggcaataattaatagcctaccaaccaaaaaaagcccaggaccagaagaattcacagccgaatcctaccagaaattcaaagaggagctggtaccattccttctgaaactatttcaaacaattgaaaagaaaagattcctcctt

SEQ ID NO: 880584 - DNA, 608 bp, Homo sapiens
ttagactacactagagaaatattcttacactgtttatagtaaatggctgtttttcatttacaaaaacagtgtaagaataatgattatttgctctagtcatagaaagtccttaatatttgctttgtatagtaaacattaattcctttgtccatcattattatcttactattactcataagaaagttattttttaagtttcaaaacactactttgtgtgtttctctaaacttttttttagataaattggcaatcagatattttctatattttcacattacatataaatttcctttgaaatttttccaccagtaatggatagaatactcattatcaggaaggtaatgattgttaggagaatagagagtgaaaatatcagtgatggctgatactgctttctttctgcatgtttctcaattctagcctgccttgtctttaaacacctcccatacaaaacytgatattttatagagcacaattttgtgtcatgcattttttctttggttttgtatggtcttggtccatttaggctgctataacggaatgccacatatgaggtggcttatgaataacagaaatttgtttctcacagttctggaggctaagaagtt

SEQ ID NO: 880585 - DNA, 558 bp, Homo sapiens
acacactggggcacatggaggaggtgaacctgtggcttctgtcactccaagccctgggagcagaggagatcaaaatatcagcagagcagtcagctacttctgcagtctgacatgggtgttctcccataggggatgagatatgacactgacaggttgaaatgaacagactgagctaggtaggcctcaaacagaaccaagcttgggtccctaaraaaaggttccacagcatgggaaggggaaagagcaacgatttcacagggagcgattctgacctaaactgtccatctacttactcatcaaaatgcatattactcagacataatgaattgcagggttttcatttccttttggttttgtggggttggggggatgggattatatataaacttatgtttttgttaatactttatgatgttggcatactgtacctgtatgctcaactggccagtagatattggtcagacttagttgctaaatggggcaattgagaaataaatgagttgcctggatcctggggttatagagagatatctgcagatatctgtgaatgaagagaaa

SEQ ID NO: 880586 - DNA, 558 bp, Homo sapiens
acacactggggcacatggaggaggtgaacctgtggcttctgtcactccaagccctgggagcagaggagatcaaaatatcagcagagcagtcagctacttctgcagtctgacatgggtgttctcccataggggatgagatatgacactgacaggttgaaatgaacagactgagctaggtaggcctcaaacagaaccaagcttgggtccctaagaaaaggttccacagcatgggaaggggaaagagcaacgatttcacagggagcgattctgacctaaactgtccatctacttactcatcaaaatgcatattactcaracataatgaattgcagggttttcatttccttttggttttgtggggttggggggatgggattatatataaacttatgtttttgttaatactttatgatgttggcatactgtacctgtatgctcaactggccagtagatattggtcagacttagttgctaaatggggcaattgagaaataaatgagttgcctggatcctggggttatagagagatatctgcagatatctgtgaatgaagagaaa

SEQ ID NO: 880587 - DNA, 619 bp, Homo sapiens
gcacagaagtcaagaattgacatttgggaactccacctagatttcagaggatgtatggaaatgcccggatgtctaagcagaagttttctgcaggagtggagacttcatagaaaacctctgctagggcagtatagaaaggaaatgtgggtcagagcccccatacagagtccctactggggcactgcctagtggagctgtgagaagagggccaccatcctctgggctccagaatggtagttccaccaacagctttcaccttcctcctggaaaagctgcagacactcaatgtcagcccatgaaggaagctgggaggagggctgtaccctgyaaagccacaggagcagagatacccaaggctgtgggagcccacctcttgtatcactgtgacctggatgtgagacatggagtcaaaggagataattttggagctttaagatttgactgccccactggatttcagacttgtatgaggcctgtagccctttcatttgggccaatttctcccatttggaataggtgtgtttaccaatgcctgcacccccattgtatctaggaagtaactaacttgcttttgattgtacacgctcatagacagaagggacttgccttgtctcagatg

SEQ ID NO: 880588 - DNA, 619 bp, Homo sapiens
gcacagaagtcaagaattgacatttgggaactccacctagatttcagaggatgtatggaaatgcccggatgtctaagcagaagttttctgcaggagtggagacttcatagaaaacctctgctagggcagtatagaaaggaaatgtgggtcagagcccccatacagagtccctactggggcactgcctagtggagctgtgagaagagggccaccatcctctgggctccagaatggtagttccaccaacagctttcaccttcctcctggaaaagctgcagacactcaatgtcagcccatgaaggaagctgggaggagggctgtaccctgcaaagccacaggagcagagatacccaaggctgtgggagcccacctcttgtatcactgtgacctggatgtgagacatggagtcaaaggagatmattttggagctttaagatttgactgccccactggatttcagacttgtatgaggcctgtagccctttcatttgggccaatttctcccatttggaataggtgtgtttaccaatgcctgcacccccattgtatctaggaagtaactaacttgcttttgattgtacacgctcatagacagaagggacttgccttgtctcagatg

SEQ ID NO: 880589 - DNA, 632 bp, Homo sapiens
attttgaaatttcacccattgtaacttggtcattaacggagaatgtgtaaatgtgtagcacagatattatgtgaggtactggtggtaaggcgacataatcctcaaactaatggtttatagtaaggaagagagacacacacaaaatatgaagctatgccattaatattagaaagagtgaaaatgcacagtccattccacaaaacactactattggacaatcaaaaacacagattgtccaagagatggtgcaagatagttatttcttccagcagttgcccatcgttcccagtgagtctgtttcctttggacattgaggagcttttctttctctgatgtcacctctccttgtcctcctaaatctccctacactttattccctctttgttccaccagggttctgtgtcttcctccastacgttttggcccatgtagtttctcccgtagcaaaatgaagaatggggagaagacttaaggactctggtgaaagagatgaaggaaaagtgttcttcctagtccagcatccactaaaaataatctatttataacacaaaccaagccctttacagctgagattgattgtctctgttgcataattcctctgttatactatcaaaatgtcttttctctgcctt

SEQ ID NO: 880590 - DNA, 623 bp, Homo sapiens
cccttgaaaaccagcacaagacaaggatgctgtctctcaccactcctattcaacatagtattgtaagttctggccagggcaatcaggcaagagaaagaaatacagagtactcaaatgggaagagaggaagtcaaattatttttgtttgcagatgacatgatgctatatctagaaaactccataatctcagcccaaaagcttcttaagctgataagcaacttcagcaaagtctcaggatataaaatcaatatgcaataattactagcattcctatacaccaacaaccatcaagccaagagccaaatcatgaatgaactcccatttggaattgctacagaaagaataaagtgcctaggaatacagctaacggagaaatgaaggaccacttcaaggagaactacaaaccactgctcaaagaaatcagagaggacacaaacaaatggaaaaayatctcatgctcatggagaggaataattaatatgatgaaaatggccatactgcccaaagtaatttatagattcaatgacatacccattaaactactgttgacattcttcacagaattagaaaaaagctattttaaaattcatttgaaaacaaaaaaggacctacgaatagccaag

SEQ ID NO: 880591 - DNA, 597 bp, Homo sapiens
tttgcagagacacacagttataccactatcttgttcgtagtgttttggtgggaaaagtaagaggattataaataggactgagcatggagcaacctctttttgggtgtgatgagatcgggactaagcaaccttcaacatcctttgctggatgcccccaggggagagagccaagtagctggtttctgctccagagcccctttgtctcactctgtcacccagactgkagtgcaatagtgtgacctcggctcactgcagcctccacctcctgagttcaaacaagtctcctgcttcagcccccggtggagctgggattacaggcgtgagtcacccgccccttcatttgtctaccagtacatagccatattcaggaccaagcaagttgtgggacagggattggggttgccaatcaagctactcaggactgactcagttcaagaagtcactctaaaggcttaagagagtgctccatactgacttggctaaagattgggagtaaatccttgcctggcaattaaaacgtggatgtggaccagtgagtcatctgtgtcttgtcatctttaggagcctagcacaccagtcagagaaatctatggattt

SEQ ID NO: 880592 - DNA, 585 bp, Homo sapiens
ccttctggtgggttcgtggtctcattgacttcaggagtgaagctgcagaccttcacggtgagtgttacagtttataatggcagcacatctggagttgttcatttctcccagtgggtttgtagtcttgttgacttcaggagtgaagctgcagacyttcacagtgttactgctcttagaggtgctgtggacccaaagagtgagcagcagcaagatttattccgaagagctaaagaacaaagtttccatagagtggaaggggacctgagcgggttgccactgctggctcgggtggcctgcttttattcccttatttgtccccacccacatcctgatgattggtccattttacagtgagctgattggtccattttacagagagttgattggtccgtttacaaacctttagctagacacagtgctaattggcgtgtttacaatcctttacctagacagaaaagttctccaagtccccacctgataagctagacacagagcactgattggtgcatttacaaacctttagctagacacagagtgctgattggtgcatttacaatcctttagctagacagcaaagttctccag

SEQ ID NO: 880593 - DNA, 585 bp, Homo sapiens
ccttctggtgggttcgtggtctcattgacttcaggagtgaagctgcagaccttcacggtgagtgttacagtttataatggcagcacatctggagttgttcatttctcccagtgggtttgtagtcttgttgacttcaggagtgaagctgcagaccttcacagtgttactgctcttagaggtgctgtggacccaaagagtgagcagcagcaagatttattccgaagagctaaagaacaaagtttccatagagtggaaggggacytgagcgggttgccactgctggctcgggtggcctgcttttattcccttatttgtccccacccacatcctgatgattggtccattttacagtgagctgattggtccattttacagagagttgattggtccgtttacaaacctttagctagacacagtgctaattggcgtgtttacaatcctttacctagacagaaaagttctccaagtccccacctgataagctagacacagagcactgattggtgcatttacaaacctttagctagacacagagtgctgattggtgcatttacaatcctttagctagacagcaaagttctccag

SEQ ID NO: 880594 - DNA, 585 bp, Homo sapiens
ccttctggtgggttcgtggtctcattgacttcaggagtgaagctgcagaccttcacggtgagtgttacagtttataatggcagcacatctggagttgttcatttctcccagtgggtttgtagtcttgttgacttcaggagtgaagctgcagaccttcacagtgttactgctcttagaggtgctgtggacccaaagagtgagcagcagcaagatttattccgaagagctaaagaacaaagtttccatagagtggaaggggacctgagcgggttgccactgctggctcgggtggcctgcttttattcccttatttgtccccacccacatcytgatgattggtccattttacagtgagctgattggtccattttacagagagttgattggtccgtttacaaacctttagctagacacagtgctaattggcgtgtttacaatcctttacctagacagaaaagttctccaagtccccacctgataagctagacacagagcactgattggtgcatttacaaacctttagctagacacagagtgctgattggtgcatttacaatcctttagctagacagcaaagttctccag

SEQ ID NO: 880595 - DNA, 524 bp, Homo sapiens
tatcatagacaaacttctgaataccagatacaagaaacccttgaaagtagtaagaaagggccaggcgcggtggcacaagcctgtaatcccagcactttgggaggccaaggcaggtggatttcctaagctcaggagtttgagaccaccctgggtaacatggtgaaaccccatctstactaaaatacaaaaaattagccaggcatggtggtgcgtgcctgtactctcagcgacttgggaggctgaggcaggagaatcgcttgagcccaggaggtggaggttgcagtgagccgagatcacaccactgcactccagcttgtgctacagagtgagactccgtttcaaaaaaggaaaaacaacaaaaaaagaaaaagtagtaagaaagaaataacactttacctctaaagggagcaattcgagtgacagcatgtttctcatctgaaaacagagaggccagaaaaaactactacagtgagattccaatactgaaagaaaagaactctaaacccataattcatacccagtga

SEQ ID NO: 880596 - DNA, 646 bp, Homo sapiens
aatgcataataatcacatcatggaaaattagctatttatccctcaagcatttatcctttgggttacaaacaatccaattatattcttttagttactttaaaatgtacaatttttattgaacattttaaaattatttcccccctgttgttctatcaaatactaggtcttattcattctttctatttttttttttttttgktttactcattaaccatccccatttcaccccactcccccacagccaccccttttcaccttcacactacccatcacagcctctggtaaccatccttctactctctatgtccatgacttcaattgtcttaatttttagatcccacaaataagtgacaacacgtgatgtttgtctttctgtatctggctaatttagcttaacataatgaactccagttccatccatgctgtgcaaatgacagaatctcattctttttatggctgaatagtactctattgtgtatatgtaccacatgttctttatccatccatctgttgatggacacttaggtgactttcaaatcttggctattgtgaaccgggctgcagcaaacatggaagtgcatggtatactgatttcctttctttgaggtatatacccaacagtagcattgctggattgtatggtagc

SEQ ID NO: 880597 - DNA, 519 bp, Homo sapiens
caaaaaagggcttgtgccattcaaggaactggaagaagttaaatttgatcagagcatcctctgattgctctaaatcacatcaatttcctaataaatgccagccgacagaccccatcatctaatgagaaaaaaagaagacagggattcaggccagaagtttatttcatgaatgagaatatgcttttccctggagtggcctctgtgtgaatagcatgcaggagcaaggaaagaaatgacttcatactcaagaagcacatgacaattcccatcaagtycctgttaaggggatgaaaataaagttaaattcctgacaccacatcttactccatctatcattattttagccatcacactggcccaactactcttctccttttaactccagaattaatgagatttaaaagttattcttttatgtaatgtatataccaggggtcctaactgatatattccacttaagcccaaagaaagctaactgttggcattctctagccttccaatatgaacttatctttatct

SEQ ID NO: 880598 - DNA, 641 bp, Homo sapiens
ggttatgtggtgtggtatgaaacctttttatttttttgcccaagctggagtgcagtggcacgatctcggctcactacaacctccgcctcctggattcaagcaattctcctgcctcagcctcctgagtagctgggattacagctgcctgccaccatgtccgactaatttttgtatttttagtagagatagggtttcaccatgttggctaaactgttcttgaactcctggcctcaagtgctcaatccacctcagcctcccaaagtgctgggattacaggcatgagtcaccgcgcctggccttgaaacttttgtctgagatacatacatacacacatacacacacacacacacacacacacacacacacacasacagagatgaatataaatagagagaagtgggtcagtcaaaacaaaaagtctggaaaatatattttagcagttgaccgtattcaagaaataaaacagtaagtgtgagatctcagagtcaaaaagagaaatcaaaaaaaaaaagctgaagtcactttaaagcatcattgtaagcaatggaactaaacaccagaaaaagtatatttgaccctggtatctactttggtaagtcaagtaataagcttccctcctccatccacctctcagggttcag

SEQ ID NO: 880599 - DNA, 641 bp, Homo sapiens
ggttatgtggtgtggtatgaaacctttttatttttttgcccaagctggagtgcagtggcacgatctcggctcactacaacctccgcctcctggattcaagcaattctcctgcctcagcctcctgagtagctgggattacagctgcctgccaccatgtccgactaatttttgtatttttagtagagatagggtttcaccatgttggctaaactgttcttgaactcctggcctcaagtgctcaatccacctcagcctcccaaagtgctgggattacaggcatgagtcaccgcgcctggccttgaaacttttgtctgagatacatacatacacacatacacacacacacacacacacacacacacacacacacasagagatgaatataaatagagagaagtgggtcagtcaaaacaaaaagtctggaaaatatattttagcagttgaccgtattcaagaaataaaacagtaagtgtgagatctcagagtcaaaaagagaaatcaaaaaaaaaaagctgaagtcactttaaagcatcattgtaagcaatggaactaaacaccagaaaaagtatatttgaccctggtatctactttggtaagtcaagtaataagcttccctcctccatccacctctcagggttcag

SEQ ID NO: 880600 - DNA, 659 bp, Homo sapiens
gtggtggctcacgcctgtaatccctgcactttgggaaaccgagggggggccaatcacctgaggtcaggagttcgagatcagcctggccaacatggtgaaaccctgtctctattaaaaatacaaaaattggctggacrcagtggctcacacctgtaatcccagcactttggggggttgaggcaggtggatcatgaggtcaagagttagagaccagcctggccaacatagtgaaaccctgtctctattagaaatacaaaaatttgccaggcatggtggcacacacctgtagtcccggctactcgggaggctgaggcaggagaatcacttgaacccaggagatggaggttgtggtgagctgagatcgcgcccctgcactccagcctagcgatagagagagacttcgtctcaaaaaaaaaaaaagaaagaaagaaaaaaaaaattagccaggtgttcaggcacctgtaatcccagctactagggaggctgagacaggagaagcgcttgaacctggaggtggaagttgcagtgagccaagattgcgccattgcactccagctgagcagcaagagtgagactctgtcaaggaaagggaaagggaaagggaaaaggaaaagaaatcgctaactaggccgggcgcggtggctcacatttgtaatccc

SEQ ID NO: 880601 - DNA, 545 bp, Homo sapiens
ttccctgctagactgtaaggaatatgcaggttgggtccatatattctcagaaatcagtatagtacctatttattgaaataacaaatatttcttgagatgattggaactgatttatattttggtccccagattttcattgaaaggtattgttaggtcaccttcaagaaaaacagaattaaatggtatatatttttatcccatatagttattacacaattcatactgagaataattgggaggttctcttcctggctatctytaaaaaaatttagcagcaaaccagtatagataaaacatcattcacttccttggaagtgggacccattgatctcttcagttcactttgaggttcttcaaagagtaaactgttcacagtactcatgctgggaaacaaagtgtcactgatttatgtgctgagcagtgttccataaggcagtgggacattttagggcaggaagccaggagtgagggagccaaggaaaacttggaaacacaaattagaggcatataagaaatatgctgattatgggaagtttccagaagtt

SEQ ID NO: 880602 - DNA, 539 bp, Homo sapiens
gcaatatgctgccagtctctttgctaaagcataacaagagtcatcttttctccagtttccaacaagttccttatctccatctgaaaccacctcagcctggacttcatcttccatgtcactatcagcattttggtcaaagtcattcaacaagtctctaggaagttccaactttcccacatcctcctgtcttctgagctttttaagtcactaggaagtttcaaacttttgcacatcctcctgttttctcctggaccctccaaactgttccaatctctaccttttacccagttccaaagttgctttcacattttcatatatccttccttatagcagcaccctattcctttggtaccaatktacagtattatttcattctcatgctcatatgaaaaaatgcccaagactgggtaatttataaaggaaagaggtttaactgactaacagttccacatggttttggaggcctcgggaaacttacaatcatggcagacggcacctcttcatagggtggcaggagagagaataagtgttaagtgaag

SEQ ID NO: 880603 - DNA, 622 bp, Homo sapiens
tttatgatgaaaaaaaaactcaacaaattaggaatagaaggaaactatctcaacccactaaatgccagatatgagaagcccacagcaaacaaagctgtgttatatatgtatttatatatgtatatatacatgtgtgtatatatatgtgtgcatatatatgtatatatgtatatatacgtatatatatacacacacacacacatattttatayatatataattcagccttaggaaaaaaggaaattctgacatatgctgcaacatgaatgaagtttgtggacatgatgctaactgaaataagccagtcacaaaaaagacaagtactagacaatcccctttagaggaggtacttcaagattacagagactcaaagtagaatggtagtttttacgggctggtggcagaagggaattgggctttattagttaatgggtataaagttccagctttggcaagataaaaagagttatagaaactgatggtgatgatagttgtacattatgaatgtatttaataccagtgaactgtacacttaaaattatcaatatggtacattttgttatgcatatgttatcagaataataaagaaaaagtggctggtctcttccctaaagaagtacac

SEQ ID NO: 880604 - DNA, 555 bp, Homo sapiens
tctctttcaagaaaccatctaagttattctgttttgcacactacattttgagaaccactgcattacaccatgcagcctaacaaagggtgatctagactaggaaacttctataaagattaactcaaagaactaagtaccttcctaaactccaaggaaattatatttggaattactgttaggtaggaactggctttcttccagcttcttttaatcacgggagatgaatgcatgaatctttattgtgatatctgtgaggataatttttccatatgtgttggacattgtaggatattaaagcarcattatggggaatgtctaactacaaacatacaaaagacgaatttgaaaacagagaagaaagagaagactatcaccaaatccttaaattgtaggcttgatttttccagtgcctgttatgaagctggacctgctttccctttcattacctgggtggaataaggaaatgcaaggtaattgaattattaaattaagcaaaacataataaggtaacttagctgtgccacaaatatataatgcattcattaattcaatgta

SEQ ID NO: 880605 - DNA, 604 bp, Homo sapiens
ggactttattttgtgatcgtgtgagtcaatcctccttaataaactccctttcatatatacatatatcctgttagttctgtccctctagagagccctaatacagtaagagattacatgggatgaatcagaaaatcataaaacatggaaagggtccttaggcaaaaatatttgtttctttctctcctgttcaaggcctagctctgygtgtgtgtgtaacatacacacacatacacgttaaacaccagttaaacatgcatcattccctacagtcctcttttttcctcttcatcagtttcaattccattattatttaaagcaattggtattatatatttctgtcttactccttggccaaatctcaatatagtttatccaaactatctgtcttttctgaacctacaggagagaagctggagtttgaaggagaaaaaccacacagctagttatgttttaaatacgtgactgcaaattgaaaattcgctattgttggaaatctatcactttcccctggtgatttttgataccacactttgtaaaaaatatacatatgaaggcatcttctgtcatctcatagcttctagacacctctcaacaccttggtgaa

SEQ ID NO: 880606 - DNA, 594 bp, Homo sapiens
cgcaaggactgcaatttgtgggcaaggcctagtgctatgctgggcttgaagccagtgggcttggagtgaacacaagctagtgagacatcatcaccaagcacagtcctgaagtttccattccaggatctagctcccagacatttctagacacatccaggaccagaagggaagcctctgccttgaaggaaagggacccattccwggcagaatttaccacctgctgaatcaagagcccttgagccctgaataatcagcagtgctagccaggcaatactttccatgggccttgggtgagactaacagctgtactgactgcaagtattatgagtccattatcacactgctatgaaaaataacctgatactgggtgatttacaaagaaaagaggtttaattgactcacagttccacatggctggggaaacctcaggaaacttacaatcatggcataaagtgacaggaaagcaagtcacatcttgccattgtggagcagaagagagaaagagagagagagagagaatgaatggggaagttccacacttttaaaccatcagatctcatgagaactcccttactatcatgagaacagaaaaga

SEQ ID NO: 880607 - DNA, 594 bp, Homo sapiens
cgcaaggactgcaatttgtgggcaaggcctagtgctatgctgggcttgaagccagtgggcttggagtgaacacaagctagtgagacatcatcaccaagcacagtcctgaagtttccattccaggatctagctcccagacatttctagacacatccaggaccagaagggaagcctctgccttgaaggaaagggacccattcctggcagaatttaccacctgctgaatcaagagcscttgagccctgaataatcagcagtgctagccaggcaatactttccatgggccttgggtgagactaacagctgtactgactgcaagtattatgagtccattatcacactgctatgaaaaataacctgatactgggtgatttacaaagaaaagaggtttaattgactcacagttccacatggctggggaaacctcaggaaacttacaatcatggcataaagtgacaggaaagcaagtcacatcttgccattgtggagcagaagagagaaagagagagagagagagaatgaatggggaagttccacacttttaaaccatcagatctcatgagaactcccttactatcatgagaacagaaaaga

SEQ ID NO: 880608 - DNA, 587 bp, Homo sapiens
tttatacaatgaccaaaaatttaccaccattttttttttttttaagaaatatgtgttggccaggcatggtggctcatgcctgtaatcccagcactttgggaggccaaggcagtcgcattacctgagttcaggagttcgagaccagcatggccaacatggtgaaaccccctctactaaaaatacaaaaattagccaagcgtggtggcacatgtctgtaatcccagctactcgggaggctgaggcaggagaattgcttgagcccaggaggcggaggttgcagtgagctgagatcatgtcactgtactccagcctggccgacagastgggactgtgtctcagaaaaaaaaaaaagaaaaaaaagcaaaggaaagaaatatgtgtcaactgtatttaatcgtaatctatgtgccctggagaagtgaataaagggcattttctcaagctctgcctaacctcaaaaactcagaaaaatttcagaaagtgttataaagttttataaaaatctgaacatgatctgaaacatcattacattatatatttactatttggttatagtgcaaaaaaagaatgtaatgagaggttattcc

SEQ ID NO: 880609 - DNA, 587 bp, Homo sapiens
tttatacaatgaccaaaaatttaccaccattttttttttttttaagaaatatgtgttggccaggcatggtggctcatgcctgtaatcccagcactttgggaggccaaggcagtcgcattacctgagttcaggagttcgagaccagcatggccaacatggtgaaaccccctctactaaaaatacaaaaattagccaagcgtggtggcacatgtctgtaatcccagctactcgggaggctgaggcaggagaattgcttgagcccaggaggcggaggttgcagtgagctgagatcatgtcactgtactccagcctggccgacagagtgggactgtgtctcagaaaaaaaaaaaagaaaaaaaagcaaaggaaagaaatatgtgtcaactgtrtttaatcgtaatctatgtgccctggagaagtgaataaagggcattttctcaagctctgcctaacctcaaaaactcagaaaaatttcagaaagtgttataaagttttataaaaatctgaacatgatctgaaacatcattacattatatatttactatttggttatagtgcaaaaaaagaatgtaatgagaggttattcc

SEQ ID NO: 880610 - DNA, 620 bp, Homo sapiens
gctagcagtattgcttactactgagaatctgcatgttcagctttgctggcttttgtcaatatagtggtagttatataggctgttggctgtctcttttctagatttctgtttctttgggctttgcaagcatcataaactttctttacttttaaaaccttcttttcaagtaattggcaattttggagtaagttaaagtttttgaattcaggctgggtgcggtggctcaagcctgtaatcccagcactttgggaggccgaggcgggtgaatcacaaggtcaggagatcgtagccatcctggctaacatggtgaaaccccgtctctactaaaaatmcaaaaaaaaaaaaaaaaaaaaaaaaaaaaattagccgagcgtggtagcgggtgcctgtagtcccagctactcgggaggctgaggcaggagaatggcgtgaacccaggaggtggagcttgcagtgagccgagatcgcgccactgcactccagcctggcgacagagcaagactccgtctcaaataaataaataaataaataaataaaataaaaaaagttttttttaattcaaaaggagtgtcgatacaccactatcattgccaccacatttctatataaatttatgacag

SEQ ID NO: 880611 - DNA, 680 bp, Homo sapiens
agcttaggaactgaatatgttggataacgctaaaaataagactagtgtgttggactatatgagttcatggaatatatccgaatttaaacatgaagaggaaagaaaaagggtgaacagtacacaaagattgtaaggtcttgtaaggtctaccataarcacaactttattccagaaggagaagagataaataatagggcaaaagcaatttttgaggagacaacgggcctaaaatttcacaactgataaaatacactaatctacagatataggaagttctaagaactccaagcaatataaatataaagaaaattcatttagctacattataacataaatgaccaaggagaataaggagagtaaacaatatgtttttaaatcttaaaaatattgcaagaaacaagacatattacagccaaaggggcagcaacaagactgaaagcttactttgcaagagaaatgatgaaaaccaaaagatattaagttgatgcttttaattgctgggggaaaacaaaaacaaatactaccagcctcacattcttcagctatcaaaaatattctttaaaagtgaaagcaatttgaaaacattccaatgcaaacataaactgagaaaatatgttgtcagctagacccacactgaagacaaatcacagtaaagagaagtctttggatgggaagaaaat

SEQ ID NO: 880612 - DNA, 680 bp, Homo sapiens
agcttaggaactgaatatgttggataacgctaaaaataagactagtgtgttggactatatgagttcatggaatatatccgaatttaaacatgaagaggaaagaaaaagggtgaacagtacacaaagattgtaaggtcttgtaaggtctaccataagcacaactttattccagaaggagaagagataaataatagggcaaaagcaatttttgaggagacaacgggcctaaaatttcacaactgataaaatayactaatctacagatataggaagttctaagaactccaagcaatataaatataaagaaaattcatttagctacattataacataaatgaccaaggagaataaggagagtaaacaatatgtttttaaatcttaaaaatattgcaagaaacaagacatattacagccaaaggggcagcaacaagactgaaagcttactttgcaagagaaatgatgaaaaccaaaagatattaagttgatgcttttaattgctgggggaaaacaaaaacaaatactaccagcctcacattcttcagctatcaaaaatattctttaaaagtgaaagcaatttgaaaacattccaatgcaaacataaactgagaaaatatgttgtcagctagacccacactgaagacaaatcacagtaaagagaagtctttggatgggaagaaaat

SEQ ID NO: 880613 - DNA, 635 bp, Homo sapiens
tgttgtgaacagtgctgcaataaacatatgtatgcatgtgtcttcatagtagaatgatttataatcatttgggtatatactcagtaatgggattgctaggtcaaatggtacttctggttctagatccttgaggaatcaccacactgtcttccacaatggttgaactaatttacattctcatcaacagtgtaaaagcattgctatttctctgctttgtctccaacatctgttgtttcctgactttttaatgatcgccattctaagtggtgtgagattgtatgtcaytgtggttttgatattcatttctctaatgaccagtgatgatgagctttttttcatatgtttgttggctgcataaatgtattcttttgagaaatgtctgttcatatcctttgcccaccttttgatggtgttgtttgattttttcttgtaaatttgtttaagttccttgcaggttctggatattagccctttgtcagatggatagattgcaaaaattttctcccattctgtaggttgcctatttactctgatgatagtttcttttgctaagcagaagttctttagtttaattaggtcccatttgtcaattctggcttttgttgcaattgcttttggtgttttagacatgaagt

SEQ ID NO: 880614 - DNA, 639 bp, Homo sapiens
gcattgaatctataaataaccttgggcagtatggccatcttcacgatattgattcttcctacccatgagcatggaatgctcttccatttgtttgtatcctcttttatttcattgagcagtggtttgtagttctccctgaagaggtccttcaagtcccttgtaagctggattcctaggtattttattctctttgaagcaattgtgaatgggagttcactcatgatttggctctctgtttgtctgttattggtgtataagaatgcttgtgatttttgtacattgattttgtatcctgagactttgctgaagttgattatcagcttaaggagattttgggctgagacaatggggttttctggatatacaatcatgtcatctgcaaacagagacaatttgacttcctcttttcctaattgaataccckttatttccttctcctgcctaattgccctggccagaacttccaacactatgctcctgaatgactactgggtacataacgaaatgaaggcagaaataaagatgttctttgaaaccaacaagaacaaagacacaacataccagaatctctgggacacattcaaagcagtgtgtagagggaaatttatagcactaaatgcccacaagagaaagcaggaa

SEQ ID NO: 880615 - DNA, 585 bp, Homo sapiens
atctcctcatccatgacatctgatcctacttatcttctgttcacacattcctggcctgtctttatagtacttgtcaggaagatgacaagtaagtcaacttccatggctcctaacagtgattctgctccaaaacttcagttctgaggtttggggtggcatacytgaagctgtgttctggaatatattctctagaagcctatcaaggaaattagaaacagacttaaaaactgagatgggtttacaacccagctgtgattcaccatatccatttgtcttttgctattctcctcttatattgctgctagaagttcccttttattgccatcattttttgatatatatctgtgcttgtgttaatcatgaaggaaaagttaagacgtccataaattctaaatacattcccttcattagttgtctcactacttctgcttaaaagaaaaataacttcaagagaattgtccaacattgttaaagaacatttagtcaacattatatttattaagaatgttatatgtacctcataaagatgtacaaacattaatattttgtaccaataaaacatttttaattgaaaaatggctttgg

SEQ ID NO: 880616 - DNA, 585 bp, Homo sapiens
atctcctcatccatgacatctgatcctacttatcttctgttcacacattcctggcctgtctttatagtacttgtcaggaagatgacaagtaagtcaacttccatggctcctaacagtgattctgctccaaaacttcagttctgaggtttggggtggcatacctgaagctgtgttctggaatatattctctagaagcctatcaaggaaattagaaacagacttaaaaactgagatgggtttacaacccagctgtgattcaccatatccatttgtcttttgctattctcctcttatattgctgctagaagttcccttttattgccatcattttttgatatatatctgtgcttgtgttaatcatgaaggaaaagttaagacgtccataaattctaaatacattccyttcattagttgtctcactacttctgcttaaaagaaaaataacttcaagagaattgtccaacattgttaaagaacatttagtcaacattatatttattaagaatgttatatgtacctcataaagatgtacaaacattaatattttgtaccaataaaacatttttaattgaaaaatggctttgg

SEQ ID NO: 880617 - DNA, 581 bp, Homo sapiens
ccaggacacaccagcacagcccaaggagatggcagaaagtgacctgaaattccctcctggtgatgccaccaacacatctgagcacgcacaggcactcttggacttgggggtgctatctctgttgctgctagccacccatcctccccatccttatgcaccccccacccacctgcccagtgccagctggataccctgcctgttctcacctggcagccttctctggctacctgaaactcctttgctgcgtaggcagaagccaaaagtaccaaagaattcacggcctctgggaacagcccttggatgtgttcctttcaccttcataacagccctgagacacaggtactatcagtatcatcctgctgtacagatgaataaggtggggcacagagagatgggatcactggcccacagtcccacagcttgtggctggcrgagccaagattccagctaggccacctgtcaccaagtggcactcatagctgttcatgcctcctcatagttgtacccagctatgcccagcatgtgtgctcatgctattcacctgccctgacgttgggctgcttccagccatctccatgggc

SEQ ID NO: 880618 - DNA, 643 bp, Homo sapiens
atgggtggaattagagaacattatcttttttcttttttgagacagagtcttgctctgtcacccaggctggagtgcagtggtgtgatcacagcttactgcagtcttaacctcctgagctcaattgatcctcccacctcagcctcctgagtagctgggactacaggcacatgatattacatctggctaatttttgcatttcttttgtagagatgaggttttgccatgttgcccaggttgatcataaacttttgggctcaagtgatctgcccattttggccgcccaaatggctgtgatttacaggtgtgagccattgtgcccagctgagaaaattatcttaagtgaaataaccaaggcacaagaagacaaatattgcagtcctctcttatacatgtgagctaaaaacttggatcacatggaggtagagtgtggaaaaacataacagagacgggaagggtgagtaggtatgagaggggaaggtgaagagaaatggrttaaaaggtataagcatacattaagatagaaagaataaattcaatgtttcaaagcatagaacggcgattaataaaaatttattgtacttgggaaatgggtaccctaaatacctcacttgatcactatgcattatatatgcattatatatgt

SEQ ID NO: 880619 - DNA, 620 bp, Homo sapiens
gaaggcttaaaactggcttgatggtatcataggcggaggttatggagaaaacctgatattacatatgttcctgtagggcaccttgatctttttttttattattatactttaagttttagggtacatgtgcacattgtgcaggttagttacatatgtatacatgtgccatgctggtgcgctgcacccactaactcgtcatctagccttaggtatatctcccaatgctatccctccccactccccccacgccaccacagtccccagagtgtgatattccccttcatgtgtccatgtgatctcattgttcaattcccacctatgagtgagaatatgcggtgtttggttttttgttcttgcgatagtttactgagaacgatgatttccaatttcatccatgtccctacaaaggacatctaaaggccccttatatgatattctctctatctaaaatatcttctgccccagtaasaaacattagcaggtcattaccgtacaccagtatgaagtaacaagagccggaatgagaatgatgacagcagtcagaaagatcatggttcctttgatgaaatacgctgatgatgcagagactgtgtaagtattagagatgatttaaaagtaag

SEQ ID NO: 880620 - DNA, 608 bp, Homo sapiens
  misc_feature 249: n = A,T,C or G
gtgaaaatgacaggtagagttcaggaacaactataattctggcgggcagccatcaccatggttgcatggtatcagtgtaaacattataggcagacaaaaaccaggagcaaataatgattgggcagcaggatgataggtaggtaggtaggtggatggatagatggatacatggatggacacacacacacacacacacayacacacacacacacacacacacacacacacagtcctggatttgacagatantccgtattactcaagcctctctgggagggtttgtttctttggttttgtttatttgtttgagacaaagtcttgctcttgtcgcccaggctggacgtgcagtgctgcaatcttggctcactgcaacctctgcctcccaagttcaagggattctcctgcctcagactcccgagtagctgggattacaggcgcccaccaccaggcccagctaatttttgtatttttagtagagacggggtttcaccttgttggccagactggtctcaaactcctgacctcaggtgatccacccacctcggcctcccaaagtgccgggattacaggcgtgcggatgctcccggctggaagggtctttaaagcaa

SEQ ID NO: 880621 - DNA, 590 bp, Homo sapiens
ttttgaggcttatggtgatagcaacagtaacaagcacacacatttattaggtacttactctttgagttcccaacatggtactaagtgctttacttgcattctctcatctaatcctttagacaacactatctgggttgtgatcataataacattattattattattattttttagatggagtctcgctctgttgcccaggctggagtgcagtggcccgatcttggctcactgcaagctccgcctcccaggttcacaccattctcctgcctcagcctcccaagtagctgggactacaggtgcccaccaccacggccagctaatttttttgtattttcggtagagacggggtttcaccgtgttagccaggatggtctcgatctcctgaccttgtgatcygcctgcctcagcctcccaaagtgctgggattacagacatgagccaccgcgcggccagtaacattatttttataacaagaaacattgttgagcacctaatatgtgccagccaccatatatgttaatgtttaaaatagatgtagtctctgccatcctggaattttatgtccagtggggaacacagactataaacaa

SEQ ID NO: 880622 - DNA, 610 bp, Homo sapiens
ttctgaacaaagtgactatttctgattaggttcccaattaggataactgggagcctatacctgtgcacggcattagacgttttacatgaacctgcttggaaatttctatcaattagagtctgaatctcacctttaaacagcacatcatggagaaaagacttttattagagtgtattttaaaaacagacctttattattgggattaaagccatttaaaactgtgcaaagtatttcgtacaagttgaacaaaatttttggcacagttctcaatctcaacagcttagaaatgcacataggccgtgccgcataggactcgagggcaacttctcatagtcatacactaatttctctccatgcttgtctctgttgagtcctgctttctccatggagctcctctgatacagtcagaaatgaagtagcataaaggatttgcactagttacatctyaagctcaatcctttcctggaacctaaggctgcctaagcaaataccacttgttaccacagtttctgtggtaccagactgttccataaggtggttgaagtctgcaggttttagatacaacggtggttagtgcaagttgggtaaatatgctgtttaaatataggca

SEQ ID NO: 880623 - DNA, 582 bp, Homo sapiens
ttccttgaaatgatcaaactagatataatagttttgcattatttatagaagtattaattgtattttttcttctttactgctaaacttttaaaaagaattattttcccaagctactcccttgatttcttgcaatttgcattctacattattctccttgaacaccattctttcagaagactccaatgacatccttactttctcattttacaaaatctctgtcaccaggcttgagtgcagtggcatgatctcagctcactgcaacctccgcctccctggttcaagcaattctcctgcttcagcctcccaagtagctaggactacaggtgcccgccaccaagcgagctaatttttgtatttttactrgagtcagtgtttcaccatgttggccaggatagtctcgatctcttgacctcgtgatccacccacctcggcatcccaaagtgctgggattacaggcgtgagccaccgcactcggcctgcagtttaaaaaaaaaaaaaaaaaaatggcttcttcttaaaattttctcatattttggattcagaaagaattcattttccaagttctcctggagttcccaccac

SEQ ID NO: 880624 - DNA, 666 bp, Homo sapiens
agaagtaattttggaggtacattaccaagactaaatttatattttataaaatgaacaaatttaaggtgtataccttaactttatatatttatgcactcatattcacaccacccatattaagataaagaacagaaactcttctggtgctttattccrcagaaaaccttctggtgctttattccagtcaataacaaacactggtcaaaggatattctactatgaccatagttttcttttgcctctcgctaaacttagtttgtctggagtcatacagattttaagcttttgtgtctgacctattttactcaacatgatgttttggagatacatccatgctgatttatgtgtctattttattttttattgctatgtattattactctgtaagtcaatatcataatttgtttatctcttctcctctttatagatgttacatccagtttttgcctacaaagaaaaacaaactgctatgaataaatttatatctgtctctatcgtgtgaatacacaccctcatttatttttggaatatacctattaattgaattatgatgtcattgggtatgtgcgcagtttaactttataagaaatagccaaacttatttaaaatgtagctatacaatttactttcccaccacaaatgtatgagattttctttgtttcataa

SEQ ID NO: 880625 - DNA, 659 bp, Homo sapiens
gcaaaactgtgagtcaattaaacctctttcctttataattacccagtctcaggtagtattctttatatcagtgtgagaatggactaatatacatcccaatattgactttaaattatactataggtgacagtaacaaaaacactatggtactgggaccaaaaaaatagacataggtccatgcaacataatagacaatccagatacaaaagccacatacctacagccatctgatctttgacaaagttgacaaaaattagcaatggggaaaaaactccctattcartatgataactggtgctggaatagctggctagccatatgcagaaaaaggaaactaggctctgacatttcttcatacacacaaattagctcaggatggtttaaagatttaaatgtaaaacctcaaattataagaatcctagaaaacctaggaaacacccttctggacattgtccttgggaaaaaaaatttatgcctaagtcctcagaagcaattgcaaccaaaccaaaattgacaagtgggacctaatgaaactaaagagtttctgcacagcaaaagaaaccatcaacagagaaaacagacaacttacagaatgggagaaaatatttataaagtctgcatccaacaaaggtcaaattcctaatgtccgtaatgaactt

SEQ ID NO: 880626 - DNA, 636 bp, Homo sapiens
ttcactatcacgagaacagcatgggaaaggcccaccccataattcaattagctcccattgggtccctcccacaacacatggaaattcaagatgagatttgggtgaggacacagccaaatcatatcattccacccagcccctcccaaacatcatgtcctcatatttcagaaccaatcatgccttcgcaatagtcccccaaagtctttacttatttcagcattaacccacaatccaaagtctcatttgagacaagtcccttctgcccatgagcctgtaaaattaaaagcaagttagttacttcctagatacaatgggggctcagttattgggtaaatatagctgttccaaatgggagaaattggccaaaacaaagggtccacagcccccatgcaagtccaaaatccagcaggccagtcaaatcttaackctccaaaatgatctcctttgactccatgtctcacatctgggtcacattgatgcaagaggtgggttcccatggtcttgggaagctctgcccctgtggctttgcagggtatagacttcttcccagctgctttcatgggctggcattgagtgtctgtggcttttccaggtgcatggtgcaagctgtcagtggatctaccattctggggtctg

SEQ ID NO: 880627 - DNA, 609 bp, Homo sapiens
aaggggtattaaacaaaatggacaaaagagggacctattccacgcacatattctatctgccacctgacagctttgcatccataacctaatgagaaggggctgctagtcaacaccaaaccaatactctaccttggacatgctggtccatgaaaggacttcagtgtacttaaatgtcttccggaataaaagtagattgaatggatgaatgtattggtctatgtgtaagtgttctcagtttgactgtttaaaaaaaaattgcagtttattagaatagattaagttcttcttagctaattctttaactgttttactatgtgctaaattttaaagagaacttcttcaagtattcattaacaataattataatatctggacaatatttttgtattagtctcasttttctgtatttttttaattgagccaaatgactcatattgccattcctagaccctttgatttgtattcatccaataagtagatatcttcatagcattgataagcaacctgattttgatttggatgagcctcctcctgctcaagatgctgtgtttgccattgtaaagttaaaacagttataaaatacagttcttgcattcaaagaacttataa

SEQ ID NO: 880628 - DNA, 608 bp, Homo sapiens
cacactttctttatccagtctgccattgatgggcattttggttgattccatgtctttgctattgtgaatagtgctgcaatgaacatacatgtgcatgtattttatgatagaacaatttatattcctttgggtatatacccagtaatgagattgttagattaaatgatatttctatttttaggtctttgaagaattgccacactgtcttccacaatggttgaactaatttacacttcaaccaatagkgtataagaatttcttttttatccacaacctcataagcatctgttattttttgactttttagtagaagccattctgactgctgtgagatggtatctcattgcggtattgatttgtactgttttaaagattgtgatattgaactttttttcatatgcttgttggccacatgtatgtcttcctttggaaagtgtctgttcatgtcctttgcccactttttaatgggattgtttgctttttttttgtaaatttgtttaagttctttaaagatgctggatattagaccctggtcacatgtataatttgaaaaaatttcctcccattctgtaggttgtctgtttactctgttgatagtttattttgct

SEQ ID NO: 880629 - DNA, 608 bp, Homo sapiens
cacactttctttatccagtctgccattgatgggcattttggttgattccatgtctttgctattgtgaatagtgctgcaatgaacatacatgtgcatgtattttatgatagaacaatttatattcctttgggtatatacccagtaatgagattgttagattaaatgatatttctatttttaggtctttgaagaattgccacactgtcttccacaatggttgaactaatttacacttcaaccaatagtgtataagaatttcttttttatccacaacctcataagcatctgttattttttgactttttagtagaagccattctgactgctgtgagatggtatctcattgcggtattgatttgtactgttttaaagattgtgatattgaactttttttcatatgcttgttggccacatgtatgtcttcctttggaaagtgtctgttcatgtcctttgcccactttttaatgggaytgtttgctttttttttgtaaatttgtttaagttctttaaagatgctggatattagaccctggtcacatgtataatttgaaaaaatttcctcccattctgtaggttgtctgtttactctgttgatagtttattttgct

SEQ ID NO: 880630 - DNA, 626 bp, Homo sapiens
ttgattcttcctatccatgaacatagaatgtttttccatttgtgtcctctcttatttccttgagcagtagttcgtagttctccttgaagaggtccttcacatcccttgtaagttgtattcctaggtattttattctctttgtrgcaattgtgaatgggagttcactcatgatttggctgtttgtctgttactggtacataggaatgcttgtgatttttgcacgttggttttgtatcctgagactttgctgaagttgctgtatcagcttaaggagattttgggttgagacaatggggttttataaatatacaatcatgtcatccacaaacagagacaatttgacttcctttcttcccatttgaatacgctttatttctctctcttgcctgatttccctgaccagaactgccaatactatgttgaataggagtgggcatccttgtcttgtgccggttttcaaagggatgcttccagtttttgcccattcaggatgatattggctatgggtttatcataaatagcccttattattttgaggtacattccatcaatacctagtttcttgagagtttttagcatgaagcgctgttgaattttatcaaaggccttttctgcatccatagaga

SEQ ID NO: 880631 - DNA, 600 bp, Homo sapiens
tgctgtatcagcttaaggagattttgggttgagacaatggggttttataaatatacaatcatgtcatccacaaacagagacaatttgacttcctttcttcccatttgaataygctttatttctctctcttgcctgatttccctgaccagaactgccaatactatgttgaataggagtgggcatccttgtcttgtgccggttttcaaagggatgcttccagtttttgcccattcaggatgatattggctatgggtttatcataaatagcccttattattttgaggtacattccatcaatacctagtttcttgagagtttttagcatgaagcgctgttgaattttatcaaaggccttttctgcatccatagagataatcgtgtggtttttgtcattggttctgtttatgtgatggattacatttattgatttgtgtatgttgaaccagccttgcatcccagggatgaagccaacttgatcgtggtggataagctttttgatgtgctgctggattcggtttgccagtattttattgaggatttttgcattgttgttcatcagggacattggcctgaaattttcttttttcgttgtgtctctgc

SEQ ID NO: 880632 - DNA, 600 bp, Homo sapiens
tgctgtatcagcttaaggagattttgggttgagacaatggggttttataaatatacaatcatgtcatccacaaacagagacaatttgacttcctttcttcccatttgaatacgctttatttctctctcttgcctgattkccctgaccagaactgccaatactatgttgaataggagtgggcatccttgtcttgtgccggttttcaaagggatgcttccagtttttgcccattcaggatgatattggctatgggtttatcataaatagcccttattattttgaggtacattccatcaatacctagtttcttgagagtttttagcatgaagcgctgttgaattttatcaaaggccttttctgcatccatagagataatcgtgtggtttttgtcattggttctgtttatgtgatggattacatttattgatttgtgtatgttgaaccagccttgcatcccagggatgaagccaacttgatcgtggtggataagctttttgatgtgctgctggattcggtttgccagtattttattgaggatttttgcattgttgttcatcagggacattggcctgaaattttcttttttcgttgtgtctctgc

SEQ ID NO: 880633 - DNA, 600 bp, Homo sapiens
tgctgtatcagcttaaggagattttgggttgagacaatggggttttataaatatacaatcatgtcatccacaaacagagacaatttgacttcctttcttcccatttgaatacgctttatttctctctcttgcctgatttccctgaccagaactgccaatactatgttgaataggagtgggcatccttgtcttgtgccrgttttcaaagggatgcttccagtttttgcccattcaggatgatattggctatgggtttatcataaatagcccttattattttgaggtacattccatcaatacctagtttcttgagagtttttagcatgaagcgctgttgaattttatcaaaggccttttctgcatccatagagataatcgtgtggtttttgtcattggttctgtttatgtgatggattacatttattgatttgtgtatgttgaaccagccttgcatcccagggatgaagccaacttgatcgtggtggataagctttttgatgtgctgctggattcggtttgccagtattttattgaggatttttgcattgttgttcatcagggacattggcctgaaattttcttttttcgttgtgtctctgc

SEQ ID NO: 880634 - DNA, 600 bp, Homo sapiens
tgctgtatcagcttaaggagattttgggttgagacaatggggttttataaatatacaatcatgtcatccacaaacagagacaatttgacttcctttcttcccatttgaatacgctttatttctctctcttgcctgatttccctgaccagaactgccaatactatgttgaataggagtgggcatccttgtcttgtgccggttttcaaagggatgcttccagtttttgcccattcaggatgatattggctatgggtttatcataaatagcccttattattttgaggtacattccatcaatacctagtttcttgagagtttttagcatgaagcgctgttgaattttatcaaaggccttttctgcatccatagagataatcgtgtggtttttgtcattggttctgtttatgtgatggattacatttattgatttgtgtatgttraaccagccttgcatcccagggatgaagccaacttgatcgtggtggataagctttttgatgtgctgctggattcggtttgccagtattttattgaggatttttgcattgttgttcatcagggacattggcctgaaattttcttttttcgttgtgtctctgc

SEQ ID NO: 880635 - DNA, 615 bp, Homo sapiens
ccacagctgccccttccccctggtgctctgtcccagggagatgggaatttgatttgtaagcccctgactgaggctgctgcctttctttcaggcatatcctgcccagagaggaggaatctagagaggcaggctggctacagtggctttgctgaactgtggtgggttctggccagttcgaacttcccrgaggctttgtttacactgtgaggggaaaaccacctattcaagcctcagtaatggcagatgccaagctgaagcgtcccaggtcgacttcaggctgctgtgctggcagcgagaatttcaagccagtggatcttagcttgaacggctccatgggggtgggatccactgagctagaccacttggctcccttgcttcagccccctttccaggagagtgaacggttctgtcttgctggcattccaggtgccactgggatatggaaaaaagctcctgcagctagcttggtgtctgcccatatggccccccagttttgtgcttgaaacccagggccctggtggtgtagtcacccgagggaatctcctggaatgcaggttgtgaagaccatgggaaaagcatggtatctgggctggaatgcactgttcctcatggcac

SEQ ID NO: 880636 - DNA, 630 bp, Homo sapiens
gcttttgggcagagactatggagttttctagatataagattgtgtctgtaagcagggatagtttgacttcctgtcttcctatttggatgctctttatttctttctctagtctgattgttctagccaggactttcaatattatgttgaataggagtggtaagagaggatatccttgtcttatgccagttttcaaaaggaatgtttccagcttttgcccattgagtatgatgttgactgtaggtttgtcatagttggctcttattatttttatgtatgttccttcaatacctagtttattgaggatttttaacatgaagcggttttcaattttgttgaaagccttttctacatctattgaaaaagtcacgtgttttttttctttttgtatttatgtagaaaaatctttccttatatatatatcctcctaattaagctttttccaatcatcttattatcccatatctcataacaagcagtggraaccataagtaagtgaatgaaaagggttaattgtttaattattagtttaagggtttcatttaggatcttatttttaggttcttgagatattagcatatttgctctagacaatcaatgcatgaaatcattcctgtctttatcaaagtgcta

SEQ ID NO: 880637 - DNA, 671 bp, Homo sapiens
aaaaggttgaatatattaacatcacatataatctgaaatttaaaaaatatactgcattttatataaaagtattagtaaaatatactaattttaatttacttataaatgaaattaagttttctcataatgcagaatattactctgaatgcctaacgcacacattgcttaatattataagttaaccataaaagtctcttcacttagattttcatcatacatctcatattttaatgtctttttcatagcaaagtttataaataatgctcacctaataaaaaagaatctctcatatctgatgcagcaacaattgatcacatgctttcacatgtaaataggagtgaagaaaaggcaggaaataatttaagagttgaattacattattactcacttttcaaaaaatctaattttttcaaaaagttaagcatactttgaatgcaataactgcaaaaaatttctacttttaaagttatatacaaatattttaccaattttagttttagattattttctayactcagcactctgatttagtaaaatacctgaagcatcagtgccttacatatttctactgtaaattctctgatatttacagacttaatgattaaaatttttaaaaaatttttcctgtatctgcaaaaatatgttttagtatgaactctctggtgttttct

SEQ ID NO: 880638 - DNA, 655 bp, Homo sapiens
aaaaaattattagtcgcccctgccattataatataagcttcccaaaatgtaactgtcattgtttcacatcccctgctgatttgcagcactccccggcgcctaccaaattaaggaatgcctcgcccaatgttcagctgagacattgctgtttgtwaaaaaaaaaaaaaaaaaaaaaaaaggtttaacagattttttaaatagctaatatttgatgtcatttatttatcaaatattatttgggggcatttcatgtgccaggcatatgtaacacttaaaagaatgttttgtaagttagggtagtattattatccttatattacatatgagggaactgaggcttacagaagttaggtaacttatgaaagctcccatggtttatggtggagctagatttccaggttgggtctgaatgttttctgagacatgctaactgctttgaaatttttacaatgttatatgcatttttaaaggatctgattttttttctccttcattctcctctcttgatgctatcactcatattttgctatctgcagtttttcacttttatatgtaagtggaggatgacgggtggaattgtgaagatgggagtggacttggagccagtaagcagggcttctcatcacagccacagtacttacttctcaagcagatg

SEQ ID NO: 880639 - DNA, 655 bp, Homo sapiens
aaaaaattattagtcgcccctgccattataatataagcttcccaaaatgtaactgtcattgtttcacatcccctgctgatttgcagcactccccggcgcctaccaaattaaggaatgcctcgcccaatgttcagctgagacattgctgtttgtaaaaaaaaaaaaaaaaaaaaaaaaaggtttaacagattttttaaatagctaatatttgatgtcatttatttatcaaatattatttgggggcatttcatgtgccaggcatatgtaacacttaaaagaatgttttgtaagttagggtagtattattatccttatattacatatgagggaactgaggcttacagaagttaggtaacttatgaaagctcccatggtttatggtggagctaratttccaggttgggtctgaatgttttctgagacatgctaactgctttgaaatttttacaatgttatatgcatttttaaaggatctgattttttttctccttcattctcctctcttgatgctatcactcatattttgctatctgcagtttttcacttttatatgtaagtggaggatgacgggtggaattgtgaagatgggagtggacttggagccagtaagcagggcttctcatcacagccacagtacttacttctcaagcagatg

SEQ ID NO: 880640 - DNA, 655 bp, Homo sapiens
aaaaaattattagtcgcccctgccattataatataagcttcccaaaatgtaactgtcattgtttcacatcccctgctgatttgcagcactccccggcgcctaccaaattaaggaatgcctcgcccaatgttcagctgagacattgctgtttgtaaaaaaaaaaaaaaaaaaaaaaaaaggtttaacagattttttaaatagctaatatttgatgtcatttatttatcaaatattatttgggggcatttcatgtgccaggcatatgtaacacttaaaagaatgttttgtaagttagggtagtattattatccttatattacatatgagggaactgaggcttacagaagttaggtaacttatgaaagctcccatggtttatggtggagctagatttccasgttgggtctgaatgttttctgagacatgctaactgctttgaaatttttacaatgttatatgcatttttaaaggatctgattttttttctccttcattctcctctcttgatgctatcactcatattttgctatctgcagtttttcacttttatatgtaagtggaggatgacgggtggaattgtgaagatgggagtggacttggagccagtaagcagggcttctcatcacagccacagtacttacttctcaagcagatg

SEQ ID NO: 880641 - DNA, 666 bp, Homo sapiens
acataaagaaatgataactgtttgaggtgatgaatatgccaattatcttcatttgatcactgcacactatatacacgtataaaaataccatactataccccataaatatgtacaattattatcaataaaaaattaaaaataataaagatagatgcacaaacacaaaataaatgcaatgaaaaccacaatgagaaactacttcacaaaaactaggatggcaatgataaaaaatatataatgacaaatgttagcaaggatattgagaacttggaacccacgcatgttgctggtgagaatgtaaaaagattttagctgctgtggaaaacagtgaggctattcctcaaaaagttatacatactgtyaccatgtgatctagcaattccacttgtagatatgtaccaacgacaaatgaaaacatgcccatgtaaaagcttatacatgaatattcatagtactactcacaataaccaaaaagtagaaaaaatctaaatggccattgattgataaatggtgtataaattgtggcatatccattcaatgggatattatttggcattaaagaggagtgaagtaatgatacatgctacaattgaatgaactttgaaaacatgctaagtgaaaagtcccaaacgaacagaaattatataatttcattgatatgtcgat

SEQ ID NO: 880642 - DNA, 669 bp, Homo sapiens
accctatctcaaaaaaataaataaataaataaaaacttttagtaaattgttttactaaacaatgatattatcatttccatgtttaaaaatatttatcaaaagaatatcgtgttaaatacattatagtaatgttgcgaggttttttttgcaagttttttcttttattattataccttaagttctagggtacatgtgcacaacctgcaggtttgttacataggtatacatgtgccatgttggtttgctgcactcatcaactcakcatttatattaggtatttctcctaatgctatccctcccccagttcccaacccccaaccaggccctggtgtgtgatgttccccaccctgtgtccaagtgttctcattgttcaattcccacctatgagagagaacatgcggtgtttggttttctgtcttggtgatagtttgctgagaatgatggtttccagcttcatccatgtccctacaaaggacataaactcgtacgtttttatggctgcatagtattccatggtgtgtatgtgccacattttctttatccagtctatcattgatggacatttaggttggttccaagtctttgctattgtgaatagtgctgcagtaaacatacatgtgcaggtgtctttatagtagcatgatttataatcctctgggtatataccca

SEQ ID NO: 880643 - DNA, 677 bp, Homo sapiens
ttcttctgtattagtcttgctagcactctatcaattttgttgatcttttcaaaaaactagctcctggattcattggttttttgaagggtttttttgtgtctctatctccttcagtttggctccgatcttagttatttcttgccttctgctagcttttgaatttgtttgcccttgcttctctagttcttttaatggtgatgttagggtgtcaattttagatctttcctgctttctcttgtgggcatttagtgctrcaaacttccctctacacgctgctttaaatgtgtcccagagattctgatacgttgtgtctttgttctctttggtttcaaagaacatctttatttctgtcttcatttctttatttacccagtagtcattcaggagcaggttgttcagtttccatgcagttgtgtggttttgagtgagtttattcgtcctgagttcgaatttgattgcactgtgatctgagagacagtttgttgtgatttctattattttacatttgctgaggagtgctttacttccaattacatggttaattttagaataagtgcagtgtggtgctgagaagaatgtatattctgatgattgatgatttggggtggagagttctgtagatgtgtattaggtctgcttggtgcagagctgagttcaagtcctggatatccttgtta

SEQ ID NO: 880644 - DNA, 677 bp, Homo sapiens
ttcttctgtattagtcttgctagcactctatcaattttgttgatcttttcaaaaaactagctcctggattcattggttttttgaagggtttttttgtgtctctatctccttcagtttggctccgatcttagttatttcttgccttctgctagcttttgaatttgtttgcccttgcttctctagttcttttaatggtgatgttagggtgtcaattttagatctttcctgctttctcttgtgggcatttagtgctgcaaacttccctctacacgctgctttaaatgtgtcccagagattctgatacgttgtgtctttgttctctttggtttcaaagaacatctttatttctgtcttcatttctttatttacccagtagtcattcaggagcaggttgttcagtttccaygcagttgtgtggttttgagtgagtttattcgtcctgagttcgaatttgattgcactgtgatctgagagacagtttgttgtgatttctattattttacatttgctgaggagtgctttacttccaattacatggttaattttagaataagtgcagtgtggtgctgagaagaatgtatattctgatgattgatgatttggggtggagagttctgtagatgtgtattaggtctgcttggtgcagagctgagttcaagtcctggatatccttgtta

SEQ ID NO: 880645 - DNA, 608 bp, Homo sapiens
ctgaaagtgacaaggagaatggaatcaagctggaaaacacacctcaggatattatccaggagaacttctccaacatagcaagacaggccaacattcaaattcaggaaatacagagaacaccactaagatactccttgagaagagcaaccccatgacacataatcatcagattctccaaggttaaaacaaaggaaaaatgtaaaggcagctggagagamaggtcaggttacctacaaagggagacccatcagactaacactggatttctctgcagaaactctacaagccagaagagagtggggacaaatattcaacattcttaaagaaaagaattttcaacccagaatttcgtatccagccaaactaagcttcgtaagcaaaggagaaatgaaatcttttccagacatgcaaatgctgagggattttgtcaccaccaggcctgccttacaaaaggaaataaggagaaaacatggaaaggaaataaatatggaaagaaacatggaaaggaaataaatatggaaaagaaaaactggtaccagccactgaaaaaacacaccaaaatataaagaccaatgacactctgaagaaactgcattgactattgtgca

SEQ ID NO: 880646 - DNA, 676 bp, Homo sapiens
acctggtgattagttggatatagagggtaatggaaggagggtttaagaatcaatcctaaatttttagtctaagtgatcatgttcatgacagttctattaggtaagatagaaaactcagtaaaattgctccctggcacaaatttggaaataatggtatttgtgattgcttccaatcttcctctgagacccaaatgttaatcagagaaagactgagggaggaaccaaatgggaggaagaacacggagcagggagtagtcgggaagtgagtgccttgtgattatttgaggctttcacagtcagggtatggttcactatatttttcactatctttatttttgtgcctattgcaattttataacatgacttttaaattcaccttgtaacratatgacctcgaattttagctgatagaattctttcaatccaacatatagtattttggtggttctatgtgtagttggagaatcaggtcaaagatgtggaattgagttttgatattgaatttatggcacttatcagctatggagatggaacccatgaaaaggaacataaacatatgtatctgaatgccagagctatttgagctgcaaaaacagattttttggccatcggtatatattggtacttgaaaccacgattatacttccttcggtaactgacattttatagagtaagc

SEQ ID NO: 880647 - DNA, 661 bp, Homo sapiens
cagttcccaataagttcctcatctctatctgagacattctcagtctgcacttcattgtccatattactatcagcattttggtcacaacaattcaacaattctctaggaagtttcaaactttccttcatctttctgtcttcttctgataccatcacactcttccaacctctgcccattacccagttccaaagttggttccacattttcaggtatctttataacaataccccaatcctggtaccaactttctgtattagttcattcttgcattgctataaagaactacctgagactaggtaatatataaagaaaagaggtttaattggctcatgattctactggctatacagcaggcatgsctgggaagccctcacacaatcatggtgaaaggtgaaggggatgcaggcatgtctttcatggctaaagcaggaggaagaaggaaaagggggaggtactacacacattcaaacaaccagatgttgtgagaactcactatcacaagaacagcaaaggggaaatctacccccatgatcaaataacctcctaccaggcccctcctccacattggggattacaattcaacatgagatttgggtgtggacacaaatccaaaccacatcacaaagtcatttatactttttattgatgcatttagtttttt

SEQ ID NO: 880648 - DNA, 595 bp, Homo sapiens
tggaatcaacgtcagctcagagcccgtgtccggtagtccccaaaatgtctgatcatctccctttccccaatacacagttaccctggcaaaaggccagaggtcttcttggagaaggatgggagaaagattaacatcataaattgtcagtagtgtagtgaggtcctacctcaaggggatccagcctcccctttattcaaggagttctgggtttgttaactggctcacatctggaaattgattgaggggccttgatgctctgttggtataattcaaattagtcttttgtccattcgacctagaagtttcctgcttatatttattaagtaaaaatgcagtagttcctattaatttcacttctagaaacaacgtrattaattagccaatgccagagttctacatgagttctacatgagtccaactattctgattgccactttgcctctgctgtccattaaggtagctatgcctactctgtctttgatggttgagtgctgccgcttggtccctgccacctcaggatccaattattcccattgtatttaaattttgtagttgagtgactggggttcccactgttagatctgacatacagaga

SEQ ID NO: 880649 - DNA, 603 bp, Homo sapiens
ccaagtcctttcatatgtctgtaaatccttcccaggaagaagggctatacataagcccagacagtgaaggctacaataaattcctaacttttcaatgcacagacaccaaagaacatctattagcaccaacaccatccaggaaaacatgactttgccaaatgaattaaataagscaccaggggccaatcctggaaagacagagatatgtgacctttaagacagagtatttaaaatagctgtgttgaagaaactcaaagaaattcaatataacacagggaaggaattcataattatatcaaatttaagaaagatattaaaatcaaaataatcaagcagaaattctggagctgaaagatacaattggcatactgaagaatgtgtcagagtcctttaatagaagacttgatcaagcagaagaaaaaattgctgagcttgaaaataggctattcaaaaatacacagtcagaggaaacaaaagaaaaaagaataaagaagaatgaaacatgcctacaggatctagaaaataacctcaaaatggcatatttaaaagttactgtccttaaagaggaggtagaaaaatatatagtggtcaaaagtttattgg

SEQ ID NO: 880650 - DNA, 597 bp, Homo sapiens
ccagtagggattctgtgtgagggacccaaccccacatttcccttcttcctgccctagcagatgttctccatgagggctctgcccctgcagctaacttctgcatggacatccaggcatttccatatatcctctgaaatctaggtggaggttcccaaacctcaattcttgacttctgtgcaccagcaggctcaacaccacgtggaagctgccaaggcttggggtttgcacactctgaagccatggcctgagctgtaccttggccccttttagccatggcttkgagtggctgggatgcagaatacaaagtcccaagggagccctggacctaacccaggaaaccatttttccttcctaggtctccaggcctgtgatgtgaggggctgctgtgaaggtttctgacatgccctggagacattttccccattgtcttggtgagtaacattcagctcctcattatttatgcaaatttctgcagcaggcttgaatttctccccagaaaatagggttttcttttcaatcatattgtcaagctgcaaattttttaaacatttgtgctctgcttcctcttgaatgctttgccacttaaaaatttcttct

SEQ ID NO: 880651 - DNA, 660 bp, Homo sapiens
gatcactgaatggcaccatggagagctgtgctttccagtatggtagctgctcgccatcttggctattaactatcagcatgacatgtgctgtaagtgtgaagtacctactggatgtcgaggacttagtatgaagaaaaaggatgtaaaatatytcattaataattttacattgattacatggaaaaatgctagtgtttagggtatatggggttaagtaaaatactatcaaaatgaatgtcacttttgttgttgttgatgttgttgttgagacggggtctcattctgttgcccaggctggagtgcagtggtgccatctaagatcactgcaacttccacctcccaggctcaagcaatcctcctgtctcagcctcccaagtagctgggactacaggagcatgccaccacacctggttaatttttgtatttttttttatagagatggggtttcgccatgatgcttaggctggtcttgaactcctgggctcaagaaatctacctgcttcagcctcccaaagtgctgggattacaggtgtgagccactacgcctggccctaatgtcactttttgtttgtttgttttttactctttcaatgtgggtattaaaacattttatattattattattattattattattattattattattattataactaa

SEQ ID NO: 880652 - DNA, 660 bp, Homo sapiens
gatcactgaatggcaccatggagagctgtgctttccagtatggtagctgctcgccatcttggctattaactatcagcatgacatgtgctgtaagtgtgaagtacctactggatgtcgaggacttagtatgaagaaaaaggatgtaaaatatctcattaataattttacattgattacatggaaaaatgctagtgtttagggtatatkgggttaagtaaaatactatcaaaatgaatgtcacttttgttgttgttgatgttgttgttgagacggggtctcattctgttgcccaggctggagtgcagtggtgccatctaagatcactgcaacttccacctcccaggctcaagcaatcctcctgtctcagcctcccaagtagctgggactacaggagcatgccaccacacctggttaatttttgtatttttttttatagagatggggtttcgccatgatgcttaggctggtcttgaactcctgggctcaagaaatctacctgcttcagcctcccaaagtgctgggattacaggtgtgagccactacgcctggccctaatgtcactttttgtttgtttgttttttactctttcaatgtgggtattaaaacattttatattattattattattattattattattattattattattataactaa

SEQ ID NO: 880653 - DNA, 571 bp, Homo sapiens
gcataaataatgataatatacgtactaattattgctgatattagtcataaaataatgatttgaatttggataccactcttacttttcaaaatgctttcattttatagcaaatttcgtccccaagttatcctttgcagtaaaaaaaacatgtaatcccaatttttttaaatttttttttaaattatactttaagttctagggtacatgtgcacaacgtgcaggtttgttacatatgtatacatgtgccatgttggtgtgctgcacccattaactcgtcatttgcattaggtatatctcccaatgctatccctccccmctccccccaccccacaacaggccgcagtgtgtgatgttccgcttcctgtgtccaagtgttctcattgttcaattcccacctatgagcgagaacaggcggtgtttggttttttgtccttgtgatagtttgctgagaatgatggtttccagcttcatccatgtccctacaaaggacatgaactcttcattttttatggctgcatagtattccatagtgtatatgtgccacattttcttaattcagtctatcattgat

SEQ ID NO: 880654 - DNA, 660 bp, Homo sapiens
ttgggggtgggctttgtttccttcatactgttctcatgggagtgaataagtctcacgggtttgtcaggggtttccacttttgcatcttcattttctcttgtggctgcgatgtaagaagtgccttttgcctcctgccatgattctgaggcctccccagccatgtggaactgtaagtccaattaaacctccttctccctagtctcaggtttgtctttatcagcagtgtgaaaatggactaatacagtaaattggtaccagtagagcagggtgttgctgaaaagatacctgaataggtggaaaccactttggaactgggtattaggcagaggttggagcagtttggagggctcagaagacataaaaatgtgggaaagtttggaacctcctraagacttgttgattggctttgacaaaaatgctgatagtggtaagaacaataaggtccaggctgaggtggtctcagatggagatgaggaacttgttgggaatcagagcaaaggtgactcttgttatgttttagcaaagagactggttgcattttgcccccaccctagagatttgtggaactttgaacatgagagagatgatttagtgtatctggcagaagaaatttctaagtggcaaagcattcaaaaggtggcttgggtgctgttaaaagca

SEQ ID NO: 880655 - DNA, 554 bp, Homo sapiens
aagattatataacccaccacttagaaggtacgaatagagcaaaagaacaagaggctgtaaggacatagaagcaaaaagatttctcctagtggggcccatgctgaaagttcaggtatagctgtgaatgtttcctcattgtttggttcagctcatcaatacagctaatgaggatttggaagcagatctgattatttcaaaaattargaagcaaagtaggtttactgtaaaaatgtccttttaatttatttttccaggacattgcaatgcgggaagcaggtgataggatgggattttgagtctaattgaggagagggaatcctaatataacaggagtcaaaaactttactgtaactcagagaggcgaagacaaccaatactcaccaggagttgggaagagactactaaataccaagccgaatttaaaacttagctcaattggataattcatatgatttctctatgtcattaataccgtttctctggaaaaagagaaagcttagtttgatcagcttttcttcctaaatgtatctacagagcagtgtcttctttctgcc

SEQ ID NO: 880656 - DNA, 680 bp, Homo sapiens; identical to SEQ ID NO: 871680

SEQ ID NO: 880657 - DNA, 572 bp, Homo sapiens
ggagtcaattaaacctctttcctttataaattacccagttctgggtatgtctttattagcagcatgagaacaaactaatacagtaaattggtaccacagagagtggagtgctgctgtaaagatacccaaaaatgtggaagtgattttagaactgggtaacaggcaaagattgaaactattcggaaggctcagaaaaagacagaaaaaatgtaggaaagtttggaacttcctagaaacttggagggctaagaaaacaggaagatgtgggaaagtctgaaacttcctggaggcttgttgaatggctttgaccaaaatgctgatagtgatatggacaacaaagtccagggtgatctcagatggagatgagaaaattcttgggaactacagcaaargtaactgttcttatgctttagcaaagagactggcagcattttgccactgccctagacatctgtgaaactttgaacttgaaagagagggcttagggtatctggcagaagaaatttctaagtggcaaaacattcgagagaaagcacagcataaaagtttggaaaatttgcaggctgacaata

SEQ ID NO: 880658 - DNA, 608 bp, Homo sapiens
ccaaacagcataatgtcactaatatgacaaaccagtataatatccttttgaagagaaagatgatcaagatccatgtgaactaaattatggtgtaaggctggagagttgatctacttctgaggtagaatagtgaaggtatattactggcctttccagctgaaggcaaactgcttctgatggtttttattgacaggtatgaaggaaaagcatttgccagatcaatagctgcataccaggtaccaagggatgtgttagtttgmtcaagcaatgaaatgcagcaattggagtcacctcctggttaagcttacttaactgctattctccaagatccatctgttctatgcacaggccaaataagagagttgagtggggagtagtaatcatcacccctgcatctttcaagtccttgatggcagcactaatctctgcaattcctccaaaaatgcagcattccttttggtttgctattttcctctgtagaggcagttctagtggctgctcccactaggtctttcccactacagtagtccttactgtgcaggtaagggaaccaatgaggggattccaacagctgctgaatgtatctattgcaattatgcattctagaa

SEQ ID NO: 880659 - DNA, 645 bp, Homo sapiens
ggctacgtgggagagagagaaagatggaaaaggcagcgtcatcatttaacgacttcatccttacattcaggcactttaataatacatcagatgctgtttctagaaagccaaaccgactgtttggaaagagcacaaagaaggcccccgaggacgggttagatgctaaaatgaggctgtatgaaacaacagaaagatttctgagcagaagtcatgaaactcaagatttggtggagaatctggcactaatttgccatggaacttcattgattctactcgcagaggttctgtctcactctgtaaamtgaagcctgtgtaaaattttcttcaagtggcttcatattcatgattagagtttcagtgagctagtgaggggcatttcttctgattcataccttgtctccttactagactggaaacttctgaatggatgggattatatcttattcacatttatatgtctgacacctgaacacaagcaggccatcaatacaattttaatatatgatttgaatctcacatttcaactctaaacttgacattgtctctgtggaaactcaagaagaagaaagaaagaaaaagaaaacagcatatggtgaggcaagatccttgcccatcttgcaccatgccaagtattaaatgctcatt

SEQ ID NO: 880660 - DNA, 665 bp, Homo sapiens
tgaaggagatggagacaccaaaaactctccaaaaaatcaatgaagccaggagctggttttctgaaaaaaattaacaaaatagatagatggctagctagactaataaagaagaaaagagaggaatcaagtagacaataaataatgataatggagatatcatcactgatcccacagaaatacaaaccaccatcagagaatactataaacacctctacgcaaataaactagcaaatctagaagaaatgcataaattcctggaaacatacaccctcccaagactaaaccaggaagaagtcaaatccctgaatagaccaataacaagttctgaaattgaggcagtaataagtaccctaccaaccaaaaaaattacaggaccagacggattcacagctgaagtcaacaagaaatacaaagaggagctgataccattccttctgaaactattccaaacaattgaaaaggagggaatcctccctaactcattttatgaagccagcaacatcctgataccaaaaccrggaagagacacagcaaaaaaagaaaacttcaggccaatatctctgatgaacatcaatgcaaacatcctcaataaaatactgggaaactgaatccagcagcacaacaaaaaacatatccaccatgatcaagtcagcttcattcctggg

SEQ ID NO: 880661 - DNA, 580 bp, Homo sapiens
ggagaagttattaaaatcttaaaattacacaatattaactttttttctaggtttaagctgaaatgtaggcgaaccatacaaaagtcattgtttttgttgtgtctttagaggacagggtggctgtcttttaaaaagtatatatatctcctagcatacttttatacaaaaacagaaattaaacccttctaaacttgaaaggtagatacatatttacattgtgatttagttatcttctgtaatgaggaaatggataatgctggcacctgatcttttgtcaacaaggtgatgcttagagtttaraataagtttctttttgtcattagattgttattataagttatgttaggtttatgggtttcatttatgcaataaatattcattgagtaattaccttgtgacagacattattctaggtacttgggatacatcagtgaacaaaatacactacagttcttactctcatgagacttatgttctagtgcgtatgtgtatgggggggatagtgagagaacagcaaagaataaacatgataattgtatatttatattatgtttaaaaggtgagggtgttaaaaatagaa

SEQ ID NO: 880662 - DNA, 591 bp, Homo sapiens
gtcttaaagggctcataagttatatcatggtacatttttaagatcatcaccttcacagttataaaaggaggatagtatcatgcctcatttccccagactccatagaccttacaatcctcatgtggtcccaagagccagctcaccagcctggctgaccccaactgtccagtagaatgcaaatatgagaaatcatgaggaaatagtaatggcaacactagcatttattgagtgctgtgtcaggtggtgtcttaagtttctgacacgtattaactcatttgatctttctacaacaccttctaagrtaaatagtattaatactatttaacagtttataatatatactatgtaatacgttaatattatttaactccttatatataaatattataatatatactagatattaatattatttaactcatatataatatatactatataatatattaattttattaatatttaactaatataataatacattaacattatttaactcatttgatcttcctacaacaccttctgatgtaaatagtaataataccatttatcattttataatatatactatataatatattttatatatat

SEQ ID NO: 880663 - DNA, 591 bp, Homo sapiens
gtcttaaagggctcataagttatatcatggtacatttttaagatcatcaccttcacagttataaaaggaggatagtatcatgcctcatttccccagactccatagaccttacaatcctcatgtggtcccaagagccagctcaccagcctggctgaccccaactgtccagtagaatgcaaatatgagaaatcatgaggaaatagtaatggcaacactagcatttattgagtgctgtgtcaggtggtgtcttaagtttctgacacgtattaactcatttgatctttctacaacaccttctaaggtaaatagtattaatactatttaacagtttataatatatactatgtaatacrttaatattatttaactccttatatataaatattataatatatactagatattaatattatttaactcatatataatatatactatataatatattaattttattaatatttaactaatataataatacattaacattatttaactcatttgatcttcctacaacaccttctgatgtaaatagtaataataccatttatcattttataatatatactatataatatattttatatatat

SEQ ID NO: 880664 - DNA, 521 bp, Homo sapiens
tgtttaaaagtgtgtagcacctcccgctttactctctcactctcctgccaccatgtgaagatgtgcctgcttccccttctgccttgattgtaagtttcctgaggcctccccagccatgccttctgtatagcctgtggaacggtgagtcaattaaacctcttttctttataaattacccaatctcaggtaatgctttatagcaatgtaagaatgaactaatacagaaaattggtaccagaagagtggagcattgctataaagatacctgaaaatgtggaagcgactttggaactgggtaatgggcagaggctrgaagagtttggggggctcagagaaagacagaaagatgtgaaaaagtttggaacttcctagagacttgttgagtggttgtgatcaaaatgctgacagtgatatggacaatcaagtccaggctgaggtgatcccagatggagatgaggaatttattaaggactagagtaaaggtcactcttgctatgctttagcaaagagaggggcatttt

SEQ ID NO: 880665 - DNA, 565 bp, Homo sapiens
ttattgttctattggtctgttgtgagtgtttgctcacactcaaggggaggggattattcacacaaaggcgtaaataccagaaggcaggaatcactggggttacctgtgggtctgtccccacacagccctttgagttcagttctgtaacttatttgggccaatggaatgtgagcagaagtatctgagggctagttctaagcctmgttggtaagagagatctagtgtttccattgtcctcactgtatgtctgccttcaatcatcatgagaaaatttcctgagtagtcacttgtccgaagaaaatgagagtcacctaaattagccttggacacaaactacatcttgaaaccaagaacagcctgtatcagtgagcttccacctaatccacaggttcttaagagtaataaataattattacttttagctactgggtgtgaggtagtaaaataatgtagcattattttagcaatagctaattgctctaatacctgagtataacttaaatggtttggaatctgcctatgatttcatgccagaggatggaagaaagctcaaaagatgaattga

SEQ ID NO: 880666 - DNA, 611 bp, Homo sapiens
caggcatggtggctcacacctgtaatcccagcactttgggaggccaaggtgggtggatcacttgagcccaggagttcaagaccaaccagcctgggcaacatggtgaaaccccatatctactaaaaatataaaaattagccaggtgtggtggcatgtacctgtagtcccagctactcaagaggctgattcgggaggatcrtttgagcctggaagggtgaagcttgcagtgagtcatgattgtgccactgcactatagcctggccaacacaggaagatgctgtctcaaaaaaaaaaacaaaaaacaaaactgagtgtgtactttgatgttgccttttccctttcaagtggctgggagctagtgagagccagaaaaactttcttaaacccataactagaagccatttgttcaatgtggcagagatgcctatccatcttggatcaactgcctgtatctggactattacatgagagagaaataaatgtttatttttttaaaaacaaagtaattgtatttgacatctatttaaaataaatatttgtacaaggaggatgctagagtacctatagaagatttatgcaatttggcttagcaggaaagcagcagatgttga

SEQ ID NO: 880667 - DNA, 651 bp, Homo sapiens
attaataccatgaatccttcaacctgatgaatgcaaaaaaacttgagacctacaggacaagtgggtgataattgttgtgagaactgttgaagctctgctcagcttgtgaggggagaaatccacaggaaatgaagcatttgctagcagtccaactgatcctaagaggcttcattaatcccatctcagcaacattcgccatctgaataccagtgctagcttttctccctcccaatactaagttttaaatatcttcagagaaaagaaatcatgaactcatttttgcatgcatttaaatatttattgaatggatgaataaatgaataataaataagaaaacagaattttcgcccatgtactagacattataatgtgggtcatttgagagctgcatatggttatctcttgtcatttctctaataaagcaattgtgcacaagtgtagttttgctaaaatccatagcaaaattaacattctctgctggcaaaaagaaaactgttagcaatggccrgtaactaaagccacatggtgccatcaacttgatcattattatttagctctagataccaacatagtataccagtggtcctcaattaggcagatggtaaagggactgcgtgttatttgaaaaagcttcccaagatatttcttgac

SEQ ID NO: 880668 - DNA, 644 bp, Homo sapiens
ctaaaaaattcctagtgacataatagtgcaacatattactcgtgtgtttggggtgatgctgttgtaaacaacccactgccctgtcagtcatataaaagcatagcacatataattatagatagcacacaatatttgataatgataacaaaaacgattatctattattaaaactattatttgataattgttgatcaattagttgatattattgataatgataataaaaactatgtttatgtatttactatacttttattgttattttagagtgtattccttctacttatagaaaaaaaaagttagctattaaaacagtctcaggcaggtccttcaagaggtagtccataagaaggcattgttatcattagtgacagctacaaacatgttattttccctgaagaccttccagtgggacaagatgtggaggtggaagatgatgatattgatgagcctaaccctatgtaggtctaggctaatgtgggtgtttttgtcttaggttttagcaaaraagtttaaaaagtaagaaaattaaaaatgcttatagaatgaagatataaagaaagaaaatatttttacacctgtacaatgtgttcatgttttaaactgttattacaaaagagtcaaagttaaaaaattaaatttta

SEQ ID NO: 880669 - DNA, 465 bp, Homo sapiens
ctgtaaaaatttaagattgtagagtcttgtgcaaagctgaaatgagaaagaaatatagaaacatttaaactaccttaagtcccctgtttttccattctgaataaggaatcaccatgagttcattgcagaggcttctatacrtggaaccttatgcagttccaaataactaaacgaaaccatttattttttcaaatgttctgcttgccatttcatatattttctattatgcaaaaatgtcttttgtgtattaatatttcttgaccacaattctggtatcctttctgatattgtcccctgcctgctcatgcagaattgaccagcagttcaagtgcatagcagaatcctccgcctaaatttagaaattggtaaatcaaacaaacacaggagcctcaaagtctgtagaagtacagctgataatctttttggcttttaaacaaacgtaaatactctaaaacttgctcttag

SEQ ID NO: 880670 - DNA, 616 bp, Homo sapiens
cctgaccaaagcaatgtacagattcaacactatttctatgaaactaccaatatcattcttcacacaattagaaaaaactattttaaaatttatatggaaccaaaaaacagcccaaatagcctaacgaatcctgagcaaaaagaacacagttgaaggcatcacactacccaacttcaaaccagactataaagctacagtaaacaaagcaacatggtactttctgcaaacccagacacacagaccaatggaacagaatagagaactgagacataaactcagacacctaaaaccctctgatctttgacaaggctgacaaaaacaaacaatagggcaaggactctctattcaataaatgatgctgggataactggctrtccatatgcagaagaatgaaactggattcttacctttctccatatgcgaaaattagctcaagatggattaaagatttaaatgtaagatctcaaactataaatatgctggaagaaaacctaggaaatacccttcttgacacaggctttagcaaagaatttttggctaagtcctcaaaatcaattgcaatgaaaacaaaaattgacaagtgagatctgtttaaattaatgaacttctgcacagc

SEQ ID NO: 880671 - DNA, 593 bp, Homo sapiens
catttatttaggtttacagacatttcattatatatttaggatactcctgaatgttgtgacagttaggaaccacagatagtttgaaagctaagctaaatatccctgcaaacagtctccctaccctggaattcaaataagtgaaataagtcaaatactttttatataaagtgattctttattgactattataatttgagacgtgaagatcagtggctgcatattatgaaaaggtcatcatgagatagcaatgaagataattctagggtccttttgagcttatgatttccacaagacaatgtattatacattccacctacctctgtggctgtgaggggagtacacaagttgctgtytagaattcatctatccaggttcggattatcagtgcatggtttcttcattcttgagctcctggggatttagaaaccttagataactaaaacttgtactccataaatacactcctatttgtcagcagtgcatatctttaaatattcaaatcatcattcttagcttataaatagagactctccaaaattacctgttggaaattcattatctaggaagatatgattttctatgatgcatgcttt

SEQ ID NO: 880672 - DNA, 594 bp, Homo sapiens
gagagcaataagcattggccataggtttcagaatgagaagatttggtgttgctgaaagggctgagcaagctgaaccaaacactttcactggataattaattattttaaaggctaagtttcaaggattgtgtagcctttgttcaacrcatgcagtacatgtatctcccagtttaccaatgactaatagtgtaaaataagacaaggagaaaatggataatagccttttgacagacttagcctagattacaggtaagcctggattactgggaaacagaactcacaaattaacatccatataatgttttcttttttaacttttaagactcagttgaaaaattattgccaaaaataatactctctgtagttgtatttcacattataggaaggtctgcctgttggcactcgattcttctagttatcctgtgagacagatgaggcatgttttattatcttcattttatatatgaagaaatgaggccacagataatatggtccaatgtcacatagtagttgtgtagcagaaaaggtttccaacaggtaaatggtgtttccatttatgcacctcccacttactcttcacgtcactgtaatcag

SEQ ID NO: 880673 - DNA, 594 bp, Homo sapiens
gagagcaataagcattggccataggtttcagaatgagaagatttggtgttgctgaaagggctgagcaagctgaaccaaacactttcactggataattaattattttaaaggctaagtttcaaggattgtgtagcctttgttcaacgcatgcagtacatgtatctcccagtttaccaatgactaatagtgtaaaataagacaaggagaaaatggataatagccttttgacagacttagcctagattacaggtaagcmtggattactgggaaacagaactcacaaattaacatccatataatgttttcttttttaacttttaagactcagttgaaaaattattgccaaaaataatactctctgtagttgtatttcacattataggaaggtctgcctgttggcactcgattcttctagttatcctgtgagacagatgaggcatgttttattatcttcattttatatatgaagaaatgaggccacagataatatggtccaatgtcacatagtagttgtgtagcagaaaaggtttccaacaggtaaatggtgtttccatttatgcacctcccacttactcttcacgtcactgtaatcag

SEQ ID NO: 880674 - DNA, 594 bp, Homo sapiens
agtcttctattcagggtctcaccaggctttagtcaagttgttggcaagggctgtaatctgatctgagtttttaagtcatctttcaagctcctgtttgttggtagaattcagttctttgttttgtaaaagaactttacttttcttgttacttatcagtcaataatacctgtcagcctaaggaggatgataccaggttattccacatgacccctttcataggttctctttcaccttgatggcttacttactcaaggtcaccaggtcaaaagaattcctctgatgcttcacctttttttttttttaagtgctctcctgattaggtaaagcccacccrggaaaatcttccttctgattcactcaaggcaactgattaataacaaacaactcatgggagaaatatcccaacatagtcatagtttctttttttttttatactcaaggtgcagggagtgttttacacaagaggagagtaataaaagtatgaatcattgggtgccagaattctgcctaccacaatatttacttatcttcccttcatctgattatgtgattttgaaaatgttgtccttaataagttagaggatattaaatttc

SEQ ID NO: 880675 - DNA, 594 bp, Homo sapiens
agtcttctattcagggtctcaccaggctttagtcaagttgttggcaagggctgtaatctgatctgagtttttaagtcatctttcaagctcctgtttgttggtagaattcagttctttgttttgtaaaagaactttacttttcttgttacttatcagtcaataatacctgtcagcctaaggaggatgataccaggttattccacatgacccctttcataggttctctttcaccttgatggcttacttactcaaggtcaccaggtcaaaagaattcctctgatgcttcacctttttttttttttaagtgctctcctgattaggtaaagcccacccaggaaaatcttccttctgattcactcaaggcaactgattaataacaaacaactcatgggagaaatatcccaacatagtcatagtttctttttttttwtatactcaaggtgcagggagtgttttacacaagaggagagtaataaaagtatgaatcattgggtgccagaattctgcctaccacaatatttacttatcttcccttcatctgattatgtgattttgaaaatgttgtccttaataagttagaggatattaaatttc

SEQ ID NO: 880676 - DNA, 614 bp, Homo sapiens
ggagctgtttcctccaaattcctccctctctgtgatctccctggtcctttcctgatcgctgggctccctttttcgggcctctggccaaaaacttggtgttgtagttaccctgctctgccgtgcacttcctacaactgcacccacagtcgcggccaagcagcgaagatttaagaaagtaagaaagcgtgacggtttgctccactcttttgggctatagctcctccaatcagaaaaggaaggttctctgcatgtcccactttatgtgaaatctaacaaagttgaactcgtagaagtagagtgtagaaagagattggggccggggaggaagggaatgggsagttactggtcaaagggtacaaagtttcagataggtaggaggaatgttttgaaatctattgcatagcagggcgactatagtcaataataaagtattgcatatttcaaaatcactgaaagggtaaatttcaaatgtctaccataaaaatgataggtaaaagaagtgcatttaatttttcttttaccacttttcttactctgttatcttcagctcaggagtatctaacctgcaaagatcttaattaaggctttggctttcgacttaaaagtctccataa

SEQ ID NO: 880677 - DNA, 624 bp, Homo sapiens
ttttactgtatgtgtttgagggatataacataatgttataagataaatatacactattttttaattctaaggataaagaagtcactgttgccctaggaaattgttttatagtgagcagcccataccaaaacaatttgttttttcaagttttatgccattcttattgcaaagtcactgaataccacagataattagatctgtgattatgctgtattcatttttacccttctagtcaatcaacaatatttctaacttaaccacaaaaataaaaaatggaagagctatgggaaaaaaagccaaacaacaacagcaacaacagaaaacaaaccaatcctatatttaacagcataaagaaraacagggaataactatgaaaagtatataaatattagatgaagcaagtttttgaggggagtggtgtgctaaaagagaaaacatagcaatgaccatttttctttattgctttttttctctacttcatctcttatgttgccttcatgatgttttacctaagatgtgtacaatgcttaaaatttaattttttcaaaggaatgtttatctaaagaagaagggttgttattatcatatatacatgtaattcttactaagaggattaattattta

SEQ ID NO: 880678 - DNA, 648 bp, Homo sapiens
caaggacaccaattgttttgtacaggtagttctaattttactccctatcttttaactggacatctgagctctgcagagaactcacactgtgtattgggtctccaaatagagaattattataaggctagaccatccttttacagttttccttcccttttttttaatgaagacatttctctaagtgtctaagctacactctttcttactttaaacatctaagtgtaaaaaatcagacaacacattacaaatgaaagcaggttaaaatctgagaagaaacttgtgtgttttctcttgggattccataaagaaaaagaagtttctccccaraaaggtgtctggtgccttctctgttttatttaaggaatttcaggctgttagaaactatttaagaaaagctttctgaagaacaaggtcataggagagaaaataaaaaccaaaaaacataaaggccttatgtatatgtgtgtgtgtatatatatatatacacacacacatatatatatacacacacatatatatatacacacacacatatatatatatatatatatatatatatatatatatatatatatatatatacacacacacacacacacatacatgttggcaacagaccaccaaatctaaaaaggttcaaacgctcac

SEQ ID NO: 880679 - DNA, 650 bp, Homo sapiens
atgttaagggcagccagagagaaagatcaggtaacctacaaagggaagctcatcaaactaacagtggatctctctacagaaaccctacaagccagaagagagtggggggccaatatgcaacattcttaaagaaaggaaatttcaacacagaatttcatatccagccaaacaaagcttcataagtgaaggaaaaatgaaatcctttacagacaagcaaatgctgagggatttttgtcaccaacaggccagccttacaagagctcctgaaggaagcactaaatatggaaaagaaaaaccagtaccagctactccaaaaacacaccaaattgcaaagaccaatggcactatgaagaaattgcattaaccaatgtgcaaaataaccagctagtatcatgatgacaggatcaaattcacacacaacaatattaaccttaaatataaatgggctaaataccccaattaaaagacacagactagcaaattkgataaagagtcaagacccattggtttgctgtattcaggagacccatctcacatgcaaagacacacatagactcaaaataaaaggatggaggaatatttaccaagcaaatggaaagcaaaaataggcaggggttacaatcctagtctctgctaaaacagacttttaa

SEQ ID NO: 880680 - DNA, 567 bp, Homo sapiens
aaatggaaagcaaaaataggcaggggttacaatcctagtctctgctaaaacagacttttaaccaacaagatcaaaaacgacaaagaaggkcattacatattggtataagggatcaatgcaacaggagatgctaactatcctaaatatgtatggacccaatacaggagaacccagattcataaatcaagttcttagagacctacaaagagacttagactcccacacaataatagtgggagactttaacaccccactgtcaatattagacatatcaacgagacagaaaattaataaggatattcaggacttgaactcagctctggacaaagcagacttaatagacatctacagaactctccaccccaaatcaacagaatatacactcttctcagcactacatagcactcattctaaaattgtcctcataattagaagtaaaactcatcagtaaatacaaaagaacagaattcataacaaacagtctctcagaccatagtgcaatcacattagaactcaggattaagaaactcactcaaaaccgcacaactatatgaaaactgaacaatg

SEQ ID NO: 880681 - DNA, 610 bp, Homo sapiens
aacctttcatagctactttctcaccttgtaataaaaatacataaatttacaattattttataatggccttattggaattgaatggccacgtgtaacctaaagccatcattcacttttaatttacaataaatcaaatgtgtytttcattcatatagactgttgctagccacaaagggctttcacataatctcatttaatttaaaaacaactctgaatagcatcattagactcattttacaaatgaggttactgaagctcagagaaagtataatttttctattaatagcatttattataaattctatgtcacaaaattacatataactagaatttaaacctcaaaacctaattccttgtattccagtaagcttggtacactcaatactttgcccaaacttcccacatgcagagccataggtactatattaaatgctcccttccttcgacctctgctttctgctggtctataagcctgtgcttgctcctcttcgccttgctaaccccaagtgcaaagccttcagtgctgactcaatcagtgctttgacatctcagagcttctccttcattgccaagccctagctttttatccttcttgggcagtatcaaatct

SEQ ID NO: 880682 - DNA, 658 bp, Homo sapiens
ttttcggcttaggatgctttcacattcaggtattttattcacctagggggcacccttatatgtgatgtcagcttagttgttttccatattatgagcccattttcccaaacatgacctactaaatgatctgttctttcccccacagatttgtggtgtcaccatatgtacatgcatctgtcttggagttttctacaaattcaatggtgcatttccctgtttttgccccaatatcatatmcgttttactaccatgaccttgtaatacatcttaatatctggtaaggcaagtacaccttctttcttctttttttttaatcatttacctaatatgtgaaggaaaaattaactcaacttatgtttttcttctgtccttacgccacaacaatcaacacaaaagatttctgggactaaacgtatgaagatttctctccacacaccaagcaagcaatcagttcttcagatgacacctgctgtatgtcctccaactcaatccagttctaacactgtctacctggagatatcctcagacagcacagggcaagggctcagtcttacaagactgccccctccctcctagcagtcacaggtctgggcctctgaaaattctgactaactggctacaagttgggctttccacaatccccactttgggttcaatt

SEQ ID NO: 880683 - DNA, 658 bp, Homo sapiens
ttttcggcttaggatgctttcacattcaggtattttattcacctagggggcacccttatatgtgatgtcagcttagttgttttccatattatgagcccattttcccaaacatgacctactaaatgatctgttctttcccccacagatttgtggtgtcaccatatgtacatgcatctgtcttggagttttctacaaattcaatggtgcatttccctgtttttgccccaatatcatatccgttttactaccatgaccttgtaatacatcttaatatctggtaaggcaagtacaccttctttcttctttttttttaatcatttacctaatatgtgaaggaaaaattaactcaacttatgtttttcttctgtccttacgccacaacaatcaacacaaaagatttctgggactaaaygtatgaagatttctctccacacaccaagcaagcaatcagttcttcagatgacacctgctgtatgtcctccaactcaatccagttctaacactgtctacctggagatatcctcagacagcacagggcaagggctcagtcttacaagactgccccctccctcctagcagtcacaggtctgggcctctgaaaattctgactaactggctacaagttgggctttccacaatccccactttgggttcaatt

SEQ ID NO: 880684 - DNA, 649 bp, Homo sapiens
cacaatagcaaagacttggaaccaacccaaatgtccaacaatgacagactggattaagaaaatgtggcacatatacaccatggaatactatgcagccataaaaaaggatgagttcatgtcctttgtagggacatggatgaaattggaaatcatcattctcagtaaactawcacaaggacaaaaatccaaacaccgcatattctcactcataggtgggaattgagcgatgagagcacatggacacaggaaggggaacatcgcactctggggactgttgtggggttgggggaggggggagggatagccttaggagatatacctaatgctaaatgacgagttaatgggtgcagcacaccagcatggcacatgtatacatatgtaactaacctgcacattgtgcacatgtaccctaaaacttaaggtataataataataaaataaataaataaataaataaattattgaacagataaaagttggggagaagataccatgattcattacagaagaattccagttagaaggaatggtggaattacaaaatcaccatcaggcaaacacagtaatagttattgcaggcaagggccaccaattggaggacaaaactgagatgagaaacagtaccttcacataatcaacaagaattttc

SEQ ID NO: 880685 - DNA, 574 bp, Homo sapiens
catttcattatatatttaggatactcctgaatgttgtgacagttaggaaccacagatagtttgaaagctaagctaaatatccctgcaaacagtctccctaccctggaattcaaataagtgaaataagtcaaatactttttatataaagtgattctttattgactattataatttgagacgtgaagatcagtggctgcatattatgaaaaggtcatcatgagatagcaatgaagataattctagggtccttttgagcttatgatttccacaagacaatgtattatacattccacctacctctgtggctgtgaggggagtacacaagttgctgtytagaattcatctatccaggttcggattatcagtgcatggtttcttcattcttgagctcctggggatttagaaaccttagataactaaaacttgtactccataaatacactcctatttgtcagcagtgcatatctttaaatattcaaatcatcattcttagcttataaatagagactctccaaaattacctgttggaaattcattatctaggaagatatgattttctatgatgcatgctttt

SEQ ID NO: 880686 - DNA, 604 bp, Homo sapiens
aaattcctggacacatacaccctcccaagactaaaccaggaagaagttgaattcccaaatagaccaaaaacaggttctgaaagtaaggcagtaataaatagcctaccaaccaaaagaagcccaggaccagatggaattacagctgaattctcctagagatacaraggggagctggtaccatttcttctgaaatgattccaaacaattgaaaaggagggacttctccctaactcattttatggggccagcattatcctgacatcaaaacctaccagagatacaacaaaaaaaaagaaaacttcaggtcaatatcctggatgaacactgatgcaaaaatcctcaataaaatactggcaaaccaaaggcagcagcacatcaaaaagcttatccaccaggatcaagtcggctttatccctgggatgcaaggtgaaatcaacatacacaaatcaataaatgtaattcatcacataaaaagaactaaagacaaaaactatgtgattatctcaatagacgcagaaaaagcttttgataaaattcagcatccctttacgttaaaaactctcaataaactaggtgttaatgtaacatatctcaaaatcataag

SEQ ID NO: 880687 - DNA, 629 bp, Homo sapiens
tgaagagaataaacctggaggcatcacgttacctgactttaaactatactacaaggctacagtaaccaaacagcatggcacacacagacacatagactaatggaacagtttagagatctcagaaataagactgcacatctacaaccacctgatcttcgacaaacctgacaaaaagatgcaatggggaaaggattccctaattaataaatggtgttgggaaaactggctagccatatacagaaaatggaaactggaccccgtacttacmccttatacaaaaattaactcaagatggattaaagatataaatgtgctggacgcagtggctcacacctgtaatctcagcactttgggaggcagaggtgggtggatcacctgaggtcaggagtttgagaccagcctggctaacatggcaaaaccctgtctctactaaaagtacaaaaattagctgagtgtggtggcacatgcctgtattcccagtttcttgggaggctgaggcaggagaatcacttgaacccaagagacagaggttgcagtgagccaagatcacgcactgcattccagcctgggtgatagagggatactctgtctcaaaaaaaaaaaaaaaaaaagaaaagaaaaaagaaaaa

SEQ ID NO: 880688 - DNA, 629 bp, Homo sapiens
tgaagagaataaacctggaggcatcacgttacctgactttaaactatactacaaggctacagtaaccaaacagcatggcacacacagacacatagactaatggaacagtttagagatctcagaaataagactgcacatctacaaccacctgatcttcgacaaacctgacaaaaagatgcaatggggaaaggattccctaattaataaatggtgttgggaaaactggctagccatatacagaaaatggaaactggaccccgtacttacaccttatacaaaaattaactcaagatggattaaagatataaatgtgctggacgcagtggctcacacctgtaatctcagcactttgggaggcagaggtgggtggatcacctgaggtcaggagtttgagaccagcctggctaacatggcaaaaccctgtctytactaaaagtacaaaaattagctgagtgtggtggcacatgcctgtattcccagtttcttgggaggctgaggcaggagaatcacttgaacccaagagacagaggttgcagtgagccaagatcacgcactgcattccagcctgggtgatagagggatactctgtctcaaaaaaaaaaaaaaaaaaagaaaagaaaaaagaaaaa

SEQ ID NO: 880689 - DNA, 665 bp, Homo sapiens
ttattattttctctttgttcttctgggcttttgtttgtttattttgttcctctgtttcactttcctggccatcctgtgtgttactggaatattttttataattccattttgatttatctataatgtatctttttgaagagtttttttactggttgctgtacatattacattttacatacataacttttgatctacctatcagtgttgacattttaccagttgaactaggtatagaaaacttacctatattaggtttctttattagtctatctttatacttgtcttaaatatattgtctatattcattgagaaccatatcggtaagattataagttttgcttcaattgttgaacataattcaraacactcaagaggagaaggacaatccattacatttacccatattttaactcttttcattgttatttctttatttctaatgtttcaagtttccttctttttatttttttttagacgaagtcttgctctgtcatacaggctggagtgtagtggcatgatcttggctcactgcaatctccgcctcctgggttcaagcgattctcctgcctcagcctcctgagtagctgggactacaggctcatgccaccatgcccacctactttttgtacttttagtagagatcaggtttcgccatgttggccagg

SEQ ID NO: 880690 - DNA, 665 bp, Homo sapiens
ttattattttctctttgttcttctgggcttttgtttgtttattttgttcctctgtttcactttcctggccatcctgtgtgttactggaatattttttataattccattttgatttatctataatgtatctttttgaagagtttttttactggttgctgtacatattacattttacatacataacttttgatctacctatcagtgttgacattttaccagttgaactaggtatagaaaacttacctatattaggtttctttattagtctatctttatacttgtcttaaatatattgtctatattcattgagaaccatatcggtaagattataagttttgcttcaattgttgaacataattcagaacactcaagaggagaaggacaatccattayatttacccatattttaactcttttcattgttatttctttatttctaatgtttcaagtttccttctttttatttttttttagacgaagtcttgctctgtcatacaggctggagtgtagtggcatgatcttggctcactgcaatctccgcctcctgggttcaagcgattctcctgcctcagcctcctgagtagctgggactacaggctcatgccaccatgcccacctactttttgtacttttagtagagatcaggtttcgccatgttggccagg

SEQ ID NO: 880691 - DNA, 585 bp, Homo sapiens
acttggcaatgtgggctcttttttggttccatatgaactttaaagtagttttttcgaattctatgaagaaagtcattggtagcttgatgcggatggcattgaatctataaattaccttgggcagtatggccattttcacaatattgattcttcctatccatgagcatggaacgttcttccatttatttgtgtcctcttttatttcactgagcagtggtttgtagttmtctttgaagaggtccttcacatgccctgtaagttgtattgctaggcattttattctctttgaagcaattgtgaatgggagttccctcatgatttggctccctgtttgtctgttattggtatataggaatgcttgtgatttttgcacattgattttgtatcctgagactttgctgaagttgctcatcagcttaaggagattttgggctgagacgatggggttttctaaatatacagtcatgtcatctgcaaacagggacaatttgactgcctcttttcctaattcaataccctttatttctttctcttgccttattgcagtggccagaacttccaatactatgttgaataggagtggtg

SEQ ID NO: 880692 - DNA, 682 bp, Homo sapiens
ttaaataagaaatgcattgtaaaaaatagaatccatagtttataagcttacaacttgaatttttttaaatgtgagatatactatttattaatcatgcacaaaaacaaagactatgacatttgagtggtgaaaaagtatttagtcaaaaaatttgaatgttacctatgtataagtctaatctataagacttcataatgatcaaaccttgaaaaataaaacatactaaatggtatgcttcttgagaaatatcactacttgttctttatttgccctgtgtattagtcttcatgctgctgataaagacatacctgagacagagtaatttaaaaaaaaacaaaactaaaagtttaatggactcccagttctatgtcgctggggaggcctcacaatcaaggcagaaggcaaaagacatgtcttacatagcaccagacaagagagaaagagagccaagtgaaaggggtttcctctataaaactatcagatctcatgagacttatttaccaccatgagaacactatggggaaaactccttccatgattcarttgtctcccaccaggtccctctcacaacatgtgagaatagtggcagctacaattcaagctgggatttggatggggacacagacaagacatatcattttgcccctggcccctcccaaatttcgtatctttacatttcaaa

SEQ ID NO: 880693 - DNA, 646 bp, Homo sapiens
acatatttctgactcctttttggtaccatcctagagctgattttgagaaagcaacttggtacagtacacataagtttatatatattacataatgtttgtagtaaactgtgttagagcacggaagtagaggttgaatgcaaaatgaaagtaattattttatgttcacccttaggtttgaatacaagttattttgttcacttttctctatggcccatatatttgaaygtaatgagcactataaaatacatccattcttaaggaccagttcaataggggataattttctgagaacttcagccaaagggagttcttaaatacaaagtgatatattggtttatgaaatctgagagtttcgtgggtttttagatacccaaattgtttctaaggaactaaaattgtcttttcaatgaactactttattgacttgatcttcataacttattagacttattttccttgagagaaaaaagaaagagcttgctcacacatttttctcttctcagatttaacagctctaattaggctaataatctctctttatgggaattgcaaagaaaatggggacaatgcaactccaaagaagtattattaaaatgtcagcctcaaaaaaagccatgtattttaaagcattcagtttgctcgtttc

SEQ ID NO: 880694 - DNA, 640 bp, Homo sapiens
attaactcatctaagtttttgagacttacagatttcactaatttggagagaaaaatggatcctgaaaatcatctaatttctccaaatccattctgtgcaacactagtctcatgagttgcgttttgcaaaacaaatgttttcctgatcagrtaagtttgggaagaatgacatattctcctcttggaattttcaagcacactaaaggtgctgagaagtccagtaatgaagaaacctgccttaacttgttctgttacacacagcatttccaaaacctactcaaataatcttttctacacccaccccaaacaccttttaacatttggctgaatacttccaagaaaactgatgtggtccaaatttcccattatatggatttttaaaactagactctaagagaggtgaatttaccccagattacacagctgttaaagacagaagtatgtgtggcatcacccttgattccatctccaaagacaaatatccctaaaggacttcagctctctctccctaagcccatgtgtagtctcagaatcttgtacaacacagtcaccccatcaacagaagttggcatgtgagagtaaatttacttgtcattcctaaactggcttccacgtgtttggactctgggtttctaaagtaa

SEQ ID NO: 880695 - DNA, 586 bp, Homo sapiens
actcattctatgaacccagcatcattctgacaccacaacctggcaaagacacaaccaaaaaagaaaacttcagacaatattcctgatgaacatcgatgcaaaaatcttcaacaaaatactaacaaacctaatccagcagcacatcaaaaagttaacccaccacaatcaaataggctttattcctggatgcaaagttggttcaacatacgcaaatcaataaatgcaatttcccacataaacagaattaaaaatgaaaactgcataattatctcaatagatgcagaraagacttttgataaaattcaacagcccttcatattaaaaaaccctcaccaaattagacatcaaaggaacatacttcaaaatagtaagagccatctgtgacaaacccacagccaacatcatactgaatgggcaaaagctgtaagcattttctcttgagaactggaacaagacaaggatgtccactctcaccactcctattcagcataatactggaaatcctagccagtgcaatcaggcaagagaaagaaataaaaggcatctaaataggaagaaaggaagtcaaggtttctctcttcacaaa

SEQ ID NO: 880696 - DNA, 603 bp, Homo sapiens
aagatgtggaagtgactttagtactggttaacagtcagggattggaatggtttggaggactcagaagaagactagaaaatgtaagaaaatttggaacttcctagagacttactgaatggctttgaccaaaatgctgataatgttatggacaatgaaatctaggctgttgtggtctcagatggagatgaggaaattgttgtgaactggagtaaaggtgactcttgctatgttttaacaaagagactggcagcattttgccattttgcctctactcyagagatatgtggaactttgaacttgaaggagatgatttagggtatctggtagaagacatttctaagcagcaaagcattcaagaggtgacttgggtgctgttaaaaaccttcagttttaaaagggaaagaacataaaaattctgaaaatttgcagcctgacaatgcactagaaaagaaaaacctattttctgaggagaaattcaagctgcctgcagaaatttgcataagtaacgaggagccaaatgttaatggtcaagacaatgggaaaaatgtctccagggcatgtcagagaccttcatggcagcctctcccatcacaggcctgaagg

SEQ ID NO: 880697 - DNA, 603 bp, Homo sapiens
aagatgtggaagtgactttagtactggttaacagtcagggattggaatggtttggaggactcagaagaagactagaaaatgtaagaaaatttggaacttcctagagacttactgaatggctttgaccaaaatgctgataatgttatggacaatgaaatctaggctgttgtggtctcagatggagatgaggaaattgttgtgaactggagtaaaggtgactcttgctatgttttaacaaagagactggcagcattttgccattttgcctctactccagagatatgtggaactttgaacttgaaggagatgatttagggtatctggtagaagacatttctaagcagcaaagcattcaagaggtgacttgggtgctgttaaaaaccttcagttttaaaagggaaagaacataaaaattctgaaaatttgcagcctgacaatgcactagaaaagaamaacctattttctgaggagaaattcaagctgcctgcagaaatttgcataagtaacgaggagccaaatgttaatggtcaagacaatgggaaaaatgtctccagggcatgtcagagaccttcatggcagcctctcccatcacaggcctgaagg

SEQ ID NO: 880698 - DNA, 621 bp, Homo sapiens
tctgattgcttaactcatgtttatgccttacctccctaacagggccaggaacaaagtctaatttccttcacgtgccttagaagtttttcttgtactctataatatttgtttattgaagtcataacaaatactctctttttttaatggaagaagaggctttttcttaatggaaaacatttggtaggttctggacactgtgaaggtgtatgcaagtactacaaatgctatccacatgctgacagattaacaatgcttttaaaagtcaccattaaggatgcaattcaagtctacttaccgttaagtttcaatcccccaccaatttcyttttccagtggccattctgttctcaattacattgtctctataatactatttaactttaaccattagagaacaggttaaaatggatccataactaaattgatctcaaaaagctattaatgctgatgtttattacaatgctttctatgttaatatatattaaatgtgttcatcgcctgtctgaaacattattccactgtattaaacatacatgtagacacatgtatatcttacatgcataaatatttaattttatatacatgtgtaaatagaaagctatttgcttctaatatgttgtgg

SEQ ID NO: 880699 - DNA, 622 bp, Homo sapiens
ggcaaaaactggaagcatgccctttgaaaactggcacaagacagggatgccctctctcaccactcctattcaacatagcattggaagttctggccagggaaatcaggcaagagaaagaaataaagggtattcagttaggaaaygaggaagtcaaattgtctctgtttgcagatgacatgattgtatatttagaaaaccccatcatctcagccccaaatctacttaaggggataagcaacttcagcaaagtctcaggatacaaaatcaatgtgcaaaaaccacaagcattcctatacaccaataacagacaaacagagagccaaatcatgagtgaactcccaccattcacaattgcttcaaagagaataaaatacctcggaatccaacttacaaggcatgtgaaggaactcttcaaggagaactacaaaccactgctcaatgaaataaaagaggacacaaacaaacggaagaacattccatgttcatggataggaagaatcaataccatgaaaatggccatactgcccaaggtaatttacagattcaatgccattcccatcaagctaccaatgactttcttcacagaactggaaaaaactactttaaagttcatatggagcca

SEQ ID NO: 880700 - DNA, 602 bp, Homo sapiens
ttcagtttcctgtctcaattacagccttccactagttttgatatctggagtatctctagtacacttctataaaaataaatttctgtctcacgcctgtaatcctaacaccttgggaggctgaggtgggcggatcacctaargtgaggagtttgagaccagcttggccaacatggtgaaaccccatctctactaaaaatacaaaaattagccaggcatggtcatgcacacctgttgtcccagctactcggaggctgaggcaggagaatcgctcgaactccggaggcggaggttgcggtgacccaagatcgcaccactgcactccagcctgagttacagagccagactccatctcaagtaaacaaacaaacaaacaaacaaacaaacaaatctctgtctccagtggaccactagaaacctgattgcacagggttgtgatggaaactggggtccaattggctctatataccatcttcagacagtcttcacatttcacccactgtgcctccctgcttgaactgtgctctccagtaccctgtctttagctgcctttttgggagttctacatgttgaatgttcttttttttctactaagtcagttatca

SEQ ID NO: 880701 - DNA, 602 bp, Homo sapiens
ttcagtttcctgtctcaattacagccttccactagttttgatatctggagtatctctagtacacttctataaaaataaatttctgtctcacgcctgtaatcctaacaccttgggaggctgaggtgggcggatcacctaaggtgaggagtttgagaccagcttggccaacatggtgaaaccccatctctactaaaaatacaaaaattagccaggcatggtcatgcacacctgttgtcccagctactcggaggctgargcaggagaatcgctcgaactccggaggcggaggttgcggtgacccaagatcgcaccactgcactccagcctgagttacagagccagactccatctcaagtaaacaaacaaacaaacaaacaaacaaacaaatctctgtctccagtggaccactagaaacctgattgcacagggttgtgatggaaactggggtccaattggctctatataccatcttcagacagtcttcacatttcacccactgtgcctccctgcttgaactgtgctctccagtaccctgtctttagctgcctttttgggagttctacatgttgaatgttcttttttttctactaagtcagttatca

SEQ ID NO: 880702 - DNA, 602 bp, Homo sapiens
ttcagtttcctgtctcaattacagccttccactagttttgatatctggagtatctctagtacacttctataaaaataaatttctgtctcacgcctgtaatcctaacaccttgggaggctgaggtgggcggatcacctaaggtgaggagtttgagaccagcttggccaacatggtgaaaccccatctctactaaaaatacaaaaattagccaggcatggtcatgcacacctgttgtcccagctactcggaggctgaggcaggagaatcgctcgaactccggaggcggargttgcggtgacccaagatcgcaccactgcactccagcctgagttacagagccagactccatctcaagtaaacaaacaaacaaacaaacaaacaaacaaatctctgtctccagtggaccactagaaacctgattgcacagggttgtgatggaaactggggtccaattggctctatataccatcttcagacagtcttcacatttcacccactgtgcctccctgcttgaactgtgctctccagtaccctgtctttagctgcctttttgggagttctacatgttgaatgttcttttttttctactaagtcagttatca

SEQ ID NO: 880703 - DNA, 614 bp, Homo sapiens
tttgggtgaggacacagccaagccatattatttcacccctggtccctccaaatcttatgttctcacattccaaagcacaattatgcccttccaacagtcccccaaagtctgaactcattccagcattaactcaaaagtccaagtccaaagtctcrtctgagacaaggcaagttccttccacctgtgagcatgtaaaatcaaaagcaagttagttatttcctagatacaatgggttacaggtattatataaatatacttattccaatgggagaaattggccaaagcaaatggggcagcaggccccatgcaagtctgaaatgcaataggactgtcgttaaaccttaaatttacaaaatgatctcatttgactccatgtctcacatccaggtcatgcttatgcatatggtgggctcccaaggccatggggagctgtgcctctgtggatttacagggtacaacccccctccaggctgctttcacaggctgacattgagtgtctgtggcttttccaggcactcagtgcaagctgtcagtgtatctaccattctggggtgtggaggacactggccttctcctcacagctccactaggcagtgccccagtagggattctgt

SEQ ID NO: 880704 - DNA, 591 bp, Homo sapiens
ccagtagggattctgtgtgagggacccaaccccacatttcccttcttcctgccctagcagatgttctccatgagggctctgcccctgcagctaacttctgcatggacatccaggcatttccatatatcctctgaaatctaggtggaggttcccaaacctcaattcttgacttctgtgcaccagcaggctcaacaccacgtggaagctgccaaggcttggggtttgcacactctgaagccatggcctgagctgtaccttggccccttttagccatggcttkgagtggctgggatgcagaatacaaagtcccaagggagccctggacctaacccaggaaaccatttttccttcctaggtctccaggcctgtgatgtgaggggctgctgtgaaggtttctgacatgccctggagacattttccccattgtcttggtgagtaacattcagctcctcattatttatgcaaatttctgcagcaggcttgaatttctccccagaaaatagggttttcttttcaatcatattgtcaagctgcaaattttttaaacatttgtgctctgcttcctcttgaatgctttgccacttaaaaatt

SEQ ID NO: 880705 - DNA, 600 bp, Homo sapiens
ccaataaacttttgaccactatatatttttctacctcctctttaaggacagtaacttttaaatatgccattttgaggttattttctagatcctgtaggcatgtttccttcttctttattcttttttcttttgtttcctctgactgtgtatttttgaatagcctattttcaagctcagcaattttttcttctgcttgatcaagtcttctattaaaggactctgacacattcttcagtatgccaattgtatctttcagctccagaatttctgcttgattattttgattttaatatctttcttaaatttgatataattatgaattccttccctgtgttatattgaatttctttgagtttcttcaacacagctattttaaatactctgtcttaaaggtcacatatctctgtctttccaggattggcccctggtgscttatttaattcatttggcaaagtcatgttttcctggatggtgttggtgctaatagatgttctttggtgtctgtgcattgaaaagttaggaatttattgtagccttcactgtctgggcttatgtatagcccttcttcctgggaaggatttacagacatatgaaaggact

SEQ ID NO: 880706 - DNA, 683 bp, Homo sapiens
aggactggctccttcccttcaaggcagtgggtccccttctggcccagggtgcttctagaaatgtcacccaggagctggggcctggaaagggggcctcaagactctgaacactgccttatccaagtgtgaccgagctggtagccaagatggaaaacaaagtcttttttttaacttttccctcttatctcctcaagtagaaggaagaagtctcttttggagttgcaagctgtggagcctggtgttgggggaggggtggcacaagcactgccttagccaccgcagctggtgtctcagtaagctgcatgccccacaagtccattggcactgagccctgttcagccctgggacatgytcaggagttacagtccttgtggcttagactgcctttcaaatttatttagggtcccagagcatttgagcctatggtgatgaggcttgtcagaactcagattcccactgccggggcaagcaattgtcctttgcctaggactggtttaaatactccatccataggtgggagtcagctgagttcagtctggttgtgctttctgctatgacagggcagcactgagttcaatgcagtgtctcgcaattgctacacttttctcccaaacactcagattctttttccataccacgtggccactgccatgggaggaggaagggatgatgtaggtgattca

SEQ ID NO: 880707 - DNA, 595 bp, Homo sapiens
agttgctcttctctgtatgtcagatctaacagtgggaaccccagtcactcaactacaaaatttaaatacaatgggaataattggatcctgaggtggcagggaccaagcggcagcactcaaccatcaaagacagagtaggcatagctaccttaatggacagcagaggcaaagtggcaatcagaatagttggactcatgtagaactcatgtagaactctggcattggctaattaatyacgttgtttctagaagtgaaattaataggaactactgcatttttacttaataaatataagcaggaaacttctaggtcgaatggacaaaagactaatttgaattataccaacagagcatcaaggcccctcaatcaatttccagatgtgagccagttaacaaacccagaactccttgaataaaggggaggctggatccccttgaggtaggacctcactacactactgacaatttatgatgttaatctttctcccatccttctccaagaagacctctggccttttgccagggtaactgtgtattggggaaagggagatgatcagacattttggggactaccggacacgggctctgagctgacg

SEQ ID NO: 880708 - DNA, 567 bp, Homo sapiens
caggcgcagtggctcacgcctgtaatcccagcactttgggaggccaaggtgggtggatcacctgaggtcaggagtttgagaccagcctagccaacatgatgaaaccccgtctctactaaaaatacaaaaaaaaattagccgtgcgtggtggcgggcacctgtaatctcagctaactgggagggtgaggcagaagaatcgcttgaacctgggaggcggaggttgcagtgagctgagattgcaccacttccctccagcctgggcaacagaccgagattctgtctcaaaaaaaaaaaaaaaaaaaaaaaaaaaagcaaaactaaaagactttcctctaagtaacaggacagtactctgccccttaataaagtggctgtgtgsccttttatttggttccagtgcttctctgaggtcataaggcaacctagtcttatggtaatctttggaaaataacttaagccgcaggttaagcagtcccacctatcaccaatggaagagaaatttcagcatggcttaagcttgaaagaggtccatttgtagaagaaagggaatgaaaaaggaattctaca

SEQ ID NO: 880709 - DNA, 658 bp, Homo sapiens
aatagtaacaaaaccctccatatacctgtagaagaatgatgggctggtgaatgagtggagaaaatgagagatgaaagaggagaaatcaccaagagtcattggatatcataatgtatgctaaacactgtcatgggtgtttgcgcaaatattatgcaattttgttacctcagtcataatactatgctgtcattatctgactctcaatagggtgcctgtttcagctatgaatcctggtacatcaagggtgctcaacgtgttaaattaaatattgtactcatttcacagttgagggaacaggactcagaacagcagacagaaattgccttttcttctgcttgtatctgaaaggatgtgttgttactaaacttmttacgaaagggagaattgggagaactgcgaaatgtttgtcagattttgggttggggagtggataaatagagaagccttcatagatacataaacttggatgtaatgtcaaactgtggattacattttcttcatatcccaaattatccactgaatacaaggtttagaaaagaaagcagaattctcctaaatccgtcttatacagaaactgactacttcattcccaatctgtttccctctcctttgtggcttacagtgaaaccacgtgaccacagttaggtgtgactgtttc

SEQ ID NO: 880710 - DNA, 725 bp, Homo sapiens
tgagtaattaatatggttatcccctagtatgtctgcacactgtattttaaatgataatctgtgattataagtagtgtctgattctcatgagtgtcagttaaaattattccataaaggttttatcaattaaaaaatatccaacctccattatcataaagttttgaaatcttttagggtctcttgaggtgaatgcaagtgccatatgtccacaaacaaacagayaggttcaattgtgatgaggctctggatgatggcagtgaactgtcagaagagagttttacttctggggatttttataggcagaaatgtggctgatgctatcacattaaaaatcatcactgggcaacacagaagggtactcttgactctttgcatttggatttcaacctcctggtcatgtgtattttataagcagaacctgataatattctgagcagggcagtgcctacaggggacagggacagagacaataaggcctccttgtcagggcatacacatgaaagggcagcaggagattctgtgcaggctggatgtgtttgagagtgcaggaaatgggttgtctgttaacatcttctgccaactcgttactcttatttccgtggagcactccaaggacacagggtagagcgaaggtcaaagtgaaatccaagagcaaatctgctcagtacataccatggtgaagagggagcctgaatgagcaaaggagatggatatttccaggaatc

SEQ ID NO: 880711 - DNA, 599 bp, Homo sapiens
ggtcgggcgtggtggctcatgcctgtaatcccagcactttgggaggctgaggcaggcggatcacaaggtcaggagttcaggaccagcctgaccaacatggtgaaaccccgtcacagggctgggcgcggtggctcacgcctgtaatcccagcactttgggaggccaaggtgggcagatcacaaggtcaggagatcgagaccatcctggctaacatggtgaaaccctgtctctactaaaaatacaaaaacttagccaggcgtggtggtgggcccctgtagycccagctacctgggaggctgaggcaggagaatggctagaacccgggaggcagagcttgcagtgagccgagattgcgccactgaactccagcctgggagacagcgagactccgtctcaaaaaaaaaaaaaaaaaaaaaaaagaaacccatctctactaaaaatataaaaattagctgggcatggtggtccatgcctataatcccggctactcaggaggctgaggcaggagaatcgcttgaacctgggaggcggaggttgcagtcaactgagatggtgccattgcactccagcctgggcaaaagagcgagactccatctcaa

SEQ ID NO: 880712 - DNA, 554 bp, Homo sapiens
  misc_feature 11: n = A,T,C or G
ctgtaatcacncaatacttgggaggctgagacaggagaatcgcttgaaccagggaggtggaggttacagtgagccgagattgcaccactgcactccagcctggggacagagcaagactccatctcaaaaaaaaaaaaaaagggaaaaaaagaaaagttttaccgagtctaacttgcaattgaaaactcagagtcttggccgggcatggtggctcactcctgtaatcccagcactttgggaggccgaggtgggtggatcacaaggtcaagagatcragaccatcctggccaacatggtgaaaccccgtctctactaaaaatacaacaattagctgggcgtggtggcacttgcctgtagtcccagctactcaggaggctgaggcaggagaatcacttgaaccagggaggcggaggttgcagtgagctgagatcgcgccactgcactcccgcctggcaacagagtgagactccgtctcaaaaaaaaaaaaaaaaaaacactaagaatcttgacatatcatgtatcaatcattttaagccacttcagtgggggtactt

SEQ ID NO: 880713 - DNA, 584 bp, Homo sapiens
cagagtctagtattgcaacccctgcttttttttggctttctattatttgcttgataaacattcctccatccatttgttttgagcctatgtgtgtctttgcacatgaggtggctctcctgaatatagcacacctatgggtcttgactctatccaatttgccagtctgtgtctgttaattggtgcatttaacccatgtacatttaacgttaatatcgwcatgtgtgaatttgatcctgtcattatgatgctaactggttattttgccaattagttgatgcagtttcttcatagtgtcgattgtctctacaatgtggtatgtttttgcagtggctggtactggtttttcctttccatatttagtgcttccttcaggagctcttgtaagacaggcctggtggtgacaaaatctttcagcatttgcttgtctgtaaaggatttcatttctcctttgcttatgaagcttagtttggctggatatgaaatactgggttgaaaattcttttctgtaagaatattgaatattgatccctactctcttctggcttgaagggtttctgccgagagatcagctgttagtctgatgg

SEQ ID NO: 880714 - DNA, 679 bp, Homo sapiens
agccccccatcccccaacaggccctggtgtatgatgtttccctccctgtgtccatgtgttctcattgttcaactcccatgtatgagtgagaacatgtggtgtttggtttcctgttcctgtattagcttgctgagaataatggtttccagcttcatccatgtccctgcatgggacatgaactcatcctttttwatggctgcatagtattccatggtgtatatgggccacattttctttatccagtctgtcattgacaggtatgggttggttccaagtcttcgctattgtgaatagtgctgtaataaacatatgtgtgcctgtgtctttgtagtagaatgatttaaaatcctttgggtatatgcccagtaatgggattgctgggtcaaatggtatttctggttctagacacttaaggaatcgccactcagtcttccacagtggttgaactaatttacactcccaccaacagtgtaaaagcgtttatatttctagacatcctctccagcatctgttgtttcctgactttttcatgatcgccattctaactggcctgagatggtatctcattgtggttttgatttgcatttctttaatgaccactgatgatgagcttcttttcatatgttttttggccacataaatgtcttctttagagaagtgtttgttcatatccttcacc

SEQ ID NO: 880715 - DNA, 610 bp, Homo sapiens
atttttcaatctcaaataactttttgcattctgcatactctttccaaaatatacaaaggcattgcctatttagtgtgacatgtggaagagctgtcttaattgcatttcacactttcttcacagattttttttagaaatgctaaaatctaaagaatttaccaaatgtcaaaagaataacacctcccttcctattcccaatgttgtactttctttaactttcaaacaagacccaaaagcttcatcacatctttccactcaagccagaacaagagcctgaaagagttttagtcactctgcttctactcctttattcacattactggctgcctatactattgccctctccaccatccagcytagatctgattccaccaaataagcctttctttattggcacaacttatcctcatcactcttgtgcttcccaagttcctctcctccaccctccttacacaatttgtgttccattgttcactgcttgaagatttttttgacttggtattagttatatgtgtttccatgagacaaaactacgtttgctcatttgtttctattcacagatcacaacacgtgaagtggctggcacatcactgaaaaactactgaagttg

SEQ ID NO: 880716 - DNA, 718 bp, Homo sapiens
cccacaacccatggggattatgggagctataattcaagatgagatttgggtggggacacagccaaaccatatcattccactttggtcgctcccaaatctcatgtcctcacatttcaaaaccaatcataccttcccaacagtcccccaaagtctcaactcatttcactattaactcaaaagtccacagtccaaagtctcatctgaggccgggcatggtggctcacacctgttatctcagcactttgggaggccaaggcaggcagatcagctgaggtcaggagttcaagaccagctttcccaaaataataaaaccctgtctatactaaaaatacaaaaattaggcaggcatggtggcacatgcctgtagtctcaactactcgggaggctgaggcacaagaattggttgaacctgggaagcagaggttgcagtgagccaagattgcaccactccaycccagcctgggtgacagagtgagattctgtctccaaaaaaaaaaaaaaatcaacaacaaaataaagtctcatctgagacaaggcaagtccctcccacctatgggcctgtaaaatcaaaagcaagtttagttatttcatagatacagtgggatccagggattgggtaaatacatccattctaaatggaagaaattggccaaaatgaaggggctgcaggctccgtgcaagtcctaaatccagtggggcagtcaaatcttaaagctcc

SEQ ID NO: 880717 - DNA, 626 bp, Homo sapiens
cctgcagaaccgtgtgccaaaataaaacctcttttctttataaattaaagcagcatgggactggtataaggatgcacaatagaccaataggaataccagtcaggtattcctttatagcaatgcaaaagtggcctaatgcagtgtcaaaaaaaaaataaaatacttagtaatacatttaacaaaaggacaaacttttatactctgaaaattacaaaacatgttgaaagaagatttaatgaaaagaaatcccatgtttatgaaccagaaaactaagtattaagatggcaatatttcccaagttgatctatagaattaacgcagtccatctcaaaatccctagctggcttctttgcagaaaatgaccagctgatgatataattcatctggaaattaaaggcggcccagaakagccaaaacaaacttgacaaagaacaatgtcggaggactcatgcttcctgatttcaaaacttattatactgctacagtaattaaagctgcatgggactggtacaagaatgcatataaaccaacaggataccataggatagaatagcccagaaataaacctttatgtatatagtcaattttcaacaagagtgccaagagtactcaatgagaaaaagaca

SEQ ID NO: 880718 - DNA, 576 bp, Homo sapiens
gagaactccgagccctggtcattgagatggtgttggccacagacatgtcctgccatttccagcaagtgaagaccatgaagacagccttgcaacagctggagaggtggcatctggtggggtgtggctggggccaggccagagggagggktgtgtgaactgggggggtatacacaagggtagttggtgtgccaggtctttacctcgctgtagagactccactggcttcaggtatcagactgcatctctatgtgagagagagagagagagagagagagagtgtgtgtgtgtgtgtgtgtgtgtgtgtgtgtgtgtgtgtccttacgtttactcacagccttggcagctgatccactggagagtgctttgggctgggagtctaagatgggggttctcatcgtagctctgggacaggcttactctggaatgttggaaaattcattcaacccttctgccccagttttattacctctgaaatggtgaaaatgatacgcctccccccacaacagcttgcccctagttcctagtctcatagggctattgggagagtcatacgaggtttaaaaaaatgcatagaac

SEQ ID NO: 880719 - DNA, 576 bp, Homo sapiens
gagaactccgagccctggtcattgagatggtgttggccacagacatgtcctgccatttccagcaagtgaagaccatgaagacagccttgcaacagctggagaggtggcatctggtggggtgtggctggggccaggccagagggagggttgtgtgaactgggggggtatacacaagggtagttggtgtgccaggtctttacctcgctgtagagactccactggcttcaggtatcagactgcatctctatgtgagagagagagagagagagagagagagtgtgtgtgtgtgtgtgtgtgtgtgtgtgtgtgtgtgtgtccttacgtttactcacagccttggcagctgatccactggagagtgctttgggctgggartctaagatgggggttctcatcgtagctctgggacaggcttactctggaatgttggaaaattcattcaacccttctgccccagttttattacctctgaaatggtgaaaatgatacgcctccccccacaacagcttgcccctagttcctagtctcatagggctattgggagagtcatacgaggtttaaaaaaatgcatagaac

SEQ ID NO: 880720 - DNA, 720 bp, Homo sapiens
agaggaaggatctagcagcaatatttgctgttctacagcctccgctggtgatacccaggcaaacagggtctggagtggacctccagcaaactccaacagacctgcagctgagagacctgactgtgagacggaaaactaacaaacrgaaaggaatagcatcaacatcaacaaaaaggacatccacaccaaaaccccatctgtaggtcaccaccaacaaagaccaaaggtagataaaaccacaaaggtggggagaaaccagagcagaaaagctgaaaattctaaaaactggagcacctcttctcctccaaaggatcgcaactccttgccagcaatggaacaaagcgggatggagaatgactttgacgagctgacagaagtaggcttcagaaggtcggtaataacaaacttctccaagctaaaggaggatgtttgaacccattgcaaggaagctaaaaaccttgaaaaaagattagacgaatggcgaactagaataaacagtgaagagaagaccttaaatgacctgatggagctgaaaaccaaggcacaagaactacgtgaagaattcacaagcttcagtagccgattcaatctagtggaagaaagggtatcagtggttgaagatcaaattaatgaaataaagtgagaagagaagtttagagaaaagagtaaaaagaaatgaacaaagcctccaagacatatgggactatgtgaaaagaccaa

SEQ ID NO: 880721 - DNA, 598 bp, Homo sapiens
gcactgtggctcatgcctgtaatcccagcactttgggaagctgaggcaggcagatcatttgaggtcaggagtttgagaccagcctggccaacatggtgaaaccctgtctctactgcaaatgcaaaaatcagctgggcgtgatggcacacatctgtartccaagctacttggaaggctgaggcaggagaatcactttaacctgggaggcgaggttgcagtgagctgagatcatgccactgcactccagcctgggccacagaggaagactccatctcaaaaaaaagcatttttttaaatttagcccagtttatacagaacattatcatttcaatgtgtaaccaatgtaaaaattattaatgagatattttatatcctcttttatactaagtctttgaaattcggtgtctacttttttaaacagctttattattgagatataatttacataccataacattcgcttattttaaatgtgcaattcagtgatttttagtaaacttggagttgtgtaaccatcaccacaatctaatttcagaacatttccaaccacctgaaagaaaaccttctgcccttcttacccagagcccccaggcaacca

SEQ ID NO: 880722 - DNA, 600 bp, Homo sapiens
  misc_feature 300: n = A,T,C or G
atctgactgttacgggcttaagttaggcaacatactcatttcataactaatcattatggctaagggcacataatgagctgattgtccaggactaggtcacatgatgaccctaatctaaggataagatcggttctaccatattacatggatggagaaaatttgcaatattgtcaccaggagaagagtacccaacrcatatgacacagaagaagagcattgggtgagaactctagggcctgattaacatcttggttctgctgggttactcagttttgctcctgaagcttgctcttgacccanaatgacaagagcattgttgtgtcattttactatcagggtcatcgtgatatttagctaactctgaccatgttctttacagaggcttgagaatgagtctgattggttcagtctcaggtcgtttttatcaagtctagtccttggccagcctgtggaatagatgctcttgggtcatggcccacccccaatccaataacctatggctagggagggaccagtcatcattatggctcatgagtgagcagagagcataaatgtgaagagggaggcagagaaatggagccagcaagacaaaaagcagaa

SEQ ID NO: 880723 - DNA, 627 bp, Homo sapiens
cactatggaatactatgcagccataaaaaaggatgagttcatgtcctttgcaggggcatagatgaagctggaaaccatcattctgatcaaactatcacaaggatagaaaaccaaacaccgcatgttctcattcataggtgagaaytgaacaatgagaacacttggacacagggcggggaacatcacacaccggggcctgtcatggagtgggggcctgggggagggatagcattaggagaaatacctaatgtaaatgacaagttaatgggtgcagcaaaccaacatgatacatgtatacctgtgtaacaaacctgcattttgtgcacatgtaccctagaacttaaagtataataaaaataaatacataaaaaaataaaagagctggaaatgtagcaacttctctcaacattgagagaaatagtttttaagtttaccaatttattacactattaataggaattatactgaccatatgatagtgatgagatgtgaaatcttaagggtagagtagagagtagcatgtttcaccatccagattagaatttgccttgggggtctcaggatgcccctttcagccacagctctttaaaatttaatgttcctcctgagtataccttctgcacctta

SEQ ID NO: 880724 - DNA, 550 bp, Homo sapiens
gaagagagagagggtgaggggggaagtgccacacctttaaaccatcagatctcatgagaactcactcactatcacaataacaggatgggggacacaaccgccatgattcaattatctccactgggtccgtctcacaacacatggggattatgggaactacaattcaagatgagatttgggtggggacacagccataccatgtcaatggaccaaaacacagacctggccatccctccccactaatggcatagcaagatctgaacactccttgstatcttccctgtggagagtaaaggagtgagaaaaatctaaaatctgacttggtttaacctgaagtcaatgagaagaataaaaatcactaaagcaattgagtttacttggaagtgacaagattaaatgttctgcttcagagagtttgggagactcaagacagaaattcagttcagtgggaacacgcacacacacacacacacacacacgcacacacaaagctaatatgttttcacccttgagaagatgctgggaaattaataattactacattggcaaa

SEQ ID NO: 880725 - DNA, 571 bp, Homo sapiens
  misc_feature 550: n = A,T,C or G
tcttaatgagcgcgggtctttgactgcaatcagttttagtctaggtactcctttgcattcctgaagacagttctgtttcagctcaggatgcatctggctgcaagtaacagccgacaaatgagtgtttgttcctaccgcattacaagaagtccagaggttagggacactagttcagctaccagggacccaggtcttttctttctttttaggtgccctgaacagaggacacgcatgcctcagttctgagagaagttcatatgagcaccttcttcattcacmctttcatttgaaaggcatataccaaatgtctctcatataccaaacaatgggctttgggacaaagaagaaaaagacaccacttagtatgtgggtcagattaacttacacagacaagtaatctctcaatttgtaataccatgcattgactactattcatttcaaccctggctttctacagaaagaatctgaggtactaatgtattatgatatgtattataagaaaggtaagcacaggagttgctggagcccagagaaagggcccctagcctgngggtgagaaaggggaggaggt

SEQ ID NO: 880726 - DNA, 583 bp, Homo sapiens
ggaggcagccaggagtagaataggtacaactgagtttgactaagacttttgcctctacttggtaaaactctgtgttcttggctgctcccactcttgaggttaaaagaatgcaagccacttcacatttctgccagtttgcttttgttttattcttctctctccacatggtttggctctctctctctctctagaagtagttctggctgatctacaaaatttctccagaatttgatatttaatagtttgatgtccttcccatcttttaaatacttgatttcccctctctggtcaatatttgcctgtcaatagtagatcatatcttataaaactgggtcttatggtgaaagagaataaaagagactttggtgaaagagtgggtgatttaraaagtgtctgtgcttgggtcaatggtagagattttaatcaccacgtggtgaaagttgaaggtatcttgggctcactgttcagggtagcagagacggctccctggcctgcaatgtctgttcagggtacatagcaatgcctaactggggtctttaccagaatcaacctgcaaaccacagaccaggctccatccctgaaa

SEQ ID NO: 880727 - DNA, 657 bp, Homo sapiens; identical to SEQ ID NO: 875282

SEQ ID NO: 880728 - DNA, 652 bp, Homo sapiens
ttatgtcagagaccatatcagtgctaagaaaatggtgttgaacccacatagacaagtcttcgtgcctgtgaagtatttccagttgtggattttgacatgtatgctggtaattacaatattgctttagtcagtttgggctgctatgacaaatgccatagactaggtggcttaaataacacatatttctgctctggaggctggaagtccaagactagggtaccaatatggtagagttcttagtgatggctctcttcctggttatgtcctcacatggccagcctttggtgcatgcaagcagaaagagatcttgtgtcttgtccttttttttttttttttgtaatggcattaatcccatcatggagctccacctttatgaccttatcgaaacctaattactccccaaagcttatccttcaaatactatcacattatgggttagggtttaacatgaactggggagtgggactcataaacacacagtccatagcraatatagtgtggtcagtgctgtgataggaatgccagaaagatacagtggaaactgggttagaaggactgcttaaccaatagtgggaggacagtgtgaagaacctggagaaagtaatatttaagctgaagcctgaacttggagcagaaattaggttaaaagaat

SEQ ID NO: 880729 - DNA, 626 bp, Homo sapiens
aagcgacatacaaaaatcagtgtttctttaacaaccaactatgtgaaaaagaaattaaggaatcaatcccattcacaatagcatcaaaaacaatacttaggaataaaatttaaccaaggaggtaaaaaaattatatactgaaaactataaaacaatgataataaacagcagacaataaaaatatatggaaaattatttgtgttcatgaattagaagaattaatattgttaaaaggtccatacagcccaaggtgatctacagattcagtgcaatccctatcaaaataccaatgttatttttcacagaaatagagaaaacaattgtaagatttgtatggaaccacaaaagactgcaaatagccaaagccatcttgagcaaaaagaacaaagctagaggcacagcaccacccaacttcaaattttattacraaactatagtaatcaaaatggtactagcatgaaaacacacattgacctatggaacagaatagcctagaaatgaacccatgcatttatggtcaattgatttttgacaaaggtgctaggaacacacaatggagaaaggacagcctcttgcataaatggtgctgggaaaacaggatatctgcatatagaagaataaaatta

SEQ ID NO: 880730 - DNA, 599 bp, Homo sapiens
tcacaagtgtaatatgatcaaaccggtttaatgtcatcaaagaactgtggtttcccaaatctggactatttttcacaccttttcaaagtcatttggggagtagctcttgaaaaacatttgcacaaagaaagtatactatatgccaacgcatgtggcatacaaatttaatagaaacactagaaaggctttgtagattaatgtcctttaaacatacttctaacaacacattagtaaattasatgttattaaggaaggaataatttgatatgtaatttcaatgcacatagaaagtgtgctaaatacaagtggatttaaagaaaccactaagcgaaataaaaagatgcaacctggtgagttgtatgatcttgggaaagtccctgtccctcatgtggacgtaaagattacctgatctatagctttacagagttgtaaagtgtaagaatggaagaaaatgcaaggaaaagtgctttgtaattgtatgttgctattgaccatattacctagaagcctacccacactgttttgcaaggacaagtgatgagtataaatgaataaacccattagtaatgcagttaacatggtagttttactattaccta

SEQ ID NO: 880731 - DNA, 621 bp, Homo sapiens
taagcttgttgcaaaccagaaacttcaaggatcccatgcaaacaatattactaccacttgcagcacgtactcatgcaggtatctaaagttagtactaagacgattaaaaacagccaatgctgctgtaattatattttctgaatccctagttgggacataagggccaatacattatagcacaatgaagctactgaaacagaatatttgacatcgaggctgtcttggaaaattgggaatataccaccttgcaataatagtaataataaaaaataacatttmttgaaaacttacattttgcaggagaatttcctaagtgctttacttgtattaatacatcaatcctcaatataaccctatgatgtgggtactactattgtccatattttacagagggaaaactgaggcactgagttgtcagtaacttgcctgagatcccacagctagtaactatgtaagtagagtcaaattgaagcttaggccatgctgaaccagaacccttgctcttaaccatcaatactctactacctctctcccattcttggcagcaaaatctctgttttaaccctcctaggaggatacttgaacttcaaatactatttccagaaatacaaatacatcaat

SEQ ID NO: 880732 - DNA, 623 bp, Homo sapiens
catgtttatcgatatctgtaacccatattttatttacctaataatgtatttagtcagatttgtgtccacttcagagtaatgagctcaatataatttcacccttagcgttttgctcagaaacaggtctcacaaatcaacttaacagcaacaaaaatagcagaaaaaaacccttgcatcacttcatcacgtcattcccaaactgtgtatctcagaatcttggatccaccatttctcacaatgcattcatgctttgctatagactgaattgagatcccccagattcgtatgttgaagacctaacttttccaatgtgatggtgtttgtagatggggcttttggaagggaattaggtttagatgaggtcatgaaggtggagccctcacgatgcgattagtgctcctaaaaaaaaagagacagcagaagcttgcctttgtctctctctctctccctctctctttctctctctcatgagagcacayggagaaggaagccatctgtaagccaggaaagagccctcatagaggaaccaaatggaccaacaccttgctcttagacttccagatgccagaattgtgagaaacaagttcctgctgctttaggctcccggtttatgatattttgct

SEQ ID NO: 880733 - DNA, 669 bp, Homo sapiens
cagaactacattcattcatcagttgctatcataggttggctatagatacaataatttgtcaaaaatcagcaaaagcattctataagaatatattggctatatggaatttaaaataaataatattgtttattttactattatttgtaaatgaatactacatatccttcatatcagtaaaattataaacttatgtatgtgcatatatatgtatacacacccacacacacacactttttttaagaaccagtggttaaactggctaggggaagtgtagaccctaatgttatccaccaattttgcaccagcactccacctgcttttcacacctgtggccacatagaggatctgttttgaccaaacccagagcttggttcattctgaattatgcttggtagatagggatcggctttacagccccattcaggagcagctacaaatgagcccaaaagcctcggctccaactagtgaaggttgatccagctactgctgcctctgaatatacaacctracagcagcaaaaccaaggtaagatcccaatatcatacttcctctgggaagccaactggacacatggtggtgagtttattgagccccatctttcctagaacagcccatagcttgttcttacaggaatgaacaactcttccatgtatgtgtttgcttttgtag

SEQ ID NO: 880734 - DNA, 670 bp, Homo sapiens
tgctgccatctgtgtaagatgtgagttgatctttcttgccttccaccataattgtgaggcttccccagccacatggaactgtaagtccattaaactatttttcctgtataaattacccggtgtcaggtatctctttatcaacagcrtgaaaacagactaatataccaacttatgatggtttgacttacaatttttttttactttatgatggtgtgaaatcaatatgcattcagtagaaactgcattaagtacccatacaaccattctatttttcactttcagtactgtattcaataagttacatgagatattaaaaactttattataaaatagtctttgtcttagataattttgcccaacagtaggctaatgtgagtgttctgagaatgtttaaggtaagctaggctaagctatcaagctttgtaggttaggcatattatgatattttcaatttatgataggtctattgggatataacctcattataacttcaggaacatctgtagtttttgcttcaggggaggcctttgtttcagaaaacagaacactcttggtatatttcaaaatgggtacctttctttctcccccttccgtagtacttggacatttgtctctaattttcccagtgagaaccttgtgggcttcccccaggaattttaactctcatgct

SEQ ID NO: 880735 - DNA, 680 bp, Homo sapiens
aacactgggtgcagtgttccaaacccatccctactctcctgacaattatttggaatccaggtcatctcctaagcacaggccaggagtggctgcgggaaggtattgctttgcttcatgaggacaacctcccgggtagaggttttggcatagggaagggaaggggtgggggctctttaaatcttgtttcccttagtacccacctgagtctgcacaatcctcactgtggcaaatgccccatattaaacctaattctacttaaccactatcrcctttagtattattgggctctttttgttgttacagtaggtcccttttgatcatcacgaatttcgggatttctgagcaaatccaattcactctccccaccacttgctgatactgaaggttttgttactaccctgtccccagcctttacccttccaaagctctctgtcagccaaagctcaccacctttcttggccttctccgatgtcccacacctccctccaccacagggttctatgcaccagcagccagaaccacatagagcataacataagaaccaggctgtgtgaggcgctcaatgagggtgtgcgactccaccccagacccgtcagggatccttcggggggcacttctgaaagcatcagctgtgactactcgcactttcaaaccacctctcatgggaggagagcacctcc

SEQ ID NO: 880736 - DNA, 638 bp, Homo sapiens
aacaaaaagtatagaaagacagagagacgttttccttacatcaattcaagccaatatcccatgacacacacacacacatgcacacatgcatgcacatataaatctgggcctgcaacatgtgatagcttttgtcatgtatcatatgacctgtttgtcaacagcttagttggtcacaaatggtgtccaggattattcaagggacatatgggggtcatacattcagactaatcctgggaatagtttattggtgatggcttccaaatgagcatctaaagtctgtgaaaagattaaatggaaatcctccaaccaaagcaggaaatgaagatttatgggaattattttgtactccaactacccaaagagcattctattagcaagttattgccaggctaatgcaaaagctgttatctatgacagcagcagctcttakaactttagcaagagcaactgtttacttcatcagaatagccaagaaaattctcgttatatttttgttgactgggccaatgttagaaggtctggcttactttaaggtgttcagattcatccaaagagcttagaaacttgggccaaaatctggtgtaagtgctattttcctgacatttcatccatttgctaacccagttctatcatctatt

SEQ ID NO: 880737 - DNA, 622 bp, Homo sapiens
ggacacctagaattaaccatgacaggaggtgacggcccctgccttgcttgcaggtcacccccacggagcagggcatgagggtcctgactcagctggtggccacctacccccagggctttaaggtctggatgggccccatcttccccgtcatccgtttttgccaccccaacatcatccggtctgtcatcaacgcctcaggtaccacctggaatacttggtggtgggtgctrtggtgcatttgaggcctgcaagtccctctatccccaagccgtgtgtggcccctgcagtactctggtctctcctttccttctctctcagccatcttcatctttctttcatgtattcactaattcccatctcagcatctcctctctccattgccatctgaccccctgtcctggtgttctgggctgccctggggccccaagagacctcaacccaaggccctgtcctggaggaacccccaagcttaaggaggtggatgtggacagagacatccccaacttcatggggtcaagaaagggccagagggagatggatgacagcccagagaagagcaagttctctgctggggcaggctggaagccttcctggaggaagagttactggagccatgtctgga

SEQ ID NO: 880738 - DNA, 622 bp, Homo sapiens
ggacacctagaattaaccatgacaggaggtgacggcccctgccttgcttgcaggtcacccccacggagcagggcatgagggtcctgactcagctggtggccacctacccccagggctttaaggtctggatgggccccatcttccccgtcatccgtttttgccaccccaacatcatccggtctgtcatcaacgcctcaggtaccacctggaatacttggtggtgggtgctatggtgcatttgaggcctgcaagtccctctatccccaagccgtgtgtggcccctgcagtactctggtctctcctttccttctytctcagccatcttcatctttctttcatgtattcactaattcccatctcagcatctcctctctccattgccatctgaccccctgtcctggtgttctgggctgccctggggccccaagagacctcaacccaaggccctgtcctggaggaacccccaagcttaaggaggtggatgtggacagagacatccccaacttcatggggtcaagaaagggccagagggagatggatgacagcccagagaagagcaagttctctgctggggcaggctggaagccttcctggaggaagagttactggagccatgtctgga

SEQ ID NO: 880739 - DNA, 622 bp, Homo sapiens
ggacacctagaattaaccatgacaggaggtgacggcccctgccttgcttgcaggtcacccccacggagcagggcatgagggtcctgactcagctggtggccacctacccccagggctttaaggtctggatgggccccatcttccccgtcatccgtttttgccaccccaacatcatccggtctgtcatcaacgcctcaggtaccacctggaatacttggtggtgggtgctatggtgcatttgaggcctgcaagtccctctatccccaagccgtgtgtggcccctgcagtactctggtctctcctttccttctctctcagccatcttcatctttctttcatgtattcactaattcccatctcagcatctcctctctccattgccatctgaccccctgtcctggtgttctgggctgccctggggccccaagagacctcaacccaaggccctrtcctggaggaacccccaagcttaaggaggtggatgtggacagagacatccccaacttcatggggtcaagaaagggccagagggagatggatgacagcccagagaagagcaagttctctgctggggcaggctggaagccttcctggaggaagagttactggagccatgtctgga

SEQ ID NO: 880740 - DNA, 623 bp, Homo sapiens
gtggatcacctgaggtcaggagttcgagaccagcctgaccaatatggtgaaaccccgtctctactaagaatacaaaaattagctggcatggtggtgtgcacctacagtcccagctactcgggaggctgagacaggagaattgctggaaccygggaggtggaggttgcagtgagctgagatcacgccactgcactccagcctgggcaatagagtgagactccgtcacaaaacaaaacaaaacactatgcgtttacagtgtcttttaaatatgatttcttttctacctgaggatttttctatgttctctaattgtggagatgccttcaggagcagaagtgaaagctgatgactaagccaggcttatcaagttgctggacatcttgtgatttcctgcacaagaactacagaaaaattagagaccagaggcatttgaggcaggatttctcactgagatgtttcttagcctctaccccatttccataacacattagcctctctcattccatcctttctggttcacctccctgtaagtaattgctgttctggacccttaattgccaactgcaagcctaggtagtaccatcaagcaatgagagcttgcattgtggagctttataactaaa

SEQ ID NO: 880741 - DNA, 623 bp, Homo sapiens
gtggatcacctgaggtcaggagttcgagaccagcctgaccaatatggtgaaaccccgtctctactaagaatacaaaaattagctggcatggtggtgtgcacctacagtcccagctactcgggaggctgagacaggagaattgctggaacctgggaggtggaggttgcagtgagctgagatcacgccactgcactccagcctgggcaatagagtgagactccgtcacaaaacaaaacaaaacactatgcgtttacagtgtcttttaaatatgatttcttttctacctgaggatttttctatgttctctaattgtggagatgccttcaggagcagaagtgaaagytgatgactaagccaggcttatcaagttgctggacatcttgtgatttcctgcacaagaactacagaaaaattagagaccagaggcatttgaggcaggatttctcactgagatgtttcttagcctctaccccatttccataacacattagcctctctcattccatcctttctggttcacctccctgtaagtaattgctgttctggacccttaattgccaactgcaagcctaggtagtaccatcaagcaatgagagcttgcattgtggagctttataactaaa

SEQ ID NO: 880742 - DNA, 644 bp, Homo sapiens
aggcgtataacattcatgaatccgtcgcgccaatttgatgccctattgagcacaagcagtgactgcttgacactttgcaccaattccctgctctacaaattagcaggaattgtcatggtcccaatttgaggcggttcccttcccggcgaggagctgttggcatcccttcacgccgccgttttcccacagagtcagtgcacttggccacgattccccacaaaggtttcagcaccatgaccaattggtcagctcctccgggcagccacacacagaccggccctagtccctccacgccgccgagagacacctaccagccggggctaatttctctttaagactcattcagggcttcgggcttttcacaagaccacatggggtgccctcttgtgtgggatgcctagggtcgcccagggggagggggattagatcctcccccaatcccaacctatttccagcctgatttccaaaccccttctcatactcctttcccaccctgtmttataaaataccgttgatcttgcaaaataagaagcagttagaagaaagcccataattgtgtcccagcctaaaacagcaacaccttaggcagcttccaccaggttttcttcctgtaacctcactgatgattcaaactatggctcaaa

SEQ ID NO: 880743 - DNA, 623 bp, Homo sapiens
tttggggaccatgactgagacaggagatgataggtggtgtggtacccatggtggatgaagaatggcagggctttttaaaagataggtaatttgagcatatttataatttgcatgaaaggactcaggaaaggattaaacagttataatataggggagaaagaaaggtacaagttcctgatcttagagaaatcagaaaagggggtgatcaagcatgcagattaaagggttggccttaaaacagggaagaatataaatatttctcttaratttagaagtttttttggtgaagacacaggcaggtggagacgaggtataaagtataaagaaaaacttgatggatttcatacctaatagacctaatattcacaatgaaacaggttaagccaaatgttggaaagaatagaatagatttgtgttgtaagcttcagaaaaaatggtgttaaaaaagacaaaattacaacaaatctaactttgcagatcttagttggcttttatttgtgactttagactcaattacagtccaagtcaaaagtagttcagaatgctctgccctaccacgtgtgcaggttatatttattgatagagaaaagaaagtgatatacagaaaatggaagtggggtata

SEQ ID NO: 880744 - DNA, 623 bp, Homo sapiens
tttggggaccatgactgagacaggagatgataggtggtgtggtacccatggtggatgaagaatggcagggctttttaaaagataggtaatttgagcatatttataatttgcatgaaaggactcaggaaaggattaaacagttataatataggggagaaagaaaggtacaagttcctgatcttagagaaatcagaaaagggggtgatcaagcatgcagattaaagggttggccttaaaacagggaagaatataaatatttctcttaaatttagaagtttttttggtgaagacacaggcaggtggagacgaggtataaagtataaagaaaaacytgatggatttcatacctaatagacctaatattcacaatgaaacaggttaagccaaatgttggaaagaatagaatagatttgtgttgtaagcttcagaaaaaatggtgttaaaaaagacaaaattacaacaaatctaactttgcagatcttagttggcttttatttgtgactttagactcaattacagtccaagtcaaaagtagttcagaatgctctgccctaccacgtgtgcaggttatatttattgatagagaaaagaaagtgatatacagaaaatggaagtggggtata

SEQ ID NO: 880745 - DNA, 636 bp, Homo sapiens
tgtctagtcaacaagaataagtgccatactccttagccaagcatttaaggttttacactcttaaatgtgcccacctttccagtcgggcctcccactcttaccctctttgttagcccgacttacctatttactttgcccaaaaacccaccttagatattcttccccctaagcctttgctcacgctatacctgccttgccctcgccracccctgtcatctttcaaaggctggctgaagttgctctttttataccaatactagctactgttattaagcatctgccatgtaccaggtgttctcctaggtactttatatatataatcttactgaatcccctctacttacctttcaaagtgggtaccattgctcccattctacaggtgggaaactggaggcttggagaggttaaattatttacccaaattcccatagggaataagtgccaaagttgggattctgaactcagggcctgcccgacttcagagtctatactttttctgacaccatgcttagtcatgaagactttcctgatgacttgtacccatggtggcttgccctcttttgaagagtacctgatgtctcttctgaatggctgatttgtcatttaatcaatgattacttacaatacaaattgtct

SEQ ID NO: 880746 - DNA, 636 bp, Homo sapiens
tgtctagtcaacaagaataagtgccatactccttagccaagcatttaaggttttacactcttaaatgtgcccacctttccagtcgggcctcccactcttaccctctttgttagcccgacttacctatttactttgcccaaaaacccaccttagatattcttccccctaagcctttgctcacgctatacctgccttgccctcgccaacccctgtcatctttcaaagrctggctgaagttgctctttttataccaatactagctactgttattaagcatctgccatgtaccaggtgttctcctaggtactttatatatataatcttactgaatcccctctacttacctttcaaagtgggtaccattgctcccattctacaggtgggaaactggaggcttggagaggttaaattatttacccaaattcccatagggaataagtgccaaagttgggattctgaactcagggcctgcccgacttcagagtctatactttttctgacaccatgcttagtcatgaagactttcctgatgacttgtacccatggtggcttgccctcttttgaagagtacctgatgtctcttctgaatggctgatttgtcatttaatcaatgattacttacaatacaaattgtct

SEQ ID NO: 880747 - DNA, 594 bp, Homo sapiens
gtcataaaatctgctgggaactatgctaaatatgttacatacattatctattttaaccttccaaaaaaagcctttgagataggttattattagctctattatatatgtgtgtgatatgtgtgtgtgtgtgtatgtgtgtgtgtatatatatatatatatttttttttttttttgagatggagtctcactctgtcgcccaggctggggtgcagtggcaccatctcrcctcactgcaacctccacctcccaggttcaagcaattctcctgcctcagcctcctgagtagctgggattacaggcacctgccaccacacccggataattttttgtatttttagtagagacagtgtttcaccatattggccaggctggtctcgactcctgaccttgtgatctgcctgccttggcctctcaaagtgctgggattacaggcagctctattatattttatagatgagaaaactgtgcctcagaaaggcaagcgagtgtgggagccagattccagcttggcagagccctaaagcccatgcttttctaggacgtcccgataagcataccctggagtctttttgccctatagggaggcccttctgt

SEQ ID NO: 880748 - DNA, 679 bp, Homo sapiens
tgatcaactggaagaaagggtatcagtgatggaagatgaaatgaatgaaatgaagtgagaagtttagagaaaaaagaataaaatgaaacaaacaaagcctccaagaaatatgggactatgtgaaaagaccaaatctacgtctgattggtgtacatgaaagtgacaaggagaatggaaccaaattggaaaacactctgcaggatattatccagaagaacgtccccaatctagcaaggcaaaccaacattcaaattcaggaaatacagagaatgccacaaagataccctcgagaagagcaactccaagacacataattgtcagatacaccaaagttgaaatgaagggaaaaatgttaagggcagccagagagaaaggtcggattacccacaaagggaagcccatcagactaacagctgatctctaggcagaaactctacaggccagaagagagyggggaccaatattcaacattcttaaagaaaagaattttcaacccagcatttcatatccagccaaactaagcttcataagtgaaggagaaataaaatcctttacagacaagcaaatgctgaccgattttgtcaccaccaggactgcccaaaaagagctcctgaaggaaacacttaacatggaaagaaacaaccggtatcagcgactgcaaaacatgccaaattgtaaa

SEQ ID NO: 880749 - DNA, 631 bp, Homo sapiens
gaaagaagctatatgtgaaactgctttgtgatgtgtgcattctgctcacagagtgacatatttattttgatttggcaggaaggaaacactcattttgtagaagctgcaaagggagatttaggagcccactaaagcctatagtgaaaaattaaatatcctgaaataaaaactagaaagaagctatctgtgaaactgttttatgatgtgtccattcagctcacagagttgaaccttacttttgattcagctgtttggaaacactatttttatagaatctgtgaagggaaatttcaaagtccactggggccagtagtgaaaaattgaatatccctggaaaaaaaaattgtaagaagctatctgtgaaactgctktgtgatgtgtacattcagatcacagagtgaaacctctctgttgattcagaagtttgaatacactctttttgtagaatctgcaaggggatatttcagggaacattgaggcctagtgtgaaaaaccaaatatatcctgaaataaaaactagaaagaagctatctttgaaactgttttgtgatgtgtgcattcagctcatggagtgaaaccttcctttgattcaacaagttggaaacactctttttgttgaatctacaaaggg

SEQ ID NO: 880750 - DNA, 653 bp, Homo sapiens
ccctttgcagattctacaaaaaaagttttcaaactgcttaatcaaaagaaaggtttaactctgtgagccaaatgtagacatcacaaagcagtttcacagataacttctttccagtttttatcacaggatattctgtttctcactatagaccttactgcactccgaaatgcttcttcatagattctacaaaaagagggttttaaaactggtgaatcaaaaggaacttttacacctttgagccaaatatggacatcataaagtagtttcacagataacttctttctaatttttatcacaggatattcagtttttcatgataggtcttcctacgyttcaaagtgtccatcagcaaatcctacaaaaagattgtttccaaactgctgaatcaaaagaaaggtttaagtctgtgagttgattctacaagaaacaaggcagtttcacagatagcttctttctagtttttaatgtgggacattgtgtttttcactataggccttactgtgcttcaaaatgttccttagcagattctacaaaaagagtgtttccaaactgctgaatccaaagaaaggtttaactctatgaactgaatccacacataacaaagcagtttcacagatagcttccttttagttttcatcgcatgatatttggtt

SEQ ID NO: 880751 - DNA, 671 bp, Homo sapiens
cttacaaaattgtaaggctgtaatctagcctttagaagaaaaatcttacatttctaaatacaataactatatatatatattgtaaatacggtataaaaccttggtatataaaataaaattggttataagttgttctattattcaggtaaaagttgaggaaaccggaaggaaatgctaataataacattgtgcctaaagtcgatgaaacatacaagacaaatattttaataaatgatataatttatatataacatatacatttgagcatgttattttattttatttattttatttatttattttttgagatggagtcttgctcttttgcccaggcttgtgtgcagtggcgcgatcttggctcactgcaacctctgcctcacaggttcaagcgattctctttcctcagcctcccgattagttatgattacaggcagatgccaccatgcccggctaattkttttttacttttagtagagttggggtttcattatgttggccaggctggtctcaaactcctgacctcatgatccacccgcctctgcctcccaaagtgctgggatttcattcgtgagccactgtgccaggccttgatcatgttattgtagaacttctaaaactaagattacagacaaattacagacatatgacaattcagaaagtgaaaacacagt

SEQ ID NO: 880752 - DNA, 592 bp, Homo sapiens
gaaacaagatatctgtaaaactgctttgctatgtgtggattcaccttacagagttaaaaagttcttttgattctgcaaacactcttcttgtggaatgtacaaaggacatttctgagcccatcaagaactatagtgaaaagcagattatcacataataaaaactagaaacaagctatctaggaaactgcttggcattgtgtgagttcatctaayggagttaaaattttctttgactcagccggttggaaactttttttagactctactaaaggatggccaggcacagtggctcacacctgtaattccagcactatgggatgctaaagtgggtggatcatgaggtcaggagatggggaccatcctggctaacacagtaaacgctgtctctactaaaaatacaaaaaaaaaaaaaaaaaaaaaaaggcagggcttggtggtgggtgcctgtagtcccaggtactcaggaggctgaggcaggaaaatgacgtgaatgcaggaggtggagcatgcagtgagcctagatcatgccactgtactccaacctgagtgacagattgagactccatctcaaaaaaaaaatctactaagggac

SEQ ID NO: 880753 - DNA, 656 bp, Homo sapiens
ctcacaaatatcccttcacagattatacaaaaacagggcttccaaactgctccatcaaaagaaaagattaactctgtgagatgaatgcacacatcacaaatcagtttctcagaaagcttctttctagttcttctctgagcataattcatttttccacataggcctcaatgcactcccaaatatatcttcacagattctacaaaaacagttttccaaactgctccataaaagaaaggktaaactctatgatatgaatgcactcatacaaagcagtttctcagaaagcttccatctagtttttatctgaagctatttcctttttcaccataggcatcaaagcactcctaaaaatgtctaagcggaacagtgtttccaaactgctcaatcaaaagaaatttttaacagtgagagttgattgcaaactactcaaaacagtttattagaaagcttcattctagtttttctctgaagatatttactttttcacaataggcctcaatatgttcccaaatatcccttcacagattctacaaaagcagtatttccaaactgctcaatcaaatgaaatgtttaaccctgtgagctgaatgcaaacatcacaaagcagttactcaaaaagcttctttctagtttttctccaaagatatttagttttt

SEQ ID NO: 880754 - DNA, 652 bp, Homo sapiens
tgtaatgtttgcattcatatcgcagtgttatacgtttcttttccttcagcagtttacaaacactgttgatgtagaatctgcaaagagatatttgggagtgcattgaggtgtatggtgaaaaaggaaacatcttcaggtaaaaagaagaaagaagcttttgagaaactgctttttgatgtgtgcattcatctcacagagttaaacctttcttgrattcagcagtttggaaacactgtttttgtgaattctgcaaatggatacttgggagctcattgaggccaatggcaacaaaacgaatataaaacctagaaggaagctatctgagaaaccgaattgtgatgtgtgcattccatctcgcagacttaaacctttcttttctgaaacatttttgaaacaccgtttttgtgcattctgagaatggacattgggaatctcattgaagccaatggcgaagaagggaatattccatataaaaactagaaggaagctatctgagaaactgctttgtgatgtgtgtattcatctcacagagttaaacctttcttttcatgcagtattttggaaatactgtttttgtaaaatctgtaaagggatattctaaatgcattgaggactatggtgaaacaggaatcatcctcagataaaaactaga

SEQ ID NO: 880755 - DNA, 587 bp, Homo sapiens
ctcgctctgtcgcccaggctggagtgcagtggcgcgatctcggctcactgcaagctctgcctcctgggttctggccattctcctgcctcagcctccctagtagctgggactacaggtgcccgccaccacgccctgctaattttttgtatttttastagagacggggtttcaccgtgttagccaggatgatcttgatctcctgacctcgtgatctgcctgcctcggcctcccaaagtgctgggattacaggcatgagccaccccgcccggcctatatgtctatatttaactggaactgttgaaagatcattttcaaggtatgatattttatattgtcacctgtttttgaactctttaaaattgtcattctattgtgaactggcttccaccacttttatgagaaattagctgtatttcttgttgctgctttgaagataatacattttattctcctgtgacttcatttaacgttttgctttatctttctttttcagaaattatatgataatgtatccagaggtggtttgttcatgtttatcctatttggtgttcatgttttctcttgaatttttgagttaatatcttttg

SEQ ID NO: 880756 - DNA, 661 bp, Homo sapiens
gtcctgggcttatttttggttggtaggctatttattacctcaatctcaaaacctgttattggtctattcagggatttaacttcttccaggttgagtcttggtagaatgtatgtgtccaggaatttatccatttcctctagcttttctgatttgtgaggatagaggtgttcctagtagtttctgattgttatttttatttcttgtggggtcagtggtaacattctcttcattatttctaactgtgcttatttgaaacttctctcttctttattagtctagctagcagtctatatattttattaattttttcaaaaaaatagctcctgaattcattgatttttttgaaaggtttttcgtgtctctatcttcctcagttcagctctgatcttggttatttcttgtattttgctacctttggggtttgtttgctctgggttttctagattttttagttgtgatgttagrttgttaacttgagatctttctagctttttgatgtgggcatttagtcctataaatttccctcttaacactgctttagctttgtcccagagattcagctacattatctctttggtctcattagtttcaaagaacttcttgatttccgccttaatttaattatttacccaaaagttattcaggagcaggttgttcaatt

SEQ ID NO: 880757 - DNA, 576 bp, Homo sapiens
aaaagtcaggaaacaacagatgctggagaggatgtggagaaataggaacgcttttacactgttggtgggaatgtaaattagttcaaccattgtagaagacagtgtgtcaaattcctcaaggatctagaaccagaaataccacttgacccagcaatcccattactggatatatactcaaaggattataaatcattctgctataaagacacatgcacacatatgtttattgcagcactattcagaatagcaaagacttggaaccaacccaaatgcccatcaatgatagactggataaagaaaatgtggcacatagacaccacggaatactatgcagccacaaaaagatgagttcatgtcctttgcagggacatggatgaagctggaaaccatcattttcagcaaactaacacaggaactgaaaaccaaacaccrcatgttctcactcataagtgggagttgaacaatgagaacacatggacacagggaggggaacatcacacacaggggactgtcgcggggtgagggtctacgagaggaatagcattaggaaaaatacctaatgtagatgataggttt

SEQ ID NO: 880758 - DNA, 580 bp, Homo sapiens
aggtggtgggaactccaggagaacttggaaaatgaattctttctgaatccaaaatatgagaaaattttaagaagaagccatttttttttttttttttttaaactgcaggccgagtgcggtggctcacgcctgtaatcccagcactttgggatgccgaggtgggtggatcacgaggtcaagagatcgagactatcctggccaacatggtgaaacactgactcyagtaaaaatacaaaaattagctcgcttggtggcgggcacctgtagtcctagctacttgggaggctgaagcaggagaattgcttgaaccagggaggcggaggttgcagtgagctgagatcatgccactgcactcaagcctggtgacagagattttgtaaaatgagaaagtaaggatgtcattggagtcttctgaaagaatggtgttcaaggagaataatgtagaatgcaaattgcaagaaatcaagggagtagcttgggaaaataattctttttaaaagtttagcagtaaagaagaaaaaatacaattaatacttctataaataatgcaaaactattatatctagtttgatcatttcaa

SEQ ID NO: 880759 - DNA, 575 bp, Homo sapiens
gctgaggcaggacgatcgcttgaacccgggaggtggaggttgcagtgagctaagactgtgccagtgagccaagactgtaccactgcactccagcctgggcaacagagtgagactttatctcaaaaaaaaaaaaaaagaaagaaagaaagaaaagaaaaagaaagaaatataagaagaaggcaggaagctgggaatgtgatagggaacagcagacaagtgggagtggatgaggaaagattgaagggaaaagtggagctttgagagtcaggcaagttgtttatatttcatgcagggtttcactaagaagtcaatgaagtttttgagcctgatagtgatataaggaggatcatcggaatcacctgatagtggttttccgggcaaatgggaagagggaagccytaaggaccaggcaggtggcttttgggtggggctgcaaggaaaggatgggaatgcagtggcaggagttgttataaaatggaatgaaactggtttaaaaaaaggcaattaaaaagcctagggttcgatcatgatagataaagaaactgaaaatatcaaagaattccgcatttccaata

SEQ ID NO: 880760 - DNA, 631 bp, Homo sapiens
gtcttgtgactgtacccctcatgcaaacttaaacctggatggcactcctcttatggggatgtagtcaccctgaagtgttacagaaaggctgtctacagctgcacccatgctgagctcccatgggcgaagcctccgctgtgtctgcagtggtgggtgagaggaagaagaagtctccttttccaagatgcttcatgagccttggggctgcctgaatgttggggtagagctgcagactttccccactgagcccagcattccacttgtgtctctgctgaaacattttgtaagcagaaagttccaggactcaagtcctaccgactggattctgttatcccacagtatgctcccttaatgtggtgcattctcccttcccttagaagtaggaatccctgagagctagactactgtgaatcctgctgcttctctgggtctagctktgcagtgggactgccacacttcaggctggtgctaggggatgtccacaaaagatccagtgatgtgacctctcttttagccttccagcagcaggtaccagcaacaactctgatggtgttggaatgggaatgatgtagactctgtgagatttccttccttataaatcaccttagtatgttgttcttctcaaatgcca

SEQ ID NO: 880761 - DNA, 697 bp, Homo sapiens
agtactagatatgcagctggacctgggtaatactggaaatgaaggtggtttatgctccccaatttctgtgccagatagcttccttttgctctttcagattgaatttactccttttgccactctactctctactggaggtgaacgaccttgtcttacatcaatgggcctcttcgccctcatgctttgagttggtttcagcgaatggttcagaagaaaaagatcaaaggaagacaggaaagtgagacctagatatttcttccattgagtctctttctgcaggattatcttgggttgggttggcttcgtaccactatcagacagccctgtttacacagctctckctctctctctggctctctctctctctctctgtgtgtgtgtgtgtgtgtgtgtgtgttctcataataacttcctttccttgccttttagacccagtagtgctaatagtttcctgctgttaccaggcctacagcaatgtgtcaacccttgtttctttttctacaccttgtctataattttgcagatagatccttcattaaaatttcttctgtttcctgccagaagcctaagtgatacatgttcagttttagacatattgttttcaaggtgactttaaggcatctcagtggaaatttggatgggtaggaactcagaagcaagatgtgaactggagatatgaatatggatgttaccatca

SEQ ID NO: 880762 - DNA, 630 bp, Homo sapiens
tatggttttcaagatttgggttttttcgttcatttgggttgtttgttttgctgggcaattctacttttattcacgaaattatttaatattcaacctttattggaaaacacagatctataaattgctccttggtgtcacttctggatgggactaacagtccattaagataaatgagttaggcatttcttacaattttatgactggccccacaaaacatatccctccttactacctcttctactatcctatgttccctcccaactccctaaatgttttgcatgtrcatgtttatttctatataggtggagttaattatctttctattgtgatgtccctgtcacttttatgtgctctgtcatgattgcttgatgtttttcttgtaacaacattgtattctatttgaaaatacattttacagtgtaaagcactgatcatacttaagacattaaaactacggaactaaaatcaacactttgaagataatgaatcaatttagattggatttttaaaagaatatgtcaacttaataagctataagaaaaattagtatagatgaaacaggaaattatcttgtaaaggtagctcatgtttataaatataatttgtgctataattgggatattaaattta

SEQ ID NO: 880763 - DNA, 603 bp, Homo sapiens
aagacacatggcctaatggagcagaatagagaacttagaaataaagctgcaaacctacagccatctaatttttcacaaagtggacaaaaataagcaaaggcgaaaggacttcctatccaataaatggtgctaggatagctagatagccatgtgaagaagaatgaaactggacacttacctttcactatatacaaaaattaattcaagatggattaaggatttaaatgtaagaccacaaactataagaatcctagaactaggaaacaccattctagacattggccttgggaaagtcctcaaaagtaattgcaaccaaaacaaaaatagacaagtggrcgctaattaaactaaagagcttctgcacagcaaaagaaattatcaacagactaaacagaccagctacagaatgggagaaaatattcacaaattacgcatttgacaaaggtctaatatccagaatctaaaaggaagttaaacaattgaacaagcaaaaaacaaataacctcattaaaaatgggcaaaaacatgaacagacacttctctcaaaagaagacacacatgtggtcaacaaacatatgaaaaaatgctccacatcactgatca

SEQ ID NO: 880764 - DNA, 569 bp, Homo sapiens
gctaaggaaaagaatgtgtatttgtgtattctgcagctcttggataagaaaatgttctgtaaatatcttattaggtccatttagcctacagtgcagaataaggctgatgtttctttgttgattttccattcggaagatctgtctaatgctgaaagtggggtgttgaagtctccatctgttactgtattggggtctacatctctctttagctttaatattttcttgataaatctgggtgctccagggttgggtacatacatatttaaaattgttatatcctgttgctaaattgacacctgtatcatattataatagtgaccttctttgtctcttcttatagtttargtctggaaatctattttgtctgacatagtgattcctcctttttttggtttcaattggcatggaatggctttttttatctctatatctttagtctacatgtgtctttatggtgaagagtgtttcttgtagcaaacaatcagtctggttttttcatccattcatccagtctgtgtcttttgattggacagtttcgtccattttcattcaatgtttttatttataag

SEQ ID NO: 880765 - DNA, 627 bp, Homo sapiens
ccttttatgatgtccataaagcatatattagtttgctggatggtttccatatgtcccattggctttctcctcttttttcactttgttcctctgactgggtaatttcaaatgacctgtctttgaagttggtcattttttttttcttctacytgatcaagtcttctgttcccttggttgtgatatgtttctttgattatttgagattattgtggttttgtattgatgtctttggatttgaagaagtagacaccttttttagattttacacagtggttttggcaggaaagctcttcactagaaaactctccaaaaattacaggtaggacagctggcaggaaccatgggtgggcttgctgctagattccttaggtagactggcctggtgacttggccagcagtggggcaagcatggttcttgggtccccaagagccagccctcacacctgaacacatgagtgtgcctggagcctgggtccacttgagtaggcctggagcttacagacatagaatctgggactgtaggaactgaccttgtccaaggatagccattgtgtctgagtcctcaggggccagactaaagccaaggggaccagcctggatcttggtgctacaggtatggactttgag

SEQ ID NO: 880766 - DNA, 596 bp, Homo sapiens
ctagttcaaccattgtggaagtcaatgtggtgattcctcagggatctagaacagaaataccatttgacccagccatcccattactgggtatatacccaaaggactatatatcatgctgctataaagacacatgcacacgtatgtttattgtggcactattcacaatacaaagacttggaaccaacccaaatgtccaacaatgatagactggattaagaaaatgtggcacatatacaccatggaatactatgcagccataaaaaatgatgagttcatgtcatttgtagggacatggatgaagctgaaaaccrtcattctcagcaaactatcacaaggacaaaaaaccaaacaccgcatgttctcactcataggtgggaattgaacatgagaacacatggacacaggaaggggaacatcacgcactggggcctgtcgtggggtgggtggacgggggagggatagcattaggagagatacctaatgctaaatgacgagttactgggtgcagcacaccaacatggcacatgtatacatatgtaactaacctgcacgttgtgtacatgtaccctaaaacttaaagtatatataaaaaaagt

SEQ ID NO: 880767 - DNA, 568 bp, Homo sapiens
ttccttgtaaattcttccaaaaaatagaagtagagagactactttgaaactgattttatggggcctgcatctctctgataccaaagccagacaaatacgtcatctgtaatttaaatttaaattaaatttggataacatttgatgttaagaaaatcaatgtaagaaaagacttaaatggtgatagtacactaccataactttttatttttttytgaaaaggacaactgaaagaaaatcactggattgaagatttactttttagcaaattagactttaaggtaatgtagagaaaatattacaaatgatttagtcggcccttttaaaaggcaagaaattttaaagtaatatatctaggaaaagcagtgcaaaataataaaacaagaaggatctgatataacatgtaaacattttaaaaaatacttagaatctcttgaatttaaaacaaaaatatctagacagtattaagctacatcacattacgtagtatgtatcatttgaatggatgttttcatcaattttgtggactttaatgaaacaataaagttgcttttttacatttatggcacca

SEQ ID NO: 880768 - DNA, 664 bp, Homo sapiens
caggtcttgtgagacttattcactaccatgagaacagtaagagagaaactgcccccatgattcaattatctcccaccaggtccctcccacaacacgtgggaattatgggagtacaattcaagatgagatttgggtggggacacagagtcaaaacatatcaataccccattgaccataatatgattactatgcatttcatgcgtgtatcaaaatgtctcatgcaacctgcaaagatacacacctactgtgtaccttcaaaaattaaaaaaatatatatttttaaaaagagcacatgtatttctataataacaattttagagagctagataaatctaaaggaagcaygcttgcagaaaataatacttgttttgaaattccttataaacctttactataatttcagtgcaaatcttaatctttcacctttagtttttgtttccctttggaaacctattcaacaaatatttattgaagacctgttataaccctatcattttgctttgtcttacaattataggtgaacaagacaatcaggatttctaccctacaaagtgttaaggaagacagaaaataagcaaatcaatacacaacacattgagataagggccacgatgaaaatgtaaacaagtggatgtcataggaagagtggaagaagtccttcatg

SEQ ID NO: 880769 - DNA, 612 bp, Homo sapiens
ggttcactcctgtaatcccagcactttgggaggccgaggtgggcagatcacgagctcaggagttcaagaccagcctgaccaacatggtgaaaccccatttctactaaaaatacaaaaattagctgggagtggtagtgggcacctgtaatcccagctactcaggaggctgaggcaggagaatcgcttgaacccgggaggcggaggttgcagtgagtggagatggtgccactgcactccagcctgggtgactgagtgagactctgtctcaaaaaaaaaaagagcaaataaccacatttattaattttatttagaattttaatggggacaacaaatgaacaaatatttctaattgctgttttaaaatgtgttttgattttgttactatagttggcactctataataagwgaaatttccaagtttatttcaaataaaagtcacactacagaagatgaactaaaattaaccttgttttacatgaaaatgttgaatggtatatttctagtctttttatttgttatatccaactgatgtaaaatatgttttgctaatgaatcgttatttatttccagaaacatgccaatcatctgtaaagataatttactttcttttta

SEQ ID NO: 880770 - DNA, 608 bp, Homo sapiens
cttgactaattttttaaaataagtttttgtagagacagggtcttgctatattgcccagtctggcctctaactcctgggctcaagtaatcctcctgcctcatcctttcaaagtgctgggattataggcatgaaccaccatgcctgcccctcctccttcttttaagaccttgtgtcaggagaaaagagagggtccttgggcatggtggctytctagtttaaggggccatatgcttttgtctgcctagccgctaggtgccctactgggctcccaggccgtagtctgcctccagggagcttgtggtctgttcctctcatgcagagagcacttcctgtggctcctcctgcagattaagtctgtttgctccagttagagctgagaacactctgagttctggctgactcccatttagacacagcagagctggcccaggggatctgcccagtgcctcactgtacacccaccccccttatcttctgaaaaaccccttctagaaactttccagccagattatcaattactttcaggtttctggaaaactaaagctaagggtttggaaaagctaacttgagtctttccactatctgatcattctgcccctccaggttag

SEQ ID NO: 880771 - DNA, 584 bp, Homo sapiens
atggtaactggagaatgtcatcctttttaatgtcaactttaacccaagaaaaatctctggggtaaacaaatcatcgttgtcaccatccctgccatttcgttatggtctggtgaggttcagtctttgtaggggagctataggatgkagtagtagttcagaaaaggatttttctagacctatagtcccaaagtcaagtctcagctgtgccactgtctagtcctatgaaatacatttgttcctaaaacctttcatgactttttacctatgcctttgttcaacccactggtatttaacttaactgatcaaagatttctgaacattgtgcatatctttggatgatcatttcagaaagagaacaaattcaggagatgacttacccaggatcctaaagatatgtcttgtttggacatgaaacttgtaaaacatttctgcttctcaatttgaattttgtgtactgttaaaaaaatacctaggatgtcattacctatccttcccacaccttgggagtattcaccgtcggtgtctgtaaggaaggtgagtactagagtactacctagccctaaaatgcttttggattataatct

SEQ ID NO: 880772 - DNA, 584 bp, Homo sapiens
atggtaactggagaatgtcatcctttttaatgtcaactttaacccaagaaaaatctctggggtaaacaaatcatcgttgtcaccatccctgccatttcgttatggtctggtgaggttcagtctttgtaggggagctataggatgtagtagtagttcagaaaaggatttttctagacctatagtcccaaastcaagtctcagctgtgccactgtctagtcctatgaaatacatttgttcctaaaacctttcatgactttttacctatgcctttgttcaacccactggtatttaacttaactgatcaaagatttctgaacattgtgcatatctttggatgatcatttcagaaagagaacaaattcaggagatgacttacccaggatcctaaagatatgtcttgtttggacatgaaacttgtaaaacatttctgcttctcaatttgaattttgtgtactgttaaaaaaatacctaggatgtcattacctatccttcccacaccttgggagtattcaccgtcggtgtctgtaaggaaggtgagtactagagtactacctagccctaaaatgcttttggattataatct

SEQ ID NO: 880773 - DNA, 584 bp, Homo sapiens
atggtaactggagaatgtcatcctttttaatgtcaactttaacccaagaaaaatctctggggtaaacaaatcatcgttgtcaccatccctgccatttcgttatggtctggtgaggttcagtctttgtaggggagctataggatgtagtagtagttcagaaaaggatttttctagacctatagtcccaaagtcaagtctcagctgtgccactgtctagtcctatgaaatacatttgttcctaaaacctttsatgactttttacctatgcctttgttcaacccactggtatttaacttaactgatcaaagatttctgaacattgtgcatatctttggatgatcatttcagaaagagaacaaattcaggagatgacttacccaggatcctaaagatatgtcttgtttggacatgaaacttgtaaaacatttctgcttctcaatttgaattttgtgtactgttaaaaaaatacctaggatgtcattacctatccttcccacaccttgggagtattcaccgtcggtgtctgtaaggaaggtgagtactagagtactacctagccctaaaatgcttttggattataatct

SEQ ID NO: 880774 - DNA, 625 bp, Homo sapiens
ccggctaattgttgcattttttagtagagacagggtttctccatgttggtcaggctggtcttgaaaatgaaaataaatcagttcattctgccagagataagaaatcacaagcagtttcatacaaaaaagacctggtccataaggagttctctcccagctctgtcctagtcagacagattaaatcaaggccctggaaagacccagcaaatctaacaggagaagaatctatgcagaacctattagatcaaggatacccccaacagatcaggagtaccagtccatgacctgttaggaactgggcttcacagcaggaggctagtggtgggagagtgagcaagcaaactttatctatatttatagcagctccccgccttgcattaccatctgagctctgcctcctgtcagatcagtgtcggcattagattctcacatgaacacaaatcctatcgtgaactgcacatgggagggatctaggttgcgwgctgcttataagaatctaacgcctgatgatctgtcactgtctcccatcaaccccagatggaaccatctagttgcaggaaaacaggctcagagctctcactgattctacaatatgatgaactgtataactatttcattatatatt

SEQ ID NO: 880775 - DNA, 682 bp, Homo sapiens
tgccaatttaatgtatgagttccttctagcaataatcaatatttaaaaatgtaaacacttaagaagaatttgagttaaaatgtaagtagtccatgatctccttattataaataactactcaagaatatcttttcttaagtgaggagtaattgaaaaaaatgtacccttcttattttaaggattaagacaggtacatttaaaatcaaacataaggtaaggttttaattcaacagatattcctagtaagtttatataaaccatattaagtagttggaaatgcctaattatggattttaaaataaataatccaagctcatccttacgtagtgaaaggtaagaaaaaaagtaaaaattcttactattgtcatctccataagggaaatgtaagtgaagtatttccataaatcctactatatgctcatcactataatgatatggagaatctgacctactaaaygaatatgtctgattcatctgaaacacaatacttatattttatattattaaagaacattgcctgaattattttgatcagtatttaaaaggtttcttatgtcatagagaaagttgggtaagaacaaatgatacttacaggggccactcccatatgacatgtaaaagttaaaaaaagaaggaagacaaatgtctatggaaatgatgaagatctatggaaaagtcagaa

SEQ ID NO: 880776 - DNA, 607 bp, Homo sapiens
agtcagagaacctagcgtaagtactttaccaactcctagaaatcagagaacctagaggtagtactctaccaactcctagaaatcagagaacctagagttagtactctaccaactccccaaaaccagacaacctaatagaatgagtactcagaagccatgctattcctcccccaaaaaggcctcataatagattctaaagaaggacagttttaaaacagcttcccgcctctctggacacctacagaattttgtggattggasagttgcaaatcttacccaggtgctgattactccaaaaagcaacgggaactgttcaagagaaacagcagccagcaatgggggcttcacagacattttgagcatagtgactgacacctctgattttttttccaaacccggtgcacccaatcaaaccccaaaaatcttcatttaacatttattgtgtgcaagacattggtggctcctgtcttcttactttgtatttagagtaaaacatgacaactttgccacaagcaaacaaacagagacacacacctcacaccttagcagaagtgaacctgttgagaaggctatcatgaggaagaacctgccaggtcagcagtgatta

SEQ ID NO: 880777 - DNA, 627 bp, Homo sapiens
agtgagtttcttaatcctgagttctactttggttgcgctgtggtctgaaagactgtttgttatgattttagttcttttgcatttgctgaggagtgttttacttccaattgtgtggtcaattttagaataagtgctatgtggtgctgagaagaatgtatattctcttggtttgtggtggagagctgtagatgtctattaggtctgcttggtccagagctgagttcaagtcctggatatgcttgttaattttctatctcattgatctgtctaatattgaccgtggggtgttaaagtctcccactattattgtgtgggagtgtaagtctctttgtaggtctctaaggacttgctttatgaatctgggtgctcttctattgggtgcatatatatttargatagttagctctttttgttgcatgaatccctttaccattatgtaatgcccttctttgtctcttttgatctttgttggtttaaagtctgttttatcagaaactaggattgcaacctctgctttttttttgctttccatttgcttagtaaatactcctccatctctttattttgagcctatgtgtgtctttgcatgtgagatgggtctcctgtatacagcataccgatgggtct

SEQ ID NO: 880778 - DNA, 592 bp, Homo sapiens
ggtctgtgtctgtttttgtaccagtaccatgtaccagttttggttactgtagccttgtagtatagtttgaagtcaggtagtgtgatgcctccagctttgttctttttcttgggattggcttagttatacaggctcttttttgatgtcatatgaattttaaaatagttttttctaattcactgaagaatgtcaatggtagtttaatgggaatagcatggaatctataaactgctttgggcagtatggccattttcataatattgattcttctatccatgagcacaaaatgtttttctgtttatgtcctctctttctttctttgatcagttgtttgcaattctccttgaagaggccctacacttcccttgttagctgtattcctaggygttttattctttctgtagcaattgtgaatgggagttgattcatgacttggctctctgcttgcatattgttggtgtataggaaactagcgatttttgcacatggattttgtatcctgagactttgctggaattgcttatcagctttagaagcttttgggatgagacaatggggttttctagatataggatcgtgtcatctgcaaaca

SEQ ID NO: 880779 - DNA, 681 bp, Homo sapiens
tattcactgatggttgtttgtatttctgtaagatcagtggttatatctcctttatcatttcatattgtctatttgaatattctcttttcttccttattagtctagttagctatctattttattgatttttgcccccaagggtttttcatgtccatttccttgagttccactctgatctgggttatttcttgtcttttgctagctttggggtttgtttgctcttgattccctagttcttctaattgtgatgttagggtgttagtttgagatctttctagctttttgatgtgggcacttagtgctataaatttccctcttaacactgctttagctgcatcccagagattctggtatgttgtctctttgttctcattggtttcaaagaaattcttgatttctgccttaatttcattatttacccaggagtcattcaggagcaggttgtttaatttctatgtggttttgtgattttcagtgagtttcytaatcttgcattctaatttgattgtgctatggtctaagatacagttggtaatgatttcagttattttgtattagttgaggagtgttttactcccaattatatgatccattttagagcaagtgccatgtggtgctgagaagaatgtatattctgatgttttgggttggagagttctgtagatatctatcaagtacact

SEQ ID NO: 880780 - DNA, 585 bp, Homo sapiens
gtagacagtttgcattttcttagtttttatttcattctgttctgctccagtcttttttcttctaattttgggtttggcttgctcttgcttttctttttccttgaagtccatttttacataatttatttgaaatctttmttttctgatgtaggcatttattgctataaacttctctattcacaatacttttgctatattccataggttctggtattatgtatcaattttcatttaagaaatttttttattttctccttaattttgcctttgacccaggggtcactcagaagcatgttgtttaatttcaatatatttgttcagtttccaaagttccacttgttaatttctagttttactccattttggtcagagaagatacttgacatcatttatatttttataaatttgttgagacttcttttgtgtttcaaaatatggtctatctggagaatgttccacatgctgacggggaaaatgtatattttgtagctgttggataaaaatgttctataaatatctgctaggtccatttggtctaatgtgcagtttaaatccttttttttttctgttggttaattttaatct

SEQ ID NO: 880781 - DNA, 623 bp, Homo sapiens
cctacttgaggaggcagtttgtccgttctcagagctcaaacaccatgctgggagaaccactgctgtcttcagtgctgtcagacagggatgtttaagtctgcagaagtttctgctgccttttgttcagctatgccctgctcccagaggtggagtctacagaggcagcaggccctgttgagctgccataggctccatccagttcgagcttcctggccacttcgtttacctactcaagcctcagcaatgacagatgcccctctccctaacaggctgccacctcacagtttgatctcagattgctgtgctagcagtgagcaaggctctgtgggcatgggatctgccaagccagctgtgggayataatctcctggtgtgctgtttgctaagaccattggaaaagcgcagtatttgggcatcagtgtcccaattttccaggtaccgtctgtcatggcttcccttggctaggaaagggaaatcccctgaccccttgtgttccctgggtgaagcaatgccccaccctgctttggctcactctccatgggctgcacccactgtccaaccagtcccagtgagatgaaccaggaagctcagctggaaatgcagaaatcacctgttttctgcgtt

SEQ ID NO: 880782 - DNA, 623 bp, Homo sapiens
cctacttgaggaggcagtttgtccgttctcagagctcaaacaccatgctgggagaaccactgctgtcttcagtgctgtcagacagggatgtttaagtctgcagaagtttctgctgccttttgttcagctatgccctgctcccagaggtggagtctacagaggcagcaggccctgttgagctgccataggctccatccagttcgagcttcctggccacttcgtttacctactcaagcctcagcaatgacagatgcccctctccctaacaggctgccacctcacagtttgatctcagattgctgtgctagcagtgagcaaggctctgtgggcatgggatctgccaagccagctgtgggacataatctcctggtgtgctgtttgctaagaccattggaaaagcgcagtatttgggcakcagtgtcccaattttccaggtaccgtctgtcatggcttcccttggctaggaaagggaaatcccctgaccccttgtgttccctgggtgaagcaatgccccaccctgctttggctcactctccatgggctgcacccactgtccaaccagtcccagtgagatgaaccaggaagctcagctggaaatgcagaaatcacctgttttctgcgtt

SEQ ID NO: 880783 - DNA, 623 bp, Homo sapiens
cctacttgaggaggcagtttgtccgttctcagagctcaaacaccatgctgggagaaccactgctgtcttcagtgctgtcagacagggatgtttaagtctgcagaagtttctgctgccttttgttcagctatgccctgctcccagaggtggagtctacagaggcagcaggccctgttgagctgccataggctccatccagttcgagcttcctggccacttcgtttacctactcaagcctcagcaatgacagatgcccctctccctaacaggctgccacctcacagtttgatctcagattgctgtgctagcagtgagcaaggctctgtgggcatgggatctgccaagccagctgtgggacataatctcctggtgtgctgtttgctaagaccattggaaaagcgcagtatttgggcatcagtgtcccaattttccaggtaccrtctgtcatggcttcccttggctaggaaagggaaatcccctgaccccttgtgttccctgggtgaagcaatgccccaccctgctttggctcactctccatgggctgcacccactgtccaaccagtcccagtgagatgaaccaggaagctcagctggaaatgcagaaatcacctgttttctgcgtt

SEQ ID NO: 880784 - DNA, 577 bp, Homo sapiens
acagagacatacaaaaaaataaggtcatgtattgcattaatcagttgataaaaatattgtaaccagaggcttgagggaccataacctgtatttcccataggaacaatggttcaatattgactgattctgtgtttgcagcaaatttatagaatgtatcagccactaataataaaaatcagttgtatataatttatatttctcaattctctgccaacttgccaatataacaactccaactagtgctatagtatttttttacattgacctaatcttgcacttcccaactcattttaagattgagttaatgtctgacttccaaacccttctaggacaatttgtaatggcttgttgaaatcctgtttttctatagtgtagttgtaaatcatgacarattttaagttcactaaatatttgacttcagcagcatccaaatatgtttctactatttgataaagaggaacatgttctaattctcatcactgaggtacatggaacaaagttaatatactctgttaaaacatgcctttcactaaactggaaatttagaaactgaaaatgttaaggaaatagaatggtg

SEQ ID NO: 880785 - DNA, 681 bp, Homo sapiens
tgggaaaatgtcacttcctctgggaaactgtcccagccctcctttttcttctgccttctcagcactctttccagtctatgggaagtgcctcctgctcacatttatcttaatacttatcatacttaatctgcctcttactagactctaacccccttgggggttagacttggactttatattcctagctcatagcacagtactttgcccataataggtactcaatgctcatgaattgcatggcaaatatattcatggaggttttgtaactggttctataagggtacatggggctttcttggaagcctaaatgtgatacaataagggatttytgacagatttgaggatgggagattttttttttttttttttttgagacagagtcttgctctgtcgcccaggctagagtacactggcgcggtctcagctcactgcaagctccgcctcccaggttcacgccattctcctgcctcagcctcccaagtagttgggactataggcacccgccaccatgcctggctaatttttttggtatttttagtagagacggagtttcaccatgttagccaggatggtctcgatctcctgacctcgtgatctgcccacctcgaagtgcccttctcttcagtcttttgtcttgatgcccaaaaaatcttttagaacagtttacctctactgctgggt

SEQ ID NO: 880786 - DNA, 648 bp, Homo sapiens
tctgagtagggaggatatttggaggactcctgttttacttagatgttctttgagttcccacaactttttattttgaagtcattgctccccaactctacccccaagctctctgcccctctgtccttcctatccctagatctgaatggaggaaagacattcgaatcaaaggcattatgacttataaacaatgccaattgcagtttacatgacagaatcataaaaacccattgacttagagagtttttcagtcagaagaaatcttggagggcacgtagtttgatcccctcattttacagatgagaaaactraggcttggaggttttttgttttttttttttgagatggagtcttgctctgtcgcccaggctggagtgcagtggcgtgatcttggctcactgcaacctctgcctcccggattcaaacaattctcctgtctcagcctcctgagtagctgggactacaagcatgtgccaccatggcctgctaatttttttgtatttgttttagtagagatgaagtttcactatgttggccagaatggcttggaggtttaattgctcaaggagacacagctaatcagtgcctaacttttctctgaaagaaactggattttggcatactttcctcaagtattctgaatctattatg

SEQ ID NO: 880787 - DNA, 692 bp, Homo sapiens
gctggaaatttactgaacctttatgctctgctttccttttaaacataagttcaaattccaaaccatgtctcagtgaatgaataaaatactatgcagccataaaaaaggatgagttcatgtcctttgtagggacatggatgaagctggaaaccatcattctcagcaaactatcacaaggacaaaaaaccaaacaccgcatgttctcactcataggtgggaattgaacaatgagaacacttggacacaggaaggagaacagcacacaccagggactgtcgtggggtggggggaggggggagggatagcattaggagatatacctaatgtaaatgatgagttaatgggtgcagcacaccaacatggcacatgtatacatatgtaacaaacctgcatgttgtgcacctgtaccctagaacttaaagtataatttaaaaaaattgaatgctttaaagagcactcaggtcaccycttgaatgctttgatgcttagaaatttctttcactagatactctaaatcatctctctcaagttcaaaattccacagatctctagggcaggggccaaacactgccagtttttgttgctgaagcatagcaagaattacctttgctccagttccagattagctcctcctctccatctgggacccagcctggactttattactatcagcatattactatcagtatttt

SEQ ID NO: 880788 - DNA, 638 bp, Homo sapiens
catcacattttctttatccagtctatcattgatgggcatttggattggttccaagtctttgctcttgtgaatagtgccgcaataaatatacgtgtgcatgtgcctttacagcagcatgatttataatcctttgggtatatacccagtaatggaattgctgggtcaaatggtatttctggttctagatccttgatgaattgccacastgtctcccacatttgttgaactaatttacactcccaccaacagtgtaaaagcgttcctatttctccacatcctctccagcatctgttgtttcctgactttttaatgattgccattctaactggtgtgagatgatatctcattgtggttttgatttgcatttctctaatggcaagtgatgatgagctttttttcatatgtttgttgtctgcataaatgtcttcttttgagaagtgtctgttcatatccttcacccacattttgatggggttgtctcagcccaaaatctccttaagtgataagcaacttcagcaaagtctcaggatacaaaatcaacgtacaaaaatcataagcattcctacacaccaataacagacaaactgagagccaaatcatgagtgaaatcccatccacaattgctacaaggagaatta

SEQ ID NO: 880789 - DNA, 694 bp, Homo sapiens
ctttgctgcctatgctggattgcagtgctgcgatctcagctcactgcaacctccacctcccagagtcaagcaattctcctgccttagcctcctgggtagctgggattagagacacccaccaccactcctggctattttttatttttttattttttattgttagtagagatggggtttcaccatgttgggccaggctggtctcgaactcctgacatcaagtgatctgcccgcctcggcctcccaaactgctgggattacaggtgtaaaagatttttaaaagtaaggaggaggccgaggtgggaggatggcttgagcccaggagttcaagttaggcaacatgacaaaatcctgtctctgcaaaaaatataaaaattagttgggcatggtggcatgtgcctgtaatcccagctacttggaggttgaggtgagagaatcacctgagcccagaaggccaaggctgcattgagccatgatgaagccactgtactccagcctgrgcgtcggagtgagaccatgtctcaaaaaaaaaaaaaaaaaaaaggaggcaatgatgatttgaagcgaccagattgtctgcctcagttgagtttctgggtttggagcctctctggtagccacaacaagaatattcttggattgagccccaaagttctgctggttgaacaaaatgcatggctgtcttcttccattttta

SEQ ID NO: 880790 - DNA, 639 bp, Homo sapiens
taatgccatggcaacagaagctgtggaaaacctaacccagaaatgtgggatggaagggactcctttggagttggcagcctctgaggaacaagagggtcatctccctgaaggcctttttctccattttgacattgcccactgcagctaagattttaaggagcaaaaaacgtgggctctggtgtcaygcagtgctcagtgtaaatgccagctttgatccttcctggctttgtggtctctgagccgatgttgcaggattgttgtgtagattatgccagaggatggatacttggaagtgcttggcacatattagatgctcaacacatagaaatcattgtggcctgttttgtttgtttgtttgtttgtttgtttgtttgttttttctgagacagggtcgagctttgttgcccaggctgcagttcagtggcacaaatataactcactatactctcaacctcccaggctcaagtgatcctcccacctacaggtgtgtgcacacaccaggctaatttttttttttttaaagatgaggctcgctatattgcacaggctggtctcaaactcctgggttcactgaacctcctgccacaccctcccaagatgctgggattacaggcgtgcatggctgtccctggccttttt

SEQ ID NO: 880791 - DNA, 620 bp, Homo sapiens
ttaagtcagtggactttgagtaggagactgccctctatgctattgctaggccttaacctatcagttgaaggcctggatacaacaaaagatcaaccttcctcaagcaagagggaattctccaggagactgcttttggacttctgcaacatcagctcttcctggtccctcagcacactcactgcggttctttccagagtctccagcttgcccacctccccttcatactatgggctcaccaagcctccaaaatcatatgagccaattccttaaaatgtttgtgtgtttgtgtgtgtgtgtgtgtgtgtgtgttcagttgtccctcagtatccatggggaattggattcaggacctccataagttaccaaaatccrtggatgctcaagtccctaatataaaatggcatagcatttgcatatagcctatgcacatccttccatatactttaaatcatctctagattacttacaatgattagtgcaatatatatgctatgtaaacagttatttaccctattgtttagggactaatgaccaaaaagtctgtacatgtttggtagagatgcaactttagtttctgaatattttagattcatagttggttgaatcaatggatacagaac

SEQ ID NO: 880792 - DNA, 642 bp, Homo sapiens
taagtagagctggagaaaggcacttaaaacttaaaacaaaaaacaaaaaacttatgggcagggaatggtggctcatgcctgtattcccagcactttgggaggccaaggtgggcagatcacctgaggtcaggagtttgagaacagcctggccaacggggtgaaaccccatctctactaaaaataaaaaattaggcatggtggtgggcmcctgtaatcccagctactcgggaggctgaggcaggagaattgcttgaacccgggaggcagaggttgcagtgagctgagatcgcaccattgcactccagcctgggtgacaaagcaagactctgtcaccaaaaaaaaaaaaaaaaaaaaaaaaaacctttgtacaaaattcttaccatctttctggaaaaattagatttctgtgtaccaaatggttggtactgaaattttgtttcaatacattacaacgactacacacagaaagactctattcttaatccccttcaatgtgccagatactgctctaaaggctttacctatatgagctcatttaatcatcactattagtctgtagggtaggccatgtttttatttcatttgcagaaaggcttagtaacttcctcaagatccttagctggtacctggcagagccagaac

SEQ ID NO: 880793 - DNA, 642 bp, Homo sapiens
taagtagagctggagaaaggcacttaaaacttaaaacaaaaaacaaaaaacttatgggcagggaatggtggctcatgcctgtattcccagcactttgggaggccaaggtgggcagatcacctgaggtcaggagtttgagaacagcctggccaacggggtgaaaccccatctctactaaaaataaaaaattaggcatggtggtgggcccctgtaatcccagctactcgggaggctgaggcaggagaattgcttgaacccgggaggcagaggttgcagtgagctgagatcgcaccattgcactccagcctgggtgacaaagcaagactctgtcaccaaaaaaaaaaaaamaaaaaaaaaaaacctttgtacaaaattcttaccatctttctggaaaaattagatttctgtgtaccaaatggttggtactgaaattttgtttcaatacattacaacgactacacacagaaagactctattcttaatccccttcaatgtgccagatactgctctaaaggctttacctatatgagctcatttaatcatcactattagtctgtagggtaggccatgtttttatttcatttgcagaaaggcttagtaacttcctcaagatccttagctggtacctggcagagccagaac

SEQ ID NO: 880794 - DNA, 607 bp, Homo sapiens
cggcctcatctttagtatttcaaaaacaacaaatttttctaaactgaatattttatattaaaatgatgcctatataacaatttcttaatcactgttttcaaagttcccatggaaatattcattcaattagaatctagaagcagtagtctatgttttactagatttcagaaatattttttcccttaacaaatgcttcatgtctatatgttcgaaatatttcttcccttaacaaatgcttcatgtctatatgttcgtatatgtctctctctgtgaaaatatatgcttatatatttattacacataaactacaycttcagaaaaatgttcattcacacctacatacctaatctgtgggctgaaatcaaacactgtcatcagctccaaaagccaacattgcagaagtttgaactagagtgccaaggccaaatagaaactctcaggtaagaaaaaaaaatagagttaaagtccaccatgccatgcaccctcatcctttgcattgaccctatttgacatagcttgactaaacaatgaccagaaaatcatactcatctactctacagggaagagagggaggcattttatttttcctatcctctgcctagaatca

SEQ ID NO: 880795 - DNA, 577 bp, Homo sapiens
cctctaattctgtcagctttttcttcatgtgctttggtgatatcttgtatatgcatgtgcatttataattattatgccttcctcatatattgaccctttatcattatacaatatccttaattgtctctcttaacttaattttttgyctaaaagtttattttttctgacattatagcctatgaatttttaaaattttatacacaatagtagttcatatttatgaggtacttgtgatattttgatacaagcatacaatgtgcaatgatcaaatcagaataattgcagtatccattaactcaagcgctgattatttatttgtgttaggaacatttcatttctaaccatttagttattttgaaatataggataaattattgttaactcttattactaaacacatgtatatatatgtacatagatacatggcaactcaatataaaagtttaatcttaaaattgtatatctcttcccattcttccacatttagcatagttgtgtcttacctttaaagtacagttgacccttgaacaaaaaggatttgaactatgcaggtccacttacaggttgattttcttct

SEQ ID NO: 880796 - DNA, 554 bp, Homo sapiens
atcagcattgctctttgctgtttatccacttggaatttgtcagaaataaaaccgtggtgaaggagagtccaagtgactaacacaatggatttctgtatcctgtccactaccatccctgagtaaactttgaaatctgacattccataaactatgtcactttattcaactgattttcaaaggttcctctccygtgaatgccatatgtagacatttacatgggattcaaatatctcacagtctttgtccattttgagaggtgcatccacatggatcttcgcatacttccttgccatcatcatatagctcttcttaaatttttgatgaaccaggcaaaccatttgaaactatgtgttcatcacttctaagcatctgtttatctggataaaggggaaaacaaaatgagctgctaaaatcctacccactagaagattttcttcactattgctctgaggctcacacatgaatgggactgtgatattatagctgtgaacttccaagttgtaccaacatatattataagtagaaccaattgtaaagtagcacacaagtttttt

SEQ ID NO: 880797 - DNA, 683 bp, Homo sapiens
atgtgttgcttattttacaaaaaaattatactattacatttattattaattataatgcactgtctttataggcttctcctttaggaacttctaagtactcaacatacatcatctgcctaatgatgtattctgcctcctgttaagaatgttatgcatactgagtacatcgcctaagtattatagaagattgataaatattatataattaataaatagattttrcttatttttaaaaacaattttacacattaaaattcctcaagaaatgtgttttgttcttattacgtagcaacaagcaaacatccaggtcttctccactcaacacatggaaatcatcctaggcttttaaagggattcatcccaactagttcacagctgcaacactaatgtcattttatattttactggtaactcgattgagcttagaaaggaataactgtttaataacatctgaagaatgctacaaagtcaaagggaagaacctgaatcattttttgctccaaagacgccatttggaccaaactgccaagttttttttaccacgtttacccagatattggctgcaccggtagctaaaagttgggagaaatttatggagctcaggaaccatttttatcattgctatgctgttctcatttttactttaatatgagattatctttcatttagtttttaaatatatt

SEQ ID NO: 880798 - DNA, 591 bp, Homo sapiens
gtgagttggcttgctttctcagtggggaggctggtggcctgcagcaagttctcagccctggtcactggctgccctactagactcagtgctgttgtgggggcatggtgggagtgagactagcctttaggactgcaggacacatggaagcacagcaaggcctgtgactacmagctttctccaacttccctggtgacctgtgtgactcagcagaggcagccataaatcctgtgagaacataactccactggactgggaaccacacccccatccctcacagcagctgcagcaagccctgcccaaggagaaactgagctcagacacaactatccctgcccccacctggtggtctttctctagctgccctggtagctgaagacaaaggacataatagagctctcttgggagctctatggccctacccaccacctgagaaacttgaatacttaaccaggtgaccctagggcaagtttacttccttcctatagtaccacaggtgctgcactcttgaaagtgccacctcctggctggaagccaaccaatacaaaaccagcacactaaacaaaaatacaaccaaggaccctcacagagtcc

SEQ ID NO: 880799 - DNA, 651 bp, Homo sapiens
actggaacaaaacaaagatgcacacatggatgaaattggaaatcatcattctcagtaaactatcgcaagaacaaaaaaccaaacaccgcatattctcactcataggtgggaattgaacaatgagaacacatggacacaggaaagggaacatcacactctggggactgttgtggggtggggagagggggaagggatagctttaggagatatacctaatgctaaatgatgagttaatgggtgcagcacaccagcatagcacatgyatacatatgtaactaacctgcacattgtgcacatgtaccctaaaacttaaagtataataataataaaattaaaaaaaacaaagatgcacacttttatcattcctgttcaacacagcattgggagtcctagccagagtaatcaggcaagagaaagaaacaaaaggcatccaaataggaaaaaaggaagtcgaattatctctcttcactgataatatgactccacacctagaaaacccttaagactctgtcaaaaggctcttagatctgataaacaactttagtaaactttaaacaactttagtaaagtttcaggatacaaaatcaatgtacaaaatcagtggcatctttatataccatgttatatctttataacattgaagctgatagc

SEQ ID NO: 880800 - DNA, 547 bp, Homo sapiens
tccccaccttccctccgagtccccaaagtccattgaatcattcttgtgcttttgcgtccttataacttagctctcaattataagtgggaacctacaatgtttggttttccattcttgagatatttcatttagaagaatagtttccaattccaaccatgttgctctaaatgccattatttcaatatttttttatggctgaatattattccatggtatatatatacaccacgttttctttatccactcattgattgatgggcatttgggctggttccatatttttgcaattgcaaattgtgctgctataaacatgcgtgtgcaagtatcttttttgtacaatgttttcttttcctctgggtagatacctagtagwgggattgctggatcaaatggtagatctgcttttagttctttaagggttgccacactgttttccacagtagttgtgctagtttacattaccatcaacagtgtaaaagtgttcccttttcaccacatccatgccaatatctattacttttttattatggccattcttgcaggagtg

SEQ ID NO: 880801 - DNA, 566 bp, Homo sapiens
tctgagatgcatgctagaaaaagcctatattcctgtgaatggatcataaagaacaattctggtgagggctcagaagagaggagagctgtggagaaagccttaatcttcttagaggttatgtaagatgttgtaaacagtgttcatagaaatatggacacagagtccattccaatgaagtttcagataaaaatgaggaatgtgttactggatagtgaaggaaaggtgatctttgttataaagtggcaaaaaacttggctgaactgtattcatgtcytagtgttttgtggaaggtagaacctcagagaaacaaaataaggtatttggtggaagaaatgtctaaactaagtgtggagggtgtggcatggcttttcttgacctcttcaagtaaaacgcaagaagagagaaacaagttaaagacagaacttaaaattaagggaagtagaacttaaagatttggaaatttcttagcctggctatgttttaaagaataaaaaacatgcttgggagagaacaccaaggatgtggccaagctaccctttgctaaaattagtatgaatagaaggaag

SEQ ID NO: 880802 - DNA, 619 bp, Homo sapiens
cccagcacaatccaccccttttcccgtttaaacccacaaaatccttgcaacacatatttagcttctaaccaacaccagcaacaaattaatgagtctgcctaatatgatgtgtctgctcttatataaatgtagatgcactcacccactcttggaaaggtggagactcaaagtttcccttcagaactgtagccatctctggatagtgttaattctccttctagtttagtcacagtccttctttgataatcagtaaactaaaaattaaattacaaattaatcacaactaacaaacttctgtatggaaaagagaagataagaagatgtacgtacatatgcaagaaacaatacatagttaacatggtcctcatttttgcaagcagttacaargccatacttaggctttaaacttctttcttctacaacccactctgtttcctttacaatcaatcagtcagcatctaagccagtcatagctttttatctgttggaataactcaaatctctactcctgaaggtgcctgtagtgggttgctgtatgcttccactaacttcctgcataaggaatgcataccaataaatcccctaggctcccaacacaaattccctaggctccacctta

SEQ ID NO: 880803 - DNA, 619 bp, Homo sapiens
cccagcacaatccaccccttttcccgtttaaacccacaaaatccttgcaacacatatttagcttctaaccaacaccagcaacaaattaatgagtctgcctaatatgatgtgtctgctcttatataaatgtagatgcactcacccactcttggaaaggtggagactcaaagtttcccttcagaactgtagccatctctggatagtgttaattctccttctagtttagtcacagtccttctttgataatcagtaaactaaaaattaaattacaaattaatcacaactaacaaacttctgtatggaaaagagaagataagaagatgtacgtacatatgcaagaaacaatacatagttaacatggtcctcatttttgcaagcagttacaaggccatacttargctttaaacttctttcttctacaacccactctgtttcctttacaatcaatcagtcagcatctaagccagtcatagctttttatctgttggaataactcaaatctctactcctgaaggtgcctgtagtgggttgctgtatgcttccactaacttcctgcataaggaatgcataccaataaatcccctaggctcccaacacaaattccctaggctccacctta

SEQ ID NO: 880804 - DNA, 644 bp, Homo sapiens
cctatagcccctttgttttggccaatgtctcccatttggaatggctgtatatttaccaaatgcctgtaccccccttgtacctaggaagtaactagcttgttatagatttaacaggatcgtaggaggaaggggcttgccttgtctcagatgagacttcggactgtggacttttgggttatgctgaaatgagttaaggctttggggggacgttgggaaggcatgactggttttgaaatgtaaggacatgagatttgaaggggcccagggcataatgatatgatttggctctgtgttcccacccaaatctcatcctgaattatactcccataattctcatgtgttgtgggagggacctggtgggagatattttgaatctggggacagctcccccatactattctcgtggtagtgaataagtctcasgagattcaatggctttatcagggggttctgtttttgcatcttcctcattttttctcttgccaccaccatgtaaggagtgactttcacctcctgccatgattctgaggcctccccagccatctggagctgtaagtccatttaaacctctttttcttcccagtctcaggtatgtctttatcagtagcatgaaaatgaactaatacagccaacaaacatatgca

SEQ ID NO: 880805 - DNA, 644 bp, Homo sapiens
cctatagcccctttgttttggccaatgtctcccatttggaatggctgtatatttaccaaatgcctgtaccccccttgtacctaggaagtaactagcttgttatagatttaacaggatcgtaggaggaaggggcttgccttgtctcagatgagacttcggactgtggacttttgggttatgctgaaatgagttaaggctttggggggacgttgggaaggcatgactggttttgaaatgtaaggacatgagatttgaaggggcccagggcataatgatatgatttggctctgtgttcccacccaaatctcatcctgaattatactcccataattctcatgtgttgtgggagggacctggtgggagatattttgaatctggggacagctcccccatactattctcgtggtagtgaataagtctcacgagattcaatggctttatcagggggttctgtttttgcatcttcctcattttttctctygccaccaccatgtaaggagtgactttcacctcctgccatgattctgaggcctccccagccatctggagctgtaagtccatttaaacctctttttcttcccagtctcaggtatgtctttatcagtagcatgaaaatgaactaatacagccaacaaacatatgca

SEQ ID NO: 880806 - DNA, 635 bp, Homo sapiens
tcagtatgatgttggctgtgggtttgtcatatatggctcttattattatgaggtatgttccttcaatcctagtttattgagagtttttaacatgaagcaatgttgaattttattgaaggtcttttctgcatctactgagacaatcatgtgattttagtctttagttctgtttatggggtgagtcamgtttattgatttgtgtatgttgaaccaaccttgcatcttggggatgaagccaacttggtcatagtggataagctttttgatgtgctgctggattcagtatgccagtattttattgaggattttttgcatcagtgttcatcagagatattggcctgaagtttgttgtggttgttgttgtatctctgacaggttttggtaaaaggatgatgctggcctcatagaatgaattagggagaagtccctccttttcaattgtttgggatagtttcagtagaaatggcaccagctcttctacctcttgaagaattcagctgtgaatccgtctggtcctgggcctttttttgattggtaggctatttattattgcctcaatttcagaactcgttattggtctgttcagggattcagtgtcttcttgattcagtcttgggatggtgtatatttccaga

SEQ ID NO: 880807 - DNA, 686 bp, Homo sapiens
gaataaggaaatatgtgccacattttctttatccagtctatcattgatggatatttgggttggttccaagtctttgctgttgtgaatagtaccccaataaacacatatgtgcatgtgtctttatagaatgatatataatcctttgggcatatagccagtaatgggattaccaggtcaaatggtatttctagttctagatccttgaggaatccccacactgtcttccgcaatggttgaactaatttacactcctaccaacagtgtaaaagcattcctatttctccacatacaccatggaatactgtacagccataaaaaaggatgagttcataccctttgcaggaacatggatgaatctggaaaccatcattctcagcaaactaacacaagaacagaaaaccaaacaccgccatgttctcacttayaagtgggagttgaacaatgagaacacatggacacagggaggggaacatcacacaccaaggcctgtggggggatggggggcaaggggagggagagcattaggagaaatacctaatgtaggggacgggttgatgggtgcagcaaaccaccacagcacgtgtatacctatgtaaaaaaactgcacgaaataaggaggccagtgggcacatctaagccttcagctaggcaagaaaatgacctttggagtctcacattcattctgt

SEQ ID NO: 880808 - DNA, 610 bp, Homo sapiens
cagaagacttgaatagacatttttcaaaagaatacataaaaatggccagcaggtatatgataaaatgctcaacatcgctaatcatcagggaaatacaaatcaaatgcacagtgaaatgtcacctcaccctagttagaatggctgttatcaaaaagacagaaaataacaaatgctggtcaggatgcagagaaaggggaactctaatacactgttggtgggagtgtaaattagtgcagtcattatgaaaacagcatgaaaattcctcagaaaactaaaaatagaactaacatatgatctagcaatctcactactaggtacatattcaaaggaactgaaattagtatatcaaagagakatctgcaccctcatgtttattgcagcaccattcaaaacaaccaaaatatggaatccacctaaatgtccataaactgatgatatacacaatgaaatactactcagctgtgaaaagaatgaaatcctatcatctgcagcaacatggatgaacctggaggacgtaatgttaagtgaaataagccaggcatagaaagacaaataccacataacctcactcatatgtaggtctaaaaaagttgatctcatggaattagag

SEQ ID NO: 880809 - DNA, 628 bp, Homo sapiens
agtttatggggatgtggttctaaatagtcacaacacaaatgctgaacaattatataatgaaataaacagagaggtattaataacacatgcaaggaaagggctggtgaagacaggagaaaggatcaagacagacacatgactcaaaaaggaaaacataattggaacaggccatgtctaattccagccaacatctcttcttgaagagaataggtcctcatcacaggcttttctcagccatagacattattaactaagatgaaaataatgcaagagacaaagaaaagagttcaaggatatcagacaagaagggttattacaataggaaaatattactttgaagtattaattcccagaggcaggtctgctgaacatagattcataaaatctgcagctagaatgagcattagattcacctactccaatgctgtaattatacacataatccagagaggtaaaygcacttgttcaaggtcacagttacctagaggtggagctaattcacaaactgtcaaggtctgtgaaggctcagccttggcattaactctttttggatgcccagcacccaagctaggcctggaaaatactgagggccaatgatagctgtccagccaaactgaacctgggtctc

SEQ ID NO: 880810 - DNA, 582 bp, Homo sapiens
gagagtcactgctaccagagtctatttgggattgtagagtaaggatagattttgttattttttgcgaactgtctgagaaatcctttgagagcatgtggtagtaggataatacatgttacactgttaacttttagcaaactttactattgttgaaaaccttgtaagtttgggatttcaattattctttgctattaataagacctcgttcagtccatattaacttagaattggtatagatggctccttcctgattctgtaagtactwtaaggtttggctgagtgcaaacaactggcacgtttgagcagaccagttattaggcaattttcctaaatctgcttctacaagagtttctttatcacttgctgaatacccattgtgtctttttcccttaatcacctgggaggaaccatctatcatccacttctgaagggagtacttcctaggtctgataggacctttgtatagtaattaagatttagatcccctgttaggaaacctgctgggttaaggatttttgataggaaggctacggttttgataggaaggctatgggttgtcagtggcctcagtgtttttgggct

SEQ ID NO: 880811 - DNA, 591 bp, Homo sapiens
ttaatgcatcttgaattaatttttgtgtaaggtgtaaggaagggatccagtttcagctttctgcatatggctagttttcccaacaccatttataaaatagggaatctttcctcatttcttgtttttgtcaggtttgtcaaagatcagatgattgtagatacatggcattatttctgaggcctctgttctgttccattggtctatctctgttttggtaccagtaccatgctgttttggttactgtagtcttgtagtatagtttgaagtcaagtagcgtgatgcctccagctttgttctttttkcttaggattggcttgactatgtgggctcttttttgattccatatgaaatttaaagtagttttttccaattctgtgagaaagtcaatggtagcttgatggggacagcattgaatctataaattacttggggcagtatggccattttcatgatattgattcttcctatccatgaacatggaatgtttttccatttgtttgtgtcctctcttttccttgagcagtggtttgtagttctccttgaagaggtctttcacatcccttgtaagttgtattcctaggtatttcattc

SEQ ID NO: 880812 - DNA, 629 bp, Homo sapiens
ttcgaaacgggtatatcttcacataaaatctagacagaagccttctcagaaacttctctgtgatgattgcatgcaactcacagagttgaacattccttttgatagagcagttttgaaactctctttttgtagaatccgcaagtggatatgtggacctctgtgaagatttctttggaaacgggaatatcttcacataaaaagtaaaccgaagcattctcagaaacttctttgtgaggcttgtgttcaactcccagagtttaacattgcttttcagagagcagttttgaaacattcctttcgtagagtctgcaagtggacatttggagcgctttcaggcctgatatcttcacataaaatctagagagaagcattgtcagaaacttctttggattgattgcattcaactcacggagctgaagattccttttgatacagcagtttggaatcactctttcggtggaatctgcaagyggatatttggacctctttgaagatttcgatggaaaaaggataatcttcccataaaagctaaacggaagcattctcagaaacttctttgtgatgtttgcattcaactcacagagttgtactttccttttcatagagcagctatgaaaccctctctttct

SEQ ID NO: 880813 - DNA, 644 bp, Homo sapiens
atacatggccaagaagcatatgaagaaatgttgaacatcactaaaatattactctgttctcaagctgctaataaagacatactctaataaagacatacttgagactgggtaatttattaaggaaaaaatgtttaatggattcacagttacatgtggctgggaggcttcacaatcataatgaaaggcaaaaggcatgtcttacmtggcggcagacaagagcaagtgagagacaagggaaggcggaaaccctttatcaagtcttcaggtctcatgagatttattcactaccacgagaacagtatgggggaaattgaccccatgattcaattatatttcactgagtccctcccacaacacaaaagaattatgggagctacaattcaaagtgagatttggtgtggacacagccaaaccatatcattctgcccctggaccctcccacatctcatgttctcatatttcaaaaccaatcatgtcttcaccacagatccccaaagtcttaactcatttcagcattaactcaaaagtccaaagtctcatctgagacaaggcagttcccttccacctatgaggatataacattaaaattaaaagcaagttagttacttcctagataaaatgggggcacaggaattgagtaaaaa

SEQ ID NO: 880814 - DNA, 593 bp, Homo sapiens
taatattctagaagctggaaatctggaaatacaggaatgaacagacaggcaaaaatgcctgccttcctggagcttacattcgagcaagttgtgacagacaatgaacaaataaacaaaggaaatatttataataggtgagagggtratgggtgcaatagagaaacagctcatggatcatgtagactgggaatagatagtgtgcaaattaaaatagagtggtcagggcaggctgtactaatggcatgacttctgaacagggacctgaggaagtaagagagcaattcacagaacagctagggaaaagagtattctaaaaagaaagaatagcaagtgtaaatgaagtacccaaggaatgatcttctatgagaaggatctgggttggaaccagcccttcttcaggtcaaaagtctataatgagtccctatgctctatggcaacaaatctaaattattcaacccaactttccatgttttcccaaaataatcagcctcactatcctatctccctagcacagttcctctgaagtaactagatcaggctcactaatattccctgtgctaagctcattccatctccagatggctattaggttc

SEQ ID NO: 880815 - DNA, 667 bp, Homo sapiens
ttttccacctcattaaattttcttctaccctgtcattttaaatgactacataacattccactatatggacatgccataattggaacttcatttttcacaaataaataagtaaatcttgggtaatttctcccgcaggtcaagcataattgctgcaagaggtggtagagcaatgctgaggccaggatgggaggaaaggaggagckcagggagtgggaatattggttggagttttgatttgaggatctaccaggggctttaagaaatgggagctggtgagagacatttaaaagagaaaaactgcccaagagggaaggagggaggggaggtgatagactggataaggtttctgagatggattacatggcttggctgtgtgcccatccaaacatctccttgaattgtagctcccataattcccacatgttgtgggagggacccggtgggggctaattgaatcatgagggtgctttcctccatactgttctcctggttttgaataagtctcacgagatttgatggttttataaggggaagcctctttcacttagttctcattctgtcttgcagccgccgtgtaagaagtacctttcaccttccaccatgattgtgaggcctccccagccacgtggaaatgtgagtacattaaacctctttttctttataaagt

SEQ ID NO: 880816 - DNA, 602 bp, Homo sapiens
aggatgggatgctggttcagtagattagactgaggtcaagtagaaggttaacaatgggaatgtacgaggatggtggcagtgggataagtggaaatgtgtggatatgaaaaatatgctggatgtagagattagagatttcaggaaatattttttacagaagtrtatgatttaaagtgattcttttggtttggaaccactgaggttggatgtttaaaccagagaaaaaaattaaaattatccacttatcttgaagtacttatagggtagtaatgtgtgttgtttttgtttgatattagagggggctaaaaaaaatacattcctgggatgaggagacactgaaaaagtcattttgtttattctcctgtctcaaggtaagagtatactaaaaacaaactaagccgatatttatttgacttattaaaacaactttaaaaattacaaaagtgacatatttcattaatggacaaaatatagggaaataaaaagaagataataaaatcatctataatttcattactcaaactattatttttatgtatatatgtgagagaggcagcagaaaggtacagagtgtggggtctggataaaactaactgggctgg

SEQ ID NO: 880817 - DNA, 602 bp, Homo sapiens
aggatgggatgctggttcagtagattagactgaggtcaagtagaaggttaacaatgggaatgtacgaggatggtggcagtgggataagtggaaatgtgtggatatgaaaaatatgctggatgtagagattagagatttcaggaaatattttttacagaagtatatgatttaaagtgattcttttggtttggaaccactgaggttggatgtttaaaccagagaaaaaaattaaaattmtccacttatcttgaagtacttatagggtagtaatgtgtgttgtttttgtttgatattagagggggctaaaaaaaatacattcctgggatgaggagacactgaaaaagtcattttgtttattctcctgtctcaaggtaagagtatactaaaaacaaactaagccgatatttatttgacttattaaaacaactttaaaaattacaaaagtgacatatttcattaatggacaaaatatagggaaataaaaagaagataataaaatcatctataatttcattactcaaactattatttttatgtatatatgtgagagaggcagcagaaaggtacagagtgtggggtctggataaaactaactgggctgg

SEQ ID NO: 880818 - DNA, 661 bp, Homo sapiens
taatgaattcatattgctaagccactgtagacataaaaaagattgcctctatgtgataaaaacttaaataaatatctaggaagaaaacaggccttcaaaaaatcctgtatcagctatatggcttgtctatattactctcaatatcggcattttagggatcatcccaatattccatttatttttttaaaatacatttttccttcaagtagttttagatttacggaaaaattgagaaaatagcgtasagttcccatgtagcctatgctctgtttcctccattgttaacatcttatattggtatggtatatttatcacaattaaggaactaatattgatacattataattaactaaatccatacttaatttagattttcttttttttttttttgagacaagagtttcactctgctgctcaggctggagtgcaatggcatggtctcagctcactgcaacctccaccttctgggttcaagtgattctcctgcctcagcctccctagtagctgggattacaggtatgtaccaccaagcccagctaatttttgtattttttagtagagatgggggtttcaccatgttggccaggctggtctggcctgacgtcaggtgatccgcccaccttggcctcccaaagtgctgggattacaggcatgagccagt

SEQ ID NO: 880819 - DNA, 613 bp, Homo sapiens
actgacaaatggaaggtgaagtctgagatgtagacactaccaggacagcagccataatatgtggaagacccaggaccagaagagcctgtgtgtgtgtgtgggtggggggggggggtgtataacagcagaaatggatgctattcatttaatttggataccaaggattcatgcttaggggcttggaataaagcagatacacatctttcttctaagtatagaagaaaggtccaagtaggaggctgagacaagcgggtctaactctccctaaagatatttttcaagaaaacttttctcctctatattaacacgatgcaggatttatttctgttagtgtactagataatataatatacatatgcatgtgtgtgtgtgtgtgtgtgtgtgtgtgtgtgygcatatgtgtgcctgtatttcagagcatataacccaggctcccaggttcccagaagtctcctagaccccatagataatgcattttagtgccagccatcatcacgaatactcagtgatggaatgaaaattcctatccagtttatttgaccacaggtagacgatggaggataaagtatcatcagacgatagaattagtaagggaaagaagtcaggtaatggg

SEQ ID NO: 880820 - DNA, 614 bp, Homo sapiens
caagtttttataaagataggttattttcaaaatataaacagcatggaatattgagacaatcatctaaataattcgagccaaagatgaccgcaaaatctctacaaaattgaaggaaaagtcatctgaatgcatattgtcatttacctgagtgcatattattatttacttataaaatatcttattcaaatattctcatacaggtttcaaactatcttcatcatcaattatgaaaactaatcaccgcaataattaaaaacattggccaagtttcagccatgttaaaactctagttttttttttttttttttttttttttttttttttgagatggagtctcactgtctcccargctggagtgcattggcgtgatctcggctcacagcaagctccacctcccagattcacgccattctcctgcctcagcctcccgagtagctgggactacaggtgcccaccaccacgcctggctaattttttgtatttttagtagagacggggtttcaccgtgttagccagtctggtctcgatctcctgacctcgtgatccacccgcctcagactcccaaagtgctgggattacaggtgtgagccactgcacccggcctaacaactcta

SEQ ID NO: 880821 - DNA, 614 bp, Homo sapiens
caagtttttataaagataggttattttcaaaatataaacagcatggaatattgagacaatcatctaaataattcgagccaaagatgaccgcaaaatctctacaaaattgaaggaaaagtcatctgaatgcatattgtcatttacctgagtgcatattattatttacttataaaatatcttattcaaatattctcatacaggtttcaaactatcttcatcatcaattatgaaaactaatcaccgcaataattaaaaacattggccaagtttcagccatgttaaaactctagttttttttttttttttttttttttttttttttttgagatggagtctcactgtctcccaggctggagtgcattggcgtgatctcggctcacagcaagctccacctcccarattcacgccattctcctgcctcagcctcccgagtagctgggactacaggtgcccaccaccacgcctggctaattttttgtatttttagtagagacggggtttcaccgtgttagccagtctggtctcgatctcctgacctcgtgatccacccgcctcagactcccaaagtgctgggattacaggtgtgagccactgcacccggcctaacaactcta

SEQ ID NO: 880822 - DNA, 604 bp, Homo sapiens
atggtatgagagtcctgtcctctgccctaatgaagtaaacttccagttatagcgagtgctgggcaaagcaggagtgtgattatcatcccaaaacgggcagtctatagggtctttctagcttcccattaccctatggagttggttgaggcatttgttgtgactgcattgtggccaattcctcctcctcccaatgttgyttcctttcctttctttactgttataaatcctgagagtactttctaatgagtttcctgtatgcagatttctattttttgttgttgtttttgagatggagtcttgttctgtcgcctaggctggactgcagtagcttgatctcagctcattgcaacttccgcctcccaggttcaagagattctcctgcctcagccacccaagtagctgggattacaggcatccgccaccatgcccagctaattttcgtatttttagtagatactaggtttcaccatgttgggcaggctggtctcaaactcctgagctcaagagatctacctgccttggcctcccaaagtgctgggattacaggtgtgagccactgccctgggcccagatttctatatctgagtttactttctgaataaat

SEQ ID NO: 880823 - DNA, 609 bp, Homo sapiens
atcatgtggtttttgtctttggttttgtttatgtgatagactatgtttattgatttgtgtctgtcaaaccagccttgcatcccagggatgaagcccacttgatcgtggtagataagctttttgatgtgctgctggattcagtttgccagtattttattgaggattttcacattgatgttcatcaggaatattggtctaaaawtttttttttgttgtgtctctgccaggctttggtatcaggatgatgctggcttcataaaatgagttagggaggattccctctttttctattgattggaatagtttcaaaaggaatggtaccagctcctctttgtacctctggtagaattctgctgtgaatccatctggtcctggactttttagttggtaagctgttaattattgcctcaatttcaaaacctgttattggtctattcagagattcaacttcttcctggtttagtctcgggagggtgtatgtgtccaggaatttatccatttcttctagattttctagattatttgcataaagatgtttatagtattctctgatggtagtttgtatttctgtgggatcagtggtgatatctcctttatctttttttattg

SEQ ID NO: 880824 - DNA, 673 bp, Homo sapiens
aactacaacacactcatcttttaagtgtagtgttaattgcttagctttttatttttatcttctctggaatataatattgaattgttcattcatcttcctacttattttgtattcattttaccacatttactccctaagccatttaaagtatgttttctaaagaaagagcagtgtcacccacaccagaaatagaaacctgaaaacgtgagcattagtagcagtgacaacagtgtccatgtggttaaagcacagagagtaagcacgtgcttctcrttattaacccttcagcttgtctgttcctttttgcatgtttttaaagatctaattttatggtttgggagtctttaacaactcacagatgctagaaatacctgtaagctaaacttggttttcttgagagtttctctgtggcctgagaagtcaaagtttttaaaaaatatttacttgtcatgaaatattcacctaaagtagtaaagtaagacatacactagacctctcatttcttaatgtcagaaatcaagccttattagaccttctatcttggttattcaacataatacaccagatacagccaacagtcatacctcttcatggaacaaattggataaatgatgaagtacggacaaattagccctgtgtcattttcacaagtaattggagctcagtaggtacc

SEQ ID NO: 880825 - DNA, 673 bp, Homo sapiens
aactacaacacactcatcttttaagtgtagtgttaattgcttagctttttatttttatcttctctggaatataatattgaattgttcattcatcttcctacttattttgtattcattttaccacatttactccctaagccatttaaagtatgttttctaaagaaagagcagtgtcacccacaccagaaatagaaacctgaaaacgtgagcattagtagcagtgacaacagtgtccatgtggttaaagcacagagagtaagcacgtgcttctcattattaacccttcagcwtgtctgttcctttttgcatgtttttaaagatctaattttatggtttgggagtctttaacaactcacagatgctagaaatacctgtaagctaaacttggttttcttgagagtttctctgtggcctgagaagtcaaagtttttaaaaaatatttacttgtcatgaaatattcacctaaagtagtaaagtaagacatacactagacctctcatttcttaatgtcagaaatcaagccttattagaccttctatcttggttattcaacataatacaccagatacagccaacagtcatacctcttcatggaacaaattggataaatgatgaagtacggacaaattagccctgtgtcattttcacaagtaattggagctcagtaggtacc

SEQ ID NO: 880826 - DNA, 720 bp, Homo sapiens
ggtattgggctgttttaggctgtgcactcttggtgggcaaggcctgtgccgtggctacttaatagttccatgctggatgaagttaagcaatggctcatttgtcaggtatctcagcagcaaaatttccagataaatgcaatctacttcagtaaatgctaaaactccttaaaaaaaatcaccttgatagaaatcatcttaaaatattctctcaacttccttttctctgcaggtagaaaatattgcacagaatgtaactctctcggtatcttgctcatcatcgtgagggtaaatattgtacctttgtgtgatggtgtcattagggtttgttaatatgtgtggaactcattgtccctcaacatgagccatcccaagactactatgtactttgtgttcttttaaggtttgtcagggttctcttctgcactgctcccacgtgtcagtccccagsagcctcttgccacctcgcctcttctcatattttacatcaaataacttgctgtgactgaggaatgagatcgcatagattatcaaggtgaatgttaagcaagaataaataggccctgaatgcagactagatgaccccttccacaagttacctctttaacttgtgtgtggacaagcatgtgaactttcggatacgtatttcagcttctcagaagtgtgtctgactgagggtccatgctgtattctggttagttaaggtttcaagataaatgagct

SEQ ID NO: 880827 - DNA, 618 bp, Homo sapiens
gggatacgttgatagaatgatcagtgaaatattatatatgggtctcatctattcaacaaaaattggctgagcaccaaatacaagcaaggagcttttgtcaaatgtcttttctgtatctattgaaataactgtgtagttttgtcctttattctattaatgtggtattgttacattgattaatttttagatgttaaaccaaccctgcattcctggaatacattcyatttggtcatactgcataatctgttttatatgttactgaattcagtttgctagtattttgttgaggatttttgtatctatgttcaaaagggataccagtctttctttttggggggatgcctttgtctgattttgttatcagggcaatactggcctcatagaatgagttgagaggcattcactcttctattttggaagagtttgagagagattggcattaagtcttctctacatatctggtcaaattaactagggaagtcatccaggcctggggttttctttgtgggaagtttttgattacgaattcaatcctttcatttattataggtcttgtgcaagggactttctattttaagggaattcacatttctaaagacttccaaatgtcacacaggt

SEQ ID NO: 880828 - DNA, 649 bp, Homo sapiens
aggtcacataaccatatggccaactagaaagaataattactcctacctgatactgcttggtttcagaattctcctacttatattcagatttaattaacatattaatcccctatcttattccaattactacttaagtggctttcatatacctttagattagccagggaacctaagtatctraggacccctgaaaatgggtggcagcaagaagtctgatctactcaaagctacacttaaaggatatcctgaaccaatgcctctgatgctgctgaaaccaccattaatgatgttagacacatgattagtgcttttatacatttcatttcattttattctcaattccagagacaattccctttacagatgaaaattgaaactcagaaagcctgatttgtccacttacaactaataaagaggaagatttaaatatctaaacacagtctcatcagtgaaatctacagttcttcctaactcatttagcttggagctatccatccttgacttcattattcctactgcctcgtggtggctagaactttagtaacaggatagtctcggatttaggcaacaacctcctggcttcatcagaactacctatgagccaacacaaatgggagccaaagatcaagaaagcaaaaagtgctcacta

SEQ ID NO: 880829 - DNA, 514 bp, Homo sapiens
cattgatggatgtttgggttggttccaagtctttgctatcgtgaatagtgccaaataaacatacatgtgcatgtgtctttatagtagcatgatttaaaattcttcgggtatatacccagtaatgggattgctgggtcaaatggtaattctagttctagatccttgaggaatcgccacactgtcttacacaatggttgaaccaatttacactctcaccaacagtgtaaaagcattcctatttctccacatcctccccagcatctgttgttttctgacttkttaatgattgccattctaactggcatgagatgataccgcattgaggttttgatttgcatttctctgatgatcagtgatgatgagcattttttcatgtgtctgttggctgcatagatgtcttcttttgggaagtgtctattcacacactttgcccactttttgatggggttgtttgtgtttttcttgtaatttgtttgagttctttgtagattctggatattagcactttgtagga

SEQ ID NO: 880830 - DNA, 611 bp, Homo sapiens
ctcctggattcattacttttttgaagagtttttttaagtgtctatctctttcagttctgctctgatcttagttatttcttgccttctgctagcttttgaatttgtttgctcttgcttctctacttcctttaattttgatgttagggtcctgattttagatctttcctgctttctcttgyggggatttagtgctataaatttccctctacacactgctttaaatgtgtcccagagattctggtacgttgtgtcttttttctcattggtttcaaagaacatccttatttctgccttcatttcgttatttacccagtagtcattcaggagcaagttgttcagtttccacatagttgtgtggttttgagtgagtttcttaatcctgagttctaatttgattgtactgtggtctgagagacagtttgttataatttctgttcttttacatttgctgaggagtgctttacttccaattatgtggtcaattttagaataagtgtgatgtggtgctgagaagaatgtatattctgttgatttggggtggagagttctgtagatgtctattaggtctgtttggtgcagagctgagttgaggtcccgtatatccttgttaa

SEQ ID NO: 880831 - DNA, 569 bp, Homo sapiens
aaagtcttaccctacaaaagccaatcctaaaaactggaggaaatgactgttacaccagatgtggagatgtcagtgtaagtatacaagaaacatgaaaaagcaaagaaacatgacacctccaaaagaacataattctccaccaacagattccaattaaacaaaaamtgatgaaatgtctgaaaaagaattcaaactaatgatattaaagaagctcagtgagatataagagaacacagacaaacaatacaaagacatcaggaaaacaattcaggatatgagtgagaaattcaacagagagatagcataaaaaagaaccaaacaggccgggcatggtggctcacgcttgtaatcccagcactttgggaggccaaggtgggtggatcatgaggtcaggagatcgagaccatcctggctaacatggtgaaaccctgtctctactaaaaatacaaaaaattagccggggcatggtagtgggtgcctgtcgtcccagctactcaggaggctgaggcaggagaatggcgtgaacccaggaggtggagcttgcagtgagttgagatcacgccactgca

SEQ ID NO: 880832 - DNA, 506 bp, Homo sapiens
aaatgccacttctctcttttctagagaatagcaagagtgacctcttttccactccccaaaatgttcctcatctccatctgagaccacctcagcctggacttctttgtccatatcactatcagtattttggtcaaaatcattcaacaagtctctaggaaattccaaactttcccacattttcctctcttctctgagtcctccaaactgttccaacctctgcccrttacccagttccaaagtcacctccacatttcaaggtatcttatatcaataccccactcttgttaccgatttactgtattagttcattttcacattgctatgaagaaatacgcaagaccgggtaacttataaaggaaagaagtttaattgactcatagttctgcattgctaaggaagcctcaagaaacttataatcatgcagaaggcaaaggggaaggaagaaccttcttcacagggcagcaggacagagtgagtgcaagcaggggaaatgccagacacctata

SEQ ID NO: 880833 - DNA, 693 bp, Homo sapiens
gacatgcaaaaccagctttttttctctgatctcatcctaacctcctctttgctaattccactttagttacactatcttctttttgtcccttgaacataccaggcatattttgccctcaagacttatcccattcttctacctggaatgatcaactccaaaaaactaaatggctcactattttattacctttacctggtgaaactttacttgcttaccccgtgtaaaattcaagcamctttcctcttcccctagatttcctgtctccctttcctttacatgttttctgtaacatgtattcattaatattctataaatcttctttatttatcctgcttattgcctaccactcccacactagaatgtcagctttataagagcagaaacctgtgcctgtttttttcattgcgctatgctcaacacctacaatagcacttggaatatggttggtactcaatattcatttgtagagtggattaataaaccattcagtgaggagaagtttaacaaacagagatgaattagatttagatgcaaaaattatggataacctgaaggacattatgctaagtgagataacacactcacaggacaaatactgcatgattccatgtatatgaagtatctaaaatagtcaaactcacagaagtagagaggagaatggtggttgttaggagctgggggaaaggggaattg

SEQ ID NO: 880834 - DNA, 573 bp, Homo sapiens
aatggcataaagattttgatacatcagtaaaagtattttgtctgttactctgagtgacttaggagatgtttcagagttttaagcactgaagtgttgtaatttgatttatgtctttaaaatatcttggctagcctgaattgagaatacaccatagggatcaggaatagactcaaggagacytattgcaataacctagatgaggaatgatgatggctcaggtgggagccatggatgacgtaagaggtagttgagtttctgatcattctgaacgtagaacaaatagtatggatcacacttggggtgtcagaggagagtcaaagatgactgaaattttggcctgaaagtcagaaaagatggaataacctgaactgagatgaggaaggctgccagaggggtggaggaagaaaagagttcagccagccattgataggtgtatctgaaaagcatactagacatccaagtaaggatgttgagtaaacagttgggtataaatctggagtttggggaaagtatagagataaatgtttggagatcaccaactttgaaactgaataagatcaccaagggagtgag

SEQ ID NO: 880835 - DNA, 602 bp, Homo sapiens
tgccacactttgttctaagtgttggggatacagtagtggacaaaagaaagtccctgcttgagtagaatttagattttagtgacataatacaaacagtgaatcaataaatatataacatgtctgatgatagagagggaaatacagggtaagaaaatagagattgtctagtgcarcagtaggaggatctctggggattgatattttatatatatgggaatatatattttatatatagggatatactctctaatcagttcattgacatttaagcagagactttaaggaagtgagggggtaggtcatgtagctatctgtgggaagagcattctgggctgaaggaacatcaaatgcaaaggcattgaggcagaatgtgcctggtttgttggagaaagaacaataagattagggttgccgatgggttgtaagcaaggggtgagtggttggagatgagcctggagtcattgtgtagggctttgcagaccattgtaagacaatttggctttaaaaaattgagaggagatgctattagaagattgtgagcagaggagttaacagggtctgtctagctatgttcacacaaaaacctgtacatgaatgtttat

SEQ ID NO: 880836 - DNA, 659 bp, Homo sapiens
ggtctgatttacatcactgggatacccttttgcttgcagttctacccagagctctgagggtctttcacccagcaggggccagtcccacagcgtgtgcccccacagctcactctgatccatcctgggtcctgccactcctgggtcttccaaccaggctctcataacggatcatacctgctctgaggggagttcacagtttaactaaagggactcagagagggcccctcccttgtcccaagaggagagccccactccccttttcccagactaatttactgacctctgaactgtaggagtgcagggtgctccacccccactccaccttaggacacaggcttacaaaacttaaaacacttctgtgtcctcaagataatcttggggaggaaactgaggctctgagaggggtgtgctctagttgcccagggccccagttcaaatcttggttgttggttgttctgaccctttccattacaccatcccattcctctccatccaaatctccttggaggggawggcaattaaccctcagtccctcagaggaccaccagctgcagatcctaagaatcaggaaggtacagtaccaaaggcctttccatgacatctccagttttcccaggtccacctcagagggactctgtcaggtaaccaccacccaggag

SEQ ID NO: 880837 - DNA, 518 bp, Homo sapiens
ctagtctcttgctgtccctgccggcagaccactctgtctcctacagggcatgcatgtgcaggatcaggtgatatgcgtgatcagtggctgcagcctagaaagatggcagagcaagagcaaagaaaaaaattccctttgattccagaatatctcctgaaaaagatgaagacttttcaagccctcaaagccatccaggcaaagtargcacttctggtaaagaatgagcagaggaaaggaagaaggctcaggtttaagcgactggaattcgtcctacatgattcctagcagcagaaatgtggcagggtgcatctcctatgactagaagtgaagcctcatgccttagaattgccagataaacttttcttggcctctgttgtatacatccaaaggattaatggggtgagttcactggtgcagaggaacactgcaagagttctgaagattttctgtggtgtctgtcaaagtcatcccccagagcctaaaagtggaaacttatgtgacctggggatttccaaatc

SEQ ID NO: 880838 - DNA, 549 bp, Homo sapiens
tcaagagtattgtcatctgcatgagcaaacctggtttatcaccacatctttgcaagaggaaaaagaaagggggagaatcatgtataacgttgtaaggcaaagattcacaaccaaaaacaaggttttattaactttcgcctttaagaaccttcagtgtttagccctctttgattcctagtattactacctttggtatgaactctttttttaaactgatccactctagaagtttatgcattttgtatcatttttcaagccaacagaaatgtgtaakgcctataattctgacatttttagttatttttaaggctgtgagcatgtaagatagtgttcatatatggaagaatatgtataaataccactaggtagcttattttgaagagatagtatctaaatttttgtccagagtagattggttgcagtttcttaggtgtgtctcttaatacgttgcctcaatgttttaaagcatgtagaaatttgaacacagtttaacttcatatagtcctttgtttataggtttaatacttctaaagactgaagacatcacag

SEQ ID NO: 880839 - DNA, 570 bp, Homo sapiens
  misc_feature 273: n = A,T,C or G
ttttgcagtttgatagatgaagaagacaatgaagctcagtgaaatctatttaaatttctctaggtattgtggcaaacaagtgaggaaacaggatttgaaactacatttattggtgatgattttaccaatggaatttccactactacgtaatgcatttggtagtcatagaaaagaaacccattctcctcatttgtgataacttggatgargaagaatgaggactaggagacataaagaacctaatggactgaaatgctgacatgacttgctgtnctctttttttttttttttttttgaaacagtctcgccctgtcacccagcctggaatgcaggggggtgattacggctcactgcaacctccacctccagggttcaaatgattctcctgcctcagcctccccagtagctgggattacaggcacacgccaccacaccccgctaatttttgtatctttagtagagaaggggtttcaccacattggtcaggctggtcttgaactcctgaccttgtgatccacccaccttggcctcccaaaatggtgggattacaggcatgagccactgcgccca

SEQ ID NO: 880840 - DNA, 553 bp, Homo sapiens
tcatcccccaactacttatttattacttatatattgagcacctactgttactcaggcactatttattaaagttctaggcataaaatggtgaacaagataaggataatctttgattccgcatattttctgtacgctcaggaaacagacaatgaacaagcaggctaatgaaaaaaatagtttcagattgtcttaagcactatgtgggaaataaccaaggtgctgtgctagaagcaagctgttggagggagtgggaagtaattttcaaaatctttcaacaagaagcctaagaaattcctcactgggagatgacttttcagcctagacctaaaggatgagaagaaactggatgtgaaaaaaagtcaaaaaaatagatgagaaaaaagatcctgaagggtgaagcagcttccttgatttaatrtgtatttttagggtgcaatgaactgggggagaggggttgaggtgagtttggaagatggaggaggaggggaggccagacccttcaagttgtggtagaaagtttgtattttattctacgtgaaaaggaaatgctttt

SEQ ID NO: 880841 - DNA, 604 bp, Homo sapiens
ctgaaagtgacaaggagaatggaatcaagctggaaaacacacctcaggatattatccaggagaacttctccaacatagcaagacaggccaacattcaaattcaggaaatacagagaacaccactaagatactccttgagaagagcaaccccatgacacataatcatcagattctccaaggttaaaacaaaggaaaaatgtaaaggcagctggagagamaggtcaggttacctacaaagggagacccatcagactaacactggatttctctgcagaaactctacaagccagaagagagtggggacaaatattcaacattcttaaagaaaagaattttcaacccagaatttcgtatccagccaaactaagcttcgtaagcaaaggagaaatgaaatcttttccagacatgcaaatgctgagggattttgtcaccaccaggcctgccttacaaaaggaaataaggagaaaacatggaaaggaaataaatatggaaagaaacatggaaaggaaataaatatggaaaagaaaaactggtaccagccactgaaaaaacacaccaaaatataaagaccaatgacactctgaagaaactgcattgactattg

SEQ ID NO: 880842 - DNA, 620 bp, Homo sapiens
ttcttctcagcaccatatagcacttattctaacattgaccacataattggaagaaaaaacactcctcagaaaatacaaaagaatgaaaattaaaaaaaaaaagtctctcggaccacagcacaatcaaattagaactcaggattaagaaactcactcaaaatctcagaactacatggaagttgaacaacttgctcctgaatgactactgggtaaataactaaattaaggcagaaataacgaagttctttcaaaccaatgagaatgaagagacaacatagcagaatctctgggacacagctaaagcagtgttaagagggaaatttatrccactaaatggccatatcagaaagctgaatagatctgaaattgacactcgaacatcgcaattaaaagaactagagaagtgtttagaatggcgatcattaaaaagtcaggaaacaacagatgctgccatggatgcagagaaataggaaggcttttacactgttggtgggagcgtaaattagttcgaccattgtgaaatacagtgtggcaattcctcaatgatctttaatcagaaatatcatttgacccagcaatcccattactgggtatatacccaaaggattatgaatatttct

SEQ ID NO: 880843 - DNA, 605 bp, Homo sapiens
tctgactggactgctctgttcaacacaaccatcaaaatgttgattttgaccatcctagcaatgagaataaaaagcaacatctgaccctttgacagtggcatttataaaaatgaaatctcacatatacatgagggtagggtcctgagctacctaaagtttgtaaactcatttcagtaacttgaagaaacctctattagtaagcactaattatagaatcccacatgtgagacacattacattcatgggttgattggcatcattctcagttgatctgagattatcatcaaaaaaattttgacttargatttctttgccaagttacatcattcctaaagcatctaaaatcaggcagggcagaatagaaccacatgctgatgtcacagggtgtaggtgggtttgaatggtctctgatttagtcaacattcatgctgtaattgtgaatgatagctgctctgtgatactaataagaatgctcacctgctcaagtgatacgcccttgaacaacaggtcctcacagttggcagccgggtggcaggagggctgctatagaaatgaagttatagagacctaacagaaccactggcagagtgggatctttgagccaa

SEQ ID NO: 880844 - DNA, 621 bp, Homo sapiens
aaaaaaacctatgactttttttttttgagatggaatctctcactgtcacccggactggagtgcagtggtgccatctaggctcactgcaacctccgcctcccgggttcaagcgattctcctgcctcagcctcctgagtaactgggactacaggtgtgcaccaccatgcccggctaatttttgaattttttttagtagagacagggtttcaccaagttggccaggatggtctccatctcttgaccttgtgatctgcccatctcagcctcccaaagtgctgggattacagacatgagccactgcgcccggtctaaaacytacgactttaaaaattaatagtttgatctatttttctttgtctttctactgtttcttatgatatccagggtcaggaagaaagggctaagtccctctttcttctagccttgctgtattagtcatctattgctacataaccaattgccccaaaacttggtagcttaaaacaacaataaacatttgtcatttctgacagtttctggaggttaggaattggtgaatggctgggtggtctggggttgcagtcaagatgttagttggggctgcttggctggagctggaggatccaattttagggtggctca

SEQ ID NO: 880845 - DNA, 605 bp, Homo sapiens
gaacctgccctaaactttgtcctggaactttgcccagctgttggtatcactgacctcccagagcatgtgaaatagagcctgggttaggatgagactctacagctagagtcccttgctagctgtgtgggtctgggtgtgttaattagcctctctgaggctgtttccacatctgtaaaggaggggtggcttcgtaatctgttcagttggctaggctgagctccattttacagaattcccytccctgtgtatttctggctaggatggcttacaggaaaccttcgggcaacagctttgcagggtggaagtgaagctggcagccattttgtagctcacacggcttgttgcttacctgctggcctacgtctttggtgtggggcctgcgacttttctaccttccctgagatctctgttcagcctcttcaacctctgagtcaggcctgtgtattcagctctatgacagggcaccagcctcccctaaggatgcccaaactgccaaggctggaggtgcaagaactgatgtggctcgcaggctgtcctcgtggtttccacctccccctagtttgcctgggtctttcccaattttaaaactgaaagtcttgaatctc

SEQ ID NO: 880846 - DNA, 654 bp, Homo sapiens
ctctaattctcacacccaacaacccatggtaatcttttctactccgtgttaatatagctctttgttattcctctctcctagaatttatctaccctgttctttcagtatgtccctgttttttctcttactagttttagaatataccattcttaaacctaagaactatagcctattctttactatttgtttggagtactctcagtgcttagtatagtcatacaaaaaaaaaaaagctctcaatgttttctggattggactgtgtatgcaggaggaatttctaaatgagaaaatgaaaataacaaaagtaatgtcctcctcgaagagtcatcaggtagctctctatctcccctgaactttactcaacaatgtcaaracaggctttttgatttcacaaccctgatattttgtctttagatttatttctttcaaaagacataggagctttacatactccagtataatgattctatgtcttaccaaatcaaatatgatgtttagtaaaagtttcattcatttcaatgtaatttaagagacactgctaaaaagatatagtattacttttatatattaattgtatatttgattgtggtatttctagccatttctataaaaagattagaattaaatcttgattcagatatttaactcttacag

SEQ ID NO: 880847 - DNA, 647 bp, Homo sapiens
tcccactctctctggcctcaattgtttctgatataatgtatccctgtatttaaagtgttatttttcctttgctactatggagaggggaaagtactatcttttcctcacccatcgcaaaattcgtagcttaaacccatgtaacaaacagcagcaaaccataataaccaaaaaacaaaaaaacagaacaaattcacataaccaaaattttacatggtacagagccttccaaaatgaagacccaaggctgggcatggtgacttacatctataatcctaccgttttgggaggctgaggtgggagatttacttgaggccaggagttcaagaccagcctgtgcaacayagtgagtcctccatctctacataaataacattaaaaagtaatttttaaaaataaagactcaaaacccatgaaaaaactatgtgtttttatggatagtcatgcaaaagtatgaatgagacaaaagggtataatttaatggtaataaactgtaaacatttagcaaagcctatgtgttcagattcttcatggcctgtctaacattccttccttccaggtataggaaaggacatctgtcacatgcaggtatttaagagagagagggtaggagaaagtcaaagagaacttttctgcttgtgtggtttatt

SEQ ID NO: 880848 - DNA, 649 bp, Homo sapiens
taattagcagtaattaaaaagtaatgatgatgtctttttagtatagtcctgatctcaccaacgtgaagtttaacagtgttgttggagttctagatacaaaagcagagcctcagttcctaaatgggtctcctggttttctcctttctctgatttttaaatagttattccattgtgcaagttaaaatggtacaggatgcactaatttaaggtggrtttaacttagaactgttttatagcaatgcagcaaggcttgatgtgggctgcttgtgtttttcaatattttgtttcctcttgccttttctctctccttactggggaagaaggttttgtgtgtgtatctggggagaaatagaacagtgattctcaactgcggttgatttttcccactctttccacagacatttggcaatatctagagacatttgcggttgtcaggaatcaagtaaggatgctactggtatttcctggatatagcaatattgagagaagctttaaatggtaaggaggagctaactattcagagggggataggaagatttttccaagcagacaggcatcaagagcacaggcaggtggatgcaggtggcaacaagctgtttggtgtagctgatgtataaaatatgaagcaaggaagagcagctgaatcaag

SEQ ID NO: 880849 - DNA, 649 bp, Homo sapiens
taattagcagtaattaaaaagtaatgatgatgtctttttagtatagtcctgatctcaccaacgtgaagtttaacagtgttgttggagttctagatacaaaagcagagcctcagttcctaaatgggtctcctggttttctcctttctctgatttttaaatagttattccattgtgcaagttaaaatggtacaggatgcactaatttaaggtggatttaacttagaactgttttatarcaatgcagcaaggcttgatgtgggctgcttgtgtttttcaatattttgtttcctcttgccttttctctctccttactggggaagaaggttttgtgtgtgtatctggggagaaatagaacagtgattctcaactgcggttgatttttcccactctttccacagacatttggcaatatctagagacatttgcggttgtcaggaatcaagtaaggatgctactggtatttcctggatatagcaatattgagagaagctttaaatggtaaggaggagctaactattcagagggggataggaagatttttccaagcagacaggcatcaagagcacaggcaggtggatgcaggtggcaacaagctgtttggtgtagctgatgtataaaatatgaagcaaggaagagcagctgaatcaag

SEQ ID NO: 880850 - DNA, 663 bp, Homo sapiens
caaaaagattgaaatggcaagaagtatctttagaggaaataaacatgagaaagtactaagataaactggggcactgggactggcaatgaggattcggtcttcagcagagagccttgtgttactgttttcctacactgatggctaagtaccttagctccagcaaggatgggatccagcttccagggggacaaataacagacacctccagagggktggtggccctactggaatgcccagggcacacagctccgacaatggcaggatccaagacagagcaggcaaagaagacaaggccattcttgaagaggactaggggaaatggatgatttcagcattatctgatggaaaaaagagccaggaaaatacagcttcctacagtttgtgtgtctcaatgtttacttccaaggacaatttaggttaaataaaacacaatggttgatgtgtttatttttattttattctaatttaccttttccgtattcacacaagtagcccaagtctcctgcctcttcaataacccccttcccccatcacacacacacacacacacacacacacacacacacacacacacactcttatttgagtccttggtttggcttttggccattcatactagtttatgatttcaaggagaactggcataaattgtgaggggcaagg

SEQ ID NO: 880851 - DNA, 633 bp, Homo sapiens
gttatgtctagctcatgctagaatttaaggcctccctttctctatctattagacctaattaattaccaaatctgattctttctctgactctaaatacctgtctcatttccttcccactaccggacctcacagtacttcccttaattcaggccactattttcatccagatcagttaccaytatcttctcacatgtcttccggcctcagttgtgaccccctcaagttaattttttcattctgccaccagaagattcttaaacacaagtctgatcattgcactccagtacataaaatcttgcaaggccaatcccccttgtttgtaggataaaatacaaattcctttatacagcagacaaggtccttcatgacctgacactcgtcctcttcagcatcatttcttttcattattatttctttccctctgcctttctctgttccagcccaactagctcttttggttccttgaatatatcatgtttttctcaactctgaaacctcaagcatgctatttccttggcctggaactctgtctgccacaaactccaatgtccttaaaacacacatatttcatctgagtcaggctgagtcatccttcagtataagctcagatacttcttcctcaagtgtttcaat

SEQ ID NO: 880852 - DNA, 633 bp, Homo sapiens
gttatgtctagctcatgctagaatttaaggcctccctttctctatctattagacctaattaattaccaaatctgattctttctctgactctaaatacctgtctcatttccttcccactaccggacctcacagtacttcccttaattcaggccactattttcatccagatcagttaccactatcttctcacatgtcttccggcctcagttgtgaccccctcaagttaattttttcattctgccaccagaagattcttaaacacaagtctgatcattgcactccagtacataaaatcttgcaaggccaatcccccttgtttgtaggataaaatacaaattcctttatacagcagacaaggtccttcatgacctgacactcgtcctcttcagcatcatttcttttcattattmtttctttccctctgcctttctctgttccagcccaactagctcttttggttccttgaatatatcatgtttttctcaactctgaaacctcaagcatgctatttccttggcctggaactctgtctgccacaaactccaatgtccttaaaacacacatatttcatctgagtcaggctgagtcatccttcagtataagctcagatacttcttcctcaagtgtttcaat

SEQ ID NO: 880853 - DNA, 572 bp, Homo sapiens
gtgaaaccccctctctactaaaaatacaaaaaaaaaaaaagaaaaaatttagccaggcgtggtggcgggcgcctgtagtcccagctactctggaggctgagacaggagaacggtgggaaccccggaggcggagcttgcagtgagcctagatcgcgccactgcactccagcctaggcgacagagcgagactccgtctcaaaaaataataataataataaaataaaaaaagagaccagggtagaatgtagagacacttattggatttggggtgcgagaaggcagaggagatgtgaagaaagagtgaacggcatgaaaatcaatcattgctatwactaatatgttgctagtaagagctccaaggaaattctgttcagctttcactacattttagatacttctcaaatagtaaataatgagtcttcagagcttgttcacttacatttctaaactttggattttggcaatagaaaaatcaggagttaaaggaatctgggctataacactgtactccagaatttttgttgttttatcttctctttcaaacttaaaccgtgttgacaaagtaattgggt

SEQ ID NO: 880854 - DNA, 501 bp, Homo sapiens
aacagagggggaatgggctgccttactgaactatgtccttagtttattttggacaagtcactttctagccccagtgtgttcaaatccttatatgattctttcctccggatttgtatctggagataaagaactgagagccaggtatggcttgctatgtgacctcagagaagttatttttccttttgttagatatccctggtccatggatacgtggccagcccagtgcctactacagcaattcttcatccaactcggtgtccacaggacactttcaacattttcaaaaatgcaaaacggccactgttttcacaaaaatgttcttgtcctttatgcccttcagagctagaatctgttakggttagggagggggaaatgtggccctgtccacatgtggtgtatgtaactctgaagccggtacctactgcagtggccaggtgagtaacccgagtgctttcagtttttgtgctaagattccctctcctggcctacgtggcatctatt

SEQ ID NO: 880855 - DNA, 646 bp, Homo sapiens
ctgctccaagaggagaaaaacattctgttgctttccttttttataggacaagtgtgcaagtggctttacatggctgaataaacatttggggttcaggccccaagcattcttagcttaggtgctgggtgttaggggaatgttggggaatgccagctgcccacacctagggatattagggggctctggttctatgaggtgttgagttggaacgcagcttttctttgggggatggagaagggaagtcccagtatcagttagttcattatcagggaaccctgaaacagctttaagggtagttgaaattacaagacattcttgcttgtcctcacaaaagcacttccgctcctcaaagtgcargcctgactcctggctcatggatccactccggagaatggggaaaggctgttctcacacttctgtgatgccactttattcaggccttcgatcctcggatatgttgaagcttgggggctggagataaagaaaggggtttaaagattttctcttaacggattaagctataagaccttcattggctggtgatgactgttgcatagctggtgtttaatgctgcctccttgtggaggcataagatgtcttctaacatgactcttttcaacttcagcctcagtccccatctcttgat

SEQ ID NO: 880856 - DNA, 587 bp, Homo sapiens
ctggagtttgttccttcagatgttcagatgtgttcgtagtttcttccttccggtgggttcatggtctcgctgacttcaggagtgaagcctcagaccttctcagtaagtgttacagctcttaaaggtggcgtgtccggagttgtttgttcctcctggtgggttcgtggtctcactgacttcagaaatgaagccacagaccctcgtggtgagtgttacagctcataaaggtagtgtggacccaaagagtcagcagcagcaagatttattgggaagagagaaagaacaaagcttctacagcayggaaggggacccaagagggttgctgctgctggctggggtggccagcttttattcccttatttggccccacccacatcctgctgattggtccattttacagagtgctgattggtgcgtttttacagagggctgattggtgtgtttacaaacatttagctagacacagtactgattggtgcgtttttacagagtgctgattggtgcatttacaaacctttagctagacacagagtgctgattggtgcatttacaaacctttagctaaacagaaaagttttccaagtccc

SEQ ID NO: 880857 - DNA, 576 bp, Homo sapiens
actgaattttaggaatggaaaaaataccgcagtgaggaggagtgagacactgtgatacagcagaaggatcccgggtttaaattctgacaccactacttcctaattgtgtgaccttgaataacattagttttccgtaagtttgaattctcttgcatataatagagttgycataaaaactaagagacaatttatgtccaagtgctttaacatctataaagtgctgtggaaataccactggttgccttctgcccaagcccctcttgttgaatagactaaaaaactatttaaaaatttgattttcttttctttcagagattccacatctggacataaacctcatggaactgtctggtataacatacatcaacagggtaatacttgctgtcatggggtgaactgtgtccccacaaaattcctaagcagaagccctaaccctctgtccctcagatgtcactgtatgtggaatagggtctgtacagaggtgattaaggtaaaatgaggtcattagggtgggccctaatccaatgtgactgatgtcctaaaaagagattaggacacagatgattaggacacaga

SEQ ID NO: 880858 - DNA, 627 bp, Homo sapiens
ctcaccatgtgtccctgaatcctttagatgccaaagctcccctcctcttttgattcaaaacatttatttctgcctgctcacagggcacttaacatgcattgccacttggttccagggatgttcactggttgctagccacatatcaagcaccaagaaccctcctggatgtagtgacattgtggttctgcatttcccttgctgttccttggctcttcttaagtgttcaggccttgtctccttgaccaacgcatggtctccctctgggtgcgctgtcattcacacatctgtgtgtctggcacagtgccaggctcagaatggatactaaacaatggtgaggtattgtcccatgcctcttattagtgttaagtctgaggcacaggggctctaagtgatgtccagaggccaactmacataattagcaacaagtctaggagacaggtatcctacatagggaaaagttggagtttaggtccagttttacttgtttttagaatgttgtcaagtcacttcatcacagtgatttacagaaagtttaagagatagactgaagattttaactcctggcttggctgtatgatcttgggcaagttatttaacctctctgtgactgatcatctgtaaaatggg

SEQ ID NO: 880859 - DNA, 609 bp, Homo sapiens
aacagcatgccacgctgtctccccgacccctaccaccaaagatacctttcagatggcagctttttcccccaaacaccttcttcagtagcattatcttagaaagttattgaggtgcttaggtttacagacttggaagcctgactgtgtgatgcaattgagaatcatctgtctctaagattcagatgcatattcgttgagcttaaggttgacatacaaacatagaatgcaaatttatctatttatagtgaaacttctgtcttargaatcagaatactcaagtcctcagcaccagcacattctctccctataggtcatcccatatagggagcccattataatcagaagactttccagggtgacatgagaacatactgttagtttgatgaacttcagtgtttcttggcaacaggctaaattagcttgttgtttacaccgccacaaaaagaaagaccttgacaatggactacagtattctgtgtctggctaggcctgtttaaaatgctttggtgagcagcttacatgtaactttctgactctctttttaaatcttccataactcatcaggcatactttgtatcaacatattatttctttagatgtgttaatgaa

SEQ ID NO: 880860 - DNA, 668 bp, Homo sapiens
atctggtcctgggcttatttttggttggtaggctatttattacctcaatctcaaaacctgttattggtctattcagggatttaacttcttccaggttgagtcttggtagaatgtatgtgtccaggaatttatccatttcctctagcttttctgatttgtgaggatagaggtgttcctagtagtttctgattgttatttttatttcttgtggggtcagtggtaacattctcttcattatttctaactgtgcttatttgaaacttctctcttctttattagtctagctagcagtctatatattttattaattttttcaaaaaaatagctcctgaattcattgatttttttgaaaggtttttcgtgtctctatcttcctcagttcagctctgatcttggttatttcttgtattttgctacctttggggtttgtttgctctgggttttctagattttttagttgtgatgttagrttgttaacttgagatctttctagctttttgatgtgggcatttagtcctataaatttccctcttaacactgctttagctttgtcccagagattcagctacattatctctttggtctcattagtttcaaagaacttcttgatttccgccttaatttaattatttacccaaaagttattcaggagcaggttgttcaatttc

SEQ ID NO: 880861 - DNA, 616 bp, Homo sapiens
ctcaaagcattgatcacattctgggcttatcttgcttattcattcgtgtgcttgataaatgtctgtctcctcctctagaatgtaagctccatgaaggcagcaacctcatcagtgatcccctaacatggggtctgacatatggtgggtatagaatgaatcactcatgaaaacatctcagcaaggatgacagacattaagactttcatcagaaaaagttgaagtccagtgttgggtagagagaaacttacctcaacgtcttaccaatatgaatatgtattatatacatataaacaaatgtatacacacatgtataaaaatcacagactaacatatatacatatgtacctatgatttatacatatttaaaacatacatgcatgtacatatacaaatgatattatacaaaatttcaagtrtgtacaaaagtagagagaagagtatgatgaattccccccaaggctccatcaaccagccttaacagtcatctcatggttaatcttgtttcataaacacagcttctcatttttctctctgtctggattctttcagagcacattccagacatcatgcttttctctataattgtaatgtatactctagaaaatagaagcagtca

SEQ ID NO: 880862 - DNA, 582 bp, Homo sapiens
atttatgtcacatgtaaagaacaccaagcttagagaacctgtatcttttatgatgggctgcaagcaaatctgaccaacttttgctgtagaagaaggcattttttttttaatgctggatgatgaatccacctttttctctgaagagacacrctatctcccaaggctgtctctatgtaaacatacttgaaaaagtagtttgtaagaaaagggcagtagacacctctgttttcaaaatgtgcagacatgctaaagactcatggagaatcatcttctaacagccacttcttacaattaatcacaataacattttcttttaatattcttaacacaaaattactccatttaattttattcaataaaaatatggattgtagtagagctgttatgaagaagaatgtgaaaacagtgggcttgctagacttaagcatatgagtacagagtaatgggtctctggcaactgagtgtacaagtggttggggcatgctagtctactagaaaggcattgtgatatataatgcaactgagcacctacaatgtattgaacactgcttttgtttaggggcatgcaaaagctagaaagca

SEQ ID NO: 880863 - DNA, 582 bp, Homo sapiens
atttatgtcacatgtaaagaacaccaagcttagagaacctgtatcttttatgatgggctgcaagcaaatctgaccaacttttgctgtagaagaaggcattttttttttaatgctggatgatgaatccacctttttctctgaagagacacgctatctcccaaggctgtctctatgtaaacatacttgaaaaagtagtttgtaagaaaagggcagtagacacctctgttttcaaaatgtgcagacatgctaaagactcatggagaatcatcttctaacagccacttcttacaattaatcacaataacattttcttttaatattcttaacacaaaattactccatttaattttattcaataaaaatatggattgtagtagagctgttatgragaagaatgtgaaaacagtgggcttgctagacttaagcatatgagtacagagtaatgggtctctggcaactgagtgtacaagtggttggggcatgctagtctactagaaaggcattgtgatatataatgcaactgagcacctacaatgtattgaacactgcttttgtttaggggcatgcaaaagctagaaagca

SEQ ID NO: 880864 - DNA, 661 bp, Homo sapiens
cctgggcttatttttggttggtaggctatttattacctcaatctcaaaacctgttattggtctattcagggatttaacttcttccaggttgagtcttggtagaatgtatgtgtccaggaatttatccatttcctctagcttttctgatttgtgaggatagaggtgttcctagtagtttctgattgttatttttatttcttgtggggtcagtggtaacattctcttcattatttctaactgtgcttatttgaaacttctctcttctttattagtctagctagcagtctatatattttattaattttttcaaaaaaatagctcctgaattcattgatttttttgaaaggtttttcgtgtctctatcttcctcagttcagctctgatcttggttatttcttgtattttgctacctttggggtttgtttgctctgggttttctagattttttagttgtgatgttagrttgttaacttgagatctttctagctttttgatgtgggcatttagtcctataaatttccctcttaacactgctttagctttgtcccagagattcagctacattatctctttggtctcattagtttcaaagaacttcttgatttccgccttaatttaattatttacccaaaagttattcaggagcaggttgttcaatttc

SEQ ID NO: 880865 - DNA, 586 bp, Homo sapiens
ttgattttgttgagcagtggtttgtagttctccttgaagaggtccttcacatcccttgtaggttggattcctaggtattttattctctttgcagcaattgtgaatgggagttcactcatgatttggctctgtgtttgtctgttattggtgtataagaatgcttgtgatttttgcacattgattttgtatcctgagactttgctgaagttgcttatcagcttaaggagatttggggctgagatgatggggttttctaaatatacagtcatgtcatctgcaaagggggacaatttgactccctctcttcctaattgaataytttttatttctttctccttcctgattgccgtggccagaacttccaacactgtgttgaataggagtggtgagagagggtatccctatcttgtgccagttttcaaagggaatgcttccaatttttgcccattcagtatgatattggctgtgggtttgtcataaatagatcttattattttgagatacatcccatcaatacctagtttattgagagtttttagcatgcagggctgttgaattttgtcaaaggcctttttttgcatctttt

SEQ ID NO: 880866 - DNA, 624 bp, Homo sapiens
cagaattatgattgcttttattttttagagtatacattacaattatagagaaaagcatgatgtctggaatttgctttgaaagaatccagacagagagaaaaatgagaagctgtgtttatgaaacaagattaaccatgagatgactgttaaggctggttgatggagccttggggggaattcatcatactcttctctctacttttgtacayacttgaaattttgtataatatcatttgtatatgtacatgcatgtatgttttaaatatgtataaatcataggtacatatgtatatatgttagtctgtgatttttatacatgtgtgtatacatttgtttatatgtatataatacatattcatattggtaagacgttgaggtaagtttctctctacccaacactggacttcaactttttctgatgaaagtcttaatgtctgtcatccttgctgagatgttttcatgagtgattcattctatacccaccatatgtcagaccccatgttaggggatcactgatgaggttgctgccttcatggagcttacattctagaggaggagacagacatttatcaagcacacgaatgaataagcaagataagcccagaatgtgatcaatgctttgag

SEQ ID NO: 880867 - DNA, 627 bp, Homo sapiens
aggtgaaatttatgctaattgtatattttattcaacccaacatatccaaaatattgccatcacaacatgtaatcaaaaatatcctgagatttttacattatctactaaatattcagaatctgaggtgcatttacatttacagcacatgttagctcaaatcagccttatgtcaacgtctgttctcaagagccactagtggctactatgttggacaacacagaattagaatatcaggttcatgaattctctagtctgaatctcagttgtctctacaattctagtcttataaaaacatgagcccagcttctccattggaatgtgtccttacactgtactcagaaactttgcaaaacttcagttttgcaggatgtcagtttggatgcaagaaagacctttggggaatcaaacaaatcattttgatgtcagaagtcatagagctacactggcctgtatcagaagtggttaaaatkctttacatcatacattttatttgattcaccagtgtgagttgacaaaagtgaaataactaagattgtttagtgtaacaaaatacagtatgatattaaaaatggtcatattagctaagcttcctgaggacctcttcccaaaacaagttttcttccagtt

SEQ ID NO: 880868 - DNA, 576 bp, Homo sapiens
ccccaggtaaaatggctttgtgttcaaatagacaggcgataatgaatactggcaaggatgtggggaaaagagaatcttcctataaagttggtgggaatgggccgggcgcggtggctcacgcctgtaatcccagcactttgggaggccgaggcgggcggatcacgaggtcaggagatcgagaccatcccrgctaaaacggtgaaaccccgtctctactaaaaatacaaaaaactagccgggcgtagtggcgggcgcctgtagtcccagctacttgggaggctgaggcaggagaatggcgtgaatccgcgaggcggagcttgcagtgagcggagatcgcgccactgcactccagcctgggcgacagagcgagactccgtctcaaaaaaaaaaaaaaaaagttggtgggaatgtaaattagtacaaccactatagaaaacagtacaaatgttgttcttcagaagactaaaaatggaactagcatatgatccagcaatccaactacttggtatatatccaaaagaaatcaaagcagtatatcaatgatatacctgcactcctatgtttattgctgcactg

SEQ ID NO: 880869 - DNA, 576 bp, Homo sapiens
ccccaggtaaaatggctttgtgttcaaatagacaggcgataatgaatactggcaaggatgtggggaaaagagaatcttcctataaagttggtgggaatgggccgggcgcggtggctcacgcctgtaatcccagcactttgggaggccgaggcgggcggatcacgaggtcaggagatcgagaccatcccagctaaaacggtgaaaccccgtctctactaaaaatacaaaaaactagccgggcgtagtggcgggcgcctgtagtcccagctacttgggaggctgaggcaggagaatggcgtgaatccgsgaggcggagcttgcagtgagcggagatcgcgccactgcactccagcctgggcgacagagcgagactccgtctcaaaaaaaaaaaaaaaaagttggtgggaatgtaaattagtacaaccactatagaaaacagtacaaatgttgttcttcagaagactaaaaatggaactagcatatgatccagcaatccaactacttggtatatatccaaaagaaatcaaagcagtatatcaatgatatacctgcactcctatgtttattgctgcactg

SEQ ID NO: 880870 - DNA, 608 bp, Homo sapiens
gatttttcttaaaatttatttttgaaaatttaccatctttatattatagaattttctatgaggactgtatctgctgttcaagaaaattccttcttgcttcttatgcctaattgtgactcgttaagggaagaaaaagaggtaacatcagaatctgtcttagtgacttgagggtgaggaggaaggttgaggaaatggaaaatttgagaaacaagggtatgttatttcctgttttcaaacttctatttagtatcataagttcaaaaataaaacaatttcaaagcatgaagatggaaaatatatttgtttcttcttgagatatatagaagcatgatttttcaacttgggataagaaggtaatatatattacctccatatatacatatatatatatatatayacacacacacacacacacacacgtatatatatatatatattttattttctctaaaaagtgttgagtaacgtttttcttatatgatattcactacaacctagaaagaaatatgataaaaataaagcagcaaacatacaagaataacttttgtaaaaattgcaaattttattaacaaccctaagtctgaaacaatgggatacacattaggatt

SEQ ID NO: 880871 - DNA, 602 bp, Homo sapiens
aggaaaatgttgcatgaaagaaaacaaaaatgatagttcactttatgtgtcagaaggttttagtgggaagtgctatgaccaaccaactttttgatatattaagatatataacttgttgtacatcactttacaaaatcaatttttatccagacttaagaattttttctgtgtatattaaagtgtacattatgaatacacactaaaattatgacaaatttagaaatttaatgtttaagtttcatctgaaaggtattaattcagttattcagaaaatatataaaacagatataccaggcactctgtgaggagatgacttgtgaagcacacaggccaatataatttttttwaaaaaaataaagaaagtataatcttagactaacaattataccaaagctttttgaagggcataattaaagttaggaaaatgtgagagagtccaagaaagatagttaatccatttcatggtaatcacatgcagcttcttatagaaaggcgtacttctagatcttgacattattttagtaattaggccaagaaacaaaaaaatatggattatgtacatgaaaagaataacttgtgttataaataccaccacttatcta

SEQ ID NO: 880872 - DNA, 621 bp, Homo sapiens
ccagggactggagggagaaggaaatgagcagttgctgttcaacaggcgcaaagtttcagttatgcaaaattaatacattttagagatctgctatacagcattgtgcctatggttaacaatgctgtgttgcacacttaaacatttaagagagtagatcttatgctaagtgttcttagcacaaatacaaaataagaaaaagttattcctattgtgctatttcaaaagaaactactattcatacaatgaaaacagattcagatgaaaatttaagatattattatcttgaaattctagtacatttttcagttgctaagcttctaaatccatgatttaaagaaacattttcacaaatacttatgtgaagtcagtatatgcacatatattagaaataaaaatgtaatcaagggcaaggattttaagtagtcatgtacagtgatcagaaagcttcttcctcagaaaatgcacaaaacttcagagtaygtaataactttaatgacattcaatagataccataaagtaaacatcaagtcttggaaacaaaaagtggttaagtcttatagttgctaataatttggtaaccacagcatcatcagtgataatattcactagaagtgtgagaca

SEQ ID NO: 880873 - DNA, 612 bp, Homo sapiens
cgtgatctcagctcactgcaacctccatctcctgggttcaagtgatttttatggctgcatagtattccatggtgtatatgtaccacattttctttatatgatctatcattgatgggcatctgggttggttccatgacttkcctattgtaaatagtgctgcagtcaacatacacattcatgtgtctttgtagtagaatgatttatactcctttgggtatatacccagtgatgagattgctgggtcaaatggaatttctggttctagatccttgaggaatcaccatactgtcttccacaatggttgaactaatttatattcccactgacagtgtaaaaattttcctatttctccacaacctctccagcatacattgtttcttgactttttaataatcgccattttgactggtgtgagatgcaaacctgatttctgatgcaaaggaatactactcaaaatgattaaaattattgtgaaacatctcacagcaattaggtcaagtagaataagattatgtagcattattttacctggtttagaaatgtaatactcagatgtccagctcatggaaaaataatttacgatttaaagtgttttttaaaatgtttcctatc

SEQ ID NO: 880874 - DNA, 613 bp, Homo sapiens
gtagttacttaccacagttttaaaattacactttagtactttagattacttggttaattaatgtttgattaaatagtctatgcctctcttgctagattttaaactccatgaggtcagggaccatgttgtttcgtttactgctatatctccctggcacatagtaagcaaagaataaatcttcattcaacaaatgaatgaatgagagggctaagattctgtatctgtaaagattaaatattaatgggctggaagaatttggttgcagcggtgcatgtgcacacacagtagatatccatgcacatctatcggtttttagatgtgtactccagaaaggtagaggtgtaagagataatgtgaccagtagataaagagagaataccatgctattaactcattcatccattttttattcatatttgttcattcaagtgtcacmagaaggaaaatttgtttttatttgaacagctggcactataattttccttaggaagagaattgccttggttgcaacaataacacaaaaggctgtggaaagtatttgggttaagaagttagtccttcccccacaccattcgctctaccaccaagcaatgacagattaataccagtctag

SEQ ID NO: 880875 - DNA, 616 bp, Homo sapiens
gctcagtgggaagaaaaaaattaaagggcatttataacaggatgtaaaggaaggcaaagaggaacacaaagtctctttcttggagacctggaagacaaattacagagagtcgtggtgtgggcaggaggagcagcagctatgtgtgtgcatgtgagtgtgtgctcccacacataatacaggtgagaacaatcaacagagggttggactgatggccatgtgaaaaggatctgcctgctgtttttctgtgctcttcaactcccactattctccccatgcccttctcacccacatttgagagcctggcctttcctctcttccctttgtatatatggaatcagcatagatggacaartattccatctattgtctaaataagttgacatgagagaatttgactccacaagccaagacttccaactaactccttttcctgccagctggatctgtacaggagcaggcacttagggagaaacactgtccctactcctactcccactcaacttcctggctttgtgccatgcctctgcctcatggaatttcttttgtgtttttagggatttgggcttcatgttctttggctctagatcctggtcaatgctcttagtctcaaggaaca

SEQ ID NO: 880876 - DNA, 718 bp, Homo sapiens
caataacagccaggccaagagccaaatcaagaatacaatcccatgtacaatggtcacaaaaatttaaaatacctagaaattcatttaaccaaggagaagaaagttttctaaaaggagaactacaaaacactactgaaagaaatcacagattacacaaacaaatggaaaacattccatgctcatggattggaagaatcaatgttgttatcatactacccaaagcaatctacagattcaatgctattcctatcaaatcaccratgtcattttttcacagaaagagaaaacactattctaaaattcatgtggaaccaaaaaagatcctgaacagccaaagcaatcctaagcaaaaagaacaaagctggaggcatcacattactggacttcaaattatagtataaggccacagtaaccaaaacagcatggtactggtataaaaaaaaaaaaaaaacagacacatagggcaatggaacacaatggagaacccataaataaagctgtacacttacagccacctgatctttgacaaagttgactaaactaagcaataggaaaaggactccccattcaataaatggtgctgggatagctggctagtcatgtgcagaagaataaaatcggacccatacctttcaccatatataaaaactaactcaagatagattaaagatttaagggtttaaatgcaggacctcaaaatataaatatcctagaggaa

SEQ ID NO: 880877 - DNA, 718 bp, Homo sapiens
caataacagccaggccaagagccaaatcaagaatacaatcccatgtacaatggtcacaaaaatttaaaatacctagaaattcatttaaccaaggagaagaaagttttctaaaaggagaactacaaaacactactgaaagaaatcacagattacacaaacaaatggaaaacattccatgctcatggattggaagaatcaatgttgttatcatactacccaaagcaatctacagattcaatgctattcctatcaaatcaccgatgtcattttttcacagaaagagaaaacactattctaaaattcatgtggaaccaaaaaagatcctgaacagccaaagcaatcctaagcaaaaagaacaaagctgsaggcatcacattactggacttcaaattatagtataaggccacagtaaccaaaacagcatggtactggtataaaaaaaaaaaaaaaacagacacatagggcaatggaacacaatggagaacccataaataaagctgtacacttacagccacctgatctttgacaaagttgactaaactaagcaataggaaaaggactccccattcaataaatggtgctgggatagctggctagtcatgtgcagaagaataaaatcggacccatacctttcaccatatataaaaactaactcaagatagattaaagatttaagggtttaaatgcaggacctcaaaatataaatatcctagaggaa

SEQ ID NO: 880878 - DNA, 604 bp, Homo sapiens
atttgcagtatgatctcattaatgtaaaatatcaactatgtatctatgcatagaaagagatttggaaggggacttaccaaataatgatattggttatctctgaatagaatcacttcctgggatttaaaaaaattattctttaaacctttctgtgctgggtgacattttttcaataagtatttattatccttgtaagcaggaaaccaatgaaactaataaaataaaaacaaatacttatctgatccatgtatacatctggctaaggaagcagacagcagggaaatgtagaggtatgcaaaattctttttatattagcattcccarttaaatacttcatttcttacacatttcatataagcatcatttattaatggtaatatatatgatgaaaattaaataaataaaatgtcaaacaaatacaattaattaaagtgactctaaagttcatttttgcaaaaatttcattttctaaagtaatatttgccttgtttatcaaaataacccaggaaatttctactcccgttttttaaatacagttcagtttagcccacctactgcttatcctgtccatcatattgacctttttcttgggaaccccattcct

SEQ ID NO: 880879 - DNA, 604 bp, Homo sapiens
atttgcagtatgatctcattaatgtaaaatatcaactatgtatctatgcatagaaagagatttggaaggggacttaccaaataatgatattggttatctctgaatagaatcacttcctgggatttaaaaaaattattctttaaacctttctgtgctgggtgacattttttcaataagtatttattatccttgtaagcaggaaaccaatgaaactaataaaataaaaacaaatacttatctgatccatgtatacatctggctaaggaagcagacagcagggaaatgtagaggtatgcaaaattctttttatattagcattcccagttaaatacttcatttcttacacatttcatataagcatcatttattaatggtratatatatgatgaaaattaaataaataaaatgtcaaacaaatacaattaattaaagtgactctaaagttcatttttgcaaaaatttcattttctaaagtaatatttgccttgtttatcaaaataacccaggaaatttctactcccgttttttaaatacagttcagtttagcccacctactgcttatcctgtccatcatattgacctttttcttgggaaccccattcct

SEQ ID NO: 880880 - DNA, 706 bp, Homo sapiens
ctcaaatacaggcaacttcagcctgtctgaatgcccttccaaccttcctaatcaacttcaccatctgtctgactgcccttccaacctgtaattctcataattctatgacttcctccattctagggaacttcctcttcctccagaattctattatcattgaaaacagttccaactgtgtaatcttgaatcagcaatagactctgtgaccagaacctgccctacccacttccaatcatcctctgggctccacttatataatgytatttccctaatgcagccctcatcacaaggctttgctaattaatatacttttcttctgtcccactaggctgcaacaattgtgagatattcagctaaagtgtctaaaacatagcatgtacttaataaccatttgattgatgacataattgtaggaactagtactaaatttatggtttcaattgaatcttcaatgacaataagcattccatttatgaattcctggacaatgcctctcagtttctcatagtgatattctaaaacctgttcactatgttcagctccatacctgctgctatttcctcactttcatcagagcaaacagaagctctacaagatatctttctcattgttcagcccatcagaagaagaggtatttttcctcctgttcaagactaatgcctcacctgggctgcagatcccattcccaattccaccttcttcgtag

SEQ ID NO: 880881 - DNA, 706 bp, Homo sapiens
ctcaaatacaggcaacttcagcctgtctgaatgcccttccaaccttcctaatcaacttcaccatctgtctgactgcccttccaacctgtaattctcataattctatgacttcctccattctagggaacttcctcttcctccagaattctattatcattgaaaacagttccaactgtgtaatcttgaatcagcaatagactctgtgaccagaacctgccctacccacttccaatcatcctctgggctccacttatataatgttatttccctaatgcagccctcatcacaaggctttgctaattaatatacttttcttctgtcccactaggctgcaacaattgtgagatattcagctaaagtgtctaaaacatagcatgtacttaataaccatttgattgatgacataattgtaggaactagtactaaatttatggtttcaattgaatcttcaatgacaataagcattccatttatgaattcctggacaatgcctctcartttctcatagtgatattctaaaacctgttcactatgttcagctccatacctgctgctatttcctcactttcatcagagcaaacagaagctctacaagatatctttctcattgttcagcccatcagaagaagaggtatttttcctcctgttcaagactaatgcctcacctgggctgcagatcccattcccaattccaccttcttcgtag

SEQ ID NO: 880882 - DNA, 623 bp, Homo sapiens
aggccaattttttgtattttttagtagagacggggtttcactaatccttcactttaggtgaacaattaggggaaaaatatacctataatcatccttgaagagtagcagataaaaaaatgaaaagtaaaatacaaagaaatgtaatgmattatcttagagagggaaatcatggccaggccatatgagatacttttatagtaaagactttcaagtgttctaattaccacatagactgaggaatgtatgcatttgaaaagaaatatcacctggatgtctctttcaattagaattctctatttttcagtgacttcttcctgacagctcaatccagaaagattgaattttatctttctcacacttccttcctaagggctgcatttgttagatgcttatttcaaacactttgtcttcgtttcctgtaagttttctaactttgaccatgtatcccttaccaaggattctatgagggggagagaataacatatttatccaatttggaatttgaaaacaaaaaagaaaaaccatgttaaacttcaagtagtaaggttctggatgacagtgactttataagaaattaaaacagtatttctccattgagaagatttgatagaccacatatgcac

SEQ ID NO: 880883 - DNA, 570 bp, Homo sapiens
tcaggttcaagtgattctcctaggtcagcctcctgagtagctgggatgacaggcacctgccacaatgcctggataatttttgtatgcttagtagagacggggtttcaccttgttggccaggctggtcttgaattcctgacttcmtgatctgtctgcctcagccttccaaagtgttggattacaggcatgagccaccgtgaccagcctgtcttttttttttttcaaagccacccttggttatgaaatgtaaaatatgcaccagtgaatattactttgctgaatattgcctagtgaatattaagtatttattctcacctttcagacatgaacttgcgaattcaacatgtgaagacttacaacttgataaaccagcttcaggtggtaggtcttcagtcttaagtcagattagaagattatgtgaaataattatttaatgcttaacaatgatttttttaatggtcctttcacatgaaataatattcctcttacttttaattatgttccaggacaggagaattcatgttgtcaaaattctaatactctctagaaaaataaactcattttcttttt

SEQ ID NO: 880884 - DNA, 603 bp, Homo sapiens
gaaagctctgcataaaggaattatctggccacaaaagtgaataccaccaagatttggcaactctaatctaaggatagtgccatctttcttatcagacattagttcagaaacgagcacatgacagattctggccattgacttaaaagaaaacattggatgtcatcttcagaaacagttcttcctcactcyttttttttttttttttttttttgagacggagtctcgctctgtcgcccaggctggagtgcagtggcatgatcttggctcactgcaaccttcgcctcccgggttcatgccattctcctgcctcagcctcccaagttcttcttcactcttaaacaacaaccataagaagcagacaacagagtggagtgacaccaaagacctgagtcctttaagatgtgcttcagttcatgttccacccaattgtaaaacctgcctgatctctcagcatcggcttatgtgaactaacactctgttttgtgtttgggtttcagttatttgcatctgcaaacacctaactgacacaagtgtgatgggtcgataaggtttaagttggctctgggaagatgagtgaacactgagaagcgtgaacagctaaga

SEQ ID NO: 880885 - DNA, 605 bp, Homo sapiens
agggacttgagcgttgatagattttgggatttgagggaggttctggaaccaatcccctgctgataccaagggactacctatcgtatgtgctttagggaaagttgtaaagtgaaaactttctgatagtatttttaaagcatttgaacatgtcatccaaattatccaaatgtgtgcattttatagtataatgatatctcatatttaatcatgcagaagcaccttctgtggaatctatgaattttagaggattttggagagttttaacaagagagacattttgtgtagtgaagagcgcaatgaactgggagttggtctgtggcctcttctgargatgattttttcctactttctcaggcaaaattaatcacagtattgttaaccttgaggggtggtatgactgaagggggcttctcaggtgctggttttggattgtggcgctaattacacaagtgtgttcattttatgaaaatgatttatatacttatgcatgtatgtaacactttaaaaagttttaaaaaactgctgtctaaaatttaagaggaaaatacagttatggctttgataacagcagcaacaaaatcatgtccatcctattcccactgcct

SEQ ID NO: 880886 - DNA, 652 bp, Homo sapiens
gataggattgtgtttcttggccacgttgtggttgagtgggttctggctaatgagttgtgaaaagtgatgcatgtcacatttagctgttgatgtgagaccattggaattcctttcatcctctgcaaagtgacctgcaatgtaagagatggtggctcctttatcagcctgagttcctcagtgatgatgataagcagcttctctgtctatctgtggctggacatatagtctgagtaaaaaattgatcttttttgttttaagccatgaaaactttcttccacaaaaaggagggtatttgtgggaatagatgttatgcttctataaaaatattttaaaatgtggatattttaagaactaaaatcgtagagaaaatttatagttacaccttmaaatttttttaaaggatgtagtgtggtaaagcagaaagcacattgccttttgtgtgacattagggtcaagtcagctttgccaccccaaagtcaaggcaggtaactctctgagctcagttgcctcagctgaaagggatatgcctatgtctgcactgctgtaatttttaagtgagaccatatatgaaatgcctagcatgagaataatagtaagtaacatttgtttagtgcttgatgcatgctaggcactggtctaaaccctttataca

SEQ ID NO: 880887 - DNA, 633 bp, Homo sapiens
agtggaagtgcccagagtgtcaacaatatattaaatgttcaatttttttgctgtgaattatgaggcatgcaaagaaacaagaaagtgtgaaccatattcttggaataaaatttgttaattatgtccagaagtaatttttaaagtactttctgttttgctggcacaaattcaccattcctatgacaattctgattcactgtattargtttatattgattgatattacattaacctttgaagctaactgctaacaactaccttcaccaggtctaaacaagaataataattgacttcaggtataagtctcattttctgaaattaattgctttcatttatggtcttcggaacttataaagttacttaattcatgctaacaatatcaaatttatctagaaaaaaatttaggaaatcttatcacaagatttttaaaaaattatgtacatgtataccttacaaaagaaaataatatgtattatatgatggcttacatctttgagaaacgacttctgaggcagagatttacataaacattagggagtacactcaagaacagcctctgtctgtgagtgagtgaaataggattgtgtagaggctggtgtttaactttaatgcagttgccttatctgacctata

SEQ ID NO: 880888 - DNA, 682 bp, Homo sapiens
tatctgatctttgacaaacctgacaaaaacaagaaatggagaaaggattccctatttaataaatggtgctgggaaaactggctagccaaatgtagaaagctgaaactgcatcccttccttacaccttatacaaaaattaattcaagatggattaaagacttacatgttagacctaaaaccataaaaaccctagaagaaaacctagggattaccattcaggacaaaggcatgggaaaggacttcatgtctaaaacaccagaagcactggcaacaaaagccaacattgacaaatcggatctaattaaactaaagagctcctgcaaaagaaactaccatcagagtgaacaggcaacctacagaatgggagaaaatttttgcaatctactcatctgacaaagggctaatatccagaattgacaatgaactcaaacaartttacaagaaaaaaacaaacaacccaccaaaaagtgggagaaagacctgaacagacacttcttaaaaaaagacatttatacagccaaaaaacacatgaaaaaatgctcatcatcactggcaatcagagaaatgcaaatcaaaaccacaatgagataccatctcacaccagttagaatggcaatcattaaaaagtcaggaaacaacaggtcctggggaggatgtggagaaataggaacacttttacact

SEQ ID NO: 880889 - DNA, 615 bp, Homo sapiens
gggtcctaactactttagactactctactttgtatcaccagcagggacacagttgctcatggaattacaggaaactgaagttaaattcagaagtcttaatgcctgattatgggacaaatttcttgtgttggaaacttatctgagtcaagaatatagagcaaaatatgtgctgaccccgccrtgggaatgagattgcttcctaccctcatttatcgtaactatttccttatttcaaacactactgcactggcagtcgagtactgtgcaaataataaagcaaactaataaaagaagtctgaatctgtcatcagtttatcctcaccaagattaaggaaacaaatggtggtttttaaatggagttaataattgctagcttgcaaaactcgttttctatttttgctatgaaattaagtaaatcttcaccgatttgaagatcaataataaaatcactatttgttacagtgtcaagatatggtgtgactgtccttgctgctaaatgtaaacattaacttacagtattttactttattatatatatattacttattatatacagattttatattcattatattttattatttattttatcacataaaaagcaaacagagccac

SEQ ID NO: 880890 - DNA, 579 bp, Homo sapiens
gttatgtagttaatgaaaaaaacaagaggggaaggaattatctaggaggagaggggaaaagatgggattgacttaggctgatggtaggagagagcttcctgtgttaattgcagggagggagaggtgtggagggaaggggtggaaataaccgaggcttgcagggtaaacagaatcctctgctgttttttaaattaattgtagaaaattgaacagtcaataacaatataaacaacataaaaaaggagtggtatagcccacccagttttccttccccttcctcctccttctgcttttcctcctattttatcctttggccaatctacgatactatttcctggacaatctgtctcaaattgtattytctcatcaaaattgcatttattaatgtcatcaaaattgcctttattaatgtcatccagattggtacttgttgtctattcttttaacatcaactttataatatttatttgcaattactatattatttgtttaaatatagatatcctttatatattttcaactatatacatcaatataattttcacatatatatattttttgatatatgtatgtgcccat

SEQ ID NO: 880891 - DNA, 610 bp, Homo sapiens
gtgggttatctggagggatttgttgattctgccttgtgatcttgtggggactactggtttatcttgactctgttccattaaatctctcatccgtcagccagctagcccatgtttgttctcatggcagacacaggagtccaagagagcagaagtcagcaagaaccccaaatctctgacacattcgactgaccaaagcaagtttaagtctagcccagtttcaaggtgtaaagaaatagactgtacttcttgatgaaaaggggctgttaagtcatatttgcaaagcttggaatgaggggaggggttgtatttgggttctccagaaccaatagcacatgtagataatttgacatataaagggtatttattaggggaattggctcatgtgattatggaagcttagaagtccgataggctgtctgcaarctggagaactggagaagccaatggtgtcactttcagtcgaaggccaaacaaaggacctggagttctgatgtccaagggcaggataagaagaatgtcccagtttgggtgtgaaggctcatacctataatcccagcacttagggaggccaaggtaggcagagatcacctgagctcaggaattcaagacc

SEQ ID NO: 880892 - DNA, 565 bp, Homo sapiens
ttacaattacaaatagattttttgtttgattgccttctgaaataactttcttttattaaaaaacccattgctgtggattcttcaataacaattcaaaaaatcttagtagaaaattgaaattatatttctctgtatttataccaccccagaaataaaacagctaggttaagaamacattgagagacatgtaataatttcctctaactggaaatgttaactcaaatgcacataggcaaataatcacctcagccctgaacatacagaggtattggtggaattaagaccataggccctcaatgagcaacagagttttgtcagaaccgatgctaaagtatattcaatcatcatcagtgcccttggtcaaaagaaaaaaataagtaaatctaaaacagtcacaaaagaagcaacctttgcttcatttactggggtgactaactccccttggaaataattggtatggcagctggataaaaacatagctccaggaccctgctcctaagaaatatacctgcggcttttactatgaaaccaagaaatatctgttactctatgctctatctgtaat

SEQ ID NO: 880893 - DNA, 601 bp, Homo sapiens
actactaccaccataaatgggcctgcaagccagagccagtgacaagggggattccctcagccacaacttgcctgataggagaaaaaaaaaaagtgggaggaccttagcagccatcaccgctgaagacccaacaactcttgccaccactgcagatatgcatattattggcaactgaggatccctgcaatttttgttaagactgaccttagctaaaagagctgcacagagacttcacagcacagctgcaccctcacaggtaccagaacaattgcattccaaccaataagcacccttgcaacaccacccccatccayggaagaaagcctttcctagagaaactagcccataaagtctaaagaagatgactgttttttcaaatgtgcagacatcaatttaaggcaacaagaaacatttacaagaaaagatgacgtaacaccaccaaaaggacacaataatttctcccaaagaaactagagataaataaagaattaaaaataattatttcaaagaatcttagcaaactttaataaaatagagagaaacaattcagtcaaataaggaaaacagtaagtgaccaaactaagaaatttagcagaaatag

SEQ ID NO: 880894 - DNA, 620 bp, Homo sapiens
taaatgtccattaaatcttcacaatttatgttcttctgccgtggcttcagccagtccctccgttcagggtccctgacttcctgcaacagcttttctgtctctgctatcaccataagaacatgccaagctactagtcttaaggagaaggatgagaaacatgtggagcagtgatgagtgttgagcctcgcctggatcagccagcccacagagagctgcagaatgagtgagagagccagccagttcacagattcataagaacacattattgttgttctaagcctataattttggggkcagtttgtttcacagcattagtatgaacatagttaatggatatactgccagcatatcacctagagataatatgaaatgtaattatgctagatacttgcacaccttctagagatagggtagggggcttgagaatcctgtgcagaatggagatagagggaaaacctaatttctgcccaaggtggaactcaacagagctagtgaggaatttcactgtgattagcagaaattgagaacttagataaaatcttgttggtgtaaagagggtgagtctatgatttatgaaactactgattagatattagtcattcaattctgtctattgagga

SEQ ID NO: 880895 - DNA, 603 bp, Homo sapiens
ttcatctctccccacttgctcctttctgatggttcctgttgcccacagaataattatcaaaccctccacatctggcttgtttaccccctttctgaatgttctctcctctctaaactatgcatcttctcttgaccacattgtgacatgattgtctctcatcctctgctcctgctggtccctctgcctgatgtctcctacttctctctttgatgccactcatccttcaatgctcaattcaagtgacacatgatgtagctactgctgtcagmagtccacccatgtccccttgactcctttttctgtgcatgtcaacctgacttccaactgccagtccctgtgactgtgctttggagccctctattgtcacagagtccattttgcctgtgcaaggctcactgcaagcacaggagaattcacttaatatctggctccctggcctcagcaattctcatccgtaaccagtaggattgcttttggacagaataactctaaagtgtctgttgtacactggcccccaggctctgcagcaagattggtccccttggtaacatgccctttattagtgtcctttcttttcctttccttctgcccactttcccgctg

SEQ ID NO: 880896 - DNA, 598 bp, Homo sapiens
ctgccatttcctgactttttaatgatcgccattctaactggtgtgagatggtatctcactgcagttttgatttgtacctctctgatggccattgatgatgagcattttctcacatgtcccctggctgcataaatgtcttcttttgagaagtgtccactcatatccttcgcccactttttgatggggttgtttgtttttttcttgtaaatttgtttgagttcattgtagatggtgtatattagccccttgttagatgagtagattgcaaaaaccttctcccrttctgtaggttgcctgttcactctgatggtagtttctcttgctgtgcagaagttccccagtttaattagatcccatttgtcaattttggcttctgtcgccaccgcttttggtgttttagacatgaagtccttgcccatacctatgtcctgaaaggtattgcctaggttttcttctagggtttttatggttttagttctaacatttaagtctttaatccatcttgaattaatttttgtacaaggtgtaaggaagggatctagtttcaactttccacacatggctagccagtcctcccagcaccatttattaaatacgg

SEQ ID NO: 880897 - DNA, 681 bp, Homo sapiens
gtagcagtctcatagcagggagacccttactaagagggagtctgtttctttcacccaagatgttggtccccctttctatctgcttttctgtcgaattcagtccaccacaccacctaagaaaaaaataatccaattcctttgcttataaagtaaggggtttacttctgcaatgtaacactccacaaacactaccaagtggtctagaggttacaaggtctagcccacacttcatagcccaagagagagctacagttgttgaatattcatgttactgtgccagtcagcctcagagaactccagcttccagccactgagtacaagtattcagtaaaatagagaggtctatggatgtctttccaacttacccacttaaacaactccagccttaaaggtcagtatagaaggtgggttgaagaacacaagttgagtgtctgctacattttttagaattttcataattttatccctacttgtaagaggatgagtgagatattagaatatctgagagwagaagacagcatttttaaatttaggcagcagattcaatttaagaaacagcttaagaataccaatctcaaaattcaagcagaaagtacattacaatatatcaactaaaaacagtagctactaaagaaaccacatctgtctattgctttaattttaattgaggttatattgttt

SEQ ID NO: 880898 - DNA, 691 bp, Homo sapiens
gatagacagatagatgatagatagatagatagatagatagatagatagatagatagaggagagagagagagagagagagattagatggataggtatgtagtttcacctataagcaaaggcaaaaatgagtatctcagaaaggcagatttagggaccactaagattttaagttgcatcattctgtaaattggagaatattatcacttactgtactgtcrcaaatttcagataagttaacattcctgaatgttcttggcacagcataaatgctcaatatcttcaattatcatactttttccccttcatccctgccctgacgcatgatagatcatttcttaaaatatactacagcatgtattaaataatatttctactgctcagttttctggggaaaatagtgtttagttaatttctaggttttgttaagaatttacaaaatatatttcataaatgtgttcttttcctttcagaaataaatgtataattttactcacaacatttcaacaactttcctaacttgcatacttcatttttctagtgtttcataaaagttctaagtttaatcatatgatattttaaaataagatattaagcaagaaaacacagcatctattgtatttttaaacgaatcttatggtttttattttattatttcaattactgttactaaattattaattctaggttagaa

SEQ ID NO: 880899 - DNA, 619 bp, Homo sapiens
caccatgttagccaggaaggtcttgatctcctgacctcgtgatccaccctcctcagcctcccaaagtgctgggattacaggcatgtgcaactgcacgccagccaggtttttcttaatataagattgtgccatgctgtgaacaggagtattttgatttcttcattcccagtttggatgatccttatttctttctcaaacctaattgctctggctagtacttacctagtagtatgttgtataaatgtatggaatagcggttatccttgttgttccagatctcaaaggtaagggtttcaatttttctccatttagtatgacaatagctatgggtttgtcacgtaaggctttattgttttgaagtatgttccttctataccaagattgttgagagcttttatcctgaaaggrtgtattatatcaaatacttttttagcatctatggaaataaacatttttttaaaaattctgttaatatgatgtatcacatttacagatttaaatatgttgaaccatctttgcatcactgggatgaatctcatttgatcatgatgaatgatctttttaatatgttattgaattatgtttgctagtattttgttgagaattttgcattttattc

SEQ ID NO: 880900 - DNA, 570 bp, Homo sapiens; identical to SEQ ID NO: 879985

SEQ ID NO: 880901 - DNA, 655 bp, Homo sapiens
acattccctatggcaaagtatcattggaacaaactcagcaagaatgtgtaatcaaacttttggatcttttccaatttcctggtaaaaaatggcatcatgtccttaaaatgtttgtgggtgctctttatatattaaacgcaccttttatctctaccaagaattgcaggtatttttctttttcttttttcttttttttttgtttgacacagagtctcgctgtgtcaccgggctggagtgcagtggtgtgatctcggctcactgcaacctccacctcccgggtttaagtgattctcctgcctcagcctyccaagtagctgggactacaggcgcccgccaccgtgcccggctaatttttgtcatttttagtagagacagggtttcaccatgttggccaggattgtctctatctcttgaccttgtgatccgcccacctcagcctcccaaagtgctgggattacaggtgtgagccaccatgcccagctgcagatatttttctaactttatttatccctggctttatatcaaattacttttccatgtagattttttttaaaaaaaagttgaattgatcaatgttttctttgacagctttaggaatttttgtcacagttagaaaggtcttattactcaagatgattgaaaaatctcatgaaat

SEQ ID NO: 880902 - DNA, 655 bp, Homo sapiens
acattccctatggcaaagtatcattggaacaaactcagcaagaatgtgtaatcaaacttttggatcttttccaatttcctggtaaaaaatggcatcatgtccttaaaatgtttgtgggtgctctttatatattaaacgcaccttttatctctaccaagaattgcaggtatttttctttttcttttttcttttttttttgtttgacacagagtctcgctgtgtcaccgggctggagtgcagtggtgtgatctcggctcactgcaacctccacctcccgggtttaagtgattctcctgcctcagccttccaagtagctgggactacaggcgcccgccaccrtgcccggctaatttttgtcatttttagtagagacagggtttcaccatgttggccaggattgtctctatctcttgaccttgtgatccgcccacctcagcctcccaaagtgctgggattacaggtgtgagccaccatgcccagctgcagatatttttctaactttatttatccctggctttatatcaaattacttttccatgtagattttttttaaaaaaaagttgaattgatcaatgttttctttgacagctttaggaatttttgtcacagttagaaaggtcttattactcaagatgattgaaaaatctcatgaaat

SEQ ID NO: 880903 - DNA, 585 bp, Homo sapiens
tgctctgttgcacaggttggtgtgtagtggcacaatcttggctcactgcaacctacacctcccaggttcaagtgattctcttgcctgaagtctcccaattagctgggattacaggcgtgttgccaccacatctggctaatttttttatttttagcagagatggggttttgctttgttggccaggctggtctcgaactcctggccttaagtgatccgcccgcctaggcaccccaaagagctgggattataggcgtgagccaccacgccctgcctgtcttcctatttttgagtgkctaatcataatgaaagctcctgtgaaatttaaaacaacagccaacttccaggaaatgtactgggcttagttcacaatgtcctgttctttttatatcttagtctatactagtggttacaaaatttggagagcttttgaaaatacaataggattcctctcagacctagtgtattagaatctctggggaaagagccaagaaagctttaattttttttaaaaaagtgtatagataatgtttaggaacaaatagtctagatcacttagagtcagacaaaaatatcagagcactgcag

SEQ ID NO: 880904 - DNA, 636 bp, Homo sapiens
  misc_feature 572: n = A,T,C or G
catacaccagatgtcactgtctctccatgctagtaaaatgaaccaacaaattttggcaggtaaaaaaaacaaaaagccagcatgatggtatgccactgtagtcacagttatttgggaggctgagataagaggatcatttgagtccagcctgggcaacatggcaagaccctatctctaaaaaatattttagaaaagcctaatttacsctccattaccatttttaagtgtatactgaatggaaatgtgtaaatttgtaaaccaaaaaacaagaccaaaaatgttcatagtggcagtacttgtaatatcccaaactggaagctacccaaatgccagccaatcatttgtataatgaataaatacattgggtgtatgtatagacagtggtatactatgcagcaagaaaatgaaaaaaaaaatacaactacacacaacaaatcccagaaacatgttgagcagaagtcacttacaatacagtatgtattttatgattccatgagttttataaagttcaaaaacatgcaaaactaatatatgggttagcagtcaggttagtgattgtccttggtggcggngggttgagactaggattgggcaagaggaaacttctggggtactggtagcattctgtctcttgac

SEQ ID NO: 880905 - DNA, 636 bp, Homo sapiens
  misc_feature 572: n = A,T,C or G
catacaccagatgtcactgtctctccatgctagtaaaatgaaccaacaaattttggcaggtaaaaaaaacaaaaagccagcatgatggtatgccactgtagtcacagttatttgggaggctgagataagaggatcatttgagtccagcctgggcaacatggcaagaccctatctctaaaaaatattttagaaaagcctaatttaccctccattaccatttttaagtgtatactgaatggaaatgtgtaaatttgtaaaccaaaaaacaagaccaaaaatgttcatagtggcagtacttgtaatatcccraactggaagctacccaaatgccagccaatcatttgtataatgaataaatacattgggtgtatgtatagacagtggtatactatgcagcaagaaaatgaaaaaaaaaatacaactacacacaacaaatcccagaaacatgttgagcagaagtcacttacaatacagtatgtattttatgattccatgagttttataaagttcaaaaacatgcaaaactaatatatgggttagcagtcaggttagtgattgtccttggtggcggngggttgagactaggattgggcaagaggaaacttctggggtactggtagcattctgtctcttgac

SEQ ID NO: 880906 - DNA, 647 bp, Homo sapiens
actgcccaaagcattttatagattcaatgctattctcattaaactaccattgacactcttcacagaattagaaaaaactactttaaaattcatatggaaccaacaaagagttcaaatagccaagatgatcttaaacaaaaagaagaaaaacaaacctggaagcatcacactacataacttcaaactatactacaaggctatagtaaccaaaacagcatggtactggtacaataatagatacatagaccaatggaacataatagggaacccagaaataagatcacacagctaaacccatctgatcttttgacaaacctgacaaaaacagcaatggggagaggatttcctatttcataaatggtgctgggagaactggctagccatatgtagaaaattgaaatgggaccccttccttacaccatatacaaaagtcaacttaagatggattatggattaaagrgtttaatgtaaaaacaaaagtataaaaaactagaagaaaatctaggcaattttattgaggccatggtcacaggctaagatttcatgatgaaaacaccaaaagcaattgcaacataagcaaaagttgacaaatgggatcctaaactaaagagcttctgtacagtgaaagaaactatcacaacagtgaa

SEQ ID NO: 880907 - DNA, 650 bp, Homo sapiens
acatgacctaaggagatctcacaggtatcttctcagaggaatatacatgcctaggaaccagacaatcagcttcaagaacaattgaaagttaattgtattattgttggccatgccacccactgccaatagactacttgcagatccagcccctttacactgttgagcatttattccaccagctttcagacccgacttttattccaccagtagagtgctgctgaagatacagaaaataatttgttgatacttcttaatctaatcctaggaagtcagccatagaatgtcacctgatacagaaacaatgtttctagaacccacactgcacaatcttgtataccatcccctacgacacacacaggcaaatacacatgccttcttgcttttaaatatttatcattttggaatckaccagtactgtatttgatacctgatgctttctttaggtaagcatataaatctgggtgccttatagttacaccttggcagtaactacaaaaaaaattgtttaaggtccatcaacttctgcctacccccacaaaaaaaaaattaaaaaccaaatcacatcttttctagaaacatcacaggggaattccatgactaatgttatgcaaaacttaaatccactatccctgtatatttctgcaattcac

SEQ ID NO: 880908 - DNA, 681 bp, Homo sapiens
cttcatgaagtgttttgtggcacaattttacattggactgaagatgcttttattccttgagtcttatctcaaggacatacttaaccataaacctttaaaaaattaaattcacactttgttttcaaaatctgaaaagaagttatatatttttcctttggaaataattctacaaaggtaaaaatttggattctggtcacctcctgattttatcattataaaagtactaatgaagataaaccaaaatggtggataaaaataaatttgtttgactttggagaggttttttttttaacctttttagttatttattatgtgtgaggaatatcaagacttttaaataaaacaaagatgtgttattgaaagacatcttttcttttcttttttttttttttcttttttttgagacagggtctcactctgtcacccaggctggagtgaagtggcatgatctcagctcactgcaacctccgcttcccgggttcragcaattctcctgcttcagtgtcctgagtacctgggattacaggcatgtgccaccatgtcaggctaatttttgtattttcagtagagacagggtttcaccatgttggccaggctggtcttgaactcctgacctcaagtgatccacccatctcagactcccaaagtgctgggattacagttgtgagccaccacaccaga

SEQ ID NO: 880909 - DNA, 651 bp, Homo sapiens
aagacaccttttgtctctctgctgctgagaccactcttaagtttctgaaaacaggttccactggatcaagggctcctagaaagcaatcccttttatccctgagctatagtagaatacctggaacatagtaggagttaattcagtattccctgaacaagtgcttatactcttgtaattgtctgaaatgtaggccattggctatccttttagagtaaggaagtgtgactgataattggtgatttgagacaaggttatcaccaaaggaaaaggttrtgattgcgatccctccacttaaacccttggctagtatatccaaactcccagtgcatttgttaccagagcatgacatgtgacaagaacccttaacccatgatgggttcagaaaacacacataccatttgaaataggagttgacaagaattacctttataagaagctgtggagaaatatttttctagagtttctttttgatggaaatatattgatgaaattattttgtattgctttactgcctgccttttgatcctttttaacactcgatcctctgctacttgttgtcttactctgtgagctcagtttcttattgtactctctttcagccacagcctcatcacaacttgttcactaaaataaagtgccacttcctatgct

SEQ ID NO: 880910 - DNA, 651 bp, Homo sapiens
aagacaccttttgtctctctgctgctgagaccactcttaagtttctgaaaacaggttccactggatcaagggctcctagaaagcaatcccttttatccctgagctatagtagaatacctggaacatagtaggagttaattcagtattccctgaacaagtgcttatactcttgtaattgtctgaaatgtaggccattggctatccttttagagtaaggaagtgtgactgataattggtgatttgagacaaggttatcaccaaaggaaaaggttatgattgcgatccctccacttaaacccttggctagtatatccaaactcccagtgcatttgttaccagagcatgacatgtgacaagaacccttaacccatgatgggttcagaaaacacacataccatttgaaataggagttgacaagaattacctttataagaarctgtggagaaatatttttctagagtttctttttgatggaaatatattgatgaaattattttgtattgctttactgcctgccttttgatcctttttaacactcgatcctctgctacttgttgtcttactctgtgagctcagtttcttattgtactctctttcagccacagcctcatcacaacttgttcactaaaataaagtgccacttcctatgct

SEQ ID NO: 880911 - DNA, 663 bp, Homo sapiens
ctgccgctatagattcctcctctctgggcagggcatctctgaaagaaaggagaactttcccaacccaggaagacaggccaacattcaaattcaggaaatacagagaacaccaaaaagatactcctcgagaagagcaaccccaagatacataattgtcagattcaccaaggttgaaatgaaggaaaaaatgttaagggcagccagagagaaagattgggttaccccaccaaggttgaaaagaaggaaaaaatgttaagggcagccagagaaaaaggtcaggttacctacaaagggaacctcatcagactaacagcrgatctctctgcagaaactctacaagccagaagagaatgggggccaatattcaacattgataaagaaaagcattttcaacccagaatttcatatccagccagactaagcttcataagtgaagaagaaatagaatcctttacatataagtaaacactgagaggttttctcaacacaaggcctgctttacaagagctcctgaaggaagcactaaacatggaggaacaactagtacagtactagccactgcaaaaacatagcgcattgtaaagaccatcgacaccatgaagaaactgcatcaactaacagggaaaataaccagctagcatcatagacaggaaaaaattcaca

SEQ ID NO: 880912 - DNA, 663 bp, Homo sapiens
ctgccgctatagattcctcctctctgggcagggcatctctgaaagaaaggagaactttcccaacccaggaagacaggccaacattcaaattcaggaaatacagagaacaccaaaaagatactcctcgagaagagcaaccccaagatacataattgtcagattcaccaaggttgaaatgaaggaaaaaatgttaagggcagccagagagaaagattgggttaccccaccaaggttgaaaagaaggaaaaaatgttaagggcagccagagaaaaaggtcaggttacctacaaagggaacctcatcagactaacagcagatctctctgcagaaactctacaagccagaagagaatgggggccaatattcaacattgataaagaaaagmattttcaacccagaatttcatatccagccagactaagcttcataagtgaagaagaaatagaatcctttacatataagtaaacactgagaggttttctcaacacaaggcctgctttacaagagctcctgaaggaagcactaaacatggaggaacaactagtacagtactagccactgcaaaaacatagcgcattgtaaagaccatcgacaccatgaagaaactgcatcaactaacagggaaaataaccagctagcatcatagacaggaaaaaattcaca

SEQ ID NO: 880913 - DNA, 622 bp, Homo sapiens
tctccagactcagcttacacctctctccttttcactctctttacccgcccccccaacaactggcttatgtatgctcctcagaaaagtcccatttactcatatattagagattttgtatagatgtttcctctaccagaaatcccttcccctagctctttgcatttggagcctttccataattcagttctcagctcaaacattaccttgttgaatagatcttccctcagcacccgacttaaaccagtatcccccatatagtctcttacctctttttaaaactcagtgtcttcttggtcactgtaagtactgagtttatcttgccttttttgtctatttatttaatgttcctgtttcctaataggatgtgaaattactttgagkagactctcctgtttatcataaacagtgcctggcacttagtacatcttcaacaaacgtttgttgaataaatgtgtgcatgaatgacagcacctcagtgatctcactctgatgttgccgagaagggatgctcatgcaatgacttcagagtcttgagatcatacatataatgtatattatatatatattggtttgtacttaaacttggatcaaatgcacttgatttactaactgactttattat

SEQ ID NO: 880914 - DNA, 590 bp, Homo sapiens
gatgtgcctataataaacgtctgtataatgttgtaagagaaggtggtaggtaaggaaagtttatctataagtcaatagatttaaataaaggagaaatgttaagtattagattgttgtttactcaagggcaagggcgtttctggcttgtttacctctatatttgaggtacaatagcccctgaagtaaagcagatgctmaaaaatgacatgaataaatggaaggataaatttcaaagaagatatgcgattcagaggtaggaagcagcacatctagaattccgaaaaatggggaatttggctgggctataaatcatgggtagtgtttcaataggcagtaacaatacaaactgatggaatatgatggcccaaggtatggaggcagaaaagtctggggtatgttcttttcagagaacgatagctacgtttgactggagaaaggtgtgtgtgggagtgtgaaataaatcttagctatattatgaaggacttttaacgttaggttgaagagtgtaaactgaatgttattagacaaagggaagccataaaatatatgtgaggttgggttcaggaaggtatttattacctaaagataac

SEQ ID NO: 880915 - DNA, 590 bp, Homo sapiens
gatgtgcctataataaacgtctgtataatgttgtaagagaaggtggtaggtaaggaaagtttatctataagtcaatagatttaaataaaggagaaatgttaagtattagattgttgtttactcaagggcaagggcgtttctggcttgtttacctctatatttgaggtacaatagcccctgaagtaaagcagatgctcaaaaatgacatgaataaatggaaggataaatttcaaagaagatatgcgattcagaggtaggaagcagcacatctagaattcygaaaaatggggaatttggctgggctataaatcatgggtagtgtttcaataggcagtaacaatacaaactgatggaatatgatggcccaaggtatggaggcagaaaagtctggggtatgttcttttcagagaacgatagctacgtttgactggagaaaggtgtgtgtgggagtgtgaaataaatcttagctatattatgaaggacttttaacgttaggttgaagagtgtaaactgaatgttattagacaaagggaagccataaaatatatgtgaggttgggttcaggaaggtatttattacctaaagataac

SEQ ID NO: 880916 - DNA, 583 bp, Homo sapiens
  misc_feature 199, 213: n = A,T,C or G
ctagatgtcagtgccttggtcatatattatatggaaatactcaaagctaactgctatagtttaagtcagaattgccaaaatacaaactatttgccagttaactacagataaattccccagatgagcactgcagtgacctaattatgccagacaagaatgtgtagccaaggtttttttttttcttgtgttacacttttangtctttatgatcantgacagattatctggcacaagggcactctgcttccaaagtattaactttatctagtcatcttccccattctctccctgccatttgccatctaacatgactagacaaagattttcctgtacttcatgagttttctaagaagtgtttcccaagcctggccatgaatcagaattattgkagaaacatctttataaatacattcttttgcgaataggttttcagacctcatcttagatgtgcgatcattagaagtgaggccctggcactttcatttttcacaatggtccctgtgatactctggtttattagaacaactgaatgctgtttgatctaggtctgaactgaaaaacagtcctttcttagactttcaaa

SEQ ID NO: 880917 - DNA, 610 bp, Homo sapiens
gcatatatgtggccaacaaacataagaaaaaagctcaacatcactaatcattagagaaatgtaaatgaaagcgccaatgagataccatctcacatcagtcagaatggctactattaagaagttaagaaataacagatgctggtgaggttgtggagaaataggaacacttttataccattggtggaaatgtaagtaaattagtttgaccattgtggaagacagtgtggtgattcctcaaagrtttattaccagaaatatcatttgacccagcaatcccattactgggtatatatccaaaggaatataaatcattctgttataaagatatacacacatgtgtgttcattgcagcacaattcacaatggcaaagacatggaatcaacccaaatgcccattaacaatagactggatttaaaaatatggcacatgtacactatggaatactatgcagccataaaaagaaatgagatcatgtcctttgcaggtacatggattaagctggaagccattatcctcagcatcctaacacagggttagaaaaccaaacaccacatgttctcatgtataagtgggagctaaacaatgagaacaactggacacagaaagggg

SEQ ID NO: 880918 - DNA, 608 bp, Homo sapiens
attggtaaaacaaaatcttggtcatgacccactacattgatgtgataattcagggtttaaaaaccattgagttatatccgaaaatctcaggggttctccaggtatttccctgttcttctttggcatatcaccattatcagcccacatttcacctcagctcacattagcttgttactgaagttcctcttcaaaccacacaccagcctgaaatgtttcagcagtgttccttcccttataattttttcagagaagagtaccagcaagtcaatttcacttcaatctccctctctccagccaacccggacatgtctggaaatttatagtgattttcagatggagagtatcccaactaggataggtttgtaatgttccattcaataagcatttattttatgtttccagcatgcctgggctaaatggcaaatacaygcactggaactattacagtgcagatggctacttttgtaccattagctggattcagcagatatccatcaggttaaacaagaagatatttggctgtcacctcattactcagccctgcttggctagaattctataattgtagatttcttctaaagtgtgactgcaaagccccgccatttagt

SEQ ID NO: 880919 - DNA, 605 bp, Homo sapiens
tgagctcaatcaagcttaactattatcatcattttaaccccctggatgttctcagctgctgagtcagagactgtttcttcctgcccaggttcttagtctttctttcttagtgtaggttctatgtaagtatcaataattggacatttgttgacctcctacaccttgacccataactacttcctgttcagtcatagttgatgaaaagacaaaaaaaaatagcatataatatgctataatttagatggattttttttctgtgatggtaaatggttgtctgtgatgaaaaagccatagctcaagtccttctgttgatcatttaaacattgatttctttttcttgttttgttttttgtttttttgttttgagacygagtttcattcttttgcccagggtggagtgaagtggtgtgatctcagttcactgcaacctccacctcccgggttcaagcagttttcttacctcagccccctgagtagctgggattacaggtgtgcgccaccaggcccagctagcttttgtatttttagtagagacggggtttcaccatgttgtccaggctggtctcgaacttctaacctcaggtgatccaccagcctcagcctcc

SEQ ID NO: 880920 - DNA, 433 bp, Homo sapiens
acagaatccttgaacattcatcccaatttttttgtttgttgttttttgtttgtttgttttgagttggagtctcactctgtcacccaggctggagtgcagtggcacaatctcggctcactgccacctccrcctcccgggttcaagaaattctgcctcagcctcctgggtagctcggattacaggcacccaccaccacacctggctaatttttgtatttttggtagagacagggtttcaccatgttggccaggctggtctcgaactcctgacctcgtgattcgcccgcctcagcctctcaaagtgctgggattacaggcgtgaaccactgcacccaccctcaccacagtattaattagtgtatgcatatgtggaaatcatctaaagtggaggaaagaataatgtgaaaggattagaagggagagtacctgcttcc

SEQ ID NO: 880921 - DNA, 668 bp, Homo sapiens
gcttgattaggtttggggaataagggatatagtttttttgttgtttgtttgtttttcgagatggtgtttcactcttgtttcccaggctggagtgcaatggcgcgatttcggctcaccgcaacctcctgggttcaagcgattctcccagtttcctccaaggctcttgtgtaaactgttcttattgagactttgggttggagatttctaaggcttgtgggataataaatcttctattttttttcttgagttcctctttataggttttattccacagacatttcctgaaactttactaattaaaacaatgatgaggcctgctttgggtacttaacaggactgtctactaggggacacaagagaaggacatgacagagcctgtgacttttaccagccatcagttcaaagggaaacttgcaaacagcctgcagctggttgaaggatcaggaaggaaatasttcatctgagcacagcctctggagcctgagttcaaatcctaactcaccccttgttagttttgtgccagtgggcaaacttcttaacctcatatgactcagtagatgcaaagtacttaactcatgcttgatgtatagttagcaattaatagttaagattaatttaattacctatttgtgattatttcaaactcatttatctcttctttttctaaa

SEQ ID NO: 880922 - DNA, 609 bp, Homo sapiens
gcccccaaaatattgctcttaactccaccgcctatcccaaaacctataagaaccaatgataatcccaccaccctttgctgactcccttttcggactcggcccgcttgccccaggtgaaataaacagctgtgttgctcacacaaagcctgtttggttgtctcttccacggacatgtgaaacactgtggtcaattttttttctttttaataataattcttttttaraaatatgtgcttaaataattgtaagccaggcatagttgcctgtgcctgtattcctaaccacttgggaagctgaggcaggactgcttgagcccaggggtgtgaggctgcagtaagctatgatcacgccactgaactccagcctgggtgacagtgagaccgtgtttaaaaatatatatatacagatgaaatgatatgatgtctgagatttgcttccaaatatgcctaggaagggaagaagtgtttagagatatagacaaatcaagattgtcaaaatgtatagtaactgttaaagcttgctaaggtagttattctatttttggatatgtttggaattgtccaaaggtttcctaaaacttatgtttaatattctttcaggagaaagcaa

SEQ ID NO: 880923 - DNA, 609 bp, Homo sapiens
gcccccaaaatattgctcttaactccaccgcctatcccaaaacctataagaaccaatgataatcccaccaccctttgctgactcccttttcggactcggcccgcttgccccaggtgaaataaacagctgtgttgctcacacaaagcctgtttggttgtctcttccacggacatgtgaaacactgtggtcaattttttttctttttaataataattcttttttagaaatatgtgcttaaataattgtaagccaggcayagttgcctgtgcctgtattcctaaccacttgggaagctgaggcaggactgcttgagcccaggggtgtgaggctgcagtaagctatgatcacgccactgaactccagcctgggtgacagtgagaccgtgtttaaaaatatatatatacagatgaaatgatatgatgtctgagatttgcttccaaatatgcctaggaagggaagaagtgtttagagatatagacaaatcaagattgtcaaaatgtatagtaactgttaaagcttgctaaggtagttattctatttttggatatgtttggaattgtccaaaggtttcctaaaacttatgtttaatattctttcaggagaaagcaa

SEQ ID NO: 880924 - DNA, 609 bp, Homo sapiens
gcccccaaaatattgctcttaactccaccgcctatcccaaaacctataagaaccaatgataatcccaccaccctttgctgactcccttttcggactcggcccgcttgccccaggtgaaataaacagctgtgttgctcacacaaagcctgtttggttgtctcttccacggacatgtgaaacactgtggtcaattttttttctttttaataataattcttttttagaaatatgtgcttaaataattgtaagccaggcatagttgcctgtgcctgtattcctaaccacttgggaagctgaggcaggactgcttgagcccaggggtgtgaggctgcagtaagctatgatcacgccactgaactccagcctgggtgacagtgagacygtgtttaaaaatatatatatacagatgaaatgatatgatgtctgagatttgcttccaaatatgcctaggaagggaagaagtgtttagagatatagacaaatcaagattgtcaaaatgtatagtaactgttaaagcttgctaaggtagttattctatttttggatatgtttggaattgtccaaaggtttcctaaaacttatgtttaatattctttcaggagaaagcaa

SEQ ID NO: 880925 - DNA, 527 bp, Homo sapiens
ggtggcagatgttgcagccaggtcgccctcacatccttgagttgtcatccttggggacagtgtttctgtgatgacctaaagggccaccctcgggagacagtgacatacattggatacgagcatgactttggagttacggagacctgggtttgaattctggccctgccatttattctcggtaggataccggggcaaattagactctcggttttctcatttacaatatcggagtaattatatagacactattgtgtcagagaagcattacaataagggctcttattgacactcmaaattctttctttttctggatcacaaaaacaaaaccaatatgtggtaaaaaaaaaaaaattgtcctccaaaacatacatattgaaaaccagaagcaaacatgccctgaaattgtgcctctcagatatacctgctatttatcctttaacttttatatatttttcacatatacttcaatgagttttattatttttatcatgaaaaaatacaataaacttgacacattaaacattaaa

SEQ ID NO: 880926 - DNA, 605 bp, Homo sapiens
gcacaatttacaagaaaaaaaatcaacctgattaaaacatgggcaaatgacatgaacagacacttttcaaaagaaggcatacatgcagccaacaatcatataaaagaaagctcagcatcactgatcattagagaagtgaaaatcaaaacacaatgagataccatctcacaccaatcaaaatggcaattattaaaaaktcaaaaaataacaaatgctggttaagttgcagagaaaaaggaacagttatacagtgttggtggagtgtaaattagttcaaccattgtggaagacagtgtggtaattcctaaaagacctaaaaatagaaataccttcaacccagcaatctaattacagggtatatgcccgaaggaatataaattattctgttataaagacacatgcacacatatgttcattgaagcactattcacaatagcaaagaaatggaaaatcaacctaattgtccatcagtggtgaattggataaagtaaatgtggtatatatggaccatggaatcatgtcctttgcagaaacatggatgaggctggaggcaattatccttagcaaactaatgcaagaacagaaaaccaaatactgcatgtttt

SEQ ID NO: 880927 - DNA, 635 bp, Homo sapiens
ttctattggtgctaaaagaaaaaataaaaatatttaccttcattagctcaatagattagcccaaggtagctgaaaggagatgttgagagggggctttagaggccctggttctcatcctcactcccccactgattcccagtgggacccaagcaggctgtcatcagactcagtttacccacatcgctcatgagccatcctcttcctaagaccactgtaaggctgaatggatttgcatcctcaagagctgtggctcctaaatctcaagtgccgctcccgcactctctgtgtgctcccttactgtgcaygatgactatggttattgaaataaagaacaaacacatatgttcttggggcttcagctccctccagatgaccatgagctctaatgaatgcacatgtgtccagcctcccagaagccttcctccctaccctctccatggaccctggaacttctgaacgccaactgtttactagggaaggacacctctgggtggattcgctttaatgactgtctcttgacccactatgtcctcaagaagaactttacgatgggctctcttggtcaaaattgaatccctgaaaagctggccggtgtgagacttttccagccctgtttggatgaaggactcttcacc

SEQ ID NO: 880928 - DNA, 478 bp, Homo sapiens
ggatgtccttccctgaagagccggtcctacaagacagaagtgatgacttttctttagctcatggcaggtgtgatgggaagaagaaatgtctgctgggcccactctgtgccaggccctggatctcaagttcagaaggccagggttcaaattctcaccttgacrtttcctggctgtgtgaccctagacaagtcacctagtttccgtgagtctcagttttcacatctttaaattggggataacattagtagcttcacctcctagggttggtgtaaggatcaaacagataattattcagaagccctttgtaagtggcaccatgagaaggaaaatttggttatctcattcggtgtgatccaacagtaatatcaggggatctatcctacccaggagtctcatccaggggaatcccaaagtcctgcccaactggagaagcaggttactcacctgacttgtgtctggcatcaggaagaggctgatg

SEQ ID NO: 880929 - DNA, 596 bp, Homo sapiens
tcctttgcccagctttttaatggagttgtttgtttttttttcttggaaatttgtttaagttctttgtaaaggctgaatattaggtctttgtcagatggatagattgcaaaaattttctcccattctgtagatcatctgttcactgtgatgatagtttcttttactgtgcagaagctctttagtttaattagatctcatttgtgaatttttgcttttgttgcaattgctttttgcatctttgccatgaaatctttgyctgtgcctatgtcctgaatggtcctgcctagattttcttctcgggttttgatagttttgggtttttcatttaagtctttaatccatcttgagttgatttttgtataaggtgtaaggaaggggtccagtttcaattttcgtcatatggccagccagttctcccagcaccatttattgaatagggaatcctttccccattgcttatttttgtcaggtttgtcaaagaccagatggttataggtgtgcagtcttatttctgggttctttattctgttctgttggtctgtatgtctgttcttgtacaagtaccatgctgtttgggttactgtagccttgtagta

SEQ ID NO: 880930 - DNA, 579 bp, Homo sapiens
aaactgaaactggaccccttccttacaccttatacgaaaattaactgaagatggattaaagatttaaatgtaagacctaaaaccataaaaatcctagaagaaaatctagggaataccattcaggacataggcatgggcaaagacttcatgactaaaacaccaaaagcaatggcaacaaaagtcaaaatagacagatgggatctaattaaactaaagagcttctgcacagcaaaggaaactaycagcagagtgaacaggcaacctacagaatgggagaaaatttttgcaatctaccagctgaaaaaggactaatatccagaatctacaaagaacttacacaaatttacaagaaaaaaaaaaacagccccatcaaaaagtgggcaaaggatatgaacagacatttctcaaaagaagacacttatgcagctaacaaacatatgaaaaaaatctcatcatcactcatcagtagaaaaaaagcaaatcaaaaccacaatgagataccatctcatgccagttagagtggtgatcattaaaaagttaggaaacaacagatgctgcagaggatgtggagaaatagga

SEQ ID NO: 880931 - DNA, 579 bp, Homo sapiens
aaactgaaactggaccccttccttacaccttatacgaaaattaactgaagatggattaaagatttaaatgtaagacctaaaaccataaaaatcctagaagaaaatctagggaataccattcaggacataggcatgggcaaagacttcatgactaaaacaccaaaagcaatggcaacaaaagtcaaaatagacagatgggatctaattaaactaaagagcttctgcacagcaaaggaaactaccakcagagtgaacaggcaacctacagaatgggagaaaatttttgcaatctaccagctgaaaaaggactaatatccagaatctacaaagaacttacacaaatttacaagaaaaaaaaaaacagccccatcaaaaagtgggcaaaggatatgaacagacatttctcaaaagaagacacttatgcagctaacaaacatatgaaaaaaatctcatcatcactcatcagtagaaaaaaagcaaatcaaaaccacaatgagataccatctcatgccagttagagtggtgatcattaaaaagttaggaaacaacagatgctgcagaggatgtggagaaatagga

SEQ ID NO: 880932 - DNA, 471 bp, Homo sapiens
tcctgaggcgacatacatcctcagcctatgaagatgacgggataaagagattaaagacaggcataggaaattataagagtattgattggggaagtgataaatgtccatgaaatcttcacaatttatgttcagagactgcagtaaagacaggtgtaagaaattataaaagtattaatttggggaactaataaatgtccgtgaaattttcacaatttatgttcttytgccatggcttcagccagtccctccatttggggtccctgacttcccacaacataggacaaaaggttgctacagtcctattattttatggttaccataagtgtacagggactctaaaaggaacttgtttgtataatgctgttctatacaaggtatgtagcccaggaagtgaccagcctgatgtgtgctataacccgtcctttttcctactgcccataaaaacaggcaaacttctaggcttcccagtct

SEQ ID NO: 880933 - DNA, 678 bp, Homo sapiens
tttaaaaaaataaagcacttattctgaattttttgaattgatttttaattatttttatttagaatatagttgaaaagctgtaatattcagttttgctagtaaaagaccatttttttgtgtgaatgaagtttcaattataaacttacatycactttattgagcactacataatttacagatattttgttgtattggcaaaagcaagtggtttccatatgctaaattaattgtattttctttttgagcagattggatatcttgttcttataaattataatattgaaatacatataatctttggatggatgggctgttaatttgtaaataggttttcattaagttatttctcatgataagtaataatcagcagttttataatatttactatttggagggtcattttgatgctttaaattgcagaaatagtcaaatttgaatattcagaaaataaatttatttagatatattgtaaagagggtgcaaaacaagcaatgggttagaataatagatcttcaagtcttttcttaaatggggtatgtagttccagcttttcagtgagaaatttccaaaccgtgcttattagctttaaatggtctcttgaaatgatcataaatttttctcagtgtcctttttgtgttgaacacatatatctgaaacctgtatttaaccagatatttc

SEQ ID NO: 880934 - DNA, 600 bp, Homo sapiens
ggctggtcttaaactcctgacctcaggtgatccacccacctcagcctcccaaagtgctgaattacaggcttgagccactgtgcccggtgaatctcctaattttaaaacagagcctacaacagggtcaggcctcataggtacacatctctggatggaataagagttctggattccaggtacctgcagtttacacctaaattgttgcataccattgactgaatgtttcttatctaccaggcactgtgctaggtgctctatgtgctttacggatggctgaatctaatragcgaagcaggctcaaagaggttggatgacttgctctagggaactctgtaagtaaaggacagagtgggaattcacactcggggagacagatcccacctgctgttcatccatttatagtctgtcaagtgtgttgacatgaacgtagctcatctacactcagccacggctaagtggagtgtccttggtgccacctcaacctcattaccttccagatttttcccaatgttggttggcctattcgaacctctcttgcctctatgtggggtcatgtgactagttgtccccagtggaatgtaaatagaagtgatgtgtgtg

SEQ ID NO: 880935 - DNA, 635 bp, Homo sapiens
tagttttcaccagatttgggaaattgctggccattatttctttaaatattttttcatctcactcattttgtccttagggcactctgactaaacgtgttcagctgctgttctccattcattttttttctaatcttctttctctctgtgtttcattttgggtagtttctactgctatgwcttcacgttcattcatcttttcttctgctatgtctaagttgctcttgattccatgcagagcatgtgtatattttttgaatcatagtcactatagatcttatcttcagaaacacaatttgagtcttttttaggattgccagatttaacaaataaaatacaagactcccagttaaatttgaattttagataaatggtgaacaatttttagagtatatgcaatagttgggacacacactaaaaaaatctactatttgtctgaaattcaaatttgactgaagagctttcattttatctggaaacctgagtcttatattttacatatttctatttacaatactcaaccttactgctagtttcttgaatatatagaacacagttataactcttttaatgtccttgtttctcaattctgccacctgtgttatttctcagtaggttttaattgattgatatttctc

SEQ ID NO: 880936 - DNA, 565 bp, Homo sapiens
acccatcatgtgccaggctcctcagagccctggcagagccacctgtacccgtgctgggtttcatttctccttgcgggggacactgtggcctagctgcagtggttctttattgcagcccttccctcagggtctttcccatgcatcctcagcaggtgagtccrtttgtcaactaatggcaccataacagctgcgtctaatttttattcatctaaagaccacaagaaaacagagcctcctgacacctcaaaccacgacgggtcttaggttttagcagtgcagaaggagctggggaaaggaagccagataaccagttcttggatgtgtccccacatgatctggggaagtgctccctgcttctgtgagcctcagctgcctcatctgaacaatgggtgggcagcactgggtcttggtggctccatcagactttaacattaaagccactttgtttatttaatttttaatttttgtgggtacacagtaggtgtatatatttgtgggtcacatgagatattttgatataggcatgcaatgcctaataatcacatcagggtaaatggggtaaggc

SEQ ID NO: 880937 - DNA, 565 bp, Homo sapiens
acccatcatgtgccaggctcctcagagccctggcagagccacctgtacccgtgctgggtttcatttctccttgcgggggacactgtggcctagctgcagtggttctttattgcagcccttccctcagggtctttcccatgcatcctcagcaggtgagtccgtttgtcaactaatggcaccataacagctgcgtctaatttttattcatctaaagaccacaagaaaacagagcctcctgacacctcaaaccacgacgggtcttaggttttagcagtgcagaaggagctggggaaaggaagccagataaccagttcttggatgtgtccccacatgatctggggaagtgctccctgcttctgtgagcctcagctgcctcrtctgaacaatgggtgggcagcactgggtcttggtggctccatcagactttaacattaaagccactttgtttatttaatttttaatttttgtgggtacacagtaggtgtatatatttgtgggtcacatgagatattttgatataggcatgcaatgcctaataatcacatcagggtaaatggggtaaggc

SEQ ID NO: 880938 - DNA, 663 bp, Homo sapiens
gctattaggacaactgtgctgactcccctagattttgtttttaatcattgtcagattttggtaattggacaattgttagtaacatattctttttgaagtcctttataactgcttacaactttcgtttgaaagctctgctttatttagagatgcagaatctattgagagaacatatctgtaaatactcgactctgagcagtgtgacatatgcagtgatagaaatattttatgtaaaaattggtktcttgattaggagatggttattaatatcagattattccctgcatccttttaagaaatttcaatttatcgagaaaatgaaagaatagcataatgtgtaatcttcacctagattcaccaattgttaacaatcaccacaaacatatgcataatatgtgtatatacacacacatatctatattttattttgatgacccagttgggataaattgcagacatcattataattcatccctaaatatgtcagtttatatctcctaagaataagagcattttcctacatttccacattactgctaacatactcaggaaatttcacattgataccattattttttaatagttgatatccaaatgttctaaattatcctaataatctccctcttcccttttctgttttttgaatctaggagccaatgcttt

SEQ ID NO: 880939 - DNA, 663 bp, Homo sapiens
gctattaggacaactgtgctgactcccctagattttgtttttaatcattgtcagattttggtaattggacaattgttagtaacatattctttttgaagtcctttataactgcttacaactttcgtttgaaagctctgctttatttagagatgcagaatctattgagagaacatatctgtaaatactcgactctgagcagtgtgacatatgcagtgatagaaatattttatgtaaaaattggtttcttgattaggagatggttattaatatcagattattcccygcatccttttaagaaatttcaatttatcgagaaaatgaaagaatagcataatgtgtaatcttcacctagattcaccaattgttaacaatcaccacaaacatatgcataatatgtgtatatacacacacatatctatattttattttgatgacccagttgggataaattgcagacatcattataattcatccctaaatatgtcagtttatatctcctaagaataagagcattttcctacatttccacattactgctaacatactcaggaaatttcacattgataccattattttttaatagttgatatccaaatgttctaaattatcctaataatctccctcttcccttttctgttttttgaatctaggagccaatgcttt

SEQ ID NO: 880940 - DNA, 663 bp, Homo sapiens
gctattaggacaactgtgctgactcccctagattttgtttttaatcattgtcagattttggtaattggacaattgttagtaacatattctttttgaagtcctttataactgcttacaactttcgtttgaaagctctgctttatttagagatgcagaatctattgagagaacatatctgtaaatactcgactctgagcagtgtgacatatgcagtgatagaaatattttatgtaaaaattggtttcttgattaggagatggttattaatatcagattattccctgcatccttttaagaaatttcaatttatcgagaaaatgaaagaatagcataatgtgtaatcttcacytagattcaccaattgttaacaatcaccacaaacatatgcataatatgtgtatatacacacacatatctatattttattttgatgacccagttgggataaattgcagacatcattataattcatccctaaatatgtcagtttatatctcctaagaataagagcattttcctacatttccacattactgctaacatactcaggaaatttcacattgataccattattttttaatagttgatatccaaatgttctaaattatcctaataatctccctcttcccttttctgttttttgaatctaggagccaatgcttt

SEQ ID NO: 880941 - DNA, 676 bp, Homo sapiens
cggtaccactcaagcactggtgaaatagtaaaatggtacagtcactctggaaaatagtttggcagtttcttataatactgaacacaattactatacaacccagcaattacacacttgggcacagatcctagagaaatggaaagtgatgtctgcacaaaaacctgcatggaaattttcacagcagctcaacaactgaaagtaacctagatgtcctccaaagggctaasagtcaaaccatggtatattccatatcatgaaatactcctgagcaataaaaatgaattaactgttgataaacacaacaaatcagattatttccaagagaattatgctgagtaaagcagcaaatcccaaaaggttacataccgtattatagaaacggaaaacaaatgtgttattgcagctgatcagagattgggaagggatagttatgaaaggacaacccaagggactcttgcagtaatgcaactattttgtatcttgactgtggaaacacaaacccacacctgtaacagaattgcatagacttaaatgtacacagcacacacacacacacacacacacacacacacacacaaatcttggggaacacgaaaaaatcgaaatgcattaataaaagttcatttttaaatgggaaaactgaaaaaacgtaacattaaaatgaatgataaagatg

SEQ ID NO: 880942 - DNA, 676 bp, Homo sapiens
cggtaccactcaagcactggtgaaatagtaaaatggtacagtcactctggaaaatagtttggcagtttcttataatactgaacacaattactatacaacccagcaattacacacttgggcacagatcctagagaaatggaaagtgatgtctgcacaaaaacctgcatggaaattttcacagcagctcaacaactgaaagtaacctagatgtcctccaaagggctaagagtcaaaccatggtatattccatatcatgaaatactcctgagcaataaaaatgaattaactgttgataaacacaacaaatcagattatttccaagagaattatgctgagtaaagcagcaaatcccaaaaggttacataccgtattatagaaacggaaaacaaatgtgttattgcagctgatcagagattgggaagggatagttatgaaaggacaacccaagggactcttgcagtaatgcaactattttktatcttgactgtggaaacacaaacccacacctgtaacagaattgcatagacttaaatgtacacagcacacacacacacacacacacacacacacacacacaaatcttggggaacacgaaaaaatcgaaatgcattaataaaagttcatttttaaatgggaaaactgaaaaaacgtaacattaaaatgaatgataaagatg

SEQ ID NO: 880943 - DNA, 661 bp, Homo sapiens
gacttgtttctgattctactgctgataacactgacgtcattttgatcacattgatgcagtgtgatcatctgcagaggcctcagtgcaaggcagctcccttccccgtgtccaagtcccctgaccctctctcttccctccatttcctcagaatgtaccctttaattcacaaacaaaaacgcagctattcgcattcttccctggcctactctgccctacctcaaacttgcctgtgccttaaatcctaaaacgttccttcctctctccagactcagtgggaaagcggtccctatttttcctggaactccgggcttgtctcttggaacttcacaacaattrcccctttctcctatattttcaccctctcccccatccctagatttaggacattgctcacgtcttgttcatcttacatacccacaccctcgctcagccctacatcatctcccagctactgtatcatccacttagcagccaacctataaactcctctcactttgcctcccattctcttgcctgagccactgatgacctctttattgccaaacccaggagacaggtttgaggatgagctgatgtgaaatctctgtgccatctgactgcaatgactatcgtttcctttatgaaactttctcctcctttggcttccgcaaaactcctctct

SEQ ID NO: 880944 - DNA, 588 bp, Homo sapiens
aacctttcctaagactcagtggacagcaatcagttaatgtgccaagaagcataagctaaatccagattgcaacatactactcattctgaatctgtaagggaatgcctctgtgagtcactgttgtgggaatgtcctgggatggcatagttaatactttctaatgggatttaaaaagtcagtacatttctctttttgaatttgtttcttaatgatctgatgcacttttggataagatacagcttgctttatagaacagaaaaaacattgtcatttatacatgatttagctttatgatcatgatttaaagccaccagctttgtgggaggaagatagtgagaayggccatgacagctttaactacacccttgaagacctccttgcttactagagggcactgtgctgtcctcagatgccctgaggcaggtcagattgggataataattacattaactcccaaactaccctgtgctggactttttttttaagttatagctctatggagatataattgaaatatagtaaatgggaaatatttaagatatataatttgatatgctttgacatattcacagtaggcccctctcacct

SEQ ID NO: 880945 - DNA, 639 bp, Homo sapiens
tgttgcagatggcagaagaaaacctgaggaaagcgggacaaccagtcacaataagtaatttaatgatagctatgatagcggtgatcaccattgccatgagtattccttcaacaagggctgacacagagtgtaattatacttattgggcatatttatcaatcttggctggcaataatgcccggatgtaatcactctatgacamagttacacatgctttctgatctcattttaccataataaatctgctcctataattgaggcatactgccctcaaagcctatttgtaaacagaattggacctggccagaaataatgaatgtatttgttttggaagattgcattgcagaacaggcagaggtgttgcacaatgattcctatggaatcattattgattggtcccctaaggggatgtttagcttaaattgcacctctcagtctgcataccatggccacactatgttcagctggtctgaacaaaatggtcagatggtagaaatagtaagaaatatggtaagagttcctattatctggaaacatgacggtatagtggcacctcaacctcaaatgatatggcccgctgtaggagctaaacataaggatttgtggaaactattaatgactcttaataagatcaaaatt

SEQ ID NO: 880946 - DNA, 643 bp, Homo sapiens
tccttcaaaccttgcaaattttttcctagtcccataccatggacataccccatttcatgcatcatatgttgactatgagggctatataattgttctggaattagaagttgtgctccccattgttgtaataaatctctcccccataaatttataggtacagaagttacaattggttgaatagtcccaggttgtccatcggatccttcacgatgcaaaacataactactttgatatactttaggggctttaccaactccaactatgttaaattgagcaggttgaattggccamatggatggccagtgctgtagagaaatgattgaaatgtctgctcctgtatctaccaaacttttaaatttctttccctgaatagttatttcacaggtaggacgtttatcagtaatctgattcacccaataagctgctttgccttatttgtgcttccaaatcctcctgttcatttaatttcccttttctccatttccacatacggcacaatcaggagttgtgctatgcgctctcctggctctgctttccagggaacaggagtagatataacaatttgaatttccccattgtaatctgaatcaatgactcctgtatgtacttgcactccttttaaatttaaactagatctacctag

SEQ ID NO: 880947 - DNA, 643 bp, Homo sapiens
tccttcaaaccttgcaaattttttcctagtcccataccatggacataccccatttcatgcatcatatgttgactatgagggctatataattgttctggaattagaagttgtgctccccattgttgtaataaatctctcccccataaatttataggtacagaagttacaattggttgaatagtcccaggttgtccatcggatccttcacgatgcaaaacataactactttgatatactttaggggctttaccaactccaactatgttaaattgagcaggttgaattggccaaatggatggccagtgctgtagagaaatgattgaaatgtctgctcctgtatctaccaaacttttaaatttctttccctgaatagttatttcacaggtaggacgtttatcagtaatctgattcacccaataagctgctttgccttatttgtgcttccaaatcctcctgttcatttaatttcccttttctccatttccacatayggcacaatcaggagttgtgctatgcgctctcctggctctgctttccagggaacaggagtagatataacaatttgaatttccccattgtaatctgaatcaatgactcctgtatgtacttgcactccttttaaatttaaactagatctacctag

SEQ ID NO: 880948 - DNA, 634 bp, Homo sapiens
  misc_feature 99: n = A,T,C or G
tgatgtctgccatcagcctttcttcttcctctagtcctccgctcctcagtaacatcagacctgggaaggtcttcagacatcccagaaacccccagttgngggagtccatacatgacccatcaaagatgagttgcaagcaggcctgccataaagagcagcagccttaatgggttttcctacagagatagtcaatgtacagaggcaataaactgactgctttgtgattgatcaccttgaaaaaatgagcatgtctggatatattagtcatttcttgcattgctgtaaagaaatacctgaggctgggtaatttataaagaaaagagatttaattggctcatagttctgcaggctctacaggaagcatagcgacttctgcctctagggaggcctcaggaaatttacaatcatggsagaaggtgaaggaggagcaggcggatcttacatggctgtagtagaagcaagagagggtggggaggaggagccacacacttataaaccaccagatctcataaaaactcattgtcacgaggacaacagcgaaggcaggatggtgtgaaaccatgagaaactgcccctaggatccaatcacctcctatcaggccccacctccagcatttggggttacatttcaaca

SEQ ID NO: 880949 - DNA, 631 bp, Homo sapiens
tttctttattttttgagacagggtctcactctgttgcccaggctggagtgcagtggcgcgatctcggctcactgcaacctcagccttctgggttcaagtgattctcctgcctcagcctctggggtagctaggagtataggcgagcaccaccacacctggataatgtttgtatttttaggagagacagggttttgccatgttggccaggctgttcttgaactgctggcctcaagtgatctacccacctcggcctcccaaagtgctgggattacaggcgtgagccaccgcgtctggccatgaatagtagcctgtgtgctttgatgcatcctgctaagactttacccatccttaccttttaaaatattgaccctaacatgctgagaataggaactgttactttcttcattttagagaagaggattttgaggcccaggaaataaagtaactgactgtaagtccctcttakggagagttacatttttacaaaacttttcattaaacaattaaaaaaatttagtttgagttaaaacgtttatacacacgtgtacacacacacacaggcacagtaaattgtacaaatctgaagtatgtggctcagtgtgtttctataggtgtgttactgctttcacct

SEQ ID NO: 880950 - DNA, 648 bp, Homo sapiens
ttagggttagcagggaatcggagacatttagaaaagagtggtgtaaagccagggatcattttcagccaaaaccgtggaaatccgggaagacttttaaagaggtcaaggagggtatcacacaggaggattacgtgacaagaacatattttatgggccctcagtggggaggccatttgtggttgatctgtttctagataacgtgaaacatggcagagggtaatcacatsatctgttcaccatatttttattctgaagaaagtctcccataataaaagacagagtgaagtcctattactttgtccatttatttgactctaagccctgacattgttaaatttccagagtttcagataccaagtgtatttagcttatagttggttcttcagtgcctagtacaatacgtgccattcactcattcattcattcatgtaacaggatacttggaggcctgccccatgccaagcactgtggctccactggaggttgtaacccattttgttattggtagagggtctcaactgcaagttatccaggttcttggtgttttgatcaaagaattggacaaaacgctcagaaaagtgaggaaaagaacgaaggaatgaaagctgagatttattgaaaatgaaagtatactttacagggtgggag

SEQ ID NO: 880951 - DNA, 583 bp, Homo sapiens
  misc_feature 512: n = A,T,C or G
aaagaagaaatggtcaagtacttcatttcccaactgttttctatttttcttttcccaaaactattccaaaaagtttatggggctttgtgtttattgtttatgaggtaaacaaatatgagtttttactcccagatttttccaaattaaaaaggcagtgacaaatatccatttaaattaaaaatccaagccattattgacattggaacttgattctacatatgcattaaaaaaaagacctaacagggggaaacctacattgtgttcataactggggatatccaacagcatcagtatgtcaaatttccataaatgaatccatgtattcaatgycattcctttaaaaaatttcacggccttttcccacagaatttgacaagacggaaaaaaatcatttgaaagagtcaaggtaaagaacagccaaaatgtgattaaaagaaaggaatgcttgtctttctagacataaagatactctttaatcatagtaatcaaaggactgtatcattaaagctcanagagaccaactgaactcagtggacaggcaagaaacagatcgcacatttatggtcgaccttgctctcgttac

SEQ ID NO: 880952 - DNA, 583 bp, Homo sapiens
  misc_feature 512: n = A,T,C or G
aaagaagaaatggtcaagtacttcatttcccaactgttttctatttttcttttcccaaaactattccaaaaagtttatggggctttgtgtttattgtttatgaggtaaacaaatatgagtttttactcccagatttttccaaattaaaaaggcagtgacaaatatccatttaaattaaaaatccaagccattattgacattggaacttgattctacatatgcattaaaaaaaagacctaacagggggaaacctacattgtgttcataactggggatatccaacagcatcagtatgtcaaatttccataaatgaatccatgtattcaatgccattcctttaaaaaatttcacggccttttcccacagaatttgacaagayggaaaaaaatcatttgaaagagtcaaggtaaagaacagccaaaatgtgattaaaagaaaggaatgcttgtctttctagacataaagatactctttaatcatagtaatcaaaggactgtatcattaaagctcanagagaccaactgaactcagtggacaggcaagaaacagatcgcacatttatggtcgaccttgctctcgttac

SEQ ID NO: 880953 - DNA, 609 bp, Homo sapiens
  misc_feature 355: n = A,T,C or G
ctcggagtagtttgatcatctgaagccttcttctctcaactcgttaaagtcattctccatccagctttgttccgttgctggtgagtagatgcgttcctttggaggaagagcggtgctctactttttagagtttccagtttttctgctctgttttttccccatctttgtggttttatctacttttgtctttgatgatggtggcgtacagatggatttttggtgtggatgtcctttctgtttgttagttttccttctaacagacaggaccctcagctgcaggtctgttggagtttgctagaggtgcactccagatcctgtttgcctgggtatcagcagtggtggctgcagagcggcntggctgcagaacagccgtggctgtagaacagyggatattggtgatctgcaaatgctgctgcctgatcattcctctggaagttttgtctcagaggagtacccagccatgtgaggtgtcagtctgcccatactggggggtgcctcccagttaggctgcttgggggtcagggagccacttgaggaggctgtctgcccattctcagaactccagctgtgtgctgggagaaccactactctcttcaaagctgttagact

SEQ ID NO: 880954 - DNA, 609 bp, Homo sapiens
  misc_feature 355: n = A,T,C or G
ctcggagtagtttgatcatctgaagccttcttctctcaactcgttaaagtcattctccatccagctttgttccgttgctggtgagtagatgcgttcctttggaggaagagcggtgctctactttttagagtttccagtttttctgctctgttttttccccatctttgtggttttatctacttttgtctttgatgatggtggcgtacagatggatttttggtgtggatgtcctttctgtttgttagttttccttctaacagacaggaccctcagctgcaggtctgttggagtttgctagaggtgcactccagatcctgtttgcctgggtatcagcagtggtggctgcagagcggcntggctgcagaacagccgtggctgtagaacagtggatattggtgatctgcaaatgctgctgcctgatcattcctctggaagttttgtctcagaggagtacccagccrtgtgaggtgtcagtctgcccatactggggggtgcctcccagttaggctgcttgggggtcagggagccacttgaggaggctgtctgcccattctcagaactccagctgtgtgctgggagaaccactactctcttcaaagctgttagact

SEQ ID NO: 880955 - DNA, 609 bp, Homo sapiens
  misc_feature 355: n = A,T,C or G
ctcggagtagtttgatcatctgaagccttcttctctcaactcgttaaagtcattctccatccagctttgttccgttgctggtgagtagatgcgttcctttggaggaagagcggtgctctactttttagagtttccagtttttctgctctgttttttccccatctttgtggttttatctacttttgtctttgatgatggtggcgtacagatggatttttggtgtggatgtcctttctgtttgttagttttccttctaacagacaggaccctcagctgcaggtctgttggagtttgctagaggtgcactccagatcctgtttgcctgggtatcagcagtggtggctgcagagcggcntggctgcagaacagccgtggctgtagaacagtggatattggtgatctgcaaatgctgctgcctgatcattcctctggaagttttgtctcagaggagtacccagccatgtgaggtgtcagtctgcccatactggggggtgcctcccagttaggctgcttgggggtcagggagccacttgaggaggctgtctgcccrttctcagaactccagctgtgtgctgggagaaccactactctcttcaaagctgttagact

SEQ ID NO: 880956 - DNA, 630 bp, Homo sapiens
tgtatgtgtgcaggaatttattcaattcttctagattttctagtttatgtgcctagaggtgttcatagtagtttctgatggttgtttgcatttctgaggatttagtagtaatatcccctttttttgtttctaattgtgtttatttgaatcttctctcttttcttcattagtgtagctagtggtctatctatcttattaattgtatcaaaacaycagctcttgggttcattaacattttgaatggtttttcatgtctcattctccttcagttcagcactgattatttcttgtattctactagcactgtggttggtttgctcttgcttctctagttcttttagttgtggtgttaggttgttaatttgagatctttctatcttttgatatgcgcatttagtgctataaatttcccttttaacattaccttagctgtgtcccagagattccaccatgctatatctttgttttcattagtttcaaagaacttcttgatttctgccttaatttcattgtttatctaaaagccattcaggagcaggttgtttaatttccatgtagttgcatgcttctgagcaattttcttagtcttgaattctatttttattgctctacaatttaagagagtggttg

SEQ ID NO: 880957 - DNA, 630 bp, Homo sapiens
tgtatgtgtgcaggaatttattcaattcttctagattttctagtttatgtgcctagaggtgttcatagtagtttctgatggttgtttgcatttctgaggatttagtagtaatatcccctttttttgtttctaattgtgtttatttgaatcttctctcttttcttcattagtgtagctagtggtctatctatcttattaattgtatcaaaacatcarctcttgggttcattaacattttgaatggtttttcatgtctcattctccttcagttcagcactgattatttcttgtattctactagcactgtggttggtttgctcttgcttctctagttcttttagttgtggtgttaggttgttaatttgagatctttctatcttttgatatgcgcatttagtgctataaatttcccttttaacattaccttagctgtgtcccagagattccaccatgctatatctttgttttcattagtttcaaagaacttcttgatttctgccttaatttcattgtttatctaaaagccattcaggagcaggttgtttaatttccatgtagttgcatgcttctgagcaattttcttagtcttgaattctatttttattgctctacaatttaagagagtggttg

SEQ ID NO: 880958 - DNA, 632 bp, Homo sapiens
ctcagatggaaatgcagaaatcacccattttctgtgtcgctcacgctgggagctgtagacccaagctgttcctatttggccatcttggctccaccccaggatatacatatcttccttatttccccaaagcacaaataagtttagactgtacatttaacaaaagttakcaaaggcttaaatataagagaagcactacacaatgaaatgtgcgattcctttagaaataatcactcagagtaagacagcttctgctctcacctattgtattactactgtctgtgagcaaatatttgaacaaaaagccacacatacctcccaagaggaagtacattcaggtttaataggaaaaaatctctaactgcagtggttgttatcagtgtaacacacactcaattattcttccccttgcattcaggttaatgctgcagatgagggaaagaaaaaggttctgacttaagaagcagcaagcagatgagaagcccaagtgaaaaactctaagaagagtgttgcctgtttgcctcccaggagagaaggcagacagaaggtccttggcaaatactatgcattgtgattaatacaagaggagagggagacatgtttccttctctcaagagttttgaggcttcatacct

SEQ ID NO: 880959 - DNA, 543 bp, Homo sapiens
ttgaatttgtttgctcttcctcctctagttcttttaattgtgtcaattttagatcttccccactttctcctgtgggatttagtgctataaatttccccctaagcactgctttagctgtgtcccagagattctagtacattgtgtctttgttctcattggtttcaaagaacttatttatttctgccttcatttcgttatttaccccatagtcattcargagtaggttgttcagtttccaggtagttgtgcagttttgagtgagtttcttaatccagagttctaatttgatggcactgtggtctgagagactgtttgttattatttccattcttttgcctttgctgagaagtgttttacttccaattatgtggttgattttagaataagtgctatgtggtgctgagaagaatgtatattctgttgatttgaggtggagagttctgtggatgtctattaggtccacttagtccagtactgagttcacgtcctgagtattctttttcattttctgtctcattgatctatctaatattgacagtgggg

SEQ ID NO: 880960 - DNA, 591 bp, Homo sapiens
agtcatctcccacctgcaccctgtccctcttctgccctcctcattcctgcccttgactgttctgtatggagatggggctctgtgtctggagtgcatgggtcttatctaaaatccctcgaacttggcgagccgccctttgctcatttctggtccgattgcctctctgttaagacattcggtttggctttaagcgggcaaggaggaggttgaawaaagggatctctgtgtgcgaatagccccttcagacttccatggagcagaggcagggcgtgatggctgcttggcgggcgtctggcgtttgtacttgcgtatgtttttaccctccaggccccggactcccattgtcacagcccagccaccgtgactccctggcagacaaccccagacgttagccagccgcgcataactgagctcctcctgctctttctcagtgttttcctcttctccagcttggcccctctggtcattttctgagccgttttgtgatgtctagagactgaaaagctgtctgttatctatcccatcctttgctcatgcattctttgctgagtgttctcagattttctctcagcttcctagcaggatttcgtg

SEQ ID NO: 880961 - DNA, 591 bp, Homo sapiens
agtcatctcccacctgcaccctgtccctcttctgccctcctcattcctgcccttgactgttctgtatggagatggggctctgtgtctggagtgcatgggtcttatctaaaatccctcgaacttggcgagccgccctttgctcatttctggtccgattgcctctctgttaagacattcggtttggctttaagcgggcaaggaggaggttgaataaagggatctctgtgtgcgaatagccccttcagacttccatggagcagaggcagggcgtgatggctgcttggcgggcgtctggcgtttgtacttgcgtatgtttttaccctccaggccccggactcccattgtcacagcccagccaccgtgactccctggcagacaaccccagacgttagccagccgcgcataactgagctcctyctgctctttctcagtgttttcctcttctccagcttggcccctctggtcattttctgagccgttttgtgatgtctagagactgaaaagctgtctgttatctatcccatcctttgctcatgcattctttgctgagtgttctcagattttctctcagcttcctagcaggatttcgtg

SEQ ID NO: 880962 - DNA, 677 bp, Homo sapiens
gattacttcaccaggatgatttctgagatctcatctcatatcgtcctgaatacacacacacacacacacacacgcacacacacacacatctcagaaatcatcctaatcaaatatagactttatatatatcaaatatatatatacatgtagaaatacatataggtatgtatctttaagtccttgcttgtgaacaatgcttttaaatgtttttaaaatactgtatgccaaaataggttttctcttaatgctttacttcctaatggatgtgatttgcagatttgtagggcacttggattagggttctctgagtttgccctgccttataatgtagatgagcaactctcctggcatgcyttggtcattgcaatttatgtcagtctgatgaacagatggcttagcctctctgaagcccaatgtgtgtggatttgtctaatttttttctttataatcttttctgcttaccaaattaaaggacaaactagtatagctggaacatatatgtgtgtatccatacacactaaacacacaggtatatgctaaattgtaatggtaaccaaatgatggttacaactttgtgactattatttgaggaagatttaatgtctttggagtgattttcccctctttcttcacattatcataaaagaagttagacactacaggcaagattacagagt

SEQ ID NO: 880963 - DNA, 677 bp, Homo sapiens
gattacttcaccaggatgatttctgagatctcatctcatatcgtcctgaatacacacacacacacacacacacgcacacacacacacatctcagaaatcatcctaatcaaatatagactttatatatatcaaatatatatatacatgtagaaatacatataggtatgtatctttaagtccttgcttgtgaacaatgcttttaaatgtttttaaaatactgtatgccaaaataggttttctcttaatgctttacttcctaatggatgtgatttgcagatttgtagggcacttggattagggttctctgagtttgccctgccttataatgtagatgagcaactctcctggcatgccttggtcattgcaatttatgtcagtctgatgaacagatggcttagcctctctgaagcccaatgtgtgtggatttgtctaatttttttctttataatcttttctgcttaccaaattaaaggacaaactartatagctggaacatatatgtgtgtatccatacacactaaacacacaggtatatgctaaattgtaatggtaaccaaatgatggttacaactttgtgactattatttgaggaagatttaatgtctttggagtgattttcccctctttcttcacattatcataaaagaagttagacactacaggcaagattacagagt

SEQ ID NO: 880964 - DNA, 607 bp, Homo sapiens
ataaatgctccgtgtggttcatttgtaaagctatctctactgtagtagtttctaccagaagacatctacagataatgcaattcaccaagtcagcatgaagggttgaatccctggaacaactaggaatttttgcaggctatttctgctgtgacacagccctgaagtggctagcagatattcagcctgagtggaccccctttattactgatctattgcctgcctaattgtgcataacattccaaatattattaatttttaattatttacgtttaattatctgcattacttaagcattcraattccacagctaatgttctcaatgaaatatttactaaacagtcaaacctcttggattccacagaattaaatgttttcaatttgcagcaaacctttcctccaggaggcattctttgcactctagtgttctggaggtggctgcagtctgggtggttatggcttcagccttaccatccttttcatctcagggacactgtcaactctaatgggatggattctctgcttggcattagcattaggaggttgagtgccgttgggacactcgtgccatctctcttcccacttctcttctgttagggccagaaaatgc

SEQ ID NO: 880965 - DNA, 598 bp, Homo sapiens
agatgggttgagtaatctcggctcactgcaagctccgcctcccgggttcaagccattctccggcctcagcctcccaagggtggatgtgtatcacactgtattactccaaccctgcttccactgtcaaatcttctctaatctcttctgcctctctcttctactttttaaggaccctcatgattacactgcacccactcagataatcctggataatatcttcatctcaaaatccttaaacccatctccaaagtccattttgccacataaggtaacatattctcaaatgtggacatctttggccaaggtgggcagatggctagagcccaggagtttgagacatgcctgggcaacacarcgaaaccccttctctacaaaaaaaagatacaaaaattagctgggcatgatggcacgcactgcagtcccacctagtcaggaggctgaggtgggaggattacttgagcctgcaaggcagagtttgcagtgaggcaagattgcacatcactgcaccctagcctgggcaacagagtgagaccctgtctcaaaaaaaaaaaaaaaaaacattgctgaatgcaagttgtatgaaatgtaaggaagaggt

SEQ ID NO: 880966 - DNA, 605 bp, Homo sapiens
cagagaaaggcgaagctctatgcaaggaaacccaaaaaacgatacaagaagtgaagggagtaatattcaagaaaatagatagcataaataaaaaacaatcaaaacttcaggaaacaacagacacaattatagaaatgcaaaatgctctggaaagtctcagcaatagcattgaagaagtagaagaaagaaattcagagctaaaagacaaggtsttcaaattaacccaatccaacaaagacaaagaaaaaagaataagaaaatacaagcaaagcctccaagaagtctgggattatgttaaacgatcaaacttaagaataatcggtgttcctgaggaagaatagaaatctataagtttggaaaacatatttgggggaataactgaagaaaattccccagccttgctagagacctagacatccaaatacaagagctcaaagaacacctgggaaattcattgccagaacatcacctaggcacattgtcttcaggttatctaagttaagatgaaggaaagaatcttaaaaactgtgagacaaaagtaccaggtaacttgtaaaggaaaaacctatcagattaacagcagatttcttagcagaaaccctaca

SEQ ID NO: 880967 - DNA, 605 bp, Homo sapiens
cagagaaaggcgaagctctatgcaaggaaacccaaaaaacgatacaagaagtgaagggagtaatattcaagaaaatagatagcataaataaaaaacaatcaaaacttcaggaaacaacagacacaattatagaaatgcaaaatgctctggaaagtctcagcaatagcattgaagaagtagaagaaagaaattcagagctaaaagacaaggtcttcaaattaacccaatccaacaaagacaaagaaaaaagaataagaaaatacaagcaaagcctccaagaagtctgggattatgttaaacgatcaaacttaagaataatcggtgttcctgaggaagaatagaaatctataagtttggaaaasatatttgggggaataactgaagaaaattccccagccttgctagagacctagacatccaaatacaagagctcaaagaacacctgggaaattcattgccagaacatcacctaggcacattgtcttcaggttatctaagttaagatgaaggaaagaatcttaaaaactgtgagacaaaagtaccaggtaacttgtaaaggaaaaacctatcagattaacagcagatttcttagcagaaaccctaca

SEQ ID NO: 880968 - DNA, 643 bp, Homo sapiens
gatatttggaacgctttgaggcctattgtggaaaaggcaatatcttcacataaaaactacacagaaacattccgagaaacttctctgtgatgtgtgcactcatctcacggagttgaacctttctttgattgacaagttttgaaagactatgtttctataatgtgcaagtggatatttggagtgctttgaggcatatggtggaaaaggaaatatattcacataaaactatacagaagcgttcccagaaacttatttgtgatgtgyttattcaactcgcagagttgaccctatcttttgatacagcagttttgaaactctctttttgtagaatctgcaagtggatatttgcagcgctttgaggcctgcggtggaaaaggaaatatcttcacataaaaactacacagaagcattctcagtaacttctttgtaatgtgtgcattcacctcacagacttgaaacttcctcttgattgagcagcttggaaacacacttttagtgaaatctgcaagtggatatttggagcaccttgaggcctgttgtggaaaaggaaatatcttcacataaaaactacacagaagcattccaataaacttgtttgtgatatgtaccttcaactgacagatttgaacctttcttttgatta

SEQ ID NO: 880969 - DNA, 593 bp, Homo sapiens
atgtacaagtgaatatttggagcactttgaggcctatgatagaaacggaaatatgtttacataaaaactacacagaagcatgctgagaaacctctttgtgatgtgtgtattcacctccgggagttcaacctatcatttgacagagcggttttgaaactctttttgtagaatctccaagtggatatttggagccctttgcattctactgtgaaaaggaaatatcttcacatmaaaactacacagacgcattctgagaaacttctttgtgatgtttgctttcaactcacagaattgaaccttttgtttgagtagttttgaaactctctttttgtagaatctagaagtggatatttagaacgcttggaggcctatggtgcaaaaacgaataacttcacacaaaaaatacacagaagcattctgagaaacttctttacgatgtctgcattcacctcacagatttgaatgtctcttttgattgagcagtttggaagcactctttcggtagaatctgcaagtggatatggagagagctttgaggcctgttgtggaaaactaaatgtcttcatataaaagctacacagaagcattctgag

SEQ ID NO: 880970 - DNA, 634 bp, Homo sapiens
aaaagatagggtcaactctgcgagttgaataarcacatcacaaataagtttctgggaacgcttctgtatagttttatgtgaatatatttccttttccaccatatgcctcaaagcactccaaatatccacttgcacattatagaaacatagtctttcaaaacttgtcaatcaaagaaaggttcaactccgtgagatgagtgcacacatcacagagaagtttctcggaatgtttctgtgtagtttttatgtgaagatattgccttttccacaataggcctcaaagcgttccaaatatccaattgcagattccacaaaaaaagttttttaaaactgctcaatcaaatgatagattaaactctgtgagattagtgcacacatgtcaaaaaagtttctcagaatgcttctgtgtactttttaggggaagatatttccttttccaccatcggccacaaaggactccaaataaccacatgcagattctagtaacacagagtttcaaaactgctctatcaaaagataagttcaactctgagagtttagtgcaaccatcgtgaagaagtttctcagaatgcttctgagtagtgtttatgtgaagatatttccttttccaccataggcctgaaagccctccaaa

SEQ ID NO: 880971 - DNA, 623 bp, Homo sapiens
caaaggtaagtttaacgctgtgagttaagaacatcacaaagaagtttctcagaatgcttctgtgtagttcttacgtaaagatatttccttttacacaataggcagaaaagtgctccaaatatccacttgaagattctacaraaaccgtgtttcaaaactgccgaatcaaaagaaaggttcaactctgtgagatgaatgcacacataacaaaggagtttctcagaatgcttctgtgtagctttaatatgaagacatttagttttccacaacaggcctcaaagctctctccatatccacttgcagattctaccgaaagagtgcttccaaactgctcaatcaaaagagacattcaaatctgtgaggtgaatgcagacatcgtaaagaagtttctcagaatgcttctgtgtattttttgtgtgaagttattcgtttttgcaccataggcctccaagcgttctaaatatccacttctagattctacaaaaagagagtttcaaaactactcaaacaaaaggttcaattctgtgagttgaaagcaaacatcacaaagaagtttctcagaatgcgtctgtgtagttttgatgtgaagatatttccttttcacagtagaatgcaaagggctc

SEQ ID NO: 880972 - DNA, 587 bp, Homo sapiens
ctcagaatgcttctgtgtagctttaatatgaagacatttagttttccacaacaggcctcaaagctctctccatatccacttgcagattctaccgaaagagtgcttccaaactgctcaatcaaaagagacattcaaatctgtgaggtgaatgcagacatcgtaaagaagtttctcagaatgcttctgtgtattttttgtgtgaagttattcgtttttgcaccataggcctccaagcgttctaaatatccacttctagattctacaaaaagagagtttcaaaactactcaaacaaaaggttcaattctgtgagttgaaagcaaacatcacaaagaagtttctcagaatgcgtctgtgtagttttkatgtgaagatatttccttttcacagtagaatgcaaagggctccaaatatccacttggagattctacaaaaagagtttcaaaaccgctctgtcaaatgataggttgaactcccggaggtgaatacacacatcacaaagaggtttctcagcatgcttctgtgtagtttttatgtaaacatatttccgtttctatcataggcctcaaagtgctccaaatattcactt

SEQ ID NO: 880973 - DNA, 669 bp, Homo sapiens
ttttcaacaataggcctcaaagtgcttcaaatgtccacttgcagattctacaaaaagagtgtttcaaaactgctcaatcaaaagaaaggttcgactctgggaaattaatgcacacatcacaaagaagtttctcagcttctgtgtagttttcatgtgaagttatttccttttccacaataggccgcaaagggctccaaatatcaacttacagattctaggaaaagagagtttcaaaactgctctacgaaaagataggttgaactctgtgagatgaatgcacacatcacaaagaagtttctcagaatgcatctgtgtagtttttacgggaagayatttccttttccaccatcttccacaaaggtctccaagtaaccacttgcagattctacagaaagacactttaaaaactgctctatcaaaagatcagttcaagtctgtggtttgaatgcacacatcacaaagaattttctcagaatgcttctgtgtagttttcatatgaagatatttccttttccaccataggcctcaaagcactccaaatatccacttgcagattctacaaaaagagattttcaaaactagtcaatcaaaagaaaggttcaactctgtcagttgaatgcacatatcacaaacaagtttctcggaatgcgtctgtgtagtttttatgtg

SEQ ID NO: 880974 - DNA, 618 bp, Homo sapiens
ctgtgtagttcttacgtaaagatatttccttttacacaataggcagaaaagtgctccaaatatccacttgaagattctacaraaaccgtgtttcaaaactgccgaatcaaaagaaaggttcaactctgtgagatgaatgcacacataacaaaggagtttctcagaatgcttctgtgtagcttttatatgaagacatttagttttccacaacaggcctcaaagctctctccatatccacttgcagattctaccgaaagagtgcttccaaactgctcaatcaaaagagacattcaaatctgtgaggtgaatgcagacatcgtaaagaagtttctcagaatgcttctgtgtatttttttgtgtgaagttattcgtttttgcaccataggcctccaagcgttctaaatatccacttctagattctacaaaaagagagtttcaaaactactcaaacaaaaggttcaattctgtgagttgaaagcaaacatcacaaagaagtttctcagaatgcgtctgtgtagtttttatgtgaagatatttccttttcacagtagaatgcaaagggctccaaatatccacttggagattctacaaaaagagtttcaaaaccgctctgtcaaa

SEQ ID NO: 880975 - DNA, 695 bp, Homo sapiens
ctaccgaaagagtgcttccaaactgctcaatcaaaagagacattcaaatctgtgaggtgaatgcagacatcgtaaagaagtttctcagaatgcttctgtgtatttttttgtgtgaagttattcgtttttgcaccataggcctccaagcgttctaaatatccacttctagattctacaaaaagagagtttcaaaactactcaaacaaaaggttcaattctgtgagttgaaagcaaacatcacaaagaagtttctcagaatgcgtctgtgtagtttttatgtgaagatatttccttttcacagtagaatgcaaagggctccaaatatccacttggagattctacaaaaagagtttcaaaaccgctctgtcaaatgataggttgaactcccggaggtgaatacacacatcacaaagmggtttctcagcatgcttctgtgtagtttttatgtaaacatatttccgtttctatcataggcctcaaagtgctccaaatattcacttgtacattctaccaaacgagtatttcaaaactgctcaatcaaatggaaggttcaaaaccgtgacatgaatgcccacatcacaaagtagtttctcagaatgcttctgtgtagtttttatgtgaagatatttccttttccacaacagcgtgcaaaacgcttcaaatatgcccttagagattccacaaaaagagtgttt

SEQ ID NO: 880976 - DNA, 623 bp, Homo sapiens
cacacacacacataaaatatttggcttaaaagtaatcagatttctttactgaaaaatttcaaagagatttaaaatgtcacgtaatgtgttatcaaagtatttatcgcacttttacttgctataacaatgtcctgtaagtacttaaactgataaaacataagagcaaaatagttactatttctacaaaaactaagttaactttctttgagaacaataaaattagatattttaaaaatacacatagaaagaccacgtgtaaagctgtgagaaaaaaatcaaacatttacaatgatttatatatatataytatatatataaatcacagtaaatgttcgatctactctcacactttacactggcaaccaggtcataaatataatctctaactttatgttctcagagggactctgcgctataaatatatatattttttttttttaaaagtaaagtcataaaaaagttatcaaagtccttcaaattttgccacgaggaataatgattggcaaccttaagtatacttcactcaggatgtcaagctatatatacacacacaatatatttatatatatatatatttatatactttatatgtatagatttttacgtgtttaatttatatatat

SEQ ID NO: 880977 - DNA, 623 bp, Homo sapiens
cacacacacacataaaatatttggcttaaaagtaatcagatttctttactgaaaaatttcaaagagatttaaaatgtcacgtaatgtgttatcaaagtatttatcgcacttttacttgctataacaatgtcctgtaagtacttaaactgataaaacataagagcaaaatagttactatttctacaaaaactaagttaactttctttgagaacaataaaattagatattttaaaaatacacatagaaagaccacgtgtaaagctgtgagaaaaaaatcaaacatttacaatgatttatatatatatactatatatataaatcacagtaaatgttcgatctactctcacactttacactggcaaccaggtcataaatataatctctaactttatgttctcagagggactctgcgctataaatatatatattwtttttttttaaaagtaaagtcataaaaaagttatcaaagtccttcaaattttgccacgaggaataatgattggcaaccttaagtatacttcactcaggatgtcaagctatatatacacacacaatatatttatatatatatatatttatatactttatatgtatagatttttacgtgtttaatttatatatat

SEQ ID NO: 880978 - DNA, 582 bp, Homo sapiens
ccataaagaggagttacagagagagataggggtagagagtttattcaaagggataataactgagaacttcccaaaccaagataaatatagcaatattcaaatacaaaagggttatagaacacctagcaaatttaatccaaataagactagctcaaggtatttaataatcttaagagtcaagtataaataatggatcctaaaagcagtaaaaggaaagaaacaaataacataccgtggagctcccatatatctggcagcagacttttaagtggaaaccccaggagagactggcataatatatttaaagtgctgaaggcaaacattttatgctagaacagtatatccagtgaaaatgcccttcaaacatgaatragaaataaagactttcccagacaaccaaaagctgaggggtttcaaaaatactagacctgcgctatcagaaaagccaaaggaagtaattcaatcagaatgcaaatgacattaatgagcaataagaaatcatttaaggtacaatcctcactggtaatagtaagtatgcagaaaaacacagaatatcataatactgtaactgtagtgtgtaaa

SEQ ID NO: 880979 - DNA, 666 bp, Homo sapiens
tgagaagttgttgcaaatacatagccttttttctacttttttaaagtattgagatattaggcatctctgtgccgagctgcaggacaaaaagaccctgtagcagtcaagccctgctattcgttgcacctgctctgcatgctcctcaatgatatcttcagatttgcctaacagccccattaatatctttatctctgatagcctgactcaccatatctttaataaaacccttgttcacagggtgaccacaatgcctctgctcattttaggtgcctaagtgttctagcctagtaattatcttcctcaaacggctccctttttaacctatgcttctagcagcggagtttctttgttgctatggattctggacagactattttgtcaatccttgaacccaataytctcttttgcaaacagttatatactaaagtcgatattttcttttacctcatttccttgttaatagacaaagacatatattgagaatatacttgtctggcatcctgctgagattagtccttggatttctgctgactttaatctttataaatgatctagagaaaggcagtgactgtgaactaactggaaatactaatcagccaaaattgctggggaggaaagaagtagaggaagctacaaacccaacacaggtggagtccaatatgccat

SEQ ID NO: 880980 - DNA, 617 bp, Homo sapiens
gcacttatattcttggtttccttccattgtcaaaagctgcaagggctggtagattctatttcacatcatatcattctgacactaactcttcagactccctctgttacttatatgaattcttgtgataatattgacctcactaaaaaaatcctggcraatctccctaccataaagtcagctaattagcaaccttaattccatctgctaccttactttccctttgacatgtaacataatctatttatagattccagggattcagtcatacacatctttgaggagccattattctgtctactacaactggtgggagagaatttagtctcagtttgtttcactgcaaagctgacagtcttcactatgctgtattacttattaaagagctcagcatgtaaagtttttcttccaggctgtgaatattttatcacactgttagaagtagagcatgaccagttatttacagtaagtttgaacaggaggaaagagtaaggaacttgacactataccagttaactggtgatggacattaagggcaacagaactgtaggtcttgaacacagaacatttatttcttctggattaatgtccaaaatgtcaggtaaaagcagaatgagatt

SEQ ID NO: 880981 - DNA, 676 bp, Homo sapiens
gggtagtatggacattttaacaacattgattcttctaatctatgaacatgaaatatatttccattacttggtgctttctttaatttctttcatcaatgttttatagtttttattatagagatcttttacttctgtggttaaattatttcctaggtatttaattttatgcatggctattgtaaatgggatcgctttttaatttctttttcatattgtttactgttagcatatagaaatactgctaatttttgtatgctgattttgtatcctgcaactttactgaatttgtttatcagttctaatmgttttttggtggagtgtacgtttttagaaatataaggtcaaattatctgcaaacaaggataatttcacttcttctttttgaatttggataccctttatttgtttctcttgtctgattgctgtagctgggactttcaatactatgctgaataacagtgggcatccttgtcgtattccagatcttagaggaatttccccattcagtgtgacactacctgttgatctgttatatatggcttttattattttgaggtatattcattttattcctaggtttttgagtttttttaaacaggaagagatgttgaattttatcaaatgctttttcagtatcaattgaggtaatcatatggtatttgtccttcattttgtt

SEQ ID NO: 880982 - DNA, 593 bp, Homo sapiens
ctattctaaaaaattgaggttaagggactccttcctcattccctgaagccagaatcttcctgatagcaaagcctggaagagacacaccaaaacaagaaaatttcaggccagtagctttgaagaacgtagatgtaaatatattcaacaaaatacaagaaaattacagaagcacttcaaaaagctagcccatcacaatcaagtaggctttatccctgagatgcaagattggtgcaataaatattattcaccatataaacagawctacaaacaaaaaccacctgatcatctcaatagatgcagaaaaggcttttgataaaatttaacattcctccatgttaaaaccctccaaaaacctaggcattgaagaaatatacttcaaaataataagagccatctatgaaaaacccattgccaacatcatattgagtgggtaaaagctggaagcattccttttgaaaaccagaacaagacaataatgtcctctctcatcactcctattaaaaataatattagaagtcttagctagagcaatcaggcaagagaaagaaataaaagacatccaaataggaagagagaaagtcaaacaatccctg

SEQ ID NO: 880983 - DNA, 653 bp, Homo sapiens
tgtggttcaaaaatttaacgtttatctgtacaccaaacccccatgacacaatttacctatatagtaaaccagcacatgtacctctgaacctaaaattaaagttaaaaaaaatacagtgttaacagatgtacactaaaaatctgtttcccactcctgttcctagtcactgtgtgtttccttgctcactgtgattaagtttctagtgtgtagttttgaaatgacaagaaatataaatgcatattcttatttccccctgtttacatgatggatagttctggcagaagccatagtgttcaccaatattcacactcttttctatctaataaagacttcgtgtgtggataaaactcttccttatgtgatcttttctcttttagctctcactctctggctgaatgtagaggactctgaaggcttaggcaagaggggagttataaggcaccacagaaccctgaatgactgcatggagcagaacccttcgcaaacctsctcttcaggcctcctttttgagacagctggaaaagattctttctccttttctagcaattacttcctccctccgactcaaatgcctactcagcctctagtattcagtgtaagtacgtgtatcactagaaatctagatctggggatttaacctcagaagctttctc

SEQ ID NO: 880984 - DNA, 615 bp, Homo sapiens
acaatgtccccctcagctcatagaccctccctccctgcatgtgtacccagaggtcaggccctgggggtttttttgagacatggcctttcctccaagacacagggagagacagttggcctcaggctccaggttcccagctccacactcacmccaaaggccctctgggcccgtctcaaaggagaaagtgaggtggcctgacactgcctggacacaccatctaccctattcctgagtgtcagagtgtgaggaagggagggacgtttggcagatgagacacactgtgctgttgggtctcccagggcccttcccatatagccccgatctaaagacacaacacagaggctacaggaagactaatccagaacctctgaggctcagccagggaccacatgaggactctctccagacagccagaaggccatttgctagtttcctggtacctcagtggatgtggcagcggttcttctgttggggaccagtgagtacacactggggagggctcacctgtgcttcctcattggctccacctctgcttctaaaaaaaattactcattccagatctggggcagagaaaatacaagatgagcttagaacatcttctgccagaaattaaaa

SEQ ID NO: 880985 - DNA, 624 bp, Homo sapiens
ttatggaaagattaaagatgagaatacatgcagtctatctacaggaaacctaaactgtttaggttaaggaaatgtttgagaaagtcatattaattagcaggttcacaggaaactaacatttattgtataaattgcatggtaaaatatattagggctccatgcacacaactatgtgccatctacgttaccacacggtgcttacttctttcagtctttattcatttctctcctaatggtctgtatggtattattacatagttctaaaaaccttccatgaggcagaaatttcatttaatcatatagcttcaaaaataatgaaaaacagtagaaaatttctatttttttatgaagcagaattgttgaattttcagtttcatttatttaatattacaagatgacaaacatatttctttaactccatctttttatttttgtctaacatcaaccacagccatttctttcatytgaagttgaaaactgctcatcaaaatccagtttaagctgagaaacaaagaactaaattttgcatgagagattatacactgcataagtaaaaaacaggaccagaaacaatggtggattagcaatttttaaaaagacaaaaacaggttatcatcaaatcaa

SEQ ID NO: 880986 - DNA, 556 bp, Homo sapiens
tgcccactaagttttaaattgtaagaactgagcaggagttagacaagctagagtaagagtgtcccagtcagtaggaatcatccgactggaaacagcaacattctttaacagtcccatttcaaaaggagaacctggtccatactgatttatagcttgtttaattttttgagtaatttaaaaggaaaaggctcaaatgtagctataatatttccctgttgatctgggggggtgtattcaaacagggaactgccaagcctctaaatcccacttttrtctagcttgctgaattcctgcctgaatagaactaagcagtcgctcaagtcaccagggcaactacttttcacccagtgtcctccagaaaagaaagatctggagggtcgttttcttcaaaataataatgagggggtgcagaagggtagggatgaacctctccctccttttctgctttagctttaggtggcaaataaacctggtctgtaacctctactgttactttgttatactctccttcctcctcattatcagtgtgaaaaagttccaaggtagaacgaaccac

SEQ ID NO: 880987 - DNA, 703 bp, Homo sapiens
cttgtatttaatttgttacacatgaatattgcatatgtaagataatatactaagaaattatcacatttaatgaaatgctttaatcaaattcctgattgaatttttgatatcaatatctttttcattgtttaatccatctttagggtgaacagggctttataggccaaagttatcacttctgtctaaattgtctgagttacagaactttttgaatttattatgttgtcacaggaagtttcttattgctgtttaaaggagtgtctctcaatatgaggcagaatgcaaacgcactgaagggcatataccttgagattctgttactgaagccaaaggttgccaatttcttgtagatcctgctagagttaaacttcatttaagtaatcattaaaagctgcatttattccctcacttgaaattttgatttcacactattaggactaatcctctaagtctttgctaagttatgttcctctttttcttgtagcttgactttgatgatctctatatgcaacttcaattgacataaattaaagtacattcagggcaagagagtttmcttaaatattattttgttattcaaaataatcacaaaagcactcatcgtaggaaaacttgtgaggactcaaatatagggaaatactttttctttctaaggcataattctgtaaaaaaattcaccttaatttgaatatacatgggaaaa

SEQ ID NO: 880988 - DNA, 625 bp, Homo sapiens
gcaaggaagctaagagtctgaaaaataaaggttagacgaattgttaactagaataaccagtttagagaagaatataaatgacctgatggagctgaaaaacccagcacaagaacttcatgaagcatacacaagtatcaatagttgaytcaatcaatcaggagaaaggatatcagagattaaagatcaactcaatgaaataaagaaagaaggcaagattagagaaaaaagagtgaaaagaaatgaacaaagcctccaagaaatagaggactatgttaaaatactgaatctacgtttgattggtgtacctaaaagtgacagaaagaatggaaccaagttggaaaaaactcttaaggatattatccaggagaacttccccaacataacaagacaggccaacattcaaattcaggaaatacagagaacaccactaagatactcctcaagaagagcaaccccaagaaacaaaatcatcagattcaccaaggttgaaatgaaggaaaaaatattaagggcatccagagagaaaggttgagttacccacaaagggaagcccgtcagactaacagtggatctcttggcagaaaacctacaagacagaagagagtgggggccaatacacaacatt

SEQ ID NO: 880989 - DNA, 625 bp, Homo sapiens
gcaaggaagctaagagtctgaaaaataaaggttagacgaattgttaactagaataaccagtttagagaagaatataaatgacctgatggagctgaaaaacccagcacaagaacttcatgaagcatacacaagtatcaatagttgattcaatcaatcaggagaaaggatatcagagattaaagatcaactcaatgaaataaagaaagaaggcaagattagagaaaaaagagtgaaaagaaatgaacaaagcctccaagaaatagaggactatgttaaaakactgaatctacgtttgattggtgtacctaaaagtgacagaaagaatggaaccaagttggaaaaaactcttaaggatattatccaggagaacttccccaacataacaagacaggccaacattcaaattcaggaaatacagagaacaccactaagatactcctcaagaagagcaaccccaagaaacaaaatcatcagattcaccaaggttgaaatgaaggaaaaaatattaagggcatccagagagaaaggttgagttacccacaaagggaagcccgtcagactaacagtggatctcttggcagaaaacctacaagacagaagagagtgggggccaatacacaacatt

SEQ ID NO: 880990 - DNA, 625 bp, Homo sapiens
gcaaggaagctaagagtctgaaaaataaaggttagacgaattgttaactagaataaccagtttagagaagaatataaatgacctgatggagctgaaaaacccagcacaagaacttcatgaagcatacacaagtatcaatagttgattcaatcaatcaggagaaaggatatcagagattaaagatcaactcaatgaaataaagaaagaaggcaagattagagaaaaaagagtgaaaagaaatgaacaaagcctccaagaaatagaggactatgttaaaatactgaatctacgtttgattggtgtacctraaagtgacagaaagaatggaaccaagttggaaaaaactcttaaggatattatccaggagaacttccccaacataacaagacaggccaacattcaaattcaggaaatacagagaacaccactaagatactcctcaagaagagcaaccccaagaaacaaaatcatcagattcaccaaggttgaaatgaaggaaaaaatattaagggcatccagagagaaaggttgagttacccacaaagggaagcccgtcagactaacagtggatctcttggcagaaaacctacaagacagaagagagtgggggccaatacacaacatt

SEQ ID NO: 880991 - DNA, 583 bp, Homo sapiens
ggctgaggcaaaagaaatgcttgaaccctgaactgggaggcagaagttgctgtgaattgagattgtgccactgcactcgagcctggtgacagaggaagatgctgtctcaaaaaaaaaaaaaaaagaaaaagaaatggcatcttcaagaaccacaagagagtaccgcgctgaagaagctctgattctgcatttgctgaactactgatttgagttagccaatataacaytatcttagataaagtgtacaaacaactcaatttcatctcctcactaataactgattagtctaatatcaattctgatttttaaaaagctaattagaaaaagaattaattatagaaccaataagaggtttgaatagttacaagctattcaaaggagaattcaaaaaaccactcaggtatgaggccataaagtatgatgaaataaatttcattaatatattttaaaataaactgattagacaggcaacaacacctgggcacgggtctcctcacctccagcaacacaaacccaatcgctcagctatggggttgaaaaggctgcatagtgacaaacagactgctctgagctgagatttctt

SEQ ID NO: 880992 - DNA, 531 bp, Homo sapiens
aaggctggtcttcactgtccatccttctgtcagccttttactcacaactatttaataagtctctgcaatggtgcaaaatttccctcatcttcctgtcttcttccaagctctccaaactctctaacctctggccactacccaatttggaacctgcgtctacactgtcagctatctttgctgcagcctggtaatgtggtaaaagaagraaagtccattatcaggggaaacatcaagatggcctccaatatttgcattgaaagaagctcagcgctaatagccaagagaatgggggaaacacctagaagtcatttcataacttcacttcacagcattaattttctgtatctacataaagaaaagaggtctaattgactcacagttcttcacgctgtaaagaaagcatagtggtttctgcttgtagggggactcaggaagcctcccaattataccagaaggccaagcagcaatgaaatgtttcatatggcaggagtagaagcaagacagagagaggaaagaagtgcaatatccagt

SEQ ID NO: 880993 - DNA, 488 bp, Homo sapiens
tacaagccagaagagagtgggggccaacattcaacattcttaaagaaaagaattttcaacccagaatttcatatcccgccaaactaagcatcataagtgaaggagaaataaaatcctttacagacaggtaaatgctgagggattttgtcaccaccaggcctgccttacaagacctcctgaaggaagcactaaatatggcaaggaaaaaccagtaccagtcactgcaaaaataataataataataataaaatgtaaagaccatcaacactatgaaraaactacatcaactaatgggcaaaataaccagctagcatcataatgacaggatcaaattcacacctaacaatagtaaccttaaatgtaaatgagctaaatgccccaattaaaatgcacagactggcaaactggataaagagtcaagacccattggtgtgctgtattcaggagacgcatctcatgtgcaaagacacacataggctcaaaataaa

SEQ ID NO: 880994 - DNA, 635 bp, Homo sapiens
ttgaaaacacaagcaaacctatctaatgcaaaaatggcaacttacaggctcgtgtaattgcaaagacctggggcagaactagcttaggtgcaacttgaagtaggagaaaaaacaggacctggatcctgtctatcacagttcttaggagtagttccttgatgttagttcccctgtcattcacatacatgttaaaacggccacatctttatgtagtcagtcactgcatatcttcctaattccaggaccaacaccaaaatttattgttcttccttgtgtcttaagcaaaagtcctaatcatgattaaattgttaggttacatgcttgctgttgaaccaattactatggctgtgggtgatgaaatatgctgattgcctaaggaccagtcacattcctactcctgacatcttagatagtgacagtttgattcaaagcaaattgactaacatgggagaggaatgagtcttccaaagcmaaatcaaggcaattttattgtagtaccagaaagcagatgatgatccagaaaacactgtaagctttgtaggggcagggttcatatctcttgttcctcataatatccctagtgtctaacataacacccagacgaaagaaaattcctgaaatcgctgaatgaataa

SEQ ID NO: 880995 - DNA, 597 bp, Homo sapiens
cagacggcacctagaaaatcgggtcactcccacccaaatactgcacttttccaatgggcttaaaatatggtgcaccaggagattatatcctgcacaagtcttggagggtcctgctcacacagagtgtcactgattgctagcacagcagcctgagatcaaactgcaaggcagcagcgaggctggatagggctcccaccattgcccaggcttgcttaggaaaacaaagccgatgggaagctcgaactgggtggagcccaccacagctcaaggaggcctgcctccctctgtaggctccacatctggggacagggcacagaacaacaaaaagacagcagtaatctctgcagacttaaatgtccctgtctgacagctttgaagagarcattggttctcccagcacacagctggagatctgagaactggcagacagcctcctcaagtgggtccctgacccctgacccccgagcagcctaactgggagacacccgcaagcaggggaagactgacacctcacacggctgggtactccaacagacctgcagctgagggtcctttctgttagaagggaaactatcaaacagagaggacatccacacc

SEQ ID NO: 880996 - DNA, 609 bp, Homo sapiens
gaatctgtaagtggatattttgaacgatttgaggcctatggttgaaacgggatattttcacataaaaactagacagaagcattctcagaaactgctttgtgatgtgtgcattcaactaacagtgttgaacctcttttttgatagagcagttttgaaacttttctttcrtaggatctgctggtggatatttggatatttttgaggacttcgatggaaacgggaatatgttaacataaaaactagacagaagcattctcagaagctgctttgtgatgtgtgcattaaactcacagagttgaacctttcttttgatagggcagttttgaaacagtctttttgcagaatgtgcaattggatatttggagcaatttgaggtctattgtgtaaaaggaaatatcatcacataaaaacttgacagaagcattctcagaaattactttatgatgtatgcattcaaatgacagtgttgaacttttctttctatagagcagttctgaaacactccttttgtagaatctgcttgtggatttttgaaggtatttgtggtcttcatttgaaactttatatcttcaaataaaacctagacagaatcattctcagaaactgctt

SEQ ID NO: 880997 - DNA, 565 bp, Homo sapiens
ttgaggccttctttggaaaagggaatatcttcacataaaaactagacagaagcattctcagatactgctttgtgaagtggacattcaactcacacagttgaacctttctttttatagagcagttttgaaacactccttttgtagaatctgcttgtcgatatttggagctgtttgaagctttcgtttgmaacagggtaccttcaatccaaaactagagagaggtattctcagaaaccgctttgtgatgtgtgcattcaactcacagatttaaacctttcttttgatagagcagttgtgaaacacactttttgtagaatctgaaaatgttcattgggagcgctttggggactatggtggaaaaggaaacatcttcacataaaaactagacagaaatattgtcagaaacttctttgtgatttgtgaattcaactcacagagttgaactttccttttgagagagcagttttgaaaaagtctatttgtaggatctgcaagtggatatttggagtaatttgaggcttatggtggaaagggaagtatcttcacattaaaactagacagaaac

SEQ ID NO: 880998 - DNA, 536 bp, Homo sapiens
gtgaaacacactttttgtagaatctgaaaatgttcattgggagcgctttggggactatggtggaaaaggaaayatcttcacataaaaactagacagaaatattgtcagaaacttctttgtgatttgtgaattcaactcacagagttgaactttccttttgagagagcagttttgaaaaagtctatttgtaggatctgcaagtggatatttggagtaatttgaggcttatggtggaaagggaagtatcttcacattaaaactagacagaaacattctcaggaacttctttgtgatatgtgcattcaactaacagacttgaacctttcttttgatagagaagttttgaaaccctgcttttcaagaatctgctggtggatatttgggtattttggaggccttcattgaaaacagaaatatcgtctcataaaaatagatagaagcattctcagaaactgctttgtgaggtgtgcattaaactcactgagttgaacctttcttttgatagagcagttgtgaaacaccctttttgtaggatc

SEQ ID NO: 880999 - DNA, 595 bp, Homo sapiens
gttgaaaaggaaataagttcacatagaaactagacagaagcattctgagaaacttctttgtgatgtatgcattcaactcacagatttgaacgttccttttgacagagcagttttgaaacactctttttgtagaatctgcaagtgttcatttgaagcgctttgaggcctatggtggaaaaggaaatattttcccataaaaactagataggaatattttcagaaacttctttgcratgtgtgcattcaacccacagagttgaaccttccttttgagagagcagttttgaaaccgtctttttgtagaatctgcaagaggatatttggagcaatttgaggcctatgttggaaaacgaaatatcttcacataaaaagtagaccagaatcattctcaggaacttctttttgatgtgagcattcacctcacagagttgaaccttcctttgagagagcagtttcgaaatagtctttttgtagaatctgcaagtggaaatttgagcaatttgaagcctatggtggagaaggaaatatcttcacataaaaactagacagaagcattctcagaaactttgtgatatgtgcattcaaccaacagagc

SEQ ID NO: 881000 - DNA, 583 bp, Homo sapiens
tgtaaagctttgaggtctatggtggaaaaggaagtatctccacgttaaaactagacagaagcattctcagaaacttcttcgtgatgtgtgcattcaactcacagtgttgaacgttccttttgttagagaagttttgaaacactgttttcttagaatctgcaagtggatatttggagagctttgaggccttcgttggaaacggaaatatcttcacatgaaaactagacagaggcattctctgaaacttctttgggatgtgtgcattcatctcacagagttgaatcttcctttttgatagagcagttttgaaacactctttttgtagaatctgcaagggacattttgagagctttgagagctayggtggaaaaggaaatatcttcacataaaaaaagacagaagcattctcagaaacttctttgtgatgtttgtattcaactcacaaagttgaactttccttttcatagagcagttttgaaacactttttgtagaatctgcaagtggatatttggaacactttgaggcattcgttggtaaccggaatatcttcacataaaaactggacagaagctttcttagaaa

SEQ ID NO: 881001 - DNA, 495 bp, Homo sapiens
atttccacttctagatcctacaaaaagactgtttcaaaactgctctgtcaaaagcaacgttcaactctttgagttttagagacacatcagaaagaagttcctgagaatgcttctgtttagtttttatgtaaaaatatttccttttccaccttaggcctctaagtgcactaactgaacacttgcagcatatacaaaaagagtktttcaaaactgcttcatcaaaagaaaagttcaactctgtgagttgaatgcactcatcacaaagcagtttctgagaatgcttctgactagtttttatctgaagttattcccgtatccaacgaagtcctcaaatatctccaaatatccactagcagattctacaaaaggagtgtttcagaactgctctatcaaaacgaagattcaactctgtgagttgaatgcgcacatcacaaagaggtttctgagaaagcttaggtctagtttttatgtgaagatatttcctttaccaccata

SEQ ID NO: 881002 - DNA, 570 bp, Homo sapiens
tccttttctgcttggtttgtccaaacaggcatgcagatatagacagggtattgaaaacaaagtgtcatggaaaccagactcactgacagtcagccaagtgcttctctttaaatcattcctttgaaacaaagttgaaaattatgaacttttttaagtcctgacattgtcctcctcaaaacaacccacttatgtcattccaagggttttgtctactgtcacgtacagacagcctacatcctctctgtggcctgattgctcagattgtcgtcaaaattcactcaattcagtattttttaatatacctgtcctaaaattgtgaagctactctccacaagtttagtattgaaaaaytgaaattaggttacctgctttgtgctgaccataaaaggtataattttttaaaatatgagcatagattttaatggattacataatagaaaaaaacttaaagacaatctggtaaatttatttatgttagcgatgacagaaatattacagattcaagattttttttcagtcatcactgtagcattttattggcttgtgaaggcatgtagattgtgccaagct

SEQ ID NO: 881003 - DNA, 705 bp, Homo sapiens
actagaaagaaggtatcagtgaaatggttttttgaggtgtggattcttttcacagagataaacctttctttctgttcagcatattggaaacacttattttggagaacatacaaggatacatttggaagccctttgaggtctatggggcsaaatccaaaatccccagataaaaagtagaaaaaagctatctgcaaaacagctttgtgaagtgtggattcttctcacagagttaaacgagtcttttgattcagcactttgaaaacctctttttggagaatcaggtaaggggcatttgggagcccattgaggcctacggggaaaaaacaaatttttcctgataaaaactagaaacaaactatctgtgaaactgctctgtgaagtgtggattcatttcacagagttaaacctttctttcaattcagtaggttggaaaagctatttttcgagcagctgaaaagggccatttgggagcccagtgatttctacggggcaaaaccaaatatttcaaataaaaaactagaaagaagctatctttgaaactgatttgtaatgtgtgcattcgtcatacagagttaaaactttcttttgattcaaaaaaattggaaacactctttttggagaatctgcaaagagacattttggagcccattgtgttctatgggggaaaaccaaatatccccagaaaaaaaaaaaaacctagaaaga

SEQ ID NO: 881004 - DNA, 705 bp, Homo sapiens
actagaaagaaggtatcagtgaaatggttttttgaggtgtggattcttttcacagagataaacctttctttctgttcagcatattggaaacacttattttggagaacatacaaggatacatttggaagccctttgaggtctatggggcgaaatccaaaatccccagataaaaagtagaaaaaagctatctgcaaaacagctttgtgaagtgtggattcttctcacagagttaaacgagtcttttgattcagcactttgaaaacctctttttggagaatcaggtaaggggcatttgggagcccattgaggcckacggggaaaaaacaaatttttcctgataaaaactagaaacaaactatctgtgaaactgctctgtgaagtgtggattcatttcacagagttaaacctttctttcaattcagtaggttggaaaagctatttttcgagcagctgaaaagggccatttgggagcccagtgatttctacggggcaaaaccaaatatttcaaataaaaaactagaaagaagctatctttgaaactgatttgtaatgtgtgcattcgtcatacagagttaaaactttcttttgattcaaaaaaattggaaacactctttttggagaatctgcaaagagacattttggagcccattgtgttctatgggggaaaaccaaatatccccagaaaaaaaaaaaaacctagaaaga

SEQ ID NO: 881005 - DNA, 617 bp, Homo sapiens
ttgtagaatctacaaacggatatttcagagagcattgaggcctgtggtgaaaaattaaaattctacagataaaaactagaaagaagctttctgagaaactgctttgtgacatgttcattcgtctcacagtcttaaaactttatttggattcagcagtttggaaacactacttttttgcattccatgaatggacattttggagstattgaggccaatggtgaaaaagcaaatatcccagcataaaaattagatggaagctatccgagaaattgttatgtgttgtctgcattcatctaggagttctaaacctttttttcatttgacagtttggaaacattgtttttgtaggatctacaaaggcatattttggagagcattgaggcctatggtgaaaaaggaaacattttcagataaaaagtagaaagaagctttctgagaaactactttgtgttgtgtgcattcatcacacagagttaaacctttctttggattcagtagtttggaaagagtgtttttgtccattctgtgagtggacgtttgggagctcattgaggccaatagtgaaaaagagaatatcccaggatcaaaactagatggaagctacctgagaaactgtt

SEQ ID NO: 881006 - DNA, 618 bp, Homo sapiens
gtctagtttttatacgaagatatttccttttctaccattggcctcaaagcgcctgaaatctccacttgcaatttccaaaaaaagagtgtttcaaatcttctctgtctaaaggaaggttcaactctgtgagttgaatacacacaacgcaaagaagttactgagaattcgtctgtctaccactatatgaagaaatcccgttccaacgaaggtctcaaagaggtccaaatatccacttgcagattctgcaaagagtatttcaaaaccgctctatcaaaaggaatgttgaactctgtgagttgaatgcaaacatcacaacttagtttctgagaaygcttctgtctagtatttatgtaagatatttccttttctaccataggcctcaaagccctctaaatacaccctggcaaattctacaaagagagtgttccataagtgctctaatgaaagaaaggtgaaactctgtgagttgaatgcagagatcgcaacgtgctttctgagaaaggttctgtctagtttttacatgaagatattaagttgtctaccgtaggcttcaaagcactctaagtatgcacttggaagttctacaaaaagagtgtctgagaactgctctttggaaag

SEQ ID NO: 881007 - DNA, 593 bp, Homo sapiens
cagagttgaacctttctttagattcaggaatttggaaacactctttttgtagaatctgaaaatgggtatttcaaagagcattgaggcctatggtgaaaaagaatatatctgcagataaaaattagaaagaagttttctgagaaatggctttgtgttgtgtgcattcatctcacagacttaaacatttctttggattcagtagtatggcaacacattttttgtccattctgcgaattgacatttgggagctcattgagaccaatggggaaaaagtgaatatccyaggataaaaagtagttggaagctatctgagaaactgctatgggatgtgtgcattcatctaacagagttatttgtctctttaattcagcagtttggaaacactgtttttgtagaaactgcaaagggaaaatttggagagcattgtggcctatggtgaaaaaggaaacatctatcaatagaaactagaaagaagctttctgggaaactgctttgttatgtgtgcaatcatctcactagtttaaccttcctttggattcagcagtttggaaacactgcttttgtccattctgagaatagacatttgggagcac

SEQ ID NO: 881008 - DNA, 628 bp, Homo sapiens
agaataaaatgtaggcagaagctatctgagaaaatgctatgtgatgtgtgcattcatctaacagagttaaacctttcttttccttcagcgtctggaaacactgtttttgtagaatctgcaaagggatatttaggagagaattgaggcctatggtgaaaaaggaaatatcttcagataaaaactagaaagaagttttctgagaaattgctttgtgatgtttgcattcatctcacagacttaaacatttctttggattcagtattatggaaacactgtttttgtccattctgtgatggacattttggaactcattgaagccaatggggaaaaagggaatatccctagataaaaagtagacagaagctacctgagaaactgctttgtgatgtgtgcrttcatctaacagagttaaactttcttttcattcagcagtttggaaacactgtttttgtagaatctgcaaagggatatttctgagagcattgaggactatggtgaaaaaggaattattgtcagaaaaaaactagaaagctttctaacaaactactttgtagtgtatgcattcatctcacagacttaaagcattcttttgattcagtagtttgtaaacactatttttgtccattct

SEQ ID NO: 881009 - DNA, 645 bp, Homo sapiens
tgtctagtttttgtgtgaagatatttctttttcacaataggccaaaaaaggttcaaaaataccccttggctgatcttagaagaatagagttttcaaactactcaataataagtaacgtttacctctgtaagatgaatgcacccatcacaaagcagattctcagaaaacttctttgtcgtttttatgtgaaaatgtttccttttctaccataggcctccacaygctactaaataaccatttgcagattctacaaaaggacagttgccaaactgctcattcaaaagaatggttcaactccgtgagatgaatggacacatcacaaagactattcccagaaagcttttgtctagtttttatgtgatgatattttctttttcaccatagaccttaaagtgctcgctcacaaatatccctttgcagagtctacaaagagactttttgcagactgcttaatcaaaagaaaggttctagtctgtgagatgaatgcacacattacaaagaagttttcagaaatcttctgtctagtttttatgtgaagataattccattttcaccataggcctcaaagtgctcacaaatatttctttcatgattccagaagaacagtgtccaaattcctaaatgaaaagaatattttacctctgt

SEQ ID NO: 881010 - DNA, 645 bp, Homo sapiens
tgtctagtttttgtgtgaagatatttctttttcacaataggccaaaaaaggttcaaaaataccccttggctgatcttagaagaatagagttttcaaactactcaataataagtaacgtttacctctgtaagatgaatgcacccatcacaaagcagattctcagaaaacttctttgtcgtttttatgtgaaaatgtttccttttctaccataggcctccacatgctactaaatarccatttgcagattctacaaaaggacagttgccaaactgctcattcaaaagaatggttcaactccgtgagatgaatggacacatcacaaagactattcccagaaagcttttgtctagtttttatgtgatgatattttctttttcaccatagaccttaaagtgctcgctcacaaatatccctttgcagagtctacaaagagactttttgcagactgcttaatcaaaagaaaggttctagtctgtgagatgaatgcacacattacaaagaagttttcagaaatcttctgtctagtttttatgtgaagataattccattttcaccataggcctcaaagtgctcacaaatatttctttcatgattccagaagaacagtgtccaaattcctaaatgaaaagaatattttacctctgt

SEQ ID NO: 881011 - DNA, 645 bp, Homo sapiens
tgtctagtttttgtgtgaagatatttctttttcacaataggccaaaaaaggttcaaaaataccccttggctgatcttagaagaatagagttttcaaactactcaataataagtaacgtttacctctgtaagatgaatgcacccatcacaaagcagattctcagaaaacttctttgtcgtttttatgtgaaaatgtttccttttctaccataggcctccacatgctactaaataaccatttgcagattctacaaaaggacagttgccaaactgctcattcaaaagaatggttcaactccgtgagatgaatggacacatcacaaagactattcccagaaagcttttgtctagtttttatgtgatgatattttctttttcaccatagrccttaaagtgctcgctcacaaatatccctttgcagagtctacaaagagactttttgcagactgcttaatcaaaagaaaggttctagtctgtgagatgaatgcacacattacaaagaagttttcagaaatcttctgtctagtttttatgtgaagataattccattttcaccataggcctcaaagtgctcacaaatatttctttcatgattccagaagaacagtgtccaaattcctaaatgaaaagaatattttacctctgt

SEQ ID NO: 881012 - DNA, 577 bp, Homo sapiens
tgaggccaatcttagaaatggaaatatcttcgaattaaaacaacacagaatcgttcgcagaaactagtttgtgatgtgtgcgttcaactcacagtgtttaacgtttcttttcatagagcagtttggaaacgctctctttgtaaagtctccmagtggatatttggagctctttgagcccttcgttggaaacgggacttcttcatataatgctagacagaagaatactcagtaacttctttgtgctgtgtgtattcaactcacagagttgaacttttctttagacagagcagatttgatactctcttttcgtggcttttgccagaggagatttcaagtcattggaggccaatggtagaaaagaaaatatcttcgtataataacgaaacagaatcattctcagaaacttctttgtgatgtgtgcgttcaactcacagagtttaacctttcttttcatagagcaggttggaagcactctctttgtaaagtctgcaagcagatatttggacctttttgaggccttcgttggaaacgggatttcttcatatactgctagaccaaagaattctcagtaacttct

SEQ ID NO: 881013 - DNA, 577 bp, Homo sapiens
tgaggccaatcttagaaatggaaatatcttcgaattaaaacaacacagaatcgttcgcagaaactagtttgtgatgtgtgcgttcaactcacagtgtttaacgtttcttttcatagagcagtttggaaacgctctctttgtaaagtctccaagtggatatttggagctctttgagcccttcgttggaaacgggacttcttcatataatgctagacagaagaatactcagtaacttctttgtgctgtgtgtattcaactcacagagttraacttttctttagacagagcagatttgatactctcttttcgtggcttttgccagaggagatttcaagtcattggaggccaatggtagaaaagaaaatatcttcgtataataacgaaacagaatcattctcagaaacttctttgtgatgtgtgcgttcaactcacagagtttaacctttcttttcatagagcaggttggaagcactctctttgtaaagtctgcaagcagatatttggacctttttgaggccttcgttggaaacgggatttcttcatatactgctagaccaaagaattctcagtaacttct

SEQ ID NO: 881014 - DNA, 511 bp, Homo sapiens
tctttgtaaagtctgcaagtggatattaggacctctttgaggccttcgttggaaacgggatttcctcctataatgctagacagaagaattcccagtcacttctttgtgttgtgtgcattcaactcagagatttgaaccttcctttagagagagcacatttgaaacactctttttgtgtaatttgctagtgcagatttcaagctcttcgaggacaatggtaggaaaggaaatatctttgtattaaaactagacaaaatcattctcagaaactactttgtgatgtgtgcgttccactcacagactttaacctttcttttaattgagyagtttggaaacactctctttgtaaagtctgcagtaggatatttggacctctttgaggccttcgttggaaacgggatttcttcatataatgctagatagaagaattctcagtaacttgtttgtgttgtgtgtattcaactaacagagttgaaccttcctttagaaagagcagttttcaaacactctg

SEQ ID NO: 881015 - DNA, 629 bp, Homo sapiens
tctttactcaaacttttttgttcctttatggacggtgccctgtgttgagtttgccagttttgtctatgtggtgttagacttttctgtctagagtggggactgagaaaggaccctgatgcttggcatataattatgtactgggaaaacatggcctaatattgcccaatccacatgctctgggactatggtctctagttttttccagtagaaggattcattttgacatcaaaattatatagaactcctacatgaaaatagttctgtttgattacgattggttgagaaaatacataaatgcatatagactcacagaataccagcttcacggaacccaacttactactaaaagttcaaagtccatagtttargaaccatttgctttagggaatgctttagggaatataggaatattgcctataatgtccataaattcttagccatctttcaaatgcaacaaagctgcagcttagcagaattgctaccactgagaagcaaattagtgtgtgaagtcagttcagtgaagggctgaggtatttgattaaatgaccacatgaaaaatggagatgtagaaaaaagtgtgaaagaaaagagaaacgattctgtaagtacaaaggcagcaataacactgg

SEQ ID NO: 881016 - DNA, 629 bp, Homo sapiens
tctttactcaaacttttttgttcctttatggacggtgccctgtgttgagtttgccagttttgtctatgtggtgttagacttttctgtctagagtggggactgagaaaggaccctgatgcttggcatataattatgtactgggaaaacatggcctaatattgcccaatccacatgctctgggactatggtctctagttttttccagtagaaggattcattttgacatcaaaattatatagaactcctacatgaaaatagttctgtttgattacgattggttgagaaaatacataaatgcatatagactcacagaataccagcttcacggaacccaacttactactaaaagttcaaagtccatagtttaggaaccatttgctttarggaatgctttagggaatataggaatattgcctataatgtccataaattcttagccatctttcaaatgcaacaaagctgcagcttagcagaattgctaccactgagaagcaaattagtgtgtgaagtcagttcagtgaagggctgaggtatttgattaaatgaccacatgaaaaatggagatgtagaaaaaagtgtgaaagaaaagagaaacgattctgtaagtacaaaggcagcaataacactgg

SEQ ID NO: 881017 - DNA, 643 bp, Homo sapiens; identical to SEQ ID NO: 873262

SEQ ID NO: 881018 - DNA, 565 bp, Homo sapiens
tgtttcagcttttgtgtgtgatagtactcctctagcctttgtgctgggaggtcattgttgacttagtgcttgtctctttcttttctctctctgtcttttttttttcttttttttttttgagatggagtcttgctgtcacccaggctggagtgcagtggcatgatctcagatcactgcaatctttgcctcctgggttcaagggattctcgtacctcagcctcccgaatagctgggattataggcactgaccaccatgcccrgctaatttgtgtatttttagtagagacggggtttctccatgttggccaggctggtcttgagcccatgacctcaagcgatctgcccaccttgcccttctaaagtgctgggattacaggtgtgagccaccgtgcccggccctgaactccttatttcacaaggctcaaggtttctgcatcccagcagacatccagttgcccgggagatgtcgatttctcctagtggcaagtacctccctctctatgtgtgttttctttctcttaaatccagctcccccgcctatggtataaggtatggggaatttatc

SEQ ID NO: 881019 - DNA, 543 bp, Homo sapiens; identical to SEQ ID NO: 875661

SEQ ID NO: 881020 - DNA, 432 bp, Homo sapiens
agtattctaaaaattaatggtaaggctatgctgacatagaaatgatggagggctaatagattcaaattagttagactgcagtcacagtagcacaccactttaccctctgtttgcttctgaatttggatatatacaaatggaatttttagtggtgattggcaaaaaaatttaatggtttaaagcaacaatgtctttttttttttcttgacagagtctcactctgttgcccargctggagtgcagtggcgtgatctggctcactgcaacctccacctcccgggttcaagcgattctcctgcctcagcctcccgagcagctgggattacaggggcccaccaccatgcccggcaaatttttgtagttttaatagagacagagtttcaccatgttggccaggttggtctcgaactcctggcctcaggtgatccaaag

SEQ ID NO: 881021 - DNA, 687 bp, Homo sapiens
gtcaaatgaattaaatgtagagaatggttctttattctgaggttagtcctccctagtttcttcttattaaaatgtgatagtaatagtagatggcaattattttaaaatgttttgtgtattttttttttttcttggcacattttggaaaagactgtactaatgcaatcaaactcctaaactgatttatctatcaatttattargactcttatttgccagtggccaaaactgtttctgagaatatagctgcttgaagttttggactcattcatctgacatatattcttaagtgcttattttgtgcccatcactgtcttgcaataaataagactaagaatgtttttgttctcatgaaacccaaattgtagtaatccacattttttcaacttgatcaccaagaggtaaaaaaatctccacagctgcagtgagagtcattttcagggaaggattccaattggctcagcctgaactatgtgccttcccacccttgaaccaatccctttcccatcctgggtcacatgctcagccctgggggtccacatgacaggcctattgctaaaaggaggtgagagaaactgcatagacaaaaacagaagatgttgatgaccattactaaaggtcatcacaaaagtgtgtttttgtgcactacaagtgcatagcattcagttttggattttccctgttagtc

SEQ ID NO: 881022 - DNA, 538 bp, Homo sapiens
aagtggacagctgcagcactacagcccctttctaggacatccctgaaggagagcagtgaagggaaatgttcccagtgggcagaacttcgagcagtgcactttacatgaaatgagaaatggtcaggtgtgcgattatatactgattcatgggctgtagccaatgacttggctggatggtcagggacttggaagaagaatgattggaaaattggtgacaaagaaatttgaggaagaagtaygtagatggacctctccgagtggtcaaaaactgtgaagatatttgtgtcccctgtgagtgctcaccaacaggtgacctcagtggaggaggagtttaataatcaagtggataggatgacccattctgtggacactactcagcctctttccccagccacccctgtcatcgcccaatagacccatgaacaaagtggccatggtggcagggatggaggttatacacgggctcagcaagatggacttccactcaccaagactgacccggctatggccactgctgagtgcccaatttgccaacaga

SEQ ID NO: 881023 - DNA, 659 bp, Homo sapiens
gcaaaggacttaggatcttcaagaacctgaattttagtagagtaagatctcacagtacttgaaatatggaaagactgaggaaaaagactaaacagcgaggatccaccaagggcaggaattaggaggtgctgattagtaacgcrgatttccctgaagatgacgtcagcttacatactgctgagaaaattgattccaaaactttatctttcttacctgttttcccaagtcaactttttgctgtcattgctattaaagggggactttctcctgccccctgccgtgatggcatctttctctttctacctggagttttcccctgcccaagccctgaattgccttcctccatttcttccagagccattgagtgtcatcctatttcaccctccaaatggacatgtccacatcttttactgtgcacaaaagacagaagaccctcctgctatcgtaaaacactccctcaacgctttccttttctgtaatctaatgtggtagggcttctgggccacttcagtgagtcgctggcattgtttcctacatagcccagggggctttctttgttttacttctctcctttcctgctccaaccctctctttgcagtatatgctctccaaagctagcttttgacaccttgaagacaccaagagggtgcttgctgctc

SEQ ID NO: 881024 - DNA, 620 bp, Homo sapiens
ggatgtgggaattagttagagaccctcctcagaggggcagcctgatgatatggaaaggcttataggacgctgggttcaatcctggcactcccactgtcttgctgtatgcccttgagtgggtactcaatgcctctctctaggtgtgggtttgctcatctgtaaaatgaggaggccagttttgactgtgaacccagccctcttccccacttcccctctcccattgcagatgggatgggtagaaggggcaggggctcctgccttttcctactgagcaamtaatttgtgtttctcctctggtcaaggatgtgggaactgggagggagcagggcagtgtgggatggtggaggagaagaagttgctgatgagagtgggaggctggctgccactaagcccttccctactggaaactccttccctgtcccctcccccagacaacctcaggaaagggtctaggtgtttccacagtggtctaggaagggctagaccaatgtggagtggacgacatgcctggtgtctccctctggagagtgcactctggatactaatctgagtctccaaaaaggagaaagggttagggatcatttggtctcaccttccctcctgcttttacagaaagggaa

SEQ ID NO: 881025 - DNA, 599 bp, Homo sapiens
caatctattcttctaggtagtaaaactaagtgggaaaaaaatttgtgtgtgtgtgtgtgtatacatatttgtgtgtatatgtatatttgtatatatatatatgttatatgtgtgtgtgcagggataattgtatatatgtgtatgtttgtgcatatatatgcacacacacacttagcatgcttaagaccagaacatttattctaattatataatgctcttaakaaaagtcattgcacaaaattcatagaatgacaaaaatttggactagcacggtcagcacaattataggaaagaagggatatgaacaggtttccataaaggggaaaggggagccgtacctaagctgactgagatgggctgagccattgtggtcaagaacaaacagcaatcaatatttcctgggcaagaaaagcagcagggagaagagggttcattcaatatttaaagacagtgataagcaagggacaactttgatgtcatcaggccagaacagacgatgactatgaagacaagaggtaagcccatacatatctggcagttaagaaagacagactggcactgatgtaagatcaaaatgaggaaacaggccaggaacagtg

SEQ ID NO: 881026 - DNA, 578 bp, Homo sapiens
ccagatatgaaagaataggttaaatgtgagttttaacttaattgggaaattacttttaaaaggatctctctgtattaacagtcatccctcttctacctaaaataagatgctatgagaaagcttgctagtcttctgaaagccctgacctgtaacagcatctccggttcttaaggtcatgctatgttasatagaaattaaatattcaaggtgaactgtcccattgccacaactagctacaaaaaatacttgtggtttgcctggcctattgatttatgagtttacaactgataaagaatggctattaaatttgaagatatcttttatgcatttgcctgattttgtgccagccctaggtttatataaggaacaactgcaattctgccaacaatcaggagagttgaaaataaatgtttagttgttgttcttcctacactgtttatacatctgaaataaattccattatttcattccataacaccaggagaagattctcttcttccatctgtttagagcatctttgatttccttgttcctcaggctgtagatcactggatttaacatggggattgtaactgtgt

SEQ ID NO: 881027 - DNA, 578 bp, Homo sapiens
cacgtggaagctaccaaggcttagggcttgaaccctctgaagccatggcccgagctgtaacttgtcccctttagccacaactggagcagctgggatgcagtgcacacagcaggggtccttagacccgccccaggaaactacttttcccgcctaagcctctgggcctgtgatgggaggggctgccatgaagggttcttacatgccctagagacatttttccctttgtcttggagattaccttttggtttctcattacttatgcaaatttmtgcagccagattgaatttctccccaggatttttttttaatcacatcatcaggttgccaattttccaaacttttatgctctgcttcctcttgaatgctttgccacttaggaatttcttcagccagatgccctaaatcatctctctgaacttccaagttccacagatctctagggcagaggcacaatgctgccagtctctttgtatagcaagagtgacttttactccagttcccacaagtttctcatctccatctgagactacttcagcctggactttattgtccatatccctatcagcattttgatcaaa

SEQ ID NO: 881028 - DNA, 578 bp, Homo sapiens
cacgtggaagctaccaaggcttagggcttgaaccctctgaagccatggcccgagctgtaacttgtcccctttagccacaactggagcagctgggatgcagtgcacacagcaggggtccttagacccgccccaggaaactacttttcccgcctaagcctctgggcctgtgatgggaggggctgccatgaagggttcttacatgccctagagacatttttccctttgtcttggagattaccttttggtttctcattacttatgcaaatttatgcagccagattgaatttctccccaggattttttttwaatcacatcatcaggttgccaattttccaaacttttatgctctgcttcctcttgaatgctttgccacttaggaatttcttcagccagatgccctaaatcatctctctgaacttccaagttccacagatctctagggcagaggcacaatgctgccagtctctttgtatagcaagagtgacttttactccagttcccacaagtttctcatctccatctgagactacttcagcctggactttattgtccatatccctatcagcattttgatcaaa

SEQ ID NO: 881029 - DNA, 578 bp, Homo sapiens
cacgtggaagctaccaaggcttagggcttgaaccctctgaagccatggcccgagctgtaacttgtcccctttagccacaactggagcagctgggatgcagtgcacacagcaggggtccttagacccgccccaggaaactacttttcccgcctaagcctctgggcctgtgatgggaggggctgccatgaagggttcttacatgccctagagacatttttccctttgtcttggagattaccttttggtttctcattacttatgcaaatttatgcagccagattgaatttctccccaggatttttttttaatcacatcatcaggttgccaattttccaaacttttatgctctgcttcctcttgaatgctttgccacttaggaatttcttcagccagatgccctaaatcatctctctgaacttccaagttccayagatctctagggcagaggcacaatgctgccagtctctttgtatagcaagagtgacttttactccagttcccacaagtttctcatctccatctgagactacttcagcctggactttattgtccatatccctatcagcattttgatcaaa

SEQ ID NO: 881030 - DNA, 695 bp, Homo sapiens
tttctacccctctctttatctggctaaattcagctcatccaatgagtttccaagtcctctcctgtgccaccttgtacttctacaatcacactttatcacactgtgttgtaaggatgtgcttacctgtctgcaaccccccaagctgttaagaaatagatgacaggtacatctcattcttctttgttaacccagaattgtatctatagtctctgctacaaaataggtgcttaattgtttwtcgagtgagtgaatgtgatttccatttgtcccttcattaatttgtgtaatccctactcaaccatctttagatctatgtcctttcaacaaaactttctaatgtttttgaacaaggaaagttttaagaattgagaacttgctcctctgatatcttaataccccaaaatgagtttcttttcaagagtccctaggaagggaaccacagtattttcaaaaatacaggagaattaaccaaaaaatgttcaagagttaattattcctgtgacagctgaaataaatatactgccttagtcatcactattctcttaaaccagcttaaaagaaacatgtttggctttttgttttaaatagaaacagattgttcagggtttgggggagccagacacaaatcagaaagcctgtcctctttcatcttataaatccttgctctctgcccagccctgagatatttactgacc

SEQ ID NO: 881031 - DNA, 639 bp, Homo sapiens
gggcatgccatttaccttagaaggacaagaaattcaactgcatgtatatgtaaacatatgcgattgcgacagatttttccatagctgagaaataagcacttattcattggtcctggaggttctgaatttttaaaactcatttgtttaaatyttacataggaagggccttcttgcttcttcctgctaattttctgtattagtccatttccacacttctataaagatactacctgagactgggtaatttatttaataaaagaggtttaattgactcagagttctgcctgactgaagaggcctcaggaaacttacaatcatggtggaaggtgaaggggaagcaagggatgtcatacatggcagcaggaaagagagagagagaggaagtgtcacacttttaaaccatcagatctcatgagaactcacttactatcacgagaacagcatgggagaagctaaccccatgatctaatcatctcccaccaggtccctcctttaacatgtagggattacaatttgagatgagatttgggtggggacacagaaccaaaccatatcatattctaaacagttctataaaacgttgttttcttttatactcttctcctgtatttaaaccagatacaggaatttgtgttagtg

SEQ ID NO: 881032 - DNA, 639 bp, Homo sapiens
gggcatgccatttaccttagaaggacaagaaattcaactgcatgtatatgtaaacatatgcgattgcgacagatttttccatagctgagaaataagcacttattcattggtcctggaggttctgaatttttaaaactcatttgtttaaattttacataggaagggmcttcttgcttcttcctgctaattttctgtattagtccatttccacacttctataaagatactacctgagactgggtaatttatttaataaaagaggtttaattgactcagagttctgcctgactgaagaggcctcaggaaacttacaatcatggtggaaggtgaaggggaagcaagggatgtcatacatggcagcaggaaagagagagagagaggaagtgtcacacttttaaaccatcagatctcatgagaactcacttactatcacgagaacagcatgggagaagctaaccccatgatctaatcatctcccaccaggtccctcctttaacatgtagggattacaatttgagatgagatttgggtggggacacagaaccaaaccatatcatattctaaacagttctataaaacgttgttttcttttatactcttctcctgtatttaaaccagatacaggaatttgtgttagtg

SEQ ID NO: 881033 - DNA, 639 bp, Homo sapiens
gggcatgccatttaccttagaaggacaagaaattcaactgcatgtatatgtaaacatatgcgattgcgacagatttttccatagctgagaaataagcacttattcattggtcctggaggttctgaatttttaaaactcatttgtttaaattttacataggaagggccttcttgcttcttcctgctaattttctgtattagtccatttccacacttctataaagatactacctgagactgggtaatttatttaataaaagaggtttaattgactcagagttctgcctgactgaagaggcctcaggaaacttacartcatggtggaaggtgaaggggaagcaagggatgtcatacatggcagcaggaaagagagagagagaggaagtgtcacacttttaaaccatcagatctcatgagaactcacttactatcacgagaacagcatgggagaagctaaccccatgatctaatcatctcccaccaggtccctcctttaacatgtagggattacaatttgagatgagatttgggtggggacacagaaccaaaccatatcatattctaaacagttctataaaacgttgttttcttttatactcttctcctgtatttaaaccagatacaggaatttgtgttagtg

SEQ ID NO: 881034 - DNA, 696 bp, Homo sapiens
acacataattaaaatatgtgaagtatcaggttatcaacattatattactaaataagactaacacagtaattactcccaagaaggcatgtataggtctttctgtgtgggtgttcatatgtgcaacactgaaggggaagaaggctgtggcaggaaatgtatcccttaggaaagagtaggaatgtaatcaagtgcattttgattccaaggaaatgactacattgacttcaacatttttcacatgaaggttgcaggaccttgtactgactatcaagtttcagctcaaagttaccaggaagaaaggctgtcctcagctgtagtagcctggatctctaaactctgatgctcttctctattattcattttaaattttgcataatgcataccattatctgcaagttgtttgtgctttttggtatttattatctcagttttctcaccagaatgtgggctatgtgatagcagaaacttagttcatcatattcattattgtgttttcaacacatagaacacagtctgccacaaaggagatgttcaatcatgattgctcmaataagaaataaatgattgattgaatatccatgttgttaagagaaatgttttcaaagaaaagcatgaaccagtttgtttattctattaataatgttggccattggaattaaagccagctctgtacactaaagcatagattatcaggga

SEQ ID NO: 881035 - DNA, 658 bp, Homo sapiens
tctgtatggggcttcaaccccacatttcccttctgcatgccctagcagaggttctccatgatgccctgcacctgcagcaaacttttgcttgggcatccaggcatttccatacatcctcagaaatctaggtggaagttcctaaacccaaattcttgacttcttgcacttgaagcacaatgccacatggaagttccaaggcttgggcttgcaccctctgaagccaaggcctgagctatatgttgatccctttcaagtatggctggagtgttgggacagggggcaccaagccctagggggcacacagcacaaggaccctgggtccagcccatgaaaccactttttcctcctacgctctgggcctgtaatgagaggggcttctgcaaagttctatgacatgccctggaggcrttttccccattgtcttggtgattaacacttgggtcttcattacttatgcaaatttttgcagctggcttgaatttctcctcagaaaatgggattttattttctatctcattgtcaggctgcaaattttccaaacttttttgctctgtttcccttttaaaacagaatatctttaacagcaccaaagtcacatcctgaatgctttgctgcttagaaatttcttccaccagatgccctaaatcatctttctcaa

SEQ ID NO: 881036 - DNA, 658 bp, Homo sapiens
tctgtatggggcttcaaccccacatttcccttctgcatgccctagcagaggttctccatgatgccctgcacctgcagcaaacttttgcttgggcatccaggcatttccatacatcctcagaaatctaggtggaagttcctaaacccaaattcttgacttcttgcacttgaagcacaatgccacatggaagttccaaggcttgggcttgcaccctctgaagccaaggcctgagctatatgttgatccctttcaagtatggctggagtgttgggacagggggcaccaagccctagggggcacacagcacaaggaccctgggtccagcccatgaaaccactttttcctcctacgctctgggcctgtaatgagaggggcttctgcaaagttctatgacatgccctggaggcgttttccccattgtcwtggtgattaacacttgggtcttcattacttatgcaaatttttgcagctggcttgaatttctcctcagaaaatgggattttattttctatctcattgtcaggctgcaaattttccaaacttttttgctctgtttcccttttaaaacagaatatctttaacagcaccaaagtcacatcctgaatgctttgctgcttagaaatttcttccaccagatgccctaaatcatctttctcaa

SEQ ID NO: 881037 - DNA, 684 bp, Homo sapiens
accagtaacaacatgatgacaggattaaaatctcacacatcaattctaaccctgatggtaaatgagctaaatgtcccacttcacttaaaagacgtaaagtggcaagctggataaaaagacaagacccaaccatctactgttgtgaaaagacccatctcatatgtaatgacacccaaagtaaagggatgaagaaaagatctaccatgcagacagaaaacaacaaagaggaggagtcactattcttatatcagataaaacagacctaaaccaataaaaaactaagaaagacaatgaaatacattacataatgataaagggtatagtccagcaagaagtcttaactatcctaaacatacatgcacctaacactggaggacccagtttcataaaacaagttcttcttggtctataaaaagacttagaccaccagacaataatagagggatatttctaaatcccactcacatcatgagacagatcatcaaggcagaaaactaacaaaaaatactctggccgtaaactcaacacttgamtaagtgggccttatagacctctacagagcacttcacccagcagccacagaatatacattcttctcttctgcacatggaacatattctcagatcaaacacatgcatgaccatacagcaagtctcaataaattaaaaaaaaatgaaacaatac

SEQ ID NO: 881038 - DNA, 604 bp, Homo sapiens
tttaatgaggccagtatcatcctgatgtcaaagcctggcagagacacaacaaaaaaagagaatttcagaccaatatccctgatgaacatcgatgtgaaaatccttaataaaatactggcaaaccgaatccagcagcacatcaaaaatcttatccaccacgatcaagttggcttcatccctggaatgcaaggctsgttcagcatatgcaaatcaataaacttaatccataacataagccaaaccaaagacaaaaaccacatgattatctcaatggatgcagaaaaggcctttgagaaaattcaacagcccttcatgctaaaaactctcaataaactaggtattcatggaacatatctcaaaataataagctatttatgacaaacccacagccaatatcatactgaatgggcaaaaactggaagcattccctttgaaaaccggcacaagacaaggatgccctctctcaccactcccattcaacatagtgttgggagttgcggccagggcaatcaggcaagacaaggaaataaagagtattcaattaggaaaagaagaagtcaaattgtccctgtttgcagatgacatgaattgtatatttagaaaa

SEQ ID NO: 881039 - DNA, 635 bp, Homo sapiens
cttgcccatgcctatgtcttgaatggtattgcctaggttttcttctagggtttttatggttttaggtctaacatgtaagtctttaatccattttaaattgatttttgtataaggtgtaaggaagggatccagtttcagctttctacatatggctagccagttttcccagcaccatttattaaatagggaatcctttccccatttcttgtttttgtcagatttgtcaaagatcagatggttatagatgtgtggtattatttctgagggctcagttctgttccattggtctatatctctgttttggtaccagtaccatgctgttttggttaatgtagacttgtagtatagtttgaagtcaggtastgtgatgcctccagcgttgttcttttggcttaggactgtcttggcaatgcaggctcttttttggttccatatgaactttaaaatagttttttccaattctgtgaagaaagtcattggtagcttgatggggatggcattgaatctataaattaccttgtgcagtatggccattttcgtgatattgattcttcctatccataagcatggaatgttcttccatttgttcatgtcctcttttatttcactgagcagtgttttgtagctctccttga

SEQ ID NO: 881040 - DNA, 489 bp, Homo sapiens
aaggaaaactggtaccagccactgcgaaaacataccaaaatgtaaagacaatcgacactatgaagaaaccacatcaactaatgggcaaaataaccagctagcatcataatgactggatcaaattcacacataacaatgttagctttaaatgaaaatgggctaaatgccccaattaaaagacacagactggcaaactggatagagtcaagacccatctgtgtgctgtattcaggagacccatctcatgtgcaaagacacacacaggctcaaaatgaagggatggaggaatacttaccaagcaaatggaaagccmaaaataaaaaaaaaaaagcaggggttgcaattctcatctctgataaaacagactctaaaccaacaaagataaaaaaagacaaagaagagcattacataatggtaaagggatcaatgcgccaagaagagctaactatcctaaatatatatgcacccaatacaggagcacccagattc

SEQ ID NO: 881041 - DNA, 668 bp, Homo sapiens
aaggaaagattgtgacatattgcaagaccaggcacacagctgatgttactcttttgccagagccatgcaaggagagcattttgagatatctctggacctatcacctaggtgatgtggctctcctgcttgggccctgccagtctggacagtgacatatttctaggccaggcacacaggtgatggtactcttttgccagggctatgcttcatagagracaatgtgacaaatctctgagcctatctcctaggtgaagtgactccctccttgggctctactcacatggagcattgtgacataagcaaagaacctatgcctaggtgatgtaactctcttgcctgggtgctgtcctaagagagccttgtgacatatctcattacccagaacccatgtgatgtggcccttctgcctgttttttctgcccacaaattaaattgtgacatatttctagggaagcacctaggtgatatgactctccttgtctacctgagctctgcctacttggtacatggggacatatctttgatctcaggtcctaagtgatatgattctcttctcctgccttggtctttaaaatggtgagattgtgacatattgctgagcccagcatttaggtcatgtgacctactctgttttctgaaccatgcccacaaagggaaattgcgacctt

SEQ ID NO: 881042 - DNA, 675 bp, Homo sapiens
cacacctaaagtgctgagggttcagtgaagcattttagccaggacagactcaaccgtcctcatgcagccttggcttcaactgaacactatggcttgaaagcttaaggaaaatccatcactttttttttaatttgattgtactagcccaactgtcccatcactttgccaactcctgctggtattcccaggacccaacaaagaatcctggatttcagaccagaaagaaatttggaaatcatctagaacactggtggcacctatggtgktgcatcttcaggagtgaaccaaccaataataaccatctactcaaatattatgaattcatgtaataatgactggattatgcctgtaggtatgctggtatcattggttttctggaaaactcagaaaagagaatgtactcttttatttgtttttttcactgatctaaggacatctttagttacaagaggataggagagatgaagtttgtttatgtctgtgatgatgtgcctttgacattaaacagactcagatccatgcacaggaatgaagtagcaattacatgactgttgaaaagaaaatgtgttggttggggcttgtagcccatctcatgaaatatcaggatgaagcagcctctgagtgctttgaaatgatattaggtaaggcagcattatctaaatgaaaaggccagat

SEQ ID NO: 881043 - DNA, 625 bp, Homo sapiens
taaagatcaacaaaatagatagaccactagccagtctaataaagatgaaaagagagaagaatcaaatagacacaataaaaaatgatatagaggatatcaccactgatcccacagaaatacaaactaccatcagagaatactataaacacctctatacaaataaactagaaaatctagaagaaatggatacattcctggacacatacaccctcccaactctaaggcaggaagaagtcaaatctctgaatagacccrtaacaagttctgaaattgaggcaataattactagcctaccaaccaaaaaaagtccaggaccagagggattcacagccaaattctatcagaggtacaaagaggagctggtaccattccttctgaaagtattccaaacaatacaaaaagagggactcctccctaactcattttatgaggacagcatcatctttgataccaaaacctggcagagacacaacaaaaaaagaaaatttcaggccaatatccctgatgaacattgatgcgaaaatccccaataaaatactgcaaaccaaatccagcagcacatcaaaaggcttgtccaccatgatcaagttggcttcatccctgggatacaaggctggttcagcat

SEQ ID NO: 881044 - DNA, 606 bp, Homo sapiens
tttcctgacattataatgattgccattctaactggtgtgagatggtatgtcattgtggttttgatttgcatttctctgatgaccagagatgaggagcatttttttatgtgtcttttggctgcataaatgttttcttttgagaggtgtctgttcatatacttcatctactttttgatgaggtggtttgatttttttattattatactttaagttttagggtacatgtgcacaatgtgcagttttgttacatatgtacacatgtgccatgttggtgcrctgcacccatcaaatcttcatttaacattaggtaggtctcataatgttatccctcccccttccccccactccacaacagaccctggtgtgtgatgttccccttcatgtgtccatgtgttctcattgttcaattcccacctatgagtaagaacatgtggtgtttggttttttgtccttgtgatagtttgctgagcatgatggcttccagcttcatccatgtccctacaaaggacatgaactcatcattttttatggctgcatagcactccatggtgtatatgtgccacattttcttaatccagtctatcattgttgcacatttgagttggt

SEQ ID NO: 881045 - DNA, 559 bp, Homo sapiens
atcatgggttttttatgttttcagctatagcctcaataagctctcaaatatcccttcacagattctataaaaacagtgtttccaagctgctgaatccaaaaaaaagtttaattctgctagatgaatgcacacaccacaaagcagtttctcagaaagttttttctgaagatatttccttttccacaataggcctcaatgcactcccaaatatcccttttcagattctaccaaaacagtgtttctacactgctaaatcaaaataaagtttaacactgtgagttgaatgcacacatcagaaagtggcttctcagataactttcttctagattttatcctgagatatwcactgttttgcctttggcctcaatgagctaacaaatgtctattcgtagaatggacaaaaaaagtgtttccagactgctgaaatccataggaaggtttaactctgcgagatgaatgcacacatcacaaagtggtatctcatgtagctttgttctattttttgtccaggaatatttgctcttttgaatttggcctctatgagctcccaagtatacat

SEQ ID NO: 881046 - DNA, 648 bp, Homo sapiens
ggaagggctgtgatttcaatgatgattgtgcttttaatctatgttgtttgtctttttatagtctgcgtatgcagatcctgactcctgcaagaagtagctcaccatgacaaagcagctttgcttttattgatttgcaaatcaaagaaggtggacatgttagaaacaaaccccccaaaatccagccataaactggccccaaaactggccataagcaaaatctctacattaccgtgacaagttaatgatggtcataatgcccatgctggaaggttactggtttactgaaatgagggcaaagaacacctggcccacccagggtgaaaaaccacttaaagtcgttcttaaaccaaaaacaatagcatgagcaatctgtgctttaagggcatgctcctctgctgatgaccagccagatccacaactttaaattggcccatcccttcatttccaataaggtatacttttaattaatcaaataactgtagaaacaattcgaataacwgattgctcttaataaatttgtggataaacatttgtttggggctcacagctctgaaggctgtgagacccctgaattcccaattcacacctctatatttctctgtgtgtgagtttaattcatctagtaccactggtttagggtcttcttga

SEQ ID NO: 881047 - DNA, 619 bp, Homo sapiens
aggacaaaagccttcccaaatatccccttgcagattccatgaaaacagtttttccaaactgctgaatgaaaagaaagatttaactctgtgagatgaatgcacacatcacaaagcattcccttagatagcctccttctagtttgtatcctcgggtattcacttttktgccattggcgtcaatgaggtcacagatatccattcatagaatggataaaaacagtgtttccagactgctgcatccaaagacaggtttagctctgcgagatgaatgcacatatcacaaagcagtttctcagaaagcttctttctagtttttaactgaagatatttcctttttcaccataggcctcaatgtgctcccaaatgtccctttgaagattcttaaaaaagagtgtttccaaactgttgaaagaaaagaaaggtttaactttgcaagatgaatacacacaccactaagctgtttctcagatagcttccttctactttttatacttagatatttgctttttcacatttggcaccaatgagctcccaaatgtccatttgcagaatggacaaagggagtgttttcaaactgctgaatcaagagaaaggtttaactctgtgagatgaatgctca

SEQ ID NO: 881048 - DNA, 619 bp, Homo sapiens
aggacaaaagccttcccaaatatccccttgcagattccatgaaaacagtttttccaaactgctgaatgaaaagaaagatttaactctgtgagatgaatgcacacatcacaaagcattcccttagatagcctccttctagtttgtatcctcgggtattcacttttttgccattggcgtcaatgaggtcacagatatccattcatagaatggataaaaacagtgtttccagactgctgcatccaaagacaggtttagctctgcgagatgaatgcacayatcacaaagcagtttctcagaaagcttctttctagtttttaactgaagatatttcctttttcaccataggcctcaatgtgctcccaaatgtccctttgaagattcttaaaaaagagtgtttccaaactgttgaaagaaaagaaaggtttaactttgcaagatgaatacacacaccactaagctgtttctcagatagcttccttctactttttatacttagatatttgctttttcacatttggcaccaatgagctcccaaatgtccatttgcagaatggacaaagggagtgttttcaaactgctgaatcaagagaaaggtttaactctgtgagatgaatgctca

SEQ ID NO: 881049 - DNA, 693 bp, Homo sapiens
ccatttgcagaatggacaaagggagtgttttcaaactgctgaatcaagagaaaggtttaactctgtgagatgaatgctcacattacaaagcagcttctcagaaaacttctttctagtttttatttgaagatgttttgtttttcaccataggcctcaatgcactccgaaatatcccttcacagattctacaaaaacagtgtttgcaaacttccraaggaaaagaaatatttaactctctgagatgaatgcacatatctcagaggggtttccctgataccttccttctagtttttatccagggatattctgacaaaacagagtttccaaatattccagagtttgctgaatgaaaagaaaggtttaactctgtgagatgaatgcccacatcacaaagcagtttcccagagatcttccttctagtttttatcctgggatattcactttttcacaattggcctcagtgagctcccaaatgaccattcgcagaatagacaaaagcagtgtttccaaactgcagaatccaaggaaagttttaattgtgagaagaaggcacacatcacaaagcagtttctctgagagcttctttctagtttttatctgaagatatttccttttcaccataggccacaatacactccaaaataccccttcgcagattctacataaacagtgttaccaaactgctgaatgaat

SEQ ID NO: 881050 - DNA, 594 bp, Homo sapiens
tcctgtctttgcttttgtcaatttgcaaatcaaagaactgggacatgttgggagcaagacccaaaatccagccataaactggccctaaaactggccataaacaaaatatctgcagcactgtcacatgttcatgatggccctaatgcccatgctggaaggttctgggtttactggaatgaaggcatgggacatctggcttgcccaaggcagaaaacagcttaaagtcattcttaaactgcaaacaatagcatgagcggagtggtctgtgccttaatggcwtgcttctgcagcagatgactagccagatccacaactttatttcagcccatcccttcgtttccaataagggatacttttagctaatcaaatatctgtagaaacaatgctaatgattggtttgctgttattaaacttgtgagtaaatctctgtttggagctctcagctccgaaggatgtgagacccttgatttcccacttcacccctctatatttctctgtgtgtctttaattcctctagcgctgctgggttagggtctccccaactgaggtggtctcagcaatgtttccttttacaccatagtcatcagtgtgctc

SEQ ID NO: 881051 - DNA, 681 bp, Homo sapiens
cttcatatctaaaacaccaaaaccaatggcaagaaaagccaaaattgacaacaaaagccaaaattgggatctaattaaactgaatagcttctgcacagcaaaataaactagcatcagagtgaacaggcaacctacagaaagggaaaaaaattttgcaatctactcctctgacaaagggctaatatccagagtctacaaagaactcaaacaaatttacaagaaaaaaaaaawcagacaaccccatcaaaaagtgggtgaacaataggaaaagacacttctcaaaagaagacacttatgcagacaagagacacatgaaaaaatgctcatcatcactggccatcagagaaatgcaaatcaaaaccacaatgagataccatctcacaccagttagaatggagatcattaacaagtcaggaaacaacagatgctggagaggatgtggagaaataggaacacttttacactgttggtgggactgtaaacaaagttcaaccactgtggaagacagtgtggtgattcctcaagatctaggaccagaaataccatttgacacagccatcccattactggatatatacccaaaggattataaaccatcctgctataaacacacaagcccatgtatgtttattgtggcactattcacaatagcaaagatttggaaccaacccaaatgtccac

SEQ ID NO: 881052 - DNA, 544 bp, Homo sapiens
tgaaatttttttggattcagcagtttggaaacagtgtttttacagaatctgtgaagggatatttgggagctcattgaggccaaaccaaaaaagtgaatatcccagtataaaaaccagaaggaagctatcacagaaactgttttgtgttatgtgcattcttctaacagacttaaacttgtcttttcattcagcagtttggaaacactgttttttagactcagtgaagtgatatttgggagcactttgaggccaatggcgaaaaacaagaaagaagctttctgagaaactgctttgtgatgtgtgcattcatctcacagagttcaaaccttctttgtattcagtagcttggaaacactstttttgtggaatctgtaaagggatatttgggaactcattaaagccaaaggaaaaaaaaaagcttattccaggataaaaattacaaggaaactatctgagaaaccacttttttatgcttgaattcatctcccagagttaaaactttcttttcattcagcagtttggaaacactcttttggtggaatct

SEQ ID NO: 881053 - DNA, 666 bp, Homo sapiens
catctcacaggtttaaacttttctttggaatcagtagtttggaaacactgttgttgtccattctgtgaatggatatttgggacctcattgaggcccatggcaaaaaagtgaatattccaggataaaaactagaagaaagctatctgaggaactgctttgtgatgtgtgcattcatytcacagagttaaacctttcttttcattcagcagttttcattcttttcattcagcagtttttaaacacctttttttgtagaatctgcaaagggatatatgggaattcactgaggccaaaaaccataaaagcaaatatcgcaggatgaatactagaaggaagctatttgagaaactgctttgtgatgtgtgcattcatctctcagagttgaaacttccttttcatttagcagttaggagacactgtttatatagaatctgcaaatggatatttgggagtgcattgaggcctatgatgaaagaggaaatatcttcagatgaaaactagaaagaaactctctgagaaactgttctgtgatgtgttcattcatctcacattgttaaacatttctttggattcagtagttgggaaacactgtttttgtcctgaatggatattttggagctcattgaggacataggcaaaaaagagaataccccaggataaacattg

SEQ ID NO: 881054 - DNA, 666 bp, Homo sapiens
catctcacaggtttaaacttttctttggaatcagtagtttggaaacactgttgttgtccattctgtgaatggatatttgggacctcattgaggcccatggcaaaaaagtgaatattccaggataaaaactagaagaaagctatctgaggaactgctttgtgatgtgtgcattcatttcacagagttaaacctttcttttcattcagcagttttcattcttttcattcagcagtttttaaacacctttttttgtagaatctgcaaagggatatatgggaattcactgaggccaaaaaccataaaagcaaatatcgcaggatgaatactagaaggaagctatttgagaaactgctttgtgatgtgtgcattcatctctcagagttgaaacttccttttcatttagcagttaggagacactgtttatatagaatctgcaaatggatatttgggagtgcattgaggcctatgatgaaagaggaaatatcttcagatraaaactagaaagaaactctctgagaaactgttctgtgatgtgttcattcatctcacattgttaaacatttctttggattcagtagttgggaaacactgtttttgtcctgaatggatattttggagctcattgaggacataggcaaaaaagagaataccccaggataaacattg

SEQ ID NO: 881055 - DNA, 616 bp, Homo sapiens
caaagggatatatgggaattcactgaggccaaaaaccataaaagcaaatatcgcaggatgaatactagaaggaagctatttgagaaactgctttgtgatgtgtgcattcatctctcagagttgaaacttccttttcatttagcagttaggagacactgtttatatagaatctgcaaatggatatttgggagtgcattgaggcctatgatgaaagaggaaatatcttcagatgaaaactagaaagaaactctctgagaaactgttctgtgatgtgttcattcatctcacattgttaaacatttctttggattcagtagttgggaaacactgtttttgtcctgaatggatattttggagctcattgaggacataggcaaaaaagagaataycccaggataaacattgaaagaagctttccgagtaacagctttttgatatgcgcattcatctcacagagttaaacctttcttttctttcagcagtttggaaacactcttttggtagaatctgcaaagggatatttgggagtgcattgaggcctagggtgaaaaaggaaatatgcacagagaaaaactagaaagaaggtttctgagaaactgctttgtgatgtgtgcat

SEQ ID NO: 881056 - DNA, 615 bp, Homo sapiens
tagaagaaatctgcctgagaatctgctctgtgatgtgtgcactcgtctcacagagttcaaccttacgttgaataaagcagttggaaacactgtttttgtagaaccaacgaagagatattttggagctcattgaggcctatggcaaaaagggaatatcccaggataaaaactagaaggaagctatctgagaaactgctgtgcaatgtatgcattcaactcrcagagtgaaaacttttctttctttcagcagtttggaaacattgtttttgtagattctgtgaagggatatttgggagcgcattgtggcctctggtgaaaaaagaaatatcaacagataaagtctagaaagaagctttctgtgaaactgctttctgatgtgtgcattaatctcacagagctaaacctttctttggatccagcagtttggaaaaactgtttatttcaatctgggaatggacatttttgagctcatgaggccaaagatgaaaaaacgaatatcccaggataaaaactagaaggaagctatctgagaaacagctttgagatgtgtgcattcatcttgcagagttcaacctttcttttcattcagcagtttggaaacactgttttggtaga

SEQ ID NO: 881057 - DNA, 615 bp, Homo sapiens
tagaagaaatctgcctgagaatctgctctgtgatgtgtgcactcgtctcacagagttcaaccttacgttgaataaagcagttggaaacactgtttttgtagaaccaacgaagagatattttggagctcattgaggcctatggcaaaaagggaatatcccaggataaaaactagaaggaagctatctgagaaactgctgtgcaatgtatgcattcaactcgcagagtgaaaacttttctttctttcagcagtttggaaacaytgtttttgtagattctgtgaagggatatttgggagcgcattgtggcctctggtgaaaaaagaaatatcaacagataaagtctagaaagaagctttctgtgaaactgctttctgatgtgtgcattaatctcacagagctaaacctttctttggatccagcagtttggaaaaactgtttatttcaatctgggaatggacatttttgagctcatgaggccaaagatgaaaaaacgaatatcccaggataaaaactagaaggaagctatctgagaaacagctttgagatgtgtgcattcatcttgcagagttcaacctttcttttcattcagcagtttggaaacactgttttggtaga

SEQ ID NO: 881058 - DNA, 615 bp, Homo sapiens
tagaagaaatctgcctgagaatctgctctgtgatgtgtgcactcgtctcacagagttcaaccttacgttgaataaagcagttggaaacactgtttttgtagaaccaacgaagagatattttggagctcattgaggcctatggcaaaaagggaatatcccaggataaaaactagaaggaagctatctgagaaactgctgtgcaatgtatgcattcaactcgcagagtgaaaacttttctttctttcagcagtttggaaacattgtttttgtagattctgtgaagggatatttgggagcgcattgtggcctctggtgaaaaaagaaatatcaacagataaagtctagaaagaagctttctgtgaaactgctttctgatgtgtgcattaatctcacagagctaaacctttctttggatycagcagtttggaaaaactgtttatttcaatctgggaatggacatttttgagctcatgaggccaaagatgaaaaaacgaatatcccaggataaaaactagaaggaagctatctgagaaacagctttgagatgtgtgcattcatcttgcagagttcaacctttcttttcattcagcagtttggaaacactgttttggtaga

SEQ ID NO: 881059 - DNA, 615 bp, Homo sapiens
tagaagaaatctgcctgagaatctgctctgtgatgtgtgcactcgtctcacagagttcaaccttacgttgaataaagcagttggaaacactgtttttgtagaaccaacgaagagatattttggagctcattgaggcctatggcaaaaagggaatatcccaggataaaaactagaaggaagctatctgagaaactgctgtgcaatgtatgcattcaactcgcagagtgaaaacttttctttctttcagcagtttggaaacattgtttttgtagattctgtgaagggatatttgggagcgcattgtggcctctggtgaaaaaagaaatatcaacagataaagtctagaaagaagctttctgtgaaactgctttctgatgtgtgcattaatctcacagagctaaacctttctttggatccagcagtttggaaamactgtttatttcaatctgggaatggacatttttgagctcatgaggccaaagatgaaaaaacgaatatcccaggataaaaactagaaggaagctatctgagaaacagctttgagatgtgtgcattcatcttgcagagttcaacctttcttttcattcagcagtttggaaacactgttttggtaga

SEQ ID NO: 881060 - DNA, 562 bp, Homo sapiens
tagatggttgtaagaataaaacacttagcaaccagaaaaggccatggacccagcaaatttataactgaattctatcagatgtacaaagaagagctgatactaatcctactgaaacaattccaaaaaatcaagaagagagtcttccctaactcattctatgaggccagcattattctggtaccaaaatctgaaataaacacaaccaacaargaaaactttaggccaatatccctgatgaacattgatgcaaaaatcctcaataaaatactagcatactgaacccagcagcacaccaaaaagctaatccatcttaatcaactaggctttattcctgggatgcaaggttagttaaacatatgcaaactaataaacttgattcatcacataaacagaactaaaacaaaaattacatgatcatctcaatagagtcagaaacaagtttagataaaattcaacatcccttcatattaaaaaccctcaacaaaccaggcattgaagaaatatacctcaaaataattagagccacttatgacaaacccatggccaacatcatactgactgg

SEQ ID NO: 881061 - DNA, 553 bp, Homo sapiens
tcacttgaactacaggaaaataaaaaactctttttcaacaaaatgtcttattaaatgtgtgaacaagcatgccccaaagatagaaaagataatagtatatacaattgacaaaggacttatatcttgaataataagtcctataaattataagaaaaatataataaaatagaaaagtggtcaaactactgaacagatacttcacaggaggatatctaagtggtcaataaatatattaacctggccaacatagtgaaaccccatctctactaaaaatacaaaaattagctgggtgtggtggcgcatgcctgtagtcccagctaygtgggaggccaaggcaggagactcgcttgaactgagaggcaaatcttgcagtgagccaagatcgcactactgcactccagcctgggcaacaatgcaagactccatctctctctctcgctccatatatatatataaaaaaacatatatatagggagagagagatatatatataacatatatatcaaatatatgtatatgttgtgcatatacatgttaacatatatatgttatg

SEQ ID NO: 881062 - DNA, 553 bp, Homo sapiens
tcacttgaactacaggaaaataaaaaactctttttcaacaaaatgtcttattaaatgtgtgaacaagcatgccccaaagatagaaaagataatagtatatacaattgacaaaggacttatatcttgaataataagtcctataaattataagaaaaatataataaaatagaaaagtggtcaaactactgaacagatacttcacaggaggatatctaagtggtcaataaatatattaacctggccaacatagtgaaaccccatctctactaaaaatacaaaaattagctgggtgtggtggcgcatgcctgtagtcccagctacgtgggaggccaaggcaggagactcgcttgaactgagaggcaaatcttgcagtgagccaagatcgcrctactgcactccagcctgggcaacaatgcaagactccatctctctctctcgctccatatatatatataaaaaaacatatatatagggagagagagatatatatataacatatatatcaaatatatgtatatgttgtgcatatacatgttaacatatatatgttatg

SEQ ID NO: 881063 - DNA, 635 bp, Homo sapiens
tgaagaaggtaggaaagacagtctttaatcaactacaccaatcctccttcgtctcctggcagtgccacatggtatggagagagaatctgtgtgcttgggggaggaaaagcaaagtgattatgggactttgcaatggaattcagtgcaaactgtcatagcagaaagcaacaaagggcaaaattcagctggtgcccatggagtgagcatttagaccagccctaaccagaggrgaatcatttaccccagcggtcaaaaccctgagttcatctagccccaccactatggctgaaatactctgggtcctaaataaacttgaaaagccatctaggccataaggactataattcctgcacaagtcctggtgctgtgctgggcttagagccagtgcacttgggatgtgcatgacccagtgagaccagctggggtaaccaagggagtgcctgcatcaaccctttctttttttttttttttttgagacagagtcccgctctgtcacccaggctggagtgcagtggcaccatctcagctcactgcaacctctgcctcctgggttcaagtgattctcctgcctcagcctcctgagtagctaggattacaggcatgcaccaccacacctggctaatttttgtattttt

SEQ ID NO: 881064 - DNA, 641 bp, Homo sapiens
ggattaacattaggatcctcattactcatgcaaatttctgcagcagccagctagaatttctcctcagaaaatgggtttttattttctatcacattgtcaggctgaagaatttcaaacttttatgccctgctttcctgataaaactgaagaccttkaacagcgcccaagtcacttcttgaatactttgctgcttagaaatttcttccaccaggtaccctaaatcatctctctcaagttcaaaattccacaaatctctaggtcaggggcaaaatgctgtcactctctttgctaaaacataacaaaagtcacctttgctgcggtccccaacaagttcctcatctccatctgaggccacctgagcccagactttattgtccatattgctatcaggttttgtcaaagccattcaacaagtctctaggaagttccaaactttcccacattttttggtctttttctgagccctccaaactgttccaacctctgcctgttacccagttccaaagtcacttccatgttttcaggtatcttttcagcagcaccccactctactgctactaatttactgtattagtccattttcacactgctgataaagacatatccaagactcagcaatttactagaggaacaggttaaat

SEQ ID NO: 881065 - DNA, 704 bp, Homo sapiens
gatgctgggcaccaagtccctggactgcacacagcacagggatccctggaccaggaccactaaaccattttctcctgagcctccagacttctgatgggaggggcttctgtgaagacctctgacatgccctggagacattttgcccattgtcatggggattaacattaggatcctcattactcatgcaaatttctgcagcagccagctagaatttctcctcagaaaatgggtttttattttctatcacattgtcaggctgaagaatttcaaacttttatgccctgctttcctgataaaactgaagacctttaacagcgcccaagtcacttcttgaatactttgctgcttagaaatttcttccaccaggtaccytaaatcatctctctcaagttcaaaattccacaaatctctaggtcaggggcaaaatgctgtcactctctttgctaaaacataacaaaagtcacctttgctgcggtccccaacaagttcctcatctccatctgaggccacctgagcccagactttattgtccatattgctatcaggttttgtcaaagccattcaacaagtctctaggaagttccaaactttcccacattttttggtctttttctgagccctccaaactgttccaacctctgcctgttacccagttccaaagtcacttccatgttttcaggtatcttttcagcagcaccccactc

SEQ ID NO: 881066 - DNA, 604 bp, Homo sapiens
gaaaacttttcctctaagataagaaacaagtcaaggctgctaggtcacagtgctacttcaggatctacatacagttgggactgacattggcaggcatgttactgggagcacagatagttgtgtctttcactggatccctgtgcaggcaggactgactctggaacagtggtatactagggctggagccatggcatagggtggtttcaagatycacagtcaggtatactatgggtgatgccataaccaggggcacagatgggcatagttcctcctgggttccttgatgaatggggcttgttgcaggatcatggccaactggagctgaggccagttccatagagtgactgttgctttggccttgcagctgagacattgctaaccctggcaccagtgtgtgcctgccttctcaaggaagctctctccaatcttgggcttcagcagaatttcataatctcctacaggcacccaaaagcttccacaaagatacttctgttcatagatggctgctagatttttgtgtgtgttggaagctataatctggggacctattattctgtcatcctactgacatctttccaatgttattttggttcttacctttgta

SEQ ID NO: 881067 - DNA, 618 bp, Homo sapiens
catttgtttcattctttctgacacaaagggtttagaataaactaagtttagcttgtatgtgaacacgcaatataagcaacaggaactccattatggttaaatcactgaagcatgggtatgagtctgactcaggtgtgtatgtcagcttcttaattccatttcaaaatttgccttttcatcagagctagaaagcaaactctgtttatctagaaaatcaggcaaggccagggtctctccatttayattggattgaaatgtttctttctcttttagagcacagagctatttatcatcatattggatgtctaacaacacagaacacatcattctgggctcagtcataatgcttgagtaataccagtgatcaaacttctgaaagcagtctgcaataggtcacaccaccaacaaatcacaatggaaagtggaataaagtagaccagttgaaggctagaaaaaagtaattgtacatttcccaaaatgaattgtattcaattaaagggatatacacacatacacatatatatgtgttatgcatatatttgtatagaaatagatatatacatacacatacatatatacatacacatatttattagtatgttctcacactgctattaa

SEQ ID NO: 881068 - DNA, 605 bp, Homo sapiens
ataattcaatcatgattgttactggtggaaggtatccaagttaccagcagtgaatccatacaggtctctagcagtctcaattcttgcctcctcagaagaaataatttgacaaaggggcataaggcagaaaaagagaccgaggcaaactttagagtaggagtggagttttattttaaaaggctttagaacagaaaagaaaagatactcttggaagagacccaagtgagtaacttgaagaacaagtgtggtgtttaaccgtgatcctaggactttatacgctggccccttttccatgattcttcctttagggtgggatgccttcatgcgcagtgccctccttgccattgacaggtgagcacacacagtgtgtttaggaagttgcacaaatgcccatctgaggctttyttcccttttccagtggtgtgcccttggaaggtcgttctctgccattatgtctcttaatgcacatgacagggaagttgcatctctctggcatctgcattcaattgacacttcagtgcaacaggtgtggaccatcaggaaatgacctctccctggtactggctgccaatttatcacttttagagaggcaatgtgataattgc

SEQ ID NO: 881069 - DNA, 467 bp, Homo sapiens
ttctctcaaaccttgccattggtttatcaactatgtttatgtaatattctaaatgccctgttgtcatttcaacaacgtccacactctttcaagattccttctcaagaacccactttctttgcttatccgtaagaagcaactcctcatccgttaaagtttggtcataacattgcagcagttcagtcacatcttcaggctccaagtctaattctagttctctttctatttccaccacatctgcatttacttcctccatgaagtcttgaactcctcaaagtcatccacaacagttgsatgaagtcttgaactcctcaaagtcatctacaacttattccaagctcctgttcatgttcatattttgaattcctcccatgatcacaagtgttcttaatggcatctagaatgatgaactctttccaaaagattttaaatttattcttcccagatctatcagaggaatcactact

SEQ ID NO: 881070 - DNA, 722 bp, Homo sapiens
atgtgtgcctgtagtttcgtgtttacagcaaagtactatgcatggaagtcctggggcagattctattgcagccacactgccattctgctgcttgcatatttatgaaaaattatcctttcaggatgaaattttccatgactggcttcggatccaaaagaagggtgtttctctctcttttctattcttttggaaaatttgaacaatatccagtcagccatgtagaagttgggcattagtgaaaaaaacaatgacatgttttgtctttcaaaatcaatgtaagcctttcttttgcgtgaccaattaaaaaacaactaacttcaaaatgagaaaccttccactcgtctaggcctcaacaaggatgaacctgagtgatagtagaagttaatggaatggaaacagaacacaaacaaaatgagtatgtatctcttcattatacttgctttaagtttcacaarttcccaaagttgtgtgcctcttcccatgacttctaaaattgaaaaatgtaatgtatttatgaaatcagagtccatcgaggctgagctaaagctcagagaaatgaaaaaaaaaaatccagataattacatgataaacttctggacagtaaataatttatttatcttgaaagaaaggttccctccaaatttttctcaaaatagagtcgtttgccttctaacctcttatctataaaatgtcctcacatgatattagttttaatacactaa

SEQ ID NO: 881071 - DNA, 621 bp, Homo sapiens
agacactgttgttaggaaagggcgtgggagagggtggccccacaaaacagtgtaaagttctaaagaatttgagaggaacactctgcgggaccctgttccaagggcatctttctaagagtctgtcccttaggctctgcccctttttggccacgttgtcaaaggccttctttatgaacgaagtgagacacattatttttgttttcttgaattctaaagtgattgtcttgagttccctgggggagactcytgggaggtgtggcccactctattccagaaacaaaccaggagactgaagactcatcccaatcccatatcccatgaaaatgtgaaatcaaatcacccctgacaattccaaaactaatggaatcctaacataactctatgtaactctaaagctgagtgtgctggtaattaagcttccagcccacccttcccagctctggggtgcagggtcaccatgggctccttcctgtgtgcaccccaccccacccccactgtcagcatcctgtctccaccctgagagtgacagctggttccagtagcgggagttggttccagcttgccattttcctagcactcctataaccagcctgctgatgcccattcagagacagcagcacg

SEQ ID NO: 881072 - DNA, 619 bp, Homo sapiens
tccccacaggagcaggctacgtagagtgactgtaccctgggtaagcttggaaactcttctgtaaccttcttttccatgctagaatagagggtccagggaggctgtactgccttctggatggaatactctacagttgcttttcttttcttttttctttcttttgtttgtttgtttgctttttgagacggagtttcactcttgttgcccaggcgggagtgcaatggcgcggtctcagctcactgtatcctccgtctcccaggttcaagtgattctcctgcctcagcctcccaagtagctgggatttcaggcgcccgccaccatgcccagctaatttttttgtatttttagtagagatgagatatcmccatgttggccaggctggtctcaaactcctgaccttgtgattcgcccacctcagcctcccaaagtgctgggattacaggcgtgagctaccatgcccagtctacattgctttctaacactgtttattagtaggagactagagtagttcaaagaacaaattggctagaaaaagctgactagaaaaaaaaagtctatttttaaaatttttttctttttaagaaatttttttttaaattttaaccttttatttatttat

SEQ ID NO: 881073 - DNA, 610 bp, Homo sapiens
taagtgttactgactcagtaagggaactgaggctcagagaggctaatatataaattacccaaggtcacagaatgaaaaagcagctgtactgagatttaaacccagacctatgtgttgctaatctatattctttttactacattatctgtgcatgtgtctttacatcagaatgctttgtagtctttccctgctataatcaagggtatacagcgccagattactggctttgtaggaggaaygagctggaaataaatggttgaaaaagtaggaaatggtaattagttaggtgatctagaaactctcagatcccatccttggcctaccacacttccctgaaaaacctccaaggaatacatatgcacagaagagaatgtgtggcaaacacaagcactttactattatctgtgtctttgaccagtagttctgtgcatttccttggggatctaacctggacctcgtggagaatccccaaacacctacttagactggaagctgtcccaggttcctcctttcccactgcctctttctggttcccacttggcttctaaggggataggggatagagggggcacatattcctaactgggaccagggcctgatcctgttttac

SEQ ID NO: 881074 - DNA, 608 bp, Homo sapiens
aatattatcaaatgtaagtgaactaatagctccaattagaagacggagtggccaaatggatggaataacaagacctaactgtatgtgtctactagatatccacttcagctataaagacacatgtagactaaaagtaaaggaatggggaaaaaaatcacatgcaaatggaaatcaagaaagattaaaagtggttgtacttgtaacagataatatagccttgtgaaaagagaataaaaggtcactatataatgataaagcaatcaattcagcaagaggatataacagttatgaatatatatgcatccaacacmagtcatattaaatatataaaacaaacattaatactaaaaaagacatagactaacataccttaatattaggggacttcaatatcccactgtaattaatgaaaatatcatcccaatagaaatttgtcaaagaaacatggagttatactctagatcaaatggacctaactgataattatagaacattttattcaactgctgcagaacacatgttcttctaatcagtacatgaaacattctctaggatagaccatatgttaggttgcaaaataagtttcagcaacttcagaagtgtcaaaa

SEQ ID NO: 881075 - DNA, 608 bp, Homo sapiens
aatattatcaaatgtaagtgaactaatagctccaattagaagacggagtggccaaatggatggaataacaagacctaactgtatgtgtctactagatatccacttcagctataaagacacatgtagactaaaagtaaaggaatggggaaaaaaatcacatgcaaatggaaatcaagaaagattaaaagtggttgtacttgtaacagataatatagccttgtgaaaagagaataaaaggtcactatataatgataaagcaatcaattcagcaagaggatataacagttatgaatatatatgcatccaacaccagtcatattaaatatataaaacaaacattaatactaaaaaagacatagactaacataccttaatattaggggamttcaatatcccactgtaattaatgaaaatatcatcccaatagaaatttgtcaaagaaacatggagttatactctagatcaaatggacctaactgataattatagaacattttattcaactgctgcagaacacatgttcttctaatcagtacatgaaacattctctaggatagaccatatgttaggttgcaaaataagtttcagcaacttcagaagtgtcaaaa

SEQ ID NO: 881076 - DNA, 754 bp, Homo sapiens
tctattctaggctctaatattctacaattcagtgaccttaattattttgagcaacttttttttttttttgagacagagtctcgctctttcgcccaggctggagtgcagtgatgctatttcggctcactgcaagctccacctcccgggttcacgccattctcctgcctcagcttcctgagtagctgggactacaggtgcccgccactatgccygcccaattttttgtatttttagtagagactgggtttcaccatgttagccaggatggtctcgatctcctgacctcatgatccgcctgccttggcctcccagagtgctgggattacaggcgtgagccaccgcacccagcctattttgagcaacttcttaagaaaacatcagaagttgaaagaggtatatgtgtcccataactcagatcagtagagctttgtgacattatttatttcctgtcactaggtgatagtactttttaaatgatttgtgattgacttttggtactaggtcttcagtgtattttgatagtgacttcttgattttctgtttgttgtttgtgttcaatttttgtctttaatttttatttgtttgttttagaaagggctaagaactctgtgtatagcatatagaaaatttacatcaaaagagtatgaggaaatagataaacgcatatttgaagccaggactgccttgcagcagcgggaagagaaattggcagctgttttccagttcatagagaaagacctgatattacttggag

SEQ ID NO: 881077 - DNA, 606 bp, Homo sapiens
gtagggtgggggtgttgcctgggaagaagcatgagagaatcttcaggggtcctggaaatattccatatcttgatttggttggtggtacactgttgtgtataatatacacgtatttgtacatgtgtgtataaaatgtcattgagctccacatttaagattttttggactttattatatgtatgctaacctcaataaaactaaaaaattcctcactygagtgaaaacttttttaatttaaataaaaataaacggtatttcatttagaaatggaaaccaggcacattatcttacacagtatttcataaactaccatcacctagtgaatatagcaaaagactgtatatggcttcaaagccacataatgcacctaaattctctaaaattgccagcaattacaaagtgatagatatgagccacataggatcaagatggggattcactcattccatattttggagccacaaagtatatctgctgcctaggtttggaccaaatgcaattaatgtatcaaacaaaaaatcctaatatttattcagcttcatccacagcctccaaaaatggttttagtaaaagaccaaataaattacggtttttaaaaaaactttc

SEQ ID NO: 881078 - DNA, 621 bp, Homo sapiens
tgaggcacacacagggaatgggtaggctcatgagcaagggccgagcaccagatactgcctgggagctgcatctggatctttcatgttggatatggctatggaacaaggcaccaaaccaccaactggtttgatttgttagtttatcagtatttattctttttaatctgttagtcaatttcttgttaatcaattgagttgggggaaggtcagtcaggaaaggtatctagacattttcctgtctagtcatttttgggatgtgaaagacctgccaggaggcaacatcgtaaagggaaggagaataagtttggggtcatcaggtctgggcctgaagcctgcctctgtttcctaccagcygtgtggtttgggtcaagcaattcaactttctacgctgcagtcttctcaccttaaaatggaaaaaacaatacctactctgcaggagtattatgagtattaaatggtataacccacgtaaatccatcatggtctgaaacggcagggacgtgaagaagtaatttcttctctctttgcctactttggacaaagggttatattgggtgaaataaagaatgtggctgggtgcggtggctcacgcctgtaatcccagcactttgggaggccgag

SEQ ID NO: 881079 - DNA, 558 bp, Homo sapiens
tgggcacactgacctcagacttccagcctgtagaactgtgtgaaacaaatgtgttgcttaggcaacccagtgtatggtaatttgcaatagcagcctgacctaagacaccctttattaccaccctgtgagtgagttatcattggctccacccaatacaggagggagctgacattcagaagaggaaggtagctttgtctaggtcacagtgccagtaagaagggagagtggtgatcaaacctggtctggctggtgcaagcctcaacctgtgtcctctattcctgccatttctgtcatatcccctccataaacaaggctcagcacactacattaatcttcttttaagaaagtgcttctctggtattttgatagcacttcaagtcatctcaaactacaagtactcaagtcaytgtgtacaaactgagggtgatgcccagatgtcaaggacactctattttcccagtgaagagtttattctccaggaagaatgccagactctcagcctataaaattccttttacttttattttattggaattactgttctattattactgcttt

SEQ ID NO: 881080 - DNA, 654 bp, Homo sapiens
taattacctttttaaagaccctatcttcaaatagaatcacattctgaaatactaggggttagaacttccacctgtacatttaagaaaaacacaattcagtccacagcctttggttatttatttacttatgaataaatgcacacatacttcaaatagaaaataagttccatgaaaacagaaattttacctgtcttgtaaaccagaatatctcctatattgaaggatttctagcacaaagtgaatatagcttaaagtctagaattaacttgcaattcattaatttatttattagtatgaatattcctttggaagagcattgactatcaataaagcttatgatggcttgttcatttactccccacctaatatggtttggctctgyttccccacccaaatctcatcttgagttgcaatccccacatggtgagggagggacctggtgggagttgattggatcatgaaggcagtttcccccacgctatgctcttgatagtgagggagttcttatgagatctgatggtttaaaattgacagtttcccctgggctctctctcctgccacctgtgaacaaggtgcttgcctctccttcaccttccaccatgattgtaagtttcctgaggcctccccggccatgtggaagtatgagtcaattaa

SEQ ID NO: 881081 - DNA, 632 bp, Homo sapiens
caagaacaccaaagcaatggttactgcagtagagaagaattctagtgattttgcgttactagtttagggttaaagttaactgttcagacaagaacataatgggagtaaaagacaaaataatggtaatatattggagattcagttattctaagatgttgaagcaattcagttcggctcaaaaaacaatactgaatttctgctaccaattatttggaggattcaaaggggaacgyctatgaacagagcttacaatattggagagatcaggcacaaataactacattatcacaccattaactaagaaaaattattatacacataagcataagaatgtggctccaactgctgagttccaatagataagaaataaaagttggccaggcgcagtggctcatgcctgtaatcccagcactttgggaggctgagatgggtggatcacgaggtcaggagatcgagaccatcctggctaacacagtgaaaccccgtctctattaaaaatacaaaaaaaaaaaattagccaggcatggtggcgcacgcctgtagtcccagctactcgggaggccgaggcaggagaatcacttgaacccgggaggtggaagttgcagtgagccgagattacgccactgcactcc

SEQ ID NO: 881082 - DNA, 507 bp, Homo sapiens
aacatatgattcatggttcagatgtgtaatatatgatgtgcttttctcttcctcatggatgatgctgactgtcctaggtttctcttgtattcagtacagtacattaaattttcttttaaaaatatagcacagatgycgggcacggtggctcaggcctataatgccagcgctttgggaggccaagacgggcagatcacccgatgtcaggagttcaagaccagcctggccaacatggtgaaagcccgtctctactaaaaaaaaagtaaataaatacaaaaattagctgggcgcagtggtgggtgcctgtaatcccagctacaggggaggctgaggcaggagaatcgcttaaacccgggaggtagagattgcagtgagctaagattgcgccactgcactccagcctgggcaacaaagattgaaactccattaaaaaaaaaaaaaatatatatatatataaaactgtatttaattatatatataatttttacatataatatagaattttgt

SEQ ID NO: 881083 - DNA, 434 bp, Homo sapiens
tctctgcctctgttgtaatccagactaggaacaaataagcaaataaactaagaaagctatcttgtgacctctaagtttcgtcttcctcctggtgtaagtatttgtgtttctcaagtatctgagcttccatagacttcactattctagttgtttctctagcagytaccattcttgactatattacggatcagatatagatataaagactttacatttctattttactaattctcacaacactgctatgcaaaaggtactactattatccttttgcatatgaggctcagaatacttaaattgcttacccaaattacccagccagttagtggcaggatgaaatttaccaatgtctttgtgtgatacccagaattgatctcaatcctccagatgtggtttgactggcccaaagtagaaaatctttatcctgacttccc

SEQ ID NO: 881084 - DNA, 631 bp, Homo sapiens; identical to SEQ ID NO: 872406

SEQ ID NO: 881085 - DNA, 631 bp, Homo sapiens; identical to SEQ ID NO: 872407

SEQ ID NO: 881086 - DNA, 682 bp, Homo sapiens
tatcagcagaaaattcatcaaacagagatgttgcacctccaagattacaaacctaaaaatgttctttctctgcttctctgtttctctctcttattctgcacctggacttgcaaccccttggtgggtttccagtgttcccagtgtgttaccacactttatttctcccccttagccaacatggttctttattaaaataaaatttattattctgtattatcaatgcaatacacattacatagaaactttctaatataaaaagtaaaaatgtcacctagatctccctacccaaggataatcattcatatgttctgtgcatatgtccatatatattttctctaataaaattaaaattatatcataaatactgccttacccggtttactttgcctagcaacacatagagatttccccttatctcaaaatacttttggaatataatttttaatggttacayagtagtccataacgctccataacattccatatctcctacatttgagaatataggtgactttcaattttttattataataaatatctttatacataattttgcataatttttgtgtacttttagaattatttcttcatgacaaactcctagaaatggaattactagatcaaagaagagaaaatttttagttgttttctttttttaacacatattactagtttatattcc

SEQ ID NO: 881087 - DNA, 642 bp, Homo sapiens
caaatatcccaatgcagaccctacaaacaaagcgtttccaaattgctgcatgaaatgaaaagtttaactatgtgagatgaatgcactcatcacaaatcaatgtctcagatggcttccttctattttttatcctgggatattcactttttcaccattggccttagtgagctcccaaatgtccattcgcagaatagacaaaaacagtgttttcaaactgctgaatcaaaagaaaggtttaactctgtgagatgaatgcacacatcatgaagcagtttctcaaaatgttctttctacttttcatctgaagttattttgtttttcaccataggagttaatgcactcccaaatatccctttgcagattctgcaaaarcagtgtttccaaactgctgaatgaaaagaaagttttgtctctgtgagatgaaagcacacatcacaaaacggtttgtcagatagcttccttcaattttttatcctgggatatttgctttttttgcccttggcctcaatgagctcccaaatggaatggacaaaaccagtgtttccaaactgctgaatcaaaagaaaagtttaattctgtgagatgaaaacacacatcacaaagcagtttctcaaaagcttctttctactttttatctgaaga

SEQ ID NO: 881088 - DNA, 642 bp, Homo sapiens
caaatatcccaatgcagaccctacaaacaaagcgtttccaaattgctgcatgaaatgaaaagtttaactatgtgagatgaatgcactcatcacaaatcaatgtctcagatggcttccttctattttttatcctgggatattcactttttcaccattggccttagtgagctcccaaatgtccattcgcagaatagacaaaaacagtgttttcaaactgctgaatcaaaagaaaggtttaactctgtgagatgaatgcacacatcatgaagcagtttctcaaaatgttctttctacttttcatctgaagttattttgtttttcaccataggagttaatgcactcccaaatatccctttgcagattctgcaaaagcagtgtttccaaactgctgaatgaaaagaaagttttgtctctgtgagatgaaagcacacatcacaaaacggtttgtcagatagcttccttcaattttttatcytgggatatttgctttttttgcccttggcctcaatgagctcccaaatggaatggacaaaaccagtgtttccaaactgctgaatcaaaagaaaagtttaattctgtgagatgaaaacacacatcacaaagcagtttctcaaaagcttctttctactttttatctgaaga

SEQ ID NO: 881089 - DNA, 685 bp, Homo sapiens
ttaatcctttcttctcactcagcattttggaaacactgtttttgtagaatccattaaggggtattttggaatgcctggaggtctatggtgaaaaagaaaatattttcacataaaaactagaaagaaattttctgagaaaatgcttgtgatgtgtgcactcatctcacagagttaaacctttcttttgattaaacagtttggaaacactgtttttgtccattctgcaaatggacatttgggacctcactgagggcaaaggagaaaaagtgaatatccgaggataaacactaggaggaagctatctgagaaactgctttgtgatatgtgcatttatctcactgagtgaaacaattattttcattaattagtttggaaacactgtttttgttgaatctgcaaagggatacttggaagtgcattgaggcctatggtgaaatggaaaatatcttcagataaaaagtagaaagaagatttctgaraaactgctttgtgatgtctgcattcacctcttgaagtgaaacctttcttttgattcagcagtttggaaacactgtttttgtccattatgtgaatggacattttgtagctgattgagacaaatggcaaaaagcgaatatcccagggtgaaaactagaaggaagttatccgagaaaccactgtgtgatgtgtgcattcatctcacaga

SEQ ID NO: 881090 - DNA, 606 bp, Homo sapiens
gtggaaaaggaaatatcttcacataaaaactagataaaagcattctcagaaacttctttgggatgtgtgcatcccactcacagttttgaatctttcttttgatagagcagtttagaaacactctttttttttagaatctgcaaatggatatttacagcgatttgaggcctactgtggaaaaggaaatatcttcacataaaatctagacagaatcattgtcagaaacttctttgtgatgtgtgcattcaactcacagagttgaaccatacttttgwtagaggagttttgaaactctctttttgtaaagaatgcaagtggatatttggaacgttttgaggcctgtggtggaaaaggaaatatcttcacataaaaaccagacaaaagcattctcagtaacttctttgtgatgtgtgaattcaaatctcagtgttgaacctttcttttgatggagcagttttgaaacaatctttttgtataatctgcaagtgaatattttgagcgctatgagcactatggtggaaaaggaaataccttcacataaaaagtatacagaaactttctcagaaaattctttgtgatatgtgcattcaactcacagaattgaaa

SEQ ID NO: 881091 - DNA, 477 bp, Homo sapiens
gtttctgagaattcctctgtctagttttatatgaagaaatcccttttcccacaaaggcctcaaagaggtccaaatagccacttgaagattctataaaaagagtgtttcaaaactgttttatcaacgggaatgttcaactctctgttgaatgcaaacatcataaagtagtttctgagagtgcttctgtctagtttttatgtgaagatatttccttttctaccttagacctcaaaaagctctaaatatacacttgcaatttctacaarcagattgtttcaaaactgctctatcaaaagaaaggataaactcagtgagttgaatgcacacatcacaaagtagcttctgagaaagattctgtctagtttttatatgaagatatttccttttctacctcaggcttcaaagcgctctaaatatccacttgcagattctacaaaaagagtgtttcaaaactgctctatcaaaaggaaggttcaa

SEQ ID NO: 881092 - DNA, 592 bp, Homo sapiens
attcttcaaaaagagtgtttcaaaactgctctatcaagagcaatgttcaaatctgtgagttggattgaaacatcacaaagtagtttctgagaatgcttctgtctagtatttatgtgaagatatttccttttctaccataggcctcaaagcgctctaaatatacamttgcaaattgtataaaaaaagtgtttcaaagctgctctatcaaataaagtttaaactctgtgagttgaatgcatacatcacaaagtagtttctgagaatgattctgtctagtttttatatgaatagatttccttttctgccataggcctcaaagcgctctacatatgcacttgtaaattctacaaaaagagtgtttcaaaactgctctatcaaaaggaaggttcaattgtgtgagttgagtgcagacatcataaggaagtttctgagaatacttctgtctactttttatgtgaagatattcccgtttccatataaggcctcaaagccctccaaatatccacttgcagaatttacaaacagagtgtttcaaaactgctctatcaaaagaaagattaaactctgtaagatgaacgcacacaccccaaaa

SEQ ID NO: 881093 - DNA, 592 bp, Homo sapiens
attcttcaaaaagagtgtttcaaaactgctctatcaagagcaatgttcaaatctgtgagttggattgaaacatcacaaagtagtttctgagaatgcttctgtctagtatttatgtgaagatatttccttttctaccataggcctcaaagcgctctaaatatacacttgcaaattgtataaaaaragtgtttcaaagctgctctatcaaataaagtttaaactctgtgagttgaatgcatacatcacaaagtagtttctgagaatgattctgtctagtttttatatgaatagatttccttttctgccataggcctcaaagcgctctacatatgcacttgtaaattctacaaaaagagtgtttcaaaactgctctatcaaaaggaaggttcaattgtgtgagttgagtgcagacatcataaggaagtttctgagaatacttctgtctactttttatgtgaagatattcccgtttccatataaggcctcaaagccctccaaatatccacttgcagaatttacaaacagagtgtttcaaaactgctctatcaaaagaaagattaaactctgtaagatgaacgcacacaccccaaaa

SEQ ID NO: 881094 - DNA, 590 bp, Homo sapiens
ttcaaaactgctctatcaaaaggaaggttcaattgtgtgagttgagtgcagacatcataaggaagtttctgagaatacttctgtctactttttatgtgaagatattcccgtttccatataaggcctcaaagccctccaaatatccacttgcagaatttacaaacagagtgtttcaaaactgctctatcaaaagaaagattaaactctgtaagatgaacgcacacaccccaaaaagtttyggagaattcttcggtctacttttcatgtgaaaaaattaccgtttccaaagaaggccccaaagaggtccaaatatccacttgcagattcaacaaaaagagtgtttcatacgtgctctatcaaaaggaatgttgaactctctcagttgaatgcaaacatcacaaagtagtttctgagaacatttctgtctagtttttatgtgaatatatttccttttataccagaggcctcaaaaccctctaaatacacacttgcaaattctacaaaaagagtgtttcaaaactgctctatcagaacaacagttaaactcggtgagtttaatgcacacatcacaaagtagtttctgagaatga

SEQ ID NO: 881095 - DNA, 620 bp, Homo sapiens
aagagcaatgttcaactctgtgagtttaatcaaacatcaaaaagtagtttctgagaatgcttctgtctagcttttatgtgaagatatttccttttatgccataggcctcaaagtgctctaaatatccacttgcaaattctacaaaaagagtgtttcaaaactgctctatcaaaagaaatgttaaactctgtgagttgaaygcacacatcacgaagtagttactgagaattattctctctagtttttatatgaagatatttcattttctaccataggccacaaatcgctctaaatttccacttggaaattgtacaaaaagagtgtttcaaaactcgtgtatcgaaaggaaggttcatcaccctgagttcaatgcacacatcacaaagaagtttctgagaagtcctctgtctcgtttttatagaagaaattcccgtttccaaagaagtcctcaaaaaggtccacatatccacatacagatgctacaaaaggagtgttataaaactgctctatcaaaaggaatgctcaactctgtgagttgaatgcaaacatcacaaagtagtttccgagaatgattctgtgtagtttttctatgaagatatttccttttctaccataggccc

SEQ ID NO: 881096 - DNA, 620 bp, Homo sapiens
aagagcaatgttcaactctgtgagtttaatcaaacatcaaaaagtagtttctgagaatgcttctgtctagcttttatgtgaagatatttccttttatgccataggcctcaaagtgctctaaatatccacttgcaaattctacaaaaagagtgtttcaaaactgctctatcaaaagaaatgttaaactctgtgagttgaatgcacacatcacgaagtagttactgagaattattctctctagtttttatatgaagatatttcattttctaccatargccacaaatcgctctaaatttccacttggaaattgtacaaaaagagtgtttcaaaactcgtgtatcgaaaggaaggttcatcaccctgagttcaatgcacacatcacaaagaagtttctgagaagtcctctgtctcgtttttatagaagaaattcccgtttccaaagaagtcctcaaaaaggtccacatatccacatacagatgctacaaaaggagtgttataaaactgctctatcaaaaggaatgctcaactctgtgagttgaatgcaaacatcacaaagtagtttccgagaatgattctgtgtagtttttctatgaagatatttccttttctaccataggccc

SEQ ID NO: 881097 - DNA, 620 bp, Homo sapiens
aagagcaatgttcaactctgtgagtttaatcaaacatcaaaaagtagtttctgagaatgcttctgtctagcttttatgtgaagatatttccttttatgccataggcctcaaagtgctctaaatatccacttgcaaattctacaaaaagagtgtttcaaaactgctctatcaaaagaaatgttaaactctgtgagttgaatgcacacatcacgaagtagttactgagaattattctctctagtttttatatgaagatatttcattttctaccataggccacaaatcgctctaaatttccacttggaaattgtacaaaaagagtgtttcaaaactcgtgtatcgaaaggaaggttcatcaccctgagttcaatgcacacatcacaaagaagtttctgagaagtcctctgtctcgtttttatagaagaaattcccgtttccaaagaagtcctcaaaraggtccacatatccacatacagatgctacaaaaggagtgttataaaactgctctatcaaaaggaatgctcaactctgtgagttgaatgcaaacatcacaaagtagtttccgagaatgattctgtgtagtttttctatgaagatatttccttttctaccataggccc

SEQ ID NO: 881098 - DNA, 657 bp, Homo sapiens
acagctctataaaaaggaaggttcaactctgtgagttgaatgcagacatcccaaagaagtttctgagaatacttctgtctaatttttatgtgaagatattcccgtttccaaagaaggcctcaaagctctccaaatatccacttgcagagaatacaaacacagtgtttcaaagctgttttatcaaaagaaaagttaaactytgtgagctgaaagcacacattacaaagtagtttctgagaatgattccgtctagtttttctgtgaagaaatttccttttctaccttaggcctcaaagtcctctaaaaacacaccagcaaattctacaaaaagagcgtttcaaaactggtctatcaaaacaaatgttaaactctgtgagttaaactcacacatcacaaagtagtttctgagaatgattctttctagtttttctatgatgatatttctttttatgccgcaggcctccaggcgctccaaatattcacttggaaattctataaaaagagggtttcaaaactgctctatcaaaaggaaggctcaaatctgtgagttgaatgaacacatcacaaagtaatttctgagaattcttctgtctagtttatttgtaaagaatttcccctttccaacgaaggcctcaaagaggtccaaatatactcttg

SEQ ID NO: 881099 - DNA, 477 bp, Homo sapiens
aaactcctcaatcaaaagaaaggttcaactctgtgagatgaatgcactcatcatgaaaagtttctccaatttcttctgtctagttttcatgtgaagatatttcctttttcaccatatgcctcaaagcactccaaatatccatttcaggattctacaaaaagactctttccaatctagtcaatcaaaagaaagtttcaactccttgaaacatcacaaagaarattctcagaacgtttcagtgtagtttttatgtgacaatatttcctattgctccttaggccccaatgggttcagaaatatgcctttgcagattctacaaaacgacggtttctaaactgcttaatcaaaagaaaggttcatgtctgtgagatgaaggtgcacattacaaagaagtttctcagaatgcttctgcctactttttatgtgaagatatttcctttttcaccataggcctcaaagcgctccgaatatccattt

SEQ ID NO: 881100 - DNA, 604 bp, Homo sapiens
gatgaaaactcacatcacaaagtagcgtcttaaattgttcatgtcgagcttttatgtgaagatatttctgatttccccaaatgcctcaatgggctcacaaatttcccttttcaaattctacaaatcaactatttccaaactattcaatcaaaagaaatattcaactctgtgagatgaatgcaaacatcacaaagaagtttctcagaatgcttcagtccagatattatgtgaagatatttccttttcaaaaataggcctcaaatcactccacatatccacttgcagatactataaaaagactgtttcaaaaccgctcaatcaaaagaaaggttcatctctatgagatawatgcacaaaacactaagaagtttctcagaaagtttctgtctagtttttatgtgaagatatttcctatttccccataggcctcaattggctcaaaaatttccctttgcagattctacaaaaagagcgtttccaaactgcttaatcaaaagaaaggttcaactctgtgagatgaatgcacacatgacaaagtagtttcccagaatgcttctgtgtagttttcatgtgaagatatttccttttccaccataggcctcaa

SEQ ID NO: 881101 - DNA, 691 bp, Homo sapiens
  misc_feature 1, 2, 3, 4: n = A,T,C or G
nnnnagggagaaaattttcatttgcaatgtcgatgggaggatttgggtccttatcctggaaggggcatattaattaccaatggagactgggtttttgtggaagaagtaactggatcatgttttcttagataagggcgacaaaagacktcgtagaacttgccccacttttattaaggagcagaataaatattgcagaacaagcttaacaagacagtgggagaccaaaaatacgattcgtttctgttgcatcctacaagtccctgcttgttcaatatgatggtgtaatatatacacaatttccaaaattgggatcatatgctacatggtattcaaatctttttttttctcaaagaataatatatcatgaagtttttcccttggaagaaaatattcatctacaagtcgaacataccaccatctggacatgctgtaatttatttgcccaatatcgtattcaatgtttgctcttgcaaatcacactaaaatcaaatatcctatgcataactctttgtttgatttgacatatttgattccttcctaaggataaattccaagaagtggaattgctagactaatgggtagaaacctttttaaggctttttatctctatcatcaaagaggcgcaggatctcgaaacacgttttcactaagtaggactgagttgtccagaaaaagcctgaagaggctggat

SEQ ID NO: 881102 - DNA, 579 bp, Homo sapiens
taattctatttaaccatatcatattgtttgtattacattgtcacataataaaacctaaaatattttaaattctataagccattacacatagttttatgtagtcaatatctttgtatgtttcttcacatgtttgtcttgtccagagtgcttgagtctttcctgcatttccattttatgtgttggttttttttttttttgattgtttgttgttataggaaaattttccttcttttgcagaatgctctttgtgaaggtctgttggcaatgacttttttcattaaaaaaaccatttaaaaatattttttaaaggaatattttggtgattgtagagttgtaggttagcaggttttttttttttttttagcacttagatgtcattgcattgccttttttgtaaatatttttcatgttgagaagytggttacccttgaaagtaattggccagtcttattactgtcctttgaaggtttttgtctgctttaaagagtttcctcgttgacttagatgctgagaagttttaccaagatgagcctaggtggtattctttttatttatcctactcggagtttgctgaacttt

SEQ ID NO: 881103 - DNA, 664 bp, Homo sapiens
aattattaaaaagtcaagaaacaacagatgctggcgaggctgtggagaaacaggaacacttttatactgtcagtgtggtgattcctcaaagatctggaaccagaaatatcatttgacccagcaatcccattactgggtatacacccaaaggaatataaatcattctagtataaagatacatgcacatgtatgtttattgcagcactattcataatagcaaagacatggaaccaacccaaatgcccatcaatgatagactacataaagaaaatgtggcacatatacaccatggaatactatgcagtcaaaaaggaatgagatcatgtcttctgaagggacaaggataaagctggaaaccatctcagcaaaataacacaggaacaaaaaaaycaaacaccgcatattctcactcataagtgggagctgaacaatgaggacacatggacacagggaggggaacaacacatatcagagcctgtcggttgtgggggctagtggagggagagcattaggaaaaatagctaatgaatgcggggcttagtacctcggtgacaggttgataggtgcagcaaacaaccatggcacacatttagctgtgtaacaaacctgcatgttctgcagggttttctaaaagtaaaattaaaaaaaaaaaaaaaatgaagaa

SEQ ID NO: 881104 - DNA, 571 bp, Homo sapiens
  misc_feature 20: n = A,T,C or G
aaggtataaggaaaagcctntactgcttggctgctgtaccttctacattttgttatgcagatagtatatatttaaaaaataaaacttgaataaaataaattaataaaggtccccaaatatctttcactgcccgtattagttkgttttaatgctgctgataaagacatacccaaaactgggaataaaaagaggttcaatgggacttacagttccacatggctggggaggcctcagaatcatggcgggaggtaacaggcacttcttacgtggtggtggcaagagaaaaatgaggaggaggcaaaagtggaaacctctgataagcccatcagatctcatgagacttattcactgttgcgagaatagtaggggaaagactggtctccacgattcagttacctcaccgtgggtccctctcacaacacctgggaattctggaagttttgagtggggacccagccaaaccgcatcagtgtcttaccacccagcattatgaacgttatcttttgaactgtatttcaggtttaactgtataatttaaatattatttctttcatcatgcttttatatttta

SEQ ID NO: 881105 - DNA, 571 bp, Homo sapiens
  misc_feature 20: n = A,T,C or G
aaggtataaggaaaagcctntactgcttggctgctgtaccttctacattttgttatgcagatagtatatatttaaaaaataaaacttgaataaaataaattaataaaggtccccaaatatctttcactgcccgtattagttggttttaatgctgctgataaagacatacccaaaactgggaataaaaagaggttcartgggacttacagttccacatggctggggaggcctcagaatcatggcgggaggtaacaggcacttcttacgtggtggtggcaagagaaaaatgaggaggaggcaaaagtggaaacctctgataagcccatcagatctcatgagacttattcactgttgcgagaatagtaggggaaagactggtctccacgattcagttacctcaccgtgggtccctctcacaacacctgggaattctggaagttttgagtggggacccagccaaaccgcatcagtgtcttaccacccagcattatgaacgttatcttttgaactgtatttcaggtttaactgtataatttaaatattatttctttcatcatgcttttatatttta

SEQ ID NO: 881106 - DNA, 610 bp, Homo sapiens; identical to SEQ ID NO: 870438

SEQ ID NO: 881107 - DNA, 646 bp, Homo sapiens
cgttgtttttatgagtttgggcaaaactcttcttttttacaggcctcaatctaacaatttgtataaaaggagatcagtgaatatgttagtcaggactctgtctgaactaaatgtagaaatacacatcaaaatacattaagaaaatattaaatgtatatgttcataaaactgaaaattctaggcttataactcactctacgtggggctggatcaagaggcttgatttatgtaatcaggcatttttcttctccagcctcagttctgctcttttcatagttatgttcatttgattttttattggctctagggttttttatttcatcttctaaatgaagagttttcttccctgataattataataaaagctctgaaatggagcctcattgatctgacttgagtcatatactctaccttaatcattatacattagtttattaatttatttgctagttactatttgagctytactatgtgataggcactgttctaaacatttgtgatacaatgacgagcataatatacataaacatataaaatagctgcttttataaagcattcattctcatgaaacagtcaggcaatacagtaatgcatgaataaaaatataatattctgtcattcttgtcatgttacaaagaaaaataaa

SEQ ID NO: 881108 - DNA, 629 bp, Homo sapiens
ccagatgttcccttctgagacttcaagtcttgtcttcttttagcccattctaacaatggtcattcaaatactagaatagataaagataaaaagaggagaaagaaacctcaaagtagtcagagaaaacgtccacctataatttatttattttatttatttatttatttatttatttatttatttacttttgagacggaggttcgctcttgttgcccaggccggggtgcaatggcgtgatctctgctcactgcaacctccgcctcttgggttcaagtgattctcctgtctaagactctagagtagctgggattacaggcatgtgccaccatgcccagccaatttttgtatttttagyagagacggggtttcaccatgttggtcaggttggtctcaaactcctgacctcaagtgatccaccactttggcttcccaaactgctgggtttacaggcatgagccaccacatcgggcctgatcatttaaatactggtggttgaatattaagtttgaatattagtttttagcttgaactattagaaatatggtaacaaaaatgatagaaatgtatagttgccaagaacattagaaaaattgtgaatttcatttgagagaatcttttactctgaactt

SEQ ID NO: 881109 - DNA, 536 bp, Homo sapiens
gctgctgtaagcttattgcttcatctgtaagcggtggtttgtaattcctgatcttcccacctcacagtgatgttgtggggatccagtgagatagaatacatgtaagtgtggttttgtaatttaaaaagtgctatactaagggaaagaattgaggaattaactgcatacgttttggtgttgcttttcaaatgtttgaaaayaaaaaaaatgttaagaaatgggtttcttgccttaaccagtctctcaagtgatgagacagtgaagtaaaattgagtgcactaaacaaataagattctgaggaagtcttatcttctgcagtgagtatggcccgatgctttctgtggctaaacagatgtaatgggaagaaataaaagcctacgtgttggtaaatccaacagcaagggagatttttgaatcataataactcataaggtgctatctgttcagtgatgccctcagagctcttgctgttagctggcagctgacgctgctaggatagttagtttggaaatggtacttcataataaactacacaa

SEQ ID NO: 881110 - DNA, 641 bp, Homo sapiens
caaaggtttaatatccagaatttataaggaagttaaacaaatttacaagaataaaacaaacaactccatcaaaaagtgggtgagggatatgaacagatacttctcaaaagaagacatttatgtggccaacaaatatatgaaaaaaaaaagcttatcatcactggtcattagagaaatgcaaatcaaaaccacaatgagatatcatctcatgccagttagaatggctgtcattaaaaagtcaggagacaacaggtgctggagaggatgtggagaaataggaatgcttttacatggttggtgggagtgtaaattagttccaccattgtggaagacagtgtggcgattcctcaaggatttggaaccagaaataccatttgacctagcaatcccattactgggcatatacccaaaggattataaatcattctataaagacacatgcacatgtatgcttattgcagcaytgttcacaatagcaaagacttggaaccaacccaaatgcccatcaatgatagactgggtaaagaaaatgtggcacatatacaccatagaatactatgcagccataaaaaaggatgagttcatgtcctttgcagggacatggatgaagctggaaaccataattctcagcaaactaacac

SEQ ID NO: 881111 - DNA, 640 bp, Homo sapiens
agccactttggaagacagtttgacagttttctacaaaactaaacatgtcttaccccgcagtccaacaactgttctacatatttacacaaatgagttgaaaatatatccacacaagaaccagtacacaagtgtttatggcagcttaactcataattacctcaatctgaaagtgaccaagatgtacttcaaaatatgaaaggataaaaaactagtatatccatacaatggaatattattcagtgataaaaagaaatgagctatcaagatatgaaaagacatggaagaaccttacacgaacatttctaaatcaaagaaatcagtctgaaaagcgacatactatatgattccaactatacggcactctggaaaagggtaaactataggaatagtagatcagtggttttccagggacttgggggaaggagatgaatgattaataattggagcacagtgaaattttaagagtaaaactttcttatataayaccataaagttgagtacatgacatgcatttgtcaaaatctatagaactgtaaacacaaagaatgaaacaatgtaaactatgtagtttaaataataattatgtgtttatattagttcatcagttgtaacaactataccacactaatacaaaatgtaa

SEQ ID NO: 881112 - DNA, 630 bp, Homo sapiens
ctattggtgctaaaagaaaaaataaaaatatttaccttcattagctcaatagattagcccaaggtagctgaaaggagatgttgagagggggctttagaggccctggttctcatcctcactcccccactgattcccagtgggacccaagcaggctgtcatcagactcagtttacccacatcgctcatgagccatcctcttcctaagaccactgtaaggctgaatggatttgcatcctcaagagctgtggctcctaaatctcaagtgccgctcccgcactctctgtgtgctcccttactgtgcaygatgactatggttattgaaataaagaacaaacacatatgttcttggggcttcagctccctccagatgaccatgagctctaatgaatgcacatgtgtccagcctcccagaagccttcctccctaccctctccatggaccctggaacttctgaacgccaactgtttactagggaaggacacctctgggtggattcgctttaatgactgtctcttgacccactatgtcctcaagaagaactttacgatgggctctcttggtcaaaattgaatccctgaaaagctggccggtgtgagacttttccagccctgtttggatgaaggactcttc

SEQ ID NO: 881113 - DNA, 684 bp, Homo sapiens
gatactatcctccttttataactgtgaaggtgatgatcttaaaaatgtaccatgatataacttatgagccctttaagacttttttggacacttgaatttgtccaacatgggcatcagtgtgctctgtaggtggcttaagttgctgcttgagtggcagatccattccctggctgggttgagcaggtcaggggacaacactactaatccccatatcattcatgggggttgggatcagtaccatcagaactgaagaaggccaatcccacagcccccagcctcatctggcatctgtaagagctgagggctctatgttttaggtaacctgttacccctttgtggcacatgttgaagatcttggtttagtggttctctgggagtaattaatatcctgaggtattgtggggacacttcttcatgggaacccaaaagatctgacaaagaccttgaagtctgagaaggtcatgacactggtgcttgagtccagcaagtaccctttctctctaattgcaggcttcagggmcacagactgacttggccctggaaggatcgttaggaaaggagccataaccacactcaattcagagtgctccagatgtagtgttacatctccctgcccctcttaccattcattgtcatcgttcctgttaccccatttgaaactgttttcttcaacatttcatattt

SEQ ID NO: 881114 - DNA, 608 bp, Homo sapiens
taagatcaactatctcaagagatggagctcaccaggtgcctctactaatcctttcagaacctgaagcgagcataggctctacagagtctaggatttttttaccttaaaaaacagagagacaaagatgtgcttaataatgtagacctaaaaagtgtgactgtactgctttttcaggggaaaatgatgtgattctatgccttagggttagtgaatgctggttgaayacagagaaataacctgagaacatttcaggatcccagatctgatccactattaaagggaaggagggttggaagcatgctgcctttgaggtgttcccctcctcaccttcttgggaatctcagccatgtgcctacggtaatgacatcctggtttcctccagtcttgtgggaagagattgtagagaatttcctgctgagggaaatgaaaagcctatagcattgagattctttctcagaaatccagaaaagaaaaaagagaaactcatacatgatggtggactttgagcccagatggcttggatttgaatcccagcttggacacttactagctgtgcaatgaagaagtgaaaactcatgggcctaacatcttcctgtgtaaggtaaaga

SEQ ID NO: 881115 - DNA, 598 bp, Homo sapiens
atatatataaaatatattatatagtatatattataaaatgataaatggtattattactatttacatcagaaggtgttgtaggaagatcaaatgagttaaataatgttaatgtattattatattagttaaatattaataaaattaatatattatatagtatatattatatatgagttaaataatattaatatctagtatatattataatatttatatataaggagttaaataatattaaygtattacatagtatatattataaactgttaaatagtattaatactatttaccttagaaggtgttgtagaaagatcaaatgagttaatacgtgtcagaaacttaagacaccacctgacacagcactcaataaatgctagtgttgccattactatttcctcatgatttctcatatttgcattctactggacagttggggtcagccaggctggtgagctggctcttgggaccacatgaggattgtaaggtctatggagtctggggaaatgaggcatgatactatcctccttttataactgtgaaggtgatgatcttaaaaatgtaccatgatataacttatgagccctttaagacttttttg

SEQ ID NO: 881116 - DNA, 598 bp, Homo sapiens
atatatataaaatatattatatagtatatattataaaatgataaatggtattattactatttacatcagaaggtgttgtaggaagatcaaatgagttaaataatgttaatgtattattatattagttaaatattaataaaattaatatattatatagtatatattatatatgagttaaataatattaatatctagtatatattataatatttatatataaggagttaaataatattaacgtattacatagtatatattataaactgttaaatagtattaatactatttaycttagaaggtgttgtagaaagatcaaatgagttaatacgtgtcagaaacttaagacaccacctgacacagcactcaataaatgctagtgttgccattactatttcctcatgatttctcatatttgcattctactggacagttggggtcagccaggctggtgagctggctcttgggaccacatgaggattgtaaggtctatggagtctggggaaatgaggcatgatactatcctccttttataactgtgaaggtgatgatcttaaaaatgtaccatgatataacttatgagccctttaagacttttttg

SEQ ID NO: 881117 - DNA, 643 bp, Homo sapiens
tctatacttctgaagaatagttgcaacagtttcaatgcaataggagttattggaaaattaagtatagcaggacaatcaccctctgggtcagtgtacacactgtcattgcctttttctgaaaacatgagaacaatcacctgagaatctatgaattgtgatattcaccaacctggctgtattattcgtcttattgccagaatgaataactggcacaaagtagctactcggaaagtgtttgttaaactgtgctggatattgcaccaatctgtctattttgcccacatattagatctcaaatgaattagggatctccctagcctcagtttcatccctaataaaatacagtgactttatcttctactaagtatctcccaaaatatatctcatagaatamtgattattaaatacataggaggagtgagttctatcatccagatatgggaacaattctgtttgaaacagtgataaatttttagctgtaagacttctcagggtatttaacattaaaccatccattgtatctattatggaagacggacagtatttctcaatttatttgacgttagaatgatttttaattaaaatattacagtaggttgattaagccttctcatagttattgaacattaaatatcatgaattt

SEQ ID NO: 881118 - DNA, 523 bp, Homo sapiens
ctagtctcttgctgtccctgccggcagaccactctgtctcctacagggcatgcatgtgcaggatcaggtgatatgcgtgatcagtggctgcagcctagaaagatggcagagcaagagcaaagaaaaaaattccctttgattccagaatatctcctgaaaaagatgaagacttttcaagccctcaaagccatccaggcaaagtargcacttctggtaaagaatgagcagaggaaaggaagaaggctcaggtttaagcgactggaattcgtcctacatgattcctagcagcagaaatgtggcagggtgcatctcctatgactagaagtgaagcctcatgccttagaattgccagataaacttttcttggcctctgttgtatacatccaaaggattaatggggtgagttcactggtgcagaggaacactgcaagagttctgaagattttctgtggtgtctgtcaaagtcatcccccagagcctaaaagtggaaacttatgtgacctggggatttccaaatctgaag

SEQ ID NO: 881119 - DNA, 605 bp, Homo sapiens
gctataaacattcatgtacaggtttttgtgtgaacatagctagacagaccctgttaactcctctgctcacaatcttctaatagcatctcctctcaattttttaaagccaaattgtcttacaatggtctgcaaagccctacacaatgactccaggctcatctccaaccactcaccccttgcttacaacccatcggcaaccctaatcttattgttctttctccaacaaaccaggcacattctgcctcaatgcctttgcatttgatgttccttcagcccagaatgctcttcccacagatagctacatgacctaccccctcacttccttaaagtctctgcttaaatgtcaatgaactgattagagagtatatccctatatataaaatatatattcccatatatataaaatatcaatccccagagatcctcctactgytgcactagacaatctctattttcttaccctgtatttccctctctatcatcagacatgttatatatttattgattcactgtttgtattatgtcactaaaatctaaattctactcaagcagggactttcttttgtccactactgtatccccaacacttagaacaaagtgtggca

SEQ ID NO: 881120 - DNA, 663 bp, Homo sapiens
gtctgatttacatcactgggatacccttttgcttgcaggttctacccagagctctgagggtctttcacccagcaggggccagtcccacagcgtgtgcccccacagctcactctgatccatcctgggtcctgccactcctgggtcttccaaccaggctctcataacggatcatacctgctctgaggggagttcacagtttaactaaagggactcagagagggcccctcccttgtcccaagaggagagccccactccccttttcccagactaatttactgacctctgaactgtaggagtgcagggtgctccacccccactccaccttaggacacaggcttacaaaacttaaaacacttctgtgtcctcaagataatcttggggaggaaactgaggctctgagaggggtgtgctctagttgcccagggccccagttcaaatcttggttgttggttgttctgaccctttccattacaccatcccattcctctccatccaaatctccttggaggggawggcaattaaccctcagtccctcagaggaccaccagctgcagatcctaagaatcaggaaggtacagtaccaaaggcctttccatgacatctccagttttcccaggtccacctcagagggactctgtcaggtaaccaccacccaggagcagc

SEQ ID NO: 881121 - DNA, 548 bp, Homo sapiens
ctcacagaggtaaatgtttctttgcattgaacagtgaaaactctgttcttgtagaatctgcaaagtgatatttgtgagtgttttgaggcctatggtgaaaaaggaaatatcttcagaaaaactagacagaagctttctgagaatattctttgtgatatatgcattcatctcamagaattgaacgacctctttgtttgagcagtttgggaacagcctttttgtagattctgcaaagggatatttgtaagccctttgaggactatggtgaaaacgtaaatatcttcacataactagacagaaggttgctgaaaagctgctttgtgatgtgtgattcacctcaaagaggtcaaagtttcttttcattgagcagattggaaacactgctcttgtagaatctgcaaagggatatatttgagtggtttcaggcctatggtgaaaaaggaaaaatctccacataaaaactagacagaagcattctgaaaaacttgtttgtgattggtgcattcatctcacacagttgaacctcacttttgattgagcagtttgga

SEQ ID NO: 881122 - DNA, 548 bp, Homo sapiens
ctcacagaggtaaatgtttctttgcattgaacagtgaaaactctgttcttgtagaatctgcaaagtgatatttgtgagtgttttgaggcctatggtgaaaaaggaaatatcttcagaaaaactagacagaagctttctgagaatattctttgtgatatatgcattcatctcaaagaattgaacgacctctttgtttgagcagtttgggaacagcctttttgtagattctgcaaagggatatttgtaagccctttgaggactatggtgaaaacgtaaatatcttcacataactagacagaaggttgctgaaaagctgctttgtgatgtgtgattcacctcaaagaggtmaaagtttcttttcattgagcagattggaaacactgctcttgtagaatctgcaaagggatatatttgagtggtttcaggcctatggtgaaaaaggaaaaatctccacataaaaactagacagaagcattctgaaaaacttgtttgtgattggtgcattcatctcacacagttgaacctcacttttgattgagcagtttgga

SEQ ID NO: 881123 - DNA, 743 bp, Homo sapiens
gctttgtgatgtatgcattcatctcatagagtaaaacctttgttttcattcaggagtttggaaactctgtttttgtagaatctgcaaagggatatatgggagcgcattgaggcttacattgaaagggaaaatatcttcagataaaaacaagtaagaagctttctgagaaactgctttggaggtgtgcattcatttcattcattcatttcatttcattttccaagaaagatttaagcctttcttggaatcagctgtctggaaacactcttattgtctattctgtgaaaggatatwtggcagctcattgaggcctatgacataaaagcaaatatcccaagaaaaaaactactaggaagctactggagaaaccactttgtgatgtgtgcatttatctcacagagttaaaaatttgatttctttcagtagtttgaaaacactatttttgtagaatctgcaaaggtatatttgggagtgctttgaggactatgttgaaaaaggaaatatcttcagataaaaactagatagaagctttttgagaaactacattgtgatatgtgcattcatctcacagagttaaacctttcttttgactcagcagtttggaaacactgcttttgtccattctacaaatattcattcaggagattattgaggccattggcaaaaaaccgaatatccaggaataaaaactagaaggaaggtatctgaaaaactgctttgtgatgtgcacattcatctcacag

SEQ ID NO: 881124 - DNA, 655 bp, Homo sapiens
atggaggcgtatgatgaaaaaggaaatatcttcagataaatactagaaagaaactctctgacaaactgctttgtgatgtgtgcattcatctcacagagtttaaactttcttgggattcagcacattggaaaaactgtttatgtacaatctgtgaaagcatatttgatagctcattaaggccaatactaaaaagcaaatatctcaggataaaaactagaaggaagctattggagaaactgctttgtggtgtgtgcattcatctcacagagttaaaccttttttttcattcagcagcttggaaacrctattttggtataaactgcaaaggtatgtttgggagtgcattgaggcctacagtgaaaaaggaaatatctccagataaaaactagaagaatctttctgagaaactgatttgtgatgtgtgcattcatctcacagctttaaacctttcattggatttagcagtttggaaacactgttttgtccattctgcaaatggacatttgggagctcattgtggccaatggtgaaaaagtgaatatccaagaataaaaactagaaggaagctatctgagaaaccactttctgatgtctgcattcatcttgcgagttaaaactttcctttcattcaacagtttggaaaaaaattagaagc

SEQ ID NO: 881125 - DNA, 595 bp, Homo sapiens
aggtgctggagaggatgtggagaaataggaacacttttacactgttggtgagactgtaaactatttcaaccgttgtggaagtcagtgtggcagttcctcgggaacctaggactagaaataccatttgacccagccatcccattactgggtatatacccaaagtattataaatcatgctgctataaagacacatgcacacgcatgtttattgtggcactattcacaatagcagagacttggaaccaacccaaatgtccaacaatgatacattggatgagcaaaatgtggcacgtatacacaatggaatactacrtagccataaaaagtgttgagttcatgtcctttgtagggacatggatgaagctggaaaccatcattctcagcaaacttttgcaaggagaaaaaacaaaacaccacatgttctcactcattggtgggaagtggacagtgagaacacttggagaaaggaaggggaacatcacatactggggtctctcatagggtaggggaaatgggggagggatagcattacgagatatacctaaggtaaatgacgaattaatgggtgcagcacatcaacacggcacatgtatac

SEQ ID NO: 881126 - DNA, 688 bp, Homo sapiens
atcccttcacagattctaaaacaactgtgtttccatctgctgaatccaaagaaaggtttaactcggtgagatgaatgcacacatcccaaatagtttctgagaaagcctctttctagtttatattttaaaatatatcctttttcaccataggcctccaggtgctctcaaatatccctttatggattcttccaaaacagtgtctccaagcagctaaatgaaaagccatgtttatctctgtgaggtgaatgcacacatcacaaaactgtttctcagatagcttacttctagtatttatcctgggatatttgctttttctctgttagcctcaatgagctcctaartgtccacttgccgaatggacaaaaacagtgtttgcaaatggctgaatacacagaaaggtttaattctgtcaggggaaagcacatatcaaagcagtttctcagaaagattccttctagtttttttctgatgatatttcctttttcaccataggcttcaaagcgctcccagatattcgttcaaagattctatgaaaacagtgtttccaaactgctgaatgaaaggaaaggtttaactatgcaagatgaatgtacacatcacaaagtgatttctcaaatagctcccttctagtttttatcctgggatactcactttttcaccattggcctcaatgagctcccaaacatcc

SEQ ID NO: 881127 - DNA, 688 bp, Homo sapiens
atcccttcacagattctaaaacaactgtgtttccatctgctgaatccaaagaaaggtttaactcggtgagatgaatgcacacatcccaaatagtttctgagaaagcctctttctagtttatattttaaaatatatcctttttcaccataggcctccaggtgctctcaaatatccctttatggattcttccaaaacagtgtctccaagcagctaaatgaaaagccatgtttatctctgtgaggtgaatgcacacatcacaaaactgtttctcagatagcttacttctagtatttatcctgggatatttgctttttctctgttagcctcaatgagctcctaaatgtccacttgcygaatggacaaaaacagtgtttgcaaatggctgaatacacagaaaggtttaattctgtcaggggaaagcacatatcaaagcagtttctcagaaagattccttctagtttttttctgatgatatttcctttttcaccataggcttcaaagcgctcccagatattcgttcaaagattctatgaaaacagtgtttccaaactgctgaatgaaaggaaaggtttaactatgcaagatgaatgtacacatcacaaagtgatttctcaaatagctcccttctagtttttatcctgggatactcactttttcaccattggcctcaatgagctcccaaacatcc

SEQ ID NO: 881128 - DNA, 589 bp, Homo sapiens
tttcactgaaaggattatctctgtgagctgaatgaacacatcacaaagcagtttctcagagagcttctttctagattttatctgagtatatttcctttttcaccatgggcctcaatgcccttccagatatccctttgaagtttctatgaaaacagtgtttccacaatgctgaatgaaaagaaagtttaacactgtgagatgaatgcacacatcacaaagtggtttctcagatagctttcttctagtttttattctgggatattcgctttttcacctttgaactcaatgacctccaaagtgtccattcgcagaatggacaaaaagagtgtttccaaactgctgaatccaaagaaaggtttacctctgtgagatgaatgcacacatcacaaagcagtttttctgaaagcttctttctagttcttacctgaaaktattttctttttcaccataggcctcattgcattctcaaacatccctttgtggattctgccagtacagtatgccaaactactgtatgaaaagaaaatattaactctgtaaggtgaatgcacacatcacaaaggtttttctcagatagcttctttgtagt

SEQ ID NO: 881129 - DNA, 546 bp, Homo sapiens
caaaatatctgttcacagattccacaaaaacagtgtttccaaactactgaatccaaagaaagttttaactctgtacccatcacaaagcagtttctcagaaagcttctgtctagcttttatctgaagatatttcctttttcactataggcctcaaggcactcccaaatataacttcacagattctaccaaaagagtgtttccaaactgctgaatgaaaagaaagttttaactctgtgagatgaatgtagacttcacaaggcmgtttctccgataccttccttttagttttcgttgtgggatattcattttttccactatgccctcaatgagctctcaaatatcccattgcagatgtgaaaaaagcagtgtttccaaattactgaatccaaacaaacatttggatttctgagatgaatgcacacatcatgaagcagtttttcagaaatcttgtttctagtttttatctgaagatatttcttttttcaccataggcctcaatgtgctctcaaatatctctttgcagaatctaccaaaatggtgtttcca

SEQ ID NO: 881130 - DNA, 546 bp, Homo sapiens
caaaatatctgttcacagattccacaaaaacagtgtttccaaactactgaatccaaagaaagttttaactctgtacccatcacaaagcagtttctcagaaagcttctgtctagcttttatctgaagatatttcctttttcactataggcctcaaggcactcccaaatataacttcacagattctaccaaaagagtgtttccaaactgctgaatgaaaagaaagttttaactctgtgagatgaatgtagacttcacaaggccgtttctccgataccttccttttagttttcgttgtgggatattcattttttccactatgccctcaatgagctctcaaatatcccatygcagatgtgaaaaaagcagtgtttccaaattactgaatccaaacaaacatttggatttctgagatgaatgcacacatcatgaagcagtttttcagaaatcttgtttctagtttttatctgaagatatttcttttttcaccataggcctcaatgtgctctcaaatatctctttgcagaatctaccaaaatggtgtttcca

SEQ ID NO: 881131 - DNA, 620 bp, Homo sapiens
gaagatatttcctttttttcaccttaggcctcaaattgctgaggaatatccctttgcagattctagaaaaagactgtttccaaagtgctcaatcaaaagaaacgttcaactctgtgagatgaatgcacacatcacacagaagttcctgagaaatattctgtctagtttttatgtgaatatatatcctttttcaccatagtcctcaaaggrctccaaaatatccctttgcagattatagaaaaagactgtttccaaaatgctcaatcaaaagaaaggttcaactctgtgagatgtatgcacacataacaaagaagtttctcagaatgtttctgtctagtttttatgttgagatatttcctttttcaacataggccacaaacagctcacaaaaatcacttgtagatggttgaaaaagactgtttccaaactactcagtcaaaaggaagtttcaactctgtgagatgaatgcatacatcaaaaagtagcttctcagaaagcttctgtatagtttttatgtgaagatatttcctttttcaccttaggccacaaatatctcagaaacatccctttgcgtattctaaaaagactgtttccaaactgctcaatcaaaaataggttca

SEQ ID NO: 881132 - DNA, 620 bp, Homo sapiens
gaagatatttcctttttttcaccttaggcctcaaattgctgaggaatatccctttgcagattctagaaaaagactgtttccaaagtgctcaatcaaaagaaacgttcaactctgtgagatgaatgcacacatcacacagaagttcctgagaaatattctgtctagtttttatgtgaatatatatcctttttcaccatagtcctcaaagggctccaaaatatccctttgcagattatagaaaaagactgtttccaaaatgctcaatmaaaagaaaggttcaactctgtgagatgtatgcacacataacaaagaagtttctcagaatgtttctgtctagtttttatgttgagatatttcctttttcaacataggccacaaacagctcacaaaaatcacttgtagatggttgaaaaagactgtttccaaactactcagtcaaaaggaagtttcaactctgtgagatgaatgcatacatcaaaaagtagcttctcagaaagcttctgtatagtttttatgtgaagatatttcctttttcaccttaggccacaaatatctcagaaacatccctttgcgtattctaaaaagactgtttccaaactgctcaatcaaaaataggttca

SEQ ID NO: 881133 - DNA, 620 bp, Homo sapiens
gaagatatttcctttttttcaccttaggcctcaaattgctgaggaatatccctttgcagattctagaaaaagactgtttccaaagtgctcaatcaaaagaaacgttcaactctgtgagatgaatgcacacatcacacagaagttcctgagaaatattctgtctagtttttatgtgaatatatatcctttttcaccatagtcctcaaagggctccaaaatatccctttgcagattatagaaaaagactgtttccaaaatgctcaatcaaaagaaaggttcaactctgtgagatgtatgcacacataacaaagaagtttctcagaatgtttctgtctagtttttatgttgagatatttcctttttcaacataggccacaaacagctcacaaaaatcacttgtagatggttgaaaaagactgtttccaaactactcagtcaaaaggaagttycaactctgtgagatgaatgcatacatcaaaaagtagcttctcagaaagcttctgtatagtttttatgtgaagatatttcctttttcaccttaggccacaaatatctcagaaacatccctttgcgtattctaaaaagactgtttccaaactgctcaatcaaaaataggttca

SEQ ID NO: 881134 - DNA, 629 bp, Homo sapiens
tgtgccagttttcaaagggaatgcttccagttcttgcccattcagtatgatattgactgtgggtttgtcatagatagctcttattattttgagatacatcccatcaatacctaatttattgagagtttttaggatgaagcgttgttgaattttgtcaaaggccttttctgcatctattgagatattcatgtggtttttgtctttggttctgtatatgtgctggattacaattattgatttgagtatattgaaccagacttgcatcccagggatgaagcccacttgatcatggtgrataagcttttttatgtgctgctggattcggtttgccagtattttattgaggatttttgcatcaatgttcaccaaggatattgttctaaaattctcttttttggttgtgtctctgccaggctttggtgtcagaatgatgctggccccataaaatgagttagggaggattccctctttttctattgattggaataatttcagaaggaatggtaccagttcctccttgtacctctggtagaattcggctgtgaatccatctggtcctggactctttttggatggtgagctgttgattattgccacaatttcggagcctgttattgatctattcatag

SEQ ID NO: 881135 - DNA, 686 bp, Homo sapiens
ggagtactttggagcgcattgagatctatgttgaaaaaggaaatatcttaaaaactagaaagaaactttctaaaaaacttctttgtgatgtgtgcattcattttgagataaaacctttctttggttttagcagttggaaacacagttttggcagaatccatamagggatatttgggatctcattgaggccaatggtgaaaaaacaaatatcacaggataaaaactagaaggaagctatctgagaaactgctttgtcatgtgtgcattcatcgcacagagttaaatgtttctgtgtattcagtagtttgcaaacgctgtgtttgtccattctgcaaattgacatttggattctgtgaggcctatggcaaaaaactgaaaatccaaggataaaaactggaagaaagctacgtgagaaactgctttgtgttgtgagcattcacctcacagagataaagctttcttttcgttcagcagtctggaaaaactgttctggcagaatccacgaagggatacttgggagcaccttgaggtctattttgaaaaaggaaataacttcagataaaaactagaaagaatctttcagagaaactgcattttgatgtatgcattcatctcacagagttaaaccatcctgtggattcagcagttttaaaacactgtttttgtccattctgtgaatggacatt

SEQ ID NO: 881136 - DNA, 654 bp, Homo sapiens
aagtagcactttgataaagacaggaatgatttcatgcattgattgtctagagcaaatatgctaatatctcaagaacctaaaaataagatcctaaatgaacccttaaactaataattaaacaattaccccttttcattcacttacttatggttyccactgcttgttatgagatatgggataataagatgattggaaaaagcttaattaggaggatatatatataaggaaagatttttctacataaatacaaaaagaaaaaaaacacgtgactttttcaatagatgtagaaaaggctttcaacaaaattgaaaaccgcttcatgttaaaaatcctcaataaactaggtattgaaggaacatacataaaaataataagagccaactatgacaaacctacagtcaacatcatactcaatgggcaaaagctggaaacattccttttgaaaactggcataagacaaggatatcctctcttaccactcctattcaacataatattgaaagtcctggctagaacaatcagactagagaaagaaataaagagcatccaaataggaagacaggaagtcaaactatccctgcttacagacacaatcttatatctagaaaactccatagtctctgcccaaaagctctgtacgcagataaacaactt

SEQ ID NO: 881137 - DNA, 614 bp, Homo sapiens
tgtgccatgaggaacagtgcattccagcccagataccatgcttttcccatggtcttcacaacctgcattccaggagattccctcgggtgactacaccaccagggccctgggtttcaagcacaaaactggggggccatatgggcagacaccaagctagctgcaggagcttttttccatatcccagtggcacctggaatgccagcaagacagaaccgttcactctcctggaaagggggctgaagcaagggagccaagtggtctagctcagtggatcccacccccatggagccgttcaagctaagatccactggcttgaaattctcgctgccagcacagcagcctgaagtcgacctgggacgcttcagcttggcatctgccattactgaggcttgaataggtggttttcccctcacagtgtaaacaaagcctcygggaagttcgaactggccagaacccaccacagttcagcaaagccactgtagccagcctgcctctctagattcctcctctctgggcaggatatgcctgaaagaaaggcagcagcctcagtcaggggcttacaaatcaaattcccatctccctgggacagagcaccagggggaaggggcagctgt

SEQ ID NO: 881138 - DNA, 591 bp, Homo sapiens
cacactttctttatccagtctgccattgatgggcattttggttgattccatgtctttgctattgtgaatagtgctgcaatgaacatacatgtgcatgtattttatgatagaacaatttatattcctttgggtatatacccagtaatgagattgttagattaaatgatatttctatttttaggtctttgaagaattgccacactgtcttccacaatggttgaactaatttacacttcaaccaatagkgtataagaatttcttttttatccacaacctcataagcatctgttattttttgactttttagtagaagccattctgactgctgtgagatggtatctcattgcggtattgatttgtactgttttaaagattgtgatattgaactttttttcatatgcttgttggccacatgtatgtcttcctttggaaagtgtctgttcatgtcctttgcccactttttaatgggattgtttgctttttttttgtaaatttgtttaagttctttaaagatgctggatattagaccctggtcacatgtataatttgaaaaaatttcctcccattctgtaggttgtctgtttactctgt

SEQ ID NO: 881139 - DNA, 588 bp, Homo sapiens
aaggggtattaaacaaaatggacaaaagagggacctattccacgcacatattctatctgccacctgacagctttgcatccataacctaatgagaaggggctgctagtcaacaccaaaccaatactctaccttggacatgctggtccatgaaaggacttcagtgtacttaaatgtcttccggaataaaagtagattgaatggatgaatgtattggtctatgtgtaagtgttctcagtttgactgtttaaaaaaaaattgcagtttattagaatagattaagttcttcttagctaattctttaactgttttactatgtgctaaattttaaagagaacttcttcaagtattcattaacaataattataatatctggacaatatttttgtattagtctcasttttctgtatttttttaattgagccaaatgactcatattgccattcctagaccctttgatttgtattcatccaataagtagatatcttcatagcattgataagcaacctgattttgatttggatgagcctcctcctgctcaagatgctgtgtttgccattgtaaagttaaaacagttataaaatacagttc

SEQ ID NO: 881140 - DNA, 605 bp, Homo sapiens
aatttgaccatttttgtatcccggtactattattatactgttttaattgttatagctttataagttttttggattggtgtttcagttatttattgctgcaaaacaaaacagtggaggttttctaaaaaatcattattttccatgattttgtgggcagccacaaaattccgtttcccatggtatcagcccaggcactggacratcatgaggtccaaaatagcctcattcgcatggttgactaccacagtgctagctgacaaatgggagctcagctggggttttcaactaaagcctttgtttttctccatgtgggtatctctatgtggctatttgagctttggaaagcatgataggtgggatccaagaagaaatattacaaaaagcaaaggcagaaattgcagatgtcttaaagtctagcctcagacatcactcaaagccacctctgccttattctattcctacaagttgattaaaagaaggtaaagtagactgcacctcttgatgggggagtggcaatgtcactttgctaaaaagtacctgggaaggaaaatagtgttgtgatcatctttggaaataacaatctattgcattctggcaggacaagc

SEQ ID NO: 881141 - DNA, 631 bp, Homo sapiens
aacaacaggctggaaagtgaccaagggctgactcagcagctttcaaactcttctgttgagtttaaaaaataaaatgcgaaagtagagagagaaaataggaaggaatagtccaagaaaggacgataaaaattaaataggccaggtgcagtggctcatgcctgtaatcccagcactttgggaggccgaggtgggtggatcatgaggtcaggagatcgagaccatcctggccaacatgatgaaaccctgtctctactaaaaatacaaaaattagctaggggtggtggtgtgtgcctgtaatcccagctactcgggagggtgaggcaggagaatcgcttgaaccagggactcggaggttgcagtgagccgagatggagccactgcactccagcctgacgacagagtgagactctgtctaaaaaaaaaaaaaagaaaaaaaaagaraaaaaaattaaataaactaataataaaatcataaaatctgggctgtgagttcacttctagaatgctaggtactcatggaaatttacctaaaaccaaaaaggtgaagtaggagctgaagacaggggtgggggacagaaggatggggaaatgggaatggggggcacagacaggtggaaaatttagaggaata

SEQ ID NO: 881142 - DNA, 601 bp, Homo sapiens
attggacccaaattcttttagcctccaaaagttggtgatgattttggatacttaatactaccaataaaatctaaataacaataatttatgattcttttgcatttgagggaaatatcacagccaggcatggtagaataygggccttagaaattaagacctaaattcaagttcctttgacacttgctaatcaagtcatcacaggtacatttcctggcttttctgaatttgaagtttctcatatgtaacacagatgtgtactattgactgctcatggtaattgggaggacgaaatgtgaaaagtactttgtaaactctaaaatggcaactacctcttcttttcaaaaagcccttagtgagatactgagtggggtttgttgttctatgtttggcatgagccaaaaagaaatcagtaacctccatgttacagaaccccaagcccattttacatcattagaagtctagaacatcgtctttgactttctgttttcacataggcacagcttcttccacctcatgttatctaagtctatgatttttatactgattatcacaatgtacaacagacataaagacaccgaccagcgaacactaaaacaaataa

SEQ ID NO: 881143 - DNA, 647 bp, Homo sapiens
ccctgatttgatcattatacattgtatccatgtatcaaaatatcacatgtaccccataaatggggctagcccatttatgtttagcataccaataatggaacattaagcatgcgggagttatttatgtcctaatgctcaaggtcatcacgaaggtctgtttgcaaaaattaaaaaaattgcaacctcaggcataaatgagttcatatgtatgattattatacatcaacttaaaaagacatttaygttcatatgtctttcagtactttaaataaaccaatcagggtcatccttttcatgaaaaactagtctttcaatattgtggccacagagatccaattctgggttttctaggaatgggtttgaactgggccagatccccaagggctgggtctgcttggaaggcttgtgaacactatgcctcagccatgtctcaaggaagtgctcagaaaacaagcagtgtcagggatggacacaagatgagcctgcaagggggtagacacagtcccctagcgacgaccttgttctcaggaggtatgagcaaagtccagtgggccaggcagcttgcatgaagtaaggagatcaccaggtcaaaggggcttagacgccagctgcctttatacccctagattggtagagggccacatctg

SEQ ID NO: 881144 - DNA, 573 bp, Homo sapiens
tgaaaacacaattgggattggaacccaggcacctcctaactctgtggaaatggacaagtagcttaatctctctgcatctcagtttcctaatagtgaccttttgcagtcaatccttcccccaactactggcctcaggcaactattgatctgccttctgtcactggtttcctaggatttcatgtaaatagaatgatacaatatgtgttccttgtcttgtgtctgacttcttttgttcawcatatttttgagattcattaatgttgttgtaatgtatcagtatttcattcatttttattgctaatttgtgttttactcatcagctgatgggcatttggattatttagtttggggctattaaggataatgctactatgaacatttatgtgcaaggctttgtgtggacattactttccaaacttttttttttttttttgacagagtcttgctctgttgcccagggtggagtgcagtggcgtgatctcggctcactgcaacgtccacctcccaagttcaagcaattctcttgtctcagcctcctgagtagctgggactacaggcgcccaccaccatgcc

SEQ ID NO: 881145 - DNA, 613 bp, Homo sapiens
tagtataccagtcattcatatacagtcataactggccaaccaaggtttacttcgtaggagggtgacagtttaccctttaataccacctaattaaaatacacaaaatgttctacacaaataacagcaaattgtttatttctaagaacataattttccttttataggaagctctcaacattaatttggagccacattttaattttataatgtaatcattcagtaaatggtcattagatattgggttatttggaaaattgtaaaaaatcagacttctgaccaygtcctttaaaataattaacttagctggaaacagtaaagcaagacttaaaaatacaaatcataacatgaaaattcaaatgattgtatactaaaacaattgtatgcaaataattaagaacagtgactataataaaaaagtttaatagatttgacaaaacatttaaagaatataacttacatatatgaaaataagacatcaaaacttgaattgaagctgtcaaactgtgaaaaacagtagtaaacaataaaaatcacttactcattggaaacactgcaaaatgtcattaaatcatttcagaaatgaaggtacattaatgaaaaataatcatagttt

SEQ ID NO: 881146 - DNA, 524 bp, Homo sapiens
acgtcctttgcaggaacacggagggagctggatggaggtcttcatccttagcaaactaatgcaagaacagaaaacaaaatactgcatgttctcatttacaagtgggagctaaattatgagaacacatgaacacatagagggaracaacagtcactggggcctctgggaagctggagggtgggaggaagcagaaggtcaggaaaaacaactaatgggtactaggcttaatagctgggtggtgaaataatctgcacaacaaacctctgtgacactagcttacctacataacaaacctacacatgtgccattgacctgaaaataaaagttaaaaaaatgataaaaaatacgtaagtaaaaatctttaaccaacacaaaatggttcatcccaagaatcatcttaatttaaaaatctttacatcttaagaagctacatgggaggctgaggcaggagactcgcttgaacctgggaggtggggttgcagtgaggcgagattgtgccattgcactctagcccaggtgactgt

SEQ ID NO: 881147 - DNA, 616 bp, Homo sapiens
cagaagggctagtctccatccttgaccttccttattaggacttttgtccctaaccagaagagctactgaggacctaaagcacaaggacaatgttcctgatatccaaaagtagagttttgattgtacttccaatcacaaccttgtaatgggcaatagtgcctccttaacactaaagaagtgatgagaacaataacaccataaactttacatacatgttatgtaaaataatcgttccctccagcttttctaaggcaattcagatttcaaacatatttttcccttctctcatacaccatcaaaatgtcctagaggatgcaatatttcagtttctaaatgacttctctcttagcatgtttctgctacccagtagtagttacaaattcttgatcagatatgtgctgacgatttttactcagaagcatggccmctataaataacctgaggactttggaaggctgactggggcacccagtcaccacgcctaacaaagataatcaaaagcaactaggctgagcatggtggctcacacctgtaatcccagcactttaggaggccaaggcaggcagatcacctgaggtcaggagctcaagaccagcctggccaacatggcgaaacc

SEQ ID NO: 881148 - DNA, 641 bp, Homo sapiens
cttcataatggtttgagaatgtcttctcaaatactgtgtaaagaataatccagtattggctttattagtgaaacaaaattgagaatatcttaaaataccgatatcaagattattaccccattcaaagatccagcagccagtcacttagtggactaaattcatcttgacattgttttgattttttatttaatttcatctaaggagagacaatgaggaaatagaagcactgaagtgttttgatgttatcactggagctcaagatctgtccatcctttttctcactttacgaccactaaatcctacatacctgacaaggcaggggctcttcccaataatggcaagcgcttccatcagagattatactttcttgggaagaaacatacatggttcacaaaaggcttcacagattactgatacttcaacctaatrcaaagtcctctttctcctcctaaattggagaatctctgatttaaaaacacaataaaatcttagagtttttctatttttttaaattttgaaggaaatctaagagagactcaaattcaaacttaggcaccttcaatgtgtttcaaaaaactcaactagtaatatctaaattttttccgtgagaactgctttgccttacatttaggatttcccta

SEQ ID NO: 881149 - DNA, 613 bp, Homo sapiens
accaagatccagcagaaaccaccttgccaaaagggctcaagatcatcacctctgaatcagagtccttagtttaggttcttatttagattcttcctagctaaaaagcaggccaccagaatagagtcacctcagcttttcctaaggagaccaactatatttggaaggcagtgtagaagtttatgtctaagggtattgtcaaaaatactggagattttgattgtgaacaactaaaaggagacaaaagtaggagaccagctacaagattatgtttataagagagaaacagggaaagaaacagctaagaagggccctcctaaagtataaggtcagactaagcctaaaatatctactcgtgcaaagcrgcccaacattaattggatcagactgttttataatacatgccccgttggtcaaaaacaatacaacaatcagctagaatttggtggaggtcaacaatggaggctgagtgtccgatcatgtgttagtctgttttcacgcggctgataaaaacataccagaggctgggtaatttataaattaaaaaaagtttaatggactcacagttccacgtggctgggaggcctcacaatcatggctgaaggcgaaatgcaca

SEQ ID NO: 881150 - DNA, 632 bp, Homo sapiens
tttatcctatatttcctttctgatatcttacaaatctttattgctccctgcttctactctttctttggctctctttcttccactgtggtcaaatagacattctcaaagctcagccgtccctttaaaatgaggctccttcaaaggaagtctcttgtggttaatattaagccatgatctctattagatttraaagccattgtaaaagatttccccaagcttagacaaaatagatgaaaaataatggaggaatttaggatagtcctggggatggggtggacgccatgctatcccttcaggaatgaaagtattaactgtctcaaggtcacccctgctttcctggggccagagtacacgcaatgtaatacattgttccttttttgaattttttagttcaaaacccagatcacattttcaggctttcttccttttaaaaatgagcatttaaatatacagttttccctctctaaaattatttagctatatcttatttatttaaatatgggtttcttaaatagtttaattgtatgttccttattgttgttataatttcttctttcatccttgagctattaagaaataaagtcacttatctccatcttaattaccttactatacaggggatacagtctgta

SEQ ID NO: 881151 - DNA, 622 bp, Homo sapiens
tgttaggttagttaacagtgacttccaaagatgctttttgtttatttcagtacaggccagagacagatattcaattgtttgctgccaatggtagctttattgcttcttgctatcctggaataattgaattttaacatttccttggaaaatattgtagtgttatgtaaatatgggccattgccacacaatatcttttatttccctgtctttgcttgtttcttttagccagaattatccaacaaaatctggccttaaaattgttttgttcaaacacactagtttcacagaacagaagtaaaaagtttaattaaggacaaggcataatattaacaacaaatgatttggtactgttttgttattagcaaaaaagttgctcaataacctaggcaaaaaatgacaatgaaatgaaagtagaccttttaaaagcaatttaaaataattaaattgtccayaataaagtggaaattaattatgatgattattaatgaaaagattattctgttttgtggagaagctgcttaagaagtgattagtatatatttcattaatatctttcttttggtgttggatagaattaacagatggaaaatatactttcagaatgcctgctaagttgtgacta

SEQ ID NO: 881152 - DNA, 613 bp, Homo sapiens
gattaacagcagatttctcagcagaaaacctacaagctagaagggattggggtcctatctttagcctcctaaacaaaacaattatcagccaagaattttgtatccagtgaaactaagcttcataaatgaaggaaagatayagtcttttctagacaagcaaatgctgagagaatttgccactaccaagccagcactacaggaactgctaaaagcggctctaaatcttgaaacaaatcctcaaaatacaccaaaatagaacctccttaaaacataaatcttacaggacctgtaaaacattcacacacacacacacacaccccaaggtactcaggcaacaaatagcatgatgaatagaatagtacctcacatctcaatactaatgttgaatgtaaatgacctaaatgctccatttagaagatacagaatggctgaatggataagaattcaccaaccaagtatttgctgtctttaagagactcacctaacacataaggacttccataaacctaaggtaaaggggtggaaaaagatattccatgcaaacagacacgcaaaagtgagcaggagtagttattcttatatcagagaaaacaaactttaaagcaacagcagt

SEQ ID NO: 881153 - DNA, 613 bp, Homo sapiens
gattaacagcagatttctcagcagaaaacctacaagctagaagggattggggtcctatctttagcctcctaaacaaaacaattatcagccaagaattttgtatccagtgaaactaagcttcataaatgaaggaaagatacagtcttttctagacaagcaaatgctgagagaatttgccactaccaagccagcactacaggaactgctaaaagcggctctaaatcttgaaacaaatcctcaaaatacaccaaaatagaacctccttaaaacataaatcttacaggacctgtaaaacattcacacacacacacacacaccccaaggtaytcaggcaacaaatagcatgatgaatagaatagtacctcacatctcaatactaatgttgaatgtaaatgacctaaatgctccatttagaagatacagaatggctgaatggataagaattcaccaaccaagtatttgctgtctttaagagactcacctaacacataaggacttccataaacctaaggtaaaggggtggaaaaagatattccatgcaaacagacacgcaaaagtgagcaggagtagttattcttatatcagagaaaacaaactttaaagcaacagcagt

SEQ ID NO: 881154 - DNA, 521 bp, Homo sapiens
ctttgctgcttagatttcttccaccagataccctaaatcatctctttgaagttcaaagttccacagatctctaggacagagggaaaatgctaccaatctctttgctaaaacacagcaagagtcaccttcactccagttctcagcaagttcctcatctccatctgagaccacctcaggttggacttcattgtccataacactatcagcattttggtcaaagccattcagcaactctctaggaagttccaaactttcccacatttttctgccttcttttgagccctccaaactstttcaacctctgcctgttacccagttgcaaatttgcttccacatttttgcgtatctgtatagcagcaccccactcctggtacaaatttattgtattaatccattctcacattgctgtgaagaaatgccagagactgggtaatttataaatgaaagaggtttaatcgactcacagttctgcatgaccggggagggctcaggaaacttagaatcatggtggaaagcaaaag

SEQ ID NO: 881155 - DNA, 600 bp, Homo sapiens
agaattttcattaactcttttcttctcctaaggtacggaaaagtttttaaaaaatattttttcctgcttattgatttgaagttttgctttaaatggaaaaaggtcctggttctcaaactgcctaagatttaggtggaagaagtttgaggctacacagagttctgaagggaatcagacaccaagaggagacatacgtgactgttcctcatagtgctaacctcctgtataatgtctgggcatttacacaatgtttacactgtgtttgtgtagtataaccaatcattttagattttcaagatatatatctctaagttggttgttattaatatcatgtatacttttctaccaaacttcgttttgtttctagctttgttttgttgttaatacaaaatcccagaatgatatgtcagtaagaaatgacctgatttgccaattgttcmgaatttttacctcatatcactagcgtttttagaggaaaaatatgaatgaaaaatggtgctcctctttgccctctcctgtgcagctgttcttcattgtttagagctttgccttgaggatccagagtgttgtttctccatcccgttcatccagtgtcccccg

SEQ ID NO: 881156 - DNA, 659 bp, Homo sapiens
caccagcccacacaggtgagaaaaaagccaacataagaactctagcaactcaaaaatcagagtgtcactttacctccaaatgactgcactagttctacagcaatggttgttaaatagaaggaaatggctgaaatgacagatatagaactgagaggtagaagaaaatgaagatcattgaaattcaatagaaagttgaacactatttccaagaatctgaggaatccattaaaatgattaaagagaaaaaaattagccatttgaaaaaacaaaacaagacaaacaaacaaaaaccaaacctagcaggtagagttacaaaatacactacaagaatttcataaaatgattggaaatattcacagcagaatggactaagccaagaaaagaatctcagagattgaagactgattatttaagttaacacagccagaaaataaataaagmaaagaagaattttaaaaaatgaaaggtcaggcatggtggctcatgcctgtacctgtaatcccagcactttgggaggatattgagaccatcctggctaacatggtgaaaccctgtctctactaaaaacacacacacaaaaaaattcactgggcatggtggcaggtgcctgtagccccagctattcaggagtctgaggcaggagattggtaggaacctgg

SEQ ID NO: 881157 - DNA, 529 bp, Homo sapiens
gccaagaaaagaatctcagagattgaagactgattatttaagttaacacagccagaaaataaataaagaaaagaagaattttaaaaaatgaaaggtcaggcatggtggctcatgcctgtacctgtaatcccagcactttgggaggatattgagaccatcctggctaacatggtgaaaccctgtctctactaaaaacacacacacaaaaaaattcactgggcatggtggcaggtgcctgtagccccagctattcaggagtctgaggcaggagattggtaggaacctgggaggtggagcttgcattgagccgagatcatgccactgcactccagcctgggctacagagcaagaytccatctcaaaaaaaaaaaaaaagaaaaaaagaaaaagaaaaaaaccttggagaaataagggattctataaaaaatttccccaatttcactagagagattgacatataaatttagaaaattcagataacccatgtaagatgctatgtaagacaaccattgcagagacacaaagtaat

SEQ ID NO: 881158 - DNA, 622 bp, Homo sapiens
agtctgttttcacactgctgataaagacatacctgagattgggtaaattataaagaaaaagaggtttaatgaactcacagttccacatgactggggagacctcacaatcatagtrgaaggcaaaagtcatgtcttacatggcaaaaggcaagagagagaatgggaaccaagcaaaagcagaaaccccttataaaaccatcaggtcgtgtgagacttactgactaccacaaggacagtataggggaaactgcctccatgattcaattatgtcccactaggtccttccataacacatggcaattatgggagctacaattcaagatgagatttgggtggggacacagagccaaaccatattattttgcctgtgtcccctctaaatgttgtgtcctcaagtttcaaaaccaatcataccttcccaacagttcctcaagtcttaattcatttcagcattaactcagaagtccacagtccaaagtctcatctgagacaagtcccttccacctataagcctgtaaaatcaaaagaaagttagttactttcttgatactatgggggtacaggcattgggtaactatacccattccaaacaggacaaattggccaaaacaaaggggttaca

SEQ ID NO: 881159 - DNA, 584 bp, Homo sapiens
attagctgtttggctctttgcactttacaaagccttctaacagtcctggggctgagagacatcaaaagggtactcttaagttatgaaagacgatcagagcaaagtgagggatctctaaaggcttctgtccacaagaagatggcattaagtctaggaatttctctctttactttgctgtgcttcaaaagattttcctagatgcgtgagccrtaggccaatgattcaccgacagccccgggctgactcctgctcattgtgcgagctcggtactcctgagctcaccttcacggaaagtccatcactcccagctgctgggccagtggttaatggcccagtcctgctacttcaccaggtagctttaatttcagtcagtgatctgagtagaagcaagttaaaggcacctgataccagatagaaacttgggtctagaaacgaaggaggcatctggtatgtgtttgcatgtgtgtgctgcacttcagaaactcttgaaagccatgtaaagtaaaaataacacagctggcagatctaagctcaagttgacttcaaatgagaggttctggaggttgatgctccagtcctggctc

SEQ ID NO: 881160 - DNA, 614 bp, Homo sapiens; identical to SEQ ID NO: 872550

SEQ ID NO: 881161 - DNA, 571 bp, Homo sapiens
cccaacaatatgctatctaaaagaaattcacttcagctataaaaatgtaggcatgttgaaagtaaaagaatctttaaagcagttttttccagttctgtgaagaaagtcattggtagcttgatggggatggcattgaatctataaattaccytgggcagtatggccgttttcacgatattgattcttcctacccatgagcatggaatgttcttccatttgtttgtgtcctcttttatttcgttgagcagtggtttgtagttctccttgaagaggtccttcacatcccttgtaagttggattcctaggcattttattctctttgaagcaattgtgaatgggagttcactcatgatttggctctctgtttgtctgttattggtgtataagaatgcttgtgatttttgtacattgattttgtatcttgagactttgctgaagttgcttctcagcttaaggagattttgggctgagacaatggggttttctaaatatacaatcttatcatctgcaaacaggtacaatttgacttcctcttttcctaattgaataccctttatttctttctcctgcc

SEQ ID NO: 881162 - DNA, 595 bp, Homo sapiens
ttatatgcattatttctccagtatctacattgtgctttacaaactgtatgctcatcacaaaagttgcaaatgaaaactctatattcctgtaggcactaatgcagaacattgctgcacaccctccatcagtgttgggtgtcatcctattcctccatcaggaagcttttcctaacattctggccaagcagggacatttcaagaggctgtttctcctcacttactgttgcaatagacctaattgggctggtaacaacagtggactcccttggtgacagaagagtggtaaacacccaagaggaacagttacaatttcaaacttgtaagagctgagaactgctaatttcctgccagcaagactgacatggctgctttttagttgacctcttcaagggaaacctcagaaggcccattgggagctttataatgtacggwgcaaagaggccctgaactgattttgttcaaggggaattttatttgtgtttatattggctactcatgtggagaggtgtttgtaaacacacagagaacttctgtgcaaagacatgaggttataatttcagactttactccctaaaggaggaacagagagcattat

SEQ ID NO: 881163 - DNA, 692 bp, Homo sapiens
ggagggtaagaatagctatattacttatgtttagcccccaaaaggcgaatatatcacacacttgatttcacccctcttctgcccttgacagacactgctaatcaaccaggtcacatttcccactgagcttaaatatagcctcaggatttttcttggtacagccctctgggcagctgctaccaatctatctgggttggcttatgagattgatttacagagtgcattatttattcatttattcaacatttattgaacatctaaactgtgccaggcatgttaaaggcattcagcagcaagacatgaaacttaaattccaatgaaaatcaaaactttttattgccttttttggtcctgcacatttgcttggcatgcagtaggtgctctatatctatatatctatctatatatctagctatatatatatatctcacattgcatttaattggtacgtgaagaacattctggcatcagctgacccagctgagaggtgaagagtggctatggttctccctcaaataataagaacattttttccacctcagttcacttyctgctcagggtctattaaaaacaaattcatcatcaagatcagttctcaactcggtaggttttgaggggcagggggagatagccacaagaagaatcagacacagaatctcatctcatcccttaaatctgacctctgaatgtct

SEQ ID NO: 881164 - DNA, 628 bp, Homo sapiens
aatgatgaaggatttctgaactagtcaccaattggaatcctctagccctttccataccactatggtgaataatctggacatgactctgagtaattatttcagccatacacagatgcgttttactaatccccactataatcatccaactttcactgtgagaagcatttttccatttgttgcctcatttgatcttcacaacagccccaagagaaacacaagccagtgttgttatccttctttgacagatgggcaagcagagggttagagaggtaaagtggcttgtgacacttctagattcaggtatatgactctgaattccatccatgagctttctattataccaagaagccacaggattgttaccacatcctaaaagacactagatattctggaagaaagaaaaccaggaaggtgaaggctgatggaaaacagatgagttagtccagccctagccatccccactgggctcccacccargcctttgctcagtgtccctctctcccaagcacttctttctcagcctatttgtttgctcagatcctctctgtggccagtaacatagctcaaacccaggctcctccatgaagctgttgaccaaccatccaacccagttcttcaattaatattt

SEQ ID NO: 881165 - DNA, 619 bp, Homo sapiens
caaaagcaaaggtgaatatctgtattatgtgagtgtcatgtgtggtgggaggacatgacaaagaattctttttaaaatcataaatggtaataatatctttaagagcaatgtactaattcttcaagtattcaaggcagttggaatatgagtttcgaacattttgtaggtattttaaattatctaagtgacattaaaattttaaattatctaagtgacattaaaaaaaattaaattatctaagtgacattaaaaaggaatgcaagaagaaggaagaaaaaaatgcyggccaatacatttgaacataaaatatttaacatggaaaataccattttatctctgattccttgagagttggcatagtaactgatgactttggcagtattaatttcatgccactctaaggaatatagattagtttttctctcctccaaatgggcctaattgtcctactctttgattcgttacatctaccactaaatttttcaaatattttgccacttttacaatcaaattatcatattttatgtattttattgttagaaacttcagtttaatattctgtttctaatcctttatgagctggaaaaccaaatattcaagacttttaacattacatatc

SEQ ID NO: 881166 - DNA, 598 bp, Homo sapiens
ctgtggagaaataggaatgcttttatactgttggttggaatgtaaattagttcaacaattgtggaagactgtgtgtggtgattcttcaaagacctagaaccagaaataccatttgacccaacagttacattactgggtatatacccaaaggagtataaatcattctattttaaagatacatgcacacatatgttcattgcagcactattcgccatagcaaagacatggaatcaacccaaattcccatcaattatagactgggtaaagaaaatatggttcatatacaccacagaatactatgcagccataaaaaggaatgagatcatgtcctttgcagggacatggatggagctggaagccattatcctctgttactgcaaactaatgcagtaacagaaaaccaaactctgcaygttctcgcttataagcgggagctgaacaatgagaacacatggacacagggaggggaagaatacacactggggtctgctgctgggggaagcagggggagggaaagcatcaggaaaaagagctaatgtatgctgggcttaatacctagggatgggttgataggtgcagcaaaccaccatggtatatg

SEQ ID NO: 881167 - DNA, 669 bp, Homo sapiens
atttagcattttttgcaaggtggatctggtagtgatgaattgtctcagctttcatttgtctgggaaagactttatctctacttcttatttaaataacaattttttctggatacaaaacacttggatggcagggcttttttttccctttgggcactttgaaaatgccattccactcccttctgcctgcatggtttcattgagaagtctgtttccagatgaattggggcttctttatatgttatttgcttcttttctgtagctgattttagggtattctctttgtcattgacctttgtgagtttgattattatatgtcttgtatagattgaatctgtttggtggtctaagaccttcctgtacgtggatatttatatctttctcaagttttggaaagttttctgttgttatttctttgaataagttatttatcccttgttcttgctctgctccctcttaaacacaggaattcttacatttggtcttttgaggtactcttttatatcttataggcartctttgttcctttttgttcttttgtcttttttctccgctgaatgtgtattttcaaacagctgatcttcaagcagaatttctatacatcaacattgttcaagctgagggccaaatcaagaatgcagtcccatttacaatagctgcaaaaagaataaa

SEQ ID NO: 881168 - DNA, 592 bp, Homo sapiens
tttttgtttttatcctaaaagcaataggaagacaatgaagtgggaagaatagaatgtgaagtgacaagatcagatttgcatttaaaaaaaaacccaatcactttgctgcaagcagaactgattgaattgagtcttgccaatctctggtgagtccagtgagagagtgattgggaaagggagtttctgtaagcctatgttatttcctctaagagctgacttattttatcatgaatgcatttgagatgttcaggcaggaaaatatcttcattaaggcattcttctatctttagcatgtagttagttatttcttargttttcagtacaaaagattatggcaagccaagaagaataatttcagtgtgttcaatttaagcttagttataaaaaatttattccaccgtttggggttcaagtatttgtctattttgtgttattggtaaaatgatgaaagttatctgtgtatacaagcaataagtacaactgactagtatttaatttggtgtcatttcaaataaagaagtgtaaataaatatccattttgtcaggtttttattgattatctgattctcaattttacttatgttccattcca

SEQ ID NO: 881169 - DNA, 445 bp, Homo sapiens
tggaggaatttggtatttgaatgtttttgaagccaatatttttgaaattttagctgtttagtcaagggcttttttattctgacattccttaaccattctgtctttccatttaaaagaaatgtctgtgtgacatgtcttcctggtttttttttgtcctttgtattaatgctccagtttgttttatactatatttcttagcccccagatttatcatgggacatcactgaaaccagtggtagggtcgtttgtgacagcctaacaatgtgaatctaactatcttgatatttaatttatgtmtttctgaaggatttaacaagttaattgtgtatattctaggtgtgtcacggggtcccagccctgtcagccttggaaatcaggataccttacctgtggcagttgcccttacagaatctgttaatgcctactttaaaggagcagatcccac

SEQ ID NO: 881170 - DNA, 602 bp, Homo sapiens
cccatcacgagatgtctactggtggggtatctaattggatggagaatagggggacttgtttggaggaatactcttggtttgtgactgggtctggaatctgtgtctcaaaggccttctgtctgtcttgtctttgttgtgtgtgtgtttgtatatgttgaggggatctctgagggaattgctgatggaagtccagcaggcctaactcagagaaccctccgtaagtcaggttacatctggtgagccctgaagaaagctcaacaggcctgacatggggtgactgtccactcttcatcttgcccagagaccacccatttaattaccrgttggaagtcatccctctccacttggagtggatcaaagactataggaaccaacatgagaaaatttgagccttgccaggtcaatattgggtgctgaacgaggtgactagtgtctgtttagttatgtgtattttgcttcggctgggatggaaaatattaattcagttccccatgcaacccgtcaggcagcatcttgcaaaagtgagaagcttttgcctacggttccataaaacagaaatggatgattttcttttgtaacagggcttggcccccacagctatg

SEQ ID NO: 881171 - DNA, 602 bp, Homo sapiens
cccatcacgagatgtctactggtggggtatctaattggatggagaatagggggacttgtttggaggaatactcttggtttgtgactgggtctggaatctgtgtctcaaaggccttctgtctgtcttgtctttgttgtgtgtgtgtttgtatatgttgaggggatctctgagggaattgctgatggaagtccagcaggcctaactcagagaaccctccgtaagtcaggttacatctggtgagccctgaagaaagctcaacaggcctgacatggggtgactgtccactcttcatcttgcccagagaccacccatttaattaccggttggaagtcatccctctccacttggagtggatcaaagactataggaaccaacatgagaaaatttgagccttgccaggtcaatattgggtgctgaacgaggtgactagtgtctgtttwgttatgtgtattttgcttcggctgggatggaaaatattaattcagttccccatgcaacccgtcaggcagcatcttgcaaaagtgagaagcttttgcctacggttccataaaacagaaatggatgattttcttttgtaacagggcttggcccccacagctatg

SEQ ID NO: 881172 - DNA, 633 bp, Homo sapiens
gaactacaaaccagtgatcagtgatggtgaaccttttttcatatgtttgttggccgcatgaatgtcttcttttgagaagtgtctgttcatatactttgcccactttttgatgctcaagtaaataagagaggatacacacaaatagaaaaacatttcatgctcatggatargaagaatcaatgttatgaaaatggccatacttctgaaattaatttatagattcaatgttattcccatcaaggtaccattaactttcttcatagaattagaaaaaactactttaaattacacttggaaccaaaaaagagtttgtatagccaagacaattttaagcaaaaagaacaaagccagacccatcagggtacctgacttcaatctgtactataaagccacagtaaccaaaacatcatggtaccggtaccaaaacagatatatagaccaatggaacagaacagaggcctcagacataacgtcacacatctacaaccaccaaacctgacaaaaataagcaatggggaaaggattccctatataataaatggtgttgggaaaactggctagccttattcagaaaactgaaacaggaccccttccttacaccttatacaaaaattaacccaagatggattaaag

SEQ ID NO: 881173 - DNA, 568 bp, Homo sapiens
tgacttcctcttttcctaattgaataccctttatttccttctcctgcctaattgccctggccagaacttccaacactatgttgaataggagtggtgagagagggcatccctgtcttgtgccagttttcaaagggaatgcttccagtttttgcccattcagtatgatattggctgtggatttgtcatagatagctcttattgttttgagataygtcctatctggtttttttgttttgttttgttttgtttttgagatggagtctcccatcgcttaggctggagtgcggtggcacgatctcggttcactgcaacttccacctcctgggttcaagcgattctccttcctcagcctcccgagtagctaggattacagacgtgccaggtatgcaccaccacaaccggctgatttttgtatttttagtacaggtggggtttctccatgttggtcaggctggtcttgtattcctgacctcaggtgatccacccgccttggcctcccaaaatgctgggattacaggcgtgagccaacatgcccagcctaattgttcttagctacagtcaccctata

SEQ ID NO: 881174 - DNA, 591 bp, Homo sapiens
atattaaatcaaagttagaaaaagctaaaatatgattcctcaaggatctagaaccagaaataccatttgacccagcaatcccattactgggcatatacccaaaggattataaatcattctgctataaagacacatgcacatatatgtttattgcagcactgttcacaatagcaaagacttggaaccagcccaattgtccatcaaagatagactggataaagaaatgtggcacatatacaccatggaatactatgcagccataaaaaagaatgagttcatgtcctttgcaaggacatggatgaagctggaaaccattctcagcaacctaacacaggaacagaaaaccaaacactgcatgttctcacttattagtgggaattgaacaatgagaacacatggacacagggaggggaatatcacacactgggatctgtygcaggatagggagctaggggagggagagcattaggacaaatacctaatgtagatgataggtttatgttgcagcagaccaccatggcatgtttatacctatgtgacaactgtgcacattctgcatatgtatcccataacttaaagtataaaatacat

SEQ ID NO: 881175 - DNA, 629 bp, Homo sapiens
tgagttagggctctgaattcctttttggggccctgtggttcctgaaatctccaagcttctgggcaccaccatgttccctggtgcaagtcattgaagctgcttgcattgcacttggtctagctgtagcgtcatagagagctgtcacccattctggaacctggagctgcccaccacattgcagcagttggcgtgtctgactgtgcaatggccagaccccacacttgctcacacacccctcaccgctccatgcctgactcacccttagcaggcatggaatcttttatggtttataataaaattgtgaatctctttactaatagagttggaagaaaacaacaatatgtcatactatttcatttcaacaagggacatgtaaaggctttccaccattgtcaacatttattatyttatgacatatcgtggagagcttctaatcattagagatgaaaataaataatcactgaaaattatattgttgaaatgtataaatgtagacataagttgccttatgaaaatgtgatgcaagttattacacaagatcacaatcctttgaaacttaaaacatttcaaattccatttgcatttataatttataaatttaaattttaaaaaaataagaaagtttaaca

SEQ ID NO: 881176 - DNA, 629 bp, Homo sapiens
tgagttagggctctgaattcctttttggggccctgtggttcctgaaatctccaagcttctgggcaccaccatgttccctggtgcaagtcattgaagctgcttgcattgcacttggtctagctgtagcgtcatagagagctgtcacccattctggaacctggagctgcccaccacattgcagcagttggcgtgtctgactgtgcaatggccagaccccacacttgctcacacacccctcaccgctccatgcctgactcacccttagcaggcatggaatcttttatggtttataataaaattgtgaatctctttactaatagagttggaagaaaacaacaatatgtcatactatttcatttcaacaagggacatgtaaaggctttccaccattgtcaacatttattattttatgacatatcgtggagagcttctaatcattagagatgaaaayaaataatcactgaaaattatattgttgaaatgtataaatgtagacataagttgccttatgaaaatgtgatgcaagttattacacaagatcacaatcctttgaaacttaaaacatttcaaattccatttgcatttataatttataaatttaaattttaaaaaaataagaaagtttaaca

SEQ ID NO: 881177 - DNA, 598 bp, Homo sapiens
gcaacctaaactcaacgttacttataagggagtcatacataagaattctgtagttcagatctattattggttattagttagaaaacaggtgtcttcctcaacaacttaatgtaagaaaataattcatcattatattcctatgtctttataactcctgtttcatagtggttacttaataaataatcataatgataaagaaggtaatgattaatgataaaattgatcacaacagctacttttcattggtcacatattgagtgccaggaactccgaaaacattatcttatttaattctaaaaacatatctyctaaaatgatatcacttattcctttcttatagatgagaatagtaagatataaagaagttgagtaccataccaaaagtcaaataattatcatgctaaaattgcaagatttaaaaagaaacatatctctaaacccaagtttcttcccctcccaaagaaatgtaagctgattcttttgagtgacagagtagatggagggatggatgtatgagttctaatgtttatctaggctaatgcatgagttctgttgtttaaagataccacacacacacacacacacacacacacacaca

SEQ ID NO: 881178 - DNA, 673 bp, Homo sapiens
gctgtttttttcttcctctctttgcttctagattgaaacaatggaggatctttgtgtggcaaacacactctttgccctcaatttattcaagcatctggcaaaagcaagccccacccagaacctcttcctctccccatggagcatctcgtccaccatggccatggtctacatgggctccaggggcagcaccgaagaccagatggccaaggtgagtttgagctgaagctccacatttgggcygagtagttcctgaatggaattggagaactgctcttgttttatgctaaagacattttaactcaggaggtcagcaatcatcacaggtaatgaagcactgatccttacaacacaaattccttagattcaaatctataagacagccaagcccccgaatccctcaactgtagctgttgaaggcatatgggagttgaatagcctgcaaggctggacacagttatgagtgaccacatcttatattttaataatataatattcttatttttcaaagttagtgttttgtacccattatctcattcagttttaagacagatatcattttacagatgagagccctggtggtgtcagagaagcccccactgtctcctaactcctagcctgggctccttcccattactgtgccactgtggtgtttgttccctattcctatgaagaa

SEQ ID NO: 881179 - DNA, 673 bp, Homo sapiens
gctgtttttttcttcctctctttgcttctagattgaaacaatggaggatctttgtgtggcaaacacactctttgccctcaatttattcaagcatctggcaaaagcaagccccacccagaacctcttcctctccccatggagcatctcgtccaccatggccatggtctacatgggctccaggggcagcaccgaagaccagatggccaaggtgagtttgagctgaagctccacatttgggccgagtagttcctgaatggaattggagaactgctcttgttttatgctaaagacattttaactcaggaggtcagcaatcatcacaggtaatgaagcactgatccttacaacacaaattccttagattcaaatctataagacagccaagcccccgaatccctcaactgtagctgttgaaggcatatgggagttgaatagcctgcaaggctggacacagttatgagtgaccacatcttatattttaataatataatattctyatttttcaaagttagtgttttgtacccattatctcattcagttttaagacagatatcattttacagatgagagccctggtggtgtcagagaagcccccactgtctcctaactcctagcctgggctccttcccattactgtgccactgtggtgtttgttccctattcctatgaagaa

SEQ ID NO: 881180 - DNA, 659 bp, Homo sapiens
tgtgaaacccacaggtggcccagagcatggcagtgaccagagtcagtgtcaaggctgttttcctctgggctataccccccaccaggtttgtggggactgcagccaagtcaaacagagctgcacacactcagagctgcacttgcttcaggctttcccagggatggcttcaccaggctctatgggtcaaatgttcaccccgcgtcactgggaggcagtgcacctgtgtggttattatccaccagctgagaagccaaccctctgttcccaaaaaagctcctgggttttcattttctttaaaacgtagaacattcattgaatgcaacttgtcaagccctcagccaagcttaaacatttgccttgcaccaggccatcctaacacaaggactcaacgctgtccctggctgacatgsctttaaaagagtttcagaagttgaaattcagtgagatcgtaaatacaccaggtagacagttgaatctgaagataaaaatcgtaaggtgatttgctagatccaaggagaggtcaggaaaaaccaagcttctttcccgatgtcctaaaagttcaataattcttcaatgatagcttccctttattgagtgcttcttatatcccaggtcactactgtgcattactgctaatccctaaagacaactggttgttg

SEQ ID NO: 881181 - DNA, 659 bp, Homo sapiens
tgtgaaacccacaggtggcccagagcatggcagtgaccagagtcagtgtcaaggctgttttcctctgggctataccccccaccaggtttgtggggactgcagccaagtcaaacagagctgcacacactcagagctgcacttgcttcaggctttcccagggatggcttcaccaggctctatgggtcaaatgttcaccccgcgtcactgggaggcagtgcacctgtgtggttattatccaccagctgagaagccaaccctctgttcccaaaaaagctcctgggttttcattttctttaaaacgtagaacattcattgaatgcaacttgtcaagccctcagccaagcttaaacatttgccttgcaccaggccatcctaacacaaggactcaacgctgtccctggctgacatggctttaaaagagtttcagaagttgaaattcagtgagatcgtaaatacaccaggtagacagttgaatctgaagatwaaaatcgtaaggtgatttgctagatccaaggagaggtcaggaaaaaccaagcttctttcccgatgtcctaaaagttcaataattcttcaatgatagcttccctttattgagtgcttcttatatcccaggtcactactgtgcattactgctaatccctaaagacaactggttgttg

SEQ ID NO: 881182 - DNA, 592 bp, Homo sapiens
gatcagtggagaaaatggactgagtgatacgttctgtggacatatatttatggaaggcagctcgaaggaggtaatgagagttggggatcttttgtaatgtatagagtttgatatcagcaagaaggcacaggcctagactctgcttctagaatctcaatcttctgggagtgtggctccttggtgaatgccattgtaatggagaccaacccaagagagctgacctcaagccctctgaggaagacggaccgattcaaaggactgcaaatgacccacatatctgagcagagggtcttttagggtcagggagtatttgatataggggaatcagactagcagagccaagacacytgcatggaaactagcagaggcagtggagtgattttcattggagagctaagcctttccaaggagcagtagaccctaaccaggatacctgtcccacctgcttgtgtcaagcttcttaggccttccagatctgactgccttacttgacctgctcccatgctcacatcagccatgtgaattgaccagtcatagcttggcttccatcccatttttgcctaagaccagtatcaactcccacaaaccagac

SEQ ID NO: 881183 - DNA, 429 bp, Homo sapiens
tataaattacccagtcttggctatgtctttattagcagtatgagaacagactaatacagtaacttggtaccagatagtagggagctgctgtaaagatacctgaaaatgtggaaatgaatttggaactgggtaacagtcagaagttagagcagtttggagggctcagaagaagatagaaaaatrtgggaaagtttggaacttcctaaagacttgtaggactcagaagacaagaagatgtgggaaagtttggaacttcctagagacttgttgaatgtctttaaccaaaatgctgatagtgatatggacaataaggtcttggctgagctggtgtcagatggagatgagaaacttgttggaaactgaagtaaaggtcactcttgctatacaaagagacacgacattttgccccttatctagagatctgtggaa

SEQ ID NO: 881184 - DNA, 581 bp, Homo sapiens
tttttttcctccttcatgtttgaagtttatttaaccagatatactcttctatggtaaaagggatttttttcccccttcagcactttaaatatgtcatgctacactctcctggcctataagttttccactgaaaagtgtgctaccagacatattggaactctgttttatgttatttgtttattttcttctgttgctttaagaattctttttttttattgtcctttggggagttttattattagatgccttgatgtagtcttctttaggataaacttgttggtgttttataaccttcttgtacttggatattgatatctttctctaggttcrtgaagttctctgatattatttctttaatctttctactcctatctctttttctatctcctctttaaagccaataactcttagatttgctcttttgagtctattctctagctcctgtagaaatgtattattgttttatattttttcttttgtttcctctgactatattttcaaatagcctgtcttcaagatcactatttttttcttctgcttgatcaattctgctattaaaagtctctgatgcattcttcagt

SEQ ID NO: 881185 - DNA, 579 bp, Homo sapiens
ggataagatctcaatctcttttatggctgcatagtattccatggcatatatgtacgttttctttatccagtctattattgatgaacattgggttggttccatgtctttgctcttgtaaatagtgctgcaataaacatatgggtacatgtgtctttattgtagaatgatttataatcctttgggtatatacttggtcataggaatgctgggtcaaatggtacttctggttctagatccttgaggaatcgccacactgtcttccacaatagttgaactaatttacattcccaccaatggtgtaaaagcattcctatttttccatagcttcaccaacatctattgttttctggcttttaaataatctccattctgactgatgttatctcattgtggttttgatttgcatttctctaatgatcrtcgataagcttttttttaaatgtgtttgttggccacataaatgtcttcttttgagaagtggctgtatatatcatttgcccactttttgaaggggttgtttgttttttttttttcttgtaaatttgtttaagttccttgtagattctggatattagacct

SEQ ID NO: 881186 - DNA, 609 bp, Homo sapiens
tggctcacacctctaatagaagaactttgggaggccgaggagggcagatcacctgaggtcaggagttcgagaccagcctaaccaacatggagaaaccccatctctattaaaatacaaaaaattagccaggtgtggtggcgcatgcctgtaatcccagctactgtggagactgaggtaggagaatcacttgaacytgggaggcagttgttgcagcgagccaagattgtgccattgcactccaccctgggcaacaagagcaaaactccatctcaaaaaaaaaaaaaaaaaaaaaaagaaaagaaagatcacagaggcgtctcctttagttgagacaatcagaaaaggaaagaaaagatctttctgaagaatgaataggagttgaaaacagagtttgtgcagtttggatgtgggaggcagggtgtgtatagacagcgatctagacgataggatgataaagatcttgcagttggaaaacagtgtgacatgttccaaaaactaaaagaaggccagatggctaaataggtagtggggccagcatagcatgagatgaaattgaagagattgacatggacgggccatatcatgacaacccctatgggccacagtgag

SEQ ID NO: 881187 - DNA, 569 bp, Homo sapiens
ctgtactctgcaaagccacagggtcagagctgcccaagaccatgggaatgcacttcttgcatcagtgtgacctggatatgagaccagagtcaaaggagatcattttggagctttaaaatttaactgccctgctggatttcggatttgcatgggctctataacccctttgttttgtccagtttctccaatttggaacggttgtatttacccgatgtctgtatcctcattgtatctaggaagtaactagcttgcttttgattttacaggctcatgagtgaaagggacttgccttgtctcagatgaaactttggactgtggacttttggattaatgctgaaatgagttatgactttgggggaccgttgggaaggcatgattggttttgaaatgtgaggacatgagakttggaggggccaggagtggcattatatggtttggctgtgttccaacccaaatctcagcttgaattctatctcccagcatgtgttgtgggagtgacataggggaggtaattgaatcatgggagccagtctttcctgtgctattctcatgatagtgagtaagtctca

SEQ ID NO: 881188 - DNA, 601 bp, Homo sapiens
tttccccatggcttgtttttgtcacctctgttgaagatcagatggttgtaggtgtgtagccctatttctgggtttgctattctgttccattggtctatgtgtctgtttttgtaccagtaccatgctgttttggttactgtagccctgcagtatagtctgaagttaggtaatgtgattcctcagcaataagttagattttgataaaacagtatatccctctcaccaaaatattatacattagaagcaagaacactctactatggagtgtttgcatacattagtctttaaacaaatttaatttaatgttaagttccaggatacatgtgtaggacatgcaggtttcttacataggtaaatgtatgccatggtggtttgctgcacctatcaacccatcacctaggtattaagccaagaatgcattagctatttatctggatgtyttccctccccctatccagctctgacagaccccagtgtgtgttgttcccctctgtgtgtccatgtgttctcattgttcagctcccacttacaagtgagaacatgcagtgtttggttttttgttcctgtgttagtttgctgaggataatgacttccagctcca

SEQ ID NO: 881189 - DNA, 623 bp, Homo sapiens
gacataattaacagtatctaagaagtagacaactatagttccctctaaagaagtatttgtctatctaatattatagacaaccaaattcatggggttgcatgagatgagacactgagttggttttggaagtaggattaaagcccaggtgtattttttcatctgttgattattctctagatggctgatcatgtctgctttacttaattttagttttacctccaggtagtttatctagctcaagttrtatattgctgtatattcactattttctctaaactactaagtaattggagtttaatttataaaattatgtacaataataaagttgcattaatgatatttcccatcatgctattaacttttatgctttatatagctgtgcaatgaaactggcatatattttactggataaacaattccactaaaattgcttccctttagtgaaggaagattcaccagcatagcctcattaggaaacaaaacagtcttccttttctgttctataagtgaggggaaaaatgccacctttggtctcaccaaaagaggcctgccatgtttcttttaatagaatgctcttctgaaagacatgatcacactgcagtcactacttgttggccagtcgc

SEQ ID NO: 881190 - DNA, 580 bp, Homo sapiens
taaatgcaccataaatgcctgcattcaatgataaggctaatgatctagatcctgctttgtggtttgcctagtattggaaagagtagcaaaaataatgatgtaatggggtgaagcaaaaagtggtgagtgaatggaaagactttagatgggctttgaatcatatttctgggttcaaattctacattaccatctacaaggtctttggcaaattgttcaacttctctgagcctttattttctcatttaaaaatagaaataatatccacttcatcagggagatgtgaaaatcacatgcaatagtaaagtggaagtttcttgcaatagtagatgctccataaatgtttattctctttttctcttctttccaaggtccacctgactgtcaacacgatgacatttgtatcaaatagcatcaygaatctgtgaattttgtagagcacaactgatttccaaattaggaattcagggcccacatccatgtgaagcaactgattattcctatagcacttgcttattgctgctttaaagaaaacctagattctagcccttattctaaactaacctgctggacaatctttggt

SEQ ID NO: 881191 - DNA, 654 bp, Homo sapiens
gatgcttccagctttgttctttttgcttaggatttttctgcctatgtaggctcttttttggttgcaaatgaaatttaaagtagtttttttctaattctgagagactaggattgccacccctgctttttttatttctttccatttccttggtaaatcttctccatccctttattttgagcctatatgtgtctttgcatgtgagatgggtctcctgaatacagcacaccaatgggtctcgactctttatccaatttgccagtctgtgtattttaattggggcatttagcccatttacatttaaggttaatatttttatgtgtgaatttgatcctaacattatgatgctagatggttattttgtccgttagtttatgcagtttcttcacagtgtctatggtctttacaatttggtatgtttttgcagtggctggtactggtttttcctttccatatttagtgcttccttcaagagctcttgtaaggcaggcctggtggtaacaaaatctctcattgttygcttgtctataaaggattttatttctctgcttataaagcttagtttggctggatatgaaattctggattgaaaacttttttccttaagaatgttgaatattggcccccactcttttctggcttgtagggtttctgcag

SEQ ID NO: 881192 - DNA, 574 bp, Homo sapiens
tagttgtcaccaaaaggactgtttagctgcttaaaactcacatcatttgaaactgccaaaggcataatgtttatatgattaacaactgaaacaattctttctagtctgtgagatatagatgtgtatagccagatggttatctgtgaatttttttctgtaaaaagggaaaaggtaaatgtcaaataccacatacattagtctttatgagagaggaaacagatactgtttgtcaaagtgtaactaagagaaamgtgtgggaagctttatctatactttctagcatcaaccctgtgaatccactaagctctaggtatgggggatgcatggctcattaccaagaataaaaagcaaaatacaggtcctggtgcaaacgctgttgacaatgcagtaagtattctctttctttagagaaggctgggaagaggagaggaaatgtggatgtgaaaaaaagtatgttatttattataaactatgcctttcatgaccacgctgctcagtttaaatccacaaatatttttctgattattctgctatttgccagatgctctgcttcattctcagggtgcaaatataa

SEQ ID NO: 881193 - DNA, 646 bp, Homo sapiens
ctggccaaaatactactatctaaagagacagcagatacgtctcagctgccgtcaaaggttgataaatgtatatctaaaaatgtaactttatagactatgatgctagaaagtcctaagttttagcaaaagggaatartgagggtgaattactaccttagggattctgcttttggtctataatatttaacaccaacatccactgcacaagtcctatttagaacacccttcattttaagaacaaagtatatattatgtagaaaaggaggaagaattacagtaccctttaatattatttcaggaatgggcaaacagtaccacttttttatttctagtcaattaataccataggtatgtgaagttaaataagacttctgcttatttttaataagcaacagatgttaagactaaagtgagagtattctttttggctgttcttctgaaaaaaaaaacaaaaaaacagtttaaaacttgtcacctgaaataatgatttcagtttaaaagtaaggttgaattagcaggaaaattgcatgtctttccattggctaacatttggtgatgtttcgtggtggttaaaatgaaaagatgcttgttaaaacaacggaaaagtaatatgcagtcataagtccacaaccaccaactttaacct

SEQ ID NO: 881194 - DNA, 554 bp, Homo sapiens
taaattggaaaaaacaactggcattcaagatgacataagtccaatgtcaagcatggactcttggagaaccagaaacagccaccttgtccttcctgagtccttaaagtttttgttattaaaagttatgcattccaaaacatcatggaaaagagaaaataattcaaattaaatattggtgtggtaacttacaaattgctaaaatagtttataaccaatgtttggtttgtcaaacccatattcatgggaaaacaatcaaagcttcagctmcatttggttacctgacggtaaccagatggttgggccacttaaacattttataaagggatttcattcaattgtcattttcaatgtatgttttctggttgtataaaagctctcccatccaagtgggctgacgttataatgtagactattatgctacagtgtattttcaccaggtaaagaaagctttttatggttcactgaggacagtcaaccccttctgttgggaataggcccccaaatctgccataaactggcaccaaaactggccataaacaaaatctctgcagcat

SEQ ID NO: 881195 - DNA, 554 bp, Homo sapiens
taaattggaaaaaacaactggcattcaagatgacataagtccaatgtcaagcatggactcttggagaaccagaaacagccaccttgtccttcctgagtccttaaagtttttgttattaaaagttatgcattccaaaacatcatggaaaagagaaaataattcaaattaaatattggtgtggtaacttacaaattgctaaaatagtttataaccaatgtttggtttgtcaaacccatattcatgggaaaacaatcaaagcttcagctccatttggttacctgacggtaaccagatggttgggccacttaaacattttataaagggatttcattcaattgtcattttcaatgyatgttttctggttgtataaaagctctcccatccaagtgggctgacgttataatgtagactattatgctacagtgtattttcaccaggtaaagaaagctttttatggttcactgaggacagtcaaccccttctgttgggaataggcccccaaatctgccataaactggcaccaaaactggccataaacaaaatctctgcagcat

SEQ ID NO: 881196 - DNA, 564 bp, Homo sapiens
caactctacaaaaaaattaaaaaattagccaggcatggtggtgcgcacctgtagttccagctacttgggaggctgaggagggaagatcacttgagcccaggaggttgaggctgcagtgagccgtgtttgtgtcactgtaccccacccagggcaatgagtgagacaatcaaaaaaaaaaaaawacctgactaaaaacaaccagactatacagcactgttagctcagtgggggttgagaaacaagattaagagaatataagtaaatggtattcataaaagtttcctttctcgtctagactaatgaggttctacttagctatgggtctttagcacactattcattcactcattcactctgcaacaacataccaaagaatgcactgtgagaaatacatagtataacatccagccttgaagatataagatcaacacatgtaacaaagtgccaaaagagaggcacaaatacagtatttatgcaagaaagacccagaaagctttagggaattcatggattgaatctggacatcagaaaactagaggggaaggagaaagaaaagaactgtag

SEQ ID NO: 881197 - DNA, 557 bp, Homo sapiens
gtgatttgtagataaagagaaactggaacatgtggtcagccagttctactagccagatgatcttacagtcagaagcctgcctatttcatttttaatacttccacatataggtcaatttaccttttaaaagtaattctgtactttagttttaacaaaattgtatgtttgcagggaaaattggaattatatttatcatgagataactctctactattagggtgaattattaaaatttagtgtttcttcctttaatttaattgaagtataacttacatatgataaactgtatatattatttttatttgtgaaaatttatggaatataagtataattttgttwaatgcatagattgcatagtggtgtagtaagggcttttatggtacaactgcatatgttggacaatttgatgatctttcataaaggttttcatctgtgaaatcatcttgtactcaagatactggatatttgtattcctgcaaaatattaggcttgtcccatttgtaatccattcctcctccaccactgtccccatacatgctttctttcactataggtta

SEQ ID NO: 881198 - DNA, 592 bp, Homo sapiens
aaaataaagtccagaagaacttaactataacttgaaataaacttttattcaaaacctcacattttaatgttgttttcaattttagttcatatcaaaacatactataagatatattttctcctaaaggtgattaagataaccatcctcttgtacacggcttcatgtaagatacacgttatcaaaatgaaatcagtttgggtaaggtaacagttaatacaagattagacttatgctttattaattctggccaycaaatctcgacaacaatccacaaaacccagatatctgcaaacaagtatgtctggatttttgtttaaatcaagaaatgataggttaagttgagaattgattaactgtctctatacaatacatataaagtacactatactactcagattatataaccatattactcccataaatgttaaacatgaatattctaaattaatgttaagtaccaacatgacaaaaaataacaaaactataaaactgttgaaataaagtagtaggggtgctaatttacatagggttatttaaaatgcctttttggagaaagaaatatctattctgaaacctacaatattaaaaatac

SEQ ID NO: 881199 - DNA, 650 bp, Homo sapiens
ctttttatgggcaacctatatccattaaaacattccagttaaaaatacagtggtagcaaatggagtaggagagtgaggtgtagaaggaagtgaaggaggagagcagacaaaggtgaaggaggagcagaagaaggtgaaggaggagaagaagaaggagaggaagaaagagaaggataagaggataaggagaagaagaagaaagaggtggaggagggagaggaataggaggaggaagagcagcaggaggaggaggaggataggaagaaaccyagatcacaggggaacccaataagggcttgcaagtctgaatagatttgcaatgatatttaagtccataggatctaaattttcctagagaaaaatggaggcggagcatctttttggaaacaaattacctgctataaatttgctttatcctattaaagtttcatggaactttcaaaagaaatagagtaattttctgataactatagatagacttcaacaactttatgaagtgtttagtttgagttcatttcagtctcagaaggcactttaaatttaatctcacttaatttgcttggacatctttaatcaaaccactcatgtggaccatcagtgatagttttcacccagttttacacctgagctgactgaggcaagagaattaa

SEQ ID NO: 881200 - DNA, 691 bp, Homo sapiens
aacaatgaaatccaggctgaggtggtctcaaatagagatgaggaactttttgggaactagaacaaaggtgactcttgttatgttttagcaaagagactggtggcatttgcccctaccctagagatctgtggaactttgcacttgagggagatgatttagggtatatggcagaagaaatgtctaagcagcaaagcattcaagagataacttccatgctgttaaaagcattctgttttaaagggaagcagaggataaaagtttggaaaatttgcagcctgatgatgcaatagaaaagaaaaacccatctttctgagaaattcaatctggcttcagaaatttgcataagtaatggggagtcaaatgttaattgcacaatgggaaaaatgtctccaagrtgtgtcagagacctttgtggcagcccctcccatcacaagcccagcgacctagcaggaaaaaatggtctcatggacaggcctagggtcctcctgctgagtacagcctagggacttggtatcctgtgtcccagctgctctagccacagccaaaaggggccatgctgcagctcaggtcatggcttcagagggtgcaaagcccaagccttggcagcttccacatgatgttgagtctgcaagtgcacagaagtcaagaattggggtttgggaacctctagatttcagaggatgtatagaaa

SEQ ID NO: 881201 - DNA, 602 bp, Homo sapiens
gacacagcagaggagctattaggatgcacagaagactctggcacccagctgaaggatgtaaatggccactctgacagccctcctccaaaagaagctttcaaaccttaatgtgctttaccatttatctgttgtcttacaagaaacattttttcctgtgtaactactcacagacacttatttaattttattactgctctctrcagtgctgtcagacaaatctcctttgagcccattttgattaataaggtttgcatttcttgtttgatttccaagcccatctcaaagcaagactccagtacagacctccagatcttctccacattggctctgttttgaaaggaaggttctgattgatataggtgtcagagaacgccctgctgagaataaatacaaaagcaacagcatgtgcatggagccacagaaagaaagaaaacaacccacaacaatgtgccagagcttagtttttaagaagaaaggtccaaaggaaaactgtcgactaaaatatccaatgcaagatttcataatcctttcaactttcatgccaggtatgtcttcctatacaggccagaaattttttggtgccaaggggagaaagggggaga

SEQ ID NO: 881202 - DNA, 638 bp, Homo sapiens
gcataatagtgtcattgtacatggtccataaacactagaatgcgagttctcaacatagaaaagaggctagcaccataggaggtgctgaaaaatgtggaattagtattgagtgattcatgtacacattaaaactgcaaaacacctgatcttcagggcaccaagaaataggcagaaattgcaggccagtagctcctatgctggttgatatctgtaccaactggacaaaccacttctaaatcttcttgctctccctgtatctagatttttttcacttctattcaatgccctccctttcggtccaaaatacaaataccttcctgtcaagtggtaacaaaagctttgttggagacttggggttaagctaagattactaatcagataagtggtttaggatttgctcaacctggttgttttgaatatttattagaccsaggaaactctcttaaaaagatcctgaggattaggccctgtagcaaaatttatctgcatttctttgttaattcatctacacctccaaagggcatgtaatggggcaggaaacatggttggggacaagggagcagaagtaaccaaataattgtgaaatttaaactacagattttttactccttcctgaggttttaatggccaccttaagt

SEQ ID NO: 881203 - DNA, 638 bp, Homo sapiens
gcataatagtgtcattgtacatggtccataaacactagaatgcgagttctcaacatagaaaagaggctagcaccataggaggtgctgaaaaatgtggaattagtattgagtgattcatgtacacattaaaactgcaaaacacctgatcttcagggcaccaagaaataggcagaaattgcaggccagtagctcctatgctggttgatatctgtaccaactggacaaaccacttctaaatcttcttgctctccctgtatctagatttttttcacttctattcaatgccctccctttcggtccaaaatacaaataccttcctgtcaagtggtaacaaaagctttgttggagacttggggttaagctaagattactaatcagataagtggtttaggatttgctcaacctggttgttttgaatatttattagaccgaggaaactctcttaaaaagatcctgaggattaggccctgtagcaaaattyatctgcatttctttgttaattcatctacacctccaaagggcatgtaatggggcaggaaacatggttggggacaagggagcagaagtaaccaaataattgtgaaatttaaactacagattttttactccttcctgaggttttaatggccaccttaagt

SEQ ID NO: 881204 - DNA, 582 bp, Homo sapiens
tcaagctatgttttataaatcttatgtcattcaaaaatctaaatacattttatttgaaaaagaacagtcacttatactcttttacttactctttatgaaacaggaaaatagggtgaagaggcagggaaaatagggtgaggaggcaggaaaatagggtgaggagctaaggtggattcacacttcagctaggacaggaaatatcctctccatagggcgtargctgtaaatgactttgtaactttacttcattctctccatttacgtagggtgtaccccaactaaccaatggaatcctctagagggtatttaaactcccagaaattctgtaacagggcctttgagccccactatgctcaggcccgctcccacactgtgaagtgtgctttcattttcaatagatcccttcattccttccttgctttgtttgtgagttttgtccaattctttgttcaagatgccaagaacctagacaccctttaccattaacatttaattaacatttgatcagctcaagtttaatggtttaaactctcaaacaattaattccttgaataaattagttaattaaatccccttaaacat

SEQ ID NO: 881205 - DNA, 582 bp, Homo sapiens
tcaagctatgttttataaatcttatgtcattcaaaaatctaaatacattttatttgaaaaagaacagtcacttatactcttttacttactctttatgaaacaggaaaatagggtgaagaggcagggaaaatagggtgaggaggcaggaaaatagggtgaggagctaaggtggattcacacttcagctaggacaggaaatatcctctccatagggcgtaggctgtaaatgactttgtaactttacttcattctctccatttacgtagggtgtaccccaactaaccaatggaatcctctagagggtatttaaactcccagaaattctgtaacagggcctttgagccccactatgctcargcccgctcccacactgtgaagtgtgctttcattttcaatagatcccttcattccttccttgctttgtttgtgagttttgtccaattctttgttcaagatgccaagaacctagacaccctttaccattaacatttaattaacatttgatcagctcaagtttaatggtttaaactctcaaacaattaattccttgaataaattagttaattaaatccccttaaacat

SEQ ID NO: 881206 - DNA, 645 bp, Homo sapiens
cttcattaggataaagtttggcaaccacatgtctaagtgcgggggaaaagggtgaagaaggaaagattataacaacaataacaagaaggaacgattaggatgacattttggtcagaaacctgggaggcagcaataccaggataggaagactaggacaaaaagggaaatgaggactattgaaagccaccttatctacttcaaagtgtggatcagagctgytcctgatgtttcccagacatggtttctgtctgggcttagtagctgatttatctttaggaagaaaaatatagcaacaagaggtcaagtgaaaactagggcttatactgaacctatgtttgcttaacaaaacgcagattctgtttattttggctaggggcaaggaatatgatagagactacacaagatcaagagttttctccaagcaaacgctggaccctgctgtaatctctgctgtttatttctttgtatgtatagtgtcaagtcaacgtcgacatatttttcctcatcatgaatcaaacaggcttctgtttctactctgtttctatttctcatattatcttgcatatgttactctttttctaaaataaaaaataaattcaacattggttgtcaaatgtcttcattaatcatgaatgccccaatgca

SEQ ID NO: 881207 - DNA, 636 bp, Homo sapiens
ataggcctaggttgtgggctggctatgacagaaagaccaataatgtgacttaaagctgggccatgtgttatcatgtggtatcccggtcatgtggtatcagttgacctgaaagctaagatcaaccacatgggcaattaattagtccatcatacctatgcaatggggccccaataaaaggtttgaatatggaagctgcaatgcattgttttgtgctctcactccacagagacaggacaggaaatactccatgtttggaaccctcctggattttaccctatgaaattcttcatttgcctaattttaatctgtatcttttctctgtaataaactctaactgtgagtataatagcttctagtgtgttctatgaattctagcaaattatcaagactaagggtggttttgtaatcccctgacattgcagttgatattagaaagggctagccatctctggaggactctgtgctcaaatgttacagtctggatactgcakgcagggccctgggtttattggatggctgctgtattgcaaggctctccactttggccatacactgggtttaaaccatttttaccttcccccagcaggtttgtgtaccaaaccttttgcctttgacaaatgcacccaggataacagg

SEQ ID NO: 881208 - DNA, 661 bp, Homo sapiens
agacaataaacttgagtcagtaagagatgcttcctatgttctaaggaaacttcctttaacacaactactctttggaattgttatcatgtagatctgcggaaatacagagatcttttaagtgaatcttgttggcatttgatttttataattttatttttcaaggcagtaatatttagacactaaataggacaataaaaatttcagagacttatctgaataataaagagtatctagcctattccakattatttatcagactttgtccttctaattatgacaatgttaataaacacatatattctctcatttccctcaaagtttcttcatgtgtgtgtgtacataaatgactcatatgtatgttatgataaaacaaggatgaataaaaggaaatttagattttttttgttttgagaaggtcatgctccgttgcccaggctgaagtgcagtagcatgaccatagctcacggaaacctcaaatttcttggctcaagtgatccttccatctcagcttctcgggtagctaggctttaaaaaaaaattgtagagatgcagtgtcactgtgttgctcgggctaatctcaaactcctgggcctcaagcagtcctcctgccttggccacctgaagtgctgggattacagatataagtcaccatgaccagcct

SEQ ID NO: 881209 - DNA, 668 bp, Homo sapiens
gacctccactctttcctggttgtagggtttctgctgagaggtccactactagtctgataggcttccctgtgtaggtgacctggcctttctttctggctgcccttaacattttttctttcatttcgacctttgagaatctgatgattacgtgtcttggggttaatcctcttgtggaatatcttagtggtgttctttgtagttcctgartttgaatgttggcctgtcttgctaggttggggaagtactcccgcatcatatcctgaagtgtgttttccaacttggttccattctccccatctggttcaaaatacacaaatcaataaacataatacatcacataaacataaccaatgacaataaccacatgatcatctcaatagatgcagaaaaggcatttgataaaattcaacatcccttcatgttaagaattctcagtaaactaggtattgatggaacatatctcaataagagctatttattacaaacccacagccaatatcatactgaatggacaaaagctggaagcattccctttgaaaactggtgcaagacaaggatgctctctctcacactcctatccaacatagcattggaagctatggccagggcaattaggccaagaaaaaaaaagggtattctaataggaagagaggaagtcagattgtctc

SEQ ID NO: 881210 - DNA, 668 bp, Homo sapiens
gacctccactctttcctggttgtagggtttctgctgagaggtccactactagtctgataggcttccctgtgtaggtgacctggcctttctttctggctgcccttaacattttttctttcatttcgacctttgagaatctgatgattacgtgtcttggggttaatcctcttgtggaatatcttagtggtgttctttgtagttcctgagtttgaatgttggcctgtcttgctaggttggggaagtactcccgcatcatatcctgaagtgtgttttccaacttggttccattctccccatctggttcaaaatacacaaatcaataaacataatmcatcacataaacataaccaatgacaataaccacatgatcatctcaatagatgcagaaaaggcatttgataaaattcaacatcccttcatgttaagaattctcagtaaactaggtattgatggaacatatctcaataagagctatttattacaaacccacagccaatatcatactgaatggacaaaagctggaagcattccctttgaaaactggtgcaagacaaggatgctctctctcacactcctatccaacatagcattggaagctatggccagggcaattaggccaagaaaaaaaaagggtattctaataggaagagaggaagtcagattgtctc

SEQ ID NO: 881211 - DNA, 624 bp, Homo sapiens; identical to SEQ ID NO: 870532

SEQ ID NO: 881212 - DNA, 605 bp, Homo sapiens
aaattctgatatcctttcttctgcttgattgatttggctgttgatacttgtgtatgcttcactaatttcttgtgctgtgtttttcagctccatcaggtcagttaggttcttctctaagctggttattctagttagcagttcctgtaaccttttatcaaggttcttagcttccttgcattgggttagaacatgcccctttagcwcagagttgtttgttgagataccatctcatgccagttagaatggcgatcattaaaagtcaggaaacaacagatgctggcgaaggtgtggagaaataggaacgcttctacactcttggtgggagtgtaaattagttcaaccattgtggaagacagtgtggcgatttctcaaggatctagaaccagaaataccatttgacccagcaatcccgttactgggtatatacccaaaggatgataaatcattctaccataaagacatatgcacatgtatatttattgcagcactatttacaatagcaaagacttggaaccatcccaaatgcccatcaatgatagactggatgaagaaaatgtggcacatatacacatggaatactatgcagccataacaaagaatgagtt

SEQ ID NO: 881213 - DNA, 658 bp, Homo sapiens
ttttccaatgttatcaacatttgaaaatcaatgatttaatagtgtatgccacaatttaattattccccttttgttggccaaatagtttatttctaccatcacactactacaaatgtctctgattaattccatggaattaattcctacaagagatattactgaaacaaagagtatttttaagtatcttgatacaccctgtggatgtctgttgtttttacctattgaggagacatttttcccttctgctatttacagtcccttgatcttggactgggcaggagactatggtcttggctgggcacagtggctcacacctgtaatcccaacactttggggggcccaggtgggtaggtcacttgaggtcaggagtttgtcactggcctggccaacatggtgaaaccatctctactaaaaaataaaaaattagccaggtgtggtggcggatgcctataatcccagctactagggaggctgaggcargagaatcgcttgaacctgggaggcagaggttgcagtgagctgagagtgtgccattgcactccagcctggatgacagaacaagactccatctcaataaataaataaacaaacaaacaaacataaagaatgtggtcttggtaggactggtaatcaaagtgcccaatgatccactgactaa

SEQ ID NO: 881214 - DNA, 633 bp, Homo sapiens
ttatgcagacctagtgtgcactcaaagaagacactaatggcaatgacaacaaaatttttgagctttttttttaaatttacaaggatatttttaacaggtattttcatgtaaaatatggattaaacataacaatatgactgttgctttaaaaaataacttttgcttggccaggcgcggtggctcacgcctgtaatcccagcactttgggaggccaaggcaggyggatcacgaggtcaggagatctagaccatcctggccaacatggtgaaaccccgtctctactaaaatacaaaaaattagccaggcgtggtggtgcatgcctgtagtcccagctacttgggaggcgaggcagtggaatcgcttgaacccaggaggcagaggttgcagtgagccaagattgcgccactgcactccagcctggtgacagagcaggattctgtctcaaaaaaataaaaaacttttgccttatattgttaataagaattacagcctctaattcactgctggaaattagcaacccatataggtaaaattgaataaaatcctatcacattacattgtacagtgttaataattccaatatagtgtatagtatatagtgttaattcaaatatcacacttaaataaaggatt

SEQ ID NO: 881215 - DNA, 690 bp, Homo sapiens
gtgttggcttcaggtctgacccagaagagtcatagtggtggtggccacatgggtgcttgtgtcactccacccccagttttaggtgacttagaacagagagagaaaccctgtttgtttgtgagaaagtaaggaagagaacaagagtcttttcctgataatccagagaattctcccggttcttgtccaggaccatcaggtagtacctctacaagtctgcaagaaccacartgttgctatgtttaaggtgtcccttaaagcagatacagcttacatcacaacacccaagtcctttcaaatatctgaaaagccttcccatgaaggatggctacaaataagcccagacaatgaagacaacaataaatacctaactattcaatgcccagacaccaaagagcatctactagcatcaacaccgtccaagaaaacatgacttaatcaaatgaacaaaataaggcaccagggaccaatcctagagaaacagagatatatgacctttcagacagataattcaaaatagttctgttgagtaaactcaaagaaattcaagatagcacagataaagtattcagaattctctcagaaaaatctaacaaagagattgaaataatttagaataaccacgcagaaattctgaaactgaaaattgcaaatggcatagtgataaatgcatcagagtctgttaatagcaaa

SEQ ID NO: 881216 - DNA, 690 bp, Homo sapiens
gtgttggcttcaggtctgacccagaagagtcatagtggtggtggccacatgggtgcttgtgtcactccacccccagttttaggtgacttagaacagagagagaaaccctgtttgtttgtgagaaagtaaggaagagaacaagagtcttttcctgataatccagagaattctcccggttcttgtccaggaccatcaggtagtacctctacaagtctgcaagaaccacagtgttgctrtgtttaaggtgtcccttaaagcagatacagcttacatcacaacacccaagtcctttcaaatatctgaaaagccttcccatgaaggatggctacaaataagcccagacaatgaagacaacaataaatacctaactattcaatgcccagacaccaaagagcatctactagcatcaacaccgtccaagaaaacatgacttaatcaaatgaacaaaataaggcaccagggaccaatcctagagaaacagagatatatgacctttcagacagataattcaaaatagttctgttgagtaaactcaaagaaattcaagatagcacagataaagtattcagaattctctcagaaaaatctaacaaagagattgaaataatttagaataaccacgcagaaattctgaaactgaaaattgcaaatggcatagtgataaatgcatcagagtctgttaatagcaaa

SEQ ID NO: 881217 - DNA, 652 bp, Homo sapiens
aaatgcatgcagaggaaattttttttttttttttgagatggagtctcactctgtcacacaggctggagtgcagtggcaggatctcggctcactgcaagctccgcctcccgggtttacaccattctcctgcctcagcctcccgagtagctgacactacaggtgcccaccaccacgcccagctaatgttttgtatttttagtagagatggggtttcaccatgttagtcaggatggtctcgacctcctgaccttgtgatccacctgccttggcctcacaaagtgctgggattacaggcaggagccactgttactcagtaatgcgatggctgggtcaaatggtattatttctagttctagatccctgaggaatcgccacactgacttccacaatggttgaactagcttaccrtcccaccaacagtgtaaaagtgttcctattgttgtttcctgacctaccgtctggcactccccagtgagatgaactcggtacctcagttggaaatgcagaaatcacctgtcttctgtgtcactcacactgggagctgtagaccagagctcttcctcttcggccatcttggctcctcctcaatattagaattttctatccttttttgtgactcatttttctctctgtgttaactacattctcttca

SEQ ID NO: 881218 - DNA, 411 bp, Homo sapiens
actcctattggccatgtggactctgtctgtacctagccttacacttctgctcctcactggccattagaaaagcaaatggagggagatggagaaagatagccaaacaaaagcctctactgatcatcctccttgcagaaccaccaaatgtaacacctatttacacaaaaaagagccyttcataagaagcagaaatcagatgagcaattatagtacctggttttaagttcatattactgaaaaaggcactgaagacagcaggaaagacagtcttgaattgcccatgccaaccctcccctgtcttatggcagctgcagtggggcatggaaacaaaatcttgtatgcataggggagggagagcacagtgattgtgggatgttgcattaaagcttagtcctttcctgttacagtgga

SEQ ID NO: 881219 - DNA, 587 bp, Homo sapiens
  misc_feature 519: n = A,T,C or G
attgattgctcctttaaccctttggttcccattagcaatttttttagtactaaagaagggcatatttattttagccattcactataactttctatgtgtccaaagatattttcccttacacctgtgccttttatccctgatcattctggttattactggtcgttaatatgggtttttactttggctctctaatacaaatttatcttgcataaccaaagtatagagatattcacagcaggaaaaataatttgccaaaaaaaatatatttctacattcctagcagaattttgggtcaggcatctttttctatttaggatatgtaaccaaaatgttgacgtytgaagataattgctaattgcatcatagtgcaagtgaaccaaggtcaattaatttaacatgatgcttgttggcaatggcaaaaggttatatcactgtgctttcagagacaagaacacacacttacatgctattacagtgcggggttctatattccttgcacacaggggaaggcatcaagantgcagcttatcaaacttcaaattatgaagtttgatgtataataccacagaagcaaatcttgcacattg

SEQ ID NO: 881220 - DNA, 680 bp, Homo sapiens
gtttgagtctgaaggcctgagaatcaagggagccaatgacataactcccagtccaaagtcaaagtcctgagaatcattgaggtgtgaggtcaggctaggtgccgatgtaagtcctggagtttgaaaacctaagaaccagaagttctgacatccaagggccagagaagatggatgtcctagctgcgaagaagagtgaatttgtcttccttttgccattttattctatgtaggccttcaacagattggatgatgcttacactggggagggcagatcttctttactcagtctattgattcaaatgcaaatctcttccatatacaccctcagacacaccaggaataattttttgccagttatctgggcatctctttgtacagtcaarttgacacataaaattaaccacctctcgtatggagttgttatggggtgataaacttaattaagtttaccccttgtcaacttggcacatgtatgcatctccttaaatcatactttatctccaaataaaggccataataaggttataattccacttaacataatgtgactatcctgaatacaactgaaatgcactaattcattccctagaaaagggagtaaaatatttgagtgatgtttactcttttcctgatatcctgtaactaaaatactgatataaaatcaatactggaatactcct

SEQ ID NO: 881221 - DNA, 576 bp, Homo sapiens
aatgatctctagattatcttttggctcagaagctcaaagattctttgacacttaacactcatttgcatgagcccactcacacacacaagtgcacatatacataaagaaacttgtttttgtatggtgtcattggttggggtagtttgtgattttaagtgaacacccctagcaggattgaagagtaagaagtgattggattaggccatccatcagcagttaagagagcaatttggaaagtccactgagaagagaagagtttgcctatcaacccactattcacaagcactgggcaatagaggagaaaaaaaattccatatttatgagcagacaaaggaatgtcagtgaaacacatgatttagaatgaaacctagacagtaaaagagagggacacgttgaagagtttttaagacaaaggacaagwttgagatgggcagaaaaaggcaaatcggaactgcacaaagccacatgaaaagggttacaaaaccttcaacagaaagagctgtgcccatttttatattcctcactgagaagatgatattcctcgacctgaaagaaataactgtatttcatatactt

SEQ ID NO: 881222 - DNA, 537 bp, Homo sapiens
gccactataccagcctatttctatcttgttgaaattgttgctatatttggtctttgctgtggcgaccaatccataccttaactagtgcaagtgataaaacaaaagaaaacaagagaatgattaacacaaaatttggactatagctaacttggcaaggggttgggggtgattctgtaaggaaaagagataggctcgtgtagattttagaaatcattatgttctagttattaagctgggatgtggtatacattatcttattttgttattcttyaaaatatttagtcacgttttatacaggcatatatgcatgaaatatttcttaatcaaaatacagaaaaatcaatttggagacaaacatatttcttttttttttttttttagaaaataccactagaagatgcataggagaacactgttgagtatttcaagaaataaaatatagtattcaaataagctatgtagtgtggggggcttattgtacagttaaagtacagatatcactaatatggctgagcttatgctatttgctagataata

SEQ ID NO: 881223 - DNA, 601 bp, Homo sapiens
tgggatttatttttcaggtcttgagatatattgctcccagtgcaatctagtatagtatttttatattgatttattctggggaaatgaattctatgggatagtttacagagatctccttccctcttttaatatctagaatggctacaactcctccacctgtatttgacagaagcaactcatgaattctgcattgattttttttagtggcaatggaagcactaaagataacgagttgtaattacatgaatargagttgctccaagttcataacctggaagaaatgacgacgatgcccctaatgaaaatcagtctattaggccagcaagattttaataagagaaggatgaaaaaaacctacctatcaggtactatgcttattacccgggtaaggaaataatctatatatcaaacccccaaaacatgcaattcacctgtactacaaacctgcacatgtacccctgaaactaaaataaaagttaaaaaaagaaaatgaagcaatattctgagactggaattatatttctttaaactaccttggctaactgccattatcctgattctggtaaaaagagaaaataatgatactaattttcagagccta

SEQ ID NO: 881224 - DNA, 629 bp, Homo sapiens
caactcctccacctgtatttgacagaagcaactcatgaattctgcattgattttttttagtggcaatggaagcactaaagataacgagttgtaattacatgaataggagttgctccaagttcataacctggaagaaatgacgacgatgcccctaatgaaaatcagtctattaggccagcaagattttaataagagaaggatgaaaaaaacctacctatcaggtactatgcttattacccgggtaaggaaataatctatatatcaaaccccsaaaacatgcaattcacctgtactacaaacctgcacatgtacccctgaaactaaaataaaagttaaaaaaagaaaatgaagcaatattctgagactggaattatatttctttaaactaccttggctaactgccattatcctgattctggtaaaaagagaaaataatgatactaattttcagagcctaaaatggttcctatccagatgttgatttctgtctgttcatgaaagtttatcaaaccattacaccatgctactgcttagtcaagcaaaataatttatagaaaaggaagcaagtggcaggttttaaaatgcatatgtatctaactacagctctaatataattttgtatataatta

SEQ ID NO: 881225 - DNA, 609 bp, Homo sapiens
agctgtgctcttagcttaactagcaccgtattatttaactggaagatgtttaagatgtgttttgtgagttgggaaattaagtctttcaaaacatggaaggttaagattctgcccagatgatgaaattggagtaccgtgacagccaggtrgaaatcaaagccatatatgtaaaagtggagttcttaagagatttgtctcccagggaaccatgcaaattttctcttcagaaacagaaaaatgattaaaactaaacgaactgcaagttggttatatgacataacagcttataatattacaccaatatctgaatgctcttcacagctgaccacttatcttcaaatgctattaagacgaaactgcaatcaacttttgaatttaaggtcccttattttttcttttatcttttagccataactctgttcataggggtgtcaaggaggtacaaggacaaagaaagattaatatttataaagcctctttttacttgttcactatactagttcagtataaggtgggtggagaaaatagttaaagtcatttgctaaaatgaggtttctgaattttctgaatattctgatttatgctcccctgaatctgatatcctttcct

SEQ ID NO: 881226 - DNA, 616 bp, Homo sapiens
ttagcatttagtgttaaaagtcagcaatattaactagtgcatttctgtagcctgagaagaaatatgtaccatgctaaagattcttttactatcttgcaactcagtaatatgtatacactaccgaagcttctctacttctataatttatttgaaaaatctaaaaagccaaagaaatgccgtatctttctcaatctagcaatttttaaagcagtctactttctttaagtatagacacattttctttcattactagttaaaaatctaccttaccataatttatcttacaaactggaccgatatttataattttattataccttatttcttttatttcagttataatttttggttgtatttttggcaaattgggccaggcatcatgtaaccagatttygttttatataaaaagacacattgaattcagtccaggtacaaacagatggaatgaaaacattaggtggtagctataaatcttgatacatcatgttagctttagaaattcttaatgcctgaaactctacataacaaatatgtcctacaaaatatatacattaaattaaatcaaggcataaatactgaaataatttcttttcaaagtactttaaaaactattctt

SEQ ID NO: 881227 - DNA, 621 bp, Homo sapiens
tttgaccctacctggtccattgcctcattacattatgtacctgacctaatctgtcattctcctttttagttactcttttccaattacactgcagatatacctgcaataaggtctttgcactgggtgttacctcttctgcaatagtcatgctccaaatattcaaatggctaactccttcatttcctgtaagtctttcttcargtatcactatctcaaggaggtctaacctgaccatcttatttaaaactaccattctctctgatccccatcatcctgttgcatcttttccatagcacaaaattacctttctagctcactatactgtataatatttctatttatcagatacagtgttcattgcctcctttcctctagaaagacaggaaatattttgcctgtttttattcattgatatgttcctaaatccctggcagggtactaccatatgaatatctgttgaataactgagtaaatacataacataacacctatatctctctctttctctctctctctctctatatatatatatatatctccatacatgtgtattttcacattcatatatgtgaaatttatatttaaatattttcgatgataatattaatgcttgttttgaaa

SEQ ID NO: 881228 - DNA, 647 bp, Homo sapiens
cattttcttctttatcttaaatccctacaatatttttatgccaacatttaaaacagtatcaattatttccattaatatatttaattattttatttggctctttaaaacttatctgttttcttggaatttctctcctccctcttctttcacttatagtctttttaaattatctcctactcattttcattttctttgaccaacttctcgacctaccacttcctccttctaggggatacttcactttttaaagtttatatttccttacaatcattatatttctcccatctgtttattttatttttatatctagcaccataagtctctcatcatgtatcattttatttattattatttctattctcactttgaaagtcatcatgattcaagtgamtatatcgtgagtttcaaagttagaatataaaatattttctagagaaatccaaaatattttctgaagaaagaattaaaatttggtatcggttttacaacccatcaactaagaaatgctgctcagtatatgtgtggttgtttccttgtctcctgatcttaaaaaggggtcctgattaataagtaagctagatagaataggtatacctggaagaattgcactctacaaatataatatattgttgtttgattttcccctc

SEQ ID NO: 881229 - DNA, 657 bp, Homo sapiens
agagtttatattcatttctcagaaaattatggaggataatcaaattgtcatgcatttatatgtaaaaagagcagcacagatgatatgtggtaatgacctaaatttgtcttgactagtttaatttcctactttctctgccataagtaagaatstatgctgagactaactcaaaaatattaaaatatagcagggctccaggtatgaagcaggatatggtcatgataggattcagccaaatctagaggactcatgggaccaggagagttgcaaagtgaagatcataatgtgtcttagatgaagttcttggcaaggagatggggtgagaattcagaatagagcactatttctgtgctggaatttgtcatctgatggggctgccagagattcatataggagacctcacaaggagccggggtgggagtggcagggtgggagggaaagggttagtcacacagaatttgaaaaacaaaaccaacaaagccaaaaacagctgacaaggtcttttagttattattattatttacaaattctgtacgaatttgagggcttagaaatttggaccaaaaggggtggggagtttttcccttccctccatgtagctctgtgagacctcagcacaaggagagataagccaagaatgctgcagctagaagattg

SEQ ID NO: 881230 - DNA, 627 bp, Homo sapiens
aaaacagccaggtgcatttgtatacaaaaagacagtgcatttgcttcaattatgtatttctattttcactcttagggtttttagagttcaaagtgcatgccaggtttattcaattgctattgttgggattattggtcaaaaaatgtaagccagattttctcccaacattcatttgttcttaagctgtgactagcccttaattcaaaaactcactcatagtgtacccttaattgtatactctggttayctacataaattgcatgacttacaagcactgcgctgtgaagggtatactctttgagtgccatatgtgagctgaatccccaaacattttagatactgttaaaactaagatgatcttttttcctcagtagcatcctgtagtcatttacattagcactttttagagttttatttctttttctgctcacctctcccttccttaagatgttgagtcttcttgatgaaagaaaagcatgtagattgtgtatatagtaaaatttccaggctgatgtcaattaactatatcaatttttactttcatttcctaagataaaggataaaataattagctaaggtagaataatctaccctagagactgtagatttatatacaagtccctaaaa

SEQ ID NO: 881231 - DNA, 611 bp, Homo sapiens
cccaacattcatttgttcttaagctgtgactagcccttaattcaaaaactcactcatagtgtacccttaattgtatactctggttacctacataaattgcatgacttacaagcactgcgctgtgaagggtatactctttgagtgccatatgtgagctgaatccccaaacattttagatactgttaaaactaagatgatcttttttcctcagtagcatcctgtagtcatttacattagcactttttagagttttatttctttttctgctcacctctcccttccttaagatgttgagtcttcttgatgaaagaaaagcatgtagattgtgtatatagtaaaatttccaggctgatgtcaattaactatatcaatttttactttcatttcctaagataaaggataaaataattagctarggtagaataatctaccctagagactgtagatttatatacaagtccctaaaaacttaaattaacgtcatttattattaaccacagtttcaataattattcttccagtgtaatgaagtaaatgactaactgaatagatgaagattgaactgtgtcctacaaggtgaagacctgaatgctcatgaactgagaaggaaa

SEQ ID NO: 881232 - DNA, 597 bp, Homo sapiens
ttaaagctaagtaatttctatgttgtcataatgataaatatggcatatttttcttgttttcatcttgttaggtttgtacatatgctttgaattgccaggacttatttatcacatgtatgctatgcacatatttagtaatagtgtcctctacattttaatctaaaatcattgatattatactcaacaggttcccttcttcaagtatgttctttcaagttgaaattcttttactagaaagcttttgggtactactattaacttgtgtgaacccaaaaaagtytgagacaggtctcagttaatttagaaagtttagtttgccaaggttgaggacatgcccatgacacagcctcaggaagtcctgatgacatgtacccaaggtggtcaacacacagcttgggacatgggacatcaatcaatatatataagaaggacattggttcagtctggaaaggctggacaacttgaagcaaaggcaggaagactctaagcagggagagagcttccaggtcacaggtaggtgagacacaaactatcacattcttttgagtttctgactatggtttccaaaggaggtaatcagatatgcatctatctcag

SEQ ID NO: 881233 - DNA, 627 bp, Homo sapiens
atgctgggtgttatgcagtgacaattcctaggggaaggtttaggaacaaagcccagaccaaaggacctctcagccattgtccaaggtaaccttatggcatcgtgtccagcgtgggtccagagtggttgtaggtatgtgagattgtatatgagaaagagaaagatacagaaagagagaaaacaatttggtagttggggttagggagtggagaacacatgaggcatactacctcaaaccaaaccagccagcctctaggtattccccagcagtcatcctatcccttcctgccaggacagacatgaagtcctctgatggaagcaggacagggcaagggatctgctcagactctggattcaaagtccagctctgccatttcctggatggatggccttgsgcatattacccaacctaaccattctccgcttcagttccccctctacaaaataggaaccacagcagtccctacatcccagagagttatcatgaggattaaatgggctaatatctacaagactgtttagaacagtatctggcacagtggaagcctatataactggttgatttttccagtacctgttctatacaaagacatggaattatatatcttagttcaatcactgagtgatg

SEQ ID NO: 881234 - DNA, 631 bp, Homo sapiens
ggtgggaagattgcttgaacccaggaggcagaggttgcagtgagccatgatcacaccattgaaatccagctcggacaacagagccagaccttgcctcaaaaataaaacaaaatcaaataattggtaaaagaaaaaaaaaaaagaaaagaaaaaagaatacctggcaactttgtcagctccaggactccactgcatcagtggtgtggtggtaatgcctggagggcctgcatgatccagtcaaagtagcatggcaccaggaaggagggagccatccgaaggagcagctgtkcagggctggggtgctctgagtgacccggcctgcagggtggttctatctgggcagtatctaggtgaccagatgacaggatgggtcagtcatgcccagaggaagaagtcaccctgtaagctactggatcgtgactccctggtgattcctagctacagccacaaaaggactgttcagggaacctggggctcacgtgagtttgaagcaagagtcaggaaaaaactggttgcaacatgaagttttgccttggaaaacaatggctcttgaagagatcatgaaatttatatgactagaattactggtataattttcttgctttattgaaataaataaatcatgttttag

SEQ ID NO: 881235 - DNA, 639 bp, Homo sapiens
tggctccgtggaagtcatgccagttaccctaaaccaggctacaatgggtagctcttggaaagcagagaaaagctgggacagatttcaaagagaatgccatagtttggatgtttgcccctccaaatctcatgttgaaatgtgatcgccagtgttggagttggggcctggtgggaggtgtttgggtacaggaggcagatccttcatgaatggttgtgtgccctcactatggtaataagttaccatgaaatctgattgttaaaaagagtttgggaccacccccatctctctcccgcttcctctccagccatgcgacacacctgctcccctttcaccttaccccatgagtgaaagcctcctgaagtcttgccagaagccaagcagaagctggcaccatgcttatacagcctgcagaactgggacccaaatacacctctttccttgatcaattatccagtctcaggtattcctttatagyaatgcaaagtgtgtctggactaacacagacaataaatgcctaagcttgtgcacatgcccatgaaaacctgaaatggccggaaggatttggactggaaggtggtgaaaattccactgatgaagccaggaaaaatgtccattgatcacatggaatcaaagaatttc

SEQ ID NO: 881236 - DNA, 667 bp, Homo sapiens
ttttctagttatcgcattcaaaatgatacatccagattgtggcaccccatactgtaaaatgttacacaatgtgatctttaaacagttaagaaaatccaattctttgtgtagaaatgcatattcatattttctccctacatttattttttgatccaataagaaccgagctttctgtaatttttccagacagccttttgggactgactatatcttcatgcttccctggcaatgacacttttcactttgaagatgtcaaacaaagaaaggaagcatcacataatttaggagtgagaatgaatgtgagccctgaacactggtcatccttgaagcagaaaactgaatgtgcattccagaggagaaatctactgcagagggcaaggacatgggactgcagccagatctcgcattcacctttcatgattctttaaaagattacaccstatcaattcatttagaaggaaacttacaactaatgtgatggatttttcttctacttccttcttaaaaatcttttttaaaagaccagaatgcttgtatccagacactttttaggagatctgttgtcacgccagtgtttgtgccaagcaaaatcctgtcgtctaactacaatttttcaaaggagataccgcaaagtaaatctaaaaatagcatattggtaaaataaatt

SEQ ID NO: 881237 - DNA, 624 bp, Homo sapiens
cataaagcccagcaacttcttgcatgtaaccggctctttaaaaatatttatcatttggccaggtgcagtgactcacgcctgtaatcccagcactttgggaggctgaggtgggtggatcacttgaggtcaggagttcaagaccagcctggccaacatggtgaagccctgtctctactaaaaaaatacagaaattagctgggcgtggtggtgcatgcctgtaatcccagctacttgggaggctgaggcaggagaattgcttaagcctgggaggcagaggttgcagtgagccaagatcgtgctactgcactccagcctgggtgaaagagcgagactcagtatytaaaaaaaaaaaaaaaaaaaaaaatgtatatctatatctatatctgtatctatatctatcatttggatgactaatcagaacacattgaatggtttttctctattattcattatgaccaaatgaataccagttattgtcacgtcaccaagcatgtcaccactattcagccaagaattgagatgtcgtgtttcaagagacgttcattctcctgccatgatccagtcacaactgatgggcctgcatagtagcacttttctaagtgatagcctttatatttctttaga

SEQ ID NO: 881238 - DNA, 567 bp, Homo sapiens
ggtaacaaattcccttagctttttaattgacctgccccttctctctagctgcctttaattttttttccctcagattgaccttgttgaatatgatgactctgtgtcttgccgatggtcattgtgcacagtatctcacaagggttctctaaatttcttgaatttacatgtcaacctctgtagtgagattggataatttttcatgaactgtatcttcaaatatatattttatgttgcttggtctctctcctctttctgaaatgccaatgagtggtagctttgggctctttatataattctgtatttctcagcagttttgttaatttattaaaattattttttctttatttttttctgcctgtattgctttcaaggagtggtcktcagactctgaggttctttccgcatctccgtctattctgttgttatgcttcaaattttactttgaaactcctgtagtaaatgtatttccaaagttcagcttggttctttcttaaaatgattatgtcatttttcaactcctggatcattttcatattttccttgtattgggtttcaaccttcttttgt

SEQ ID NO: 881239 - DNA, 567 bp, Homo sapiens
ggtaacaaattcccttagctttttaattgacctgccccttctctctagctgcctttaattttttttccctcagattgaccttgttgaatatgatgactctgtgtcttgccgatggtcattgtgcacagtatctcacaagggttctctaaatttcttgaatttacatgtcaacctctgtagtgagattggataatttttcatgaactgtatcttcaaatatatattttatgttgcttggtctctctcctctttctgaaatgccaatgagtggtagctttgggctctttatataattctgtatttctcagcagttttgttaatttattaaaattattttttctttatttttttctgcctgtattgctttcaaggagtggtcttcagactctgaggttctttccgcatctcsgtctattctgttgttatgcttcaaattttactttgaaactcctgtagtaaatgtatttccaaagttcagcttggttctttcttaaaatgattatgtcatttttcaactcctggatcattttcatattttccttgtattgggtttcaaccttcttttgt

SEQ ID NO: 881240 - DNA, 608 bp, Homo sapiens
ttttagatctttcttactttcttttgtggacattttgtgctataaatttccctttacacactgctttaaatgtgtcccagagattctggtatgttgtgtctttgttctcattggtttcaaagaacatctttatttctgccttcattttgttatttaaccggtagtcattcaggagcaggttgttcagtttccatgtagttgtgtggttttgagtgaatttcttaatcctgagttctaatttgattgcactgtggtcwgagagacagtttgttaagaattctattcttttacatttgctgaggagtgctttacttccaactatgtggtcaattttggaataagtgcaatgtggtgctgagaagaaagtatattctgttgatttggggtggagacttctgtagatgtctattaggtccacttgatgcagagctgagttcaagtcctgggtatccttgttaacttttctgtctcgttgatctgtctaatgttgacagtggggtgttaaagtctctcattattattgtgtggcagtctaagtctctttgtaggtctctaaggacttgctttgtgaatctgggtgctcctgtattgggtgcacatatatttag

SEQ ID NO: 881241 - DNA, 619 bp, Homo sapiens
actagggtatacctggcttaagccgatccttagcttgccctgtaacctataacaaattatggcctggctcaaaaatggaagctttatgaatcccctgctggcctatttgaactaagagactacagaaagttgctcaatagkgatgaaagctgaaagacctagatcatgtacagtccatcctagaacagtgtgggcatttgtgtcaccagatttagaggaactgctctgacagagagaatatgagatagaaatgggataggccatgcatcccctgagggagaagcagatgaaaacgctgtgtttctaatgtcttctcagttctagttcccaggagtcttatacatactctatgcctgtatttagatatcactggttgtcttcaccataacctctgttgggtgcttttcagtgtttctctgttccctttcttaggcaaaatatccttgatacctgctgtgattcagcctctgaactgtcattccaagagttcaaagatgacttggaaagtccctttttttaaaaatcttgcaaccagttggataataaatacaggtatatttcaaatataacacaaaacagaccatatataagagtacaaatacaataaaagaacaaacga

SEQ ID NO: 881242 - DNA, 623 bp, Homo sapiens
ttgcctaggttgtctttcaggggtttgtatagttttgggttttacatttaagtctttaatccatcttgagttgatttttgtgtatggtgtaaggaagggatccaacaggttgcagtgagccaagatcacaccactgcactccaacctggttgatagagtgagaccccatctcaaaaaaaaaaaaaaagaaagaaagaaaaagaaaaaacagagagaaaagggagcatagaacaggtaaaacaaatgaaaaccaaatagtaaaatggtaggtttaaacgtattactatgttattacagtgagtatgtaaggattaaataccatgtacttttcatatcaaattaaaagtcaaagatagaaggaacataataaaagctatatatgacagatccayagctagtatcatactgaatggggaaaaactgaaagcatttcctctaagatctggaacacaacaaggatgctgtattagtccattttcatactgctatgaagaaatacccgagactggataattttttttaaaaaaagtagcttgatggactcaacagttcacatggctggggagacttcacagtcatgggagagggtgaaggagggccaaaggcatgtcttacatgatggc

SEQ ID NO: 881243 - DNA, 579 bp, Homo sapiens
tattagataaatgcaaaccaaaaccacaacgagatactatgttacaccgttcagaatggccattattacaaagtcaaaaaataacagatgctggcagggttgcagagaaaagggaatgcatatacattgctgatgggagtgtaaattagttcaactactgtggaaagcagcgtggtgattcctcaaagaactaaaaacagaactacaatttgacccagcaatcccattactggatacatacccaaaggaatataaatcattctgttataaagacacacrcacatgtatgttcactgcagcactgttcacaatagcaaagacatggaatcaacctgaatgtccatcaatggtagattgaataaagaaaatatagtacatatacaccatggaatactatgcagccataaaaagaatgagatcatgtcctttgcaggaacatggatggaactggaggccattatccttagcagactaacacagaaacagaaaagcaaatattgtatgttctcacttataagtaggagctaaataatgataacacatggacagaatgagggagacatcagacactggagccta

SEQ ID NO: 881244 - DNA, 615 bp, Homo sapiens
ctgaagctgttttttagtgtcctgtggccactgttaaaaaaattgacatcttttttgtagtacttttcaatttcttaacatcttttgaatcagagctagcaatgttgtgttatctttgtgttatttttttattttgttataaatttcattccatacctgttagaatttgtcacttgtgttttgacaagctccatatacaaaagatgtttaacactgaatcttctagagcttaaagtaaaattctctgtcaaattataaatataaaattatttcttcctcatcttagaggaaaaggttttaacttttcatcattgtgtatgatgtttgctgtgggcttgtttatatatagtctttattgtgttgcagtgtgtcctttttatacataatttttgagtttttatcataaatgatgttgaatyttgtcaaatgtttattctgcatctattgatattattgtatggtttttgttcctcatcactaatgtgatatcttatttagtgcttagtatatcttgagccatccttgcatcctagggataaatctcactggcttaaagtgatagactgctgaggatttttgaatctatgatcatcaggtatactgagctgtaatttt

SEQ ID NO: 881245 - DNA, 577 bp, Homo sapiens
tggtgcataatcctacagttaggtttattattttatgttcttaagcatgagtttcagagaaaatcaaacttaacagaaatggaggtaatcatttatctaatgctgtctatacgaagatgcaaactcctctaccactagaagattagaggatgtcttcttcagccttggctgcaaaaggaagatagctatatttaaggcttgttgtgattcaggtacagttaccctatccacttgtttgcattatcttctttaattttcacaactgtattttgaaatcagtattatcattcctcattacagataaggaaaatgaaatagaaaggttaaatactaaatacttggtaaacagtagraaaggacatcgttgattcaggagagactggtgagagagaaagagaaagaaagggtggagggaagaaaaagaataaaaggagataaagtaaatttgaaattttaacagaaagaaaaactgcagttcccaagatatcactagaaacttgtgagatgagagttctgactggtacataacagtgacagaatctaaatttaaaatgaatggagaaatgaagaaaaacca

SEQ ID NO: 881246 - DNA, 677 bp, Homo sapiens
agcacacaagcagattcatctcaaagataaataaagggaagctaattcaatatgtctataatatgattcatctagagacaatgaagcaaagtacatgaaatttggtggacaaaaggaatgtgatgactctagagttcgatgctgatttgccaaagaatggtaaaagaaaccaacaagaatttgttagacaaggactcagaaagcactactctacattagaacttgagcaacatatggaagagataccagttggcttagtattttatattcaagcaacaaatgactagaggaaagtaaaataaaaatcaaaattagaaataagcaaacaaacacatccaagtatatggaacaagraaaagaatgccagttcaaagcaaacaataagaaaaatgatgtgatttgtattgtcttctttccagtgaagccttcttttatagtagagggtatatagatagactgttaaagggcatataattttaatctaaagaattttatctcttatatatgttgatattttcaatcttctgtatgaattgctaatgaagctcagtagaacaaataaccttttgagacctttaaaagataaaacatataatgcagaaatggtagaaaaaatattttggtgagtaagaagcagaagaaaagatttcaaaatcattgaaggtatttagatagat

SEQ ID NO: 881247 - DNA, 636 bp, Homo sapiens
gaaaaacaatgagagagagtgaagttaggggaaaggtctctgaactgtgattatgaagacctcatgctgccactgtcactatccccaagagaccttggacaagtcacttacctcctttaatcttggtttcgttaccaataaaatgaaaggattcaatcagatggcctttaaaaccctttttttttttttttttttgagacagaatctcagtctgtcacttaggttggagtgcagtggcacgatctcagctcactgcaacctccacctcccgrgttcaagcgattctcctgcctcaacctcccaagtagctgggattacaggggcataccaccacgcctggctaatttttgtatttttagtagagacagggttttgccatattggccaggctggtctcaaactcctgacctcaggtgatctgccagcctcagcctcctaaagtgctgggattacaggcatgagccaccgcgcccggccttaaaacctttctaatgctaagaaatttatgatctattttctttaatagttctttataaccatctcctccctttaaagattaaaaaatgataattatattgatgtctgtgagaagaggacaaacaaatgtgctggttataacaatatttaataataaaa

SEQ ID NO: 881248 - DNA, 647 bp, Homo sapiens
acaccatttctcaaaatatgtgctgcagaacatgtgtcccatataattatccaacaaaagaataagttggggaatgccgtatactaaattaatgttaaataaaggctcccaagaagtcctgcaataaggaaacttgttaaacttagttaacccagtttttcccaactcattggctattgtgtcttgtctttgtgggtatgtgtatgtaaaacacttatccctatcttgtggaatagtgttctgtggagcatgctttaggaaatgctgagttactctattatggtagttttcagtttttttttttttaagacggcatctcactctgtcacccaggctggagtgcagtggcattatcttggctcactgcaacctccgcctcctgggtccaagcgattctcctgcctcagcytctcaagtaactgggattacagccacccaccaccacacccagctattattattattattattattattattattattattctatttttagtagagatggggttttgccatgttggccaggctggtctcaaactcccgaccttaggtaatctgaccctctcggcctccccaagtgctgggattacaggcgtaagccaccatgcctagcctattggtagcttaaagttttattttaaatt

SEQ ID NO: 881249 - DNA, 679 bp, Homo sapiens
gtgcctaagcactgctcttctgcatttttgtaggaggaaattagctcattatttaggatctgctgtgtcttcctaactctctgatctccttggagcctttgccttggccacctgtagagtctttaggttgatgcttacatgttggtggagtttctaggcattctgcttctccctctgataggtcactacagttcttaaagttgaaggrgaggcagaggctattggcaaaggcaagatactgtgtggatttcagagttccttgtcatttgttgtattttcaatctgaacagaaaccaaactgaagtctccaaatcctaggattcgagagggagtcatttttgcaaggagtctatgattccctatgtttgtggggaagcattttatgtggaaaaccaaaaacccatggcctggtatatacagagctttcaggaaatggcagctgtaggcccatgactgagaagtttggcttcccacaaaagctgggccttgtgctgaatgtgactgatactgatggagtttcagaaggattgcagtggagacgagtgtatggtcagaattacattttctagccagattatcagagtctattatgcatttatatggccaagaaggcaggcagaaagagcagttgggaagcaatttgtgatagtgtaggagagattttgggggctattgtgtt

SEQ ID NO: 881250 - DNA, 679 bp, Homo sapiens
gtgcctaagcactgctcttctgcatttttgtaggaggaaattagctcattatttaggatctgctgtgtcttcctaactctctgatctccttggagcctttgccttggccacctgtagagtctttaggttgatgcttacatgttggtggagtttctaggcattctgcttctccctctgataggtcactacagttcttaaagttgaaggggaggcagaggctattggcaaaggcaagatactgtgyggatttcagagttccttgtcatttgttgtattttcaatctgaacagaaaccaaactgaagtctccaaatcctaggattcgagagggagtcatttttgcaaggagtctatgattccctatgtttgtggggaagcattttatgtggaaaaccaaaaacccatggcctggtatatacagagctttcaggaaatggcagctgtaggcccatgactgagaagtttggcttcccacaaaagctgggccttgtgctgaatgtgactgatactgatggagtttcagaaggattgcagtggagacgagtgtatggtcagaattacattttctagccagattatcagagtctattatgcatttatatggccaagaaggcaggcagaaagagcagttgggaagcaatttgtgatagtgtaggagagattttgggggctattgtgtt

SEQ ID NO: 881251 - DNA, 685 bp, Homo sapiens
actgtgggaggccgaggcaggtggatcgcttgagctcaggagtttgagaccatcgtgggcaacatggaggaacctcatctctattaaaaataaaaaaaaaaatcccccaggcgtggtggcatgcacccgtagtcccagctactcagaggctgaggtaggagatttgcttgagcccaagttcaagactgcagtgagctatgactatgccactgcactccagtctgggtgacagagtaacaccctgtctcaaaaaaaaaaaaattcatgaggccaggtgtggtggcttatgcctataatcccagcagtctgggaggccaaggcgggaggatcacttgaggccaggagtttgagaccaaccagggcaatgaagcaagaccccatttctacaaaaattaaaataataaataaataaataaagtcatgaaaaattccagacatgcttaaaaatcagctagaaaaaccactaggtttacatgacacctaytgataataacattattcactttgcattcttttacacccaagtcaccctggagtatactaaggctgttacactctgaaaggaaggaataaactctaggtgacattcagcagctgtccaggtgatggctgaggagctgacctggtagaaggggagcactccttggagaaaggatcttctacctgtacctgagcacataaagaa

SEQ ID NO: 881252 - DNA, 647 bp, Homo sapiens
cagagctggaagtagcaatgtggtaaggcttcaatatagtgggctaataaatttagtaaattttaacccattcttctgctccatgtgaaaatagatattttgagtatattctatatgtcaggtattatattaagtattggtatagaacatataatatgtatgtaatacatattatgtcctttctggtcttcagaaaaatcagaatatgactatatttcatggaccccgaatatagtatatgcttacacagtcatgtaattgagaaaaaaaaaaatagagggtaaagaattggccatgagtgtaggcttacgccagtaatctcagcattttgagaagccaaggccagaggaccatttggggctaggattcaagactagcctgggcaatataatgagaaaccatctgtacaaaaatttwaaaaaaaaattagtcaggcatggtggtacacacctgtagtcttagcgcctctagaggctgagtcaggaagactgtttgagcccagaagttcagcattgcagcacgtagtgatcatgccactgcactccagcctgggtaacagagtgagaccctgtctcaaaaaaaaaataaataataaaaaataaattataagttacagaatctcaggagcaaacactatcaaatatcca

SEQ ID NO: 881253 - DNA, 592 bp, Homo sapiens
ttattaagcaatatcagattattgtctattcccagaatttttcaaagccatcctagttcgctgcccttgctatttccagtacttggcattccctctacttctctatgcctgaaaatgatggaaatggctttggaattgggcagtgagtggaggctggaagaattttggaaagcatgctagaaaactcctaggtgcctttgaacagactattaaatagggacactgttgaggaaaataaggagaattttagaaaaatcttagaaatcaccttagaaaaagcctaaattgcagtaaacagactgttagtagacatctgtacttgaaggatactactagccagggmtcagagggaagtgagtgacttggtattggaaaccagaagaaatgggatccttataatacagtggcaggaagcttagcaaaattgtatcttgtacgttcacagagagacttgaagagtgaggaagactaagaggctgctgccatttgaagatgaagtgtacaatacaacagggaatcaagtgaacagaaagtgttgatggggatcccagcagatagccaacaaaagggaacctcacttctacagcagcaa

SEQ ID NO: 881254 - DNA, 576 bp, Homo sapiens
tagcacatagcctgagattcttattattttgatctccctctacatttaatatgtcttttggaagagttatttgttgctttgttggtgctgttgtacaaaacaataatctggctggaattaggctcatattgtgaagaatataatcattgtaagaagagggtaagagtgaattactttatgtgttaaatcatagaggatttttgaacctcttgaattttgaacttcagtttcttaggaatattaatattagattaataaaaatatcaagtataccataatagaataaagtttatatgcaaatttcaagtatttctacatttctaaaaattgaaatatcaaaatatgtwcatttatttccattgcgtaatctctgatgagaacaatgcataacattggttgtaggttacactatggtcctttggagagtaaagtcaaaactgcctaccagtggtctatggagtgtctatgaaagactggcagctgattgtgagtagtcccatgaaggaaggacacagggtcaattctaaattgtaatatttaagagatcaaaaacctatgaaatattcaggaggatgc

SEQ ID NO: 881255 - DNA, 609 bp, Homo sapiens
caggatgatctgagatataggcctaaatcaactttgtttaaaaatgatgactattgtaataaaatatgttgcaatatctgaaacaaaataatgaaaaaaatctttatatccttacattcattatattggaactagtgacttgatgtttttattttattcaattctggaatgctctagagttctcagaacagcaaaataaataatgctttcaacttgtctttactttttgtatctgccctcagtaatataaayaacataatcaatcagttcttttctctatttagagaatcattgacttgatttttattccttgccttgtagcaacttgcaagaatttgtttacaaaatgataataaatataataaatattaacaccttattttgctttaggctgtattctatattctttatacaaattatgtaacttaatcatcatagtaaacacattaggtgtgcactaatattgttccatattaaagttgataaaactaagacagaactttttagtaattgccaaaagccacaacttcaatgtggcagatgaagggatcatatcacacgatgtgaatccagtaagatgtagctatcttatgcactacacaataatcc

SEQ ID NO: 881256 - DNA, 637 bp, Homo sapiens
taacattaggatcctcattactcatgcaaatttctgcagcagccagctagaatttctcctcagaaaatgggtttttattttctatcacattgtcaggctgaagaatttcaaacttttatgccctgctttcctgataaaactgaagaccttkaacagcgcccaagtcacttcttgaatactttgctgcttagaaatttcttccaccaggtaccctaaatcatctctctcaagttcaaaattccacaaatctctaggtcaggggcaaaatgctgtcactctctttgctaaaacataacaaaagtcacctttgctgcggtccccaacaagttcctcatctccatctgaggccacctgagcccagactttattgtccatattgctatcaggttttgtcaaagccattcaacaagtctctaggaagttccaaactttcccacattttttggtctttttctgagccctccaaactgttccaacctctgcctgttacccagttccaaagtcacttccatgttttcaggtatcttttcagcagcaccccactctactgctactaatttactgtattagtccattttcacactgctgataaagacatatccaagactcagcaatttactagaggaacaggttaaat

SEQ ID NO: 881257 - DNA, 600 bp, Homo sapiens
gtccatacactgtctcttacctcttcttcatttttgcatataagtagtccactagactgcaattacaatgagcattagatattccgaactctctattaatcaagaacatattggaaatattttcaattacaaaatctaatattggataagagctaatgaagagagataattaaatctcctgttacattgatggggattaaaatatttccaatttcaagatctaatattaaaaaaactaatgaaaaaagatatttaaaactctgaatatgaaactaggatgttacatgaaatcaccacttacacaaraacaggttcaaacagatgttcgttttcaattcacagagtcctcgagtactccttctttaaagaagacccagccttcaaaaaacaaaaaaggaatgtaaaagcaatttaaatctctaattaagattctcaaagcatttccaaagagaattttactcataatatacaacaaaaatgcctctaaaaatcttcatccatttttctccccgtgtcttacattgaacaaattcagctgcccaattttctctctgccttctataaaataccccaaacacttttacaaaacacaacagccat

SEQ ID NO: 881258 - DNA, 576 bp, Homo sapiens
cttggtttgtttgtccctattttttttctgtgtgatcaaagataagttctcatctctttgaaataatgtgttatcaatagcaaagacttggaaccaacccaaatgtccaacaatgatagactggattaagaaaatgtggcacatatacaccatggaatactatgcagccataaaaaaygatgagttcatgtcctttgtagggacatggatgaagctggaaaccatcattctcagcaaactctcgcaaggacaaaaaaccaaacaccgcatgttctcactcataggtgggaattgaacaatgaaaacacatgaacacaggaaggggaacatcacacaccggagcctgttgtggggtgggggaggggggagggatagcattaagagatatacctaatgttaaatgatgagttaatggatgcagcacaccaacatggcacatgtatacatatgtaactaaccttcatgttgtgcacatgtaccctaaaacttaaaaagtataattaaaaaaataaaataaaataatgtattatatctatattttttacctcatggtaaccacaatgagaaaacctataa

SEQ ID NO: 881259 - DNA, 576 bp, Homo sapiens
cttggtttgtttgtccctattttttttctgtgtgatcaaagataagttctcatctctttgaaataatgtgttatcaatagcaaagacttggaaccaacccaaatgtccaacaatgatagactggattaagaaaatgtggcacatatacaccatggaatactatgcagccataaaaaacgatgagttcatgtcctttgtagggacatggatgaagctggaaaccatcattctcagcaaactctcgcaaggacaaaaaaccaaacaccgcatgttctcactcataggtgggaattgaacaatgaaaacacatgracacaggaaggggaacatcacacaccggagcctgttgtggggtgggggaggggggagggatagcattaagagatatacctaatgttaaatgatgagttaatggatgcagcacaccaacatggcacatgtatacatatgtaactaaccttcatgttgtgcacatgtaccctaaaacttaaaaagtataattaaaaaaataaaataaaataatgtattatatctatattttttacctcatggtaaccacaatgagaaaacctataa

SEQ ID NO: 881260 - DNA, 576 bp, Homo sapiens
cttggtttgtttgtccctattttttttctgtgtgatcaaagataagttctcatctctttgaaataatgtgttatcaatagcaaagacttggaaccaacccaaatgtccaacaatgatagactggattaagaaaatgtggcacatatacaccatggaatactatgcagccataaaaaacgatgagttcatgtcctttgtagggacatggatgaagctggaaaccatcattctcagcaaactctcgcaaggacaaaaaaccaaacaccgcatgttctcactcataggtgggaattgaacaatgaaaacacatgaacacaggaaggggaacatcacacaccsgagcctgttgtggggtgggggaggggggagggatagcattaagagatatacctaatgttaaatgatgagttaatggatgcagcacaccaacatggcacatgtatacatatgtaactaaccttcatgttgtgcacatgtaccctaaaacttaaaaagtataattaaaaaaataaaataaaataatgtattatatctatattttttacctcatggtaaccacaatgagaaaacctataa

SEQ ID NO: 881261 - DNA, 598 bp, Homo sapiens
acagaagaaatttttaagtggcaaagcattcaagaggaagcagagcacaaatgtttaaaaaatttgcagcttgacaatatgattgaaaagaaaaccctattttctggggagaaattcaagcctgctgcagaaatttgcataaataatgaggagctgaatgttactcaccaagacaatggggaaaatgtctccagggcatgtcagaaaccttcacagcagcccctcacatcacaggcctggagacctaggaaggaaaaatggtttcctgggttaggtccagggctcccttgggactttgtattctgcatcccagccactcmaagccatggctaaaaggggccaaggtacagctcaggccatggcttcagagtgtgcaaaccccaagccttggcagcttccacgtggtgttgagcctgctggtgcacagaagtcaagaattgaggtttgggaacctccacctagatttcagaggatatatggaaatgcctggatgtccatgcagaagttagctgcaggggcagagccctcatggagaacatctgctagggcaggaagaagggaaatgtggggttgggtccctcacacagaatccctactg

SEQ ID NO: 881262 - DNA, 587 bp, Homo sapiens
agaaccagctgtgtgccaggctgcaaattcagcaggttacatgtactcgctctcatactacaccagctctgcaaaatgggcagggttgtgcatatttacacatgaagaaactaatatttcatatttacacatgaagaaactcgtgtttcagagataytttttttcatttacctaaaacagcagagagaaaacatgaagccaagtgtttgaggctctgaaactacatttatctcatcactctgctctatggttagaatatttcatcattcattatttaaacatttctgctcagctatttcattgaagactcaccagcccctccctctaatgcatactttttagggggaaaaaaaaacctgaatccagcaagcaaaatttctcagtttatcctacaggtgccactataaccatataatatctctttccagctcttcaactctgatttctcagggctgccatagaccagaaattctagaagacagaagaaggcaatttatgtagctgacggttcattttgataaatctatgcgtgtgtttacagctctgtagcttctatatatgtgtaataattgcatttttccttttat

SEQ ID NO: 881263 - DNA, 629 bp, Homo sapiens
tgaatttgttctcaattttctagtttatttgcatagaggtgtttataacattctctgatggtagtttgtatttctttggaatcagtggtatatcccctttgtcatgttttattgtgtcttgattcttctctcttttcttcattcatctgtctcgtggtctatccattttgttaatctttctaaaaaacccgctcctggattcgttgattttttgaagggcttttcatgtctctatctccttcagttctgctctgatcttagttatttgttgtcttctgctagcttttgtatttgtttgctcttgcttctctagttctttcaattgtgatttagggtgacaattttagatctttcccgctttctgatgtgggcatttagtgctataaatttccctcttaacactactttagctgtgtcccagagattctggtacattgtatctttgttctcattggtttcaaagaaygtatttatttctgccttaatttcatcatttacccagtagtcattcaggagcatgttgttcagtttccatgtatgtgtggttttgagggagtttttaatcctgagttttaatttgattgtactgtggtctgagagactgttatgattttcattcttttgcattt

SEQ ID NO: 881264 - DNA, 572 bp, Homo sapiens
tgcttctgttcagggtgttccttctgcctggcttaaacttgttgcctctgcttccctgtgtaattgacagcatctatctcttcttgaaaacttatctcaaatgctccctcttttacaaatatcatgttgaatcactatcaaacacaggtctccttgatgaaaactttgtcataattcttgagtaactttcttatgatacctgccttactgtgacttttgttcagttattagtatttttgcgttttaactatcttatcaaagttgtaaactcctaaagataatgtgtttatttctctcagtatcatttctagagactaacgttgtttyttgtacatggtaagagttcaatatatttattgtattgaacgttataataataacagtatctctttctataaatgtcaatcttctttgatccttattactctgggactgggcagagattatcacactgtcatattagagaactgaaaccaatgcaatttatcgtcccatgttaaaaagatactgaacacaaacatactttcctttcccaatattgagaataacttagctacctactccagggtaca

SEQ ID NO: 881265 - DNA, 571 bp, Homo sapiens
gaagaaatataggaggccctctcttccttttcaggcaagcacattacatgagtttcactctcaggtatatctaacaatattctggtcagagttcacttccaggattatctaacaatattctgaagacaaacacaatcaactttctactctagatttagaatgagagccttctactagctaaggatggacagacagaaatgagctcctaaccgaaagtgctatttcaaatataataataggctaaccaggattctaatacatttattgagtcaagggggtattgcaatttttttttctagctaattacatatcttgaacacattcatttcatcaatgaaaatcattattttatgctaattaatagatgttctggggatctatttggataagtttgaatcacttgtatagctaccctgagcacagrttttgaataaagatactttcaaaaataagtaactcttcagcaccaccatggccagtgtaattataatatataaatattttaaagtataagactgacaatattacatttgagtaaatgacttataaaagacattcagccaaaagaaca

SEQ ID NO: 881266 - DNA, 462 bp, Homo sapiens
aatcatacaatatgtgacctattttgttaggcttctttcacttggtataatgttttccaggttcattcacattgtagcatgtgttggtacttcatttctttttatggctgaataacattccattgtatgtccgtccataccaccattggcttatccactcgtctgtcaatggacatttgggttgtttccatctttgggctattgtcartagtgctgctatgaacactggtgtgtatttatttgagtatctgttttcaattcttttcagtacacctaggagtggaattgctgggtcatctggtagttctatatttaactttttgagccattgccaaactatttttcacagtggctgttttgttttatattctgtcattttgctttgtgaggattaaatgcagcagggtatttacaagtgctctcttgactataaagactatgagaattactgtatatgaattg

SEQ ID NO: 881267 - DNA, 594 bp, Homo sapiens
tgcctatcatcagatacattactaaacacagtagctgaacttgactgcatgccctttaagaggcaggcattccaccaggtatgtttaatccttttaaaaagatgtgtgtgaactgggtattaatactaaagccaatttacaaaaaaagaaatgaaatgagagcgcttaaataatgtgccactgaaagcacacctagaaatggtcaaggtaagattaaaatctaggttttctaagatgaaaaatccagtgtctgctccacttcactatacatggcaaaataaaacacacacacacacacacacactttaatgttttaaaagaatcacttatccagttttgatcattcctytgattcaggttcatctaatcctacttttggcctgcctatttgcacatataaacccacataataggtgaatgcgtgtgtctgtgtatttggcagcctgtggaaagaatgtaaatttcagctattctcatctgctgacaaaggagaccaccaatctcccaacctcactgggcacgccctttctgaattagctgaggctggtgtttatgcttttctggattagatccaccctactcatcaacatgatt

SEQ ID NO: 881268 - DNA, 594 bp, Homo sapiens
tgcctatcatcagatacattactaaacacagtagctgaacttgactgcatgccctttaagaggcaggcattccaccaggtatgtttaatccttttaaaaagatgtgtgtgaactgggtattaatactaaagccaatttacaaaaaaagaaatgaaatgagagcgcttaaataatgtgccactgaaagcacacctagaaatggtcaaggtaagattaaaatctaggttttctaagatgaaaaatccagtgtctgctccacttcactatacatggcaaaataaaacacacacacacacacacacactttaatgttttaaaagaatcacttatccagttttgatcattcctctgattcaggttcatctaatcctacttttggcctgcctatttgcacatataaacccacataataggtgaatgcgtgtgtctgtgtatttggcagcctgtggaaagaatgkaaatttcagctattctcatctgctgacaaaggagaccaccaatctcccaacctcactgggcacgccctttctgaattagctgaggctggtgtttatgcttttctggattagatccaccctactcatcaacatgatt

SEQ ID NO: 881269 - DNA, 606 bp, Homo sapiens
ctttgggttcttctgccctgggtgcctcaaccccaccccacccgtaagtgctcttaatttccctctctttcatatttcctgggtgtttttgtagatttccgaaatcaaatcaaaaaactatttatcatgaatatgatggtgtcaggaattgtatgagcatgaacaygcaaacactaagtggaaacagctgatgtgcaagattgtgaaatttttttccttttaaaatcaaagccttttgtgttgttgttagtatgctaaatatacattttacaattgaatccagacagtattttactatatcaaaataggcagagaaaaacaaacacaacatgattacattacattttaaaggagccatcctgatagtgatagaaaaggagggaataccattcaatatttctattgtttaatagttatttaaagatatttttaaatctcaataataatataaagaaaaattctttaaaaagtgtcatgcatttattttctgtctaccacaccccactacatgtctttaagaaagtgccaggcaaggaaacaagactctggaatgactgagtcacagaggagacacctgaaccatccaggattgttctaaaaatgccc

SEQ ID NO: 881270 - DNA, 522 bp, Homo sapiens
ccaagagaacttccccaacctagcaagacagcccaacattcaaattcaggaaatccagagaaccccagtaagatactccatgagaagatcaaccccatacacataatcttcagactctccaaggttgaaatgaagaaaaaartgttaagggcagccagagagaaaggccaggtcacctacaaagagaagcccatcagactaacagcgtacctctcagcagaaaccctacaagccagaagagattggggccaatattcaatattcttaaagataacatttttcaacccagaatttcatatccagctaaactaagcttcataagtgaaggagaaatgaaatccttttcagacaaagaaatgctggaggaattcatcaccactagccctgccttacaagaactcctaaaggaagcactaaatatggaaaggaaaaactgttaccagcccctgcaaaaacacactgaagtacaaagagcaatgacactgtgaagcatctatatcaagtctgcaaaataaccagcta

SEQ ID NO: 881271 - DNA, 659 bp, Homo sapiens; identical to SEQ ID NO: 864602

SEQ ID NO: 881272 - DNA, 605 bp, Homo sapiens
caaatctgttttgtactgaaatttcttttatttaagtgttcccttatgacagtttttattaatggattactgtgtgtggagcctgtactgggtgcaggggagagagaaggaccctgtgttaagatgcatgtagtcttgtgcagactaacaaattgatgacaatgatgattccatgtagatggtcctaggtgcacaggttaaacagagaagggattcctggctgtgcctggtgtgtccaaaaaggcttcctggtcaaagcgatccctaatctggkctgggaaggggagaactgagcaagggccttccaaggttggtcacagggtgcgaggacacggtgagttcaagagccacgagaggatggggcgtgtcggggtgcaatggggaaagatgagcagagttgagttctcagttccctcttatccgaggtgtgcgtgccagcaagtccatttggtgggggtctgggtttctgaaaaacaactcaaggacatatgctaagatgttacctttagtttctttaggcaaccacacgtttcgtgtggtctgacttccttgctattattttagctacgattaccttcttatcaggttgcacatttacttctcag

SEQ ID NO: 881273 - DNA, 589 bp, Homo sapiens
cacatacaaaaacgacaatggctatattagttatcagacaaagtgggcttcagaacagtgctatctcttcatcaggcataaagaacacttcataataataaatagcataataataatgctaaaaaattagttcatcaacaagacaataatactggctgtgcatccaactaattaataactaacagcttcaaaaaataacagaacttcaaaattcaagaagtgaaaattgacagaaatggagaaacagacaaatccgcaattatagttggagatttcaacatgcctttcttaataatgtatactgtttccaaacatctacaaggacctttttttcttaagattgagcacagatgaccaaagagaactgtgtttcataattcagattcctgcacaccaatctytgacatgaggtttcacttcccaatttcccatactcttattaataagtaggtgggttgggatctgaagagatgcatgaagggacaggagaatgaaccatcttagattagggttccagatcttgcacaatgggtggctttatttatgcatctaagctccctgggcctcagttttctcctctgttagaaaa

SEQ ID NO: 881274 - DNA, 613 bp, Homo sapiens
gaacaaggcaacatttatcacttgcactccagtgacacctaaatattgatctagttgcaaaaagggaattttctgggaaaggacatgaggcctttggtgaggtggctttctgcaacttctacagatattgaaagggctaatatctgaaagttgtctgtgaacagcgtgcccagcaactggaaatatatatccttctttcctaaaggragggcaaggaagtacatccttttatctatcacagcctacctattatgtcacttgaatccatttcttcatatacacttgagaacagcttctttaagattctcttcctgggggaaaattaaaagagaaaggttaagggacaaatattgtctcttgccaccatggctgatcatagagttgcaactgctatgtaccatcttattcctttattgtcaattctatttctcccacttcaccttttactagcaccgctactggtctcatgacttacttaaaggtgtagcttagaccttcatctccaaaatatctcatcctggtacactataatcattcagaacctgattcttttctattctcacttattatcacaattagacagggcatggcaagatgtgcccctgtcagtcac

SEQ ID NO: 881275 - DNA, 574 bp, Homo sapiens
cctatcccgttaaataagttatgagatcagtagagatgctagcagaggtaagtggaaaaaaattgataaggaggaagattgtaaacagtagttgcaactcagatcagcttcagtggcaagatacatagtttggccttcagcttttctcttctaattcccctcaagtaagagaatcytaaatgagctgttctgatcatatataagaatatgtaaattcacacggcataagggatatattatggtatatatgaggagcctctgccctgcccttcatttaggaaagaaggatttatttttccagctgttgggtgtgctgttagtagacagcattcagatgatgtccccttaggtatctttagaagttgcagaaagccacctcaataaaggtctcatgccctttctcagagcagtccctctttgcgtccaggttaacatttaggttcaggtatcattagagtgcaagtcagaaatatggtacttttctagaaaaaaaatatttcattttgttatgttaaataacataaactatactataaaactacagtaaccaaaacagcatggtactggtatcaaa

SEQ ID NO: 881276 - DNA, 664 bp, Homo sapiens
atttcccaaaccatatgcttaactaccatgataccctgccaagcaatgatgatagaaatatcagatcatgataacagctatcatttattgagacaaggactagctggacacattgtatatgttagttcattaaaaatataagtttttcattaataattgtttcatttttatatatcaaaactgatggccattgttttctgaaatattatgctatctaactacttcagggctataaaagcaaaaatctatttagcatctgatgggtaaacaatgaagtttataccatgatttcaaatgtccttgtaggcttcagaaccattttctattattcatgttacyctttttatactgataatcgaccagaaagagtgatggttcaaataaagatgttttgatatcaaggagaaatttctatttattgaatatacagttataatccataaagtacttgcccgatagataacaatagttcctacaaggtaccacgtctggtataccataaacagaatcaatgaataaaaggattaatgaaaatgaataaattcaataaaatataaagcaaaagtagtagtggaggctaggaaagtattttctaccttcagactaagaattctggttggaactcatagggaaatcacattttttcactcttattgaaacaatg

SEQ ID NO: 881277 - DNA, 625 bp, Homo sapiens
acatcacacaagccttccagaaagaacccatctgcctcttctgtctgaactaactcatagaccccatcaccacaggctgcggccccagcttctgtaggcctttcctgtctctgcctttcctgggaagaagccaaaattcctaccggctgcccacatgcggggaactgtcacagcaggaggacgtcaaaactaatattcttctggagattccagtgttcattgccataaaagccagtctctggcaattcctgagctctaatgaacaaatgtgtgggatccacagggagaaaaaaagatattggagcggtggataagagcctgcttcatttgctgttctggaacactcgggarcactgggctcccagacactgtgaggggcaactaaggaacactgggtaagtgatggctctcagagcactttgaaagctggaggatggcacaggtaaagagattagggggaagatgaagagcatgaggattattctgttctgtactggatatcatgtagtgcctaggtatcaatgatagaaatttaaatggaatctgtgagaataccttccttcctggaacttgcatttcactgagggagtgatggaagttaataatcattataataatttgacta

SEQ ID NO: 881278 - DNA, 575 bp, Homo sapiens
ttttcaagtcatcctcctgtggcagcaaagctgccagtcctcatgggatgccccatcacttggtgtaacttatgccacaaactctggatgagggtgggggaaatggttgcagccccaggctaaacaagtgtgtccagttgtatcactgctttttgtgaaggagctattccaagctccctactcagctattccagatgttagcacctatcaatattttattccattttgaaactgctcccaaaataagaagtgttttactgatctccatttttcagtgcytattctaaggcttgatacacattagaatatctgtaaattatcttgagtaaataataaaaagcctattttaagcagtcagcataaaatgcaggactttgaatagccatcagtttaaagtatttctttacttgtatcatagaattatttctcttgtaaaacaaccagataatcatactgtgaacttttctaatttcaggcaagcacagaaacaaagatttataaatatcagttgagaaatgcagattcagaaagaaataattaaatgtcctggagctaaaaaacttgtaagagtaaaa

SEQ ID NO: 881279 - DNA, 619 bp, Homo sapiens
ctaaaaaacttgtaagagtaaaaacaaatacggtccactttagggattgtgagttcaatgttacaattacacaaattataataataacatgagagtatattttattatttcggaagaaaggacttccatattctaataatagtaataatggcaacaatagtaataataatgatgaaaaatactgttttcagaatgtggaaaattaaaaccactcattacgatgagcaactcatcataattctcagcccttggaccttgtgtatgagctacaattttacacatgcatccaataattcacttaataaataaaacatatgtgccaggttcggaaggcacgaagatgagtcatctccactttgccttcaggatatcacagtccagggaaggagacagatctgtaagtgggtaattaccataaaaagtagtactaaaaataagtagaaggaggatttaatggtccaatctattrattaggttaatatgaagtgaaatgagttagtacttgtaaaccatagaccactgtccagcactagcaagtgacaaatggatgtttgtctcttaggaaaaaaaaaggattcagcgtggaaacagctctggatactcctcactcttcaccttg

SEQ ID NO: 881280 - DNA, 661 bp, Homo sapiens
actattctgtagaaaattttggaatatgtatcaattttaactgagtatattatttgatccagcaacttcagttctagggaaagttaagtgaacctaaactcaatttcctagaatagttgcttctaaaataagttttggaaatggtggtaacatctgagcattacagtagccattggccatgtgtgaccattaaacacttcaaataagggaagtttgactgaggaaatggatatttagattccttcatttctttcggttattagcagctttattgaggtataattaatatataataagctatacatatttaaggtgtaaaatttgttaagcttgacatatgtatatacctgtaaaaccatcactataatcaagataaygtagatatccattacctcaaagatttcctcatacccctttgtaatctctccttcctgcccttccccacccactcctgcaaaaagcattaatttgcttttagtcacaatatattagtttgcatttccaagaatttcatataaatgagatcacacaataagtactctttttttaatctagcatcttttatttagcatagagattcacccatgctgtagcatatattattcctttttcttgctgagtagttttttttgttgtatgtgtataccataatctttttatc

SEQ ID NO: 881281 - DNA, 544 bp, Homo sapiens
ccttagtaatgatgggcttatgccttatcctaggcgttgaggaaacacaccccttcccttcaagcattcttattccaatggaagatggggggagagtgaagccagataagttagaaaattccaacataatgcattagttatgtacaaattattcacttagataagaagtgactaattctgtcctatggattggagatgattttaataggaaggtgatagttccgttagaattaaggcagtggccaggtktggtggctcacacctgtaatcccagcactttgggaggccaaggcgggcagatcacctgaggtcaggagttcgagaccagcctggtcaacatggcaaaaccctgtctctactaaaaatacaaaaatgagccgggtgtggtggcaggcacctgtagtcccaactactcaggaggctgaggtagggagcattgcttgaacccgggaggcagaggttgcagtgagccaagatgcaccattgcactccagcctggatgacagaacgagactccgtctcaaaaaaaaaaaaaaaatagaat

SEQ ID NO: 881282 - DNA, 570 bp, Homo sapiens
tcaaatctttgttgaaaaatgatgtatatcaattttgtttattcccaaacctgtaggatgagaataaaataatgcaaattatgtccatttgggggtttgcaatacaccaaatggtgtatttatatatacactaatatttatatacacttttactataaaaatacttagcactcttcaattcatttagcaatggctgccaagttcctacttggattaatcaataccaaacagaggtaaagtaatttatactttatataaagtatataaacaaatataaataaatcaataccaaacagaggtaaagtaatactctgctagtaccctagtaaccttgaaaatcaggttactaaaaggaaaaataagacaactccttacccacygaagaaacccacccaaatacactgtgtctgaatatgtatctaggaacactcaagtccagtcaatctctccagcaaatataattaaatgttcaagataactacagtctaataaagtatcgggtaaggtctttcaagaaacaagaggaggaagattatttctgtgcagtttttagaaaagggagcccaaaga

SEQ ID NO: 881283 - DNA, 576 bp, Homo sapiens
ggatatataaaatgccactgaaatttttctggattaaaaagattgttttctgttagcaaataaattcatcaagtctttcaaaggtatacttgagatcttataacctgtttactttctcctagtcatcagggagatattaccatattctgtgtgacaaggctcttcctcagcctgggtaaaataatccttgaaacactctaacttattttgttctacctccatggccaccattggataaccttctgattatttgatggatttcataggtgctctgatataattaagttacttactcggatagcaagctcaagtatttcagttttacacacacacacacacacacacacacayagataaataatctggtatgtaaattaatttcttgtaaatatagatggtctgtgttagatcccacgggctcatcactcttgagaataagaaaagtttttaacctggaagagctatcctggaccacagttactccacagggtcctctcaccattgaggtcttcccttcatatccagactattgttctgtttgtttgtttgtttgtttttggatatcaccttcctcta

SEQ ID NO: 881284 - DNA, 576 bp, Homo sapiens
ggatatataaaatgccactgaaatttttctggattaaaaagattgttttctgttagcaaataaattcatcaagtctttcaaaggtatacttgagatcttataacctgtttactttctcctagtcatcagggagatattaccatattctgtgtgacaaggctcttcctcagcctgggtaaaataatccttgaaacactctaacttattttgttctacctccatggccaccattggataaccttctgattatttgatggatttcataggtgctctgatataattaagttacttactcggatagcaagctcaagtatttcagttttacacacacacacacacacacacacacacagataaataatctggtatrtaaattaatttcttgtaaatatagatggtctgtgttagatcccacgggctcatcactcttgagaataagaaaagtttttaacctggaagagctatcctggaccacagttactccacagggtcctctcaccattgaggtcttcccttcatatccagactattgttctgtttgtttgtttgtttgtttttggatatcaccttcctcta

SEQ ID NO: 881285 - DNA, 606 bp, Homo sapiens
atttttgcatttctaaaattaatgccagttacatcttttaaaaaaatttttttattttactttaagttctggaatacatgtgcagaacatgcagrtatgctacataggtatacatgtgccatggtggtttgctgcacctatcaacccatcatctaggttttaagccctgcatgcattagataattgtcctaatgctctccctccccttgccctccaccccccaccaacaggccccagtgtgtgatgttcccctccctgtgtccatgtgttctcattgttcaactcacacttatgagtgagaacatgtggtgtttggtcttctgttcttgtgttagtttgctgagaatgatggcttccagcttcatccatgtccctgcaaaggacatgaactcatcattttttatggctgcatagtattccagggtgtatatttgccacattttctttatccagtctatcactgatggacatttgggttggttccaggtctttgctattgcgaatagtgctgcaataaacatacatgtacatgtgtctttatagtagaatgatttataatcctttgggtgtatacccagtaatgggattgctgggtcaaatggcatt

SEQ ID NO: 881286 - DNA, 447 bp, Homo sapiens
ggggcaaaatgtcaccagtctctttgctaaaacataacaagagtcacttttgctccagttcccaacaagttcctcatctccatctgagacatctgagcctggatttcattgtccatatcattatcaggattttgggtccaagccattcaacaagtctctaggagttccaaactttctcacrttttcctatcttcttctgagccctccaaactgttccaaactctgcctgttacccagttccaaagttgcttccacattttcaggtatcttttcagcagtgccccattctactggtaccagtttactgtgttagtccatttatgctgctgataaacacatatgcgagattgggtaatttacaaaaggatgaggtttattggacttgcagttccatgtgactgggaaggcctcacaatgatggcagaaggtgaaaggcatatctcacat

SEQ ID NO: 881287 - DNA, 655 bp, Homo sapiens
tctcccaggccactttgacttgaagacccctcattggttttgctgaaactttctttattagtagtagcagtagtatactttaagttctgggatgcatgtacacaatatgcaggtttgttacataggtatacatgtgccatggtggtttgctgcatccatcaactcatctgcattaggtatttctcctaatgctatcccttccctagaccccacccmtcaacaggccccagtgtatgatgttcccctccctgtgtccatgttttctcattattcaactcccacttatgagtgagaacatgcggtgtttggtttcctgttcctgtgttagtttgctgagaatgatggtttccagcttcatccatgtccctgcaaaggacatgaactcatctttctttttttggctgcatagtattccatggtgtatctgtgccacattttcattttctttatctggtctattattgatgggcatttgggttggttccaagtctttgctatcgtgaacagtgctgcaataaacatatgtgtgcacctgtctttatagcagaatgatttataatctcttgggtatatattcagtaatgagattgctgggtcaaatggtatttctggttgtagatccttgaggaatcgctacactgtcttccacgatggc

SEQ ID NO: 881288 - DNA, 637 bp, Homo sapiens
cttgaatttctgctgcatgcacttggcctccctgggaattagattaattgtcatgctaggagatattctcctattcagtctgaaggcctaggaagtcacacaggatagtctttgttttgttgggaggatgggcactctgtggttaatgagaatggttacaaatggggcaaacaagagaaaaataacaatcttataaacttccctttgctactgctattatagtcttaatgaaaagccgctagatgctactggcccaagtgagaagtagtcattgtatcaatttagtcccataataagktggcacagtccattttttaattatttattttattatttatttatggcccccccccccgagacggagtctcgctctgttgcccaggctagagtgcagtggcgccatctccgctcactgcaagctccgcctcccgggttcaggccattctcctgccttagcctcctgagtagctgggactacaggcgcctgccaccatgcccagctaattttttgtatttttagtagggacgggatttcaccgtgttagccaggatggtctcgatctcctgatcttgtgatccgctcgccttggcctcacaaagtgctgggattacaggcatgagccaccgcgccctgccg

SEQ ID NO: 881289 - DNA, 552 bp, Homo sapiens
gaaaatcagatggaaacaggaaaggatgagttcttaggcagagatactactagaaaccaggctgcttagtatagcagaatgggggcaatcagttcaatatgtttgtaccattgatgtgaagatgggactcgtgtctctttsctgatctgtcacatccaagaaggtgcagactgaaagccactgaatgcttcaaagatacaatttttattacttgaccagccacaaaatgttcttcactgaccagcacattaattctcaagtaggtgtaaccctcagaccagaaaataaaactgaatggtagtacctagggtagggttggcaaatttaggaaaattattggagatctctagtttactctgaatttcagataaacttcaaatatgtaatacttgaaaatacttattattaaaatatactatttatctgaaattcaaatttaactgttctatattttatgtggcagccctaatctaagtaggtatttttaaatttctatggatgtatttatttatttatttatttttttgagacaaggtctcactctgttaccca

SEQ ID NO: 881290 - DNA, 641 bp, Homo sapiens
agcttgtgccaggaaacaggaaggaagatcaaatatatatttatcattatataaaaattacatcatgtcagagagaaagtcttataattgttattgaatgttgagcataagaatgatatcaacaaccagataaatcttacgtttattatagaaatgatcctacttaacatttctttgaatttatttagtgggtctagatttttatggaagaggctaattactaaagtttcaaaatgaggatgtgatataggtatgggtgtcaatctattaatatgtcatatctgacaactttatcttctaacataactaagaaaacatactttagcaaactttatcatttgtacaaaagcatttggaagagctaactacaagtacttatactcatgcctccagtggttcagatttagtaatgtagttggactcatgtattcctcatatgcakgtattgcatactcgctgtaattgggttcatatgtgcatttttgccagtaaaatcggtaattctgatatttgctctgaggatcataatttaataaatactgctttaaagtgaaaatgagtcaaaatactgttaaaagagaacgtgtattttgcattttcagaggtgatataaatgtggtcttacaaacaattctaacttt

SEQ ID NO: 881291 - DNA, 665 bp, Homo sapiens
acatatttaaaatgttatcattattattataactgttatggtgatctgggatcagtgatctttgatgttagaattgtaattattttggggtgccataaactgtgctcatataagacagcaaacataactgatatatattgtgtgtgttctgactactccaccaaccagctcttcccccatctctctccctttccttagacttccataattcttggctacaacattattaaaattaggccataattacccagagtgttcagatgaaaaaaggagttgaacatctgtcactttcaatcaaaaactagaaatgattaagcttarcaaggaaagcatgttgaaagcaaagacaggacaaaagctaggcttaccatgaccaacaggttgactttcttactggaggctaatggaactggtgactctaagttgaaatcaatgctcatttaccattctgaaaatcccagaactctttaacaattatgctaaatctattctgcctgtgttctatcaatgggataaaaaagcctggatgacagcatggcttattgaatattttaagtctactcttgagaccggcttctcagaataaaaaatgatttttttttccaaactattattactcattgacaatgcacctagtcgcctggagctctgatggagatggacaa

SEQ ID NO: 881292 - DNA, 604 bp, Homo sapiens
aagagagcagggaaattgccagaaaaatcagggttaacctcatctttggataatactcacttgctatgtttgtcagtttaaaatttactactgaaggtatctatggtgtcaagaattacaagaatctcaaaaagagttcatcatttactctttcattagatggtatattagtcagggatttccagggggacagaactaatagaaaaaatatatatatatgtaaatatatataatactaaataaactcaatatatatacagaataaaaatatatataaaawatatatataaaatgctactcaataaactctcttcatatatatatatatatatatatatatattttttttactatactaatactcttgtgagtattaattcacatgatcacaaggtcccacaggaggctgtctccaagctgaagagcaaggaagccagtccgagttccaaagctgaagaacttggagttcgatgagtggatgtttgagggcagaaagtatctagcttgggggaaagatgtaggctgggaggctaagccagtccagccttttcatgtttgtctacctgctttatatcctggccacactggcagctgattatatggt

SEQ ID NO: 881293 - DNA, 592 bp, Homo sapiens
ctgatctcaaactcttaggctcgagtgatcttttcgcctcagcctctcaaaatgcacccctttactttggaaggataatttcactggatatagaattagacgttgatgggtgatttttatttcagcacctaacatattccactctcttcttgcctgtttggttcctgatgagatgtctgctgaaattgttacccattttgctttatagataggtgttcattttacttttccttcttttaacatgttccaattattttgttttctgcagtttatgtctgtgtgtgtgtgcgtgcatgtgtgcaggcatgcatgtgtgtgtgtgtgttggtatttattcttcttggagttctctgagcttcctggatctctgatytggtgtctgtaattaattttggaatattcttgaacattattactttcaaatatttttccagctctgacctgccttccggtgtttcggttacacatgtgataaactctttggaacagctcgctggttcttgcatgccatgtgtttgcttggttttcatttgtttttctctttgcatttcagtgtggggacattctactgacatagcttcaagttttataa

SEQ ID NO: 881294 - DNA, 598 bp, Homo sapiens
tgccacatacttttaaatgaccagatctcatgagaagtcactcactatgccaggacagcatcaagccatgaggatcctcccacatgacccaagcacttcccaccaggccctacttccaacattggggattataattgaacatgakatttgggcagggcatccaacctgtatgattttgccccggcccctcccaaatctcatgtccttcttacattgtaaaatgcaatcatgcctttcccaacagttccccaaagtcttaactcatttcagcattaactcaaaagtccaaagtctcttctgagacaaggcaagttccttccacctatgagcctataaaatacaaaacaagtgatttacttccaagatacaatgggggtataggcattggggaaacatttctattccaaaagggagaaatcagccaaaagaaaggcggctacaggctctcaggctgagctctgaaacccagcaggcacgtcattaaacctgaaagctccaaaataatcccctttgactccatgtcccacatccagggcacactgatacaagtggtgggctcccaaggccttgggcagctcttcccctgtgacattgtagg

SEQ ID NO: 881295 - DNA, 645 bp, Homo sapiens
gcggctgagctggcatgcaaactataggatgcagtccttcccactcttctgcccctttccaaaggcagaggaaccttaccctgtagccaccgccaccccaggccatgagtagtattgccaggctaccaatgatgttctcttatggcccaagggcttttaagtcagcttgtggtgaatgctgcctcacctgggactcatccttcagggcagtgggttcccctctggcccaaggcaggtccagaattgccatacaagagtcaagtcctggaatcgcggaccccaagaacctgcctcggtgctctacyctcctgtggccgtgctggtatctaaggtgtaagactgtccccactgcttttccctcgcaagcaagagttttgccccatagctaccctagctggtaatatgctgagtctcacctgaagcctgcaagtcacagaggctcacccaaggccctcaatgtagtagctgggtattgctgctagttattcagggcccaagggctcttcagttaacaggtgatgaatgttgccaggactgggtcccttccttcaaggcagcaggttcccttctggcccagagtgtgtctagaaatgtaacttgggagctagaacctggaacgagggccttatgactctaactggtgcc

SEQ ID NO: 881296 - DNA, 565 bp, Homo sapiens
aaataattctgtttacctctcttttggatgcttcagggaacctctgtagcatcccaaagttaaaggtcaaaaaagacttaattttgaagctgaaatctgatttttgggaagcctgacaaatatgtcaaaggtttaaaacacttgaccaaaatagaatcacaggtcaccataaaacaatagtcattcatttaaccaaagtgataattaaaagattctttttatttgtttgtttgttttttgagacaaagtctcactctgtcrcccaggctggagtgtgatggcaccatctcggctcactgcaacctccgcttcctgggttcaagtgattctcctggctcagcctcccgagtagctgggactacaggcatgcaccaccatgcccagctaatttttgtatttttagtagagatggggtttcatcatgttggccaggctggtcttaaactcctgacctcaggtgatccacccaccttggcctcccaaagtgctgggattagaggcatgaaccatcccacctggcctaaaagatacttaaaaacaaaaaacctgtactctttgataaagg

SEQ ID NO: 881297 - DNA, 659 bp, Homo sapiens
gtgtttccatacatcttctgaaatctaggcagaggttcccaaacctcaattcttgacttctgtgcacctgcaggctcaatactatgtggaagctgccaagggctggggcttccaccctctgaagccacatcccaagctgtacattggcccctttcagccatggctggagcaactgggacacagggcaccaagtctctaggctgcacacagcacagggatcctgggcctggcccacaaaaaccactttttcctactgggcctctgggcctctgatgggaggggctgtcatggtctctgacatggcctgcagacatatcccccgtggtcttggggattaacattagattcctttctatttatacaaatttctgcagctgscttgatttctccccagaaaatggatttttcttttctaccacatgtcaggctgcaaagtttctgaacttttatgctctgcttctcttataaaactaaatgcctttaacagtacccaagtcacctcttgaatgctttgctgcttagaagtttcttctgccagctgccagataccctaaatcatctctctcatgttcaaagttccataaatctctagggctgggcaaaatgtcgccagtctctttgctaaagcgtaacaagagtcacctttactccaatttcca

SEQ ID NO: 881298 - DNA, 596 bp, Homo sapiens
aatgtcgtaattgttaaataattataaactggggttgtttttatgagacccaaacacaaagggttttacaagattttttgtatcagtgaagatacacagatgaaaattggtacatactgttgtctatgtttcattaccttttacatttagatggaagtttggtagaaagagcaaacactggaatcacagtgttgtccaggctgtgcttttcatgttattgtaactttgaggaagctacttgtccatgttacctgaatggtcagtttcttcatctataaatatgttgtaataatgcgtatttcattatacaaagrtttcaatgtaagatatgtcagatgtgctttttacaccaggctattaagttttcattatttaaattattgatattattattatttgagttgccaattttatactttgttcaataatgtaactcaaccatccaggtattattgttatcccaaaataattgttagaaccgtactagaactgtactactcctcacatattttaaagttacatctgttttttattttttttttatactttaagttttagggtacatgtgcagaacgtgcaggttagttacatatgta

SEQ ID NO: 881299 - DNA, 635 bp, Homo sapiens
ataaggtgtaaggaagggatccagtttcagctttctacatatggctagccaggtttcccagcaccatttattaaatagggaatccttcccccatttctggtttttgtcagttttgtcaaagatcagatggttgtagatgtgtggtattatttctgagggctctgttctcttccataggtctatatctctgttttggtaccagtaccatgctgttttggttactgtagccttgtagtatagtttgaagtcagatagcgtaatgcctccagctttgttcttttggcttargattttcttggcagtgtgggctcttttctggttccatatgaattttaaagtagttttttgcaattctgtgaagaaaatcattggtagcttgatggggatggtattgaatctataaattaccttgggcagtatggccattttcacgatattgattcttcctatccacgagcatggaattcttccatttgtttgtgtcctcttttatttcatggagcagtggtttgtagttctccttgaagaggtccttcgcaacacttgtaagttggattcctaggtattttattctctttgaagcaattgtgaatgggagttcactcatggtttggctctctgtttgtctgttattg

SEQ ID NO: 881300 - DNA, 678 bp, Homo sapiens
atataccatttgttccagttctgtggcagaacaattcttgttggattgctcatgtgaggtttgtttgagaggtacctagaacacctcatcatgagagagaaatggtgtagtgtagtgctaagagttcgacttcagccagacttcctgagcttgaattttgcctctagtatgatactgatgacttgaactcttatccctcagttttctcatttgtaatatggggattaaaatagtacctcctcaaaaggttattcattcatttatttaattattattttactttaagttctatggtacatgtgcacaacgtgcaggtttgttacatatgtatacatgtgccatgttggtgtgctgcactcrttaactcgtcatttacattaggtatatctcctaatgctatccctcccccttcccccaaccccaagacaggccccagtgtgtgatgttccccaccctgcatccaagtgttctcattgttcaattcccacctatgagcgaggacatgcggtgtttggttttctgtccttgcaatagtttgcttagaatgatggtttccagcttcatccgtgtccctacaaaggacatgaactcatccttttttatggctgcatagtattccatggtgtgtatgtgccacattttcttaatccagtctatcattggtggtcatttgggttg

SEQ ID NO: 881301 - DNA, 678 bp, Homo sapiens
atataccatttgttccagttctgtggcagaacaattcttgttggattgctcatgtgaggtttgtttgagaggtacctagaacacctcatcatgagagagaaatggtgtagtgtagtgctaagagttcgacttcagccagacttcctgagcttgaattttgcctctagtatgatactgatgacttgaactcttatccctcagttttctcatttgtaatatggggattaaaatagtacctcctcaaaaggttattcattcatttatttaattattattttactttaagttctatggtacatgtgcacaacgtgcaggtttgttacatatgtatacatgtgccatgttggtgtgctgcactcgttaactcgtcatttacattaggtatatctcctaatgctatccctcccccttcccccaaccccaagacaggccccagtgtgtgatgttccccaccctgcatccaagtgttctcattgttcaattcccacctatgagcgaggacatgcggtgtttggttttctgtccttgcaatagtttgctyagaatgatggtttccagcttcatccgtgtccctacaaaggacatgaactcatccttttttatggctgcatagtattccatggtgtgtatgtgccacattttcttaatccagtctatcattggtggtcatttgggttg

SEQ ID NO: 881302 - DNA, 638 bp, Homo sapiens
gggacagttgactttagtatgtgcatggctgttgtattgttttgaggccaaaatgaagttgacagtctctgtcttaattcaagtttacatcttaaaaaattactcatacttttaaaaaatggatcagcctaaacaaaccatggttattgctggtattcattttatttattttaaaggtataacatggtaattttactgagaaactattataaacaaatcaatgcatgtrtaaatggaggtagatgaaattgtaagggaagcttagactttatagaccaaattcaagtgttcgtcaagtgcaagaattttactgctagaacaccattgaattagaaaaactctgcttaataatactcatgtctttttagtcttttaagtgtggatcttttctcaaagacacaccactggaattatccaaattcaaatgattgggactgaaggaatatgttacaatcacattttatattattatccattaaatagctttggattatataatacgcagctgaaatatgctgacagttattcagaaacctaagtaaaacttttgatgaaccgggctctactttagttcagtagttatatctcaatcagacaagctcgactgtataatttaagttttagtcaagatgagattt

SEQ ID NO: 881303 - DNA, 653 bp, Homo sapiens
acatacagtgtctcattccattaagatagtaacctttccaaacttcagtttctgtgcatttcagggttgtgtcttttgtaaaagtcacctggaataaacagtttttaaaataaaactgcaaaaaattatcatggcttccaactttagcaataattttaattccttgatgcttttaaatttcctagctgatgtttatatttggagctgaatatgtcatattcatctcttctccattacagtacscagcacaatatctgggacaatacatatttctaaaatgttatttaacaaagaaaattgtatttaactctcatagcatccctgtgaagtaaggtaaacattgttatctccattgtgctggggtggaaatggagatttgcaccagcacaggaaagtcttgtcaggggcctgcagatgatcctgcctgctgttctttatcatcaggaccagcaatttttctgtctgcaatttaaattattttggtcccaaatttgaggatttaaagggcaatctggccaagtatttagttagttatacaacagagaaaattaggtgaacacaccagaatttaactaacccttgctattcactactgttaattagagtttaagggtagaagacttggcaagacataggtcattttctgcatggta

SEQ ID NO: 881304 - DNA, 621 bp, Homo sapiens
tgctcatggattggaagaattaatattgttaaaatgacagtattttccaaaacaatttacagattcagtgcaatcccaattaaaataccaataacattcttcacagaaatagaaaaacaatcctaaaatttatgtggaaccaaaaaagatcctgaatagccaaagcaatacttggtaaaaagaacaaaactgcagacatcacactacaggacttcaaaattaactacaaagctatagtaacaagaacatcatagtactggcataaaaacatatgtgtagaccaatggagcagaatagaaaacccagctrtaatccatgcatttacagccaattcactttcacttaagatgccacaaacatataatggggaaaggacagtcttttcaataaatggtgctgggaaaactggataactatatgcagaagaataaaactagacccttatttctcatatgcaaaaatcaaatcaaaatgcaataaaggcttaaatctgaaacctgaaactataaactagcagaagaaaacattggaaaagtgctccagaaaattggtctgagcaaagatttttgtataagaccttaaaaccccagacaaccaaagcaaaattagacaatcaggatt

SEQ ID NO: 881305 - DNA, 581 bp, Homo sapiens
cgacagttaaaataaatttaaaataaccgtgctacctctagattttaaaattgttaaggtgaagataggtggtctaattttactctatttccatttttcttattcacagggtatatttgttctgtaaaaccacatatgtatcttatagtctgcagctgatgtatttatctgcctaaatacacatttctccaatggaatattctgtaatatcaagcatttcttttttagatggaaattaattttataacagttsaacatcatctttgtcaatcagcagctttatctaccataaagaacaaaaacgtacttggcgtggcctgctttaacttttgtagttcctatgtttaaactgaacagaggaatattatgtgaacaaattggaaaattatataaagaaataaaaatctttttactattatagttatctttaccccatagctttcaaaaaggcatttgaagcaatttaataaaataggaataacagtaagtactagatgtgagaggtgagaaaacaactttgtaaatcacccatctcacgaagttgcacagaggttcctgatagcccagacaatgaaataatg

SEQ ID NO: 881306 - DNA, 564 bp, Homo sapiens
acaaagtgtacaagatgtgttattcacaaattttatttcaagaaggaacattacaaaatatttaggctataaggtggtattgggtgtgattgggttgaaagtcaccggattaagtagcagggtgatgtcagacaaatcaatggacagggaaactttagcatgctagaggagcacagaggccactgcagtatccagaggagcagcctctgccaagtcctgagggagtgtggtcacactggcccgggatgatcaggagctgggggacatggagggcaaaaggaatggcacatacaaagtcctgaagggtggatgcttagcgttggtgagtggctasagcccagggtgtggtagggctgagccctggcagaagggagagagaaggctggagaggcagacagaagtccatgaagagcctaacaaatcttgcttgcattttattgtagagacactggggagctaccaaagggcttctgggctaggatcaggtttgctggttagacagacacgcttgtcacagtggtgaaaatgggctagatgagggcacggttacatgagccagggtga

SEQ ID NO: 881307 - DNA, 612 bp, Homo sapiens
ccttttctcctccaaatttattaaggtttaattgataaaaattttatagatttatgatatacaacatatttcgataaatgtatacattgtgcaatgattaaatcaagctaattaacatatccatcaccttatatacttatcgctttttctagattacttttgctcaggagtggccaaacttagtttctttcaaagttcagaasactctgtggatccttcagcacttaaagaccaccatacagaatatcatttttccattctcattttaaaaaaatgagattctattacaaaaaggaatctacaaaaaaaaaacccaattcaaatggatttagcttcttgtgttttctttgataaacacagatcctctagaaaaaaaatatagtacttgattttagtccccaacttcatttaaagtgacgcatacttatttgaaagaagataaaataagagatgcttgttttctctctttggatgtaattattagcatttgaaatcagaggccaaaaagacttcatgctttgacttaggattaacagtctcttttgaacagaactatcacttgtctattcaacttagtaaagtaattgcttctttattctccttgaaatgttg

SEQ ID NO: 881308 - DNA, 654 bp, Homo sapiens
attttagagtacattattgaattcttggacattaaaaacttcagttacttggaacacacacatgacagaaacaaactgcaactgacactcaaaagcacatctgatgaaaatattaaggttgatgtttttcttaatattatcttatgtaatatctagtgttctctaaggaaattatatttattaggcctttcttttttcttctaaactcttttactgtactccaaaatatctttattttctggttatgaagtagtagatcttcactgtagaaaatttgaaaacatatggaaaagtataaagacaatttttaaagtacctatgattcttcaatcttggggtcttatttatttatttagagacacartcttgctctgttgcccaggctggagtgcagtggcgcgctctcagctcactgcaacctctgcctcccaggttcaagcaattctccaggctcagcctcccaggtagctgggattacagatgcatgccaccacgcccagctaatttttgtgtttttagtagagactgggtttcaccatgttggccaggctggtcttgaactcctgacctcgtgatccgcccacctcggcctcccaaagtgctgggattacaggcatgagccaccgcgcctagccagggtctttatttttaaaa

SEQ ID NO: 881309 - DNA, 616 bp, Homo sapiens
gcgacctgacaatgacttcatcggatgtttttggttttgaagctagagagaccatgagcctaggaatgtgggtgtcctctagaagttgccaagacaaggaaataaattctcccttaaagcctccaagaacgaaagcagttctgctgactccttgattttagcccagtgagacccctttggggcttctaattgccagaactaaaagaaaattatttttttcctgttttaggtcagtaaaatttttaataattcactacagcagcaataagaaagtaatatgtacatatattaactgacataactttactaccatgtttcaaagagaaaaaacagacctcttkgttaccttttcaagtaatcaaaatactgactttaaaagtagtaaaggaacacttattcatctcaagtccatgtatatagcagtctgaacattttagaataatggttctcaaactttagtgggcaccagaatcacccagagggcttataaacacagattgctatatacttcacccacagagtttctgattcactgggtctggggtggggaccaggactttgcctttctaacaactccctgggtgctgctgctgctgtgggcctgaggacaacactt

SEQ ID NO: 881310 - DNA, 687 bp, Homo sapiens
aacaaacaaagatgaccaccccaattaccaggggtggtcatccattgaatggtgacaaatggtgctgtcaaatcctcttgagaactagatattgtttatcttaataacatgcatgtaataggttatatctgctttgctatataaaaaggaaagacgtctttttgtctttgcaatcttttagtggattgcctgtgctgtgtatcacattctgatttartgtttattcaataataaaattgttttcttccttttctaccctgtggagaggttttctgaagtaagaggggattttgttttaaattatatttctccaacactttaatttcaggccacaatgaatctggactggttcctctggtttgtaacagtgatttttggtttaaaagtcagagaggatggcatgcaaatttgtttccaaagtgaataaataaaaaagaggttttcacaaattaatgctaattttctatgtagtctgatccatccacagcacagcgataatcttctgcttccttgctttctatctctgcttttgataaaaagtttccaagtttataaaatatctctctctcaacaggcagtatggacaaagaaatgctgtaaatgattttgagatccatgtgtaaatatctattggtaactgaaattagaaaacttttcttgaactactcaagaaatgaagtgttcagc

SEQ ID NO: 881311 - DNA, 687 bp, Homo sapiens
aacaaacaaagatgaccaccccaattaccaggggtggtcatccattgaatggtgacaaatggtgctgtcaaatcctcttgagaactagatattgtttatcttaataacatgcatgtaataggttatatctgctttgctatataaaaaggaaagacgtctttttgtctttgcaatcttttagtggattgcctgtgctgtgtatcacattctgatttagtgtttattcaataataaaattgttttcttccttttctaccctgtggagaggttttctgaagtaagaggggattttgttttaaattatatttctccaacactttaatttcaggccacaatgaatctggactggttcctctggtttgtaacagtgatttttggtttaaaagtcagagaggatggcatgcaaatttgtttccaaagtgaataaataaaaaagaggttttcacaaattaatgctaattttctrtgtagtctgatccatccacagcacagcgataatcttctgcttccttgctttctatctctgcttttgataaaaagtttccaagtttataaaatatctctctctcaacaggcagtatggacaaagaaatgctgtaaatgattttgagatccatgtgtaaatatctattggtaactgaaattagaaaacttttcttgaactactcaagaaatgaagtgttcagc

SEQ ID NO: 881312 - DNA, 687 bp, Homo sapiens
aacaaacaaagatgaccaccccaattaccaggggtggtcatccattgaatggtgacaaatggtgctgtcaaatcctcttgagaactagatattgtttatcttaataacatgcatgtaataggttatatctgctttgctatataaaaaggaaagacgtctttttgtctttgcaatcttttagtggattgcctgtgctgtgtatcacattctgatttagtgtttattcaataataaaattgttttcttccttttctaccctgtggagaggttttctgaagtaagaggggattttgttttaaattatatttctccaacactttaatttcaggccacaatgaatctggactggttcctctggtttgtaacagtgatttttggtttaaaagtcagagaggatggcatgcaaatttgtttccaaagtgaataaataaaaaagaggttttcacaaattaatgctaattttctatgtagtctgatccatccacagcacagcgataatcttctgcttccttgctttstatctctgcttttgataaaaagtttccaagtttataaaatatctctctctcaacaggcagtatggacaaagaaatgctgtaaatgattttgagatccatgtgtaaatatctattggtaactgaaattagaaaacttttcttgaactactcaagaaatgaagtgttcagc

SEQ ID NO: 881313 - DNA, 775 bp, Homo sapiens
ctgagtatttctctgttgcccaggctggagtgcaatggcgcgatctcagctcactgcaacctctgcctcctgggttcaagtgattctcctgcctcagcatgccgagtagttgggattacagctaccaccaccacacccggctaatttttgtatttttagtagagacggagtttcaccatgttggctaggctggtcttgaactcctgacctcatgctctgcctgccttggcctcccaaagtgctgggattactcattaagaagaaataaactatttcattgtcattttcaccartcaagcaggaatcaacggctttcaaacattatgtatcttcagaaatggttttaaatacattaaggatatttggataacaaccctatgttgttatcctccagcagtggagacaattacttaaaagtatatatatgtatcatgggatattagaaaaaaaaagccaaactctcagaaagaactgtgttggaactatgaaaaatagcccaaagtgtacagtaaccaagctaatgctgaatcaagggaaaagtgacttaatcgtggcagaacttggctacattttctttggccaagttccagcaccctccatggatttgtggtggtcttaaaacaaaagcttacattctcattgtgggttcaagactccagcaggagcagagcagaactttgtctaatgtaattatgtttttctgttttgacctgtcagggagctccctgagggactaaggtaaaacactctcttttgttttgcctatttcagaact

SEQ ID NO: 881314 - DNA, 775 bp, Homo sapiens
ctgagtatttctctgttgcccaggctggagtgcaatggcgcgatctcagctcactgcaacctctgcctcctgggttcaagtgattctcctgcctcagcatgccgagtagttgggattacagctaccaccaccacacccggctaatttttgtatttttagtagagacggagtttcaccatgttggctaggctggtcttgaactcctgacctcatgctctgcctgccttggcctcccaaagtgctgggattactcattaagaagaaataaactatttcattgtcattttcaccagtcaagcagraatcaacggctttcaaacattatgtatcttcagaaatggttttaaatacattaaggatatttggataacaaccctatgttgttatcctccagcagtggagacaattacttaaaagtatatatatgtatcatgggatattagaaaaaaaaagccaaactctcagaaagaactgtgttggaactatgaaaaatagcccaaagtgtacagtaaccaagctaatgctgaatcaagggaaaagtgacttaatcgtggcagaacttggctacattttctttggccaagttccagcaccctccatggatttgtggtggtcttaaaacaaaagcttacattctcattgtgggttcaagactccagcaggagcagagcagaactttgtctaatgtaattatgtttttctgttttgacctgtcagggagctccctgagggactaaggtaaaacactctcttttgttttgcctatttcagaact

SEQ ID NO: 881315 - DNA, 590 bp, Homo sapiens
ttgaagaattgtcctgagtcctgtacatcttttgaatgtactgtcagaatattcatagaggtgaaaagctagttcataggcacatgagccataatcaacttcactttacatgtacgtttaaaaaaaaaaaaacaccctggtgcagtggctcatgtctgtaatcctgaagcgggtggatcacctaaggtcaggagttcgagaccagcctggccaacatggtgaaaccttgtctctactaaaaatacaaaaattagcctggtgtggtggcaggcgcctgtaatcccagctactcgggggactggggcaagagaatcgcttgaaccggggagacagaggttgcagtgagccgagattgtgccactgcactccagcctgggcgacagagtgagactctgtctcaaacaacaacaacaacaacaacaamaaagaacacatgattttattgcacaacctacctggagtacaactaccatgttgagagctgtgtgtaaattgtcctgcattttgtctgaaacgttatcgaccttaagccacagttttgtaaaatcacatcatccatggcaatgctgctcacatagtaattgagtcac

SEQ ID NO: 881316 - DNA, 573 bp, Homo sapiens
catagaccctgtctctaaaaaacaaaacagagcaaaaattaaatgatacctggatcctgttattgtcattttttatttagtggaaatgcaatgaagaaaatgcaaaaagtccccacctttcatatataattttttcatgtgtaaaagttacatggatggtatgatctagcggcggttctggttggaaagagctaaaaaatagttataatgtactagttatctcttcccttttagaaacattgttcagtgattttcagaattcaaaatatgtttcctaattttcccctcctctcctctccccttctcttcttcccctccctgctgtcgaaccacagatttaatccacttaagttcagaggatatattcaattgargtccagaatttatcactttgaacatacctagacatttccatctttttatgcagtctgaggcctgtgcttatcactagtattagtactttcttatttctatattctactcttttgtgtaaagcagaggcaaaaatgcgaagaaaaatttaaataatggcaaaacattgttttccaaagctggtatttctgctgaattgta

SEQ ID NO: 881317 - DNA, 542 bp, Homo sapiens
ggggaagagccaacaaacataatcataaagcaacaaggtttacaaaagaaattatgaggtacattcaaggatgagctaagcataaggtactaagtaccttggataattcatactgagctgaataggaaaggattcatagaaattggtaagatgaagagaggtgggtggggagagcattccaggcagaggagtatgaataagggcatagagaagaaagtacaagcactttatattactgggacaaggcaagaagtagtaaaagaagaggcaggagaaagaggaccagattatggtggatcttagttgtcctgtttagaagtgtggatttttcctgtgtccagtttcytgagctggtcaggtttttgttaaagaaagaccactcagacagggctatggagagttggtttgaggacacagggatagtagccttatcaggtggttgaagtcagctggtggagaaataaggaaggcttgaactatgacagaggtgatccaaattgagaggaggggagatagttgacaaaaatgtaggatgtaagtag

SEQ ID NO: 881318 - DNA, 587 bp, Homo sapiens
tattgaatagaaagtcctttttttttttttttggtcagccttgttgatcagatggttgtaggcacacagctttgtttctgagctttctattctgttccattggtctatgtgtctgtttttgtgctggtatcatgctgttttggttactgtagccttatagtatagtttgaactcaggtagagtgatgcctctggctttgttctttttacttaggattgctttggctatttggttccatatgaattttaraatagttttttctaattctgtgaagaataacatggtaatacgataggaatagctttgaatctgtaaattgctttgggcagtaggggtattttaataatactgattcttccaacccatttgcatggaatgtttttccatttattggtgtcatctctgagttctttcagcagtgttttgtagttctccttgtagagatctttacctccttggttagctgtattcctaggtatttcattttgttcatggctattgtaaataggactgtgttttttatttgactctcagtctagatatttttagtgtatagaaatactactgatttttgtacattaattttg

SEQ ID NO: 881319 - DNA, 662 bp, Homo sapiens
gaaagtcctttttttttttttttggtcagccttgttgatcagatggttgtaggcacacagctttgtttctgagctttctattctgttccattggtctatgtgtctgtttttgtgctggtatcatgctgttttggttactgtagccttatagtatagtttgaactcaggtagagtgatgcctctggctttgttctttttacttaggattgctttggctatttggttccatatgaattttagaatagttttttctaattctgtgaagaataacatggtaatacgataggaatagctttgaatctgtaaattgctttgggcagtaggggtattttaatratactgattcttccaacccatttgcatggaatgtttttccatttattggtgtcatctctgagttctttcagcagtgttttgtagttctccttgtagagatctttacctccttggttagctgtattcctaggtatttcattttgttcatggctattgtaaataggactgtgttttttatttgactctcagtctagatatttttagtgtatagaaatactactgatttttgtacattaattttgtatcctgaaatcatactagaatcattgatcagttctagtagcctcttggcagagtcttcagggttttctaagtatagaatcata

SEQ ID NO: 881320 - DNA, 561 bp, Homo sapiens
ctatgatggagccactgctcacagtggaagctgtgagtcctgctcacacatggaccttagtgagagtatccagccctctagctgaaagctcttactcttttgtgtcccattccctgaggggcagttaagttgtgcttgtccagaagattaagttttgcaccaagttgcacagaattattatgccttagggatgcacagacagggaagaggatcctaggtgataatcctgaaggcatgtgtgttgctgagaaaaaaatgcctaaaactactgtctctgtgatcctgctgaatacatctaaaacagattctgtttggatgctcagagtcggttaagaaaagttcacttaagcagatggctaggaatgagacagaatctctttcacgcttcccaatttacaggcaccygcccaacagagcttacacacatgagcaacaacattgtccatgacgccaagtcatgagtttccccaggtaattccatgggatgttgccacatggtatattttcctctctaggcattcacagaatgtttacattacgtgactgaactcaacataagat

SEQ ID NO: 881321 - DNA, 643 bp, Homo sapiens
tgttatgttatttccatacaataaagtactcaaatctttactattttatttgttttatttttctgagacaggcctcactctgttgcccaggaaggaatgcagtggcacaatctcaactcactgcaacctccgcccctcaggttcaagtgattctcctgcctcagcttcctgaatagctgggattacaggcatgagccaatatgaccagttgatttttgtatttttagtagagacggggttccaccatgttggccaggctggtcttgaacttctggcctcaagtgatctgcccatcttggcctcccaaagtgctgggattacaggcatgacccaccaggtctggccagtactcaaagctttagataaatattcatattcaaattcattggaattattctaacaatacctgaaagtgwaaaagtgagagtgaaatcaacttatttctcactatagtgttgaatactaataagttagtgaccattctcctaaatattatccatccataaatgtgctttgtgcacagatacatacaagcacatctcattttattgttcttagctttattgtgctttgcagatactgtgattgattgattgattgatcaattttacaaattgaaggtttgtggcaaccttacacagaa

SEQ ID NO: 881322 - DNA, 643 bp, Homo sapiens
tgttatgttatttccatacaataaagtactcaaatctttactattttatttgttttatttttctgagacaggcctcactctgttgcccaggaaggaatgcagtggcacaatctcaactcactgcaacctccgcccctcaggttcaagtgattctcctgcctcagcttcctgaatagctgggattacaggcatgagccaatatgaccagttgatttttgtatttttagtagagacggggttccaccatgttggccaggctggtcttgaacttctggcctcaagtgatctgcccatcttggcctcccaaagtgctgggattacaggcatgacccaccaggtctggccagtactcaaagctttagataaatattcatattcaaattcattggaattattctaacaatacctgaaagtgtaaaagtgagagtgaaatcaacttatttctcactatmgtgttgaatactaataagttagtgaccattctcctaaatattatccatccataaatgtgctttgtgcacagatacatacaagcacatctcattttattgttcttagctttattgtgctttgcagatactgtgattgattgattgattgatcaattttacaaattgaaggtttgtggcaaccttacacagaa

SEQ ID NO: 881323 - DNA, 511 bp, Homo sapiens
tggtggcattttgccctggccctagagatttgtggaactttgaacttgagagggatgatttagagtatctggtggaagaaatttctaagcagcaatgcattcaaggagtgacttcggtgctcttaaaggcattcagttttataagggaagcagagcataaaagtttggaaaatgygtagcctgacaatgcaatagaaaagaaaattccattttctgaggagaaatccaagctggctacagaaatctgcataagtaacaaggagccgaatgttaatccccaagacaatgaggaaaaggtctccagggaatgttagaggtcttcacagcagccccttctatcatagacccagaggcctaggaaaaaatatgtggttttgggggccggacccagggtagggtctccatactgtgggcagcctagggacttggtgccctgcatcccaactgttctagctgtggctgaaaggggccaacatagagctcgggccacggcttcagaggttgcaagccc

SEQ ID NO: 881324 - DNA, 594 bp, Homo sapiens
agttttagttagtaatcccattaggaagccttagtaaaacatgtatgttcctaaaagcagggtacgtctctgccaaaaagctatgaggtatatttatgcttgtatgcaaattatatgatgtagcctgtcagttcgtttctgccatagaacatgcaagaattctgtttattcagggtgctattatattcaatttctataaaaaagcactaggcaaaaagagattaaatgtgctaagtgttgctttcagagtggactttgtgttcacaggtgagcattargccgtgcaaatctccttcctttgggacaggccctttgcattgtaaaagcaataccacatgatttgcacaaatccttgcctatccaccactgcacatctttatactatcataatatggctttggaagaacggaacccaggaagttttgactatgtttatgtatcttcagcctaatatttttgatgtggaaaaagtaaacaaagcaggactatgtatttaatctggcagcctattttcttgttgcatgaatatgtaaaaactcacctgttcaaactttgcacatgatcccacaagaagagcaccactgacaggttggt

SEQ ID NO: 881325 - DNA, 639 bp, Homo sapiens
caaaaccatacaattacatgaaaatcaaatgacctgtttttgaatgacttttgtttttgtttgtttgtttgtttctttgagacagggtctcgctctgttccccaggctggagttcagtagtgcaatctcagctcactgtaacctccacctcctgggttcaagcaattctcctgactcagcctcctgagcagctgggattacaggcatgtgtcaccacacccagttaattctgaatgacttttaggtaaataatgaaataaagacagaaatcaagaagctctttgaaacaaatgagaacaaagatacaacatactagaatctctgggacacagctaaggcagtgttaagagggaaatttatagtactaaatgcccacatcaraaagttagaaagatctcaagttaacaatctaacatcacaactaaaacaactagagaaccatgaacaaacatatcccaaagctagcaggagacaaaaaataaccaaaatcagagttaaactgaagaagatagagacaaaaaaaaaacaccattcaaaagatcaatgaatccaggagctgtttttttggtgcaaaaatgaataaaatagactgctaactagactaacaaaagaagaaaatagagaagattcaaataagca

SEQ ID NO: 881326 - DNA, 611 bp, Homo sapiens
aaaatttaaaataaatagataaattcttgggcatatccatcctcctaagatggaaccaggaagaaactgaatccttgaacagaacaataaagtgctatgaataaataacctaccaaccaaaaaaagctgaggaacagatggattcacagctgatacattcagatgtacaaagaagagatgataccatttttactgagactattccaaaaaattgaggaggaaggacttctccctacctcattctgtgaggccagcatcatcctgaaaccaagagctgkcggagatacaacaaagaaagaaaacttcaggccaatatccttaataaacatcaatgcaaaaatcctcaacaaagtgcttcaaactgaatccagctgcacatcaaaaagcttatctaacacaatcaagtaggctttatccctgggatgcaaggttggttcaacatacacaaatcaataaatgtgattcatcacagaaacagaactgaagacaaaaaccacctgattgtctcaaaagatgtggaaaagacttttgataaaagtcaacagctattcatgttaaaaactctcaataaacttggtattaaaggaacatacctcaaaataataacagca

SEQ ID NO: 881327 - DNA, 611 bp, Homo sapiens
aaaatttaaaataaatagataaattcttgggcatatccatcctcctaagatggaaccaggaagaaactgaatccttgaacagaacaataaagtgctatgaataaataacctaccaaccaaaaaaagctgaggaacagatggattcacagctgatacattcagatgtacaaagaagagatgataccatttttactgagactattccaaaaaattgaggaggaaggacttctccctacctcattctgtgaggccagcatcatcctgaaaccaagagctgtcrgagatacaacaaagaaagaaaacttcaggccaatatccttaataaacatcaatgcaaaaatcctcaacaaagtgcttcaaactgaatccagctgcacatcaaaaagcttatctaacacaatcaagtaggctttatccctgggatgcaaggttggttcaacatacacaaatcaataaatgtgattcatcacagaaacagaactgaagacaaaaaccacctgattgtctcaaaagatgtggaaaagacttttgataaaagtcaacagctattcatgttaaaaactctcaataaacttggtattaaaggaacatacctcaaaataataacagca

SEQ ID NO: 881328 - DNA, 574 bp, Homo sapiens
aataaataacctaccaaccaaaaaaagctgaggaacagatggattcacagctgatacattcagatgtacaaagaagagatgataccatttttactgagactattccaaaaaattgaggaggaaggacttctccctacctcattctgtgaggccagcatcatcctgaaaccaagagctgtcggagatacaacaaagaaagaaaacttcaggccaatatccttaataaacatcaatgcaaaaatcctcaacaaagtgcttcaaactgaatccagctgcacatcaaaaagcttatctaacacaatcaagtaggctttatccctgggatgcaaggttggttcaacatacacaaatcaataaatgtgattcatcacagaaacagaactgaagacaaaaaccacctgattgtctcaaaaratgtggaaaagacttttgataaaagtcaacagctattcatgttaaaaactctcaataaacttggtattaaaggaacatacctcaaaataataacagcaatatatgacaaggccacagccaacattatactgaaggggcaaaaactggaagcattcccctt

SEQ ID NO: 881329 - DNA, 574 bp, Homo sapiens
aataaataacctaccaaccaaaaaaagctgaggaacagatggattcacagctgatacattcagatgtacaaagaagagatgataccatttttactgagactattccaaaaaattgaggaggaaggacttctccctacctcattctgtgaggccagcatcatcctgaaaccaagagctgtcggagatacaacaaagaaagaaaacttcaggccaatatccttaataaacatcaatgcaaaaatcctcaacaaagtgcttcaaactgaatccagctgcacatcaaaaagcttatctaacacaatcaagtaggctttatccctgggatgcaaggttggttcaacatacacaaatcaataaatgtgattcatcacagaaacagaactgaagacaaaaaccacctgattgtctcaaaagatgtggaaaaracttttgataaaagtcaacagctattcatgttaaaaactctcaataaacttggtattaaaggaacatacctcaaaataataacagcaatatatgacaaggccacagccaacattatactgaaggggcaaaaactggaagcattcccctt

SEQ ID NO: 881330 - DNA, 564 bp, Homo sapiens
aaaggcaagttctagagaagacataagataggtcaaggagacagtaaagacatgggagaacttgctgatcatcagggactactttagaagaaacagtggaagggtttcagatggagaagaggagaggctgtgtcagaggggagatccgtcaaggtccagtgcagatccggttccctcatggctggagcagttcaccaagctctcctctagtgctctgccttcatgggactcagcatttctgtgtctctgcttccttctgcatatattttcatcaagcactttattccttctttatatcaaatttrccagagagaggatccccaattgatttctgtcagtcctcatgggcagagctttcctggcagagcacctatcagccaagggcccatccctgattcagttttccagagtaaaaggccacatgtactagcatggtagttatttgacttgaatcttgttgaagaaaactgtagagaaaccggaaccctcatattttgttgatgaaaatataaaatagaacagccactttgaaaaaagagttcggtcatttcttaaaaagttaag

SEQ ID NO: 881331 - DNA, 603 bp, Homo sapiens
atattttttttttttttgagacaggttctgactccgtcacccaggctggagtgcagtggcatgatctcagctcactgcaacctccacctcccggggtcaagttatcctcctgcctcagcctcccaagtagctgacaccagacgtgtgcacaatgyttggcttatttttttattttttgtagagacagggtttctccatgttgcccaggttggtctcaaactcttggactcaagcaatctgcccgcctttgcctcccaaagtactaagattacaggcatgagccaccatgctggcctgatattttatttctttaaaaaatatatccaaagagaatagaaaaaaatggcaatatatgtgataagtctgtgtcacatgtggtcatggtattctctgcaattttttatgtttcacttttcacaaaagaaaaaaaaaaaacttggtatgagaaagctaaccagagctctgcatttgtgactaaggcatgtgaactggcagctttgctgttggatgaccaggcagaggtcagtgcagaaagaccgccatctttccatctgcagacattcagctttcagccctgcagctcttgtgagccccaagcctgtc

SEQ ID NO: 881332 - DNA, 595 bp, Homo sapiens
ctggcactgtttgagacacaaactgtggcttctgctctttaagattaaaaaccttcttaccctgccctgccatctgccttcttcatgcttattctctttttttcctctctctatcttcttttttttctgatactcctttctcttgtcctggccaaagttgtggtgataaataggtgtgtctagtatggaaagatggggcaaatttcaatatctattttttccccaaccttcagaaacaccagaaacattcacttttgttttctcatctcacttttaaagtagtaatctgaagatttgcttgttatcttttctgccagttcataacttacacagtagttacattgagtcccgttacattaagcttacrtgggagcttttttggctaccacataattgtcttgggaaataatctgtagttcttaacatggactgtaaaaatctagtaaagctggttatccttgaatttgagttaaggtttcagcattatcaaagagtaatatttggcccttgaagataccaccaagtatttcatggattgattctcattcgtcattgtcaactgcttattgaacacccagagttcataatattgtac

SEQ ID NO: 881333 - DNA, 635 bp, Homo sapiens
tacagaagtctgaggctggaggaaagaccagttcagagacaagtgagagctgaattattacagtcaaagcaaggattgatttgataattatttagaagatagaattaatgagagttggtgacatggcacataaagactcctacagagttggaggggtgtaggatgacttgagtttctggcttgtgtgattggatgggtagtgatgctrttagctagataaaggaatatagaaatgggtcatatgtggggaaagagtacacagatttgaagatgttcagctctacgtgagtgtgaaatttttcaactgaatctgattgcaagagacttatcaatcctagttatataaatatataaataatgaggatatgagtggtaaaggaaaccatgaaatagacaaatccacccagaatacatataaagataagaagggaaagccaagaagggattggaagagaaggacagtattgcaaagcagacaaagaagtcgggggtaggaggagattcagcagcattgcgtcttaaaagccaaggggaaaaatttcaagaaaaaaagaagtggcagggaaaaggaaaaattactaagcaatatgttatgtgttttattctatgctattttatctaattttcaaaacaag

SEQ ID NO: 881334 - DNA, 578 bp, Homo sapiens
cttgcttttcaaagtgtgagtccatgggtctgcagcatcagcttcgcccgggagctcatgctgagctgatacctttcctcagacgtgctgtataaaacatgaattttaatgtgattcctgtgcttcgtatgcataccaaggtttaaactgcatcaacatagacctgttacagaacacattttgactttatcaaaaattgaacataaaaacttcatggaccaaataaagagtgaagatgtaaaatcaaagggggaaaatattgatgggttcatgtagaaactcccaagagtacagcagttgctttatatataatacaaaattgttattgtacttacaaatataaaaatctatttcattcgttagtctgaaacyagaaatgagttcatccactaccattcattattgctatgttgcttattaagctttgtagttggaaactggtggtctaagtttgacttgtaatttatccttctctgattgacaggtgaaatttgtaatagaggcagctagcaaagaaaaaactaaaaatgaacgtcttttcctgcttttttttttttgagaaaaaaacatttacaaag

SEQ ID NO: 881335 - DNA, 591 bp, Homo sapiens
tagtaatttatagattcaatgctatccccatcaaactaccaatgactttcttcacagaattggaaaaaactactttaaacttcatatggaaccaaaaaagagcgcgcatagccaagacaatccagggcaagaagaacaaagctggaggcatcatgttacctgacttcagactatactacaaggctacagtaaccaaaacagcatggtactggtaccaaaacagatatataggccaatggaacagagcagaggcctcagaaataacgccagacatctacaaccatctgatctttgacaaacctgacacaaacaagcaatggggaaaagattccctatttaataaatggtgttgggaaarctgactagccatatgcagaaaactgaaactagaccccttccttacacattatacaaaaatcaagtcaagatgaatcaaatacttaaacgtaatacctaggatcattaaaatcctggaagaaaacttgggcaataccattcaggacataggaatgggcaaagactcatgtctaaatcagcaaaagcaatggcaacaaaagccaaaattaacaaatgggatctaattaaactaaa

SEQ ID NO: 881336 - DNA, 652 bp, Homo sapiens
catgtagtaaatctatttttaatattttgagaaatgttcagactgttttttatgatggcagtactaatttacattgctccaacagtgtgtaaggttatcaatttttccacatccgtaccaatgtttatgttttgtctttttatttttattttattttatctttattattattattattattttttgagatggagtcttgctctgttgcccaagctggagagcagtggctcagtctctgctcactgcaacytctgcctttcatgttcaagcaattctcctgactcagcctcctgagtaactgggattacaggcatgtgccaccacacccagctaacttttgtataaatgtggagatgggatttcactatattggccaggttggtcttgaactcctgacttcaagtgatctgcccacattagcctcccaaagtttttttttatctttttagtaataaccattctaattgtggttttgattttcatttctctaatgattagtgatgaatattttttcatgtacctgttggctgtttgtatatcttcttttcttaaatatttaaagttaatttaactgattttatttataatttaaaaaatgtttaatttctgtgggtacatagtaggtatatatatttatagggtatatggatat

SEQ ID NO: 881337 - DNA, 652 bp, Homo sapiens
catgtagtaaatctatttttaatattttgagaaatgttcagactgttttttatgatggcagtactaatttacattgctccaacagtgtgtaaggttatcaatttttccacatccgtaccaatgtttatgttttgtctttttatttttattttattttatctttattattattattattattttttgagatggagtcttgctctgttgcccaagctggagagcagtggctcagtctctgctcactgcaacctctgcctttcatgttcaagcaattctcctgactcagcctcctgagtaactgggattacaggcatgtgccaccacacccagctaacttttgtataaatgtggagatgggatttcactatattggccaggttggtcttgaactcctgacttcaagtgatctgcccacattagcctcccaaaktttttttttatctttttagtaataaccattctaattgtggttttgattttcatttctctaatgattagtgatgaatattttttcatgtacctgttggctgtttgtatatcttcttttcttaaatatttaaagttaatttaactgattttatttataatttaaaaaatgtttaatttctgtgggtacatagtaggtatatatatttatagggtatatggatat

SEQ ID NO: 881338 - DNA, 585 bp, Homo sapiens
atacttagagcttgtggggatgataaggaacaacaaaaatagactgagtaaaaatagccagaaaatgtggagaaaaacagataagtggaaaaaaatgtttcagtaaagtgaatgatcagctgtattaagagctgctcaytggtcaaacccaatgaagagtgagaagtgaacaataacatggtcactgctgaacctggacatttttagtagtgtgctgtgggcaaaagatggttgatttaagagaatgagaggaaaggaactggattgctgagagagggagcagtagctagaagggatgtgagtcaggaaagaaactttcattgatcatttccttttggtacttaggtaaaaagaggtacccaaaaataaggattgaataaattaagctcagtattcaatagatttactctaaatacactaaccgtctaaagttcatacttatcatgcagactttcattagacactaagggaatatttttgtttcccttggaaagaagccaaactagagcagttagatgatgtttacatctcaagaaactcagatgtcctattaacttttcatgaacattaatcatcttctcagga

SEQ ID NO: 881339 - DNA, 585 bp, Homo sapiens
atacttagagcttgtggggatgataaggaacaacaaaaatagactgagtaaaaatagccagaaaatgtggagaaaaacagataagtggaaaaaaatgtttcagtaaagtgaatgatcagctgtattaagagctgctcactggtcaaaccmaatgaagagtgagaagtgaacaataacatggtcactgctgaacctggacatttttagtagtgtgctgtgggcaaaagatggttgatttaagagaatgagaggaaaggaactggattgctgagagagggagcagtagctagaagggatgtgagtcaggaaagaaactttcattgatcatttccttttggtacttaggtaaaaagaggtacccaaaaataaggattgaataaattaagctcagtattcaatagatttactctaaatacactaaccgtctaaagttcatacttatcatgcagactttcattagacactaagggaatatttttgtttcccttggaaagaagccaaactagagcagttagatgatgtttacatctcaagaaactcagatgtcctattaacttttcatgaacattaatcatcttctcagga

SEQ ID NO: 881340 - DNA, 489 bp, Homo sapiens
aattgctgttgtttaatccaccagtctgtggtatattgctatggtagccctagcaaactaatacaagaagaaagagcattcaacagaaacaggctcagaatgatagagacgacagacgtggtcattgaaacagtgatgatacacaggcttcatatattcaaagaaaagcataatcatgatgagatgataaatggaatatttttaaggcccaaacataaattctagagatggaatgcaatatttgaaatgataaatatactagatgagktaataaaagaataggcattgctgaagaaaaagtaaacttgaagaaaaagcattagaatctatccaaattgaagcccacagagaacaaaaactgaaaaaaaaaaaaaaaaagaagaagaacagagcataagtggcctgtgggacaataccaactagtcaaaaatacatgtaaccgcagtccaacatgagagaagaccaagggagaagaaaaaaaaaaaataa

SEQ ID NO: 881341 - DNA, 489 bp, Homo sapiens
aattgctgttgtttaatccaccagtctgtggtatattgctatggtagccctagcaaactaatacaagaagaaagagcattcaacagaaacaggctcagaatgatagagacgacagacgtggtcattgaaacagtgatgatacacaggcttcatatattcaaagaaaagcataatcatgatgagatgataaatggaatatttttaaggcccaaacataaattctagagatggaatgcaatatttgaaatgataaatatactagatgaggtaataaaagaayaggcattgctgaagaaaaagtaaacttgaagaaaaagcattagaatctatccaaattgaagcccacagagaacaaaaactgaaaaaaaaaaaaaaaaagaagaagaacagagcataagtggcctgtgggacaataccaactagtcaaaaatacatgtaaccgcagtccaacatgagagaagaccaagggagaagaaaaaaaaaaaataa

SEQ ID NO: 881342 - DNA, 674 bp, Homo sapiens
ttagtttttgtagagcagtacctaaatgtgcatacctgttgagccagcaattccaactcaaagatcttaatctactgcaatactctcacatgagaaagtatgtacaaagataattaccacagcactatttttaactataaagaaatataagtaatctaaatataaagaattagggtagtagcagtcatgttattcatactctagaatactttgaggtacaattacacagaaattgtccacgatcgaaagaagcacatcattaaaaagttagttggttcttcctagcaaagccaagaaaaaaataaaacaacaagaacaacaaagtaagctgaagaattacttggcatagattcaatttttgttaaaaaactaaggttttgattttaaatatatatcacacacacacatacaaacataygtttacatatactttcataagtacacacacacacactctcacacaaacttacaaaagcttctgtaagaatacataacgaagagttaccaatcattacctctgggccaggagtgtttaatgcaatttaaatttgtattctacatagtatactaacctaatgcctactggtaatcattttctgaatgcctactggtaaaaatatgtaatcattttctgaaagttaaaaagtgttgcccaacacatgatattttaaaat

SEQ ID NO: 881343 - DNA, 573 bp, Homo sapiens
aaacatattatgagatcacctatcttatagagaagccctcccagacctcacattctcctccaacaaccattatttgctaacttttatggaaaatctcaagttaaaagaaacaacagttatttatacttgcagtgtcaaattcctctctgccaattctctcttgatctagacttttgtccccaccattccactgctactgtccttaatctccatcatagcagtggtcatytcttggttccatataacttcttacagttgcagtatatttcagcccttattatttctttctccttgaaacactttcttcacttgacctctaggacaaagatccaaatataaactggcaactttagagttgatccatccagctgtaacctcttctcaagttctagccttgtatttccaaccatcaagcggacactaccacttggatatctaacaggcatctcaaacttgacacatacaaaaactgtacttaattttttccctctaacctgtttcttctacagtcaatcctctcttaaaaaaaatcaatcccatctgtccagttgctcatgccaaaaattttgaaat

SEQ ID NO: 881344 - DNA, 667 bp, Homo sapiens
aataagtacctacttcttcaaatgcacagatatcaatgcataaccacaaggatcaagaacaatcagagtagaatgacatcaccaaatgaatgaaatatgtgctagtgactgacaataaagaaataaagatgtatagactgcttaacaaagaattcaaaataactttataaggaagctcagtgaatttcaagaaaatacagagaaacaattcgatgatgtgaggaaaacaataagtgacttacattttaatggagatatttaaatatttttcaaaaaatcaaactgaaaatatagaactgaaaatacaattaatgaaataaacaatgcaacagagaacatcaaccacagaactgatcagacagaagaaaaatctgtgacytgaaagacatttattttaaaatatacaatcttaggagaaaaaaggaatgaaaagaaatgaaggaagcttatgagatttatgagtcagtatcaaaagagcaaatttctaagtcatgggaatttaagaaagggaagaaacaaataaagggttagaaagcttatttatagaaatagtagcagaaaacttttaaaacctggagaaagaagtaaatatccaggtacaggtaggtcaaaggtctttaattagattcaatcaatacaccaagacatattgtaatcaaactctcaa

SEQ ID NO: 881345 - DNA, 562 bp, Homo sapiens
gaaccaaagacaaaaataacatgattatctcaatagatgcagaaaaggcctttgacaaaactcaacagccttcatgctaaaaactctcaataaattaggtattgatgggacatatctcaagatgataagggctatttttgacaaacccacagccaatagcatactgaatggkcaaaaactgcaagcattccctttgaaaactggcacaagacagggatgccctctctcaccactcctattcaacatagtgttggaagttctggccagcgcaatcaggcaggagaaggaaataaagggtattcaattaggaaaagaggaagtcaaattgtccctgtttgcagatgacatgattgtatatctagaaaaccccatcatctccgcccaaaatctccttaagctgataggcaacttcagcaaagtctcaggatacaaaatcaatgtgcaaaaatcacaagcattcttatacatcaataacagacaaacagagagccaagtcatgagtgaactcccattcacaactgcttcaaagagaataaaatacctaggaatccaacttacaagg

SEQ ID NO: 881346 - DNA, 623 bp, Homo sapiens
cagaaatggttttaaaccgcagggggctgtgcaagagtgaacatgtggagatggatcagaggacatcctagggtgggggagggtgtgtgcaaggcacagatgaatggaagtgtccagagcatatttgggaaatattcccattttactaatgagttaactatgatccaagaaggtargatcacttgcccaaatagaaaaatgtatgtgattaaataagataatttctgagaaagtgcccaaggcagcagctagctctctgggagtataataaatgttacacttttattcataagtgttgtttatcttcctcctgaaaccactcagtacacagccagaaccagggcttaaatccaagttaaacccaaaaggaaattctttttggactgcatggtgtggatgggtttggtttattctgagattgtgctgaggagcctgttaccaggcctggcagtggccacaccccctagggtcaagatgtgaggaaaggagacttagaagggttggaggggtaggaattaagggaaggaagcgagcatggttgaaagcataaggtctatactagatggaccaagacagtgaaaatgagggcattccaagcagagggaacagcacagaccaagagt

SEQ ID NO: 881347 - DNA, 623 bp, Homo sapiens
cagaaatggttttaaaccgcagggggctgtgcaagagtgaacatgtggagatggatcagaggacatcctagggtgggggagggtgtgtgcaaggcacagatgaatggaagtgtccagagcatatttgggaaatattcccattttactaatgagttaactatgatccaagaaggtaggatcacttgcccaaatagaaaaatgtatgtgattaaataagataatttctgagaaagtgcccaargcagcagctagctctctgggagtataataaatgttacacttttattcataagtgttgtttatcttcctcctgaaaccactcagtacacagccagaaccagggcttaaatccaagttaaacccaaaaggaaattctttttggactgcatggtgtggatgggtttggtttattctgagattgtgctgaggagcctgttaccaggcctggcagtggccacaccccctagggtcaagatgtgaggaaaggagacttagaagggttggaggggtaggaattaagggaaggaagcgagcatggttgaaagcataaggtctatactagatggaccaagacagtgaaaatgagggcattccaagcagagggaacagcacagaccaagagt

SEQ ID NO: 881348 - DNA, 623 bp, Homo sapiens
cagaaatggttttaaaccgcagggggctgtgcaagagtgaacatgtggagatggatcagaggacatcctagggtgggggagggtgtgtgcaaggcacagatgaatggaagtgtccagagcatatttgggaaatattcccattttactaatgagttaactatgatccaagaaggtaggatcacttgcccaaatagaaaaatgtatgtgattaaataagataatttctgagaaagtgcccaaggcagcagctagctctctgggagtataataaatgttacacttttattcataagtgttgtttatcttcctcctgaaaccactcagtacacagccagaaccagggcttaaatccaagttaaacccaaaaggaaattctttttggactgcatggtgtggatgggtttggtttattctgagattgtgctgargagcctgttaccaggcctggcagtggccacaccccctagggtcaagatgtgaggaaaggagacttagaagggttggaggggtaggaattaagggaaggaagcgagcatggttgaaagcataaggtctatactagatggaccaagacagtgaaaatgagggcattccaagcagagggaacagcacagaccaagagt

SEQ ID NO: 881349 - DNA, 566 bp, Homo sapiens
gaggattgattgcttgaggccaggagttcaaaaccagcctgggcaacatagcaagaccccatctctacaaaaaaaattaaaaattagccgggcatggtggcatggacctgtagtcctagctattcaggaggctgaggtgggaggatcatctgaggtagaagccagagtctggggctacagtgagctctgatcataccactacactctgkcctgggcaacagagcaagacttcatctctaaaaataaaataaaaagaacaaatatgtacacttacagaactggaaggatccaaccaatgcatgagaatatgcatttatgtctgacataaacactcagatttgtgtgtggctagtcactggccgtaagaatcagattagcaattcaacattttaattcctatggcatcctattttcataatagaactgtaggtgctttgctagtcactttcatacacattattttatttagcttgtgtaatttgttaatccctacttcatagataagaagattaaaggctaacagaaattaagtaatttgcaaggagtttccctatagtaacgactgg

SEQ ID NO: 881350 - DNA, 617 bp, Homo sapiens
tttttttaaatttttattatggccattcttgtaggagtaaggtggtattacattgtggttttgatttgcatttctctgctaattagtgatgctgagcattttttcatatgtttgttggccatttgtatatcttcttttgagaattgtytattcacatccttagcccactttttaatgagattgtttggttttttcttgctgatttgtttgagttccttgtagattctggatattagtcctttgttagacatacagattgtggagattttctcccactctgtgttttgtctgtttactttgctgactatttcttttgctgtgcatgaagctttttggtttagttaactcccatatatttatccttgttttttgttgcatttgcttttgggttcttgaagtctttgcctaagccaatgtctagaagggtttttccaacgttatcttctagaatttttatggtctcaggtcttagatttaagtctttgatctatcttgagttgatttttttgtataaggtgagagacacgtggcatgccaattatcccagcactgtttgttgaatagggtgccctttccccactgtgatggttaataatgagtgtcaacttgattggatt

SEQ ID NO: 881351 - DNA, 544 bp, Homo sapiens
agccctgtaattgctcttctccatatgtcgggtctaacagtgggaaccaaagtaactcagctacaaaatttaaatacaataggaataattggatcctgaggtggcaggggccaagtggtacattcaaccatcaaaggcaagctgggtttagctactgtaatggacagcagaggcaaagcagtaatcaaaatagtctgactcatgtagagctctggcattggctaattaatcacagtgttcctagaagtgaaattgataggaagcctactgcatttctacttaatwtatataagcagaaaacttctatttcgaatggatcatcgtttgaatgataaaaacaggaaatcacagtctctcaatttccagacttgagccagtttatagactcagaaccccttgaatgaaggggaggccgggtccccttgaggaaggacccactatgctactgacaatttatgcagtgaatctttctcccatccttcccgaggaaccttctggccttttaaccagggtaactgtgcattggggaaaaggagacgatcag

SEQ ID NO: 881352 - DNA, 608 bp, Homo sapiens
cttgttttatgcaatcatatcaaattggtaacctggtccccaagcctactctgcatcatatgcagcaaatgtgaaaatataaattctaaaaacaaaacaaaattgagacatattagcatggaggcagtcattgcagacataaatgattctactctatctcaacagtcctacgttttatgctggctgacacaataagtgatcttcatattgggaagccagaatcatcaaatgtattcacatatcaaaacatcacattgtacaccttacatacacaatttttgtttgtcaattatacctcaataaacctggaaaaaatatattcagtatgtttgaggaggttaaaaatgatgtgataaattaggaagtgttctagtcagtaaagaacaaattaaatataactcagaactatttgaaaaattcggatrttcagaacttagagttcacatagtggaggttttattgctttaggatattctattacgaagaatgtaaaacctattatggctaataattttttttacttaaaggcaaactttctaatgctgatattattgtcttttccaatttagattctatgtaaacatcactactttttaagttagttcatc

SEQ ID NO: 881353 - DNA, 663 bp, Homo sapiens
actattctgtagaaaattttggaatatgtatcaattttaactgagtatattatttgatccagcaacttcagttctagggaaagttaagtgaacctaaactcaatttcctagaatagttgcttctaaaataagttttggaaatggtggtaacatctgagcattacagtagccattggccatgtgtgaccattaaacacttcaaataagggaagtttgactgaggaaatggatatttagattccttcatttctttcggttattagcagctttattgaggtataattaatatataataagctatacatatttaaggtgtaaaatttgttaagcttgacatatgtatatacctgtaaaaccatcactataatcaagataaygtagatatccattacctcaaagatttcctcatacccctttgtaatctctccttcctgcccttccccacccactcctgcaaaaagcattaatttgcttttagtcacaatatattagtttgcatttccaagaatttcatataaatgagatcacacaataagtactctttttttaatctagcatcttttatttagcatagagattcacccatgctgtagcatatattattcctttttcttgctgagtagttttttttgttgtatgtgtataccataatctttttatcca

SEQ ID NO: 881354 - DNA, 483 bp, Homo sapiens
cagaagatctctgaacttgaatttttttcgttctctgatgaagggcgtatttttaaaaaggcaagcatggtgttatgtgtgaaggggcaggagtagtacacaactgaataatctggcaggaaagatttctttttttttttttttgagatggagtcttgctctattgtccaggctgtagtgtagtggcccaatgtcagctcactgcaacctctgcctcccrggttcaagtgattctcctgcctcaggcttccaagaagctgggattacaggcacacattcccacacccggctactttttgtatttttagtagagatggagttttaccatgttggccaggctggcctcaaacccctaacctcaagtgatctgtccgcctcagcctcccaaaatgctgggattacaggagtgagccaccgcacccggcctcatattttttgcttgcattttcatttctttgatgacctttgaaaaactagaaacat

SEQ ID NO: 881355 - DNA, 587 bp, Homo sapiens
atttatgtatcatgcagggaagtttaattatcttttatctcacctatttcccaatgtggctgagatttgaatgctatttttgtaagaaaagtgacaggcagatctcttatatggctcccaaagacccaagcccttgtataacctcctcccctgagtacagctgagacttataacttgcttctaaccaagagaatatgacaaaagtaatgagatgtcactcccatgataatgttacattatatgacaaaagtaaagggattttggagatgtaattaaaacccctaaacagtgaactttaagttaatcaaaagggaaattatcytgaatgggcctgacttcatcaggtgagccctttttattttattttattttattttattttattttattattattatactttaagttttagggcacatgtcgacaatgtgcaggttagttacatatgtatacatgtgccatgctggtgtgctgcacccattaactcgtcatttagcactaggtatatctcctaaagctatccctcccccctccccccaccccacaacagtctccagagtgtgatgttccccttcctgtgtccatgt

SEQ ID NO: 881356 - DNA, 637 bp, Homo sapiens
acagttatctcaagtcattcttctatgtcatcatctcaattttaaggcatatttcacttaaggagtgagaagtgtgtagcatttttttacctagaagtctgatgctgatttttaactaagagttaagtttggattttgtggtcataaaacatctatttttcctaaagaactgaaatgattcttatcatttgattagatttatgtaggcttagttgccaacacgtttaatacactagctcttctaaacctgattttctgtataagcatctatccccaaacttgcataccatgatgttattttattttagtgttagtgactccatgtacttcttgctttcaactgtaagccagctcaagttctgtttgsagttaagtaaagtatgcaatttaaaaacaaaatcactttcttggaaacaaaatgatataccctaaatccctatcataacaacagcttctcagccaactgtcaaaatattttctcccaccatcataaaggggctcaaaatattttaattttgtggcttgttaaaaccaaaggaaattaaattaaaaagttaaaataggcacacatgatccaaccaagtagtcacttttatagatccttcaaatagaaatttagttgacaagtggagaccat

SEQ ID NO: 881357 - DNA, 672 bp, Homo sapiens
taacacttcattcttaattctttattcttggtaatattgtgggaaaggacagaggttatcaatgaagaaggagtgaaaataatagttgcttcatttgataaattatttttcatttttattttaaaaatttaataaattaacttgataaacaaaaattacatatatttatatgtatagtgtatatatgtatatatttatagtgtacatggtgtatttatatatttatatataaactttcccacattttccttcctatataaaagtttatatatttatagtgtacatggtgtattaacgtatgtatacattgttgaatgctaaatcaaattaattaacatatgcattacctcacatagttatcattttttttgtagtgagaacccttaaaatctatgctgytagtaattttcaagtatataatatattgttattaactatagctgacatggtgcactgatgcagtagtgaatactcttctcttatgagaagtgggtggtattaaaaagtatcgtgctaatgatgcattgctcagagccgcggaaaactaacccttaataatagactcctgtgttccttgctggacactctcacaacttttcacatcttttattctcacagcactgtgtgtgtaaaggagaaaactgaacctcacagaatctagacagttactga

SEQ ID NO: 881358 - DNA, 672 bp, Homo sapiens
taacacttcattcttaattctttattcttggtaatattgtgggaaaggacagaggttatcaatgaagaaggagtgaaaataatagttgcttcatttgataaattatttttcatttttattttaaaaatttaataaattaacttgataaacaaaaattacatatatttatatgtatagtgtatatatgtatatatttatagtgtacatggtgtatttatatatttatatataaactttcccacattttccttcctatataaaagtttatatatttatagtgtacatggtgtattaacgtatgtatacattgttgaatgctaaatcaaattaattaacatatgcattacctcacatagttatcattttttttgtagtgagaacccttaaaatctatgctgctagtaattttcaagtatataatatattgttattaactatagctgacatggtgcactgatgcagtagtgaatactcttctcttatgagaagtgggtggtattaaaaagtatygtgctaatgatgcattgctcagagccgcggaaaactaacccttaataatagactcctgtgttccttgctggacactctcacaacttttcacatcttttattctcacagcactgtgtgtgtaaaggagaaaactgaacctcacagaatctagacagttactga

SEQ ID NO: 881359 - DNA, 613 bp, Homo sapiens
acaaatgaattgacaaagaaaattatatatgtgtatatacatacatatgcactacatatgtaatctgtttatatatatgtatatatacacatatatacatattaaaaatattatatatacacatatatttttaatatgtatatatgtgtgtgtgtgtatatatatatctccagttttttaaaaaaaaggaatactgscatttgcaacaacatgaatgaatctggatgccattatgctaaataacataaacctagcacaaaaggaaaaatactgcatgattctatttacatgaggtatatataatagtcgaatttatagaaacatagaatacaatggtggttgcgaggttttgtgcagttggggaaatggagagttgtttaatgggtgcaaagtttcagttatgctagatgaataaattttagagattttaaaccacaagcataaaaggagccaaacgtactgagcttcatccacaagcatacaggagaatcattcatgaactcttaatatacattcctgtttgatatattaaacatattgtaatgaagagttcaataaagtcagtgccaatggaaaagaaataatcacatatttgtaaaaatctaggggaccc

SEQ ID NO: 881360 - DNA, 601 bp, Homo sapiens
gctgcaataagcataagtgtgcatgtgtctttatagcagcatgatttataatcctttgggtatatacccagtaataggatggctgggtcaaatggtatttctagttctagatccctgaggaatagccacactgacttccacaatggttgaactagtttacagtcccaccaacagtgtaaaagtgttcctatttctccacatcctctccagcacgtgttgtttcctgactttttaatgatcaccattctaactggtgttggatggtatctgattgtggttttgatttgcatttctctgatggccagtgatgatgagcattttgtcatgtgtctattggctgcataaatgtcttcttttgagaagtgtctgtttatattcttcacccacttgttgatggggttgtttgttttttttcttgtaaatttgtttgagttctttgtagattctggatwttagcccttttcagatgagtagattgcaaaaattttctcccattctgtagttttttgctgtgcagaaactctttagtttaattagatcccatttgtcaattttggcttttgttgtcattgcttttggtgtttttgacatgaagtccttg

SEQ ID NO: 881361 - DNA, 690 bp, Homo sapiens
attgttgttgttattattattattaattttagccattctggcaggtgagagtgacatattattgtggctttaatttgcatttctccaacagttaataataatgttatctttacatgtgcttactttccagtgtatatttycctttatatgctgtctcttaatgtgtttggtccattttcattttttttttaattttgctgttgaattggatgaattctttatatattctagttaccagtcctttgttgcacacatgatattaaaatattttctcctactctagatcatcctttattctattaacatagtacgccatatagcaaacattttaattttaatgaaatacaagttatcaatctttcctttcatgaattactcttccggtctcaagtttaagaatttttttatctacctctagattccaaagttttctctcttcttaaatagccttatactttcatggtttcacattttacatttaagtttatgatctactttgaaaatcttgaattaattttttaataaagtgtgatatttaggctgaagggttttcatttgtttgtttcttttattggtttgtttcttttttttttttttcattttaacctataaaaatgtccaattactccacagtcatttaaaaaggcaatccttcttcaattgaatttccgcctttgtaaaaaatagttg

SEQ ID NO: 881362 - DNA, 675 bp, Homo sapiens
gttgtgaattaaacacacaagagagcaggtcacaggagcaggcaccaggtggtgaggcagaatatatttctggacaggtagccagcatgttgccgttagtttgaggagaggctgggggcaggcagtgcgaagtgattatctaccaccatgcagctgttaagcagggaggkagagtatgcagtgttaggagagaaggcagcagagataagctttgggccagcagatcagagagcttccattacagacaggcagggcagagtctgcacagctctttgaaaaggatgctgtattgtcaaactcagtggtcacacagacccaagtataactggatggctttgccccttgggagaacagcatttgacttagaaatgtctcactcatatctgtatctaactcagagatgtgtctaccaagaggacaaagggtatataataactgatgaaaaatttaggcatttggagaaaaagacagagagcctaagcttgtgccttataggaagggctctcttcctgtttattctcagatggtttgcattctataactggatttggacagggtttctattggatcaggacacatgtcttcccagaactaatgtactactatttagggatgtggggaggaagccagcagacaatgtagtggaacctgtgttcagatgccactcactagtcc

SEQ ID NO: 881363 - DNA, 583 bp, Homo sapiens
aacaggtgggtatggtggctcatgcctgtaatcccagcattttgggaggctgaggcaggtggatcacttgaggccaggagttcaagaccagcctggtcaacatggtgaaaccctgtctctactaaaaatacattcattagccacacatggtggcacacccctatagtcacagatacccaggaggctggggcacgagaatgacttgaacccaggaggtggaggctgcagtgagctgagattgtgccactgcactccagcctgggtaagagagcgagactctctctcaaaaaaaaaaaaaacaaaaaaaaaaaccaaagactggtacaacaaacatgtgtatacccactacttagacttggcaattgttcatagtacataatatrctaatttgaaagtgaattgacatggaaaatattatttgttacccattttaacattaattagatcatttgactgataatcttggaaagggcatgaaggatttgcttattaacaggtctgagttagatatcagttagacacatatagcccaatagttacttttcttaaaagtagttcgaatataaaaaatttgtccaattat

SEQ ID NO: 881364 - DNA, 583 bp, Homo sapiens
aacaggtgggtatggtggctcatgcctgtaatcccagcattttgggaggctgaggcaggtggatcacttgaggccaggagttcaagaccagcctggtcaacatggtgaaaccctgtctctactaaaaatacattcattagccacacatggtggcacacccctatagtcacagatacccaggaggctggggcacgagaatgacttgaacccaggaggtggaggctgcagtgagctgagattgtgccactgcactccagcctgggtaagagagcgagactctctctcaaaaaaaaaaaaaacaaaaaaaaaaaccaaagactggtacaacaaacatgtgtatacccactacttagacttggcaattgttcatagtacataatatgctaatttgaaagtgaattgacatggaaaatattatttgttmcccattttaacattaattagatcatttgactgataatcttggaaagggcatgaaggatttgcttattaacaggtctgagttagatatcagttagacacatatagcccaatagttacttttcttaaaagtagttcgaatataaaaaatttgtccaattat

SEQ ID NO: 881365 - DNA, 629 bp, Homo sapiens
aaagcactaggccagatggtttcgctggttaatgctatgagataattaagaattaaatgatacaaattcttcaaacggtcttccaggacacagaaacagaagtgagcatgtaaagcatcaaaggaaagaaaaactacaggcttatatctaacatgaatatagataaaaatatgctcaacaatatataaggaaatcctatataacattgcctgaaaaaagaaatacatgagctgggaaaataattacttcaggtatttaaggctgattcaatgttcaaaaatcaattaatgtagccawttacattaaaaggccaaagtagaacaatcatacaattgtgcaaattgatgcagaaaaagcagttaacaaaatccaacactcattcatggtgttggatagcgcagcaacctagaaacattttactcctcaacagaaaacatttaccaacaaaaggcatatccaaaactaatatcatacttaattgtagaaaaatggtcatcttccccctaatattggaaacaaagcaagaatgtcatctcccaaaacttcgagtcaacagtgtagtggaagtgttagctgttaaaataaaacagaaaaaaatgagatacatattgggaagaaagaaatataat

SEQ ID NO: 881366 - DNA, 629 bp, Homo sapiens
aaagcactaggccagatggtttcgctggttaatgctatgagataattaagaattaaatgatacaaattcttcaaacggtcttccaggacacagaaacagaagtgagcatgtaaagcatcaaaggaaagaaaaactacaggcttatatctaacatgaatatagataaaaatatgctcaacaatatataaggaaatcctatataacattgcctgaaaaaagaaatacatgagctgggaaaataattacttcaggtatttaaggctgattcaatgttcaaaaatcaattaatgtagccaattacattaaaaggccaaagtagaacaatcatacaattgtgcaaattgatgcagaaaaagcagttaacaaaatccaacaytcattcatggtgttggatagcgcagcaacctagaaacattttactcctcaacagaaaacatttaccaacaaaaggcatatccaaaactaatatcatacttaattgtagaaaaatggtcatcttccccctaatattggaaacaaagcaagaatgtcatctcccaaaacttcgagtcaacagtgtagtggaagtgttagctgttaaaataaaacagaaaaaaatgagatacatattgggaagaaagaaatataat

SEQ ID NO: 881367 - DNA, 503 bp, Homo sapiens
agcttccttataagtgagagaagaaggcagaagaaaggcaaccatggaggtcgcagcatgagaaattactcaacatcactgacttttaagatacaagaatgaggacccagcgcggtggctcatgcctaatcccagcactttgggaggcyggggtggatggatcacgaggtcaggagattgagaccatcctggataacatggtgaaaccccatccctactaaaaatacaaaaaattaactgaacatggtggcacgtgcctgtagtccaagctactcaggaagctgaggcaggagaatcacttgagcctgggaggcagaggttgcagtgagctgagattgtgccactgcactccagcctgggtgacggaaggagactccatctcaaaaaaaaaaaaagatataagaatgaagtcatgttccaaggaataaaggtggcctctggatgctgaaaaatatcaagtacatagattctgccacatagccctcagaaagactgcagccctg

SEQ ID NO: 881368 - DNA, 503 bp, Homo sapiens
agcttccttataagtgagagaagaaggcagaagaaaggcaaccatggaggtcgcagcatgagaaattactcaacatcactgacttttaagatacaagaatgaggacccagcgcggtggctcatgcctaatcccagcactttgggaggctggggtggrtggatcacgaggtcaggagattgagaccatcctggataacatggtgaaaccccatccctactaaaaatacaaaaaattaactgaacatggtggcacgtgcctgtagtccaagctactcaggaagctgaggcaggagaatcacttgagcctgggaggcagaggttgcagtgagctgagattgtgccactgcactccagcctgggtgacggaaggagactccatctcaaaaaaaaaaaaagatataagaatgaagtcatgttccaaggaataaaggtggcctctggatgctgaaaaatatcaagtacatagattctgccacatagccctcagaaagactgcagccctg

SEQ ID NO: 881369 - DNA, 644 bp, Homo sapiens
tctcaatgtatgtcatcagtatagcacatctctggtacaaaaatccaagaaaggtagcacaaaagcgaaagcaccaaccaagcttacatataaacaaacatgcatacatcctaaatactacacaatagtacccaaatgaatacaacattgcattaaaggtataaaagcactgtactgaaaacttaaaagttacacgtgaatactgcactgtaaatcctgaatactataatgacccacccccacccttccacagccctggtgagggtcagaaaccattcatctgcctccagactttgctagtcctcagagacactgctgcgagggtagtgggcagtgggattagcctcccgcagagctctggcctcctccagagcttctctgtatcgggagggccaggcctggggrtctttcttaaagaccctggccaggaactccatgatttgcatcttggtgatttcgcggctggcccgggagccccaaaagaactcgtattcgggcggctccacgtatgggacgcgctggtacttcaggtaattcatttggacgaactcctcagtgatgagcttccgcacgtccccgaaggtggagtgcttcttccagggccgcagccccaggatgcgcagcacgttccagacggcgctctc

SEQ ID NO: 881370 - DNA, 681 bp, Homo sapiens
taccaacagaatgttaaaatacatgaggtgaaaactaagagaactggaaggaaaaacagacaaatccactgttatagccggagacttaaacacacttccatcagtaattgacagatgcagcaggcaaaaagttaataagaatacggttgaactgacagcaccaccaatcaatgaatttaactggtatttacagaatacctcatccaacaacagcagaatatacattcttatcaagctcacatagtatattcactaagacagaaaacattctgggccaaaaaacatacctcagcaaatttaaaagaatagaaatcatacaaagtatgttctcagaccaaaatggaattaaattagaaattaatgactaaaagtcaaaatacgtggaatttaaacaatatatgtctaaataacacatggatccaaaaactcaaagtacattttaaaaagtatttcaaactaaacgaaaatgaaaacataatttctaaaaatgtagggatgcagcagaagtagtgcttaaagggaaatttatagcattraatacatatatctgattaggagaaagatctaaaataaattatctaaacttacatagtagaaaatctagatgggtgggcctagatgggctaatgggtgaattctacaaacatttaaagaagaaataataccaattctctacaatct

SEQ ID NO: 881371 - DNA, 503 bp, Homo sapiens
ttatctcacttcaaattatactacagagctaaaccaaacagcatggtactggcataaacagacacacagaccaatggaactgaatagacaatacagaaataaatctacccatctacagtgaacttattttcgacaatggtgccaagaacatacattggagaaaacacagtcctcaatagttggtgctggggaaactgggtatccatatgcagaagaatgacactgcacttctgttgcttgccatagacaaaaatcacaacaaaatggattaaagacttaaatctaataattcagcctatgaarcttctaaaagaagtaattgaagaaactcatcaaaacactgcagttggcaaaggtttcttgaatattacaccacaagcacaggcaaccaaagcaaaaattaactaatgctttttttttttttttttttttttttggtagggcatgaagtttcgctcttgtcacccaggctggagtacaatgacacgatctcggctcactgc

SEQ ID NO: 881372 - DNA, 503 bp, Homo sapiens
ttatctcacttcaaattatactacagagctaaaccaaacagcatggtactggcataaacagacacacagaccaatggaactgaatagacaatacagaaataaatctacccatctacagtgaacttattttcgacaatggtgccaagaacatacattggagaaaacacagtcctcaatagttggtgctggggaaactgggtatccatatgcagaagaatgacactgcacttctgttgcttgccatagacaaaaatcacaacaaaatggattaaagacttaaatctaataattcagcctatgaaacttytaaaagaagtaattgaagaaactcatcaaaacactgcagttggcaaaggtttcttgaatattacaccacaagcacaggcaaccaaagcaaaaattaactaatgctttttttttttttttttttttttttggtagggcatgaagtttcgctcttgtcacccaggctggagtacaatgacacgatctcggctcactgc

SEQ ID NO: 881373 - DNA, 642 bp, Homo sapiens
gccattgctgaggcttgagtaggtaaacaaagcggccagaaagcttgaactgggtagagcccactgcagctcaaggaggcctgccttcctctgtagactccacctctgggggcagggcatagccaaacaaaacgcagcagaaacctctgcagacttaaatgcccctgtctgacagctttgaagagagtagtggttctcccagcaygcagctggagatctgagaacggacagactgcctcctcaagtgggtccctgacccccgagtggcctaactgggaggcataccccagtaagggcaaactgacatctcacacagccgggtactcctctgagacaaaacttccagaggaatgatcaggcagcaacatttgctgttcatcaatatctgctgttctgcagcctccgcgactgatacccaggcaaacagggtctggagtagacctccagcaaactcctacagacctgcagctgagggtcctgactgttagaaggaaaactaacaaacagaaaggacatccacaccaaaaccccaactgtacatcaccatcatcaaagaccaaaggtagataaaaccacaaagatgggaaaaaaacagagcagaaaaactggaaactctaaaaatcagagtgcctctcctcctcc

SEQ ID NO: 881374 - DNA, 571 bp, Homo sapiens
taattttgttcctttcgcaaaccagacaccataacagaaaaattttaggaacatgtgcatgttcagtagccttcaatgcaattatactggttattaaaaagtgttggataatcaatattttttaaagattcactagtcccttctgataattttagaactttgggaagtaataatacaaatgtatttttagctgtgtcctttaatcttttactgtttcctctatgtgtggtgtttggtttgtgtgtgtgtgataattattataaagatcagaggctaacagaggtgttaatcacgaacttttamatttttttatttttatttttttattttttttaagagacagagtctcgcggatgttgccaaggctggatgcagtggcgccaactcagctcactgcaacctccgccttcagggttcaagcgattctgctgcctcagcctcccaagtagctgggactgcaggagggcaccacgatgcccactaatttttgtatttttagtagagatggggtttcaccatattggccagactggtcttgaactcctgacctcatgatccgcccacctcagct

SEQ ID NO: 881375 - DNA, 571 bp, Homo sapiens
taattttgttcctttcgcaaaccagacaccataacagaaaaattttaggaacatgtgcatgttcagtagccttcaatgcaattatactggttattaaaaagtgttggataatcaatattttttaaagattcactagtcccttctgataattttagaactttgggaagtaataatacaaatgtatttttagctgtgtcctttaatcttttactgtttcctctatgtgtggtgtttggtttgtgtgtgtgtgataattattataaagatcagaggctaacagaggtgttaatcacgaacttttacatttttttatttttatttttttattttttttaagagacagagtctcgcggatgttgccaaggctggatgcagtggcgccaactcagctcactgcaacctycgccttcagggttcaagcgattctgctgcctcagcctcccaagtagctgggactgcaggagggcaccacgatgcccactaatttttgtatttttagtagagatggggtttcaccatattggccagactggtcttgaactcctgacctcatgatccgcccacctcagct

SEQ ID NO: 881376 - DNA, 479 bp, Homo sapiens
cctgaatgctattgcctaggttttcttctagggtttttatggttgtaggtctgaaatgtaggtatttaatccatcttgaattaatttttgtataaggtgtaagaaagggatccagtttcagctttctacatatggctagccagatttcccagcaccatttattaaatacgaaatcctttccccatttcttgtttttctcaggtttgtcaaagatcagatgctggtagatgcgtggtattatttctgaggtctctgttctgttccattggtctatatctctattttggtaccagtaccatgctgttttgattactgtagccttgtagtgyagtttgaagtcaagtagtgtgatgcctccagctttgttcttttggcttagattgacttggcaatgcaggctcttttttggttccatatggactttaaaccagtttttttttttccaattctgtgaagaaagtctttgataacttgatggg

SEQ ID NO: 881377 - DNA, 614 bp, Homo sapiens
cagcatgggcaacaagagtgaaactccatcccccaaaaaaagaaaggaaagaaagaaataaagaaagtaagaaagagaaagaaaggtttaactctctgagctaaatgcacatatcagaaagcagttttacaggtagtttctttctagtaattgtgttgggatatatggtttttcactataggcctagtgggctctgaaatacctctttgcagattctacaaaaagagtatttccaacccactgaatcaaaagaaaggtttaattctgtgagctgagtccacacgtcagaaagcagtatcacagatagcttctttgtagattttaccatgtgataatcggtttttcactataagcctcaatgccctttgaaatgtcccttcgcagattctgcaaatacagtttttccaaactgctgaatgaaaaaaaaagtttaaccctgtyagctgaatccacacatcacatagtcgtttcacaaataatttctatctgtttttatcatgagatattttgttttttactatatgccttactatgtaccacaactgtcccatttgcagattctaccaaaaaagggttaccatattgctgaatcaaaggaaaattttaactctgtg

SEQ ID NO: 881378 - DNA, 599 bp, Homo sapiens
acaccatttccaaaagatattccatggtcttgccattaaagctttgactgaatcacagccaaagcgcaaagtcattctttgttgttgcaagtccttcagggcctcctcaagtgcttcctgatgcagactcaggctcttacatsgcacacgtgaaccttcacagacctctaagtttcctgtctttgcagctgcaaatcctgtgtccccaactaccctgccaccagctccactgcgtttcccatacctaccttaatcttcatcaacatcaaactgtttactgttctccaataaaacaggcatttaaaaacacattttctctgctctaaatattcttctcaaagtagaactgctagtttctacttatcactgaacacctgctgtaagtgtgaagttctcttaagtttttgcctggtccccactgccttccactgctgctacacaatgctaattgccctctgctcaccctcatgagcatatgagggctactgtaccttcccccgccacacattactgaaactagcatattcatttgcacatagtagggagtgtattagtcagagttctctagagggataggactaatatgatagatatataca

SEQ ID NO: 881379 - DNA, 571 bp, Homo sapiens
atgtatatttggtgcagctctatcatataggttttgatttccctacatttaaattataaaatacttttcttgtgcgagttcatcaggacaatatttactataaaagttcacagtttgatatatatcgaattttgccaactgcttcgctaagtgaaactgaagccaaagaagttacaggattcccaatatgtccgagctgcttagtgacggaggtctctctgaacctgaagctctgctatttgccactatttgtccacgggcttaaacttctctttacacacccattatttagtcattttggacctttgcatcctstgggagatctctttaggtatttggaacgcagtcaattcgaaaagtgtgtcaacaaaaatccagaaataaaacttgtaagaaaataaacttgtcataatgattttctccctcatctgtaaaaataacccaagaaaatttgtattgaaatcaaagagataactgtttagcaacaaaaattatacctttagcaatgtgaattattttttaaaatattatcttcctccatattcacaccatcctgaagtcagcatggaga

SEQ ID NO: 881380 - DNA, 570 bp, Homo sapiens
ccttgattaatgactgtgagattcaaaaattattgttatctgatatctgaaatcccttccccccaaaagtaaagaacatagcaaaataaacaatttaatttatttggtggataacaaaaacagtgacaaccaaaatcctgagagaattgaataaatgccaaactggcatatagtttgttgcagctgtttstgccaatacacatttaagtaataaaattagaatgaattttagtttattagaaatatgaagttaaaaaaatacaatattttcaagtaataaaaatagctcactttgttcacaggtgagttgcctagcccaacatactttaaggtagccatccaataaagggtgacatattctccttacacatacacatattcagaaaccctgggataaaaattagctactgagtccccaagaattttggaaataaaatgaacagaaaaatgtccgcatttacgtaagtcacctaaaataaggctttcttgctggtcatcctattaaagggccaagaagactgtgaatctataaatagatctgattaccaacagaaagggtaaacttttaag

SEQ ID NO: 881381 - DNA, 570 bp, Homo sapiens
ccttgattaatgactgtgagattcaaaaattattgttatctgatatctgaaatcccttccccccaaaagtaaagaacatagcaaaataaacaatttaatttatttggtggataacaaaaacagtgacaaccaaaatcctgagagaattgaataaatgccaaactggcatatagtttgttgcagctgtttctgccaatacacatttaagtaataaaattrgaatgaattttagtttattagaaatatgaagttaaaaaaatacaatattttcaagtaataaaaatagctcactttgttcacaggtgagttgcctagcccaacatactttaaggtagccatccaataaagggtgacatattctccttacacatacacatattcagaaaccctgggataaaaattagctactgagtccccaagaattttggaaataaaatgaacagaaaaatgtccgcatttacgtaagtcacctaaaataaggctttcttgctggtcatcctattaaagggccaagaagactgtgaatctataaatagatctgattaccaacagaaagggtaaacttttaag

SEQ ID NO: 881382 - DNA, 570 bp, Homo sapiens
ccttgattaatgactgtgagattcaaaaattattgttatctgatatctgaaatcccttccccccaaaagtaaagaacatagcaaaataaacaatttaatttatttggtggataacaaaaacagtgacaaccaaaatcctgagagaattgaataaatgccaaactggcatatagtttgttgcagctgtttctgccaatacacatttaagtaataaaattagaatgaattttagtttattagaaatatgaagttaaaaaartacaatattttcaagtaataaaaatagctcactttgttcacaggtgagttgcctagcccaacatactttaaggtagccatccaataaagggtgacatattctccttacacatacacatattcagaaaccctgggataaaaattagctactgagtccccaagaattttggaaataaaatgaacagaaaaatgtccgcatttacgtaagtcacctaaaataaggctttcttgctggtcatcctattaaagggccaagaagactgtgaatctataaatagatctgattaccaacagaaagggtaaacttttaag

SEQ ID NO: 881383 - DNA, 570 bp, Homo sapiens
ccttgattaatgactgtgagattcaaaaattattgttatctgatatctgaaatcccttccccccaaaagtaaagaacatagcaaaataaacaatttaatttatttggtggataacaaaaacagtgacaaccaaaatcctgagagaattgaataaatgccaaactggcatatagtttgttgcagctgtttctgccaatacacatttaagtaataaaattagaatgaattttagtttattagaaatatgaagttaaaaaaatacaatattttcaagtaataaaaatagctcactttgttcacaggtgagttgcctagcccaacatactttaaggtagccatcmaataaagggtgacatattctccttacacatacacatattcagaaaccctgggataaaaattagctactgagtccccaagaattttggaaataaaatgaacagaaaaatgtccgcatttacgtaagtcacctaaaataaggctttcttgctggtcatcctattaaagggccaagaagactgtgaatctataaatagatctgattaccaacagaaagggtaaacttttaag

SEQ ID NO: 881384 - DNA, 530 bp, Homo sapiens
gacctcgatttccatcagacggcaaacctcctctctcatttttaggcttggccatgaaaaagatggtttggacaggaccgtggtaagtccatcactacattcatacccctgttttttttttttttttttttaaatcagccaggaaagcttttctatggcaactgaatttatccagtccttatatgcatctatcacaggttataacatgtccaaatttggagtcaagaattatagcaaagagacaggtaagaaraaaaaatccccagggaggctttcttttgtgggaggcaggccgccacagtgctaagtattagaaacctttcagccaagcaggtgaactagaattggcagagtccagcaatagctcttagtctaattaagagttttcttcagtgacatttaaaaagtgtaaattcagttaataggtaataggcaacaaacagtaataagaacattcaggaattcagtcaggcggttagtttaaagaagagaagtgaataagccataggagctaagatatttattatttt

SEQ ID NO: 881385 - DNA, 598 bp, Homo sapiens
tcttttgtgttctactttcctttttactttcaaatctttaattaacctgggattcatgttgaaaattatgaaggttaattttatgtgtcaacctgactgaccataaagtgcccaaatacttggtcaaagattatcttaggtatgtatgtgagggtgttttggatgagattaacatttgaatctgtagactgagtaaaacaggctgtccttcctaatgygagtaggtctcatcccatcagtggagggcctgaatagaacaaaaagtctgaacctcccttacatgagagggaatttcctcttacttgattgccttatggctgggacattggtttatcctgcctttggactccagctgaaacatcagcttttcctgggtccactgaccttgggactgaaactgcaccattggctctcataggtcttcagcttgccaactgcagatcttgggacttgttagcctccacaattgtgtgagccaattccttatcatctctctctctcatgctgtgtgtgtgtgtataataattaatagatatctaattgtgcaccctaccccatgatttagtcaattgtttcaacattatgaaaatctattttt

SEQ ID NO: 881386 - DNA, 598 bp, Homo sapiens
tcttttgtgttctactttcctttttactttcaaatctttaattaacctgggattcatgttgaaaattatgaaggttaattttatgtgtcaacctgactgaccataaagtgcccaaatacttggtcaaagattatcttaggtatgtatgtgagggtgttttggatgagattaacatttgaatctgtagactgagtaaaacaggctgtccttcctaatgtgagtaggtctcatcccatcagtggagggcctgaatagaacaaaaagtctgaacctcccttacatgagagggaatttcctcttacttgattgccttatggctgggacattrgtttatcctgcctttggactccagctgaaacatcagcttttcctgggtccactgaccttgggactgaaactgcaccattggctctcataggtcttcagcttgccaactgcagatcttgggacttgttagcctccacaattgtgtgagccaattccttatcatctctctctctcatgctgtgtgtgtgtgtataataattaatagatatctaattgtgcaccctaccccatgatttagtcaattgtttcaacattatgaaaatctattttt

SEQ ID NO: 881387 - DNA, 598 bp, Homo sapiens
tcttttgtgttctactttcctttttactttcaaatctttaattaacctgggattcatgttgaaaattatgaaggttaattttatgtgtcaacctgactgaccataaagtgcccaaatacttggtcaaagattatcttaggtatgtatgtgagggtgttttggatgagattaacatttgaatctgtagactgagtaaaacaggctgtccttcctaatgtgagtaggtctcatcccatcagtggagggcctgaatagaacaaaaagtctgaacctcccttacatgagagggaatttcctcttacttgattgccttatggctgggacattggtttatcctgcctttggactccagctgaaacatcagcttttcctgggtccactgaccttkggactgaaactgcaccattggctctcataggtcttcagcttgccaactgcagatcttgggacttgttagcctccacaattgtgtgagccaattccttatcatctctctctctcatgctgtgtgtgtgtgtataataattaatagatatctaattgtgcaccctaccccatgatttagtcaattgtttcaacattatgaaaatctattttt

SEQ ID NO: 881388 - DNA, 623 bp, Homo sapiens
ataacaagcagtgagattgaaattgtaactaaataattgccaaccaaaagaaagtccaggaccaggcagattcacagcagaattctaccagacattcaaagaagaattggtaccaatgctgttgacactattccacaagatagagaaagagggaaccctctctaattcattctatgaagccagcatcaccctaatacccaaatcaggaaaggacataaccaatcaaggaaactacagactgatatccctgatgaacatagacgctaaaatccttaacaaaatactagctaaccgaatccaacaacatatcaaaaagataatccaccacgatcaagtgagtttaataccagggatgcagggatggtttaacatacrcaagtcaataaatgtgatacaccacataaacagaattaaaaaccaaaatcacatgatcatctcagtagatgcagaaaaagcatttgacaaaatctagcatactttatgattaaaactctcagcaaaattggcatacaaggaacataatacctcaatgtaataaaagccatctatgacaaacccacagccaacataataccaaatggggaaaagttgaaagcattccctctgagaattggaacaagaca

SEQ ID NO: 881389 - DNA, 614 bp, Homo sapiens
agaacatacaaagtttgtctttctgtgcctggcttatttcacttaatataatgacctccagttccatccatgttgctgcaaatgacatgatttcattctttttaattgatgaatagtatatatatatatatatatatatatatatatatatatatacacacatacacacatacacacatatatatacacacatatatatatacaccatataccatatatatgccagatttcctttatccattcttccattggtgaagccttaggttgatttcatatatttgctattgtaaatagcattgcaataaatggaagtgcaggtaccctttgacatactgagatcttttcctttgggtaaatatctggtagtrggattgctagatcatatggcagttctctttctagttttttgagatacctctatactgttttccatagtgactatactaatttgcatcccaccagtagtatatgagttcccttttctgctgacccttgccagcatctgttattttttgtctttttgatgacagctattgtaactggggtgagatgatagctcattatggttttgatttacatttccctaatgattgctaatgttgagcatgttttca

SEQ ID NO: 881390 - DNA, 581 bp, Homo sapiens
tgttcaaaacttatattttgtggaaaaaaatattttctcgaagtatgcggtgaagcaaaatgttagaaaatgtgtatacattaatgcattgatataaactttaaaaaatcaccataacactttagcttctgattttgttcaacttcactaaatgaacttytgtgagatatttgaattcccacaagtagattaattgggtggagaagtttatagaccccaatttagtgaaatgaaaaagttattaaaatatatgtaattattcaaacaagtattttgaagcatctactatgactagattataaagcatgtacagattaaaaataaattaatctctaaattcacctacagctaaattcaaattcaaggctaattttgaagaaaaggtttgaatttagtggaaaagctgattagaagcaggttacaaactattattttcttattttaagacaaaaagtgtacatgaatccagcttgcatagttcatattttccaattgatttgtaggcctgtttatactcttcttcttctttttattttttgagacagggtcttgctctattgcccaggccagtgttccaatag

SEQ ID NO: 881391 - DNA, 581 bp, Homo sapiens
tgttcaaaacttatattttgtggaaaaaaatattttctcgaagtatgcggtgaagcaaaatgttagaaaatgtgtatacattaatgcattgatataaactttaaaaaatcaccataacactttagcttctgattttgttcaacttcactaaatgaacttctgtgagatatwtgaattcccacaagtagattaattgggtggagaagtttatagaccccaatttagtgaaatgaaaaagttattaaaatatatgtaattattcaaacaagtattttgaagcatctactatgactagattataaagcatgtacagattaaaaataaattaatctctaaattcacctacagctaaattcaaattcaaggctaattttgaagaaaaggtttgaatttagtggaaaagctgattagaagcaggttacaaactattattttcttattttaagacaaaaagtgtacatgaatccagcttgcatagttcatattttccaattgatttgtaggcctgtttatactcttcttcttctttttattttttgagacagggtcttgctctattgcccaggccagtgttccaatag

SEQ ID NO: 881392 - DNA, 674 bp, Homo sapiens
aatgggtaaagactggaataatttggaggagcatactagaaaaagttcaggtttctgtgaatgggacaagaactacagtaaaagtctggaacattttagacattacttaaatgctcatgatcagaatgctgatagaaatatagatgataaaggccattcttatgagatctcagatagaaaggaggaacaagttattggaaactgaagtaaagggcatttttattatatacttccaaaaactaggtgaaattttgtctttgtgttgggtgtttatggaatacagaacttgagataaatgaactaagagcactgagagcaagactaccatcaagcctccagaactatagagctactagcattcaatgccagcctgggattattgctggcacaatactccaacacacgggagcgctgagtagactgagccaaacagagctctagaggtgggattgcctgaagccttggggatccagcccttgccccagtgtgtccrggatgtgagacattgtgtcatagaagattagtctccagctttcacatttcatgttgtttgccttgttgagtttggacttacttggacttgagaccactgatcgcctttttcttgactatttctctcttctgaaattacaatatctattctacgcctgtaccatcatcgtattttggaagca

SEQ ID NO: 881393 - DNA, 561 bp, Homo sapiens
caaactgtgtttgtaacgactttctaagattgatagcctccgtgtttcaatgctcatggagcagatggatatgactgacactgcccttaatactacagcatgatccaaagcatcaccaaagtcttcaaagagaaagtaaaaaaaaaaaaatgcctctccattttcacttctacttcaaatcctgcaatttgacataaaaagacaatatatctgtctccttcactagactaagggcgtcttaaggtagggctcatggcttttttctatgttctccatacctagcatacactatacacatccattttttwaaaaaataaaatattaataatttggcctttgtggaaaggatagtttttctaagacttctgtgacttgtttagcaatgtctttctattgatttcttcacttgcttcacttgcatgtatgtgacattgtgtcactttggggcagaagttttaaaagccagtatggagttcatcatatctcttttatggctgcaataataaatggcaatattcaagatagaaactctaccaacctgggatcccgagtgaagacagt

SEQ ID NO: 881394 - DNA, 608 bp, Homo sapiens
tcattttagctagatctgatataagccacaaagttttttgatgttgcttttgttgttttagtaaaacacacttatattacttctctgttttaaatcatacattgttgtccacctgaataacaacaacaaaatagaagacttgaaagaacaaaatgatctataagtaaattgactgcttggccaaaaaaaaaatccactatttaaagaaagacaacaaaatccaacatcctacaatgtaaattaataatgtctaatatccactgaaaaaaaaatcactaacatgagaaagaaagagaaaaatgtgactcacaaccagtggataaattaatagaaaaagactcagaaagtctgagatgataaaagtgtaaattaaagattgaagctgctatgtcaaggatttaaagaacatggaaaaagtatatgtttaaacaaattgtggtttatgaatacwggaatctttatttattaaaaataaataagaaaatggtgcacgtaacctggatatgtctcaaaaccattatgccaagagagagaaaccaggccaaatattgtattctatatgattgtattttattaaataatagaagaggaaaaactaactcatagca

SEQ ID NO: 881395 - DNA, 627 bp, Homo sapiens
caacaaaccatcaatcaactaaaacaggaagttccacatccaggtgtaattaaaataacctgttcagtaagagggcgtacctaagactctgctgcctcatctgtccagacagggacacagtaaaggcaacttctttctaatacaacacaacagcattctcatttccacactctagtgcctgggaccccaaatgggagagasagaaaaccaagcaccgctgggtaacctagagagagttttataccatttttgataatgcactgaataaaaaaggtgaactggattttatacagacaacattcacagtcagcagcttttacgactccagtaaatactaaaaacgtatccaccttaagctcagagcctaaggggtttgtgtttttatcacaggccttgagattctcgtattcctcaatacaaccggcaagttccaaagccctttaaagaaaatgacacctgctgcataaacacatcaccagagaaatatgattgcctgagatctgtggttggacatctcccagggattaaaatgctgctgctcctcatgtaattaatatgttgggcaaaaagaggccgtccatgaattctgactagggagaaaggacgctgcatttgctagaaaattct

SEQ ID NO: 881396 - DNA, 604 bp, Homo sapiens
accctggggtcttaatttcctgagaggattcaaaataatcaagaacgtcaaaaatgctacatttcagcagaaacatgaaactagcagatcccatttttccatgtaaataaatatgcttaggatgccttagagcagcakgggaagggagtgggaaggcgggcaagtctccacccacaaaacgttcagggtttattacccagacaaaacctttccatgctcaggctagcaggaggtttcccagctatcctctgagcagcccgccctgggtctgggccaacctgaccaggctctattcaccgatgttgtggagaaaaggaccgagggaggggaccccgccttctcttttcttgtagcagaatggcaggctgctggctggacacacgcctggcagatggcatttcaaagggttttcaggagccatctgggttgggtacaattattataaaccatgcttctaacaaagccagaagggttacttcctgacagaagacgagtcaaacaaattctaccatgtttctcagggacagcgtactaatataaaaaaaaagaaaaaaaaaagcgaccaggctgacaaactgggattttccttagcctacaatactgc

SEQ ID NO: 881397 - DNA, 652 bp, Homo sapiens
ggagtgcagtggcacaatcactggtctcaagtgatcctcccacctcagcctcccaggtaactgggactataggcacatgcccccacgaccaactaattttttgcagagacgaggtttcaccatattgtccaggctggtctctaactcctgggctcaagcgatctgcctgccttgccctcccaaagtattgggattaaaggcatgagacacaacccagccaaygcgtctttatagaagctttgcacacatttttaagcacccctcagaagaatgcataaatgacatgactaaatgtgacacagccaatttatgcagctacaaccaagcattcaataacacttcaaaccaatagacagcacacataatggatagcgaaatgctaacagaaacagacatatcaatcaaaatagatcattgcataagaagcaataaatcagaccaaagagcaatcataataccacagatagaaccatatattgcaggatctaacatgacatccttgaatataatacacttctacaagtaagtcatttgttaatacttgatatgaattctgaaggaaatgaagaaacccaggcttgaaggaaatgaagattatgattatgaagtaggtccaaaggatgatactacaccaaatattgctaccacatga

SEQ ID NO: 881398 - DNA, 644 bp, Homo sapiens
ttacttgtaatgctgggaagtgttagatttcaataagttgagtgagtaaatcaagttaaaatcctaggttattcaaaggaagcaaatcactaaaacaaatacttaaaattatgggcctccatgtaaaatgtagcgcaaagattcccatcacatctcaataacaaatagaaaaaatcaaaacaaaacgacttttccyatatacttctcctctttcattaagatgatgaatagattaaaattggatggtggaggtgagggggacaaaggtaacagactttcttattatctgaaaagagacaaaaatttgaccccacacccttttgtttataatctgtttagagtgaaaaagtgttttgttttgttcatttaactgaaataggactgttttagagtaatgatagaaccctacttcaaatcaaaaagtgatttcgtgatctcttcaatgcaaaaatccaagggtaaattttgttttgggagagattgaatacagaagattaaatactgttatcaggaactggcttctctttcaggcggccatttcctctgttatcccaaaatggctgccagcagcttcctggccagcatctttctgatttctcatcctgtgaaaaggtgggggcctttgtctcagcattccctgcatt

SEQ ID NO: 881399 - DNA, 621 bp, Homo sapiens
gaaagcaacttgatcttggcagatattctttttgatgtgctgctggattcagtttgccagtatttaaatgaggatttttgcatcgatgttcatcaagattattggccagaagttttcttttttgttgttgtatctctgccaggtttttgtatcaggatgatgctgtcctcataaaaccagttagggagaagtcccttaattttaaktgttaagaatagtttcagaagaaatggtaccagctcctccttgttcctctgatagaattaagctgtaaatcagtccagtcttcagctttttttggttggtaggctacttattactgcctcaattttataactcattcttggtctattaagggatttagcttcttcctgattcagtcttgggagggtgtatgtatacaggaatttatccattttttctagatttttttttagtttatttgcatagaggtgtttatagtattctctaacggttgttatatctgtgggttcattggtgatagtccccttattatttctgattgtatttgtttcttctctcttttctcctttatttgtctagctaatagtctattttattaattttttcaaaaactcctctcctggattcactgagttt

SEQ ID NO: 881400 - DNA, 621 bp, Homo sapiens
gaaagcaacttgatcttggcagatattctttttgatgtgctgctggattcagtttgccagtatttaaatgaggatttttgcatcgatgttcatcaagattattggccagaagttttcttttttgttgttgtatctctgccaggtttttgtatcaggatgatgctgtcctcataaaaccagttagggagaagtcccttaattttaagtgttaagaatagtttcagaagaaatggtaccagctcctccttgtwcctctgatagaattaagctgtaaatcagtccagtcttcagctttttttggttggtaggctacttattactgcctcaattttataactcattcttggtctattaagggatttagcttcttcctgattcagtcttgggagggtgtatgtatacaggaatttatccattttttctagatttttttttagtttatttgcatagaggtgtttatagtattctctaacggttgttatatctgtgggttcattggtgatagtccccttattatttctgattgtatttgtttcttctctcttttctcctttatttgtctagctaatagtctattttattaattttttcaaaaactcctctcctggattcactgagttt

SEQ ID NO: 881401 - DNA, 621 bp, Homo sapiens
gaaagcaacttgatcttggcagatattctttttgatgtgctgctggattcagtttgccagtatttaaatgaggatttttgcatcgatgttcatcaagattattggccagaagttttcttttttgttgttgtatctctgccaggtttttgtatcaggatgatgctgtcctcataaaaccagttagggagaagtcccttaattttaagtgttaagaatagtttcagaagaaatggtaccagctcctccttgttcctctgatagaattaagctgtaaatcagtccagtcttcagctttttttggttggtaggctacttattactgcctcaattttataactcattcttggtctattaagggatttagcttcttcctgattcagtcttgggagggtgtatgtatacaggaatttatccattttttctagatttttttttagtttatttgcatagaggtgtttatagtattctctaacrgttgttatatctgtgggttcattggtgatagtccccttattatttctgattgtatttgtttcttctctcttttctcctttatttgtctagctaatagtctattttattaattttttcaaaaactcctctcctggattcactgagttt

SEQ ID NO: 881402 - DNA, 556 bp, Homo sapiens
gtgcacgcctgtagtcacagctactcaggaggctgagccaggaggtcaaggctacagtgagctctgattgtaccactacactccagctgagggaacaaagcaagatcccattttgaaaataactggccgggtgcagtggctcatgcctgtaatcccagcactctgggaggctgaggtgggtggatcacttgaagtcaggaatttgagaccagcctggccaacatggcaaaaccctgtgtctactaaaaatacaaaaattagctgggcatggtggtgcacacttgtaatcctagcttctcgggaggctgaggcaggagacttgcttgaacctgggaggcggaggttgccttgagcccagatcgtgccactgcrctccagcctgggcaacagaacgagactctgtctccaaaaaaagaaaaaaaactctatctgtctctatctagttgctttcctgtagttaatgaaattgtcaactttaattgttaattattgttctttgacttgttagtagcagtaaagcatcatttgattttagccaagaaactatttgaagata

SEQ ID NO: 881403 - DNA, 714 bp, Homo sapiens
aaccagtaatgtggggctctttttcatatgattgttggctgcagctatggcttcttttcaaaagtgtctgttcatgtcctttgcccacttttctatggggttatttatttgtttcttgtaaacttgttaagttccttgtagaggctggatattakacctttgtcacatgcatactttgcataatttttctcccagcctgtttactctgttgatagtttgtgttgctgtgcagcagctctttagtataatttgattccatttgtcaatttttgtcttgtttaaattgcttttggcatcatcatgaaatctttgcccatgcctacttcttgagtggtatttcctaggttttcttccagggtttttacagttttgagttttacacctaagtctttaatccatcttgagttaatttttgtatatggtgtaaggaaagggtccagtttcagtcttctgcatatggctagccaattctgccagcaacattttttgaatatggaatcctttccccactgctaaagtgaggcaaactcatttttctttatatatatttaagtatcttctcaagattataggaacagagtgtttaaatttagtggaatcctggtgtatcattgtaatttgagtcccagggttgattaagcttgtgaagttctgccaattgatgcattttaacaaatgttaaagttaagttaaagtctatgttatagaggcaca

SEQ ID NO: 881404 - DNA, 714 bp, Homo sapiens
aaccagtaatgtggggctctttttcatatgattgttggctgcagctatggcttcttttcaaaagtgtctgttcatgtcctttgcccacttttctatggggttatttatttgtttcttgtaaacttgttaagttccttgtagaggctggatattatacctttgtcasatgcatactttgcataatttttctcccagcctgtttactctgttgatagtttgtgttgctgtgcagcagctctttagtataatttgattccatttgtcaatttttgtcttgtttaaattgcttttggcatcatcatgaaatctttgcccatgcctacttcttgagtggtatttcctaggttttcttccagggtttttacagttttgagttttacacctaagtctttaatccatcttgagttaatttttgtatatggtgtaaggaaagggtccagtttcagtcttctgcatatggctagccaattctgccagcaacattttttgaatatggaatcctttccccactgctaaagtgaggcaaactcatttttctttatatatatttaagtatcttctcaagattataggaacagagtgtttaaatttagtggaatcctggtgtatcattgtaatttgagtcccagggttgattaagcttgtgaagttctgccaattgatgcattttaacaaatgttaaagttaagttaaagtctatgttatagaggcaca

SEQ ID NO: 881405 - DNA, 714 bp, Homo sapiens
aaccagtaatgtggggctctttttcatatgattgttggctgcagctatggcttcttttcaaaagtgtctgttcatgtcctttgcccacttttctatggggttatttatttgtttcttgtaaacttgttaagttccttgtagaggctggatattatacctttgtcacatgcatactttgcataatttttctcccagcctgtttactctgttgatagtttgtgttgctgtgcagcagctctttagtataatttgattccatttgtcaatttttgtcttgtttaaattgcttttggcatcatcatgaaatctttgcccatgcctacttcttgagtggtatttcctaggttttcttccagggtttttacagttttgagttttacacctaagtctttaatccatcttgagttaatttttgtatatggtgtaaggaaagggtccagtttcagtcttctgcatatggctagccaattctgccagcaacattttttgaatatggaatcctttccccactgctaaagtgaggcaaactcatttttctttatatatatttaagtatcttctcaagattataggarcagagtgtttaaatttagtggaatcctggtgtatcattgtaatttgagtcccagggttgattaagcttgtgaagttctgccaattgatgcattttaacaaatgttaaagttaagttaaagtctatgttatagaggcaca

SEQ ID NO: 881406 - DNA, 635 bp, Homo sapiens
gttacagaacacacattcttcttatcagtacatggaatactcttcagggtagaccatatgttagccaacaaaacaagtctcaataaattttaaaaagttaaaatcatatccaatatcttctcagaccacagtagaataaaaccagaaatcaaaaacaagaggaactttggaaactatacaaacacacggaaattaaatgacatactctggaataatcastgggtcaagaaagaaattaaaaagtgaaattcagaatgtcttgaaataaatgaaaattaaaacacaacacattaaagactaagagatacagcaaaagttttgctaaagtgaagtttatagcaataaatgcttatttcaaataaggtttcaaataaacaatatcacagtgtacctcaaggaacctgaaaaggaggaataaatcaagccccaaaattaatagcaagaaagaaataataaagattggaaaagaaccaaacaatatagagactttttaaaaagcacaaagcctaatgaaatgaaagattggtgttttgaaaagacaaacaaaatggacaaactgctagctacacaaccaagaaaagaaaagacacaaaatccaaataaataaaattagaaatgaaaaaggagacattaca

SEQ ID NO: 881407 - DNA, 613 bp, Homo sapiens
aagaaccttgaaaaagattactggaactgctaactagaataaccagtttagagaagaatataagtgagctgatggagtgaaaaacacagcacgagaacttcgtgaagcatacacaagtatcaatagccaaatcaatcaaacagaagaagggatatcagagattgaagatcaacttaatgaaataaagtgtgaagacaagattagagaaaaaataatgaaaaggaaccaacaaagcctccaagaaatatgggactatgtgaaaagaccaaacatgcatttgattgctatacctgaaagagaaaaggagaatggaaccaagttggaaaacactcttcaggatattatccaggagaactttaccaacctagcaaggcaggccaacattcaacttcaggaaatacagagaacaccacaaagatactccttgaaaagagcaaccccaagacacamaattgtcagattcaccaaggttgaaatgaaggaaaaaatgttaatggcagccagagagaaaggtcgggttacccacgaagggaagcccatcagactaacagtggatctctctgcaaaaaccctgcaagccagaagacagtggggaccaatatccaacattctt

SEQ ID NO: 881408 - DNA, 637 bp, Homo sapiens
cccagtcacccaccgccttctgaatcgcatcaattggtccctgggtgggtctctgttgcagagggtggaggggcagcccggggactcgatgcagcaaaacttactgagccttcagtcaatatttgaaaaatcaggagaccccccacccccactctcacacatatgcacacactctctcacacatgcacacataacacacatacacaccctgcatttctgccttctctagaaaaaatcagaagacctggccaccctaggtgccaattcctgccagatgtcaagcagctcttgcygaatagaagctgctccctttggatgggagcatgaatgtgtcattcctccacagtcccgcccttctggaagcctctcacctgcccccttgctcacatgccattttcttgccccgccccgccccgcccctctgggcttctgtcactgattactctcatggctgttctgtgtctgtggggctcatgtctcttccatcttcgccctgcaccctgactcccagagccagcccagtgctgagcccagcattgggtgcagtggatgcttgttggctgtggtcctttgttctttggtgtgcagggccctgcatgcccaccctatggggctggccaggtctcagaaccaagca

SEQ ID NO: 881409 - DNA, 637 bp, Homo sapiens
cccagtcacccaccgccttctgaatcgcatcaattggtccctgggtgggtctctgttgcagagggtggaggggcagcccggggactcgatgcagcaaaacttactgagccttcagtcaatatttgaaaaatcaggagaccccccacccccactctcacacatatgcacacactctctcacacatgcacacataacacacatacacaccctgcatttctgccttctctagaaaaaatcagaagacctggccaccctaggtgccaattcctgccagatgtcaagcagctcttgctgaatagaagctgctccctttggatgggagcatgaatgtgtcattcctccacagtcccgcccttctggaagcctctcacctgcccccttgctcacatgccattttcttgccccgccccgccccgcccctctgggcttctgtcactgattactctcatggctgttctgtgtctgtggggctcatgtctcttscatcttcgccctgcaccctgactcccagagccagcccagtgctgagcccagcattgggtgcagtggatgcttgttggctgtggtcctttgttctttggtgtgcagggccctgcatgcccaccctatggggctggccaggtctcagaaccaagca

SEQ ID NO: 881410 - DNA, 659 bp, Homo sapiens
tcctttgtagggacatggatgaaattggaaatcatcattctcagtaaactactgcaagaacaaaaaaccaaacaccgcatattctcactcataggtgggaattgaacaatgagatcacatggacacaggaaggagaatatcacactctggggactgttgtggggtgggggtaggggggagggatagcatcgggagatatacctaatgctagatgacgagttagtgggttcagcgcaccagcatggcacatgtatgcatatgtaactaacctgcacaatgtgcacatgtacyctaaaacttaaagtataatttaaaaaaaaaaagataattcaccatgatcaagtaggagttatcccagggttgcaaagatggttcatatatgcaaatcaataaatgtgatataatacatcaatagaataaaggaaaaagtcttacgatcatcataatagaaaccaaaacaaagcaattcataaatcttcatcctaaaatttcttcatcataaagtctctcaaaaattggacatagaattagatatacccctacacaataaaggccatttatgacaaacccacaactaacagtacactgaacagagaaaagcttaaagcattttctacaagaactggaataggacaagtatgcctacttttaccactctt

SEQ ID NO: 881411 - DNA, 704 bp, Homo sapiens
gctatccctaagcaaaacagacagacaaacaaacaaaaaactaaattgttctcttaagtgtaaagaaaattaaactgaatgaaaaagaacctacgtcacttcaaattaatttatctacttggtgcaatttgcatgcaattttttggctggacaaaatgatttctaattttgtctggaagaataaatgtacataaacattataaaatcttaaaaacgaagagtaataaaaaaatgcttattctaacaaaaagtcttaaaaatatgtttgttaaattttcagtgatcaaaataatatggctctaaaagttgtaaagatgtgatagaaagtctaaagacatattgaactatatgtaattatatagtctataataaaagtcacaaatgaaatctggtggagcatcaaaggygtcaggattattgtataaccacgtgaaaataaagtaaggtaaattctacattacatctattacaaaaaaatcaaacatgaattcagggtttaatttttgcctaggcacagcttcttttttttttccaaaatgagaaagataaaatgttaactgccttgagcaatgaaaatttattttaaagaaaatgctaaatcccaaaacttacaaatcaagttaaagataaggatcataataacagtaacaacagcaacaacaaatctttgtattgtaaaatgcaatccctatattgtaaaccaa

SEQ ID NO: 881412 - DNA, 555 bp, Homo sapiens
gacagcaatagaaactctgatgcctaaatttggaaattttcttgtaagtcatgctctaaggaaaatgcacagatgaagatatcatccatttatcagaaatgtctaataatgtggacaacatagaattttaggagatatttgaaaagattttactaacaagagaagaaaagggacgggttaaccaggaaacacattgaagaaacatttctcaatgaattgaaaactctgagttagaaaattaaaaaaaaaaaactattagccaggcatggtggcacaatactgtggtcccagatactggggaggatgaggtggaaggattgcttgagtctgggagattgaggctgcagtgagctatrattgggccacagtactccaatctgagcaacagagagagaccttctcttaggaaaaaaaaaaaaaaaaaagaggtttgtgttttcccacattgcaagccctatctaatgccagaaaatgtgagataaattaattttgctccaaagaacacagtgaagaagtttgagaaagaagcttacattgtcagtaacacttcagcaa

SEQ ID NO: 881413 - DNA, 657 bp, Homo sapiens
ttgtggaagttggtgtggcgattcctcagggatctagaactagaaataccatttgacccagccatcccattactgggtatatacccaaaggattataaatcatgctgctataaagacacatgcacacatgagtttattgtggcactattcacaatagcaaagacttggcgccaacccaaatgtcgaacagtgacagactggattaagaaaatgtggcacatacacaccatggaatactatgcagccataaaaaatgatgaggtcatgtcctttgtagggacatggaagaaactggaaaccatcattctcagcaaactatcgtaaggacaaaaagccaaacaccacatgttctcactcataggtgggaaatgaacaatgagcacacatgsacacaggaaggggaacatcacacactggggcctgttgtggggtgggttgagcagggagggatagcgttgggagatatacctaatgttaaatgacgagttaatgggtgcagcacaccaacatggcacatgtatacatatgtaacaaacatgcacattgtgcacatgtaccatataataatagtttaaaaaatttatagcatgatgtgcatagttcttgtagttttatttgcattttttgttgctaatgagatggagcatcttttaatat

SEQ ID NO: 881414 - DNA, 657 bp, Homo sapiens
ttgtggaagttggtgtggcgattcctcagggatctagaactagaaataccatttgacccagccatcccattactgggtatatacccaaaggattataaatcatgctgctataaagacacatgcacacatgagtttattgtggcactattcacaatagcaaagacttggcgccaacccaaatgtcgaacagtgacagactggattaagaaaatgtggcacatacacaccatggaatactatgcagccataaaaaatgatgaggtcatgtcctttgtagggacatggaagaaactggaaaccatcattctcagcaaactatcgtaaggacaaaaagccaaacaccacatgttctcactcataggtgggaaatgaacaatgagcacacatggacacaggaaggggaacatcacacactggggcctgttgtggggtgggttgagcagggagggatagcgttgggagatatacctaatgttaaatgacgagttaatgggygcagcacaccaacatggcacatgtatacatatgtaacaaacatgcacattgtgcacatgtaccatataataatagtttaaaaaatttatagcatgatgtgcatagttcttgtagttttatttgcattttttgttgctaatgagatggagcatcttttaatat

SEQ ID NO: 881415 - DNA, 602 bp, Homo sapiens; identical to SEQ ID NO: 877656

SEQ ID NO: 881416 - DNA, 608 bp, Homo sapiens
atgtcatggttactacgagagccccaagggacaggcagttgtggcaggcagtggcctgggctgtgagttctgattgccctttactgcatgaagatactttgtctccacacaaacttggataatctggttttaattttattaagtttactggaaggtttctttacaccacccagtttcttttctcattaacatttctgacttcaattttctcttctctgaagtctgagtagtagccagacttttttcttgtttatcattcctttagaaaaagacacattgtgactttcttgtcttcctcaagcatatgtcacagagtcacatctgcattgaataaacaygtacttttcaatctgaaaaacagactcaggaatttcactggactgggagtggtgacgtccgtaatcccaacactttgggaagctgagtcaggcagactgctcgagctcaggagttcaagagcagcctgggcaagatagcgagacctcctctccactaaaaattcaaaaaaatcagccaggtgtggtggtgtgcacctgtggtcccagctactcgtgagtctgaggtgggaggatcacttgagctcaggagatagaggctgcggtgagctg

SEQ ID NO: 881417 - DNA, 603 bp, Homo sapiens
gggtttgccatcttggccaggctggtctcaatctcctagcctcaagtgatctgtctgatcggcctcccaaagtgttgagattacaggggtgagccaccgttcccgggcacatcctggagactttcaaatccacattttttagctgtcaggcactccttgacaccatcctgcctgcaccttgaaaccagcatttccccagtacgtcctcctcctgacttctttgttgttcctagtttcttttcttttcttttttttttttttttttgagacagagtcttgctctgtcacccaggctggagtgcagtggcacaatctcggctcactgcaagctccgcctcctgggttcasgccattctcgtacctcagcctccccagtagctgggactacaggcgcccgccaccacgcccagctaatttttttgtatttttagtagagacggggttccaccgtgttagccaggatggtctcaatctcctgaccttgtgatacgcccacctcggcctcccaaagtgctgggattacaggcgtgagccaccgcacctggcctgttgttcctaattagtttcatggtccctttggtgtcgcaaaccagacacctcagc

SEQ ID NO: 881418 - DNA, 566 bp, Homo sapiens
ccaccatgcctggctaatttttgtgttttagtagatggggtttgccatcttggccaggctggtctcaatctcctagcctcaagtgatctgtctgatcggcctcccaaagtgttgagattacaggggtgagccaccgttcccgggcacatcctggagactttcaaatccacattttttagctgtcaggcactccttgacaccatcctgcctgcaccttgaaaccagcatttccccagtacgtcctcctcctgacttctttgttgttcctagtttcttttcttttcttttttttttttttttttgagacagagtcttgctctgtcacccaggctggagtgcagtggcacaatctcggctcactgcaagctccgcctcctgggttcacgccattctcgtrcctcagcctccccagtagctgggactacaggcgcccgccaccacgcccagctaatttttttgtatttttagtagagacggggttccaccgtgttagccaggatggtctcaatctcctgaccttgtgatacgcccacctcggcctcccaaagtgctgggattacaggcgt

SEQ ID NO: 881419 - DNA, 590 bp, Homo sapiens
ataccattaacactgtgagtcttcacataaatgctatggattgggtatacatacagacaaactatggtgggactatctcactaccgtgatctacaaaaaggccagaataaattacctcttggtagggaaaatgtataaacataaatacaaatcttgctactctgttaaaatgaagaaaaactggcataagcaaaaaacactcatatctttggcatgttataaatataagctgcactgagaaggtataggaaacacaaggatggccgggcgcagtggctcatggctgtaatcccaacactctgggaggccaaggcgggcggatcacytgaggtcaggagtttgagaccagcctggccaacatggtgaaaccctgtctctactaaaaattcaaaattagctgggcatggtggtacatgcctgtaatcccagctactcaggaggctgaggcaggagaattgcttgaacctgggaggcagaggttgtagtgagctgagattgtgccattgcactccagcctgggcaacaagagcgaaactctgtccccccgccccacccaaaaaaaaaaaaaagataagtgagcagaagagaaa

SEQ ID NO: 881420 - DNA, 612 bp, Homo sapiens
aaagatatgccaaaataccttctgtggctctggcacaggcaggagagtcacatcattagggggctgggccaagcaatatgccataattccctctttatgcatgacctgtttatgcagaagagtaacatcaactgggtgctgggctctgaaatacggcaaaagtcctgttcacgggcattgttctgcgacaagacgagagtcacaataccgaagtgctgggctcatcaacatgtcacaatcttcccattgtaaaggcccagacagaagagagtcccatcacttaggtcaggggctcagagatatggtccaatgtcaccagtaggcagggctcaggcagaagaagacagtcatatcmtataggtgcttctttaagtatatgtcacaatttaatatgtgggcagaacccaggctgcagagccacatcacctggtcctgggtccagagatattcaccagtcccccttagaaaaggatccaagcaagagagttccatcacctaggtgcaggttccacccttatgtcacaatgctcgatgtgggcagggcaagcaggaagtcacatcacctaggtgataggcccagagatatgtcacaaagccttccttaaagcatgg

SEQ ID NO: 881421 - DNA, 641 bp, Homo sapiens
taactgggcaatggacaacctcacggtggctcagctttctcatcggtatggggagtatgacacatcagcacctgtgtcagagggtggccaagaggatcaatgcacgaacagctcagagagcgtgagatgctggctggcacatactaactggtaagcaatttttgttgtttttgctgttgttgcctcccrtatccttgagatctagtctgtacttcttctggagttggtatccttgtctgtctgtggctactctttcccagtcactaacactaaatcacagttaggctgactttgagaaccaagaattccacaactaactttgagacaaaatgaatcacagaagaaactcaagggcagacaaggctaagagtctatgggaaaggtggactaagaggggaaaagatgcagaaggaacagctcacataacaccacaggtcaacagaatgtccttattaatctgaacattcctcgtaaaatcttagattttaaaatatgaatgaactcatgttttttaaaaatatatttcctacctctgtccattgaacaaacctataatgactcctgctagcaacaagcctacctggcatctacatctgggtttcttaatgcattctccacaaaatatacccagggattcttgg

SEQ ID NO: 881422 - DNA, 623 bp, Homo sapiens
caggagggctgtatcaatcctacactgtcagcaaaggtctgggttgcccggcaaggtaaagaaagcctgcacaggtggggcctcagaccatctgccttcacgtttccaaaaaaggtccaactgctggatggtatcaaaatgaacagtgcctccctgaagccaagctagtccttcttgtaaatcataatttggccaaacctttgtgtagagggctataaggtgtttttccttcagagtccaagaatcaaagcagtcccagggtttaggatacactctagaggagtataagctggggttggtgaagatagctggttgcccattctgaaagacagggaaatagaggtgtccctcatttcccttctttctttcagtgataacctagggtgtgatggagagaaagtgggcatcccccctttctmttccatctttttgtccccaagtcccagtaaccttggcaggtgccacccatgggtgcaaaagtggctttcatccacattaacgggaggtcctgggggtggaagtgtccacccttatgcttgtatgccctatctccctggctgtcgacaacatttgagttccctgggccttgtctatgtcaaggagcatggcctgctttcatgaag

SEQ ID NO: 881423 - DNA, 623 bp, Homo sapiens
caggagggctgtatcaatcctacactgtcagcaaaggtctgggttgcccggcaaggtaaagaaagcctgcacaggtggggcctcagaccatctgccttcacgtttccaaaaaaggtccaactgctggatggtatcaaaatgaacagtgcctccctgaagccaagctagtccttcttgtaaatcataatttggccaaacctttgtgtagagggctataaggtgtttttccttcagagtccaagaatcaaagcagtcccagggtttaggatacactctagaggagtataagctggggttggtgaagatagctggttgcccattctgaaagacagggaaatagaggtgtccctcatttcccttctttctttcagtgataacctagggtgtgatggagagaaagtgggcatcccccctttctcttccatctttttgtccccaagtcccagtaacyttggcaggtgccacccatgggtgcaaaagtggctttcatccacattaacgggaggtcctgggggtggaagtgtccacccttatgcttgtatgccctatctccctggctgtcgacaacatttgagttccctgggccttgtctatgtcaaggagcatggcctgctttcatgaag

SEQ ID NO: 881424 - DNA, 511 bp, Homo sapiens
tcacagctgaattctacaagaggtacgaagagctggtacaatttctactgaaggtgtttcaaaaaattgaaaaggagggactcctccttaactcattttatgaggccagcaacatcttgataccaaaagctgccagagatgcaacaacaacaacaamaaagaaaacttcaggccaatatctttgataacatcaatgcaacaattctctgttaaatattggcaaaccaaatctagcagcacatcaaaaagcttattcaccatgatcaagttggtttcatcaccaggatgcaaggttggttcaacatatgcaaatcaataaatgtgattcatcacaaaaacagaactgaagacaaaaaccatcacatgattatttcaattgatgtggaaaaggccttcaataaaactcaacgttccttcaggttacaactctcagtaaactaggtattgaaggaacctacctcaaaataataagagccatatatgacaaacccacagtcaatgtcatactgaa

SEQ ID NO: 881425 - DNA, 640 bp, Homo sapiens
ccttctagaggacaggagtctttggaaactatttcaggaaggtcctcaataaaatacttgcaaactgaattcaacaaaatcatggttcaacatatgcaaataaaataatgtcatacatcatatcaggaaggtcactctccacctcctgagagccaatagcccttaagaattgctgaggagatattatttcaggattatggcagttgggagtcaggactagacagcagctccaactcggatggacagagcagtgtacggaggctcacatcatgaattttagctccagaatgactgcaagaactaacaaggaatcctgagaagaccctcagaccctmtgaagaaagcagagtgctcctgcaggacccaggagacactccaaatactctgcaggaagacccactaaaggagagtccaaggtcagacacgcctagccctgcccccactttatggtactttccaacccaccctggtagctgaagacaaagggcatatactcttgggggttctaaggccccacccactgccagttcctctccatactaccacagctgatgctctccaaaaagcaccacatgccagcaggaggccaaatcagcacaaaagtaaagcattaaaccaccaaaactaagaacccccacag

SEQ ID NO: 881426 - DNA, 653 bp, Homo sapiens
tcaaagaaaagagaagagagttcacaaaactttgaatgaggaagagcccatacagcgaccttccatttcactaaaataccaatccgaattatgacattatattttccctcatgaaaaaatggtcaatggcttatgtacaaattttacagtacaaagtgttttttcatgaaatatttcttgtaagcctactrtgaacatgtctttcacttagactataatatcatttgtgttcccataaaacttcaatagtggtaggtgagagaagactttcttaaaactagactaaatactaaataaagaattcttaccagcttaagagattttgggctaagacaatggggttttctaaatgtataatcatgtcatctgcaaacacagacaatctgacttcctcccttactggaacacctgctatttctttctcttgcctgattgccctggccagaacttccaacactatgttgaataggagtggtgagagaggccatccctgtcttgtgccagttttcaaaggggatgcttccagtttttgcccattcaatatgatattggctgtgggtttgtcataaataggtattattttgagataccttccatcaatacctactttattgagagttttcagcatgaaggggtgttgaattttatcaaag

SEQ ID NO: 881427 - DNA, 668 bp, Homo sapiens
tcaatatcatttattattagagaaatacaaatcaaaatcacaatcagataccatctcacaccagccagaatcgtaccttattaaaaagtcaaggctgggcacagtggcagatacttgtaatcccaacactttgggaggcaraggcaggtggatcacctgaggtcaagtgtttgagaccagcccggctaacatgccgaaaccctatctctactaaaaatacaaaaattaggccaggcacggtggctcatgcctgttatcccagcactttgggaggcagaggcaagtggatcacctgaggtcaggagttcgagaccagcctggccaacatggtaaaaccccatctctactaaaaatacaaaaatcaggcagacgtggtggcatttgggaggctgaggcaggagaattgcttgaacctcggaggcagaggttgcagtgagccgagattgtgccattacactccaaactgggaaacagaaggagactctggctcaaaaaaaaaaaaaatagctgggcatggtggcatgcacgtgtaataccagctactcgggaatctgaggcaggagaatctcttgaacccgggagatggaggttgcaatgagccaagatcgcagcactgtcactccagtctgacagagtgagactgtgtctcaggaaaaaaaaaaaattag

SEQ ID NO: 881428 - DNA, 668 bp, Homo sapiens
tcaatatcatttattattagagaaatacaaatcaaaatcacaatcagataccatctcacaccagccagaatcgtaccttattaaaaagtcaaggctgggcacagtggcagatacttgtaatcccaacactttgggaggcaaaggcaggtggatcacctgaggtcaagtgtttgagaccagcccggctaacatgccgaaaccctatctctactaaaaatacaaaaattaggccaggcacggtggctcatgcctgttatcccagcactttgggaggcagaggcaagtggatcacctgaggtcaggagttcgagaccagcctggccaacatggtaaaaccccatctctactaaaaatacaaaaatcaggcagacgtggtggcayttgggaggctgaggcaggagaattgcttgaacctcggaggcagaggttgcagtgagccgagattgtgccattacactccaaactgggaaacagaaggagactctggctcaaaaaaaaaaaaaatagctgggcatggtggcatgcacgtgtaataccagctactcgggaatctgaggcaggagaatctcttgaacccgggagatggaggttgcaatgagccaagatcgcagcactgtcactccagtctgacagagtgagactgtgtctcaggaaaaaaaaaaaattag

SEQ ID NO: 881429 - DNA, 629 bp, Homo sapiens
ttgctggtgaggagctgcattcctttggaggtggagaggcgctctgatttcatagaattttcagtttttctgctctgttttttccccatctttgtggttttatctacctttggtgtttgatgatggtgacgtacaggtggggttttggtgtkgatgtcctttctgtttattagatttccttctaacagccaggaccctcagctgcaggtctgttggagtttgctggaggtccactccagaccctgtttgcctgggtatcagcagcagaggctgcagaacagtgaatattggtgaacagcaaatgttgctgcctgatcgttcctctggaagtttcatctcagaggggtaccggccgggtgaggtgtcagtctgcccctactggggggtgcctcccagtttggctactcctgggtcagggacccacttgaggcagtctgtccgttcgcagatctcaagctccgtgctgggagaaccactactcttccaagctgtcagacagggacatttaagtctgcagaggtttctgctgccttttgttcggctatgccctgcccccagaggtggagtctacagaggcaggcaggccttcttgagctgcagtgggctccacccagtttgagtttcccggc

SEQ ID NO: 881430 - DNA, 606 bp, Homo sapiens
agctgcagtgggctccacccagtttgagtttcccggccactttgtttacctactcaagcctcagcaatggcgggcacccctcccccagcctcgctgctgccttgcggtttgatctcagacacgctgtgctagcaatgagcgaggctctgtgggcataggaccctctgagccaggtgcgggatgtaatctcctagtgtgccatttgctaagaccattggaaaagtacaatattagggtgggagtgacccgattttccaggtgccatttgtcgccccttcccttggctagaaagggaattccctgaccccttgcacttcccgggtgaggcgatgccttgccctgcttcggctcatgctcggtgccctgcacccactgtcctgcacccactgtccaacaatccccagtgagatgaacccrgtacctcagttggaaatgcagacatcacccgtcttttgtgtcacttacgctgggagctgtagactggagctgttcctattcagccatcttggaatcgccccccgaaattggtttcttgagatggaaactactcatgctgaagatgctgtgaacattgttgaaatggtaacaacggattaagaatattac

SEQ ID NO: 881431 - DNA, 606 bp, Homo sapiens
agctgcagtgggctccacccagtttgagtttcccggccactttgtttacctactcaagcctcagcaatggcgggcacccctcccccagcctcgctgctgccttgcggtttgatctcagacacgctgtgctagcaatgagcgaggctctgtgggcataggaccctctgagccaggtgcgggatgtaatctcctagtgtgccatttgctaagaccattggaaaagtacaatattagggtgggagtgacccgattttccaggtgccatttgtcgccccttcccttggctagaaagggaattccctgaccccttgcacttcccgggtgaggcgatgccttgccctgcttcggctcatgctcggtgccctgcacccactgtcctgcacccactgtccaacaatccccagtgagatgaacccagtacctcagttggaaatgcagacatcacccgtcttttgtgtcacttacgcygggagctgtagactggagctgttcctattcagccatcttggaatcgccccccgaaattggtttcttgagatggaaactactcatgctgaagatgctgtgaacattgttgaaatggtaacaacggattaagaatattac

SEQ ID NO: 881432 - DNA, 572 bp, Homo sapiens
acttgagcaaaaagaaatgtttctactttcaaatgctttttggtaaaaatctttaaaaaataataaatgcttcaaagagaataaaacagctaggaatccaacttataaggatgtgaaggacctcttcaaggagaactacaaaccactgctcagcraaataaaagaggacacaaacaaatggaagaacattccatgctcatggataggaagaatcaatatcgtgaaaatggccatactgcccaaggtaacttatagattcagtgccatcccaatcaagctaccaatgactttcttcacagaattggaaaaaactgctttaaagttcatatgcaaccaaaaaagagcccgcattgccaagacaatcctaagccaaaagaacaaagctggaggcatcacactacctgacttcaaaccatactacactacaaggctacagtaaccaaaacagcatggtactggtgccaaaacagatatatagaccaatggaacagaacagaggcatcagaaataacaccacacatctacaaccatctgatctttgacaaacttgacaaaaacaagaaatggggaaa

SEQ ID NO: 881433 - DNA, 581 bp, Homo sapiens
tgacccttatgggagaccactagtgtcgatcctggttcaactctaaaggcctgaaaatcatgagtgctgatatctgagggcaggtactcagaaagaagaaatttattctttctccaccttgttttaaattcaatccctccatggattggatgattcgcacattggtgaggtggtcttctttactcactgtactgattcaaatgccaatctcttctagaaacacttcacagacacacccagaaatgatgttttactagctatctaggcatcctttagcacmatcaagttgacacataaaattaaccatcacacaggggttagcgtttgggcatgtattttagagggattcaggtgaatgtattacaagatgtgaaaaatagactttggagttaggcaaaactgagtgaaaaacatggatctgccactcacattgaggaattatgatcatgcccataattctttagagcacaagtttcccccttttaaaaataacgatattttaataattgtgatgatactagcttcacacatgttgtattagataatagcgtgcattgtaagataatatgtataaagcaatt

SEQ ID NO: 881434 - DNA, 577 bp, Homo sapiens
tttacagttaatttattttacttaccttcaagctgggataaccctacaactctacgcataaatactttataattctttttttattattatactttaagttttagggtacatgtgcacaatgtgcaaaggactataaatcatgctgctataaagacacatgcacacgtatgtttattgcggcactattcacaatagcaaagacttggaaccaacccaaatgtccaacaatgatagactggattaagaaaatgtggcacatatacaccatggactactatgcagccataaaaaatgatgagttcatgtcctttgtagggacatggatgaaattggaaataytttataattcttaagcagtggctcattttaggcagccagcaaaaggttaaataagcataatgggtaccatattttggatatttaagaattattaacatactactttcatgggtttaaaatggcattattcatcttactatttgccatttcattcaataaattaaacatgctgcagaatggttcttcatattcttctctcactcatacccactatctattagcaagtctaaccttcaac

SEQ ID NO: 881435 - DNA, 586 bp, Homo sapiens
ctccatgcatcctaatcctgatacagactctttctgtttaattagatttgaggtaaaacgggtcaacacctgcacagcatatccccaccctcaaaaatattgcttcccattctgaaaagtccccttctgctgtttgactatttaaatatgtatgttctctggtgtaactactcattagtttcttccgaattactgttcccaatgaaaccacttccaatgattactttttatctttaagtttgtgtgtgtgtgtgtgaaagataaaatgataatactctttaaaaataaaaaaatacatattttttctaagtttattatgttagacttttatctgtctagatatatagattgtaactgaagttctgattattaggtgatgacaacaatytatataactaatttcctcagaaaagtttcttacacatttcttcaaatttaaagaatgaagaacgaattactgctttgtaatgtatttttttttttttttttttttttttttttttggtgagtcttgctctgtcgcccagactggagtgcagtggcacgatttttggctcactgcaacctccgcctgccggattcaagc

SEQ ID NO: 881436 - DNA, 586 bp, Homo sapiens
ctccatgcatcctaatcctgatacagactctttctgtttaattagatttgaggtaaaacgggtcaacacctgcacagcatatccccaccctcaaaaatattgcttcccattctgaaaagtccccttctgctgtttgactatttaaatatgtatgttctctggtgtaactactcattagtttcttccgaattactgttcccaatgaaaccacttccaatgattactttttatctttaagtttgtgtgtgtgtgtgtgaaagataaaatgataatactctttaaaaataaaaaaatacatattttttctaagtttattatgttagacttttatctgtctagatatatagattgtaactgaagttctgattattaggtgatgacaacaatctatataactaatttcctcagaaaagtttyttacacatttcttcaaatttaaagaatgaagaacgaattactgctttgtaatgtatttttttttttttttttttttttttttttttggtgagtcttgctctgtcgcccagactggagtgcagtggcacgatttttggctcactgcaacctccgcctgccggattcaagc

SEQ ID NO: 881437 - DNA, 603 bp, Homo sapiens
attacaccagtatagcagatatttcccctacaggtaaattatgtttactgtaatctcctgttatttttgcacactattctactgacttatgcagcttttaaaatttacaatgatacagatattaaatttatatggcatgttttaaacattgataaacagtgtgatatattttgctaaaacagctgcgaaagctgaaaaaaaagtcatccttttargtttgtttaggtaatcagaattgttaatcagatcatcctttctttatgttcctttaaagttacatgcctagttctacttcctggagtctaaactattttatctggtgcctccaccatctatttccatttgtttggcccacctaatactccattactccaaacataactcttctactttagttacactcataatctgcatacttaaagtttgtgctgtggctcacattttctaggaatggttttctcattgctggctaattatttgttcattaaataatcactcattcattcatttcacatctacttattgagcatcaactttgaccaggatacattcctttcactcagggaacttatattctagtaggtaaacattgattggaatttt

SEQ ID NO: 881438 - DNA, 608 bp, Homo sapiens
ctttttagaactgtgattaagaaggtaatgattagggatgatcagttgtctcaccagcagtctgttaggtggagctgacctgggctcatgccatctgcaaaggaacccatgggaaccagggaccattttcagcatttgaaaaggcttaacagaaactatgcttttacccaggatgaacatacaaaagctacccaaaccatcaagtttccttgcttttgtttggaattgcaaccctgtatggaaggtttcatgctgactccacgttctgattggctgtggatgacataataggagtttctgacacaggattggtctaactgtagatattgttactggagctggtaccaggtctcacttcccactacctttagaatgargttgaccttgaatgtgagtgcccttgactatggaaatgaagccactgattgtttcttgcttgctcagctatgcttattatcacacctgtggcagtgacttgatttttataatgtcattatgaaccccttataaatatggattgttgattaaaatttggatcagtattgaaatggaagaataatacacagaattaatcagtttactggtaaacaatgtaagaatattgaaaa

SEQ ID NO: 881439 - DNA, 630 bp, Homo sapiens
tgaacctttgttttgcttgagcagttttgagaccatctttccataggatctggaagtgaatatttggagggctttgagatctattttggagaaggagatatcttcatataaaaactacagagaagcattctgagaaacatctttgtgaggtgtgcactgaagtcacagagttcaaactatcttttgattcagcaattttgaatctctctttttgcagaatctgtgagtggatatttggagygctttgtggcctactgtggaaaaccaaatatcttcacataaaaactacacagaagcatcctgagaaacttcttggtgatgtggtctttcaactaatagagttgaacctatcttttgattgagcagttttgaatctctctttttgcataatctgcaagtggatatttggagaactttgaggcctactgtggaaaatcaaatatcttcccataaaaactacacagaagcattctgagaaacctctttgtcatacatacattcatctcacagggttgatcctattttatgattgagcacttttgaaacactctttttgtagaatctgcaagtgaatatttggagcttattggggcctactgtggaaaaaccaatatcttcacataaaaacta

SEQ ID NO: 881440 - DNA, 630 bp, Homo sapiens
tgaacctttgttttgcttgagcagttttgagaccatctttccataggatctggaagtgaatatttggagggctttgagatctattttggagaaggagatatcttcatataaaaactacagagaagcattctgagaaacatctttgtgaggtgtgcactgaagtcacagagttcaaactatcttttgattcagcaattttgaatctctctttttgcagaatctgtgagtggatatttggagtgctttgtggcctactgtggaaaaccaaatatcttcacataaaaactacacagaagcatcctgagaaacttcttggtgatgtggtctttcaactaatagagttgaacctatcttttgattgagcagttttgaatctctctttttgcakaatctgcaagtggatatttggagaactttgaggcctactgtggaaaatcaaatatcttcccataaaaactacacagaagcattctgagaaacctctttgtcatacatacattcatctcacagggttgatcctattttatgattgagcacttttgaaacactctttttgtagaatctgcaagtgaatatttggagcttattggggcctactgtggaaaaaccaatatcttcacataaaaacta

SEQ ID NO: 881441 - DNA, 676 bp, Homo sapiens
ctgaaaaacttcattgtgatgtgttcattcaactctcagagttgaacctatcttatgattgagcagtttggaaacactctttttgtagaatctgcaagtggatatttagagagatttgaggcctattgtggaaaaggaaatatcttcacatagaaactacgcagaagcattctgagaaacttctttgggatgtgtgcattcaactaacagtgttaaacctatcttttgattgagcagcttagaatctctctttttgtagaaaatgcaagtggatatttggagccccatttcgccctatggtggaaaacaaaacatcttcacataaaaactacacagaagcattctgagaaacttctttgtgatgtttgcattcaactcaccgagtcgaacytatcttttgatagagcagttttgtatctctctttttgcagaatctgcaagtggatatttggaaagctttgaggcctattgtggaaaaggaaatatctacacataaaaactacagagaagcattctgagaaacttctttgtgaagtatagattcaacccacagagttggacttatcttttcattgagcagttttgaatgtctctttttgtagaatctgcatatggatatttggagccctttgcaacctatggtggaaaaggaaataacttcaaataacaactacac

SEQ ID NO: 881442 - DNA, 676 bp, Homo sapiens
ctgaaaaacttcattgtgatgtgttcattcaactctcagagttgaacctatcttatgattgagcagtttggaaacactctttttgtagaatctgcaagtggatatttagagagatttgaggcctattgtggaaaaggaaatatcttcacatagaaactacgcagaagcattctgagaaacttctttgggatgtgtgcattcaactaacagtgttaaacctatcttttgattgagcagcttagaatctctctttttgtagaaaatgcaagtggatatttggagccccatttcgccctatggtggaaaacaaaacatcttcacataaaaactacacagaagcattctgagaaacttctttgtgatgtttgcattcaactcaccgagtcgaacttatyttttgatagagcagttttgtatctctctttttgcagaatctgcaagtggatatttggaaagctttgaggcctattgtggaaaaggaaatatctacacataaaaactacagagaagcattctgagaaacttctttgtgaagtatagattcaacccacagagttggacttatcttttcattgagcagttttgaatgtctctttttgtagaatctgcatatggatatttggagccctttgcaacctatggtggaaaaggaaataacttcaaataacaactacac

SEQ ID NO: 881443 - DNA, 514 bp, Homo sapiens
tgcagaatctgcaagtggatatttggaaagctttgaggcctattgtggaaaaggaaatatctacacataaaaactacagagaagcattctgagaaacttctttgtgaagtatagattcaacccacagagttggacttatcttttcattgarcagttttgaatgtctctttttgtagaatctgcatatggatatttggagccctttgcaacctatggtggaaaaggaaataacttcaaataacaactacacagaagccttcagagaaacttctttgtgatgagtgcattcatcccacagagttgaaacttcctttttattgagcagttttgaaacattatttttgcagaatcagcaagtggatatttggagagcactgtggcctattgtggaaaaggaaatctcttcatataaaaactacacaggagcattcagagaaactactttgtgatgtgtgcattgaactcacagagttgaacctgtcttttgattgagcagttttgaatctctcttttt

SEQ ID NO: 881444 - DNA, 514 bp, Homo sapiens
tgcagaatctgcaagtggatatttggaaagctttgaggcctattgtggaaaaggaaatatctacacataaaaactacagagaagcattctgagaaacttctttgtgaagtatagattcaacccacagagttggacttatcttttcattgagcagttttgaatgtctctttttgtagaatctgcawatggatatttggagccctttgcaacctatggtggaaaaggaaataacttcaaataacaactacacagaagccttcagagaaacttctttgtgatgagtgcattcatcccacagagttgaaacttcctttttattgagcagttttgaaacattatttttgcagaatcagcaagtggatatttggagagcactgtggcctattgtggaaaaggaaatctcttcatataaaaactacacaggagcattcagagaaactactttgtgatgtgtgcattgaactcacagagttgaacctgtcttttgattgagcagttttgaatctctcttttt

SEQ ID NO: 881445 - DNA, 514 bp, Homo sapiens
tgcagaatctgcaagtggatatttggaaagctttgaggcctattgtggaaaaggaaatatctacacataaaaactacagagaagcattctgagaaacttctttgtgaagtatagattcaacccacagagttggacttatcttttcattgagcagttttgaatgtctctttttgtagaatctgcatrtggatatttggagccctttgcaacctatggtggaaaaggaaataacttcaaataacaactacacagaagccttcagagaaacttctttgtgatgagtgcattcatcccacagagttgaaacttcctttttattgagcagttttgaaacattatttttgcagaatcagcaagtggatatttggagagcactgtggcctattgtggaaaaggaaatctcttcatataaaaactacacaggagcattcagagaaactactttgtgatgtgtgcattgaactcacagagttgaacctgtcttttgattgagcagttttgaatctctcttttt

SEQ ID NO: 881446 - DNA, 514 bp, Homo sapiens
tgcagaatctgcaagtggatatttggaaagctttgaggcctattgtggaaaaggaaatatctacacataaaaactacagagaagcattctgagaaacttctttgtgaagtatagattcaacccacagagttggacttatcttttcattgagcagttttgaatgtctctttttgtagaatctgcatatggatatttrgagccctttgcaacctatggtggaaaaggaaataacttcaaataacaactacacagaagccttcagagaaacttctttgtgatgagtgcattcatcccacagagttgaaacttcctttttattgagcagttttgaaacattatttttgcagaatcagcaagtggatatttggagagcactgtggcctattgtggaaaaggaaatctcttcatataaaaactacacaggagcattcagagaaactactttgtgatgtgtgcattgaactcacagagttgaacctgtcttttgattgagcagttttgaatctctcttttt

SEQ ID NO: 881447 - DNA, 695 bp, Homo sapiens
tttgtggcctatgatggaaaaggagatatcttcaaatgaaaactacacagaaatattctgagaaacttctttgtgatgtgtgcattcatctcacagggttgaacctatcttatgattgagcagttttgatatgctctttttgtaggatctgcaagtggatatttggagcrctttgaggcctaccatggaaatgaaataacatcttataaaaactacacagaagcattctgagagactcctttgtgatgtgtgcattcatctcacagagttaaacctttatttttatggagcagttttgaaacacactttttgtagaatctgcaagtggatatttggggtgatttgaggcatattttggaaaaggaaatatcttcatttaaaaaccacacagaaacattctgagaaacatttttgtgatgtgtgcactaaactcacagagttgaacctatcttttgattgagcagtttagaatctctctttttatagaatctgcaagtagatatttgaagaccttcttgccctatggtggaaaaggaaatatcttcacataaaaactacacagaagcattctgagaaacttctttgtgaggtgttcattcaactcacagagttgaacctatctttttattgatcagttttgaatctctctttttgcagaatctgcaagtggatatttggagcgctttgaggcctac

SEQ ID NO: 881448 - DNA, 695 bp, Homo sapiens
tttgtggcctatgatggaaaaggagatatcttcaaatgaaaactacacagaaatattctgagaaacttctttgtgatgtgtgcattcatctcacagggttgaacctatcttatgattgagcagttttgatatgctctttttgtaggatctgcaagtggatatttggagcactttgaggcctaccatggaaatgaaataacatcwtataaaaactacacagaagcattctgagagactcctttgtgatgtgtgcattcatctcacagagttaaacctttatttttatggagcagttttgaaacacactttttgtagaatctgcaagtggatatttggggtgatttgaggcatattttggaaaaggaaatatcttcatttaaaaaccacacagaaacattctgagaaacatttttgtgatgtgtgcactaaactcacagagttgaacctatcttttgattgagcagtttagaatctctctttttatagaatctgcaagtagatatttgaagaccttcttgccctatggtggaaaaggaaatatcttcacataaaaactacacagaagcattctgagaaacttctttgtgaggtgttcattcaactcacagagttgaacctatctttttattgatcagttttgaatctctctttttgcagaatctgcaagtggatatttggagcgctttgaggcctac

SEQ ID NO: 881449 - DNA, 695 bp, Homo sapiens
tttgtggcctatgatggaaaaggagatatcttcaaatgaaaactacacagaaatattctgagaaacttctttgtgatgtgtgcattcatctcacagggttgaacctatcttatgattgagcagttttgatatgctctttttgtaggatctgcaagtggatatttggagcactttgaggcctaccatggaaatgaaataacatcttataaaaactacacagaagcattctgagagactcctttgtgatgtgtgcattcatctcacagagttaaacctttattttkatggagcagttttgaaacacactttttgtagaatctgcaagtggatatttggggtgatttgaggcatattttggaaaaggaaatatcttcatttaaaaaccacacagaaacattctgagaaacatttttgtgatgtgtgcactaaactcacagagttgaacctatcttttgattgagcagtttagaatctctctttttatagaatctgcaagtagatatttgaagaccttcttgccctatggtggaaaaggaaatatcttcacataaaaactacacagaagcattctgagaaacttctttgtgaggtgttcattcaactcacagagttgaacctatctttttattgatcagttttgaatctctctttttgcagaatctgcaagtggatatttggagcgctttgaggcctac

SEQ ID NO: 881450 - DNA, 559 bp, Homo sapiens
agagttgaaccattcttttgattgagcagttttgaaatactgttttgtagaatctgcaggtggatatttggagtgctttgtggcctatagtggtgaagcaaatatattcacataaaaactagacagaagcattctgagaacgttctttgttatgtgtgcattcaactcacagacttgaacctttcttttgattgagcagttttgaatgtctctttttgtagaatctgcawatggatatttggagcacttttaggcctatggtggaaaaggaaatatcttcacataaaaactacagagaagcattttgagaaacttctttgtgatgtgtgcattcaactcacagtgttcaacctttcttttgattgagcagttttgaaacactctttttgtaaaatctgccaatggatatttggagcactttgaggcctatagtggaaaaggaaatatcttcacataaatcgtagacagaagcattctgagaaacttctttggatgtgtgcattcaactcacggaatggaaaccttcttttgatagagcagttttgaaagactccttttg

SEQ ID NO: 881451 - DNA, 681 bp, Homo sapiens
ttggatcgcattgaggcctatggtggaaaagaaaatatcttcacatgagaactacacagaaccattctgagaaacttctttgtgatgtgtgctttcatctcacagtgttgaaccattcttttgattgagcagttttgaaacactcattttgtagaatctgcaagtggatattcagagygctttgtggccaatggtggaaatggatatatcttcacataaaaactatgcagaagcattcagagaaacttctttggaatgtgtgcatacaactcaccgagttgaacttatcttttgattgagcagttttgaaactctctgtttgtagaatctgcaagtggatatttggagccctttgcagcctatggtggaaaaggaaatattttcacataataactacacagaagcaaactggcaaatgaggcagcagtcaagatggccaaatgggaacagctctgttctacagttcccatcatgagtgaagcagaagatgggtgatttcttcatttccatctgagataccaggttcatctcactagggagtgccagactgtgggcacaggatactgggtgcagggtgccatgcatgggctgaagcagagcgaggcatttcctcacatgggaagtggaagtggtcagggagttccctttcctagtcaaataaagggatgacagacggcacct

SEQ ID NO: 881452 - DNA, 589 bp, Homo sapiens
ttgattgagcagttttgaaacactcattttgtagaatctgcaagtggatattcagagcgctttgtggccaatggtggaaatggatatatcttcacataaaaactatgcagaagcattcagagaaacttctttggaatgtgtgcatacaactcaccgagttgaacttatcttttgattgagcagttttgaaactctctktttgtagaatctgcaagtggatatttggagccctttgcagcctatggtggaaaaggaaatattttcacataataactacacagaagcaaactggcaaatgaggcagcagtcaagatggccaaatgggaacagctctgttctacagttcccatcatgagtgaagcagaagatgggtgatttcttcatttccatctgagataccaggttcatctcactagggagtgccagactgtgggcacaggatactgggtgcagggtgccatgcatgggctgaagcagagcgaggcatttcctcacatgggaagtggaagtggtcagggagttccctttcctagtcaaataaagggatgacagacggcacctggaaaatcgggtcactcccacactaata

SEQ ID NO: 881453 - DNA, 593 bp, Homo sapiens
gtagaccaccacagctctaggaggcctgcatgactctgtaggctccacatctgggggcagggcacagataaacaaaaagacagcagtaacctctgcggacttaaatgtccctgtctgacagctttgaagagagcagtggttctcccagcacacagctggagatctaagaacgggcagactgcctcctctagtgggtccctgacccctgaactatgagcagcctgagaggcacaacccagtaggggcacactgacacctcacaaggccgggtagtcctctgagacaaaatttccagagcaaagatcagacagcagcattcatggtttatgaaaatccactgttctgcagtcaccgctgctgatacccaggcaaacaggatctrgagtggacttctagcaaactccaacagacctgcagctgagggtctgcctgttagaaggaaaactaacaaacagaaaggacatccacagcaaaaacccaactgtacatcaccatcatcaaagaccaaaagtagataaaaccacaaagatgaggaaaaaacagagtagaaaaactggaaactctaaaaagcagagtgcctctcctcctccaaa

SEQ ID NO: 881454 - DNA, 658 bp, Homo sapiens
cagttttgaaacactctctttgtagaatctacaagtggatacttggagtgctttgagtcctattgtggaaaaggtaatatcttcacataaaaaccacatagaagcattctgagaaacttctttgtgatgtgtgcattcatctcaaagagttgaatctttcttttgactgagtggttttgaaacactgtttttgtggaatctgctagtggatatttggagtgctctgtggcttactgtggaaaagcaaatatcttcagaaaaaaaccacacagaggcattctgagaaacttcttcgtgatgagtgcattcatctcacagagttgaacctttcttttgactgagcagatttgagtctctctttttgtagaatccaccagtggatatttggagcgctttgagrcctacagtgaaaaagaaaaaatattcatataaaaactatgcagaaggattcagagaaacctctttgtgatgtgtgcattaaactcaccgagttgaacttatcttttgattcagcagttttcaatctctctttttgtagaatctgcaagtagatatttggagccccttctggcctatggtggaaaaggaaatttcttccaataaaaactacacagaagcattttgagaaactcttttttgatgtgtgcattcatctcaa

SEQ ID NO: 881455 - DNA, 608 bp, Homo sapiens
atatcttcatataaaaactacacagaagctttctgagaaacttctctgtgatgtgtgcattcaactcatggaggtgaatctgtcttttcattgaacagttttgaaactctctttctgtagaatctgcaagtggatatttggaggcatttgaagcrtatggtggaaatgggaatatcttcaattaaaaactacacagaagaattctgagaaacttcatggtgatgtgtgcattcatctcacagagttgaacctttcttttgattgagcagttttgaaacactctttctgtgcaatctgcaagttgatatttggagtgcttagattcctattgtggaaaaggaaatatcttcacataaaaactgcacagaatcattctgagaaacttctgtgcgatatgtgcattcatctcacagttttgaacctttcttttcactcagcagttttgaaactttatttttgtggaatctgcaagtggatatttggagcgctttgaggcctatagtggaaatgggaatatcttcacataaaaactacacagaagcattctgagaaacaactttgttaagtgtgcattaaatgcacagagtagaaactatcttttgattgaa

SEQ ID NO: 881456 - DNA, 608 bp, Homo sapiens
atatcttcatataaaaactacacagaagctttctgagaaacttctctgtgatgtgtgcattcaactcatggaggtgaatctgtcttttcattgaacagttttgaaactctctttctgtagaatctgcaagtggatatttggaggcatttgaagcatayggtggaaatgggaatatcttcaattaaaaactacacagaagaattctgagaaacttcatggtgatgtgtgcattcatctcacagagttgaacctttcttttgattgagcagttttgaaacactctttctgtgcaatctgcaagttgatatttggagtgcttagattcctattgtggaaaaggaaatatcttcacataaaaactgcacagaatcattctgagaaacttctgtgcgatatgtgcattcatctcacagttttgaacctttcttttcactcagcagttttgaaactttatttttgtggaatctgcaagtggatatttggagcgctttgaggcctatagtggaaatgggaatatcttcacataaaaactacacagaagcattctgagaaacaactttgttaagtgtgcattaaatgcacagagtagaaactatcttttgattgaa

SEQ ID NO: 881457 - DNA, 608 bp, Homo sapiens
gagtagaaactatcttttgattgaacagctttgaatttctctttttgtagaatctgcaagaggatatttggagcccttttcagcctatggtggaataggaaataccttcacataaaaactacaaaaaaggtatctgacgaacttcttggtcatgtgtgccttcatctcacagagttgaacctttcttttggttgagcagtttggaaacactctttttgtagtatctacaagtggatgtttggatcgctttgaggcctatggtggaaaaggaaatatcttcacattagaactacacagaaggattctgagaaacttctttgtgatgtgtgctttcatctcacaatgttgaacctatcttatgattgagcagttttgaaacactctttttgtagaaagtgcaagtgtatatttggagcccrtgtggcctattgtgaaaaaggtaatatcttcacataaaaactacacagaagcattctgagaaactacttggtgatatgtgcattaaactcacagagttgaacctatcttttcattgagcagttttcattccctctttttgtaggatctgcaagtggatatttggagccctttgtggcctatggaggaaa

SEQ ID NO: 881458 - DNA, 622 bp, Homo sapiens
gaaaaggaaatatcttcccataaaaactacacagaagcattctgagaaacttctttgtgatgtgtgcattcatctcatagagttgaacgtatcttttgattgaacagttttgaatttctctttttgcagaatctgcaagtggatatwtgaagccctttgcagccaatggaggataaggaaatatcttcaaataaatactacacagaagcattctgagaaacttctttgtgatgtgtgcattcatctcatagatttggacatatcttatgattgagtacatttgaaacactctctttgtagaatctgcaagtggatacttggagggctttcaggactgttgtggaaaagaaaatatcttcacgtaaaaactacacaaaatcattctgagatacttctttatgatgtatgcattcaactcagagagttgaacctatcttttgattgagaagttttgaaacactctgttcgtagaatctgcaagtggatatttggagtgctttgaggcctattgtggaaaaggtaatatcttcacataaaaactacaaataagcattctgagaaacttctttgtgatgtgtgaattcaagtcacagagtttaacctatcttttgattgagcagtt

SEQ ID NO: 881459 - DNA, 611 bp, Homo sapiens
tgctttgaggcctattgtggaaaaggtaatatcttcacataaaaactacaaataagcattctgagaaacttctttgtgatgtgtgaattcaagtcacagagtttaacctatcttttgattgagcagttttgaatctctctttttgtagaatctgcaagtggatatttrgtgggctttgaggcctattttggaaaaggaaacatcttcacataaaaactacacagaggcattctgagaaacttcttcatgatgtgtgcattcatctcacagagttgaacctatcttatgattgagcagatttgaaacactggctttgtagatgctgcaagtggatatttggagcgcttgaggcctactgtggaaaaggaaatattttcacataaaaaccacacagaaaaattctgacaaatttcttggtgatgtgtgcattcatctcacagagttgaaactttccttgttatgagcagttttgccacactcttttggagaatttagaagtggatatttggagcactttgaggtctattgtggaaaaagaaatatcttcacataaacactacaaagaagcattctgagaaactactttgtgatgtgtgtgttaaactcacaga

SEQ ID NO: 881460 - DNA, 611 bp, Homo sapiens
tgctttgaggcctattgtggaaaaggtaatatcttcacataaaaactacaaataagcattctgagaaacttctttgtgatgtgtgaattcaagtcacagagtttaacctatcttttgattgagcagttttgaatctctctttttgtagaatctgcaagtggatatttggtgggctttgaggcctattttggaaaaggaaacatcttcacataaaaactacacagaggcattctgagaaacttcttcrtgatgtgtgcattcatctcacagagttgaacctatcttatgattgagcagatttgaaacactggctttgtagatgctgcaagtggatatttggagcgcttgaggcctactgtggaaaaggaaatattttcacataaaaaccacacagaaaaattctgacaaatttcttggtgatgtgtgcattcatctcacagagttgaaactttccttgttatgagcagttttgccacactcttttggagaatttagaagtggatatttggagcactttgaggtctattgtggaaaaagaaatatcttcacataaacactacaaagaagcattctgagaaactactttgtgatgtgtgtgttaaactcacaga

SEQ ID NO: 881461 - DNA, 681 bp, Homo sapiens
aatctgaaggggatatttggagcactttgcagcctatggtgaaaaaggaaatatcttcacataaaagctagacagaagcattctaagaaagtgctttgtgatttgtgcattcatctcacagtgttgaaactttcttttgattgagcagttttgaaacactcttgtagaatctgcaagtggatatttggagagtttgagkccactggtggaaaagcaaatatcttcacataaaaactagacagaatcattctgagtaatctctttgagatgcgtgctttcaaatcacagagttggacctttcctttgattgagcagtttggaaacagtctttttgcagtatctgcaaacggatatttggagcactttcaggcctatagtaggaaaggaaatatttttcacataaaaactagacagaaaattactgagaaacttcttaatgatgtattcattcatctcacagagttgaaactttcttttgattgagcagtttggaaacactcttttagtagaaactgcaaggggatatttggagcgttttgtggtctatggtagaaaagaatatatcttcacataaaaatagacagaagcattctgaggaacttcatgttgtgtgcattcatctcaaagagttgaacctttcttttgattcacagttttgaaactgtcgttttgtagaatctg

SEQ ID NO: 881462 - DNA, 627 bp, Homo sapiens
gagattcaaaactgctcaatcaaaagatgggttcgactctgtgagttgaatgcacacctcacaaaaaagtttcacagaatgcttctgtgtagtttttatttgaagatatttgcttttccacagtaggcctcagaacgttacaaatatcaacttgcagattctgcaaaaagagagattcaaaactgctcaatcaaaagataggctcaactctgtgtgttgaatgcacacataataaaggagtttctcagaataattctgtgtagtttttatattaagatatatcttttccaaaaataggcctcaatgccctccaaatagctactwtgagtttctacaaaaagagtgtatcgaaactgctcagtcaaaagaaactttaaactctttttgatcaatgcactcatcaccaaggcatttctctgaatgcttctgtgtagtttttatttgaagatatttccttttcaaccatagggcacaaagggctccaaatatccacttgtatagtctacaaaaagagagattgaaaactgctcaatcataagataggttcaaacgtgtgagctgaatgcaaacatcacagagaagtttcccagaattcttctgtgtcgtttttatttgaagatatttcct

SEQ ID NO: 881463 - DNA, 432 bp, Homo sapiens
ctcacaatgcttctgtgtgtttttttatgtgaaggtatttactttttcaccataggcctcaaagtgctccaaacatccatttgctgattccacaaaaaaacccattccaaactgctcaatcaaaagaaaggtacaactccrtgtgttgaaagcatgcatcacaaagaagtttctcagaaagcttctgtctagtttttctttgaggatatttcctgtttcaccatgggccataaagggctcaaaaatatttttcacagattctacaataagactgtttccaaactgctcaatccaaagaaaggttcaactctgtgagatgaatggacacaagacaaagaagtttctcagaatacttctgtctagggttcatgtgagatatttcctttttcaccataggcctcaaagtgctccaaatatccatttgcagattcc

SEQ ID NO: 881464 - DNA, 583 bp, Homo sapiens
gtttgaaaactgtcaatttgtagaatytgcaatgggatatttgtgagccctttgaggcctatggtgagaaaggaaatatcttcacataaaaactagacagaagatttcagagaaacctctttgtgatgtgtgcattcatctcacagaggcgaaccattcttttgattgagcagtttgtaaacagactttttgtagaatctgcaaagggatatttgtcagctctatgaggcctatggtgaaaaaggaaatatcttcaataaaaactataaagaatgtttctgagaagctgttttgcaaggtgtgcactcatctcagagagataaaagtttctattctttgatgagtctggaaactctgttcttctaaaatctgcaaagggatatttgtgagtggcttgaggcctatggtaaaaaaggaaatgtcttcacataaaaactacacagaagatttcagagaaactactttgtgatatatgcattcatctcacagagttgaaccattcttttgattgagaagtttggaaacagtcttttcagagaatctgcaaagggatattttgagcgctttgataggtatggtgaaa

SEQ ID NO: 881465 - DNA, 592 bp, Homo sapiens
tagaatctgcaagtggacatttggagcgctttgcggcctattgtagaaaaggtaatatgttcacataaattccagacagaagcaatctgagaaactactttgtgatgtgtgcattcatgtcacatagttaaaattttttttgattgagcagttttgaaactctctttttgtagaatctgcaagtagacatttggagcactaggtggcctatggtggaaaaggaaatatcttcccataaaaactagatagaagaattctgagaaacttctttgtgatgtgtgcgttcatctcatagagttgaaccatactttagattgagcagttcggaaaccctctttttgtaggatctgcaagtagacatacggagcrcaatgtggcctatggtagaaagggaaatatcttcacataaaatctagacagaagcaatctgagaaacttctttgtgatgggtgtattcatctcacagagataaaattttcttttgtttgagcagttttgagtatctcttttggttgaatccgcaaatggacatcaggagcgctttgtggccaatggtggaaaaggaaatatcttcacataaaaactagacagt

SEQ ID NO: 881466 - DNA, 571 bp, Homo sapiens
agcaatttgcagcctatggtagaaaaaggaaatatcttcacatgaaatctagacagaagcaacctgagaaactacattgtgatgtgtgcatgcatctcagagagttaaacctttcttttgattgagcagtttttaaactctctttttgtaggatstgcaattcgacatctggagcgctttgacgctatagtggaaaaggaaatatcttcacaaaaaactagacagaaaaattttgagaaactacgttgtgatgtgtgcattcatctcacagagttgaacttttcttttgattgagcagttttgaaacactatttttgtagaatctgcaagggaaatttgaagcgcttagaggcctatgtttgaaaaggaaatgtcttcacataaaaactacatagaatcattctgagaccttcttagtgatgtgtgcattcatctcccagagttgaaactttcttttgatggaccagtttggaaatacttttttgtagagtgtgcaggtggacgtttcgagcgccttgaggcctatggtggaaaatgaaatttctacacataaaaactagacagaagaatt

SEQ ID NO: 881467 - DNA, 571 bp, Homo sapiens
agcaatttgcagcctatggtagaaaaaggaaatatcttcacatgaaatctagacagaagcaacctgagaaactacattgtgatgtgtgcatgcatctcagagagttaaacctttcttttgattgagcagtttttaaactctctttttgtaggatgtgcaattcgacatctggagcgctttgacgctatagtggaaaaggaaatatcttcacaaaaaactagacagaaaaattttgagaaactackttgtgatgtgtgcattcatctcacagagttgaacttttcttttgattgagcagttttgaaacactatttttgtagaatctgcaagggaaatttgaagcgcttagaggcctatgtttgaaaaggaaatgtcttcacataaaaactacatagaatcattctgagaccttcttagtgatgtgtgcattcatctcccagagttgaaactttcttttgatggaccagtttggaaatacttttttgtagagtgtgcaggtggacgtttcgagcgccttgaggcctatggtggaaaatgaaatttctacacataaaaactagacagaagaatt

SEQ ID NO: 881468 - DNA, 574 bp, Homo sapiens
tatagtttttatgttatcatatttacttgtccacaataggcctcaaagtgctccaaatatcctcttgcagatttttcaaaaacagtgtttcaaaaatgttctaccaaaagaaaggttcaacactgtgagttgaatgcacacaaccgaaagaagattctcagaatgcttccgtgtagtttttatttcatgatacttccttttcctctataggctgaaaargacttcaaatatctacttgcagattcgacataaagagagattcaaaactactgaatcaaaagataggttcaactctgtgttatgaatgcactcatcacaaagaagtttctcagaatgcttctgtgtagtttttatgtgaagatatttacttttacaccataagcttcaaaactctccaaatatccacttgcagattctacaaaaagagtgatcccaaatggctcaaacaaaagaaatgttcaactctgtcaaatgaatgcacacatcacaaagaacttcctcagaatgcttctgtgtaatttttatgtgaagatatttcattttccacaataggcctcaaagagctccaaatatc

SEQ ID NO: 881469 - DNA, 588 bp, Homo sapiens
tgaaggatatgaacagacacttctcaaaagaagacatttatgcagccaaaagacacatgagaaaatgctcatcatgattggccatcagagaaatgcaaatcaaaaccacaatgagataccatctcacaccagttagaatggtgatcattaaaaagtcaggaaacaacaggtgctggagaggatgtggagaaataggaacacttttacrctgttggtgggactgtaaactagttcaaccattgtggaagtcagtgtggcgattcctcagggatctagaactagaaataccatttgacccaacaatcccattattgggtatatatccaaaggattataaaacatgctgctataaagacacatgcacacgtatgtttattgtggccctattcacaatagcaaagacttggaaccaacccaaatgtccaacaatgatagactggattaagacaatgtggcacatatacaccagggaatactatgcagctataaaaaatgatgagttcatgtcctttgtagggacatggatgacgctggaaaccatcattctcagcaaactatcgcaaggacaaaaaaccaaacactgcatgt

SEQ ID NO: 881470 - DNA, 588 bp, Homo sapiens
tgaaggatatgaacagacacttctcaaaagaagacatttatgcagccaaaagacacatgagaaaatgctcatcatgattggccatcagagaaatgcaaatcaaaaccacaatgagataccatctcacaccagttagaatggtgatcattaaaaagtcaggaaacaacaggtgctggagaggatgtggagaaataggaacacttttacgctgttggtgggactgtaaactagttcaaccattgtggaagtsagtgtggcgattcctcagggatctagaactagaaataccatttgacccaacaatcccattattgggtatatatccaaaggattataaaacatgctgctataaagacacatgcacacgtatgtttattgtggccctattcacaatagcaaagacttggaaccaacccaaatgtccaacaatgatagactggattaagacaatgtggcacatatacaccagggaatactatgcagctataaaaaatgatgagttcatgtcctttgtagggacatggatgacgctggaaaccatcattctcagcaaactatcgcaaggacaaaaaaccaaacactgcatgt

SEQ ID NO: 881471 - DNA, 621 bp, Homo sapiens
ctttgttgattgtttcctttgctgtgtagaaagttcttaacttgatatgttcccatttgtccattttttgttgcctgtgcttgtagggtattactcaagaaatttttgcccagaccaatgacctggagagtttccctaatattttcttgtagtagttttgtagtttgagttgttagatttaagtctttaatccattttgatttgatttttatatatatcaagagatagggggtctagtttcatttttctgcatgtggatatccagttttctcagcaccatttattgaagagactgtcttccctaatgtatgttcttggcacctttgtcaaaaatgagttcactggatgtgtgtggatttctttctgggttccttattctgttccattgatygatgtgtctgtttttatgccagtaccatattgttttggttactatagctctgtagtatagtttgaaatcaggtaatgtaattcctccagttttgttctttttgcttagactagctttggctattctggatcttttgtagttccatataaattttaggatttttttttccctttctgtgaagaatgtcattggtattttgatagggattgcactgaatctctagattactt

SEQ ID NO: 881472 - DNA, 680 bp, Homo sapiens
gagtgtggaagactcacagtatacaaaatggaatatgtaattcagcagagccttcaccatgatgggtcagttccttagacccagtgagaagttaaacactgcagaagaaaactatgtggcattgaggcagaactaatcatttaggaattgggacattatttggttagctatcctcctctgaataatctttgattccccactgctctgtcagagagtggggtttccaattattcttattgtaacttcactacacaataagccccagaaggtgcgtgtcttttcctctgaagagcctatgttttaggctttctaaacactacctgtttgctcaaaacatggttgagaaataattagcatcaactgtggagcaatgagctgytgctttcaggttctacatatagtttctgaaatagaaaatagcaagaaattagccatctctttcctaattaatgggcaacaattcccattcctgttaatttataacatgttaacacaactctagctactcccttgctgttgtgcctagcttaaggtgacatcaaagggaaacaaaaacatttgttgtctgtgtgtgcatgcatttaggctggaggagcagggatatagaaaggaaaagtggacttttatcagaaaagagtaagcacagctctcaatttggtcacaaggcagaaaatggaaga

SEQ ID NO: 881473 - DNA, 614 bp, Homo sapiens
gtaacttcagcacttctgaagcaaacacattttcccctccatcatgctcttcccaaatttgttcctccactttctcctcacctcactaaatggcagcagcatcctcacagttactaaagccagaaactcaaacatcatccttgcctccttctccctccatattccatctgtcatcggttcctgacaactgatccttttccttagtaaatatcttatatccatccacctccctccatctactcgagttaggccactatcatctctcttctaagttactataacagcyttcttagctggtcttcttgcttctgtcttcatgcgcctcctattgagattctctttttataaagaaataaatcaactgcatcacccctcctacttaaaacccttcagtgatattgcaatgcctttaaaataaaacccaagcccctatcacaactcaaaagaaccccaagcctcctactgtgccattctccaccatagtatgccctgctcccttttgcctatcagactatatacactccctttctctatttgcaaaaaatactcttcccctcagatctacagctgtcaccaggctgactctcactcatccttcagatttcagcctagaa

SEQ ID NO: 881474 - DNA, 603 bp, Homo sapiens
tcccaagcacgtggctaagtacaatccccaaactgtaaggcttccagccatttctctttcctgcatcaagcttcttttcatacctgttgccacctgtttcatagctgcattggtggtcactctgagttttagttcttctgtctctttgcccccggatttgatcttgagctccctggaagccccagccagcctgacagagaggaagagttgtgagtccattttargagaggagcatgctcccagcgggccctaccattcatgatgaacagcctgggtcacgctcctgtccctccagtccaggatctctctggaaatgagtgctcttgtatgtttagagaaaatgcatttctattctccttttcaggctaaaagcatctgccttcttcacaaagaagttagtgaaccagttataattacacaccatacactggggagcgtgaaagtgacatttagcaacacttaagcctgggctctgtggtggctgcagtaaacattacataattgctgcggcatcgatcccaacaattaaccccaaagagcagagacagaatggaagttctccaggaaactgccacaacctgagagtaaaatggagcccaaagt

SEQ ID NO: 881475 - DNA, 645 bp, Homo sapiens
ctgatgtactggaaagtgatggggagaatggaaccaagttagaaaacactcttcaggatattatccaggagaacttccctaacctagcaaggcaggccaacattcaaattcaggaaatacagggaacaccacaaagatactcctcgagaagagcaaccccaagacacataattgtcaaattcaccaaggttgaaatgaaggaaaaaatgttaatggcagccagagagaaaggctgggttacccacaaagggaagcccatcaaactaacagcagatgtctcagtggaaaccctacaagccagaagacagtgggggccaaattcaacattcttaaagaaaataattttcaacccagaatctcatatccaggcaaactaagcttcataagtgaaggagaaataaaatcctttacagacaarcaaatgctaagagattttgttatcaccaggtctgccttacaagagctcctgaaggaagcactaaacatggaaaggaacaaccggtaacagccactgcaaaaacatgccaaattgtcaagaccatcgacattatgaagaaactgcatcaattaatgggcaaaataaacagctaacatcataatgacaggatcaaattcaaacttaataatattaaccttaaatgtaaa

SEQ ID NO: 881476 - DNA, 602 bp, Homo sapiens
ccgcacctggtcttaaaaagtatttcttttgtccccctctcttcgtctctcttcccgtttcaataacaggtatgttagactgctattttctcacaggttttagatgcttccttttcctcttctttcttttttcactgtttttctatttgtgtttcagtttgggtaaactgattcctcagcttgtgtctattctattgatgaggctattgaagacattctttatctctgttactgtgtttttaatttttagcaatttcatttaattttttcttayagttttcatctctgtgataaaattacacatctgttcaggcatgctgtgtaccctttccgctgaagtcctgaatatattaattaatattattttagcttttctagatgatagttccaacatcttggtcgtatctgagtcttgtcttattgattattttgtctcttatctgtgattttatttttaatttttttgtgtctcatgtgagtttttggttgaaacttgttgccctgtgtaagacagtgagagaggagaaagggaaaaatcccagtcaggtaggcagttagggtgtgtctttgtttgaatcccttcaaacaaaagaacaacctgc

SEQ ID NO: 881477 - DNA, 602 bp, Homo sapiens
ccgcacctggtcttaaaaagtatttcttttgtccccctctcttcgtctctcttcccgtttcaataacaggtatgttagactgctattttctcacaggttttagatgcttccttttcctcttctttcttttttcactgtttttctatttgtgtttcagtttgggtaaactgattcctcagcttgtgtctattctattgatgaggctattgaagacattctttatctctgttactgtgtttttaatttttagcaatttcatttaattttttcttacagttttcatctctgtgwtaaaattacacatctgttcaggcatgctgtgtaccctttccgctgaagtcctgaatatattaattaatattattttagcttttctagatgatagttccaacatcttggtcgtatctgagtcttgtcttattgattattttgtctcttatctgtgattttatttttaatttttttgtgtctcatgtgagtttttggttgaaacttgttgccctgtgtaagacagtgagagaggagaaagggaaaaatcccagtcaggtaggcagttagggtgtgtctttgtttgaatcccttcaaacaaaagaacaacctgc

SEQ ID NO: 881478 - DNA, 602 bp, Homo sapiens
ccgcacctggtcttaaaaagtatttcttttgtccccctctcttcgtctctcttcccgtttcaataacaggtatgttagactgctattttctcacaggttttagatgcttccttttcctcttctttcttttttcactgtttttctatttgtgtttcagtttgggtaaactgattcctcagcttgtgtctattctattgatgaggctattgaagacattctttatctctgttactgtgtttttaatttttagcaatttcatttaattttttcttacagttttcatctctgtgataaaattacacatctgttcaggcatgctgtgtaccctttccrctgaagtcctgaatatattaattaatattattttagcttttctagatgatagttccaacatcttggtcgtatctgagtcttgtcttattgattattttgtctcttatctgtgattttatttttaatttttttgtgtctcatgtgagtttttggttgaaacttgttgccctgtgtaagacagtgagagaggagaaagggaaaaatcccagtcaggtaggcagttagggtgtgtctttgtttgaatcccttcaaacaaaagaacaacctgc

SEQ ID NO: 881479 - DNA, 602 bp, Homo sapiens
ccgcacctggtcttaaaaagtatttcttttgtccccctctcttcgtctctcttcccgtttcaataacaggtatgttagactgctattttctcacaggttttagatgcttccttttcctcttctttcttttttcactgtttttctatttgtgtttcagtttgggtaaactgattcctcagcttgtgtctattctattgatgaggctattgaagacattctttatctctgttactgtgtttttaatttttagcaatttcatttaattttttcttacagttttcatctctgtgataaaattacacatctgttcaggcatgctgtgtaccctttccgctgaagtcctgaatatattaattaatattattttagcttttctagatgatagttccaacatcttggtcrtatctgagtcttgtcttattgattattttgtctcttatctgtgattttatttttaatttttttgtgtctcatgtgagtttttggttgaaacttgttgccctgtgtaagacagtgagagaggagaaagggaaaaatcccagtcaggtaggcagttagggtgtgtctttgtttgaatcccttcaaacaaaagaacaacctgc

SEQ ID NO: 881480 - DNA, 608 bp, Homo sapiens
tgcctagattttcttctggggtttttatagtttggggttttgtatttaagtcttggatccatcttgagttaatttttgtataaggtgtaaggaaggggtccagtttcaattttctgcatatggctagatatttcttccaaccaccatttattaaataggraaccctttcctatagcttattgctatcaggtttgttgaagagcagatagtgtagatgtgtggtcttacttctgagatttctattctgttccatcggtctatgtgtctgtttttataccagtatcataatgcttttgttactatagccttacagtatagtttgaagtcaggtagtgtgatgcctccagctttgttctttttgcttaggattgtcttggctatacaggctcttttttggtttcacatgaattttaaagtagttttttctaattctgtgaagaatgacaatggtagtttaatgggaatagcattgtatctgtaagttactttgggcagtatggccattttcacaatattgattcttcctatccatggaatgtttttccctttgtttgtgttctctcttatttccttgagcagtggtttgtagttctccttgaagaggtcct

SEQ ID NO: 881481 - DNA, 608 bp, Homo sapiens
tgcctagattttcttctggggtttttatagtttggggttttgtatttaagtcttggatccatcttgagttaatttttgtataaggtgtaaggaaggggtccagtttcaattttctgcatatggctagatatttcttccaaccaccatttattaaatagggaaccctttcctatagcttattgctatcaggtttgttgaagagcagatagtgtagrtgtgtggtcttacttctgagatttctattctgttccatcggtctatgtgtctgtttttataccagtatcataatgcttttgttactatagccttacagtatagtttgaagtcaggtagtgtgatgcctccagctttgttctttttgcttaggattgtcttggctatacaggctcttttttggtttcacatgaattttaaagtagttttttctaattctgtgaagaatgacaatggtagtttaatgggaatagcattgtatctgtaagttactttgggcagtatggccattttcacaatattgattcttcctatccatggaatgtttttccctttgtttgtgttctctcttatttccttgagcagtggtttgtagttctccttgaagaggtcct

SEQ ID NO: 881482 - DNA, 565 bp, Homo sapiens
cttcttttgagaagtgtctgttcatatcctttgcccactttttgatggggttgtttgtttttttcttgtaaatttgtttgagctcattgtagattctggatattagccctttgtcagatgagtaggttgcgaaaattttctcccattttgtgggttgcctgttcattactgggtatatacccaaaggactgtaaatcatgctgctataaagacacatgcacacgtatgtttattgtggcactattcayaatagcaaagacttggaaccaacccaaatgtccaacaaggatagactggattaagaaaatgtgggacatatacaccatggaatactatgcagccataaaaaatgaagagttcatgtcctttgtagggacatggatgaaattggaaatcatcattctcagtaaactatcgcaaggacaaaaaaccaaacaccacatgttctcactcatagatgggaattgaacagtgagaacacatggacacaggaagggggacatcacactctggggactattgtggggtggggggaggggggagggatagcattaggagataaaac

SEQ ID NO: 881483 - DNA, 711 bp, Homo sapiens
tgtagaggaaataataaggcatcaggatgtattgtgacttaaactgaaccctgatgaaagggtgaaattggatgagtggttgtcaagctgtgagaaaatccttgtgggcttgttgccttgttttgatcaacatgaaaacgttgtcttygcaatagctaaagacacacatggttccatatctggaggacaaaagatatgattgaacctattggaacagattatgtcacaaggaatagcaagaagagaaaattgctggatataaaaggaagaaggttaagtaaattaggcacttgttaagtgtaaaaataacattatatatattgtccttacaagaggaaaaggcagttaatttcacttaattcctaggattcttcctaaaaaatataaggtttgcttcttggaatatacaggctttgtctcagaactaaatgtgagcgattttgcagtgagcagttctccttcaacaacatcatggtgcacccaagcaaagtgaagtatctatggacagatttacagacactgaggcatatttatactataataatgattgagctgttggcttgctaatgacttcaaaagtttttaagtctttcttcagtgtgccagccaaaaatatcgttatttggaagctcattgtcaatagaattaagttaagaatcagttaacttagttgtgtgtgacttccgtgaacactaccaaatgtgcagagca

SEQ ID NO: 881484 - DNA, 711 bp, Homo sapiens
tgtagaggaaataataaggcatcaggatgtattgtgacttaaactgaaccctgatgaaagggtgaaattggatgagtggttgtcaagctgtgagaaaatccttgtgggcttgttgccttgttttgatcaacatgaaaacgttgtcttcgcaatagctaaagacacacatggttccatatctggaggacaaaagatatgattgaacctattggaacagattatgtcacaaggaatrgcaagaagagaaaattgctggatataaaaggaagaaggttaagtaaattaggcacttgttaagtgtaaaaataacattatatatattgtccttacaagaggaaaaggcagttaatttcacttaattcctaggattcttcctaaaaaatataaggtttgcttcttggaatatacaggctttgtctcagaactaaatgtgagcgattttgcagtgagcagttctccttcaacaacatcatggtgcacccaagcaaagtgaagtatctatggacagatttacagacactgaggcatatttatactataataatgattgagctgttggcttgctaatgacttcaaaagtttttaagtctttcttcagtgtgccagccaaaaatatcgttatttggaagctcattgtcaatagaattaagttaagaatcagttaacttagttgtgtgtgacttccgtgaacactaccaaatgtgcagagca

SEQ ID NO: 881485 - DNA, 769 bp, Homo sapiens
ggtctgtgaatttcaggtattcatggggggaggtaacccaattgtattgataactctaaagtttaacttccatgtggatcttgaaaagcagctctctaatggtctgaatacctcagcttctcagcacatctcatctaggttagccagatattccagtttattaggtatggatggggcctgggagtctgtagtatttgaaacctgctaaatgattctgttgtgaagtcaatattgagaattacttaatttgatgaagggaaatctctgcagattagttttgcatgtcagttatttttttagggaggttccatataaaagattcccttatttttcgtcaacattttctgtatacttagcatggttgttgtcttmtactgcttatcagctcttattatgtgtcatgtcttaatttacattattttgtttaattctcatgaaaatacactttatgcatatagaaactggggcttagtgaaagtaaacaacttggtcaagataacttagtaaccagtagtgatgagtcaaacataggtcagcctgaatccagtctctatattatcaatcattacttttaattctctcatagttttaaaagcagactgaaaataagagaattttgtgactccccttgatatagtttggctgtgtccccacccaaatctcaccttgaattgtaataaccacccctcatcccctgccctgtgtcaagggcagggccaggtggagattgttgaatcatgggggtggtttcccccatactggtctggtg

SEQ ID NO: 881486 - DNA, 678 bp, Homo sapiens
tctggccaatatgtaagcacacataatgaatgaagttacaaggagtcccctttttctcttgttgcctggaaagtggacatgacagttggagctccagcagccatactggatcttgaactagtcttctaaggatttggtggcagcaaggtacaaaaagcctgatgacaatggagctgccattccttccctggactgcctacttttaggttccttttatgagagaaataagctattttacttaatatattattatttttcttgttattgttttaattaatttttttttagacaggatctcactctgttgcctgggctggagtgcagtggcataatcatggctcactgcagcctcaatctcctaggctcaagcaatccttctgcctcagcctcgtgagtagctgggactacaggcacgcacttctatgcttggctaatttttaaactttttgtagagatggggtcacactatattgcctaggatggactcctttcccagggctcaagcaaccctcctgcctctgcctcccacagtgctgrcattacaggcatgagccaccgagcccagccttcttgttattattgttgctagagttacatgcaaggtgccaaatcttatctgacattgaatgctgttcagttaacttcctttgaaaattcaattttatccactttatgtat

SEQ ID NO: 881487 - DNA, 518 bp, Homo sapiens
cgtattcccaaatttgaaatgaattaatacaaaagaaaaaaatataaagtgattctgacaaaaggaagaaaaatatgaatgacatttataaaaaaaagtcagtagtgtagttactttgaaatcactgctgaatgaagactccatccccataaatttgggaaacaraaatgttttggacccctatgaattcaattaataaaacatcaaattgaagttctaaaaactgcccagtgggaatggtttatatagaattcaatgctgaagtgtttttctcaaataatttctgctcccctcaaagcgcacacacacacacacacacacagacacacacacaaaatatgatgtaccactatatcacgttataatagctaacacgtgcacagacacacacacacattcatggacacacataaaacataatgtaccactatatcatgttataatatatcaggaggtcattctctgtgagttaacaaaaacaaatgtagaattgaacacatcatttttctttgggtcat

SEQ ID NO: 881488 - DNA, 648 bp, Homo sapiens
taccttgtgtacaaccagataatcaaagaatatatccttatttaagggcaatgattagttatatctgtgaccttagctatatctgcaaattccctttgacatgtaatatagcatattcatgtatctgataccattgggtaaaaatcatgggagtcaaaattctgacttccacaaggcttggtgagaaaatatgtggaaaaacctaagatactgtctgacatatagaaggtattcaataaataccaattccccctaatgcagcacccctttatataattagattattcccattagaggttgtaagagtgtttatttttgtttatcacataagaacacacaagtgtgtgtgtgtgtgtgtgtgtatgtgtgtgtgtgtcccaaaactctacctccaagtwaatttttcaaatttccttatcttacatgctgaaggagagtttgcaagatttaaatataacattcaattcagaggatttcagggattagaaagtagagtctcaataaatgtaatccagcatataaacagcaccaaagacaaaaaccccatgattatctcaatagatgccagaaaaggcctttgacaaaattccacaacccttcatgctaaaaactctcaataaattaggtgttgatgggacgtatctcaaa

SEQ ID NO: 881489 - DNA, 605 bp, Homo sapiens
gcttgagagaattgactccaattttgaaagaagttctaccattggtcaaactctatcaaacagcatcacgtgttacagaggaatctttcataaaaggaagagtaaattgatgtggcaaacttcattgttttattttaagaaattgtcayggccactccaaacttcagcaaccatcatgctgatctgtcagcagccatcaatatcaaggcaagaccctctaccagtaaaaaaagattacaactgaaggctcagatgatcattagcattttttaggaatagagtacttttaaattaaggtatgcaatgtaccttgcataccttaatgtaagcaatgtacattgcttttttagacataatgttattgcacacttaatagactacagtataaacataacttttatatgcactaggtaataagaaattccatgtgactcactctattgcaatattcactttacagtggtagtctagaactgaacctgcagtatctccaaggtatgtctacacttatatattgctgcataacaaaatcaccccaaacttagcagcttaaaacaataaacatttattgttttatatcatgcagtcttggaggttcagaaatc

SEQ ID NO: 881490 - DNA, 497 bp, Homo sapiens
tggctttgtgctgagttctttgaagctggcgcaaagtgtgtgttcactcttgcactgagtgaagttcaagttcactcttgcacagagcttgcactgaggggaaggatcagccaaggtaaaagtgtagggtcttcttatgacatttgtcagcatgtggcttaacctatgcatacgtgtgactttctagactctcccatgtacgtgaatgattttgaatgtcttagttttccaaatactcttctccaacttttcttcctgtgctsaaggtgatctactatatgtgtaaactctaatttttgccctaagcatctgttgtttgttaggtctccttgcagagtttctcaataatgtccattccttatctgttctgtattctagcaacacagaaaaaaaagcctttcattagtccttcaggtatcccccagaccagtcagaacagacatacataataatttgcgggtaagagcttctcttgttcctttggagccatggaccag

SEQ ID NO: 881491 - DNA, 593 bp, Homo sapiens
ttaatttgctcgtcagttgatgcagtttcttcctagcatcgatggtctttacaatttggcatgttttttgcagtgtctggtaccggtgattctgttccatgtttagtgcttccttcaggagctcttgtagtgcgggcctagtggtgacaaaatctctcagcatttgcttgtctgtaaaggattttatttctccttcacttatgaagcttagtttggctggatatgaaatcctgggttgaaaattcttttaagaatgttgaatattggcccccactctcttctggcttgtagagtttctgccgagagatcagctgttagtctgatggacttccctttgtgggtaaaacccgacctttctctctggccgcccttaacattttttccttcatttcaactttggtgaatctgataattatgtgtcttggagttgctcttctcaaggaccatctttggggcrttctctgtatttcctgaatttgaatgttggctggccttgctaggttggggaagttctcctggatagtgtcctgcagagtgttttccaacctggttccattctccctgtcactttcaggtacaccagtcagacatag

SEQ ID NO: 881492 - DNA, 644 bp, Homo sapiens
ttaagcaaagccgagctctgaatgtttatagttcatgagtgcaaataggaatttgaggaacaagatggaaatagtttttaaaactgttttctttcccttttccttagagttagaatcaattaaaacatagttgagcacttccgtgaatatatgtgaatcccttgtgatgctttaaatatccacagtttacacataaaggcattttacttgatgcaaaaagatttaagtgttttctactttcaataagctcattttgtatttttttaacaaaaaaataaamgtagcagtgggagttttcactgtataaaaagaaaaattggtttatgtgttatattatcagaaaaaatcttttatttaaagagatggtacaggatgatatgattaaaggtaatctataaatctgatccttatttttttataaagatttctatttatctacaaaaatatcatataattgccaaatatctgtcagatagaaggcaaagtgtttatctgaaaatatcaagtggttgttctcaaagagtttatattcttattggatgcatctgccaaataataaatgaaacgagggactaaatataaggctaagcaaataattcaactttactttgcactctataacaatactgaaaagatttttttat

SEQ ID NO: 881493 - DNA, 649 bp, Homo sapiens
agctttattaattcttaaattattatgagtacttaaaatacagtcacactgaaactaaaaagaatacaattcattcttaattagatcaacttggattatctccacttaaaaaattatttcattaaaccactttgaaagtttggatgttctaggcattttaactcaggtctgcctcagtactgcctttatatctgaacattagatctctgccttaggccccacacctcaagaaatgcatgcttccaagtaccttcctcaaaattttctaagtccctctcctatgcctggcatggtttggggccaccagtgccatytaagtgtagtccagactgagcatagacataaatcctagcccctgattttttacttgggacattttgcgaccctctattcagtacatagactcaactggatgccccgagaagctctaggactcactcaacctatgtggtctttctggatatcatggttgagcctcagacctgtaaagacagcctagcaaaaaaattgttccagctgtttggtaaggtatttattctacgggatctcatagaattgatctaccataatggtgtgggcacattaatttgggtgattctcactcacattggagataagatgagttaaaggctctgggctgctgatggac

SEQ ID NO: 881494 - DNA, 596 bp, Homo sapiens
tcatgactaaaacaacaaaagcaatggcaacaaaagtcaaaattaacaactgggatctaattaaactaaaaagcttctgcacagtaaaagaaactatcctcagagtgaacaggcaacctatagaatgggagaaaatttttacaatctatctacatctgacaaagggctaatatccagaatctacaaggaacttaaacaaatttacaagtaaaaaaacaaccccatcagaaagtgggtgaaggatatgaacagacacttctcaaagaagacatttctgtggccaacaaacatatgaaaaaaagctcatcatyactggtcattagagaaatgtaaatcaaaaccacaatgagataccatcttacgccagttagaatggtaatcattaaaaagtcaggaaacaacagatgctggagaggatgtggagaaataagaacgcttttatactcttggtgggagtgtaaattagttcaaccatggtggaagacagtgtggtgattcctcaaggatctagaaccagaaatatcatttgccccagcaatcccattattgggtatatacccaaaggattataaatcattctactataaagacacatg

SEQ ID NO: 881495 - DNA, 646 bp, Homo sapiens
ctaaattgggtcttaaattagcagaaggatttctactgaaggaaatgggggagtggcaagaaagggcatttgaaaggacaagatgaacaagaacccagcgaaaggatgcgttttgcctgttcagagagcaaacaggagttatgctaaggtggcagatgaagtcctcaggtgcatggcaggccgttctctgttgcactgctttttacatttttggctttgcttgttaagtttttggtttgagttgcttgagtcagtgagtgaagmagtcatcacaatcaaacttgctaggcacaggagaggctttgagcttgcctctgctgtgagccacttgaccaaaaactgctcagggtagttatgtggccttaggcaattttacttaaccccctaagccttacttcttccttgaaaaatggtcacaataatatgacacctactttgcaagaatgccatgaggttaaatgagataatgcatatgaaaacccagaactgcatcatatggcacctttgtgcagtttggaaaattttgatcatctctccaagtgaatgcaacccttctctagggcacccatgtgggtgagtggagattaagatggattccagtctccccataacctcacccaagcaaccttgtgcagtatacaacctg

SEQ ID NO: 881496 - DNA, 553 bp, Homo sapiens
agacacttttcaaaataagatatacaaatagctaacaggtatatgaaaacatgctcaacatcacgaatcatcagggaaatgcaaatgaacaccacgatgaaatacaaccacatgcttgttagggtgaccgttatcaaacagacaaaagataacaagtgccggcgaggatgtggagaaaagggaacccttgtatgctgttggtgggaatgtaaattggcacagccattatggttcctgaaaaagctaactatagaattgccwtgtgatccagcaatttcacctctgagtatatagccaaaggaaatgaaatcagtatctcaaagagttatctgcactcctgtgtttactggagtatcattcacaataacatgaaatcattcacggtagatatggaaccaacctaactgtccatcaagagaagaatggataaagcaaatgtcgcatatgtacacaatcgaatactattcagccataaaaagaaggaaatgctgtcatttgcagcaacatgggtgaacctggagaacattatcttatatgagataaggcaggcaga

SEQ ID NO: 881497 - DNA, 636 bp, Homo sapiens
gtgtgagtcagccagcactagctgagaaggatgaacatttcctctccctgagtaacatgaccataaatttctttggctttcagcctcacagcaatgcagtccactgtactttttaaaaaatcggttgtcatttcatgaatctacaaatttagctgattttccatcttttccctagcttaatcacacactctagatgttactttagcactttgaagaacagcctcacatacagattggtcaatttccttttcctttttctggatgtggcttattgtactgttgattccttgacactgaacgcacagccaccagcactataactcatgcytaaacaaagcatatctaacaaacttatttcctccttaaggcacatcacagcctttctgctcctagggacactagacaacagttcagcactacacttgggaggcattttaaacagtaaaatcaccaacagaaagcacaaaaatgcaaaaaaaaaaaaaaaaaagaaaaagaaaaaaggtggcactaaatagatcatgctaaagacactcgttattagcatgagagctgatataagaaggcagagtgtcaccttgttagacctcagctgggaacacgcatattagacgactcaaattttacactaatctg

SEQ ID NO: 881498 - DNA, 581 bp, Homo sapiens
agtcacctgtatacatatggtctggaattttacaaagtaaatgagagtcccaagatagagattggtagcttgacctcacctacctgagcctacaaaatcaattcacgtttacatttatgtctttgttacagagacttatctcttcctcttaaatggggatcactatgggagtgttttctgggagtctctgaaggaggaattccacagaatgtcaaatgttctgatcctagaggctcagagactggagtggccctagttccacaggtgagagccagttttatgtcaaacttctgctattctttgtcctccagaccttaatgcatttcttcttttgtatggaatttcacaaaggggctagacattctttcagcttctaggctgaactacacaaagattttctcaaaactgggttcttccattgtgtgaaattgtgtcctatgtgygaaattccatcctagtgacccacattcagtccaggactctagatcgaccaaagaaccaaattttttcttccagtttcctcatctctctcctccctctgcctcatcaaaaagaaaaaatccccttttctttccagtgat

SEQ ID NO: 881499 - DNA, 646 bp, Homo sapiens
tgccgtccccatcaagctaccaatgactttcttcacagaattggaaaaaactactttaaagttgatatggaaccaaaaagagcctgcattgccaagacaatcctaagcaaaaagaacgaagctggaggcatcatgctacctgacttcaaacgatactataaggctacaggaaccaaaacagcttggtactggtaccgaaacagagatatagactgatggaacagaacagagccctcagaaataataccacacatcaacaaccatctgatctttgacaaacctgacaaaaacaagcaatggggaaaggattccctatttaataaatggtgctgggaaaactggctagccatatgtagaaagctgaaactggatcccttccttayaccttacacaaaaattaattcaagatggattagaggcttaaatgttagacctaaaaccgtaaaaaccctagaagaaaatctaggcaataccattcaggacataggcaagggcaaggacttcatgactaaaacaccaaaagcaatagcaacaaagccaaaattgacaaatgggatctgattaaactaaagagcttctgcacagcgaaagaaactaccatcattgtcaacagggaacctacagaatgcaaggaaatttgtacgat

SEQ ID NO: 881500 - DNA, 650 bp, Homo sapiens
cagcaatagctttattcttagaagagtgagagttttatcgtatcacttccacatttaaaatgacaatccatggcttctgtgtaacaaagtgtcttagagctgagtcatagaattctccaaattatgcttttgaattcatattctaaaatcataccttacaaatctgagtagataatacattttgattagtagaaatcctgtctttattctaggagaaagaaatcttattcaaattacctgaacaatataaatgtaagtttcagcttctattttcttgtttcttgtatcaaccaacaattcaacagtaagttagattcaaagggtttgatggcctattatctgtaagtgaataaagatccagtgaagttttacagtagatatttaacataggctagatattattcttttacatttctcaaaaacaaaacacagaaaactctattcatgtttttgtttacttattgtacrttttgaagaattaaaacatactagcagttgcataaatttgtatgatattatttctgtggtgatcttaatttttcttttatagctgttgctgtgacattttgaatccagatctggcatgattaatggagagactggccatgctgcctcaagacagagtagctgcagccagtgatggagaatgt

SEQ ID NO: 881501 - DNA, 663 bp, Homo sapiens
taacaaatagagcaacatccaatttcttgagagatgatatccgaacttctgcagataatctagaatgtcctaattgtttagaaaacttccatctaaggattatctttatttttaaatgtacataatccaagtttctctaagatactaacatacattcttgaatatcaaatattgttgaatggaggccagtacctcagtgactcactcaaaagagaatccctataaatcagtgcagttgattggcttggagaagggctgttgattttaaaatcctttcttctttgtatgcaaatgagatgttatgtgttgactttgaatacaaaggtggtggaaggccaaagttgaattaggtgttattgtagggtaatatcagggtctgtagtcctttttattatgcttggaaatacatgttctataccaagtsctaatcctcatgaatggggttgtttttaaaaattttttttgtattatactatctggaaataacctcatttttaaaaaagactaatgagtcaatcaaaagttacagctgatccctcctgaaatttcttaagttctatcactgtaacaggaccatttttaaactgggctcaggctcagatgacatatgatcactgccagctgcatcaagtggcaaagtctgggtaaaaataagttatttga

SEQ ID NO: 881502 - DNA, 663 bp, Homo sapiens
actctgtgcttttttgaacagacacttctcaaaagaagacatacatgcagccgagaagcatatgaaaaagaagctcaacatcactgatcactgagaaatacaaaccaaaccacaagatatcatttcactccagtgagaagggctattattaaaaagtcaaaaaataacagatgcctgtcaggtggtggagaaaacagaacacttatacactcttggtcagactgtaaattaaatcaaccattgtggaacacagtatggcaattcctcaaagagctaaaagcagaactaccatttgactcacaatcccattactgggtatatccccaaagtaatataaatcattccaccataaagacacatgygtgtgaatgttcgttacagcagtattaacaatagcaaaggcatggaatcaacctaaatgtccatcaatgacagactggattaagaagatgtggtacatatacactatggaatactatgcagccataaaaaagaatgagatagtgtcttttgcaggaatatggatggagctggaggctattattcttagcaaactaatacaggaacagaaaacccaatactgcatgttcctataagtgggagctaaatgataagaacttatgaacatgaagaatgaataacagacactgggatctacttgag

SEQ ID NO: 881503 - DNA, 558 bp, Homo sapiens
gcattcttttttttttgacatccccttccctctactcccactcatcaagcttgggatcctgtcctctattcaggagttctgatccatgtaactgtaggagtcctggaatctgcatttttccctttctagtttggacactcatagagacttgaggcagtagaaactctttggggtttgaggctgtgatttcttattcagagacgatgagtgttattattatgctgaggtasgggaaaggaaagaaaaggagtaaggataagtaggaaacagtcctagaacaaaagtagcagatagagacagtattgaaaatgaagttcacctcctaggaagttgtaccaaaggcaattaatgggtaagatttaagttggtagaatgatgttaaaaacagcatctctttttaggttaggcaccctactgtctctgcatattcatctctggacactcccaaacaattaaaacaggtttatagacagttccaggcatagacatactatgttttcagatacaaggtctaattgctcctcttataatattttgttagtatagcattcagttctt

SEQ ID NO: 881504 - DNA, 625 bp, Homo sapiens
gttattgcagggcgcccagcaaggagaatcgggcagctcatgcttaagacctgaactccctgatggctggtagggaagggtttttgtttgtttgtttgtgtttgtttttgtttttgttttttttgacagagtcttgctctgttgccaggctggagtgcagtggcacaatctcggctcactgcaacctctgcttcccgggttcaaacaattctcctgcctcagcctcccaagtagctgggactacaggcaccygccaccacacccagctaatttttgtatttttagtagagacggggttttaccatgttggccaggttggtctcaatctcttgacctcgtgatccacctgcctcagcctcccaaagtgctgggattacaggcatgagtcaacgcacccggccctaggtaagggtttttaaaggcagagaggcagaggttacaggcaaagtcagaaattgacacatggaagctgtacattgtttcgacctataaaagtaggactttttttttttttaagactttctctcttgttgcccaggctgcagtgcaatggtgtaatctcagcttattgcagcctctgcctcccaggttcaagcaattctcctgcctcactttcctgagtagc

SEQ ID NO: 881505 - DNA, 590 bp, Homo sapiens
aactgcctttttttttttttttgcagaaatggaaaagctaatcctaaaatacatatgaaattcaagggacacaaaatagccagaacagtattgaaaaagaacaaagttgcaagactcacacttcccagttctaagacttgctacaaagctataataatcaaagcagtatagtgtggcacaaagatagacgtggagatcaaaggaatcacatttagagtctagaaacaaaccctcacatttatagtccattgatttttgacaagastgacaagacaattcaataaggaaagaatagtcttttcagcaatggtgccgggacacagatatccacatgaaaaagagtgaatttggacctcaaccttatactatacagaaaaaaaattcaaagggcatcaaagacctaaatataagagatgaaactataaaattcttagaaaacacaggggtaaatcttcatggccttggattttgcaatggtttcttagatatgacttcaaaaccacaaataaccaaagaaaaaaatagctactttgtattttaccaaaaagaaaaactttgatgcttcaaaggacattatcaagcaagtgaaa

SEQ ID NO: 881506 - DNA, 658 bp, Homo sapiens
ggtcacctcactgcccaagtaacccaccaggcatgctagctgccatctggcccctgaagttggtgttactttgttacacgaggaacatgaggagttgacaccatgctgatctagcttatgctgtgtcaatcacaactgcctaaaatcaactgggcttgttgcctccttcctggccaaatccataggcgtgtggcaagtcaactcagcagctgcagcagtggtccttttggtcttggtggtcaccgagctactgaccacttgacatccaatcatgtcctatgtagcatcttctttcttgtccaggatccaatccaacttcataccttgtacttatttgtcatatcactttaatatcatttaatctgaaataattccttcatttttcctttcacatcttgatattttttwttattattattattattattattattattattattattattatttgagacggagtttcactctgtcgcccaggctggagtgcagtggcacgatctcggctcactgcaagctcggcctcccgggttcacgccattctcccgcctcagcctccgaagtagctgggactacaggcgcccgccaccacgcctggctaaattttttgtattttttagcggagacggggtttcaccgtgttagccaggatggtctt

SEQ ID NO: 881507 - DNA, 654 bp, Homo sapiens
caggatggtctcgatctcctgacctcgtgatccagccgcctcggcctagcacgaagattcttacaggtggtgaatcgggatgaagtccaggcagaaagtgaatgcagtagccatggcataaatggtgtggggcaaaggtaattttaaggatcgtggagttggctacttttgttaaggctcctaaagttagactcctacctcaaggcaagttgtgaaagtcagaaaacatccatgaagtattaaaagaaacctttatcttttaggataatgggggaaaagtaggtttcaaatcatgcccaggaattacggtcaaggaagcagagctgcaaaggagactgaatgcaaaagcttaatagctaatgggaaagtactgggctgctgagatgaaattgttggtgacctccaacaaacctgagatccttgaactcccagaagtccctgaaccyttcaggtcagtggaagcaacttccttcccactgatgagatgatgttgttggtgacctccaacaaacctgagattcttgaactcccagacagccctgaacccttcaggtcagtggaagcaacttccttcccactgatagaagaggaagtgccactagtctagacaccctgaaaacatattacctgagtcagatgcattgctacaagatg

SEQ ID NO: 881508 - DNA, 627 bp, Homo sapiens; identical to SEQ ID NO: 878610

SEQ ID NO: 881509 - DNA, 634 bp, Homo sapiens
acactctttaagttattttaaaatatgcaactaagttattattgactatagtcaccctattgtcctatcaaatagtaggtgttatccattctttctatttttttggggtacctattaacaattcccacctcccccagtcctcccactacccttcctagcctctggtaactatccttcaactctctatgtcaatgagttcaattgttttgatttttrtatctccaaaataaatgagaacacctaatatttgcctttctgtgcctggcttatttcacttaacataatgacctccagttccatctgtgttgtaaggttatgagatttacatagattattatatgtgaaaagtgcctgattctgtgaaagctctgtggtcaatatttatttactgttatttctcttctttttcttccttagcacagtgtcaagcataattcactctgatatagtgctaaacctaacttgtacatgtcagaagttatatacaggcagagaaggtaaaaatgctacacatgcctgtcaggtagtcatgctgcttccagaggccaaattcactgtttgggttttttaaaggtttggtggcaggctggttaaaaaagagtctgctattttgaaaaaaataactatcttaatt

SEQ ID NO: 881510 - DNA, 587 bp, Homo sapiens
gaattcatacatacagaaagtgggatggtggggacttgggtggaggataggaaattatttcaatggggaaagagttatagttttgtaagattataaagttctggagatagttggtgtacgaaaaagtgaatgtacttgatgctacagcactgtacacttaaaaatggctaagatggtaaattttgttatgtatgtcttatcacamtttgagaaaaataacgaaactcactgagcagctgtgggtggctgtggcctcagatttggcttcatgaggactccttggccactcagcgggtgggtctctctctctgtctctctcacacatttatttccagtgactccctagaccctgatcttctcagctgtgtgttggctctgtctgcaggcttgatgtggtctctaggcagcctcagtagctccacttcagtgtcatctttctttaaagtctagaaggaaggaagtcatttgttttcttgagaactcaaaccaaagcacatttttttacaactctcatcccttgtaggttgctaagggactatgtgagtccctggaggaactggcctcacttagtgcatcccaagtgtaaa

SEQ ID NO: 881511 - DNA, 597 bp, Homo sapiens
acaaagactactggaaattaccaaccacttacgagtacggaaagacagctaaaaccacaccacgtgacacacgtatttcactagcaatggaacattcatgggtacagagtctatgcgtaatgtccttaaatgagggctcctcttttattttaaggagaacagaggtagaatttaaaaagttaaatagggagctacgtgttcatacaacaaagcataaagaaacttattcctactctgagcaagtgraatggtctcacgtatgaatgtcctcaggggtagtatctttgtgaagcagaaataggccatttttccctgttaatacccaccctctcccacccccaggtctttctgtaaaccagaagccctctaagactgatttttcctgtatttcctgtatgtccctatattttctcgtatgtcaccacatacacctgtccccggcggtagcagtgtcgtgcacacagccctggtcccctgccccgccccatcttcaggccagtccctgcctggtctagcttcagcttctctgaagagcaagcccccgctggtcccacatgcctctcagcattctgggtctttaaggggaacttgtgccaa

SEQ ID NO: 881512 - DNA, 610 bp, Homo sapiens
tgttagggttgatttatggtgaaaagttttctgacattcagtacattcataggatttctcttctcagtgtgttctctgatgatcagtgaagtttgacttcatagaaaaggccttcccacattcattacatacatggggtctctttcctgtgtgatttctcagatgaatattaagatgtgacttcaggccaagtgcagtagctcatgcctgtaatcccaggactttgggaggccaaggcaggctgatcacttgaggtcaggggtttaagaccagcctgtctctactaaaaatacaaaaattagctgggcatggtggcaggcacctgtaatcccagctagttgggaggctgaggcatgacaatcgcttaaacccaggaggtggaggctgcagcgagccaagatcacrccactgcactccagcctgggtgacagagcgagactccatctcaaaaaattaaaaaaaaaaaaaaaaagatgtgacttcagataggatttttcacactcatttacattttgtaaggtttctctccagtgtgagttctctggtgtataactagggttgtaaggacttcctacgttcattacatttatgtggcctctcccgtgtgagt

SEQ ID NO: 881513 - DNA, 672 bp, Homo sapiens
gaactctgtgagatgaaagcatgcatcacaaagaagattctcagaattcttctgcctagtttttatgtgaagatattttccaccataggcctcaaaacactgcaaatgtccaactacagattctacgaaaagagagtttcaaaactcctcaatcaacagaaagttttaattctgtgagttgaatgcacacatcacaaagaagtttctcagattgcttctttstagattttatgtgaagatatttccctttctaccataggccgcaaagcactccaaatatccgcttgcagattctacataaagatagtttccaaactgttcaataaaaagaaaggttcaactgtgtgagaggaatgcacacatcacaaagaagtttctcagaactattctgtcatgtgaagatatttccttttccaccataggcctcaaggcgctccaaatgtccacttgcagattctacaaaaagagagttttaaaactgctcaaccagaagaaaggtttaactctgaggtgaatgcacacatcacaaagacgtctcagaatgcctctgtccagattttatgtgaagatatttccttttctaccgttggcctctaaccgctccaaatgtccatttgcagattctacaaaaagactgtttccaaactgctcaatcaaaagaaaggttcaact

SEQ ID NO: 881514 - DNA, 672 bp, Homo sapiens
gaactctgtgagatgaaagcatgcatcacaaagaagattctcagaattcttctgcctagtttttatgtgaagatattttccaccataggcctcaaaacactgcaaatgtccaactacagattctacgaaaagagagtttcaaaactcctcaatcaacagaaagttttaattctgtgagttgaatgcacacatcacaaagaagtttctcagattgcttctttgtagattttatgtgaagatatttccctttctaccataggccgcaaagcactccaaatatccgcttgcagattctacataaagatagtttccaaactgttcaataaaaagaaaggttcaactstgtgagaggaatgcacacatcacaaagaagtttctcagaactattctgtcatgtgaagatatttccttttccaccataggcctcaaggcgctccaaatgtccacttgcagattctacaaaaagagagttttaaaactgctcaaccagaagaaaggtttaactctgaggtgaatgcacacatcacaaagacgtctcagaatgcctctgtccagattttatgtgaagatatttccttttctaccgttggcctctaaccgctccaaatgtccatttgcagattctacaaaaagactgtttccaaactgctcaatcaaaagaaaggttcaact

SEQ ID NO: 881515 - DNA, 617 bp, Homo sapiens
gggggttgcaagtaacaccaagagaaaaaagaagtcttgagcagctttttaaaaatggtcttaaaatatggaaaatgaagccaggtgtgttggctcactcttgtgatcccagcactttgggagcctgagatgggaggattgcttgaggccaaaagtttgagaccagcctgggcatcatagcaagatccccatcattgcaaaaaataataattttttaaaaaaattagctggatgtggtgatgcatgccttagagtcccagttatgtgggaggctgaggtaggaggagctcttgagcccaggagttcaagtctgaagtgagctatgattgcaccactgtcctcaagcctgggcaacaaagtgagacctctctctctctctctctctctctctctmtatatatatatacatatatatatatatatatatatatgtgtgtgtgtgtgtgtgtgtgtgtgtgtgtgtgtgtgtgtgtgtgtatgaaaagggaaggggccaagtatatcaaagacattgaagaagaggaaagatttgtcctgccaaatatcagaacttttataaagctactgcaattaagacagtgtggttctcactgataaattgactaatgaaacaggat

SEQ ID NO: 881516 - DNA, 585 bp, Homo sapiens
tttttactcttacaagttttttagctccaggacatttaattatttctttctgaatctgcatttctcaactgatatttataaatctttgtttctgtgcttgcctgaaattagaaaagttcacagtatgattatctggttgttttacaagagaaataattctatgatacaagtaaagaaatactttaaactgatggctattcaaagtcctgcattttatgctgactgcttaaaataggctttttattatttactcaagataatttacagatattctaatgtgtatcaagccttagaatargcactgaaaaatggagatcagtaaaacacttcttattttgggagcagtttcaaaatggaataaaatattgataggtgctaacatctggaatagctgagtagggagcttggaatagctccttcacaaaaagcagtgatacaactggacacacttgtttagcctggggctgcaaccatttcccccaccctcatccagagtttgtggcataagttacaccaagtgatggggcatcccatgaggactggcagctttgctgccacaggaggatgacttgaaaatatccaagt

SEQ ID NO: 881517 - DNA, 536 bp, Homo sapiens
ggcgggagaatggtgtggacccaggaggtggagcttgcagtgagccgagatctcgccactgcactccagcttgggcgacagagggaggctccgtctcaaaaaaaaaaaaaaaaagtaagacctggtccctgactttgaagaggaaaaasagacataaaatcaattttcttaaaagcagaataagctccattatagaggtcaataatagagcacaagaaaatcatagtaaaaggtaatgaaaaatctggaggcttcaggcaagacttagagaaacggtgacctttcaactttgatttgaagctctaagaatgtcattgagagcttacacaaaatggcagaaaacagtgtaatatcttcaagacataattcagtatggccaatccaatcaacaatgtgcaaaagatagacagagaggtaccaaggggaaccttccgggataccaaaataagtctgtaatctatgttataagtaaaaaaaaaaaaaaaaaaaaaaattgtatcaatacctttctatttgaagtgacaactggtgtctta

SEQ ID NO: 881518 - DNA, 536 bp, Homo sapiens
ggcgggagaatggtgtggacccaggaggtggagcttgcagtgagccgagatctcgccactgcactccagcttgggcgacagagggaggctccgtctcaaaaaaaaaaaaaaaaagtaagacctggtccctgactttgaagaggaaaaacagacataaaatcaattttcttaaaagcagaataagctccattatagaggtcaataatagagcacaagaaaatcatagtaaaaggtaatgaaaaatctggaggcttcaggcaagacttagagaaacggtgacctttcaactttgatttgaagctctaagaatktcattgagagcttacacaaaatggcagaaaacagtgtaatatcttcaagacataattcagtatggccaatccaatcaacaatgtgcaaaagatagacagagaggtaccaaggggaaccttccgggataccaaaataagtctgtaatctatgttataagtaaaaaaaaaaaaaaaaaaaaaaattgtatcaatacctttctatttgaagtgacaactggtgtctta

SEQ ID NO: 881519 - DNA, 607 bp, Homo sapiens
ctatagcaataatctgaaagactctttagctggacttaaatgatgatgagaaagtaattttctgaaaattactgaatctaatctttgaagaaaactatacaacatgttgtaagcctataaaatgaacataaaatataatgttcaaggcattctgaaggatgtatagcagattctggtatcagtctctaatacattatctcagtgaaagtgtggtaatactatttcttcagtagtgtggttagtagaacagtaactgtgttgatcttgtccattttcttatgacttattcttttctcatgacttattcttttctcatgacttattctyttctcatgacaccttgtctatggtaacatgtcttcttccagctttagggcctttattactgctaccttttttttttttttttttttttttttttagtgtaattgttaacttcagcaatagctgtgcggcagtatagctctgtcactgaaacctaagcgctctgcatctatgtgcgttgggggtggaggtcttcattcactttccaaaataaaaaaaagagtttctgctggcaactgatttgtatgtatgtgtgtgcatttgaagaaaaaaggttaaaagt

SEQ ID NO: 881520 - DNA, 578 bp, Homo sapiens
gcattaacatgtttggattgagataatggttacatagtaaagagagaaaattgttactatgtttgcaaggaggacaattgctggatcagtgtcatggaggaagttgttgagctttgttggtttatctctcatttgtctatctatctatctatctgtctgtckgtctgtctttctgtctgtctgtctgtctgtctgtctgtctatctatctaatctatctatctatcgatctgtctatccatccatctaatgataataggagagaagccacaatctgtacacagctacatggtagatgttttggacacttgtaatttttttaaaaaattgcatctattttctcagagaatctcaagcaaggtcatcaaccaaaagtgcagatggtgaagtgggtttttaatatttgaggagaggagacataaaggaactatttaggaaagtgggagagtaattgactgtaatacaaaacaatcagttacacaaaattaaaattatatattttgttttatttcgtaggtctttctttcaaatcatattttattatcccaactacttatacaagtaaatacatgaggtaac

SEQ ID NO: 881521 - DNA, 578 bp, Homo sapiens
gcattaacatgtttggattgagataatggttacatagtaaagagagaaaattgttactatgtttgcaaggaggacaattgctggatcagtgtcatggaggaagttgttgagctttgttggtttatctctcatttgtctatctatctatctatctgtctgtcggtctgtctttctgtctgtctgtctgtctgtctgtctgtctrtctatctaatctatctatctatcgatctgtctatccatccatctaatgataataggagagaagccacaatctgtacacagctacatggtagatgttttggacacttgtaatttttttaaaaaattgcatctattttctcagagaatctcaagcaaggtcatcaaccaaaagtgcagatggtgaagtgggtttttaatatttgaggagaggagacataaaggaactatttaggaaagtgggagagtaattgactgtaatacaaaacaatcagttacacaaaattaaaattatatattttgttttatttcgtaggtctttctttcaaatcatattttattatcccaactacttatacaagtaaatacatgaggtaac

SEQ ID NO: 881522 - DNA, 578 bp, Homo sapiens
gcattaacatgtttggattgagataatggttacatagtaaagagagaaaattgttactatgtttgcaaggaggacaattgctggatcagtgtcatggaggaagttgttgagctttgttggtttatctctcatttgtctatctatctatctatctgtctgtcggtctgtctttctgtctgtctgtctgtctgtctgtctgtctatctatctaatctatctatctatcgatctgtctatccatccatctaatgataataggagagaagccacaatctgtacacagctacatggtagatgttttggacacttgtaatttttttaaaaarttgcatctattttctcagagaatctcaagcaaggtcatcaaccaaaagtgcagatggtgaagtgggtttttaatatttgaggagaggagacataaaggaactatttaggaaagtgggagagtaattgactgtaatacaaaacaatcagttacacaaaattaaaattatatattttgttttatttcgtaggtctttctttcaaatcatattttattatcccaactacttatacaagtaaatacatgaggtaac

SEQ ID NO: 881523 - DNA, 674 bp, Homo sapiens
gatgcctccagctttttctttttgcttaggattgtcttggctatgcaggctcttttttggttccatatgaactttaaagtagttttttccaattctgtgaagaaagtcaatggtagcttgattggcatagcattgaatctataaagtactttaggcagtatggccattttcacratattgattcctcctatccatgagcatggaatgtttttcccatttgtttgtgtcctctcttatttccttgagcagtagtttttatttctccttgaagaggtacttcacatcccttgtaagttgtattcctagatattttattctctttgtattgattgtgaatgggaatccactcatgatttggctctttgtttgcccgttattggtgtatacgaatgcttgtgatttttgcacattgattttgtatcctgagactttcctgaagttgcttatcagcttaaggagattttgggctgagatgatggggttttctaaatatacaatcatgtcatctgcaaacagaaacaatttaacttcctctcttcctaattgaataccctttatttatttcccttgcctttttgccctggccagaatttccaatactatgttgaataggagtggtgagagagggcatccttgtattgtgccggttttcaaagggaatgcttccagttttt

SEQ ID NO: 881524 - DNA, 564 bp, Homo sapiens
tgtgccctggatatgagacatggagtcaaaggagattattttggagctacaagatttaatgactgccctactgggttttggacttgcatgaggtctgtatcccctttgttttggccaatttctcccctttggaatgtatttaccctgtacctccactgtatcttggaagtaactaacttgttttttattttataggtgaaaggsgcttgccttgtcttaggtgagactttggacttggatgtttgaattaatgttgtaatgagttaaggcttttggggactgttgcaaatgcatgaatttgtttcagaattgaaggatatgagaccttggaagggccaggggcagaataatatgatttcactctctgaccccacccaaatctcatgttcaattggaattcccaatgttggggaaaggacctggtgggaggtgattggatcatgagggcagattttcccttgctgttctcatgatagtgagtaagttatcacaagaactagttgtttaaatgtgtgtagcacttcccccttttctctctctcctgttgctatgtgaagatgtgct

SEQ ID NO: 881525 - DNA, 550 bp, Homo sapiens
  misc_feature 487, 516, 517, 518, 519, 520, 521, 522, 523, 524, 525, 526,527, 528, 529, 530, 531, 532, 533, 534, 535, 536, 537, 538,539, 540, 541, 542, 543, 544, 545, 546, 547, 548, 549, 550: n = A,T,C or G
tggcatcaagactcattcaaacgagactgacctgaataatcttcagccatcagtatgtctcatctcttctatcaacacatagacttctgctgtttgtgtacattttgttgtttttaaaaatttagtgatgcttcactataattcctctgtaaagacattttggaagwtaaatactcttatgggtaagagtaagcagaagatagagaagtaattgttacatatagcatgaaaattgtagttgctgcagaatcttcatgatgttgtgtttgtggcatcttacaaaaaaaatggtatggaaagtgtgatggttaatactgagggtcaacttgattggattgaaggattaacatttgagtcagtggactgggaaaggcagacccacccttaattttggatatgtgcattctaatcagctgccagcatggctagaaaatcagcaggcagaaaaatgtgaaaagagagactggcccagcctcccagcctacantttctcccgtgctggttgcttaaaacaannnnnnnnnnnnnnnnnnnnnnnnnnnnnnnnnnn

SEQ ID NO: 881526 - DNA, 665 bp, Homo sapiens
tgaatcttgggggtgggctttgtttccttcatactgttctcatgggagtgaataagtctcacgggtttgtcaggggtttccacttttgcatcttcattttctcttgtggctgcgatgtaagaagtgccttttgcctcctgccatgattctgaggcctcccagccatgtggaactgtaagtccaattaaacctccttctccctagtctcaggtttgtctttatcagcagtgtgaaaatggactaatacagtaaattggtaccagtagagcagggtgttgctgaaaagatacctgaataggtggaaaccactttggaactgggtattaggcagaggttggagcagtttggagggctcagaagacataaaaatgtgggaaagtttggaacctcctraagacttgttgattggctttgacaaaaatgctgatagtggtaagaacaataaggtccaggctgaggtggtctcagatggagatgaggaacttgttgggaatcagagcaaaggtgactcttgttatgttttagcaaagagactggttgcattttgcccccaccctagagatttgtggaactttgaacgtgagagagatgatttagtgtatctggcagaagaaatttctaagtggcaaagcattcaaaaggtggcttgggtgctgttaaaagca

SEQ ID NO: 881527 - DNA, 679 bp, Homo sapiens
gctggggaaggatgcaatgaaatatttgcttctgtaaccaactggcattctcctgtttcagtccccaagtatgtctgaggatctgggtcctgagtgtaaaataaaacatacttaattttctcaaatatcactagttaggaaaaaagcaaaagaaaagcagagtaatttccttcctcatctcctgccrcaggtgattggattgcaggattgcatggagggagaagtgattttgtttcttggatggtgaaattaagtgagcacttcccaatttattcctaaaaacacggagacaccgcgtttatgttcctgaaatgagaaatcagtagaaacacaactgggtaaagaaagggaaattaaaaagaaaatcaccaatcatttgattatatgacaacacgtgaacactcacatacttgattgtactctgcaagtctgtagaaaggaggatcatttaagaaaaaaaaaaaaagacgctggtttcagcatgttttttgtaaggatgggctatggcagctggaaagctaagtgtcctgaaacaatggatggccctcacatttgtgcaaggtcttcagagtttacaaagcgctttcagacgtgttgtatttctcctccatgtcctggcttatgccaggctctccagctcccctttcaacccaccctccctgttcctgctccatgcttt

SEQ ID NO: 881528 - DNA, 557 bp, Homo sapiens
ctgttgaaaagatttatgtggaagctgatatatacacatatatatcagtagtatgggttggttctgctttagtttgttttattatttttttcttttggaatacatatattacagtgcctagcacagtatgcaacacatatcaggccctttatatatatttcttgaatgaataaagcattattggataaataattattattgagtgtctactactctttagccaatttatatatttgctccctaaatttaaaaataatcattcaaagaaggtaatatcatctgcacttttttttttttttttttttttttttttagagacagggttttgctctttcgcccaggctggagtgatgtggtgcaatcgcagctcactgcaacctctgcccttggattcaagcggttctcctgmctcagcatcccaagtagctgggattacagggattacaggtccccgccatcatgcccagctaatttttgtatttttggtagagacagggttttgccatgttggccagtcttgtgtcgaactctgacatcagtgggtctgcccacctcag

SEQ ID NO: 881529 - DNA, 638 bp, Homo sapiens
aaggtaaggcaaaaatagaaacgggagagccctaaatagtaaagtcaacaattaagggaatggaaagcaaacagtggaacaaagtgagtggtttagcatgttaccgggggttcctgcccctggctgggcgtgagaactgccgggagacctttttataaatacagatgctggagtccacccctccttcacgatgaccaattagatcagaatccccaagggtggggccaaggaattcatatttatgggaagtgccttccgtgattctgaagtagctcgaccagcatggggtgtggacacaygttgggaggccgtggatttagatgattaaaatataatcctagcagctggaggccacagcatcagctgcatggcactctctaaatctgactggagctgagccaacattttagaacttgggaacaaagacccctgtgtacaaaaggagaaaatgggtggctgggtgcatcctccctacaagccactagaggatgtgggtgctgacctgtgtgagaaattcctggagcaccctcagccaatgagatgtaaatccgtgctcttgcttcttggctgaaagtaagagaaaagaatgaatgtttccattttctgggccagtttcatggaggccaccttatttctta

SEQ ID NO: 881530 - DNA, 638 bp, Homo sapiens
aaggtaaggcaaaaatagaaacgggagagccctaaatagtaaagtcaacaattaagggaatggaaagcaaacagtggaacaaagtgagtggtttagcatgttaccgggggttcctgcccctggctgggcgtgagaactgccgggagacctttttataaatacagatgctggagtccacccctccttcacgatgaccaattagatcagaatccccaagggtggggccaaggaattcatatttatgggaagtgccttccgtgattctgaagtagctcgaccagcatggggtgtggacacacgttgggaggccgtggatttagatgattaaaatataatcctagcagctggaggccacagcatcagctgcatggcactctctaaatctgactggagctgagccaacattttagaacytgggaacaaagacccctgtgtacaaaaggagaaaatgggtggctgggtgcatcctccctacaagccactagaggatgtgggtgctgacctgtgtgagaaattcctggagcaccctcagccaatgagatgtaaatccgtgctcttgcttcttggctgaaagtaagagaaaagaatgaatgtttccattttctgggccagtttcatggaggccaccttatttctta

SEQ ID NO: 881531 - DNA, 682 bp, Homo sapiens
tgtacttcagcctgagtgacagagcaaggcactgtcaaaaaaaaaattctagacaagctaatctaaacaagcctgtttgggctattgcattctcaaattctgtgacatttcacctgtagctaagtgctattactagctgaagttctcgtggacagagaagaggtggagctgggggcatcagtgctgttaaaaccagagaagccaaagtgatgccccctcttgggtcctttctctggttctttgtaggacagagaagaatggtgaaagatgaggtcccattgcctagctagttgcacaaacagtgttgtgtagggctgtgtgtgtgtatgtgtttgtgtgtgcatgtgtgtgtgtttgtgtgttgaagttcaacaataaataagggatgtggaaagccagagaaaamatattgcagaggaaagaggcagagtgggcaaaacttacatcagcttctgaaactattagttcttttgagagcatctctcaggtaaccttttgagagtatctctaaatatccctaggaggagcaacaattcaaactaacccacaactgggaattagatgatggctagctgaaaactaaataaatagctttctctctctctctctctcgctctctctttctctctctctctctctttcctcttccctcccattttcctcccttttttctttcatgctt

SEQ ID NO: 881532 - DNA, 646 bp, Homo sapiens
gtgtgatactataaaattataataaaaaacaacttacaatatgcaatttaaaatatattattaaattgaaaggatgaacaaataatatgtgcatcatctcaatggataaaataaagaatgttaaatatattaaatgagaagagcattacacatrggttgtggggctgtaggtaaatctattatttgtgcatttccaatttctaaaattgtagcaatgtacaactatttattttgtaatctaaggtactttttttttaaatttatgtttgtttttttgaaacgggatctagctctgtcaccagcctggagtgcagtggtgcgatctcagctcactgcaacctctgcctccctggttcaagcaattctcctgtctcagcctcctgagtagctgggactataggtgcacaccaccacacctggctaatttttgtatttttagtagagaaggggtttaactatggtggccggtggccaggattgtctcgatctcttgacattgtgatccgtctgcctcagcctcccaaagtgctgggattacaggctgaggtacttattcttaaaagaacaaaaagtcttgtatcccattttctcatgtttgtattatattgaataaagtaatataattaatgctaatatacaagtataa

SEQ ID NO: 881533 - DNA, 539 bp, Homo sapiens
tctcctaattacccaatcaaaagtacatcctctcttgcgtattttttttatcccatttcccaattttattttttaaaatctgtgaaatattgtatttactgggcatttttttcctcttgtttccctcctacctagtttagtgttgcatccccatcacttatgatattaccagaacataatggtcttctgtaaatttattaaatggataacttagataagaagaacactagtggktgcaatggatttgagagtaggaagaagaaaaaggataaataggtgaagcacaggtacttttaaggcagtaaagctattatgtatgatattgtaaagaaggatacatgacattatacatctagaaaaacccatagaatgtacaacacaaggagtgaacctaatgaaaatccgcagatcagcagattccctcctgagcctacaccaccagaaccctgggtttcaagcacaaaactgggtggctgtttgggcaggcactgagctgcaagagttttttcatactccagtggtgcctggaactccagtga

SEQ ID NO: 881534 - DNA, 622 bp, Homo sapiens
atcttctgaaatctaggtggaggttcccaaaccccaattcttgacttctgtgcactcacaggctcaacacagcatgcaagctgccaagccttggggcttgcaccttctcaagccatggccttagctctacgttggcccctttcatccatggctggagctgatgggacacagggcaccaagtccctaggctgcacacagcatgaggaccctgggcctggcccaggaaatcacttttttcttctaggcccctagccctgtgatgagaggggctgccatggmgatctcaggcatgccctggagactttttccccatcatcttggggattaacattcagttcctcattacttacataaatttctgcagccagcttgaatttatcctcagaaaatgggattttcttttctattgcattgtcagtctgcaaattttccaaacttttatgctctgcttcccttataaaactgaatgtctttaacagcacccaactcacttcttgaatgctttgctgcttagaaatttcttctgccagatatcctaaatcatctctctcaagttcaaagttccaaaaatctctagggcaggggcaaaatgctgccagtctatttgctaaaacataacaag

SEQ ID NO: 881535 - DNA, 622 bp, Homo sapiens
atcttctgaaatctaggtggaggttcccaaaccccaattcttgacttctgtgcactcacaggctcaacacagcatgcaagctgccaagccttggggcttgcaccttctcaagccatggccttagctctacgttggcccctttcatccatggctggagctgatgggacacagggcaccaagtccctaggctgcacacagcatgaggaccctgggcctggcccaggaaatcacttttttcttctaggcccctagccctgtgatgagaggggctgccatggagatctcaggcatgccctggagacwttttccccatcatcttggggattaacattcagttcctcattacttacataaatttctgcagccagcttgaatttatcctcagaaaatgggattttcttttctattgcattgtcagtctgcaaattttccaaacttttatgctctgcttcccttataaaactgaatgtctttaacagcacccaactcacttcttgaatgctttgctgcttagaaatttcttctgccagatatcctaaatcatctctctcaagttcaaagttccaaaaatctctagggcaggggcaaaatgctgccagtctatttgctaaaacataacaag

SEQ ID NO: 881536 - DNA, 622 bp, Homo sapiens
atcttctgaaatctaggtggaggttcccaaaccccaattcttgacttctgtgcactcacaggctcaacacagcatgcaagctgccaagccttggggcttgcaccttctcaagccatggccttagctctacgttggcccctttcatccatggctggagctgatgggacacagggcaccaagtccctaggctgcacacagcatgaggaccctgggcctggcccaggaaatcacttttttcttctaggcccctagccctgtgatgagaggggctgccatggagatctcaggcatgccctggagactttttccccatcatcttggggattaacattcagttcctcattacttacataaatttctgcagccagcttgaatttatcctcagaaaatgggattttcttttctattgcattgtcagkctgcaaattttccaaacttttatgctctgcttcccttataaaactgaatgtctttaacagcacccaactcacttcttgaatgctttgctgcttagaaatttcttctgccagatatcctaaatcatctctctcaagttcaaagttccaaaaatctctagggcaggggcaaaatgctgccagtctatttgctaaaacataacaag

SEQ ID NO: 881537 - DNA, 603 bp, Homo sapiens
tatttcatcacttcctatgttttttgtttttcccactttttaataatgtcctttgaacactaacatcttaaatttggaagtccaactgaccaattttgtcactcctttttggtgtctatgacgcctttgcctaacccgaggtcatggagatttgctcctgtttccatgtaagtcttagtttcaggttttacatttaggtatatgacctatttggagtgaacccttgaacagggtgtaaggaaggggttcaacttcattcttcatgtaactagccagttgttccagcaccattctttcccctacactttttttactgtactaaacatctaaaaaaaaaaatccytaaaggacagatgtggtgagaaatttgtgcgtaatttcttttgttgagatggagtcttgtgcacctcagcctcccgagtagctaggattagaggtgagcaccaccatgctggctacgttttgtatttttagtagagacagggttttaccatgttggccaggctggtcttgaactcccaaactctagtgatctgcctgcctcagcctcccaaagtactgggattacagatgtgagccagcatgcttggccttgtatgcaat

SEQ ID NO: 881538 - DNA, 664 bp, Homo sapiens
aaggaattagtctctggtgtagtgttactgtctttgtgtctgatgttagagcctgaagcttgaagtctataaggcatcaaggaaagagagataaattcaagtaagttaggggaaaacaagaagctgaaacccacaagcaggagctagtgcccatagggacagactaacatctatgtcaatattttctgttcttgatctcagtaaggtgtatatttagcagaagccagggatctttttttttttttattatactttaagttctgagatacatgtgcagaacgtgcaggtttgttacataggtatacacgtgccatggtggtttgctgcacccatcaacccatcgtctacattaggtattcctcctaatgctctccctccccagccccccacccccagacaggccccgatgtgtgatgttcccctccstgtgtccatgtgttctcattgttcaactctcacttatgagtgagaacataaggtatttggttttctgttcctgtgttagtttgctgagaatgatggtttccagattcatccatgtccctgcaaaggacatgaactcattttttatggctgcatagtattccatggtgtatatttgccatattttctttatccagtctatcattgatgggcatttggattggttccaagtctttgctat

SEQ ID NO: 881539 - DNA, 694 bp, Homo sapiens
aggaatggcaatgcatcaagagatggtatcaaaggaatctgagccacctgctcattcaatttacttgtattttatttacctgcctgagcttgatctcttatgcatcatctgcagtgacgatttatggcttctgggcatgccctgccttataatttggttggtaaaaaaaacactcaactcaaatagtttggtcaagccacatgatctcttgatgtcttataatcaaatttttaaatttatatagggcccaatagcaagtcagaaagtgtttctcataaggaaataaaaaagtatattatccgtgaaaaagggaaagctgtttcttcaaaacacaaggagtctcctgtgtcttattagacttcagcagatttgtcacataccttttatatatcaatgtaactgctgtaaggaagtttatatggcaacatagcttttattgcacaatggactcctaaagagctttcccttgctcttggcctcaacattgagagtcttatytgttacataaaacatgtgtaatatatcgtttttgaggtgtatgacgcaatgtgtataaatccattttaggcactggaatgattatctttatattgtacaaaaaaaatttaatgaggtgacaaggcccttaagctctgtgaggtttgactctaatctctggtttacattttccttactgtgattttgtttttttggt

SEQ ID NO: 881540 - DNA, 660 bp, Homo sapiens
tcaaatcactacactgtaaaatatacatgagatatatcatcttcaaagcattacaaatctaagaagacaaaatgaaaaccgtaggccaaaagtgagtggagatataaaacaaaaaagtaaagtcacttttaccctgaagtattttacattgtcaggcaaatttctgctctgtattttacgtggagtacaggggacagaatatgcagctcagagagaaaggctcactcagtgtgaaaaaacttttccttgggttcattgatcaaaattagctaaaggcagttgttgagctttgcagctccttgaggcaatgaaaacaaaattgggggtataatccaaaatgcagaaaataaaaagtgttgactmgcaagaatacttgaaaaatggagtcctcatgcattgttagtagtaatgtaaaatggtgcaggcactcagtaaaccagtctggcagttcctcaagtgaaacataccagatttacaggagtgtaacttattacgataacactgtaaaaagaattttgcattatctagtaatctggaagatatttatacctcaacatataattaataacagtagtctacattatatgttcacatatgcgttaaagagttttgcaaaattatatacctacacacaagttttatattaatgtctatctttca

SEQ ID NO: 881541 - DNA, 591 bp, Homo sapiens
ccttgaatttctgtatgaaatttaggataaggtataaaattcgaaaagcaaactgttgggattttaatagattgtgtttagatggtagatcaattttcagagtattgccatcttaaaagtattatttccaagcattaagtatgggagttcctacattaacttaggtttattatgtttcaacaatgtttaataatattcagtgtacaagttttctaccagttttgttgattttttttctaaatgagtcattctttttgattttattataaatggaactaatttcttaatttcattttctgattgggcatttttagtgtatagaaatataattgaattctgtacatcaatctataattgtatcaaactgattcattctaagggtattattttagtgaattccttaggattttctatgtgcaagwtcatgacacctatgaatacagatagtttgtcttctttctttccaatgtcggtccagttttttattattacccaagtgctctggctagaacctcaacttcaatagtgaatataagtatcaagagcagctatccttgtgtttttcctgatctttgagggaaagcattcctt

SEQ ID NO: 881542 - DNA, 588 bp, Homo sapiens
acaatttggtatgtttttgcagtgactggtatcggctgttcctttccatgtttagtgcttccttcaggagctcttgtaaggcaggactggtggtgacaaaatctctcagaatttgcttgtctgtaaaggattttatttctccgctgtttatgaagcttagtttggctggatgtgaaattctgggttgaaaattcttttctttaagaatgttgaatattggcccccactctcttctggcttgtagggtttctgccaagagatctgctgttagtctgttagtctgatgggcttccctttgtggatatcccgaccattctctctggctacccttaacatattttccttcattttaacmttggtgaatctgacaattatgtgtcttgaggttgctcttctagaggagtatttttgtgatgttctctgtttttttttttttttttttttgagatggagtttctcccttgttgcccaggctggagtgcaacggtgcgatcttggctcaccacaacctctgcttcctgggttcaaacaattctcctgcctcagcctcctgagtagctgggatcacaggcatgtgccaccatgcct

SEQ ID NO: 881543 - DNA, 610 bp, Homo sapiens
tcaggctgagggccaccagtttgcaacttctgcctgaaaggaaagtagaacttggctggaagacagaattatgaagagaccagatatagagtgagaaagaaaaaaaaaagtacatcctttgggctgagctatttctagcatgaaaacaggccaacttattttttatttattttatctcctaattgattccatattatcagcccctggaccttctcaaagctrccatgttttccacacttgagtaggagatttgtcctcaggcacagaatttctgggcagttcttgctaaaatgtcacagttttcatagttataattcatcacactcaagcacccatggaaacaattgtccacaacatgaactcagagatccaaagtaaaaatgtttttctctgccataataaacatctccttgtggaactgaagattaaagggagacatttattttactaggctattgactttactatggggtacctgaaattcccagggtgactcacaaagaagtgacagtgatatgtttgtgtctctttaaatatgtaccattgtgagtgtcaagctgcaaagataaatctttctgaggaataataggagactttctgctctggaaat

SEQ ID NO: 881544 - DNA, 598 bp, Homo sapiens
taaaaaataaagtttgcacctatctcacaacctatgaaaattataactcaaaatggataaaaaatctaaatggaacggctaaaaatataaaatgcttacaagacaagtcagaataaatcttcatcaccttggaattggtaatgaattcttaaatataacaccaaaagtaggagcaacaaagaaaaaatctaaataattttttttttktttttttttttttttttttagacagagttctgctctgtcacccaggctggagtgcagtagctcgatctcagctcactgaaatctctgcctcccgggttccagcgattgtcctgcctcagcctcccaaatagctgagattacaggggcccaccacccatgcctggcacctgtttattttattaaaataaaattttaagagcattcttcacaggacactaccagaaaataaaaatacacctcaggagataggagaaaatatctgcaaatcatacatcatacacctaataagggacttatatccagaaaatacaaagaactcttacaactcaataatacaaggaaaataattcaattaaaaaactgacaatggatatgaatagacgtttctcaa

SEQ ID NO: 881545 - DNA, 583 bp, Homo sapiens
acgtgcattgttagctagaaatatttaacggattaggactgcgtgtaccagcagacagacctgatttaagtttttcacatgatatgaattctccagggtaaaacccaacatgctggcatcattccaggttaaagcaggagataaaactggaagaattcagactgctccattcatttcaaacccagaaagcgaggctctccttatagcttattgtttcaggattagcgtatgtaatgttagtgccacactgaataccgatgagatggggcctcacttcattaagcatttgatatgtttaaactgctaccccatttcaaagcctatggaaatcatcgcacactgacaacttgtcctacaaacggaatgcaaaagcgtgacttcacsggctgcaggtgagctttctctctttctctctcaccttctagtcatttttaaatgtggaggaaaaaaatgtgctttttccaactcccttgtgtcttagagtaagaaaagaacacattttctaccatttccaccattttctggctcatgccaaagatattagataactcagtaaagccagatgtatcctattcctgccaga

SEQ ID NO: 881546 - DNA, 543 bp, Homo sapiens
ttttttttttaaggagagaggtattcttgggactctgggcttcttagatctgcaactttttgtctttcattaattttggaaaattcttagccattatatttaatttttttaacctgtttctctttttctttggaactctttttttttttttttttttgagacagggtctcatcactcaggcttcagtgcagtgacatgatcatagctgctaactgtagcctcaaactyctggctcaaatgatcctcctgcctcagcctcctgagtcggactacaggcacataccaccatgcctgattaaattaaaaaaaaaatatatatatatatatgtgtgtgtgtatatatgtgtgtgtgtgtgtgtgtattatacatatatatatatatatatatagagagagagagagagagagagagagagagagagagagatggggtcttgctatgctgcccaggctggtcttgaactcctggcctcaagtgatcctcctgccttgaccttggcctcccaaagtgctgagattacaggcatgagccacaatgcatgg

SEQ ID NO: 881547 - DNA, 585 bp, Homo sapiens
tggtcaaaaccattcacttgcacatggaaagtattcaatacacaatcattatcttgcctcagagccacattaactctattgctctctgctaaaatacaatctatgggaacctcaatcaacttgacattctggagaatgtcatgctgcagaaaactccacagaaattcataagtctcccacatttgtgaatattccaaggatctaaagatctgggcaatgctgggaattccatttaaaggtaataatgaaagctgttgtaagttgtacttcaaaaaaccaagaataaagcacaagcctttcaaaacctttttgattttgaaagcaacatactcaatatttaggaatattacatttgtcaggtaactctgaagtgacwgttttaagtggatctacagcaagggagaactctatagcaaatttagactgtatataaattgccctgacactcaggccctactatctagtagagccaatggtgatacaggtagccaaggtgaataagaacactatgtggagtctctggcaagtcacaaaaggagagtcatagcatctgcattctggagcaaagctttgtttctgctgcaa

SEQ ID NO: 881548 - DNA, 582 bp, Homo sapiens
atatcctctcacaattaatatgttggattcctaacccccaaggtgatggcattaggaggtgagacctttgggaggtgattagttcatggaagtggaatcttcttgaatgggattaatacccatataaaataggcccaatgttctgacttcaaactatactataaggctacagtaaccaaacagcatggtactagtacaaaaacagacacatagaccaatggaacagaataaagaactcagaaataaaaccaagcatttacagccatctgatctttgacaaagtcaacaaamgcaatggggaaaggacttcctattcaataaaaggtgctgagatacctggctagcaatatgtagaaaaatgaaactggacttctaccttgagttgatacaaaaatcaactcaagatgaattaaagatttaaatgtaaaacctcaaaacataagaattatagaagaaaacctaggaaataccattctggactttggctttggtaaagaatttatgactaagtcctcaaaagcaattgcaacaaaaaaattgacaagtgggacctaattaaactgaagagcttctgcacagcaa

SEQ ID NO: 881549 - DNA, 619 bp, Homo sapiens
gagagagagaaaagagagattggaagaacttgtgttggctctctagttcctgtttctttgcctgggaagcctgggtgtactctctgttgcaagattttgtgagacagattgatatcctcaaaacaaattcaacttcgttctttttttttttgatgatttttctaggtattttttgcaactgttttttttttttttaataaagttctcgggtacatgtgcacaacgtacaggtttgttacaataggtatacatgtgccatgttggtttgctgcacccatcaacttgtcatttacattaggtatttctcctaatgctatccctccccaagcccccaaccccgtgacagttgctggtrtgtgatgttccccaccctgtgtccatgtgttctcattgttcaactcccacctatgagtgagaacatgtgatgtttggttttctgtccttgtgatagtttgcttagaatgatggtttccagtttcatccatgtccctacaaaggacatgaactcatccttttttatggctgcatagtattccatggtgtatatgtgccacattttcttaatccagtctatcattgatggacatttgggttggttctaagtctttgctattgtgaa

SEQ ID NO: 881550 - DNA, 626 bp, Homo sapiens
aaaggaattcattatcatttcagggcccaaacttttacttgatttgctaactgccccaactatcagttcactaaactgaaaacaaactacttttatatacaatctactaatttattaaccactgatgagctgtggctgctacagactgtctgaggtcacatgaaatacttaacatcaaaatcctccattttcatctagaaatgaagtggaacctccacttacttttcctaaatagtaatgttgcctctgtctgctagaggaaggagacaatggataaaaatcattccagtcaaaggcagagaattttattttgttrttttgtttttttaataaaaatcaatgcattggctagccagtctttaggaattattttggcaaaacagagaaggtcactgattattagacctaacagtgcatgagagcacactttctggtaaatccaaaagaggagtgtgtctggtacttggccatgcatttgatgagtttgaattaggatttttatctgtaagtacttgaaaagtgattctcagactagctctgtttaccaggagaagggctgtactgtcatcttctcgaatatttagctagaagcacattagaaacctaaatgctacaataagctattc

SEQ ID NO: 881551 - DNA, 630 bp, Homo sapiens
gttactcttactcagaaggacattttatggttaccagataagaggattttaaaagcaaatacttagtagtagtattacaatcatgacagattcttacctctaaaattatttgcaatgtagaatcatataaatcccatgtccaaaatatttcttgactatttatgttcattttagttgtcactaattcattttcttaatttaaagtggcatgattgcataatcagactgctgcaaccatctcccaactcatatctctgcctcctttttttgcgagggttgactttaaagacttgaagtcatgaaaagtttatagctccctccctaatcctctacataatttgaacaaaactatgctgtatattttttaaagtttttaacatgtgattttggaaaacagtttgccttttactggttttcaaggtaggcatgtgacttttttcatttatgtagcrttattgtttggtacagaagtgcctctttgggtgctctgcatttctatattaattagaatctagaactaagttctatagatttaaaaaaagccataaaggtcacagcttcatattcatgaatcttaattaaaatttcaagctcaagaatcactctgcatggtacaacagaaatgccact

SEQ ID NO: 881552 - DNA, 646 bp, Homo sapiens
ctgattctatacatcccttttaaaaaacatgtacgctctgaatttgataagactggtttattgctaacaattaagccctttacactgtgccagcctctgtcctgaaaagcatcagtactatttctctgtgaaaacattcagagttggcttcagtagcatttgatacatttcttcacagttggtatagaaaaggaagatgagatytgaactaagaaccttttcccctcattctaatgcagggttttaaactagatagcgaggacatttagaatcatttggttggtttataaatacaggttgaacattccaaatttgaacaccagaaatgctccaaaatccaaaacattttgagtgctgacataaggaaatgctcattggaacatttaggatttctggacttgggatgctcagccagtgagtataatgcaaatattctgaaatatgaaacacttctgatcccaagcattttagataagaatactcaacctataatgtgtaatgagttgcgtattttggagactgcatcacctgcacagaaacctcctctcactcacacttcaccacttttcctaacttgcctgatgtgaataatcacctagagtgtattttaaaaaacagattcctgggcctcaacccagacctactg

SEQ ID NO: 881553 - DNA, 577 bp, Homo sapiens
gagccaagactccaaggtacctcacttcaaagagctgctcttctctccagatcttgaccctcatatcctggctgctctaacagttgccccaagtaatttatagattcgatgctatctccatcaagctactactgactttcttcagaaaattaaaaaaaaaactactttaaatttcatatggaaccaaaaaagagcctgtatagccaaaacaatcctaagcaaaaagaaaaaaactggaggtatcatgctacctgacttcaaactgtactacaaggctacagtaaccaaaacagcatgttactggtaccaacacagatatatagaccaatggaacagaacagaggccttagaaataacaccacacatctacaaccatctgatctgtaacaaacctgagaaaaacaagcaatggggaaaggattccctatttaataaaygatgttgggaaaactggctagccatttgcagaaaactgaaactggaccccttccttataccttatacaaaaattaactcaagatggattaaagacttaaacataagacctaaacccataaaaactctagaagaaaaccta

SEQ ID NO: 881554 - DNA, 704 bp, Homo sapiens
ccatgggactcacctgcttctatgaggttcctgtggttttttctgggttctctgttggtaaggaccttcttcctttctagacccccttatcttctcctctcaaagcccttattaaaatgctctgtacttgtttgatttgctgtctytttccttagattgtgagccctttgaggaaaagaacatcaatctagcctattggaatgactcctcttggtttcagagggaaatggtgtaaaagtttgcattcagtcaacgtgtatgtgtaggcagttgcttggcagaatggttatttgaactattcgccagtggctcgagattttatctctggtaaatgagggacttcatcatcaactgcatggaattttctctggaacaatgagctttccacccaagcggtcctgggcaaatcccatcaccctctcctttttcgtaagcttctgaattgctcattaaagggcactgtctgggttttaatagtatttggcccatcactagcgctaacactagatatccattggttttgtctgcccgacatcgcttctcctttcttttggtagaggaaagtgtcttcccgtggggaacccatttcctgtggtttgggtgggctggctgtcatcccatcctgttacaatggtgggacaaaccccaggcctgacaatcagagcaccccattgctctggctggagtgattggcttagggacag

SEQ ID NO: 881555 - DNA, 674 bp, Homo sapiens
tacacaccccccgacggtcacttcatttgactcattgacctcccttctatgtcaccccacccaggcactgagggagaaggggagattgtgatcccagaggaagtctagctccatacagaaagtgcacactcagctgctgtgtctttcgggccatagtctcagaacataagtaaggctttaggtggctggatggagtgtggaaaatgatcactgtggctcttatatgaaagtacagcacaaaaagagacactttaaagaaaatagaatggtttagtaaaatgcaaaataatttttcatcttaatgatgggcctttgcctctttagacatggtcayttcctcatgactttatcatcgtatgaaagctcccactaggatattccattaggagatcccaatgtatttcttagaatgaaacacattgatctgacatctttggcttcccttcggcaccttcactttaactttgaattaggtctactctgacctctggaacctcctcagtgcatgtattctaagaggtgagtccagtatcactcacaagtcattgcatactatactgatgaactgtagttgcaatgtgaaatgaagtctgctctagggtctgacaatttggggacacttaaggtcttcccacctccatggtggtacttaaacaattggcctttctttcaaa

SEQ ID NO: 881556 - DNA, 633 bp, Homo sapiens
gatccttttcaaatataattcagattgtgtcctttctctgtgcagaacctcctcgccatggctttctatttcatcctgattaaaagccaagttcttatcatgacctgcaaagtctctctgatctcctccctcctgctctgtaactttcctccttactctttttcctcactcactgtagtccagacgcactgtcagttgctggacaygctaagcacacctccatcttacagagcattaccacttgctgtttgtttttcctccttttttccattcaaggcccccccatgaccaccctgtaaaatagcgccctcccattgaattgttctctagcctccttatcctcatgtactttcctgctgagtccttatcgctgtctgccacattattcataaacattctcttaaagcctgcttctcccacaaaagtgatagcggggctttgttttagctaccatatttattatagtcctagtacctgaagaatgcctgcacactgtaggtactcaacaaatattatgtgaatgaataaataatcaattttattcctctcacatctgccccatccctagcagacttctatttcagagtcctctgagatttaaggaatggaatacatccattttctgcctctgta

SEQ ID NO: 881557 - DNA, 656 bp, Homo sapiens
tttcggcattaactttctttcagtatacattgaaccaatttcaggcctacagttttaggtgtaatataataaccacaaatatcatttggttttattctacgaggcactgagtgttagatttccacaaatgaatgcatcctgacataagaattgtacytcccgccttgattcctggggagatgtcattgcagatttgccactaatctttaattcattcttccaaacactgcatttcattaggcctttaggcttagggttgggatggtgctttatctgtgctgtcggtcaccacgcatagagtatccgggcgtaaagagataattgattctctttatttcatcctcatagctttgtattgcaaagttttgaggctatgactttaccttgtatttaagtagagattacacaacctgctgaaaggaagttgtcggggattcctaggttgaataagaaagttggactaggaaataagacctcacataataattataattgcctatagcttagtcttacaacttgctggatacttttctaggtaagttgcatacatcatctctaagccttactatagtgcagagagatagattatcagggaggaaaacgggaaaagtggatgcagttgagtaaaatgattatccacatgggctgaagtcagg

SEQ ID NO: 881558 - DNA, 608 bp, Homo sapiens
aagacttttaatgcttctcccgttgtcatctacacccactactgctaccgctgtctctcttcatcattaaagagggctttttgtttgcccagttcataagagcctctgccctcatcatgaaccatagccctggaatcacagtgacacccagggctttgatgataatggctcatatttcttttctctatcttagtgacttaaaaacatakccttaaaaataagcaaagctgttgtaatgtttaataatgactttttaaaatggaatactatgtttttctgaaattgtggcaaatttattaatcaaacttaggcaataaaatgaagaaacgtcatgaagttatcttttgattatatattaatcttctaatcagttggttactatcaccttgccaaataacacagagtcctgataaataggagatttagtggttattggtctcgacatcatcagccaacagctggttttaaatgagtcctaagctctcacagtttcaataagccacccagaagctctgcttcacattttcataaaattcctttctcctcctagtgtattcgagtaaattttcataacagctgggactatgcaaaactgatagcatcttaaa

SEQ ID NO: 881559 - DNA, 655 bp, Homo sapiens
ggcctaaagaaaacaaccccaaactttcactcagtatgtcttatgcagacttttactcactattctcagcagttctgcaaaaatagaaatctcctttccaaagatcacagcctgttccttctctcactaactttcactgtctagttatgtgacagccttacttctcaattattttgcttataagagataactaaaacaacttgaatgtgatgactatccatgctttcttttccatcaagtcctcatgcctgtctagttactccacctggatatattttactatagcagaaacaaggtcgagaacaatacctaccagggaagaaaatggtaattcaaagaagttttgctgtctcccagcctcctttttttcatattttttttttactagaatagctttctccagttaactcattgcacaaattcgggattttacttctagaagtttccatgaatagttaagagtcactcatagcatgatggaacagttcagactgaggaaattgttggttmgctatggtaggaggcagggatggagggagggagggaggtttgcctcaggaaccatacctagcccagggaaggtaaaaaggcaagagggttctcttaccaaaactggactttttcttctagactttcccagaactgcagttaacca

SEQ ID NO: 881560 - DNA, 614 bp, Homo sapiens
caccatgttagccaggaaggtcttgatctcctgacctcgtgatccaccctcctcagcctcccaaagtgctgggattacaggcatgtgccactgcacccagccaggtttttcttaatataagattgtgccatctgtgaacaggagtattttgatttcttcattcccagtttggatgatctttatttctttctcaaacctaattgctctggctagtacttacctagtagtatgttgaataaaagtagtgaaagcggttaaccttgttgttccagatctcaaaggaaagggtttcaatttttctccatttagtatgacaatagctatgggtttgtcacgtaaggctttattgttttgaagtatgttccttctataccaagattgttgagagcttttatcctgaaaggrtgtattatatcaaatacttttttagcatctatggaaataaacatttttttaaaaattctgttaatatgatgtatcacatttacagatttaaatatgttgaaccatctttgcatcactgggatgaatctcatttgatcatgatgaatgatctttttaatatgttattgaattatgtttgctagtattttgttgagaattttgcattttat

SEQ ID NO: 881561 - DNA, 692 bp, Homo sapiens
ctttataattctaacctagaattaataatttagtaacagtaattgaaataataaaataaaaaccataagattcgtttaaaaatacaatagatgctgtgttttcttgcttaatatcttattttaaaatatcatatgattaaatttagaacttttatgaaacactagaaaaatgaagtatgcaagttaggaaagttgttgaaatgttgtgagtaaaattatacatttatttctgaaaggaaaagaacacatttatgaaatatattttgtaaattcttaacaaaacctagaaattaactaaacactattttccccagaaaactgagcagtagaaatattatttaatacatgctgtagtatattttaagaaatgatctatcatgcgtcagggcagggatgaaggggaaaaagtatgataattgaagatattgagcatttatgctgtgccaagaacattcaggaatgttaacttatctgaaatttgygacagtacagtaagtgataatattctccaatttacagaatgatgcaacttaaaatcttagtggtccctaaatctgcctttctgagatactcatttttgcctttgcttataggtgaaactacatacctatccatctaatctctctctctctctctctctcctctatctatctatctatctatctatctatctatctatctatcatctatct

SEQ ID NO: 881562 - DNA, 566 bp, Homo sapiens
taattaattaatgttcaataagtaaatcaaccgttttcttaaatttcattctatcagcagagaaatttgttaggaaaattttagtcacaatctagataacatatgtttatgttgaggtgtacaaatatattttcaagtgccattttttctggatctcaaaattgaacaraagaagccgaaaatgtacattcattaatttatctgataaccaaatgatgtcttcattttggaaacattatagtgaggagaaattgatttatcctctagaataattgaacacgttccctagaaatgggagcagatttaaagtcacaattataatttttttctgtcctaatctttttaatatggaacagtttatacatctttgctatgcacaagattccctgaaggatatgttaaaaatatagtttcacatccatacaaaagagttggattgcataggtgcaggaatttgtaacttgtattacattgccttcctttaattttctgtattaactggatatatgctgcctttttttttcttttttcttttcttttcttttttttttttttttttttttttt

SEQ ID NO: 881563 - DNA, 591 bp, Homo sapiens
taaaacaccaaaagcaatggcaacaaaagccaaaattgacagatgggatctaattaaactaaagagcttctgcacagcaaaaggaactaccatcagagtgaacagacagcctacagaatgggagaacatttttgcaacctactcctctgacaaagggctaatatccagaatctacaaagaactcaaacaaatttacaagaaaaaaacaaacaaccccatcacaaagtgggcraaggatatgtacagacacttctcaaaagaagacatttatgcagccaacagacacatgaaaaaatgctcatcatcactggccatcagagaaatgcaaatcaaaaccacaatgagatatcatctcacaccagttacaatggcgatcattaaaaagtcaggaaacaacaggtgctggagaggatgtggagaaataggaacattgttacactgttggtgggactgtaaattagttcaaccattgtggaagacagtgtggcgattcctcaaggatctaaaactagaaataccatttgacctagcaataccattactgggtatatacctaaaggattataaatcatgctgctataaagacacatg

SEQ ID NO: 881564 - DNA, 691 bp, Homo sapiens
atttagtagaggaatgactagggaagagtgaggtgatcaggtaatagcttttctttctggttaaatgttttcttactagatctaatattgtcaggttttattcatatgtctgtaaatctctcacaatttatttttaaaaattcaataaacctatttttctgatagaaagcttattatttacatagttttgctttttatgtgcttataaaaatagaattttgttkacttatctattagcatgaattaacttttttggctttaaatgtagctattagcaaattatggcattacagaaatgttgtgtttacttgtgcccagccatattgaaatatccttttaggagttcaaatattttaatgaatatgtaactttttttctcagctattagtcattttgctaaaacaagaataccttacctgtgtcaattacatacctttcaaaatagaaatgcataaaagtataattcctgaggaatttatcattattttcaatagcaagcatataggaattagtaacgtaacaaggttatttcctatactttaagggttatttaaggttgtatgaggttagaatacagtttttacaccaaacctacaagattcaagtgttttaactccactgatattggtaaatgtatatgaaaccttcaaacatgtttctcactggtagtatttctgtataaaaatagtca

SEQ ID NO: 881565 - DNA, 679 bp, Homo sapiens
gctgtattttgcttgtcactgctttgaaagatgcttacggggggaggagccaagatggccgaataggaacagctccggtctacagctcccagcgtgagcaacgcagaagacgggtgatttcagcatttccatctgaggtaccgggttcayctcactagggagtgccagacagtgggcgcaggccagtgtgtgtgcgcaccgtgcgcgagccgaagcagggcgaggcattgcctcacctgggaagcgcaaggggtcagggagttccctttccgagtcaaagaaaggggtgacggaggcacctggaaaatcgggtcactcccacccgaatattgcgcttttcagaccggcttaagaaacggcgcaccacgagactatatcccacacctggctcagagggtcctacgcccacggaatctcgctgattgctagcacagcagtctgagatcaaacggcaaggccaaggaggcaacgaggctgggggaggggcgcccgccattgcccaggcttgcttaggtaaacaaagcagctgggaagctcgaactgggtggagcccaccacagctcaaggaggtctgcctgcctctgtaggctccacctctgggggcagggcacagacaaacaaaaagacagcagtaacctctgcagacttaagtgtccctgtctgacagctttgaagagag

SEQ ID NO: 881566 - DNA, 679 bp, Homo sapiens
gctgtattttgcttgtcactgctttgaaagatgcttacggggggaggagccaagatggccgaataggaacagctccggtctacagctcccagcgtgagcaacgcagaagacgggtgatttcagcatttccatctgaggtaccgggttcacctcactagggagtgccagacagtgggcgcaggccagtgtgtgtgcgcaccgtgcgcgagccgaagcagggcgaggcattgcctcacctgggaagcgcaaggggtcagggagttccctttccgagtcaaagaaaggggtgacggaggcacctggaaaatcgggtcactcccacccgaatattgcgcttttcagaccggcttaagaaacggcgcaccacgagactatatcccacacctggctcagagggtcctacgcccacggaatctcgctgattgctagcacagcagtctgagatcaaacggcaaggccaaggmggcaacgaggctgggggaggggcgcccgccattgcccaggcttgcttaggtaaacaaagcagctgggaagctcgaactgggtggagcccaccacagctcaaggaggtctgcctgcctctgtaggctccacctctgggggcagggcacagacaaacaaaaagacagcagtaacctctgcagacttaagtgtccctgtctgacagctttgaagagag

SEQ ID NO: 881567 - DNA, 619 bp, Homo sapiens
ctgagaatgtctatgtctccagtgtctctgaaagaatgagaacatctctctggatatgacaaatttgtccagaatccctctcataagggcagcagaggatgggggagcctcatgggtacccaggcagcagaagctggaagtgaactgacatgaatggggcttgaggatgcaatctgcccctatcctcaggagtctgagggcagcacagaggcagggtagtggggaaggaaaacatcaggcacataagatgcccctcacactcaactccctggtcacaaactagagagtcaccagcccccatcatgagcccctcttctggatgcagggcctgcccttctgtggaggtcttaggagtgatggcataagaggacagagacctaggtataagtcgcaggcatctggtawtgaacagagcactccagtgattagcttcctctctgggaatacaaaccaaacccaggaaatgtgcacagccttgtaaaaccactacaatttcagattgggtttatctggtttattgcttgatatgcaattagaagtgtcttgaacacatcagctttcagttcttcccacggttgagtatttaatgacctgtgaatgaaccctgagaagatgcaac

SEQ ID NO: 881568 - DNA, 541 bp, Homo sapiens
gccacgaagcagagataagccacaacctaatatttcaatataagctaaagaacattaagaaaacaatagaagcaatgaaagagacttataaattagaattaggaaaatattagaaatgatatggctaagtgacagtgagacattttttaaaatgctaacagagctcaagaacaaatgagaaagaaaacaaaaagcaaaggaataaaaaggaagtttcagaaattaaaaggcctccctagccagtgttgctagaaagaaaagtttagctttgccaggggatgctaagacaaaggaagctgaaatcagcccatcatacgcaccctacctaattagcacacctctccacctgctccttcattacatttccccrtcaagagctcatcacaacctgtttgggagtgatatggtttggcagtgtcttcacccgaatctcatcttgaattgtagtccccataatcttcacatgtcatgggagggagctggtgggggacaaatgaatcatggggtcagttacctccatgctgttcttatgatatgagtg

SEQ ID NO: 881569 - DNA, 600 bp, Homo sapiens
tgtagttcctgctttgggggcattaccctgcttatcattgtccctgaaatatgggaaggaaagaaaaaaaaatcatttctcttcagccagtaaaacaactccagggaaaagagatgactatttagacaacagtcagctgggtgattgtagataaaaagtctacttcccatattatgtcactcagcattcatggttgcaagcaacagaaatcaactctggctgtcttatgcaaaatggagatttttctggaaggagattggtgggaaattagaagagcagacttggagcaagggaagtcaagcatcagagacaaccacatgctggtcaggaggctgtcagtgacactgatacgtcactgctaccatcactgctctaccactgctgggtcaagctgatgtctgccaagccaccatttgctatcacatactcargatgcaacatcctgcctccctgctgaaccaggaatattggaaggatctaagctccaagtttccagagtggaggacaggcattgagaattgctttcctgccaagatcatacacactggaggagagacagcatccctcttggtcaagggggttggacgctggacaatcaga

SEQ ID NO: 881570 - DNA, 583 bp, Homo sapiens
ggcaggttataggcactgttttccctttccaaaaatgggagaaaggtaagtgcctcgagagccctgtggaggggcctggtgtctcggggctccctgtttgttacccctgctctgccctacatcttcccagatggaattctggccacaagttatcaggttgcagatgaatagtgaatactttttttgaatttcatcattcttccccctagaatgactcattacaaattctgcgtccatgtgatgcattaatattgattaaraaacaggtgctctcagattcaattagcaaaactgcaatgattcacacagggttacgctggaaaattgggggaaaatatgcaggtgtgcaaatgagcctaatctgaaggtgctgcagcaggtcttgaaaaatgcatcccctccagcaaatgctttcctggaattaccctttgtttgggtgacaaatggacttgccatttcaaccaaacagtgaccccaaacctctgtggcttaggatccagtggaacttcacatttggagtcagacttctatgtcgggattcccaagctttcctgttgaaccactgcagctgtttgtgaaacac

SEQ ID NO: 881571 - DNA, 620 bp, Homo sapiens
ggggaaaactctatcagttagggcctgactggtaaagagatctcaaaggaggtgcctggaaattgccttagctgaggcccctaatcaggaagccttcaaacagaggcacagggctaggaatgcagatatgcatatgtacatggttttgggagtgagctagggggtaagtctttgactgtatgtccctcagaaagttacagtgcactgactatgtgccatatcttatacaggcaggcagcttcccacatgaggcttgatgagcaaagcactgtaattgcctagggttgacctaaaaacaaatcacatatagaagttttggcctggaggcagactcttcatgtacattttatatatatatatatatatatatatatatatatatatatatatawaatataccccatgatacagtaatgttactatgttttgttaaattttaacttttagttaggtttaggaggtacatatgcaggtttgctacctggatatactgtatgatgctgaggtttagggtacagataattccatcacccaggtagtgagcatagtacccaataggtagtttttcagcccttgcccacttctctctctcaccaacagtagttcccagtgtctattgt

SEQ ID NO: 881572 - DNA, 626 bp, Homo sapiens
gtagcctacttgtagatagtatctacttggatctctgtcttttatttgtgtttaggccatttatatttaatgtagttattgatatggttttattaaaatgtcctaactgttttctgttttatggtttctttttcccatctttctttcttcttttggattgatgaattatcattttatttttctactaatgacttgttatttayacattttattaaaaacagctctttccctagggtttacaatatatatatttagtaaattgaaggtagaccagtaaactatcacacaacaatagaaaattaatgtttcacattgtactgtaaagatcttacacaatacattcccaattccttttctactcacaatattgttgttatattcattgctaatacttttgttttagacagtaataatccacagcaattaaaattagcaactgagttttattatactttaagttctggggtacgtgtgcagaacgtgcaggtttgttacataggtatacacgtgccatggtggtttgctgcacccatcaacctgtcatcaactttaggtatttctcctaatgctatccctcccctagctccctcacccccaacaggcccctgtgtgtgatgttcccctcc

SEQ ID NO: 881573 - DNA, 600 bp, Homo sapiens
aaaaaatggaaagcagaaaaaagcaggggttgcaatcctagcctctgacaaaacagactttaaactaacaaggatcaaaaaagacaaagaaaggcattacataattgtaaagggatctattcaaaaggaagagctaactatcctaaatatatatgcacccaacacaggaggacccagattcataaaacatggtyttagggacctacgaagagacttagactcccacacaataatagtgggagactttaaaaccccactgtcaacattagacagatcaacatgacagaaaattaacaagaatattaaggacttgaactcagtcctggatcaagtggatctaatagatatcaacagaaatctccacctcaacacaacagaatatacattcttctcagtaccacatgacacttactctaaaatcaaccacataactggaagtaaaacactcctcagcaaatgcaaaagaactcaaatcataacaaacagtctctcagatcacagtgcaatcagattagaactcaggattaagaaactcactcaaaaccacacaactacatggaaattgaacaacctgctcctgaatgactcctgggtaaatca

SEQ ID NO: 881574 - DNA, 613 bp, Homo sapiens
acctcagcaaagtctcaggatacaaaatcaatgtgcaaaaatcacaagcattcctataccccaacaacagacaatcagagagccaaatcatgaatgaactcccattcacaattgctacaaagagaatagaatacctagaaatacactaacaagggacacgatggaactcttcaaggagaactacaaaccactttcaagaaaataaaagaggacacaaacaaatgaaaaaacattccatcctcatggataggaagaatcaatatcataaaaatggccatacagcccaaagtaacakagattcaatgctattcccatcaaactaccactgacattcttcacagaattagaaaaaaactaccttaaaattcatgtgaaaccaaaaaagagcctgcatagccaagataatcttaagcaaaaataacaaagctggaggcatcacgctacctgacttcaaactacactgcaaggctacagttaccaaaacagcatggtactagtaccaaaatagacatatagaccaatgaaacagaatagagacctcagaaataagatcacacatctaaaactatctgatcttcgacaaacctgacaaaaacaagcaatggagaaagga

SEQ ID NO: 881575 - DNA, 617 bp, Homo sapiens
atgctgtgtttatttgatacgttagcaaatgccatattaacaaactaagagaaagttttttattttgcttacattttaatagagtatccaagaagaaaaaaacaaagcatattctacaataccaaaaacaagaaagtaactctcatgtaaagcagcagtgctaggtatgtttcactgaacagcagtgcataagttgttccttgggggaggaaaaagtatatcttggtaaaataactttaagaaattcagtatgctatctccactgggatattaacagtgaacatcagcttagtaaacactccaaaaagtcctagagtaaaaaaatctgtttaactctgtttcacttatcattacttttagttctgtgaaagtagttaggtatctcattttaagacatgctgaaataaaactttaaattctcatagtttttttgtttttgkttttttttttttttttacttaggaaattcataatgactggcattgtaacaactgtcacacaagtatagaattatgttgttgatatggtttggctttgtgtcctcactcaaatctcatgttgaattatgatcttcattgctgaaggaggggcctattgggaggtgactggaccatggg

SEQ ID NO: 881576 - DNA, 617 bp, Homo sapiens
atgctgtgtttatttgatacgttagcaaatgccatattaacaaactaagagaaagttttttattttgcttacattttaatagagtatccaagaagaaaaaaacaaagcatattctacaataccaaaaacaagaaagtaactctcatgtaaagcagcagtgctaggtatgtttcactgaacagcagtgcataagttgttccttgggggaggaaaaagtatatcttggtaaaataactttaagaaattcagtatgctatctccactgggatattaacagtgaacatcagcttagtaaacactccaaaaagtcctagagtaaaaaaatctgtttaactctgtttcacttatcattacttttagttctgtgaaagtagttaggtatctcattttaagacatgctgaaataaaactttaaattctcatagtttttttgtttttggttttktttttttttttacttaggaaattcataatgactggcattgtaacaactgtcacacaagtatagaattatgttgttgatatggtttggctttgtgtcctcactcaaatctcatgttgaattatgatcttcattgctgaaggaggggcctattgggaggtgactggaccatggg

SEQ ID NO: 881577 - DNA, 608 bp, Homo sapiens
gtatctccttgtggttttgatttgtatttctctaatgatcagagatattgagcttttttttgtatgtttgttggctgcatgtatgtcatctattgaaaagtgtctgtttgtggtctttgcccactttttaatggggttgtttgtttttttcttgtagatttgtttaagttccttatagatgctagatagtaaacctttgtcagatgcatagtttgcaaaaattttctcccattctgtaggttgattgtttactctgttgatagtttcttttgctgtgcagaagctctttagtttaattagatcccatttgtcaatttttgcctttgttgtgattgcttytgtcatctttgtcatgaactgtttgccagttcctatgttcagaatggtgttgcttatgttgtattttttccacaatgaaatttaaaatacagtttatctagaaataaattgagttaatgatatgcgagagggcttcaaagacaactataaagcattatttgtagaaattagagaagacctaaataaataaatgatattgtaaagatgtcatttcttctcaaaatgatctatagtatctatgtattcccataaaatacttcaataatttt

SEQ ID NO: 881578 - DNA, 580 bp, Homo sapiens
catgctctgagattgagcagggctttttcagccattgtaaaaccagtgaggttttactgtcaatgaaataaacagtgttggagggctttgagtggagcagtgatgagttatgacttgaattcgtaaagattttttctggctgctggatggtaaacaggctggaaataagcgaaagtgtaagcagaaagaccactctggaagtaatgacagtaatccatatgagatatatgggggaggggacagtggaggtggttggaagtggttgaattctcgatactctttgaaagtagaagcatcaagatttcctggtggagcagatgtgagttgtaaaagaaaraatctcaaggatgactgagactcgtggctgagaagaagtatgacatgtattgacatgggaaagcctataggaagaaaagttgggcaaagctaggtcagaaaaatcaagtgctttcaacttgtgaagtttggaatacgtattagacatttaattacagaattcaggaatttagaaagatatctaggctggagatggagatgtacatttgggagttgtgtggatggtgtttagtcctgagaccag

SEQ ID NO: 881579 - DNA, 580 bp, Homo sapiens
catgctctgagattgagcagggctttttcagccattgtaaaaccagtgaggttttactgtcaatgaaataaacagtgttggagggctttgagtggagcagtgatgagttatgacttgaattcgtaaagattttttctggctgctggatggtaaacaggctggaaataagcgaaagtgtaagcagaaagaccactctggaagtaatgacagtaatccatatgagatatatgggggaggggacagtggaggtggttggaagtggttgaattctcgatactctttgaaagtagaagcatcaagatttcctggtggagcagatgtgagttgtaaaagaaaaaatctcaaggatractgagactcgtggctgagaagaagtatgacatgtattgacatgggaaagcctataggaagaaaagttgggcaaagctaggtcagaaaaatcaagtgctttcaacttgtgaagtttggaatacgtattagacatttaattacagaattcaggaatttagaaagatatctaggctggagatggagatgtacatttgggagttgtgtggatggtgtttagtcctgagaccag

SEQ ID NO: 881580 - DNA, 626 bp, Homo sapiens
attaaatgtactgagacactttctgtattgtgcccaagagctgagttattttcctatcatttatgttgaacatttttttttctaattccgtttatataatgtgtaaataaaaggaagaaaactatgaaagaatgtagggttaagagtataacagaaacattttggagccgcagccaaatgcctgaggaaatagggaggggatttcyaaagagactttagaaaggaactatgggaatcagagtctagacatctgccaagtccagaatacactggcgcccttcacagaagtaagtatgtactagtaaaagcattattctctattatttctcacctttacccaatttcaaactctgtgggaatatggggcagtggaaagactagaactactcattttcaaaaggtagctaaacataccacccttccccaaccatagactttccacttgaaacagaaccaaactggagagaaagacaagatgcctcaacttacagtcgttgagagtattaattatatatgactggacattatatatacttatcccaggctgtgttttatgtcttgttcataagacattttgctactaagagtgaccagaaaagtcaagggactgactaagtgttcactca

SEQ ID NO: 881581 - DNA, 632 bp, Homo sapiens
aaattgatgagatggtcattcaggttttcctttggcgtggaagcatatggtaacatattttcagattccatagaaaggctagtcattcaccatcttcaataatggacatacatagggagtgggaaacatatgcattgaatgtcagttctaagacctccttgatactactatgaaaattatttatttaggttttccagtgattatcttttctactattttgctttctataaaaaggggaagagctgctataaagatctgtgggttcactttcaatattacatggctcaattttggaacatttaagataattactactttatgtggctaaaatatgctcaaagaatctatttttggtgatgtttttaaaagycattcttaattcaatgggaccctgttgtcttgtatttttgacaccatttctactattatggcaactggtcatcttttaataataatattcactaacttcttgcttgaactgatcacactttagggacggattatatgaaagattattgtgctcactacctaatgcttattcttagtaacatccaataatgtttcaagtggcctgtgtaaaccttgctccattttttaactaacaattttgatgaaatatagaaaactgtccc

SEQ ID NO: 881582 - DNA, 631 bp, Homo sapiens
cagactaacatggtcagagtgggaagatatgacacattgctaagggataaaaaagccttcacagagatagctagggctcagggataggtaggcattcagaaggtaaagttggtgacacagagtttcctaatattgcaagaattgtctgtgtgtgtgtgtgtatttgcacacttgactagagagaagaggaaatggggcaaaaaaaagagacacatggtccaagagaaattaaaaagaaattttttttttttrccatgtttgcactctactactctattctatctactgagataggagccccgtggggtgaataatttcatctttgctttgtacattgcctttcatcagtacacactcatgatcaggtttctggaacttaatggcaaacatgttctgattgagagtagagctaactggtataatggtacattgtctgagagaccaaagttaagggcatttagttgtttctgcactctgatattaccaaaatcaaccattaatcagaacctcattcagtttctgtaagtaagaatgttactcctggatgttatttatgaaccttatgtcttagagcacaaaagtatttaaaacatagaaatttatagaaggtaattttgtgattctaaagagt

SEQ ID NO: 881583 - DNA, 623 bp, Homo sapiens
ccatttaatctttgtaaaaattgtgtgagataagtactaccagtattcctatttcacatgggagaaaattgaagcacagagaattttagtaatttgctcaacatcacagttaataagttagaggacctatgatttcaaccccggggctggtaccaaatagtagtaaccaccactaaagctataggctacttctcctgggttgaaggatgcttggcattttatgtgcacagtgtttgcagattttatacccaaagtttttgtcttctgagtagccaacattaggactgctgaagacagaagggagaccaaggtgatcccaactagggagggagtaggggttagagtgtggagatgggcgagaatgtgccctgtgaaggcacaraacagggaagatgagagaaaaccaggaaacatgcctgagtgaggacccactcctaccgattttagtgagagatgcacttcatgacctgacaatgtctctagctttggacctgcagggattcattcccagtccctcggtggcagcaaccatgtccaaatagctatcatcttttatgaagactacatttctatctgccattttgtccttctattatcctgtcccccacctaacagccaatagg

SEQ ID NO: 881584 - DNA, 597 bp, Homo sapiens
aaattaatggggaaaaattggccagaaatataaaagcctgtttttagaaaaataaatgcaatttataagtgaatatatttaaaattaacaggaaaatactatcgagacagaaattttctctcttttttttaaattatactttaagttctagggtacatgtgcacaacgtgcaggtttgttacatatgtatacatgggtcatgttggtgtgctgcacccattaacttgtcatttacattaggtatctctcctaatgctatccctcccccsctcccctagtgtgtgatgttccccaccctgtgtccaagtgttctcaatgttcaatttccacctatgagtgagaacatgcagtgctttgttttcaaactaccaatgactttcttcacagaattggaaaaaaactgctttaaagttcatatggaaccaaaaaagagcctgcattgccaagacaatcctaagccaaaagaacaaagctggaggcatcacgctacctgacttcaaactatactacaaggctacagtaaccaaaacagcatgatactggtaccaaaacagagatatagaccaacggaacagaacagatctctctctttaaagc

SEQ ID NO: 881585 - DNA, 634 bp, Homo sapiens
tgaagggtggttgtctctggacctgcttcttggttatcatggagctggactgggcctgggtgagagggcctgatggggttgtcctgggtcatcacgggggtgatcagaaaagatgcagaatggaattgctgcgaggatgaatgagatgactgtcagcacagaataggcacccagtgagtgttcagggattaccctcagcagctgcccagaggccaaaaccacccacctgatagcgactgtccccaagccaggagaaaaagaagagagcaggtcccactcacctgagtctgatcagtcagctgtgttgagatgtgcctctcacytagaaaatggtccttcacgcagagccactcacagacacggctgtgtgtctctaactgctccacaacacagaggcgatgggggcttagcaacagtgacattgtggggtgacacaacccaccacaatgggagcctgcatgggtcaacagggcccagagtcaatgtcctctatcccctgaactgacatgtgtggatgcagtgtgtttgtgcatgtgtgtgtgcctgtatatgtgtgcacttatgtgtgtgtttctcctgcttctctggccaggcctagcttctccactcacgggtgcacccaggtcatcactga

SEQ ID NO: 881586 - DNA, 634 bp, Homo sapiens
tgaagggtggttgtctctggacctgcttcttggttatcatggagctggactgggcctgggtgagagggcctgatggggttgtcctgggtcatcacgggggtgatcagaaaagatgcagaatggaattgctgcgaggatgaatgagatgactgtcagcacagaataggcacccagtgagtgttcagggattaccctcagcagctgcccagaggccaaaaccacccacctgatagcgactgtccccaagccaggagaaaaagaagagagcaggtcccactcacctgagtctgatcagtcagctgtgttgagatgtgcctctcacctagaaaatggtccttcacgcagagccactcacagacacggctgtgtgtctctaactgctccacaacacagaggcgatgggggcttagcaacagtgacattgtggggtgacacaacccaccacaatgggagcctgcatgggtcaacagggcccagagtcaatgtcctctatcccytgaactgacatgtgtggatgcagtgtgtttgtgcatgtgtgtgtgcctgtatatgtgtgcacttatgtgtgtgtttctcctgcttctctggccaggcctagcttctccactcacgggtgcacccaggtcatcactga

SEQ ID NO: 881587 - DNA, 535 bp, Homo sapiens
tagaaaaggtgctgtgctttgaggtgcacatacataaacatctcggtgcattaaagagcagtattgcggccagcatgtctcacctccagccttaaggcggttttctccttatctcagttgatggaacatacaatcaggttttacactgagacattccattgcccagggatgagcaggagacagatgccttcctcttatctcaactgcaaagaggccttcctcttttactaatcctcctcagcacagaccatttatgggtgtctggctgggggatggtcaggtctttcccttcccatgaggccatatctcagactatcacttggggagaaaytttggacaatacctggctttcctaggcagaggtccctgcagccttccgcagtgtattgtgtccctgggtacttgagattagagagtggtgatgacttttaacaagcaaactgccttcaagcacttgtttaacaaagcacatcctgcatagccctaaatccattaaaccttgagtcaacacagtgcatgtctctgccagcacagg

SEQ ID NO: 881588 - DNA, 535 bp, Homo sapiens
tagaaaaggtgctgtgctttgaggtgcacatacataaacatctcggtgcattaaagagcagtattgcggccagcatgtctcacctccagccttaaggcggttttctccttatctcagttgatggaacatacaatcaggttttacactgagacattccattgcccagggatgagcaggagacagatgccttcctcttatctcaactgcaaagaggccttcctcttttactaatcctcctcagcacagaccatttatgggtgtctggctgggggatggtcaggtctttcccttcccatgaggccatatctcagactatcacttggggagaaatyttggacaatacctggctttcctaggcagaggtccctgcagccttccgcagtgtattgtgtccctgggtacttgagattagagagtggtgatgacttttaacaagcaaactgccttcaagcacttgtttaacaaagcacatcctgcatagccctaaatccattaaaccttgagtcaacacagtgcatgtctctgccagcacagg

SEQ ID NO: 881589 - DNA, 656 bp, Homo sapiens
acattggccaggactataagctctgctcactacagttatgagaaaaactgggaaactcatttaaagacataagccagggccaggcatggtggctcatgcctgtaattccagcaatttgggaggccaaggtgggagaatcacttgagcacaggaatttgaaaccagtccaggtaacataacgagacccagtctctacaaaaacaaaacaaaacaaaagctgggtgcggtggtgcacacctgttatgcctgcagtcctacctactcaggagtytgagctgggagatcacatgaggagttcaaggctgcatgagctttgattatgccactgcactccagcctgggagacagagtgagaccatttttcaaaaaattataaattaaataataaaatgtgataaacacataaatacatttaaacagtgctccttggaaaaagtgaatctatgttcccttagtgaagaagatgagaataacggatatagcagggaaatggacagcattggccacattagaccaaaatgaaagtcataacagtaccccaaatcagtaccattaaaaccacataatgtgaccataatgcagtcaaattgtgaccaacaaaaacaaactgacaaaaaaggtatcatggagcatacgaattctaaatctaaattgaa

SEQ ID NO: 881590 - DNA, 666 bp, Homo sapiens
acccatttcaaatttatgaccaaaaatcttcagtgagcactcaacactatctgacaactaaacttccctagtaaattcattaacctactcccaagatgactattacacactttctcctcagtcctcaaatctccaacatctcctcccactcaacttcagccgaagactttgtcrtatatttcatgcagaaatatagatgcaatcatgtgaaaaccatttcaacttcccaccttcattccacaagcttattcatatctgtagtcacatgctctggtaaacttgtgccctatttcccagcttgctctccttctcatgagctgggctcctgaaacagtttcttcttttctgtatcatctattccttcctaaactaaatctttaagcactagctcctccagcaattttttttataagtctcttctctggctacacttttttctttagtgattccaaaagcccccatgtcttcaaatatcatccaaatgttgatgatgcccaaattcattttactagtccagatctctttcctgaggtttagatttgcatgtataaatacatctttattacatctctgtacgtttaataggtgtcttaaattaacacggctgaaactgagctattgatcttctctatcaaaaaaaatcattcctaaattattttcctatcc

SEQ ID NO: 881591 - DNA, 598 bp, Homo sapiens
caacccacattactgtcccaacgaaacgtgaaggatttctactcccattctctttcggtcagctttttgtttgtttgtttgtttttgaggcagagtctcactctgtcgcccaggcttgagtgcagtggctctatcttggctcattgcaagctccgcctcccaggttcaggccattctcctgcttcagcctcccaastagctgggactataggcgcccgccgcggcactcggctaattttttgtatttttaggagagacggggtttcaccgtcttagccaggatgatctcgatctcctgacctcatgatccgcccgccttggcctcccaaagtgctgggattacaggcctgagccactgcgcccggctcagtcagcttcttaacatccacttaaaggcaatgctctaaaagcccaacgatagtgtaactccaaagtcaggtgaaacccagccaccaagtttgcccccacaaaaagcaaaacaaaaaagtgttaagtcaattggattactgagtttcactcaggaaatacaagagttatttcacctgaattaatcacaaggcttattgcatcctgaggacgacagacaagagtttctctc

SEQ ID NO: 881592 - DNA, 671 bp, Homo sapiens
tgagttaggctagatgagcatgttgtgatgggttttatataatataccaaggacctcaggtttgctttgtagacaatgaaggacatatgaggaatttttatcggagtgatgatatcatcatatcttagaaaaatctctgattcctacctctttttctgctctccatatatcttgggggtggtggctctaattagtagattggattatctgcttttgaggaggatattcttacaagttcctccttccattataagaaagagctcaactgactgttctgttaaataatactctgctgagctgacagcatataacacataagaaaatttgcccttatgctgcccgaaaattccattcacatgttacccagaaacagaagtaaagacctaagttttgcaaggtcttttatgtaaaccagtagaattgttatgacactattgatctcagtttgagcttgaaattggttgtatctatatcctcaatayttttttggtgggttgtggggaggggtttctagtaaagacaggaaaacctgctaggcaaattctagaagagctgtagtactcatatcatcaatataaacagttttctaaattagttacaaagatatatccctcttttcaaaaatattttaagttttttcattggaagagaaaaattttatatactgctta

SEQ ID NO: 881593 - DNA, 607 bp, Homo sapiens
gtggtgaggtttaaatgacctaaaatttgcaaagcagtacagtcccttgaatgtaacgtgctactgactcataactagtatcattgtcatgtgtatatatggacagccaagatatcacagtgagtatggtatactattcaagtttttcatgattaargtgttcttaaataattgttgaatagaattatggatgcacttcaaatctcatttgctagcattgtaatatatttaatacaaacttaaaaaaaccaaaacaataaaagataaaatagttgtcaggacagagtagcataaagggagtgtctttgtagcataatattttgacctatgagaaattttgtacaatttcctgaaaaaacgtcataatgaattatacattagtagacttaccttcttgaaggtcagtgggttgttactagcatttgttaaggtcacatgtatgtaaacactgtactgcacctatgttttaaaaagtgaaatgaatattatttacttcttggaagattatatactacaaattgaactgttgatgaagtcactctgggtccctaaagactgagtgaaagaggtagaattagaaagacttcttttggctattaatctaaag

SEQ ID NO: 881594 - DNA, 607 bp, Homo sapiens
gtggtgaggtttaaatgacctaaaatttgcaaagcagtacagtcccttgaatgtaacgtgctactgactcataactagtatcattgtcatgtgtatatatggacagccaagatatcacagtgagtatggtatactattcaagtttttcatgattaaggtgttcttaaataattgttgaatagaattatggatgcacttcaaatctcatttgctagcattgtaatatatttaatacaaacttaaaaaaaccaaaacaataaaagataaaatagttgtcaggacagagtagcataaagggagtgtctttgtagcataatattttgacctatgagaaattttgtacaatttcctgaaaaaacgtcataatgaattatacattagtagacttaccttcttgaaggtcagtgggttgttactagcatttgttaargtcacatgtatgtaaacactgtactgcacctatgttttaaaaagtgaaatgaatattatttacttcttggaagattatatactacaaattgaactgttgatgaagtcactctgggtccctaaagactgagtgaaagaggtagaattagaaagacttcttttggctattaatctaaag

SEQ ID NO: 881595 - DNA, 590 bp, Homo sapiens
tgcacattttcctgctgtgccagccctatcacactgacccttatctttcccatttttaattataatgcattaaagtctatagcttaatctatcaaaagggttatttcaataaatataaaatgagacatctcaatgctaaggagaccttggatcacagttgaattggcastgttttattttttcttagtgggagataaaataatgatgtgttcagcatgggaaggcatatgagatttgatcaaatatcttctcatttgctgttttaaagatagagaaggaattaacctgtttttatttggtgacggactaagctaatatttttcacatgtgatctcatctaatccttataaaataaactttaacacatgaggaaataaaagcaccaagaggttaaatacctgagtccacagaccttgtaaatgcttcaagactcagtctatttggtttgttccatatattagactacttctttaagcttaaagaagtaaatattagatactgtgcctagtatatgccagagactattgtgagcacataatgggattaacttgtttaattttaataatcccaggaggtaggtactccaccta

SEQ ID NO: 881596 - DNA, 590 bp, Homo sapiens
tgcacattttcctgctgtgccagccctatcacactgacccttatctttcccatttttaattataatgcattaaagtctatagcttaatctatcaaaagggttatttcaataaatataaaatgagacatctcaatgctaaggagaccttggatcacagttgaattggcagtgttttattttttcttagtgggagataaaataatgatgtgttcagcatgggaaggcatatgagatttgatcaaatatcttctcatttgctgttttaaagatagagaaggaattaacctgtttttatttggtgacggactaagctaatatttttcacrtgtgatctcatctaatccttataaaataaactttaacacatgaggaaataaaagcaccaagaggttaaatacctgagtccacagaccttgtaaatgcttcaagactcagtctatttggtttgttccatatattagactacttctttaagcttaaagaagtaaatattagatactgtgcctagtatatgccagagactattgtgagcacataatgggattaacttgtttaattttaataatcccaggaggtaggtactccaccta

SEQ ID NO: 881597 - DNA, 663 bp, Homo sapiens
cttgttttcactcattcacctttactctcttgccagagtatttacaactcattaatatttttgttattgttttaaatgttgccttttatttcagatacagcggggtacaggtgtaggattgttacatgggtatattggatccaggtggtaagcatagtacccaataggtagtttttcaacccctcccctcctccctctttccccattctagtagcctgaaatgtctaattttcccatttttatggccatgtgtgctcagtgtttagttcccasttataagtgagaacatgtggtatttggtattcggtccctgtgttagcttgcttaggattatgacctccaactccatccacgtacaatttctttctttctttctttcctttttttgaggtggagtcttgctccgttgcccaggctggagtgcagtagtgtgatctcagctcgatgcaagctccgcctcccgggttcatgtcactctcctgcctcagcctcccaagtagctgggactacaggtgcctgccaccacgcccggcttatttctgtatttttaatagagacggggtttccccatgttagccaggatggtctcgatttcctgacctcgtgatctgcctgcctcagcctcccaaagtgctgggattacaggcgtgagccaccacgcct

SEQ ID NO: 881598 - DNA, 663 bp, Homo sapiens
cttgttttcactcattcacctttactctcttgccagagtatttacaactcattaatatttttgttattgttttaaatgttgccttttatttcagatacagcggggtacaggtgtaggattgttacatgggtatattggatccaggtggtaagcatagtacccaataggtagtttttcaacccctcccctcctccctctttccccattctagtagcctgaaatgtctaattttcccatttttatggccatgtgtgctcagtgtttagttcccagttataagtgagaacatgtggtatttggtattcggtccctgtgttagcttgcttaggattatgacctccaactccatccacgtacaatttctttctttctttctttcctttttttgaggtggagtcttgctccgttgcccaggctggagtgcagtagtgtgatctcagctcratgcaagctccgcctcccgggttcatgtcactctcctgcctcagcctcccaagtagctgggactacaggtgcctgccaccacgcccggcttatttctgtatttttaatagagacggggtttccccatgttagccaggatggtctcgatttcctgacctcgtgatctgcctgcctcagcctcccaaagtgctgggattacaggcgtgagccaccacgcct

SEQ ID NO: 881599 - DNA, 634 bp, Homo sapiens
accttgatcttcgacttacagcttccagaactgtgagaaataagtttatgttgtttataatccaacaacttaatggtattttgttacagcagctcaaaatgaataagactccctgggagctgaaatgccctgaaagacctctacttcatataaccacaggagtagttaacatgtgtaaagtgcttatgatatccaagtgtattctgaacacttgacatatagaaacttgtttaatcctcacaataacctgtggggggcttgatctcgttgcctctgttttacagagggcagaggtgaagtagtatgctcaaatgaatattcacaaaataaaatagtggtgacagtagtcaccctactctgaatcaaacattggatttctacaatgtttttaaactgstggagtcggcagcagagccccaaaaatttatctccagatttgctgctttcaattcctgtgctttaacacatccaatctatagcaaaatactcccttacatcctctaaaaaggaacaccaaagaattacataatcatggcggtggggggggtgaaaagtgtggatatgtggcatctgtcagcatccccagcaccaaatgggccctcagaagtcagctatgacccgcgtcctgcgtatc

SEQ ID NO: 881600 - DNA, 614 bp, Homo sapiens
taacatcccaactcacagccccatttgcacccaaataaaggacagatacaggaattagacagttgaaaggatttattaccaatgaaggctaggtggcaagatttggttaacatataaccataagggcttgctggcactacctgcctgatgcccctcccctgagttaaattcagatcttcaaattgcccaataggcaaactcagtgggaaggtttagatctgcagagtagacacccatatgaaggaagaatgtctccccctatctcagaaggaactagaggaagagtctaagctcttcaatgcttaaagttttatagagtgattctcaccaattaagaaaagaggacccaaacctgttatcagccaaccaattaagattaaytcagttcttctttgcagggaagaatgagtaaggagtggaaagaggcttagaggatcactctgataggtggccatctgtctaggcaatgaatgaaacaaaaactgaatcattctttccattaagcaggccccagtttcttcaatacatgccgtttattctccttcttctattctctactcatttttataccaacctgaattctctcctacttcctacttttctattcattctgc

SEQ ID NO: 881601 - DNA, 638 bp, Homo sapiens
tttgctattgtgaacagtgctacattgaacatatgtgtgtatatgtctttataatataaggatttctattccttcagatatacacccagtaatgagattgctgggtcacatggtatttgtctttaggtctttgaggaaccttcaaactggttgaactaacttacgctcccaccaacagtgtataagccttcccttttctccacagcctggccagcaccagttattttttgactttttgataatagcctttctggtgtgagatggtatgtcmttgtggctttaatttgcatttctctaacggtcagtgatgttgaatttttttcatatgattattggccacatgtatgttgtcttttgaaaagtgtctgttcatgtcctttgcctactttttaatgaggttggtttttttccttgtaaatttgtttaagttccttacagatgctggatattagacttttgtctaataattaggccttctttgtattgaatatcatatgaatagcaattggtcagtcttctgatctttattttaacattaatgatggtcagttgtgtccaaaccacaaaagtgagggagcacaatgaagcctgttcaacctcccatcaaaccatggccagaaactcagtttttaaggttt

SEQ ID NO: 881602 - DNA, 576 bp, Homo sapiens
tactgtgtagtttttacttgaagattttttttgcacaatatgcatcaaagttctccaaatatccaaatgcagattctataaaaagactgtttcaaaactgctcaatcaaaagaaaagtttaactctgtgagatgaatgcacacatcacaaagaagtttctcagaatgcttctgtgtggtctttaggtgaagatattttcttttaaagagtaggcctcatgagctccaaatatccacttgcagattctacaaaaagagggtttcaaaactgctcaatcataaaataggttcaaacatgtgagttgaacgcacacatcacacagaagtttctcagaatgcttctgtgtagtttytatgtgaagatagttccttttccacaataggcctcaaagagctccaaatatccacttgcagatgctacaaaaagagtgtttcaaaactgctcaatcaaaagaaagattcatctctgtaaggtgaatgcaaatatcacaatgtagtttctgagaatgcttctgtgtaccttttacgtgaagatatttccttttccacaataggcctcaaaccgctccaaatatcc

SEQ ID NO: 881603 - DNA, 653 bp, Homo sapiens
cctcaaagagctccaaatatccacttgcagatgctacaaaaagagtgtttcaaaactgctcaatcaaaagaaagattcatctctgtaaggtgaatgcaaatatcacaatgtagtttctgagaatgcttctgtgtaccttttacgtgaagatatttccttttccacaataggcctcaaaccgctccaaatatccacttacacattctacaaaaagagtatttcacaactgctcaatcataagataggttcaactctgtgagatgaatgcacacatcacaaataagtttctcagaatgcttctgtgtagtttttatttgaagacatttccttttccaccacagaccrcaaattgctccagatatccacttgcagattctataaaaagagagattcaaaactgatcaatcataagataggttcaactctgtgagatgtatgcacacttcacaaagaagtttctcagaattcttccttgtagtttttatgtgaagatatttccttttccacaataggcctcaaaacgccccaaatatccacttgcagattctacaactagagtgtttcaaaactactaaatcataagatagtttcaaatctgtgagatgaatgcacacatcacaaataagtttatcagaatacttctgtgtagtttt

SEQ ID NO: 881604 - DNA, 615 bp, Homo sapiens
tgtaggcctcaatgctctccaaatatcctcttgcagattctacaaagagtgttacaaaactgctcaatcaaaagaaagttcaactccttgagatgaatgcacatatcaaaaagaagtttctcagaatgcttctgtgtagtttttatgtgaagatatttgcttttcctgagtaggcttaatatccacttgcagattctgcaaaaactgtatttcataactgctcaatcaaaagaaagtttcaactcrgtaaaatgaaagcacacaacacaaagacgcttctcagaatgctctgtgtagtttttatgtgaagatattttcttttagaccacaagcctcaaagtgctccaaataaccacttgcagattctaaaaaaagagagcttcaaaactgctcaatccaaagagagattcaactctgtgagatgaatgcacacatcacaaagaagtttctcagactgcttctgtgtagttttttttgaagatatttccatttccaccataggccgcaaaggaatccaaatatccaattgcagaatctacaaaaagagagattcaaaactgctcaatcaaaaaataggttcaactctgtgagttgaatgtacacatcacaaagaat

SEQ ID NO: 881605 - DNA, 601 bp, Homo sapiens
caaagtagtttctcagaatgcttctgtgtagtttttatatggaggtattttctttttcacaataggccacatgggctccaaatacacacttgcactttctacaaaaagagtgtttcaaaactgctcaatcataagatagtttcaacattgtgagatgaaagcacacatcacaaagaagtttctcakaatgcttctgtgtagttttcattgaagatatttccttttccaccttaggctgcaaagggctccaaatatccgcttgcagattctataaaaagagagattcaaaactgatcaataataagataagttcaaccctgtgaatcgtatgcacacatcagaaagaagattctcagaaatcttttttgtactttttatgtgaagatatttctttttccacaatatgcatcaaagtgctccaaatatccaattgcagattgtacagaaagagtgtttcaaaactgcccaatcaaaagaaagtttaaactttgtgagatgaaggaacacctcacaaagaagtttctcagaatgcctctgttttattttaagatatttccttttcctccatagcccgcaaaaggctccaaatttccactggcag

SEQ ID NO: 881606 - DNA, 573 bp, Homo sapiens
tcaaagtgctccaaatatccaattgcagattgtacagaaagagtgtttcaaaactgcccaatcaaaagaaagtttaaactttgtgagatgaaggaacacctcacaaagaagtttctcagaatgcctctgttttattttaagatatttccttttcctccatagcccgcaaaaggctccaaatttccactggcagattctgcaaaaagagtgattcaaaactgctaaatcaaaagatagcttcaactctttgaattcaatgcacacatcagaaagaagtttctcagaattctttggtgtagtttttatatgaagatatttcgttttccacgataggctgcaaagggttcaaaatactgacttgcagattctacaaaaacagagattcaaaactgcwcaatcaaaacatatgttcaactctgtgtgttgaaggcatgcattacagagaagtttcaaagaatgcttctgtgtagtttttatgtgaagttatatccttttccacaataagccacaaagcgctccaaatatccactagcagattctacaaaaactacaaaaacggtgtttcaataaatg

SEQ ID NO: 881607 - DNA, 610 bp, Homo sapiens
tcacttcagtgcacaactcacaaagatgtttctcagaatgcttctgtgtagtttttgtgtgaagataattcattttccacagtacgcctcaaagcgctccaaatatccactcacagattctgtaaaaagaaagattcaaaactgctgaatcaaaagatacgttcaacaatgtgagctgaatgcacacatcacaaataaggttgacagaatgcttctgggtagtttttatttgaagaaatttccctttccacaataggcctcaaattgctctaaatatccacttgcagattctacagaaagaatgtttcaaawctgctcagtcaaaagaaaggttgtactctgtgaggtgaatgcacacttcacaaagtagtttctcagaatgcttctgcatagtttttatgtgaagatatttccttccccactataggcctcaaaggctccaaatatccacttgtagattctaaaaaaatagtgtttcaaaactgctgtatcaaaagaaagattcaactctgtgagatggatgcacagatcacaaagaagtttctcataaagcttctgtgtagtttttatgtgaagatatttgtttttccacagcaggccccaatgaact

SEQ ID NO: 881608 - DNA, 622 bp, Homo sapiens
aagaaaggttgtactctgtgaggtgaatgcacacttcacaaagtagtttctcagaatgcttctgcatagtttttatgtgaagatatttccttccccactataggcctcaaaggctccaaatatccacttgtagattctaaaaaaatagtgtttcaaaactgctgtatcaaaagaaagattcaactctgtgagatggatgcacagatcacaaagaagtttctcataaagcttctgtgtagtttttatgtgaagatatttgtttttccacagcaggccccaatgaactccaaatatccacttgcagattctataaaaagagtgtttcaaaactgctcaatcaacagagacattcaactctgtgagatgaatgcacacatcacaaagaagtttctcagaatrcttctgtgcagtttttgtgtgaagatatttcattttccacagtacgcctcaaagcgctccaaatatccactcgcaggttctgtaaaaagagagattcaaaactggtgaatcaaaagataggttcaacactgtgacttcagtgcacaactcacaaaggtgtttatcagaaatcttctgtacagtttttatatgaagatatctccttctccaaaacacaactcaa

SEQ ID NO: 881609 - DNA, 622 bp, Homo sapiens
aagaaaggttgtactctgtgaggtgaatgcacacttcacaaagtagtttctcagaatgcttctgcatagtttttatgtgaagatatttccttccccactataggcctcaaaggctccaaatatccacttgtagattctaaaaaaatagtgtttcaaaactgctgtatcaaaagaaagattcaactctgtgagatggatgcacagatcacaaagaagtttctcataaagcttctgtgtagtttttatgtgaagatatttgtttttccacagcaggccccaatgaactccaaatatccacttgcagattctataaaaagagtgtttcaaaactgctcaatcaacagagacattcaactctgtgagatgaatgcacacatcacaaagaagtttctcagaatgcttctgtgcagtttttgtgtgaagatatttcattttccacagtacgcctcaaagcgctccaaatatcyactcgcaggttctgtaaaaagagagattcaaaactggtgaatcaaaagataggttcaacactgtgacttcagtgcacaactcacaaaggtgtttatcagaaatcttctgtacagtttttatatgaagatatctccttctccaaaacacaactcaa

SEQ ID NO: 881610 - DNA, 606 bp, Homo sapiens
caaagcgctccaaatatccactctcagattctgtaaaaagagagattccaaactgctgaatcaaaagataggttcaacactgtgacttaggtgcacaattcacaaagatgttcctcagaaatcttctgtgtagtttttatatgaagatatctcctcctccaaaacagatctcaaagccctccaaatattcacttccagattgtacggaaagattgtgtcaaaactgctaaatcaaaacaaaggttcaactctgtgatgaatgcactcatcagaaagaaggttctctgaatgcttctgtgtagtttctatttgaagatatttccttttccaatatagggcaaaatagggccccaaatattcacttgcagattctrcaaaaagggagattctaaactgctcaatcaacagataccttcaacaatgtgatttgaatgcacacatcgcaaataagtttcacagaatgcttctgggtagtttttagttgaagaaatttccctttccacaataggcctcaaatcactctaaatatccacttgcagattctacaaaaagagtgtttcaaaactgctcaatccaaagaaaggttgtaccctgtgagatgaatgc

SEQ ID NO: 881611 - DNA, 606 bp, Homo sapiens
caaagcgctccaaatatccactctcagattctgtaaaaagagagattccaaactgctgaatcaaaagataggttcaacactgtgacttaggtgcacaattcacaaagatgttcctcagaaatcttctgtgtagtttttatatgaagatatctcctcctccaaaacagatctcaaagccctccaaatattcacttccagattgtacggaaagattgtgtcaaaactgctaaatcaaaacaaaggttcaactctgtgatgaatgcactcatcagaaagaaggttctctgaatgcttctgtgtagtttctatttgaagatatttccttttccaatatagggcaaaatagggccccaaatattcacttgcagattctgcaaaaagggagattctaaactgctcaatcaacagataccttcaacaatgtgakttgaatgcacacatcgcaaataagtttcacagaatgcttctgggtagtttttagttgaagaaatttccctttccacaataggcctcaaatcactctaaatatccacttgcagattctacaaaaagagtgtttcaaaactgctcaatccaaagaaaggttgtaccctgtgagatgaatgc

SEQ ID NO: 881612 - DNA, 663 bp, Homo sapiens
atttggagccctttgtggcctactgtggaaaaggaaatatcttcacatacaaactacacagaggcattctgagaaacttctttgtgatgtgtgcagtcatctaatggagttgaaacttcctttttatagagcagtgttgaagcgatctttttgaagaattagcaatggatgtttggagmgctttgaggcctattgtggaaaaggaaatatcttcaaaaaaaaaactacacagaaacattctgagaaacttctttgtgatgtgtgcattcaattcacaggggagagcctatcttttgattgagccgttttgaatctctctttttgtagaatctgcaagtgggttttagtagccctttgtggcccatggtggaaaagaaaatatcttcaaataaaaactacacagaagcattctgagaaaccattttgtgatgtgtgcatttatctcatatagttgaacctttcttttgattgagtagttttgaaacacctttttatagagtctggaagtggatatttggaggactttgaggtctattttggaaaaggaaatatcttcacataaaaactacacagaagcattctgaggaacttctttgtgagatgtgcactcatctcacagagttgaacctatcttttcattgagcagttttgaatctctctttt

SEQ ID NO: 881613 - DNA, 663 bp, Homo sapiens
atttggagccctttgtggcctactgtggaaaaggaaatatcttcacatacaaactacacagaggcattctgagaaacttctttgtgatgtgtgcagtcatctaatggagttgaaacttcctttttatagagcagtgttgaagcgatctttttgaagaattagcaatggatgtttggagagctttgaggcstattgtggaaaaggaaatatcttcaaaaaaaaaactacacagaaacattctgagaaacttctttgtgatgtgtgcattcaattcacaggggagagcctatcttttgattgagccgttttgaatctctctttttgtagaatctgcaagtgggttttagtagccctttgtggcccatggtggaaaagaaaatatcttcaaataaaaactacacagaagcattctgagaaaccattttgtgatgtgtgcatttatctcatatagttgaacctttcttttgattgagtagttttgaaacacctttttatagagtctggaagtggatatttggaggactttgaggtctattttggaaaaggaaatatcttcacataaaaactacacagaagcattctgaggaacttctttgtgagatgtgcactcatctcacagagttgaacctatcttttcattgagcagttttgaatctctctttt

SEQ ID NO: 881614 - DNA, 663 bp, Homo sapiens
atttggagccctttgtggcctactgtggaaaaggaaatatcttcacatacaaactacacagaggcattctgagaaacttctttgtgatgtgtgcagtcatctaatggagttgaaacttcctttttatagagcagtgttgaagcgatctttttgaagaattagcaatggatgtttggagagctttgaggcctaytgtggaaaaggaaatatcttcaaaaaaaaaactacacagaaacattctgagaaacttctttgtgatgtgtgcattcaattcacaggggagagcctatcttttgattgagccgttttgaatctctctttttgtagaatctgcaagtgggttttagtagccctttgtggcccatggtggaaaagaaaatatcttcaaataaaaactacacagaagcattctgagaaaccattttgtgatgtgtgcatttatctcatatagttgaacctttcttttgattgagtagttttgaaacacctttttatagagtctggaagtggatatttggaggactttgaggtctattttggaaaaggaaatatcttcacataaaaactacacagaagcattctgaggaacttctttgtgagatgtgcactcatctcacagagttgaacctatcttttcattgagcagttttgaatctctctttt

SEQ ID NO: 881615 - DNA, 640 bp, Homo sapiens
agccctttgtggcccatggtggaaaagaaaatatcttcaaataaaaactacacagaagcattctgagaaaccattttgtgatgtgtgcatttatctcatatagttgaacctttcttttgattgagtagttttgaaacacctttttatagagtctggaagtggatatttggaggactttgaggtctattttggaaaaggaaatatcttcacataaaaactacacagaagcattctgaggaacttctttgtgagatgtgcactcatctcacagagttgaacctatcttttcattgagcagttttgaatctctctytttgtagactctgcttgcggatatttggagagctttgaggcctattgtggaaaaggagatatcttcacgtaaaaactacacagaagcattctgagaaactttttgtgatgtgcgcattcaactcacagagttgaacctatattttgatagaacattttttaatctctctttttgtagaagcagcatgtggatatttggagacctttgaggcgtatggtggaaaaggaaatatcttcaaataaaaactaaacagaagcattttgagaaacttctctgggatgtgtgcattcatatcacagggttgaaactaccttttgattgagcagt

SEQ ID NO: 881616 - DNA, 645 bp, Homo sapiens
ctttccatagaatctggaagtgaatatttggagggctttgagatctattttggagaaggagatatcttcatatcaaaactacaaagaagcattctgagaaacttctttgtgaggtgtgcactgaagtcacagtgttgaacctatcttttgattcagcagttttgaatctctctttttacrgaatctgcgagtggatatttgtagctcattggggcctactgtggaaaaacaaatatcttcacataaaaactacacagaagcatcctgagaaacttctttgtgatctgtgcattcatctaacagagttgaatctttcttttgacacagcagttttgaaacactcttttttcagaatctgcaagtggatatttggagccttttgaggcctatagtggagaaggaaatatcttcacataaaaactatgcagaagcattctgagaaactactttgtgatgtgtgcattcatctcacagagtagaacctttctttggattgagcagttttgaaacactctttttttagaatctgcaagtggatatttggagccttttgaggcctatggtggagaaggaaatatcttcacataaaaactatgcagaagcattctgagaaaccactttgtgatgcgtgcattcacctcacag

SEQ ID NO: 881617 - DNA, 640 bp, Homo sapiens
atctttgttttgatacagcagttttgaaacactctttttttagaatccgcaagtggatatttggagccttttgaggcctatagtggagaaggaaatatcttcacataaaaactatgcagaagcattctgagaaagtactttgtgatgtgtgcattcatctcatacagtagaacctttctttggattgagcagttttgaaacactctttttttagaatctgcaagtggatatttagagcgttttgaggcctattgtggaaagggaaatttcttcacataaaaactacccagaagcattctgtgaaacttatttgtgatgtgtgcattcatctcacattgttgaaggtatctgttgattgagcagtttagaatctctctttttgtagaatctgcaagtggatatttggagccccttgcaacytatggtggtaaaggaaataccttcaaataaaaactacatagaagcattctgaaaaacttctttgttatgtgtgcattcatctcacagggttgaacctatctaatgattgagcagttttgaaacactcattttgtagaatctgcaagtggatatttggagcgctttgagaccttccgtggacaagctaatgtcttcacataaaaactacactgaagcattc

SEQ ID NO: 881618 - DNA, 620 bp, Homo sapiens
atgctgaggaacttcttcgtgttgtgtgcattcatctcacagagttgaacatttcctatattgggaagtttgaaacactctttttacaaaatctgcaagttgatatttggagcactttgtggcatatattggaaaaggaaatatcttcacatatctacaagacagaagcattctgggaaactactttgtgatgtgcattcaattcacagagctgaatattttctttgattgagctggttggaaagcatctttctgtartatctgcaaatggacattttgagttctttgaggcctatggtggaaaaggaaatatcttcacataaaaactagacagaagcactttgagaaatttgtttgtgaagtgtgcattcatctgacagagttgaacctttgttttgattgagcagttgggaaacagtccttttgtaggatctgcaaagggatatttctgagcccattgagacctatggtgaaagaggaaatatcttcacttaaaaactagacagaagcattctgagaaacttcttagtgatgtgtgctttcatctcacaggtttgaacctttcttttaattgagcagtttggaaacagtctttttgtggaatctgcaaaggataattc

SEQ ID NO: 881619 - DNA, 593 bp, Homo sapiens
aactttcttttgattgagaagtttggaaacactttttgtagaatctgcaagtggacatttggagtgttttgtggcctatggtagaaaaggaaatatcttcacataaaaagtagacagaagaattctgagaaagttctttgtgatgtgtgcattcatctaacagagttgaaactttcttttgattgaycagtttggaaatactctttttgtagaaactgcaattggacattgggagtgctttgtggcctatggtaggaaagcaagtatcttcacataacatctagacagaagcaatcagagaaacttctttgtgatgtgtgcattcatctcacagatgtaaaactttgttttgattgagcagttttcaaactccgtttttgtagaatcttcaagtggacatttgtagcgctttgaggcctatggtggaaaaggaacataaaaactagacagagaattctgagaaaattcttgtgatgtgtgcattcatctcacagagttgaacttttcttttgatagagctatttggaaacactcttttcgtagaatctgcaagtggatattggagcactttgaggcctctggtaaaaaaggaa

SEQ ID NO: 881620 - DNA, 593 bp, Homo sapiens
aactttcttttgattgagaagtttggaaacactttttgtagaatctgcaagtggacatttggagtgttttgtggcctatggtagaaaaggaaatatcttcacataaaaagtagacagaagaattctgagaaagttctttgtgatgtgtgcattcatctaacagagttgaaactttcttttgattgatcagtttggaaatactctttttgtagaaactgcaattggacattgggagtgctttgtggcctatggtaggaaagcaagtatcttcacataacatctagacagaagcaatcagagaaacttctttgtgatgtgtgcattcatctcacagatgtaaaactttgttttgattgagcagttttcaaactccgtttttgtagaatcttcaagtggacatttgtagygctttgaggcctatggtggaaaaggaacataaaaactagacagagaattctgagaaaattcttgtgatgtgtgcattcatctcacagagttgaacttttcttttgatagagctatttggaaacactcttttcgtagaatctgcaagtggatattggagcactttgaggcctctggtaaaaaaggaa

SEQ ID NO: 881621 - DNA, 587 bp, Homo sapiens
atgaatgcgcacgtaacagagaagtttctcagaattcttctgtcttgtttttatgtgaagatattacctttctcaacataggtctcaaagcaatccaaacatccatttgcagattctacaaaaagactgtttccaaactgatcaatcaaaacaaatttttacctctctgagatgaaagcacacatmacaaaaaagttactcagacagcttctgtctagtttgtatgtgaagatatttcctatttcacctgagaccataaagggctcacaaatatccctttgaaggttctacaaaaagactgtttccaaactgctcaatcaaaagaaaggttcaactctgtgaggtgaatggacacatcacaaaaaatttcttgtaatgattctgtctagtttttatgtgaagatatttctctttcaccataggcctcaaatggatcagaattatccctttgcggattgtacaataagcctctttccaacctgctcaatcaaaagaaaggttcaactctgtgaggtgaatgcacacatcacaaggaagtttctcagaaagcttctgtttagtttttatgtgaagatatttcgtttttc

SEQ ID NO: 881622 - DNA, 674 bp, Homo sapiens
caaagcactccaaatatccacttgcagattctacaaaatgagtgtttcaaaaccgctcaatcaaaagaatggttcaacattgtgagattaaacacacatcacaaagaagtttctcagaatgcttctgtgttgttctcatgtgaagatatttcttttttcaccatagaccttaatgtgatccaaacatccacttgcagatactacaaaaagagtgtttccaaactgctcaatcaaaagaaaggttcaactctgtgggatgaaggcacacatgaccaagacgttcctcagaaatsttttttgtagtttttatgtgaaggtatttccttttccgctataggccataaagggctccaaatatcctcttgcagattctataaaaagagagactcaaaactgctcaatcaaaagatagtttcaactctgtgagtttaatgcacacttagcaaaggtgtttctcagaatgcttctgtgtagtttttatgtgaagatattcccgtttcccccataggcctcaaagcgctccaaatatccacttgcagatactacaaaaataaagtttcaaaactgctgaatgaaaagaaaggttcaacactgtgagatgaatgcacatattgcacagaagtttttcagaatgattctgtgcagtttttatgtgaagatatttccttttccac

SEQ ID NO: 881623 - DNA, 693 bp, Homo sapiens
cccataggcctcaaagcgctccaaatatccacttgcagatactacaaaaataaagtttcaaaactgctgaatgaaaagaaaggttcaacactgtgagatgaatgcacatattgcacagaagtttttcagaatgattctgtgcagtttttatgtgaagatatttccttttccacaataggaatccaagtgctcctaatatcaacttgcagattctacataaagagtttttcaaaactgctcaatcaaaagaaaggttcaactctgtgagatgcacacatcacaaagaggttacttggaatacttctgtgtacgtttcatgtgaagatattttcttttcaacaataggyctcaaagtgctccaattatccacttgcagattctacaaaaagaatgtttcaaaactactaactgaaaagaaagattcatctttgtgagatgaatgcacacatcaccatgaagtttctcagaatgattctgtgtagcttttagttgaagatattcccatgtccaccataggccacaaatggccccaaatatccacttgtagattctacaaaaagagagtttcaaaactgttcaatgaaaagataggttcaactctgtgagttgaatgcacacatcacagagaagcttctcagaaagtttctgtgtagtttttatgtgaagttgtttccttttacccaatagacctca

SEQ ID NO: 881624 - DNA, 617 bp, Homo sapiens
actactaactgaaaagaaagattcatctttgtgagatgaatgcacacatcaccatgaagtttctcagaatgattctgtgtagcttttagttgaagatattcccatgtccaccataggccacaaatggccccaaatatccacttgtagattctacaaaaagagagtttcaaaactgttcaatgaaaagataggttcaactctgtgagttgaatgcacacatcacagagaagcttctcagaaagtttctgtgtagtttttatgtgaagttgtttccttttacccaatagacctcaaagtgttccaaatattcacttgcagatacttcaaaaatattgtttcaaaactgctcaatcaaaagaaaggttcatcttgtgagatgaatrcacacatcacaaagaagtttctcagaatacttgtgtctgttttttatgtgaaggcatttccttttccacaacagaccacaaaaggctgtaaatatccacttgcagatactacaaaaagagagtttcaaaatggcttaatcaaaagatatgttcaactctgtgagttgaatgcacagattgcaaaggagtttctcagaatatttctgtctagttttcatgtgaaggcatttcctt

SEQ ID NO: 881625 - DNA, 619 bp, Homo sapiens
ttagacaataagcttcaaagcgctccaagtaaccacttgcagattctacaaaaaaagggtttcaaaactgctcaatccaaagagaggttcaactctgtgagatgaatgcacacatcacaaagaagtttctcagactgctcctgtgtagttttttttttttgaagatatttccgtttccaccataggccacaaaggactccaaatatccagttgcagattcttcaaaaagagagattcaaaactactcaatcaaaaaataggttgaaatmtgtgagttgaatgtacacatcacaaagaattttctcagaatgctactgtatagtttttacgtgaagacatttcctttttcaaaacaggcctcaaagccctccaaatatccacttgcagattctacaaaaagtgtgtttcaaaactgctcaatcaaaagatacgtccaatctgtgtgatgaatgcactcatcacaaagtagtctctcagaattcttctgtgaaatttttatgtgaagatatttccttttccacaataggcctcaaagtgctccaaatatccactttcagattctacaaaaagagagattcaaaactgctcaaacaaaacgtaggttacactctgtgagttg

SEQ ID NO: 881626 - DNA, 596 bp, Homo sapiens
aaatatgtgagttgaatgtacacatcacaaagaattttctcagaatgctactgtatagtttttacgtgaagacatttcctttttcaaaacaggcctcaaagccctccaaatatccacttgcagattctacaaaaagtgtgtttcaaaactgctcaatcaaaagatacgtycaatctgtgtgatgaatgcactcatcacaaagtagtctctcagaattcttctgtgaaatttttatgtgaagatatttccttttccacaataggcctcaaagtgctccaaatatccactttcagattctacaaaaagagagattcaaaactgctcaaacaaaacgtaggttacactctgtgagttgaattcacaattcacaaagtagtttctcagaaagcttctgtgaaatttttatgtgaagatatttccttttccacaatagacctcaaagcactgcaaatatccattttcggattgtacaaaaagagagattcaaaactactcaaacaaaacctaggttaaactctgtgagttgaattcacaattcatgaagaagtttatcagaatgctactgtgtagtttttacttgaagattttttttgcac

SEQ ID NO: 881627 - DNA, 668 bp, Homo sapiens
ttaatttgacctttattataagccctgcaaattaccattattgtagtatttgacagttgaagaaatcatagatgataaagaatttgaccataagtctgtctgactcaggtcttttctttcttattttttcgtttcttattctttctttctttctttattttgaaataaagtctcgttctgtctgccaggtgggagtgcagtagtacaatcactgcagccttgacttcctaggcttaagcggtcctcctacttctgcctcctaagtagtgaggctacaggcatgtaccaccacacctggttaattgtttctagtttttgtagctagggggtcttactatgtcacctaggctggtctcaaactcctgagctcaagtgattcacacccctcagcttcccaaagtgatgagattacaggtgtgagccaccatggttggtgactcaagccttytctaaaattaaaagctgatacttccttaaaagcttgtaatccctaacctaaccatttttacaagatatagtgagaggtatcttatgctaaaaatatacaagcaaagctagaggtttatatgtccatgggaaatcacaggtagaatagattgaatctaaatacaaaaggggactggggagttcttcctaaatgtgatctaagcataatatttcaaaggcca

SEQ ID NO: 881628 - DNA, 625 bp, Homo sapiens
ttgaatgtcacttggcctgacccccaggattttttatacttgtaaaaatttctgacttccagaacacataaaaaacttctaaaaagagagcaaatatttaaccagtttttcttcctttgtgcctctactcaaatctaaagaaaataatacagagaataatacagaggtgattgtttgaagtttcctgctgatttcacacatcatttcttattaagtattagaatatattctgtgtccgcatggcattattacagatatccctgctataggggttacatgaaataacgtataaaatattcttagcccagttctggaaaaaggaaagcagtcaatgcttgtcagctctacagcgacatattgctgacatcttataattactgttttccaggatttttttwaatttcttttttctctacctatttactctacactctccttagacaattttatccactgatataaattttattattgtctatatgctaacaattccagagcctgtatcaagactaagaacaaagtgaaatctcaagaaaagtctaggcttgatatatttatttgggaattattggcatattgataatgtatagacagtgattaaagatatggtgaacttgaaatgtca

SEQ ID NO: 881629 - DNA, 674 bp, Homo sapiens
tgtgtacctcataatttataagaaaaaagctctatttttaaaattagtctgacaagtttttttcttaccatgtattttatatataactggtgtcattaacacacagcatattatgctatgtttgcattcttggcattaaaagactttttatatactttgtagagaatgatgtgttaatagaagtggtgcaattaatttgaagaaatagccattaattttggctggaaaacttttaaagactcatgccaatcactataaaatgaaataaataaaaatatcaattgtattgaagttgcaagaaagcaaagcagaatggtatatttatagtctctagtttggacatttgtaaaatagtgcaagtttctgtcatattctcttgaacaaaaaaatagactttgtcatttattcaatttaggattcaaatgaattgctaaaggtacacaccctattgtagtcatttatggtaatattagaaccactgaaagrctttaggagaaatttctatatacatcataatttattcactgaaaagaccctgatacaattacaattcttcttcgtctcaggtaatttaaaccgtcatttaccatttccgagggagaacattaacactcttcagtaggaactagcgacaaatatgtaatgggaaatatacatggaaaatttttctcagt

SEQ ID NO: 881630 - DNA, 593 bp, Homo sapiens
tagaacccagactactaaaactccgattggacagaggacctgccttgcgctcttttctgataagcaactgcagaccttaagcctgttcagtcagcttatagagactgtgcacaaactgtctttgtgtcctgtagttcacctttcgatgtaaagagccaaattccaccccactgtaatgctaaaaccccacccctaggtgaacgacggatgtttatgttacatatatgtttgcacatttgcaggaccccgtcataaatatgtatagctttcccccaagcatgctgaatatgtatgactttattgtctgatacaggccctgtgaggcataaaacccaatctgcyctttccctcttcaaagaggaaacaccttcagcccatggtggagactttcttttcccagattgcaaactattatcaccaacaaagctctcctttctaccatttagccatcctggtggtcttttggacaacatgagtgatggaagccttatacaaaagagcacaaactgaatgattctaattagaggtagttttataacaggcaaaattaatctatggtggtagaaaatcagaatagtgtttgtgtactacga

SEQ ID NO: 881631 - DNA, 596 bp, Homo sapiens
tatattggatatcagatgatttgggatctacttcatttggaaaagtcacctaatttaatgttgcttcttcctcttttataagatgggacttatcatgattatcctttactgaatactgaccatttactaagcacctatcttatcttcacaagagcctttttggatcttattatccccattttttatgttaagaaactgaggtttagtgattatttatcaatatgtggctagtaggttgagattaaactcacctgagtctagctccaaatttctgttacaacatacaattttccttgttatgcattttcttactgagatttcaagtgttttattaagaaaattgggattttgaatcaaattttgcattttccaagaatagaacgcatactytccagaagaggagagtggatgcctcactgaaaaaaaaaaaaaaaaaaaaaaaaaaagaagaaagaaagaaaaagaaaatatcagccagatttcttagtgactaaatccaaagttgactaaggtcaagaaacatcttgtacttttatcagagttagaatattttatacaaacgtggcgacttttctcctaataatatataaatgtgg

SEQ ID NO: 881632 - DNA, 651 bp, Homo sapiens
tttgatgactctgaagggatttttttgtgtgtatgtgtgcaaggagcaggataattccagggaaaatttcagattgccggcggaggggatactacaaagaccttatatggacttcactggatacatttagatgctataaaattatagcatttaatgtgttaggaatatcttctggtattattctaactgtgttccccacatccagaaacatttctcaaagatgttgccactgggggtagcagtgggatgggagtggaagtgagaaaggaacgcttggactatgaatcttgcttcaatgagaagagatccattttatgaacttmcaattttgagctttcctgttgagtttcactcaaagaaaaatatgtgtccattttggacctctagaaagtagatgccgatatggaatttggagtgtaagatattggttgtgggaaatatctgtgaaggacagaggtgagaatgagcaagcatacatggaatagaataatcttagtccttagagaagtagatgccaaagtgggattaaaaatatccagatttcatgtaagaaacttgtatgaaaggaaataggaggccagaaaaggcttgtatggctataaaaccatggcaccagtctgattctaaagaaaaggaaaggagggatggatg

SEQ ID NO: 881633 - DNA, 694 bp, Homo sapiens
ctgacgtacctggttcatctctctgggactggttagacagtgggtgcagcccacagagggtgagcacaagcagggtggggcatcacctcacctgggaacagcaaggggccaaggaactccctgccttagccaagggaagccatgaggaactatgccatgagggactgtgctatccagcccagatactatgcttttcccaaggattttgcaacctgctgaccaggagatgccctcctgtgcctayaccaccaaggtcctgggtttcaagcacaaaactgggcagctgtttgggcaggcatcaagctagctgcaggagtttttgtttgttggtttgtaccccagtacaattgttctggagacagaaccattcatccctctgtaaagggggctgaagccagggagccaagtggtctcactcagcaggtcccactcccacagagcccagaaagataagaatcactggcttgaaattcccgctgccatcacagcagtctgaagtccacctggaatgactgagttggtagggggaggtgtatccaccattagtgaggcttgagtagacagttttcccctgatggtgctaaggaggcctggaagttcagactgggctgaactcaacacagcgtggcaaagcagctgtggccaaactgcctctctagattcctcttcactgggcagggcatctctgaaagaa

SEQ ID NO: 881634 - DNA, 694 bp, Homo sapiens
ctgacgtacctggttcatctctctgggactggttagacagtgggtgcagcccacagagggtgagcacaagcagggtggggcatcacctcacctgggaacagcaaggggccaaggaactccctgccttagccaagggaagccatgaggaactatgccatgagggactgtgctatccagcccagatactatgcttttcccaaggattttgcaacctgctgaccaggagatgccctcctgtgcctacaccaccaaggtcctgggtttcaagcacaaaactgggcagctgtttgggcaggcatcaagctagctgcaggagtttttgtttgttggtttgtaccccagtacaattgttctggagacagaaccattcatccctctgtaaagggggctgaagccagggagccaagtggtctcactcagcaggtcccactcccacagagcccagaaagataagaatcactggcttgaaattcccgytgccatcacagcagtctgaagtccacctggaatgactgagttggtagggggaggtgtatccaccattagtgaggcttgagtagacagttttcccctgatggtgctaaggaggcctggaagttcagactgggctgaactcaacacagcgtggcaaagcagctgtggccaaactgcctctctagattcctcttcactgggcagggcatctctgaaagaa

SEQ ID NO: 881635 - DNA, 668 bp, Homo sapiens
ttaagaatttcctgctaatattatggattgcttattctatgtagaagcactcacttagtgattattaatattaaacacgccaaagttagctcctgctttagtctgttttcagatcgagttactgctatgcagcctcctgacttttctggtagatctcctggcctaaaaatgatgagtgtctacagaggctcactccttgtccacgttagaagaacttggaaaaggagtgaagtaggcttcagcagcattagtgcctagagaatagtgaaactaagtagaaattaaaagtacctcttttttctttttgtgtgtgtgagactaatcattgatactattgaaaggaagaacaatcaactcatcttacttttcctttagaatatttcaattctaaatgatcagagttgttttgctttactctttaatgagaaattacttaactaaatacartttgattgcagttaaatttgtgaatttaaaaatgcatttatgaaaggcatgaagtttctgttttgtaaattattaataatgaccttacaaaatccccaaatctgttcaacatttttctatttgaaaaattaaaaaacaaagacataatttgctcgttctttttggggttattacatgttcaactgcatagaaacataactctattttcacaggaagatacc

SEQ ID NO: 881636 - DNA, 603 bp, Homo sapiens
taatttggcactatcagttcaactacaactatgtaacaaagcagtttatggtatctaaagaaaatatttcagaattgcacaaaattagttcagaatgtttataggaggttcaccatataaaggtgaaacatgttccttaagagttgtcattgaatttggacttagatttagaataaaaaattctggtgtcttaagtaaggaatctttccwgtttcaagagagttcctaaaagtattgtaatctatttacagaaccatgaaaaatgagaacaatatgaatatttattcggataatataataacagtaaaatacaatatgtgggtgtagcaggcaaaaaagggcacctcaaaagatatatttacttcctaatcccaagagcctgggaatattacataatagagccaaagatgcaattacattcaagatcttgagagaaggaatttatccagaattgtttggtgggccctaaatgtaatcacatattattataagggtgagacagagggaaattagacatgtggaagagaagatgcactgaagacaagaccatgtaaaggcagagcagatagagatatggccacaagtcgaggaaggccaacggcc

SEQ ID NO: 881637 - DNA, 603 bp, Homo sapiens
taatttggcactatcagttcaactacaactatgtaacaaagcagtttatggtatctaaagaaaatatttcagaattgcacaaaattagttcagaatgtttataggaggttcaccatataaaggtgaaacatgttccttaagagttgtcattgaatttggacttagatttagaataaaaaattctggtgtcttaagtaaggaatctttccagtttcaagagagttcctaaaagtattgtaatctatttacagaaccatgaaaaatgagaacaatatgaatatttattcggataatataayaacagtaaaatacaatatgtgggtgtagcaggcaaaaaagggcacctcaaaagatatatttacttcctaatcccaagagcctgggaatattacataatagagccaaagatgcaattacattcaagatcttgagagaaggaatttatccagaattgtttggtgggccctaaatgtaatcacatattattataagggtgagacagagggaaattagacatgtggaagagaagatgcactgaagacaagaccatgtaaaggcagagcagatagagatatggccacaagtcgaggaaggccaacggcc

SEQ ID NO: 881638 - DNA, 629 bp, Homo sapiens
aagaaggccataatataataattaaggaggtaatacagcaagaaggtataacaattatatatgtactcaacactggagcacctaaacatataaagcaaatagaaatagacctaaagggagagatagactgcgatattataatcrtaagtgattttaacatcccactttcagcaacatacagatcatccaaatagaaaatcaacaaagaaacattggagttaaactgcactctggatcaaatggtcctaacagttacctacagaaaagtcttttcaacatctgaagaatacactttttttttcaacagcacagggaacattcttcaggacagaccatatgtgaggctacaaaacaagttgtaacaaatttttaaaatcaaaattatatcaagtacgttttctgacaatggcctaaaattagaaatcaataataaaagaaactttgtaaactgtaaaaatacatataaattaagcaacatgctttgaaacaacaaataggccattaaaaaaaaagagaagaaaagttttaaatattttaaatatctcaagacaagtaaaaatggaaatacaacataccaaaacctatgggatacagcataagcagttctaagggaaaagtttatggcaata

SEQ ID NO: 881639 - DNA, 656 bp, Homo sapiens
aactgaaggaaataagagacacaaaaaacccttcaaaaaatcaatgaatccaggagctggttttttgaaaagatcaacaaaattgatagactgctagcaagactaataaagaataaaaaaagagaggagaatcaaatagatgcaataaaaaatgataaaggggatatcaccaccaatcccacagaaatacaaactaccatcagaaaatactacaaamaactctacacaaataaactggaagaaatgggtaaattgctgaacacatacaccctcccaagactaaaccaggaagaagttgcatctctgaatagaccagtaacaggctctgaaattgaggcaataattaatagcttaccaaccaaaaaaagtccaggaccagatggattcacagccgaattccaccagaggtacaaggaggagctggtaccattccttctgaaactattccaatcaatagaaaaagagggattcctccctaactcattttatgaggccagcatcatcctgataccaaagcctggcagagacacacacacaaaaaaaaagaattttagaccaatatccctaatgaacatcgatgcaaaaatctccaataaaatactggcaaaccgattccagcaccacatcaaaaaacttatccaccatgatcaagtggg

SEQ ID NO: 881640 - DNA, 656 bp, Homo sapiens
aactgaaggaaataagagacacaaaaaacccttcaaaaaatcaatgaatccaggagctggttttttgaaaagatcaacaaaattgatagactgctagcaagactaataaagaataaaaaaagagaggagaatcaaatagatgcaataaaaaatgataaaggggatatcaccaccaatcccacagaaatacaaactaccatcagaaaatactacaaaaaactctacacaaataaactggaagaaatgggtaaattgctsaacacatacaccctcccaagactaaaccaggaagaagttgcatctctgaatagaccagtaacaggctctgaaattgaggcaataattaatagcttaccaaccaaaaaaagtccaggaccagatggattcacagccgaattccaccagaggtacaaggaggagctggtaccattccttctgaaactattccaatcaatagaaaaagagggattcctccctaactcattttatgaggccagcatcatcctgataccaaagcctggcagagacacacacacaaaaaaaaagaattttagaccaatatccctaatgaacatcgatgcaaaaatctccaataaaatactggcaaaccgattccagcaccacatcaaaaaacttatccaccatgatcaagtggg

SEQ ID NO: 881641 - DNA, 572 bp, Homo sapiens
tttggccgggcttggtggctcacacttgtaatctcagcactttgggagaccgaggtgagtggatcacgaggccaggagatggagaccatcctggccaacatggtgaaacctcgtctctactaaaaatacaaaaattagctgggtgtggtggcgcatgcctgtaatctcagctactcgagaggctgaggcacaggaatcacttgaacccagtaggcggaggctgcagtgagccraggtctcaccactgcacttcagcctggtgacagagtgaggcttcgtctcaaaaaaaaaaaaaaaaaaaaaaaaaaacttttataattgtattttaaagaaacaatatggagtactgacttttatgataggtgtttagaaatgaagagacaagcaattttcagatgcttaaaacaaaaacggaataataataaaaaggaggattagaaaggccagaaacatatccactggtatgtattgctgaagatcatttctcatccaagataagatgcagatcttatactgctaaaggtggttttcaatcgagcctccctttgcaaagcacattcactcagtctatg

SEQ ID NO: 881642 - DNA, 589 bp, Homo sapiens
gctcctcaaaggagaaaagaggggaaaagatgaaaaagacaagagaggggtggggagagagcctttcctgacaggctgtggcatgtcagcgtttgctcctattccattaactggccttctctgtcgtcttgccttggtgcccatgacggcacatctttcatcactgcgtctgctgtcctcctytgaactcatggaagggccacatgtaattagatgaggtcagctgggggtgggggaggagagccaggctcgctgctcctaaacaggacctccaaaaaatcagatacagggtcgctcctgttcactgcctcatcagcaaggtcattaattggcccagatttctcagagagcatttaaagatgattcatcttaggaaaggctaacccctgtcttccaaatgcttggcctttttttttttttttcttcttctttttaactactgtgtaggaaaacgtctttaacttgattacgttttgaaaagtgatttctccatgacaaatcagtaccctttttgaaaacgtaccttgtccccagagacgttcttgctcggcatttcagcgggtctccaggagttcacgctctgaccccc

SEQ ID NO: 881643 - DNA, 584 bp, Homo sapiens
acacacacacactaggttcttgcatctgagggtggggcctgaatctctgtacatcaggcacaggaaggtgccactccttgctacttttctccaggtctcatgatccaatccctaatatttccattgtggaatacgcttgacacttacttcacatcatttgctctatctttgcattaactaaygatcatatcaaaacactgtcttttgaaaaaatttattgcagaggggtcacctaggaaagatgcacttggtaggggtcacctgtgcccccttgtcctcctttgctattcaaatcgtcctcaaacctaccctctggctgaggtgggcagtccaacatgcaggcaggcgcctggctgcctggaggcagcccttctcgttgccctgtcataattcaagcaggtctttctgatgccagaggaaatgcctacaagccttagaaaagtcttagagatttttaataagggttattagcctctattcctttggaacaagaaagggtagagctgactttgatcatgaagttttcgattctctcgctgccgtcacacctcttccaatgcctcagtaggagacaccttctcacc

SEQ ID NO: 881644 - DNA, 599 bp, Homo sapiens
attgaaaaggaatgctccatgatgtgtcttgtctactatctctggaatcagtatcaattccaagtagtaatgtaaaataaaagatctatgaaacaactgagcggggtggggcaggcacagtggctcacacctgtaatccctgcactttgggaggccaaggagggcagatcacttgaggtcaggagttcgagaccagcctggccacatggcgaaatcccatctctactaaaacatacaaaaattaccctagtgtggtggcaggcacctgtaatcccagctactcaggaggctgaggcaggagaatcacttgaaccagggaggtggagggtgcagtgagtcgagatcgcaccactgcactccagcytgggagacagagcaagactatctcaaaaaaaaaaaaaaaaagtctactttatgttgtcattaaacagtaatgatatctttttaagatctcaaatcttttggtaactaaaaatacaattatgtaattaatttaaaattcattaattctcagtgactttaaaaaacccctgtccatctccttagtttatagcttcctaaagtatcttaatttaaaggatgataagccattctaacat

SEQ ID NO: 881645 - DNA, 603 bp, Homo sapiens
gactttattttgtgatcgtgtgagtcaatcctccttaataaactccctttcatatatacatatatcctgttagttctgtccctctagagagccctaatacagtaagagattacatgggatgaatcagaaaatcataaaacatggaaagggtccttaggcaaaaatatttgtttctttctctcctgttcaaggcctagctctgygtgtgtgtgtaacatacacacacatacacgttaaacaccagttaaacatgcatcattccctacagtcctcttttttcctcttcatcagtttcaattccattattatttaaagcaattggtattatatatttctgtcttactccttggccaaatctcaatatagtttatccaaactatctgtcttttctgaacctacaggagagaagctggagtttgaaggagaaaaaccacacagctagttatgttttaaatacgtgactgcaaattgaaaattcgctattgttggaaatctatcactttcccctggtgatttttgataccacactttgtaaaaaatatacatatgaaggcatcttctgtcatctcatagcttctagacacctctcaacaccttggtgaa

SEQ ID NO: 881646 - DNA, 596 bp, Homo sapiens
gtggatttagaagaaattataataccaaatgaatctgaaaactttccttgggaaatctggaatatcaattatgaaacatattttattattatttattctgttaaaccactaagcattgggaaatcatttttgttaatttatatattcttagaatactgtatttcacaaagcttttaaaaagtattagcataggcatttctttctttttcttttgcttttgtttgtttgtttttgttttttttttgttttttttaaattatactttaagttttagggtacatgggcacaatgtgcaggttagttacatatgtatacatgtgccatgctggtgcactgcacccactaactygtcttctagcattaggtatatctcccagtgctatccctccccgctccccccaccccacaacagtccccagagtgtgatattccccttcctgtgtccatgtgatctcattgttcaattcccacctatgagtgagaatatgcgatgtttggttttttgttcttgcgatagtttactgagaatgatgttttccaatttcatccatgtccctacaaaggacatgaactcatcatttgttttggctgcatag

SEQ ID NO: 881647 - DNA, 596 bp, Homo sapiens
gtggatttagaagaaattataataccaaatgaatctgaaaactttccttgggaaatctggaatatcaattatgaaacatattttattattatttattctgttaaaccactaagcattgggaaatcatttttgttaatttatatattcttagaatactgtatttcacaaagcttttaaaaagtattagcataggcatttctttctttttcttttgcttttgtttgtttgtttttgttttttttttgttttttttaaattatactttaagttttagggtacatgggcacaatgtgcaggttagttacatatgtatacatgtgccatgctggtgcactgcacccactaacttgtcwtctagcattaggtatatctcccagtgctatccctccccgctccccccaccccacaacagtccccagagtgtgatattccccttcctgtgtccatgtgatctcattgttcaattcccacctatgagtgagaatatgcgatgtttggttttttgttcttgcgatagtttactgagaatgatgttttccaatttcatccatgtccctacaaaggacatgaactcatcatttgttttggctgcatag

SEQ ID NO: 881648 - DNA, 593 bp, Homo sapiens
cttctagttttgaaggtaaatccaggcaggaagaagtgagaaatcaggaaagtcgtctctgaattgtgctattattacctgacattggtgcactgtggaataggcatatatttatatggacttctttctcttgtgaatggtgttgtttcttaacaccaaaactaacatgtctattttacatatccgtattcatacttaatcacacaaatacttgaaaattctataggtttgctattcacttccctcagggcaaattaaatgtcatttaaaattttcttctacattttgacttacaatttgaactaaaattctattaggaacaayactctttcatattccacaggttccatatgctatttttttcacatatttgatgttgatcaccactttccaatcaatcttatcttctctatattcaacatatgcacagtctttaattttggttacttttgtgtcaagccatttcacaattacagtatcttttctgttttttactttccatgtgagatatgaatatagcataatagagtggataaaagcattctcaggctattttccttctgacatttactgactgggtaaccccagaccag

SEQ ID NO: 881649 - DNA, 588 bp, Homo sapiens
tagagagccaagagcaaacaaaccccagagctagcagaagacaagaaatagccaagatcatagtggaactgaaggatatagaaacacaaaaaccccttgtttttaataaatgaatcctggagttggctttttgaaaaaaaaaaataataaaatagatagactgctagctagactaataaagamgaaaagagagaagaatcaaatagacacaataagaaatgataaggggaatattaccactgaccccacagaaatacaaacaaccatcagagaatactataaacacatctatgcacataaactagaacatctaaaagaaatggataaatttctggaagcatacactctcccaagactgaacctacgaagaaattgaaaccctgaatagaccaataatgagttctgaaattcaggcagtaataaatagcctaccaacgaaaataaagcccaggaacagatggattcacagctatattctaccagaggtataaagaagaggtggtaccttgtctacttaagcaattccaaacaatcaaaaaggagagactcctccctaactcattttaggaagccagcatcatcctgata

SEQ ID NO: 881650 - DNA, 588 bp, Homo sapiens
tagagagccaagagcaaacaaaccccagagctagcagaagacaagaaatagccaagatcatagtggaactgaaggatatagaaacacaaaaaccccttgtttttaataaatgaatcctggagttggctttttgaaaaaaaaaaataataaaatagatagactgctagctagactaataaagaagaaaagagagaagaatcaaatagacacaataagaaatgataaggggaatattaccactgaccccacagaaatacaaacaaccatcagagaatactataaacacatctatgcacataaactagaacatctaaaagaaatggataaatttctggaagcatacactctcccaagrctgaacctacgaagaaattgaaaccctgaatagaccaataatgagttctgaaattcaggcagtaataaatagcctaccaacgaaaataaagcccaggaacagatggattcacagctatattctaccagaggtataaagaagaggtggtaccttgtctacttaagcaattccaaacaatcaaaaaggagagactcctccctaactcattttaggaagccagcatcatcctgata

SEQ ID NO: 881651 - DNA, 633 bp, Homo sapiens
gttagtggtgatatcccctttatcattttttattgggtctatttgattcttctatttagtctagctagcagtctatttcatcaatttttttcaaaaaccagctcctggattcactgattttttgaagggctttttgtgtctctgtctccttcagttctgctctgatgttagttatttcttgtctactgtgagattttggatttgtttgctcttgcttctctagctcttttaattgttatgctagggtgttgatttgacatctttctagctttctgatgtgggcatttagtgctataaatttccctcttaacactgctttatctgtgtccyggggatttgtatatgttgtctctttgttcttattggtttcaaggaacttatttatttctgccttaatttcattttttaccaggagtcattcaggaacaggttgttcaattgccatgtagttgtaaggttttgagtgagtttcttaatcctgagttctaatttgattgcactgtggtctgagagactgtttgttatgatttcagttcttttgcatttgccaaggagtgttttgcttccaactatgtggtcaattttagaataagtgccatgtggcactgagaagaatgtatattctgttgattt

SEQ ID NO: 881652 - DNA, 576 bp, Homo sapiens
tttcaaagggaatgcttccagcttttgcccattcgatatgatattggctatgggtttatcataaatagctcttattgagatatgtccatcaatacctagtttattgagagtttttaacatgaagggagttgaatattatcaaaggmcttttctgcatctattgagataatcatgtggtttttgtctttgattgtgtttatgtgatgaattatgtttattaatttgcatatgttgaaccagccttgcatcccagggataaggccaacttgatcgtggtggataagttttttgatgtgctgctggattcagtttgccagtattttattgaggattcttgcatcactgttcatcagagatattggcctgaagttttctttttttgttgtgtctctgccaggttttggtatcaggatgatgctggcctcatgaaatgagttaggaaggagtccttcctttttaatatttggaatagtttcagaagggacagtaccagctcctctttgtacctctggtagaattcagctgtgaatctgtctggtattgggctgtttttggttagtaggctattaattacca

SEQ ID NO: 881653 - DNA, 647 bp, Homo sapiens
tattgtattctctgatggtagtttgtatttctgtggggcaaattctttaagaatgttgaatattggtccccactctcttctggctggtagggtttgtcctgaggtgtccacttttagtctgatgggcttacctttgtaggtgaccaggcctttctctctgtctgtccttaacagcttttccttcatttctaccttggagaatctgatgattatgtgtcttgtgattgatctcatggagtatcttagtggtgttctctgtatttcctgaatttgaatgttggcctgtcttgctagatttgtaaagtgctcctggataatatcctgaagtatgtttgccagcttgtttccattctccctgtctccttcaggtattccaatcaatcataggttctgtctgtttacatagtcccatatttctcagaggctttatttgttcmtttttttctctaattttgtctgcatgtcttatttcagcaaggtggtcttcaaaaactgatattttttcttccacttggtcaactggtctattgatagttgtgcatgcttcacgaagttctcgttctatgtttttcagctccatcaggtcatttatgatcctctgaaaactgattattctagttagcggctctctaaccttttatgaaggt

SEQ ID NO: 881654 - DNA, 598 bp, Homo sapiens
cattaacagaatgaaaataaagcattatatgattatatctaaatatgtggaaaaatcatctatcaaatttcaacatccttttacagtaactctcaacaaattaggtatagaaggaacatacctcaatataataagggccrtatatgataaacctacagcaaacatcacactcaattgtgggaagttcaaggcatttcctctaacatcaaaaaaaaaaaaaaaaggacaaataacgcccactctaaccacttctattcaaatggtactggaattcctagccaaaaaaaaagaaaaaaaaaaaaaaagaaaagacacatgaattggaaagaaataaaactgtctctgtttacagatgacatgatgttgtatgttgaaaaccttaaagattccacaaaaacaccgttaaaactaataaaatcagcactttcaagacaaaaaatctacataatcagttgtgtttctgtacagtaacaacaaactatacaaaatataagagaacactcctgtttacaatagaatcaaaaagaataaaatgcttaggcatcaatttaaccaaggaggtgaaatatatctacaccggaaattataaaacattgat

SEQ ID NO: 881655 - DNA, 608 bp, Homo sapiens
tttcccattctgtatgatattggcttcaggtttctcattgatggctcttattattttgagatatgctcccccattgcctacattgttgagagcttttaacaacaagggatgttaaattttatcaaaagccttttctacatctattgaggtgatcatgtggttttttagtctttttatgtgatgaattgcatgtgttgatttgcatgtgttgaacaaacctggtatctcagacataaagcctacttgatcatggtgaattagctttttgatgtgctgctggattcatttcacgggtattttgttgagattttcacatctatgttcattaagggtaytggcctgacgtttactttttctgctgtgtttctgccaggttttgatattagaataatgctggcctcataaagtggatcaaagaggagtccctcctcctcaattttttggaatagtttcagtaggaatggtaccagctcttctttatatatctggtagaatttggctgtgaatccctctgatccctgagctttttctgattggtaggcattttattactgattcaattttggaactcactgttggtctgttcagggactcagtttcttcctggt

SEQ ID NO: 881656 - DNA, 633 bp, Homo sapiens
tcaaagactgcattatttcctctggaccaagttcctctctgtcctttagttgtgttattcttaatattgactctagtcttaaaaacagttatttcttccacatcacaaagtaacagcaataattttaataatcacatcctgtgagaaagagtgagggtctcctaggaggcacgggtagttttactggtcatttttggttaaatattgttcccctagagctgagagatgaagcctatcccacatagaatgagaatagagaagaggaaagaggtgaaaggtggtgggttttgtgcaacctggactcaggcaaagtcttctattcctatcagatgttttcactgaagtcagcaycttccatttatatagcagggcatcttcacttggtccatgtacttggaagagaaaaaaattacactttattttctctaacttgtaattaaaatttaatatttcatttaattatatgtgtagccaataaaccacagtagctttagcaataactatgactttgccatcgataggaataatagatattttcatatccactagttattccaatcttcaaatattgtttatcttcattatttcttcaaaaattatggtagttggagcaagatggccaaatagaaggtt

SEQ ID NO: 881657 - DNA, 609 bp, Homo sapiens
aactactcttcctaccactttgcaattgaataggtattttattttgttcccaggttttgcatctgtaaattaagagaatatcagttaggattatgtttagtttcagataacaaaaacctcaaatgatgtagtttaaatgagataaaagtttattttgactacatggaaaaatgttctgagataggagatgcagggttgctatgtggctcctcaaagatgtcagaaacttaggtcagtttcaattcaccrctctgacacattgtcagactcctaccaacacatctgtgtaccagacagcaggatggaaaaaatggtaatgaagaaacgtgcaaacagcacacaatatcatcctttttagggcatctttaagaagctgtaacacacttctattttgctcaccagaactcagtcacataaccacaccttagtttcaaaggaagctgagaaatgtgttttcgattcctgtgccttttacatagctaaaaactggcaggttcttttattaagaacaacgacaacaaaagccaagaaggttaataaaatgtctagctcatggtgttaacctaaactagtgttattttgtctttcttatccacttctgtttttcct

SEQ ID NO: 881658 - DNA, 665 bp, Homo sapiens
tagatgcagcaaaccaccatggtacacttttgcctatgtaacaaacctgcacatcctacacatgtattccagaacttaaaataaaatttaaaaaaaaaaaagaaaagaaaaaagaaaacctagaacaggaaggaaggaccttgtcccaggtgtagcagattctccttggttaccctcaatacgtacaccatatctatcttctctctctctctctcttcgttagtaatagagattgcgcattwtaatcaccacaaagcctttcagtcaaaggactgtatttcctggcattctatgcagctggctttgatcatgtgactaagtatggcctatcttccctctccctcatgacttaaacgaaaaagaatagtgaaaactggtctatgagataaagccacagcatgaggatagcagagcaacaaggtaatgaagccttgataatgacatatttaaaggattgtatcagccttggaacaccatattagcacagaaccaccttccagtattttcacatgaaggagagatgaacatctaccatattcaagtgacattattttcatgtctcataaaacagctcaactactatcataatacactagctgaagcccaaaagatggccagatattgtttattttttccacccagcacagtgtgaatgcagaaaattt

SEQ ID NO: 881659 - DNA, 607 bp, Homo sapiens
aacaataaaagaggaagataggaacaaatgatagacaaaacaatcactaaacaattaataaaatgaaaggagtaagccctcacctatcataaaaactttgaatatacatgatttaaattccccaattaaagatatagatagaatgaatggattacaaaaaaagaccaaataatatgctgtctacaagaaactcactttacctgtaaagacacatagactgcaagtgaaaggaaggaaggatattccatgcaaatggaaaccaaaagcacacagaagtagctatatttatatcagacaaaatagatcttaagtaaaaaaaaaaaaaaawaaataaaagagaaagagaagggcattatataataataacaggatcaattcagcaagaggatacagcagtcataaaggtatatatactcaatacctgagcacacagatatataaggcaaacatcactgaaactaaagagacagatagcctccagtacaataatagatggggactccatagtctgactttcagcattgaagggatcatctaaacagaaaatcaacaaagaaacatcaaaatgaacctgcactatagaccacatggacctagcagacactta

SEQ ID NO: 881660 - DNA, 681 bp, Homo sapiens
attcgccttcttttcctcatgtgcacacattcttgtttattactgaatttagttaaggacaaagaaggtgttatcttcctgccaaatcggttttctgttaacttaggcaatagattcagcccactactcactcttccctgaaacatctgcagtgcttaacaacctactgaagtctcaaaaagaatttgatacgtgggtggggctgctggtggtacatcccacactggtaaaatgttttctctgttttttattagaagctcaaatcaacctcagagttccttgcatattcaattgcctgctcagatccttctaaaagattyctatctcacaatacaagtaaaattccaatggcctttgaggccctaggtaacctggcctctacctccctcctgatctcagctcctacaactgtctcaccgattcagtccattcctgctatatgtgaatcctgccacttctgattagtttgaaaatgggactcaatgccaaacaaataaatcacagatagccacagttacctttgtactatcagttatatccgaatgataggcagtgagccttgaaatgaaaattatgagcaaattctttgtaaaaacattcaaagtaaatgataaataccagtggtaagattaaatgtaacatggctttgctgaaattcacatctgtcccaaattatgattt

SEQ ID NO: 881661 - DNA, 637 bp, Homo sapiens
agaacctttaatgtctgttattcttttttttgagatagagtctcgctctgttgcccaggctggagtacagtggtgcaatctcggctcactgcaacctccgcctcctgggttcaagtgattcttctgcctcagcctcctgagcagctggggctacaggcgcgtgccaccacgcctggttaacacgcctggctaattttttgtatttttagtacagacggtgtttcaccgcattagccaggatggtctcgatctcctgacctcgtgatccacccacctcagcctcccatagtgctgggattacaggcgtgagccaacgcacccggctattctctcttatacgttatcttgctcgtattaattcttctggtcctgtaaatcctattctctttttcaccactttcctgtgactcttttattttaaaaatcatattatggctkagtgcagagtggctcttgcctgcaatctcagtactttgggaggttgaggtgggagaatcgcttgagcccaggagtttggtaccaatcttggcaatgtagtgagacctgtctctacaaaaaattaaaaaattagctaggtgtggtggcacatgcttgtagtcctagctactcaggggactgaggtgggaggattgcatga

SEQ ID NO: 881662 - DNA, 621 bp, Homo sapiens
cagttgagcagttagaaggacaattatgtaataacaggcaaaacaattacaaaatgcaatgtccaagtggcattgttttcaatccaaagctgcctctccaaggacattctcactgttcaaaaggggcttgagatgctatggtaccaaaattccaaagagctgatattggtagaatataatggcaagcatcaggactctgcttatagagtggatctcctccttcatttattgatctgttatcgcaggtcctccctttctgctttgaagagcctggacatgcccaaggaaaagtagtagtggtggtgaaggtttcattgaaggtagtggagcccaagaagctgaagtgaccttcasggtgtagctctcagagaagtgtcttacaaaataattaaaatatgttcactctcttcaaggtatcttctaacagttcaggtgaaccagaccaactatgatgcaaataatggagtaggaagggattttaatttacttataagacttactgggtatcatgaaagttgatctatcttctatagtaccgtcatcaccttgctcatcctaccacaaatcctagcacttagagggagctcaataaataaatactaaatgaatgaactggcttta

SEQ ID NO: 881663 - DNA, 582 bp, Homo sapiens
taaaatgaagcatagacagagtgaaaagaggaagtgaatattctaaatggacttcagtatgagggaggttcttctgtctaaacaaaggcatggcgttgagaattagcctgggatgcaaaaggggatttaactatttggtggtgttaggaagcaaggcagaattttaacctgaaataatatgtaatagcaagccctgaagattatgagatagggtatgacatgaaggggcatttaagaaaaatrgtttagacgtagacttcagaataaatgggaaccaagcaaaactaggctcaaagatgttggttaggaggctgcttcagtaattcaattctaagaagagaatggaaaaatatcttcttggtagtttggatttggaagaagaaggagttcaaggttgaaaggaaagtacaaattgtcatatttcctaacatgcaagtattagtcacttactgctgtggtaatgctgtgtaacaaatccctcccaaatttagtggcttacaataatatgcatttacttatcttgcttataagtctttgggctggccagggtggctttgtttctggctgcaacttggtggggct

SEQ ID NO: 881664 - DNA, 582 bp, Homo sapiens
taaaatgaagcatagacagagtgaaaagaggaagtgaatattctaaatggacttcagtatgagggaggttcttctgtctaaacaaaggcatggcgttgagaattagcctgggatgcaaaaggggatttaactatttggtggtgttaggaagcaaggcagaattttaacctgaaataatatgtaatagcaagccctgaagattatgagatagggtatgacatgaaggggcatttaagaaaaatggtttrgacgtagacttcagaataaatgggaaccaagcaaaactaggctcaaagatgttggttaggaggctgcttcagtaattcaattctaagaagagaatggaaaaatatcttcttggtagtttggatttggaagaagaaggagttcaaggttgaaaggaaagtacaaattgtcatatttcctaacatgcaagtattagtcacttactgctgtggtaatgctgtgtaacaaatccctcccaaatttagtggcttacaataatatgcatttacttatcttgcttataagtctttgggctggccagggtggctttgtttctggctgcaacttggtggggct

SEQ ID NO: 881665 - DNA, 628 bp, Homo sapiens
tagtgttcactggagctgtcataggtcctcagtcaacagcagaatgcttggggacttgctgtctcctgccctccccttgctcccacccacagcagatttgaaaccccctctcatgctaatgccgtgcttgcttttactcctagatgctgtgagaatgggtagccatcgaaagcaattctgttcatcagacaagagttcttgctatttacaccacatctgcagtgacttcctccactgaagtattgaacctttaaagtcatccatgaaggttgaaatcaacttcttccaaactcctcataggattgatattttgacctcctcccataaaygacaaattttctgaatgtcatctaaaatggcaatttttttccagaaggttttcaactttgcccagatccattagaggaatcactgtagcagttatatccttaataaatgtatttgtaaaataataatacttgaaagtcaaaattactccttaactgtgggctacaggatagatgttgtgttagcagtcatgaaaaaaacattaatctccttgaacatcttcatcagagctcttgggtaaccaggtgcattgtcagtgaccaggaatattttgaaaggaatttcaaaaggtctcaacagt

SEQ ID NO: 881666 - DNA, 617 bp, Homo sapiens
cagtttattgctaagtcacctgttatgatctgattaaatgcatgcctacctttcctgatccctccatcagaagcacacgtgtaatcacctgtcgtcagtaggaaacatgtttcccctcttctgtttttgtctctggtactagagcgtctgatggggagcctttctgggggtgatartggcggctcacttcctgtactgtcgtcacctgataacactggtcacagcaccatgcccattgacagacagtgatgaatgaggaaatgagacagtacaaagagtttacacagaatgccggtagtccagtcactcgatatacaacacacaagaatcacatcacaataagaaaaagaatttttatcactcttcacgaaaaattacatggagcaaaatggaaatgtattgaaaagaatagaaatgttttttgggagattttaattccattttggattttatctaataggaaactgcctttcacacgactaatatgaattcaaaataaatgtgaaaatgaagaagcatgtggattattgtcttacaatttttgacgttatctatttactctgaataggaatatttaaaaatggaacctatttaagaaaatatcttaagtaaacttt

SEQ ID NO: 881667 - DNA, 606 bp, Homo sapiens
tcatagataattttatttagacttcaaaaaagatctgtaaaatggttattatcattccattttaagatgacataattaagattgagagggtaaattttcgtaagtctcataagtaacagaactagaattagaattcagattgctttgacgtcaaaacccattatttctcctagttgtactcttcttgactcatattacrtattttgtcccacaaggataacataaacaaatctgtcaagtgccttactgggttacagatacactatgcacagtacttcttcttaaagggatcatataatccagtggtttccaaggccagctagataatagaatcacctgagaataatcataaacatatagattcctggggtgcgcccttatctctgctaatttagaagctatagagaagtgcttggacatctgtattcttttcatctcttttagatacttgtgatatagaaaaaccactgttgaaatctccccttaatgcaggacttcctaaacttttctgcacattagactcacataggaggcttccaaaactactggaagccccagatactgtgctttggcaccactgcctcaatatataaattccctttataa

SEQ ID NO: 881668 - DNA, 595 bp, Homo sapiens
gtaatagtaaaactaccatgttaactgcattactaatgggtttattcatttatactcatcacttgtcctttgcataacagtgtgggttaggcttctaggtaatatgtgaatagcaacatacaattacaaagcacttttccttgcattttcttccattcttacactttacaactctgtaaaactatagatcaggtaattctttacgtccacatgagggacagggactttcccaagatcatacaactcaccaggttgcatctttttattttgcttagtggtttctttaaatccacttgtatttagcacactttctatgtgcattgaaattacatatcaaattattccttccttaataacatstaatttactaatgtgttttttgaagtatgtttaaaggacattaatctacaaagcctttctagtgtttctattaaatttgtatgccacatgcgttggcatatagtatactttctttgtgcaaatgtttttcaagagctactccccaaatgactttgaaaaggtgtgaaaaatagtccagatttgggaaaccacagttctttgatgacattaaaccggtttgatcatattacacttg

SEQ ID NO: 881669 - DNA, 632 bp, Homo sapiens
atttttatcctcattttatcaatgagcaaagggcttaaagaagctaagtctttttttttttttttttaattgtactttaagttctgggatacatgtggagaacatgcaggtttgtaacataggtaaacatgtgccatggtggtttgctgcacctatcaacccatcatctaggttttaagccccatttgcataaggcatttgtcctaatgctctccttccccatccccttcaacccctgacaggccctggtgtgtgaagttcccctccctgcgtccatgtattctcattgttcaactcccacttgtgagtgggaacacgcggtgtttggttttctgttcctgtgttagtttgcagagaatgatggcttccagcttcatccatggccctgcaaaggacatgaactcattcttttttatggctgcatagtattccatggtgtatatgtgccaaaataagctaagtcttatagctaagatgtyggaggcaaaatttgggcttagacctgtcctcaaagtctatggttttacctcctatggtattctcttagcatgaaaaatgtcatgaaggatatttgatgacatgggaaattgtttatgaaacagaattaagtaaaaacaattacaaaacagtat

SEQ ID NO: 881670 - DNA, 645 bp, Homo sapiens
cattgccgaaactggagtaggtaaacaagtggccaggaagctcaaactgggtggagccgactgcagcaaaaagaggcttgcctgcctctgtagactccacctctcggggcatgcatagctgaacaaaggcagcagaaacctctgcagacttaaacattcctgtctgacagctttgaagagartagtcgttctcccagcatgcagcttgagaactgagaacgggcagactgcctccacaagttggtccctgacccccaagtaacctaactgggagacaccccaaagtaagggaagactgacacctcacacagccaggtactactctgagacaaaacttccagaggaactataagacagcaacatttgctgttcaccaatatctgctgttctgcagcttctgctgcttatacccaggcaaacagggtttggagtggacctccagcaaactccaacagaccagcagctgagggtcctgactgtcagaaggaaaactaacaaacagaaaggacatccacaccaaaggtgatctgtaagtcaccatcatcaaagaccaaaagtagataaaactacaaagattggggaaaaacagcagaaaaactggaaactctaaaaatcagagtgcctctcctcctccaaaggagcaca

SEQ ID NO: 881671 - DNA, 645 bp, Homo sapiens
cattgccgaaactggagtaggtaaacaagtggccaggaagctcaaactgggtggagccgactgcagcaaaaagaggcttgcctgcctctgtagactccacctctcggggcatgcatagctgaacaaaggcagcagaaacctctgcagacttaaacattcctgtctgacagctttgaagagaatagtcgttctcccagcatgcagcttgagaactgagaacgggcagactgcctccacaagttggtccctgacccccaagtaacctaactgggagacaccccaaagtaagggaagactgacacctcacacagccaggtactactctgagacaaaacttccagaggaactataagacagcaacatttgctgttcaccaatatctgctgttctgcagcttctgctgcttatacccaggcaaacagggtttggagtggacctccagcaaactccaacagaccagcagmtgagggtcctgactgtcagaaggaaaactaacaaacagaaaggacatccacaccaaaggtgatctgtaagtcaccatcatcaaagaccaaaagtagataaaactacaaagattggggaaaaacagcagaaaaactggaaactctaaaaatcagagtgcctctcctcctccaaaggagcaca

SEQ ID NO: 881672 - DNA, 655 bp, Homo sapiens
tgtgctcctttggaggaggagaggcactctgatttttagagtttccagtttttctgctgtttttccccaatctttgtagttttatctacttttggtctttgatgatggtgacttacagatcacctttggtgtggatgtcctttctgtttgttagttttccttctgacagtcaggaccctcakctgctggtctgttggagtttgctggaggtccactccaaaccctgtttgcctgggtataagcagcagaagctgcagaacagcagatattggtgaacagcaaatgttgctgtcttatagttcctctggaagttttgtctcagagtagtacctggctgtgtgaggtgtcagtcttcccttactttggggtgtctcccagttaggttacttgggggtcagggaccaacttgtggaggcagtctgcccgttctcagttctcaagctgcatgctgggagaacgactattctcttcaaagctgtcagacaggaatgtttaagtctgcagaggtttctgctgccttttgttcagctatgcattgccccgagaggtggagtctacagaggcaggcaagcctctttttgctgcagtcggctccacccagtttgagcttcctggccactttgtttacctactccagtttcggcaatggtgggcg

SEQ ID NO: 881673 - DNA, 655 bp, Homo sapiens
tgtgctcctttggaggaggagaggcactctgatttttagagtttccagtttttctgctgtttttccccaatctttgtagttttatctacttttggtctttgatgatggtgacttacagatcacctttggtgtggatgtcctttctgtttgttagttttccttctgacagtcaggaccctcagctgctggtctgttggagtttgctggaggtccactccaaaccctgtttgcctgggtataagcagcagaagctgcagaacagcagatattggtgaacagcaaatgttgctgtcttatagttcctctggaagttttgtctcagagtagtacctggctgtgtgaggtgtcagtcttcccttactttggggtgtctcccagttaggttacttgggggtcagggaccaacttgtggaggcagtctgcccgttctcagttctcaagctgcatgctgggagaacgactaytctcttcaaagctgtcagacaggaatgtttaagtctgcagaggtttctgctgccttttgttcagctatgcattgccccgagaggtggagtctacagaggcaggcaagcctctttttgctgcagtcggctccacccagtttgagcttcctggccactttgtttacctactccagtttcggcaatggtgggcg

SEQ ID NO: 881674 - DNA, 671 bp, Homo sapiens; identical to SEQ ID NO: 871788

SEQ ID NO: 881675 - DNA, 663 bp, Homo sapiens
gctggccagtattggtgacatttttctctgcccatttcacacagcttggtgaaattgtgtttccagagcatccactggaagtcctcagtgatctctttcaagggtccctaatgtaagctttctattgtctttactcatcaataaaactggcattaatgtaaccagatacttctactccatggataggctgcaagtacaaccttgtggatttatatggtgtaatattaacaaggtgatttttgaaattattgcatggaaacacagagccaaatcatgagtgaactcccattcacaattgcttcaaagagaatacaatacctaggaatccaacttacaagggatgtgaaggacctcttcaaggagaactacaaaccactgctcaacaaaataaaagaggatacaaacaagtggaagaacattcmatgctcatggataggaagaatcaatattgtgaaaatggccatactactgaaagtaatttatagattcaatgccatccccatcaaggtaccaatgactttcttcacagaattggaaaaaactactttaaagttcatatggaaccaaaaaagagcccacattgccatgtcaatcctaagccaaaagaacaaagctggaggcatcacgctacctgacttcaaactataccacaaggctacagta

SEQ ID NO: 881676 - DNA, 584 bp, Homo sapiens
ttttgtatttatagtagagatgaggtttcaccctgttgaccagactggtctcaaattcctaacctcgggttatccacctgccttggccgccaaaaatgctgggattgcaagcatgagccaccacactcagccttgactttttttttttttttttttttttttttttactaatttggataccttttatttytttctcttgcctgattgctctagctaggacttgcagtattatgttgaatagggttcatgaaagtagactagctgttttgttccatttcctagaggaaaaatactttagcttttccccatattgtataatgctacccataagtttgtcatatagggcctttaatatgttgagatgtttctccttctatgctaatttgttgagaattttcatcatgaagaaatgttgaattttatcaaatgctttttcagtgtatattgatataatatttctttgtccttcattatgttgaggtgatatttattgatttggtgtacattgaactatttttgcatcactgggataaatctcaacttatcatagcatattgtctttttgatgtgttgtggatttggtt

SEQ ID NO: 881677 - DNA, 584 bp, Homo sapiens
ttttgtatttatagtagagatgaggtttcaccctgttgaccagactggtctcaaattcctaacctcgggttatccacctgccttggccgccaaaaatgctgggattgcaagcatgagccaccacactcagccttgactttttttttttttttttttttttttttttactaatttggataccttttatttctttctcttgcctgattgctctagctaggacttgcagtattatgttgaatagggttcatgaaagtagactagctgttttgttccatttcctaraggaaaaatactttagcttttccccatattgtataatgctacccataagtttgtcatatagggcctttaatatgttgagatgtttctccttctatgctaatttgttgagaattttcatcatgaagaaatgttgaattttatcaaatgctttttcagtgtatattgatataatatttctttgtccttcattatgttgaggtgatatttattgatttggtgtacattgaactatttttgcatcactgggataaatctcaacttatcatagcatattgtctttttgatgtgttgtggatttggtt

SEQ ID NO: 881678 - DNA, 584 bp, Homo sapiens
ttttgtatttatagtagagatgaggtttcaccctgttgaccagactggtctcaaattcctaacctcgggttatccacctgccttggccgccaaaaatgctgggattgcaagcatgagccaccacactcagccttgactttttttttttttttttttttttttttttactaatttggataccttttatttctttctcttgcctgattgctctagctaggacttgcagtattatgttgaatagggttcatgaaagtagactagctgttttgttccatttcctagaggaaaaatactttagcttttccccatattgtataatgctacccataagtttgtcatatagggcctttaatatgttgagatgtttctccttctatgctaatttgttgagaattttcatcatgaaraaatgttgaattttatcaaatgctttttcagtgtatattgatataatatttctttgtccttcattatgttgaggtgatatttattgatttggtgtacattgaactatttttgcatcactgggataaatctcaacttatcatagcatattgtctttttgatgtgttgtggatttggtt

SEQ ID NO: 881679 - DNA, 609 bp, Homo sapiens
atataagctaaaaatagtgtttgtttttctattttaagcattatctattgacctcccactgtggatgaggattttctctttcatcccttcttaattgccagcacacacatgtgtccttttcataatcctatacctgctaaatattgtaaattaggttagatcaacatgcaatatttacattaactcattattattactacataggatctctattcaccatcatctggggaaaatatcctttgtctcttgtttgtattgtgtctcttgtatcttgtctcccacgtcttcttcctttcttggtttactctctcattgtgggagataatagcctactataacttcctgaaaaaatatacgtgggattttgggaggttttcttgcatgatgatattttggctaggmaaactgtactctgttggaaataatttctcttcagaattttgacggcattggctcactactttctagtttcagaatttgttattcaaaaggcccaagccattctgatagcctaattcctgtggaaatctaaatcgtctcccctctctagcccctgtggaagtttgtaaaagatccttagttctctgaaatttcatagtgatttaactt

SEQ ID NO: 881680 - DNA, 607 bp, Homo sapiens
gttttgatttccattgctatgatgacaagtgatgaggagcattttttcatgtgcttgctggctgcataaatgtcttcttttgagaagtgtctgtcatatcctttgcccactttttgatggggttgtttgtttttttcttgtaaatttgtttgatttctttgtagattctagatattagccctttgtcagatgggtagatttcaaaatttttctctcattctttaggttgccttttcactctgatggtattttcttttgctgtgcagaagctctttagtttagttagatcttatttgtcrattttggcttttgttgcccttgcttttagtgttttagtcatgaagtccttgcccatgcctatgtcctgagtggtattgtctaggttttcttctagggtttttatggttttaggtctaacatttaaatctttaaatcatcttgaattaatttttgtataaggtgtaaggaagggatccagtttcagctttctacatatggctagccagttttcccagcaccatttattaaatagggaatcctttcctcatttcttgtttttgtcaggtctgtcaaatatcagatgattgtagatgtgtggtgttatttc

SEQ ID NO: 881681 - DNA, 607 bp, Homo sapiens
gttttgatttccattgctatgatgacaagtgatgaggagcattttttcatgtgcttgctggctgcataaatgtcttcttttgagaagtgtctgtcatatcctttgcccactttttgatggggttgtttgtttttttcttgtaaatttgtttgatttctttgtagattctagatattagccctttgtcagatgggtagatttcaaaatttttctctcattctttaggttgccttttcactctgatggtattttcttttgctgtgcagaagctctttagtttagttagatcttatttgtcgattttggcttttgttgccmttgcttttagtgttttagtcatgaagtccttgcccatgcctatgtcctgagtggtattgtctaggttttcttctagggtttttatggttttaggtctaacatttaaatctttaaatcatcttgaattaatttttgtataaggtgtaaggaagggatccagtttcagctttctacatatggctagccagttttcccagcaccatttattaaatagggaatcctttcctcatttcttgtttttgtcaggtctgtcaaatatcagatgattgtagatgtgtggtgttatttc

SEQ ID NO: 881682 - DNA, 557 bp, Homo sapiens
ccagtctggccaacatagtgaaaccccatctctactaaaaatacaaaaaattagctgggtgtggtggtgtgcacctgtaatcccagctactggggagcctgaggcaggagaattgcatgaacccaggaggtggaggttgcagtgagccaagattgcaccattgcattccagcccagatgagagtgcgagactctgtctgaaaaaaagaaagaaaaaaaaacaaaagtcatacaaacrcactgaaaataaattggaatccggcacctgacactgattaacaggttgagcagattaaactagacctaaatccctgtaaacaacattgaaagttggaattttttaattaacaacatcttcaacaatttaataaacctatggaattagcaaaaaaagatttgtttacccatcatcaatcaatattaggtttaactacaaaactttgaacacaccatatataaaatgaaattagtaaactatccccagagctaatctgattaaaacaagacttctgggtatttagaaacaccaaattattgataagcatatctatttttaac

SEQ ID NO: 881683 - DNA, 599 bp, Homo sapiens
tttgggaacctccacctagatttcagaggatgtatggaaatgcccggatgtctaagcagaagttttctgcaggagtggagacttcatagaaaacctctgctagggcagtatagaaaggaaatgtggggtcagagcccccatacagagtccctactggggcactgcctagtggagctgtgagaagagggccaccatcctctgggctccagaatggtagttccaccaacagctttcaccttcctcctggaaaagctgcagacactcaatgtcagcccatgaaggaagctgggaggagggctgtaccctgyaaagccacaggagcagagatacccaaggctgtgggagcccacctcttgtatcactgtgacctggatgtgagacatggagtcaaaggagataattttggagctttaagatttgactgccccactggatttcagacttgtatgaggcctgtagccctttcatttgggccaatttctcccatttggaataggtgtgtttaccaatgcctgcacccccattgtatctaggaagtaactaacttgcttttgattgtacacgctcatagacagaagggacttgccttgtctcagatg

SEQ ID NO: 881684 - DNA, 599 bp, Homo sapiens
tttgggaacctccacctagatttcagaggatgtatggaaatgcccggatgtctaagcagaagttttctgcaggagtggagacttcatagaaaacctctgctagggcagtatagaaaggaaatgtggggtcagagcccccatacagagtccctactggggcactgcctagtggagctgtgagaagagggccaccatcctctgggctccagaatggtagttccaccaacagctttcaccttcctcctggaaaagctgcagacactcaatgtcagcccatgaaggaagctgggaggagggctgtaccctgcaaagccacaggagcagagatacccaaggctgtgggagcccacctcttgtatcactgtgacctggatgtgagacatggagtcaaaggagatmattttggagctttaagatttgactgccccactggatttcagacttgtatgaggcctgtagccctttcatttgggccaatttctcccatttggaataggtgtgtttaccaatgcctgcacccccattgtatctaggaagtaactaacttgcttttgattgtacacgctcatagacagaagggacttgccttgtctcagatg

SEQ ID NO: 881685 - DNA, 638 bp, Homo sapiens
attttgaaatttcacccattgtaacttggtcattaacggagaatgtgtaaatgtgtagcacagatattatgtgaggtactggtggtaaggcgacataatcctcaaactaatggtttatagtaaggaagagagacacacacaaaatatgaagctatgccattaatattagaaagagtgaaaatgcacagtccattccacaaaacactactattggacaatcaaaaacacagattgtccaagagatggtgcaagatagttatttcttccagcagttgcccatcgttcccagtgagtctgtttcctttggacattgaggagcttttctttctctgatgtcacctctccttgtcctcctaaatctccctacactttattccctctttgttccaccagggttctgtgtcttcctccastacgttttggcccatgtagtttctcccgtagcaaaatgaagaatggggagaagacttaaggactctggtgaaagagatgaaggaaaagtgttcttcctagtccagcatccactaaaaataatctatttataacacaaaccaagccctttacagctgagattgattgtctctgttgcataattcctctgttatactatcaaaatgtcttttctctgccttatcaaa

SEQ ID NO: 881686 - DNA, 643 bp, Homo sapiens
agtaaaacattgcccatagcttttgttgttgttgttgttgttgttgttgtttttagatggagtcttgctctgtagcccaggctggagtgcagtagcacaatcttgactcaccacaacctctgcctcccgggttccagtgattctcctgcctcagcctcccaagtagctggaattacagacatgcacccctatgcccggctaattttatatttttaawagagactgggtttctccatgttggtcaggttggtcttgaactcccgacctcaggtgatccgcctgcctcggcctcccaaagtgctgggattacaggcgtgagccactgtgcccggctgcaatagcttttatatttaggcacaagtacagaagaaaaatgtttatttatgtttttatctctcctttctcaaacacttgctattgtgtccatcctgttttgtgcacagcttaatggtctcaatttagttcatccaatgtatccaaggttataatgtttcttcctttatctaaattttctctataattttctttttgtagacataggatttgttttattttcacacaccatttccaggattttgcttactattccattctaattaaggtacccacagtccctctgctcaagaaagtatgttctatcaat

SEQ ID NO: 881687 - DNA, 643 bp, Homo sapiens
agtaaaacattgcccatagcttttgttgttgttgttgttgttgttgttgtttttagatggagtcttgctctgtagcccaggctggagtgcagtagcacaatcttgactcaccacaacctctgcctcccgggttccagtgattctcctgcctcagcctcccaagtagctggaattacagacatgcacccctatgcccggctaattttatatttttaatagagactgggtttctccatgttggtcaggttggtcttgaactcccgacctcaggtgatccgcctgcctcggcctcccaaagtgctgggattacaggcgtgagccactgtgcccggctgcaatagcttttatatttaggcacaagtacagaagaaaaatgkttatttatgtttttatctctcctttctcaaacacttgctattgtgtccatcctgttttgtgcacagcttaatggtctcaatttagttcatccaatgtatccaaggttataatgtttcttcctttatctaaattttctctataattttctttttgtagacataggatttgttttattttcacacaccatttccaggattttgcttactattccattctaattaaggtacccacagtccctctgctcaagaaagtatgttctatcaat

SEQ ID NO: 881688 - DNA, 643 bp, Homo sapiens
agtaaaacattgcccatagcttttgttgttgttgttgttgttgttgttgtttttagatggagtcttgctctgtagcccaggctggagtgcagtagcacaatcttgactcaccacaacctctgcctcccgggttccagtgattctcctgcctcagcctcccaagtagctggaattacagacatgcacccctatgcccggctaattttatatttttaatagagactgggtttctccatgttggtcaggttggtcttgaactcccgacctcaggtgatccgcctgcctcggcctcccaaagtgctgggattacaggcgtgagccactgtgcccggctgcaatagcttttatatttaggcacaagtacagaagaaaaatgtttatttatgtttttatctctcctttctcaaacacytgctattgtgtccatcctgttttgtgcacagcttaatggtctcaatttagttcatccaatgtatccaaggttataatgtttcttcctttatctaaattttctctataattttctttttgtagacataggatttgttttattttcacacaccatttccaggattttgcttactattccattctaattaaggtacccacagtccctctgctcaagaaagtatgttctatcaat

SEQ ID NO: 881689 - DNA, 674 bp, Homo sapiens
  misc_feature 391: n = A,T,C or G
ccatcccccaacaggccctggtgtatgatgtttccctccctgtgtccatgtgttctcattgttcaactcccatgtatgagtgagaacatgtggtgtttggtttcctgttcctgtattagcttgctgagaataatggtttccagcttcatccatgtccctgcatgggacatgaactcatcctttttwatggctgcatagtattccatggtgtatatgggccacattttctttatccagtctgtcattgacaggtatttgggttggttccaagtcttcgctattgtgaatagtgctgtaataaacatatgtgtgcctgtgtctttgtagtagaatgatttaaaatcctttgggtatatgcccagtaatgggattgcagggtcaaatggtactntctgtttctagacacttaagaaatcgccactcagtcttccacagtgttgaactaattacactcccaccaacagtgtaaaagcgtttatatttctagacatcctctccagcatctgttgtttcctgactttttcatgatcgccattctaactggcctgagatggtatctcattgtggttttgatttgcatttctttaatgaccactgatgatgagcttcttttcatatgttttttggccacataaatgtcttctttagagaagtgtttgttcatatccttcacc

SEQ ID NO: 881690 - DNA, 592 bp, Homo sapiens
tggtttatcagagtctagtattgcaacccctgcttttttttggctttctattatttgcttgataaacattcctccatccatttgttttgagcctatgtgtgtctttgcacatgaggtggctctcctgaatatagcacacctatgggtcttgactctatccaatttgccagtctgtgtctgttaattggtgcatttaacccatgtacatttaacgttaatatcgwcatgtgtgaatttgatcctgtcattatgatgctaactggttattttgccaattagttgatgcagtttcttcatagtgtcgattgtctctacaatgtggtatgtttttgcagtggctggtactggtttttcctttccatatttagtgcttccttcaggagctcttgtaagacaggcctggtggtgacaaaatctttcagcatttgcttgtctgtaaaggatttcatttctcctttgcttatgaagcttagtttggctggatatgaaatactgggttgaaaattcttttctgtaagaatattgaatattgatccctactctcttctggcttgaagggtttctgccgagagatcagctgttagtctgatgg

SEQ ID NO: 881691 - DNA, 577 bp, Homo sapiens
gttaagagaatgattagcaggagagcaggcaacaattgcagtgaggagtattggtgctgacaaggcaaaaaagaacaaccatagtcaaccaaaatcctatcctctcccatgcactatcccctcctctgttggttatggaaacagtcagttttataccctggctttttctcaagtacacctttttcttctctgtatcagcactgcctgacttcargtcctggtttcctcttgactgggcgttgcaacagcctatcaatccatttcccatgccaccaccaagggtttctttctaaaatgcaaatgtaatcacattgctctccaaattaaaaatcctcagactatctttccaatgcctgaataaagtttaaactcaccaaaacctttcataatcactttagataggtaaaacttgattgtgaaaggttttggtgagtttgaataaggtatgatcaactacactgccacaattttggacttgcccttccctgccttgttctactgatgatttgtcttccatccttcaagactcagtcctggatcaacctcctcttcacagccttcttccccatctgctccc

SEQ ID NO: 881692 - DNA, 590 bp, Homo sapiens
agtgagatctgagaaggctccacacaaagagtggcttttgagctggtccttgaaagatggacaggattttgatgagcagagttggagtagagagacacatttccttcaaaggaattggaattaataaagatctgaaattaataaacrcttgaactgagtggagaatggaagtacaggcaagggaaggtggcaataataacaaaaagaagattcaagtaagaacaagacaccttaattctttcatggaggcatcaaaaccagagatattgatccattaaggccaagataaggatgcagcaatgaaagtgcagtgtacatgatgggagtgccatattcagagctaattcatctgggaaaatccatctgagatgaaatataaaagagatcctcataaatagtctcattataaagtaatgttccagccagatggccatgctgtatgtagtacttttgcaccctctctactccagtagtttatcaaataccctaggctagtagtctccaaacttcaggcatccctgggccacttcataatttttgtcatatctttgccccagctacactaatatttacttaacattttttttatt

SEQ ID NO: 881693 - DNA, 605 bp, Homo sapiens
aatatcggagttggaagagaccttagagattttctgggacaatattctcaccatcaaattaaaaaacaggccaggtgtggtggcttatgtctataatcccaacactttgggaggctgaggcgaaaggattgtttgagcccaggagtttgagaccagcctgggcaacatagtgagaccccatctctacaaaaaatagaaaaaagtagccaagcatggtggcacacacctgtggtcctagttacttgggaggctgaggtgggaggactgcttaatctcaggaagttgaggctgcagtgagcygtgattgcaccactgcactccagactggatgacaggacaaggccctgtctcaaaacaaaacaaacacacaccaaaaaatgaaaaaacaaacaaacaaaaaagccaggaaaggtgcaatgatttgcaaaaagtcacaaagaacgtctgtgttaatcttccaaaaaagtcaatagaagtaaaatgtcaatgcttctagaccagagtttctcaacatgggcaatactgatattttaaacctggcagttcttttttgaggggtgagagagctggtcctgtgcatggtagaatgtttagcagcatctctg

SEQ ID NO: 881694 - DNA, 607 bp, Homo sapiens
catctgtctctcattttcagggacattgtccttgctgaagcttttttaactatagacaattgcagcagattttaaattgatcttactctgtcgactcccttatgtttcaacattttcacccattggaaggtataaaagaagatattcctgtccgtgtcaacataatctcatgtacctctccagatcttagaaacacgtatggcttcaaatcaggcatttkgagatctttatgctgtatggtttcagagtggaaaaaatgattgattcaaaaacataatatttaaagagtttttattgtatttacagttcacctgaacctctgttcattgggcaagaaaatgagtactcttaaaatgcaataataaattaaagttactttattattaaattttaaatatatatatatatacttaccttaaatatgtcctcttgttgtcttttagcatcacccatttttgatttgaccattatcttttctgaataatcagtaagatacagaattattattaatgttcaaaagttgcagtattcatgttttctttattctttctaccaattaaaatgtgttaatatataaaatttttagaaattttactataaaaaatca

SEQ ID NO: 881695 - DNA, 565 bp, Homo sapiens
caccctccttctgctccccagaagttgggctggtatatgtggctcaaagctccaagtctgatcatgtggttggtcttcctggctgcccactctccattccgggtcatctgattagcataaattatctatgggccctctccattctgagttgcctcattagcataaactatcaggtggggactgagggtcccaccctaaataacagacattccarccactcaagaagttgaaaagatttagattacctcccaggaatcagtccaggcaaattttttaatcacacaactattcctacaaaagcatttcactgaaaatctaaatttttattgggaatctatatagtatagtaggagcttttacatgcattattgcatttattacaacaaccttacattattattctaattttttaaatgtaacgattagggcagaaaaaataaagtcaagttctctagtcatcacaactggtagctgacagagatctaatcctctcagcattctgaaaccagttccaacattgatttcaatatacaagcaacttgtagaaatccacagatgtaagggt

SEQ ID NO: 881696 - DNA, 627 bp, Homo sapiens
accaaaaagtcaaagaacaagtattggtgaagatgcagaaaaaagggaaccctcttacactgttaatgagaatgtaaattagtaaagccattatggaaaacagcatggatgttcttcataaaattaaatatgaaacttaccatatgatttagctaacccactactaggtatatactcaaagcaaatgaaattttcaccttgtaaatacatcttcactcccacattcattgyagcattattcacaacagcccatctatggactcaccctaaatgttcattggtggatgagtaaagaaaatgcagtatgtatacacaatggaaaactattcagccttaaaaaagaaaatgaaactcttgtcatccgtaacaatttggataaacccagtgaacattatgttaagtgaaataaattaggcacagaaagacaatactgcgtgatcttacttacatgtgtaatctaagaatattggactcatagaaacagaaagtaaaatgatggtcaccagaggctggcggaaagaaggtgttaaggaggtgttgttggtcaaaggatacaaaattttagttagaaaaaatatattgaaaagttatattgtatatcatgatgactaccattaataatattat

SEQ ID NO: 881697 - DNA, 635 bp, Homo sapiens
ttagtctccacacccctcagcccaatgagaatctcatcttcattctaaagtcatgtctccctagtgccccttctgttgtgtcacaaaagtcaagtccattttggaaataatgtacagggagcattctggactgcctggctcctttgggtccccttcagagtcgaacacctaccttaaaccttacagccactctcccttccatattgcccagagagacattgatgattgattgattgattgattgactgttcatcatctgaaccccctttctgtgtctgaggactctcattgtgtgacttttggtggttggtcagatgccttctcaccttggaaaccccaaatttggacagttgttttctcagaccctggaagctgtaacttgggcctgggatgaggcctcagccacctagatgccctcccccaacccccccgccaaccccgggaatttgctctggattaagtgatgcaagctrtcagtgaattcccaagaagtttccctggtggcagtgtcagcagaagcctggaaatggcatttagcttctcctggctatagcagcgctgggcccaggcccatactctgcaaaagcagtggagataccccagccagcctcttcctggggcatcctcaaggccac

SEQ ID NO: 881698 - DNA, 668 bp, Homo sapiens
tgattatattaatatataagaaaaagtacaacatttgtgatgtgcaataacatagaatgatagcaaatacctaatgtaaatgacaagttaatgggtgcagcacaccaacatggcacatgtatacatatgtaacaaacttgaacattgtgcacatgtaccctagaacttaaagtataataataaaaataaataaataaataaaaagaaaaaaagaaaatgatagcaaataggcaaatagtgattattattatagttctgtttcaaacactttgtcaatattctaagctgctttagatgtgtaaatgaatctccccttgtcaccatccagaatattgcatgaacagtagactttcacctaaaatacctttatatttaatatgtttatattttcatttttacctaacctattttttcaaggawgctctatcaagataattaatgcccattttactttaaaatgttaggataagaattccaaagcacatcaaaaccatactgctgcttttcaaagaaaagactgtcacagacagagttgaaagactcacatatatttcagtctgacttttaaatatatagcggtttgaaaaaaaaatcttattacaatggtggtttctattagggatgctgacaaatttaaccaatctagaacacaaggttacagtttcagt

SEQ ID NO: 881699 - DNA, 589 bp, Homo sapiens
gagtccattccttaaaataattttttatctctttatctgtttctaggtagatagatgtttacctatttatctctctctctctaaatatatatatgagaattatgcaaatatacatacttgtataccacatagataattctctatgtaatatacaaatatactatatatatatatatatatatrtatactttatgtaagttatgattctctggagaactctaatataacacccccttactcccaaaaagagcaagtgacattgggtgcttgatgattaaaagcttttctaccattacaaggcaagctgctgtacctgccttagcccttatgtgatggacaggaaaacagacagactcacagaaaccttgaggggagtcaatgagatggaggccaggtgttctggcaaataatagacaaacctcaatgcatgactgaaagtatcagaatttaaaatgatattatcaaatttgggctcatgaatgccataagaaataagatttcagtttcttttataggaggtaattggattaaattgcttaaagtaccaacaagctagactataagtgatcttataagccatacaaacatg

SEQ ID NO: 881700 - DNA, 597 bp, Homo sapiens
ttatcaacaaacacatatcgattatatgcctgatactatttcaatccttggggattcaaatgttaataaaataagagctctgctttcaagcaggaaagatggacatgtacaaaattaattagaatatgatatgacaacccctctagtagagtcctataaaaagttttgtatacactgaaatatatatggataatgtaataggatacctaggattggcttcaaaatgatatgtggtggagggaatgatttctgtacatgaaaaatatgttcataaatgttgaatctgggtaatgggaatatagggattcattctttctgtgttttaaaatgttcaacattttccataataaaaagtgaaaaaaaatmtatggcaatataatggatgaaacagtaactgttcctatgctgaggaggagtctttgcagaggaaacagtatttagactgattcctcatggaaatcaaagcaagaactcattaaaatggagagcaaaagaagggcagccccacccttatgtcacatctgccctgcaaagaaacagaacaatgcctgggctacaaattagatgtggctcagtccagttgggtgatagaaggtg

SEQ ID NO: 881701 - DNA, 629 bp, Homo sapiens
tgttctagtaaaagggacatatgcatgaaagcacctggggagaaaggcagctagcatttccatgtattataaaataaagagcagtcacattgcttgaattttgatagatctggagctccactgttagagatgttcttttttttttttttcggaaaaaaagtgtttaaaggcmaattgtgaataaatggttcaatgattttagaaagcacagaaaaattggcacatgtctttacaagggtaggggacttgttttcatatcaagggtttttataaattgtaaccaatttttatattacctaatgcatactaattttattattctataatccaaagttttttttttccaacttacagaaatagaaaaaagaaatctaaaaaacgattccttggtcatatgttaagctatgcatgcttgtgtgctctttacagaaagtgtgcttgataaatgcttgtgaaataaatgataaactggtaatcaccaatttcagcaagaattcctttctgacaaagagactacagttacagcataatttgaaatcatttgtaatagtctcaggaaaatatgttttaacctaattttcaatctgactctcctaatttacctcctatgctacataaggttatgaaat

SEQ ID NO: 881702 - DNA, 645 bp, Homo sapiens
aggatctgcataatagtgtcattgtacatggtccataaacactagaatgcgagttctcaacatagaaaagaggctagcaccataggaggtgctgaaaaatgtggaattagtattgagtgattcatgtacacattaaaactgcaaaacacctgatcttcagggcaccaagaaataggcagaaattgcaggccagtagctcctatgctggttgatatctgtaccaactggacaaaccacttctaaatcttcttgctctccctgtatctagatttttttcacttctattcaatgccctccctttcggtccaaaatacaaataccttcctgtcaagtggtaacaaaagctttgttggagacttggggttaagctaagattactaatcagataagtggtttaggatttgctcaacctggttgttttgaatatttattagaccyaggaaactctcttaaaaagatcctgaggattaggccctgtagcaaaattcatctgcatttctttgttaattcatctacacctccaaagggcatgtaatggggcaggaaacatggttggggacaagggagcagaagtaaccaaataattgtgaaatttaaactacagattttttactccttcctgaggttttaatggccaccttaagt

SEQ ID NO: 881703 - DNA, 685 bp, Homo sapiens
atcacgttatttttctcacacccaaccttattctttaaaagtagaggcaaatggctgggtgtggtggctcacacctctaatcccagcactttggaaggctgagacagacagatcacctgaggtcaggagtttaagaccaacctggccaacatgctgaaacctcatctctactaaaaatacaaaaattagctaggtgtcatggtgcacccctgtaatcccagctacttgggaggctgaggcacaagaatctcttgaacctgggaggcagaggctgcagtgagccaaggtagtgctactgcactccagcctgtgcaatagagtgagattctgtctccaaaaaaaaaaaaaaaargtagaagcaaacatctgattcattcataaaaatgtttcctgaggtagttgcatatgagcatcatgtatataatgacacttacatcatcttactataaattacttttcttatatttcttctttataatacatttagggcacaacaataaagtatattgattttttctttgaaataatgtgtgtaaataggctataattctatgaattttacttaagtataatagaagtggcattacaaaatatttgttattaaagggaacgttgaatccaatatagttgagaaccacagtgctagaggtaaaatgctgaacaagatagtcctgtcccctactct

SEQ ID NO: 881704 - DNA, 572 bp, Homo sapiens
ttgagaaggttgtatgaaagaggtgacatttgagctggcctgaaagatgttgggaagtctggaaaatgcaaggtggcaaatagaattctagtcaaaagagcaccatcagccgggtgcggtggctcacacctgtaatcccaacagtttgggaggccgaggctggtgtatcacctgaggtcaggagttcgagaccagcctggccaacatggtgaaaccccgtctctactaaaaatacaaaaattagccaggtttggtggcatgtgcctgtagtcccagctactcgggaggctgaggcaggagaatggcgtgaacctgggaggtggagcttatactgagccgagatcataccactgcactccagcctgggcaacagagtgagactctgtctcaaaaaaaaaaaaaaaaaaaaaaaaaaaggcwccgtcatgggaacactatcatatagacatgtgaaaaagcacaatgtgttgtgaaaagtgcaagtggcaaaacgtggcccaatcacagcctgcattgggctagggatgcagggaaaagagatgacatgtagtgacttgaatgttggctcccca

SEQ ID NO: 881705 - DNA, 669 bp, Homo sapiens
tttgtaaatttctggtgccttgaacccttatagtaggatctgatcatttgcatttttacaatgagcacctgctcttgttgtccctcagaaccaaatactggtcttactcgtgaatggagggaaagctcatcagcttccttcagcttgcagagctggacttaacaggaaccgggaatacacggagaagaggatgatttctaggcagatgtgtgtgtgtgtgtgtgtgtgtttttttttttttttttttttttwaggaagctgaccagtggcagctggagtagctttgttcattacagatgttattggcactgtctttgtagttttctctgtgaagaagaaatggaagattggcaggaagctccactagggggagatgaccagtatctagaattttgtgttgccttttatgtctatttgaccacataggtccaccggttcttttcatttcatcttctcttggtcttgcattccattttcctgtgatcagctggggaacctttcacctctagcagcataaagtaacagcatctgtgatttggaggcgggggcagtaggctattttcccagtagccccagtctttctgcaggaggggaaaatgaggtcaaaagaaagagaacagtaaagtcaagggatagaggtcacctcccttcaccacagatcctgctagc

SEQ ID NO: 881706 - DNA, 645 bp, Homo sapiens
gaaaaaataactccttattcaacatggacagtcatctaccacaagaaaattggctttcattttgcgatatttgttttttccatctgacaattataaataaagggtctacttctgtgtgttactttccttaaaaaatggacattatataatatrttatatgaatgttcaatttaataatcatgaattcaaaattattccttgattatgaatattaaacatggattattgattcttattctcaaaaaatcagatattaaggagaaaaatgatcattctagcttccaataattattcctgtcttattttatttccaatttttctagtgattcctctatactctttaagaatattcataaatctataccttaatgtatcatctttaaaatatcttcttactttctttatgaaaacggagagagaaattcatttcaacttctacctggcagtctctcccaatccacttctactttttgttagtgttattatttctctatcttccacttgtagaacaattaaattatgcatgtcaaccacttatccttgatacagtattggtgaaatgttgagtatggatttaatgttcattcatttgcttgattggctgtctttggagtcactttttaaaatttggagtaattttatgtg

SEQ ID NO: 881707 - DNA, 588 bp, Homo sapiens
gtgtgacatctgagaccaagatgtaaaagcattgcatctttctcgttgttctgtctcggatcattttttctggaggaagctggctgccatgttgaggatgctcaagtagcatctaaggagagggccacatggtgaactgaggccaatagccatttgagtgagtcaccttggaggtggatcctccagccccagtcaagccttcagatgactgcagcccccataccatgactgaaacctcaagagagagagagaaccacctgagtcagagccatccagcaaaaatgctcttgaattcttgaaactttaagaggaaaaatattgttttggggtagctagggtttggagkgatttgtcatgcagcaggaggtaactaacctattcctctttatccttttcaactctggggtctgcactaaagagttatttttttttcacagcaggattaaaacagatttactaaagaattgtgtgtgtgtgtgtgtgtgtgtgtgtgtgtctcactatcaataattgaactttactatgtcaaatgtggtgttaggagattgtgttcctggacggagaaaaatgatcatggaggagaattgt

SEQ ID NO: 881708 - DNA, 619 bp, Homo sapiens
ccaatatggtagctgatatggtttggctgtgtcctcacccagatctcatattgaattatagctcccataattcccacgtgttgtgagagggacccagtgggaggtaactgactcatggaggtgggtctttcctgtgctgttctcatgacagtgaataagtctcatgagatctgatggttttatagaggggagttcccccacacaacctcttttgcctgccaccatgtaagatgtgactttgctcctcattcaccttcagccatgattgtgaggtctccccagccatgggaactgtaagtcaattagacctctttcctttataaattacccagtcttaggtatgtctttattagcagcatgagaagagactaatacagtaagttggtacaggtagagtggggtgctattataaagatacccaaaaatatggaagcaactttgcaactgggtaacaggcagaggttggaacagtttggakgacttagaagaggacaggaagatgtgggaaagtttggaacttcctaaagatttgttgaatggctttgaccaaaatactgacagtgacagggacaatgaagtccaagttaaggtggtctcagatggagatgaggaacttgtt

SEQ ID NO: 881709 - DNA, 608 bp, Homo sapiens
tggagcataaggcctgggtctgcagcggcaagttgggtggctgcagctgtgcctggggagctcctgccccaacttggagggggcaagggctcctgtttgtccccagctccggaaggctcctctgagcctatggcactgggagcatctccctgctgcagccagcatgatagcaatggcaggccatccggagcggccactaccgtcaattatttcttccattttgcagattaaaaaaattgagatccatggagaatgaagccaactgggccaagttcagtgaagtgaagtggcctttggcctttcttttttgctacccacagcaacccctctctttatgaggttggacaacctcccacaagaaaagctaagaatgccaatttctcactttcccagaccttcttgcagctaggcagagaggyctcacataggccccagggattgcatcaatcaatccaacttccaagttcatgggaactaatgtctagcatttctaacattcattccatagacatctgctgagccccttctatagccaggctctgtgctaagttctttgcaagcatgacatgcacataacaactctaaatggtagaatctgttattattcc

SEQ ID NO: 881710 - DNA, 504 bp, Homo sapiens
atgccacaaagttccagctcagagcacccaactaagtgaagcaatctgctcatctgaaactctgcacttgcagtccccttgcctggaatgttctccccagagactccccatcgctcccaccttctcccttcctcccacattgccatgagcatctggctgactccttcaggtctcaatctagtgccacctgctcagagaagtcctctccgtccaccctggctaaagtagcctctgagtcagtttaacatcttggtcattttcttcttagccggcatcatgacacatgacttgtttatgttyctattgcctgtctcccctgccagcttgtaagttccatgtgggcgggacaatgaaccagaacatgacaggttcccaataaatgtttattgaatgaataaatggaagaaggagtgaacaaagtaatgaacaaaacagaccccagatcagaggaagagatggctttcttgttaattctggagcagattcaagcagcaaatatttact

SEQ ID NO: 881711 - DNA, 620 bp, Homo sapiens
tttcccaggcagcttcttgaatcagaatccttgtctgctagaatcagatggtgtctttgagattgtccattcatccctagagccacaaatgctggctgagctcttactgtctacagaagctgtgcttggcacttgggggcatatggacgtacttggaaatggatccaagcccacagtttagtaaaggagataaaactataataaaaggtagaaagctatcattgtcaaaagagaggtacaggagcctgagtttgagtgtctgaatgtggcagacaccacagtgaccttcccaggcattcttctcttcctattgacagaactcagaatcctgatcctactcagggaggaagttgatatctctagatttcagagaaggaagtcccagtcttggggtgggctttagatccagttctggatgctggaaatgtctgacagggcttttgggaaaggcattactgcagccktccctgcttcctggctttgaaagttgcacaataatggctggaggcacagcagccacattgtaattaaaaggcaatactcttaaagaccaataagcaacactatgaggacaatggaggagaaggaagaaaagatttgcctggtctttaatgattcca

SEQ ID NO: 881712 - DNA, 553 bp, Homo sapiens
accacttagcatttattctaaaattgaccacataattggaagtaaaacactcctcagcaaatgcaaaagaacagaaatcgtaacagtctctcagaccacagtacaatcaaattacaactcaggattaagaaactcactgaaaaccacacaactacaaggaaactgaacaacctgctcctgaatgactactgggtaaataacaaagttaaggcagaaataaataagttctttgaaaccaatgagaacaaagacacaacataccagaatctctgggacacagctaaagcagtgtttagaaggaaatgtatagcactaaatgcccayatcagaaagcaagaaagatctaaaattgacaccctaacatcaaactaaaggaactagagaagcaagagcaaacaaattcaaaagctagcagaaggcaagaaataactaagattagagcagaagtgaaggagacagagacacaaaaaacccttcaaaatatcaatgaatccaggagccagttttttgaaaagattaacaaaataggtagaccactagccaggctaataaa

SEQ ID NO: 881713 - DNA, 553 bp, Homo sapiens
accacttagcatttattctaaaattgaccacataattggaagtaaaacactcctcagcaaatgcaaaagaacagaaatcgtaacagtctctcagaccacagtacaatcaaattacaactcaggattaagaaactcactgaaaaccacacaactacaaggaaactgaacaacctgctcctgaatgactactgggtaaataacaaagttaaggcagaaataaataagttctttgaaaccaatgagaacaaagacacaacataccagaatctctgggacacagctaaagcagtgtttagaaggaaatgtatagcactaaatgcccacatcagaaagcaagaaagatctaaaattgacaccctaacatcaaaytaaaggaactagagaagcaagagcaaacaaattcaaaagctagcagaaggcaagaaataactaagattagagcagaagtgaaggagacagagacacaaaaaacccttcaaaatatcaatgaatccaggagccagttttttgaaaagattaacaaaataggtagaccactagccaggctaataaa

SEQ ID NO: 881714 - DNA, 656 bp, Homo sapiens
ggtataagattggctaaatcaacctaaactataatttgacttttcaaacacatttaactaattagcacacttagttagaggaaagaaggatttcctcatcctgcatttgaaggcaaaaaaatgtatcaaataagctcccaactctgtatcactgaggcaggaattcttccttttaatgcaccatcttcatttataagtctctataaataatgataattgaagaagtgtattattgtagcaaagcagaatataataagattttacatagcattcactcaggyagaaaaggatacaggggttattaataaaagagcgttgtccttgataatagaacatttttgtttttgcatctaaattaatttctttcttagagaaaaaagtactgagtagcctcctatggataagaaaattgtcctccttgttttctattttacatgttcactcattcacccactcatcatgctctacaaggcaggcatagataacagtatctgttatatacattattgttaatagttctagcataatactcaaattcttgagctctcttagtaaaatcattaatgttattcttaaaataaaagtccccataaagactgctaagagcatgtgaagaaatgctggcttcagtcacttagtgaatagtgagcatggtg

SEQ ID NO: 881715 - DNA, 593 bp, Homo sapiens
acattaggctcctcattacttatgcaaatttctgcagccagattgaattcctcctcagaaaataggtctttcttttttatcacatcagcaggctgcaaattttttgaacttctatgctctgcttcccttttaagcataagttccaattctaaaccacatctttgtgaatacataaaactgaatgcttttaacagcacccaagtcacttcttgaacactttgctgcttagaaatttcttctgccagatgccctaaatcatctcttaagttcaaagttscacaagtctctcgggcaggggcaaaatgctgccagtctctttgctaacatataataagagtcacctttgctccagttcccaacaagttccccatctctgtctgagaccacctcagcctggaatttattctccatgtcactatcaacattttggtcaaagccattcacaagtctctaggaagttccaaattttccgacattttcctgtcttctgagtcctccaagtccctaggaagttctaaacttttccacatatccctgttttcttctgagcattccaaactgttccagcttctgcttgttacccaattccaatg
